United States Patent Application Publication US 2007/0048756 A1 - sequence listing, part 26

SEQ ID NO: 908872 - DNA, 33 bp, Homo sapien
tggaatccggtggaactgcacacggaaatgaga

SEQ ID NO: 908873 - DNA, 33 bp, Homo sapien
tatgaaataagcaaaaataacatttcctggaga

SEQ ID NO: 908874 - DNA, 33 bp, Homo sapien
tatgaaataagcaaaattaacatttcctggaga

SEQ ID NO: 908875 - DNA, 33 bp, Homo sapien
agctaaggaggtcagcaaagtaatatccatatt

SEQ ID NO: 908876 - DNA, 33 bp, Homo sapien
agctaaggaggtcagcgaagtaatatccatatt

SEQ ID NO: 908877 - DNA, 33 bp, Homo sapien
agcctggatttttggacggaaattgttctccat

SEQ ID NO: 908878 - DNA, 33 bp, Homo sapien
agcctggatttttggatggaaattgttctccat

SEQ ID NO: 908879 - DNA, 33 bp, Homo sapien
aaaggaaaatatcatccaaggttgcaaataatt

SEQ ID NO: 908880 - DNA, 33 bp, Homo sapien
aaaggaaaatatcatctaaggttgcaaataatt

SEQ ID NO: 908881 - DNA, 33 bp, Homo sapien
ttttctctggcatttccagacaataaattatta

SEQ ID NO: 908882 - DNA, 33 bp, Homo sapien
ttttctctggcatttctagacaataaattatta

SEQ ID NO: 908883 - DNA, 33 bp, Homo sapien
tctctccagatgcagacgtggccatgcctcttg

SEQ ID NO: 908884 - DNA, 33 bp, Homo sapien
tctctccagatgcagatgtggccatgcctcttg

SEQ ID NO: 908885 - DNA, 33 bp, Homo sapien
aaagacagccatgtgaataacacaaatttatta

SEQ ID NO: 908886 - DNA, 33 bp, Homo sapien
aaagacagccatgtgattaacacaaatttatta

SEQ ID NO: 908887 - DNA, 33 bp, Homo sapien
cccatgctggaagctacagtctgcttaaaacct

SEQ ID NO: 908888 - DNA, 33 bp, Homo sapien
cccatgctggaagctatagtctgcttaaaacct

SEQ ID NO: 908889 - DNA, 33 bp, Homo sapien
atatttaaaatgcacacatctcatcagggagtg

SEQ ID NO: 908890 - DNA, 33 bp, Homo sapien
atatttaaaatgcacatatctcatcagggagtg

SEQ ID NO: 908891 - DNA, 33 bp, Homo sapien
tataatcttaagtgaactgagaaacaggaaatc

SEQ ID NO: 908892 - DNA, 33 bp, Homo sapien
tataatcttaagtgaattgagaaacaggaaatc

SEQ ID NO: 908893 - DNA, 33 bp, Homo sapien
gatgtgttgatgattaccattttctaaaaagtg

SEQ ID NO: 908894 - DNA, 33 bp, Homo sapien
gatgtgttgatgattatcattttctaaaaagtg

SEQ ID NO: 908895 - DNA, 33 bp, Homo sapien
acagacctgagactccagaaataagtcttcatt

SEQ ID NO: 908896 - DNA, 33 bp, Homo sapien
acagacctgagactccggaaataagtcttcatt

SEQ ID NO: 908897 - DNA, 33 bp, Homo sapien
caaggtgtgcttcgggaaagttctttgctgtct

SEQ ID NO: 908898 - DNA, 33 bp, Homo sapien
caaggtgtgcttcgggcaagttctttgctgtct

SEQ ID NO: 908899 - DNA, 33 bp, Homo sapien
aataattgaaactatccaatcctaaagctgctc

SEQ ID NO: 908900 - DNA, 33 bp, Homo sapien
aataattgaaactatctaatcctaaagctgctc

SEQ ID NO: 908901 - DNA, 33 bp, Homo sapien
gatctccctcttgcaacgtcctctttcgtttat

SEQ ID NO: 908902 - DNA, 33 bp, Homo sapien
gatctccctcttgcaatgtcctctttcgtttat

SEQ ID NO: 908903 - DNA, 33 bp, Homo sapien
tttctagaatcaaaccaattattactggcatga

SEQ ID NO: 908904 - DNA, 33 bp, Homo sapien
tttctagaatcaaaccgattattactggcatga

SEQ ID NO: 908905 - DNA, 33 bp, Homo sapien
ctcattttctgtagccacacacactaagccaac

SEQ ID NO: 908906 - DNA, 33 bp, Homo sapien
ctcattttctgtagccgcacacactaagccaac

SEQ ID NO: 908907 - DNA, 33 bp, Homo sapien
ttttgacaaccatgacaggattctgaggggagg

SEQ ID NO: 908908 - DNA, 33 bp, Homo sapien
ttttgacaaccatgacgggattctgaggggagg

SEQ ID NO: 908909 - DNA, 33 bp, Homo sapien
aaacttgccctctgagaagattgttgaacaggc

SEQ ID NO: 908910 - DNA, 33 bp, Homo sapien
aaacttgccctctgagtagattgttgaacaggc

SEQ ID NO: 908911 - DNA, 33 bp, Homo sapien
ttcctaagcagatgccactgaatttcatataat

SEQ ID NO: 908912 - DNA, 33 bp, Homo sapien
ttcctaagcagatgccgctgaatttcatataat

SEQ ID NO: 908913 - DNA, 33 bp, Homo sapien
atgttcagggcttcaacgtgagtttagtttatg

SEQ ID NO: 908914 - DNA, 33 bp, Homo sapien
atgttcagggcttcaatgtgagtttagtttatg

SEQ ID NO: 908915 - DNA, 33 bp, Homo sapien
acagtgcgttcaggaaacttttcaactttttat

SEQ ID NO: 908916 - DNA, 33 bp, Homo sapien
acagtgcgttcaggaaccttttcaactttttat

SEQ ID NO: 908917 - DNA, 33 bp, Homo sapien
gacaaaagtcttcttcaagttcctctgctgagt

SEQ ID NO: 908918 - DNA, 33 bp, Homo sapien
gacaaaagtcttcttcgagttcctctgctgagt

SEQ ID NO: 908919 - DNA, 33 bp, Homo sapien
acattgaaattaagaaacattgataaaattaaa

SEQ ID NO: 908920 - DNA, 33 bp, Homo sapien
acattgaaattaagaaccattgataaaattaaa

SEQ ID NO: 908921 - DNA, 33 bp, Homo sapien
ttgattgtgttcttaccggtcagtgacctgaaa

SEQ ID NO: 908922 - DNA, 33 bp, Homo sapien
ttgattgtgttcttactggtcagtgacctgaaa

SEQ ID NO: 908923 - DNA, 33 bp, Homo sapien
agtgggaagaagtgtcaaatccatgcatatgta

SEQ ID NO: 908924 - DNA, 33 bp, Homo sapien
agtgggaagaagtgtcgaatccatgcatatgta

SEQ ID NO: 908925 - DNA, 33 bp, Homo sapien
ctcaatataagttgaaggatctgattatgggct

SEQ ID NO: 908926 - DNA, 33 bp, Homo sapien
ctcaatataagttgaatgatctgattatgggct

SEQ ID NO: 908927 - DNA, 33 bp, Homo sapien
aaatcactgagccaaaaggaagtaaggctggga

SEQ ID NO: 908928 - DNA, 33 bp, Homo sapien
aaatcactgagccaaagggaagtaaggctggga

SEQ ID NO: 908929 - DNA, 33 bp, Homo sapien
aaacatctttggtgaaatgactgttaaaatcat

SEQ ID NO: 908930 - DNA, 33 bp, Homo sapien
aaacatctttggtgaagtgactgttaaaatcat

SEQ ID NO: 908931 - DNA, 33 bp, Homo sapien
aacaggaattctcttcacttattcagtgttgct

SEQ ID NO: 908932 - DNA, 33 bp, Homo sapien
aacaggaattctcttcgcttattcagtgttgct

SEQ ID NO: 908933 - DNA, 33 bp, Homo sapien
gcaaattttgagatagacattcttttgaaattg

SEQ ID NO: 908934 - DNA, 33 bp, Homo sapien
gcaaattttgagataggcattcttttgaaattg

SEQ ID NO: 908935 - DNA, 33 bp, Homo sapien
tcaaaccatgtaagcaaggaattactttagctt

SEQ ID NO: 908936 - DNA, 33 bp, Homo sapien
tcaaaccatgtaagcagggaattactttagctt

SEQ ID NO: 908937 - DNA, 33 bp, Homo sapien
tccactgtcacccttccagaacatgaatgtgct

SEQ ID NO: 908938 - DNA, 33 bp, Homo sapien
tccactgtcacccttctagaacatgaatgtgct

SEQ ID NO: 908939 - DNA, 33 bp, Homo sapien
atggacttctgatttcaacaacattttcttaat

SEQ ID NO: 908940 - DNA, 33 bp, Homo sapien
atggacttctgatttcgacaacattttcttaat

SEQ ID NO: 908941 - DNA, 33 bp, Homo sapien
gaagaaatcaaccctaaggacaccttgacttta

SEQ ID NO: 908942 - DNA, 33 bp, Homo sapien
gaagaaatcaaccctatggacaccttgacttta

SEQ ID NO: 908943 - DNA, 33 bp, Homo sapien
attgatgtattacgtcactaagttctgaagtgg

SEQ ID NO: 908944 - DNA, 33 bp, Homo sapien
attgatgtattacgtccctaagttctgaagtgg

SEQ ID NO: 908945 - DNA, 33 bp, Homo sapien
aggatgtccacttttacctcttctattcaacat

SEQ ID NO: 908946 - DNA, 33 bp, Homo sapien
aggatgtccacttttagctcttctattcaacat

SEQ ID NO: 908947 - DNA, 33 bp, Homo sapien
tcatatatccttgaccaaagaacaatcttcctc

SEQ ID NO: 908948 - DNA, 33 bp, Homo sapien
tcatatatccttgaccgaagaacaatcttcctc

SEQ ID NO: 908949 - DNA, 33 bp, Homo sapien
gaggagaagaaagatgaacaggcacatgtgaac

SEQ ID NO: 908950 - DNA, 33 bp, Homo sapien
gaggagaagaaagatggacaggcacatgtgaac

SEQ ID NO: 908951 - DNA, 33 bp, Homo sapien
ttgtgaatagacccatcacaagacgagattaaa

SEQ ID NO: 908952 - DNA, 33 bp, Homo sapien
ttgtgaatagacccattacaagacgagattaaa

SEQ ID NO: 908953 - DNA, 33 bp, Homo sapien
acatcaataattattaagcaacagggaccatct

SEQ ID NO: 908954 - DNA, 33 bp, Homo sapien
acatcaataattattaggcaacagggaccatct

SEQ ID NO: 908955 - DNA, 33 bp, Homo sapien
cagagctttgagcaaacgtgtaatgtataattt

SEQ ID NO: 908956 - DNA, 33 bp, Homo sapien
cagagctttgagcaaatgtgtaatgtataattt

SEQ ID NO: 908957 - DNA, 33 bp, Homo sapien
cattattagacaagaaaaaccaatgagatatac

SEQ ID NO: 908958 - DNA, 33 bp, Homo sapien
cattattagacaagaagaaccaatgagatatac

SEQ ID NO: 908959 - DNA, 33 bp, Homo sapien
gataaacaggatttaaatacatacacaaggcac

SEQ ID NO: 908960 - DNA, 33 bp, Homo sapien
gataaacaggatttaagtacatacacaaggcac

SEQ ID NO: 908961 - DNA, 33 bp, Homo sapien
atttggaattaagaagcaaaaatgtaatcaact

SEQ ID NO: 908962 - DNA, 33 bp, Homo sapien
atttggaattaagaaggaaaaatgtaatcaact

SEQ ID NO: 908963 - DNA, 33 bp, Homo sapien
ttttgttccaagagcaaccataggaataaaact

SEQ ID NO: 908964 - DNA, 33 bp, Homo sapien
ttttgttccaagagcagccataggaataaaact

SEQ ID NO: 908965 - DNA, 33 bp, Homo sapien
cacacgcaacttgcataaaatgggtttggtact

SEQ ID NO: 908966 - DNA, 33 bp, Homo sapien
cacacgcaacttgcatgaaatgggtttggtact

SEQ ID NO: 908967 - DNA, 33 bp, Homo sapien
aatctgtggaatatggccaaaacagcgtttgga

SEQ ID NO: 908968 - DNA, 33 bp, Homo sapien
aatctgtggaatatggtcaaaacagcgtttgga

SEQ ID NO: 908969 - DNA, 33 bp, Homo sapien
gaaacacttgagtcaacgtcagtgtttctaaat

SEQ ID NO: 908970 - DNA, 33 bp, Homo sapien
gaaacacttgagtcaatgtcagtgtttctaaat

SEQ ID NO: 908971 - DNA, 33 bp, Homo sapien
caggtgttcaccttaacgatgtctgttttatac

SEQ ID NO: 908972 - DNA, 33 bp, Homo sapien
caggtgttcaccttaatgatgtctgttttatac

SEQ ID NO: 908973 - DNA, 33 bp, Homo sapien
acttagcatcgtgtatcagatagttagctaagt

SEQ ID NO: 908974 - DNA, 33 bp, Homo sapien
acttagcatcgtgtattagatagttagctaagt

SEQ ID NO: 908975 - DNA, 33 bp, Homo sapien
taattgccttgtccccgaccacattgtgaatta

SEQ ID NO: 908976 - DNA, 33 bp, Homo sapien
taattgccttgtcccctaccacattgtgaatta

SEQ ID NO: 908977 - DNA, 33 bp, Homo sapien
ttgttgacttttgataacattgtcatcagagaa

SEQ ID NO: 908978 - DNA, 33 bp, Homo sapien
ttgttgacttttgatagcattgtcatcagagaa

SEQ ID NO: 908979 - DNA, 33 bp, Homo sapien
gccacagagaatttcacaacttttgcctgtata

SEQ ID NO: 908980 - DNA, 33 bp, Homo sapien
gccacagagaatttcagaacttttgcctgtata

SEQ ID NO: 908981 - DNA, 33 bp, Homo sapien
ttactttcaaagagacaattgaaagagatgtga

SEQ ID NO: 908982 - DNA, 33 bp, Homo sapien
ttactttcaaagagacgattgaaagagatgtga

SEQ ID NO: 908983 - DNA, 33 bp, Homo sapien
gcaccagcctatttaccaaggagtcctgcttct

SEQ ID NO: 908984 - DNA, 33 bp, Homo sapien
gcaccagcctatttacgaaggagtcctgcttct

SEQ ID NO: 908985 - DNA, 33 bp, Homo sapien
ctcatcattttaacacacgttgccttgatcagt

SEQ ID NO: 908986 - DNA, 33 bp, Homo sapien
ctcatcattttaacacgcgttgccttgatcagt

SEQ ID NO: 908987 - DNA, 33 bp, Homo sapien
agcttctattctcccacgttgagcttcagagac

SEQ ID NO: 908988 - DNA, 33 bp, Homo sapien
agcttctattctcccatgttgagcttcagagac

SEQ ID NO: 908989 - DNA, 33 bp, Homo sapien
tctctatgaacaggaaaaatccacccgcctgac

SEQ ID NO: 908990 - DNA, 33 bp, Homo sapien
tctctatgaacaggaacaatccacccgcctgac

SEQ ID NO: 908991 - DNA, 33 bp, Homo sapien
aggccttgataaaacacggattcctgtgcccca

SEQ ID NO: 908992 - DNA, 33 bp, Homo sapien
aggccttgataaaacatggattcctgtgcccca

SEQ ID NO: 908993 - DNA, 33 bp, Homo sapien
acaagacatacagcgacgtgggtcctttgcaaa

SEQ ID NO: 908994 - DNA, 33 bp, Homo sapien
acaagacatacagcgatgtgggtcctttgcaaa

SEQ ID NO: 908995 - DNA, 33 bp, Homo sapien
tcctttgaccaacctagcttccttcatgtataa

SEQ ID NO: 908996 - DNA, 33 bp, Homo sapien
tcctttgaccaacctatcttccttcatgtataa

SEQ ID NO: 908997 - DNA, 33 bp, Homo sapien
ctcaagcttgaggataaggaagactgctacagc

SEQ ID NO: 908998 - DNA, 33 bp, Homo sapien
ctcaagcttgaggatagggaagactgctacagc

SEQ ID NO: 908999 - DNA, 33 bp, Homo sapien
aatatgagctaaaagccgaagtctttaaattcc

SEQ ID NO: 909000 - DNA, 33 bp, Homo sapien
aatatgagctaaaagcggaagtctttaaattcc

SEQ ID NO: 909001 - DNA, 33 bp, Homo sapien
ctctcatataagtgacaacttgaccaaaagagg

SEQ ID NO: 909002 - DNA, 33 bp, Homo sapien
ctctcatataagtgactacttgaccaaaagagg

SEQ ID NO: 909003 - DNA, 33 bp, Homo sapien
ttgttgagagaattcaatcttcttggtttttaa

SEQ ID NO: 909004 - DNA, 33 bp, Homo sapien
ttgttgagagaattcagtcttcttggtttttaa

SEQ ID NO: 909005 - DNA, 33 bp, Homo sapien
attaaagcataaattcactcaagtcactgtcaa

SEQ ID NO: 909006 - DNA, 33 bp, Homo sapien
attaaagcataaattcgctcaagtcactgtcaa

SEQ ID NO: 909007 - DNA, 33 bp, Homo sapien
cctttatatagaagaactggctaaccccaggaa

SEQ ID NO: 909008 - DNA, 33 bp, Homo sapien
cctttatatagaagaattggctaaccccaggaa

SEQ ID NO: 909009 - DNA, 33 bp, Homo sapien
aaactttattggtgccaactctctgaatctgcc

SEQ ID NO: 909010 - DNA, 33 bp, Homo sapien
aaactttattggtgcctactctctgaatctgcc

SEQ ID NO: 909011 - DNA, 33 bp, Homo sapien
cattgatagactaaaaatgattttcctgcaaac

SEQ ID NO: 909012 - DNA, 33 bp, Homo sapien
cattgatagactaaaattgattttcctgcaaac

SEQ ID NO: 909013 - DNA, 33 bp, Homo sapien
gagtatataacttccaaaattggtaggaggtag

SEQ ID NO: 909014 - DNA, 33 bp, Homo sapien
gagtatataacttccagaattggtaggaggtag

SEQ ID NO: 909015 - DNA, 33 bp, Homo sapien
atatgatattatgcaaagagaccaaatcatatg

SEQ ID NO: 909016 - DNA, 33 bp, Homo sapien
atatgatattatgcaaggagaccaaatcatatg

SEQ ID NO: 909017 - DNA, 33 bp, Homo sapien
ctgtagtcattatgtagaggctccaggatagtt

SEQ ID NO: 909018 - DNA, 33 bp, Homo sapien
ctgtagtcattatgtataggctccaggatagtt

SEQ ID NO: 909019 - DNA, 33 bp, Homo sapien
taatgtgcctcataaaaacatttctaatagtca

SEQ ID NO: 909020 - DNA, 33 bp, Homo sapien
taatgtgcctcataaacacatttctaatagtca

SEQ ID NO: 909021 - DNA, 33 bp, Homo sapien
tattgcagtgagggaaagctaagcagatttgag

SEQ ID NO: 909022 - DNA, 33 bp, Homo sapien
tattgcagtgagggaaggctaagcagatttgag

SEQ ID NO: 909023 - DNA, 33 bp, Homo sapien
atgacaaacgcaaaaacgcaaccatactgtaga

SEQ ID NO: 909024 - DNA, 33 bp, Homo sapien
atgacaaacgcaaaaatgcaaccatactgtaga

SEQ ID NO: 909025 - DNA, 33 bp, Homo sapien
agtagataccatttaacaaaagttgatgttggc

SEQ ID NO: 909026 - DNA, 33 bp, Homo sapien
agtagataccatttaataaaagttgatgttggc

SEQ ID NO: 909027 - DNA, 33 bp, Homo sapien
tttccaaatgtttgaaatagatccaagacctgc

SEQ ID NO: 909028 - DNA, 33 bp, Homo sapien
tttccaaatgtttgaagtagatccaagacctgc

SEQ ID NO: 909029 - DNA, 33 bp, Homo sapien
ttttagcttggtgagaaactgagcagaggacgt

SEQ ID NO: 909030 - DNA, 33 bp, Homo sapien
ttttagcttggtgagagactgagcagaggacgt

SEQ ID NO: 909031 - DNA, 33 bp, Homo sapien
ttgtgttaaccaggtcaattagaccttctacct

SEQ ID NO: 909032 - DNA, 33 bp, Homo sapien
ttgtgttaaccaggtcgattagaccttctacct

SEQ ID NO: 909033 - DNA, 33 bp, Homo sapien
ggccattgaccggcggaactaggcagagtttgg

SEQ ID NO: 909034 - DNA, 33 bp, Homo sapien
ggccattgaccggcgggactaggcagagtttgg

SEQ ID NO: 909035 - DNA, 33 bp, Homo sapien
caattggggtaaatctaaacacataagaggagt

SEQ ID NO: 909036 - DNA, 33 bp, Homo sapien
caattggggtaaatctgaacacataagaggagt

SEQ ID NO: 909037 - DNA, 33 bp, Homo sapien
attctaacatctatgcagatcctctttgaccta

SEQ ID NO: 909038 - DNA, 33 bp, Homo sapien
attctaacatctatgcggatcctctttgaccta

SEQ ID NO: 909039 - DNA, 33 bp, Homo sapien
ctttttgaggcataaactgagagaataattgtc

SEQ ID NO: 909040 - DNA, 33 bp, Homo sapien
ctttttgaggcataaagtgagagaataattgtc

SEQ ID NO: 909041 - DNA, 33 bp, Homo sapien
ttttccaagtcacttacagccataccttttgat

SEQ ID NO: 909042 - DNA, 33 bp, Homo sapien
ttttccaagtcacttagagccataccttttgat

SEQ ID NO: 909043 - DNA, 33 bp, Homo sapien
atggataaaaaactaagctaccaacagtaagct

SEQ ID NO: 909044 - DNA, 33 bp, Homo sapien
atggataaaaaactaatctaccaacagtaagct

SEQ ID NO: 909045 - DNA, 33 bp, Homo sapien
aaaatagcaggtggacaaaataaacaaaataga

SEQ ID NO: 909046 - DNA, 33 bp, Homo sapien
aaaatagcaggtggacgaaataaacaaaataga

SEQ ID NO: 909047 - DNA, 33 bp, Homo sapien
tccctgtgaatcataactaattccattaggacc

SEQ ID NO: 909048 - DNA, 33 bp, Homo sapien
tccctgtgaatcataattaattccattaggacc

SEQ ID NO: 909049 - DNA, 33 bp, Homo sapien
caacaaatcgtagtgaactttcccaacataaat

SEQ ID NO: 909050 - DNA, 33 bp, Homo sapien
caacaaatcgtagtgacctttcccaacataaat

SEQ ID NO: 909051 - DNA, 33 bp, Homo sapien
aatgttctatgaaaaaaccatgtgcacttcatt

SEQ ID NO: 909052 - DNA, 33 bp, Homo sapien
aatgttctatgaaaaacccatgtgcacttcatt

SEQ ID NO: 909053 - DNA, 33 bp, Homo sapien
agcaaattcttgtcccgattgtccatgttgaga

SEQ ID NO: 909054 - DNA, 33 bp, Homo sapien
agcaaattcttgtccctattgtccatgttgaga

SEQ ID NO: 909055 - DNA, 33 bp, Homo sapien
tggtagattattagaactatttcatcaagatgc

SEQ ID NO: 909056 - DNA, 33 bp, Homo sapien
tggtagattattagaattatttcatcaagatgc

SEQ ID NO: 909057 - DNA, 33 bp, Homo sapien
gtaattatgatgataacggtaacttattcctta

SEQ ID NO: 909058 - DNA, 33 bp, Homo sapien
gtaattatgatgataatggtaacttattcctta

SEQ ID NO: 909059 - DNA, 33 bp, Homo sapien
cttgactctttggtgaaaaattgaggtaggata

SEQ ID NO: 909060 - DNA, 33 bp, Homo sapien
cttgactctttggtgagaaattgaggtaggata

SEQ ID NO: 909061 - DNA, 33 bp, Homo sapien
gtctccaactctaacgaagtgtaaagaagtatg

SEQ ID NO: 909062 - DNA, 33 bp, Homo sapien
gtctccaactctaacgcagtgtaaagaagtatg

SEQ ID NO: 909063 - DNA, 33 bp, Homo sapien
atcaaaattatattacaaagccttactaatcaa

SEQ ID NO: 909064 - DNA, 33 bp, Homo sapien
atcaaaattatattacgaagccttactaatcaa

SEQ ID NO: 909065 - DNA, 33 bp, Homo sapien
tttcaggaatacccacaagtcacagatttcgtc

SEQ ID NO: 909066 - DNA, 33 bp, Homo sapien
tttcaggaatacccacgagtcacagatttcgtc

SEQ ID NO: 909067 - DNA, 33 bp, Homo sapien
gtgatgtctttgcaaaaatagaagtaactgtcc

SEQ ID NO: 909068 - DNA, 33 bp, Homo sapien
gtgatgtctttgcaaacatagaagtaactgtcc

SEQ ID NO: 909069 - DNA, 33 bp, Homo sapien
agtttgagtgatgaataaccattttgatcatac

SEQ ID NO: 909070 - DNA, 33 bp, Homo sapien
agtttgagtgatgaatgaccattttgatcatac

SEQ ID NO: 909071 - DNA, 33 bp, Homo sapien
agcatattttgctccaaaggtttgcatacctaa

SEQ ID NO: 909072 - DNA, 33 bp, Homo sapien
agcatattttgctccagaggtttgcatacctaa

SEQ ID NO: 909073 - DNA, 33 bp, Homo sapien
taacaagctttgcctacgagctccttttcactt

SEQ ID NO: 909074 - DNA, 33 bp, Homo sapien
taacaagctttgcctatgagctccttttcactt

SEQ ID NO: 909075 - DNA, 33 bp, Homo sapien
ctctgtcagaaagtcaaagtggaagcagtttta

SEQ ID NO: 909076 - DNA, 33 bp, Homo sapien
ctctgtcagaaagtcatagtggaagcagtttta

SEQ ID NO: 909077 - DNA, 33 bp, Homo sapien
gaaagtattgcttcaaataacagttccaccact

SEQ ID NO: 909078 - DNA, 33 bp, Homo sapien
gaaagtattgcttcaagtaacagttccaccact

SEQ ID NO: 909079 - DNA, 33 bp, Homo sapien
tgagatatggaggtgtcaagttgtggatttatt

SEQ ID NO: 909080 - DNA, 33 bp, Homo sapien
tgagatatggaggtgttaagttgtggatttatt

SEQ ID NO: 909081 - DNA, 33 bp, Homo sapien
cacaggcaggtggtcccgatgacggtttagctc

SEQ ID NO: 909082 - DNA, 33 bp, Homo sapien
cacaggcaggtggtcctgatgacggtttagctc

SEQ ID NO: 909083 - DNA, 33 bp, Homo sapien
ccggatgctcatcctacatgttgacttctgact

SEQ ID NO: 909084 - DNA, 33 bp, Homo sapien
ccggatgctcatcctatatgttgacttctgact

SEQ ID NO: 909085 - DNA, 33 bp, Homo sapien
tcttggtttactcacaaatttcttcttgtgttc

SEQ ID NO: 909086 - DNA, 33 bp, Homo sapien
tcttggtttactcacagatttcttcttgtgttc

SEQ ID NO: 909087 - DNA, 33 bp, Homo sapien
tcagagtatgaaggaaagtttgtatctcagaag

SEQ ID NO: 909088 - DNA, 33 bp, Homo sapien
tcagagtatgaaggaaggtttgtatctcagaag

SEQ ID NO: 909089 - DNA, 33 bp, Homo sapien
cttgtgtggttccctgaaataaaatctatcaga

SEQ ID NO: 909090 - DNA, 33 bp, Homo sapien
cttgtgtggttccctggaataaaatctatcaga

SEQ ID NO: 909091 - DNA, 33 bp, Homo sapien
ccaaaagccattccacactttcaatgtgggaga

SEQ ID NO: 909092 - DNA, 33 bp, Homo sapien
ccaaaagccattccacgctttcaatgtgggaga

SEQ ID NO: 909093 - DNA, 33 bp, Homo sapien
actctgatgttgcccaataggtttgatcctgat

SEQ ID NO: 909094 - DNA, 33 bp, Homo sapien
actctgatgttgcccagtaggtttgatcctgat

SEQ ID NO: 909095 - DNA, 33 bp, Homo sapien
aaaatgagcatattgcagaagtaaaaatttgaa

SEQ ID NO: 909096 - DNA, 33 bp, Homo sapien
aaaatgagcatattgcggaagtaaaaatttgaa

SEQ ID NO: 909097 - DNA, 33 bp, Homo sapien
tgctctgctaagataaaactgtctcaggaggaa

SEQ ID NO: 909098 - DNA, 33 bp, Homo sapien
tgctctgctaagataatactgtctcaggaggaa

SEQ ID NO: 909099 - DNA, 33 bp, Homo sapien
tagtgggaaacagtgaccttgtatcatatttat

SEQ ID NO: 909100 - DNA, 33 bp, Homo sapien
tagtgggaaacagtgatcttgtatcatatttat

SEQ ID NO: 909101 - DNA, 33 bp, Homo sapien
ccctgacttctgcctacaccacccaggtcagag

SEQ ID NO: 909102 - DNA, 33 bp, Homo sapien
ccctgacttctgcctataccacccaggtcagag

SEQ ID NO: 909103 - DNA, 33 bp, Homo sapien
tttgtttctctttcataataaggactggatctt

SEQ ID NO: 909104 - DNA, 33 bp, Homo sapien
tttgtttctctttcatgataaggactggatctt

SEQ ID NO: 909105 - DNA, 33 bp, Homo sapien
gaacaaaagcacatagcatcttaaatgcagttt

SEQ ID NO: 909106 - DNA, 33 bp, Homo sapien
gaacaaaagcacatagtatcttaaatgcagttt

SEQ ID NO: 909107 - DNA, 33 bp, Homo sapien
ccatgtggtagcaatagccttacaattttcgct

SEQ ID NO: 909108 - DNA, 33 bp, Homo sapien
ccatgtggtagcaatatccttacaattttcgct

SEQ ID NO: 909109 - DNA, 33 bp, Homo sapien
gttgtcacgtattacactgaagtgacaagagaa

SEQ ID NO: 909110 - DNA, 33 bp, Homo sapien
gttgtcacgtattacattgaagtgacaagagaa

SEQ ID NO: 909111 - DNA, 33 bp, Homo sapien
ggttttacatcttactcagaaagaaaagtttat

SEQ ID NO: 909112 - DNA, 33 bp, Homo sapien
ggttttacatcttactgagaaagaaaagtttat

SEQ ID NO: 909113 - DNA, 33 bp, Homo sapien
gcatcagcaggtcacactgagctggtacaccat

SEQ ID NO: 909114 - DNA, 33 bp, Homo sapien
gcatcagcaggtcacattgagctggtacaccat

SEQ ID NO: 909115 - DNA, 33 bp, Homo sapien
cagagttaactctttacgtcattgagacctcca

SEQ ID NO: 909116 - DNA, 33 bp, Homo sapien
cagagttaactctttatgtcattgagacctcca

SEQ ID NO: 909117 - DNA, 33 bp, Homo sapien
gagtatggttggaaaactggtgaaaaggaaatt

SEQ ID NO: 909118 - DNA, 33 bp, Homo sapien
gagtatggttggaaaattggtgaaaaggaaatt

SEQ ID NO: 909119 - DNA, 33 bp, Homo sapien; identical to SEQ ID NO: 909117

SEQ ID NO: 909120 - DNA, 33 bp, Homo sapien; identical to SEQ ID NO: 909118

SEQ ID NO: 909121 - DNA, 33 bp, Homo sapien
actggaaaatcaaatcaaagtgcgtttattagg

SEQ ID NO: 909122 - DNA, 33 bp, Homo sapien
actggaaaatcaaatcgaagtgcgtttattagg

SEQ ID NO: 909123 - DNA, 33 bp, Homo sapien
tgatatgacaagaagaacactcaacttctgtga

SEQ ID NO: 909124 - DNA, 33 bp, Homo sapien
tgatatgacaagaagagcactcaacttctgtga

SEQ ID NO: 909125 - DNA, 33 bp, Homo sapien
ttcaacagtgaaaaacaagctattgagtaatga

SEQ ID NO: 909126 - DNA, 33 bp, Homo sapien
ttcaacagtgaaaaacgagctattgagtaatga

SEQ ID NO: 909127 - DNA, 33 bp, Homo sapien
gaccatgttctccttgcatcaatgtaccctgta

SEQ ID NO: 909128 - DNA, 33 bp, Homo sapien
gaccatgttctccttgtatcaatgtaccctgta

SEQ ID NO: 909129 - DNA, 33 bp, Homo sapien
aaagtagtcagtgagacgctttatgtttattta

SEQ ID NO: 909130 - DNA, 33 bp, Homo sapien
aaagtagtcagtgagatgctttatgtttattta

SEQ ID NO: 909131 - DNA, 33 bp, Homo sapien
tggttctctatgcaatcaagcaaatcagagtcc

SEQ ID NO: 909132 - DNA, 33 bp, Homo sapien
tggttctctatgcaatgaagcaaatcagagtcc

SEQ ID NO: 909133 - DNA, 33 bp, Homo sapien
atgtacacttgtttgaactgactctttatcata

SEQ ID NO: 909134 - DNA, 33 bp, Homo sapien
atgtacacttgtttgagctgactctttatcata

SEQ ID NO: 909135 - DNA, 33 bp, Homo sapien
cagtctccacaaagagaacaaagaacttttcct

SEQ ID NO: 909136 - DNA, 33 bp, Homo sapien
cagtctccacaaagaggacaaagaacttttcct

SEQ ID NO: 909137 - DNA, 33 bp, Homo sapien
tcttcacagtaataaacgagctctcactcttcc

SEQ ID NO: 909138 - DNA, 33 bp, Homo sapien
tcttcacagtaataaatgagctctcactcttcc

SEQ ID NO: 909139 - DNA, 33 bp, Homo sapien
agaggaagaaataggcaaactatagcagaagac

SEQ ID NO: 909140 - DNA, 33 bp, Homo sapien
agaggaagaaataggcgaactatagcagaagac

SEQ ID NO: 909141 - DNA, 33 bp, Homo sapien
cattcagtcaacaagaacaatgcaacatttccc

SEQ ID NO: 909142 - DNA, 33 bp, Homo sapien
cattcagtcaacaagagcaatgcaacatttccc

SEQ ID NO: 909143 - DNA, 33 bp, Homo sapien
gcgcttctgagtgtgcaatcttcctccggatta

SEQ ID NO: 909144 - DNA, 33 bp, Homo sapien
gcgcttctgagtgtgccatcttcctccggatta

SEQ ID NO: 909145 - DNA, 33 bp, Homo sapien
gacttaggacagttgaagaacaggcccaactca

SEQ ID NO: 909146 - DNA, 33 bp, Homo sapien
gacttaggacagttgaggaacaggcccaactca

SEQ ID NO: 909147 - DNA, 33 bp, Homo sapien
gaccaaactgcgaagtaaccctggaagttaatt

SEQ ID NO: 909148 - DNA, 33 bp, Homo sapien
gaccaaactgcgaagtcaccctggaagttaatt

SEQ ID NO: 909149 - DNA, 33 bp, Homo sapien
caaaatttcaatgacacaagaggaataagttca

SEQ ID NO: 909150 - DNA, 33 bp, Homo sapien
caaaatttcaatgacataagaggaataagttca

SEQ ID NO: 909151 - DNA, 33 bp, Homo sapien
ccatgctggtaccagaagttggatagggccaat

SEQ ID NO: 909152 - DNA, 33 bp, Homo sapien
ccatgctggtaccagacgttggatagggccaat

SEQ ID NO: 909153 - DNA, 33 bp, Homo sapien
tctagttacttggaaaacatttagctgtttctt

SEQ ID NO: 909154 - DNA, 33 bp, Homo sapien
tctagttacttggaaagcatttagctgtttctt

SEQ ID NO: 909155 - DNA, 33 bp, Homo sapien
gttcatttgttttccactcagacagcttctctc

SEQ ID NO: 909156 - DNA, 33 bp, Homo sapien
gttcatttgttttccattcagacagcttctctc

SEQ ID NO: 909157 - DNA, 33 bp, Homo sapien
ctcaaaaccaagcacaacactagcatcctctcc

SEQ ID NO: 909158 - DNA, 33 bp, Homo sapien
ctcaaaaccaagcacatcactagcatcctctcc

SEQ ID NO: 909159 - DNA, 33 bp, Homo sapien
tggcagtcttcccacaacttgctacatgacctt

SEQ ID NO: 909160 - DNA, 33 bp, Homo sapien
tggcagtcttcccacagcttgctacatgacctt

SEQ ID NO: 909161 - DNA, 33 bp, Homo sapien
cctgcttgttatcaaaaagggattcattcttta

SEQ ID NO: 909162 - DNA, 33 bp, Homo sapien
cctgcttgttatcaaacagggattcattcttta

SEQ ID NO: 909163 - DNA, 33 bp, Homo sapien
tctttctttgtcttcaccaatattcctagtgaa

SEQ ID NO: 909164 - DNA, 33 bp, Homo sapien
tctttctttgtcttcagcaatattcctagtgaa

SEQ ID NO: 909165 - DNA, 33 bp, Homo sapien
taaaatagaagatgataaaatcgtttcttgtgc

SEQ ID NO: 909166 - DNA, 33 bp, Homo sapien
taaaatagaagatgattaaatcgtttcttgtgc

SEQ ID NO: 909167 - DNA, 33 bp, Homo sapien
cttgcactgaagccaactgataggtgagtcaga

SEQ ID NO: 909168 - DNA, 33 bp, Homo sapien
cttgcactgaagccaattgataggtgagtcaga

SEQ ID NO: 909169 - DNA, 33 bp, Homo sapien
ataatcatatgttcaactatttctccctagtta

SEQ ID NO: 909170 - DNA, 33 bp, Homo sapien
ataatcatatgttcaattatttctccctagtta

SEQ ID NO: 909171 - DNA, 33 bp, Homo sapien
acacattacttgcttacaggatgctggtctaag

SEQ ID NO: 909172 - DNA, 33 bp, Homo sapien
acacattacttgcttataggatgctggtctaag

SEQ ID NO: 909173 - DNA, 33 bp, Homo sapien
tctggttttcaaaagagattgtggctggagtct

SEQ ID NO: 909174 - DNA, 33 bp, Homo sapien
tctggttttcaaaagatattgtggctggagtct

SEQ ID NO: 909175 - DNA, 33 bp, Homo sapien
ttgaagtcagcattgaagatgtcagtggacaca

SEQ ID NO: 909176 - DNA, 33 bp, Homo sapien
ttgaagtcagcattgaggatgtcagtggacaca

SEQ ID NO: 909177 - DNA, 33 bp, Homo sapien
actgccacccatttcccaaggctcttgatgtcc

SEQ ID NO: 909178 - DNA, 33 bp, Homo sapien
actgccacccatttcctaaggctcttgatgtcc

SEQ ID NO: 909179 - DNA, 33 bp, Homo sapien
gatctgggtttaaagacgtggccttaaattcgc

SEQ ID NO: 909180 - DNA, 33 bp, Homo sapien
gatctgggtttaaagatgtggccttaaattcgc

SEQ ID NO: 909181 - DNA, 33 bp, Homo sapien
caaactggttctacacacagttctggaagcaag

SEQ ID NO: 909182 - DNA, 33 bp, Homo sapien
caaactggttctacacgcagttctggaagcaag

SEQ ID NO: 909183 - DNA, 33 bp, Homo sapien
cagtaaaaaatgctaaagtgttgcttatgcaag

SEQ ID NO: 909184 - DNA, 33 bp, Homo sapien
cagtaaaaaatgctaacgtgttgcttatgcaag

SEQ ID NO: 909185 - DNA, 33 bp, Homo sapien
atggcctgattccgtgacacatgcccgtaatcc

SEQ ID NO: 909186 - DNA, 33 bp, Homo sapien
atggcctgattccgtggcacatgcccgtaatcc

SEQ ID NO: 909187 - DNA, 33 bp, Homo sapien
tatgtgccttttctcacgtcttcctggaatatc

SEQ ID NO: 909188 - DNA, 33 bp, Homo sapien
tatgtgccttttctcatgtcttcctggaatatc

SEQ ID NO: 909189 - DNA, 33 bp, Homo sapien
gtactcacttaagaggaaagtctctcagacaca

SEQ ID NO: 909190 - DNA, 33 bp, Homo sapien
gtactcacttaagagggaagtctctcagacaca

SEQ ID NO: 909191 - DNA, 33 bp, Homo sapien
ttcagtcatttgaagaacagtattttataacag

SEQ ID NO: 909192 - DNA, 33 bp, Homo sapien
ttcagtcatttgaagagcagtattttataacag

SEQ ID NO: 909193 - DNA, 33 bp, Homo sapien
cctatttgcttattccagattttgcctggattt

SEQ ID NO: 909194 - DNA, 33 bp, Homo sapien
cctatttgcttattccggattttgcctggattt

SEQ ID NO: 909195 - DNA, 33 bp, Homo sapien
tacaaaagggcaaaacaatttgagtactccctt

SEQ ID NO: 909196 - DNA, 33 bp, Homo sapien
tacaaaagggcaaaacgatttgagtactccctt

SEQ ID NO: 909197 - DNA, 33 bp, Homo sapien
aaatatctcttattcacgtgaggaactgcacac

SEQ ID NO: 909198 - DNA, 33 bp, Homo sapien
aaatatctcttattcatgtgaggaactgcacac

SEQ ID NO: 909199 - DNA, 33 bp, Homo sapien
cttcctgcgatgcttaagttcaggactcaggtg

SEQ ID NO: 909200 - DNA, 33 bp, Homo sapien
cttcctgcgatgcttaggttcaggactcaggtg

SEQ ID NO: 909201 - DNA, 33 bp, Homo sapien
atgggatcaggctttacgtgtttcggcatgctt

SEQ ID NO: 909202 - DNA, 33 bp, Homo sapien
atgggatcaggctttatgtgtttcggcatgctt

SEQ ID NO: 909203 - DNA, 33 bp, Homo sapien
aagtcttattagtctgcacttgtttctcgctga

SEQ ID NO: 909204 - DNA, 33 bp, Homo sapien
aagtcttattagtctgtacttgtttctcgctga

SEQ ID NO: 909205 - DNA, 33 bp, Homo sapien
agactggagccaaagaggaaagggaagtcttat

SEQ ID NO: 909206 - DNA, 33 bp, Homo sapien
agactggagccaaagatgaaagggaagtcttat

SEQ ID NO: 909207 - DNA, 33 bp, Homo sapien
agtgtcctccacatataaacttagtgacattac

SEQ ID NO: 909208 - DNA, 33 bp, Homo sapien
agtgtcctccacatatcaacttagtgacattac

SEQ ID NO: 909209 - DNA, 33 bp, Homo sapien
ccagactgagatatgacgtggatgctggaagga

SEQ ID NO: 909210 - DNA, 33 bp, Homo sapien
ccagactgagatatgatgtggatgctggaagga

SEQ ID NO: 909211 - DNA, 33 bp, Homo sapien
atttataagtgtgcacaattacacctggataat

SEQ ID NO: 909212 - DNA, 33 bp, Homo sapien
atttataagtgtgcacgattacacctggataat

SEQ ID NO: 909213 - DNA, 33 bp, Homo sapien
tgcctgacaaaaatgaactgtatcaaatagtaa

SEQ ID NO: 909214 - DNA, 33 bp, Homo sapien
tgcctgacaaaaatgagctgtatcaaatagtaa

SEQ ID NO: 909215 - DNA, 33 bp, Homo sapien
agaggtgaggttaagaatatgacccatgaggag

SEQ ID NO: 909216 - DNA, 33 bp, Homo sapien
agaggtgaggttaagagtatgacccatgaggag

SEQ ID NO: 909217 - DNA, 33 bp, Homo sapien
aaactaatgcactgatgacttctgaaacatcca

SEQ ID NO: 909218 - DNA, 33 bp, Homo sapien
aaactaatgcactgattacttctgaaacatcca

SEQ ID NO: 909219 - DNA, 33 bp, Homo sapien
cagctgatggtttaataaatccttctacataat

SEQ ID NO: 909220 - DNA, 33 bp, Homo sapien
cagctgatggtttaatcaatccttctacataat

SEQ ID NO: 909221 - DNA, 33 bp, Homo sapien
tgatggtgcaccttcacgctttgcacaactttc

SEQ ID NO: 909222 - DNA, 33 bp, Homo sapien
tgatggtgcaccttcatgctttgcacaactttc

SEQ ID NO: 909223 - DNA, 33 bp, Homo sapien
ataatgtgctgtgatacggtaaaagtcagattt

SEQ ID NO: 909224 - DNA, 33 bp, Homo sapien
ataatgtgctgtgatatggtaaaagtcagattt

SEQ ID NO: 909225 - DNA, 33 bp, Homo sapien
atattagatgtgaagaaagattttttagaaggc

SEQ ID NO: 909226 - DNA, 33 bp, Homo sapien
atattagatgtgaagagagattttttagaaggc

SEQ ID NO: 909227 - DNA, 33 bp, Homo sapien
cacaaatcaagtcttaccatcttttctaccaag

SEQ ID NO: 909228 - DNA, 33 bp, Homo sapien
cacaaatcaagtcttatcatcttttctaccaag

SEQ ID NO: 909229 - DNA, 33 bp, Homo sapien
cttattcagagcttaaaagtgccaggttattgc

SEQ ID NO: 909230 - DNA, 33 bp, Homo sapien
cttattcagagcttaacagtgccaggttattgc

SEQ ID NO: 909231 - DNA, 33 bp, Homo sapien
gcaagagaactagatggcaatactacaagcttt

SEQ ID NO: 909232 - DNA, 33 bp, Homo sapien
gcaagagaactagatgtcaatactacaagcttt

SEQ ID NO: 909233 - DNA, 33 bp, Homo sapien
ctgacaattaacttcaaagaaactgaattcatg

SEQ ID NO: 909234 - DNA, 33 bp, Homo sapien
ctgacaattaacttcagagaaactgaattcatg

SEQ ID NO: 909235 - DNA, 33 bp, Homo sapien
ggctgtgtttttgagcccctcctcttgttccca

SEQ ID NO: 909236 - DNA, 33 bp, Homo sapien
ggctgtgtttttgagctcctcctcttgttccca

SEQ ID NO: 909237 - DNA, 33 bp, Homo sapien
tgaaatcaagcgatgacggagtattgaaagatg

SEQ ID NO: 909238 - DNA, 33 bp, Homo sapien
tgaaatcaagcgatgatggagtattgaaagatg

SEQ ID NO: 909239 - DNA, 33 bp, Homo sapien
atgctaatggaaaacaatatgtatttgcaggca

SEQ ID NO: 909240 - DNA, 33 bp, Homo sapien
atgctaatggaaaacagtatgtatttgcaggca

SEQ ID NO: 909241 - DNA, 33 bp, Homo sapien
gttcagctgctcccaaagaacaaaagatgctcg

SEQ ID NO: 909242 - DNA, 33 bp, Homo sapien
gttcagctgctcccaatgaacaaaagatgctcg

SEQ ID NO: 909243 - DNA, 33 bp, Homo sapien
atcccaggacctacaaactttccttggtgttag

SEQ ID NO: 909244 - DNA, 33 bp, Homo sapien
atcccaggacctacaatctttccttggtgttag

SEQ ID NO: 909245 - DNA, 33 bp, Homo sapien
aggttgtagaggcaaaaaagaaatctgtttcat

SEQ ID NO: 909246 - DNA, 33 bp, Homo sapien
aggttgtagaggcaaacaagaaatctgtttcat

SEQ ID NO: 909247 - DNA, 33 bp, Homo sapien
tgtgcctgaacaatgccaccaatggcctccaat

SEQ ID NO: 909248 - DNA, 33 bp, Homo sapien
tgtgcctgaacaatgctaccaatggcctccaat

SEQ ID NO: 909249 - DNA, 33 bp, Homo sapien
agaggtggttagtccacatgtggttcattttgg

SEQ ID NO: 909250 - DNA, 33 bp, Homo sapien
agaggtggttagtccatatgtggttcattttgg

SEQ ID NO: 909251 - DNA, 33 bp, Homo sapien
aatcagccagggtggcaaagttattgctctcat

SEQ ID NO: 909252 - DNA, 33 bp, Homo sapien
aatcagccagggtggccaagttattgctctcat

SEQ ID NO: 909253 - DNA, 33 bp, Homo sapien
tctgtgccctgattaaagagtcatctccaaacc

SEQ ID NO: 909254 - DNA, 33 bp, Homo sapien
tctgtgccctgattaaggagtcatctccaaacc

SEQ ID NO: 909255 - DNA, 33 bp, Homo sapien
tttttaaagcaagtacactagggattccaatac

SEQ ID NO: 909256 - DNA, 33 bp, Homo sapien
tttttaaagcaagtacgctagggattccaatac

SEQ ID NO: 909257 - DNA, 33 bp, Homo sapien
agctccaggtccagtaccaaacattgtataggt

SEQ ID NO: 909258 - DNA, 33 bp, Homo sapien
agctccaggtccagtatcaaacattgtataggt

SEQ ID NO: 909259 - DNA, 33 bp, Homo sapien
attatggttaaagatcacagaagagaccacact

SEQ ID NO: 909260 - DNA, 33 bp, Homo sapien
attatggttaaagatcgcagaagagaccacact

SEQ ID NO: 909261 - DNA, 33 bp, Homo sapien
cattataagtggaacactggtgtaatctttacc

SEQ ID NO: 909262 - DNA, 33 bp, Homo sapien
cattataagtggaacattggtgtaatctttacc

SEQ ID NO: 909263 - DNA, 33 bp, Homo sapien
tctcaaaagactcaacaaatttcacttcatggt

SEQ ID NO: 909264 - DNA, 33 bp, Homo sapien
tctcaaaagactcaacgaatttcacttcatggt

SEQ ID NO: 909265 - DNA, 33 bp, Homo sapien
taatcatttggaagaactacctacagtcatgaa

SEQ ID NO: 909266 - DNA, 33 bp, Homo sapien
taatcatttggaagaattacctacagtcatgaa

SEQ ID NO: 909267 - DNA, 33 bp, Homo sapien
gagaattggtcattgacaatgaatggtttctca

SEQ ID NO: 909268 - DNA, 33 bp, Homo sapien
gagaattggtcattgataatgaatggtttctca

SEQ ID NO: 909269 - DNA, 33 bp, Homo sapien
ttcaagcaagcttttaaaataggactgctgttt

SEQ ID NO: 909270 - DNA, 33 bp, Homo sapien
ttcaagcaagcttttataataggactgctgttt

SEQ ID NO: 909271 - DNA, 33 bp, Homo sapien
aggacatttccagcaaaatgcgagagaggcagt

SEQ ID NO: 909272 - DNA, 33 bp, Homo sapien
aggacatttccagcaagatgcgagagaggcagt

SEQ ID NO: 909273 - DNA, 33 bp, Homo sapien
attggatggatctgaacgcctgtgtcaaggctc

SEQ ID NO: 909274 - DNA, 33 bp, Homo sapien
attggatggatctgaatgcctgtgtcaaggctc

SEQ ID NO: 909275 - DNA, 33 bp, Homo sapien
gaaaaaaatgtcatacacagatacaatggaata

SEQ ID NO: 909276 - DNA, 33 bp, Homo sapien
gaaaaaaatgtcatacccagatacaatggaata

SEQ ID NO: 909277 - DNA, 33 bp, Homo sapien
aaagaaattcaagggagtatttcagaggaacct

SEQ ID NO: 909278 - DNA, 33 bp, Homo sapien
aaagaaattcaagggattatttcagaggaacct

SEQ ID NO: 909279 - DNA, 33 bp, Homo sapien
tcgattcagttcccgcaaggacttttaggtgat

SEQ ID NO: 909280 - DNA, 33 bp, Homo sapien
tcgattcagttcccgcgaggacttttaggtgat

SEQ ID NO: 909281 - DNA, 33 bp, Homo sapien
ccccagtaaatactgacctgaaggccagcagct

SEQ ID NO: 909282 - DNA, 33 bp, Homo sapien
ccccagtaaatactgagctgaaggccagcagct

SEQ ID NO: 909283 - DNA, 33 bp, Homo sapien
tcatccctaaaagacaactcaaggcctcttcaa

SEQ ID NO: 909284 - DNA, 33 bp, Homo sapien
tcatccctaaaagacagctcaaggcctcttcaa

SEQ ID NO: 909285 - DNA, 33 bp, Homo sapien
tgtggtgccaattctaactcatgccttagcttg

SEQ ID NO: 909286 - DNA, 33 bp, Homo sapien
tgtggtgccaattctagctcatgccttagcttg

SEQ ID NO: 909287 - DNA, 33 bp, Homo sapien
aaaatggagacaccagcaaaaaggatgatgatg

SEQ ID NO: 909288 - DNA, 33 bp, Homo sapien
aaaatggagacaccaggaaaaaggatgatgatg

SEQ ID NO: 909289 - DNA, 33 bp, Homo sapien
gtaccaattggcattaggagaaagcagcaaata

SEQ ID NO: 909290 - DNA, 33 bp, Homo sapien
gtaccaattggcattatgagaaagcagcaaata

SEQ ID NO: 909291 - DNA, 33 bp, Homo sapien
tttgccttctcctaaaaccttggtatccttcca

SEQ ID NO: 909292 - DNA, 33 bp, Homo sapien
tttgccttctcctaaagccttggtatccttcca

SEQ ID NO: 909293 - DNA, 33 bp, Homo sapien
tccttgctaacctatacgatttcaaatgcctgg

SEQ ID NO: 909294 - DNA, 33 bp, Homo sapien
tccttgctaacctatatgatttcaaatgcctgg

SEQ ID NO: 909295 - DNA, 33 bp, Homo sapien
tttcattgcaaatagacgttctaactggtcttg

SEQ ID NO: 909296 - DNA, 33 bp, Homo sapien
tttcattgcaaatagaggttctaactggtcttg

SEQ ID NO: 909297 - DNA, 33 bp, Homo sapien
tgttgaggaagctcatcactaaaagcctaagaa

SEQ ID NO: 909298 - DNA, 33 bp, Homo sapien
tgttgaggaagctcatgactaaaagcctaagaa

SEQ ID NO: 909299 - DNA, 33 bp, Homo sapien
gtgccaagccctgtaacgactgattcactttgg

SEQ ID NO: 909300 - DNA, 33 bp, Homo sapien
gtgccaagccctgtaatgactgattcactttgg

SEQ ID NO: 909301 - DNA, 33 bp, Homo sapien
ctttaaaggaacaatcaaaatgtcacttccttt

SEQ ID NO: 909302 - DNA, 33 bp, Homo sapien
ctttaaaggaacaatcgaaatgtcacttccttt

SEQ ID NO: 909303 - DNA, 33 bp, Homo sapien
tatgcgttgaacatacagcatcacgtaatgtaa

SEQ ID NO: 909304 - DNA, 33 bp, Homo sapien
tatgcgttgaacatacggcatcacgtaatgtaa

SEQ ID NO: 909305 - DNA, 33 bp, Homo sapien
tttcttaaatatcagaacttgtgaactacttaa

SEQ ID NO: 909306 - DNA, 33 bp, Homo sapien
tttcttaaatatcagaccttgtgaactacttaa

SEQ ID NO: 909307 - DNA, 33 bp, Homo sapien
aaaagctgcaatgcagaagtgtgttatggactg

SEQ ID NO: 909308 - DNA, 33 bp, Homo sapien
aaaagctgcaatgcagtagtgtgttatggactg

SEQ ID NO: 909309 - DNA, 33 bp, Homo sapien
ctacataacgtctaacaatctggtgtcggacaa

SEQ ID NO: 909310 - DNA, 33 bp, Homo sapien
ctacataacgtctaaccatctggtgtcggacaa

SEQ ID NO: 909311 - DNA, 33 bp, Homo sapien
tccagtctatttggtggattttactttatagat

SEQ ID NO: 909312 - DNA, 33 bp, Homo sapien
tccagtctatttggtgtattttactttatagat

SEQ ID NO: 909313 - DNA, 33 bp, Homo sapien
tgacccctggttcatgcaaaaattatcttccac

SEQ ID NO: 909314 - DNA, 33 bp, Homo sapien
tgacccctggttcatggaaaaattatcttccac

SEQ ID NO: 909315 - DNA, 33 bp, Homo sapien
tttgtgtaacttatgaatatgtattggtgtcta

SEQ ID NO: 909316 - DNA, 33 bp, Homo sapien
tttgtgtaacttatgactatgtattggtgtcta

SEQ ID NO: 909317 - DNA, 33 bp, Homo sapien
atttgttgtttatcaggagtggctgaaataaga

SEQ ID NO: 909318 - DNA, 33 bp, Homo sapien
atttgttgtttatcagtagtggctgaaataaga

SEQ ID NO: 909319 - DNA, 33 bp, Homo sapien
gattcttgaggttttacaacaacttcatccaaa

SEQ ID NO: 909320 - DNA, 33 bp, Homo sapien
gattcttgaggttttataacaacttcatccaaa

SEQ ID NO: 909321 - DNA, 33 bp, Homo sapien
cagtctcttaatgacaaaacagatggtcctaga

SEQ ID NO: 909322 - DNA, 33 bp, Homo sapien
cagtctcttaatgacacaacagatggtcctaga

SEQ ID NO: 909323 - DNA, 33 bp, Homo sapien
tacttttgaacataccaggtactgtagactgac

SEQ ID NO: 909324 - DNA, 33 bp, Homo sapien
tacttttgaacataccgggtactgtagactgac

SEQ ID NO: 909325 - DNA, 33 bp, Homo sapien
atgggactgagaaccaacaatgatttgggacaa

SEQ ID NO: 909326 - DNA, 33 bp, Homo sapien
atgggactgagaaccagcaatgatttgggacaa

SEQ ID NO: 909327 - DNA, 33 bp, Homo sapien
gatttttaggggaattaaatgaacatggagaca

SEQ ID NO: 909328 - DNA, 33 bp, Homo sapien
gatttttaggggaattgaatgaacatggagaca

SEQ ID NO: 909329 - DNA, 33 bp, Homo sapien
acttaattgccaatacaatagtgtgtagatatg

SEQ ID NO: 909330 - DNA, 33 bp, Homo sapien
acttaattgccaatacgatagtgtgtagatatg

SEQ ID NO: 909331 - DNA, 33 bp, Homo sapien
cccatccacaatagacaccttttgcaggattcc

SEQ ID NO: 909332 - DNA, 33 bp, Homo sapien
cccatccacaatagacgccttttgcaggattcc

SEQ ID NO: 909333 - DNA, 33 bp, Homo sapien
aaaagagggaaatcataaagagtggaagattaa

SEQ ID NO: 909334 - DNA, 33 bp, Homo sapien
aaaagagggaaatcatgaagagtggaagattaa

SEQ ID NO: 909335 - DNA, 33 bp, Homo sapien
atgactttgtttagcacgagcaagtgtcaggga

SEQ ID NO: 909336 - DNA, 33 bp, Homo sapien
atgactttgtttagcatgagcaagtgtcaggga

SEQ ID NO: 909337 - DNA, 33 bp, Homo sapien
ttttcacgaggttgtaccataaacataactttg

SEQ ID NO: 909338 - DNA, 33 bp, Homo sapien
ttttcacgaggttgtatcataaacataactttg

SEQ ID NO: 909339 - DNA, 33 bp, Homo sapien
atgattaacttttgccactataattctccattt

SEQ ID NO: 909340 - DNA, 33 bp, Homo sapien
atgattaacttttgcctctataattctccattt

SEQ ID NO: 909341 - DNA, 33 bp, Homo sapien
cactctctcctgcatgaactgtacttagaaata

SEQ ID NO: 909342 - DNA, 33 bp, Homo sapien
cactctctcctgcatggactgtacttagaaata

SEQ ID NO: 909343 - DNA, 33 bp, Homo sapien
aacttatctctttctacagctctagcccattgg

SEQ ID NO: 909344 - DNA, 33 bp, Homo sapien
aacttatctctttctatagctctagcccattgg

SEQ ID NO: 909345 - DNA, 33 bp, Homo sapien
tgtcaattgagaagaaactttgttgtgtgtagc

SEQ ID NO: 909346 - DNA, 33 bp, Homo sapien
tgtcaattgagaagaagctttgttgtgtgtagc

SEQ ID NO: 909347 - DNA, 33 bp, Homo sapien
catttttaaattgctcccttattgtgtagtcca

SEQ ID NO: 909348 - DNA, 33 bp, Homo sapien
catttttaaattgctctcttattgtgtagtcca

SEQ ID NO: 909349 - DNA, 33 bp, Homo sapien
ttagtccctgctgctgcatccaggaggagccct

SEQ ID NO: 909350 - DNA, 33 bp, Homo sapien
ttagtccctgctgctgtatccaggaggagccct

SEQ ID NO: 909351 - DNA, 33 bp, Homo sapien
caccattgttttggcccacaacaacgtaatact

SEQ ID NO: 909352 - DNA, 33 bp, Homo sapien
caccattgttttggcctacaacaacgtaatact

SEQ ID NO: 909353 - DNA, 33 bp, Homo sapien
agtacatcatgtggcaactcttaccctttcaaa

SEQ ID NO: 909354 - DNA, 33 bp, Homo sapien
agtacatcatgtggcagctcttaccctttcaaa

SEQ ID NO: 909355 - DNA, 33 bp, Homo sapien
gcttactgttgtcttgcagcattttgtttgcac

SEQ ID NO: 909356 - DNA, 33 bp, Homo sapien
gcttactgttgtcttgtagcattttgtttgcac

SEQ ID NO: 909357 - DNA, 33 bp, Homo sapien
ccagtagcaaaagctaagtaaacaagaaggaat

SEQ ID NO: 909358 - DNA, 33 bp, Homo sapien
ccagtagcaaaagctaggtaaacaagaaggaat

SEQ ID NO: 909359 - DNA, 33 bp, Homo sapien
atccattcagagtgaaatataaaccaatggatt

SEQ ID NO: 909360 - DNA, 33 bp, Homo sapien
atccattcagagtgaagtataaaccaatggatt

SEQ ID NO: 909361 - DNA, 33 bp, Homo sapien
gcctggcagctttatgcaacccttcagctgagg

SEQ ID NO: 909362 - DNA, 33 bp, Homo sapien
gcctggcagctttatgtaacccttcagctgagg

SEQ ID NO: 909363 - DNA, 33 bp, Homo sapien
tctataggtcacaaaaatgatcgcaataaaaat

SEQ ID NO: 909364 - DNA, 33 bp, Homo sapien
tctataggtcacaaaagtgatcgcaataaaaat

SEQ ID NO: 909365 - DNA, 33 bp, Homo sapien
aagagccttgttttgccatattatgagggttgg

SEQ ID NO: 909366 - DNA, 33 bp, Homo sapien
aagagccttgttttgctatattatgagggttgg

SEQ ID NO: 909367 - DNA, 33 bp, Homo sapien
atggacttagcggaagaagaccacagaagtatg

SEQ ID NO: 909368 - DNA, 33 bp, Homo sapien
atggacttagcggaagcagaccacagaagtatg

SEQ ID NO: 909369 - DNA, 33 bp, Homo sapien
ggtgaggaataggtgccgaactaagttaattta

SEQ ID NO: 909370 - DNA, 33 bp, Homo sapien
ggtgaggaataggtgctgaactaagttaattta

SEQ ID NO: 909371 - DNA, 33 bp, Homo sapien
cacctattcctcaccccattcagtgaagttgtg

SEQ ID NO: 909372 - DNA, 33 bp, Homo sapien
cacctattcctcaccctattcagtgaagttgtg

SEQ ID NO: 909373 - DNA, 33 bp, Homo sapien
ggatcataagaaagacaatattttagctctaat

SEQ ID NO: 909374 - DNA, 33 bp, Homo sapien
ggatcataagaaagacgatattttagctctaat

SEQ ID NO: 909375 - DNA, 33 bp, Homo sapien
attaagagggcaacaaagcaatcaaaaagtgag

SEQ ID NO: 909376 - DNA, 33 bp, Homo sapien
attaagagggcaacaaggcaatcaaaaagtgag

SEQ ID NO: 909377 - DNA, 33 bp, Homo sapien
ataaaaataactgcaaatctcttcttaaaaaat

SEQ ID NO: 909378 - DNA, 33 bp, Homo sapien
ataaaaataactgcaactctcttcttaaaaaat

SEQ ID NO: 909379 - DNA, 33 bp, Homo sapien
caattccaagggagatcaaagtgaggagcaatg

SEQ ID NO: 909380 - DNA, 33 bp, Homo sapien
caattccaagggagatgaaagtgaggagcaatg

SEQ ID NO: 909381 - DNA, 33 bp, Homo sapien
aatacactttctgaaacccttagtcaaatttag

SEQ ID NO: 909382 - DNA, 33 bp, Homo sapien
aatacactttctgaaatccttagtcaaatttag

SEQ ID NO: 909383 - DNA, 33 bp, Homo sapien
agccagaggtaaagaaatcgtaagtgttcaaaa

SEQ ID NO: 909384 - DNA, 33 bp, Homo sapien
agccagaggtaaagaagtcgtaagtgttcaaaa

SEQ ID NO: 909385 - DNA, 33 bp, Homo sapien
ttaggggaagaacaaaactatcaacactgcaag

SEQ ID NO: 909386 - DNA, 33 bp, Homo sapien
ttaggggaagaacaaagctatcaacactgcaag

SEQ ID NO: 909387 - DNA, 33 bp, Homo sapien
cgggtactgccaaagaaagagggagatccacat

SEQ ID NO: 909388 - DNA, 33 bp, Homo sapien
cgggtactgccaaagagagagggagatccacat

SEQ ID NO: 909389 - DNA, 33 bp, Homo sapien
tatagctaagtcttcccaaggccagggcatttg

SEQ ID NO: 909390 - DNA, 33 bp, Homo sapien
tatagctaagtcttcctaaggccagggcatttg

SEQ ID NO: 909391 - DNA, 33 bp, Homo sapien
ttttgctgccaaaaaactaccatcacatcttac

SEQ ID NO: 909392 - DNA, 33 bp, Homo sapien
ttttgctgccaaaaaattaccatcacatcttac

SEQ ID NO: 909393 - DNA, 33 bp, Homo sapien
tggatgctgagcaaatcactttgggaaacttga

SEQ ID NO: 909394 - DNA, 33 bp, Homo sapien
tggatgctgagcaaattactttgggaaacttga

SEQ ID NO: 909395 - DNA, 33 bp, Homo sapien
caatgcgtagaaatgacaactactcaaggtgct

SEQ ID NO: 909396 - DNA, 33 bp, Homo sapien
caatgcgtagaaatgataactactcaaggtgct

SEQ ID NO: 909397 - DNA, 33 bp, Homo sapien
gcagtacatgatggtaataataggagaaaacag

SEQ ID NO: 909398 - DNA, 33 bp, Homo sapien
gcagtacatgatggtagtaataggagaaaacag

SEQ ID NO: 909399 - DNA, 33 bp, Homo sapien
atttttagtagcataaagtttagtgtgtatttt

SEQ ID NO: 909400 - DNA, 33 bp, Homo sapien
atttttagtagcataaggtttagtgtgtatttt

SEQ ID NO: 909401 - DNA, 33 bp, Homo sapien
ttcctttcaggttctacggtctggtccacttat

SEQ ID NO: 909402 - DNA, 33 bp, Homo sapien
ttcctttcaggttctagggtctggtccacttat

SEQ ID NO: 909403 - DNA, 33 bp, Homo sapien
ttgcagttaggctgccaataaggaccaccagca

SEQ ID NO: 909404 - DNA, 33 bp, Homo sapien
ttgcagttaggctgccgataaggaccaccagca

SEQ ID NO: 909405 - DNA, 33 bp, Homo sapien
aggcatctgatcacagaactgcagaggaatact

SEQ ID NO: 909406 - DNA, 33 bp, Homo sapien
aggcatctgatcacaggactgcagaggaatact

SEQ ID NO: 909407 - DNA, 33 bp, Homo sapien
aatgtctactatcacgccaaactctatcggcag

SEQ ID NO: 909408 - DNA, 33 bp, Homo sapien
aatgtctactatcacgtcaaactctatcggcag

SEQ ID NO: 909409 - DNA, 33 bp, Homo sapien
atgaagtctgagcaggacattgtcaataaaatc

SEQ ID NO: 909410 - DNA, 33 bp, Homo sapien
atgaagtctgagcaggtcattgtcaataaaatc

SEQ ID NO: 909411 - DNA, 33 bp, Homo sapien
caattatctcaatgttaaaacgtgactcattta

SEQ ID NO: 909412 - DNA, 33 bp, Homo sapien
caattatctcaatgttcaaacgtgactcattta

SEQ ID NO: 909413 - DNA, 33 bp, Homo sapien
acaaagcaagtaataaaatggtcgtttttgtag

SEQ ID NO: 909414 - DNA, 33 bp, Homo sapien
acaaagcaagtaataagatggtcgtttttgtag

SEQ ID NO: 909415 - DNA, 33 bp, Homo sapien
gcatatgaattggaagacgttatatgaggaaga

SEQ ID NO: 909416 - DNA, 33 bp, Homo sapien
gcatatgaattggaagtcgttatatgaggaaga

SEQ ID NO: 909417 - DNA, 33 bp, Homo sapien
tacacatttcttagcactatttataacatcaac

SEQ ID NO: 909418 - DNA, 33 bp, Homo sapien
tacacatttcttagcattatttataacatcaac

SEQ ID NO: 909419 - DNA, 33 bp, Homo sapien
agaaataagaggcatgaaaacaaatcaagcttt

SEQ ID NO: 909420 - DNA, 33 bp, Homo sapien
agaaataagaggcatgcaaacaaatcaagcttt

SEQ ID NO: 909421 - DNA, 33 bp, Homo sapien
tgtgttgaactgggaaaatctcttgcctttgtg

SEQ ID NO: 909422 - DNA, 33 bp, Homo sapien
tgtgttgaactgggaagatctcttgcctttgtg

SEQ ID NO: 909423 - DNA, 33 bp, Homo sapien
agatcagcagttttggacaatctgatatcatta

SEQ ID NO: 909424 - DNA, 33 bp, Homo sapien
agatcagcagttttgggcaatctgatatcatta

SEQ ID NO: 909425 - DNA, 33 bp, Homo sapien
tagcattattagtggacatacatgggggggcca

SEQ ID NO: 909426 - DNA, 33 bp, Homo sapien
tagcattattagtggagatacatgggggggcca

SEQ ID NO: 909427 - DNA, 33 bp, Homo sapien
caagccagtttcaagacggaaagtgtgactggg

SEQ ID NO: 909428 - DNA, 33 bp, Homo sapien
caagccagtttcaagatggaaagtgtgactggg

SEQ ID NO: 909429 - DNA, 33 bp, Homo sapien
ttcaagcagcggtgagaaaaaccagttttatga

SEQ ID NO: 909430 - DNA, 33 bp, Homo sapien
ttcaagcagcggtgaggaaaaccagttttatga

SEQ ID NO: 909431 - DNA, 33 bp, Homo sapien
gaacaaatcctaactcagacagctactacttca

SEQ ID NO: 909432 - DNA, 33 bp, Homo sapien
gaacaaatcctaactcggacagctactacttca

SEQ ID NO: 909433 - DNA, 33 bp, Homo sapien
tcttgactgtcttttaagttatctttagtacac

SEQ ID NO: 909434 - DNA, 33 bp, Homo sapien
tcttgactgtcttttatgttatctttagtacac

SEQ ID NO: 909435 - DNA, 33 bp, Homo sapien
tgatcagataagggcaaataattcagtagaaaa

SEQ ID NO: 909436 - DNA, 33 bp, Homo sapien
tgatcagataagggcagataattcagtagaaaa

SEQ ID NO: 909437 - DNA, 33 bp, Homo sapien
gagagtgaggactagaacttttgtcaacaaaac

SEQ ID NO: 909438 - DNA, 33 bp, Homo sapien
gagagtgaggactagaccttttgtcaacaaaac

SEQ ID NO: 909439 - DNA, 33 bp, Homo sapien
ctgcttaaagttctcacgatataaaccaagtag

SEQ ID NO: 909440 - DNA, 33 bp, Homo sapien
ctgcttaaagttctcaggatataaaccaagtag

SEQ ID NO: 909441 - DNA, 33 bp, Homo sapien
ttcactctctgtggcaagtacgagttccaggtc

SEQ ID NO: 909442 - DNA, 33 bp, Homo sapien
ttcactctctgtggcaggtacgagttccaggtc

SEQ ID NO: 909443 - DNA, 33 bp, Homo sapien
ggaaatagctggctccaatgacaatatttctgc

SEQ ID NO: 909444 - DNA, 33 bp, Homo sapien
ggaaatagctggctccgatgacaatatttctgc

SEQ ID NO: 909445 - DNA, 33 bp, Homo sapien
taaatgagctaacaaaccattacagaaggtgac

SEQ ID NO: 909446 - DNA, 33 bp, Homo sapien
taaatgagctaacaaagcattacagaaggtgac

SEQ ID NO: 909447 - DNA, 33 bp, Homo sapien
agactgtgccgtgatcaaagactgggtgagaag

SEQ ID NO: 909448 - DNA, 33 bp, Homo sapien
agactgtgccgtgatcgaagactgggtgagaag

SEQ ID NO: 909449 - DNA, 33 bp, Homo sapien
ctactggatagtggagaattttgctgggcttcc

SEQ ID NO: 909450 - DNA, 33 bp, Homo sapien
ctactggatagtggaggattttgctgggcttcc

SEQ ID NO: 909451 - DNA, 33 bp, Homo sapien
tccttaaggttggccactcggcaggctgtacct

SEQ ID NO: 909452 - DNA, 33 bp, Homo sapien
tccttaaggttggccattcggcaggctgtacct

SEQ ID NO: 909453 - DNA, 33 bp, Homo sapien
agctgtgtcacaggccacggcaaaatctctcac

SEQ ID NO: 909454 - DNA, 33 bp, Homo sapien
agctgtgtcacaggccgcggcaaaatctctcac

SEQ ID NO: 909455 - DNA, 33 bp, Homo sapien
aactacagtggaaataggtagtaaaacttctgt

SEQ ID NO: 909456 - DNA, 33 bp, Homo sapien
aactacagtggaaatatgtagtaaaacttctgt

SEQ ID NO: 909457 - DNA, 33 bp, Homo sapien
gattagcaattaaaacagttctaactctcctca

SEQ ID NO: 909458 - DNA, 33 bp, Homo sapien
gattagcaattaaaacggttctaactctcctca

SEQ ID NO: 909459 - DNA, 33 bp, Homo sapien
aagagtgaattcaagacggcattcttcagtgat

SEQ ID NO: 909460 - DNA, 33 bp, Homo sapien
aagagtgaattcaagatggcattcttcagtgat

SEQ ID NO: 909461 - DNA, 33 bp, Homo sapien
accccagcgttcctaaatggaagcagcaagtat

SEQ ID NO: 909462 - DNA, 33 bp, Homo sapien
accccagcgttcctaattggaagcagcaagtat

SEQ ID NO: 909463 - DNA, 33 bp, Homo sapien
atcaagaagaagcccaagatttaacaattgcag

SEQ ID NO: 909464 - DNA, 33 bp, Homo sapien
atcaagaagaagcccatgatttaacaattgcag

SEQ ID NO: 909465 - DNA, 33 bp, Homo sapien
tggctgctctgaatgaccatgtgcgcagagacc

SEQ ID NO: 909466 - DNA, 33 bp, Homo sapien
tggctgctctgaatgatcatgtgcgcagagacc

SEQ ID NO: 909467 - DNA, 33 bp, Homo sapien
ttaatcaagaatggaacgacaagtagaggtcca

SEQ ID NO: 909468 - DNA, 33 bp, Homo sapien
ttaatcaagaatggaatgacaagtagaggtcca

SEQ ID NO: 909469 - DNA, 33 bp, Homo sapien
cctgaaaccatctactgaaaccagactgctgtc

SEQ ID NO: 909470 - DNA, 33 bp, Homo sapien
cctgaaaccatctacttaaaccagactgctgtc

SEQ ID NO: 909471 - DNA, 33 bp, Homo sapien
tggtcatcagagcccacaggggaataaatggga

SEQ ID NO: 909472 - DNA, 33 bp, Homo sapien
tggtcatcagagcccataggggaataaatggga

SEQ ID NO: 909473 - DNA, 33 bp, Homo sapien
gtcaaggtctctttccccatgaagatgtaattt

SEQ ID NO: 909474 - DNA, 33 bp, Homo sapien
gtcaaggtctctttcctcatgaagatgtaattt

SEQ ID NO: 909475 - DNA, 33 bp, Homo sapien
ttgtcaattttagagacgttagatgaatttagt

SEQ ID NO: 909476 - DNA, 33 bp, Homo sapien
ttgtcaattttagagatgttagatgaatttagt

SEQ ID NO: 909477 - DNA, 33 bp, Homo sapien
gggttcttgacaattgaaagcagtcttgcacac

SEQ ID NO: 909478 - DNA, 33 bp, Homo sapien
gggttcttgacaattgtaagcagtcttgcacac

SEQ ID NO: 909479 - DNA, 33 bp, Homo sapien
cccacacacttcaagaataggcagcactgatcc

SEQ ID NO: 909480 - DNA, 33 bp, Homo sapien
cccacacacttcaagagtaggcagcactgatcc

SEQ ID NO: 909481 - DNA, 33 bp, Homo sapien
taggcagcactgatccaaggtgacagaccccag

SEQ ID NO: 909482 - DNA, 33 bp, Homo sapien
taggcagcactgatccgaggtgacagaccccag

SEQ ID NO: 909483 - DNA, 33 bp, Homo sapien
ctcccttaccagactcagactaagggcatcata

SEQ ID NO: 909484 - DNA, 33 bp, Homo sapien
ctcccttaccagactccgactaagggcatcata

SEQ ID NO: 909485 - DNA, 33 bp, Homo sapien
tatggagttttaataacgcaatgttgccaacaa

SEQ ID NO: 909486 - DNA, 33 bp, Homo sapien
tatggagttttaataatgcaatgttgccaacaa

SEQ ID NO: 909487 - DNA, 33 bp, Homo sapien
attgctttgaacaagagaatttggtgaagtgag

SEQ ID NO: 909488 - DNA, 33 bp, Homo sapien
attgctttgaacaagataatttggtgaagtgag

SEQ ID NO: 909489 - DNA, 33 bp, Homo sapien
cttaagttatgccttgaaagcaaataatctgaa

SEQ ID NO: 909490 - DNA, 33 bp, Homo sapien
cttaagttatgccttggaagcaaataatctgaa

SEQ ID NO: 909491 - DNA, 33 bp, Homo sapien
tattgtctgtctgcccaagggttgctcaggttt

SEQ ID NO: 909492 - DNA, 33 bp, Homo sapien
tattgtctgtctgcccgagggttgctcaggttt

SEQ ID NO: 909493 - DNA, 33 bp, Homo sapien
tataaggaaatccatactagaatactaaatgaa

SEQ ID NO: 909494 - DNA, 33 bp, Homo sapien
tataaggaaatccatattagaatactaaatgaa

SEQ ID NO: 909495 - DNA, 33 bp, Homo sapien
agtgtgctcactgtacacttcacacttcttgta

SEQ ID NO: 909496 - DNA, 33 bp, Homo sapien
agtgtgctcactgtactcttcacacttcttgta

SEQ ID NO: 909497 - DNA, 33 bp, Homo sapien
ttaagtaaacaaagtgcagcagtgaaccaaatt

SEQ ID NO: 909498 - DNA, 33 bp, Homo sapien
ttaagtaaacaaagtgtagcagtgaaccaaatt

SEQ ID NO: 909499 - DNA, 33 bp, Homo sapien
tgtgaaagagggtacacgttgtgaaaataaatc

SEQ ID NO: 909500 - DNA, 33 bp, Homo sapien
tgtgaaagagggtacatgttgtgaaaataaatc

SEQ ID NO: 909501 - DNA, 33 bp, Homo sapien
ttataaatctataaaacgtacttccgtcagcat

SEQ ID NO: 909502 - DNA, 33 bp, Homo sapien
ttataaatctataaaatgtacttccgtcagcat

SEQ ID NO: 909503 - DNA, 33 bp, Homo sapien
tttcccaagactgctcaattcttacttcaggga

SEQ ID NO: 909504 - DNA, 33 bp, Homo sapien
tttcccaagactgctcgattcttacttcaggga

SEQ ID NO: 909505 - DNA, 33 bp, Homo sapien
gcttatattttactcaagagaggcagaagagca

SEQ ID NO: 909506 - DNA, 33 bp, Homo sapien
gcttatattttactcaggagaggcagaagagca

SEQ ID NO: 909507 - DNA, 33 bp, Homo sapien
atgcagtaagcattaacaacgttgaccttatca

SEQ ID NO: 909508 - DNA, 33 bp, Homo sapien
atgcagtaagcattaagaacgttgaccttatca

SEQ ID NO: 909509 - DNA, 33 bp, Homo sapien
cattctgaattctgtaactgctggaaaggggaa

SEQ ID NO: 909510 - DNA, 33 bp, Homo sapien
cattctgaattctgtagctgctggaaaggggaa

SEQ ID NO: 909511 - DNA, 33 bp, Homo sapien
catgaatataagtgaacggagcaatttattcaa

SEQ ID NO: 909512 - DNA, 33 bp, Homo sapien
catgaatataagtgaatggagcaatttattcaa

SEQ ID NO: 909513 - DNA, 33 bp, Homo sapien
tccagacaacagaatactatccactggtttaaa

SEQ ID NO: 909514 - DNA, 33 bp, Homo sapien
tccagacaacagaatattatccactggtttaaa

SEQ ID NO: 909515 - DNA, 33 bp, Homo sapien
ggggcctctttgaaaccgatcctctctccagca

SEQ ID NO: 909516 - DNA, 33 bp, Homo sapien
ggggcctctttgaaactgatcctctctccagca

SEQ ID NO: 909517 - DNA, 33 bp, Homo sapien
ctttattaaagaaccacgcagaagtgctcagga

SEQ ID NO: 909518 - DNA, 33 bp, Homo sapien
ctttattaaagaaccatgcagaagtgctcagga

SEQ ID NO: 909519 - DNA, 33 bp, Homo sapien
cagctttccgtgattacggactattgcccacaa

SEQ ID NO: 909520 - DNA, 33 bp, Homo sapien
cagctttccgtgattatggactattgcccacaa

SEQ ID NO: 909521 - DNA, 33 bp, Homo sapien
gagaaagataagaaccactgacagggaccacct

SEQ ID NO: 909522 - DNA, 33 bp, Homo sapien
gagaaagataagaaccgctgacagggaccacct

SEQ ID NO: 909523 - DNA, 33 bp, Homo sapien
caggtctaacacagggcagagtggtcatttggc

SEQ ID NO: 909524 - DNA, 33 bp, Homo sapien
caggtctaacacaggggagagtggtcatttggc

SEQ ID NO: 909525 - DNA, 33 bp, Homo sapien
atatcctctggcccaacacgtcctttttgagac

SEQ ID NO: 909526 - DNA, 33 bp, Homo sapien
atatcctctggcccaagacgtcctttttgagac

SEQ ID NO: 909527 - DNA, 33 bp, Homo sapien
ccactggccaagtctacatcctagtatcacaac

SEQ ID NO: 909528 - DNA, 33 bp, Homo sapien
ccactggccaagtctatatcctagtatcacaac

SEQ ID NO: 909529 - DNA, 33 bp, Homo sapien
gctgggctatatctcaagtacttttcataaaca

SEQ ID NO: 909530 - DNA, 33 bp, Homo sapien
gctgggctatatctcaggtacttttcataaaca

SEQ ID NO: 909531 - DNA, 33 bp, Homo sapien
tcactttcgcctctccaacttctgtaaattgtc

SEQ ID NO: 909532 - DNA, 33 bp, Homo sapien
tcactttcgcctctccgacttctgtaaattgtc

SEQ ID NO: 909533 - DNA, 33 bp, Homo sapien
ggtgtgggtgcagaagaactccaggcgaggcca

SEQ ID NO: 909534 - DNA, 33 bp, Homo sapien
ggtgtgggtgcagaaggactccaggcgaggcca

SEQ ID NO: 909535 - DNA, 33 bp, Homo sapien
ggcatagtggtgtaaacaagctttctgaattta

SEQ ID NO: 909536 - DNA, 33 bp, Homo sapien
ggcatagtggtgtaaataagctttctgaattta

SEQ ID NO: 909537 - DNA, 33 bp, Homo sapien
gggagttcgctggaaacgttcattgctgagacc

SEQ ID NO: 909538 - DNA, 33 bp, Homo sapien
gggagttcgctggaaatgttcattgctgagacc

SEQ ID NO: 909539 - DNA, 33 bp, Homo sapien
tattttgtttttgtatcagtgttgcgtggaata

SEQ ID NO: 909540 - DNA, 33 bp, Homo sapien
tattttgtttttgtattagtgttgcgtggaata

SEQ ID NO: 909541 - DNA, 33 bp, Homo sapien
gtaagcagctcctcttaaagaatgcagtctcta

SEQ ID NO: 909542 - DNA, 33 bp, Homo sapien
gtaagcagctcctcttgaagaatgcagtctcta

SEQ ID NO: 909543 - DNA, 33 bp, Homo sapien
catacacaaggatgacaggctttctacagttac

SEQ ID NO: 909544 - DNA, 33 bp, Homo sapien
catacacaaggatgacgggctttctacagttac

SEQ ID NO: 909545 - DNA, 33 bp, Homo sapien
tggatggaccaagccccagactctgacagcagc

SEQ ID NO: 909546 - DNA, 33 bp, Homo sapien
tggatggaccaagccctagactctgacagcagc

SEQ ID NO: 909547 - DNA, 33 bp, Homo sapien
tgttcatgtccacgcacacgttcctcaccagtc

SEQ ID NO: 909548 - DNA, 33 bp, Homo sapien
tgttcatgtccacgcatacgttcctcaccagtc

SEQ ID NO: 909549 - DNA, 33 bp, Homo sapien
ggccctgagacgtgggaagatcctggcaatcca

SEQ ID NO: 909550 - DNA, 33 bp, Homo sapien
ggccctgagacgtgggcagatcctggcaatcca

SEQ ID NO: 909551 - DNA, 33 bp, Homo sapien
aaaatgatactaaaaaataagtgccagccacct

SEQ ID NO: 909552 - DNA, 33 bp, Homo sapien
aaaatgatactaaaaattaagtgccagccacct

SEQ ID NO: 909553 - DNA, 33 bp, Homo sapien
caggaacgagctcatgaacataccctattctga

SEQ ID NO: 909554 - DNA, 33 bp, Homo sapien
caggaacgagctcatggacataccctattctga

SEQ ID NO: 909555 - DNA, 33 bp, Homo sapien
tcatattgttcaaacaaaaatgctttacgaaca

SEQ ID NO: 909556 - DNA, 33 bp, Homo sapien
tcatattgttcaaacacaaatgctttacgaaca

SEQ ID NO: 909557 - DNA, 33 bp, Homo sapien
tgaagccgcatggggaaacttgtgccacatctg

SEQ ID NO: 909558 - DNA, 33 bp, Homo sapien
tgaagccgcatggggagacttgtgccacatctg

SEQ ID NO: 909559 - DNA, 33 bp, Homo sapien
ctgtggtacctagtaaactccatagaatttaag

SEQ ID NO: 909560 - DNA, 33 bp, Homo sapien
ctgtggtacctagtaagctccatagaatttaag

SEQ ID NO: 909561 - DNA, 33 bp, Homo sapien
ttcagttttccttcaagaagaaggctacgttct

SEQ ID NO: 909562 - DNA, 33 bp, Homo sapien
ttcagttttccttcaataagaaggctacgttct

SEQ ID NO: 909563 - DNA, 33 bp, Homo sapien
ctccctgctgtgaattaaaacttgccgaagcag

SEQ ID NO: 909564 - DNA, 33 bp, Homo sapien
ctccctgctgtgaattgaaacttgccgaagcag

SEQ ID NO: 909565 - DNA, 33 bp, Homo sapien
tcatagtctcattttaacctcattccagacttt

SEQ ID NO: 909566 - DNA, 33 bp, Homo sapien
tcatagtctcattttatcctcattccagacttt

SEQ ID NO: 909567 - DNA, 33 bp, Homo sapien
aatggctgcgccaagaagtgtgcaaggaatcag

SEQ ID NO: 909568 - DNA, 33 bp, Homo sapien
aatggctgcgccaagatgtgtgcaaggaatcag

SEQ ID NO: 909569 - DNA, 33 bp, Homo sapien
gattagcttattttccaccagcaaaaacagtat

SEQ ID NO: 909570 - DNA, 33 bp, Homo sapien
gattagcttattttccgccagcaaaaacagtat

SEQ ID NO: 909571 - DNA, 33 bp, Homo sapien
agtcagcgtttgtatacggtattggtctaaagg

SEQ ID NO: 909572 - DNA, 33 bp, Homo sapien
agtcagcgtttgtatatggtattggtctaaagg

SEQ ID NO: 909573 - DNA, 33 bp, Homo sapien
cttaaataaaaaaggagcactgagattcgttta

SEQ ID NO: 909574 - DNA, 33 bp, Homo sapien
cttaaataaaaaaggatcactgagattcgttta

SEQ ID NO: 909575 - DNA, 33 bp, Homo sapien
ctcaccatggggctgccgcaaaaacagcctgaa

SEQ ID NO: 909576 - DNA, 33 bp, Homo sapien
ctcaccatggggctgctgcaaaaacagcctgaa

SEQ ID NO: 909577 - DNA, 33 bp, Homo sapien
ctatcagtcacctcagccatctctgtcccgagt

SEQ ID NO: 909578 - DNA, 33 bp, Homo sapien
ctatcagtcacctcagtcatctctgtcccgagt

SEQ ID NO: 909579 - DNA, 33 bp, Homo sapien
cagataattaaggaggcacacttgtcaagacag

SEQ ID NO: 909580 - DNA, 33 bp, Homo sapien
cagataattaaggaggtacacttgtcaagacag

SEQ ID NO: 909581 - DNA, 33 bp, Homo sapien
atagactcagagaacaacaattagcattcagat

SEQ ID NO: 909582 - DNA, 33 bp, Homo sapien
atagactcagagaacaccaattagcattcagat

SEQ ID NO: 909583 - DNA, 33 bp, Homo sapien
aagctgccaggagatagagtgtctggtgatggc

SEQ ID NO: 909584 - DNA, 33 bp, Homo sapien
aagctgccaggagatatagtgtctggtgatggc

SEQ ID NO: 909585 - DNA, 33 bp, Homo sapien
tctatttcacagtgataagacattgtcattatg

SEQ ID NO: 909586 - DNA, 33 bp, Homo sapien
tctatttcacagtgatgagacattgtcattatg

SEQ ID NO: 909587 - DNA, 33 bp, Homo sapien
acaacaaaaatgtgctaaaagaactaaggtaaa

SEQ ID NO: 909588 - DNA, 33 bp, Homo sapien
acaacaaaaatgtgctcaaagaactaaggtaaa

SEQ ID NO: 909589 - DNA, 33 bp, Homo sapien
atcatctttatcacaccgcacagaaaacaagcc

SEQ ID NO: 909590 - DNA, 33 bp, Homo sapien
atcatctttatcacactgcacagaaaacaagcc

SEQ ID NO: 909591 - DNA, 33 bp, Homo sapien
tcacccttgactagacaggactgagggaattat

SEQ ID NO: 909592 - DNA, 33 bp, Homo sapien
tcacccttgactagacgggactgagggaattat

SEQ ID NO: 909593 - DNA, 33 bp, Homo sapien
tactcaatgttgagaactaaccaatagctgggc

SEQ ID NO: 909594 - DNA, 33 bp, Homo sapien
tactcaatgttgagaattaaccaatagctgggc

SEQ ID NO: 909595 - DNA, 33 bp, Homo sapien
tatggcataactcttaccagtggaacagaatac

SEQ ID NO: 909596 - DNA, 33 bp, Homo sapien
tatggcataactcttatcagtggaacagaatac

SEQ ID NO: 909597 - DNA, 33 bp, Homo sapien
atcaacatgaaagaaaagcaaaagaggtctcca

SEQ ID NO: 909598 - DNA, 33 bp, Homo sapien
atcaacatgaaagaaaggcaaaagaggtctcca

SEQ ID NO: 909599 - DNA, 33 bp, Homo sapien
atgatgaattttttccacattgcactccaattt

SEQ ID NO: 909600 - DNA, 33 bp, Homo sapien
atgatgaattttttccgcattgcactccaattt

SEQ ID NO: 909601 - DNA, 33 bp, Homo sapien
tcctggtttgaatttacgagccctgcttattgc

SEQ ID NO: 909602 - DNA, 33 bp, Homo sapien
tcctggtttgaatttatgagccctgcttattgc

SEQ ID NO: 909603 - DNA, 33 bp, Homo sapien
cagaaatgtattgaatcactgttctggaagcta

SEQ ID NO: 909604 - DNA, 33 bp, Homo sapien
cagaaatgtattgaattactgttctggaagcta

SEQ ID NO: 909605 - DNA, 33 bp, Homo sapien
aagaacacagaaggacaaaaaagcattttacct

SEQ ID NO: 909606 - DNA, 33 bp, Homo sapien
aagaacacagaaggacgaaaaagcattttacct

SEQ ID NO: 909607 - DNA, 33 bp, Homo sapien
tggtcagtttcgttcccgctaacacggtagagt

SEQ ID NO: 909608 - DNA, 33 bp, Homo sapien
tggtcagtttcgttcctgctaacacggtagagt

SEQ ID NO: 909609 - DNA, 33 bp, Homo sapien
acagcaagaccccagacgtccagttccagccac

SEQ ID NO: 909610 - DNA, 33 bp, Homo sapien
acagcaagaccccagatgtccagttccagccac

SEQ ID NO: 909611 - DNA, 33 bp, Homo sapien
atgacttccatgtgtcaaaatgaagagcaacca

SEQ ID NO: 909612 - DNA, 33 bp, Homo sapien
atgacttccatgtgtcgaaatgaagagcaacca

SEQ ID NO: 909613 - DNA, 33 bp, Homo sapien
cctcacagctgataaacggcagagcaggaattt

SEQ ID NO: 909614 - DNA, 33 bp, Homo sapien
cctcacagctgataaatggcagagcaggaattt

SEQ ID NO: 909615 - DNA, 33 bp, Homo sapien
taggctgaataaagtaccttgccctgcccactg

SEQ ID NO: 909616 - DNA, 33 bp, Homo sapien
taggctgaataaagtatcttgccctgcccactg

SEQ ID NO: 909617 - DNA, 33 bp, Homo sapien
caaatccacctctatcactgttcctgtcctgct

SEQ ID NO: 909618 - DNA, 33 bp, Homo sapien
caaatccacctctatctctgttcctgtcctgct

SEQ ID NO: 909619 - DNA, 33 bp, Homo sapien
ttctcacgatgagaaactggaagaactcagttc

SEQ ID NO: 909620 - DNA, 33 bp, Homo sapien
ttctcacgatgagaaattggaagaactcagttc

SEQ ID NO: 909621 - DNA, 33 bp, Homo sapien
ctcctcttacccagtacatcatttccacattgc

SEQ ID NO: 909622 - DNA, 33 bp, Homo sapien
ctcctcttacccagtatatcatttccacattgc

SEQ ID NO: 909623 - DNA, 33 bp, Homo sapien
acctggaatgtcaaagataaagtgcaacacatt

SEQ ID NO: 909624 - DNA, 33 bp, Homo sapien
acctggaatgtcaaaggtaaagtgcaacacatt

SEQ ID NO: 909625 - DNA, 33 bp, Homo sapien
acaatcgccctatgtcccattcacaagatgttc

SEQ ID NO: 909626 - DNA, 33 bp, Homo sapien
acaatcgccctatgtctcattcacaagatgttc

SEQ ID NO: 909627 - DNA, 33 bp, Homo sapien
cttctatgctcacggaagaccaaatttgccttg

SEQ ID NO: 909628 - DNA, 33 bp, Homo sapien
cttctatgctcacggaggaccaaatttgccttg

SEQ ID NO: 909629 - DNA, 33 bp, Homo sapien
atagaaaagcaagtgaagttcaatcaattgttt

SEQ ID NO: 909630 - DNA, 33 bp, Homo sapien
atagaaaagcaagtgacgttcaatcaattgttt

SEQ ID NO: 909631 - DNA, 33 bp, Homo sapien
agtagccacactaataaaaaaagtagaaagaaa

SEQ ID NO: 909632 - DNA, 33 bp, Homo sapien
agtagccacactaatacaaaaagtagaaagaaa

SEQ ID NO: 909633 - DNA, 33 bp, Homo sapien
attaggcctcacttcagtattttggaagtaggt

SEQ ID NO: 909634 - DNA, 33 bp, Homo sapien
attaggcctcacttcattattttggaagtaggt

SEQ ID NO: 909635 - DNA, 33 bp, Homo sapien
cgattctgagaaaggcgcacagggacaccctct

SEQ ID NO: 909636 - DNA, 33 bp, Homo sapien
cgattctgagaaaggctcacagggacaccctct

SEQ ID NO: 909637 - DNA, 33 bp, Homo sapien
agatggaaggaaaagacgctaggaaaaaatcaa

SEQ ID NO: 909638 - DNA, 33 bp, Homo sapien
agatggaaggaaaagatgctaggaaaaaatcaa

SEQ ID NO: 909639 - DNA, 33 bp, Homo sapien
cagctgcaggagcaaaagtcagaaaggtcagca

SEQ ID NO: 909640 - DNA, 33 bp, Homo sapien
cagctgcaggagcaaaggtcagaaaggtcagca

SEQ ID NO: 909641 - DNA, 33 bp, Homo sapien
atatttatctaaacacaatgaagcaactgcttg

SEQ ID NO: 909642 - DNA, 33 bp, Homo sapien
atatttatctaaacacgatgaagcaactgcttg

SEQ ID NO: 909643 - DNA, 33 bp, Homo sapien
caaatctcagttgttacgggcatttatagctat

SEQ ID NO: 909644 - DNA, 33 bp, Homo sapien
caaatctcagttgttatgggcatttatagctat

SEQ ID NO: 909645 - DNA, 33 bp, Homo sapien
tttctgttttccttaacgctgataaggtcagaa

SEQ ID NO: 909646 - DNA, 33 bp, Homo sapien
tttctgttttccttaatgctgataaggtcagaa

SEQ ID NO: 909647 - DNA, 33 bp, Homo sapien
aagccttctcaacatacatttttcttccaagat

SEQ ID NO: 909648 - DNA, 33 bp, Homo sapien
aagccttctcaacatatatttttcttccaagat

SEQ ID NO: 909649 - DNA, 33 bp, Homo sapien
tgctcactctgagtcacggtgaaaatgtttcag

SEQ ID NO: 909650 - DNA, 33 bp, Homo sapien
tgctcactctgagtcatggtgaaaatgtttcag

SEQ ID NO: 909651 - DNA, 33 bp, Homo sapien
gagtcaagaagtaacaccctgggaatgattggc

SEQ ID NO: 909652 - DNA, 33 bp, Homo sapien
gagtcaagaagtaacatcctgggaatgattggc

SEQ ID NO: 909653 - DNA, 33 bp, Homo sapien
aaggctacacttgggaagaatgtttacaaactg

SEQ ID NO: 909654 - DNA, 33 bp, Homo sapien
aaggctacacttgggaggaatgtttacaaactg

SEQ ID NO: 909655 - DNA, 33 bp, Homo sapien
gaaaagagaaatattaagatagtgttgtgtgca

SEQ ID NO: 909656 - DNA, 33 bp, Homo sapien
gaaaagagaaatattaggatagtgttgtgtgca

SEQ ID NO: 909657 - DNA, 33 bp, Homo sapien
aggaatttacgacaagacagtccagcaacttcc

SEQ ID NO: 909658 - DNA, 33 bp, Homo sapien
aggaatttacgacaaggcagtccagcaacttcc

SEQ ID NO: 909659 - DNA, 33 bp, Homo sapien
atccagcatatgtgaaaggagaagttagaaagg

SEQ ID NO: 909660 - DNA, 33 bp, Homo sapien
atccagcatatgtgaagggagaagttagaaagg

SEQ ID NO: 909661 - DNA, 33 bp, Homo sapien
atgacattgtttctaaaaattcattacttgcat

SEQ ID NO: 909662 - DNA, 33 bp, Homo sapien
atgacattgtttctaagaattcattacttgcat

SEQ ID NO: 909663 - DNA, 33 bp, Homo sapien
ccaaaatcaaaagcaaacatccattgtacaagc

SEQ ID NO: 909664 - DNA, 33 bp, Homo sapien
ccaaaatcaaaagcaagcatccattgtacaagc

SEQ ID NO: 909665 - DNA, 33 bp, Homo sapien
acatgagaagggctgacacacatagatttctgt

SEQ ID NO: 909666 - DNA, 33 bp, Homo sapien
acatgagaagggctgagacacatagatttctgt

SEQ ID NO: 909667 - DNA, 33 bp, Homo sapien
tcccttttctgagaaccctagtaagtccctcca

SEQ ID NO: 909668 - DNA, 33 bp, Homo sapien
tcccttttctgagaacgctagtaagtccctcca

SEQ ID NO: 909669 - DNA, 33 bp, Homo sapien
atgcaagagcctagaaaagccctgagtgataag

SEQ ID NO: 909670 - DNA, 33 bp, Homo sapien
atgcaagagcctagaagagccctgagtgataag

SEQ ID NO: 909671 - DNA, 33 bp, Homo sapien
ctcctgttggaggacacagtctgttgcaatagg

SEQ ID NO: 909672 - DNA, 33 bp, Homo sapien
ctcctgttggaggacatagtctgttgcaatagg

SEQ ID NO: 909673 - DNA, 33 bp, Homo sapien
cattatcatcatctgcaagtttagatggggcat

SEQ ID NO: 909674 - DNA, 33 bp, Homo sapien
cattatcatcatctgccagtttagatggggcat

SEQ ID NO: 909675 - DNA, 33 bp, Homo sapien
ttatttaatactaaaaggtgcaacatgggattg

SEQ ID NO: 909676 - DNA, 33 bp, Homo sapien
ttatttaatactaaaatgtgcaacatgggattg

SEQ ID NO: 909677 - DNA, 33 bp, Homo sapien
caattagaaatgaaccacaaagggacacatcag

SEQ ID NO: 909678 - DNA, 33 bp, Homo sapien
caattagaaatgaaccgcaaagggacacatcag

SEQ ID NO: 909679 - DNA, 33 bp, Homo sapien
ccctgtgaaattcgccaagctggccccatgtca

SEQ ID NO: 909680 - DNA, 33 bp, Homo sapien
ccctgtgaaattcgccgagctggccccatgtca

SEQ ID NO: 909681 - DNA, 33 bp, Homo sapien
ttttccatcccacaaaagttttgattaaaccca

SEQ ID NO: 909682 - DNA, 33 bp, Homo sapien
ttttccatcccacaaacgttttgattaaaccca

SEQ ID NO: 909683 - DNA, 33 bp, Homo sapien
aaaagttagtgctttgaagtcctaagtcatagg

SEQ ID NO: 909684 - DNA, 33 bp, Homo sapien
aaaagttagtgctttgtagtcctaagtcatagg

SEQ ID NO: 909685 - DNA, 33 bp, Homo sapien
aatatgaaaatggtgaaaataacgttgatctct

SEQ ID NO: 909686 - DNA, 33 bp, Homo sapien
aatatgaaaatggtgacaataacgttgatctct

SEQ ID NO: 909687 - DNA, 33 bp, Homo sapien
ttttgggtatgtgacaagggaaagcctcagaag

SEQ ID NO: 909688 - DNA, 33 bp, Homo sapien
ttttgggtatgtgacaggggaaagcctcagaag

SEQ ID NO: 909689 - DNA, 33 bp, Homo sapien
acgtgcactgagtgccagctgtgtgtaagatac

SEQ ID NO: 909690 - DNA, 33 bp, Homo sapien
acgtgcactgagtgccggctgtgtgtaagatac

SEQ ID NO: 909691 - DNA, 33 bp, Homo sapien
gccagataggatgccaccataagtcaaggggca

SEQ ID NO: 909692 - DNA, 33 bp, Homo sapien
gccagataggatgccatcataagtcaaggggca

SEQ ID NO: 909693 - DNA, 33 bp, Homo sapien
gtcttcatttattgaacgtgcttaactcaggcc

SEQ ID NO: 909694 - DNA, 33 bp, Homo sapien
gtcttcatttattgaatgtgcttaactcaggcc

SEQ ID NO: 909695 - DNA, 33 bp, Homo sapien
ctgaccctgtaataaaataactctttggagtct

SEQ ID NO: 909696 - DNA, 33 bp, Homo sapien
ctgaccctgtaataaagtaactctttggagtct

SEQ ID NO: 909697 - DNA, 33 bp, Homo sapien
gatcatttcccagggacgtcgcagagcacttgc

SEQ ID NO: 909698 - DNA, 33 bp, Homo sapien
gatcatttcccagggatgtcgcagagcacttgc

SEQ ID NO: 909699 - DNA, 33 bp, Homo sapien
agaggccgaccgtgaccggaaggacaaagtagt

SEQ ID NO: 909700 - DNA, 33 bp, Homo sapien
agaggccgaccgtgactggaaggacaaagtagt

SEQ ID NO: 909701 - DNA, 33 bp, Homo sapien
gcctagtagtcaagcacagttctaccctccagc

SEQ ID NO: 909702 - DNA, 33 bp, Homo sapien
gcctagtagtcaagcatagttctaccctccagc

SEQ ID NO: 909703 - DNA, 33 bp, Homo sapien
agaaacctgcagggacgccatgctgccagcctt

SEQ ID NO: 909704 - DNA, 33 bp, Homo sapien
agaaacctgcagggactccatgctgccagcctt

SEQ ID NO: 909705 - DNA, 33 bp, Homo sapien
taaaaaatgaggaaaactgtgcctggtagggga

SEQ ID NO: 909706 - DNA, 33 bp, Homo sapien
taaaaaatgaggaaaagtgtgcctggtagggga

SEQ ID NO: 909707 - DNA, 33 bp, Homo sapien
aaggaaggaaccaaaactcatgtcagcagttag

SEQ ID NO: 909708 - DNA, 33 bp, Homo sapien
aaggaaggaaccaaaagtcatgtcagcagttag

SEQ ID NO: 909709 - DNA, 33 bp, Homo sapien
gtgctggggctccacgaagattgttgtggaata

SEQ ID NO: 909710 - DNA, 33 bp, Homo sapien
gtgctggggctccacggagattgttgtggaata

SEQ ID NO: 909711 - DNA, 33 bp, Homo sapien
cagcatttgtgtgtaacctacagacatcctccc

SEQ ID NO: 909712 - DNA, 33 bp, Homo sapien
cagcatttgtgtgtaatctacagacatcctccc

SEQ ID NO: 909713 - DNA, 33 bp, Homo sapien
tctgaataaaaggtcaccaccatttgtatttta

SEQ ID NO: 909714 - DNA, 33 bp, Homo sapien
tctgaataaaaggtcatcaccatttgtatttta

SEQ ID NO: 909715 - DNA, 33 bp, Homo sapien
ctcattgcttgcatccccctggttagcagtggc

SEQ ID NO: 909716 - DNA, 33 bp, Homo sapien
ctcattgcttgcatccgcctggttagcagtggc

SEQ ID NO: 909717 - DNA, 33 bp, Homo sapien
ttgggtgagcgcctcacgaatgactcggcagga

SEQ ID NO: 909718 - DNA, 33 bp, Homo sapien
ttgggtgagcgcctcatgaatgactcggcagga

SEQ ID NO: 909719 - DNA, 33 bp, Homo sapien
agctgtgtgatgtgaacgtgctgggtaagtcat

SEQ ID NO: 909720 - DNA, 33 bp, Homo sapien
agctgtgtgatgtgaatgtgctgggtaagtcat

SEQ ID NO: 909721 - DNA, 33 bp, Homo sapien
gagctgctttgggaacagtacttgctgggacag

SEQ ID NO: 909722 - DNA, 33 bp, Homo sapien
gagctgctttgggaacggtacttgctgggacag

SEQ ID NO: 909723 - DNA, 33 bp, Homo sapien
ttccttccaatgttaaacttgtattctgtgtat

SEQ ID NO: 909724 - DNA, 33 bp, Homo sapien
ttccttccaatgttaagcttgtattctgtgtat

SEQ ID NO: 909725 - DNA, 33 bp, Homo sapien
gggcagtatgacctgacatttgcccatgtttgc

SEQ ID NO: 909726 - DNA, 33 bp, Homo sapien
gggcagtatgacctgatatttgcccatgtttgc

SEQ ID NO: 909727 - DNA, 33 bp, Homo sapien
gaatatgacagagccaagttaatgtaaatatta

SEQ ID NO: 909728 - DNA, 33 bp, Homo sapien
gaatatgacagagccacgttaatgtaaatatta

SEQ ID NO: 909729 - DNA, 33 bp, Homo sapien
tgccaagtcctacagactccaacttctaccgtg

SEQ ID NO: 909730 - DNA, 33 bp, Homo sapien
tgccaagtcctacagattccaacttctaccgtg

SEQ ID NO: 909731 - DNA, 33 bp, Homo sapien
tggtactctgaagaaacaaaacctgggcttgcc

SEQ ID NO: 909732 - DNA, 33 bp, Homo sapien
tggtactctgaagaaataaaacctgggcttgcc

SEQ ID NO: 909733 - DNA, 33 bp, Homo sapien
taggaacaacagactacgccgtatcacttaggc

SEQ ID NO: 909734 - DNA, 33 bp, Homo sapien
taggaacaacagactatgccgtatcacttaggc

SEQ ID NO: 909735 - DNA, 33 bp, Homo sapien
attaaggagatctttacgtttttctagacacag

SEQ ID NO: 909736 - DNA, 33 bp, Homo sapien
attaaggagatctttatgtttttctagacacag

SEQ ID NO: 909737 - DNA, 33 bp, Homo sapien
ccttcaaaacgcaggcgctaagccacatccatg

SEQ ID NO: 909738 - DNA, 33 bp, Homo sapien
ccttcaaaacgcaggctctaagccacatccatg

SEQ ID NO: 909739 - DNA, 33 bp, Homo sapien
ttgttcatatcttgccactaggaagttttccat

SEQ ID NO: 909740 - DNA, 33 bp, Homo sapien
ttgttcatatcttgccgctaggaagttttccat

SEQ ID NO: 909741 - DNA, 33 bp, Homo sapien
tcattgagctttcctacagaaggtcacacctct

SEQ ID NO: 909742 - DNA, 33 bp, Homo sapien
tcattgagctttcctatagaaggtcacacctct

SEQ ID NO: 909743 - DNA, 33 bp, Homo sapien
tgcctggatcagcaaccggcacatagtaagtgc

SEQ ID NO: 909744 - DNA, 33 bp, Homo sapien
tgcctggatcagcaactggcacatagtaagtgc

SEQ ID NO: 909745 - DNA, 33 bp, Homo sapien
gtagggtactgatgggaaaatgaggtggtcctg

SEQ ID NO: 909746 - DNA, 33 bp, Homo sapien
gtagggtactgatgggtaaatgaggtggtcctg

SEQ ID NO: 909747 - DNA, 33 bp, Homo sapien
gctgggagcaataggcaattgtaagggtggacg

SEQ ID NO: 909748 - DNA, 33 bp, Homo sapien
gctgggagcaataggcgattgtaagggtggacg

SEQ ID NO: 909749 - DNA, 33 bp, Homo sapien
gcaattctctgggaaacattgtgcaggctgtga

SEQ ID NO: 909750 - DNA, 33 bp, Homo sapien
gcaattctctgggaaagattgtgcaggctgtga

SEQ ID NO: 909751 - DNA, 33 bp, Homo sapien
tttgtttgaatgcaaacgaaactacagcccagg

SEQ ID NO: 909752 - DNA, 33 bp, Homo sapien
tttgtttgaatgcaaaggaaactacagcccagg

SEQ ID NO: 909753 - DNA, 33 bp, Homo sapien
ttttatttctcaggaacgcatttcattagctct

SEQ ID NO: 909754 - DNA, 33 bp, Homo sapien
ttttatttctcaggaatgcatttcattagctct

SEQ ID NO: 909755 - DNA, 33 bp, Homo sapien
agtgttttctaggctgaagttagttatgtcagg

SEQ ID NO: 909756 - DNA, 33 bp, Homo sapien
agtgttttctaggctggagttagttatgtcagg

SEQ ID NO: 909757 - DNA, 33 bp, Homo sapien
gaaacagggtaaatcacgaaatgccaggcagag

SEQ ID NO: 909758 - DNA, 33 bp, Homo sapien
gaaacagggtaaatcatgaaatgccaggcagag

SEQ ID NO: 909759 - DNA, 33 bp, Homo sapien
aaagttgtttccacagactcaacaaaaatggag

SEQ ID NO: 909760 - DNA, 33 bp, Homo sapien
aaagttgtttccacaggctcaacaaaaatggag

SEQ ID NO: 909761 - DNA, 33 bp, Homo sapien
atagtgacaaataaataaaagtgaaaggacttc

SEQ ID NO: 909762 - DNA, 33 bp, Homo sapien
atagtgacaaataaatgaaagtgaaaggacttc

SEQ ID NO: 909763 - DNA, 33 bp, Homo sapien
ttcagtttgtagtttacaggagttattttgcag

SEQ ID NO: 909764 - DNA, 33 bp, Homo sapien
ttcagtttgtagtttataggagttattttgcag

SEQ ID NO: 909765 - DNA, 33 bp, Homo sapien
ccctccagccttcagacgcaggaacgggaatct

SEQ ID NO: 909766 - DNA, 33 bp, Homo sapien
ccctccagccttcagatgcaggaacgggaatct

SEQ ID NO: 909767 - DNA, 33 bp, Homo sapien
atgtgaaactgctccacgaaccccaaagaatta

SEQ ID NO: 909768 - DNA, 33 bp, Homo sapien
atgtgaaactgctccatgaaccccaaagaatta

SEQ ID NO: 909769 - DNA, 33 bp, Homo sapien
caataccgaacttatgccaggcactatttctca

SEQ ID NO: 909770 - DNA, 33 bp, Homo sapien
caataccgaacttatgtcaggcactatttctca

SEQ ID NO: 909771 - DNA, 33 bp, Homo sapien
aagtaccttctatccaaacacacaaaatctgca

SEQ ID NO: 909772 - DNA, 33 bp, Homo sapien
aagtaccttctatccatacacacaaaatctgca

SEQ ID NO: 909773 - DNA, 33 bp, Homo sapien
caccatttaattcctcaaatttttgaccatgat

SEQ ID NO: 909774 - DNA, 33 bp, Homo sapien
caccatttaattcctcgaatttttgaccatgat

SEQ ID NO: 909775 - DNA, 33 bp, Homo sapien
taatgataaagtcatcaatttattaagatacta

SEQ ID NO: 909776 - DNA, 33 bp, Homo sapien
taatgataaagtcatcgatttattaagatacta

SEQ ID NO: 909777 - DNA, 33 bp, Homo sapien
ttagatttatttggtccatggtgttgttcaagt

SEQ ID NO: 909778 - DNA, 33 bp, Homo sapien
ttagatttatttggtctatggtgttgttcaagt

SEQ ID NO: 909779 - DNA, 33 bp, Homo sapien
gcttacataaaaacaaaatcatggagaaaatct

SEQ ID NO: 909780 - DNA, 33 bp, Homo sapien
gcttacataaaaacaatatcatggagaaaatct

SEQ ID NO: 909781 - DNA, 33 bp, Homo sapien
cccctttcaaagacagccaggaggcaacaggca

SEQ ID NO: 909782 - DNA, 33 bp, Homo sapien
cccctttcaaagacagtcaggaggcaacaggca

SEQ ID NO: 909783 - DNA, 33 bp, Homo sapien
atttaagtatttcggcagaggtaggcccctggc

SEQ ID NO: 909784 - DNA, 33 bp, Homo sapien
atttaagtatttcggcggaggtaggcccctggc

SEQ ID NO: 909785 - DNA, 33 bp, Homo sapien
gtagtttggtaaggccaccgtaacacagactgt

SEQ ID NO: 909786 - DNA, 33 bp, Homo sapien
gtagtttggtaaggcctccgtaacacagactgt

SEQ ID NO: 909787 - DNA, 33 bp, Homo sapien
ggactaatgatagaagcccaaatacaatcaggt

SEQ ID NO: 909788 - DNA, 33 bp, Homo sapien
ggactaatgatagaagtccaaatacaatcaggt

SEQ ID NO: 909789 - DNA, 33 bp, Homo sapien
gttaaggaagaaacaaatatctggggaaaacac

SEQ ID NO: 909790 - DNA, 33 bp, Homo sapien
gttaaggaagaaacaagtatctggggaaaacac

SEQ ID NO: 909791 - DNA, 33 bp, Homo sapien
cctagtgcataagctccaaaacaatggcttctc

SEQ ID NO: 909792 - DNA, 33 bp, Homo sapien
cctagtgcataagctctaaaacaatggcttctc

SEQ ID NO: 909793 - DNA, 33 bp, Homo sapien
caggaagcaatagagaagctgggaaacaactgg

SEQ ID NO: 909794 - DNA, 33 bp, Homo sapien
caggaagcaatagagatgctgggaaacaactgg

SEQ ID NO: 909795 - DNA, 33 bp, Homo sapien
taggttttttataggccgcacacaagttgtgtc

SEQ ID NO: 909796 - DNA, 33 bp, Homo sapien
taggttttttataggctgcacacaagttgtgtc

SEQ ID NO: 909797 - DNA, 33 bp, Homo sapien
ctgagaatctggtggacaagaagccacagctca

SEQ ID NO: 909798 - DNA, 33 bp, Homo sapien
ctgagaatctggtggataagaagccacagctca

SEQ ID NO: 909799 - DNA, 33 bp, Homo sapien
gtaaatccttgaggaacggctgactatgtaaat

SEQ ID NO: 909800 - DNA, 33 bp, Homo sapien
gtaaatccttgaggaatggctgactatgtaaat

SEQ ID NO: 909801 - DNA, 33 bp, Homo sapien
aagcgccaaggacctacggagggtgggagccag

SEQ ID NO: 909802 - DNA, 33 bp, Homo sapien
aagcgccaaggacctatggagggtgggagccag

SEQ ID NO: 909803 - DNA, 33 bp, Homo sapien
ctcacagcaaagatcaatgagatgccaaatgtc

SEQ ID NO: 909804 - DNA, 33 bp, Homo sapien
ctcacagcaaagatcagtgagatgccaaatgtc

SEQ ID NO: 909805 - DNA, 33 bp, Homo sapien
cctgcagaagttcctaccatgatgcctagatct

SEQ ID NO: 909806 - DNA, 33 bp, Homo sapien
cctgcagaagttcctatcatgatgcctagatct

SEQ ID NO: 909807 - DNA, 33 bp, Homo sapien
tagggagggaggataccaagccattcatgagag

SEQ ID NO: 909808 - DNA, 33 bp, Homo sapien
tagggagggaggatactaagccattcatgagag

SEQ ID NO: 909809 - DNA, 33 bp, Homo sapien
tcatgggagaaggcaaatggggagtaagtatgt

SEQ ID NO: 909810 - DNA, 33 bp, Homo sapien
tcatgggagaaggcaactggggagtaagtatgt

SEQ ID NO: 909811 - DNA, 33 bp, Homo sapien
aaagtttatcccccaaataactggaaggattag

SEQ ID NO: 909812 - DNA, 33 bp, Homo sapien
aaagtttatcccccaactaactggaaggattag

SEQ ID NO: 909813 - DNA, 33 bp, Homo sapien
acgatgacatgtttacaaataaaagtcaggata

SEQ ID NO: 909814 - DNA, 33 bp, Homo sapien
acgatgacatgtttacgaataaaagtcaggata

SEQ ID NO: 909815 - DNA, 33 bp, Homo sapien
cctccacttacaaaaccatcagtggggcccaac

SEQ ID NO: 909816 - DNA, 33 bp, Homo sapien
cctccacttacaaaactatcagtggggcccaac

SEQ ID NO: 909817 - DNA, 33 bp, Homo sapien
cctctttttctagggccgagtagtccacatcct

SEQ ID NO: 909818 - DNA, 33 bp, Homo sapien
cctctttttctagggctgagtagtccacatcct

SEQ ID NO: 909819 - DNA, 33 bp, Homo sapien
ctgctgaacgtgttccacttggcaccaacacca

SEQ ID NO: 909820 - DNA, 33 bp, Homo sapien
ctgctgaacgtgttccgcttggcaccaacacca

SEQ ID NO: 909821 - DNA, 33 bp, Homo sapien
ctggaaaaaggccaccaaaaataaattcagtta

SEQ ID NO: 909822 - DNA, 33 bp, Homo sapien
ctggaaaaaggccaccgaaaataaattcagtta

SEQ ID NO: 909823 - DNA, 33 bp, Homo sapien
actaggcttagcctaacaaagcccgcagtggac

SEQ ID NO: 909824 - DNA, 33 bp, Homo sapien
actaggcttagcctaataaagcccgcagtggac

SEQ ID NO: 909825 - DNA, 33 bp, Homo sapien
atctgttctgtttccccgaactttgaagatagt

SEQ ID NO: 909826 - DNA, 33 bp, Homo sapien
atctgttctgtttccctgaactttgaagatagt

SEQ ID NO: 909827 - DNA, 33 bp, Homo sapien
ctgtctgctattcctacactcttcagagttctc

SEQ ID NO: 909828 - DNA, 33 bp, Homo sapien
ctgtctgctattcctatactcttcagagttctc

SEQ ID NO: 909829 - DNA, 33 bp, Homo sapien
aggtacacatagttaccgatacataggtgaata

SEQ ID NO: 909830 - DNA, 33 bp, Homo sapien
aggtacacatagttactgatacataggtgaata

SEQ ID NO: 909831 - DNA, 33 bp, Homo sapien
gagacccaggctatgacagatgacaattttcaa

SEQ ID NO: 909832 - DNA, 33 bp, Homo sapien
gagacccaggctatgatagatgacaattttcaa

SEQ ID NO: 909833 - DNA, 33 bp, Homo sapien
gccctcctgtgcccaacttacgaccagacacct

SEQ ID NO: 909834 - DNA, 33 bp, Homo sapien
gccctcctgtgcccaatttacgaccagacacct

SEQ ID NO: 909835 - DNA, 33 bp, Homo sapien
ccctacaactgaccaacgaactggtgagtgaac

SEQ ID NO: 909836 - DNA, 33 bp, Homo sapien
ccctacaactgaccaatgaactggtgagtgaac

SEQ ID NO: 909837 - DNA, 33 bp, Homo sapien
aattcccagtggaagcgcttgctgtagaaagat

SEQ ID NO: 909838 - DNA, 33 bp, Homo sapien
aattcccagtggaagctcttgctgtagaaagat

SEQ ID NO: 909839 - DNA, 33 bp, Homo sapien
tctgctgtggcatgaaagatttcagttagatca

SEQ ID NO: 909840 - DNA, 33 bp, Homo sapien
tctgctgtggcatgaaggatttcagttagatca

SEQ ID NO: 909841 - DNA, 33 bp, Homo sapien
cttttctgccatgtccactcatcggctactggt

SEQ ID NO: 909842 - DNA, 33 bp, Homo sapien
cttttctgccatgtccgctcatcggctactggt

SEQ ID NO: 909843 - DNA, 33 bp, Homo sapien
atacatcttcttcatactataaactacagaaaa

SEQ ID NO: 909844 - DNA, 33 bp, Homo sapien
atacatcttcttcatagtataaactacagaaaa

SEQ ID NO: 909845 - DNA, 33 bp, Homo sapien
agagagctttagtctacacttattttctgtagt

SEQ ID NO: 909846 - DNA, 33 bp, Homo sapien
agagagctttagtctatacttattttctgtagt

SEQ ID NO: 909847 - DNA, 33 bp, Homo sapien
gcatgcctgaacaactcaggacttcatatgcca

SEQ ID NO: 909848 - DNA, 33 bp, Homo sapien
gcatgcctgaacaacttaggacttcatatgcca

SEQ ID NO: 909849 - DNA, 33 bp, Homo sapien
gccctagaactcaaaacgtgaatagaaggaaga

SEQ ID NO: 909850 - DNA, 33 bp, Homo sapien
gccctagaactcaaaatgtgaatagaaggaaga

SEQ ID NO: 909851 - DNA, 33 bp, Homo sapien
caggacagaaagtgtgaaaagacagcacaatgc

SEQ ID NO: 909852 - DNA, 33 bp, Homo sapien
caggacagaaagtgtggaaagacagcacaatgc

SEQ ID NO: 909853 - DNA, 33 bp, Homo sapien
ttctcctcacaggccacgtactgttttcctgat

SEQ ID NO: 909854 - DNA, 33 bp, Homo sapien
ttctcctcacaggccatgtactgttttcctgat

SEQ ID NO: 909855 - DNA, 33 bp, Homo sapien
ggtgtggggtggagaaagtgctagtagcccacc

SEQ ID NO: 909856 - DNA, 33 bp, Homo sapien
ggtgtggggtggagaaggtgctagtagcccacc

SEQ ID NO: 909857 - DNA, 33 bp, Homo sapien
aattacgatattcctacacacggagcttcccct

SEQ ID NO: 909858 - DNA, 33 bp, Homo sapien
aattacgatattcctatacacggagcttcccct

SEQ ID NO: 909859 - DNA, 33 bp, Homo sapien
atccttatatttagcacctggcaggtaatataa

SEQ ID NO: 909860 - DNA, 33 bp, Homo sapien
atccttatatttagcatctggcaggtaatataa

SEQ ID NO: 909861 - DNA, 33 bp, Homo sapien
ccatcagagcacttacacggactagaggctttt

SEQ ID NO: 909862 - DNA, 33 bp, Homo sapien
ccatcagagcacttacgcggactagaggctttt

SEQ ID NO: 909863 - DNA, 33 bp, Homo sapien
taaataatttgagtaacgcacttagcatggtac

SEQ ID NO: 909864 - DNA, 33 bp, Homo sapien
taaataatttgagtaatgcacttagcatggtac

SEQ ID NO: 909865 - DNA, 33 bp, Homo sapien
acacaggcactgcccaatacatagccactagct

SEQ ID NO: 909866 - DNA, 33 bp, Homo sapien
acacaggcactgcccagtacatagccactagct

SEQ ID NO: 909867 - DNA, 33 bp, Homo sapien
ataattcccaataataaacagtgttggcaaagg

SEQ ID NO: 909868 - DNA, 33 bp, Homo sapien
ataattcccaataatacacagtgttggcaaagg

SEQ ID NO: 909869 - DNA, 33 bp, Homo sapien
aaagccccatcacaccccaagtatgtgcaggct

SEQ ID NO: 909870 - DNA, 33 bp, Homo sapien
aaagccccatcacaccgcaagtatgtgcaggct

SEQ ID NO: 909871 - DNA, 33 bp, Homo sapien
tgtgttctccccgaaacttctctctgtcctgtg

SEQ ID NO: 909872 - DNA, 33 bp, Homo sapien
tgtgttctccccgaaagttctctctgtcctgtg

SEQ ID NO: 909873 - DNA, 33 bp, Homo sapien
cagcagcaagcaaaaccgttgtcttcactcagc

SEQ ID NO: 909874 - DNA, 33 bp, Homo sapien
cagcagcaagcaaaactgttgtcttcactcagc

SEQ ID NO: 909875 - DNA, 33 bp, Homo sapien
ccaaggctgaaaataccgatactcaacaaacag

SEQ ID NO: 909876 - DNA, 33 bp, Homo sapien
ccaaggctgaaaatactgatactcaacaaacag

SEQ ID NO: 909877 - DNA, 33 bp, Homo sapien
cgtcagaagcaccgtcacgttggaaaagaatga

SEQ ID NO: 909878 - DNA, 33 bp, Homo sapien
cgtcagaagcaccgtcgcgttggaaaagaatga

SEQ ID NO: 909879 - DNA, 33 bp, Homo sapien
ggcatcaagaacactcactaagttcccaaaggg

SEQ ID NO: 909880 - DNA, 33 bp, Homo sapien
ggcatcaagaacactcgctaagttcccaaaggg

SEQ ID NO: 909881 - DNA, 33 bp, Homo sapien
cataaactgtgttagaaagtaataagttcttct

SEQ ID NO: 909882 - DNA, 33 bp, Homo sapien
cataaactgtgttagacagtaataagttcttct

SEQ ID NO: 909883 - DNA, 33 bp, Homo sapien
acatcaacttaccgcaagtctgagactatctcc

SEQ ID NO: 909884 - DNA, 33 bp, Homo sapien
acatcaacttaccgcaggtctgagactatctcc

SEQ ID NO: 909885 - DNA, 33 bp, Homo sapien
gagtcggtcgtcatcaaggaaagaacactgtct

SEQ ID NO: 909886 - DNA, 33 bp, Homo sapien
gagtcggtcgtcatcagggaaagaacactgtct

SEQ ID NO: 909887 - DNA, 33 bp, Homo sapien
acgagttgtttttatagcagtgtcattgttcag

SEQ ID NO: 909888 - DNA, 33 bp, Homo sapien
acgagttgtttttatatcagtgtcattgttcag

SEQ ID NO: 909889 - DNA, 33 bp, Homo sapien
taattaatttttgttaactacagttgctctact

SEQ ID NO: 909890 - DNA, 33 bp, Homo sapien
taattaatttttgttacctacagttgctctact

SEQ ID NO: 909891 - DNA, 33 bp, Homo sapien
agtttttttcatccgacggacaccatgatgttg

SEQ ID NO: 909892 - DNA, 33 bp, Homo sapien
agtttttttcatccgatggacaccatgatgttg

SEQ ID NO: 909893 - DNA, 33 bp, Homo sapien
cttacgatattagaccactttacttaccatcct

SEQ ID NO: 909894 - DNA, 33 bp, Homo sapien
cttacgatattagacctctttacttaccatcct

SEQ ID NO: 909895 - DNA, 33 bp, Homo sapien
gcctgggctggacctacgtgttctaatttgtga

SEQ ID NO: 909896 - DNA, 33 bp, Homo sapien
gcctgggctggacctatgtgttctaatttgtga

SEQ ID NO: 909897 - DNA, 33 bp, Homo sapien
ttctcacatgacctgacgagggacagtggctgt

SEQ ID NO: 909898 - DNA, 33 bp, Homo sapien
ttctcacatgacctgatgagggacagtggctgt

SEQ ID NO: 909899 - DNA, 33 bp, Homo sapien
caactcttaggataacaaatcagggcatgaaga

SEQ ID NO: 909900 - DNA, 33 bp, Homo sapien
caactcttaggataaccaatcagggcatgaaga

SEQ ID NO: 909901 - DNA, 33 bp, Homo sapien
agactgtgcttgtcagcagaattcagacagaag

SEQ ID NO: 909902 - DNA, 33 bp, Homo sapien
agactgtgcttgtcaggagaattcagacagaag

SEQ ID NO: 909903 - DNA, 33 bp, Homo sapien
tcggataatggctccaactgtatccatcttact

SEQ ID NO: 909904 - DNA, 33 bp, Homo sapien
tcggataatggctccagctgtatccatcttact

SEQ ID NO: 909905 - DNA, 33 bp, Homo sapien
ccacatacagtccttgaaaagaagaggagaaaa

SEQ ID NO: 909906 - DNA, 33 bp, Homo sapien
ccacatacagtccttgcaaagaagaggagaaaa

SEQ ID NO: 909907 - DNA, 33 bp, Homo sapien
gtcgaatgtccatgaaagcggtcaatgagcaga

SEQ ID NO: 909908 - DNA, 33 bp, Homo sapien
gtcgaatgtccatgaaggcggtcaatgagcaga

SEQ ID NO: 909909 - DNA, 33 bp, Homo sapien
cacaatccctccaatacgctgaggctttcacac

SEQ ID NO: 909910 - DNA, 33 bp, Homo sapien
cacaatccctccaataggctgaggctttcacac

SEQ ID NO: 909911 - DNA, 33 bp, Homo sapien
attgttatgacatctcaattatttaaaagcatt

SEQ ID NO: 909912 - DNA, 33 bp, Homo sapien
attgttatgacatctcgattatttaaaagcatt

SEQ ID NO: 909913 - DNA, 33 bp, Homo sapien
gaactagaaaggaaaaatagtcaagaacataga

SEQ ID NO: 909914 - DNA, 33 bp, Homo sapien
gaactagaaaggaaaagtagtcaagaacataga

SEQ ID NO: 909915 - DNA, 33 bp, Homo sapien
agaatcgcttgaacccaggaggcgaaggttgca

SEQ ID NO: 909916 - DNA, 33 bp, Homo sapien
agaatcgcttgaacccgggaggcgaaggttgca

SEQ ID NO: 909917 - DNA, 33 bp, Homo sapien; identical to SEQ ID NO: 909915

SEQ ID NO: 909918 - DNA, 33 bp, Homo sapien; identical to SEQ ID NO: 909916

SEQ ID NO: 909919 - DNA, 33 bp, Homo sapien; identical to SEQ ID NO: 909915

SEQ ID NO: 909920 - DNA, 33 bp, Homo sapien; identical to SEQ ID NO: 909916

SEQ ID NO: 909921 - DNA, 33 bp, Homo sapien
tttcaggtgcgtttagccatattgacatgctgg

SEQ ID NO: 909922 - DNA, 33 bp, Homo sapien
tttcaggtgcgtttagtcatattgacatgctgg

SEQ ID NO: 909923 - DNA, 33 bp, Homo sapien
aacaggacactagttgcaattaatgtgttttct

SEQ ID NO: 909924 - DNA, 33 bp, Homo sapien
aacaggacactagttgtaattaatgtgttttct

SEQ ID NO: 909925 - DNA, 33 bp, Homo sapien
atgtatcttttgcaatcaaccagtaataggaaa

SEQ ID NO: 909926 - DNA, 33 bp, Homo sapien
atgtatcttttgcaatgaaccagtaataggaaa

SEQ ID NO: 909927 - DNA, 33 bp, Homo sapien; identical to SEQ ID NO: 909925

SEQ ID NO: 909928 - DNA, 33 bp, Homo sapien; identical to SEQ ID NO: 909926

SEQ ID NO: 909929 - DNA, 33 bp, Homo sapien
agtcattgctaaattcaaagtcacctgcatttc

SEQ ID NO: 909930 - DNA, 33 bp, Homo sapien
agtcattgctaaattccaagtcacctgcatttc

SEQ ID NO: 909931 - DNA, 33 bp, Homo sapien
tatatgtgagaataaacgaattataaatcagta

SEQ ID NO: 909932 - DNA, 33 bp, Homo sapien
tatatgtgagaataaaggaattataaatcagta

SEQ ID NO: 909933 - DNA, 33 bp, Homo sapien
aagcaaaagttgcctaacaaattacttctcaga

SEQ ID NO: 909934 - DNA, 33 bp, Homo sapien
aagcaaaagttgcctagcaaattacttctcaga

SEQ ID NO: 909935 - DNA, 33 bp, Homo sapien
tggaggttgcattatacagtcaagattgattaa

SEQ ID NO: 909936 - DNA, 33 bp, Homo sapien
tggaggttgcattatatagtcaagattgattaa

SEQ ID NO: 909937 - DNA, 33 bp, Homo sapien
cttttagctatttcataaacaccacagagaaac

SEQ ID NO: 909938 - DNA, 33 bp, Homo sapien
cttttagctatttcatgaacaccacagagaaac

SEQ ID NO: 909939 - DNA, 33 bp, Homo sapien
agcaactctgggtaaggcaggataggctttgct

SEQ ID NO: 909940 - DNA, 33 bp, Homo sapien
agcaactctgggtaagtcaggataggctttgct

SEQ ID NO: 909941 - DNA, 33 bp, Homo sapien
gactcctgccttaaagaagcagctccctgactc

SEQ ID NO: 909942 - DNA, 33 bp, Homo sapien
gactcctgccttaaagcagcagctccctgactc

SEQ ID NO: 909943 - DNA, 33 bp, Homo sapien
ttcaccgctggaacacactccctgcccagatca

SEQ ID NO: 909944 - DNA, 33 bp, Homo sapien
ttcaccgctggaacacgctccctgcccagatca

SEQ ID NO: 909945 - DNA, 33 bp, Homo sapien
agagaccaaaggttaaacattcttccatgaaag

SEQ ID NO: 909946 - DNA, 33 bp, Homo sapien
agagaccaaaggttaagcattcttccatgaaag

SEQ ID NO: 909947 - DNA, 33 bp, Homo sapien
gtcctcggtaacagcaacgtgatgttctttgta

SEQ ID NO: 909948 - DNA, 33 bp, Homo sapien
gtcctcggtaacagcagcgtgatgttctttgta

SEQ ID NO: 909949 - DNA, 33 bp, Homo sapien
agtgcagtgacgtaatcatggctaactgcagcc

SEQ ID NO: 909950 - DNA, 33 bp, Homo sapien
agtgcagtgacgtaattatggctaactgcagcc

SEQ ID NO: 909951 - DNA, 33 bp, Homo sapien
aacgttgaacagatgacgaatagttgaagttgc

SEQ ID NO: 909952 - DNA, 33 bp, Homo sapien
aacgttgaacagatgaggaatagttgaagttgc

SEQ ID NO: 909953 - DNA, 33 bp, Homo sapien
agcacaaagagatgaactgcacaaacccacagc

SEQ ID NO: 909954 - DNA, 33 bp, Homo sapien
agcacaaagagatgaattgcacaaacccacagc

SEQ ID NO: 909955 - DNA, 33 bp, Homo sapien
atggagagcagagatgaaccatcagctgagact

SEQ ID NO: 909956 - DNA, 33 bp, Homo sapien
atggagagcagagatgcaccatcagctgagact

SEQ ID NO: 909957 - DNA, 33 bp, Homo sapien
atgcagattctcagaccctttcccaattctatt

SEQ ID NO: 909958 - DNA, 33 bp, Homo sapien
atgcagattctcagactctttcccaattctatt

SEQ ID NO: 909959 - DNA, 33 bp, Homo sapien
gagtatagtgaagtaacggaagaggttacagaa

SEQ ID NO: 909960 - DNA, 33 bp, Homo sapien
gagtatagtgaagtaatggaagaggttacagaa

SEQ ID NO: 909961 - DNA, 33 bp, Homo sapien
ttctgtccatgtataccaaatcttcacctccca

SEQ ID NO: 909962 - DNA, 33 bp, Homo sapien
ttctgtccatgtatactaaatcttcacctccca

SEQ ID NO: 909963 - DNA, 33 bp, Homo sapien
ctaactcagaagcagaaagctgttctcacttat

SEQ ID NO: 909964 - DNA, 33 bp, Homo sapien
ctaactcagaagcagatagctgttctcacttat

SEQ ID NO: 909965 - DNA, 33 bp, Homo sapien
aaaaaggaagagaaaaaaaggacagatccattc

SEQ ID NO: 909966 - DNA, 33 bp, Homo sapien
aaaaaggaagagaaaagaaggacagatccattc

SEQ ID NO: 909967 - DNA, 33 bp, Homo sapien
ataaaataaatagatacagcagtgagcacaatt

SEQ ID NO: 909968 - DNA, 33 bp, Homo sapien
ataaaataaatagatatagcagtgagcacaatt

SEQ ID NO: 909969 - DNA, 33 bp, Homo sapien
atgaaccatggcacccaaccgaccttgtgattt

SEQ ID NO: 909970 - DNA, 33 bp, Homo sapien
atgaaccatggcacccgaccgaccttgtgattt

SEQ ID NO: 909971 - DNA, 33 bp, Homo sapien
tctcctatggactaccccaaagagaataaccct

SEQ ID NO: 909972 - DNA, 33 bp, Homo sapien
tctcctatggactacctcaaagagaataaccct

SEQ ID NO: 909973 - DNA, 33 bp, Homo sapien
agaagggcagccatacagataaatgaaggtgct

SEQ ID NO: 909974 - DNA, 33 bp, Homo sapien
agaagggcagccatacggataaatgaaggtgct

SEQ ID NO: 909975 - DNA, 33 bp, Homo sapien
tgctgcagtgagacagaatgttttggggaagtt

SEQ ID NO: 909976 - DNA, 33 bp, Homo sapien
tgctgcagtgagacaggatgttttggggaagtt

SEQ ID NO: 909977 - DNA, 33 bp, Homo sapien
gtgaagttattcgtgcaaagagtaagggtcccc

SEQ ID NO: 909978 - DNA, 33 bp, Homo sapien
gtgaagttattcgtgcgaagagtaagggtcccc

SEQ ID NO: 909979 - DNA, 33 bp, Homo sapien
tgtaagctggtaaaagccagttccaacacaagc

SEQ ID NO: 909980 - DNA, 33 bp, Homo sapien
tgtaagctggtaaaagtcagttccaacacaagc

SEQ ID NO: 909981 - DNA, 33 bp, Homo sapien
gcctgacttcagttccaagtaggatttctttct

SEQ ID NO: 909982 - DNA, 33 bp, Homo sapien
gcctgacttcagttcccagtaggatttctttct

SEQ ID NO: 909983 - DNA, 33 bp, Homo sapien
gataatgtaaaaacaccccaagttctagtgtgt

SEQ ID NO: 909984 - DNA, 33 bp, Homo sapien
gataatgtaaaaacactccaagttctagtgtgt

SEQ ID NO: 909985 - DNA, 33 bp, Homo sapien
attgtccaggaatcacagaacttgttgaggggt

SEQ ID NO: 909986 - DNA, 33 bp, Homo sapien
attgtccaggaatcacggaacttgttgaggggt

SEQ ID NO: 909987 - DNA, 33 bp, Homo sapien
ctcgtaatccatgcaaacttctgatgatttggc

SEQ ID NO: 909988 - DNA, 33 bp, Homo sapien
ctcgtaatccatgcaaccttctgatgatttggc

SEQ ID NO: 909989 - DNA, 33 bp, Homo sapien
ctccatgcagcttgaacgattaaatagaaaaaa

SEQ ID NO: 909990 - DNA, 33 bp, Homo sapien
ctccatgcagcttgaatgattaaatagaaaaaa

SEQ ID NO: 909991 - DNA, 33 bp, Homo sapien
ccagcctggcaaaatccatgaaccctgagtttg

SEQ ID NO: 909992 - DNA, 33 bp, Homo sapien
ccagcctggcaaaatctatgaaccctgagtttg

SEQ ID NO: 909993 - DNA, 33 bp, Homo sapien
ctgtgattaaagcatacacaaggattgctagac

SEQ ID NO: 909994 - DNA, 33 bp, Homo sapien
ctgtgattaaagcatatacaaggattgctagac

SEQ ID NO: 909995 - DNA, 33 bp, Homo sapien
cctgtaacacttccacaaatagaggatggtgga

SEQ ID NO: 909996 - DNA, 33 bp, Homo sapien
cctgtaacacttccaccaatagaggatggtgga

SEQ ID NO: 909997 - DNA, 33 bp, Homo sapien
tctttctctctctctcaaacacatatacccaca

SEQ ID NO: 909998 - DNA, 33 bp, Homo sapien
tctttctctctctctcgaacacatatacccaca

SEQ ID NO: 909999 - DNA, 33 bp, Homo sapien
tctccgtggatcatcactctcctctaattatct

SEQ ID NO: 910000 - DNA, 33 bp, Homo sapien
tctccgtggatcatcagtctcctctaattatct

SEQ ID NO: 910001 - DNA, 33 bp, Homo sapien
agatgtgagaccactccaatgcaggatataaac

SEQ ID NO: 910002 - DNA, 33 bp, Homo sapien
agatgtgagaccactctaatgcaggatataaac

SEQ ID NO: 910003 - DNA, 33 bp, Homo sapien
aatactggcttcaacaatcaccatcatggcaga

SEQ ID NO: 910004 - DNA, 33 bp, Homo sapien
aatactggcttcaacagtcaccatcatggcaga

SEQ ID NO: 910005 - DNA, 33 bp, Homo sapien
acttcgtgttttgaaaagtgattatgtgtgaag

SEQ ID NO: 910006 - DNA, 33 bp, Homo sapien
acttcgtgttttgaaaggtgattatgtgtgaag

SEQ ID NO: 910007 - DNA, 33 bp, Homo sapien; identical to SEQ ID NO: 910005

SEQ ID NO: 910008 - DNA, 33 bp, Homo sapien; identical to SEQ ID NO: 910006

SEQ ID NO: 910009 - DNA, 33 bp, Homo sapien
ccatcctagtcagaacaaccaagctgtcagcat

SEQ ID NO: 910010 - DNA, 33 bp, Homo sapien
ccatcctagtcagaaccaccaagctgtcagcat

SEQ ID NO: 910011 - DNA, 33 bp, Homo sapien
tagtgcagtgtattgaacagctattgatcgctc

SEQ ID NO: 910012 - DNA, 33 bp, Homo sapien
tagtgcagtgtattgagcagctattgatcgctc

SEQ ID NO: 910013 - DNA, 33 bp, Homo sapien
ccagccgtcatgaagacctgttttgtgttctgc

SEQ ID NO: 910014 - DNA, 33 bp, Homo sapien
ccagccgtcatgaagatctgttttgtgttctgc

SEQ ID NO: 910015 - DNA, 33 bp, Homo sapien
aactgaaccgtaataaaatcttatacattaaaa

SEQ ID NO: 910016 - DNA, 33 bp, Homo sapien
aactgaaccgtaataacatcttatacattaaaa

SEQ ID NO: 910017 - DNA, 33 bp, Homo sapien
agcacttcaagaggccaagaagagaggatcact

SEQ ID NO: 910018 - DNA, 33 bp, Homo sapien
agcacttcaagaggccgagaagagaggatcact

SEQ ID NO: 910019 - DNA, 33 bp, Homo sapien
caatttcattctgaaaagaacagaagtgaaaca

SEQ ID NO: 910020 - DNA, 33 bp, Homo sapien
caatttcattctgaaaggaacagaagtgaaaca

SEQ ID NO: 910021 - DNA, 33 bp, Homo sapien
atggggaagaaggacaatcaggattactaagaa

SEQ ID NO: 910022 - DNA, 33 bp, Homo sapien
atggggaagaaggacagtcaggattactaagaa

SEQ ID NO: 910023 - DNA, 33 bp, Homo sapien
ctaagaactgttgaacaaaaacattctctgctc

SEQ ID NO: 910024 - DNA, 33 bp, Homo sapien
ctaagaactgttgaacgaaaacattctctgctc

SEQ ID NO: 910025 - DNA, 33 bp, Homo sapien
gtgtatatatcacctccctttccttgagaattt

SEQ ID NO: 910026 - DNA, 33 bp, Homo sapien
gtgtatatatcacctctctttccttgagaattt

SEQ ID NO: 910027 - DNA, 33 bp, Homo sapien
cattacacactctacgcccatgtttacatattt

SEQ ID NO: 910028 - DNA, 33 bp, Homo sapien
cattacacactctacgtccatgtttacatattt

SEQ ID NO: 910029 - DNA, 33 bp, Homo sapien
ataattaaaggaactgcaattgtgattcagctg

SEQ ID NO: 910030 - DNA, 33 bp, Homo sapien
ataattaaaggaactgtaattgtgattcagctg

SEQ ID NO: 910031 - DNA, 33 bp, Homo sapien
gaaactggagaaagacgaaatatcaggatgtta

SEQ ID NO: 910032 - DNA, 33 bp, Homo sapien
gaaactggagaaagactaaatatcaggatgtta

SEQ ID NO: 910033 - DNA, 33 bp, Homo sapien
tgtggcgcatggtgccaaatcaacaagataagt

SEQ ID NO: 910034 - DNA, 33 bp, Homo sapien
tgtggcgcatggtgccgaatcaacaagataagt

SEQ ID NO: 910035 - DNA, 33 bp, Homo sapien
tagaaaataagtccgggcattgtggctcacatc

SEQ ID NO: 910036 - DNA, 33 bp, Homo sapien
tagaaaataagtccggtcattgtggctcacatc

SEQ ID NO: 910037 - DNA, 33 bp, Homo sapien
tcgtgacctcactacacaaacttccttcatgtg

SEQ ID NO: 910038 - DNA, 33 bp, Homo sapien
tcgtgacctcactacagaaacttccttcatgtg

SEQ ID NO: 910039 - DNA, 33 bp, Homo sapien
agacatctggccgttaaccacattcctacgcag

SEQ ID NO: 910040 - DNA, 33 bp, Homo sapien
agacatctggccgttagccacattcctacgcag

SEQ ID NO: 910041 - DNA, 33 bp, Homo sapien
gtctttgaaaatcatcaagtatacactgtattt

SEQ ID NO: 910042 - DNA, 33 bp, Homo sapien
gtctttgaaaatcatcgagtatacactgtattt

SEQ ID NO: 910043 - DNA, 33 bp, Homo sapien
gacaatcaatttacaaaaggacttctcagtggc

SEQ ID NO: 910044 - DNA, 33 bp, Homo sapien
gacaatcaatttacaagaggacttctcagtggc

SEQ ID NO: 910045 - DNA, 33 bp, Homo sapien
ttccactgcacaagaacgacttcaaattgcacg

SEQ ID NO: 910046 - DNA, 33 bp, Homo sapien
ttccactgcacaagaatgacttcaaattgcacg

SEQ ID NO: 910047 - DNA, 33 bp, Homo sapien
ataagcaatgtttcttgaacactgtaaaatgac

SEQ ID NO: 910048 - DNA, 33 bp, Homo sapien
ataagcaatgtttctttaacactgtaaaatgac

SEQ ID NO: 910049 - DNA, 33 bp, Homo sapien
gagatgttaatgcctaaagaagccaggtagaga

SEQ ID NO: 910050 - DNA, 33 bp, Homo sapien
gagatgttaatgcctagagaagccaggtagaga

SEQ ID NO: 910051 - DNA, 33 bp, Homo sapien
ttgcctgagggctggcgctatccatagaagtgt

SEQ ID NO: 910052 - DNA, 33 bp, Homo sapien
ttgcctgagggctggctctatccatagaagtgt

SEQ ID NO: 910053 - DNA, 33 bp, Homo sapien
tttatttcctctagtcacctctgagttgggact

SEQ ID NO: 910054 - DNA, 33 bp, Homo sapien
tttatttcctctagtcgcctctgagttgggact

SEQ ID NO: 910055 - DNA, 33 bp, Homo sapien
aatgcccatctctatacgttgaatcaaggacct

SEQ ID NO: 910056 - DNA, 33 bp, Homo sapien
aatgcccatctctatatgttgaatcaaggacct

SEQ ID NO: 910057 - DNA, 33 bp, Homo sapien
ctgaggctgggcctataacagcttcaggagcat

SEQ ID NO: 910058 - DNA, 33 bp, Homo sapien
ctgaggctgggcctatgacagcttcaggagcat

SEQ ID NO: 910059 - DNA, 33 bp, Homo sapien
gacactgaagaatttgaagctgatgactttcca

SEQ ID NO: 910060 - DNA, 33 bp, Homo sapien
gacactgaagaatttggagctgatgactttcca

SEQ ID NO: 910061 - DNA, 33 bp, Homo sapien
gtaactgtcacttaccaaaatttcctaatgtca

SEQ ID NO: 910062 - DNA, 33 bp, Homo sapien
gtaactgtcacttaccgaaatttcctaatgtca

SEQ ID NO: 910063 - DNA, 33 bp, Homo sapien
cattttatatgcccaactgaagtgctaaatatt

SEQ ID NO: 910064 - DNA, 33 bp, Homo sapien
cattttatatgcccaattgaagtgctaaatatt

SEQ ID NO: 910065 - DNA, 33 bp, Homo sapien
gttctacacatacaatgagggtcctctctatct

SEQ ID NO: 910066 - DNA, 33 bp, Homo sapien
gttctacacatacaattagggtcctctctatct

SEQ ID NO: 910067 - DNA, 33 bp, Homo sapien
aaataagcttcgtccaatgaatgtaaattcaaa

SEQ ID NO: 910068 - DNA, 33 bp, Homo sapien
aaataagcttcgtccagtgaatgtaaattcaaa

SEQ ID NO: 910069 - DNA, 33 bp, Homo sapien
tgtgcttgaagatccacagaagcaatatcattt

SEQ ID NO: 910070 - DNA, 33 bp, Homo sapien
tgtgcttgaagatccatagaagcaatatcattt

SEQ ID NO: 910071 - DNA, 33 bp, Homo sapien
cagtggtggcttagagcattgaggcagtaaaga

SEQ ID NO: 910072 - DNA, 33 bp, Homo sapien
cagtggtggcttagagtattgaggcagtaaaga

SEQ ID NO: 910073 - DNA, 33 bp, Homo sapien
ctttttgggtggtatacagagtttcataacagg

SEQ ID NO: 910074 - DNA, 33 bp, Homo sapien
ctttttgggtggtatagagagtttcataacagg

SEQ ID NO: 910075 - DNA, 33 bp, Homo sapien
cacatcacttagctcacaggctcagagatatgt

SEQ ID NO: 910076 - DNA, 33 bp, Homo sapien
cacatcacttagctcataggctcagagatatgt

SEQ ID NO: 910077 - DNA, 33 bp, Homo sapien; identical to SEQ ID NO: 910075

SEQ ID NO: 910078 - DNA, 33 bp, Homo sapien; identical to SEQ ID NO: 910076

SEQ ID NO: 910079 - DNA, 33 bp, Homo sapien
atatctctgagcctataagctatgtgatttgcc

SEQ ID NO: 910080 - DNA, 33 bp, Homo sapien
atatctctgagcctatcagctatgtgatttgcc

SEQ ID NO: 910081 - DNA, 33 bp, Homo sapien
ccttctcaaaatcaaactttagttacaaaattg

SEQ ID NO: 910082 - DNA, 33 bp, Homo sapien
ccttctcaaaatcaaagtttagttacaaaattg

SEQ ID NO: 910083 - DNA, 33 bp, Homo sapien
cagacagaaaaatacacgttgaaacagataaga

SEQ ID NO: 910084 - DNA, 33 bp, Homo sapien
cagacagaaaaatacatgttgaaacagataaga

SEQ ID NO: 910085 - DNA, 33 bp, Homo sapien
ggaactctgaacactcagaagcattttttaata

SEQ ID NO: 910086 - DNA, 33 bp, Homo sapien
ggaactctgaacactccgaagcattttttaata

SEQ ID NO: 910087 - DNA, 33 bp, Homo sapien
gtaaactgtcaacccaacgattgaagaaaaagc

SEQ ID NO: 910088 - DNA, 33 bp, Homo sapien
gtaaactgtcaacccatcgattgaagaaaaagc

SEQ ID NO: 910089 - DNA, 33 bp, Homo sapien
tccagatttgacagcaaagacttcccctctaac

SEQ ID NO: 910090 - DNA, 33 bp, Homo sapien
tccagatttgacagcatagacttcccctctaac

SEQ ID NO: 910091 - DNA, 33 bp, Homo sapien; identical to SEQ ID NO: 910089

SEQ ID NO: 910092 - DNA, 33 bp, Homo sapien; identical to SEQ ID NO: 910090

SEQ ID NO: 910093 - DNA, 33 bp, Homo sapien
tattgatttctaattacgtagcttctactacat

SEQ ID NO: 910094 - DNA, 33 bp, Homo sapien
tattgatttctaattatgtagcttctactacat

SEQ ID NO: 910095 - DNA, 33 bp, Homo sapien
attgcttctggcttagaattattttgtgcaaat

SEQ ID NO: 910096 - DNA, 33 bp, Homo sapien
attgcttctggcttagcattattttgtgcaaat

SEQ ID NO: 910097 - DNA, 33 bp, Homo sapien; identical to SEQ ID NO: 910095

SEQ ID NO: 910098 - DNA, 33 bp, Homo sapien; identical to SEQ ID NO: 910096

SEQ ID NO: 910099 - DNA, 33 bp, Homo sapien
atatgagagtttttgacgtaataaattgttacc

SEQ ID NO: 910100 - DNA, 33 bp, Homo sapien
atatgagagtttttgatgtaataaattgttacc

SEQ ID NO: 910101 - DNA, 33 bp, Homo sapien
gcaagagggttcattcactgagaatctgtaaat

SEQ ID NO: 910102 - DNA, 33 bp, Homo sapien
gcaagagggttcattcgctgagaatctgtaaat

SEQ ID NO: 910103 - DNA, 33 bp, Homo sapien
aactcctggcctaaaaagatgctgcttctgcct

SEQ ID NO: 910104 - DNA, 33 bp, Homo sapien
aactcctggcctaaaatgatgctgcttctgcct

SEQ ID NO: 910105 - DNA, 33 bp, Homo sapien
ttcttggtgcaaaaataaccatgttacctgtgt

SEQ ID NO: 910106 - DNA, 33 bp, Homo sapien
ttcttggtgcaaaaatcaccatgttacctgtgt

SEQ ID NO: 910107 - DNA, 33 bp, Homo sapien
ggtgtttgttacaatcccaaaagtaggatcacg

SEQ ID NO: 910108 - DNA, 33 bp, Homo sapien
ggtgtttgttacaatctcaaaagtaggatcacg

SEQ ID NO: 910109 - DNA, 33 bp, Homo sapien
gtatgcaaactcagatcaaagtgaggattatca

SEQ ID NO: 910110 - DNA, 33 bp, Homo sapien
gtatgcaaactcagatgaaagtgaggattatca

SEQ ID NO: 910111 - DNA, 33 bp, Homo sapien
gtgacatcacttacccagcacccaggtgatagg

SEQ ID NO: 910112 - DNA, 33 bp, Homo sapien
gtgacatcacttacccggcacccaggtgatagg

SEQ ID NO: 910113 - DNA, 33 bp, Homo sapien; identical to SEQ ID NO: 910111

SEQ ID NO: 910114 - DNA, 33 bp, Homo sapien; identical to SEQ ID NO: 910112

SEQ ID NO: 910115 - DNA, 33 bp, Homo sapien; identical to SEQ ID NO: 910111

SEQ ID NO: 910116 - DNA, 33 bp, Homo sapien; identical to SEQ ID NO: 910112

SEQ ID NO: 910117 - DNA, 33 bp, Homo sapien
agaacatgaccacatcaatgggaaacaaaggca

SEQ ID NO: 910118 - DNA, 33 bp, Homo sapien
agaacatgaccacatcgatgggaaacaaaggca

SEQ ID NO: 910119 - DNA, 33 bp, Homo sapien; identical to SEQ ID NO: 910117

SEQ ID NO: 910120 - DNA, 33 bp, Homo sapien; identical to SEQ ID NO: 910118

SEQ ID NO: 910121 - DNA, 33 bp, Homo sapien
acacacagcttggttacctagtgatgttggtac

SEQ ID NO: 910122 - DNA, 33 bp, Homo sapien
acacacagcttggttatctagtgatgttggtac

SEQ ID NO: 910123 - DNA, 33 bp, Homo sapien
ctggtcaaagacttaccacattctttacatttc

SEQ ID NO: 910124 - DNA, 33 bp, Homo sapien
ctggtcaaagacttacgacattctttacatttc

SEQ ID NO: 910125 - DNA, 33 bp, Homo sapien
aaggaaataagcaaaactgctgaggtgatgaag

SEQ ID NO: 910126 - DNA, 33 bp, Homo sapien
aaggaaataagcaaaattgctgaggtgatgaag

SEQ ID NO: 910127 - DNA, 33 bp, Homo sapien
cattcttctcaagtacacattctcaggagaggc

SEQ ID NO: 910128 - DNA, 33 bp, Homo sapien
cattcttctcaagtacgcattctcaggagaggc

SEQ ID NO: 910129 - DNA, 33 bp, Homo sapien
ggtattgtggtcggaaagaaatgagatgacatg

SEQ ID NO: 910130 - DNA, 33 bp, Homo sapien
ggtattgtggtcggaaggaaatgagatgacatg

SEQ ID NO: 910131 - DNA, 33 bp, Homo sapien
ctgtaatgtgactttaccattttctcaacaaga

SEQ ID NO: 910132 - DNA, 33 bp, Homo sapien
ctgtaatgtgactttatcattttctcaacaaga

SEQ ID NO: 910133 - DNA, 33 bp, Homo sapien
tgtttcactggacaacactgataatacacagcc

SEQ ID NO: 910134 - DNA, 33 bp, Homo sapien
tgtttcactggacaaccctgataatacacagcc

SEQ ID NO: 910135 - DNA, 33 bp, Homo sapien
gactactctggatagcgaatgcaagtggaatca

SEQ ID NO: 910136 - DNA, 33 bp, Homo sapien
gactactctggatagctaatgcaagtggaatca

SEQ ID NO: 910137 - DNA, 33 bp, Homo sapien
tgtgtgtgtgtgaacactcttgcgcacagatgt

SEQ ID NO: 910138 - DNA, 33 bp, Homo sapien
tgtgtgtgtgtgaacattcttgcgcacagatgt

SEQ ID NO: 910139 - DNA, 33 bp, Homo sapien
aatgcccctgggagtgaaaaggacagatggcct

SEQ ID NO: 910140 - DNA, 33 bp, Homo sapien
aatgcccctgggagtgcaaaggacagatggcct

SEQ ID NO: 910141 - DNA, 33 bp, Homo sapien
ttgatttccagctccaacataaaacaggtactc

SEQ ID NO: 910142 - DNA, 33 bp, Homo sapien
ttgatttccagctccagcataaaacaggtactc

SEQ ID NO: 910143 - DNA, 33 bp, Homo sapien
tatcctggcataaaaccatctttcagacaaaat

SEQ ID NO: 910144 - DNA, 33 bp, Homo sapien
tatcctggcataaaactatctttcagacaaaat

SEQ ID NO: 910145 - DNA, 33 bp, Homo sapien
atatcactaagcctagcacttaatgatgtgact

SEQ ID NO: 910146 - DNA, 33 bp, Homo sapien
atatcactaagcctagtacttaatgatgtgact

SEQ ID NO: 910147 - DNA, 33 bp, Homo sapien
gtcacaattaaacttgaaggaaggcccaggaat

SEQ ID NO: 910148 - DNA, 33 bp, Homo sapien
gtcacaattaaacttgcaggaaggcccaggaat

SEQ ID NO: 910149 - DNA, 33 bp, Homo sapien
actgaatctagtcacactattttgttttttgca

SEQ ID NO: 910150 - DNA, 33 bp, Homo sapien
actgaatctagtcacattattttgttttttgca

SEQ ID NO: 910151 - DNA, 33 bp, Homo sapien
gataatgcgtaagttcacatgaggtctaatggt

SEQ ID NO: 910152 - DNA, 33 bp, Homo sapien
gataatgcgtaagttcgcatgaggtctaatggt

SEQ ID NO: 910153 - DNA, 33 bp, Homo sapien
tgaattctcttgtgtcaaataagatgtgagctc

SEQ ID NO: 910154 - DNA, 33 bp, Homo sapien
tgaattctcttgtgtccaataagatgtgagctc

SEQ ID NO: 910155 - DNA, 33 bp, Homo sapien
tggtttctaagaccaacggatagctcttatcct

SEQ ID NO: 910156 - DNA, 33 bp, Homo sapien
tggtttctaagaccaatggatagctcttatcct

SEQ ID NO: 910157 - DNA, 33 bp, Homo sapien
tttaacatctatttacaccaaagctcagtactg

SEQ ID NO: 910158 - DNA, 33 bp, Homo sapien
tttaacatctatttacgccaaagctcagtactg

SEQ ID NO: 910159 - DNA, 33 bp, Homo sapien
cttcatggtaaccactaaggcccacagattctg

SEQ ID NO: 910160 - DNA, 33 bp, Homo sapien
cttcatggtaaccactgaggcccacagattctg

SEQ ID NO: 910161 - DNA, 33 bp, Homo sapien; identical to SEQ ID NO: 910159

SEQ ID NO: 910162 - DNA, 33 bp, Homo sapien; identical to SEQ ID NO: 910160

SEQ ID NO: 910163 - DNA, 33 bp, Homo sapien
tagaaaagatttgatgacagaaccctggtactg

SEQ ID NO: 910164 - DNA, 33 bp, Homo sapien
tagaaaagatttgatggcagaaccctggtactg

SEQ ID NO: 910165 - DNA, 33 bp, Homo sapien
ggttaatgaagaagaaaacaccttatccttctg

SEQ ID NO: 910166 - DNA, 33 bp, Homo sapien
ggttaatgaagaagaagacaccttatccttctg

SEQ ID NO: 910167 - DNA, 33 bp, Homo sapien; identical to SEQ ID NO: 910165

SEQ ID NO: 910168 - DNA, 33 bp, Homo sapien; identical to SEQ ID NO: 910166

SEQ ID NO: 910169 - DNA, 33 bp, Homo sapien; identical to SEQ ID NO: 910165

SEQ ID NO: 910170 - DNA, 33 bp, Homo sapien; identical to SEQ ID NO: 910166

SEQ ID NO: 910171 - DNA, 33 bp, Homo sapien
ggacagatgggagggacacagaaagaaagcatg

SEQ ID NO: 910172 - DNA, 33 bp, Homo sapien
ggacagatgggagggatacagaaagaaagcatg

SEQ ID NO: 910173 - DNA, 33 bp, Homo sapien
agaattggacatactccagctgcaaagtgatca

SEQ ID NO: 910174 - DNA, 33 bp, Homo sapien
agaattggacatactctagctgcaaagtgatca

SEQ ID NO: 910175 - DNA, 33 bp, Homo sapien
agcctaattcaggctcgcagtaaaaactagtcc

SEQ ID NO: 910176 - DNA, 33 bp, Homo sapien
agcctaattcaggctctcagtaaaaactagtcc

SEQ ID NO: 910177 - DNA, 33 bp, Homo sapien
tggaataatccctccaaaaaatgcttctgaaga

SEQ ID NO: 910178 - DNA, 33 bp, Homo sapien
tggaataatccctccacaaaatgcttctgaaga

SEQ ID NO: 910179 - DNA, 33 bp, Homo sapien
agtttgttgagcttcacgtttagtatttttttt

SEQ ID NO: 910180 - DNA, 33 bp, Homo sapien
agtttgttgagcttcaggtttagtatttttttt

SEQ ID NO: 910181 - DNA, 33 bp, Homo sapien
tgactatgtccattacaaaaagaagaatcacga

SEQ ID NO: 910182 - DNA, 33 bp, Homo sapien
tgactatgtccattacgaaaagaagaatcacga

SEQ ID NO: 910183 - DNA, 33 bp, Homo sapien
cacattgtgctgaaaacgtatgtattgaataaa

SEQ ID NO: 910184 - DNA, 33 bp, Homo sapien
cacattgtgctgaaaatgtatgtattgaataaa

SEQ ID NO: 910185 - DNA, 33 bp, Homo sapien
atggtcagtgacagcacagtgaaccactggcag

SEQ ID NO: 910186 - DNA, 33 bp, Homo sapien
atggtcagtgacagcagagtgaaccactggcag

SEQ ID NO: 910187 - DNA, 33 bp, Homo sapien; identical to SEQ ID NO: 910185

SEQ ID NO: 910188 - DNA, 33 bp, Homo sapien; identical to SEQ ID NO: 910186

SEQ ID NO: 910189 - DNA, 33 bp, Homo sapien
gcaagtgcagcaaacccggttcaggaagagcaa

SEQ ID NO: 910190 - DNA, 33 bp, Homo sapien
gcaagtgcagcaaacctggttcaggaagagcaa

SEQ ID NO: 910191 - DNA, 33 bp, Homo sapien
ttactaaggtgctggccgaagtgaagagtgttt

SEQ ID NO: 910192 - DNA, 33 bp, Homo sapien
ttactaaggtgctggctgaagtgaagagtgttt

SEQ ID NO: 910193 - DNA, 33 bp, Homo sapien
acctcaaagacaaatagaatcttccatcgtaac

SEQ ID NO: 910194 - DNA, 33 bp, Homo sapien
acctcaaagacaaatataatcttccatcgtaac

SEQ ID NO: 910195 - DNA, 33 bp, Homo sapien
ggctggagtgcagtgacaggattatagctgatt

SEQ ID NO: 910196 - DNA, 33 bp, Homo sapien
ggctggagtgcagtgataggattatagctgatt

SEQ ID NO: 910197 - DNA, 33 bp, Homo sapien
aatacaagctcagtagcacgaatccccatgtga

SEQ ID NO: 910198 - DNA, 33 bp, Homo sapien
aatacaagctcagtagtacgaatccccatgtga

SEQ ID NO: 910199 - DNA, 33 bp, Homo sapien
ataaaacaggtattggaaagctgcctaaactgc

SEQ ID NO: 910200 - DNA, 33 bp, Homo sapien
ataaaacaggtattggcaagctgcctaaactgc

SEQ ID NO: 910201 - DNA, 33 bp, Homo sapien
tcctttctacagcttaacctcctaccatctcac

SEQ ID NO: 910202 - DNA, 33 bp, Homo sapien
tcctttctacagcttagcctcctaccatctcac

SEQ ID NO: 910203 - DNA, 33 bp, Homo sapien
cacgatagaaacattacgaagagaaccaaatca

SEQ ID NO: 910204 - DNA, 33 bp, Homo sapien
cacgatagaaacattatgaagagaaccaaatca

SEQ ID NO: 910205 - DNA, 33 bp, Homo sapien
ctggagaacttatgaagagacctacgtgcagac

SEQ ID NO: 910206 - DNA, 33 bp, Homo sapien
ctggagaacttatgaatagacctacgtgcagac

SEQ ID NO: 910207 - DNA, 33 bp, Homo sapien
gagagaaaaatgcctcaaaggatatgctccaag

SEQ ID NO: 910208 - DNA, 33 bp, Homo sapien
gagagaaaaatgcctcgaaggatatgctccaag

SEQ ID NO: 910209 - DNA, 33 bp, Homo sapien
tcaagatgtttaaatgcacctgccatatgactg

SEQ ID NO: 910210 - DNA, 33 bp, Homo sapien
tcaagatgtttaaatgtacctgccatatgactg

SEQ ID NO: 910211 - DNA, 33 bp, Homo sapien
ttagaactatggtgaacgcctttttccctagcg

SEQ ID NO: 910212 - DNA, 33 bp, Homo sapien
ttagaactatggtgaatgcctttttccctagcg

SEQ ID NO: 910213 - DNA, 33 bp, Homo sapien
gacgatctgagattcaaacctatgtcaattcgt

SEQ ID NO: 910214 - DNA, 33 bp, Homo sapien
gacgatctgagattcacacctatgtcaattcgt

SEQ ID NO: 910215 - DNA, 33 bp, Homo sapien
gtggcctagatcagagcagggcagttacaatcc

SEQ ID NO: 910216 - DNA, 33 bp, Homo sapien
gtggcctagatcagagtagggcagttacaatcc

SEQ ID NO: 910217 - DNA, 33 bp, Homo sapien
gcagctccagtctttcacttctgcaggcagtga

SEQ ID NO: 910218 - DNA, 33 bp, Homo sapien
gcagctccagtctttcgcttctgcaggcagtga

SEQ ID NO: 910219 - DNA, 33 bp, Homo sapien
ggatctagttcaagacactgctttatatctttg

SEQ ID NO: 910220 - DNA, 33 bp, Homo sapien
ggatctagttcaagaccctgctttatatctttg

SEQ ID NO: 910221 - DNA, 33 bp, Homo sapien
cctctgcccatatgtgacaaaagcattaaacat

SEQ ID NO: 910222 - DNA, 33 bp, Homo sapien
cctctgcccatatgtggcaaaagcattaaacat

SEQ ID NO: 910223 - DNA, 33 bp, Homo sapien
ggatttaccaggagagacatcaagggggcttct

SEQ ID NO: 910224 - DNA, 33 bp, Homo sapien
ggatttaccaggagagtcatcaagggggcttct

SEQ ID NO: 910225 - DNA, 33 bp, Homo sapien
ccgtctgcattcctgaccacaggatctgagaga

SEQ ID NO: 910226 - DNA, 33 bp, Homo sapien
ccgtctgcattcctgatcacaggatctgagaga

SEQ ID NO: 910227 - DNA, 33 bp, Homo sapien
gagccactcttgattcacccttcctctgcccag

SEQ ID NO: 910228 - DNA, 33 bp, Homo sapien
gagccactcttgattcgcccttcctctgcccag

SEQ ID NO: 910229 - DNA, 33 bp, Homo sapien
cacacactttatctacagaggcacctggaactc

SEQ ID NO: 910230 - DNA, 33 bp, Homo sapien
cacacactttatctacggaggcacctggaactc

SEQ ID NO: 910231 - DNA, 33 bp, Homo sapien
ttgactgtgtgaaatacaattgtggggcaggag

SEQ ID NO: 910232 - DNA, 33 bp, Homo sapien
ttgactgtgtgaaatataattgtggggcaggag

SEQ ID NO: 910233 - DNA, 33 bp, Homo sapien
tctatgtctttgtaaactgcatggaaataattc

SEQ ID NO: 910234 - DNA, 33 bp, Homo sapien
tctatgtctttgtaaagtgcatggaaataattc

SEQ ID NO: 910235 - DNA, 33 bp, Homo sapien; identical to SEQ ID NO: 910233

SEQ ID NO: 910236 - DNA, 33 bp, Homo sapien; identical to SEQ ID NO: 910234

SEQ ID NO: 910237 - DNA, 33 bp, Homo sapien
cagaactaagaatgtcaatgtttgttctcgggt

SEQ ID NO: 910238 - DNA, 33 bp, Homo sapien
cagaactaagaatgtctatgtttgttctcgggt

SEQ ID NO: 910239 - DNA, 33 bp, Homo sapien; identical to SEQ ID NO: 910237

SEQ ID NO: 910240 - DNA, 33 bp, Homo sapien; identical to SEQ ID NO: 910238

SEQ ID NO: 910241 - DNA, 33 bp, Homo sapien
aaaatggcatagccagaatgcaaggatgaatct

SEQ ID NO: 910242 - DNA, 33 bp, Homo sapien
aaaatggcatagccaggatgcaaggatgaatct

SEQ ID NO: 910243 - DNA, 33 bp, Homo sapien
agaagtttcaggtgaacgagggaaggagaaaca

SEQ ID NO: 910244 - DNA, 33 bp, Homo sapien
agaagtttcaggtgaatgagggaaggagaaaca

SEQ ID NO: 910245 - DNA, 33 bp, Homo sapien
tctataatgtaagaacaaaattgcaattatgaa

SEQ ID NO: 910246 - DNA, 33 bp, Homo sapien
tctataatgtaagaaccaaattgcaattatgaa

SEQ ID NO: 910247 - DNA, 33 bp, Homo sapien
cccttccttataaccacggctcagggaccacaa

SEQ ID NO: 910248 - DNA, 33 bp, Homo sapien
cccttccttataaccatggctcagggaccacaa

SEQ ID NO: 910249 - DNA, 33 bp, Homo sapien
cataattctcatgttacctgtagaagcaggatg

SEQ ID NO: 910250 - DNA, 33 bp, Homo sapien
cataattctcatgttatctgtagaagcaggatg

SEQ ID NO: 910251 - DNA, 33 bp, Homo sapien
aaaatggatgttaaagaataactctaacttcaa

SEQ ID NO: 910252 - DNA, 33 bp, Homo sapien
aaaatggatgttaaaggataactctaacttcaa

SEQ ID NO: 910253 - DNA, 33 bp, Homo sapien
aaaagcgtgcatagtacctaattccattcatta

SEQ ID NO: 910254 - DNA, 33 bp, Homo sapien
aaaagcgtgcatagtatctaattccattcatta

SEQ ID NO: 910255 - DNA, 33 bp, Homo sapien
aaaaatattctcataacgattgggcaaatgtgg

SEQ ID NO: 910256 - DNA, 33 bp, Homo sapien
aaaaatattctcataatgattgggcaaatgtgg

SEQ ID NO: 910257 - DNA, 33 bp, Homo sapien
agcagagctgctccccacttccatcagagtcaa

SEQ ID NO: 910258 - DNA, 33 bp, Homo sapien
agcagagctgctccccccttccatcagagtcaa

SEQ ID NO: 910259 - DNA, 33 bp, Homo sapien
cagcacttattaggcacctgatgtacagggatt

SEQ ID NO: 910260 - DNA, 33 bp, Homo sapien
cagcacttattaggcatctgatgtacagggatt

SEQ ID NO: 910261 - DNA, 33 bp, Homo sapien
aggtagggagccatccgcttagattctgaccaa

SEQ ID NO: 910262 - DNA, 33 bp, Homo sapien
aggtagggagccatcctcttagattctgaccaa

SEQ ID NO: 910263 - DNA, 33 bp, Homo sapien
ccctgggcctcgtgcaccttatgattcccatga

SEQ ID NO: 910264 - DNA, 33 bp, Homo sapien
ccctgggcctcgtgcatcttatgattcccatga

SEQ ID NO: 910265 - DNA, 33 bp, Homo sapien
cttattactcactcccacccttccactttcgtg

SEQ ID NO: 910266 - DNA, 33 bp, Homo sapien
cttattactcactccctcccttccactttcgtg

SEQ ID NO: 910267 - DNA, 33 bp, Homo sapien
aaaagacaggcgcctccgagatcgtaccactgc

SEQ ID NO: 910268 - DNA, 33 bp, Homo sapien
aaaagacaggcgcctctgagatcgtaccactgc

SEQ ID NO: 910269 - DNA, 33 bp, Homo sapien
tttgccaacccctctcaatggcaatgactcaaa

SEQ ID NO: 910270 - DNA, 33 bp, Homo sapien
tttgccaacccctctcgatggcaatgactcaaa

SEQ ID NO: 910271 - DNA, 33 bp, Homo sapien
taagacttatgagttccaacagaatgcaccagg

SEQ ID NO: 910272 - DNA, 33 bp, Homo sapien
taagacttatgagttctaacagaatgcaccagg

SEQ ID NO: 910273 - DNA, 33 bp, Homo sapien
ggaaatttataagtaaagtaactgtgggcacca

SEQ ID NO: 910274 - DNA, 33 bp, Homo sapien
ggaaatttataagtaaggtaactgtgggcacca

SEQ ID NO: 910275 - DNA, 33 bp, Homo sapien
gcatatcaaaataccacaagccgtaattccttc

SEQ ID NO: 910276 - DNA, 33 bp, Homo sapien
gcatatcaaaataccataagccgtaattccttc

SEQ ID NO: 910277 - DNA, 33 bp, Homo sapien
attgctgacaagttaaataacaaatagcacaga

SEQ ID NO: 910278 - DNA, 33 bp, Homo sapien
attgctgacaagttaagtaacaaatagcacaga

SEQ ID NO: 910279 - DNA, 33 bp, Homo sapien
actctgggaggccgacagataacaatgtcaaga

SEQ ID NO: 910280 - DNA, 33 bp, Homo sapien
actctgggaggccgacggataacaatgtcaaga

SEQ ID NO: 910281 - DNA, 33 bp, Homo sapien
tcaggaggccggttgtcaatggttttcgccggc

SEQ ID NO: 910282 - DNA, 33 bp, Homo sapien
tcaggaggccggttgtgaatggttttcgccggc

SEQ ID NO: 910283 - DNA, 33 bp, Homo sapien
gaggtaattaaatcacaggagtggttctttccc

SEQ ID NO: 910284 - DNA, 33 bp, Homo sapien
gaggtaattaaatcacgggagtggttctttccc

SEQ ID NO: 910285 - DNA, 33 bp, Homo sapien
aaagacaggtggttgacggaagtatgagtataa

SEQ ID NO: 910286 - DNA, 33 bp, Homo sapien
aaagacaggtggttgatggaagtatgagtataa

SEQ ID NO: 910287 - DNA, 33 bp, Homo sapien
aacgtttggtcaaacaaaaagctggaattaggc

SEQ ID NO: 910288 - DNA, 33 bp, Homo sapien
aacgtttggtcaaacagaaagctggaattaggc

SEQ ID NO: 910289 - DNA, 33 bp, Homo sapien
tttaaagatgactgtaaaaaataaatctccaag

SEQ ID NO: 910290 - DNA, 33 bp, Homo sapien
tttaaagatgactgtagaaaataaatctccaag

SEQ ID NO: 910291 - DNA, 33 bp, Homo sapien
gagacaaaccagtatacgatatttcactcttgg

SEQ ID NO: 910292 - DNA, 33 bp, Homo sapien
gagacaaaccagtatatgatatttcactcttgg

SEQ ID NO: 910293 - DNA, 33 bp, Homo sapien; identical to SEQ ID NO: 910291

SEQ ID NO: 910294 - DNA, 33 bp, Homo sapien; identical to SEQ ID NO: 910292

SEQ ID NO: 910295 - DNA, 33 bp, Homo sapien
aaacattaagacttcacgtaagatttcagaatg

SEQ ID NO: 910296 - DNA, 33 bp, Homo sapien
aaacattaagacttcaggtaagatttcagaatg

SEQ ID NO: 910297 - DNA, 33 bp, Homo sapien
tattttaacagttctccccacattatctttata

SEQ ID NO: 910298 - DNA, 33 bp, Homo sapien
tattttaacagttctctccacattatctttata

SEQ ID NO: 910299 - DNA, 33 bp, Homo sapien
aagtacattctttacaatatcaggcagggaatt

SEQ ID NO: 910300 - DNA, 33 bp, Homo sapien
aagtacattctttacagtatcaggcagggaatt

SEQ ID NO: 910301 - DNA, 33 bp, Homo sapien; identical to SEQ ID NO: 910299

SEQ ID NO: 910302 - DNA, 33 bp, Homo sapien; identical to SEQ ID NO: 910300

SEQ ID NO: 910303 - DNA, 33 bp, Homo sapien
ccttaacaggagctgcaaaggataaagagttag

SEQ ID NO: 910304 - DNA, 33 bp, Homo sapien
ccttaacaggagctgcgaaggataaagagttag

SEQ ID NO: 910305 - DNA, 33 bp, Homo sapien
acagcttgtgccaatgcaaattgcctggaagtt

SEQ ID NO: 910306 - DNA, 33 bp, Homo sapien
acagcttgtgccaatggaaattgcctggaagtt

SEQ ID NO: 910307 - DNA, 33 bp, Homo sapien
tttatgagatgatcaagtgaactgtattccttt

SEQ ID NO: 910308 - DNA, 33 bp, Homo sapien
tttatgagatgatcaattgaactgtattccttt

SEQ ID NO: 910309 - DNA, 33 bp, Homo sapien
gaacgttcatatagtgaaatactcttgtgtttg

SEQ ID NO: 910310 - DNA, 33 bp, Homo sapien
gaacgttcatatagtgcaatactcttgtgtttg

SEQ ID NO: 910311 - DNA, 33 bp, Homo sapien
gaccttcttggcactacccctgggcctctcatc

SEQ ID NO: 910312 - DNA, 33 bp, Homo sapien
gaccttcttggcactatccctgggcctctcatc

SEQ ID NO: 910313 - DNA, 33 bp, Homo sapien; identical to SEQ ID NO: 910311

SEQ ID NO: 910314 - DNA, 33 bp, Homo sapien; identical to SEQ ID NO: 910312

SEQ ID NO: 910315 - DNA, 33 bp, Homo sapien
gcagaggccaatgccaaagcacaatgccactat

SEQ ID NO: 910316 - DNA, 33 bp, Homo sapien
gcagaggccaatgccacagcacaatgccactat

SEQ ID NO: 910317 - DNA, 33 bp, Homo sapien
gcaaagctgaaacaaacggtggtgtctaggcat

SEQ ID NO: 910318 - DNA, 33 bp, Homo sapien
gcaaagctgaaacaaatggtggtgtctaggcat

SEQ ID NO: 910319 - DNA, 33 bp, Homo sapien
cttttgtgcaaccagaagacaactggcagaatg

SEQ ID NO: 910320 - DNA, 33 bp, Homo sapien
cttttgtgcaaccagaggacaactggcagaatg

SEQ ID NO: 910321 - DNA, 33 bp, Homo sapien
agaaattgagttagaaccttaagtactgtcagt

SEQ ID NO: 910322 - DNA, 33 bp, Homo sapien
agaaattgagttagaatcttaagtactgtcagt

SEQ ID NO: 910323 - DNA, 33 bp, Homo sapien
atagtgtcagatctcacaggtcagtccccaaga

SEQ ID NO: 910324 - DNA, 33 bp, Homo sapien
atagtgtcagatctcataggtcagtccccaaga

SEQ ID NO: 910325 - DNA, 33 bp, Homo sapien
aggatgaattctcaaagttcttttttctttctt

SEQ ID NO: 910326 - DNA, 33 bp, Homo sapien
aggatgaattctcaaatttcttttttctttctt

SEQ ID NO: 910327 - DNA, 33 bp, Homo sapien
aaattcaggtgttctacgattgttatacttttt

SEQ ID NO: 910328 - DNA, 33 bp, Homo sapien
aaattcaggtgttctatgattgttatacttttt

SEQ ID NO: 910329 - DNA, 33 bp, Homo sapien
ttgttgtttttagtgccgagtctcttttcccct

SEQ ID NO: 910330 - DNA, 33 bp, Homo sapien
ttgttgtttttagtgctgagtctcttttcccct

SEQ ID NO: 910331 - DNA, 33 bp, Homo sapien
ggacaaactgcaacctaacttaataggtaggca

SEQ ID NO: 910332 - DNA, 33 bp, Homo sapien
ggacaaactgcaacctcacttaataggtaggca

SEQ ID NO: 910333 - DNA, 33 bp, Homo sapien
taactgtgaaaagaaaatccacacatagcaaag

SEQ ID NO: 910334 - DNA, 33 bp, Homo sapien
taactgtgaaaagaaagtccacacatagcaaag

SEQ ID NO: 910335 - DNA, 33 bp, Homo sapien
aattcggtttgcagccaagcatgtgcttcacat

SEQ ID NO: 910336 - DNA, 33 bp, Homo sapien
aattcggtttgcagccgagcatgtgcttcacat

SEQ ID NO: 910337 - DNA, 33 bp, Homo sapien
gggaaagaagcacacagtgagtgagagacagag

SEQ ID NO: 910338 - DNA, 33 bp, Homo sapien
gggaaagaagcacacattgagtgagagacagag

SEQ ID NO: 910339 - DNA, 33 bp, Homo sapien
tcaattgctccggaccaacgcgtctcctcacgt

SEQ ID NO: 910340 - DNA, 33 bp, Homo sapien
tcaattgctccggaccgacgcgtctcctcacgt

SEQ ID NO: 910341 - DNA, 33 bp, Homo sapien
ggacgatgttaaggaactggaaataattctcca

SEQ ID NO: 910342 - DNA, 33 bp, Homo sapien
ggacgatgttaaggaattggaaataattctcca

SEQ ID NO: 910343 - DNA, 33 bp, Homo sapien
aaccctttggaaagaaatcaagtgtgtagtgca

SEQ ID NO: 910344 - DNA, 33 bp, Homo sapien
aaccctttggaaagaagtcaagtgtgtagtgca

SEQ ID NO: 910345 - DNA, 33 bp, Homo sapien
ctttactttaggcatacaaaaaatgcataataa

SEQ ID NO: 910346 - DNA, 33 bp, Homo sapien
ctttactttaggcatataaaaaatgcataataa

SEQ ID NO: 910347 - DNA, 33 bp, Homo sapien
tgagataagaatattaagaatgccttgttcaga

SEQ ID NO: 910348 - DNA, 33 bp, Homo sapien
tgagataagaatattaggaatgccttgttcaga

SEQ ID NO: 910349 - DNA, 33 bp, Homo sapien; identical to SEQ ID NO: 910347

SEQ ID NO: 910350 - DNA, 33 bp, Homo sapien; identical to SEQ ID NO: 910348

SEQ ID NO: 910351 - DNA, 33 bp, Homo sapien
catccaagcatataaagtccatctccctgggtc

SEQ ID NO: 910352 - DNA, 33 bp, Homo sapien
catccaagcatataaattccatctccctgggtc

SEQ ID NO: 910353 - DNA, 33 bp, Homo sapien; identical to SEQ ID NO: 910351

SEQ ID NO: 910354 - DNA, 33 bp, Homo sapien; identical to SEQ ID NO: 910352

SEQ ID NO: 910355 - DNA, 33 bp, Homo sapien
tctgcttgcaagagcccaacagcttttagaagc

SEQ ID NO: 910356 - DNA, 33 bp, Homo sapien
tctgcttgcaagagcctaacagcttttagaagc

SEQ ID NO: 910357 - DNA, 33 bp, Homo sapien; identical to SEQ ID NO: 910355

SEQ ID NO: 910358 - DNA, 33 bp, Homo sapien; identical to SEQ ID NO: 910356

SEQ ID NO: 910359 - DNA, 33 bp, Homo sapien; identical to SEQ ID NO: 910355

SEQ ID NO: 910360 - DNA, 33 bp, Homo sapien; identical to SEQ ID NO: 910356

SEQ ID NO: 910361 - DNA, 33 bp, Homo sapien
ccctggatcactctggaaaaatacaagcaagac

SEQ ID NO: 910362 - DNA, 33 bp, Homo sapien
ccctggatcactctgggaaaatacaagcaagac

SEQ ID NO: 910363 - DNA, 33 bp, Homo sapien
ccatataagagcaaaacagaaggacagggagag

SEQ ID NO: 910364 - DNA, 33 bp, Homo sapien
ccatataagagcaaaatagaaggacagggagag

SEQ ID NO: 910365 - DNA, 33 bp, Homo sapien
cttctctaccataggccgcaaatagctccaaat

SEQ ID NO: 910366 - DNA, 33 bp, Homo sapien
cttctctaccataggctgcaaatagctccaaat

SEQ ID NO: 910367 - DNA, 33 bp, Homo sapien
caacttattaatattacagaaaatgctgaactt

SEQ ID NO: 910368 - DNA, 33 bp, Homo sapien
caacttattaatattatagaaaatgctgaactt

SEQ ID NO: 910369 - DNA, 33 bp, Homo sapien
cttcatttagctatgcaacttttctttactcct

SEQ ID NO: 910370 - DNA, 33 bp, Homo sapien
cttcatttagctatgctacttttctttactcct

SEQ ID NO: 910371 - DNA, 33 bp, Homo sapien
actttatctctgtgaaatgaatacacaaatcat

SEQ ID NO: 910372 - DNA, 33 bp, Homo sapien
actttatctctgtgaattgaatacacaaatcat

SEQ ID NO: 910373 - DNA, 33 bp, Homo sapien
cacgagaatggtagaaactgcacagggatattt

SEQ ID NO: 910374 - DNA, 33 bp, Homo sapien
cacgagaatggtagaatctgcacagggatattt

SEQ ID NO: 910375 - DNA, 33 bp, Homo sapien
agcgatttgagacctaagtgaaaaagaatatat

SEQ ID NO: 910376 - DNA, 33 bp, Homo sapien
agcgatttgagacctaggtgaaaaagaatatat

SEQ ID NO: 910377 - DNA, 33 bp, Homo sapien
aaggagttttcttagacactgctttgtgatctg

SEQ ID NO: 910378 - DNA, 33 bp, Homo sapien
aaggagttttcttagagactgctttgtgatctg

SEQ ID NO: 910379 - DNA, 33 bp, Homo sapien
tctgaagagatatttcacagtgcattgaggcca

SEQ ID NO: 910380 - DNA, 33 bp, Homo sapien
tctgaagagatatttcgcagtgcattgaggcca

SEQ ID NO: 910381 - DNA, 33 bp, Homo sapien
aagcagtgtttccaaactgtccaatcataaaca

SEQ ID NO: 910382 - DNA, 33 bp, Homo sapien
aagcagtgtttccaaagtgtccaatcataaaca

SEQ ID NO: 910383 - DNA, 33 bp, Homo sapien
ttcaaactacacttcacggctacggtaaccaaa

SEQ ID NO: 910384 - DNA, 33 bp, Homo sapien
ttcaaactacacttcatggctacggtaaccaaa

SEQ ID NO: 910385 - DNA, 33 bp, Homo sapien
catttgcatattctacaacagtgtctgaacact

SEQ ID NO: 910386 - DNA, 33 bp, Homo sapien
catttgcatattctactacagtgtctgaacact

SEQ ID NO: 910387 - DNA, 33 bp, Homo sapien; identical to SEQ ID NO: 910385

SEQ ID NO: 910388 - DNA, 33 bp, Homo sapien; identical to SEQ ID NO: 910386

SEQ ID NO: 910389 - DNA, 33 bp, Homo sapien
tctgaaatatctcatcacacattctaccaaaac

SEQ ID NO: 910390 - DNA, 33 bp, Homo sapien
tctgaaatatctcatcgcacattctaccaaaac

SEQ ID NO: 910391 - DNA, 33 bp, Homo sapien
agatcattgaggccaaatgcgaaaaatccaata

SEQ ID NO: 910392 - DNA, 33 bp, Homo sapien
agatcattgaggccaagtgcgaaaaatccaata

SEQ ID NO: 910393 - DNA, 33 bp, Homo sapien
ctcccagataaccctccacagaattccacaaaa

SEQ ID NO: 910394 - DNA, 33 bp, Homo sapien
ctcccagataaccctctacagaattccacaaaa

SEQ ID NO: 910395 - DNA, 33 bp, Homo sapien
gtacattatgagagtcaacatttggcagctcct

SEQ ID NO: 910396 - DNA, 33 bp, Homo sapien
gtacattatgagagtcgacatttggcagctcct

SEQ ID NO: 910397 - DNA, 33 bp, Homo sapien
taacatctttggtcaccggaactgacacttact

SEQ ID NO: 910398 - DNA, 33 bp, Homo sapien
taacatctttggtcactggaactgacacttact

SEQ ID NO: 910399 - DNA, 33 bp, Homo sapien
tatatgcctaaagtaaatgactagttaatgggt

SEQ ID NO: 910400 - DNA, 33 bp, Homo sapien
tatatgcctaaagtaagtgactagttaatgggt

SEQ ID NO: 910401 - DNA, 33 bp, Homo sapien
caaaaaaatcctctccacaaatgaagcatccct

SEQ ID NO: 910402 - DNA, 33 bp, Homo sapien
caaaaaaatcctctccgcaaatgaagcatccct

SEQ ID NO: 910403 - DNA, 33 bp, Homo sapien; identical to SEQ ID NO: 910401

SEQ ID NO: 910404 - DNA, 33 bp, Homo sapien; identical to SEQ ID NO: 910402

SEQ ID NO: 910405 - DNA, 33 bp, Homo sapien
aattattaacaggtgcaagtaaggaacagctat

SEQ ID NO: 910406 - DNA, 33 bp, Homo sapien
aattattaacaggtgcgagtaaggaacagctat

SEQ ID NO: 910407 - DNA, 33 bp, Homo sapien
caaacttaccttgtggaaaattgactttgtgtt

SEQ ID NO: 910408 - DNA, 33 bp, Homo sapien
caaacttaccttgtggcaaattgactttgtgtt

SEQ ID NO: 910409 - DNA, 33 bp, Homo sapien
cagcagaataaaatccgcaggccctgcccccag

SEQ ID NO: 910410 - DNA, 33 bp, Homo sapien
cagcagaataaaatcctcaggccctgcccccag

SEQ ID NO: 910411 - DNA, 33 bp, Homo sapien
catagatggaaacacccaagtgtggacatacac

SEQ ID NO: 910412 - DNA, 33 bp, Homo sapien
catagatggaaacaccgaagtgtggacatacac

SEQ ID NO: 910413 - DNA, 33 bp, Homo sapien
agccatgtctttcttccaccacaggctgcatgg

SEQ ID NO: 910414 - DNA, 33 bp, Homo sapien
agccatgtctttcttctaccacaggctgcatgg

SEQ ID NO: 910415 - DNA, 33 bp, Homo sapien
agaggtgttagcgaagacaatgtatccggtcaa

SEQ ID NO: 910416 - DNA, 33 bp, Homo sapien
agaggtgttagcgaagtcaatgtatccggtcaa

SEQ ID NO: 910417 - DNA, 33 bp, Homo sapien
aaattctagattgggaactagaaaatcaccatc

SEQ ID NO: 910418 - DNA, 33 bp, Homo sapien
aaattctagattgggagctagaaaatcaccatc

SEQ ID NO: 910419 - DNA, 33 bp, Homo sapien
taccagagggtggcccacacagctcatttgttt

SEQ ID NO: 910420 - DNA, 33 bp, Homo sapien
taccagagggtggcccgcacagctcatttgttt

SEQ ID NO: 910421 - DNA, 33 bp, Homo sapien
tgtgccttctaaaatacacgggactcactggtc

SEQ ID NO: 910422 - DNA, 33 bp, Homo sapien
tgtgccttctaaaatatacgggactcactggtc

SEQ ID NO: 910423 - DNA, 33 bp, Homo sapien
ggtttgcttgaaagtaacattaacaggccaggt

SEQ ID NO: 910424 - DNA, 33 bp, Homo sapien
ggtttgcttgaaagtagcattaacaggccaggt

SEQ ID NO: 910425 - DNA, 33 bp, Homo sapien; identical to SEQ ID NO: 910423

SEQ ID NO: 910426 - DNA, 33 bp, Homo sapien; identical to SEQ ID NO: 910424

SEQ ID NO: 910427 - DNA, 33 bp, Homo sapien
agtttcacaaacagaaaaacaacatacttatcc

SEQ ID NO: 910428 - DNA, 33 bp, Homo sapien
agtttcacaaacagaagaacaacatacttatcc

SEQ ID NO: 910429 - DNA, 33 bp, Homo sapien
tcaccactcagggaacagggactggaagctgct

SEQ ID NO: 910430 - DNA, 33 bp, Homo sapien
tcaccactcagggaacggggactggaagctgct

SEQ ID NO: 910431 - DNA, 33 bp, Homo sapien
tgtgtgggataatgtcacctggcttccatgtgg

SEQ ID NO: 910432 - DNA, 33 bp, Homo sapien
tgtgtgggataatgtctcctggcttccatgtgg

SEQ ID NO: 910433 - DNA, 33 bp, Homo sapien
aaaaatgtggcaaaataattaatgaatgctgac

SEQ ID NO: 910434 - DNA, 33 bp, Homo sapien
aaaaatgtggcaaaatcattaatgaatgctgac

SEQ ID NO: 910435 - DNA, 33 bp, Homo sapien
ttttaaaatgagaaccacaatcagagttaaatg

SEQ ID NO: 910436 - DNA, 33 bp, Homo sapien
ttttaaaatgagaaccgcaatcagagttaaatg

SEQ ID NO: 910437 - DNA, 33 bp, Homo sapien
agttgaattattttaaaccaaatggccatgtag

SEQ ID NO: 910438 - DNA, 33 bp, Homo sapien
agttgaattattttaagccaaatggccatgtag

SEQ ID NO: 910439 - DNA, 33 bp, Homo sapien
ccactgaactcggatgaactagtaagtcaatag

SEQ ID NO: 910440 - DNA, 33 bp, Homo sapien
ccactgaactcggatggactagtaagtcaatag

SEQ ID NO: 910441 - DNA, 33 bp, Homo sapien
aagaagtctaattggcggacagttctgcaggct

SEQ ID NO: 910442 - DNA, 33 bp, Homo sapien
aagaagtctaattggctgacagttctgcaggct

SEQ ID NO: 910443 - DNA, 33 bp, Homo sapien
tctccagaggagggaaataaactcaacagtaat

SEQ ID NO: 910444 - DNA, 33 bp, Homo sapien
tctccagaggagggaagtaaactcaacagtaat

SEQ ID NO: 910445 - DNA, 33 bp, Homo sapien
tctataagtatagatacgtacacaagaataagg

SEQ ID NO: 910446 - DNA, 33 bp, Homo sapien
tctataagtatagatatgtacacaagaataagg

SEQ ID NO: 910447 - DNA, 33 bp, Homo sapien; identical to SEQ ID NO: 910445

SEQ ID NO: 910448 - DNA, 33 bp, Homo sapien; identical to SEQ ID NO: 910446

SEQ ID NO: 910449 - DNA, 33 bp, Homo sapien
aagatgccctagtttcaaggtgtgcacgtctcc

SEQ ID NO: 910450 - DNA, 33 bp, Homo sapien
aagatgccctagtttccaggtgtgcacgtctcc

SEQ ID NO: 910451 - DNA, 33 bp, Homo sapien
agactaaaggtatgatcaccaaagtcagtgcct

SEQ ID NO: 910452 - DNA, 33 bp, Homo sapien
agactaaaggtatgatgaccaaagtcagtgcct

SEQ ID NO: 910453 - DNA, 33 bp, Homo sapien; identical to SEQ ID NO: 910451

SEQ ID NO: 910454 - DNA, 33 bp, Homo sapien; identical to SEQ ID NO: 910452

SEQ ID NO: 910455 - DNA, 33 bp, Homo sapien
accacattcacctagaaaattcgaagaaacaga

SEQ ID NO: 910456 - DNA, 33 bp, Homo sapien
accacattcacctagacaattcgaagaaacaga

SEQ ID NO: 910457 - DNA, 33 bp, Homo sapien; identical to SEQ ID NO: 910455

SEQ ID NO: 910458 - DNA, 33 bp, Homo sapien; identical to SEQ ID NO: 910456

SEQ ID NO: 910459 - DNA, 33 bp, Homo sapien
cggccaataagcacataaaacgatgctcagcac

SEQ ID NO: 910460 - DNA, 33 bp, Homo sapien
cggccaataagcacatgaaacgatgctcagcac

SEQ ID NO: 910461 - DNA, 33 bp, Homo sapien
agactaggtttgatgactaagagattcaaaaag

SEQ ID NO: 910462 - DNA, 33 bp, Homo sapien
agactaggtttgatgagtaagagattcaaaaag

SEQ ID NO: 910463 - DNA, 33 bp, Homo sapien
tttctaaagagtaaggccaagaaccgtaggagc

SEQ ID NO: 910464 - DNA, 33 bp, Homo sapien
tttctaaagagtaaggtcaagaaccgtaggagc

SEQ ID NO: 910465 - DNA, 33 bp, Homo sapien
cagagtagtgctctaaagaaaaccagttgtact

SEQ ID NO: 910466 - DNA, 33 bp, Homo sapien
cagagtagtgctctaaggaaaaccagttgtact

SEQ ID NO: 910467 - DNA, 33 bp, Homo sapien
aaggtttcaggccccacccttcatgccctgagt

SEQ ID NO: 910468 - DNA, 33 bp, Homo sapien
aaggtttcaggccccagccttcatgccctgagt

SEQ ID NO: 910469 - DNA, 33 bp, Homo sapien
atcccgcaattgggaacatacccagtgaatgta

SEQ ID NO: 910470 - DNA, 33 bp, Homo sapien
atcccgcaattgggaatatacccagtgaatgta

SEQ ID NO: 910471 - DNA, 33 bp, Homo sapien
gtgggctcgtaggtgcccgcgaggtagtacagg

SEQ ID NO: 910472 - DNA, 33 bp, Homo sapien
gtgggctcgtaggtgcgcgcgaggtagtacagg

SEQ ID NO: 910473 - DNA, 33 bp, Homo sapien
ctattggtataaagaccgattattggccaggca

SEQ ID NO: 910474 - DNA, 33 bp, Homo sapien
ctattggtataaagactgattattggccaggca

SEQ ID NO: 910475 - DNA, 33 bp, Homo sapien
actttgctcttttgcacgtggatatccgatcgt

SEQ ID NO: 910476 - DNA, 33 bp, Homo sapien
actttgctcttttgcatgtggatatccgatcgt

SEQ ID NO: 910477 - DNA, 33 bp, Homo sapien
tttggcataaaatcaccaatgttgactgtttca

SEQ ID NO: 910478 - DNA, 33 bp, Homo sapien
tttggcataaaatcactaatgttgactgtttca

SEQ ID NO: 910479 - DNA, 33 bp, Homo sapien
ccaagttttcttccaacggtgtcacagctccct

SEQ ID NO: 910480 - DNA, 33 bp, Homo sapien
ccaagttttcttccaatggtgtcacagctccct

SEQ ID NO: 910481 - DNA, 33 bp, Homo sapien
gtcctctggcaaatacactagcttggttaagtg

SEQ ID NO: 910482 - DNA, 33 bp, Homo sapien
gtcctctggcaaatacgctagcttggttaagtg

SEQ ID NO: 910483 - DNA, 33 bp, Homo sapien
tagcaatgtacttgggaaataaattttggtcac

SEQ ID NO: 910484 - DNA, 33 bp, Homo sapien
tagcaatgtacttggggaataaattttggtcac

SEQ ID NO: 910485 - DNA, 33 bp, Homo sapien
cagggcttgaggatcagccaggtttcatgagtt

SEQ ID NO: 910486 - DNA, 33 bp, Homo sapien
cagggcttgaggatcatccaggtttcatgagtt

SEQ ID NO: 910487 - DNA, 33 bp, Homo sapien
ctggtggccgccgtgacgcatgagcttggcctc

SEQ ID NO: 910488 - DNA, 33 bp, Homo sapien
ctggtggccgccgtgatgcatgagcttggcctc

SEQ ID NO: 910489 - DNA, 33 bp, Homo sapien
cagctcttaaaacgagaaaggcagttgtatatg

SEQ ID NO: 910490 - DNA, 33 bp, Homo sapien
cagctcttaaaacgagtaaggcagttgtatatg

SEQ ID NO: 910491 - DNA, 33 bp, Homo sapien
cataaactgagacaaaaaaagctcgggctggat

SEQ ID NO: 910492 - DNA, 33 bp, Homo sapien
cataaactgagacaaagaaagctcgggctggat

SEQ ID NO: 910493 - DNA, 33 bp, Homo sapien
gactatgtctgtaaaggagaagctttccttaaa

SEQ ID NO: 910494 - DNA, 33 bp, Homo sapien
gactatgtctgtaaagtagaagctttccttaaa

SEQ ID NO: 910495 - DNA, 33 bp, Homo sapien
aattgaccattttctaaaaccaggccttaagag

SEQ ID NO: 910496 - DNA, 33 bp, Homo sapien
aattgaccattttctacaaccaggccttaagag

SEQ ID NO: 910497 - DNA, 33 bp, Homo sapien; identical to SEQ ID NO: 910495

SEQ ID NO: 910498 - DNA, 33 bp, Homo sapien; identical to SEQ ID NO: 910496

SEQ ID NO: 910499 - DNA, 33 bp, Homo sapien
ctttaaagaaattaccaatgatttatcttacta

SEQ ID NO: 910500 - DNA, 33 bp, Homo sapien
ctttaaagaaattaccgatgatttatcttacta

SEQ ID NO: 910501 - DNA, 33 bp, Homo sapien
agtaaatggggagctacacagtaaggaaagtac

SEQ ID NO: 910502 - DNA, 33 bp, Homo sapien
agtaaatggggagctatacagtaaggaaagtac

SEQ ID NO: 910503 - DNA, 33 bp, Homo sapien
atattcactggagacactcaaccctcggctcac

SEQ ID NO: 910504 - DNA, 33 bp, Homo sapien
atattcactggagacattcaaccctcggctcac

SEQ ID NO: 910505 - DNA, 33 bp, Homo sapien
cgttttgagcaacaaaaagctactatctaaaag

SEQ ID NO: 910506 - DNA, 33 bp, Homo sapien
cgttttgagcaacaaacagctactatctaaaag

SEQ ID NO: 910507 - DNA, 33 bp, Homo sapien; identical to SEQ ID NO: 910505

SEQ ID NO: 910508 - DNA, 33 bp, Homo sapien; identical to SEQ ID NO: 910506

SEQ ID NO: 910509 - DNA, 33 bp, Homo sapien
acacttgaatgtaagacgcataaagaaaatcta

SEQ ID NO: 910510 - DNA, 33 bp, Homo sapien
acacttgaatgtaagatgcataaagaaaatcta

SEQ ID NO: 910511 - DNA, 33 bp, Homo sapien
tcttctcctacaatgcagaatcatgttaccctg

SEQ ID NO: 910512 - DNA, 33 bp, Homo sapien
tcttctcctacaatgctgaatcatgttaccctg

SEQ ID NO: 910513 - DNA, 33 bp, Homo sapien
atgtaaacagtggaagccttcatacatcatgag

SEQ ID NO: 910514 - DNA, 33 bp, Homo sapien
atgtaaacagtggaaggcttcatacatcatgag

SEQ ID NO: 910515 - DNA, 33 bp, Homo sapien
tcactgtgataaagagaagaaaatgtcccagga

SEQ ID NO: 910516 - DNA, 33 bp, Homo sapien
tcactgtgataaagaggagaaaatgtcccagga

SEQ ID NO: 910517 - DNA, 33 bp, Homo sapien
agctcgagggacctggacaggggccgcttggca

SEQ ID NO: 910518 - DNA, 33 bp, Homo sapien
agctcgagggacctgggcaggggccgcttggca

SEQ ID NO: 910519 - DNA, 33 bp, Homo sapien; identical to SEQ ID NO: 910517

SEQ ID NO: 910520 - DNA, 33 bp, Homo sapien; identical to SEQ ID NO: 910518

SEQ ID NO: 910521 - DNA, 33 bp, Homo sapien
agaggatcaggagaaacaatgaatgggtactag

SEQ ID NO: 910522 - DNA, 33 bp, Homo sapien
agaggatcaggagaaataatgaatgggtactag

SEQ ID NO: 910523 - DNA, 33 bp, Homo sapien
actgcatctgccatacagggtggttcaggaagt

SEQ ID NO: 910524 - DNA, 33 bp, Homo sapien
actgcatctgccatacggggtggttcaggaagt

SEQ ID NO: 910525 - DNA, 33 bp, Homo sapien
tgggacatgtcatgctaaaccagaccctcaaat

SEQ ID NO: 910526 - DNA, 33 bp, Homo sapien
tgggacatgtcatgctgaaccagaccctcaaat

SEQ ID NO: 910527 - DNA, 33 bp, Homo sapien
agctggtataaatgacaagttgcaggtcaaata

SEQ ID NO: 910528 - DNA, 33 bp, Homo sapien
agctggtataaatgacgagttgcaggtcaaata

SEQ ID NO: 910529 - DNA, 33 bp, Homo sapien
tcatttctacagtctcaatagaagccagaacac

SEQ ID NO: 910530 - DNA, 33 bp, Homo sapien
tcatttctacagtctcgatagaagccagaacac

SEQ ID NO: 910531 - DNA, 33 bp, Homo sapien
tcagatctaatgaaaaaaatagactgaaaatgg

SEQ ID NO: 910532 - DNA, 33 bp, Homo sapien
tcagatctaatgaaaacaatagactgaaaatgg

SEQ ID NO: 910533 - DNA, 33 bp, Homo sapien
atcggacatagcctaacctaaaacatgagacaa

SEQ ID NO: 910534 - DNA, 33 bp, Homo sapien
atcggacatagcctaatctaaaacatgagacaa

SEQ ID NO: 910535 - DNA, 33 bp, Homo sapien
tgcctgttccaataaaatttatcagagcttttc

SEQ ID NO: 910536 - DNA, 33 bp, Homo sapien
tgcctgttccaataaattttatcagagcttttc

SEQ ID NO: 910537 - DNA, 33 bp, Homo sapien
acagcaactgagctaacaaaaacacaaccaact

SEQ ID NO: 910538 - DNA, 33 bp, Homo sapien
acagcaactgagctaagaaaaacacaaccaact

SEQ ID NO: 910539 - DNA, 33 bp, Homo sapien
tctccctaaggagaaagatagtacagtggatcc

SEQ ID NO: 910540 - DNA, 33 bp, Homo sapien
tctccctaaggagaaatatagtacagtggatcc

SEQ ID NO: 910541 - DNA, 33 bp, Homo sapien
aaatgtagactttgacactggatttagggtgaa

SEQ ID NO: 910542 - DNA, 33 bp, Homo sapien
aaatgtagactttgactctggatttagggtgaa

SEQ ID NO: 910543 - DNA, 33 bp, Homo sapien
ttcagaactttctgggcaatacacgccattctg

SEQ ID NO: 910544 - DNA, 33 bp, Homo sapien
ttcagaactttctgggtaatacacgccattctg

SEQ ID NO: 910545 - DNA, 33 bp, Homo sapien
agacaaatcccttatgaatgacttggcacaatc

SEQ ID NO: 910546 - DNA, 33 bp, Homo sapien
agacaaatcccttatggatgacttggcacaatc

SEQ ID NO: 910547 - DNA, 33 bp, Homo sapien
gtcttatgttcactcacatgcccaacaccacat

SEQ ID NO: 910548 - DNA, 33 bp, Homo sapien
gtcttatgttcactcagatgcccaacaccacat

SEQ ID NO: 910549 - DNA, 33 bp, Homo sapien
gtctgggatttgtcaacaaaggacattgtgaca

SEQ ID NO: 910550 - DNA, 33 bp, Homo sapien
gtctgggatttgtcaataaaggacattgtgaca

SEQ ID NO: 910551 - DNA, 33 bp, Homo sapien
agaaactggcaggacacggctttcaattgactt

SEQ ID NO: 910552 - DNA, 33 bp, Homo sapien
agaaactggcaggacagggctttcaattgactt

SEQ ID NO: 910553 - DNA, 33 bp, Homo sapien
acttgtgctacacagacggtggctcagaaaggg

SEQ ID NO: 910554 - DNA, 33 bp, Homo sapien
acttgtgctacacagatggtggctcagaaaggg

SEQ ID NO: 910555 - DNA, 33 bp, Homo sapien
ataaacacagagatacacacaaggctttagttc

SEQ ID NO: 910556 - DNA, 33 bp, Homo sapien
ataaacacagagatacgcacaaggctttagttc

SEQ ID NO: 910557 - DNA, 33 bp, Homo sapien
gcaggttataaattcacggtgacaattttttca

SEQ ID NO: 910558 - DNA, 33 bp, Homo sapien
gcaggttataaattcatggtgacaattttttca

SEQ ID NO: 910559 - DNA, 33 bp, Homo sapien
tatttttctgttccacaatttctactgggttct

SEQ ID NO: 910560 - DNA, 33 bp, Homo sapien
tatttttctgttccacgatttctactgggttct

SEQ ID NO: 910561 - DNA, 33 bp, Homo sapien
ttttccagtacctgacaacattatcaccagtga

SEQ ID NO: 910562 - DNA, 33 bp, Homo sapien
ttttccagtacctgacgacattatcaccagtga

SEQ ID NO: 910563 - DNA, 33 bp, Homo sapien
tctgaagactgcatgaactaagctttaagggtc

SEQ ID NO: 910564 - DNA, 33 bp, Homo sapien
tctgaagactgcatgagctaagctttaagggtc

SEQ ID NO: 910565 - DNA, 33 bp, Homo sapien
cacacagacccggaataaaagagagtagaaata

SEQ ID NO: 910566 - DNA, 33 bp, Homo sapien
cacacagacccggaatcaaagagagtagaaata

SEQ ID NO: 910567 - DNA, 33 bp, Homo sapien
ctaacattcggtataccactcctcacatgacaa

SEQ ID NO: 910568 - DNA, 33 bp, Homo sapien
ctaacattcggtatactactcctcacatgacaa

SEQ ID NO: 910569 - DNA, 33 bp, Homo sapien
tatttggtcccctgaactgtctgggtatggacg

SEQ ID NO: 910570 - DNA, 33 bp, Homo sapien
tatttggtcccctgaagtgtctgggtatggacg

SEQ ID NO: 910571 - DNA, 33 bp, Homo sapien
tcatgtcactgatctccagcctaggagacacag

SEQ ID NO: 910572 - DNA, 33 bp, Homo sapien
tcatgtcactgatctctagcctaggagacacag

SEQ ID NO: 910573 - DNA, 33 bp, Homo sapien
gttgtagtgagtctgaagtcctaagattttatt

SEQ ID NO: 910574 - DNA, 33 bp, Homo sapien
gttgtagtgagtctgaggtcctaagattttatt

SEQ ID NO: 910575 - DNA, 33 bp, Homo sapien
actcttctaactcttacgtgcaattcccttgca

SEQ ID NO: 910576 - DNA, 33 bp, Homo sapien
actcttctaactcttatgtgcaattcccttgca

SEQ ID NO: 910577 - DNA, 33 bp, Homo sapien
cactgtgccctagttacaaggatgcctggaaac

SEQ ID NO: 910578 - DNA, 33 bp, Homo sapien
cactgtgccctagttataaggatgcctggaaac

SEQ ID NO: 910579 - DNA, 33 bp, Homo sapien
agaaacaccgcattacccactttccctcttgaa

SEQ ID NO: 910580 - DNA, 33 bp, Homo sapien
agaaacaccgcattactcactttccctcttgaa

SEQ ID NO: 910581 - DNA, 33 bp, Homo sapien
ctagatactatcctaccgaagatgtacctcgaa

SEQ ID NO: 910582 - DNA, 33 bp, Homo sapien
ctagatactatcctactgaagatgtacctcgaa

SEQ ID NO: 910583 - DNA, 33 bp, Homo sapien; identical to SEQ ID NO: 910581

SEQ ID NO: 910584 - DNA, 33 bp, Homo sapien; identical to SEQ ID NO: 910582

SEQ ID NO: 910585 - DNA, 33 bp, Homo sapien
tgtaacagttgcaagaaccttctcctttttctt

SEQ ID NO: 910586 - DNA, 33 bp, Homo sapien
tgtaacagttgcaagagccttctcctttttctt

SEQ ID NO: 910587 - DNA, 33 bp, Homo sapien
ctgaaaattctgtgacgcaaacacgtctagaga

SEQ ID NO: 910588 - DNA, 33 bp, Homo sapien
ctgaaaattctgtgactcaaacacgtctagaga

SEQ ID NO: 910589 - DNA, 33 bp, Homo sapien
ttatggaattgtataacgataagtgaccttgaa

SEQ ID NO: 910590 - DNA, 33 bp, Homo sapien
ttatggaattgtataatgataagtgaccttgaa

SEQ ID NO: 910591 - DNA, 33 bp, Homo sapien
atcctgtctaacggaccctgaccatcctgcatc

SEQ ID NO: 910592 - DNA, 33 bp, Homo sapien
atcctgtctaacggactctgaccatcctgcatc

SEQ ID NO: 910593 - DNA, 33 bp, Homo sapien
aaattcataggagttacgatagcaagaagttag

SEQ ID NO: 910594 - DNA, 33 bp, Homo sapien
aaattcataggagttatgatagcaagaagttag

SEQ ID NO: 910595 - DNA, 33 bp, Homo sapien
tcatttagtgcatcctcacttattcaaaatatg

SEQ ID NO: 910596 - DNA, 33 bp, Homo sapien
tcatttagtgcatccttacttattcaaaatatg

SEQ ID NO: 910597 - DNA, 33 bp, Homo sapien
tgcacaagagagtcaccatgtatgcactggaga

SEQ ID NO: 910598 - DNA, 33 bp, Homo sapien
tgcacaagagagtcactatgtatgcactggaga

SEQ ID NO: 910599 - DNA, 33 bp, Homo sapien
aacagtttccacttaaagttatcattcaaaagt

SEQ ID NO: 910600 - DNA, 33 bp, Homo sapien
aacagtttccacttaacgttatcattcaaaagt

SEQ ID NO: 910601 - DNA, 33 bp, Homo sapien
agctgagaaacagacaatcacccggctgagtct

SEQ ID NO: 910602 - DNA, 33 bp, Homo sapien
agctgagaaacagacactcacccggctgagtct

SEQ ID NO: 910603 - DNA, 33 bp, Homo sapien
ttactttccaggatatcagaaattacttcacat

SEQ ID NO: 910604 - DNA, 33 bp, Homo sapien
ttactttccaggatattagaaattacttcacat

SEQ ID NO: 910605 - DNA, 33 bp, Homo sapien
caacaaaaaaatatagcatttcagcatggtgat

SEQ ID NO: 910606 - DNA, 33 bp, Homo sapien
caacaaaaaaatatagtatttcagcatggtgat

SEQ ID NO: 910607 - DNA, 33 bp, Homo sapien
aattctgcattgcatacaagaatccaagatgaa

SEQ ID NO: 910608 - DNA, 33 bp, Homo sapien
aattctgcattgcatataagaatccaagatgaa

SEQ ID NO: 910609 - DNA, 33 bp, Homo sapien
aagttatcccatttcaagtgggagaaaatggcc

SEQ ID NO: 910610 - DNA, 33 bp, Homo sapien
aagttatcccatttcatgtgggagaaaatggcc

SEQ ID NO: 910611 - DNA, 33 bp, Homo sapien
ctaggccttgttatcaactctatcactctaggg

SEQ ID NO: 910612 - DNA, 33 bp, Homo sapien
ctaggccttgttatcacctctatcactctaggg

SEQ ID NO: 910613 - DNA, 33 bp, Homo sapien
gatgatgactctcatacatagacccagcaaata

SEQ ID NO: 910614 - DNA, 33 bp, Homo sapien
gatgatgactctcatagatagacccagcaaata

SEQ ID NO: 910615 - DNA, 33 bp, Homo sapien
ggtcttttacttgtagaaaggtcagagattaca

SEQ ID NO: 910616 - DNA, 33 bp, Homo sapien
ggtcttttacttgtagtaaggtcagagattaca

SEQ ID NO: 910617 - DNA, 33 bp, Homo sapien
ttaataatttgataaaactactcataaatttga

SEQ ID NO: 910618 - DNA, 33 bp, Homo sapien
ttaataatttgataaacctactcataaatttga

SEQ ID NO: 910619 - DNA, 33 bp, Homo sapien
gtctggattgcatttacgtgtgagatttaggac

SEQ ID NO: 910620 - DNA, 33 bp, Homo sapien
gtctggattgcatttatgtgtgagatttaggac

SEQ ID NO: 910621 - DNA, 33 bp, Homo sapien; identical to SEQ ID NO: 910619

SEQ ID NO: 910622 - DNA, 33 bp, Homo sapien; identical to SEQ ID NO: 910620

SEQ ID NO: 910623 - DNA, 33 bp, Homo sapien
actcaccatctgcttcaagacctttgtgcttgc

SEQ ID NO: 910624 - DNA, 33 bp, Homo sapien
actcaccatctgcttcgagacctttgtgcttgc

SEQ ID NO: 910625 - DNA, 33 bp, Homo sapien
tctaagtatatttcacaatctaaactgtaggtg

SEQ ID NO: 910626 - DNA, 33 bp, Homo sapien
tctaagtatatttcacgatctaaactgtaggtg

SEQ ID NO: 910627 - DNA, 33 bp, Homo sapien
tcccatccctgtacaacctgggtgagatgaggc

SEQ ID NO: 910628 - DNA, 33 bp, Homo sapien
tcccatccctgtacaatctgggtgagatgaggc

SEQ ID NO: 910629 - DNA, 33 bp, Homo sapien
cttagtactgctttggaataaaccaagataccc

SEQ ID NO: 910630 - DNA, 33 bp, Homo sapien
cttagtactgctttgggataaaccaagataccc

SEQ ID NO: 910631 - DNA, 33 bp, Homo sapien
aatgactcgggcttctcagaaactctttccatg

SEQ ID NO: 910632 - DNA, 33 bp, Homo sapien
aatgactcgggcttcttagaaactctttccatg

SEQ ID NO: 910633 - DNA, 33 bp, Homo sapien
tgcatcatgtctaaaacgtgtgagaatagtagt

SEQ ID NO: 910634 - DNA, 33 bp, Homo sapien
tgcatcatgtctaaaatgtgtgagaatagtagt

SEQ ID NO: 910635 - DNA, 33 bp, Homo sapien
ttcacttactacacccagatagatatactttac

SEQ ID NO: 910636 - DNA, 33 bp, Homo sapien
ttcacttactacacccggatagatatactttac

SEQ ID NO: 910637 - DNA, 33 bp, Homo sapien
gaatttgaaaatttgcagaagactttgacacat

SEQ ID NO: 910638 - DNA, 33 bp, Homo sapien
gaatttgaaaatttgccgaagactttgacacat

SEQ ID NO: 910639 - DNA, 33 bp, Homo sapien
tactagggagaattcccaccaatgtgaagaatg

SEQ ID NO: 910640 - DNA, 33 bp, Homo sapien
tactagggagaattcctaccaatgtgaagaatg

SEQ ID NO: 910641 - DNA, 33 bp, Homo sapien
cggcaaacccttcaacagctcttcaaccctttc

SEQ ID NO: 910642 - DNA, 33 bp, Homo sapien
cggcaaacccttcaactgctcttcaaccctttc

SEQ ID NO: 910643 - DNA, 33 bp, Homo sapien
ttgatagcaaatcaacacttctttcaaagcaca

SEQ ID NO: 910644 - DNA, 33 bp, Homo sapien
ttgatagcaaatcaacccttctttcaaagcaca

SEQ ID NO: 910645 - DNA, 33 bp, Homo sapien
atgaattttgttctaaacttagtgatcatctta

SEQ ID NO: 910646 - DNA, 33 bp, Homo sapien
atgaattttgttctaatcttagtgatcatctta

SEQ ID NO: 910647 - DNA, 33 bp, Homo sapien
attggtcagtttgggactataatagtcgatgga

SEQ ID NO: 910648 - DNA, 33 bp, Homo sapien
attggtcagtttgggattataatagtcgatgga

SEQ ID NO: 910649 - DNA, 33 bp, Homo sapien; identical to SEQ ID NO: 910647

SEQ ID NO: 910650 - DNA, 33 bp, Homo sapien; identical to SEQ ID NO: 910648

SEQ ID NO: 910651 - DNA, 33 bp, Homo sapien
acctttacataggagacagcaaaatagtgagtt

SEQ ID NO: 910652 - DNA, 33 bp, Homo sapien
acctttacataggagagagcaaaatagtgagtt

SEQ ID NO: 910653 - DNA, 33 bp, Homo sapien; identical to SEQ ID NO: 910651

SEQ ID NO: 910654 - DNA, 33 bp, Homo sapien; identical to SEQ ID NO: 910652

SEQ ID NO: 910655 - DNA, 33 bp, Homo sapien
ttattggtggggtccacgtataagagtcatcac

SEQ ID NO: 910656 - DNA, 33 bp, Homo sapien
ttattggtggggtccaggtataagagtcatcac

SEQ ID NO: 910657 - DNA, 33 bp, Homo sapien; identical to SEQ ID NO: 910655

SEQ ID NO: 910658 - DNA, 33 bp, Homo sapien; identical to SEQ ID NO: 910656

SEQ ID NO: 910659 - DNA, 33 bp, Homo sapien
tttatatcacccaaagactttatagaatacgca

SEQ ID NO: 910660 - DNA, 33 bp, Homo sapien
tttatatcacccaaaggctttatagaatacgca

SEQ ID NO: 910661 - DNA, 33 bp, Homo sapien; identical to SEQ ID NO: 910659

SEQ ID NO: 910662 - DNA, 33 bp, Homo sapien; identical to SEQ ID NO: 910660

SEQ ID NO: 910663 - DNA, 33 bp, Homo sapien
aatatcagctttgaaccgcacccacaagagatt

SEQ ID NO: 910664 - DNA, 33 bp, Homo sapien
aatatcagctttgaactgcacccacaagagatt

SEQ ID NO: 910665 - DNA, 33 bp, Homo sapien
ttagaccaagccaatcagacagatattgactca

SEQ ID NO: 910666 - DNA, 33 bp, Homo sapien
ttagaccaagccaatcggacagatattgactca

SEQ ID NO: 910667 - DNA, 33 bp, Homo sapien; identical to SEQ ID NO: 910665

SEQ ID NO: 910668 - DNA, 33 bp, Homo sapien; identical to SEQ ID NO: 910666

SEQ ID NO: 910669 - DNA, 33 bp, Homo sapien
gtctagtaattataaaaaggtcacaaaagatta

SEQ ID NO: 910670 - DNA, 33 bp, Homo sapien
gtctagtaattataaagaggtcacaaaagatta

SEQ ID NO: 910671 - DNA, 33 bp, Homo sapien; identical to SEQ ID NO: 910669

SEQ ID NO: 910672 - DNA, 33 bp, Homo sapien; identical to SEQ ID NO: 910670

SEQ ID NO: 910673 - DNA, 33 bp, Homo sapien
acttaggaagaacccaatcaagagccatatcac

SEQ ID NO: 910674 - DNA, 33 bp, Homo sapien
acttaggaagaacccagtcaagagccatatcac

SEQ ID NO: 910675 - DNA, 33 bp, Homo sapien
ggacacatgaggtttggaaaagttcatgaggtg

SEQ ID NO: 910676 - DNA, 33 bp, Homo sapien
ggacacatgaggtttgtaaaagttcatgaggtg

SEQ ID NO: 910677 - DNA, 33 bp, Homo sapien
cccagcagaagattagaattgtcactctcatat

SEQ ID NO: 910678 - DNA, 33 bp, Homo sapien
cccagcagaagattaggattgtcactctcatat

SEQ ID NO: 910679 - DNA, 33 bp, Homo sapien
ctagtttgtattatgacgctgtctgtaccagcc

SEQ ID NO: 910680 - DNA, 33 bp, Homo sapien
ctagtttgtattatgatgctgtctgtaccagcc

SEQ ID NO: 910681 - DNA, 33 bp, Homo sapien
tttggctggttctacacctgagagacattataa

SEQ ID NO: 910682 - DNA, 33 bp, Homo sapien
tttggctggttctacatctgagagacattataa

SEQ ID NO: 910683 - DNA, 33 bp, Homo sapien
ggtaatgtgactctcccgcctgtagcctgccta

SEQ ID NO: 910684 - DNA, 33 bp, Homo sapien
ggtaatgtgactctcctgcctgtagcctgccta

SEQ ID NO: 910685 - DNA, 33 bp, Homo sapien
agcctatagagagccacatcacaaactggtgag

SEQ ID NO: 910686 - DNA, 33 bp, Homo sapien
agcctatagagagccatatcacaaactggtgag

SEQ ID NO: 910687 - DNA, 33 bp, Homo sapien
ctggatctacatataacaggtacaattccaact

SEQ ID NO: 910688 - DNA, 33 bp, Homo sapien
ctggatctacatataataggtacaattccaact

SEQ ID NO: 910689 - DNA, 33 bp, Homo sapien
cttgtacaaagtacacagaagactatgacacta

SEQ ID NO: 910690 - DNA, 33 bp, Homo sapien
cttgtacaaagtacaccgaagactatgacacta

SEQ ID NO: 910691 - DNA, 33 bp, Homo sapien
ttttctggttcacacccacagttgtgattttga

SEQ ID NO: 910692 - DNA, 33 bp, Homo sapien
ttttctggttcacacctacagttgtgattttga

SEQ ID NO: 910693 - DNA, 33 bp, Homo sapien
tgtggcacttaatctcacacataaacacagttg

SEQ ID NO: 910694 - DNA, 33 bp, Homo sapien
tgtggcacttaatctcgcacataaacacagttg

SEQ ID NO: 910695 - DNA, 33 bp, Homo sapien
gatactagaatcacatgacataggttatgggcc

SEQ ID NO: 910696 - DNA, 33 bp, Homo sapien
gatactagaatcacattacataggttatgggcc

SEQ ID NO: 910697 - DNA, 33 bp, Homo sapien
atacctagccaacaataaggatagtcactctcc

SEQ ID NO: 910698 - DNA, 33 bp, Homo sapien
atacctagccaacaatgaggatagtcactctcc

SEQ ID NO: 910699 - DNA, 33 bp, Homo sapien; identical to SEQ ID NO: 910697

SEQ ID NO: 910700 - DNA, 33 bp, Homo sapien; identical to SEQ ID NO: 910698

SEQ ID NO: 910701 - DNA, 33 bp, Homo sapien
tggacatgataatgaccctcatacatagactca

SEQ ID NO: 910702 - DNA, 33 bp, Homo sapien
tggacatgataatgactctcatacatagactca

SEQ ID NO: 910703 - DNA, 33 bp, Homo sapien
ctctgggtgtggatcacgcaagagtcacatcac

SEQ ID NO: 910704 - DNA, 33 bp, Homo sapien
ctctgggtgtggatcaggcaagagtcacatcac

SEQ ID NO: 910705 - DNA, 33 bp, Homo sapien
caggcaggaagagaaactcttattatctacatg

SEQ ID NO: 910706 - DNA, 33 bp, Homo sapien
caggcaggaagagaaagtcttattatctacatg

SEQ ID NO: 910707 - DNA, 33 bp, Homo sapien
gacaaaaagagaagggacacattatccatgtga

SEQ ID NO: 910708 - DNA, 33 bp, Homo sapien
gacaaaaagagaagggtcacattatccatgtga

SEQ ID NO: 910709 - DNA, 33 bp, Homo sapien
gacttctacttccacgaaaaaggggtcagtgag

SEQ ID NO: 910710 - DNA, 33 bp, Homo sapien
gacttctacttccacggaaaaggggtcagtgag

SEQ ID NO: 910711 - DNA, 33 bp, Homo sapien
ccaccacccagagtccacaacaagtactgctag

SEQ ID NO: 910712 - DNA, 33 bp, Homo sapien
ccaccacccagagtccgcaacaagtactgctag

SEQ ID NO: 910713 - DNA, 33 bp, Homo sapien
cagccacagtagaatacggcatcagaaaaagcc

SEQ ID NO: 910714 - DNA, 33 bp, Homo sapien
cagccacagtagaatatggcatcagaaaaagcc

SEQ ID NO: 910715 - DNA, 33 bp, Homo sapien; identical to SEQ ID NO: 910713

SEQ ID NO: 910716 - DNA, 33 bp, Homo sapien; identical to SEQ ID NO: 910714

SEQ ID NO: 910717 - DNA, 33 bp, Homo sapien
aattaatgtgacatagcctactgtaaaacataa

SEQ ID NO: 910718 - DNA, 33 bp, Homo sapien
aattaatgtgacataggctactgtaaaacataa

SEQ ID NO: 910719 - DNA, 33 bp, Homo sapien
aaagtcagatattgatcagtcatacatattttg

SEQ ID NO: 910720 - DNA, 33 bp, Homo sapien
aaagtcagatattgatgagtcatacatattttg

SEQ ID NO: 910721 - DNA, 33 bp, Homo sapien
ggagatgtaaaaattacgtgagacaatttgaat

SEQ ID NO: 910722 - DNA, 33 bp, Homo sapien
ggagatgtaaaaattatgtgagacaatttgaat

SEQ ID NO: 910723 - DNA, 33 bp, Homo sapien
gctttctcttgacaatcatgacctctgtgatca

SEQ ID NO: 910724 - DNA, 33 bp, Homo sapien
gctttctcttgacaattatgacctctgtgatca

SEQ ID NO: 910725 - DNA, 33 bp, Homo sapien; identical to SEQ ID NO: 910723

SEQ ID NO: 910726 - DNA, 33 bp, Homo sapien; identical to SEQ ID NO: 910724

SEQ ID NO: 910727 - DNA, 33 bp, Homo sapien
tagttatgcttgctgaaattgcgatgggcaccc

SEQ ID NO: 910728 - DNA, 33 bp, Homo sapien
tagttatgcttgctgagattgcgatgggcaccc

SEQ ID NO: 910729 - DNA, 33 bp, Homo sapien
gttacaagcaaaagtcagaacgattacttcagt

SEQ ID NO: 910730 - DNA, 33 bp, Homo sapien
gttacaagcaaaagtcggaacgattacttcagt

SEQ ID NO: 910731 - DNA, 33 bp, Homo sapien; identical to SEQ ID NO: 910729

SEQ ID NO: 910732 - DNA, 33 bp, Homo sapien; identical to SEQ ID NO: 910730

SEQ ID NO: 910733 - DNA, 33 bp, Homo sapien
aagcacttggatcaaagattttttgaagggaag

SEQ ID NO: 910734 - DNA, 33 bp, Homo sapien
aagcacttggatcaaatattttttgaagggaag

SEQ ID NO: 910735 - DNA, 33 bp, Homo sapien
atcctgcctaagtgtaacccacaaatgagattt

SEQ ID NO: 910736 - DNA, 33 bp, Homo sapien
atcctgcctaagtgtagcccacaaatgagattt

SEQ ID NO: 910737 - DNA, 33 bp, Homo sapien; identical to SEQ ID NO: 910735

SEQ ID NO: 910738 - DNA, 33 bp, Homo sapien; identical to SEQ ID NO: 910736

SEQ ID NO: 910739 - DNA, 33 bp, Homo sapien
acacctacagaatgagcccaagatatgtaaaaa

SEQ ID NO: 910740 - DNA, 33 bp, Homo sapien
acacctacagaatgaggccaagatatgtaaaaa

SEQ ID NO: 910741 - DNA, 33 bp, Homo sapien
tccagcacccagttaacgtaaccctcattttta

SEQ ID NO: 910742 - DNA, 33 bp, Homo sapien
tccagcacccagttaatgtaaccctcattttta

SEQ ID NO: 910743 - DNA, 33 bp, Homo sapien
ttgccctaagcatagcaatgagaggcaaaatat

SEQ ID NO: 910744 - DNA, 33 bp, Homo sapien
ttgccctaagcatagcgatgagaggcaaaatat

SEQ ID NO: 910745 - DNA, 33 bp, Homo sapien; identical to SEQ ID NO: 910743

SEQ ID NO: 910746 - DNA, 33 bp, Homo sapien; identical to SEQ ID NO: 910744

SEQ ID NO: 910747 - DNA, 33 bp, Homo sapien
gaaaaggatccaagcaagagagttccatcacct

SEQ ID NO: 910748 - DNA, 33 bp, Homo sapien
gaaaaggatccaagcaggagagttccatcacct

SEQ ID NO: 910749 - DNA, 33 bp, Homo sapien
taaagaagcacctataggatatgactgtcttct

SEQ ID NO: 910750 - DNA, 33 bp, Homo sapien
taaagaagcacctatatgatatgactgtcttct

SEQ ID NO: 910751 - DNA, 33 bp, Homo sapien; identical to SEQ ID NO: 910749

SEQ ID NO: 910752 - DNA, 33 bp, Homo sapien; identical to SEQ ID NO: 910750

SEQ ID NO: 910753 - DNA, 33 bp, Homo sapien
gttactcttctgcataaacaggtcatgcataaa

SEQ ID NO: 910754 - DNA, 33 bp, Homo sapien
gttactcttctgcatacacaggtcatgcataaa

SEQ ID NO: 910755 - DNA, 33 bp, Homo sapien
acttatattgtataaactctttggtggtagaga

SEQ ID NO: 910756 - DNA, 33 bp, Homo sapien
acttatattgtataaagtctttggtggtagaga

SEQ ID NO: 910757 - DNA, 33 bp, Homo sapien
acagtaggtttcgtgacgtttgaactatgattc

SEQ ID NO: 910758 - DNA, 33 bp, Homo sapien
acagtaggtttcgtgatgtttgaactatgattc

SEQ ID NO: 910759 - DNA, 33 bp, Homo sapien
actctcctttttgagccctgccaacaggaagct

SEQ ID NO: 910760 - DNA, 33 bp, Homo sapien
actctcctttttgagctctgccaacaggaagct

SEQ ID NO: 910761 - DNA, 33 bp, Homo sapien
ttgcctacaagggtaacagtggaatttttctgg

SEQ ID NO: 910762 - DNA, 33 bp, Homo sapien
ttgcctacaagggtaatagtggaatttttctgg

SEQ ID NO: 910763 - DNA, 33 bp, Homo sapien
tctgacagatagcatacgttcctggctaaggct

SEQ ID NO: 910764 - DNA, 33 bp, Homo sapien
tctgacagatagcatatgttcctggctaaggct

SEQ ID NO: 910765 - DNA, 33 bp, Homo sapien
taacacagaagtaaacagacatgaggctgagat

SEQ ID NO: 910766 - DNA, 33 bp, Homo sapien
taacacagaagtaaacggacatgaggctgagat

SEQ ID NO: 910767 - DNA, 33 bp, Homo sapien
ggagacaggattcttcaagagcctttcttgcag

SEQ ID NO: 910768 - DNA, 33 bp, Homo sapien
ggagacaggattcttcgagagcctttcttgcag

SEQ ID NO: 910769 - DNA, 33 bp, Homo sapien
tcttctgtgacctttacactagaaggagattga

SEQ ID NO: 910770 - DNA, 33 bp, Homo sapien
tcttctgtgacctttatactagaaggagattga

SEQ ID NO: 910771 - DNA, 33 bp, Homo sapien
cacactgtacttctctcactaccctggacacat

SEQ ID NO: 910772 - DNA, 33 bp, Homo sapien
cacactgtacttctcttactaccctggacacat

SEQ ID NO: 910773 - DNA, 33 bp, Homo sapien
aaaaaatactgaatgaagtaaatgacaggaatg

SEQ ID NO: 910774 - DNA, 33 bp, Homo sapien
aaaaaatactgaatgacgtaaatgacaggaatg

SEQ ID NO: 910775 - DNA, 33 bp, Homo sapien
actgtctcctaagttgaataaagcagagaacaa

SEQ ID NO: 910776 - DNA, 33 bp, Homo sapien
actgtctcctaagttgcataaagcagagaacaa

SEQ ID NO: 910777 - DNA, 33 bp, Homo sapien
ctcttaatagaatttacggttgtggttattcag

SEQ ID NO: 910778 - DNA, 33 bp, Homo sapien
ctcttaatagaatttatggttgtggttattcag

SEQ ID NO: 910779 - DNA, 33 bp, Homo sapien
cagataaatgaaggtacaaagcaagcttcagaa

SEQ ID NO: 910780 - DNA, 33 bp, Homo sapien
cagataaatgaaggtataaagcaagcttcagaa

SEQ ID NO: 910781 - DNA, 33 bp, Homo sapien
atgttgtagtttctgacgtttcagactggattt

SEQ ID NO: 910782 - DNA, 33 bp, Homo sapien
atgttgtagtttctgatgtttcagactggattt

SEQ ID NO: 910783 - DNA, 33 bp, Homo sapien
gaatttaattgatttgcattcaaggttaatatt

SEQ ID NO: 910784 - DNA, 33 bp, Homo sapien
gaatttaattgatttgtattcaaggttaatatt

SEQ ID NO: 910785 - DNA, 33 bp, Homo sapien
atctcaggaacatcaacgacaaacgtggcttgt

SEQ ID NO: 910786 - DNA, 33 bp, Homo sapien
atctcaggaacatcaatgacaaacgtggcttgt

SEQ ID NO: 910787 - DNA, 33 bp, Homo sapien
aaagtaactttgctctcaacaggtgcgaaaact

SEQ ID NO: 910788 - DNA, 33 bp, Homo sapien
aaagtaactttgctcttaacaggtgcgaaaact

SEQ ID NO: 910789 - DNA, 33 bp, Homo sapien
agcttgagatggttaaagtttgtttggggagag

SEQ ID NO: 910790 - DNA, 33 bp, Homo sapien
agcttgagatggttaaggtttgtttggggagag

SEQ ID NO: 910791 - DNA, 33 bp, Homo sapien
aggaaggtactgtgtccagaaagataaaaaaat

SEQ ID NO: 910792 - DNA, 33 bp, Homo sapien
aggaaggtactgtgtctagaaagataaaaaaat

SEQ ID NO: 910793 - DNA, 33 bp, Homo sapien
gttgtcagacttatcaaataaaaacatagaaca

SEQ ID NO: 910794 - DNA, 33 bp, Homo sapien
gttgtcagacttatcagataaaaacatagaaca

SEQ ID NO: 910795 - DNA, 33 bp, Homo sapien
acaaaggcatttcaaaacaataaccttaggcaa

SEQ ID NO: 910796 - DNA, 33 bp, Homo sapien
acaaaggcatttcaaatcaataaccttaggcaa

SEQ ID NO: 910797 - DNA, 33 bp, Homo sapien
catgattagtgttaagcctgaaaacaagctggc

SEQ ID NO: 910798 - DNA, 33 bp, Homo sapien
catgattagtgttaagtctgaaaacaagctggc

SEQ ID NO: 910799 - DNA, 33 bp, Homo sapien
agattttctaaaaacaatccgcataataagatc

SEQ ID NO: 910800 - DNA, 33 bp, Homo sapien
agattttctaaaaacagtccgcataataagatc

SEQ ID NO: 910801 - DNA, 33 bp, Homo sapien
tgtaatgttgaggatccatctgtgttctctatt

SEQ ID NO: 910802 - DNA, 33 bp, Homo sapien
tgtaatgttgaggatctatctgtgttctctatt

SEQ ID NO: 910803 - DNA, 33 bp, Homo sapien
cctgaactcactatgccaaaagtaaagctggga

SEQ ID NO: 910804 - DNA, 33 bp, Homo sapien
cctgaactcactatgctaaaagtaaagctggga

SEQ ID NO: 910805 - DNA, 33 bp, Homo sapien
gactagaaatattcacggtcacaaatttaccat

SEQ ID NO: 910806 - DNA, 33 bp, Homo sapien
gactagaaatattcactgtcacaaatttaccat

SEQ ID NO: 910807 - DNA, 33 bp, Homo sapien
gttcagctatatgttaaaattgctttattgggc

SEQ ID NO: 910808 - DNA, 33 bp, Homo sapien
gttcagctatatgttacaattgctttattgggc

SEQ ID NO: 910809 - DNA, 33 bp, Homo sapien
tccacagttaatatcgccactgtgtactcagaa

SEQ ID NO: 910810 - DNA, 33 bp, Homo sapien
tccacagttaatatcgtcactgtgtactcagaa

SEQ ID NO: 910811 - DNA, 33 bp, Homo sapien
tccaaaaaacaggtgacgtgactctacttatca

SEQ ID NO: 910812 - DNA, 33 bp, Homo sapien
tccaaaaaacaggtgatgtgactctacttatca

SEQ ID NO: 910813 - DNA, 33 bp, Homo sapien
atgcaggacagtcacacgacctagacattattc

SEQ ID NO: 910814 - DNA, 33 bp, Homo sapien
atgcaggacagtcacatgacctagacattattc

SEQ ID NO: 910815 - DNA, 33 bp, Homo sapien
cccctcaggaagtatcaagacatatttctggac

SEQ ID NO: 910816 - DNA, 33 bp, Homo sapien
cccctcaggaagtatcgagacatatttctggac

SEQ ID NO: 910817 - DNA, 33 bp, Homo sapien
cttgggcagagtctaaatagtggaggacagtca

SEQ ID NO: 910818 - DNA, 33 bp, Homo sapien
cttgggcagagtctaagtagtggaggacagtca

SEQ ID NO: 910819 - DNA, 33 bp, Homo sapien
ccaggtgttatgactcccttctcctaccttatc

SEQ ID NO: 910820 - DNA, 33 bp, Homo sapien
ccaggtgttatgactctcttctcctaccttatc

SEQ ID NO: 910821 - DNA, 33 bp, Homo sapien
aatatctccaatgggaaaagcccaagcaagaga

SEQ ID NO: 910822 - DNA, 33 bp, Homo sapien
aatatctccaatgggataagcccaagcaagaga

SEQ ID NO: 910823 - DNA, 33 bp, Homo sapien
gctggtcataagttacgctcacttctgtgggca

SEQ ID NO: 910824 - DNA, 33 bp, Homo sapien
gctggtcataagttactctcacttctgtgggca

SEQ ID NO: 910825 - DNA, 33 bp, Homo sapien
tttaagagtcacaaacacaaatgtgaaccaaat

SEQ ID NO: 910826 - DNA, 33 bp, Homo sapien
tttaagagtcacaaacgcaaatgtgaaccaaat

SEQ ID NO: 910827 - DNA, 33 bp, Homo sapien
aatatgtcacaatacccgctgtgagcaaagacc

SEQ ID NO: 910828 - DNA, 33 bp, Homo sapien
aatatgtcacaatacctgctgtgagcaaagacc

SEQ ID NO: 910829 - DNA, 33 bp, Homo sapien
atatctgcattgtcacacatagggccttgtgat

SEQ ID NO: 910830 - DNA, 33 bp, Homo sapien
atatctgcattgtcacgcatagggccttgtgat

SEQ ID NO: 910831 - DNA, 33 bp, Homo sapien
caatcacaaatctaaccgtggactgcatccata

SEQ ID NO: 910832 - DNA, 33 bp, Homo sapien
caatcacaaatctaactgtggactgcatccata

SEQ ID NO: 910833 - DNA, 33 bp, Homo sapien
tcatttgggtgttgaacgtagcaatatgtcacg

SEQ ID NO: 910834 - DNA, 33 bp, Homo sapien
tcatttgggtgttgaatgtagcaatatgtcacg

SEQ ID NO: 910835 - DNA, 33 bp, Homo sapien
tcattaggcacaccaccaaggtaatatgactct

SEQ ID NO: 910836 - DNA, 33 bp, Homo sapien
tcattaggcacaccacgaaggtaatatgactct

SEQ ID NO: 910837 - DNA, 33 bp, Homo sapien
atgttactctttttcccaagcattgccctcaga

SEQ ID NO: 910838 - DNA, 33 bp, Homo sapien
atgttactctttttcctaagcattgccctcaga

SEQ ID NO: 910839 - DNA, 33 bp, Homo sapien
atcttccttataggcacgatgcaggcagaacag

SEQ ID NO: 910840 - DNA, 33 bp, Homo sapien
atcttccttataggcaggatgcaggcagaacag

SEQ ID NO: 910841 - DNA, 33 bp, Homo sapien
ctagcttctgataaaaaagttcacacttaccta

SEQ ID NO: 910842 - DNA, 33 bp, Homo sapien
ctagcttctgataaaagagttcacacttaccta

SEQ ID NO: 910843 - DNA, 33 bp, Homo sapien
tgcagattattttatcactgagatactaagcat

SEQ ID NO: 910844 - DNA, 33 bp, Homo sapien
tgcagattattttatcgctgagatactaagcat

SEQ ID NO: 910845 - DNA, 33 bp, Homo sapien
gtttgaaattacccccaaaaagtggcagaccag

SEQ ID NO: 910846 - DNA, 33 bp, Homo sapien
gtttgaaattaccccccaaaagtggcagaccag

SEQ ID NO: 910847 - DNA, 33 bp, Homo sapien
aacaacaacaaaacaacgaaaaacaagtgtcta

SEQ ID NO: 910848 - DNA, 33 bp, Homo sapien
aacaacaacaaaacaatgaaaaacaagtgtcta

SEQ ID NO: 910849 - DNA, 33 bp, Homo sapien
gtgcattgattaaacacgagaatttaccttcct

SEQ ID NO: 910850 - DNA, 33 bp, Homo sapien
gtgcattgattaaacatgagaatttaccttcct

SEQ ID NO: 910851 - DNA, 33 bp, Homo sapien
acagataactttgtatcagtaccctctctgcct

SEQ ID NO: 910852 - DNA, 33 bp, Homo sapien
acagataactttgtatgagtaccctctctgcct

SEQ ID NO: 910853 - DNA, 33 bp, Homo sapien
ttataaaatagtattcaccagcctcatcataac

SEQ ID NO: 910854 - DNA, 33 bp, Homo sapien
ttataaaatagtattcgccagcctcatcataac

SEQ ID NO: 910855 - DNA, 33 bp, Homo sapien
ttgctggtcaatcaatcatatgctggtattgag

SEQ ID NO: 910856 - DNA, 33 bp, Homo sapien
ttgctggtcaatcaattatatgctggtattgag

SEQ ID NO: 910857 - DNA, 33 bp, Homo sapien
gcttccagtcaactcacggttgtgctgcaaagt

SEQ ID NO: 910858 - DNA, 33 bp, Homo sapien
gcttccagtcaactcatggttgtgctgcaaagt

SEQ ID NO: 910859 - DNA, 33 bp, Homo sapien
cagctcaaagaagggagaaagacataattgtgg

SEQ ID NO: 910860 - DNA, 33 bp, Homo sapien
cagctcaaagaagggataaagacataattgtgg

SEQ ID NO: 910861 - DNA, 33 bp, Homo sapien
atccaaactatgcaacacaggacctgaaaaaca

SEQ ID NO: 910862 - DNA, 33 bp, Homo sapien
atccaaactatgcaacccaggacctgaaaaaca

SEQ ID NO: 910863 - DNA, 33 bp, Homo sapien
gaccaactaggcttaacagttatgtgcaaactt

SEQ ID NO: 910864 - DNA, 33 bp, Homo sapien
gaccaactaggcttaagagttatgtgcaaactt

SEQ ID NO: 910865 - DNA, 33 bp, Homo sapien
attgacgaagtgtaacagtatcttaaaactaaa

SEQ ID NO: 910866 - DNA, 33 bp, Homo sapien
attgacgaagtgtaactgtatcttaaaactaaa

SEQ ID NO: 910867 - DNA, 33 bp, Homo sapien
gagtccaatcagtccaacctatttttggttata

SEQ ID NO: 910868 - DNA, 33 bp, Homo sapien
gagtccaatcagtccagcctatttttggttata

SEQ ID NO: 910869 - DNA, 33 bp, Homo sapien
atggtaattcttacaacaccgacggcagctaaa

SEQ ID NO: 910870 - DNA, 33 bp, Homo sapien
atggtaattcttacaataccgacggcagctaaa

SEQ ID NO: 910871 - DNA, 33 bp, Homo sapien
ctcatttcgacaaatacaatgttttcctccagg

SEQ ID NO: 910872 - DNA, 33 bp, Homo sapien
ctcatttcgacaaatataatgttttcctccagg

SEQ ID NO: 910873 - DNA, 33 bp, Homo sapien
agaaaggagattcttcaagcagatgaacaaggc

SEQ ID NO: 910874 - DNA, 33 bp, Homo sapien
agaaaggagattcttcgagcagatgaacaaggc

SEQ ID NO: 910875 - DNA, 33 bp, Homo sapien
atgctctctggctctcacaatgtcatggaggat

SEQ ID NO: 910876 - DNA, 33 bp, Homo sapien
atgctctctggctctcgcaatgtcatggaggat

SEQ ID NO: 910877 - DNA, 33 bp, Homo sapien
aggattttaggtaaccagcaatctttcactctc

SEQ ID NO: 910878 - DNA, 33 bp, Homo sapien
aggattttaggtaaccggcaatctttcactctc

SEQ ID NO: 910879 - DNA, 33 bp, Homo sapien
tttgcaatttaaaaagccgaggctcagacaaat

SEQ ID NO: 910880 - DNA, 33 bp, Homo sapien
tttgcaatttaaaaagtcgaggctcagacaaat

SEQ ID NO: 910881 - DNA, 33 bp, Homo sapien
tcaggattgcaatcgccccatatggcctctgag

SEQ ID NO: 910882 - DNA, 33 bp, Homo sapien
tcaggattgcaatcgctccatatggcctctgag

SEQ ID NO: 910883 - DNA, 33 bp, Homo sapien
tgcgatactgttggaacggtggattccagttat

SEQ ID NO: 910884 - DNA, 33 bp, Homo sapien
tgcgatactgttggaatggtggattccagttat

SEQ ID NO: 910885 - DNA, 33 bp, Homo sapien
cccgcagtacttgttgaaggcagcctatttcct

SEQ ID NO: 910886 - DNA, 33 bp, Homo sapien
cccgcagtacttgttgcaggcagcctatttcct

SEQ ID NO: 910887 - DNA, 33 bp, Homo sapien
tctgtgacgtgcgtcgaagttggacttccggtt

SEQ ID NO: 910888 - DNA, 33 bp, Homo sapien
tctgtgacgtgcgtcggagttggacttccggtt

SEQ ID NO: 910889 - DNA, 33 bp, Homo sapien
tgacttaatgagtagcaaatgtgaccaagaggt

SEQ ID NO: 910890 - DNA, 33 bp, Homo sapien
tgacttaatgagtagcgaatgtgaccaagaggt

SEQ ID NO: 910891 - DNA, 33 bp, Homo sapien
aaccaagtaccgaccagggaaaagtagtctcca

SEQ ID NO: 910892 - DNA, 33 bp, Homo sapien
aaccaagtaccgaccatggaaaagtagtctcca

SEQ ID NO: 910893 - DNA, 33 bp, Homo sapien
tgcattttagagaaaactgcctgtgtcaaagac

SEQ ID NO: 910894 - DNA, 33 bp, Homo sapien
tgcattttagagaaaattgcctgtgtcaaagac

SEQ ID NO: 910895 - DNA, 33 bp, Homo sapien
acaacgcaggaaaactcaaatggaagaaatgta

SEQ ID NO: 910896 - DNA, 33 bp, Homo sapien
acaacgcaggaaaactgaaatggaagaaatgta

SEQ ID NO: 910897 - DNA, 33 bp, Homo sapien
aggggtccagtttcaaccttatacatagtacta

SEQ ID NO: 910898 - DNA, 33 bp, Homo sapien
aggggtccagtttcaatcttatacatagtacta

SEQ ID NO: 910899 - DNA, 33 bp, Homo sapien
agcaacacattaacaacctgattttatgaatga

SEQ ID NO: 910900 - DNA, 33 bp, Homo sapien
agcaacacattaacaatctgattttatgaatga

SEQ ID NO: 910901 - DNA, 33 bp, Homo sapien
aagggcatccaaatcactaaagaggagctgaaa

SEQ ID NO: 910902 - DNA, 33 bp, Homo sapien
aagggcatccaaatcagtaaagaggagctgaaa

SEQ ID NO: 910903 - DNA, 33 bp, Homo sapien
gtaacaatgtactattaaataacagagtggact

SEQ ID NO: 910904 - DNA, 33 bp, Homo sapien
gtaacaatgtactatttaataacagagtggact

SEQ ID NO: 910905 - DNA, 33 bp, Homo sapien
aaaatctgtgatacaaataaagacactacaacc

SEQ ID NO: 910906 - DNA, 33 bp, Homo sapien
aaaatctgtgatacaagtaaagacactacaacc

SEQ ID NO: 910907 - DNA, 33 bp, Homo sapien
aaaataccacaggttcgaattccttcatagaca

SEQ ID NO: 910908 - DNA, 33 bp, Homo sapien
aaaataccacaggttctaattccttcatagaca

SEQ ID NO: 910909 - DNA, 33 bp, Homo sapien; identical to SEQ ID NO: 910907

SEQ ID NO: 910910 - DNA, 33 bp, Homo sapien; identical to SEQ ID NO: 910908

SEQ ID NO: 910911 - DNA, 33 bp, Homo sapien
gtatgcggaaagttcaaccttactaactgctgc

SEQ ID NO: 910912 - DNA, 33 bp, Homo sapien
gtatgcggaaagttcagccttactaactgctgc

SEQ ID NO: 910913 - DNA, 33 bp, Homo sapien
ggagattggaaggacaatgaatggcctcctgaa

SEQ ID NO: 910914 - DNA, 33 bp, Homo sapien
ggagattggaaggacagtgaatggcctcctgaa

SEQ ID NO: 910915 - DNA, 33 bp, Homo sapien
aagtcttcacctgggacctggtttgaaattcat

SEQ ID NO: 910916 - DNA, 33 bp, Homo sapien
aagtcttcacctgggatctggtttgaaattcat

SEQ ID NO: 910917 - DNA, 33 bp, Homo sapien
aagctgaccagtccacacacggctgaagcttga

SEQ ID NO: 910918 - DNA, 33 bp, Homo sapien
aagctgaccagtccacgcacggctgaagcttga

SEQ ID NO: 910919 - DNA, 33 bp, Homo sapien
attcccctagttcacgaagattacccttaattt

SEQ ID NO: 910920 - DNA, 33 bp, Homo sapien
attcccctagttcacggagattacccttaattt

SEQ ID NO: 910921 - DNA, 33 bp, Homo sapien
cattctctctttctaggatcttgctcttacaga

SEQ ID NO: 910922 - DNA, 33 bp, Homo sapien
cattctctctttctagtatcttgctcttacaga

SEQ ID NO: 910923 - DNA, 33 bp, Homo sapien
gaggggcacaaccaacaggacttgtaagtaagc

SEQ ID NO: 910924 - DNA, 33 bp, Homo sapien
gaggggcacaaccaacgggacttgtaagtaagc

SEQ ID NO: 910925 - DNA, 33 bp, Homo sapien
tttgggatgtgctcaaatgaatactgctttatc

SEQ ID NO: 910926 - DNA, 33 bp, Homo sapien
tttgggatgtgctcaagtgaatactgctttatc

SEQ ID NO: 910927 - DNA, 33 bp, Homo sapien
taggtgtgttatccccagctttctcccccagag

SEQ ID NO: 910928 - DNA, 33 bp, Homo sapien
taggtgtgttatccccggctttctcccccagag

SEQ ID NO: 910929 - DNA, 33 bp, Homo sapien
caggatgtggtttaaaaaaatgccagccagaac

SEQ ID NO: 910930 - DNA, 33 bp, Homo sapien
caggatgtggtttaaataaatgccagccagaac

SEQ ID NO: 910931 - DNA, 33 bp, Homo sapien
tgctacaactactgggacattatgatagttaca

SEQ ID NO: 910932 - DNA, 33 bp, Homo sapien
tgctacaactactgggtcattatgatagttaca

SEQ ID NO: 910933 - DNA, 33 bp, Homo sapien
tcagtgccaagaagaacctagagcaggtagagg

SEQ ID NO: 910934 - DNA, 33 bp, Homo sapien
tcagtgccaagaagaatctagagcaggtagagg

SEQ ID NO: 910935 - DNA, 33 bp, Homo sapien
ccccacatggtagcagaaaatgagagcgtccag

SEQ ID NO: 910936 - DNA, 33 bp, Homo sapien
ccccacatggtagcaggaaatgagagcgtccag

SEQ ID NO: 910937 - DNA, 33 bp, Homo sapien
aaagggtgagtaaaaccggatcatatgcaggaa

SEQ ID NO: 910938 - DNA, 33 bp, Homo sapien
aaagggtgagtaaaactggatcatatgcaggaa

SEQ ID NO: 910939 - DNA, 33 bp, Homo sapien
cagattggaaatagtacgaggttacccccatga

SEQ ID NO: 910940 - DNA, 33 bp, Homo sapien
cagattggaaatagtatgaggttacccccatga

SEQ ID NO: 910941 - DNA, 33 bp, Homo sapien
atgtacctagcctacacgacagagtgacagcct

SEQ ID NO: 910942 - DNA, 33 bp, Homo sapien
atgtacctagcctacatgacagagtgacagcct

SEQ ID NO: 910943 - DNA, 33 bp, Homo sapien
aaccccacagaactaccatacaatacatcagtc

SEQ ID NO: 910944 - DNA, 33 bp, Homo sapien
aaccccacagaactactatacaatacatcagtc

SEQ ID NO: 910945 - DNA, 33 bp, Homo sapien
tggctaagatggctacaactgagtcacagacct

SEQ ID NO: 910946 - DNA, 33 bp, Homo sapien
tggctaagatggctacgactgagtcacagacct

SEQ ID NO: 910947 - DNA, 33 bp, Homo sapien
acagtaaagactaaagaccaagttctgtaggcc

SEQ ID NO: 910948 - DNA, 33 bp, Homo sapien
acagtaaagactaaaggccaagttctgtaggcc

SEQ ID NO: 910949 - DNA, 33 bp, Homo sapien
gattacaaagtgaacaaatatagcacataatcc

SEQ ID NO: 910950 - DNA, 33 bp, Homo sapien
gattacaaagtgaacacatatagcacataatcc

SEQ ID NO: 910951 - DNA, 33 bp, Homo sapien
cactttgtaatctgaaatatgccagatttgcct

SEQ ID NO: 910952 - DNA, 33 bp, Homo sapien
cactttgtaatctgaactatgccagatttgcct

SEQ ID NO: 910953 - DNA, 33 bp, Homo sapien
aaaactgtgttaggctaacaagagtggttcatt

SEQ ID NO: 910954 - DNA, 33 bp, Homo sapien
aaaactgtgttaggctgacaagagtggttcatt

SEQ ID NO: 910955 - DNA, 33 bp, Homo sapien
ctagaaagccctaagacatttgtttaaattgct

SEQ ID NO: 910956 - DNA, 33 bp, Homo sapien
ctagaaagccctaagagatttgtttaaattgct

SEQ ID NO: 910957 - DNA, 33 bp, Homo sapien; identical to SEQ ID NO: 910955

SEQ ID NO: 910958 - DNA, 33 bp, Homo sapien; identical to SEQ ID NO: 910956

SEQ ID NO: 910959 - DNA, 33 bp, Homo sapien
taaagttagtggcataataacacttcatcgaat

SEQ ID NO: 910960 - DNA, 33 bp, Homo sapien
taaagttagtggcatagtaacacttcatcgaat

SEQ ID NO: 910961 - DNA, 33 bp, Homo sapien
tttagccttaaaatgagtacaatgctgatgagt

SEQ ID NO: 910962 - DNA, 33 bp, Homo sapien
tttagccttaaaatgattacaatgctgatgagt

SEQ ID NO: 910963 - DNA, 33 bp, Homo sapien
gcctgtagtcctagccacgggggaagatcatct

SEQ ID NO: 910964 - DNA, 33 bp, Homo sapien
gcctgtagtcctagccgcgggggaagatcatct

SEQ ID NO: 910965 - DNA, 33 bp, Homo sapien
cccagagaaggctgacaagggccccctgcccag

SEQ ID NO: 910966 - DNA, 33 bp, Homo sapien
cccagagaaggctgacgagggccccctgcccag

SEQ ID NO: 910967 - DNA, 33 bp, Homo sapien
gctcctttacatcagcaaagtttatttttatcc

SEQ ID NO: 910968 - DNA, 33 bp, Homo sapien
gctcctttacatcagcgaagtttatttttatcc

SEQ ID NO: 910969 - DNA, 33 bp, Homo sapien
tcccttatagatgctgaaaattagatctttgtc

SEQ ID NO: 910970 - DNA, 33 bp, Homo sapien
tcccttatagatgctggaaattagatctttgtc

SEQ ID NO: 910971 - DNA, 33 bp, Homo sapien
aaagacatcaaatcaacccacatgttcatctgt

SEQ ID NO: 910972 - DNA, 33 bp, Homo sapien
aaagacatcaaatcaatccacatgttcatctgt

SEQ ID NO: 910973 - DNA, 33 bp, Homo sapien
aaaagataataactaacctgaagaagcagtaag

SEQ ID NO: 910974 - DNA, 33 bp, Homo sapien
aaaagataataactaagctgaagaagcagtaag

SEQ ID NO: 910975 - DNA, 33 bp, Homo sapien; identical to SEQ ID NO: 910973

SEQ ID NO: 910976 - DNA, 33 bp, Homo sapien; identical to SEQ ID NO: 910974

SEQ ID NO: 910977 - DNA, 33 bp, Homo sapien
aatatctttttccttacgtagctagaactcttt

SEQ ID NO: 910978 - DNA, 33 bp, Homo sapien
aatatctttttccttaggtagctagaactcttt

SEQ ID NO: 910979 - DNA, 33 bp, Homo sapien
caagcacattttggacacacacaagtaaaagca

SEQ ID NO: 910980 - DNA, 33 bp, Homo sapien
caagcacattttggacgcacacaagtaaaagca

SEQ ID NO: 910981 - DNA, 33 bp, Homo sapien
atgcctaaaatatttacggtgttgccgggctaa

SEQ ID NO: 910982 - DNA, 33 bp, Homo sapien
atgcctaaaatatttatggtgttgccgggctaa

SEQ ID NO: 910983 - DNA, 33 bp, Homo sapien
catttggtgaacaaaaataaactgctctgcata

SEQ ID NO: 910984 - DNA, 33 bp, Homo sapien
catttggtgaacaaaagtaaactgctctgcata

SEQ ID NO: 910985 - DNA, 33 bp, Homo sapien
attccatttacagccactaagtcctgaaaggtg

SEQ ID NO: 910986 - DNA, 33 bp, Homo sapien
attccatttacagccattaagtcctgaaaggtg

SEQ ID NO: 910987 - DNA, 33 bp, Homo sapien; identical to SEQ ID NO: 910985

SEQ ID NO: 910988 - DNA, 33 bp, Homo sapien; identical to SEQ ID NO: 910986

SEQ ID NO: 910989 - DNA, 33 bp, Homo sapien
tcatggcagtttaaagcaggagacttaaatgga

SEQ ID NO: 910990 - DNA, 33 bp, Homo sapien
tcatggcagtttaaaggaggagacttaaatgga

SEQ ID NO: 910991 - DNA, 33 bp, Homo sapien
gtttataaaggggaaacctggtcgggtagcagt

SEQ ID NO: 910992 - DNA, 33 bp, Homo sapien
gtttataaaggggaaatctggtcgggtagcagt

SEQ ID NO: 910993 - DNA, 33 bp, Homo sapien
catcaatttaatagcactcaggttgtttatgca

SEQ ID NO: 910994 - DNA, 33 bp, Homo sapien
catcaatttaatagcattcaggttgtttatgca

SEQ ID NO: 910995 - DNA, 33 bp, Homo sapien
caccaatttgaagcaaatgcatcacatgggcaa

SEQ ID NO: 910996 - DNA, 33 bp, Homo sapien
caccaatttgaagcaagtgcatcacatgggcaa

SEQ ID NO: 910997 - DNA, 33 bp, Homo sapien
atatgcctcggaatcaacaagtcagaaaacatt

SEQ ID NO: 910998 - DNA, 33 bp, Homo sapien
atatgcctcggaatcaccaagtcagaaaacatt

SEQ ID NO: 910999 - DNA, 33 bp, Homo sapien
ggcaaaaggagagtgaaaattaggccaaatacc

SEQ ID NO: 911000 - DNA, 33 bp, Homo sapien
ggcaaaaggagagtgagaattaggccaaatacc

SEQ ID NO: 911001 - DNA, 33 bp, Homo sapien
atgctcatcctacagacagaaaaaatgaattca

SEQ ID NO: 911002 - DNA, 33 bp, Homo sapien
atgctcatcctacagagagaaaaaatgaattca

SEQ ID NO: 911003 - DNA, 33 bp, Homo sapien
atgcaatacaacttcacagctagctcagaacta

SEQ ID NO: 911004 - DNA, 33 bp, Homo sapien
atgcaatacaacttcatagctagctcagaacta

SEQ ID NO: 911005 - DNA, 33 bp, Homo sapien
atatatcacaacaaaaatatctttctctaaggc

SEQ ID NO: 911006 - DNA, 33 bp, Homo sapien
atatatcacaacaaaagtatctttctctaaggc

SEQ ID NO: 911007 - DNA, 33 bp, Homo sapien
ttgaagacagtatggacgagttgctttagagta

SEQ ID NO: 911008 - DNA, 33 bp, Homo sapien
ttgaagacagtatggatgagttgctttagagta

SEQ ID NO: 911009 - DNA, 33 bp, Homo sapien
tgcttgcttcggtagcacatatactaaagttgg

SEQ ID NO: 911010 - DNA, 33 bp, Homo sapien
tgcttgcttcggtagctcatatactaaagttgg

SEQ ID NO: 911011 - DNA, 33 bp, Homo sapien
cctgaaagcttggcaacttacatcaagcataat

SEQ ID NO: 911012 - DNA, 33 bp, Homo sapien
cctgaaagcttggcaatttacatcaagcataat

SEQ ID NO: 911013 - DNA, 33 bp, Homo sapien
acatatcagtctacaacggattggaattttttt

SEQ ID NO: 911014 - DNA, 33 bp, Homo sapien
acatatcagtctacaatggattggaattttttt

SEQ ID NO: 911015 - DNA, 33 bp, Homo sapien
taacaagttggctaacaagttcacatcttttaa

SEQ ID NO: 911016 - DNA, 33 bp, Homo sapien
taacaagttggctaacgagttcacatcttttaa

SEQ ID NO: 911017 - DNA, 33 bp, Homo sapien
atgaaccaaatcagaacagctgacaggtaatgg

SEQ ID NO: 911018 - DNA, 33 bp, Homo sapien
atgaaccaaatcagaagagctgacaggtaatgg

SEQ ID NO: 911019 - DNA, 33 bp, Homo sapien
atttattcaaccattacctatttgtaacctacc

SEQ ID NO: 911020 - DNA, 33 bp, Homo sapien
atttattcaaccattatctatttgtaacctacc

SEQ ID NO: 911021 - DNA, 33 bp, Homo sapien
tgggcctttctgaagacatagcgcctagtggga

SEQ ID NO: 911022 - DNA, 33 bp, Homo sapien
tgggcctttctgaagagatagcgcctagtggga

SEQ ID NO: 911023 - DNA, 33 bp, Homo sapien
aaaaacgcagaaaatacgtggttggagagctca

SEQ ID NO: 911024 - DNA, 33 bp, Homo sapien
aaaaacgcagaaaatatgtggttggagagctca

SEQ ID NO: 911025 - DNA, 33 bp, Homo sapien
cctcatgtcctaggaacctggcctggacacaat

SEQ ID NO: 911026 - DNA, 33 bp, Homo sapien
cctcatgtcctaggaagctggcctggacacaat

SEQ ID NO: 911027 - DNA, 33 bp, Homo sapien
aaagctagtaaatggcagaaaagctcctgttct

SEQ ID NO: 911028 - DNA, 33 bp, Homo sapien
aaagctagtaaatggcggaaaagctcctgttct

SEQ ID NO: 911029 - DNA, 33 bp, Homo sapien
aggagttatatgaaaccgtggagtggatattat

SEQ ID NO: 911030 - DNA, 33 bp, Homo sapien
aggagttatatgaaactgtggagtggatattat

SEQ ID NO: 911031 - DNA, 33 bp, Homo sapien
atgcaatgtttccccaatggataaaacacccaa

SEQ ID NO: 911032 - DNA, 33 bp, Homo sapien
atgcaatgtttccccagtggataaaacacccaa

SEQ ID NO: 911033 - DNA, 33 bp, Homo sapien
ttggaatcgtccatgacggttggaatccacttc

SEQ ID NO: 911034 - DNA, 33 bp, Homo sapien
ttggaatcgtccatgagggttggaatccacttc

SEQ ID NO: 911035 - DNA, 33 bp, Homo sapien
aaagaaaaaagaaatacgctggacttcatcaaa

SEQ ID NO: 911036 - DNA, 33 bp, Homo sapien
aaagaaaaaagaaatatgctggacttcatcaaa

SEQ ID NO: 911037 - DNA, 33 bp, Homo sapien
ccttacaagtagctggaactatatgcatgggcc

SEQ ID NO: 911038 - DNA, 33 bp, Homo sapien
ccttacaagtagctgggactatatgcatgggcc

SEQ ID NO: 911039 - DNA, 33 bp, Homo sapien
cctccactcctgggcacaagtgtcctctcacct

SEQ ID NO: 911040 - DNA, 33 bp, Homo sapien
cctccactcctgggcataagtgtcctctcacct

SEQ ID NO: 911041 - DNA, 33 bp, Homo sapien
catccttccaccaggcagatttaagactgctaa

SEQ ID NO: 911042 - DNA, 33 bp, Homo sapien
catccttccaccaggccgatttaagactgctaa

SEQ ID NO: 911043 - DNA, 33 bp, Homo sapien
agacaaagccaaatagaaaataccttatagata

SEQ ID NO: 911044 - DNA, 33 bp, Homo sapien
agacaaagccaaatagcaaataccttatagata

SEQ ID NO: 911045 - DNA, 33 bp, Homo sapien
gtggttcacaaagagacagacctcggccttagg

SEQ ID NO: 911046 - DNA, 33 bp, Homo sapien
gtggttcacaaagagatagacctcggccttagg

SEQ ID NO: 911047 - DNA, 33 bp, Homo sapien
tgagaaaaaacaaaggcaatgactgtaattaaa

SEQ ID NO: 911048 - DNA, 33 bp, Homo sapien
tgagaaaaaacaaaggtaatgactgtaattaaa

SEQ ID NO: 911049 - DNA, 33 bp, Homo sapien
taaatccaaacccagccgaatatcaatacacgg

SEQ ID NO: 911050 - DNA, 33 bp, Homo sapien
taaatccaaacccagctgaatatcaatacacgg

SEQ ID NO: 911051 - DNA, 33 bp, Homo sapien
cccggagttttaggaaacagctagagaggggtg

SEQ ID NO: 911052 - DNA, 33 bp, Homo sapien
cccggagttttaggaaccagctagagaggggtg

SEQ ID NO: 911053 - DNA, 33 bp, Homo sapien
ctttccagaggccgccactaccatttattgctt

SEQ ID NO: 911054 - DNA, 33 bp, Homo sapien
ctttccagaggccgccgctaccatttattgctt

SEQ ID NO: 911055 - DNA, 33 bp, Homo sapien
accctttcagcaatgagctgtttctttctttga

SEQ ID NO: 911056 - DNA, 33 bp, Homo sapien
accctttcagcaatgatctgtttctttctttga

SEQ ID NO: 911057 - DNA, 33 bp, Homo sapien
aggaaatctttcaagcacagaggggtccgcggt

SEQ ID NO: 911058 - DNA, 33 bp, Homo sapien
aggaaatctttcaagcgcagaggggtccgcggt

SEQ ID NO: 911059 - DNA, 33 bp, Homo sapien
tgaacccacaaggcgaagaaggttgcagtgagc

SEQ ID NO: 911060 - DNA, 33 bp, Homo sapien
tgaacccacaaggcgacgaaggttgcagtgagc

SEQ ID NO: 911061 - DNA, 33 bp, Homo sapien
gggtcttccggttctacgaacacagccactgac

SEQ ID NO: 911062 - DNA, 33 bp, Homo sapien
gggtcttccggttctatgaacacagccactgac

SEQ ID NO: 911063 - DNA, 33 bp, Homo sapien
ttacagattatctctcaatttggatttgtctgt

SEQ ID NO: 911064 - DNA, 33 bp, Homo sapien
ttacagattatctctccatttggatttgtctgt

SEQ ID NO: 911065 - DNA, 33 bp, Homo sapien
aatgaatcacttgcacactaatctctaactcaa

SEQ ID NO: 911066 - DNA, 33 bp, Homo sapien
aatgaatcacttgcacgctaatctctaactcaa

SEQ ID NO: 911067 - DNA, 33 bp, Homo sapien
tagcaaggagagaagaaaagaaactaaccatat

SEQ ID NO: 911068 - DNA, 33 bp, Homo sapien
tagcaaggagagaagacaagaaactaaccatat

SEQ ID NO: 911069 - DNA, 33 bp, Homo sapien
acactatgaccaaagaaatggatgtgcaaaagc

SEQ ID NO: 911070 - DNA, 33 bp, Homo sapien
acactatgaccaaagacatggatgtgcaaaagc

SEQ ID NO: 911071 - DNA, 33 bp, Homo sapien
aggaagacaagagttaataaatacaagagaatc

SEQ ID NO: 911072 - DNA, 33 bp, Homo sapien
aggaagacaagagttagtaaatacaagagaatc

SEQ ID NO: 911073 - DNA, 33 bp, Homo sapien
tcaagtaagttgactgacaatttttctaagcag

SEQ ID NO: 911074 - DNA, 33 bp, Homo sapien
tcaagtaagttgactggcaatttttctaagcag

SEQ ID NO: 911075 - DNA, 33 bp, Homo sapien
ttttgccatgtctacagtaagactctcactttc

SEQ ID NO: 911076 - DNA, 33 bp, Homo sapien
ttttgccatgtctacattaagactctcactttc

SEQ ID NO: 911077 - DNA, 33 bp, Homo sapien
acttgactatttgatgcaagaggcctggctttc

SEQ ID NO: 911078 - DNA, 33 bp, Homo sapien
acttgactatttgatggaagaggcctggctttc

SEQ ID NO: 911079 - DNA, 33 bp, Homo sapien
tcaaaccaggttggaacgctttagaatgatggc

SEQ ID NO: 911080 - DNA, 33 bp, Homo sapien
tcaaaccaggttggaatgctttagaatgatggc

SEQ ID NO: 911081 - DNA, 33 bp, Homo sapien
aattgtgtgttataaaaagaaggtgtctgtctt

SEQ ID NO: 911082 - DNA, 33 bp, Homo sapien
aattgtgtgttataaagagaaggtgtctgtctt

SEQ ID NO: 911083 - DNA, 33 bp, Homo sapien
gagaacagctgcctcaagaagactgcctgggag

SEQ ID NO: 911084 - DNA, 33 bp, Homo sapien
gagaacagctgcctcaggaagactgcctgggag

SEQ ID NO: 911085 - DNA, 33 bp, Homo sapien
catttttgatattgaacgtcttgcgaatctcct

SEQ ID NO: 911086 - DNA, 33 bp, Homo sapien
catttttgatattgaatgtcttgcgaatctcct

SEQ ID NO: 911087 - DNA, 33 bp, Homo sapien
taaaattgatccctcaactataaaagcctaggt

SEQ ID NO: 911088 - DNA, 33 bp, Homo sapien
taaaattgatccctcatctataaaagcctaggt

SEQ ID NO: 911089 - DNA, 33 bp, Homo sapien
ctttctgtcatgtttccaagaccctttcaacac

SEQ ID NO: 911090 - DNA, 33 bp, Homo sapien
ctttctgtcatgtttctaagaccctttcaacac

SEQ ID NO: 911091 - DNA, 33 bp, Homo sapien
aaggacaagagagtgccagaaagcaagagggca

SEQ ID NO: 911092 - DNA, 33 bp, Homo sapien
aaggacaagagagtgcgagaaagcaagagggca

SEQ ID NO: 911093 - DNA, 33 bp, Homo sapien
cagaaaatactttgaacaggtccttcggcatcc

SEQ ID NO: 911094 - DNA, 33 bp, Homo sapien
cagaaaatactttgaagaggtccttcggcatcc

SEQ ID NO: 911095 - DNA, 33 bp, Homo sapien
aaaagccacaccaatacgctcccatgtcgtatg

SEQ ID NO: 911096 - DNA, 33 bp, Homo sapien
aaaagccacaccaatatgctcccatgtcgtatg

SEQ ID NO: 911097 - DNA, 33 bp, Homo sapien
taaagtgtagtccatgaatgtatttgtcagaaa

SEQ ID NO: 911098 - DNA, 33 bp, Homo sapien
taaagtgtagtccatggatgtatttgtcagaaa

SEQ ID NO: 911099 - DNA, 33 bp, Homo sapien
gaaaatacatgaactaaaaggacagatttgggc

SEQ ID NO: 911100 - DNA, 33 bp, Homo sapien
gaaaatacatgaactacaaggacagatttgggc

SEQ ID NO: 911101 - DNA, 33 bp, Homo sapien
tctaccattgagcagaaaacccagttgaagtgg

SEQ ID NO: 911102 - DNA, 33 bp, Homo sapien
tctaccattgagcagacaacccagttgaagtgg

SEQ ID NO: 911103 - DNA, 33 bp, Homo sapien
aaaaaaaagagtatcacaacattacccttcttt

SEQ ID NO: 911104 - DNA, 33 bp, Homo sapien
aaaaaaaagagtatcagaacattacccttcttt

SEQ ID NO: 911105 - DNA, 33 bp, Homo sapien; identical to SEQ ID NO: 911103

SEQ ID NO: 911106 - DNA, 33 bp, Homo sapien; identical to SEQ ID NO: 911104

SEQ ID NO: 911107 - DNA, 33 bp, Homo sapien
agtcctcaccctgtgcaatctgaccctatctcc

SEQ ID NO: 911108 - DNA, 33 bp, Homo sapien
agtcctcaccctgtgcgatctgaccctatctcc

SEQ ID NO: 911109 - DNA, 33 bp, Homo sapien
ggcagttactcatgaacggtttcgcaccatccc

SEQ ID NO: 911110 - DNA, 33 bp, Homo sapien
ggcagttactcatgaatggtttcgcaccatccc

SEQ ID NO: 911111 - DNA, 33 bp, Homo sapien
cagagctggttttctcacttcatccaggtcctc

SEQ ID NO: 911112 - DNA, 33 bp, Homo sapien
cagagctggttttctcgcttcatccaggtcctc

SEQ ID NO: 911113 - DNA, 33 bp, Homo sapien
taccaccctcatttcaactaatagcgatgtggt

SEQ ID NO: 911114 - DNA, 33 bp, Homo sapien
taccaccctcatttcatctaatagcgatgtggt

SEQ ID NO: 911115 - DNA, 33 bp, Homo sapien
gctgcccttctcccaccacattgcctagttcac

SEQ ID NO: 911116 - DNA, 33 bp, Homo sapien
gctgcccttctcccacgacattgcctagttcac

SEQ ID NO: 911117 - DNA, 33 bp, Homo sapien
gaccttgtttaaacacagatgaaaaggaatgaa

SEQ ID NO: 911118 - DNA, 33 bp, Homo sapien
gaccttgtttaaacactgatgaaaaggaatgaa

SEQ ID NO: 911119 - DNA, 33 bp, Homo sapien
tctttccctcaaaccacatcattttcccaatga

SEQ ID NO: 911120 - DNA, 33 bp, Homo sapien
tctttccctcaaaccatatcattttcccaatga

SEQ ID NO: 911121 - DNA, 33 bp, Homo sapien
gacctacagaataagcacaaggcattttcatgt

SEQ ID NO: 911122 - DNA, 33 bp, Homo sapien
gacctacagaataagcgcaaggcattttcatgt

SEQ ID NO: 911123 - DNA, 33 bp, Homo sapien
aagacccaaaattcaccgaatgaatgaaagaaa

SEQ ID NO: 911124 - DNA, 33 bp, Homo sapien
aagacccaaaattcactgaatgaatgaaagaaa

SEQ ID NO: 911125 - DNA, 33 bp, Homo sapien
aaatctaaatgcaaaggaagagtgacagtatta

SEQ ID NO: 911126 - DNA, 33 bp, Homo sapien
aaatctaaatgcaaagtaagagtgacagtatta

SEQ ID NO: 911127 - DNA, 33 bp, Homo sapien
catttgggcagagcaacagcgcctcagctcatc

SEQ ID NO: 911128 - DNA, 33 bp, Homo sapien
catttgggcagagcaagagcgcctcagctcatc

SEQ ID NO: 911129 - DNA, 33 bp, Homo sapien
gctgcagtgagttgtaataaggccactgcactc

SEQ ID NO: 911130 - DNA, 33 bp, Homo sapien
gctgcagtgagttgtagtaaggccactgcactc

SEQ ID NO: 911131 - DNA, 33 bp, Homo sapien
agccaaaacaacttgcagaaaataagtctacag

SEQ ID NO: 911132 - DNA, 33 bp, Homo sapien
agccaaaacaacttgcggaaaataagtctacag

SEQ ID NO: 911133 - DNA, 33 bp, Homo sapien
atattccttacatgggaatcacataaagaaagt

SEQ ID NO: 911134 - DNA, 33 bp, Homo sapien
atattccttacatgggtatcacataaagaaagt

SEQ ID NO: 911135 - DNA, 33 bp, Homo sapien
gaccctttaactcgaaaacctgtcacatcctag

SEQ ID NO: 911136 - DNA, 33 bp, Homo sapien
gaccctttaactcgaacacctgtcacatcctag

SEQ ID NO: 911137 - DNA, 33 bp, Homo sapien; identical to SEQ ID NO: 911135

SEQ ID NO: 911138 - DNA, 33 bp, Homo sapien; identical to SEQ ID NO: 911136

SEQ ID NO: 911139 - DNA, 33 bp, Homo sapien
aaaaaaaaaagtaaccaaatgacatcaggagtg

SEQ ID NO: 911140 - DNA, 33 bp, Homo sapien
aaaaaaaaaagtaaccgaatgacatcaggagtg

SEQ ID NO: 911141 - DNA, 33 bp, Homo sapien
gacgaggctttacaacagtgatgtttgggtgag

SEQ ID NO: 911142 - DNA, 33 bp, Homo sapien
gacgaggctttacaacggtgatgtttgggtgag

SEQ ID NO: 911143 - DNA, 33 bp, Homo sapien
tgatcccttgacaccaataagacaggcctctcg

SEQ ID NO: 911144 - DNA, 33 bp, Homo sapien
tgatcccttgacaccagtaagacaggcctctcg

SEQ ID NO: 911145 - DNA, 33 bp, Homo sapien
aatggtatataggaaaatcattttgtacagtta

SEQ ID NO: 911146 - DNA, 33 bp, Homo sapien
aatggtatataggaaagtcattttgtacagtta

SEQ ID NO: 911147 - DNA, 33 bp, Homo sapien
ccaccgcggtcgccacagcagaaggcatccctg

SEQ ID NO: 911148 - DNA, 33 bp, Homo sapien
ccaccgcggtcgccacggcagaaggcatccctg

SEQ ID NO: 911149 - DNA, 33 bp, Homo sapien
ccagtctcaagctgaaaatctttatgtagaagg

SEQ ID NO: 911150 - DNA, 33 bp, Homo sapien
ccagtctcaagctgaagatctttatgtagaagg

SEQ ID NO: 911151 - DNA, 33 bp, Homo sapien
tgaactcagctactcaaggtccattttgtcaag

SEQ ID NO: 911152 - DNA, 33 bp, Homo sapien
tgaactcagctactcacggtccattttgtcaag

SEQ ID NO: 911153 - DNA, 33 bp, Homo sapien
caggaactgtgcgggacacaaaatgtaagagaa

SEQ ID NO: 911154 - DNA, 33 bp, Homo sapien
caggaactgtgcgggatacaaaatgtaagagaa

SEQ ID NO: 911155 - DNA, 33 bp, Homo sapien
ttgtattctccagtaacgtaagaacccacttaa

SEQ ID NO: 911156 - DNA, 33 bp, Homo sapien
ttgtattctccagtaatgtaagaacccacttaa

SEQ ID NO: 911157 - DNA, 33 bp, Homo sapien
agggatggttaatgaactgcaaaaatccaagac

SEQ ID NO: 911158 - DNA, 33 bp, Homo sapien
agggatggttaatgaattgcaaaaatccaagac

SEQ ID NO: 911159 - DNA, 33 bp, Homo sapien
ctgaccccaaaagccacgctatcaatcacaatg

SEQ ID NO: 911160 - DNA, 33 bp, Homo sapien
ctgaccccaaaagccatgctatcaatcacaatg

SEQ ID NO: 911161 - DNA, 33 bp, Homo sapien
gctgagcactgcacaacttccacggctgccata

SEQ ID NO: 911162 - DNA, 33 bp, Homo sapien
gctgagcactgcacaatttccacggctgccata

SEQ ID NO: 911163 - DNA, 33 bp, Homo sapien
ttaggaatacgaaaagaagccatgcagtgggct

SEQ ID NO: 911164 - DNA, 33 bp, Homo sapien
ttaggaatacgaaaaggagccatgcagtgggct

SEQ ID NO: 911165 - DNA, 33 bp, Homo sapien
tatgcagtgttcaagacaacttttgaagtttcc

SEQ ID NO: 911166 - DNA, 33 bp, Homo sapien
tatgcagtgttcaagataacttttgaagtttcc

SEQ ID NO: 911167 - DNA, 33 bp, Homo sapien
agttttcagtttgacaatattcttgcaggtatt

SEQ ID NO: 911168 - DNA, 33 bp, Homo sapien
agttttcagtttgacagtattcttgcaggtatt

SEQ ID NO: 911169 - DNA, 33 bp, Homo sapien
aaattgcaccactacaatatagactggatgaca

SEQ ID NO: 911170 - DNA, 33 bp, Homo sapien
aaattgcaccactacactatagactggatgaca

SEQ ID NO: 911171 - DNA, 33 bp, Homo sapien
aataaaaataactacaagatgaatgatcagtca

SEQ ID NO: 911172 - DNA, 33 bp, Homo sapien
aataaaaataactacaggatgaatgatcagtca

SEQ ID NO: 911173 - DNA, 33 bp, Homo sapien
ccaaatactgctccccacaacaaattccgaaaa

SEQ ID NO: 911174 - DNA, 33 bp, Homo sapien
ccaaatactgctccccgcaacaaattccgaaaa

SEQ ID NO: 911175 - DNA, 33 bp, Homo sapien
tatccatatgacgataaatgttcaccgaggttt

SEQ ID NO: 911176 - DNA, 33 bp, Homo sapien
tatccatatgacgatacatgttcaccgaggttt

SEQ ID NO: 911177 - DNA, 33 bp, Homo sapien
ctacttcttatcaacgcagggcttgagacctct

SEQ ID NO: 911178 - DNA, 33 bp, Homo sapien
ctacttcttatcaacggagggcttgagacctct

SEQ ID NO: 911179 - DNA, 33 bp, Homo sapien
gtctaggtttaatgtagaacttgcaagaaatct

SEQ ID NO: 911180 - DNA, 33 bp, Homo sapien
gtctaggtttaatgtataacttgcaagaaatct

SEQ ID NO: 911181 - DNA, 33 bp, Homo sapien
actctgcgtcctttgaataaggcctgagctttt

SEQ ID NO: 911182 - DNA, 33 bp, Homo sapien
actctgcgtcctttgagtaaggcctgagctttt

SEQ ID NO: 911183 - DNA, 33 bp, Homo sapien
atgtgatctaacttcaagtctgacagcatcagc

SEQ ID NO: 911184 - DNA, 33 bp, Homo sapien
atgtgatctaacttcaggtctgacagcatcagc

SEQ ID NO: 911185 - DNA, 33 bp, Homo sapien
gtatgtagccttttcacatttgcttctttcact

SEQ ID NO: 911186 - DNA, 33 bp, Homo sapien
gtatgtagccttttcagatttgcttctttcact

SEQ ID NO: 911187 - DNA, 33 bp, Homo sapien
tgtcctactcaggaagcaatatagtgttctttg

SEQ ID NO: 911188 - DNA, 33 bp, Homo sapien
tgtcctactcaggaaggaatatagtgttctttg

SEQ ID NO: 911189 - DNA, 33 bp, Homo sapien
aaatatttgacaaatcagagattattgatgcct

SEQ ID NO: 911190 - DNA, 33 bp, Homo sapien
aaatatttgacaaatcggagattattgatgcct

SEQ ID NO: 911191 - DNA, 33 bp, Homo sapien
cccagatgcactaataaaggttttcaaatgtca

SEQ ID NO: 911192 - DNA, 33 bp, Homo sapien
cccagatgcactaatataggttttcaaatgtca

SEQ ID NO: 911193 - DNA, 33 bp, Homo sapien
agcaggattttgcaaacaggaaactggtgttca

SEQ ID NO: 911194 - DNA, 33 bp, Homo sapien
agcaggattttgcaaagaggaaactggtgttca

SEQ ID NO: 911195 - DNA, 33 bp, Homo sapien
gtgaatatgtgtaagcagcacgttgagttcaaa

SEQ ID NO: 911196 - DNA, 33 bp, Homo sapien
gtgaatatgtgtaagcggcacgttgagttcaaa

SEQ ID NO: 911197 - DNA, 33 bp, Homo sapien
taattactttatcaaacttgctctcataaaata

SEQ ID NO: 911198 - DNA, 33 bp, Homo sapien
taattactttatcaaatttgctctcataaaata

SEQ ID NO: 911199 - DNA, 33 bp, Homo sapien
agcatgattcaatttgcactttaaaaattcaag

SEQ ID NO: 911200 - DNA, 33 bp, Homo sapien
agcatgattcaatttgtactttaaaaattcaag

SEQ ID NO: 911201 - DNA, 33 bp, Homo sapien
aagatgagcctgcaaaccaaaattccaaaagat

SEQ ID NO: 911202 - DNA, 33 bp, Homo sapien
aagatgagcctgcaaatcaaaattccaaaagat

SEQ ID NO: 911203 - DNA, 33 bp, Homo sapien
cgattgtctggcactacctactaatgatgactg

SEQ ID NO: 911204 - DNA, 33 bp, Homo sapien
cgattgtctggcactatctactaatgatgactg

SEQ ID NO: 911205 - DNA, 33 bp, Homo sapien
gtgccagacaatcgcacggccatataagaacat

SEQ ID NO: 911206 - DNA, 33 bp, Homo sapien
gtgccagacaatcgcagggccatataagaacat

SEQ ID NO: 911207 - DNA, 33 bp, Homo sapien
ggttctcaatgtgccacgtctccgtgcttttcc

SEQ ID NO: 911208 - DNA, 33 bp, Homo sapien
ggttctcaatgtgccatgtctccgtgcttttcc

SEQ ID NO: 911209 - DNA, 33 bp, Homo sapien
taaagtcaaaagactgaaagttgaaccactgta

SEQ ID NO: 911210 - DNA, 33 bp, Homo sapien
taaagtcaaaagactgcaagttgaaccactgta

SEQ ID NO: 911211 - DNA, 33 bp, Homo sapien
ctttggagctaagagcagagattgactgaaaat

SEQ ID NO: 911212 - DNA, 33 bp, Homo sapien
ctttggagctaagagcggagattgactgaaaat

SEQ ID NO: 911213 - DNA, 33 bp, Homo sapien
gggaggatccttgagccgaagaagttgaggctt

SEQ ID NO: 911214 - DNA, 33 bp, Homo sapien
gggaggatccttgagctgaagaagttgaggctt

SEQ ID NO: 911215 - DNA, 33 bp, Homo sapien
agaagctttcacactgcattagaagtgaggaag

SEQ ID NO: 911216 - DNA, 33 bp, Homo sapien
agaagctttcacactgtattagaagtgaggaag

SEQ ID NO: 911217 - DNA, 33 bp, Homo sapien
ctggctccatggaataaaagggactgcttcact

SEQ ID NO: 911218 - DNA, 33 bp, Homo sapien
ctggctccatggaatagaagggactgcttcact

SEQ ID NO: 911219 - DNA, 33 bp, Homo sapien; identical to SEQ ID NO: 911217

SEQ ID NO: 911220 - DNA, 33 bp, Homo sapien; identical to SEQ ID NO: 911218

SEQ ID NO: 911221 - DNA, 33 bp, Homo sapien
tattgtatccacgttaagccagaaaagctagtt

SEQ ID NO: 911222 - DNA, 33 bp, Homo sapien
tattgtatccacgttaggccagaaaagctagtt

SEQ ID NO: 911223 - DNA, 33 bp, Homo sapien
tcaagtatcctgttacagcagcataaacagact

SEQ ID NO: 911224 - DNA, 33 bp, Homo sapien
tcaagtatcctgttacggcagcataaacagact

SEQ ID NO: 911225 - DNA, 33 bp, Homo sapien
gtggtggtggacacataatcatagaaataataa

SEQ ID NO: 911226 - DNA, 33 bp, Homo sapien
gtggtggtggacacatcatcatagaaataataa

SEQ ID NO: 911227 - DNA, 33 bp, Homo sapien
tattacccttgtggcacagcatccttattcatg

SEQ ID NO: 911228 - DNA, 33 bp, Homo sapien
tattacccttgtggcatagcatccttattcatg

SEQ ID NO: 911229 - DNA, 33 bp, Homo sapien
aaatgcctttaaacaacagaggtttctgttttc

SEQ ID NO: 911230 - DNA, 33 bp, Homo sapien
aaatgcctttaaacaatagaggtttctgttttc

SEQ ID NO: 911231 - DNA, 33 bp, Homo sapien
agaagagccatgtgacagcttgaagtgaaaggg

SEQ ID NO: 911232 - DNA, 33 bp, Homo sapien
agaagagccatgtgacggcttgaagtgaaaggg

SEQ ID NO: 911233 - DNA, 33 bp, Homo sapien
ccactaagacttggaacggtttgctgggtagca

SEQ ID NO: 911234 - DNA, 33 bp, Homo sapien
ccactaagacttggaatggtttgctgggtagca

SEQ ID NO: 911235 - DNA, 33 bp, Homo sapien
gctctacgggttcttagaatagcaatgaacctt

SEQ ID NO: 911236 - DNA, 33 bp, Homo sapien
gctctacgggttcttataatagcaatgaacctt

SEQ ID NO: 911237 - DNA, 33 bp, Homo sapien
ttttaaaactcatatcgcatgtctcatgttcgt

SEQ ID NO: 911238 - DNA, 33 bp, Homo sapien
ttttaaaactcatatctcatgtctcatgttcgt

SEQ ID NO: 911239 - DNA, 33 bp, Homo sapien
acctgctttctttcccaaggcttcaaagggaat

SEQ ID NO: 911240 - DNA, 33 bp, Homo sapien
acctgctttctttcccgaggcttcaaagggaat

SEQ ID NO: 911241 - DNA, 33 bp, Homo sapien
cagtgtatgtcagtagcatagttgacagagtat

SEQ ID NO: 911242 - DNA, 33 bp, Homo sapien
cagtgtatgtcagtagtatagttgacagagtat

SEQ ID NO: 911243 - DNA, 33 bp, Homo sapien
gtgcgtcataacaaaactctcatgttttcatca

SEQ ID NO: 911244 - DNA, 33 bp, Homo sapien
gtgcgtcataacaaaagtctcatgttttcatca

SEQ ID NO: 911245 - DNA, 33 bp, Homo sapien
agtacacagtgagagacgtacttacatggtttc

SEQ ID NO: 911246 - DNA, 33 bp, Homo sapien
agtacacagtgagagaggtacttacatggtttc

SEQ ID NO: 911247 - DNA, 33 bp, Homo sapien; identical to SEQ ID NO: 911245

SEQ ID NO: 911248 - DNA, 33 bp, Homo sapien; identical to SEQ ID NO: 911246

SEQ ID NO: 911249 - DNA, 33 bp, Homo sapien
tttcttaagtggagttaaaaagagttgtacaga

SEQ ID NO: 911250 - DNA, 33 bp, Homo sapien
tttcttaagtggagttgaaaagagttgtacaga

SEQ ID NO: 911251 - DNA, 33 bp, Homo sapien; identical to SEQ ID NO: 911249

SEQ ID NO: 911252 - DNA, 33 bp, Homo sapien; identical to SEQ ID NO: 911250

SEQ ID NO: 911253 - DNA, 33 bp, Homo sapien
ggtctgtttcccaactgaatatccagggatttt

SEQ ID NO: 911254 - DNA, 33 bp, Homo sapien
ggtctgtttcccaacttaatatccagggatttt

SEQ ID NO: 911255 - DNA, 33 bp, Homo sapien; identical to SEQ ID NO: 911253

SEQ ID NO: 911256 - DNA, 33 bp, Homo sapien; identical to SEQ ID NO: 911254

SEQ ID NO: 911257 - DNA, 33 bp, Homo sapien
ctctctcacctatgaccgggaagcctcctccct

SEQ ID NO: 911258 - DNA, 33 bp, Homo sapien
ctctctcacctatgactgggaagcctcctccct

SEQ ID NO: 911259 - DNA, 33 bp, Homo sapien
cccctgtcatgaaaaactggccctgtctagaca

SEQ ID NO: 911260 - DNA, 33 bp, Homo sapien
cccctgtcatgaaaaattggccctgtctagaca

SEQ ID NO: 911261 - DNA, 33 bp, Homo sapien
gcacacctggtccagtcaatctcttgggcccta

SEQ ID NO: 911262 - DNA, 33 bp, Homo sapien
gcacacctggtccagttaatctcttgggcccta

SEQ ID NO: 911263 - DNA, 33 bp, Homo sapien
aatgagaagaatcgccaaccttgaacaagtgga

SEQ ID NO: 911264 - DNA, 33 bp, Homo sapien
aatgagaagaatcgccgaccttgaacaagtgga

SEQ ID NO: 911265 - DNA, 33 bp, Homo sapien
aaagctcattaggaaaaattattcacaatgaag

SEQ ID NO: 911266 - DNA, 33 bp, Homo sapien
aaagctcattaggaaagattattcacaatgaag

SEQ ID NO: 911267 - DNA, 33 bp, Homo sapien
ggaaaagccctgaggacaaaggaagtctgcata

SEQ ID NO: 911268 - DNA, 33 bp, Homo sapien
ggaaaagccctgaggagaaaggaagtctgcata

SEQ ID NO: 911269 - DNA, 33 bp, Homo sapien
atggcttactgcaaaaaccccctgtattagtct

SEQ ID NO: 911270 - DNA, 33 bp, Homo sapien
atggcttactgcaaaacccccctgtattagtct

SEQ ID NO: 911271 - DNA, 33 bp, Homo sapien
gccactttatgtgtcccaaagaataccaacaag

SEQ ID NO: 911272 - DNA, 33 bp, Homo sapien
gccactttatgtgtccgaaagaataccaacaag

SEQ ID NO: 911273 - DNA, 33 bp, Homo sapien
gttacaagccggttcaacctctagcgattgtag

SEQ ID NO: 911274 - DNA, 33 bp, Homo sapien
gttacaagccggttcaccctctagcgattgtag

SEQ ID NO: 911275 - DNA, 33 bp, Homo sapien
acagcccgggttctgacacagggctgcaagctg

SEQ ID NO: 911276 - DNA, 33 bp, Homo sapien
acagcccgggttctgagacagggctgcaagctg

SEQ ID NO: 911277 - DNA, 33 bp, Homo sapien
tctcatggctttcaaaatctctccagctcttgc

SEQ ID NO: 911278 - DNA, 33 bp, Homo sapien
tctcatggctttcaaagtctctccagctcttgc

SEQ ID NO: 911279 - DNA, 33 bp, Homo sapien
atcctacccaaggtcacctagcatctgagtggc

SEQ ID NO: 911280 - DNA, 33 bp, Homo sapien
atcctacccaaggtcatctagcatctgagtggc

SEQ ID NO: 911281 - DNA, 33 bp, Homo sapien
cccccaggctatggacaagtactgagtctgtgg

SEQ ID NO: 911282 - DNA, 33 bp, Homo sapien
cccccaggctatggaccagtactgagtctgtgg

SEQ ID NO: 911283 - DNA, 33 bp, Homo sapien
cccggctttcttgaacaaaatcgtcaataatct

SEQ ID NO: 911284 - DNA, 33 bp, Homo sapien
cccggctttcttgaacgaaatcgtcaataatct

SEQ ID NO: 911285 - DNA, 33 bp, Homo sapien
agctgagatactaatgaatacaaatggactatc

SEQ ID NO: 911286 - DNA, 33 bp, Homo sapien
agctgagatactaatggatacaaatggactatc

SEQ ID NO: 911287 - DNA, 33 bp, Homo sapien
atgctctgttcacgggaaactttccttcttatg

SEQ ID NO: 911288 - DNA, 33 bp, Homo sapien
atgctctgttcacggggaactttccttcttatg

SEQ ID NO: 911289 - DNA, 33 bp, Homo sapien
tcctacttctgcctggccagatacaaatttaag

SEQ ID NO: 911290 - DNA, 33 bp, Homo sapien
tcctacttctgcctggtcagatacaaatttaag

SEQ ID NO: 911291 - DNA, 33 bp, Homo sapien
cctaatgacaacagtaaaggccctggctgtgct

SEQ ID NO: 911292 - DNA, 33 bp, Homo sapien
cctaatgacaacagtacaggccctggctgtgct

SEQ ID NO: 911293 - DNA, 33 bp, Homo sapien
agagctggaaataatcacacatcagttgctcaa

SEQ ID NO: 911294 - DNA, 33 bp, Homo sapien
agagctggaaataatcgcacatcagttgctcaa

SEQ ID NO: 911295 - DNA, 33 bp, Homo sapien
gtccaatgaagatgcaactttgatgtaaatctt

SEQ ID NO: 911296 - DNA, 33 bp, Homo sapien
gtccaatgaagatgcagctttgatgtaaatctt

SEQ ID NO: 911297 - DNA, 33 bp, Homo sapien
caagtttgacaaccaccgcataaggtatttcct

SEQ ID NO: 911298 - DNA, 33 bp, Homo sapien
caagtttgacaaccactgcataaggtatttcct

SEQ ID NO: 911299 - DNA, 33 bp, Homo sapien
gggacccaaaagcccacagtgagtaaggatgag

SEQ ID NO: 911300 - DNA, 33 bp, Homo sapien
gggacccaaaagcccagagtgagtaaggatgag

SEQ ID NO: 911301 - DNA, 33 bp, Homo sapien
tgctagcatgcacaaaacaataatgtaattctg

SEQ ID NO: 911302 - DNA, 33 bp, Homo sapien
tgctagcatgcacaaagcaataatgtaattctg

SEQ ID NO: 911303 - DNA, 33 bp, Homo sapien
caccaccacctttcacaccagctactcttggct

SEQ ID NO: 911304 - DNA, 33 bp, Homo sapien
caccaccacctttcacgccagctactcttggct

SEQ ID NO: 911305 - DNA, 33 bp, Homo sapien
agctggtaaatggaagaatgaagacttgaatac

SEQ ID NO: 911306 - DNA, 33 bp, Homo sapien
agctggtaaatggaaggatgaagacttgaatac

SEQ ID NO: 911307 - DNA, 33 bp, Homo sapien
tgtgtggggaaaaccactgagtcttgggcccag

SEQ ID NO: 911308 - DNA, 33 bp, Homo sapien
tgtgtggggaaaaccattgagtcttgggcccag

SEQ ID NO: 911309 - DNA, 33 bp, Homo sapien
tgaggaccaatttctgacaaaatttgtgaacac

SEQ ID NO: 911310 - DNA, 33 bp, Homo sapien
tgaggaccaatttctggcaaaatttgtgaacac

SEQ ID NO: 911311 - DNA, 33 bp, Homo sapien
tgagcgggtcacaagaagagtgtcaggatcaag

SEQ ID NO: 911312 - DNA, 33 bp, Homo sapien
tgagcgggtcacaagaggagtgtcaggatcaag

SEQ ID NO: 911313 - DNA, 33 bp, Homo sapien
cactatctgcaacacaagagtttatttctcatc

SEQ ID NO: 911314 - DNA, 33 bp, Homo sapien
cactatctgcaacacaggagtttatttctcatc

SEQ ID NO: 911315 - DNA, 33 bp, Homo sapien
ttttatgttcagaaaagagaggccatgtgtttg

SEQ ID NO: 911316 - DNA, 33 bp, Homo sapien
ttttatgttcagaaaatagaggccatgtgtttg

SEQ ID NO: 911317 - DNA, 33 bp, Homo sapien
tggtatcagtgcaaggaattaggaggctcaagc

SEQ ID NO: 911318 - DNA, 33 bp, Homo sapien
tggtatcagtgcaaggcattaggaggctcaagc

SEQ ID NO: 911319 - DNA, 33 bp, Homo sapien
cttctcttaaaaaaaagaatgtggtagcagaac

SEQ ID NO: 911320 - DNA, 33 bp, Homo sapien
cttctcttaaaaaaaataatgtggtagcagaac

SEQ ID NO: 911321 - DNA, 33 bp, Homo sapien
taacacttacaggttcaaggcattaggacatgg

SEQ ID NO: 911322 - DNA, 33 bp, Homo sapien
taacacttacaggttcgaggcattaggacatgg

SEQ ID NO: 911323 - DNA, 33 bp, Homo sapien
tggaaatctgttgctacatttggcctaaagaaa

SEQ ID NO: 911324 - DNA, 33 bp, Homo sapien
tggaaatctgttgctatatttggcctaaagaaa

SEQ ID NO: 911325 - DNA, 33 bp, Homo sapien
catatctggggttagcaaagacttttcagacaa

SEQ ID NO: 911326 - DNA, 33 bp, Homo sapien
catatctggggttagcgaagacttttcagacaa

SEQ ID NO: 911327 - DNA, 33 bp, Homo sapien
tcagaattggaaagaaattccgatatcaacagg

SEQ ID NO: 911328 - DNA, 33 bp, Homo sapien
tcagaattggaaagaacttccgatatcaacagg

SEQ ID NO: 911329 - DNA, 33 bp, Homo sapien
ctggacagcatagccaagccctttctcttaaaa

SEQ ID NO: 911330 - DNA, 33 bp, Homo sapien
ctggacagcatagccaggccctttctcttaaaa

SEQ ID NO: 911331 - DNA, 33 bp, Homo sapien
ccttccaagaggactacgagggtgaagagagtg

SEQ ID NO: 911332 - DNA, 33 bp, Homo sapien
ccttccaagaggactatgagggtgaagagagtg

SEQ ID NO: 911333 - DNA, 33 bp, Homo sapien
tgacctccagatttgacaaccaccaatttccag

SEQ ID NO: 911334 - DNA, 33 bp, Homo sapien
tgacctccagatttgataaccaccaatttccag

SEQ ID NO: 911335 - DNA, 33 bp, Homo sapien
agtgctgacatgttgcccatctctgcagagaac

SEQ ID NO: 911336 - DNA, 33 bp, Homo sapien
agtgctgacatgttgctcatctctgcagagaac

SEQ ID NO: 911337 - DNA, 33 bp, Homo sapien
caatatgaccgcccctaaaagatctctatctat

SEQ ID NO: 911338 - DNA, 33 bp, Homo sapien
caatatgaccgccccttaaagatctctatctat

SEQ ID NO: 911339 - DNA, 33 bp, Homo sapien
ttcaaaaaagaggaaactcagagaaatgaaatg

SEQ ID NO: 911340 - DNA, 33 bp, Homo sapien
ttcaaaaaagaggaaattcagagaaatgaaatg

SEQ ID NO: 911341 - DNA, 33 bp, Homo sapien
actccctagggtactgaagaaagaggacctcag

SEQ ID NO: 911342 - DNA, 33 bp, Homo sapien
actccctagggtactggagaaagaggacctcag

SEQ ID NO: 911343 - DNA, 33 bp, Homo sapien
taggtaatcagacagacgtgagaagggcaggag

SEQ ID NO: 911344 - DNA, 33 bp, Homo sapien
taggtaatcagacagatgtgagaagggcaggag

SEQ ID NO: 911345 - DNA, 33 bp, Homo sapien
aatatagctcaccttacaggttatgtagacaaa

SEQ ID NO: 911346 - DNA, 33 bp, Homo sapien
aatatagctcaccttataggttatgtagacaaa

SEQ ID NO: 911347 - DNA, 33 bp, Homo sapien
tttatatgtaacctacactctctatatttatat

SEQ ID NO: 911348 - DNA, 33 bp, Homo sapien
tttatatgtaacctaccctctctatatttatat

SEQ ID NO: 911349 - DNA, 33 bp, Homo sapien
gatgtgagtggatgtacctgtttccatgtcgtg

SEQ ID NO: 911350 - DNA, 33 bp, Homo sapien
gatgtgagtggatgtatctgtttccatgtcgtg

SEQ ID NO: 911351 - DNA, 33 bp, Homo sapien
tccatgtcgtgtggctaaaacgcagatgtggtc

SEQ ID NO: 911352 - DNA, 33 bp, Homo sapien
tccatgtcgtgtggctcaaacgcagatgtggtc

SEQ ID NO: 911353 - DNA, 33 bp, Homo sapien
gcaataaaacactagaaacatacttggaagatg

SEQ ID NO: 911354 - DNA, 33 bp, Homo sapien
gcaataaaacactagatacatacttggaagatg

SEQ ID NO: 911355 - DNA, 33 bp, Homo sapien
ggttttctgtttggatcagttaagacgttttta

SEQ ID NO: 911356 - DNA, 33 bp, Homo sapien
ggttttctgtttggattagttaagacgttttta

SEQ ID NO: 911357 - DNA, 33 bp, Homo sapien
ctattatgaataagcgacaggaaatcacatttt

SEQ ID NO: 911358 - DNA, 33 bp, Homo sapien
ctattatgaataagcggcaggaaatcacatttt

SEQ ID NO: 911359 - DNA, 33 bp, Homo sapien
acaattctggctcacacatactagtagatttgg

SEQ ID NO: 911360 - DNA, 33 bp, Homo sapien
acaattctggctcacagatactagtagatttgg

SEQ ID NO: 911361 - DNA, 33 bp, Homo sapien
tttgttagatatgtgacggcaagtaggtggaga

SEQ ID NO: 911362 - DNA, 33 bp, Homo sapien
tttgttagatatgtgatggcaagtaggtggaga

SEQ ID NO: 911363 - DNA, 33 bp, Homo sapien
tctttcctgtgccaaacaaagccaggctggcca

SEQ ID NO: 911364 - DNA, 33 bp, Homo sapien
tctttcctgtgccaaataaagccaggctggcca

SEQ ID NO: 911365 - DNA, 33 bp, Homo sapien
ataaataagcaaatccaagtatacaatacttta

SEQ ID NO: 911366 - DNA, 33 bp, Homo sapien
ataaataagcaaatcccagtatacaatacttta

SEQ ID NO: 911367 - DNA, 33 bp, Homo sapien
cagcctactgccttcaaatgacacagatctgtt

SEQ ID NO: 911368 - DNA, 33 bp, Homo sapien
cagcctactgccttcagatgacacagatctgtt

SEQ ID NO: 911369 - DNA, 33 bp, Homo sapien
aatcacatcagagtaaataaggtatgcatcgct

SEQ ID NO: 911370 - DNA, 33 bp, Homo sapien
aatcacatcagagtaagtaaggtatgcatcgct

SEQ ID NO: 911371 - DNA, 33 bp, Homo sapien
tattgaggtctctaaggcatttccaaaccttga

SEQ ID NO: 911372 - DNA, 33 bp, Homo sapien
tattgaggtctctaagtcatttccaaaccttga

SEQ ID NO: 911373 - DNA, 33 bp, Homo sapien; identical to SEQ ID NO: 911371

SEQ ID NO: 911374 - DNA, 33 bp, Homo sapien; identical to SEQ ID NO: 911372

SEQ ID NO: 911375 - DNA, 33 bp, Homo sapien
ggttctttcctctgtacacctatgtgaattgat

SEQ ID NO: 911376 - DNA, 33 bp, Homo sapien
ggttctttcctctgtagacctatgtgaattgat

SEQ ID NO: 911377 - DNA, 33 bp, Homo sapien; identical to SEQ ID NO: 911375

SEQ ID NO: 911378 - DNA, 33 bp, Homo sapien; identical to SEQ ID NO: 911376

SEQ ID NO: 911379 - DNA, 33 bp, Homo sapien
aatatctgttccgtcactcattatatcaaaata

SEQ ID NO: 911380 - DNA, 33 bp, Homo sapien
aatatctgttccgtcagtcattatatcaaaata

SEQ ID NO: 911381 - DNA, 33 bp, Homo sapien
gaggctgcagagtaagcacctatagatcacaaa

SEQ ID NO: 911382 - DNA, 33 bp, Homo sapien
gaggctgcagagtaagtacctatagatcacaaa

SEQ ID NO: 911383 - DNA, 33 bp, Homo sapien
caggactccttcctgaccatgcagaaaaaaaag

SEQ ID NO: 911384 - DNA, 33 bp, Homo sapien
caggactccttcctgatcatgcagaaaaaaaag

SEQ ID NO: 911385 - DNA, 33 bp, Homo sapien
tgtttatatggctcaaggaggacttttggaagt

SEQ ID NO: 911386 - DNA, 33 bp, Homo sapien
tgtttatatggctcaatgaggacttttggaagt

SEQ ID NO: 911387 - DNA, 33 bp, Homo sapien
agctcattcaagaccaccagaactttgttatgc

SEQ ID NO: 911388 - DNA, 33 bp, Homo sapien
agctcattcaagaccagcagaactttgttatgc

SEQ ID NO: 911389 - DNA, 33 bp, Homo sapien
ggctttctaggttgatcaataaaatctaaaggg

SEQ ID NO: 911390 - DNA, 33 bp, Homo sapien
ggctttctaggttgatgaataaaatctaaaggg

SEQ ID NO: 911391 - DNA, 33 bp, Homo sapien
tgtctttctgctcaaccgtaaaagccctttaga

SEQ ID NO: 911392 - DNA, 33 bp, Homo sapien
tgtctttctgctcaactgtaaaagccctttaga

SEQ ID NO: 911393 - DNA, 33 bp, Homo sapien
attatactgaggaacacgtggaatgtaaactgt

SEQ ID NO: 911394 - DNA, 33 bp, Homo sapien
attatactgaggaacatgtggaatgtaaactgt

SEQ ID NO: 911395 - DNA, 33 bp, Homo sapien
gatccattcattctaccactttttcatcatctg

SEQ ID NO: 911396 - DNA, 33 bp, Homo sapien
gatccattcattctactactttttcatcatctg

SEQ ID NO: 911397 - DNA, 33 bp, Homo sapien
ggtggtcaggaaagtgcacctagatgggaattt

SEQ ID NO: 911398 - DNA, 33 bp, Homo sapien
ggtggtcaggaaagtgtacctagatgggaattt

SEQ ID NO: 911399 - DNA, 33 bp, Homo sapien
cagggaatcataagaaaagcatggagaaaacca

SEQ ID NO: 911400 - DNA, 33 bp, Homo sapien
cagggaatcataagaagagcatggagaaaacca

SEQ ID NO: 911401 - DNA, 33 bp, Homo sapien
gatgactctacctaacaattggagatccgtaac

SEQ ID NO: 911402 - DNA, 33 bp, Homo sapien
gatgactctacctaacgattggagatccgtaac

SEQ ID NO: 911403 - DNA, 33 bp, Homo sapien
ctcctaatcataatcacattagagtgagtccag

SEQ ID NO: 911404 - DNA, 33 bp, Homo sapien
ctcctaatcataatcatattagagtgagtccag

SEQ ID NO: 911405 - DNA, 33 bp, Homo sapien
agggtctgggttacacaatagagtcatacatat

SEQ ID NO: 911406 - DNA, 33 bp, Homo sapien
agggtctgggttacacgatagagtcatacatat

SEQ ID NO: 911407 - DNA, 33 bp, Homo sapien
ttacatcaaaaagcgacgacaggacacaaagac

SEQ ID NO: 911408 - DNA, 33 bp, Homo sapien
ttacatcaaaaagcgatgacaggacacaaagac

SEQ ID NO: 911409 - DNA, 33 bp, Homo sapien
tgtgcagtctctatacaccggctgaaagcagct

SEQ ID NO: 911410 - DNA, 33 bp, Homo sapien
tgtgcagtctctatacgccggctgaaagcagct

SEQ ID NO: 911411 - DNA, 33 bp, Homo sapien
gaagaaaagaaaattacaggactggacaggtgc

SEQ ID NO: 911412 - DNA, 33 bp, Homo sapien
gaagaaaagaaaattataggactggacaggtgc

SEQ ID NO: 911413 - DNA, 33 bp, Homo sapien
gggtaatctcattcacccctttacaccatctat

SEQ ID NO: 911414 - DNA, 33 bp, Homo sapien
gggtaatctcattcactcctttacaccatctat

SEQ ID NO: 911415 - DNA, 33 bp, Homo sapien
acatgaggaatcagagaacacttcccagcagaa

SEQ ID NO: 911416 - DNA, 33 bp, Homo sapien
acatgaggaatcagaggacacttcccagcagaa

SEQ ID NO: 911417 - DNA, 33 bp, Homo sapien
agtgccttggatgtagacgagctcaaaagagca

SEQ ID NO: 911418 - DNA, 33 bp, Homo sapien
agtgccttggatgtaggcgagctcaaaagagca

SEQ ID NO: 911419 - DNA, 33 bp, Homo sapien
atcttgtaccaacctcaaatctcatcctgtgac

SEQ ID NO: 911420 - DNA, 33 bp, Homo sapien
atcttgtaccaacctcgaatctcatcctgtgac

SEQ ID NO: 911421 - DNA, 33 bp, Homo sapien
aggctgtgcctgggtaacctcttggtggcctga

SEQ ID NO: 911422 - DNA, 33 bp, Homo sapien
aggctgtgcctgggtagcctcttggtggcctga

SEQ ID NO: 911423 - DNA, 33 bp, Homo sapien
cacgaaatgaaaggccccctcagatcaaatcta

SEQ ID NO: 911424 - DNA, 33 bp, Homo sapien
cacgaaatgaaaggcctcctcagatcaaatcta

SEQ ID NO: 911425 - DNA, 33 bp, Homo sapien
tagttcctttctttcaacatttgccagagactt

SEQ ID NO: 911426 - DNA, 33 bp, Homo sapien
tagttcctttctttcagcatttgccagagactt

SEQ ID NO: 911427 - DNA, 33 bp, Homo sapien
ttcttatggcaatagacaccattaacaacacac

SEQ ID NO: 911428 - DNA, 33 bp, Homo sapien
ttcttatggcaatagagaccattaacaacacac

SEQ ID NO: 911429 - DNA, 33 bp, Homo sapien
ggagccaaaagtgtcacaggaaagccagcttcc

SEQ ID NO: 911430 - DNA, 33 bp, Homo sapien
ggagccaaaagtgtcagaggaaagccagcttcc

SEQ ID NO: 911431 - DNA, 33 bp, Homo sapien
gatggagtgtataaaaataatagagtcgtcatt

SEQ ID NO: 911432 - DNA, 33 bp, Homo sapien
gatggagtgtataaaagtaatagagtcgtcatt

SEQ ID NO: 911433 - DNA, 33 bp, Homo sapien
ggctgacatcttgccactaagtgaagcttaaga

SEQ ID NO: 911434 - DNA, 33 bp, Homo sapien
ggctgacatcttgccattaagtgaagcttaaga

SEQ ID NO: 911435 - DNA, 33 bp, Homo sapien
aaacgcatggcattgcacccattttccatgatg

SEQ ID NO: 911436 - DNA, 33 bp, Homo sapien
aaacgcatggcattgcgcccattttccatgatg

SEQ ID NO: 911437 - DNA, 33 bp, Homo sapien
gagtgtaagcaaccaccaagacatcctgttgga

SEQ ID NO: 911438 - DNA, 33 bp, Homo sapien
gagtgtaagcaaccacgaagacatcctgttgga

SEQ ID NO: 911439 - DNA, 33 bp, Homo sapien
gaagctgagatataaaaatgaagaattgtttgc

SEQ ID NO: 911440 - DNA, 33 bp, Homo sapien
gaagctgagatataaagatgaagaattgtttgc

SEQ ID NO: 911441 - DNA, 33 bp, Homo sapien
cagaagcttttcaatcacacaactttttcttcc

SEQ ID NO: 911442 - DNA, 33 bp, Homo sapien
cagaagcttttcaatcgcacaactttttcttcc

SEQ ID NO: 911443 - DNA, 33 bp, Homo sapien
aggagagcctgacataagaacaacaggggagaa

SEQ ID NO: 911444 - DNA, 33 bp, Homo sapien
aggagagcctgacataggaacaacaggggagaa

SEQ ID NO: 911445 - DNA, 33 bp, Homo sapien
gcttcccatttccaggcaatttgacagaggatg

SEQ ID NO: 911446 - DNA, 33 bp, Homo sapien
gcttcccatttccaggtaatttgacagaggatg

SEQ ID NO: 911447 - DNA, 33 bp, Homo sapien
aagcttacaatgagagaagaacattctgagaag

SEQ ID NO: 911448 - DNA, 33 bp, Homo sapien
aagcttacaatgagaggagaacattctgagaag

SEQ ID NO: 911449 - DNA, 33 bp, Homo sapien
ccaggattctcaggaccgtagcaaaaggattca

SEQ ID NO: 911450 - DNA, 33 bp, Homo sapien
ccaggattctcaggacggtagcaaaaggattca

SEQ ID NO: 911451 - DNA, 33 bp, Homo sapien
gtgatggaagaagataagtggctagaaccagaa

SEQ ID NO: 911452 - DNA, 33 bp, Homo sapien
gtgatggaagaagataggtggctagaaccagaa

SEQ ID NO: 911453 - DNA, 33 bp, Homo sapien
cttatgcacccataacaatcttctgttttctac

SEQ ID NO: 911454 - DNA, 33 bp, Homo sapien
cttatgcacccataacgatcttctgttttctac

SEQ ID NO: 911455 - DNA, 33 bp, Homo sapien
acaggttgagagaatacggcagatttaccagcc

SEQ ID NO: 911456 - DNA, 33 bp, Homo sapien
acaggttgagagaatatggcagatttaccagcc

SEQ ID NO: 911457 - DNA, 33 bp, Homo sapien
gaatcacagtgagaaactgaaagcagagatgaa

SEQ ID NO: 911458 - DNA, 33 bp, Homo sapien
gaatcacagtgagaaattgaaagcagagatgaa

SEQ ID NO: 911459 - DNA, 33 bp, Homo sapien
ctaagatgtacagcaccaatacaagttcagaga

SEQ ID NO: 911460 - DNA, 33 bp, Homo sapien
ctaagatgtacagcactaatacaagttcagaga

SEQ ID NO: 911461 - DNA, 33 bp, Homo sapien
taatcctttgtatcccagagccttctaagatgt

SEQ ID NO: 911462 - DNA, 33 bp, Homo sapien
taatcctttgtatcccggagccttctaagatgt

SEQ ID NO: 911463 - DNA, 33 bp, Homo sapien
tcccaacactcctcaacgtgaccatgtcctttc

SEQ ID NO: 911464 - DNA, 33 bp, Homo sapien
tcccaacactcctcaatgtgaccatgtcctttc

SEQ ID NO: 911465 - DNA, 33 bp, Homo sapien
atcattattgacctgacattctgctgtcattta

SEQ ID NO: 911466 - DNA, 33 bp, Homo sapien
atcattattgacctgatattctgctgtcattta

SEQ ID NO: 911467 - DNA, 33 bp, Homo sapien
ttcagatattttaaaccgattgcttggaaaagc

SEQ ID NO: 911468 - DNA, 33 bp, Homo sapien
ttcagatattttaaactgattgcttggaaaagc

SEQ ID NO: 911469 - DNA, 33 bp, Homo sapien
tacgaggtggtttcccaaagaactcagaggaac

SEQ ID NO: 911470 - DNA, 33 bp, Homo sapien
tacgaggtggtttcccgaagaactcagaggaac

SEQ ID NO: 911471 - DNA, 33 bp, Homo sapien
atctgttcttcctgccaagacccacaggctaat

SEQ ID NO: 911472 - DNA, 33 bp, Homo sapien
atctgttcttcctgcccagacccacaggctaat

SEQ ID NO: 911473 - DNA, 33 bp, Homo sapien
gaagcaagggaaatgtaaactgcattttgccac

SEQ ID NO: 911474 - DNA, 33 bp, Homo sapien
gaagcaagggaaatgtgaactgcattttgccac

SEQ ID NO: 911475 - DNA, 33 bp, Homo sapien
tgttgacagagagagaaaatgcaggcaacagat

SEQ ID NO: 911476 - DNA, 33 bp, Homo sapien
tgttgacagagagagagaatgcaggcaacagat

SEQ ID NO: 911477 - DNA, 33 bp, Homo sapien
tcaaaactgtaactgaagtctccaaagggatcc

SEQ ID NO: 911478 - DNA, 33 bp, Homo sapien
tcaaaactgtaactgatgtctccaaagggatcc

SEQ ID NO: 911479 - DNA, 33 bp, Homo sapien
gactacaggtacatacaaccacactcagataat

SEQ ID NO: 911480 - DNA, 33 bp, Homo sapien
gactacaggtacataccaccacactcagataat

SEQ ID NO: 911481 - DNA, 33 bp, Homo sapien
ctgtgacagccactgagggagattattatcttc

SEQ ID NO: 911482 - DNA, 33 bp, Homo sapien
ctgtgacagccactgatggagattattatcttc

SEQ ID NO: 911483 - DNA, 33 bp, Homo sapien
caggcagaatacttcagtcgagaggctgagaga

SEQ ID NO: 911484 - DNA, 33 bp, Homo sapien
caggcagaatacttcattcgagaggctgagaga

SEQ ID NO: 911485 - DNA, 33 bp, Homo sapien
aggctggagtatagtaacgttatcatggctcac

SEQ ID NO: 911486 - DNA, 33 bp, Homo sapien
aggctggagtatagtagcgttatcatggctcac

SEQ ID NO: 911487 - DNA, 33 bp, Homo sapien
ctctgtgggtgaattcaaacacatctctttcct

SEQ ID NO: 911488 - DNA, 33 bp, Homo sapien
ctctgtgggtgaattcgaacacatctctttcct

SEQ ID NO: 911489 - DNA, 33 bp, Homo sapien
gaagtcatgccctgcaacataaagttagcatct

SEQ ID NO: 911490 - DNA, 33 bp, Homo sapien
gaagtcatgccctgcaccataaagttagcatct

SEQ ID NO: 911491 - DNA, 33 bp, Homo sapien
gccaagtacttgctaccctggtgtattagtctg

SEQ ID NO: 911492 - DNA, 33 bp, Homo sapien
gccaagtacttgctacgctggtgtattagtctg

SEQ ID NO: 911493 - DNA, 33 bp, Homo sapien
ttgattttctataagccctgtattgctcaaggc

SEQ ID NO: 911494 - DNA, 33 bp, Homo sapien
ttgattttctataagctctgtattgctcaaggc

SEQ ID NO: 911495 - DNA, 33 bp, Homo sapien
gaaaacctaatgcaccgaaaacagtaaagaaag

SEQ ID NO: 911496 - DNA, 33 bp, Homo sapien
gaaaacctaatgcacctaaaacagtaaagaaag

SEQ ID NO: 911497 - DNA, 33 bp, Homo sapien
ttgggtagagcttgagaagatagagaagtccaa

SEQ ID NO: 911498 - DNA, 33 bp, Homo sapien
ttgggtagagcttgaggagatagagaagtccaa

SEQ ID NO: 911499 - DNA, 33 bp, Homo sapien
aggtgcttcccagccactaataccataaatctg

SEQ ID NO: 911500 - DNA, 33 bp, Homo sapien
aggtgcttcccagccagtaataccataaatctg

SEQ ID NO: 911501 - DNA, 33 bp, Homo sapien
acagctgtctaaacacgcttccgtgcctcaggc

SEQ ID NO: 911502 - DNA, 33 bp, Homo sapien
acagctgtctaaacactcttccgtgcctcaggc

SEQ ID NO: 911503 - DNA, 33 bp, Homo sapien
tgaacgttggcatacacgttgtttgagtccctg

SEQ ID NO: 911504 - DNA, 33 bp, Homo sapien
tgaacgttggcatacaggttgtttgagtccctg

SEQ ID NO: 911505 - DNA, 33 bp, Homo sapien
caggcctgcacagcacaccccaaaatattgaca

SEQ ID NO: 911506 - DNA, 33 bp, Homo sapien
caggcctgcacagcactccccaaaatattgaca

SEQ ID NO: 911507 - DNA, 33 bp, Homo sapien
atacagctttccatcactcacaagacaggcttg

SEQ ID NO: 911508 - DNA, 33 bp, Homo sapien
atacagctttccatcagtcacaagacaggcttg

SEQ ID NO: 911509 - DNA, 33 bp, Homo sapien
gataagtcacagaggacgggcatggtgattcac

SEQ ID NO: 911510 - DNA, 33 bp, Homo sapien
gataagtcacagaggatgggcatggtgattcac

SEQ ID NO: 911511 - DNA, 33 bp, Homo sapien
aacacaggaaaaccccaaagtggaacacagccg

SEQ ID NO: 911512 - DNA, 33 bp, Homo sapien
aacacaggaaaaccccgaagtggaacacagccg

SEQ ID NO: 911513 - DNA, 33 bp, Homo sapien
tgactaaagaaccccactggagacttaggaggc

SEQ ID NO: 911514 - DNA, 33 bp, Homo sapien
tgactaaagaaccccattggagacttaggaggc

SEQ ID NO: 911515 - DNA, 33 bp, Homo sapien
tgatgccagctgctacaatggaagtaatgatga

SEQ ID NO: 911516 - DNA, 33 bp, Homo sapien
tgatgccagctgctacgatggaagtaatgatga

SEQ ID NO: 911517 - DNA, 33 bp, Homo sapien
caacacagtgagactccgacaacaaataaataa

SEQ ID NO: 911518 - DNA, 33 bp, Homo sapien
caacacagtgagactctgacaacaaataaataa

SEQ ID NO: 911519 - DNA, 33 bp, Homo sapien
gtatctaaggcaaaggaccattggacaacaggt

SEQ ID NO: 911520 - DNA, 33 bp, Homo sapien
gtatctaaggcaaagggccattggacaacaggt

SEQ ID NO: 911521 - DNA, 33 bp, Homo sapien
ggatgacctggaatcccaactagggaattttaa

SEQ ID NO: 911522 - DNA, 33 bp, Homo sapien
ggatgacctggaatcctaactagggaattttaa

SEQ ID NO: 911523 - DNA, 33 bp, Homo sapien
cctctggaatgtcaggacacttcattgctggag

SEQ ID NO: 911524 - DNA, 33 bp, Homo sapien
cctctggaatgtcagggcacttcattgctggag

SEQ ID NO: 911525 - DNA, 33 bp, Homo sapien
attcttggaaccagaacattttggattttgagt

SEQ ID NO: 911526 - DNA, 33 bp, Homo sapien
attcttggaaccagaagattttggattttgagt

SEQ ID NO: 911527 - DNA, 33 bp, Homo sapien
catttctccccttcaacgttgcctcaaccttac

SEQ ID NO: 911528 - DNA, 33 bp, Homo sapien
catttctccccttcaatgttgcctcaaccttac

SEQ ID NO: 911529 - DNA, 33 bp, Homo sapien
cttcatgaggaacagaaggaagagagaagttga

SEQ ID NO: 911530 - DNA, 33 bp, Homo sapien
cttcatgaggaacagagggaagagagaagttga

SEQ ID NO: 911531 - DNA, 33 bp, Homo sapien
attcattattggacacaggtaatcacatctccc

SEQ ID NO: 911532 - DNA, 33 bp, Homo sapien
attcattattggacacgggtaatcacatctccc

SEQ ID NO: 911533 - DNA, 33 bp, Homo sapien
ttcagctttcttctccaatggtgccctgattat

SEQ ID NO: 911534 - DNA, 33 bp, Homo sapien
ttcagctttcttctccgatggtgccctgattat

SEQ ID NO: 911535 - DNA, 33 bp, Homo sapien
tgtggatttgtgtaaccgtcaccacatgcaaaa

SEQ ID NO: 911536 - DNA, 33 bp, Homo sapien
tgtggatttgtgtaactgtcaccacatgcaaaa

SEQ ID NO: 911537 - DNA, 33 bp, Homo sapien
tctgatttttggctaacagaagttgaatctttt

SEQ ID NO: 911538 - DNA, 33 bp, Homo sapien
tctgatttttggctaatagaagttgaatctttt

SEQ ID NO: 911539 - DNA, 33 bp, Homo sapien
gtacagatactgagtgcacagttggttgtatca

SEQ ID NO: 911540 - DNA, 33 bp, Homo sapien
gtacagatactgagtggacagttggttgtatca

SEQ ID NO: 911541 - DNA, 33 bp, Homo sapien
tctttattggtcttgcacatttagagaaatgaa

SEQ ID NO: 911542 - DNA, 33 bp, Homo sapien
tctttattggtcttgcgcatttagagaaatgaa

SEQ ID NO: 911543 - DNA, 33 bp, Homo sapien
cttaacatacacaacccgaagtttcatgcaggt

SEQ ID NO: 911544 - DNA, 33 bp, Homo sapien
cttaacatacacaacctgaagtttcatgcaggt

SEQ ID NO: 911545 - DNA, 33 bp, Homo sapien
caaacaaacagaaagcaaaagtagttcttaact

SEQ ID NO: 911546 - DNA, 33 bp, Homo sapien
caaacaaacagaaagcgaaagtagttcttaact

SEQ ID NO: 911547 - DNA, 33 bp, Homo sapien
gcttcaagtaatcataggacctaagctgcccat

SEQ ID NO: 911548 - DNA, 33 bp, Homo sapien
gcttcaagtaatcatatgacctaagctgcccat

SEQ ID NO: 911549 - DNA, 33 bp, Homo sapien
gattctatggcacaaccatgttgacagccttta

SEQ ID NO: 911550 - DNA, 33 bp, Homo sapien
gattctatggcacaactatgttgacagccttta

SEQ ID NO: 911551 - DNA, 33 bp, Homo sapien
tgtatcctggttgcaaataacagaaatggactc

SEQ ID NO: 911552 - DNA, 33 bp, Homo sapien
tgtatcctggttgcaagtaacagaaatggactc

SEQ ID NO: 911553 - DNA, 33 bp, Homo sapien
ctttgcaaacagaaccaatgtgcttcttaattg

SEQ ID NO: 911554 - DNA, 33 bp, Homo sapien
ctttgcaaacagaacccatgtgcttcttaattg

SEQ ID NO: 911555 - DNA, 33 bp, Homo sapien
tgttcaactgcagcccaaaagtattacaaggaa

SEQ ID NO: 911556 - DNA, 33 bp, Homo sapien
tgttcaactgcagcccgaaagtattacaaggaa

SEQ ID NO: 911557 - DNA, 33 bp, Homo sapien
taaggcagcatgagcaagattatactggataat

SEQ ID NO: 911558 - DNA, 33 bp, Homo sapien
taaggcagcatgagcaggattatactggataat

SEQ ID NO: 911559 - DNA, 33 bp, Homo sapien
tcttgatcttctaaaagcctccaacattgtaaa

SEQ ID NO: 911560 - DNA, 33 bp, Homo sapien
tcttgatcttctaaaatcctccaacattgtaaa

SEQ ID NO: 911561 - DNA, 33 bp, Homo sapien
gtcatttggaatcataatagaaaaagagaacat

SEQ ID NO: 911562 - DNA, 33 bp, Homo sapien
gtcatttggaatcatagtagaaaaagagaacat

SEQ ID NO: 911563 - DNA, 33 bp, Homo sapien
tctaatctctacatcacagcaaaatccttttca

SEQ ID NO: 911564 - DNA, 33 bp, Homo sapien
tctaatctctacatcagagcaaaatccttttca

SEQ ID NO: 911565 - DNA, 33 bp, Homo sapien
aggtgatgcctaaatgaacgtgtgtccaccctt

SEQ ID NO: 911566 - DNA, 33 bp, Homo sapien
aggtgatgcctaaatgtacgtgtgtccaccctt

SEQ ID NO: 911567 - DNA, 33 bp, Homo sapien
agagggtggtaaattcgcattgtgttctcttct

SEQ ID NO: 911568 - DNA, 33 bp, Homo sapien
agagggtggtaaattctcattgtgttctcttct

SEQ ID NO: 911569 - DNA, 33 bp, Homo sapien
agaccaaatctagagtcaagtcatcgattgctg

SEQ ID NO: 911570 - DNA, 33 bp, Homo sapien
agaccaaatctagagttaagtcatcgattgctg

SEQ ID NO: 911571 - DNA, 33 bp, Homo sapien
gacaacacacttgaaaaatgtggccacctgcca

SEQ ID NO: 911572 - DNA, 33 bp, Homo sapien
gacaacacacttgaaagatgtggccacctgcca

SEQ ID NO: 911573 - DNA, 33 bp, Homo sapien
caaagacgcagacacaagaagtgggtttaggag

SEQ ID NO: 911574 - DNA, 33 bp, Homo sapien
caaagacgcagacacaggaagtgggtttaggag

SEQ ID NO: 911575 - DNA, 33 bp, Homo sapien
cgacttcacaggctacactttgttagaaaagaa

SEQ ID NO: 911576 - DNA, 33 bp, Homo sapien
cgacttcacaggctactctttgttagaaaagaa

SEQ ID NO: 911577 - DNA, 33 bp, Homo sapien
gaaaagccaggatggacgttaggttttccaact

SEQ ID NO: 911578 - DNA, 33 bp, Homo sapien
gaaaagccaggatggatgttaggttttccaact

SEQ ID NO: 911579 - DNA, 33 bp, Homo sapien
gcttgtgctttgattacaaccttgatatcaaat

SEQ ID NO: 911580 - DNA, 33 bp, Homo sapien
gcttgtgctttgattataaccttgatatcaaat

SEQ ID NO: 911581 - DNA, 33 bp, Homo sapien
tgggtcttcatttttaagtgatcactctggctg

SEQ ID NO: 911582 - DNA, 33 bp, Homo sapien
tgggtcttcatttttaggtgatcactctggctg

SEQ ID NO: 911583 - DNA, 33 bp, Homo sapien
ccagactgctaaatacaccattatctatgatgt

SEQ ID NO: 911584 - DNA, 33 bp, Homo sapien
ccagactgctaaatacgccattatctatgatgt

SEQ ID NO: 911585 - DNA, 33 bp, Homo sapien
cttccaacagtatccccccaggaagacacgctc

SEQ ID NO: 911586 - DNA, 33 bp, Homo sapien
cttccaacagtatccctccaggaagacacgctc

SEQ ID NO: 911587 - DNA, 33 bp, Homo sapien
tataacgcatgattacagatgcaattatgagat

SEQ ID NO: 911588 - DNA, 33 bp, Homo sapien
tataacgcatgattacggatgcaattatgagat

SEQ ID NO: 911589 - DNA, 33 bp, Homo sapien
aggtcaactctctgcaacacctgtttaatctct

SEQ ID NO: 911590 - DNA, 33 bp, Homo sapien
aggtcaactctctgcagcacctgtttaatctct

SEQ ID NO: 911591 - DNA, 33 bp, Homo sapien
gagctttagccctataacttcagttttattgtt

SEQ ID NO: 911592 - DNA, 33 bp, Homo sapien
gagctttagccctatagcttcagttttattgtt

SEQ ID NO: 911593 - DNA, 33 bp, Homo sapien
ggccaaaatcatgtgacctttatattcagccct

SEQ ID NO: 911594 - DNA, 33 bp, Homo sapien
ggccaaaatcatgtgatctttatattcagccct

SEQ ID NO: 911595 - DNA, 33 bp, Homo sapien
gagttccttcttgagacgagaagttccccacac

SEQ ID NO: 911596 - DNA, 33 bp, Homo sapien
gagttccttcttgagatgagaagttccccacac

SEQ ID NO: 911597 - DNA, 33 bp, Homo sapien
tctatatgggccttgacaagtgctgtagaacta

SEQ ID NO: 911598 - DNA, 33 bp, Homo sapien
tctatatgggccttgataagtgctgtagaacta

SEQ ID NO: 911599 - DNA, 33 bp, Homo sapien
ctcctataaacatcacaggctaatggaggtgta

SEQ ID NO: 911600 - DNA, 33 bp, Homo sapien
ctcctataaacatcacgggctaatggaggtgta

SEQ ID NO: 911601 - DNA, 33 bp, Homo sapien; identical to SEQ ID NO: 911599

SEQ ID NO: 911602 - DNA, 33 bp, Homo sapien; identical to SEQ ID NO: 911600

SEQ ID NO: 911603 - DNA, 33 bp, Homo sapien
tatatctcttccttacaactcgagacctttctc

SEQ ID NO: 911604 - DNA, 33 bp, Homo sapien
tatatctcttccttacgactcgagacctttctc

SEQ ID NO: 911605 - DNA, 33 bp, Homo sapien
cccgatggcattgggaaggtttcaacagtaagg

SEQ ID NO: 911606 - DNA, 33 bp, Homo sapien
cccgatggcattgggagggtttcaacagtaagg

SEQ ID NO: 911607 - DNA, 33 bp, Homo sapien
tactgagactcagagaaaataagtagctagccc

SEQ ID NO: 911608 - DNA, 33 bp, Homo sapien
tactgagactcagagagaataagtagctagccc

SEQ ID NO: 911609 - DNA, 33 bp, Homo sapien
ctctccaaccttatctcactctgaaatgtgctt

SEQ ID NO: 911610 - DNA, 33 bp, Homo sapien
ctctccaaccttatcttactctgaaatgtgctt

SEQ ID NO: 911611 - DNA, 33 bp, Homo sapien
gctgattgcaaagttcaatatccatccgtctaa

SEQ ID NO: 911612 - DNA, 33 bp, Homo sapien
gctgattgcaaagttctatatccatccgtctaa

SEQ ID NO: 911613 - DNA, 33 bp, Homo sapien
ctgactctttttgggaagataacacataactct

SEQ ID NO: 911614 - DNA, 33 bp, Homo sapien
ctgactctttttgggacgataacacataactct

SEQ ID NO: 911615 - DNA, 33 bp, Homo sapien
cttattgacctatgacccgaaagccccctcccc

SEQ ID NO: 911616 - DNA, 33 bp, Homo sapien
cttattgacctatgactcgaaagccccctcccc

SEQ ID NO: 911617 - DNA, 33 bp, Homo sapien
ggcctactgcaatacacagtgataatttatatg

SEQ ID NO: 911618 - DNA, 33 bp, Homo sapien
ggcctactgcaatacatagtgataatttatatg

SEQ ID NO: 911619 - DNA, 33 bp, Homo sapien
actaaacaatcaggtcaacaggagtaggttgtg

SEQ ID NO: 911620 - DNA, 33 bp, Homo sapien
actaaacaatcaggtcgacaggagtaggttgtg

SEQ ID NO: 911621 - DNA, 33 bp, Homo sapien
ttctgaaaaggaaaaaaaccagtggagtgcacc

SEQ ID NO: 911622 - DNA, 33 bp, Homo sapien
ttctgaaaaggaaaaagaccagtggagtgcacc

SEQ ID NO: 911623 - DNA, 33 bp, Homo sapien
ggcatcatcttggaaacagagagtagccttcac

SEQ ID NO: 911624 - DNA, 33 bp, Homo sapien
ggcatcatcttggaaatagagagtagccttcac

SEQ ID NO: 911625 - DNA, 33 bp, Homo sapien
aagcaagagaggtggacgtcgctttctagtctt

SEQ ID NO: 911626 - DNA, 33 bp, Homo sapien
aagcaagagaggtggatgtcgctttctagtctt

SEQ ID NO: 911627 - DNA, 33 bp, Homo sapien
tgcacccagcctgaaaatctccttattaaagtc

SEQ ID NO: 911628 - DNA, 33 bp, Homo sapien
tgcacccagcctgaaagtctccttattaaagtc

SEQ ID NO: 911629 - DNA, 33 bp, Homo sapien
tagttctgaatgccacacaatattgcttctgcc

SEQ ID NO: 911630 - DNA, 33 bp, Homo sapien
tagttctgaatgccacgcaatattgcttctgcc

SEQ ID NO: 911631 - DNA, 33 bp, Homo sapien
attcagaactagatcaaaaaagacaatacagca

SEQ ID NO: 911632 - DNA, 33 bp, Homo sapien
attcagaactagatcataaaagacaatacagca

SEQ ID NO: 911633 - DNA, 33 bp, Homo sapien
aaaacagcttactctccatagtggggtgggcct

SEQ ID NO: 911634 - DNA, 33 bp, Homo sapien
aaaacagcttactctctatagtggggtgggcct

SEQ ID NO: 911635 - DNA, 33 bp, Homo sapien
attgcatcatcctctaacaggacacatctctgc

SEQ ID NO: 911636 - DNA, 33 bp, Homo sapien
attgcatcatcctctagcaggacacatctctgc

SEQ ID NO: 911637 - DNA, 33 bp, Homo sapien
gctaggctacctgccaccttcctgtctagcttc

SEQ ID NO: 911638 - DNA, 33 bp, Homo sapien
gctaggctacctgccatcttcctgtctagcttc

SEQ ID NO: 911639 - DNA, 33 bp, Homo sapien
tctccttgctgttttcaagcgtgacccatacct

SEQ ID NO: 911640 - DNA, 33 bp, Homo sapien
tctccttgctgttttcgagcgtgacccatacct

SEQ ID NO: 911641 - DNA, 33 bp, Homo sapien
tgatctctacatcagcaactcttgttttctttt

SEQ ID NO: 911642 - DNA, 33 bp, Homo sapien
tgatctctacatcagcgactcttgttttctttt

SEQ ID NO: 911643 - DNA, 33 bp, Homo sapien
tcagatggtgaaggcacagatgagtgtggtagt

SEQ ID NO: 911644 - DNA, 33 bp, Homo sapien
tcagatggtgaaggcatagatgagtgtggtagt

SEQ ID NO: 911645 - DNA, 33 bp, Homo sapien
gttccagaaggttcaacgagtaggctgcatatc

SEQ ID NO: 911646 - DNA, 33 bp, Homo sapien
gttccagaaggttcaatgagtaggctgcatatc

SEQ ID NO: 911647 - DNA, 33 bp, Homo sapien
tgagagacctcctggtaacataaaagggcaatg

SEQ ID NO: 911648 - DNA, 33 bp, Homo sapien
tgagagacctcctggtgacataaaagggcaatg

SEQ ID NO: 911649 - DNA, 33 bp, Homo sapien
aagtaaccaggaggagaagagggtgctgacatc

SEQ ID NO: 911650 - DNA, 33 bp, Homo sapien
aagtaaccaggaggaggagagggtgctgacatc

SEQ ID NO: 911651 - DNA, 33 bp, Homo sapien
atagaaaactttgacaagtgataggtatcgtct

SEQ ID NO: 911652 - DNA, 33 bp, Homo sapien
atagaaaactttgacaggtgataggtatcgtct

SEQ ID NO: 911653 - DNA, 33 bp, Homo sapien
cttccccttcaatcgccatctggatgaacaagg

SEQ ID NO: 911654 - DNA, 33 bp, Homo sapien
cttccccttcaatcgctatctggatgaacaagg

SEQ ID NO: 911655 - DNA, 33 bp, Homo sapien
cagtagactgagtgaaaaagagctgctcttagt

SEQ ID NO: 911656 - DNA, 33 bp, Homo sapien
cagtagactgagtgaagaagagctgctcttagt

SEQ ID NO: 911657 - DNA, 33 bp, Homo sapien
aaagaattcccattaaaagtatgcaaggtggag

SEQ ID NO: 911658 - DNA, 33 bp, Homo sapien
aaagaattcccattaagagtatgcaaggtggag

SEQ ID NO: 911659 - DNA, 33 bp, Homo sapien
tgctcaaatgctacccacgtcttgactttcctt

SEQ ID NO: 911660 - DNA, 33 bp, Homo sapien
tgctcaaatgctacccgcgtcttgactttcctt

SEQ ID NO: 911661 - DNA, 33 bp, Homo sapien
gctgcttatgagtgccacaaagaaaatagctag

SEQ ID NO: 911662 - DNA, 33 bp, Homo sapien
gctgcttatgagtgccgcaaagaaaatagctag

SEQ ID NO: 911663 - DNA, 33 bp, Homo sapien
taatgtaataggattgaaagtccagaaacaaac

SEQ ID NO: 911664 - DNA, 33 bp, Homo sapien
taatgtaataggattggaagtccagaaacaaac

SEQ ID NO: 911665 - DNA, 33 bp, Homo sapien
gtgtctgaacctggaactggaaacagttatatc

SEQ ID NO: 911666 - DNA, 33 bp, Homo sapien
gtgtctgaacctggaattggaaacagttatatc

SEQ ID NO: 911667 - DNA, 33 bp, Homo sapien
tgggtcttagggtcagaaaacctgggagctaag

SEQ ID NO: 911668 - DNA, 33 bp, Homo sapien
tgggtcttagggtcaggaaacctgggagctaag

SEQ ID NO: 911669 - DNA, 33 bp, Homo sapien
ggtttaggtgccagcacggtgtagtcagcctta

SEQ ID NO: 911670 - DNA, 33 bp, Homo sapien
ggtttaggtgccagcatggtgtagtcagcctta

SEQ ID NO: 911671 - DNA, 33 bp, Homo sapien
atgtagaaaaacaggcagcaggggtgagcttgc

SEQ ID NO: 911672 - DNA, 33 bp, Homo sapien
atgtagaaaaacaggctgcaggggtgagcttgc

SEQ ID NO: 911673 - DNA, 33 bp, Homo sapien
tacattcctggaaaagaaagaaatagctattgt

SEQ ID NO: 911674 - DNA, 33 bp, Homo sapien
tacattcctggaaaagtaagaaatagctattgt

SEQ ID NO: 911675 - DNA, 33 bp, Homo sapien
ccttacactactgacaacagctggtctgcaggc

SEQ ID NO: 911676 - DNA, 33 bp, Homo sapien
ccttacactactgacaccagctggtctgcaggc

SEQ ID NO: 911677 - DNA, 33 bp, Homo sapien
cagcttggaaggttacaagactttggtgtgacc

SEQ ID NO: 911678 - DNA, 33 bp, Homo sapien
cagcttggaaggttacgagactttggtgtgacc

SEQ ID NO: 911679 - DNA, 33 bp, Homo sapien
aaggtagagagggccactagtcccctatcaggg

SEQ ID NO: 911680 - DNA, 33 bp, Homo sapien
aaggtagagagggccattagtcccctatcaggg

SEQ ID NO: 911681 - DNA, 33 bp, Homo sapien
tcctggtctaggtaagcatcagaaacagaaact

SEQ ID NO: 911682 - DNA, 33 bp, Homo sapien
tcctggtctaggtaagtatcagaaacagaaact

SEQ ID NO: 911683 - DNA, 33 bp, Homo sapien
tgtctctgctttgtaacagaattctctcaactc

SEQ ID NO: 911684 - DNA, 33 bp, Homo sapien
tgtctctgctttgtaatagaattctctcaactc

SEQ ID NO: 911685 - DNA, 33 bp, Homo sapien
gtgttatatttggttaaaaacactgattgctta

SEQ ID NO: 911686 - DNA, 33 bp, Homo sapien
gtgttatatttggttagaaacactgattgctta

SEQ ID NO: 911687 - DNA, 33 bp, Homo sapien
tacctgaggttcgtcaactcacaccaaggaaat

SEQ ID NO: 911688 - DNA, 33 bp, Homo sapien
tacctgaggttcgtcatctcacaccaaggaaat

SEQ ID NO: 911689 - DNA, 33 bp, Homo sapien
cagctacttttcattgcatttgcagaatttatt

SEQ ID NO: 911690 - DNA, 33 bp, Homo sapien
cagctacttttcattgtatttgcagaatttatt

SEQ ID NO: 911691 - DNA, 33 bp, Homo sapien
agcaggctatgttttaagaatttatgactacca

SEQ ID NO: 911692 - DNA, 33 bp, Homo sapien
agcaggctatgttttatgaatttatgactacca

SEQ ID NO: 911693 - DNA, 33 bp, Homo sapien
gcccccataattcacactcattttgtgtagcca

SEQ ID NO: 911694 - DNA, 33 bp, Homo sapien
gcccccataattcacattcattttgtgtagcca

SEQ ID NO: 911695 - DNA, 33 bp, Homo sapien
cagcttgtacatgtgagacttttcagcctccat

SEQ ID NO: 911696 - DNA, 33 bp, Homo sapien
cagcttgtacatgtgatacttttcagcctccat

SEQ ID NO: 911697 - DNA, 33 bp, Homo sapien
tgtgttctagaaggcacatgacaagtgagagag

SEQ ID NO: 911698 - DNA, 33 bp, Homo sapien
tgtgttctagaaggcatatgacaagtgagagag

SEQ ID NO: 911699 - DNA, 33 bp, Homo sapien
ctgggaggacctgacaaagcaaccatttatcag

SEQ ID NO: 911700 - DNA, 33 bp, Homo sapien
ctgggaggacctgacatagcaaccatttatcag

SEQ ID NO: 911701 - DNA, 33 bp, Homo sapien
gaggacacattttcagacatttgccatctcttc

SEQ ID NO: 911702 - DNA, 33 bp, Homo sapien
gaggacacattttcaggcatttgccatctcttc

SEQ ID NO: 911703 - DNA, 33 bp, Homo sapien
agagccccatcacgtaagagacactcatttttc

SEQ ID NO: 911704 - DNA, 33 bp, Homo sapien
agagccccatcacgtaggagacactcatttttc

SEQ ID NO: 911705 - DNA, 33 bp, Homo sapien
ccttatgcattctaaaatctgagacagcatagc

SEQ ID NO: 911706 - DNA, 33 bp, Homo sapien
ccttatgcattctaaagtctgagacagcatagc

SEQ ID NO: 911707 - DNA, 33 bp, Homo sapien
ggggctttggtttatacgagtaatttgcataga

SEQ ID NO: 911708 - DNA, 33 bp, Homo sapien
ggggctttggtttatatgagtaatttgcataga

SEQ ID NO: 911709 - DNA, 33 bp, Homo sapien
gctccttagcttgctcggagagagtaataagta

SEQ ID NO: 911710 - DNA, 33 bp, Homo sapien
gctccttagcttgctctgagagagtaataagta

SEQ ID NO: 911711 - DNA, 33 bp, Homo sapien
gatgatacacttgctcgatgattctaagtatct

SEQ ID NO: 911712 - DNA, 33 bp, Homo sapien
gatgatacacttgctctatgattctaagtatct

SEQ ID NO: 911713 - DNA, 33 bp, Homo sapien
agagatttgtttttccagccatctatagagatt

SEQ ID NO: 911714 - DNA, 33 bp, Homo sapien
agagatttgtttttccggccatctatagagatt

SEQ ID NO: 911715 - DNA, 33 bp, Homo sapien
gtcctcagaaggaagcacaaggctggattgaga

SEQ ID NO: 911716 - DNA, 33 bp, Homo sapien
gtcctcagaaggaagcgcaaggctggattgaga

SEQ ID NO: 911717 - DNA, 33 bp, Homo sapien
aaagcattctacatataaaaagcaatgtgtgtt

SEQ ID NO: 911718 - DNA, 33 bp, Homo sapien
aaagcattctacatatgaaaagcaatgtgtgtt

SEQ ID NO: 911719 - DNA, 33 bp, Homo sapien
ttataaaaaccatcctaaccttgaagattgcat

SEQ ID NO: 911720 - DNA, 33 bp, Homo sapien
ttataaaaaccatcctgaccttgaagattgcat

SEQ ID NO: 911721 - DNA, 33 bp, Homo sapien
ccagaaccctgaaactgaactcatggctaccac

SEQ ID NO: 911722 - DNA, 33 bp, Homo sapien
ccagaaccctgaaacttaactcatggctaccac

SEQ ID NO: 911723 - DNA, 33 bp, Homo sapien
aatacttaaggttcaaatctggagtacacaaga

SEQ ID NO: 911724 - DNA, 33 bp, Homo sapien
aatacttaaggttcaattctggagtacacaaga

SEQ ID NO: 911725 - DNA, 33 bp, Homo sapien
gatatcacttatatagcagaggaatcggatcat

SEQ ID NO: 911726 - DNA, 33 bp, Homo sapien
gatatcacttatatagtagaggaatcggatcat

SEQ ID NO: 911727 - DNA, 33 bp, Homo sapien
ctctttacccgcatgaacaaatgggtattcagc

SEQ ID NO: 911728 - DNA, 33 bp, Homo sapien
ctctttacccgcatgagcaaatgggtattcagc

SEQ ID NO: 911729 - DNA, 33 bp, Homo sapien
tccctgtttgatgtcacgaagccaatatatgga

SEQ ID NO: 911730 - DNA, 33 bp, Homo sapien
tccctgtttgatgtcatgaagccaatatatgga

SEQ ID NO: 911731 - DNA, 33 bp, Homo sapien
gttttgtttggcatacagatctttcttggtcat

SEQ ID NO: 911732 - DNA, 33 bp, Homo sapien
gttttgtttggcatacggatctttcttggtcat

SEQ ID NO: 911733 - DNA, 33 bp, Homo sapien
ttgagaatgaaacgcaatcctgtatgagaggtg

SEQ ID NO: 911734 - DNA, 33 bp, Homo sapien
ttgagaatgaaacgcagtcctgtatgagaggtg

SEQ ID NO: 911735 - DNA, 33 bp, Homo sapien
ttctatgtatctgaagcctgtaatatgtgatta

SEQ ID NO: 911736 - DNA, 33 bp, Homo sapien
ttctatgtatctgaagtctgtaatatgtgatta

SEQ ID NO: 911737 - DNA, 33 bp, Homo sapien
tcaatctcggaaagcacccattccttccctctt

SEQ ID NO: 911738 - DNA, 33 bp, Homo sapien
tcaatctcggaaagcatccattccttccctctt

SEQ ID NO: 911739 - DNA, 33 bp, Homo sapien
tcctcttccttatcctcactgggctgagatgtt

SEQ ID NO: 911740 - DNA, 33 bp, Homo sapien
tcctcttccttatccttactgggctgagatgtt

SEQ ID NO: 911741 - DNA, 33 bp, Homo sapien
tctatgcctaatacaaagatttttcagagtgtt

SEQ ID NO: 911742 - DNA, 33 bp, Homo sapien
tctatgcctaatacaatgatttttcagagtgtt

SEQ ID NO: 911743 - DNA, 33 bp, Homo sapien
gcattttcagtttcaacgcccctcgacgcctct

SEQ ID NO: 911744 - DNA, 33 bp, Homo sapien
gcattttcagtttcaatgcccctcgacgcctct

SEQ ID NO: 911745 - DNA, 33 bp, Homo sapien
gaggctccttgaaaacaccttattatttttagc

SEQ ID NO: 911746 - DNA, 33 bp, Homo sapien
gaggctccttgaaaactccttattatttttagc

SEQ ID NO: 911747 - DNA, 33 bp, Homo sapien
gttgactctgggatacgcaggtcagttagactc

SEQ ID NO: 911748 - DNA, 33 bp, Homo sapien
gttgactctgggatactcaggtcagttagactc

SEQ ID NO: 911749 - DNA, 33 bp, Homo sapien
aatgagatagcacagagcaaatgtcatcacagt

SEQ ID NO: 911750 - DNA, 33 bp, Homo sapien
aatgagatagcacagatcaaatgtcatcacagt

SEQ ID NO: 911751 - DNA, 33 bp, Homo sapien
cttgttcactgttgcaataaagcccctctgtct

SEQ ID NO: 911752 - DNA, 33 bp, Homo sapien
cttgttcactgttgcagtaaagcccctctgtct

SEQ ID NO: 911753 - DNA, 33 bp, Homo sapien
gtatccaaagcaattgaaaaccctcctagattc

SEQ ID NO: 911754 - DNA, 33 bp, Homo sapien
gtatccaaagcaattgcaaaccctcctagattc

SEQ ID NO: 911755 - DNA, 33 bp, Homo sapien
gtgtttttggttgatcacctgcttatttgtaac

SEQ ID NO: 911756 - DNA, 33 bp, Homo sapien
gtgtttttggttgatcgcctgcttatttgtaac

SEQ ID NO: 911757 - DNA, 33 bp, Homo sapien
tttccccttttagccaaggacggatgacataag

SEQ ID NO: 911758 - DNA, 33 bp, Homo sapien
tttccccttttagccacggacggatgacataag

SEQ ID NO: 911759 - DNA, 33 bp, Homo sapien
atgctaaaactctctcccctgaaaaaagatctc

SEQ ID NO: 911760 - DNA, 33 bp, Homo sapien
atgctaaaactctctctcctgaaaaaagatctc

SEQ ID NO: 911761 - DNA, 33 bp, Homo sapien
tatgaaagagaaataacgttctaggattacatg

SEQ ID NO: 911762 - DNA, 33 bp, Homo sapien
tatgaaagagaaataatgttctaggattacatg

SEQ ID NO: 911763 - DNA, 33 bp, Homo sapien
ttcgtaggcatgttgaaccctctttaggcatga

SEQ ID NO: 911764 - DNA, 33 bp, Homo sapien
ttcgtaggcatgttgacccctctttaggcatga

SEQ ID NO: 911765 - DNA, 33 bp, Homo sapien
ataagggtttgtcataaagattattccatcacc

SEQ ID NO: 911766 - DNA, 33 bp, Homo sapien
ataagggtttgtcatacagattattccatcacc

SEQ ID NO: 911767 - DNA, 33 bp, Homo sapien
tcctgcctgagtcaacacacgaaaaggctttgg

SEQ ID NO: 911768 - DNA, 33 bp, Homo sapien
tcctgcctgagtcaacgcacgaaaaggctttgg

SEQ ID NO: 911769 - DNA, 33 bp, Homo sapien
gaactctcatattgtacctgggttaagtacgtc

SEQ ID NO: 911770 - DNA, 33 bp, Homo sapien
gaactctcatattgtatctgggttaagtacgtc

SEQ ID NO: 911771 - DNA, 33 bp, Homo sapien
cagttcacttctcaaacttaatgtgaacatcaa

SEQ ID NO: 911772 - DNA, 33 bp, Homo sapien
cagttcacttctcaaatttaatgtgaacatcaa

SEQ ID NO: 911773 - DNA, 33 bp, Homo sapien
tcgtgatttttatttacgatacatgcagttcac

SEQ ID NO: 911774 - DNA, 33 bp, Homo sapien
tcgtgatttttatttatgatacatgcagttcac

SEQ ID NO: 911775 - DNA, 33 bp, Homo sapien
atacaggctctttatgaaattcttagaaacaca

SEQ ID NO: 911776 - DNA, 33 bp, Homo sapien
atacaggctctttatggaattcttagaaacaca

SEQ ID NO: 911777 - DNA, 33 bp, Homo sapien
ctggattttggaggcaccatatattacccttgt

SEQ ID NO: 911778 - DNA, 33 bp, Homo sapien
ctggattttggaggcagcatatattacccttgt

SEQ ID NO: 911779 - DNA, 33 bp, Homo sapien
cgaggagctaaacctacggagatgttacaggta

SEQ ID NO: 911780 - DNA, 33 bp, Homo sapien
cgaggagctaaacctatggagatgttacaggta

SEQ ID NO: 911781 - DNA, 33 bp, Homo sapien
ttgcaccatgttaacccaattaagtggttagta

SEQ ID NO: 911782 - DNA, 33 bp, Homo sapien
ttgcaccatgttaaccgaattaagtggttagta

SEQ ID NO: 911783 - DNA, 33 bp, Homo sapien
cctacaagcatgaaaacatgggttgtttgctgc

SEQ ID NO: 911784 - DNA, 33 bp, Homo sapien
cctacaagcatgaaaatatgggttgtttgctgc

SEQ ID NO: 911785 - DNA, 33 bp, Homo sapien
tggggccccagtcagaagtgcagtgattagttg

SEQ ID NO: 911786 - DNA, 33 bp, Homo sapien
tggggccccagtcagaggtgcagtgattagttg

SEQ ID NO: 911787 - DNA, 33 bp, Homo sapien
gtgattagttgggtcacgttcttctcattatga

SEQ ID NO: 911788 - DNA, 33 bp, Homo sapien
gtgattagttgggtcatgttcttctcattatga

SEQ ID NO: 911789 - DNA, 33 bp, Homo sapien
aaaaacacacaatgtacgttaaactgccttaaa

SEQ ID NO: 911790 - DNA, 33 bp, Homo sapien
aaaaacacacaatgtatgttaaactgccttaaa

SEQ ID NO: 911791 - DNA, 33 bp, Homo sapien
ttaatttttcatccccaagtcctctacaaaaaa

SEQ ID NO: 911792 - DNA, 33 bp, Homo sapien
ttaatttttcatccccgagtcctctacaaaaaa

SEQ ID NO: 911793 - DNA, 33 bp, Homo sapien
tcagcagaaaccatagacaaaaccatagaatca

SEQ ID NO: 911794 - DNA, 33 bp, Homo sapien
tcagcagaaaccataggcaaaaccatagaatca

SEQ ID NO: 911795 - DNA, 33 bp, Homo sapien
gctgcaaatctatatgaaggccaatttgtaatc

SEQ ID NO: 911796 - DNA, 33 bp, Homo sapien
gctgcaaatctatatggaggccaatttgtaatc

SEQ ID NO: 911797 - DNA, 33 bp, Homo sapien
ctggagaattggtcagaaaattaaaggaaccaa

SEQ ID NO: 911798 - DNA, 33 bp, Homo sapien
ctggagaattggtcaggaaattaaaggaaccaa

SEQ ID NO: 911799 - DNA, 33 bp, Homo sapien
gtctgttgatcttaaaaaagtgatatactactt

SEQ ID NO: 911800 - DNA, 33 bp, Homo sapien
gtctgttgatcttaaagaagtgatatactactt

SEQ ID NO: 911801 - DNA, 33 bp, Homo sapien
taattagtgaagtccacctgggagacaagcaac

SEQ ID NO: 911802 - DNA, 33 bp, Homo sapien
taattagtgaagtccatctgggagacaagcaac

SEQ ID NO: 911803 - DNA, 33 bp, Homo sapien
ctttgttttactagacactctgagcttcttctt

SEQ ID NO: 911804 - DNA, 33 bp, Homo sapien
ctttgttttactagacgctctgagcttcttctt

SEQ ID NO: 911805 - DNA, 33 bp, Homo sapien
ggagtcagggatgagacaaggtagagttttagt

SEQ ID NO: 911806 - DNA, 33 bp, Homo sapien
ggagtcagggatgagataaggtagagttttagt

SEQ ID NO: 911807 - DNA, 33 bp, Homo sapien
atttccactaccaatcactcctttgacttcagg

SEQ ID NO: 911808 - DNA, 33 bp, Homo sapien
atttccactaccaatcgctcctttgacttcagg

SEQ ID NO: 911809 - DNA, 33 bp, Homo sapien
caggtcattctcttcacagagcttacattcagt

SEQ ID NO: 911810 - DNA, 33 bp, Homo sapien
caggtcattctcttcatagagcttacattcagt

SEQ ID NO: 911811 - DNA, 33 bp, Homo sapien
aatccggccgatataacagcaaacaagtaaatc

SEQ ID NO: 911812 - DNA, 33 bp, Homo sapien
aatccggccgatataatagcaaacaagtaaatc

SEQ ID NO: 911813 - DNA, 33 bp, Homo sapien
tcctctagtagtgcacagtatctattgttatca

SEQ ID NO: 911814 - DNA, 33 bp, Homo sapien
tcctctagtagtgcacggtatctattgttatca

SEQ ID NO: 911815 - DNA, 33 bp, Homo sapien
acagaatccttgtagcaataagatgccaacata

SEQ ID NO: 911816 - DNA, 33 bp, Homo sapien
acagaatccttgtagctataagatgccaacata

SEQ ID NO: 911817 - DNA, 33 bp, Homo sapien
agatgtgctttgaataccacctctgaatttact

SEQ ID NO: 911818 - DNA, 33 bp, Homo sapien
agatgtgctttgaatatcacctctgaatttact

SEQ ID NO: 911819 - DNA, 33 bp, Homo sapien
gtgcaacaaattactcaattgcttagaaaacgg

SEQ ID NO: 911820 - DNA, 33 bp, Homo sapien
gtgcaacaaattactcgattgcttagaaaacgg

SEQ ID NO: 911821 - DNA, 33 bp, Homo sapien
gtctgtatcaggagaaatcaaatatagaaggca

SEQ ID NO: 911822 - DNA, 33 bp, Homo sapien
gtctgtatcaggagaagtcaaatatagaaggca

SEQ ID NO: 911823 - DNA, 33 bp, Homo sapien
gtttattgatcactcccaatggctcaaggaaat

SEQ ID NO: 911824 - DNA, 33 bp, Homo sapien
gtttattgatcactcctaatggctcaaggaaat

SEQ ID NO: 911825 - DNA, 33 bp, Homo sapien
agaccaatgaataaacaggtgatataccaatga

SEQ ID NO: 911826 - DNA, 33 bp, Homo sapien
agaccaatgaataaaccggtgatataccaatga

SEQ ID NO: 911827 - DNA, 33 bp, Homo sapien
gaaatgagtcctgaaccaagacaagcccagcag

SEQ ID NO: 911828 - DNA, 33 bp, Homo sapien
gaaatgagtcctgaactaagacaagcccagcag

SEQ ID NO: 911829 - DNA, 33 bp, Homo sapien
aggaaaaaagaaaaaactgagatgagatagtgt

SEQ ID NO: 911830 - DNA, 33 bp, Homo sapien
aggaaaaaagaaaaaagtgagatgagatagtgt

SEQ ID NO: 911831 - DNA, 33 bp, Homo sapien
caggaaagtagatggacggtaggtgagctacaa

SEQ ID NO: 911832 - DNA, 33 bp, Homo sapien
caggaaagtagatggatggtaggtgagctacaa

SEQ ID NO: 911833 - DNA, 33 bp, Homo sapien
agctgaagcagctaccaaagaacgaaaagattg

SEQ ID NO: 911834 - DNA, 33 bp, Homo sapien
agctgaagcagctaccgaagaacgaaaagattg

SEQ ID NO: 911835 - DNA, 33 bp, Homo sapien
tacaaacacagaaccaaagaatttagggtacac

SEQ ID NO: 911836 - DNA, 33 bp, Homo sapien
tacaaacacagaaccatagaatttagggtacac

SEQ ID NO: 911837 - DNA, 33 bp, Homo sapien
ggggatggatgaaggcaagtggtggaaataagg

SEQ ID NO: 911838 - DNA, 33 bp, Homo sapien
ggggatggatgaaggcgagtggtggaaataagg

SEQ ID NO: 911839 - DNA, 33 bp, Homo sapien
ttttacatacatttcaacctagctgccccttca

SEQ ID NO: 911840 - DNA, 33 bp, Homo sapien
ttttacatacatttcatcctagctgccccttca

SEQ ID NO: 911841 - DNA, 33 bp, Homo sapien
gccacgctcttttcaacaatcgcctctcgtgag

SEQ ID NO: 911842 - DNA, 33 bp, Homo sapien
gccacgctcttttcaataatcgcctctcgtgag

SEQ ID NO: 911843 - DNA, 33 bp, Homo sapien
atgatgtactaaacaacggcaatgaattaacca

SEQ ID NO: 911844 - DNA, 33 bp, Homo sapien
atgatgtactaaacaatggcaatgaattaacca

SEQ ID NO: 911845 - DNA, 33 bp, Homo sapien
tccagagtgtcttcaaaaatcagtttctatctg

SEQ ID NO: 911846 - DNA, 33 bp, Homo sapien
tccagagtgtcttcaataatcagtttctatctg

SEQ ID NO: 911847 - DNA, 33 bp, Homo sapien
atcctgaatccacaggaaagtgatcaagtgacg

SEQ ID NO: 911848 - DNA, 33 bp, Homo sapien
atcctgaatccacaggcaagtgatcaagtgacg

SEQ ID NO: 911849 - DNA, 33 bp, Homo sapien
taagtggttagcagagacataaaagggacatct

SEQ ID NO: 911850 - DNA, 33 bp, Homo sapien
taagtggttagcagaggcataaaagggacatct

SEQ ID NO: 911851 - DNA, 33 bp, Homo sapien
acctggcctatattagcattttttaatagctgt

SEQ ID NO: 911852 - DNA, 33 bp, Homo sapien
acctggcctatattaggattttttaatagctgt

SEQ ID NO: 911853 - DNA, 33 bp, Homo sapien
ctggccttaggataggaccaaatcgagggagtg

SEQ ID NO: 911854 - DNA, 33 bp, Homo sapien
ctggccttaggataggtccaaatcgagggagtg

SEQ ID NO: 911855 - DNA, 33 bp, Homo sapien
cccatgctacatagtacaggaacgattaccttg

SEQ ID NO: 911856 - DNA, 33 bp, Homo sapien
cccatgctacatagtagaggaacgattaccttg

SEQ ID NO: 911857 - DNA, 33 bp, Homo sapien
aacagtactcacactacagtcttcacccacagg

SEQ ID NO: 911858 - DNA, 33 bp, Homo sapien
aacagtactcacactatagtcttcacccacagg

SEQ ID NO: 911859 - DNA, 33 bp, Homo sapien
aaacaataccaattgaaagtattccagctcatt

SEQ ID NO: 911860 - DNA, 33 bp, Homo sapien
aaacaataccaattgagagtattccagctcatt

SEQ ID NO: 911861 - DNA, 33 bp, Homo sapien
tttgtaaatgaacgaacggttgagtgggacacg

SEQ ID NO: 911862 - DNA, 33 bp, Homo sapien
tttgtaaatgaacgaatggttgagtgggacacg

SEQ ID NO: 911863 - DNA, 33 bp, Homo sapien
caaatgatttgaccacagaacaggtatttgtca

SEQ ID NO: 911864 - DNA, 33 bp, Homo sapien
caaatgatttgaccacggaacaggtatttgtca

SEQ ID NO: 911865 - DNA, 33 bp, Homo sapien
caagactctggaagtaagccaatgcataaaacc

SEQ ID NO: 911866 - DNA, 33 bp, Homo sapien
caagactctggaagtacgccaatgcataaaacc

SEQ ID NO: 911867 - DNA, 33 bp, Homo sapien
ttatgaatgaataacaacaatgacaaacatgta

SEQ ID NO: 911868 - DNA, 33 bp, Homo sapien
ttatgaatgaataacagcaatgacaaacatgta

SEQ ID NO: 911869 - DNA, 33 bp, Homo sapien
acaattagccaaaacaagtgaaagcaagcacca

SEQ ID NO: 911870 - DNA, 33 bp, Homo sapien
acaattagccaaaacaggtgaaagcaagcacca

SEQ ID NO: 911871 - DNA, 33 bp, Homo sapien
gtttctgattttgctacggttgttaattctatc

SEQ ID NO: 911872 - DNA, 33 bp, Homo sapien
gtttctgattttgctatggttgttaattctatc

SEQ ID NO: 911873 - DNA, 33 bp, Homo sapien
tgagacaattagcatcaccagtgaagaaaggct

SEQ ID NO: 911874 - DNA, 33 bp, Homo sapien
tgagacaattagcatcgccagtgaagaaaggct

SEQ ID NO: 911875 - DNA, 33 bp, Homo sapien
tgaaccagttaagtcacgggtttatataacagg

SEQ ID NO: 911876 - DNA, 33 bp, Homo sapien
tgaaccagttaagtcaggggtttatataacagg

SEQ ID NO: 911877 - DNA, 33 bp, Homo sapien
agtatttcacatcaatgatctcttttaaatcct

SEQ ID NO: 911878 - DNA, 33 bp, Homo sapien
agtatttcacatcaattatctcttttaaatcct

SEQ ID NO: 911879 - DNA, 33 bp, Homo sapien
ttcaactatgtccccaaatggccttctatgtgg

SEQ ID NO: 911880 - DNA, 33 bp, Homo sapien
ttcaactatgtccccagatggccttctatgtgg

SEQ ID NO: 911881 - DNA, 33 bp, Homo sapien
ctgcagccagcgtgaacggtctccatgccaatt

SEQ ID NO: 911882 - DNA, 33 bp, Homo sapien
ctgcagccagcgtgaatggtctccatgccaatt

SEQ ID NO: 911883 - DNA, 33 bp, Homo sapien
tcaaatgagtgtgtggcactatttaggctgaac

SEQ ID NO: 911884 - DNA, 33 bp, Homo sapien
tcaaatgagtgtgtggtactatttaggctgaac

SEQ ID NO: 911885 - DNA, 33 bp, Homo sapien
catatgttgcaattataacaaatgaatggatga

SEQ ID NO: 911886 - DNA, 33 bp, Homo sapien
catatgttgcaattatgacaaatgaatggatga

SEQ ID NO: 911887 - DNA, 33 bp, Homo sapien
acactatgacttgaaccccaacgcactgaagtg

SEQ ID NO: 911888 - DNA, 33 bp, Homo sapien
acactatgacttgaactccaacgcactgaagtg

SEQ ID NO: 911889 - DNA, 33 bp, Homo sapien
aatgcatttggctaaaaccaggggtgctgaatc

SEQ ID NO: 911890 - DNA, 33 bp, Homo sapien
aatgcatttggctaaacccaggggtgctgaatc

SEQ ID NO: 911891 - DNA, 33 bp, Homo sapien
caatcaagctcatccacgtgataatttttcatg

SEQ ID NO: 911892 - DNA, 33 bp, Homo sapien
caatcaagctcatccaggtgataatttttcatg

SEQ ID NO: 911893 - DNA, 33 bp, Homo sapien
cacccagttccctgaacgtcatagagctgcctc

SEQ ID NO: 911894 - DNA, 33 bp, Homo sapien
cacccagttccctgaatgtcatagagctgcctc

SEQ ID NO: 911895 - DNA, 33 bp, Homo sapien
cattgtggctgagtgcacaccttgatgaagtgc

SEQ ID NO: 911896 - DNA, 33 bp, Homo sapien
cattgtggctgagtgcgcaccttgatgaagtgc

SEQ ID NO: 911897 - DNA, 33 bp, Homo sapien
gggagaaaccaacaacagcaatgccacttttaa

SEQ ID NO: 911898 - DNA, 33 bp, Homo sapien
gggagaaaccaacaacggcaatgccacttttaa

SEQ ID NO: 911899 - DNA, 33 bp, Homo sapien
gaaactgactttgggaggttcggtgacatgctc

SEQ ID NO: 911900 - DNA, 33 bp, Homo sapien
gaaactgactttgggatgttcggtgacatgctc

SEQ ID NO: 911901 - DNA, 33 bp, Homo sapien
tgttgtaatgttagaaaagtagaacagcttgtg

SEQ ID NO: 911902 - DNA, 33 bp, Homo sapien
tgttgtaatgttagaagagtagaacagcttgtg

SEQ ID NO: 911903 - DNA, 33 bp, Homo sapien
gtctgcttggaaggaacgtcacagagacaagcc

SEQ ID NO: 911904 - DNA, 33 bp, Homo sapien
gtctgcttggaaggaatgtcacagagacaagcc

SEQ ID NO: 911905 - DNA, 33 bp, Homo sapien
atgtcagggttattcactcctgtggctggatga

SEQ ID NO: 911906 - DNA, 33 bp, Homo sapien
atgtcagggttattcattcctgtggctggatga

SEQ ID NO: 911907 - DNA, 33 bp, Homo sapien
aactgttagctgctgtaacaattatgcactgtc

SEQ ID NO: 911908 - DNA, 33 bp, Homo sapien
aactgttagctgctgtgacaattatgcactgtc

SEQ ID NO: 911909 - DNA, 33 bp, Homo sapien
agagtcatagcttgcacggtggccatcccacag

SEQ ID NO: 911910 - DNA, 33 bp, Homo sapien
agagtcatagcttgcatggtggccatcccacag

SEQ ID NO: 911911 - DNA, 33 bp, Homo sapien
atagcgagaaataaaaacatccagtggaagttg

SEQ ID NO: 911912 - DNA, 33 bp, Homo sapien
atagcgagaaataaaagcatccagtggaagttg

SEQ ID NO: 911913 - DNA, 33 bp, Homo sapien
gaacactaacttcaagacaacctcaaatgtggg

SEQ ID NO: 911914 - DNA, 33 bp, Homo sapien
gaacactaacttcaaggcaacctcaaatgtggg

SEQ ID NO: 911915 - DNA, 33 bp, Homo sapien
gagagcaatgaaggaggaagtagagcacagcaa

SEQ ID NO: 911916 - DNA, 33 bp, Homo sapien
gagagcaatgaaggagtaagtagagcacagcaa

SEQ ID NO: 911917 - DNA, 33 bp, Homo sapien
tctggatctgatggaacgtggaactcatcatcc

SEQ ID NO: 911918 - DNA, 33 bp, Homo sapien
tctggatctgatggaatgtggaactcatcatcc

SEQ ID NO: 911919 - DNA, 33 bp, Homo sapien
taagacatttttgagaactaaaaggggcagtat

SEQ ID NO: 911920 - DNA, 33 bp, Homo sapien
taagacatttttgagagctaaaaggggcagtat

SEQ ID NO: 911921 - DNA, 33 bp, Homo sapien
ttttgtttttccatataaagagttgactcagtc

SEQ ID NO: 911922 - DNA, 33 bp, Homo sapien
ttttgtttttccatatgaagagttgactcagtc

SEQ ID NO: 911923 - DNA, 33 bp, Homo sapien
ttgatggtgtttacataagtcagtatgctgttt

SEQ ID NO: 911924 - DNA, 33 bp, Homo sapien
ttgatggtgtttacattagtcagtatgctgttt

SEQ ID NO: 911925 - DNA, 33 bp, Homo sapien
taaaattgagcctttgaataaacataccgatgc

SEQ ID NO: 911926 - DNA, 33 bp, Homo sapien
taaaattgagcctttgcataaacataccgatgc

SEQ ID NO: 911927 - DNA, 33 bp, Homo sapien
aaaagttatatcaccaataaggcacaagctgac

SEQ ID NO: 911928 - DNA, 33 bp, Homo sapien
aaaagttatatcaccagtaaggcacaagctgac

SEQ ID NO: 911929 - DNA, 33 bp, Homo sapien
aaacacaactaaacaaaccagtcatttcctgct

SEQ ID NO: 911930 - DNA, 33 bp, Homo sapien
aaacacaactaaacaagccagtcatttcctgct

SEQ ID NO: 911931 - DNA, 33 bp, Homo sapien
tcatcagactgacttcaatgtgtaagttctttc

SEQ ID NO: 911932 - DNA, 33 bp, Homo sapien
tcatcagactgacttctatgtgtaagttctttc

SEQ ID NO: 911933 - DNA, 33 bp, Homo sapien
gagtatttctccaggtaacccattctagacagt

SEQ ID NO: 911934 - DNA, 33 bp, Homo sapien
gagtatttctccaggtgacccattctagacagt

SEQ ID NO: 911935 - DNA, 33 bp, Homo sapien
tattggcagcaagtacaaaacctaaaacaatga

SEQ ID NO: 911936 - DNA, 33 bp, Homo sapien
tattggcagcaagtaccaaacctaaaacaatga

SEQ ID NO: 911937 - DNA, 33 bp, Homo sapien
tcagtttgtgcaagaaaagaagacagaggatga

SEQ ID NO: 911938 - DNA, 33 bp, Homo sapien
tcagtttgtgcaagaagagaagacagaggatga

SEQ ID NO: 911939 - DNA, 33 bp, Homo sapien
aaagatcatgcaaagcaagaccatttataacgt

SEQ ID NO: 911940 - DNA, 33 bp, Homo sapien
aaagatcatgcaaagcgagaccatttataacgt

SEQ ID NO: 911941 - DNA, 33 bp, Homo sapien
gaggcaatggaattacaagaaaagaaacaacag

SEQ ID NO: 911942 - DNA, 33 bp, Homo sapien
gaggcaatggaattacgagaaaagaaacaacag

SEQ ID NO: 911943 - DNA, 33 bp, Homo sapien
atattcctggtcagtacgtttgtgatctctgag

SEQ ID NO: 911944 - DNA, 33 bp, Homo sapien
atattcctggtcagtatgtttgtgatctctgag

SEQ ID NO: 911945 - DNA, 33 bp, Homo sapien
agacaaaccaggtgaacgagttaaaatttgtct

SEQ ID NO: 911946 - DNA, 33 bp, Homo sapien
agacaaaccaggtgaatgagttaaaatttgtct

SEQ ID NO: 911947 - DNA, 33 bp, Homo sapien
gatggctcctatcaaaacagtaagtaaaataac

SEQ ID NO: 911948 - DNA, 33 bp, Homo sapien
gatggctcctatcaaagcagtaagtaaaataac

SEQ ID NO: 911949 - DNA, 33 bp, Homo sapien
taattgctggatcacacgataattctattttta

SEQ ID NO: 911950 - DNA, 33 bp, Homo sapien
taattgctggatcacatgataattctattttta

SEQ ID NO: 911951 - DNA, 33 bp, Homo sapien
atcatgctgctatgaacgtggtcacgtaaatgg

SEQ ID NO: 911952 - DNA, 33 bp, Homo sapien
atcatgctgctatgaatgtggtcacgtaaatgg

SEQ ID NO: 911953 - DNA, 33 bp, Homo sapien
aagtaaatctcataagcagtagagaaagcaaca

SEQ ID NO: 911954 - DNA, 33 bp, Homo sapien
aagtaaatctcataaggagtagagaaagcaaca

SEQ ID NO: 911955 - DNA, 33 bp, Homo sapien
agagctacattctaacaacaaatggaaagttat

SEQ ID NO: 911956 - DNA, 33 bp, Homo sapien
agagctacattctaacgacaaatggaaagttat

SEQ ID NO: 911957 - DNA, 33 bp, Homo sapien
cctgtttgttaatgcacggttcctttgttccca

SEQ ID NO: 911958 - DNA, 33 bp, Homo sapien
cctgtttgttaatgcagggttcctttgttccca

SEQ ID NO: 911959 - DNA, 33 bp, Homo sapien
tgttcccaccaacttgaagggacagagtgacat

SEQ ID NO: 911960 - DNA, 33 bp, Homo sapien
tgttcccaccaacttgtagggacagagtgacat

SEQ ID NO: 911961 - DNA, 33 bp, Homo sapien
cgtgtgatttctattacgaacaatctcagatac

SEQ ID NO: 911962 - DNA, 33 bp, Homo sapien
cgtgtgatttctattatgaacaatctcagatac

SEQ ID NO: 911963 - DNA, 33 bp, Homo sapien
gtgtccttagagcaaacactgcagaggtcctga

SEQ ID NO: 911964 - DNA, 33 bp, Homo sapien
gtgtccttagagcaaatactgcagaggtcctga

SEQ ID NO: 911965 - DNA, 33 bp, Homo sapien
tgtcaggggtgacacaatgggatgtaactttgc

SEQ ID NO: 911966 - DNA, 33 bp, Homo sapien
tgtcaggggtgacacattgggatgtaactttgc

SEQ ID NO: 911967 - DNA, 33 bp, Homo sapien
actttgttacccagaacactcatctatgatgaa

SEQ ID NO: 911968 - DNA, 33 bp, Homo sapien
actttgttacccagaatactcatctatgatgaa

SEQ ID NO: 911969 - DNA, 33 bp, Homo sapien
gaaagaagtgaggacactgatgattaactgcta

SEQ ID NO: 911970 - DNA, 33 bp, Homo sapien
gaaagaagtgaggacattgatgattaactgcta

SEQ ID NO: 911971 - DNA, 33 bp, Homo sapien
atggtaagaatccaaaattaccctgtatagtca

SEQ ID NO: 911972 - DNA, 33 bp, Homo sapien
atggtaagaatccaaagttaccctgtatagtca

SEQ ID NO: 911973 - DNA, 33 bp, Homo sapien
tcccagtttaataaacaagggaaatcagctacc

SEQ ID NO: 911974 - DNA, 33 bp, Homo sapien
tcccagtttaataaacgagggaaatcagctacc

SEQ ID NO: 911975 - DNA, 33 bp, Homo sapien
ctaccatgaagaaagcagatgcatttaatcctt

SEQ ID NO: 911976 - DNA, 33 bp, Homo sapien
ctaccatgaagaaagcggatgcatttaatcctt

SEQ ID NO: 911977 - DNA, 33 bp, Homo sapien
gacagcagaaagactacgtttttcaacctgaac

SEQ ID NO: 911978 - DNA, 33 bp, Homo sapien
gacagcagaaagactatgtttttcaacctgaac

SEQ ID NO: 911979 - DNA, 33 bp, Homo sapien
atgacaggagcaggaaagcagtggcagggacag

SEQ ID NO: 911980 - DNA, 33 bp, Homo sapien
atgacaggagcaggaaggcagtggcagggacag

SEQ ID NO: 911981 - DNA, 33 bp, Homo sapien
tagtaatccaacctcaaataggggcaggggtgg

SEQ ID NO: 911982 - DNA, 33 bp, Homo sapien
tagtaatccaacctcagataggggcaggggtgg

SEQ ID NO: 911983 - DNA, 33 bp, Homo sapien
cttgttctgtgctagacacttaaggtatggaga

SEQ ID NO: 911984 - DNA, 33 bp, Homo sapien
cttgttctgtgctagatacttaaggtatggaga

SEQ ID NO: 911985 - DNA, 33 bp, Homo sapien
ctcattgtggtcaaaaacgcagcagattttgtt

SEQ ID NO: 911986 - DNA, 33 bp, Homo sapien
ctcattgtggtcaaaaccgcagcagattttgtt

SEQ ID NO: 911987 - DNA, 33 bp, Homo sapien
aatgggtgtttgagcaccatagagaaaaagtaa

SEQ ID NO: 911988 - DNA, 33 bp, Homo sapien
aatgggtgtttgagcatcatagagaaaaagtaa

SEQ ID NO: 911989 - DNA, 33 bp, Homo sapien
gcgagtacatgaatgaagaatcatttggctaga

SEQ ID NO: 911990 - DNA, 33 bp, Homo sapien
gcgagtacatgaatgaggaatcatttggctaga

SEQ ID NO: 911991 - DNA, 33 bp, Homo sapien
aaagttacagtcactccaatttgcgtgtcagtt

SEQ ID NO: 911992 - DNA, 33 bp, Homo sapien
aaagttacagtcactcgaatttgcgtgtcagtt

SEQ ID NO: 911993 - DNA, 33 bp, Homo sapien
cagcaaataaccagataataatggctgttagta

SEQ ID NO: 911994 - DNA, 33 bp, Homo sapien
cagcaaataaccagattataatggctgttagta

SEQ ID NO: 911995 - DNA, 33 bp, Homo sapien
caagttcatggaacaccggatgagaaggtcaag

SEQ ID NO: 911996 - DNA, 33 bp, Homo sapien
caagttcatggaacactggatgagaaggtcaag

SEQ ID NO: 911997 - DNA, 33 bp, Homo sapien
actgaatcttaaacaaacacacagacccccaga

SEQ ID NO: 911998 - DNA, 33 bp, Homo sapien
actgaatcttaaacaagcacacagacccccaga

SEQ ID NO: 911999 - DNA, 33 bp, Homo sapien
gactctgggcccagacagaaacttatcttataa

SEQ ID NO: 912000 - DNA, 33 bp, Homo sapien
gactctgggcccagacggaaacttatcttataa

SEQ ID NO: 912001 - DNA, 33 bp, Homo sapien
gatgggaaaaagctccactgagttcagagaacc

SEQ ID NO: 912002 - DNA, 33 bp, Homo sapien
gatgggaaaaagctccgctgagttcagagaacc

SEQ ID NO: 912003 - DNA, 33 bp, Homo sapien
cccatttcgtgattaacgcaatggagtcccagg

SEQ ID NO: 912004 - DNA, 33 bp, Homo sapien
cccatttcgtgattaatgcaatggagtcccagg

SEQ ID NO: 912005 - DNA, 33 bp, Homo sapien
cagacttagtcccagaagaagaggctacaagat

SEQ ID NO: 912006 - DNA, 33 bp, Homo sapien
cagacttagtcccagatgaagaggctacaagat

SEQ ID NO: 912007 - DNA, 33 bp, Homo sapien
cttggcatttggtggaataatgtaaagtgcatt

SEQ ID NO: 912008 - DNA, 33 bp, Homo sapien
cttggcatttggtggactaatgtaaagtgcatt

SEQ ID NO: 912009 - DNA, 33 bp, Homo sapien
tgtggggaccctggacacaatccagatacctat

SEQ ID NO: 912010 - DNA, 33 bp, Homo sapien
tgtggggaccctggacgcaatccagatacctat

SEQ ID NO: 912011 - DNA, 33 bp, Homo sapien
tcttgaagttgtaatccactgtggaaatggggg

SEQ ID NO: 912012 - DNA, 33 bp, Homo sapien
tcttgaagttgtaatctactgtggaaatggggg

SEQ ID NO: 912013 - DNA, 33 bp, Homo sapien
gattcatccttacagcaatgggcactgttcttg

SEQ ID NO: 912014 - DNA, 33 bp, Homo sapien
gattcatccttacagcgatgggcactgttcttg

SEQ ID NO: 912015 - DNA, 33 bp, Homo sapien
catgtccaatgaggtacgacaaactcaattatt

SEQ ID NO: 912016 - DNA, 33 bp, Homo sapien
catgtccaatgaggtatgacaaactcaattatt

SEQ ID NO: 912017 - DNA, 33 bp, Homo sapien
ttgttcagtatggtaaagcaagacaacttgaat

SEQ ID NO: 912018 - DNA, 33 bp, Homo sapien
ttgttcagtatggtaaggcaagacaacttgaat

SEQ ID NO: 912019 - DNA, 33 bp, Homo sapien
agaattattgaaatgcggactctgtctactgat

SEQ ID NO: 912020 - DNA, 33 bp, Homo sapien
agaattattgaaatgctgactctgtctactgat

SEQ ID NO: 912021 - DNA, 33 bp, Homo sapien
actaacctgtggatagcatggcaatgaccagtc

SEQ ID NO: 912022 - DNA, 33 bp, Homo sapien
actaacctgtggatagtatggcaatgaccagtc

SEQ ID NO: 912023 - DNA, 33 bp, Homo sapien
gatttgcatgactaaaaaggagccaaatactaa

SEQ ID NO: 912024 - DNA, 33 bp, Homo sapien
gatttgcatgactaaacaggagccaaatactaa

SEQ ID NO: 912025 - DNA, 33 bp, Homo sapien
aatggagatatattcacggattggaggactcag

SEQ ID NO: 912026 - DNA, 33 bp, Homo sapien
aatggagatatattcatggattggaggactcag

SEQ ID NO: 912027 - DNA, 33 bp, Homo sapien
attttactgttgtgaacgtcaaacgttgaatgt

SEQ ID NO: 912028 - DNA, 33 bp, Homo sapien
attttactgttgtgaatgtcaaacgttgaatgt

SEQ ID NO: 912029 - DNA, 33 bp, Homo sapien
gaccagattgcgtgagacattaagaaacacagg

SEQ ID NO: 912030 - DNA, 33 bp, Homo sapien
gaccagattgcgtgagtcattaagaaacacagg

SEQ ID NO: 912031 - DNA, 33 bp, Homo sapien
cacaggtcttgagaacagcagcgatacactcac

SEQ ID NO: 912032 - DNA, 33 bp, Homo sapien
cacaggtcttgagaacggcagcgatacactcac

SEQ ID NO: 912033 - DNA, 33 bp, Homo sapien
taaaatgatcagccagacgtagtgtcactcacc

SEQ ID NO: 912034 - DNA, 33 bp, Homo sapien
taaaatgatcagccaggcgtagtgtcactcacc

SEQ ID NO: 912035 - DNA, 33 bp, Homo sapien
cctgtggccgggcttgcattgctgactgatgga

SEQ ID NO: 912036 - DNA, 33 bp, Homo sapien
cctgtggccgggcttgtattgctgactgatgga

SEQ ID NO: 912037 - DNA, 33 bp, Homo sapien
agcaggttagattttaccctaggagtggtgata

SEQ ID NO: 912038 - DNA, 33 bp, Homo sapien
agcaggttagattttatcctaggagtggtgata

SEQ ID NO: 912039 - DNA, 33 bp, Homo sapien
aaggtgtgaacagcaaaaatctgagactggtct

SEQ ID NO: 912040 - DNA, 33 bp, Homo sapien
aaggtgtgaacagcaataatctgagactggtct

SEQ ID NO: 912041 - DNA, 33 bp, Homo sapien
gatttcttccatttcactctccttttttgacat

SEQ ID NO: 912042 - DNA, 33 bp, Homo sapien
gatttcttccatttcattctccttttttgacat

SEQ ID NO: 912043 - DNA, 33 bp, Homo sapien
caacactcaaccaagaagtaagagataactaga

SEQ ID NO: 912044 - DNA, 33 bp, Homo sapien
caacactcaaccaagatgtaagagataactaga

SEQ ID NO: 912045 - DNA, 33 bp, Homo sapien
ggagagaacctacacaccggcttgtgggtgctt

SEQ ID NO: 912046 - DNA, 33 bp, Homo sapien
ggagagaacctacacatcggcttgtgggtgctt

SEQ ID NO: 912047 - DNA, 33 bp, Homo sapien
tacttcacttagaaaaatagcctccagctccat

SEQ ID NO: 912048 - DNA, 33 bp, Homo sapien
tacttcacttagaaaactagcctccagctccat

SEQ ID NO: 912049 - DNA, 33 bp, Homo sapien
atgaatacaaagcaagaattaagcatggtcaac

SEQ ID NO: 912050 - DNA, 33 bp, Homo sapien
atgaatacaaagcaagtattaagcatggtcaac

SEQ ID NO: 912051 - DNA, 33 bp, Homo sapien
atcacacaccaagtaaataagagatccagattt

SEQ ID NO: 912052 - DNA, 33 bp, Homo sapien
atcacacaccaagtaagtaagagatccagattt

SEQ ID NO: 912053 - DNA, 33 bp, Homo sapien
gaactcctggcttaagaactcttctctcctcgg

SEQ ID NO: 912054 - DNA, 33 bp, Homo sapien
gaactcctggcttaagcactcttctctcctcgg

SEQ ID NO: 912055 - DNA, 33 bp, Homo sapien
tgtgtgcggaattcccccttaacagagaagact

SEQ ID NO: 912056 - DNA, 33 bp, Homo sapien
tgtgtgcggaattcccgcttaacagagaagact

SEQ ID NO: 912057 - DNA, 33 bp, Homo sapien
gcataacttggaaggcagactgaatacatctaa

SEQ ID NO: 912058 - DNA, 33 bp, Homo sapien
gcataacttggaaggcggactgaatacatctaa

SEQ ID NO: 912059 - DNA, 33 bp, Homo sapien
agtactaccacgtggactcaaatatatggggta

SEQ ID NO: 912060 - DNA, 33 bp, Homo sapien
agtactaccacgtggagtcaaatatatggggta

SEQ ID NO: 912061 - DNA, 33 bp, Homo sapien
ctcttctagtttagtaaaataatgctcttaagg

SEQ ID NO: 912062 - DNA, 33 bp, Homo sapien
ctcttctagtttagtacaataatgctcttaagg

SEQ ID NO: 912063 - DNA, 33 bp, Homo sapien
tgcctgggatgttctcaaatgttttcttaacac

SEQ ID NO: 912064 - DNA, 33 bp, Homo sapien
tgcctgggatgttctcgaatgttttcttaacac

SEQ ID NO: 912065 - DNA, 33 bp, Homo sapien
acatccctagtttgacaggacttgggatacctg

SEQ ID NO: 912066 - DNA, 33 bp, Homo sapien
acatccctagtttgacgggacttgggatacctg

SEQ ID NO: 912067 - DNA, 33 bp, Homo sapien
ataggaaaatggaagacgccaagcaaagagggt

SEQ ID NO: 912068 - DNA, 33 bp, Homo sapien
ataggaaaatggaagaggccaagcaaagagggt

SEQ ID NO: 912069 - DNA, 33 bp, Homo sapien
agagagttttcacccaaatatctaaaatcttca

SEQ ID NO: 912070 - DNA, 33 bp, Homo sapien
agagagttttcacccagatatctaaaatcttca

SEQ ID NO: 912071 - DNA, 33 bp, Homo sapien
agaattaagctatttgaaattttagatatttga

SEQ ID NO: 912072 - DNA, 33 bp, Homo sapien
agaattaagctatttggaattttagatatttga

SEQ ID NO: 912073 - DNA, 33 bp, Homo sapien
tagatttgactcatggaccaaaatttgacaatc

SEQ ID NO: 912074 - DNA, 33 bp, Homo sapien
tagatttgactcatgggccaaaatttgacaatc

SEQ ID NO: 912075 - DNA, 33 bp, Homo sapien
atgtgaaggattaataaaaacacaataatgctg

SEQ ID NO: 912076 - DNA, 33 bp, Homo sapien
atgtgaaggattaatacaaacacaataatgctg

SEQ ID NO: 912077 - DNA, 33 bp, Homo sapien
taaaatatgtaatgtacagcatgagttctatgt

SEQ ID NO: 912078 - DNA, 33 bp, Homo sapien
taaaatatgtaatgtagagcatgagttctatgt

SEQ ID NO: 912079 - DNA, 33 bp, Homo sapien
ataatagcagtatctaagttgcagggtgacaca

SEQ ID NO: 912080 - DNA, 33 bp, Homo sapien
ataatagcagtatctatgttgcagggtgacaca

SEQ ID NO: 912081 - DNA, 33 bp, Homo sapien
aaatgacttcaaaataaacagcagaagttgctg

SEQ ID NO: 912082 - DNA, 33 bp, Homo sapien
aaatgacttcaaaatacacagcagaagttgctg

SEQ ID NO: 912083 - DNA, 33 bp, Homo sapien
tttttggctcaggcgaatatgcactaatctgtg

SEQ ID NO: 912084 - DNA, 33 bp, Homo sapien
tttttggctcaggcgagtatgcactaatctgtg

SEQ ID NO: 912085 - DNA, 33 bp, Homo sapien
acatgatattgattttaaaaaagatacacaaaa

SEQ ID NO: 912086 - DNA, 33 bp, Homo sapien
acatgatattgatttttaaaaagatacacaaaa

SEQ ID NO: 912087 - DNA, 33 bp, Homo sapien
tactttgggatgatagaccaccatcttctttct

SEQ ID NO: 912088 - DNA, 33 bp, Homo sapien
tactttgggatgatagtccaccatcttctttct

SEQ ID NO: 912089 - DNA, 33 bp, Homo sapien
attaatttcctgaacccaggcagaaccaattcc

SEQ ID NO: 912090 - DNA, 33 bp, Homo sapien
attaatttcctgaacctaggcagaaccaattcc

SEQ ID NO: 912091 - DNA, 33 bp, Homo sapien
ttctcagacatacaagacctccctggtgcccac

SEQ ID NO: 912092 - DNA, 33 bp, Homo sapien
ttctcagacatacaagccctccctggtgcccac

SEQ ID NO: 912093 - DNA, 33 bp, Homo sapien
acttcagccacagtagaacaggaggtgacattt

SEQ ID NO: 912094 - DNA, 33 bp, Homo sapien
acttcagccacagtaggacaggaggtgacattt

SEQ ID NO: 912095 - DNA, 33 bp, Homo sapien
catgaggtcatgaagaaaaacctggagcagctc

SEQ ID NO: 912096 - DNA, 33 bp, Homo sapien
catgaggtcatgaagacaaacctggagcagctc

SEQ ID NO: 912097 - DNA, 33 bp, Homo sapien
gtagtctctgcctccaaacttaatgggctaaga

SEQ ID NO: 912098 - DNA, 33 bp, Homo sapien
gtagtctctgcctccacacttaatgggctaaga

SEQ ID NO: 912099 - DNA, 33 bp, Homo sapien
tctctgctgctaccaacaggatacaagaacaaa

SEQ ID NO: 912100 - DNA, 33 bp, Homo sapien
tctctgctgctaccaataggatacaagaacaaa

SEQ ID NO: 912101 - DNA, 33 bp, Homo sapien
caattccatttcctaccgctgatggctactacc

SEQ ID NO: 912102 - DNA, 33 bp, Homo sapien
caattccatttcctactgctgatggctactacc

SEQ ID NO: 912103 - DNA, 33 bp, Homo sapien
tagtatcatggaggacaaagtatcaggagaaca

SEQ ID NO: 912104 - DNA, 33 bp, Homo sapien
tagtatcatggaggacgaagtatcaggagaaca

SEQ ID NO: 912105 - DNA, 33 bp, Homo sapien
atacattgcttctataataaaagcacggtaagt

SEQ ID NO: 912106 - DNA, 33 bp, Homo sapien
atacattgcttctatagtaaaagcacggtaagt

SEQ ID NO: 912107 - DNA, 33 bp, Homo sapien
tgaaatgttatttttccaagctcactataatgc

SEQ ID NO: 912108 - DNA, 33 bp, Homo sapien
tgaaatgttatttttctaagctcactataatgc

SEQ ID NO: 912109 - DNA, 33 bp, Homo sapien
ctgaggcttcaagataaagaattcccccacatt

SEQ ID NO: 912110 - DNA, 33 bp, Homo sapien
ctgaggcttcaagatagagaattcccccacatt

SEQ ID NO: 912111 - DNA, 33 bp, Homo sapien
aaaaaacagcaaaaagaaatctgactacttaca

SEQ ID NO: 912112 - DNA, 33 bp, Homo sapien
aaaaaacagcaaaaaggaatctgactacttaca

SEQ ID NO: 912113 - DNA, 33 bp, Homo sapien
tcattaaaaccttgaaacttcgaaaaggagcta

SEQ ID NO: 912114 - DNA, 33 bp, Homo sapien
tcattaaaaccttgaagcttcgaaaaggagcta

SEQ ID NO: 912115 - DNA, 33 bp, Homo sapien
ttcagtcactactaccaaaaggattggccaccg

SEQ ID NO: 912116 - DNA, 33 bp, Homo sapien
ttcagtcactactaccgaaaggattggccaccg

SEQ ID NO: 912117 - DNA, 33 bp, Homo sapien
gaaacaggaaatacatgagaagcacacagaaag

SEQ ID NO: 912118 - DNA, 33 bp, Homo sapien
gaaacaggaaatacattagaagcacacagaaag

SEQ ID NO: 912119 - DNA, 33 bp, Homo sapien
ggaagcatctgtggagacgtttaatggcagcta

SEQ ID NO: 912120 - DNA, 33 bp, Homo sapien
ggaagcatctgtggaggcgtttaatggcagcta

SEQ ID NO: 912121 - DNA, 33 bp, Homo sapien
ttccaactgtgaaaaaacagactgtggatgaga

SEQ ID NO: 912122 - DNA, 33 bp, Homo sapien
ttccaactgtgaaaaagcagactgtggatgaga

SEQ ID NO: 912123 - DNA, 33 bp, Homo sapien
aatggcctttgtggtcaatgggagaattctgta

SEQ ID NO: 912124 - DNA, 33 bp, Homo sapien
aatggcctttgtggtcgatgggagaattctgta

SEQ ID NO: 912125 - DNA, 33 bp, Homo sapien
tgatacatactttgaactggagacaaaacactg

SEQ ID NO: 912126 - DNA, 33 bp, Homo sapien
tgatacatactttgaattggagacaaaacactg

SEQ ID NO: 912127 - DNA, 33 bp, Homo sapien
gcctcaccaggaacaccggaagaacttgtggat

SEQ ID NO: 912128 - DNA, 33 bp, Homo sapien
gcctcaccaggaacactggaagaacttgtggat

SEQ ID NO: 912129 - DNA, 33 bp, Homo sapien
aggctagagtgtagtacggcactcgggctaggt

SEQ ID NO: 912130 - DNA, 33 bp, Homo sapien
aggctagagtgtagtatggcactcgggctaggt

SEQ ID NO: 912131 - DNA, 33 bp, Homo sapien
gccagtgaaggaaaatgaggcagaatggtcgga

SEQ ID NO: 912132 - DNA, 33 bp, Homo sapien
gccagtgaaggaaaattaggcagaatggtcgga

SEQ ID NO: 912133 - DNA, 33 bp, Homo sapien
agatagatgtgaacccaatatgaaacaataact

SEQ ID NO: 912134 - DNA, 33 bp, Homo sapien
agatagatgtgaacccgatatgaaacaataact

SEQ ID NO: 912135 - DNA, 33 bp, Homo sapien
tcagccttgatccaaaaaaatggccgagtgcac

SEQ ID NO: 912136 - DNA, 33 bp, Homo sapien
tcagccttgatccaaagaaatggccgagtgcac

SEQ ID NO: 912137 - DNA, 33 bp, Homo sapien
gtgcactttcaagtcaagaatacctggagcaag

SEQ ID NO: 912138 - DNA, 33 bp, Homo sapien
gtgcactttcaagtcaggaatacctggagcaag

SEQ ID NO: 912139 - DNA, 33 bp, Homo sapien
gaaaaatgagagccacacaaaagggtttttttc

SEQ ID NO: 912140 - DNA, 33 bp, Homo sapien
gaaaaatgagagccacgcaaaagggtttttttc

SEQ ID NO: 912141 - DNA, 33 bp, Homo sapien
agacaaatccactatcacagttggagacttcaa

SEQ ID NO: 912142 - DNA, 33 bp, Homo sapien
agacaaatccactatcgcagttggagacttcaa

SEQ ID NO: 912143 - DNA, 33 bp, Homo sapien
acaaaggtttactaaacacctactgctcatccc

SEQ ID NO: 912144 - DNA, 33 bp, Homo sapien
acaaaggtttactaaatacctactgctcatccc

SEQ ID NO: 912145 - DNA, 33 bp, Homo sapien
tgggcagttgtaaaaccctcagagagtatgtta

SEQ ID NO: 912146 - DNA, 33 bp, Homo sapien
tgggcagttgtaaaacgctcagagagtatgtta

SEQ ID NO: 912147 - DNA, 33 bp, Homo sapien
cccatgtttttggtcaagtgtggttgaattttt

SEQ ID NO: 912148 - DNA, 33 bp, Homo sapien
cccatgtttttggtcatgtgtggttgaattttt

SEQ ID NO: 912149 - DNA, 33 bp, Homo sapien
ttcctacttcccctgaccgtaactcatgacttg

SEQ ID NO: 912150 - DNA, 33 bp, Homo sapien
ttcctacttcccctgagcgtaactcatgacttg

SEQ ID NO: 912151 - DNA, 33 bp, Homo sapien
cctgcttctctctccaagtcgttctgccaacta

SEQ ID NO: 912152 - DNA, 33 bp, Homo sapien
cctgcttctctctccacgtcgttctgccaacta

SEQ ID NO: 912153 - DNA, 33 bp, Homo sapien
agcgatagcagagcatcaaccaagtgcctgacc

SEQ ID NO: 912154 - DNA, 33 bp, Homo sapien
agcgatagcagagcattaaccaagtgcctgacc

SEQ ID NO: 912155 - DNA, 33 bp, Homo sapien
aaagacaaaactgaacccagacactaccacagg

SEQ ID NO: 912156 - DNA, 33 bp, Homo sapien
aaagacaaaactgaacgcagacactaccacagg

SEQ ID NO: 912157 - DNA, 33 bp, Homo sapien
catgtacctcatcaaacatcagtaactcacaac

SEQ ID NO: 912158 - DNA, 33 bp, Homo sapien
catgtacctcatcaaatatcagtaactcacaac

SEQ ID NO: 912159 - DNA, 33 bp, Homo sapien
ctctgcccttaacttacgcctcataaaatcagt

SEQ ID NO: 912160 - DNA, 33 bp, Homo sapien
ctctgcccttaacttatgcctcataaaatcagt

SEQ ID NO: 912161 - DNA, 33 bp, Homo sapien
ataatgccagtcttggacaatactgcacagcag

SEQ ID NO: 912162 - DNA, 33 bp, Homo sapien
ataatgccagtcttggtcaatactgcacagcag

SEQ ID NO: 912163 - DNA, 33 bp, Homo sapien
ttcctgttggcaattcaaagtgttggtgtcaaa

SEQ ID NO: 912164 - DNA, 33 bp, Homo sapien
ttcctgttggcaattcgaagtgttggtgtcaaa

SEQ ID NO: 912165 - DNA, 33 bp, Homo sapien
gtggtcaagtggatgactcaatgacttgccagg

SEQ ID NO: 912166 - DNA, 33 bp, Homo sapien
gtggtcaagtggatgattcaatgacttgccagg

SEQ ID NO: 912167 - DNA, 33 bp, Homo sapien
ttagccaggctgaaaacgagagagaatggtaag

SEQ ID NO: 912168 - DNA, 33 bp, Homo sapien
ttagccaggctgaaaatgagagagaatggtaag

SEQ ID NO: 912169 - DNA, 33 bp, Homo sapien
caacagtaagaaatcaacttccagagaatttca

SEQ ID NO: 912170 - DNA, 33 bp, Homo sapien
caacagtaagaaatcagcttccagagaatttca

SEQ ID NO: 912171 - DNA, 33 bp, Homo sapien
ctaaatctcattcgtcactctggaaccatcttc

SEQ ID NO: 912172 - DNA, 33 bp, Homo sapien
ctaaatctcattcgtcgctctggaaccatcttc

SEQ ID NO: 912173 - DNA, 33 bp, Homo sapien
cctgagatattaaacaagtgtcctaagtcctct

SEQ ID NO: 912174 - DNA, 33 bp, Homo sapien
cctgagatattaaacatgtgtcctaagtcctct

SEQ ID NO: 912175 - DNA, 33 bp, Homo sapien
taatggaaagcctttacagaggatggactcaga

SEQ ID NO: 912176 - DNA, 33 bp, Homo sapien
taatggaaagcctttatagaggatggactcaga

SEQ ID NO: 912177 - DNA, 33 bp, Homo sapien
gagacctacactttgaaaggctgaagcatcaac

SEQ ID NO: 912178 - DNA, 33 bp, Homo sapien
gagacctacactttgagaggctgaagcatcaac

SEQ ID NO: 912179 - DNA, 33 bp, Homo sapien
caggctggaagaaaaacgagctagtcagtagtt

SEQ ID NO: 912180 - DNA, 33 bp, Homo sapien
caggctggaagaaaaatgagctagtcagtagtt

SEQ ID NO: 912181 - DNA, 33 bp, Homo sapien
ccatgaaatgctaaaccccaatcctctttaaaa

SEQ ID NO: 912182 - DNA, 33 bp, Homo sapien
ccatgaaatgctaaactccaatcctctttaaaa

SEQ ID NO: 912183 - DNA, 33 bp, Homo sapien
aagactccatcaatcaagtcatcttcagaaatg

SEQ ID NO: 912184 - DNA, 33 bp, Homo sapien
aagactccatcaatcacgtcatcttcagaaatg

SEQ ID NO: 912185 - DNA, 33 bp, Homo sapien
tctggctgttctctacccattaatcactccttc

SEQ ID NO: 912186 - DNA, 33 bp, Homo sapien
tctggctgttctctacgcattaatcactccttc

SEQ ID NO: 912187 - DNA, 33 bp, Homo sapien
atgtcatttccacaacaagctttacctggccat

SEQ ID NO: 912188 - DNA, 33 bp, Homo sapien
atgtcatttccacaacgagctttacctggccat

SEQ ID NO: 912189 - DNA, 33 bp, Homo sapien
cgcgagcaaacagacccggcttgacctcatgtc

SEQ ID NO: 912190 - DNA, 33 bp, Homo sapien
cgcgagcaaacagacctggcttgacctcatgtc

SEQ ID NO: 912191 - DNA, 33 bp, Homo sapien
ggaaatggcagaggagaacttgaacccagccct

SEQ ID NO: 912192 - DNA, 33 bp, Homo sapien
ggaaatggcagaggaggacttgaacccagccct

SEQ ID NO: 912193 - DNA, 33 bp, Homo sapien
catccagtgagccttccagagtgagctatgata

SEQ ID NO: 912194 - DNA, 33 bp, Homo sapien
catccagtgagccttcgagagtgagctatgata

SEQ ID NO: 912195 - DNA, 33 bp, Homo sapien
gactaaattccagagacggccacttagccgatg

SEQ ID NO: 912196 - DNA, 33 bp, Homo sapien
gactaaattccagagatggccacttagccgatg

SEQ ID NO: 912197 - DNA, 33 bp, Homo sapien
tcataagaaatcttgaagcctatattcatttgg

SEQ ID NO: 912198 - DNA, 33 bp, Homo sapien
tcataagaaatcttgaggcctatattcatttgg

SEQ ID NO: 912199 - DNA, 33 bp, Homo sapien
ctccccttcatgaccacgctgtcacaccagata

SEQ ID NO: 912200 - DNA, 33 bp, Homo sapien
ctccccttcatgaccatgctgtcacaccagata

SEQ ID NO: 912201 - DNA, 33 bp, Homo sapien
tcaatagagtaacatcaaaatgaggactctgaa

SEQ ID NO: 912202 - DNA, 33 bp, Homo sapien
tcaatagagtaacatccaaatgaggactctgaa

SEQ ID NO: 912203 - DNA, 33 bp, Homo sapien
cagttagtatcttgtacggggaaatagaatttt

SEQ ID NO: 912204 - DNA, 33 bp, Homo sapien
cagttagtatcttgtatggggaaatagaatttt

SEQ ID NO: 912205 - DNA, 33 bp, Homo sapien
ggccctcaaagcaagtaaagctcttcctgaaaa

SEQ ID NO: 912206 - DNA, 33 bp, Homo sapien
ggccctcaaagcaagtgaagctcttcctgaaaa

SEQ ID NO: 912207 - DNA, 33 bp, Homo sapien
ccattgccacaatcaaaatagtaagctcgtcca

SEQ ID NO: 912208 - DNA, 33 bp, Homo sapien
ccattgccacaatcaagatagtaagctcgtcca

SEQ ID NO: 912209 - DNA, 33 bp, Homo sapien
gaagttacttgccttcaactacaccatagtgag

SEQ ID NO: 912210 - DNA, 33 bp, Homo sapien
gaagttacttgccttcgactacaccatagtgag

SEQ ID NO: 912211 - DNA, 33 bp, Homo sapien
caggcttacaaaaacacataggaagctgagtgt

SEQ ID NO: 912212 - DNA, 33 bp, Homo sapien
caggcttacaaaaacagataggaagctgagtgt

SEQ ID NO: 912213 - DNA, 33 bp, Homo sapien
tgcagtggtgtgagtaagttagcaactggtatg

SEQ ID NO: 912214 - DNA, 33 bp, Homo sapien
tgcagtggtgtgagtatgttagcaactggtatg

SEQ ID NO: 912215 - DNA, 33 bp, Homo sapien
tcacaaggcaggcctgaacttttgcgtttccta

SEQ ID NO: 912216 - DNA, 33 bp, Homo sapien
tcacaaggcaggcctgtacttttgcgtttccta

SEQ ID NO: 912217 - DNA, 33 bp, Homo sapien
agtttggcattctgcacattgtaggcagctgag

SEQ ID NO: 912218 - DNA, 33 bp, Homo sapien
agtttggcattctgcatattgtaggcagctgag

SEQ ID NO: 912219 - DNA, 33 bp, Homo sapien
ctcaatagctgcaaaactgtggacgcctgagcc

SEQ ID NO: 912220 - DNA, 33 bp, Homo sapien
ctcaatagctgcaaaattgtggacgcctgagcc

SEQ ID NO: 912221 - DNA, 33 bp, Homo sapien
cctcccctgtgagttacacccatgcaaagggaa

SEQ ID NO: 912222 - DNA, 33 bp, Homo sapien
cctcccctgtgagttatacccatgcaaagggaa

SEQ ID NO: 912223 - DNA, 33 bp, Homo sapien
gatgctgaaatcccatcaccagtgtgtttctcc

SEQ ID NO: 912224 - DNA, 33 bp, Homo sapien
gatgctgaaatcccatgaccagtgtgtttctcc

SEQ ID NO: 912225 - DNA, 33 bp, Homo sapien
aaaagtgagatcagagaatgtgaaatgggatgc

SEQ ID NO: 912226 - DNA, 33 bp, Homo sapien
aaaagtgagatcagaggatgtgaaatgggatgc

SEQ ID NO: 912227 - DNA, 33 bp, Homo sapien
aggaagagaataatgacgagagaacaagctggg

SEQ ID NO: 912228 - DNA, 33 bp, Homo sapien
aggaagagaataatgatgagagaacaagctggg

SEQ ID NO: 912229 - DNA, 33 bp, Homo sapien
gatagcatcaaacacaaggcttagtttgcatgc

SEQ ID NO: 912230 - DNA, 33 bp, Homo sapien
gatagcatcaaacacagggcttagtttgcatgc

SEQ ID NO: 912231 - DNA, 33 bp, Homo sapien
ccatcattttgagttcaccatttttttctatgt

SEQ ID NO: 912232 - DNA, 33 bp, Homo sapien
ccatcattttgagttcgccatttttttctatgt

SEQ ID NO: 912233 - DNA, 33 bp, Homo sapien
gatgctctgataaagagtaatgcttgacttcct

SEQ ID NO: 912234 - DNA, 33 bp, Homo sapien
gatgctctgataaagattaatgcttgacttcct

SEQ ID NO: 912235 - DNA, 33 bp, Homo sapien
tctgtttaaataacacaatgactcaatggcata

SEQ ID NO: 912236 - DNA, 33 bp, Homo sapien
tctgtttaaataacactatgactcaatggcata

SEQ ID NO: 912237 - DNA, 33 bp, Homo sapien
tcatttttctctctccagaaactcaatctcagt

SEQ ID NO: 912238 - DNA, 33 bp, Homo sapien
tcatttttctctctccggaaactcaatctcagt

SEQ ID NO: 912239 - DNA, 33 bp, Homo sapien
aagacgaacagggagacaacgggatgggacgac

SEQ ID NO: 912240 - DNA, 33 bp, Homo sapien
aagacgaacagggagagaacgggatgggacgac

SEQ ID NO: 912241 - DNA, 33 bp, Homo sapien
ggtatgtgtgactccacgttttctaaatgtaac

SEQ ID NO: 912242 - DNA, 33 bp, Homo sapien
ggtatgtgtgactccaggttttctaaatgtaac

SEQ ID NO: 912243 - DNA, 33 bp, Homo sapien
ggcacaacaggtttcaagctaacaaacatcaaa

SEQ ID NO: 912244 - DNA, 33 bp, Homo sapien
ggcacaacaggtttcacgctaacaaacatcaaa

SEQ ID NO: 912245 - DNA, 33 bp, Homo sapien
acgagggcatactggactagggtggattagggc

SEQ ID NO: 912246 - DNA, 33 bp, Homo sapien
acgagggcatactggattagggtggattagggc

SEQ ID NO: 912247 - DNA, 33 bp, Homo sapien
aggttctttcagacacaaatgttaaaacgaggg

SEQ ID NO: 912248 - DNA, 33 bp, Homo sapien
aggttctttcagacaccaatgttaaaacgaggg

SEQ ID NO: 912249 - DNA, 33 bp, Homo sapien
cacatatacgtacacacagtcatacacatataa

SEQ ID NO: 912250 - DNA, 33 bp, Homo sapien
cacatatacgtacacagagtcatacacatataa

SEQ ID NO: 912251 - DNA, 33 bp, Homo sapien
aaaaagagcaaaccagaacatggccttgcctca

SEQ ID NO: 912252 - DNA, 33 bp, Homo sapien
aaaaagagcaaaccaggacatggccttgcctca

SEQ ID NO: 912253 - DNA, 33 bp, Homo sapien
caaaaaaaccgaactaactggtgcaaaaagaaa

SEQ ID NO: 912254 - DNA, 33 bp, Homo sapien
caaaaaaaccgaactatctggtgcaaaaagaaa

SEQ ID NO: 912255 - DNA, 33 bp, Homo sapien
ctctgcctctgtattaagtaacagaactgccaa

SEQ ID NO: 912256 - DNA, 33 bp, Homo sapien
ctctgcctctgtattacgtaacagaactgccaa

SEQ ID NO: 912257 - DNA, 33 bp, Homo sapien
atttcaaaggaccaccaaagtcttccaaaggtg

SEQ ID NO: 912258 - DNA, 33 bp, Homo sapien
atttcaaaggaccaccgaagtcttccaaaggtg

SEQ ID NO: 912259 - DNA, 33 bp, Homo sapien
atttctccaataaaatcatcacacacgtaagta

SEQ ID NO: 912260 - DNA, 33 bp, Homo sapien
atttctccaataaaattatcacacacgtaagta

SEQ ID NO: 912261 - DNA, 33 bp, Homo sapien
tggagaaatcgcaaaaagaaaagtgaattctca

SEQ ID NO: 912262 - DNA, 33 bp, Homo sapien
tggagaaatcgcaaaaggaaaagtgaattctca

SEQ ID NO: 912263 - DNA, 33 bp, Homo sapien
gtatcttgcaggaaagcaggcagaataaagagg

SEQ ID NO: 912264 - DNA, 33 bp, Homo sapien
gtatcttgcaggaaagtaggcagaataaagagg

SEQ ID NO: 912265 - DNA, 33 bp, Homo sapien
ctctctcatgcatgcaagtgctacatattatgt

SEQ ID NO: 912266 - DNA, 33 bp, Homo sapien
ctctctcatgcatgcaggtgctacatattatgt

SEQ ID NO: 912267 - DNA, 33 bp, Homo sapien
gtctcttagctgagaaatcctttttaaagaagc

SEQ ID NO: 912268 - DNA, 33 bp, Homo sapien
gtctcttagctgagaagtcctttttaaagaagc

SEQ ID NO: 912269 - DNA, 33 bp, Homo sapien
tctgtatccacaaaaacgtccttctgggatcct

SEQ ID NO: 912270 - DNA, 33 bp, Homo sapien
tctgtatccacaaaaatgtccttctgggatcct

SEQ ID NO: 912271 - DNA, 33 bp, Homo sapien
gaaatgtatgttttataaggattgctttgaaat

SEQ ID NO: 912272 - DNA, 33 bp, Homo sapien
gaaatgtatgttttatgaggattgctttgaaat

SEQ ID NO: 912273 - DNA, 33 bp, Homo sapien
aactggctaatggtcacatagctaataatggtg

SEQ ID NO: 912274 - DNA, 33 bp, Homo sapien
aactggctaatggtcatatagctaataatggtg

SEQ ID NO: 912275 - DNA, 33 bp, Homo sapien
gttttctcatttgttagatgatgataattacag

SEQ ID NO: 912276 - DNA, 33 bp, Homo sapien
gttttctcatttgttatatgatgataattacag

SEQ ID NO: 912277 - DNA, 33 bp, Homo sapien
ccagttaatgtacctgcaggatttgggcagcaa

SEQ ID NO: 912278 - DNA, 33 bp, Homo sapien
ccagttaatgtacctgtaggatttgggcagcaa

SEQ ID NO: 912279 - DNA, 33 bp, Homo sapien
atcaactcttgatccactgaggatttaaatctt

SEQ ID NO: 912280 - DNA, 33 bp, Homo sapien
atcaactcttgatccattgaggatttaaatctt

SEQ ID NO: 912281 - DNA, 33 bp, Homo sapien
aagtcacaagaaaaaccagagcaaacaattttc

SEQ ID NO: 912282 - DNA, 33 bp, Homo sapien
aagtcacaagaaaaactagagcaaacaattttc

SEQ ID NO: 912283 - DNA, 33 bp, Homo sapien
accaaaatgcaaaggcaaaatgctcaatgacct

SEQ ID NO: 912284 - DNA, 33 bp, Homo sapien
accaaaatgcaaaggcgaaatgctcaatgacct

SEQ ID NO: 912285 - DNA, 33 bp, Homo sapien
cttgagagcttgcagacgtaatgagaagaaaaa

SEQ ID NO: 912286 - DNA, 33 bp, Homo sapien
cttgagagcttgcagatgtaatgagaagaaaaa

SEQ ID NO: 912287 - DNA, 33 bp, Homo sapien
taatagttacttgttcaatttattgcatctgca

SEQ ID NO: 912288 - DNA, 33 bp, Homo sapien
taatagttacttgttcgatttattgcatctgca

SEQ ID NO: 912289 - DNA, 33 bp, Homo sapien
tcaaatccatgtcctgccacattttctgtaaac

SEQ ID NO: 912290 - DNA, 33 bp, Homo sapien
tcaaatccatgtcctgtcacattttctgtaaac

SEQ ID NO: 912291 - DNA, 33 bp, Homo sapien
gaggaagtttcacaaagtgacatttaaattggt

SEQ ID NO: 912292 - DNA, 33 bp, Homo sapien
gaggaagtttcacaaattgacatttaaattggt

SEQ ID NO: 912293 - DNA, 33 bp, Homo sapien
ataatttgcctttccactgacctactttcaaga

SEQ ID NO: 912294 - DNA, 33 bp, Homo sapien
ataatttgcctttccattgacctactttcaaga

SEQ ID NO: 912295 - DNA, 33 bp, Homo sapien
gcctgtgtctcatacacggtgctacaaaacctt

SEQ ID NO: 912296 - DNA, 33 bp, Homo sapien
gcctgtgtctcatacagggtgctacaaaacctt

SEQ ID NO: 912297 - DNA, 33 bp, Homo sapien
tctaatctccaaaggaggacaagtatctcaaac

SEQ ID NO: 912298 - DNA, 33 bp, Homo sapien
tctaatctccaaaggatgacaagtatctcaaac

SEQ ID NO: 912299 - DNA, 33 bp, Homo sapien
tactataaattggcttaaagagacatctcagtc

SEQ ID NO: 912300 - DNA, 33 bp, Homo sapien
tactataaattggctttaagagacatctcagtc

SEQ ID NO: 912301 - DNA, 33 bp, Homo sapien
caatgctgaaagcaaccgtgatggtgaactcta

SEQ ID NO: 912302 - DNA, 33 bp, Homo sapien
caatgctgaaagcaactgtgatggtgaactcta

SEQ ID NO: 912303 - DNA, 33 bp, Homo sapien
agttatgtggtcaaacagcccctgagttatgtc

SEQ ID NO: 912304 - DNA, 33 bp, Homo sapien
agttatgtggtcaaacggcccctgagttatgtc

SEQ ID NO: 912305 - DNA, 33 bp, Homo sapien
caagtagacaaatgaaaagtgcctaataaagag

SEQ ID NO: 912306 - DNA, 33 bp, Homo sapien
caagtagacaaatgaatagtgcctaataaagag

SEQ ID NO: 912307 - DNA, 33 bp, Homo sapien
ttgctggcttcctcctcaaaggtttctgattca

SEQ ID NO: 912308 - DNA, 33 bp, Homo sapien
ttgctggcttcctccttaaaggtttctgattca

SEQ ID NO: 912309 - DNA, 33 bp, Homo sapien
ggtaggagctgggaagaacccttgtatttgtgc

SEQ ID NO: 912310 - DNA, 33 bp, Homo sapien
ggtaggagctgggaaggacccttgtatttgtgc

SEQ ID NO: 912311 - DNA, 33 bp, Homo sapien
agaaactcaggccctgaatacacaaacctaggc

SEQ ID NO: 912312 - DNA, 33 bp, Homo sapien
agaaactcaggccctgcatacacaaacctaggc

SEQ ID NO: 912313 - DNA, 33 bp, Homo sapien
ctgtgctctacagaggcaaatggcaagatgctt

SEQ ID NO: 912314 - DNA, 33 bp, Homo sapien
ctgtgctctacagaggtaaatggcaagatgctt

SEQ ID NO: 912315 - DNA, 33 bp, Homo sapien
aaaacaccttgcctagaaataaaataccacaca

SEQ ID NO: 912316 - DNA, 33 bp, Homo sapien
aaaacaccttgcctaggaataaaataccacaca

SEQ ID NO: 912317 - DNA, 33 bp, Homo sapien
gcaatgccaagacaacagcatagcatgttcaga

SEQ ID NO: 912318 - DNA, 33 bp, Homo sapien
gcaatgccaagacaacggcatagcatgttcaga

SEQ ID NO: 912319 - DNA, 33 bp, Homo sapien
tatgtcaataaatcacagccaggaggcaattcg

SEQ ID NO: 912320 - DNA, 33 bp, Homo sapien
tatgtcaataaatcacggccaggaggcaattcg

SEQ ID NO: 912321 - DNA, 33 bp, Homo sapien
cagtcttactgataaccgaatgaaataaattaa

SEQ ID NO: 912322 - DNA, 33 bp, Homo sapien
cagtcttactgataactgaatgaaataaattaa

SEQ ID NO: 912323 - DNA, 33 bp, Homo sapien
tcttagacagaatcccactgccttttcatatca

SEQ ID NO: 912324 - DNA, 33 bp, Homo sapien
tcttagacagaatcccgctgccttttcatatca

SEQ ID NO: 912325 - DNA, 33 bp, Homo sapien
gatgtaaccgccaccaataaagagtagggatag

SEQ ID NO: 912326 - DNA, 33 bp, Homo sapien
gatgtaaccgccaccagtaaagagtagggatag

SEQ ID NO: 912327 - DNA, 33 bp, Homo sapien
gcgctgtttcctacaaccattatgattatcctt

SEQ ID NO: 912328 - DNA, 33 bp, Homo sapien
gcgctgtttcctacaatcattatgattatcctt

SEQ ID NO: 912329 - DNA, 33 bp, Homo sapien
tattttgttggggagaaagagactgagaatctg

SEQ ID NO: 912330 - DNA, 33 bp, Homo sapien
tattttgttggggagagagagactgagaatctg

SEQ ID NO: 912331 - DNA, 33 bp, Homo sapien
cctgcagcatttctcaaactaacagctggcatc

SEQ ID NO: 912332 - DNA, 33 bp, Homo sapien
cctgcagcatttctcagactaacagctggcatc

SEQ ID NO: 912333 - DNA, 33 bp, Homo sapien
aatggtaccacatcgagagggtcgacctcaatt

SEQ ID NO: 912334 - DNA, 33 bp, Homo sapien
aatggtaccacatcgatagggtcgacctcaatt

SEQ ID NO: 912335 - DNA, 33 bp, Homo sapien
tcaagtaacagagataaaagggcattgtgaaaa

SEQ ID NO: 912336 - DNA, 33 bp, Homo sapien
tcaagtaacagagatacaagggcattgtgaaaa

SEQ ID NO: 912337 - DNA, 33 bp, Homo sapien
gccatgctgaaagagaccctgagtctactccag

SEQ ID NO: 912338 - DNA, 33 bp, Homo sapien
gccatgctgaaagagatcctgagtctactccag

SEQ ID NO: 912339 - DNA, 33 bp, Homo sapien
atatatattggtaaaacttagctttgaaagtct

SEQ ID NO: 912340 - DNA, 33 bp, Homo sapien
atatatattggtaaaatttagctttgaaagtct

SEQ ID NO: 912341 - DNA, 33 bp, Homo sapien
taactttttttatttcaaacagtgattgcttta

SEQ ID NO: 912342 - DNA, 33 bp, Homo sapien
taactttttttatttccaacagtgattgcttta

SEQ ID NO: 912343 - DNA, 33 bp, Homo sapien
catgtaggtcctagtacattgtcacattttcca

SEQ ID NO: 912344 - DNA, 33 bp, Homo sapien
catgtaggtcctagtatattgtcacattttcca

SEQ ID NO: 912345 - DNA, 33 bp, Homo sapien
gagctactggaaatcacgactgtcactagacaa

SEQ ID NO: 912346 - DNA, 33 bp, Homo sapien
gagctactggaaatcaggactgtcactagacaa

SEQ ID NO: 912347 - DNA, 33 bp, Homo sapien
cacttctacatacataccaaaaagaactaaaag

SEQ ID NO: 912348 - DNA, 33 bp, Homo sapien
cacttctacatacatagcaaaaagaactaaaag

SEQ ID NO: 912349 - DNA, 33 bp, Homo sapien
ggatctcaagacagtacagaaagagttggacat

SEQ ID NO: 912350 - DNA, 33 bp, Homo sapien
ggatctcaagacagtatagaaagagttggacat

SEQ ID NO: 912351 - DNA, 33 bp, Homo sapien
atagtgtgtactgaaaccccataatgaactcat

SEQ ID NO: 912352 - DNA, 33 bp, Homo sapien
atagtgtgtactgaaagcccataatgaactcat

SEQ ID NO: 912353 - DNA, 33 bp, Homo sapien
acccatttttgaactcaacataaattttcaggg

SEQ ID NO: 912354 - DNA, 33 bp, Homo sapien
acccatttttgaactcgacataaattttcaggg

SEQ ID NO: 912355 - DNA, 33 bp, Homo sapien
atgcacttggcaaaccaaagtagctgtggtgga

SEQ ID NO: 912356 - DNA, 33 bp, Homo sapien
atgcacttggcaaaccgaagtagctgtggtgga

SEQ ID NO: 912357 - DNA, 33 bp, Homo sapien
ctgaggctgcaccctaactaatttgattcctgt

SEQ ID NO: 912358 - DNA, 33 bp, Homo sapien
ctgaggctgcaccctagctaatttgattcctgt

SEQ ID NO: 912359 - DNA, 33 bp, Homo sapien
tgtatatttcacatgacagtgatacgagggata

SEQ ID NO: 912360 - DNA, 33 bp, Homo sapien
tgtatatttcacatgagagtgatacgagggata

SEQ ID NO: 912361 - DNA, 33 bp, Homo sapien
gcccaacaaagcaaatcatgtccacacagcatg

SEQ ID NO: 912362 - DNA, 33 bp, Homo sapien
gcccaacaaagcaaattatgtccacacagcatg

SEQ ID NO: 912363 - DNA, 33 bp, Homo sapien
gtgactcctagaaaaaccttaaaattgcaaatg

SEQ ID NO: 912364 - DNA, 33 bp, Homo sapien
gtgactcctagaaaaagcttaaaattgcaaatg

SEQ ID NO: 912365 - DNA, 33 bp, Homo sapien
gcttcaagggatataaagattgctgctttctag

SEQ ID NO: 912366 - DNA, 33 bp, Homo sapien
gcttcaagggatataacgattgctgctttctag

SEQ ID NO: 912367 - DNA, 33 bp, Homo sapien
agtggtgtcacctcacacagttgccaatcctgc

SEQ ID NO: 912368 - DNA, 33 bp, Homo sapien
agtggtgtcacctcacgcagttgccaatcctgc

SEQ ID NO: 912369 - DNA, 33 bp, Homo sapien
catgtgttgtcttacacgacactttctgtttct

SEQ ID NO: 912370 - DNA, 33 bp, Homo sapien
catgtgttgtcttacatgacactttctgtttct

SEQ ID NO: 912371 - DNA, 33 bp, Homo sapien
gtaaagatgcataatacattcagttgacaaaca

SEQ ID NO: 912372 - DNA, 33 bp, Homo sapien
gtaaagatgcataatatattcagttgacaaaca

SEQ ID NO: 912373 - DNA, 33 bp, Homo sapien
aaagaagttgatagataatattcaccacaattt

SEQ ID NO: 912374 - DNA, 33 bp, Homo sapien
aaagaagttgatagattatattcaccacaattt

SEQ ID NO: 912375 - DNA, 33 bp, Homo sapien
aagaactgtacagatacactcagtgttagaaat

SEQ ID NO: 912376 - DNA, 33 bp, Homo sapien
aagaactgtacagatatactcagtgttagaaat

SEQ ID NO: 912377 - DNA, 33 bp, Homo sapien
ttggagaattataaaactaaaaaatcatccctt

SEQ ID NO: 912378 - DNA, 33 bp, Homo sapien
ttggagaattataaaagtaaaaaatcatccctt

SEQ ID NO: 912379 - DNA, 33 bp, Homo sapien
attttcaaggaccaacaatgtatgacaaaataa

SEQ ID NO: 912380 - DNA, 33 bp, Homo sapien
attttcaaggaccaacgatgtatgacaaaataa

SEQ ID NO: 912381 - DNA, 33 bp, Homo sapien
atcaatattttttgtgcaagccaaagtttatag

SEQ ID NO: 912382 - DNA, 33 bp, Homo sapien
atcaatattttttgtggaagccaaagtttatag

SEQ ID NO: 912383 - DNA, 33 bp, Homo sapien
atattaagattcaaccacatcaaattatgtatt

SEQ ID NO: 912384 - DNA, 33 bp, Homo sapien
atattaagattcaaccgcatcaaattatgtatt

SEQ ID NO: 912385 - DNA, 33 bp, Homo sapien
ttggatattaggaaaaaccttgacactctttat

SEQ ID NO: 912386 - DNA, 33 bp, Homo sapien
ttggatattaggaaaagccttgacactctttat

SEQ ID NO: 912387 - DNA, 33 bp, Homo sapien
agatgtcactcctgttaaaattctccagctatg

SEQ ID NO: 912388 - DNA, 33 bp, Homo sapien
agatgtcactcctgttgaaattctccagctatg

SEQ ID NO: 912389 - DNA, 33 bp, Homo sapien
gacatttggcaaagtcaatcacaagagggtttt

SEQ ID NO: 912390 - DNA, 33 bp, Homo sapien
gacatttggcaaagtcgatcacaagagggtttt

SEQ ID NO: 912391 - DNA, 33 bp, Homo sapien
gaaccgttttcttgaacactgtcccaagcccca

SEQ ID NO: 912392 - DNA, 33 bp, Homo sapien
gaaccgttttcttgaagactgtcccaagcccca

SEQ ID NO: 912393 - DNA, 33 bp, Homo sapien
taaaatagtttccatgaaatcagaaattaatta

SEQ ID NO: 912394 - DNA, 33 bp, Homo sapien
taaaatagtttccatggaatcagaaattaatta

SEQ ID NO: 912395 - DNA, 33 bp, Homo sapien
ggtggcaagctagtaacggtgggcctcagagtc

SEQ ID NO: 912396 - DNA, 33 bp, Homo sapien
ggtggcaagctagtaagggtgggcctcagagtc

SEQ ID NO: 912397 - DNA, 33 bp, Homo sapien
gtgtgcattctgtctcccaccccaattttatag

SEQ ID NO: 912398 - DNA, 33 bp, Homo sapien
gtgtgcattctgtctctcaccccaattttatag

SEQ ID NO: 912399 - DNA, 33 bp, Homo sapien
aacacagctgggttcaatatggtgcctctttca

SEQ ID NO: 912400 - DNA, 33 bp, Homo sapien
aacacagctgggttcagtatggtgcctctttca

SEQ ID NO: 912401 - DNA, 33 bp, Homo sapien
aagagaagccattatgaagattcacagctattc

SEQ ID NO: 912402 - DNA, 33 bp, Homo sapien
aagagaagccattatgtagattcacagctattc

SEQ ID NO: 912403 - DNA, 33 bp, Homo sapien
gacctctacctctgtcaatgttgctgcaaaggg

SEQ ID NO: 912404 - DNA, 33 bp, Homo sapien
gacctctacctctgtcgatgttgctgcaaaggg

SEQ ID NO: 912405 - DNA, 33 bp, Homo sapien
gccttcagcagtggcagtctcctaaaacgattg

SEQ ID NO: 912406 - DNA, 33 bp, Homo sapien
gccttcagcagtggcattctcctaaaacgattg

SEQ ID NO: 912407 - DNA, 33 bp, Homo sapien
aagaataatatatctaccaagagccaaagagtt

SEQ ID NO: 912408 - DNA, 33 bp, Homo sapien
aagaataatatatctatcaagagccaaagagtt

SEQ ID NO: 912409 - DNA, 33 bp, Homo sapien
ccgtctctaccattccaattataaaacttggag

SEQ ID NO: 912410 - DNA, 33 bp, Homo sapien
ccgtctctaccattccgattataaaacttggag

SEQ ID NO: 912411 - DNA, 33 bp, Homo sapien
aaaatcactggtgacactcctgagaagcattca

SEQ ID NO: 912412 - DNA, 33 bp, Homo sapien
aaaatcactggtgacattcctgagaagcattca

SEQ ID NO: 912413 - DNA, 33 bp, Homo sapien
cttccactcggaaataatagggggtgacaaatg

SEQ ID NO: 912414 - DNA, 33 bp, Homo sapien
cttccactcggaaatagtagggggtgacaaatg

SEQ ID NO: 912415 - DNA, 33 bp, Homo sapien
ctagtttaagagcaaactgattagatcacttct

SEQ ID NO: 912416 - DNA, 33 bp, Homo sapien
ctagtttaagagcaaattgattagatcacttct

SEQ ID NO: 912417 - DNA, 33 bp, Homo sapien
tgcagagactgcatagaagattgaattcctctg

SEQ ID NO: 912418 - DNA, 33 bp, Homo sapien
tgcagagactgcataggagattgaattcctctg

SEQ ID NO: 912419 - DNA, 33 bp, Homo sapien
tccttgttttcaaggaataagtactctagtcca

SEQ ID NO: 912420 - DNA, 33 bp, Homo sapien
tccttgttttcaaggagtaagtactctagtcca

SEQ ID NO: 912421 - DNA, 33 bp, Homo sapien
catatggtcaagaagcaaggtttcacattggtt

SEQ ID NO: 912422 - DNA, 33 bp, Homo sapien
catatggtcaagaagcgaggtttcacattggtt

SEQ ID NO: 912423 - DNA, 33 bp, Homo sapien
gaagagtgtgaaataaatagtgagattcagatc

SEQ ID NO: 912424 - DNA, 33 bp, Homo sapien
gaagagtgtgaaataagtagtgagattcagatc

SEQ ID NO: 912425 - DNA, 33 bp, Homo sapien
attggaaaagaggaaaacagccttactattaga

SEQ ID NO: 912426 - DNA, 33 bp, Homo sapien
attggaaaagaggaaatcagccttactattaga

SEQ ID NO: 912427 - DNA, 33 bp, Homo sapien
aaggttgcactgaaaaatggggcagaattcatt

SEQ ID NO: 912428 - DNA, 33 bp, Homo sapien
aaggttgcactgaaaagtggggcagaattcatt

SEQ ID NO: 912429 - DNA, 33 bp, Homo sapien
ctgagtgagaaacttaaatctgctagaaagatc

SEQ ID NO: 912430 - DNA, 33 bp, Homo sapien
ctgagtgagaaacttatatctgctagaaagatc

SEQ ID NO: 912431 - DNA, 33 bp, Homo sapien
tcagtccttggcaacacgaagttaggttcacct

SEQ ID NO: 912432 - DNA, 33 bp, Homo sapien
tcagtccttggcaacatgaagttaggttcacct

SEQ ID NO: 912433 - DNA, 33 bp, Homo sapien
attgatagaagtaccaatagctttgtatgataa

SEQ ID NO: 912434 - DNA, 33 bp, Homo sapien
attgatagaagtaccagtagctttgtatgataa

SEQ ID NO: 912435 - DNA, 33 bp, Homo sapien
tcatacatgttctatcacttattccttgagatg

SEQ ID NO: 912436 - DNA, 33 bp, Homo sapien
tcatacatgttctatcgcttattccttgagatg

SEQ ID NO: 912437 - DNA, 33 bp, Homo sapien
aagctgacgcagaatcacagtttgctgtaaaaa

SEQ ID NO: 912438 - DNA, 33 bp, Homo sapien
aagctgacgcagaatcgcagtttgctgtaaaaa

SEQ ID NO: 912439 - DNA, 33 bp, Homo sapien
ttttgtcttagaagtaccctggaagctatcgca

SEQ ID NO: 912440 - DNA, 33 bp, Homo sapien
ttttgtcttagaagtatcctggaagctatcgca

SEQ ID NO: 912441 - DNA, 33 bp, Homo sapien
tcatctctcaggataaacccccagggatattaa

SEQ ID NO: 912442 - DNA, 33 bp, Homo sapien
tcatctctcaggataaccccccagggatattaa

SEQ ID NO: 912443 - DNA, 33 bp, Homo sapien
gtaatcgttaaagatcaaaaacgacagtaaatg

SEQ ID NO: 912444 - DNA, 33 bp, Homo sapien
gtaatcgttaaagatcgaaaacgacagtaaatg

SEQ ID NO: 912445 - DNA, 33 bp, Homo sapien
atgagtggatatgtataactgaaagactgaacc

SEQ ID NO: 912446 - DNA, 33 bp, Homo sapien
atgagtggatatgtatgactgaaagactgaacc

SEQ ID NO: 912447 - DNA, 33 bp, Homo sapien
ggctgttcctgcagcccaaatgatagtaaatac

SEQ ID NO: 912448 - DNA, 33 bp, Homo sapien
ggctgttcctgcagcctaaatgatagtaaatac

SEQ ID NO: 912449 - DNA, 33 bp, Homo sapien
catcatcagcctttggaaactaagccaagctca

SEQ ID NO: 912450 - DNA, 33 bp, Homo sapien
catcatcagcctttggtaactaagccaagctca

SEQ ID NO: 912451 - DNA, 33 bp, Homo sapien
gggaagactatgcttaactgggtcttatgaaca

SEQ ID NO: 912452 - DNA, 33 bp, Homo sapien
gggaagactatgcttatctgggtcttatgaaca

SEQ ID NO: 912453 - DNA, 33 bp, Homo sapien
caaaactccttgatcaactccctggaatgtgct

SEQ ID NO: 912454 - DNA, 33 bp, Homo sapien
caaaactccttgatcatctccctggaatgtgct

SEQ ID NO: 912455 - DNA, 33 bp, Homo sapien
gttcaacaaatctgtagctgtgcttagtacaaa

SEQ ID NO: 912456 - DNA, 33 bp, Homo sapien
gttcaacaaatctgtatctgtgcttagtacaaa

SEQ ID NO: 912457 - DNA, 33 bp, Homo sapien
ggacatacatcttgtaaccaacgaagtttactg

SEQ ID NO: 912458 - DNA, 33 bp, Homo sapien
ggacatacatcttgtagccaacgaagtttactg

SEQ ID NO: 912459 - DNA, 33 bp, Homo sapien
tgagtggggataagacaaggccacatgaaaagt

SEQ ID NO: 912460 - DNA, 33 bp, Homo sapien
tgagtggggataagacgaggccacatgaaaagt

SEQ ID NO: 912461 - DNA, 33 bp, Homo sapien
ggagaaggatgaggtaaatgagtcagaaaaagg

SEQ ID NO: 912462 - DNA, 33 bp, Homo sapien
ggagaaggatgaggtagatgagtcagaaaaagg

SEQ ID NO: 912463 - DNA, 33 bp, Homo sapien
ccctttatgcaacatccccagtgttggagcaca

SEQ ID NO: 912464 - DNA, 33 bp, Homo sapien
ccctttatgcaacatcgccagtgttggagcaca

SEQ ID NO: 912465 - DNA, 33 bp, Homo sapien
cttttcctgtgtactacggaatgtgatgggaaa

SEQ ID NO: 912466 - DNA, 33 bp, Homo sapien
cttttcctgtgtactagggaatgtgatgggaaa

SEQ ID NO: 912467 - DNA, 33 bp, Homo sapien
gtccctgcagctttaaaataaggggaatgccaa

SEQ ID NO: 912468 - DNA, 33 bp, Homo sapien
gtccctgcagctttaagataaggggaatgccaa

SEQ ID NO: 912469 - DNA, 33 bp, Homo sapien
cctgactcagctatgcccctaatgaacaggtaa

SEQ ID NO: 912470 - DNA, 33 bp, Homo sapien
cctgactcagctatgctcctaatgaacaggtaa

SEQ ID NO: 912471 - DNA, 33 bp, Homo sapien
tgagatgatctcaaacaaggtacaaaccaggag

SEQ ID NO: 912472 - DNA, 33 bp, Homo sapien
tgagatgatctcaaaccaggtacaaaccaggag

SEQ ID NO: 912473 - DNA, 33 bp, Homo sapien
cagtagaaccataagccgaataaacctcttttc

SEQ ID NO: 912474 - DNA, 33 bp, Homo sapien
cagtagaaccataagctgaataaacctcttttc

SEQ ID NO: 912475 - DNA, 33 bp, Homo sapien
ctgttgcctaagacaccgcacgctctgctgaca

SEQ ID NO: 912476 - DNA, 33 bp, Homo sapien
ctgttgcctaagacactgcacgctctgctgaca

SEQ ID NO: 912477 - DNA, 33 bp, Homo sapien
gaggagaccagaacaacggagatgagcaaagga

SEQ ID NO: 912478 - DNA, 33 bp, Homo sapien
gaggagaccagaacaatggagatgagcaaagga

SEQ ID NO: 912479 - DNA, 33 bp, Homo sapien
tcacggtgaggaccaacgagaaaggccatgaaa

SEQ ID NO: 912480 - DNA, 33 bp, Homo sapien
tcacggtgaggaccaatgagaaaggccatgaaa

SEQ ID NO: 912481 - DNA, 33 bp, Homo sapien
ggaaggaatgtgttagcaactgtagagtattag

SEQ ID NO: 912482 - DNA, 33 bp, Homo sapien
ggaaggaatgtgttagtaactgtagagtattag

SEQ ID NO: 912483 - DNA, 33 bp, Homo sapien
cacttgggtttccatcaattcatggtattggtt

SEQ ID NO: 912484 - DNA, 33 bp, Homo sapien
cacttgggtttccatcgattcatggtattggtt

SEQ ID NO: 912485 - DNA, 33 bp, Homo sapien
acatgccacttctcacactgccactgtggccat

SEQ ID NO: 912486 - DNA, 33 bp, Homo sapien
acatgccacttctcacgctgccactgtggccat

SEQ ID NO: 912487 - DNA, 33 bp, Homo sapien
acatgtgactttttaactgggctcattccactc

SEQ ID NO: 912488 - DNA, 33 bp, Homo sapien
acatgtgactttttaattgggctcattccactc

SEQ ID NO: 912489 - DNA, 33 bp, Homo sapien
cttacttggcattctgaaaacacacaaatggaa

SEQ ID NO: 912490 - DNA, 33 bp, Homo sapien
cttacttggcattctgcaaacacacaaatggaa

SEQ ID NO: 912491 - DNA, 33 bp, Homo sapien
cattctaaaggacctacgtggtggaggaatagc

SEQ ID NO: 912492 - DNA, 33 bp, Homo sapien
cattctaaaggacctatgtggtggaggaatagc

SEQ ID NO: 912493 - DNA, 33 bp, Homo sapien
aaagaaagccagctaacgaatgattccacttgt

SEQ ID NO: 912494 - DNA, 33 bp, Homo sapien
aaagaaagccagctaatgaatgattccacttgt

SEQ ID NO: 912495 - DNA, 33 bp, Homo sapien
tgatatagttgaggaacgaggcctattctatac

SEQ ID NO: 912496 - DNA, 33 bp, Homo sapien
tgatatagttgaggaatgaggcctattctatac

SEQ ID NO: 912497 - DNA, 33 bp, Homo sapien
ttcacaccgtaacaaaaaatgaacacctcttag

SEQ ID NO: 912498 - DNA, 33 bp, Homo sapien
ttcacaccgtaacaaacaatgaacacctcttag

SEQ ID NO: 912499 - DNA, 33 bp, Homo sapien
gttaacaagtacagcaagcataaattggggctg

SEQ ID NO: 912500 - DNA, 33 bp, Homo sapien
gttaacaagtacagcaggcataaattggggctg

SEQ ID NO: 912501 - DNA, 33 bp, Homo sapien
ccttagtgctgagaacgcgagaaacatcaatgc

SEQ ID NO: 912502 - DNA, 33 bp, Homo sapien
ccttagtgctgagaactcgagaaacatcaatgc

SEQ ID NO: 912503 - DNA, 33 bp, Homo sapien
tttaaacagagcattacgagtgtaacccaagac

SEQ ID NO: 912504 - DNA, 33 bp, Homo sapien
tttaaacagagcattatgagtgtaacccaagac

SEQ ID NO: 912505 - DNA, 33 bp, Homo sapien
ttattcatcaacctcaaatagtatcttccagta

SEQ ID NO: 912506 - DNA, 33 bp, Homo sapien
ttattcatcaacctcagatagtatcttccagta

SEQ ID NO: 912507 - DNA, 33 bp, Homo sapien
aaaaaaaaagatgagcactaagttttggtgaga

SEQ ID NO: 912508 - DNA, 33 bp, Homo sapien
aaaaaaaaagatgagcgctaagttttggtgaga

SEQ ID NO: 912509 - DNA, 33 bp, Homo sapien
tggccaggcacaaaaaagaagcggctgcacgca

SEQ ID NO: 912510 - DNA, 33 bp, Homo sapien
tggccaggcacaaaaaggaagcggctgcacgca

SEQ ID NO: 912511 - DNA, 33 bp, Homo sapien
gtcctatgctgaagaccacatcttatgggcatc

SEQ ID NO: 912512 - DNA, 33 bp, Homo sapien
gtcctatgctgaagacgacatcttatgggcatc

SEQ ID NO: 912513 - DNA, 33 bp, Homo sapien
tcactggatctaaagccattccttatgggaaat

SEQ ID NO: 912514 - DNA, 33 bp, Homo sapien
tcactggatctaaagctattccttatgggaaat

SEQ ID NO: 912515 - DNA, 33 bp, Homo sapien
ttcttgaaaatacaccagagaccagagaaggtc

SEQ ID NO: 912516 - DNA, 33 bp, Homo sapien
ttcttgaaaatacaccggagaccagagaaggtc

SEQ ID NO: 912517 - DNA, 33 bp, Homo sapien
ctccagctcttccctgaaatggcaaggaaaagt

SEQ ID NO: 912518 - DNA, 33 bp, Homo sapien
ctccagctcttccctgcaatggcaaggaaaagt

SEQ ID NO: 912519 - DNA, 33 bp, Homo sapien
cacacaatacttgacaatcacagctctgccatg

SEQ ID NO: 912520 - DNA, 33 bp, Homo sapien
cacacaatacttgacagtcacagctctgccatg

SEQ ID NO: 912521 - DNA, 33 bp, Homo sapien
ctcaaggagcttatcacattttaggtgaaatca

SEQ ID NO: 912522 - DNA, 33 bp, Homo sapien
ctcaaggagcttatcatattttaggtgaaatca

SEQ ID NO: 912523 - DNA, 33 bp, Homo sapien
tcttcagatgattcgaaagctgaaaaatgatga

SEQ ID NO: 912524 - DNA, 33 bp, Homo sapien
tcttcagatgattcgagagctgaaaaatgatga

SEQ ID NO: 912525 - DNA, 33 bp, Homo sapien
ggcagctggtgactgacggagcccctgattctc

SEQ ID NO: 912526 - DNA, 33 bp, Homo sapien
ggcagctggtgactgatggagcccctgattctc

SEQ ID NO: 912527 - DNA, 33 bp, Homo sapien
ggggcctgtcactttaactggtttcttctcagg

SEQ ID NO: 912528 - DNA, 33 bp, Homo sapien
ggggcctgtcactttatctggtttcttctcagg

SEQ ID NO: 912529 - DNA, 33 bp, Homo sapien
cctggcacatcatcaactgtgtgtcaaagtctc

SEQ ID NO: 912530 - DNA, 33 bp, Homo sapien
cctggcacatcatcaattgtgtgtcaaagtctc

SEQ ID NO: 912531 - DNA, 33 bp, Homo sapien
tatctactgattactacaaaggcacagatccag

SEQ ID NO: 912532 - DNA, 33 bp, Homo sapien
tatctactgattactataaaggcacagatccag

SEQ ID NO: 912533 - DNA, 33 bp, Homo sapien
gaaataggtctttcataaatctgtgagctcacc

SEQ ID NO: 912534 - DNA, 33 bp, Homo sapien
gaaataggtctttcatgaatctgtgagctcacc

SEQ ID NO: 912535 - DNA, 33 bp, Homo sapien
ggtcagtgccatcaaccggcagaggcaaagcca

SEQ ID NO: 912536 - DNA, 33 bp, Homo sapien
ggtcagtgccatcaacgggcagaggcaaagcca

SEQ ID NO: 912537 - DNA, 33 bp, Homo sapien
acagaactgcaaactcaccacagatgctcccac

SEQ ID NO: 912538 - DNA, 33 bp, Homo sapien
acagaactgcaaactcgccacagatgctcccac

SEQ ID NO: 912539 - DNA, 33 bp, Homo sapien
ccattgttaagctacaaggaaatgtggcacaca

SEQ ID NO: 912540 - DNA, 33 bp, Homo sapien
ccattgttaagctacagggaaatgtggcacaca

SEQ ID NO: 912541 - DNA, 33 bp, Homo sapien
ccccttaccgtaaagcacggtgccacatgaggt

SEQ ID NO: 912542 - DNA, 33 bp, Homo sapien
ccccttaccgtaaagcgcggtgccacatgaggt

SEQ ID NO: 912543 - DNA, 33 bp, Homo sapien
ctttttttcccagccagaacagttccaggtccc

SEQ ID NO: 912544 - DNA, 33 bp, Homo sapien
ctttttttcccagccataacagttccaggtccc

SEQ ID NO: 912545 - DNA, 33 bp, Homo sapien
cataaattgtcaataaagacagtaaaggaatgt

SEQ ID NO: 912546 - DNA, 33 bp, Homo sapien
cataaattgtcaataaggacagtaaaggaatgt

SEQ ID NO: 912547 - DNA, 33 bp, Homo sapien
aggttgctgggagtgacgctctcctgttgctga

SEQ ID NO: 912548 - DNA, 33 bp, Homo sapien
aggttgctgggagtgatgctctcctgttgctga

SEQ ID NO: 912549 - DNA, 33 bp, Homo sapien
ggacaaccacttggacccaggaggtggaggctg

SEQ ID NO: 912550 - DNA, 33 bp, Homo sapien
ggacaaccacttggacgcaggaggtggaggctg

SEQ ID NO: 912551 - DNA, 33 bp, Homo sapien
ctgagaaagataacaaagtctcagatatttcta

SEQ ID NO: 912552 - DNA, 33 bp, Homo sapien
ctgagaaagataacaaggtctcagatatttcta

SEQ ID NO: 912553 - DNA, 33 bp, Homo sapien
tctgttttctgacacaagcatatgaggatcggg

SEQ ID NO: 912554 - DNA, 33 bp, Homo sapien
tctgttttctgacacatgcatatgaggatcggg

SEQ ID NO: 912555 - DNA, 33 bp, Homo sapien
ccaatttcctttcctcactctgtaataatgctg

SEQ ID NO: 912556 - DNA, 33 bp, Homo sapien
ccaatttcctttcctcgctctgtaataatgctg

SEQ ID NO: 912557 - DNA, 33 bp, Homo sapien
tttactgcctttgaaagaaggaattctatttta

SEQ ID NO: 912558 - DNA, 33 bp, Homo sapien
tttactgcctttgaaataaggaattctatttta

SEQ ID NO: 912559 - DNA, 33 bp, Homo sapien
tccaggttgacaacgcaaagagacaggttagcc

SEQ ID NO: 912560 - DNA, 33 bp, Homo sapien
tccaggttgacaacgcgaagagacaggttagcc

SEQ ID NO: 912561 - DNA, 33 bp, Homo sapien
atgtactctagatttaaaagcaggctcaagaaa

SEQ ID NO: 912562 - DNA, 33 bp, Homo sapien
atgtactctagatttataagcaggctcaagaaa

SEQ ID NO: 912563 - DNA, 33 bp, Homo sapien
ctgagtctgttttaaaccattagcaacagagag

SEQ ID NO: 912564 - DNA, 33 bp, Homo sapien
ctgagtctgttttaaatcattagcaacagagag

SEQ ID NO: 912565 - DNA, 33 bp, Homo sapien
atgtggcctcaataggacagatctttaatggat

SEQ ID NO: 912566 - DNA, 33 bp, Homo sapien
atgtggcctcaataggtcagatctttaatggat

SEQ ID NO: 912567 - DNA, 33 bp, Homo sapien
cacgtatcctcactggaaacaagatactgcttt

SEQ ID NO: 912568 - DNA, 33 bp, Homo sapien
cacgtatcctcactgggaacaagatactgcttt

SEQ ID NO: 912569 - DNA, 33 bp, Homo sapien
ctgtaaatggaaattacataggaccagagagga

SEQ ID NO: 912570 - DNA, 33 bp, Homo sapien
ctgtaaatggaaattatataggaccagagagga

SEQ ID NO: 912571 - DNA, 33 bp, Homo sapien
aagagcagtgggcaccgaagtcaaaatgcagat

SEQ ID NO: 912572 - DNA, 33 bp, Homo sapien
aagagcagtgggcacctaagtcaaaatgcagat

SEQ ID NO: 912573 - DNA, 33 bp, Homo sapien
ttgacttatactgggcaattactgctgtccttt

SEQ ID NO: 912574 - DNA, 33 bp, Homo sapien
ttgacttatactgggcgattactgctgtccttt

SEQ ID NO: 912575 - DNA, 33 bp, Homo sapien
gagtcctacaacaacaaaagtcttatgttaggt

SEQ ID NO: 912576 - DNA, 33 bp, Homo sapien
gagtcctacaacaacagaagtcttatgttaggt

SEQ ID NO: 912577 - DNA, 33 bp, Homo sapien
aatctcattggccagacaaagtcacatgaccaa

SEQ ID NO: 912578 - DNA, 33 bp, Homo sapien
aatctcattggccagagaaagtcacatgaccaa

SEQ ID NO: 912579 - DNA, 33 bp, Homo sapien
tcatttagcttgttcccctgtccctcgtatttc

SEQ ID NO: 912580 - DNA, 33 bp, Homo sapien
tcatttagcttgttcctctgtccctcgtatttc

SEQ ID NO: 912581 - DNA, 33 bp, Homo sapien
gtctatgatgaggtccaaaaaacctcccatctt

SEQ ID NO: 912582 - DNA, 33 bp, Homo sapien
gtctatgatgaggtccgaaaaacctcccatctt

SEQ ID NO: 912583 - DNA, 33 bp, Homo sapien
gcatcagaatttctagcaggtctcatctgaccc

SEQ ID NO: 912584 - DNA, 33 bp, Homo sapien
gcatcagaatttctagtaggtctcatctgaccc

SEQ ID NO: 912585 - DNA, 33 bp, Homo sapien
gaacaggaagagtcaaaacgataaggagaattc

SEQ ID NO: 912586 - DNA, 33 bp, Homo sapien
gaacaggaagagtcaacacgataaggagaattc

SEQ ID NO: 912587 - DNA, 33 bp, Homo sapien
gcatctctgcctgttagaaggatccagacatag

SEQ ID NO: 912588 - DNA, 33 bp, Homo sapien
gcatctctgcctgttataaggatccagacatag

SEQ ID NO: 912589 - DNA, 33 bp, Homo sapien
aacctagctggaaccacggaaagtgatcaggaa

SEQ ID NO: 912590 - DNA, 33 bp, Homo sapien
aacctagctggaaccatggaaagtgatcaggaa

SEQ ID NO: 912591 - DNA, 33 bp, Homo sapien
ataaagaaagtaatgacagagctgtaaagaaaa

SEQ ID NO: 912592 - DNA, 33 bp, Homo sapien
ataaagaaagtaatgatagagctgtaaagaaaa

SEQ ID NO: 912593 - DNA, 33 bp, Homo sapien
aatgctgggagtggcagtctctccaaacaaatg

SEQ ID NO: 912594 - DNA, 33 bp, Homo sapien
aatgctgggagtggcattctctccaaacaaatg

SEQ ID NO: 912595 - DNA, 33 bp, Homo sapien
ggaggaaagacataaacagccataatgcaatgt

SEQ ID NO: 912596 - DNA, 33 bp, Homo sapien
ggaggaaagacataaagagccataatgcaatgt

SEQ ID NO: 912597 - DNA, 33 bp, Homo sapien
atgtcaaagaacagatcaacagtcatcccaggg

SEQ ID NO: 912598 - DNA, 33 bp, Homo sapien
atgtcaaagaacagatgaacagtcatcccaggg

SEQ ID NO: 912599 - DNA, 33 bp, Homo sapien
tcacctgtaccatgcaatatccctgtgcccact

SEQ ID NO: 912600 - DNA, 33 bp, Homo sapien
tcacctgtaccatgcactatccctgtgcccact

SEQ ID NO: 912601 - DNA, 33 bp, Homo sapien
tgatttggggcacacactggacaatcactgaga

SEQ ID NO: 912602 - DNA, 33 bp, Homo sapien
tgatttggggcacacattggacaatcactgaga

SEQ ID NO: 912603 - DNA, 33 bp, Homo sapien
ggggccatggaacaaggcatttagctaataact

SEQ ID NO: 912604 - DNA, 33 bp, Homo sapien
ggggccatggaacaagtcatttagctaataact

SEQ ID NO: 912605 - DNA, 33 bp, Homo sapien
tcaaaagacgtgcaaaacaccccaaaatcgttg

SEQ ID NO: 912606 - DNA, 33 bp, Homo sapien
tcaaaagacgtgcaaatcaccccaaaatcgttg

SEQ ID NO: 912607 - DNA, 33 bp, Homo sapien
taatttttttacaccaaacatctaaaattattc

SEQ ID NO: 912608 - DNA, 33 bp, Homo sapien
taatttttttacaccagacatctaaaattattc

SEQ ID NO: 912609 - DNA, 33 bp, Homo sapien
tacaggcacacatcagaacatggtgcatattaa

SEQ ID NO: 912610 - DNA, 33 bp, Homo sapien
tacaggcacacatcaggacatggtgcatattaa

SEQ ID NO: 912611 - DNA, 33 bp, Homo sapien
gcttggctgtgttatccaaattcttgaggctcg

SEQ ID NO: 912612 - DNA, 33 bp, Homo sapien
gcttggctgtgttatcgaaattcttgaggctcg

SEQ ID NO: 912613 - DNA, 33 bp, Homo sapien
gccaagttacaaagaaacgtctaaaaagcagca

SEQ ID NO: 912614 - DNA, 33 bp, Homo sapien
gccaagttacaaagaagcgtctaaaaagcagca

SEQ ID NO: 912615 - DNA, 33 bp, Homo sapien
accatctcctgcctaaatggtaagcagggtatc

SEQ ID NO: 912616 - DNA, 33 bp, Homo sapien
accatctcctgcctaagtggtaagcagggtatc

SEQ ID NO: 912617 - DNA, 33 bp, Homo sapien
gattcctgtctcagtcacagttatacatcagca

SEQ ID NO: 912618 - DNA, 33 bp, Homo sapien
gattcctgtctcagtcgcagttatacatcagca

SEQ ID NO: 912619 - DNA, 33 bp, Homo sapien
ctggatgcataggcaacgttgttttgtagggga

SEQ ID NO: 912620 - DNA, 33 bp, Homo sapien
ctggatgcataggcaatgttgttttgtagggga

SEQ ID NO: 912621 - DNA, 33 bp, Homo sapien
tggagtattactcagcaatgaagactggatgat

SEQ ID NO: 912622 - DNA, 33 bp, Homo sapien
tggagtattactcagcgatgaagactggatgat

SEQ ID NO: 912623 - DNA, 33 bp, Homo sapien
tccagaccgtgcaataacaggaagcccggacgg

SEQ ID NO: 912624 - DNA, 33 bp, Homo sapien
tccagaccgtgcaatagcaggaagcccggacgg

SEQ ID NO: 912625 - DNA, 33 bp, Homo sapien
aatctgttctcatggcgccctctggtgtccaga

SEQ ID NO: 912626 - DNA, 33 bp, Homo sapien
aatctgttctcatggctccctctggtgtccaga

SEQ ID NO: 912627 - DNA, 33 bp, Homo sapien
ctgtttgaagagggaaactaattgtatttaaca

SEQ ID NO: 912628 - DNA, 33 bp, Homo sapien
ctgtttgaagagggaacctaattgtatttaaca

SEQ ID NO: 912629 - DNA, 33 bp, Homo sapien
aagatcatttttatcgaacattttggaaagcca

SEQ ID NO: 912630 - DNA, 33 bp, Homo sapien
aagatcatttttatcgtacattttggaaagcca

SEQ ID NO: 912631 - DNA, 33 bp, Homo sapien
ttcatacctgtaactgacacagtatttggaaat

SEQ ID NO: 912632 - DNA, 33 bp, Homo sapien
ttcatacctgtaactggcacagtatttggaaat

SEQ ID NO: 912633 - DNA, 33 bp, Homo sapien
aggtgataaaaggtgacacagttctacctggtt

SEQ ID NO: 912634 - DNA, 33 bp, Homo sapien
aggtgataaaaggtgatacagttctacctggtt

SEQ ID NO: 912635 - DNA, 33 bp, Homo sapien
ctctcttcttgctacaaatatttacttctgtat

SEQ ID NO: 912636 - DNA, 33 bp, Homo sapien
ctctcttcttgctacagatatttacttctgtat

SEQ ID NO: 912637 - DNA, 33 bp, Homo sapien
taactccaaatagatgaaagaactagatttata

SEQ ID NO: 912638 - DNA, 33 bp, Homo sapien
taactccaaatagatggaagaactagatttata

SEQ ID NO: 912639 - DNA, 33 bp, Homo sapien
catgcaacaacctgaacgaacctcaaaaacatc

SEQ ID NO: 912640 - DNA, 33 bp, Homo sapien
catgcaacaacctgaatgaacctcaaaaacatc

SEQ ID NO: 912641 - DNA, 33 bp, Homo sapien
gtgaccgagggcagccaattttatgcaccttaa

SEQ ID NO: 912642 - DNA, 33 bp, Homo sapien
gtgaccgagggcagccgattttatgcaccttaa

SEQ ID NO: 912643 - DNA, 33 bp, Homo sapien
tcccggggattttatacgtggaagtgctttgga

SEQ ID NO: 912644 - DNA, 33 bp, Homo sapien
tcccggggattttatatgtggaagtgctttgga

SEQ ID NO: 912645 - DNA, 33 bp, Homo sapien
tctagaacatttccatcaaccccagaggaaagc

SEQ ID NO: 912646 - DNA, 33 bp, Homo sapien
tctagaacatttccattaaccccagaggaaagc

SEQ ID NO: 912647 - DNA, 33 bp, Homo sapien
agaaacttttccaaagaatacttacatggagcc

SEQ ID NO: 912648 - DNA, 33 bp, Homo sapien
agaaacttttccaaaggatacttacatggagcc

SEQ ID NO: 912649 - DNA, 33 bp, Homo sapien
actaattcatactttcaccaatggagtataaat

SEQ ID NO: 912650 - DNA, 33 bp, Homo sapien
actaattcatactttcgccaatggagtataaat

SEQ ID NO: 912651 - DNA, 33 bp, Homo sapien
tcttgttaaatgcctccgacactgggatcccta

SEQ ID NO: 912652 - DNA, 33 bp, Homo sapien
tcttgttaaatgcctctgacactgggatcccta

SEQ ID NO: 912653 - DNA, 33 bp, Homo sapien
agggagggtcagaatgccatagcctccagctgc

SEQ ID NO: 912654 - DNA, 33 bp, Homo sapien
agggagggtcagaatgtcatagcctccagctgc

SEQ ID NO: 912655 - DNA, 33 bp, Homo sapien
ttctcctaagatcggcacttgagatattgtgca

SEQ ID NO: 912656 - DNA, 33 bp, Homo sapien
ttctcctaagatcggcgcttgagatattgtgca

SEQ ID NO: 912657 - DNA, 33 bp, Homo sapien
aagaagatcaacaaaacagataaacacttagct

SEQ ID NO: 912658 - DNA, 33 bp, Homo sapien
aagaagatcaacaaaatagataaacacttagct

SEQ ID NO: 912659 - DNA, 33 bp, Homo sapien
caaataacagcatcttcaacaactaatgggtca

SEQ ID NO: 912660 - DNA, 33 bp, Homo sapien
caaataacagcatcttgaacaactaatgggtca

SEQ ID NO: 912661 - DNA, 33 bp, Homo sapien
ggagaaaaatgcaaacaaagcatgttatagaac

SEQ ID NO: 912662 - DNA, 33 bp, Homo sapien
ggagaaaaatgcaaaccaagcatgttatagaac

SEQ ID NO: 912663 - DNA, 33 bp, Homo sapien
ggcacaatgctttgacagaaggctagagctgag

SEQ ID NO: 912664 - DNA, 33 bp, Homo sapien
ggcacaatgctttgacggaaggctagagctgag

SEQ ID NO: 912665 - DNA, 33 bp, Homo sapien
tttcacagtatgtcacagtatttcaaggtgccc

SEQ ID NO: 912666 - DNA, 33 bp, Homo sapien
tttcacagtatgtcacggtatttcaaggtgccc

SEQ ID NO: 912667 - DNA, 33 bp, Homo sapien
ggaagtattttaccccaattctctcagcagttg

SEQ ID NO: 912668 - DNA, 33 bp, Homo sapien
ggaagtattttaccccgattctctcagcagttg

SEQ ID NO: 912669 - DNA, 33 bp, Homo sapien
aaaattaaattagcaaagtgtgttggtgtgcat

SEQ ID NO: 912670 - DNA, 33 bp, Homo sapien
aaaattaaattagcaaggtgtgttggtgtgcat

SEQ ID NO: 912671 - DNA, 33 bp, Homo sapien
cattatttagccttggaagtctcaccttgttag

SEQ ID NO: 912672 - DNA, 33 bp, Homo sapien
cattatttagccttggtagtctcaccttgttag

SEQ ID NO: 912673 - DNA, 33 bp, Homo sapien
gtacttcatttttttccctatggcttaataata

SEQ ID NO: 912674 - DNA, 33 bp, Homo sapien
gtacttcatttttttctctatggcttaataata

SEQ ID NO: 912675 - DNA, 33 bp, Homo sapien
taaccaattctatgacagacttcttcaaaatgc

SEQ ID NO: 912676 - DNA, 33 bp, Homo sapien
taaccaattctatgacggacttcttcaaaatgc

SEQ ID NO: 912677 - DNA, 33 bp, Homo sapien
ggtccagtctgccctaagttgtagcattttgaa

SEQ ID NO: 912678 - DNA, 33 bp, Homo sapien
ggtccagtctgccctaggttgtagcattttgaa

SEQ ID NO: 912679 - DNA, 33 bp, Homo sapien
ttctgcaactatgagaaccatgatgctgtccag

SEQ ID NO: 912680 - DNA, 33 bp, Homo sapien
ttctgcaactatgagacccatgatgctgtccag

SEQ ID NO: 912681 - DNA, 33 bp, Homo sapien
cgttgagaacttggagaaagtcataggacctca

SEQ ID NO: 912682 - DNA, 33 bp, Homo sapien
cgttgagaacttggaggaagtcataggacctca

SEQ ID NO: 912683 - DNA, 33 bp, Homo sapien
ggatgttggttgcccaatggctttctgactgta

SEQ ID NO: 912684 - DNA, 33 bp, Homo sapien
ggatgttggttgcccagtggctttctgactgta

SEQ ID NO: 912685 - DNA, 33 bp, Homo sapien
tgcccatctaagaggaacctcacagttgcctag

SEQ ID NO: 912686 - DNA, 33 bp, Homo sapien
tgcccatctaagaggagcctcacagttgcctag

SEQ ID NO: 912687 - DNA, 33 bp, Homo sapien
caataataatcagccaaaagggccactgatttt

SEQ ID NO: 912688 - DNA, 33 bp, Homo sapien
caataataatcagccataagggccactgatttt

SEQ ID NO: 912689 - DNA, 33 bp, Homo sapien
ctcctacccatcctaaatatagaactcttgcag

SEQ ID NO: 912690 - DNA, 33 bp, Homo sapien
ctcctacccatcctaactatagaactcttgcag

SEQ ID NO: 912691 - DNA, 33 bp, Homo sapien
gagtgccctctcatccactctcagacttactcc

SEQ ID NO: 912692 - DNA, 33 bp, Homo sapien
gagtgccctctcatccgctctcagacttactcc

SEQ ID NO: 912693 - DNA, 33 bp, Homo sapien
ttctccctatatcctcacatgaacttttctcta

SEQ ID NO: 912694 - DNA, 33 bp, Homo sapien
ttctccctatatcctcgcatgaacttttctcta

SEQ ID NO: 912695 - DNA, 33 bp, Homo sapien
atgtctgctatttggggaccccaggtattttgt

SEQ ID NO: 912696 - DNA, 33 bp, Homo sapien
atgtctgctatttgggtaccccaggtattttgt

SEQ ID NO: 912697 - DNA, 33 bp, Homo sapien
acctcaacaacctgagaaatttaaagggccaga

SEQ ID NO: 912698 - DNA, 33 bp, Homo sapien
acctcaacaacctgagtaatttaaagggccaga

SEQ ID NO: 912699 - DNA, 33 bp, Homo sapien
caaataccaagaaactcaaagaatgccagaaca

SEQ ID NO: 912700 - DNA, 33 bp, Homo sapien
caaataccaagaaactgaaagaatgccagaaca

SEQ ID NO: 912701 - DNA, 33 bp, Homo sapien
tgatactcacatgcagacagagttgagtaccac

SEQ ID NO: 912702 - DNA, 33 bp, Homo sapien
tgatactcacatgcaggcagagttgagtaccac

SEQ ID NO: 912703 - DNA, 33 bp, Homo sapien
gacttgccagggaaacagagacttggttgatgg

SEQ ID NO: 912704 - DNA, 33 bp, Homo sapien
gacttgccagggaaacggagacttggttgatgg

SEQ ID NO: 912705 - DNA, 33 bp, Homo sapien
gacacctgggaacactaagcagttgcacatact

SEQ ID NO: 912706 - DNA, 33 bp, Homo sapien
gacacctgggaacactgagcagttgcacatact

SEQ ID NO: 912707 - DNA, 33 bp, Homo sapien
cagagtaaactcacaactccctgagggtgtccc

SEQ ID NO: 912708 - DNA, 33 bp, Homo sapien
cagagtaaactcacaagtccctgagggtgtccc

SEQ ID NO: 912709 - DNA, 33 bp, Homo sapien
acaggtttgctgcaatcatgagcccatttgagt

SEQ ID NO: 912710 - DNA, 33 bp, Homo sapien
acaggtttgctgcaatgatgagcccatttgagt

SEQ ID NO: 912711 - DNA, 33 bp, Homo sapien
ttcagaggttcgagcactcactctgtatgcccc

SEQ ID NO: 912712 - DNA, 33 bp, Homo sapien
ttcagaggttcgagcagtcactctgtatgcccc

SEQ ID NO: 912713 - DNA, 33 bp, Homo sapien
ctagagccttcactccaaaaaatgactttgctt

SEQ ID NO: 912714 - DNA, 33 bp, Homo sapien
ctagagccttcactccgaaaaatgactttgctt

SEQ ID NO: 912715 - DNA, 33 bp, Homo sapien
ccaaaaataaagttgtaaaaagtgatgtcttca

SEQ ID NO: 912716 - DNA, 33 bp, Homo sapien
ccaaaaataaagttgttaaaagtgatgtcttca

SEQ ID NO: 912717 - DNA, 33 bp, Homo sapien
cctactttctttcatccgatacacagctttgga

SEQ ID NO: 912718 - DNA, 33 bp, Homo sapien
cctactttctttcatctgatacacagctttgga

SEQ ID NO: 912719 - DNA, 33 bp, Homo sapien
agttggacaagagtgacaacaatttaaatacta

SEQ ID NO: 912720 - DNA, 33 bp, Homo sapien
agttggacaagagtgagaacaatttaaatacta

SEQ ID NO: 912721 - DNA, 33 bp, Homo sapien
cctataatgactaatcaaattattgcattcact

SEQ ID NO: 912722 - DNA, 33 bp, Homo sapien
cctataatgactaatcgaattattgcattcact

SEQ ID NO: 912723 - DNA, 33 bp, Homo sapien
aagggaggaatgtgagaaacataagaactgttc

SEQ ID NO: 912724 - DNA, 33 bp, Homo sapien
aagggaggaatgtgaggaacataagaactgttc

SEQ ID NO: 912725 - DNA, 33 bp, Homo sapien
ttatttggttgctcagcattgaaggaaaaggaa

SEQ ID NO: 912726 - DNA, 33 bp, Homo sapien
ttatttggttgctcagtattgaaggaaaaggaa

SEQ ID NO: 912727 - DNA, 33 bp, Homo sapien
actatgtcccttggtcaccacgaaggaagagtg

SEQ ID NO: 912728 - DNA, 33 bp, Homo sapien
actatgtcccttggtctccacgaaggaagagtg

SEQ ID NO: 912729 - DNA, 33 bp, Homo sapien
gtgtgatggaattgtacagtctctaggatattc

SEQ ID NO: 912730 - DNA, 33 bp, Homo sapien
gtgtgatggaattgtatagtctctaggatattc

SEQ ID NO: 912731 - DNA, 33 bp, Homo sapien
gagattctgatcaggagtcaacttcacttgatg

SEQ ID NO: 912732 - DNA, 33 bp, Homo sapien
gagattctgatcaggattcaacttcacttgatg

SEQ ID NO: 912733 - DNA, 33 bp, Homo sapien
ggactctggttatagcccttctggagtcgtagg

SEQ ID NO: 912734 - DNA, 33 bp, Homo sapien
ggactctggttatagctcttctggagtcgtagg

SEQ ID NO: 912735 - DNA, 33 bp, Homo sapien
agaaagaacaggaaggccaccacgctaatgcga

SEQ ID NO: 912736 - DNA, 33 bp, Homo sapien
agaaagaacaggaagggcaccacgctaatgcga

SEQ ID NO: 912737 - DNA, 33 bp, Homo sapien
agtagagcagacagagaaggacttttgtgggca

SEQ ID NO: 912738 - DNA, 33 bp, Homo sapien
agtagagcagacagaggaggacttttgtgggca

SEQ ID NO: 912739 - DNA, 33 bp, Homo sapien
agaggtgattatacaaacctgcagcggtgcaga

SEQ ID NO: 912740 - DNA, 33 bp, Homo sapien
agaggtgattatacaagcctgcagcggtgcaga

SEQ ID NO: 912741 - DNA, 33 bp, Homo sapien
cttttacggtcatagaaaagggatgaattaagc

SEQ ID NO: 912742 - DNA, 33 bp, Homo sapien
cttttacggtcatagataagggatgaattaagc

SEQ ID NO: 912743 - DNA, 33 bp, Homo sapien
cacctttttgaaaataaccatcctaataacaca

SEQ ID NO: 912744 - DNA, 33 bp, Homo sapien
cacctttttgaaaatagccatcctaataacaca

SEQ ID NO: 912745 - DNA, 33 bp, Homo sapien
tggatccagagttaaacccatccacaaggcctt

SEQ ID NO: 912746 - DNA, 33 bp, Homo sapien
tggatccagagttaaatccatccacaaggcctt

SEQ ID NO: 912747 - DNA, 33 bp, Homo sapien
gtggtgtttgccctggaatctgtaggaagagct

SEQ ID NO: 912748 - DNA, 33 bp, Homo sapien
gtggtgtttgccctggcatctgtaggaagagct

SEQ ID NO: 912749 - DNA, 33 bp, Homo sapien
tatggggtacatgagaaacttcgatataggcat

SEQ ID NO: 912750 - DNA, 33 bp, Homo sapien
tatggggtacatgagatacttcgatataggcat

SEQ ID NO: 912751 - DNA, 33 bp, Homo sapien
tcactccccccattaacctgggcctgaacaata

SEQ ID NO: 912752 - DNA, 33 bp, Homo sapien
tcactccccccattaatctgggcctgaacaata

SEQ ID NO: 912753 - DNA, 33 bp, Homo sapien
gatctgagactctagactcacaaaggttatcat

SEQ ID NO: 912754 - DNA, 33 bp, Homo sapien
gatctgagactctagattcacaaaggttatcat

SEQ ID NO: 912755 - DNA, 33 bp, Homo sapien
gctccacacctgtacccggaagaaagactgagg

SEQ ID NO: 912756 - DNA, 33 bp, Homo sapien
gctccacacctgtacctggaagaaagactgagg

SEQ ID NO: 912757 - DNA, 33 bp, Homo sapien
attgggtgaaatgacaaagatgctctgagcatg

SEQ ID NO: 912758 - DNA, 33 bp, Homo sapien
attgggtgaaatgacagagatgctctgagcatg

SEQ ID NO: 912759 - DNA, 33 bp, Homo sapien
gtcacctgaagacaaaggtatgattagggggtt

SEQ ID NO: 912760 - DNA, 33 bp, Homo sapien
gtcacctgaagacaaatgtatgattagggggtt

SEQ ID NO: 912761 - DNA, 33 bp, Homo sapien
tgcttttaactattcagatggatgtacagggtt

SEQ ID NO: 912762 - DNA, 33 bp, Homo sapien
tgcttttaactattcatatggatgtacagggtt

SEQ ID NO: 912763 - DNA, 33 bp, Homo sapien
acttaaaagtcagaaaccacattctggaccagg

SEQ ID NO: 912764 - DNA, 33 bp, Homo sapien
acttaaaagtcagaaagcacattctggaccagg

SEQ ID NO: 912765 - DNA, 33 bp, Homo sapien
aaccaggctttgaaccaggaagtctgagtttga

SEQ ID NO: 912766 - DNA, 33 bp, Homo sapien
aaccaggctttgaaccgggaagtctgagtttga

SEQ ID NO: 912767 - DNA, 33 bp, Homo sapien
ctgcagagccctatcaaagagctcctaacacgt

SEQ ID NO: 912768 - DNA, 33 bp, Homo sapien
ctgcagagccctatcacagagctcctaacacgt

SEQ ID NO: 912769 - DNA, 33 bp, Homo sapien
gttttatgactgggaacggttttgggtgccatc

SEQ ID NO: 912770 - DNA, 33 bp, Homo sapien
gttttatgactgggaatggttttgggtgccatc

SEQ ID NO: 912771 - DNA, 33 bp, Homo sapien
ttgccttctcggagcaacctcccactgcagcag

SEQ ID NO: 912772 - DNA, 33 bp, Homo sapien
ttgccttctcggagcagcctcccactgcagcag

SEQ ID NO: 912773 - DNA, 33 bp, Homo sapien
gtttcttaaatctttcccgtggactcctgtgaa

SEQ ID NO: 912774 - DNA, 33 bp, Homo sapien
gtttcttaaatctttctcgtggactcctgtgaa

SEQ ID NO: 912775 - DNA, 33 bp, Homo sapien
tataggaaacaccagaagaggagcagattttac

SEQ ID NO: 912776 - DNA, 33 bp, Homo sapien
tataggaaacaccagacgaggagcagattttac

SEQ ID NO: 912777 - DNA, 33 bp, Homo sapien
accacgcaatgcataaatattcagaaaggtgct

SEQ ID NO: 912778 - DNA, 33 bp, Homo sapien
accacgcaatgcataagtattcagaaaggtgct

SEQ ID NO: 912779 - DNA, 33 bp, Homo sapien
cacattgcatttgaacaatgaagtcacaaaaac

SEQ ID NO: 912780 - DNA, 33 bp, Homo sapien
cacattgcatttgaacgatgaagtcacaaaaac

SEQ ID NO: 912781 - DNA, 33 bp, Homo sapien
tttcagcgggaaaagccagtgtggtctctgttt

SEQ ID NO: 912782 - DNA, 33 bp, Homo sapien
tttcagcgggaaaagctagtgtggtctctgttt

SEQ ID NO: 912783 - DNA, 33 bp, Homo sapien
tcgatgtggaagtcaccgaattgaatttttaca

SEQ ID NO: 912784 - DNA, 33 bp, Homo sapien
tcgatgtggaagtcactgaattgaatttttaca

SEQ ID NO: 912785 - DNA, 33 bp, Homo sapien
taaaaatcctttggcactacacaacaaattcca

SEQ ID NO: 912786 - DNA, 33 bp, Homo sapien
taaaaatcctttggcattacacaacaaattcca

SEQ ID NO: 912787 - DNA, 33 bp, Homo sapien
tcctagtttttggacaactttgagccgaatagg

SEQ ID NO: 912788 - DNA, 33 bp, Homo sapien
tcctagtttttggacagctttgagccgaatagg

SEQ ID NO: 912789 - DNA, 33 bp, Homo sapien
atcagattttcagccacggttttcaaataaact

SEQ ID NO: 912790 - DNA, 33 bp, Homo sapien
atcagattttcagccatggttttcaaataaact

SEQ ID NO: 912791 - DNA, 33 bp, Homo sapien
gaaactggagtatagccatccaaaatcaatcta

SEQ ID NO: 912792 - DNA, 33 bp, Homo sapien
gaaactggagtatagctatccaaaatcaatcta

SEQ ID NO: 912793 - DNA, 33 bp, Homo sapien
tcagaaactgtgaaaaaagaatcatctagaagt

SEQ ID NO: 912794 - DNA, 33 bp, Homo sapien
tcagaaactgtgaaaacagaatcatctagaagt

SEQ ID NO: 912795 - DNA, 33 bp, Homo sapien
gcatttaacatttgtaagcaatctagtttatta

SEQ ID NO: 912796 - DNA, 33 bp, Homo sapien
gcatttaacatttgtaggcaatctagtttatta

SEQ ID NO: 912797 - DNA, 33 bp, Homo sapien
ttatgaccagcccccaataaaaatcttgcatac

SEQ ID NO: 912798 - DNA, 33 bp, Homo sapien
ttatgaccagcccccagtaaaaatcttgcatac

SEQ ID NO: 912799 - DNA, 33 bp, Homo sapien
agccaattactgaaaacggatttaatgatgtca

SEQ ID NO: 912800 - DNA, 33 bp, Homo sapien
agccaattactgaaaatggatttaatgatgtca

SEQ ID NO: 912801 - DNA, 33 bp, Homo sapien
aaaagaaagccaatataactggaaaatccacac

SEQ ID NO: 912802 - DNA, 33 bp, Homo sapien
aaaagaaagccaatatgactggaaaatccacac

SEQ ID NO: 912803 - DNA, 33 bp, Homo sapien
atgagctcttattgtcactattttttaagagtc

SEQ ID NO: 912804 - DNA, 33 bp, Homo sapien
atgagctcttattgtcgctattttttaagagtc

SEQ ID NO: 912805 - DNA, 33 bp, Homo sapien
aagacattgatctgaacaatgtaattgataaga

SEQ ID NO: 912806 - DNA, 33 bp, Homo sapien
aagacattgatctgaataatgtaattgataaga

SEQ ID NO: 912807 - DNA, 33 bp, Homo sapien
tatcaagttctctttaccttggtgatatggttt

SEQ ID NO: 912808 - DNA, 33 bp, Homo sapien
tatcaagttctctttatcttggtgatatggttt

SEQ ID NO: 912809 - DNA, 33 bp, Homo sapien
ccgtttcaaaacacaacgataatgacaacactg

SEQ ID NO: 912810 - DNA, 33 bp, Homo sapien
ccgtttcaaaacacaaggataatgacaacactg

SEQ ID NO: 912811 - DNA, 33 bp, Homo sapien
cccaggatataatatccgacatttacaggtgac

SEQ ID NO: 912812 - DNA, 33 bp, Homo sapien
cccaggatataatatctgacatttacaggtgac

SEQ ID NO: 912813 - DNA, 33 bp, Homo sapien
ggtaatgggagcaaagcaaagttccatgaaagt

SEQ ID NO: 912814 - DNA, 33 bp, Homo sapien
ggtaatgggagcaaaggaaagttccatgaaagt

SEQ ID NO: 912815 - DNA, 33 bp, Homo sapien
caaagccagcaaaccacgagaacaccttttcta

SEQ ID NO: 912816 - DNA, 33 bp, Homo sapien
caaagccagcaaaccatgagaacaccttttcta

SEQ ID NO: 912817 - DNA, 33 bp, Homo sapien
ggaagctgccagaggaactgttctttctttgga

SEQ ID NO: 912818 - DNA, 33 bp, Homo sapien
ggaagctgccagaggagctgttctttctttgga

SEQ ID NO: 912819 - DNA, 33 bp, Homo sapien
tagtgtaccataagcaaaatttcatgtcaaaaa

SEQ ID NO: 912820 - DNA, 33 bp, Homo sapien
tagtgtaccataagcataatttcatgtcaaaaa

SEQ ID NO: 912821 - DNA, 33 bp, Homo sapien
tatgagttattgagctcacaagcctggggcagt

SEQ ID NO: 912822 - DNA, 33 bp, Homo sapien
tatgagttattgagctgacaagcctggggcagt

SEQ ID NO: 912823 - DNA, 33 bp, Homo sapien
ctggggactccaaatacagggagacaagaaggg

SEQ ID NO: 912824 - DNA, 33 bp, Homo sapien
ctggggactccaaatagagggagacaagaaggg

SEQ ID NO: 912825 - DNA, 33 bp, Homo sapien
gtgtctgttgttctcacctgttaagtccatagg

SEQ ID NO: 912826 - DNA, 33 bp, Homo sapien
gtgtctgttgttctcatctgttaagtccatagg

SEQ ID NO: 912827 - DNA, 33 bp, Homo sapien
cagagacctaaaatgacaccagctttaccaggg

SEQ ID NO: 912828 - DNA, 33 bp, Homo sapien
cagagacctaaaatgataccagctttaccaggg

SEQ ID NO: 912829 - DNA, 33 bp, Homo sapien
tccctcccattcccaagacttggattaaaagtt

SEQ ID NO: 912830 - DNA, 33 bp, Homo sapien
tccctcccattcccaatacttggattaaaagtt

SEQ ID NO: 912831 - DNA, 33 bp, Homo sapien
ttcatggtactgtggaaagggtcacggtcctgt

SEQ ID NO: 912832 - DNA, 33 bp, Homo sapien
ttcatggtactgtggatagggtcacggtcctgt

SEQ ID NO: 912833 - DNA, 33 bp, Homo sapien
ttgacctccacaagaacctatcataacccaaat

SEQ ID NO: 912834 - DNA, 33 bp, Homo sapien
ttgacctccacaagaatctatcataacccaaat

SEQ ID NO: 912835 - DNA, 33 bp, Homo sapien
agaagcataaagggccaatgcagaggtcaaata

SEQ ID NO: 912836 - DNA, 33 bp, Homo sapien
agaagcataaagggccgatgcagaggtcaaata

SEQ ID NO: 912837 - DNA, 33 bp, Homo sapien
ttctatgcaacaaatacggcaccttttgtgtcc

SEQ ID NO: 912838 - DNA, 33 bp, Homo sapien
ttctatgcaacaaatatggcaccttttgtgtcc

SEQ ID NO: 912839 - DNA, 33 bp, Homo sapien
ttgacatttctgggtacggaattctctagacat

SEQ ID NO: 912840 - DNA, 33 bp, Homo sapien
ttgacatttctgggtatggaattctctagacat

SEQ ID NO: 912841 - DNA, 33 bp, Homo sapien
tgctggtcatgctagaagaagccatgtaggcca

SEQ ID NO: 912842 - DNA, 33 bp, Homo sapien
tgctggtcatgctagaggaagccatgtaggcca

SEQ ID NO: 912843 - DNA, 33 bp, Homo sapien
tctagactgtcatacactggaaatggaatcatg

SEQ ID NO: 912844 - DNA, 33 bp, Homo sapien
tctagactgtcatacattggaaatggaatcatg

SEQ ID NO: 912845 - DNA, 33 bp, Homo sapien
tgtccatccatacttcagaaattacttaacagt

SEQ ID NO: 912846 - DNA, 33 bp, Homo sapien
tgtccatccatacttcggaaattacttaacagt

SEQ ID NO: 912847 - DNA, 33 bp, Homo sapien
tcaaaagaatgcttagccaaagtctctttatct

SEQ ID NO: 912848 - DNA, 33 bp, Homo sapien
tcaaaagaatgcttagtcaaagtctctttatct

SEQ ID NO: 912849 - DNA, 33 bp, Homo sapien
caagctaggcagttcagcttagcttttgatgtg

SEQ ID NO: 912850 - DNA, 33 bp, Homo sapien
caagctaggcagttcatcttagcttttgatgtg

SEQ ID NO: 912851 - DNA, 33 bp, Homo sapien
ggagggcagagtcccactgcttaaactcctgag

SEQ ID NO: 912852 - DNA, 33 bp, Homo sapien
ggagggcagagtcccattgcttaaactcctgag

SEQ ID NO: 912853 - DNA, 33 bp, Homo sapien
agagttaacacatagaagcaacctgtgacctgg

SEQ ID NO: 912854 - DNA, 33 bp, Homo sapien
agagttaacacatagacgcaacctgtgacctgg

SEQ ID NO: 912855 - DNA, 33 bp, Homo sapien
gcctcaatagcttcacagtaaatcttgctctgc

SEQ ID NO: 912856 - DNA, 33 bp, Homo sapien
gcctcaatagcttcacggtaaatcttgctctgc

SEQ ID NO: 912857 - DNA, 33 bp, Homo sapien
gaatgaaaactgaaaactgagactgtaaatctg

SEQ ID NO: 912858 - DNA, 33 bp, Homo sapien
gaatgaaaactgaaaattgagactgtaaatctg

SEQ ID NO: 912859 - DNA, 33 bp, Homo sapien
aggttctgggatacacacacaggatgtgcaggt

SEQ ID NO: 912860 - DNA, 33 bp, Homo sapien
aggttctgggatacacgcacaggatgtgcaggt

SEQ ID NO: 912861 - DNA, 33 bp, Homo sapien
cattttttaaagagcacggttatgctatgctgc

SEQ ID NO: 912862 - DNA, 33 bp, Homo sapien
cattttttaaagagcagggttatgctatgctgc

SEQ ID NO: 912863 - DNA, 33 bp, Homo sapien
gaaagtggtctgctaaatgagaacccattgcca

SEQ ID NO: 912864 - DNA, 33 bp, Homo sapien
gaaagtggtctgctaagtgagaacccattgcca

SEQ ID NO: 912865 - DNA, 33 bp, Homo sapien
acccagcagggtaaaacgtatactcaaaaatgt

SEQ ID NO: 912866 - DNA, 33 bp, Homo sapien
acccagcagggtaaaatgtatactcaaaaatgt

SEQ ID NO: 912867 - DNA, 33 bp, Homo sapien
tcatctttccacactaactgtccctccatctgc

SEQ ID NO: 912868 - DNA, 33 bp, Homo sapien
tcatctttccacactagctgtccctccatctgc

SEQ ID NO: 912869 - DNA, 33 bp, Homo sapien
aggtataagatgttgcagacgttgattctactt

SEQ ID NO: 912870 - DNA, 33 bp, Homo sapien
aggtataagatgttgcggacgttgattctactt

SEQ ID NO: 912871 - DNA, 33 bp, Homo sapien
ataagtcggggctaaacgacgagtacacatgga

SEQ ID NO: 912872 - DNA, 33 bp, Homo sapien
ataagtcggggctaaatgacgagtacacatgga

SEQ ID NO: 912873 - DNA, 33 bp, Homo sapien
gcaatttggtgaagccacaaagaactcaaagca

SEQ ID NO: 912874 - DNA, 33 bp, Homo sapien
gcaatttggtgaagccgcaaagaactcaaagca

SEQ ID NO: 912875 - DNA, 33 bp, Homo sapien
ttcacaggcgtctaacactatgcccagctaatt

SEQ ID NO: 912876 - DNA, 33 bp, Homo sapien
ttcacaggcgtctaacgctatgcccagctaatt

SEQ ID NO: 912877 - DNA, 33 bp, Homo sapien
ctgccgtaatcttatccatctacttctcttgcc

SEQ ID NO: 912878 - DNA, 33 bp, Homo sapien
ctgccgtaatcttatcgatctacttctcttgcc

SEQ ID NO: 912879 - DNA, 33 bp, Homo sapien
acatcataatgacagccgagaagggaacctatt

SEQ ID NO: 912880 - DNA, 33 bp, Homo sapien
acatcataatgacagctgagaagggaacctatt

SEQ ID NO: 912881 - DNA, 33 bp, Homo sapien
aaaatgtacaatgtaccgccaagaaactgaaat

SEQ ID NO: 912882 - DNA, 33 bp, Homo sapien
aaaatgtacaatgtactgccaagaaactgaaat

SEQ ID NO: 912883 - DNA, 33 bp, Homo sapien
gatgtgtagcatacaacgatgctttggtcatct

SEQ ID NO: 912884 - DNA, 33 bp, Homo sapien
gatgtgtagcatacaatgatgctttggtcatct

SEQ ID NO: 912885 - DNA, 33 bp, Homo sapien
agaacctgtggattagaaaggctgactccacat

SEQ ID NO: 912886 - DNA, 33 bp, Homo sapien
agaacctgtggattaggaaggctgactccacat

SEQ ID NO: 912887 - DNA, 33 bp, Homo sapien
atgaatcaagaaaatgcagtatgtggagtcagc

SEQ ID NO: 912888 - DNA, 33 bp, Homo sapien
atgaatcaagaaaatgtagtatgtggagtcagc

SEQ ID NO: 912889 - DNA, 33 bp, Homo sapien
ggcgaaactgtgtggccgatctgcaggccttcc

SEQ ID NO: 912890 - DNA, 33 bp, Homo sapien
ggcgaaactgtgtggctgatctgcaggccttcc

SEQ ID NO: 912891 - DNA, 33 bp, Homo sapien
tgagctagtggcaaaaagactggaggtggcccg

SEQ ID NO: 912892 - DNA, 33 bp, Homo sapien
tgagctagtggcaaaatgactggaggtggcccg

SEQ ID NO: 912893 - DNA, 33 bp, Homo sapien
tgttcttattttggtgaaacacaacacctggaa

SEQ ID NO: 912894 - DNA, 33 bp, Homo sapien
tgttcttattttggtggaacacaacacctggaa

SEQ ID NO: 912895 - DNA, 33 bp, Homo sapien
agtgcaagtcctaacaatatcataaagggtact

SEQ ID NO: 912896 - DNA, 33 bp, Homo sapien
agtgcaagtcctaacagtatcataaagggtact

SEQ ID NO: 912897 - DNA, 33 bp, Homo sapien
atgctgttggcctacaacaattccttcatacct

SEQ ID NO: 912898 - DNA, 33 bp, Homo sapien
atgctgttggcctacagcaattccttcatacct

SEQ ID NO: 912899 - DNA, 33 bp, Homo sapien
gctgtgctctctgccaatagcaaagggcatccc

SEQ ID NO: 912900 - DNA, 33 bp, Homo sapien
gctgtgctctctgccagtagcaaagggcatccc

SEQ ID NO: 912901 - DNA, 33 bp, Homo sapien
agtgcagctttccaacagcgatactgagaagtt

SEQ ID NO: 912902 - DNA, 33 bp, Homo sapien
agtgcagctttccaacggcgatactgagaagtt

SEQ ID NO: 912903 - DNA, 33 bp, Homo sapien
tcagcctattttacagcctcctaccttgcagcc

SEQ ID NO: 912904 - DNA, 33 bp, Homo sapien
tcagcctattttacagtctcctaccttgcagcc

SEQ ID NO: 912905 - DNA, 33 bp, Homo sapien
gagtgcttttctaagaacattatataagcttgg

SEQ ID NO: 912906 - DNA, 33 bp, Homo sapien
gagtgcttttctaagagcattatataagcttgg

SEQ ID NO: 912907 - DNA, 33 bp, Homo sapien
gatactataccagagtcaagttggaagttggta

SEQ ID NO: 912908 - DNA, 33 bp, Homo sapien
gatactataccagagtgaagttggaagttggta

SEQ ID NO: 912909 - DNA, 33 bp, Homo sapien
gatgtttaggtctttccattactcatacacaga

SEQ ID NO: 912910 - DNA, 33 bp, Homo sapien
gatgtttaggtctttcgattactcatacacaga

SEQ ID NO: 912911 - DNA, 33 bp, Homo sapien
agctgactttgattcccagtcacttgtttttag

SEQ ID NO: 912912 - DNA, 33 bp, Homo sapien
agctgactttgattcctagtcacttgtttttag

SEQ ID NO: 912913 - DNA, 33 bp, Homo sapien
caaaatattattcatacgcaaaacacccaccct

SEQ ID NO: 912914 - DNA, 33 bp, Homo sapien
caaaatattattcatatgcaaaacacccaccct

SEQ ID NO: 912915 - DNA, 33 bp, Homo sapien
aggcaacaatccaccaacaggagcaagaagtgc

SEQ ID NO: 912916 - DNA, 33 bp, Homo sapien
aggcaacaatccaccagcaggagcaagaagtgc

SEQ ID NO: 912917 - DNA, 33 bp, Homo sapien
gatcaccaggccatgaatactgttccagatcat

SEQ ID NO: 912918 - DNA, 33 bp, Homo sapien
gatcaccaggccatgagtactgttccagatcat

SEQ ID NO: 912919 - DNA, 33 bp, Homo sapien
acaatagagtgtttgacgtatcgctgttctcca

SEQ ID NO: 912920 - DNA, 33 bp, Homo sapien
acaatagagtgtttgatgtatcgctgttctcca

SEQ ID NO: 912921 - DNA, 33 bp, Homo sapien
atgcctggcagaaccacgctgggtagaggagcc

SEQ ID NO: 912922 - DNA, 33 bp, Homo sapien
atgcctggcagaaccatgctgggtagaggagcc

SEQ ID NO: 912923 - DNA, 33 bp, Homo sapien
gattcttcaatatgaaagtgaactggggcccag

SEQ ID NO: 912924 - DNA, 33 bp, Homo sapien
gattcttcaatatgaaggtgaactggggcccag

SEQ ID NO: 912925 - DNA, 33 bp, Homo sapien
caccctcactgtttcaatcttcccagtgtcaac

SEQ ID NO: 912926 - DNA, 33 bp, Homo sapien
caccctcactgtttcagtcttcccagtgtcaac

SEQ ID NO: 912927 - DNA, 33 bp, Homo sapien
aggaagaagtgagatacgcattggactcttggt

SEQ ID NO: 912928 - DNA, 33 bp, Homo sapien
aggaagaagtgagatatgcattggactcttggt

SEQ ID NO: 912929 - DNA, 33 bp, Homo sapien
ggcacttacacactacagtagggagatagacat

SEQ ID NO: 912930 - DNA, 33 bp, Homo sapien
ggcacttacacactacggtagggagatagacat

SEQ ID NO: 912931 - DNA, 33 bp, Homo sapien
ttctctgagttcactcccatctgcagacctcca

SEQ ID NO: 912932 - DNA, 33 bp, Homo sapien
ttctctgagttcactcgcatctgcagacctcca

SEQ ID NO: 912933 - DNA, 33 bp, Homo sapien
ggtgcactttgctctgcaatctgtcgcgtcccg

SEQ ID NO: 912934 - DNA, 33 bp, Homo sapien
ggtgcactttgctctgtaatctgtcgcgtcccg

SEQ ID NO: 912935 - DNA, 33 bp, Homo sapien
ttcttttatgcccagcactcaagaagagacaga

SEQ ID NO: 912936 - DNA, 33 bp, Homo sapien
ttcttttatgcccagcgctcaagaagagacaga

SEQ ID NO: 912937 - DNA, 33 bp, Homo sapien
aatggagcaattgtccggaaagagatggagttt

SEQ ID NO: 912938 - DNA, 33 bp, Homo sapien
aatggagcaattgtcctgaaagagatggagttt

SEQ ID NO: 912939 - DNA, 33 bp, Homo sapien
ctggatgagatggcaaatccagcatagaaaaag

SEQ ID NO: 912940 - DNA, 33 bp, Homo sapien
ctggatgagatggcaagtccagcatagaaaaag

SEQ ID NO: 912941 - DNA, 33 bp, Homo sapien
aaaaagcccattcataagtttcaaaataaatta

SEQ ID NO: 912942 - DNA, 33 bp, Homo sapien
aaaaagcccattcatatgtttcaaaataaatta

SEQ ID NO: 912943 - DNA, 33 bp, Homo sapien
atttaataacagtgggacacaaactcagctcca

SEQ ID NO: 912944 - DNA, 33 bp, Homo sapien
atttaataacagtgggccacaaactcagctcca

SEQ ID NO: 912945 - DNA, 33 bp, Homo sapien
aacgccagtggtgactaaagttgccagtctcaa

SEQ ID NO: 912946 - DNA, 33 bp, Homo sapien
aacgccagtggtgactgaagttgccagtctcaa

SEQ ID NO: 912947 - DNA, 33 bp, Homo sapien
tcttttttgaaacaaaatcaatctgtcacccag

SEQ ID NO: 912948 - DNA, 33 bp, Homo sapien
tcttttttgaaacaaagtcaatctgtcacccag

SEQ ID NO: 912949 - DNA, 33 bp, Homo sapien
aatattgcagatacacagtgacgcagtcatatg

SEQ ID NO: 912950 - DNA, 33 bp, Homo sapien
aatattgcagatacacggtgacgcagtcatatg

SEQ ID NO: 912951 - DNA, 33 bp, Homo sapien
aaacagcatgaaattgaatttcctcatccataa

SEQ ID NO: 912952 - DNA, 33 bp, Homo sapien
aaacagcatgaaattggatttcctcatccataa

SEQ ID NO: 912953 - DNA, 33 bp, Homo sapien
aatatcaaatcacaagaaacagctgtaagggtc

SEQ ID NO: 912954 - DNA, 33 bp, Homo sapien
aatatcaaatcacaaggaacagctgtaagggtc

SEQ ID NO: 912955 - DNA, 33 bp, Homo sapien
caggaagaccagaggaaaaatgatggaccaggc

SEQ ID NO: 912956 - DNA, 33 bp, Homo sapien
caggaagaccagaggagaaatgatggaccaggc

SEQ ID NO: 912957 - DNA, 33 bp, Homo sapien
aggagagggaagatccacacaaaggcaccagga

SEQ ID NO: 912958 - DNA, 33 bp, Homo sapien
aggagagggaagatccgcacaaaggcaccagga

SEQ ID NO: 912959 - DNA, 33 bp, Homo sapien
agtaaatctgaaagacaagggtagtgggggtgg

SEQ ID NO: 912960 - DNA, 33 bp, Homo sapien
agtaaatctgaaagacgagggtagtgggggtgg

SEQ ID NO: 912961 - DNA, 33 bp, Homo sapien
aaggtgatcttgtgggcatgggccatttgtttc

SEQ ID NO: 912962 - DNA, 33 bp, Homo sapien
aaggtgatcttgtggggatgggccatttgtttc

SEQ ID NO: 912963 - DNA, 33 bp, Homo sapien
gacaaaagatcagacaaaagctcagaggttatg

SEQ ID NO: 912964 - DNA, 33 bp, Homo sapien
gacaaaagatcagacagaagctcagaggttatg

SEQ ID NO: 912965 - DNA, 33 bp, Homo sapien
tccttcagattatctcacagcaaaacctactct

SEQ ID NO: 912966 - DNA, 33 bp, Homo sapien
tccttcagattatctcgcagcaaaacctactct

SEQ ID NO: 912967 - DNA, 33 bp, Homo sapien
taaagggatggatggaagaaaatgacctcaagc

SEQ ID NO: 912968 - DNA, 33 bp, Homo sapien
taaagggatggatggaggaaaatgacctcaagc

SEQ ID NO: 912969 - DNA, 33 bp, Homo sapien
tgtcactttaggatctaacacttccaggacaca

SEQ ID NO: 912970 - DNA, 33 bp, Homo sapien
tgtcactttaggatctgacacttccaggacaca

SEQ ID NO: 912971 - DNA, 33 bp, Homo sapien
gttaagtgggcttcaccgctgagtgcaacgtgg

SEQ ID NO: 912972 - DNA, 33 bp, Homo sapien
gttaagtgggcttcactgctgagtgcaacgtgg

SEQ ID NO: 912973 - DNA, 33 bp, Homo sapien
accaagatctacatgacggcaaatggttcatcc

SEQ ID NO: 912974 - DNA, 33 bp, Homo sapien
accaagatctacatgatggcaaatggttcatcc

SEQ ID NO: 912975 - DNA, 33 bp, Homo sapien
gttttaggtgtttccacaggctaggacaatagc

SEQ ID NO: 912976 - DNA, 33 bp, Homo sapien
gttttaggtgtttccataggctaggacaatagc

SEQ ID NO: 912977 - DNA, 33 bp, Homo sapien
aatcccaggcaaaatgcaaagaaatgacagtag

SEQ ID NO: 912978 - DNA, 33 bp, Homo sapien
aatcccaggcaaaatggaaagaaatgacagtag

SEQ ID NO: 912979 - DNA, 33 bp, Homo sapien
tagaagttcttaccaccgcggtacttaaattga

SEQ ID NO: 912980 - DNA, 33 bp, Homo sapien
tagaagttcttaccactgcggtacttaaattga

SEQ ID NO: 912981 - DNA, 33 bp, Homo sapien
ataagtaagtacccaaagagttctgagttctta

SEQ ID NO: 912982 - DNA, 33 bp, Homo sapien
ataagtaagtacccaatgagttctgagttctta

SEQ ID NO: 912983 - DNA, 33 bp, Homo sapien
ggggtacacaagatgacgtggaccattagaggg

SEQ ID NO: 912984 - DNA, 33 bp, Homo sapien
ggggtacacaagatgatgtggaccattagaggg

SEQ ID NO: 912985 - DNA, 33 bp, Homo sapien
tatgaaccactttctccacctctttgaccctca

SEQ ID NO: 912986 - DNA, 33 bp, Homo sapien
tatgaaccactttctctacctctttgaccctca

SEQ ID NO: 912987 - DNA, 33 bp, Homo sapien
atgaactgtcattagcagcacctcttgtgtgag

SEQ ID NO: 912988 - DNA, 33 bp, Homo sapien
atgaactgtcattagcggcacctcttgtgtgag

SEQ ID NO: 912989 - DNA, 33 bp, Homo sapien
gctaaaacaaccttgaacaaactgggaggactt

SEQ ID NO: 912990 - DNA, 33 bp, Homo sapien
gctaaaacaaccttgagcaaactgggaggactt

SEQ ID NO: 912991 - DNA, 33 bp, Homo sapien
taccttgaaattcagccgccttgttttactctc

SEQ ID NO: 912992 - DNA, 33 bp, Homo sapien
taccttgaaattcagctgccttgttttactctc

SEQ ID NO: 912993 - DNA, 33 bp, Homo sapien
aattttccattctacactggcagggcgcagctt

SEQ ID NO: 912994 - DNA, 33 bp, Homo sapien
aattttccattctacattggcagggcgcagctt

SEQ ID NO: 912995 - DNA, 33 bp, Homo sapien
tgcactgtgatctatacgggtatccatcccacc

SEQ ID NO: 912996 - DNA, 33 bp, Homo sapien
tgcactgtgatctatatgggtatccatcccacc

SEQ ID NO: 912997 - DNA, 33 bp, Homo sapien
aagctatgtcttggaacagaccaaatgaaaagc

SEQ ID NO: 912998 - DNA, 33 bp, Homo sapien
aagctatgtcttggaatagaccaaatgaaaagc

SEQ ID NO: 912999 - DNA, 33 bp, Homo sapien
tttagaacggcaaaccagattaggctgctcatg

SEQ ID NO: 913000 - DNA, 33 bp, Homo sapien
tttagaacggcaaaccggattaggctgctcatg

SEQ ID NO: 913001 - DNA, 33 bp, Homo sapien
gggccagagtccattgcatgccgcactgttcaa

SEQ ID NO: 913002 - DNA, 33 bp, Homo sapien
gggccagagtccattgtatgccgcactgttcaa

SEQ ID NO: 913003 - DNA, 33 bp, Homo sapien
tggtgatttctaggaactgggttttcgtggatg

SEQ ID NO: 913004 - DNA, 33 bp, Homo sapien
tggtgatttctaggaattgggttttcgtggatg

SEQ ID NO: 913005 - DNA, 33 bp, Homo sapien
cactatgagctgcacccagacaggaccgcgaac

SEQ ID NO: 913006 - DNA, 33 bp, Homo sapien
cactatgagctgcacctagacaggaccgcgaac

SEQ ID NO: 913007 - DNA, 33 bp, Homo sapien
ctactctgcatgtgcccgagaaatggaacaaca

SEQ ID NO: 913008 - DNA, 33 bp, Homo sapien
ctactctgcatgtgcctgagaaatggaacaaca

SEQ ID NO: 913009 - DNA, 33 bp, Homo sapien
aatcctgctgctgatacaccacctaagtttatg

SEQ ID NO: 913010 - DNA, 33 bp, Homo sapien
aatcctgctgctgatataccacctaagtttatg

SEQ ID NO: 913011 - DNA, 33 bp, Homo sapien
cagggggtagtgtacacatttgttacatggata

SEQ ID NO: 913012 - DNA, 33 bp, Homo sapien
cagggggtagtgtacatatttgttacatggata

SEQ ID NO: 913013 - DNA, 33 bp, Homo sapien
ctgctgatctgtgaaccgtccatgcctgctcct

SEQ ID NO: 913014 - DNA, 33 bp, Homo sapien
ctgctgatctgtgaactgtccatgcctgctcct

SEQ ID NO: 913015 - DNA, 33 bp, Homo sapien
tacctccctgttctaaaccaacttcctttcttg

SEQ ID NO: 913016 - DNA, 33 bp, Homo sapien
tacctccctgttctaagccaacttcctttcttg

SEQ ID NO: 913017 - DNA, 33 bp, Homo sapien
ttgctaatggattgaaaatggtggatcagagaa

SEQ ID NO: 913018 - DNA, 33 bp, Homo sapien
ttgctaatggattgaatatggtggatcagagaa

SEQ ID NO: 913019 - DNA, 33 bp, Homo sapien
tttggctaatcagtaacgggaggctgtatcaat

SEQ ID NO: 913020 - DNA, 33 bp, Homo sapien
tttggctaatcagtaatgggaggctgtatcaat

SEQ ID NO: 913021 - DNA, 33 bp, Homo sapien
ggtcaccccattctaaacttattatgcaaatgg

SEQ ID NO: 913022 - DNA, 33 bp, Homo sapien
ggtcaccccattctaaccttattatgcaaatgg

SEQ ID NO: 913023 - DNA, 33 bp, Homo sapien
cagatccaagtcccaactggcttttctgtaata

SEQ ID NO: 913024 - DNA, 33 bp, Homo sapien
cagatccaagtcccaattggcttttctgtaata

SEQ ID NO: 913025 - DNA, 33 bp, Homo sapien
gagaaaggactaataaaatttcacagtcttaaa

SEQ ID NO: 913026 - DNA, 33 bp, Homo sapien
gagaaaggactaataacatttcacagtcttaaa

SEQ ID NO: 913027 - DNA, 33 bp, Homo sapien
actttgaaattatagcaagtagacccatcactt

SEQ ID NO: 913028 - DNA, 33 bp, Homo sapien
actttgaaattatagcgagtagacccatcactt

SEQ ID NO: 913029 - DNA, 33 bp, Homo sapien
ctgagtctaggtcaacagtgtccttgcccctga

SEQ ID NO: 913030 - DNA, 33 bp, Homo sapien
ctgagtctaggtcaaccgtgtccttgcccctga

SEQ ID NO: 913031 - DNA, 33 bp, Homo sapien
tacatagtatgtgtatcaattcccacccggagt

SEQ ID NO: 913032 - DNA, 33 bp, Homo sapien
tacatagtatgtgtatgaattcccacccggagt

SEQ ID NO: 913033 - DNA, 33 bp, Homo sapien
ctcactaccaggagaacagtatcggggaaacta

SEQ ID NO: 913034 - DNA, 33 bp, Homo sapien
ctcactaccaggagaagagtatcggggaaacta

SEQ ID NO: 913035 - DNA, 33 bp, Homo sapien
gaactatctccacccaaaatggtattacctctc

SEQ ID NO: 913036 - DNA, 33 bp, Homo sapien
gaactatctccacccagaatggtattacctctc

SEQ ID NO: 913037 - DNA, 33 bp, Homo sapien
gattcaaatgtgcagccagggttaggaacctct

SEQ ID NO: 913038 - DNA, 33 bp, Homo sapien
gattcaaatgtgcagcgagggttaggaacctct

SEQ ID NO: 913039 - DNA, 33 bp, Homo sapien
agggcagttctttaaaatatgcaaggttaaatg

SEQ ID NO: 913040 - DNA, 33 bp, Homo sapien
agggcagttctttaaagtatgcaaggttaaatg

SEQ ID NO: 913041 - DNA, 33 bp, Homo sapien
cctcactggagcaaaaaatctgaaaatagatgc

SEQ ID NO: 913042 - DNA, 33 bp, Homo sapien
cctcactggagcaaaatatctgaaaatagatgc

SEQ ID NO: 913043 - DNA, 33 bp, Homo sapien
ggaacactgattttgacaaccccccacagatga

SEQ ID NO: 913044 - DNA, 33 bp, Homo sapien
ggaacactgattttgagaaccccccacagatga

SEQ ID NO: 913045 - DNA, 33 bp, Homo sapien
ccagcttaaaatagaacggcctacatctttcct

SEQ ID NO: 913046 - DNA, 33 bp, Homo sapien
ccagcttaaaatagaatggcctacatctttcct

SEQ ID NO: 913047 - DNA, 33 bp, Homo sapien
atggaattgataccaccggctttcctggatctc

SEQ ID NO: 913048 - DNA, 33 bp, Homo sapien
atggaattgataccacgggctttcctggatctc

SEQ ID NO: 913049 - DNA, 33 bp, Homo sapien
gtgagccaatttctcacgatcactctcctttct

SEQ ID NO: 913050 - DNA, 33 bp, Homo sapien
gtgagccaatttctcatgatcactctcctttct

SEQ ID NO: 913051 - DNA, 33 bp, Homo sapien
gccatcctgttttctgcaaaggctgcaggattc

SEQ ID NO: 913052 - DNA, 33 bp, Homo sapien
gccatcctgttttctggaaaggctgcaggattc

SEQ ID NO: 913053 - DNA, 33 bp, Homo sapien
agaatattaatacatcaaacaacttcatcctta

SEQ ID NO: 913054 - DNA, 33 bp, Homo sapien
agaatattaatacatcgaacaacttcatcctta

SEQ ID NO: 913055 - DNA, 33 bp, Homo sapien
ggcagtggtcccataaatgcctgtcaacttgat

SEQ ID NO: 913056 - DNA, 33 bp, Homo sapien
ggcagtggtcccataagtgcctgtcaacttgat

SEQ ID NO: 913057 - DNA, 33 bp, Homo sapien
aagtgatgggtgaatacatttaatgctcacagg

SEQ ID NO: 913058 - DNA, 33 bp, Homo sapien
aagtgatgggtgaatatatttaatgctcacagg

SEQ ID NO: 913059 - DNA, 33 bp, Homo sapien
gaaataatctaaattcaaagtaaggccttttta

SEQ ID NO: 913060 - DNA, 33 bp, Homo sapien
gaaataatctaaattcgaagtaaggccttttta

SEQ ID NO: 913061 - DNA, 33 bp, Homo sapien
agactttttacctaaaaccactggactcggatt

SEQ ID NO: 913062 - DNA, 33 bp, Homo sapien
agactttttacctaaagccactggactcggatt

SEQ ID NO: 913063 - DNA, 33 bp, Homo sapien
tttcaattgtgaatcacggcattctgtttcaca

SEQ ID NO: 913064 - DNA, 33 bp, Homo sapien
tttcaattgtgaatcatggcattctgtttcaca

SEQ ID NO: 913065 - DNA, 33 bp, Homo sapien
gacaatggcttcttcaataagtcctcatcttca

SEQ ID NO: 913066 - DNA, 33 bp, Homo sapien
gacaatggcttcttcagtaagtcctcatcttca

SEQ ID NO: 913067 - DNA, 33 bp, Homo sapien
agtgccttgagatgccaccataagaagtccagc

SEQ ID NO: 913068 - DNA, 33 bp, Homo sapien
agtgccttgagatgccgccataagaagtccagc

SEQ ID NO: 913069 - DNA, 33 bp, Homo sapien
agagaagctaatgtaccggtgtatttctctggc

SEQ ID NO: 913070 - DNA, 33 bp, Homo sapien
agagaagctaatgtactggtgtatttctctggc

SEQ ID NO: 913071 - DNA, 33 bp, Homo sapien
ctctgacaccgtgtccacatgggctcagttaaa

SEQ ID NO: 913072 - DNA, 33 bp, Homo sapien
ctctgacaccgtgtccgcatgggctcagttaaa

SEQ ID NO: 913073 - DNA, 33 bp, Homo sapien
accagggatcagtttacagggaaacctggattt

SEQ ID NO: 913074 - DNA, 33 bp, Homo sapien
accagggatcagtttatagggaaacctggattt

SEQ ID NO: 913075 - DNA, 33 bp, Homo sapien
aacggagtgacttacaacttaggagcttaaaat

SEQ ID NO: 913076 - DNA, 33 bp, Homo sapien
aacggagtgacttacagcttaggagcttaaaat

SEQ ID NO: 913077 - DNA, 33 bp, Homo sapien
gtagtttatgtgctaacctcagcaattctgttt

SEQ ID NO: 913078 - DNA, 33 bp, Homo sapien
gtagtttatgtgctaatctcagcaattctgttt

SEQ ID NO: 913079 - DNA, 33 bp, Homo sapien
tgtacagcaaggtttgaaagactcctgtgaatt

SEQ ID NO: 913080 - DNA, 33 bp, Homo sapien
tgtacagcaaggtttgcaagactcctgtgaatt

SEQ ID NO: 913081 - DNA, 33 bp, Homo sapien
caccatttgtcatggccgatgtgcccgtcttgg

SEQ ID NO: 913082 - DNA, 33 bp, Homo sapien
caccatttgtcatggctgatgtgcccgtcttgg

SEQ ID NO: 913083 - DNA, 33 bp, Homo sapien
aaatccacaactggacacgtcatagtaaaactt

SEQ ID NO: 913084 - DNA, 33 bp, Homo sapien
aaatccacaactggacgcgtcatagtaaaactt

SEQ ID NO: 913085 - DNA, 33 bp, Homo sapien
caagctgagaaaaaaaaggtgcaggaaacaagg

SEQ ID NO: 913086 - DNA, 33 bp, Homo sapien
caagctgagaaaaaaacggtgcaggaaacaagg

SEQ ID NO: 913087 - DNA, 33 bp, Homo sapien
gacacacagtggagaacaatacacactggggcc

SEQ ID NO: 913088 - DNA, 33 bp, Homo sapien
gacacacagtggagaataatacacactggggcc

SEQ ID NO: 913089 - DNA, 33 bp, Homo sapien
cccacctccaatcttcactcaagtgtcacatcc

SEQ ID NO: 913090 - DNA, 33 bp, Homo sapien
cccacctccaatcttcgctcaagtgtcacatcc

SEQ ID NO: 913091 - DNA, 33 bp, Homo sapien
gaacctatgctacttacatcgcaagaatttttt

SEQ ID NO: 913092 - DNA, 33 bp, Homo sapien
gaacctatgctacttatatcgcaagaatttttt

SEQ ID NO: 913093 - DNA, 33 bp, Homo sapien
ttcttccttctgggaacgtgcattttgtgcctg

SEQ ID NO: 913094 - DNA, 33 bp, Homo sapien
ttcttccttctgggaatgtgcattttgtgcctg

SEQ ID NO: 913095 - DNA, 33 bp, Homo sapien
ggaagaaggtcaacctaaagcagcctagaccaa

SEQ ID NO: 913096 - DNA, 33 bp, Homo sapien
ggaagaaggtcaacctgaagcagcctagaccaa

SEQ ID NO: 913097 - DNA, 33 bp, Homo sapien
aaagggttagaactacggacctactaccatgtc

SEQ ID NO: 913098 - DNA, 33 bp, Homo sapien
aaagggttagaactactgacctactaccatgtc

SEQ ID NO: 913099 - DNA, 33 bp, Homo sapien
tgtccattggagttgacatggtctgggttgtaa

SEQ ID NO: 913100 - DNA, 33 bp, Homo sapien
tgtccattggagttgatatggtctgggttgtaa

SEQ ID NO: 913101 - DNA, 33 bp, Homo sapien
catatgctaaatgcataatcttgggaaaattac

SEQ ID NO: 913102 - DNA, 33 bp, Homo sapien
catatgctaaatgcatgatcttgggaaaattac

SEQ ID NO: 913103 - DNA, 33 bp, Homo sapien
aacagaggcatggatacgtgaagtaattttccc

SEQ ID NO: 913104 - DNA, 33 bp, Homo sapien
aacagaggcatggatatgtgaagtaattttccc

SEQ ID NO: 913105 - DNA, 33 bp, Homo sapien
accgaattcaaagtcaagaaatcctgattccag

SEQ ID NO: 913106 - DNA, 33 bp, Homo sapien
accgaattcaaagtcaggaaatcctgattccag

SEQ ID NO: 913107 - DNA, 33 bp, Homo sapien
atttgatgggtcttccaaatgctcagtttctct

SEQ ID NO: 913108 - DNA, 33 bp, Homo sapien
atttgatgggtcttccgaatgctcagtttctct

SEQ ID NO: 913109 - DNA, 33 bp, Homo sapien
acaatatttatggccagtctttcagtccagacc

SEQ ID NO: 913110 - DNA, 33 bp, Homo sapien
acaatatttatggccattctttcagtccagacc

SEQ ID NO: 913111 - DNA, 33 bp, Homo sapien
acagtcacttactcgacgtacaccctttgtaaa

SEQ ID NO: 913112 - DNA, 33 bp, Homo sapien
acagtcacttactcgatgtacaccctttgtaaa

SEQ ID NO: 913113 - DNA, 33 bp, Homo sapien
ggcccagtctatactacctcggttgggggcttt

SEQ ID NO: 913114 - DNA, 33 bp, Homo sapien
ggcccagtctatactatctcggttgggggcttt

SEQ ID NO: 913115 - DNA, 33 bp, Homo sapien
aacaggacacacttccagacaacttgcgttgcc

SEQ ID NO: 913116 - DNA, 33 bp, Homo sapien
aacaggacacacttccggacaacttgcgttgcc

SEQ ID NO: 913117 - DNA, 33 bp, Homo sapien
aaagtcttaatatcacgaccaggtaatggtgta

SEQ ID NO: 913118 - DNA, 33 bp, Homo sapien
aaagtcttaatatcactaccaggtaatggtgta

SEQ ID NO: 913119 - DNA, 33 bp, Homo sapien
cggacattgaaaacaacacatattttggggaca

SEQ ID NO: 913120 - DNA, 33 bp, Homo sapien
cggacattgaaaacaagacatattttggggaca

SEQ ID NO: 913121 - DNA, 33 bp, Homo sapien
gacctcgttcatttcccatctctgggaacatct

SEQ ID NO: 913122 - DNA, 33 bp, Homo sapien
gacctcgttcatttcctatctctgggaacatct

SEQ ID NO: 913123 - DNA, 33 bp, Homo sapien
acactgaataagcacaactcgtgacataatcaa

SEQ ID NO: 913124 - DNA, 33 bp, Homo sapien
acactgaataagcacagctcgtgacataatcaa

SEQ ID NO: 913125 - DNA, 33 bp, Homo sapien
tgagacctcactcctcaaatccagcgggtccag

SEQ ID NO: 913126 - DNA, 33 bp, Homo sapien
tgagacctcactcctcgaatccagcgggtccag

SEQ ID NO: 913127 - DNA, 33 bp, Homo sapien
cttcctctaagtaaaactgtaggcagaatgcct

SEQ ID NO: 913128 - DNA, 33 bp, Homo sapien
cttcctctaagtaaaattgtaggcagaatgcct

SEQ ID NO: 913129 - DNA, 33 bp, Homo sapien
ggtgagaatcagaaaaactgaatcactcataca

SEQ ID NO: 913130 - DNA, 33 bp, Homo sapien
ggtgagaatcagaaaacctgaatcactcataca

SEQ ID NO: 913131 - DNA, 33 bp, Homo sapien
ttatttaacccactcacgtgttgatggacacct

SEQ ID NO: 913132 - DNA, 33 bp, Homo sapien
ttatttaacccactcatgtgttgatggacacct

SEQ ID NO: 913133 - DNA, 33 bp, Homo sapien
tatttcatgaaggtaaagaaaatcagtaaaagg

SEQ ID NO: 913134 - DNA, 33 bp, Homo sapien
tatttcatgaaggtaaggaaaatcagtaaaagg

SEQ ID NO: 913135 - DNA, 33 bp, Homo sapien
aacagcaagttgggaactctggaatcagcctca

SEQ ID NO: 913136 - DNA, 33 bp, Homo sapien
aacagcaagttgggaattctggaatcagcctca

SEQ ID NO: 913137 - DNA, 33 bp, Homo sapien
gccattgagtaatgaggaagatacagcaaccac

SEQ ID NO: 913138 - DNA, 33 bp, Homo sapien
gccattgagtaatgagtaagatacagcaaccac

SEQ ID NO: 913139 - DNA, 33 bp, Homo sapien
tagttcccttttcaaccatgaaggtgagaaaat

SEQ ID NO: 913140 - DNA, 33 bp, Homo sapien
tagttcccttttcaacgatgaaggtgagaaaat

SEQ ID NO: 913141 - DNA, 33 bp, Homo sapien
gagcttgtattttatgcaaaggttggggacaaa

SEQ ID NO: 913142 - DNA, 33 bp, Homo sapien
gagcttgtattttatgtaaaggttggggacaaa

SEQ ID NO: 913143 - DNA, 33 bp, Homo sapien
gacctgatgcaaatggaaattgtctaaacaggt

SEQ ID NO: 913144 - DNA, 33 bp, Homo sapien
gacctgatgcaaatggcaattgtctaaacaggt

SEQ ID NO: 913145 - DNA, 33 bp, Homo sapien
ttggaggaacaatcagaataggtcccccatatc

SEQ ID NO: 913146 - DNA, 33 bp, Homo sapien
ttggaggaacaatcaggataggtcccccatatc

SEQ ID NO: 913147 - DNA, 33 bp, Homo sapien
atttgtcaaatgggcaacaggaagatgtaaatg

SEQ ID NO: 913148 - DNA, 33 bp, Homo sapien
atttgtcaaatgggcagcaggaagatgtaaatg

SEQ ID NO: 913149 - DNA, 33 bp, Homo sapien
catgctgatgtaatggaaattctggagtccatg

SEQ ID NO: 913150 - DNA, 33 bp, Homo sapien
catgctgatgtaatgggaattctggagtccatg

SEQ ID NO: 913151 - DNA, 33 bp, Homo sapien
ttaagagtgcagctgcaaacagagacaaccaag

SEQ ID NO: 913152 - DNA, 33 bp, Homo sapien
ttaagagtgcagctgcgaacagagacaaccaag

SEQ ID NO: 913153 - DNA, 33 bp, Homo sapien
gttcccactgactacaactaaagaaagaagact

SEQ ID NO: 913154 - DNA, 33 bp, Homo sapien
gttcccactgactacagctaaagaaagaagact

SEQ ID NO: 913155 - DNA, 33 bp, Homo sapien
gatggtaagctctgaactgaaatagtggagaag

SEQ ID NO: 913156 - DNA, 33 bp, Homo sapien
gatggtaagctctgaagtgaaatagtggagaag

SEQ ID NO: 913157 - DNA, 33 bp, Homo sapien
gaagattctatgaccccctcaaggtgcaagtga

SEQ ID NO: 913158 - DNA, 33 bp, Homo sapien
gaagattctatgaccctctcaaggtgcaagtga

SEQ ID NO: 913159 - DNA, 33 bp, Homo sapien
ctggatcagttacccaatctaatagagctgttt

SEQ ID NO: 913160 - DNA, 33 bp, Homo sapien
ctggatcagttacccagtctaatagagctgttt

SEQ ID NO: 913161 - DNA, 33 bp, Homo sapien
tatttaaaagcaatcacacatacaggagaaata

SEQ ID NO: 913162 - DNA, 33 bp, Homo sapien
tatttaaaagcaatcatacatacaggagaaata

SEQ ID NO: 913163 - DNA, 33 bp, Homo sapien
ataaaattggaattcacagttctgaaatcaaac

SEQ ID NO: 913164 - DNA, 33 bp, Homo sapien
ataaaattggaattcatagttctgaaatcaaac

SEQ ID NO: 913165 - DNA, 33 bp, Homo sapien
gaattcttcaaggatgcaaagctcacaatggct

SEQ ID NO: 913166 - DNA, 33 bp, Homo sapien
gaattcttcaaggatgtaaagctcacaatggct

SEQ ID NO: 913167 - DNA, 33 bp, Homo sapien
gtagacatgggcttcaagaggaggctgcctaac

SEQ ID NO: 913168 - DNA, 33 bp, Homo sapien
gtagacatgggcttcaggaggaggctgcctaac

SEQ ID NO: 913169 - DNA, 33 bp, Homo sapien
gttaaaagtttgttccagcggagcgaggtggct

SEQ ID NO: 913170 - DNA, 33 bp, Homo sapien
gttaaaagtttgttccggcggagcgaggtggct

SEQ ID NO: 913171 - DNA, 33 bp, Homo sapien
aagagagattgaaatacgtggagcaaaagcaaa

SEQ ID NO: 913172 - DNA, 33 bp, Homo sapien
aagagagattgaaatatgtggagcaaaagcaaa

SEQ ID NO: 913173 - DNA, 33 bp, Homo sapien
cagtcctggtagtcatcatcgttaccataaagg

SEQ ID NO: 913174 - DNA, 33 bp, Homo sapien
cagtcctggtagtcatgatcgttaccataaagg

SEQ ID NO: 913175 - DNA, 33 bp, Homo sapien
cttgaagaccatgaagacctgtaataaacacaa

SEQ ID NO: 913176 - DNA, 33 bp, Homo sapien
cttgaagaccatgaaggcctgtaataaacacaa

SEQ ID NO: 913177 - DNA, 33 bp, Homo sapien
tataattcacaaagccactagtgttggtgaaga

SEQ ID NO: 913178 - DNA, 33 bp, Homo sapien
tataattcacaaagccgctagtgttggtgaaga

SEQ ID NO: 913179 - DNA, 33 bp, Homo sapien
attgagaccatcgataccctggaagacaccatc

SEQ ID NO: 913180 - DNA, 33 bp, Homo sapien
attgagaccatcgatatcctggaagacaccatc

SEQ ID NO: 913181 - DNA, 33 bp, Homo sapien
gacacgataacccgcaagctttggagccttcta

SEQ ID NO: 913182 - DNA, 33 bp, Homo sapien
gacacgataacccgcaggctttggagccttcta

SEQ ID NO: 913183 - DNA, 33 bp, Homo sapien
aatatatgatccttacccattcagactcatcat

SEQ ID NO: 913184 - DNA, 33 bp, Homo sapien
aatatatgatccttacgcattcagactcatcat

SEQ ID NO: 913185 - DNA, 33 bp, Homo sapien
aaactttactcctccaactcatgcaacacgtgc

SEQ ID NO: 913186 - DNA, 33 bp, Homo sapien
aaactttactcctccatctcatgcaacacgtgc

SEQ ID NO: 913187 - DNA, 33 bp, Homo sapien
actaaaacctaagagagagttggatgaaaggtg

SEQ ID NO: 913188 - DNA, 33 bp, Homo sapien
actaaaacctaagagatagttggatgaaaggtg

SEQ ID NO: 913189 - DNA, 33 bp, Homo sapien
cagatgccaaggagtccctaatctccgtatatt

SEQ ID NO: 913190 - DNA, 33 bp, Homo sapien
cagatgccaaggagtctctaatctccgtatatt

SEQ ID NO: 913191 - DNA, 33 bp, Homo sapien
catgtttttgtaatagcaattatgagtttgttt

SEQ ID NO: 913192 - DNA, 33 bp, Homo sapien
catgtttttgtaataggaattatgagtttgttt

SEQ ID NO: 913193 - DNA, 33 bp, Homo sapien
tttcagtacggtattgcagaaattacatgagat

SEQ ID NO: 913194 - DNA, 33 bp, Homo sapien
tttcagtacggtattggagaaattacatgagat

SEQ ID NO: 913195 - DNA, 33 bp, Homo sapien
gaaaatgaactaacttcaaatggtccccaatgg

SEQ ID NO: 913196 - DNA, 33 bp, Homo sapien
gaaaatgaactaacttgaaatggtccccaatgg

SEQ ID NO: 913197 - DNA, 33 bp, Homo sapien
aaaaaattatatgaagaatgccaccacaataaa

SEQ ID NO: 913198 - DNA, 33 bp, Homo sapien
aaaaaattatatgaaggatgccaccacaataaa

SEQ ID NO: 913199 - DNA, 33 bp, Homo sapien
ggcagtgtttctcgccagcagctgcacagccag

SEQ ID NO: 913200 - DNA, 33 bp, Homo sapien
ggcagtgtttctcgccggcagctgcacagccag

SEQ ID NO: 913201 - DNA, 33 bp, Homo sapien
aattaagttgccatcccatagtctattttcatt

SEQ ID NO: 913202 - DNA, 33 bp, Homo sapien
aattaagttgccatcctatagtctattttcatt

SEQ ID NO: 913203 - DNA, 33 bp, Homo sapien
catttcaacatgaaaactggtttcacgacaata

SEQ ID NO: 913204 - DNA, 33 bp, Homo sapien
catttcaacatgaaaattggtttcacgacaata

SEQ ID NO: 913205 - DNA, 33 bp, Homo sapien
tcatatcatcacagcaaatagttattgagcatc

SEQ ID NO: 913206 - DNA, 33 bp, Homo sapien
tcatatcatcacagcatatagttattgagcatc

SEQ ID NO: 913207 - DNA, 33 bp, Homo sapien
agcatcccttttaccaagaaagcctcaggctag

SEQ ID NO: 913208 - DNA, 33 bp, Homo sapien
agcatcccttttaccaggaaagcctcaggctag

SEQ ID NO: 913209 - DNA, 33 bp, Homo sapien
tctgtattccctgacacggtgattaatcatcta

SEQ ID NO: 913210 - DNA, 33 bp, Homo sapien
tctgtattccctgacatggtgattaatcatcta

SEQ ID NO: 913211 - DNA, 33 bp, Homo sapien
tttctggccattaacacagattgcataaatttg

SEQ ID NO: 913212 - DNA, 33 bp, Homo sapien
tttctggccattaacatagattgcataaatttg

SEQ ID NO: 913213 - DNA, 33 bp, Homo sapien
tttttcaaggcttttcaagagtaaaaatgaagt

SEQ ID NO: 913214 - DNA, 33 bp, Homo sapien
tttttcaaggcttttcgagagtaaaaatgaagt

SEQ ID NO: 913215 - DNA, 33 bp, Homo sapien
aatatatcaaaaggtacataacacatcatgact

SEQ ID NO: 913216 - DNA, 33 bp, Homo sapien
aatatatcaaaaggtatataacacatcatgact

SEQ ID NO: 913217 - DNA, 33 bp, Homo sapien
atttgaaaggatgaggaaggtgtgtttgcattc

SEQ ID NO: 913218 - DNA, 33 bp, Homo sapien
atttgaaaggatgagggaggtgtgtttgcattc

SEQ ID NO: 913219 - DNA, 33 bp, Homo sapien
tgtcactaaacacttacgtctgcatcggagttt

SEQ ID NO: 913220 - DNA, 33 bp, Homo sapien
tgtcactaaacacttatgtctgcatcggagttt

SEQ ID NO: 913221 - DNA, 33 bp, Homo sapien
atccagttgtcaagcaaaagtaatatggtcagc

SEQ ID NO: 913222 - DNA, 33 bp, Homo sapien
atccagttgtcaagcagaagtaatatggtcagc

SEQ ID NO: 913223 - DNA, 33 bp, Homo sapien
tgtcaatttcctatcaggataatccacaacgat

SEQ ID NO: 913224 - DNA, 33 bp, Homo sapien
tgtcaatttcctatcatgataatccacaacgat

SEQ ID NO: 913225 - DNA, 33 bp, Homo sapien
attttgtttctcaagcaacaaaacatttggtct

SEQ ID NO: 913226 - DNA, 33 bp, Homo sapien
attttgtttctcaagcgacaaaacatttggtct

SEQ ID NO: 913227 - DNA, 33 bp, Homo sapien
catcttgaaatttacaatgcacatcagctggtt

SEQ ID NO: 913228 - DNA, 33 bp, Homo sapien
catcttgaaatttacagtgcacatcagctggtt

SEQ ID NO: 913229 - DNA, 33 bp, Homo sapien
ttgccgtacaatagtcactttgagtttcttggt

SEQ ID NO: 913230 - DNA, 33 bp, Homo sapien
ttgccgtacaatagtcgctttgagtttcttggt

SEQ ID NO: 913231 - DNA, 33 bp, Homo sapien
acagtctgtagcttccacctaaattgctacgtt

SEQ ID NO: 913232 - DNA, 33 bp, Homo sapien
acagtctgtagcttccgcctaaattgctacgtt

SEQ ID NO: 913233 - DNA, 33 bp, Homo sapien
cttgaaacctagaaataataaactgagtgctca

SEQ ID NO: 913234 - DNA, 33 bp, Homo sapien
cttgaaacctagaaatgataaactgagtgctca

SEQ ID NO: 913235 - DNA, 33 bp, Homo sapien
tgtaagtcctattcaacgtaagaatatcataaa

SEQ ID NO: 913236 - DNA, 33 bp, Homo sapien
tgtaagtcctattcaatgtaagaatatcataaa

SEQ ID NO: 913237 - DNA, 33 bp, Homo sapien
agaatccagagacaaacggccatgtaggattcc

SEQ ID NO: 913238 - DNA, 33 bp, Homo sapien
agaatccagagacaaagggccatgtaggattcc

SEQ ID NO: 913239 - DNA, 33 bp, Homo sapien
ccacctctgttgaacactaaagacaaaggagag

SEQ ID NO: 913240 - DNA, 33 bp, Homo sapien
ccacctctgttgaacattaaagacaaaggagag

SEQ ID NO: 913241 - DNA, 33 bp, Homo sapien
gttctctatgtctagaactcaggagtgagaagg

SEQ ID NO: 913242 - DNA, 33 bp, Homo sapien
gttctctatgtctagacctcaggagtgagaagg

SEQ ID NO: 913243 - DNA, 33 bp, Homo sapien
caacaaatcacaataaaaggctactgagctggg

SEQ ID NO: 913244 - DNA, 33 bp, Homo sapien
caacaaatcacaataacaggctactgagctggg

SEQ ID NO: 913245 - DNA, 33 bp, Homo sapien
aggtaattgagaaatacaatggctgagtgctta

SEQ ID NO: 913246 - DNA, 33 bp, Homo sapien
aggtaattgagaaatagaatggctgagtgctta

SEQ ID NO: 913247 - DNA, 33 bp, Homo sapien
tttacttaaaccttgcaactattgtacaacatc

SEQ ID NO: 913248 - DNA, 33 bp, Homo sapien
tttacttaaaccttgcgactattgtacaacatc

SEQ ID NO: 913249 - DNA, 33 bp, Homo sapien
aaatatataaataaggcagccaacacttgtgga

SEQ ID NO: 913250 - DNA, 33 bp, Homo sapien
aaatatataaataaggtagccaacacttgtgga

SEQ ID NO: 913251 - DNA, 33 bp, Homo sapien
ttaccacaaagatagacgcagtttgcaggtaat

SEQ ID NO: 913252 - DNA, 33 bp, Homo sapien
ttaccacaaagatagaggcagtttgcaggtaat

SEQ ID NO: 913253 - DNA, 33 bp, Homo sapien
taaagaaatagctccacagtgtaaaaatcattt

SEQ ID NO: 913254 - DNA, 33 bp, Homo sapien
taaagaaatagctccatagtgtaaaaatcattt

SEQ ID NO: 913255 - DNA, 33 bp, Homo sapien
agtattttatatgttcactttcagccttacaag

SEQ ID NO: 913256 - DNA, 33 bp, Homo sapien
agtattttatatgttctctttcagccttacaag

SEQ ID NO: 913257 - DNA, 33 bp, Homo sapien
aagggagacagggagaaacgacagggccaaaga

SEQ ID NO: 913258 - DNA, 33 bp, Homo sapien
aagggagacagggagagacgacagggccaaaga

SEQ ID NO: 913259 - DNA, 33 bp, Homo sapien
tctttagtttgtctccaaacaaaagcagcccat

SEQ ID NO: 913260 - DNA, 33 bp, Homo sapien
tctttagtttgtctccgaacaaaagcagcccat

SEQ ID NO: 913261 - DNA, 33 bp, Homo sapien
agagtgccctcttatccgacaaaagtaatttcc

SEQ ID NO: 913262 - DNA, 33 bp, Homo sapien
agagtgccctcttatctgacaaaagtaatttcc

SEQ ID NO: 913263 - DNA, 33 bp, Homo sapien
gctctcatttcaaaataagggactggccttaaa

SEQ ID NO: 913264 - DNA, 33 bp, Homo sapien
gctctcatttcaaaattagggactggccttaaa

SEQ ID NO: 913265 - DNA, 33 bp, Homo sapien
tcctgtccactttgagacatttagtagtattct

SEQ ID NO: 913266 - DNA, 33 bp, Homo sapien
tcctgtccactttgaggcatttagtagtattct

SEQ ID NO: 913267 - DNA, 33 bp, Homo sapien
cccacccagatagttacggagaaagctacaagg

SEQ ID NO: 913268 - DNA, 33 bp, Homo sapien
cccacccagatagttatggagaaagctacaagg

SEQ ID NO: 913269 - DNA, 33 bp, Homo sapien
tctaatcaggtcagtcagaactctgcgatgtct

SEQ ID NO: 913270 - DNA, 33 bp, Homo sapien
tctaatcaggtcagtcggaactctgcgatgtct

SEQ ID NO: 913271 - DNA, 33 bp, Homo sapien
ttgctccttcaccggcaagaagtcaagctcctt

SEQ ID NO: 913272 - DNA, 33 bp, Homo sapien
ttgctccttcaccggcgagaagtcaagctcctt

SEQ ID NO: 913273 - DNA, 33 bp, Homo sapien
agtgaacttcctttaaaatcggagacagctact

SEQ ID NO: 913274 - DNA, 33 bp, Homo sapien
agtgaacttcctttaatatcggagacagctact

SEQ ID NO: 913275 - DNA, 33 bp, Homo sapien
aagtgttgtagcagatcaggatctacagacaga

SEQ ID NO: 913276 - DNA, 33 bp, Homo sapien
aagtgttgtagcagattaggatctacagacaga

SEQ ID NO: 913277 - DNA, 33 bp, Homo sapien
gttcgtgcagctactacgtgaattgtggttggg

SEQ ID NO: 913278 - DNA, 33 bp, Homo sapien
gttcgtgcagctactatgtgaattgtggttggg

SEQ ID NO: 913279 - DNA, 33 bp, Homo sapien
tccagctaagacactacaaagaccacctcttaa

SEQ ID NO: 913280 - DNA, 33 bp, Homo sapien
tccagctaagacactagaaagaccacctcttaa

SEQ ID NO: 913281 - DNA, 33 bp, Homo sapien
ttcctgctgtctttgcaccctatgccacagaat

SEQ ID NO: 913282 - DNA, 33 bp, Homo sapien
ttcctgctgtctttgcgccctatgccacagaat

SEQ ID NO: 913283 - DNA, 33 bp, Homo sapien
aaactaaattcacctccatctgaagtttacctc

SEQ ID NO: 913284 - DNA, 33 bp, Homo sapien
aaactaaattcacctctatctgaagtttacctc

SEQ ID NO: 913285 - DNA, 33 bp, Homo sapien
gacataaacctgggaacgtgatgactaaattca

SEQ ID NO: 913286 - DNA, 33 bp, Homo sapien
gacataaacctgggaatgtgatgactaaattca

SEQ ID NO: 913287 - DNA, 33 bp, Homo sapien
agatgattctgatctgaacaggattcaaagcac

SEQ ID NO: 913288 - DNA, 33 bp, Homo sapien
agatgattctgatctggacaggattcaaagcac

SEQ ID NO: 913289 - DNA, 33 bp, Homo sapien
agtgtcattttaaaaaaagcagtaatatttcta

SEQ ID NO: 913290 - DNA, 33 bp, Homo sapien
agtgtcattttaaaaatagcagtaatatttcta

SEQ ID NO: 913291 - DNA, 33 bp, Homo sapien
ttaaagcatccttctacgccaatagaaaaaagc

SEQ ID NO: 913292 - DNA, 33 bp, Homo sapien
ttaaagcatccttctaggccaatagaaaaaagc

SEQ ID NO: 913293 - DNA, 33 bp, Homo sapien
caggagtcaatcacaaagagtgggtagagaaca

SEQ ID NO: 913294 - DNA, 33 bp, Homo sapien
caggagtcaatcacaaggagtgggtagagaaca

SEQ ID NO: 913295 - DNA, 33 bp, Homo sapien
ctagtggggaagaaaccatgagcaatggaacga

SEQ ID NO: 913296 - DNA, 33 bp, Homo sapien
ctagtggggaagaaactatgagcaatggaacga

SEQ ID NO: 913297 - DNA, 33 bp, Homo sapien
cggaataacagagtcaaatagtacagggataag

SEQ ID NO: 913298 - DNA, 33 bp, Homo sapien
cggaataacagagtcagatagtacagggataag

SEQ ID NO: 913299 - DNA, 33 bp, Homo sapien
tgcatactgggagttacgatccatgagtagcta

SEQ ID NO: 913300 - DNA, 33 bp, Homo sapien
tgcatactgggagttatgatccatgagtagcta

SEQ ID NO: 913301 - DNA, 33 bp, Homo sapien
aaatcatcttgttttcactaaaaaaatccactt

SEQ ID NO: 913302 - DNA, 33 bp, Homo sapien
aaatcatcttgttttcgctaaaaaaatccactt

SEQ ID NO: 913303 - DNA, 33 bp, Homo sapien
tctggtggatgaaatcactccaagtaaagtgct

SEQ ID NO: 913304 - DNA, 33 bp, Homo sapien
tctggtggatgaaatccctccaagtaaagtgct

SEQ ID NO: 913305 - DNA, 33 bp, Homo sapien
tagtttgctcaggttaccgtaacaaaagactac

SEQ ID NO: 913306 - DNA, 33 bp, Homo sapien
tagtttgctcaggttatcgtaacaaaagactac

SEQ ID NO: 913307 - DNA, 33 bp, Homo sapien
catggcaacaccgagaagttatcacccctttcc

SEQ ID NO: 913308 - DNA, 33 bp, Homo sapien
catggcaacaccgagacgttatcacccctttcc

SEQ ID NO: 913309 - DNA, 33 bp, Homo sapien
taatgcctgagtattccatgcctggttcttcag

SEQ ID NO: 913310 - DNA, 33 bp, Homo sapien
taatgcctgagtattctatgcctggttcttcag

SEQ ID NO: 913311 - DNA, 33 bp, Homo sapien
gagtttagcctccatcccggtaattggtaaaag

SEQ ID NO: 913312 - DNA, 33 bp, Homo sapien
gagtttagcctccatctcggtaattggtaaaag

SEQ ID NO: 913313 - DNA, 33 bp, Homo sapien
tgtcctggttatcgatgactgcaaagcaaacca

SEQ ID NO: 913314 - DNA, 33 bp, Homo sapien
tgtcctggttatcgattactgcaaagcaaacca

SEQ ID NO: 913315 - DNA, 33 bp, Homo sapien
aggaaccagggtttgccgagttagaaaggatta

SEQ ID NO: 913316 - DNA, 33 bp, Homo sapien
aggaaccagggtttgctgagttagaaaggatta

SEQ ID NO: 913317 - DNA, 33 bp, Homo sapien
agaaaccagattttaccgccctagatttgaaag

SEQ ID NO: 913318 - DNA, 33 bp, Homo sapien
agaaaccagattttactgccctagatttgaaag

SEQ ID NO: 913319 - DNA, 33 bp, Homo sapien
gaacacatgtatgcaaaggactttatggtagaa

SEQ ID NO: 913320 - DNA, 33 bp, Homo sapien
gaacacatgtatgcaatggactttatggtagaa

SEQ ID NO: 913321 - DNA, 33 bp, Homo sapien
actaataaagtaaatgcaggccaaaatcaaatt

SEQ ID NO: 913322 - DNA, 33 bp, Homo sapien
actaataaagtaaatggaggccaaaatcaaatt

SEQ ID NO: 913323 - DNA, 33 bp, Homo sapien
ggtaaacttctggtaaatgatgcgatcaagtga

SEQ ID NO: 913324 - DNA, 33 bp, Homo sapien
ggtaaacttctggtaagtgatgcgatcaagtga

SEQ ID NO: 913325 - DNA, 33 bp, Homo sapien
catgtttgagtctttccatgaatatatgctttt

SEQ ID NO: 913326 - DNA, 33 bp, Homo sapien
catgtttgagtctttctatgaatatatgctttt

SEQ ID NO: 913327 - DNA, 33 bp, Homo sapien
gtcccaaatggatgggaaaaacttctgttgctt

SEQ ID NO: 913328 - DNA, 33 bp, Homo sapien
gtcccaaatggatggggaaaacttctgttgctt

SEQ ID NO: 913329 - DNA, 33 bp, Homo sapien
aaccaagaactctataaccagtggaaatatcct

SEQ ID NO: 913330 - DNA, 33 bp, Homo sapien
aaccaagaactctatatccagtggaaatatcct

SEQ ID NO: 913331 - DNA, 33 bp, Homo sapien
tgttttatctgaaagcccaccaccaaacacaag

SEQ ID NO: 913332 - DNA, 33 bp, Homo sapien
tgttttatctgaaagctcaccaccaaacacaag

SEQ ID NO: 913333 - DNA, 33 bp, Homo sapien
gaaaaggcaaaactatcagggataaagggaaag

SEQ ID NO: 913334 - DNA, 33 bp, Homo sapien
gaaaaggcaaaactatgagggataaagggaaag

SEQ ID NO: 913335 - DNA, 33 bp, Homo sapien
ttgtttactggaaaccaccacttcagtactgca

SEQ ID NO: 913336 - DNA, 33 bp, Homo sapien
ttgtttactggaaacccccacttcagtactgca

SEQ ID NO: 913337 - DNA, 33 bp, Homo sapien
gtaccgttatatcctaaaatgagatccaagcac

SEQ ID NO: 913338 - DNA, 33 bp, Homo sapien
gtaccgttatatcctataatgagatccaagcac

SEQ ID NO: 913339 - DNA, 33 bp, Homo sapien
cctgtcataaagcaagaaggacactgcatgaac

SEQ ID NO: 913340 - DNA, 33 bp, Homo sapien
cctgtcataaagcaaggaggacactgcatgaac

SEQ ID NO: 913341 - DNA, 33 bp, Homo sapien
gatgtcgaaaaccgagaaggaaaagatttggtc

SEQ ID NO: 913342 - DNA, 33 bp, Homo sapien
gatgtcgaaaaccgaggaggaaaagatttggtc

SEQ ID NO: 913343 - DNA, 33 bp, Homo sapien
caaagtcagctcttagaagatcaggctcaaaaa

SEQ ID NO: 913344 - DNA, 33 bp, Homo sapien
caaagtcagctcttaggagatcaggctcaaaaa

SEQ ID NO: 913345 - DNA, 33 bp, Homo sapien
aagttaaacaggagaaacaagtgtgtcattaca

SEQ ID NO: 913346 - DNA, 33 bp, Homo sapien
aagttaaacaggagaagcaagtgtgtcattaca

SEQ ID NO: 913347 - DNA, 33 bp, Homo sapien
atggaggtctgtcttacgtgcagatgccaacat

SEQ ID NO: 913348 - DNA, 33 bp, Homo sapien
atggaggtctgtcttatgtgcagatgccaacat

SEQ ID NO: 913349 - DNA, 33 bp, Homo sapien
ggctgaccggcaaggacacaagtggctgagcag

SEQ ID NO: 913350 - DNA, 33 bp, Homo sapien
ggctgaccggcaaggatacaagtggctgagcag

SEQ ID NO: 913351 - DNA, 33 bp, Homo sapien
cctgcagactgtggacagctaagtgttaacggc

SEQ ID NO: 913352 - DNA, 33 bp, Homo sapien
cctgcagactgtggacggctaagtgttaacggc

SEQ ID NO: 913353 - DNA, 33 bp, Homo sapien
ttaggcacactaaacccacccagcatttcaaga

SEQ ID NO: 913354 - DNA, 33 bp, Homo sapien
ttaggcacactaaacctacccagcatttcaaga

SEQ ID NO: 913355 - DNA, 33 bp, Homo sapien
aattttaacaatttaacagtgtggtacagcttt

SEQ ID NO: 913356 - DNA, 33 bp, Homo sapien
aattttaacaatttaagagtgtggtacagcttt

SEQ ID NO: 913357 - DNA, 33 bp, Homo sapien
caagcgtgggcccaaacaagcagcctcagcatc

SEQ ID NO: 913358 - DNA, 33 bp, Homo sapien
caagcgtgggcccaaataagcagcctcagcatc

SEQ ID NO: 913359 - DNA, 33 bp, Homo sapien
atctctgctctgagaaccatgcaaagaatagag

SEQ ID NO: 913360 - DNA, 33 bp, Homo sapien
atctctgctctgagaatcatgcaaagaatagag

SEQ ID NO: 913361 - DNA, 33 bp, Homo sapien
tactgcacatatgtaactctcacaataacccat

SEQ ID NO: 913362 - DNA, 33 bp, Homo sapien
tactgcacatatgtaattctcacaataacccat

SEQ ID NO: 913363 - DNA, 33 bp, Homo sapien
atctttctgatgcataactttaattgttcctct

SEQ ID NO: 913364 - DNA, 33 bp, Homo sapien
atctttctgatgcatagctttaattgttcctct

SEQ ID NO: 913365 - DNA, 33 bp, Homo sapien
ctcaatagctcctttcgctttcatgttctcagg

SEQ ID NO: 913366 - DNA, 33 bp, Homo sapien
ctcaatagctcctttctctttcatgttctcagg

SEQ ID NO: 913367 - DNA, 33 bp, Homo sapien
tctggacctttggtgccatttctgactggtgta

SEQ ID NO: 913368 - DNA, 33 bp, Homo sapien
tctggacctttggtgcgatttctgactggtgta

SEQ ID NO: 913369 - DNA, 33 bp, Homo sapien
tcctcggttttcaggaaaagttaggctagaaac

SEQ ID NO: 913370 - DNA, 33 bp, Homo sapien
tcctcggttttcaggagaagttaggctagaaac

SEQ ID NO: 913371 - DNA, 33 bp, Homo sapien
tggtgtaacatttctccctatgaatttccttct

SEQ ID NO: 913372 - DNA, 33 bp, Homo sapien
tggtgtaacatttctcgctatgaatttccttct

SEQ ID NO: 913373 - DNA, 33 bp, Homo sapien
agagcttccagatatacgaagcaaacactaaca

SEQ ID NO: 913374 - DNA, 33 bp, Homo sapien
agagcttccagatatatgaagcaaacactaaca

SEQ ID NO: 913375 - DNA, 33 bp, Homo sapien
cagaaaggcaaagaaaaggattctcctctggac

SEQ ID NO: 913376 - DNA, 33 bp, Homo sapien
cagaaaggcaaagaaatggattctcctctggac

SEQ ID NO: 913377 - DNA, 33 bp, Homo sapien
tgatccagcactgtatcaggggttatggcaaca

SEQ ID NO: 913378 - DNA, 33 bp, Homo sapien
tgatccagcactgtattaggggttatggcaaca

SEQ ID NO: 913379 - DNA, 33 bp, Homo sapien
tcagatggggattaggaaacgccattctcacca

SEQ ID NO: 913380 - DNA, 33 bp, Homo sapien
tcagatggggattagggaacgccattctcacca

SEQ ID NO: 913381 - DNA, 33 bp, Homo sapien
ctctgtgaatatatgaacttaacaacgtatgcc

SEQ ID NO: 913382 - DNA, 33 bp, Homo sapien
ctctgtgaatatatgaccttaacaacgtatgcc

SEQ ID NO: 913383 - DNA, 33 bp, Homo sapien
atctgacaataatagaaccacttcgactttctt

SEQ ID NO: 913384 - DNA, 33 bp, Homo sapien
atctgacaataatagagccacttcgactttctt

SEQ ID NO: 913385 - DNA, 33 bp, Homo sapien
agagaattcattaaacagagttggagctgaaac

SEQ ID NO: 913386 - DNA, 33 bp, Homo sapien
agagaattcattaaacggagttggagctgaaac

SEQ ID NO: 913387 - DNA, 33 bp, Homo sapien
atccaaaaagtagatacactccagatgtccatt

SEQ ID NO: 913388 - DNA, 33 bp, Homo sapien
atccaaaaagtagatatactccagatgtccatt

SEQ ID NO: 913389 - DNA, 33 bp, Homo sapien
gattaagaagttaatacgctttgttctgaactg

SEQ ID NO: 913390 - DNA, 33 bp, Homo sapien
gattaagaagttaatatgctttgttctgaactg

SEQ ID NO: 913391 - DNA, 33 bp, Homo sapien
aagctaccttggttgcacttccatcttatgggc

SEQ ID NO: 913392 - DNA, 33 bp, Homo sapien
aagctaccttggttgctcttccatcttatgggc

SEQ ID NO: 913393 - DNA, 33 bp, Homo sapien
gtaagctacaagatcacagtgaactattcctcc

SEQ ID NO: 913394 - DNA, 33 bp, Homo sapien
gtaagctacaagatcagagtgaactattcctcc

SEQ ID NO: 913395 - DNA, 33 bp, Homo sapien
ttaaggatgaaggatgaataatggcattatcag

SEQ ID NO: 913396 - DNA, 33 bp, Homo sapien
ttaaggatgaaggatgcataatggcattatcag

SEQ ID NO: 913397 - DNA, 33 bp, Homo sapien
gccacccagccaacatcataactcttggtgggg

SEQ ID NO: 913398 - DNA, 33 bp, Homo sapien
gccacccagccaacattataactcttggtgggg

SEQ ID NO: 913399 - DNA, 33 bp, Homo sapien
atgcatctcaaaaataggttgagtttaagaagc

SEQ ID NO: 913400 - DNA, 33 bp, Homo sapien
atgcatctcaaaaatatgttgagtttaagaagc

SEQ ID NO: 913401 - DNA, 33 bp, Homo sapien
gattgggagccactcaagggtgaagctttgcag

SEQ ID NO: 913402 - DNA, 33 bp, Homo sapien
gattgggagccactcaggggtgaagctttgcag

SEQ ID NO: 913403 - DNA, 33 bp, Homo sapien
tgccagtcgactcccaataaagcctttcttttt

SEQ ID NO: 913404 - DNA, 33 bp, Homo sapien
tgccagtcgactcccagtaaagcctttcttttt

SEQ ID NO: 913405 - DNA, 33 bp, Homo sapien
agtattggcttctatacacatccagcagtgagc

SEQ ID NO: 913406 - DNA, 33 bp, Homo sapien
agtattggcttctatatacatccagcagtgagc

SEQ ID NO: 913407 - DNA, 33 bp, Homo sapien
ggagccttggacttaaaaacaatagaacaggac

SEQ ID NO: 913408 - DNA, 33 bp, Homo sapien
ggagccttggacttaagaacaatagaacaggac

SEQ ID NO: 913409 - DNA, 33 bp, Homo sapien
caactgtgaaagggcacgacggagtgggaacaa

SEQ ID NO: 913410 - DNA, 33 bp, Homo sapien
caactgtgaaagggcatgacggagtgggaacaa

SEQ ID NO: 913411 - DNA, 33 bp, Homo sapien
actttacttctagaaaagaagcatgggatagtc

SEQ ID NO: 913412 - DNA, 33 bp, Homo sapien
actttacttctagaaaggaagcatgggatagtc

SEQ ID NO: 913413 - DNA, 33 bp, Homo sapien; identical to SEQ ID NO: 913411

SEQ ID NO: 913414 - DNA, 33 bp, Homo sapien; identical to SEQ ID NO: 913412

SEQ ID NO: 913415 - DNA, 33 bp, Homo sapien
acggccgagcacttcaaaaacccagctgtagag

SEQ ID NO: 913416 - DNA, 33 bp, Homo sapien
acggccgagcacttcagaaacccagctgtagag

SEQ ID NO: 913417 - DNA, 33 bp, Homo sapien
tccttctaggcttccgcccacatcctccctgta

SEQ ID NO: 913418 - DNA, 33 bp, Homo sapien
tccttctaggcttccgtccacatcctccctgta

SEQ ID NO: 913419 - DNA, 33 bp, Homo sapien
ggaacaggtatgggaacctctgatgtataacca

SEQ ID NO: 913420 - DNA, 33 bp, Homo sapien
ggaacaggtatgggaatctctgatgtataacca

SEQ ID NO: 913421 - DNA, 33 bp, Homo sapien
catggccttcatctgacaataagagaatgcctt

SEQ ID NO: 913422 - DNA, 33 bp, Homo sapien
catggccttcatctgagaataagagaatgcctt

SEQ ID NO: 913423 - DNA, 33 bp, Homo sapien
cgatgcatggtgaagaagcccaaatgcgggggg

SEQ ID NO: 913424 - DNA, 33 bp, Homo sapien
cgatgcatggtgaagacgcccaaatgcgggggg

SEQ ID NO: 913425 - DNA, 33 bp, Homo sapien
tggaaacagccagggaaggagaccactgagagg

SEQ ID NO: 913426 - DNA, 33 bp, Homo sapien
tggaaacagccagggacggagaccactgagagg

SEQ ID NO: 913427 - DNA, 33 bp, Homo sapien
gggcttccaatggcaactcgagacattagttta

SEQ ID NO: 913428 - DNA, 33 bp, Homo sapien
gggcttccaatggcaattcgagacattagttta

SEQ ID NO: 913429 - DNA, 33 bp, Homo sapien
cacctgagaacacagcactcacctgaagggcca

SEQ ID NO: 913430 - DNA, 33 bp, Homo sapien
cacctgagaacacagcgctcacctgaagggcca

SEQ ID NO: 913431 - DNA, 33 bp, Homo sapien
atttccaggagggtcacgttgggaagtcaagaa

SEQ ID NO: 913432 - DNA, 33 bp, Homo sapien
atttccaggagggtcatgttgggaagtcaagaa

SEQ ID NO: 913433 - DNA, 33 bp, Homo sapien
tcctagcattttgaaacacagttctgggaaact

SEQ ID NO: 913434 - DNA, 33 bp, Homo sapien
tcctagcattttgaaatacagttctgggaaact

SEQ ID NO: 913435 - DNA, 33 bp, Homo sapien
ctttagctattttgacaggataattaaaaaaca

SEQ ID NO: 913436 - DNA, 33 bp, Homo sapien
ctttagctattttgactggataattaaaaaaca

SEQ ID NO: 913437 - DNA, 33 bp, Homo sapien
tcctaatccttggaacccaggaatttgttgggt

SEQ ID NO: 913438 - DNA, 33 bp, Homo sapien
tcctaatccttggaactcaggaatttgttgggt

SEQ ID NO: 913439 - DNA, 33 bp, Homo sapien
acccttcacacatttacggtgcccatctgacat

SEQ ID NO: 913440 - DNA, 33 bp, Homo sapien
acccttcacacatttatggtgcccatctgacat

SEQ ID NO: 913441 - DNA, 33 bp, Homo sapien
gaactccttgcaaagacgatatgaggctaagag

SEQ ID NO: 913442 - DNA, 33 bp, Homo sapien
gaactccttgcaaagatgatatgaggctaagag

SEQ ID NO: 913443 - DNA, 33 bp, Homo sapien
acctgaccaactgtcactctccaaagacactta

SEQ ID NO: 913444 - DNA, 33 bp, Homo sapien
acctgaccaactgtcattctccaaagacactta

SEQ ID NO: 913445 - DNA, 33 bp, Homo sapien
tgccaggcactttcgtaaatcaccttatttaag

SEQ ID NO: 913446 - DNA, 33 bp, Homo sapien
tgccaggcactttcgtgaatcaccttatttaag

SEQ ID NO: 913447 - DNA, 33 bp, Homo sapien
cgggtctcggggaataggtcccaaagggtgttt

SEQ ID NO: 913448 - DNA, 33 bp, Homo sapien
cgggtctcggggaatatgtcccaaagggtgttt

SEQ ID NO: 913449 - DNA, 33 bp, Homo sapien
gagaatcaaataaacacgtctctgagccttgat

SEQ ID NO: 913450 - DNA, 33 bp, Homo sapien
gagaatcaaataaacatgtctctgagccttgat

SEQ ID NO: 913451 - DNA, 33 bp, Homo sapien
ctctgcaagggatacaaacaaacatctctggac

SEQ ID NO: 913452 - DNA, 33 bp, Homo sapien
ctctgcaagggatacagacaaacatctctggac

SEQ ID NO: 913453 - DNA, 33 bp, Homo sapien
aaaaacaaaactgcagcaagtggagtttctttt

SEQ ID NO: 913454 - DNA, 33 bp, Homo sapien
aaaaacaaaactgcaggaagtggagtttctttt

SEQ ID NO: 913455 - DNA, 33 bp, Homo sapien
cacttctcaggctgacaattctgtctcatcaca

SEQ ID NO: 913456 - DNA, 33 bp, Homo sapien
cacttctcaggctgacgattctgtctcatcaca

SEQ ID NO: 913457 - DNA, 33 bp, Homo sapien
agaaatttacattcagacatatagtgaatttca

SEQ ID NO: 913458 - DNA, 33 bp, Homo sapien
agaaatttacattcaggcatatagtgaatttca

SEQ ID NO: 913459 - DNA, 33 bp, Homo sapien
ccacatttgggcacagaaggactcagacaggca

SEQ ID NO: 913460 - DNA, 33 bp, Homo sapien
ccacatttgggcacaggaggactcagacaggca

SEQ ID NO: 913461 - DNA, 33 bp, Homo sapien
cccactttgcaacctacgtggcagccatgaggg

SEQ ID NO: 913462 - DNA, 33 bp, Homo sapien
cccactttgcaacctatgtggcagccatgaggg

SEQ ID NO: 913463 - DNA, 33 bp, Homo sapien
tcttgctcttctatcactccaaggcttaggcat

SEQ ID NO: 913464 - DNA, 33 bp, Homo sapien
tcttgctcttctatcattccaaggcttaggcat

SEQ ID NO: 913465 - DNA, 33 bp, Homo sapien
ccgcgctcgacctcaacgcttttttcaacagtt

SEQ ID NO: 913466 - DNA, 33 bp, Homo sapien
ccgcgctcgacctcaatgcttttttcaacagtt

SEQ ID NO: 913467 - DNA, 33 bp, Homo sapien
tacagagcactgggcaacttttacttttcacca

SEQ ID NO: 913468 - DNA, 33 bp, Homo sapien
tacagagcactgggcagcttttacttttcacca

SEQ ID NO: 913469 - DNA, 33 bp, Homo sapien
aggataaaaaccaccaaatcagctcacccatct

SEQ ID NO: 913470 - DNA, 33 bp, Homo sapien
aggataaaaaccaccagatcagctcacccatct

SEQ ID NO: 913471 - DNA, 33 bp, Homo sapien
aaagtcagggttaagccatcctggccagcagaa

SEQ ID NO: 913472 - DNA, 33 bp, Homo sapien
aaagtcagggttaagctatcctggccagcagaa

SEQ ID NO: 913473 - DNA, 33 bp, Homo sapien
tatcaaggcctacccgcaacagaggagatgcag

SEQ ID NO: 913474 - DNA, 33 bp, Homo sapien
tatcaaggcctacccggaacagaggagatgcag

SEQ ID NO: 913475 - DNA, 33 bp, Homo sapien
agaaactcaaagaatacgaccatttgtctttca

SEQ ID NO: 913476 - DNA, 33 bp, Homo sapien
agaaactcaaagaataggaccatttgtctttca

SEQ ID NO: 913477 - DNA, 33 bp, Homo sapien
acacatccaaaatgcagagggcatccttccaga

SEQ ID NO: 913478 - DNA, 33 bp, Homo sapien
acacatccaaaatgcatagggcatccttccaga

SEQ ID NO: 913479 - DNA, 33 bp, Homo sapien
aggaagagaggataccagccactcatgagctgt

SEQ ID NO: 913480 - DNA, 33 bp, Homo sapien
aggaagagaggataccggccactcatgagctgt

SEQ ID NO: 913481 - DNA, 33 bp, Homo sapien
cttgacccagtacagaaagcccaggaaaggctc

SEQ ID NO: 913482 - DNA, 33 bp, Homo sapien
cttgacccagtacagacagcccaggaaaggctc

SEQ ID NO: 913483 - DNA, 33 bp, Homo sapien
acaatccaaaatcatacactcggccgggtgcag

SEQ ID NO: 913484 - DNA, 33 bp, Homo sapien
acaatccaaaatcatatactcggccgggtgcag

SEQ ID NO: 913485 - DNA, 33 bp, Homo sapien
caactctcataccacaatgcaaaaataatataa

SEQ ID NO: 913486 - DNA, 33 bp, Homo sapien
caactctcataccacagtgcaaaaataatataa

SEQ ID NO: 913487 - DNA, 33 bp, Homo sapien
gccctcatggttcttacagtttggtggcagaga

SEQ ID NO: 913488 - DNA, 33 bp, Homo sapien
gccctcatggttcttatagtttggtggcagaga

SEQ ID NO: 913489 - DNA, 33 bp, Homo sapien
ttatattacgtcattacgctctcacgctgttat

SEQ ID NO: 913490 - DNA, 33 bp, Homo sapien
ttatattacgtcattatgctctcacgctgttat

SEQ ID NO: 913491 - DNA, 33 bp, Homo sapien
gcagtgagctaggtcacaccactgtactccagt

SEQ ID NO: 913492 - DNA, 33 bp, Homo sapien
gcagtgagctaggtcataccactgtactccagt

SEQ ID NO: 913493 - DNA, 33 bp, Homo sapien
gagacagatggggtgcaataagcacagccacag

SEQ ID NO: 913494 - DNA, 33 bp, Homo sapien
gagacagatggggtgccataagcacagccacag

SEQ ID NO: 913495 - DNA, 33 bp, Homo sapien
ccaacgatcaccaggcagccaggtgcacccggt

SEQ ID NO: 913496 - DNA, 33 bp, Homo sapien
ccaacgatcaccaggcggccaggtgcacccggt

SEQ ID NO: 913497 - DNA, 33 bp, Homo sapien
ttctcgaggcagtgacacgggcaggaaccagct

SEQ ID NO: 913498 - DNA, 33 bp, Homo sapien
ttctcgaggcagtgacgcgggcaggaaccagct

SEQ ID NO: 913499 - DNA, 33 bp, Homo sapien
acttcccacccaagaacccctgcttgctttggt

SEQ ID NO: 913500 - DNA, 33 bp, Homo sapien
acttcccacccaagaatccctgcttgctttggt

SEQ ID NO: 913501 - DNA, 33 bp, Homo sapien
gtcccagggcttccagaaacaagaggctggaag

SEQ ID NO: 913502 - DNA, 33 bp, Homo sapien
gtcccagggcttccaggaacaagaggctggaag

SEQ ID NO: 913503 - DNA, 33 bp, Homo sapien
gccctgctggctaacaagattcagcagggcttt

SEQ ID NO: 913504 - DNA, 33 bp, Homo sapien
gccctgctggctaacaggattcagcagggcttt

SEQ ID NO: 913505 - DNA, 33 bp, Homo sapien
gataaaatagcatccaccagtagtttagtgagc

SEQ ID NO: 913506 - DNA, 33 bp, Homo sapien
gataaaatagcatccatcagtagtttagtgagc

SEQ ID NO: 913507 - DNA, 33 bp, Homo sapien
tctctgggcaagtagaagagggtcctttagttc

SEQ ID NO: 913508 - DNA, 33 bp, Homo sapien
tctctgggcaagtagaggagggtcctttagttc

SEQ ID NO: 913509 - DNA, 33 bp, Homo sapien
tataaaatgcctgaaacaagacacagcagattg

SEQ ID NO: 913510 - DNA, 33 bp, Homo sapien
tataaaatgcctgaaagaagacacagcagattg

SEQ ID NO: 913511 - DNA, 33 bp, Homo sapien
tcccatttgccatccaagtggagatcccaaata

SEQ ID NO: 913512 - DNA, 33 bp, Homo sapien
tcccatttgccatccaggtggagatcccaaata

SEQ ID NO: 913513 - DNA, 33 bp, Homo sapien
aatgcagagtgggcacaccataattatttgcaa

SEQ ID NO: 913514 - DNA, 33 bp, Homo sapien
aatgcagagtgggcacgccataattatttgcaa

SEQ ID NO: 913515 - DNA, 33 bp, Homo sapien
tatactgaactactgaactgtcctttatagcaa

SEQ ID NO: 913516 - DNA, 33 bp, Homo sapien
tatactgaactactgagctgtcctttatagcaa

SEQ ID NO: 913517 - DNA, 33 bp, Homo sapien
ttctgcttcaccttctcaaggtttgctgataaa

SEQ ID NO: 913518 - DNA, 33 bp, Homo sapien
ttctgcttcaccttctgaaggtttgctgataaa

SEQ ID NO: 913519 - DNA, 33 bp, Homo sapien
cactgtaataacaccccctctgcagcttcgggg

SEQ ID NO: 913520 - DNA, 33 bp, Homo sapien
cactgtaataacaccctctctgcagcttcgggg

SEQ ID NO: 913521 - DNA, 33 bp, Homo sapien
aaactggaaacgggcaaggcctattccaaagcc

SEQ ID NO: 913522 - DNA, 33 bp, Homo sapien
aaactggaaacgggcagggcctattccaaagcc

SEQ ID NO: 913523 - DNA, 33 bp, Homo sapien
gtcccagctactagggcagtgatgagttcctcc

SEQ ID NO: 913524 - DNA, 33 bp, Homo sapien
gtcccagctactagggtagtgatgagttcctcc

SEQ ID NO: 913525 - DNA, 33 bp, Homo sapien
cgtacatctcacctctaaattacttgggtcaca

SEQ ID NO: 913526 - DNA, 33 bp, Homo sapien
cgtacatctcacctctgaattacttgggtcaca

SEQ ID NO: 913527 - DNA, 33 bp, Homo sapien
ttggagtttggctcataaaggaccatcttcatt

SEQ ID NO: 913528 - DNA, 33 bp, Homo sapien
ttggagtttggctcatgaaggaccatcttcatt

SEQ ID NO: 913529 - DNA, 33 bp, Homo sapien
tgccagcatctggggaataatgaactagattta

SEQ ID NO: 913530 - DNA, 33 bp, Homo sapien
tgccagcatctggggagtaatgaactagattta

SEQ ID NO: 913531 - DNA, 33 bp, Homo sapien
tcctttaacaaatacaactctcctgcagggtgc

SEQ ID NO: 913532 - DNA, 33 bp, Homo sapien
tcctttaacaaatacagctctcctgcagggtgc

SEQ ID NO: 913533 - DNA, 33 bp, Homo sapien
agaacgtggggatctacgccgacaactctgtgt

SEQ ID NO: 913534 - DNA, 33 bp, Homo sapien
agaacgtggggatctatgccgacaactctgtgt

SEQ ID NO: 913535 - DNA, 33 bp, Homo sapien
cttgtgggcccccagaaccttccagcacttatc

SEQ ID NO: 913536 - DNA, 33 bp, Homo sapien
cttgtgggcccccagagccttccagcacttatc

SEQ ID NO: 913537 - DNA, 33 bp, Homo sapien
ctttaaagctgtccccaagtgagcatccttcac

SEQ ID NO: 913538 - DNA, 33 bp, Homo sapien
ctttaaagctgtccccgagtgagcatccttcac

SEQ ID NO: 913539 - DNA, 33 bp, Homo sapien
aataagcaatgacagaagcctcagttggcactg

SEQ ID NO: 913540 - DNA, 33 bp, Homo sapien
aataagcaatgacagaggcctcagttggcactg

SEQ ID NO: 913541 - DNA, 33 bp, Homo sapien
ccttgcaaagacctacagcgaaaatgatcatta

SEQ ID NO: 913542 - DNA, 33 bp, Homo sapien
ccttgcaaagacctacggcgaaaatgatcatta

SEQ ID NO: 913543 - DNA, 33 bp, Homo sapien
tccaccagagcaatagaaaaattagctgggtgc

SEQ ID NO: 913544 - DNA, 33 bp, Homo sapien
tccaccagagcaataggaaaattagctgggtgc

SEQ ID NO: 913545 - DNA, 33 bp, Homo sapien
acatctgaacataagacatctaggccagggcca

SEQ ID NO: 913546 - DNA, 33 bp, Homo sapien
acatctgaacataagatatctaggccagggcca

SEQ ID NO: 913547 - DNA, 33 bp, Homo sapien
ccaattgaggaagaagcaagcacctgtatcaat

SEQ ID NO: 913548 - DNA, 33 bp, Homo sapien
ccaattgaggaagaaggaagcacctgtatcaat

SEQ ID NO: 913549 - DNA, 33 bp, Homo sapien
gagtaactggaatgaacgtgaaatagaggaaac

SEQ ID NO: 913550 - DNA, 33 bp, Homo sapien
gagtaactggaatgaaggtgaaatagaggaaac

SEQ ID NO: 913551 - DNA, 33 bp, Homo sapien
gatgcattgccatgacaaagtgttggagttcct

SEQ ID NO: 913552 - DNA, 33 bp, Homo sapien
gatgcattgccatgacgaagtgttggagttcct

SEQ ID NO: 913553 - DNA, 33 bp, Homo sapien
caggcttgaatacacaagaccggtgacctaggc

SEQ ID NO: 913554 - DNA, 33 bp, Homo sapien
caggcttgaatacacatgaccggtgacctaggc

SEQ ID NO: 913555 - DNA, 33 bp, Homo sapien
aagcttcctcggagaaagtgagaccaggcaggg

SEQ ID NO: 913556 - DNA, 33 bp, Homo sapien
aagcttcctcggagaaggtgagaccaggcaggg

SEQ ID NO: 913557 - DNA, 33 bp, Homo sapien
agacccaaaactccagaaagttctatcgagact

SEQ ID NO: 913558 - DNA, 33 bp, Homo sapien
agacccaaaactccaggaagttctatcgagact

SEQ ID NO: 913559 - DNA, 33 bp, Homo sapien
cctgccacttccaggaaaaagagaaatccctgt

SEQ ID NO: 913560 - DNA, 33 bp, Homo sapien
cctgccacttccaggacaaagagaaatccctgt

SEQ ID NO: 913561 - DNA, 33 bp, Homo sapien
gagaaaatccttgaaaagtcactaagaatacac

SEQ ID NO: 913562 - DNA, 33 bp, Homo sapien
gagaaaatccttgaaacgtcactaagaatacac

SEQ ID NO: 913563 - DNA, 33 bp, Homo sapien
attttgaagaactgccaaacttttctgaagcag

SEQ ID NO: 913564 - DNA, 33 bp, Homo sapien
attttgaagaactgccgaacttttctgaagcag

SEQ ID NO: 913565 - DNA, 33 bp, Homo sapien
tcactttatttccccccaatcctggaccacttc

SEQ ID NO: 913566 - DNA, 33 bp, Homo sapien
tcactttatttcccccgaatcctggaccacttc

SEQ ID NO: 913567 - DNA, 33 bp, Homo sapien
ctccaatgaagacataataacaccctgtccctt

SEQ ID NO: 913568 - DNA, 33 bp, Homo sapien
ctccaatgaagacatattaacaccctgtccctt

SEQ ID NO: 913569 - DNA, 33 bp, Homo sapien
tgtagtctcaggaacgcacatgaggccaggccc

SEQ ID NO: 913570 - DNA, 33 bp, Homo sapien
tgtagtctcaggaacgtacatgaggccaggccc

SEQ ID NO: 913571 - DNA, 33 bp, Homo sapien
tttatttctttgacgacgggcagtaattcagag

SEQ ID NO: 913572 - DNA, 33 bp, Homo sapien
tttatttctttgacgatgggcagtaattcagag

SEQ ID NO: 913573 - DNA, 33 bp, Homo sapien
ttctctgtcagcgtaacggcaatgaacctggac

SEQ ID NO: 913574 - DNA, 33 bp, Homo sapien
ttctctgtcagcgtaatggcaatgaacctggac

SEQ ID NO: 913575 - DNA, 33 bp, Homo sapien
gttaggcccggtgatgaatataccatctctcca

SEQ ID NO: 913576 - DNA, 33 bp, Homo sapien
gttaggcccggtgatgcatataccatctctcca

SEQ ID NO: 913577 - DNA, 33 bp, Homo sapien
catgggggctccctcagctggggatctctcagg

SEQ ID NO: 913578 - DNA, 33 bp, Homo sapien
catgggggctccctcatctggggatctctcagg

SEQ ID NO: 913579 - DNA, 33 bp, Homo sapien
agaacaggagatgtgacagtgcatcacacttca

SEQ ID NO: 913580 - DNA, 33 bp, Homo sapien
agaacaggagatgtgagagtgcatcacacttca

SEQ ID NO: 913581 - DNA, 33 bp, Homo sapien
catacctagacctataacaatttatcccaaatg

SEQ ID NO: 913582 - DNA, 33 bp, Homo sapien
catacctagacctatagcaatttatcccaaatg

SEQ ID NO: 913583 - DNA, 33 bp, Homo sapien
ggggaactccttctccagcaattaaaggatctt

SEQ ID NO: 913584 - DNA, 33 bp, Homo sapien
ggggaactccttctccggcaattaaaggatctt

SEQ ID NO: 913585 - DNA, 33 bp, Homo sapien
cttatgtcctgactgaccatgagctgagagccg

SEQ ID NO: 913586 - DNA, 33 bp, Homo sapien
cttatgtcctgactgagcatgagctgagagccg

SEQ ID NO: 913587 - DNA, 33 bp, Homo sapien
catcgactcggcaagacgttgttgggcacagca

SEQ ID NO: 913588 - DNA, 33 bp, Homo sapien
catcgactcggcaagatgttgttgggcacagca

SEQ ID NO: 913589 - DNA, 33 bp, Homo sapien
agagctgtgagtctcacggaagagagaaaattc

SEQ ID NO: 913590 - DNA, 33 bp, Homo sapien
agagctgtgagtctcatggaagagagaaaattc

SEQ ID NO: 913591 - DNA, 33 bp, Homo sapien
aatataagcagttacacaacagactcctctttt

SEQ ID NO: 913592 - DNA, 33 bp, Homo sapien
aatataagcagttacataacagactcctctttt

SEQ ID NO: 913593 - DNA, 33 bp, Homo sapien
atttaaaaggaaaaacacaatgctcatttaata

SEQ ID NO: 913594 - DNA, 33 bp, Homo sapien
atttaaaaggaaaaacgcaatgctcatttaata

SEQ ID NO: 913595 - DNA, 33 bp, Homo sapien
acaagattaagttaaaataaggaaagagagcaa

SEQ ID NO: 913596 - DNA, 33 bp, Homo sapien
acaagattaagttaaagtaaggaaagagagcaa

SEQ ID NO: 913597 - DNA, 33 bp, Homo sapien
caactaatttttgaaaccttcgtagaaacaggg

SEQ ID NO: 913598 - DNA, 33 bp, Homo sapien
caactaatttttgaaatcttcgtagaaacaggg

SEQ ID NO: 913599 - DNA, 33 bp, Homo sapien
tttcagatataacaagacaaggatgtttattat

SEQ ID NO: 913600 - DNA, 33 bp, Homo sapien
tttcagatataacaagccaaggatgtttattat

SEQ ID NO: 913601 - DNA, 33 bp, Homo sapien
aagactcacggaaacacaactgaaaataatcat

SEQ ID NO: 913602 - DNA, 33 bp, Homo sapien
aagactcacggaaacagaactgaaaataatcat

SEQ ID NO: 913603 - DNA, 33 bp, Homo sapien
cagggcagtcacaagcactcagttgttacacgg

SEQ ID NO: 913604 - DNA, 33 bp, Homo sapien
cagggcagtcacaagcgctcagttgttacacgg

SEQ ID NO: 913605 - DNA, 33 bp, Homo sapien
tacaaagttcactcgtaaagttaaccatgaaca

SEQ ID NO: 913606 - DNA, 33 bp, Homo sapien
tacaaagttcactcgtcaagttaaccatgaaca

SEQ ID NO: 913607 - DNA, 33 bp, Homo sapien
gatggcataaagttaaaataatttgatcctctt

SEQ ID NO: 913608 - DNA, 33 bp, Homo sapien
gatggcataaagttaagataatttgatcctctt

SEQ ID NO: 913609 - DNA, 33 bp, Homo sapien
atatcaatacaaatacccaaaatgaaacataac

SEQ ID NO: 913610 - DNA, 33 bp, Homo sapien
atatcaatacaaatactcaaaatgaaacataac

SEQ ID NO: 913611 - DNA, 33 bp, Homo sapien
gtccctggaaaaattacatgcaccaagttctcc

SEQ ID NO: 913612 - DNA, 33 bp, Homo sapien
gtccctggaaaaattatatgcaccaagttctcc

SEQ ID NO: 913613 - DNA, 33 bp, Homo sapien
agtgacctgcttctgcccctctaggtctatcag

SEQ ID NO: 913614 - DNA, 33 bp, Homo sapien
agtgacctgcttctgctcctctaggtctatcag

SEQ ID NO: 913615 - DNA, 33 bp, Homo sapien
ttacaaatggggcaaacagtctagtgtaatgga

SEQ ID NO: 913616 - DNA, 33 bp, Homo sapien
ttacaaatggggcaaatagtctagtgtaatgga

SEQ ID NO: 913617 - DNA, 33 bp, Homo sapien
attgttgtgggggtcaaatagtcagcaggactg

SEQ ID NO: 913618 - DNA, 33 bp, Homo sapien
attgttgtgggggtcagatagtcagcaggactg

SEQ ID NO: 913619 - DNA, 33 bp, Homo sapien
gtcaacactgcatgaaagtaactgagggggccg

SEQ ID NO: 913620 - DNA, 33 bp, Homo sapien
gtcaacactgcatgaaggtaactgagggggccg

SEQ ID NO: 913621 - DNA, 33 bp, Homo sapien
caccgggaccgcttcaaggagcagtttacaaag

SEQ ID NO: 913622 - DNA, 33 bp, Homo sapien
caccgggaccgcttcatggagcagtttacaaag

SEQ ID NO: 913623 - DNA, 33 bp, Homo sapien
ggaactaattgaagtgaaaggatttggaggata

SEQ ID NO: 913624 - DNA, 33 bp, Homo sapien
ggaactaattgaagtggaaggatttggaggata

SEQ ID NO: 913625 - DNA, 33 bp, Homo sapien
agtctggaagagatccacagaacctgcccaaga

SEQ ID NO: 913626 - DNA, 33 bp, Homo sapien
agtctggaagagatccgcagaacctgcccaaga

SEQ ID NO: 913627 - DNA, 33 bp, Homo sapien
ttttgctctgttgctgaagtgcaatagcatgat

SEQ ID NO: 913628 - DNA, 33 bp, Homo sapien
ttttgctctgttgctggagtgcaatagcatgat

SEQ ID NO: 913629 - DNA, 33 bp, Homo sapien
gtgaggccctgtttcacagaaaaaagagagaag

SEQ ID NO: 913630 - DNA, 33 bp, Homo sapien
gtgaggccctgtttcatagaaaaaagagagaag

SEQ ID NO: 913631 - DNA, 33 bp, Homo sapien
gtgaaaagttcattcccctaaacctctccatga

SEQ ID NO: 913632 - DNA, 33 bp, Homo sapien
gtgaaaagttcattcctctaaacctctccatga

SEQ ID NO: 913633 - DNA, 33 bp, Homo sapien
ctataattccagatgaccagggggcgatgtatc

SEQ ID NO: 913634 - DNA, 33 bp, Homo sapien
ctataattccagatgagcagggggcgatgtatc

SEQ ID NO: 913635 - DNA, 33 bp, Homo sapien
tagaagcgaggaaacaatatgaggagatcaact

SEQ ID NO: 913636 - DNA, 33 bp, Homo sapien
tagaagcgaggaaacagtatgaggagatcaact

SEQ ID NO: 913637 - DNA, 33 bp, Homo sapien
tgtttagtgaaaggcacaccctccatcatcaac

SEQ ID NO: 913638 - DNA, 33 bp, Homo sapien
tgtttagtgaaaggcataccctccatcatcaac

SEQ ID NO: 913639 - DNA, 33 bp, Homo sapien
tttagtccaatggccactaaaccgaatcaccct

SEQ ID NO: 913640 - DNA, 33 bp, Homo sapien
tttagtccaatggccattaaaccgaatcaccct

SEQ ID NO: 913641 - DNA, 33 bp, Homo sapien
ggggcacttacagagcactaatgacacacaggg

SEQ ID NO: 913642 - DNA, 33 bp, Homo sapien
ggggcacttacagagcgctaatgacacacaggg

SEQ ID NO: 913643 - DNA, 33 bp, Homo sapien
tatgcagtagttaaaaagaatgtggttgatcta

SEQ ID NO: 913644 - DNA, 33 bp, Homo sapien
tatgcagtagttaaaaggaatgtggttgatcta

SEQ ID NO: 913645 - DNA, 33 bp, Homo sapien
cttgctggcttaccaacctcttcctcatatttt

SEQ ID NO: 913646 - DNA, 33 bp, Homo sapien
cttgctggcttaccaatctcttcctcatatttt

SEQ ID NO: 913647 - DNA, 33 bp, Homo sapien
ctctggtttgccataaagctttcaaccctggga

SEQ ID NO: 913648 - DNA, 33 bp, Homo sapien
ctctggtttgccataacgctttcaaccctggga

SEQ ID NO: 913649 - DNA, 33 bp, Homo sapien
agtgtaagtgggaaggaaaactcaaagacagat

SEQ ID NO: 913650 - DNA, 33 bp, Homo sapien
agtgtaagtgggaaggcaaactcaaagacagat

SEQ ID NO: 913651 - DNA, 33 bp, Homo sapien
taatcagtagagcaacagtcctgctaaggcaag

SEQ ID NO: 913652 - DNA, 33 bp, Homo sapien
taatcagtagagcaacggtcctgctaaggcaag

SEQ ID NO: 913653 - DNA, 33 bp, Homo sapien
agagggaaagaagagactaatttgggctcaaat

SEQ ID NO: 913654 - DNA, 33 bp, Homo sapien
agagggaaagaagagattaatttgggctcaaat

SEQ ID NO: 913655 - DNA, 33 bp, Homo sapien
aaaagttgggaagtcccgagtgcaggaatccta

SEQ ID NO: 913656 - DNA, 33 bp, Homo sapien
aaaagttgggaagtcctgagtgcaggaatccta

SEQ ID NO: 913657 - DNA, 33 bp, Homo sapien
atgctacaacatgcttaaacattgaaaacatta

SEQ ID NO: 913658 - DNA, 33 bp, Homo sapien
atgctacaacatgcttgaacattgaaaacatta

SEQ ID NO: 913659 - DNA, 33 bp, Homo sapien
agatgtgttggttccaagaggttaaggaaatct

SEQ ID NO: 913660 - DNA, 33 bp, Homo sapien
agatgtgttggttccaggaggttaaggaaatct

SEQ ID NO: 913661 - DNA, 33 bp, Homo sapien
tctgtgaagcaaagacagtcagtgaagacaagt

SEQ ID NO: 913662 - DNA, 33 bp, Homo sapien
tctgtgaagcaaagacggtcagtgaagacaagt

SEQ ID NO: 913663 - DNA, 33 bp, Homo sapien
ttgcttcacagattccacttttgctagatcaac

SEQ ID NO: 913664 - DNA, 33 bp, Homo sapien
ttgcttcacagattccgcttttgctagatcaac

SEQ ID NO: 913665 - DNA, 33 bp, Homo sapien
aaagcactgatagagcaagaaaatacatacctt

SEQ ID NO: 913666 - DNA, 33 bp, Homo sapien
aaagcactgatagagcgagaaaatacatacctt

SEQ ID NO: 913667 - DNA, 33 bp, Homo sapien
cctccaggcctttccacgtgatgttttcactgc

SEQ ID NO: 913668 - DNA, 33 bp, Homo sapien
cctccaggcctttccatgtgatgttttcactgc

SEQ ID NO: 913669 - DNA, 33 bp, Homo sapien
tggaagaactcttacaacccaggactcaagaga

SEQ ID NO: 913670 - DNA, 33 bp, Homo sapien
tggaagaactcttacagcccaggactcaagaga

SEQ ID NO: 913671 - DNA, 33 bp, Homo sapien
tggcacagatgttggaaaagtagattaatgcat

SEQ ID NO: 913672 - DNA, 33 bp, Homo sapien
tggcacagatgttggataagtagattaatgcat

SEQ ID NO: 913673 - DNA, 33 bp, Homo sapien
gctctgattgtcaagtaaatggaaaaatggggt

SEQ ID NO: 913674 - DNA, 33 bp, Homo sapien
gctctgattgtcaagtgaatggaaaaatggggt

SEQ ID NO: 913675 - DNA, 33 bp, Homo sapien
ggggcattccagtgacagaagaacataaataaa

SEQ ID NO: 913676 - DNA, 33 bp, Homo sapien
ggggcattccagtgacggaagaacataaataaa

SEQ ID NO: 913677 - DNA, 33 bp, Homo sapien
agaatgggctcaaagaagcaatgttattaagaa

SEQ ID NO: 913678 - DNA, 33 bp, Homo sapien
agaatgggctcaaagaggcaatgttattaagaa

SEQ ID NO: 913679 - DNA, 33 bp, Homo sapien
ctatttgagaatatgaatcaggtccctagcctt

SEQ ID NO: 913680 - DNA, 33 bp, Homo sapien
ctatttgagaatatgagtcaggtccctagcctt

SEQ ID NO: 913681 - DNA, 33 bp, Homo sapien
caaagcagcatagagacgggtagcggggtggat

SEQ ID NO: 913682 - DNA, 33 bp, Homo sapien
caaagcagcatagagatgggtagcggggtggat

SEQ ID NO: 913683 - DNA, 33 bp, Homo sapien
cttacatatttggtgtcaaaactgtcgcgagca

SEQ ID NO: 913684 - DNA, 33 bp, Homo sapien
cttacatatttggtgtgaaaactgtcgcgagca

SEQ ID NO: 913685 - DNA, 33 bp, Homo sapien
tccaaatagcttcataagtagtaactgtgaact

SEQ ID NO: 913686 - DNA, 33 bp, Homo sapien
tccaaatagcttcataggtagtaactgtgaact

SEQ ID NO: 913687 - DNA, 33 bp, Homo sapien
agatgctgtcaggaccactttccatcagctctc

SEQ ID NO: 913688 - DNA, 33 bp, Homo sapien
agatgctgtcaggaccgctttccatcagctctc

SEQ ID NO: 913689 - DNA, 33 bp, Homo sapien
gtgtgtgtgtttggtagcgaggaagcaggatat

SEQ ID NO: 913690 - DNA, 33 bp, Homo sapien
gtgtgtgtgtttggtatcgaggaagcaggatat

SEQ ID NO: 913691 - DNA, 33 bp, Homo sapien
actaatcgcctccaaaacgtatgtcctcaacga

SEQ ID NO: 913692 - DNA, 33 bp, Homo sapien
actaatcgcctccaaagcgtatgtcctcaacga

SEQ ID NO: 913693 - DNA, 33 bp, Homo sapien
gatgtccctgaaagtgaagttgggaagagatgc

SEQ ID NO: 913694 - DNA, 33 bp, Homo sapien
gatgtccctgaaagtggagttgggaagagatgc

SEQ ID NO: 913695 - DNA, 33 bp, Homo sapien
gtcctttttagtgtatcacattagagggttcat

SEQ ID NO: 913696 - DNA, 33 bp, Homo sapien
gtcctttttagtgtattacattagagggttcat

SEQ ID NO: 913697 - DNA, 33 bp, Homo sapien
cccattccttcgaaaacataaatgggtcattag

SEQ ID NO: 913698 - DNA, 33 bp, Homo sapien
cccattccttcgaaaatataaatgggtcattag

SEQ ID NO: 913699 - DNA, 33 bp, Homo sapien
agtgcttatccgatctcacaggtaaactgatgc

SEQ ID NO: 913700 - DNA, 33 bp, Homo sapien
agtgcttatccgatcttacaggtaaactgatgc

SEQ ID NO: 913701 - DNA, 33 bp, Homo sapien
ccttgtccgtgttactaaagagccacgtgactt

SEQ ID NO: 913702 - DNA, 33 bp, Homo sapien
ccttgtccgtgttactgaagagccacgtgactt

SEQ ID NO: 913703 - DNA, 33 bp, Homo sapien
ggctgaatgtccctaacctaaaatctgaaatct

SEQ ID NO: 913704 - DNA, 33 bp, Homo sapien
ggctgaatgtccctaatctaaaatctgaaatct

SEQ ID NO: 913705 - DNA, 33 bp, Homo sapien
gcaaagttctgagatcactcactgtgtaggatc

SEQ ID NO: 913706 - DNA, 33 bp, Homo sapien
gcaaagttctgagatcgctcactgtgtaggatc

SEQ ID NO: 913707 - DNA, 33 bp, Homo sapien
aagttcctgaattttccacaaatcattgttaaa

SEQ ID NO: 913708 - DNA, 33 bp, Homo sapien
aagttcctgaattttctacaaatcattgttaaa

SEQ ID NO: 913709 - DNA, 33 bp, Homo sapien
actgaagataagcctaccaagtgcaaaatcaca

SEQ ID NO: 913710 - DNA, 33 bp, Homo sapien
actgaagataagcctatcaagtgcaaaatcaca

SEQ ID NO: 913711 - DNA, 33 bp, Homo sapien
tgcagaagcttgtcagcatcgcctgcaaaacta

SEQ ID NO: 913712 - DNA, 33 bp, Homo sapien
tgcagaagcttgtcagtatcgcctgcaaaacta

SEQ ID NO: 913713 - DNA, 33 bp, Homo sapien
aggtcatcaggtggaacgcagaatgcaggcatc

SEQ ID NO: 913714 - DNA, 33 bp, Homo sapien
aggtcatcaggtggaatgcagaatgcaggcatc

SEQ ID NO: 913715 - DNA, 33 bp, Homo sapien
agaccttccctggcacaatttcaatggggtatg

SEQ ID NO: 913716 - DNA, 33 bp, Homo sapien
agaccttccctggcacgatttcaatggggtatg

SEQ ID NO: 913717 - DNA, 33 bp, Homo sapien
ggttcaggggttcagacaaccaaatgcaatctg

SEQ ID NO: 913718 - DNA, 33 bp, Homo sapien
ggttcaggggttcagataaccaaatgcaatctg

SEQ ID NO: 913719 - DNA, 33 bp, Homo sapien
cgagagcatgcagccccaagtcagaacattaaa

SEQ ID NO: 913720 - DNA, 33 bp, Homo sapien
cgagagcatgcagcccgaagtcagaacattaaa

SEQ ID NO: 913721 - DNA, 33 bp, Homo sapien
ccaggcagctgatagtaaatcgcagagccagga

SEQ ID NO: 913722 - DNA, 33 bp, Homo sapien
ccaggcagctgatagtgaatcgcagagccagga

SEQ ID NO: 913723 - DNA, 33 bp, Homo sapien
tttgctatataaattaaccaatctcaagcattc

SEQ ID NO: 913724 - DNA, 33 bp, Homo sapien
tttgctatataaattacccaatctcaagcattc

SEQ ID NO: 913725 - DNA, 33 bp, Homo sapien
gttaaaacttataaataaaggcagtgttaacat

SEQ ID NO: 913726 - DNA, 33 bp, Homo sapien
gttaaaacttataaatgaaggcagtgttaacat

SEQ ID NO: 913727 - DNA, 33 bp, Homo sapien
aaatccgaatcaagacacttacccagtgggttt

SEQ ID NO: 913728 - DNA, 33 bp, Homo sapien
aaatccgaatcaagacgcttacccagtgggttt

SEQ ID NO: 913729 - DNA, 33 bp, Homo sapien
tctgaggatgaggatcaattggggtgaaggggc

SEQ ID NO: 913730 - DNA, 33 bp, Homo sapien
tctgaggatgaggatcgattggggtgaaggggc

SEQ ID NO: 913731 - DNA, 33 bp, Homo sapien
cttgttaactcatccagcttcatactttggtca

SEQ ID NO: 913732 - DNA, 33 bp, Homo sapien
cttgttaactcatccatcttcatactttggtca

SEQ ID NO: 913733 - DNA, 33 bp, Homo sapien
gtggcagagtcaattccacaccattcatgtata

SEQ ID NO: 913734 - DNA, 33 bp, Homo sapien
gtggcagagtcaattctacaccattcatgtata

SEQ ID NO: 913735 - DNA, 33 bp, Homo sapien
ctggctggtgccacaaacgtgacgcccaggtga

SEQ ID NO: 913736 - DNA, 33 bp, Homo sapien
ctggctggtgccacaaccgtgacgcccaggtga

SEQ ID NO: 913737 - DNA, 33 bp, Homo sapien
aaaaagggcatcgagaagaacctgggcatcggc

SEQ ID NO: 913738 - DNA, 33 bp, Homo sapien
aaaaagggcatcgagaggaacctgggcatcggc

SEQ ID NO: 913739 - DNA, 33 bp, Homo sapien
ccttttgatggcagcacggcgtcctaggccttg

SEQ ID NO: 913740 - DNA, 33 bp, Homo sapien
ccttttgatggcagcatggcgtcctaggccttg

SEQ ID NO: 913741 - DNA, 33 bp, Homo sapien
ggaaagaactttctagcaataggcaatggcctt

SEQ ID NO: 913742 - DNA, 33 bp, Homo sapien
ggaaagaactttctaggaataggcaatggcctt

SEQ ID NO: 913743 - DNA, 33 bp, Homo sapien
gtgggtcgtgtcagtacagtgtagggagttggg

SEQ ID NO: 913744 - DNA, 33 bp, Homo sapien
gtgggtcgtgtcagtagagtgtagggagttggg

SEQ ID NO: 913745 - DNA, 33 bp, Homo sapien; identical to SEQ ID NO: 913743

SEQ ID NO: 913746 - DNA, 33 bp, Homo sapien; identical to SEQ ID NO: 913744

SEQ ID NO: 913747 - DNA, 33 bp, Homo sapien
agtaatttccatttaagaatctggcatactcaa

SEQ ID NO: 913748 - DNA, 33 bp, Homo sapien
agtaatttccatttaataatctggcatactcaa

SEQ ID NO: 913749 - DNA, 33 bp, Homo sapien
tgtgagactatgaacaaatgactttaaatatta

SEQ ID NO: 913750 - DNA, 33 bp, Homo sapien
tgtgagactatgaacacatgactttaaatatta

SEQ ID NO: 913751 - DNA, 33 bp, Homo sapien
aaagacttcagttgaaaggtcaaagagaatcca

SEQ ID NO: 913752 - DNA, 33 bp, Homo sapien
aaagacttcagttgaagggtcaaagagaatcca

SEQ ID NO: 913753 - DNA, 33 bp, Homo sapien
ctagctagttttcagacgggaagaatgtgtacc

SEQ ID NO: 913754 - DNA, 33 bp, Homo sapien
ctagctagttttcagatgggaagaatgtgtacc

SEQ ID NO: 913755 - DNA, 33 bp, Homo sapien
ggagatcgaagggcccaagaataaggtgctgac

SEQ ID NO: 913756 - DNA, 33 bp, Homo sapien
ggagatcgaagggcccgagaataaggtgctgac

SEQ ID NO: 913757 - DNA, 33 bp, Homo sapien
cgcacatctttgaaaactgcagtaatctggctg

SEQ ID NO: 913758 - DNA, 33 bp, Homo sapien
cgcacatctttgaaaagtgcagtaatctggctg

SEQ ID NO: 913759 - DNA, 33 bp, Homo sapien
ctgtcccatcctctgagtatcaaggcccagttc

SEQ ID NO: 913760 - DNA, 33 bp, Homo sapien
ctgtcccatcctctgattatcaaggcccagttc

SEQ ID NO: 913761 - DNA, 33 bp, Homo sapien
ttcctcagtgctgaagacctggcttgatctgtg

SEQ ID NO: 913762 - DNA, 33 bp, Homo sapien
ttcctcagtgctgaaggcctggcttgatctgtg

SEQ ID NO: 913763 - DNA, 33 bp, Homo sapien
tgattctcctgttgcaatcatctttatttattt

SEQ ID NO: 913764 - DNA, 33 bp, Homo sapien
tgattctcctgttgcagtcatctttatttattt

SEQ ID NO: 913765 - DNA, 33 bp, Homo sapien
ggaaaaagctcgagaccggattcatctctgttt

SEQ ID NO: 913766 - DNA, 33 bp, Homo sapien
ggaaaaagctcgagactggattcatctctgttt

SEQ ID NO: 913767 - DNA, 33 bp, Homo sapien
cctctcaccaggcccacggaaagttgaggtaga

SEQ ID NO: 913768 - DNA, 33 bp, Homo sapien
cctctcaccaggcccagggaaagttgaggtaga

SEQ ID NO: 913769 - DNA, 33 bp, Homo sapien
aaaaaaaaaggccccaagtcatagtgttcctca

SEQ ID NO: 913770 - DNA, 33 bp, Homo sapien
aaaaaaaaaggccccaggtcatagtgttcctca

SEQ ID NO: 913771 - DNA, 33 bp, Homo sapien
ctttcctctccaatacgctggataacaggataa

SEQ ID NO: 913772 - DNA, 33 bp, Homo sapien
ctttcctctccaatactctggataacaggataa

SEQ ID NO: 913773 - DNA, 33 bp, Homo sapien
tgggtagaaatttcacgactctgaggctgttcc

SEQ ID NO: 913774 - DNA, 33 bp, Homo sapien
tgggtagaaatttcactactctgaggctgttcc

SEQ ID NO: 913775 - DNA, 33 bp, Homo sapien
taaacattagttgaacccatcaattgggacaac

SEQ ID NO: 913776 - DNA, 33 bp, Homo sapien
taaacattagttgaactcatcaattgggacaac

SEQ ID NO: 913777 - DNA, 33 bp, Homo sapien
aatgcagaaattagccaataagccaggtggaat

SEQ ID NO: 913778 - DNA, 33 bp, Homo sapien
aatgcagaaattagccgataagccaggtggaat

SEQ ID NO: 913779 - DNA, 33 bp, Homo sapien
gctctcaaatcctacaatcatttaaaggctggg

SEQ ID NO: 913780 - DNA, 33 bp, Homo sapien
gctctcaaatcctacactcatttaaaggctggg

SEQ ID NO: 913781 - DNA, 33 bp, Homo sapien
gtacataaataaataaatcagggaggaacttgc

SEQ ID NO: 913782 - DNA, 33 bp, Homo sapien
gtacataaataaataagtcagggaggaacttgc

SEQ ID NO: 913783 - DNA, 33 bp, Homo sapien
ccattgtcatgctccaatctgttcaagcctttg

SEQ ID NO: 913784 - DNA, 33 bp, Homo sapien
ccattgtcatgctccagtctgttcaagcctttg

SEQ ID NO: 913785 - DNA, 33 bp, Homo sapien
gaatttggtggacatgaatttgttgtgtgtctt

SEQ ID NO: 913786 - DNA, 33 bp, Homo sapien
gaatttggtggacatgtatttgttgtgtgtctt

SEQ ID NO: 913787 - DNA, 33 bp, Homo sapien
acaggtcaacaattcaccctcttctcactgtct

SEQ ID NO: 913788 - DNA, 33 bp, Homo sapien
acaggtcaacaattcatcctcttctcactgtct

SEQ ID NO: 913789 - DNA, 33 bp, Homo sapien
gcctggcctgcagaagaaccacggagcgttgtg

SEQ ID NO: 913790 - DNA, 33 bp, Homo sapien
gcctggcctgcagaaggaccacggagcgttgtg

SEQ ID NO: 913791 - DNA, 33 bp, Homo sapien
ggcaacagatggactcagaaagggatatgaagg

SEQ ID NO: 913792 - DNA, 33 bp, Homo sapien
ggcaacagatggactctgaaagggatatgaagg

SEQ ID NO: 913793 - DNA, 33 bp, Homo sapien
ctggagtatatggggacgcttttcactacctca

SEQ ID NO: 913794 - DNA, 33 bp, Homo sapien
ctggagtatatggggatgcttttcactacctca

SEQ ID NO: 913795 - DNA, 33 bp, Homo sapien
gaccatttcctgaatgaagtgcttataccagta

SEQ ID NO: 913796 - DNA, 33 bp, Homo sapien
gaccatttcctgaatgtagtgcttataccagta

SEQ ID NO: 913797 - DNA, 33 bp, Homo sapien
cccacagtggaaaaaaacaaattctgcatccac

SEQ ID NO: 913798 - DNA, 33 bp, Homo sapien
cccacagtggaaaaaaccaaattctgcatccac

SEQ ID NO: 913799 - DNA, 33 bp, Homo sapien
gcccagctcgaaaccacggggctcggcaaggtg

SEQ ID NO: 913800 - DNA, 33 bp, Homo sapien
gcccagctcgaaaccatggggctcggcaaggtg

SEQ ID NO: 913801 - DNA, 33 bp, Homo sapien
acaaaatccattggcccggaacataatggctca

SEQ ID NO: 913802 - DNA, 33 bp, Homo sapien
acaaaatccattggccgggaacataatggctca

SEQ ID NO: 913803 - DNA, 33 bp, Homo sapien
taaagggagaaaagcacagtttctacaactagt

SEQ ID NO: 913804 - DNA, 33 bp, Homo sapien
taaagggagaaaagcatagtttctacaactagt

SEQ ID NO: 913805 - DNA, 33 bp, Homo sapien; identical to SEQ ID NO: 913803

SEQ ID NO: 913806 - DNA, 33 bp, Homo sapien; identical to SEQ ID NO: 913804

SEQ ID NO: 913807 - DNA, 33 bp, Homo sapien
ataataatgaaaggaactaggaataacaaggaa

SEQ ID NO: 913808 - DNA, 33 bp, Homo sapien
ataataatgaaaggaagtaggaataacaaggaa

SEQ ID NO: 913809 - DNA, 33 bp, Homo sapien
agttggccaagcataaaggtaggtagtctaggc

SEQ ID NO: 913810 - DNA, 33 bp, Homo sapien
agttggccaagcataatggtaggtagtctaggc

SEQ ID NO: 913811 - DNA, 33 bp, Homo sapien
taagatcttttaaatgcaatcaaattcaaagga

SEQ ID NO: 913812 - DNA, 33 bp, Homo sapien
taagatcttttaaatgtaatcaaattcaaagga

SEQ ID NO: 913813 - DNA, 33 bp, Homo sapien
cactaccagttggtacaatcagccctgggtggg

SEQ ID NO: 913814 - DNA, 33 bp, Homo sapien
cactaccagttggtactatcagccctgggtggg

SEQ ID NO: 913815 - DNA, 33 bp, Homo sapien
aaacagttttaatggaggacaagggaaaatacc

SEQ ID NO: 913816 - DNA, 33 bp, Homo sapien
aaacagttttaatggatgacaagggaaaatacc

SEQ ID NO: 913817 - DNA, 33 bp, Homo sapien
aaaactagggatgtaacaacaagcaccatgtac

SEQ ID NO: 913818 - DNA, 33 bp, Homo sapien
aaaactagggatgtaataacaagcaccatgtac

SEQ ID NO: 913819 - DNA, 33 bp, Homo sapien
gcctgttgcgagatggaacatgagacacaatca

SEQ ID NO: 913820 - DNA, 33 bp, Homo sapien
gcctgttgcgagatgggacatgagacacaatca

SEQ ID NO: 913821 - DNA, 33 bp, Homo sapien
acactgcagctagtgcccacaaggaattaagtg

SEQ ID NO: 913822 - DNA, 33 bp, Homo sapien
acactgcagctagtgctcacaaggaattaagtg

SEQ ID NO: 913823 - DNA, 33 bp, Homo sapien
cattaatttcatgtaaatctcataggaaatctt

SEQ ID NO: 913824 - DNA, 33 bp, Homo sapien
cattaatttcatgtaagtctcataggaaatctt

SEQ ID NO: 913825 - DNA, 33 bp, Homo sapien
agtcaaccctaatcacaaaatatctctgtgaat

SEQ ID NO: 913826 - DNA, 33 bp, Homo sapien
agtcaaccctaatcacgaaatatctctgtgaat

SEQ ID NO: 913827 - DNA, 33 bp, Homo sapien; identical to SEQ ID NO: 913825

SEQ ID NO: 913828 - DNA, 33 bp, Homo sapien; identical to SEQ ID NO: 913826

SEQ ID NO: 913829 - DNA, 33 bp, Homo sapien
caaccaatatgtattcaaaatctgccacttgtt

SEQ ID NO: 913830 - DNA, 33 bp, Homo sapien
caaccaatatgtattcgaaatctgccacttgtt

SEQ ID NO: 913831 - DNA, 33 bp, Homo sapien
acactcagagcatctgcaaagacagttagtaga

SEQ ID NO: 913832 - DNA, 33 bp, Homo sapien
acactcagagcatctggaaagacagttagtaga

SEQ ID NO: 913833 - DNA, 33 bp, Homo sapien; identical to SEQ ID NO: 913831

SEQ ID NO: 913834 - DNA, 33 bp, Homo sapien; identical to SEQ ID NO: 913832

SEQ ID NO: 913835 - DNA, 33 bp, Homo sapien
atacagtattttatgactacagaagttactcat

SEQ ID NO: 913836 - DNA, 33 bp, Homo sapien
atacagtattttatgattacagaagttactcat

SEQ ID NO: 913837 - DNA, 33 bp, Homo sapien; identical to SEQ ID NO: 913835

SEQ ID NO: 913838 - DNA, 33 bp, Homo sapien; identical to SEQ ID NO: 913836

SEQ ID NO: 913839 - DNA, 33 bp, Homo sapien
aaagactttccacacaaacgcaaaagaagataa

SEQ ID NO: 913840 - DNA, 33 bp, Homo sapien
aaagactttccacacacacgcaaaagaagataa

SEQ ID NO: 913841 - DNA, 33 bp, Homo sapien
tgatgggatacaacgacacaaatttatcatctt

SEQ ID NO: 913842 - DNA, 33 bp, Homo sapien
tgatgggatacaacgatacaaatttatcatctt

SEQ ID NO: 913843 - DNA, 33 bp, Homo sapien
attaaatataatctaacgacaaattgaagaatt

SEQ ID NO: 913844 - DNA, 33 bp, Homo sapien
attaaatataatctaatgacaaattgaagaatt

SEQ ID NO: 913845 - DNA, 33 bp, Homo sapien
aactttgcttaactcacggaaaaattgtgtaag

SEQ ID NO: 913846 - DNA, 33 bp, Homo sapien
aactttgcttaactcatggaaaaattgtgtaag

SEQ ID NO: 913847 - DNA, 33 bp, Homo sapien
aagtaaatgcaaaagaggaggatgcaatatata

SEQ ID NO: 913848 - DNA, 33 bp, Homo sapien
aagtaaatgcaaaagatgaggatgcaatatata

SEQ ID NO: 913849 - DNA, 33 bp, Homo sapien
acttctgaaataatgccgacaattctgttcagt

SEQ ID NO: 913850 - DNA, 33 bp, Homo sapien
acttctgaaataatgctgacaattctgttcagt

SEQ ID NO: 913851 - DNA, 33 bp, Homo sapien; identical to SEQ ID NO: 913849

SEQ ID NO: 913852 - DNA, 33 bp, Homo sapien; identical to SEQ ID NO: 913850

SEQ ID NO: 913853 - DNA, 33 bp, Homo sapien
aatgaccattgtattccagaagctagggctttt

SEQ ID NO: 913854 - DNA, 33 bp, Homo sapien
aatgaccattgtattctagaagctagggctttt

SEQ ID NO: 913855 - DNA, 33 bp, Homo sapien
aagacaggagtaagaacgaaaatgattaaagat

SEQ ID NO: 913856 - DNA, 33 bp, Homo sapien
aagacaggagtaagaatgaaaatgattaaagat

SEQ ID NO: 913857 - DNA, 33 bp, Homo sapien
tcatgttaaaacattgaaaactaaactggagta

SEQ ID NO: 913858 - DNA, 33 bp, Homo sapien
tcatgttaaaacattggaaactaaactggagta

SEQ ID NO: 913859 - DNA, 33 bp, Homo sapien; identical to SEQ ID NO: 913857

SEQ ID NO: 913860 - DNA, 33 bp, Homo sapien; identical to SEQ ID NO: 913858

SEQ ID NO: 913861 - DNA, 33 bp, Homo sapien
tgataaagctagttaaacactatgcatccaata

SEQ ID NO: 913862 - DNA, 33 bp, Homo sapien
tgataaagctagttaagcactatgcatccaata

SEQ ID NO: 913863 - DNA, 33 bp, Homo sapien
ggctagcaatatgcagaagattaaaacggaatc

SEQ ID NO: 913864 - DNA, 33 bp, Homo sapien
ggctagcaatatgcaggagattaaaacggaatc

SEQ ID NO: 913865 - DNA, 33 bp, Homo sapien
caagcaatgggcaaagcactttctcgttaataa

SEQ ID NO: 913866 - DNA, 33 bp, Homo sapien
caagcaatgggcaaaggactttctcgttaataa

SEQ ID NO: 913867 - DNA, 33 bp, Homo sapien
ggaccatatcctgaaacatgcttccaagttact

SEQ ID NO: 913868 - DNA, 33 bp, Homo sapien
ggaccatatcctgaaatatgcttccaagttact

SEQ ID NO: 913869 - DNA, 33 bp, Homo sapien
cttcccagaaagactgccacaaaatagtaagct

SEQ ID NO: 913870 - DNA, 33 bp, Homo sapien
cttcccagaaagactgtcacaaaatagtaagct

SEQ ID NO: 913871 - DNA, 33 bp, Homo sapien
ctagcatgacaaattcaaggtggaactaactac

SEQ ID NO: 913872 - DNA, 33 bp, Homo sapien
ctagcatgacaaattcgaggtggaactaactac

SEQ ID NO: 913873 - DNA, 33 bp, Homo sapien; identical to SEQ ID NO: 913871

SEQ ID NO: 913874 - DNA, 33 bp, Homo sapien; identical to SEQ ID NO: 913872

SEQ ID NO: 913875 - DNA, 33 bp, Homo sapien
ggtaaatttatgcttacctgcttaagaaattgt

SEQ ID NO: 913876 - DNA, 33 bp, Homo sapien
ggtaaatttatgcttatctgcttaagaaattgt

SEQ ID NO: 913877 - DNA, 33 bp, Homo sapien
tatatttttatacttgaaaattgtttctgcatg

SEQ ID NO: 913878 - DNA, 33 bp, Homo sapien
tatatttttatacttgcaaattgtttctgcatg

SEQ ID NO: 913879 - DNA, 33 bp, Homo sapien
aaaccttttgtctgaccacgtggataagaacag

SEQ ID NO: 913880 - DNA, 33 bp, Homo sapien
aaaccttttgtctgactacgtggataagaacag

SEQ ID NO: 913881 - DNA, 33 bp, Homo sapien; identical to SEQ ID NO: 913879

SEQ ID NO: 913882 - DNA, 33 bp, Homo sapien; identical to SEQ ID NO: 913880

SEQ ID NO: 913883 - DNA, 33 bp, Homo sapien
ctactctactaggaaacacagttaataagagtt

SEQ ID NO: 913884 - DNA, 33 bp, Homo sapien
ctactctactaggaaatacagttaataagagtt

SEQ ID NO: 913885 - DNA, 33 bp, Homo sapien; identical to SEQ ID NO: 913883

SEQ ID NO: 913886 - DNA, 33 bp, Homo sapien; identical to SEQ ID NO: 913884

SEQ ID NO: 913887 - DNA, 33 bp, Homo sapien
acattatatggactggcaacaattggctatgca

SEQ ID NO: 913888 - DNA, 33 bp, Homo sapien
acattatatggactggtaacaattggctatgca

SEQ ID NO: 913889 - DNA, 33 bp, Homo sapien; identical to SEQ ID NO: 913887

SEQ ID NO: 913890 - DNA, 33 bp, Homo sapien; identical to SEQ ID NO: 913888

SEQ ID NO: 913891 - DNA, 33 bp, Homo sapien
gtgctctatactcatacaactggcaatataatt

SEQ ID NO: 913892 - DNA, 33 bp, Homo sapien
gtgctctatactcatagaactggcaatataatt

SEQ ID NO: 913893 - DNA, 33 bp, Homo sapien
cacttcttagcaaataaaacattacagcaagca

SEQ ID NO: 913894 - DNA, 33 bp, Homo sapien
cacttcttagcaaatacaacattacagcaagca

SEQ ID NO: 913895 - DNA, 33 bp, Homo sapien
ttggagaaattcaagaagggaacctagagaagg

SEQ ID NO: 913896 - DNA, 33 bp, Homo sapien
ttggagaaattcaagaggggaacctagagaagg

SEQ ID NO: 913897 - DNA, 33 bp, Homo sapien
gagccactgaaagttaaattgtcagtaggaatg

SEQ ID NO: 913898 - DNA, 33 bp, Homo sapien
gagccactgaaagttacattgtcagtaggaatg

SEQ ID NO: 913899 - DNA, 33 bp, Homo sapien
gtagactgagggattgaagacaaaggcgctaga

SEQ ID NO: 913900 - DNA, 33 bp, Homo sapien
gtagactgagggattggagacaaaggcgctaga

SEQ ID NO: 913901 - DNA, 33 bp, Homo sapien
gagtgatacaaagtaaacctatagaggcaactg

SEQ ID NO: 913902 - DNA, 33 bp, Homo sapien
gagtgatacaaagtaagcctatagaggcaactg

SEQ ID NO: 913903 - DNA, 33 bp, Homo sapien
ttacttgcaaaatacactgcctacatgcaagct

SEQ ID NO: 913904 - DNA, 33 bp, Homo sapien
ttacttgcaaaatacattgcctacatgcaagct

SEQ ID NO: 913905 - DNA, 33 bp, Homo sapien
gaagatgaatgaaaacaagcagtggtcctgaaa

SEQ ID NO: 913906 - DNA, 33 bp, Homo sapien
gaagatgaatgaaaaccagcagtggtcctgaaa

SEQ ID NO: 913907 - DNA, 33 bp, Homo sapien
ttagaaacacttgatacagatttcagaagagat

SEQ ID NO: 913908 - DNA, 33 bp, Homo sapien
ttagaaacacttgatatagatttcagaagagat

SEQ ID NO: 913909 - DNA, 33 bp, Homo sapien; identical to SEQ ID NO: 913907

SEQ ID NO: 913910 - DNA, 33 bp, Homo sapien; identical to SEQ ID NO: 913908

SEQ ID NO: 913911 - DNA, 33 bp, Homo sapien
gctattttctaactgaaaggaaccttactcttc

SEQ ID NO: 913912 - DNA, 33 bp, Homo sapien
gctattttctaactgagaggaaccttactcttc

SEQ ID NO: 913913 - DNA, 33 bp, Homo sapien
attgtgaacaattaacagaccaaaaagtcaagc

SEQ ID NO: 913914 - DNA, 33 bp, Homo sapien
attgtgaacaattaacggaccaaaaagtcaagc

SEQ ID NO: 913915 - DNA, 33 bp, Homo sapien
gtttaaagatgatgtaagaaaacagtttataga

SEQ ID NO: 913916 - DNA, 33 bp, Homo sapien
gtttaaagatgatgtaggaaaacagtttataga

SEQ ID NO: 913917 - DNA, 33 bp, Homo sapien
cattaggcatagaagactcaagggttatagggt

SEQ ID NO: 913918 - DNA, 33 bp, Homo sapien
cattaggcatagaagattcaagggttatagggt

SEQ ID NO: 913919 - DNA, 33 bp, Homo sapien; identical to SEQ ID NO: 913917

SEQ ID NO: 913920 - DNA, 33 bp, Homo sapien; identical to SEQ ID NO: 913918

SEQ ID NO: 913921 - DNA, 33 bp, Homo sapien
aagcacgtgagtgtagcccaaagtcaacataag

SEQ ID NO: 913922 - DNA, 33 bp, Homo sapien
aagcacgtgagtgtagtccaaagtcaacataag

SEQ ID NO: 913923 - DNA, 33 bp, Homo sapien
ctccaatggctaactcaatcttctcggacttat

SEQ ID NO: 913924 - DNA, 33 bp, Homo sapien
ctccaatggctaactccatcttctcggacttat

SEQ ID NO: 913925 - DNA, 33 bp, Homo sapien
agccaaatagttattgaaatctttatcaaaacg

SEQ ID NO: 913926 - DNA, 33 bp, Homo sapien
agccaaatagttattggaatctttatcaaaacg

SEQ ID NO: 913927 - DNA, 33 bp, Homo sapien; identical to SEQ ID NO: 913925

SEQ ID NO: 913928 - DNA, 33 bp, Homo sapien; identical to SEQ ID NO: 913926

SEQ ID NO: 913929 - DNA, 33 bp, Homo sapien
tctgttggcttctaaaatatcctcatcactctt

SEQ ID NO: 913930 - DNA, 33 bp, Homo sapien
tctgttggcttctaaattatcctcatcactctt

SEQ ID NO: 913931 - DNA, 33 bp, Homo sapien
acgtctaattttaccacagtctttttgatgatt

SEQ ID NO: 913932 - DNA, 33 bp, Homo sapien
acgtctaattttaccatagtctttttgatgatt

SEQ ID NO: 913933 - DNA, 33 bp, Homo sapien
cttctctgagtcttcacgttttctgaatatcaa

SEQ ID NO: 913934 - DNA, 33 bp, Homo sapien
cttctctgagtcttcatgttttctgaatatcaa

SEQ ID NO: 913935 - DNA, 33 bp, Homo sapien; identical to SEQ ID NO: 913933

SEQ ID NO: 913936 - DNA, 33 bp, Homo sapien; identical to SEQ ID NO: 913934

SEQ ID NO: 913937 - DNA, 33 bp, Homo sapien
agtaaaaatgctagcaaatacaggtgtctcaac

SEQ ID NO: 913938 - DNA, 33 bp, Homo sapien
agtaaaaatgctagcagatacaggtgtctcaac

SEQ ID NO: 913939 - DNA, 33 bp, Homo sapien; identical to SEQ ID NO: 913937

SEQ ID NO: 913940 - DNA, 33 bp, Homo sapien; identical to SEQ ID NO: 913938

SEQ ID NO: 913941 - DNA, 33 bp, Homo sapien
attgtgcattgagaataaacatgagggagcagg

SEQ ID NO: 913942 - DNA, 33 bp, Homo sapien
attgtgcattgagaatgaacatgagggagcagg

SEQ ID NO: 913943 - DNA, 33 bp, Homo sapien; identical to SEQ ID NO: 913941

SEQ ID NO: 913944 - DNA, 33 bp, Homo sapien; identical to SEQ ID NO: 913942

SEQ ID NO: 913945 - DNA, 33 bp, Homo sapien
tctgtaataactctaacgtgatacgaatgtatc

SEQ ID NO: 913946 - DNA, 33 bp, Homo sapien
tctgtaataactctaatgtgatacgaatgtatc

SEQ ID NO: 913947 - DNA, 33 bp, Homo sapien
cacttgcactactcccaggatttggtgttcact

SEQ ID NO: 913948 - DNA, 33 bp, Homo sapien
cacttgcactactcccgggatttggtgttcact

SEQ ID NO: 913949 - DNA, 33 bp, Homo sapien
cacttaatgggcaaacccatagttaagtggcaa

SEQ ID NO: 913950 - DNA, 33 bp, Homo sapien
cacttaatgggcaaactcatagttaagtggcaa

SEQ ID NO: 913951 - DNA, 33 bp, Homo sapien
tagaagtttgagataaacatgatgaactgttct

SEQ ID NO: 913952 - DNA, 33 bp, Homo sapien
tagaagtttgagataagcatgatgaactgttct

SEQ ID NO: 913953 - DNA, 33 bp, Homo sapien; identical to SEQ ID NO: 913951

SEQ ID NO: 913954 - DNA, 33 bp, Homo sapien; identical to SEQ ID NO: 913952

SEQ ID NO: 913955 - DNA, 33 bp, Homo sapien
gttattgctgatgcaccggtgtgacttctcaat

SEQ ID NO: 913956 - DNA, 33 bp, Homo sapien
gttattgctgatgcactggtgtgacttctcaat

SEQ ID NO: 913957 - DNA, 33 bp, Homo sapien
atttatgttatgatccagaacagtgactaatga

SEQ ID NO: 913958 - DNA, 33 bp, Homo sapien
atttatgttatgatccggaacagtgactaatga

SEQ ID NO: 913959 - DNA, 33 bp, Homo sapien
gctagtacaaatgcacacaaaacatttaaaata

SEQ ID NO: 913960 - DNA, 33 bp, Homo sapien
gctagtacaaatgcacgcaaaacatttaaaata

SEQ ID NO: 913961 - DNA, 33 bp, Homo sapien
tttatgttaacataagaaagctgagggttaaat

SEQ ID NO: 913962 - DNA, 33 bp, Homo sapien
tttatgttaacataaggaagctgagggttaaat

SEQ ID NO: 913963 - DNA, 33 bp, Homo sapien
gtggtgcacagtctacaaaattaccgtgtaaag

SEQ ID NO: 913964 - DNA, 33 bp, Homo sapien
gtggtgcacagtctaccaaattaccgtgtaaag

SEQ ID NO: 913965 - DNA, 33 bp, Homo sapien
acagtagctttgggaacgttgagaacaggaagc

SEQ ID NO: 913966 - DNA, 33 bp, Homo sapien
acagtagctttgggaatgttgagaacaggaagc

SEQ ID NO: 913967 - DNA, 33 bp, Homo sapien
gaaatttcttctggatcactgaatgtatttcct

SEQ ID NO: 913968 - DNA, 33 bp, Homo sapien
gaaatttcttctggattactgaatgtatttcct

SEQ ID NO: 913969 - DNA, 33 bp, Homo sapien
ctgtcatggttgttgtaaattttgacttagctg

SEQ ID NO: 913970 - DNA, 33 bp, Homo sapien
ctgtcatggttgttgtcaattttgacttagctg

SEQ ID NO: 913971 - DNA, 33 bp, Homo sapien
gcaactgtgaaggatggagctgccaggaacaga

SEQ ID NO: 913972 - DNA, 33 bp, Homo sapien
gcaactgtgaaggatgtagctgccaggaacaga

SEQ ID NO: 913973 - DNA, 33 bp, Homo sapien
gaacaatcactattggccaggtacagcaatatg

SEQ ID NO: 913974 - DNA, 33 bp, Homo sapien
gaacaatcactattgggcaggtacagcaatatg

SEQ ID NO: 913975 - DNA, 33 bp, Homo sapien
gtacacaaacaaactacgctttctaatgttttc

SEQ ID NO: 913976 - DNA, 33 bp, Homo sapien
gtacacaaacaaactatgctttctaatgttttc

SEQ ID NO: 913977 - DNA, 33 bp, Homo sapien
aaaaaatgatgtctgacggctaggttcttatgc

SEQ ID NO: 913978 - DNA, 33 bp, Homo sapien
aaaaaatgatgtctgatggctaggttcttatgc

SEQ ID NO: 913979 - DNA, 33 bp, Homo sapien
aagcatttgctaaacaggttcaagtaagtttag

SEQ ID NO: 913980 - DNA, 33 bp, Homo sapien
aagcatttgctaaacatgttcaagtaagtttag

SEQ ID NO: 913981 - DNA, 33 bp, Homo sapien
ttggcagactctttacacttccatgactgtatt

SEQ ID NO: 913982 - DNA, 33 bp, Homo sapien
ttggcagactctttactcttccatgactgtatt

SEQ ID NO: 913983 - DNA, 33 bp, Homo sapien
tgtcaatgcttaaaacccagtgtactgaaaaca

SEQ ID NO: 913984 - DNA, 33 bp, Homo sapien
tgtcaatgcttaaaactcagtgtactgaaaaca

SEQ ID NO: 913985 - DNA, 33 bp, Homo sapien
ttttgggattataagaagaagcttaagatcaat

SEQ ID NO: 913986 - DNA, 33 bp, Homo sapien
ttttgggattataagaggaagcttaagatcaat

SEQ ID NO: 913987 - DNA, 33 bp, Homo sapien
aacatgtttggccttacgcagggttcagtaagg

SEQ ID NO: 913988 - DNA, 33 bp, Homo sapien
aacatgtttggccttatgcagggttcagtaagg

SEQ ID NO: 913989 - DNA, 33 bp, Homo sapien
agattttggagtggcaatagttaggaaagtagg

SEQ ID NO: 913990 - DNA, 33 bp, Homo sapien
agattttggagtggcagtagttaggaaagtagg

SEQ ID NO: 913991 - DNA, 33 bp, Homo sapien
aaaactatgaagaaccacaagaaaaaaatgata

SEQ ID NO: 913992 - DNA, 33 bp, Homo sapien
aaaactatgaagaaccgcaagaaaaaaatgata

SEQ ID NO: 913993 - DNA, 33 bp, Homo sapien
acatgacaaatgagaagttcagcgaacaaaact

SEQ ID NO: 913994 - DNA, 33 bp, Homo sapien
acatgacaaatgagaatttcagcgaacaaaact

SEQ ID NO: 913995 - DNA, 33 bp, Homo sapien
gtctgtgatcaacaaaatgaggtaacaaatgac

SEQ ID NO: 913996 - DNA, 33 bp, Homo sapien
gtctgtgatcaacaaagtgaggtaacaaatgac

SEQ ID NO: 913997 - DNA, 33 bp, Homo sapien
tttcatgtctcaaatccagccaggaacaattct

SEQ ID NO: 913998 - DNA, 33 bp, Homo sapien
tttcatgtctcaaatctagccaggaacaattct

SEQ ID NO: 913999 - DNA, 33 bp, Homo sapien
attgagctctcaaaacggcttcctttgactttt

SEQ ID NO: 914000 - DNA, 33 bp, Homo sapien
attgagctctcaaaactgcttcctttgactttt

SEQ ID NO: 914001 - DNA, 33 bp, Homo sapien
acttactagaaggggacaaatgatacggaaaga

SEQ ID NO: 914002 - DNA, 33 bp, Homo sapien
acttactagaaggggataaatgatacggaaaga

SEQ ID NO: 914003 - DNA, 33 bp, Homo sapien
gagtctctgtttttcacgtaacccagcacacaa

SEQ ID NO: 914004 - DNA, 33 bp, Homo sapien
gagtctctgtttttcatgtaacccagcacacaa

SEQ ID NO: 914005 - DNA, 33 bp, Homo sapien
agacctccgtggagaacgcttctggaaaattat

SEQ ID NO: 914006 - DNA, 33 bp, Homo sapien
agacctccgtggagaatgcttctggaaaattat

SEQ ID NO: 914007 - DNA, 33 bp, Homo sapien
ggtactgctatagtcacgggatgagggggccac

SEQ ID NO: 914008 - DNA, 33 bp, Homo sapien
ggtactgctatagtcatgggatgagggggccac

SEQ ID NO: 914009 - DNA, 33 bp, Homo sapien
acctttcaaacttgcagtaaaacttaaatctga

SEQ ID NO: 914010 - DNA, 33 bp, Homo sapien
acctttcaaacttgcattaaaacttaaatctga

SEQ ID NO: 914011 - DNA, 33 bp, Homo sapien
tttggtgaaagaaaagcccacagattcaaaaag

SEQ ID NO: 914012 - DNA, 33 bp, Homo sapien
tttggtgaaagaaaagtccacagattcaaaaag

SEQ ID NO: 914013 - DNA, 33 bp, Homo sapien
ctggatggcaactatacgcaggtactttttaag

SEQ ID NO: 914014 - DNA, 33 bp, Homo sapien
ctggatggcaactatatgcaggtactttttaag

SEQ ID NO: 914015 - DNA, 33 bp, Homo sapien
cacctctatgagaagacgatatcggtacaggtc

SEQ ID NO: 914016 - DNA, 33 bp, Homo sapien
cacctctatgagaagatgatatcggtacaggtc

SEQ ID NO: 914017 - DNA, 33 bp, Homo sapien
caagtagcctaccaaacggctggtatatgaatg

SEQ ID NO: 914018 - DNA, 33 bp, Homo sapien
caagtagcctaccaaatggctggtatatgaatg

SEQ ID NO: 914019 - DNA, 33 bp, Homo sapien
ccactgctgggtgagaacatcattggtgatcct

SEQ ID NO: 914020 - DNA, 33 bp, Homo sapien
ccactgctgggtgagagcatcattggtgatcct

SEQ ID NO: 914021 - DNA, 33 bp, Homo sapien
gggaaatacatggacaaactttctatgcctggg

SEQ ID NO: 914022 - DNA, 33 bp, Homo sapien
gggaaatacatggacagactttctatgcctggg

SEQ ID NO: 914023 - DNA, 33 bp, Homo sapien
gaaaagattagatggacaccaaaactgtgattg

SEQ ID NO: 914024 - DNA, 33 bp, Homo sapien
gaaaagattagatggagaccaaaactgtgattg

SEQ ID NO: 914025 - DNA, 33 bp, Homo sapien
cacaggtaggcacaacaggttatttcacataat

SEQ ID NO: 914026 - DNA, 33 bp, Homo sapien
cacaggtaggcacaaccggttatttcacataat

SEQ ID NO: 914027 - DNA, 33 bp, Homo sapien
tatttacaccaaaagcacatgactccaatctga

SEQ ID NO: 914028 - DNA, 33 bp, Homo sapien
tatttacaccaaaagctcatgactccaatctga

SEQ ID NO: 914029 - DNA, 33 bp, Homo sapien
ttaaggacatttaaggaatgtagatacaggaaa

SEQ ID NO: 914030 - DNA, 33 bp, Homo sapien
ttaaggacatttaagggatgtagatacaggaaa

SEQ ID NO: 914031 - DNA, 33 bp, Homo sapien
ttgggaagccattaaacctattgccagccaagt

SEQ ID NO: 914032 - DNA, 33 bp, Homo sapien
ttgggaagccattaaagctattgccagccaagt

SEQ ID NO: 914033 - DNA, 33 bp, Homo sapien
ataagtgaggcgctccacttaaaaggaactaaa

SEQ ID NO: 914034 - DNA, 33 bp, Homo sapien
ataagtgaggcgctccgcttaaaaggaactaaa

SEQ ID NO: 914035 - DNA, 33 bp, Homo sapien
actgcatttctctttaacagtccctttcaattt

SEQ ID NO: 914036 - DNA, 33 bp, Homo sapien
actgcatttctctttatcagtccctttcaattt

SEQ ID NO: 914037 - DNA, 33 bp, Homo sapien
ttttatttgactattaggcttctgctctgatga

SEQ ID NO: 914038 - DNA, 33 bp, Homo sapien
ttttatttgactattatgcttctgctctgatga

SEQ ID NO: 914039 - DNA, 33 bp, Homo sapien
cagttctgcctactataagattatcattttaaa

SEQ ID NO: 914040 - DNA, 33 bp, Homo sapien
cagttctgcctactatgagattatcattttaaa

SEQ ID NO: 914041 - DNA, 33 bp, Homo sapien
tgagacatgatgtgaacaaaaaataaggcaagg

SEQ ID NO: 914042 - DNA, 33 bp, Homo sapien
tgagacatgatgtgaagaaaaaataaggcaagg

SEQ ID NO: 914043 - DNA, 33 bp, Homo sapien
cagaagcaaaaaaggggatgtcacaacagatac

SEQ ID NO: 914044 - DNA, 33 bp, Homo sapien
cagaagcaaaaaagggtatgtcacaacagatac

SEQ ID NO: 914045 - DNA, 33 bp, Homo sapien
catatctgtatggacaacaattacagttcttat

SEQ ID NO: 914046 - DNA, 33 bp, Homo sapien
catatctgtatggacagcaattacagttcttat

SEQ ID NO: 914047 - DNA, 33 bp, Homo sapien
gaattaaaattttctaagcaagacaatggcaga

SEQ ID NO: 914048 - DNA, 33 bp, Homo sapien
gaattaaaattttctaggcaagacaatggcaga

SEQ ID NO: 914049 - DNA, 33 bp, Homo sapien
gtcctcacctgtattcaaatgtatccaagttaa

SEQ ID NO: 914050 - DNA, 33 bp, Homo sapien
gtcctcacctgtattccaatgtatccaagttaa

SEQ ID NO: 914051 - DNA, 33 bp, Homo sapien
agatagcaaaagagtacagaagcatttcagatt

SEQ ID NO: 914052 - DNA, 33 bp, Homo sapien
agatagcaaaagagtagagaagcatttcagatt

SEQ ID NO: 914053 - DNA, 33 bp, Homo sapien
ccttcatcctctatccccagggcacagtcccaa

SEQ ID NO: 914054 - DNA, 33 bp, Homo sapien
ccttcatcctctatcctcagggcacagtcccaa

SEQ ID NO: 914055 - DNA, 33 bp, Homo sapien
agtgcttgccaggaaccggggagtaggggataa

SEQ ID NO: 914056 - DNA, 33 bp, Homo sapien
agtgcttgccaggaactggggagtaggggataa

SEQ ID NO: 914057 - DNA, 33 bp, Homo sapien
gcaactatgacatgaccggtaacgtgctagaaa

SEQ ID NO: 914058 - DNA, 33 bp, Homo sapien
gcaactatgacatgactggtaacgtgctagaaa

SEQ ID NO: 914059 - DNA, 33 bp, Homo sapien
catcactcacagtaacaccagatacacaatttc

SEQ ID NO: 914060 - DNA, 33 bp, Homo sapien
catcactcacagtaacgccagatacacaatttc

SEQ ID NO: 914061 - DNA, 33 bp, Homo sapien
aggacaaaagagccaacacttaccaggaggcag

SEQ ID NO: 914062 - DNA, 33 bp, Homo sapien
aggacaaaagagccaatacttaccaggaggcag

SEQ ID NO: 914063 - DNA, 33 bp, Homo sapien
gtgtatgtgacaatgtaaaattagttcatttta

SEQ ID NO: 914064 - DNA, 33 bp, Homo sapien
gtgtatgtgacaatgtcaaattagttcatttta

SEQ ID NO: 914065 - DNA, 33 bp, Homo sapien
atgttagaagcaatcacatcctcaaggaatgac

SEQ ID NO: 914066 - DNA, 33 bp, Homo sapien
atgttagaagcaatcagatcctcaaggaatgac

SEQ ID NO: 914067 - DNA, 33 bp, Homo sapien
atgggtggtattacgcaagcagagatgaggaaa

SEQ ID NO: 914068 - DNA, 33 bp, Homo sapien
atgggtggtattacgcgagcagagatgaggaaa

SEQ ID NO: 914069 - DNA, 33 bp, Homo sapien
tctcttgcctcaggaaaggacacattctttaaa

SEQ ID NO: 914070 - DNA, 33 bp, Homo sapien
tctcttgcctcaggaagggacacattctttaaa

SEQ ID NO: 914071 - DNA, 33 bp, Homo sapien
tttcatcaaatcttcccagcaaacttttttgtt

SEQ ID NO: 914072 - DNA, 33 bp, Homo sapien
tttcatcaaatcttcctagcaaacttttttgtt

SEQ ID NO: 914073 - DNA, 33 bp, Homo sapien
tgttgaatttgtagaaatgtcaaagtcaaactt

SEQ ID NO: 914074 - DNA, 33 bp, Homo sapien
tgttgaatttgtagaagtgtcaaagtcaaactt

SEQ ID NO: 914075 - DNA, 33 bp, Homo sapien
gagctccttcagaaccaggccatattgaactct

SEQ ID NO: 914076 - DNA, 33 bp, Homo sapien
gagctccttcagaacctggccatattgaactct

SEQ ID NO: 914077 - DNA, 33 bp, Homo sapien
tcatctacagtggaaaaatcttattttaagcaa

SEQ ID NO: 914078 - DNA, 33 bp, Homo sapien
tcatctacagtggaaacatcttattttaagcaa

SEQ ID NO: 914079 - DNA, 33 bp, Homo sapien
cctgcaggctaaataaatgctgaagtagaaacc

SEQ ID NO: 914080 - DNA, 33 bp, Homo sapien
cctgcaggctaaataagtgctgaagtagaaacc

SEQ ID NO: 914081 - DNA, 33 bp, Homo sapien
caaaggatatgtcaacagaagataagggcagaa

SEQ ID NO: 914082 - DNA, 33 bp, Homo sapien
caaaggatatgtcaacggaagataagggcagaa

SEQ ID NO: 914083 - DNA, 33 bp, Homo sapien
gatttgtgtactcccaagtcatcctataatgac

SEQ ID NO: 914084 - DNA, 33 bp, Homo sapien
gatttgtgtactcccaggtcatcctataatgac

SEQ ID NO: 914085 - DNA, 33 bp, Homo sapien
ttgttcatcctgtacacgactcaaaacttctgg

SEQ ID NO: 914086 - DNA, 33 bp, Homo sapien
ttgttcatcctgtacatgactcaaaacttctgg

SEQ ID NO: 914087 - DNA, 33 bp, Homo sapien
ctctcctgactccaatgactccattttcagtgt

SEQ ID NO: 914088 - DNA, 33 bp, Homo sapien
ctctcctgactccaattactccattttcagtgt

SEQ ID NO: 914089 - DNA, 33 bp, Homo sapien
gcaggggacagagataccgctttcccatggact

SEQ ID NO: 914090 - DNA, 33 bp, Homo sapien
gcaggggacagagatatcgctttcccatggact

SEQ ID NO: 914091 - DNA, 33 bp, Homo sapien
tattcaccaccttccaaagaatatacactctga

SEQ ID NO: 914092 - DNA, 33 bp, Homo sapien
tattcaccaccttccacagaatatacactctga

SEQ ID NO: 914093 - DNA, 33 bp, Homo sapien
tattcttagctcctaaaccagtgcttagcacct

SEQ ID NO: 914094 - DNA, 33 bp, Homo sapien
tattcttagctcctaatccagtgcttagcacct

SEQ ID NO: 914095 - DNA, 33 bp, Homo sapien
ctaattatatcagaaccggattgctgcgacatc

SEQ ID NO: 914096 - DNA, 33 bp, Homo sapien
ctaattatatcagaactggattgctgcgacatc

SEQ ID NO: 914097 - DNA, 33 bp, Homo sapien
gtctctgagatgccctcacccatcctgtttctg

SEQ ID NO: 914098 - DNA, 33 bp, Homo sapien
gtctctgagatgcccttacccatcctgtttctg

SEQ ID NO: 914099 - DNA, 33 bp, Homo sapien
aacaccttccaaatgggaacaccacaagttaga

SEQ ID NO: 914100 - DNA, 33 bp, Homo sapien
aacaccttccaaatggtaacaccacaagttaga

SEQ ID NO: 914101 - DNA, 33 bp, Homo sapien
gtcaataaggaagaaaagtggaaaagagggcat

SEQ ID NO: 914102 - DNA, 33 bp, Homo sapien
gtcaataaggaagaaaggtggaaaagagggcat

SEQ ID NO: 914103 - DNA, 33 bp, Homo sapien
aaaaaagagatgtttcaagtggaggacacattt

SEQ ID NO: 914104 - DNA, 33 bp, Homo sapien
aaaaaagagatgtttcgagtggaggacacattt

SEQ ID NO: 914105 - DNA, 33 bp, Homo sapien
cctttcccatttgattcaaacttaggcaaattg

SEQ ID NO: 914106 - DNA, 33 bp, Homo sapien
cctttcccatttgattgaaacttaggcaaattg

SEQ ID NO: 914107 - DNA, 33 bp, Homo sapien
agtggaggccttacagaaaattgcaccagaggc

SEQ ID NO: 914108 - DNA, 33 bp, Homo sapien
agtggaggccttacaggaaattgcaccagaggc

SEQ ID NO: 914109 - DNA, 33 bp, Homo sapien
agattaacatctggcacggtaggtcaagctctc

SEQ ID NO: 914110 - DNA, 33 bp, Homo sapien
agattaacatctggcagggtaggtcaagctctc

SEQ ID NO: 914111 - DNA, 33 bp, Homo sapien
agtggtgagctgtacacagaggccaaatagtat

SEQ ID NO: 914112 - DNA, 33 bp, Homo sapien
agtggtgagctgtacatagaggccaaatagtat

SEQ ID NO: 914113 - DNA, 33 bp, Homo sapien
ataaaattctgatccactcaggatactttgcat

SEQ ID NO: 914114 - DNA, 33 bp, Homo sapien
ataaaattctgatccattcaggatactttgcat

SEQ ID NO: 914115 - DNA, 33 bp, Homo sapien
ttgttataattcaacccggaaatccggccagac

SEQ ID NO: 914116 - DNA, 33 bp, Homo sapien
ttgttataattcaacctggaaatccggccagac

SEQ ID NO: 914117 - DNA, 33 bp, Homo sapien
acaaagtcagtcagatcaaagttcaagaccagt

SEQ ID NO: 914118 - DNA, 33 bp, Homo sapien
acaaagtcagtcagatgaaagttcaagaccagt

SEQ ID NO: 914119 - DNA, 33 bp, Homo sapien
atttatcacagctaaaagatacaaagtaaaagc

SEQ ID NO: 914120 - DNA, 33 bp, Homo sapien
atttatcacagctaaaggatacaaagtaaaagc

SEQ ID NO: 914121 - DNA, 33 bp, Homo sapien
aacagctagttgcaggcaagcgccattaaagtg

SEQ ID NO: 914122 - DNA, 33 bp, Homo sapien
aacagctagttgcaggtaagcgccattaaagtg

SEQ ID NO: 914123 - DNA, 33 bp, Homo sapien
ggcctcaagacatattaaaagcattctggtttt

SEQ ID NO: 914124 - DNA, 33 bp, Homo sapien
ggcctcaagacatattgaaagcattctggtttt

SEQ ID NO: 914125 - DNA, 33 bp, Homo sapien
cttgctgcagcctctaaatcagaatttggtgct

SEQ ID NO: 914126 - DNA, 33 bp, Homo sapien
cttgctgcagcctctacatcagaatttggtgct

SEQ ID NO: 914127 - DNA, 33 bp, Homo sapien
ttggtgcagggttgccacaaaacttcaatttgt

SEQ ID NO: 914128 - DNA, 33 bp, Homo sapien
ttggtgcagggttgccgcaaaacttcaatttgt

SEQ ID NO: 914129 - DNA, 33 bp, Homo sapien
atgttaaaatgtgatcaaattccagttaaattt

SEQ ID NO: 914130 - DNA, 33 bp, Homo sapien
atgttaaaatgtgatcgaattccagttaaattt

SEQ ID NO: 914131 - DNA, 33 bp, Homo sapien
tcttttgtgtatatggaattgcgactactgcaa

SEQ ID NO: 914132 - DNA, 33 bp, Homo sapien
tcttttgtgtatatggcattgcgactactgcaa

SEQ ID NO: 914133 - DNA, 33 bp, Homo sapien
ttttatatgactgacaacatagtagctttgttt

SEQ ID NO: 914134 - DNA, 33 bp, Homo sapien
ttttatatgactgacagcatagtagctttgttt

SEQ ID NO: 914135 - DNA, 33 bp, Homo sapien
agcatattaccatactcaacaattgtaacacaa

SEQ ID NO: 914136 - DNA, 33 bp, Homo sapien
agcatattaccatactgaacaattgtaacacaa

SEQ ID NO: 914137 - DNA, 33 bp, Homo sapien
taagtatttagaatccacagaaccatgtttttt

SEQ ID NO: 914138 - DNA, 33 bp, Homo sapien
taagtatttagaatccgcagaaccatgtttttt

SEQ ID NO: 914139 - DNA, 33 bp, Homo sapien
gtaaaaaatactttgcaaaaaatggctcccaaa

SEQ ID NO: 914140 - DNA, 33 bp, Homo sapien
gtaaaaaatactttgcgaaaaatggctcccaaa

SEQ ID NO: 914141 - DNA, 33 bp, Homo sapien
aaatcaaaaccaggtacggactagctaccttaa

SEQ ID NO: 914142 - DNA, 33 bp, Homo sapien
aaatcaaaaccaggtatggactagctaccttaa

SEQ ID NO: 914143 - DNA, 33 bp, Homo sapien
gcatagaaactgcatgcaaaatgttactgtgta

SEQ ID NO: 914144 - DNA, 33 bp, Homo sapien
gcatagaaactgcatgtaaaatgttactgtgta

SEQ ID NO: 914145 - DNA, 33 bp, Homo sapien
ctttgtcaaaataaataataccagtgatactaa

SEQ ID NO: 914146 - DNA, 33 bp, Homo sapien
ctttgtcaaaataaatgataccagtgatactaa

SEQ ID NO: 914147 - DNA, 33 bp, Homo sapien
catccattctttgtgacaatgtggaaaaaagat

SEQ ID NO: 914148 - DNA, 33 bp, Homo sapien
catccattctttgtgataatgtggaaaaaagat

SEQ ID NO: 914149 - DNA, 33 bp, Homo sapien
tatgctacattttggcaattcttacataactga

SEQ ID NO: 914150 - DNA, 33 bp, Homo sapien
tatgctacattttggcgattcttacataactga

SEQ ID NO: 914151 - DNA, 33 bp, Homo sapien
gcagtatttccagacaagtaagtaccctaacct

SEQ ID NO: 914152 - DNA, 33 bp, Homo sapien
gcagtatttccagacaggtaagtaccctaacct

SEQ ID NO: 914153 - DNA, 33 bp, Homo sapien
agcctgcccagtgccaaataaagcaaaaataat

SEQ ID NO: 914154 - DNA, 33 bp, Homo sapien
agcctgcccagtgccagataaagcaaaaataat

SEQ ID NO: 914155 - DNA, 33 bp, Homo sapien
ggtgcaaataagaaacaaatactcagaggatct

SEQ ID NO: 914156 - DNA, 33 bp, Homo sapien
ggtgcaaataagaaacgaatactcagaggatct

SEQ ID NO: 914157 - DNA, 33 bp, Homo sapien
gccatctgagaataccacaaatacaaaaaacct

SEQ ID NO: 914158 - DNA, 33 bp, Homo sapien
gccatctgagaataccgcaaatacaaaaaacct

SEQ ID NO: 914159 - DNA, 33 bp, Homo sapien
ggacacgaagtgccgtaaaaggagagggctctc

SEQ ID NO: 914160 - DNA, 33 bp, Homo sapien
ggacacgaagtgccgtcaaaggagagggctctc

SEQ ID NO: 914161 - DNA, 33 bp, Homo sapien
ttatccttgaaccacaatgaacttctcataaac

SEQ ID NO: 914162 - DNA, 33 bp, Homo sapien
ttatccttgaaccacagtgaacttctcataaac

SEQ ID NO: 914163 - DNA, 33 bp, Homo sapien
tatgagaatgagggaggagtcaggtaggatagt

SEQ ID NO: 914164 - DNA, 33 bp, Homo sapien
tatgagaatgagggagtagtcaggtaggatagt

SEQ ID NO: 914165 - DNA, 33 bp, Homo sapien
acattagtttgaaataaaacagagacaacactt

SEQ ID NO: 914166 - DNA, 33 bp, Homo sapien
acattagtttgaaatagaacagagacaacactt

SEQ ID NO: 914167 - DNA, 33 bp, Homo sapien
tatacgctcataggtgaaagagacttggccttg

SEQ ID NO: 914168 - DNA, 33 bp, Homo sapien
tatacgctcataggtggaagagacttggccttg

SEQ ID NO: 914169 - DNA, 33 bp, Homo sapien
cttttctgtagtataacgtttgtgagattcatc

SEQ ID NO: 914170 - DNA, 33 bp, Homo sapien
cttttctgtagtataatgtttgtgagattcatc

SEQ ID NO: 914171 - DNA, 33 bp, Homo sapien
cagcagtaccactacacacaagatggatgaatc

SEQ ID NO: 914172 - DNA, 33 bp, Homo sapien
cagcagtaccactacatacaagatggatgaatc

SEQ ID NO: 914173 - DNA, 33 bp, Homo sapien
tctggaaaacctcacaacctgatgacgctcaat

SEQ ID NO: 914174 - DNA, 33 bp, Homo sapien
tctggaaaacctcacatcctgatgacgctcaat

SEQ ID NO: 914175 - DNA, 33 bp, Homo sapien
acaattatgggggtaacacagagttgcatctgg

SEQ ID NO: 914176 - DNA, 33 bp, Homo sapien
acaattatgggggtaatacagagttgcatctgg

SEQ ID NO: 914177 - DNA, 33 bp, Homo sapien
acagcttcaaactatacggaataaccttcaaaa

SEQ ID NO: 914178 - DNA, 33 bp, Homo sapien
acagcttcaaactatatggaataaccttcaaaa

SEQ ID NO: 914179 - DNA, 33 bp, Homo sapien
ctacttccataaaacaagattggtgaatcacgg

SEQ ID NO: 914180 - DNA, 33 bp, Homo sapien
ctacttccataaaacaggattggtgaatcacgg

SEQ ID NO: 914181 - DNA, 33 bp, Homo sapien
gatttcatcccgtaaactgcacaatccccacct

SEQ ID NO: 914182 - DNA, 33 bp, Homo sapien
gatttcatcccgtaaattgcacaatccccacct

SEQ ID NO: 914183 - DNA, 33 bp, Homo sapien
ttcttacatttggctgcacttaccacaggtgct

SEQ ID NO: 914184 - DNA, 33 bp, Homo sapien
ttcttacatttggctgtacttaccacaggtgct

SEQ ID NO: 914185 - DNA, 33 bp, Homo sapien
cagcactcatccccccaataagaaagaacctag

SEQ ID NO: 914186 - DNA, 33 bp, Homo sapien
cagcactcatcccccccataagaaagaacctag

SEQ ID NO: 914187 - DNA, 33 bp, Homo sapien
tttcaattctagccctcaaattcatctgtggtg

SEQ ID NO: 914188 - DNA, 33 bp, Homo sapien
tttcaattctagcccttaaattcatctgtggtg

SEQ ID NO: 914189 - DNA, 33 bp, Homo sapien
actacctgggctatcactaacattcactcaagg

SEQ ID NO: 914190 - DNA, 33 bp, Homo sapien
actacctgggctatcagtaacattcactcaagg

SEQ ID NO: 914191 - DNA, 33 bp, Homo sapien
atttttaagagtgataaagtcatccctcagtat

SEQ ID NO: 914192 - DNA, 33 bp, Homo sapien
atttttaagagtgatacagtcatccctcagtat

SEQ ID NO: 914193 - DNA, 33 bp, Homo sapien
tgatctttagtaactacagacactggttttcaa

SEQ ID NO: 914194 - DNA, 33 bp, Homo sapien
tgatctttagtaactatagacactggttttcaa

SEQ ID NO: 914195 - DNA, 33 bp, Homo sapien
tgcatttgttacaaacagaacacaattacagta

SEQ ID NO: 914196 - DNA, 33 bp, Homo sapien
tgcatttgttacaaacggaacacaattacagta

SEQ ID NO: 914197 - DNA, 33 bp, Homo sapien
tgtgagccactacaccaagctttattaaatctt

SEQ ID NO: 914198 - DNA, 33 bp, Homo sapien
tgtgagccactacacccagctttattaaatctt

SEQ ID NO: 914199 - DNA, 33 bp, Homo sapien
tttattccatgatagaagcagtatttcctggac

SEQ ID NO: 914200 - DNA, 33 bp, Homo sapien
tttattccatgatagatgcagtatttcctggac

SEQ ID NO: 914201 - DNA, 33 bp, Homo sapien
agcatgggaactttgaatacaaacctggcacaa

SEQ ID NO: 914202 - DNA, 33 bp, Homo sapien
agcatgggaactttgactacaaacctggcacaa

SEQ ID NO: 914203 - DNA, 33 bp, Homo sapien
taaaccaagaaggtaactgccaactcatgttct

SEQ ID NO: 914204 - DNA, 33 bp, Homo sapien
taaaccaagaaggtaattgccaactcatgttct

SEQ ID NO: 914205 - DNA, 33 bp, Homo sapien
tgccaccatttaagcaataaggttttcaggtag

SEQ ID NO: 914206 - DNA, 33 bp, Homo sapien
tgccaccatttaagcattaaggttttcaggtag

SEQ ID NO: 914207 - DNA, 33 bp, Homo sapien
ccttgtctctcacttacgcttttgatacactga

SEQ ID NO: 914208 - DNA, 33 bp, Homo sapien
ccttgtctctcacttatgcttttgatacactga

SEQ ID NO: 914209 - DNA, 33 bp, Homo sapien
atgagtatatacctcaatcaaaaggataccata

SEQ ID NO: 914210 - DNA, 33 bp, Homo sapien
atgagtatatacctcactcaaaaggataccata

SEQ ID NO: 914211 - DNA, 33 bp, Homo sapien
accaagcaactaggaaatcaggcactgtgctag

SEQ ID NO: 914212 - DNA, 33 bp, Homo sapien
accaagcaactaggaagtcaggcactgtgctag

SEQ ID NO: 914213 - DNA, 33 bp, Homo sapien
ttttaacaaccagttaacatgggaactaataga

SEQ ID NO: 914214 - DNA, 33 bp, Homo sapien
ttttaacaaccagttatcatgggaactaataga

SEQ ID NO: 914215 - DNA, 33 bp, Homo sapien
gaggggtcacacaaacgatagcacagggtatgt

SEQ ID NO: 914216 - DNA, 33 bp, Homo sapien
gaggggtcacacaaactatagcacagggtatgt

SEQ ID NO: 914217 - DNA, 33 bp, Homo sapien
ctgggctagccattcacaaaaaaaactatcaat

SEQ ID NO: 914218 - DNA, 33 bp, Homo sapien
ctgggctagccattcagaaaaaaaactatcaat

SEQ ID NO: 914219 - DNA, 33 bp, Homo sapien
aatagagtcagcggtacctacagcatttgcagg

SEQ ID NO: 914220 - DNA, 33 bp, Homo sapien
aatagagtcagcggtatctacagcatttgcagg

SEQ ID NO: 914221 - DNA, 33 bp, Homo sapien
tgtcacaatgaaagtactaaaattggagtccct

SEQ ID NO: 914222 - DNA, 33 bp, Homo sapien
tgtcacaatgaaagtattaaaattggagtccct

SEQ ID NO: 914223 - DNA, 33 bp, Homo sapien
acaggggtcaagacaacggaagaacatcagaag

SEQ ID NO: 914224 - DNA, 33 bp, Homo sapien
acaggggtcaagacaagggaagaacatcagaag

SEQ ID NO: 914225 - DNA, 33 bp, Homo sapien
atttgcccaaagtcacacagctactaagaagca

SEQ ID NO: 914226 - DNA, 33 bp, Homo sapien
atttgcccaaagtcacgcagctactaagaagca

SEQ ID NO: 914227 - DNA, 33 bp, Homo sapien
ctggaagtctgctcaaatctgtaaaatgtagag

SEQ ID NO: 914228 - DNA, 33 bp, Homo sapien
ctggaagtctgctcaactctgtaaaatgtagag

SEQ ID NO: 914229 - DNA, 33 bp, Homo sapien
aatgtaagtgctatgtaaacaactgctgtactg

SEQ ID NO: 914230 - DNA, 33 bp, Homo sapien
aatgtaagtgctatgtcaacaactgctgtactg

SEQ ID NO: 914231 - DNA, 33 bp, Homo sapien
aaggatgactatatctcaccacattttcacaca

SEQ ID NO: 914232 - DNA, 33 bp, Homo sapien
aaggatgactatatcttaccacattttcacaca

SEQ ID NO: 914233 - DNA, 33 bp, Homo sapien
atgctctaatcatagcaactgtgtccaaggttc

SEQ ID NO: 914234 - DNA, 33 bp, Homo sapien
atgctctaatcatagcgactgtgtccaaggttc

SEQ ID NO: 914235 - DNA, 33 bp, Homo sapien
ataacaaattaaacttaaaacacagcacctggc

SEQ ID NO: 914236 - DNA, 33 bp, Homo sapien
ataacaaattaaacttcaaacacagcacctggc

SEQ ID NO: 914237 - DNA, 33 bp, Homo sapien
gtaggcaagagctggaagtgcttcaaagtagaa

SEQ ID NO: 914238 - DNA, 33 bp, Homo sapien
gtaggcaagagctggacgtgcttcaaagtagaa

SEQ ID NO: 914239 - DNA, 33 bp, Homo sapien
aggattagatctttggccatcagcgtcacctac

SEQ ID NO: 914240 - DNA, 33 bp, Homo sapien
aggattagatctttggtcatcagcgtcacctac

SEQ ID NO: 914241 - DNA, 33 bp, Homo sapien
gtcaaaggatgcacaagcgggcagtgagatttc

SEQ ID NO: 914242 - DNA, 33 bp, Homo sapien
gtcaaaggatgcacaatcgggcagtgagatttc

SEQ ID NO: 914243 - DNA, 33 bp, Homo sapien
tcaggctcctttagtaacaaagaccacatctga

SEQ ID NO: 914244 - DNA, 33 bp, Homo sapien
tcaggctcctttagtaccaaagaccacatctga

SEQ ID NO: 914245 - DNA, 33 bp, Homo sapien
atgtctcctgtactcacggatgctctcagtatc

SEQ ID NO: 914246 - DNA, 33 bp, Homo sapien
atgtctcctgtactcatggatgctctcagtatc

SEQ ID NO: 914247 - DNA, 33 bp, Homo sapien
aattgccagaccccacaactcagggcttcatca

SEQ ID NO: 914248 - DNA, 33 bp, Homo sapien
aattgccagaccccacgactcagggcttcatca

SEQ ID NO: 914249 - DNA, 33 bp, Homo sapien
tgtaagggccacccacaatggcattaacacatc

SEQ ID NO: 914250 - DNA, 33 bp, Homo sapien
tgtaagggccacccacgatggcattaacacatc

SEQ ID NO: 914251 - DNA, 33 bp, Homo sapien
gctatactaaaactccacattgattcaaagtga

SEQ ID NO: 914252 - DNA, 33 bp, Homo sapien
gctatactaaaactccgcattgattcaaagtga

SEQ ID NO: 914253 - DNA, 33 bp, Homo sapien
ctgggtcatcatcataagtgagactgctgacca

SEQ ID NO: 914254 - DNA, 33 bp, Homo sapien
ctgggtcatcatcataggtgagactgctgacca

SEQ ID NO: 914255 - DNA, 33 bp, Homo sapien
gttgaaggtaattcaaaatgtgtggtcagcagt

SEQ ID NO: 914256 - DNA, 33 bp, Homo sapien
gttgaaggtaattcaacatgtgtggtcagcagt

SEQ ID NO: 914257 - DNA, 33 bp, Homo sapien
tacccttatttgcagagcagggaagaactaaat

SEQ ID NO: 914258 - DNA, 33 bp, Homo sapien
tacccttatttgcagatcagggaagaactaaat

SEQ ID NO: 914259 - DNA, 33 bp, Homo sapien
aatggttattagaaaacagaaatagtggcatat

SEQ ID NO: 914260 - DNA, 33 bp, Homo sapien
aatggttattagaaaagagaaatagtggcatat

SEQ ID NO: 914261 - DNA, 33 bp, Homo sapien
gtaatagctagcaaaacgagttgaggaaacttt

SEQ ID NO: 914262 - DNA, 33 bp, Homo sapien
gtaatagctagcaaaatgagttgaggaaacttt

SEQ ID NO: 914263 - DNA, 33 bp, Homo sapien
aatataaataaaccaccgacacctcccagaccc

SEQ ID NO: 914264 - DNA, 33 bp, Homo sapien
aatataaataaaccactgacacctcccagaccc

SEQ ID NO: 914265 - DNA, 33 bp, Homo sapien
atggcaactatttaaaaaaacacacacgcctgt

SEQ ID NO: 914266 - DNA, 33 bp, Homo sapien
atggcaactatttaaacaaacacacacgcctgt

SEQ ID NO: 914267 - DNA, 33 bp, Homo sapien
agttttcttccactcaacaattaacacagagat

SEQ ID NO: 914268 - DNA, 33 bp, Homo sapien
agttttcttccactcagcaattaacacagagat

SEQ ID NO: 914269 - DNA, 33 bp, Homo sapien
taacacagagatacatgacatgagaataagtgg

SEQ ID NO: 914270 - DNA, 33 bp, Homo sapien
taacacagagatacattacatgagaataagtgg

SEQ ID NO: 914271 - DNA, 33 bp, Homo sapien
aagaaagactgaataaataagtgaatggatgaa

SEQ ID NO: 914272 - DNA, 33 bp, Homo sapien
aagaaagactgaataagtaagtgaatggatgaa

SEQ ID NO: 914273 - DNA, 33 bp, Homo sapien
gtgagagagaacaggaaagaagcatgagggcta

SEQ ID NO: 914274 - DNA, 33 bp, Homo sapien
gtgagagagaacaggagagaagcatgagggcta

SEQ ID NO: 914275 - DNA, 33 bp, Homo sapien
aatcagaagggatctcccagtcgtctgaagtct

SEQ ID NO: 914276 - DNA, 33 bp, Homo sapien
aatcagaagggatctctcagtcgtctgaagtct

SEQ ID NO: 914277 - DNA, 33 bp, Homo sapien
ttcaacaagagtgcgacatttttttgttttggt

SEQ ID NO: 914278 - DNA, 33 bp, Homo sapien
ttcaacaagagtgcgatatttttttgttttggt

SEQ ID NO: 914279 - DNA, 33 bp, Homo sapien
aagcaatgcccagctaaaattttaccacttggg

SEQ ID NO: 914280 - DNA, 33 bp, Homo sapien
aagcaatgcccagctacaattttaccacttggg

SEQ ID NO: 914281 - DNA, 33 bp, Homo sapien
gaatggacatagcagaacctttttattaatctt

SEQ ID NO: 914282 - DNA, 33 bp, Homo sapien
gaatggacatagcagagcctttttattaatctt

SEQ ID NO: 914283 - DNA, 33 bp, Homo sapien
cacaggtggtgcttgacagatgcttatggaact

SEQ ID NO: 914284 - DNA, 33 bp, Homo sapien
cacaggtggtgcttgatagatgcttatggaact

SEQ ID NO: 914285 - DNA, 33 bp, Homo sapien
tatcctttttgtgtccaatagaaagagagccac

SEQ ID NO: 914286 - DNA, 33 bp, Homo sapien
tatcctttttgtgtccgatagaaagagagccac

SEQ ID NO: 914287 - DNA, 33 bp, Homo sapien
caattatatccagcaaatcaactatgaattttt

SEQ ID NO: 914288 - DNA, 33 bp, Homo sapien
caattatatccagcaagtcaactatgaattttt

SEQ ID NO: 914289 - DNA, 33 bp, Homo sapien
aaattgatgtggagtgaaattccattctgcaca

SEQ ID NO: 914290 - DNA, 33 bp, Homo sapien
aaattgatgtggagtgcaattccattctgcaca

SEQ ID NO: 914291 - DNA, 33 bp, Homo sapien
tttaacaacaaagcccagctgctcaaagtacag

SEQ ID NO: 914292 - DNA, 33 bp, Homo sapien
tttaacaacaaagcccggctgctcaaagtacag

SEQ ID NO: 914293 - DNA, 33 bp, Homo sapien
caccaacttcttaataggtccagctgagaggtt

SEQ ID NO: 914294 - DNA, 33 bp, Homo sapien
caccaacttcttaatatgtccagctgagaggtt

SEQ ID NO: 914295 - DNA, 33 bp, Homo sapien
agggagctaatctgtaaaatttattcctgtgca

SEQ ID NO: 914296 - DNA, 33 bp, Homo sapien
agggagctaatctgtataatttattcctgtgca

SEQ ID NO: 914297 - DNA, 33 bp, Homo sapien
gaaaaggaagtatgcaccatggttgtaaaactg

SEQ ID NO: 914298 - DNA, 33 bp, Homo sapien
gaaaaggaagtatgcatcatggttgtaaaactg

SEQ ID NO: 914299 - DNA, 33 bp, Homo sapien
agctagcaagccttcacagtgagtcaaaaagca

SEQ ID NO: 914300 - DNA, 33 bp, Homo sapien
agctagcaagccttcatagtgagtcaaaaagca

SEQ ID NO: 914301 - DNA, 33 bp, Homo sapien
ttacatgaaaagcaccaaaacttgaggtggcct

SEQ ID NO: 914302 - DNA, 33 bp, Homo sapien
ttacatgaaaagcaccgaaacttgaggtggcct

SEQ ID NO: 914303 - DNA, 33 bp, Homo sapien
gagagagtagcatatgcaaaggctgcaaagttt

SEQ ID NO: 914304 - DNA, 33 bp, Homo sapien
gagagagtagcatatgtaaaggctgcaaagttt

SEQ ID NO: 914305 - DNA, 33 bp, Homo sapien
tacttcactcattcaccaatatattcagtgcac

SEQ ID NO: 914306 - DNA, 33 bp, Homo sapien
tacttcactcattcactaatatattcagtgcac

SEQ ID NO: 914307 - DNA, 33 bp, Homo sapien
tataccaagtgaaaaaactcatgtctctgaggt

SEQ ID NO: 914308 - DNA, 33 bp, Homo sapien
tataccaagtgaaaaacctcatgtctctgaggt

SEQ ID NO: 914309 - DNA, 33 bp, Homo sapien
ctgccatacagagaacaccagcaaaaagaagag

SEQ ID NO: 914310 - DNA, 33 bp, Homo sapien
ctgccatacagagaacgccagcaaaaagaagag

SEQ ID NO: 914311 - DNA, 33 bp, Homo sapien
agcaccagtgggaagcaacgcaaagtactatat

SEQ ID NO: 914312 - DNA, 33 bp, Homo sapien
agcaccagtgggaagcgacgcaaagtactatat

SEQ ID NO: 914313 - DNA, 33 bp, Homo sapien
agaatttaccagaaaaactgtcagaactaatat

SEQ ID NO: 914314 - DNA, 33 bp, Homo sapien
agaatttaccagaaaagctgtcagaactaatat

SEQ ID NO: 914315 - DNA, 33 bp, Homo sapien
ggcaacacgcatatcacagaagaggaaaatgaa

SEQ ID NO: 914316 - DNA, 33 bp, Homo sapien
ggcaacacgcatatcagagaagaggaaaatgaa

SEQ ID NO: 914317 - DNA, 33 bp, Homo sapien
cctaattccctgatagaagtacattttccagtt

SEQ ID NO: 914318 - DNA, 33 bp, Homo sapien
cctaattccctgatagcagtacattttccagtt

SEQ ID NO: 914319 - DNA, 33 bp, Homo sapien
gcagttattttctggccacaagctgccttttgt

SEQ ID NO: 914320 - DNA, 33 bp, Homo sapien
gcagttattttctggctacaagctgccttttgt

SEQ ID NO: 914321 - DNA, 33 bp, Homo sapien
aagatataagagaagacgtttaagaccatgtct

SEQ ID NO: 914322 - DNA, 33 bp, Homo sapien
aagatataagagaagatgtttaagaccatgtct

SEQ ID NO: 914323 - DNA, 33 bp, Homo sapien
gatttagttacaggtcagaagtgaaagcaaggc

SEQ ID NO: 914324 - DNA, 33 bp, Homo sapien
gatttagttacaggtcggaagtgaaagcaaggc

SEQ ID NO: 914325 - DNA, 33 bp, Homo sapien
catcagcctatcttaacactggtaaaccaacct

SEQ ID NO: 914326 - DNA, 33 bp, Homo sapien
catcagcctatcttaagactggtaaaccaacct

SEQ ID NO: 914327 - DNA, 33 bp, Homo sapien
gtggcaagtcattggaccattggtaaaattgga

SEQ ID NO: 914328 - DNA, 33 bp, Homo sapien
gtggcaagtcattggatcattggtaaaattgga

SEQ ID NO: 914329 - DNA, 33 bp, Homo sapien
acaaagaaatgctgccaatggtgagaatgcaca

SEQ ID NO: 914330 - DNA, 33 bp, Homo sapien
acaaagaaatgctgcccatggtgagaatgcaca

SEQ ID NO: 914331 - DNA, 33 bp, Homo sapien
agtgtgaattccaagacgccaggttattcaatc

SEQ ID NO: 914332 - DNA, 33 bp, Homo sapien
agtgtgaattccaagatgccaggttattcaatc

SEQ ID NO: 914333 - DNA, 33 bp, Homo sapien
tgtaaagcatgtgcaaaattgagagttcaagga

SEQ ID NO: 914334 - DNA, 33 bp, Homo sapien
tgtaaagcatgtgcaagattgagagttcaagga

SEQ ID NO: 914335 - DNA, 33 bp, Homo sapien
ggtggctataataacaacaaaggctatgaaatc

SEQ ID NO: 914336 - DNA, 33 bp, Homo sapien
ggtggctataataacagcaaaggctatgaaatc

SEQ ID NO: 914337 - DNA, 33 bp, Homo sapien
tacttgttaatttccaagcactgcagaacttgc

SEQ ID NO: 914338 - DNA, 33 bp, Homo sapien
tacttgttaatttccaggcactgcagaacttgc

SEQ ID NO: 914339 - DNA, 33 bp, Homo sapien
tttttgatatgttggaagttgaaagcaatttga

SEQ ID NO: 914340 - DNA, 33 bp, Homo sapien
tttttgatatgttggaggttgaaagcaatttga

SEQ ID NO: 914341 - DNA, 33 bp, Homo sapien
taccaaaacagtgtggaacattgagcagagcca

SEQ ID NO: 914342 - DNA, 33 bp, Homo sapien
taccaaaacagtgtggtacattgagcagagcca

SEQ ID NO: 914343 - DNA, 33 bp, Homo sapien
agtgactgaaggagccagagtagactatacaag

SEQ ID NO: 914344 - DNA, 33 bp, Homo sapien
agtgactgaaggagccggagtagactatacaag

SEQ ID NO: 914345 - DNA, 33 bp, Homo sapien
tggagaaagtattaaaaaggcaaagtggatttt

SEQ ID NO: 914346 - DNA, 33 bp, Homo sapien
tggagaaagtattaaacaggcaaagtggatttt

SEQ ID NO: 914347 - DNA, 33 bp, Homo sapien
tgaaggttaaacaacacgtcattagcttaaaga

SEQ ID NO: 914348 - DNA, 33 bp, Homo sapien
tgaaggttaaacaacatgtcattagcttaaaga

SEQ ID NO: 914349 - DNA, 33 bp, Homo sapien
tttgtcactcttgagcaatgaaggcaaactgtt

SEQ ID NO: 914350 - DNA, 33 bp, Homo sapien
tttgtcactcttgagcgatgaaggcaaactgtt

SEQ ID NO: 914351 - DNA, 33 bp, Homo sapien
tacaaaaatggccagacgttgggtacctgatga

SEQ ID NO: 914352 - DNA, 33 bp, Homo sapien
tacaaaaatggccagatgttgggtacctgatga

SEQ ID NO: 914353 - DNA, 33 bp, Homo sapien
agcaataacagacacaataaaagaagggaagtc

SEQ ID NO: 914354 - DNA, 33 bp, Homo sapien
agcaataacagacacagtaaaagaagggaagtc

SEQ ID NO: 914355 - DNA, 33 bp, Homo sapien
ccaaacagtaaacatcgcctattgcttactgct

SEQ ID NO: 914356 - DNA, 33 bp, Homo sapien
ccaaacagtaaacatctcctattgcttactgct

SEQ ID NO: 914357 - DNA, 33 bp, Homo sapien
caacctctgtcaagaaattatcttaaacaatca

SEQ ID NO: 914358 - DNA, 33 bp, Homo sapien
caacctctgtcaagaagttatcttaaacaatca

SEQ ID NO: 914359 - DNA, 33 bp, Homo sapien
ccactagaggaacaccaatgaagaaaggaagga

SEQ ID NO: 914360 - DNA, 33 bp, Homo sapien
ccactagaggaacaccgatgaagaaaggaagga

SEQ ID NO: 914361 - DNA, 33 bp, Homo sapien
atttccattacttttacagcttattggcttgtg

SEQ ID NO: 914362 - DNA, 33 bp, Homo sapien
atttccattacttttatagcttattggcttgtg

SEQ ID NO: 914363 - DNA, 33 bp, Homo sapien
ggcccttctgggaacacagtctttctcactacc

SEQ ID NO: 914364 - DNA, 33 bp, Homo sapien
ggcccttctgggaacatagtctttctcactacc

SEQ ID NO: 914365 - DNA, 33 bp, Homo sapien
attttgaccagggataagtggcacaaggatggc

SEQ ID NO: 914366 - DNA, 33 bp, Homo sapien
attttgaccagggatatgtggcacaaggatggc

SEQ ID NO: 914367 - DNA, 33 bp, Homo sapien
ttaagactgactctaacatgtttttatgaagtc

SEQ ID NO: 914368 - DNA, 33 bp, Homo sapien
ttaagactgactctaatatgtttttatgaagtc

SEQ ID NO: 914369 - DNA, 33 bp, Homo sapien
ctctgaggaatttcctaaagtgtaaatctagaa

SEQ ID NO: 914370 - DNA, 33 bp, Homo sapien
ctctgaggaatttcctgaagtgtaaatctagaa

SEQ ID NO: 914371 - DNA, 33 bp, Homo sapien
tgataaatccacttcacgtagcctggtgtgtgg

SEQ ID NO: 914372 - DNA, 33 bp, Homo sapien
tgataaatccacttcatgtagcctggtgtgtgg

SEQ ID NO: 914373 - DNA, 33 bp, Homo sapien
ccactgaacactaatacccaaagaatgctttgt

SEQ ID NO: 914374 - DNA, 33 bp, Homo sapien
ccactgaacactaatatccaaagaatgctttgt

SEQ ID NO: 914375 - DNA, 33 bp, Homo sapien
cacaccaatattgcaaaaacgaactttaaaaag

SEQ ID NO: 914376 - DNA, 33 bp, Homo sapien
cacaccaatattgcaagaacgaactttaaaaag

SEQ ID NO: 914377 - DNA, 33 bp, Homo sapien
ttccagcttggctcaactgggtatttaattacg

SEQ ID NO: 914378 - DNA, 33 bp, Homo sapien
ttccagcttggctcaattgggtatttaattacg

SEQ ID NO: 914379 - DNA, 33 bp, Homo sapien
gagacagtgcaaactacaactcttgctcactaa

SEQ ID NO: 914380 - DNA, 33 bp, Homo sapien
gagacagtgcaaactataactcttgctcactaa

SEQ ID NO: 914381 - DNA, 33 bp, Homo sapien
atgtctcaaacagatcagacgcaaacagggctg

SEQ ID NO: 914382 - DNA, 33 bp, Homo sapien
atgtctcaaacagatcggacgcaaacagggctg

SEQ ID NO: 914383 - DNA, 33 bp, Homo sapien
aactttgttcaaatgaaatcttgggcaatagcc

SEQ ID NO: 914384 - DNA, 33 bp, Homo sapien
aactttgttcaaatgagatcttgggcaatagcc

SEQ ID NO: 914385 - DNA, 33 bp, Homo sapien
ctgtaaaatggagataataacacccctctcaca

SEQ ID NO: 914386 - DNA, 33 bp, Homo sapien
ctgtaaaatggagatagtaacacccctctcaca

SEQ ID NO: 914387 - DNA, 33 bp, Homo sapien
agtacattaatgccacacttcctctcattatag

SEQ ID NO: 914388 - DNA, 33 bp, Homo sapien
agtacattaatgccacgcttcctctcattatag

SEQ ID NO: 914389 - DNA, 33 bp, Homo sapien
gaaatacatggattcaagattaattgtacattg

SEQ ID NO: 914390 - DNA, 33 bp, Homo sapien
gaaatacatggattcaggattaattgtacattg

SEQ ID NO: 914391 - DNA, 33 bp, Homo sapien
gttgctaaggataaaaatcaatacatgatcagt

SEQ ID NO: 914392 - DNA, 33 bp, Homo sapien
gttgctaaggataaaagtcaatacatgatcagt

SEQ ID NO: 914393 - DNA, 33 bp, Homo sapien
cctgttacagttgagacgaaacgcaaaacctac

SEQ ID NO: 914394 - DNA, 33 bp, Homo sapien
cctgttacagttgagatgaaacgcaaaacctac

SEQ ID NO: 914395 - DNA, 33 bp, Homo sapien
aatcatttcatgagacaagagagggtgtgatct

SEQ ID NO: 914396 - DNA, 33 bp, Homo sapien
aatcatttcatgagacgagagagggtgtgatct

SEQ ID NO: 914397 - DNA, 33 bp, Homo sapien
tgggggccactgttccacctatcacaccaaaca

SEQ ID NO: 914398 - DNA, 33 bp, Homo sapien
tgggggccactgttccgcctatcacaccaaaca

SEQ ID NO: 914399 - DNA, 33 bp, Homo sapien
caattgtaacagatgcaaaaactttggcccagg

SEQ ID NO: 914400 - DNA, 33 bp, Homo sapien
caattgtaacagatgcgaaaactttggcccagg

SEQ ID NO: 914401 - DNA, 33 bp, Homo sapien
tctgggaattggagtacaggagcaatgaacaat

SEQ ID NO: 914402 - DNA, 33 bp, Homo sapien
tctgggaattggagtagaggagcaatgaacaat

SEQ ID NO: 914403 - DNA, 33 bp, Homo sapien
ttggtttctgcataaactctacattgttcattg

SEQ ID NO: 914404 - DNA, 33 bp, Homo sapien
ttggtttctgcataaattctacattgttcattg

SEQ ID NO: 914405 - DNA, 33 bp, Homo sapien
taaaactaagtgagtacgaagactaacgagtgg

SEQ ID NO: 914406 - DNA, 33 bp, Homo sapien
taaaactaagtgagtatgaagactaacgagtgg

SEQ ID NO: 914407 - DNA, 33 bp, Homo sapien
gttttgttcactgctacattaaggagcttcaag

SEQ ID NO: 914408 - DNA, 33 bp, Homo sapien
gttttgttcactgctatattaaggagcttcaag

SEQ ID NO: 914409 - DNA, 33 bp, Homo sapien
ataatctttcaagaaagttggcccaggatgaaa

SEQ ID NO: 914410 - DNA, 33 bp, Homo sapien
ataatctttcaagaaatttggcccaggatgaaa

SEQ ID NO: 914411 - DNA, 33 bp, Homo sapien
aggataaaaccatcacaggaagaataagttcaa

SEQ ID NO: 914412 - DNA, 33 bp, Homo sapien
aggataaaaccatcaccggaagaataagttcaa

SEQ ID NO: 914413 - DNA, 33 bp, Homo sapien
atagttgatgatgatacaccatattcttgaaaa

SEQ ID NO: 914414 - DNA, 33 bp, Homo sapien
atagttgatgatgatataccatattcttgaaaa

SEQ ID NO: 914415 - DNA, 33 bp, Homo sapien
accaccatgaccacaacaacaaaagacttaaga

SEQ ID NO: 914416 - DNA, 33 bp, Homo sapien
accaccatgaccacaataacaaaagacttaaga

SEQ ID NO: 914417 - DNA, 33 bp, Homo sapien
ggacctagaatagccaaattattttgaaaaagc

SEQ ID NO: 914418 - DNA, 33 bp, Homo sapien
ggacctagaatagccacattattttgaaaaagc

SEQ ID NO: 914419 - DNA, 33 bp, Homo sapien
tacttctcaatagttcaaaaattatattaactg

SEQ ID NO: 914420 - DNA, 33 bp, Homo sapien
tacttctcaatagttcgaaaattatattaactg

SEQ ID NO: 914421 - DNA, 33 bp, Homo sapien
ttaagtctgagaatacaaagtactgtgtcagat

SEQ ID NO: 914422 - DNA, 33 bp, Homo sapien
ttaagtctgagaatacgaagtactgtgtcagat

SEQ ID NO: 914423 - DNA, 33 bp, Homo sapien
acatcctttagtgcccactcatagagacagagc

SEQ ID NO: 914424 - DNA, 33 bp, Homo sapien
acatcctttagtgcccgctcatagagacagagc

SEQ ID NO: 914425 - DNA, 33 bp, Homo sapien
aagttggttaaatatcacctggaaaatacctca

SEQ ID NO: 914426 - DNA, 33 bp, Homo sapien
aagttggttaaatatcgcctggaaaatacctca

SEQ ID NO: 914427 - DNA, 33 bp, Homo sapien
cctcctgaatcatctggatatctttaaagcacc

SEQ ID NO: 914428 - DNA, 33 bp, Homo sapien
cctcctgaatcatctgtatatctttaaagcacc

SEQ ID NO: 914429 - DNA, 33 bp, Homo sapien
taaagacagttccaacactttcatttggaacta

SEQ ID NO: 914430 - DNA, 33 bp, Homo sapien
taaagacagttccaacgctttcatttggaacta

SEQ ID NO: 914431 - DNA, 33 bp, Homo sapien
agaaataaaaaagacactgcccttatgcagcca

SEQ ID NO: 914432 - DNA, 33 bp, Homo sapien
agaaataaaaaagacattgcccttatgcagcca

SEQ ID NO: 914433 - DNA, 33 bp, Homo sapien
gaaattgaaaagttacaatgaagagaggacaag

SEQ ID NO: 914434 - DNA, 33 bp, Homo sapien
gaaattgaaaagttaccatgaagagaggacaag

SEQ ID NO: 914435 - DNA, 33 bp, Homo sapien
agcctataattattgacgggtgtatgcgaacaa

SEQ ID NO: 914436 - DNA, 33 bp, Homo sapien
agcctataattattgatgggtgtatgcgaacaa

SEQ ID NO: 914437 - DNA, 33 bp, Homo sapien
tttgggtcctggagtcaattctatgaaaaatac

SEQ ID NO: 914438 - DNA, 33 bp, Homo sapien
tttgggtcctggagtctattctatgaaaaatac

SEQ ID NO: 914439 - DNA, 33 bp, Homo sapien
agaccatctggtctgcaaaacctaaaatgtttt

SEQ ID NO: 914440 - DNA, 33 bp, Homo sapien
agaccatctggtctgccaaacctaaaatgtttt

SEQ ID NO: 914441 - DNA, 33 bp, Homo sapien
aatatttgaccctttacagagtttgctgatttc

SEQ ID NO: 914442 - DNA, 33 bp, Homo sapien
aatatttgaccctttagagagtttgctgatttc

SEQ ID NO: 914443 - DNA, 33 bp, Homo sapien
ttttaaatatcaccaaagctgtattgccattta

SEQ ID NO: 914444 - DNA, 33 bp, Homo sapien
ttttaaatatcaccaacgctgtattgccattta

SEQ ID NO: 914445 - DNA, 33 bp, Homo sapien
gagaaacacgaacaaacgcttttacactgttgg

SEQ ID NO: 914446 - DNA, 33 bp, Homo sapien
gagaaacacgaacaaatgcttttacactgttgg

SEQ ID NO: 914447 - DNA, 33 bp, Homo sapien
catctcatacggaaaactttaaactggactagg

SEQ ID NO: 914448 - DNA, 33 bp, Homo sapien
catctcatacggaaaattttaaactggactagg

SEQ ID NO: 914449 - DNA, 33 bp, Homo sapien
tagaacttcctacacacgaagagcagtcccaag

SEQ ID NO: 914450 - DNA, 33 bp, Homo sapien
tagaacttcctacacatgaagagcagtcccaag

SEQ ID NO: 914451 - DNA, 33 bp, Homo sapien
atatgtaagcggacagaaaaagcagaagtctaa

SEQ ID NO: 914452 - DNA, 33 bp, Homo sapien
atatgtaagcggacagtaaaagcagaagtctaa

SEQ ID NO: 914453 - DNA, 33 bp, Homo sapien
ctagatgaaatagctaatacttacctcacagag

SEQ ID NO: 914454 - DNA, 33 bp, Homo sapien
ctagatgaaatagctagtacttacctcacagag

SEQ ID NO: 914455 - DNA, 33 bp, Homo sapien
cagaatatgactcttacgcttttagcttttaat

SEQ ID NO: 914456 - DNA, 33 bp, Homo sapien
cagaatatgactcttatgcttttagcttttaat

SEQ ID NO: 914457 - DNA, 33 bp, Homo sapien
atatctcactgttttccagcttcactctcctgt

SEQ ID NO: 914458 - DNA, 33 bp, Homo sapien
atatctcactgttttctagcttcactctcctgt

SEQ ID NO: 914459 - DNA, 33 bp, Homo sapien
aaaatgcaaattttcacataaatgagatctctt

SEQ ID NO: 914460 - DNA, 33 bp, Homo sapien
aaaatgcaaattttcatataaatgagatctctt

SEQ ID NO: 914461 - DNA, 33 bp, Homo sapien
aaataactagcattaccaccgagggagggaaga

SEQ ID NO: 914462 - DNA, 33 bp, Homo sapien
aaataactagcattacgaccgagggagggaaga

SEQ ID NO: 914463 - DNA, 33 bp, Homo sapien
tttataagtttgagacaagacatacatagtttt

SEQ ID NO: 914464 - DNA, 33 bp, Homo sapien
tttataagtttgagacgagacatacatagtttt

SEQ ID NO: 914465 - DNA, 33 bp, Homo sapien
atgttttgatacttataaagtgtagtgatcaga

SEQ ID NO: 914466 - DNA, 33 bp, Homo sapien
atgttttgatacttatgaagtgtagtgatcaga

SEQ ID NO: 914467 - DNA, 33 bp, Homo sapien
atgtaacagggtggaaccttgagcgctggtggg

SEQ ID NO: 914468 - DNA, 33 bp, Homo sapien
atgtaacagggtggaagcttgagcgctggtggg

SEQ ID NO: 914469 - DNA, 33 bp, Homo sapien
tacaaaatgcctaatacataccaagtgcttaat

SEQ ID NO: 914470 - DNA, 33 bp, Homo sapien
tacaaaatgcctaatatataccaagtgcttaat

SEQ ID NO: 914471 - DNA, 33 bp, Homo sapien
gaaaatgatgggtgaaagtagttaagacaagtg

SEQ ID NO: 914472 - DNA, 33 bp, Homo sapien
gaaaatgatgggtgaatgtagttaagacaagtg

SEQ ID NO: 914473 - DNA, 33 bp, Homo sapien
ttctgacccatgtggaataacagcaagcctacc

SEQ ID NO: 914474 - DNA, 33 bp, Homo sapien
ttctgacccatgtggagtaacagcaagcctacc

SEQ ID NO: 914475 - DNA, 33 bp, Homo sapien
tgtggatgattaaggtaacactgatgaaagaat

SEQ ID NO: 914476 - DNA, 33 bp, Homo sapien
tgtggatgattaaggtcacactgatgaaagaat

SEQ ID NO: 914477 - DNA, 33 bp, Homo sapien
ttaatttgtagtcaataatatcagcttggaaaa

SEQ ID NO: 914478 - DNA, 33 bp, Homo sapien
ttaatttgtagtcaatcatatcagcttggaaaa

SEQ ID NO: 914479 - DNA, 33 bp, Homo sapien
aagggtacttgtcagccactttattgaatatct

SEQ ID NO: 914480 - DNA, 33 bp, Homo sapien
aagggtacttgtcagctactttattgaatatct

SEQ ID NO: 914481 - DNA, 33 bp, Homo sapien
acagaacttatttttcgagtgaagcagcctttt

SEQ ID NO: 914482 - DNA, 33 bp, Homo sapien
acagaacttatttttctagtgaagcagcctttt

SEQ ID NO: 914483 - DNA, 33 bp, Homo sapien
atggcacttagaccaacggatcagactgagcac

SEQ ID NO: 914484 - DNA, 33 bp, Homo sapien
atggcacttagaccaatggatcagactgagcac

SEQ ID NO: 914485 - DNA, 33 bp, Homo sapien
gaagacagaaaacagacggtcataatatattct

SEQ ID NO: 914486 - DNA, 33 bp, Homo sapien
gaagacagaaaacagatggtcataatatattct

SEQ ID NO: 914487 - DNA, 33 bp, Homo sapien
atctctcccagtgccacagcggacacatcatct

SEQ ID NO: 914488 - DNA, 33 bp, Homo sapien
atctctcccagtgccatagcggacacatcatct

SEQ ID NO: 914489 - DNA, 33 bp, Homo sapien
ggggtagaggagagaacaaaaagttgacattgg

SEQ ID NO: 914490 - DNA, 33 bp, Homo sapien
ggggtagaggagagaagaaaaagttgacattgg

SEQ ID NO: 914491 - DNA, 33 bp, Homo sapien
ccaaattcctctcaaaccatttttctaagagta

SEQ ID NO: 914492 - DNA, 33 bp, Homo sapien
ccaaattcctctcaaatcatttttctaagagta

SEQ ID NO: 914493 - DNA, 33 bp, Homo sapien
ccatatgtaaagctgaaaggagaaatggaaaca

SEQ ID NO: 914494 - DNA, 33 bp, Homo sapien
ccatatgtaaagctgataggagaaatggaaaca

SEQ ID NO: 914495 - DNA, 33 bp, Homo sapien
ttcattaccagtgaacaaaagcattgatccata

SEQ ID NO: 914496 - DNA, 33 bp, Homo sapien
ttcattaccagtgaacgaaagcattgatccata

SEQ ID NO: 914497 - DNA, 33 bp, Homo sapien
gtaaagattgccaacactctaatccctgctgta

SEQ ID NO: 914498 - DNA, 33 bp, Homo sapien
gtaaagattgccaacattctaatccctgctgta

SEQ ID NO: 914499 - DNA, 33 bp, Homo sapien
caccttcatgcataaacaccccttacagatcca

SEQ ID NO: 914500 - DNA, 33 bp, Homo sapien
caccttcatgcataaataccccttacagatcca

SEQ ID NO: 914501 - DNA, 33 bp, Homo sapien
ttttactattatattccatgcactgtcctggac

SEQ ID NO: 914502 - DNA, 33 bp, Homo sapien
ttttactattatattcgatgcactgtcctggac

SEQ ID NO: 914503 - DNA, 33 bp, Homo sapien
tgcccagatagttgctaaaacagtatttctggg

SEQ ID NO: 914504 - DNA, 33 bp, Homo sapien
tgcccagatagttgctgaaacagtatttctggg

SEQ ID NO: 914505 - DNA, 33 bp, Homo sapien
tgtgaaaggagatttgaatgatgaggagccagc

SEQ ID NO: 914506 - DNA, 33 bp, Homo sapien
tgtgaaaggagatttggatgatgaggagccagc

SEQ ID NO: 914507 - DNA, 33 bp, Homo sapien
aatcctactgtgttcaaaaacatttttgtgcat

SEQ ID NO: 914508 - DNA, 33 bp, Homo sapien
aatcctactgtgttcacaaacatttttgtgcat

SEQ ID NO: 914509 - DNA, 33 bp, Homo sapien
ctcgtcatcctagagagtccaatgtattaaaaa

SEQ ID NO: 914510 - DNA, 33 bp, Homo sapien
ctcgtcatcctagagattccaatgtattaaaaa

SEQ ID NO: 914511 - DNA, 33 bp, Homo sapien
gccaaattctctttacagaaatgcttaagtaac

SEQ ID NO: 914512 - DNA, 33 bp, Homo sapien
gccaaattctctttactgaaatgcttaagtaac

SEQ ID NO: 914513 - DNA, 33 bp, Homo sapien
gaattcaatttatacaatacgagatgctatctt

SEQ ID NO: 914514 - DNA, 33 bp, Homo sapien
gaattcaatttatacagtacgagatgctatctt

SEQ ID NO: 914515 - DNA, 33 bp, Homo sapien
cattttattgttggtacacgacaaccattctaa

SEQ ID NO: 914516 - DNA, 33 bp, Homo sapien
cattttattgttggtatacgacaaccattctaa

SEQ ID NO: 914517 - DNA, 33 bp, Homo sapien
taaaaatctgccattacgaatttactatttata

SEQ ID NO: 914518 - DNA, 33 bp, Homo sapien
taaaaatctgccattatgaatttactatttata

SEQ ID NO: 914519 - DNA, 33 bp, Homo sapien
ccactgaacacctttacgtaactcacttactgg

SEQ ID NO: 914520 - DNA, 33 bp, Homo sapien
ccactgaacacctttatgtaactcacttactgg

SEQ ID NO: 914521 - DNA, 33 bp, Homo sapien
taatttccttcacaaactggccttttcacggtt

SEQ ID NO: 914522 - DNA, 33 bp, Homo sapien
taatttccttcacaaattggccttttcacggtt

SEQ ID NO: 914523 - DNA, 33 bp, Homo sapien
aatttctccactgaaaactcccgtggaaaaaaa

SEQ ID NO: 914524 - DNA, 33 bp, Homo sapien
aatttctccactgaaatctcccgtggaaaaaaa

SEQ ID NO: 914525 - DNA, 33 bp, Homo sapien
attccctgctgattcaatgaacttttgattagc

SEQ ID NO: 914526 - DNA, 33 bp, Homo sapien
attccctgctgattcagtgaacttttgattagc

SEQ ID NO: 914527 - DNA, 33 bp, Homo sapien
ttagcctttgagaaagaacagtctgcttccata

SEQ ID NO: 914528 - DNA, 33 bp, Homo sapien
ttagcctttgagaaagtacagtctgcttccata

SEQ ID NO: 914529 - DNA, 33 bp, Homo sapien
aagtttcagaatgtcaaatgaagtaataaaatg

SEQ ID NO: 914530 - DNA, 33 bp, Homo sapien
aagtttcagaatgtcagatgaagtaataaaatg

SEQ ID NO: 914531 - DNA, 33 bp, Homo sapien
agttctgctttgcaagacacagaaatggatttt

SEQ ID NO: 914532 - DNA, 33 bp, Homo sapien
agttctgctttgcaaggcacagaaatggatttt

SEQ ID NO: 914533 - DNA, 33 bp, Homo sapien
ttcaagcttcagcttccgaaattatgaaggcac

SEQ ID NO: 914534 - DNA, 33 bp, Homo sapien
ttcaagcttcagcttctgaaattatgaaggcac

SEQ ID NO: 914535 - DNA, 33 bp, Homo sapien
atctagactttgaaaaatactaagcagagccat

SEQ ID NO: 914536 - DNA, 33 bp, Homo sapien
atctagactttgaaaactactaagcagagccat

SEQ ID NO: 914537 - DNA, 33 bp, Homo sapien
ccaaatgtaaatcatcactaccttgtgctattt

SEQ ID NO: 914538 - DNA, 33 bp, Homo sapien
ccaaatgtaaatcatctctaccttgtgctattt

SEQ ID NO: 914539 - DNA, 33 bp, Homo sapien
tacaggtcagaagatacctagtgattttcctct

SEQ ID NO: 914540 - DNA, 33 bp, Homo sapien
tacaggtcagaagatatctagtgattttcctct

SEQ ID NO: 914541 - DNA, 33 bp, Homo sapien
cttcatgaggtttttacgatggatgtatacagg

SEQ ID NO: 914542 - DNA, 33 bp, Homo sapien
cttcatgaggtttttatgatggatgtatacagg

SEQ ID NO: 914543 - DNA, 33 bp, Homo sapien
tttgtgggatgaaaaaaaatggcccacttagta

SEQ ID NO: 914544 - DNA, 33 bp, Homo sapien
tttgtgggatgaaaaacaatggcccacttagta

SEQ ID NO: 914545 - DNA, 33 bp, Homo sapien
gaacagagagttgaaacgtgacatacaccaggt

SEQ ID NO: 914546 - DNA, 33 bp, Homo sapien
gaacagagagttgaaatgtgacatacaccaggt

SEQ ID NO: 914547 - DNA, 33 bp, Homo sapien
tggaatagagagccacacagaacagtgaaaaaa

SEQ ID NO: 914548 - DNA, 33 bp, Homo sapien
tggaatagagagccacgcagaacagtgaaaaaa

SEQ ID NO: 914549 - DNA, 33 bp, Homo sapien
ctgatggaccaaaatgcatctaagattggaagt

SEQ ID NO: 914550 - DNA, 33 bp, Homo sapien
ctgatggaccaaaatggatctaagattggaagt

SEQ ID NO: 914551 - DNA, 33 bp, Homo sapien
ttaactgcatttctcacgaagaataaatacttc

SEQ ID NO: 914552 - DNA, 33 bp, Homo sapien
ttaactgcatttctcatgaagaataaatacttc

SEQ ID NO: 914553 - DNA, 33 bp, Homo sapien
tctaaatcctaggccaatgaagtatttattctt

SEQ ID NO: 914554 - DNA, 33 bp, Homo sapien
tctaaatcctaggccagtgaagtatttattctt

SEQ ID NO: 914555 - DNA, 33 bp, Homo sapien
ctttaaacacactaagaaatttagacattttcc

SEQ ID NO: 914556 - DNA, 33 bp, Homo sapien
ctttaaacacactaaggaatttagacattttcc

SEQ ID NO: 914557 - DNA, 33 bp, Homo sapien
agacgtgactaaagtggaagctagagccgttag

SEQ ID NO: 914558 - DNA, 33 bp, Homo sapien
agacgtgactaaagtgtaagctagagccgttag

SEQ ID NO: 914559 - DNA, 33 bp, Homo sapien
gtgccaggtgaacctaaacttttgtggtagcaa

SEQ ID NO: 914560 - DNA, 33 bp, Homo sapien
gtgccaggtgaacctagacttttgtggtagcaa

SEQ ID NO: 914561 - DNA, 33 bp, Homo sapien
ttaaagttttctgtgacggaagtgatcaactta

SEQ ID NO: 914562 - DNA, 33 bp, Homo sapien
ttaaagttttctgtgatggaagtgatcaactta

SEQ ID NO: 914563 - DNA, 33 bp, Homo sapien
gagttcctttaattgacactttatgaagacaac

SEQ ID NO: 914564 - DNA, 33 bp, Homo sapien
gagttcctttaattgatactttatgaagacaac

SEQ ID NO: 914565 - DNA, 33 bp, Homo sapien
cttataagcataattgcaatgcctaaaataaga

SEQ ID NO: 914566 - DNA, 33 bp, Homo sapien
cttataagcataattggaatgcctaaaataaga

SEQ ID NO: 914567 - DNA, 33 bp, Homo sapien
acagtgttatcgaaagcctgtaaaatatgctat

SEQ ID NO: 914568 - DNA, 33 bp, Homo sapien
acagtgttatcgaaagtctgtaaaatatgctat

SEQ ID NO: 914569 - DNA, 33 bp, Homo sapien
aatgaaagcaaaattagggaacacttatttgag

SEQ ID NO: 914570 - DNA, 33 bp, Homo sapien
aatgaaagcaaaattatggaacacttatttgag

SEQ ID NO: 914571 - DNA, 33 bp, Homo sapien
gtcacacccatttggacatgatgaataggaagg

SEQ ID NO: 914572 - DNA, 33 bp, Homo sapien
gtcacacccatttggatatgatgaataggaagg

SEQ ID NO: 914573 - DNA, 33 bp, Homo sapien
tcccaaccactactcacattacttctgtcattc

SEQ ID NO: 914574 - DNA, 33 bp, Homo sapien
tcccaaccactactcatattacttctgtcattc

SEQ ID NO: 914575 - DNA, 33 bp, Homo sapien
actagctcacctgaggacacatacagagcaaaa

SEQ ID NO: 914576 - DNA, 33 bp, Homo sapien
actagctcacctgagggcacatacagagcaaaa

SEQ ID NO: 914577 - DNA, 33 bp, Homo sapien
actgtaccatgtgcccaaaactgacctgtctac

SEQ ID NO: 914578 - DNA, 33 bp, Homo sapien
actgtaccatgtgcccgaaactgacctgtctac

SEQ ID NO: 914579 - DNA, 33 bp, Homo sapien
tgacatcctcaaacacagtgaactgaaagcaaa

SEQ ID NO: 914580 - DNA, 33 bp, Homo sapien
tgacatcctcaaacacggtgaactgaaagcaaa

SEQ ID NO: 914581 - DNA, 33 bp, Homo sapien
ttgaaactaaatagcaagatgatggcataaaaa

SEQ ID NO: 914582 - DNA, 33 bp, Homo sapien
ttgaaactaaatagcaggatgatggcataaaaa

SEQ ID NO: 914583 - DNA, 33 bp, Homo sapien
ccaacagcaagtaagactcaaaagtgttcataa

SEQ ID NO: 914584 - DNA, 33 bp, Homo sapien
ccaacagcaagtaagattcaaaagtgttcataa

SEQ ID NO: 914585 - DNA, 33 bp, Homo sapien
acactggtattacagaatagcaatgggcacata

SEQ ID NO: 914586 - DNA, 33 bp, Homo sapien
acactggtattacagagtagcaatgggcacata

SEQ ID NO: 914587 - DNA, 33 bp, Homo sapien
ttccacagtggtcagaacaaaaggtacaaaatg

SEQ ID NO: 914588 - DNA, 33 bp, Homo sapien
ttccacagtggtcagagcaaaaggtacaaaatg

SEQ ID NO: 914589 - DNA, 33 bp, Homo sapien
atcgattgagtgatgccagtcacacagctatcc

SEQ ID NO: 914590 - DNA, 33 bp, Homo sapien
atcgattgagtgatgcgagtcacacagctatcc

SEQ ID NO: 914591 - DNA, 33 bp, Homo sapien
aagaggccagagaaaacactttccatcctacag

SEQ ID NO: 914592 - DNA, 33 bp, Homo sapien
aagaggccagagaaaatactttccatcctacag

SEQ ID NO: 914593 - DNA, 33 bp, Homo sapien
aggttttcacttctctaagaacccaagagtgca

SEQ ID NO: 914594 - DNA, 33 bp, Homo sapien
aggttttcacttctctgagaacccaagagtgca

SEQ ID NO: 914595 - DNA, 33 bp, Homo sapien
tctataaatggaatcacaatgtgtgtaaacttt

SEQ ID NO: 914596 - DNA, 33 bp, Homo sapien
tctataaatggaatcataatgtgtgtaaacttt

SEQ ID NO: 914597 - DNA, 33 bp, Homo sapien
tcttttcgggtcagaactactcagaaataccaa

SEQ ID NO: 914598 - DNA, 33 bp, Homo sapien
tcttttcgggtcagaagtactcagaaataccaa

SEQ ID NO: 914599 - DNA, 33 bp, Homo sapien
aagccaaaataccaaacagcattgctacggagt

SEQ ID NO: 914600 - DNA, 33 bp, Homo sapien
aagccaaaataccaaatagcattgctacggagt

SEQ ID NO: 914601 - DNA, 33 bp, Homo sapien
taattggagtcagatacgatgcataagagaaac

SEQ ID NO: 914602 - DNA, 33 bp, Homo sapien
taattggagtcagatatgatgcataagagaaac

SEQ ID NO: 914603 - DNA, 33 bp, Homo sapien
cacgacttgcgaaaaaagctaaacctccagaag

SEQ ID NO: 914604 - DNA, 33 bp, Homo sapien
cacgacttgcgaaaaaggctaaacctccagaag

SEQ ID NO: 914605 - DNA, 33 bp, Homo sapien
ctgaaatggcatttccagaaagtaatgataaaa

SEQ ID NO: 914606 - DNA, 33 bp, Homo sapien
ctgaaatggcatttcccgaaagtaatgataaaa

SEQ ID NO: 914607 - DNA, 33 bp, Homo sapien
ttacctggtggacaacacatattaacaatgcat

SEQ ID NO: 914608 - DNA, 33 bp, Homo sapien
ttacctggtggacaacgcatattaacaatgcat

SEQ ID NO: 914609 - DNA, 33 bp, Homo sapien
ctgctcctgaagaagacgccattttatttctga

SEQ ID NO: 914610 - DNA, 33 bp, Homo sapien
ctgctcctgaagaagatgccattttatttctga

SEQ ID NO: 914611 - DNA, 33 bp, Homo sapien
tggtggtgtgcaatagaaatggtaatttgactc

SEQ ID NO: 914612 - DNA, 33 bp, Homo sapien
tggtggtgtgcaataggaatggtaatttgactc

SEQ ID NO: 914613 - DNA, 33 bp, Homo sapien
gaagaatgttttctcaaaagataggatattaac

SEQ ID NO: 914614 - DNA, 33 bp, Homo sapien
gaagaatgttttctcagaagataggatattaac

SEQ ID NO: 914615 - DNA, 33 bp, Homo sapien
atatgttctcaaagtaagataactcaaagtctg

SEQ ID NO: 914616 - DNA, 33 bp, Homo sapien
atatgttctcaaagtaggataactcaaagtctg

SEQ ID NO: 914617 - DNA, 33 bp, Homo sapien
aaatgaactttccttccactgtataataccatt

SEQ ID NO: 914618 - DNA, 33 bp, Homo sapien
aaatgaactttccttctactgtataataccatt

SEQ ID NO: 914619 - DNA, 33 bp, Homo sapien
attatgttgccatgggccaaaaagctaccagaa

SEQ ID NO: 914620 - DNA, 33 bp, Homo sapien
attatgttgccatgggtcaaaaagctaccagaa

SEQ ID NO: 914621 - DNA, 33 bp, Homo sapien
tctctcccaattaaacgctttcagttcctgcac

SEQ ID NO: 914622 - DNA, 33 bp, Homo sapien
tctctcccaattaaactctttcagttcctgcac

SEQ ID NO: 914623 - DNA, 33 bp, Homo sapien
atagagttagcccatgacacctagtaaaaccat

SEQ ID NO: 914624 - DNA, 33 bp, Homo sapien
atagagttagcccatggcacctagtaaaaccat

SEQ ID NO: 914625 - DNA, 33 bp, Homo sapien
tgcttgtatttggttacataagactcaggatag

SEQ ID NO: 914626 - DNA, 33 bp, Homo sapien
tgcttgtatttggttatataagactcaggatag

SEQ ID NO: 914627 - DNA, 33 bp, Homo sapien
tgtaaatataaaatgacgtgagtaaatataacc

SEQ ID NO: 914628 - DNA, 33 bp, Homo sapien
tgtaaatataaaatgatgtgagtaaatataacc

SEQ ID NO: 914629 - DNA, 33 bp, Homo sapien
aaattcatgaattacaactcttccgacaagagc

SEQ ID NO: 914630 - DNA, 33 bp, Homo sapien
aaattcatgaattacagctcttccgacaagagc

SEQ ID NO: 914631 - DNA, 33 bp, Homo sapien
gctactacttctagtacctctgctaccaccacc

SEQ ID NO: 914632 - DNA, 33 bp, Homo sapien
gctactacttctagtatctctgctaccaccacc

SEQ ID NO: 914633 - DNA, 33 bp, Homo sapien
tgactgtgttgattagcatattgccaacagctg

SEQ ID NO: 914634 - DNA, 33 bp, Homo sapien
tgactgtgttgattagtatattgccaacagctg

SEQ ID NO: 914635 - DNA, 33 bp, Homo sapien
tgaggatctttgacaacgggtgtgataaaagga

SEQ ID NO: 914636 - DNA, 33 bp, Homo sapien
tgaggatctttgacaatgggtgtgataaaagga

SEQ ID NO: 914637 - DNA, 33 bp, Homo sapien
gctgcatctactagaaaggctatatgttgtcca

SEQ ID NO: 914638 - DNA, 33 bp, Homo sapien
gctgcatctactagaacggctatatgttgtcca

SEQ ID NO: 914639 - DNA, 33 bp, Homo sapien
catctgtctcgtgagcccacacctacctaccat

SEQ ID NO: 914640 - DNA, 33 bp, Homo sapien
catctgtctcgtgagctcacacctacctaccat

SEQ ID NO: 914641 - DNA, 33 bp, Homo sapien
ttcacaaacgctctatcagggtacatgcttcca

SEQ ID NO: 914642 - DNA, 33 bp, Homo sapien
ttcacaaacgctctattagggtacatgcttcca

SEQ ID NO: 914643 - DNA, 33 bp, Homo sapien
aggcaatcctaagagccatgataaattctgttg

SEQ ID NO: 914644 - DNA, 33 bp, Homo sapien
aggcaatcctaagagctatgataaattctgttg

SEQ ID NO: 914645 - DNA, 33 bp, Homo sapien
agtatccaatgaacaacattatagtcaaaatat

SEQ ID NO: 914646 - DNA, 33 bp, Homo sapien
agtatccaatgaacaagattatagtcaaaatat

SEQ ID NO: 914647 - DNA, 33 bp, Homo sapien
gtgttagacttcgagacaccggtaacttcactt

SEQ ID NO: 914648 - DNA, 33 bp, Homo sapien
gtgttagacttcgagataccggtaacttcactt

SEQ ID NO: 914649 - DNA, 33 bp, Homo sapien
atttacactgttttctaaactccagtttcatag

SEQ ID NO: 914650 - DNA, 33 bp, Homo sapien
atttacactgttttctgaactccagtttcatag

SEQ ID NO: 914651 - DNA, 33 bp, Homo sapien
gagtgccctggaacgcgaattctgccttcttct

SEQ ID NO: 914652 - DNA, 33 bp, Homo sapien
gagtgccctggaacgctaattctgccttcttct

SEQ ID NO: 914653 - DNA, 33 bp, Homo sapien
agagtgggccaacttgaagagtaccagaggcgg

SEQ ID NO: 914654 - DNA, 33 bp, Homo sapien
agagtgggccaacttggagagtaccagaggcgg

SEQ ID NO: 914655 - DNA, 33 bp, Homo sapien
agttaaaaatgtgacaatataataggccaaatg

SEQ ID NO: 914656 - DNA, 33 bp, Homo sapien
agttaaaaatgtgacagtataataggccaaatg

SEQ ID NO: 914657 - DNA, 33 bp, Homo sapien
acccaaattaacacaacgtgtggtgtcaataaa

SEQ ID NO: 914658 - DNA, 33 bp, Homo sapien
acccaaattaacacaatgtgtggtgtcaataaa

SEQ ID NO: 914659 - DNA, 33 bp, Homo sapien
gattcctttcactgataaatgggtaaaattata

SEQ ID NO: 914660 - DNA, 33 bp, Homo sapien
gattcctttcactgattaatgggtaaaattata

SEQ ID NO: 914661 - DNA, 33 bp, Homo sapien
ttcttctactggtcaaataaacatttagtgaga

SEQ ID NO: 914662 - DNA, 33 bp, Homo sapien
ttcttctactggtcaagtaaacatttagtgaga

SEQ ID NO: 914663 - DNA, 33 bp, Homo sapien
agtgagatcagtaaacagtcagtgttcctaaaa

SEQ ID NO: 914664 - DNA, 33 bp, Homo sapien
agtgagatcagtaaacggtcagtgttcctaaaa

SEQ ID NO: 914665 - DNA, 33 bp, Homo sapien
caaaaatgctataacccggatatgtaaaaaaca

SEQ ID NO: 914666 - DNA, 33 bp, Homo sapien
caaaaatgctataacctggatatgtaaaaaaca

SEQ ID NO: 914667 - DNA, 33 bp, Homo sapien
aaatgcattatctcccaaatggttagcttattg

SEQ ID NO: 914668 - DNA, 33 bp, Homo sapien
aaatgcattatctccccaatggttagcttattg

SEQ ID NO: 914669 - DNA, 33 bp, Homo sapien
gggagtgagaaccagcaatctgtgctttaacaa

SEQ ID NO: 914670 - DNA, 33 bp, Homo sapien
gggagtgagaaccagctatctgtgctttaacaa

SEQ ID NO: 914671 - DNA, 33 bp, Homo sapien
gaaggcttcttcctatgactgcaacgtactgag

SEQ ID NO: 914672 - DNA, 33 bp, Homo sapien
gaaggcttcttcctattactgcaacgtactgag

SEQ ID NO: 914673 - DNA, 33 bp, Homo sapien
aagcccatacccttagccatttcaacattcttc

SEQ ID NO: 914674 - DNA, 33 bp, Homo sapien
aagcccatacccttaggcatttcaacattcttc

SEQ ID NO: 914675 - DNA, 33 bp, Homo sapien
tttaacctcactcgtccgaacagtcctcatttg

SEQ ID NO: 914676 - DNA, 33 bp, Homo sapien
tttaacctcactcgtctgaacagtcctcatttg

SEQ ID NO: 914677 - DNA, 33 bp, Homo sapien
gaaatgacacatgggacccttgcttttgaaggc

SEQ ID NO: 914678 - DNA, 33 bp, Homo sapien
gaaatgacacatgggatccttgcttttgaaggc

SEQ ID NO: 914679 - DNA, 33 bp, Homo sapien
aatactttagttaccaacaatcgaaacactagc

SEQ ID NO: 914680 - DNA, 33 bp, Homo sapien
aatactttagttaccatcaatcgaaacactagc

SEQ ID NO: 914681 - DNA, 33 bp, Homo sapien
caacactgcaaatttgaatggaactaaattagc

SEQ ID NO: 914682 - DNA, 33 bp, Homo sapien
caacactgcaaatttggatggaactaaattagc

SEQ ID NO: 914683 - DNA, 33 bp, Homo sapien
ctttgaaaagtaaagacagcagtattttctctg

SEQ ID NO: 914684 - DNA, 33 bp, Homo sapien
ctttgaaaagtaaagagagcagtattttctctg

SEQ ID NO: 914685 - DNA, 33 bp, Homo sapien
taatattttgtctaccgcatttattaaatcaat

SEQ ID NO: 914686 - DNA, 33 bp, Homo sapien
taatattttgtctacctcatttattaaatcaat

SEQ ID NO: 914687 - DNA, 33 bp, Homo sapien
caagtgtgggatgcacagaaaacttccaagaaa

SEQ ID NO: 914688 - DNA, 33 bp, Homo sapien
caagtgtgggatgcacggaaaacttccaagaaa

SEQ ID NO: 914689 - DNA, 33 bp, Homo sapien
ttatctttctgaaatacagagaacattgcaaaa

SEQ ID NO: 914690 - DNA, 33 bp, Homo sapien
ttatctttctgaaatatagagaacattgcaaaa

SEQ ID NO: 914691 - DNA, 33 bp, Homo sapien
ttattggaagatagaaatatagactaaaactgg

SEQ ID NO: 914692 - DNA, 33 bp, Homo sapien
ttattggaagatagaagtatagactaaaactgg

SEQ ID NO: 914693 - DNA, 33 bp, Homo sapien
tctgagaaggtcattacacattgaagatgaaat

SEQ ID NO: 914694 - DNA, 33 bp, Homo sapien
tctgagaaggtcattatacattgaagatgaaat

SEQ ID NO: 914695 - DNA, 33 bp, Homo sapien
ttattttatcttttaccgagatttaactaggca

SEQ ID NO: 914696 - DNA, 33 bp, Homo sapien
ttattttatcttttactgagatttaactaggca

SEQ ID NO: 914697 - DNA, 33 bp, Homo sapien
gattcctttccattagccatcaaccaaagcaag

SEQ ID NO: 914698 - DNA, 33 bp, Homo sapien
gattcctttccattagtcatcaaccaaagcaag

SEQ ID NO: 914699 - DNA, 33 bp, Homo sapien
acctggtcttcagataaaatttcatctatgaaa

SEQ ID NO: 914700 - DNA, 33 bp, Homo sapien
acctggtcttcagatacaatttcatctatgaaa

SEQ ID NO: 914701 - DNA, 33 bp, Homo sapien
tagcacattgggtgaactatatttgtttatatt

SEQ ID NO: 914702 - DNA, 33 bp, Homo sapien
tagcacattgggtgaattatatttgtttatatt

SEQ ID NO: 914703 - DNA, 33 bp, Homo sapien
tgttgtataagagagaacacacaaaagatactg

SEQ ID NO: 914704 - DNA, 33 bp, Homo sapien
tgttgtataagagagagcacacaaaagatactg

SEQ ID NO: 914705 - DNA, 33 bp, Homo sapien
atttgtatgacccgccaagctaagcaaataaca

SEQ ID NO: 914706 - DNA, 33 bp, Homo sapien
atttgtatgacccgccgagctaagcaaataaca

SEQ ID NO: 914707 - DNA, 33 bp, Homo sapien
gtggttgtccatgaaccaatgctccaaaaagca

SEQ ID NO: 914708 - DNA, 33 bp, Homo sapien
gtggttgtccatgaactaatgctccaaaaagca

SEQ ID NO: 914709 - DNA, 33 bp, Homo sapien
aaaaatgaagaaaggacgatggcagatagtttt

SEQ ID NO: 914710 - DNA, 33 bp, Homo sapien
aaaaatgaagaaaggatgatggcagatagtttt

SEQ ID NO: 914711 - DNA, 33 bp, Homo sapien
acagattcacctttcaagcatattttaaggaat

SEQ ID NO: 914712 - DNA, 33 bp, Homo sapien
acagattcacctttcaggcatattttaaggaat

SEQ ID NO: 914713 - DNA, 33 bp, Homo sapien
attgctaagttgtgccagacactacttgaaact

SEQ ID NO: 914714 - DNA, 33 bp, Homo sapien
attgctaagttgtgccggacactacttgaaact

SEQ ID NO: 914715 - DNA, 33 bp, Homo sapien
gacagagtaaattggcaaagcacagtaaatgat

SEQ ID NO: 914716 - DNA, 33 bp, Homo sapien
gacagagtaaattggcgaagcacagtaaatgat

SEQ ID NO: 914717 - DNA, 33 bp, Homo sapien
ctaacttttgtttttaccaaccatccttcatca

SEQ ID NO: 914718 - DNA, 33 bp, Homo sapien
ctaacttttgtttttagcaaccatccttcatca

SEQ ID NO: 914719 - DNA, 33 bp, Homo sapien
aggcacaagagcaagaaggtgtagagtgaggaa

SEQ ID NO: 914720 - DNA, 33 bp, Homo sapien
aggcacaagagcaagagggtgtagagtgaggaa

SEQ ID NO: 914721 - DNA, 33 bp, Homo sapien
ctttcctgccatctacaactatggtaccatcat

SEQ ID NO: 914722 - DNA, 33 bp, Homo sapien
ctttcctgccatctacgactatggtaccatcat

SEQ ID NO: 914723 - DNA, 33 bp, Homo sapien
aatagagaactccacaaactaaataagggcgcc

SEQ ID NO: 914724 - DNA, 33 bp, Homo sapien
aatagagaactccacagactaaataagggcgcc

SEQ ID NO: 914725 - DNA, 33 bp, Homo sapien
aagcgctctaagtgccaaataatttctcatttt

SEQ ID NO: 914726 - DNA, 33 bp, Homo sapien
aagcgctctaagtgcccaataatttctcatttt

SEQ ID NO: 914727 - DNA, 33 bp, Homo sapien
agtttcctgaaaaataaggcagctggttaacaa

SEQ ID NO: 914728 - DNA, 33 bp, Homo sapien
agtttcctgaaaaatatggcagctggttaacaa

SEQ ID NO: 914729 - DNA, 33 bp, Homo sapien
aacgcttcaaaaaagacgtaaattgttaaccag

SEQ ID NO: 914730 - DNA, 33 bp, Homo sapien
aacgcttcaaaaaagatgtaaattgttaaccag

SEQ ID NO: 914731 - DNA, 33 bp, Homo sapien
actgaatttatttaaccggaaaataacatggaa

SEQ ID NO: 914732 - DNA, 33 bp, Homo sapien
actgaatttatttaactggaaaataacatggaa

SEQ ID NO: 914733 - DNA, 33 bp, Homo sapien
aagaggtaactgttataaatgtgtcaacattag

SEQ ID NO: 914734 - DNA, 33 bp, Homo sapien
aagaggtaactgttatgaatgtgtcaacattag

SEQ ID NO: 914735 - DNA, 33 bp, Homo sapien
tctcaactggaatgaaaaatgtaccacaatgcc

SEQ ID NO: 914736 - DNA, 33 bp, Homo sapien
tctcaactggaatgaagaatgtaccacaatgcc

SEQ ID NO: 914737 - DNA, 33 bp, Homo sapien
tcttgaaataagggaaatagtaagtggtcatta

SEQ ID NO: 914738 - DNA, 33 bp, Homo sapien
tcttgaaataagggaagtagtaagtggtcatta

SEQ ID NO: 914739 - DNA, 33 bp, Homo sapien
gcgataataggactgcactcataagacagaaga

SEQ ID NO: 914740 - DNA, 33 bp, Homo sapien
gcgataataggactgcgctcataagacagaaga

SEQ ID NO: 914741 - DNA, 33 bp, Homo sapien
aaagagagggaaatgacgcttactacaagttaa

SEQ ID NO: 914742 - DNA, 33 bp, Homo sapien
aaagagagggaaatgatgcttactacaagttaa

SEQ ID NO: 914743 - DNA, 33 bp, Homo sapien
aagccagagtatataaatcatcccttcgaaata

SEQ ID NO: 914744 - DNA, 33 bp, Homo sapien
aagccagagtatataagtcatcccttcgaaata

SEQ ID NO: 914745 - DNA, 33 bp, Homo sapien
tgttttccctttttagaattgtgatccattgtg

SEQ ID NO: 914746 - DNA, 33 bp, Homo sapien
tgttttccctttttagcattgtgatccattgtg

SEQ ID NO: 914747 - DNA, 33 bp, Homo sapien
cagaacaccaaatgccaaataagagttttcttc

SEQ ID NO: 914748 - DNA, 33 bp, Homo sapien
cagaacaccaaatgccgaataagagttttcttc

SEQ ID NO: 914749 - DNA, 33 bp, Homo sapien
gtgattctatgtcagcgcttcctctattttcct

SEQ ID NO: 914750 - DNA, 33 bp, Homo sapien
gtgattctatgtcagctcttcctctattttcct

SEQ ID NO: 914751 - DNA, 33 bp, Homo sapien
caaaaggcaatatcataaacataggaaacacag

SEQ ID NO: 914752 - DNA, 33 bp, Homo sapien
caaaaggcaatatcatgaacataggaaacacag

SEQ ID NO: 914753 - DNA, 33 bp, Homo sapien
tccaggctctgcaaacaccatagctgccagccc

SEQ ID NO: 914754 - DNA, 33 bp, Homo sapien
tccaggctctgcaaacgccatagctgccagccc

SEQ ID NO: 914755 - DNA, 33 bp, Homo sapien
ttagcgaggtaggcaccggaagaggtcactgta

SEQ ID NO: 914756 - DNA, 33 bp, Homo sapien
ttagcgaggtaggcactggaagaggtcactgta

SEQ ID NO: 914757 - DNA, 33 bp, Homo sapien
gtaatgaattcacactgagtcatccatatttcc

SEQ ID NO: 914758 - DNA, 33 bp, Homo sapien
gtaatgaattcacacttagtcatccatatttcc

SEQ ID NO: 914759 - DNA, 33 bp, Homo sapien
tttcctctattgtttcacttggaacctgaaacc

SEQ ID NO: 914760 - DNA, 33 bp, Homo sapien
tttcctctattgtttctcttggaacctgaaacc

SEQ ID NO: 914761 - DNA, 33 bp, Homo sapien
aatttcatcccttcaactagaggttgccattca

SEQ ID NO: 914762 - DNA, 33 bp, Homo sapien
aatttcatcccttcaattagaggttgccattca

SEQ ID NO: 914763 - DNA, 33 bp, Homo sapien
acagctcaagacccgaaactatgtgcctctttt

SEQ ID NO: 914764 - DNA, 33 bp, Homo sapien
acagctcaagacccgagactatgtgcctctttt

SEQ ID NO: 914765 - DNA, 33 bp, Homo sapien
gaggcaagaacccccactggcaaccagattatg

SEQ ID NO: 914766 - DNA, 33 bp, Homo sapien
gaggcaagaacccccattggcaaccagattatg

SEQ ID NO: 914767 - DNA, 33 bp, Homo sapien
tactcttcgtaacatacctcatagtactctccc

SEQ ID NO: 914768 - DNA, 33 bp, Homo sapien
tactcttcgtaacatatctcatagtactctccc

SEQ ID NO: 914769 - DNA, 33 bp, Homo sapien
aactagatagtatcacagtagtctatattgcct

SEQ ID NO: 914770 - DNA, 33 bp, Homo sapien
aactagatagtatcacggtagtctatattgcct

SEQ ID NO: 914771 - DNA, 33 bp, Homo sapien
atactatctagttcgcaaaagtgtgcaggttac

SEQ ID NO: 914772 - DNA, 33 bp, Homo sapien
atactatctagttcgcgaaagtgtgcaggttac

SEQ ID NO: 914773 - DNA, 33 bp, Homo sapien
aaaatagtttagggggccatctttcatttgtcc

SEQ ID NO: 914774 - DNA, 33 bp, Homo sapien
aaaatagtttagggggtcatctttcatttgtcc

SEQ ID NO: 914775 - DNA, 33 bp, Homo sapien
ctggcattcatatgggccagattttcaggaaaa

SEQ ID NO: 914776 - DNA, 33 bp, Homo sapien
ctggcattcatatgggtcagattttcaggaaaa

SEQ ID NO: 914777 - DNA, 33 bp, Homo sapien
tgcaggtcctccctgacggtcaaactcaacaga

SEQ ID NO: 914778 - DNA, 33 bp, Homo sapien
tgcaggtcctccctgatggtcaaactcaacaga

SEQ ID NO: 914779 - DNA, 33 bp, Homo sapien
attctcatctaggtgaggtttccaaaagccact

SEQ ID NO: 914780 - DNA, 33 bp, Homo sapien
attctcatctaggtgatgtttccaaaagccact

SEQ ID NO: 914781 - DNA, 33 bp, Homo sapien
tacatatcactgttacaccaactggcttgtcaa

SEQ ID NO: 914782 - DNA, 33 bp, Homo sapien
tacatatcactgttacgccaactggcttgtcaa

SEQ ID NO: 914783 - DNA, 33 bp, Homo sapien
cagaatttcagctataatacttcagtgtatgac

SEQ ID NO: 914784 - DNA, 33 bp, Homo sapien
cagaatttcagctatagtacttcagtgtatgac

SEQ ID NO: 914785 - DNA, 33 bp, Homo sapien
tagaagagagagagtacaatcaggagtgctgct

SEQ ID NO: 914786 - DNA, 33 bp, Homo sapien
tagaagagagagagtataatcaggagtgctgct

SEQ ID NO: 914787 - DNA, 33 bp, Homo sapien
tggttccagcagccccaataagcaggaaactag

SEQ ID NO: 914788 - DNA, 33 bp, Homo sapien
tggttccagcagccccgataagcaggaaactag

SEQ ID NO: 914789 - DNA, 33 bp, Homo sapien
cttagcaaagtaaatgccagctagtcattatca

SEQ ID NO: 914790 - DNA, 33 bp, Homo sapien
cttagcaaagtaaatgtcagctagtcattatca

SEQ ID NO: 914791 - DNA, 33 bp, Homo sapien
accaacaggggtccaactgagcttttgtgttta

SEQ ID NO: 914792 - DNA, 33 bp, Homo sapien
accaacaggggtccaattgagcttttgtgttta

SEQ ID NO: 914793 - DNA, 33 bp, Homo sapien
ctcattgtccttaaaaaagcttttgcaaaattt

SEQ ID NO: 914794 - DNA, 33 bp, Homo sapien
ctcattgtccttaaaatagcttttgcaaaattt

SEQ ID NO: 914795 - DNA, 33 bp, Homo sapien
aactaggtaagtggtgcaagcagactttgaagt

SEQ ID NO: 914796 - DNA, 33 bp, Homo sapien
aactaggtaagtggtgtaagcagactttgaagt

SEQ ID NO: 914797 - DNA, 33 bp, Homo sapien
tctttaccttcagtacagaacttcaatgattta

SEQ ID NO: 914798 - DNA, 33 bp, Homo sapien
tctttaccttcagtacggaacttcaatgattta

SEQ ID NO: 914799 - DNA, 33 bp, Homo sapien
gagaagcaagttaaccagaaatcagccatgtgc

SEQ ID NO: 914800 - DNA, 33 bp, Homo sapien
gagaagcaagttaaccggaaatcagccatgtgc

SEQ ID NO: 914801 - DNA, 33 bp, Homo sapien
gaaagtataacccatacgaaaatcccaagagta

SEQ ID NO: 914802 - DNA, 33 bp, Homo sapien
gaaagtataacccatatgaaaatcccaagagta

SEQ ID NO: 914803 - DNA, 33 bp, Homo sapien
ggaaattatctccaccaaggcaacaaaatgcta

SEQ ID NO: 914804 - DNA, 33 bp, Homo sapien
ggaaattatctccaccgaggcaacaaaatgcta

SEQ ID NO: 914805 - DNA, 33 bp, Homo sapien
tcaggtattaattgtaccattgccagtgttttg

SEQ ID NO: 914806 - DNA, 33 bp, Homo sapien
tcaggtattaattgtatcattgccagtgttttg

SEQ ID NO: 914807 - DNA, 33 bp, Homo sapien
aaacactgagtttctacctggtgacagccatga

SEQ ID NO: 914808 - DNA, 33 bp, Homo sapien
aaacactgagtttctatctggtgacagccatga

SEQ ID NO: 914809 - DNA, 33 bp, Homo sapien
catgccaaatggataaaaacttattgctgaaaa

SEQ ID NO: 914810 - DNA, 33 bp, Homo sapien
catgccaaatggataacaacttattgctgaaaa

SEQ ID NO: 914811 - DNA, 33 bp, Homo sapien
atgtgagccattccaaagtttctggagttatgg

SEQ ID NO: 914812 - DNA, 33 bp, Homo sapien
atgtgagccattccaaggtttctggagttatgg

SEQ ID NO: 914813 - DNA, 33 bp, Homo sapien
aataaattccattgtacgtatatgctacatttt

SEQ ID NO: 914814 - DNA, 33 bp, Homo sapien
aataaattccattgtatgtatatgctacatttt

SEQ ID NO: 914815 - DNA, 33 bp, Homo sapien
atcctatgttacctggcattatacaatttttaa

SEQ ID NO: 914816 - DNA, 33 bp, Homo sapien
atcctatgttacctggtattatacaatttttaa

SEQ ID NO: 914817 - DNA, 33 bp, Homo sapien
ggataaaataaaataactcacttgcttaacaaa

SEQ ID NO: 914818 - DNA, 33 bp, Homo sapien
ggataaaataaaataagtcacttgcttaacaaa

SEQ ID NO: 914819 - DNA, 33 bp, Homo sapien
ttcattggctaacaagcatagatctttcagtgt

SEQ ID NO: 914820 - DNA, 33 bp, Homo sapien
ttcattggctaacaagtatagatctttcagtgt

SEQ ID NO: 914821 - DNA, 33 bp, Homo sapien
agggctgccataaacaatcgtatgcaaattttt

SEQ ID NO: 914822 - DNA, 33 bp, Homo sapien
agggctgccataaacattcgtatgcaaattttt

SEQ ID NO: 914823 - DNA, 33 bp, Homo sapien
cttatatttaaacatcccaaagttagccattat

SEQ ID NO: 914824 - DNA, 33 bp, Homo sapien
cttatatttaaacatctcaaagttagccattat

SEQ ID NO: 914825 - DNA, 33 bp, Homo sapien
agaagggaagggaagggactactacaccaactt

SEQ ID NO: 914826 - DNA, 33 bp, Homo sapien
agaagggaagggaaggtactactacaccaactt

SEQ ID NO: 914827 - DNA, 33 bp, Homo sapien
aaagtatggaattatagaaggtctcctctaatg

SEQ ID NO: 914828 - DNA, 33 bp, Homo sapien
aaagtatggaattatataaggtctcctctaatg

SEQ ID NO: 914829 - DNA, 33 bp, Homo sapien
gctttggtttctgaaagtgccaaactcttcatt

SEQ ID NO: 914830 - DNA, 33 bp, Homo sapien
gctttggtttctgaaattgccaaactcttcatt

SEQ ID NO: 914831 - DNA, 33 bp, Homo sapien
tatgttgaggtctacactgaggtctatcataat

SEQ ID NO: 914832 - DNA, 33 bp, Homo sapien
tatgttgaggtctacattgaggtctatcataat

SEQ ID NO: 914833 - DNA, 33 bp, Homo sapien
ctgatccaaataactgccacagaacaactcagc

SEQ ID NO: 914834 - DNA, 33 bp, Homo sapien
ctgatccaaataactgtcacagaacaactcagc

SEQ ID NO: 914835 - DNA, 33 bp, Homo sapien
agagaaactgggaaaccgagaattgatccaatt

SEQ ID NO: 914836 - DNA, 33 bp, Homo sapien
agagaaactgggaaactgagaattgatccaatt

SEQ ID NO: 914837 - DNA, 33 bp, Homo sapien
tttctgatttaaatgcacctagccaaaagaaca

SEQ ID NO: 914838 - DNA, 33 bp, Homo sapien
tttctgatttaaatgcgcctagccaaaagaaca

SEQ ID NO: 914839 - DNA, 33 bp, Homo sapien
ggcttttccagagacaaaatatagcctcagaac

SEQ ID NO: 914840 - DNA, 33 bp, Homo sapien
ggcttttccagagacacaatatagcctcagaac

SEQ ID NO: 914841 - DNA, 33 bp, Homo sapien
acacacttctactgcaccctttctgaacatatt

SEQ ID NO: 914842 - DNA, 33 bp, Homo sapien
acacacttctactgcatcctttctgaacatatt

SEQ ID NO: 914843 - DNA, 33 bp, Homo sapien
aagggcactcttacacactgttggtaggaatgt

SEQ ID NO: 914844 - DNA, 33 bp, Homo sapien
aagggcactcttacactctgttggtaggaatgt

SEQ ID NO: 914845 - DNA, 33 bp, Homo sapien
agttgtagccagaagaaacttgtgattttcaag

SEQ ID NO: 914846 - DNA, 33 bp, Homo sapien
agttgtagccagaagagacttgtgattttcaag

SEQ ID NO: 914847 - DNA, 33 bp, Homo sapien
tacagagttctaaaaaatgtacaataaatgtta

SEQ ID NO: 914848 - DNA, 33 bp, Homo sapien
tacagagttctaaaaagtgtacaataaatgtta

SEQ ID NO: 914849 - DNA, 33 bp, Homo sapien
acaaggccatgaaacgcatgctaaataaataaa

SEQ ID NO: 914850 - DNA, 33 bp, Homo sapien
acaaggccatgaaacgtatgctaaataaataaa

SEQ ID NO: 914851 - DNA, 33 bp, Homo sapien
tcattaggcaactgaaatgcacaatttatggta

SEQ ID NO: 914852 - DNA, 33 bp, Homo sapien
tcattaggcaactgaagtgcacaatttatggta

SEQ ID NO: 914853 - DNA, 33 bp, Homo sapien
atcaatcttcttcatacggcaagtcggttaacc

SEQ ID NO: 914854 - DNA, 33 bp, Homo sapien
atcaatcttcttcatatggcaagtcggttaacc

SEQ ID NO: 914855 - DNA, 33 bp, Homo sapien
aaatgagattgtcaaagagccatctatactccc

SEQ ID NO: 914856 - DNA, 33 bp, Homo sapien
aaatgagattgtcaaatagccatctatactccc

SEQ ID NO: 914857 - DNA, 33 bp, Homo sapien
tctaaccttatatgcaaaaggctgagtttaatg

SEQ ID NO: 914858 - DNA, 33 bp, Homo sapien
tctaaccttatatgcagaaggctgagtttaatg

SEQ ID NO: 914859 - DNA, 33 bp, Homo sapien
tccttgtcccaaaatcgaatctgtgtcaacgtt

SEQ ID NO: 914860 - DNA, 33 bp, Homo sapien
tccttgtcccaaaatctaatctgtgtcaacgtt

SEQ ID NO: 914861 - DNA, 33 bp, Homo sapien
aaatagaatactgagacgctgtcaatgtctttt

SEQ ID NO: 914862 - DNA, 33 bp, Homo sapien
aaatagaatactgagatgctgtcaatgtctttt

SEQ ID NO: 914863 - DNA, 33 bp, Homo sapien
atcttatcggtcttgacgtatttcaatggcagg

SEQ ID NO: 914864 - DNA, 33 bp, Homo sapien
atcttatcggtcttgaggtatttcaatggcagg

SEQ ID NO: 914865 - DNA, 33 bp, Homo sapien
ccttatggatgtaagacggctgcttcagctcca

SEQ ID NO: 914866 - DNA, 33 bp, Homo sapien
ccttatggatgtaagatggctgcttcagctcca

SEQ ID NO: 914867 - DNA, 33 bp, Homo sapien
ttgtgggaggatttgacaattggagctgaagca

SEQ ID NO: 914868 - DNA, 33 bp, Homo sapien
ttgtgggaggatttgataattggagctgaagca

SEQ ID NO: 914869 - DNA, 33 bp, Homo sapien
atcacttcaaactttccattgcatcctagagat

SEQ ID NO: 914870 - DNA, 33 bp, Homo sapien
atcacttcaaactttctattgcatcctagagat

SEQ ID NO: 914871 - DNA, 33 bp, Homo sapien
agtactaactgagaaacttccatgtgcaatgca

SEQ ID NO: 914872 - DNA, 33 bp, Homo sapien
agtactaactgagaaatttccatgtgcaatgca

SEQ ID NO: 914873 - DNA, 33 bp, Homo sapien
ataggaaagtcctagacggcatcctgttcaaat

SEQ ID NO: 914874 - DNA, 33 bp, Homo sapien
ataggaaagtcctagatggcatcctgttcaaat

SEQ ID NO: 914875 - DNA, 33 bp, Homo sapien
tatcaatcaaatctaccaacattctgtaagcat

SEQ ID NO: 914876 - DNA, 33 bp, Homo sapien
tatcaatcaaatctacgaacattctgtaagcat

SEQ ID NO: 914877 - DNA, 33 bp, Homo sapien
ttctaacatctttcatcagtatttcacattcga

SEQ ID NO: 914878 - DNA, 33 bp, Homo sapien
ttctaacatctttcatgagtatttcacattcga

SEQ ID NO: 914879 - DNA, 33 bp, Homo sapien
gttgacagtgtttcccaagacagttttgtcctg

SEQ ID NO: 914880 - DNA, 33 bp, Homo sapien
gttgacagtgtttcccgagacagttttgtcctg

SEQ ID NO: 914881 - DNA, 33 bp, Homo sapien
actaagttcacattaacattgccttctgaattt

SEQ ID NO: 914882 - DNA, 33 bp, Homo sapien
actaagttcacattaatattgccttctgaattt

SEQ ID NO: 914883 - DNA, 33 bp, Homo sapien
gagttctgttaggttacgaaaatgggctaggca

SEQ ID NO: 914884 - DNA, 33 bp, Homo sapien
gagttctgttaggttatgaaaatgggctaggca

SEQ ID NO: 914885 - DNA, 33 bp, Homo sapien
tttgcataaacccatccgaatctgtccttgctt

SEQ ID NO: 914886 - DNA, 33 bp, Homo sapien
tttgcataaacccatctgaatctgtccttgctt

SEQ ID NO: 914887 - DNA, 33 bp, Homo sapien
cccatggttaccaagaaagtagttgatatgagg

SEQ ID NO: 914888 - DNA, 33 bp, Homo sapien
cccatggttaccaagagagtagttgatatgagg

SEQ ID NO: 914889 - DNA, 33 bp, Homo sapien
ttagcctgaagagagactaaatttgttgaattc

SEQ ID NO: 914890 - DNA, 33 bp, Homo sapien
ttagcctgaagagagattaaatttgttgaattc

SEQ ID NO: 914891 - DNA, 33 bp, Homo sapien
agtcacttatcagtcccagattagcttacatca

SEQ ID NO: 914892 - DNA, 33 bp, Homo sapien
agtcacttatcagtcctagattagcttacatca

SEQ ID NO: 914893 - DNA, 33 bp, Homo sapien
tgtgtgatcttaggaactcacgtaatttttttg

SEQ ID NO: 914894 - DNA, 33 bp, Homo sapien
tgtgtgatcttaggaagtcacgtaatttttttg

SEQ ID NO: 914895 - DNA, 33 bp, Homo sapien
ggtacttatttcaccacgtaacaatgaattgaa

SEQ ID NO: 914896 - DNA, 33 bp, Homo sapien
ggtacttatttcaccatgtaacaatgaattgaa

SEQ ID NO: 914897 - DNA, 33 bp, Homo sapien
aactgtgattcttgtgcaagttcgatctcttct

SEQ ID NO: 914898 - DNA, 33 bp, Homo sapien
aactgtgattcttgtgtaagttcgatctcttct

SEQ ID NO: 914899 - DNA, 33 bp, Homo sapien
aaggaaaatgtttgaagttagaacttgtgaaca

SEQ ID NO: 914900 - DNA, 33 bp, Homo sapien
aaggaaaatgtttgaatttagaacttgtgaaca

SEQ ID NO: 914901 - DNA, 33 bp, Homo sapien
atttctttcagtttgacctcttggtatttattg

SEQ ID NO: 914902 - DNA, 33 bp, Homo sapien
atttctttcagtttgatctcttggtatttattg

SEQ ID NO: 914903 - DNA, 33 bp, Homo sapien
acatctataatgttccaaaatcaataaatacca

SEQ ID NO: 914904 - DNA, 33 bp, Homo sapien
acatctataatgttccgaaatcaataaatacca

SEQ ID NO: 914905 - DNA, 33 bp, Homo sapien
atattagccaggcttccatctatcatatcttca

SEQ ID NO: 914906 - DNA, 33 bp, Homo sapien
atattagccaggcttctatctatcatatcttca

SEQ ID NO: 914907 - DNA, 33 bp, Homo sapien
aaacataaagttatgcaaaaaaaattgtatgtt

SEQ ID NO: 914908 - DNA, 33 bp, Homo sapien
aaacataaagttatgccaaaaaaattgtatgtt

SEQ ID NO: 914909 - DNA, 33 bp, Homo sapien
acacatggacacagggaaaagagcaacaacact

SEQ ID NO: 914910 - DNA, 33 bp, Homo sapien
acacatggacacagggtaaagagcaacaacact

SEQ ID NO: 914911 - DNA, 33 bp, Homo sapien
gttgttaattgtgtagcctaagaattagtgata

SEQ ID NO: 914912 - DNA, 33 bp, Homo sapien
gttgttaattgtgtagtctaagaattagtgata

SEQ ID NO: 914913 - DNA, 33 bp, Homo sapien
aattttgcaatgcacaagtattattacacaagc

SEQ ID NO: 914914 - DNA, 33 bp, Homo sapien
aattttgcaatgcacaggtattattacacaagc

SEQ ID NO: 914915 - DNA, 33 bp, Homo sapien
gattgggaattggtcaaaagagttcaattatta

SEQ ID NO: 914916 - DNA, 33 bp, Homo sapien
gattgggaattggtcagaagagttcaattatta

SEQ ID NO: 914917 - DNA, 33 bp, Homo sapien
atacatgaggaagaaaggctggtaacaggtcaa

SEQ ID NO: 914918 - DNA, 33 bp, Homo sapien
atacatgaggaagaaatgctggtaacaggtcaa

SEQ ID NO: 914919 - DNA, 33 bp, Homo sapien
tttaaaaacaacataaatgagaactgtcatctc

SEQ ID NO: 914920 - DNA, 33 bp, Homo sapien
tttaaaaacaacataagtgagaactgtcatctc

SEQ ID NO: 914921 - DNA, 33 bp, Homo sapien
taaaatggaatttcaccataatactatgagcta

SEQ ID NO: 914922 - DNA, 33 bp, Homo sapien
taaaatggaatttcactataatactatgagcta

SEQ ID NO: 914923 - DNA, 33 bp, Homo sapien
atttaatggtacaataaaaatgcaaacatttaa

SEQ ID NO: 914924 - DNA, 33 bp, Homo sapien
atttaatggtacaatacaaatgcaaacatttaa

SEQ ID NO: 914925 - DNA, 33 bp, Homo sapien
ctaaatctgaactacaactctcaacttctagct

SEQ ID NO: 914926 - DNA, 33 bp, Homo sapien
ctaaatctgaactacagctctcaacttctagct

SEQ ID NO: 914927 - DNA, 33 bp, Homo sapien
tgaaaattgaaatcctcactactagctgtttct

SEQ ID NO: 914928 - DNA, 33 bp, Homo sapien
tgaaaattgaaatcctgactactagctgtttct

SEQ ID NO: 914929 - DNA, 33 bp, Homo sapien
gtactagaatactagcaagagaatccttgttct

SEQ ID NO: 914930 - DNA, 33 bp, Homo sapien
gtactagaatactagcgagagaatccttgttct

SEQ ID NO: 914931 - DNA, 33 bp, Homo sapien
acaatgatttagagaaagaaacttcgcaattcg

SEQ ID NO: 914932 - DNA, 33 bp, Homo sapien
acaatgatttagagaaggaaacttcgcaattcg

SEQ ID NO: 914933 - DNA, 33 bp, Homo sapien
catttcttatctagaaagcacattgtacaattg

SEQ ID NO: 914934 - DNA, 33 bp, Homo sapien
catttcttatctagaaggcacattgtacaattg

SEQ ID NO: 914935 - DNA, 33 bp, Homo sapien
gggttggtatgtgaaagtgttactacaaattgt

SEQ ID NO: 914936 - DNA, 33 bp, Homo sapien
gggttggtatgtgaaattgttactacaaattgt

SEQ ID NO: 914937 - DNA, 33 bp, Homo sapien
tcctcactgtggctctaaaaagtaactacttat

SEQ ID NO: 914938 - DNA, 33 bp, Homo sapien
tcctcactgtggctctcaaaagtaactacttat

SEQ ID NO: 914939 - DNA, 33 bp, Homo sapien
tggtgtgtcggagggacgtcaagggacaataaa

SEQ ID NO: 914940 - DNA, 33 bp, Homo sapien
tggtgtgtcggagggatgtcaagggacaataaa

SEQ ID NO: 914941 - DNA, 33 bp, Homo sapien
gtaattgcagcaaaacggattcaagcaatttgt

SEQ ID NO: 914942 - DNA, 33 bp, Homo sapien
gtaattgcagcaaaactgattcaagcaatttgt

SEQ ID NO: 914943 - DNA, 33 bp, Homo sapien
atgggacgtcaaatccacttcctcaaaggacag

SEQ ID NO: 914944 - DNA, 33 bp, Homo sapien
atgggacgtcaaatcctcttcctcaaaggacag

SEQ ID NO: 914945 - DNA, 33 bp, Homo sapien
gggaaaataaaggcaacgttgaggagtagtaag

SEQ ID NO: 914946 - DNA, 33 bp, Homo sapien
gggaaaataaaggcaatgttgaggagtagtaag

SEQ ID NO: 914947 - DNA, 33 bp, Homo sapien
ctccccagaccacacaactagctaattaatggc

SEQ ID NO: 914948 - DNA, 33 bp, Homo sapien
ctccccagaccacacagctagctaattaatggc

SEQ ID NO: 914949 - DNA, 33 bp, Homo sapien
aacagggaaagtggtaggaagaaactagagaat

SEQ ID NO: 914950 - DNA, 33 bp, Homo sapien
aacagggaaagtggtatgaagaaactagagaat

SEQ ID NO: 914951 - DNA, 33 bp, Homo sapien
aaattgtttcctggaacatggggagcctcatac

SEQ ID NO: 914952 - DNA, 33 bp, Homo sapien
aaattgtttcctggaatatggggagcctcatac

SEQ ID NO: 914953 - DNA, 33 bp, Homo sapien
aaggagataaagtgagccatactgtaacaaaag

SEQ ID NO: 914954 - DNA, 33 bp, Homo sapien
aaggagataaagtgaggcatactgtaacaaaag

SEQ ID NO: 914955 - DNA, 33 bp, Homo sapien
cttcattttacccagacgtcctttgaaagatgt

SEQ ID NO: 914956 - DNA, 33 bp, Homo sapien
cttcattttacccagatgtcctttgaaagatgt

SEQ ID NO: 914957 - DNA, 33 bp, Homo sapien
attctcatctggaggccataaacgcaagcaagc

SEQ ID NO: 914958 - DNA, 33 bp, Homo sapien
attctcatctggaggctataaacgcaagcaagc

SEQ ID NO: 914959 - DNA, 33 bp, Homo sapien
tcacaaccaaacatcaatgagttggatagtatc

SEQ ID NO: 914960 - DNA, 33 bp, Homo sapien
tcacaaccaaacatcactgagttggatagtatc

SEQ ID NO: 914961 - DNA, 33 bp, Homo sapien
ggtaaatcacactccacggcacttgctctctcc

SEQ ID NO: 914962 - DNA, 33 bp, Homo sapien
ggtaaatcacactccatggcacttgctctctcc

SEQ ID NO: 914963 - DNA, 33 bp, Homo sapien
aaaaaaaattgctttacaggacaccatcaagaa

SEQ ID NO: 914964 - DNA, 33 bp, Homo sapien
aaaaaaaattgctttataggacaccatcaagaa

SEQ ID NO: 914965 - DNA, 33 bp, Homo sapien
ggcaggtgctaccacaactggttttaaaatata

SEQ ID NO: 914966 - DNA, 33 bp, Homo sapien
ggcaggtgctaccacatctggttttaaaatata

SEQ ID NO: 914967 - DNA, 33 bp, Homo sapien
atgcgtgtgacatatacagacttctgataagca

SEQ ID NO: 914968 - DNA, 33 bp, Homo sapien
atgcgtgtgacatatatagacttctgataagca

SEQ ID NO: 914969 - DNA, 33 bp, Homo sapien
aacaatgaaaatccaccaaaatctgtctcaagg

SEQ ID NO: 914970 - DNA, 33 bp, Homo sapien
aacaatgaaaatccactaaaatctgtctcaagg

SEQ ID NO: 914971 - DNA, 33 bp, Homo sapien
ttaaatgtaaatataacgtaagcctcaaaattc

SEQ ID NO: 914972 - DNA, 33 bp, Homo sapien
ttaaatgtaaatataatgtaagcctcaaaattc

SEQ ID NO: 914973 - DNA, 33 bp, Homo sapien
ttccttcgcttgccataaaggcttcttggggag

SEQ ID NO: 914974 - DNA, 33 bp, Homo sapien
ttccttcgcttgccatgaaggcttcttggggag

SEQ ID NO: 914975 - DNA, 33 bp, Homo sapien
aaacaaatgcaaaggaagatgagtcattgagtt

SEQ ID NO: 914976 - DNA, 33 bp, Homo sapien
aaacaaatgcaaaggaggatgagtcattgagtt

SEQ ID NO: 914977 - DNA, 33 bp, Homo sapien
tacaggcgtgcacaaccatggcccggctaattt

SEQ ID NO: 914978 - DNA, 33 bp, Homo sapien
tacaggcgtgcacaactatggcccggctaattt

SEQ ID NO: 914979 - DNA, 33 bp, Homo sapien
tgggaaaatgatacaaactttgcattttagaaa

SEQ ID NO: 914980 - DNA, 33 bp, Homo sapien
tgggaaaatgatacaagctttgcattttagaaa

SEQ ID NO: 914981 - DNA, 33 bp, Homo sapien
agctcttcccacattcacacattatttccatca

SEQ ID NO: 914982 - DNA, 33 bp, Homo sapien
agctcttcccacattcgcacattatttccatca

SEQ ID NO: 914983 - DNA, 33 bp, Homo sapien
gcaaagggagggttacaataacacacagtttat

SEQ ID NO: 914984 - DNA, 33 bp, Homo sapien
gcaaagggagggttacgataacacacagtttat

SEQ ID NO: 914985 - DNA, 33 bp, Homo sapien
ggtaacaagaagccacggaaagttattagggaa

SEQ ID NO: 914986 - DNA, 33 bp, Homo sapien
ggtaacaagaagccactgaaagttattagggaa

SEQ ID NO: 914987 - DNA, 33 bp, Homo sapien
taattaggcccgaatgacaaccttacaaaaaaa

SEQ ID NO: 914988 - DNA, 33 bp, Homo sapien
taattaggcccgaatggcaaccttacaaaaaaa

SEQ ID NO: 914989 - DNA, 33 bp, Homo sapien
tgggctaggtgcttacactaagattctctttcc

SEQ ID NO: 914990 - DNA, 33 bp, Homo sapien
tgggctaggtgcttaccctaagattctctttcc

SEQ ID NO: 914991 - DNA, 33 bp, Homo sapien
agtttgaggaagattcaaggatatggattaaac

SEQ ID NO: 914992 - DNA, 33 bp, Homo sapien
agtttgaggaagattcgaggatatggattaaac

SEQ ID NO: 914993 - DNA, 33 bp, Homo sapien
cggtttcattttcaaagctgaagatactcttta

SEQ ID NO: 914994 - DNA, 33 bp, Homo sapien
cggtttcattttcaaatctgaagatactcttta

SEQ ID NO: 914995 - DNA, 33 bp, Homo sapien
aatccattccaagaaaccattgctaaacatttg

SEQ ID NO: 914996 - DNA, 33 bp, Homo sapien
aatccattccaagaaatcattgctaaacatttg

SEQ ID NO: 914997 - DNA, 33 bp, Homo sapien
atgaggaaaagtctcaagtcaatagtaaaattt

SEQ ID NO: 914998 - DNA, 33 bp, Homo sapien
atgaggaaaagtctcaggtcaatagtaaaattt

SEQ ID NO: 914999 - DNA, 33 bp, Homo sapien
attcctcttagcacaacgtaagtaacaaaaaaa

SEQ ID NO: 915000 - DNA, 33 bp, Homo sapien
attcctcttagcacaatgtaagtaacaaaaaaa

SEQ ID NO: 915001 - DNA, 33 bp, Homo sapien
tttagcctacataaaactgtggcattaggaaag

SEQ ID NO: 915002 - DNA, 33 bp, Homo sapien
tttagcctacataaaattgtggcattaggaaag

SEQ ID NO: 915003 - DNA, 33 bp, Homo sapien
tttgccttcttttgataaccgttttactcctct

SEQ ID NO: 915004 - DNA, 33 bp, Homo sapien
tttgccttcttttgatcaccgttttactcctct

SEQ ID NO: 915005 - DNA, 33 bp, Homo sapien
agcaccaatgttgtcacggtggaacacttaagc

SEQ ID NO: 915006 - DNA, 33 bp, Homo sapien
agcaccaatgttgtcatggtggaacacttaagc

SEQ ID NO: 915007 - DNA, 33 bp, Homo sapien
gtttaaaaattgcatccaaaatgttttcaaaga

SEQ ID NO: 915008 - DNA, 33 bp, Homo sapien
gtttaaaaattgcatctaaaatgttttcaaaga

SEQ ID NO: 915009 - DNA, 33 bp, Homo sapien
tttagcctattttagacggtctcctttgttaat

SEQ ID NO: 915010 - DNA, 33 bp, Homo sapien
tttagcctattttagatggtctcctttgttaat

SEQ ID NO: 915011 - DNA, 33 bp, Homo sapien
tttcataccaggaaaagcctttctagcaccagc

SEQ ID NO: 915012 - DNA, 33 bp, Homo sapien
tttcataccaggaaaatcctttctagcaccagc

SEQ ID NO: 915013 - DNA, 33 bp, Homo sapien
aaatgacagctggaaaaaagcccacattctttg

SEQ ID NO: 915014 - DNA, 33 bp, Homo sapien
aaatgacagctggaaacaagcccacattctttg

SEQ ID NO: 915015 - DNA, 33 bp, Homo sapien
catttgttcttgacacagccatgcaaatgttag

SEQ ID NO: 915016 - DNA, 33 bp, Homo sapien
catttgttcttgacacggccatgcaaatgttag

SEQ ID NO: 915017 - DNA, 33 bp, Homo sapien
gttaaatagggatttcaattgccaaaaaaacct

SEQ ID NO: 915018 - DNA, 33 bp, Homo sapien
gttaaatagggatttcgattgccaaaaaaacct

SEQ ID NO: 915019 - DNA, 33 bp, Homo sapien
ttataatgcgggtgaaatgttaattttgcatta

SEQ ID NO: 915020 - DNA, 33 bp, Homo sapien
ttataatgcgggtgaagtgttaattttgcatta

SEQ ID NO: 915021 - DNA, 33 bp, Homo sapien
caatgtctgacttgcacaaataaggcagcttcc

SEQ ID NO: 915022 - DNA, 33 bp, Homo sapien
caatgtctgacttgcataaataaggcagcttcc

SEQ ID NO: 915023 - DNA, 33 bp, Homo sapien
tagaattgattcaaaacctattctctatattga

SEQ ID NO: 915024 - DNA, 33 bp, Homo sapien
tagaattgattcaaaagctattctctatattga

SEQ ID NO: 915025 - DNA, 33 bp, Homo sapien
ttttcagtaagtaccaaatgcaaattctaagta

SEQ ID NO: 915026 - DNA, 33 bp, Homo sapien
ttttcagtaagtaccagatgcaaattctaagta

SEQ ID NO: 915027 - DNA, 33 bp, Homo sapien
aggtaggaaggcagttcaaatcaaggtacagaa

SEQ ID NO: 915028 - DNA, 33 bp, Homo sapien
aggtaggaaggcagttgaaatcaaggtacagaa

SEQ ID NO: 915029 - DNA, 33 bp, Homo sapien
ttggtattaaagaacacagtgtgtggagaataa

SEQ ID NO: 915030 - DNA, 33 bp, Homo sapien
ttggtattaaagaacatagtgtgtggagaataa

SEQ ID NO: 915031 - DNA, 33 bp, Homo sapien
gtattttccagctacacaggctcagtcaaattc

SEQ ID NO: 915032 - DNA, 33 bp, Homo sapien
gtattttccagctacataggctcagtcaaattc

SEQ ID NO: 915033 - DNA, 33 bp, Homo sapien
aggatggcctcagaccacgggaaggaactagac

SEQ ID NO: 915034 - DNA, 33 bp, Homo sapien
aggatggcctcagaccgcgggaaggaactagac

SEQ ID NO: 915035 - DNA, 33 bp, Homo sapien
ctctctgtgcacttacaatgtgtcataccagtt

SEQ ID NO: 915036 - DNA, 33 bp, Homo sapien
ctctctgtgcacttacgatgtgtcataccagtt

SEQ ID NO: 915037 - DNA, 33 bp, Homo sapien
cacaatttagggcaaaaaagggtagctgtgaag

SEQ ID NO: 915038 - DNA, 33 bp, Homo sapien
cacaatttagggcaaagaagggtagctgtgaag

SEQ ID NO: 915039 - DNA, 33 bp, Homo sapien
atattatttccaatgaacgcctactttcaggct

SEQ ID NO: 915040 - DNA, 33 bp, Homo sapien
atattatttccaatgagcgcctactttcaggct

SEQ ID NO: 915041 - DNA, 33 bp, Homo sapien
tatcagttaagatccaatcaaagggtattgact

SEQ ID NO: 915042 - DNA, 33 bp, Homo sapien
tatcagttaagatccagtcaaagggtattgact

SEQ ID NO: 915043 - DNA, 33 bp, Homo sapien
gattgttctactccaaaacaaattcaaaacagc

SEQ ID NO: 915044 - DNA, 33 bp, Homo sapien
gattgttctactccaacacaaattcaaaacagc

SEQ ID NO: 915045 - DNA, 33 bp, Homo sapien
tgttacaatggctatccataaaaaagaaaaccc

SEQ ID NO: 915046 - DNA, 33 bp, Homo sapien
tgttacaatggctatctataaaaaagaaaaccc

SEQ ID NO: 915047 - DNA, 33 bp, Homo sapien
caggcctattaagtaggagtgagtaatctttat

SEQ ID NO: 915048 - DNA, 33 bp, Homo sapien
caggcctattaagtagtagtgagtaatctttat

SEQ ID NO: 915049 - DNA, 33 bp, Homo sapien
acatgatcacatctgccatattctgtcagtcac

SEQ ID NO: 915050 - DNA, 33 bp, Homo sapien
acatgatcacatctgctatattctgtcagtcac

SEQ ID NO: 915051 - DNA, 33 bp, Homo sapien
tctagaaatgacatacaaattcaagttatttcc

SEQ ID NO: 915052 - DNA, 33 bp, Homo sapien
tctagaaatgacatacgaattcaagttatttcc

SEQ ID NO: 915053 - DNA, 33 bp, Homo sapien
atatcaagccgtcagaatcatgtcctaaagccc

SEQ ID NO: 915054 - DNA, 33 bp, Homo sapien
atatcaagccgtcagagtcatgtcctaaagccc

SEQ ID NO: 915055 - DNA, 33 bp, Homo sapien
tctattcatcctgacaatgaaacaaatgttaca

SEQ ID NO: 915056 - DNA, 33 bp, Homo sapien
tctattcatcctgacactgaaacaaatgttaca

SEQ ID NO: 915057 - DNA, 33 bp, Homo sapien
gaggcttaaactaattaaaactagcagtactaa

SEQ ID NO: 915058 - DNA, 33 bp, Homo sapien
gaggcttaaactaattgaaactagcagtactaa

SEQ ID NO: 915059 - DNA, 33 bp, Homo sapien
attctatgatgattaaaaactgtatacttgttc

SEQ ID NO: 915060 - DNA, 33 bp, Homo sapien
attctatgatgattaacaactgtatacttgttc

SEQ ID NO: 915061 - DNA, 33 bp, Homo sapien
attcctggcagaactgaagattgggcaggtgga

SEQ ID NO: 915062 - DNA, 33 bp, Homo sapien
attcctggcagaactggagattgggcaggtgga

SEQ ID NO: 915063 - DNA, 33 bp, Homo sapien
gcaatacacaaactcaaattagaagaaattctt

SEQ ID NO: 915064 - DNA, 33 bp, Homo sapien
gcaatacacaaactcatattagaagaaattctt

SEQ ID NO: 915065 - DNA, 33 bp, Homo sapien
gaaatgagggaaacacacatttacatatacgtt

SEQ ID NO: 915066 - DNA, 33 bp, Homo sapien
gaaatgagggaaacacccatttacatatacgtt

SEQ ID NO: 915067 - DNA, 33 bp, Homo sapien
tatctcctatgttggcaaaaagacctttgattt

SEQ ID NO: 915068 - DNA, 33 bp, Homo sapien
tatctcctatgttggccaaaagacctttgattt

SEQ ID NO: 915069 - DNA, 33 bp, Homo sapien
aagttgtaaccacccaataggttcaccttgcct

SEQ ID NO: 915070 - DNA, 33 bp, Homo sapien
aagttgtaaccacccagtaggttcaccttgcct

SEQ ID NO: 915071 - DNA, 33 bp, Homo sapien
ataatttaccactaaccgaaaatgattttctgt

SEQ ID NO: 915072 - DNA, 33 bp, Homo sapien
ataatttaccactaactgaaaatgattttctgt

SEQ ID NO: 915073 - DNA, 33 bp, Homo sapien
ttactgaaagcaaggaaaaataaacacaatacc

SEQ ID NO: 915074 - DNA, 33 bp, Homo sapien
ttactgaaagcaaggagaaataaacacaatacc

SEQ ID NO: 915075 - DNA, 33 bp, Homo sapien
agatggttcacaaagacactaaatactagttat

SEQ ID NO: 915076 - DNA, 33 bp, Homo sapien
agatggttcacaaagatactaaatactagttat

SEQ ID NO: 915077 - DNA, 33 bp, Homo sapien
agacactatttccacaatgctgagccaccctta

SEQ ID NO: 915078 - DNA, 33 bp, Homo sapien
agacactatttccacagtgctgagccaccctta

SEQ ID NO: 915079 - DNA, 33 bp, Homo sapien
taagatggaagtgggcaaatgcaactaaggtaa

SEQ ID NO: 915080 - DNA, 33 bp, Homo sapien
taagatggaagtgggcgaatgcaactaaggtaa

SEQ ID NO: 915081 - DNA, 33 bp, Homo sapien
cagccaaagtgctttaagtatggagatagcttc

SEQ ID NO: 915082 - DNA, 33 bp, Homo sapien
cagccaaagtgctttatgtatggagatagcttc

SEQ ID NO: 915083 - DNA, 33 bp, Homo sapien
ttccttctgatttaaggcatgaagcctcatgtt

SEQ ID NO: 915084 - DNA, 33 bp, Homo sapien
ttccttctgatttaagtcatgaagcctcatgtt

SEQ ID NO: 915085 - DNA, 33 bp, Homo sapien
atttttctctaatgcactaattctcaaacaaac

SEQ ID NO: 915086 - DNA, 33 bp, Homo sapien
atttttctctaatgcagtaattctcaaacaaac

SEQ ID NO: 915087 - DNA, 33 bp, Homo sapien
attagaggttctactgcaaaaatccaggctgat

SEQ ID NO: 915088 - DNA, 33 bp, Homo sapien
attagaggttctactgtaaaaatccaggctgat

SEQ ID NO: 915089 - DNA, 33 bp, Homo sapien
ctgcactggatatttccaatgactccacatttt

SEQ ID NO: 915090 - DNA, 33 bp, Homo sapien
ctgcactggatatttctaatgactccacatttt

SEQ ID NO: 915091 - DNA, 33 bp, Homo sapien
tatgtagccaattcaacgcaagcattactaagc

SEQ ID NO: 915092 - DNA, 33 bp, Homo sapien
tatgtagccaattcaaggcaagcattactaagc

SEQ ID NO: 915093 - DNA, 33 bp, Homo sapien
tgagagcaaggtgagaagattatgcatgaagac

SEQ ID NO: 915094 - DNA, 33 bp, Homo sapien
tgagagcaaggtgagaggattatgcatgaagac

SEQ ID NO: 915095 - DNA, 33 bp, Homo sapien
gggcactttggatataaccatagctttggagtt

SEQ ID NO: 915096 - DNA, 33 bp, Homo sapien
gggcactttggatatagccatagctttggagtt

SEQ ID NO: 915097 - DNA, 33 bp, Homo sapien
actggcccacaactaaccagtggctgaagtgga

SEQ ID NO: 915098 - DNA, 33 bp, Homo sapien
actggcccacaactaatcagtggctgaagtgga

SEQ ID NO: 915099 - DNA, 33 bp, Homo sapien
tattgtgtatgtaaaccattctcttcactgaat

SEQ ID NO: 915100 - DNA, 33 bp, Homo sapien
tattgtgtatgtaaacgattctcttcactgaat

SEQ ID NO: 915101 - DNA, 33 bp, Homo sapien
ataatctggtttcacaatgacatatctaggtat

SEQ ID NO: 915102 - DNA, 33 bp, Homo sapien
ataatctggtttcacagtgacatatctaggtat

SEQ ID NO: 915103 - DNA, 33 bp, Homo sapien
ataccagtgtttaccaaggatgtgtgtgtgtat

SEQ ID NO: 915104 - DNA, 33 bp, Homo sapien
ataccagtgtttaccagggatgtgtgtgtgtat

SEQ ID NO: 915105 - DNA, 33 bp, Homo sapien
tctgcatgtatcatgtaaagcctgggctctgaa

SEQ ID NO: 915106 - DNA, 33 bp, Homo sapien
tctgcatgtatcatgtgaagcctgggctctgaa

SEQ ID NO: 915107 - DNA, 33 bp, Homo sapien
cagtaatttgtctctaaccagtggtcacacatg

SEQ ID NO: 915108 - DNA, 33 bp, Homo sapien
cagtaatttgtctctatccagtggtcacacatg

SEQ ID NO: 915109 - DNA, 33 bp, Homo sapien
tggactgtcagtcataggtggactttgcaagta

SEQ ID NO: 915110 - DNA, 33 bp, Homo sapien
tggactgtcagtcatatgtggactttgcaagta

SEQ ID NO: 915111 - DNA, 33 bp, Homo sapien
aaaaagggcccaaataactgaagtgatcctcag

SEQ ID NO: 915112 - DNA, 33 bp, Homo sapien
aaaaagggcccaaatagctgaagtgatcctcag

SEQ ID NO: 915113 - DNA, 33 bp, Homo sapien
tgcaataaaagcaaaacggacaagtgggaatct

SEQ ID NO: 915114 - DNA, 33 bp, Homo sapien
tgcaataaaagcaaaatggacaagtgggaatct

SEQ ID NO: 915115 - DNA, 33 bp, Homo sapien
ttatccaatctgtagaaggactcagtagaacaa

SEQ ID NO: 915116 - DNA, 33 bp, Homo sapien
ttatccaatctgtagagggactcagtagaacaa

SEQ ID NO: 915117 - DNA, 33 bp, Homo sapien
ataagctaaatgtaataatgagaagacatcaga

SEQ ID NO: 915118 - DNA, 33 bp, Homo sapien
ataagctaaatgtaatcatgagaagacatcaga

SEQ ID NO: 915119 - DNA, 33 bp, Homo sapien
aagagacaaagcatacagtagtacttacagcta

SEQ ID NO: 915120 - DNA, 33 bp, Homo sapien
aagagacaaagcatacggtagtacttacagcta

SEQ ID NO: 915121 - DNA, 33 bp, Homo sapien
tacagcaagagaatataacagtggtaaatacat

SEQ ID NO: 915122 - DNA, 33 bp, Homo sapien
tacagcaagagaatatcacagtggtaaatacat

SEQ ID NO: 915123 - DNA, 33 bp, Homo sapien
ttccaaccatgaaatactagctactcaatagca

SEQ ID NO: 915124 - DNA, 33 bp, Homo sapien
ttccaaccatgaaatattagctactcaatagca

SEQ ID NO: 915125 - DNA, 33 bp, Homo sapien
ctcatagggctatctactaaagttactgctttc

SEQ ID NO: 915126 - DNA, 33 bp, Homo sapien
ctcatagggctatctattaaagttactgctttc

SEQ ID NO: 915127 - DNA, 33 bp, Homo sapien
atgaatattacctactcaagaactttgcttctc

SEQ ID NO: 915128 - DNA, 33 bp, Homo sapien
atgaatattacctactgaagaactttgcttctc

SEQ ID NO: 915129 - DNA, 33 bp, Homo sapien
gggtgagtagcattgtgaacaggatttcttgtc

SEQ ID NO: 915130 - DNA, 33 bp, Homo sapien
gggtgagtagcattgttaacaggatttcttgtc

SEQ ID NO: 915131 - DNA, 33 bp, Homo sapien
tatttctttgtatgtagagtgtcaagtcaacgt

SEQ ID NO: 915132 - DNA, 33 bp, Homo sapien
tatttctttgtatgtatagtgtcaagtcaacgt

SEQ ID NO: 915133 - DNA, 33 bp, Homo sapien
gtcaaaagacaacagaagtcggagagtctgctg

SEQ ID NO: 915134 - DNA, 33 bp, Homo sapien
gtcaaaagacaacagatgtcggagagtctgctg

SEQ ID NO: 915135 - DNA, 33 bp, Homo sapien
aggggaagcaagcttgaacctcacatggcagca

SEQ ID NO: 915136 - DNA, 33 bp, Homo sapien
aggggaagcaagcttggacctcacatggcagca

SEQ ID NO: 915137 - DNA, 33 bp, Homo sapien
gctgtggatagaatgcgatgatttaaatgtgcc

SEQ ID NO: 915138 - DNA, 33 bp, Homo sapien
gctgtggatagaatgctatgatttaaatgtgcc

SEQ ID NO: 915139 - DNA, 33 bp, Homo sapien
gcatagtcagcactacaatgttgatttatatca

SEQ ID NO: 915140 - DNA, 33 bp, Homo sapien
gcatagtcagcactacgatgttgatttatatca

SEQ ID NO: 915141 - DNA, 33 bp, Homo sapien
ctaaaatgcagggagaagaaacttgagacatca

SEQ ID NO: 915142 - DNA, 33 bp, Homo sapien
ctaaaatgcagggagaggaaacttgagacatca

SEQ ID NO: 915143 - DNA, 33 bp, Homo sapien
gcactgcaatcatgaaagaagagcaagtgactc

SEQ ID NO: 915144 - DNA, 33 bp, Homo sapien
gcactgcaatcatgaaggaagagcaagtgactc

SEQ ID NO: 915145 - DNA, 33 bp, Homo sapien
gctgagtgactactaccaatcttcatttaaagt

SEQ ID NO: 915146 - DNA, 33 bp, Homo sapien
gctgagtgactactactaatcttcatttaaagt

SEQ ID NO: 915147 - DNA, 33 bp, Homo sapien
gaagtcacattgactgaagttctttgaatggac

SEQ ID NO: 915148 - DNA, 33 bp, Homo sapien
gaagtcacattgactggagttctttgaatggac

SEQ ID NO: 915149 - DNA, 33 bp, Homo sapien
ttcaaaattaattgccggaaacactcagatgcc

SEQ ID NO: 915150 - DNA, 33 bp, Homo sapien
ttcaaaattaattgcctgaaacactcagatgcc

SEQ ID NO: 915151 - DNA, 33 bp, Homo sapien
cagtgttatccaacaaatagaccttcaatgtta

SEQ ID NO: 915152 - DNA, 33 bp, Homo sapien
cagtgttatccaacaagtagaccttcaatgtta

SEQ ID NO: 915153 - DNA, 33 bp, Homo sapien
tacttgccctaggtcacaccaatgttaagcaga

SEQ ID NO: 915154 - DNA, 33 bp, Homo sapien
tacttgccctaggtcataccaatgttaagcaga

SEQ ID NO: 915155 - DNA, 33 bp, Homo sapien
tgacataattgtgtaactagaaaaatcccaaaa

SEQ ID NO: 915156 - DNA, 33 bp, Homo sapien
tgacataattgtgtaagtagaaaaatcccaaaa

SEQ ID NO: 915157 - DNA, 33 bp, Homo sapien
taagggagtcagcttacggtactttgttatggc

SEQ ID NO: 915158 - DNA, 33 bp, Homo sapien
taagggagtcagcttatggtactttgttatggc

SEQ ID NO: 915159 - DNA, 33 bp, Homo sapien
agtagaatagatatacactggaacaatgagaac

SEQ ID NO: 915160 - DNA, 33 bp, Homo sapien
agtagaatagatatacgctggaacaatgagaac

SEQ ID NO: 915161 - DNA, 33 bp, Homo sapien
tgactgagcaacatgaaagtatcatcagcctgt

SEQ ID NO: 915162 - DNA, 33 bp, Homo sapien
tgactgagcaacatgagagtatcatcagcctgt

SEQ ID NO: 915163 - DNA, 33 bp, Homo sapien
tcatcagcctgtaccaatgcaggtttgtgggtt

SEQ ID NO: 915164 - DNA, 33 bp, Homo sapien
tcatcagcctgtaccactgcaggtttgtgggtt

SEQ ID NO: 915165 - DNA, 33 bp, Homo sapien
acattgaaaacccacaatgaaacactagttatc

SEQ ID NO: 915166 - DNA, 33 bp, Homo sapien
acattgaaaacccacagtgaaacactagttatc

SEQ ID NO: 915167 - DNA, 33 bp, Homo sapien
gtgctgaggtgacaaaatagaattgtgacaaag

SEQ ID NO: 915168 - DNA, 33 bp, Homo sapien
gtgctgaggtgacaaagtagaattgtgacaaag

SEQ ID NO: 915169 - DNA, 33 bp, Homo sapien
tcttgtaaagcattgtgaaagagtctattggca

SEQ ID NO: 915170 - DNA, 33 bp, Homo sapien
tcttgtaaagcattgttaaagagtctattggca

SEQ ID NO: 915171 - DNA, 33 bp, Homo sapien
gacttttattccaacacgaagactgctgtcttg

SEQ ID NO: 915172 - DNA, 33 bp, Homo sapien
gacttttattccaacatgaagactgctgtcttg

SEQ ID NO: 915173 - DNA, 33 bp, Homo sapien
aaaactcatctgccctaaataatactaaggaat

SEQ ID NO: 915174 - DNA, 33 bp, Homo sapien
aaaactcatctgccctcaataatactaaggaat

SEQ ID NO: 915175 - DNA, 33 bp, Homo sapien
tgcttccatgcctgataacttactgattcacct

SEQ ID NO: 915176 - DNA, 33 bp, Homo sapien
tgcttccatgcctgatcacttactgattcacct

SEQ ID NO: 915177 - DNA, 33 bp, Homo sapien
gcctagagtgttttcaagatgcttcttaagaaa

SEQ ID NO: 915178 - DNA, 33 bp, Homo sapien
gcctagagtgttttcaggatgcttcttaagaaa

SEQ ID NO: 915179 - DNA, 33 bp, Homo sapien
ggatgaaacaaaaagcaagatggtaaattagca

SEQ ID NO: 915180 - DNA, 33 bp, Homo sapien
ggatgaaacaaaaagcgagatggtaaattagca

SEQ ID NO: 915181 - DNA, 33 bp, Homo sapien
atcaacggacaactaacagccaataatgcaaac

SEQ ID NO: 915182 - DNA, 33 bp, Homo sapien
atcaacggacaactaatagccaataatgcaaac

SEQ ID NO: 915183 - DNA, 33 bp, Homo sapien
ttcttttacccataaactggaatgtatatcttc

SEQ ID NO: 915184 - DNA, 33 bp, Homo sapien
ttcttttacccataaattggaatgtatatcttc

SEQ ID NO: 915185 - DNA, 33 bp, Homo sapien
gaacaggtattgaacccatgttttctgaagctt

SEQ ID NO: 915186 - DNA, 33 bp, Homo sapien
gaacaggtattgaacctatgttttctgaagctt

SEQ ID NO: 915187 - DNA, 33 bp, Homo sapien
atatattaccagaaagcctctctagaatttttg

SEQ ID NO: 915188 - DNA, 33 bp, Homo sapien
atatattaccagaaaggctctctagaatttttg

SEQ ID NO: 915189 - DNA, 33 bp, Homo sapien
ctgctgctttccactaagagtcttaactatata

SEQ ID NO: 915190 - DNA, 33 bp, Homo sapien
ctgctgctttccactaggagtcttaactatata

SEQ ID NO: 915191 - DNA, 33 bp, Homo sapien
tttccagttccacagacatgacgttcccccaat

SEQ ID NO: 915192 - DNA, 33 bp, Homo sapien
tttccagttccacagagatgacgttcccccaat

SEQ ID NO: 915193 - DNA, 33 bp, Homo sapien
acggtaccacttctccacttcagaatgctttaa

SEQ ID NO: 915194 - DNA, 33 bp, Homo sapien
acggtaccacttctccgcttcagaatgctttaa

SEQ ID NO: 915195 - DNA, 33 bp, Homo sapien
tactggccctcataacaaaattgcttgactgaa

SEQ ID NO: 915196 - DNA, 33 bp, Homo sapien
tactggccctcataaccaaattgcttgactgaa

SEQ ID NO: 915197 - DNA, 33 bp, Homo sapien
ttctttctgtgattgactacatttatcaggtga

SEQ ID NO: 915198 - DNA, 33 bp, Homo sapien
ttctttctgtgattgagtacatttatcaggtga

SEQ ID NO: 915199 - DNA, 33 bp, Homo sapien
ggaattgttgaattaaaatgagcctaatgaaaa

SEQ ID NO: 915200 - DNA, 33 bp, Homo sapien
ggaattgttgaattaagatgagcctaatgaaaa

SEQ ID NO: 915201 - DNA, 33 bp, Homo sapien
gtatttgttgaataaaagaatacacgttacaca

SEQ ID NO: 915202 - DNA, 33 bp, Homo sapien
gtatttgttgaataaatgaatacacgttacaca

SEQ ID NO: 915203 - DNA, 33 bp, Homo sapien
gcactaccacatatataagatcagaaactaaga

SEQ ID NO: 915204 - DNA, 33 bp, Homo sapien
gcactaccacatatatgagatcagaaactaaga

SEQ ID NO: 915205 - DNA, 33 bp, Homo sapien
tagccagttttatcaccatctttttgtcttatt

SEQ ID NO: 915206 - DNA, 33 bp, Homo sapien
tagccagttttatcactatctttttgtcttatt

SEQ ID NO: 915207 - DNA, 33 bp, Homo sapien
aaggctttccaggatacggtttctactcacctt

SEQ ID NO: 915208 - DNA, 33 bp, Homo sapien
aaggctttccaggatatggtttctactcacctt

SEQ ID NO: 915209 - DNA, 33 bp, Homo sapien
ttcattaaatgctcccacctcaaacagaacctg

SEQ ID NO: 915210 - DNA, 33 bp, Homo sapien
ttcattaaatgctcccgcctcaaacagaacctg

SEQ ID NO: 915211 - DNA, 33 bp, Homo sapien
ctggtgattagaacacaaaggcagtggcagcat

SEQ ID NO: 915212 - DNA, 33 bp, Homo sapien
ctggtgattagaacacgaaggcagtggcagcat

SEQ ID NO: 915213 - DNA, 33 bp, Homo sapien
ctgcctagacatcaacacgtttccattcatctt

SEQ ID NO: 915214 - DNA, 33 bp, Homo sapien
ctgcctagacatcaacgcgtttccattcatctt

SEQ ID NO: 915215 - DNA, 33 bp, Homo sapien
aaaggctatgtcctaacccttggaaactgaata

SEQ ID NO: 915216 - DNA, 33 bp, Homo sapien
aaaggctatgtcctaatccttggaaactgaata

SEQ ID NO: 915217 - DNA, 33 bp, Homo sapien
tacagcaaaaaagctaaataatttgtggtgact

SEQ ID NO: 915218 - DNA, 33 bp, Homo sapien
tacagcaaaaaagctagataatttgtggtgact

SEQ ID NO: 915219 - DNA, 33 bp, Homo sapien
aaggtaattagggttaaactgccctaggagaaa

SEQ ID NO: 915220 - DNA, 33 bp, Homo sapien
aaggtaattagggttacactgccctaggagaaa

SEQ ID NO: 915221 - DNA, 33 bp, Homo sapien
gggatgtattccagtaccttcagagcaattaaa

SEQ ID NO: 915222 - DNA, 33 bp, Homo sapien
gggatgtattccagtatcttcagagcaattaaa

SEQ ID NO: 915223 - DNA, 33 bp, Homo sapien
tgctttatgtatgctcgaattcaatcctggttc

SEQ ID NO: 915224 - DNA, 33 bp, Homo sapien
tgctttatgtatgctctaattcaatcctggttc

SEQ ID NO: 915225 - DNA, 33 bp, Homo sapien
aatgatctctggattacgaaattagaggctgtg

SEQ ID NO: 915226 - DNA, 33 bp, Homo sapien
aatgatctctggattatgaaattagaggctgtg

SEQ ID NO: 915227 - DNA, 33 bp, Homo sapien
tctgaccgatgtaaaccaagtgacacttctccc

SEQ ID NO: 915228 - DNA, 33 bp, Homo sapien
tctgaccgatgtaaactaagtgacacttctccc

SEQ ID NO: 915229 - DNA, 33 bp, Homo sapien
agcaaagtacattctacaaaccaaaataagcca

SEQ ID NO: 915230 - DNA, 33 bp, Homo sapien
agcaaagtacattctagaaaccaaaataagcca

SEQ ID NO: 915231 - DNA, 33 bp, Homo sapien
tgctccttattccccacagtacaactaaaatta

SEQ ID NO: 915232 - DNA, 33 bp, Homo sapien
tgctccttattccccatagtacaactaaaatta

SEQ ID NO: 915233 - DNA, 33 bp, Homo sapien
atccatagacgtaaaaaatcttgaatggtgaaa

SEQ ID NO: 915234 - DNA, 33 bp, Homo sapien
atccatagacgtaaaacatcttgaatggtgaaa

SEQ ID NO: 915235 - DNA, 33 bp, Homo sapien
aaaatcgtttttagagcacagtaatagtgagag

SEQ ID NO: 915236 - DNA, 33 bp, Homo sapien
aaaatcgtttttagagtacagtaatagtgagag

SEQ ID NO: 915237 - DNA, 33 bp, Homo sapien
tggtacagtaatttggccatttattgtaagtct

SEQ ID NO: 915238 - DNA, 33 bp, Homo sapien
tggtacagtaatttggtcatttattgtaagtct

SEQ ID NO: 915239 - DNA, 33 bp, Homo sapien
tgattaagtgatgaacacagtgcctcatgcatg

SEQ ID NO: 915240 - DNA, 33 bp, Homo sapien
tgattaagtgatgaacgcagtgcctcatgcatg

SEQ ID NO: 915241 - DNA, 33 bp, Homo sapien
ttgaaagtataagatcaagatgtcagcagattc

SEQ ID NO: 915242 - DNA, 33 bp, Homo sapien
ttgaaagtataagatcgagatgtcagcagattc

SEQ ID NO: 915243 - DNA, 33 bp, Homo sapien
actgtgttatgagttaccttacttaacacaaca

SEQ ID NO: 915244 - DNA, 33 bp, Homo sapien
actgtgttatgagttatcttacttaacacaaca

SEQ ID NO: 915245 - DNA, 33 bp, Homo sapien
gaattgatggtaataacgtaacagagggtgaga

SEQ ID NO: 915246 - DNA, 33 bp, Homo sapien
gaattgatggtaataatgtaacagagggtgaga

SEQ ID NO: 915247 - DNA, 33 bp, Homo sapien
agttcttttgatgatacgattgttcaggtcagg

SEQ ID NO: 915248 - DNA, 33 bp, Homo sapien
agttcttttgatgatatgattgttcaggtcagg

SEQ ID NO: 915249 - DNA, 33 bp, Homo sapien
gtatgctgtttggtcccactttgttagggtatg

SEQ ID NO: 915250 - DNA, 33 bp, Homo sapien
gtatgctgtttggtcctactttgttagggtatg

SEQ ID NO: 915251 - DNA, 33 bp, Homo sapien
acagctttgatggtatcagtaactggccagaag

SEQ ID NO: 915252 - DNA, 33 bp, Homo sapien
acagctttgatggtattagtaactggccagaag

SEQ ID NO: 915253 - DNA, 33 bp, Homo sapien
aatattctgtaaataaacagagctactgacgac

SEQ ID NO: 915254 - DNA, 33 bp, Homo sapien
aatattctgtaaataaccagagctactgacgac

SEQ ID NO: 915255 - DNA, 33 bp, Homo sapien
taacatttcagtaccaatggaaaatctctccac

SEQ ID NO: 915256 - DNA, 33 bp, Homo sapien
taacatttcagtaccagtggaaaatctctccac

SEQ ID NO: 915257 - DNA, 33 bp, Homo sapien
agtgtcattcccaaatcatcttgttgattattg

SEQ ID NO: 915258 - DNA, 33 bp, Homo sapien
agtgtcattcccaaattatcttgttgattattg

SEQ ID NO: 915259 - DNA, 33 bp, Homo sapien
tagaaacagtctactacgaaggcagatccatag

SEQ ID NO: 915260 - DNA, 33 bp, Homo sapien
tagaaacagtctactatgaaggcagatccatag

SEQ ID NO: 915261 - DNA, 33 bp, Homo sapien
aatttagcatgaagtacgagtttcactaagtca

SEQ ID NO: 915262 - DNA, 33 bp, Homo sapien
aatttagcatgaagtatgagtttcactaagtca

SEQ ID NO: 915263 - DNA, 33 bp, Homo sapien
atatcccctgaccaccacttggaatgaggactt

SEQ ID NO: 915264 - DNA, 33 bp, Homo sapien
atatcccctgaccaccgcttggaatgaggactt

SEQ ID NO: 915265 - DNA, 33 bp, Homo sapien
gttctcagagcacatgaatatatgaactggaat

SEQ ID NO: 915266 - DNA, 33 bp, Homo sapien
gttctcagagcacatggatatatgaactggaat

SEQ ID NO: 915267 - DNA, 33 bp, Homo sapien
tatgatccagacatcactctttttttactgaag

SEQ ID NO: 915268 - DNA, 33 bp, Homo sapien
tatgatccagacatcattctttttttactgaag

SEQ ID NO: 915269 - DNA, 33 bp, Homo sapien
actgtatttctaaccaatattgtctgagaagaa

SEQ ID NO: 915270 - DNA, 33 bp, Homo sapien
actgtatttctaaccagtattgtctgagaagaa

SEQ ID NO: 915271 - DNA, 33 bp, Homo sapien
aaatcaaaaagagccccctcactatatgctatc

SEQ ID NO: 915272 - DNA, 33 bp, Homo sapien
aaatcaaaaagagccctctcactatatgctatc

SEQ ID NO: 915273 - DNA, 33 bp, Homo sapien
aagtggcaacatacaggaaaaagaagaggagga

SEQ ID NO: 915274 - DNA, 33 bp, Homo sapien
aagtggcaacatacagtaaaaagaagaggagga

SEQ ID NO: 915275 - DNA, 33 bp, Homo sapien
tctatgtaatgcttcaataaaaaaactgaaaaa

SEQ ID NO: 915276 - DNA, 33 bp, Homo sapien
tctatgtaatgcttcagtaaaaaaactgaaaaa

SEQ ID NO: 915277 - DNA, 33 bp, Homo sapien
acagtgtagaaaggaacaggcctcaggtgatga

SEQ ID NO: 915278 - DNA, 33 bp, Homo sapien
acagtgtagaaaggaataggcctcaggtgatga

SEQ ID NO: 915279 - DNA, 33 bp, Homo sapien
ggtggttctgcaaacgacaaatgatgtaaaaaa

SEQ ID NO: 915280 - DNA, 33 bp, Homo sapien
ggtggttctgcaaacggcaaatgatgtaaaaaa

SEQ ID NO: 915281 - DNA, 33 bp, Homo sapien
agctctttctttcttacagtacaacttgtcaaa

SEQ ID NO: 915282 - DNA, 33 bp, Homo sapien
agctctttctttcttatagtacaacttgtcaaa

SEQ ID NO: 915283 - DNA, 33 bp, Homo sapien
ccttatgtttctctctaaagtgagtctacagct

SEQ ID NO: 915284 - DNA, 33 bp, Homo sapien
ccttatgtttctctctgaagtgagtctacagct

SEQ ID NO: 915285 - DNA, 33 bp, Homo sapien
ctccctaaactgtaacgaagatagggattcaag

SEQ ID NO: 915286 - DNA, 33 bp, Homo sapien
ctccctaaactgtaactaagatagggattcaag

SEQ ID NO: 915287 - DNA, 33 bp, Homo sapien
ctacttccttcctaaactctatcttcctaccag

SEQ ID NO: 915288 - DNA, 33 bp, Homo sapien
ctacttccttcctaaattctatcttcctaccag

SEQ ID NO: 915289 - DNA, 33 bp, Homo sapien
cacaatttctcatatcagagtcaatttcaggaa

SEQ ID NO: 915290 - DNA, 33 bp, Homo sapien
cacaatttctcatatcggagtcaatttcaggaa

SEQ ID NO: 915291 - DNA, 33 bp, Homo sapien
ggtctcaaggaagcaacaaaaaagagtgtttca

SEQ ID NO: 915292 - DNA, 33 bp, Homo sapien
ggtctcaaggaagcaagaaaaaagagtgtttca

SEQ ID NO: 915293 - DNA, 33 bp, Homo sapien
accaagaggttattgcagcaaggaaatggtctc

SEQ ID NO: 915294 - DNA, 33 bp, Homo sapien
accaagaggttattgcggcaaggaaatggtctc

SEQ ID NO: 915295 - DNA, 33 bp, Homo sapien
taatgaatgtgagaaccagagtgagcaaagaag

SEQ ID NO: 915296 - DNA, 33 bp, Homo sapien
taatgaatgtgagaacgagagtgagcaaagaag

SEQ ID NO: 915297 - DNA, 33 bp, Homo sapien
gcctgagtttctttctcacagatttgtggtgag

SEQ ID NO: 915298 - DNA, 33 bp, Homo sapien
gcctgagtttctttcttacagatttgtggtgag

SEQ ID NO: 915299 - DNA, 33 bp, Homo sapien
atggacaaagatacttaaagaattccctgagaa

SEQ ID NO: 915300 - DNA, 33 bp, Homo sapien
atggacaaagatacttgaagaattccctgagaa

SEQ ID NO: 915301 - DNA, 33 bp, Homo sapien
gtgagtagatgtattcccaaatatggaatctgt

SEQ ID NO: 915302 - DNA, 33 bp, Homo sapien
gtgagtagatgtattctcaaatatggaatctgt

SEQ ID NO: 915303 - DNA, 33 bp, Homo sapien
ggctcctattcaaaaccgacattatagattatc

SEQ ID NO: 915304 - DNA, 33 bp, Homo sapien
ggctcctattcaaaactgacattatagattatc

SEQ ID NO: 915305 - DNA, 33 bp, Homo sapien
tgtgatagggactgagaatatgaggatgaaaaa

SEQ ID NO: 915306 - DNA, 33 bp, Homo sapien
tgtgatagggactgaggatatgaggatgaaaaa

SEQ ID NO: 915307 - DNA, 33 bp, Homo sapien
ttgtcctgtgcataatcatctacctggcttttt

SEQ ID NO: 915308 - DNA, 33 bp, Homo sapien
ttgtcctgtgcataattatctacctggcttttt

SEQ ID NO: 915309 - DNA, 33 bp, Homo sapien
taacactgtgtcgccaaatggggcttagtattt

SEQ ID NO: 915310 - DNA, 33 bp, Homo sapien
taacactgtgtcgccacatggggcttagtattt

SEQ ID NO: 915311 - DNA, 33 bp, Homo sapien
aacaaaggtccttctacgactaatgaaattcaa

SEQ ID NO: 915312 - DNA, 33 bp, Homo sapien
aacaaaggtccttctatgactaatgaaattcaa

SEQ ID NO: 915313 - DNA, 33 bp, Homo sapien
atttgctatataaacaaccttcaaaagataatt

SEQ ID NO: 915314 - DNA, 33 bp, Homo sapien
atttgctatataaacatccttcaaaagataatt

SEQ ID NO: 915315 - DNA, 33 bp, Homo sapien
atttgagtcagtgaacaaggagaggcagaccca

SEQ ID NO: 915316 - DNA, 33 bp, Homo sapien
atttgagtcagtgaacgaggagaggcagaccca

SEQ ID NO: 915317 - DNA, 33 bp, Homo sapien
tatatatagaagatacagacttttccttaccta

SEQ ID NO: 915318 - DNA, 33 bp, Homo sapien
tatatatagaagatacggacttttccttaccta

SEQ ID NO: 915319 - DNA, 33 bp, Homo sapien
gtaattgaagtcaacaatgagctttctggcaaa

SEQ ID NO: 915320 - DNA, 33 bp, Homo sapien
gtaattgaagtcaacagtgagctttctggcaaa

SEQ ID NO: 915321 - DNA, 33 bp, Homo sapien
ataagggaatcatgcaagttttttagatcagca

SEQ ID NO: 915322 - DNA, 33 bp, Homo sapien
ataagggaatcatgcacgttttttagatcagca

SEQ ID NO: 915323 - DNA, 33 bp, Homo sapien
ctgcaaattcctggaaacatttaaagtaagcat

SEQ ID NO: 915324 - DNA, 33 bp, Homo sapien
ctgcaaattcctggaatcatttaaagtaagcat

SEQ ID NO: 915325 - DNA, 33 bp, Homo sapien
ctgctctagtaatctacggtttctgttgttgcc

SEQ ID NO: 915326 - DNA, 33 bp, Homo sapien
ctgctctagtaatctatggtttctgttgttgcc

SEQ ID NO: 915327 - DNA, 33 bp, Homo sapien
actgaaaaactattaactactctgctcagtact

SEQ ID NO: 915328 - DNA, 33 bp, Homo sapien
actgaaaaactattaagtactctgctcagtact

SEQ ID NO: 915329 - DNA, 33 bp, Homo sapien
gatgccacttctctgacaaattttggtttcaga

SEQ ID NO: 915330 - DNA, 33 bp, Homo sapien
gatgccacttctctgataaattttggtttcaga

SEQ ID NO: 915331 - DNA, 33 bp, Homo sapien
ggttttattattttaaatcttgctgccttcttt

SEQ ID NO: 915332 - DNA, 33 bp, Homo sapien
ggttttattattttaagtcttgctgccttcttt

SEQ ID NO: 915333 - DNA, 33 bp, Homo sapien
agaagaattcaatgaacatttcgtggctgttgt

SEQ ID NO: 915334 - DNA, 33 bp, Homo sapien
agaagaattcaatgaatatttcgtggctgttgt

SEQ ID NO: 915335 - DNA, 33 bp, Homo sapien
aaactcagctgtgaaaaccaaagtagctgcttt

SEQ ID NO: 915336 - DNA, 33 bp, Homo sapien
aaactcagctgtgaaatccaaagtagctgcttt

SEQ ID NO: 915337 - DNA, 33 bp, Homo sapien
gtcatatacaacaacagagataatcctagaagg

SEQ ID NO: 915338 - DNA, 33 bp, Homo sapien
gtcatatacaacaacatagataatcctagaagg

SEQ ID NO: 915339 - DNA, 33 bp, Homo sapien
aaatacattatcaaaaagaagcactaatcaaat

SEQ ID NO: 915340 - DNA, 33 bp, Homo sapien
aaatacattatcaaaaggaagcactaatcaaat

SEQ ID NO: 915341 - DNA, 33 bp, Homo sapien
tgtctgtttcttcttacagcttgaaaacgagtt

SEQ ID NO: 915342 - DNA, 33 bp, Homo sapien
tgtctgtttcttcttatagcttgaaaacgagtt

SEQ ID NO: 915343 - DNA, 33 bp, Homo sapien
tagtcactgacaatccaaattagaattgtcagt

SEQ ID NO: 915344 - DNA, 33 bp, Homo sapien
tagtcactgacaatcccaattagaattgtcagt

SEQ ID NO: 915345 - DNA, 33 bp, Homo sapien
gccctagataactctgaagataagttgccagtg

SEQ ID NO: 915346 - DNA, 33 bp, Homo sapien
gccctagataactctggagataagttgccagtg

SEQ ID NO: 915347 - DNA, 33 bp, Homo sapien
gagagttccagattaactagataagaagtatat

SEQ ID NO: 915348 - DNA, 33 bp, Homo sapien
gagagttccagattaattagataagaagtatat

SEQ ID NO: 915349 - DNA, 33 bp, Homo sapien
ttgcaatgtcactttcgatattaatacacacaa

SEQ ID NO: 915350 - DNA, 33 bp, Homo sapien
ttgcaatgtcactttctatattaatacacacaa

SEQ ID NO: 915351 - DNA, 33 bp, Homo sapien
aataaaccggattgtccgaacaccatgtgtgga

SEQ ID NO: 915352 - DNA, 33 bp, Homo sapien
aataaaccggattgtctgaacaccatgtgtgga

SEQ ID NO: 915353 - DNA, 33 bp, Homo sapien
cagcactatatacaggccacaaagatcttgatg

SEQ ID NO: 915354 - DNA, 33 bp, Homo sapien
cagcactatatacaggtcacaaagatcttgatg

SEQ ID NO: 915355 - DNA, 33 bp, Homo sapien
agagtttatggacagcaaggttcccattatgca

SEQ ID NO: 915356 - DNA, 33 bp, Homo sapien
agagtttatggacagcgaggttcccattatgca

SEQ ID NO: 915357 - DNA, 33 bp, Homo sapien
cattaccactttcttcacaagaatttgtaagtg

SEQ ID NO: 915358 - DNA, 33 bp, Homo sapien
cattaccactttcttcgcaagaatttgtaagtg

SEQ ID NO: 915359 - DNA, 33 bp, Homo sapien
cctggaaattctagtaaatctatttgctcaata

SEQ ID NO: 915360 - DNA, 33 bp, Homo sapien
cctggaaattctagtagatctatttgctcaata

SEQ ID NO: 915361 - DNA, 33 bp, Homo sapien
acacaattccagtaaaaaccctagcgagttatt

SEQ ID NO: 915362 - DNA, 33 bp, Homo sapien
acacaattccagtaaagaccctagcgagttatt

SEQ ID NO: 915363 - DNA, 33 bp, Homo sapien
gatttcagaaaaaaaagttgaggcaggagtaat

SEQ ID NO: 915364 - DNA, 33 bp, Homo sapien
gatttcagaaaaaaaatttgaggcaggagtaat

SEQ ID NO: 915365 - DNA, 33 bp, Homo sapien
atggtgcaattgtgtcccatacattttactgca

SEQ ID NO: 915366 - DNA, 33 bp, Homo sapien
atggtgcaattgtgtctcatacattttactgca

SEQ ID NO: 915367 - DNA, 33 bp, Homo sapien
atgtttcttccttgacactctaatttttcacta

SEQ ID NO: 915368 - DNA, 33 bp, Homo sapien
atgtttcttccttgaccctctaatttttcacta

SEQ ID NO: 915369 - DNA, 33 bp, Homo sapien
agaagagtagtgacaagtaagggttcttcagtt

SEQ ID NO: 915370 - DNA, 33 bp, Homo sapien
agaagagtagtgacaattaagggttcttcagtt

SEQ ID NO: 915371 - DNA, 33 bp, Homo sapien
actattacatgatcataagaaagtcaaattgtg

SEQ ID NO: 915372 - DNA, 33 bp, Homo sapien
actattacatgatcatcagaaagtcaaattgtg

SEQ ID NO: 915373 - DNA, 33 bp, Homo sapien
tttcttacctatgaacaaacagagtagattaaa

SEQ ID NO: 915374 - DNA, 33 bp, Homo sapien
tttcttacctatgaacgaacagagtagattaaa

SEQ ID NO: 915375 - DNA, 33 bp, Homo sapien
aagttctgttgaagaggactgagttataagaag

SEQ ID NO: 915376 - DNA, 33 bp, Homo sapien
aagttctgttgaagagtactgagttataagaag

SEQ ID NO: 915377 - DNA, 33 bp, Homo sapien
acaagatgcagtgctaataaaaaagggggaagt

SEQ ID NO: 915378 - DNA, 33 bp, Homo sapien
acaagatgcagtgctactaaaaaagggggaagt

SEQ ID NO: 915379 - DNA, 33 bp, Homo sapien
aaagtcgcactttgacagctcttcagattcagt

SEQ ID NO: 915380 - DNA, 33 bp, Homo sapien
aaagtcgcactttgaccgctcttcagattcagt

SEQ ID NO: 915381 - DNA, 33 bp, Homo sapien
gttatgtgaaatatgcacgattctgaaataaga

SEQ ID NO: 915382 - DNA, 33 bp, Homo sapien
gttatgtgaaatatgcgcgattctgaaataaga

SEQ ID NO: 915383 - DNA, 33 bp, Homo sapien
ttctttacgtacagaaagctatatgactaagtg

SEQ ID NO: 915384 - DNA, 33 bp, Homo sapien
ttctttacgtacagaatgctatatgactaagtg

SEQ ID NO: 915385 - DNA, 33 bp, Homo sapien
accatgtagaccattcaagctagtaagatatta

SEQ ID NO: 915386 - DNA, 33 bp, Homo sapien
accatgtagaccattccagctagtaagatatta

SEQ ID NO: 915387 - DNA, 33 bp, Homo sapien
gtcagcttgcaaatgaaagccatcctcaggata

SEQ ID NO: 915388 - DNA, 33 bp, Homo sapien
gtcagcttgcaaatgacagccatcctcaggata

SEQ ID NO: 915389 - DNA, 33 bp, Homo sapien
gcacattcttccttacaattactcaggctcctt

SEQ ID NO: 915390 - DNA, 33 bp, Homo sapien
gcacattcttccttaccattactcaggctcctt

SEQ ID NO: 915391 - DNA, 33 bp, Homo sapien
aaatactggtgaatggacaattaaaaaatatat

SEQ ID NO: 915392 - DNA, 33 bp, Homo sapien
aaatactggtgaatggtcaattaaaaaatatat

SEQ ID NO: 915393 - DNA, 33 bp, Homo sapien
tactagatctctaagacaaaaacgcaaaggaat

SEQ ID NO: 915394 - DNA, 33 bp, Homo sapien
tactagatctctaagagaaaaacgcaaaggaat

SEQ ID NO: 915395 - DNA, 33 bp, Homo sapien
ctgactgcattcctaactaaaggtccatatcag

SEQ ID NO: 915396 - DNA, 33 bp, Homo sapien
ctgactgcattcctaattaaaggtccatatcag

SEQ ID NO: 915397 - DNA, 33 bp, Homo sapien
ttatagggctttcataacctggaccttgattat

SEQ ID NO: 915398 - DNA, 33 bp, Homo sapien
ttatagggctttcataccctggaccttgattat

SEQ ID NO: 915399 - DNA, 33 bp, Homo sapien
tcaagaggaaaagtcactctgctacttcctgcc

SEQ ID NO: 915400 - DNA, 33 bp, Homo sapien
tcaagaggaaaagtcattctgctacttcctgcc

SEQ ID NO: 915401 - DNA, 33 bp, Homo sapien
atagattattatttccagcaggatcaccagatt

SEQ ID NO: 915402 - DNA, 33 bp, Homo sapien
atagattattatttccggcaggatcaccagatt

SEQ ID NO: 915403 - DNA, 33 bp, Homo sapien
ttcattatgtaaagcaatcaacaccaggaattg

SEQ ID NO: 915404 - DNA, 33 bp, Homo sapien
ttcattatgtaaagcagtcaacaccaggaattg

SEQ ID NO: 915405 - DNA, 33 bp, Homo sapien
gaaatctggaggtaataagactagctaacacct

SEQ ID NO: 915406 - DNA, 33 bp, Homo sapien
gaaatctggaggtaatgagactagctaacacct

SEQ ID NO: 915407 - DNA, 33 bp, Homo sapien
aaagcaacatcaacagcaaggcctattacagag

SEQ ID NO: 915408 - DNA, 33 bp, Homo sapien
aaagcaacatcaacaggaaggcctattacagag

SEQ ID NO: 915409 - DNA, 33 bp, Homo sapien
cactcttaggctccaacagatactctccattct

SEQ ID NO: 915410 - DNA, 33 bp, Homo sapien
cactcttaggctccaagagatactctccattct

SEQ ID NO: 915411 - DNA, 33 bp, Homo sapien
tgtttctctttactgtcaagtttttctgattag

SEQ ID NO: 915412 - DNA, 33 bp, Homo sapien
tgtttctctttactgttaagtttttctgattag

SEQ ID NO: 915413 - DNA, 33 bp, Homo sapien
cgaagagactatagcaatgagttattaaatggc

SEQ ID NO: 915414 - DNA, 33 bp, Homo sapien
cgaagagactatagcagtgagttattaaatggc

SEQ ID NO: 915415 - DNA, 33 bp, Homo sapien
acactgaaagggtatgaaaggttagtgcaaagg

SEQ ID NO: 915416 - DNA, 33 bp, Homo sapien
acactgaaagggtatggaaggttagtgcaaagg

SEQ ID NO: 915417 - DNA, 33 bp, Homo sapien
ttaaatgaataagcccccaattacaccagtgag

SEQ ID NO: 915418 - DNA, 33 bp, Homo sapien
ttaaatgaataagccctcaattacaccagtgag

SEQ ID NO: 915419 - DNA, 33 bp, Homo sapien
ttgtcacccatacaccaaaccatcttccaattt

SEQ ID NO: 915420 - DNA, 33 bp, Homo sapien
ttgtcacccatacacccaaccatcttccaattt

SEQ ID NO: 915421 - DNA, 33 bp, Homo sapien
tcctctttcttagagcaaaacatggaaggatta

SEQ ID NO: 915422 - DNA, 33 bp, Homo sapien
tcctctttcttagagccaaacatggaaggatta

SEQ ID NO: 915423 - DNA, 33 bp, Homo sapien
ggctgtatctagtgaactatagctccatcctct

SEQ ID NO: 915424 - DNA, 33 bp, Homo sapien
ggctgtatctagtgaagtatagctccatcctct

SEQ ID NO: 915425 - DNA, 33 bp, Homo sapien
tacactttttgaagtcacgagaagtttgggttt

SEQ ID NO: 915426 - DNA, 33 bp, Homo sapien
tacactttttgaagtcgcgagaagtttgggttt

SEQ ID NO: 915427 - DNA, 33 bp, Homo sapien
aggaagtggttccttacgccaggactgcattgt

SEQ ID NO: 915428 - DNA, 33 bp, Homo sapien
aggaagtggttccttatgccaggactgcattgt

SEQ ID NO: 915429 - DNA, 33 bp, Homo sapien
ctgagtgtagatgtcacggcctattagaattgt

SEQ ID NO: 915430 - DNA, 33 bp, Homo sapien
ctgagtgtagatgtcatggcctattagaattgt

SEQ ID NO: 915431 - DNA, 33 bp, Homo sapien
ctgctgggagctacctaagcggggtgtcaggtt

SEQ ID NO: 915432 - DNA, 33 bp, Homo sapien
ctgctgggagctacctgagcggggtgtcaggtt

SEQ ID NO: 915433 - DNA, 33 bp, Homo sapien
ggtctttactcacttcaattctgtgaaagtaaa

SEQ ID NO: 915434 - DNA, 33 bp, Homo sapien
ggtctttactcacttcgattctgtgaaagtaaa

SEQ ID NO: 915435 - DNA, 33 bp, Homo sapien
ttcccaactagcattcagaaagtgcattaacat

SEQ ID NO: 915436 - DNA, 33 bp, Homo sapien
ttcccaactagcattctgaaagtgcattaacat

SEQ ID NO: 915437 - DNA, 33 bp, Homo sapien
gaatctttgttacaacagccaataggatatatg

SEQ ID NO: 915438 - DNA, 33 bp, Homo sapien
gaatctttgttacaacggccaataggatatatg

SEQ ID NO: 915439 - DNA, 33 bp, Homo sapien
tacctcttcatatgtaagtattgcattcatctt

SEQ ID NO: 915440 - DNA, 33 bp, Homo sapien
tacctcttcatatgtaggtattgcattcatctt

SEQ ID NO: 915441 - DNA, 33 bp, Homo sapien
tccttgcttaagcctccaattagtacaccatat

SEQ ID NO: 915442 - DNA, 33 bp, Homo sapien
tccttgcttaagcctctaattagtacaccatat

SEQ ID NO: 915443 - DNA, 33 bp, Homo sapien
ggcagaatttcttcgacggtgataagtgacctg

SEQ ID NO: 915444 - DNA, 33 bp, Homo sapien
ggcagaatttcttcgatggtgataagtgacctg

SEQ ID NO: 915445 - DNA, 33 bp, Homo sapien
agcttagcatacaagacctgaaagcacacagct

SEQ ID NO: 915446 - DNA, 33 bp, Homo sapien
agcttagcatacaagatctgaaagcacacagct

SEQ ID NO: 915447 - DNA, 33 bp, Homo sapien
aagagattgcacatggccatttctactttatcc

SEQ ID NO: 915448 - DNA, 33 bp, Homo sapien
aagagattgcacatggtcatttctactttatcc

SEQ ID NO: 915449 - DNA, 33 bp, Homo sapien
caactaggttgtggcacagaatctggagaaggg

SEQ ID NO: 915450 - DNA, 33 bp, Homo sapien
caactaggttgtggcatagaatctggagaaggg

SEQ ID NO: 915451 - DNA, 33 bp, Homo sapien
agttatacaccatgataagttctcatcacaaag

SEQ ID NO: 915452 - DNA, 33 bp, Homo sapien
agttatacaccatgattagttctcatcacaaag

SEQ ID NO: 915453 - DNA, 33 bp, Homo sapien
gagacaagatgacctacagataatcaggaatcc

SEQ ID NO: 915454 - DNA, 33 bp, Homo sapien
gagacaagatgacctatagataatcaggaatcc

SEQ ID NO: 915455 - DNA, 33 bp, Homo sapien
tctactcacttcacagacattcaaatatgacag

SEQ ID NO: 915456 - DNA, 33 bp, Homo sapien
tctactcacttcacaggcattcaaatatgacag

SEQ ID NO: 915457 - DNA, 33 bp, Homo sapien
gtaaacaaaattcaaaacatttgtcatatgtga

SEQ ID NO: 915458 - DNA, 33 bp, Homo sapien
gtaaacaaaattcaaagcatttgtcatatgtga

SEQ ID NO: 915459 - DNA, 33 bp, Homo sapien
acgaactctaaagaaacagcagtaaacaaaatt

SEQ ID NO: 915460 - DNA, 33 bp, Homo sapien
acgaactctaaagaaatagcagtaaacaaaatt

SEQ ID NO: 915461 - DNA, 33 bp, Homo sapien
ttattactttcttttccctagtgccataagcaa

SEQ ID NO: 915462 - DNA, 33 bp, Homo sapien
ttattactttcttttcgctagtgccataagcaa

SEQ ID NO: 915463 - DNA, 33 bp, Homo sapien
aaaactcattcaatgacggctcgtattagtgat

SEQ ID NO: 915464 - DNA, 33 bp, Homo sapien
aaaactcattcaatgatggctcgtattagtgat

SEQ ID NO: 915465 - DNA, 33 bp, Homo sapien
ggattacgagcgcctacctcaggatagctgagg

SEQ ID NO: 915466 - DNA, 33 bp, Homo sapien
ggattacgagcgcctatctcaggatagctgagg

SEQ ID NO: 915467 - DNA, 33 bp, Homo sapien
gcactgagagggcttaccagagtggaaggttgg

SEQ ID NO: 915468 - DNA, 33 bp, Homo sapien
gcactgagagggcttagcagagtggaaggttgg

SEQ ID NO: 915469 - DNA, 33 bp, Homo sapien
ttaagatggctgttaacgaaaagataagagata

SEQ ID NO: 915470 - DNA, 33 bp, Homo sapien
ttaagatggctgttaatgaaaagataagagata

SEQ ID NO: 915471 - DNA, 33 bp, Homo sapien
tttgtagacaggtgaacggataacaaaattaca

SEQ ID NO: 915472 - DNA, 33 bp, Homo sapien
tttgtagacaggtgaatggataacaaaattaca

SEQ ID NO: 915473 - DNA, 33 bp, Homo sapien
aacaaatgcctagaaaatattggagaattagaa

SEQ ID NO: 915474 - DNA, 33 bp, Homo sapien
aacaaatgcctagaaactattggagaattagaa

SEQ ID NO: 915475 - DNA, 33 bp, Homo sapien
cagctccaatcacaatcaattttaaaaagtgaa

SEQ ID NO: 915476 - DNA, 33 bp, Homo sapien
cagctccaatcacaatgaattttaaaaagtgaa

SEQ ID NO: 915477 - DNA, 33 bp, Homo sapien
tcaaaaaaatgagggcagcatattgccaggatt

SEQ ID NO: 915478 - DNA, 33 bp, Homo sapien
tcaaaaaaatgagggcggcatattgccaggatt

SEQ ID NO: 915479 - DNA, 33 bp, Homo sapien
gatgtttgcctttgccaataatataattttgtc

SEQ ID NO: 915480 - DNA, 33 bp, Homo sapien
gatgtttgcctttgccgataatataattttgtc

SEQ ID NO: 915481 - DNA, 33 bp, Homo sapien
aattatcactgacattaaagatcacttgaatct

SEQ ID NO: 915482 - DNA, 33 bp, Homo sapien
aattatcactgacattgaagatcacttgaatct

SEQ ID NO: 915483 - DNA, 33 bp, Homo sapien
gccgagtgtctttgcaatattggttaatcatct

SEQ ID NO: 915484 - DNA, 33 bp, Homo sapien
gccgagtgtctttgcagtattggttaatcatct

SEQ ID NO: 915485 - DNA, 33 bp, Homo sapien
cagttgttggtgtggaataattcttgaataaac

SEQ ID NO: 915486 - DNA, 33 bp, Homo sapien
cagttgttggtgtggagtaattcttgaataaac

SEQ ID NO: 915487 - DNA, 33 bp, Homo sapien
gagccaatgatatttaacaacttcattatgtca

SEQ ID NO: 915488 - DNA, 33 bp, Homo sapien
gagccaatgatatttaccaacttcattatgtca

SEQ ID NO: 915489 - DNA, 33 bp, Homo sapien
tctgtgagaatctcaacttataacacattacca

SEQ ID NO: 915490 - DNA, 33 bp, Homo sapien
tctgtgagaatctcaagttataacacattacca

SEQ ID NO: 915491 - DNA, 33 bp, Homo sapien
atgaaggggtttcccaagtatctctgcaccgct

SEQ ID NO: 915492 - DNA, 33 bp, Homo sapien
atgaaggggtttcccaggtatctctgcaccgct

SEQ ID NO: 915493 - DNA, 33 bp, Homo sapien
catcctaaaaacctcacggatgaagatttcatc

SEQ ID NO: 915494 - DNA, 33 bp, Homo sapien
catcctaaaaacctcatggatgaagatttcatc

SEQ ID NO: 915495 - DNA, 33 bp, Homo sapien
taaatctctggagacaacatgggcccgccaggc

SEQ ID NO: 915496 - DNA, 33 bp, Homo sapien
taaatctctggagacaccatgggcccgccaggc

SEQ ID NO: 915497 - DNA, 33 bp, Homo sapien
aatatattgtctttccaaaacagcactggcagg

SEQ ID NO: 915498 - DNA, 33 bp, Homo sapien
aatatattgtctttccgaaacagcactggcagg

SEQ ID NO: 915499 - DNA, 33 bp, Homo sapien
acttgtctgaatatcactgacgtcattttatga

SEQ ID NO: 915500 - DNA, 33 bp, Homo sapien
acttgtctgaatatcattgacgtcattttatga

SEQ ID NO: 915501 - DNA, 33 bp, Homo sapien
gcaccctacccacttacgtgcttataaagtcag

SEQ ID NO: 915502 - DNA, 33 bp, Homo sapien
gcaccctacccacttatgtgcttataaagtcag

SEQ ID NO: 915503 - DNA, 33 bp, Homo sapien
tagagaagattagccccgaatttacatctttgg

SEQ ID NO: 915504 - DNA, 33 bp, Homo sapien
tagagaagattagccctgaatttacatctttgg

SEQ ID NO: 915505 - DNA, 33 bp, Homo sapien
aacctgttttcttgcaccattttttatcataag

SEQ ID NO: 915506 - DNA, 33 bp, Homo sapien
aacctgttttcttgcatcattttttatcataag

SEQ ID NO: 915507 - DNA, 33 bp, Homo sapien
tcattgaattggattaaattgtctcctccattg

SEQ ID NO: 915508 - DNA, 33 bp, Homo sapien
tcattgaattggattacattgtctcctccattg

SEQ ID NO: 915509 - DNA, 33 bp, Homo sapien
atgccaaaaaggataacaaatgtagtagcacat

SEQ ID NO: 915510 - DNA, 33 bp, Homo sapien
atgccaaaaaggataagaaatgtagtagcacat

SEQ ID NO: 915511 - DNA, 33 bp, Homo sapien
ttcatgtattgattaaaaagtcacagagtctgt

SEQ ID NO: 915512 - DNA, 33 bp, Homo sapien
ttcatgtattgattaagaagtcacagagtctgt

SEQ ID NO: 915513 - DNA, 33 bp, Homo sapien
gcactgactacaagtacacaaagatagctgtgg

SEQ ID NO: 915514 - DNA, 33 bp, Homo sapien
gcactgactacaagtatacaaagatagctgtgg

SEQ ID NO: 915515 - DNA, 33 bp, Homo sapien
caaaaggcccattaaaaacagtctgtatatcag

SEQ ID NO: 915516 - DNA, 33 bp, Homo sapien
caaaaggcccattaaacacagtctgtatatcag

SEQ ID NO: 915517 - DNA, 33 bp, Homo sapien
tctatgcgaggcactacatatggtactagcaac

SEQ ID NO: 915518 - DNA, 33 bp, Homo sapien
tctatgcgaggcactatatatggtactagcaac

SEQ ID NO: 915519 - DNA, 33 bp, Homo sapien
gaaatagggcttaatgaatgtactatgtaaata

SEQ ID NO: 915520 - DNA, 33 bp, Homo sapien
gaaatagggcttaatggatgtactatgtaaata

SEQ ID NO: 915521 - DNA, 33 bp, Homo sapien
gcattaattcaaataccgcagggagcaatagct

SEQ ID NO: 915522 - DNA, 33 bp, Homo sapien
gcattaattcaaatactgcagggagcaatagct

SEQ ID NO: 915523 - DNA, 33 bp, Homo sapien
ggccagtgggagaaaactaaaatgatgtgtttc

SEQ ID NO: 915524 - DNA, 33 bp, Homo sapien
ggccagtgggagaaaattaaaatgatgtgtttc

SEQ ID NO: 915525 - DNA, 33 bp, Homo sapien
ctccatttctattatcactcaattctagacaca

SEQ ID NO: 915526 - DNA, 33 bp, Homo sapien
ctccatttctattatctctcaattctagacaca

SEQ ID NO: 915527 - DNA, 33 bp, Homo sapien
gcataaagatcaaggaaaaaataccaggcatca

SEQ ID NO: 915528 - DNA, 33 bp, Homo sapien
gcataaagatcaaggagaaaataccaggcatca

SEQ ID NO: 915529 - DNA, 33 bp, Homo sapien
tcatgcgttttatactcaaagtctgccctgtag

SEQ ID NO: 915530 - DNA, 33 bp, Homo sapien
tcatgcgttttatactgaaagtctgccctgtag

SEQ ID NO: 915531 - DNA, 33 bp, Homo sapien
tatgagtacacattgacaatatagaattacaaa

SEQ ID NO: 915532 - DNA, 33 bp, Homo sapien
tatgagtacacattgataatatagaattacaaa

SEQ ID NO: 915533 - DNA, 33 bp, Homo sapien
gagtgtgatcctagagacactgatatttaagaa

SEQ ID NO: 915534 - DNA, 33 bp, Homo sapien
gagtgtgatcctagagtcactgatatttaagaa

SEQ ID NO: 915535 - DNA, 33 bp, Homo sapien
gaacagtggcccatgtcaaatgttacacagtaa

SEQ ID NO: 915536 - DNA, 33 bp, Homo sapien
gaacagtggcccatgtgaaatgttacacagtaa

SEQ ID NO: 915537 - DNA, 33 bp, Homo sapien
tataggagacccatcacggtaccaacgaaatga

SEQ ID NO: 915538 - DNA, 33 bp, Homo sapien
tataggagacccatcatggtaccaacgaaatga

SEQ ID NO: 915539 - DNA, 33 bp, Homo sapien
tgactatgactacacactattactttttcttct

SEQ ID NO: 915540 - DNA, 33 bp, Homo sapien
tgactatgactacacattattactttttcttct

SEQ ID NO: 915541 - DNA, 33 bp, Homo sapien
tatttctagaggcccacgggtatttacactttt

SEQ ID NO: 915542 - DNA, 33 bp, Homo sapien
tatttctagaggcccatgggtatttacactttt

SEQ ID NO: 915543 - DNA, 33 bp, Homo sapien
acagcacgttactgtacaaaattctgtaggtaa

SEQ ID NO: 915544 - DNA, 33 bp, Homo sapien
acagcacgttactgtataaaattctgtaggtaa

SEQ ID NO: 915545 - DNA, 33 bp, Homo sapien
tgatgcttattgcaccagaagtaacacaagact

SEQ ID NO: 915546 - DNA, 33 bp, Homo sapien
tgatgcttattgcaccggaagtaacacaagact

SEQ ID NO: 915547 - DNA, 33 bp, Homo sapien
taaatgatgcagttgaagtaaccatggactagt

SEQ ID NO: 915548 - DNA, 33 bp, Homo sapien
taaatgatgcagttgaggtaaccatggactagt

SEQ ID NO: 915549 - DNA, 33 bp, Homo sapien
attatggtagaagcaaaatgattgtgtttcttt

SEQ ID NO: 915550 - DNA, 33 bp, Homo sapien
attatggtagaagcaagatgattgtgtttcttt

SEQ ID NO: 915551 - DNA, 33 bp, Homo sapien
gagaaggggttcaaggaatatgggtagaagcaa

SEQ ID NO: 915552 - DNA, 33 bp, Homo sapien
gagaaggggttcaagggatatgggtagaagcaa

SEQ ID NO: 915553 - DNA, 33 bp, Homo sapien
ccacagtctcagtgacaataagatatttggatc

SEQ ID NO: 915554 - DNA, 33 bp, Homo sapien
ccacagtctcagtgacgataagatatttggatc

SEQ ID NO: 915555 - DNA, 33 bp, Homo sapien
tagtaaccataaagaacattttcctggagttat

SEQ ID NO: 915556 - DNA, 33 bp, Homo sapien
tagtaaccataaagaagattttcctggagttat

SEQ ID NO: 915557 - DNA, 33 bp, Homo sapien
ggtgaccaacaggtaccggttctctttgagatt

SEQ ID NO: 915558 - DNA, 33 bp, Homo sapien
ggtgaccaacaggtactggttctctttgagatt

SEQ ID NO: 915559 - DNA, 33 bp, Homo sapien
ctatctgtctgcaataactttctcaaatatgtc

SEQ ID NO: 915560 - DNA, 33 bp, Homo sapien
ctatctgtctgcaatagctttctcaaatatgtc

SEQ ID NO: 915561 - DNA, 33 bp, Homo sapien
gttccattggcagagacgggcttcaacatctcc

SEQ ID NO: 915562 - DNA, 33 bp, Homo sapien
gttccattggcagagaggggcttcaacatctcc

SEQ ID NO: 915563 - DNA, 33 bp, Homo sapien
aatgcattcagggaaacctagtaaataactgct

SEQ ID NO: 915564 - DNA, 33 bp, Homo sapien
aatgcattcagggaaatctagtaaataactgct

SEQ ID NO: 915565 - DNA, 33 bp, Homo sapien
gatgtcaaagtagtgacaggtttaaaactgtgt

SEQ ID NO: 915566 - DNA, 33 bp, Homo sapien
gatgtcaaagtagtgataggtttaaaactgtgt

SEQ ID NO: 915567 - DNA, 33 bp, Homo sapien
gattcccccaagttaacgtaatcatccattaat

SEQ ID NO: 915568 - DNA, 33 bp, Homo sapien
gattcccccaagttaatgtaatcatccattaat

SEQ ID NO: 915569 - DNA, 33 bp, Homo sapien
gtatttttcttgtacccgaaatgtggtggatat

SEQ ID NO: 915570 - DNA, 33 bp, Homo sapien
gtatttttcttgtacctgaaatgtggtggatat

SEQ ID NO: 915571 - DNA, 33 bp, Homo sapien
gtatcttctcaatttcaagccacctgccaaatt

SEQ ID NO: 915572 - DNA, 33 bp, Homo sapien
gtatcttctcaatttccagccacctgccaaatt

SEQ ID NO: 915573 - DNA, 33 bp, Homo sapien
tctctgcaaccagtaacgagaaactccaaagga

SEQ ID NO: 915574 - DNA, 33 bp, Homo sapien
tctctgcaaccagtaatgagaaactccaaagga

SEQ ID NO: 915575 - DNA, 33 bp, Homo sapien
attggtttctgagaacaagcatattggtatcaa

SEQ ID NO: 915576 - DNA, 33 bp, Homo sapien
attggtttctgagaacgagcatattggtatcaa

SEQ ID NO: 915577 - DNA, 33 bp, Homo sapien
gacaaagcatattttacaactttgagtcctata

SEQ ID NO: 915578 - DNA, 33 bp, Homo sapien
gacaaagcatattttagaactttgagtcctata

SEQ ID NO: 915579 - DNA, 33 bp, Homo sapien
ttcttttctcagaaagcattacaagcatatttg

SEQ ID NO: 915580 - DNA, 33 bp, Homo sapien
ttcttttctcagaaagtattacaagcatatttg

SEQ ID NO: 915581 - DNA, 33 bp, Homo sapien
ccttggccaatgattccctaagtcatgcagttt

SEQ ID NO: 915582 - DNA, 33 bp, Homo sapien
ccttggccaatgattctctaagtcatgcagttt

SEQ ID NO: 915583 - DNA, 33 bp, Homo sapien
gaaaaatattttttccaaagactaaaggcatta

SEQ ID NO: 915584 - DNA, 33 bp, Homo sapien
gaaaaatattttttccgaagactaaaggcatta

SEQ ID NO: 915585 - DNA, 33 bp, Homo sapien
aaggtagaagttgatacccgagatttaccaata

SEQ ID NO: 915586 - DNA, 33 bp, Homo sapien
aaggtagaagttgatatccgagatttaccaata

SEQ ID NO: 915587 - DNA, 33 bp, Homo sapien
tggaaagacagagaaaataagtacaatatatta

SEQ ID NO: 915588 - DNA, 33 bp, Homo sapien
tggaaagacagagaaagtaagtacaatatatta

SEQ ID NO: 915589 - DNA, 33 bp, Homo sapien
agtcccatatcaacgactactgcagagacttag

SEQ ID NO: 915590 - DNA, 33 bp, Homo sapien
agtcccatatcaacgattactgcagagacttag

SEQ ID NO: 915591 - DNA, 33 bp, Homo sapien
ttgcactgaattatacagaagggcacttacaca

SEQ ID NO: 915592 - DNA, 33 bp, Homo sapien
ttgcactgaattatacggaagggcacttacaca

SEQ ID NO: 915593 - DNA, 33 bp, Homo sapien
atatgactgtttcaaaatatgtgtatcctctcc

SEQ ID NO: 915594 - DNA, 33 bp, Homo sapien
atatgactgtttcaaactatgtgtatcctctcc

SEQ ID NO: 915595 - DNA, 33 bp, Homo sapien
atttaagaagttgagaaatcaaaaattatgagc

SEQ ID NO: 915596 - DNA, 33 bp, Homo sapien
atttaagaagttgagagatcaaaaattatgagc

SEQ ID NO: 915597 - DNA, 33 bp, Homo sapien
atagacacactgcacaacatacacgatagagaa

SEQ ID NO: 915598 - DNA, 33 bp, Homo sapien
atagacacactgcacaccatacacgatagagaa

SEQ ID NO: 915599 - DNA, 33 bp, Homo sapien
aggttttcaagcctcaacttttgccttctgtgc

SEQ ID NO: 915600 - DNA, 33 bp, Homo sapien
aggttttcaagcctcaccttttgccttctgtgc

SEQ ID NO: 915601 - DNA, 33 bp, Homo sapien
ctatttggtgacttgactatgcattatcttttt

SEQ ID NO: 915602 - DNA, 33 bp, Homo sapien
ctatttggtgacttgattatgcattatcttttt

SEQ ID NO: 915603 - DNA, 33 bp, Homo sapien
cctacctcttcttgaactgactcaaagtcacga

SEQ ID NO: 915604 - DNA, 33 bp, Homo sapien
cctacctcttcttgaattgactcaaagtcacga

SEQ ID NO: 915605 - DNA, 33 bp, Homo sapien
tgagtaatcttgccaactgtatggaagtcaaat

SEQ ID NO: 915606 - DNA, 33 bp, Homo sapien
tgagtaatcttgccaattgtatggaagtcaaat

SEQ ID NO: 915607 - DNA, 33 bp, Homo sapien
attttaacagtaattgaaaacatcagatttagt

SEQ ID NO: 915608 - DNA, 33 bp, Homo sapien
attttaacagtaattgtaaacatcagatttagt

SEQ ID NO: 915609 - DNA, 33 bp, Homo sapien
tgtgtgccctgttctacgctggaataaaacctc

SEQ ID NO: 915610 - DNA, 33 bp, Homo sapien
tgtgtgccctgttctatgctggaataaaacctc

SEQ ID NO: 915611 - DNA, 33 bp, Homo sapien
gtcttatgtgactggcacaggaggaataaagtg

SEQ ID NO: 915612 - DNA, 33 bp, Homo sapien
gtcttatgtgactggcgcaggaggaataaagtg

SEQ ID NO: 915613 - DNA, 33 bp, Homo sapien
ttattacttgtctggaagcaaaacataaacaat

SEQ ID NO: 915614 - DNA, 33 bp, Homo sapien
ttattacttgtctggaggcaaaacataaacaat

SEQ ID NO: 915615 - DNA, 33 bp, Homo sapien
caacagcagcgagtacaacgtcatcaacaagaa

SEQ ID NO: 915616 - DNA, 33 bp, Homo sapien
caacagcagcgagtaccacgtcatcaacaagaa

SEQ ID NO: 915617 - DNA, 33 bp, Homo sapien
cataaagcccatttcaaatgctattttcactgc

SEQ ID NO: 915618 - DNA, 33 bp, Homo sapien
cataaagcccatttcagatgctattttcactgc

SEQ ID NO: 915619 - DNA, 33 bp, Homo sapien
ttgactcaggaagagaagagattaacttgactc

SEQ ID NO: 915620 - DNA, 33 bp, Homo sapien
ttgactcaggaagagaggagattaacttgactc

SEQ ID NO: 915621 - DNA, 33 bp, Homo sapien
ggagactaagagattaccacagaatgactattt

SEQ ID NO: 915622 - DNA, 33 bp, Homo sapien
ggagactaagagattatcacagaatgactattt

SEQ ID NO: 915623 - DNA, 33 bp, Homo sapien
ttaaggataaggcacacatataattgatacagg

SEQ ID NO: 915624 - DNA, 33 bp, Homo sapien
ttaaggataaggcacatatataattgatacagg

SEQ ID NO: 915625 - DNA, 33 bp, Homo sapien
taagtcaaggttttccaatacattccagtaaaa

SEQ ID NO: 915626 - DNA, 33 bp, Homo sapien
taagtcaaggttttccgatacattccagtaaaa

SEQ ID NO: 915627 - DNA, 33 bp, Homo sapien
cagttctaaaattgccaaaaatttgaatttatc

SEQ ID NO: 915628 - DNA, 33 bp, Homo sapien
cagttctaaaattgccgaaaatttgaatttatc

SEQ ID NO: 915629 - DNA, 33 bp, Homo sapien
caaatctcccaggtatcagaaaatattctattt

SEQ ID NO: 915630 - DNA, 33 bp, Homo sapien
caaatctcccaggtatgagaaaatattctattt

SEQ ID NO: 915631 - DNA, 33 bp, Homo sapien
aaaacttagtatctacacatagtaaatcacata

SEQ ID NO: 915632 - DNA, 33 bp, Homo sapien
aaaacttagtatctacgcatagtaaatcacata

SEQ ID NO: 915633 - DNA, 33 bp, Homo sapien
ggtcaatttgaggcaacaatgttaaatagtgta

SEQ ID NO: 915634 - DNA, 33 bp, Homo sapien
ggtcaatttgaggcaagaatgttaaatagtgta

SEQ ID NO: 915635 - DNA, 33 bp, Homo sapien
tttccagcaaacaccaagcataacaacatcata

SEQ ID NO: 915636 - DNA, 33 bp, Homo sapien
tttccagcaaacaccaggcataacaacatcata

SEQ ID NO: 915637 - DNA, 33 bp, Homo sapien
ccatccaaaaacctaaatcaagccttctaattg

SEQ ID NO: 915638 - DNA, 33 bp, Homo sapien
ccatccaaaaacctaagtcaagccttctaattg

SEQ ID NO: 915639 - DNA, 33 bp, Homo sapien
tcttggtggctaaaaacgataaaagtatttatg

SEQ ID NO: 915640 - DNA, 33 bp, Homo sapien
tcttggtggctaaaaatgataaaagtatttatg

SEQ ID NO: 915641 - DNA, 33 bp, Homo sapien
ttatcctcaagcagcaagggattttttttgcag

SEQ ID NO: 915642 - DNA, 33 bp, Homo sapien
ttatcctcaagcagcaggggattttttttgcag

SEQ ID NO: 915643 - DNA, 33 bp, Homo sapien
agatccttgaggattcaccacctcgtctttcac

SEQ ID NO: 915644 - DNA, 33 bp, Homo sapien
agatccttgaggattcgccacctcgtctttcac

SEQ ID NO: 915645 - DNA, 33 bp, Homo sapien; identical to SEQ ID NO: 915643

SEQ ID NO: 915646 - DNA, 33 bp, Homo sapien; identical to SEQ ID NO: 915644

SEQ ID NO: 915647 - DNA, 33 bp, Homo sapien
gactgagcagtctgacactttttgaggcctggt

SEQ ID NO: 915648 - DNA, 33 bp, Homo sapien
gactgagcagtctgaccctttttgaggcctggt

SEQ ID NO: 915649 - DNA, 33 bp, Homo sapien
ggcctgctcatttgcaatcacagaatcctctgg

SEQ ID NO: 915650 - DNA, 33 bp, Homo sapien
ggcctgctcatttgcagtcacagaatcctctgg

SEQ ID NO: 915651 - DNA, 33 bp, Homo sapien
acatcttaactgacaccgtctaccagtcactcg

SEQ ID NO: 915652 - DNA, 33 bp, Homo sapien
acatcttaactgacactgtctaccagtcactcg

SEQ ID NO: 915653 - DNA, 33 bp, Homo sapien
catataaatcagccaagtaatatgctaagtcac

SEQ ID NO: 915654 - DNA, 33 bp, Homo sapien
catataaatcagccaattaatatgctaagtcac

SEQ ID NO: 915655 - DNA, 33 bp, Homo sapien
gttgagtagccgtttacgatgcaaaatcatcaa

SEQ ID NO: 915656 - DNA, 33 bp, Homo sapien
gttgagtagccgtttatgatgcaaaatcatcaa

SEQ ID NO: 915657 - DNA, 33 bp, Homo sapien
cattagactgaagtaaatccactagcctttgaa

SEQ ID NO: 915658 - DNA, 33 bp, Homo sapien
cattagactgaagtaagtccactagcctttgaa

SEQ ID NO: 915659 - DNA, 33 bp, Homo sapien
gaagttaagcctacccagaactgcttaaccgac

SEQ ID NO: 915660 - DNA, 33 bp, Homo sapien
gaagttaagcctacccggaactgcttaaccgac

SEQ ID NO: 915661 - DNA, 33 bp, Homo sapien
tgttaacaatctgtgccctgtccttgaatctca

SEQ ID NO: 915662 - DNA, 33 bp, Homo sapien
tgttaacaatctgtgctctgtccttgaatctca

SEQ ID NO: 915663 - DNA, 33 bp, Homo sapien
tgaacaaatgtggtagaattatttagcatttct

SEQ ID NO: 915664 - DNA, 33 bp, Homo sapien
tgaacaaatgtggtaggattatttagcatttct

SEQ ID NO: 915665 - DNA, 33 bp, Homo sapien
agatccactattataccggaatcactttgaaat

SEQ ID NO: 915666 - DNA, 33 bp, Homo sapien
agatccactattatactggaatcactttgaaat

SEQ ID NO: 915667 - DNA, 33 bp, Homo sapien
ccagtctgaatgcacaagggtatactgaaacct

SEQ ID NO: 915668 - DNA, 33 bp, Homo sapien
ccagtctgaatgcacacgggtatactgaaacct

SEQ ID NO: 915669 - DNA, 33 bp, Homo sapien
gttcaactgtggtttaactactgcatacctacc

SEQ ID NO: 915670 - DNA, 33 bp, Homo sapien
gttcaactgtggtttatctactgcatacctacc

SEQ ID NO: 915671 - DNA, 33 bp, Homo sapien
gtagacaaacgccacaatctgattttgtctcag

SEQ ID NO: 915672 - DNA, 33 bp, Homo sapien
gtagacaaacgccacagtctgattttgtctcag

SEQ ID NO: 915673 - DNA, 33 bp, Homo sapien
gcaaggcacagcaacactaagaagatgtataga

SEQ ID NO: 915674 - DNA, 33 bp, Homo sapien
gcaaggcacagcaacattaagaagatgtataga

SEQ ID NO: 915675 - DNA, 33 bp, Homo sapien
ttaactaccattatacagatctgcctccagagt

SEQ ID NO: 915676 - DNA, 33 bp, Homo sapien
ttaactaccattatactgatctgcctccagagt

SEQ ID NO: 915677 - DNA, 33 bp, Homo sapien
atgacttcttgtctaactgatagctggaacagt

SEQ ID NO: 915678 - DNA, 33 bp, Homo sapien
atgacttcttgtctaattgatagctggaacagt

SEQ ID NO: 915679 - DNA, 33 bp, Homo sapien
taaagggacagtatacaatgataaacaatgctt

SEQ ID NO: 915680 - DNA, 33 bp, Homo sapien
taaagggacagtatactatgataaacaatgctt

SEQ ID NO: 915681 - DNA, 33 bp, Homo sapien
ctggttttaacatccaaggataatattttgcaa

SEQ ID NO: 915682 - DNA, 33 bp, Homo sapien
ctggttttaacatccagggataatattttgcaa

SEQ ID NO: 915683 - DNA, 33 bp, Homo sapien
cttttctgccaactccaactcagaattacagag

SEQ ID NO: 915684 - DNA, 33 bp, Homo sapien
cttttctgccaactcccactcagaattacagag

SEQ ID NO: 915685 - DNA, 33 bp, Homo sapien
agcaattctgtgaacaccttaactacaaagaca

SEQ ID NO: 915686 - DNA, 33 bp, Homo sapien
agcaattctgtgaacatcttaactacaaagaca

SEQ ID NO: 915687 - DNA, 33 bp, Homo sapien
aacaagaaatacatagaaatggctgaggtttta

SEQ ID NO: 915688 - DNA, 33 bp, Homo sapien
aacaagaaatacataggaatggctgaggtttta

SEQ ID NO: 915689 - DNA, 33 bp, Homo sapien
atgtgaaaaatatggaacaaaatgtctgttagc

SEQ ID NO: 915690 - DNA, 33 bp, Homo sapien
atgtgaaaaatatggagcaaaatgtctgttagc

SEQ ID NO: 915691 - DNA, 33 bp, Homo sapien
ccaaaagagtccaataagtttcactcatacaaa

SEQ ID NO: 915692 - DNA, 33 bp, Homo sapien
ccaaaagagtccaatatgtttcactcatacaaa

SEQ ID NO: 915693 - DNA, 33 bp, Homo sapien
taattttctcttccacaacttaaagactctact

SEQ ID NO: 915694 - DNA, 33 bp, Homo sapien
taattttctcttccactacttaaagactctact

SEQ ID NO: 915695 - DNA, 33 bp, Homo sapien
aggaggaggtatgtgccaattggttcatgggag

SEQ ID NO: 915696 - DNA, 33 bp, Homo sapien
aggaggaggtatgtgctaattggttcatgggag

SEQ ID NO: 915697 - DNA, 33 bp, Homo sapien
tcattacctgtcacagaatttattattattttt

SEQ ID NO: 915698 - DNA, 33 bp, Homo sapien
tcattacctgtcacagcatttattattattttt

SEQ ID NO: 915699 - DNA, 33 bp, Homo sapien
tccaaatatttccacaactttgcccatccacag

SEQ ID NO: 915700 - DNA, 33 bp, Homo sapien
tccaaatatttccacagctttgcccatccacag

SEQ ID NO: 915701 - DNA, 33 bp, Homo sapien
tctaacatcaagtttcaacagttaataagcatg

SEQ ID NO: 915702 - DNA, 33 bp, Homo sapien
tctaacatcaagtttctacagttaataagcatg

SEQ ID NO: 915703 - DNA, 33 bp, Homo sapien
tgcttttttcgaatcaagagttttattacgaat

SEQ ID NO: 915704 - DNA, 33 bp, Homo sapien
tgcttttttcgaatcacgagttttattacgaat

SEQ ID NO: 915705 - DNA, 33 bp, Homo sapien
gctccatcttaatgaaaggattaatgccattat

SEQ ID NO: 915706 - DNA, 33 bp, Homo sapien
gctccatcttaatgaatggattaatgccattat

SEQ ID NO: 915707 - DNA, 33 bp, Homo sapien
catgtaagaacagagacgaagtaaagagattct

SEQ ID NO: 915708 - DNA, 33 bp, Homo sapien
catgtaagaacagagatgaagtaaagagattct

SEQ ID NO: 915709 - DNA, 33 bp, Homo sapien
gtatgtgttaaaatcaaagtcagccagctgctt

SEQ ID NO: 915710 - DNA, 33 bp, Homo sapien
gtatgtgttaaaatcagagtcagccagctgctt

SEQ ID NO: 915711 - DNA, 33 bp, Homo sapien
ttattgaggagtaaataacacaggtaaatttgg

SEQ ID NO: 915712 - DNA, 33 bp, Homo sapien
ttattgaggagtaaatgacacaggtaaatttgg

SEQ ID NO: 915713 - DNA, 33 bp, Homo sapien
gagtttataagttgtacgtaaacattcttgaac

SEQ ID NO: 915714 - DNA, 33 bp, Homo sapien
gagtttataagttgtatgtaaacattcttgaac

SEQ ID NO: 915715 - DNA, 33 bp, Homo sapien
gtttttaccatattccaacttcccaattcacac

SEQ ID NO: 915716 - DNA, 33 bp, Homo sapien
gtttttaccatattccgacttcccaattcacac

SEQ ID NO: 915717 - DNA, 33 bp, Homo sapien
tcctagtttctcatcactaagtacaatgttagt

SEQ ID NO: 915718 - DNA, 33 bp, Homo sapien
tcctagtttctcatcattaagtacaatgttagt

SEQ ID NO: 915719 - DNA, 33 bp, Homo sapien
tgctgtgctataattccaaaatttgtgtcatat

SEQ ID NO: 915720 - DNA, 33 bp, Homo sapien
tgctgtgctataattctaaaatttgtgtcatat

SEQ ID NO: 915721 - DNA, 33 bp, Homo sapien
cttttcttggacccataagagaattgatgttgc

SEQ ID NO: 915722 - DNA, 33 bp, Homo sapien
cttttcttggacccatgagagaattgatgttgc

SEQ ID NO: 915723 - DNA, 33 bp, Homo sapien
tgcaatagcaacagtgacaaccactatttgaga

SEQ ID NO: 915724 - DNA, 33 bp, Homo sapien
tgcaatagcaacagtggcaaccactatttgaga

SEQ ID NO: 915725 - DNA, 33 bp, Homo sapien
ttaggatggtttgctccgacgaacgaaagaaaa

SEQ ID NO: 915726 - DNA, 33 bp, Homo sapien
ttaggatggtttgctctgacgaacgaaagaaaa

SEQ ID NO: 915727 - DNA, 33 bp, Homo sapien
caaatcaatggcttcacaccaggtaccaggaga

SEQ ID NO: 915728 - DNA, 33 bp, Homo sapien
caaatcaatggcttcataccaggtaccaggaga

SEQ ID NO: 915729 - DNA, 33 bp, Homo sapien
gctccagaacaagagaaggttctgcaacaggtc

SEQ ID NO: 915730 - DNA, 33 bp, Homo sapien
gctccagaacaagagacggttctgcaacaggtc

SEQ ID NO: 915731 - DNA, 33 bp, Homo sapien
tagtctgagtactatcaaaattatctgatgcag

SEQ ID NO: 915732 - DNA, 33 bp, Homo sapien
tagtctgagtactatccaaattatctgatgcag

SEQ ID NO: 915733 - DNA, 33 bp, Homo sapien
ctcaggaggaataaaacaactcagcaaaagagg

SEQ ID NO: 915734 - DNA, 33 bp, Homo sapien
ctcaggaggaataaaagaactcagcaaaagagg

SEQ ID NO: 915735 - DNA, 33 bp, Homo sapien
aaattgatcattaatgacatgactagagcaagt

SEQ ID NO: 915736 - DNA, 33 bp, Homo sapien
aaattgatcattaatgtcatgactagagcaagt

SEQ ID NO: 915737 - DNA, 33 bp, Homo sapien
atacatatggaagtaccgcttaaagcaaaaact

SEQ ID NO: 915738 - DNA, 33 bp, Homo sapien
atacatatggaagtactgcttaaagcaaaaact

SEQ ID NO: 915739 - DNA, 33 bp, Homo sapien
gcagagcaaatcttcccacttcttttaaacagc

SEQ ID NO: 915740 - DNA, 33 bp, Homo sapien
gcagagcaaatcttcctacttcttttaaacagc

SEQ ID NO: 915741 - DNA, 33 bp, Homo sapien
agaattttttcacacactaaggcgttcttcctc

SEQ ID NO: 915742 - DNA, 33 bp, Homo sapien
agaattttttcacacattaaggcgttcttcctc

SEQ ID NO: 915743 - DNA, 33 bp, Homo sapien
ggacctgtttggcataccagggtgaaccatatt

SEQ ID NO: 915744 - DNA, 33 bp, Homo sapien
ggacctgtttggcatagcagggtgaaccatatt

SEQ ID NO: 915745 - DNA, 33 bp, Homo sapien
ggctgccattatctaagatgaagctggagagac

SEQ ID NO: 915746 - DNA, 33 bp, Homo sapien
ggctgccattatctaatatgaagctggagagac

SEQ ID NO: 915747 - DNA, 33 bp, Homo sapien
tccctcaaacagtctgcaatcagtaagcctgca

SEQ ID NO: 915748 - DNA, 33 bp, Homo sapien
tccctcaaacagtctggaatcagtaagcctgca

SEQ ID NO: 915749 - DNA, 33 bp, Homo sapien
actttgatgaataagacagttaatgtgattaaa

SEQ ID NO: 915750 - DNA, 33 bp, Homo sapien
actttgatgaataagatagttaatgtgattaaa

SEQ ID NO: 915751 - DNA, 33 bp, Homo sapien
atgtcttttctgataaacactttaccaaacatt

SEQ ID NO: 915752 - DNA, 33 bp, Homo sapien
atgtcttttctgataatcactttaccaaacatt

SEQ ID NO: 915753 - DNA, 33 bp, Homo sapien
aggaaaagacacagaaactattatatgatagac

SEQ ID NO: 915754 - DNA, 33 bp, Homo sapien
aggaaaagacacagaacctattatatgatagac

SEQ ID NO: 915755 - DNA, 33 bp, Homo sapien
tgaggtttcttttatcccagggctctcttgatt

SEQ ID NO: 915756 - DNA, 33 bp, Homo sapien
tgaggtttcttttatctcagggctctcttgatt

SEQ ID NO: 915757 - DNA, 33 bp, Homo sapien
ttattattgtatcaaaatcaccaaataagctct

SEQ ID NO: 915758 - DNA, 33 bp, Homo sapien
ttattattgtatcaaattcaccaaataagctct

SEQ ID NO: 915759 - DNA, 33 bp, Homo sapien
cacaacagatgcttaacaaataccttaaaaata

SEQ ID NO: 915760 - DNA, 33 bp, Homo sapien
cacaacagatgcttaataaataccttaaaaata

SEQ ID NO: 915761 - DNA, 33 bp, Homo sapien
tgcgaagtctaaaagacgttgaaagtcagggaa

SEQ ID NO: 915762 - DNA, 33 bp, Homo sapien
tgcgaagtctaaaagatgttgaaagtcagggaa

SEQ ID NO: 915763 - DNA, 33 bp, Homo sapien
aaagcctctgctcttcaagatgaaccacatacg

SEQ ID NO: 915764 - DNA, 33 bp, Homo sapien
aaagcctctgctcttcgagatgaaccacatacg

SEQ ID NO: 915765 - DNA, 33 bp, Homo sapien
gggtgaatcaggagaacgtttctccaatcaacc

SEQ ID NO: 915766 - DNA, 33 bp, Homo sapien
gggtgaatcaggagaatgtttctccaatcaacc

SEQ ID NO: 915767 - DNA, 33 bp, Homo sapien
gaaaggtaaataggcaatccaggaatgaggtag

SEQ ID NO: 915768 - DNA, 33 bp, Homo sapien
gaaaggtaaataggcagtccaggaatgaggtag

SEQ ID NO: 915769 - DNA, 33 bp, Homo sapien
tatccttgaagaaaaccgtgatgtctctattaa

SEQ ID NO: 915770 - DNA, 33 bp, Homo sapien
tatccttgaagaaaactgtgatgtctctattaa

SEQ ID NO: 915771 - DNA, 33 bp, Homo sapien
ggggattaaatttccagcatatgaatctcgaag

SEQ ID NO: 915772 - DNA, 33 bp, Homo sapien
ggggattaaatttccatcatatgaatctcgaag

SEQ ID NO: 915773 - DNA, 33 bp, Homo sapien
atcaatttggttctaacatcacttaagatttta

SEQ ID NO: 915774 - DNA, 33 bp, Homo sapien
atcaatttggttctaatatcacttaagatttta

SEQ ID NO: 915775 - DNA, 33 bp, Homo sapien
gtgttcattgtaggaacagaccttcactaatag

SEQ ID NO: 915776 - DNA, 33 bp, Homo sapien
gtgttcattgtaggaatagaccttcactaatag

SEQ ID NO: 915777 - DNA, 33 bp, Homo sapien
ttatacccaagaggcactatacacaagttcttt

SEQ ID NO: 915778 - DNA, 33 bp, Homo sapien
ttatacccaagaggcattatacacaagttcttt

SEQ ID NO: 915779 - DNA, 33 bp, Homo sapien
cctgggaatatagcaccatttgtagcttacaaa

SEQ ID NO: 915780 - DNA, 33 bp, Homo sapien
cctgggaatatagcacgatttgtagcttacaaa

SEQ ID NO: 915781 - DNA, 33 bp, Homo sapien
aggagataccacagataagagtgagaagagatg

SEQ ID NO: 915782 - DNA, 33 bp, Homo sapien
aggagataccacagatcagagtgagaagagatg

SEQ ID NO: 915783 - DNA, 33 bp, Homo sapien
ttgctcaaattaagtgaaagtcataattttagc

SEQ ID NO: 915784 - DNA, 33 bp, Homo sapien
ttgctcaaattaagtgtaagtcataattttagc

SEQ ID NO: 915785 - DNA, 33 bp, Homo sapien
gaatggctccttttcaataatatctgtagtaac

SEQ ID NO: 915786 - DNA, 33 bp, Homo sapien
gaatggctccttttcagtaatatctgtagtaac

SEQ ID NO: 915787 - DNA, 33 bp, Homo sapien
gcaagctttttgaaagcagataagttagttctc

SEQ ID NO: 915788 - DNA, 33 bp, Homo sapien
gcaagctttttgaaagtagataagttagttctc

SEQ ID NO: 915789 - DNA, 33 bp, Homo sapien
gttcttgctcgttttacactttaactactgtgg

SEQ ID NO: 915790 - DNA, 33 bp, Homo sapien
gttcttgctcgttttatactttaactactgtgg

SEQ ID NO: 915791 - DNA, 33 bp, Homo sapien
aaaatatgatgcactgaaactactgacaaagca

SEQ ID NO: 915792 - DNA, 33 bp, Homo sapien
aaaatatgatgcactggaactactgacaaagca

SEQ ID NO: 915793 - DNA, 33 bp, Homo sapien
agatgactgaaatgaacgtcttcttttttctac

SEQ ID NO: 915794 - DNA, 33 bp, Homo sapien
agatgactgaaatgaatgtcttcttttttctac

SEQ ID NO: 915795 - DNA, 33 bp, Homo sapien
tgtgtaggattgtggaacggttgaccaagtcag

SEQ ID NO: 915796 - DNA, 33 bp, Homo sapien
tgtgtaggattgtggagcggttgaccaagtcag

SEQ ID NO: 915797 - DNA, 33 bp, Homo sapien
actaagacctgggtgtaaaataattagctgatt

SEQ ID NO: 915798 - DNA, 33 bp, Homo sapien
actaagacctgggtgtcaaataattagctgatt

SEQ ID NO: 915799 - DNA, 33 bp, Homo sapien
tggtggcttttcaaaaatgaggctttgatgctt

SEQ ID NO: 915800 - DNA, 33 bp, Homo sapien
tggtggcttttcaaaattgaggctttgatgctt

SEQ ID NO: 915801 - DNA, 33 bp, Homo sapien
tgcctcaactgcctccacgcaaacctttttatc

SEQ ID NO: 915802 - DNA, 33 bp, Homo sapien
tgcctcaactgcctccgcgcaaacctttttatc

SEQ ID NO: 915803 - DNA, 33 bp, Homo sapien
aacgaataatgaaaaccgcctgtgaattttatt

SEQ ID NO: 915804 - DNA, 33 bp, Homo sapien
aacgaataatgaaaactgcctgtgaattttatt

SEQ ID NO: 915805 - DNA, 33 bp, Homo sapien
gatatttatccagagaagagctaaggttaattg

SEQ ID NO: 915806 - DNA, 33 bp, Homo sapien
gatatttatccagagatgagctaaggttaattg

SEQ ID NO: 915807 - DNA, 33 bp, Homo sapien
cattctcatttgcacactaaaaaatcaagacta

SEQ ID NO: 915808 - DNA, 33 bp, Homo sapien
cattctcatttgcacattaaaaaatcaagacta

SEQ ID NO: 915809 - DNA, 33 bp, Homo sapien
catataagtctgaataacccaaaaatcccatgc

SEQ ID NO: 915810 - DNA, 33 bp, Homo sapien
catataagtctgaataccccaaaaatcccatgc

SEQ ID NO: 915811 - DNA, 33 bp, Homo sapien
agagatacagcatgaaaaaataatagctgcaat

SEQ ID NO: 915812 - DNA, 33 bp, Homo sapien
agagatacagcatgaagaaataatagctgcaat

SEQ ID NO: 915813 - DNA, 33 bp, Homo sapien
aacctatttcgtgacagagttaatcaaaaataa

SEQ ID NO: 915814 - DNA, 33 bp, Homo sapien
aacctatttcgtgacatagttaatcaaaaataa

SEQ ID NO: 915815 - DNA, 33 bp, Homo sapien
gcctgtttcctttacaactttagtacatttggg

SEQ ID NO: 915816 - DNA, 33 bp, Homo sapien
gcctgtttcctttacatctttagtacatttggg

SEQ ID NO: 915817 - DNA, 33 bp, Homo sapien
attatataatgtcacaataaacaatgtcagaaa

SEQ ID NO: 915818 - DNA, 33 bp, Homo sapien
attatataatgtcacagtaaacaatgtcagaaa

SEQ ID NO: 915819 - DNA, 33 bp, Homo sapien
attctactagactctacgctgcatttcccattc

SEQ ID NO: 915820 - DNA, 33 bp, Homo sapien
attctactagactctatgctgcatttcccattc

SEQ ID NO: 915821 - DNA, 33 bp, Homo sapien
aatgcagaacagtacacggtaaaactgaaaaca

SEQ ID NO: 915822 - DNA, 33 bp, Homo sapien
aatgcagaacagtacagggtaaaactgaaaaca

SEQ ID NO: 915823 - DNA, 33 bp, Homo sapien
ttggcagtgaaatggaaaaggcatagaaagtag

SEQ ID NO: 915824 - DNA, 33 bp, Homo sapien
ttggcagtgaaatggagaaggcatagaaagtag

SEQ ID NO: 915825 - DNA, 33 bp, Homo sapien
ctttgaggtatgtgtacggtgaggatgaagatg

SEQ ID NO: 915826 - DNA, 33 bp, Homo sapien
ctttgaggtatgtgtatggtgaggatgaagatg

SEQ ID NO: 915827 - DNA, 33 bp, Homo sapien
caatgaatatcaaggcagataaaacaaaaaggt

SEQ ID NO: 915828 - DNA, 33 bp, Homo sapien
caatgaatatcaaggcggataaaacaaaaaggt

SEQ ID NO: 915829 - DNA, 33 bp, Homo sapien
acataagaaaaatccaacttcaaacttggtgat

SEQ ID NO: 915830 - DNA, 33 bp, Homo sapien
acataagaaaaatccagcttcaaacttggtgat

SEQ ID NO: 915831 - DNA, 33 bp, Homo sapien
tattctgagtccaaaaagttagaactctattta

SEQ ID NO: 915832 - DNA, 33 bp, Homo sapien
tattctgagtccaaaatgttagaactctattta

SEQ ID NO: 915833 - DNA, 33 bp, Homo sapien
agtatacataactgacactgcccaaattactga

SEQ ID NO: 915834 - DNA, 33 bp, Homo sapien
agtatacataactgactctgcccaaattactga

SEQ ID NO: 915835 - DNA, 33 bp, Homo sapien
tcctttggaaacaactaaatgcatccaaggtca

SEQ ID NO: 915836 - DNA, 33 bp, Homo sapien
tcctttggaaacaactgaatgcatccaaggtca

SEQ ID NO: 915837 - DNA, 33 bp, Homo sapien
ccccaagtcaaagaaacgcctacttgctttaaa

SEQ ID NO: 915838 - DNA, 33 bp, Homo sapien
ccccaagtcaaagaaatgcctacttgctttaaa

SEQ ID NO: 915839 - DNA, 33 bp, Homo sapien
gttgtctaattcttgggacaaccatcttgcctc

SEQ ID NO: 915840 - DNA, 33 bp, Homo sapien
gttgtctaattcttggtacaaccatcttgcctc

SEQ ID NO: 915841 - DNA, 33 bp, Homo sapien
catgaagaccaggatccagctcattataaattt

SEQ ID NO: 915842 - DNA, 33 bp, Homo sapien
catgaagaccaggatcgagctcattataaattt

SEQ ID NO: 915843 - DNA, 33 bp, Homo sapien
gattgttaactctacaatggaaagcacctcttt

SEQ ID NO: 915844 - DNA, 33 bp, Homo sapien
gattgttaactctacagtggaaagcacctcttt

SEQ ID NO: 915845 - DNA, 33 bp, Homo sapien
taacaaattaccaaaaacttagaggctaacaac

SEQ ID NO: 915846 - DNA, 33 bp, Homo sapien
taacaaattaccaaaaccttagaggctaacaac

SEQ ID NO: 915847 - DNA, 33 bp, Homo sapien
actgaatattatccacactatggtactgccgag

SEQ ID NO: 915848 - DNA, 33 bp, Homo sapien
actgaatattatccacgctatggtactgccgag

SEQ ID NO: 915849 - DNA, 33 bp, Homo sapien
gtagggatcagctataaagattagagacatctg

SEQ ID NO: 915850 - DNA, 33 bp, Homo sapien
gtagggatcagctatagagattagagacatctg

SEQ ID NO: 915851 - DNA, 33 bp, Homo sapien
caaattcatggccaaactcttttttcactccac

SEQ ID NO: 915852 - DNA, 33 bp, Homo sapien
caaattcatggccaaattcttttttcactccac

SEQ ID NO: 915853 - DNA, 33 bp, Homo sapien
tatgttatcaaaatgactaaactaatagcataa

SEQ ID NO: 915854 - DNA, 33 bp, Homo sapien
tatgttatcaaaatgagtaaactaatagcataa

SEQ ID NO: 915855 - DNA, 33 bp, Homo sapien
ctcacgtacgttcttaaaagcatcacttgtgga

SEQ ID NO: 915856 - DNA, 33 bp, Homo sapien
ctcacgtacgttcttacaagcatcacttgtgga

SEQ ID NO: 915857 - DNA, 33 bp, Homo sapien
gttttgtgttattgaactggtcattttgtttac

SEQ ID NO: 915858 - DNA, 33 bp, Homo sapien
gttttgtgttattgaattggtcattttgtttac

SEQ ID NO: 915859 - DNA, 33 bp, Homo sapien
tgcttacttttcctacaaaaccagatattctca

SEQ ID NO: 915860 - DNA, 33 bp, Homo sapien
tgcttacttttcctacgaaaccagatattctca

SEQ ID NO: 915861 - DNA, 33 bp, Homo sapien
ggtctgtcgatttgcaataatagaaattgaaac

SEQ ID NO: 915862 - DNA, 33 bp, Homo sapien
ggtctgtcgatttgcagtaatagaaattgaaac

SEQ ID NO: 915863 - DNA, 33 bp, Homo sapien
ttttattaaaccagccggaatggacaaagacag

SEQ ID NO: 915864 - DNA, 33 bp, Homo sapien
ttttattaaaccagcctgaatggacaaagacag

SEQ ID NO: 915865 - DNA, 33 bp, Homo sapien
ctttattaatcagccaagtaattttagttcaag

SEQ ID NO: 915866 - DNA, 33 bp, Homo sapien
ctttattaatcagccatgtaattttagttcaag

SEQ ID NO: 915867 - DNA, 33 bp, Homo sapien
taatcttgcaaaggacaaaaataggtatttata

SEQ ID NO: 915868 - DNA, 33 bp, Homo sapien
taatcttgcaaaggacgaaaataggtatttata

SEQ ID NO: 915869 - DNA, 33 bp, Homo sapien
gaattttcaagtataaagcagattgtccagtga

SEQ ID NO: 915870 - DNA, 33 bp, Homo sapien
gaattttcaagtataatgcagattgtccagtga

SEQ ID NO: 915871 - DNA, 33 bp, Homo sapien
gcagtataatttcacaaatcaagaagctagaag

SEQ ID NO: 915872 - DNA, 33 bp, Homo sapien
gcagtataatttcacacatcaagaagctagaag

SEQ ID NO: 915873 - DNA, 33 bp, Homo sapien
ctttcatcgccttagaagtaaattactaaaaaa

SEQ ID NO: 915874 - DNA, 33 bp, Homo sapien
ctttcatcgccttagacgtaaattactaaaaaa

SEQ ID NO: 915875 - DNA, 33 bp, Homo sapien
attttatggtgcagaactaaagatgcccctcac

SEQ ID NO: 915876 - DNA, 33 bp, Homo sapien
attttatggtgcagaagtaaagatgcccctcac

SEQ ID NO: 915877 - DNA, 33 bp, Homo sapien
tcattagcttagttacactggcaaagactgtat

SEQ ID NO: 915878 - DNA, 33 bp, Homo sapien
tcattagcttagttacgctggcaaagactgtat

SEQ ID NO: 915879 - DNA, 33 bp, Homo sapien
actggattcctgtttcccaccatatacaaatat

SEQ ID NO: 915880 - DNA, 33 bp, Homo sapien
actggattcctgtttctcaccatatacaaatat

SEQ ID NO: 915881 - DNA, 33 bp, Homo sapien
acacagtcaaaccataccacagagatagagtga

SEQ ID NO: 915882 - DNA, 33 bp, Homo sapien
acacagtcaaaccatatcacagagatagagtga

SEQ ID NO: 915883 - DNA, 33 bp, Homo sapien
aagatcattactgaccactacaaaacacacata

SEQ ID NO: 915884 - DNA, 33 bp, Homo sapien
aagatcattactgaccgctacaaaacacacata

SEQ ID NO: 915885 - DNA, 33 bp, Homo sapien
gaagcaagactcaacaagatgctgtctgcaaga

SEQ ID NO: 915886 - DNA, 33 bp, Homo sapien
gaagcaagactcaacaggatgctgtctgcaaga

SEQ ID NO: 915887 - DNA, 33 bp, Homo sapien
gcttttacctgccaaaatcagtcataaatacta

SEQ ID NO: 915888 - DNA, 33 bp, Homo sapien
gcttttacctgccaaagtcagtcataaatacta

SEQ ID NO: 915889 - DNA, 33 bp, Homo sapien
ctgggcctgtaagtggacaggactgctctcaga

SEQ ID NO: 915890 - DNA, 33 bp, Homo sapien
ctgggcctgtaagtgggcaggactgctctcaga

SEQ ID NO: 915891 - DNA, 33 bp, Homo sapien
actgtgcatagccaagcacggctgtggtggggc

SEQ ID NO: 915892 - DNA, 33 bp, Homo sapien
actgtgcatagccaagtacggctgtggtggggc

SEQ ID NO: 915893 - DNA, 33 bp, Homo sapien
ccccagctcccagtaacccctctgattttggag

SEQ ID NO: 915894 - DNA, 33 bp, Homo sapien
ccccagctcccagtaatccctctgattttggag

SEQ ID NO: 915895 - DNA, 33 bp, Homo sapien
ccatgctccacaggccagcaggagataggaaca

SEQ ID NO: 915896 - DNA, 33 bp, Homo sapien
ccatgctccacaggccggcaggagataggaaca

SEQ ID NO: 915897 - DNA, 33 bp, Homo sapien
ttactctttccaagccaccatgaagtcgaaaga

SEQ ID NO: 915898 - DNA, 33 bp, Homo sapien
ttactctttccaagcctccatgaagtcgaaaga

SEQ ID NO: 915899 - DNA, 33 bp, Homo sapien
agatgcacccagggaaatagaagtagctgaatg

SEQ ID NO: 915900 - DNA, 33 bp, Homo sapien
agatgcacccagggaactagaagtagctgaatg

SEQ ID NO: 915901 - DNA, 33 bp, Homo sapien
cataataagacttgaaatgattctatgaaatac

SEQ ID NO: 915902 - DNA, 33 bp, Homo sapien
cataataagacttgaagtgattctatgaaatac

SEQ ID NO: 915903 - DNA, 33 bp, Homo sapien
aaagatgttcaaattaccaccattttaagcact

SEQ ID NO: 915904 - DNA, 33 bp, Homo sapien
aaagatgttcaaattatcaccattttaagcact

SEQ ID NO: 915905 - DNA, 33 bp, Homo sapien
gagtatttccttttcacgcagtaagatgtcatc

SEQ ID NO: 915906 - DNA, 33 bp, Homo sapien
gagtatttccttttcaggcagtaagatgtcatc

SEQ ID NO: 915907 - DNA, 33 bp, Homo sapien
atactcatttgaaatgcagcgtattttaaaaga

SEQ ID NO: 915908 - DNA, 33 bp, Homo sapien
atactcatttgaaatgtagcgtattttaaaaga

SEQ ID NO: 915909 - DNA, 33 bp, Homo sapien
atttaaagttccatatgaggctcatgttatatt

SEQ ID NO: 915910 - DNA, 33 bp, Homo sapien
atttaaagttccatattaggctcatgttatatt

SEQ ID NO: 915911 - DNA, 33 bp, Homo sapien
tgaagacttatggaagaaaaagctgtataacat

SEQ ID NO: 915912 - DNA, 33 bp, Homo sapien
tgaagacttatggaaggaaaagctgtataacat

SEQ ID NO: 915913 - DNA, 33 bp, Homo sapien
ttttatcaaaaacaaccatattcctttactaga

SEQ ID NO: 915914 - DNA, 33 bp, Homo sapien
ttttatcaaaaacaacgatattcctttactaga

SEQ ID NO: 915915 - DNA, 33 bp, Homo sapien
cctggcagttattgaacataccgctctgttatg

SEQ ID NO: 915916 - DNA, 33 bp, Homo sapien
cctggcagttattgaagataccgctctgttatg

SEQ ID NO: 915917 - DNA, 33 bp, Homo sapien
agcttgcatccaataaccaaagaatagaagagt

SEQ ID NO: 915918 - DNA, 33 bp, Homo sapien
agcttgcatccaataatcaaagaatagaagagt

SEQ ID NO: 915919 - DNA, 33 bp, Homo sapien
tctgtgcccattcaaacggtggtttctgcagtt

SEQ ID NO: 915920 - DNA, 33 bp, Homo sapien
tctgtgcccattcaaatggtggtttctgcagtt

SEQ ID NO: 915921 - DNA, 33 bp, Homo sapien
ttcttcctgcccgctgcactaacaaagaccatg

SEQ ID NO: 915922 - DNA, 33 bp, Homo sapien
ttcttcctgcccgctgtactaacaaagaccatg

SEQ ID NO: 915923 - DNA, 33 bp, Homo sapien
gaatatggcattgaacaaaaatataaggaggaa

SEQ ID NO: 915924 - DNA, 33 bp, Homo sapien
gaatatggcattgaacgaaaatataaggaggaa

SEQ ID NO: 915925 - DNA, 33 bp, Homo sapien
caatgcttagatggtagaattgttaagagaata

SEQ ID NO: 915926 - DNA, 33 bp, Homo sapien
caatgcttagatggtataattgttaagagaata

SEQ ID NO: 915927 - DNA, 33 bp, Homo sapien
gattgaaatttgtaacaaaagtttaatgtgttt

SEQ ID NO: 915928 - DNA, 33 bp, Homo sapien
gattgaaatttgtaacgaaagtttaatgtgttt

SEQ ID NO: 915929 - DNA, 33 bp, Homo sapien
gccttgaacctactaccagttgctgacaaattt

SEQ ID NO: 915930 - DNA, 33 bp, Homo sapien
gccttgaacctactactagttgctgacaaattt

SEQ ID NO: 915931 - DNA, 33 bp, Homo sapien
cacgttatgttcaaaactgaatgtatcactgtt

SEQ ID NO: 915932 - DNA, 33 bp, Homo sapien
cacgttatgttcaaaattgaatgtatcactgtt

SEQ ID NO: 915933 - DNA, 33 bp, Homo sapien
agccatgaagtgtataaggaagaatcagatttg

SEQ ID NO: 915934 - DNA, 33 bp, Homo sapien
agccatgaagtgtatacggaagaatcagatttg

SEQ ID NO: 915935 - DNA, 33 bp, Homo sapien
gaagagataatatgaaagatgttgaaaccaata

SEQ ID NO: 915936 - DNA, 33 bp, Homo sapien
gaagagataatatgaaggatgttgaaaccaata

SEQ ID NO: 915937 - DNA, 33 bp, Homo sapien
aaaatcattattgatgcaaatcatgtacccagg

SEQ ID NO: 915938 - DNA, 33 bp, Homo sapien
aaaatcattattgatgtaaatcatgtacccagg

SEQ ID NO: 915939 - DNA, 33 bp, Homo sapien
gaaattgcttattctccaagtgcacagcaagca

SEQ ID NO: 915940 - DNA, 33 bp, Homo sapien
gaaattgcttattctcgaagtgcacagcaagca

SEQ ID NO: 915941 - DNA, 33 bp, Homo sapien
agattcttaaaaacttcaagtactcttaactca

SEQ ID NO: 915942 - DNA, 33 bp, Homo sapien
agattcttaaaaacttgaagtactcttaactca

SEQ ID NO: 915943 - DNA, 33 bp, Homo sapien
tggtggccttctacgacgaagaggaatccttct

SEQ ID NO: 915944 - DNA, 33 bp, Homo sapien
tggtggccttctacgatgaagaggaatccttct

SEQ ID NO: 915945 - DNA, 33 bp, Homo sapien
ttcagatcacagaacaacagaccaattagtaat

SEQ ID NO: 915946 - DNA, 33 bp, Homo sapien
ttcagatcacagaacagcagaccaattagtaat

SEQ ID NO: 915947 - DNA, 33 bp, Homo sapien
atttctaccatggtaacaatgaaactatcaaat

SEQ ID NO: 915948 - DNA, 33 bp, Homo sapien
atttctaccatggtaataatgaaactatcaaat

SEQ ID NO: 915949 - DNA, 33 bp, Homo sapien
aacccaggcactatcaataacctcttctctatt

SEQ ID NO: 915950 - DNA, 33 bp, Homo sapien
aacccaggcactatcattaacctcttctctatt

SEQ ID NO: 915951 - DNA, 33 bp, Homo sapien
tatccaatgctatcaaggtactatattttaaac

SEQ ID NO: 915952 - DNA, 33 bp, Homo sapien
tatccaatgctatcaatgtactatattttaaac

SEQ ID NO: 915953 - DNA, 33 bp, Homo sapien
tttaaagaccaaataactaaaaagcagagagat

SEQ ID NO: 915954 - DNA, 33 bp, Homo sapien
tttaaagaccaaataagtaaaaagcagagagat

SEQ ID NO: 915955 - DNA, 33 bp, Homo sapien
atggaagaatataataagcctgagttcatgttt

SEQ ID NO: 915956 - DNA, 33 bp, Homo sapien
atggaagaatataatacgcctgagttcatgttt

SEQ ID NO: 915957 - DNA, 33 bp, Homo sapien
aacagtgatagtagccaaattcaaacaaaaaca

SEQ ID NO: 915958 - DNA, 33 bp, Homo sapien
aacagtgatagtagccgaattcaaacaaaaaca

SEQ ID NO: 915959 - DNA, 33 bp, Homo sapien
ttagttaacatagctgcacatatcttaatatat

SEQ ID NO: 915960 - DNA, 33 bp, Homo sapien
ttagttaacatagctggacatatcttaatatat

SEQ ID NO: 915961 - DNA, 33 bp, Homo sapien
tttttcatatatacgaagtcagatccttgccac

SEQ ID NO: 915962 - DNA, 33 bp, Homo sapien
tttttcatatatacgaggtcagatccttgccac

SEQ ID NO: 915963 - DNA, 33 bp, Homo sapien
ctaccatataactgaactgaagacgtgataaac

SEQ ID NO: 915964 - DNA, 33 bp, Homo sapien
ctaccatataactgaattgaagacgtgataaac

SEQ ID NO: 915965 - DNA, 33 bp, Homo sapien
ctgcccaatcttgctgaagaaaattacacacca

SEQ ID NO: 915966 - DNA, 33 bp, Homo sapien
ctgcccaatcttgctggagaaaattacacacca

SEQ ID NO: 915967 - DNA, 33 bp, Homo sapien
cataaacattcagttgacaaatacggtctctag

SEQ ID NO: 915968 - DNA, 33 bp, Homo sapien
cataaacattcagttgtcaaatacggtctctag

SEQ ID NO: 915969 - DNA, 33 bp, Homo sapien
acagatgcactgaatgacaaatttaaaaatcta

SEQ ID NO: 915970 - DNA, 33 bp, Homo sapien
acagatgcactgaatgtcaaatttaaaaatcta

SEQ ID NO: 915971 - DNA, 33 bp, Homo sapien
gatttgttagcaaccacggactaagaattgcac

SEQ ID NO: 915972 - DNA, 33 bp, Homo sapien
gatttgttagcaaccatggactaagaattgcac

SEQ ID NO: 915973 - DNA, 33 bp, Homo sapien
tggtcatctcaacagaataactggtggcaagaa

SEQ ID NO: 915974 - DNA, 33 bp, Homo sapien
tggtcatctcaacagagtaactggtggcaagaa

SEQ ID NO: 915975 - DNA, 33 bp, Homo sapien
ttccattaagtagaagacaaatgcccaattgca

SEQ ID NO: 915976 - DNA, 33 bp, Homo sapien
ttccattaagtagaaggcaaatgcccaattgca

SEQ ID NO: 915977 - DNA, 33 bp, Homo sapien
tttttctttgtgaacaagtaaattgaaatgaaa

SEQ ID NO: 915978 - DNA, 33 bp, Homo sapien
tttttctttgtgaacacgtaaattgaaatgaaa

SEQ ID NO: 915979 - DNA, 33 bp, Homo sapien
attgtgtggtttgataagaaatttacttaatta

SEQ ID NO: 915980 - DNA, 33 bp, Homo sapien
attgtgtggtttgataggaaatttacttaatta

SEQ ID NO: 915981 - DNA, 33 bp, Homo sapien
tgtttgattctctactaaactgatcatatcact

SEQ ID NO: 915982 - DNA, 33 bp, Homo sapien
tgtttgattctctactgaactgatcatatcact

SEQ ID NO: 915983 - DNA, 33 bp, Homo sapien
gatcagctcccttgaaagtctattcattctcaa

SEQ ID NO: 915984 - DNA, 33 bp, Homo sapien
gatcagctcccttgaaggtctattcattctcaa

SEQ ID NO: 915985 - DNA, 33 bp, Homo sapien
tttgatgaagatagtaagtgaaactcctagagt

SEQ ID NO: 915986 - DNA, 33 bp, Homo sapien
tttgatgaagatagtaggtgaaactcctagagt

SEQ ID NO: 915987 - DNA, 33 bp, Homo sapien
gtgaacttgcatataacgagccttagtaaatat

SEQ ID NO: 915988 - DNA, 33 bp, Homo sapien
gtgaacttgcatataaggagccttagtaaatat

SEQ ID NO: 915989 - DNA, 33 bp, Homo sapien
aatttgaaagattctaaatcataacttaagcaa

SEQ ID NO: 915990 - DNA, 33 bp, Homo sapien
aatttgaaagattctagatcataacttaagcaa

SEQ ID NO: 915991 - DNA, 33 bp, Homo sapien
cgagctactgctgtcacaaacacctcttccaat

SEQ ID NO: 915992 - DNA, 33 bp, Homo sapien
cgagctactgctgtcataaacacctcttccaat

SEQ ID NO: 915993 - DNA, 33 bp, Homo sapien
aacattgtccaacactcagtgtcgtttttgata

SEQ ID NO: 915994 - DNA, 33 bp, Homo sapien
aacattgtccaacacttagtgtcgtttttgata

SEQ ID NO: 915995 - DNA, 33 bp, Homo sapien
gaaggaatttctaggacaaaatgcccagaagct

SEQ ID NO: 915996 - DNA, 33 bp, Homo sapien
gaaggaatttctaggataaaatgcccagaagct

SEQ ID NO: 915997 - DNA, 33 bp, Homo sapien
agtagtaggaatgtcacgtcaggagatgaaatt

SEQ ID NO: 915998 - DNA, 33 bp, Homo sapien
agtagtaggaatgtcatgtcaggagatgaaatt

SEQ ID NO: 915999 - DNA, 33 bp, Homo sapien
ttccatgatgtataaccaagtaccacaagcttg

SEQ ID NO: 916000 - DNA, 33 bp, Homo sapien
ttccatgatgtataacgaagtaccacaagcttg

SEQ ID NO: 916001 - DNA, 33 bp, Homo sapien
taaccttggattgaatcaccatgcatttccatg

SEQ ID NO: 916002 - DNA, 33 bp, Homo sapien
taaccttggattgaattaccatgcatttccatg

SEQ ID NO: 916003 - DNA, 33 bp, Homo sapien
aattgtgcatttgaacaaagactttacaagaat

SEQ ID NO: 916004 - DNA, 33 bp, Homo sapien
aattgtgcatttgaacgaagactttacaagaat

SEQ ID NO: 916005 - DNA, 33 bp, Homo sapien
tctctattgtagaaaaatataagagtcaatcat

SEQ ID NO: 916006 - DNA, 33 bp, Homo sapien
tctctattgtagaaaagtataagagtcaatcat

SEQ ID NO: 916007 - DNA, 33 bp, Homo sapien
tcccaggtgcgaaggaagtagggaaaacaagct

SEQ ID NO: 916008 - DNA, 33 bp, Homo sapien
tcccaggtgcgaaggaggtagggaaaacaagct

SEQ ID NO: 916009 - DNA, 33 bp, Homo sapien
gctacaatttttaaggccatgaaactgctgcct

SEQ ID NO: 916010 - DNA, 33 bp, Homo sapien
gctacaatttttaaggtcatgaaactgctgcct

SEQ ID NO: 916011 - DNA, 33 bp, Homo sapien
taaaggagaaaggagaaaggcatcatatgagag

SEQ ID NO: 916012 - DNA, 33 bp, Homo sapien
taaaggagaaaggagagaggcatcatatgagag

SEQ ID NO: 916013 - DNA, 33 bp, Homo sapien
gaatgtgggaggaaaacgcactctctagcactg

SEQ ID NO: 916014 - DNA, 33 bp, Homo sapien
gaatgtgggaggaaaatgcactctctagcactg

SEQ ID NO: 916015 - DNA, 33 bp, Homo sapien
ccttagttggcacctgcactacatttcaaggca

SEQ ID NO: 916016 - DNA, 33 bp, Homo sapien
ccttagttggcacctggactacatttcaaggca

SEQ ID NO: 916017 - DNA, 33 bp, Homo sapien
aaccattcactggaaaaatattcttcaggttat

SEQ ID NO: 916018 - DNA, 33 bp, Homo sapien
aaccattcactggaaagatattcttcaggttat

SEQ ID NO: 916019 - DNA, 33 bp, Homo sapien
cttagtttcagctatgcactgtaaagattagat

SEQ ID NO: 916020 - DNA, 33 bp, Homo sapien
cttagtttcagctatgtactgtaaagattagat

SEQ ID NO: 916021 - DNA, 33 bp, Homo sapien
aatgaggcccaagctacatatgaatttcaaaga

SEQ ID NO: 916022 - DNA, 33 bp, Homo sapien
aatgaggcccaagctatatatgaatttcaaaga

SEQ ID NO: 916023 - DNA, 33 bp, Homo sapien
gattgtcaaagggaaaatgtccctcagaaagat

SEQ ID NO: 916024 - DNA, 33 bp, Homo sapien
gattgtcaaagggaaagtgtccctcagaaagat

SEQ ID NO: 916025 - DNA, 33 bp, Homo sapien
ctggcccagcctgtacaccagcttatacaatgt

SEQ ID NO: 916026 - DNA, 33 bp, Homo sapien
ctggcccagcctgtaccccagcttatacaatgt

SEQ ID NO: 916027 - DNA, 33 bp, Homo sapien
taagttacacaactatcaaattggatgcaactc

SEQ ID NO: 916028 - DNA, 33 bp, Homo sapien
taagttacacaactattaaattggatgcaactc

SEQ ID NO: 916029 - DNA, 33 bp, Homo sapien
gtctgcgtgttatgtacactctccgtaaattta

SEQ ID NO: 916030 - DNA, 33 bp, Homo sapien
gtctgcgtgttatgtatactctccgtaaattta

SEQ ID NO: 916031 - DNA, 33 bp, Homo sapien
agtcctagaacctacaaaaaatgagtcatctct

SEQ ID NO: 916032 - DNA, 33 bp, Homo sapien
agtcctagaacctacagaaaatgagtcatctct

SEQ ID NO: 916033 - DNA, 33 bp, Homo sapien
gagaatgatacatggacaatgaggaatcagtgc

SEQ ID NO: 916034 - DNA, 33 bp, Homo sapien
gagaatgatacatggagaatgaggaatcagtgc

SEQ ID NO: 916035 - DNA, 33 bp, Homo sapien
tgtgaatcctgcaataagtaagaaatcttttct

SEQ ID NO: 916036 - DNA, 33 bp, Homo sapien
tgtgaatcctgcaataggtaagaaatcttttct

SEQ ID NO: 916037 - DNA, 33 bp, Homo sapien
cttgggtgattttcaggagctgaagaggattcg

SEQ ID NO: 916038 - DNA, 33 bp, Homo sapien
cttgggtgattttcagtagctgaagaggattcg

SEQ ID NO: 916039 - DNA, 33 bp, Homo sapien
ggttaagttacttaccaaaggacacaaaattag

SEQ ID NO: 916040 - DNA, 33 bp, Homo sapien
ggttaagttacttaccgaaggacacaaaattag

SEQ ID NO: 916041 - DNA, 33 bp, Homo sapien
aatagtggcctcatacgcatttgtatcaccgtt

SEQ ID NO: 916042 - DNA, 33 bp, Homo sapien
aatagtggcctcatactcatttgtatcaccgtt

SEQ ID NO: 916043 - DNA, 33 bp, Homo sapien
gattcctcagtgcattcaagatatgaaggaatt

SEQ ID NO: 916044 - DNA, 33 bp, Homo sapien
gattcctcagtgcatttaagatatgaaggaatt

SEQ ID NO: 916045 - DNA, 33 bp, Homo sapien
ttatggtggccacaatcagtactagaagatcaa

SEQ ID NO: 916046 - DNA, 33 bp, Homo sapien
ttatggtggccacaattagtactagaagatcaa

SEQ ID NO: 916047 - DNA, 33 bp, Homo sapien
acagatagaaaagtgaaagacctcagtgtttca

SEQ ID NO: 916048 - DNA, 33 bp, Homo sapien
acagatagaaaagtgatagacctcagtgtttca

SEQ ID NO: 916049 - DNA, 33 bp, Homo sapien
gactgtcttaattgcccacagccccaaacagca

SEQ ID NO: 916050 - DNA, 33 bp, Homo sapien
gactgtcttaattgccgacagccccaaacagca

SEQ ID NO: 916051 - DNA, 33 bp, Homo sapien
aataatccttgcattaaagaacagttttgaagt

SEQ ID NO: 916052 - DNA, 33 bp, Homo sapien
aataatccttgcattagagaacagttttgaagt

SEQ ID NO: 916053 - DNA, 33 bp, Homo sapien
tattcaaattttgtcaagaaaatctggatgaat

SEQ ID NO: 916054 - DNA, 33 bp, Homo sapien
tattcaaattttgtcaggaaaatctggatgaat

SEQ ID NO: 916055 - DNA, 33 bp, Homo sapien
ttctcaaatgtttccccaaccattagcattata

SEQ ID NO: 916056 - DNA, 33 bp, Homo sapien
ttctcaaatgtttccctaaccattagcattata

SEQ ID NO: 916057 - DNA, 33 bp, Homo sapien
ttcgtcagtcagtagacatggagttgcatcaga

SEQ ID NO: 916058 - DNA, 33 bp, Homo sapien
ttcgtcagtcagtagatatggagttgcatcaga

SEQ ID NO: 916059 - DNA, 33 bp, Homo sapien
ttgatgtgagtgattcaaaactattatataata

SEQ ID NO: 916060 - DNA, 33 bp, Homo sapien
ttgatgtgagtgattccaaactattatataata

SEQ ID NO: 916061 - DNA, 33 bp, Homo sapien
gaaaagaattcctatacgcagttatttatcata

SEQ ID NO: 916062 - DNA, 33 bp, Homo sapien
gaaaagaattcctatatgcagttatttatcata

SEQ ID NO: 916063 - DNA, 33 bp, Homo sapien
acatttccaccatgtaaagtcaagaggctgttg

SEQ ID NO: 916064 - DNA, 33 bp, Homo sapien
acatttccaccatgtatagtcaagaggctgttg

SEQ ID NO: 916065 - DNA, 33 bp, Homo sapien
ctgaattgtctcccccaaaaaatgtgtatgttg

SEQ ID NO: 916066 - DNA, 33 bp, Homo sapien
ctgaattgtctccccccaaaaatgtgtatgttg

SEQ ID NO: 916067 - DNA, 33 bp, Homo sapien
gaacagcataatattcaattcagttcctcagtc

SEQ ID NO: 916068 - DNA, 33 bp, Homo sapien
gaacagcataatattcgattcagttcctcagtc

SEQ ID NO: 916069 - DNA, 33 bp, Homo sapien
atgttaacaggcagtacaaaaattacctctttc

SEQ ID NO: 916070 - DNA, 33 bp, Homo sapien
atgttaacaggcagtagaaaaattacctctttc

SEQ ID NO: 916071 - DNA, 33 bp, Homo sapien
aaataatataagcaaaacactaccatactgctt

SEQ ID NO: 916072 - DNA, 33 bp, Homo sapien
aaataatataagcaaatcactaccatactgctt

SEQ ID NO: 916073 - DNA, 33 bp, Homo sapien
tagtactcaatagatgacaccaattattattat

SEQ ID NO: 916074 - DNA, 33 bp, Homo sapien
tagtactcaatagatgccaccaattattattat

SEQ ID NO: 916075 - DNA, 33 bp, Homo sapien
aagtgattctgatccactcgaaggaggtgtatg

SEQ ID NO: 916076 - DNA, 33 bp, Homo sapien
aagtgattctgatccattcgaaggaggtgtatg

SEQ ID NO: 916077 - DNA, 33 bp, Homo sapien
gcttgtagttcctcgtcaaatagcaggcttcct

SEQ ID NO: 916078 - DNA, 33 bp, Homo sapien
gcttgtagttcctcgttaaatagcaggcttcct

SEQ ID NO: 916079 - DNA, 33 bp, Homo sapien
acttagcaatttttgggagttagtagagcaata

SEQ ID NO: 916080 - DNA, 33 bp, Homo sapien
acttagcaatttttggtagttagtagagcaata

SEQ ID NO: 916081 - DNA, 33 bp, Homo sapien
ttggacttgtcaattgcaagtgatgttggtagc

SEQ ID NO: 916082 - DNA, 33 bp, Homo sapien
ttggacttgtcaattggaagtgatgttggtagc

SEQ ID NO: 916083 - DNA, 33 bp, Homo sapien
aagatgacaggaaaaggctttagttgtaacttt

SEQ ID NO: 916084 - DNA, 33 bp, Homo sapien
aagatgacaggaaaagtctttagttgtaacttt

SEQ ID NO: 916085 - DNA, 33 bp, Homo sapien
gaagaagaatgttctacgtgtgggaagaaagaa

SEQ ID NO: 916086 - DNA, 33 bp, Homo sapien
gaagaagaatgttctatgtgtgggaagaaagaa

SEQ ID NO: 916087 - DNA, 33 bp, Homo sapien
taccttggaatcacaagatagaggtgaaaatgc

SEQ ID NO: 916088 - DNA, 33 bp, Homo sapien
taccttggaatcacaatatagaggtgaaaatgc

SEQ ID NO: 916089 - DNA, 33 bp, Homo sapien
cagacgctcaagtcccaaagtatttgcatataa

SEQ ID NO: 916090 - DNA, 33 bp, Homo sapien
cagacgctcaagtcccgaagtatttgcatataa

SEQ ID NO: 916091 - DNA, 33 bp, Homo sapien
atcatctatctgctagacctgtgctgtccaacg

SEQ ID NO: 916092 - DNA, 33 bp, Homo sapien
atcatctatctgctaggcctgtgctgtccaacg

SEQ ID NO: 916093 - DNA, 33 bp, Homo sapien
tttagtcttctataaacgctaacaaatatgctt

SEQ ID NO: 916094 - DNA, 33 bp, Homo sapien
tttagtcttctataaatgctaacaaatatgctt

SEQ ID NO: 916095 - DNA, 33 bp, Homo sapien
tctttctgggtgagacaaggactatatatcata

SEQ ID NO: 916096 - DNA, 33 bp, Homo sapien
tctttctgggtgagacgaggactatatatcata

SEQ ID NO: 916097 - DNA, 33 bp, Homo sapien
catcttatttctcttaccacaggcctaaaattg

SEQ ID NO: 916098 - DNA, 33 bp, Homo sapien
catcttatttctcttatcacaggcctaaaattg

SEQ ID NO: 916099 - DNA, 33 bp, Homo sapien
tttaaaacttctgcacccacaaagagaacaaaa

SEQ ID NO: 916100 - DNA, 33 bp, Homo sapien
tttaaaacttctgcactcacaaagagaacaaaa

SEQ ID NO: 916101 - DNA, 33 bp, Homo sapien
aagacatttccatgttaaaatttggactccctc

SEQ ID NO: 916102 - DNA, 33 bp, Homo sapien
aagacatttccatgttcaaatttggactccctc

SEQ ID NO: 916103 - DNA, 33 bp, Homo sapien
ccagaaacaaagaaacactcaaagaataaaggc

SEQ ID NO: 916104 - DNA, 33 bp, Homo sapien
ccagaaacaaagaaacgctcaaagaataaaggc

SEQ ID NO: 916105 - DNA, 33 bp, Homo sapien
aaaaatactgtattcacgtcaaaaaggatagtg

SEQ ID NO: 916106 - DNA, 33 bp, Homo sapien
aaaaatactgtattcatgtcaaaaaggatagtg

SEQ ID NO: 916107 - DNA, 33 bp, Homo sapien
attataaaagcatacaccttcaaaggaagtaaa

SEQ ID NO: 916108 - DNA, 33 bp, Homo sapien
attataaaagcatacatcttcaaaggaagtaaa

SEQ ID NO: 916109 - DNA, 33 bp, Homo sapien
gacatgttaaatgacacgaagaagatgtaataa

SEQ ID NO: 916110 - DNA, 33 bp, Homo sapien
gacatgttaaatgacatgaagaagatgtaataa

SEQ ID NO: 916111 - DNA, 33 bp, Homo sapien
agagcagcttttgctaagatatcaaactgatcc

SEQ ID NO: 916112 - DNA, 33 bp, Homo sapien
agagcagcttttgctacgatatcaaactgatcc

SEQ ID NO: 916113 - DNA, 33 bp, Homo sapien
aatttttgcttatggcgaaaggttggagtccag

SEQ ID NO: 916114 - DNA, 33 bp, Homo sapien
aatttttgcttatggctaaaggttggagtccag

SEQ ID NO: 916115 - DNA, 33 bp, Homo sapien
cccatgctatggactgaaagaatgaatattgtt

SEQ ID NO: 916116 - DNA, 33 bp, Homo sapien
cccatgctatggactggaagaatgaatattgtt

SEQ ID NO: 916117 - DNA, 33 bp, Homo sapien
ctcacaacagtcagaaaattattaatggtttag

SEQ ID NO: 916118 - DNA, 33 bp, Homo sapien
ctcacaacagtcagaacattattaatggtttag

SEQ ID NO: 916119 - DNA, 33 bp, Homo sapien
ttagttgtgaatgaccaaaataaaactgactaa

SEQ ID NO: 916120 - DNA, 33 bp, Homo sapien
ttagttgtgaatgaccgaaataaaactgactaa

SEQ ID NO: 916121 - DNA, 33 bp, Homo sapien
agctgaggaacttgcaatgattacagacaaaaa

SEQ ID NO: 916122 - DNA, 33 bp, Homo sapien
agctgaggaacttgcagtgattacagacaaaaa

SEQ ID NO: 916123 - DNA, 33 bp, Homo sapien
tagctcactaatatccactctatgctttctcag

SEQ ID NO: 916124 - DNA, 33 bp, Homo sapien
tagctcactaatatcctctctatgctttctcag

SEQ ID NO: 916125 - DNA, 33 bp, Homo sapien
tgttgttctgactagaaaggtaagtccaatttg

SEQ ID NO: 916126 - DNA, 33 bp, Homo sapien
tgttgttctgactagacaggtaagtccaatttg

SEQ ID NO: 916127 - DNA, 33 bp, Homo sapien
ctcaggagatttttctcaccaattaaatcttaa

SEQ ID NO: 916128 - DNA, 33 bp, Homo sapien
ctcaggagatttttctgaccaattaaatcttaa

SEQ ID NO: 916129 - DNA, 33 bp, Homo sapien
tatgctaagtctctacaacctcagagagtctga

SEQ ID NO: 916130 - DNA, 33 bp, Homo sapien
tatgctaagtctctacgacctcagagagtctga

SEQ ID NO: 916131 - DNA, 33 bp, Homo sapien
agataccaggctcaaaattataaaacatatgaa

SEQ ID NO: 916132 - DNA, 33 bp, Homo sapien
agataccaggctcaaagttataaaacatatgaa

SEQ ID NO: 916133 - DNA, 33 bp, Homo sapien
ggtttgtgctgctctaagaatctaatgctgctg

SEQ ID NO: 916134 - DNA, 33 bp, Homo sapien
ggtttgtgctgctctaggaatctaatgctgctg

SEQ ID NO: 916135 - DNA, 33 bp, Homo sapien
ttcttgactctccttacagttggttactttttg

SEQ ID NO: 916136 - DNA, 33 bp, Homo sapien
ttcttgactctccttatagttggttactttttg

SEQ ID NO: 916137 - DNA, 33 bp, Homo sapien
ctgatacacttattgaacagagcaaaacccatt

SEQ ID NO: 916138 - DNA, 33 bp, Homo sapien
ctgatacacttattgatcagagcaaaacccatt

SEQ ID NO: 916139 - DNA, 33 bp, Homo sapien
tgttcaataagcacccactaacgttcacaaatg

SEQ ID NO: 916140 - DNA, 33 bp, Homo sapien
tgttcaataagcacccgctaacgttcacaaatg

SEQ ID NO: 916141 - DNA, 33 bp, Homo sapien
aggagctcttgtaaggaaagcctgatggtgaca

SEQ ID NO: 916142 - DNA, 33 bp, Homo sapien
aggagctcttgtaaggcaagcctgatggtgaca

SEQ ID NO: 916143 - DNA, 33 bp, Homo sapien
ttccccacaattttgacaaaccacaggctcact

SEQ ID NO: 916144 - DNA, 33 bp, Homo sapien
ttccccacaattttgataaaccacaggctcact

SEQ ID NO: 916145 - DNA, 33 bp, Homo sapien
gaggacttgtgaccaggagacaacagacatatg

SEQ ID NO: 916146 - DNA, 33 bp, Homo sapien
gaggacttgtgaccagtagacaacagacatatg

SEQ ID NO: 916147 - DNA, 33 bp, Homo sapien
ttgtttagcatataatcaagaaataagcagcag

SEQ ID NO: 916148 - DNA, 33 bp, Homo sapien
ttgtttagcatataatgaagaaataagcagcag

SEQ ID NO: 916149 - DNA, 33 bp, Homo sapien
atcttgcgcaaaaaagaattcagggtaattcca

SEQ ID NO: 916150 - DNA, 33 bp, Homo sapien
atcttgcgcaaaaaagtattcagggtaattcca

SEQ ID NO: 916151 - DNA, 33 bp, Homo sapien
gctcttctgggcaaaagacattgacatctttgt

SEQ ID NO: 916152 - DNA, 33 bp, Homo sapien
gctcttctgggcaaaatacattgacatctttgt

SEQ ID NO: 916153 - DNA, 33 bp, Homo sapien
gtggagagttgtggagaaatgtgataggacaag

SEQ ID NO: 916154 - DNA, 33 bp, Homo sapien
gtggagagttgtggagtaatgtgataggacaag

SEQ ID NO: 916155 - DNA, 33 bp, Homo sapien
tagcttcacttgacacacggccttcataaggaa

SEQ ID NO: 916156 - DNA, 33 bp, Homo sapien
tagcttcacttgacacgcggccttcataaggaa

SEQ ID NO: 916157 - DNA, 33 bp, Homo sapien
aagggcaatggcaacactcttataacaaaagac

SEQ ID NO: 916158 - DNA, 33 bp, Homo sapien
aagggcaatggcaacattcttataacaaaagac

SEQ ID NO: 916159 - DNA, 33 bp, Homo sapien
atttctacatggatggacattcttcatagaacc

SEQ ID NO: 916160 - DNA, 33 bp, Homo sapien
atttctacatggatgggcattcttcatagaacc

SEQ ID NO: 916161 - DNA, 33 bp, Homo sapien
cacttttcttagaccacaggatcactctcaggg

SEQ ID NO: 916162 - DNA, 33 bp, Homo sapien
cacttttcttagaccataggatcactctcaggg

SEQ ID NO: 916163 - DNA, 33 bp, Homo sapien
cttgtgataaggtgtcaaagttctgtcttctca

SEQ ID NO: 916164 - DNA, 33 bp, Homo sapien
cttgtgataaggtgtcgaagttctgtcttctca

SEQ ID NO: 916165 - DNA, 33 bp, Homo sapien
gaactacacatttgctaactacaagtttcccaa

SEQ ID NO: 916166 - DNA, 33 bp, Homo sapien
gaactacacatttgctgactacaagtttcccaa

SEQ ID NO: 916167 - DNA, 33 bp, Homo sapien
tttcttcatacctgtaaataaagaccaccagaa

SEQ ID NO: 916168 - DNA, 33 bp, Homo sapien
tttcttcatacctgtagataaagaccaccagaa

SEQ ID NO: 916169 - DNA, 33 bp, Homo sapien
tgatgatgaaggacaactctaacaaatagaaaa

SEQ ID NO: 916170 - DNA, 33 bp, Homo sapien
tgatgatgaaggacaagtctaacaaatagaaaa

SEQ ID NO: 916171 - DNA, 33 bp, Homo sapien
caatagaatggcaataagctagatatgtttgaa

SEQ ID NO: 916172 - DNA, 33 bp, Homo sapien
caatagaatggcaataggctagatatgtttgaa

SEQ ID NO: 916173 - DNA, 33 bp, Homo sapien
cccagacaatggtcaaacacagcagggtagaac

SEQ ID NO: 916174 - DNA, 33 bp, Homo sapien
cccagacaatggtcaagcacagcagggtagaac

SEQ ID NO: 916175 - DNA, 33 bp, Homo sapien
tgctttgcgtttcagacgatgtatttccttttc

SEQ ID NO: 916176 - DNA, 33 bp, Homo sapien
tgctttgcgtttcagatgatgtatttccttttc

SEQ ID NO: 916177 - DNA, 33 bp, Homo sapien
agatttacaggagccacgtaataagtggagtct

SEQ ID NO: 916178 - DNA, 33 bp, Homo sapien
agatttacaggagccatgtaataagtggagtct

SEQ ID NO: 916179 - DNA, 33 bp, Homo sapien
ttgcagttttcagaaacgtgtctttgcaaggct

SEQ ID NO: 916180 - DNA, 33 bp, Homo sapien
ttgcagttttcagaaatgtgtctttgcaaggct

SEQ ID NO: 916181 - DNA, 33 bp, Homo sapien
tagagcagtttctataccctgagaagacatgtt

SEQ ID NO: 916182 - DNA, 33 bp, Homo sapien
tagagcagtttctatatcctgagaagacatgtt

SEQ ID NO: 916183 - DNA, 33 bp, Homo sapien
aaacttttatgcttctgacttcaaaatttgtac

SEQ ID NO: 916184 - DNA, 33 bp, Homo sapien
aaacttttatgcttcttacttcaaaatttgtac

SEQ ID NO: 916185 - DNA, 33 bp, Homo sapien
tgggattgatagcctaataatagaagcaaaatg

SEQ ID NO: 916186 - DNA, 33 bp, Homo sapien
tgggattgatagcctactaatagaagcaaaatg

SEQ ID NO: 916187 - DNA, 33 bp, Homo sapien
tcgttggtactggttaacactttcctacatttt

SEQ ID NO: 916188 - DNA, 33 bp, Homo sapien
tcgttggtactggttaccactttcctacatttt

SEQ ID NO: 916189 - DNA, 33 bp, Homo sapien
tgttgttgtctcctataaaatagtaagaggctt

SEQ ID NO: 916190 - DNA, 33 bp, Homo sapien
tgttgttgtctcctatgaaatagtaagaggctt

SEQ ID NO: 916191 - DNA, 33 bp, Homo sapien
aagcagtcaagcttaacgaaacaaggttgtttc

SEQ ID NO: 916192 - DNA, 33 bp, Homo sapien
aagcagtcaagcttaatgaaacaaggttgtttc

SEQ ID NO: 916193 - DNA, 33 bp, Homo sapien
catctcttttacagccactatctaatctgactt

SEQ ID NO: 916194 - DNA, 33 bp, Homo sapien
catctcttttacagccgctatctaatctgactt

SEQ ID NO: 916195 - DNA, 33 bp, Homo sapien
ctaccttttccaccaactaaaatagaagtcaaa

SEQ ID NO: 916196 - DNA, 33 bp, Homo sapien
ctaccttttccaccaattaaaatagaagtcaaa

SEQ ID NO: 916197 - DNA, 33 bp, Homo sapien
atgactaaggcataacaattttgaagccaagtt

SEQ ID NO: 916198 - DNA, 33 bp, Homo sapien
atgactaaggcataactattttgaagccaagtt

SEQ ID NO: 916199 - DNA, 33 bp, Homo sapien
ttgaaataataggcaaaaaacactgatccacat

SEQ ID NO: 916200 - DNA, 33 bp, Homo sapien
ttgaaataataggcaacaaacactgatccacat

SEQ ID NO: 916201 - DNA, 33 bp, Homo sapien
ataaagtcaggcataacactaatctagagtact

SEQ ID NO: 916202 - DNA, 33 bp, Homo sapien
ataaagtcaggcataatactaatctagagtact

SEQ ID NO: 916203 - DNA, 33 bp, Homo sapien
ttagaaataacctaaactgattggacaaaagtt

SEQ ID NO: 916204 - DNA, 33 bp, Homo sapien
ttagaaataacctaaattgattggacaaaagtt

SEQ ID NO: 916205 - DNA, 33 bp, Homo sapien
aagcaatattgcatgaaatggttaattgcttaa

SEQ ID NO: 916206 - DNA, 33 bp, Homo sapien
aagcaatattgcatgagatggttaattgcttaa

SEQ ID NO: 916207 - DNA, 33 bp, Homo sapien
ttttcagtgtttagtagcctattaagcaaaaga

SEQ ID NO: 916208 - DNA, 33 bp, Homo sapien
ttttcagtgtttagtatcctattaagcaaaaga

SEQ ID NO: 916209 - DNA, 33 bp, Homo sapien
ccctggagaaatacgacattgtcttctcttctg

SEQ ID NO: 916210 - DNA, 33 bp, Homo sapien
ccctggagaaatacgatattgtcttctcttctg

SEQ ID NO: 916211 - DNA, 33 bp, Homo sapien
ctagggtagttgatgcacttaggaatgagaaat

SEQ ID NO: 916212 - DNA, 33 bp, Homo sapien
ctagggtagttgatgcgcttaggaatgagaaat

SEQ ID NO: 916213 - DNA, 33 bp, Homo sapien
catttatatttgttagaagacactttcctagta

SEQ ID NO: 916214 - DNA, 33 bp, Homo sapien
catttatatttgttaggagacactttcctagta

SEQ ID NO: 916215 - DNA, 33 bp, Homo sapien
atagtagtgtataaaccgcacatatcgttttat

SEQ ID NO: 916216 - DNA, 33 bp, Homo sapien
atagtagtgtataaactgcacatatcgttttat

SEQ ID NO: 916217 - DNA, 33 bp, Homo sapien
tatttaagtgagggaagggatgtctgtatgaat

SEQ ID NO: 916218 - DNA, 33 bp, Homo sapien
tatttaagtgagggaatggatgtctgtatgaat

SEQ ID NO: 916219 - DNA, 33 bp, Homo sapien
attttcacaaatggtaaattgtttcatggcagt

SEQ ID NO: 916220 - DNA, 33 bp, Homo sapien
attttcacaaatggtatattgtttcatggcagt

SEQ ID NO: 916221 - DNA, 33 bp, Homo sapien
aaattttagccactgaatatgccatcattgtat

SEQ ID NO: 916222 - DNA, 33 bp, Homo sapien
aaattttagccactgagtatgccatcattgtat

SEQ ID NO: 916223 - DNA, 33 bp, Homo sapien
atggagaatgtaccaactaactgtctcttcagg

SEQ ID NO: 916224 - DNA, 33 bp, Homo sapien
atggagaatgtaccaattaactgtctcttcagg

SEQ ID NO: 916225 - DNA, 33 bp, Homo sapien
aaagacagaagaatcacagaaagatcaaaggag

SEQ ID NO: 916226 - DNA, 33 bp, Homo sapien
aaagacagaagaatcatagaaagatcaaaggag

SEQ ID NO: 916227 - DNA, 33 bp, Homo sapien
agcgacctatgagagtcacagagaacatctcga

SEQ ID NO: 916228 - DNA, 33 bp, Homo sapien
agcgacctatgagagtgacagagaacatctcga

SEQ ID NO: 916229 - DNA, 33 bp, Homo sapien
ctttcttgggctatgacgatgccatgacaacaa

SEQ ID NO: 916230 - DNA, 33 bp, Homo sapien
ctttcttgggctatgatgatgccatgacaacaa

SEQ ID NO: 916231 - DNA, 33 bp, Homo sapien
ctttgccaacttgccaccttataatatgcaaaa

SEQ ID NO: 916232 - DNA, 33 bp, Homo sapien
ctttgccaacttgccagcttataatatgcaaaa

SEQ ID NO: 916233 - DNA, 33 bp, Homo sapien
ggttgttaggatccataagtaaatatctcttgt

SEQ ID NO: 916234 - DNA, 33 bp, Homo sapien
ggttgttaggatccatcagtaaatatctcttgt

SEQ ID NO: 916235 - DNA, 33 bp, Homo sapien
tcaatacacagatgaaaaaattcaaacatagaa

SEQ ID NO: 916236 - DNA, 33 bp, Homo sapien
tcaatacacagatgaagaaattcaaacatagaa

SEQ ID NO: 916237 - DNA, 33 bp, Homo sapien
ttcattcttgattttacgcagtactctaagaat

SEQ ID NO: 916238 - DNA, 33 bp, Homo sapien
ttcattcttgattttatgcagtactctaagaat

SEQ ID NO: 916239 - DNA, 33 bp, Homo sapien
gagttctgttcagtaactgcaattatatcttca

SEQ ID NO: 916240 - DNA, 33 bp, Homo sapien
gagttctgttcagtaagtgcaattatatcttca

SEQ ID NO: 916241 - DNA, 33 bp, Homo sapien
taatactttggcatcaagcagtagactcctaac

SEQ ID NO: 916242 - DNA, 33 bp, Homo sapien
taatactttggcatcaggcagtagactcctaac

SEQ ID NO: 916243 - DNA, 33 bp, Homo sapien
tataatttactcaaataaaatatggcattctca

SEQ ID NO: 916244 - DNA, 33 bp, Homo sapien
tataatttactcaaatgaaatatggcattctca

SEQ ID NO: 916245 - DNA, 33 bp, Homo sapien
aatctttggaccatagcataactcttcctcatg

SEQ ID NO: 916246 - DNA, 33 bp, Homo sapien
aatctttggaccatagtataactcttcctcatg

SEQ ID NO: 916247 - DNA, 33 bp, Homo sapien
tgtagtatattttggccatattcaaaggagata

SEQ ID NO: 916248 - DNA, 33 bp, Homo sapien
tgtagtatattttggctatattcaaaggagata

SEQ ID NO: 916249 - DNA, 33 bp, Homo sapien
tcttgagccactaataaattgtcatgtaatatg

SEQ ID NO: 916250 - DNA, 33 bp, Homo sapien
tcttgagccactaatagattgtcatgtaatatg

SEQ ID NO: 916251 - DNA, 33 bp, Homo sapien
ctgagtccctgaaactcacagtggtatgtctct

SEQ ID NO: 916252 - DNA, 33 bp, Homo sapien
ctgagtccctgaaacttacagtggtatgtctct

SEQ ID NO: 916253 - DNA, 33 bp, Homo sapien
tcaatggataataacacctaggacttcaatgaa

SEQ ID NO: 916254 - DNA, 33 bp, Homo sapien
tcaatggataataacagctaggacttcaatgaa

SEQ ID NO: 916255 - DNA, 33 bp, Homo sapien
tgcataaacagaaaaaccttcatgactaattca

SEQ ID NO: 916256 - DNA, 33 bp, Homo sapien
tgcataaacagaaaaatcttcatgactaattca

SEQ ID NO: 916257 - DNA, 33 bp, Homo sapien
aggttttgatctggtaacctacaggccagaatc

SEQ ID NO: 916258 - DNA, 33 bp, Homo sapien
aggttttgatctggtagcctacaggccagaatc

SEQ ID NO: 916259 - DNA, 33 bp, Homo sapien
catgtcctttcttacacgaggaactcagtgagc

SEQ ID NO: 916260 - DNA, 33 bp, Homo sapien
catgtcctttcttacatgaggaactcagtgagc

SEQ ID NO: 916261 - DNA, 33 bp, Homo sapien
ctcaaagtatactgaaaaaaatacagatagtgt

SEQ ID NO: 916262 - DNA, 33 bp, Homo sapien
ctcaaagtatactgaagaaaatacagatagtgt

SEQ ID NO: 916263 - DNA, 33 bp, Homo sapien
tcaaccagtgttcactgaaaaccaacataaaaa

SEQ ID NO: 916264 - DNA, 33 bp, Homo sapien
tcaaccagtgttcacttaaaaccaacataaaaa

SEQ ID NO: 916265 - DNA, 33 bp, Homo sapien
catttcagttacccataaaccgtggttcaaaaa

SEQ ID NO: 916266 - DNA, 33 bp, Homo sapien
catttcagttacccatcaaccgtggttcaaaaa

SEQ ID NO: 916267 - DNA, 33 bp, Homo sapien
actttgtactacaagaccaggacctcacaacat

SEQ ID NO: 916268 - DNA, 33 bp, Homo sapien
actttgtactacaagatcaggacctcacaacat

SEQ ID NO: 916269 - DNA, 33 bp, Homo sapien
caaagttggacatttgaaagagatcctcttcat

SEQ ID NO: 916270 - DNA, 33 bp, Homo sapien
caaagttggacatttggaagagatcctcttcat

SEQ ID NO: 916271 - DNA, 33 bp, Homo sapien
gaatttctttcattgacagatggtctagaattg

SEQ ID NO: 916272 - DNA, 33 bp, Homo sapien
gaatttctttcattgatagatggtctagaattg

SEQ ID NO: 916273 - DNA, 33 bp, Homo sapien
ggtacactgaacttaccatacttacagaagtat

SEQ ID NO: 916274 - DNA, 33 bp, Homo sapien
ggtacactgaacttactatacttacagaagtat

SEQ ID NO: 916275 - DNA, 33 bp, Homo sapien
caacccatttttcttacgatgatttaggagaac

SEQ ID NO: 916276 - DNA, 33 bp, Homo sapien
caacccatttttcttatgatgatttaggagaac

SEQ ID NO: 916277 - DNA, 33 bp, Homo sapien
ctcaggagtcacttcactctcaaattgccagtt

SEQ ID NO: 916278 - DNA, 33 bp, Homo sapien
ctcaggagtcacttcattctcaaattgccagtt

SEQ ID NO: 916279 - DNA, 33 bp, Homo sapien
agaatagcctagaaaaaattgagatgaggtaag

SEQ ID NO: 916280 - DNA, 33 bp, Homo sapien
agaatagcctagaaaagattgagatgaggtaag

SEQ ID NO: 916281 - DNA, 33 bp, Homo sapien
ttagttttgattctgacggtagatttgggagta

SEQ ID NO: 916282 - DNA, 33 bp, Homo sapien
ttagttttgattctgatggtagatttgggagta

SEQ ID NO: 916283 - DNA, 33 bp, Homo sapien
tgcatatattcggcaaagtagaaaaaaacgatt

SEQ ID NO: 916284 - DNA, 33 bp, Homo sapien
tgcatatattcggcaaggtagaaaaaaacgatt

SEQ ID NO: 916285 - DNA, 33 bp, Homo sapien
agtgatataaactccccgatttaatgaaagaac

SEQ ID NO: 916286 - DNA, 33 bp, Homo sapien
agtgatataaactccctgatttaatgaaagaac

SEQ ID NO: 916287 - DNA, 33 bp, Homo sapien
tatgatttaaactccacgttcacattctttcca

SEQ ID NO: 916288 - DNA, 33 bp, Homo sapien
tatgatttaaactccaggttcacattctttcca

SEQ ID NO: 916289 - DNA, 33 bp, Homo sapien
gttgacacagtttttgaatagataggtttagat

SEQ ID NO: 916290 - DNA, 33 bp, Homo sapien
gttgacacagtttttggatagataggtttagat

SEQ ID NO: 916291 - DNA, 33 bp, Homo sapien
ccacactaaagagatcaagatgcagaagcagcc

SEQ ID NO: 916292 - DNA, 33 bp, Homo sapien
ccacactaaagagatcgagatgcagaagcagcc

SEQ ID NO: 916293 - DNA, 33 bp, Homo sapien
atagggtaactttagcagcagacacagctttgc

SEQ ID NO: 916294 - DNA, 33 bp, Homo sapien
atagggtaactttagcggcagacacagctttgc

SEQ ID NO: 916295 - DNA, 33 bp, Homo sapien
tatcctcagctgaaaaaatgtcaggattctgga

SEQ ID NO: 916296 - DNA, 33 bp, Homo sapien
tatcctcagctgaaaagatgtcaggattctgga

SEQ ID NO: 916297 - DNA, 33 bp, Homo sapien
tgagtgaaagcagtatcagaagttctctttttg

SEQ ID NO: 916298 - DNA, 33 bp, Homo sapien
tgagtgaaagcagtatgagaagttctctttttg

SEQ ID NO: 916299 - DNA, 33 bp, Homo sapien
aaatgatgccttttcaaacctaactccataaac

SEQ ID NO: 916300 - DNA, 33 bp, Homo sapien
aaatgatgccttttcatacctaactccataaac

SEQ ID NO: 916301 - DNA, 33 bp, Homo sapien
ttattttgcactctcacggaaagtaaacttatg

SEQ ID NO: 916302 - DNA, 33 bp, Homo sapien
ttattttgcactctcatggaaagtaaacttatg

SEQ ID NO: 916303 - DNA, 33 bp, Homo sapien
gcaacccaaacatctacgtgaagaggatcacct

SEQ ID NO: 916304 - DNA, 33 bp, Homo sapien
gcaacccaaacatctatgtgaagaggatcacct

SEQ ID NO: 916305 - DNA, 33 bp, Homo sapien
cctaaaatcacagttccaagaatgtaacccttg

SEQ ID NO: 916306 - DNA, 33 bp, Homo sapien
cctaaaatcacagttcgaagaatgtaacccttg

SEQ ID NO: 916307 - DNA, 33 bp, Homo sapien
caacttactgctcacgaagaaagatcagtgtca

SEQ ID NO: 916308 - DNA, 33 bp, Homo sapien
caacttactgctcacgtagaaagatcagtgtca

SEQ ID NO: 916309 - DNA, 33 bp, Homo sapien
acttaaataccacttacgcactgttcagttact

SEQ ID NO: 916310 - DNA, 33 bp, Homo sapien
acttaaataccacttatgcactgttcagttact

SEQ ID NO: 916311 - DNA, 33 bp, Homo sapien
ttttaacaatagaggaagctcagtaaagagtat

SEQ ID NO: 916312 - DNA, 33 bp, Homo sapien
ttttaacaatagaggatgctcagtaaagagtat

SEQ ID NO: 916313 - DNA, 33 bp, Homo sapien
cactaccaggccatcaatcaaataaattgtgtg

SEQ ID NO: 916314 - DNA, 33 bp, Homo sapien
cactaccaggccatcagtcaaataaattgtgtg

SEQ ID NO: 916315 - DNA, 33 bp, Homo sapien
tctacacacattcaggacatgaatcgaggctat

SEQ ID NO: 916316 - DNA, 33 bp, Homo sapien
tctacacacattcaggtcatgaatcgaggctat

SEQ ID NO: 916317 - DNA, 33 bp, Homo sapien
cctcaacactttcatacgtaactctttctctgt

SEQ ID NO: 916318 - DNA, 33 bp, Homo sapien
cctcaacactttcatatgtaactctttctctgt

SEQ ID NO: 916319 - DNA, 33 bp, Homo sapien
tgctgtataagcagaaattctatccacagtttc

SEQ ID NO: 916320 - DNA, 33 bp, Homo sapien
tgctgtataagcagaagttctatccacagtttc

SEQ ID NO: 916321 - DNA, 33 bp, Homo sapien
aggtgatttgaatccaggagtcataagcatttt

SEQ ID NO: 916322 - DNA, 33 bp, Homo sapien
aggtgatttgaatccatgagtcataagcatttt

SEQ ID NO: 916323 - DNA, 33 bp, Homo sapien
aaaggaactagcacaactgggcatctgaatgaa

SEQ ID NO: 916324 - DNA, 33 bp, Homo sapien
aaaggaactagcacaattgggcatctgaatgaa

SEQ ID NO: 916325 - DNA, 33 bp, Homo sapien
gtcttcagcaggatacagaaaatattaaccata

SEQ ID NO: 916326 - DNA, 33 bp, Homo sapien
gtcttcagcaggataccgaaaatattaaccata

SEQ ID NO: 916327 - DNA, 33 bp, Homo sapien
aaagttaatcagtctacggttgtggatcccagg

SEQ ID NO: 916328 - DNA, 33 bp, Homo sapien
aaagttaatcagtctatggttgtggatcccagg

SEQ ID NO: 916329 - DNA, 33 bp, Homo sapien
ccatatgtctggtgagacctcagaatcatggtg

SEQ ID NO: 916330 - DNA, 33 bp, Homo sapien
ccatatgtctggtgaggcctcagaatcatggtg

SEQ ID NO: 916331 - DNA, 33 bp, Homo sapien
tgcacaaatgtcatcaggtcctcattgtgcaaa

SEQ ID NO: 916332 - DNA, 33 bp, Homo sapien
tgcacaaatgtcatcatgtcctcattgtgcaaa

SEQ ID NO: 916333 - DNA, 33 bp, Homo sapien
gccatctttaactcctaactacataaaggacac

SEQ ID NO: 916334 - DNA, 33 bp, Homo sapien
gccatctttaactccttactacataaaggacac

SEQ ID NO: 916335 - DNA, 33 bp, Homo sapien
gagagggcaagctctgaagtcagactgttaatg

SEQ ID NO: 916336 - DNA, 33 bp, Homo sapien
gagagggcaagctctggagtcagactgttaatg

SEQ ID NO: 916337 - DNA, 33 bp, Homo sapien
ctgaagtacatagaaaactccattatacattga

SEQ ID NO: 916338 - DNA, 33 bp, Homo sapien
ctgaagtacatagaaatctccattatacattga

SEQ ID NO: 916339 - DNA, 33 bp, Homo sapien
tggatatttttggaagaattcaagatattaaca

SEQ ID NO: 916340 - DNA, 33 bp, Homo sapien
tggatatttttggaagtattcaagatattaaca

SEQ ID NO: 916341 - DNA, 33 bp, Homo sapien
caattctctaatcttaacaatggtaatgatggt

SEQ ID NO: 916342 - DNA, 33 bp, Homo sapien
caattctctaatcttagcaatggtaatgatggt

SEQ ID NO: 916343 - DNA, 33 bp, Homo sapien
ttcctgtgacattttacctgactctgagaatga

SEQ ID NO: 916344 - DNA, 33 bp, Homo sapien
ttcctgtgacattttatctgactctgagaatga

SEQ ID NO: 916345 - DNA, 33 bp, Homo sapien
atcactggattccttgcagtcactccccagcat

SEQ ID NO: 916346 - DNA, 33 bp, Homo sapien
atcactggattccttgtagtcactccccagcat

SEQ ID NO: 916347 - DNA, 33 bp, Homo sapien
ggggaagtcttatgacagcctgggacagttttg

SEQ ID NO: 916348 - DNA, 33 bp, Homo sapien
ggggaagtcttatgacggcctgggacagttttg

SEQ ID NO: 916349 - DNA, 33 bp, Homo sapien
gcagaccttggtcaaactgaaacatttcacagg

SEQ ID NO: 916350 - DNA, 33 bp, Homo sapien
gcagaccttggtcaaattgaaacatttcacagg

SEQ ID NO: 916351 - DNA, 33 bp, Homo sapien
gattttaaaatgctaaagcaggtgtgagtatgt

SEQ ID NO: 916352 - DNA, 33 bp, Homo sapien
gattttaaaatgctaatgcaggtgtgagtatgt

SEQ ID NO: 916353 - DNA, 33 bp, Homo sapien
ctagacaggacagtaaacgagggagaaatttgg

SEQ ID NO: 916354 - DNA, 33 bp, Homo sapien
ctagacaggacagtaagcgagggagaaatttgg

SEQ ID NO: 916355 - DNA, 33 bp, Homo sapien
atggattagtttgttaaggagaattatgtgtat

SEQ ID NO: 916356 - DNA, 33 bp, Homo sapien
atggattagtttgttagggagaattatgtgtat

SEQ ID NO: 916357 - DNA, 33 bp, Homo sapien
tcattattctgggataaagtctaatttgccatt

SEQ ID NO: 916358 - DNA, 33 bp, Homo sapien
tcattattctgggatagagtctaatttgccatt

SEQ ID NO: 916359 - DNA, 33 bp, Homo sapien
acttgccacagagataatagcattagagttaaa

SEQ ID NO: 916360 - DNA, 33 bp, Homo sapien
acttgccacagagatagtagcattagagttaaa

SEQ ID NO: 916361 - DNA, 33 bp, Homo sapien
atgactttcaaagacaactaatgaacaagacaa

SEQ ID NO: 916362 - DNA, 33 bp, Homo sapien
atgactttcaaagacagctaatgaacaagacaa

SEQ ID NO: 916363 - DNA, 33 bp, Homo sapien
taatatgaagaaagcagagaggcatatataatg

SEQ ID NO: 916364 - DNA, 33 bp, Homo sapien
taatatgaagaaagcatagaggcatatataatg

SEQ ID NO: 916365 - DNA, 33 bp, Homo sapien
ggggaaaatgggtagacggtaacacttttaatc

SEQ ID NO: 916366 - DNA, 33 bp, Homo sapien
ggggaaaatgggtagatggtaacacttttaatc

SEQ ID NO: 916367 - DNA, 33 bp, Homo sapien
acaaaactcaggcaccagagatactggaggcca

SEQ ID NO: 916368 - DNA, 33 bp, Homo sapien
acaaaactcaggcaccggagatactggaggcca

SEQ ID NO: 916369 - DNA, 33 bp, Homo sapien; identical to SEQ ID NO: 916367

SEQ ID NO: 916370 - DNA, 33 bp, Homo sapien; identical to SEQ ID NO: 916368

SEQ ID NO: 916371 - DNA, 33 bp, Homo sapien
ttaaagtttatcttacccatggtgaatagtctt

SEQ ID NO: 916372 - DNA, 33 bp, Homo sapien
ttaaagtttatcttactcatggtgaatagtctt

SEQ ID NO: 916373 - DNA, 33 bp, Homo sapien
taagtcattttccttcaaagactattcaccatg

SEQ ID NO: 916374 - DNA, 33 bp, Homo sapien
taagtcattttccttccaagactattcaccatg

SEQ ID NO: 916375 - DNA, 33 bp, Homo sapien
ttgtatatcacatagaacagtgttttgcacata

SEQ ID NO: 916376 - DNA, 33 bp, Homo sapien
ttgtatatcacatagatcagtgttttgcacata

SEQ ID NO: 916377 - DNA, 33 bp, Homo sapien
tgtcagccctcagtagcaatgcaagcagacagc

SEQ ID NO: 916378 - DNA, 33 bp, Homo sapien
tgtcagccctcagtaggaatgcaagcagacagc

SEQ ID NO: 916379 - DNA, 33 bp, Homo sapien
gatactggcagttaacccatcagaaaaggcaat

SEQ ID NO: 916380 - DNA, 33 bp, Homo sapien
gatactggcagttaactcatcagaaaaggcaat

SEQ ID NO: 916381 - DNA, 33 bp, Homo sapien
aatggtatgtgtttcaaaatcatctggtccaac

SEQ ID NO: 916382 - DNA, 33 bp, Homo sapien
aatggtatgtgtttcagaatcatctggtccaac

SEQ ID NO: 916383 - DNA, 33 bp, Homo sapien
aatatgactttctcataaactattgtagcagaa

SEQ ID NO: 916384 - DNA, 33 bp, Homo sapien
aatatgactttctcatcaactattgtagcagaa

SEQ ID NO: 916385 - DNA, 33 bp, Homo sapien
caaagatgtgatagcaagagttaattacactct

SEQ ID NO: 916386 - DNA, 33 bp, Homo sapien
caaagatgtgatagcaggagttaattacactct

SEQ ID NO: 916387 - DNA, 33 bp, Homo sapien
cagagtgcaaaataaaaaaaagcatagctgctc

SEQ ID NO: 916388 - DNA, 33 bp, Homo sapien
cagagtgcaaaataaacaaaagcatagctgctc

SEQ ID NO: 916389 - DNA, 33 bp, Homo sapien
aaccccaatatcaagacgttctgtgtttttaac

SEQ ID NO: 916390 - DNA, 33 bp, Homo sapien
aaccccaatatcaagatgttctgtgtttttaac

SEQ ID NO: 916391 - DNA, 33 bp, Homo sapien
atggttccgtcacaacaaaaagaggtaaaggac

SEQ ID NO: 916392 - DNA, 33 bp, Homo sapien
atggttccgtcacaacgaaaagaggtaaaggac

SEQ ID NO: 916393 - DNA, 33 bp, Homo sapien
cctcttcttcgtatgaacttaagtcaactgaat

SEQ ID NO: 916394 - DNA, 33 bp, Homo sapien
cctcttcttcgtatgaccttaagtcaactgaat

SEQ ID NO: 916395 - DNA, 33 bp, Homo sapien
actggagggacatttccaagtgagtttcattga

SEQ ID NO: 916396 - DNA, 33 bp, Homo sapien
actggagggacatttctaagtgagtttcattga

SEQ ID NO: 916397 - DNA, 33 bp, Homo sapien
atatatcttcctgtcacgtgtagcttcacaagg

SEQ ID NO: 916398 - DNA, 33 bp, Homo sapien
atatatcttcctgtcatgtgtagcttcacaagg

SEQ ID NO: 916399 - DNA, 33 bp, Homo sapien
tgactcacacctgtcgaaaagagcttaccacag

SEQ ID NO: 916400 - DNA, 33 bp, Homo sapien
tgactcacacctgtcggaaagagcttaccacag

SEQ ID NO: 916401 - DNA, 33 bp, Homo sapien
aatattttgactgtaaagctaatagttttgcat

SEQ ID NO: 916402 - DNA, 33 bp, Homo sapien
aatattttgactgtaaggctaatagttttgcat

SEQ ID NO: 916403 - DNA, 33 bp, Homo sapien; identical to SEQ ID NO: 916401

SEQ ID NO: 916404 - DNA, 33 bp, Homo sapien; identical to SEQ ID NO: 916402

SEQ ID NO: 916405 - DNA, 33 bp, Homo sapien
ttgttattgtgatgacacttttactttataccc

SEQ ID NO: 916406 - DNA, 33 bp, Homo sapien
ttgttattgtgatgacgcttttactttataccc

SEQ ID NO: 916407 - DNA, 33 bp, Homo sapien
acacaattgttaccaacgttaaactctctacgt

SEQ ID NO: 916408 - DNA, 33 bp, Homo sapien
acacaattgttaccaatgttaaactctctacgt

SEQ ID NO: 916409 - DNA, 33 bp, Homo sapien
tggaaagtaagtcttacattctcacactcacaa

SEQ ID NO: 916410 - DNA, 33 bp, Homo sapien
tggaaagtaagtcttatattctcacactcacaa

SEQ ID NO: 916411 - DNA, 33 bp, Homo sapien
ttacaaaaataggcaaaaagccaccttcggcct

SEQ ID NO: 916412 - DNA, 33 bp, Homo sapien
ttacaaaaataggcaacaagccaccttcggcct

SEQ ID NO: 916413 - DNA, 33 bp, Homo sapien
gctgtgctcaattaaccgggaaatgccgagatg

SEQ ID NO: 916414 - DNA, 33 bp, Homo sapien
gctgtgctcaattaactgggaaatgccgagatg

SEQ ID NO: 916415 - DNA, 33 bp, Homo sapien
tgacggtgtgtcaagacaggaagtgcaggtgct

SEQ ID NO: 916416 - DNA, 33 bp, Homo sapien
tgacggtgtgtcaagagaggaagtgcaggtgct

SEQ ID NO: 916417 - DNA, 33 bp, Homo sapien
tcacatctgagagggaacctattagaccacatt

SEQ ID NO: 916418 - DNA, 33 bp, Homo sapien
tcacatctgagagggagcctattagaccacatt

SEQ ID NO: 916419 - DNA, 33 bp, Homo sapien
ggaatgtgctgactcactccttggctgtgaccc

SEQ ID NO: 916420 - DNA, 33 bp, Homo sapien
ggaatgtgctgactcattccttggctgtgaccc

SEQ ID NO: 916421 - DNA, 33 bp, Homo sapien
tgtggactaatttgcccggaatctctcatttaa

SEQ ID NO: 916422 - DNA, 33 bp, Homo sapien
tgtggactaatttgcctggaatctctcatttaa

SEQ ID NO: 916423 - DNA, 33 bp, Homo sapien
caatctgagatgggaacggataaaaagaagaaa

SEQ ID NO: 916424 - DNA, 33 bp, Homo sapien
caatctgagatgggaatggataaaaagaagaaa

SEQ ID NO: 916425 - DNA, 33 bp, Homo sapien
aggtgcgacagacctcagaacgttaatggaggc

SEQ ID NO: 916426 - DNA, 33 bp, Homo sapien
aggtgcgacagacctcggaacgttaatggaggc

SEQ ID NO: 916427 - DNA, 33 bp, Homo sapien
ctaagagagtacagttgaaaaattccattcatt

SEQ ID NO: 916428 - DNA, 33 bp, Homo sapien
ctaagagagtacagtttaaaaattccattcatt

SEQ ID NO: 916429 - DNA, 33 bp, Homo sapien
tggaaaaactgggttaacttttgtgctagatta

SEQ ID NO: 916430 - DNA, 33 bp, Homo sapien
tggaaaaactgggttagcttttgtgctagatta

SEQ ID NO: 916431 - DNA, 33 bp, Homo sapien
aagctgtagcatttaaacaactatgcacagaga

SEQ ID NO: 916432 - DNA, 33 bp, Homo sapien
aagctgtagcatttaaccaactatgcacagaga

SEQ ID NO: 916433 - DNA, 33 bp, Homo sapien
aagcttgcctcatagaacttgtaagatagtttt

SEQ ID NO: 916434 - DNA, 33 bp, Homo sapien
aagcttgcctcatagaccttgtaagatagtttt

SEQ ID NO: 916435 - DNA, 33 bp, Homo sapien
tattttccaagttagaacagatactgagcgtaa

SEQ ID NO: 916436 - DNA, 33 bp, Homo sapien
tattttccaagttagagcagatactgagcgtaa

SEQ ID NO: 916437 - DNA, 33 bp, Homo sapien
ttctggaatttcttctcaatagaatcatatggt

SEQ ID NO: 916438 - DNA, 33 bp, Homo sapien
ttctggaatttcttctgaatagaatcatatggt

SEQ ID NO: 916439 - DNA, 33 bp, Homo sapien
aactataataagatacacctcatgcctgctata

SEQ ID NO: 916440 - DNA, 33 bp, Homo sapien
aactataataagatacccctcatgcctgctata

SEQ ID NO: 916441 - DNA, 33 bp, Homo sapien
ggtcttataatcagctaaaatgccatctcttgc

SEQ ID NO: 916442 - DNA, 33 bp, Homo sapien
ggtcttataatcagcttaaatgccatctcttgc

SEQ ID NO: 916443 - DNA, 33 bp, Homo sapien
aaaaagccaaatttgcaagggttgcaagtacca

SEQ ID NO: 916444 - DNA, 33 bp, Homo sapien
aaaaagccaaatttgctagggttgcaagtacca

SEQ ID NO: 916445 - DNA, 33 bp, Homo sapien
aacaatgttgacttcagaattgagaacatactc

SEQ ID NO: 916446 - DNA, 33 bp, Homo sapien
aacaatgttgacttcataattgagaacatactc

SEQ ID NO: 916447 - DNA, 33 bp, Homo sapien
aagaagtgtgaaaatacagtgctataaacatta

SEQ ID NO: 916448 - DNA, 33 bp, Homo sapien
aagaagtgtgaaaatatagtgctataaacatta

SEQ ID NO: 916449 - DNA, 33 bp, Homo sapien
caaatatatttcgttcaagtcaaggaaaccatt

SEQ ID NO: 916450 - DNA, 33 bp, Homo sapien
caaatatatttcgttcgagtcaaggaaaccatt

SEQ ID NO: 916451 - DNA, 33 bp, Homo sapien
aggaatgtttagaaacaggagccataattgaat

SEQ ID NO: 916452 - DNA, 33 bp, Homo sapien
aggaatgtttagaaacgggagccataattgaat

SEQ ID NO: 916453 - DNA, 33 bp, Homo sapien
caagagcgctatcttcgaaagtaatatcctccc

SEQ ID NO: 916454 - DNA, 33 bp, Homo sapien
caagagcgctatcttctaaagtaatatcctccc

SEQ ID NO: 916455 - DNA, 33 bp, Homo sapien
ttttccatcaatacataaccctaatctttacta

SEQ ID NO: 916456 - DNA, 33 bp, Homo sapien
ttttccatcaatacattaccctaatctttacta

SEQ ID NO: 916457 - DNA, 33 bp, Homo sapien
ccttggacaaaaggagaagtatagatcaattgg

SEQ ID NO: 916458 - DNA, 33 bp, Homo sapien
ccttggacaaaaggagcagtatagatcaattgg

SEQ ID NO: 916459 - DNA, 33 bp, Homo sapien
gctcagtttagtcaaccaaagcatactctactc

SEQ ID NO: 916460 - DNA, 33 bp, Homo sapien
gctcagtttagtcaacgaaagcatactctactc

SEQ ID NO: 916461 - DNA, 33 bp, Homo sapien
gacttttgtgttctgacgttacttttgacagcc

SEQ ID NO: 916462 - DNA, 33 bp, Homo sapien
gacttttgtgttctgatgttacttttgacagcc

SEQ ID NO: 916463 - DNA, 33 bp, Homo sapien
tgtgtaggctcaacaacgtcaatgaggactcaa

SEQ ID NO: 916464 - DNA, 33 bp, Homo sapien
tgtgtaggctcaacaatgtcaatgaggactcaa

SEQ ID NO: 916465 - DNA, 33 bp, Homo sapien
cctactcattttataaatctgtcaatgaatcat

SEQ ID NO: 916466 - DNA, 33 bp, Homo sapien
cctactcattttataagtctgtcaatgaatcat

SEQ ID NO: 916467 - DNA, 33 bp, Homo sapien
tcactccttaccgtgaacaagagtcgacatcct

SEQ ID NO: 916468 - DNA, 33 bp, Homo sapien
tcactccttaccgtgagcaagagtcgacatcct

SEQ ID NO: 916469 - DNA, 33 bp, Homo sapien
ccaaatgccatcaaaacaagccaacttccagtt

SEQ ID NO: 916470 - DNA, 33 bp, Homo sapien
ccaaatgccatcaaaagaagccaacttccagtt

SEQ ID NO: 916471 - DNA, 33 bp, Homo sapien
ttacacatttctgatacgttaagttttaatctc

SEQ ID NO: 916472 - DNA, 33 bp, Homo sapien
ttacacatttctgataggttaagttttaatctc

SEQ ID NO: 916473 - DNA, 33 bp, Homo sapien
aatagataccggcaaggctgtggagaaatagga

SEQ ID NO: 916474 - DNA, 33 bp, Homo sapien
aatagataccggcaagtctgtggagaaatagga

SEQ ID NO: 916475 - DNA, 33 bp, Homo sapien
ttatgcggccaagaaacatgtgaataaaagctc

SEQ ID NO: 916476 - DNA, 33 bp, Homo sapien
ttatgcggccaagaaatatgtgaataaaagctc

SEQ ID NO: 916477 - DNA, 33 bp, Homo sapien
attcaacatctcttcacgttaaaaattctctat

SEQ ID NO: 916478 - DNA, 33 bp, Homo sapien
attcaacatctcttcatgttaaaaattctctat

SEQ ID NO: 916479 - DNA, 33 bp, Homo sapien
tgatacaaagtgagaaaattggaaggaaacagg

SEQ ID NO: 916480 - DNA, 33 bp, Homo sapien
tgatacaaagtgagaatattggaaggaaacagg

SEQ ID NO: 916481 - DNA, 33 bp, Homo sapien
tgatcccttcctttccagctctagttaagaaca

SEQ ID NO: 916482 - DNA, 33 bp, Homo sapien
tgatcccttcctttccggctctagttaagaaca

SEQ ID NO: 916483 - DNA, 33 bp, Homo sapien
tatctaagttatcttaagcccgtgtagattgcc

SEQ ID NO: 916484 - DNA, 33 bp, Homo sapien
tatctaagttatcttacgcccgtgtagattgcc

SEQ ID NO: 916485 - DNA, 33 bp, Homo sapien
ttatcatgtttccaaaaagaaattagtgtatgc

SEQ ID NO: 916486 - DNA, 33 bp, Homo sapien
ttatcatgtttccaaagagaaattagtgtatgc

SEQ ID NO: 916487 - DNA, 33 bp, Homo sapien
aaggcagagccttcagaacctagtaacctctta

SEQ ID NO: 916488 - DNA, 33 bp, Homo sapien
aaggcagagccttcaggacctagtaacctctta

SEQ ID NO: 916489 - DNA, 33 bp, Homo sapien
ttgctattatagcagcaaaaaaaggactaagag

SEQ ID NO: 916490 - DNA, 33 bp, Homo sapien
ttgctattatagcagcgaaaaaaggactaagag

SEQ ID NO: 916491 - DNA, 33 bp, Homo sapien
attgaagggtggaaaacaaacaacagtcatttt

SEQ ID NO: 916492 - DNA, 33 bp, Homo sapien
attgaagggtggaaaagaaacaacagtcatttt

SEQ ID NO: 916493 - DNA, 33 bp, Homo sapien
cagcactttgatgttacgaaaaaccatggtctt

SEQ ID NO: 916494 - DNA, 33 bp, Homo sapien
cagcactttgatgttatgaaaaaccatggtctt

SEQ ID NO: 916495 - DNA, 33 bp, Homo sapien
ctaacctggaagacaacgaactatttttctaat

SEQ ID NO: 916496 - DNA, 33 bp, Homo sapien
ctaacctggaagacaatgaactatttttctaat

SEQ ID NO: 916497 - DNA, 33 bp, Homo sapien
acatgatctgtaattcacatcaccaggagagaa

SEQ ID NO: 916498 - DNA, 33 bp, Homo sapien
acatgatctgtaattcgcatcaccaggagagaa

SEQ ID NO: 916499 - DNA, 33 bp, Homo sapien
atcactatgtcactcaataatttaaaattttat

SEQ ID NO: 916500 - DNA, 33 bp, Homo sapien
atcactatgtcactcagtaatttaaaattttat

SEQ ID NO: 916501 - DNA, 33 bp, Homo sapien
ttcagttgtgtcaaaaattcagaaatttgaaat

SEQ ID NO: 916502 - DNA, 33 bp, Homo sapien
ttcagttgtgtcaaaagttcagaaatttgaaat

SEQ ID NO: 916503 - DNA, 33 bp, Homo sapien
cctcaacgtaccaatgacactttttgattgtta

SEQ ID NO: 916504 - DNA, 33 bp, Homo sapien
cctcaacgtaccaatggcactttttgattgtta

SEQ ID NO: 916505 - DNA, 33 bp, Homo sapien
gagtgcagtggagccaccataattcactgtaac

SEQ ID NO: 916506 - DNA, 33 bp, Homo sapien
gagtgcagtggagccatcataattcactgtaac

SEQ ID NO: 916507 - DNA, 33 bp, Homo sapien
ccttaatgttcaaaccacaaaatttatacctga

SEQ ID NO: 916508 - DNA, 33 bp, Homo sapien
ccttaatgttcaaaccgcaaaatttatacctga

SEQ ID NO: 916509 - DNA, 33 bp, Homo sapien
tgcttgctgttctcaccgtagagccagccttcc

SEQ ID NO: 916510 - DNA, 33 bp, Homo sapien
tgcttgctgttctcactgtagagccagccttcc

SEQ ID NO: 916511 - DNA, 33 bp, Homo sapien
cagattagattacccactatattgagttaatac

SEQ ID NO: 916512 - DNA, 33 bp, Homo sapien
cagattagattacccagtatattgagttaatac

SEQ ID NO: 916513 - DNA, 33 bp, Homo sapien
tcataaatcatagtgaagtaaaagcaggtttta

SEQ ID NO: 916514 - DNA, 33 bp, Homo sapien
tcataaatcatagtgatgtaaaagcaggtttta

SEQ ID NO: 916515 - DNA, 33 bp, Homo sapien
aaaactatttattttacgtcaacctatctagcc

SEQ ID NO: 916516 - DNA, 33 bp, Homo sapien
aaaactatttattttatgtcaacctatctagcc

SEQ ID NO: 916517 - DNA, 33 bp, Homo sapien
tacctcattttattccaatttcatcaggtgtga

SEQ ID NO: 916518 - DNA, 33 bp, Homo sapien
tacctcattttattccgatttcatcaggtgtga

SEQ ID NO: 916519 - DNA, 33 bp, Homo sapien
cttacaaagaatcctaaaacttatgtattgata

SEQ ID NO: 916520 - DNA, 33 bp, Homo sapien
cttacaaagaatcctagaacttatgtattgata

SEQ ID NO: 916521 - DNA, 33 bp, Homo sapien
tctatttctaactccactaaaatgcagactaaa

SEQ ID NO: 916522 - DNA, 33 bp, Homo sapien
tctatttctaactccagtaaaatgcagactaaa

SEQ ID NO: 916523 - DNA, 33 bp, Homo sapien
caaagagatccagtatcaaaaaaggtaaaagga

SEQ ID NO: 916524 - DNA, 33 bp, Homo sapien
caaagagatccagtatgaaaaaaggtaaaagga

SEQ ID NO: 916525 - DNA, 33 bp, Homo sapien
acacctgctagatagacaagtgagtatctctgg

SEQ ID NO: 916526 - DNA, 33 bp, Homo sapien
acacctgctagatagataagtgagtatctctgg

SEQ ID NO: 916527 - DNA, 33 bp, Homo sapien
gattttgtggtcaagacaagctatatagaaatt

SEQ ID NO: 916528 - DNA, 33 bp, Homo sapien
gattttgtggtcaagataagctatatagaaatt

SEQ ID NO: 916529 - DNA, 33 bp, Homo sapien
actccttgaagatcaaaaataccagtcactagt

SEQ ID NO: 916530 - DNA, 33 bp, Homo sapien
actccttgaagatcaataataccagtcactagt

SEQ ID NO: 916531 - DNA, 33 bp, Homo sapien
gtttcccattttccccaataaagatttacaaat

SEQ ID NO: 916532 - DNA, 33 bp, Homo sapien
gtttcccattttcccctataaagatttacaaat

SEQ ID NO: 916533 - DNA, 33 bp, Homo sapien
tcaagcattggtaacacgaatccttgtatatgg

SEQ ID NO: 916534 - DNA, 33 bp, Homo sapien
tcaagcattggtaacatgaatccttgtatatgg

SEQ ID NO: 916535 - DNA, 33 bp, Homo sapien
agtatgttgagggtaactgactaatgacatatg

SEQ ID NO: 916536 - DNA, 33 bp, Homo sapien
agtatgttgagggtaattgactaatgacatatg

SEQ ID NO: 916537 - DNA, 33 bp, Homo sapien
ctacttcaaactattacgtctttgttcatgtta

SEQ ID NO: 916538 - DNA, 33 bp, Homo sapien
ctacttcaaactattatgtctttgttcatgtta

SEQ ID NO: 916539 - DNA, 33 bp, Homo sapien
tttcaggcattctctcaatccaaaatcctactt

SEQ ID NO: 916540 - DNA, 33 bp, Homo sapien
tttcaggcattctctccatccaaaatcctactt

SEQ ID NO: 916541 - DNA, 33 bp, Homo sapien
tcttatatgttcagaccatgtgtgggattatgg

SEQ ID NO: 916542 - DNA, 33 bp, Homo sapien
tcttatatgttcagactatgtgtgggattatgg

SEQ ID NO: 916543 - DNA, 33 bp, Homo sapien
gttaatttgtgaattacgctgaattatacctct

SEQ ID NO: 916544 - DNA, 33 bp, Homo sapien
gttaatttgtgaattatgctgaattatacctct

SEQ ID NO: 916545 - DNA, 33 bp, Homo sapien
ttgcttttgcaaaatacggttcattatctttct

SEQ ID NO: 916546 - DNA, 33 bp, Homo sapien
ttgcttttgcaaaatatggttcattatctttct

SEQ ID NO: 916547 - DNA, 33 bp, Homo sapien
tttgaacagatttagaaccagactgatgctccc

SEQ ID NO: 916548 - DNA, 33 bp, Homo sapien
tttgaacagatttagacccagactgatgctccc

SEQ ID NO: 916549 - DNA, 33 bp, Homo sapien
gcagctgtgatctcccacacaatcgatcctccc

SEQ ID NO: 916550 - DNA, 33 bp, Homo sapien
gcagctgtgatctcccgcacaatcgatcctccc

SEQ ID NO: 916551 - DNA, 33 bp, Homo sapien
ttctgcttctaaaacaataagaatgcctgtgct

SEQ ID NO: 916552 - DNA, 33 bp, Homo sapien
ttctgcttctaaaacagtaagaatgcctgtgct

SEQ ID NO: 916553 - DNA, 33 bp, Homo sapien
tcttttcttttaactccctggctaaatatgata

SEQ ID NO: 916554 - DNA, 33 bp, Homo sapien
tcttttcttttaactctctggctaaatatgata

SEQ ID NO: 916555 - DNA, 33 bp, Homo sapien
taccttgtgttcatcaatccagaagctctccaa

SEQ ID NO: 916556 - DNA, 33 bp, Homo sapien
taccttgtgttcatcagtccagaagctctccaa

SEQ ID NO: 916557 - DNA, 33 bp, Homo sapien
atttcaatttttttagaaccataaatctacaat

SEQ ID NO: 916558 - DNA, 33 bp, Homo sapien
atttcaatttttttaggaccataaatctacaat

SEQ ID NO: 916559 - DNA, 33 bp, Homo sapien
atttgtatctattataaaagcacacactgagaa

SEQ ID NO: 916560 - DNA, 33 bp, Homo sapien
atttgtatctattatacaagcacacactgagaa

SEQ ID NO: 916561 - DNA, 33 bp, Homo sapien
gataagatgaacaattaaagaaaacatgaataa

SEQ ID NO: 916562 - DNA, 33 bp, Homo sapien
gataagatgaacaattgaagaaaacatgaataa

SEQ ID NO: 916563 - DNA, 33 bp, Homo sapien
ttctaccaccatagataaattttgcctgttata

SEQ ID NO: 916564 - DNA, 33 bp, Homo sapien
ttctaccaccatagattaattttgcctgttata

SEQ ID NO: 916565 - DNA, 33 bp, Homo sapien
aaaacgcattgttaaaacttttcaacagtacaa

SEQ ID NO: 916566 - DNA, 33 bp, Homo sapien
aaaacgcattgttaaaccttttcaacagtacaa

SEQ ID NO: 916567 - DNA, 33 bp, Homo sapien
tattcctttgtatttcacacgtcagtttaattc

SEQ ID NO: 916568 - DNA, 33 bp, Homo sapien
tattcctttgtatttcccacgtcagtttaattc

SEQ ID NO: 916569 - DNA, 33 bp, Homo sapien
gtggtttcccctaatacgttctcgtgatagtta

SEQ ID NO: 916570 - DNA, 33 bp, Homo sapien
gtggtttcccctaatatgttctcgtgatagtta

SEQ ID NO: 916571 - DNA, 33 bp, Homo sapien
tttacacaacgattataaaaatgtaagtttttg

SEQ ID NO: 916572 - DNA, 33 bp, Homo sapien
tttacacaacgattatgaaaatgtaagtttttg

SEQ ID NO: 916573 - DNA, 33 bp, Homo sapien
agaagataacagcttaagaatagatcagcaaga

SEQ ID NO: 916574 - DNA, 33 bp, Homo sapien
agaagataacagcttaggaatagatcagcaaga

SEQ ID NO: 916575 - DNA, 33 bp, Homo sapien
caagttgaaactcacaaaaggcaaaagaatatg

SEQ ID NO: 916576 - DNA, 33 bp, Homo sapien
caagttgaaactcacagaaggcaaaagaatatg

SEQ ID NO: 916577 - DNA, 33 bp, Homo sapien
gagcattccctgccaactcatttccatttcctc

SEQ ID NO: 916578 - DNA, 33 bp, Homo sapien
gagcattccctgccaagtcatttccatttcctc

SEQ ID NO: 916579 - DNA, 33 bp, Homo sapien
aaattaattgccaatacgtcatcaatatgttcg

SEQ ID NO: 916580 - DNA, 33 bp, Homo sapien
aaattaattgccaatatgtcatcaatatgttcg

SEQ ID NO: 916581 - DNA, 33 bp, Homo sapien
aaaggtggatcagctcaaagacattcaattgtg

SEQ ID NO: 916582 - DNA, 33 bp, Homo sapien
aaaggtggatcagctcgaagacattcaattgtg

SEQ ID NO: 916583 - DNA, 33 bp, Homo sapien
tgtggggtagggcaaacatgttgcactctctat

SEQ ID NO: 916584 - DNA, 33 bp, Homo sapien
tgtggggtagggcaaatatgttgcactctctat

SEQ ID NO: 916585 - DNA, 33 bp, Homo sapien
tggtactagtttttgcaatagactctaaaaata

SEQ ID NO: 916586 - DNA, 33 bp, Homo sapien
tggtactagtttttgcgatagactctaaaaata

SEQ ID NO: 916587 - DNA, 33 bp, Homo sapien
atttcataaaacagaacagaaagaacacatata

SEQ ID NO: 916588 - DNA, 33 bp, Homo sapien
atttcataaaacagaagagaaagaacacatata

SEQ ID NO: 916589 - DNA, 33 bp, Homo sapien
gcaagtgtagacagcaatgatagccccagtggt

SEQ ID NO: 916590 - DNA, 33 bp, Homo sapien
gcaagtgtagacagcagtgatagccccagtggt

SEQ ID NO: 916591 - DNA, 33 bp, Homo sapien
aattagaatgcaagtccaaattgtgatatctct

SEQ ID NO: 916592 - DNA, 33 bp, Homo sapien
aattagaatgcaagtctaaattgtgatatctct

SEQ ID NO: 916593 - DNA, 33 bp, Homo sapien
gaggggagtgaagggaaggtttttcagaaaatg

SEQ ID NO: 916594 - DNA, 33 bp, Homo sapien
gaggggagtgaagggacggtttttcagaaaatg

SEQ ID NO: 916595 - DNA, 33 bp, Homo sapien
ctaagtgtccataaacagttcactggataaagc

SEQ ID NO: 916596 - DNA, 33 bp, Homo sapien
ctaagtgtccataaacggttcactggataaagc

SEQ ID NO: 916597 - DNA, 33 bp, Homo sapien
tcagttttatttccgcaaatggcaatcttaata

SEQ ID NO: 916598 - DNA, 33 bp, Homo sapien
tcagttttatttccgcgaatggcaatcttaata

SEQ ID NO: 916599 - DNA, 33 bp, Homo sapien
gagagagagatcaaacaaaccaaccgagaacat

SEQ ID NO: 916600 - DNA, 33 bp, Homo sapien
gagagagagatcaaaccaaccaaccgagaacat

SEQ ID NO: 916601 - DNA, 33 bp, Homo sapien
ggtcctcaacttaaaaagaaaaggacatcatat

SEQ ID NO: 916602 - DNA, 33 bp, Homo sapien
ggtcctcaacttaaaaggaaaaggacatcatat

SEQ ID NO: 916603 - DNA, 33 bp, Homo sapien
aaagaactacgccttcactagctgttattctcc

SEQ ID NO: 916604 - DNA, 33 bp, Homo sapien
aaagaactacgccttcgctagctgttattctcc

SEQ ID NO: 916605 - DNA, 33 bp, Homo sapien
ttccagccttcttagccctattacacagagaaa

SEQ ID NO: 916606 - DNA, 33 bp, Homo sapien
ttccagccttcttagctctattacacagagaaa

SEQ ID NO: 916607 - DNA, 33 bp, Homo sapien
agtgaagctacagaaaagataattttggggttt

SEQ ID NO: 916608 - DNA, 33 bp, Homo sapien
agtgaagctacagaaaggataattttggggttt

SEQ ID NO: 916609 - DNA, 33 bp, Homo sapien
ttattgggtttcagtgccaccaaaattttctaa

SEQ ID NO: 916610 - DNA, 33 bp, Homo sapien
ttattgggtttcagtggcaccaaaattttctaa

SEQ ID NO: 916611 - DNA, 33 bp, Homo sapien
atgaactcccaggtgacagaaatgtccatattc

SEQ ID NO: 916612 - DNA, 33 bp, Homo sapien
atgaactcccaggtgatagaaatgtccatattc

SEQ ID NO: 916613 - DNA, 33 bp, Homo sapien
caatgtaatgtttctaaagttaatgactaatga

SEQ ID NO: 916614 - DNA, 33 bp, Homo sapien
caatgtaatgtttctacagttaatgactaatga

SEQ ID NO: 916615 - DNA, 33 bp, Homo sapien
cattgttgccatctaccaatttcagaatcattg

SEQ ID NO: 916616 - DNA, 33 bp, Homo sapien
cattgttgccatctactaatttcagaatcattg

SEQ ID NO: 916617 - DNA, 33 bp, Homo sapien
atttgtaaaatatccacgtcatttgtgtagctc

SEQ ID NO: 916618 - DNA, 33 bp, Homo sapien
atttgtaaaatatccatgtcatttgtgtagctc

SEQ ID NO: 916619 - DNA, 33 bp, Homo sapien
ttaggatgatgttgaacacattgaaatggagta

SEQ ID NO: 916620 - DNA, 33 bp, Homo sapien
ttaggatgatgttgaatacattgaaatggagta

SEQ ID NO: 916621 - DNA, 33 bp, Homo sapien
tttaaacctagtgagaacaaatcatcagctatg

SEQ ID NO: 916622 - DNA, 33 bp, Homo sapien
tttaaacctagtgagagcaaatcatcagctatg

SEQ ID NO: 916623 - DNA, 33 bp, Homo sapien
tgaagatatgcatgtccaattttttttaaatgt

SEQ ID NO: 916624 - DNA, 33 bp, Homo sapien
tgaagatatgcatgtcgaattttttttaaatgt

SEQ ID NO: 916625 - DNA, 33 bp, Homo sapien
gtcttgtgcgtctgaaacaattacatttaaaag

SEQ ID NO: 916626 - DNA, 33 bp, Homo sapien
gtcttgtgcgtctgaagcaattacatttaaaag

SEQ ID NO: 916627 - DNA, 33 bp, Homo sapien
ggtgtgatatttacggcaaagcgtgtgctgagt

SEQ ID NO: 916628 - DNA, 33 bp, Homo sapien
ggtgtgatatttacgggaaagcgtgtgctgagt

SEQ ID NO: 916629 - DNA, 33 bp, Homo sapien
aactttgggctcaacaccaagaactgtcttacc

SEQ ID NO: 916630 - DNA, 33 bp, Homo sapien
aactttgggctcaacatcaagaactgtcttacc

SEQ ID NO: 916631 - DNA, 33 bp, Homo sapien
atataagtttttactccagtaagtgaggcatac

SEQ ID NO: 916632 - DNA, 33 bp, Homo sapien
atataagtttttactctagtaagtgaggcatac

SEQ ID NO: 916633 - DNA, 33 bp, Homo sapien
acacagtatttagaagcaattgacttttctgaa

SEQ ID NO: 916634 - DNA, 33 bp, Homo sapien
acacagtatttagaaggaattgacttttctgaa

SEQ ID NO: 916635 - DNA, 33 bp, Homo sapien
cacatatagccagtgaataattttactagcctc

SEQ ID NO: 916636 - DNA, 33 bp, Homo sapien
cacatatagccagtgattaattttactagcctc

SEQ ID NO: 916637 - DNA, 33 bp, Homo sapien
ggcttaggtggaacgaaggatcttaaaagacct

SEQ ID NO: 916638 - DNA, 33 bp, Homo sapien
ggcttaggtggaacgatggatcttaaaagacct

SEQ ID NO: 916639 - DNA, 33 bp, Homo sapien
tggtctgtactgaccaatagccatccacatcat

SEQ ID NO: 916640 - DNA, 33 bp, Homo sapien
tggtctgtactgaccagtagccatccacatcat

SEQ ID NO: 916641 - DNA, 33 bp, Homo sapien
tgaaaatatacctgaaaaagtctgtttctaatt

SEQ ID NO: 916642 - DNA, 33 bp, Homo sapien
tgaaaatatacctgaagaagtctgtttctaatt

SEQ ID NO: 916643 - DNA, 33 bp, Homo sapien
atgaatatatttctgccaaaggtcaaaaaacaa

SEQ ID NO: 916644 - DNA, 33 bp, Homo sapien
atgaatatatttctgcgaaaggtcaaaaaacaa

SEQ ID NO: 916645 - DNA, 33 bp, Homo sapien
ttcagtggcttacttccagtctatctgattttt

SEQ ID NO: 916646 - DNA, 33 bp, Homo sapien
ttcagtggcttacttcgagtctatctgattttt

SEQ ID NO: 916647 - DNA, 33 bp, Homo sapien
attatatgcaactttcacaatctgcaatggaca

SEQ ID NO: 916648 - DNA, 33 bp, Homo sapien
attatatgcaactttcgcaatctgcaatggaca

SEQ ID NO: 916649 - DNA, 33 bp, Homo sapien
agactatgtattcaacaatttttgacaaagtaa

SEQ ID NO: 916650 - DNA, 33 bp, Homo sapien
agactatgtattcaacgatttttgacaaagtaa

SEQ ID NO: 916651 - DNA, 33 bp, Homo sapien
aaacaactccatatgaacagtcaaataagggga

SEQ ID NO: 916652 - DNA, 33 bp, Homo sapien
aaacaactccatatgagcagtcaaataagggga

SEQ ID NO: 916653 - DNA, 33 bp, Homo sapien
cttgatgaggtacctacgcaaacaactccatat

SEQ ID NO: 916654 - DNA, 33 bp, Homo sapien
cttgatgaggtacctatgcaaacaactccatat

SEQ ID NO: 916655 - DNA, 33 bp, Homo sapien
tcttacaaaccataaaagtgtggcaaatataaa

SEQ ID NO: 916656 - DNA, 33 bp, Homo sapien
tcttacaaaccataaatgtgtggcaaatataaa

SEQ ID NO: 916657 - DNA, 33 bp, Homo sapien
agttgttgtggaaaaacgaccacatattaatgt

SEQ ID NO: 916658 - DNA, 33 bp, Homo sapien
agttgttgtggaaaaatgaccacatattaatgt

SEQ ID NO: 916659 - DNA, 33 bp, Homo sapien
ctaggatgtgtgcagaagcaaaattagtaggaa

SEQ ID NO: 916660 - DNA, 33 bp, Homo sapien
ctaggatgtgtgcagaggcaaaattagtaggaa

SEQ ID NO: 916661 - DNA, 33 bp, Homo sapien
gaaaaactatccttcgccatggtgtcaggtaat

SEQ ID NO: 916662 - DNA, 33 bp, Homo sapien
gaaaaactatccttcgtcatggtgtcaggtaat

SEQ ID NO: 916663 - DNA, 33 bp, Homo sapien
tggactttttctagtacgattgtgatctcatgt

SEQ ID NO: 916664 - DNA, 33 bp, Homo sapien
tggactttttctagtatgattgtgatctcatgt

SEQ ID NO: 916665 - DNA, 33 bp, Homo sapien
cataaggaagcatatgcaaaacctatagaaatt

SEQ ID NO: 916666 - DNA, 33 bp, Homo sapien
cataaggaagcatatgtaaaacctatagaaatt

SEQ ID NO: 916667 - DNA, 33 bp, Homo sapien
tcttaatatgcctttgcagttcctgtagttcaa

SEQ ID NO: 916668 - DNA, 33 bp, Homo sapien
tcttaatatgcctttggagttcctgtagttcaa

SEQ ID NO: 916669 - DNA, 33 bp, Homo sapien
tttcaaatcactttgacgtttccattaacttcc

SEQ ID NO: 916670 - DNA, 33 bp, Homo sapien
tttcaaatcactttgatgtttccattaacttcc

SEQ ID NO: 916671 - DNA, 33 bp, Homo sapien
agcacaggacccagcaacttcttgtgttctcaa

SEQ ID NO: 916672 - DNA, 33 bp, Homo sapien
agcacaggacccagcatcttcttgtgttctcaa

SEQ ID NO: 916673 - DNA, 33 bp, Homo sapien
aaatttagtctgatagcacaaaaggctcctttt

SEQ ID NO: 916674 - DNA, 33 bp, Homo sapien
aaatttagtctgatagtacaaaaggctcctttt

SEQ ID NO: 916675 - DNA, 33 bp, Homo sapien
ggttatgaactgtgctaaagatgcaatattgat

SEQ ID NO: 916676 - DNA, 33 bp, Homo sapien
ggttatgaactgtgctgaagatgcaatattgat

SEQ ID NO: 916677 - DNA, 33 bp, Homo sapien
ttcatcttgagaaaagcatgaagatagtctcta

SEQ ID NO: 916678 - DNA, 33 bp, Homo sapien
ttcatcttgagaaaagtatgaagatagtctcta

SEQ ID NO: 916679 - DNA, 33 bp, Homo sapien
aattcagaatttagtgaagtgtgtagacttata

SEQ ID NO: 916680 - DNA, 33 bp, Homo sapien
aattcagaatttagtgtagtgtgtagacttata

SEQ ID NO: 916681 - DNA, 33 bp, Homo sapien
agaaattctttgtctgaaaacttcgatattctg

SEQ ID NO: 916682 - DNA, 33 bp, Homo sapien
agaaattctttgtctgcaaacttcgatattctg

SEQ ID NO: 916683 - DNA, 33 bp, Homo sapien
tttctgttaggtcataggtatacaagggataag

SEQ ID NO: 916684 - DNA, 33 bp, Homo sapien
tttctgttaggtcatatgtatacaagggataag

SEQ ID NO: 916685 - DNA, 33 bp, Homo sapien
ggaatgtctgtacacaaaggctaccaggctacc

SEQ ID NO: 916686 - DNA, 33 bp, Homo sapien
ggaatgtctgtacacagaggctaccaggctacc

SEQ ID NO: 916687 - DNA, 33 bp, Homo sapien
ctgtttaagatcagtgaaagtataacatgggaa

SEQ ID NO: 916688 - DNA, 33 bp, Homo sapien
ctgtttaagatcagtgcaagtataacatgggaa

SEQ ID NO: 916689 - DNA, 33 bp, Homo sapien
atcagaaatcaaaccacatccattgactacttt

SEQ ID NO: 916690 - DNA, 33 bp, Homo sapien
atcagaaatcaaaccatatccattgactacttt

SEQ ID NO: 916691 - DNA, 33 bp, Homo sapien
gttaaatccattacaacttgcattatcaagaac

SEQ ID NO: 916692 - DNA, 33 bp, Homo sapien
gttaaatccattacaatttgcattatcaagaac

SEQ ID NO: 916693 - DNA, 33 bp, Homo sapien
atatgaatgttaagcccccattattttctagta

SEQ ID NO: 916694 - DNA, 33 bp, Homo sapien
atatgaatgttaagcctccattattttctagta

SEQ ID NO: 916695 - DNA, 33 bp, Homo sapien
aaatcaatgcagataaagactacatcgtataca

SEQ ID NO: 916696 - DNA, 33 bp, Homo sapien
aaatcaatgcagataaggactacatcgtataca

SEQ ID NO: 916697 - DNA, 33 bp, Homo sapien
gttccgtaccaattcgcagaaataaacttgctc

SEQ ID NO: 916698 - DNA, 33 bp, Homo sapien
gttccgtaccaattcgtagaaataaacttgctc

SEQ ID NO: 916699 - DNA, 33 bp, Homo sapien
taatttatacttctaacctaacccattctagtt

SEQ ID NO: 916700 - DNA, 33 bp, Homo sapien
taatttatacttctaatctaacccattctagtt

SEQ ID NO: 916701 - DNA, 33 bp, Homo sapien
agttgacagagcattacctagtacttaaataac

SEQ ID NO: 916702 - DNA, 33 bp, Homo sapien
agttgacagagcattatctagtacttaaataac

SEQ ID NO: 916703 - DNA, 33 bp, Homo sapien
atcctgagacatcttcaaaaatctgtacttctc

SEQ ID NO: 916704 - DNA, 33 bp, Homo sapien
atcctgagacatcttcgaaaatctgtacttctc

SEQ ID NO: 916705 - DNA, 33 bp, Homo sapien
atctctgctgttaaacaacgcatgactgtattg

SEQ ID NO: 916706 - DNA, 33 bp, Homo sapien
atctctgctgttaaacgacgcatgactgtattg

SEQ ID NO: 916707 - DNA, 33 bp, Homo sapien
aaagaggtctattttcataactagaagacgaaa

SEQ ID NO: 916708 - DNA, 33 bp, Homo sapien
aaagaggtctattttcgtaactagaagacgaaa

SEQ ID NO: 916709 - DNA, 33 bp, Homo sapien
tactttcaaatttggtgaaaaatagttgagagg

SEQ ID NO: 916710 - DNA, 33 bp, Homo sapien
tactttcaaatttggttaaaaatagttgagagg

SEQ ID NO: 916711 - DNA, 33 bp, Homo sapien
tgcaaatgaatggcacacatcctgatgaatcag

SEQ ID NO: 916712 - DNA, 33 bp, Homo sapien
tgcaaatgaatggcacgcatcctgatgaatcag

SEQ ID NO: 916713 - DNA, 33 bp, Homo sapien
ctcaggcacatagttacactctcttgctctctc

SEQ ID NO: 916714 - DNA, 33 bp, Homo sapien
ctcaggcacatagttatactctcttgctctctc

SEQ ID NO: 916715 - DNA, 33 bp, Homo sapien
tgagagaatgcggagacgtttcacttttctgta

SEQ ID NO: 916716 - DNA, 33 bp, Homo sapien
tgagagaatgcggagaggtttcacttttctgta

SEQ ID NO: 916717 - DNA, 33 bp, Homo sapien
catgtgtttttgcctcgaagagggatttgccta

SEQ ID NO: 916718 - DNA, 33 bp, Homo sapien
catgtgtttttgcctctaagagggatttgccta

SEQ ID NO: 916719 - DNA, 33 bp, Homo sapien
attgttatcacttaacagtcattcacctactaa

SEQ ID NO: 916720 - DNA, 33 bp, Homo sapien
attgttatcacttaacggtcattcacctactaa

SEQ ID NO: 916721 - DNA, 33 bp, Homo sapien
cttttaaatggcagtaaaagaaatactgattat

SEQ ID NO: 916722 - DNA, 33 bp, Homo sapien
cttttaaatggcagtagaagaaatactgattat

SEQ ID NO: 916723 - DNA, 33 bp, Homo sapien
gactatttagtgagataaaaaaaaactatcaat

SEQ ID NO: 916724 - DNA, 33 bp, Homo sapien
gactatttagtgagattaaaaaaaactatcaat

SEQ ID NO: 916725 - DNA, 33 bp, Homo sapien
aaagcactgtctatagcacaaatcatccctgac

SEQ ID NO: 916726 - DNA, 33 bp, Homo sapien
aaagcactgtctatagtacaaatcatccctgac

SEQ ID NO: 916727 - DNA, 33 bp, Homo sapien
tacagctaaagccacaatgaaataaaattcttc

SEQ ID NO: 916728 - DNA, 33 bp, Homo sapien
tacagctaaagccacagtgaaataaaattcttc

SEQ ID NO: 916729 - DNA, 33 bp, Homo sapien
ttattagagcacaagaataaaggatttggacac

SEQ ID NO: 916730 - DNA, 33 bp, Homo sapien
ttattagagcacaagagtaaaggatttggacac

SEQ ID NO: 916731 - DNA, 33 bp, Homo sapien
aatggtggatctttgaaaacaagtgaccatggg

SEQ ID NO: 916732 - DNA, 33 bp, Homo sapien
aatggtggatctttgagaacaagtgaccatggg

SEQ ID NO: 916733 - DNA, 33 bp, Homo sapien
ttgtatgagggaaaggaaatatgatctagctgc

SEQ ID NO: 916734 - DNA, 33 bp, Homo sapien
ttgtatgagggaaaggcaatatgatctagctgc

SEQ ID NO: 916735 - DNA, 33 bp, Homo sapien
atttatgcagttgaacaagaaagaactatagaa

SEQ ID NO: 916736 - DNA, 33 bp, Homo sapien
atttatgcagttgaacgagaaagaactatagaa

SEQ ID NO: 916737 - DNA, 33 bp, Homo sapien
atacacacatacacagcctactacatggagtga

SEQ ID NO: 916738 - DNA, 33 bp, Homo sapien
atacacacatacacagtctactacatggagtga

SEQ ID NO: 916739 - DNA, 33 bp, Homo sapien
attacagttttacatgaagaaatatgaaccatt

SEQ ID NO: 916740 - DNA, 33 bp, Homo sapien
attacagttttacatggagaaatatgaaccatt

SEQ ID NO: 916741 - DNA, 33 bp, Homo sapien
tgttgaatagtttgaacggcagagtattatata

SEQ ID NO: 916742 - DNA, 33 bp, Homo sapien
tgttgaatagtttgaatggcagagtattatata

SEQ ID NO: 916743 - DNA, 33 bp, Homo sapien
gaacagaggtggtagcagaaaaagaaaccacat

SEQ ID NO: 916744 - DNA, 33 bp, Homo sapien
gaacagaggtggtagcggaaaaagaaaccacat

SEQ ID NO: 916745 - DNA, 33 bp, Homo sapien
tgaaggttttggcaaaactgcatagagaaagtc

SEQ ID NO: 916746 - DNA, 33 bp, Homo sapien
tgaaggttttggcaaacctgcatagagaaagtc

SEQ ID NO: 916747 - DNA, 33 bp, Homo sapien
ttggttcttttctttcaagtcaacaagcgtgcc

SEQ ID NO: 916748 - DNA, 33 bp, Homo sapien
ttggttcttttctttcgagtcaacaagcgtgcc

SEQ ID NO: 916749 - DNA, 33 bp, Homo sapien
ataaacaaggtggtaacagcattctacaactaa

SEQ ID NO: 916750 - DNA, 33 bp, Homo sapien
ataaacaaggtggtaatagcattctacaactaa

SEQ ID NO: 916751 - DNA, 33 bp, Homo sapien
tttcacactcagcttactaaaacacactcttgc

SEQ ID NO: 916752 - DNA, 33 bp, Homo sapien
tttcacactcagcttagtaaaacacactcttgc

SEQ ID NO: 916753 - DNA, 33 bp, Homo sapien
gtcatttatttcctccggcatatgagtattggt

SEQ ID NO: 916754 - DNA, 33 bp, Homo sapien
gtcatttatttcctcctgcatatgagtattggt

SEQ ID NO: 916755 - DNA, 33 bp, Homo sapien
cacacattcctagtgaatacactggcttccaac

SEQ ID NO: 916756 - DNA, 33 bp, Homo sapien
cacacattcctagtgagtacactggcttccaac

SEQ ID NO: 916757 - DNA, 33 bp, Homo sapien
tttaaaatagtcaggacataagatatttaatct

SEQ ID NO: 916758 - DNA, 33 bp, Homo sapien
tttaaaatagtcaggagataagatatttaatct

SEQ ID NO: 916759 - DNA, 33 bp, Homo sapien
taacaagttggactgaacacattgtatctcagg

SEQ ID NO: 916760 - DNA, 33 bp, Homo sapien
taacaagttggactgagcacattgtatctcagg

SEQ ID NO: 916761 - DNA, 33 bp, Homo sapien
tatctaagatgactaacgaatttgccaggggta

SEQ ID NO: 916762 - DNA, 33 bp, Homo sapien
tatctaagatgactaaggaatttgccaggggta

SEQ ID NO: 916763 - DNA, 33 bp, Homo sapien
tctattctgtaagatacggaggataaactctct

SEQ ID NO: 916764 - DNA, 33 bp, Homo sapien
tctattctgtaagatagggaggataaactctct

SEQ ID NO: 916765 - DNA, 33 bp, Homo sapien
gtggatttagaaaagccgcaaccatacaagaac

SEQ ID NO: 916766 - DNA, 33 bp, Homo sapien
gtggatttagaaaagctgcaaccatacaagaac

SEQ ID NO: 916767 - DNA, 33 bp, Homo sapien
ctaaattatcaagtcaaattcgtttgttccttg

SEQ ID NO: 916768 - DNA, 33 bp, Homo sapien
ctaaattatcaagtcagattcgtttgttccttg

SEQ ID NO: 916769 - DNA, 33 bp, Homo sapien
attaatgtggctttgcaaaactcctaatacctt

SEQ ID NO: 916770 - DNA, 33 bp, Homo sapien
attaatgtggctttgctaaactcctaatacctt

SEQ ID NO: 916771 - DNA, 33 bp, Homo sapien
tcacttattcaggaaaaccatctgtgaactcac

SEQ ID NO: 916772 - DNA, 33 bp, Homo sapien
tcacttattcaggaaagccatctgtgaactcac

SEQ ID NO: 916773 - DNA, 33 bp, Homo sapien
ccacatcatattgttcccacttggaaaaaatta

SEQ ID NO: 916774 - DNA, 33 bp, Homo sapien
ccacatcatattgttctcacttggaaaaaatta

SEQ ID NO: 916775 - DNA, 33 bp, Homo sapien
tactgtctttcacaaaccaattaccaacttttg

SEQ ID NO: 916776 - DNA, 33 bp, Homo sapien
tactgtctttcacaaatcaattaccaacttttg

SEQ ID NO: 916777 - DNA, 33 bp, Homo sapien
ataatggaataaaagaatagagatggagaagat

SEQ ID NO: 916778 - DNA, 33 bp, Homo sapien
ataatggaataaaagagtagagatggagaagat

SEQ ID NO: 916779 - DNA, 33 bp, Homo sapien
aaatctacactaaaaaatgttaactgcaattca

SEQ ID NO: 916780 - DNA, 33 bp, Homo sapien
aaatctacactaaaaactgttaactgcaattca

SEQ ID NO: 916781 - DNA, 33 bp, Homo sapien
atcattttaataaatgccacaaaagcattcaat

SEQ ID NO: 916782 - DNA, 33 bp, Homo sapien
atcattttaataaatgtcacaaaagcattcaat

SEQ ID NO: 916783 - DNA, 33 bp, Homo sapien
gggtttagaagaaataactcaaatcaatatagg

SEQ ID NO: 916784 - DNA, 33 bp, Homo sapien
gggtttagaagaaatacctcaaatcaatatagg

SEQ ID NO: 916785 - DNA, 33 bp, Homo sapien
atgtttgtgaatacaactgcattttatggatgc

SEQ ID NO: 916786 - DNA, 33 bp, Homo sapien
atgtttgtgaatacaattgcattttatggatgc

SEQ ID NO: 916787 - DNA, 33 bp, Homo sapien
attactaagtaccaaacgctagtctaattatta

SEQ ID NO: 916788 - DNA, 33 bp, Homo sapien
attactaagtaccaaatgctagtctaattatta

SEQ ID NO: 916789 - DNA, 33 bp, Homo sapien
tataagccagaacatacggtattttgttttctg

SEQ ID NO: 916790 - DNA, 33 bp, Homo sapien
tataagccagaacatatggtattttgttttctg

SEQ ID NO: 916791 - DNA, 33 bp, Homo sapien
tatcagtgtgtctcaactgtgcaaaagaaacta

SEQ ID NO: 916792 - DNA, 33 bp, Homo sapien
tatcagtgtgtctcaattgtgcaaaagaaacta

SEQ ID NO: 916793 - DNA, 33 bp, Homo sapien
attttagattactgacggcaatgctagttttat

SEQ ID NO: 916794 - DNA, 33 bp, Homo sapien
attttagattactgactgcaatgctagttttat

SEQ ID NO: 916795 - DNA, 33 bp, Homo sapien
aaagaaatgggtgaaaggatagtacatatatag

SEQ ID NO: 916796 - DNA, 33 bp, Homo sapien
aaagaaatgggtgaaatgatagtacatatatag

SEQ ID NO: 916797 - DNA, 33 bp, Homo sapien
ctagaacatcaaaaagaaactgcatattcatgg

SEQ ID NO: 916798 - DNA, 33 bp, Homo sapien
ctagaacatcaaaaagcaactgcatattcatgg

SEQ ID NO: 916799 - DNA, 33 bp, Homo sapien
caccaaaagtagtaaccatgagttgcacctctt

SEQ ID NO: 916800 - DNA, 33 bp, Homo sapien
caccaaaagtagtaacgatgagttgcacctctt

SEQ ID NO: 916801 - DNA, 33 bp, Homo sapien
aataagtagtcaaaatgagtagagtagatttgg

SEQ ID NO: 916802 - DNA, 33 bp, Homo sapien
aataagtagtcaaaattagtagagtagatttgg

SEQ ID NO: 916803 - DNA, 33 bp, Homo sapien
tattttgtatcagatgcaaagctttctctaaac

SEQ ID NO: 916804 - DNA, 33 bp, Homo sapien
tattttgtatcagatgtaaagctttctctaaac

SEQ ID NO: 916805 - DNA, 33 bp, Homo sapien
tacaatacacataatacaatacgaagcacgaag

SEQ ID NO: 916806 - DNA, 33 bp, Homo sapien
tacaatacacataatataatacgaagcacgaag

SEQ ID NO: 916807 - DNA, 33 bp, Homo sapien
ttgtaaacttgatgaaagactcatatttgatta

SEQ ID NO: 916808 - DNA, 33 bp, Homo sapien
ttgtaaacttgatgaaggactcatatttgatta

SEQ ID NO: 916809 - DNA, 33 bp, Homo sapien
aaattcacaaataaggaatccacaataacgata

SEQ ID NO: 916810 - DNA, 33 bp, Homo sapien
aaattcacaaataagggatccacaataacgata

SEQ ID NO: 916811 - DNA, 33 bp, Homo sapien
ttgtgaatttgtctacccatacccagaaaaatc

SEQ ID NO: 916812 - DNA, 33 bp, Homo sapien
ttgtgaatttgtctactcatacccagaaaaatc

SEQ ID NO: 916813 - DNA, 33 bp, Homo sapien
tgatttcaaggccaggacaggaaaagccaagta

SEQ ID NO: 916814 - DNA, 33 bp, Homo sapien
tgatttcaaggccagggcaggaaaagccaagta

SEQ ID NO: 916815 - DNA, 33 bp, Homo sapien
agaatggagtaaagaaaattgttcatatttagg

SEQ ID NO: 916816 - DNA, 33 bp, Homo sapien
agaatggagtaaagaagattgttcatatttagg

SEQ ID NO: 916817 - DNA, 33 bp, Homo sapien
tgattccagccagaaaagagtggttgctttttc

SEQ ID NO: 916818 - DNA, 33 bp, Homo sapien
tgattccagccagaaaggagtggttgctttttc

SEQ ID NO: 916819 - DNA, 33 bp, Homo sapien
ttctcttcttaaaagcaaagttgcaagtgaaac

SEQ ID NO: 916820 - DNA, 33 bp, Homo sapien
ttctcttcttaaaagcgaagttgcaagtgaaac

SEQ ID NO: 916821 - DNA, 33 bp, Homo sapien
acccagctgttgagtaagagacttctactaaag

SEQ ID NO: 916822 - DNA, 33 bp, Homo sapien
acccagctgttgagtaggagacttctactaaag

SEQ ID NO: 916823 - DNA, 33 bp, Homo sapien
tttgatctacaccttgcatcctaatatcaaatt

SEQ ID NO: 916824 - DNA, 33 bp, Homo sapien
tttgatctacaccttgtatcctaatatcaaatt

SEQ ID NO: 916825 - DNA, 33 bp, Homo sapien
ttaacattttatacatcagtgcctaaggaaagt

SEQ ID NO: 916826 - DNA, 33 bp, Homo sapien
ttaacattttatacattagtgcctaaggaaagt

SEQ ID NO: 916827 - DNA, 33 bp, Homo sapien
agttgaagatggcagagaaaaacatacaggagc

SEQ ID NO: 916828 - DNA, 33 bp, Homo sapien
agttgaagatggcagataaaaacatacaggagc

SEQ ID NO: 916829 - DNA, 33 bp, Homo sapien
ccttatttgtgttctcaagttcttatcattatt

SEQ ID NO: 916830 - DNA, 33 bp, Homo sapien
ccttatttgtgttctccagttcttatcattatt

SEQ ID NO: 916831 - DNA, 33 bp, Homo sapien
cctaaagttgctgaacccgttggtctatgggta

SEQ ID NO: 916832 - DNA, 33 bp, Homo sapien
cctaaagttgctgaactcgttggtctatgggta

SEQ ID NO: 916833 - DNA, 33 bp, Homo sapien
ctttctgtttcatcttaaaaataggctctacct

SEQ ID NO: 916834 - DNA, 33 bp, Homo sapien
ctttctgtttcatcttgaaaataggctctacct

SEQ ID NO: 916835 - DNA, 33 bp, Homo sapien
tcatgattgatttgtccagttccttaagtcttg

SEQ ID NO: 916836 - DNA, 33 bp, Homo sapien
tcatgattgatttgtctagttccttaagtcttg

SEQ ID NO: 916837 - DNA, 33 bp, Homo sapien
gaagagttaatttatacgccccatctcctctga

SEQ ID NO: 916838 - DNA, 33 bp, Homo sapien
gaagagttaatttatatgccccatctcctctga

SEQ ID NO: 916839 - DNA, 33 bp, Homo sapien
ccaggagcttgctgccagagaagactgcatcct

SEQ ID NO: 916840 - DNA, 33 bp, Homo sapien
ccaggagcttgctgccggagaagactgcatcct

SEQ ID NO: 916841 - DNA, 33 bp, Homo sapien
ttcagagcataagctcacctggatcagcagcct

SEQ ID NO: 916842 - DNA, 33 bp, Homo sapien
ttcagagcataagctcccctggatcagcagcct

SEQ ID NO: 916843 - DNA, 33 bp, Homo sapien
actgtgcattatatgaataagcccattctctga

SEQ ID NO: 916844 - DNA, 33 bp, Homo sapien
actgtgcattatatgattaagcccattctctga

SEQ ID NO: 916845 - DNA, 33 bp, Homo sapien
tatttgctgataaagaagagattaccttatgtt

SEQ ID NO: 916846 - DNA, 33 bp, Homo sapien
tatttgctgataaagaggagattaccttatgtt

SEQ ID NO: 916847 - DNA, 33 bp, Homo sapien
atgtctctatatgatgcaggccagcaaccttgt

SEQ ID NO: 916848 - DNA, 33 bp, Homo sapien
atgtctctatatgatgtaggccagcaaccttgt

SEQ ID NO: 916849 - DNA, 33 bp, Homo sapien
accattccaacttaaacgtgaactctgagtgtc

SEQ ID NO: 916850 - DNA, 33 bp, Homo sapien
accattccaacttaaatgtgaactctgagtgtc

SEQ ID NO: 916851 - DNA, 33 bp, Homo sapien
gggatttgtggatgaaagtttgacttaagacat

SEQ ID NO: 916852 - DNA, 33 bp, Homo sapien
gggatttgtggatgaacgtttgacttaagacat

SEQ ID NO: 916853 - DNA, 33 bp, Homo sapien
ctgtaaatgcatttaaagccatgagagtagatg

SEQ ID NO: 916854 - DNA, 33 bp, Homo sapien
ctgtaaatgcatttaaggccatgagagtagatg

SEQ ID NO: 916855 - DNA, 33 bp, Homo sapien
agtagctcaaaaatataaaaatggtatgctgta

SEQ ID NO: 916856 - DNA, 33 bp, Homo sapien
agtagctcaaaaatatgaaaatggtatgctgta

SEQ ID NO: 916857 - DNA, 33 bp, Homo sapien
atgtaatatatggataccagccactctatgcta

SEQ ID NO: 916858 - DNA, 33 bp, Homo sapien
atgtaatatatggatatcagccactctatgcta

SEQ ID NO: 916859 - DNA, 33 bp, Homo sapien
agtaatattgaaaaggaacatacagataagaaa

SEQ ID NO: 916860 - DNA, 33 bp, Homo sapien
agtaatattgaaaagggacatacagataagaaa

SEQ ID NO: 916861 - DNA, 33 bp, Homo sapien
gtgatgaaatcacccaatatggaatttaatgag

SEQ ID NO: 916862 - DNA, 33 bp, Homo sapien
gtgatgaaatcacccagtatggaatttaatgag

SEQ ID NO: 916863 - DNA, 33 bp, Homo sapien
attaagtctcgtaacacgtcatttacagctgag

SEQ ID NO: 916864 - DNA, 33 bp, Homo sapien
attaagtctcgtaacaggtcatttacagctgag

SEQ ID NO: 916865 - DNA, 33 bp, Homo sapien
tgtttatctggaaagacgtcttggtaaacgtgt

SEQ ID NO: 916866 - DNA, 33 bp, Homo sapien
tgtttatctggaaagatgtcttggtaaacgtgt

SEQ ID NO: 916867 - DNA, 33 bp, Homo sapien
cccggacaatgttttacattcatctcaaatttt

SEQ ID NO: 916868 - DNA, 33 bp, Homo sapien
cccggacaatgttttatattcatctcaaatttt

SEQ ID NO: 916869 - DNA, 33 bp, Homo sapien
ataaataagacaacagaaagtatgccatcttga

SEQ ID NO: 916870 - DNA, 33 bp, Homo sapien
ataaataagacaacaggaagtatgccatcttga

SEQ ID NO: 916871 - DNA, 33 bp, Homo sapien
acaaaacagacttctaggaaaagaagatgccat

SEQ ID NO: 916872 - DNA, 33 bp, Homo sapien
acaaaacagacttctatgaaaagaagatgccat

SEQ ID NO: 916873 - DNA, 33 bp, Homo sapien
ttttcagcatttattcacttacagaaacatcca

SEQ ID NO: 916874 - DNA, 33 bp, Homo sapien
ttttcagcatttattcgcttacagaaacatcca

SEQ ID NO: 916875 - DNA, 33 bp, Homo sapien
aatattgtagagttaaaaagaagactgatttga

SEQ ID NO: 916876 - DNA, 33 bp, Homo sapien
aatattgtagagttaagaagaagactgatttga

SEQ ID NO: 916877 - DNA, 33 bp, Homo sapien
tcatggcaggacaatacggataaacagactctt

SEQ ID NO: 916878 - DNA, 33 bp, Homo sapien
tcatggcaggacaatatggataaacagactctt

SEQ ID NO: 916879 - DNA, 33 bp, Homo sapien
agagtcagctgacaaaagaaaatcagttgtaga

SEQ ID NO: 916880 - DNA, 33 bp, Homo sapien
agagtcagctgacaaaggaaaatcagttgtaga

SEQ ID NO: 916881 - DNA, 33 bp, Homo sapien
tatcaaagaacagaaaacaatcagtcaattttt

SEQ ID NO: 916882 - DNA, 33 bp, Homo sapien
tatcaaagaacagaaatcaatcagtcaattttt

SEQ ID NO: 916883 - DNA, 33 bp, Homo sapien
agaaaaggagaaactaacaactagaatccaaaa

SEQ ID NO: 916884 - DNA, 33 bp, Homo sapien
agaaaaggagaaactaccaactagaatccaaaa

SEQ ID NO: 916885 - DNA, 33 bp, Homo sapien
actccaacctgagctgcagttaatttgttataa

SEQ ID NO: 916886 - DNA, 33 bp, Homo sapien
actccaacctgagctgtagttaatttgttataa

SEQ ID NO: 916887 - DNA, 33 bp, Homo sapien
ctttacggattacaaaatcaacgatattctgtg

SEQ ID NO: 916888 - DNA, 33 bp, Homo sapien
ctttacggattacaaagtcaacgatattctgtg

SEQ ID NO: 916889 - DNA, 33 bp, Homo sapien
ggtagtgatggtactaagtcaatggaaatgttt

SEQ ID NO: 916890 - DNA, 33 bp, Homo sapien
ggtagtgatggtactaggtcaatggaaatgttt

SEQ ID NO: 916891 - DNA, 33 bp, Homo sapien
tttttccttatcattacactctcatctgtgttc

SEQ ID NO: 916892 - DNA, 33 bp, Homo sapien
tttttccttatcattatactctcatctgtgttc

SEQ ID NO: 916893 - DNA, 33 bp, Homo sapien
taaaagtcattttatacggacaacagagactca

SEQ ID NO: 916894 - DNA, 33 bp, Homo sapien
taaaagtcattttatatggacaacagagactca

SEQ ID NO: 916895 - DNA, 33 bp, Homo sapien
tattataatgaccaccagcagttttgatattaa

SEQ ID NO: 916896 - DNA, 33 bp, Homo sapien
tattataatgaccaccggcagttttgatattaa

SEQ ID NO: 916897 - DNA, 33 bp, Homo sapien
cttttggctttttaggaagaaagggatgttgca

SEQ ID NO: 916898 - DNA, 33 bp, Homo sapien
cttttggctttttagggagaaagggatgttgca

SEQ ID NO: 916899 - DNA, 33 bp, Homo sapien
cttgatcatctggctaaaccaatttttgttagg

SEQ ID NO: 916900 - DNA, 33 bp, Homo sapien
cttgatcatctggctacaccaatttttgttagg

SEQ ID NO: 916901 - DNA, 33 bp, Homo sapien
ctcccttaactgattaaccaaaattacaacatt

SEQ ID NO: 916902 - DNA, 33 bp, Homo sapien
ctcccttaactgattagccaaaattacaacatt

SEQ ID NO: 916903 - DNA, 33 bp, Homo sapien
tgcagtcatctcagaactggaatcccaagacta

SEQ ID NO: 916904 - DNA, 33 bp, Homo sapien
tgcagtcatctcagaattggaatcccaagacta

SEQ ID NO: 916905 - DNA, 33 bp, Homo sapien
tggcctgtttcacctacgaccttgctgtatgct

SEQ ID NO: 916906 - DNA, 33 bp, Homo sapien
tggcctgtttcacctatgaccttgctgtatgct

SEQ ID NO: 916907 - DNA, 33 bp, Homo sapien
agctccatgacatttccaagaacactcatattt

SEQ ID NO: 916908 - DNA, 33 bp, Homo sapien
agctccatgacatttctaagaacactcatattt

SEQ ID NO: 916909 - DNA, 33 bp, Homo sapien
ttagggaaagatgtacacataggcagctcctgg

SEQ ID NO: 916910 - DNA, 33 bp, Homo sapien
ttagggaaagatgtacgcataggcagctcctgg

SEQ ID NO: 916911 - DNA, 33 bp, Homo sapien
atttgcttatttactgaacttggagaagatagg

SEQ ID NO: 916912 - DNA, 33 bp, Homo sapien
atttgcttatttactggacttggagaagatagg

SEQ ID NO: 916913 - DNA, 33 bp, Homo sapien
attgcaaattgctaagactactgtttgttttgt

SEQ ID NO: 916914 - DNA, 33 bp, Homo sapien
attgcaaattgctaaggctactgtttgttttgt

SEQ ID NO: 916915 - DNA, 33 bp, Homo sapien
tttcaaagaggcttaaaaaaggagctatggaaa

SEQ ID NO: 916916 - DNA, 33 bp, Homo sapien
tttcaaagaggcttaacaaaggagctatggaaa

SEQ ID NO: 916917 - DNA, 33 bp, Homo sapien
gacagaacttacaaaagtgttatccttatgatt

SEQ ID NO: 916918 - DNA, 33 bp, Homo sapien
gacagaacttacaaaattgttatccttatgatt

SEQ ID NO: 916919 - DNA, 33 bp, Homo sapien
ttgcagattaaaaaggcaaggcacatgggcagt

SEQ ID NO: 916920 - DNA, 33 bp, Homo sapien
ttgcagattaaaaaggtaaggcacatgggcagt

SEQ ID NO: 916921 - DNA, 33 bp, Homo sapien
acagtaaaataaatctcacctaaacagctccat

SEQ ID NO: 916922 - DNA, 33 bp, Homo sapien
acagtaaaataaatctgacctaaacagctccat

SEQ ID NO: 916923 - DNA, 33 bp, Homo sapien
gtctctgactatgagcaaagaactacaccctcc

SEQ ID NO: 916924 - DNA, 33 bp, Homo sapien
gtctctgactatgagcgaagaactacaccctcc

SEQ ID NO: 916925 - DNA, 33 bp, Homo sapien
catgggcagtctctccgaaagcactgacaagtt

SEQ ID NO: 916926 - DNA, 33 bp, Homo sapien
catgggcagtctctcctaaagcactgacaagtt

SEQ ID NO: 916927 - DNA, 33 bp, Homo sapien
aaatatactgcagtcccacatgtcagacaatat

SEQ ID NO: 916928 - DNA, 33 bp, Homo sapien
aaatatactgcagtcctacatgtcagacaatat

SEQ ID NO: 916929 - DNA, 33 bp, Homo sapien
gaacatgagtacaacactgggcttgagagctag

SEQ ID NO: 916930 - DNA, 33 bp, Homo sapien
gaacatgagtacaacattgggcttgagagctag

SEQ ID NO: 916931 - DNA, 33 bp, Homo sapien
gaccctccagtttagccgattactatggtctcc

SEQ ID NO: 916932 - DNA, 33 bp, Homo sapien
gaccctccagtttagctgattactatggtctcc

SEQ ID NO: 916933 - DNA, 33 bp, Homo sapien
atagaaatcaagagtgaatttggaccattatgt

SEQ ID NO: 916934 - DNA, 33 bp, Homo sapien
atagaaatcaagagtggatttggaccattatgt

SEQ ID NO: 916935 - DNA, 33 bp, Homo sapien
agatatgtagggtataaagatcaacattgagat

SEQ ID NO: 916936 - DNA, 33 bp, Homo sapien
agatatgtagggtatatagatcaacattgagat

SEQ ID NO: 916937 - DNA, 33 bp, Homo sapien
gagatgtatttcaaaacgactgaactgctcaac

SEQ ID NO: 916938 - DNA, 33 bp, Homo sapien
gagatgtatttcaaaatgactgaactgctcaac

SEQ ID NO: 916939 - DNA, 33 bp, Homo sapien
tgccctgaattttgaactctgtgatgtttcacc

SEQ ID NO: 916940 - DNA, 33 bp, Homo sapien
tgccctgaattttgaagtctgtgatgtttcacc

SEQ ID NO: 916941 - DNA, 33 bp, Homo sapien
ctgttttacctactaccaagccaagcagaatat

SEQ ID NO: 916942 - DNA, 33 bp, Homo sapien
ctgttttacctactactaagccaagcagaatat

SEQ ID NO: 916943 - DNA, 33 bp, Homo sapien
tccctacccagcaacagaacttgtattttcatt

SEQ ID NO: 916944 - DNA, 33 bp, Homo sapien
tccctacccagcaacataacttgtattttcatt

SEQ ID NO: 916945 - DNA, 33 bp, Homo sapien
gcacttgctggtttaaaaaagggcaatgtggct

SEQ ID NO: 916946 - DNA, 33 bp, Homo sapien
gcacttgctggtttaataaagggcaatgtggct

SEQ ID NO: 916947 - DNA, 33 bp, Homo sapien
caatatttcatagctacaaaatcactttttata

SEQ ID NO: 916948 - DNA, 33 bp, Homo sapien
caatatttcatagctagaaaatcactttttata

SEQ ID NO: 916949 - DNA, 33 bp, Homo sapien
taactaaaaagacagacggtcctccacacagca

SEQ ID NO: 916950 - DNA, 33 bp, Homo sapien
taactaaaaagacagatggtcctccacacagca

SEQ ID NO: 916951 - DNA, 33 bp, Homo sapien
aaggtgcttaaaggtagagaaatgtaggattca

SEQ ID NO: 916952 - DNA, 33 bp, Homo sapien
aaggtgcttaaaggtatagaaatgtaggattca

SEQ ID NO: 916953 - DNA, 33 bp, Homo sapien
aggattcatgcaaggcacttagcttttttgttc

SEQ ID NO: 916954 - DNA, 33 bp, Homo sapien
aggattcatgcaaggcgcttagcttttttgttc

SEQ ID NO: 916955 - DNA, 33 bp, Homo sapien
ccatgatacttttaccactgacactttcctcca

SEQ ID NO: 916956 - DNA, 33 bp, Homo sapien
ccatgatacttttaccgctgacactttcctcca

SEQ ID NO: 916957 - DNA, 33 bp, Homo sapien
atatagaaaatgaagacaaggaagggacaatag

SEQ ID NO: 916958 - DNA, 33 bp, Homo sapien
atatagaaaatgaagagaaggaagggacaatag

SEQ ID NO: 916959 - DNA, 33 bp, Homo sapien
tgtagtttaaaacagaagctcatatagaacaaa

SEQ ID NO: 916960 - DNA, 33 bp, Homo sapien
tgtagtttaaaacagacgctcatatagaacaaa

SEQ ID NO: 916961 - DNA, 33 bp, Homo sapien
agaagagttccaactaagatgaaaatgtaaaga

SEQ ID NO: 916962 - DNA, 33 bp, Homo sapien
agaagagttccaactaggatgaaaatgtaaaga

SEQ ID NO: 916963 - DNA, 33 bp, Homo sapien
ctgtccagtataacagcaacaaaggagagagga

SEQ ID NO: 916964 - DNA, 33 bp, Homo sapien
ctgtccagtataacagtaacaaaggagagagga

SEQ ID NO: 916965 - DNA, 33 bp, Homo sapien
agagaggaaattaaaaatggaatacctgccata

SEQ ID NO: 916966 - DNA, 33 bp, Homo sapien
agagaggaaattaaaagtggaatacctgccata

SEQ ID NO: 916967 - DNA, 33 bp, Homo sapien
tagtatctatgtttccgcacttgtaaaataaga

SEQ ID NO: 916968 - DNA, 33 bp, Homo sapien
tagtatctatgtttcctcacttgtaaaataaga

SEQ ID NO: 916969 - DNA, 33 bp, Homo sapien
tgaatatatgatttgagaggtgaatataaataa

SEQ ID NO: 916970 - DNA, 33 bp, Homo sapien
tgaatatatgatttgataggtgaatataaataa

SEQ ID NO: 916971 - DNA, 33 bp, Homo sapien
ttcttttcttattgtaaaatcagctttattgag

SEQ ID NO: 916972 - DNA, 33 bp, Homo sapien
ttcttttcttattgtagaatcagctttattgag

SEQ ID NO: 916973 - DNA, 33 bp, Homo sapien
agaatatgaatgttcaaatatgagaataaagaa

SEQ ID NO: 916974 - DNA, 33 bp, Homo sapien
agaatatgaatgttcagatatgagaataaagaa

SEQ ID NO: 916975 - DNA, 33 bp, Homo sapien
tgtgaaaactatttccaacaatataggctgtaa

SEQ ID NO: 916976 - DNA, 33 bp, Homo sapien
tgtgaaaactatttcccacaatataggctgtaa

SEQ ID NO: 916977 - DNA, 33 bp, Homo sapien
attcaatcattttgtaagtttgacaggacactg

SEQ ID NO: 916978 - DNA, 33 bp, Homo sapien
attcaatcattttgtaggtttgacaggacactg

SEQ ID NO: 916979 - DNA, 33 bp, Homo sapien
tggccatttcaaatagccatacctgtcaacact

SEQ ID NO: 916980 - DNA, 33 bp, Homo sapien
tggccatttcaaatagtcatacctgtcaacact

SEQ ID NO: 916981 - DNA, 33 bp, Homo sapien
ggtgagattgaagctccaatatgtgtatctcgc

SEQ ID NO: 916982 - DNA, 33 bp, Homo sapien
ggtgagattgaagctcgaatatgtgtatctcgc

SEQ ID NO: 916983 - DNA, 33 bp, Homo sapien
agttaacaattttcaagcagggctgccatacaa

SEQ ID NO: 916984 - DNA, 33 bp, Homo sapien
agttaacaattttcaatcagggctgccatacaa

SEQ ID NO: 916985 - DNA, 33 bp, Homo sapien
atttacataattccacccgttcctttgcagcag

SEQ ID NO: 916986 - DNA, 33 bp, Homo sapien
atttacataattccactcgttcctttgcagcag

SEQ ID NO: 916987 - DNA, 33 bp, Homo sapien
cctgctgaatagtacccgaaatcgaagagaaca

SEQ ID NO: 916988 - DNA, 33 bp, Homo sapien
cctgctgaatagtacctgaaatcgaagagaaca

SEQ ID NO: 916989 - DNA, 33 bp, Homo sapien
actccggtttctttaaaacagtgaatatcacag

SEQ ID NO: 916990 - DNA, 33 bp, Homo sapien
actccggtttctttaatacagtgaatatcacag

SEQ ID NO: 916991 - DNA, 33 bp, Homo sapien
actgctatatcattcagcactccttgacctcca

SEQ ID NO: 916992 - DNA, 33 bp, Homo sapien
actgctatatcattcatcactccttgacctcca

SEQ ID NO: 916993 - DNA, 33 bp, Homo sapien
gtttaaaatatatttccaagtgataagtagatc

SEQ ID NO: 916994 - DNA, 33 bp, Homo sapien
gtttaaaatatatttcgaagtgataagtagatc

SEQ ID NO: 916995 - DNA, 33 bp, Homo sapien
tttaataccagtaatgaaaaatacaatgccttg

SEQ ID NO: 916996 - DNA, 33 bp, Homo sapien
tttaataccagtaatgcaaaatacaatgccttg

SEQ ID NO: 916997 - DNA, 33 bp, Homo sapien
ttgtttcacttacctacatatctgctaatttat

SEQ ID NO: 916998 - DNA, 33 bp, Homo sapien
ttgtttcacttacctatatatctgctaatttat

SEQ ID NO: 916999 - DNA, 33 bp, Homo sapien
gtgtcccagttccttacgctgctagacttgact

SEQ ID NO: 917000 - DNA, 33 bp, Homo sapien
gtgtcccagttccttaggctgctagacttgact

SEQ ID NO: 917001 - DNA, 33 bp, Homo sapien
aggacagcagatgttacagttctagtccaagtg

SEQ ID NO: 917002 - DNA, 33 bp, Homo sapien
aggacagcagatgttatagttctagtccaagtg

SEQ ID NO: 917003 - DNA, 33 bp, Homo sapien
aagtgcactttgtaaacgtaccagagagaacca

SEQ ID NO: 917004 - DNA, 33 bp, Homo sapien
aagtgcactttgtaaatgtaccagagagaacca

SEQ ID NO: 917005 - DNA, 33 bp, Homo sapien
gttgatgtatgtacggcataaactgatgcaatt

SEQ ID NO: 917006 - DNA, 33 bp, Homo sapien
gttgatgtatgtacggtataaactgatgcaatt

SEQ ID NO: 917007 - DNA, 33 bp, Homo sapien
ttctcatcctaatacactatcaaagcacacata

SEQ ID NO: 917008 - DNA, 33 bp, Homo sapien
ttctcatcctaatacattatcaaagcacacata

SEQ ID NO: 917009 - DNA, 33 bp, Homo sapien
ggtttcgttcatttgcacggagaagtgatgact

SEQ ID NO: 917010 - DNA, 33 bp, Homo sapien
ggtttcgttcatttgcgcggagaagtgatgact

SEQ ID NO: 917011 - DNA, 33 bp, Homo sapien
agaagatcggggttgggagtgatcagccccagc

SEQ ID NO: 917012 - DNA, 33 bp, Homo sapien
agaagatcggggttggtagtgatcagccccagc

SEQ ID NO: 917013 - DNA, 33 bp, Homo sapien
atatagctacctctgaacagaagacaggagaaa

SEQ ID NO: 917014 - DNA, 33 bp, Homo sapien
atatagctacctctgaccagaagacaggagaaa

SEQ ID NO: 917015 - DNA, 33 bp, Homo sapien
ttttctgaagtctcagaatttgggccaaagagg

SEQ ID NO: 917016 - DNA, 33 bp, Homo sapien
ttttctgaagtctcaggatttgggccaaagagg

SEQ ID NO: 917017 - DNA, 33 bp, Homo sapien
aaagtgcccaatttaacgtcggagctactgctt

SEQ ID NO: 917018 - DNA, 33 bp, Homo sapien
aaagtgcccaatttaatgtcggagctactgctt

SEQ ID NO: 917019 - DNA, 33 bp, Homo sapien
aaggatttacttgaatcaatgagaaaaaggcaa

SEQ ID NO: 917020 - DNA, 33 bp, Homo sapien
aaggatttacttgaatgaatgagaaaaaggcaa

SEQ ID NO: 917021 - DNA, 33 bp, Homo sapien
agtgtaggcgatcaaagctagtagttttcagaa

SEQ ID NO: 917022 - DNA, 33 bp, Homo sapien
agtgtaggcgatcaaatctagtagttttcagaa

SEQ ID NO: 917023 - DNA, 33 bp, Homo sapien
aatagaatattgttaacagggcttttgagcaag

SEQ ID NO: 917024 - DNA, 33 bp, Homo sapien
aatagaatattgttaagagggcttttgagcaag

SEQ ID NO: 917025 - DNA, 33 bp, Homo sapien
ttcaggaaatagcctcaccttgcaacctcttct

SEQ ID NO: 917026 - DNA, 33 bp, Homo sapien
ttcaggaaatagcctcgccttgcaacctcttct

SEQ ID NO: 917027 - DNA, 33 bp, Homo sapien
aacatttatcaaaggcaattatctccatgtata

SEQ ID NO: 917028 - DNA, 33 bp, Homo sapien
aacatttatcaaaggcgattatctccatgtata

SEQ ID NO: 917029 - DNA, 33 bp, Homo sapien
aattagggtttctacaccattggattttatcta

SEQ ID NO: 917030 - DNA, 33 bp, Homo sapien
aattagggtttctacatcattggattttatcta

SEQ ID NO: 917031 - DNA, 33 bp, Homo sapien
tacctcctggactatcacaacctagagatttgc

SEQ ID NO: 917032 - DNA, 33 bp, Homo sapien
tacctcctggactatcgcaacctagagatttgc

SEQ ID NO: 917033 - DNA, 33 bp, Homo sapien
ctattatgttaccaaactattttccagcagatt

SEQ ID NO: 917034 - DNA, 33 bp, Homo sapien
ctattatgttaccaaattattttccagcagatt

SEQ ID NO: 917035 - DNA, 33 bp, Homo sapien
cattctttgctctaaactctagcagtagaaatg

SEQ ID NO: 917036 - DNA, 33 bp, Homo sapien
cattctttgctctaaattctagcagtagaaatg

SEQ ID NO: 917037 - DNA, 33 bp, Homo sapien
gaaggctatgaaaacaagtaaagaagagcctac

SEQ ID NO: 917038 - DNA, 33 bp, Homo sapien
gaaggctatgaaaacaggtaaagaagagcctac

SEQ ID NO: 917039 - DNA, 33 bp, Homo sapien
tagaaaaattttgtaccaaacatctggagccaa

SEQ ID NO: 917040 - DNA, 33 bp, Homo sapien
tagaaaaattttgtactaaacatctggagccaa

SEQ ID NO: 917041 - DNA, 33 bp, Homo sapien
aaggtctgcttctttcccaattatcttgttccc

SEQ ID NO: 917042 - DNA, 33 bp, Homo sapien
aaggtctgcttctttctcaattatcttgttccc

SEQ ID NO: 917043 - DNA, 33 bp, Homo sapien
gcaagttgacagagaactcttttccttggactt

SEQ ID NO: 917044 - DNA, 33 bp, Homo sapien
gcaagttgacagagaagtcttttccttggactt

SEQ ID NO: 917045 - DNA, 33 bp, Homo sapien
tcaactcctctggcacaaattataccctctaat

SEQ ID NO: 917046 - DNA, 33 bp, Homo sapien
tcaactcctctggcacgaattataccctctaat

SEQ ID NO: 917047 - DNA, 33 bp, Homo sapien
atttagcagcttaaatcattggaatgtacaaat

SEQ ID NO: 917048 - DNA, 33 bp, Homo sapien
atttagcagcttaaatgattggaatgtacaaat

SEQ ID NO: 917049 - DNA, 33 bp, Homo sapien
gaaaaaaatcagcataatactttaatggctaat

SEQ ID NO: 917050 - DNA, 33 bp, Homo sapien
gaaaaaaatcagcatagtactttaatggctaat

SEQ ID NO: 917051 - DNA, 33 bp, Homo sapien
ggatgccagagattaaaaaaatgtgtgtatttg

SEQ ID NO: 917052 - DNA, 33 bp, Homo sapien
ggatgccagagattaagaaaatgtgtgtatttg

SEQ ID NO: 917053 - DNA, 33 bp, Homo sapien
atcagattgatggttgcaaggtaaaaatagaca

SEQ ID NO: 917054 - DNA, 33 bp, Homo sapien
atcagattgatggttgtaaggtaaaaatagaca

SEQ ID NO: 917055 - DNA, 33 bp, Homo sapien
atgcttatagaagagcaatgacaagcaaaattt

SEQ ID NO: 917056 - DNA, 33 bp, Homo sapien
atgcttatagaagagcgatgacaagcaaaattt

SEQ ID NO: 917057 - DNA, 33 bp, Homo sapien
tttacactgttccacccctttcgccatgtttca

SEQ ID NO: 917058 - DNA, 33 bp, Homo sapien
tttacactgttccacctctttcgccatgtttca

SEQ ID NO: 917059 - DNA, 33 bp, Homo sapien
gatctaaagaagagataaagtttgcttgaaata

SEQ ID NO: 917060 - DNA, 33 bp, Homo sapien
gatctaaagaagagatcaagtttgcttgaaata

SEQ ID NO: 917061 - DNA, 33 bp, Homo sapien
tttgaaagaagatggaagaatacgtatctttca

SEQ ID NO: 917062 - DNA, 33 bp, Homo sapien
tttgaaagaagatggatgaatacgtatctttca

SEQ ID NO: 917063 - DNA, 33 bp, Homo sapien
attaaggtacagagaacgataaatttggggtca

SEQ ID NO: 917064 - DNA, 33 bp, Homo sapien
attaaggtacagagaatgataaatttggggtca

SEQ ID NO: 917065 - DNA, 33 bp, Homo sapien
gtgtagtttctatccacctcaaagacaacacaa

SEQ ID NO: 917066 - DNA, 33 bp, Homo sapien
gtgtagtttctatccatctcaaagacaacacaa

SEQ ID NO: 917067 - DNA, 33 bp, Homo sapien
agaatagcaactggtaataataggcaaaattca

SEQ ID NO: 917068 - DNA, 33 bp, Homo sapien
agaatagcaactggtagtaataggcaaaattca

SEQ ID NO: 917069 - DNA, 33 bp, Homo sapien
tagcagctaacacatgacattgggcctgctggt

SEQ ID NO: 917070 - DNA, 33 bp, Homo sapien
tagcagctaacacatggcattgggcctgctggt

SEQ ID NO: 917071 - DNA, 33 bp, Homo sapien
ttcattaatgcagccaagctttctttttctagt

SEQ ID NO: 917072 - DNA, 33 bp, Homo sapien
ttcattaatgcagccaggctttctttttctagt

SEQ ID NO: 917073 - DNA, 33 bp, Homo sapien
cttttgatagccataccctagtcatccttaact

SEQ ID NO: 917074 - DNA, 33 bp, Homo sapien
cttttgatagccatactctagtcatccttaact

SEQ ID NO: 917075 - DNA, 33 bp, Homo sapien
aagattggtccaaaaaaattagctaagacattt

SEQ ID NO: 917076 - DNA, 33 bp, Homo sapien
aagattggtccaaaaagattagctaagacattt

SEQ ID NO: 917077 - DNA, 33 bp, Homo sapien
ttgctgtggtttttcacgctggtagaggtactg

SEQ ID NO: 917078 - DNA, 33 bp, Homo sapien
ttgctgtggtttttcatgctggtagaggtactg

SEQ ID NO: 917079 - DNA, 33 bp, Homo sapien
aaaaaaagcttatcgacgatcattagagaaatg

SEQ ID NO: 917080 - DNA, 33 bp, Homo sapien
aaaaaaagcttatcgatgatcattagagaaatg

SEQ ID NO: 917081 - DNA, 33 bp, Homo sapien
tataatccttcgatcagtctaattgggccttta

SEQ ID NO: 917082 - DNA, 33 bp, Homo sapien
tataatccttcgatcattctaattgggccttta

SEQ ID NO: 917083 - DNA, 33 bp, Homo sapien
gtccttagttctggaacggatagaagttcaatt

SEQ ID NO: 917084 - DNA, 33 bp, Homo sapien
gtccttagttctggaagggatagaagttcaatt

SEQ ID NO: 917085 - DNA, 33 bp, Homo sapien
ttctcttttcgtttccaccttcaatccagataa

SEQ ID NO: 917086 - DNA, 33 bp, Homo sapien
ttctcttttcgtttcctccttcaatccagataa

SEQ ID NO: 917087 - DNA, 33 bp, Homo sapien
ctaattgctaggttccaaaatagaatgaaatac

SEQ ID NO: 917088 - DNA, 33 bp, Homo sapien
ctaattgctaggttccgaaatagaatgaaatac

SEQ ID NO: 917089 - DNA, 33 bp, Homo sapien
cttctcattttcctcacatgtaatactggcaac

SEQ ID NO: 917090 - DNA, 33 bp, Homo sapien
cttctcattttcctcatatgtaatactggcaac

SEQ ID NO: 917091 - DNA, 33 bp, Homo sapien
gtcatgataggaatgcacctaccccactttaat

SEQ ID NO: 917092 - DNA, 33 bp, Homo sapien
gtcatgataggaatgcgcctaccccactttaat

SEQ ID NO: 917093 - DNA, 33 bp, Homo sapien
ctgtgtctgtccactacaaaggtctagaaataa

SEQ ID NO: 917094 - DNA, 33 bp, Homo sapien
ctgtgtctgtccactataaaggtctagaaataa

SEQ ID NO: 917095 - DNA, 33 bp, Homo sapien
gcttaaaagcgttaaactatttctgattagcac

SEQ ID NO: 917096 - DNA, 33 bp, Homo sapien
gcttaaaagcgttaaagtatttctgattagcac

SEQ ID NO: 917097 - DNA, 33 bp, Homo sapien
ggctacagatccttgactagatttgagcctaaa

SEQ ID NO: 917098 - DNA, 33 bp, Homo sapien
ggctacagatccttgattagatttgagcctaaa

SEQ ID NO: 917099 - DNA, 33 bp, Homo sapien
gacatttgtctaattgcaacagaaagtcagttt

SEQ ID NO: 917100 - DNA, 33 bp, Homo sapien
gacatttgtctaattggaacagaaagtcagttt

SEQ ID NO: 917101 - DNA, 33 bp, Homo sapien
attgccttctcctctggattggtctcaaacatc

SEQ ID NO: 917102 - DNA, 33 bp, Homo sapien
attgccttctcctctgtattggtctcaaacatc

SEQ ID NO: 917103 - DNA, 33 bp, Homo sapien
tctaaaatatcattcaccccagtaaaatatctc

SEQ ID NO: 917104 - DNA, 33 bp, Homo sapien
tctaaaatatcattcatcccagtaaaatatctc

SEQ ID NO: 917105 - DNA, 33 bp, Homo sapien
ttgattctttgtggcaaattggcttttattaaa

SEQ ID NO: 917106 - DNA, 33 bp, Homo sapien
ttgattctttgtggcagattggcttttattaaa

SEQ ID NO: 917107 - DNA, 33 bp, Homo sapien
catacccagtacaataaaatttggcacataact

SEQ ID NO: 917108 - DNA, 33 bp, Homo sapien
catacccagtacaatagaatttggcacataact

SEQ ID NO: 917109 - DNA, 33 bp, Homo sapien
aatctttttacatcttcaacagtacttgttatt

SEQ ID NO: 917110 - DNA, 33 bp, Homo sapien
aatctttttacatcttgaacagtacttgttatt

SEQ ID NO: 917111 - DNA, 33 bp, Homo sapien
aaatcagatatagtgcaacttacatcaacataa

SEQ ID NO: 917112 - DNA, 33 bp, Homo sapien
aaatcagatatagtgcgacttacatcaacataa

SEQ ID NO: 917113 - DNA, 33 bp, Homo sapien
agatgtgtcagctaaacggtgatagagatttct

SEQ ID NO: 917114 - DNA, 33 bp, Homo sapien
agatgtgtcagctaaatggtgatagagatttct

SEQ ID NO: 917115 - DNA, 33 bp, Homo sapien
atacataggttttaaaaacaagagtggcaagat

SEQ ID NO: 917116 - DNA, 33 bp, Homo sapien
atacataggttttaaagacaagagtggcaagat

SEQ ID NO: 917117 - DNA, 33 bp, Homo sapien
tgtctaggagtagttcaaggaagtcttcttaaa

SEQ ID NO: 917118 - DNA, 33 bp, Homo sapien
tgtctaggagtagttcgaggaagtcttcttaaa

SEQ ID NO: 917119 - DNA, 33 bp, Homo sapien
aaaaatgacagcttccaatttttatctgtggaa

SEQ ID NO: 917120 - DNA, 33 bp, Homo sapien
aaaaatgacagcttccgatttttatctgtggaa

SEQ ID NO: 917121 - DNA, 33 bp, Homo sapien
tggaatcagcagagataaacagcaagagcgagc

SEQ ID NO: 917122 - DNA, 33 bp, Homo sapien
tggaatcagcagagattaacagcaagagcgagc

SEQ ID NO: 917123 - DNA, 33 bp, Homo sapien
ctagcccctaccctaacagcagcttcagacttt

SEQ ID NO: 917124 - DNA, 33 bp, Homo sapien
ctagcccctaccctaagagcagcttcagacttt

SEQ ID NO: 917125 - DNA, 33 bp, Homo sapien
gagtatttgtaaccatgaaataaagtccatgaa

SEQ ID NO: 917126 - DNA, 33 bp, Homo sapien
gagtatttgtaaccattaaataaagtccatgaa

SEQ ID NO: 917127 - DNA, 33 bp, Homo sapien
aaaattactgataatcaccaaagtcaatattga

SEQ ID NO: 917128 - DNA, 33 bp, Homo sapien
aaaattactgataatcgccaaagtcaatattga

SEQ ID NO: 917129 - DNA, 33 bp, Homo sapien
ctcttcccctactataaccccgataggctgcag

SEQ ID NO: 917130 - DNA, 33 bp, Homo sapien
ctcttcccctactatacccccgataggctgcag

SEQ ID NO: 917131 - DNA, 33 bp, Homo sapien
accaccaaaagtctcactcttgtagatgctgta

SEQ ID NO: 917132 - DNA, 33 bp, Homo sapien
accaccaaaagtctcattcttgtagatgctgta

SEQ ID NO: 917133 - DNA, 33 bp, Homo sapien
caatatctccctgaagcacgccatctctgctaa

SEQ ID NO: 917134 - DNA, 33 bp, Homo sapien
caatatctccctgaagtacgccatctctgctaa

SEQ ID NO: 917135 - DNA, 33 bp, Homo sapien
ttgttactataaggcacggaattgaaaataaca

SEQ ID NO: 917136 - DNA, 33 bp, Homo sapien
ttgttactataaggcatggaattgaaaataaca

SEQ ID NO: 917137 - DNA, 33 bp, Homo sapien
agttatctcaacttctaactagaatggcataaa

SEQ ID NO: 917138 - DNA, 33 bp, Homo sapien
agttatctcaacttctgactagaatggcataaa

SEQ ID NO: 917139 - DNA, 33 bp, Homo sapien
agagaatggagcagaacaatgatttaaaaaacc

SEQ ID NO: 917140 - DNA, 33 bp, Homo sapien
agagaatggagcagaataatgatttaaaaaacc

SEQ ID NO: 917141 - DNA, 33 bp, Homo sapien
cttatccccagtatgacagcgtttgaaggtgga

SEQ ID NO: 917142 - DNA, 33 bp, Homo sapien
cttatccccagtatgatagcgtttgaaggtgga

SEQ ID NO: 917143 - DNA, 33 bp, Homo sapien
tatactagtcccttgacctttgactacttaatc

SEQ ID NO: 917144 - DNA, 33 bp, Homo sapien
tatactagtcccttgatctttgactacttaatc

SEQ ID NO: 917145 - DNA, 33 bp, Homo sapien
ctgttagaacagtctgaactaagacacttcaca

SEQ ID NO: 917146 - DNA, 33 bp, Homo sapien
ctgttagaacagtctggactaagacacttcaca

SEQ ID NO: 917147 - DNA, 33 bp, Homo sapien
tttcccagtactacacactatgggattctgact

SEQ ID NO: 917148 - DNA, 33 bp, Homo sapien
tttcccagtactacacgctatgggattctgact

SEQ ID NO: 917149 - DNA, 33 bp, Homo sapien
attgaggcagtagagagataaataccacttagc

SEQ ID NO: 917150 - DNA, 33 bp, Homo sapien
attgaggcagtagagatataaataccacttagc

SEQ ID NO: 917151 - DNA, 33 bp, Homo sapien
tggttaccacgaaaacacgcagatcatatatcc

SEQ ID NO: 917152 - DNA, 33 bp, Homo sapien
tggttaccacgaaaacgcgcagatcatatatcc

SEQ ID NO: 917153 - DNA, 33 bp, Homo sapien
gatacataatcaaaaggcagacatagtaatata

SEQ ID NO: 917154 - DNA, 33 bp, Homo sapien
gatacataatcaaaagtcagacatagtaatata

SEQ ID NO: 917155 - DNA, 33 bp, Homo sapien
ggtcaactaaaattcacgtaagccaaaaatttt

SEQ ID NO: 917156 - DNA, 33 bp, Homo sapien
ggtcaactaaaattcatgtaagccaaaaatttt

SEQ ID NO: 917157 - DNA, 33 bp, Homo sapien
aaagcctctggtccaccgtcttggagttaaaac

SEQ ID NO: 917158 - DNA, 33 bp, Homo sapien
aaagcctctggtccactgtcttggagttaaaac

SEQ ID NO: 917159 - DNA, 33 bp, Homo sapien
caatgttattaaggtaaaagggttgaatgtcct

SEQ ID NO: 917160 - DNA, 33 bp, Homo sapien
caatgttattaaggtacaagggttgaatgtcct

SEQ ID NO: 917161 - DNA, 33 bp, Homo sapien
aaattctggagtcgataaccctttttcaggatg

SEQ ID NO: 917162 - DNA, 33 bp, Homo sapien
aaattctggagtcgattaccctttttcaggatg

SEQ ID NO: 917163 - DNA, 33 bp, Homo sapien
taaagtagccaaacgcactgccgtttcatctga

SEQ ID NO: 917164 - DNA, 33 bp, Homo sapien
taaagtagccaaacgcgctgccgtttcatctga

SEQ ID NO: 917165 - DNA, 33 bp, Homo sapien
agagttagggtaggtcaaaaagagaagggatta

SEQ ID NO: 917166 - DNA, 33 bp, Homo sapien
agagttagggtaggtcgaaaagagaagggatta

SEQ ID NO: 917167 - DNA, 33 bp, Homo sapien
ctactgcattacaagagctgctcatttcagtat

SEQ ID NO: 917168 - DNA, 33 bp, Homo sapien
ctactgcattacaagatctgctcatttcagtat

SEQ ID NO: 917169 - DNA, 33 bp, Homo sapien
tatttactgaataaaaagtgttctggcacttaa

SEQ ID NO: 917170 - DNA, 33 bp, Homo sapien
tatttactgaataaaaggtgttctggcacttaa

SEQ ID NO: 917171 - DNA, 33 bp, Homo sapien
tatattcaagatgttaaaaattgagtcaaatac

SEQ ID NO: 917172 - DNA, 33 bp, Homo sapien
tatattcaagatgttagaaattgagtcaaatac

SEQ ID NO: 917173 - DNA, 33 bp, Homo sapien
tcatgatatgaaatcagctttctgttctaaaag

SEQ ID NO: 917174 - DNA, 33 bp, Homo sapien
tcatgatatgaaatcatctttctgttctaaaag

SEQ ID NO: 917175 - DNA, 33 bp, Homo sapien
acactcttgagggcccagaaagctccaccaacc

SEQ ID NO: 917176 - DNA, 33 bp, Homo sapien
acactcttgagggcccggaaagctccaccaacc

SEQ ID NO: 917177 - DNA, 33 bp, Homo sapien
gtacattcacctataaaaacctaagtttactat

SEQ ID NO: 917178 - DNA, 33 bp, Homo sapien
gtacattcacctataagaacctaagtttactat

SEQ ID NO: 917179 - DNA, 33 bp, Homo sapien
ctgcaaattcaatgggcaaaattgttgaaataa

SEQ ID NO: 917180 - DNA, 33 bp, Homo sapien
ctgcaaattcaatggggaaaattgttgaaataa

SEQ ID NO: 917181 - DNA, 33 bp, Homo sapien
ctggagactgcctaaactgattgagttctgggg

SEQ ID NO: 917182 - DNA, 33 bp, Homo sapien
ctggagactgcctaaattgattgagttctgggg

SEQ ID NO: 917183 - DNA, 33 bp, Homo sapien
caccaatagctgatcaagtatggccactcagtc

SEQ ID NO: 917184 - DNA, 33 bp, Homo sapien
caccaatagctgatcaggtatggccactcagtc

SEQ ID NO: 917185 - DNA, 33 bp, Homo sapien
tattacatcctaggtacaatgtaacaggagcaa

SEQ ID NO: 917186 - DNA, 33 bp, Homo sapien
tattacatcctaggtataatgtaacaggagcaa

SEQ ID NO: 917187 - DNA, 33 bp, Homo sapien
aaaacctgccttcaaaccgtggcttcatcattt

SEQ ID NO: 917188 - DNA, 33 bp, Homo sapien
aaaacctgccttcaaatcgtggcttcatcattt

SEQ ID NO: 917189 - DNA, 33 bp, Homo sapien
gcagcacctagggctaacttgtttatttatgtc

SEQ ID NO: 917190 - DNA, 33 bp, Homo sapien
gcagcacctagggctagcttgtttatttatgtc

SEQ ID NO: 917191 - DNA, 33 bp, Homo sapien
catatgttcagaggaaacattatttggcctacc

SEQ ID NO: 917192 - DNA, 33 bp, Homo sapien
catatgttcagaggaagcattatttggcctacc

SEQ ID NO: 917193 - DNA, 33 bp, Homo sapien
agccatacgcagcagtcaaaaaaagataccctt

SEQ ID NO: 917194 - DNA, 33 bp, Homo sapien
agccatacgcagcagtgaaaaaaagataccctt

SEQ ID NO: 917195 - DNA, 33 bp, Homo sapien
ccagggttatctcgaaatcgtgggcttaagtga

SEQ ID NO: 917196 - DNA, 33 bp, Homo sapien
ccagggttatctcgaactcgtgggcttaagtga

SEQ ID NO: 917197 - DNA, 33 bp, Homo sapien
aatatctgttgctaaaggcaaataaacatcaca

SEQ ID NO: 917198 - DNA, 33 bp, Homo sapien
aatatctgttgctaaatgcaaataaacatcaca

SEQ ID NO: 917199 - DNA, 33 bp, Homo sapien
cacaaaatggtcattacagttccaacattgaac

SEQ ID NO: 917200 - DNA, 33 bp, Homo sapien
cacaaaatggtcattatagttccaacattgaac

SEQ ID NO: 917201 - DNA, 33 bp, Homo sapien
caaattatgtggattacatggacttttaaaata

SEQ ID NO: 917202 - DNA, 33 bp, Homo sapien
caaattatgtggattatatggacttttaaaata

SEQ ID NO: 917203 - DNA, 33 bp, Homo sapien
catttttaactatccaagattttttgactaaga

SEQ ID NO: 917204 - DNA, 33 bp, Homo sapien
catttttaactatccatgattttttgactaaga

SEQ ID NO: 917205 - DNA, 33 bp, Homo sapien
tttaaagtagagagacaatcaaaaggatgagtg

SEQ ID NO: 917206 - DNA, 33 bp, Homo sapien
tttaaagtagagagacgatcaaaaggatgagtg

SEQ ID NO: 917207 - DNA, 33 bp, Homo sapien
catggctcttctacaaccttcccattccttcct

SEQ ID NO: 917208 - DNA, 33 bp, Homo sapien
catggctcttctacaatcttcccattccttcct

SEQ ID NO: 917209 - DNA, 33 bp, Homo sapien
tcctctgggaatttcaagatgctgctacccctg

SEQ ID NO: 917210 - DNA, 33 bp, Homo sapien
tcctctgggaatttcaggatgctgctacccctg

SEQ ID NO: 917211 - DNA, 33 bp, Homo sapien
aaaatgaaaaaaatcaactgaaatatagaatac

SEQ ID NO: 917212 - DNA, 33 bp, Homo sapien
aaaatgaaaaaaatcagctgaaatatagaatac

SEQ ID NO: 917213 - DNA, 33 bp, Homo sapien
gaagaatcaccatctggcaaataaatggtgaag

SEQ ID NO: 917214 - DNA, 33 bp, Homo sapien
gaagaatcaccatctgtcaaataaatggtgaag

SEQ ID NO: 917215 - DNA, 33 bp, Homo sapien
ccagaatatggcaaaacgatgaactatcactcc

SEQ ID NO: 917216 - DNA, 33 bp, Homo sapien
ccagaatatggcaaaatgatgaactatcactcc

SEQ ID NO: 917217 - DNA, 33 bp, Homo sapien
cccacgaaatgctctgaaagagaaaaggtgttc

SEQ ID NO: 917218 - DNA, 33 bp, Homo sapien
cccacgaaatgctctggaagagaaaaggtgttc

SEQ ID NO: 917219 - DNA, 33 bp, Homo sapien
caattctgtttgaacccatgtgagacctcactt

SEQ ID NO: 917220 - DNA, 33 bp, Homo sapien
caattctgtttgaacctatgtgagacctcactt

SEQ ID NO: 917221 - DNA, 33 bp, Homo sapien
atcccagtgaatcccaagtagagtaaaaacaac

SEQ ID NO: 917222 - DNA, 33 bp, Homo sapien
atcccagtgaatcccaggtagagtaaaaacaac

SEQ ID NO: 917223 - DNA, 33 bp, Homo sapien
atattcctgaatttcagactttggactagaaaa

SEQ ID NO: 917224 - DNA, 33 bp, Homo sapien
atattcctgaatttcatactttggactagaaaa

SEQ ID NO: 917225 - DNA, 33 bp, Homo sapien
aatgaggtggcactcaataaaagttgcataaag

SEQ ID NO: 917226 - DNA, 33 bp, Homo sapien
aatgaggtggcactcagtaaaagttgcataaag

SEQ ID NO: 917227 - DNA, 33 bp, Homo sapien
tattatgaggtttctcaaaatagtgctgtcttg

SEQ ID NO: 917228 - DNA, 33 bp, Homo sapien
tattatgaggtttctcgaaatagtgctgtcttg

SEQ ID NO: 917229 - DNA, 33 bp, Homo sapien
cactggatgaaatcaagatatcgtcagaatcct

SEQ ID NO: 917230 - DNA, 33 bp, Homo sapien
cactggatgaaatcaatatatcgtcagaatcct

SEQ ID NO: 917231 - DNA, 33 bp, Homo sapien
ttacttcatcggtaagcccaaacaaggttttct

SEQ ID NO: 917232 - DNA, 33 bp, Homo sapien
ttacttcatcggtaagtccaaacaaggttttct

SEQ ID NO: 917233 - DNA, 33 bp, Homo sapien
ctgatctcattagaaaagtatcaactattgtca

SEQ ID NO: 917234 - DNA, 33 bp, Homo sapien
ctgatctcattagaaacgtatcaactattgtca

SEQ ID NO: 917235 - DNA, 33 bp, Homo sapien
ttaaattcttccagtacatggcattcctccagg

SEQ ID NO: 917236 - DNA, 33 bp, Homo sapien
ttaaattcttccagtatatggcattcctccagg

SEQ ID NO: 917237 - DNA, 33 bp, Homo sapien
caactgtaagcacaaaaaaatatggcatggatc

SEQ ID NO: 917238 - DNA, 33 bp, Homo sapien
caactgtaagcacaaacaaatatggcatggatc

SEQ ID NO: 917239 - DNA, 33 bp, Homo sapien
aagttgcagttatgaaatcaatattagtatgta

SEQ ID NO: 917240 - DNA, 33 bp, Homo sapien
aagttgcagttatgaagtcaatattagtatgta

SEQ ID NO: 917241 - DNA, 33 bp, Homo sapien
ggatgttgaattttatcaaatgatttttcaaca

SEQ ID NO: 917242 - DNA, 33 bp, Homo sapien
ggatgttgaattttatgaaatgatttttcaaca

SEQ ID NO: 917243 - DNA, 33 bp, Homo sapien
tagcagatagataagaacattcaaacaataaga

SEQ ID NO: 917244 - DNA, 33 bp, Homo sapien
tagcagatagataagatcattcaaacaataaga

SEQ ID NO: 917245 - DNA, 33 bp, Homo sapien
tcttctttctcaaaaccattttcaattaaataa

SEQ ID NO: 917246 - DNA, 33 bp, Homo sapien
tcttctttctcaaaacgattttcaattaaataa

SEQ ID NO: 917247 - DNA, 33 bp, Homo sapien
atcacacccaagataacgtctgaaaaatgttat

SEQ ID NO: 917248 - DNA, 33 bp, Homo sapien
atcacacccaagataatgtctgaaaaatgttat

SEQ ID NO: 917249 - DNA, 33 bp, Homo sapien
aattcagcccactgataatagactgaccttgaa

SEQ ID NO: 917250 - DNA, 33 bp, Homo sapien
aattcagcccactgattatagactgaccttgaa

SEQ ID NO: 917251 - DNA, 33 bp, Homo sapien
tgaaaatgtaagaccacatgacaataaaataag

SEQ ID NO: 917252 - DNA, 33 bp, Homo sapien
tgaaaatgtaagaccagatgacaataaaataag

SEQ ID NO: 917253 - DNA, 33 bp, Homo sapien
gaggttgagggcagaaaagaaatgctagagggg

SEQ ID NO: 917254 - DNA, 33 bp, Homo sapien
gaggttgagggcagaacagaaatgctagagggg

SEQ ID NO: 917255 - DNA, 33 bp, Homo sapien
tagcagctgctatcagaaaaccttggaaagttt

SEQ ID NO: 917256 - DNA, 33 bp, Homo sapien
tagcagctgctatcaggaaaccttggaaagttt

SEQ ID NO: 917257 - DNA, 33 bp, Homo sapien
ctctcatgaaggtaacggacattttgacctttg

SEQ ID NO: 917258 - DNA, 33 bp, Homo sapien
ctctcatgaaggtaactgacattttgacctttg

SEQ ID NO: 917259 - DNA, 33 bp, Homo sapien
tcagttgatcttcaccagaagcctaagtcctca

SEQ ID NO: 917260 - DNA, 33 bp, Homo sapien
tcagttgatcttcaccggaagcctaagtcctca

SEQ ID NO: 917261 - DNA, 33 bp, Homo sapien
tgtcagattgataggaagcaatattttcctccc

SEQ ID NO: 917262 - DNA, 33 bp, Homo sapien
tgtcagattgataggatgcaatattttcctccc

SEQ ID NO: 917263 - DNA, 33 bp, Homo sapien
catgtgtgagaagtgcacccaagtctatgacct

SEQ ID NO: 917264 - DNA, 33 bp, Homo sapien
catgtgtgagaagtgctcccaagtctatgacct

SEQ ID NO: 917265 - DNA, 33 bp, Homo sapien
tctccttcagttgctcgaatcaatcataggttt

SEQ ID NO: 917266 - DNA, 33 bp, Homo sapien
tctccttcagttgctctaatcaatcataggttt

SEQ ID NO: 917267 - DNA, 33 bp, Homo sapien
atttgaagaacactaccaaccaatttgatctaa

SEQ ID NO: 917268 - DNA, 33 bp, Homo sapien
atttgaagaacactactaaccaatttgatctaa

SEQ ID NO: 917269 - DNA, 33 bp, Homo sapien
tcttaaattactttcacgtcattatgcacctgg

SEQ ID NO: 917270 - DNA, 33 bp, Homo sapien
tcttaaattactttcatgtcattatgcacctgg

SEQ ID NO: 917271 - DNA, 33 bp, Homo sapien
ttagtttttccatcggcagttgaacatcaagtg

SEQ ID NO: 917272 - DNA, 33 bp, Homo sapien
ttagtttttccatcggtagttgaacatcaagtg

SEQ ID NO: 917273 - DNA, 33 bp, Homo sapien
atccaggctaggatcaccttgtcactacaaatc

SEQ ID NO: 917274 - DNA, 33 bp, Homo sapien
atccaggctaggatcatcttgtcactacaaatc

SEQ ID NO: 917275 - DNA, 33 bp, Homo sapien
tgagaatgtaaattagcatagcctttatagaaa

SEQ ID NO: 917276 - DNA, 33 bp, Homo sapien
tgagaatgtaaattaggatagcctttatagaaa

SEQ ID NO: 917277 - DNA, 33 bp, Homo sapien
ctgcccactaccgatacattgcaggggtccata

SEQ ID NO: 917278 - DNA, 33 bp, Homo sapien
ctgcccactaccgatatattgcaggggtccata

SEQ ID NO: 917279 - DNA, 33 bp, Homo sapien
ccatgccaggtacttccatgcttctctatttcc

SEQ ID NO: 917280 - DNA, 33 bp, Homo sapien
ccatgccaggtacttcgatgcttctctatttcc

SEQ ID NO: 917281 - DNA, 33 bp, Homo sapien
tctttgacttggtttaaaagataatgttctacc

SEQ ID NO: 917282 - DNA, 33 bp, Homo sapien
tctttgacttggtttagaagataatgttctacc

SEQ ID NO: 917283 - DNA, 33 bp, Homo sapien
aatctgataaccaaggacataattatatggtaa

SEQ ID NO: 917284 - DNA, 33 bp, Homo sapien
aatctgataaccaagggcataattatatggtaa

SEQ ID NO: 917285 - DNA, 33 bp, Homo sapien
gtatcaactcttatgacgtagcctgagaggtca

SEQ ID NO: 917286 - DNA, 33 bp, Homo sapien
gtatcaactcttatgatgtagcctgagaggtca

SEQ ID NO: 917287 - DNA, 33 bp, Homo sapien
tattgcctgtttccaccagtgaaagtagaagat

SEQ ID NO: 917288 - DNA, 33 bp, Homo sapien
tattgcctgtttccactagtgaaagtagaagat

SEQ ID NO: 917289 - DNA, 33 bp, Homo sapien
ctataaacaagtcaacaaacaatcccattaaaa

SEQ ID NO: 917290 - DNA, 33 bp, Homo sapien
ctataaacaagtcaactaacaatcccattaaaa

SEQ ID NO: 917291 - DNA, 33 bp, Homo sapien
tttgtcactcaggtaccaagcctaatatccaac

SEQ ID NO: 917292 - DNA, 33 bp, Homo sapien
tttgtcactcaggtactaagcctaatatccaac

SEQ ID NO: 917293 - DNA, 33 bp, Homo sapien
gcagatacctaatactaaagtgctgtatgattg

SEQ ID NO: 917294 - DNA, 33 bp, Homo sapien
gcagatacctaatactgaagtgctgtatgattg

SEQ ID NO: 917295 - DNA, 33 bp, Homo sapien
acttctccatgataagactcccccaatcactaa

SEQ ID NO: 917296 - DNA, 33 bp, Homo sapien
acttctccatgataagcctcccccaatcactaa

SEQ ID NO: 917297 - DNA, 33 bp, Homo sapien
agaaggttaactagataagcacagaaaaatttt

SEQ ID NO: 917298 - DNA, 33 bp, Homo sapien
agaaggttaactagatgagcacagaaaaatttt

SEQ ID NO: 917299 - DNA, 33 bp, Homo sapien
atttgttccagccatcccatcacgggtacatac

SEQ ID NO: 917300 - DNA, 33 bp, Homo sapien
atttgttccagccatctcatcacgggtacatac

SEQ ID NO: 917301 - DNA, 33 bp, Homo sapien
agcatatgtccttcaacttcacccatgttgctg

SEQ ID NO: 917302 - DNA, 33 bp, Homo sapien
agcatatgtccttcaagttcacccatgttgctg

SEQ ID NO: 917303 - DNA, 33 bp, Homo sapien
tggaaaacaaagtttgcataacagcacatctct

SEQ ID NO: 917304 - DNA, 33 bp, Homo sapien
tggaaaacaaagtttggataacagcacatctct

SEQ ID NO: 917305 - DNA, 33 bp, Homo sapien
ggaatcattgcctactaagctatatatgtttag

SEQ ID NO: 917306 - DNA, 33 bp, Homo sapien
ggaatcattgcctactgagctatatatgtttag

SEQ ID NO: 917307 - DNA, 33 bp, Homo sapien
tatctactggtttctgcaaatcacttaaggaag

SEQ ID NO: 917308 - DNA, 33 bp, Homo sapien
tatctactggtttctggaaatcacttaaggaag

SEQ ID NO: 917309 - DNA, 33 bp, Homo sapien
aaaagtaaatcacaccaaattctggcgaggatg

SEQ ID NO: 917310 - DNA, 33 bp, Homo sapien
aaaagtaaatcacaccgaattctggcgaggatg

SEQ ID NO: 917311 - DNA, 33 bp, Homo sapien
tagtatgctcttaagtcacattagaaatcagtt

SEQ ID NO: 917312 - DNA, 33 bp, Homo sapien
tagtatgctcttaagttacattagaaatcagtt

SEQ ID NO: 917313 - DNA, 33 bp, Homo sapien
aatattacttttccatgagattgctaagatctc

SEQ ID NO: 917314 - DNA, 33 bp, Homo sapien
aatattacttttccattagattgctaagatctc

SEQ ID NO: 917315 - DNA, 33 bp, Homo sapien
tatggccatacatctgaaaatttatttgcattt

SEQ ID NO: 917316 - DNA, 33 bp, Homo sapien
tatggccatacatctggaaatttatttgcattt

SEQ ID NO: 917317 - DNA, 33 bp, Homo sapien
agtgctacttataaacacatctgacgttactgc

SEQ ID NO: 917318 - DNA, 33 bp, Homo sapien
agtgctacttataaacgcatctgacgttactgc

SEQ ID NO: 917319 - DNA, 33 bp, Homo sapien
tctgagtaccaacaacccctcattcacttccaa

SEQ ID NO: 917320 - DNA, 33 bp, Homo sapien
tctgagtaccaacaactcctcattcacttccaa

SEQ ID NO: 917321 - DNA, 33 bp, Homo sapien
ctttttatttgcatgacgtcatacttttaccaa

SEQ ID NO: 917322 - DNA, 33 bp, Homo sapien
ctttttatttgcatgatgtcatacttttaccaa

SEQ ID NO: 917323 - DNA, 33 bp, Homo sapien
acacaggtatttgttacatgattcattgtggct

SEQ ID NO: 917324 - DNA, 33 bp, Homo sapien
acacaggtatttgttatatgattcattgtggct

SEQ ID NO: 917325 - DNA, 33 bp, Homo sapien
aacgttaatctagagcaaggtcatctgcttgtc

SEQ ID NO: 917326 - DNA, 33 bp, Homo sapien
aacgttaatctagagcgaggtcatctgcttgtc

SEQ ID NO: 917327 - DNA, 33 bp, Homo sapien
ctgatcatctttgaggcaaacagagtgaagaaa

SEQ ID NO: 917328 - DNA, 33 bp, Homo sapien
ctgatcatctttgaggtaaacagagtgaagaaa

SEQ ID NO: 917329 - DNA, 33 bp, Homo sapien
ttacaataacggtccacagcatagtcatataaa

SEQ ID NO: 917330 - DNA, 33 bp, Homo sapien
ttacaataacggtccagagcatagtcatataaa

SEQ ID NO: 917331 - DNA, 33 bp, Homo sapien
aaatacactgcgaatacgaaagagtactttaaa

SEQ ID NO: 917332 - DNA, 33 bp, Homo sapien
aaatacactgcgaatatgaaagagtactttaaa

SEQ ID NO: 917333 - DNA, 33 bp, Homo sapien
ttctccaatgtaccaacggcatgtaaattctat

SEQ ID NO: 917334 - DNA, 33 bp, Homo sapien
ttctccaatgtaccaatggcatgtaaattctat

SEQ ID NO: 917335 - DNA, 33 bp, Homo sapien
tgcacactagaatacactacagtctagttccat

SEQ ID NO: 917336 - DNA, 33 bp, Homo sapien
tgcacactagaatacattacagtctagttccat

SEQ ID NO: 917337 - DNA, 33 bp, Homo sapien
acctgcatggtggacactctgacaggcggagaa

SEQ ID NO: 917338 - DNA, 33 bp, Homo sapien
acctgcatggtggacattctgacaggcggagaa

SEQ ID NO: 917339 - DNA, 33 bp, Homo sapien
aatgacatataagcagaaatgactgggcagcgc

SEQ ID NO: 917340 - DNA, 33 bp, Homo sapien
aatgacatataagcagcaatgactgggcagcgc

SEQ ID NO: 917341 - DNA, 33 bp, Homo sapien
tccagatctgctgaatcagaaattctggaagtg

SEQ ID NO: 917342 - DNA, 33 bp, Homo sapien
tccagatctgctgaatgagaaattctggaagtg

SEQ ID NO: 917343 - DNA, 33 bp, Homo sapien
cctatttatcttcaaacggcaacacctcttctc

SEQ ID NO: 917344 - DNA, 33 bp, Homo sapien
cctatttatcttcaaagggcaacacctcttctc

SEQ ID NO: 917345 - DNA, 33 bp, Homo sapien
catatgaagcatttataagcatagtatgaagac

SEQ ID NO: 917346 - DNA, 33 bp, Homo sapien
catatgaagcatttatgagcatagtatgaagac

SEQ ID NO: 917347 - DNA, 33 bp, Homo sapien
ctttcccagtttatccagagcaggatgaatccc

SEQ ID NO: 917348 - DNA, 33 bp, Homo sapien
ctttcccagtttatccggagcaggatgaatccc

SEQ ID NO: 917349 - DNA, 33 bp, Homo sapien
ggacactgcaaaagtacctagtgagtgagtaag

SEQ ID NO: 917350 - DNA, 33 bp, Homo sapien
ggacactgcaaaagtatctagtgagtgagtaag

SEQ ID NO: 917351 - DNA, 33 bp, Homo sapien
aggaaataatgcagaaatagtctaaaaatcatg

SEQ ID NO: 917352 - DNA, 33 bp, Homo sapien
aggaaataatgcagaagtagtctaaaaatcatg

SEQ ID NO: 917353 - DNA, 33 bp, Homo sapien
tatctctattgcataaatcacatccataatgga

SEQ ID NO: 917354 - DNA, 33 bp, Homo sapien
tatctctattgcataagtcacatccataatgga

SEQ ID NO: 917355 - DNA, 33 bp, Homo sapien
aaaaagagacattacaactgatatcataaaaat

SEQ ID NO: 917356 - DNA, 33 bp, Homo sapien
aaaaagagacattacagctgatatcataaaaat

SEQ ID NO: 917357 - DNA, 33 bp, Homo sapien
acattttccaacataccctatgaaatgtacatt

SEQ ID NO: 917358 - DNA, 33 bp, Homo sapien
acattttccaacatactctatgaaatgtacatt

SEQ ID NO: 917359 - DNA, 33 bp, Homo sapien
tcagctacagaaatagactaagcgaaccttgtg

SEQ ID NO: 917360 - DNA, 33 bp, Homo sapien
tcagctacagaaataggctaagcgaaccttgtg

SEQ ID NO: 917361 - DNA, 33 bp, Homo sapien
ttttcaggaccctgaccacaagagaataaagga

SEQ ID NO: 917362 - DNA, 33 bp, Homo sapien
ttttcaggaccctgactacaagagaataaagga

SEQ ID NO: 917363 - DNA, 33 bp, Homo sapien
ggagactgaggtggtcacaatgctcaggaaaga

SEQ ID NO: 917364 - DNA, 33 bp, Homo sapien
ggagactgaggtggtcgcaatgctcaggaaaga

SEQ ID NO: 917365 - DNA, 33 bp, Homo sapien
ggaagtcttcatggaacgttatccaagttgctt

SEQ ID NO: 917366 - DNA, 33 bp, Homo sapien
ggaagtcttcatggaatgttatccaagttgctt

SEQ ID NO: 917367 - DNA, 33 bp, Homo sapien
acacagttgcttttgacgccttgtaaagcacag

SEQ ID NO: 917368 - DNA, 33 bp, Homo sapien
acacagttgcttttgatgccttgtaaagcacag

SEQ ID NO: 917369 - DNA, 33 bp, Homo sapien
cctcatctgtggtaaactagtaccagtggaatt

SEQ ID NO: 917370 - DNA, 33 bp, Homo sapien
cctcatctgtggtaaagtagtaccagtggaatt

SEQ ID NO: 917371 - DNA, 33 bp, Homo sapien
ttgatcagtcaggttacagaccagtcaattata

SEQ ID NO: 917372 - DNA, 33 bp, Homo sapien
ttgatcagtcaggttagagaccagtcaattata

SEQ ID NO: 917373 - DNA, 33 bp, Homo sapien
aagattggctcaaagaaaagttcagaaaaaact

SEQ ID NO: 917374 - DNA, 33 bp, Homo sapien
aagattggctcaaagagaagttcagaaaaaact

SEQ ID NO: 917375 - DNA, 33 bp, Homo sapien
cactgttagcataaaactgcctactcaagcctc

SEQ ID NO: 917376 - DNA, 33 bp, Homo sapien
cactgttagcataaaagtgcctactcaagcctc

SEQ ID NO: 917377 - DNA, 33 bp, Homo sapien
aaaaactttgatccagaagaaattccatccctt

SEQ ID NO: 917378 - DNA, 33 bp, Homo sapien
aaaaactttgatccaggagaaattccatccctt

SEQ ID NO: 917379 - DNA, 33 bp, Homo sapien
gattatgaccatgtgaataacaaaaattctgat

SEQ ID NO: 917380 - DNA, 33 bp, Homo sapien
gattatgaccatgtgactaacaaaaattctgat

SEQ ID NO: 917381 - DNA, 33 bp, Homo sapien
acaaaaaaacttgttagagccagacatcatgac

SEQ ID NO: 917382 - DNA, 33 bp, Homo sapien
acaaaaaaacttgttatagccagacatcatgac

SEQ ID NO: 917383 - DNA, 33 bp, Homo sapien
gtaacctacatagaataagagatacacatgaaa

SEQ ID NO: 917384 - DNA, 33 bp, Homo sapien
gtaacctacatagaatgagagatacacatgaaa

SEQ ID NO: 917385 - DNA, 33 bp, Homo sapien
cccacagaagctctgcactcaaaaatggtgaaa

SEQ ID NO: 917386 - DNA, 33 bp, Homo sapien
cccacagaagctctgcgctcaaaaatggtgaaa

SEQ ID NO: 917387 - DNA, 33 bp, Homo sapien
ctagctgctctggtaacggaaccccaatttggc

SEQ ID NO: 917388 - DNA, 33 bp, Homo sapien
ctagctgctctggtaatggaaccccaatttggc

SEQ ID NO: 917389 - DNA, 33 bp, Homo sapien
tctttatctctcaatacaatgtagctttcagga

SEQ ID NO: 917390 - DNA, 33 bp, Homo sapien
tctttatctctcaatagaatgtagctttcagga

SEQ ID NO: 917391 - DNA, 33 bp, Homo sapien
gtggacatgtagcacccggtatgcaatcaagaa

SEQ ID NO: 917392 - DNA, 33 bp, Homo sapien
gtggacatgtagcacctggtatgcaatcaagaa

SEQ ID NO: 917393 - DNA, 33 bp, Homo sapien
gctaattctagtcagaaaaaccagcaaatgttt

SEQ ID NO: 917394 - DNA, 33 bp, Homo sapien
gctaattctagtcagagaaaccagcaaatgttt

SEQ ID NO: 917395 - DNA, 33 bp, Homo sapien
tattctatttgagatcaaaaatgccttcagaag

SEQ ID NO: 917396 - DNA, 33 bp, Homo sapien
tattctatttgagatcgaaaatgccttcagaag

SEQ ID NO: 917397 - DNA, 33 bp, Homo sapien
caatgggaataagacacatggaatgaatctaaa

SEQ ID NO: 917398 - DNA, 33 bp, Homo sapien
caatgggaataagacatatggaatgaatctaaa

SEQ ID NO: 917399 - DNA, 33 bp, Homo sapien
tgtaatatgaactatacaagtaccgactaggct

SEQ ID NO: 917400 - DNA, 33 bp, Homo sapien
tgtaatatgaactatagaagtaccgactaggct

SEQ ID NO: 917401 - DNA, 33 bp, Homo sapien
ggcactgctaaatctaaaaaactatagatgccc

SEQ ID NO: 917402 - DNA, 33 bp, Homo sapien
ggcactgctaaatctagaaaactatagatgccc

SEQ ID NO: 917403 - DNA, 33 bp, Homo sapien
gtagattacagtttcactaacacatctcgatgt

SEQ ID NO: 917404 - DNA, 33 bp, Homo sapien
gtagattacagtttcattaacacatctcgatgt

SEQ ID NO: 917405 - DNA, 33 bp, Homo sapien
atgtgtcaaggagtgacaaagacaaatactgag

SEQ ID NO: 917406 - DNA, 33 bp, Homo sapien
atgtgtcaaggagtgagaaagacaaatactgag

SEQ ID NO: 917407 - DNA, 33 bp, Homo sapien
ccttgaagaaggaataccactaggaagcatgga

SEQ ID NO: 917408 - DNA, 33 bp, Homo sapien
ccttgaagaaggaatatcactaggaagcatgga

SEQ ID NO: 917409 - DNA, 33 bp, Homo sapien
tccattactctggtagcaagatgacagaccaac

SEQ ID NO: 917410 - DNA, 33 bp, Homo sapien
tccattactctggtaggaagatgacagaccaac

SEQ ID NO: 917411 - DNA, 33 bp, Homo sapien
ggagcacgtccgctgaagatgtacagatcaacc

SEQ ID NO: 917412 - DNA, 33 bp, Homo sapien
ggagcacgtccgctgaggatgtacagatcaacc

SEQ ID NO: 917413 - DNA, 33 bp, Homo sapien
catgtgccaagtcaaacaggctttatctcagtc

SEQ ID NO: 917414 - DNA, 33 bp, Homo sapien
catgtgccaagtcaaataggctttatctcagtc

SEQ ID NO: 917415 - DNA, 33 bp, Homo sapien
agagcttaggagaataagaaattgggctttggg

SEQ ID NO: 917416 - DNA, 33 bp, Homo sapien
agagcttaggagaataggaaattgggctttggg

SEQ ID NO: 917417 - DNA, 33 bp, Homo sapien
agagaggggacctttggacatgaatttgtttcc

SEQ ID NO: 917418 - DNA, 33 bp, Homo sapien
agagaggggacctttgtacatgaatttgtttcc

SEQ ID NO: 917419 - DNA, 33 bp, Homo sapien
ttctcctggcatattacggtatttagcacccat

SEQ ID NO: 917420 - DNA, 33 bp, Homo sapien
ttctcctggcatattatggtatttagcacccat

SEQ ID NO: 917421 - DNA, 33 bp, Homo sapien
attggagaggcaaaataataaacttgaaaatgg

SEQ ID NO: 917422 - DNA, 33 bp, Homo sapien
attggagaggcaaaatcataaacttgaaaatgg

SEQ ID NO: 917423 - DNA, 33 bp, Homo sapien
ataaagaatgaaactaagtctaacaaaagtaaa

SEQ ID NO: 917424 - DNA, 33 bp, Homo sapien
ataaagaatgaaactacgtctaacaaaagtaaa

SEQ ID NO: 917425 - DNA, 33 bp, Homo sapien
tatgaggtaggcaaacagattgtcctaaacttt

SEQ ID NO: 917426 - DNA, 33 bp, Homo sapien
tatgaggtaggcaaacggattgtcctaaacttt

SEQ ID NO: 917427 - DNA, 33 bp, Homo sapien
tttgcaaggcatacagacagctgaagaacactg

SEQ ID NO: 917428 - DNA, 33 bp, Homo sapien
tttgcaaggcatacaggcagctgaagaacactg

SEQ ID NO: 917429 - DNA, 33 bp, Homo sapien
ttcccataaagattttcagccttctggaagtat

SEQ ID NO: 917430 - DNA, 33 bp, Homo sapien
ttcccataaagattttgagccttctggaagtat

SEQ ID NO: 917431 - DNA, 33 bp, Homo sapien
gtctcccatcaaattacgacttcctggaggact

SEQ ID NO: 917432 - DNA, 33 bp, Homo sapien
gtctcccatcaaattatgacttcctggaggact

SEQ ID NO: 917433 - DNA, 33 bp, Homo sapien
caagaagcaatagagaaggtgataatagctaat

SEQ ID NO: 917434 - DNA, 33 bp, Homo sapien
caagaagcaatagagagggtgataatagctaat

SEQ ID NO: 917435 - DNA, 33 bp, Homo sapien
cagagccacaagttgaactaatctatatttttc

SEQ ID NO: 917436 - DNA, 33 bp, Homo sapien
cagagccacaagttgagctaatctatatttttc

SEQ ID NO: 917437 - DNA, 33 bp, Homo sapien
tatctgaggtactaaacgatgtgtttctaacag

SEQ ID NO: 917438 - DNA, 33 bp, Homo sapien
tatctgaggtactaaatgatgtgtttctaacag

SEQ ID NO: 917439 - DNA, 33 bp, Homo sapien
ctgtagtttgtaaccaagattgtcacacacttt

SEQ ID NO: 917440 - DNA, 33 bp, Homo sapien
ctgtagtttgtaaccaggattgtcacacacttt

SEQ ID NO: 917441 - DNA, 33 bp, Homo sapien
tctacctcacgtaggagagttctttctctatac

SEQ ID NO: 917442 - DNA, 33 bp, Homo sapien
tctacctcacgtaggatagttctttctctatac

SEQ ID NO: 917443 - DNA, 33 bp, Homo sapien
aaggcttggaagttcacgttccctagagaggtg

SEQ ID NO: 917444 - DNA, 33 bp, Homo sapien
aaggcttggaagttcatgttccctagagaggtg

SEQ ID NO: 917445 - DNA, 33 bp, Homo sapien
aacatattttgagaaaatccccaactattaata

SEQ ID NO: 917446 - DNA, 33 bp, Homo sapien
aacatattttgagaaattccccaactattaata

SEQ ID NO: 917447 - DNA, 33 bp, Homo sapien
catgggaatacagggcacagaaaaagtttaatc

SEQ ID NO: 917448 - DNA, 33 bp, Homo sapien
catgggaatacagggcgcagaaaaagtttaatc

SEQ ID NO: 917449 - DNA, 33 bp, Homo sapien
tcaattactcttttcaagtctaccgttcagttt

SEQ ID NO: 917450 - DNA, 33 bp, Homo sapien
tcaattactcttttcatgtctaccgttcagttt

SEQ ID NO: 917451 - DNA, 33 bp, Homo sapien
ttttttctaacttgaacattgtggcaataaact

SEQ ID NO: 917452 - DNA, 33 bp, Homo sapien
ttttttctaacttgaatattgtggcaataaact

SEQ ID NO: 917453 - DNA, 33 bp, Homo sapien
ttttctgggtgtaagacacatagtaatttccca

SEQ ID NO: 917454 - DNA, 33 bp, Homo sapien
ttttctgggtgtaagatacatagtaatttccca

SEQ ID NO: 917455 - DNA, 33 bp, Homo sapien
ttcttgcctgacaccacgtttatgtgactttgt

SEQ ID NO: 917456 - DNA, 33 bp, Homo sapien
ttcttgcctgacaccatgtttatgtgactttgt

SEQ ID NO: 917457 - DNA, 33 bp, Homo sapien
tatttagaagtaagagcaagaaattctcagcca

SEQ ID NO: 917458 - DNA, 33 bp, Homo sapien
tatttagaagtaagaggaagaaattctcagcca

SEQ ID NO: 917459 - DNA, 33 bp, Homo sapien
tcgtgtggcattgttgcatcagatatttctctt

SEQ ID NO: 917460 - DNA, 33 bp, Homo sapien
tcgtgtggcattgttggatcagatatttctctt

SEQ ID NO: 917461 - DNA, 33 bp, Homo sapien
tgccacacgatgtgggccaatttcctggacatg

SEQ ID NO: 917462 - DNA, 33 bp, Homo sapien
tgccacacgatgtgggtcaatttcctggacatg

SEQ ID NO: 917463 - DNA, 33 bp, Homo sapien
tccttctccttcaaaacttgtccttccctagtc

SEQ ID NO: 917464 - DNA, 33 bp, Homo sapien
tccttctccttcaaaagttgtccttccctagtc

SEQ ID NO: 917465 - DNA, 33 bp, Homo sapien
gcctgagtcataatacaggccaattaaatgtga

SEQ ID NO: 917466 - DNA, 33 bp, Homo sapien
gcctgagtcataataccggccaattaaatgtga

SEQ ID NO: 917467 - DNA, 33 bp, Homo sapien
ccactatggactttcaactcaaataaatcaggt

SEQ ID NO: 917468 - DNA, 33 bp, Homo sapien
ccactatggactttcagctcaaataaatcaggt

SEQ ID NO: 917469 - DNA, 33 bp, Homo sapien
gaactaattggataataagctaacccgagaaat

SEQ ID NO: 917470 - DNA, 33 bp, Homo sapien
gaactaattggataatgagctaacccgagaaat

SEQ ID NO: 917471 - DNA, 33 bp, Homo sapien
cattctagtacagacacagcaacctaaggatct

SEQ ID NO: 917472 - DNA, 33 bp, Homo sapien
cattctagtacagacagagcaacctaaggatct

SEQ ID NO: 917473 - DNA, 33 bp, Homo sapien
acccatttctatgccacgtactctgttctacta

SEQ ID NO: 917474 - DNA, 33 bp, Homo sapien
acccatttctatgccatgtactctgttctacta

SEQ ID NO: 917475 - DNA, 33 bp, Homo sapien
ccattttccaactgagaaagactgatatggctt

SEQ ID NO: 917476 - DNA, 33 bp, Homo sapien
ccattttccaactgagtaagactgatatggctt

SEQ ID NO: 917477 - DNA, 33 bp, Homo sapien
accttcctgatcaactaactctgctagatgctt

SEQ ID NO: 917478 - DNA, 33 bp, Homo sapien
accttcctgatcaactgactctgctagatgctt

SEQ ID NO: 917479 - DNA, 33 bp, Homo sapien
agatgagtaaacagagcataatgaccttcccag

SEQ ID NO: 917480 - DNA, 33 bp, Homo sapien
agatgagtaaacagaggataatgaccttcccag

SEQ ID NO: 917481 - DNA, 33 bp, Homo sapien
atacagagcaaacaagaaattcagtcagaaaaa

SEQ ID NO: 917482 - DNA, 33 bp, Homo sapien
atacagagcaaacaaggaattcagtcagaaaaa

SEQ ID NO: 917483 - DNA, 33 bp, Homo sapien
acagacgggctaatacaggaggcatatgtaaaa

SEQ ID NO: 917484 - DNA, 33 bp, Homo sapien
acagacgggctaatacgggaggcatatgtaaaa

SEQ ID NO: 917485 - DNA, 33 bp, Homo sapien
ggcctttagaacataaatgagcatatctaagat

SEQ ID NO: 917486 - DNA, 33 bp, Homo sapien
ggcctttagaacataagtgagcatatctaagat

SEQ ID NO: 917487 - DNA, 33 bp, Homo sapien
ttaattgttaggttcaaaatatggcccccagat

SEQ ID NO: 917488 - DNA, 33 bp, Homo sapien
ttaattgttaggttcacaatatggcccccagat

SEQ ID NO: 917489 - DNA, 33 bp, Homo sapien
tcatgttgaaaaatgaatatctgaaaaataaaa

SEQ ID NO: 917490 - DNA, 33 bp, Homo sapien
tcatgttgaaaaatgagtatctgaaaaataaaa

SEQ ID NO: 917491 - DNA, 33 bp, Homo sapien
acaattctgagcctacaaaattgttttcttgtt

SEQ ID NO: 917492 - DNA, 33 bp, Homo sapien
acaattctgagcctacgaaattgttttcttgtt

SEQ ID NO: 917493 - DNA, 33 bp, Homo sapien
ctgaataatgcagttcactttggatgggaaaac

SEQ ID NO: 917494 - DNA, 33 bp, Homo sapien
ctgaataatgcagttcgctttggatgggaaaac

SEQ ID NO: 917495 - DNA, 33 bp, Homo sapien
tgcacttggataaagtaaccctggaacttgcaa

SEQ ID NO: 917496 - DNA, 33 bp, Homo sapien
tgcacttggataaagtcaccctggaacttgcaa

SEQ ID NO: 917497 - DNA, 33 bp, Homo sapien
tatttcctaggttttccactgactttgatatgc

SEQ ID NO: 917498 - DNA, 33 bp, Homo sapien
tatttcctaggttttctactgactttgatatgc

SEQ ID NO: 917499 - DNA, 33 bp, Homo sapien
tctttataaattggctcaactcatcagggctaa

SEQ ID NO: 917500 - DNA, 33 bp, Homo sapien
tctttataaattggctgaactcatcagggctaa

SEQ ID NO: 917501 - DNA, 33 bp, Homo sapien
tcataaatatctctcacgaacaaattagagtct

SEQ ID NO: 917502 - DNA, 33 bp, Homo sapien
tcataaatatctctcatgaacaaattagagtct

SEQ ID NO: 917503 - DNA, 33 bp, Homo sapien
tgattgtgccacactcaaacgaaagcctttcaa

SEQ ID NO: 917504 - DNA, 33 bp, Homo sapien
tgattgtgccacactctaacgaaagcctttcaa

SEQ ID NO: 917505 - DNA, 33 bp, Homo sapien
caaaggtggggcctcaaagaaaattcagttcaa

SEQ ID NO: 917506 - DNA, 33 bp, Homo sapien
caaaggtggggcctcagagaaaattcagttcaa

SEQ ID NO: 917507 - DNA, 33 bp, Homo sapien
gttgtatgctaaaaaaactgaatgaaaatagta

SEQ ID NO: 917508 - DNA, 33 bp, Homo sapien
gttgtatgctaaaaaagctgaatgaaaatagta

SEQ ID NO: 917509 - DNA, 33 bp, Homo sapien
tgaaagcttcagtgtaacaacagtcttaagaga

SEQ ID NO: 917510 - DNA, 33 bp, Homo sapien
tgaaagcttcagtgtagcaacagtcttaagaga

SEQ ID NO: 917511 - DNA, 33 bp, Homo sapien
ggatttactgataaaaaggaaactgcaataatc

SEQ ID NO: 917512 - DNA, 33 bp, Homo sapien
ggatttactgataaaagggaaactgcaataatc

SEQ ID NO: 917513 - DNA, 33 bp, Homo sapien
gcaagcaaattcttaactggataactaatctct

SEQ ID NO: 917514 - DNA, 33 bp, Homo sapien
gcaagcaaattcttaagtggataactaatctct

SEQ ID NO: 917515 - DNA, 33 bp, Homo sapien
aagagggaactgcctcaaatgtatgttagtaag

SEQ ID NO: 917516 - DNA, 33 bp, Homo sapien
aagagggaactgcctctaatgtatgttagtaag

SEQ ID NO: 917517 - DNA, 33 bp, Homo sapien
aggcaactaatgaacccctagtcatgtgcaagc

SEQ ID NO: 917518 - DNA, 33 bp, Homo sapien
aggcaactaatgaaccgctagtcatgtgcaagc

SEQ ID NO: 917519 - DNA, 33 bp, Homo sapien
agctagtgggccaagaaccttatttcagcttaa

SEQ ID NO: 917520 - DNA, 33 bp, Homo sapien
agctagtgggccaagagccttatttcagcttaa

SEQ ID NO: 917521 - DNA, 33 bp, Homo sapien
gcttgtttaaaggctccatgaagtcatgaggct

SEQ ID NO: 917522 - DNA, 33 bp, Homo sapien
gcttgtttaaaggctctatgaagtcatgaggct

SEQ ID NO: 917523 - DNA, 33 bp, Homo sapien
ctgtcagcatagaggaaaaatggaccaacagga

SEQ ID NO: 917524 - DNA, 33 bp, Homo sapien
ctgtcagcatagaggagaaatggaccaacagga

SEQ ID NO: 917525 - DNA, 33 bp, Homo sapien
catgtaaggccttagagatcttaaaacggagat

SEQ ID NO: 917526 - DNA, 33 bp, Homo sapien
catgtaaggccttagatatcttaaaacggagat

SEQ ID NO: 917527 - DNA, 33 bp, Homo sapien
atctccctgcttcaaactctttaatggcttccc

SEQ ID NO: 917528 - DNA, 33 bp, Homo sapien
atctccctgcttcaaagtctttaatggcttccc

SEQ ID NO: 917529 - DNA, 33 bp, Homo sapien
aaacagtaattcagtaccatagctaaccactca

SEQ ID NO: 917530 - DNA, 33 bp, Homo sapien
aaacagtaattcagtatcatagctaaccactca

SEQ ID NO: 917531 - DNA, 33 bp, Homo sapien
tcttgggatgcccatcacatacatggtgtttcc

SEQ ID NO: 917532 - DNA, 33 bp, Homo sapien
tcttgggatgcccatcgcatacatggtgtttcc

SEQ ID NO: 917533 - DNA, 33 bp, Homo sapien
ctgaaagaattacacaacaatatgtaaaggtag

SEQ ID NO: 917534 - DNA, 33 bp, Homo sapien
ctgaaagaattacacagcaatatgtaaaggtag

SEQ ID NO: 917535 - DNA, 33 bp, Homo sapien
gatcactgtgagctaacggatgataaaatactt

SEQ ID NO: 917536 - DNA, 33 bp, Homo sapien
gatcactgtgagctaatggatgataaaatactt

SEQ ID NO: 917537 - DNA, 33 bp, Homo sapien
aaaaatggtgaacgatgaagaagcattttctgt

SEQ ID NO: 917538 - DNA, 33 bp, Homo sapien
aaaaatggtgaacgattaagaagcattttctgt

SEQ ID NO: 917539 - DNA, 33 bp, Homo sapien
agacatgaggttcaccaatgtcaagcgatttag

SEQ ID NO: 917540 - DNA, 33 bp, Homo sapien
agacatgaggttcaccgatgtcaagcgatttag

SEQ ID NO: 917541 - DNA, 33 bp, Homo sapien
caggactagatgcagaagttaggaagccctgga

SEQ ID NO: 917542 - DNA, 33 bp, Homo sapien
caggactagatgcagaggttaggaagccctgga

SEQ ID NO: 917543 - DNA, 33 bp, Homo sapien
gaataggtctcaactcagaggatgctccacaga

SEQ ID NO: 917544 - DNA, 33 bp, Homo sapien
gaataggtctcaactcggaggatgctccacaga

SEQ ID NO: 917545 - DNA, 33 bp, Homo sapien
ctggtttcttctccaccccatctcttcctattt

SEQ ID NO: 917546 - DNA, 33 bp, Homo sapien
ctggtttcttctccactccatctcttcctattt

SEQ ID NO: 917547 - DNA, 33 bp, Homo sapien
gcattttctagtgggccacataataacatcaaa

SEQ ID NO: 917548 - DNA, 33 bp, Homo sapien
gcattttctagtgggctacataataacatcaaa

SEQ ID NO: 917549 - DNA, 33 bp, Homo sapien
agaaaaccacccagagaaaaggcttggtctcag

SEQ ID NO: 917550 - DNA, 33 bp, Homo sapien
agaaaaccacccagaggaaaggcttggtctcag

SEQ ID NO: 917551 - DNA, 33 bp, Homo sapien
gctgctcttctagacaacttcaggcatctctgg

SEQ ID NO: 917552 - DNA, 33 bp, Homo sapien
gctgctcttctagacaccttcaggcatctctgg

SEQ ID NO: 917553 - DNA, 33 bp, Homo sapien
tcccagagagagtagaagtgatattataatggt

SEQ ID NO: 917554 - DNA, 33 bp, Homo sapien
tcccagagagagtagaggtgatattataatggt

SEQ ID NO: 917555 - DNA, 33 bp, Homo sapien
aggcaaagtgaaagtacgtaatgaaatgagtaa

SEQ ID NO: 917556 - DNA, 33 bp, Homo sapien
aggcaaagtgaaagtatgtaatgaaatgagtaa

SEQ ID NO: 917557 - DNA, 33 bp, Homo sapien
cccaggaagccttctaaattggcaaaaggacaa

SEQ ID NO: 917558 - DNA, 33 bp, Homo sapien
cccaggaagccttctatattggcaaaaggacaa

SEQ ID NO: 917559 - DNA, 33 bp, Homo sapien
gttgtgttctgaatacgctttccttcaaatgcc

SEQ ID NO: 917560 - DNA, 33 bp, Homo sapien
gttgtgttctgaatactctttccttcaaatgcc

SEQ ID NO: 917561 - DNA, 33 bp, Homo sapien
caaagctgaaactgtacacttaacatttgtgca

SEQ ID NO: 917562 - DNA, 33 bp, Homo sapien
caaagctgaaactgtatacttaacatttgtgca

SEQ ID NO: 917563 - DNA, 33 bp, Homo sapien
tgaattcactgactgaagaatttaaaaaaatta

SEQ ID NO: 917564 - DNA, 33 bp, Homo sapien
tgaattcactgactgatgaatttaaaaaaatta

SEQ ID NO: 917565 - DNA, 33 bp, Homo sapien
tgtaatggccaaacacaggtttacacacagaat

SEQ ID NO: 917566 - DNA, 33 bp, Homo sapien
tgtaatggccaaacacgggtttacacacagaat

SEQ ID NO: 917567 - DNA, 33 bp, Homo sapien
cagggatgttttataacacaattattcctaaat

SEQ ID NO: 917568 - DNA, 33 bp, Homo sapien
cagggatgttttataagacaattattcctaaat

SEQ ID NO: 917569 - DNA, 33 bp, Homo sapien
tagtcagggatgaaaactggtagtaactgaagg

SEQ ID NO: 917570 - DNA, 33 bp, Homo sapien
tagtcagggatgaaaagtggtagtaactgaagg

SEQ ID NO: 917571 - DNA, 33 bp, Homo sapien
ggagtgcaggtgagaaatgtggatctcatgcca

SEQ ID NO: 917572 - DNA, 33 bp, Homo sapien
ggagtgcaggtgagaagtgtggatctcatgcca

SEQ ID NO: 917573 - DNA, 33 bp, Homo sapien
gaagatgcggcggttcaagcttaccaattagag

SEQ ID NO: 917574 - DNA, 33 bp, Homo sapien
gaagatgcggcggttcgagcttaccaattagag

SEQ ID NO: 917575 - DNA, 33 bp, Homo sapien
cagtttatgtccttcaatctaacttttctgcta

SEQ ID NO: 917576 - DNA, 33 bp, Homo sapien
cagtttatgtccttcagtctaacttttctgcta

SEQ ID NO: 917577 - DNA, 33 bp, Homo sapien
agctgtccaaagttagaatgactgccatggaaa

SEQ ID NO: 917578 - DNA, 33 bp, Homo sapien
agctgtccaaagttaggatgactgccatggaaa

SEQ ID NO: 917579 - DNA, 33 bp, Homo sapien
aaatagagctataaccactgtaaaataagggaa

SEQ ID NO: 917580 - DNA, 33 bp, Homo sapien
aaatagagctataaccgctgtaaaataagggaa

SEQ ID NO: 917581 - DNA, 33 bp, Homo sapien
ggaaatgtgaccttcccattgtctatgtcacat

SEQ ID NO: 917582 - DNA, 33 bp, Homo sapien
ggaaatgtgaccttcctattgtctatgtcacat

SEQ ID NO: 917583 - DNA, 33 bp, Homo sapien
atgtagggtggcgatacacctcactttctggcc

SEQ ID NO: 917584 - DNA, 33 bp, Homo sapien
atgtagggtggcgatatacctcactttctggcc

SEQ ID NO: 917585 - DNA, 33 bp, Homo sapien
agctgctatgagaaacagctttcaagttgcagt

SEQ ID NO: 917586 - DNA, 33 bp, Homo sapien
agctgctatgagaaacggctttcaagttgcagt

SEQ ID NO: 917587 - DNA, 33 bp, Homo sapien
gtggttcatgatactcaacacactaattaacat

SEQ ID NO: 917588 - DNA, 33 bp, Homo sapien
gtggttcatgatactcgacacactaattaacat

SEQ ID NO: 917589 - DNA, 33 bp, Homo sapien
tttgccgtacagtaaaataaaaataatgtcttc

SEQ ID NO: 917590 - DNA, 33 bp, Homo sapien
tttgccgtacagtaaactaaaaataatgtcttc

SEQ ID NO: 917591 - DNA, 33 bp, Homo sapien
ttacagtagtaagaacaatgaccagcttccaaa

SEQ ID NO: 917592 - DNA, 33 bp, Homo sapien
ttacagtagtaagaacgatgaccagcttccaaa

SEQ ID NO: 917593 - DNA, 33 bp, Homo sapien
ggggaggggcagttaacccagggcgatttatct

SEQ ID NO: 917594 - DNA, 33 bp, Homo sapien
ggggaggggcagttaatccagggcgatttatct

SEQ ID NO: 917595 - DNA, 33 bp, Homo sapien
tgttaatatgacattagcgttgtccagagtctg

SEQ ID NO: 917596 - DNA, 33 bp, Homo sapien
tgttaatatgacattatcgttgtccagagtctg

SEQ ID NO: 917597 - DNA, 33 bp, Homo sapien
agccagagccttagtacggtcctgtcagtctgg

SEQ ID NO: 917598 - DNA, 33 bp, Homo sapien
agccagagccttagtatggtcctgtcagtctgg

SEQ ID NO: 917599 - DNA, 33 bp, Homo sapien
gaggtacacaaatttacagaatcttcttcttca

SEQ ID NO: 917600 - DNA, 33 bp, Homo sapien
gaggtacacaaatttagagaatcttcttcttca

SEQ ID NO: 917601 - DNA, 33 bp, Homo sapien
agtgtccccaagattacaaagttggcagatgga

SEQ ID NO: 917602 - DNA, 33 bp, Homo sapien
agtgtccccaagattataaagttggcagatgga

SEQ ID NO: 917603 - DNA, 33 bp, Homo sapien
tataagaggtcagtaaatgttcactatgattag

SEQ ID NO: 917604 - DNA, 33 bp, Homo sapien
tataagaggtcagtaagtgttcactatgattag

SEQ ID NO: 917605 - DNA, 33 bp, Homo sapien
agttgcccgaagtgacactatttttcagtttct

SEQ ID NO: 917606 - DNA, 33 bp, Homo sapien
agttgcccgaagtgacgctatttttcagtttct

SEQ ID NO: 917607 - DNA, 33 bp, Homo sapien
tctgttcaacaaaaacagagcttatccaacaga

SEQ ID NO: 917608 - DNA, 33 bp, Homo sapien
tctgttcaacaaaaacggagcttatccaacaga

SEQ ID NO: 917609 - DNA, 33 bp, Homo sapien
cctctgcttatgtttcactcgcaccagctgggc

SEQ ID NO: 917610 - DNA, 33 bp, Homo sapien
cctctgcttatgtttcgctcgcaccagctgggc

SEQ ID NO: 917611 - DNA, 33 bp, Homo sapien
aaattgtgatagtagaatagaaagtttagtaat

SEQ ID NO: 917612 - DNA, 33 bp, Homo sapien
aaattgtgatagtagagtagaaagtttagtaat

SEQ ID NO: 917613 - DNA, 33 bp, Homo sapien
aatacatcttcacatacatacattcatttgctt

SEQ ID NO: 917614 - DNA, 33 bp, Homo sapien
aatacatcttcacatatatacattcatttgctt

SEQ ID NO: 917615 - DNA, 33 bp, Homo sapien
aagtgaccatgactgcaaccacagaagtagcag

SEQ ID NO: 917616 - DNA, 33 bp, Homo sapien
aagtgaccatgactgcgaccacagaagtagcag

SEQ ID NO: 917617 - DNA, 33 bp, Homo sapien
tcccttattctgcttacgataggctaatacctc

SEQ ID NO: 917618 - DNA, 33 bp, Homo sapien
tcccttattctgcttatgataggctaatacctc

SEQ ID NO: 917619 - DNA, 33 bp, Homo sapien
ttgtaatgacaaaagcaacttaatttctgtgga

SEQ ID NO: 917620 - DNA, 33 bp, Homo sapien
ttgtaatgacaaaagccacttaatttctgtgga

SEQ ID NO: 917621 - DNA, 33 bp, Homo sapien
aaaagagaagttgctacctctagaccaacagtc

SEQ ID NO: 917622 - DNA, 33 bp, Homo sapien
aaaagagaagttgctagctctagaccaacagtc

SEQ ID NO: 917623 - DNA, 33 bp, Homo sapien
tagacaaagatgtcaaatggcagatgacacctc

SEQ ID NO: 917624 - DNA, 33 bp, Homo sapien
tagacaaagatgtcaagtggcagatgacacctc

SEQ ID NO: 917625 - DNA, 33 bp, Homo sapien
attaaaaatgtttcaaaaatctgttaatgttga

SEQ ID NO: 917626 - DNA, 33 bp, Homo sapien
attaaaaatgtttcaagaatctgttaatgttga

SEQ ID NO: 917627 - DNA, 33 bp, Homo sapien
tgatgtgaaataggaacgtaattttactgtatg

SEQ ID NO: 917628 - DNA, 33 bp, Homo sapien
tgatgtgaaataggaatgtaattttactgtatg

SEQ ID NO: 917629 - DNA, 33 bp, Homo sapien
gggatgtttgcttttgaataataggtgaaattt

SEQ ID NO: 917630 - DNA, 33 bp, Homo sapien
gggatgtttgcttttgtataataggtgaaattt

SEQ ID NO: 917631 - DNA, 33 bp, Homo sapien
tcaccaaggattcaacggatctctttaatacct

SEQ ID NO: 917632 - DNA, 33 bp, Homo sapien
tcaccaaggattcaactgatctctttaatacct

SEQ ID NO: 917633 - DNA, 33 bp, Homo sapien
taatattgagaagcaaatcaggacacaagacca

SEQ ID NO: 917634 - DNA, 33 bp, Homo sapien
taatattgagaagcaagtcaggacacaagacca

SEQ ID NO: 917635 - DNA, 33 bp, Homo sapien
ttcggttccatcaaaaaggtcaaagataggtga

SEQ ID NO: 917636 - DNA, 33 bp, Homo sapien
ttcggttccatcaaaagggtcaaagataggtga

SEQ ID NO: 917637 - DNA, 33 bp, Homo sapien
aataagacattttataagttaaagctatcaaca

SEQ ID NO: 917638 - DNA, 33 bp, Homo sapien
aataagacattttatacgttaaagctatcaaca

SEQ ID NO: 917639 - DNA, 33 bp, Homo sapien
tcatctgcataaagcacgaatttctgctagctc

SEQ ID NO: 917640 - DNA, 33 bp, Homo sapien
tcatctgcataaagcatgaatttctgctagctc

SEQ ID NO: 917641 - DNA, 33 bp, Homo sapien
aaaacaatcaatgagagtagaattaatgacaag

SEQ ID NO: 917642 - DNA, 33 bp, Homo sapien
aaaacaatcaatgagattagaattaatgacaag

SEQ ID NO: 917643 - DNA, 33 bp, Homo sapien
gaggattaaaacaagacgattttgaatggtgaa

SEQ ID NO: 917644 - DNA, 33 bp, Homo sapien
gaggattaaaacaagatgattttgaatggtgaa

SEQ ID NO: 917645 - DNA, 33 bp, Homo sapien
gtaataactctgtctccgacgtggcatcgccag

SEQ ID NO: 917646 - DNA, 33 bp, Homo sapien
gtaataactctgtctctgacgtggcatcgccag

SEQ ID NO: 917647 - DNA, 33 bp, Homo sapien
attaatacacgtgtcaatatgttcaagattgct

SEQ ID NO: 917648 - DNA, 33 bp, Homo sapien
attaatacacgtgtcagtatgttcaagattgct

SEQ ID NO: 917649 - DNA, 33 bp, Homo sapien
aggactttccagaagcagataccagcactatgc

SEQ ID NO: 917650 - DNA, 33 bp, Homo sapien
aggactttccagaagccgataccagcactatgc

SEQ ID NO: 917651 - DNA, 33 bp, Homo sapien
tcttcctaggtccagtcaaatccaagcactttt

SEQ ID NO: 917652 - DNA, 33 bp, Homo sapien
tcttcctaggtccagttaaatccaagcactttt

SEQ ID NO: 917653 - DNA, 33 bp, Homo sapien
atattcaaggttatgagtatagcataggattac

SEQ ID NO: 917654 - DNA, 33 bp, Homo sapien
atattcaaggttatgattatagcataggattac

SEQ ID NO: 917655 - DNA, 33 bp, Homo sapien
ctgttcacattttaaacgcaagccaaaaacctt

SEQ ID NO: 917656 - DNA, 33 bp, Homo sapien
ctgttcacattttaaatgcaagccaaaaacctt

SEQ ID NO: 917657 - DNA, 33 bp, Homo sapien
ccaattttcactttacacatgatagattcaatg

SEQ ID NO: 917658 - DNA, 33 bp, Homo sapien
ccaattttcactttacgcatgatagattcaatg

SEQ ID NO: 917659 - DNA, 33 bp, Homo sapien
tgttcctttggccacactgtgatttacagttta

SEQ ID NO: 917660 - DNA, 33 bp, Homo sapien
tgttcctttggccacattgtgatttacagttta

SEQ ID NO: 917661 - DNA, 33 bp, Homo sapien
ctcccaaaggaaatagccagcttctttgtttcc

SEQ ID NO: 917662 - DNA, 33 bp, Homo sapien
ctcccaaaggaaatagtcagcttctttgtttcc

SEQ ID NO: 917663 - DNA, 33 bp, Homo sapien
ctataatcatcaggcaaccaggactgaggctgg

SEQ ID NO: 917664 - DNA, 33 bp, Homo sapien
ctataatcatcaggcagccaggactgaggctgg

SEQ ID NO: 917665 - DNA, 33 bp, Homo sapien
aatgaaattgccctaccgagctaactctgaaag

SEQ ID NO: 917666 - DNA, 33 bp, Homo sapien
aatgaaattgccctactgagctaactctgaaag

SEQ ID NO: 917667 - DNA, 33 bp, Homo sapien
actggaagtcagggccagagctttatcagaaaa

SEQ ID NO: 917668 - DNA, 33 bp, Homo sapien
actggaagtcagggccggagctttatcagaaaa

SEQ ID NO: 917669 - DNA, 33 bp, Homo sapien
ctggaaagtgttaagggaagcagtacccaagaa

SEQ ID NO: 917670 - DNA, 33 bp, Homo sapien
ctggaaagtgttaaggtaagcagtacccaagaa

SEQ ID NO: 917671 - DNA, 33 bp, Homo sapien
ttccctctttcaagcccagattgcaacctaatg

SEQ ID NO: 917672 - DNA, 33 bp, Homo sapien
ttccctctttcaagcctagattgcaacctaatg

SEQ ID NO: 917673 - DNA, 33 bp, Homo sapien
agattaacattcggaccaaccatgtttccacta

SEQ ID NO: 917674 - DNA, 33 bp, Homo sapien
agattaacattcggactaaccatgtttccacta

SEQ ID NO: 917675 - DNA, 33 bp, Homo sapien
ctatggaatcccaaaaacttgaggtcactgaga

SEQ ID NO: 917676 - DNA, 33 bp, Homo sapien
ctatggaatcccaaaagcttgaggtcactgaga

SEQ ID NO: 917677 - DNA, 33 bp, Homo sapien
aaaatttgcaaattcccccaaatgaaaatacca

SEQ ID NO: 917678 - DNA, 33 bp, Homo sapien
aaaatttgcaaattcctccaaatgaaaatacca

SEQ ID NO: 917679 - DNA, 33 bp, Homo sapien
caaatgtagaaacgaacgctcagaagagttact

SEQ ID NO: 917680 - DNA, 33 bp, Homo sapien
caaatgtagaaacgaaggctcagaagagttact

SEQ ID NO: 917681 - DNA, 33 bp, Homo sapien
catttataaatccaccaagcaaacatatgaggc

SEQ ID NO: 917682 - DNA, 33 bp, Homo sapien
catttataaatccacccagcaaacatatgaggc

SEQ ID NO: 917683 - DNA, 33 bp, Homo sapien
gcatataaaaagctacagcaattaaaatagtaa

SEQ ID NO: 917684 - DNA, 33 bp, Homo sapien
gcatataaaaagctacggcaattaaaatagtaa

SEQ ID NO: 917685 - DNA, 33 bp, Homo sapien
gatacttcagctattaaatggttaaatacttaa

SEQ ID NO: 917686 - DNA, 33 bp, Homo sapien
gatacttcagctattagatggttaaatacttaa

SEQ ID NO: 917687 - DNA, 33 bp, Homo sapien
gatggtttgacatcaacgacaccactgaactca

SEQ ID NO: 917688 - DNA, 33 bp, Homo sapien
gatggtttgacatcaatgacaccactgaactca

SEQ ID NO: 917689 - DNA, 33 bp, Homo sapien
tttgccatgtagaattcaaaaagtgatagatgg

SEQ ID NO: 917690 - DNA, 33 bp, Homo sapien
tttgccatgtagaattgaaaaagtgatagatgg

SEQ ID NO: 917691 - DNA, 33 bp, Homo sapien
cttcttaaatcaacccaaattccttcccttcac

SEQ ID NO: 917692 - DNA, 33 bp, Homo sapien
cttcttaaatcaacccgaattccttcccttcac

SEQ ID NO: 917693 - DNA, 33 bp, Homo sapien
tcttggatattactcaaacaagagaggcagcac

SEQ ID NO: 917694 - DNA, 33 bp, Homo sapien
tcttggatattactcagacaagagaggcagcac

SEQ ID NO: 917695 - DNA, 33 bp, Homo sapien
agatattaatttgtgacaaaatgaaactgaccc

SEQ ID NO: 917696 - DNA, 33 bp, Homo sapien
agatattaatttgtgataaaatgaaactgaccc

SEQ ID NO: 917697 - DNA, 33 bp, Homo sapien
gccccttataaatcaaactataggccagagagg

SEQ ID NO: 917698 - DNA, 33 bp, Homo sapien
gccccttataaatcaacctataggccagagagg

SEQ ID NO: 917699 - DNA, 33 bp, Homo sapien
cctttgctgccctcacaatctcttcctgtgaca

SEQ ID NO: 917700 - DNA, 33 bp, Homo sapien
cctttgctgccctcacgatctcttcctgtgaca

SEQ ID NO: 917701 - DNA, 33 bp, Homo sapien
ttcaattttgtggtgaacttaaaaacaggactc

SEQ ID NO: 917702 - DNA, 33 bp, Homo sapien
ttcaattttgtggtgagcttaaaaacaggactc

SEQ ID NO: 917703 - DNA, 33 bp, Homo sapien
tatagctaactctctccattaccaggtgtcaga

SEQ ID NO: 917704 - DNA, 33 bp, Homo sapien
tatagctaactctctcgattaccaggtgtcaga

SEQ ID NO: 917705 - DNA, 33 bp, Homo sapien
tctgacttagacatgacggcaggggaaagagag

SEQ ID NO: 917706 - DNA, 33 bp, Homo sapien
tctgacttagacatgatggcaggggaaagagag

SEQ ID NO: 917707 - DNA, 33 bp, Homo sapien
aacaaatatctttttcacagttgggtgggcatc

SEQ ID NO: 917708 - DNA, 33 bp, Homo sapien
aacaaatatctttttcgcagttgggtgggcatc

SEQ ID NO: 917709 - DNA, 33 bp, Homo sapien
acaggccagtactttgccaaaccatgaaaccaa

SEQ ID NO: 917710 - DNA, 33 bp, Homo sapien
acaggccagtactttgtcaaaccatgaaaccaa

SEQ ID NO: 917711 - DNA, 33 bp, Homo sapien
ttgaattatgtttaccacaagatacttagaaaa

SEQ ID NO: 917712 - DNA, 33 bp, Homo sapien
ttgaattatgtttaccccaagatacttagaaaa

SEQ ID NO: 917713 - DNA, 33 bp, Homo sapien
cctgtttttggctgacaggttttagttcctccc

SEQ ID NO: 917714 - DNA, 33 bp, Homo sapien
cctgtttttggctgacgggttttagttcctccc

SEQ ID NO: 917715 - DNA, 33 bp, Homo sapien
ggccaattaagacaaacaccagtagaaaggagg

SEQ ID NO: 917716 - DNA, 33 bp, Homo sapien
ggccaattaagacaaataccagtagaaaggagg

SEQ ID NO: 917717 - DNA, 33 bp, Homo sapien
gagttgggtggtctaacatctttaggcattttg

SEQ ID NO: 917718 - DNA, 33 bp, Homo sapien
gagttgggtggtctaatatctttaggcattttg

SEQ ID NO: 917719 - DNA, 33 bp, Homo sapien
ttacagcctcactgggaaatttgaccttactag

SEQ ID NO: 917720 - DNA, 33 bp, Homo sapien
ttacagcctcactggggaatttgaccttactag

SEQ ID NO: 917721 - DNA, 33 bp, Homo sapien
agtaaagttacaatctaaaaggaatgctctctg

SEQ ID NO: 917722 - DNA, 33 bp, Homo sapien
agtaaagttacaatctgaaaggaatgctctctg

SEQ ID NO: 917723 - DNA, 33 bp, Homo sapien
tctatatgtctctctaataactagcaatacaat

SEQ ID NO: 917724 - DNA, 33 bp, Homo sapien
tctatatgtctctctagtaactagcaatacaat

SEQ ID NO: 917725 - DNA, 33 bp, Homo sapien
cttcttccgatttataatagtttcctaacttcc

SEQ ID NO: 917726 - DNA, 33 bp, Homo sapien
cttcttccgatttatagtagtttcctaacttcc

SEQ ID NO: 917727 - DNA, 33 bp, Homo sapien
agtcctgtgatatacacgcattttgtcctgctg

SEQ ID NO: 917728 - DNA, 33 bp, Homo sapien
agtcctgtgatatacatgcattttgtcctgctg

SEQ ID NO: 917729 - DNA, 33 bp, Homo sapien
ctggttctcctacttccaccactctgatgcttc

SEQ ID NO: 917730 - DNA, 33 bp, Homo sapien
ctggttctcctacttctaccactctgatgcttc

SEQ ID NO: 917731 - DNA, 33 bp, Homo sapien
cataggatctaattagacagctctaaaaccttc

SEQ ID NO: 917732 - DNA, 33 bp, Homo sapien
cataggatctaattagtcagctctaaaaccttc

SEQ ID NO: 917733 - DNA, 33 bp, Homo sapien
cacaactagatcatcaactgtttgggagctcat

SEQ ID NO: 917734 - DNA, 33 bp, Homo sapien
cacaactagatcatcatctgtttgggagctcat

SEQ ID NO: 917735 - DNA, 33 bp, Homo sapien
ctctcttactgcttcacagtggaagaatcaaat

SEQ ID NO: 917736 - DNA, 33 bp, Homo sapien
ctctcttactgcttcatagtggaagaatcaaat

SEQ ID NO: 917737 - DNA, 33 bp, Homo sapien
actactactgataccaacctagtccaagacacc

SEQ ID NO: 917738 - DNA, 33 bp, Homo sapien
actactactgataccaccctagtccaagacacc

SEQ ID NO: 917739 - DNA, 33 bp, Homo sapien
gaatagacacaaaactgagtcaatcatcattcc

SEQ ID NO: 917740 - DNA, 33 bp, Homo sapien
gaatagacacaaaacttagtcaatcatcattcc

SEQ ID NO: 917741 - DNA, 33 bp, Homo sapien
tgaatactttgacacaaaatggttgacaaaagg

SEQ ID NO: 917742 - DNA, 33 bp, Homo sapien
tgaatactttgacacataatggttgacaaaagg

SEQ ID NO: 917743 - DNA, 33 bp, Homo sapien
atttatcttactgctaccatttgtgttttcaat

SEQ ID NO: 917744 - DNA, 33 bp, Homo sapien
atttatcttactgctatcatttgtgttttcaat

SEQ ID NO: 917745 - DNA, 33 bp, Homo sapien
atgagctctgaaatcaaatcagtaataaatagc

SEQ ID NO: 917746 - DNA, 33 bp, Homo sapien
atgagctctgaaatcacatcagtaataaatagc

SEQ ID NO: 917747 - DNA, 33 bp, Homo sapien
tgtcactgtaaaacaaccacagaaaaagccaac

SEQ ID NO: 917748 - DNA, 33 bp, Homo sapien
tgtcactgtaaaacaatcacagaaaaagccaac

SEQ ID NO: 917749 - DNA, 33 bp, Homo sapien
tctcgaatgttcttgacgaatcttttccagaag

SEQ ID NO: 917750 - DNA, 33 bp, Homo sapien
tctcgaatgttcttgatgaatcttttccagaag

SEQ ID NO: 917751 - DNA, 33 bp, Homo sapien
gattacaaactgagaaactaagcaattgacagg

SEQ ID NO: 917752 - DNA, 33 bp, Homo sapien
gattacaaactgagaacctaagcaattgacagg

SEQ ID NO: 917753 - DNA, 33 bp, Homo sapien
atgaatctaagtggtaccaggacagataattgt

SEQ ID NO: 917754 - DNA, 33 bp, Homo sapien
atgaatctaagtggtatcaggacagataattgt

SEQ ID NO: 917755 - DNA, 33 bp, Homo sapien
gatatttctctgtccacactgtactccatctcc

SEQ ID NO: 917756 - DNA, 33 bp, Homo sapien
gatatttctctgtccatactgtactccatctcc

SEQ ID NO: 917757 - DNA, 33 bp, Homo sapien
acaaacaaacaaaaaccgaacacctggaactct

SEQ ID NO: 917758 - DNA, 33 bp, Homo sapien
acaaacaaacaaaaactgaacacctggaactct

SEQ ID NO: 917759 - DNA, 33 bp, Homo sapien
aacttgcattatcaaaagataccatcaaaaaat

SEQ ID NO: 917760 - DNA, 33 bp, Homo sapien
aacttgcattatcaaaggataccatcaaaaaat

SEQ ID NO: 917761 - DNA, 33 bp, Homo sapien
cctacacagagtggcaacattcctgcaatagag

SEQ ID NO: 917762 - DNA, 33 bp, Homo sapien
cctacacagagtggcagcattcctgcaatagag

SEQ ID NO: 917763 - DNA, 33 bp, Homo sapien
atgaatttaatgaaccacagtataactcttata

SEQ ID NO: 917764 - DNA, 33 bp, Homo sapien
atgaatttaatgaaccccagtataactcttata

SEQ ID NO: 917765 - DNA, 33 bp, Homo sapien
ttgacttaaaattttacctcactggtcttcctc

SEQ ID NO: 917766 - DNA, 33 bp, Homo sapien
ttgacttaaaattttatctcactggtcttcctc

SEQ ID NO: 917767 - DNA, 33 bp, Homo sapien
taaggccttgtgcgctaaaggaggaacaagaag

SEQ ID NO: 917768 - DNA, 33 bp, Homo sapien
taaggccttgtgcgcttaaggaggaacaagaag

SEQ ID NO: 917769 - DNA, 33 bp, Homo sapien
gaaataaaagtatcacaaaatggttatacttgc

SEQ ID NO: 917770 - DNA, 33 bp, Homo sapien
gaaataaaagtatcacgaaatggttatacttgc

SEQ ID NO: 917771 - DNA, 33 bp, Homo sapien
actctgctctataactcaaccaaaggagatgcc

SEQ ID NO: 917772 - DNA, 33 bp, Homo sapien
actctgctctataactgaaccaaaggagatgcc

SEQ ID NO: 917773 - DNA, 33 bp, Homo sapien
ggacaaattacttgaaatacactaactgtcaaa

SEQ ID NO: 917774 - DNA, 33 bp, Homo sapien
ggacaaattacttgaagtacactaactgtcaaa

SEQ ID NO: 917775 - DNA, 33 bp, Homo sapien
tcttgaacaaagtttcccaccataaataaccct

SEQ ID NO: 917776 - DNA, 33 bp, Homo sapien
tcttgaacaaagtttctcaccataaataaccct

SEQ ID NO: 917777 - DNA, 33 bp, Homo sapien
gaaggggagagcactacgtcaagggatcattcc

SEQ ID NO: 917778 - DNA, 33 bp, Homo sapien
gaaggggagagcactatgtcaagggatcattcc

SEQ ID NO: 917779 - DNA, 33 bp, Homo sapien
gacctttgtgataatacatgtccaataaaaata

SEQ ID NO: 917780 - DNA, 33 bp, Homo sapien
gacctttgtgataatagatgtccaataaaaata

SEQ ID NO: 917781 - DNA, 33 bp, Homo sapien
agaccacagaaaatgcaaagaaaccaggctcac

SEQ ID NO: 917782 - DNA, 33 bp, Homo sapien
agaccacagaaaatgcgaagaaaccaggctcac

SEQ ID NO: 917783 - DNA, 33 bp, Homo sapien
ttgagctagaaactaaagatagagagcaacaga

SEQ ID NO: 917784 - DNA, 33 bp, Homo sapien
ttgagctagaaactaaggatagagagcaacaga

SEQ ID NO: 917785 - DNA, 33 bp, Homo sapien
ttttccaccaggtgcaagtaaccagtaacaagc

SEQ ID NO: 917786 - DNA, 33 bp, Homo sapien
ttttccaccaggtgcaggtaaccagtaacaagc

SEQ ID NO: 917787 - DNA, 33 bp, Homo sapien
gggcatttgtcactgagctgatagactaacagg

SEQ ID NO: 917788 - DNA, 33 bp, Homo sapien
gggcatttgtcactgatctgatagactaacagg

SEQ ID NO: 917789 - DNA, 33 bp, Homo sapien
attttaagttactgacacagcatagtacttttg

SEQ ID NO: 917790 - DNA, 33 bp, Homo sapien
attttaagttactgacgcagcatagtacttttg

SEQ ID NO: 917791 - DNA, 33 bp, Homo sapien
atgcaaacttgcctcaatcacgtgtttggaaat

SEQ ID NO: 917792 - DNA, 33 bp, Homo sapien
atgcaaacttgcctcagtcacgtgtttggaaat

SEQ ID NO: 917793 - DNA, 33 bp, Homo sapien
aagattgtgcagcaaactcagcgcttcatgagt

SEQ ID NO: 917794 - DNA, 33 bp, Homo sapien
aagattgtgcagcaaagtcagcgcttcatgagt

SEQ ID NO: 917795 - DNA, 33 bp, Homo sapien
tgtaaaaagaaacatcccaaagagctaagcaca

SEQ ID NO: 917796 - DNA, 33 bp, Homo sapien
tgtaaaaagaaacatctcaaagagctaagcaca

SEQ ID NO: 917797 - DNA, 33 bp, Homo sapien
tttatatgattgacacagacttctaaaagaatt

SEQ ID NO: 917798 - DNA, 33 bp, Homo sapien
tttatatgattgacacggacttctaaaagaatt

SEQ ID NO: 917799 - DNA, 33 bp, Homo sapien
tacaggttgtcttgagaattgaatggtacatac

SEQ ID NO: 917800 - DNA, 33 bp, Homo sapien
tacaggttgtcttgaggattgaatggtacatac

SEQ ID NO: 917801 - DNA, 33 bp, Homo sapien
ggtgatctacatcaagaccctttaggcatttct

SEQ ID NO: 917802 - DNA, 33 bp, Homo sapien
ggtgatctacatcaaggccctttaggcatttct

SEQ ID NO: 917803 - DNA, 33 bp, Homo sapien
agctctgtactaataacgcatgcagcaaaattt

SEQ ID NO: 917804 - DNA, 33 bp, Homo sapien
agctctgtactaataatgcatgcagcaaaattt

SEQ ID NO: 917805 - DNA, 33 bp, Homo sapien
tttggtgataaaattaagagcttaagtgacaac

SEQ ID NO: 917806 - DNA, 33 bp, Homo sapien
tttggtgataaaattaggagcttaagtgacaac

SEQ ID NO: 917807 - DNA, 33 bp, Homo sapien
tgatcagacgtggctccaaaataccttagaaag

SEQ ID NO: 917808 - DNA, 33 bp, Homo sapien
tgatcagacgtggctctaaaataccttagaaag

SEQ ID NO: 917809 - DNA, 33 bp, Homo sapien
tacaagtgagaaaccacagactgagagagatca

SEQ ID NO: 917810 - DNA, 33 bp, Homo sapien
tacaagtgagaaaccatagactgagagagatca

SEQ ID NO: 917811 - DNA, 33 bp, Homo sapien
attacacagctggtaacggaaggcgccaatagc

SEQ ID NO: 917812 - DNA, 33 bp, Homo sapien
attacacagctggtaagggaaggcgccaatagc

SEQ ID NO: 917813 - DNA, 33 bp, Homo sapien
ctatttggaatttaaacataaacagatgcagtt

SEQ ID NO: 917814 - DNA, 33 bp, Homo sapien
ctatttggaatttaaagataaacagatgcagtt

SEQ ID NO: 917815 - DNA, 33 bp, Homo sapien
agtccaagatccagtcaaacaatcataaagtcc

SEQ ID NO: 917816 - DNA, 33 bp, Homo sapien
agtccaagatccagtcgaacaatcataaagtcc

SEQ ID NO: 917817 - DNA, 33 bp, Homo sapien
tggatcttggactagggaataataactgttgat

SEQ ID NO: 917818 - DNA, 33 bp, Homo sapien
tggatcttggactaggtaataataactgttgat

SEQ ID NO: 917819 - DNA, 33 bp, Homo sapien
aacatagccccttcaaatatctgaaggcagata

SEQ ID NO: 917820 - DNA, 33 bp, Homo sapien
aacatagccccttcaattatctgaaggcagata

SEQ ID NO: 917821 - DNA, 33 bp, Homo sapien
tatatgaacagttgaaaatttgtggattgttct

SEQ ID NO: 917822 - DNA, 33 bp, Homo sapien
tatatgaacagttgaacatttgtggattgttct

SEQ ID NO: 917823 - DNA, 33 bp, Homo sapien
tgcacattaaatgaaaccaggtgttactaatgt

SEQ ID NO: 917824 - DNA, 33 bp, Homo sapien
tgcacattaaatgaaatcaggtgttactaatgt

SEQ ID NO: 917825 - DNA, 33 bp, Homo sapien
ttccttgggtcactagaattttcttacttcaag

SEQ ID NO: 917826 - DNA, 33 bp, Homo sapien
ttccttgggtcactaggattttcttacttcaag

SEQ ID NO: 917827 - DNA, 33 bp, Homo sapien
aatatctttctatgggaaaagccaattaagtta

SEQ ID NO: 917828 - DNA, 33 bp, Homo sapien
aatatctttctatgggcaaagccaattaagtta

SEQ ID NO: 917829 - DNA, 33 bp, Homo sapien
gagacaaaacatcaaactgaagacccaatttca

SEQ ID NO: 917830 - DNA, 33 bp, Homo sapien
gagacaaaacatcaaattgaagacccaatttca

SEQ ID NO: 917831 - DNA, 33 bp, Homo sapien
tcctaacaagtgaagacctatggttaattcaac

SEQ ID NO: 917832 - DNA, 33 bp, Homo sapien
tcctaacaagtgaagatctatggttaattcaac

SEQ ID NO: 917833 - DNA, 33 bp, Homo sapien
caaatatttacctgtacgtgtgtttaatactgt

SEQ ID NO: 917834 - DNA, 33 bp, Homo sapien
caaatatttacctgtatgtgtgtttaatactgt

SEQ ID NO: 917835 - DNA, 33 bp, Homo sapien
tattctatcaaaaacactctccattttactgat

SEQ ID NO: 917836 - DNA, 33 bp, Homo sapien
tattctatcaaaaacattctccattttactgat

SEQ ID NO: 917837 - DNA, 33 bp, Homo sapien
tgttgggtcattacaacattagctattaaataa

SEQ ID NO: 917838 - DNA, 33 bp, Homo sapien
tgttgggtcattacaatattagctattaaataa

SEQ ID NO: 917839 - DNA, 33 bp, Homo sapien
tgtgctttccattttaccctatcaaaaacacct

SEQ ID NO: 917840 - DNA, 33 bp, Homo sapien
tgtgctttccattttagcctatcaaaaacacct

SEQ ID NO: 917841 - DNA, 33 bp, Homo sapien
tttataggaagtattaagaaatctgggcactac

SEQ ID NO: 917842 - DNA, 33 bp, Homo sapien
tttataggaagtattaggaaatctgggcactac

SEQ ID NO: 917843 - DNA, 33 bp, Homo sapien
gccacaaaatttaatacgtcaactctggaatta

SEQ ID NO: 917844 - DNA, 33 bp, Homo sapien
gccacaaaatttaatatgtcaactctggaatta

SEQ ID NO: 917845 - DNA, 33 bp, Homo sapien
cttctctgaccatgcaaaacatgggaaagtaaa

SEQ ID NO: 917846 - DNA, 33 bp, Homo sapien
cttctctgaccatgcagaacatgggaaagtaaa

SEQ ID NO: 917847 - DNA, 33 bp, Homo sapien
tatggttcctgggcaaacctgagatggagattt

SEQ ID NO: 917848 - DNA, 33 bp, Homo sapien
tatggttcctgggcaaccctgagatggagattt

SEQ ID NO: 917849 - DNA, 33 bp, Homo sapien
aaactgaactatgatgcaactacaacagatgct

SEQ ID NO: 917850 - DNA, 33 bp, Homo sapien
aaactgaactatgatggaactacaacagatgct

SEQ ID NO: 917851 - DNA, 33 bp, Homo sapien
ggtggtaagttgggcacaggtagattttgactt

SEQ ID NO: 917852 - DNA, 33 bp, Homo sapien
ggtggtaagttgggcagaggtagattttgactt

SEQ ID NO: 917853 - DNA, 33 bp, Homo sapien
agtcataaaaagggtacactgctgagactgcgt

SEQ ID NO: 917854 - DNA, 33 bp, Homo sapien
agtcataaaaagggtatactgctgagactgcgt

SEQ ID NO: 917855 - DNA, 33 bp, Homo sapien
tcttacggaagaaatacgtgttagataagcctt

SEQ ID NO: 917856 - DNA, 33 bp, Homo sapien
tcttacggaagaaatatgtgttagataagcctt

SEQ ID NO: 917857 - DNA, 33 bp, Homo sapien
cttgtagatttcctcacccaatctctctctctc

SEQ ID NO: 917858 - DNA, 33 bp, Homo sapien
cttgtagatttcctcatccaatctctctctctc

SEQ ID NO: 917859 - DNA, 33 bp, Homo sapien
ttttttttttaagatgaaccatagtggtagatt

SEQ ID NO: 917860 - DNA, 33 bp, Homo sapien
ttttttttttaagatggaccatagtggtagatt

SEQ ID NO: 917861 - DNA, 33 bp, Homo sapien
ttcagttcagaaacagcctgactttaactacag

SEQ ID NO: 917862 - DNA, 33 bp, Homo sapien
ttcagttcagaaacaggctgactttaactacag

SEQ ID NO: 917863 - DNA, 33 bp, Homo sapien
atccccctgtacctcaatctagctctctaaaat

SEQ ID NO: 917864 - DNA, 33 bp, Homo sapien
atccccctgtacctcactctagctctctaaaat

SEQ ID NO: 917865 - DNA, 33 bp, Homo sapien
ctatgttgttcacttacgtgggtaattttgtgc

SEQ ID NO: 917866 - DNA, 33 bp, Homo sapien
ctatgttgttcacttatgtgggtaattttgtgc

SEQ ID NO: 917867 - DNA, 33 bp, Homo sapien
catcctccaactcatcaattagaattctggaaa

SEQ ID NO: 917868 - DNA, 33 bp, Homo sapien
catcctccaactcatcgattagaattctggaaa

SEQ ID NO: 917869 - DNA, 33 bp, Homo sapien
ttggcaagactttgaaagcttacatcctccaac

SEQ ID NO: 917870 - DNA, 33 bp, Homo sapien
ttggcaagactttgaatgcttacatcctccaac

SEQ ID NO: 917871 - DNA, 33 bp, Homo sapien
atagaatcatcagcacacaggcattaaaagaat

SEQ ID NO: 917872 - DNA, 33 bp, Homo sapien
atagaatcatcagcacgcaggcattaaaagaat

SEQ ID NO: 917873 - DNA, 33 bp, Homo sapien
taagtaaaagttgttacggtctgcattttcatc

SEQ ID NO: 917874 - DNA, 33 bp, Homo sapien
taagtaaaagttgttatggtctgcattttcatc

SEQ ID NO: 917875 - DNA, 33 bp, Homo sapien
ggggataaaagccacacatttgaatgctaaagg

SEQ ID NO: 917876 - DNA, 33 bp, Homo sapien
ggggataaaagccacatatttgaatgctaaagg

SEQ ID NO: 917877 - DNA, 33 bp, Homo sapien
gcacattcctgagtccacttgcaatactggatt

SEQ ID NO: 917878 - DNA, 33 bp, Homo sapien
gcacattcctgagtccgcttgcaatactggatt

SEQ ID NO: 917879 - DNA, 33 bp, Homo sapien
agaaaaaaatacatcaataagtccatcacctag

SEQ ID NO: 917880 - DNA, 33 bp, Homo sapien
agaaaaaaatacatcagtaagtccatcacctag

SEQ ID NO: 917881 - DNA, 33 bp, Homo sapien
gtgtttttttgggaacaggattagagtggttga

SEQ ID NO: 917882 - DNA, 33 bp, Homo sapien
gtgtttttttgggaacgggattagagtggttga

SEQ ID NO: 917883 - DNA, 33 bp, Homo sapien
cctcagaactgtctacggccttcaaggacacac

SEQ ID NO: 917884 - DNA, 33 bp, Homo sapien
cctcagaactgtctactgccttcaaggacacac

SEQ ID NO: 917885 - DNA, 33 bp, Homo sapien
gtatgtttgttcttcaataagttgttgtttttt

SEQ ID NO: 917886 - DNA, 33 bp, Homo sapien
gtatgtttgttcttcagtaagttgttgtttttt

SEQ ID NO: 917887 - DNA, 33 bp, Homo sapien
tttgttaggccaagacgctgaacataaatgtaa

SEQ ID NO: 917888 - DNA, 33 bp, Homo sapien
tttgttaggccaagactctgaacataaatgtaa

SEQ ID NO: 917889 - DNA, 33 bp, Homo sapien
tcacctgtcagtcagaccttgctttatctctca

SEQ ID NO: 917890 - DNA, 33 bp, Homo sapien
tcacctgtcagtcagatcttgctttatctctca

SEQ ID NO: 917891 - DNA, 33 bp, Homo sapien
cttctttggggctctgcagatttaatagcttgg

SEQ ID NO: 917892 - DNA, 33 bp, Homo sapien
cttctttggggctctggagatttaatagcttgg

SEQ ID NO: 917893 - DNA, 33 bp, Homo sapien
gcaggcacaattgacaaaatgtagacagaacgt

SEQ ID NO: 917894 - DNA, 33 bp, Homo sapien
gcaggcacaattgacacaatgtagacagaacgt

SEQ ID NO: 917895 - DNA, 33 bp, Homo sapien
tctaagtcactgcctgaaggtaatttgagcagt

SEQ ID NO: 917896 - DNA, 33 bp, Homo sapien
tctaagtcactgcctggaggtaatttgagcagt

SEQ ID NO: 917897 - DNA, 33 bp, Homo sapien
ctttctcacactttacactccagcaattctgaa

SEQ ID NO: 917898 - DNA, 33 bp, Homo sapien
ctttctcacactttacgctccagcaattctgaa

SEQ ID NO: 917899 - DNA, 33 bp, Homo sapien
aattaaaatttggaagaaactcatttctctttc

SEQ ID NO: 917900 - DNA, 33 bp, Homo sapien
aattaaaatttggaaggaactcatttctctttc

SEQ ID NO: 917901 - DNA, 33 bp, Homo sapien
ttatggttatgagaaccctaaaataatcagacc

SEQ ID NO: 917902 - DNA, 33 bp, Homo sapien
ttatggttatgagaactctaaaataatcagacc

SEQ ID NO: 917903 - DNA, 33 bp, Homo sapien
tagtgagtgggcattaagatctaaatactctct

SEQ ID NO: 917904 - DNA, 33 bp, Homo sapien
tagtgagtgggcattaggatctaaatactctct

SEQ ID NO: 917905 - DNA, 33 bp, Homo sapien
gtgacattatgtaacgcagtttggtttgttttt

SEQ ID NO: 917906 - DNA, 33 bp, Homo sapien
gtgacattatgtaacgtagtttggtttgttttt

SEQ ID NO: 917907 - DNA, 33 bp, Homo sapien
cccactctctgacttaaggacccatcttattat

SEQ ID NO: 917908 - DNA, 33 bp, Homo sapien
cccactctctgacttagggacccatcttattat

SEQ ID NO: 917909 - DNA, 33 bp, Homo sapien
ttgtggtaggaataaccatgaaggcactcaaag

SEQ ID NO: 917910 - DNA, 33 bp, Homo sapien
ttgtggtaggaataactatgaaggcactcaaag

SEQ ID NO: 917911 - DNA, 33 bp, Homo sapien
gcttaagtaatgggtaagtacatcttcagttct

SEQ ID NO: 917912 - DNA, 33 bp, Homo sapien
gcttaagtaatgggtacgtacatcttcagttct

SEQ ID NO: 917913 - DNA, 33 bp, Homo sapien
aagtccatgacaggaaatatttaaatcatttaa

SEQ ID NO: 917914 - DNA, 33 bp, Homo sapien
aagtccatgacaggaagtatttaaatcatttaa

SEQ ID NO: 917915 - DNA, 33 bp, Homo sapien
ggaatgactaactgctaaaagaaggtaagactt

SEQ ID NO: 917916 - DNA, 33 bp, Homo sapien
ggaatgactaactgcttaaagaaggtaagactt

SEQ ID NO: 917917 - DNA, 33 bp, Homo sapien
tgtgcagaataaagacaaaattcctccttattg

SEQ ID NO: 917918 - DNA, 33 bp, Homo sapien
tgtgcagaataaagacgaaattcctccttattg

SEQ ID NO: 917919 - DNA, 33 bp, Homo sapien
tatctttttctttatcaaactgtcatgttgccc

SEQ ID NO: 917920 - DNA, 33 bp, Homo sapien
tatctttttctttatcgaactgtcatgttgccc

SEQ ID NO: 917921 - DNA, 33 bp, Homo sapien
ggagacccataagagccaataatgtagttccag

SEQ ID NO: 917922 - DNA, 33 bp, Homo sapien
ggagacccataagagcgaataatgtagttccag

SEQ ID NO: 917923 - DNA, 33 bp, Homo sapien
tgtcaacaggttcaaactgggaaaatggcagtt

SEQ ID NO: 917924 - DNA, 33 bp, Homo sapien
tgtcaacaggttcaaattgggaaaatggcagtt

SEQ ID NO: 917925 - DNA, 33 bp, Homo sapien
atatatgacaaaagaaacatggtaaagtccaga

SEQ ID NO: 917926 - DNA, 33 bp, Homo sapien
atatatgacaaaagaaccatggtaaagtccaga

SEQ ID NO: 917927 - DNA, 33 bp, Homo sapien
ttttttcgttaaagcaatcacactgagtccatg

SEQ ID NO: 917928 - DNA, 33 bp, Homo sapien
ttttttcgttaaagcagtcacactgagtccatg

SEQ ID NO: 917929 - DNA, 33 bp, Homo sapien
gttccttggtcatggacgtgaactatgtccaga

SEQ ID NO: 917930 - DNA, 33 bp, Homo sapien
gttccttggtcatggatgtgaactatgtccaga

SEQ ID NO: 917931 - DNA, 33 bp, Homo sapien
aactcaataggactgaacaaaaaggagagcaga

SEQ ID NO: 917932 - DNA, 33 bp, Homo sapien
aactcaataggactgaccaaaaaggagagcaga

SEQ ID NO: 917933 - DNA, 33 bp, Homo sapien
tcataaaatttgtgacagaattgactatgatga

SEQ ID NO: 917934 - DNA, 33 bp, Homo sapien
tcataaaatttgtgacggaattgactatgatga

SEQ ID NO: 917935 - DNA, 33 bp, Homo sapien
tgaattaataacaaaactgaatctcagagaaac

SEQ ID NO: 917936 - DNA, 33 bp, Homo sapien
tgaattaataacaaaattgaatctcagagaaac

SEQ ID NO: 917937 - DNA, 33 bp, Homo sapien
ctaaacccagaggctaagaaagggctagaagct

SEQ ID NO: 917938 - DNA, 33 bp, Homo sapien
ctaaacccagaggctaggaaagggctagaagct

SEQ ID NO: 917939 - DNA, 33 bp, Homo sapien
tccaccctgggtcgcaagaaaagtaaggagact

SEQ ID NO: 917940 - DNA, 33 bp, Homo sapien
tccaccctgggtcgcacgaaaagtaaggagact

SEQ ID NO: 917941 - DNA, 33 bp, Homo sapien
gcagaataggtgccttaaaataacatagggact

SEQ ID NO: 917942 - DNA, 33 bp, Homo sapien
gcagaataggtgccttgaaataacatagggact

SEQ ID NO: 917943 - DNA, 33 bp, Homo sapien
gatgtgtccaaggtggcatagttaattagtgat

SEQ ID NO: 917944 - DNA, 33 bp, Homo sapien
gatgtgtccaaggtgggatagttaattagtgat

SEQ ID NO: 917945 - DNA, 33 bp, Homo sapien
tatcagtacaaactcacgcttaattaatatagc

SEQ ID NO: 917946 - DNA, 33 bp, Homo sapien
tatcagtacaaactcatgcttaattaatatagc

SEQ ID NO: 917947 - DNA, 33 bp, Homo sapien
tcacaatttcgttataaaacttttgtgcaatat

SEQ ID NO: 917948 - DNA, 33 bp, Homo sapien
tcacaatttcgttatacaacttttgtgcaatat

SEQ ID NO: 917949 - DNA, 33 bp, Homo sapien
gtaaatgtggagaaaccgaaacaattttacaca

SEQ ID NO: 917950 - DNA, 33 bp, Homo sapien
gtaaatgtggagaaactgaaacaattttacaca

SEQ ID NO: 917951 - DNA, 33 bp, Homo sapien
ttgaactgttaacacaatgtagctctccactta

SEQ ID NO: 917952 - DNA, 33 bp, Homo sapien
ttgaactgttaacacagtgtagctctccactta

SEQ ID NO: 917953 - DNA, 33 bp, Homo sapien
atatattgattttgtaaatggcaaatgttaagt

SEQ ID NO: 917954 - DNA, 33 bp, Homo sapien
atatattgattttgtacatggcaaatgttaagt

SEQ ID NO: 917955 - DNA, 33 bp, Homo sapien
acaactgctttccccaacaaaactataaaacaa

SEQ ID NO: 917956 - DNA, 33 bp, Homo sapien
acaactgctttccccagcaaaactataaaacaa

SEQ ID NO: 917957 - DNA, 33 bp, Homo sapien
tttgccaactttgttaaatatcacttggttgta

SEQ ID NO: 917958 - DNA, 33 bp, Homo sapien
tttgccaactttgttatatatcacttggttgta

SEQ ID NO: 917959 - DNA, 33 bp, Homo sapien
taaaataacagttgcagtagttgcacatgttct

SEQ ID NO: 917960 - DNA, 33 bp, Homo sapien
taaaataacagttgcattagttgcacatgttct

SEQ ID NO: 917961 - DNA, 33 bp, Homo sapien
tgtcaagtggttatcacagagaaagaagaacaa

SEQ ID NO: 917962 - DNA, 33 bp, Homo sapien
tgtcaagtggttatcatagagaaagaagaacaa

SEQ ID NO: 917963 - DNA, 33 bp, Homo sapien
ggaaaactcaggggaggaaacagctttgaagat

SEQ ID NO: 917964 - DNA, 33 bp, Homo sapien
ggaaaactcaggggagtaaacagctttgaagat

SEQ ID NO: 917965 - DNA, 33 bp, Homo sapien
tatcatagcacttatacagtgttgtgccattgt

SEQ ID NO: 917966 - DNA, 33 bp, Homo sapien
tatcatagcacttatagagtgttgtgccattgt

SEQ ID NO: 917967 - DNA, 33 bp, Homo sapien
gaacatggtctgtttcaatcaataattatgtgt

SEQ ID NO: 917968 - DNA, 33 bp, Homo sapien
gaacatggtctgtttcgatcaataattatgtgt

SEQ ID NO: 917969 - DNA, 33 bp, Homo sapien
gtaggagcttaataacagtccattttattcctt

SEQ ID NO: 917970 - DNA, 33 bp, Homo sapien
gtaggagcttaataacggtccattttattcctt

SEQ ID NO: 917971 - DNA, 33 bp, Homo sapien
tagctgattaattctagggtacacaccagagcc

SEQ ID NO: 917972 - DNA, 33 bp, Homo sapien
tagctgattaattctatggtacacaccagagcc

SEQ ID NO: 917973 - DNA, 33 bp, Homo sapien
atatgaacacatggcaagaaatgaatgcttcag

SEQ ID NO: 917974 - DNA, 33 bp, Homo sapien
atatgaacacatggcaggaaatgaatgcttcag

SEQ ID NO: 917975 - DNA, 33 bp, Homo sapien
ggcaagtaagaagcgaaaggctgagaagcaaga

SEQ ID NO: 917976 - DNA, 33 bp, Homo sapien
ggcaagtaagaagcgagaggctgagaagcaaga

SEQ ID NO: 917977 - DNA, 33 bp, Homo sapien
tgtcagatctgcggaaagatgagtagaatgggt

SEQ ID NO: 917978 - DNA, 33 bp, Homo sapien
tgtcagatctgcggaacgatgagtagaatgggt

SEQ ID NO: 917979 - DNA, 33 bp, Homo sapien
acatatcctgttaaaccaaaatgaacgtatcca

SEQ ID NO: 917980 - DNA, 33 bp, Homo sapien
acatatcctgttaaactaaaatgaacgtatcca

SEQ ID NO: 917981 - DNA, 33 bp, Homo sapien
tcacagggctaataacaggagctttggccaaca

SEQ ID NO: 917982 - DNA, 33 bp, Homo sapien
tcacagggctaataacgggagctttggccaaca

SEQ ID NO: 917983 - DNA, 33 bp, Homo sapien
ctagtcggctttttcacgattgcaaatctgaag

SEQ ID NO: 917984 - DNA, 33 bp, Homo sapien
ctagtcggctttttcatgattgcaaatctgaag

SEQ ID NO: 917985 - DNA, 33 bp, Homo sapien
aggaagactttattcaaggccgttacaataggg

SEQ ID NO: 917986 - DNA, 33 bp, Homo sapien
aggaagactttattcagggccgttacaataggg

SEQ ID NO: 917987 - DNA, 33 bp, Homo sapien
gctaagggccttcaaaatttctattgctttaca

SEQ ID NO: 917988 - DNA, 33 bp, Homo sapien
gctaagggccttcaaagtttctattgctttaca

SEQ ID NO: 917989 - DNA, 33 bp, Homo sapien
ggcattgacatctttacgagtgactttccatcc

SEQ ID NO: 917990 - DNA, 33 bp, Homo sapien
ggcattgacatctttatgagtgactttccatcc

SEQ ID NO: 917991 - DNA, 33 bp, Homo sapien; identical to SEQ ID NO: 917989

SEQ ID NO: 917992 - DNA, 33 bp, Homo sapien; identical to SEQ ID NO: 917990

SEQ ID NO: 917993 - DNA, 33 bp, Homo sapien
cctctgtaatcatgaacgtacctctgacctcct

SEQ ID NO: 917994 - DNA, 33 bp, Homo sapien
cctctgtaatcatgaatgtacctctgacctcct

SEQ ID NO: 917995 - DNA, 33 bp, Homo sapien
cataacaaaatattacaaactgagaggcttaaa

SEQ ID NO: 917996 - DNA, 33 bp, Homo sapien
cataacaaaatattaccaactgagaggcttaaa

SEQ ID NO: 917997 - DNA, 33 bp, Homo sapien
cagcagagatgttaggaaaaaaaagatgtaatt

SEQ ID NO: 917998 - DNA, 33 bp, Homo sapien
cagcagagatgttagggaaaaaaagatgtaatt

SEQ ID NO: 917999 - DNA, 33 bp, Homo sapien
tatatatcagtgaaagacaaggaagaactatta

SEQ ID NO: 918000 - DNA, 33 bp, Homo sapien
tatatatcagtgaaagtcaaggaagaactatta

SEQ ID NO: 918001 - DNA, 33 bp, Homo sapien
catccacatcacatcgccctttttgattcactt

SEQ ID NO: 918002 - DNA, 33 bp, Homo sapien
catccacatcacatcgtcctttttgattcactt

SEQ ID NO: 918003 - DNA, 33 bp, Homo sapien
tccttgcatcagacaaatggggagaacagatag

SEQ ID NO: 918004 - DNA, 33 bp, Homo sapien
tccttgcatcagacaattggggagaacagatag

SEQ ID NO: 918005 - DNA, 33 bp, Homo sapien
ttatcatactcttggagcagcatgattaactca

SEQ ID NO: 918006 - DNA, 33 bp, Homo sapien
ttatcatactcttggatcagcatgattaactca

SEQ ID NO: 918007 - DNA, 33 bp, Homo sapien
tatggaggagtattcacagctgacagatggtaa

SEQ ID NO: 918008 - DNA, 33 bp, Homo sapien
tatggaggagtattcagagctgacagatggtaa

SEQ ID NO: 918009 - DNA, 33 bp, Homo sapien
gcgcagagattggttaagtacaataagctttac

SEQ ID NO: 918010 - DNA, 33 bp, Homo sapien
gcgcagagattggttaggtacaataagctttac

SEQ ID NO: 918011 - DNA, 33 bp, Homo sapien
tatcagctagggaatggcaaagcattcttatgg

SEQ ID NO: 918012 - DNA, 33 bp, Homo sapien
tatcagctagggaatgtcaaagcattcttatgg

SEQ ID NO: 918013 - DNA, 33 bp, Homo sapien
atggactaaactctccaatcaaaagtcatagaa

SEQ ID NO: 918014 - DNA, 33 bp, Homo sapien
atggactaaactctccgatcaaaagtcatagaa

SEQ ID NO: 918015 - DNA, 33 bp, Homo sapien
gttcaatgggtgaagcacatcaggattggacag

SEQ ID NO: 918016 - DNA, 33 bp, Homo sapien
gttcaatgggtgaagcgcatcaggattggacag

SEQ ID NO: 918017 - DNA, 33 bp, Homo sapien
aatcatttgtctgtctaaagagatagcatgtat

SEQ ID NO: 918018 - DNA, 33 bp, Homo sapien
aatcatttgtctgtctgaagagatagcatgtat

SEQ ID NO: 918019 - DNA, 33 bp, Homo sapien
atggaagatcagtacacatactacttaacttac

SEQ ID NO: 918020 - DNA, 33 bp, Homo sapien
atggaagatcagtacagatactacttaacttac

SEQ ID NO: 918021 - DNA, 33 bp, Homo sapien
catctcttgccacaagcaaagagatggaagatc

SEQ ID NO: 918022 - DNA, 33 bp, Homo sapien
catctcttgccacaagtaaagagatggaagatc

SEQ ID NO: 918023 - DNA, 33 bp, Homo sapien
attcatagaaacctcaaaatggaaacaatccaa

SEQ ID NO: 918024 - DNA, 33 bp, Homo sapien
attcatagaaacctcagaatggaaacaatccaa

SEQ ID NO: 918025 - DNA, 33 bp, Homo sapien
agaaagaaaaggacaacctaatgcttaaaatat

SEQ ID NO: 918026 - DNA, 33 bp, Homo sapien
agaaagaaaaggacaatctaatgcttaaaatat

SEQ ID NO: 918027 - DNA, 33 bp, Homo sapien
cttatttcgtttaccgcaatttaagccaccagg

SEQ ID NO: 918028 - DNA, 33 bp, Homo sapien
cttatttcgtttaccgtaatttaagccaccagg

SEQ ID NO: 918029 - DNA, 33 bp, Homo sapien
gtgctatgtcaacttacgaatctgctgatttga

SEQ ID NO: 918030 - DNA, 33 bp, Homo sapien
gtgctatgtcaacttatgaatctgctgatttga

SEQ ID NO: 918031 - DNA, 33 bp, Homo sapien
gagaatgtgaatgcaactaatatggccacctcc

SEQ ID NO: 918032 - DNA, 33 bp, Homo sapien
gagaatgtgaatgcaagtaatatggccacctcc

SEQ ID NO: 918033 - DNA, 33 bp, Homo sapien
tctgcaatggcagaaacatctgcgaacatgtca

SEQ ID NO: 918034 - DNA, 33 bp, Homo sapien
tctgcaatggcagaaagatctgcgaacatgtca

SEQ ID NO: 918035 - DNA, 33 bp, Homo sapien
gccagaggatgaggaaagtttcatggctggctc

SEQ ID NO: 918036 - DNA, 33 bp, Homo sapien
gccagaggatgaggaaggtttcatggctggctc

SEQ ID NO: 918037 - DNA, 33 bp, Homo sapien
ggcctaatggtaaagaatctaattgacaattac

SEQ ID NO: 918038 - DNA, 33 bp, Homo sapien
ggcctaatggtaaagactctaattgacaattac

SEQ ID NO: 918039 - DNA, 33 bp, Homo sapien
aaagtgtgtaaattcaaaagtgaagcaaatact

SEQ ID NO: 918040 - DNA, 33 bp, Homo sapien
aaagtgtgtaaattcagaagtgaagcaaatact

SEQ ID NO: 918041 - DNA, 33 bp, Homo sapien
aagtcacaaattataaacaaatctcacttttcc

SEQ ID NO: 918042 - DNA, 33 bp, Homo sapien
aagtcacaaattataatcaaatctcacttttcc

SEQ ID NO: 918043 - DNA, 33 bp, Homo sapien
ctgagggtacaaaatcaagaagaaaaatcccac

SEQ ID NO: 918044 - DNA, 33 bp, Homo sapien
ctgagggtacaaaatcgagaagaaaaatcccac

SEQ ID NO: 918045 - DNA, 33 bp, Homo sapien
aactctggaaaatactgaggctctgcgctcatg

SEQ ID NO: 918046 - DNA, 33 bp, Homo sapien
aactctggaaaatacttaggctctgcgctcatg

SEQ ID NO: 918047 - DNA, 33 bp, Homo sapien
gtttaatccatgactgaaaattggaaataaata

SEQ ID NO: 918048 - DNA, 33 bp, Homo sapien
gtttaatccatgactggaaattggaaataaata

SEQ ID NO: 918049 - DNA, 33 bp, Homo sapien
agatttggagactacacataacactaaactctc

SEQ ID NO: 918050 - DNA, 33 bp, Homo sapien
agatttggagactacatataacactaaactctc

SEQ ID NO: 918051 - DNA, 33 bp, Homo sapien
ttatccagtccaaaaggcatttaattttgtctt

SEQ ID NO: 918052 - DNA, 33 bp, Homo sapien
ttatccagtccaaaagtcatttaattttgtctt

SEQ ID NO: 918053 - DNA, 33 bp, Homo sapien
gcaacacaactggacactgatgaatgaattgat

SEQ ID NO: 918054 - DNA, 33 bp, Homo sapien
gcaacacaactggacattgatgaatgaattgat

SEQ ID NO: 918055 - DNA, 33 bp, Homo sapien
tagggaattcctatcacaccagtaatttcagtg

SEQ ID NO: 918056 - DNA, 33 bp, Homo sapien
tagggaattcctatcataccagtaatttcagtg

SEQ ID NO: 918057 - DNA, 33 bp, Homo sapien
gtgggaatgctaatcacatctgtgtatcaacac

SEQ ID NO: 918058 - DNA, 33 bp, Homo sapien
gtgggaatgctaatcatatctgtgtatcaacac

SEQ ID NO: 918059 - DNA, 33 bp, Homo sapien
caatatcctttggccacgtgcaaggttattgta

SEQ ID NO: 918060 - DNA, 33 bp, Homo sapien
caatatcctttggccatgtgcaaggttattgta

SEQ ID NO: 918061 - DNA, 33 bp, Homo sapien
tggtatggtgctagtacaaacggtcattgactc

SEQ ID NO: 918062 - DNA, 33 bp, Homo sapien
tggtatggtgctagtataaacggtcattgactc

SEQ ID NO: 918063 - DNA, 33 bp, Homo sapien
gtttcaactagcactaataaaagatctttccta

SEQ ID NO: 918064 - DNA, 33 bp, Homo sapien
gtttcaactagcactagtaaaagatctttccta

SEQ ID NO: 918065 - DNA, 33 bp, Homo sapien
ccatagatcccaatagcagaagctgtccttgtc

SEQ ID NO: 918066 - DNA, 33 bp, Homo sapien
ccatagatcccaatagtagaagctgtccttgtc

SEQ ID NO: 918067 - DNA, 33 bp, Homo sapien
ataatctccaaaaatcaactaacaatgagaatt

SEQ ID NO: 918068 - DNA, 33 bp, Homo sapien
ataatctccaaaaatcgactaacaatgagaatt

SEQ ID NO: 918069 - DNA, 33 bp, Homo sapien
aagttagtgtgaacccaagatcatgaaatcact

SEQ ID NO: 918070 - DNA, 33 bp, Homo sapien
aagttagtgtgaacccgagatcatgaaatcact

SEQ ID NO: 918071 - DNA, 33 bp, Homo sapien
cattaattagttaacaccacgttttgagataat

SEQ ID NO: 918072 - DNA, 33 bp, Homo sapien
cattaattagttaacatcacgttttgagataat

SEQ ID NO: 918073 - DNA, 33 bp, Homo sapien
tatagataaattccacagaagttttgaatcaca

SEQ ID NO: 918074 - DNA, 33 bp, Homo sapien
tatagataaattccacggaagttttgaatcaca

SEQ ID NO: 918075 - DNA, 33 bp, Homo sapien
cttctttgccacaagcaagaaaggacatatatg

SEQ ID NO: 918076 - DNA, 33 bp, Homo sapien
cttctttgccacaagccagaaaggacatatatg

SEQ ID NO: 918077 - DNA, 33 bp, Homo sapien
atgatttactggagcacagtcgaatacattttg

SEQ ID NO: 918078 - DNA, 33 bp, Homo sapien
atgatttactggagcagagtcgaatacattttg

SEQ ID NO: 918079 - DNA, 33 bp, Homo sapien
taatatagggtgcttaagatttcatactttatc

SEQ ID NO: 918080 - DNA, 33 bp, Homo sapien
taatatagggtgcttaggatttcatactttatc

SEQ ID NO: 918081 - DNA, 33 bp, Homo sapien
tgtgacagatatcgctaagagatcaataaaatc

SEQ ID NO: 918082 - DNA, 33 bp, Homo sapien
tgtgacagatatcgctgagagatcaataaaatc

SEQ ID NO: 918083 - DNA, 33 bp, Homo sapien
tgcagatgaacaaagaagcagagaaaaggcaaa

SEQ ID NO: 918084 - DNA, 33 bp, Homo sapien
tgcagatgaacaaagacgcagagaaaaggcaaa

SEQ ID NO: 918085 - DNA, 33 bp, Homo sapien
tatatgagaagcaaaagataaccaatgtaagtc

SEQ ID NO: 918086 - DNA, 33 bp, Homo sapien
tatatgagaagcaaaatataaccaatgtaagtc

SEQ ID NO: 918087 - DNA, 33 bp, Homo sapien
aaggatctttggtttacaagaaagatggtaaaa

SEQ ID NO: 918088 - DNA, 33 bp, Homo sapien
aaggatctttggtttagaagaaagatggtaaaa

SEQ ID NO: 918089 - DNA, 33 bp, Homo sapien
aactgaagaccatataaggagggaacaatttgg

SEQ ID NO: 918090 - DNA, 33 bp, Homo sapien
aactgaagaccatatagggagggaacaatttgg

SEQ ID NO: 918091 - DNA, 33 bp, Homo sapien
cattttctttctcaacacaaattgcttaataaa

SEQ ID NO: 918092 - DNA, 33 bp, Homo sapien
cattttctttctcaacgcaaattgcttaataaa

SEQ ID NO: 918093 - DNA, 33 bp, Homo sapien
tccttcaatttgctcacgtttttcttctactaa

SEQ ID NO: 918094 - DNA, 33 bp, Homo sapien
tccttcaatttgctcatgtttttcttctactaa

SEQ ID NO: 918095 - DNA, 33 bp, Homo sapien
gtgcctatattactacaaacaaagatttggaaa

SEQ ID NO: 918096 - DNA, 33 bp, Homo sapien
gtgcctatattactaccaacaaagatttggaaa

SEQ ID NO: 918097 - DNA, 33 bp, Homo sapien
tgcttataagatgagtaacgtatagggtctagg

SEQ ID NO: 918098 - DNA, 33 bp, Homo sapien
tgcttataagatgagtgacgtatagggtctagg

SEQ ID NO: 918099 - DNA, 33 bp, Homo sapien
gaacactgtggcaaaaaagttgggtttctaaag

SEQ ID NO: 918100 - DNA, 33 bp, Homo sapien
gaacactgtggcaaaatagttgggtttctaaag

SEQ ID NO: 918101 - DNA, 33 bp, Homo sapien
agcattggtataggaagtcgaagtgtttcctac

SEQ ID NO: 918102 - DNA, 33 bp, Homo sapien
agcattggtataggaattcgaagtgtttcctac

SEQ ID NO: 918103 - DNA, 33 bp, Homo sapien
atggcatggagtcttaccaatatgattttcaca

SEQ ID NO: 918104 - DNA, 33 bp, Homo sapien
atggcatggagtcttatcaatatgattttcaca

SEQ ID NO: 918105 - DNA, 33 bp, Homo sapien
ggctgagtcacacagaaccatccatagatatca

SEQ ID NO: 918106 - DNA, 33 bp, Homo sapien
ggctgagtcacacagagccatccatagatatca

SEQ ID NO: 918107 - DNA, 33 bp, Homo sapien
ctctacactgttgtataataattttgtctatgc

SEQ ID NO: 918108 - DNA, 33 bp, Homo sapien
ctctacactgttgtattataattttgtctatgc

SEQ ID NO: 918109 - DNA, 33 bp, Homo sapien
caaaaggaaatcttagaatatctggtttactta

SEQ ID NO: 918110 - DNA, 33 bp, Homo sapien
caaaaggaaatcttagtatatctggtttactta

SEQ ID NO: 918111 - DNA, 33 bp, Homo sapien
tcactgtagcataaaactgtgtacaaaaataat

SEQ ID NO: 918112 - DNA, 33 bp, Homo sapien
tcactgtagcataaaagtgtgtacaaaaataat

SEQ ID NO: 918113 - DNA, 33 bp, Homo sapien
aatcactcagatacaaagacattcactcaagca

SEQ ID NO: 918114 - DNA, 33 bp, Homo sapien
aatcactcagatacaaggacattcactcaagca

SEQ ID NO: 918115 - DNA, 33 bp, Homo sapien
ctattatatgctctgcaaatatcatatatattg

SEQ ID NO: 918116 - DNA, 33 bp, Homo sapien
ctattatatgctctgctaatatcatatatattg

SEQ ID NO: 918117 - DNA, 33 bp, Homo sapien
gccaatctgtgaacaacagaaataaagcaaaaa

SEQ ID NO: 918118 - DNA, 33 bp, Homo sapien
gccaatctgtgaacaatagaaataaagcaaaaa

SEQ ID NO: 918119 - DNA, 33 bp, Homo sapien
ctgtacagatcttagcactcttattagcctacc

SEQ ID NO: 918120 - DNA, 33 bp, Homo sapien
ctgtacagatcttagcgctcttattagcctacc

SEQ ID NO: 918121 - DNA, 33 bp, Homo sapien
tgtacaatagagttctaaaacttactcctgcta

SEQ ID NO: 918122 - DNA, 33 bp, Homo sapien
tgtacaatagagttcttaaacttactcctgcta

SEQ ID NO: 918123 - DNA, 33 bp, Homo sapien
gaaggaattcttccaaactaattgtgcaaggcc

SEQ ID NO: 918124 - DNA, 33 bp, Homo sapien
gaaggaattcttccaagctaattgtgcaaggcc

SEQ ID NO: 918125 - DNA, 33 bp, Homo sapien
ttttgttattgactcaatcttcttagtattggt

SEQ ID NO: 918126 - DNA, 33 bp, Homo sapien
ttttgttattgactcagtcttcttagtattggt

SEQ ID NO: 918127 - DNA, 33 bp, Homo sapien
acaactgatagaacagaagtgcaagaggttatt

SEQ ID NO: 918128 - DNA, 33 bp, Homo sapien
acaactgatagaacaggagtgcaagaggttatt

SEQ ID NO: 918129 - DNA, 33 bp, Homo sapien
agcctcattttactccaatgccaatatgccaaa

SEQ ID NO: 918130 - DNA, 33 bp, Homo sapien
agcctcattttactccgatgccaatatgccaaa

SEQ ID NO: 918131 - DNA, 33 bp, Homo sapien
tcttagcaactgtcagcaaagaggtagttacaa

SEQ ID NO: 918132 - DNA, 33 bp, Homo sapien
tcttagcaactgtcagtaaagaggtagttacaa

SEQ ID NO: 918133 - DNA, 33 bp, Homo sapien
tagagatcaattcaggaaagatgcaaattttgg

SEQ ID NO: 918134 - DNA, 33 bp, Homo sapien
tagagatcaattcagggaagatgcaaattttgg

SEQ ID NO: 918135 - DNA, 33 bp, Homo sapien
gtccatcacttatttacaggaattgatctccta

SEQ ID NO: 918136 - DNA, 33 bp, Homo sapien
gtccatcacttatttataggaattgatctccta

SEQ ID NO: 918137 - DNA, 33 bp, Homo sapien
tgtatcattatgttaaatctggtaatcaaaagg

SEQ ID NO: 918138 - DNA, 33 bp, Homo sapien
tgtatcattatgttaagtctggtaatcaaaagg

SEQ ID NO: 918139 - DNA, 33 bp, Homo sapien
gacacaggggccgtgcacaaagggtaattgagt

SEQ ID NO: 918140 - DNA, 33 bp, Homo sapien
gacacaggggccgtgcgcaaagggtaattgagt

SEQ ID NO: 918141 - DNA, 33 bp, Homo sapien
gagtataataaactaaaatctcagtggtgatca

SEQ ID NO: 918142 - DNA, 33 bp, Homo sapien
gagtataataaactaacatctcagtggtgatca

SEQ ID NO: 918143 - DNA, 33 bp, Homo sapien
cagtttttttattgtaacacactgaatttatcg

SEQ ID NO: 918144 - DNA, 33 bp, Homo sapien
cagtttttttattgtagcacactgaatttatcg

SEQ ID NO: 918145 - DNA, 33 bp, Homo sapien
ggtgggcatataatgtaaagtcagaggttcaag

SEQ ID NO: 918146 - DNA, 33 bp, Homo sapien
ggtgggcatataatgtgaagtcagaggttcaag

SEQ ID NO: 918147 - DNA, 33 bp, Homo sapien
gttagtggttttacaactaattccttgtatcat

SEQ ID NO: 918148 - DNA, 33 bp, Homo sapien
gttagtggttttacaattaattccttgtatcat

SEQ ID NO: 918149 - DNA, 33 bp, Homo sapien
ttaaattgtaaagaccaactcaatcaggaaatt

SEQ ID NO: 918150 - DNA, 33 bp, Homo sapien
ttaaattgtaaagaccgactcaatcaggaaatt

SEQ ID NO: 918151 - DNA, 33 bp, Homo sapien
tttttcaagtagtagaaatttatgcacacacaa

SEQ ID NO: 918152 - DNA, 33 bp, Homo sapien
tttttcaagtagtagatatttatgcacacacaa

SEQ ID NO: 918153 - DNA, 33 bp, Homo sapien
ttgaggtttcttcaaaatagacccaatctttga

SEQ ID NO: 918154 - DNA, 33 bp, Homo sapien
ttgaggtttcttcaaattagacccaatctttga

SEQ ID NO: 918155 - DNA, 33 bp, Homo sapien
catctatccaagtaataacgtggacagcaatga

SEQ ID NO: 918156 - DNA, 33 bp, Homo sapien
catctatccaagtaatcacgtggacagcaatga

SEQ ID NO: 918157 - DNA, 33 bp, Homo sapien
cttcttttgagaaatacccgttcatgtcctttg

SEQ ID NO: 918158 - DNA, 33 bp, Homo sapien
cttcttttgagaaatatccgttcatgtcctttg

SEQ ID NO: 918159 - DNA, 33 bp, Homo sapien
agacagaaattataaactcattagcggatacat

SEQ ID NO: 918160 - DNA, 33 bp, Homo sapien
agacagaaattataaagtcattagcggatacat

SEQ ID NO: 918161 - DNA, 33 bp, Homo sapien
agtggttgaagaatgaaaacaagcttgatgttt

SEQ ID NO: 918162 - DNA, 33 bp, Homo sapien
agtggttgaagaatgagaacaagcttgatgttt

SEQ ID NO: 918163 - DNA, 33 bp, Homo sapien
tcctcaaggctttatgacacattggtagagagc

SEQ ID NO: 918164 - DNA, 33 bp, Homo sapien
tcctcaaggctttatggcacattggtagagagc

SEQ ID NO: 918165 - DNA, 33 bp, Homo sapien
tgattactattgtccaatcataagcattccatt

SEQ ID NO: 918166 - DNA, 33 bp, Homo sapien
tgattactattgtccattcataagcattccatt

SEQ ID NO: 918167 - DNA, 33 bp, Homo sapien
agagtaatgtgcttgcaatcatagtgtatcttc

SEQ ID NO: 918168 - DNA, 33 bp, Homo sapien
agagtaatgtgcttgccatcatagtgtatcttc

SEQ ID NO: 918169 - DNA, 33 bp, Homo sapien
tcttgaaatctcagccccttcctctctaaagtg

SEQ ID NO: 918170 - DNA, 33 bp, Homo sapien
tcttgaaatctcagcctcttcctctctaaagtg

SEQ ID NO: 918171 - DNA, 33 bp, Homo sapien
gtctactgaaacttgacgagggtatttggagat

SEQ ID NO: 918172 - DNA, 33 bp, Homo sapien
gtctactgaaacttgatgagggtatttggagat

SEQ ID NO: 918173 - DNA, 33 bp, Homo sapien
gaagataccatctaaccgtgtagtttttccaaa

SEQ ID NO: 918174 - DNA, 33 bp, Homo sapien
gaagataccatctaactgtgtagtttttccaaa

SEQ ID NO: 918175 - DNA, 33 bp, Homo sapien
ttaaagacatggtggacagtgttatcagtaagt

SEQ ID NO: 918176 - DNA, 33 bp, Homo sapien
ttaaagacatggtggagagtgttatcagtaagt

SEQ ID NO: 918177 - DNA, 33 bp, Homo sapien
agttcagctgcagcaaactaaagcaccaagtaa

SEQ ID NO: 918178 - DNA, 33 bp, Homo sapien
agttcagctgcagcaagctaaagcaccaagtaa

SEQ ID NO: 918179 - DNA, 33 bp, Homo sapien
tttggcaaaagtgaccagagaaggctaataagt

SEQ ID NO: 918180 - DNA, 33 bp, Homo sapien
tttggcaaaagtgaccggagaaggctaataagt

SEQ ID NO: 918181 - DNA, 33 bp, Homo sapien
gtcactgtggaaccaaacaaacaccagtaaaca

SEQ ID NO: 918182 - DNA, 33 bp, Homo sapien
gtcactgtggaaccaagcaaacaccagtaaaca

SEQ ID NO: 918183 - DNA, 33 bp, Homo sapien
ggatagttggttcacaatgaactataagaaaaa

SEQ ID NO: 918184 - DNA, 33 bp, Homo sapien
ggatagttggttcacactgaactataagaaaaa

SEQ ID NO: 918185 - DNA, 33 bp, Homo sapien
atccacactaataatacagatgcccatatgatc

SEQ ID NO: 918186 - DNA, 33 bp, Homo sapien
atccacactaataatatagatgcccatatgatc

SEQ ID NO: 918187 - DNA, 33 bp, Homo sapien
ctaacagctgtaacaaagtacacattcctgata

SEQ ID NO: 918188 - DNA, 33 bp, Homo sapien
ctaacagctgtaacaaggtacacattcctgata

SEQ ID NO: 918189 - DNA, 33 bp, Homo sapien
ttaacatccatttatacgtgtgtaaggcacaaa

SEQ ID NO: 918190 - DNA, 33 bp, Homo sapien
ttaacatccatttatatgtgtgtaaggcacaaa

SEQ ID NO: 918191 - DNA, 33 bp, Homo sapien
ttctattctatctatacgcacacttccatcttt

SEQ ID NO: 918192 - DNA, 33 bp, Homo sapien
ttctattctatctatatgcacacttccatcttt

SEQ ID NO: 918193 - DNA, 33 bp, Homo sapien
agcgtaatctatgaagaagcaaatgattcacta

SEQ ID NO: 918194 - DNA, 33 bp, Homo sapien
agcgtaatctatgaaggagcaaatgattcacta

SEQ ID NO: 918195 - DNA, 33 bp, Homo sapien
cttggtgaatgttttacgtgagttggagacgaa

SEQ ID NO: 918196 - DNA, 33 bp, Homo sapien
cttggtgaatgttttatgtgagttggagacgaa

SEQ ID NO: 918197 - DNA, 33 bp, Homo sapien
aaaaagaaagacgacaaaaacagaagattataa

SEQ ID NO: 918198 - DNA, 33 bp, Homo sapien
aaaaagaaagacgacagaaacagaagattataa

SEQ ID NO: 918199 - DNA, 33 bp, Homo sapien
tactattgcatctgtaccttcatttgcatttct

SEQ ID NO: 918200 - DNA, 33 bp, Homo sapien
tactattgcatctgtatcttcatttgcatttct

SEQ ID NO: 918201 - DNA, 33 bp, Homo sapien
ttaaattatggagttccattagtatcccctaag

SEQ ID NO: 918202 - DNA, 33 bp, Homo sapien
ttaaattatggagttctattagtatcccctaag

SEQ ID NO: 918203 - DNA, 33 bp, Homo sapien
taaaacagagcgcaaacttaagagtcttgtaat

SEQ ID NO: 918204 - DNA, 33 bp, Homo sapien
taaaacagagcgcaaatttaagagtcttgtaat

SEQ ID NO: 918205 - DNA, 33 bp, Homo sapien
aagacagactaaagcaatgacctcatgctactc

SEQ ID NO: 918206 - DNA, 33 bp, Homo sapien
aagacagactaaagcagtgacctcatgctactc

SEQ ID NO: 918207 - DNA, 33 bp, Homo sapien
aaccatgccaagctaaatgaaaggaagacaata

SEQ ID NO: 918208 - DNA, 33 bp, Homo sapien
aaccatgccaagctaattgaaaggaagacaata

SEQ ID NO: 918209 - DNA, 33 bp, Homo sapien
ctcttttgggaatagactaaaagtgagatgtac

SEQ ID NO: 918210 - DNA, 33 bp, Homo sapien
ctcttttgggaatagattaaaagtgagatgtac

SEQ ID NO: 918211 - DNA, 33 bp, Homo sapien
aagcagcaggaagcacaagatcattatccattt

SEQ ID NO: 918212 - DNA, 33 bp, Homo sapien
aagcagcaggaagcaccagatcattatccattt

SEQ ID NO: 918213 - DNA, 33 bp, Homo sapien
cccttccagtccctaactgggatgatgacattt

SEQ ID NO: 918214 - DNA, 33 bp, Homo sapien
cccttccagtccctaattgggatgatgacattt

SEQ ID NO: 918215 - DNA, 33 bp, Homo sapien
agatttctgcattttaagtaaaaaccataaact

SEQ ID NO: 918216 - DNA, 33 bp, Homo sapien
agatttctgcattttaggtaaaaaccataaact

SEQ ID NO: 918217 - DNA, 33 bp, Homo sapien
tataacagcaatgggaatatataacatcacatt

SEQ ID NO: 918218 - DNA, 33 bp, Homo sapien
tataacagcaatgggactatataacatcacatt

SEQ ID NO: 918219 - DNA, 33 bp, Homo sapien
gcacagcagaatgtggaaagaatgatgcaacag

SEQ ID NO: 918220 - DNA, 33 bp, Homo sapien
gcacagcagaatgtggtaagaatgatgcaacag

SEQ ID NO: 918221 - DNA, 33 bp, Homo sapien
ccttctctgtgatcaactatatcattcttctgt

SEQ ID NO: 918222 - DNA, 33 bp, Homo sapien
ccttctctgtgatcaattatatcattcttctgt

SEQ ID NO: 918223 - DNA, 33 bp, Homo sapien
ttcatacactcaatgacactaggttgtataaaa

SEQ ID NO: 918224 - DNA, 33 bp, Homo sapien
ttcatacactcaatgatactaggttgtataaaa

SEQ ID NO: 918225 - DNA, 33 bp, Homo sapien
tatgggttacaatgacactacaaagtttaactt

SEQ ID NO: 918226 - DNA, 33 bp, Homo sapien
tatgggttacaatgacgctacaaagtttaactt

SEQ ID NO: 918227 - DNA, 33 bp, Homo sapien
aagaagctggaaaagacagatggagtgataaag

SEQ ID NO: 918228 - DNA, 33 bp, Homo sapien
aagaagctggaaaagatagatggagtgataaag

SEQ ID NO: 918229 - DNA, 33 bp, Homo sapien
tattatcaccagaacaacccaaaactctcagct

SEQ ID NO: 918230 - DNA, 33 bp, Homo sapien
tattatcaccagaacaccccaaaactctcagct

SEQ ID NO: 918231 - DNA, 33 bp, Homo sapien
aatgggtgacttgttacaatcatgggtttcttc

SEQ ID NO: 918232 - DNA, 33 bp, Homo sapien
aatgggtgacttgttataatcatgggtttcttc

SEQ ID NO: 918233 - DNA, 33 bp, Homo sapien
ccaaatcatttgcactaaaagtatattcactct

SEQ ID NO: 918234 - DNA, 33 bp, Homo sapien
ccaaatcatttgcactgaaagtatattcactct

SEQ ID NO: 918235 - DNA, 33 bp, Homo sapien
aatttatgctttttaaacctagagatgtaggaa

SEQ ID NO: 918236 - DNA, 33 bp, Homo sapien
aatttatgctttttaatcctagagatgtaggaa

SEQ ID NO: 918237 - DNA, 33 bp, Homo sapien
ttccagtggcccttcaaaaaccacagaatcaaa

SEQ ID NO: 918238 - DNA, 33 bp, Homo sapien
ttccagtggcccttcagaaaccacagaatcaaa

SEQ ID NO: 918239 - DNA, 33 bp, Homo sapien
acttggtaaacagtagaaaaggacatcgttgat

SEQ ID NO: 918240 - DNA, 33 bp, Homo sapien
acttggtaaacagtaggaaaggacatcgttgat

SEQ ID NO: 918241 - DNA, 33 bp, Homo sapien
tgactggtacataacactgacagaatctaaatt

SEQ ID NO: 918242 - DNA, 33 bp, Homo sapien
tgactggtacataacagtgacagaatctaaatt

SEQ ID NO: 918243 - DNA, 33 bp, Homo sapien
gatagagtaatcatggaaactcactagatgtcc

SEQ ID NO: 918244 - DNA, 33 bp, Homo sapien
gatagagtaatcatgggaactcactagatgtcc

SEQ ID NO: 918245 - DNA, 33 bp, Homo sapien
agtctggctttccaagaagaaacacttgatatc

SEQ ID NO: 918246 - DNA, 33 bp, Homo sapien
agtctggctttccaaggagaaacacttgatatc

SEQ ID NO: 918247 - DNA, 33 bp, Homo sapien
tcctgggttactgattaaaccattatagcaaga

SEQ ID NO: 918248 - DNA, 33 bp, Homo sapien
tcctgggttactgatttaaccattatagcaaga

SEQ ID NO: 918249 - DNA, 33 bp, Homo sapien
ctaggtgctacagagccatagacaagaggatgt

SEQ ID NO: 918250 - DNA, 33 bp, Homo sapien
ctaggtgctacagagctatagacaagaggatgt

SEQ ID NO: 918251 - DNA, 33 bp, Homo sapien
ttccactgtcattttaagtagagaaatatcaaa

SEQ ID NO: 918252 - DNA, 33 bp, Homo sapien
ttccactgtcattttacgtagagaaatatcaaa

SEQ ID NO: 918253 - DNA, 33 bp, Homo sapien
gaacaatactaatagccgagttcggaaatatgt

SEQ ID NO: 918254 - DNA, 33 bp, Homo sapien
gaacaatactaatagctgagttcggaaatatgt

SEQ ID NO: 918255 - DNA, 33 bp, Homo sapien
aatatccaggcttacacaaatgccaactcacat

SEQ ID NO: 918256 - DNA, 33 bp, Homo sapien
aatatccaggcttacataaatgccaactcacat

SEQ ID NO: 918257 - DNA, 33 bp, Homo sapien
gcctcaacaaaatttacacatcttcaacaccat

SEQ ID NO: 918258 - DNA, 33 bp, Homo sapien
gcctcaacaaaatttatacatcttcaacaccat

SEQ ID NO: 918259 - DNA, 33 bp, Homo sapien
ttgacaactttttccaatgattacactttactt

SEQ ID NO: 918260 - DNA, 33 bp, Homo sapien
ttgacaactttttccagtgattacactttactt

SEQ ID NO: 918261 - DNA, 33 bp, Homo sapien
tctcagaaggccgatgaaaaattcgctggcctg

SEQ ID NO: 918262 - DNA, 33 bp, Homo sapien
tctcagaaggccgatggaaaattcgctggcctg

SEQ ID NO: 918263 - DNA, 33 bp, Homo sapien
tgcttctatttactgcaaaaaattgtgaagaat

SEQ ID NO: 918264 - DNA, 33 bp, Homo sapien
tgcttctatttactgccaaaaattgtgaagaat

SEQ ID NO: 918265 - DNA, 33 bp, Homo sapien
tatctggattacatagcccattgacattcaagc

SEQ ID NO: 918266 - DNA, 33 bp, Homo sapien
tatctggattacataggccattgacattcaagc

SEQ ID NO: 918267 - DNA, 33 bp, Homo sapien
ggccataccaacctgaaaaaaagctaatttggg

SEQ ID NO: 918268 - DNA, 33 bp, Homo sapien
ggccataccaacctgacaaaaagctaatttggg

SEQ ID NO: 918269 - DNA, 33 bp, Homo sapien
acctttggggtctagaatatgactgaatatgag

SEQ ID NO: 918270 - DNA, 33 bp, Homo sapien
acctttggggtctagactatgactgaatatgag

SEQ ID NO: 918271 - DNA, 33 bp, Homo sapien
cttgaaagtctaaatgcagcagcataaatttta

SEQ ID NO: 918272 - DNA, 33 bp, Homo sapien
cttgaaagtctaaatgtagcagcataaatttta

SEQ ID NO: 918273 - DNA, 33 bp, Homo sapien
tcccttgtctctataacgactgtgacacaatgc

SEQ ID NO: 918274 - DNA, 33 bp, Homo sapien
tcccttgtctctataatgactgtgacacaatgc

SEQ ID NO: 918275 - DNA, 33 bp, Homo sapien
tagtggatcatttaaaactccatcactacagag

SEQ ID NO: 918276 - DNA, 33 bp, Homo sapien
tagtggatcatttaaacctccatcactacagag

SEQ ID NO: 918277 - DNA, 33 bp, Homo sapien
ttacagtctacatataaccacagatacaaaaac

SEQ ID NO: 918278 - DNA, 33 bp, Homo sapien
ttacagtctacatatagccacagatacaaaaac

SEQ ID NO: 918279 - DNA, 33 bp, Homo sapien
agatttcactgtctaaaatttgggttcaaaaga

SEQ ID NO: 918280 - DNA, 33 bp, Homo sapien
agatttcactgtctaagatttgggttcaaaaga

SEQ ID NO: 918281 - DNA, 33 bp, Homo sapien
atttactgatcctacacatttcacatttagagt

SEQ ID NO: 918282 - DNA, 33 bp, Homo sapien
atttactgatcctacatatttcacatttagagt

SEQ ID NO: 918283 - DNA, 33 bp, Homo sapien
acctatgttgctatgaacctgagaaagaagagg

SEQ ID NO: 918284 - DNA, 33 bp, Homo sapien
acctatgttgctatgatcctgagaaagaagagg

SEQ ID NO: 918285 - DNA, 33 bp, Homo sapien
atattgttctctgttacggtggagacaaatatg

SEQ ID NO: 918286 - DNA, 33 bp, Homo sapien
atattgttctctgttatggtggagacaaatatg

SEQ ID NO: 918287 - DNA, 33 bp, Homo sapien
gattcctgcagccaaaatgaatatgaacaaaaa

SEQ ID NO: 918288 - DNA, 33 bp, Homo sapien
gattcctgcagccaaagtgaatatgaacaaaaa

SEQ ID NO: 918289 - DNA, 33 bp, Homo sapien
acctccaataagaagtgaccacagttcatctag

SEQ ID NO: 918290 - DNA, 33 bp, Homo sapien
acctccaataagaagttaccacagttcatctag

SEQ ID NO: 918291 - DNA, 33 bp, Homo sapien
tattcttaagatgctacgcagcagttgtgagcc

SEQ ID NO: 918292 - DNA, 33 bp, Homo sapien
tattcttaagatgctaggcagcagttgtgagcc

SEQ ID NO: 918293 - DNA, 33 bp, Homo sapien
tgatggatttataatcagagcataacacagata

SEQ ID NO: 918294 - DNA, 33 bp, Homo sapien
tgatggatttataatcggagcataacacagata

SEQ ID NO: 918295 - DNA, 33 bp, Homo sapien
aggaactgggaagtcaatagaagtacagtatgt

SEQ ID NO: 918296 - DNA, 33 bp, Homo sapien
aggaactgggaagtcagtagaagtacagtatgt

SEQ ID NO: 918297 - DNA, 33 bp, Homo sapien
atacatcatatgaagacaattctaggcaaatga

SEQ ID NO: 918298 - DNA, 33 bp, Homo sapien
atacatcatatgaagataattctaggcaaatga

SEQ ID NO: 918299 - DNA, 33 bp, Homo sapien
tataggattcgaaagaaaatttatacattacat

SEQ ID NO: 918300 - DNA, 33 bp, Homo sapien
tataggattcgaaagagaatttatacattacat

SEQ ID NO: 918301 - DNA, 33 bp, Homo sapien
tattatgtagtgaagaatagaagctggtaaaga

SEQ ID NO: 918302 - DNA, 33 bp, Homo sapien
tattatgtagtgaagagtagaagctggtaaaga

SEQ ID NO: 918303 - DNA, 33 bp, Homo sapien
ctagcttgccaaacacacactaagaacaaagta

SEQ ID NO: 918304 - DNA, 33 bp, Homo sapien
ctagcttgccaaacacgcactaagaacaaagta

SEQ ID NO: 918305 - DNA, 33 bp, Homo sapien
aaaggcatccaggtataacaagcaaatcactta

SEQ ID NO: 918306 - DNA, 33 bp, Homo sapien
aaaggcatccaggtatgacaagcaaatcactta

SEQ ID NO: 918307 - DNA, 33 bp, Homo sapien
actataaattgggtgaagagttccaaacatatg

SEQ ID NO: 918308 - DNA, 33 bp, Homo sapien
actataaattgggtgatgagttccaaacatatg

SEQ ID NO: 918309 - DNA, 33 bp, Homo sapien
tttctctatcactaagacaatatgaccaagtgg

SEQ ID NO: 918310 - DNA, 33 bp, Homo sapien
tttctctatcactaaggcaatatgaccaagtgg

SEQ ID NO: 918311 - DNA, 33 bp, Homo sapien
tgaaagtgttaattaccctggactttctgcatg

SEQ ID NO: 918312 - DNA, 33 bp, Homo sapien
tgaaagtgttaattactctggactttctgcatg

SEQ ID NO: 918313 - DNA, 33 bp, Homo sapien
ttttatcacctgagtacatagttttaatagata

SEQ ID NO: 918314 - DNA, 33 bp, Homo sapien
ttttatcacctgagtagatagttttaatagata

SEQ ID NO: 918315 - DNA, 33 bp, Homo sapien
cataggtgatactactaaggttaagagagtttg

SEQ ID NO: 918316 - DNA, 33 bp, Homo sapien
cataggtgatactactgaggttaagagagtttg

SEQ ID NO: 918317 - DNA, 33 bp, Homo sapien
agaaatttagaaaaccaaccaaattcataaaat

SEQ ID NO: 918318 - DNA, 33 bp, Homo sapien
agaaatttagaaaaccgaccaaattcataaaat

SEQ ID NO: 918319 - DNA, 33 bp, Homo sapien
tagatagaactcagtcacatgtcccaattaact

SEQ ID NO: 918320 - DNA, 33 bp, Homo sapien
tagatagaactcagtcgcatgtcccaattaact

SEQ ID NO: 918321 - DNA, 33 bp, Homo sapien
attgatcactcaaggaacattacaaggaaagta

SEQ ID NO: 918322 - DNA, 33 bp, Homo sapien
attgatcactcaaggagcattacaaggaaagta

SEQ ID NO: 918323 - DNA, 33 bp, Homo sapien
atcataggtaatcctcacagaagcttcaatgca

SEQ ID NO: 918324 - DNA, 33 bp, Homo sapien
atcataggtaatcctcgcagaagcttcaatgca

SEQ ID NO: 918325 - DNA, 33 bp, Homo sapien
acccaactccccagtcaagaaataagcttaaca

SEQ ID NO: 918326 - DNA, 33 bp, Homo sapien
acccaactccccagtcgagaaataagcttaaca

SEQ ID NO: 918327 - DNA, 33 bp, Homo sapien
ctaggcattggtgcaacgtatctcaaaataata

SEQ ID NO: 918328 - DNA, 33 bp, Homo sapien
ctaggcattggtgcaatgtatctcaaaataata

SEQ ID NO: 918329 - DNA, 33 bp, Homo sapien
gcataccagtgtcacaccattgtaaattcaaaa

SEQ ID NO: 918330 - DNA, 33 bp, Homo sapien
gcataccagtgtcacatcattgtaaattcaaaa

SEQ ID NO: 918331 - DNA, 33 bp, Homo sapien
tcattcttccatgcgacgattttgcaggcattt

SEQ ID NO: 918332 - DNA, 33 bp, Homo sapien
tcattcttccatgcgatgattttgcaggcattt

SEQ ID NO: 918333 - DNA, 33 bp, Homo sapien
ttggtggtgtgatggaaaataaaagacaatgtt

SEQ ID NO: 918334 - DNA, 33 bp, Homo sapien
ttggtggtgtgatggagaataaaagacaatgtt

SEQ ID NO: 918335 - DNA, 33 bp, Homo sapien
agacatgaaaaaccaacgaaaagatcaacaagc

SEQ ID NO: 918336 - DNA, 33 bp, Homo sapien
agacatgaaaaaccaatgaaaagatcaacaagc

SEQ ID NO: 918337 - DNA, 33 bp, Homo sapien
tcaacaaagtggacaacctacagaatggaaaac

SEQ ID NO: 918338 - DNA, 33 bp, Homo sapien
tcaacaaagtggacaatctacagaatggaaaac

SEQ ID NO: 918339 - DNA, 33 bp, Homo sapien
aaaaaacctcaatagcactgatcattagaaaaa

SEQ ID NO: 918340 - DNA, 33 bp, Homo sapien
aaaaaacctcaatagcgctgatcattagaaaaa

SEQ ID NO: 918341 - DNA, 33 bp, Homo sapien
taaacctggttattaaatggtcctgctattact

SEQ ID NO: 918342 - DNA, 33 bp, Homo sapien
taaacctggttattaagtggtcctgctattact

SEQ ID NO: 918343 - DNA, 33 bp, Homo sapien
gccatgactgaggaaacatggtgaaatacaatt

SEQ ID NO: 918344 - DNA, 33 bp, Homo sapien
gccatgactgaggaaatatggtgaaatacaatt

SEQ ID NO: 918345 - DNA, 33 bp, Homo sapien
ccttttttgttttcagaagagatcaagagaaga

SEQ ID NO: 918346 - DNA, 33 bp, Homo sapien
ccttttttgttttcaggagagatcaagagaaga

SEQ ID NO: 918347 - DNA, 33 bp, Homo sapien
ggtcagaaaaaagatacaggtgcaagttatatt

SEQ ID NO: 918348 - DNA, 33 bp, Homo sapien
ggtcagaaaaaagatataggtgcaagttatatt

SEQ ID NO: 918349 - DNA, 33 bp, Homo sapien
ggtaattcaatttctgccaactggtattcttgt

SEQ ID NO: 918350 - DNA, 33 bp, Homo sapien
ggtaattcaatttctgtcaactggtattcttgt

SEQ ID NO: 918351 - DNA, 33 bp, Homo sapien
ggaactctgccattaaatatgtcgttgtgtcca

SEQ ID NO: 918352 - DNA, 33 bp, Homo sapien
ggaactctgccattaagtatgtcgttgtgtcca

SEQ ID NO: 918353 - DNA, 33 bp, Homo sapien
acttaagcacagaacactgaaatagcaaatata

SEQ ID NO: 918354 - DNA, 33 bp, Homo sapien
acttaagcacagaacattgaaatagcaaatata

SEQ ID NO: 918355 - DNA, 33 bp, Homo sapien
tttatgtttcctagaaagggtcatataatctgt

SEQ ID NO: 918356 - DNA, 33 bp, Homo sapien
tttatgtttcctagaaggggtcatataatctgt

SEQ ID NO: 918357 - DNA, 33 bp, Homo sapien
ttatgtttcttaatcaatagcagtgactttgaa

SEQ ID NO: 918358 - DNA, 33 bp, Homo sapien
ttatgtttcttaatcagtagcagtgactttgaa

SEQ ID NO: 918359 - DNA, 33 bp, Homo sapien
gcaccaaaatgttagacgtggtgaatatcagaa

SEQ ID NO: 918360 - DNA, 33 bp, Homo sapien
gcaccaaaatgttagatgtggtgaatatcagaa

SEQ ID NO: 918361 - DNA, 33 bp, Homo sapien
taggtaatttttaaagcctctattgtatttcat

SEQ ID NO: 918362 - DNA, 33 bp, Homo sapien
taggtaatttttaaaggctctattgtatttcat

SEQ ID NO: 918363 - DNA, 33 bp, Homo sapien
catttcttattctagaactctgccataactgga

SEQ ID NO: 918364 - DNA, 33 bp, Homo sapien
catttcttattctagagctctgccataactgga

SEQ ID NO: 918365 - DNA, 33 bp, Homo sapien
tatgtatgtgcaaatacgtctgtgcatacataa

SEQ ID NO: 918366 - DNA, 33 bp, Homo sapien
tatgtatgtgcaaatatgtctgtgcatacataa

SEQ ID NO: 918367 - DNA, 33 bp, Homo sapien
catagttgaggttaagaaacaaacatgagagag

SEQ ID NO: 918368 - DNA, 33 bp, Homo sapien
catagttgaggttaaggaacaaacatgagagag

SEQ ID NO: 918369 - DNA, 33 bp, Homo sapien
ttctaaggagagttgaacttagtaatgaaaaga

SEQ ID NO: 918370 - DNA, 33 bp, Homo sapien
ttctaaggagagttgaccttagtaatgaaaaga

SEQ ID NO: 918371 - DNA, 33 bp, Homo sapien
caaagaacctgaagaggaaagggaaataacatg

SEQ ID NO: 918372 - DNA, 33 bp, Homo sapien
caaagaacctgaagagtaaagggaaataacatg

SEQ ID NO: 918373 - DNA, 33 bp, Homo sapien
caagagaaaatgatataaggctgcgaatattta

SEQ ID NO: 918374 - DNA, 33 bp, Homo sapien
caagagaaaatgatatgaggctgcgaatattta

SEQ ID NO: 918375 - DNA, 33 bp, Homo sapien
cccttctaaacatggaaaactttgtagttacac

SEQ ID NO: 918376 - DNA, 33 bp, Homo sapien
cccttctaaacatggagaactttgtagttacac

SEQ ID NO: 918377 - DNA, 33 bp, Homo sapien
ggaccgttgttttacccacagctctcaataggt

SEQ ID NO: 918378 - DNA, 33 bp, Homo sapien
ggaccgttgttttacctacagctctcaataggt

SEQ ID NO: 918379 - DNA, 33 bp, Homo sapien
tagctctgctgtaaaaacggcaatttgaggaat

SEQ ID NO: 918380 - DNA, 33 bp, Homo sapien
tagctctgctgtaaaagcggcaatttgaggaat

SEQ ID NO: 918381 - DNA, 33 bp, Homo sapien
cttggcacttgaggaaaaaaatatgtcacaaat

SEQ ID NO: 918382 - DNA, 33 bp, Homo sapien
cttggcacttgaggaacaaaatatgtcacaaat

SEQ ID NO: 918383 - DNA, 33 bp, Homo sapien
cttatttaagcatatccagagtcctcgggaagg

SEQ ID NO: 918384 - DNA, 33 bp, Homo sapien
cttatttaagcatatcgagagtcctcgggaagg

SEQ ID NO: 918385 - DNA, 33 bp, Homo sapien
agctaaattcaaacaacgcaatgctcagccttc

SEQ ID NO: 918386 - DNA, 33 bp, Homo sapien
agctaaattcaaacaatgcaatgctcagccttc

SEQ ID NO: 918387 - DNA, 33 bp, Homo sapien
tcttctaaacgtgggaaaactatgtgaaaacaa

SEQ ID NO: 918388 - DNA, 33 bp, Homo sapien
tcttctaaacgtgggagaactatgtgaaaacaa

SEQ ID NO: 918389 - DNA, 33 bp, Homo sapien
catgtagagctttcaaatgaaggatcactttca

SEQ ID NO: 918390 - DNA, 33 bp, Homo sapien
catgtagagctttcaagtgaaggatcactttca

SEQ ID NO: 918391 - DNA, 33 bp, Homo sapien
aaattctcagtacacaatagtgattggcaagtt

SEQ ID NO: 918392 - DNA, 33 bp, Homo sapien
aaattctcagtacacagtagtgattggcaagtt

SEQ ID NO: 918393 - DNA, 33 bp, Homo sapien
gcgtagcagtagccaactagaaagcaaagaact

SEQ ID NO: 918394 - DNA, 33 bp, Homo sapien
gcgtagcagtagccaattagaaagcaaagaact

SEQ ID NO: 918395 - DNA, 33 bp, Homo sapien
tgcaactgtatgcaccgcagccctgaagtcagc

SEQ ID NO: 918396 - DNA, 33 bp, Homo sapien
tgcaactgtatgcacctcagccctgaagtcagc

SEQ ID NO: 918397 - DNA, 33 bp, Homo sapien
aaataatacagccacactggaagacaactgaag

SEQ ID NO: 918398 - DNA, 33 bp, Homo sapien
aaataatacagccacattggaagacaactgaag

SEQ ID NO: 918399 - DNA, 33 bp, Homo sapien
ctcaatcagactctacaccttgtcataaggaca

SEQ ID NO: 918400 - DNA, 33 bp, Homo sapien
ctcaatcagactctacgccttgtcataaggaca

SEQ ID NO: 918401 - DNA, 33 bp, Homo sapien
tgaccttaccgttaatcataagtaaagcactta

SEQ ID NO: 918402 - DNA, 33 bp, Homo sapien
tgaccttaccgttaatgataagtaaagcactta

SEQ ID NO: 918403 - DNA, 33 bp, Homo sapien
tgtatccacacaatcaaatttcattataaggta

SEQ ID NO: 918404 - DNA, 33 bp, Homo sapien
tgtatccacacaatcacatttcattataaggta

SEQ ID NO: 918405 - DNA, 33 bp, Homo sapien
accttgcacttttatacgatgaagatggtttcc

SEQ ID NO: 918406 - DNA, 33 bp, Homo sapien
accttgcacttttatatgatgaagatggtttcc

SEQ ID NO: 918407 - DNA, 33 bp, Homo sapien
aaatacatttgcaagacgacaaatcataactaa

SEQ ID NO: 918408 - DNA, 33 bp, Homo sapien
aaatacatttgcaagatgacaaatcataactaa

SEQ ID NO: 918409 - DNA, 33 bp, Homo sapien
actgacaaaaagaagggaggatagagccaccat

SEQ ID NO: 918410 - DNA, 33 bp, Homo sapien
actgacaaaaagaaggtaggatagagccaccat

SEQ ID NO: 918411 - DNA, 33 bp, Homo sapien
aagttctctatgaaacaaagctggttcaaacat

SEQ ID NO: 918412 - DNA, 33 bp, Homo sapien
aagttctctatgaaacgaagctggttcaaacat

SEQ ID NO: 918413 - DNA, 33 bp, Homo sapien
cattctaatctccataaccatgaagtcaattgc

SEQ ID NO: 918414 - DNA, 33 bp, Homo sapien
cattctaatctccatatccatgaagtcaattgc

SEQ ID NO: 918415 - DNA, 33 bp, Homo sapien
aagattgctatttaaacgtgtagcttcacaatt

SEQ ID NO: 918416 - DNA, 33 bp, Homo sapien
aagattgctatttaaatgtgtagcttcacaatt

SEQ ID NO: 918417 - DNA, 33 bp, Homo sapien
taaagaataatccttacgtggtcaattaaccag

SEQ ID NO: 918418 - DNA, 33 bp, Homo sapien
taaagaataatccttatgtggtcaattaaccag

SEQ ID NO: 918419 - DNA, 33 bp, Homo sapien
tagatttttgcatagggcctaccataaattgag

SEQ ID NO: 918420 - DNA, 33 bp, Homo sapien
tagatttttgcataggtcctaccataaattgag

SEQ ID NO: 918421 - DNA, 33 bp, Homo sapien
tttttctagtggtttacatattaatctgctata

SEQ ID NO: 918422 - DNA, 33 bp, Homo sapien
tttttctagtggtttagatattaatctgctata

SEQ ID NO: 918423 - DNA, 33 bp, Homo sapien
tccatagcttcccactaagtaattccagagttc

SEQ ID NO: 918424 - DNA, 33 bp, Homo sapien
tccatagcttcccacttagtaattccagagttc

SEQ ID NO: 918425 - DNA, 33 bp, Homo sapien
tctgcagtgaagtggaaaagtgagtcatgctta

SEQ ID NO: 918426 - DNA, 33 bp, Homo sapien
tctgcagtgaagtggagaagtgagtcatgctta

SEQ ID NO: 918427 - DNA, 33 bp, Homo sapien
atttaaacacttcaacaggagctatgaaaaaaa

SEQ ID NO: 918428 - DNA, 33 bp, Homo sapien
atttaaacacttcaacgggagctatgaaaaaaa

SEQ ID NO: 918429 - DNA, 33 bp, Homo sapien
attttgaagagctgaaatagggtcaagacagca

SEQ ID NO: 918430 - DNA, 33 bp, Homo sapien
attttgaagagctgaagtagggtcaagacagca

SEQ ID NO: 918431 - DNA, 33 bp, Homo sapien
cctctcttggcttggacggaaactgtgatgctt

SEQ ID NO: 918432 - DNA, 33 bp, Homo sapien
cctctcttggcttggatggaaactgtgatgctt

SEQ ID NO: 918433 - DNA, 33 bp, Homo sapien
cccttactagtctgtcacagcttttgctttgtt

SEQ ID NO: 918434 - DNA, 33 bp, Homo sapien
cccttactagtctgtcgcagcttttgctttgtt

SEQ ID NO: 918435 - DNA, 33 bp, Homo sapien
aagatttaggtcaggagtatgaaacagatgaaa

SEQ ID NO: 918436 - DNA, 33 bp, Homo sapien
aagatttaggtcaggattatgaaacagatgaaa

SEQ ID NO: 918437 - DNA, 33 bp, Homo sapien
ttatattggattccaactctgttttgtagccat

SEQ ID NO: 918438 - DNA, 33 bp, Homo sapien
ttatattggattccaagtctgttttgtagccat

SEQ ID NO: 918439 - DNA, 33 bp, Homo sapien
acttagatcttgctcaggttgagactatagaag

SEQ ID NO: 918440 - DNA, 33 bp, Homo sapien
acttagatcttgctcatgttgagactatagaag

SEQ ID NO: 918441 - DNA, 33 bp, Homo sapien
acattcctgaagagaaagcaatacacctttttt

SEQ ID NO: 918442 - DNA, 33 bp, Homo sapien
acattcctgaagagaaggcaatacacctttttt

SEQ ID NO: 918443 - DNA, 33 bp, Homo sapien
gccagaagtaaggtggacacagttaacatactg

SEQ ID NO: 918444 - DNA, 33 bp, Homo sapien
gccagaagtaaggtgggcacagttaacatactg

SEQ ID NO: 918445 - DNA, 33 bp, Homo sapien
tcactgtcaatcctgaactatagagaatgacaa

SEQ ID NO: 918446 - DNA, 33 bp, Homo sapien
tcactgtcaatcctgagctatagagaatgacaa

SEQ ID NO: 918447 - DNA, 33 bp, Homo sapien
ccttgtctgaagaacacgaagcttcctttaagg

SEQ ID NO: 918448 - DNA, 33 bp, Homo sapien
ccttgtctgaagaacatgaagcttcctttaagg

SEQ ID NO: 918449 - DNA, 33 bp, Homo sapien
tttttgcttaattgaacggaaatttttgggcat

SEQ ID NO: 918450 - DNA, 33 bp, Homo sapien
tttttgcttaattgaatggaaatttttgggcat

SEQ ID NO: 918451 - DNA, 33 bp, Homo sapien
ccaaaccattggccacagcccatagtcagcatg

SEQ ID NO: 918452 - DNA, 33 bp, Homo sapien
ccaaaccattggccaccgcccatagtcagcatg

SEQ ID NO: 918453 - DNA, 33 bp, Homo sapien
ttacttgtgttttcaggacctcctctggcctga

SEQ ID NO: 918454 - DNA, 33 bp, Homo sapien
ttacttgtgttttcagtacctcctctggcctga

SEQ ID NO: 918455 - DNA, 33 bp, Homo sapien
tcagtaccaaaatctacgggttagagttcctca

SEQ ID NO: 918456 - DNA, 33 bp, Homo sapien
tcagtaccaaaatctatgggttagagttcctca

SEQ ID NO: 918457 - DNA, 33 bp, Homo sapien
ctgactcagattggaactataccactggttctc

SEQ ID NO: 918458 - DNA, 33 bp, Homo sapien
ctgactcagattggaagtataccactggttctc

SEQ ID NO: 918459 - DNA, 33 bp, Homo sapien
agcaacagtctcaaaaagcttcagtggggatag

SEQ ID NO: 918460 - DNA, 33 bp, Homo sapien
agcaacagtctcaaaaggcttcagtggggatag

SEQ ID NO: 918461 - DNA, 33 bp, Homo sapien
tcttacttccaatcacagtgatgttatctcctg

SEQ ID NO: 918462 - DNA, 33 bp, Homo sapien
tcttacttccaatcacggtgatgttatctcctg

SEQ ID NO: 918463 - DNA, 33 bp, Homo sapien
ccagatgaaggacaaacatttcttacatctggg

SEQ ID NO: 918464 - DNA, 33 bp, Homo sapien
ccagatgaaggacaaatatttcttacatctggg

SEQ ID NO: 918465 - DNA, 33 bp, Homo sapien
tgacattgtgagtaacaacaactttgctacctc

SEQ ID NO: 918466 - DNA, 33 bp, Homo sapien
tgacattgtgagtaacgacaactttgctacctc

SEQ ID NO: 918467 - DNA, 33 bp, Homo sapien
tgacacactgggtatccgaaacaacagaaattt

SEQ ID NO: 918468 - DNA, 33 bp, Homo sapien
tgacacactgggtatctgaaacaacagaaattt

SEQ ID NO: 918469 - DNA, 33 bp, Homo sapien
gagtcagtaggatgagaccctaatccagtaaga

SEQ ID NO: 918470 - DNA, 33 bp, Homo sapien
gagtcagtaggatgaggccctaatccagtaaga

SEQ ID NO: 918471 - DNA, 33 bp, Homo sapien
gaattttggagaacaacaattcagtccataaca

SEQ ID NO: 918472 - DNA, 33 bp, Homo sapien
gaattttggagaacaataattcagtccataaca

SEQ ID NO: 918473 - DNA, 33 bp, Homo sapien
cataaagccctacacaacctaaggatagctcta

SEQ ID NO: 918474 - DNA, 33 bp, Homo sapien
cataaagccctacacaccctaaggatagctcta

SEQ ID NO: 918475 - DNA, 33 bp, Homo sapien
gttaggcctattttgaccacttttaataagtaa

SEQ ID NO: 918476 - DNA, 33 bp, Homo sapien
gttaggcctattttgatcacttttaataagtaa

SEQ ID NO: 918477 - DNA, 33 bp, Homo sapien
tctcagaatcacacaagaggttcaaaacttgag

SEQ ID NO: 918478 - DNA, 33 bp, Homo sapien
tctcagaatcacacaataggttcaaaacttgag

SEQ ID NO: 918479 - DNA, 33 bp, Homo sapien
gtgagttgatacccaactgaagagaagaaagga

SEQ ID NO: 918480 - DNA, 33 bp, Homo sapien
gtgagttgatacccaattgaagagaagaaagga

SEQ ID NO: 918481 - DNA, 33 bp, Homo sapien
attttacgctatgatacagtatcgtcatctctg

SEQ ID NO: 918482 - DNA, 33 bp, Homo sapien
attttacgctatgatagagtatcgtcatctctg

SEQ ID NO: 918483 - DNA, 33 bp, Homo sapien
agagaccaacgtggggaataataattaagagta

SEQ ID NO: 918484 - DNA, 33 bp, Homo sapien
agagaccaacgtgggggataataattaagagta

SEQ ID NO: 918485 - DNA, 33 bp, Homo sapien
tctagcagcaatcttacgaaagcattatttaaa

SEQ ID NO: 918486 - DNA, 33 bp, Homo sapien
tctagcagcaatcttatgaaagcattatttaaa

SEQ ID NO: 918487 - DNA, 33 bp, Homo sapien
taatgcatcacaaaataacctgaaagtgacact

SEQ ID NO: 918488 - DNA, 33 bp, Homo sapien
taatgcatcacaaaatgacctgaaagtgacact

SEQ ID NO: 918489 - DNA, 33 bp, Homo sapien
atgaaattagataaaaattatagtgtcattccc

SEQ ID NO: 918490 - DNA, 33 bp, Homo sapien
atgaaattagataaaagttatagtgtcattccc

SEQ ID NO: 918491 - DNA, 33 bp, Homo sapien
ctttttctgtaaaaaccgagtagcaaatatttt

SEQ ID NO: 918492 - DNA, 33 bp, Homo sapien
ctttttctgtaaaaactgagtagcaaatatttt

SEQ ID NO: 918493 - DNA, 33 bp, Homo sapien
ccaaataccttactcacgcttgactatttctct

SEQ ID NO: 918494 - DNA, 33 bp, Homo sapien
ccaaataccttactcatgcttgactatttctct

SEQ ID NO: 918495 - DNA, 33 bp, Homo sapien
taggtttgtaaatgcagcctgaaactctcctcc

SEQ ID NO: 918496 - DNA, 33 bp, Homo sapien
taggtttgtaaatgcatcctgaaactctcctcc

SEQ ID NO: 918497 - DNA, 33 bp, Homo sapien
tctgcaatgttcaaagcaaaagaattgtagatg

SEQ ID NO: 918498 - DNA, 33 bp, Homo sapien
tctgcaatgttcaaagtaaaagaattgtagatg

SEQ ID NO: 918499 - DNA, 33 bp, Homo sapien
gtaagacacctagaaacgaaatcaacttcccta

SEQ ID NO: 918500 - DNA, 33 bp, Homo sapien
gtaagacacctagaaatgaaatcaacttcccta

SEQ ID NO: 918501 - DNA, 33 bp, Homo sapien
agcaattgctattgatcagaaaaacagtgacct

SEQ ID NO: 918502 - DNA, 33 bp, Homo sapien
agcaattgctattgatgagaaaaacagtgacct

SEQ ID NO: 918503 - DNA, 33 bp, Homo sapien
gtgacatacagcgatccataatgttaacagtgt

SEQ ID NO: 918504 - DNA, 33 bp, Homo sapien
gtgacatacagcgatctataatgttaacagtgt

SEQ ID NO: 918505 - DNA, 33 bp, Homo sapien
atgtcactacatcatcgcattaatccctcaagt

SEQ ID NO: 918506 - DNA, 33 bp, Homo sapien
atgtcactacatcatctcattaatccctcaagt

SEQ ID NO: 918507 - DNA, 33 bp, Homo sapien
tccctctagattgcagactctcaaagagcagaa

SEQ ID NO: 918508 - DNA, 33 bp, Homo sapien
tccctctagattgcagtctctcaaagagcagaa

SEQ ID NO: 918509 - DNA, 33 bp, Homo sapien
cataggtgcctaacaaatgctgagctgattgtg

SEQ ID NO: 918510 - DNA, 33 bp, Homo sapien
cataggtgcctaacaagtgctgagctgattgtg

SEQ ID NO: 918511 - DNA, 33 bp, Homo sapien
catgagtaaggtacaactgctgaatgaaatcct

SEQ ID NO: 918512 - DNA, 33 bp, Homo sapien
catgagtaaggtacaattgctgaatgaaatcct

SEQ ID NO: 918513 - DNA, 33 bp, Homo sapien
taaatagaatttcccacagaaagcaaagtcctg

SEQ ID NO: 918514 - DNA, 33 bp, Homo sapien
taaatagaatttcccagagaaagcaaagtcctg

SEQ ID NO: 918515 - DNA, 33 bp, Homo sapien
gattaataagtagctgcagaagataaactagtc

SEQ ID NO: 918516 - DNA, 33 bp, Homo sapien
gattaataagtagctgtagaagataaactagtc

SEQ ID NO: 918517 - DNA, 33 bp, Homo sapien
atatatatgcagacacacctcatcttaatgcat

SEQ ID NO: 918518 - DNA, 33 bp, Homo sapien
atatatatgcagacacgcctcatcttaatgcat

SEQ ID NO: 918519 - DNA, 33 bp, Homo sapien
gaaaacagaagctagaaattataaagtttagtg

SEQ ID NO: 918520 - DNA, 33 bp, Homo sapien
gaaaacagaagctagagattataaagtttagtg

SEQ ID NO: 918521 - DNA, 33 bp, Homo sapien
agctttgagctttgtagcttgctagtgttcagt

SEQ ID NO: 918522 - DNA, 33 bp, Homo sapien
agctttgagctttgtatcttgctagtgttcagt

SEQ ID NO: 918523 - DNA, 33 bp, Homo sapien
tttgcaatagctacaacggttataaaatactta

SEQ ID NO: 918524 - DNA, 33 bp, Homo sapien
tttgcaatagctacaatggttataaaatactta

SEQ ID NO: 918525 - DNA, 33 bp, Homo sapien
agaaaagaccgtatgacgatacagtggggaggc

SEQ ID NO: 918526 - DNA, 33 bp, Homo sapien
agaaaagaccgtatgatgatacagtggggaggc

SEQ ID NO: 918527 - DNA, 33 bp, Homo sapien
tgtattaaagcttagaactgagagaaatggaat

SEQ ID NO: 918528 - DNA, 33 bp, Homo sapien
tgtattaaagcttagatctgagagaaatggaat

SEQ ID NO: 918529 - DNA, 33 bp, Homo sapien
cagaaaaacagtctgcccaagttcttcctgcaa

SEQ ID NO: 918530 - DNA, 33 bp, Homo sapien
cagaaaaacagtctgctcaagttcttcctgcaa

SEQ ID NO: 918531 - DNA, 33 bp, Homo sapien
catgttgactgtattgaacactagagtcaaaat

SEQ ID NO: 918532 - DNA, 33 bp, Homo sapien
catgttgactgtattggacactagagtcaaaat

SEQ ID NO: 918533 - DNA, 33 bp, Homo sapien
ttgtgctttcgatgtacctaattcaagcgtagt

SEQ ID NO: 918534 - DNA, 33 bp, Homo sapien
ttgtgctttcgatgtatctaattcaagcgtagt

SEQ ID NO: 918535 - DNA, 33 bp, Homo sapien
aagtacccagctacagaacatgggaactggctt

SEQ ID NO: 918536 - DNA, 33 bp, Homo sapien
aagtacccagctacaggacatgggaactggctt

SEQ ID NO: 918537 - DNA, 33 bp, Homo sapien
aatgtagaagcgtcaactcttcgtagtgtttac

SEQ ID NO: 918538 - DNA, 33 bp, Homo sapien
aatgtagaagcgtcaattcttcgtagtgtttac

SEQ ID NO: 918539 - DNA, 33 bp, Homo sapien
ctgagagtgaggaaaaagttaagttgtaaagag

SEQ ID NO: 918540 - DNA, 33 bp, Homo sapien
ctgagagtgaggaaaacgttaagttgtaaagag

SEQ ID NO: 918541 - DNA, 33 bp, Homo sapien
cctagaaaaagtcttacgtactatctgaaagct

SEQ ID NO: 918542 - DNA, 33 bp, Homo sapien
cctagaaaaagtcttatgtactatctgaaagct

SEQ ID NO: 918543 - DNA, 33 bp, Homo sapien
ttcatgaataggcaacacaatctctatttatca

SEQ ID NO: 918544 - DNA, 33 bp, Homo sapien
ttcatgaataggcaacccaatctctatttatca

SEQ ID NO: 918545 - DNA, 33 bp, Homo sapien
tccttctgagtcaacacggttaagaagcaaata

SEQ ID NO: 918546 - DNA, 33 bp, Homo sapien
tccttctgagtcaacatggttaagaagcaaata

SEQ ID NO: 918547 - DNA, 33 bp, Homo sapien
cttttaacttcatttcaaaggatgggtagcagt

SEQ ID NO: 918548 - DNA, 33 bp, Homo sapien
cttttaacttcatttcgaaggatgggtagcagt

SEQ ID NO: 918549 - DNA, 33 bp, Homo sapien
gactccatgcaaaaaccagttgtccaccggaga

SEQ ID NO: 918550 - DNA, 33 bp, Homo sapien
gactccatgcaaaaacgagttgtccaccggaga

SEQ ID NO: 918551 - DNA, 33 bp, Homo sapien
atcatttatgttttacaccaagaatcactgtgt

SEQ ID NO: 918552 - DNA, 33 bp, Homo sapien
atcatttatgttttacgccaagaatcactgtgt

SEQ ID NO: 918553 - DNA, 33 bp, Homo sapien
tctatgtatgtttccaaagaaagaaaggacaga

SEQ ID NO: 918554 - DNA, 33 bp, Homo sapien
tctatgtatgtttccagagaaagaaaggacaga

SEQ ID NO: 918555 - DNA, 33 bp, Homo sapien
cacactaaatctccatcaccacatgtgcataca

SEQ ID NO: 918556 - DNA, 33 bp, Homo sapien
cacactaaatctccattaccacatgtgcataca

SEQ ID NO: 918557 - DNA, 33 bp, Homo sapien
atcaaggaatctgaacacttgagaaatgccata

SEQ ID NO: 918558 - DNA, 33 bp, Homo sapien
atcaaggaatctgaacgcttgagaaatgccata

SEQ ID NO: 918559 - DNA, 33 bp, Homo sapien
tatgcacccatttacacctttcattcacttaca

SEQ ID NO: 918560 - DNA, 33 bp, Homo sapien
tatgcacccatttacatctttcattcacttaca

SEQ ID NO: 918561 - DNA, 33 bp, Homo sapien
aaatacaaagtatttacggtggttgataagaat

SEQ ID NO: 918562 - DNA, 33 bp, Homo sapien
aaatacaaagtatttatggtggttgataagaat

SEQ ID NO: 918563 - DNA, 33 bp, Homo sapien
gagacatcataaccgccgaattcctttattcat

SEQ ID NO: 918564 - DNA, 33 bp, Homo sapien
gagacatcataaccgctgaattcctttattcat

SEQ ID NO: 918565 - DNA, 33 bp, Homo sapien; identical to SEQ ID NO: 918563

SEQ ID NO: 918566 - DNA, 33 bp, Homo sapien; identical to SEQ ID NO: 918564

SEQ ID NO: 918567 - DNA, 33 bp, Homo sapien
gatcttcaaagtagccactcccatcacaggccc

SEQ ID NO: 918568 - DNA, 33 bp, Homo sapien
gatcttcaaagtagcccctcccatcacaggccc

SEQ ID NO: 918569 - DNA, 33 bp, Homo sapien
ctgctgcttagtgctcaccatatacttgtcctt

SEQ ID NO: 918570 - DNA, 33 bp, Homo sapien
ctgctgcttagtgctcgccatatacttgtcctt

SEQ ID NO: 918571 - DNA, 33 bp, Homo sapien
agggatgggatgagtcacttccttcacagggag

SEQ ID NO: 918572 - DNA, 33 bp, Homo sapien
agggatgggatgagtcgcttccttcacagggag

SEQ ID NO: 918573 - DNA, 33 bp, Homo sapien
tgccatcaacattaccagacttaaaattatatt

SEQ ID NO: 918574 - DNA, 33 bp, Homo sapien
tgccatcaacattacccgacttaaaattatatt

SEQ ID NO: 918575 - DNA, 33 bp, Homo sapien; identical to SEQ ID NO: 918573

SEQ ID NO: 918576 - DNA, 33 bp, Homo sapien; identical to SEQ ID NO: 918574

SEQ ID NO: 918577 - DNA, 33 bp, Homo sapien
cttctgaaacttacacaatgggtatttgagatc

SEQ ID NO: 918578 - DNA, 33 bp, Homo sapien
cttctgaaacttacactatgggtatttgagatc

SEQ ID NO: 918579 - DNA, 33 bp, Homo sapien; identical to SEQ ID NO: 918577

SEQ ID NO: 918580 - DNA, 33 bp, Homo sapien; identical to SEQ ID NO: 918578

SEQ ID NO: 918581 - DNA, 33 bp, Homo sapien
ttgcctaagctttctacacttaactagttttct

SEQ ID NO: 918582 - DNA, 33 bp, Homo sapien
ttgcctaagctttctatacttaactagttttct

SEQ ID NO: 918583 - DNA, 33 bp, Homo sapien; identical to SEQ ID NO: 918581

SEQ ID NO: 918584 - DNA, 33 bp, Homo sapien; identical to SEQ ID NO: 918582

SEQ ID NO: 918585 - DNA, 33 bp, Homo sapien
ttcagcaaataatacaaaaattgggattcattc

SEQ ID NO: 918586 - DNA, 33 bp, Homo sapien
ttcagcaaataatacagaaattgggattcattc

SEQ ID NO: 918587 - DNA, 33 bp, Homo sapien
ttatgggcttgaaaaaactgacattcttctcta

SEQ ID NO: 918588 - DNA, 33 bp, Homo sapien
ttatgggcttgaaaaagctgacattcttctcta

SEQ ID NO: 918589 - DNA, 33 bp, Homo sapien; identical to SEQ ID NO: 918587

SEQ ID NO: 918590 - DNA, 33 bp, Homo sapien; identical to SEQ ID NO: 918588

SEQ ID NO: 918591 - DNA, 33 bp, Homo sapien
tcatctccacctgaataactgaatcagaaaaga

SEQ ID NO: 918592 - DNA, 33 bp, Homo sapien
tcatctccacctgaatcactgaatcagaaaaga

SEQ ID NO: 918593 - DNA, 33 bp, Homo sapien
ggaaacggatctaaccaatggatcatttagtaa

SEQ ID NO: 918594 - DNA, 33 bp, Homo sapien
ggaaacggatctaaccgatggatcatttagtaa

SEQ ID NO: 918595 - DNA, 33 bp, Homo sapien
gcaaagctcctttatgaagtcatgtgggggcca

SEQ ID NO: 918596 - DNA, 33 bp, Homo sapien
gcaaagctcctttatgcagtcatgtgggggcca

SEQ ID NO: 918597 - DNA, 33 bp, Homo sapien
tggccctaggccagaacgctctaaatttcaagt

SEQ ID NO: 918598 - DNA, 33 bp, Homo sapien
tggccctaggccagaatgctctaaatttcaagt

SEQ ID NO: 918599 - DNA, 33 bp, Homo sapien
attctcttcccttatcaagaggccaatctttaa

SEQ ID NO: 918600 - DNA, 33 bp, Homo sapien
attctcttcccttatcgagaggccaatctttaa

SEQ ID NO: 918601 - DNA, 33 bp, Homo sapien
acttaggcaatgatccaagagtctccaccagga

SEQ ID NO: 918602 - DNA, 33 bp, Homo sapien
acttaggcaatgatccgagagtctccaccagga

SEQ ID NO: 918603 - DNA, 33 bp, Homo sapien; identical to SEQ ID NO: 918601

SEQ ID NO: 918604 - DNA, 33 bp, Homo sapien; identical to SEQ ID NO: 918602

SEQ ID NO: 918605 - DNA, 33 bp, Homo sapien
tactttatctcttgtaagctaattgctcattct

SEQ ID NO: 918606 - DNA, 33 bp, Homo sapien
tactttatctcttgtaggctaattgctcattct

SEQ ID NO: 918607 - DNA, 33 bp, Homo sapien
ttggtaacttacctgacaggaattggttcagag

SEQ ID NO: 918608 - DNA, 33 bp, Homo sapien
ttggtaacttacctgataggaattggttcagag

SEQ ID NO: 918609 - DNA, 33 bp, Homo sapien
cttaagtccttgctgaacctcacttttgacata

SEQ ID NO: 918610 - DNA, 33 bp, Homo sapien
cttaagtccttgctgaccctcacttttgacata

SEQ ID NO: 918611 - DNA, 33 bp, Homo sapien; identical to SEQ ID NO: 918609

SEQ ID NO: 918612 - DNA, 33 bp, Homo sapien; identical to SEQ ID NO: 918610

SEQ ID NO: 918613 - DNA, 33 bp, Homo sapien
acctttgaatataggacgctgaataatatgcat

SEQ ID NO: 918614 - DNA, 33 bp, Homo sapien
acctttgaatataggatgctgaataatatgcat

SEQ ID NO: 918615 - DNA, 33 bp, Homo sapien; identical to SEQ ID NO: 918613

SEQ ID NO: 918616 - DNA, 33 bp, Homo sapien; identical to SEQ ID NO: 918614

SEQ ID NO: 918617 - DNA, 33 bp, Homo sapien
gctttcctgtcctgcaacactagtgccttgctg

SEQ ID NO: 918618 - DNA, 33 bp, Homo sapien
gctttcctgtcctgcatcactagtgccttgctg

SEQ ID NO: 918619 - DNA, 33 bp, Homo sapien; identical to SEQ ID NO: 918617

SEQ ID NO: 918620 - DNA, 33 bp, Homo sapien; identical to SEQ ID NO: 918618

SEQ ID NO: 918621 - DNA, 33 bp, Homo sapien
cttatcaactttattacggcaccaagtatagga

SEQ ID NO: 918622 - DNA, 33 bp, Homo sapien
cttatcaactttattatggcaccaagtatagga

SEQ ID NO: 918623 - DNA, 33 bp, Homo sapien
aagagtgcttactttgaagaatagtctgttata

SEQ ID NO: 918624 - DNA, 33 bp, Homo sapien
aagagtgcttactttgcagaatagtctgttata

SEQ ID NO: 918625 - DNA, 33 bp, Homo sapien; identical to SEQ ID NO: 918623

SEQ ID NO: 918626 - DNA, 33 bp, Homo sapien; identical to SEQ ID NO: 918624

SEQ ID NO: 918627 - DNA, 33 bp, Homo sapien
ccatttattaactgcaagacctttgaaaaataa

SEQ ID NO: 918628 - DNA, 33 bp, Homo sapien
ccatttattaactgcatgacctttgaaaaataa

SEQ ID NO: 918629 - DNA, 33 bp, Homo sapien
gtgtgtaatttgatagaaatattttggagatta

SEQ ID NO: 918630 - DNA, 33 bp, Homo sapien
gtgtgtaatttgatagcaatattttggagatta

SEQ ID NO: 918631 - DNA, 33 bp, Homo sapien; identical to SEQ ID NO: 918629

SEQ ID NO: 918632 - DNA, 33 bp, Homo sapien; identical to SEQ ID NO: 918630

SEQ ID NO: 918633 - DNA, 33 bp, Homo sapien
tgatgagtacaaaaacagaatgacagacaaggt

SEQ ID NO: 918634 - DNA, 33 bp, Homo sapien
tgatgagtacaaaaacggaatgacagacaaggt

SEQ ID NO: 918635 - DNA, 33 bp, Homo sapien
ttcatatattctgatcccaagaaatttctttca

SEQ ID NO: 918636 - DNA, 33 bp, Homo sapien
ttcatatattctgatctcaagaaatttctttca

SEQ ID NO: 918637 - DNA, 33 bp, Homo sapien
gtgcaagagtggagtcaacgagaacagcaggaa

SEQ ID NO: 918638 - DNA, 33 bp, Homo sapien
gtgcaagagtggagtcgacgagaacagcaggaa

SEQ ID NO: 918639 - DNA, 33 bp, Homo sapien
gtaaggggagaatgaaaagtagatgaaaactca

SEQ ID NO: 918640 - DNA, 33 bp, Homo sapien
gtaaggggagaatgaacagtagatgaaaactca

SEQ ID NO: 918641 - DNA, 33 bp, Homo sapien
ggaaagtatcatataaattagtgtgttagatat

SEQ ID NO: 918642 - DNA, 33 bp, Homo sapien
ggaaagtatcatataagttagtgtgttagatat

SEQ ID NO: 918643 - DNA, 33 bp, Homo sapien; identical to SEQ ID NO: 918641

SEQ ID NO: 918644 - DNA, 33 bp, Homo sapien; identical to SEQ ID NO: 918642

SEQ ID NO: 918645 - DNA, 33 bp, Homo sapien
acttattgatatagaacatgatctagaatagta

SEQ ID NO: 918646 - DNA, 33 bp, Homo sapien
acttattgatatagaagatgatctagaatagta

SEQ ID NO: 918647 - DNA, 33 bp, Homo sapien; identical to SEQ ID NO: 918645

SEQ ID NO: 918648 - DNA, 33 bp, Homo sapien; identical to SEQ ID NO: 918646

SEQ ID NO: 918649 - DNA, 33 bp, Homo sapien
atttcccataagcctgaatatttggatagtctt

SEQ ID NO: 918650 - DNA, 33 bp, Homo sapien
atttcccataagcctgcatatttggatagtctt

SEQ ID NO: 918651 - DNA, 33 bp, Homo sapien; identical to SEQ ID NO: 918649

SEQ ID NO: 918652 - DNA, 33 bp, Homo sapien; identical to SEQ ID NO: 918650

SEQ ID NO: 918653 - DNA, 33 bp, Homo sapien
aatttggtagaccacactggagtcattacttct

SEQ ID NO: 918654 - DNA, 33 bp, Homo sapien
aatttggtagaccacattggagtcattacttct

SEQ ID NO: 918655 - DNA, 33 bp, Homo sapien; identical to SEQ ID NO: 918653

SEQ ID NO: 918656 - DNA, 33 bp, Homo sapien; identical to SEQ ID NO: 918654

SEQ ID NO: 918657 - DNA, 33 bp, Homo sapien
cgtgcacgaccatgcccagcctagaaaaactat

SEQ ID NO: 918658 - DNA, 33 bp, Homo sapien
cgtgcacgaccatgcctagcctagaaaaactat

SEQ ID NO: 918659 - DNA, 33 bp, Homo sapien
acagcaatgtcgacaaagcctgtaaatatttta

SEQ ID NO: 918660 - DNA, 33 bp, Homo sapien
acagcaatgtcgacaaggcctgtaaatatttta

SEQ ID NO: 918661 - DNA, 33 bp, Homo sapien
ttgctacactaaacaaatgaaatgtgaagtaat

SEQ ID NO: 918662 - DNA, 33 bp, Homo sapien
ttgctacactaaacaagtgaaatgtgaagtaat

SEQ ID NO: 918663 - DNA, 33 bp, Homo sapien
tgagaagccgccaatcaaaggtgaactggcaac

SEQ ID NO: 918664 - DNA, 33 bp, Homo sapien
tgagaagccgccaatctaaggtgaactggcaac

SEQ ID NO: 918665 - DNA, 33 bp, Homo sapien
aatttctgatgtctgtgaacctttcttcttcca

SEQ ID NO: 918666 - DNA, 33 bp, Homo sapien
aatttctgatgtctgttaacctttcttcttcca

SEQ ID NO: 918667 - DNA, 33 bp, Homo sapien
ggatcccacgttacaccgagttgtcatgtcttc

SEQ ID NO: 918668 - DNA, 33 bp, Homo sapien
ggatcccacgttacactgagttgtcatgtcttc

SEQ ID NO: 918669 - DNA, 33 bp, Homo sapien
tacatgaaaatggaaacagcagtaactttgaga

SEQ ID NO: 918670 - DNA, 33 bp, Homo sapien
tacatgaaaatggaaatagcagtaactttgaga

SEQ ID NO: 918671 - DNA, 33 bp, Homo sapien
caagtgcagtgctttaacttgatcctaggactt

SEQ ID NO: 918672 - DNA, 33 bp, Homo sapien
caagtgcagtgctttaccttgatcctaggactt

SEQ ID NO: 918673 - DNA, 33 bp, Homo sapien
ttattacagtattccacgatgtactacagttaa

SEQ ID NO: 918674 - DNA, 33 bp, Homo sapien
ttattacagtattccaggatgtactacagttaa

SEQ ID NO: 918675 - DNA, 33 bp, Homo sapien
tctgtattctttttgcacttcccctgtagaaac

SEQ ID NO: 918676 - DNA, 33 bp, Homo sapien
tctgtattctttttgcgcttcccctgtagaaac

SEQ ID NO: 918677 - DNA, 33 bp, Homo sapien
gtaaagttgtctcttcagaacttgaaacacatg

SEQ ID NO: 918678 - DNA, 33 bp, Homo sapien
gtaaagttgtctcttcggaacttgaaacacatg

SEQ ID NO: 918679 - DNA, 33 bp, Homo sapien; identical to SEQ ID NO: 918677

SEQ ID NO: 918680 - DNA, 33 bp, Homo sapien; identical to SEQ ID NO: 918678

SEQ ID NO: 918681 - DNA, 33 bp, Homo sapien
tcctaaatacagcacactcttgggtcttgactc

SEQ ID NO: 918682 - DNA, 33 bp, Homo sapien
tcctaaatacagcacattcttgggtcttgactc

SEQ ID NO: 918683 - DNA, 33 bp, Homo sapien; identical to SEQ ID NO: 918681

SEQ ID NO: 918684 - DNA, 33 bp, Homo sapien; identical to SEQ ID NO: 918682

SEQ ID NO: 918685 - DNA, 33 bp, Homo sapien
tagatttgagacacaccgggtatttgtaacgta

SEQ ID NO: 918686 - DNA, 33 bp, Homo sapien
tagatttgagacacactgggtatttgtaacgta

SEQ ID NO: 918687 - DNA, 33 bp, Homo sapien
tagtatgtacacaaagccttagtggtggcaggg

SEQ ID NO: 918688 - DNA, 33 bp, Homo sapien
tagtatgtacacaaaggcttagtggtggcaggg

SEQ ID NO: 918689 - DNA, 33 bp, Homo sapien; identical to SEQ ID NO: 918687

SEQ ID NO: 918690 - DNA, 33 bp, Homo sapien; identical to SEQ ID NO: 918688

SEQ ID NO: 918691 - DNA, 33 bp, Homo sapien
cttaagagaaatgcaaataagaactataacaaa

SEQ ID NO: 918692 - DNA, 33 bp, Homo sapien
cttaagagaaatgcaattaagaactataacaaa

SEQ ID NO: 918693 - DNA, 33 bp, Homo sapien; identical to SEQ ID NO: 918691

SEQ ID NO: 918694 - DNA, 33 bp, Homo sapien; identical to SEQ ID NO: 918692

SEQ ID NO: 918695 - DNA, 33 bp, Homo sapien
ccagttagtgtatttcaaatgtgcaatactttt

SEQ ID NO: 918696 - DNA, 33 bp, Homo sapien
ccagttagtgtatttccaatgtgcaatactttt

SEQ ID NO: 918697 - DNA, 33 bp, Homo sapien; identical to SEQ ID NO: 918695

SEQ ID NO: 918698 - DNA, 33 bp, Homo sapien; identical to SEQ ID NO: 918696

SEQ ID NO: 918699 - DNA, 33 bp, Homo sapien
ctattcacaatggtcaaaatatgaaatcaacct

SEQ ID NO: 918700 - DNA, 33 bp, Homo sapien
ctattcacaatggtcagaatatgaaatcaacct

SEQ ID NO: 918701 - DNA, 33 bp, Homo sapien; identical to SEQ ID NO: 918699

SEQ ID NO: 918702 - DNA, 33 bp, Homo sapien; identical to SEQ ID NO: 918700

SEQ ID NO: 918703 - DNA, 33 bp, Homo sapien
aaatttatatgtcctagtagaatgaagtgctgc

SEQ ID NO: 918704 - DNA, 33 bp, Homo sapien
aaatttatatgtcctattagaatgaagtgctgc

SEQ ID NO: 918705 - DNA, 33 bp, Homo sapien
attttaatagtagtcaataatctagcttaaggc

SEQ ID NO: 918706 - DNA, 33 bp, Homo sapien
attttaatagtagtcagtaatctagcttaaggc

SEQ ID NO: 918707 - DNA, 33 bp, Homo sapien
agtgatcaagtttgtcaccaataataagaaaaa

SEQ ID NO: 918708 - DNA, 33 bp, Homo sapien
agtgatcaagtttgtcgccaataataagaaaaa

SEQ ID NO: 918709 - DNA, 33 bp, Homo sapien
cattgtggggaggttaaagtttccaatctttag

SEQ ID NO: 918710 - DNA, 33 bp, Homo sapien
cattgtggggaggttagagtttccaatctttag

SEQ ID NO: 918711 - DNA, 33 bp, Homo sapien; identical to SEQ ID NO: 918709

SEQ ID NO: 918712 - DNA, 33 bp, Homo sapien; identical to SEQ ID NO: 918710

SEQ ID NO: 918713 - DNA, 33 bp, Homo sapien
ctaactgcctggatataaattcagtgctgttgg

SEQ ID NO: 918714 - DNA, 33 bp, Homo sapien
ctaactgcctggatatgaattcagtgctgttgg

SEQ ID NO: 918715 - DNA, 33 bp, Homo sapien; identical to SEQ ID NO: 918713

SEQ ID NO: 918716 - DNA, 33 bp, Homo sapien; identical to SEQ ID NO: 918714

SEQ ID NO: 918717 - DNA, 33 bp, Homo sapien
gtactatcagtcttgaaatcctaaagcagatag

SEQ ID NO: 918718 - DNA, 33 bp, Homo sapien
gtactatcagtcttgatatcctaaagcagatag

SEQ ID NO: 918719 - DNA, 33 bp, Homo sapien; identical to SEQ ID NO: 918717

SEQ ID NO: 918720 - DNA, 33 bp, Homo sapien; identical to SEQ ID NO: 918718

SEQ ID NO: 918721 - DNA, 33 bp, Homo sapien
aattcaatgaagggaccaaatacagaggtgtgt

SEQ ID NO: 918722 - DNA, 33 bp, Homo sapien
aattcaatgaagggactaaatacagaggtgtgt

SEQ ID NO: 918723 - DNA, 33 bp, Homo sapien
ctttatagtggtgtgacaatggacgaatacagt

SEQ ID NO: 918724 - DNA, 33 bp, Homo sapien
ctttatagtggtgtgagaatggacgaatacagt

SEQ ID NO: 918725 - DNA, 33 bp, Homo sapien; identical to SEQ ID NO: 918723

SEQ ID NO: 918726 - DNA, 33 bp, Homo sapien; identical to SEQ ID NO: 918724

SEQ ID NO: 918727 - DNA, 33 bp, Homo sapien
tcgctattactttggaagccccagtattcccat

SEQ ID NO: 918728 - DNA, 33 bp, Homo sapien
tcgctattactttggaggccccagtattcccat

SEQ ID NO: 918729 - DNA, 33 bp, Homo sapien
ggtattaggaggattacagcattgacactaagg

SEQ ID NO: 918730 - DNA, 33 bp, Homo sapien
ggtattaggaggattagagcattgacactaagg

SEQ ID NO: 918731 - DNA, 33 bp, Homo sapien
tattatgacagtgctgcaaaacaacatgagagc

SEQ ID NO: 918732 - DNA, 33 bp, Homo sapien
tattatgacagtgctggaaaacaacatgagagc

SEQ ID NO: 918733 - DNA, 33 bp, Homo sapien; identical to SEQ ID NO: 918731

SEQ ID NO: 918734 - DNA, 33 bp, Homo sapien; identical to SEQ ID NO: 918732

SEQ ID NO: 918735 - DNA, 33 bp, Homo sapien
ggtcagaggataattacgccaagaagtttggca

SEQ ID NO: 918736 - DNA, 33 bp, Homo sapien
ggtcagaggataattaggccaagaagtttggca

SEQ ID NO: 918737 - DNA, 33 bp, Homo sapien
gaaatgctataagttacgagggaaatggccact

SEQ ID NO: 918738 - DNA, 33 bp, Homo sapien
gaaatgctataagttatgagggaaatggccact

SEQ ID NO: 918739 - DNA, 33 bp, Homo sapien
gggagtccttcagctgaaataaatatatggaca

SEQ ID NO: 918740 - DNA, 33 bp, Homo sapien
gggagtccttcagctggaataaatatatggaca

SEQ ID NO: 918741 - DNA, 33 bp, Homo sapien
cctgaaaggaggatcacgccaacagtggtaaag

SEQ ID NO: 918742 - DNA, 33 bp, Homo sapien
cctgaaaggaggatcatgccaacagtggtaaag

SEQ ID NO: 918743 - DNA, 33 bp, Homo sapien
ggtaagtattgtataacgtaccaaaagtccaac

SEQ ID NO: 918744 - DNA, 33 bp, Homo sapien
ggtaagtattgtataatgtaccaaaagtccaac

SEQ ID NO: 918745 - DNA, 33 bp, Homo sapien; identical to SEQ ID NO: 918743

SEQ ID NO: 918746 - DNA, 33 bp, Homo sapien; identical to SEQ ID NO: 918744

SEQ ID NO: 918747 - DNA, 33 bp, Homo sapien
agtaaatcaaatgttaactcctctagcaaccca

SEQ ID NO: 918748 - DNA, 33 bp, Homo sapien
agtaaatcaaatgttacctcctctagcaaccca

SEQ ID NO: 918749 - DNA, 33 bp, Homo sapien; identical to SEQ ID NO: 918747

SEQ ID NO: 918750 - DNA, 33 bp, Homo sapien; identical to SEQ ID NO: 918748

SEQ ID NO: 918751 - DNA, 33 bp, Homo sapien
atttttttgcttgggaagattttggttctatta

SEQ ID NO: 918752 - DNA, 33 bp, Homo sapien
atttttttgcttgggacgattttggttctatta

SEQ ID NO: 918753 - DNA, 33 bp, Homo sapien; identical to SEQ ID NO: 918751

SEQ ID NO: 918754 - DNA, 33 bp, Homo sapien; identical to SEQ ID NO: 918752

SEQ ID NO: 918755 - DNA, 33 bp, Homo sapien
tggttttcagtgaaaaaaaagtgcaagtgaaaa

SEQ ID NO: 918756 - DNA, 33 bp, Homo sapien
tggttttcagtgaaaagaaagtgcaagtgaaaa

SEQ ID NO: 918757 - DNA, 33 bp, Homo sapien
tcacataaaggcaatacaaaggcttagtttcct

SEQ ID NO: 918758 - DNA, 33 bp, Homo sapien
tcacataaaggcaatataaaggcttagtttcct

SEQ ID NO: 918759 - DNA, 33 bp, Homo sapien; identical to SEQ ID NO: 918757

SEQ ID NO: 918760 - DNA, 33 bp, Homo sapien; identical to SEQ ID NO: 918758

SEQ ID NO: 918761 - DNA, 33 bp, Homo sapien
catattaggatttaaaatgaacagcatataaat

SEQ ID NO: 918762 - DNA, 33 bp, Homo sapien
catattaggatttaaagtgaacagcatataaat

SEQ ID NO: 918763 - DNA, 33 bp, Homo sapien
ccaagtatatcattcaatcacctgatgtaagac

SEQ ID NO: 918764 - DNA, 33 bp, Homo sapien
ccaagtatatcattcagtcacctgatgtaagac

SEQ ID NO: 918765 - DNA, 33 bp, Homo sapien
attgcaaatagttctaccgtttaagcaattcta

SEQ ID NO: 918766 - DNA, 33 bp, Homo sapien
attgcaaatagttctatcgtttaagcaattcta

SEQ ID NO: 918767 - DNA, 33 bp, Homo sapien; identical to SEQ ID NO: 918765

SEQ ID NO: 918768 - DNA, 33 bp, Homo sapien; identical to SEQ ID NO: 918766

SEQ ID NO: 918769 - DNA, 33 bp, Homo sapien
tagaactatatgcctacgtatgtgaaaattata

SEQ ID NO: 918770 - DNA, 33 bp, Homo sapien
tagaactatatgcctatgtatgtgaaaattata

SEQ ID NO: 918771 - DNA, 33 bp, Homo sapien; identical to SEQ ID NO: 918769

SEQ ID NO: 918772 - DNA, 33 bp, Homo sapien; identical to SEQ ID NO: 918770

SEQ ID NO: 918773 - DNA, 33 bp, Homo sapien
cattagtttgatcatccatgatttccttcaaca

SEQ ID NO: 918774 - DNA, 33 bp, Homo sapien
cattagtttgatcatctatgatttccttcaaca

SEQ ID NO: 918775 - DNA, 33 bp, Homo sapien; identical to SEQ ID NO: 918773

SEQ ID NO: 918776 - DNA, 33 bp, Homo sapien; identical to SEQ ID NO: 918774

SEQ ID NO: 918777 - DNA, 33 bp, Homo sapien
aaatttgcttgcttgaatagaccagataattaa

SEQ ID NO: 918778 - DNA, 33 bp, Homo sapien
aaatttgcttgcttgagtagaccagataattaa

SEQ ID NO: 918779 - DNA, 33 bp, Homo sapien; identical to SEQ ID NO: 918777

SEQ ID NO: 918780 - DNA, 33 bp, Homo sapien; identical to SEQ ID NO: 918778

SEQ ID NO: 918781 - DNA, 33 bp, Homo sapien
tatctagctcataataaacttgagaaaaattgc

SEQ ID NO: 918782 - DNA, 33 bp, Homo sapien
tatctagctcataatagacttgagaaaaattgc

SEQ ID NO: 918783 - DNA, 33 bp, Homo sapien
attgaaaaagactccaagatgattattgcactg

SEQ ID NO: 918784 - DNA, 33 bp, Homo sapien
attgaaaaagactccaggatgattattgcactg

SEQ ID NO: 918785 - DNA, 33 bp, Homo sapien
agatgagcatataatggaaagttggttactcat

SEQ ID NO: 918786 - DNA, 33 bp, Homo sapien
agatgagcatataatgtaaagttggttactcat

SEQ ID NO: 918787 - DNA, 33 bp, Homo sapien
ccctgcgagtccctaggaagctgcctagtcttt

SEQ ID NO: 918788 - DNA, 33 bp, Homo sapien
ccctgcgagtccctagtaagctgcctagtcttt

SEQ ID NO: 918789 - DNA, 33 bp, Homo sapien; identical to SEQ ID NO: 918787

SEQ ID NO: 918790 - DNA, 33 bp, Homo sapien; identical to SEQ ID NO: 918788

SEQ ID NO: 918791 - DNA, 33 bp, Homo sapien
atgactaccaggtaaaatcagtagctgccaact

SEQ ID NO: 918792 - DNA, 33 bp, Homo sapien
atgactaccaggtaaagtcagtagctgccaact

SEQ ID NO: 918793 - DNA, 33 bp, Homo sapien
cccagtttacaacacagatcaatgagtgtggct

SEQ ID NO: 918794 - DNA, 33 bp, Homo sapien
cccagtttacaacacatatcaatgagtgtggct

SEQ ID NO: 918795 - DNA, 33 bp, Homo sapien
ggctgaagttatggacaagatggggaagactta

SEQ ID NO: 918796 - DNA, 33 bp, Homo sapien
ggctgaagttatggacgagatggggaagactta

SEQ ID NO: 918797 - DNA, 33 bp, Homo sapien
tacatcaaccactcaaccagagcatgaaaactg

SEQ ID NO: 918798 - DNA, 33 bp, Homo sapien
tacatcaaccactcaatcagagcatgaaaactg

SEQ ID NO: 918799 - DNA, 33 bp, Homo sapien
catggtacctcaaccaatagttaaccttccata

SEQ ID NO: 918800 - DNA, 33 bp, Homo sapien
catggtacctcaaccagtagttaaccttccata

SEQ ID NO: 918801 - DNA, 33 bp, Homo sapien; identical to SEQ ID NO: 918799

SEQ ID NO: 918802 - DNA, 33 bp, Homo sapien; identical to SEQ ID NO: 918800

SEQ ID NO: 918803 - DNA, 33 bp, Homo sapien
caaattccactgacaacagccaataatttcctg

SEQ ID NO: 918804 - DNA, 33 bp, Homo sapien
caaattccactgacaatagccaataatttcctg

SEQ ID NO: 918805 - DNA, 33 bp, Homo sapien
atggaactgtcaaaaaatccttacaatagtggc

SEQ ID NO: 918806 - DNA, 33 bp, Homo sapien
atggaactgtcaaaaattccttacaatagtggc

SEQ ID NO: 918807 - DNA, 33 bp, Homo sapien; identical to SEQ ID NO: 918805

SEQ ID NO: 918808 - DNA, 33 bp, Homo sapien; identical to SEQ ID NO: 918806

SEQ ID NO: 918809 - DNA, 33 bp, Homo sapien
catttaagatgaagatcaaggaactagtgcatg

SEQ ID NO: 918810 - DNA, 33 bp, Homo sapien
catttaagatgaagatgaaggaactagtgcatg

SEQ ID NO: 918811 - DNA, 33 bp, Homo sapien
cggcactgagacctgaaggaagttacttaatga

SEQ ID NO: 918812 - DNA, 33 bp, Homo sapien
cggcactgagacctgagggaagttacttaatga

SEQ ID NO: 918813 - DNA, 33 bp, Homo sapien
tgcaaattagttgaaaagtagctataacttaag

SEQ ID NO: 918814 - DNA, 33 bp, Homo sapien
tgcaaattagttgaaacgtagctataacttaag

SEQ ID NO: 918815 - DNA, 33 bp, Homo sapien; identical to SEQ ID NO: 918813

SEQ ID NO: 918816 - DNA, 33 bp, Homo sapien; identical to SEQ ID NO: 918814

SEQ ID NO: 918817 - DNA, 33 bp, Homo sapien
tttctccatttacccagtgatgtaacatagttt

SEQ ID NO: 918818 - DNA, 33 bp, Homo sapien
tttctccatttacccattgatgtaacatagttt

SEQ ID NO: 918819 - DNA, 33 bp, Homo sapien
tcaatttgaaataaaactggttgagtacgttgc

SEQ ID NO: 918820 - DNA, 33 bp, Homo sapien
tcaatttgaaataaaagtggttgagtacgttgc

SEQ ID NO: 918821 - DNA, 33 bp, Homo sapien
cactggggaataaccacatgacgaatgtctgtt

SEQ ID NO: 918822 - DNA, 33 bp, Homo sapien
cactggggaataaccatatgacgaatgtctgtt

SEQ ID NO: 918823 - DNA, 33 bp, Homo sapien
tgttttaaagcatagccaagaaatcatgtcatt

SEQ ID NO: 918824 - DNA, 33 bp, Homo sapien
tgttttaaagcatagcgaagaaatcatgtcatt

SEQ ID NO: 918825 - DNA, 33 bp, Homo sapien
cagaggctgtaggaaggaggtatagcaggttat

SEQ ID NO: 918826 - DNA, 33 bp, Homo sapien
cagaggctgtaggaagtaggtatagcaggttat

SEQ ID NO: 918827 - DNA, 33 bp, Homo sapien
aatataggggatcttgcacgtgagaaggccaag

SEQ ID NO: 918828 - DNA, 33 bp, Homo sapien
aatataggggatcttgtacgtgagaaggccaag

SEQ ID NO: 918829 - DNA, 33 bp, Homo sapien
agtaattaattataggccattgcaggaaaacag

SEQ ID NO: 918830 - DNA, 33 bp, Homo sapien
agtaattaattataggtcattgcaggaaaacag

SEQ ID NO: 918831 - DNA, 33 bp, Homo sapien
tggtgctcaagaataaccagatatggctgaatg

SEQ ID NO: 918832 - DNA, 33 bp, Homo sapien
tggtgctcaagaataagcagatatggctgaatg

SEQ ID NO: 918833 - DNA, 33 bp, Homo sapien
catgtgtggtattacaaggaaaggcaaaaacaa

SEQ ID NO: 918834 - DNA, 33 bp, Homo sapien
catgtgtggtattacagggaaaggcaaaaacaa

SEQ ID NO: 918835 - DNA, 33 bp, Homo sapien
tgttcaggtaagtagaccgggagagcagaaatt

SEQ ID NO: 918836 - DNA, 33 bp, Homo sapien
tgttcaggtaagtagagcgggagagcagaaatt

SEQ ID NO: 918837 - DNA, 33 bp, Homo sapien
acgatgaatgaacaaaaaatataaatacacaga

SEQ ID NO: 918838 - DNA, 33 bp, Homo sapien
acgatgaatgaacaaagaatataaatacacaga

SEQ ID NO: 918839 - DNA, 33 bp, Homo sapien
tatctcctcacccaaaagacttaattccaacaa

SEQ ID NO: 918840 - DNA, 33 bp, Homo sapien
tatctcctcacccaaatgacttaattccaacaa

SEQ ID NO: 918841 - DNA, 33 bp, Homo sapien
gtaggaggaaaactacaggagtgtggtatttgg

SEQ ID NO: 918842 - DNA, 33 bp, Homo sapien
gtaggaggaaaactacgggagtgtggtatttgg

SEQ ID NO: 918843 - DNA, 33 bp, Homo sapien
acccacctgttgactcaagccattcacaccctc

SEQ ID NO: 918844 - DNA, 33 bp, Homo sapien
acccacctgttgactcgagccattcacaccctc

SEQ ID NO: 918845 - DNA, 33 bp, Homo sapien
aaaagagaatgaatcacaaaaatgaagcagaag

SEQ ID NO: 918846 - DNA, 33 bp, Homo sapien
aaaagagaatgaatcataaaaatgaagcagaag

SEQ ID NO: 918847 - DNA, 33 bp, Homo sapien
gaggggaaaagccaagcaagaatgtggcctcag

SEQ ID NO: 918848 - DNA, 33 bp, Homo sapien
gaggggaaaagccaaggaagaatgtggcctcag

SEQ ID NO: 918849 - DNA, 33 bp, Homo sapien
ttgtgaattgccttgacagcatatgcacggtta

SEQ ID NO: 918850 - DNA, 33 bp, Homo sapien
ttgtgaattgccttgatagcatatgcacggtta

SEQ ID NO: 918851 - DNA, 33 bp, Homo sapien
ctctgcagcagcattgaagccaaagtaaccgtg

SEQ ID NO: 918852 - DNA, 33 bp, Homo sapien
ctctgcagcagcattgcagccaaagtaaccgtg

SEQ ID NO: 918853 - DNA, 33 bp, Homo sapien
ttaattaggtcagtaaacaatgcttaaatagaa

SEQ ID NO: 918854 - DNA, 33 bp, Homo sapien
ttaattaggtcagtaatcaatgcttaaatagaa

SEQ ID NO: 918855 - DNA, 33 bp, Homo sapien
tgggaagcatgggaaaacaagggagccttatag

SEQ ID NO: 918856 - DNA, 33 bp, Homo sapien
tgggaagcatgggaaagcaagggagccttatag

SEQ ID NO: 918857 - DNA, 33 bp, Homo sapien
ttgttacatcctctaaccattgttaaaaataac

SEQ ID NO: 918858 - DNA, 33 bp, Homo sapien
ttgttacatcctctaagcattgttaaaaataac

SEQ ID NO: 918859 - DNA, 33 bp, Homo sapien
atcaagtaattatgtaccagaccttaagctaat

SEQ ID NO: 918860 - DNA, 33 bp, Homo sapien
atcaagtaattatgtatcagaccttaagctaat

SEQ ID NO: 918861 - DNA, 33 bp, Homo sapien
tgaacactacttttgaatatacacctgtatcac

SEQ ID NO: 918862 - DNA, 33 bp, Homo sapien
tgaacactacttttgagtatacacctgtatcac

SEQ ID NO: 918863 - DNA, 33 bp, Homo sapien
tcttagggcttagagacgtttagcatcttgcct

SEQ ID NO: 918864 - DNA, 33 bp, Homo sapien
tcttagggcttagagaggtttagcatcttgcct

SEQ ID NO: 918865 - DNA, 33 bp, Homo sapien
gtggagaaggcaacaacaggggtgatgcacctg

SEQ ID NO: 918866 - DNA, 33 bp, Homo sapien
gtggagaaggcaacaagaggggtgatgcacctg

SEQ ID NO: 918867 - DNA, 33 bp, Homo sapien
aatcaaatataactcacgtcctgacagaaaggg

SEQ ID NO: 918868 - DNA, 33 bp, Homo sapien
aatcaaatataactcatgtcctgacagaaaggg

SEQ ID NO: 918869 - DNA, 33 bp, Homo sapien
caaagatgtggcttctaaactcaatcagtggcc

SEQ ID NO: 918870 - DNA, 33 bp, Homo sapien
caaagatgtggcttctgaactcaatcagtggcc

SEQ ID NO: 918871 - DNA, 33 bp, Homo sapien
taatccagttaagtaacgtgatatttgatcttg

SEQ ID NO: 918872 - DNA, 33 bp, Homo sapien
taatccagttaagtaatgtgatatttgatcttg

SEQ ID NO: 918873 - DNA, 33 bp, Homo sapien
caagtcacttaagcgtcaaggggtctatcatga

SEQ ID NO: 918874 - DNA, 33 bp, Homo sapien
caagtcacttaagcgtgaaggggtctatcatga

SEQ ID NO: 918875 - DNA, 33 bp, Homo sapien
tattaaaatttcattaagtgaaaggctgtctta

SEQ ID NO: 918876 - DNA, 33 bp, Homo sapien
tattaaaatttcattatgtgaaaggctgtctta

SEQ ID NO: 918877 - DNA, 33 bp, Homo sapien
ggcaataacaaatagcaatgaggatatggagaa

SEQ ID NO: 918878 - DNA, 33 bp, Homo sapien
ggcaataacaaatagcgatgaggatatggagaa

SEQ ID NO: 918879 - DNA, 33 bp, Homo sapien
attgcatggttgaaacagtctcttctgtgacat

SEQ ID NO: 918880 - DNA, 33 bp, Homo sapien
attgcatggttgaaacggtctcttctgtgacat

SEQ ID NO: 918881 - DNA, 33 bp, Homo sapien
ccagtgtgacaagcagacccatcagtgggaggt

SEQ ID NO: 918882 - DNA, 33 bp, Homo sapien
ccagtgtgacaagcaggcccatcagtgggaggt

SEQ ID NO: 918883 - DNA, 33 bp, Homo sapien
tgacattaaatcaataaagaaatttggggtgag

SEQ ID NO: 918884 - DNA, 33 bp, Homo sapien
tgacattaaatcaatagagaaatttggggtgag

SEQ ID NO: 918885 - DNA, 33 bp, Homo sapien
ctttacttttccttaacacatatgattcatggt

SEQ ID NO: 918886 - DNA, 33 bp, Homo sapien
ctttacttttccttaatacatatgattcatggt

SEQ ID NO: 918887 - DNA, 33 bp, Homo sapien
aggtctctgctcaagaaattacctcctcaaaga

SEQ ID NO: 918888 - DNA, 33 bp, Homo sapien
aggtctctgctcaagagattacctcctcaaaga

SEQ ID NO: 918889 - DNA, 33 bp, Homo sapien
tcttaaaaatcttgccagcttcgaaagtagaag

SEQ ID NO: 918890 - DNA, 33 bp, Homo sapien
tcttaaaaatcttgccggcttcgaaagtagaag

SEQ ID NO: 918891 - DNA, 33 bp, Homo sapien
ctgtttcagtgtggtgaaatccacagcaagata

SEQ ID NO: 918892 - DNA, 33 bp, Homo sapien
ctgtttcagtgtggtggaatccacagcaagata

SEQ ID NO: 918893 - DNA, 33 bp, Homo sapien
ttttcacacttcttccaaatggtatcataggat

SEQ ID NO: 918894 - DNA, 33 bp, Homo sapien
ttttcacacttcttcccaatggtatcataggat

SEQ ID NO: 918895 - DNA, 33 bp, Homo sapien
tctaatatctgtatgaagttttctgaaaaaata

SEQ ID NO: 918896 - DNA, 33 bp, Homo sapien
tctaatatctgtatgaggttttctgaaaaaata

SEQ ID NO: 918897 - DNA, 33 bp, Homo sapien
tgtcacagaattttaaaaagaagcaaagaaata

SEQ ID NO: 918898 - DNA, 33 bp, Homo sapien
tgtcacagaattttaagaagaagcaaagaaata

SEQ ID NO: 918899 - DNA, 33 bp, Homo sapien
acaaatgcaggtactacataaatgctagacatg

SEQ ID NO: 918900 - DNA, 33 bp, Homo sapien
acaaatgcaggtactatataaatgctagacatg

SEQ ID NO: 918901 - DNA, 33 bp, Homo sapien
ttctcatcattttctaacattttgcttttttgc

SEQ ID NO: 918902 - DNA, 33 bp, Homo sapien
ttctcatcattttctatcattttgcttttttgc

SEQ ID NO: 918903 - DNA, 33 bp, Homo sapien
tgatttcaggaattcaactaaacatcttttact

SEQ ID NO: 918904 - DNA, 33 bp, Homo sapien
tgatttcaggaattcagctaaacatcttttact

SEQ ID NO: 918905 - DNA, 33 bp, Homo sapien
aatggttttattctaacactgtgaagaatgtca

SEQ ID NO: 918906 - DNA, 33 bp, Homo sapien
aatggttttattctaatactgtgaagaatgtca

SEQ ID NO: 918907 - DNA, 33 bp, Homo sapien; identical to SEQ ID NO: 918905

SEQ ID NO: 918908 - DNA, 33 bp, Homo sapien; identical to SEQ ID NO: 918906

SEQ ID NO: 918909 - DNA, 33 bp, Homo sapien
taacattgatgtttcaaaaatttctattttacc

SEQ ID NO: 918910 - DNA, 33 bp, Homo sapien
taacattgatgtttcacaaatttctattttacc

SEQ ID NO: 918911 - DNA, 33 bp, Homo sapien
gaggttaatatgaaaactgaactaggattgtct

SEQ ID NO: 918912 - DNA, 33 bp, Homo sapien
gaggttaatatgaaaattgaactaggattgtct

SEQ ID NO: 918913 - DNA, 33 bp, Homo sapien
gaatcagatatatcaaagtaaaatcacgtttaa

SEQ ID NO: 918914 - DNA, 33 bp, Homo sapien
gaatcagatatatcaatgtaaaatcacgtttaa

SEQ ID NO: 918915 - DNA, 33 bp, Homo sapien
tcttgatcaaggttgacgtttctgcattgccca

SEQ ID NO: 918916 - DNA, 33 bp, Homo sapien
tcttgatcaaggttgatgtttctgcattgccca

SEQ ID NO: 918917 - DNA, 33 bp, Homo sapien
gtagattcattccaaaagtattcaacagtctac

SEQ ID NO: 918918 - DNA, 33 bp, Homo sapien
gtagattcattccaaaggtattcaacagtctac

SEQ ID NO: 918919 - DNA, 33 bp, Homo sapien
gagggttctcccttcacgaatggatcaatccat

SEQ ID NO: 918920 - DNA, 33 bp, Homo sapien
gagggttctcccttcaggaatggatcaatccat

SEQ ID NO: 918921 - DNA, 33 bp, Homo sapien
ttttatagaggttcataacctagatgattgatt

SEQ ID NO: 918922 - DNA, 33 bp, Homo sapien
ttttatagaggttcattacctagatgattgatt

SEQ ID NO: 918923 - DNA, 33 bp, Homo sapien
aagtggaaatatgcataaatgaaggagtattct

SEQ ID NO: 918924 - DNA, 33 bp, Homo sapien
aagtggaaatatgcatgaatgaaggagtattct

SEQ ID NO: 918925 - DNA, 33 bp, Homo sapien
ctaagtcccgcctgaccggcagcaggttccagc

SEQ ID NO: 918926 - DNA, 33 bp, Homo sapien
ctaagtcccgcctgactggcagcaggttccagc

SEQ ID NO: 918927 - DNA, 33 bp, Homo sapien
ttactgtccgcaacccaacaatctatgtatcct

SEQ ID NO: 918928 - DNA, 33 bp, Homo sapien
ttactgtccgcaacccgacaatctatgtatcct

SEQ ID NO: 918929 - DNA, 33 bp, Homo sapien
cttggccagttttgaaactttcatcatcttgta

SEQ ID NO: 918930 - DNA, 33 bp, Homo sapien
cttggccagttttgaatctttcatcatcttgta

SEQ ID NO: 918931 - DNA, 33 bp, Homo sapien
gatcctgggggctttcaacaatcagacatggcc

SEQ ID NO: 918932 - DNA, 33 bp, Homo sapien
gatcctgggggctttccacaatcagacatggcc

SEQ ID NO: 918933 - DNA, 33 bp, Homo sapien
tccagaaaattgggcgccctgaggacaggtcta

SEQ ID NO: 918934 - DNA, 33 bp, Homo sapien
tccagaaaattgggcgtcctgaggacaggtcta

SEQ ID NO: 918935 - DNA, 33 bp, Homo sapien
tagagcaactcccacaactctctctcaacacac

SEQ ID NO: 918936 - DNA, 33 bp, Homo sapien
tagagcaactcccacacctctctctcaacacac

SEQ ID NO: 918937 - DNA, 33 bp, Homo sapien
aaactcttccttgcataaaactgtatagtaaaa

SEQ ID NO: 918938 - DNA, 33 bp, Homo sapien
aaactcttccttgcattaaactgtatagtaaaa

SEQ ID NO: 918939 - DNA, 33 bp, Homo sapien
cctcactggtttgtgacaataacaagagatggt

SEQ ID NO: 918940 - DNA, 33 bp, Homo sapien
cctcactggtttgtgagaataacaagagatggt

SEQ ID NO: 918941 - DNA, 33 bp, Homo sapien
aacttcatttctaagacactccaaaggaactcc

SEQ ID NO: 918942 - DNA, 33 bp, Homo sapien
aacttcatttctaagagactccaaaggaactcc

SEQ ID NO: 918943 - DNA, 33 bp, Homo sapien
taatttcaccaaaatacctgaactctaacttca

SEQ ID NO: 918944 - DNA, 33 bp, Homo sapien
taatttcaccaaaatatctgaactctaacttca

SEQ ID NO: 918945 - DNA, 33 bp, Homo sapien
attccttaagagcaaaatactccatagaagttc

SEQ ID NO: 918946 - DNA, 33 bp, Homo sapien
attccttaagagcaaagtactccatagaagttc

SEQ ID NO: 918947 - DNA, 33 bp, Homo sapien
aaatatcgaaagaagaatatttggtgacatacg

SEQ ID NO: 918948 - DNA, 33 bp, Homo sapien
aaatatcgaaagaagactatttggtgacatacg

SEQ ID NO: 918949 - DNA, 33 bp, Homo sapien
taatgtctcatccatacaatgaaacacttccca

SEQ ID NO: 918950 - DNA, 33 bp, Homo sapien
taatgtctcatccatataatgaaacacttccca

SEQ ID NO: 918951 - DNA, 33 bp, Homo sapien
ttacaactagaattagcagaactagctgataca

SEQ ID NO: 918952 - DNA, 33 bp, Homo sapien
ttacaactagaattagtagaactagctgataca

SEQ ID NO: 918953 - DNA, 33 bp, Homo sapien
tgatgactaggactaggatggtggaaaactgtg

SEQ ID NO: 918954 - DNA, 33 bp, Homo sapien
tgatgactaggactagtatggtggaaaactgtg

SEQ ID NO: 918955 - DNA, 33 bp, Homo sapien
tattgaaattaatgaacagcactgaggcccaat

SEQ ID NO: 918956 - DNA, 33 bp, Homo sapien
tattgaaattaatgaatagcactgaggcccaat

SEQ ID NO: 918957 - DNA, 33 bp, Homo sapien
tccatgaaaatactgagaacctatttcccatta

SEQ ID NO: 918958 - DNA, 33 bp, Homo sapien
tccatgaaaatactgataacctatttcccatta

SEQ ID NO: 918959 - DNA, 33 bp, Homo sapien
agcagccctacaaccaatatctaccttcagaac

SEQ ID NO: 918960 - DNA, 33 bp, Homo sapien
agcagccctacaaccagtatctaccttcagaac

SEQ ID NO: 918961 - DNA, 33 bp, Homo sapien
aggttagcacttcttccattatgaattttgatt

SEQ ID NO: 918962 - DNA, 33 bp, Homo sapien
aggttagcacttcttcgattatgaattttgatt

SEQ ID NO: 918963 - DNA, 33 bp, Homo sapien
ctgattaatggacaagccttgacatgaacatca

SEQ ID NO: 918964 - DNA, 33 bp, Homo sapien
ctgattaatggacaagtcttgacatgaacatca

SEQ ID NO: 918965 - DNA, 33 bp, Homo sapien
tgatatgttatcactcagaagatttttcaaaga

SEQ ID NO: 918966 - DNA, 33 bp, Homo sapien
tgatatgttatcactcggaagatttttcaaaga

SEQ ID NO: 918967 - DNA, 33 bp, Homo sapien
ctacctcctgcttgaacggaatagctaggtttc

SEQ ID NO: 918968 - DNA, 33 bp, Homo sapien
ctacctcctgcttgaatggaatagctaggtttc

SEQ ID NO: 918969 - DNA, 33 bp, Homo sapien
aagcatattcactttaaccgaggatttgtaggc

SEQ ID NO: 918970 - DNA, 33 bp, Homo sapien
aagcatattcactttatccgaggatttgtaggc

SEQ ID NO: 918971 - DNA, 33 bp, Homo sapien
ctagtggagagtaggaaattgtggaaacagcct

SEQ ID NO: 918972 - DNA, 33 bp, Homo sapien
ctagtggagagtaggagattgtggaaacagcct

SEQ ID NO: 918973 - DNA, 33 bp, Homo sapien
gcattgaacaaaaagcaaatgatccttacaggg

SEQ ID NO: 918974 - DNA, 33 bp, Homo sapien
gcattgaacaaaaagcgaatgatccttacaggg

SEQ ID NO: 918975 - DNA, 33 bp, Homo sapien
agggactgtgaatacagtggggcagcaaacata

SEQ ID NO: 918976 - DNA, 33 bp, Homo sapien
agggactgtgaatacattggggcagcaaacata

SEQ ID NO: 918977 - DNA, 33 bp, Homo sapien
agacagcagaattctaagataggaaggtaaagt

SEQ ID NO: 918978 - DNA, 33 bp, Homo sapien
agacagcagaattctacgataggaaggtaaagt

SEQ ID NO: 918979 - DNA, 33 bp, Homo sapien
aaagcttcatggcctccatttctctctgtcatg

SEQ ID NO: 918980 - DNA, 33 bp, Homo sapien
aaagcttcatggcctctatttctctctgtcatg

SEQ ID NO: 918981 - DNA, 33 bp, Homo sapien
gtggactagctgttaccgaaatgtaatatacaa

SEQ ID NO: 918982 - DNA, 33 bp, Homo sapien
gtggactagctgttactgaaatgtaatatacaa

SEQ ID NO: 918983 - DNA, 33 bp, Homo sapien
ctgcagaaaatcaccaaaaataatgctcccatt

SEQ ID NO: 918984 - DNA, 33 bp, Homo sapien
ctgcagaaaatcaccagaaataatgctcccatt

SEQ ID NO: 918985 - DNA, 33 bp, Homo sapien
catttaaaacagtgtacgtcagatttgtgtacc

SEQ ID NO: 918986 - DNA, 33 bp, Homo sapien
catttaaaacagtgtatgtcagatttgtgtacc

SEQ ID NO: 918987 - DNA, 33 bp, Homo sapien
gtccctccagttccaaaaagccatgaatcacat

SEQ ID NO: 918988 - DNA, 33 bp, Homo sapien
gtccctccagttccaagaagccatgaatcacat

SEQ ID NO: 918989 - DNA, 33 bp, Homo sapien
gaagagtcagatactacgcaagctaagctcatt

SEQ ID NO: 918990 - DNA, 33 bp, Homo sapien
gaagagtcagatactaggcaagctaagctcatt

SEQ ID NO: 918991 - DNA, 33 bp, Homo sapien
ctgctgctaatctcaacgggcttttcaaaaggt

SEQ ID NO: 918992 - DNA, 33 bp, Homo sapien
ctgctgctaatctcaatgggcttttcaaaaggt

SEQ ID NO: 918993 - DNA, 33 bp, Homo sapien
ttaataagctggttcaaggtctcaagatatgtt

SEQ ID NO: 918994 - DNA, 33 bp, Homo sapien
ttaataagctggttcagggtctcaagatatgtt

SEQ ID NO: 918995 - DNA, 33 bp, Homo sapien
tgtacttcctaaagaacatggctgaaaaaaaat

SEQ ID NO: 918996 - DNA, 33 bp, Homo sapien
tgtacttcctaaagaagatggctgaaaaaaaat

SEQ ID NO: 918997 - DNA, 33 bp, Homo sapien
ttgtatcagaaaatgccataaggaaatggggca

SEQ ID NO: 918998 - DNA, 33 bp, Homo sapien
ttgtatcagaaaatgctataaggaaatggggca

SEQ ID NO: 918999 - DNA, 33 bp, Homo sapien
aaaggtgtatttcttacagcctcttgctaaaat

SEQ ID NO: 919000 - DNA, 33 bp, Homo sapien
aaaggtgtatttcttagagcctcttgctaaaat

SEQ ID NO: 919001 - DNA, 33 bp, Homo sapien
taaaatgcattttttccagtgagttgtggccaa

SEQ ID NO: 919002 - DNA, 33 bp, Homo sapien
taaaatgcattttttctagtgagttgtggccaa

SEQ ID NO: 919003 - DNA, 33 bp, Homo sapien
gactgttccttcctaaagatttgaacactcaga

SEQ ID NO: 919004 - DNA, 33 bp, Homo sapien
gactgttccttcctaaggatttgaacactcaga

SEQ ID NO: 919005 - DNA, 33 bp, Homo sapien
tggcacgactaccaatcagaacctcagcgctgg

SEQ ID NO: 919006 - DNA, 33 bp, Homo sapien
tggcacgactaccaattagaacctcagcgctgg

SEQ ID NO: 919007 - DNA, 33 bp, Homo sapien; identical to SEQ ID NO: 919005

SEQ ID NO: 919008 - DNA, 33 bp, Homo sapien; identical to SEQ ID NO: 919006

SEQ ID NO: 919009 - DNA, 33 bp, Homo sapien
atcaagtattatcataacaaagggttgaacaat

SEQ ID NO: 919010 - DNA, 33 bp, Homo sapien
atcaagtattatcataccaaagggttgaacaat

SEQ ID NO: 919011 - DNA, 33 bp, Homo sapien
aaaattagcacgtttaacattaaagtcatcatc

SEQ ID NO: 919012 - DNA, 33 bp, Homo sapien
aaaattagcacgtttaccattaaagtcatcatc

SEQ ID NO: 919013 - DNA, 33 bp, Homo sapien
ctgttcttgacatacacggaaaatggtactcaa

SEQ ID NO: 919014 - DNA, 33 bp, Homo sapien
ctgttcttgacatacatggaaaatggtactcaa

SEQ ID NO: 919015 - DNA, 33 bp, Homo sapien
tcaacttgatgcagcaaacaataagtatttata

SEQ ID NO: 919016 - DNA, 33 bp, Homo sapien
tcaacttgatgcagcagacaataagtatttata

SEQ ID NO: 919017 - DNA, 33 bp, Homo sapien
agcaatttcttgctaaaattacgtcatgtctcc

SEQ ID NO: 919018 - DNA, 33 bp, Homo sapien
agcaatttcttgctaacattacgtcatgtctcc

SEQ ID NO: 919019 - DNA, 33 bp, Homo sapien
actgtggcttgatcctcaaaggccccatagtgc

SEQ ID NO: 919020 - DNA, 33 bp, Homo sapien
actgtggcttgatccttaaaggccccatagtgc

SEQ ID NO: 919021 - DNA, 33 bp, Homo sapien
ccctgtcatccagtgcagagtcccactttacaa

SEQ ID NO: 919022 - DNA, 33 bp, Homo sapien
ccctgtcatccagtgccgagtcccactttacaa

SEQ ID NO: 919023 - DNA, 33 bp, Homo sapien
tgagtattcttggtcaaataccctggtctatca

SEQ ID NO: 919024 - DNA, 33 bp, Homo sapien
tgagtattcttggtcagataccctggtctatca

SEQ ID NO: 919025 - DNA, 33 bp, Homo sapien
ctggttcccttttgtgaaatgaggagagagttt

SEQ ID NO: 919026 - DNA, 33 bp, Homo sapien
ctggttcccttttgtggaatgaggagagagttt

SEQ ID NO: 919027 - DNA, 33 bp, Homo sapien
cctgtagtttttgaacaaggatgaaggtacccc

SEQ ID NO: 919028 - DNA, 33 bp, Homo sapien
cctgtagtttttgaacgaggatgaaggtacccc

SEQ ID NO: 919029 - DNA, 33 bp, Homo sapien
acagaataagtactaactgctagaatgaacctg

SEQ ID NO: 919030 - DNA, 33 bp, Homo sapien
acagaataagtactaattgctagaatgaacctg

SEQ ID NO: 919031 - DNA, 33 bp, Homo sapien
accagctctgagagtcacgttgcaaacttctaa

SEQ ID NO: 919032 - DNA, 33 bp, Homo sapien
accagctctgagagtcgcgttgcaaacttctaa

SEQ ID NO: 919033 - DNA, 33 bp, Homo sapien
aagtggaagatccctggacagtctggagaggtg

SEQ ID NO: 919034 - DNA, 33 bp, Homo sapien
aagtggaagatccctgtacagtctggagaggtg

SEQ ID NO: 919035 - DNA, 33 bp, Homo sapien
tctatagaatccaagaggagctgtcaaagacat

SEQ ID NO: 919036 - DNA, 33 bp, Homo sapien
tctatagaatccaagatgagctgtcaaagacat

SEQ ID NO: 919037 - DNA, 33 bp, Homo sapien
tgaaaaaattaggataactttgtgccaaattta

SEQ ID NO: 919038 - DNA, 33 bp, Homo sapien
tgaaaaaattaggatatctttgtgccaaattta

SEQ ID NO: 919039 - DNA, 33 bp, Homo sapien
gatgtcatggtcctcaaaaagatgccagtgcct

SEQ ID NO: 919040 - DNA, 33 bp, Homo sapien
gatgtcatggtcctcagaaagatgccagtgcct

SEQ ID NO: 919041 - DNA, 33 bp, Homo sapien
ctcagtggacggagaaatctgttttgttacaga

SEQ ID NO: 919042 - DNA, 33 bp, Homo sapien
ctcagtggacggagaagtctgttttgttacaga

SEQ ID NO: 919043 - DNA, 33 bp, Homo sapien
cttgtcaataggttccactttatgtgctttttg

SEQ ID NO: 919044 - DNA, 33 bp, Homo sapien
cttgtcaataggttcctctttatgtgctttttg

SEQ ID NO: 919045 - DNA, 33 bp, Homo sapien
acattcaaatctcccaaagacagatggcaacat

SEQ ID NO: 919046 - DNA, 33 bp, Homo sapien
acattcaaatctcccagagacagatggcaacat

SEQ ID NO: 919047 - DNA, 33 bp, Homo sapien
cttagtgttctcagtacgattcttaaattggct

SEQ ID NO: 919048 - DNA, 33 bp, Homo sapien
cttagtgttctcagtatgattcttaaattggct

SEQ ID NO: 919049 - DNA, 33 bp, Homo sapien
agtggagcataatataccaaaaggggagaatca

SEQ ID NO: 919050 - DNA, 33 bp, Homo sapien
agtggagcataatatatcaaaaggggagaatca

SEQ ID NO: 919051 - DNA, 33 bp, Homo sapien
ctaaagagctttgaaaatcaatgcagctaatga

SEQ ID NO: 919052 - DNA, 33 bp, Homo sapien
ctaaagagctttgaaagtcaatgcagctaatga

SEQ ID NO: 919053 - DNA, 33 bp, Homo sapien
ctgacatttgagatgaaacatttatcattttaa

SEQ ID NO: 919054 - DNA, 33 bp, Homo sapien
ctgacatttgagatgagacatttatcattttaa

SEQ ID NO: 919055 - DNA, 33 bp, Homo sapien
gttgtctataactcccaaccaaaagacttaaca

SEQ ID NO: 919056 - DNA, 33 bp, Homo sapien
gttgtctataactcccgaccaaaagacttaaca

SEQ ID NO: 919057 - DNA, 33 bp, Homo sapien
catagggcaaatacttaaaccattcaatcatgc

SEQ ID NO: 919058 - DNA, 33 bp, Homo sapien
catagggcaaatactttaaccattcaatcatgc

SEQ ID NO: 919059 - DNA, 33 bp, Homo sapien
tcaccatggacaggaaagtctctcaaaattgag

SEQ ID NO: 919060 - DNA, 33 bp, Homo sapien
tcaccatggacaggaaggtctctcaaaattgag

SEQ ID NO: 919061 - DNA, 33 bp, Homo sapien
ggaagatgctctgggacgcataggacattgcag

SEQ ID NO: 919062 - DNA, 33 bp, Homo sapien
ggaagatgctctgggatgcataggacattgcag

SEQ ID NO: 919063 - DNA, 33 bp, Homo sapien
tttctttatcctggccaaaaaattattgtcata

SEQ ID NO: 919064 - DNA, 33 bp, Homo sapien
tttctttatcctggccgaaaaattattgtcata

SEQ ID NO: 919065 - DNA, 33 bp, Homo sapien
gtaacctttttgatgcactactgagtttgcttt

SEQ ID NO: 919066 - DNA, 33 bp, Homo sapien
gtaacctttttgatgcgctactgagtttgcttt

SEQ ID NO: 919067 - DNA, 33 bp, Homo sapien
catagtagctgtactgcagactaattcatatga

SEQ ID NO: 919068 - DNA, 33 bp, Homo sapien
catagtagctgtactggagactaattcatatga

SEQ ID NO: 919069 - DNA, 33 bp, Homo sapien
ctaagtcctagttagaagaaagaaggcccctct

SEQ ID NO: 919070 - DNA, 33 bp, Homo sapien
ctaagtcctagttagacgaaagaaggcccctct

SEQ ID NO: 919071 - DNA, 33 bp, Homo sapien
atagtactgagctccagacatattatgttcttt

SEQ ID NO: 919072 - DNA, 33 bp, Homo sapien
atagtactgagctccatacatattatgttcttt

SEQ ID NO: 919073 - DNA, 33 bp, Homo sapien
ccctcaatcctgctcaacttcatgcatcaaaat

SEQ ID NO: 919074 - DNA, 33 bp, Homo sapien
ccctcaatcctgctcagcttcatgcatcaaaat

SEQ ID NO: 919075 - DNA, 33 bp, Homo sapien
cagttacctggattaactgatgcgaacaacaat

SEQ ID NO: 919076 - DNA, 33 bp, Homo sapien
cagttacctggattaattgatgcgaacaacaat

SEQ ID NO: 919077 - DNA, 33 bp, Homo sapien
caccttatgagctgccaaatgaaactggtaaaa

SEQ ID NO: 919078 - DNA, 33 bp, Homo sapien
caccttatgagctgccgaatgaaactggtaaaa

SEQ ID NO: 919079 - DNA, 33 bp, Homo sapien
gtaataatatctcacaccttggttagcatatag

SEQ ID NO: 919080 - DNA, 33 bp, Homo sapien
gtaataatatctcacagcttggttagcatatag

SEQ ID NO: 919081 - DNA, 33 bp, Homo sapien
tccttggtgctgctcaagaatgcgttttattat

SEQ ID NO: 919082 - DNA, 33 bp, Homo sapien
tccttggtgctgctcaggaatgcgttttattat

SEQ ID NO: 919083 - DNA, 33 bp, Homo sapien
ttttgattaacctcataatgacttcactgacat

SEQ ID NO: 919084 - DNA, 33 bp, Homo sapien
ttttgattaacctcatgatgacttcactgacat

SEQ ID NO: 919085 - DNA, 33 bp, Homo sapien
attttcacattggtcaagtttcttgtttcttcc

SEQ ID NO: 919086 - DNA, 33 bp, Homo sapien
attttcacattggtcaggtttcttgtttcttcc

SEQ ID NO: 919087 - DNA, 33 bp, Homo sapien
aatgagtagtttaacactgacaattagaaagga

SEQ ID NO: 919088 - DNA, 33 bp, Homo sapien
aatgagtagtttaacagtgacaattagaaagga

SEQ ID NO: 919089 - DNA, 33 bp, Homo sapien
gctagtagcatccccccagttgagacaatcaaa

SEQ ID NO: 919090 - DNA, 33 bp, Homo sapien
gctagtagcatcccccgagttgagacaatcaaa

SEQ ID NO: 919091 - DNA, 33 bp, Homo sapien
gtcaaacaactaaagacggaagttcacaattca

SEQ ID NO: 919092 - DNA, 33 bp, Homo sapien
gtcaaacaactaaagatggaagttcacaattca

SEQ ID NO: 919093 - DNA, 33 bp, Homo sapien
caagccctcagttgtgaaatgaagatgaagata

SEQ ID NO: 919094 - DNA, 33 bp, Homo sapien
caagccctcagttgtggaatgaagatgaagata

SEQ ID NO: 919095 - DNA, 33 bp, Homo sapien
gcacacattcagaccacaataggattagatgaa

SEQ ID NO: 919096 - DNA, 33 bp, Homo sapien
gcacacattcagaccataataggattagatgaa

SEQ ID NO: 919097 - DNA, 33 bp, Homo sapien
aggtctaatggaaaggaccccaacaatatgact

SEQ ID NO: 919098 - DNA, 33 bp, Homo sapien
aggtctaatggaaaggtccccaacaatatgact

SEQ ID NO: 919099 - DNA, 33 bp, Homo sapien
acagtctggaggctggaattctaagtcagattc

SEQ ID NO: 919100 - DNA, 33 bp, Homo sapien
acagtctggaggctggtattctaagtcagattc

SEQ ID NO: 919101 - DNA, 33 bp, Homo sapien
ctgttaacattactgacggctatttcttagtct

SEQ ID NO: 919102 - DNA, 33 bp, Homo sapien
ctgttaacattactgatggctatttcttagtct

SEQ ID NO: 919103 - DNA, 33 bp, Homo sapien
ataaattggacaaatccaccttaatagaagata

SEQ ID NO: 919104 - DNA, 33 bp, Homo sapien
ataaattggacaaatctaccttaatagaagata

SEQ ID NO: 919105 - DNA, 33 bp, Homo sapien
agacaaactactgaaaaccaatgacaaagaaaa

SEQ ID NO: 919106 - DNA, 33 bp, Homo sapien
agacaaactactgaaagccaatgacaaagaaaa

SEQ ID NO: 919107 - DNA, 33 bp, Homo sapien
caaaatttagttgcacactcttggtatgcctca

SEQ ID NO: 919108 - DNA, 33 bp, Homo sapien
caaaatttagttgcactctcttggtatgcctca

SEQ ID NO: 919109 - DNA, 33 bp, Homo sapien
caaaacattgttcaaacctctattcgcactctc

SEQ ID NO: 919110 - DNA, 33 bp, Homo sapien
caaaacattgttcaaatctctattcgcactctc

SEQ ID NO: 919111 - DNA, 33 bp, Homo sapien
tgatcctccctactgacgaagaatgtgatagtt

SEQ ID NO: 919112 - DNA, 33 bp, Homo sapien
tgatcctccctactgatgaagaatgtgatagtt

SEQ ID NO: 919113 - DNA, 33 bp, Homo sapien
aggcctcaactaactccaagtgttgtttttgtt

SEQ ID NO: 919114 - DNA, 33 bp, Homo sapien
aggcctcaactaactctaagtgttgtttttgtt

SEQ ID NO: 919115 - DNA, 33 bp, Homo sapien
atttactcaaaaagtacgcaccatgcagctaat

SEQ ID NO: 919116 - DNA, 33 bp, Homo sapien
atttactcaaaaagtatgcaccatgcagctaat

SEQ ID NO: 919117 - DNA, 33 bp, Homo sapien
ctatgacagtctataaagagaacctagacttcc

SEQ ID NO: 919118 - DNA, 33 bp, Homo sapien
ctatgacagtctataaggagaacctagacttcc

SEQ ID NO: 919119 - DNA, 33 bp, Homo sapien
ataaaaacacttcataacaaaagcaagggctag

SEQ ID NO: 919120 - DNA, 33 bp, Homo sapien
ataaaaacacttcatatcaaaagcaagggctag

SEQ ID NO: 919121 - DNA, 33 bp, Homo sapien
atctcaatacatttcaacaaagcatgttctctg

SEQ ID NO: 919122 - DNA, 33 bp, Homo sapien
atctcaatacatttcagcaaagcatgttctctg

SEQ ID NO: 919123 - DNA, 33 bp, Homo sapien
tggagatcatctctccactgcatgctattattg

SEQ ID NO: 919124 - DNA, 33 bp, Homo sapien
tggagatcatctctccgctgcatgctattattg

SEQ ID NO: 919125 - DNA, 33 bp, Homo sapien
aaacagatctaaattacagtcaacacacttaaa

SEQ ID NO: 919126 - DNA, 33 bp, Homo sapien
aaacagatctaaattatagtcaacacacttaaa

SEQ ID NO: 919127 - DNA, 33 bp, Homo sapien
ctcatccacattatcaagttgaaatcacgagga

SEQ ID NO: 919128 - DNA, 33 bp, Homo sapien
ctcatccacattatcaggttgaaatcacgagga

SEQ ID NO: 919129 - DNA, 33 bp, Homo sapien
aaatctggaaagatcaaaatctctaaaggaagg

SEQ ID NO: 919130 - DNA, 33 bp, Homo sapien
aaatctggaaagatcacaatctctaaaggaagg

SEQ ID NO: 919131 - DNA, 33 bp, Homo sapien
tcagtgatgattatggaaatggtgatgaagatg

SEQ ID NO: 919132 - DNA, 33 bp, Homo sapien
tcagtgatgattatgggaatggtgatgaagatg

SEQ ID NO: 919133 - DNA, 33 bp, Homo sapien
agctgtcactcccaggaaagtcacaatttcatt

SEQ ID NO: 919134 - DNA, 33 bp, Homo sapien
agctgtcactcccagggaagtcacaatttcatt

SEQ ID NO: 919135 - DNA, 33 bp, Homo sapien
cttggtctcaatgcaacgtatgggttaagagct

SEQ ID NO: 919136 - DNA, 33 bp, Homo sapien
cttggtctcaatgcaatgtatgggttaagagct

SEQ ID NO: 919137 - DNA, 33 bp, Homo sapien
ttgtaaatatggacaaatctgaagccccagaag

SEQ ID NO: 919138 - DNA, 33 bp, Homo sapien
ttgtaaatatggacaattctgaagccccagaag

SEQ ID NO: 919139 - DNA, 33 bp, Homo sapien
gccatgtttccactacgcttgcactctgcatgt

SEQ ID NO: 919140 - DNA, 33 bp, Homo sapien
gccatgtttccactactcttgcactctgcatgt

SEQ ID NO: 919141 - DNA, 33 bp, Homo sapien
actactttgtggaaatcaagagagcatctgctt

SEQ ID NO: 919142 - DNA, 33 bp, Homo sapien
actactttgtggaaattaagagagcatctgctt

SEQ ID NO: 919143 - DNA, 33 bp, Homo sapien
taactccgttccaaaaccttgcagctcagcagc

SEQ ID NO: 919144 - DNA, 33 bp, Homo sapien
taactccgttccaaaatcttgcagctcagcagc

SEQ ID NO: 919145 - DNA, 33 bp, Homo sapien
cccacccatagcatgcacttttcagtaatgtac

SEQ ID NO: 919146 - DNA, 33 bp, Homo sapien
cccacccatagcatgcgcttttcagtaatgtac

SEQ ID NO: 919147 - DNA, 33 bp, Homo sapien
tgtctctggtgtttccgccatctagtttcatct

SEQ ID NO: 919148 - DNA, 33 bp, Homo sapien
tgtctctggtgtttcctccatctagtttcatct

SEQ ID NO: 919149 - DNA, 33 bp, Homo sapien
tttgccaatccattcaaagcaattttccaagat

SEQ ID NO: 919150 - DNA, 33 bp, Homo sapien
tttgccaatccattcagagcaattttccaagat

SEQ ID NO: 919151 - DNA, 33 bp, Homo sapien
gcataactgaacttcaatcaagaacccttttag

SEQ ID NO: 919152 - DNA, 33 bp, Homo sapien
gcataactgaacttcagtcaagaacccttttag

SEQ ID NO: 919153 - DNA, 33 bp, Homo sapien
gtcacagagatttttagaattggaaccatttga

SEQ ID NO: 919154 - DNA, 33 bp, Homo sapien
gtcacagagatttttataattggaaccatttga

SEQ ID NO: 919155 - DNA, 33 bp, Homo sapien
gggccttcgctgctgccgagacatagactggga

SEQ ID NO: 919156 - DNA, 33 bp, Homo sapien
gggccttcgctgctgctgagacatagactggga

SEQ ID NO: 919157 - DNA, 33 bp, Homo sapien
ttcctttgactccctcacaggtctccatgctgt

SEQ ID NO: 919158 - DNA, 33 bp, Homo sapien
ttcctttgactccctcgcaggtctccatgctgt

SEQ ID NO: 919159 - DNA, 33 bp, Homo sapien
agaattacaataattgcagcgcacacatcagga

SEQ ID NO: 919160 - DNA, 33 bp, Homo sapien
agaattacaataattggagcgcacacatcagga

SEQ ID NO: 919161 - DNA, 33 bp, Homo sapien
tcatgatgaaatatacactttctttgctgcccg

SEQ ID NO: 919162 - DNA, 33 bp, Homo sapien
tcatgatgaaatataccctttctttgctgcccg

SEQ ID NO: 919163 - DNA, 33 bp, Homo sapien
ctcaaatgagcattaaaggaaattgtttcagga

SEQ ID NO: 919164 - DNA, 33 bp, Homo sapien
ctcaaatgagcattaagggaaattgtttcagga

SEQ ID NO: 919165 - DNA, 33 bp, Homo sapien
agaagcctatgccagcacctgtggccacactct

SEQ ID NO: 919166 - DNA, 33 bp, Homo sapien
agaagcctatgccagcgcctgtggccacactct

SEQ ID NO: 919167 - DNA, 33 bp, Homo sapien
gaggagaacatctttaagaaggaaataggagtt

SEQ ID NO: 919168 - DNA, 33 bp, Homo sapien
gaggagaacatctttaggaaggaaataggagtt

SEQ ID NO: 919169 - DNA, 33 bp, Homo sapien
accccatgtaacagagaccgtcagatttcaaca

SEQ ID NO: 919170 - DNA, 33 bp, Homo sapien
accccatgtaacagagcccgtcagatttcaaca

SEQ ID NO: 919171 - DNA, 33 bp, Homo sapien
tttcctatgctccatcaattatttctttgtttt

SEQ ID NO: 919172 - DNA, 33 bp, Homo sapien
tttcctatgctccatcgattatttctttgtttt

SEQ ID NO: 919173 - DNA, 33 bp, Homo sapien
tgctcctgggcagttacgtgcatttgagatttt

SEQ ID NO: 919174 - DNA, 33 bp, Homo sapien
tgctcctgggcagttatgtgcatttgagatttt

SEQ ID NO: 919175 - DNA, 33 bp, Homo sapien
ttgaaggtcagactaagggctggataccatcag

SEQ ID NO: 919176 - DNA, 33 bp, Homo sapien
ttgaaggtcagactaatggctggataccatcag

SEQ ID NO: 919177 - DNA, 33 bp, Homo sapien
atatgcacttagaatcccgttaactggaaaaat

SEQ ID NO: 919178 - DNA, 33 bp, Homo sapien
atatgcacttagaatctcgttaactggaaaaat

SEQ ID NO: 919179 - DNA, 33 bp, Homo sapien
aatcgagaataaataaaccacactgtgtgctct

SEQ ID NO: 919180 - DNA, 33 bp, Homo sapien
aatcgagaataaataagccacactgtgtgctct

SEQ ID NO: 919181 - DNA, 33 bp, Homo sapien
ttctttgtctaccccaccacttatctcactctt

SEQ ID NO: 919182 - DNA, 33 bp, Homo sapien
ttctttgtctaccccatcacttatctcactctt

SEQ ID NO: 919183 - DNA, 33 bp, Homo sapien
ctttagggtatgaatgcaactttgctgtatgac

SEQ ID NO: 919184 - DNA, 33 bp, Homo sapien
ctttagggtatgaatgtaactttgctgtatgac

SEQ ID NO: 919185 - DNA, 33 bp, Homo sapien
ttaataactctcaatactatcactgaacctcct

SEQ ID NO: 919186 - DNA, 33 bp, Homo sapien
ttaataactctcaatattatcactgaacctcct

SEQ ID NO: 919187 - DNA, 33 bp, Homo sapien
ctttcctatgctctacaggctcttcctggggag

SEQ ID NO: 919188 - DNA, 33 bp, Homo sapien
ctttcctatgctctacgggctcttcctggggag

SEQ ID NO: 919189 - DNA, 33 bp, Homo sapien
tatgactcacaaggggaaacatgttaatttatc

SEQ ID NO: 919190 - DNA, 33 bp, Homo sapien
tatgactcacaaggggcaacatgttaatttatc

SEQ ID NO: 919191 - DNA, 33 bp, Homo sapien
cactagttgaccgtctaaaaaaacagaccgggt

SEQ ID NO: 919192 - DNA, 33 bp, Homo sapien
cactagttgaccgtctgaaaaaacagaccgggt

SEQ ID NO: 919193 - DNA, 33 bp, Homo sapien
ttataattctggtccaatgattcctatttttca

SEQ ID NO: 919194 - DNA, 33 bp, Homo sapien
ttataattctggtccagtgattcctatttttca

SEQ ID NO: 919195 - DNA, 33 bp, Homo sapien
ttagaaaatagtgaagaattttgtgacttatct

SEQ ID NO: 919196 - DNA, 33 bp, Homo sapien
ttagaaaatagtgaagcattttgtgacttatct

SEQ ID NO: 919197 - DNA, 33 bp, Homo sapien
aaggacttgcaacttaccgttagaatgagtaat

SEQ ID NO: 919198 - DNA, 33 bp, Homo sapien
aaggacttgcaacttatcgttagaatgagtaat

SEQ ID NO: 919199 - DNA, 33 bp, Homo sapien
gttcaaactatggcaacgtttccatacttttcc

SEQ ID NO: 919200 - DNA, 33 bp, Homo sapien
gttcaaactatggcaatgtttccatacttttcc

SEQ ID NO: 919201 - DNA, 33 bp, Homo sapien
agctgaatcaatcaagcagaagacagaatatca

SEQ ID NO: 919202 - DNA, 33 bp, Homo sapien
agctgaatcaatcaaggagaagacagaatatca

SEQ ID NO: 919203 - DNA, 33 bp, Homo sapien
gttaccacatttaagacatgatatgattctgaa

SEQ ID NO: 919204 - DNA, 33 bp, Homo sapien
gttaccacatttaagagatgatatgattctgaa

SEQ ID NO: 919205 - DNA, 33 bp, Homo sapien
attgtgttgatctgaagtgaaggctttcagttt

SEQ ID NO: 919206 - DNA, 33 bp, Homo sapien
attgtgttgatctgaattgaaggctttcagttt

SEQ ID NO: 919207 - DNA, 33 bp, Homo sapien
ccaatcctagaaaaacagaatgggacagttcag

SEQ ID NO: 919208 - DNA, 33 bp, Homo sapien
ccaatcctagaaaaacggaatgggacagttcag

SEQ ID NO: 919209 - DNA, 33 bp, Homo sapien
tcttctgaattttatccaagactatcaaggcag

SEQ ID NO: 919210 - DNA, 33 bp, Homo sapien
tcttctgaattttatcgaagactatcaaggcag

SEQ ID NO: 919211 - DNA, 33 bp, Homo sapien
ggaatcaaaaaccttcaaagtctctctggtgtt

SEQ ID NO: 919212 - DNA, 33 bp, Homo sapien
ggaatcaaaaaccttcgaagtctctctggtgtt

SEQ ID NO: 919213 - DNA, 33 bp, Homo sapien
caggcatatgtttggacggaaaaacatactgag

SEQ ID NO: 919214 - DNA, 33 bp, Homo sapien
caggcatatgtttggatggaaaaacatactgag

SEQ ID NO: 919215 - DNA, 33 bp, Homo sapien
ctgtgtgttcacaaaacaagcttggatggaaaa

SEQ ID NO: 919216 - DNA, 33 bp, Homo sapien
ctgtgtgttcacaaaataagcttggatggaaaa

SEQ ID NO: 919217 - DNA, 33 bp, Homo sapien
ataggatacttatcatcaatagtctttgaagct

SEQ ID NO: 919218 - DNA, 33 bp, Homo sapien
ataggatacttatcatgaatagtctttgaagct

SEQ ID NO: 919219 - DNA, 33 bp, Homo sapien
atttatatgtcctccaaagtttcatgtcacttt

SEQ ID NO: 919220 - DNA, 33 bp, Homo sapien
atttatatgtcctccagagtttcatgtcacttt

SEQ ID NO: 919221 - DNA, 33 bp, Homo sapien
ctttattgaactaacaatcttataacttcaatt

SEQ ID NO: 919222 - DNA, 33 bp, Homo sapien
ctttattgaactaacagtcttataacttcaatt

SEQ ID NO: 919223 - DNA, 33 bp, Homo sapien
accaataacagactggaagaaacctgagtggga

SEQ ID NO: 919224 - DNA, 33 bp, Homo sapien
accaataacagactgggagaaacctgagtggga

SEQ ID NO: 919225 - DNA, 33 bp, Homo sapien
agatcagagcaaaggacaccaataacagactgg

SEQ ID NO: 919226 - DNA, 33 bp, Homo sapien
agatcagagcaaaggataccaataacagactgg

SEQ ID NO: 919227 - DNA, 33 bp, Homo sapien
ttgaaatactatcctcccctagcttccacaact

SEQ ID NO: 919228 - DNA, 33 bp, Homo sapien
ttgaaatactatcctctcctagcttccacaact

SEQ ID NO: 919229 - DNA, 33 bp, Homo sapien
atggaatttacatttaaaactgagtccagtaac

SEQ ID NO: 919230 - DNA, 33 bp, Homo sapien
atggaatttacatttacaactgagtccagtaac

SEQ ID NO: 919231 - DNA, 33 bp, Homo sapien
gagaaatgttgtttgcaagaggtaatgcatctc

SEQ ID NO: 919232 - DNA, 33 bp, Homo sapien
gagaaatgttgtttgcgagaggtaatgcatctc

SEQ ID NO: 919233 - DNA, 33 bp, Homo sapien
tgcagtgccttccctactaaggtatcaatatgt

SEQ ID NO: 919234 - DNA, 33 bp, Homo sapien
tgcagtgccttccctagtaaggtatcaatatgt

SEQ ID NO: 919235 - DNA, 33 bp, Homo sapien
cacttttcagaggtaaacattgtctcttaccat

SEQ ID NO: 919236 - DNA, 33 bp, Homo sapien
cacttttcagaggtaaccattgtctcttaccat

SEQ ID NO: 919237 - DNA, 33 bp, Homo sapien
ccaacatttagaggttcaaaagatgaaaaggaa

SEQ ID NO: 919238 - DNA, 33 bp, Homo sapien
ccaacatttagaggttgaaaagatgaaaaggaa

SEQ ID NO: 919239 - DNA, 33 bp, Homo sapien
aaaaaaagacagagaaagagcagctagaaaatt

SEQ ID NO: 919240 - DNA, 33 bp, Homo sapien
aaaaaaagacagagaaggagcagctagaaaatt

SEQ ID NO: 919241 - DNA, 33 bp, Homo sapien
atgttaaattgatggcgatctctcaggcctcct

SEQ ID NO: 919242 - DNA, 33 bp, Homo sapien
atgttaaattgatggctatctctcaggcctcct

SEQ ID NO: 919243 - DNA, 33 bp, Homo sapien
gtgtgtgtgtataaagccagccttttcttaaac

SEQ ID NO: 919244 - DNA, 33 bp, Homo sapien
gtgtgtgtgtataaagtcagccttttcttaaac

SEQ ID NO: 919245 - DNA, 33 bp, Homo sapien
caaagaaccacaaaccaagtggcctagtcaata

SEQ ID NO: 919246 - DNA, 33 bp, Homo sapien
caaagaaccacaaaccgagtggcctagtcaata

SEQ ID NO: 919247 - DNA, 33 bp, Homo sapien
gaggatactgaggtgagataattataaggaaac

SEQ ID NO: 919248 - DNA, 33 bp, Homo sapien
gaggatactgaggtgatataattataaggaaac

SEQ ID NO: 919249 - DNA, 33 bp, Homo sapien
aagtttcatcatataactgaaaactgtgaaatt

SEQ ID NO: 919250 - DNA, 33 bp, Homo sapien
aagtttcatcatataattgaaaactgtgaaatt

SEQ ID NO: 919251 - DNA, 33 bp, Homo sapien
gcctaaactctaatgacctgaattctcttaatt

SEQ ID NO: 919252 - DNA, 33 bp, Homo sapien
gcctaaactctaatgatctgaattctcttaatt

SEQ ID NO: 919253 - DNA, 33 bp, Homo sapien
tgaggcacagaataaccaggtttcctattttag

SEQ ID NO: 919254 - DNA, 33 bp, Homo sapien
tgaggcacagaataactaggtttcctattttag

SEQ ID NO: 919255 - DNA, 33 bp, Homo sapien
gtgttataacctgcaaataatgattttgaatag

SEQ ID NO: 919256 - DNA, 33 bp, Homo sapien
gtgttataacctgcaagtaatgattttgaatag

SEQ ID NO: 919257 - DNA, 33 bp, Homo sapien
actgggaagagtaggaaggtggagaagatgaag

SEQ ID NO: 919258 - DNA, 33 bp, Homo sapien
actgggaagagtaggagggtggagaagatgaag

SEQ ID NO: 919259 - DNA, 33 bp, Homo sapien
gaccaaatttataacccgagaaataaactcata

SEQ ID NO: 919260 - DNA, 33 bp, Homo sapien
gaccaaatttataacctgagaaataaactcata

SEQ ID NO: 919261 - DNA, 33 bp, Homo sapien
gattaactttcaaagactactgtttctagacaa

SEQ ID NO: 919262 - DNA, 33 bp, Homo sapien
gattaactttcaaagattactgtttctagacaa

SEQ ID NO: 919263 - DNA, 33 bp, Homo sapien
ataactaaagaagaaacgtcaaggctgagaaaa

SEQ ID NO: 919264 - DNA, 33 bp, Homo sapien
ataactaaagaagaaatgtcaaggctgagaaaa

SEQ ID NO: 919265 - DNA, 33 bp, Homo sapien
gaagtacactgaatacagagattaatttggaga

SEQ ID NO: 919266 - DNA, 33 bp, Homo sapien
gaagtacactgaatactgagattaatttggaga

SEQ ID NO: 919267 - DNA, 33 bp, Homo sapien
aataggatccaagctacgaagtggttgattaaa

SEQ ID NO: 919268 - DNA, 33 bp, Homo sapien
aataggatccaagctaggaagtggttgattaaa

SEQ ID NO: 919269 - DNA, 33 bp, Homo sapien
aagaagatttcatgccagagagatagatttaga

SEQ ID NO: 919270 - DNA, 33 bp, Homo sapien
aagaagatttcatgccggagagatagatttaga

SEQ ID NO: 919271 - DNA, 33 bp, Homo sapien
aaatgtcttctcaaaaataaagacatacatgtt

SEQ ID NO: 919272 - DNA, 33 bp, Homo sapien
aaatgtcttctcaaaactaaagacatacatgtt

SEQ ID NO: 919273 - DNA, 33 bp, Homo sapien
atgtggaacttttttacataccatacggacctt

SEQ ID NO: 919274 - DNA, 33 bp, Homo sapien
atgtggaacttttttatataccatacggacctt

SEQ ID NO: 919275 - DNA, 33 bp, Homo sapien
catagaccttacattccagttggtacagataga

SEQ ID NO: 919276 - DNA, 33 bp, Homo sapien
catagaccttacattctagttggtacagataga

SEQ ID NO: 919277 - DNA, 33 bp, Homo sapien
acatcttaagcatcaactcccaagtaaacttta

SEQ ID NO: 919278 - DNA, 33 bp, Homo sapien
acatcttaagcatcaagtcccaagtaaacttta

SEQ ID NO: 919279 - DNA, 33 bp, Homo sapien
aatataggcctgattgcatggtagcctgtccaa

SEQ ID NO: 919280 - DNA, 33 bp, Homo sapien
aatataggcctgattgtatggtagcctgtccaa

SEQ ID NO: 919281 - DNA, 33 bp, Homo sapien
acatataaattattaaaccaatgtgtctttgct

SEQ ID NO: 919282 - DNA, 33 bp, Homo sapien
acatataaattattaagccaatgtgtctttgct

SEQ ID NO: 919283 - DNA, 33 bp, Homo sapien
ctcccccatcatatcaaacaaggctcagaaagt

SEQ ID NO: 919284 - DNA, 33 bp, Homo sapien
ctcccccatcatatcagacaaggctcagaaagt

SEQ ID NO: 919285 - DNA, 33 bp, Homo sapien
aaaatactctttagagaaaaatccacaatgcat

SEQ ID NO: 919286 - DNA, 33 bp, Homo sapien
aaaatactctttagaggaaaatccacaatgcat

SEQ ID NO: 919287 - DNA, 33 bp, Homo sapien
gaatgaatgaactagaaataaatgcagtaactt

SEQ ID NO: 919288 - DNA, 33 bp, Homo sapien
gaatgaatgaactagagataaatgcagtaactt

SEQ ID NO: 919289 - DNA, 33 bp, Homo sapien
accgtccttttatccactgaaagccaaccaaac

SEQ ID NO: 919290 - DNA, 33 bp, Homo sapien
accgtccttttatccattgaaagccaaccaaac

SEQ ID NO: 919291 - DNA, 33 bp, Homo sapien
aaaatctgggtcttgtcaaatttggatgctcaa

SEQ ID NO: 919292 - DNA, 33 bp, Homo sapien
aaaatctgggtcttgtgaaatttggatgctcaa

SEQ ID NO: 919293 - DNA, 33 bp, Homo sapien
ctagtcctgcaaggtacaaagaataaaaatccc

SEQ ID NO: 919294 - DNA, 33 bp, Homo sapien
ctagtcctgcaaggtataaagaataaaaatccc

SEQ ID NO: 919295 - DNA, 33 bp, Homo sapien; identical to SEQ ID NO: 919293

SEQ ID NO: 919296 - DNA, 33 bp, Homo sapien; identical to SEQ ID NO: 919294

SEQ ID NO: 919297 - DNA, 33 bp, Homo sapien
tttttttagggcgtcaccgttgtattggggaaa

SEQ ID NO: 919298 - DNA, 33 bp, Homo sapien
tttttttagggcgtcatcgttgtattggggaaa

SEQ ID NO: 919299 - DNA, 33 bp, Homo sapien
tccttcagtgaaaaaagattgtagatagcacta

SEQ ID NO: 919300 - DNA, 33 bp, Homo sapien
tccttcagtgaaaaaatattgtagatagcacta

SEQ ID NO: 919301 - DNA, 33 bp, Homo sapien
aggttgctaagatctacgctaaggacgaatatt

SEQ ID NO: 919302 - DNA, 33 bp, Homo sapien
aggttgctaagatctatgctaaggacgaatatt

SEQ ID NO: 919303 - DNA, 33 bp, Homo sapien
aggagtgtctcctcatcaaggtggcagccacca

SEQ ID NO: 919304 - DNA, 33 bp, Homo sapien
aggagtgtctcctcatgaaggtggcagccacca

SEQ ID NO: 919305 - DNA, 33 bp, Homo sapien
gaatgatagtttccaaaaatgttttaatgaagc

SEQ ID NO: 919306 - DNA, 33 bp, Homo sapien
gaatgatagtttccaagaatgttttaatgaagc

SEQ ID NO: 919307 - DNA, 33 bp, Homo sapien
aatgtatacaactgatcagccctttattaagtt

SEQ ID NO: 919308 - DNA, 33 bp, Homo sapien
aatgtatacaactgattagccctttattaagtt

SEQ ID NO: 919309 - DNA, 33 bp, Homo sapien
tcagagcactttacagaaccatctagactgaaa

SEQ ID NO: 919310 - DNA, 33 bp, Homo sapien
tcagagcactttacaggaccatctagactgaaa

SEQ ID NO: 919311 - DNA, 33 bp, Homo sapien
gctcaaagagtttccacccaaaaagtggctatg

SEQ ID NO: 919312 - DNA, 33 bp, Homo sapien
gctcaaagagtttccatccaaaaagtggctatg

SEQ ID NO: 919313 - DNA, 33 bp, Homo sapien
ttctactctctccttcgacaaggttgctgacaa

SEQ ID NO: 919314 - DNA, 33 bp, Homo sapien
ttctactctctccttctacaaggttgctgacaa

SEQ ID NO: 919315 - DNA, 33 bp, Homo sapien
attgttgtaagttgcaatgaatcaagaaaccca

SEQ ID NO: 919316 - DNA, 33 bp, Homo sapien
attgttgtaagttgcagtgaatcaagaaaccca

SEQ ID NO: 919317 - DNA, 33 bp, Homo sapien
tagatcttgtttcctacgacagaataattaatg

SEQ ID NO: 919318 - DNA, 33 bp, Homo sapien
tagatcttgtttcctatgacagaataattaatg

SEQ ID NO: 919319 - DNA, 33 bp, Homo sapien
actctgatttttgttacgagatgtagtttggtc

SEQ ID NO: 919320 - DNA, 33 bp, Homo sapien
actctgatttttgttatgagatgtagtttggtc

SEQ ID NO: 919321 - DNA, 33 bp, Homo sapien
agcagttaccttcaacaatgacttctcacacat

SEQ ID NO: 919322 - DNA, 33 bp, Homo sapien
agcagttaccttcaacgatgacttctcacacat

SEQ ID NO: 919323 - DNA, 33 bp, Homo sapien
tatgtcaggtagcgggcatacaatgataggaaa

SEQ ID NO: 919324 - DNA, 33 bp, Homo sapien
tatgtcaggtagcggggatacaatgataggaaa

SEQ ID NO: 919325 - DNA, 33 bp, Homo sapien
tagaaaagcaagaaacaaacttttgaagtacag

SEQ ID NO: 919326 - DNA, 33 bp, Homo sapien
tagaaaagcaagaaacgaacttttgaagtacag

SEQ ID NO: 919327 - DNA, 33 bp, Homo sapien
attattaagaaattcaataaaacatcctgcgca

SEQ ID NO: 919328 - DNA, 33 bp, Homo sapien
attattaagaaattcagtaaaacatcctgcgca

SEQ ID NO: 919329 - DNA, 33 bp, Homo sapien
ttacagccttctcaccagaatgaaagatttctt

SEQ ID NO: 919330 - DNA, 33 bp, Homo sapien
ttacagccttctcaccggaatgaaagatttctt

SEQ ID NO: 919331 - DNA, 33 bp, Homo sapien
ctttctttccttccaaaggtgctgaaatgagac

SEQ ID NO: 919332 - DNA, 33 bp, Homo sapien
ctttctttccttccaagggtgctgaaatgagac

SEQ ID NO: 919333 - DNA, 33 bp, Homo sapien
gactgtagcttctcggaagagtttatgtgcttg

SEQ ID NO: 919334 - DNA, 33 bp, Homo sapien
gactgtagcttctcgggagagtttatgtgcttg

SEQ ID NO: 919335 - DNA, 33 bp, Homo sapien
aaaaaactgtttcctactagacagatagatctt

SEQ ID NO: 919336 - DNA, 33 bp, Homo sapien
aaaaaactgtttcctagtagacagatagatctt

SEQ ID NO: 919337 - DNA, 33 bp, Homo sapien
cccagctctccactaactaatggcagcagagat

SEQ ID NO: 919338 - DNA, 33 bp, Homo sapien
cccagctctccactaattaatggcagcagagat

SEQ ID NO: 919339 - DNA, 33 bp, Homo sapien
aggcccatctttgtgaggcctttgagtttatct

SEQ ID NO: 919340 - DNA, 33 bp, Homo sapien
aggcccatctttgtgatgcctttgagtttatct

SEQ ID NO: 919341 - DNA, 33 bp, Homo sapien
tcattcttcaatgccaccgcactaacggctcag

SEQ ID NO: 919342 - DNA, 33 bp, Homo sapien
tcattcttcaatgccatcgcactaacggctcag

SEQ ID NO: 919343 - DNA, 33 bp, Homo sapien
aaagagactgagaaagcacatacaagttttctc

SEQ ID NO: 919344 - DNA, 33 bp, Homo sapien
aaagagactgagaaagtacatacaagttttctc

SEQ ID NO: 919345 - DNA, 33 bp, Homo sapien
cgtcgggaataagtggcagatgttacaatcgaa

SEQ ID NO: 919346 - DNA, 33 bp, Homo sapien
cgtcgggaataagtgggagatgttacaatcgaa

SEQ ID NO: 919347 - DNA, 33 bp, Homo sapien
tataaactatacattacaatcactttcaacttt

SEQ ID NO: 919348 - DNA, 33 bp, Homo sapien
tataaactatacattagaatcactttcaacttt

SEQ ID NO: 919349 - DNA, 33 bp, Homo sapien
agtccatttattggaacctaaatttgaaccact

SEQ ID NO: 919350 - DNA, 33 bp, Homo sapien
agtccatttattggaagctaaatttgaaccact

SEQ ID NO: 919351 - DNA, 33 bp, Homo sapien
gaaaattgtgtggccacatccgaatggtgattt

SEQ ID NO: 919352 - DNA, 33 bp, Homo sapien
gaaaattgtgtggccatatccgaatggtgattt

SEQ ID NO: 919353 - DNA, 33 bp, Homo sapien
aatacaatacttgaaacacagtacagagtatat

SEQ ID NO: 919354 - DNA, 33 bp, Homo sapien
aatacaatacttgaaagacagtacagagtatat

SEQ ID NO: 919355 - DNA, 33 bp, Homo sapien
aacatactgtctctcaagaaggaatctaccctc

SEQ ID NO: 919356 - DNA, 33 bp, Homo sapien
aacatactgtctctcaggaaggaatctaccctc

SEQ ID NO: 919357 - DNA, 33 bp, Homo sapien
ctaatatctggtgaaaatggtcttgacactgaa

SEQ ID NO: 919358 - DNA, 33 bp, Homo sapien
ctaatatctggtgaaagtggtcttgacactgaa

SEQ ID NO: 919359 - DNA, 33 bp, Homo sapien
ttgacccattgtttctcaaatatcatttacaat

SEQ ID NO: 919360 - DNA, 33 bp, Homo sapien
ttgacccattgtttctgaaatatcatttacaat

SEQ ID NO: 919361 - DNA, 33 bp, Homo sapien
tgaagtacatagggaacattacagagtccaaaa

SEQ ID NO: 919362 - DNA, 33 bp, Homo sapien
tgaagtacatagggaatattacagagtccaaaa

SEQ ID NO: 919363 - DNA, 33 bp, Homo sapien
gttaattgcatttttacgtatttgtcatgtatt

SEQ ID NO: 919364 - DNA, 33 bp, Homo sapien
gttaattgcatttttatgtatttgtcatgtatt

SEQ ID NO: 919365 - DNA, 33 bp, Homo sapien
acccattagaggttaccagagaatgagggagtg

SEQ ID NO: 919366 - DNA, 33 bp, Homo sapien
acccattagaggttactagagaatgagggagtg

SEQ ID NO: 919367 - DNA, 33 bp, Homo sapien
catgctttaaaaaatgaagaagaatcatcttgt

SEQ ID NO: 919368 - DNA, 33 bp, Homo sapien
catgctttaaaaaatggagaagaatcatcttgt

SEQ ID NO: 919369 - DNA, 33 bp, Homo sapien
tgttgtctcaggagtaaggtattaataacgagg

SEQ ID NO: 919370 - DNA, 33 bp, Homo sapien
tgttgtctcaggagtatggtattaataacgagg

SEQ ID NO: 919371 - DNA, 33 bp, Homo sapien
ctggcttctccatcctaaagtgaactgggtata

SEQ ID NO: 919372 - DNA, 33 bp, Homo sapien
ctggcttctccatcctgaagtgaactgggtata

SEQ ID NO: 919373 - DNA, 33 bp, Homo sapien
aattcaggaggtaaagcagacactcattactca

SEQ ID NO: 919374 - DNA, 33 bp, Homo sapien
aattcaggaggtaaaggagacactcattactca

SEQ ID NO: 919375 - DNA, 33 bp, Homo sapien
ggtttagaagcctctcaattcactttgacatat

SEQ ID NO: 919376 - DNA, 33 bp, Homo sapien
ggtttagaagcctctcgattcactttgacatat

SEQ ID NO: 919377 - DNA, 33 bp, Homo sapien
attccactatttggacagctgaatataagcctt

SEQ ID NO: 919378 - DNA, 33 bp, Homo sapien
attccactatttggactgctgaatataagcctt

SEQ ID NO: 919379 - DNA, 33 bp, Homo sapien
cacgaagttgcgctctaaaagacatcttgacag

SEQ ID NO: 919380 - DNA, 33 bp, Homo sapien
cacgaagttgcgctctgaaagacatcttgacag

SEQ ID NO: 919381 - DNA, 33 bp, Homo sapien
agatgaaacgattaccgcgacttctgtctccca

SEQ ID NO: 919382 - DNA, 33 bp, Homo sapien
agatgaaacgattacctcgacttctgtctccca

SEQ ID NO: 919383 - DNA, 33 bp, Homo sapien
ttttctgatgaacaaaagttttcaatttttata

SEQ ID NO: 919384 - DNA, 33 bp, Homo sapien
ttttctgatgaacaaatgttttcaatttttata

SEQ ID NO: 919385 - DNA, 33 bp, Homo sapien
gtaggtggtttcccaaagatgatccaatgcaat

SEQ ID NO: 919386 - DNA, 33 bp, Homo sapien
gtaggtggtttcccaaggatgatccaatgcaat

SEQ ID NO: 919387 - DNA, 33 bp, Homo sapien
cttcctgccttaagaggaatctccagtatctct

SEQ ID NO: 919388 - DNA, 33 bp, Homo sapien
cttcctgccttaagagtaatctccagtatctct

SEQ ID NO: 919389 - DNA, 33 bp, Homo sapien
aaacattgcagaaaacacagttctgaatgcctg

SEQ ID NO: 919390 - DNA, 33 bp, Homo sapien
aaacattgcagaaaacgcagttctgaatgcctg

SEQ ID NO: 919391 - DNA, 33 bp, Homo sapien
aactgacaaacatgaaagataaagaatagaaat

SEQ ID NO: 919392 - DNA, 33 bp, Homo sapien
aactgacaaacatgaaggataaagaatagaaat

SEQ ID NO: 919393 - DNA, 33 bp, Homo sapien
aaagatgtctcttatgcatcaaaccaaacttaa

SEQ ID NO: 919394 - DNA, 33 bp, Homo sapien
aaagatgtctcttatgtatcaaaccaaacttaa

SEQ ID NO: 919395 - DNA, 33 bp, Homo sapien
ataaaactaacaggcacggaaatctcctacttt

SEQ ID NO: 919396 - DNA, 33 bp, Homo sapien
ataaaactaacaggcatggaaatctcctacttt

SEQ ID NO: 919397 - DNA, 33 bp, Homo sapien
tcttatctagatagaactctttgtaaacaccta

SEQ ID NO: 919398 - DNA, 33 bp, Homo sapien
tcttatctagatagaattctttgtaaacaccta

SEQ ID NO: 919399 - DNA, 33 bp, Homo sapien
tcatttatgtgtcagccaggctcaccatcctcc

SEQ ID NO: 919400 - DNA, 33 bp, Homo sapien
tcatttatgtgtcagcgaggctcaccatcctcc

SEQ ID NO: 919401 - DNA, 33 bp, Homo sapien
aagaggtttgacactacacttggcacatggtat

SEQ ID NO: 919402 - DNA, 33 bp, Homo sapien
aagaggtttgacactatacttggcacatggtat

SEQ ID NO: 919403 - DNA, 33 bp, Homo sapien
tgacctgaaaatcaaacaaacgaatcacatgct

SEQ ID NO: 919404 - DNA, 33 bp, Homo sapien
tgacctgaaaatcaaataaacgaatcacatgct

SEQ ID NO: 919405 - DNA, 33 bp, Homo sapien
tccctcaactggcagccatcttggtgaaatccc

SEQ ID NO: 919406 - DNA, 33 bp, Homo sapien
tccctcaactggcagctatcttggtgaaatccc

SEQ ID NO: 919407 - DNA, 33 bp, Homo sapien
gcaattctagaaatggacaacaccacattctgt

SEQ ID NO: 919408 - DNA, 33 bp, Homo sapien
gcaattctagaaatgggcaacaccacattctgt

SEQ ID NO: 919409 - DNA, 33 bp, Homo sapien
actactgagtcacacaatagtttaagacaattt

SEQ ID NO: 919410 - DNA, 33 bp, Homo sapien
actactgagtcacacagtagtttaagacaattt

SEQ ID NO: 919411 - DNA, 33 bp, Homo sapien
taagctacacatgatacctctggaaattccatt

SEQ ID NO: 919412 - DNA, 33 bp, Homo sapien
taagctacacatgatatctctggaaattccatt

SEQ ID NO: 919413 - DNA, 33 bp, Homo sapien
ctattaagcattcttcaagaagctgaaatgtta

SEQ ID NO: 919414 - DNA, 33 bp, Homo sapien
ctattaagcattcttcgagaagctgaaatgtta

SEQ ID NO: 919415 - DNA, 33 bp, Homo sapien
ctctgtgcgaggtagacgtaaataatttaaaag

SEQ ID NO: 919416 - DNA, 33 bp, Homo sapien
ctctgtgcgaggtagatgtaaataatttaaaag

SEQ ID NO: 919417 - DNA, 33 bp, Homo sapien
aaggaaggataagctggaactgagatggacgct

SEQ ID NO: 919418 - DNA, 33 bp, Homo sapien
aaggaaggataagctgtaactgagatggacgct

SEQ ID NO: 919419 - DNA, 33 bp, Homo sapien
tgcggcaggcatttgacaggtattggctgaatg

SEQ ID NO: 919420 - DNA, 33 bp, Homo sapien
tgcggcaggcatttgataggtattggctgaatg

SEQ ID NO: 919421 - DNA, 33 bp, Homo sapien
ggtttatatcctgaatgatccgctcctccatac

SEQ ID NO: 919422 - DNA, 33 bp, Homo sapien
ggtttatatcctgaattatccgctcctccatac

SEQ ID NO: 919423 - DNA, 33 bp, Homo sapien
aaaaagcacctaaggacagtttcgggaaatctc

SEQ ID NO: 919424 - DNA, 33 bp, Homo sapien
aaaaagcacctaaggagagtttcgggaaatctc

SEQ ID NO: 919425 - DNA, 33 bp, Homo sapien
cccgcctcgtataatcccacaatgctctgagca

SEQ ID NO: 919426 - DNA, 33 bp, Homo sapien
cccgcctcgtataatctcacaatgctctgagca

SEQ ID NO: 919427 - DNA, 33 bp, Homo sapien
agaaagcctacctagcaaagaaatacaacctag

SEQ ID NO: 919428 - DNA, 33 bp, Homo sapien
agaaagcctacctagcgaagaaatacaacctag

SEQ ID NO: 919429 - DNA, 33 bp, Homo sapien
cagtagggaagttagagaattttatttctgctt

SEQ ID NO: 919430 - DNA, 33 bp, Homo sapien
cagtagggaagttagataattttatttctgctt

SEQ ID NO: 919431 - DNA, 33 bp, Homo sapien
atgtgtatgtatcctaacaaaaaatataacagc

SEQ ID NO: 919432 - DNA, 33 bp, Homo sapien
atgtgtatgtatcctagcaaaaaatataacagc

SEQ ID NO: 919433 - DNA, 33 bp, Homo sapien
aggaataaatcattcaatatgtcaaattctaaa

SEQ ID NO: 919434 - DNA, 33 bp, Homo sapien
aggaataaatcattcagtatgtcaaattctaaa

SEQ ID NO: 919435 - DNA, 33 bp, Homo sapien
attctacatcctattaagtaaaccacagatggt

SEQ ID NO: 919436 - DNA, 33 bp, Homo sapien
attctacatcctattaggtaaaccacagatggt

SEQ ID NO: 919437 - DNA, 33 bp, Homo sapien
tagattagatgctagggatagaaaaatcaaagg

SEQ ID NO: 919438 - DNA, 33 bp, Homo sapien
tagattagatgctaggtatagaaaaatcaaagg

SEQ ID NO: 919439 - DNA, 33 bp, Homo sapien
aggacaaaggtaacaccaccagcagctgaaatt

SEQ ID NO: 919440 - DNA, 33 bp, Homo sapien
aggacaaaggtaacactaccagcagctgaaatt

SEQ ID NO: 919441 - DNA, 33 bp, Homo sapien
ggcataaactacctaccggttctcttctgattt

SEQ ID NO: 919442 - DNA, 33 bp, Homo sapien
ggcataaactacctactggttctcttctgattt

SEQ ID NO: 919443 - DNA, 33 bp, Homo sapien
caatgtttggcatccaataacacattattagac

SEQ ID NO: 919444 - DNA, 33 bp, Homo sapien
caatgtttggcatccagtaacacattattagac

SEQ ID NO: 919445 - DNA, 33 bp, Homo sapien
tggcagccaagagacacgaggaatttaccctag

SEQ ID NO: 919446 - DNA, 33 bp, Homo sapien
tggcagccaagagacatgaggaatttaccctag

SEQ ID NO: 919447 - DNA, 33 bp, Homo sapien
tacgtttggaaggacactattcattcatataca

SEQ ID NO: 919448 - DNA, 33 bp, Homo sapien
tacgtttggaaggacattattcattcatataca

SEQ ID NO: 919449 - DNA, 33 bp, Homo sapien
ggggtgttcgccacaaattcgcttgtcgtctcc

SEQ ID NO: 919450 - DNA, 33 bp, Homo sapien
ggggtgttcgccacaatttcgcttgtcgtctcc

SEQ ID NO: 919451 - DNA, 33 bp, Homo sapien
gaggtcctgaaatcagcacgtagatccttaaac

SEQ ID NO: 919452 - DNA, 33 bp, Homo sapien
gaggtcctgaaatcagtacgtagatccttaaac

SEQ ID NO: 919453 - DNA, 33 bp, Homo sapien
caccaagcacatcacacctctgagcctttgcac

SEQ ID NO: 919454 - DNA, 33 bp, Homo sapien
caccaagcacatcacatctctgagcctttgcac

SEQ ID NO: 919455 - DNA, 33 bp, Homo sapien
acccagtagatatttaccgaatgaatgaataaa

SEQ ID NO: 919456 - DNA, 33 bp, Homo sapien
acccagtagatatttatcgaatgaatgaataaa

SEQ ID NO: 919457 - DNA, 33 bp, Homo sapien
caaaaccacctgtgaactaagtactattattat

SEQ ID NO: 919458 - DNA, 33 bp, Homo sapien
caaaaccacctgtgaagtaagtactattattat

SEQ ID NO: 919459 - DNA, 33 bp, Homo sapien
ctggaaacccagaagactagggtgggatttctt

SEQ ID NO: 919460 - DNA, 33 bp, Homo sapien
ctggaaacccagaagagtagggtgggatttctt

SEQ ID NO: 919461 - DNA, 33 bp, Homo sapien
cttgtatgtgcagcaaatacattaaaagtaaga

SEQ ID NO: 919462 - DNA, 33 bp, Homo sapien
cttgtatgtgcagcaagtacattaaaagtaaga

SEQ ID NO: 919463 - DNA, 33 bp, Homo sapien
tcaatgacaaattggacgtggaagaaagatgag

SEQ ID NO: 919464 - DNA, 33 bp, Homo sapien
tcaatgacaaattggatgtggaagaaagatgag

SEQ ID NO: 919465 - DNA, 33 bp, Homo sapien
tcttcctatttttcagaatcaggctggttgtct

SEQ ID NO: 919466 - DNA, 33 bp, Homo sapien
tcttcctatttttcagtatcaggctggttgtct

SEQ ID NO: 919467 - DNA, 33 bp, Homo sapien
tcaaaaatgtaatgcccagaactgaacacagaa

SEQ ID NO: 919468 - DNA, 33 bp, Homo sapien
tcaaaaatgtaatgcctagaactgaacacagaa

SEQ ID NO: 919469 - DNA, 33 bp, Homo sapien
agatcaatgattattacgtgaccacagttaggc

SEQ ID NO: 919470 - DNA, 33 bp, Homo sapien
agatcaatgattattatgtgaccacagttaggc

SEQ ID NO: 919471 - DNA, 33 bp, Homo sapien
gtgaggaaccacatccagccctttcttgccatc

SEQ ID NO: 919472 - DNA, 33 bp, Homo sapien
gtgaggaaccacatccggccctttcttgccatc

SEQ ID NO: 919473 - DNA, 33 bp, Homo sapien
cattgcatcctcgcacaacctgttctgtgtgtg

SEQ ID NO: 919474 - DNA, 33 bp, Homo sapien
cattgcatcctcgcacgacctgttctgtgtgtg

SEQ ID NO: 919475 - DNA, 33 bp, Homo sapien
ctgtgcaatgtaattcgcatactttcctttaat

SEQ ID NO: 919476 - DNA, 33 bp, Homo sapien
ctgtgcaatgtaattctcatactttcctttaat

SEQ ID NO: 919477 - DNA, 33 bp, Homo sapien
aatgagaggaaaccacacctaaagaattaaagg

SEQ ID NO: 919478 - DNA, 33 bp, Homo sapien
aatgagaggaaaccacgcctaaagaattaaagg

SEQ ID NO: 919479 - DNA, 33 bp, Homo sapien
atcttaatccaatccaactaatcttgtcctcct

SEQ ID NO: 919480 - DNA, 33 bp, Homo sapien
atcttaatccaatccagctaatcttgtcctcct

SEQ ID NO: 919481 - DNA, 33 bp, Homo sapien
agcccttaaatgtacacatctgttgcaataagc

SEQ ID NO: 919482 - DNA, 33 bp, Homo sapien
agcccttaaatgtacatatctgttgcaataagc

SEQ ID NO: 919483 - DNA, 33 bp, Homo sapien
cacaacctaactagcacggtaatcacttccttc

SEQ ID NO: 919484 - DNA, 33 bp, Homo sapien
cacaacctaactagcatggtaatcacttccttc

SEQ ID NO: 919485 - DNA, 33 bp, Homo sapien
tggtacaaggagaaagaagacttcaagaaggag

SEQ ID NO: 919486 - DNA, 33 bp, Homo sapien
tggtacaaggagaaaggagacttcaagaaggag

SEQ ID NO: 919487 - DNA, 33 bp, Homo sapien
atcctctaattgggggacatattcagcacttcc

SEQ ID NO: 919488 - DNA, 33 bp, Homo sapien
atcctctaattggggggcatattcagcacttcc

SEQ ID NO: 919489 - DNA, 33 bp, Homo sapien
acacaatggaccatccacggaagtcagaatgct

SEQ ID NO: 919490 - DNA, 33 bp, Homo sapien
acacaatggaccatccgcggaagtcagaatgct

SEQ ID NO: 919491 - DNA, 33 bp, Homo sapien
ggccacccaagtcagccgcggaaacccacttgg

SEQ ID NO: 919492 - DNA, 33 bp, Homo sapien
ggccacccaagtcagctgcggaaacccacttgg

SEQ ID NO: 919493 - DNA, 33 bp, Homo sapien
atcttgggagggagaaccatacaagggaaaacc

SEQ ID NO: 919494 - DNA, 33 bp, Homo sapien
atcttgggagggagaatcatacaagggaaaacc

SEQ ID NO: 919495 - DNA, 33 bp, Homo sapien
atcatctgttattttccacttctgtccaacgca

SEQ ID NO: 919496 - DNA, 33 bp, Homo sapien
atcatctgttattttctacttctgtccaacgca

SEQ ID NO: 919497 - DNA, 33 bp, Homo sapien
atggaggagttgaaagaagcatagaggtgagtc

SEQ ID NO: 919498 - DNA, 33 bp, Homo sapien
atggaggagttgaaagtagcatagaggtgagtc

SEQ ID NO: 919499 - DNA, 33 bp, Homo sapien
agtcattcaacaggaaatattttgcaataagaa

SEQ ID NO: 919500 - DNA, 33 bp, Homo sapien
agtcattcaacaggaattattttgcaataagaa

SEQ ID NO: 919501 - DNA, 33 bp, Homo sapien
aggtggaatgccagccaagatgccatttttgag

SEQ ID NO: 919502 - DNA, 33 bp, Homo sapien
aggtggaatgccagccgagatgccatttttgag

SEQ ID NO: 919503 - DNA, 33 bp, Homo sapien
atatcaatacttacacgaaacataaatggatta

SEQ ID NO: 919504 - DNA, 33 bp, Homo sapien
atatcaatacttacactaaacataaatggatta

SEQ ID NO: 919505 - DNA, 33 bp, Homo sapien
tctgtatcgttctgtaaatcaaaatttccattt

SEQ ID NO: 919506 - DNA, 33 bp, Homo sapien
tctgtatcgttctgtagatcaaaatttccattt

SEQ ID NO: 919507 - DNA, 33 bp, Homo sapien
aatgtacagtagattacattacagttaaccata

SEQ ID NO: 919508 - DNA, 33 bp, Homo sapien
aatgtacagtagattatattacagttaaccata

SEQ ID NO: 919509 - DNA, 33 bp, Homo sapien
acttggtttcttccaagccctgaagctaacatg

SEQ ID NO: 919510 - DNA, 33 bp, Homo sapien
acttggtttcttccaatccctgaagctaacatg

SEQ ID NO: 919511 - DNA, 33 bp, Homo sapien
aatatccacagcttaactcactgagaaactcac

SEQ ID NO: 919512 - DNA, 33 bp, Homo sapien
aatatccacagcttaagtcactgagaaactcac

SEQ ID NO: 919513 - DNA, 33 bp, Homo sapien
tagttcttaaattccaagctctagaatgctgct

SEQ ID NO: 919514 - DNA, 33 bp, Homo sapien
tagttcttaaattccaggctctagaatgctgct

SEQ ID NO: 919515 - DNA, 33 bp, Homo sapien
agtgacttctgtctacactacagatgaactgaa

SEQ ID NO: 919516 - DNA, 33 bp, Homo sapien
agtgacttctgtctacgctacagatgaactgaa

SEQ ID NO: 919517 - DNA, 33 bp, Homo sapien
ttttatgatcagatcacgagagttctttgcctt

SEQ ID NO: 919518 - DNA, 33 bp, Homo sapien
ttttatgatcagatcatgagagttctttgcctt

SEQ ID NO: 919519 - DNA, 33 bp, Homo sapien
ttacctggtaatctcaatgaagagagaactaac

SEQ ID NO: 919520 - DNA, 33 bp, Homo sapien
ttacctggtaatctcagtgaagagagaactaac

SEQ ID NO: 919521 - DNA, 33 bp, Homo sapien
tttcaaagttaatgaacctcagcaggacagatt

SEQ ID NO: 919522 - DNA, 33 bp, Homo sapien
tttcaaagttaatgaatctcagcaggacagatt

SEQ ID NO: 919523 - DNA, 33 bp, Homo sapien
gaatattcagattctcaagtgctacctgaaaga

SEQ ID NO: 919524 - DNA, 33 bp, Homo sapien
gaatattcagattctccagtgctacctgaaaga

SEQ ID NO: 919525 - DNA, 33 bp, Homo sapien
gcctagtacattattcaagtgaatgggcaatcc

SEQ ID NO: 919526 - DNA, 33 bp, Homo sapien
gcctagtacattattcgagtgaatgggcaatcc

SEQ ID NO: 919527 - DNA, 33 bp, Homo sapien
tagatataaactcttacctgctggagtaacttc

SEQ ID NO: 919528 - DNA, 33 bp, Homo sapien
tagatataaactcttatctgctggagtaacttc

SEQ ID NO: 919529 - DNA, 33 bp, Homo sapien
cacatactcaaatacacaaagttaaagatgatc

SEQ ID NO: 919530 - DNA, 33 bp, Homo sapien
cacatactcaaatacataaagttaaagatgatc

SEQ ID NO: 919531 - DNA, 33 bp, Homo sapien
gggaatagcatcaaaactggtaaagaaggcaag

SEQ ID NO: 919532 - DNA, 33 bp, Homo sapien
gggaatagcatcaaaagtggtaaagaaggcaag

SEQ ID NO: 919533 - DNA, 33 bp, Homo sapien
taattagagataacgacgtgaactgatttagga

SEQ ID NO: 919534 - DNA, 33 bp, Homo sapien
taattagagataacgatgtgaactgatttagga

SEQ ID NO: 919535 - DNA, 33 bp, Homo sapien
taaaacaatctttctccaatcaacgaaaaggaa

SEQ ID NO: 919536 - DNA, 33 bp, Homo sapien
taaaacaatctttctctaatcaacgaaaaggaa

SEQ ID NO: 919537 - DNA, 33 bp, Homo sapien
ccaacttggaattaagaaactagcacccgttaa

SEQ ID NO: 919538 - DNA, 33 bp, Homo sapien
ccaacttggaattaagtaactagcacccgttaa

SEQ ID NO: 919539 - DNA, 33 bp, Homo sapien
ttcccctcactttacaatctttgctaaataaat

SEQ ID NO: 919540 - DNA, 33 bp, Homo sapien
ttcccctcactttacagtctttgctaaataaat

SEQ ID NO: 919541 - DNA, 33 bp, Homo sapien
ccttctttcttcttgacaggccctcatgccttg

SEQ ID NO: 919542 - DNA, 33 bp, Homo sapien
ccttctttcttcttgataggccctcatgccttg

SEQ ID NO: 919543 - DNA, 33 bp, Homo sapien
atcatgtggaaggagacagtaagctctctagtg

SEQ ID NO: 919544 - DNA, 33 bp, Homo sapien
atcatgtggaaggagatagtaagctctctagtg

SEQ ID NO: 919545 - DNA, 33 bp, Homo sapien
catcagattgtgttgaaagcaatgaagaaatta

SEQ ID NO: 919546 - DNA, 33 bp, Homo sapien
catcagattgtgttgagagcaatgaagaaatta

SEQ ID NO: 919547 - DNA, 33 bp, Homo sapien
tagtccaatataacataagagtttttgcattag

SEQ ID NO: 919548 - DNA, 33 bp, Homo sapien
tagtccaatataacatgagagtttttgcattag

SEQ ID NO: 919549 - DNA, 33 bp, Homo sapien
tatagtattcttattccctcctattacagctca

SEQ ID NO: 919550 - DNA, 33 bp, Homo sapien
tatagtattcttattctctcctattacagctca

SEQ ID NO: 919551 - DNA, 33 bp, Homo sapien
gtcataacaatggttacgtgactacagttatac

SEQ ID NO: 919552 - DNA, 33 bp, Homo sapien
gtcataacaatggttatgtgactacagttatac

SEQ ID NO: 919553 - DNA, 33 bp, Homo sapien
attagaacacactaaaagctgcactatagttca

SEQ ID NO: 919554 - DNA, 33 bp, Homo sapien
attagaacacactaaacgctgcactatagttca

SEQ ID NO: 919555 - DNA, 33 bp, Homo sapien
agtatcagtctagccaatgatgaactctggaat

SEQ ID NO: 919556 - DNA, 33 bp, Homo sapien
agtatcagtctagccagtgatgaactctggaat

SEQ ID NO: 919557 - DNA, 33 bp, Homo sapien
ctaattttcagataaacacaattgaaaagctga

SEQ ID NO: 919558 - DNA, 33 bp, Homo sapien
ctaattttcagataaatacaattgaaaagctga

SEQ ID NO: 919559 - DNA, 33 bp, Homo sapien
tacgctaaagtgtagtcacaccatcaggtaacc

SEQ ID NO: 919560 - DNA, 33 bp, Homo sapien
tacgctaaagtgtagtgacaccatcaggtaacc

SEQ ID NO: 919561 - DNA, 33 bp, Homo sapien
ttaagcacccaagcaaaatgctatcctttccat

SEQ ID NO: 919562 - DNA, 33 bp, Homo sapien
ttaagcacccaagcaagatgctatcctttccat

SEQ ID NO: 919563 - DNA, 33 bp, Homo sapien
atgattggtatttgagaaaagagtgtgcttaaa

SEQ ID NO: 919564 - DNA, 33 bp, Homo sapien
atgattggtatttgaggaaagagtgtgcttaaa

SEQ ID NO: 919565 - DNA, 33 bp, Homo sapien
aataacaagtgaccaacgttttgagaagtggac

SEQ ID NO: 919566 - DNA, 33 bp, Homo sapien
aataacaagtgaccaatgttttgagaagtggac

SEQ ID NO: 919567 - DNA, 33 bp, Homo sapien
gatcttctagttggaacaaaattagttaccaat

SEQ ID NO: 919568 - DNA, 33 bp, Homo sapien
gatcttctagttggaagaaaattagttaccaat

SEQ ID NO: 919569 - DNA, 33 bp, Homo sapien
cttacatttgccgttaaagagcacatgagtagt

SEQ ID NO: 919570 - DNA, 33 bp, Homo sapien
cttacatttgccgttacagagcacatgagtagt

SEQ ID NO: 919571 - DNA, 33 bp, Homo sapien
ttgcttctgatttgagcctaagtgttaaggtct

SEQ ID NO: 919572 - DNA, 33 bp, Homo sapien
ttgcttctgatttgagtctaagtgttaaggtct

SEQ ID NO: 919573 - DNA, 33 bp, Homo sapien
gcttcagttacgtgcaatgattcagtgttgctc

SEQ ID NO: 919574 - DNA, 33 bp, Homo sapien
gcttcagttacgtgcagtgattcagtgttgctc

SEQ ID NO: 919575 - DNA, 33 bp, Homo sapien
tgtcggtatgtttcaccaaaaattgcttcaagt

SEQ ID NO: 919576 - DNA, 33 bp, Homo sapien
tgtcggtatgtttcactaaaaattgcttcaagt

SEQ ID NO: 919577 - DNA, 33 bp, Homo sapien
cattgctgggaaaagacaactggaagaacatat

SEQ ID NO: 919578 - DNA, 33 bp, Homo sapien
cattgctgggaaaagataactggaagaacatat

SEQ ID NO: 919579 - DNA, 33 bp, Homo sapien
aagccccatattcccaataactgaattatctcc

SEQ ID NO: 919580 - DNA, 33 bp, Homo sapien
aagccccatattcccagtaactgaattatctcc

SEQ ID NO: 919581 - DNA, 33 bp, Homo sapien
ctgtgtgacttgagcaacttaatttagtctgtg

SEQ ID NO: 919582 - DNA, 33 bp, Homo sapien
ctgtgtgacttgagcatcttaatttagtctgtg

SEQ ID NO: 919583 - DNA, 33 bp, Homo sapien
aagcaagctatcctagaaaggctcacagactaa

SEQ ID NO: 919584 - DNA, 33 bp, Homo sapien
aagcaagctatcctagcaaggctcacagactaa

SEQ ID NO: 919585 - DNA, 33 bp, Homo sapien
tttgctttcttaggaaccctccattacatcaag

SEQ ID NO: 919586 - DNA, 33 bp, Homo sapien
tttgctttcttaggaatcctccattacatcaag

SEQ ID NO: 919587 - DNA, 33 bp, Homo sapien
catttttatagctgcaatcatctttttcaggtc

SEQ ID NO: 919588 - DNA, 33 bp, Homo sapien
catttttatagctgcagtcatctttttcaggtc

SEQ ID NO: 919589 - DNA, 33 bp, Homo sapien
agggtaaaaacagatacgcaaggaaaaacaaag

SEQ ID NO: 919590 - DNA, 33 bp, Homo sapien
agggtaaaaacagatatgcaaggaaaaacaaag

SEQ ID NO: 919591 - DNA, 33 bp, Homo sapien
ttcatagagcattccaacaagctagaatacctc

SEQ ID NO: 919592 - DNA, 33 bp, Homo sapien
ttcatagagcattccagcaagctagaatacctc

SEQ ID NO: 919593 - DNA, 33 bp, Homo sapien
agaaactgaaacaatcaagtcctattttctata

SEQ ID NO: 919594 - DNA, 33 bp, Homo sapien
agaaactgaaacaatcgagtcctattttctata

SEQ ID NO: 919595 - DNA, 33 bp, Homo sapien
gcaattaatagagtaacagatttgttggaaaag

SEQ ID NO: 919596 - DNA, 33 bp, Homo sapien
gcaattaatagagtaagagatttgttggaaaag

SEQ ID NO: 919597 - DNA, 33 bp, Homo sapien
atttattgtcctagaaagatgtgttcttaaaga

SEQ ID NO: 919598 - DNA, 33 bp, Homo sapien
atttattgtcctagaaggatgtgttcttaaaga

SEQ ID NO: 919599 - DNA, 33 bp, Homo sapien
ttattaacactctggaaccattagaagccaaat

SEQ ID NO: 919600 - DNA, 33 bp, Homo sapien
ttattaacactctggagccattagaagccaaat

SEQ ID NO: 919601 - DNA, 33 bp, Homo sapien
ataaattatttaaacactggattgataaataaa

SEQ ID NO: 919602 - DNA, 33 bp, Homo sapien
ataaattatttaaacagtggattgataaataaa

SEQ ID NO: 919603 - DNA, 33 bp, Homo sapien
gtgatgattctagttgaaatataagatctaaga

SEQ ID NO: 919604 - DNA, 33 bp, Homo sapien
gtgatgattctagttggaatataagatctaaga

SEQ ID NO: 919605 - DNA, 33 bp, Homo sapien
cacggttcagtaaaaacgttagaaactgaagta

SEQ ID NO: 919606 - DNA, 33 bp, Homo sapien
cacggttcagtaaaaatgttagaaactgaagta

SEQ ID NO: 919607 - DNA, 33 bp, Homo sapien
ctttaagttactgaaacgaatggtgaattctgc

SEQ ID NO: 919608 - DNA, 33 bp, Homo sapien
ctttaagttactgaaatgaatggtgaattctgc

SEQ ID NO: 919609 - DNA, 33 bp, Homo sapien
aacaatcctagctgataaagaggtatatgagtg

SEQ ID NO: 919610 - DNA, 33 bp, Homo sapien
aacaatcctagctgattaagaggtatatgagtg

SEQ ID NO: 919611 - DNA, 33 bp, Homo sapien
aatcaggaatgatcccaactttctcattcatac

SEQ ID NO: 919612 - DNA, 33 bp, Homo sapien
aatcaggaatgatcccgactttctcattcatac

SEQ ID NO: 919613 - DNA, 33 bp, Homo sapien
ttgttgattgggaatacactacctccatatatt

SEQ ID NO: 919614 - DNA, 33 bp, Homo sapien
ttgttgattgggaatatactacctccatatatt

SEQ ID NO: 919615 - DNA, 33 bp, Homo sapien
acagtgtgacacacaacgtaagagaaataattc

SEQ ID NO: 919616 - DNA, 33 bp, Homo sapien
acagtgtgacacacaatgtaagagaaataattc

SEQ ID NO: 919617 - DNA, 33 bp, Homo sapien
ctctcaacaaccctcacagaaaagcaggtttgc

SEQ ID NO: 919618 - DNA, 33 bp, Homo sapien
ctctcaacaaccctcagagaaaagcaggtttgc

SEQ ID NO: 919619 - DNA, 33 bp, Homo sapien
aacatttaaaactacaaatagcactgcagcttg

SEQ ID NO: 919620 - DNA, 33 bp, Homo sapien
aacatttaaaactacagatagcactgcagcttg

SEQ ID NO: 919621 - DNA, 33 bp, Homo sapien
accttgaattgagagcagaaagagaagtgtaaa

SEQ ID NO: 919622 - DNA, 33 bp, Homo sapien
accttgaattgagagcggaaagagaagtgtaaa

SEQ ID NO: 919623 - DNA, 33 bp, Homo sapien
ctagaaagcctggaaacgccacttccttgtgat

SEQ ID NO: 919624 - DNA, 33 bp, Homo sapien
ctagaaagcctggaaatgccacttccttgtgat

SEQ ID NO: 919625 - DNA, 33 bp, Homo sapien
acatgggactactactcaaataaatggaaatat

SEQ ID NO: 919626 - DNA, 33 bp, Homo sapien
acatgggactactactgaaataaatggaaatat

SEQ ID NO: 919627 - DNA, 33 bp, Homo sapien
cttcagaactcctacaaattttctgcttataag

SEQ ID NO: 919628 - DNA, 33 bp, Homo sapien
cttcagaactcctacagattttctgcttataag

SEQ ID NO: 919629 - DNA, 33 bp, Homo sapien
aaagtctttgcataccagcagggatttgagata

SEQ ID NO: 919630 - DNA, 33 bp, Homo sapien
aaagtctttgcataccggcagggatttgagata

SEQ ID NO: 919631 - DNA, 33 bp, Homo sapien
tgttaataaagctacacactcaaaataccttaa

SEQ ID NO: 919632 - DNA, 33 bp, Homo sapien
tgttaataaagctacatactcaaaataccttaa

SEQ ID NO: 919633 - DNA, 33 bp, Homo sapien
aaccaacaatgatttacgtttctcagtattact

SEQ ID NO: 919634 - DNA, 33 bp, Homo sapien
aaccaacaatgatttaggtttctcagtattact

SEQ ID NO: 919635 - DNA, 33 bp, Homo sapien
ctataccatctagaaacgactctttgggtgtaa

SEQ ID NO: 919636 - DNA, 33 bp, Homo sapien
ctataccatctagaaatgactctttgggtgtaa

SEQ ID NO: 919637 - DNA, 33 bp, Homo sapien
ttcagattctgttcgccgccctaggattcttcc

SEQ ID NO: 919638 - DNA, 33 bp, Homo sapien
ttcagattctgttcgctgccctaggattcttcc

SEQ ID NO: 919639 - DNA, 33 bp, Homo sapien
ttgcccttctaagtctaaatttaacaaaaccag

SEQ ID NO: 919640 - DNA, 33 bp, Homo sapien
ttgcccttctaagtctcaatttaacaaaaccag

SEQ ID NO: 919641 - DNA, 33 bp, Homo sapien
accctttagcaattgtcacaaaactctgtctct

SEQ ID NO: 919642 - DNA, 33 bp, Homo sapien
accctttagcaattgttacaaaactctgtctct

SEQ ID NO: 919643 - DNA, 33 bp, Homo sapien
attgctaaagggtatcagacaagaacaatatct

SEQ ID NO: 919644 - DNA, 33 bp, Homo sapien
attgctaaagggtatccgacaagaacaatatct

SEQ ID NO: 919645 - DNA, 33 bp, Homo sapien
tatgataagacatttaacctcactaataatcaa

SEQ ID NO: 919646 - DNA, 33 bp, Homo sapien
tatgataagacatttagcctcactaataatcaa

SEQ ID NO: 919647 - DNA, 33 bp, Homo sapien
tccttatcccacttgacctactggtaacatccc

SEQ ID NO: 919648 - DNA, 33 bp, Homo sapien
tccttatcccacttgatctactggtaacatccc

SEQ ID NO: 919649 - DNA, 33 bp, Homo sapien
aatgttaacatgaatgaaaatattatctactgt

SEQ ID NO: 919650 - DNA, 33 bp, Homo sapien
aatgttaacatgaatggaaatattatctactgt

SEQ ID NO: 919651 - DNA, 33 bp, Homo sapien
gtagatgttcagtaaggcaaaattaatagaact

SEQ ID NO: 919652 - DNA, 33 bp, Homo sapien
gtagatgttcagtaagtcaaaattaatagaact

SEQ ID NO: 919653 - DNA, 33 bp, Homo sapien
tcaggaactgctgatacgattctggaggttcaa

SEQ ID NO: 919654 - DNA, 33 bp, Homo sapien
tcaggaactgctgatatgattctggaggttcaa

SEQ ID NO: 919655 - DNA, 33 bp, Homo sapien
catcatttgtgaagaccccactctgtttccaga

SEQ ID NO: 919656 - DNA, 33 bp, Homo sapien
catcatttgtgaagactccactctgtttccaga

SEQ ID NO: 919657 - DNA, 33 bp, Homo sapien
tcatgtcttgatctaccaacttagatatgcccc

SEQ ID NO: 919658 - DNA, 33 bp, Homo sapien
tcatgtcttgatctactaacttagatatgcccc

SEQ ID NO: 919659 - DNA, 33 bp, Homo sapien
aaagttattaaatagacacaatggcatcagcct

SEQ ID NO: 919660 - DNA, 33 bp, Homo sapien
aaagttattaaatagatacaatggcatcagcct

SEQ ID NO: 919661 - DNA, 33 bp, Homo sapien
tacttcccttcaagacccctatgtgaatctaga

SEQ ID NO: 919662 - DNA, 33 bp, Homo sapien
tacttcccttcaagactcctatgtgaatctaga

SEQ ID NO: 919663 - DNA, 33 bp, Homo sapien
tctacgtggcaaggaactgtggcctcctaccaa

SEQ ID NO: 919664 - DNA, 33 bp, Homo sapien
tctacgtggcaaggaagtgtggcctcctaccaa

SEQ ID NO: 919665 - DNA, 33 bp, Homo sapien
tcagtgggtctatggactaatgagcttatttct

SEQ ID NO: 919666 - DNA, 33 bp, Homo sapien
tcagtgggtctatggattaatgagcttatttct

SEQ ID NO: 919667 - DNA, 33 bp, Homo sapien
aactcctagggcacaagtactgtttacctatgg

SEQ ID NO: 919668 - DNA, 33 bp, Homo sapien
aactcctagggcacaattactgtttacctatgg

SEQ ID NO: 919669 - DNA, 33 bp, Homo sapien
attcaggttagattcaccctggctaaatttcag

SEQ ID NO: 919670 - DNA, 33 bp, Homo sapien
attcaggttagattcagcctggctaaatttcag

SEQ ID NO: 919671 - DNA, 33 bp, Homo sapien
catcacagttagcttgaattaaaaggatcagag

SEQ ID NO: 919672 - DNA, 33 bp, Homo sapien
catcacagttagcttggattaaaaggatcagag

SEQ ID NO: 919673 - DNA, 33 bp, Homo sapien
actggtatgctacaaagatagctttttagagga

SEQ ID NO: 919674 - DNA, 33 bp, Homo sapien
actggtatgctacaaatatagctttttagagga

SEQ ID NO: 919675 - DNA, 33 bp, Homo sapien
cagtagcttttctacacagtttagcattttttc

SEQ ID NO: 919676 - DNA, 33 bp, Homo sapien
cagtagcttttctacatagtttagcattttttc

SEQ ID NO: 919677 - DNA, 33 bp, Homo sapien
atcaagttgaattacaataacacttttagcctg

SEQ ID NO: 919678 - DNA, 33 bp, Homo sapien
atcaagttgaattacagtaacacttttagcctg

SEQ ID NO: 919679 - DNA, 33 bp, Homo sapien
ttttatttcagatgaactattttccttatgata

SEQ ID NO: 919680 - DNA, 33 bp, Homo sapien
ttttatttcagatgaattattttccttatgata

SEQ ID NO: 919681 - DNA, 33 bp, Homo sapien
tgaggcacttcaagcagtataattttggtcttg

SEQ ID NO: 919682 - DNA, 33 bp, Homo sapien
tgaggcacttcaagcattataattttggtcttg

SEQ ID NO: 919683 - DNA, 33 bp, Homo sapien
aaataaatagcttatccgaggctatgaagctct

SEQ ID NO: 919684 - DNA, 33 bp, Homo sapien
aaataaatagcttatctgaggctatgaagctct

SEQ ID NO: 919685 - DNA, 33 bp, Homo sapien
cttgattgcactcccaactgatcatgagagctc

SEQ ID NO: 919686 - DNA, 33 bp, Homo sapien
cttgattgcactcccagctgatcatgagagctc

SEQ ID NO: 919687 - DNA, 33 bp, Homo sapien
tttatgaaatttgaaccaataacccagtctctg

SEQ ID NO: 919688 - DNA, 33 bp, Homo sapien
tttatgaaatttgaacgaataacccagtctctg

SEQ ID NO: 919689 - DNA, 33 bp, Homo sapien
tagatgctaacttaaccgattgcactgaattct

SEQ ID NO: 919690 - DNA, 33 bp, Homo sapien
tagatgctaacttaactgattgcactgaattct

SEQ ID NO: 919691 - DNA, 33 bp, Homo sapien
agaccaacatttcagaagtctggcacaggaact

SEQ ID NO: 919692 - DNA, 33 bp, Homo sapien
agaccaacatttcagaggtctggcacaggaact

SEQ ID NO: 919693 - DNA, 33 bp, Homo sapien
ctatttatagttagacaagaacgtcatgctata

SEQ ID NO: 919694 - DNA, 33 bp, Homo sapien
ctatttatagttagaccagaacgtcatgctata

SEQ ID NO: 919695 - DNA, 33 bp, Homo sapien
gatgcattaacaaaaacaaatgtctataaggag

SEQ ID NO: 919696 - DNA, 33 bp, Homo sapien
gatgcattaacaaaaagaaatgtctataaggag

SEQ ID NO: 919697 - DNA, 33 bp, Homo sapien
tgcctatggtttgtgacgactgacagtaagaat

SEQ ID NO: 919698 - DNA, 33 bp, Homo sapien
tgcctatggtttgtgatgactgacagtaagaat

SEQ ID NO: 919699 - DNA, 33 bp, Homo sapien
ggcttggggaatcagaagttgaccacaaattgt

SEQ ID NO: 919700 - DNA, 33 bp, Homo sapien
ggcttggggaatcagacgttgaccacaaattgt

SEQ ID NO: 919701 - DNA, 33 bp, Homo sapien
aactaagttgtcacaacacatttagtcaccatg

SEQ ID NO: 919702 - DNA, 33 bp, Homo sapien
aactaagttgtcacaatacatttagtcaccatg

SEQ ID NO: 919703 - DNA, 33 bp, Homo sapien
attaatccaccattgaagtagtgtcattggtct

SEQ ID NO: 919704 - DNA, 33 bp, Homo sapien
attaatccaccattgaggtagtgtcattggtct

SEQ ID NO: 919705 - DNA, 33 bp, Homo sapien
acattctatttgtgggaagatcatggtactctg

SEQ ID NO: 919706 - DNA, 33 bp, Homo sapien
acattctatttgtggggagatcatggtactctg

SEQ ID NO: 919707 - DNA, 33 bp, Homo sapien
aagaagaccaggaataacacaaaaccaaatggc

SEQ ID NO: 919708 - DNA, 33 bp, Homo sapien
aagaagaccaggaatagcacaaaaccaaatggc

SEQ ID NO: 919709 - DNA, 33 bp, Homo sapien
gtattagaataagatacgacttctctgaaaatg

SEQ ID NO: 919710 - DNA, 33 bp, Homo sapien
gtattagaataagatatgacttctctgaaaatg

SEQ ID NO: 919711 - DNA, 33 bp, Homo sapien
aagaactctgttatgtaaaagccatcaggtttt

SEQ ID NO: 919712 - DNA, 33 bp, Homo sapien
aagaactctgttatgtgaaagccatcaggtttt

SEQ ID NO: 919713 - DNA, 33 bp, Homo sapien
taggtattttctgatacggtaaaaatttcatag

SEQ ID NO: 919714 - DNA, 33 bp, Homo sapien
taggtattttctgatatggtaaaaatttcatag

SEQ ID NO: 919715 - DNA, 33 bp, Homo sapien
tttcattacatcaggactcagcaaacgttttct

SEQ ID NO: 919716 - DNA, 33 bp, Homo sapien
tttcattacatcaggagtcagcaaacgttttct

SEQ ID NO: 919717 - DNA, 33 bp, Homo sapien
gagaaagaaataaaagacatcaagctatctttc

SEQ ID NO: 919718 - DNA, 33 bp, Homo sapien
gagaaagaaataaaaggcatcaagctatctttc

SEQ ID NO: 919719 - DNA, 33 bp, Homo sapien
cactcactattgctcacattttcaggtgagaat

SEQ ID NO: 919720 - DNA, 33 bp, Homo sapien
cactcactattgctcatattttcaggtgagaat

SEQ ID NO: 919721 - DNA, 33 bp, Homo sapien
tcaggggcttaagaaactgactatatctacctt

SEQ ID NO: 919722 - DNA, 33 bp, Homo sapien
tcaggggcttaagaaagtgactatatctacctt

SEQ ID NO: 919723 - DNA, 33 bp, Homo sapien
ggagaaagcgaaaaatcatccacctgatccttt

SEQ ID NO: 919724 - DNA, 33 bp, Homo sapien
ggagaaagcgaaaaattatccacctgatccttt

SEQ ID NO: 919725 - DNA, 33 bp, Homo sapien
tattaaggcttatagacgttggttattctgtat

SEQ ID NO: 919726 - DNA, 33 bp, Homo sapien
tattaaggcttatagatgttggttattctgtat

SEQ ID NO: 919727 - DNA, 33 bp, Homo sapien
tgagaaaatctcaggaaggttaacccacaggga

SEQ ID NO: 919728 - DNA, 33 bp, Homo sapien
tgagaaaatctcaggacggttaacccacaggga

SEQ ID NO: 919729 - DNA, 33 bp, Homo sapien
ttctcagcctaaaacactattcttctctaagga

SEQ ID NO: 919730 - DNA, 33 bp, Homo sapien
ttctcagcctaaaacattattcttctctaagga

SEQ ID NO: 919731 - DNA, 33 bp, Homo sapien
aatttagtacaccttacaaataccctggctatc

SEQ ID NO: 919732 - DNA, 33 bp, Homo sapien
aatttagtacaccttagaaataccctggctatc

SEQ ID NO: 919733 - DNA, 33 bp, Homo sapien
gtttagcctcgttgaacatcattataataaccg

SEQ ID NO: 919734 - DNA, 33 bp, Homo sapien
gtttagcctcgttgaatatcattataataaccg

SEQ ID NO: 919735 - DNA, 33 bp, Homo sapien
ctcaataaaggcaagacatagggtcaacgtaat

SEQ ID NO: 919736 - DNA, 33 bp, Homo sapien
ctcaataaaggcaagatatagggtcaacgtaat

SEQ ID NO: 919737 - DNA, 33 bp, Homo sapien
tccagctatcatggaaacaacaaccctcaagct

SEQ ID NO: 919738 - DNA, 33 bp, Homo sapien
tccagctatcatggaagcaacaaccctcaagct

SEQ ID NO: 919739 - DNA, 33 bp, Homo sapien
tgaaaatttctgcttcaacaaacaaataggtaa

SEQ ID NO: 919740 - DNA, 33 bp, Homo sapien
tgaaaatttctgcttcgacaaacaaataggtaa

SEQ ID NO: 919741 - DNA, 33 bp, Homo sapien; identical to SEQ ID NO: 919739

SEQ ID NO: 919742 - DNA, 33 bp, Homo sapien; identical to SEQ ID NO: 919740

SEQ ID NO: 919743 - DNA, 33 bp, Homo sapien
cctgcctctctgaaggccatgggacttacctat

SEQ ID NO: 919744 - DNA, 33 bp, Homo sapien
cctgcctctctgaagggcatgggacttacctat

SEQ ID NO: 919745 - DNA, 33 bp, Homo sapien
gttaaacgtcatacaactaaagcataagggaag

SEQ ID NO: 919746 - DNA, 33 bp, Homo sapien
gttaaacgtcatacaattaaagcataagggaag

SEQ ID NO: 919747 - DNA, 33 bp, Homo sapien
gcagactaatgccaaacagaaaattgccctgag

SEQ ID NO: 919748 - DNA, 33 bp, Homo sapien
gcagactaatgccaaatagaaaattgccctgag

SEQ ID NO: 919749 - DNA, 33 bp, Homo sapien
atgggttcagatgttacggagcagtcagctttt

SEQ ID NO: 919750 - DNA, 33 bp, Homo sapien
atgggttcagatgttatggagcagtcagctttt

SEQ ID NO: 919751 - DNA, 33 bp, Homo sapien
aatgtgatttataaaactgatgagggggaatga

SEQ ID NO: 919752 - DNA, 33 bp, Homo sapien
aatgtgatttataaaattgatgagggggaatga

SEQ ID NO: 919753 - DNA, 33 bp, Homo sapien
aatgcagtagggtcccagacttggtgaaacaca

SEQ ID NO: 919754 - DNA, 33 bp, Homo sapien
aatgcagtagggtcccggacttggtgaaacaca

SEQ ID NO: 919755 - DNA, 33 bp, Homo sapien
gatattaaccccatgaagtatatgtttcacaaa

SEQ ID NO: 919756 - DNA, 33 bp, Homo sapien
gatattaaccccatgaggtatatgtttcacaaa

SEQ ID NO: 919757 - DNA, 33 bp, Homo sapien
ttaccaaatcatgccacatattgtccttgaaac

SEQ ID NO: 919758 - DNA, 33 bp, Homo sapien
ttaccaaatcatgccatatattgtccttgaaac

SEQ ID NO: 919759 - DNA, 33 bp, Homo sapien
gcttctttacagcgcaatcactagcaggtcatt

SEQ ID NO: 919760 - DNA, 33 bp, Homo sapien
gcttctttacagcgcagtcactagcaggtcatt

SEQ ID NO: 919761 - DNA, 33 bp, Homo sapien
tctctctgggctgctacggttcttctccaaaaa

SEQ ID NO: 919762 - DNA, 33 bp, Homo sapien
tctctctgggctgctatggttcttctccaaaaa

SEQ ID NO: 919763 - DNA, 33 bp, Homo sapien
ttttttttgtatgagcaaaagacaatcaaaaag

SEQ ID NO: 919764 - DNA, 33 bp, Homo sapien
ttttttttgtatgagcgaaagacaatcaaaaag

SEQ ID NO: 919765 - DNA, 33 bp, Homo sapien
aaacctctatgaccacagatggagaaaggagaa

SEQ ID NO: 919766 - DNA, 33 bp, Homo sapien
aaacctctatgaccacggatggagaaaggagaa

SEQ ID NO: 919767 - DNA, 33 bp, Homo sapien
ctggagactactttgacgttactgaatttacat

SEQ ID NO: 919768 - DNA, 33 bp, Homo sapien
ctggagactactttgatgttactgaatttacat

SEQ ID NO: 919769 - DNA, 33 bp, Homo sapien
taataaattcaaggcacaatgcaaactttcact

SEQ ID NO: 919770 - DNA, 33 bp, Homo sapien
taataaattcaaggcataatgcaaactttcact

SEQ ID NO: 919771 - DNA, 33 bp, Homo sapien
tccacattaacagaggccaaagtcaagcttatt

SEQ ID NO: 919772 - DNA, 33 bp, Homo sapien
tccacattaacagagggcaaagtcaagcttatt

SEQ ID NO: 919773 - DNA, 33 bp, Homo sapien
tatacattgattactgcagtgccatatgctctc

SEQ ID NO: 919774 - DNA, 33 bp, Homo sapien
tatacattgattactgtagtgccatatgctctc

SEQ ID NO: 919775 - DNA, 33 bp, Homo sapien
tgaagaacgatctggcaaggatccactggtaaa

SEQ ID NO: 919776 - DNA, 33 bp, Homo sapien
tgaagaacgatctggcgaggatccactggtaaa

SEQ ID NO: 919777 - DNA, 33 bp, Homo sapien
actcatgtaaactcaacaggatgccagaaggac

SEQ ID NO: 919778 - DNA, 33 bp, Homo sapien
actcatgtaaactcaataggatgccagaaggac

SEQ ID NO: 919779 - DNA, 33 bp, Homo sapien; identical to SEQ ID NO: 919777

SEQ ID NO: 919780 - DNA, 33 bp, Homo sapien; identical to SEQ ID NO: 919778

SEQ ID NO: 919781 - DNA, 33 bp, Homo sapien
ctttactgttactaagcaggaaaaatcggaccc

SEQ ID NO: 919782 - DNA, 33 bp, Homo sapien
ctttactgttactaagtaggaaaaatcggaccc

SEQ ID NO: 919783 - DNA, 33 bp, Homo sapien
ctgtcgaaccacctaaccttctgaatcatattc

SEQ ID NO: 919784 - DNA, 33 bp, Homo sapien
ctgtcgaaccacctaatcttctgaatcatattc

SEQ ID NO: 919785 - DNA, 33 bp, Homo sapien
cctgggctctcagtaaagccaattgatgtcatc

SEQ ID NO: 919786 - DNA, 33 bp, Homo sapien
cctgggctctcagtaatgccaattgatgtcatc

SEQ ID NO: 919787 - DNA, 33 bp, Homo sapien
atatagacttgtaatcacaactcccaacaagtt

SEQ ID NO: 919788 - DNA, 33 bp, Homo sapien
atatagacttgtaatcgcaactcccaacaagtt

SEQ ID NO: 919789 - DNA, 33 bp, Homo sapien
gcctgagaaatattgaccaggattacagagaaa

SEQ ID NO: 919790 - DNA, 33 bp, Homo sapien
gcctgagaaatattgatcaggattacagagaaa

SEQ ID NO: 919791 - DNA, 33 bp, Homo sapien
ctggggcaggctggtcaaggcaaagaaaatcag

SEQ ID NO: 919792 - DNA, 33 bp, Homo sapien
ctggggcaggctggtcgaggcaaagaaaatcag

SEQ ID NO: 919793 - DNA, 33 bp, Homo sapien
gctagtgatcaagagacgaagaagtggagacag

SEQ ID NO: 919794 - DNA, 33 bp, Homo sapien
gctagtgatcaagagatgaagaagtggagacag

SEQ ID NO: 919795 - DNA, 33 bp, Homo sapien
tatttttaaaagctacccagctaagtttcaaca

SEQ ID NO: 919796 - DNA, 33 bp, Homo sapien
tatttttaaaagctacgcagctaagtttcaaca

SEQ ID NO: 919797 - DNA, 33 bp, Homo sapien
atctgcacctttaaaagtcagattacttcatgg

SEQ ID NO: 919798 - DNA, 33 bp, Homo sapien
atctgcacctttaaaattcagattacttcatgg

SEQ ID NO: 919799 - DNA, 33 bp, Homo sapien
aagtaaaggctcaaaacttcagctgtatctagg

SEQ ID NO: 919800 - DNA, 33 bp, Homo sapien
aagtaaaggctcaaaagttcagctgtatctagg

SEQ ID NO: 919801 - DNA, 33 bp, Homo sapien
gctacagtttgtattccagttggggttcttccc

SEQ ID NO: 919802 - DNA, 33 bp, Homo sapien
gctacagtttgtattctagttggggttcttccc

SEQ ID NO: 919803 - DNA, 33 bp, Homo sapien
tgaagttacactgcctaagcataaatcctggct

SEQ ID NO: 919804 - DNA, 33 bp, Homo sapien
tgaagttacactgcctgagcataaatcctggct

SEQ ID NO: 919805 - DNA, 33 bp, Homo sapien
agcatcaaaacattcccagtgttcaaatactgt

SEQ ID NO: 919806 - DNA, 33 bp, Homo sapien
agcatcaaaacattcctagtgttcaaatactgt

SEQ ID NO: 919807 - DNA, 33 bp, Homo sapien
gattttagtacaggcacgtcaatgtcagaattc

SEQ ID NO: 919808 - DNA, 33 bp, Homo sapien
gattttagtacaggcatgtcaatgtcagaattc

SEQ ID NO: 919809 - DNA, 33 bp, Homo sapien
gctttccacagtgtcaataaatgtttattcagg

SEQ ID NO: 919810 - DNA, 33 bp, Homo sapien
gctttccacagtgtcagtaaatgtttattcagg

SEQ ID NO: 919811 - DNA, 33 bp, Homo sapien
catggtgtgtgcttagaaagaggaagtgaagat

SEQ ID NO: 919812 - DNA, 33 bp, Homo sapien
catggtgtgtgcttaggaagaggaagtgaagat

SEQ ID NO: 919813 - DNA, 33 bp, Homo sapien
aatctaaggcaatttccaggcctggtacattag

SEQ ID NO: 919814 - DNA, 33 bp, Homo sapien
aatctaaggcaatttctaggcctggtacattag

SEQ ID NO: 919815 - DNA, 33 bp, Homo sapien
gtgaaacaaaagtgccaaattgttatctagtga

SEQ ID NO: 919816 - DNA, 33 bp, Homo sapien
gtgaaacaaaagtgccgaattgttatctagtga

SEQ ID NO: 919817 - DNA, 33 bp, Homo sapien
taaaatgattggaatacgtatctcagagattcc

SEQ ID NO: 919818 - DNA, 33 bp, Homo sapien
taaaatgattggaatatgtatctcagagattcc

SEQ ID NO: 919819 - DNA, 33 bp, Homo sapien
aactttgattgaaagcgccacgtaagccactgc

SEQ ID NO: 919820 - DNA, 33 bp, Homo sapien
aactttgattgaaagctccacgtaagccactgc

SEQ ID NO: 919821 - DNA, 33 bp, Homo sapien
ctcaatttacagagtacgaatgtgctttcttaa

SEQ ID NO: 919822 - DNA, 33 bp, Homo sapien
ctcaatttacagagtatgaatgtgctttcttaa

SEQ ID NO: 919823 - DNA, 33 bp, Homo sapien
atggagctccagagacggggtttcctgagattt

SEQ ID NO: 919824 - DNA, 33 bp, Homo sapien
atggagctccagagactgggtttcctgagattt

SEQ ID NO: 919825 - DNA, 33 bp, Homo sapien
tctagtgattggtctacctggttaaagccatac

SEQ ID NO: 919826 - DNA, 33 bp, Homo sapien
tctagtgattggtctatctggttaaagccatac

SEQ ID NO: 919827 - DNA, 33 bp, Homo sapien
aaactgtgattcccaaataggatgattcaccat

SEQ ID NO: 919828 - DNA, 33 bp, Homo sapien
aaactgtgattcccaagtaggatgattcaccat

SEQ ID NO: 919829 - DNA, 33 bp, Homo sapien
ttctatttccatttcaatattacctcacttctc

SEQ ID NO: 919830 - DNA, 33 bp, Homo sapien
ttctatttccatttcagtattacctcacttctc

SEQ ID NO: 919831 - DNA, 33 bp, Homo sapien
gctgaggctttaggagaccatcatatcctatat

SEQ ID NO: 919832 - DNA, 33 bp, Homo sapien
gctgaggctttaggagcccatcatatcctatat

SEQ ID NO: 919833 - DNA, 33 bp, Homo sapien
caagcactttctgacacataccaggactgggat

SEQ ID NO: 919834 - DNA, 33 bp, Homo sapien
caagcactttctgacatataccaggactgggat

SEQ ID NO: 919835 - DNA, 33 bp, Homo sapien
ttcttctacttaactgaaaccagagatagagta

SEQ ID NO: 919836 - DNA, 33 bp, Homo sapien
ttcttctacttaactggaaccagagatagagta

SEQ ID NO: 919837 - DNA, 33 bp, Homo sapien
tatcaaattaatgttacgccacttaagtaaaac

SEQ ID NO: 919838 - DNA, 33 bp, Homo sapien
tatcaaattaatgttatgccacttaagtaaaac

SEQ ID NO: 919839 - DNA, 33 bp, Homo sapien
aggctctcaagttctcaagggataactaactgc

SEQ ID NO: 919840 - DNA, 33 bp, Homo sapien
aggctctcaagttctcgagggataactaactgc

SEQ ID NO: 919841 - DNA, 33 bp, Homo sapien
aatcttctcagcagttcaaatcccttcattatc

SEQ ID NO: 919842 - DNA, 33 bp, Homo sapien
aatcttctcagcagtttaaatcccttcattatc

SEQ ID NO: 919843 - DNA, 33 bp, Homo sapien
tggtgcatatccatggaagtacaattccactgc

SEQ ID NO: 919844 - DNA, 33 bp, Homo sapien
tggtgcatatccatggtagtacaattccactgc

SEQ ID NO: 919845 - DNA, 33 bp, Homo sapien
tctataggcaattgagcatttatgaccagtctg

SEQ ID NO: 919846 - DNA, 33 bp, Homo sapien
tctataggcaattgagtatttatgaccagtctg

SEQ ID NO: 919847 - DNA, 33 bp, Homo sapien
cagaagcctcctctcacattttgactatgtact

SEQ ID NO: 919848 - DNA, 33 bp, Homo sapien
cagaagcctcctctcagattttgactatgtact

SEQ ID NO: 919849 - DNA, 33 bp, Homo sapien
taccctgaggcaaaagaaaaaatgtacacctat

SEQ ID NO: 919850 - DNA, 33 bp, Homo sapien
taccctgaggcaaaaggaaaaatgtacacctat

SEQ ID NO: 919851 - DNA, 33 bp, Homo sapien
acatttaatggcttaaaagtccacaaaattact

SEQ ID NO: 919852 - DNA, 33 bp, Homo sapien
acatttaatggcttaagagtccacaaaattact

SEQ ID NO: 919853 - DNA, 33 bp, Homo sapien
tgagatattgatatagaattggttagttaatag

SEQ ID NO: 919854 - DNA, 33 bp, Homo sapien
tgagatattgatatagtattggttagttaatag

SEQ ID NO: 919855 - DNA, 33 bp, Homo sapien
tttttaaaagctctcaagttaaaaggaaattaa

SEQ ID NO: 919856 - DNA, 33 bp, Homo sapien
tttttaaaagctctcaggttaaaaggaaattaa

SEQ ID NO: 919857 - DNA, 33 bp, Homo sapien
aattgtttaaacttaagacaatcttaccaaaca

SEQ ID NO: 919858 - DNA, 33 bp, Homo sapien
aattgtttaaacttaatacaatcttaccaaaca

SEQ ID NO: 919859 - DNA, 33 bp, Homo sapien
ttatgttgatattgtagacctcagaatgtgact

SEQ ID NO: 919860 - DNA, 33 bp, Homo sapien
ttatgttgatattgtatacctcagaatgtgact

SEQ ID NO: 919861 - DNA, 33 bp, Homo sapien
gctagacacacagaaaacagttaaaaatctatt

SEQ ID NO: 919862 - DNA, 33 bp, Homo sapien
gctagacacacagaaagcagttaaaaatctatt

SEQ ID NO: 919863 - DNA, 33 bp, Homo sapien
tcctctgacgtctataaaacatattccttgcct

SEQ ID NO: 919864 - DNA, 33 bp, Homo sapien
tcctctgacgtctatacaacatattccttgcct

SEQ ID NO: 919865 - DNA, 33 bp, Homo sapien
tttgccatgacaatcacataagcaactccacta

SEQ ID NO: 919866 - DNA, 33 bp, Homo sapien
tttgccatgacaatcatataagcaactccacta

SEQ ID NO: 919867 - DNA, 33 bp, Homo sapien
gatacacgatgtttaacgcttatagtcattctg

SEQ ID NO: 919868 - DNA, 33 bp, Homo sapien
gatacacgatgtttaatgcttatagtcattctg

SEQ ID NO: 919869 - DNA, 33 bp, Homo sapien
atttctactgctttcaaaattgctgccacacct

SEQ ID NO: 919870 - DNA, 33 bp, Homo sapien
atttctactgctttcagaattgctgccacacct

SEQ ID NO: 919871 - DNA, 33 bp, Homo sapien
ctaaagacagaagggcaatctcaagataccgat

SEQ ID NO: 919872 - DNA, 33 bp, Homo sapien
ctaaagacagaagggcgatctcaagataccgat

SEQ ID NO: 919873 - DNA, 33 bp, Homo sapien
agagaggagtaagagaataagaaggacatcaca

SEQ ID NO: 919874 - DNA, 33 bp, Homo sapien
agagaggagtaagagagtaagaaggacatcaca

SEQ ID NO: 919875 - DNA, 33 bp, Homo sapien
cattagcaagctgtaaataaccttcacaaactc

SEQ ID NO: 919876 - DNA, 33 bp, Homo sapien
cattagcaagctgtaagtaaccttcacaaactc

SEQ ID NO: 919877 - DNA, 33 bp, Homo sapien
ttagatgatggggggaagaaaaagttttgctgt

SEQ ID NO: 919878 - DNA, 33 bp, Homo sapien
ttagatgatggggggaggaaaaagttttgctgt

SEQ ID NO: 919879 - DNA, 33 bp, Homo sapien
tgctccttttacttgacggctctgtgtaattca

SEQ ID NO: 919880 - DNA, 33 bp, Homo sapien
tgctccttttacttgagggctctgtgtaattca

SEQ ID NO: 919881 - DNA, 33 bp, Homo sapien
tgaggcatgattcggaaaacaaacacaggaaga

SEQ ID NO: 919882 - DNA, 33 bp, Homo sapien
tgaggcatgattcggacaacaaacacaggaaga

SEQ ID NO: 919883 - DNA, 33 bp, Homo sapien
gacttctgcgcattcaaaggctcaacactacat

SEQ ID NO: 919884 - DNA, 33 bp, Homo sapien
gacttctgcgcattcacaggctcaacactacat

SEQ ID NO: 919885 - DNA, 33 bp, Homo sapien; identical to SEQ ID NO: 919883

SEQ ID NO: 919886 - DNA, 33 bp, Homo sapien; identical to SEQ ID NO: 919884

SEQ ID NO: 919887 - DNA, 33 bp, Homo sapien
ggcatgatgaaatggcactgaatattttattct

SEQ ID NO: 919888 - DNA, 33 bp, Homo sapien
ggcatgatgaaatggcgctgaatattttattct

SEQ ID NO: 919889 - DNA, 33 bp, Homo sapien
tgatcagtgaataaacaatctgtacatgacatg

SEQ ID NO: 919890 - DNA, 33 bp, Homo sapien
tgatcagtgaataaaccatctgtacatgacatg

SEQ ID NO: 919891 - DNA, 33 bp, Homo sapien
gaaaaaggaaccattcacgtggacataggtggt

SEQ ID NO: 919892 - DNA, 33 bp, Homo sapien
gaaaaaggaaccattcgcgtggacataggtggt

SEQ ID NO: 919893 - DNA, 33 bp, Homo sapien
ttgtagactccaataactgtacttgctttttga

SEQ ID NO: 919894 - DNA, 33 bp, Homo sapien
ttgtagactccaataattgtacttgctttttga

SEQ ID NO: 919895 - DNA, 33 bp, Homo sapien
catgccttgcaattaacattctcatcaacacag

SEQ ID NO: 919896 - DNA, 33 bp, Homo sapien
catgccttgcaattaatattctcatcaacacag

SEQ ID NO: 919897 - DNA, 33 bp, Homo sapien
cgatatcagatgccacagatagatcaaataagg

SEQ ID NO: 919898 - DNA, 33 bp, Homo sapien
cgatatcagatgccacggatagatcaaataagg

SEQ ID NO: 919899 - DNA, 33 bp, Homo sapien
acatttatttgtcacaacaatgaaggctaggaa

SEQ ID NO: 919900 - DNA, 33 bp, Homo sapien
acatttatttgtcacagcaatgaaggctaggaa

SEQ ID NO: 919901 - DNA, 33 bp, Homo sapien
gtgatgaaacatcttacgggaaatatgtagggt

SEQ ID NO: 919902 - DNA, 33 bp, Homo sapien
gtgatgaaacatcttatgggaaatatgtagggt

SEQ ID NO: 919903 - DNA, 33 bp, Homo sapien
tgtcaatgtgtaaataaaatcacctgggcctct

SEQ ID NO: 919904 - DNA, 33 bp, Homo sapien
tgtcaatgtgtaaatacaatcacctgggcctct

SEQ ID NO: 919905 - DNA, 33 bp, Homo sapien
agcacattttagctacacaggtatactcacagc

SEQ ID NO: 919906 - DNA, 33 bp, Homo sapien
agcacattttagctacgcaggtatactcacagc

SEQ ID NO: 919907 - DNA, 33 bp, Homo sapien
ctagatagtgatgaaacgatggcagaggtggta

SEQ ID NO: 919908 - DNA, 33 bp, Homo sapien
ctagatagtgatgaaatgatggcagaggtggta

SEQ ID NO: 919909 - DNA, 33 bp, Homo sapien
ttcatatttaaattgactacaggggaatggtat

SEQ ID NO: 919910 - DNA, 33 bp, Homo sapien
ttcatatttaaattgagtacaggggaatggtat

SEQ ID NO: 919911 - DNA, 33 bp, Homo sapien
tctgttatcacttgaaacaatcatttaatattc

SEQ ID NO: 919912 - DNA, 33 bp, Homo sapien
tctgttatcacttgaagcaatcatttaatattc

SEQ ID NO: 919913 - DNA, 33 bp, Homo sapien
gaaactgttagaactacgtgattcaaaagaaag

SEQ ID NO: 919914 - DNA, 33 bp, Homo sapien
gaaactgttagaactatgtgattcaaaagaaag

SEQ ID NO: 919915 - DNA, 33 bp, Homo sapien
tccacgcacttaggaacgatacaatctctaatt

SEQ ID NO: 919916 - DNA, 33 bp, Homo sapien
tccacgcacttaggaatgatacaatctctaatt

SEQ ID NO: 919917 - DNA, 33 bp, Homo sapien
agctttatgtaatcacaggatgttgctctgtaa

SEQ ID NO: 919918 - DNA, 33 bp, Homo sapien
agctttatgtaatcacgggatgttgctctgtaa

SEQ ID NO: 919919 - DNA, 33 bp, Homo sapien
accaacaacatttcaacacacattccaagtgac

SEQ ID NO: 919920 - DNA, 33 bp, Homo sapien
accaacaacatttcaatacacattccaagtgac

SEQ ID NO: 919921 - DNA, 33 bp, Homo sapien
gccttcatatggactccactgggtcaaagtctt

SEQ ID NO: 919922 - DNA, 33 bp, Homo sapien
gccttcatatggactctactgggtcaaagtctt

SEQ ID NO: 919923 - DNA, 33 bp, Homo sapien
tgcatctgcttctaaagagccataaatatctcc

SEQ ID NO: 919924 - DNA, 33 bp, Homo sapien
tgcatctgcttctaaatagccataaatatctcc

SEQ ID NO: 919925 - DNA, 33 bp, Homo sapien
ttctgtcaacaaggaacagagtataggaagata

SEQ ID NO: 919926 - DNA, 33 bp, Homo sapien
ttctgtcaacaaggaatagagtataggaagata

SEQ ID NO: 919927 - DNA, 33 bp, Homo sapien
agaattcataagaaacaaggaatctactaaata

SEQ ID NO: 919928 - DNA, 33 bp, Homo sapien
agaattcataagaaacgaggaatctactaaata

SEQ ID NO: 919929 - DNA, 33 bp, Homo sapien
taaataaaataaagtgaaaattgtagaagttga

SEQ ID NO: 919930 - DNA, 33 bp, Homo sapien
taaataaaataaagtggaaattgtagaagttga

SEQ ID NO: 919931 - DNA, 33 bp, Homo sapien
aatactattcagcaacaaaaaagagtagactgc

SEQ ID NO: 919932 - DNA, 33 bp, Homo sapien
aatactattcagcaacgaaaaagagtagactgc

SEQ ID NO: 919933 - DNA, 33 bp, Homo sapien
attgaaaagctgaaaaaaattggttcatcttgt

SEQ ID NO: 919934 - DNA, 33 bp, Homo sapien
attgaaaagctgaaaacaattggttcatcttgt

SEQ ID NO: 919935 - DNA, 33 bp, Homo sapien
agatttcaaagaaccaacatagcaagatgatta

SEQ ID NO: 919936 - DNA, 33 bp, Homo sapien
agatttcaaagaaccagcatagcaagatgatta

SEQ ID NO: 919937 - DNA, 33 bp, Homo sapien
ggtatagtagtcttcaatataattaacacatcc

SEQ ID NO: 919938 - DNA, 33 bp, Homo sapien
ggtatagtagtcttcagtataattaacacatcc

SEQ ID NO: 919939 - DNA, 33 bp, Homo sapien
tttctgtttcatttagcatattggcctctagtt

SEQ ID NO: 919940 - DNA, 33 bp, Homo sapien
tttctgtttcatttagtatattggcctctagtt

SEQ ID NO: 919941 - DNA, 33 bp, Homo sapien
gaggcaaggaatccagcagagcctgttgcaatg

SEQ ID NO: 919942 - DNA, 33 bp, Homo sapien
gaggcaaggaatccagtagagcctgttgcaatg

SEQ ID NO: 919943 - DNA, 33 bp, Homo sapien
agtgacctgagaaagacgagtaaaaggataaga

SEQ ID NO: 919944 - DNA, 33 bp, Homo sapien
agtgacctgagaaagatgagtaaaaggataaga

SEQ ID NO: 919945 - DNA, 33 bp, Homo sapien
ttatggacattaacccagaacacatactggttt

SEQ ID NO: 919946 - DNA, 33 bp, Homo sapien
ttatggacattaacccggaacacatactggttt

SEQ ID NO: 919947 - DNA, 33 bp, Homo sapien
aatttcttccattcaaataacttcaaatattac

SEQ ID NO: 919948 - DNA, 33 bp, Homo sapien
aatttcttccattcaagtaacttcaaatattac

SEQ ID NO: 919949 - DNA, 33 bp, Homo sapien
atcccaaatggggtaaatcaacattaaacaaag

SEQ ID NO: 919950 - DNA, 33 bp, Homo sapien
atcccaaatggggtaagtcaacattaaacaaag

SEQ ID NO: 919951 - DNA, 33 bp, Homo sapien
tttttagcgttgtacaacttatgcaatacttta

SEQ ID NO: 919952 - DNA, 33 bp, Homo sapien
tttttagcgttgtacagcttatgcaatacttta

SEQ ID NO: 919953 - DNA, 33 bp, Homo sapien
aggtagtggcacataagtgtcagagttgcttta

SEQ ID NO: 919954 - DNA, 33 bp, Homo sapien
aggtagtggcacataattgtcagagttgcttta

SEQ ID NO: 919955 - DNA, 33 bp, Homo sapien
aggttgtacagtcatacacttgaccatcttttt

SEQ ID NO: 919956 - DNA, 33 bp, Homo sapien
aggttgtacagtcatatacttgaccatcttttt

SEQ ID NO: 919957 - DNA, 33 bp, Homo sapien
gatctgtaaggcacaaacttaatctcttgcaaa

SEQ ID NO: 919958 - DNA, 33 bp, Homo sapien
gatctgtaaggcacaaccttaatctcttgcaaa

SEQ ID NO: 919959 - DNA, 33 bp, Homo sapien
caggtctctcaagctccatttatttactttcat

SEQ ID NO: 919960 - DNA, 33 bp, Homo sapien
caggtctctcaagctctatttatttactttcat

SEQ ID NO: 919961 - DNA, 33 bp, Homo sapien
tggggaatgctttaaaaactgagacaggcagtt

SEQ ID NO: 919962 - DNA, 33 bp, Homo sapien
tggggaatgctttaaatactgagacaggcagtt

SEQ ID NO: 919963 - DNA, 33 bp, Homo sapien
ctgagacaagagtccaaataaatgccacgggac

SEQ ID NO: 919964 - DNA, 33 bp, Homo sapien
ctgagacaagagtccagataaatgccacgggac

SEQ ID NO: 919965 - DNA, 33 bp, Homo sapien
gtatgtaaccttggaaaaactcatattttggtt

SEQ ID NO: 919966 - DNA, 33 bp, Homo sapien
gtatgtaaccttggaacaactcatattttggtt

SEQ ID NO: 919967 - DNA, 33 bp, Homo sapien
ttacaaattggttgtacctgtaaatcagttgga

SEQ ID NO: 919968 - DNA, 33 bp, Homo sapien
ttacaaattggttgtatctgtaaatcagttgga

SEQ ID NO: 919969 - DNA, 33 bp, Homo sapien
taaaatgtgtgaaaaaaatggcattgaagatga

SEQ ID NO: 919970 - DNA, 33 bp, Homo sapien
taaaatgtgtgaaaaagatggcattgaagatga

SEQ ID NO: 919971 - DNA, 33 bp, Homo sapien
cctctcaccctcaagaagtcataaaaatttgca

SEQ ID NO: 919972 - DNA, 33 bp, Homo sapien
cctctcaccctcaagaggtcataaaaatttgca

SEQ ID NO: 919973 - DNA, 33 bp, Homo sapien
tcaatagtgttcattacgttcacattgttgtgc

SEQ ID NO: 919974 - DNA, 33 bp, Homo sapien
tcaatagtgttcattatgttcacattgttgtgc

SEQ ID NO: 919975 - DNA, 33 bp, Homo sapien
atttcaatgaagaacaacatattattgctctat

SEQ ID NO: 919976 - DNA, 33 bp, Homo sapien
atttcaatgaagaacagcatattattgctctat

SEQ ID NO: 919977 - DNA, 33 bp, Homo sapien
agaggaacataaatgcagcacaagaactttgta

SEQ ID NO: 919978 - DNA, 33 bp, Homo sapien
agaggaacataaatgcggcacaagaactttgta

SEQ ID NO: 919979 - DNA, 33 bp, Homo sapien
tttctttaaccctacaatgattgcaatggttta

SEQ ID NO: 919980 - DNA, 33 bp, Homo sapien
tttctttaaccctacagtgattgcaatggttta

SEQ ID NO: 919981 - DNA, 33 bp, Homo sapien
cttgtcttcctatttaagttatactgaaccctt

SEQ ID NO: 919982 - DNA, 33 bp, Homo sapien
cttgtcttcctatttacgttatactgaaccctt

SEQ ID NO: 919983 - DNA, 33 bp, Homo sapien
agttatggcaatttcacgcaaaatagacctcat

SEQ ID NO: 919984 - DNA, 33 bp, Homo sapien
agttatggcaatttcaggcaaaatagacctcat

SEQ ID NO: 919985 - DNA, 33 bp, Homo sapien
caacaaaagggtgatcaaagaaaaagaacagca

SEQ ID NO: 919986 - DNA, 33 bp, Homo sapien
caacaaaagggtgatcgaagaaaaagaacagca

SEQ ID NO: 919987 - DNA, 33 bp, Homo sapien
aaatgagtctcttataaacagcacagaatttga

SEQ ID NO: 919988 - DNA, 33 bp, Homo sapien
aaatgagtctcttatagacagcacagaatttga

SEQ ID NO: 919989 - DNA, 33 bp, Homo sapien
tttcatgaaatcttgccgagtttgtcttctaga

SEQ ID NO: 919990 - DNA, 33 bp, Homo sapien
tttcatgaaatcttgctgagtttgtcttctaga

SEQ ID NO: 919991 - DNA, 33 bp, Homo sapien
ccctttgctcttatggaaatatcccatctctac

SEQ ID NO: 919992 - DNA, 33 bp, Homo sapien
ccctttgctcttatggcaatatcccatctctac

SEQ ID NO: 919993 - DNA, 33 bp, Homo sapien
atctatatttgtgtgaaaattactttaacattt

SEQ ID NO: 919994 - DNA, 33 bp, Homo sapien
atctatatttgtgtgagaattactttaacattt

SEQ ID NO: 919995 - DNA, 33 bp, Homo sapien
ttgcaggtagattctaagattttctgacttgca

SEQ ID NO: 919996 - DNA, 33 bp, Homo sapien
ttgcaggtagattctacgattttctgacttgca

SEQ ID NO: 919997 - DNA, 33 bp, Homo sapien
gatcaaattgaaagagaatgcaaaaaagcaccg

SEQ ID NO: 919998 - DNA, 33 bp, Homo sapien
gatcaaattgaaagaggatgcaaaaaagcaccg

SEQ ID NO: 919999 - DNA, 33 bp, Homo sapien
ttgtaaagtgcatgaacactctgtttctggatc

SEQ ID NO: 920000 - DNA, 33 bp, Homo sapien
ttgtaaagtgcatgaatactctgtttctggatc

SEQ ID NO: 920001 - DNA, 33 bp, Homo sapien
tcagctttctggattaactgatgtcttccattt

SEQ ID NO: 920002 - DNA, 33 bp, Homo sapien
tcagctttctggattagctgatgtcttccattt

SEQ ID NO: 920003 - DNA, 33 bp, Homo sapien
gtgatcaaagtaaagacgtatgttctcaatttg

SEQ ID NO: 920004 - DNA, 33 bp, Homo sapien
gtgatcaaagtaaagatgtatgttctcaatttg

SEQ ID NO: 920005 - DNA, 33 bp, Homo sapien
aatggcaaaaatggtccacttagtgcaatcaac

SEQ ID NO: 920006 - DNA, 33 bp, Homo sapien
aatggcaaaaatggtctacttagtgcaatcaac

SEQ ID NO: 920007 - DNA, 33 bp, Homo sapien
agtacttacctcatgccatctgtgtgagtgtcc

SEQ ID NO: 920008 - DNA, 33 bp, Homo sapien
agtacttacctcatgctatctgtgtgagtgtcc

SEQ ID NO: 920009 - DNA, 33 bp, Homo sapien
gctagcccttgagtcacctccatgtaagcccag

SEQ ID NO: 920010 - DNA, 33 bp, Homo sapien
gctagcccttgagtcagctccatgtaagcccag

SEQ ID NO: 920011 - DNA, 33 bp, Homo sapien
actatgtttagtgctaataagatttctacttat

SEQ ID NO: 920012 - DNA, 33 bp, Homo sapien
actatgtttagtgctagtaagatttctacttat

SEQ ID NO: 920013 - DNA, 33 bp, Homo sapien
tttaaatctcctcagaagtatattatcccaagc

SEQ ID NO: 920014 - DNA, 33 bp, Homo sapien
tttaaatctcctcagaggtatattatcccaagc

SEQ ID NO: 920015 - DNA, 33 bp, Homo sapien
gcagaaaaaccacaataagtgatgcacataggt

SEQ ID NO: 920016 - DNA, 33 bp, Homo sapien
gcagaaaaaccacaatgagtgatgcacataggt

SEQ ID NO: 920017 - DNA, 33 bp, Homo sapien
acaaatgtttgctgaacgagaaagcatagagag

SEQ ID NO: 920018 - DNA, 33 bp, Homo sapien
acaaatgtttgctgaatgagaaagcatagagag

SEQ ID NO: 920019 - DNA, 33 bp, Homo sapien
actcatgcagttcatccaatatcacatccttca

SEQ ID NO: 920020 - DNA, 33 bp, Homo sapien
actcatgcagttcatcgaatatcacatccttca

SEQ ID NO: 920021 - DNA, 33 bp, Homo sapien
acaaacaacaatagcaaaaaacgctttgtgttg

SEQ ID NO: 920022 - DNA, 33 bp, Homo sapien
acaaacaacaatagcagaaaacgctttgtgttg

SEQ ID NO: 920023 - DNA, 33 bp, Homo sapien
ttagccctctaaagaaagttcatttaggcacgt

SEQ ID NO: 920024 - DNA, 33 bp, Homo sapien
ttagccctctaaagaaggttcatttaggcacgt

SEQ ID NO: 920025 - DNA, 33 bp, Homo sapien
taaataagtagatgaaaagatgctccacatatg

SEQ ID NO: 920026 - DNA, 33 bp, Homo sapien
taaataagtagatgaacagatgctccacatatg

SEQ ID NO: 920027 - DNA, 33 bp, Homo sapien
atggagaaaagtggaaagattgaagagttagtt

SEQ ID NO: 920028 - DNA, 33 bp, Homo sapien
atggagaaaagtggaaggattgaagagttagtt

SEQ ID NO: 920029 - DNA, 33 bp, Homo sapien
attgcagcaaaattcaataaggttttaagtaag

SEQ ID NO: 920030 - DNA, 33 bp, Homo sapien
attgcagcaaaattcagtaaggttttaagtaag

SEQ ID NO: 920031 - DNA, 33 bp, Homo sapien
caagacaaagtacaaccgagctgtgcactcaaa

SEQ ID NO: 920032 - DNA, 33 bp, Homo sapien
caagacaaagtacaactgagctgtgcactcaaa

SEQ ID NO: 920033 - DNA, 33 bp, Homo sapien
tatctcaatattcactcacgtctagctctagga

SEQ ID NO: 920034 - DNA, 33 bp, Homo sapien
tatctcaatattcacttacgtctagctctagga

SEQ ID NO: 920035 - DNA, 33 bp, Homo sapien
ttttataacttaataaaacatttgcagctacct

SEQ ID NO: 920036 - DNA, 33 bp, Homo sapien
ttttataacttaataacacatttgcagctacct

SEQ ID NO: 920037 - DNA, 33 bp, Homo sapien
agaagtatgaactgtccatacagaatcaggaac

SEQ ID NO: 920038 - DNA, 33 bp, Homo sapien
agaagtatgaactgtctatacagaatcaggaac

SEQ ID NO: 920039 - DNA, 33 bp, Homo sapien
atcctatagagcatttcaggaatggataatctg

SEQ ID NO: 920040 - DNA, 33 bp, Homo sapien
atcctatagagcatttgaggaatggataatctg

SEQ ID NO: 920041 - DNA, 33 bp, Homo sapien
tgacatggaagaccccaagatacatacatcgtt

SEQ ID NO: 920042 - DNA, 33 bp, Homo sapien
tgacatggaagaccccgagatacatacatcgtt

SEQ ID NO: 920043 - DNA, 33 bp, Homo sapien
tacaaacaaggctaccaactaagatgttatccc

SEQ ID NO: 920044 - DNA, 33 bp, Homo sapien
tacaaacaaggctaccgactaagatgttatccc

SEQ ID NO: 920045 - DNA, 33 bp, Homo sapien
aggtggataactgcctaaatacagaaaatcaga

SEQ ID NO: 920046 - DNA, 33 bp, Homo sapien
aggtggataactgcctgaatacagaaaatcaga

SEQ ID NO: 920047 - DNA, 33 bp, Homo sapien
agatcttccagccttactaaagcattcagatac

SEQ ID NO: 920048 - DNA, 33 bp, Homo sapien
agatcttccagccttagtaaagcattcagatac

SEQ ID NO: 920049 - DNA, 33 bp, Homo sapien
agctaacaactggttgaattttgtgagaatcac

SEQ ID NO: 920050 - DNA, 33 bp, Homo sapien
agctaacaactggttggattttgtgagaatcac

SEQ ID NO: 920051 - DNA, 33 bp, Homo sapien
aaattctagacctacacaaggaaatgaagagaa

SEQ ID NO: 920052 - DNA, 33 bp, Homo sapien
aaattctagacctacagaaggaaatgaagagaa

SEQ ID NO: 920053 - DNA, 33 bp, Homo sapien
tagtataaccacaatgaaaaacagtatggagta

SEQ ID NO: 920054 - DNA, 33 bp, Homo sapien
tagtataaccacaatggaaaacagtatggagta

SEQ ID NO: 920055 - DNA, 33 bp, Homo sapien
acattgagagtttttaaatttcagcattgaata

SEQ ID NO: 920056 - DNA, 33 bp, Homo sapien
acattgagagtttttacatttcagcattgaata

SEQ ID NO: 920057 - DNA, 33 bp, Homo sapien
tttaatagtactctcaactgaactctattcttt

SEQ ID NO: 920058 - DNA, 33 bp, Homo sapien
tttaatagtactctcagctgaactctattcttt

SEQ ID NO: 920059 - DNA, 33 bp, Homo sapien
gcgaaggctaggattccgaagagtgtattggag

SEQ ID NO: 920060 - DNA, 33 bp, Homo sapien
gcgaaggctaggattctgaagagtgtattggag

SEQ ID NO: 920061 - DNA, 33 bp, Homo sapien
ataaacaatcactgaaaccacttgagatgagaa

SEQ ID NO: 920062 - DNA, 33 bp, Homo sapien
ataaacaatcactgaatccacttgagatgagaa

SEQ ID NO: 920063 - DNA, 33 bp, Homo sapien
actcttcagtaataccactagactacctggaaa

SEQ ID NO: 920064 - DNA, 33 bp, Homo sapien
actcttcagtaataccgctagactacctggaaa

SEQ ID NO: 920065 - DNA, 33 bp, Homo sapien
agggtatattagatatcagattgcaccagagaa

SEQ ID NO: 920066 - DNA, 33 bp, Homo sapien
agggtatattagatatgagattgcaccagagaa

SEQ ID NO: 920067 - DNA, 33 bp, Homo sapien
cttctgcttgttctggaactgttgaaagatacc

SEQ ID NO: 920068 - DNA, 33 bp, Homo sapien
cttctgcttgttctggtactgttgaaagatacc

SEQ ID NO: 920069 - DNA, 33 bp, Homo sapien
aaatacttgattggtacctcatggggctgttgt

SEQ ID NO: 920070 - DNA, 33 bp, Homo sapien
aaatacttgattggtatctcatggggctgttgt

SEQ ID NO: 920071 - DNA, 33 bp, Homo sapien
cccttagattcagagacgcattgacttttgaat

SEQ ID NO: 920072 - DNA, 33 bp, Homo sapien
cccttagattcagagatgcattgacttttgaat

SEQ ID NO: 920073 - DNA, 33 bp, Homo sapien
ttgcgaaggaattccaacaagggaaagaagtgg

SEQ ID NO: 920074 - DNA, 33 bp, Homo sapien
ttgcgaaggaattccagcaagggaaagaagtgg

SEQ ID NO: 920075 - DNA, 33 bp, Homo sapien
aaggctagatggaggccataattggagtaagac

SEQ ID NO: 920076 - DNA, 33 bp, Homo sapien
aaggctagatggaggctataattggagtaagac

SEQ ID NO: 920077 - DNA, 33 bp, Homo sapien
tgtagatgtttttccaacatactatgccacctt

SEQ ID NO: 920078 - DNA, 33 bp, Homo sapien
tgtagatgtttttccatcatactatgccacctt

SEQ ID NO: 920079 - DNA, 33 bp, Homo sapien
cctgaagcctgacaaacttacattcttaacagg

SEQ ID NO: 920080 - DNA, 33 bp, Homo sapien
cctgaagcctgacaaatttacattcttaacagg

SEQ ID NO: 920081 - DNA, 33 bp, Homo sapien
ttctataaggttctaacatccaccaaggagttt

SEQ ID NO: 920082 - DNA, 33 bp, Homo sapien
ttctataaggttctaatatccaccaaggagttt

SEQ ID NO: 920083 - DNA, 33 bp, Homo sapien
actggatgtcatcaaaatatcattaagagttca

SEQ ID NO: 920084 - DNA, 33 bp, Homo sapien
actggatgtcatcaaagtatcattaagagttca

SEQ ID NO: 920085 - DNA, 33 bp, Homo sapien
tatctttggattatgaagacgaatttgaagcca

SEQ ID NO: 920086 - DNA, 33 bp, Homo sapien
tatctttggattatgaggacgaatttgaagcca

SEQ ID NO: 920087 - DNA, 33 bp, Homo sapien
ggcagcagttattccacgttgaccactcttata

SEQ ID NO: 920088 - DNA, 33 bp, Homo sapien
ggcagcagttattccatgttgaccactcttata

SEQ ID NO: 920089 - DNA, 33 bp, Homo sapien
tttttactagaatgtgcaacctaagctaaaaaa

SEQ ID NO: 920090 - DNA, 33 bp, Homo sapien
tttttactagaatgtggaacctaagctaaaaaa

SEQ ID NO: 920091 - DNA, 33 bp, Homo sapien
aggcattccatcaaacagcaagggtgacctctt

SEQ ID NO: 920092 - DNA, 33 bp, Homo sapien
aggcattccatcaaacggcaagggtgacctctt

SEQ ID NO: 920093 - DNA, 33 bp, Homo sapien
caatgtatacacaacgaaagaagtggcaataag

SEQ ID NO: 920094 - DNA, 33 bp, Homo sapien
caatgtatacacaacgcaagaagtggcaataag

SEQ ID NO: 920095 - DNA, 33 bp, Homo sapien
gtcatgaggggcctcactcagagaaaattacct

SEQ ID NO: 920096 - DNA, 33 bp, Homo sapien
gtcatgaggggcctcattcagagaaaattacct

SEQ ID NO: 920097 - DNA, 33 bp, Homo sapien
agcagccctctacctccgaaaaacagcaagacg

SEQ ID NO: 920098 - DNA, 33 bp, Homo sapien
agcagccctctacctctgaaaaacagcaagacg

SEQ ID NO: 920099 - DNA, 33 bp, Homo sapien
ccagaaatcattgtcaaggcaaaaatgtgctca

SEQ ID NO: 920100 - DNA, 33 bp, Homo sapien
ccagaaatcattgtcagggcaaaaatgtgctca

SEQ ID NO: 920101 - DNA, 33 bp, Homo sapien
aaggaaaaaaaaaaagccatagcattctatttc

SEQ ID NO: 920102 - DNA, 33 bp, Homo sapien
aaggaaaaaaaaaaagtcatagcattctatttc

SEQ ID NO: 920103 - DNA, 33 bp, Homo sapien
tgtgttccctattgtacccattaaagcagaaaa

SEQ ID NO: 920104 - DNA, 33 bp, Homo sapien
tgtgttccctattgtatccattaaagcagaaaa

SEQ ID NO: 920105 - DNA, 33 bp, Homo sapien
aggtgcctagggggaactgagtgttaccacaga

SEQ ID NO: 920106 - DNA, 33 bp, Homo sapien
aggtgcctagggggaattgagtgttaccacaga

SEQ ID NO: 920107 - DNA, 33 bp, Homo sapien
acttgaatttgatttccaacaccctccttcctc

SEQ ID NO: 920108 - DNA, 33 bp, Homo sapien
acttgaatttgatttctaacaccctccttcctc

SEQ ID NO: 920109 - DNA, 33 bp, Homo sapien
gtgtttaatgcagaagaaatttatagaaggggt

SEQ ID NO: 920110 - DNA, 33 bp, Homo sapien
gtgtttaatgcagaagcaatttatagaaggggt

SEQ ID NO: 920111 - DNA, 33 bp, Homo sapien
attgtctattccctaaacacttaaaattgccat

SEQ ID NO: 920112 - DNA, 33 bp, Homo sapien
attgtctattccctaagcacttaaaattgccat

SEQ ID NO: 920113 - DNA, 33 bp, Homo sapien
aaactcaggcaaagtacagtgaaggagaacttt

SEQ ID NO: 920114 - DNA, 33 bp, Homo sapien
aaactcaggcaaagtatagtgaaggagaacttt

SEQ ID NO: 920115 - DNA, 33 bp, Homo sapien
agacacgctagataaaattcttaccgacgtggt

SEQ ID NO: 920116 - DNA, 33 bp, Homo sapien
agacacgctagataaacttcttaccgacgtggt

SEQ ID NO: 920117 - DNA, 33 bp, Homo sapien
cattttcgctgtctaaaaaaatctgacgtaaga

SEQ ID NO: 920118 - DNA, 33 bp, Homo sapien
cattttcgctgtctaagaaaatctgacgtaaga

SEQ ID NO: 920119 - DNA, 33 bp, Homo sapien
aactgtgattattctacgttttccaggctagag

SEQ ID NO: 920120 - DNA, 33 bp, Homo sapien
aactgtgattattctatgttttccaggctagag

SEQ ID NO: 920121 - DNA, 33 bp, Homo sapien
taaacgcgggcatatacggtacctgaactatag

SEQ ID NO: 920122 - DNA, 33 bp, Homo sapien
taaacgcgggcatatatggtacctgaactatag

SEQ ID NO: 920123 - DNA, 33 bp, Homo sapien
agcagggattggaattcaagtatgaacacaaag

SEQ ID NO: 920124 - DNA, 33 bp, Homo sapien
agcagggattggaatttaagtatgaacacaaag

SEQ ID NO: 920125 - DNA, 33 bp, Homo sapien
tgaaaatgaggtagaaaaaatatgagttggatg

SEQ ID NO: 920126 - DNA, 33 bp, Homo sapien
tgaaaatgaggtagaacaaatatgagttggatg

SEQ ID NO: 920127 - DNA, 33 bp, Homo sapien
ccagctctctcgaaataaatagagtgagaattc

SEQ ID NO: 920128 - DNA, 33 bp, Homo sapien
ccagctctctcgaaatgaatagagtgagaattc

SEQ ID NO: 920129 - DNA, 33 bp, Homo sapien
ggagcaagccaaatccccaggatagatgcatcc

SEQ ID NO: 920130 - DNA, 33 bp, Homo sapien
ggagcaagccaaatcctcaggatagatgcatcc

SEQ ID NO: 920131 - DNA, 33 bp, Homo sapien
ataaaggatgggttgccgagcctcctggagtga

SEQ ID NO: 920132 - DNA, 33 bp, Homo sapien
ataaaggatgggttgctgagcctcctggagtga

SEQ ID NO: 920133 - DNA, 33 bp, Homo sapien
taataaaaactcacaaactgtaatttttacatg

SEQ ID NO: 920134 - DNA, 33 bp, Homo sapien
taataaaaactcacaagctgtaatttttacatg

SEQ ID NO: 920135 - DNA, 33 bp, Homo sapien
gacagcagagaagagacacatggttgtacagag

SEQ ID NO: 920136 - DNA, 33 bp, Homo sapien
gacagcagagaagagagacatggttgtacagag

SEQ ID NO: 920137 - DNA, 33 bp, Homo sapien
agccttgagaaggaaacagacatggagcaaatc

SEQ ID NO: 920138 - DNA, 33 bp, Homo sapien
agccttgagaaggaaagagacatggagcaaatc

SEQ ID NO: 920139 - DNA, 33 bp, Homo sapien
ttggcctcacattgtaactactgccctctctct

SEQ ID NO: 920140 - DNA, 33 bp, Homo sapien
ttggcctcacattgtagctactgccctctctct

SEQ ID NO: 920141 - DNA, 33 bp, Homo sapien
cattccccctcttttccaatactcttctctttt

SEQ ID NO: 920142 - DNA, 33 bp, Homo sapien
cattccccctcttttcgaatactcttctctttt

SEQ ID NO: 920143 - DNA, 33 bp, Homo sapien
ttctataggacagttacaaaacaaacaccaatg

SEQ ID NO: 920144 - DNA, 33 bp, Homo sapien
ttctataggacagttataaaacaaacaccaatg

SEQ ID NO: 920145 - DNA, 33 bp, Homo sapien
agcctcttgccaagaaaggaaggattttggtag

SEQ ID NO: 920146 - DNA, 33 bp, Homo sapien
agcctcttgccaagaacggaaggattttggtag

SEQ ID NO: 920147 - DNA, 33 bp, Homo sapien
aacgtggaggtcagaacatcacctggagatact

SEQ ID NO: 920148 - DNA, 33 bp, Homo sapien
aacgtggaggtcagaatatcacctggagatact

SEQ ID NO: 920149 - DNA, 33 bp, Homo sapien
gtataaaaatgcacaccccttgaaagtaccact

SEQ ID NO: 920150 - DNA, 33 bp, Homo sapien
gtataaaaatgcacactccttgaaagtaccact

SEQ ID NO: 920151 - DNA, 33 bp, Homo sapien
atctcttacaaggccaaaagtgtatatacttct

SEQ ID NO: 920152 - DNA, 33 bp, Homo sapien
atctcttacaaggccagaagtgtatatacttct

SEQ ID NO: 920153 - DNA, 33 bp, Homo sapien
catatagaaatagagacggaatgaggagatgga

SEQ ID NO: 920154 - DNA, 33 bp, Homo sapien
catatagaaatagagatggaatgaggagatgga

SEQ ID NO: 920155 - DNA, 33 bp, Homo sapien
acccaagggcacaagcactagaaatcagtggtg

SEQ ID NO: 920156 - DNA, 33 bp, Homo sapien
acccaagggcacaagcgctagaaatcagtggtg

SEQ ID NO: 920157 - DNA, 33 bp, Homo sapien
aactatggggacagacacagctattcacaagtc

SEQ ID NO: 920158 - DNA, 33 bp, Homo sapien
aactatggggacagacgcagctattcacaagtc

SEQ ID NO: 920159 - DNA, 33 bp, Homo sapien
cactgtaggcttctcacatagaatgttctggat

SEQ ID NO: 920160 - DNA, 33 bp, Homo sapien
cactgtaggcttctcagatagaatgttctggat

SEQ ID NO: 920161 - DNA, 33 bp, Homo sapien
ttgaaaatgtggctaaaagagaatcatgtgtac

SEQ ID NO: 920162 - DNA, 33 bp, Homo sapien
ttgaaaatgtggctaagagagaatcatgtgtac

SEQ ID NO: 920163 - DNA, 33 bp, Homo sapien
gcccccatagtaataaatctgaagtaggaggga

SEQ ID NO: 920164 - DNA, 33 bp, Homo sapien
gcccccatagtaataactctgaagtaggaggga

SEQ ID NO: 920165 - DNA, 33 bp, Homo sapien
tgtttctacttctgaaagagcagcctttttccc

SEQ ID NO: 920166 - DNA, 33 bp, Homo sapien
tgtttctacttctgaaggagcagcctttttccc

SEQ ID NO: 920167 - DNA, 33 bp, Homo sapien
tgttgtcactaatgtgcaagccaccagtttttc

SEQ ID NO: 920168 - DNA, 33 bp, Homo sapien
tgttgtcactaatgtgtaagccaccagtttttc

SEQ ID NO: 920169 - DNA, 33 bp, Homo sapien
tcaagtgtctttgatcgacagctgaagagtttc

SEQ ID NO: 920170 - DNA, 33 bp, Homo sapien
tcaagtgtctttgatctacagctgaagagtttc

SEQ ID NO: 920171 - DNA, 33 bp, Homo sapien
ggtttcctcattttgcagaacttgtggaaagac

SEQ ID NO: 920172 - DNA, 33 bp, Homo sapien
ggtttcctcattttgcggaacttgtggaaagac

SEQ ID NO: 920173 - DNA, 33 bp, Homo sapien
ccacatagatggcaaacaagaatatccaagtat

SEQ ID NO: 920174 - DNA, 33 bp, Homo sapien
ccacatagatggcaaataagaatatccaagtat

SEQ ID NO: 920175 - DNA, 33 bp, Homo sapien
ccctgggaaactagtacgccatgatatcacaaa

SEQ ID NO: 920176 - DNA, 33 bp, Homo sapien
ccctgggaaactagtatgccatgatatcacaaa

SEQ ID NO: 920177 - DNA, 33 bp, Homo sapien
ctagaaacaccagtagacaccgacagaaaatag

SEQ ID NO: 920178 - DNA, 33 bp, Homo sapien
ctagaaacaccagtagtcaccgacagaaaatag

SEQ ID NO: 920179 - DNA, 33 bp, Homo sapien
aggcttacataacatgaaactcatttaacaaat

SEQ ID NO: 920180 - DNA, 33 bp, Homo sapien
aggcttacataacatggaactcatttaacaaat

SEQ ID NO: 920181 - DNA, 33 bp, Homo sapien
atcaatctgataagaccgatataacggaaaata

SEQ ID NO: 920182 - DNA, 33 bp, Homo sapien
atcaatctgataagactgatataacggaaaata

SEQ ID NO: 920183 - DNA, 33 bp, Homo sapien
aataggacttttcaagacactgtcccatccatt

SEQ ID NO: 920184 - DNA, 33 bp, Homo sapien
aataggacttttcaaggcactgtcccatccatt

SEQ ID NO: 920185 - DNA, 33 bp, Homo sapien
taattcagtgcaatccaacaggtctccttgaat

SEQ ID NO: 920186 - DNA, 33 bp, Homo sapien
taattcagtgcaatccgacaggtctccttgaat

SEQ ID NO: 920187 - DNA, 33 bp, Homo sapien
tgctcctgtggaccaacaagtaagaaaagtctc

SEQ ID NO: 920188 - DNA, 33 bp, Homo sapien
tgctcctgtggaccaagaagtaagaaaagtctc

SEQ ID NO: 920189 - DNA, 33 bp, Homo sapien
taggatatgatagaaacagtggtatatgacttc

SEQ ID NO: 920190 - DNA, 33 bp, Homo sapien
taggatatgatagaaatagtggtatatgacttc

SEQ ID NO: 920191 - DNA, 33 bp, Homo sapien
cgctaccccatgtctacagtctgtgtgcagtga

SEQ ID NO: 920192 - DNA, 33 bp, Homo sapien
cgctaccccatgtctagagtctgtgtgcagtga

SEQ ID NO: 920193 - DNA, 33 bp, Homo sapien
atgctatttaacaaaacgcttgcagacccatta

SEQ ID NO: 920194 - DNA, 33 bp, Homo sapien
atgctatttaacaaaatgcttgcagacccatta

SEQ ID NO: 920195 - DNA, 33 bp, Homo sapien
ttcagacctgctccaacgagtttcaggttgatg

SEQ ID NO: 920196 - DNA, 33 bp, Homo sapien
ttcagacctgctccaatgagtttcaggttgatg

SEQ ID NO: 920197 - DNA, 33 bp, Homo sapien
gcccctaccgagagccaccaagaagtgaacgct

SEQ ID NO: 920198 - DNA, 33 bp, Homo sapien
gcccctaccgagagcctccaagaagtgaacgct

SEQ ID NO: 920199 - DNA, 33 bp, Homo sapien
agtcaaggtctgaacccagtccgtcttactcca

SEQ ID NO: 920200 - DNA, 33 bp, Homo sapien
agtcaaggtctgaaccgagtccgtcttactcca

SEQ ID NO: 920201 - DNA, 33 bp, Homo sapien
gcatttctagacaacacaaagatactttcacag

SEQ ID NO: 920202 - DNA, 33 bp, Homo sapien
gcatttctagacaacataaagatactttcacag

SEQ ID NO: 920203 - DNA, 33 bp, Homo sapien
atcactctgcaaccaacaaattggctaaaatta

SEQ ID NO: 920204 - DNA, 33 bp, Homo sapien
atcactctgcaaccaagaaattggctaaaatta

SEQ ID NO: 920205 - DNA, 33 bp, Homo sapien
gagtgaaagataccaaatgaagaaagcattcaa

SEQ ID NO: 920206 - DNA, 33 bp, Homo sapien
gagtgaaagataccaagtgaagaaagcattcaa

SEQ ID NO: 920207 - DNA, 33 bp, Homo sapien
accaaaagttggttaaatgtataaacatccatg

SEQ ID NO: 920208 - DNA, 33 bp, Homo sapien
accaaaagttggttaagtgtataaacatccatg

SEQ ID NO: 920209 - DNA, 33 bp, Homo sapien
gacatttatgtgcacaagccaaagatccagctt

SEQ ID NO: 920210 - DNA, 33 bp, Homo sapien
gacatttatgtgcacaggccaaagatccagctt

SEQ ID NO: 920211 - DNA, 33 bp, Homo sapien
cattgtattagtcaagactctccaaagaaacag

SEQ ID NO: 920212 - DNA, 33 bp, Homo sapien
cattgtattagtcaaggctctccaaagaaacag

SEQ ID NO: 920213 - DNA, 33 bp, Homo sapien
ctgtgggaactaagataacacagattaacacca

SEQ ID NO: 920214 - DNA, 33 bp, Homo sapien
ctgtgggaactaagatgacacagattaacacca

SEQ ID NO: 920215 - DNA, 33 bp, Homo sapien
ctatgtgacacagagaaactaagccaggccctg

SEQ ID NO: 920216 - DNA, 33 bp, Homo sapien
ctatgtgacacagagagactaagccaggccctg

SEQ ID NO: 920217 - DNA, 33 bp, Homo sapien
acaagattacaggtgcccaaagaggtatagcga

SEQ ID NO: 920218 - DNA, 33 bp, Homo sapien
acaagattacaggtgctcaaagaggtatagcga

SEQ ID NO: 920219 - DNA, 33 bp, Homo sapien
tggacaaagttgttgactattttccttgggttc

SEQ ID NO: 920220 - DNA, 33 bp, Homo sapien
tggacaaagttgttgattattttccttgggttc

SEQ ID NO: 920221 - DNA, 33 bp, Homo sapien
ggtatttagtccattccatctatccatgcatct

SEQ ID NO: 920222 - DNA, 33 bp, Homo sapien
ggtatttagtccattctatctatccatgcatct

SEQ ID NO: 920223 - DNA, 33 bp, Homo sapien
tgaatttgagaacctacggcaattaacatgata

SEQ ID NO: 920224 - DNA, 33 bp, Homo sapien
tgaatttgagaacctatggcaattaacatgata

SEQ ID NO: 920225 - DNA, 33 bp, Homo sapien
tttgttaggtcaagtaagcatgagaaacaggag

SEQ ID NO: 920226 - DNA, 33 bp, Homo sapien
tttgttaggtcaagtaggcatgagaaacaggag

SEQ ID NO: 920227 - DNA, 33 bp, Homo sapien
aatcatattcagaacactaatttcattgaagtc

SEQ ID NO: 920228 - DNA, 33 bp, Homo sapien
aatcatattcagaacagtaatttcattgaagtc

SEQ ID NO: 920229 - DNA, 33 bp, Homo sapien
gcctttcttgtacaagactcatttaggtagaag

SEQ ID NO: 920230 - DNA, 33 bp, Homo sapien
gcctttcttgtacaaggctcatttaggtagaag

SEQ ID NO: 920231 - DNA, 33 bp, Homo sapien
aagatagaaactcaaaaaggtaaagagaattgc

SEQ ID NO: 920232 - DNA, 33 bp, Homo sapien
aagatagaaactcaaataggtaaagagaattgc

SEQ ID NO: 920233 - DNA, 33 bp, Homo sapien
gtgtgaaatctcctgaacatcttggtctgtcct

SEQ ID NO: 920234 - DNA, 33 bp, Homo sapien
gtgtgaaatctcctgatcatcttggtctgtcct

SEQ ID NO: 920235 - DNA, 33 bp, Homo sapien
atgtttcagtgaatgaagccttgttacctccac

SEQ ID NO: 920236 - DNA, 33 bp, Homo sapien
atgtttcagtgaatgaggccttgttacctccac

SEQ ID NO: 920237 - DNA, 33 bp, Homo sapien
gtggaatccttggcaaatgtcttaaactcttta

SEQ ID NO: 920238 - DNA, 33 bp, Homo sapien
gtggaatccttggcaagtgtcttaaactcttta

SEQ ID NO: 920239 - DNA, 33 bp, Homo sapien
tgctgcttactctagaaatctcatagacctcat

SEQ ID NO: 920240 - DNA, 33 bp, Homo sapien
tgctgcttactctagacatctcatagacctcat

SEQ ID NO: 920241 - DNA, 33 bp, Homo sapien
aaagataataagccaccattgttctaacagtag

SEQ ID NO: 920242 - DNA, 33 bp, Homo sapien
aaagataataagccacgattgttctaacagtag

SEQ ID NO: 920243 - DNA, 33 bp, Homo sapien
ttgggggtgtcagataataaaaggagcacaatc

SEQ ID NO: 920244 - DNA, 33 bp, Homo sapien
ttgggggtgtcagatagtaaaaggagcacaatc

SEQ ID NO: 920245 - DNA, 33 bp, Homo sapien
atgtcctttgttttgacgctaaccttttctggt

SEQ ID NO: 920246 - DNA, 33 bp, Homo sapien
atgtcctttgttttgatgctaaccttttctggt

SEQ ID NO: 920247 - DNA, 33 bp, Homo sapien
ttcttccttgtaagaactgatgatagcttacac

SEQ ID NO: 920248 - DNA, 33 bp, Homo sapien
ttcttccttgtaagaattgatgatagcttacac

SEQ ID NO: 920249 - DNA, 33 bp, Homo sapien
atttcttggaataagccagttttaaaaatcaac

SEQ ID NO: 920250 - DNA, 33 bp, Homo sapien
atttcttggaataagctagttttaaaaatcaac

SEQ ID NO: 920251 - DNA, 33 bp, Homo sapien
ggctttatagtgatgcactggctaagatgtcta

SEQ ID NO: 920252 - DNA, 33 bp, Homo sapien
ggctttatagtgatgcgctggctaagatgtcta

SEQ ID NO: 920253 - DNA, 33 bp, Homo sapien
attcagcagctgtctccattctcatcccattac

SEQ ID NO: 920254 - DNA, 33 bp, Homo sapien
attcagcagctgtctctattctcatcccattac

SEQ ID NO: 920255 - DNA, 33 bp, Homo sapien
tatatatattatcccaaaggttagtattagaat

SEQ ID NO: 920256 - DNA, 33 bp, Homo sapien
tatatatattatcccacaggttagtattagaat

SEQ ID NO: 920257 - DNA, 33 bp, Homo sapien
tgaaacccttgatgtaggagatagaatttgagg

SEQ ID NO: 920258 - DNA, 33 bp, Homo sapien
tgaaacccttgatgtatgagatagaatttgagg

SEQ ID NO: 920259 - DNA, 33 bp, Homo sapien
gaaattaattaggacaatagagtaaaccctaaa

SEQ ID NO: 920260 - DNA, 33 bp, Homo sapien
gaaattaattaggacagtagagtaaaccctaaa

SEQ ID NO: 920261 - DNA, 33 bp, Homo sapien
cattcatgaaacgcaactgtatttccttcaaag

SEQ ID NO: 920262 - DNA, 33 bp, Homo sapien
cattcatgaaacgcaattgtatttccttcaaag

SEQ ID NO: 920263 - DNA, 33 bp, Homo sapien
tcctgtgagaaagaaacgttcaggagctcttag

SEQ ID NO: 920264 - DNA, 33 bp, Homo sapien
tcctgtgagaaagaaatgttcaggagctcttag

SEQ ID NO: 920265 - DNA, 33 bp, Homo sapien
aagaagagataagatccaggaaacacaggaatt

SEQ ID NO: 920266 - DNA, 33 bp, Homo sapien
aagaagagataagatctaggaaacacaggaatt

SEQ ID NO: 920267 - DNA, 33 bp, Homo sapien
agatgaagcatgtataactgatgaaatctgaat

SEQ ID NO: 920268 - DNA, 33 bp, Homo sapien
agatgaagcatgtatacctgatgaaatctgaat

SEQ ID NO: 920269 - DNA, 33 bp, Homo sapien
tatttctttgttaatgacacctatagctgctta

SEQ ID NO: 920270 - DNA, 33 bp, Homo sapien
tatttctttgttaatgtcacctatagctgctta

SEQ ID NO: 920271 - DNA, 33 bp, Homo sapien
acacactgatcttagacggctgtttcaaaacac

SEQ ID NO: 920272 - DNA, 33 bp, Homo sapien
acacactgatcttagatggctgtttcaaaacac

SEQ ID NO: 920273 - DNA, 33 bp, Homo sapien
atgaagcttgagactaagtgaagagaatgtgaa

SEQ ID NO: 920274 - DNA, 33 bp, Homo sapien
atgaagcttgagactaggtgaagagaatgtgaa

SEQ ID NO: 920275 - DNA, 33 bp, Homo sapien
ttatttttacagggaaagttgcagaagatttgc

SEQ ID NO: 920276 - DNA, 33 bp, Homo sapien
ttatttttacagggaaggttgcagaagatttgc

SEQ ID NO: 920277 - DNA, 33 bp, Homo sapien
tcagaaatctggacaacaacaacttttcagggt

SEQ ID NO: 920278 - DNA, 33 bp, Homo sapien
tcagaaatctggacaataacaacttttcagggt

SEQ ID NO: 920279 - DNA, 33 bp, Homo sapien
atgaagacagacttagcattagcagtgtccttt

SEQ ID NO: 920280 - DNA, 33 bp, Homo sapien
atgaagacagacttagtattagcagtgtccttt

SEQ ID NO: 920281 - DNA, 33 bp, Homo sapien
tatggtcagcaatatacgaagtcaaaatgaacc

SEQ ID NO: 920282 - DNA, 33 bp, Homo sapien
tatggtcagcaatataggaagtcaaaatgaacc

SEQ ID NO: 920283 - DNA, 33 bp, Homo sapien
taagcctacaggcccaaatcaaaccaaggcctc

SEQ ID NO: 920284 - DNA, 33 bp, Homo sapien
taagcctacaggcccagatcaaaccaaggcctc

SEQ ID NO: 920285 - DNA, 33 bp, Homo sapien
cactagggtctgaaacaccaaaccaaactgtac

SEQ ID NO: 920286 - DNA, 33 bp, Homo sapien
cactagggtctgaaacgccaaaccaaactgtac

SEQ ID NO: 920287 - DNA, 33 bp, Homo sapien
ctaaaacttgagataacatgacgacagtctgaa

SEQ ID NO: 920288 - DNA, 33 bp, Homo sapien
ctaaaacttgagataatatgacgacagtctgaa

SEQ ID NO: 920289 - DNA, 33 bp, Homo sapien
tgatattctcaaatcacaatgcaaaaagatgaa

SEQ ID NO: 920290 - DNA, 33 bp, Homo sapien
tgatattctcaaatcataatgcaaaaagatgaa

SEQ ID NO: 920291 - DNA, 33 bp, Homo sapien
atacaattattaagaaccaactatttttggcat

SEQ ID NO: 920292 - DNA, 33 bp, Homo sapien
atacaattattaagaagcaactatttttggcat

SEQ ID NO: 920293 - DNA, 33 bp, Homo sapien
tgtctgaaaaccaaacactatcgggcttaaaga

SEQ ID NO: 920294 - DNA, 33 bp, Homo sapien
tgtctgaaaaccaaactctatcgggcttaaaga

SEQ ID NO: 920295 - DNA, 33 bp, Homo sapien
atattccatgattaaaatggcccctacaggaca

SEQ ID NO: 920296 - DNA, 33 bp, Homo sapien
atattccatgattaaagtggcccctacaggaca

SEQ ID NO: 920297 - DNA, 33 bp, Homo sapien
caacaggaagcagaaacccatggtcacaactcc

SEQ ID NO: 920298 - DNA, 33 bp, Homo sapien
caacaggaagcagaaatccatggtcacaactcc

SEQ ID NO: 920299 - DNA, 33 bp, Homo sapien
atataagtgccgtaaaaactccattgtaagcac

SEQ ID NO: 920300 - DNA, 33 bp, Homo sapien
atataagtgccgtaaagactccattgtaagcac

SEQ ID NO: 920301 - DNA, 33 bp, Homo sapien
tttcttgtattctaaaagaggttatgcattgtt

SEQ ID NO: 920302 - DNA, 33 bp, Homo sapien
tttcttgtattctaaatgaggttatgcattgtt

SEQ ID NO: 920303 - DNA, 33 bp, Homo sapien
aaacaataagcatcaaacgttcatcactggaga

SEQ ID NO: 920304 - DNA, 33 bp, Homo sapien
aaacaataagcatcaatcgttcatcactggaga

SEQ ID NO: 920305 - DNA, 33 bp, Homo sapien
ctgcactgtattgacacgggcacttctgaacat

SEQ ID NO: 920306 - DNA, 33 bp, Homo sapien
ctgcactgtattgacatgggcacttctgaacat

SEQ ID NO: 920307 - DNA, 33 bp, Homo sapien
taactctctcagacaaatcttgccttcttgacc

SEQ ID NO: 920308 - DNA, 33 bp, Homo sapien
taactctctcagacaattcttgccttcttgacc

SEQ ID NO: 920309 - DNA, 33 bp, Homo sapien
acaaatcccaaatccacacactgaaggtcagtt

SEQ ID NO: 920310 - DNA, 33 bp, Homo sapien
acaaatcccaaatccatacactgaaggtcagtt

SEQ ID NO: 920311 - DNA, 33 bp, Homo sapien
acccttcctgcacaacaaatatggtgcagcagg

SEQ ID NO: 920312 - DNA, 33 bp, Homo sapien
acccttcctgcacaacgaatatggtgcagcagg

SEQ ID NO: 920313 - DNA, 33 bp, Homo sapien
aagaggaaagtaagaaatatctacgtggtttta

SEQ ID NO: 920314 - DNA, 33 bp, Homo sapien
aagaggaaagtaagaagtatctacgtggtttta

SEQ ID NO: 920315 - DNA, 33 bp, Homo sapien
tcatgtcccttttcaccgcatcaaagtgtccat

SEQ ID NO: 920316 - DNA, 33 bp, Homo sapien
tcatgtcccttttcactgcatcaaagtgtccat

SEQ ID NO: 920317 - DNA, 33 bp, Homo sapien
ctattattggactctgcaaaaaacaagcttgcc

SEQ ID NO: 920318 - DNA, 33 bp, Homo sapien
ctattattggactctgtaaaaaacaagcttgcc

SEQ ID NO: 920319 - DNA, 33 bp, Homo sapien
ctctcttccgtactataaaacaattacactggt

SEQ ID NO: 920320 - DNA, 33 bp, Homo sapien
ctctcttccgtactatgaaacaattacactggt

SEQ ID NO: 920321 - DNA, 33 bp, Homo sapien
tcacagttaccaatcaactggcaaaaagtgcgg

SEQ ID NO: 920322 - DNA, 33 bp, Homo sapien
tcacagttaccaatcatctggcaaaaagtgcgg

SEQ ID NO: 920323 - DNA, 33 bp, Homo sapien
tatactttgtggatctcaaatgctgtgtaaata

SEQ ID NO: 920324 - DNA, 33 bp, Homo sapien
tatactttgtggatcttaaatgctgtgtaaata

SEQ ID NO: 920325 - DNA, 33 bp, Homo sapien
taagacctcaatgagacgaaatttggactaagt

SEQ ID NO: 920326 - DNA, 33 bp, Homo sapien
taagacctcaatgagatgaaatttggactaagt

SEQ ID NO: 920327 - DNA, 33 bp, Homo sapien
ctgtgatgtaacagctcagaattattagaatgt

SEQ ID NO: 920328 - DNA, 33 bp, Homo sapien
ctgtgatgtaacagcttagaattattagaatgt

SEQ ID NO: 920329 - DNA, 33 bp, Homo sapien
cctgctgtatgataaacgagccagattctctgt

SEQ ID NO: 920330 - DNA, 33 bp, Homo sapien
cctgctgtatgataaaggagccagattctctgt

SEQ ID NO: 920331 - DNA, 33 bp, Homo sapien
agcccagccatcaacaagataatttatcctcaa

SEQ ID NO: 920332 - DNA, 33 bp, Homo sapien
agcccagccatcaacatgataatttatcctcaa

SEQ ID NO: 920333 - DNA, 33 bp, Homo sapien
tatgcttttaaaggaccaaaatcagagaaattt

SEQ ID NO: 920334 - DNA, 33 bp, Homo sapien
tatgcttttaaaggacgaaaatcagagaaattt

SEQ ID NO: 920335 - DNA, 33 bp, Homo sapien
ttcacaatttactggcacataccaagtggtttt

SEQ ID NO: 920336 - DNA, 33 bp, Homo sapien
ttcacaatttactggcgcataccaagtggtttt

SEQ ID NO: 920337 - DNA, 33 bp, Homo sapien
gtctacttccggtccaatcttgctatccctctg

SEQ ID NO: 920338 - DNA, 33 bp, Homo sapien
gtctacttccggtccagtcttgctatccctctg

SEQ ID NO: 920339 - DNA, 33 bp, Homo sapien
ttttgccatgaatataaaaactagtgtgaatta

SEQ ID NO: 920340 - DNA, 33 bp, Homo sapien
ttttgccatgaatatagaaactagtgtgaatta

SEQ ID NO: 920341 - DNA, 33 bp, Homo sapien
tatgcctgtgtggaaacagtacactttcagaag

SEQ ID NO: 920342 - DNA, 33 bp, Homo sapien
tatgcctgtgtggaaatagtacactttcagaag

SEQ ID NO: 920343 - DNA, 33 bp, Homo sapien
ttctctaccaagtgaacttagtaactttaatta

SEQ ID NO: 920344 - DNA, 33 bp, Homo sapien
ttctctaccaagtgaatttagtaactttaatta

SEQ ID NO: 920345 - DNA, 33 bp, Homo sapien
ctcctgcagaagtagcagaatacagattcacag

SEQ ID NO: 920346 - DNA, 33 bp, Homo sapien
ctcctgcagaagtagcggaatacagattcacag

SEQ ID NO: 920347 - DNA, 33 bp, Homo sapien
aagcagccatagctcccgatattaaacagatgt

SEQ ID NO: 920348 - DNA, 33 bp, Homo sapien
aagcagccatagctcctgatattaaacagatgt

SEQ ID NO: 920349 - DNA, 33 bp, Homo sapien
tctaaagatatttcaaatactagatgttgagta

SEQ ID NO: 920350 - DNA, 33 bp, Homo sapien
tctaaagatatttcaagtactagatgttgagta

SEQ ID NO: 920351 - DNA, 33 bp, Homo sapien
atttaaagacatactaacatgaaccacataatg

SEQ ID NO: 920352 - DNA, 33 bp, Homo sapien
atttaaagacatactatcatgaaccacataatg

SEQ ID NO: 920353 - DNA, 33 bp, Homo sapien
agagaatgaggagatagaatacatcaatcaaaa

SEQ ID NO: 920354 - DNA, 33 bp, Homo sapien
agagaatgaggagatataatacatcaatcaaaa

SEQ ID NO: 920355 - DNA, 33 bp, Homo sapien
tcataatgatctggcacagtgctttgcccatca

SEQ ID NO: 920356 - DNA, 33 bp, Homo sapien
tcataatgatctggcatagtgctttgcccatca

SEQ ID NO: 920357 - DNA, 33 bp, Homo sapien
tttagcgtcaggtacagagcaggcactaaataa

SEQ ID NO: 920358 - DNA, 33 bp, Homo sapien
tttagcgtcaggtacatagcaggcactaaataa

SEQ ID NO: 920359 - DNA, 33 bp, Homo sapien
tttcaaatatattgggacaaaggtatccttctc

SEQ ID NO: 920360 - DNA, 33 bp, Homo sapien
tttcaaatatattggggcaaaggtatccttctc

SEQ ID NO: 920361 - DNA, 33 bp, Homo sapien
aacatactaacagggacggtttaaaagatgaga

SEQ ID NO: 920362 - DNA, 33 bp, Homo sapien
aacatactaacagggatggtttaaaagatgaga

SEQ ID NO: 920363 - DNA, 33 bp, Homo sapien
ctttgtctcttcttccaaaatgctcctatgtgg

SEQ ID NO: 920364 - DNA, 33 bp, Homo sapien
ctttgtctcttcttccgaaatgctcctatgtgg

SEQ ID NO: 920365 - DNA, 33 bp, Homo sapien
agtagaggacctcctacgcccacgaggcgtcct

SEQ ID NO: 920366 - DNA, 33 bp, Homo sapien
agtagaggacctcctatgcccacgaggcgtcct

SEQ ID NO: 920367 - DNA, 33 bp, Homo sapien
agtctgattaaagctacggaaactctcctgaaa

SEQ ID NO: 920368 - DNA, 33 bp, Homo sapien
agtctgattaaagctatggaaactctcctgaaa

SEQ ID NO: 920369 - DNA, 33 bp, Homo sapien
gggagaagtcattggaagaagctgcaattgggg

SEQ ID NO: 920370 - DNA, 33 bp, Homo sapien
gggagaagtcattggaggaagctgcaattgggg

SEQ ID NO: 920371 - DNA, 33 bp, Homo sapien
agtgccagcaagatgacggaccttgtataggaa

SEQ ID NO: 920372 - DNA, 33 bp, Homo sapien
agtgccagcaagatgatggaccttgtataggaa

SEQ ID NO: 920373 - DNA, 33 bp, Homo sapien
gatgccattgcttataacttgtaagaccaacat

SEQ ID NO: 920374 - DNA, 33 bp, Homo sapien
gatgccattgcttataccttgtaagaccaacat

SEQ ID NO: 920375 - DNA, 33 bp, Homo sapien
tctatgaatattctccaggaacttctaccattg

SEQ ID NO: 920376 - DNA, 33 bp, Homo sapien
tctatgaatattctccgggaacttctaccattg

SEQ ID NO: 920377 - DNA, 33 bp, Homo sapien
aattcatagtttattgaatgcttccattttcca

SEQ ID NO: 920378 - DNA, 33 bp, Homo sapien
aattcatagtttattgtatgcttccattttcca

SEQ ID NO: 920379 - DNA, 33 bp, Homo sapien
taatgcaaaaagattacgaagcacaactacaga

SEQ ID NO: 920380 - DNA, 33 bp, Homo sapien
taatgcaaaaagattaggaagcacaactacaga

SEQ ID NO: 920381 - DNA, 33 bp, Homo sapien
tgtaaatacagcgtcaagtcgaactttctagcc

SEQ ID NO: 920382 - DNA, 33 bp, Homo sapien
tgtaaatacagcgtcacgtcgaactttctagcc

SEQ ID NO: 920383 - DNA, 33 bp, Homo sapien
ctctctataaattttccccttaaggcctcagca

SEQ ID NO: 920384 - DNA, 33 bp, Homo sapien
ctctctataaattttcgccttaaggcctcagca

SEQ ID NO: 920385 - DNA, 33 bp, Homo sapien
caaacagagttaatcacgtttgatgtttggttt

SEQ ID NO: 920386 - DNA, 33 bp, Homo sapien
caaacagagttaatcaggtttgatgtttggttt

SEQ ID NO: 920387 - DNA, 33 bp, Homo sapien
caaatggcacctatgaaaataataaatgtgtat

SEQ ID NO: 920388 - DNA, 33 bp, Homo sapien
caaatggcacctatgacaataataaatgtgtat

SEQ ID NO: 920389 - DNA, 33 bp, Homo sapien
atagttctttctcataaacactgttagtttgtt

SEQ ID NO: 920390 - DNA, 33 bp, Homo sapien
atagttctttctcatagacactgttagtttgtt

SEQ ID NO: 920391 - DNA, 33 bp, Homo sapien
ttttctttaaacagccactctactaattcttca

SEQ ID NO: 920392 - DNA, 33 bp, Homo sapien
ttttctttaaacagccgctctactaattcttca

SEQ ID NO: 920393 - DNA, 33 bp, Homo sapien
gtaaaatacttcactacgaaatgaggctaaaat

SEQ ID NO: 920394 - DNA, 33 bp, Homo sapien
gtaaaatacttcactatgaaatgaggctaaaat

SEQ ID NO: 920395 - DNA, 33 bp, Homo sapien
tttctcatttcacaaaaaacataaaggccaaag

SEQ ID NO: 920396 - DNA, 33 bp, Homo sapien
tttctcatttcacaaacaacataaaggccaaag

SEQ ID NO: 920397 - DNA, 33 bp, Homo sapien
tttcactcggttggccacacagctgcagataat

SEQ ID NO: 920398 - DNA, 33 bp, Homo sapien
tttcactcggttggcctcacagctgcagataat

SEQ ID NO: 920399 - DNA, 33 bp, Homo sapien
tctaacctctttccacacctactcttgctacaa

SEQ ID NO: 920400 - DNA, 33 bp, Homo sapien
tctaacctctttccacgcctactcttgctacaa

SEQ ID NO: 920401 - DNA, 33 bp, Homo sapien
taaaaggaatgctagaaaacatgtactaatatt

SEQ ID NO: 920402 - DNA, 33 bp, Homo sapien
taaaaggaatgctagagaacatgtactaatatt

SEQ ID NO: 920403 - DNA, 33 bp, Homo sapien
caaggttcccaccaaaagaaactgcagatttgc

SEQ ID NO: 920404 - DNA, 33 bp, Homo sapien
caaggttcccaccaaaggaaactgcagatttgc

SEQ ID NO: 920405 - DNA, 33 bp, Homo sapien
tcttcagtggctaaagaatccatgactttctga

SEQ ID NO: 920406 - DNA, 33 bp, Homo sapien
tcttcagtggctaaaggatccatgactttctga

SEQ ID NO: 920407 - DNA, 33 bp, Homo sapien
gctaatctaggaaataaggagccattaaaggtt

SEQ ID NO: 920408 - DNA, 33 bp, Homo sapien
gctaatctaggaaatagggagccattaaaggtt

SEQ ID NO: 920409 - DNA, 33 bp, Homo sapien
cagctgggattccataggaacagtggcaccatt

SEQ ID NO: 920410 - DNA, 33 bp, Homo sapien
cagctgggattccatatgaacagtggcaccatt

SEQ ID NO: 920411 - DNA, 33 bp, Homo sapien
atagcaaaacttgaaaactaataaagccagtaa

SEQ ID NO: 920412 - DNA, 33 bp, Homo sapien
atagcaaaacttgaaagctaataaagccagtaa

SEQ ID NO: 920413 - DNA, 33 bp, Homo sapien
atgataattacaaggaagctctaagccagaagt

SEQ ID NO: 920414 - DNA, 33 bp, Homo sapien
atgataattacaaggacgctctaagccagaagt

SEQ ID NO: 920415 - DNA, 33 bp, Homo sapien
ccccacagcgtaggtaagcaggtcacacaaaaa

SEQ ID NO: 920416 - DNA, 33 bp, Homo sapien
ccccacagcgtaggtaggcaggtcacacaaaaa

SEQ ID NO: 920417 - DNA, 33 bp, Homo sapien
aggaaagctatgctgaaaccttataatttcttt

SEQ ID NO: 920418 - DNA, 33 bp, Homo sapien
aggaaagctatgctgagaccttataatttcttt

SEQ ID NO: 920419 - DNA, 33 bp, Homo sapien
tagtataccacgtgtacgtaggaataacaaagt

SEQ ID NO: 920420 - DNA, 33 bp, Homo sapien
tagtataccacgtgtatgtaggaataacaaagt

SEQ ID NO: 920421 - DNA, 33 bp, Homo sapien
acaattcagtccataggaattggtgaacttgct

SEQ ID NO: 920422 - DNA, 33 bp, Homo sapien
acaattcagtccatagtaattggtgaacttgct

SEQ ID NO: 920423 - DNA, 33 bp, Homo sapien
tattctagcagagggaaatatcataagtttctc

SEQ ID NO: 920424 - DNA, 33 bp, Homo sapien
tattctagcagagggacatatcataagtttctc

SEQ ID NO: 920425 - DNA, 33 bp, Homo sapien
tatgttgctggagctacgttggaaacttttttt

SEQ ID NO: 920426 - DNA, 33 bp, Homo sapien
tatgttgctggagctatgttggaaacttttttt

SEQ ID NO: 920427 - DNA, 33 bp, Homo sapien
gcatttataagctaaactaattgtttttagtca

SEQ ID NO: 920428 - DNA, 33 bp, Homo sapien
gcatttataagctaaagtaattgtttttagtca

SEQ ID NO: 920429 - DNA, 33 bp, Homo sapien
gattaagactcagaaaagtccagcagagaaaga

SEQ ID NO: 920430 - DNA, 33 bp, Homo sapien
gattaagactcagaaaggtccagcagagaaaga

SEQ ID NO: 920431 - DNA, 33 bp, Homo sapien
aactatttcagccaagaagtccattaaattgaa

SEQ ID NO: 920432 - DNA, 33 bp, Homo sapien
aactatttcagccaaggagtccattaaattgaa

SEQ ID NO: 920433 - DNA, 33 bp, Homo sapien
aacagagtgagtcacacaaaccaccatgcagtt

SEQ ID NO: 920434 - DNA, 33 bp, Homo sapien
aacagagtgagtcacataaaccaccatgcagtt

SEQ ID NO: 920435 - DNA, 33 bp, Homo sapien
taactattcaaatcacaaagagaattgacaatg

SEQ ID NO: 920436 - DNA, 33 bp, Homo sapien
taactattcaaatcacgaagagaattgacaatg

SEQ ID NO: 920437 - DNA, 33 bp, Homo sapien
tgctagtattacacacaatatggaatgagtagg

SEQ ID NO: 920438 - DNA, 33 bp, Homo sapien
tgctagtattacacaccatatggaatgagtagg

SEQ ID NO: 920439 - DNA, 33 bp, Homo sapien
gactactcctgataccacaagctgagttccaac

SEQ ID NO: 920440 - DNA, 33 bp, Homo sapien
gactactcctgataccgcaagctgagttccaac

SEQ ID NO: 920441 - DNA, 33 bp, Homo sapien
ctcagggctcccctaaacacggtgccctatgca

SEQ ID NO: 920442 - DNA, 33 bp, Homo sapien
ctcagggctcccctaagcacggtgccctatgca

SEQ ID NO: 920443 - DNA, 33 bp, Homo sapien
tatcatttaagaaataaccaaactgctaacatt

SEQ ID NO: 920444 - DNA, 33 bp, Homo sapien
tatcatttaagaaatatccaaactgctaacatt

SEQ ID NO: 920445 - DNA, 33 bp, Homo sapien
ctctttctcctaatagccaaccaatagtttctc

SEQ ID NO: 920446 - DNA, 33 bp, Homo sapien
ctctttctcctaatagtcaaccaatagtttctc

SEQ ID NO: 920447 - DNA, 33 bp, Homo sapien
ttggaagaccacatccacagaattgtacaaaaa

SEQ ID NO: 920448 - DNA, 33 bp, Homo sapien
ttggaagaccacatccgcagaattgtacaaaaa

SEQ ID NO: 920449 - DNA, 33 bp, Homo sapien
gtgctacacaagctcaactgtcatattagctac

SEQ ID NO: 920450 - DNA, 33 bp, Homo sapien
gtgctacacaagctcatctgtcatattagctac

SEQ ID NO: 920451 - DNA, 33 bp, Homo sapien
atattttattcctagtcaatggtattaatcctt

SEQ ID NO: 920452 - DNA, 33 bp, Homo sapien
atattttattcctagtgaatggtattaatcctt

SEQ ID NO: 920453 - DNA, 33 bp, Homo sapien
aagggacagtcattcacgcttcaaggctttcag

SEQ ID NO: 920454 - DNA, 33 bp, Homo sapien
aagggacagtcattcaggcttcaaggctttcag

SEQ ID NO: 920455 - DNA, 33 bp, Homo sapien
cgacttaccctttgaccgctacttataaagtag

SEQ ID NO: 920456 - DNA, 33 bp, Homo sapien
cgacttaccctttgactgctacttataaagtag

SEQ ID NO: 920457 - DNA, 33 bp, Homo sapien
ataggcagtaatgggaaactttgaaggaggcct

SEQ ID NO: 920458 - DNA, 33 bp, Homo sapien
ataggcagtaatgggagactttgaaggaggcct

SEQ ID NO: 920459 - DNA, 33 bp, Homo sapien
gggatgccaactacttaaaactctcaagaataa

SEQ ID NO: 920460 - DNA, 33 bp, Homo sapien
gggatgccaactacttcaaactctcaagaataa

SEQ ID NO: 920461 - DNA, 33 bp, Homo sapien
ggactgtttcccagaaagaaattacacatacat

SEQ ID NO: 920462 - DNA, 33 bp, Homo sapien
ggactgtttcccagaatgaaattacacatacat

SEQ ID NO: 920463 - DNA, 33 bp, Homo sapien
tgagatggactgaaaaccctagacatggtacag

SEQ ID NO: 920464 - DNA, 33 bp, Homo sapien
tgagatggactgaaaatcctagacatggtacag

SEQ ID NO: 920465 - DNA, 33 bp, Homo sapien
cagtggaaaaaaacaacgcctttgattagaaca

SEQ ID NO: 920466 - DNA, 33 bp, Homo sapien
cagtggaaaaaaacaatgcctttgattagaaca

SEQ ID NO: 920467 - DNA, 33 bp, Homo sapien
aaggccattgttcttgcagtacttagagaaaat

SEQ ID NO: 920468 - DNA, 33 bp, Homo sapien
aaggccattgttcttggagtacttagagaaaat

SEQ ID NO: 920469 - DNA, 33 bp, Homo sapien
ctgtccacagaaaacacggcagtatatttttta

SEQ ID NO: 920470 - DNA, 33 bp, Homo sapien
ctgtccacagaaaacatggcagtatatttttta

SEQ ID NO: 920471 - DNA, 33 bp, Homo sapien
tgagagcagaataagaagctgagaaaaatctca

SEQ ID NO: 920472 - DNA, 33 bp, Homo sapien
tgagagcagaataagaggctgagaaaaatctca

SEQ ID NO: 920473 - DNA, 33 bp, Homo sapien
ctaaagtgcatatatacctgacatctgggtaat

SEQ ID NO: 920474 - DNA, 33 bp, Homo sapien
ctaaagtgcatatatatctgacatctgggtaat

SEQ ID NO: 920475 - DNA, 33 bp, Homo sapien
ttccaactgcctcaaaagaaatttattagtgtg

SEQ ID NO: 920476 - DNA, 33 bp, Homo sapien
ttccaactgcctcaaatgaaatttattagtgtg

SEQ ID NO: 920477 - DNA, 33 bp, Homo sapien
caacaggagcaggaataaaaagctctaaggcag

SEQ ID NO: 920478 - DNA, 33 bp, Homo sapien
caacaggagcaggaatgaaaagctctaaggcag

SEQ ID NO: 920479 - DNA, 33 bp, Homo sapien
cacatttcttttctcaatcttgtccttgacttt

SEQ ID NO: 920480 - DNA, 33 bp, Homo sapien
cacatttcttttctcagtcttgtccttgacttt

SEQ ID NO: 920481 - DNA, 33 bp, Homo sapien
aaatttgccattaaagaaagcataaatagagag

SEQ ID NO: 920482 - DNA, 33 bp, Homo sapien
aaatttgccattaaagcaagcataaatagagag

SEQ ID NO: 920483 - DNA, 33 bp, Homo sapien
gaaatgattcgctgccgcttagaggtttagagc

SEQ ID NO: 920484 - DNA, 33 bp, Homo sapien
gaaatgattcgctgcctcttagaggtttagagc

SEQ ID NO: 920485 - DNA, 33 bp, Homo sapien
atagggccaagaatagccgagataatcttaaag

SEQ ID NO: 920486 - DNA, 33 bp, Homo sapien
atagggccaagaatagtcgagataatcttaaag

SEQ ID NO: 920487 - DNA, 33 bp, Homo sapien
tctgaagccggacagaagacaaatgtgtttctg

SEQ ID NO: 920488 - DNA, 33 bp, Homo sapien
tctgaagccggacagaggacaaatgtgtttctg

SEQ ID NO: 920489 - DNA, 33 bp, Homo sapien
aatcgtttagctcaatcaatttttggtatttta

SEQ ID NO: 920490 - DNA, 33 bp, Homo sapien
aatcgtttagctcaatgaatttttggtatttta

SEQ ID NO: 920491 - DNA, 33 bp, Homo sapien
ctgcaatacttataccaagaaaatgcaagagag

SEQ ID NO: 920492 - DNA, 33 bp, Homo sapien
ctgcaatacttataccgagaaaatgcaagagag

SEQ ID NO: 920493 - DNA, 33 bp, Homo sapien
acctagcgtataattcaattcacgcaaagtgaa

SEQ ID NO: 920494 - DNA, 33 bp, Homo sapien
acctagcgtataattccattcacgcaaagtgaa

SEQ ID NO: 920495 - DNA, 33 bp, Homo sapien
tctggttggagaatcccggaggaagaggcattt

SEQ ID NO: 920496 - DNA, 33 bp, Homo sapien
tctggttggagaatcctggaggaagaggcattt

SEQ ID NO: 920497 - DNA, 33 bp, Homo sapien
atttaaatctgactccactgcggccgggcgcag

SEQ ID NO: 920498 - DNA, 33 bp, Homo sapien
atttaaatctgactcctctgcggccgggcgcag

SEQ ID NO: 920499 - DNA, 33 bp, Homo sapien
tttttctgaatctaacaaagggtcttactttct

SEQ ID NO: 920500 - DNA, 33 bp, Homo sapien
tttttctgaatctaacgaagggtcttactttct

SEQ ID NO: 920501 - DNA, 33 bp, Homo sapien
gcagatggcgagaaagaaagggtaggacacagg

SEQ ID NO: 920502 - DNA, 33 bp, Homo sapien
gcagatggcgagaaaggaagggtaggacacagg

SEQ ID NO: 920503 - DNA, 33 bp, Homo sapien
gaacaaacaaactgagaactgtggtttcacgct

SEQ ID NO: 920504 - DNA, 33 bp, Homo sapien
gaacaaacaaactgaggactgtggtttcacgct

SEQ ID NO: 920505 - DNA, 33 bp, Homo sapien
gaaaaggaagatagtaacgcccaaaaattccat

SEQ ID NO: 920506 - DNA, 33 bp, Homo sapien
gaaaaggaagatagtagcgcccaaaaattccat

SEQ ID NO: 920507 - DNA, 33 bp, Homo sapien
caagaaatagcaaactcaagaagaaaaagcatc

SEQ ID NO: 920508 - DNA, 33 bp, Homo sapien
caagaaatagcaaactgaagaagaaaaagcatc

SEQ ID NO: 920509 - DNA, 33 bp, Homo sapien
aaagcgggaacaccataaaactgtctcttaaaa

SEQ ID NO: 920510 - DNA, 33 bp, Homo sapien
aaagcgggaacaccatgaaactgtctcttaaaa

SEQ ID NO: 920511 - DNA, 33 bp, Homo sapien
gattattaatcaagagaccataatgccaaggga

SEQ ID NO: 920512 - DNA, 33 bp, Homo sapien
gattattaatcaagaggccataatgccaaggga

SEQ ID NO: 920513 - DNA, 33 bp, Homo sapien
ttgatcaaaatttgcaacactcatgtgggtcct

SEQ ID NO: 920514 - DNA, 33 bp, Homo sapien
ttgatcaaaatttgcagcactcatgtgggtcct

SEQ ID NO: 920515 - DNA, 33 bp, Homo sapien
gagtactgtcaggttaccaccaatgttcactta

SEQ ID NO: 920516 - DNA, 33 bp, Homo sapien
gagtactgtcaggttatcaccaatgttcactta

SEQ ID NO: 920517 - DNA, 33 bp, Homo sapien
ttggcacatagtgttaactttcaatctgagagc

SEQ ID NO: 920518 - DNA, 33 bp, Homo sapien
ttggcacatagtgttagctttcaatctgagagc

SEQ ID NO: 920519 - DNA, 33 bp, Homo sapien
cagggagcagcagagaaatgaaatccaggaagg

SEQ ID NO: 920520 - DNA, 33 bp, Homo sapien
cagggagcagcagagatatgaaatccaggaagg

SEQ ID NO: 920521 - DNA, 33 bp, Homo sapien
tcttgtggtcaaggagaattcaaaagagcagga

SEQ ID NO: 920522 - DNA, 33 bp, Homo sapien
tcttgtggtcaaggagcattcaaaagagcagga

SEQ ID NO: 920523 - DNA, 33 bp, Homo sapien
ttgggaaagagagcaaatcaggaaattcaacat

SEQ ID NO: 920524 - DNA, 33 bp, Homo sapien
ttgggaaagagagcaagtcaggaaattcaacat

SEQ ID NO: 920525 - DNA, 33 bp, Homo sapien
gtagaaaaggcacgctaagactatttaaagaca

SEQ ID NO: 920526 - DNA, 33 bp, Homo sapien
gtagaaaaggcacgctgagactatttaaagaca

SEQ ID NO: 920527 - DNA, 33 bp, Homo sapien
aaaataactgaacaaaagcgaattacatgaaag

SEQ ID NO: 920528 - DNA, 33 bp, Homo sapien
aaaataactgaacaaaggcgaattacatgaaag

SEQ ID NO: 920529 - DNA, 33 bp, Homo sapien
ttcaccatatacaagacggattacagatttaaa

SEQ ID NO: 920530 - DNA, 33 bp, Homo sapien
ttcaccatatacaagatggattacagatttaaa

SEQ ID NO: 920531 - DNA, 33 bp, Homo sapien
tacaagggtcagagaacgatgttgggaggtgag

SEQ ID NO: 920532 - DNA, 33 bp, Homo sapien
tacaagggtcagagaatgatgttgggaggtgag

SEQ ID NO: 920533 - DNA, 33 bp, Homo sapien
ctatactctcagggaaattacctccatattttt

SEQ ID NO: 920534 - DNA, 33 bp, Homo sapien
ctatactctcagggaagttacctccatattttt

SEQ ID NO: 920535 - DNA, 33 bp, Homo sapien
gtcatgctttccaatgaatttctagcttttgaa

SEQ ID NO: 920536 - DNA, 33 bp, Homo sapien
gtcatgctttccaatggatttctagcttttgaa

SEQ ID NO: 920537 - DNA, 33 bp, Homo sapien
ctgagaagattgatgaagttttgaaattattat

SEQ ID NO: 920538 - DNA, 33 bp, Homo sapien
ctgagaagattgatgaggttttgaaattattat

SEQ ID NO: 920539 - DNA, 33 bp, Homo sapien
gtgtgtcactgtctaacaacaggatctttccag

SEQ ID NO: 920540 - DNA, 33 bp, Homo sapien
gtgtgtcactgtctaataacaggatctttccag

SEQ ID NO: 920541 - DNA, 33 bp, Homo sapien
actcctccccttcaaccgtcaaccaccaaccac

SEQ ID NO: 920542 - DNA, 33 bp, Homo sapien
actcctccccttcaactgtcaaccaccaaccac

SEQ ID NO: 920543 - DNA, 33 bp, Homo sapien
gtgcctttcattcctgccaaacctggtcacgac

SEQ ID NO: 920544 - DNA, 33 bp, Homo sapien
gtgcctttcattcctgtcaaacctggtcacgac

SEQ ID NO: 920545 - DNA, 33 bp, Homo sapien
atacagtgattcaacaaccacaaagcaagctac

SEQ ID NO: 920546 - DNA, 33 bp, Homo sapien
atacagtgattcaacatccacaaagcaagctac

SEQ ID NO: 920547 - DNA, 33 bp, Homo sapien
tttcaaccggaagcatcaggtaaagtcactaaa

SEQ ID NO: 920548 - DNA, 33 bp, Homo sapien
tttcaaccggaagcattaggtaaagtcactaaa

SEQ ID NO: 920549 - DNA, 33 bp, Homo sapien
tcaattgctgtgagggcaaaagcaagagccaga

SEQ ID NO: 920550 - DNA, 33 bp, Homo sapien
tcaattgctgtgaggggaaaagcaagagccaga

SEQ ID NO: 920551 - DNA, 33 bp, Homo sapien
agaaagcagtaggagtgaagtaggactgcagtg

SEQ ID NO: 920552 - DNA, 33 bp, Homo sapien
agaaagcagtaggagttaagtaggactgcagtg

SEQ ID NO: 920553 - DNA, 33 bp, Homo sapien
tctacttccaattcacagtcatcacaacataac

SEQ ID NO: 920554 - DNA, 33 bp, Homo sapien
tctacttccaattcacggtcatcacaacataac

SEQ ID NO: 920555 - DNA, 33 bp, Homo sapien
tggtctcagctccagcacacaggatctctgaga

SEQ ID NO: 920556 - DNA, 33 bp, Homo sapien
tggtctcagctccagcgcacaggatctctgaga

SEQ ID NO: 920557 - DNA, 33 bp, Homo sapien
atgccactgaaatgtacactcaacaatggctaa

SEQ ID NO: 920558 - DNA, 33 bp, Homo sapien
atgccactgaaatgtatactcaacaatggctaa

SEQ ID NO: 920559 - DNA, 33 bp, Homo sapien
atgaattttaaacgtgacaaggtgccaggccct

SEQ ID NO: 920560 - DNA, 33 bp, Homo sapien
atgaattttaaacgtggcaaggtgccaggccct

SEQ ID NO: 920561 - DNA, 33 bp, Homo sapien
gtaggtctgaaagctacgatgacatccagagtt

SEQ ID NO: 920562 - DNA, 33 bp, Homo sapien
gtaggtctgaaagctatgatgacatccagagtt

SEQ ID NO: 920563 - DNA, 33 bp, Homo sapien
aatgttttctcactgacctttagtaatattaac

SEQ ID NO: 920564 - DNA, 33 bp, Homo sapien
aatgttttctcactgatctttagtaatattaac

SEQ ID NO: 920565 - DNA, 33 bp, Homo sapien
ttcagaaacataccaacaaatcataacatggaa

SEQ ID NO: 920566 - DNA, 33 bp, Homo sapien
ttcagaaacataccaagaaatcataacatggaa

SEQ ID NO: 920567 - DNA, 33 bp, Homo sapien
ataaatagatagataactcctgatagaaataca

SEQ ID NO: 920568 - DNA, 33 bp, Homo sapien
ataaatagatagataattcctgatagaaataca

SEQ ID NO: 920569 - DNA, 33 bp, Homo sapien
aatacattgcattgtgcactttacagcagtggt

SEQ ID NO: 920570 - DNA, 33 bp, Homo sapien
aatacattgcattgtgtactttacagcagtggt

SEQ ID NO: 920571 - DNA, 33 bp, Homo sapien
tcacagggttgcacaaccatgacctcaattcat

SEQ ID NO: 920572 - DNA, 33 bp, Homo sapien
tcacagggttgcacaatcatgacctcaattcat

SEQ ID NO: 920573 - DNA, 33 bp, Homo sapien
aataatttgccaggtaaaaataaacttctcaga

SEQ ID NO: 920574 - DNA, 33 bp, Homo sapien
aataatttgccaggtacaaataaacttctcaga

SEQ ID NO: 920575 - DNA, 33 bp, Homo sapien
cagaatcacagagtgaaaaatgtacttaacaat

SEQ ID NO: 920576 - DNA, 33 bp, Homo sapien
cagaatcacagagtgagaaatgtacttaacaat

SEQ ID NO: 920577 - DNA, 33 bp, Homo sapien
tggagaagctaagaaaaaagtaaccataataca

SEQ ID NO: 920578 - DNA, 33 bp, Homo sapien
tggagaagctaagaaagaagtaaccataataca

SEQ ID NO: 920579 - DNA, 33 bp, Homo sapien
catggttctgactagaaaagaggagtaatcatt

SEQ ID NO: 920580 - DNA, 33 bp, Homo sapien
catggttctgactagagaagaggagtaatcatt

SEQ ID NO: 920581 - DNA, 33 bp, Homo sapien
tgtgcttgtgaatgtacagttgtctctcagtat

SEQ ID NO: 920582 - DNA, 33 bp, Homo sapien
tgtgcttgtgaatgtatagttgtctctcagtat

SEQ ID NO: 920583 - DNA, 33 bp, Homo sapien
atttaaatatggaaccaatgttcaagtactgag

SEQ ID NO: 920584 - DNA, 33 bp, Homo sapien
atttaaatatggaaccgatgttcaagtactgag

SEQ ID NO: 920585 - DNA, 33 bp, Homo sapien
gtatgataagcgctacactaaaaattaaaaaat

SEQ ID NO: 920586 - DNA, 33 bp, Homo sapien
gtatgataagcgctacgctaaaaattaaaaaat

SEQ ID NO: 920587 - DNA, 33 bp, Homo sapien
tacatataccatgaaacactaccgagccataaa

SEQ ID NO: 920588 - DNA, 33 bp, Homo sapien
tacatataccatgaaatactaccgagccataaa

SEQ ID NO: 920589 - DNA, 33 bp, Homo sapien
gctgggacatgtacagcctctgggatttgtgtc

SEQ ID NO: 920590 - DNA, 33 bp, Homo sapien
gctgggacatgtacaggctctgggatttgtgtc

SEQ ID NO: 920591 - DNA, 33 bp, Homo sapien
ctcttcataataaaagactttcggttaacttct

SEQ ID NO: 920592 - DNA, 33 bp, Homo sapien
ctcttcataataaaagcctttcggttaacttct

SEQ ID NO: 920593 - DNA, 33 bp, Homo sapien
tcagcctttggccctacattggcattcgtgagg

SEQ ID NO: 920594 - DNA, 33 bp, Homo sapien
tcagcctttggccctatattggcattcgtgagg

SEQ ID NO: 920595 - DNA, 33 bp, Homo sapien
tcaagtgccttcagctcaaaataatcaatatac

SEQ ID NO: 920596 - DNA, 33 bp, Homo sapien
tcaagtgccttcagcttaaaataatcaatatac

SEQ ID NO: 920597 - DNA, 33 bp, Homo sapien
taaactctcaaaatggcaccttcgtcttgcaac

SEQ ID NO: 920598 - DNA, 33 bp, Homo sapien
taaactctcaaaatggtaccttcgtcttgcaac

SEQ ID NO: 920599 - DNA, 33 bp, Homo sapien
tccttctcctcccacacctcagggtgccagcgc

SEQ ID NO: 920600 - DNA, 33 bp, Homo sapien
tccttctcctcccacatctcagggtgccagcgc

SEQ ID NO: 920601 - DNA, 33 bp, Homo sapien
gtaggtccttcctttcaaggcagtgggttctct

SEQ ID NO: 920602 - DNA, 33 bp, Homo sapien
gtaggtccttcctttcgaggcagtgggttctct

SEQ ID NO: 920603 - DNA, 33 bp, Homo sapien
agcaggcagtaacctacagaaatctggtgtcct

SEQ ID NO: 920604 - DNA, 33 bp, Homo sapien
agcaggcagtaacctatagaaatctggtgtcct

SEQ ID NO: 920605 - DNA, 33 bp, Homo sapien
cgttcgtaaactgccacgccatgttaggtggca

SEQ ID NO: 920606 - DNA, 33 bp, Homo sapien
cgttcgtaaactgccaggccatgttaggtggca

SEQ ID NO: 920607 - DNA, 33 bp, Homo sapien
cagtagttttattttcaatcttgaagccacatg

SEQ ID NO: 920608 - DNA, 33 bp, Homo sapien
cagtagttttattttccatcttgaagccacatg

SEQ ID NO: 920609 - DNA, 33 bp, Homo sapien
taatggcttcttcctacatagccagttccattt

SEQ ID NO: 920610 - DNA, 33 bp, Homo sapien
taatggcttcttcctatatagccagttccattt

SEQ ID NO: 920611 - DNA, 33 bp, Homo sapien
ttatcaacatgttttccaatctcatgtcatgta

SEQ ID NO: 920612 - DNA, 33 bp, Homo sapien
ttatcaacatgttttctaatctcatgtcatgta

SEQ ID NO: 920613 - DNA, 33 bp, Homo sapien
aatgacagcttttttcccacttgctagtgatta

SEQ ID NO: 920614 - DNA, 33 bp, Homo sapien
aatgacagcttttttctcacttgctagtgatta

SEQ ID NO: 920615 - DNA, 33 bp, Homo sapien
aaaattggattcaataacagcattcaagcaatt

SEQ ID NO: 920616 - DNA, 33 bp, Homo sapien
aaaattggattcaatagcagcattcaagcaatt

SEQ ID NO: 920617 - DNA, 33 bp, Homo sapien
cttttctctatacataaaagtgacggcgaaact

SEQ ID NO: 920618 - DNA, 33 bp, Homo sapien
cttttctctatacatagaagtgacggcgaaact

SEQ ID NO: 920619 - DNA, 33 bp, Homo sapien
gcaaaagaggtcaatcagatcactaatgactaa

SEQ ID NO: 920620 - DNA, 33 bp, Homo sapien
gcaaaagaggtcaatcggatcactaatgactaa

SEQ ID NO: 920621 - DNA, 33 bp, Homo sapien
aaatggcttattacacagatttgtgactcacaa

SEQ ID NO: 920622 - DNA, 33 bp, Homo sapien
aaatggcttattacacggatttgtgactcacaa

SEQ ID NO: 920623 - DNA, 33 bp, Homo sapien
tataaattgtttacaaacacaaacaagatgatg

SEQ ID NO: 920624 - DNA, 33 bp, Homo sapien
tataaattgtttacaatcacaaacaagatgatg

SEQ ID NO: 920625 - DNA, 33 bp, Homo sapien
agagaaaatatagtagcaaagtggtgccgtgct

SEQ ID NO: 920626 - DNA, 33 bp, Homo sapien
agagaaaatatagtagtaaagtggtgccgtgct

SEQ ID NO: 920627 - DNA, 33 bp, Homo sapien
tttctaatactgcaaaataaatcaattatcaaa

SEQ ID NO: 920628 - DNA, 33 bp, Homo sapien
tttctaatactgcaaactaaatcaattatcaaa

SEQ ID NO: 920629 - DNA, 33 bp, Homo sapien
ccaaactaattttatacgtgaaatcagccgttg

SEQ ID NO: 920630 - DNA, 33 bp, Homo sapien
ccaaactaattttatatgtgaaatcagccgttg

SEQ ID NO: 920631 - DNA, 33 bp, Homo sapien
cataaatatttctcaacagcatttttcacaggg

SEQ ID NO: 920632 - DNA, 33 bp, Homo sapien
cataaatatttctcaatagcatttttcacaggg

SEQ ID NO: 920633 - DNA, 33 bp, Homo sapien
acctctacccactaaacgctggcagtttttcta

SEQ ID NO: 920634 - DNA, 33 bp, Homo sapien
acctctacccactaaatgctggcagtttttcta

SEQ ID NO: 920635 - DNA, 33 bp, Homo sapien
caaggtgaaaccactcaatatttactcatgaaa

SEQ ID NO: 920636 - DNA, 33 bp, Homo sapien
caaggtgaaaccactcgatatttactcatgaaa

SEQ ID NO: 920637 - DNA, 33 bp, Homo sapien
tgccctttactacaaacggagatggattgattt

SEQ ID NO: 920638 - DNA, 33 bp, Homo sapien
tgccctttactacaaatggagatggattgattt

SEQ ID NO: 920639 - DNA, 33 bp, Homo sapien
atgtctgactcagcagaatgtcaaccacataaa

SEQ ID NO: 920640 - DNA, 33 bp, Homo sapien
atgtctgactcagcaggatgtcaaccacataaa

SEQ ID NO: 920641 - DNA, 33 bp, Homo sapien
catgtcctggcatttaagtaaagtttaagtgtg

SEQ ID NO: 920642 - DNA, 33 bp, Homo sapien
catgtcctggcatttacgtaaagtttaagtgtg

SEQ ID NO: 920643 - DNA, 33 bp, Homo sapien
gtttacttcatattacacctttgtatgctgttg

SEQ ID NO: 920644 - DNA, 33 bp, Homo sapien
gtttacttcatattacccctttgtatgctgttg

SEQ ID NO: 920645 - DNA, 33 bp, Homo sapien
aagaagccaaaatgaaccaaatcgaggctttta

SEQ ID NO: 920646 - DNA, 33 bp, Homo sapien
aagaagccaaaatgaatcaaatcgaggctttta

SEQ ID NO: 920647 - DNA, 33 bp, Homo sapien
aagcaagctcaatcacacaagtgcttctcaagt

SEQ ID NO: 920648 - DNA, 33 bp, Homo sapien
aagcaagctcaatcacgcaagtgcttctcaagt

SEQ ID NO: 920649 - DNA, 33 bp, Homo sapien
cttggcacaaaattgccaccttaagattgtgaa

SEQ ID NO: 920650 - DNA, 33 bp, Homo sapien
cttggcacaaaattgctaccttaagattgtgaa

SEQ ID NO: 920651 - DNA, 33 bp, Homo sapien
ctttctggatgaaacaatcagcctgagcatatt

SEQ ID NO: 920652 - DNA, 33 bp, Homo sapien
ctttctggatgaaacactcagcctgagcatatt

SEQ ID NO: 920653 - DNA, 33 bp, Homo sapien
tggatgaatgtgagaaaccgacatgaaaactgt

SEQ ID NO: 920654 - DNA, 33 bp, Homo sapien
tggatgaatgtgagaacccgacatgaaaactgt

SEQ ID NO: 920655 - DNA, 33 bp, Homo sapien
tagcaagctcttcccaggtggctctgatgcaga

SEQ ID NO: 920656 - DNA, 33 bp, Homo sapien
tagcaagctcttcccatgtggctctgatgcaga

SEQ ID NO: 920657 - DNA, 33 bp, Homo sapien
gcacaagcaccatgaacgaagataaactgaaca

SEQ ID NO: 920658 - DNA, 33 bp, Homo sapien
gcacaagcaccatgaaggaagataaactgaaca

SEQ ID NO: 920659 - DNA, 33 bp, Homo sapien
acttctcaacagcaaccctaggtggaagaaggc

SEQ ID NO: 920660 - DNA, 33 bp, Homo sapien
acttctcaacagcaactctaggtggaagaaggc

SEQ ID NO: 920661 - DNA, 33 bp, Homo sapien
caactttagagaatcaataatatcaaatgctga

SEQ ID NO: 920662 - DNA, 33 bp, Homo sapien
caactttagagaatcagtaatatcaaatgctga

SEQ ID NO: 920663 - DNA, 33 bp, Homo sapien
tatcatgacttcttgccaatttttcataggcaa

SEQ ID NO: 920664 - DNA, 33 bp, Homo sapien
tatcatgacttcttgctaatttttcataggcaa

SEQ ID NO: 920665 - DNA, 33 bp, Homo sapien
gcaggaaataagagaccggttcctaaccctctt

SEQ ID NO: 920666 - DNA, 33 bp, Homo sapien
gcaggaaataagagactggttcctaaccctctt

SEQ ID NO: 920667 - DNA, 33 bp, Homo sapien
atgtggtcctggccaactgaatgcgtaatttga

SEQ ID NO: 920668 - DNA, 33 bp, Homo sapien
atgtggtcctggccaattgaatgcgtaatttga

SEQ ID NO: 920669 - DNA, 33 bp, Homo sapien
agactggctaagaaaacgctgaggatacaatat

SEQ ID NO: 920670 - DNA, 33 bp, Homo sapien
agactggctaagaaaatgctgaggatacaatat

SEQ ID NO: 920671 - DNA, 33 bp, Homo sapien
gcgtcatgaaggataacacgataatgagaaagt

SEQ ID NO: 920672 - DNA, 33 bp, Homo sapien
gcgtcatgaaggataatacgataatgagaaagt

SEQ ID NO: 920673 - DNA, 33 bp, Homo sapien
gtacaagtatctcttcaagactccactttcagt

SEQ ID NO: 920674 - DNA, 33 bp, Homo sapien
gtacaagtatctcttccagactccactttcagt

SEQ ID NO: 920675 - DNA, 33 bp, Homo sapien
tacaggtacacactaccgcacttagctgataat

SEQ ID NO: 920676 - DNA, 33 bp, Homo sapien
tacaggtacacactactgcacttagctgataat

SEQ ID NO: 920677 - DNA, 33 bp, Homo sapien
ttttactactgctcacaatggagtaacaggagc

SEQ ID NO: 920678 - DNA, 33 bp, Homo sapien
ttttactactgctcacgatggagtaacaggagc

SEQ ID NO: 920679 - DNA, 33 bp, Homo sapien
cattatacctcctaacagtaactgaaggaatga

SEQ ID NO: 920680 - DNA, 33 bp, Homo sapien
cattatacctcctaacggtaactgaaggaatga

SEQ ID NO: 920681 - DNA, 33 bp, Homo sapien
agaaaaggcttatcaacctatgaaagaagagat

SEQ ID NO: 920682 - DNA, 33 bp, Homo sapien
agaaaaggcttatcaagctatgaaagaagagat

SEQ ID NO: 920683 - DNA, 33 bp, Homo sapien
tgtgggtacttcgttacggcagcactaggaacc

SEQ ID NO: 920684 - DNA, 33 bp, Homo sapien
tgtgggtacttcgttatggcagcactaggaacc

SEQ ID NO: 920685 - DNA, 33 bp, Homo sapien
acacttgtaaatgcagaattgtggtaagggctt

SEQ ID NO: 920686 - DNA, 33 bp, Homo sapien
acacttgtaaatgcagcattgtggtaagggctt

SEQ ID NO: 920687 - DNA, 33 bp, Homo sapien
tgatgaacttgctagaaccttaatgagaatgaa

SEQ ID NO: 920688 - DNA, 33 bp, Homo sapien
tgatgaacttgctagagccttaatgagaatgaa

SEQ ID NO: 920689 - DNA, 33 bp, Homo sapien
ttttaatcgaccataacgtaattttagcttagt

SEQ ID NO: 920690 - DNA, 33 bp, Homo sapien
ttttaatcgaccataatgtaattttagcttagt

SEQ ID NO: 920691 - DNA, 33 bp, Homo sapien
aaggaaataagacaggacattaaccagtggaaa

SEQ ID NO: 920692 - DNA, 33 bp, Homo sapien
aaggaaataagacaggtcattaaccagtggaaa

SEQ ID NO: 920693 - DNA, 33 bp, Homo sapien
agaactacattgtatacattcaaggtttcagcc

SEQ ID NO: 920694 - DNA, 33 bp, Homo sapien
agaactacattgtatatattcaaggtttcagcc

SEQ ID NO: 920695 - DNA, 33 bp, Homo sapien
tgtcatgagaatccaacgtagagcactatacaa

SEQ ID NO: 920696 - DNA, 33 bp, Homo sapien
tgtcatgagaatccaatgtagagcactatacaa

SEQ ID NO: 920697 - DNA, 33 bp, Homo sapien
tccattgaggaataaaaagaacaggtatttctg

SEQ ID NO: 920698 - DNA, 33 bp, Homo sapien
tccattgaggaataaatagaacaggtatttctg

SEQ ID NO: 920699 - DNA, 33 bp, Homo sapien
ggagaacttcggtaaaagatgagctgaagctga

SEQ ID NO: 920700 - DNA, 33 bp, Homo sapien
ggagaacttcggtaaaggatgagctgaagctga

SEQ ID NO: 920701 - DNA, 33 bp, Homo sapien
cagcttttcctgatacgggtgaaatgtattgac

SEQ ID NO: 920702 - DNA, 33 bp, Homo sapien
cagcttttcctgatactggtgaaatgtattgac

SEQ ID NO: 920703 - DNA, 33 bp, Homo sapien
cattgtacactcttaggaggcacatgttggtat

SEQ ID NO: 920704 - DNA, 33 bp, Homo sapien
cattgtacactcttagtaggcacatgttggtat

SEQ ID NO: 920705 - DNA, 33 bp, Homo sapien
tgagactgttaagctgcagtaatctgaagggtg

SEQ ID NO: 920706 - DNA, 33 bp, Homo sapien
tgagactgttaagctggagtaatctgaagggtg

SEQ ID NO: 920707 - DNA, 33 bp, Homo sapien
ggtttagagtaactaccgctatgatacaaacat

SEQ ID NO: 920708 - DNA, 33 bp, Homo sapien
ggtttagagtaactactgctatgatacaaacat

SEQ ID NO: 920709 - DNA, 33 bp, Homo sapien
ctcttaaaatcatgaaagttttccctgagagat

SEQ ID NO: 920710 - DNA, 33 bp, Homo sapien
ctcttaaaatcatgaatgttttccctgagagat

SEQ ID NO: 920711 - DNA, 33 bp, Homo sapien
ctgcagtgaagactaacgggtatatgtaaagca

SEQ ID NO: 920712 - DNA, 33 bp, Homo sapien
ctgcagtgaagactaatgggtatatgtaaagca

SEQ ID NO: 920713 - DNA, 33 bp, Homo sapien
tagcttctaactttgaaaatttgattggagaac

SEQ ID NO: 920714 - DNA, 33 bp, Homo sapien
tagcttctaactttgagaatttgattggagaac

SEQ ID NO: 920715 - DNA, 33 bp, Homo sapien
acaaaaacttatatccagattatgtgatgaatt

SEQ ID NO: 920716 - DNA, 33 bp, Homo sapien
acaaaaacttatatcccgattatgtgatgaatt

SEQ ID NO: 920717 - DNA, 33 bp, Homo sapien
aaaccataatgaaacactactatgcacctatta

SEQ ID NO: 920718 - DNA, 33 bp, Homo sapien
aaaccataatgaaacattactatgcacctatta

SEQ ID NO: 920719 - DNA, 33 bp, Homo sapien
gatcctttgaaaacataagccgaataatgttac

SEQ ID NO: 920720 - DNA, 33 bp, Homo sapien
gatcctttgaaaacatgagccgaataatgttac

SEQ ID NO: 920721 - DNA, 33 bp, Homo sapien
actctgccaaccgaaaacagcagagtttcagca

SEQ ID NO: 920722 - DNA, 33 bp, Homo sapien
actctgccaaccgaaagcagcagagtttcagca

SEQ ID NO: 920723 - DNA, 33 bp, Homo sapien
catgttatgggcagcccagagagtgatacaaac

SEQ ID NO: 920724 - DNA, 33 bp, Homo sapien
catgttatgggcagcctagagagtgatacaaac

SEQ ID NO: 920725 - DNA, 33 bp, Homo sapien
tcttgcaatcaataggcaagtttactttaaggt

SEQ ID NO: 920726 - DNA, 33 bp, Homo sapien
tcttgcaatcaataggtaagtttactttaaggt

SEQ ID NO: 920727 - DNA, 33 bp, Homo sapien
tttagaggattcaaaaatgcccaaacttaagat

SEQ ID NO: 920728 - DNA, 33 bp, Homo sapien
tttagaggattcaaaagtgcccaaacttaagat

SEQ ID NO: 920729 - DNA, 33 bp, Homo sapien
aagaggtagaacaggacggctgaatataaacct

SEQ ID NO: 920730 - DNA, 33 bp, Homo sapien
aagaggtagaacaggatggctgaatataaacct

SEQ ID NO: 920731 - DNA, 33 bp, Homo sapien
gttatatgatgtataaacaggtactgtaatagc

SEQ ID NO: 920732 - DNA, 33 bp, Homo sapien
gttatatgatgtataaccaggtactgtaatagc

SEQ ID NO: 920733 - DNA, 33 bp, Homo sapien
tggcattgcagataaccgaagaaagagggttct

SEQ ID NO: 920734 - DNA, 33 bp, Homo sapien
tggcattgcagataactgaagaaagagggttct

SEQ ID NO: 920735 - DNA, 33 bp, Homo sapien
atttgcatgctttttaaaagtggcagcagttct

SEQ ID NO: 920736 - DNA, 33 bp, Homo sapien
atttgcatgctttttacaagtggcagcagttct

SEQ ID NO: 920737 - DNA, 33 bp, Homo sapien
catcagatccaattagaatagcattacaaggta

SEQ ID NO: 920738 - DNA, 33 bp, Homo sapien
catcagatccaattagtatagcattacaaggta

SEQ ID NO: 920739 - DNA, 33 bp, Homo sapien
ggttggtcagttgttacatatttgtgtatagcc

SEQ ID NO: 920740 - DNA, 33 bp, Homo sapien
ggttggtcagttgttatatatttgtgtatagcc

SEQ ID NO: 920741 - DNA, 33 bp, Homo sapien
atttgtgtatagccagcaggatgaatttaaact

SEQ ID NO: 920742 - DNA, 33 bp, Homo sapien
atttgtgtatagccagtaggatgaatttaaact

SEQ ID NO: 920743 - DNA, 33 bp, Homo sapien
tgagccttgtttagcacccctgacccttggcac

SEQ ID NO: 920744 - DNA, 33 bp, Homo sapien
tgagccttgtttagcatccctgacccttggcac

SEQ ID NO: 920745 - DNA, 33 bp, Homo sapien
ctaatagcatacttctcaattccgtgatcagta

SEQ ID NO: 920746 - DNA, 33 bp, Homo sapien
ctaatagcatacttcttaattccgtgatcagta

SEQ ID NO: 920747 - DNA, 33 bp, Homo sapien
gactactattgtccaacgaacgacatcactaag

SEQ ID NO: 920748 - DNA, 33 bp, Homo sapien
gactactattgtccaatgaacgacatcactaag

SEQ ID NO: 920749 - DNA, 33 bp, Homo sapien
atgtgtagggtcaaaaatccttctgtctctatc

SEQ ID NO: 920750 - DNA, 33 bp, Homo sapien
atgtgtagggtcaaaagtccttctgtctctatc

SEQ ID NO: 920751 - DNA, 33 bp, Homo sapien
tcatattctatgacacagaacttaaaggtctca

SEQ ID NO: 920752 - DNA, 33 bp, Homo sapien
tcatattctatgacacggaacttaaaggtctca

SEQ ID NO: 920753 - DNA, 33 bp, Homo sapien
cttaagagattgtagaaatggtgctacttataa

SEQ ID NO: 920754 - DNA, 33 bp, Homo sapien
cttaagagattgtagagatggtgctacttataa

SEQ ID NO: 920755 - DNA, 33 bp, Homo sapien
tccacatttgggttagaattatagaaggcccac

SEQ ID NO: 920756 - DNA, 33 bp, Homo sapien
tccacatttgggttagtattatagaaggcccac

SEQ ID NO: 920757 - DNA, 33 bp, Homo sapien
gccaatccagttatgacatcgtcactggtggtg

SEQ ID NO: 920758 - DNA, 33 bp, Homo sapien
gccaatccagttatgatatcgtcactggtggtg

SEQ ID NO: 920759 - DNA, 33 bp, Homo sapien
tgtttaaaagccaagaagttgttatagttttaa

SEQ ID NO: 920760 - DNA, 33 bp, Homo sapien
tgtttaaaagccaagaggttgttatagttttaa

SEQ ID NO: 920761 - DNA, 33 bp, Homo sapien
tccttcctatgaggaaagtcacatatttgtggg

SEQ ID NO: 920762 - DNA, 33 bp, Homo sapien
tccttcctatgaggaacgtcacatatttgtggg

SEQ ID NO: 920763 - DNA, 33 bp, Homo sapien
tcaaaaggataaacataaacaccaaattccaac

SEQ ID NO: 920764 - DNA, 33 bp, Homo sapien
tcaaaaggataaacatgaacaccaaattccaac

SEQ ID NO: 920765 - DNA, 33 bp, Homo sapien
ggtacatttttctgcacggaccataatctctgt

SEQ ID NO: 920766 - DNA, 33 bp, Homo sapien
ggtacatttttctgcatggaccataatctctgt

SEQ ID NO: 920767 - DNA, 33 bp, Homo sapien
aaggtttgcttatcatcaaaacgtaaaatatgc

SEQ ID NO: 920768 - DNA, 33 bp, Homo sapien
aaggtttgcttatcattaaaacgtaaaatatgc

SEQ ID NO: 920769 - DNA, 33 bp, Homo sapien
taaaggcctaagaaaagtcagacttaaacaaca

SEQ ID NO: 920770 - DNA, 33 bp, Homo sapien
taaaggcctaagaaaattcagacttaaacaaca

SEQ ID NO: 920771 - DNA, 33 bp, Homo sapien
atttaaaagactcaccaaaaaggaggtaccact

SEQ ID NO: 920772 - DNA, 33 bp, Homo sapien
atttaaaagactcaccgaaaaggaggtaccact

SEQ ID NO: 920773 - DNA, 33 bp, Homo sapien
ctaaatccttccgtaacgtgtggtcaaggagtt

SEQ ID NO: 920774 - DNA, 33 bp, Homo sapien
ctaaatccttccgtaatgtgtggtcaaggagtt

SEQ ID NO: 920775 - DNA, 33 bp, Homo sapien
aagtgcttcgaaggaactagacagtaagggcca

SEQ ID NO: 920776 - DNA, 33 bp, Homo sapien
aagtgcttcgaaggaagtagacagtaagggcca

SEQ ID NO: 920777 - DNA, 33 bp, Homo sapien
ttttgcttagcctagcagaatgtcctggaaact

SEQ ID NO: 920778 - DNA, 33 bp, Homo sapien
ttttgcttagcctagcggaatgtcctggaaact

SEQ ID NO: 920779 - DNA, 33 bp, Homo sapien
tcaataaacctgagcacgggaaaatatatatga

SEQ ID NO: 920780 - DNA, 33 bp, Homo sapien
tcaataaacctgagcaggggaaaatatatatga

SEQ ID NO: 920781 - DNA, 33 bp, Homo sapien
gttttcatgaaaatcacaatgctaatactgtta

SEQ ID NO: 920782 - DNA, 33 bp, Homo sapien
gttttcatgaaaatcataatgctaatactgtta

SEQ ID NO: 920783 - DNA, 33 bp, Homo sapien
gttaagttttaaggaaaaatggcattgctacta

SEQ ID NO: 920784 - DNA, 33 bp, Homo sapien
gttaagttttaaggaagaatggcattgctacta

SEQ ID NO: 920785 - DNA, 33 bp, Homo sapien
gcgaaacagatactccaactctcccaaactcca

SEQ ID NO: 920786 - DNA, 33 bp, Homo sapien
gcgaaacagatactccgactctcccaaactcca

SEQ ID NO: 920787 - DNA, 33 bp, Homo sapien
ttcctgtaattcttcccactgctgttgttgagc

SEQ ID NO: 920788 - DNA, 33 bp, Homo sapien
ttcctgtaattcttcctactgctgttgttgagc

SEQ ID NO: 920789 - DNA, 33 bp, Homo sapien
cttaatacaacagatccctgaattgttcacatg

SEQ ID NO: 920790 - DNA, 33 bp, Homo sapien
cttaatacaacagatctctgaattgttcacatg

SEQ ID NO: 920791 - DNA, 33 bp, Homo sapien
tataagctgactttacccatattttgaagtgaa

SEQ ID NO: 920792 - DNA, 33 bp, Homo sapien
tataagctgactttactcatattttgaagtgaa

SEQ ID NO: 920793 - DNA, 33 bp, Homo sapien
ggtaagctgagagtaactgaaagccggagcagc

SEQ ID NO: 920794 - DNA, 33 bp, Homo sapien
ggtaagctgagagtaattgaaagccggagcagc

SEQ ID NO: 920795 - DNA, 33 bp, Homo sapien
caaaagtatcagtctacacaaggaaacattggt

SEQ ID NO: 920796 - DNA, 33 bp, Homo sapien
caaaagtatcagtctatacaaggaaacattggt

SEQ ID NO: 920797 - DNA, 33 bp, Homo sapien
cttcactagccagttaccagaggggcagaatga

SEQ ID NO: 920798 - DNA, 33 bp, Homo sapien
cttcactagccagttatcagaggggcagaatga

SEQ ID NO: 920799 - DNA, 33 bp, Homo sapien
ctgcccacaatttttaaaagtgactccattgct

SEQ ID NO: 920800 - DNA, 33 bp, Homo sapien
ctgcccacaatttttacaagtgactccattgct

SEQ ID NO: 920801 - DNA, 33 bp, Homo sapien
gtaaatgtttcgagtacgttattgggctccatt

SEQ ID NO: 920802 - DNA, 33 bp, Homo sapien
gtaaatgtttcgagtatgttattgggctccatt

SEQ ID NO: 920803 - DNA, 33 bp, Homo sapien
ctaacttaggttctcccgctatgtgctctcata

SEQ ID NO: 920804 - DNA, 33 bp, Homo sapien
ctaacttaggttctcctgctatgtgctctcata

SEQ ID NO: 920805 - DNA, 33 bp, Homo sapien
atttctctatcaaggcaatattttccttcagga

SEQ ID NO: 920806 - DNA, 33 bp, Homo sapien
atttctctatcaaggcgatattttccttcagga

SEQ ID NO: 920807 - DNA, 33 bp, Homo sapien
gtagactttcgtgaacacttttagccttaagtg

SEQ ID NO: 920808 - DNA, 33 bp, Homo sapien
gtagactttcgtgaacccttttagccttaagtg

SEQ ID NO: 920809 - DNA, 33 bp, Homo sapien
tccagtaggagtactagggaaaacattctgtgt

SEQ ID NO: 920810 - DNA, 33 bp, Homo sapien
tccagtaggagtactatggaaaacattctgtgt

SEQ ID NO: 920811 - DNA, 33 bp, Homo sapien
gaggaaatggaaaaaaagctgaatctaagaggt

SEQ ID NO: 920812 - DNA, 33 bp, Homo sapien
gaggaaatggaaaaaaggctgaatctaagaggt

SEQ ID NO: 920813 - DNA, 33 bp, Homo sapien
tagctgtttttgcagtaacgtgtttgctgtatc

SEQ ID NO: 920814 - DNA, 33 bp, Homo sapien
tagctgtttttgcagttacgtgtttgctgtatc

SEQ ID NO: 920815 - DNA, 33 bp, Homo sapien
tgtttgtcaggaaatagaagggaactgtcacag

SEQ ID NO: 920816 - DNA, 33 bp, Homo sapien
tgtttgtcaggaaatataagggaactgtcacag

SEQ ID NO: 920817 - DNA, 33 bp, Homo sapien
tgaactgcctatgcaaagtatctaggttatgtg

SEQ ID NO: 920818 - DNA, 33 bp, Homo sapien
tgaactgcctatgcaacgtatctaggttatgtg

SEQ ID NO: 920819 - DNA, 33 bp, Homo sapien
cttttcaacccataccaccctccagtagtccat

SEQ ID NO: 920820 - DNA, 33 bp, Homo sapien
cttttcaacccatacctccctccagtagtccat

SEQ ID NO: 920821 - DNA, 33 bp, Homo sapien
agtgataaaatgttcaaaatgacaatgtattta

SEQ ID NO: 920822 - DNA, 33 bp, Homo sapien
agtgataaaatgttcagaatgacaatgtattta

SEQ ID NO: 920823 - DNA, 33 bp, Homo sapien
gtatatattcaaattagggctcagcaaatcagg

SEQ ID NO: 920824 - DNA, 33 bp, Homo sapien
gtatatattcaaattatggctcagcaaatcagg

SEQ ID NO: 920825 - DNA, 33 bp, Homo sapien
ctctctgtaagcaaataagtccactgagtttca

SEQ ID NO: 920826 - DNA, 33 bp, Homo sapien
ctctctgtaagcaaatgagtccactgagtttca

SEQ ID NO: 920827 - DNA, 33 bp, Homo sapien
aactctcagtggatgcacttcaccaactatgtc

SEQ ID NO: 920828 - DNA, 33 bp, Homo sapien
aactctcagtggatgcgcttcaccaactatgtc

SEQ ID NO: 920829 - DNA, 33 bp, Homo sapien
ttgctgctagtaagaccagaagaggaccattgc

SEQ ID NO: 920830 - DNA, 33 bp, Homo sapien
ttgctgctagtaagacgagaagaggaccattgc

SEQ ID NO: 920831 - DNA, 33 bp, Homo sapien
actaattcaacaaatgaactaacagcagggtta

SEQ ID NO: 920832 - DNA, 33 bp, Homo sapien
actaattcaacaaatgtactaacagcagggtta

SEQ ID NO: 920833 - DNA, 33 bp, Homo sapien
aagatgctagcagtataagtgttggcatcaatg

SEQ ID NO: 920834 - DNA, 33 bp, Homo sapien
aagatgctagcagtatgagtgttggcatcaatg

SEQ ID NO: 920835 - DNA, 33 bp, Homo sapien
gtttgagttattgtctcactattgagttgtttt

SEQ ID NO: 920836 - DNA, 33 bp, Homo sapien
gtttgagttattgtcttactattgagttgtttt

SEQ ID NO: 920837 - DNA, 33 bp, Homo sapien
gtaataactagcaagagtaaaaaagtattagta

SEQ ID NO: 920838 - DNA, 33 bp, Homo sapien
gtaataactagcaagattaaaaaagtattagta

SEQ ID NO: 920839 - DNA, 33 bp, Homo sapien
gactaaaatgccagtacggttttgatccttgaa

SEQ ID NO: 920840 - DNA, 33 bp, Homo sapien
gactaaaatgccagtatggttttgatccttgaa

SEQ ID NO: 920841 - DNA, 33 bp, Homo sapien
tccagagatccgtcccccattagaaagagcaca

SEQ ID NO: 920842 - DNA, 33 bp, Homo sapien
tccagagatccgtcccgcattagaaagagcaca

SEQ ID NO: 920843 - DNA, 33 bp, Homo sapien
ccttttcggtttttcacaatggaagcttttaca

SEQ ID NO: 920844 - DNA, 33 bp, Homo sapien
ccttttcggtttttcataatggaagcttttaca

SEQ ID NO: 920845 - DNA, 33 bp, Homo sapien
agagagagcagtgaaaacctctgaaatgatgag

SEQ ID NO: 920846 - DNA, 33 bp, Homo sapien
agagagagcagtgaaaccctctgaaatgatgag

SEQ ID NO: 920847 - DNA, 33 bp, Homo sapien
ggataaaagagaagacaaaaatacaggtattgg

SEQ ID NO: 920848 - DNA, 33 bp, Homo sapien
ggataaaagagaagacgaaaatacaggtattgg

SEQ ID NO: 920849 - DNA, 33 bp, Homo sapien
gacagcaatctggaaaattgatagctacatggt

SEQ ID NO: 920850 - DNA, 33 bp, Homo sapien
gacagcaatctggaaagttgatagctacatggt

SEQ ID NO: 920851 - DNA, 33 bp, Homo sapien
gttatattacttgccaaactttttcctcacaaa

SEQ ID NO: 920852 - DNA, 33 bp, Homo sapien
gttatattacttgccagactttttcctcacaaa

SEQ ID NO: 920853 - DNA, 33 bp, Homo sapien
aatgtgttttctcagacagttaattaagccaaa

SEQ ID NO: 920854 - DNA, 33 bp, Homo sapien
aatgtgttttctcagatagttaattaagccaaa

SEQ ID NO: 920855 - DNA, 33 bp, Homo sapien
gatgataacataagcaagtaaaacgtgtacatg

SEQ ID NO: 920856 - DNA, 33 bp, Homo sapien
gatgataacataagcaggtaaaacgtgtacatg

SEQ ID NO: 920857 - DNA, 33 bp, Homo sapien
taagtcaccacattacaattaagtcaaagtcat

SEQ ID NO: 920858 - DNA, 33 bp, Homo sapien
taagtcaccacattacgattaagtcaaagtcat

SEQ ID NO: 920859 - DNA, 33 bp, Homo sapien
gtcaaagttatctgcaagactaaaagtgcactc

SEQ ID NO: 920860 - DNA, 33 bp, Homo sapien
gtcaaagttatctgcaggactaaaagtgcactc

SEQ ID NO: 920861 - DNA, 33 bp, Homo sapien
cttggaatcagaagagccctaagctgtttctcc

SEQ ID NO: 920862 - DNA, 33 bp, Homo sapien
cttggaatcagaagagtcctaagctgtttctcc

SEQ ID NO: 920863 - DNA, 33 bp, Homo sapien
aaaagaaagaagggaactgctaagtgaaagcaa

SEQ ID NO: 920864 - DNA, 33 bp, Homo sapien
aaaagaaagaagggaattgctaagtgaaagcaa

SEQ ID NO: 920865 - DNA, 33 bp, Homo sapien
acaaatatagcatgtaagtatcatttccaaaag

SEQ ID NO: 920866 - DNA, 33 bp, Homo sapien
acaaatatagcatgtacgtatcatttccaaaag

SEQ ID NO: 920867 - DNA, 33 bp, Homo sapien
agctacagcacagtaccattttgagagccagcc

SEQ ID NO: 920868 - DNA, 33 bp, Homo sapien
agctacagcacagtacgattttgagagccagcc

SEQ ID NO: 920869 - DNA, 33 bp, Homo sapien
cgcacactccatgactaaacagcggtgtaacct

SEQ ID NO: 920870 - DNA, 33 bp, Homo sapien
cgcacactccatgactgaacagcggtgtaacct

SEQ ID NO: 920871 - DNA, 33 bp, Homo sapien
caattccaggaaccagaaaaaatgggtttgtac

SEQ ID NO: 920872 - DNA, 33 bp, Homo sapien
caattccaggaaccagcaaaaatgggtttgtac

SEQ ID NO: 920873 - DNA, 33 bp, Homo sapien
agggattcctgttataagataaaaatgtaggaa

SEQ ID NO: 920874 - DNA, 33 bp, Homo sapien
agggattcctgttatatgataaaaatgtaggaa

SEQ ID NO: 920875 - DNA, 33 bp, Homo sapien
ttctactagtaactcaaattgttgccaagtcat

SEQ ID NO: 920876 - DNA, 33 bp, Homo sapien
ttctactagtaactcagattgttgccaagtcat

SEQ ID NO: 920877 - DNA, 33 bp, Homo sapien
gggtctcctgaaccaacggcctgcaaagctcct

SEQ ID NO: 920878 - DNA, 33 bp, Homo sapien
gggtctcctgaaccaatggcctgcaaagctcct

SEQ ID NO: 920879 - DNA, 33 bp, Homo sapien
cagaaggtgtgtttagccccttattcaagccat

SEQ ID NO: 920880 - DNA, 33 bp, Homo sapien
cagaaggtgtgtttagtcccttattcaagccat

SEQ ID NO: 920881 - DNA, 33 bp, Homo sapien
tggaaacttgtgctgaaatctagattgaacaag

SEQ ID NO: 920882 - DNA, 33 bp, Homo sapien
tggaaacttgtgctgagatctagattgaacaag

SEQ ID NO: 920883 - DNA, 33 bp, Homo sapien
gccaagccagtatgaacaattgatatcctcata

SEQ ID NO: 920884 - DNA, 33 bp, Homo sapien
gccaagccagtatgaataattgatatcctcata

SEQ ID NO: 920885 - DNA, 33 bp, Homo sapien
ccttgtgctttaatgactcacagagctttacac

SEQ ID NO: 920886 - DNA, 33 bp, Homo sapien
ccttgtgctttaatgagtcacagagctttacac

SEQ ID NO: 920887 - DNA, 33 bp, Homo sapien
gacagggagtcactagcagacaaatgggagaag

SEQ ID NO: 920888 - DNA, 33 bp, Homo sapien
gacagggagtcactaggagacaaatgggagaag

SEQ ID NO: 920889 - DNA, 33 bp, Homo sapien
ggacacacctggaagacgaggaagcagatagtc

SEQ ID NO: 920890 - DNA, 33 bp, Homo sapien
ggacacacctggaagatgaggaagcagatagtc

SEQ ID NO: 920891 - DNA, 33 bp, Homo sapien
gaaagacggttatgaaagccctttagagactat

SEQ ID NO: 920892 - DNA, 33 bp, Homo sapien
gaaagacggttatgaatgccctttagagactat

SEQ ID NO: 920893 - DNA, 33 bp, Homo sapien
tatgtccatgtctctacagtatcattaaaagga

SEQ ID NO: 920894 - DNA, 33 bp, Homo sapien
tatgtccatgtctctagagtatcattaaaagga

SEQ ID NO: 920895 - DNA, 33 bp, Homo sapien
actagcctaataaataatagctcactgggagtt

SEQ ID NO: 920896 - DNA, 33 bp, Homo sapien
actagcctaataaatactagctcactgggagtt

SEQ ID NO: 920897 - DNA, 33 bp, Homo sapien
atattgttgcagccccccttaggagcaatttgg

SEQ ID NO: 920898 - DNA, 33 bp, Homo sapien
atattgttgcagcccctcttaggagcaatttgg

SEQ ID NO: 920899 - DNA, 33 bp, Homo sapien
acaaggtagtatccaccagattgctcctttgta

SEQ ID NO: 920900 - DNA, 33 bp, Homo sapien
acaaggtagtatccactagattgctcctttgta

SEQ ID NO: 920901 - DNA, 33 bp, Homo sapien
tcctgccagctatcccaaacagttagtgctatg

SEQ ID NO: 920902 - DNA, 33 bp, Homo sapien
tcctgccagctatccccaacagttagtgctatg

SEQ ID NO: 920903 - DNA, 33 bp, Homo sapien
actctgactaatcttcaagctttagctccccta

SEQ ID NO: 920904 - DNA, 33 bp, Homo sapien
actctgactaatcttcgagctttagctccccta

SEQ ID NO: 920905 - DNA, 33 bp, Homo sapien
cagtgaacaaaaacaccagaggtaacttgaatg

SEQ ID NO: 920906 - DNA, 33 bp, Homo sapien
cagtgaacaaaaacactagaggtaacttgaatg

SEQ ID NO: 920907 - DNA, 33 bp, Homo sapien
cactatggataacaccaaagtacactcactatg

SEQ ID NO: 920908 - DNA, 33 bp, Homo sapien
cactatggataacaccgaagtacactcactatg

SEQ ID NO: 920909 - DNA, 33 bp, Homo sapien
tggatacaaaacatgaaccaattttatgctgtt

SEQ ID NO: 920910 - DNA, 33 bp, Homo sapien
tggatacaaaacatgacccaattttatgctgtt

SEQ ID NO: 920911 - DNA, 33 bp, Homo sapien
attactgcctagagagcaatagtatttttgtgg

SEQ ID NO: 920912 - DNA, 33 bp, Homo sapien
attactgcctagagagtaatagtatttttgtgg

SEQ ID NO: 920913 - DNA, 33 bp, Homo sapien
taatcccttaatagaggaatgtcattggataaa

SEQ ID NO: 920914 - DNA, 33 bp, Homo sapien
taatcccttaatagagtaatgtcattggataaa

SEQ ID NO: 920915 - DNA, 33 bp, Homo sapien
acatctgaaggttaaccatgtggcaatttgtac

SEQ ID NO: 920916 - DNA, 33 bp, Homo sapien
acatctgaaggttaactatgtggcaatttgtac

SEQ ID NO: 920917 - DNA, 33 bp, Homo sapien
gcattcctaattctcaagagcctcaccaggatt

SEQ ID NO: 920918 - DNA, 33 bp, Homo sapien
gcattcctaattctcaggagcctcaccaggatt

SEQ ID NO: 920919 - DNA, 33 bp, Homo sapien
ttcatgatcatccaacaacttcttaatcgcttt

SEQ ID NO: 920920 - DNA, 33 bp, Homo sapien
ttcatgatcatccaacgacttcttaatcgcttt

SEQ ID NO: 920921 - DNA, 33 bp, Homo sapien
accgctgtcctaaagaataatcgctaaaagcaa

SEQ ID NO: 920922 - DNA, 33 bp, Homo sapien
accgctgtcctaaagagtaatcgctaaaagcaa

SEQ ID NO: 920923 - DNA, 33 bp, Homo sapien
tcttattcataaaggcactaataggcatttctc

SEQ ID NO: 920924 - DNA, 33 bp, Homo sapien
tcttattcataaaggcgctaataggcatttctc

SEQ ID NO: 920925 - DNA, 33 bp, Homo sapien
cagcatcaggctctgcaattatgactcattggg

SEQ ID NO: 920926 - DNA, 33 bp, Homo sapien
cagcatcaggctctgcgattatgactcattggg

SEQ ID NO: 920927 - DNA, 33 bp, Homo sapien
taggagaattagtatacgtgtgcttgtgtatat

SEQ ID NO: 920928 - DNA, 33 bp, Homo sapien
taggagaattagtatatgtgtgcttgtgtatat

SEQ ID NO: 920929 - DNA, 33 bp, Homo sapien
gtcctcctagcaggtaaatacatgagctttata

SEQ ID NO: 920930 - DNA, 33 bp, Homo sapien
gtcctcctagcaggtagatacatgagctttata

SEQ ID NO: 920931 - DNA, 33 bp, Homo sapien
ggaagacccagttctaaaaggatcagagcattt

SEQ ID NO: 920932 - DNA, 33 bp, Homo sapien
ggaagacccagttctagaaggatcagagcattt

SEQ ID NO: 920933 - DNA, 33 bp, Homo sapien
tatagcaaaggtgttgaaagcatgggttgtaca

SEQ ID NO: 920934 - DNA, 33 bp, Homo sapien
tatagcaaaggtgttggaagcatgggttgtaca

SEQ ID NO: 920935 - DNA, 33 bp, Homo sapien
agccagagatgatgggaaagtccaagaagccgc

SEQ ID NO: 920936 - DNA, 33 bp, Homo sapien
agccagagatgatggggaagtccaagaagccgc

SEQ ID NO: 920937 - DNA, 33 bp, Homo sapien
atgtaataagttatgcaccgggaagtaatttca

SEQ ID NO: 920938 - DNA, 33 bp, Homo sapien
atgtaataagttatgccccgggaagtaatttca

SEQ ID NO: 920939 - DNA, 33 bp, Homo sapien
agataacaaacgaagacaggtcacccagggtaa

SEQ ID NO: 920940 - DNA, 33 bp, Homo sapien
agataacaaacgaagagaggtcacccagggtaa

SEQ ID NO: 920941 - DNA, 33 bp, Homo sapien
tgaaggaaagccaaataactcaggaggaaagcc

SEQ ID NO: 920942 - DNA, 33 bp, Homo sapien
tgaaggaaagccaaatcactcaggaggaaagcc

SEQ ID NO: 920943 - DNA, 33 bp, Homo sapien
agcatgaaacattttacggaagagtatggtaca

SEQ ID NO: 920944 - DNA, 33 bp, Homo sapien
agcatgaaacattttatggaagagtatggtaca

SEQ ID NO: 920945 - DNA, 33 bp, Homo sapien
acttgtaggcggagacgggaaatctgcattgtt

SEQ ID NO: 920946 - DNA, 33 bp, Homo sapien
acttgtaggcggagactggaaatctgcattgtt

SEQ ID NO: 920947 - DNA, 33 bp, Homo sapien
tgacgaagaactaaacacttcagcatacaacaa

SEQ ID NO: 920948 - DNA, 33 bp, Homo sapien
tgacgaagaactaaactcttcagcatacaacaa

SEQ ID NO: 920949 - DNA, 33 bp, Homo sapien
caacacaaattcttcaataaaacgcattttctc

SEQ ID NO: 920950 - DNA, 33 bp, Homo sapien
caacacaaattcttcagtaaaacgcattttctc

SEQ ID NO: 920951 - DNA, 33 bp, Homo sapien
gaatctcagaacttgaagattggctctctgaaa

SEQ ID NO: 920952 - DNA, 33 bp, Homo sapien
gaatctcagaacttgaggattggctctctgaaa

SEQ ID NO: 920953 - DNA, 33 bp, Homo sapien
gttagctggtaatgccggcttcgttgtgtggtt

SEQ ID NO: 920954 - DNA, 33 bp, Homo sapien
gttagctggtaatgcctgcttcgttgtgtggtt

SEQ ID NO: 920955 - DNA, 33 bp, Homo sapien
tgatgagttgatgggaacgtcaaaccaacatgg

SEQ ID NO: 920956 - DNA, 33 bp, Homo sapien
tgatgagttgatgggagcgtcaaaccaacatgg

SEQ ID NO: 920957 - DNA, 33 bp, Homo sapien
cttatgcttagagtcacagtatctaagaaccta

SEQ ID NO: 920958 - DNA, 33 bp, Homo sapien
cttatgcttagagtcagagtatctaagaaccta

SEQ ID NO: 920959 - DNA, 33 bp, Homo sapien
tgcgtgaaaatgccctcaattagtgaaagaagg

SEQ ID NO: 920960 - DNA, 33 bp, Homo sapien
tgcgtgaaaatgcccttaattagtgaaagaagg

SEQ ID NO: 920961 - DNA, 33 bp, Homo sapien
tgttgagccaatcctacattgttaaacaatttt

SEQ ID NO: 920962 - DNA, 33 bp, Homo sapien
tgttgagccaatcctatattgttaaacaatttt

SEQ ID NO: 920963 - DNA, 33 bp, Homo sapien
actgatgtccttaatacacagtgaatagagaaa

SEQ ID NO: 920964 - DNA, 33 bp, Homo sapien
actgatgtccttaatatacagtgaatagagaaa

SEQ ID NO: 920965 - DNA, 33 bp, Homo sapien
atactgggcacccagaatagtagtagtatagta

SEQ ID NO: 920966 - DNA, 33 bp, Homo sapien
atactgggcacccagagtagtagtagtatagta

SEQ ID NO: 920967 - DNA, 33 bp, Homo sapien
caaagctgtctaagtgcatcagctagggtccta

SEQ ID NO: 920968 - DNA, 33 bp, Homo sapien
caaagctgtctaagtgtatcagctagggtccta

SEQ ID NO: 920969 - DNA, 33 bp, Homo sapien
ttggccaggcattgtacgtgctttggtatatta

SEQ ID NO: 920970 - DNA, 33 bp, Homo sapien
ttggccaggcattgtatgtgctttggtatatta

SEQ ID NO: 920971 - DNA, 33 bp, Homo sapien
actcagcttcatctaaacttatgtcagaaaaaa

SEQ ID NO: 920972 - DNA, 33 bp, Homo sapien
actcagcttcatctaaccttatgtcagaaaaaa

SEQ ID NO: 920973 - DNA, 33 bp, Homo sapien
tgcaacctagagtaaactgagcccatagtctat

SEQ ID NO: 920974 - DNA, 33 bp, Homo sapien
tgcaacctagagtaaagtgagcccatagtctat

SEQ ID NO: 920975 - DNA, 33 bp, Homo sapien
gcagtagaagggaacagcttgaactcaaagttc

SEQ ID NO: 920976 - DNA, 33 bp, Homo sapien
gcagtagaagggaacatcttgaactcaaagttc

SEQ ID NO: 920977 - DNA, 33 bp, Homo sapien
catgctcagatcatacggtagtcaaaaagcaaa

SEQ ID NO: 920978 - DNA, 33 bp, Homo sapien
catgctcagatcatactgtagtcaaaaagcaaa

SEQ ID NO: 920979 - DNA, 33 bp, Homo sapien; identical to SEQ ID NO: 920977

SEQ ID NO: 920980 - DNA, 33 bp, Homo sapien; identical to SEQ ID NO: 920978

SEQ ID NO: 920981 - DNA, 33 bp, Homo sapien
ccttcagtttgaaaaaatcccagttcagagaac

SEQ ID NO: 920982 - DNA, 33 bp, Homo sapien
ccttcagtttgaaaaagtcccagttcagagaac

SEQ ID NO: 920983 - DNA, 33 bp, Homo sapien; identical to SEQ ID NO: 920981

SEQ ID NO: 920984 - DNA, 33 bp, Homo sapien; identical to SEQ ID NO: 920982

SEQ ID NO: 920985 - DNA, 33 bp, Homo sapien
agaacaaattacatggacattcaactctcattg

SEQ ID NO: 920986 - DNA, 33 bp, Homo sapien
agaacaaattacatggtcattcaactctcattg

SEQ ID NO: 920987 - DNA, 33 bp, Homo sapien
attatgtagaatatacactctactctctggtct

SEQ ID NO: 920988 - DNA, 33 bp, Homo sapien
attatgtagaatatactctctactctctggtct

SEQ ID NO: 920989 - DNA, 33 bp, Homo sapien
gaaaacaagaaagcaaatacctcaaaaaaccag

SEQ ID NO: 920990 - DNA, 33 bp, Homo sapien
gaaaacaagaaagcaactacctcaaaaaaccag

SEQ ID NO: 920991 - DNA, 33 bp, Homo sapien
cagctgcccctttggagaataggcttttattac

SEQ ID NO: 920992 - DNA, 33 bp, Homo sapien
cagctgcccctttggataataggcttttattac

SEQ ID NO: 920993 - DNA, 33 bp, Homo sapien
agtaaagcttttagaaacaatgacatgaaggaa

SEQ ID NO: 920994 - DNA, 33 bp, Homo sapien
agtaaagcttttagaagcaatgacatgaaggaa

SEQ ID NO: 920995 - DNA, 33 bp, Homo sapien
acttgtcaattggcaccagaatcttgttctcca

SEQ ID NO: 920996 - DNA, 33 bp, Homo sapien
acttgtcaattggcactagaatcttgttctcca

SEQ ID NO: 920997 - DNA, 33 bp, Homo sapien
gaaatgttagtcttaaagcgactaaactgcccc

SEQ ID NO: 920998 - DNA, 33 bp, Homo sapien
gaaatgttagtcttaacgcgactaaactgcccc

SEQ ID NO: 920999 - DNA, 33 bp, Homo sapien
cacatggttcctgagcactggaagaaatttaag

SEQ ID NO: 921000 - DNA, 33 bp, Homo sapien
cacatggttcctgagcgctggaagaaatttaag

SEQ ID NO: 921001 - DNA, 33 bp, Homo sapien
tgtgattcatgagtcaagtagcatctcatctaa

SEQ ID NO: 921002 - DNA, 33 bp, Homo sapien
tgtgattcatgagtcaggtagcatctcatctaa

SEQ ID NO: 921003 - DNA, 33 bp, Homo sapien
gaagtcagagtcttccagaaacttccaggtgaa

SEQ ID NO: 921004 - DNA, 33 bp, Homo sapien
gaagtcagagtcttccggaaacttccaggtgaa

SEQ ID NO: 921005 - DNA, 33 bp, Homo sapien
ataaggtctctaaaaccctgaaacctgggatcc

SEQ ID NO: 921006 - DNA, 33 bp, Homo sapien
ataaggtctctaaaactctgaaacctgggatcc

SEQ ID NO: 921007 - DNA, 33 bp, Homo sapien
gaagaaatatagcaagacctacttaggagcaat

SEQ ID NO: 921008 - DNA, 33 bp, Homo sapien
gaagaaatatagcaagccctacttaggagcaat

SEQ ID NO: 921009 - DNA, 33 bp, Homo sapien
ttcctgctgaattatgcagtggacagatgggga

SEQ ID NO: 921010 - DNA, 33 bp, Homo sapien
ttcctgctgaattatgtagtggacagatgggga

SEQ ID NO: 921011 - DNA, 33 bp, Homo sapien
ggatggagaaagtggtcaattatttactgaaac

SEQ ID NO: 921012 - DNA, 33 bp, Homo sapien
ggatggagaaagtggtgaattatttactgaaac

SEQ ID NO: 921013 - DNA, 33 bp, Homo sapien
cctatgatgataagtacgctcttttgaaagtaa

SEQ ID NO: 921014 - DNA, 33 bp, Homo sapien
cctatgatgataagtatgctcttttgaaagtaa

SEQ ID NO: 921015 - DNA, 33 bp, Homo sapien
catcactgtcgggatgaacccctgcacgccctc

SEQ ID NO: 921016 - DNA, 33 bp, Homo sapien
catcactgtcgggatgtacccctgcacgccctc

SEQ ID NO: 921017 - DNA, 33 bp, Homo sapien; identical to SEQ ID NO: 921015

SEQ ID NO: 921018 - DNA, 33 bp, Homo sapien; identical to SEQ ID NO: 921016

SEQ ID NO: 921019 - DNA, 33 bp, Homo sapien
tgctacggcatagacaaatcttgaaagcactat

SEQ ID NO: 921020 - DNA, 33 bp, Homo sapien
tgctacggcatagacatatcttgaaagcactat

SEQ ID NO: 921021 - DNA, 33 bp, Homo sapien
taactgattccctgatcaccatacttgattttc

SEQ ID NO: 921022 - DNA, 33 bp, Homo sapien
taactgattccctgatgaccatacttgattttc

SEQ ID NO: 921023 - DNA, 33 bp, Homo sapien
cctgcttgtccgtccagagctctacacttctcc

SEQ ID NO: 921024 - DNA, 33 bp, Homo sapien
cctgcttgtccgtccatagctctacacttctcc

SEQ ID NO: 921025 - DNA, 33 bp, Homo sapien
tagatattacacagaaagcctcatttaaacaca

SEQ ID NO: 921026 - DNA, 33 bp, Homo sapien
tagatattacacagaaggcctcatttaaacaca

SEQ ID NO: 921027 - DNA, 33 bp, Homo sapien
tgtgttttgaagctaactgtagtccatcaacct

SEQ ID NO: 921028 - DNA, 33 bp, Homo sapien
tgtgttttgaagctaattgtagtccatcaacct

SEQ ID NO: 921029 - DNA, 33 bp, Homo sapien; identical to SEQ ID NO: 921027

SEQ ID NO: 921030 - DNA, 33 bp, Homo sapien; identical to SEQ ID NO: 921028

SEQ ID NO: 921031 - DNA, 33 bp, Homo sapien
tgggaaataccaccgaagagcctcatcgtgtgc

SEQ ID NO: 921032 - DNA, 33 bp, Homo sapien
tgggaaataccaccgaggagcctcatcgtgtgc

SEQ ID NO: 921033 - DNA, 33 bp, Homo sapien
gtcaaataatgataacacagggtgaacacctac

SEQ ID NO: 921034 - DNA, 33 bp, Homo sapien
gtcaaataatgataacccagggtgaacacctac

SEQ ID NO: 921035 - DNA, 33 bp, Homo sapien
aaggcttgaatccaaacaaccgtaacgagccat

SEQ ID NO: 921036 - DNA, 33 bp, Homo sapien
aaggcttgaatccaaataaccgtaacgagccat

SEQ ID NO: 921037 - DNA, 33 bp, Homo sapien
atacttcccatcaaagacttggaaatgctaatt

SEQ ID NO: 921038 - DNA, 33 bp, Homo sapien
atacttcccatcaaaggcttggaaatgctaatt

SEQ ID NO: 921039 - DNA, 33 bp, Homo sapien
tcttctctcaggctaaccctgcgagttgaggac

SEQ ID NO: 921040 - DNA, 33 bp, Homo sapien
tcttctctcaggctaatcctgcgagttgaggac

SEQ ID NO: 921041 - DNA, 33 bp, Homo sapien
gagcttttactaaacaatcataattgctcccca

SEQ ID NO: 921042 - DNA, 33 bp, Homo sapien
gagcttttactaaacattcataattgctcccca

SEQ ID NO: 921043 - DNA, 33 bp, Homo sapien
atacaaagtcatttgacggatgtgacactgggc

SEQ ID NO: 921044 - DNA, 33 bp, Homo sapien
atacaaagtcatttgatggatgtgacactgggc

SEQ ID NO: 921045 - DNA, 33 bp, Homo sapien
accatatccgtgaaagcctgtgaacacacagca

SEQ ID NO: 921046 - DNA, 33 bp, Homo sapien
accatatccgtgaaagtctgtgaacacacagca

SEQ ID NO: 921047 - DNA, 33 bp, Homo sapien
gcagttcacaaagctacactctcctgggtcttc

SEQ ID NO: 921048 - DNA, 33 bp, Homo sapien
gcagttcacaaagctatactctcctgggtcttc

SEQ ID NO: 921049 - DNA, 33 bp, Homo sapien
agctaacatttagatccccgtatccttccagta

SEQ ID NO: 921050 - DNA, 33 bp, Homo sapien
agctaacatttagatctccgtatccttccagta

SEQ ID NO: 921051 - DNA, 33 bp, Homo sapien
ggctttcctgaacataaagacattaaagtaata

SEQ ID NO: 921052 - DNA, 33 bp, Homo sapien
ggctttcctgaacatagagacattaaagtaata

SEQ ID NO: 921053 - DNA, 33 bp, Homo sapien
ttgagcccgggaaatgaaggttgtggtgagctg

SEQ ID NO: 921054 - DNA, 33 bp, Homo sapien
ttgagcccgggaaatggaggttgtggtgagctg

SEQ ID NO: 921055 - DNA, 33 bp, Homo sapien
acctgactccctaaccggcatgagctgatggcc

SEQ ID NO: 921056 - DNA, 33 bp, Homo sapien
acctgactccctaacctgcatgagctgatggcc

SEQ ID NO: 921057 - DNA, 33 bp, Homo sapien
tattttcaacaaacagaataggactattttcac

SEQ ID NO: 921058 - DNA, 33 bp, Homo sapien
tattttcaacaaacaggataggactattttcac

SEQ ID NO: 921059 - DNA, 33 bp, Homo sapien
gatctcactacaaagcccaagctcttcctacaa

SEQ ID NO: 921060 - DNA, 33 bp, Homo sapien
gatctcactacaaagctcaagctcttcctacaa

SEQ ID NO: 921061 - DNA, 33 bp, Homo sapien
atcctttcaagagtcacggacaggtattttaaa

SEQ ID NO: 921062 - DNA, 33 bp, Homo sapien
atcctttcaagagtcatggacaggtattttaaa

SEQ ID NO: 921063 - DNA, 33 bp, Homo sapien
ccagcagtggaaaataggtcacatttaaatacc

SEQ ID NO: 921064 - DNA, 33 bp, Homo sapien
ccagcagtggaaaatatgtcacatttaaatacc

SEQ ID NO: 921065 - DNA, 33 bp, Homo sapien
aagctgctgtggccacggtgaaggaccggctat

SEQ ID NO: 921066 - DNA, 33 bp, Homo sapien
aagctgctgtggccactgtgaaggaccggctat

SEQ ID NO: 921067 - DNA, 33 bp, Homo sapien
gtaggctgaccatctaagttcatgtaagtatac

SEQ ID NO: 921068 - DNA, 33 bp, Homo sapien
gtaggctgaccatctaggttcatgtaagtatac

SEQ ID NO: 921069 - DNA, 33 bp, Homo sapien
tctgtctctaccactaaaaagcaagctagacat

SEQ ID NO: 921070 - DNA, 33 bp, Homo sapien
tctgtctctaccactagaaagcaagctagacat

SEQ ID NO: 921071 - DNA, 33 bp, Homo sapien
atctcaccagcattaacggagaccggcccgttc

SEQ ID NO: 921072 - DNA, 33 bp, Homo sapien
atctcaccagcattaatggagaccggcccgttc

SEQ ID NO: 921073 - DNA, 33 bp, Homo sapien
cactggggttagtgtgcagcgaacttccacagc

SEQ ID NO: 921074 - DNA, 33 bp, Homo sapien
cactggggttagtgtgtagcgaacttccacagc

SEQ ID NO: 921075 - DNA, 33 bp, Homo sapien
aaatgactaataaaacagtaagccaatacgtac

SEQ ID NO: 921076 - DNA, 33 bp, Homo sapien
aaatgactaataaaacggtaagccaatacgtac

SEQ ID NO: 921077 - DNA, 33 bp, Homo sapien
catgatagtccacacccctttcagtttcttctt

SEQ ID NO: 921078 - DNA, 33 bp, Homo sapien
catgatagtccacaccgctttcagtttcttctt

SEQ ID NO: 921079 - DNA, 33 bp, Homo sapien
gtttttgggaacattcaaaagccgctcttagag

SEQ ID NO: 921080 - DNA, 33 bp, Homo sapien
gtttttgggaacattcgaaagccgctcttagag

SEQ ID NO: 921081 - DNA, 33 bp, Homo sapien
ctgaacttgctgaatgaaccgacgagctgagcc

SEQ ID NO: 921082 - DNA, 33 bp, Homo sapien
ctgaacttgctgaatggaccgacgagctgagcc

SEQ ID NO: 921083 - DNA, 33 bp, Homo sapien
gagaagccagaaccgcaattgttgcatctggga

SEQ ID NO: 921084 - DNA, 33 bp, Homo sapien
gagaagccagaaccgcgattgttgcatctggga

SEQ ID NO: 921085 - DNA, 33 bp, Homo sapien
tcccaaatggggcacaaaggtaataaaaagcag

SEQ ID NO: 921086 - DNA, 33 bp, Homo sapien
tcccaaatggggcacagaggtaataaaaagcag

SEQ ID NO: 921087 - DNA, 33 bp, Homo sapien
gttcatattaatcaacactaaaaagactcagcc

SEQ ID NO: 921088 - DNA, 33 bp, Homo sapien
gttcatattaatcaacgctaaaaagactcagcc

SEQ ID NO: 921089 - DNA, 33 bp, Homo sapien
accactgctcatttgcaacgtgaaccaaaggat

SEQ ID NO: 921090 - DNA, 33 bp, Homo sapien
accactgctcatttgcgacgtgaaccaaaggat

SEQ ID NO: 921091 - DNA, 33 bp, Homo sapien
agggtgtggcctgaaacacccgagctcaggcac

SEQ ID NO: 921092 - DNA, 33 bp, Homo sapien
agggtgtggcctgaaatacccgagctcaggcac

SEQ ID NO: 921093 - DNA, 33 bp, Homo sapien
tgagtcttgaacatacaccaaggagagaaaaac

SEQ ID NO: 921094 - DNA, 33 bp, Homo sapien
tgagtcttgaacatacgccaaggagagaaaaac

SEQ ID NO: 921095 - DNA, 33 bp, Homo sapien
tgcaaagccaagactccatgaaacagcatctcc

SEQ ID NO: 921096 - DNA, 33 bp, Homo sapien
tgcaaagccaagactctatgaaacagcatctcc

SEQ ID NO: 921097 - DNA, 33 bp, Homo sapien
tgggaggttgaaacagaagaattgcgtgaaccc

SEQ ID NO: 921098 - DNA, 33 bp, Homo sapien
tgggaggttgaaacaggagaattgcgtgaaccc

SEQ ID NO: 921099 - DNA, 33 bp, Homo sapien
tatattcagagtaacaaaacagggtgcttttcc

SEQ ID NO: 921100 - DNA, 33 bp, Homo sapien
tatattcagagtaacagaacagggtgcttttcc

SEQ ID NO: 921101 - DNA, 33 bp, Homo sapien
attccaagtcttcttcaataggaatgcatttct

SEQ ID NO: 921102 - DNA, 33 bp, Homo sapien
attccaagtcttcttcgataggaatgcatttct

SEQ ID NO: 921103 - DNA, 33 bp, Homo sapien
atttctcttaaaaccaacaagaggccgggcatg

SEQ ID NO: 921104 - DNA, 33 bp, Homo sapien
atttctcttaaaaccagcaagaggccgggcatg

SEQ ID NO: 921105 - DNA, 33 bp, Homo sapien
ataaagcagctcttacagccgtcgcttctccca

SEQ ID NO: 921106 - DNA, 33 bp, Homo sapien
ataaagcagctcttacggccgtcgcttctccca

SEQ ID NO: 921107 - DNA, 33 bp, Homo sapien
ctggggctgtgacttaccccctctcctttagcc

SEQ ID NO: 921108 - DNA, 33 bp, Homo sapien
ctggggctgtgacttatcccctctcctttagcc

SEQ ID NO: 921109 - DNA, 33 bp, Homo sapien
ggcagggcctgcgacacagctagatggtggtgt

SEQ ID NO: 921110 - DNA, 33 bp, Homo sapien
ggcagggcctgcgacagagctagatggtggtgt

SEQ ID NO: 921111 - DNA, 33 bp, Homo sapien
aaagcatgagaatcaacaggcacattccaatga

SEQ ID NO: 921112 - DNA, 33 bp, Homo sapien
aaagcatgagaatcaataggcacattccaatga

SEQ ID NO: 921113 - DNA, 33 bp, Homo sapien
catagcaattagataacgtatgtaaatcacttg

SEQ ID NO: 921114 - DNA, 33 bp, Homo sapien
catagcaattagataatgtatgtaaatcacttg

SEQ ID NO: 921115 - DNA, 33 bp, Homo sapien
agatatgttagcgggaagccattgcgtattttt

SEQ ID NO: 921116 - DNA, 33 bp, Homo sapien
agatatgttagcgggacgccattgcgtattttt

SEQ ID NO: 921117 - DNA, 33 bp, Homo sapien
actaatattttagaagcatgagttcaaaggtaa

SEQ ID NO: 921118 - DNA, 33 bp, Homo sapien
actaatattttagaagtatgagttcaaaggtaa

SEQ ID NO: 921119 - DNA, 33 bp, Homo sapien
catcctcttacaaataagtgtggatttctaact

SEQ ID NO: 921120 - DNA, 33 bp, Homo sapien
catcctcttacaaataggtgtggatttctaact

SEQ ID NO: 921121 - DNA, 33 bp, Homo sapien
agtcgtgagttcctaacgttgaaacagctattt

SEQ ID NO: 921122 - DNA, 33 bp, Homo sapien
agtcgtgagttcctaatgttgaaacagctattt

SEQ ID NO: 921123 - DNA, 33 bp, Homo sapien
tatttaacttctacacagtatccctttatgatg

SEQ ID NO: 921124 - DNA, 33 bp, Homo sapien
tatttaacttctacacggtatccctttatgatg

SEQ ID NO: 921125 - DNA, 33 bp, Homo sapien
tatgagctcccgtgcccagcctagattagtgtt

SEQ ID NO: 921126 - DNA, 33 bp, Homo sapien
tatgagctcccgtgcctagcctagattagtgtt

SEQ ID NO: 921127 - DNA, 33 bp, Homo sapien
taggcataataataaaggttgcagaaatgtgta

SEQ ID NO: 921128 - DNA, 33 bp, Homo sapien
taggcataataataaatgttgcagaaatgtgta

SEQ ID NO: 921129 - DNA, 33 bp, Homo sapien
ggggctttctaaacaacgtaacccagtgcataa

SEQ ID NO: 921130 - DNA, 33 bp, Homo sapien
ggggctttctaaacaatgtaacccagtgcataa

SEQ ID NO: 921131 - DNA, 33 bp, Homo sapien
caaacttaacctacacacgtattaagcttttcc

SEQ ID NO: 921132 - DNA, 33 bp, Homo sapien
caaacttaacctacacgcgtattaagcttttcc

SEQ ID NO: 921133 - DNA, 33 bp, Homo sapien
catattgagacaaaacaaagtccaaatattgaa

SEQ ID NO: 921134 - DNA, 33 bp, Homo sapien
catattgagacaaaaccaagtccaaatattgaa

SEQ ID NO: 921135 - DNA, 33 bp, Homo sapien
ctaagtaaacatcagcaatccaggtgaatgtgg

SEQ ID NO: 921136 - DNA, 33 bp, Homo sapien
ctaagtaaacatcagccatccaggtgaatgtgg

SEQ ID NO: 921137 - DNA, 33 bp, Homo sapien
aaggacaggtgcttcacacattaaatggataaa

SEQ ID NO: 921138 - DNA, 33 bp, Homo sapien
aaggacaggtgcttcatacattaaatggataaa

SEQ ID NO: 921139 - DNA, 33 bp, Homo sapien
tgatcctctgtagccaatatcaaatatccttaa

SEQ ID NO: 921140 - DNA, 33 bp, Homo sapien
tgatcctctgtagccagtatcaaatatccttaa

SEQ ID NO: 921141 - DNA, 33 bp, Homo sapien
caggctgggatacagcaacaaaatcaaggctca

SEQ ID NO: 921142 - DNA, 33 bp, Homo sapien
caggctgggatacagcgacaaaatcaaggctca

SEQ ID NO: 921143 - DNA, 33 bp, Homo sapien
atgctgctaagaaccaagtcattccacaattga

SEQ ID NO: 921144 - DNA, 33 bp, Homo sapien
atgctgctaagaaccaggtcattccacaattga

SEQ ID NO: 921145 - DNA, 33 bp, Homo sapien
gaccactgttgcacacaactatgtctggctagt

SEQ ID NO: 921146 - DNA, 33 bp, Homo sapien
gaccactgttgcacaccactatgtctggctagt

SEQ ID NO: 921147 - DNA, 33 bp, Homo sapien
agcctatttcaagttaccaatgtgacatccacc

SEQ ID NO: 921148 - DNA, 33 bp, Homo sapien
agcctatttcaagttagcaatgtgacatccacc

SEQ ID NO: 921149 - DNA, 33 bp, Homo sapien
aatcactgaaacaaggaaggtattttggactaa

SEQ ID NO: 921150 - DNA, 33 bp, Homo sapien
aatcactgaaacaagggaggtattttggactaa

SEQ ID NO: 921151 - DNA, 33 bp, Homo sapien
ttgaggcttgcagggacagcgacttgcccaagt

SEQ ID NO: 921152 - DNA, 33 bp, Homo sapien
ttgaggcttgcagggagagcgacttgcccaagt

SEQ ID NO: 921153 - DNA, 33 bp, Homo sapien
atctgtggtaggctgaaccatttttcaatagtt

SEQ ID NO: 921154 - DNA, 33 bp, Homo sapien
atctgtggtaggctgagccatttttcaatagtt

SEQ ID NO: 921155 - DNA, 33 bp, Homo sapien
ctctcacttctgacacccccagcaagttcaggg

SEQ ID NO: 921156 - DNA, 33 bp, Homo sapien
ctctcacttctgacacgcccagcaagttcaggg

SEQ ID NO: 921157 - DNA, 33 bp, Homo sapien
ccctaactgcatgagccaattctttataataca

SEQ ID NO: 921158 - DNA, 33 bp, Homo sapien
ccctaactgcatgagctaattctttataataca

SEQ ID NO: 921159 - DNA, 33 bp, Homo sapien
tctagcaacttagggcgctggtggaaggaaaga

SEQ ID NO: 921160 - DNA, 33 bp, Homo sapien
tctagcaacttagggctctggtggaaggaaaga

SEQ ID NO: 921161 - DNA, 33 bp, Homo sapien
cccagctgcacatatgcaacagatgaagggagt

SEQ ID NO: 921162 - DNA, 33 bp, Homo sapien
cccagctgcacatatggaacagatgaagggagt

SEQ ID NO: 921163 - DNA, 33 bp, Homo sapien
ctctaactcagactcacggacatagggaacatc

SEQ ID NO: 921164 - DNA, 33 bp, Homo sapien
ctctaactcagactcatggacatagggaacatc

SEQ ID NO: 921165 - DNA, 33 bp, Homo sapien
gggattttaacgtttacagtccaaagaaggagt

SEQ ID NO: 921166 - DNA, 33 bp, Homo sapien
gggattttaacgtttagagtccaaagaaggagt

SEQ ID NO: 921167 - DNA, 33 bp, Homo sapien
ggatgtttttcacaaccgtagcagacctgtgca

SEQ ID NO: 921168 - DNA, 33 bp, Homo sapien
ggatgtttttcacaactgtagcagacctgtgca

SEQ ID NO: 921169 - DNA, 33 bp, Homo sapien
cagcatcaggcgccggacaatcagtgctgtagg

SEQ ID NO: 921170 - DNA, 33 bp, Homo sapien
cagcatcaggcgccgggcaatcagtgctgtagg

SEQ ID NO: 921171 - DNA, 33 bp, Homo sapien
cccctggcacctgcctaagattgtttaatacaa

SEQ ID NO: 921172 - DNA, 33 bp, Homo sapien
cccctggcacctgccttagattgtttaatacaa

SEQ ID NO: 921173 - DNA, 33 bp, Homo sapien
ctgccttgtagtttaactccttcaaccttcatt

SEQ ID NO: 921174 - DNA, 33 bp, Homo sapien
ctgccttgtagtttaattccttcaaccttcatt

SEQ ID NO: 921175 - DNA, 33 bp, Homo sapien
taaaaactggacattgaagagaggccccagtcc

SEQ ID NO: 921176 - DNA, 33 bp, Homo sapien
taaaaactggacattggagagaggccccagtcc

SEQ ID NO: 921177 - DNA, 33 bp, Homo sapien
catatctgtttctgtacatttactttcaaacag

SEQ ID NO: 921178 - DNA, 33 bp, Homo sapien
catatctgtttctgtatatttactttcaaacag

SEQ ID NO: 921179 - DNA, 33 bp, Homo sapien
agctgtgtggttgtgacggatggctgagccagg

SEQ ID NO: 921180 - DNA, 33 bp, Homo sapien
agctgtgtggttgtgatggatggctgagccagg

SEQ ID NO: 921181 - DNA, 33 bp, Homo sapien
gctgggaagcaaaggaaaagatgagactgatgc

SEQ ID NO: 921182 - DNA, 33 bp, Homo sapien
gctgggaagcaaaggagaagatgagactgatgc

SEQ ID NO: 921183 - DNA, 33 bp, Homo sapien
tgctggccagtactcaactaaagatggctagaa

SEQ ID NO: 921184 - DNA, 33 bp, Homo sapien
tgctggccagtactcagctaaagatggctagaa

SEQ ID NO: 921185 - DNA, 33 bp, Homo sapien
tcattgtcttgaccaaccctccagaggctctcc

SEQ ID NO: 921186 - DNA, 33 bp, Homo sapien
tcattgtcttgaccaatcctccagaggctctcc

SEQ ID NO: 921187 - DNA, 33 bp, Homo sapien
gttaatcaaattgtccagccgtgtcttgctatt

SEQ ID NO: 921188 - DNA, 33 bp, Homo sapien
gttaatcaaattgtccggccgtgtcttgctatt

SEQ ID NO: 921189 - DNA, 33 bp, Homo sapien
gacagttaatacagataagtccctcagcctccc

SEQ ID NO: 921190 - DNA, 33 bp, Homo sapien
gacagttaatacagatgagtccctcagcctccc

SEQ ID NO: 921191 - DNA, 33 bp, Homo sapien
tgatctatccagacataagcaggattgggaagc

SEQ ID NO: 921192 - DNA, 33 bp, Homo sapien
tgatctatccagacatgagcaggattgggaagc

SEQ ID NO: 921193 - DNA, 33 bp, Homo sapien
ggctcctgaaatcctccctgcagggaaatcctt

SEQ ID NO: 921194 - DNA, 33 bp, Homo sapien
ggctcctgaaatcctctctgcagggaaatcctt

SEQ ID NO: 921195 - DNA, 33 bp, Homo sapien
acacagactaaaatcaagacaagatttgtggcg

SEQ ID NO: 921196 - DNA, 33 bp, Homo sapien
acacagactaaaatcaggacaagatttgtggcg

SEQ ID NO: 921197 - DNA, 33 bp, Homo sapien
ctctgagttatctcttaaaaaaaaatcatccta

SEQ ID NO: 921198 - DNA, 33 bp, Homo sapien
ctctgagttatctctttaaaaaaaatcatccta

SEQ ID NO: 921199 - DNA, 33 bp, Homo sapien
cccagcttagcccagacgcctcagaagaggaca

SEQ ID NO: 921200 - DNA, 33 bp, Homo sapien
cccagcttagcccagatgcctcagaagaggaca

SEQ ID NO: 921201 - DNA, 33 bp, Homo sapien
tttggtctgcttatgcaatctcccatcaatgcc

SEQ ID NO: 921202 - DNA, 33 bp, Homo sapien
tttggtctgcttatgcgatctcccatcaatgcc

SEQ ID NO: 921203 - DNA, 33 bp, Homo sapien
ccttataaaagggaccacaaagagctctcttcc

SEQ ID NO: 921204 - DNA, 33 bp, Homo sapien
ccttataaaagggaccgcaaagagctctcttcc

SEQ ID NO: 921205 - DNA, 33 bp, Homo sapien
aagaaagaaactgagaagagaatgtatgtgctc

SEQ ID NO: 921206 - DNA, 33 bp, Homo sapien
aagaaagaaactgagaggagaatgtatgtgctc

SEQ ID NO: 921207 - DNA, 33 bp, Homo sapien
tgtcctttcttcttaaagtcaggcagtgcccaa

SEQ ID NO: 921208 - DNA, 33 bp, Homo sapien
tgtcctttcttcttaaggtcaggcagtgcccaa

SEQ ID NO: 921209 - DNA, 33 bp, Homo sapien
tcttctatttatttggccaatcaacattgacta

SEQ ID NO: 921210 - DNA, 33 bp, Homo sapien
tcttctatttatttggtcaatcaacattgacta

SEQ ID NO: 921211 - DNA, 33 bp, Homo sapien
ttcatggttaaagaggacacagctgaaggaaga

SEQ ID NO: 921212 - DNA, 33 bp, Homo sapien
ttcatggttaaagaggtcacagctgaaggaaga

SEQ ID NO: 921213 - DNA, 33 bp, Homo sapien
tcattctgtgggaacaagggtcaaactgcctca

SEQ ID NO: 921214 - DNA, 33 bp, Homo sapien
tcattctgtgggaacaggggtcaaactgcctca

SEQ ID NO: 921215 - DNA, 33 bp, Homo sapien
actggtttatatttaccgaggactgagttctct

SEQ ID NO: 921216 - DNA, 33 bp, Homo sapien
actggtttatatttacggaggactgagttctct

SEQ ID NO: 921217 - DNA, 33 bp, Homo sapien
aatagcattaatagccacagtgacccaaacggg

SEQ ID NO: 921218 - DNA, 33 bp, Homo sapien
aatagcattaatagccgcagtgacccaaacggg

SEQ ID NO: 921219 - DNA, 33 bp, Homo sapien
tgtcttgaaaacggtgcacagtggcccttatta

SEQ ID NO: 921220 - DNA, 33 bp, Homo sapien
tgtcttgaaaacggtgtacagtggcccttatta

SEQ ID NO: 921221 - DNA, 33 bp, Homo sapien
gcctggggctatgcaaactaacaacgtacatga

SEQ ID NO: 921222 - DNA, 33 bp, Homo sapien
gcctggggctatgcaatctaacaacgtacatga

SEQ ID NO: 921223 - DNA, 33 bp, Homo sapien
tgttatattgattgcacagtgagatgataatat

SEQ ID NO: 921224 - DNA, 33 bp, Homo sapien
tgttatattgattgcatagtgagatgataatat

SEQ ID NO: 921225 - DNA, 33 bp, Homo sapien
gcagtttggaaaataacgctccagtgtgtggcc

SEQ ID NO: 921226 - DNA, 33 bp, Homo sapien
gcagtttggaaaataatgctccagtgtgtggcc

SEQ ID NO: 921227 - DNA, 33 bp, Homo sapien
agtgtctgaccggctaggctttctgcaggctcc

SEQ ID NO: 921228 - DNA, 33 bp, Homo sapien
agtgtctgaccggctatgctttctgcaggctcc

SEQ ID NO: 921229 - DNA, 33 bp, Homo sapien
tagagactagtggttcacatacctgatatgcac

SEQ ID NO: 921230 - DNA, 33 bp, Homo sapien
tagagactagtggttctcatacctgatatgcac

SEQ ID NO: 921231 - DNA, 33 bp, Homo sapien
gaggagacacagatgccgagtgcattctgtcca

SEQ ID NO: 921232 - DNA, 33 bp, Homo sapien
gaggagacacagatgctgagtgcattctgtcca

SEQ ID NO: 921233 - DNA, 33 bp, Homo sapien
cgggcacgtggccgacaacacggatggtggagc

SEQ ID NO: 921234 - DNA, 33 bp, Homo sapien
cgggcacgtggccgaccacacggatggtggagc

SEQ ID NO: 921235 - DNA, 33 bp, Homo sapien
aaaaaataagaggtccaaagttgaagactgaaa

SEQ ID NO: 921236 - DNA, 33 bp, Homo sapien
aaaaaataagaggtccgaagttgaagactgaaa

SEQ ID NO: 921237 - DNA, 33 bp, Homo sapien
aaagactgaagaaaaacgaaaagtgtctgaggg

SEQ ID NO: 921238 - DNA, 33 bp, Homo sapien
aaagactgaagaaaaatgaaaagtgtctgaggg

SEQ ID NO: 921239 - DNA, 33 bp, Homo sapien
ggatgctggatttcaaacctagccagcgtgcaa

SEQ ID NO: 921240 - DNA, 33 bp, Homo sapien
ggatgctggatttcaagcctagccagcgtgcaa

SEQ ID NO: 921241 - DNA, 33 bp, Homo sapien
aagtgacatttacactaaaacttgaaaggcaag

SEQ ID NO: 921242 - DNA, 33 bp, Homo sapien
aagtgacatttacactgaaacttgaaaggcaag

SEQ ID NO: 921243 - DNA, 33 bp, Homo sapien
gcacggtaatgcctgacgacatttttaatttac

SEQ ID NO: 921244 - DNA, 33 bp, Homo sapien
gcacggtaatgcctgatgacatttttaatttac

SEQ ID NO: 921245 - DNA, 33 bp, Homo sapien
tccaattttagaataacgtcatcatcccaaaaa

SEQ ID NO: 921246 - DNA, 33 bp, Homo sapien
tccaattttagaataatgtcatcatcccaaaaa

SEQ ID NO: 921247 - DNA, 33 bp, Homo sapien
gataacgttgcaggtgccaaaaaagtaaggtga

SEQ ID NO: 921248 - DNA, 33 bp, Homo sapien
gataacgttgcaggtgtcaaaaaagtaaggtga

SEQ ID NO: 921249 - DNA, 33 bp, Homo sapien
atcccctgaaacttacaatgcagaaaaatggta

SEQ ID NO: 921250 - DNA, 33 bp, Homo sapien
atcccctgaaacttacgatgcagaaaaatggta

SEQ ID NO: 921251 - DNA, 33 bp, Homo sapien
caatggatcggaaataaaagtgaacaaatacaa

SEQ ID NO: 921252 - DNA, 33 bp, Homo sapien
caatggatcggaaatacaagtgaacaaatacaa

SEQ ID NO: 921253 - DNA, 33 bp, Homo sapien
agatattgcaggtatgaatacattgtgtgtgat

SEQ ID NO: 921254 - DNA, 33 bp, Homo sapien
agatattgcaggtatggatacattgtgtgtgat

SEQ ID NO: 921255 - DNA, 33 bp, Homo sapien
cttcctcttacaacaccgtaattgtagctacac

SEQ ID NO: 921256 - DNA, 33 bp, Homo sapien
cttcctcttacaacactgtaattgtagctacac

SEQ ID NO: 921257 - DNA, 33 bp, Homo sapien
gaaagttaattcattccaaagtaaggctgcctt

SEQ ID NO: 921258 - DNA, 33 bp, Homo sapien
gaaagttaattcattcgaaagtaaggctgcctt

SEQ ID NO: 921259 - DNA, 33 bp, Homo sapien
gtgattaaataatgccacatgctcgagtggagt

SEQ ID NO: 921260 - DNA, 33 bp, Homo sapien
gtgattaaataatgccgcatgctcgagtggagt

SEQ ID NO: 921261 - DNA, 33 bp, Homo sapien
gttgtcattaacctagaaattcatccgagttac

SEQ ID NO: 921262 - DNA, 33 bp, Homo sapien
gttgtcattaacctaggaattcatccgagttac

SEQ ID NO: 921263 - DNA, 33 bp, Homo sapien
actttcttttaaaaacagacatggaaacataga

SEQ ID NO: 921264 - DNA, 33 bp, Homo sapien
actttcttttaaaaactgacatggaaacataga

SEQ ID NO: 921265 - DNA, 33 bp, Homo sapien
tacgtgcatcttggaaatgtagccctctctgca

SEQ ID NO: 921266 - DNA, 33 bp, Homo sapien
tacgtgcatcttggaagtgtagccctctctgca

SEQ ID NO: 921267 - DNA, 33 bp, Homo sapien
ccccgtgccccacgggcagaatcccagagagga

SEQ ID NO: 921268 - DNA, 33 bp, Homo sapien
ccccgtgccccacgggtagaatcccagagagga

SEQ ID NO: 921269 - DNA, 33 bp, Homo sapien
ctgagcaatcctcttacaaagggtgacacagat

SEQ ID NO: 921270 - DNA, 33 bp, Homo sapien
ctgagcaatcctcttataaagggtgacacagat

SEQ ID NO: 921271 - DNA, 33 bp, Homo sapien
ccttgctgggctcttcaattctccccagctctt

SEQ ID NO: 921272 - DNA, 33 bp, Homo sapien
ccttgctgggctcttcgattctccccagctctt

SEQ ID NO: 921273 - DNA, 33 bp, Homo sapien
atggtttcttagaagacgtgaaaagtatgagca

SEQ ID NO: 921274 - DNA, 33 bp, Homo sapien
atggtttcttagaagatgtgaaaagtatgagca

SEQ ID NO: 921275 - DNA, 33 bp, Homo sapien
ttgccaggatgtaataagcgttcatttatccga

SEQ ID NO: 921276 - DNA, 33 bp, Homo sapien
ttgccaggatgtaataggcgttcatttatccga

SEQ ID NO: 921277 - DNA, 33 bp, Homo sapien
tggttcacactaacaaggtctcccaccacccca

SEQ ID NO: 921278 - DNA, 33 bp, Homo sapien
tggttcacactaacaatgtctcccaccacccca

SEQ ID NO: 921279 - DNA, 33 bp, Homo sapien
ttctgtagaacgcctccacttcctcccagacga

SEQ ID NO: 921280 - DNA, 33 bp, Homo sapien
ttctgtagaacgcctcgacttcctcccagacga

SEQ ID NO: 921281 - DNA, 33 bp, Homo sapien
ctgatattgtaatcaaagtgagcctaaggcaac

SEQ ID NO: 921282 - DNA, 33 bp, Homo sapien
ctgatattgtaatcaaggtgagcctaaggcaac

SEQ ID NO: 921283 - DNA, 33 bp, Homo sapien
aatgcttggtcagcacagaatggtggtcctaat

SEQ ID NO: 921284 - DNA, 33 bp, Homo sapien
aatgcttggtcagcacggaatggtggtcctaat

SEQ ID NO: 921285 - DNA, 33 bp, Homo sapien
gtgagtgaccgactagacagtttgttccagctt

SEQ ID NO: 921286 - DNA, 33 bp, Homo sapien
gtgagtgaccgactaggcagtttgttccagctt

SEQ ID NO: 921287 - DNA, 33 bp, Homo sapien
ctgtactagagactcacagactactgcagacat

SEQ ID NO: 921288 - DNA, 33 bp, Homo sapien
ctgtactagagactcatagactactgcagacat

SEQ ID NO: 921289 - DNA, 33 bp, Homo sapien
tttttcttcaggtgcaatgatagtaaatgtcta

SEQ ID NO: 921290 - DNA, 33 bp, Homo sapien
tttttcttcaggtgcagtgatagtaaatgtcta

SEQ ID NO: 921291 - DNA, 33 bp, Homo sapien
cattgttccaggctaccacggaatgatgattac

SEQ ID NO: 921292 - DNA, 33 bp, Homo sapien
cattgttccaggctacgacggaatgatgattac

SEQ ID NO: 921293 - DNA, 33 bp, Homo sapien
gaatttctttgcgcaccggttatcttttcgttt

SEQ ID NO: 921294 - DNA, 33 bp, Homo sapien
gaatttctttgcgcactggttatcttttcgttt

SEQ ID NO: 921295 - DNA, 33 bp, Homo sapien
atcccatgttttttcccgatagagcactttcag

SEQ ID NO: 921296 - DNA, 33 bp, Homo sapien
atcccatgttttttcctgatagagcactttcag

SEQ ID NO: 921297 - DNA, 33 bp, Homo sapien
ccccgtgttcagcaatcactgagaatttcacct

SEQ ID NO: 921298 - DNA, 33 bp, Homo sapien
ccccgtgttcagcaatgactgagaatttcacct

SEQ ID NO: 921299 - DNA, 33 bp, Homo sapien
gatgactacggaaaacacagaaggaatgtaact

SEQ ID NO: 921300 - DNA, 33 bp, Homo sapien
gatgactacggaaaacgcagaaggaatgtaact

SEQ ID NO: 921301 - DNA, 33 bp, Homo sapien
tctttcattggtaatcaaatgctttcttggact

SEQ ID NO: 921302 - DNA, 33 bp, Homo sapien
tctttcattggtaatcgaatgctttcttggact

SEQ ID NO: 921303 - DNA, 33 bp, Homo sapien
tgcaaataatcctcaacgaaatatgcacaaatt

SEQ ID NO: 921304 - DNA, 33 bp, Homo sapien
tgcaaataatcctcaatgaaatatgcacaaatt

SEQ ID NO: 921305 - DNA, 33 bp, Homo sapien
ggtttaagactgctgccaacctggatttccagt

SEQ ID NO: 921306 - DNA, 33 bp, Homo sapien
ggtttaagactgctgctaacctggatttccagt

SEQ ID NO: 921307 - DNA, 33 bp, Homo sapien
aatgattttacacaccagactttacataaatgt

SEQ ID NO: 921308 - DNA, 33 bp, Homo sapien
aatgattttacacaccggactttacataaatgt

SEQ ID NO: 921309 - DNA, 33 bp, Homo sapien
acctgtttttccacacccttgtctcatcacaga

SEQ ID NO: 921310 - DNA, 33 bp, Homo sapien
acctgtttttccacactcttgtctcatcacaga

SEQ ID NO: 921311 - DNA, 33 bp, Homo sapien
atgattatacctctaagtgacaacccgagatga

SEQ ID NO: 921312 - DNA, 33 bp, Homo sapien
atgattatacctctaattgacaacccgagatga

SEQ ID NO: 921313 - DNA, 33 bp, Homo sapien
tgagaagattctgtggccataaaacaaaaagat

SEQ ID NO: 921314 - DNA, 33 bp, Homo sapien
tgagaagattctgtggtcataaaacaaaaagat

SEQ ID NO: 921315 - DNA, 33 bp, Homo sapien
ccaacctcataaaagaacttgagagccagaacc

SEQ ID NO: 921316 - DNA, 33 bp, Homo sapien
ccaacctcataaaagaccttgagagccagaacc

SEQ ID NO: 921317 - DNA, 33 bp, Homo sapien
ctccaggattctcagcacattatcactgcacat

SEQ ID NO: 921318 - DNA, 33 bp, Homo sapien
ctccaggattctcagcgcattatcactgcacat

SEQ ID NO: 921319 - DNA, 33 bp, Homo sapien
ttgttcttgaagccacaaagccctgaggctgta

SEQ ID NO: 921320 - DNA, 33 bp, Homo sapien
ttgttcttgaagccacgaagccctgaggctgta

SEQ ID NO: 921321 - DNA, 33 bp, Homo sapien
cttccattgatctatacgtttatctttgtcatc

SEQ ID NO: 921322 - DNA, 33 bp, Homo sapien
cttccattgatctatatgtttatctttgtcatc

SEQ ID NO: 921323 - DNA, 33 bp, Homo sapien
agcttcattgttggaacaggttactgtaagagt

SEQ ID NO: 921324 - DNA, 33 bp, Homo sapien
agcttcattgttggaataggttactgtaagagt

SEQ ID NO: 921325 - DNA, 33 bp, Homo sapien
agcctgattaggagaacgagggaagcacagggt

SEQ ID NO: 921326 - DNA, 33 bp, Homo sapien
agcctgattaggagaatgagggaagcacagggt

SEQ ID NO: 921327 - DNA, 33 bp, Homo sapien
tgacccagacctgttaggcaggtataaaagggg

SEQ ID NO: 921328 - DNA, 33 bp, Homo sapien
tgacccagacctgttatgcaggtataaaagggg

SEQ ID NO: 921329 - DNA, 33 bp, Homo sapien
catccagcacaccacccccatgctccaagagac

SEQ ID NO: 921330 - DNA, 33 bp, Homo sapien
catccagcacaccaccgccatgctccaagagac

SEQ ID NO: 921331 - DNA, 33 bp, Homo sapien
cccagcaatcagttcaatcattggaagctccca

SEQ ID NO: 921332 - DNA, 33 bp, Homo sapien
cccagcaatcagttcagtcattggaagctccca

SEQ ID NO: 921333 - DNA, 33 bp, Homo sapien
atgcccaaaagctcccaagtttgatttctgcct

SEQ ID NO: 921334 - DNA, 33 bp, Homo sapien
atgcccaaaagctcccgagtttgatttctgcct

SEQ ID NO: 921335 - DNA, 33 bp, Homo sapien
gcatgggcccaacctaactcataattgttttgt

SEQ ID NO: 921336 - DNA, 33 bp, Homo sapien
gcatgggcccaacctagctcataattgttttgt

SEQ ID NO: 921337 - DNA, 33 bp, Homo sapien
cacttactttctctaccctgcgtcaaggattgt

SEQ ID NO: 921338 - DNA, 33 bp, Homo sapien
cacttactttctctactctgcgtcaaggattgt

SEQ ID NO: 921339 - DNA, 33 bp, Homo sapien
agctctggtgtcaacactggaaacgatgcagag

SEQ ID NO: 921340 - DNA, 33 bp, Homo sapien
agctctggtgtcaacattggaaacgatgcagag

SEQ ID NO: 921341 - DNA, 33 bp, Homo sapien
ggatctacttccatgccatcaggctgctatcct

SEQ ID NO: 921342 - DNA, 33 bp, Homo sapien
ggatctacttccatgctatcaggctgctatcct

SEQ ID NO: 921343 - DNA, 33 bp, Homo sapien
atgaactccatggtgactacgtttgcaatagta

SEQ ID NO: 921344 - DNA, 33 bp, Homo sapien
atgaactccatggtgattacgtttgcaatagta

SEQ ID NO: 921345 - DNA, 33 bp, Homo sapien
gtttatattaaaaaaactgattctgctgataaa

SEQ ID NO: 921346 - DNA, 33 bp, Homo sapien
gtttatattaaaaaaattgattctgctgataaa

SEQ ID NO: 921347 - DNA, 33 bp, Homo sapien
cagtcaatacctgcaaatgagacatgggtcatc

SEQ ID NO: 921348 - DNA, 33 bp, Homo sapien
cagtcaatacctgcaagtgagacatgggtcatc

SEQ ID NO: 921349 - DNA, 33 bp, Homo sapien
aggtcacctgagttgacgtaaaggctctaaaag

SEQ ID NO: 921350 - DNA, 33 bp, Homo sapien
aggtcacctgagttgatgtaaaggctctaaaag

SEQ ID NO: 921351 - DNA, 33 bp, Homo sapien
tatgatcaaggtgagcaacaaacgcacgtttat

SEQ ID NO: 921352 - DNA, 33 bp, Homo sapien
tatgatcaaggtgagctacaaacgcacgtttat

SEQ ID NO: 921353 - DNA, 33 bp, Homo sapien
tgtgtgctgtcatgaccaattccaattcccacc

SEQ ID NO: 921354 - DNA, 33 bp, Homo sapien
tgtgtgctgtcatgactaattccaattcccacc

SEQ ID NO: 921355 - DNA, 33 bp, Homo sapien
ggcacacattatacaccaggcatgatagataca

SEQ ID NO: 921356 - DNA, 33 bp, Homo sapien
ggcacacattatacacgaggcatgatagataca

SEQ ID NO: 921357 - DNA, 33 bp, Homo sapien
cacccttgatcaaaaaaagcattcaggccgggt

SEQ ID NO: 921358 - DNA, 33 bp, Homo sapien
cacccttgatcaaaaagagcattcaggccgggt

SEQ ID NO: 921359 - DNA, 33 bp, Homo sapien
acggtggcatacacaacctccagtaaggtctca

SEQ ID NO: 921360 - DNA, 33 bp, Homo sapien
acggtggcatacacaatctccagtaaggtctca

SEQ ID NO: 921361 - DNA, 33 bp, Homo sapien
ggctgaggtatgagaactgctcgagcccaggag

SEQ ID NO: 921362 - DNA, 33 bp, Homo sapien
ggctgaggtatgagaattgctcgagcccaggag

SEQ ID NO: 921363 - DNA, 33 bp, Homo sapien
gcaagaagtaccagtacggggtgtttctccggc

SEQ ID NO: 921364 - DNA, 33 bp, Homo sapien
gcaagaagtaccagtatggggtgtttctccggc

SEQ ID NO: 921365 - DNA, 33 bp, Homo sapien
tgaggctgccgttttacgagtcatagagtaaag

SEQ ID NO: 921366 - DNA, 33 bp, Homo sapien
tgaggctgccgttttaggagtcatagagtaaag

SEQ ID NO: 921367 - DNA, 33 bp, Homo sapien
cctggatctaccgagaactgggaataggaaggc

SEQ ID NO: 921368 - DNA, 33 bp, Homo sapien
cctggatctaccgagagctgggaataggaaggc

SEQ ID NO: 921369 - DNA, 33 bp, Homo sapien
cctgcctgcctgctcacgactgattactttcaa

SEQ ID NO: 921370 - DNA, 33 bp, Homo sapien
cctgcctgcctgctcatgactgattactttcaa

SEQ ID NO: 921371 - DNA, 33 bp, Homo sapien
ggcctggtttgagagaagccaagaactggaata

SEQ ID NO: 921372 - DNA, 33 bp, Homo sapien
ggcctggtttgagagaggccaagaactggaata

SEQ ID NO: 921373 - DNA, 33 bp, Homo sapien
tcaaaacacgcataagccatgcaagtactgaga

SEQ ID NO: 921374 - DNA, 33 bp, Homo sapien
tcaaaacacgcataaggcatgcaagtactgaga

SEQ ID NO: 921375 - DNA, 33 bp, Homo sapien
aggtgatattactcctcactatgcagggattgt

SEQ ID NO: 921376 - DNA, 33 bp, Homo sapien
aggtgatattactccttactatgcagggattgt

SEQ ID NO: 921377 - DNA, 33 bp, Homo sapien
gccctagcgaaggtcacggatcacctagctgtt

SEQ ID NO: 921378 - DNA, 33 bp, Homo sapien
gccctagcgaaggtcagggatcacctagctgtt

SEQ ID NO: 921379 - DNA, 33 bp, Homo sapien
gagagagattacagacaggatgcgtcaaaggac

SEQ ID NO: 921380 - DNA, 33 bp, Homo sapien
gagagagattacagacgggatgcgtcaaaggac

SEQ ID NO: 921381 - DNA, 33 bp, Homo sapien
attgacacaggaaagcagctcctcgtgccccat

SEQ ID NO: 921382 - DNA, 33 bp, Homo sapien
attgacacaggaaagcggctcctcgtgccccat

SEQ ID NO: 921383 - DNA, 33 bp, Homo sapien
acgaggctgcactgaccgggtcgtaaatgtatc

SEQ ID NO: 921384 - DNA, 33 bp, Homo sapien
acgaggctgcactgactgggtcgtaaatgtatc

SEQ ID NO: 921385 - DNA, 33 bp, Homo sapien
ggagctgggccttgctcactttcctatctggcc

SEQ ID NO: 921386 - DNA, 33 bp, Homo sapien
ggagctgggccttgctgactttcctatctggcc

SEQ ID NO: 921387 - DNA, 33 bp, Homo sapien
catttattttcgttcacatttctgggggtgact

SEQ ID NO: 921388 - DNA, 33 bp, Homo sapien
catttattttcgttcatatttctgggggtgact

SEQ ID NO: 921389 - DNA, 33 bp, Homo sapien
caactgacgaattgacaattttttattcagtgt

SEQ ID NO: 921390 - DNA, 33 bp, Homo sapien
caactgacgaattgaccattttttattcagtgt

SEQ ID NO: 921391 - DNA, 33 bp, Homo sapien
aacataccgatcaggaagcacactatcccagta

SEQ ID NO: 921392 - DNA, 33 bp, Homo sapien
aacataccgatcaggaggcacactatcccagta

SEQ ID NO: 921393 - DNA, 33 bp, Homo sapien
gctcttttgtctttcaatatctcttccctgttt

SEQ ID NO: 921394 - DNA, 33 bp, Homo sapien
gctcttttgtctttcagtatctcttccctgttt

SEQ ID NO: 921395 - DNA, 33 bp, Homo sapien
atatctacaaactgaaacagaaatcaggtctca

SEQ ID NO: 921396 - DNA, 33 bp, Homo sapien
atatctacaaactgaatcagaaatcaggtctca

SEQ ID NO: 921397 - DNA, 33 bp, Homo sapien
gctgtgataaaggaaagagcctactgttttagt

SEQ ID NO: 921398 - DNA, 33 bp, Homo sapien
gctgtgataaaggaaatagcctactgttttagt

SEQ ID NO: 921399 - DNA, 33 bp, Homo sapien
ggctgactttggcatacagatttaaatatgtcc

SEQ ID NO: 921400 - DNA, 33 bp, Homo sapien
ggctgactttggcatagagatttaaatatgtcc

SEQ ID NO: 921401 - DNA, 33 bp, Homo sapien
ctgctgaatttgaagaaatgctgaatattctta

SEQ ID NO: 921402 - DNA, 33 bp, Homo sapien
ctgctgaatttgaagagatgctgaatattctta

SEQ ID NO: 921403 - DNA, 33 bp, Homo sapien
agtgtaagacaacccaagaccatgtctccagca

SEQ ID NO: 921404 - DNA, 33 bp, Homo sapien
agtgtaagacaacccacgaccatgtctccagca

SEQ ID NO: 921405 - DNA, 33 bp, Homo sapien
gcctcttcattgtaacaaaaagcagcattactc

SEQ ID NO: 921406 - DNA, 33 bp, Homo sapien
gcctcttcattgtaaccaaaagcagcattactc

SEQ ID NO: 921407 - DNA, 33 bp, Homo sapien; identical to SEQ ID NO: 921405

SEQ ID NO: 921408 - DNA, 33 bp, Homo sapien; identical to SEQ ID NO: 921406

SEQ ID NO: 921409 - DNA, 33 bp, Homo sapien
ccttctttttcatgtaactggattgatgggaca

SEQ ID NO: 921410 - DNA, 33 bp, Homo sapien
ccttctttttcatgtatctggattgatgggaca

SEQ ID NO: 921411 - DNA, 33 bp, Homo sapien
catcaccagccatcaactcaaccgtgaatctgc

SEQ ID NO: 921412 - DNA, 33 bp, Homo sapien
catcaccagccatcaattcaaccgtgaatctgc

SEQ ID NO: 921413 - DNA, 33 bp, Homo sapien
gattcctgggctacaccagcatcgtctaaggct

SEQ ID NO: 921414 - DNA, 33 bp, Homo sapien
gattcctgggctacactagcatcgtctaaggct

SEQ ID NO: 921415 - DNA, 33 bp, Homo sapien
aaaacagtcgaagccaatgaaatcagacttgct

SEQ ID NO: 921416 - DNA, 33 bp, Homo sapien
aaaacagtcgaagccagtgaaatcagacttgct

SEQ ID NO: 921417 - DNA, 33 bp, Homo sapien
agcatcaaggactccaataagatggtcccagcc

SEQ ID NO: 921418 - DNA, 33 bp, Homo sapien
agcatcaaggactccagtaagatggtcccagcc

SEQ ID NO: 921419 - DNA, 33 bp, Homo sapien
tttaacctgttgacgagatcattggtatttata

SEQ ID NO: 921420 - DNA, 33 bp, Homo sapien
tttaacctgttgacgatatcattggtatttata

SEQ ID NO: 921421 - DNA, 33 bp, Homo sapien
tagtacagccaaacatcaaaatgctttctttgg

SEQ ID NO: 921422 - DNA, 33 bp, Homo sapien
tagtacagccaaacattaaaatgctttctttgg

SEQ ID NO: 921423 - DNA, 33 bp, Homo sapien
tatagctctccacctccgaggctgcatctcctc

SEQ ID NO: 921424 - DNA, 33 bp, Homo sapien
tatagctctccacctctgaggctgcatctcctc

SEQ ID NO: 921425 - DNA, 33 bp, Homo sapien
actcactcattttctcactcaacaaaatgcctt

SEQ ID NO: 921426 - DNA, 33 bp, Homo sapien
actcactcattttctcgctcaacaaaatgcctt

SEQ ID NO: 921427 - DNA, 33 bp, Homo sapien
ctagaactctatacaacgttcagtgtcacctag

SEQ ID NO: 921428 - DNA, 33 bp, Homo sapien
ctagaactctatacaatgttcagtgtcacctag

SEQ ID NO: 921429 - DNA, 33 bp, Homo sapien
aataatgaccatgatcaatttcaagccatcaaa

SEQ ID NO: 921430 - DNA, 33 bp, Homo sapien
aataatgaccatgatcgatttcaagccatcaaa

SEQ ID NO: 921431 - DNA, 33 bp, Homo sapien
tcaacaactgagagtacaagggagccggcacag

SEQ ID NO: 921432 - DNA, 33 bp, Homo sapien
tcaacaactgagagtataagggagccggcacag

SEQ ID NO: 921433 - DNA, 33 bp, Homo sapien
tggcccagttcctgacacacggtaaccacttac

SEQ ID NO: 921434 - DNA, 33 bp, Homo sapien
tggcccagttcctgactcacggtaaccacttac

SEQ ID NO: 921435 - DNA, 33 bp, Homo sapien
acacgttgcatactacaaagcaggtgacaaatc

SEQ ID NO: 921436 - DNA, 33 bp, Homo sapien
acacgttgcatactacgaagcaggtgacaaatc

SEQ ID NO: 921437 - DNA, 33 bp, Homo sapien
tagataatcgtcaccgcatgaaggtctagaaag

SEQ ID NO: 921438 - DNA, 33 bp, Homo sapien
tagataatcgtcaccgtatgaaggtctagaaag

SEQ ID NO: 921439 - DNA, 33 bp, Homo sapien
gagtcccccttcatacaattgcaaagaacttgc

SEQ ID NO: 921440 - DNA, 33 bp, Homo sapien
gagtcccccttcatacgattgcaaagaacttgc

SEQ ID NO: 921441 - DNA, 33 bp, Homo sapien
atctgccatacgataccataaaccttaaaccac

SEQ ID NO: 921442 - DNA, 33 bp, Homo sapien
atctgccatacgatactataaaccttaaaccac

SEQ ID NO: 921443 - DNA, 33 bp, Homo sapien
acagtcaggactggccagccaactgcagctgcc

SEQ ID NO: 921444 - DNA, 33 bp, Homo sapien
acagtcaggactggccggccaactgcagctgcc

SEQ ID NO: 921445 - DNA, 33 bp, Homo sapien
tggtagcatttcattcacctgctaatgttgtgt

SEQ ID NO: 921446 - DNA, 33 bp, Homo sapien
tggtagcatttcattcgcctgctaatgttgtgt

SEQ ID NO: 921447 - DNA, 33 bp, Homo sapien
gatcaaggcttccttaactataaaatgaagaca

SEQ ID NO: 921448 - DNA, 33 bp, Homo sapien
gatcaaggcttccttatctataaaatgaagaca

SEQ ID NO: 921449 - DNA, 33 bp, Homo sapien
gtctaaaacaaaaaaaacgatcatatcattccc

SEQ ID NO: 921450 - DNA, 33 bp, Homo sapien
gtctaaaacaaaaaaaccgatcatatcattccc

SEQ ID NO: 921451 - DNA, 33 bp, Homo sapien
agacttgaaggtaggtaaatagaaattgctgaa

SEQ ID NO: 921452 - DNA, 33 bp, Homo sapien
agacttgaaggtaggtgaatagaaattgctgaa

SEQ ID NO: 921453 - DNA, 33 bp, Homo sapien
tattcctggttatttacgcaagagaactgacaa

SEQ ID NO: 921454 - DNA, 33 bp, Homo sapien
tattcctggttatttatgcaagagaactgacaa

SEQ ID NO: 921455 - DNA, 33 bp, Homo sapien
agaattacatactataagatttggggccagagc

SEQ ID NO: 921456 - DNA, 33 bp, Homo sapien
agaattacatactataggatttggggccagagc

SEQ ID NO: 921457 - DNA, 33 bp, Homo sapien
tagtcctttctattcacgagaacaaccacttcc

SEQ ID NO: 921458 - DNA, 33 bp, Homo sapien
tagtcctttctattcatgagaacaaccacttcc

SEQ ID NO: 921459 - DNA, 33 bp, Homo sapien
acagacgtccaccacccaaaatcctattcccag

SEQ ID NO: 921460 - DNA, 33 bp, Homo sapien
acagacgtccaccacctaaaatcctattcccag

SEQ ID NO: 921461 - DNA, 33 bp, Homo sapien
tctctccttttctaaacagatggcttggccggg

SEQ ID NO: 921462 - DNA, 33 bp, Homo sapien
tctctccttttctaaatagatggcttggccggg

SEQ ID NO: 921463 - DNA, 33 bp, Homo sapien
cgttgtaatactccacaatgtctttcagggtct

SEQ ID NO: 921464 - DNA, 33 bp, Homo sapien
cgttgtaatactccacgatgtctttcagggtct

SEQ ID NO: 921465 - DNA, 33 bp, Homo sapien; identical to SEQ ID NO: 921463

SEQ ID NO: 921466 - DNA, 33 bp, Homo sapien; identical to SEQ ID NO: 921464

SEQ ID NO: 921467 - DNA, 33 bp, Homo sapien
caactgtctcagctctaaatttgcatatcctgt

SEQ ID NO: 921468 - DNA, 33 bp, Homo sapien
caactgtctcagctctgaatttgcatatcctgt

SEQ ID NO: 921469 - DNA, 33 bp, Homo sapien
tcctgtggcctccacaatcaacgaaagggataa

SEQ ID NO: 921470 - DNA, 33 bp, Homo sapien
tcctgtggcctccacagtcaacgaaagggataa

SEQ ID NO: 921471 - DNA, 33 bp, Homo sapien
acacagagtggcaaagactatatggattggcat

SEQ ID NO: 921472 - DNA, 33 bp, Homo sapien
acacagagtggcaaaggctatatggattggcat

SEQ ID NO: 921473 - DNA, 33 bp, Homo sapien
aggcttttgcaatctaagcatgcagttccgtaa

SEQ ID NO: 921474 - DNA, 33 bp, Homo sapien
aggcttttgcaatctaggcatgcagttccgtaa

SEQ ID NO: 921475 - DNA, 33 bp, Homo sapien
atacctgaaatacagcaaaaatatcctggaccg

SEQ ID NO: 921476 - DNA, 33 bp, Homo sapien
atacctgaaatacagcgaaaatatcctggaccg

SEQ ID NO: 921477 - DNA, 33 bp, Homo sapien
ggccaagtcgaggtaccggttaaccaaagatgc

SEQ ID NO: 921478 - DNA, 33 bp, Homo sapien
ggccaagtcgaggtacgggttaaccaaagatgc

SEQ ID NO: 921479 - DNA, 33 bp, Homo sapien
gccaccacgtccttgcagatgacttcccagtgc

SEQ ID NO: 921480 - DNA, 33 bp, Homo sapien
gccaccacgtccttgcggatgacttcccagtgc

SEQ ID NO: 921481 - DNA, 33 bp, Homo sapien
caatgaaagtttcataacctcacctcagtcttt

SEQ ID NO: 921482 - DNA, 33 bp, Homo sapien
caatgaaagtttcataccctcacctcagtcttt

SEQ ID NO: 921483 - DNA, 33 bp, Homo sapien
ttcttttgtcaagccaataatctcccaggcatg

SEQ ID NO: 921484 - DNA, 33 bp, Homo sapien
ttcttttgtcaagccagtaatctcccaggcatg

SEQ ID NO: 921485 - DNA, 33 bp, Homo sapien
gcctcagcagggttaacagtaggagattctgcc

SEQ ID NO: 921486 - DNA, 33 bp, Homo sapien
gcctcagcagggttaatagtaggagattctgcc

SEQ ID NO: 921487 - DNA, 33 bp, Homo sapien
gattatacgtgtttgacggacagtcgggtggaa

SEQ ID NO: 921488 - DNA, 33 bp, Homo sapien
gattatacgtgtttgatggacagtcgggtggaa

SEQ ID NO: 921489 - DNA, 33 bp, Homo sapien
tctcctggagtttacaaaagcccttcagagtgt

SEQ ID NO: 921490 - DNA, 33 bp, Homo sapien
tctcctggagtttacacaagcccttcagagtgt

SEQ ID NO: 921491 - DNA, 33 bp, Homo sapien
ctttctccaccacatccaccattctcagacgtg

SEQ ID NO: 921492 - DNA, 33 bp, Homo sapien
ctttctccaccacatctaccattctcagacgtg

SEQ ID NO: 921493 - DNA, 33 bp, Homo sapien
gaagcaaatgacgctcaagttttcctggctcac

SEQ ID NO: 921494 - DNA, 33 bp, Homo sapien
gaagcaaatgacgctccagttttcctggctcac

SEQ ID NO: 921495 - DNA, 33 bp, Homo sapien
ctcagataaagaacaaatgtctggatggatggc

SEQ ID NO: 921496 - DNA, 33 bp, Homo sapien
ctcagataaagaacaagtgtctggatggatggc

SEQ ID NO: 921497 - DNA, 33 bp, Homo sapien
aggagaggagttcaacacttacgcttaccagtt

SEQ ID NO: 921498 - DNA, 33 bp, Homo sapien
aggagaggagttcaacccttacgcttaccagtt

SEQ ID NO: 921499 - DNA, 33 bp, Homo sapien
tgtgtacctgcagaacacaaattggcattggtc

SEQ ID NO: 921500 - DNA, 33 bp, Homo sapien
tgtgtacctgcagaacccaaattggcattggtc

SEQ ID NO: 921501 - DNA, 33 bp, Homo sapien
cccactagacttctgcactgacccaggggctgg

SEQ ID NO: 921502 - DNA, 33 bp, Homo sapien
cccactagacttctgcgctgacccaggggctgg

SEQ ID NO: 921503 - DNA, 33 bp, Homo sapien
cgcagccgttaggagaataagattccacagact

SEQ ID NO: 921504 - DNA, 33 bp, Homo sapien
cgcagccgttaggagactaagattccacagact

SEQ ID NO: 921505 - DNA, 33 bp, Homo sapien
tggcaggtggcttccgccctgtacctgggtggt

SEQ ID NO: 921506 - DNA, 33 bp, Homo sapien
tggcaggtggcttccgtcctgtacctgggtggt

SEQ ID NO: 921507 - DNA, 33 bp, Homo sapien
gccctagctggcattacacaggtgtatctcgct

SEQ ID NO: 921508 - DNA, 33 bp, Homo sapien
gccctagctggcattatacaggtgtatctcgct

SEQ ID NO: 921509 - DNA, 33 bp, Homo sapien
gagtgcagtaggaaaaccattggaggattttga

SEQ ID NO: 921510 - DNA, 33 bp, Homo sapien
gagtgcagtaggaaaagcattggaggattttga

SEQ ID NO: 921511 - DNA, 33 bp, Homo sapien
aggatgatttcccggcacagacaacagtgctct

SEQ ID NO: 921512 - DNA, 33 bp, Homo sapien
aggatgatttcccggcgcagacaacagtgctct

SEQ ID NO: 921513 - DNA, 33 bp, Homo sapien; identical to SEQ ID NO: 921511

SEQ ID NO: 921514 - DNA, 33 bp, Homo sapien; identical to SEQ ID NO: 921512

SEQ ID NO: 921515 - DNA, 33 bp, Homo sapien
gccttgaataccataaatagcagcgcggtcagg

SEQ ID NO: 921516 - DNA, 33 bp, Homo sapien
gccttgaataccataagtagcagcgcggtcagg

SEQ ID NO: 921517 - DNA, 33 bp, Homo sapien
tgtcagaggcgggcccaagtgtgcaaggcgtgt

SEQ ID NO: 921518 - DNA, 33 bp, Homo sapien
tgtcagaggcgggcccgagtgtgcaaggcgtgt

SEQ ID NO: 921519 - DNA, 33 bp, Homo sapien
tctgtgtttaatggaaatagcccatagtctcct

SEQ ID NO: 921520 - DNA, 33 bp, Homo sapien
tctgtgtttaatggaagtagcccatagtctcct

SEQ ID NO: 921521 - DNA, 33 bp, Homo sapien
ggacccttaggagttcaatgagagagaccatga

SEQ ID NO: 921522 - DNA, 33 bp, Homo sapien
ggacccttaggagttcgatgagagagaccatga

SEQ ID NO: 921523 - DNA, 33 bp, Homo sapien
tgttcgtggagtggaaagattaatattgtcaag

SEQ ID NO: 921524 - DNA, 33 bp, Homo sapien
tgttcgtggagtggaaggattaatattgtcaag

SEQ ID NO: 921525 - DNA, 33 bp, Homo sapien
aaagatgatcctgttacggactcctgtcctgct

SEQ ID NO: 921526 - DNA, 33 bp, Homo sapien
aaagatgatcctgttatggactcctgtcctgct

SEQ ID NO: 921527 - DNA, 33 bp, Homo sapien
tgagtcaggctttgaaaggagtatgtgaggccc

SEQ ID NO: 921528 - DNA, 33 bp, Homo sapien
tgagtcaggctttgaagggagtatgtgaggccc

SEQ ID NO: 921529 - DNA, 33 bp, Homo sapien
aatggaagaacaattgcaacgagggtagggtag

SEQ ID NO: 921530 - DNA, 33 bp, Homo sapien
aatggaagaacaattggaacgagggtagggtag

SEQ ID NO: 921531 - DNA, 33 bp, Homo sapien
ctgcacaaaaatcttacagcctgttaccttgta

SEQ ID NO: 921532 - DNA, 33 bp, Homo sapien
ctgcacaaaaatcttatagcctgttaccttgta

SEQ ID NO: 921533 - DNA, 33 bp, Homo sapien
acgttgcaggaccgcacggagaagatgaaggag

SEQ ID NO: 921534 - DNA, 33 bp, Homo sapien
acgttgcaggaccgcatggagaagatgaaggag

SEQ ID NO: 921535 - DNA, 33 bp, Homo sapien
tccctcttgtcctcataaatggtgatgtttctg

SEQ ID NO: 921536 - DNA, 33 bp, Homo sapien
tccctcttgtcctcattaatggtgatgtttctg

SEQ ID NO: 921537 - DNA, 33 bp, Homo sapien
agcgattcattcctccacacatgatgtgcctcc

SEQ ID NO: 921538 - DNA, 33 bp, Homo sapien
agcgattcattcctcctcacatgatgtgcctcc

SEQ ID NO: 921539 - DNA, 33 bp, Homo sapien
gccctggtggagctgacgttctagtggggttgc

SEQ ID NO: 921540 - DNA, 33 bp, Homo sapien
gccctggtggagctgatgttctagtggggttgc

SEQ ID NO: 921541 - DNA, 33 bp, Homo sapien
gacaggatgacctggagaacttaggtggcaagc

SEQ ID NO: 921542 - DNA, 33 bp, Homo sapien
gacaggatgacctggataacttaggtggcaagc

SEQ ID NO: 921543 - DNA, 33 bp, Homo sapien
cgcctggaacaagaaccgtgcgatcttaataaa

SEQ ID NO: 921544 - DNA, 33 bp, Homo sapien
cgcctggaacaagaactgtgcgatcttaataaa

SEQ ID NO: 921545 - DNA, 33 bp, Homo sapien
aggtgttctctgtgtaccagcgctccccgacct

SEQ ID NO: 921546 - DNA, 33 bp, Homo sapien
aggtgttctctgtgtatcagcgctccccgacct

SEQ ID NO: 921547 - DNA, 33 bp, Homo sapien
acctgaggcccgaaacagagcagcccatccagg

SEQ ID NO: 921548 - DNA, 33 bp, Homo sapien
acctgaggcccgaaacggagcagcccatccagg

SEQ ID NO: 921549 - DNA, 33 bp, Homo sapien
gttaccagtcaaaacccgaaacccagtgctaca

SEQ ID NO: 921550 - DNA, 33 bp, Homo sapien
gttaccagtcaaaacctgaaacccagtgctaca

SEQ ID NO: 921551 - DNA, 33 bp, Homo sapien
ggatgggtgaaattaacatttgtaaggcgctca

SEQ ID NO: 921552 - DNA, 33 bp, Homo sapien
ggatgggtgaaattaatatttgtaaggcgctca

SEQ ID NO: 921553 - DNA, 33 bp, Homo sapien
cattgctctagtaatacgtgcatcttgggtgca

SEQ ID NO: 921554 - DNA, 33 bp, Homo sapien
cattgctctagtaatatgtgcatcttgggtgca

SEQ ID NO: 921555 - DNA, 33 bp, Homo sapien
gaataggagtagagtcaagtggagagagcatgt

SEQ ID NO: 921556 - DNA, 33 bp, Homo sapien
gaataggagtagagtcgagtggagagagcatgt

SEQ ID NO: 921557 - DNA, 33 bp, Homo sapien
aagattggaggtacaaagagacaagaaagagct

SEQ ID NO: 921558 - DNA, 33 bp, Homo sapien
aagattggaggtacaatgagacaagaaagagct

SEQ ID NO: 921559 - DNA, 33 bp, Homo sapien
acaaatgcccccacacacgttccttttgttcct

SEQ ID NO: 921560 - DNA, 33 bp, Homo sapien
acaaatgcccccacacgcgttccttttgttcct

SEQ ID NO: 921561 - DNA, 33 bp, Homo sapien
caagaaatctttgaacaaagggccttgcatgtc

SEQ ID NO: 921562 - DNA, 33 bp, Homo sapien
caagaaatctttgaacgaagggccttgcatgtc

SEQ ID NO: 921563 - DNA, 33 bp, Homo sapien
tattggacaatgccaccgaagtagtgaaagaga

SEQ ID NO: 921564 - DNA, 33 bp, Homo sapien
tattggacaatgccactgaagtagtgaaagaga

SEQ ID NO: 921565 - DNA, 33 bp, Homo sapien
tctgatgtttccatcaataggcaaaagtacaga

SEQ ID NO: 921566 - DNA, 33 bp, Homo sapien
tctgatgtttccatcactaggcaaaagtacaga

SEQ ID NO: 921567 - DNA, 33 bp, Homo sapien
gtttaaatcatattaaagcagtgatcaaggagt

SEQ ID NO: 921568 - DNA, 33 bp, Homo sapien
gtttaaatcatattaaggcagtgatcaaggagt

SEQ ID NO: 921569 - DNA, 33 bp, Homo sapien
tctccttggtaagtacagggcttgtttcctgta

SEQ ID NO: 921570 - DNA, 33 bp, Homo sapien
tctccttggtaagtacggggcttgtttcctgta

SEQ ID NO: 921571 - DNA, 33 bp, Homo sapien
gcgatcaatggggtgaaagatgttgcagtcaga

SEQ ID NO: 921572 - DNA, 33 bp, Homo sapien
gcgatcaatggggtgatagatgttgcagtcaga

SEQ ID NO: 921573 - DNA, 33 bp, Homo sapien
acacatctgatcctgaagccttggcactgggag

SEQ ID NO: 921574 - DNA, 33 bp, Homo sapien
acacatctgatcctgaggccttggcactgggag

SEQ ID NO: 921575 - DNA, 33 bp, Homo sapien
ttgacaccaagaatacaaaagaggttttctact

SEQ ID NO: 921576 - DNA, 33 bp, Homo sapien
ttgacaccaagaatacgaaagaggttttctact

SEQ ID NO: 921577 - DNA, 33 bp, Homo sapien
ctgggggtctgcacgaaagaccttctgggaatg

SEQ ID NO: 921578 - DNA, 33 bp, Homo sapien
ctgggggtctgcacgagagaccttctgggaatg

SEQ ID NO: 921579 - DNA, 33 bp, Homo sapien
agttgtgtgcagaaaccaggttggagggtctgg

SEQ ID NO: 921580 - DNA, 33 bp, Homo sapien
agttgtgtgcagaaacgaggttggagggtctgg

SEQ ID NO: 921581 - DNA, 33 bp, Homo sapien
gactggggctctagaacgtaaaggacctgttca

SEQ ID NO: 921582 - DNA, 33 bp, Homo sapien
gactggggctctagaaggtaaaggacctgttca

SEQ ID NO: 921583 - DNA, 33 bp, Homo sapien
ttgtgtttgctctggacgcagacttctcccatg

SEQ ID NO: 921584 - DNA, 33 bp, Homo sapien
ttgtgtttgctctggatgcagacttctcccatg

SEQ ID NO: 921585 - DNA, 33 bp, Homo sapien
ctattatttcaacaaaccttacttgagaaacca

SEQ ID NO: 921586 - DNA, 33 bp, Homo sapien
ctattatttcaacaaagcttacttgagaaacca

SEQ ID NO: 921587 - DNA, 33 bp, Homo sapien
ggctggtggcaacacacaagctgctgatgactg

SEQ ID NO: 921588 - DNA, 33 bp, Homo sapien
ggctggtggcaacacagaagctgctgatgactg

SEQ ID NO: 921589 - DNA, 33 bp, Homo sapien
actaaatgatttgatacatgcaagtccctagca

SEQ ID NO: 921590 - DNA, 33 bp, Homo sapien
actaaatgatttgatatatgcaagtccctagca

SEQ ID NO: 921591 - DNA, 33 bp, Homo sapien
ggtctccctgacctacaggacgaccatttctca

SEQ ID NO: 921592 - DNA, 33 bp, Homo sapien
ggtctccctgacctacgggacgaccatttctca

SEQ ID NO: 921593 - DNA, 33 bp, Homo sapien
gcccctccatgctcaacttagcctctccccgcc

SEQ ID NO: 921594 - DNA, 33 bp, Homo sapien
gcccctccatgctcaatttagcctctccccgcc

SEQ ID NO: 921595 - DNA, 33 bp, Homo sapien
gcaccttctgcgggtcacctttttcttttgaac

SEQ ID NO: 921596 - DNA, 33 bp, Homo sapien
gcaccttctgcgggtcgcctttttcttttgaac

SEQ ID NO: 921597 - DNA, 33 bp, Homo sapien
gaatgcaataaaagagccaattgtctgcgatca

SEQ ID NO: 921598 - DNA, 33 bp, Homo sapien
gaatgcaataaaagagtcaattgtctgcgatca

SEQ ID NO: 921599 - DNA, 33 bp, Homo sapien
aagttacagggcttccaagaaagagcagtgtgg

SEQ ID NO: 921600 - DNA, 33 bp, Homo sapien
aagttacagggcttccgagaaagagcagtgtgg

SEQ ID NO: 921601 - DNA, 33 bp, Homo sapien
agatgagagtgtctgcgctgggacaggtgctct

SEQ ID NO: 921602 - DNA, 33 bp, Homo sapien
agatgagagtgtctgctctgggacaggtgctct

SEQ ID NO: 921603 - DNA, 33 bp, Homo sapien
cctcgttcatctctctaacaaaggccgggaact

SEQ ID NO: 921604 - DNA, 33 bp, Homo sapien
cctcgttcatctctctgacaaaggccgggaact

SEQ ID NO: 921605 - DNA, 33 bp, Homo sapien
agtgcccccgtttagacatggccttgtgagggc

SEQ ID NO: 921606 - DNA, 33 bp, Homo sapien
agtgcccccgtttagatatggccttgtgagggc

SEQ ID NO: 921607 - DNA, 33 bp, Homo sapien
taatcccgagagctcaaacaggccatacaagtg

SEQ ID NO: 921608 - DNA, 33 bp, Homo sapien
taatcccgagagctcagacaggccatacaagtg

SEQ ID NO: 921609 - DNA, 33 bp, Homo sapien
gcaactttatacattcacagaaagacttgcttt

SEQ ID NO: 921610 - DNA, 33 bp, Homo sapien
gcaactttatacattcgcagaaagacttgcttt

SEQ ID NO: 921611 - DNA, 33 bp, Homo sapien
gatccaatccacgctgcatttagtaagtccctt

SEQ ID NO: 921612 - DNA, 33 bp, Homo sapien
gatccaatccacgctgtatttagtaagtccctt

SEQ ID NO: 921613 - DNA, 33 bp, Homo sapien
gatattatagaagatccccacttttgatttttt

SEQ ID NO: 921614 - DNA, 33 bp, Homo sapien
gatattatagaagatctccacttttgatttttt

SEQ ID NO: 921615 - DNA, 33 bp, Homo sapien
ttctgttcctaccagcaccttcctgaacttctg

SEQ ID NO: 921616 - DNA, 33 bp, Homo sapien
ttctgttcctaccagcgccttcctgaacttctg

SEQ ID NO: 921617 - DNA, 33 bp, Homo sapien
gcgagaggaacgaagcaattccattaggaggct

SEQ ID NO: 921618 - DNA, 33 bp, Homo sapien
gcgagaggaacgaagcgattccattaggaggct

SEQ ID NO: 921619 - DNA, 33 bp, Homo sapien
ataactacaacctacaaagctatgacagcgctc

SEQ ID NO: 921620 - DNA, 33 bp, Homo sapien
ataactacaacctacacagctatgacagcgctc

SEQ ID NO: 921621 - DNA, 33 bp, Homo sapien
tgtttcttcagctaaaagaaagatactactcta

SEQ ID NO: 921622 - DNA, 33 bp, Homo sapien
tgtttcttcagctaaaggaaagatactactcta

SEQ ID NO: 921623 - DNA, 33 bp, Homo sapien
gtattctagcaattacaaattttaaaaagagtc

SEQ ID NO: 921624 - DNA, 33 bp, Homo sapien
gtattctagcaattacgaattttaaaaagagtc

SEQ ID NO: 921625 - DNA, 33 bp, Homo sapien
gtggcaaggtgaaaaacggtcacctcaaggcta

SEQ ID NO: 921626 - DNA, 33 bp, Homo sapien
gtggcaaggtgaaaaagggtcacctcaaggcta

SEQ ID NO: 921627 - DNA, 33 bp, Homo sapien
gattccgtccataagcggacatgtccataagcc

SEQ ID NO: 921628 - DNA, 33 bp, Homo sapien
gattccgtccataagctgacatgtccataagcc

SEQ ID NO: 921629 - DNA, 33 bp, Homo sapien
ttcagcatgagtcaacagagttgtggcctctac

SEQ ID NO: 921630 - DNA, 33 bp, Homo sapien
ttcagcatgagtcaacggagttgtggcctctac

SEQ ID NO: 921631 - DNA, 33 bp, Homo sapien
gtgctcacagacaaagactgagcatgcatttat

SEQ ID NO: 921632 - DNA, 33 bp, Homo sapien
gtgctcacagacaaaggctgagcatgcatttat

SEQ ID NO: 921633 - DNA, 33 bp, Homo sapien
ctggacttggtccacaccaacagaaagtggagg

SEQ ID NO: 921634 - DNA, 33 bp, Homo sapien
ctggacttggtccacatcaacagaaagtggagg

SEQ ID NO: 921635 - DNA, 33 bp, Homo sapien
tcctaccagttagttcaatctggctagcagcat

SEQ ID NO: 921636 - DNA, 33 bp, Homo sapien
tcctaccagttagttctatctggctagcagcat

SEQ ID NO: 921637 - DNA, 33 bp, Homo sapien
ggccactccttagctaaatgacttggacaaatc

SEQ ID NO: 921638 - DNA, 33 bp, Homo sapien
ggccactccttagctagatgacttggacaaatc

SEQ ID NO: 921639 - DNA, 33 bp, Homo sapien
catactgagacccttcacgttgcatgaaaaggc

SEQ ID NO: 921640 - DNA, 33 bp, Homo sapien
catactgagacccttctcgttgcatgaaaaggc

SEQ ID NO: 921641 - DNA, 33 bp, Homo sapien
atgggaaggtaagcccccttctgcaggaagttt

SEQ ID NO: 921642 - DNA, 33 bp, Homo sapien
atgggaaggtaagccctcttctgcaggaagttt

SEQ ID NO: 921643 - DNA, 33 bp, Homo sapien
catagagaagaaagacagaagcttgcaggggtg

SEQ ID NO: 921644 - DNA, 33 bp, Homo sapien
catagagaagaaagacggaagcttgcaggggtg

SEQ ID NO: 921645 - DNA, 33 bp, Homo sapien
gccattgttgattaacacaatctcatctttctt

SEQ ID NO: 921646 - DNA, 33 bp, Homo sapien
gccattgttgattaactcaatctcatctttctt

SEQ ID NO: 921647 - DNA, 33 bp, Homo sapien
aaaaaaaagatatttcaagcaagctatctactt

SEQ ID NO: 921648 - DNA, 33 bp, Homo sapien
aaaaaaaagatatttcgagcaagctatctactt

SEQ ID NO: 921649 - DNA, 33 bp, Homo sapien
acagctgccagatggtaaaacttctgtgcctaa

SEQ ID NO: 921650 - DNA, 33 bp, Homo sapien
acagctgccagatggtgaaacttctgtgcctaa

SEQ ID NO: 921651 - DNA, 33 bp, Homo sapien
ggaagccgctggtaagcctggatgttgaattta

SEQ ID NO: 921652 - DNA, 33 bp, Homo sapien
ggaagccgctggtaagtctggatgttgaattta

SEQ ID NO: 921653 - DNA, 33 bp, Homo sapien
gggtcactgtttctcacgcaaagaaaggcaaac

SEQ ID NO: 921654 - DNA, 33 bp, Homo sapien
gggtcactgtttctcatgcaaagaaaggcaaac

SEQ ID NO: 921655 - DNA, 33 bp, Homo sapien
tttcaaagaccttctccaaatgaaaagcaacat

SEQ ID NO: 921656 - DNA, 33 bp, Homo sapien
tttcaaagaccttctctaaatgaaaagcaacat

SEQ ID NO: 921657 - DNA, 33 bp, Homo sapien
atgtccagtttccactcaagggtaagggtagaa

SEQ ID NO: 921658 - DNA, 33 bp, Homo sapien
atgtccagtttccactgaagggtaagggtagaa

SEQ ID NO: 921659 - DNA, 33 bp, Homo sapien
caaccgggacagtcagaaagttaaaggcatgtc

SEQ ID NO: 921660 - DNA, 33 bp, Homo sapien
caaccgggacagtcaggaagttaaaggcatgtc

SEQ ID NO: 921661 - DNA, 33 bp, Homo sapien
tgactctctcttctccaattcattttaatgtgc

SEQ ID NO: 921662 - DNA, 33 bp, Homo sapien
tgactctctcttctccgattcattttaatgtgc

SEQ ID NO: 921663 - DNA, 33 bp, Homo sapien
cacattcctgccttataaattcggttgtgtctt

SEQ ID NO: 921664 - DNA, 33 bp, Homo sapien
cacattcctgccttatgaattcggttgtgtctt

SEQ ID NO: 921665 - DNA, 33 bp, Homo sapien
gggctatgacttagtgcaagaggcaactcagga

SEQ ID NO: 921666 - DNA, 33 bp, Homo sapien
gggctatgacttagtggaagaggcaactcagga

SEQ ID NO: 921667 - DNA, 33 bp, Homo sapien
tcatcttcctgtagcacccactggtcaaggctc

SEQ ID NO: 921668 - DNA, 33 bp, Homo sapien
tcatcttcctgtagcatccactggtcaaggctc

SEQ ID NO: 921669 - DNA, 33 bp, Homo sapien
atcctccctggataaaaagctgggactaaagat

SEQ ID NO: 921670 - DNA, 33 bp, Homo sapien
atcctccctggataaacagctgggactaaagat

SEQ ID NO: 921671 - DNA, 33 bp, Homo sapien
actgtgactctccccacgggtaaccactcacct

SEQ ID NO: 921672 - DNA, 33 bp, Homo sapien
actgtgactctccccatgggtaaccactcacct

SEQ ID NO: 921673 - DNA, 33 bp, Homo sapien
aggcagaaggaatccacaaaggacaagtaattt

SEQ ID NO: 921674 - DNA, 33 bp, Homo sapien
aggcagaaggaatccataaaggacaagtaattt

SEQ ID NO: 921675 - DNA, 33 bp, Homo sapien
tcccgccttacagatacgaacacaggtgtgcgg

SEQ ID NO: 921676 - DNA, 33 bp, Homo sapien
tcccgccttacagatatgaacacaggtgtgcgg

SEQ ID NO: 921677 - DNA, 33 bp, Homo sapien
ctttccttcatgtaacaaatcttttattgatca

SEQ ID NO: 921678 - DNA, 33 bp, Homo sapien
ctttccttcatgtaacgaatcttttattgatca

SEQ ID NO: 921679 - DNA, 33 bp, Homo sapien
gatgagaatatagagaagttgtggtcctcatac

SEQ ID NO: 921680 - DNA, 33 bp, Homo sapien
gatgagaatatagagaggttgtggtcctcatac

SEQ ID NO: 921681 - DNA, 33 bp, Homo sapien
aaccaaggattgcaaagtatatacaagccagaa

SEQ ID NO: 921682 - DNA, 33 bp, Homo sapien
aaccaaggattgcaaattatatacaagccagaa

SEQ ID NO: 921683 - DNA, 33 bp, Homo sapien
tagtgagggtaagagaatcctagtgtagcagga

SEQ ID NO: 921684 - DNA, 33 bp, Homo sapien
tagtgagggtaagagattcctagtgtagcagga

SEQ ID NO: 921685 - DNA, 33 bp, Homo sapien
ggaccttggctcctaaatgctccagtccagaag

SEQ ID NO: 921686 - DNA, 33 bp, Homo sapien
ggaccttggctcctaactgctccagtccagaag

SEQ ID NO: 921687 - DNA, 33 bp, Homo sapien
cagacatgcgccatcacgcttgcctaatttttt

SEQ ID NO: 921688 - DNA, 33 bp, Homo sapien
cagacatgcgccatcaggcttgcctaatttttt

SEQ ID NO: 921689 - DNA, 33 bp, Homo sapien
ttttgctttttccttacaggactcagtcaataa

SEQ ID NO: 921690 - DNA, 33 bp, Homo sapien
ttttgctttttccttataggactcagtcaataa

SEQ ID NO: 921691 - DNA, 33 bp, Homo sapien
ttccaagtgttctttaggtgacctgacccaacc

SEQ ID NO: 921692 - DNA, 33 bp, Homo sapien
ttccaagtgttctttatgtgacctgacccaacc

SEQ ID NO: 921693 - DNA, 33 bp, Homo sapien
acacatctgggggaaacgctgcaaacatctgct

SEQ ID NO: 921694 - DNA, 33 bp, Homo sapien
acacatctgggggaaatgctgcaaacatctgct

SEQ ID NO: 921695 - DNA, 33 bp, Homo sapien
aaaacaggctcagagacgtttcattacttgccc

SEQ ID NO: 921696 - DNA, 33 bp, Homo sapien
aaaacaggctcagagatgtttcattacttgccc

SEQ ID NO: 921697 - DNA, 33 bp, Homo sapien
cagaccaaaaaactgacgccagaaagcagataa

SEQ ID NO: 921698 - DNA, 33 bp, Homo sapien
cagaccaaaaaactgaggccagaaagcagataa

SEQ ID NO: 921699 - DNA, 33 bp, Homo sapien
aggaaggctggccagaaaccatctgactactca

SEQ ID NO: 921700 - DNA, 33 bp, Homo sapien
aggaaggctggccagagaccatctgactactca

SEQ ID NO: 921701 - DNA, 33 bp, Homo sapien
ataagggaactttttcacttcaccactatgcct

SEQ ID NO: 921702 - DNA, 33 bp, Homo sapien
ataagggaactttttcgcttcaccactatgcct

SEQ ID NO: 921703 - DNA, 33 bp, Homo sapien
cttaatgacagagatacattttctgagaaatat

SEQ ID NO: 921704 - DNA, 33 bp, Homo sapien
cttaatgacagagatagattttctgagaaatat

SEQ ID NO: 921705 - DNA, 33 bp, Homo sapien
agcttgtccatacaaacattttgcaaactgtaa

SEQ ID NO: 921706 - DNA, 33 bp, Homo sapien
agcttgtccatacaaatattttgcaaactgtaa

SEQ ID NO: 921707 - DNA, 33 bp, Homo sapien
aataaaatgcacagaactggacctccttgagag

SEQ ID NO: 921708 - DNA, 33 bp, Homo sapien
aataaaatgcacagaattggacctccttgagag

SEQ ID NO: 921709 - DNA, 33 bp, Homo sapien
aatcagatcacatttccccctgcttacaacttt

SEQ ID NO: 921710 - DNA, 33 bp, Homo sapien
aatcagatcacatttctccctgcttacaacttt

SEQ ID NO: 921711 - DNA, 33 bp, Homo sapien
actgctctttgtgggtaaccatctccgtctaga

SEQ ID NO: 921712 - DNA, 33 bp, Homo sapien
actgctctttgtgggtgaccatctccgtctaga

SEQ ID NO: 921713 - DNA, 33 bp, Homo sapien
agccatcggcaggaatcaaggtacaggaagggc

SEQ ID NO: 921714 - DNA, 33 bp, Homo sapien
agccatcggcaggaattaaggtacaggaagggc

SEQ ID NO: 921715 - DNA, 33 bp, Homo sapien
gcaatgttctaatagcaatgaaacagagttatt

SEQ ID NO: 921716 - DNA, 33 bp, Homo sapien
gcaatgttctaatagcgatgaaacagagttatt

SEQ ID NO: 921717 - DNA, 33 bp, Homo sapien
acagtaaaacacagacaagtttcaaaagaaaac

SEQ ID NO: 921718 - DNA, 33 bp, Homo sapien
acagtaaaacacagaccagtttcaaaagaaaac

SEQ ID NO: 921719 - DNA, 33 bp, Homo sapien
actctaggtatctttcaacacctctaatgatta

SEQ ID NO: 921720 - DNA, 33 bp, Homo sapien
actctaggtatctttcgacacctctaatgatta

SEQ ID NO: 921721 - DNA, 33 bp, Homo sapien
attctctcttccttacaactttcttaataacat

SEQ ID NO: 921722 - DNA, 33 bp, Homo sapien
attctctcttccttacgactttcttaataacat

SEQ ID NO: 921723 - DNA, 33 bp, Homo sapien
atagggatcaggtgccgccaaacatgggtcatc

SEQ ID NO: 921724 - DNA, 33 bp, Homo sapien
atagggatcaggtgcctccaaacatgggtcatc

SEQ ID NO: 921725 - DNA, 33 bp, Homo sapien
ttcagatccagatggcaaaagaatttgttgggc

SEQ ID NO: 921726 - DNA, 33 bp, Homo sapien
ttcagatccagatggcgaaagaatttgttgggc

SEQ ID NO: 921727 - DNA, 33 bp, Homo sapien
gacaaaaatgcagaacacccttgacggatgcta

SEQ ID NO: 921728 - DNA, 33 bp, Homo sapien
gacaaaaatgcagaacgcccttgacggatgcta

SEQ ID NO: 921729 - DNA, 33 bp, Homo sapien
attatctacaggaaaacgaacacaggaagactg

SEQ ID NO: 921730 - DNA, 33 bp, Homo sapien
attatctacaggaaaatgaacacaggaagactg

SEQ ID NO: 921731 - DNA, 33 bp, Homo sapien
actctaacgtagagaaatggacagacccagttg

SEQ ID NO: 921732 - DNA, 33 bp, Homo sapien
actctaacgtagagaagtggacagacccagttg

SEQ ID NO: 921733 - DNA, 33 bp, Homo sapien
acaggactctggaaaacggaggacctcaatggg

SEQ ID NO: 921734 - DNA, 33 bp, Homo sapien
acaggactctggaaaatggaggacctcaatggg

SEQ ID NO: 921735 - DNA, 33 bp, Homo sapien
cctggtcatgcaaagagaattcagtgagatgaa

SEQ ID NO: 921736 - DNA, 33 bp, Homo sapien
cctggtcatgcaaagataattcagtgagatgaa

SEQ ID NO: 921737 - DNA, 33 bp, Homo sapien
gtgatcatgggaataccgcttaacctcaaatcc

SEQ ID NO: 921738 - DNA, 33 bp, Homo sapien
gtgatcatgggaatactgcttaacctcaaatcc

SEQ ID NO: 921739 - DNA, 33 bp, Homo sapien
ggcccatgtaaacaaagtctagattaacctact

SEQ ID NO: 921740 - DNA, 33 bp, Homo sapien
ggcccatgtaaacaaattctagattaacctact

SEQ ID NO: 921741 - DNA, 33 bp, Homo sapien
ttctggacacattcatcacaggtgtgctcgaag

SEQ ID NO: 921742 - DNA, 33 bp, Homo sapien
ttctggacacattcattacaggtgtgctcgaag

SEQ ID NO: 921743 - DNA, 33 bp, Homo sapien
aaaaaaaactgacttgcatatgtgcttacataa

SEQ ID NO: 921744 - DNA, 33 bp, Homo sapien
aaaaaaaactgacttggatatgtgcttacataa

SEQ ID NO: 921745 - DNA, 33 bp, Homo sapien
tttcagaactttgaaaatacatctgtgatttac

SEQ ID NO: 921746 - DNA, 33 bp, Homo sapien
tttcagaactttgaaattacatctgtgatttac

SEQ ID NO: 921747 - DNA, 33 bp, Homo sapien
ctactgtgtctggccggatttccattattctcg

SEQ ID NO: 921748 - DNA, 33 bp, Homo sapien
ctactgtgtctggccgtatttccattattctcg

SEQ ID NO: 921749 - DNA, 33 bp, Homo sapien
tgggggaagattactacgatcccagcagggtcc

SEQ ID NO: 921750 - DNA, 33 bp, Homo sapien
tgggggaagattactatgatcccagcagggtcc

SEQ ID NO: 921751 - DNA, 33 bp, Homo sapien
tcatcttacagataaaaggactaaacccgagag

SEQ ID NO: 921752 - DNA, 33 bp, Homo sapien
tcatcttacagataaacggactaaacccgagag

SEQ ID NO: 921753 - DNA, 33 bp, Homo sapien
gggtgggaaatgaagcaatcactcaggacagga

SEQ ID NO: 921754 - DNA, 33 bp, Homo sapien
gggtgggaaatgaagcgatcactcaggacagga

SEQ ID NO: 921755 - DNA, 33 bp, Homo sapien
aaagcataaaaaagtgaagctcaatgcaacaaa

SEQ ID NO: 921756 - DNA, 33 bp, Homo sapien
aaagcataaaaaagtggagctcaatgcaacaaa

SEQ ID NO: 921757 - DNA, 33 bp, Homo sapien
gcactagaaatggaataataaagcctagatcac

SEQ ID NO: 921758 - DNA, 33 bp, Homo sapien
gcactagaaatggaatcataaagcctagatcac

SEQ ID NO: 921759 - DNA, 33 bp, Homo sapien
tgcaagatcaatatacaggtatacctcaaagat

SEQ ID NO: 921760 - DNA, 33 bp, Homo sapien
tgcaagatcaatatacgggtatacctcaaagat

SEQ ID NO: 921761 - DNA, 33 bp, Homo sapien
atatttcctaagcaacagaaccaactagctgct

SEQ ID NO: 921762 - DNA, 33 bp, Homo sapien
atatttcctaagcaacggaaccaactagctgct

SEQ ID NO: 921763 - DNA, 33 bp, Homo sapien
gttaatctacggaaataatagctttttgtcttg

SEQ ID NO: 921764 - DNA, 33 bp, Homo sapien
gttaatctacggaaatcatagctttttgtcttg

SEQ ID NO: 921765 - DNA, 33 bp, Homo sapien
taaaggttaatgcctacgtagcaaagctggtca

SEQ ID NO: 921766 - DNA, 33 bp, Homo sapien
taaaggttaatgcctatgtagcaaagctggtca

SEQ ID NO: 921767 - DNA, 33 bp, Homo sapien
ccatctcacaagtgacactggcgcccataccag

SEQ ID NO: 921768 - DNA, 33 bp, Homo sapien
ccatctcacaagtgacgctggcgcccataccag

SEQ ID NO: 921769 - DNA, 33 bp, Homo sapien
cactcctgatgataacaaagtgcagagcagcgc

SEQ ID NO: 921770 - DNA, 33 bp, Homo sapien
cactcctgatgataactaagtgcagagcagcgc

SEQ ID NO: 921771 - DNA, 33 bp, Homo sapien
cttaggaattgtcgcccgctgctacagatctac

SEQ ID NO: 921772 - DNA, 33 bp, Homo sapien
cttaggaattgtcgcctgctgctacagatctac

SEQ ID NO: 921773 - DNA, 33 bp, Homo sapien
tacagtaagagaagcacacaattccatatggct

SEQ ID NO: 921774 - DNA, 33 bp, Homo sapien
tacagtaagagaagcatacaattccatatggct

SEQ ID NO: 921775 - DNA, 33 bp, Homo sapien
gtctcaggctactaaacgacccagagcaaaggg

SEQ ID NO: 921776 - DNA, 33 bp, Homo sapien
gtctcaggctactaaatgacccagagcaaaggg

SEQ ID NO: 921777 - DNA, 33 bp, Homo sapien
tgattatcaaaagagcacatggcatcagcaagc

SEQ ID NO: 921778 - DNA, 33 bp, Homo sapien
tgattatcaaaagagcgcatggcatcagcaagc

SEQ ID NO: 921779 - DNA, 33 bp, Homo sapien
tcatcgctgtctcgcacgaactaaatgaggtga

SEQ ID NO: 921780 - DNA, 33 bp, Homo sapien
tcatcgctgtctcgcatgaactaaatgaggtga

SEQ ID NO: 921781 - DNA, 33 bp, Homo sapien
aaaggtgcttggacaacagaatgtcccttagaa

SEQ ID NO: 921782 - DNA, 33 bp, Homo sapien
aaaggtgcttggacaagagaatgtcccttagaa

SEQ ID NO: 921783 - DNA, 33 bp, Homo sapien
gggaccctcggacacacgatggggccttgaatc

SEQ ID NO: 921784 - DNA, 33 bp, Homo sapien
gggaccctcggacacatgatggggccttgaatc

SEQ ID NO: 921785 - DNA, 33 bp, Homo sapien
tgcctgacaacaggtcaacggacttcaccgacg

SEQ ID NO: 921786 - DNA, 33 bp, Homo sapien
tgcctgacaacaggtcgacggacttcaccgacg

SEQ ID NO: 921787 - DNA, 33 bp, Homo sapien
ccacgggtatatgtcacagtacttggctatttt

SEQ ID NO: 921788 - DNA, 33 bp, Homo sapien
ccacgggtatatgtcatagtacttggctatttt

SEQ ID NO: 921789 - DNA, 33 bp, Homo sapien
aaatagattcttttaccatgttagcattaagta

SEQ ID NO: 921790 - DNA, 33 bp, Homo sapien
aaatagattcttttactatgttagcattaagta

SEQ ID NO: 921791 - DNA, 33 bp, Homo sapien
tttcatacctcttccacgatatttttccagatc

SEQ ID NO: 921792 - DNA, 33 bp, Homo sapien
tttcatacctcttccatgatatttttccagatc

SEQ ID NO: 921793 - DNA, 33 bp, Homo sapien
cacagaatgtcacctacatacacggcaggactg

SEQ ID NO: 921794 - DNA, 33 bp, Homo sapien
cacagaatgtcacctatatacacggcaggactg

SEQ ID NO: 921795 - DNA, 33 bp, Homo sapien
gtcagttgggcaggtagcgagatgggcatgggg

SEQ ID NO: 921796 - DNA, 33 bp, Homo sapien
gtcagttgggcaggtatcgagatgggcatgggg

SEQ ID NO: 921797 - DNA, 33 bp, Homo sapien
acaggtgataccgcctaagaacacagatcccca

SEQ ID NO: 921798 - DNA, 33 bp, Homo sapien
acaggtgataccgcctgagaacacagatcccca

SEQ ID NO: 921799 - DNA, 33 bp, Homo sapien
ctctaggagatgataacaatgtggacagacaaa

SEQ ID NO: 921800 - DNA, 33 bp, Homo sapien
ctctaggagatgataataatgtggacagacaaa

SEQ ID NO: 921801 - DNA, 33 bp, Homo sapien
atactggtttatgcgcgctctcactgctcacca

SEQ ID NO: 921802 - DNA, 33 bp, Homo sapien
atactggtttatgcgctctctcactgctcacca

SEQ ID NO: 921803 - DNA, 33 bp, Homo sapien
atacctcaagtgctaaaacaacagatatacatg

SEQ ID NO: 921804 - DNA, 33 bp, Homo sapien
atacctcaagtgctaagacaacagatatacatg

SEQ ID NO: 921805 - DNA, 33 bp, Homo sapien
tgggtagagctgctcacagtagaacccaggaga

SEQ ID NO: 921806 - DNA, 33 bp, Homo sapien
tgggtagagctgctcatagtagaacccaggaga

SEQ ID NO: 921807 - DNA, 33 bp, Homo sapien
cttccttcccatgtcaggtaatgcctctcctca

SEQ ID NO: 921808 - DNA, 33 bp, Homo sapien
cttccttcccatgtcatgtaatgcctctcctca

SEQ ID NO: 921809 - DNA, 33 bp, Homo sapien
ttcctcctttgctctgaactctagctacactgt

SEQ ID NO: 921810 - DNA, 33 bp, Homo sapien
ttcctcctttgctctgtactctagctacactgt

SEQ ID NO: 921811 - DNA, 33 bp, Homo sapien
ttcacatttgacacgccaaatttctagtgagtt

SEQ ID NO: 921812 - DNA, 33 bp, Homo sapien
ttcacatttgacacgctaaatttctagtgagtt

SEQ ID NO: 921813 - DNA, 33 bp, Homo sapien
cttctacggacagcacaaaatgcagagtctcta

SEQ ID NO: 921814 - DNA, 33 bp, Homo sapien
cttctacggacagcacgaaatgcagagtctcta

SEQ ID NO: 921815 - DNA, 33 bp, Homo sapien
gaggtatggatagatcaataggtgtgtgataaa

SEQ ID NO: 921816 - DNA, 33 bp, Homo sapien
gaggtatggatagatcgataggtgtgtgataaa

SEQ ID NO: 921817 - DNA, 33 bp, Homo sapien
cttgatggtttctataaacagagcattattttt

SEQ ID NO: 921818 - DNA, 33 bp, Homo sapien
cttgatggtttctatacacagagcattattttt

SEQ ID NO: 921819 - DNA, 33 bp, Homo sapien
tctgcaaaaggatttccgaaacctgtgtggcag

SEQ ID NO: 921820 - DNA, 33 bp, Homo sapien
tctgcaaaaggatttctgaaacctgtgtggcag

SEQ ID NO: 921821 - DNA, 33 bp, Homo sapien
ggaagagtaggatgccaagcacggtggagaagc

SEQ ID NO: 921822 - DNA, 33 bp, Homo sapien
ggaagagtaggatgccgagcacggtggagaagc

SEQ ID NO: 921823 - DNA, 33 bp, Homo sapien
ggcatgtctaggcaccaggaagactgtgctcca

SEQ ID NO: 921824 - DNA, 33 bp, Homo sapien
ggcatgtctaggcaccgggaagactgtgctcca

SEQ ID NO: 921825 - DNA, 33 bp, Homo sapien
tgttagtgggaaggtaagttggtaaaccattat

SEQ ID NO: 921826 - DNA, 33 bp, Homo sapien
tgttagtgggaaggtatgttggtaaaccattat

SEQ ID NO: 921827 - DNA, 33 bp, Homo sapien
caaacagatccatctacgtccacagttcctact

SEQ ID NO: 921828 - DNA, 33 bp, Homo sapien
caaacagatccatctaggtccacagttcctact

SEQ ID NO: 921829 - DNA, 33 bp, Homo sapien
cactgaaatcatcttgcagtttaggaaacagct

SEQ ID NO: 921830 - DNA, 33 bp, Homo sapien
cactgaaatcatcttggagtttaggaaacagct

SEQ ID NO: 921831 - DNA, 33 bp, Homo sapien
ttaaatgttttgcgtgcatttgtactggcacca

SEQ ID NO: 921832 - DNA, 33 bp, Homo sapien
ttaaatgttttgcgtgtatttgtactggcacca

SEQ ID NO: 921833 - DNA, 33 bp, Homo sapien
gaactacagatggaaacaactttgctgcatttt

SEQ ID NO: 921834 - DNA, 33 bp, Homo sapien
gaactacagatggaaataactttgctgcatttt

SEQ ID NO: 921835 - DNA, 33 bp, Homo sapien
aggatagaagaaaaaaatccaatgaatacctca

SEQ ID NO: 921836 - DNA, 33 bp, Homo sapien
aggatagaagaaaaaagtccaatgaatacctca

SEQ ID NO: 921837 - DNA, 33 bp, Homo sapien
agaataatttattgaaagatgaaacaagcttta

SEQ ID NO: 921838 - DNA, 33 bp, Homo sapien
agaataatttattgaaggatgaaacaagcttta

SEQ ID NO: 921839 - DNA, 33 bp, Homo sapien
ttctgtggatgctcaacatgaaaagaacagatg

SEQ ID NO: 921840 - DNA, 33 bp, Homo sapien
ttctgtggatgctcaatatgaaaagaacagatg

SEQ ID NO: 921841 - DNA, 33 bp, Homo sapien
ccactctcagacaactaaagcactgctgaactt

SEQ ID NO: 921842 - DNA, 33 bp, Homo sapien
ccactctcagacaactgaagcactgctgaactt

SEQ ID NO: 921843 - DNA, 33 bp, Homo sapien
aaatgtctggaccccacagaatcaaaaaagaat

SEQ ID NO: 921844 - DNA, 33 bp, Homo sapien
aaatgtctggaccccatagaatcaaaaaagaat

SEQ ID NO: 921845 - DNA, 33 bp, Homo sapien
atctaaaaagtcccccaacagtcagtaaacata

SEQ ID NO: 921846 - DNA, 33 bp, Homo sapien
atctaaaaagtcccccgacagtcagtaaacata

SEQ ID NO: 921847 - DNA, 33 bp, Homo sapien
ctcaggatatctggaaccataggaattcagtgt

SEQ ID NO: 921848 - DNA, 33 bp, Homo sapien
ctcaggatatctggaatcataggaattcagtgt

SEQ ID NO: 921849 - DNA, 33 bp, Homo sapien
aacatggtggtgccacaaaccaggaaaagaacc

SEQ ID NO: 921850 - DNA, 33 bp, Homo sapien
aacatggtggtgccacgaaccaggaaaagaacc

SEQ ID NO: 921851 - DNA, 33 bp, Homo sapien
tatatatatgtctaagcctatcactccctggct

SEQ ID NO: 921852 - DNA, 33 bp, Homo sapien
tatatatatgtctaagtctatcactccctggct

SEQ ID NO: 921853 - DNA, 33 bp, Homo sapien
agatgattagactctaccaatgactattaaagt

SEQ ID NO: 921854 - DNA, 33 bp, Homo sapien
agatgattagactctatcaatgactattaaagt

SEQ ID NO: 921855 - DNA, 33 bp, Homo sapien
agaactcattgtggtgcagccctcttactgcaa

SEQ ID NO: 921856 - DNA, 33 bp, Homo sapien
agaactcattgtggtgtagccctcttactgcaa

SEQ ID NO: 921857 - DNA, 33 bp, Homo sapien
tgtgcatttactgcacaatgactcagagctggg

SEQ ID NO: 921858 - DNA, 33 bp, Homo sapien
tgtgcatttactgcacgatgactcagagctggg

SEQ ID NO: 921859 - DNA, 33 bp, Homo sapien
gagaatgaatttaaaaatagaagttagctacat

SEQ ID NO: 921860 - DNA, 33 bp, Homo sapien
gagaatgaatttaaaagtagaagttagctacat

SEQ ID NO: 921861 - DNA, 33 bp, Homo sapien
tggctaaaataaaatagaggctacataccagtt

SEQ ID NO: 921862 - DNA, 33 bp, Homo sapien
tggctaaaataaaatataggctacataccagtt

SEQ ID NO: 921863 - DNA, 33 bp, Homo sapien
aagaatttctacttgccagaggctccaacactg

SEQ ID NO: 921864 - DNA, 33 bp, Homo sapien
aagaatttctacttgctagaggctccaacactg

SEQ ID NO: 921865 - DNA, 33 bp, Homo sapien
acttcacttagcacaacgtcgtcagggtttact

SEQ ID NO: 921866 - DNA, 33 bp, Homo sapien
acttcacttagcacaatgtcgtcagggtttact

SEQ ID NO: 921867 - DNA, 33 bp, Homo sapien
atggtccctggtaaatgagaggagtgcatcaca

SEQ ID NO: 921868 - DNA, 33 bp, Homo sapien
atggtccctggtaaattagaggagtgcatcaca

SEQ ID NO: 921869 - DNA, 33 bp, Homo sapien
tagcattagtactctcaagactttacgaactgg

SEQ ID NO: 921870 - DNA, 33 bp, Homo sapien
tagcattagtactctcgagactttacgaactgg

SEQ ID NO: 921871 - DNA, 33 bp, Homo sapien
caggcagaataaaaaccaagaaggggatgaggt

SEQ ID NO: 921872 - DNA, 33 bp, Homo sapien
caggcagaataaaaactaagaaggggatgaggt

SEQ ID NO: 921873 - DNA, 33 bp, Homo sapien
ataatgaattcgttgcaaaagatttttcatagt

SEQ ID NO: 921874 - DNA, 33 bp, Homo sapien
ataatgaattcgttgcgaaagatttttcatagt

SEQ ID NO: 921875 - DNA, 33 bp, Homo sapien
ggaaccatgtgtgataactctctctcttttttt

SEQ ID NO: 921876 - DNA, 33 bp, Homo sapien
ggaaccatgtgtgatacctctctctcttttttt

SEQ ID NO: 921877 - DNA, 33 bp, Homo sapien
ttgattctaggcttcaccaattgttaactgggt

SEQ ID NO: 921878 - DNA, 33 bp, Homo sapien
ttgattctaggcttcatcaattgttaactgggt

SEQ ID NO: 921879 - DNA, 33 bp, Homo sapien
tcttctcatctaggccaccagttactataacat

SEQ ID NO: 921880 - DNA, 33 bp, Homo sapien
tcttctcatctaggccgccagttactataacat

SEQ ID NO: 921881 - DNA, 33 bp, Homo sapien
atagatggaggttagcggagggaagagtggaag

SEQ ID NO: 921882 - DNA, 33 bp, Homo sapien
atagatggaggttagctgagggaagagtggaag

SEQ ID NO: 921883 - DNA, 33 bp, Homo sapien
ctgtatctctgtgataagttctctaagagtggt

SEQ ID NO: 921884 - DNA, 33 bp, Homo sapien
ctgtatctctgtgataggttctctaagagtggt

SEQ ID NO: 921885 - DNA, 33 bp, Homo sapien
ggatcccatctttagcgctcgtgcttcaccatc

SEQ ID NO: 921886 - DNA, 33 bp, Homo sapien
ggatcccatctttagctctcgtgcttcaccatc

SEQ ID NO: 921887 - DNA, 33 bp, Homo sapien
ttccaaccctgacaacaaaccaggcaccaatgt

SEQ ID NO: 921888 - DNA, 33 bp, Homo sapien
ttccaaccctgacaaccaaccaggcaccaatgt

SEQ ID NO: 921889 - DNA, 33 bp, Homo sapien
catggagactgcttcccactcctagactgagct

SEQ ID NO: 921890 - DNA, 33 bp, Homo sapien
catggagactgcttcctactcctagactgagct

SEQ ID NO: 921891 - DNA, 33 bp, Homo sapien
agccatgaaaatgccacgtgagtgattagtttc

SEQ ID NO: 921892 - DNA, 33 bp, Homo sapien
agccatgaaaatgccatgtgagtgattagtttc

SEQ ID NO: 921893 - DNA, 33 bp, Homo sapien
aaaaggatggattcatcacacccaagtcaagaa

SEQ ID NO: 921894 - DNA, 33 bp, Homo sapien
aaaaggatggattcattacacccaagtcaagaa

SEQ ID NO: 921895 - DNA, 33 bp, Homo sapien
atgtgatatccttagaaagtccctagaacttgg

SEQ ID NO: 921896 - DNA, 33 bp, Homo sapien
atgtgatatccttagacagtccctagaacttgg

SEQ ID NO: 921897 - DNA, 33 bp, Homo sapien
cagcccatcctaagaaagtatgttcagtgcaat

SEQ ID NO: 921898 - DNA, 33 bp, Homo sapien
cagcccatcctaagaaggtatgttcagtgcaat

SEQ ID NO: 921899 - DNA, 33 bp, Homo sapien
tggtacaaaattctgactacctttgagaatgtc

SEQ ID NO: 921900 - DNA, 33 bp, Homo sapien
tggtacaaaattctgattacctttgagaatgtc

SEQ ID NO: 921901 - DNA, 33 bp, Homo sapien
gagtgaaagagtggaagggtgtcaccaggggct

SEQ ID NO: 921902 - DNA, 33 bp, Homo sapien
gagtgaaagagtggaatggtgtcaccaggggct

SEQ ID NO: 921903 - DNA, 33 bp, Homo sapien
cgtgttttagctacaaacgtttatctaaggtaa

SEQ ID NO: 921904 - DNA, 33 bp, Homo sapien
cgtgttttagctacaatcgtttatctaaggtaa

SEQ ID NO: 921905 - DNA, 33 bp, Homo sapien
ccaatgcatgaattaactattcagcggagagtc

SEQ ID NO: 921906 - DNA, 33 bp, Homo sapien
ccaatgcatgaattaagtattcagcggagagtc

SEQ ID NO: 921907 - DNA, 33 bp, Homo sapien
agcaggtttactgccccgcatcctttcggccca

SEQ ID NO: 921908 - DNA, 33 bp, Homo sapien
agcaggtttactgccctgcatcctttcggccca

SEQ ID NO: 921909 - DNA, 33 bp, Homo sapien
atacttatttttgccaaagatatacagagctaa

SEQ ID NO: 921910 - DNA, 33 bp, Homo sapien
atacttatttttgccatagatatacagagctaa

SEQ ID NO: 921911 - DNA, 33 bp, Homo sapien
attaaactgggaatgaatagcaaggggtgatga

SEQ ID NO: 921912 - DNA, 33 bp, Homo sapien
attaaactgggaatgagtagcaaggggtgatga

SEQ ID NO: 921913 - DNA, 33 bp, Homo sapien
cccaaccaaacaggggcacaggctgtgtttgca

SEQ ID NO: 921914 - DNA, 33 bp, Homo sapien
cccaaccaaacaggggtacaggctgtgtttgca

SEQ ID NO: 921915 - DNA, 33 bp, Homo sapien
tgtgggattggtggtccaccctggtagtttcca

SEQ ID NO: 921916 - DNA, 33 bp, Homo sapien
tgtgggattggtggtctaccctggtagtttcca

SEQ ID NO: 921917 - DNA, 33 bp, Homo sapien
atgggcacttagcgaacacttgtggaccacaag

SEQ ID NO: 921918 - DNA, 33 bp, Homo sapien
atgggcacttagcgaatacttgtggaccacaag

SEQ ID NO: 921919 - DNA, 33 bp, Homo sapien
aaattctgtgccacagcagaaaagtgtgaaaag

SEQ ID NO: 921920 - DNA, 33 bp, Homo sapien
aaattctgtgccacagtagaaaagtgtgaaaag

SEQ ID NO: 921921 - DNA, 33 bp, Homo sapien
attctcactctgaccccatactcctctcaggcc

SEQ ID NO: 921922 - DNA, 33 bp, Homo sapien
attctcactctgaccctatactcctctcaggcc

SEQ ID NO: 921923 - DNA, 33 bp, Homo sapien
cactgaaaatgtcagagatactcagtatttatt

SEQ ID NO: 921924 - DNA, 33 bp, Homo sapien
cactgaaaatgtcagatatactcagtatttatt

SEQ ID NO: 921925 - DNA, 33 bp, Homo sapien
ggaccaagttgagatcagaaagcttaaattgaa

SEQ ID NO: 921926 - DNA, 33 bp, Homo sapien
ggaccaagttgagatcggaaagcttaaattgaa

SEQ ID NO: 921927 - DNA, 33 bp, Homo sapien
ctttgagttttgtctaataaattctgtgaaact

SEQ ID NO: 921928 - DNA, 33 bp, Homo sapien
ctttgagttttgtctagtaaattctgtgaaact

SEQ ID NO: 921929 - DNA, 33 bp, Homo sapien
tgataggagttaacatcaacacatacaccacag

SEQ ID NO: 921930 - DNA, 33 bp, Homo sapien
tgataggagttaacatgaacacatacaccacag

SEQ ID NO: 921931 - DNA, 33 bp, Homo sapien
tgctatatttttcctccatccaaagaagtatat

SEQ ID NO: 921932 - DNA, 33 bp, Homo sapien
tgctatatttttcctcgatccaaagaagtatat

SEQ ID NO: 921933 - DNA, 33 bp, Homo sapien
atatcctaataccttaaagtgagtctgagaatt

SEQ ID NO: 921934 - DNA, 33 bp, Homo sapien
atatcctaataccttagagtgagtctgagaatt

SEQ ID NO: 921935 - DNA, 33 bp, Homo sapien
gtaaacctaagagcagaactcacttgccccagg

SEQ ID NO: 921936 - DNA, 33 bp, Homo sapien
gtaaacctaagagcaggactcacttgccccagg

SEQ ID NO: 921937 - DNA, 33 bp, Homo sapien
gagaatattcctaaagcctgattccatttttat

SEQ ID NO: 921938 - DNA, 33 bp, Homo sapien
gagaatattcctaaagtctgattccatttttat

SEQ ID NO: 921939 - DNA, 33 bp, Homo sapien
atgaaatccatatgcccctgataaactgaaaat

SEQ ID NO: 921940 - DNA, 33 bp, Homo sapien
atgaaatccatatgcctctgataaactgaaaat

SEQ ID NO: 921941 - DNA, 33 bp, Homo sapien
ggtaatagaatatcaaatgtaagcttttaccta

SEQ ID NO: 921942 - DNA, 33 bp, Homo sapien
ggtaatagaatatcaagtgtaagcttttaccta

SEQ ID NO: 921943 - DNA, 33 bp, Homo sapien
aaataccaagagatgtcaagaaggttaactaaa

SEQ ID NO: 921944 - DNA, 33 bp, Homo sapien
aaataccaagagatgtgaagaaggttaactaaa

SEQ ID NO: 921945 - DNA, 33 bp, Homo sapien
tgtactgatctgcaaaatagtaacaccattttc

SEQ ID NO: 921946 - DNA, 33 bp, Homo sapien
tgtactgatctgcaaagtagtaacaccattttc

SEQ ID NO: 921947 - DNA, 33 bp, Homo sapien
acgatcagtccttaaactgactcaatgtttctt

SEQ ID NO: 921948 - DNA, 33 bp, Homo sapien
acgatcagtccttaaattgactcaatgtttctt

SEQ ID NO: 921949 - DNA, 33 bp, Homo sapien
tagaattggaaatgagactaatatagctttaag

SEQ ID NO: 921950 - DNA, 33 bp, Homo sapien
tagaattggaaatgaggctaatatagctttaag

SEQ ID NO: 921951 - DNA, 33 bp, Homo sapien
tatgatattgtctcaaagaatttacagtctaga

SEQ ID NO: 921952 - DNA, 33 bp, Homo sapien
tatgatattgtctcaaggaatttacagtctaga

SEQ ID NO: 921953 - DNA, 33 bp, Homo sapien
ttgtttatattgaggcccatagagaagtcatgt

SEQ ID NO: 921954 - DNA, 33 bp, Homo sapien
ttgtttatattgaggctcatagagaagtcatgt

SEQ ID NO: 921955 - DNA, 33 bp, Homo sapien
cccttaaattcctctgacaaaggactcttacac

SEQ ID NO: 921956 - DNA, 33 bp, Homo sapien
cccttaaattcctctgccaaaggactcttacac

SEQ ID NO: 921957 - DNA, 33 bp, Homo sapien
ttagatcaagtaactcaccagatgtcccaccat

SEQ ID NO: 921958 - DNA, 33 bp, Homo sapien
ttagatcaagtaactcgccagatgtcccaccat

SEQ ID NO: 921959 - DNA, 33 bp, Homo sapien
gctctcaaataatggacagaaggcaaaaaggca

SEQ ID NO: 921960 - DNA, 33 bp, Homo sapien
gctctcaaataatggatagaaggcaaaaaggca

SEQ ID NO: 921961 - DNA, 33 bp, Homo sapien
gtaaccacccaaagcacgatttctaccagtacc

SEQ ID NO: 921962 - DNA, 33 bp, Homo sapien
gtaaccacccaaagcatgatttctaccagtacc

SEQ ID NO: 921963 - DNA, 33 bp, Homo sapien
gtttagacattattcacgaatgcttaccatgaa

SEQ ID NO: 921964 - DNA, 33 bp, Homo sapien
gtttagacattattcatgaatgcttaccatgaa

SEQ ID NO: 921965 - DNA, 33 bp, Homo sapien
aaagcacacaatgacacgagaagctccaacaaa

SEQ ID NO: 921966 - DNA, 33 bp, Homo sapien
aaagcacacaatgacaggagaagctccaacaaa

SEQ ID NO: 921967 - DNA, 33 bp, Homo sapien
tagatgaacaagatcacaagtgtgttaaaaatt

SEQ ID NO: 921968 - DNA, 33 bp, Homo sapien
tagatgaacaagatcagaagtgtgttaaaaatt

SEQ ID NO: 921969 - DNA, 33 bp, Homo sapien
tcaggaaagaagtctgaaaattcaggagaccct

SEQ ID NO: 921970 - DNA, 33 bp, Homo sapien
tcaggaaagaagtctgcaaattcaggagaccct

SEQ ID NO: 921971 - DNA, 33 bp, Homo sapien
agcatctactgaaggaatcataaaccaatacca

SEQ ID NO: 921972 - DNA, 33 bp, Homo sapien
agcatctactgaaggagtcataaaccaatacca

SEQ ID NO: 921973 - DNA, 33 bp, Homo sapien
tctacagaatttacaacgtaatggcaacatgat

SEQ ID NO: 921974 - DNA, 33 bp, Homo sapien
tctacagaatttacaatgtaatggcaacatgat

SEQ ID NO: 921975 - DNA, 33 bp, Homo sapien
aaagtcctcattccataaagtctgaatgatgtg

SEQ ID NO: 921976 - DNA, 33 bp, Homo sapien
aaagtcctcattccatgaagtctgaatgatgtg

SEQ ID NO: 921977 - DNA, 33 bp, Homo sapien
aaccctaataaggtaactgaactatgtcagact

SEQ ID NO: 921978 - DNA, 33 bp, Homo sapien
aaccctaataaggtaagtgaactatgtcagact

SEQ ID NO: 921979 - DNA, 33 bp, Homo sapien
gcagagacttaccgtacccaatatcaacagttt

SEQ ID NO: 921980 - DNA, 33 bp, Homo sapien
gcagagacttaccgtatccaatatcaacagttt

SEQ ID NO: 921981 - DNA, 33 bp, Homo sapien
aacatagagctgaggcaaaaagcaaatacattt

SEQ ID NO: 921982 - DNA, 33 bp, Homo sapien
aacatagagctgaggcgaaaagcaaatacattt

SEQ ID NO: 921983 - DNA, 33 bp, Homo sapien
caccatgtgacatacagtatcttatggctggtt

SEQ ID NO: 921984 - DNA, 33 bp, Homo sapien
caccatgtgacatacattatcttatggctggtt

SEQ ID NO: 921985 - DNA, 33 bp, Homo sapien
ctaaaataattttcaaaaaccacgattaactgg

SEQ ID NO: 921986 - DNA, 33 bp, Homo sapien
ctaaaataattttcaagaaccacgattaactgg

SEQ ID NO: 921987 - DNA, 33 bp, Homo sapien
cagaagaagccaagcactaggtgacagaaaaaa

SEQ ID NO: 921988 - DNA, 33 bp, Homo sapien
cagaagaagccaagcagtaggtgacagaaaaaa

SEQ ID NO: 921989 - DNA, 33 bp, Homo sapien
cttaagtgttcaggaactcacacttgaggtctt

SEQ ID NO: 921990 - DNA, 33 bp, Homo sapien
cttaagtgttcaggaagtcacacttgaggtctt

SEQ ID NO: 921991 - DNA, 33 bp, Homo sapien
ggtcttgatggaggaacttataaagacctcaag

SEQ ID NO: 921992 - DNA, 33 bp, Homo sapien
ggtcttgatggaggaatttataaagacctcaag

SEQ ID NO: 921993 - DNA, 33 bp, Homo sapien
agctgctgctaacttgcaagtgcaaaatcagaa

SEQ ID NO: 921994 - DNA, 33 bp, Homo sapien
agctgctgctaacttgtaagtgcaaaatcagaa

SEQ ID NO: 921995 - DNA, 33 bp, Homo sapien
acaaggtcctgcctgagatccgcctgaacctgg

SEQ ID NO: 921996 - DNA, 33 bp, Homo sapien
acaaggtcctgcctgatatccgcctgaacctgg

SEQ ID NO: 921997 - DNA, 33 bp, Homo sapien
ggaatcagtcatttctaaaggtatccaggtgat

SEQ ID NO: 921998 - DNA, 33 bp, Homo sapien
ggaatcagtcatttctgaaggtatccaggtgat

SEQ ID NO: 921999 - DNA, 33 bp, Homo sapien
aatcctcattcacggcaacgtctgtgctgacca

SEQ ID NO: 922000 - DNA, 33 bp, Homo sapien
aatcctcattcacggcgacgtctgtgctgacca

SEQ ID NO: 922001 - DNA, 33 bp, Homo sapien
tgaaagtttgaaacggcaagaatgtaattaatg

SEQ ID NO: 922002 - DNA, 33 bp, Homo sapien
tgaaagtttgaaacgggaagaatgtaattaatg

SEQ ID NO: 922003 - DNA, 33 bp, Homo sapien
ttggaaagatgcttataaagaataaggctgccc

SEQ ID NO: 922004 - DNA, 33 bp, Homo sapien
ttggaaagatgcttatgaagaataaggctgccc

SEQ ID NO: 922005 - DNA, 33 bp, Homo sapien
cgcaagtgctaatgaaaagtatgttatacagaa

SEQ ID NO: 922006 - DNA, 33 bp, Homo sapien
cgcaagtgctaatgaagagtatgttatacagaa

SEQ ID NO: 922007 - DNA, 33 bp, Homo sapien
ttttcaattatagtcaatagatgccagttatca

SEQ ID NO: 922008 - DNA, 33 bp, Homo sapien
ttttcaattatagtcagtagatgccagttatca

SEQ ID NO: 922009 - DNA, 33 bp, Homo sapien
gaaaagttattttgaactatccacttgttttgt

SEQ ID NO: 922010 - DNA, 33 bp, Homo sapien
gaaaagttattttgaattatccacttgttttgt

SEQ ID NO: 922011 - DNA, 33 bp, Homo sapien
aatgagaggatgaaaacatgttcaaataacaga

SEQ ID NO: 922012 - DNA, 33 bp, Homo sapien
aatgagaggatgaaaatatgttcaaataacaga

SEQ ID NO: 922013 - DNA, 33 bp, Homo sapien
tcaacttgactagaataaagacaagaaacagcc

SEQ ID NO: 922014 - DNA, 33 bp, Homo sapien
tcaacttgactagaatgaagacaagaaacagcc

SEQ ID NO: 922015 - DNA, 33 bp, Homo sapien
agctgacccagactctcaccaactcatcaactg

SEQ ID NO: 922016 - DNA, 33 bp, Homo sapien
agctgacccagactcttaccaactcatcaactg

SEQ ID NO: 922017 - DNA, 33 bp, Homo sapien
gtaacaatatttcacacgtactctgacaaataa

SEQ ID NO: 922018 - DNA, 33 bp, Homo sapien
gtaacaatatttcacatgtactctgacaaataa

SEQ ID NO: 922019 - DNA, 33 bp, Homo sapien
gcagaagtcctgtgacgggataatttggtgggg

SEQ ID NO: 922020 - DNA, 33 bp, Homo sapien
gcagaagtcctgtgactggataatttggtgggg

SEQ ID NO: 922021 - DNA, 33 bp, Homo sapien
aaatatatttgcagaacactatgctgtttctca

SEQ ID NO: 922022 - DNA, 33 bp, Homo sapien
aaatatatttgcagaatactatgctgtttctca

SEQ ID NO: 922023 - DNA, 33 bp, Homo sapien
tgtagtttagcatcagaatctaaacaaggaagg

SEQ ID NO: 922024 - DNA, 33 bp, Homo sapien
tgtagtttagcatcaggatctaaacaaggaagg

SEQ ID NO: 922025 - DNA, 33 bp, Homo sapien
ggtcttgtttcagaacactaatcaaaatttcat

SEQ ID NO: 922026 - DNA, 33 bp, Homo sapien
ggtcttgtttcagaaccctaatcaaaatttcat

SEQ ID NO: 922027 - DNA, 33 bp, Homo sapien
cattatcaattccctccctactatattgcatct

SEQ ID NO: 922028 - DNA, 33 bp, Homo sapien
cattatcaattccctctctactatattgcatct

SEQ ID NO: 922029 - DNA, 33 bp, Homo sapien
atgttgaagtgaaggggcagtaacccaaaggaa

SEQ ID NO: 922030 - DNA, 33 bp, Homo sapien
atgttgaagtgaagggtcagtaacccaaaggaa

SEQ ID NO: 922031 - DNA, 33 bp, Homo sapien
ttgcaatgtgaaccaaccaataaattttggagc

SEQ ID NO: 922032 - DNA, 33 bp, Homo sapien
ttgcaatgtgaaccaatcaataaattttggagc

SEQ ID NO: 922033 - DNA, 33 bp, Homo sapien
tggtaaaagagtcacaatcttactttaaaattg

SEQ ID NO: 922034 - DNA, 33 bp, Homo sapien
tggtaaaagagtcacagtcttactttaaaattg

SEQ ID NO: 922035 - DNA, 33 bp, Homo sapien
aggagaggctagagacaagtaacaggtggtgct

SEQ ID NO: 922036 - DNA, 33 bp, Homo sapien
aggagaggctagagacgagtaacaggtggtgct

SEQ ID NO: 922037 - DNA, 33 bp, Homo sapien
caaacctgttcccataccaatcaaaacagtaac

SEQ ID NO: 922038 - DNA, 33 bp, Homo sapien
caaacctgttcccatatcaatcaaaacagtaac

SEQ ID NO: 922039 - DNA, 33 bp, Homo sapien
tggaggcagttctaggaaaaactgtaaaatata

SEQ ID NO: 922040 - DNA, 33 bp, Homo sapien
tggaggcagttctaggcaaaactgtaaaatata

SEQ ID NO: 922041 - DNA, 33 bp, Homo sapien
ctggggagaaggtccacaggttttatcagatta

SEQ ID NO: 922042 - DNA, 33 bp, Homo sapien
ctggggagaaggtccataggttttatcagatta

SEQ ID NO: 922043 - DNA, 33 bp, Homo sapien
gctctcctgactcccaatatgtctgctactaat

SEQ ID NO: 922044 - DNA, 33 bp, Homo sapien
gctctcctgactcccagtatgtctgctactaat

SEQ ID NO: 922045 - DNA, 33 bp, Homo sapien
atagacagtagaataacaggcactggagactca

SEQ ID NO: 922046 - DNA, 33 bp, Homo sapien
atagacagtagaataataggcactggagactca

SEQ ID NO: 922047 - DNA, 33 bp, Homo sapien
gagggatgataaattacgttgtactctatttgg

SEQ ID NO: 922048 - DNA, 33 bp, Homo sapien
gagggatgataaattatgttgtactctatttgg

SEQ ID NO: 922049 - DNA, 33 bp, Homo sapien
gcatgaagatgaccacagcaggtatagttctac

SEQ ID NO: 922050 - DNA, 33 bp, Homo sapien
gcatgaagatgaccacggcaggtatagttctac

SEQ ID NO: 922051 - DNA, 33 bp, Homo sapien
tgctaactagagctaccgattgaggttggcctt

SEQ ID NO: 922052 - DNA, 33 bp, Homo sapien
tgctaactagagctactgattgaggttggcctt

SEQ ID NO: 922053 - DNA, 33 bp, Homo sapien
cactccagatgcagaacatacatccctgttctg

SEQ ID NO: 922054 - DNA, 33 bp, Homo sapien
cactccagatgcagaagatacatccctgttctg

SEQ ID NO: 922055 - DNA, 33 bp, Homo sapien
tcttatttcatctcccacaatgcaacaactttt

SEQ ID NO: 922056 - DNA, 33 bp, Homo sapien
tcttatttcatctcccgcaatgcaacaactttt

SEQ ID NO: 922057 - DNA, 33 bp, Homo sapien
aaagcctaagcctggcagcaatagtagcagtag

SEQ ID NO: 922058 - DNA, 33 bp, Homo sapien
aaagcctaagcctggccgcaatagtagcagtag

SEQ ID NO: 922059 - DNA, 33 bp, Homo sapien
ctgaatatcagtatagacagagctaaataacaa

SEQ ID NO: 922060 - DNA, 33 bp, Homo sapien
ctgaatatcagtataggcagagctaaataacaa

SEQ ID NO: 922061 - DNA, 33 bp, Homo sapien
tcacaaatgcagtgtacgcccttatcctgttga

SEQ ID NO: 922062 - DNA, 33 bp, Homo sapien
tcacaaatgcagtgtatgcccttatcctgttga

SEQ ID NO: 922063 - DNA, 33 bp, Homo sapien
acctgttgtattgtggaacatattccatgcatg

SEQ ID NO: 922064 - DNA, 33 bp, Homo sapien
acctgttgtattgtgggacatattccatgcatg

SEQ ID NO: 922065 - DNA, 33 bp, Homo sapien
cctgggttctctgcgacgtgcttcactgacctt

SEQ ID NO: 922066 - DNA, 33 bp, Homo sapien
cctgggttctctgcgatgtgcttcactgacctt

SEQ ID NO: 922067 - DNA, 33 bp, Homo sapien
gaaggaacaggtggtacgcatggaacaaagctg

SEQ ID NO: 922068 - DNA, 33 bp, Homo sapien
gaaggaacaggtggtatgcatggaacaaagctg

SEQ ID NO: 922069 - DNA, 33 bp, Homo sapien
ccatgacttcagactcaatcagaataaatttcc

SEQ ID NO: 922070 - DNA, 33 bp, Homo sapien
ccatgacttcagactccatcagaataaatttcc

SEQ ID NO: 922071 - DNA, 33 bp, Homo sapien
gagcttttagactttacaatctcaagaatacac

SEQ ID NO: 922072 - DNA, 33 bp, Homo sapien
gagcttttagactttataatctcaagaatacac

SEQ ID NO: 922073 - DNA, 33 bp, Homo sapien
ttcatgcaacatggcaatgaaactactgtgggc

SEQ ID NO: 922074 - DNA, 33 bp, Homo sapien
ttcatgcaacatggcagtgaaactactgtgggc

SEQ ID NO: 922075 - DNA, 33 bp, Homo sapien
atgttgcatgaaacacaaggaagagaaatgtgt

SEQ ID NO: 922076 - DNA, 33 bp, Homo sapien
atgttgcatgaaacacgaggaagagaaatgtgt

SEQ ID NO: 922077 - DNA, 33 bp, Homo sapien
ggcccatgtaaactacacccgaatgctcatgcc

SEQ ID NO: 922078 - DNA, 33 bp, Homo sapien
ggcccatgtaaactacgcccgaatgctcatgcc

SEQ ID NO: 922079 - DNA, 33 bp, Homo sapien
tccctgccaacaacccaagtcacttgaaaggac

SEQ ID NO: 922080 - DNA, 33 bp, Homo sapien
tccctgccaacaacccgagtcacttgaaaggac

SEQ ID NO: 922081 - DNA, 33 bp, Homo sapien
tattctcttcttggaaaccatgaccaccagttg

SEQ ID NO: 922082 - DNA, 33 bp, Homo sapien
tattctcttcttggaagccatgaccaccagttg

SEQ ID NO: 922083 - DNA, 33 bp, Homo sapien
aggtctaacgtttaagactctacaatgaactca

SEQ ID NO: 922084 - DNA, 33 bp, Homo sapien
aggtctaacgtttaagtctctacaatgaactca

SEQ ID NO: 922085 - DNA, 33 bp, Homo sapien
tcatcatctattcagcagaaatatgaactctac

SEQ ID NO: 922086 - DNA, 33 bp, Homo sapien
tcatcatctattcagcggaaatatgaactctac

SEQ ID NO: 922087 - DNA, 33 bp, Homo sapien
ttccatgacttcattacgtgcttgcctgctggc

SEQ ID NO: 922088 - DNA, 33 bp, Homo sapien
ttccatgacttcattatgtgcttgcctgctggc

SEQ ID NO: 922089 - DNA, 33 bp, Homo sapien
gctacttgtcagaggacactgaattgaagagag

SEQ ID NO: 922090 - DNA, 33 bp, Homo sapien
gctacttgtcagaggatactgaattgaagagag

SEQ ID NO: 922091 - DNA, 33 bp, Homo sapien
actatatcctttgtaaagcttgatcaagttcaa

SEQ ID NO: 922092 - DNA, 33 bp, Homo sapien
actatatcctttgtaaggcttgatcaagttcaa

SEQ ID NO: 922093 - DNA, 33 bp, Homo sapien
aggtctaggatttttaaaagttgctacacagta

SEQ ID NO: 922094 - DNA, 33 bp, Homo sapien
aggtctaggatttttagaagttgctacacagta

SEQ ID NO: 922095 - DNA, 33 bp, Homo sapien
tatcagaatccattcaactagcatttttggaac

SEQ ID NO: 922096 - DNA, 33 bp, Homo sapien
tatcagaatccattcagctagcatttttggaac

SEQ ID NO: 922097 - DNA, 33 bp, Homo sapien
ggtacagatttgggacagactaaagttcagttt

SEQ ID NO: 922098 - DNA, 33 bp, Homo sapien
ggtacagatttgggacggactaaagttcagttt

SEQ ID NO: 922099 - DNA, 33 bp, Homo sapien
agaattgagactcaaaaatttcatggctagaaa

SEQ ID NO: 922100 - DNA, 33 bp, Homo sapien
agaattgagactcaaagatttcatggctagaaa

SEQ ID NO: 922101 - DNA, 33 bp, Homo sapien
ttttgttattaaaaaaagttttgtgtatggctt

SEQ ID NO: 922102 - DNA, 33 bp, Homo sapien
ttttgttattaaaaaaggttttgtgtatggctt

SEQ ID NO: 922103 - DNA, 33 bp, Homo sapien
aatgacaaatttctcacgattatcacaaagttt

SEQ ID NO: 922104 - DNA, 33 bp, Homo sapien
aatgacaaatttctcatgattatcacaaagttt

SEQ ID NO: 922105 - DNA, 33 bp, Homo sapien
aaggtaagaaatgtgaacacctaaagcagacta

SEQ ID NO: 922106 - DNA, 33 bp, Homo sapien
aaggtaagaaatgtgagcacctaaagcagacta

SEQ ID NO: 922107 - DNA, 33 bp, Homo sapien
aaaacactggcaataacgaggcctacctgttat

SEQ ID NO: 922108 - DNA, 33 bp, Homo sapien
aaaacactggcaataatgaggcctacctgttat

SEQ ID NO: 922109 - DNA, 33 bp, Homo sapien
taatagatattagataaccgattagatattaaa

SEQ ID NO: 922110 - DNA, 33 bp, Homo sapien
taatagatattagatacccgattagatattaaa

SEQ ID NO: 922111 - DNA, 33 bp, Homo sapien
tatttagagatatggaagaacatttagaaacaa

SEQ ID NO: 922112 - DNA, 33 bp, Homo sapien
tatttagagatatggaggaacatttagaaacaa

SEQ ID NO: 922113 - DNA, 33 bp, Homo sapien
tactacagaagggcaacgataacagcaaggtaa

SEQ ID NO: 922114 - DNA, 33 bp, Homo sapien
tactacagaagggcaatgataacagcaaggtaa

SEQ ID NO: 922115 - DNA, 33 bp, Homo sapien
ctgcaaggaagggtaacctgtctccagcagtgc

SEQ ID NO: 922116 - DNA, 33 bp, Homo sapien
ctgcaaggaagggtaatctgtctccagcagtgc

SEQ ID NO: 922117 - DNA, 33 bp, Homo sapien
gtctgtaatgtgatagaagagtctatagtgata

SEQ ID NO: 922118 - DNA, 33 bp, Homo sapien
gtctgtaatgtgatagtagagtctatagtgata

SEQ ID NO: 922119 - DNA, 33 bp, Homo sapien
tacttgaaaccacataaaacgtttgtgaaagca

SEQ ID NO: 922120 - DNA, 33 bp, Homo sapien
tacttgaaaccacatagaacgtttgtgaaagca

SEQ ID NO: 922121 - DNA, 33 bp, Homo sapien
gcctcttaatcttcaccgggaaaggcacacaca

SEQ ID NO: 922122 - DNA, 33 bp, Homo sapien
gcctcttaatcttcactgggaaaggcacacaca

SEQ ID NO: 922123 - DNA, 33 bp, Homo sapien
actgcaatcatcttagaaaaacatactggaagg

SEQ ID NO: 922124 - DNA, 33 bp, Homo sapien
actgcaatcatcttagcaaaacatactggaagg

SEQ ID NO: 922125 - DNA, 33 bp, Homo sapien
agcatttttaaacttcgaatgcgtgatatcctt

SEQ ID NO: 922126 - DNA, 33 bp, Homo sapien
agcatttttaaacttctaatgcgtgatatcctt

SEQ ID NO: 922127 - DNA, 33 bp, Homo sapien
tcattttccatacaccggatccctgctttatgc

SEQ ID NO: 922128 - DNA, 33 bp, Homo sapien
tcattttccatacacctgatccctgctttatgc

SEQ ID NO: 922129 - DNA, 33 bp, Homo sapien
taatttctgtaccaacaatcaatatcactctgt

SEQ ID NO: 922130 - DNA, 33 bp, Homo sapien
taatttctgtaccaaccatcaatatcactctgt

SEQ ID NO: 922131 - DNA, 33 bp, Homo sapien
tatctaccaccatgcaactgttaagcagggagg

SEQ ID NO: 922132 - DNA, 33 bp, Homo sapien
tatctaccaccatgcagctgttaagcagggagg

SEQ ID NO: 922133 - DNA, 33 bp, Homo sapien
caatgtgacctggggacccagtatggcgagatc

SEQ ID NO: 922134 - DNA, 33 bp, Homo sapien
caatgtgacctggggatccagtatggcgagatc

SEQ ID NO: 922135 - DNA, 33 bp, Homo sapien
cacattgcactcttcaatatccagtctcatgag

SEQ ID NO: 922136 - DNA, 33 bp, Homo sapien
cacattgcactcttcagtatccagtctcatgag

SEQ ID NO: 922137 - DNA, 33 bp, Homo sapien
cccactccggtcaaccaatcaccaggtctttct

SEQ ID NO: 922138 - DNA, 33 bp, Homo sapien
cccactccggtcaaccgatcaccaggtctttct

SEQ ID NO: 922139 - DNA, 33 bp, Homo sapien
cttctatgtcaccagaagttaactatggcatct

SEQ ID NO: 922140 - DNA, 33 bp, Homo sapien
cttctatgtcaccagacgttaactatggcatct

SEQ ID NO: 922141 - DNA, 33 bp, Homo sapien
agagacagaagagtaaaaagtaaatgatgtgag

SEQ ID NO: 922142 - DNA, 33 bp, Homo sapien
agagacagaagagtaagaagtaaatgatgtgag

SEQ ID NO: 922143 - DNA, 33 bp, Homo sapien
atctcagcaggaccacggtgctttttctggact

SEQ ID NO: 922144 - DNA, 33 bp, Homo sapien
atctcagcaggaccactgtgctttttctggact

SEQ ID NO: 922145 - DNA, 33 bp, Homo sapien
gtgcctcagggttaaacttagtactcaattaaa

SEQ ID NO: 922146 - DNA, 33 bp, Homo sapien
gtgcctcagggttaaatttagtactcaattaaa

SEQ ID NO: 922147 - DNA, 33 bp, Homo sapien
gactgtcctattaatacggcaaatgtagtctct

SEQ ID NO: 922148 - DNA, 33 bp, Homo sapien
gactgtcctattaatatggcaaatgtagtctct

SEQ ID NO: 922149 - DNA, 33 bp, Homo sapien
ttcaattaagatgaaacgttagaatgtatcttt

SEQ ID NO: 922150 - DNA, 33 bp, Homo sapien
ttcaattaagatgaaatgttagaatgtatcttt

SEQ ID NO: 922151 - DNA, 33 bp, Homo sapien
tagagagaagtgcatacacttaagaaatattac

SEQ ID NO: 922152 - DNA, 33 bp, Homo sapien
tagagagaagtgcatatacttaagaaatattac

SEQ ID NO: 922153 - DNA, 33 bp, Homo sapien
aatttgcactttagaaaaatctggagaattgaa

SEQ ID NO: 922154 - DNA, 33 bp, Homo sapien
aatttgcactttagaagaatctggagaattgaa

SEQ ID NO: 922155 - DNA, 33 bp, Homo sapien
tttgatatatctgttgcagctaacttttttgaa

SEQ ID NO: 922156 - DNA, 33 bp, Homo sapien
tttgatatatctgttggagctaacttttttgaa

SEQ ID NO: 922157 - DNA, 33 bp, Homo sapien
ttagcaaccttaatcacattgctactgttccct

SEQ ID NO: 922158 - DNA, 33 bp, Homo sapien
ttagcaaccttaatcatattgctactgttccct

SEQ ID NO: 922159 - DNA, 33 bp, Homo sapien
aggtgatgttaacatccaccatcacaagcagaa

SEQ ID NO: 922160 - DNA, 33 bp, Homo sapien
aggtgatgttaacatcgaccatcacaagcagaa

SEQ ID NO: 922161 - DNA, 33 bp, Homo sapien
acctataattattggcaccttagttttctcaca

SEQ ID NO: 922162 - DNA, 33 bp, Homo sapien
acctataattattggcgccttagttttctcaca

SEQ ID NO: 922163 - DNA, 33 bp, Homo sapien
ggttatatatattcaaagtccagttcatttgtc

SEQ ID NO: 922164 - DNA, 33 bp, Homo sapien
ggttatatatattcaatgtccagttcatttgtc

SEQ ID NO: 922165 - DNA, 33 bp, Homo sapien
taaagagatggcctcaaaatctagtaaagaaga

SEQ ID NO: 922166 - DNA, 33 bp, Homo sapien
taaagagatggcctcagaatctagtaaagaaga

SEQ ID NO: 922167 - DNA, 33 bp, Homo sapien
ttacagcatatcatacaaatgttctggtcagga

SEQ ID NO: 922168 - DNA, 33 bp, Homo sapien
ttacagcatatcatactaatgttctggtcagga

SEQ ID NO: 922169 - DNA, 33 bp, Homo sapien
agttctgagctcaacaaagaaattttgaaagag

SEQ ID NO: 922170 - DNA, 33 bp, Homo sapien
agttctgagctcaacacagaaattttgaaagag

SEQ ID NO: 922171 - DNA, 33 bp, Homo sapien
ttgaggatcactaagacagagtaatgtgtataa

SEQ ID NO: 922172 - DNA, 33 bp, Homo sapien
ttgaggatcactaagatagagtaatgtgtataa

SEQ ID NO: 922173 - DNA, 33 bp, Homo sapien
agcctcaaattttgtacgtaagcagcagataag

SEQ ID NO: 922174 - DNA, 33 bp, Homo sapien
agcctcaaattttgtatgtaagcagcagataag

SEQ ID NO: 922175 - DNA, 33 bp, Homo sapien
cactaggattttgttacgtaagccacatttcca

SEQ ID NO: 922176 - DNA, 33 bp, Homo sapien
cactaggattttgttatgtaagccacatttcca

SEQ ID NO: 922177 - DNA, 33 bp, Homo sapien
tatgtgggtcttgatactaaataggatggccag

SEQ ID NO: 922178 - DNA, 33 bp, Homo sapien
tatgtgggtcttgatattaaataggatggccag

SEQ ID NO: 922179 - DNA, 33 bp, Homo sapien
ccctattggattgatcactttttaacaaactaa

SEQ ID NO: 922180 - DNA, 33 bp, Homo sapien
ccctattggattgatcgctttttaacaaactaa

SEQ ID NO: 922181 - DNA, 33 bp, Homo sapien
tttccggttctctttcagaaaagttcctctcca

SEQ ID NO: 922182 - DNA, 33 bp, Homo sapien
tttccggttctctttcggaaaagttcctctcca

SEQ ID NO: 922183 - DNA, 33 bp, Homo sapien
ttgctctgatgactgacagagaatgaacaggaa

SEQ ID NO: 922184 - DNA, 33 bp, Homo sapien
ttgctctgatgactgagagagaatgaacaggaa

SEQ ID NO: 922185 - DNA, 33 bp, Homo sapien
tttccagaaatgataaatctacagtttcttggg

SEQ ID NO: 922186 - DNA, 33 bp, Homo sapien
tttccagaaatgataagtctacagtttcttggg

SEQ ID NO: 922187 - DNA, 33 bp, Homo sapien
gctatgtcaaatataccagcatgggagttagga

SEQ ID NO: 922188 - DNA, 33 bp, Homo sapien
gctatgtcaaatatactagcatgggagttagga

SEQ ID NO: 922189 - DNA, 33 bp, Homo sapien
atgaaaagttagcatacaggccctgcatttcta

SEQ ID NO: 922190 - DNA, 33 bp, Homo sapien
atgaaaagttagcatataggccctgcatttcta

SEQ ID NO: 922191 - DNA, 33 bp, Homo sapien
ctggaggtgaagagataaggttaagtcagcata

SEQ ID NO: 922192 - DNA, 33 bp, Homo sapien
ctggaggtgaagagatgaggttaagtcagcata

SEQ ID NO: 922193 - DNA, 33 bp, Homo sapien
ggatgtctgagagcaaggtgttcacaggtttgc

SEQ ID NO: 922194 - DNA, 33 bp, Homo sapien
ggatgtctgagagcaatgtgttcacaggtttgc

SEQ ID NO: 922195 - DNA, 33 bp, Homo sapien
agcagcacctattcaccggctctggagtcagaa

SEQ ID NO: 922196 - DNA, 33 bp, Homo sapien
agcagcacctattcactggctctggagtcagaa

SEQ ID NO: 922197 - DNA, 33 bp, Homo sapien
gtctcacaagcactggaaacactagaacagcac

SEQ ID NO: 922198 - DNA, 33 bp, Homo sapien
gtctcacaagcactggtaacactagaacagcac

SEQ ID NO: 922199 - DNA, 33 bp, Homo sapien
ctttcctggcaacatacggagtgcattcattct

SEQ ID NO: 922200 - DNA, 33 bp, Homo sapien
ctttcctggcaacatatggagtgcattcattct

SEQ ID NO: 922201 - DNA, 33 bp, Homo sapien
ggctaatattcctgaaacaggagttaaggtctg

SEQ ID NO: 922202 - DNA, 33 bp, Homo sapien
ggctaatattcctgaagcaggagttaaggtctg

SEQ ID NO: 922203 - DNA, 33 bp, Homo sapien
tcctcttagccactcaatcatctcccactccca

SEQ ID NO: 922204 - DNA, 33 bp, Homo sapien
tcctcttagccactcagtcatctcccactccca

SEQ ID NO: 922205 - DNA, 33 bp, Homo sapien
tccataaaagtttgcccgagcttgttagtgatt

SEQ ID NO: 922206 - DNA, 33 bp, Homo sapien
tccataaaagtttgcctgagcttgttagtgatt

SEQ ID NO: 922207 - DNA, 33 bp, Homo sapien
tttcttgcacaagcaaagttttatatttctctg

SEQ ID NO: 922208 - DNA, 33 bp, Homo sapien
tttcttgcacaagcaacgttttatatttctctg

SEQ ID NO: 922209 - DNA, 33 bp, Homo sapien
cattactaattttgtgcatatctgtgtatgaat

SEQ ID NO: 922210 - DNA, 33 bp, Homo sapien
cattactaattttgtgtatatctgtgtatgaat

SEQ ID NO: 922211 - DNA, 33 bp, Homo sapien
tttgtgtgcatccatacactgtaatactaaaca

SEQ ID NO: 922212 - DNA, 33 bp, Homo sapien
tttgtgtgcatccatatactgtaatactaaaca

SEQ ID NO: 922213 - DNA, 33 bp, Homo sapien
tagatttaggaaaatacaatgccatgatgagat

SEQ ID NO: 922214 - DNA, 33 bp, Homo sapien
tagatttaggaaaatagaatgccatgatgagat

SEQ ID NO: 922215 - DNA, 33 bp, Homo sapien
acaagaaagggtgagaagagaactgagagcagc

SEQ ID NO: 922216 - DNA, 33 bp, Homo sapien
acaagaaagggtgagatgagaactgagagcagc

SEQ ID NO: 922217 - DNA, 33 bp, Homo sapien
tctaaaagttgtaataactgcatcaggtgaaat

SEQ ID NO: 922218 - DNA, 33 bp, Homo sapien
tctaaaagttgtaatacctgcatcaggtgaaat

SEQ ID NO: 922219 - DNA, 33 bp, Homo sapien
atgtaataagcaaaagaaatgacaaacttggat

SEQ ID NO: 922220 - DNA, 33 bp, Homo sapien
atgtaataagcaaaaggaatgacaaacttggat

SEQ ID NO: 922221 - DNA, 33 bp, Homo sapien
ttatgaccgacctaaacagttgataataaatgt

SEQ ID NO: 922222 - DNA, 33 bp, Homo sapien
ttatgaccgacctaaatagttgataataaatgt

SEQ ID NO: 922223 - DNA, 33 bp, Homo sapien
tttgttttttgcttagaagcctcaattttatca

SEQ ID NO: 922224 - DNA, 33 bp, Homo sapien
tttgttttttgcttaggagcctcaattttatca

SEQ ID NO: 922225 - DNA, 33 bp, Homo sapien
aacacttgtttatttaagccatttcactgcatt

SEQ ID NO: 922226 - DNA, 33 bp, Homo sapien
aacacttgtttatttaggccatttcactgcatt

SEQ ID NO: 922227 - DNA, 33 bp, Homo sapien
acaaataatactgccacgaacattcatatacaa

SEQ ID NO: 922228 - DNA, 33 bp, Homo sapien
acaaataatactgccatgaacattcatatacaa

SEQ ID NO: 922229 - DNA, 33 bp, Homo sapien
tgtgactttgtcaccaatcgaaattacagatat

SEQ ID NO: 922230 - DNA, 33 bp, Homo sapien
tgtgactttgtcaccagtcgaaattacagatat

SEQ ID NO: 922231 - DNA, 33 bp, Homo sapien
ttcactaaaatttcacaaagaattagcattttc

SEQ ID NO: 922232 - DNA, 33 bp, Homo sapien
ttcactaaaatttcacgaagaattagcattttc

SEQ ID NO: 922233 - DNA, 33 bp, Homo sapien
gtcatttcaaacatccaattgctagtaattttt

SEQ ID NO: 922234 - DNA, 33 bp, Homo sapien
gtcatttcaaacatccgattgctagtaattttt

SEQ ID NO: 922235 - DNA, 33 bp, Homo sapien
ttattgaatattagaacggctcgctgaagtatt

SEQ ID NO: 922236 - DNA, 33 bp, Homo sapien
ttattgaatattagaatggctcgctgaagtatt

SEQ ID NO: 922237 - DNA, 33 bp, Homo sapien
ttggtagcttgattcacagaaaggatgaaaagg

SEQ ID NO: 922238 - DNA, 33 bp, Homo sapien
ttggtagcttgattcatagaaaggatgaaaagg

SEQ ID NO: 922239 - DNA, 33 bp, Homo sapien
gataagatgcttgcgaaagaacacttacccagt

SEQ ID NO: 922240 - DNA, 33 bp, Homo sapien
gataagatgcttgcgagagaacacttacccagt

SEQ ID NO: 922241 - DNA, 33 bp, Homo sapien
gaatccaaagactaaacaatggtcttgctgaag

SEQ ID NO: 922242 - DNA, 33 bp, Homo sapien
gaatccaaagactaaataatggtcttgctgaag

SEQ ID NO: 922243 - DNA, 33 bp, Homo sapien
aagatttcttacataacgttgcaggatcatctt

SEQ ID NO: 922244 - DNA, 33 bp, Homo sapien
aagatttcttacataatgttgcaggatcatctt

SEQ ID NO: 922245 - DNA, 33 bp, Homo sapien
tatgtctccaaacctacgatgacagattgacaa

SEQ ID NO: 922246 - DNA, 33 bp, Homo sapien
tatgtctccaaacctatgatgacagattgacaa

SEQ ID NO: 922247 - DNA, 33 bp, Homo sapien
cagcacatcttagacaactctcttctttgattc

SEQ ID NO: 922248 - DNA, 33 bp, Homo sapien
cagcacatcttagacatctctcttctttgattc

SEQ ID NO: 922249 - DNA, 33 bp, Homo sapien
tatatattcaacatttgaaagtacaaagtcaag

SEQ ID NO: 922250 - DNA, 33 bp, Homo sapien
tatatattcaacattttaaagtacaaagtcaag

SEQ ID NO: 922251 - DNA, 33 bp, Homo sapien
gcatagaccagccgaaaaatataaagctggcca

SEQ ID NO: 922252 - DNA, 33 bp, Homo sapien
gcatagaccagccgaagaatataaagctggcca

SEQ ID NO: 922253 - DNA, 33 bp, Homo sapien
agatgtcagaaccacaaatcagctcaggtcttt

SEQ ID NO: 922254 - DNA, 33 bp, Homo sapien
agatgtcagaaccacagatcagctcaggtcttt

SEQ ID NO: 922255 - DNA, 33 bp, Homo sapien
cctggctttagatcaacttcctggctttagaac

SEQ ID NO: 922256 - DNA, 33 bp, Homo sapien
cctggctttagatcaatttcctggctttagaac

SEQ ID NO: 922257 - DNA, 33 bp, Homo sapien
tccaagcttctcgtgaaaaaaatgcatcagagc

SEQ ID NO: 922258 - DNA, 33 bp, Homo sapien
tccaagcttctcgtgagaaaaatgcatcagagc

SEQ ID NO: 922259 - DNA, 33 bp, Homo sapien
gatgatagggtgctgacgttatttgctgattag

SEQ ID NO: 922260 - DNA, 33 bp, Homo sapien
gatgatagggtgctgaggttatttgctgattag

SEQ ID NO: 922261 - DNA, 33 bp, Homo sapien
accttctttagtgaaacacaaggccctttcttc

SEQ ID NO: 922262 - DNA, 33 bp, Homo sapien
accttctttagtgaaatacaaggccctttcttc

SEQ ID NO: 922263 - DNA, 33 bp, Homo sapien
tttggcaaaggtagacaatgaatttatgtccat

SEQ ID NO: 922264 - DNA, 33 bp, Homo sapien
tttggcaaaggtagacgatgaatttatgtccat

SEQ ID NO: 922265 - DNA, 33 bp, Homo sapien
aatgacaaacttgagtaaaatgttgttatcttt

SEQ ID NO: 922266 - DNA, 33 bp, Homo sapien
aatgacaaacttgagtgaaatgttgttatcttt

SEQ ID NO: 922267 - DNA, 33 bp, Homo sapien
ccagatgtggcttcccagcataacactaaccag

SEQ ID NO: 922268 - DNA, 33 bp, Homo sapien
ccagatgtggcttcccggcataacactaaccag

SEQ ID NO: 922269 - DNA, 33 bp, Homo sapien
cagtatcacgatttttaaaaaaccatgtgttgg

SEQ ID NO: 922270 - DNA, 33 bp, Homo sapien
cagtatcacgattttttaaaaaccatgtgttgg

SEQ ID NO: 922271 - DNA, 33 bp, Homo sapien
tatttcaaatgttccaaatttctctaaactgct

SEQ ID NO: 922272 - DNA, 33 bp, Homo sapien
tatttcaaatgttccagatttctctaaactgct

SEQ ID NO: 922273 - DNA, 33 bp, Homo sapien
tgcaagagctgtagatcagagagcggaatcttc

SEQ ID NO: 922274 - DNA, 33 bp, Homo sapien
tgcaagagctgtagatgagagagcggaatcttc

SEQ ID NO: 922275 - DNA, 33 bp, Homo sapien
ccctctctcaaccacacaaccccttcagcagtt

SEQ ID NO: 922276 - DNA, 33 bp, Homo sapien
ccctctctcaaccacataaccccttcagcagtt

SEQ ID NO: 922277 - DNA, 33 bp, Homo sapien
tttatatgaactgttacatgcacttaagcttac

SEQ ID NO: 922278 - DNA, 33 bp, Homo sapien
tttatatgaactgttatatgcacttaagcttac

SEQ ID NO: 922279 - DNA, 33 bp, Homo sapien
gcccaggtctgaaggacgtatttcttatctctc

SEQ ID NO: 922280 - DNA, 33 bp, Homo sapien
gcccaggtctgaaggatgtatttcttatctctc

SEQ ID NO: 922281 - DNA, 33 bp, Homo sapien
tgcattagaagattgccagattcaaattgttaa

SEQ ID NO: 922282 - DNA, 33 bp, Homo sapien
tgcattagaagattgctagattcaaattgttaa

SEQ ID NO: 922283 - DNA, 33 bp, Homo sapien
gagttaggagatttaagtcctagtcaggtgagt

SEQ ID NO: 922284 - DNA, 33 bp, Homo sapien
gagttaggagatttaattcctagtcaggtgagt

SEQ ID NO: 922285 - DNA, 33 bp, Homo sapien
acactcttttcaggccagagtataatacatctg

SEQ ID NO: 922286 - DNA, 33 bp, Homo sapien
acactcttttcaggccggagtataatacatctg

SEQ ID NO: 922287 - DNA, 33 bp, Homo sapien
gtggatctgacaaaaactctctagacaatgagt

SEQ ID NO: 922288 - DNA, 33 bp, Homo sapien
gtggatctgacaaaaagtctctagacaatgagt

SEQ ID NO: 922289 - DNA, 33 bp, Homo sapien
ccttacctagatttcaaaactaatcatttatta

SEQ ID NO: 922290 - DNA, 33 bp, Homo sapien
ccttacctagatttcagaactaatcatttatta

SEQ ID NO: 922291 - DNA, 33 bp, Homo sapien
tctcttttactatgatcactgttgtagctatca

SEQ ID NO: 922292 - DNA, 33 bp, Homo sapien
tctcttttactatgatgactgttgtagctatca

SEQ ID NO: 922293 - DNA, 33 bp, Homo sapien
tctagttaccgtattacatgcaattgtcatata

SEQ ID NO: 922294 - DNA, 33 bp, Homo sapien
tctagttaccgtattagatgcaattgtcatata

SEQ ID NO: 922295 - DNA, 33 bp, Homo sapien
gagccagggagggccacgaagaaagtgttatca

SEQ ID NO: 922296 - DNA, 33 bp, Homo sapien
gagccagggagggccatgaagaaagtgttatca

SEQ ID NO: 922297 - DNA, 33 bp, Homo sapien
acacaaagtgtatcccaaaacataagatgtatt

SEQ ID NO: 922298 - DNA, 33 bp, Homo sapien
acacaaagtgtatcccgaaacataagatgtatt

SEQ ID NO: 922299 - DNA, 33 bp, Homo sapien
tcttcctttacctccccgaagatgcagagttta

SEQ ID NO: 922300 - DNA, 33 bp, Homo sapien
tcttcctttacctccctgaagatgcagagttta

SEQ ID NO: 922301 - DNA, 33 bp, Homo sapien
cctagggcaaacatgacaacaactttaaaaact

SEQ ID NO: 922302 - DNA, 33 bp, Homo sapien
cctagggcaaacatgataacaactttaaaaact

SEQ ID NO: 922303 - DNA, 33 bp, Homo sapien
gcccatctctaaaagccccaaataagagagaag

SEQ ID NO: 922304 - DNA, 33 bp, Homo sapien
gcccatctctaaaagctccaaataagagagaag

SEQ ID NO: 922305 - DNA, 33 bp, Homo sapien
gagaaattacagaaaaattaggaatgaagaaag

SEQ ID NO: 922306 - DNA, 33 bp, Homo sapien
gagaaattacagaaaagttaggaatgaagaaag

SEQ ID NO: 922307 - DNA, 33 bp, Homo sapien
aattactcacagctaacgtaacatggtaactaa

SEQ ID NO: 922308 - DNA, 33 bp, Homo sapien
aattactcacagctaatgtaacatggtaactaa

SEQ ID NO: 922309 - DNA, 33 bp, Homo sapien
aaaagatgaagggtgaaccttggtaactgcata

SEQ ID NO: 922310 - DNA, 33 bp, Homo sapien
aaaagatgaagggtgacccttggtaactgcata

SEQ ID NO: 922311 - DNA, 33 bp, Homo sapien
taaagagacagagagaagttggaaaattaatga

SEQ ID NO: 922312 - DNA, 33 bp, Homo sapien
taaagagacagagagaggttggaaaattaatga

SEQ ID NO: 922313 - DNA, 33 bp, Homo sapien
atgttttgtagcttaccgagaggttttaccagg

SEQ ID NO: 922314 - DNA, 33 bp, Homo sapien
atgttttgtagcttactgagaggttttaccagg

SEQ ID NO: 922315 - DNA, 33 bp, Homo sapien
catttgaaccaacttacgttaatgctttcttat

SEQ ID NO: 922316 - DNA, 33 bp, Homo sapien
catttgaaccaacttatgttaatgctttcttat

SEQ ID NO: 922317 - DNA, 33 bp, Homo sapien
tgtatacacatccttcaagtgcacatattcatc

SEQ ID NO: 922318 - DNA, 33 bp, Homo sapien
tgtatacacatccttcgagtgcacatattcatc

SEQ ID NO: 922319 - DNA, 33 bp, Homo sapien
acagacagtcatgttacgtgtggttttcatttt

SEQ ID NO: 922320 - DNA, 33 bp, Homo sapien
acagacagtcatgttatgtgtggttttcatttt

SEQ ID NO: 922321 - DNA, 33 bp, Homo sapien
tattcttatatccagactaagatacggtgttag

SEQ ID NO: 922322 - DNA, 33 bp, Homo sapien
tattcttatatccagagtaagatacggtgttag

SEQ ID NO: 922323 - DNA, 33 bp, Homo sapien
tgaacagacactctcaaaaggagaaatttatgc

SEQ ID NO: 922324 - DNA, 33 bp, Homo sapien
tgaacagacactctcagaaggagaaatttatgc

SEQ ID NO: 922325 - DNA, 33 bp, Homo sapien
tgactgaaactcaaatcaaatcatccttcacga

SEQ ID NO: 922326 - DNA, 33 bp, Homo sapien
tgactgaaactcaaatgaaatcatccttcacga

SEQ ID NO: 922327 - DNA, 33 bp, Homo sapien
caggaatagtaaattacgtagtcataggtgtat

SEQ ID NO: 922328 - DNA, 33 bp, Homo sapien
caggaatagtaaattaggtagtcataggtgtat

SEQ ID NO: 922329 - DNA, 33 bp, Homo sapien
aacatccagttaaaggcatagctgacatgtaag

SEQ ID NO: 922330 - DNA, 33 bp, Homo sapien
aacatccagttaaaggtatagctgacatgtaag

SEQ ID NO: 922331 - DNA, 33 bp, Homo sapien
aaacgaatagcagcaacgtgagaagggaggaat

SEQ ID NO: 922332 - DNA, 33 bp, Homo sapien
aaacgaatagcagcaatgtgagaagggaggaat

SEQ ID NO: 922333 - DNA, 33 bp, Homo sapien
tagcatatggttacacaaaacgaatagcagcaa

SEQ ID NO: 922334 - DNA, 33 bp, Homo sapien
tagcatatggttacacgaaacgaatagcagcaa

SEQ ID NO: 922335 - DNA, 33 bp, Homo sapien
aacaggtcttattcaagatcatgcttagctatt

SEQ ID NO: 922336 - DNA, 33 bp, Homo sapien
aacaggtcttattcaatatcatgcttagctatt

SEQ ID NO: 922337 - DNA, 33 bp, Homo sapien
attcccacactactaaactttgcattttctatg

SEQ ID NO: 922338 - DNA, 33 bp, Homo sapien
attcccacactactaatctttgcattttctatg

SEQ ID NO: 922339 - DNA, 33 bp, Homo sapien
gacttgaccccaggtccctctctcaatctctct

SEQ ID NO: 922340 - DNA, 33 bp, Homo sapien
gacttgaccccaggtctctctctcaatctctct

SEQ ID NO: 922341 - DNA, 33 bp, Homo sapien
gggccccatggctaatcatactccccacagttg

SEQ ID NO: 922342 - DNA, 33 bp, Homo sapien
gggccccatggctaatgatactccccacagttg

SEQ ID NO: 922343 - DNA, 33 bp, Homo sapien
tgtaaggctgctttgacattgtggagtcactat

SEQ ID NO: 922344 - DNA, 33 bp, Homo sapien
tgtaaggctgctttgagattgtggagtcactat

SEQ ID NO: 922345 - DNA, 33 bp, Homo sapien
agtagaaataaagtgagatttggagacaggtgt

SEQ ID NO: 922346 - DNA, 33 bp, Homo sapien
agtagaaataaagtgatatttggagacaggtgt

SEQ ID NO: 922347 - DNA, 33 bp, Homo sapien
cctttgcgtgatatacaaagcctctcagaatgg

SEQ ID NO: 922348 - DNA, 33 bp, Homo sapien
cctttgcgtgatatacgaagcctctcagaatgg

SEQ ID NO: 922349 - DNA, 33 bp, Homo sapien
aacagggataaggaaacgacccatatatttcag

SEQ ID NO: 922350 - DNA, 33 bp, Homo sapien
aacagggataaggaaatgacccatatatttcag

SEQ ID NO: 922351 - DNA, 33 bp, Homo sapien
atctgaattatccaaaccaatgaatgtgattcc

SEQ ID NO: 922352 - DNA, 33 bp, Homo sapien
atctgaattatccaaagcaatgaatgtgattcc

SEQ ID NO: 922353 - DNA, 33 bp, Homo sapien
gagaacgagcagaaagaatgttgcaagaagcag

SEQ ID NO: 922354 - DNA, 33 bp, Homo sapien
gagaacgagcagaaaggatgttgcaagaagcag

SEQ ID NO: 922355 - DNA, 33 bp, Homo sapien
ctcattggaaatcaaactattcgcttgtgtatt

SEQ ID NO: 922356 - DNA, 33 bp, Homo sapien
ctcattggaaatcaaattattcgcttgtgtatt

SEQ ID NO: 922357 - DNA, 33 bp, Homo sapien
gccctcactggctgtacgtatcctttcctctac

SEQ ID NO: 922358 - DNA, 33 bp, Homo sapien
gccctcactggctgtaggtatcctttcctctac

SEQ ID NO: 922359 - DNA, 33 bp, Homo sapien
catcatgagacttggacacgaagaattataagt

SEQ ID NO: 922360 - DNA, 33 bp, Homo sapien
catcatgagacttggagacgaagaattataagt

SEQ ID NO: 922361 - DNA, 33 bp, Homo sapien
ctatttcctttgcttaactgtgtggccacatga

SEQ ID NO: 922362 - DNA, 33 bp, Homo sapien
ctatttcctttgcttagctgtgtggccacatga

SEQ ID NO: 922363 - DNA, 33 bp, Homo sapien
gtcagtcctttccatactaggcctttctaggga

SEQ ID NO: 922364 - DNA, 33 bp, Homo sapien
gtcagtcctttccatattaggcctttctaggga

SEQ ID NO: 922365 - DNA, 33 bp, Homo sapien
tcagctgccaactttcaagtttttctagactgt

SEQ ID NO: 922366 - DNA, 33 bp, Homo sapien
tcagctgccaactttcgagtttttctagactgt

SEQ ID NO: 922367 - DNA, 33 bp, Homo sapien
ccaatgcacttggaaactcactcaatctcagct

SEQ ID NO: 922368 - DNA, 33 bp, Homo sapien
ccaatgcacttggaaattcactcaatctcagct

SEQ ID NO: 922369 - DNA, 33 bp, Homo sapien
gctgccatggtccaaacgaaactacttctgaca

SEQ ID NO: 922370 - DNA, 33 bp, Homo sapien
gctgccatggtccaaatgaaactacttctgaca

SEQ ID NO: 922371 - DNA, 33 bp, Homo sapien
cacctgttccaagatgcattaaaggtaaaggaa

SEQ ID NO: 922372 - DNA, 33 bp, Homo sapien
cacctgttccaagatggattaaaggtaaaggaa

SEQ ID NO: 922373 - DNA, 33 bp, Homo sapien
agtatgacaagcatgactacagacatatgagca

SEQ ID NO: 922374 - DNA, 33 bp, Homo sapien
agtatgacaagcatgagtacagacatatgagca

SEQ ID NO: 922375 - DNA, 33 bp, Homo sapien
gaagtttgagtacaacaacataacaattctcta

SEQ ID NO: 922376 - DNA, 33 bp, Homo sapien
gaagtttgagtacaacgacataacaattctcta

SEQ ID NO: 922377 - DNA, 33 bp, Homo sapien
tgtgggcaaggatatgaagaaacgaactctgtg

SEQ ID NO: 922378 - DNA, 33 bp, Homo sapien
tgtgggcaaggatatggagaaacgaactctgtg

SEQ ID NO: 922379 - DNA, 33 bp, Homo sapien
gcttattagccattcacatcttagttggtaaat

SEQ ID NO: 922380 - DNA, 33 bp, Homo sapien
gcttattagccattcatatcttagttggtaaat

SEQ ID NO: 922381 - DNA, 33 bp, Homo sapien
tgcatcattatccttaagagaccccattactag

SEQ ID NO: 922382 - DNA, 33 bp, Homo sapien
tgcatcattatccttacgagaccccattactag

SEQ ID NO: 922383 - DNA, 33 bp, Homo sapien
gggttatgttatagccccattttgcactggaga

SEQ ID NO: 922384 - DNA, 33 bp, Homo sapien
gggttatgttatagcctcattttgcactggaga

SEQ ID NO: 922385 - DNA, 33 bp, Homo sapien
tttgcagatgagaaaaatgagccataaagaggt

SEQ ID NO: 922386 - DNA, 33 bp, Homo sapien
tttgcagatgagaaaactgagccataaagaggt

SEQ ID NO: 922387 - DNA, 33 bp, Homo sapien
ctttcctcttaagatcagaaacaagaatgtctg

SEQ ID NO: 922388 - DNA, 33 bp, Homo sapien
ctttcctcttaagatccgaaacaagaatgtctg

SEQ ID NO: 922389 - DNA, 33 bp, Homo sapien
gctagaacctctggtacgatattgaagagtggt

SEQ ID NO: 922390 - DNA, 33 bp, Homo sapien
gctagaacctctggtatgatattgaagagtggt

SEQ ID NO: 922391 - DNA, 33 bp, Homo sapien
agttaaatgcatagaaaataatacccatgtcaa

SEQ ID NO: 922392 - DNA, 33 bp, Homo sapien
agttaaatgcatagaagataatacccatgtcaa

SEQ ID NO: 922393 - DNA, 33 bp, Homo sapien
ctaacagaaagatcacacctacgtaaaatcttc

SEQ ID NO: 922394 - DNA, 33 bp, Homo sapien
ctaacagaaagatcacgcctacgtaaaatcttc

SEQ ID NO: 922395 - DNA, 33 bp, Homo sapien
gccgttcatgctagacaccagcacttctaaaac

SEQ ID NO: 922396 - DNA, 33 bp, Homo sapien
gccgttcatgctagacgccagcacttctaaaac

SEQ ID NO: 922397 - DNA, 33 bp, Homo sapien
tcttggaggaaaattccaagaggaaaccagatc

SEQ ID NO: 922398 - DNA, 33 bp, Homo sapien
tcttggaggaaaattctaagaggaaaccagatc

SEQ ID NO: 922399 - DNA, 33 bp, Homo sapien
tttaaagtttgtggctgagaatcgtatgttttc

SEQ ID NO: 922400 - DNA, 33 bp, Homo sapien
tttaaagtttgtggcttagaatcgtatgttttc

SEQ ID NO: 922401 - DNA, 33 bp, Homo sapien
ttgcccgtgtgtcaaaagcttctcaagtgttct

SEQ ID NO: 922402 - DNA, 33 bp, Homo sapien
ttgcccgtgtgtcaaaggcttctcaagtgttct

SEQ ID NO: 922403 - DNA, 33 bp, Homo sapien
actcttcctttctttaagttattctcacctaga

SEQ ID NO: 922404 - DNA, 33 bp, Homo sapien
actcttcctttctttaggttattctcacctaga

SEQ ID NO: 922405 - DNA, 33 bp, Homo sapien
tcattagacctacagaacattttttgtgctcat

SEQ ID NO: 922406 - DNA, 33 bp, Homo sapien
tcattagacctacagagcattttttgtgctcat

SEQ ID NO: 922407 - DNA, 33 bp, Homo sapien
gagattgttacccagacgctgtatcaatcgtgg

SEQ ID NO: 922408 - DNA, 33 bp, Homo sapien
gagattgttacccagatgctgtatcaatcgtgg

SEQ ID NO: 922409 - DNA, 33 bp, Homo sapien
attacagctgtcaacaatggagattccttaaag

SEQ ID NO: 922410 - DNA, 33 bp, Homo sapien
attacagctgtcaacactggagattccttaaag

SEQ ID NO: 922411 - DNA, 33 bp, Homo sapien
gtaattcagccacttacaacatattcaaattat

SEQ ID NO: 922412 - DNA, 33 bp, Homo sapien
gtaattcagccacttagaacatattcaaattat

SEQ ID NO: 922413 - DNA, 33 bp, Homo sapien
ttacccgagaccaaaaaatttcagaattggttt

SEQ ID NO: 922414 - DNA, 33 bp, Homo sapien
ttacccgagaccaaaacatttcagaattggttt

SEQ ID NO: 922415 - DNA, 33 bp, Homo sapien
aaaaaaagtgaacttacatgcaagatcaatcag

SEQ ID NO: 922416 - DNA, 33 bp, Homo sapien
aaaaaaagtgaacttagatgcaagatcaatcag

SEQ ID NO: 922417 - DNA, 33 bp, Homo sapien
ttatcatgatatgacaaagacattctgttacac

SEQ ID NO: 922418 - DNA, 33 bp, Homo sapien
ttatcatgatatgacacagacattctgttacac

SEQ ID NO: 922419 - DNA, 33 bp, Homo sapien
taaattaaacttttggaaagtctagaggtaaac

SEQ ID NO: 922420 - DNA, 33 bp, Homo sapien
taaattaaacttttgggaagtctagaggtaaac

SEQ ID NO: 922421 - DNA, 33 bp, Homo sapien
gcacagattcaactggcaaacatttttgtcttc

SEQ ID NO: 922422 - DNA, 33 bp, Homo sapien
gcacagattcaactggtaaacatttttgtcttc

SEQ ID NO: 922423 - DNA, 33 bp, Homo sapien
cagctatcttaacctcaaacatggcagccaagc

SEQ ID NO: 922424 - DNA, 33 bp, Homo sapien
cagctatcttaacctcgaacatggcagccaagc

SEQ ID NO: 922425 - DNA, 33 bp, Homo sapien
ataggcagggattataactaggtcaaacactca

SEQ ID NO: 922426 - DNA, 33 bp, Homo sapien
ataggcagggattatagctaggtcaaacactca

SEQ ID NO: 922427 - DNA, 33 bp, Homo sapien
gttaagaaaggtgcacaaatgcaaagctaaaga

SEQ ID NO: 922428 - DNA, 33 bp, Homo sapien
gttaagaaaggtgcacgaatgcaaagctaaaga

SEQ ID NO: 922429 - DNA, 33 bp, Homo sapien
caacctgcacttcacaaaactttacagtgcaca

SEQ ID NO: 922430 - DNA, 33 bp, Homo sapien
caacctgcacttcacagaactttacagtgcaca

SEQ ID NO: 922431 - DNA, 33 bp, Homo sapien
atcaatctttgcttctgaaaactcatcggtggc

SEQ ID NO: 922432 - DNA, 33 bp, Homo sapien
atcaatctttgcttcttaaaactcatcggtggc

SEQ ID NO: 922433 - DNA, 33 bp, Homo sapien
tttatctgcttcaaaacacctacaaagaaggtg

SEQ ID NO: 922434 - DNA, 33 bp, Homo sapien
tttatctgcttcaaaagacctacaaagaaggtg

SEQ ID NO: 922435 - DNA, 33 bp, Homo sapien
agaattgcttgaaagacacagtgaagttttaag

SEQ ID NO: 922436 - DNA, 33 bp, Homo sapien
agaattgcttgaaagatacagtgaagttttaag

SEQ ID NO: 922437 - DNA, 33 bp, Homo sapien
tggaatttaaaatgcaatgaccaaactgaagaa

SEQ ID NO: 922438 - DNA, 33 bp, Homo sapien
tggaatttaaaatgcagtgaccaaactgaagaa

SEQ ID NO: 922439 - DNA, 33 bp, Homo sapien
tatacatttcctttaaagcttatctagcagaat

SEQ ID NO: 922440 - DNA, 33 bp, Homo sapien
tatacatttcctttaatgcttatctagcagaat

SEQ ID NO: 922441 - DNA, 33 bp, Homo sapien
ctcttcattctcattaccttttggcatatacag

SEQ ID NO: 922442 - DNA, 33 bp, Homo sapien
ctcttcattctcattatcttttggcatatacag

SEQ ID NO: 922443 - DNA, 33 bp, Homo sapien
tactggagcaactggacattcctaggcataaaa

SEQ ID NO: 922444 - DNA, 33 bp, Homo sapien
tactggagcaactggatattcctaggcataaaa

SEQ ID NO: 922445 - DNA, 33 bp, Homo sapien
gagtgactggttctaacgttctaatagtgatat

SEQ ID NO: 922446 - DNA, 33 bp, Homo sapien
gagtgactggttctaatgttctaatagtgatat

SEQ ID NO: 922447 - DNA, 33 bp, Homo sapien
tcccactggactataaactccacgagggaagaa

SEQ ID NO: 922448 - DNA, 33 bp, Homo sapien
tcccactggactataagctccacgagggaagaa

SEQ ID NO: 922449 - DNA, 33 bp, Homo sapien
tcttctaaaggagagcacaaatcattaaaatta

SEQ ID NO: 922450 - DNA, 33 bp, Homo sapien
tcttctaaaggagagcgcaaatcattaaaatta

SEQ ID NO: 922451 - DNA, 33 bp, Homo sapien
gtcctggttaatagcaactttctgagtaataat

SEQ ID NO: 922452 - DNA, 33 bp, Homo sapien
gtcctggttaatagcatctttctgagtaataat

SEQ ID NO: 922453 - DNA, 33 bp, Homo sapien
cctccatgaagcgcgacgagaacgtatgtcaaa

SEQ ID NO: 922454 - DNA, 33 bp, Homo sapien
cctccatgaagcgcgatgagaacgtatgtcaaa

SEQ ID NO: 922455 - DNA, 33 bp, Homo sapien
agaaatgagataactgcaaagcacttcccacta

SEQ ID NO: 922456 - DNA, 33 bp, Homo sapien
agaaatgagataactgtaaagcacttcccacta

SEQ ID NO: 922457 - DNA, 33 bp, Homo sapien
tttcacgtctctggaaaaggattgctcacatta

SEQ ID NO: 922458 - DNA, 33 bp, Homo sapien
tttcacgtctctggaacaggattgctcacatta

SEQ ID NO: 922459 - DNA, 33 bp, Homo sapien
gcccacataggagctgaaaaaatattcattaag

SEQ ID NO: 922460 - DNA, 33 bp, Homo sapien
gcccacataggagctggaaaaatattcattaag

SEQ ID NO: 922461 - DNA, 33 bp, Homo sapien
tgttgcctgttattgaaattttgtggcactttc

SEQ ID NO: 922462 - DNA, 33 bp, Homo sapien
tgttgcctgttattgatattttgtggcactttc

SEQ ID NO: 922463 - DNA, 33 bp, Homo sapien
gcttctgcttattttccatatacacatcctccc

SEQ ID NO: 922464 - DNA, 33 bp, Homo sapien
gcttctgcttattttctatatacacatcctccc

SEQ ID NO: 922465 - DNA, 33 bp, Homo sapien
tgcaatgggtggtaaaagcaatgatgggatatt

SEQ ID NO: 922466 - DNA, 33 bp, Homo sapien
tgcaatgggtggtaaaggcaatgatgggatatt

SEQ ID NO: 922467 - DNA, 33 bp, Homo sapien
ctgttatccaaaagcccgagaccttgtcacaga

SEQ ID NO: 922468 - DNA, 33 bp, Homo sapien
ctgttatccaaaagcctgagaccttgtcacaga

SEQ ID NO: 922469 - DNA, 33 bp, Homo sapien
gttttcgtttacatcaaatgtgtctagtgaaag

SEQ ID NO: 922470 - DNA, 33 bp, Homo sapien
gttttcgtttacatcagatgtgtctagtgaaag

SEQ ID NO: 922471 - DNA, 33 bp, Homo sapien
ttctccacaagtccaactactggattcttcaga

SEQ ID NO: 922472 - DNA, 33 bp, Homo sapien
ttctccacaagtccaattactggattcttcaga

SEQ ID NO: 922473 - DNA, 33 bp, Homo sapien
taggccgcaacactgaaagttttagagagaaga

SEQ ID NO: 922474 - DNA, 33 bp, Homo sapien
taggccgcaacactgagagttttagagagaaga

SEQ ID NO: 922475 - DNA, 33 bp, Homo sapien
cctaagatagtgcatgaattacctgtaattaat

SEQ ID NO: 922476 - DNA, 33 bp, Homo sapien
cctaagatagtgcatgtattacctgtaattaat

SEQ ID NO: 922477 - DNA, 33 bp, Homo sapien
cgagagtttctgttgactaatcgaacatttgga

SEQ ID NO: 922478 - DNA, 33 bp, Homo sapien
cgagagtttctgttgattaatcgaacatttgga

SEQ ID NO: 922479 - DNA, 33 bp, Homo sapien
tcctactcatccgttgaatttgacctgagagct

SEQ ID NO: 922480 - DNA, 33 bp, Homo sapien
tcctactcatccgttggatttgacctgagagct

SEQ ID NO: 922481 - DNA, 33 bp, Homo sapien
cccagaaagtccaatgcagccttagcttctagc

SEQ ID NO: 922482 - DNA, 33 bp, Homo sapien
cccagaaagtccaatgtagccttagcttctagc

SEQ ID NO: 922483 - DNA, 33 bp, Homo sapien
atagacctgaattcaaccagaacttagacttga

SEQ ID NO: 922484 - DNA, 33 bp, Homo sapien
atagacctgaattcaatcagaacttagacttga

SEQ ID NO: 922485 - DNA, 33 bp, Homo sapien
tatttactgctaaatcagatctcttgattgtgt

SEQ ID NO: 922486 - DNA, 33 bp, Homo sapien
tatttactgctaaatccgatctcttgattgtgt

SEQ ID NO: 922487 - DNA, 33 bp, Homo sapien
atggttacaagtctaaatggtcactttttcagc

SEQ ID NO: 922488 - DNA, 33 bp, Homo sapien
atggttacaagtctaagtggtcactttttcagc

SEQ ID NO: 922489 - DNA, 33 bp, Homo sapien
cacacttcaatacaataaggaaggtctgtgata

SEQ ID NO: 922490 - DNA, 33 bp, Homo sapien
cacacttcaatacaatgaggaaggtctgtgata

SEQ ID NO: 922491 - DNA, 33 bp, Homo sapien
taatttcattcagagcacttgtcactatcaata

SEQ ID NO: 922492 - DNA, 33 bp, Homo sapien
taatttcattcagagcgcttgtcactatcaata

SEQ ID NO: 922493 - DNA, 33 bp, Homo sapien
gactttcaaaatgtcagctccttcaaaacacac

SEQ ID NO: 922494 - DNA, 33 bp, Homo sapien
gactttcaaaatgtcatctccttcaaaacacac

SEQ ID NO: 922495 - DNA, 33 bp, Homo sapien
aacatggaccgatctcacattagttaaactctc

SEQ ID NO: 922496 - DNA, 33 bp, Homo sapien
aacatggaccgatctcgcattagttaaactctc

SEQ ID NO: 922497 - DNA, 33 bp, Homo sapien
atccacttctgtgtaactcatacagcttccaat

SEQ ID NO: 922498 - DNA, 33 bp, Homo sapien
atccacttctgtgtaattcatacagcttccaat

SEQ ID NO: 922499 - DNA, 33 bp, Homo sapien
catgataagaggaataagtgaaaaataacagaa

SEQ ID NO: 922500 - DNA, 33 bp, Homo sapien
catgataagaggaatatgtgaaaaataacagaa

SEQ ID NO: 922501 - DNA, 33 bp, Homo sapien
tggggacctagatttcaaagttgctataaagtt

SEQ ID NO: 922502 - DNA, 33 bp, Homo sapien
tggggacctagatttcgaagttgctataaagtt

SEQ ID NO: 922503 - DNA, 33 bp, Homo sapien
tatctcaataacaacaccaaggaacatcgtctt

SEQ ID NO: 922504 - DNA, 33 bp, Homo sapien
tatctcaataacaacatcaaggaacatcgtctt

SEQ ID NO: 922505 - DNA, 33 bp, Homo sapien
acacacatacaaaacacgagcgtctatctccaa

SEQ ID NO: 922506 - DNA, 33 bp, Homo sapien
acacacatacaaaacatgagcgtctatctccaa

SEQ ID NO: 922507 - DNA, 33 bp, Homo sapien
acagctctacaaactacatcctgaatgttttgg

SEQ ID NO: 922508 - DNA, 33 bp, Homo sapien
acagctctacaaactatatcctgaatgttttgg

SEQ ID NO: 922509 - DNA, 33 bp, Homo sapien
gttctttttaaacctgaactcagatttattctc

SEQ ID NO: 922510 - DNA, 33 bp, Homo sapien
gttctttttaaacctggactcagatttattctc

SEQ ID NO: 922511 - DNA, 33 bp, Homo sapien
catcactgatatctacacaagagatactttgta

SEQ ID NO: 922512 - DNA, 33 bp, Homo sapien
catcactgatatctacccaagagatactttgta

SEQ ID NO: 922513 - DNA, 33 bp, Homo sapien
cagcttgtaaagatcaagtaagtaaatatctca

SEQ ID NO: 922514 - DNA, 33 bp, Homo sapien
cagcttgtaaagatcaggtaagtaaatatctca

SEQ ID NO: 922515 - DNA, 33 bp, Homo sapien
aacatgggaaagaggcaaagagatcttccagta

SEQ ID NO: 922516 - DNA, 33 bp, Homo sapien
aacatgggaaagaggcgaagagatcttccagta

SEQ ID NO: 922517 - DNA, 33 bp, Homo sapien
ggataaatagtcttctaaaatcatgtaatacgt

SEQ ID NO: 922518 - DNA, 33 bp, Homo sapien
ggataaatagtcttctgaaatcatgtaatacgt

SEQ ID NO: 922519 - DNA, 33 bp, Homo sapien
cacagaaataaagctcagaatcataattcctca

SEQ ID NO: 922520 - DNA, 33 bp, Homo sapien
cacagaaataaagctcggaatcataattcctca

SEQ ID NO: 922521 - DNA, 33 bp, Homo sapien
tggatgaatacttttcacagtcagaaatcacta

SEQ ID NO: 922522 - DNA, 33 bp, Homo sapien
tggatgaatacttttctcagtcagaaatcacta

SEQ ID NO: 922523 - DNA, 33 bp, Homo sapien
tgaccctgctgtcataagaagatggttagttag

SEQ ID NO: 922524 - DNA, 33 bp, Homo sapien
tgaccctgctgtcatatgaagatggttagttag

SEQ ID NO: 922525 - DNA, 33 bp, Homo sapien
gttcataggattataactgaaaaagacagaaaa

SEQ ID NO: 922526 - DNA, 33 bp, Homo sapien
gttcataggattataattgaaaaagacagaaaa

SEQ ID NO: 922527 - DNA, 33 bp, Homo sapien
gggagaaagatgactaagtaggcaggtatctgg

SEQ ID NO: 922528 - DNA, 33 bp, Homo sapien
gggagaaagatgactatgtaggcaggtatctgg

SEQ ID NO: 922529 - DNA, 33 bp, Homo sapien
agcataagttaaaatcccactgcaagaaaagat

SEQ ID NO: 922530 - DNA, 33 bp, Homo sapien
agcataagttaaaatctcactgcaagaaaagat

SEQ ID NO: 922531 - DNA, 33 bp, Homo sapien
aatctacagtgagaacaaatcttccatccatga

SEQ ID NO: 922532 - DNA, 33 bp, Homo sapien
aatctacagtgagaacgaatcttccatccatga

SEQ ID NO: 922533 - DNA, 33 bp, Homo sapien
aaatttgtctctgtaacatatgacaaagcccca

SEQ ID NO: 922534 - DNA, 33 bp, Homo sapien
aaatttgtctctgtaatatatgacaaagcccca

SEQ ID NO: 922535 - DNA, 33 bp, Homo sapien
aggaaaggtacctgaccaggactttaattttga

SEQ ID NO: 922536 - DNA, 33 bp, Homo sapien
aggaaaggtacctgactaggactttaattttga

SEQ ID NO: 922537 - DNA, 33 bp, Homo sapien
atactgtcttcatggacggacccagttgctgag

SEQ ID NO: 922538 - DNA, 33 bp, Homo sapien
atactgtcttcatggatggacccagttgctgag

SEQ ID NO: 922539 - DNA, 33 bp, Homo sapien
ttggctaatccaaccacaagttcatcacccaga

SEQ ID NO: 922540 - DNA, 33 bp, Homo sapien
ttggctaatccaaccataagttcatcacccaga

SEQ ID NO: 922541 - DNA, 33 bp, Homo sapien
aatctgacctcaaatgcagccaaatgtgatgct

SEQ ID NO: 922542 - DNA, 33 bp, Homo sapien
aatctgacctcaaatggagccaaatgtgatgct

SEQ ID NO: 922543 - DNA, 33 bp, Homo sapien
ttatgactgaggctaaacatttctaagtattta

SEQ ID NO: 922544 - DNA, 33 bp, Homo sapien
ttatgactgaggctaagcatttctaagtattta

SEQ ID NO: 922545 - DNA, 33 bp, Homo sapien
attatgcgtgtcgctcccttcccttcagagtga

SEQ ID NO: 922546 - DNA, 33 bp, Homo sapien
attatgcgtgtcgctctcttcccttcagagtga

SEQ ID NO: 922547 - DNA, 33 bp, Homo sapien
aatacaactgaaaagaaatacctaaaagctagc

SEQ ID NO: 922548 - DNA, 33 bp, Homo sapien
aatacaactgaaaagacatacctaaaagctagc

SEQ ID NO: 922549 - DNA, 33 bp, Homo sapien
cactggatgccactgacgtgctctggtaaaacc

SEQ ID NO: 922550 - DNA, 33 bp, Homo sapien
cactggatgccactgatgtgctctggtaaaacc

SEQ ID NO: 922551 - DNA, 33 bp, Homo sapien
agtgggagaacacctaaaacttcactaggcagg

SEQ ID NO: 922552 - DNA, 33 bp, Homo sapien
agtgggagaacacctacaacttcactaggcagg

SEQ ID NO: 922553 - DNA, 33 bp, Homo sapien
gttacattttgcatccaaattttctgccatcct

SEQ ID NO: 922554 - DNA, 33 bp, Homo sapien
gttacattttgcatccgaattttctgccatcct

SEQ ID NO: 922555 - DNA, 33 bp, Homo sapien
catcatcatctgaccaaaccaaatgtaggcatg

SEQ ID NO: 922556 - DNA, 33 bp, Homo sapien
catcatcatctgaccacaccaaatgtaggcatg

SEQ ID NO: 922557 - DNA, 33 bp, Homo sapien
agggggtatcagactcacacattcacatatata

SEQ ID NO: 922558 - DNA, 33 bp, Homo sapien
agggggtatcagactcgcacattcacatatata

SEQ ID NO: 922559 - DNA, 33 bp, Homo sapien
gaatgcttctctgaacacctttcccttactcaa

SEQ ID NO: 922560 - DNA, 33 bp, Homo sapien
gaatgcttctctgaactcctttcccttactcaa

SEQ ID NO: 922561 - DNA, 33 bp, Homo sapien
tgtatatacatccacacattgtgcggtatcagc

SEQ ID NO: 922562 - DNA, 33 bp, Homo sapien
tgtatatacatccacatattgtgcggtatcagc

SEQ ID NO: 922563 - DNA, 33 bp, Homo sapien
tgttgatattagtatgaacatcaacattaggct

SEQ ID NO: 922564 - DNA, 33 bp, Homo sapien
tgttgatattagtatggacatcaacattaggct

SEQ ID NO: 922565 - DNA, 33 bp, Homo sapien
agcccctcagacattcaaaaaagtcagcgttca

SEQ ID NO: 922566 - DNA, 33 bp, Homo sapien
agcccctcagacattcgaaaaagtcagcgttca

SEQ ID NO: 922567 - DNA, 33 bp, Homo sapien
aggagccaaatgtgaccattgagcactggaaat

SEQ ID NO: 922568 - DNA, 33 bp, Homo sapien
aggagccaaatgtgactattgagcactggaaat

SEQ ID NO: 922569 - DNA, 33 bp, Homo sapien
cctcttggatttttccacagaagttcagcttca

SEQ ID NO: 922570 - DNA, 33 bp, Homo sapien
cctcttggatttttccgcagaagttcagcttca

SEQ ID NO: 922571 - DNA, 33 bp, Homo sapien
aggactcacatcatctcactttccccacaacag

SEQ ID NO: 922572 - DNA, 33 bp, Homo sapien
aggactcacatcatctgactttccccacaacag

SEQ ID NO: 922573 - DNA, 33 bp, Homo sapien
gttttgagcaaaaacaataggaggaaaagccac

SEQ ID NO: 922574 - DNA, 33 bp, Homo sapien
gttttgagcaaaaacattaggaggaaaagccac

SEQ ID NO: 922575 - DNA, 33 bp, Homo sapien
gtattctgcagtccacactgatctttaaacttg

SEQ ID NO: 922576 - DNA, 33 bp, Homo sapien
gtattctgcagtccacgctgatctttaaacttg

SEQ ID NO: 922577 - DNA, 33 bp, Homo sapien
ggaatcttgcaggaagactaagctggtgttcag

SEQ ID NO: 922578 - DNA, 33 bp, Homo sapien
ggaatcttgcaggaaggctaagctggtgttcag

SEQ ID NO: 922579 - DNA, 33 bp, Homo sapien
tgagggctctgtaagaaaaggaagagaaaagag

SEQ ID NO: 922580 - DNA, 33 bp, Homo sapien
tgagggctctgtaagagaaggaagagaaaagag

SEQ ID NO: 922581 - DNA, 33 bp, Homo sapien
actggtgttacagttacagcaaatcgctggctt

SEQ ID NO: 922582 - DNA, 33 bp, Homo sapien
actggtgttacagttatagcaaatcgctggctt

SEQ ID NO: 922583 - DNA, 33 bp, Homo sapien
aggagcttaaaaataccctctcatgccagactg

SEQ ID NO: 922584 - DNA, 33 bp, Homo sapien
aggagcttaaaaatactctctcatgccagactg

SEQ ID NO: 922585 - DNA, 33 bp, Homo sapien
tctgatagtcaacagactctggatgagtgacct

SEQ ID NO: 922586 - DNA, 33 bp, Homo sapien
tctgatagtcaacagattctggatgagtgacct

SEQ ID NO: 922587 - DNA, 33 bp, Homo sapien
acatgatagaacttgacggagatgcaggtctga

SEQ ID NO: 922588 - DNA, 33 bp, Homo sapien
acatgatagaacttgatggagatgcaggtctga

SEQ ID NO: 922589 - DNA, 33 bp, Homo sapien
agctgtggttgatctgcaagactccgtcgccgg

SEQ ID NO: 922590 - DNA, 33 bp, Homo sapien
agctgtggttgatctgtaagactccgtcgccgg

SEQ ID NO: 922591 - DNA, 33 bp, Homo sapien
ctacttccggtctccaaaatagagcctagagct

SEQ ID NO: 922592 - DNA, 33 bp, Homo sapien
ctacttccggtctccagaatagagcctagagct

SEQ ID NO: 922593 - DNA, 33 bp, Homo sapien
aggattctggtcttctaacaactggttggatat

SEQ ID NO: 922594 - DNA, 33 bp, Homo sapien
aggattctggtcttctgacaactggttggatat

SEQ ID NO: 922595 - DNA, 33 bp, Homo sapien
aaggatgcatttaccaaagataatcagatagtt

SEQ ID NO: 922596 - DNA, 33 bp, Homo sapien
aaggatgcatttaccagagataatcagatagtt

SEQ ID NO: 922597 - DNA, 33 bp, Homo sapien
gaggcctctagactaaagtcctggctatatcct

SEQ ID NO: 922598 - DNA, 33 bp, Homo sapien
gaggcctctagactaaggtcctggctatatcct

SEQ ID NO: 922599 - DNA, 33 bp, Homo sapien
tgcctcccaaagtcacccctgtactgctaattt

SEQ ID NO: 922600 - DNA, 33 bp, Homo sapien
tgcctcccaaagtcacgcctgtactgctaattt

SEQ ID NO: 922601 - DNA, 33 bp, Homo sapien
ggttttagatgcaccgaataattgtcattgtcc

SEQ ID NO: 922602 - DNA, 33 bp, Homo sapien
ggttttagatgcaccggataattgtcattgtcc

SEQ ID NO: 922603 - DNA, 33 bp, Homo sapien
gtatcacccaaggctacgcagctggtaaataga

SEQ ID NO: 922604 - DNA, 33 bp, Homo sapien
gtatcacccaaggctatgcagctggtaaataga

SEQ ID NO: 922605 - DNA, 33 bp, Homo sapien
gatatcaagtttagccaaatacacaactttttc

SEQ ID NO: 922606 - DNA, 33 bp, Homo sapien
gatatcaagtttagccgaatacacaactttttc

SEQ ID NO: 922607 - DNA, 33 bp, Homo sapien
aaggctttttattcaccgctaccacggcagttt

SEQ ID NO: 922608 - DNA, 33 bp, Homo sapien
aaggctttttattcactgctaccacggcagttt

SEQ ID NO: 922609 - DNA, 33 bp, Homo sapien
tctcctagaatgtaaaatgtttatagaagaaat

SEQ ID NO: 922610 - DNA, 33 bp, Homo sapien
tctcctagaatgtaaagtgtttatagaagaaat

SEQ ID NO: 922611 - DNA, 33 bp, Homo sapien
attccaggtgaaaatgcatgaaagctcttagca

SEQ ID NO: 922612 - DNA, 33 bp, Homo sapien
attccaggtgaaaatgtatgaaagctcttagca

SEQ ID NO: 922613 - DNA, 33 bp, Homo sapien
gtgatgttcacacaacgatgaaatctcctaaca

SEQ ID NO: 922614 - DNA, 33 bp, Homo sapien
gtgatgttcacacaactatgaaatctcctaaca

SEQ ID NO: 922615 - DNA, 33 bp, Homo sapien
gaaaagatggcccgtaccagaaacatttggcta

SEQ ID NO: 922616 - DNA, 33 bp, Homo sapien
gaaaagatggcccgtagcagaaacatttggcta

SEQ ID NO: 922617 - DNA, 33 bp, Homo sapien
cgggagtcctacatcactaacagtggtatgaac

SEQ ID NO: 922618 - DNA, 33 bp, Homo sapien
cgggagtcctacatcagtaacagtggtatgaac

SEQ ID NO: 922619 - DNA, 33 bp, Homo sapien
aataaaaaattatccacgatgaacaaaatatca

SEQ ID NO: 922620 - DNA, 33 bp, Homo sapien
aataaaaaattatccatgatgaacaaaatatca

SEQ ID NO: 922621 - DNA, 33 bp, Homo sapien
tctcttcttataaagacactagtcagctcacac

SEQ ID NO: 922622 - DNA, 33 bp, Homo sapien
tctcttcttataaagatactagtcagctcacac

SEQ ID NO: 922623 - DNA, 33 bp, Homo sapien
tgttatggaagcccaaatggataaatacaatca

SEQ ID NO: 922624 - DNA, 33 bp, Homo sapien
tgttatggaagcccaagtggataaatacaatca

SEQ ID NO: 922625 - DNA, 33 bp, Homo sapien
tagggaattctcttacaccttgcaattttcttc

SEQ ID NO: 922626 - DNA, 33 bp, Homo sapien
tagggaattctcttacgccttgcaattttcttc

SEQ ID NO: 922627 - DNA, 33 bp, Homo sapien
caaatctccatctgaacgtctgtaaggaacatg

SEQ ID NO: 922628 - DNA, 33 bp, Homo sapien
caaatctccatctgaaggtctgtaaggaacatg

SEQ ID NO: 922629 - DNA, 33 bp, Homo sapien
agtcctggtccttaccaaagatgggtggtagta

SEQ ID NO: 922630 - DNA, 33 bp, Homo sapien
agtcctggtccttacccaagatgggtggtagta

SEQ ID NO: 922631 - DNA, 33 bp, Homo sapien
gtttccgctcctaagaaatgtcttaacaaaaca

SEQ ID NO: 922632 - DNA, 33 bp, Homo sapien
gtttccgctcctaagagatgtcttaacaaaaca

SEQ ID NO: 922633 - DNA, 33 bp, Homo sapien
gttgttcttcctataaatcccagaaaccatagc

SEQ ID NO: 922634 - DNA, 33 bp, Homo sapien
gttgttcttcctataagtcccagaaaccatagc

SEQ ID NO: 922635 - DNA, 33 bp, Homo sapien
aggccctccccaaaaaagatgcaatttatgata

SEQ ID NO: 922636 - DNA, 33 bp, Homo sapien
aggccctccccaaaaatgatgcaatttatgata

SEQ ID NO: 922637 - DNA, 33 bp, Homo sapien
taacctttatgtcggaagctttatgcctagtac

SEQ ID NO: 922638 - DNA, 33 bp, Homo sapien
taacctttatgtcggacgctttatgcctagtac

SEQ ID NO: 922639 - DNA, 33 bp, Homo sapien
aagggctattttcacaaaaggtcaaaactggga

SEQ ID NO: 922640 - DNA, 33 bp, Homo sapien
aagggctattttcacagaaggtcaaaactggga

SEQ ID NO: 922641 - DNA, 33 bp, Homo sapien
ataaatctgcaaaatagctcctaaacctagatt

SEQ ID NO: 922642 - DNA, 33 bp, Homo sapien
ataaatctgcaaaatatctcctaaacctagatt

SEQ ID NO: 922643 - DNA, 33 bp, Homo sapien
ttttttccaatcagaaatacccagttgctgctg

SEQ ID NO: 922644 - DNA, 33 bp, Homo sapien
ttttttccaatcagaagtacccagttgctgctg

SEQ ID NO: 922645 - DNA, 33 bp, Homo sapien
agagttgcttggctccagattcatgctgccaca

SEQ ID NO: 922646 - DNA, 33 bp, Homo sapien
agagttgcttggctccggattcatgctgccaca

SEQ ID NO: 922647 - DNA, 33 bp, Homo sapien
cacaaaactactggtaaatcagctactgtgtcc

SEQ ID NO: 922648 - DNA, 33 bp, Homo sapien
cacaaaactactggtagatcagctactgtgtcc

SEQ ID NO: 922649 - DNA, 33 bp, Homo sapien
agaatttaacccttgaaagtatcacattatgat

SEQ ID NO: 922650 - DNA, 33 bp, Homo sapien
agaatttaacccttgagagtatcacattatgat

SEQ ID NO: 922651 - DNA, 33 bp, Homo sapien
aggcaaagagatggagaaagtattccagacaga

SEQ ID NO: 922652 - DNA, 33 bp, Homo sapien
aggcaaagagatggaggaagtattccagacaga

SEQ ID NO: 922653 - DNA, 33 bp, Homo sapien
atagaaaagtttagagaaagatacatggcaata

SEQ ID NO: 922654 - DNA, 33 bp, Homo sapien
atagaaaagtttagaggaagatacatggcaata

SEQ ID NO: 922655 - DNA, 33 bp, Homo sapien
aatgtttccttttcaccatactaagtgttccct

SEQ ID NO: 922656 - DNA, 33 bp, Homo sapien
aatgtttccttttcacgatactaagtgttccct

SEQ ID NO: 922657 - DNA, 33 bp, Homo sapien
aatacccagtgctcaaaaagtgtttgttcagtt

SEQ ID NO: 922658 - DNA, 33 bp, Homo sapien
aatacccagtgctcaataagtgtttgttcagtt

SEQ ID NO: 922659 - DNA, 33 bp, Homo sapien
ggaattgagtccttcaaataaggataataatct

SEQ ID NO: 922660 - DNA, 33 bp, Homo sapien
ggaattgagtccttcacataaggataataatct

SEQ ID NO: 922661 - DNA, 33 bp, Homo sapien
catatttctgtagtaggcacatttcaagccagt

SEQ ID NO: 922662 - DNA, 33 bp, Homo sapien
catatttctgtagtagtcacatttcaagccagt

SEQ ID NO: 922663 - DNA, 33 bp, Homo sapien
aagaagtttatgactcggaagatcttatatcca

SEQ ID NO: 922664 - DNA, 33 bp, Homo sapien
aagaagtttatgactctgaagatcttatatcca

SEQ ID NO: 922665 - DNA, 33 bp, Homo sapien
cattctgagctagcaaatgttcccagtacattg

SEQ ID NO: 922666 - DNA, 33 bp, Homo sapien
cattctgagctagcaagtgttcccagtacattg

SEQ ID NO: 922667 - DNA, 33 bp, Homo sapien
gatgcatttgcttccacgagcataaataatctc

SEQ ID NO: 922668 - DNA, 33 bp, Homo sapien
gatgcatttgcttccatgagcataaataatctc

SEQ ID NO: 922669 - DNA, 33 bp, Homo sapien
ttttgaaggaaacacaatccaatgggctcatgt

SEQ ID NO: 922670 - DNA, 33 bp, Homo sapien
ttttgaaggaaacacagtccaatgggctcatgt

SEQ ID NO: 922671 - DNA, 33 bp, Homo sapien
attttattcctggttagctatattgcaaaagtt

SEQ ID NO: 922672 - DNA, 33 bp, Homo sapien
attttattcctggttatctatattgcaaaagtt

SEQ ID NO: 922673 - DNA, 33 bp, Homo sapien
tctttctgtcaggtgaatatggaaacattttgg

SEQ ID NO: 922674 - DNA, 33 bp, Homo sapien
tctttctgtcaggtgagtatggaaacattttgg

SEQ ID NO: 922675 - DNA, 33 bp, Homo sapien
ttttccaaaatctcacacttgaagttccctccc

SEQ ID NO: 922676 - DNA, 33 bp, Homo sapien
ttttccaaaatctcactcttgaagttccctccc

SEQ ID NO: 922677 - DNA, 33 bp, Homo sapien
gaaagttactgtactacaaaagtgtaggaacta

SEQ ID NO: 922678 - DNA, 33 bp, Homo sapien
gaaagttactgtactataaaagtgtaggaacta

SEQ ID NO: 922679 - DNA, 33 bp, Homo sapien
ggtcagttgcccgacacgtgagtgccattcctt

SEQ ID NO: 922680 - DNA, 33 bp, Homo sapien
ggtcagttgcccgacatgtgagtgccattcctt

SEQ ID NO: 922681 - DNA, 33 bp, Homo sapien
gtgcagccagtttggaaaacagtctagcagtat

SEQ ID NO: 922682 - DNA, 33 bp, Homo sapien
gtgcagccagtttggacaacagtctagcagtat

SEQ ID NO: 922683 - DNA, 33 bp, Homo sapien
tagaaataagaatttgcaatggtccaaaaggtt

SEQ ID NO: 922684 - DNA, 33 bp, Homo sapien
tagaaataagaatttgtaatggtccaaaaggtt

SEQ ID NO: 922685 - DNA, 33 bp, Homo sapien
gtggggagtaggaatacgcaggatgttatgaca

SEQ ID NO: 922686 - DNA, 33 bp, Homo sapien
gtggggagtaggaatatgcaggatgttatgaca

SEQ ID NO: 922687 - DNA, 33 bp, Homo sapien
ccattcctcatgttcagttgatagctgcagtca

SEQ ID NO: 922688 - DNA, 33 bp, Homo sapien
ccattcctcatgttcatttgatagctgcagtca

SEQ ID NO: 922689 - DNA, 33 bp, Homo sapien
gtgattgacctgttaaatcttacgtattttttt

SEQ ID NO: 922690 - DNA, 33 bp, Homo sapien
gtgattgacctgttaagtcttacgtattttttt

SEQ ID NO: 922691 - DNA, 33 bp, Homo sapien
agcaatcagcaagagaaccgatcagcacccaca

SEQ ID NO: 922692 - DNA, 33 bp, Homo sapien
agcaatcagcaagagagccgatcagcacccaca

SEQ ID NO: 922693 - DNA, 33 bp, Homo sapien
tctttctcttcacctaaaaagcactcagaactg

SEQ ID NO: 922694 - DNA, 33 bp, Homo sapien
tctttctcttcacctataaagcactcagaactg

SEQ ID NO: 922695 - DNA, 33 bp, Homo sapien
atgcttcacctgtctacgttgtaacacactgta

SEQ ID NO: 922696 - DNA, 33 bp, Homo sapien
atgcttcacctgtctatgttgtaacacactgta

SEQ ID NO: 922697 - DNA, 33 bp, Homo sapien
acttaaaatctgcaaaagatgaaaaaagtgaca

SEQ ID NO: 922698 - DNA, 33 bp, Homo sapien
acttaaaatctgcaaaggatgaaaaaagtgaca

SEQ ID NO: 922699 - DNA, 33 bp, Homo sapien
tttttaacatacaagaactaatgaactaccttg

SEQ ID NO: 922700 - DNA, 33 bp, Homo sapien
tttttaacatacaagagctaatgaactaccttg

SEQ ID NO: 922701 - DNA, 33 bp, Homo sapien
tgttgtagcatttgtcaaagttcacttgctttt

SEQ ID NO: 922702 - DNA, 33 bp, Homo sapien
tgttgtagcatttgtcgaagttcacttgctttt

SEQ ID NO: 922703 - DNA, 33 bp, Homo sapien
tatcaccatttgaaacaactaatgaattaatga

SEQ ID NO: 922704 - DNA, 33 bp, Homo sapien
tatcaccatttgaaactactaatgaattaatga

SEQ ID NO: 922705 - DNA, 33 bp, Homo sapien
ttctgagattctatgacggttttcctcctaacc

SEQ ID NO: 922706 - DNA, 33 bp, Homo sapien
ttctgagattctatgatggttttcctcctaacc

SEQ ID NO: 922707 - DNA, 33 bp, Homo sapien
attgcttcatcaagaacatccttacatgaacct

SEQ ID NO: 922708 - DNA, 33 bp, Homo sapien
attgcttcatcaagaatatccttacatgaacct

SEQ ID NO: 922709 - DNA, 33 bp, Homo sapien
gaatagtaaacttaaaggagttctgacatacaa

SEQ ID NO: 922710 - DNA, 33 bp, Homo sapien
gaatagtaaacttaaatgagttctgacatacaa

SEQ ID NO: 922711 - DNA, 33 bp, Homo sapien
ttgcaactttccgtacactttttgtgctattta

SEQ ID NO: 922712 - DNA, 33 bp, Homo sapien
ttgcaactttccgtacgctttttgtgctattta

SEQ ID NO: 922713 - DNA, 33 bp, Homo sapien
tttggaatctgagtccaaagttatgagcaatgc

SEQ ID NO: 922714 - DNA, 33 bp, Homo sapien
tttggaatctgagtccgaagttatgagcaatgc

SEQ ID NO: 922715 - DNA, 33 bp, Homo sapien
aaacttaaggagagtacagttacaaagcttaga

SEQ ID NO: 922716 - DNA, 33 bp, Homo sapien
aaacttaaggagagtagagttacaaagcttaga

SEQ ID NO: 922717 - DNA, 33 bp, Homo sapien
cataggtcagttcgataatcaaataagataaat

SEQ ID NO: 922718 - DNA, 33 bp, Homo sapien
cataggtcagttcgatcatcaaataagataaat

SEQ ID NO: 922719 - DNA, 33 bp, Homo sapien
atgaatgtggctagtaaagaacagacgtgggtg

SEQ ID NO: 922720 - DNA, 33 bp, Homo sapien
atgaatgtggctagtagagaacagacgtgggtg

SEQ ID NO: 922721 - DNA, 33 bp, Homo sapien
aagttctaccctacacaaagtggaaaagcagat

SEQ ID NO: 922722 - DNA, 33 bp, Homo sapien
aagttctaccctacactaagtggaaaagcagat

SEQ ID NO: 922723 - DNA, 33 bp, Homo sapien
actgaaacaacaacgtaaatttgcacaaaagct

SEQ ID NO: 922724 - DNA, 33 bp, Homo sapien
actgaaacaacaacgtcaatttgcacaaaagct

SEQ ID NO: 922725 - DNA, 33 bp, Homo sapien
ggcagtcccagtctagcagaaatggaaaccaga

SEQ ID NO: 922726 - DNA, 33 bp, Homo sapien
ggcagtcccagtctagtagaaatggaaaccaga

SEQ ID NO: 922727 - DNA, 33 bp, Homo sapien
ggacagacaccttaggaatcctacatgaaaatg

SEQ ID NO: 922728 - DNA, 33 bp, Homo sapien
ggacagacaccttagggatcctacatgaaaatg

SEQ ID NO: 922729 - DNA, 33 bp, Homo sapien
tatttgcaatgcacaaatattttctatgttatt

SEQ ID NO: 922730 - DNA, 33 bp, Homo sapien
tatttgcaatgcacaagtattttctatgttatt

SEQ ID NO: 922731 - DNA, 33 bp, Homo sapien
attagcaaaacattaaaagcaatgaaacttggg

SEQ ID NO: 922732 - DNA, 33 bp, Homo sapien
attagcaaaacattaacagcaatgaaacttggg

SEQ ID NO: 922733 - DNA, 33 bp, Homo sapien
gggacaggagaatataagatgaccaaaaacctg

SEQ ID NO: 922734 - DNA, 33 bp, Homo sapien
gggacaggagaatatacgatgaccaaaaacctg

SEQ ID NO: 922735 - DNA, 33 bp, Homo sapien
atttgtgagaaatgaaaaacaatcctatcttat

SEQ ID NO: 922736 - DNA, 33 bp, Homo sapien
atttgtgagaaatgaagaacaatcctatcttat

SEQ ID NO: 922737 - DNA, 33 bp, Homo sapien
gtgtttagtgaagatcagaagcaggccgggtac

SEQ ID NO: 922738 - DNA, 33 bp, Homo sapien
gtgtttagtgaagatcggaagcaggccgggtac

SEQ ID NO: 922739 - DNA, 33 bp, Homo sapien
accccagcacacatgaagggctgcaagtgttct

SEQ ID NO: 922740 - DNA, 33 bp, Homo sapien
accccagcacacatgacgggctgcaagtgttct

SEQ ID NO: 922741 - DNA, 33 bp, Homo sapien
tggttcacccatctgtaaaaggagagtaacagc

SEQ ID NO: 922742 - DNA, 33 bp, Homo sapien
tggttcacccatctgtgaaaggagagtaacagc

SEQ ID NO: 922743 - DNA, 33 bp, Homo sapien
tcactcattttagatacagtcccagcagctaac

SEQ ID NO: 922744 - DNA, 33 bp, Homo sapien
tcactcattttagatatagtcccagcagctaac

SEQ ID NO: 922745 - DNA, 33 bp, Homo sapien
atacagcgacttttaaacttctttgtagctatc

SEQ ID NO: 922746 - DNA, 33 bp, Homo sapien
atacagcgacttttaagcttctttgtagctatc

SEQ ID NO: 922747 - DNA, 33 bp, Homo sapien
ctggcagatcaggagccactgctatcaaatatt

SEQ ID NO: 922748 - DNA, 33 bp, Homo sapien
ctggcagatcaggagcgactgctatcaaatatt

SEQ ID NO: 922749 - DNA, 33 bp, Homo sapien
ttttacgactatgtccccttaaagcctatttgc

SEQ ID NO: 922750 - DNA, 33 bp, Homo sapien
ttttacgactatgtcctcttaaagcctatttgc

SEQ ID NO: 922751 - DNA, 33 bp, Homo sapien
gttttagccatgtaaacgggagattactccttg

SEQ ID NO: 922752 - DNA, 33 bp, Homo sapien
gttttagccatgtaaatgggagattactccttg

SEQ ID NO: 922753 - DNA, 33 bp, Homo sapien
cttagaagtaacctccccacaagctgtccacag

SEQ ID NO: 922754 - DNA, 33 bp, Homo sapien
cttagaagtaacctccgcacaagctgtccacag

SEQ ID NO: 922755 - DNA, 33 bp, Homo sapien
tcttgcccccagttcacgccagcaccaggcagg

SEQ ID NO: 922756 - DNA, 33 bp, Homo sapien
tcttgcccccagttcatgccagcaccaggcagg

SEQ ID NO: 922757 - DNA, 33 bp, Homo sapien
aggatactgaccaggacagcagatgcatgaagt

SEQ ID NO: 922758 - DNA, 33 bp, Homo sapien
aggatactgaccaggagagcagatgcatgaagt

SEQ ID NO: 922759 - DNA, 33 bp, Homo sapien
gcactggtcaagcaaaaaaacccagcaattgga

SEQ ID NO: 922760 - DNA, 33 bp, Homo sapien
gcactggtcaagcaaagaaacccagcaattgga

SEQ ID NO: 922761 - DNA, 33 bp, Homo sapien
ggtaaagaagacctagcataacctttgcttaag

SEQ ID NO: 922762 - DNA, 33 bp, Homo sapien
ggtaaagaagacctagtataacctttgcttaag

SEQ ID NO: 922763 - DNA, 33 bp, Homo sapien
aatactacaagcaacccgaataatccataataa

SEQ ID NO: 922764 - DNA, 33 bp, Homo sapien
aatactacaagcaacctgaataatccataataa

SEQ ID NO: 922765 - DNA, 33 bp, Homo sapien
tatatatgcaaaagaactggtatctcaaatgtg

SEQ ID NO: 922766 - DNA, 33 bp, Homo sapien
tatatatgcaaaagaattggtatctcaaatgtg

SEQ ID NO: 922767 - DNA, 33 bp, Homo sapien
agatgggtaagtttcacgttaagcatatttcac

SEQ ID NO: 922768 - DNA, 33 bp, Homo sapien
agatgggtaagtttcatgttaagcatatttcac

SEQ ID NO: 922769 - DNA, 33 bp, Homo sapien
agcagcagggaaccggcaggtgatgaagggccg

SEQ ID NO: 922770 - DNA, 33 bp, Homo sapien
agcagcagggaaccggtaggtgatgaagggccg

SEQ ID NO: 922771 - DNA, 33 bp, Homo sapien
gcaatagaaatgaggccaaaagagtcttcccag

SEQ ID NO: 922772 - DNA, 33 bp, Homo sapien
gcaatagaaatgaggcgaaaagagtcttcccag

SEQ ID NO: 922773 - DNA, 33 bp, Homo sapien
taatcatcaagagctaaaataaccctctgctgc

SEQ ID NO: 922774 - DNA, 33 bp, Homo sapien
taatcatcaagagctacaataaccctctgctgc

SEQ ID NO: 922775 - DNA, 33 bp, Homo sapien
atgaccttcataacagacaacgtgaagtccacc

SEQ ID NO: 922776 - DNA, 33 bp, Homo sapien
atgaccttcataacagtcaacgtgaagtccacc

SEQ ID NO: 922777 - DNA, 33 bp, Homo sapien
atccctcaaggccatacgtcaatcaaaataatt

SEQ ID NO: 922778 - DNA, 33 bp, Homo sapien
atccctcaaggccatatgtcaatcaaaataatt

SEQ ID NO: 922779 - DNA, 33 bp, Homo sapien
tcttaaagttaaaaaacaagcacagtggctaag

SEQ ID NO: 922780 - DNA, 33 bp, Homo sapien
tcttaaagttaaaaaataagcacagtggctaag

SEQ ID NO: 922781 - DNA, 33 bp, Homo sapien
gtttcactcctggtagcaattttctgtattagc

SEQ ID NO: 922782 - DNA, 33 bp, Homo sapien
gtttcactcctggtagtaattttctgtattagc

SEQ ID NO: 922783 - DNA, 33 bp, Homo sapien
tgcaggggtggcaatcaagaatgaaggttcagt

SEQ ID NO: 922784 - DNA, 33 bp, Homo sapien
tgcaggggtggcaatcgagaatgaaggttcagt

SEQ ID NO: 922785 - DNA, 33 bp, Homo sapien
agatgaggtctgctcacgtttctattttgccac

SEQ ID NO: 922786 - DNA, 33 bp, Homo sapien
agatgaggtctgctcaggtttctattttgccac

SEQ ID NO: 922787 - DNA, 33 bp, Homo sapien
tcttccagtaacagcaccttgattttcctcctg

SEQ ID NO: 922788 - DNA, 33 bp, Homo sapien
tcttccagtaacagcagcttgattttcctcctg

SEQ ID NO: 922789 - DNA, 33 bp, Homo sapien
agacccaaagccccaaataggaaatttctataa

SEQ ID NO: 922790 - DNA, 33 bp, Homo sapien
agacccaaagccccaagtaggaaatttctataa

SEQ ID NO: 922791 - DNA, 33 bp, Homo sapien
gctcctgctgcagttaggaggaagctgtgggat

SEQ ID NO: 922792 - DNA, 33 bp, Homo sapien
gctcctgctgcagttatgaggaagctgtgggat

SEQ ID NO: 922793 - DNA, 33 bp, Homo sapien
gtccaggaatccttccagcagctccgcttcgca

SEQ ID NO: 922794 - DNA, 33 bp, Homo sapien
gtccaggaatccttccggcagctccgcttcgca

SEQ ID NO: 922795 - DNA, 33 bp, Homo sapien
tgaaagcttataattcactgtgctgctgtttaa

SEQ ID NO: 922796 - DNA, 33 bp, Homo sapien
tgaaagcttataattcgctgtgctgctgtttaa

SEQ ID NO: 922797 - DNA, 33 bp, Homo sapien
ttccagaacaaaagctcaactctttcgtgtggc

SEQ ID NO: 922798 - DNA, 33 bp, Homo sapien
ttccagaacaaaagctgaactctttcgtgtggc

SEQ ID NO: 922799 - DNA, 33 bp, Homo sapien
gataaatatgtgttggcataggttcaaacattt

SEQ ID NO: 922800 - DNA, 33 bp, Homo sapien
gataaatatgtgttggtataggttcaaacattt

SEQ ID NO: 922801 - DNA, 33 bp, Homo sapien
tgatctaatttcaagactaccagcctttttgtt

SEQ ID NO: 922802 - DNA, 33 bp, Homo sapien
tgatctaatttcaagattaccagcctttttgtt

SEQ ID NO: 922803 - DNA, 33 bp, Homo sapien
tgcaggcatatttgagaacaccaacaaaaaggc

SEQ ID NO: 922804 - DNA, 33 bp, Homo sapien
tgcaggcatatttgaggacaccaacaaaaaggc

SEQ ID NO: 922805 - DNA, 33 bp, Homo sapien
atggctggccatcttacgtttaaaattaaaata

SEQ ID NO: 922806 - DNA, 33 bp, Homo sapien
atggctggccatcttatgtttaaaattaaaata

SEQ ID NO: 922807 - DNA, 33 bp, Homo sapien
tgagacagagagaaaaatgtgaatgtgatttat

SEQ ID NO: 922808 - DNA, 33 bp, Homo sapien
tgagacagagagaaaattgtgaatgtgatttat

SEQ ID NO: 922809 - DNA, 33 bp, Homo sapien
catccctcagagcctaacatagtctcagttaat

SEQ ID NO: 922810 - DNA, 33 bp, Homo sapien
catccctcagagcctagcatagtctcagttaat

SEQ ID NO: 922811 - DNA, 33 bp, Homo sapien
gtgattctcaggaaaggcattgggagggagtgt

SEQ ID NO: 922812 - DNA, 33 bp, Homo sapien
gtgattctcaggaaagtcattgggagggagtgt

SEQ ID NO: 922813 - DNA, 33 bp, Homo sapien
attgtaaggtgccacagccattaaatagcacct

SEQ ID NO: 922814 - DNA, 33 bp, Homo sapien
attgtaaggtgccacatccattaaatagcacct

SEQ ID NO: 922815 - DNA, 33 bp, Homo sapien
agtttttgtcctacagaattttcgcctcccacc

SEQ ID NO: 922816 - DNA, 33 bp, Homo sapien
agtttttgtcctacaggattttcgcctcccacc

SEQ ID NO: 922817 - DNA, 33 bp, Homo sapien
tactcagatttaaataaaggaatgtttgttacc

SEQ ID NO: 922818 - DNA, 33 bp, Homo sapien
tactcagatttaaatacaggaatgtttgttacc

SEQ ID NO: 922819 - DNA, 33 bp, Homo sapien
aaggaactcaaaagataatatcaataccaggag

SEQ ID NO: 922820 - DNA, 33 bp, Homo sapien
aaggaactcaaaagatgatatcaataccaggag

SEQ ID NO: 922821 - DNA, 33 bp, Homo sapien
ctgtggaatcacagccacatgtagaaagttgac

SEQ ID NO: 922822 - DNA, 33 bp, Homo sapien
ctgtggaatcacagccgcatgtagaaagttgac

SEQ ID NO: 922823 - DNA, 33 bp, Homo sapien
tctgtgtcttactataagatgttgagtggcttc

SEQ ID NO: 922824 - DNA, 33 bp, Homo sapien
tctgtgtcttactataggatgttgagtggcttc

SEQ ID NO: 922825 - DNA, 33 bp, Homo sapien
ctaatgtgaatgtaaaccaatatttgcaaagcc

SEQ ID NO: 922826 - DNA, 33 bp, Homo sapien
ctaatgtgaatgtaaagcaatatttgcaaagcc

SEQ ID NO: 922827 - DNA, 33 bp, Homo sapien
aagtagactttggaataaaaaaatagctaccct

SEQ ID NO: 922828 - DNA, 33 bp, Homo sapien
aagtagactttggaatcaaaaaatagctaccct

SEQ ID NO: 922829 - DNA, 33 bp, Homo sapien
aatgcacagttaggtacggacccattaacctgt

SEQ ID NO: 922830 - DNA, 33 bp, Homo sapien
aatgcacagttaggtatggacccattaacctgt

SEQ ID NO: 922831 - DNA, 33 bp, Homo sapien
tccttgtcttttgaaacagatttagaaccagta

SEQ ID NO: 922832 - DNA, 33 bp, Homo sapien
tccttgtcttttgaaatagatttagaaccagta

SEQ ID NO: 922833 - DNA, 33 bp, Homo sapien
tttaatgtatgcagaacggaaggcgaggttgaa

SEQ ID NO: 922834 - DNA, 33 bp, Homo sapien
tttaatgtatgcagaatggaaggcgaggttgaa

SEQ ID NO: 922835 - DNA, 33 bp, Homo sapien
aattttctgcaattcgaaaactcaagagctctg

SEQ ID NO: 922836 - DNA, 33 bp, Homo sapien
aattttctgcaattcggaaactcaagagctctg

SEQ ID NO: 922837 - DNA, 33 bp, Homo sapien
tgtgctgggatagtaaaggatgtggttagcagc

SEQ ID NO: 922838 - DNA, 33 bp, Homo sapien
tgtgctgggatagtaatggatgtggttagcagc

SEQ ID NO: 922839 - DNA, 33 bp, Homo sapien
ggtaaaggtagaagcaaggaagtcagaaaggga

SEQ ID NO: 922840 - DNA, 33 bp, Homo sapien
ggtaaaggtagaagcacggaagtcagaaaggga

SEQ ID NO: 922841 - DNA, 33 bp, Homo sapien
catcttgctaatcccaccttcaagcctgtggac

SEQ ID NO: 922842 - DNA, 33 bp, Homo sapien
catcttgctaatcccatcttcaagcctgtggac

SEQ ID NO: 922843 - DNA, 33 bp, Homo sapien
ggaggcgtgttccctgaaaaggcacctctgaag

SEQ ID NO: 922844 - DNA, 33 bp, Homo sapien
ggaggcgtgttccctgcaaaggcacctctgaag

SEQ ID NO: 922845 - DNA, 33 bp, Homo sapien
acaggtgaattttgaacgagaactgggtatcag

SEQ ID NO: 922846 - DNA, 33 bp, Homo sapien
acaggtgaattttgaatgagaactgggtatcag

SEQ ID NO: 922847 - DNA, 33 bp, Homo sapien
taagatattgctgtgactataagagtttgctgt

SEQ ID NO: 922848 - DNA, 33 bp, Homo sapien
taagatattgctgtgagtataagagtttgctgt

SEQ ID NO: 922849 - DNA, 33 bp, Homo sapien
tgtgtggcaggtaactaagggaggcctctggtc

SEQ ID NO: 922850 - DNA, 33 bp, Homo sapien
tgtgtggcaggtaactgagggaggcctctggtc

SEQ ID NO: 922851 - DNA, 33 bp, Homo sapien
caggacacctcagttacagtgaagcaaatcagt

SEQ ID NO: 922852 - DNA, 33 bp, Homo sapien
caggacacctcagttatagtgaagcaaatcagt

SEQ ID NO: 922853 - DNA, 33 bp, Homo sapien
agtattattatgtctacagtcaatggagagact

SEQ ID NO: 922854 - DNA, 33 bp, Homo sapien
agtattattatgtctatagtcaatggagagact

SEQ ID NO: 922855 - DNA, 33 bp, Homo sapien
ttctcaaagaaatataacacttaagaccaggcg

SEQ ID NO: 922856 - DNA, 33 bp, Homo sapien
ttctcaaagaaatataccacttaagaccaggcg

SEQ ID NO: 922857 - DNA, 33 bp, Homo sapien
gtggcctacccttgaaagctccaacactgggtc

SEQ ID NO: 922858 - DNA, 33 bp, Homo sapien
gtggcctacccttgaacgctccaacactgggtc

SEQ ID NO: 922859 - DNA, 33 bp, Homo sapien
tttcatgctatggatgcattatagtttatttga

SEQ ID NO: 922860 - DNA, 33 bp, Homo sapien
tttcatgctatggatgtattatagtttatttga

SEQ ID NO: 922861 - DNA, 33 bp, Homo sapien
attacaccactgtgtaaacctttgcatagccat

SEQ ID NO: 922862 - DNA, 33 bp, Homo sapien
attacaccactgtgtatacctttgcatagccat

SEQ ID NO: 922863 - DNA, 33 bp, Homo sapien
tcaaaggcgtttattaagaagcatttctaaagg

SEQ ID NO: 922864 - DNA, 33 bp, Homo sapien
tcaaaggcgtttattaggaagcatttctaaagg

SEQ ID NO: 922865 - DNA, 33 bp, Homo sapien
gcggcagccctgtgataaacaaaatcatgtttc

SEQ ID NO: 922866 - DNA, 33 bp, Homo sapien
gcggcagccctgtgatcaacaaaatcatgtttc

SEQ ID NO: 922867 - DNA, 33 bp, Homo sapien
ctgcatggatcacctcacttaagtcttacaaca

SEQ ID NO: 922868 - DNA, 33 bp, Homo sapien
ctgcatggatcacctcgcttaagtcttacaaca

SEQ ID NO: 922869 - DNA, 33 bp, Homo sapien
tgatcatactgcttggacatctcttgtttgggg

SEQ ID NO: 922870 - DNA, 33 bp, Homo sapien
tgatcatactgcttgggcatctcttgtttgggg

SEQ ID NO: 922871 - DNA, 33 bp, Homo sapien
cctgagcgaaagccacacaaaagcgccttgagc

SEQ ID NO: 922872 - DNA, 33 bp, Homo sapien
cctgagcgaaagccacgcaaaagcgccttgagc

SEQ ID NO: 922873 - DNA, 33 bp, Homo sapien
gccctcaagcagtttacgaaatagtagggatgc

SEQ ID NO: 922874 - DNA, 33 bp, Homo sapien
gccctcaagcagtttatgaaatagtagggatgc

SEQ ID NO: 922875 - DNA, 33 bp, Homo sapien
agtgctcatgggaggaaaaagaacacaaatagg

SEQ ID NO: 922876 - DNA, 33 bp, Homo sapien
agtgctcatgggaggacaaagaacacaaatagg

SEQ ID NO: 922877 - DNA, 33 bp, Homo sapien
ctcagatcttaatacacgtgatgcctctctttg

SEQ ID NO: 922878 - DNA, 33 bp, Homo sapien
ctcagatcttaatacatgtgatgcctctctttg

SEQ ID NO: 922879 - DNA, 33 bp, Homo sapien
ctatattactgaagcaatccgattaggaggatt

SEQ ID NO: 922880 - DNA, 33 bp, Homo sapien
ctatattactgaagcagtccgattaggaggatt

SEQ ID NO: 922881 - DNA, 33 bp, Homo sapien
gtggcagagactgaataaagggttgacccaggg

SEQ ID NO: 922882 - DNA, 33 bp, Homo sapien
gtggcagagactgaatgaagggttgacccaggg

SEQ ID NO: 922883 - DNA, 33 bp, Homo sapien
atttgctgaagcctacactatgagataggtcta

SEQ ID NO: 922884 - DNA, 33 bp, Homo sapien
atttgctgaagcctaccctatgagataggtcta

SEQ ID NO: 922885 - DNA, 33 bp, Homo sapien
gggaaagagaaggaaacgtattctctgcagagc

SEQ ID NO: 922886 - DNA, 33 bp, Homo sapien
gggaaagagaaggaaaggtattctctgcagagc

SEQ ID NO: 922887 - DNA, 33 bp, Homo sapien
tgtgggaattgtaacaatagcaatgggaaatga

SEQ ID NO: 922888 - DNA, 33 bp, Homo sapien
tgtgggaattgtaacagtagcaatgggaaatga

SEQ ID NO: 922889 - DNA, 33 bp, Homo sapien
tttcacttagtagtacacatttaagcttctttc

SEQ ID NO: 922890 - DNA, 33 bp, Homo sapien
tttcacttagtagtacgcatttaagcttctttc

SEQ ID NO: 922891 - DNA, 33 bp, Homo sapien
cacccagagataaccacagtctgttggatttgg

SEQ ID NO: 922892 - DNA, 33 bp, Homo sapien
cacccagagataaccagagtctgttggatttgg

SEQ ID NO: 922893 - DNA, 33 bp, Homo sapien
aaaaattttttttaaagtagctgagcatagtgg

SEQ ID NO: 922894 - DNA, 33 bp, Homo sapien
aaaaattttttttaaattagctgagcatagtgg

SEQ ID NO: 922895 - DNA, 33 bp, Homo sapien
ctcactgttaaatatacgtgatggtgcagatta

SEQ ID NO: 922896 - DNA, 33 bp, Homo sapien
ctcactgttaaatatatgtgatggtgcagatta

SEQ ID NO: 922897 - DNA, 33 bp, Homo sapien
acaacaactctttagaagttctgacatgaacat

SEQ ID NO: 922898 - DNA, 33 bp, Homo sapien
acaacaactctttagaggttctgacatgaacat

SEQ ID NO: 922899 - DNA, 33 bp, Homo sapien
acctgagattacttcaaaacaaatccaaggcat

SEQ ID NO: 922900 - DNA, 33 bp, Homo sapien
acctgagattacttcagaacaaatccaaggcat

SEQ ID NO: 922901 - DNA, 33 bp, Homo sapien
gttcactgtggtaagacgtcagacgtagaaatt

SEQ ID NO: 922902 - DNA, 33 bp, Homo sapien
gttcactgtggtaagatgtcagacgtagaaatt

SEQ ID NO: 922903 - DNA, 33 bp, Homo sapien
aaggcagcatcccaaactcttctgagtcaataa

SEQ ID NO: 922904 - DNA, 33 bp, Homo sapien
aaggcagcatcccaaattcttctgagtcaataa

SEQ ID NO: 922905 - DNA, 33 bp, Homo sapien
tgccatctagtgccccacaggagtcttcactgt

SEQ ID NO: 922906 - DNA, 33 bp, Homo sapien
tgccatctagtgccccgcaggagtcttcactgt

SEQ ID NO: 922907 - DNA, 33 bp, Homo sapien
gattcctgttctttcacgtaagttcaattcatg

SEQ ID NO: 922908 - DNA, 33 bp, Homo sapien
gattcctgttctttcatgtaagttcaattcatg

SEQ ID NO: 922909 - DNA, 33 bp, Homo sapien
ctttaaggcatctacacaagtggccagcagtca

SEQ ID NO: 922910 - DNA, 33 bp, Homo sapien
ctttaaggcatctacagaagtggccagcagtca

SEQ ID NO: 922911 - DNA, 33 bp, Homo sapien
agctgagggactcttacgtgactcaccccctca

SEQ ID NO: 922912 - DNA, 33 bp, Homo sapien
agctgagggactcttatgtgactcaccccctca

SEQ ID NO: 922913 - DNA, 33 bp, Homo sapien
aaatgttgttcagcacacttctgtgaagtcaat

SEQ ID NO: 922914 - DNA, 33 bp, Homo sapien
aaatgttgttcagcacgcttctgtgaagtcaat

SEQ ID NO: 922915 - DNA, 33 bp, Homo sapien
atacaaggaaagaggacgaagaaaatctgaact

SEQ ID NO: 922916 - DNA, 33 bp, Homo sapien
atacaaggaaagaggatgaagaaaatctgaact

SEQ ID NO: 922917 - DNA, 33 bp, Homo sapien
cagaccattgcggaaaactcaaattcgctattt

SEQ ID NO: 922918 - DNA, 33 bp, Homo sapien
cagaccattgcggaaagctcaaattcgctattt

SEQ ID NO: 922919 - DNA, 33 bp, Homo sapien
gccaagactatagaaacgacagtgagaaagcaa

SEQ ID NO: 922920 - DNA, 33 bp, Homo sapien
gccaagactatagaaatgacagtgagaaagcaa

SEQ ID NO: 922921 - DNA, 33 bp, Homo sapien
ctgctgcctgtcatgaagctctctctggtgttg

SEQ ID NO: 922922 - DNA, 33 bp, Homo sapien
ctgctgcctgtcatgaggctctctctggtgttg

SEQ ID NO: 922923 - DNA, 33 bp, Homo sapien
agcacctggaagaaaaaaggagcaaaatttctc

SEQ ID NO: 922924 - DNA, 33 bp, Homo sapien
agcacctggaagaaaagaggagcaaaatttctc

SEQ ID NO: 922925 - DNA, 33 bp, Homo sapien
tgccccagccaaattccacgtgttctgccagca

SEQ ID NO: 922926 - DNA, 33 bp, Homo sapien
tgccccagccaaattcgacgtgttctgccagca

SEQ ID NO: 922927 - DNA, 33 bp, Homo sapien
actcaagaaatattgaatacctactgtgtgtca

SEQ ID NO: 922928 - DNA, 33 bp, Homo sapien
actcaagaaatattgattacctactgtgtgtca

SEQ ID NO: 922929 - DNA, 33 bp, Homo sapien
aaaagtctagcgcatacggttatgtacagtaca

SEQ ID NO: 922930 - DNA, 33 bp, Homo sapien
aaaagtctagcgcatatggttatgtacagtaca

SEQ ID NO: 922931 - DNA, 33 bp, Homo sapien
cttggaactcaattacacttacataatctataa

SEQ ID NO: 922932 - DNA, 33 bp, Homo sapien
cttggaactcaattacccttacataatctataa

SEQ ID NO: 922933 - DNA, 33 bp, Homo sapien
gggagcaaaagggtcaacttttggaattcattg

SEQ ID NO: 922934 - DNA, 33 bp, Homo sapien
gggagcaaaagggtcatcttttggaattcattg

SEQ ID NO: 922935 - DNA, 33 bp, Homo sapien
tggattatttacagtaactcacatgacaggaaa

SEQ ID NO: 922936 - DNA, 33 bp, Homo sapien
tggattatttacagtatctcacatgacaggaaa

SEQ ID NO: 922937 - DNA, 33 bp, Homo sapien
tattccaccaacagctaacaaagggaggctcta

SEQ ID NO: 922938 - DNA, 33 bp, Homo sapien
tattccaccaacagcttacaaagggaggctcta

SEQ ID NO: 922939 - DNA, 33 bp, Homo sapien
gggagccagaagattcacatggacatgaaaagg

SEQ ID NO: 922940 - DNA, 33 bp, Homo sapien
gggagccagaagattcgcatggacatgaaaagg

SEQ ID NO: 922941 - DNA, 33 bp, Homo sapien
tgtaaatgcttcttaacgctctcatcatatgaa

SEQ ID NO: 922942 - DNA, 33 bp, Homo sapien
tgtaaatgcttcttaatgctctcatcatatgaa

SEQ ID NO: 922943 - DNA, 33 bp, Homo sapien
gctctccctaaaacaccgcatactttccttcca

SEQ ID NO: 922944 - DNA, 33 bp, Homo sapien
gctctccctaaaacacggcatactttccttcca

SEQ ID NO: 922945 - DNA, 33 bp, Homo sapien
cccattctcttttctcacaaatgcatacctctc

SEQ ID NO: 922946 - DNA, 33 bp, Homo sapien
cccattctcttttctcgcaaatgcatacctctc

SEQ ID NO: 922947 - DNA, 33 bp, Homo sapien
aaggtgcacaacactaaaagactttgccagtgc

SEQ ID NO: 922948 - DNA, 33 bp, Homo sapien
aaggtgcacaacactacaagactttgccagtgc

SEQ ID NO: 922949 - DNA, 33 bp, Homo sapien
cctgaggttcccattacgtgttcttaaactcag

SEQ ID NO: 922950 - DNA, 33 bp, Homo sapien
cctgaggttcccattaggtgttcttaaactcag

SEQ ID NO: 922951 - DNA, 33 bp, Homo sapien
gctggtaacaacaacaacgagaacagtttttcc

SEQ ID NO: 922952 - DNA, 33 bp, Homo sapien
gctggtaacaacaacagcgagaacagtttttcc

SEQ ID NO: 922953 - DNA, 33 bp, Homo sapien
gtgttgagagcaaccccattcttttggttccaa

SEQ ID NO: 922954 - DNA, 33 bp, Homo sapien
gtgttgagagcaaccctattcttttggttccaa

SEQ ID NO: 922955 - DNA, 33 bp, Homo sapien
gtaatactgaggtcaaggatctatccaagcttg

SEQ ID NO: 922956 - DNA, 33 bp, Homo sapien
gtaatactgaggtcaatgatctatccaagcttg

SEQ ID NO: 922957 - DNA, 33 bp, Homo sapien
tacttcccatagattaactcatcgaatcctcat

SEQ ID NO: 922958 - DNA, 33 bp, Homo sapien
tacttcccatagattagctcatcgaatcctcat

SEQ ID NO: 922959 - DNA, 33 bp, Homo sapien
aactgaaggagagaaaacttcactgtgagctgt

SEQ ID NO: 922960 - DNA, 33 bp, Homo sapien
aactgaaggagagaaagcttcactgtgagctgt

SEQ ID NO: 922961 - DNA, 33 bp, Homo sapien
agactcagggaagttacgaagttgtcctagcta

SEQ ID NO: 922962 - DNA, 33 bp, Homo sapien
agactcagggaagttatgaagttgtcctagcta

SEQ ID NO: 922963 - DNA, 33 bp, Homo sapien
aagatccctcatttcaacggctcatttctgcgg

SEQ ID NO: 922964 - DNA, 33 bp, Homo sapien
aagatccctcatttcagcggctcatttctgcgg

SEQ ID NO: 922965 - DNA, 33 bp, Homo sapien
ttttaatgtgcaaatccctcctcaactgtgctg

SEQ ID NO: 922966 - DNA, 33 bp, Homo sapien
ttttaatgtgcaaatctctcctcaactgtgctg

SEQ ID NO: 922967 - DNA, 33 bp, Homo sapien
ggcaattcccaggaccaaatctcctgctctaca

SEQ ID NO: 922968 - DNA, 33 bp, Homo sapien
ggcaattcccaggacccaatctcctgctctaca

SEQ ID NO: 922969 - DNA, 33 bp, Homo sapien
ccccaccaggttaagaagacagacacaaaccaa

SEQ ID NO: 922970 - DNA, 33 bp, Homo sapien
ccccaccaggttaagatgacagacacaaaccaa

SEQ ID NO: 922971 - DNA, 33 bp, Homo sapien
tacatacaggatatgacgggaactgagaagaag

SEQ ID NO: 922972 - DNA, 33 bp, Homo sapien
tacatacaggatatgatgggaactgagaagaag

SEQ ID NO: 922973 - DNA, 33 bp, Homo sapien
tgctcatgcattttgcaccctgctatattgtaa

SEQ ID NO: 922974 - DNA, 33 bp, Homo sapien
tgctcatgcattttgcgccctgctatattgtaa

SEQ ID NO: 922975 - DNA, 33 bp, Homo sapien
ggacatctgcacaaaacgtgggaaaatgagaaa

SEQ ID NO: 922976 - DNA, 33 bp, Homo sapien
ggacatctgcacaaaatgtgggaaaatgagaaa

SEQ ID NO: 922977 - DNA, 33 bp, Homo sapien
aaccaaaataccaatcacctagatgctaccttc

SEQ ID NO: 922978 - DNA, 33 bp, Homo sapien
aaccaaaataccaatcgcctagatgctaccttc

SEQ ID NO: 922979 - DNA, 33 bp, Homo sapien
tggctgaattagaggaggcacttaaggatggaa

SEQ ID NO: 922980 - DNA, 33 bp, Homo sapien
tggctgaattagaggatgcacttaaggatggaa

SEQ ID NO: 922981 - DNA, 33 bp, Homo sapien
attgtctaaggctggacgtcctttttggtgatg

SEQ ID NO: 922982 - DNA, 33 bp, Homo sapien
attgtctaaggctggatgtcctttttggtgatg

SEQ ID NO: 922983 - DNA, 33 bp, Homo sapien
tacggtgtggaatttacccagacatactcaagg

SEQ ID NO: 922984 - DNA, 33 bp, Homo sapien
tacggtgtggaatttatccagacatactcaagg

SEQ ID NO: 922985 - DNA, 33 bp, Homo sapien
caccaccttccagcaggagctctgtaaggaaag

SEQ ID NO: 922986 - DNA, 33 bp, Homo sapien
caccaccttccagcagtagctctgtaaggaaag

SEQ ID NO: 922987 - DNA, 33 bp, Homo sapien
gatgggggttgtttcacagtccactttagttac

SEQ ID NO: 922988 - DNA, 33 bp, Homo sapien
gatgggggttgtttcatagtccactttagttac

SEQ ID NO: 922989 - DNA, 33 bp, Homo sapien
tttctttgtactaatgacatctctggtgcagtt

SEQ ID NO: 922990 - DNA, 33 bp, Homo sapien
tttctttgtactaatgccatctctggtgcagtt

SEQ ID NO: 922991 - DNA, 33 bp, Homo sapien
ccaatgctggttccaacgtcacacgcctgctgc

SEQ ID NO: 922992 - DNA, 33 bp, Homo sapien
ccaatgctggttccaatgtcacacgcctgctgc

SEQ ID NO: 922993 - DNA, 33 bp, Homo sapien
attaactgtcaaataacaaaatctatggatgaa

SEQ ID NO: 922994 - DNA, 33 bp, Homo sapien
attaactgtcaaataagaaaatctatggatgaa

SEQ ID NO: 922995 - DNA, 33 bp, Homo sapien
aaaactggggtaaatacgttcaggaattagacc

SEQ ID NO: 922996 - DNA, 33 bp, Homo sapien
aaaactggggtaaatatgttcaggaattagacc

SEQ ID NO: 922997 - DNA, 33 bp, Homo sapien
atttattgaatgaatacgaaggataaacacacg

SEQ ID NO: 922998 - DNA, 33 bp, Homo sapien
atttattgaatgaataggaaggataaacacacg

SEQ ID NO: 922999 - DNA, 33 bp, Homo sapien
agtgtctttcagttcactaaaaggccacacggt

SEQ ID NO: 923000 - DNA, 33 bp, Homo sapien
agtgtctttcagttcattaaaaggccacacggt

SEQ ID NO: 923001 - DNA, 33 bp, Homo sapien
ttaatgtacacatgccactatggggcagactta

SEQ ID NO: 923002 - DNA, 33 bp, Homo sapien
ttaatgtacacatgccgctatggggcagactta

SEQ ID NO: 923003 - DNA, 33 bp, Homo sapien
cctggtctttgaacataacctggctctgagaaa

SEQ ID NO: 923004 - DNA, 33 bp, Homo sapien
cctggtctttgaacatcacctggctctgagaaa

SEQ ID NO: 923005 - DNA, 33 bp, Homo sapien
atatgcaaaactgagaggcagagcctggatttg

SEQ ID NO: 923006 - DNA, 33 bp, Homo sapien
atatgcaaaactgagatgcagagcctggatttg

SEQ ID NO: 923007 - DNA, 33 bp, Homo sapien
atttaatccttgtaaccattctgagttgcacag

SEQ ID NO: 923008 - DNA, 33 bp, Homo sapien
atttaatccttgtaactattctgagttgcacag

SEQ ID NO: 923009 - DNA, 33 bp, Homo sapien
ttggggtgaagcccgaaaaagggatgagagaca

SEQ ID NO: 923010 - DNA, 33 bp, Homo sapien
ttggggtgaagcccgagaaagggatgagagaca

SEQ ID NO: 923011 - DNA, 33 bp, Homo sapien
ctctgaaattagagaaagtcatcacaaggtcct

SEQ ID NO: 923012 - DNA, 33 bp, Homo sapien
ctctgaaattagagaaggtcatcacaaggtcct

SEQ ID NO: 923013 - DNA, 33 bp, Homo sapien
catagtcatcagcaatcaaggatttgagaagtt

SEQ ID NO: 923014 - DNA, 33 bp, Homo sapien
catagtcatcagcaatgaaggatttgagaagtt

SEQ ID NO: 923015 - DNA, 33 bp, Homo sapien
ctattatctgctgaaccgtgagaagagctgtta

SEQ ID NO: 923016 - DNA, 33 bp, Homo sapien
ctattatctgctgaactgtgagaagagctgtta

SEQ ID NO: 923017 - DNA, 33 bp, Homo sapien
gaagcccgccactgtaaggttcccgcccttgag

SEQ ID NO: 923018 - DNA, 33 bp, Homo sapien
gaagcccgccactgtacggttcccgcccttgag

SEQ ID NO: 923019 - DNA, 33 bp, Homo sapien
aacaccagactctccacgtgcggagcaatttat

SEQ ID NO: 923020 - DNA, 33 bp, Homo sapien
aacaccagactctccatgtgcggagcaatttat

SEQ ID NO: 923021 - DNA, 33 bp, Homo sapien
taagaagccatgaccaaaaagagcactacccat

SEQ ID NO: 923022 - DNA, 33 bp, Homo sapien
taagaagccatgaccagaaagagcactacccat

SEQ ID NO: 923023 - DNA, 33 bp, Homo sapien
tgcaagtacctgtgaacgtgggccactgagagt

SEQ ID NO: 923024 - DNA, 33 bp, Homo sapien
tgcaagtacctgtgaatgtgggccactgagagt

SEQ ID NO: 923025 - DNA, 33 bp, Homo sapien
agaagagtagaaaccacatcatgaagattttca

SEQ ID NO: 923026 - DNA, 33 bp, Homo sapien
agaagagtagaaaccatatcatgaagattttca

SEQ ID NO: 923027 - DNA, 33 bp, Homo sapien
ttttcaattgccaaacaacatttttagtcagcc

SEQ ID NO: 923028 - DNA, 33 bp, Homo sapien
ttttcaattgccaaactacatttttagtcagcc

SEQ ID NO: 923029 - DNA, 33 bp, Homo sapien
ggttaaaactagacaaattattccataaatcca

SEQ ID NO: 923030 - DNA, 33 bp, Homo sapien
ggttaaaactagacaagttattccataaatcca

SEQ ID NO: 923031 - DNA, 33 bp, Homo sapien
cgtaactgcgtgccaacaggaaagtatcaccta

SEQ ID NO: 923032 - DNA, 33 bp, Homo sapien
cgtaactgcgtgccaagaggaaagtatcaccta

SEQ ID NO: 923033 - DNA, 33 bp, Homo sapien
tctgaacattcttcccagattttgaacagttgt

SEQ ID NO: 923034 - DNA, 33 bp, Homo sapien
tctgaacattcttccctgattttgaacagttgt

SEQ ID NO: 923035 - DNA, 33 bp, Homo sapien
caacttcttctgcctaaaataaagctcatatta

SEQ ID NO: 923036 - DNA, 33 bp, Homo sapien
caacttcttctgcctataataaagctcatatta

SEQ ID NO: 923037 - DNA, 33 bp, Homo sapien
gtgaagaggcacttacactacagttgcagcaat

SEQ ID NO: 923038 - DNA, 33 bp, Homo sapien
gtgaagaggcacttacgctacagttgcagcaat

SEQ ID NO: 923039 - DNA, 33 bp, Homo sapien
catcaattcatcagcactagaattttcctggcc

SEQ ID NO: 923040 - DNA, 33 bp, Homo sapien
catcaattcatcagcattagaattttcctggcc

SEQ ID NO: 923041 - DNA, 33 bp, Homo sapien
gtactgtagtcctgtcagaagcacaacttccca

SEQ ID NO: 923042 - DNA, 33 bp, Homo sapien
gtactgtagtcctgtcggaagcacaacttccca

SEQ ID NO: 923043 - DNA, 33 bp, Homo sapien
tagagcctatgatccaaaaaagggacatttttc

SEQ ID NO: 923044 - DNA, 33 bp, Homo sapien
tagagcctatgatccacaaaagggacatttttc

SEQ ID NO: 923045 - DNA, 33 bp, Homo sapien
aggatctcttagcatgaacaaaatgtctgtttg

SEQ ID NO: 923046 - DNA, 33 bp, Homo sapien
aggatctcttagcatggacaaaatgtctgtttg

SEQ ID NO: 923047 - DNA, 33 bp, Homo sapien
cagtcttgaagttaccaaaaggcaaataacttc

SEQ ID NO: 923048 - DNA, 33 bp, Homo sapien
cagtcttgaagttaccgaaaggcaaataacttc

SEQ ID NO: 923049 - DNA, 33 bp, Homo sapien
tatacgccttatcagactcactcatccaagcat

SEQ ID NO: 923050 - DNA, 33 bp, Homo sapien
tatacgccttatcagattcactcatccaagcat

SEQ ID NO: 923051 - DNA, 33 bp, Homo sapien
atggagaaatatgagaaggaaaagagtatgatg

SEQ ID NO: 923052 - DNA, 33 bp, Homo sapien
atggagaaatatgagagggaaaagagtatgatg

SEQ ID NO: 923053 - DNA, 33 bp, Homo sapien
gggctcagggtcgccaactgggtacgggaagct

SEQ ID NO: 923054 - DNA, 33 bp, Homo sapien
gggctcagggtcgccagctgggtacgggaagct

SEQ ID NO: 923055 - DNA, 33 bp, Homo sapien
gcaaaaggttgcccgaaccctgctccagacagg

SEQ ID NO: 923056 - DNA, 33 bp, Homo sapien
gcaaaaggttgcccgacccctgctccagacagg

SEQ ID NO: 923057 - DNA, 33 bp, Homo sapien
gctctggagttaggccagagtttgccgcatagc

SEQ ID NO: 923058 - DNA, 33 bp, Homo sapien
gctctggagttaggccggagtttgccgcatagc

SEQ ID NO: 923059 - DNA, 33 bp, Homo sapien
ctgtggaagtttgtcacgtgggactgaaatctg

SEQ ID NO: 923060 - DNA, 33 bp, Homo sapien
ctgtggaagtttgtcatgtgggactgaaatctg

SEQ ID NO: 923061 - DNA, 33 bp, Homo sapien
aaacatcagacaaatgaagaacatctcttgaac

SEQ ID NO: 923062 - DNA, 33 bp, Homo sapien
aaacatcagacaaatgcagaacatctcttgaac

SEQ ID NO: 923063 - DNA, 33 bp, Homo sapien
gcttatagagaagaacaagtgagacaccatgag

SEQ ID NO: 923064 - DNA, 33 bp, Homo sapien
gcttatagagaagaacgagtgagacaccatgag

SEQ ID NO: 923065 - DNA, 33 bp, Homo sapien
agttctttgaaccttacgttttggaggtcatag

SEQ ID NO: 923066 - DNA, 33 bp, Homo sapien
agttctttgaaccttatgttttggaggtcatag

SEQ ID NO: 923067 - DNA, 33 bp, Homo sapien
cagcctggcttactaaactaattgaaagcctaa

SEQ ID NO: 923068 - DNA, 33 bp, Homo sapien
cagcctggcttactaatctaattgaaagcctaa

SEQ ID NO: 923069 - DNA, 33 bp, Homo sapien
cctaacaaagactcaccccttgggcaagcccta

SEQ ID NO: 923070 - DNA, 33 bp, Homo sapien
cctaacaaagactcactccttgggcaagcccta

SEQ ID NO: 923071 - DNA, 33 bp, Homo sapien
aaagagaactcttatacgctatcggtgggcacg

SEQ ID NO: 923072 - DNA, 33 bp, Homo sapien
aaagagaactcttatatgctatcggtgggcacg

SEQ ID NO: 923073 - DNA, 33 bp, Homo sapien
aacaagagactaatataaaaagcatacaacgaa

SEQ ID NO: 923074 - DNA, 33 bp, Homo sapien
aacaagagactaatatcaaaagcatacaacgaa

SEQ ID NO: 923075 - DNA, 33 bp, Homo sapien
tataatgagaagtctacattgaatttgtcatat

SEQ ID NO: 923076 - DNA, 33 bp, Homo sapien
tataatgagaagtctatattgaatttgtcatat

SEQ ID NO: 923077 - DNA, 33 bp, Homo sapien
agctcagcagcagccactcaacgcttggtacat

SEQ ID NO: 923078 - DNA, 33 bp, Homo sapien
agctcagcagcagccattcaacgcttggtacat

SEQ ID NO: 923079 - DNA, 33 bp, Homo sapien
attcaaaaagaccgggcagataaaatgaatatg

SEQ ID NO: 923080 - DNA, 33 bp, Homo sapien
attcaaaaagaccggggagataaaatgaatatg

SEQ ID NO: 923081 - DNA, 33 bp, Homo sapien
agcaatagcatcattcgcaagtagtaaaggaaa

SEQ ID NO: 923082 - DNA, 33 bp, Homo sapien
agcaatagcatcattctcaagtagtaaaggaaa

SEQ ID NO: 923083 - DNA, 33 bp, Homo sapien
atgacagacacatgaacgctggagctcagagca

SEQ ID NO: 923084 - DNA, 33 bp, Homo sapien
atgacagacacatgaatgctggagctcagagca

SEQ ID NO: 923085 - DNA, 33 bp, Homo sapien
accctcctggcttctcactccgcctgtgtgact

SEQ ID NO: 923086 - DNA, 33 bp, Homo sapien
accctcctggcttctcgctccgcctgtgtgact

SEQ ID NO: 923087 - DNA, 33 bp, Homo sapien
ccctcttttggatcacaatttatgtaaaatcat

SEQ ID NO: 923088 - DNA, 33 bp, Homo sapien
ccctcttttggatcaccatttatgtaaaatcat

SEQ ID NO: 923089 - DNA, 33 bp, Homo sapien
cttatttaatgtgagacggggctacacaagggc

SEQ ID NO: 923090 - DNA, 33 bp, Homo sapien
cttatttaatgtgagatggggctacacaagggc

SEQ ID NO: 923091 - DNA, 33 bp, Homo sapien
cctattgtgttactgacactaggtataggaaac

SEQ ID NO: 923092 - DNA, 33 bp, Homo sapien
cctattgtgttactgatactaggtataggaaac

SEQ ID NO: 923093 - DNA, 33 bp, Homo sapien
acaatgacttgggtacaaggagtttatttggga

SEQ ID NO: 923094 - DNA, 33 bp, Homo sapien
acaatgacttgggtactaggagtttatttggga

SEQ ID NO: 923095 - DNA, 33 bp, Homo sapien
ctttacaagttcttaacgttggtggaaggaatc

SEQ ID NO: 923096 - DNA, 33 bp, Homo sapien
ctttacaagttcttaaggttggtggaaggaatc

SEQ ID NO: 923097 - DNA, 33 bp, Homo sapien
ttgaagttgcatccagcataaatgaaaggcttg

SEQ ID NO: 923098 - DNA, 33 bp, Homo sapien
ttgaagttgcatccagtataaatgaaaggcttg

SEQ ID NO: 923099 - DNA, 33 bp, Homo sapien
agggaaggctgtttctcacatctttacaggcct

SEQ ID NO: 923100 - DNA, 33 bp, Homo sapien
agggaaggctgtttctgacatctttacaggcct

SEQ ID NO: 923101 - DNA, 33 bp, Homo sapien
tgcctccctgatgcagccctagattccctagaa

SEQ ID NO: 923102 - DNA, 33 bp, Homo sapien
tgcctccctgatgcaggcctagattccctagaa

SEQ ID NO: 923103 - DNA, 33 bp, Homo sapien
aaagttttacacttaacaggcatgcaaccaaca

SEQ ID NO: 923104 - DNA, 33 bp, Homo sapien
aaagttttacacttaagaggcatgcaaccaaca

SEQ ID NO: 923105 - DNA, 33 bp, Homo sapien
tgcttatagtcatcaaacgtatacctcagaagt

SEQ ID NO: 923106 - DNA, 33 bp, Homo sapien
tgcttatagtcatcaatcgtatacctcagaagt

SEQ ID NO: 923107 - DNA, 33 bp, Homo sapien
tgacaaaccgctttcacagacattgtcctattt

SEQ ID NO: 923108 - DNA, 33 bp, Homo sapien
tgacaaaccgctttcagagacattgtcctattt

SEQ ID NO: 923109 - DNA, 33 bp, Homo sapien
tgattaatgaaatctccgactctagctaaagcg

SEQ ID NO: 923110 - DNA, 33 bp, Homo sapien
tgattaatgaaatctctgactctagctaaagcg

SEQ ID NO: 923111 - DNA, 33 bp, Homo sapien
tcattaatcactccacggccttcataacctaag

SEQ ID NO: 923112 - DNA, 33 bp, Homo sapien
tcattaatcactccactgccttcataacctaag

SEQ ID NO: 923113 - DNA, 33 bp, Homo sapien
tttgtttgaaaactcacgatttgttctttttgg

SEQ ID NO: 923114 - DNA, 33 bp, Homo sapien
tttgtttgaaaactcatgatttgttctttttgg

SEQ ID NO: 923115 - DNA, 33 bp, Homo sapien
acctagactgttcgccaaggaggcagaaggaac

SEQ ID NO: 923116 - DNA, 33 bp, Homo sapien
acctagactgttcgccgaggaggcagaaggaac

SEQ ID NO: 923117 - DNA, 33 bp, Homo sapien
ccacgcccagcctaaaatcttgataagcaaaaa

SEQ ID NO: 923118 - DNA, 33 bp, Homo sapien
ccacgcccagcctaaagtcttgataagcaaaaa

SEQ ID NO: 923119 - DNA, 33 bp, Homo sapien
gaaacacatattctcaaacaaaacgctaaattc

SEQ ID NO: 923120 - DNA, 33 bp, Homo sapien
gaaacacatattctcacacaaaacgctaaattc

SEQ ID NO: 923121 - DNA, 33 bp, Homo sapien
acaatctgtttagtcacctgcatcaatgatctt

SEQ ID NO: 923122 - DNA, 33 bp, Homo sapien
acaatctgtttagtcatctgcatcaatgatctt

SEQ ID NO: 923123 - DNA, 33 bp, Homo sapien
ggtctgagttttcataaactggagcttcacaaa

SEQ ID NO: 923124 - DNA, 33 bp, Homo sapien
ggtctgagttttcatagactggagcttcacaaa

SEQ ID NO: 923125 - DNA, 33 bp, Homo sapien
aattctacaaaactatcaatgaggctattctaa

SEQ ID NO: 923126 - DNA, 33 bp, Homo sapien
aattctacaaaactatgaatgaggctattctaa

SEQ ID NO: 923127 - DNA, 33 bp, Homo sapien
ccaagatccatcaacaagttgtcttttagatgc

SEQ ID NO: 923128 - DNA, 33 bp, Homo sapien
ccaagatccatcaacaggttgtcttttagatgc

SEQ ID NO: 923129 - DNA, 33 bp, Homo sapien
gtaaaatggaattctccaaaatactttctcgga

SEQ ID NO: 923130 - DNA, 33 bp, Homo sapien
gtaaaatggaattctctaaaatactttctcgga

SEQ ID NO: 923131 - DNA, 33 bp, Homo sapien
cagtgttttttactgaagtcaaatcaggtcaga

SEQ ID NO: 923132 - DNA, 33 bp, Homo sapien
cagtgttttttactgaggtcaaatcaggtcaga

SEQ ID NO: 923133 - DNA, 33 bp, Homo sapien
atcttgtgaccacacacggacaaatcttcaata

SEQ ID NO: 923134 - DNA, 33 bp, Homo sapien
atcttgtgaccacacatggacaaatcttcaata

SEQ ID NO: 923135 - DNA, 33 bp, Homo sapien
actattctggctggtacataaaacaaagcaatg

SEQ ID NO: 923136 - DNA, 33 bp, Homo sapien
actattctggctggtatataaaacaaagcaatg

SEQ ID NO: 923137 - DNA, 33 bp, Homo sapien
agcctggatgatcagcacattccgaggtttagg

SEQ ID NO: 923138 - DNA, 33 bp, Homo sapien
agcctggatgatcagcgcattccgaggtttagg

SEQ ID NO: 923139 - DNA, 33 bp, Homo sapien
ctctctagagtatacaaatctcatcaaaactgt

SEQ ID NO: 923140 - DNA, 33 bp, Homo sapien
ctctctagagtatacacatctcatcaaaactgt

SEQ ID NO: 923141 - DNA, 33 bp, Homo sapien
tgactcagggagaaaaggagatggctctatctt

SEQ ID NO: 923142 - DNA, 33 bp, Homo sapien
tgactcagggagaaaatgagatggctctatctt

SEQ ID NO: 923143 - DNA, 33 bp, Homo sapien
atgacctgggatcaccaaagagttcccagaaag

SEQ ID NO: 923144 - DNA, 33 bp, Homo sapien
atgacctgggatcaccgaagagttcccagaaag

SEQ ID NO: 923145 - DNA, 33 bp, Homo sapien
cagcatgatatcaggtgaattcagtaagggaat

SEQ ID NO: 923146 - DNA, 33 bp, Homo sapien
cagcatgatatcaggttaattcagtaagggaat

SEQ ID NO: 923147 - DNA, 33 bp, Homo sapien
cagctggaatttaggcgcagtctgaattaatgg

SEQ ID NO: 923148 - DNA, 33 bp, Homo sapien
cagctggaatttaggctcagtctgaattaatgg

SEQ ID NO: 923149 - DNA, 33 bp, Homo sapien
acaagtcagaaagtccaagcatattatagatgg

SEQ ID NO: 923150 - DNA, 33 bp, Homo sapien
acaagtcagaaagtccgagcatattatagatgg

SEQ ID NO: 923151 - DNA, 33 bp, Homo sapien; identical to SEQ ID NO: 923149

SEQ ID NO: 923152 - DNA, 33 bp, Homo sapien; identical to SEQ ID NO: 923150

SEQ ID NO: 923153 - DNA, 33 bp, Homo sapien
tgggcacaaacaaatacaatcctattgcacact

SEQ ID NO: 923154 - DNA, 33 bp, Homo sapien
tgggcacaaacaaatataatcctattgcacact

SEQ ID NO: 923155 - DNA, 33 bp, Homo sapien
tccgttaacgacagccggaatccctatcctctt

SEQ ID NO: 923156 - DNA, 33 bp, Homo sapien
tccgttaacgacagcctgaatccctatcctctt

SEQ ID NO: 923157 - DNA, 33 bp, Homo sapien
gcttgctttggtgaaaaaaattaagacaaagac

SEQ ID NO: 923158 - DNA, 33 bp, Homo sapien
gcttgctttggtgaaagaaattaagacaaagac

SEQ ID NO: 923159 - DNA, 33 bp, Homo sapien
ctctaagttgataagacgaagatttgttgacct

SEQ ID NO: 923160 - DNA, 33 bp, Homo sapien
ctctaagttgataagatgaagatttgttgacct

SEQ ID NO: 923161 - DNA, 33 bp, Homo sapien
gaaaaggtaccacataaactgtacatcacatgt

SEQ ID NO: 923162 - DNA, 33 bp, Homo sapien
gaaaaggtaccacatacactgtacatcacatgt

SEQ ID NO: 923163 - DNA, 33 bp, Homo sapien
ttcaggcgtaaaattacctgcaatttgtgagca

SEQ ID NO: 923164 - DNA, 33 bp, Homo sapien
ttcaggcgtaaaattatctgcaatttgtgagca

SEQ ID NO: 923165 - DNA, 33 bp, Homo sapien
cgtgaggagatgttgcaatgagcacgggtcggt

SEQ ID NO: 923166 - DNA, 33 bp, Homo sapien
cgtgaggagatgttgcgatgagcacgggtcggt

SEQ ID NO: 923167 - DNA, 33 bp, Homo sapien
cagttccaagtgtcaaaaggattttcatcactc

SEQ ID NO: 923168 - DNA, 33 bp, Homo sapien
cagttccaagtgtcaagaggattttcatcactc

SEQ ID NO: 923169 - DNA, 33 bp, Homo sapien
agatgtgcttagggcaatcacagaactccgtct

SEQ ID NO: 923170 - DNA, 33 bp, Homo sapien
agatgtgcttagggcagtcacagaactccgtct

SEQ ID NO: 923171 - DNA, 33 bp, Homo sapien
taaaaatgtagaaaagaaaacgttgcctacttg

SEQ ID NO: 923172 - DNA, 33 bp, Homo sapien
taaaaatgtagaaaagtaaacgttgcctacttg

SEQ ID NO: 923173 - DNA, 33 bp, Homo sapien
attctaaaaatccaaaaagacaggaaagaggga

SEQ ID NO: 923174 - DNA, 33 bp, Homo sapien
attctaaaaatccaaagagacaggaaagaggga

SEQ ID NO: 923175 - DNA, 33 bp, Homo sapien
cttggtatattacaccactaggacgtccaatac

SEQ ID NO: 923176 - DNA, 33 bp, Homo sapien
cttggtatattacaccgctaggacgtccaatac

SEQ ID NO: 923177 - DNA, 33 bp, Homo sapien
gattcaagaagagacacaaaacctgaacagcct

SEQ ID NO: 923178 - DNA, 33 bp, Homo sapien
gattcaagaagagacataaaacctgaacagcct

SEQ ID NO: 923179 - DNA, 33 bp, Homo sapien
gttctgttagtccagcactctatcctctaacat

SEQ ID NO: 923180 - DNA, 33 bp, Homo sapien
gttctgttagtccagcgctctatcctctaacat

SEQ ID NO: 923181 - DNA, 33 bp, Homo sapien
accaaaagtgtgaaataaatcaacgaatttgtt

SEQ ID NO: 923182 - DNA, 33 bp, Homo sapien
accaaaagtgtgaaatgaatcaacgaatttgtt

SEQ ID NO: 923183 - DNA, 33 bp, Homo sapien
agaaactattctgatacggcttattttccagtg

SEQ ID NO: 923184 - DNA, 33 bp, Homo sapien
agaaactattctgatatggcttattttccagtg

SEQ ID NO: 923185 - DNA, 33 bp, Homo sapien
ttgctataccctcaaccaagctctgcatttaaa

SEQ ID NO: 923186 - DNA, 33 bp, Homo sapien
ttgctataccctcaactaagctctgcatttaaa

SEQ ID NO: 923187 - DNA, 33 bp, Homo sapien
agtgctctcctataaggatgccggacacaaaag

SEQ ID NO: 923188 - DNA, 33 bp, Homo sapien
agtgctctcctataagtatgccggacacaaaag

SEQ ID NO: 923189 - DNA, 33 bp, Homo sapien
agctatcttaagctcaagttccaggtacaaagt

SEQ ID NO: 923190 - DNA, 33 bp, Homo sapien
agctatcttaagctcaggttccaggtacaaagt

SEQ ID NO: 923191 - DNA, 33 bp, Homo sapien
cactcatatcttgtacaacttagaaatggatag

SEQ ID NO: 923192 - DNA, 33 bp, Homo sapien
cactcatatcttgtaccacttagaaatggatag

SEQ ID NO: 923193 - DNA, 33 bp, Homo sapien
aaaagagcaaatactgaaaaaaaaagagtacat

SEQ ID NO: 923194 - DNA, 33 bp, Homo sapien
aaaagagcaaatactggaaaaaaaagagtacat

SEQ ID NO: 923195 - DNA, 33 bp, Homo sapien
aaagacttacaaacaaatgcttatagagccttt

SEQ ID NO: 923196 - DNA, 33 bp, Homo sapien
aaagacttacaaacaagtgcttatagagccttt

SEQ ID NO: 923197 - DNA, 33 bp, Homo sapien
tcctctcaaccatgaacgcctatactgtgttgg

SEQ ID NO: 923198 - DNA, 33 bp, Homo sapien
tcctctcaaccatgaatgcctatactgtgttgg

SEQ ID NO: 923199 - DNA, 33 bp, Homo sapien
tttcccctttctaatacccctctcaataacctc

SEQ ID NO: 923200 - DNA, 33 bp, Homo sapien
tttcccctttctaatatccctctcaataacctc

SEQ ID NO: 923201 - DNA, 33 bp, Homo sapien
cagcagagcccaagataaagattttcaagtgaa

SEQ ID NO: 923202 - DNA, 33 bp, Homo sapien
cagcagagcccaagatgaagattttcaagtgaa

SEQ ID NO: 923203 - DNA, 33 bp, Homo sapien
tatttgtgccacattgaagacactgcctatcta

SEQ ID NO: 923204 - DNA, 33 bp, Homo sapien
tatttgtgccacattggagacactgcctatcta

SEQ ID NO: 923205 - DNA, 33 bp, Homo sapien
tactctagaaactgacaccctgacacctgggtg

SEQ ID NO: 923206 - DNA, 33 bp, Homo sapien
tactctagaaactgacgccctgacacctgggtg

SEQ ID NO: 923207 - DNA, 33 bp, Homo sapien
gaactaaggcttacctgacattgaccaggggca

SEQ ID NO: 923208 - DNA, 33 bp, Homo sapien
gaactaaggcttaccttacattgaccaggggca

SEQ ID NO: 923209 - DNA, 33 bp, Homo sapien
gtgcaaagtatttagcacagttcctgatacata

SEQ ID NO: 923210 - DNA, 33 bp, Homo sapien
gtgcaaagtatttagcccagttcctgatacata

SEQ ID NO: 923211 - DNA, 33 bp, Homo sapien
caaacatttgtaaaacagggtgttcagcctctt

SEQ ID NO: 923212 - DNA, 33 bp, Homo sapien
caaacatttgtaaaacggggtgttcagcctctt

SEQ ID NO: 923213 - DNA, 33 bp, Homo sapien
gagggaaaagttgaaacacacactgaactaaag

SEQ ID NO: 923214 - DNA, 33 bp, Homo sapien
gagggaaaagttgaaagacacactgaactaaag

SEQ ID NO: 923215 - DNA, 33 bp, Homo sapien
ttgccaagctcatactcacttagcaataaagat

SEQ ID NO: 923216 - DNA, 33 bp, Homo sapien
ttgccaagctcatacttacttagcaataaagat

SEQ ID NO: 923217 - DNA, 33 bp, Homo sapien
gacagagcagtgaaaaaaagaggccaactctct

SEQ ID NO: 923218 - DNA, 33 bp, Homo sapien
gacagagcagtgaaaacaagaggccaactctct

SEQ ID NO: 923219 - DNA, 33 bp, Homo sapien
tagcaatacttgatgtaacagatatggtaatca

SEQ ID NO: 923220 - DNA, 33 bp, Homo sapien
tagcaatacttgatgttacagatatggtaatca

SEQ ID NO: 923221 - DNA, 33 bp, Homo sapien
cttattgaaacacagaactctctaactaactgg

SEQ ID NO: 923222 - DNA, 33 bp, Homo sapien
cttattgaaacacagagctctctaactaactgg

SEQ ID NO: 923223 - DNA, 33 bp, Homo sapien
atgatgtccaccgacactggtgagagtagatgt

SEQ ID NO: 923224 - DNA, 33 bp, Homo sapien
atgatgtccaccgacattggtgagagtagatgt

SEQ ID NO: 923225 - DNA, 33 bp, Homo sapien
attaatgtgagtaaaaactctcttgtgtaaatc

SEQ ID NO: 923226 - DNA, 33 bp, Homo sapien
attaatgtgagtaaaatctctcttgtgtaaatc

SEQ ID NO: 923227 - DNA, 33 bp, Homo sapien
gaatttttagagcctgacagagaagttaggagg

SEQ ID NO: 923228 - DNA, 33 bp, Homo sapien
gaatttttagagcctggcagagaagttaggagg

SEQ ID NO: 923229 - DNA, 33 bp, Homo sapien
tgagcaggacctcatcaaagtgcagtggtagac

SEQ ID NO: 923230 - DNA, 33 bp, Homo sapien
tgagcaggacctcatcgaagtgcagtggtagac

SEQ ID NO: 923231 - DNA, 33 bp, Homo sapien
atacatatgtaacaagcctacacattgtgcacg

SEQ ID NO: 923232 - DNA, 33 bp, Homo sapien
atacatatgtaacaaggctacacattgtgcacg

SEQ ID NO: 923233 - DNA, 33 bp, Homo sapien
acaaaatggatagtccactagcaagaccagtaa

SEQ ID NO: 923234 - DNA, 33 bp, Homo sapien
acaaaatggatagtccgctagcaagaccagtaa

SEQ ID NO: 923235 - DNA, 33 bp, Homo sapien
gttcttcttcatttcaatctcagaggataactt

SEQ ID NO: 923236 - DNA, 33 bp, Homo sapien
gttcttcttcatttcagtctcagaggataactt

SEQ ID NO: 923237 - DNA, 33 bp, Homo sapien
gtcagagaagatgctacgctgatggctttgaaa

SEQ ID NO: 923238 - DNA, 33 bp, Homo sapien
gtcagagaagatgctatgctgatggctttgaaa

SEQ ID NO: 923239 - DNA, 33 bp, Homo sapien
acttgcattacaaatggacttttcttattttgt

SEQ ID NO: 923240 - DNA, 33 bp, Homo sapien
acttgcattacaaatgtacttttcttattttgt

SEQ ID NO: 923241 - DNA, 33 bp, Homo sapien
ccacaacttctgatacccagccttatgttcttg

SEQ ID NO: 923242 - DNA, 33 bp, Homo sapien
ccacaacttctgatactcagccttatgttcttg

SEQ ID NO: 923243 - DNA, 33 bp, Homo sapien
ctttctacagctcctagatctgataaacaactt

SEQ ID NO: 923244 - DNA, 33 bp, Homo sapien
ctttctacagctcctatatctgataaacaactt

SEQ ID NO: 923245 - DNA, 33 bp, Homo sapien
gatggatagcatttgaaagaccaaacaatacca

SEQ ID NO: 923246 - DNA, 33 bp, Homo sapien
gatggatagcatttgagagaccaaacaatacca

SEQ ID NO: 923247 - DNA, 33 bp, Homo sapien
aggaagcctggaaagaatcaattctgcaagtag

SEQ ID NO: 923248 - DNA, 33 bp, Homo sapien
aggaagcctggaaagagtcaattctgcaagtag

SEQ ID NO: 923249 - DNA, 33 bp, Homo sapien
ggtaggaatcttccaaactggacattgattacc

SEQ ID NO: 923250 - DNA, 33 bp, Homo sapien
ggtaggaatcttccaacctggacattgattacc

SEQ ID NO: 923251 - DNA, 33 bp, Homo sapien
ctagtcctcctggcaggatttgcctcctaactc

SEQ ID NO: 923252 - DNA, 33 bp, Homo sapien
ctagtcctcctggcagtatttgcctcctaactc

SEQ ID NO: 923253 - DNA, 33 bp, Homo sapien
atttcctacttgctaagaaatggtgtggtctgt

SEQ ID NO: 923254 - DNA, 33 bp, Homo sapien
atttcctacttgctaataaatggtgtggtctgt

SEQ ID NO: 923255 - DNA, 33 bp, Homo sapien
ataaagaagctaacacggtcatggctcctagct

SEQ ID NO: 923256 - DNA, 33 bp, Homo sapien
ataaagaagctaacactgtcatggctcctagct

SEQ ID NO: 923257 - DNA, 33 bp, Homo sapien
gcaaacaaataacaaaccttaggcaaccaagaa

SEQ ID NO: 923258 - DNA, 33 bp, Homo sapien
gcaaacaaataacaaatcttaggcaaccaagaa

SEQ ID NO: 923259 - DNA, 33 bp, Homo sapien
accatagaattgcctacgtacacttttgggcac

SEQ ID NO: 923260 - DNA, 33 bp, Homo sapien
accatagaattgcctatgtacacttttgggcac

SEQ ID NO: 923261 - DNA, 33 bp, Homo sapien
ctgtctactccaaattaaattccaaatggaaaa

SEQ ID NO: 923262 - DNA, 33 bp, Homo sapien
ctgtctactccaaattgaattccaaatggaaaa

SEQ ID NO: 923263 - DNA, 33 bp, Homo sapien
gctgatagttcttgagacatgacaaatagcaag

SEQ ID NO: 923264 - DNA, 33 bp, Homo sapien
gctgatagttcttgaggcatgacaaatagcaag

SEQ ID NO: 923265 - DNA, 33 bp, Homo sapien
gttatgattctgcctaagttttgaaggtagaga

SEQ ID NO: 923266 - DNA, 33 bp, Homo sapien
gttatgattctgcctatgttttgaaggtagaga

SEQ ID NO: 923267 - DNA, 33 bp, Homo sapien
attttcagttgcaacaatagttattaagtagag

SEQ ID NO: 923268 - DNA, 33 bp, Homo sapien
attttcagttgcaacagtagttattaagtagag

SEQ ID NO: 923269 - DNA, 33 bp, Homo sapien
agaatcctggaagagcactattgtgaaaaaaac

SEQ ID NO: 923270 - DNA, 33 bp, Homo sapien
agaatcctggaagagcgctattgtgaaaaaaac

SEQ ID NO: 923271 - DNA, 33 bp, Homo sapien
cttctttatatcaggcgataggataatttcaga

SEQ ID NO: 923272 - DNA, 33 bp, Homo sapien
cttctttatatcaggctataggataatttcaga

SEQ ID NO: 923273 - DNA, 33 bp, Homo sapien
ttccccaaaactgagaccaaacgcgaaaattaa

SEQ ID NO: 923274 - DNA, 33 bp, Homo sapien
ttccccaaaactgagatcaaacgcgaaaattaa

SEQ ID NO: 923275 - DNA, 33 bp, Homo sapien
tgaagccctcttttctcaattatttatacaggc

SEQ ID NO: 923276 - DNA, 33 bp, Homo sapien
tgaagccctcttttctgaattatttatacaggc

SEQ ID NO: 923277 - DNA, 33 bp, Homo sapien
gagttatgattttttacagaaacctatcaaata

SEQ ID NO: 923278 - DNA, 33 bp, Homo sapien
gagttatgattttttatagaaacctatcaaata

SEQ ID NO: 923279 - DNA, 33 bp, Homo sapien
aagaaacatcaaagtcaaacttctgaaaactag

SEQ ID NO: 923280 - DNA, 33 bp, Homo sapien
aagaaacatcaaagtcgaacttctgaaaactag

SEQ ID NO: 923281 - DNA, 33 bp, Homo sapien
atccaagagtaccacaataggtaggaatgttgt

SEQ ID NO: 923282 - DNA, 33 bp, Homo sapien
atccaagagtaccacagtaggtaggaatgttgt

SEQ ID NO: 923283 - DNA, 33 bp, Homo sapien
ggatgtctagtctttaccaggcactgtctttga

SEQ ID NO: 923284 - DNA, 33 bp, Homo sapien
ggatgtctagtctttagcaggcactgtctttga

SEQ ID NO: 923285 - DNA, 33 bp, Homo sapien
gttgattctgtcaaccacaaaataaaatgtacg

SEQ ID NO: 923286 - DNA, 33 bp, Homo sapien
gttgattctgtcaacctcaaaataaaatgtacg

SEQ ID NO: 923287 - DNA, 33 bp, Homo sapien
tgctggaaagagaagtgaaataacatgaggatt

SEQ ID NO: 923288 - DNA, 33 bp, Homo sapien
tgctggaaagagaagttaaataacatgaggatt

SEQ ID NO: 923289 - DNA, 33 bp, Homo sapien
tatcatttttcagatacgtgactcaagttacca

SEQ ID NO: 923290 - DNA, 33 bp, Homo sapien
tatcatttttcagatatgtgactcaagttacca

SEQ ID NO: 923291 - DNA, 33 bp, Homo sapien
tgagcctgaacctcaacataattaaaaccacag

SEQ ID NO: 923292 - DNA, 33 bp, Homo sapien
tgagcctgaacctcaagataattaaaaccacag

SEQ ID NO: 923293 - DNA, 33 bp, Homo sapien
taaaataaatgcctgcacgggtatggctagtcc

SEQ ID NO: 923294 - DNA, 33 bp, Homo sapien
taaaataaatgcctgcgcgggtatggctagtcc

SEQ ID NO: 923295 - DNA, 33 bp, Homo sapien
aaaagataaatcgatacgtgttggccagagttg

SEQ ID NO: 923296 - DNA, 33 bp, Homo sapien
aaaagataaatcgatatgtgttggccagagttg

SEQ ID NO: 923297 - DNA, 33 bp, Homo sapien
tgccaaattggctttacaatccatgcttgaaaa

SEQ ID NO: 923298 - DNA, 33 bp, Homo sapien
tgccaaattggctttataatccatgcttgaaaa

SEQ ID NO: 923299 - DNA, 33 bp, Homo sapien
gccaaagtcctggcaacggcctcagggcccgac

SEQ ID NO: 923300 - DNA, 33 bp, Homo sapien
gccaaagtcctggcaatggcctcagggcccgac

SEQ ID NO: 923301 - DNA, 33 bp, Homo sapien
catacaaatgtttatcaacctatcaaccttaca

SEQ ID NO: 923302 - DNA, 33 bp, Homo sapien
catacaaatgtttatcgacctatcaaccttaca

SEQ ID NO: 923303 - DNA, 33 bp, Homo sapien
tatttgggtcaacaaccgttagtattcatttgt

SEQ ID NO: 923304 - DNA, 33 bp, Homo sapien
tatttgggtcaacaactgttagtattcatttgt

SEQ ID NO: 923305 - DNA, 33 bp, Homo sapien
tatgtagaaataatgacagtcctagctacccat

SEQ ID NO: 923306 - DNA, 33 bp, Homo sapien
tatgtagaaataatgagagtcctagctacccat

SEQ ID NO: 923307 - DNA, 33 bp, Homo sapien
ggaaaattgtcagtaacccaaaccaagaacaaa

SEQ ID NO: 923308 - DNA, 33 bp, Homo sapien
ggaaaattgtcagtaatccaaaccaagaacaaa

SEQ ID NO: 923309 - DNA, 33 bp, Homo sapien
gttagatctggagtaggaagactcgaggttcct

SEQ ID NO: 923310 - DNA, 33 bp, Homo sapien
gttagatctggagtagtaagactcgaggttcct

SEQ ID NO: 923311 - DNA, 33 bp, Homo sapien
ttccctttcttttatcacatgcttgggtctgtc

SEQ ID NO: 923312 - DNA, 33 bp, Homo sapien
ttccctttcttttatcgcatgcttgggtctgtc

SEQ ID NO: 923313 - DNA, 33 bp, Homo sapien
atcttttcttggctacagagattaaaaagaaaa

SEQ ID NO: 923314 - DNA, 33 bp, Homo sapien
atcttttcttggctacggagattaaaaagaaaa

SEQ ID NO: 923315 - DNA, 33 bp, Homo sapien
ctgtatgtaaactgataagcctcatgcagacgc

SEQ ID NO: 923316 - DNA, 33 bp, Homo sapien
ctgtatgtaaactgatgagcctcatgcagacgc

SEQ ID NO: 923317 - DNA, 33 bp, Homo sapien
aaacaaaattctaaaacggatgatttgtaggca

SEQ ID NO: 923318 - DNA, 33 bp, Homo sapien
aaacaaaattctaaaatggatgatttgtaggca

SEQ ID NO: 923319 - DNA, 33 bp, Homo sapien
aacatttactgctacccatctactagcttggaa

SEQ ID NO: 923320 - DNA, 33 bp, Homo sapien
aacatttactgctacctatctactagcttggaa

SEQ ID NO: 923321 - DNA, 33 bp, Homo sapien
aggaggaattcgccctcaacttgcttgccgcct

SEQ ID NO: 923322 - DNA, 33 bp, Homo sapien
aggaggaattcgcccttaacttgcttgccgcct

SEQ ID NO: 923323 - DNA, 33 bp, Homo sapien
gagagagacagagagaaagaggttgattttgaa

SEQ ID NO: 923324 - DNA, 33 bp, Homo sapien
gagagagacagagagagagaggttgattttgaa

SEQ ID NO: 923325 - DNA, 33 bp, Homo sapien
gctataagggaatacacgacactgggtaattta

SEQ ID NO: 923326 - DNA, 33 bp, Homo sapien
gctataagggaatacatgacactgggtaattta

SEQ ID NO: 923327 - DNA, 33 bp, Homo sapien
gaagttgatgggaggaagtagttttagacagga

SEQ ID NO: 923328 - DNA, 33 bp, Homo sapien
gaagttgatgggaggatgtagttttagacagga

SEQ ID NO: 923329 - DNA, 33 bp, Homo sapien
ccacccccagaggccaacactgatttttatcct

SEQ ID NO: 923330 - DNA, 33 bp, Homo sapien
ccacccccagaggccatcactgatttttatcct

SEQ ID NO: 923331 - DNA, 33 bp, Homo sapien
gtcagtcattacaaacactcctttacctactgc

SEQ ID NO: 923332 - DNA, 33 bp, Homo sapien
gtcagtcattacaaacgctcctttacctactgc

SEQ ID NO: 923333 - DNA, 33 bp, Homo sapien
ccactaacaggtagaaatagatgtcaaggctat

SEQ ID NO: 923334 - DNA, 33 bp, Homo sapien
ccactaacaggtagaactagatgtcaaggctat

SEQ ID NO: 923335 - DNA, 33 bp, Homo sapien
catctggctcaaaccaagattccttttgtcttc

SEQ ID NO: 923336 - DNA, 33 bp, Homo sapien
catctggctcaaaccaggattccttttgtcttc

SEQ ID NO: 923337 - DNA, 33 bp, Homo sapien
gatgaagttgtggaaacaagacacttgagacta

SEQ ID NO: 923338 - DNA, 33 bp, Homo sapien
gatgaagttgtggaaataagacacttgagacta

SEQ ID NO: 923339 - DNA, 33 bp, Homo sapien
ctcatagacactcaacacttcctcatacaccat

SEQ ID NO: 923340 - DNA, 33 bp, Homo sapien
ctcatagacactcaacgcttcctcatacaccat

SEQ ID NO: 923341 - DNA, 33 bp, Homo sapien; identical to SEQ ID NO: 923339

SEQ ID NO: 923342 - DNA, 33 bp, Homo sapien; identical to SEQ ID NO: 923340

SEQ ID NO: 923343 - DNA, 33 bp, Homo sapien
atgaggcctttgagaaattattaagtcatgggg

SEQ ID NO: 923344 - DNA, 33 bp, Homo sapien
atgaggcctttgagaagttattaagtcatgggg

SEQ ID NO: 923345 - DNA, 33 bp, Homo sapien
taagtgaatggatatacgtaaagcttgtagaac

SEQ ID NO: 923346 - DNA, 33 bp, Homo sapien
taagtgaatggatatatgtaaagcttgtagaac

SEQ ID NO: 923347 - DNA, 33 bp, Homo sapien
accatgattctgttgcacaaagaaaaaaccaca

SEQ ID NO: 923348 - DNA, 33 bp, Homo sapien
accatgattctgttgcgcaaagaaaaaaccaca

SEQ ID NO: 923349 - DNA, 33 bp, Homo sapien
atctgtattcttaacaatctctctcggtaattc

SEQ ID NO: 923350 - DNA, 33 bp, Homo sapien
atctgtattcttaacagtctctctcggtaattc

SEQ ID NO: 923351 - DNA, 33 bp, Homo sapien
ctgcctcctcttcaaaccttgcaatgtgaaact

SEQ ID NO: 923352 - DNA, 33 bp, Homo sapien
ctgcctcctcttcaaatcttgcaatgtgaaact

SEQ ID NO: 923353 - DNA, 33 bp, Homo sapien
aaaggatgcctctacacggaggaagtatccaca

SEQ ID NO: 923354 - DNA, 33 bp, Homo sapien
aaaggatgcctctacatggaggaagtatccaca

SEQ ID NO: 923355 - DNA, 33 bp, Homo sapien
ggcatttgatgacaaccgaatggagtgcctgtg

SEQ ID NO: 923356 - DNA, 33 bp, Homo sapien
ggcatttgatgacaactgaatggagtgcctgtg

SEQ ID NO: 923357 - DNA, 33 bp, Homo sapien
cttatattttaggtgaagattcagtgaatcaca

SEQ ID NO: 923358 - DNA, 33 bp, Homo sapien
cttatattttaggtgacgattcagtgaatcaca

SEQ ID NO: 923359 - DNA, 33 bp, Homo sapien
caaacagatgaaccccactgacaggagagaaga

SEQ ID NO: 923360 - DNA, 33 bp, Homo sapien
caaacagatgaaccccgctgacaggagagaaga

SEQ ID NO: 923361 - DNA, 33 bp, Homo sapien
aaactcaagtttctccactacaaagcccatcct

SEQ ID NO: 923362 - DNA, 33 bp, Homo sapien
aaactcaagtttctccgctacaaagcccatcct

SEQ ID NO: 923363 - DNA, 33 bp, Homo sapien
tggaagaatgtcagatcacaaggtctctgtggt

SEQ ID NO: 923364 - DNA, 33 bp, Homo sapien
tggaagaatgtcagattacaaggtctctgtggt

SEQ ID NO: 923365 - DNA, 33 bp, Homo sapien
tcccccatgttaactcacagttgcagccatgtt

SEQ ID NO: 923366 - DNA, 33 bp, Homo sapien
tcccccatgttaactcccagttgcagccatgtt

SEQ ID NO: 923367 - DNA, 33 bp, Homo sapien; identical to SEQ ID NO: 923365

SEQ ID NO: 923368 - DNA, 33 bp, Homo sapien; identical to SEQ ID NO: 923366

SEQ ID NO: 923369 - DNA, 33 bp, Homo sapien
actaggaacacaagacagattgtgatgtgttat

SEQ ID NO: 923370 - DNA, 33 bp, Homo sapien
actaggaacacaagaccgattgtgatgtgttat

SEQ ID NO: 923371 - DNA, 33 bp, Homo sapien
agaaatgtaaatccacaggtaatatgaaagaat

SEQ ID NO: 923372 - DNA, 33 bp, Homo sapien
agaaatgtaaatccacgggtaatatgaaagaat

SEQ ID NO: 923373 - DNA, 33 bp, Homo sapien
ggtcaaatggtagttccagcttaagttctttga

SEQ ID NO: 923374 - DNA, 33 bp, Homo sapien
ggtcaaatggtagttctagcttaagttctttga

SEQ ID NO: 923375 - DNA, 33 bp, Homo sapien
taccagtgctaatggaggatatttgtcacagac

SEQ ID NO: 923376 - DNA, 33 bp, Homo sapien
taccagtgctaatggatgatatttgtcacagac

SEQ ID NO: 923377 - DNA, 33 bp, Homo sapien
taaagccaagtttagcactccctgtctctcact

SEQ ID NO: 923378 - DNA, 33 bp, Homo sapien
taaagccaagtttagcgctccctgtctctcact

SEQ ID NO: 923379 - DNA, 33 bp, Homo sapien
ttgcattttccaagaccactttggcccaccatg

SEQ ID NO: 923380 - DNA, 33 bp, Homo sapien
ttgcattttccaagacgactttggcccaccatg

SEQ ID NO: 923381 - DNA, 33 bp, Homo sapien
tttggaagcagtaacagagactataaaattaaa

SEQ ID NO: 923382 - DNA, 33 bp, Homo sapien
tttggaagcagtaacatagactataaaattaaa

SEQ ID NO: 923383 - DNA, 33 bp, Homo sapien
tgtgtgcattttagaactcttcccaggtgatgt

SEQ ID NO: 923384 - DNA, 33 bp, Homo sapien
tgtgtgcattttagaagtcttcccaggtgatgt

SEQ ID NO: 923385 - DNA, 33 bp, Homo sapien
agtttggaagttggaaatgtctctttttgtgct

SEQ ID NO: 923386 - DNA, 33 bp, Homo sapien
agtttggaagttggaagtgtctctttttgtgct

SEQ ID NO: 923387 - DNA, 33 bp, Homo sapien
aaattaattgcaataggccaaaaatggaaggaa

SEQ ID NO: 923388 - DNA, 33 bp, Homo sapien
aaattaattgcaatagtccaaaaatggaaggaa

SEQ ID NO: 923389 - DNA, 33 bp, Homo sapien
cagagcatctcaacgagggctgaagattagaat

SEQ ID NO: 923390 - DNA, 33 bp, Homo sapien
cagagcatctcaacgatggctgaagattagaat

SEQ ID NO: 923391 - DNA, 33 bp, Homo sapien
aaatatggccaaaataagatgcaaagcaggatt

SEQ ID NO: 923392 - DNA, 33 bp, Homo sapien
aaatatggccaaaataggatgcaaagcaggatt

SEQ ID NO: 923393 - DNA, 33 bp, Homo sapien
caagcccttccacatcaactggcaaaaccacca

SEQ ID NO: 923394 - DNA, 33 bp, Homo sapien
caagcccttccacatcgactggcaaaaccacca

SEQ ID NO: 923395 - DNA, 33 bp, Homo sapien
cactaggcacagcagtaaacacattatgccctt

SEQ ID NO: 923396 - DNA, 33 bp, Homo sapien
cactaggcacagcagtgaacacattatgccctt

SEQ ID NO: 923397 - DNA, 33 bp, Homo sapien
tgcctccatttcgttacgtgtacccagtagtca

SEQ ID NO: 923398 - DNA, 33 bp, Homo sapien
tgcctccatttcgttatgtgtacccagtagtca

SEQ ID NO: 923399 - DNA, 33 bp, Homo sapien
gcttagagagcctgacacttggtcctggatgca

SEQ ID NO: 923400 - DNA, 33 bp, Homo sapien
gcttagagagcctgacgcttggtcctggatgca

SEQ ID NO: 923401 - DNA, 33 bp, Homo sapien
acatccagtgtgtcagaacagcagttaggatta

SEQ ID NO: 923402 - DNA, 33 bp, Homo sapien
acatccagtgtgtcagtacagcagttaggatta

SEQ ID NO: 923403 - DNA, 33 bp, Homo sapien
gagcttaatgatgtaacgacttagggacgtagt

SEQ ID NO: 923404 - DNA, 33 bp, Homo sapien
gagcttaatgatgtaatgacttagggacgtagt

SEQ ID NO: 923405 - DNA, 33 bp, Homo sapien
atcaggaggcttacaaagtggaagatcttgaaa

SEQ ID NO: 923406 - DNA, 33 bp, Homo sapien
atcaggaggcttacaacgtggaagatcttgaaa

SEQ ID NO: 923407 - DNA, 33 bp, Homo sapien
tcttcctagccagtcacagttgtgtgcataatg

SEQ ID NO: 923408 - DNA, 33 bp, Homo sapien
tcttcctagccagtcatagttgtgtgcataatg

SEQ ID NO: 923409 - DNA, 33 bp, Homo sapien
gtatgtttagttgtaaaagacaccactaaacaa

SEQ ID NO: 923410 - DNA, 33 bp, Homo sapien
gtatgtttagttgtaagagacaccactaaacaa

SEQ ID NO: 923411 - DNA, 33 bp, Homo sapien
taatgtgtgacttccacaatgctatatacagta

SEQ ID NO: 923412 - DNA, 33 bp, Homo sapien
taatgtgtgacttccataatgctatatacagta

SEQ ID NO: 923413 - DNA, 33 bp, Homo sapien
atcccaccactttaatgacaggcagacaaagac

SEQ ID NO: 923414 - DNA, 33 bp, Homo sapien
atcccaccactttaattacaggcagacaaagac

SEQ ID NO: 923415 - DNA, 33 bp, Homo sapien
caccaagaaaggaacacactgcaacatatactg

SEQ ID NO: 923416 - DNA, 33 bp, Homo sapien
caccaagaaaggaacatactgcaacatatactg

SEQ ID NO: 923417 - DNA, 33 bp, Homo sapien
ttaattgctctttatccgacttaattgcactta

SEQ ID NO: 923418 - DNA, 33 bp, Homo sapien
ttaattgctctttatctgacttaattgcactta

SEQ ID NO: 923419 - DNA, 33 bp, Homo sapien
tcagtgattctcagtaactattttccagaagtt

SEQ ID NO: 923420 - DNA, 33 bp, Homo sapien
tcagtgattctcagtatctattttccagaagtt

SEQ ID NO: 923421 - DNA, 33 bp, Homo sapien
ccctgtagattattgaaagccaattatattaag

SEQ ID NO: 923422 - DNA, 33 bp, Homo sapien
ccctgtagattattgacagccaattatattaag

SEQ ID NO: 923423 - DNA, 33 bp, Homo sapien
actgcttttgctcatcaacttagaaaatgctag

SEQ ID NO: 923424 - DNA, 33 bp, Homo sapien
actgcttttgctcatcgacttagaaaatgctag

SEQ ID NO: 923425 - DNA, 33 bp, Homo sapien
ttgccataataagtcacagccatgagcacaact

SEQ ID NO: 923426 - DNA, 33 bp, Homo sapien
ttgccataataagtcatagccatgagcacaact

SEQ ID NO: 923427 - DNA, 33 bp, Homo sapien
tacctctttgcttccaatctagagaaggaaatg

SEQ ID NO: 923428 - DNA, 33 bp, Homo sapien
tacctctttgcttccagtctagagaaggaaatg

SEQ ID NO: 923429 - DNA, 33 bp, Homo sapien
taggtagctagtgacacggtaccaggaggagaa

SEQ ID NO: 923430 - DNA, 33 bp, Homo sapien
taggtagctagtgacatggtaccaggaggagaa

SEQ ID NO: 923431 - DNA, 33 bp, Homo sapien
ttgcacatcagggataggaaggtttggaatgaa

SEQ ID NO: 923432 - DNA, 33 bp, Homo sapien
ttgcacatcagggatatgaaggtttggaatgaa

SEQ ID NO: 923433 - DNA, 33 bp, Homo sapien
caccggactcagcaaaagctccttataaagttc

SEQ ID NO: 923434 - DNA, 33 bp, Homo sapien
caccggactcagcaaatgctccttataaagttc

SEQ ID NO: 923435 - DNA, 33 bp, Homo sapien
attctagcataaataacaaaaagagctcaagaa

SEQ ID NO: 923436 - DNA, 33 bp, Homo sapien
attctagcataaataagaaaaagagctcaagaa

SEQ ID NO: 923437 - DNA, 33 bp, Homo sapien
agctctgactggaaacaacctagaacaaggttt

SEQ ID NO: 923438 - DNA, 33 bp, Homo sapien
agctctgactggaaaccacctagaacaaggttt

SEQ ID NO: 923439 - DNA, 33 bp, Homo sapien
tactcataataagatcaaaagaaaacctgcatt

SEQ ID NO: 923440 - DNA, 33 bp, Homo sapien
tactcataataagatcgaaagaaaacctgcatt

SEQ ID NO: 923441 - DNA, 33 bp, Homo sapien
gaggataaactgaaaacgtagttagctaacatt

SEQ ID NO: 923442 - DNA, 33 bp, Homo sapien
gaggataaactgaaaatgtagttagctaacatt

SEQ ID NO: 923443 - DNA, 33 bp, Homo sapien
ctctcttttctctccacatataacttccctatg

SEQ ID NO: 923444 - DNA, 33 bp, Homo sapien
ctctcttttctctccatatataacttccctatg

SEQ ID NO: 923445 - DNA, 33 bp, Homo sapien
aataaaatcaaaggcagactttcttaatcagag

SEQ ID NO: 923446 - DNA, 33 bp, Homo sapien
aataaaatcaaaggcatactttcttaatcagag

SEQ ID NO: 923447 - DNA, 33 bp, Homo sapien
ttgtagctaaacagaacttaacctaatgggata

SEQ ID NO: 923448 - DNA, 33 bp, Homo sapien
ttgtagctaaacagaatttaacctaatgggata

SEQ ID NO: 923449 - DNA, 33 bp, Homo sapien
caagtgaacaaaatgaacaatgaaaaatactga

SEQ ID NO: 923450 - DNA, 33 bp, Homo sapien
caagtgaacaaaatgaccaatgaaaaatactga

SEQ ID NO: 923451 - DNA, 33 bp, Homo sapien
ctaacaagcataagaacagatactcaacaagag

SEQ ID NO: 923452 - DNA, 33 bp, Homo sapien
ctaacaagcataagaatagatactcaacaagag

SEQ ID NO: 923453 - DNA, 33 bp, Homo sapien
gtgagtaggtatattaccaatgatgagtaatag

SEQ ID NO: 923454 - DNA, 33 bp, Homo sapien
gtgagtaggtatattatcaatgatgagtaatag

SEQ ID NO: 923455 - DNA, 33 bp, Homo sapien
ttctttaatctgataacagtagcaagcaataaa

SEQ ID NO: 923456 - DNA, 33 bp, Homo sapien
ttctttaatctgataatagtagcaagcaataaa

SEQ ID NO: 923457 - DNA, 33 bp, Homo sapien
agtagactcagcttaaagaaaataacaggaaac

SEQ ID NO: 923458 - DNA, 33 bp, Homo sapien
agtagactcagcttaaggaaaataacaggaaac

SEQ ID NO: 923459 - DNA, 33 bp, Homo sapien
cttgccttttactggacgactattatcgaatag

SEQ ID NO: 923460 - DNA, 33 bp, Homo sapien
cttgccttttactggatgactattatcgaatag

SEQ ID NO: 923461 - DNA, 33 bp, Homo sapien
gagtgcagagtatttgcatttaatctaattttc

SEQ ID NO: 923462 - DNA, 33 bp, Homo sapien
gagtgcagagtatttgtatttaatctaattttc

SEQ ID NO: 923463 - DNA, 33 bp, Homo sapien
aggaacacagaccaaggaatttaacatatgcac

SEQ ID NO: 923464 - DNA, 33 bp, Homo sapien
aggaacacagaccaagtaatttaacatatgcac

SEQ ID NO: 923465 - DNA, 33 bp, Homo sapien
aaagcaagtctgcttgcattctatttgtctagg

SEQ ID NO: 923466 - DNA, 33 bp, Homo sapien
aaagcaagtctgcttgtattctatttgtctagg

SEQ ID NO: 923467 - DNA, 33 bp, Homo sapien
aagataaggggggaacaaatgtgtagcaaaatc

SEQ ID NO: 923468 - DNA, 33 bp, Homo sapien
aagataaggggggaacgaatgtgtagcaaaatc

SEQ ID NO: 923469 - DNA, 33 bp, Homo sapien
ccattggatctctgccacgcatatgtatgttaa

SEQ ID NO: 923470 - DNA, 33 bp, Homo sapien
ccattggatctctgccgcgcatatgtatgttaa

SEQ ID NO: 923471 - DNA, 33 bp, Homo sapien
gctcagtcctctgacaccgcaagttagtaaggc

SEQ ID NO: 923472 - DNA, 33 bp, Homo sapien
gctcagtcctctgacatcgcaagttagtaaggc

SEQ ID NO: 923473 - DNA, 33 bp, Homo sapien
aaaggaaatcccagacgagatgacttcacaggt

SEQ ID NO: 923474 - DNA, 33 bp, Homo sapien
aaaggaaatcccagactagatgacttcacaggt

SEQ ID NO: 923475 - DNA, 33 bp, Homo sapien
ccttgtagtataactaagagtccagtaatatga

SEQ ID NO: 923476 - DNA, 33 bp, Homo sapien
ccttgtagtataactaggagtccagtaatatga

SEQ ID NO: 923477 - DNA, 33 bp, Homo sapien
ttgacgcttaatctcactcccctgtgatgtgca

SEQ ID NO: 923478 - DNA, 33 bp, Homo sapien
ttgacgcttaatctcattcccctgtgatgtgca

SEQ ID NO: 923479 - DNA, 33 bp, Homo sapien
ttaataaacaattatacactgcaatgacagtga

SEQ ID NO: 923480 - DNA, 33 bp, Homo sapien
ttaataaacaattatatactgcaatgacagtga

SEQ ID NO: 923481 - DNA, 33 bp, Homo sapien
tataaaattaagaacagtacctatcaacagctc

SEQ ID NO: 923482 - DNA, 33 bp, Homo sapien
tataaaattaagaacattacctatcaacagctc

SEQ ID NO: 923483 - DNA, 33 bp, Homo sapien
ttctgtccaatatacacgtgctatgatttagac

SEQ ID NO: 923484 - DNA, 33 bp, Homo sapien
ttctgtccaatatacatgtgctatgatttagac

SEQ ID NO: 923485 - DNA, 33 bp, Homo sapien
ttgtaaactcatgagaacatgcagagtagaggg

SEQ ID NO: 923486 - DNA, 33 bp, Homo sapien
ttgtaaactcatgagagcatgcagagtagaggg

SEQ ID NO: 923487 - DNA, 33 bp, Homo sapien
ctttcactattttccaccttttcaaactgtgcg

SEQ ID NO: 923488 - DNA, 33 bp, Homo sapien
ctttcactattttccagcttttcaaactgtgcg

SEQ ID NO: 923489 - DNA, 33 bp, Homo sapien
cttgaactcgcttgaccaaaaaaggaaaaattt

SEQ ID NO: 923490 - DNA, 33 bp, Homo sapien
cttgaactcgcttgactaaaaaaggaaaaattt

SEQ ID NO: 923491 - DNA, 33 bp, Homo sapien
tcagacaaattcagaacgtgagaactttctttg

SEQ ID NO: 923492 - DNA, 33 bp, Homo sapien
tcagacaaattcagaatgtgagaactttctttg

SEQ ID NO: 923493 - DNA, 33 bp, Homo sapien
ttgttgtagctggtaaacattaaatttcagatt

SEQ ID NO: 923494 - DNA, 33 bp, Homo sapien
ttgttgtagctggtaatcattaaatttcagatt

SEQ ID NO: 923495 - DNA, 33 bp, Homo sapien
acaaacagaagaaaggaatggtcaagaaatttc

SEQ ID NO: 923496 - DNA, 33 bp, Homo sapien
acaaacagaagaaaggcatggtcaagaaatttc

SEQ ID NO: 923497 - DNA, 33 bp, Homo sapien
agatggaaccagtggagagagttgagcagtagg

SEQ ID NO: 923498 - DNA, 33 bp, Homo sapien
agatggaaccagtggatagagttgagcagtagg

SEQ ID NO: 923499 - DNA, 33 bp, Homo sapien
tttagctgtcatgccaatgcctctaaaaacttc

SEQ ID NO: 923500 - DNA, 33 bp, Homo sapien
tttagctgtcatgccagtgcctctaaaaacttc

SEQ ID NO: 923501 - DNA, 33 bp, Homo sapien
gagctggtgagactaacgtaccgtgtaaatgta

SEQ ID NO: 923502 - DNA, 33 bp, Homo sapien
gagctggtgagactaatgtaccgtgtaaatgta

SEQ ID NO: 923503 - DNA, 33 bp, Homo sapien
attgcctctgcctaacagcaagccatcatcatc

SEQ ID NO: 923504 - DNA, 33 bp, Homo sapien
attgcctctgcctaactgcaagccatcatcatc

SEQ ID NO: 923505 - DNA, 33 bp, Homo sapien
ttccaactgcagttaaaatcaaaccaccaagac

SEQ ID NO: 923506 - DNA, 33 bp, Homo sapien
ttccaactgcagttaagatcaaaccaccaagac

SEQ ID NO: 923507 - DNA, 33 bp, Homo sapien
atcggcagttgtatgacaggttggtagggggct

SEQ ID NO: 923508 - DNA, 33 bp, Homo sapien
atcggcagttgtatgataggttggtagggggct

SEQ ID NO: 923509 - DNA, 33 bp, Homo sapien
gtgcaaaagattccataactgttacatcttcag

SEQ ID NO: 923510 - DNA, 33 bp, Homo sapien
gtgcaaaagattccatgactgttacatcttcag

SEQ ID NO: 923511 - DNA, 33 bp, Homo sapien
ctgtgtctcctttcaaccattattatcttctct

SEQ ID NO: 923512 - DNA, 33 bp, Homo sapien
ctgtgtctcctttcaatcattattatcttctct

SEQ ID NO: 923513 - DNA, 33 bp, Homo sapien
ctagtgagggagagagaacttgtatgtaaataa

SEQ ID NO: 923514 - DNA, 33 bp, Homo sapien
ctagtgagggagagaggacttgtatgtaaataa

SEQ ID NO: 923515 - DNA, 33 bp, Homo sapien
aaacagaactcagaacgcctccccagagaaccc

SEQ ID NO: 923516 - DNA, 33 bp, Homo sapien
aaacagaactcagaactcctccccagagaaccc

SEQ ID NO: 923517 - DNA, 33 bp, Homo sapien
gaatgaatgataaatgaatgtgtaactgagcca

SEQ ID NO: 923518 - DNA, 33 bp, Homo sapien
gaatgaatgataaatggatgtgtaactgagcca

SEQ ID NO: 923519 - DNA, 33 bp, Homo sapien
gtgcctgttaatgaaccactgagtgcacatggc

SEQ ID NO: 923520 - DNA, 33 bp, Homo sapien
gtgcctgttaatgaactactgagtgcacatggc

SEQ ID NO: 923521 - DNA, 33 bp, Homo sapien
taaaccatgaaataaactgaggcaggactggga

SEQ ID NO: 923522 - DNA, 33 bp, Homo sapien
taaaccatgaaataaattgaggcaggactggga

SEQ ID NO: 923523 - DNA, 33 bp, Homo sapien
gaaataaaagttgagcagaacaagtaaacactc

SEQ ID NO: 923524 - DNA, 33 bp, Homo sapien
gaaataaaagttgagcggaacaagtaaacactc

SEQ ID NO: 923525 - DNA, 33 bp, Homo sapien
atctaagaattggtgaatatgtcaataattgct

SEQ ID NO: 923526 - DNA, 33 bp, Homo sapien
atctaagaattggtgagtatgtcaataattgct

SEQ ID NO: 923527 - DNA, 33 bp, Homo sapien
atatggggttacaaagaaggcctagacgtttat

SEQ ID NO: 923528 - DNA, 33 bp, Homo sapien
atatggggttacaaaggaggcctagacgtttat

SEQ ID NO: 923529 - DNA, 33 bp, Homo sapien
gaagtgatttgcttgaggtcagttagtgggtcc

SEQ ID NO: 923530 - DNA, 33 bp, Homo sapien
gaagtgatttgcttgatgtcagttagtgggtcc

SEQ ID NO: 923531 - DNA, 33 bp, Homo sapien
taattgatcactcaccaattttaatatagtggc

SEQ ID NO: 923532 - DNA, 33 bp, Homo sapien
taattgatcactcaccgattttaatatagtggc

SEQ ID NO: 923533 - DNA, 33 bp, Homo sapien
ttttagactaagctcccgcactagacgacaaca

SEQ ID NO: 923534 - DNA, 33 bp, Homo sapien
ttttagactaagctcctgcactagacgacaaca

SEQ ID NO: 923535 - DNA, 33 bp, Homo sapien
gccttatatactacataaaggagcctaggtttt

SEQ ID NO: 923536 - DNA, 33 bp, Homo sapien
gccttatatactacatgaaggagcctaggtttt

SEQ ID NO: 923537 - DNA, 33 bp, Homo sapien
ccccaagttttcctcaactcaataatggaccct

SEQ ID NO: 923538 - DNA, 33 bp, Homo sapien
ccccaagttttcctcagctcaataatggaccct

SEQ ID NO: 923539 - DNA, 33 bp, Homo sapien
gaagggacatctgagaaggaactaattttttaa

SEQ ID NO: 923540 - DNA, 33 bp, Homo sapien
gaagggacatctgagagggaactaattttttaa

SEQ ID NO: 923541 - DNA, 33 bp, Homo sapien
tgatggtgttctaagacatactccaaatacaat

SEQ ID NO: 923542 - DNA, 33 bp, Homo sapien
tgatggtgttctaagatatactccaaatacaat

SEQ ID NO: 923543 - DNA, 33 bp, Homo sapien
atacgtagttctaaaaacgtgtatctgaggtgc

SEQ ID NO: 923544 - DNA, 33 bp, Homo sapien
atacgtagttctaaaagcgtgtatctgaggtgc

SEQ ID NO: 923545 - DNA, 33 bp, Homo sapien
aaagtggtttaaacaacatcagccagaacattg

SEQ ID NO: 923546 - DNA, 33 bp, Homo sapien
aaagtggtttaaacaatatcagccagaacattg

SEQ ID NO: 923547 - DNA, 33 bp, Homo sapien
cagaggtattccaaaactggagtgttctagaag

SEQ ID NO: 923548 - DNA, 33 bp, Homo sapien
cagaggtattccaaaagtggagtgttctagaag

SEQ ID NO: 923549 - DNA, 33 bp, Homo sapien
cttgtgcattgctgtgcagagcatggatttttg

SEQ ID NO: 923550 - DNA, 33 bp, Homo sapien
cttgtgcattgctgtgtagagcatggatttttg

SEQ ID NO: 923551 - DNA, 33 bp, Homo sapien
aaataatctagctatccgagcttcctagaatga

SEQ ID NO: 923552 - DNA, 33 bp, Homo sapien
aaataatctagctatctgagcttcctagaatga

SEQ ID NO: 923553 - DNA, 33 bp, Homo sapien
agcaggttcctaacacactatgatatttaacag

SEQ ID NO: 923554 - DNA, 33 bp, Homo sapien
agcaggttcctaacacgctatgatatttaacag

SEQ ID NO: 923555 - DNA, 33 bp, Homo sapien
gaatgtggacaggtcactagcgtttgttagaaa

SEQ ID NO: 923556 - DNA, 33 bp, Homo sapien
gaatgtggacaggtcattagcgtttgttagaaa

SEQ ID NO: 923557 - DNA, 33 bp, Homo sapien
caagctgaacaaaggcaaattattacacgatat

SEQ ID NO: 923558 - DNA, 33 bp, Homo sapien
caagctgaacaaaggccaattattacacgatat

SEQ ID NO: 923559 - DNA, 33 bp, Homo sapien
gaagaggatgactccacgcactataggaccgca

SEQ ID NO: 923560 - DNA, 33 bp, Homo sapien
gaagaggatgactccatgcactataggaccgca

SEQ ID NO: 923561 - DNA, 33 bp, Homo sapien
ttcttgtccaggtgccgcagctaagttaggtac

SEQ ID NO: 923562 - DNA, 33 bp, Homo sapien
ttcttgtccaggtgcctcagctaagttaggtac

SEQ ID NO: 923563 - DNA, 33 bp, Homo sapien
agtttcagagactagaactccaaaatcaaggtg

SEQ ID NO: 923564 - DNA, 33 bp, Homo sapien
agtttcagagactagagctccaaaatcaaggtg

SEQ ID NO: 923565 - DNA, 33 bp, Homo sapien
caagatggaagaagccagagtctgtgaatcatg

SEQ ID NO: 923566 - DNA, 33 bp, Homo sapien
caagatggaagaagccggagtctgtgaatcatg

SEQ ID NO: 923567 - DNA, 33 bp, Homo sapien
gaaggtagtatcattcaacacaaaactaagaat

SEQ ID NO: 923568 - DNA, 33 bp, Homo sapien
gaaggtagtatcattcgacacaaaactaagaat

SEQ ID NO: 923569 - DNA, 33 bp, Homo sapien
gtatagtatttttccactcaaaacatcttgcag

SEQ ID NO: 923570 - DNA, 33 bp, Homo sapien
gtatagtatttttccattcaaaacatcttgcag

SEQ ID NO: 923571 - DNA, 33 bp, Homo sapien
cttctattgcttctgacagaatttttagctaga

SEQ ID NO: 923572 - DNA, 33 bp, Homo sapien
cttctattgcttctgatagaatttttagctaga

SEQ ID NO: 923573 - DNA, 33 bp, Homo sapien
caaattcccttttgccaagtaaagtaacatatc

SEQ ID NO: 923574 - DNA, 33 bp, Homo sapien
caaattcccttttgcccagtaaagtaacatatc

SEQ ID NO: 923575 - DNA, 33 bp, Homo sapien
ccctttcctctctttaccattccaattagtact

SEQ ID NO: 923576 - DNA, 33 bp, Homo sapien
ccctttcctctctttatcattccaattagtact

SEQ ID NO: 923577 - DNA, 33 bp, Homo sapien
catgcattattgctaaatgaagagtggagagaa

SEQ ID NO: 923578 - DNA, 33 bp, Homo sapien
catgcattattgctaagtgaagagtggagagaa

SEQ ID NO: 923579 - DNA, 33 bp, Homo sapien
ataaatccttgcagaacaacattaaatatggag

SEQ ID NO: 923580 - DNA, 33 bp, Homo sapien
ataaatccttgcagaataacattaaatatggag

SEQ ID NO: 923581 - DNA, 33 bp, Homo sapien
atatccatcgcttctcccctttatcattttttt

SEQ ID NO: 923582 - DNA, 33 bp, Homo sapien
atatccatcgcttctcgcctttatcattttttt

SEQ ID NO: 923583 - DNA, 33 bp, Homo sapien
agatggtgaattggaaagacatgttgaactgag

SEQ ID NO: 923584 - DNA, 33 bp, Homo sapien
agatggtgaattggaaggacatgttgaactgag

SEQ ID NO: 923585 - DNA, 33 bp, Homo sapien
ttctttcttttgcccccgatgaagatggaaatg

SEQ ID NO: 923586 - DNA, 33 bp, Homo sapien
ttctttcttttgcccctgatgaagatggaaatg

SEQ ID NO: 923587 - DNA, 33 bp, Homo sapien
gttggctctaaacaaaccagttcttgcaatcct

SEQ ID NO: 923588 - DNA, 33 bp, Homo sapien
gttggctctaaacaaatcagttcttgcaatcct

SEQ ID NO: 923589 - DNA, 33 bp, Homo sapien
acatatccctcaaatacaagaacaatgcatagc

SEQ ID NO: 923590 - DNA, 33 bp, Homo sapien
acatatccctcaaatataagaacaatgcatagc

SEQ ID NO: 923591 - DNA, 33 bp, Homo sapien
tgaagttaacttatgacgcaaaaaggcagaatg

SEQ ID NO: 923592 - DNA, 33 bp, Homo sapien
tgaagttaacttatgatgcaaaaaggcagaatg

SEQ ID NO: 923593 - DNA, 33 bp, Homo sapien
gtttcgaaatttgagacgtgcactcacaagtct

SEQ ID NO: 923594 - DNA, 33 bp, Homo sapien
gtttcgaaatttgagatgtgcactcacaagtct

SEQ ID NO: 923595 - DNA, 33 bp, Homo sapien
cttctttcacaaaataaagaccaaactcctcgt

SEQ ID NO: 923596 - DNA, 33 bp, Homo sapien
cttctttcacaaaatagagaccaaactcctcgt

SEQ ID NO: 923597 - DNA, 33 bp, Homo sapien
caaagactctccaccacgtgaagcagggaggaa

SEQ ID NO: 923598 - DNA, 33 bp, Homo sapien
caaagactctccaccaggtgaagcagggaggaa

SEQ ID NO: 923599 - DNA, 33 bp, Homo sapien
atgtctcttgtgttccactcttgccctcaaata

SEQ ID NO: 923600 - DNA, 33 bp, Homo sapien
atgtctcttgtgttccgctcttgccctcaaata

SEQ ID NO: 923601 - DNA, 33 bp, Homo sapien
tgtgaggttgaggttacgtggttagagaaagcc

SEQ ID NO: 923602 - DNA, 33 bp, Homo sapien
tgtgaggttgaggttatgtggttagagaaagcc

SEQ ID NO: 923603 - DNA, 33 bp, Homo sapien
attcaaagagctttaacgtgttggttggattcc

SEQ ID NO: 923604 - DNA, 33 bp, Homo sapien
attcaaagagctttaatgtgttggttggattcc

SEQ ID NO: 923605 - DNA, 33 bp, Homo sapien
aactacatagtgtaaaattccacctacatggca

SEQ ID NO: 923606 - DNA, 33 bp, Homo sapien
aactacatagtgtaaagttccacctacatggca

SEQ ID NO: 923607 - DNA, 33 bp, Homo sapien
tcctgtttagccaaccaattctatgatttttaa

SEQ ID NO: 923608 - DNA, 33 bp, Homo sapien
tcctgtttagccaaccgattctatgatttttaa

SEQ ID NO: 923609 - DNA, 33 bp, Homo sapien
aagttatacctcaacaaactggattttatttaa

SEQ ID NO: 923610 - DNA, 33 bp, Homo sapien
aagttatacctcaacagactggattttatttaa

SEQ ID NO: 923611 - DNA, 33 bp, Homo sapien
atgcttgttggcagcaagtacctggaattatgc

SEQ ID NO: 923612 - DNA, 33 bp, Homo sapien
atgcttgttggcagcaggtacctggaattatgc

SEQ ID NO: 923613 - DNA, 33 bp, Homo sapien
tcctgtagacccgaaagaagttggttgcctaat

SEQ ID NO: 923614 - DNA, 33 bp, Homo sapien
tcctgtagacccgaaataagttggttgcctaat

SEQ ID NO: 923615 - DNA, 33 bp, Homo sapien
tctcaaagagtatctaccatcatcccttcaaaa

SEQ ID NO: 923616 - DNA, 33 bp, Homo sapien
tctcaaagagtatctatcatcatcccttcaaaa

SEQ ID NO: 923617 - DNA, 33 bp, Homo sapien
gcttttatatctcccccaatttcactgcttcct

SEQ ID NO: 923618 - DNA, 33 bp, Homo sapien
gcttttatatctcccctaatttcactgcttcct

SEQ ID NO: 923619 - DNA, 33 bp, Homo sapien
agttttgatgacttggcacaagaaatgatataa

SEQ ID NO: 923620 - DNA, 33 bp, Homo sapien
agttttgatgacttggtacaagaaatgatataa

SEQ ID NO: 923621 - DNA, 33 bp, Homo sapien
attacaggttcataaccgaaaaaatgaagctgg

SEQ ID NO: 923622 - DNA, 33 bp, Homo sapien
attacaggttcataactgaaaaaatgaagctgg

SEQ ID NO: 923623 - DNA, 33 bp, Homo sapien
agtggattgctgacagaataatagggttatatt

SEQ ID NO: 923624 - DNA, 33 bp, Homo sapien
agtggattgctgacaggataatagggttatatt

SEQ ID NO: 923625 - DNA, 33 bp, Homo sapien
agagatgcagaaaggaagaattgtagagattat

SEQ ID NO: 923626 - DNA, 33 bp, Homo sapien
agagatgcagaaaggaggaattgtagagattat

SEQ ID NO: 923627 - DNA, 33 bp, Homo sapien
acaattttctcctacactatttcatgctctttt

SEQ ID NO: 923628 - DNA, 33 bp, Homo sapien
acaattttctcctacattatttcatgctctttt

SEQ ID NO: 923629 - DNA, 33 bp, Homo sapien
taggagatggaaaagggatggaaactatttcag

SEQ ID NO: 923630 - DNA, 33 bp, Homo sapien
taggagatggaaaaggtatggaaactatttcag

SEQ ID NO: 923631 - DNA, 33 bp, Homo sapien
caattgcatattttcaactgtctgctgaatatg

SEQ ID NO: 923632 - DNA, 33 bp, Homo sapien
caattgcatattttcatctgtctgctgaatatg

SEQ ID NO: 923633 - DNA, 33 bp, Homo sapien
aggcaaatggtataaaaagccagactatacggg

SEQ ID NO: 923634 - DNA, 33 bp, Homo sapien
aggcaaatggtataaagagccagactatacggg

SEQ ID NO: 923635 - DNA, 33 bp, Homo sapien
cctaaccctgcaaatccagatttctaccattat

SEQ ID NO: 923636 - DNA, 33 bp, Homo sapien
cctaaccctgcaaatcgagatttctaccattat

SEQ ID NO: 923637 - DNA, 33 bp, Homo sapien
aaatattcccctgtaaccaagttcaaatatcat

SEQ ID NO: 923638 - DNA, 33 bp, Homo sapien
aaatattcccctgtaatcaagttcaaatatcat

SEQ ID NO: 923639 - DNA, 33 bp, Homo sapien
tcttcgtttctccatcgcatctacaaggatatc

SEQ ID NO: 923640 - DNA, 33 bp, Homo sapien
tcttcgtttctccatctcatctacaaggatatc

SEQ ID NO: 923641 - DNA, 33 bp, Homo sapien
atgttctttaaaatcaggtcaattttgcattca

SEQ ID NO: 923642 - DNA, 33 bp, Homo sapien
atgttctttaaaatcatgtcaattttgcattca

SEQ ID NO: 923643 - DNA, 33 bp, Homo sapien
cttttgaaaaatctgcacttctctatgtaattt

SEQ ID NO: 923644 - DNA, 33 bp, Homo sapien
cttttgaaaaatctgcgcttctctatgtaattt

SEQ ID NO: 923645 - DNA, 33 bp, Homo sapien
ccacacttctaaagacggctgttgcaaaacagg

SEQ ID NO: 923646 - DNA, 33 bp, Homo sapien
ccacacttctaaagactgctgttgcaaaacagg

SEQ ID NO: 923647 - DNA, 33 bp, Homo sapien
gtttgaactcttctgcacctatgtaccttccat

SEQ ID NO: 923648 - DNA, 33 bp, Homo sapien
gtttgaactcttctgcgcctatgtaccttccat

SEQ ID NO: 923649 - DNA, 33 bp, Homo sapien
agagtcaggtacgtaaagagcttctcatttgtg

SEQ ID NO: 923650 - DNA, 33 bp, Homo sapien
agagtcaggtacgtaaggagcttctcatttgtg

SEQ ID NO: 923651 - DNA, 33 bp, Homo sapien
gattgcaagttaaccccgagtccgatgctgaaa

SEQ ID NO: 923652 - DNA, 33 bp, Homo sapien
gattgcaagttaaccctgagtccgatgctgaaa

SEQ ID NO: 923653 - DNA, 33 bp, Homo sapien
tatcccatgatgaaaaattctgtatccttatct

SEQ ID NO: 923654 - DNA, 33 bp, Homo sapien
tatcccatgatgaaaagttctgtatccttatct

SEQ ID NO: 923655 - DNA, 33 bp, Homo sapien
tgtgcaacaaatataccaaagagcacttaagaa

SEQ ID NO: 923656 - DNA, 33 bp, Homo sapien
tgtgcaacaaatatacgaaagagcacttaagaa

SEQ ID NO: 923657 - DNA, 33 bp, Homo sapien
caggtactgaagagaaatagcacacccttgtct

SEQ ID NO: 923658 - DNA, 33 bp, Homo sapien
caggtactgaagagaagtagcacacccttgtct

SEQ ID NO: 923659 - DNA, 33 bp, Homo sapien
gcttcgtccgagtgccggaaggggcttatttgg

SEQ ID NO: 923660 - DNA, 33 bp, Homo sapien
gcttcgtccgagtgcctgaaggggcttatttgg

SEQ ID NO: 923661 - DNA, 33 bp, Homo sapien
acatatgtggaaaaaaatagtgcctatggatta

SEQ ID NO: 923662 - DNA, 33 bp, Homo sapien
acatatgtggaaaaaagtagtgcctatggatta

SEQ ID NO: 923663 - DNA, 33 bp, Homo sapien
agatctttagagcaccagagatggaaataaaga

SEQ ID NO: 923664 - DNA, 33 bp, Homo sapien
agatctttagagcaccggagatggaaataaaga

SEQ ID NO: 923665 - DNA, 33 bp, Homo sapien
catgttgaaactgacactaattgctgtgggaag

SEQ ID NO: 923666 - DNA, 33 bp, Homo sapien
catgttgaaactgacattaattgctgtgggaag

SEQ ID NO: 923667 - DNA, 33 bp, Homo sapien
tttgaaatttcccaccacttaaatgacatccaa

SEQ ID NO: 923668 - DNA, 33 bp, Homo sapien
tttgaaatttcccaccgcttaaatgacatccaa

SEQ ID NO: 923669 - DNA, 33 bp, Homo sapien
cttttgtggttaaatgacatcggagaatctttt

SEQ ID NO: 923670 - DNA, 33 bp, Homo sapien
cttttgtggttaaatggcatcggagaatctttt

SEQ ID NO: 923671 - DNA, 33 bp, Homo sapien
aggttttcccaaagtcagacgatcgttctatca

SEQ ID NO: 923672 - DNA, 33 bp, Homo sapien
aggttttcccaaagtcggacgatcgttctatca

SEQ ID NO: 923673 - DNA, 33 bp, Homo sapien
tcttcttgcaaggaaaatgtctaacctctaaaa

SEQ ID NO: 923674 - DNA, 33 bp, Homo sapien
tcttcttgcaaggaaagtgtctaacctctaaaa

SEQ ID NO: 923675 - DNA, 33 bp, Homo sapien
ttgcctatttttcagcactctttctgcttcatc

SEQ ID NO: 923676 - DNA, 33 bp, Homo sapien
ttgcctatttttcagcgctctttctgcttcatc

SEQ ID NO: 923677 - DNA, 33 bp, Homo sapien
ctagctccagtgagaaaagcaacatctatgggg

SEQ ID NO: 923678 - DNA, 33 bp, Homo sapien
ctagctccagtgagaagagcaacatctatgggg

SEQ ID NO: 923679 - DNA, 33 bp, Homo sapien
acgggaccccaccacccattctgctacccttag

SEQ ID NO: 923680 - DNA, 33 bp, Homo sapien
acgggaccccaccacctattctgctacccttag

SEQ ID NO: 923681 - DNA, 33 bp, Homo sapien
ttattagctgaagtgcagaagaagtggacctca

SEQ ID NO: 923682 - DNA, 33 bp, Homo sapien
ttattagctgaagtgcggaagaagtggacctca

SEQ ID NO: 923683 - DNA, 33 bp, Homo sapien
gggcacatgaagaggcccggccaactggattac

SEQ ID NO: 923684 - DNA, 33 bp, Homo sapien
gggcacatgaagaggctcggccaactggattac

SEQ ID NO: 923685 - DNA, 33 bp, Homo sapien
aatggttcacatatccagccttgagactttagt

SEQ ID NO: 923686 - DNA, 33 bp, Homo sapien
aatggttcacatatccggccttgagactttagt

SEQ ID NO: 923687 - DNA, 33 bp, Homo sapien
tacttgttatatggaaactgttatttttaagtt

SEQ ID NO: 923688 - DNA, 33 bp, Homo sapien
tacttgttatatggaacctgttatttttaagtt

SEQ ID NO: 923689 - DNA, 33 bp, Homo sapien
ctaatttatgtgaaaaacttgagaagcctgatg

SEQ ID NO: 923690 - DNA, 33 bp, Homo sapien
ctaatttatgtgaaaaccttgagaagcctgatg

SEQ ID NO: 923691 - DNA, 33 bp, Homo sapien
gatcacacctgaataccgagttggtttggagta

SEQ ID NO: 923692 - DNA, 33 bp, Homo sapien
gatcacacctgaatactgagttggtttggagta

SEQ ID NO: 923693 - DNA, 33 bp, Homo sapien
gtttatgtcatacacaaattgtttccactgatc

SEQ ID NO: 923694 - DNA, 33 bp, Homo sapien
gtttatgtcatacacacattgtttccactgatc

SEQ ID NO: 923695 - DNA, 33 bp, Homo sapien
aatcgcggttagcaaaccttagtggagatgtta

SEQ ID NO: 923696 - DNA, 33 bp, Homo sapien
aatcgcggttagcaaatcttagtggagatgtta

SEQ ID NO: 923697 - DNA, 33 bp, Homo sapien
ggcaaaacatgaccacaggctgtattgtctatg

SEQ ID NO: 923698 - DNA, 33 bp, Homo sapien
ggcaaaacatgaccacgggctgtattgtctatg

SEQ ID NO: 923699 - DNA, 33 bp, Homo sapien
ggggatgtcatgttgacgaaatggtgtgctatt

SEQ ID NO: 923700 - DNA, 33 bp, Homo sapien
ggggatgtcatgttgatgaaatggtgtgctatt

SEQ ID NO: 923701 - DNA, 33 bp, Homo sapien
gctagtttaatcagcacataaatggagaactgg

SEQ ID NO: 923702 - DNA, 33 bp, Homo sapien
gctagtttaatcagcatataaatggagaactgg

SEQ ID NO: 923703 - DNA, 33 bp, Homo sapien
tggagtacggggaagacgtggatatttagattc

SEQ ID NO: 923704 - DNA, 33 bp, Homo sapien
tggagtacggggaagatgtggatatttagattc

SEQ ID NO: 923705 - DNA, 33 bp, Homo sapien
aagttcagcaaacctactacaagggcaagggtg

SEQ ID NO: 923706 - DNA, 33 bp, Homo sapien
aagttcagcaaacctattacaagggcaagggtg

SEQ ID NO: 923707 - DNA, 33 bp, Homo sapien
aaagtgttgatagcaaagaggcaagtgtcaaag

SEQ ID NO: 923708 - DNA, 33 bp, Homo sapien
aaagtgttgatagcaaggaggcaagtgtcaaag

SEQ ID NO: 923709 - DNA, 33 bp, Homo sapien
gaatacaccagaagacacaatgaagtaggaaga

SEQ ID NO: 923710 - DNA, 33 bp, Homo sapien
gaatacaccagaagacgcaatgaagtaggaaga

SEQ ID NO: 923711 - DNA, 33 bp, Homo sapien
taacatttgcatctgagaccaggggacattacc

SEQ ID NO: 923712 - DNA, 33 bp, Homo sapien
taacatttgcatctgataccaggggacattacc

SEQ ID NO: 923713 - DNA, 33 bp, Homo sapien
tttagcaattgtatcactacatcatgccaggga

SEQ ID NO: 923714 - DNA, 33 bp, Homo sapien
tttagcaattgtatcattacatcatgccaggga

SEQ ID NO: 923715 - DNA, 33 bp, Homo sapien
atattcctcgtgtccccatgatatagccacagc

SEQ ID NO: 923716 - DNA, 33 bp, Homo sapien
atattcctcgtgtccctatgatatagccacagc

SEQ ID NO: 923717 - DNA, 33 bp, Homo sapien
agaagtggctctccacaatctgaagtccacctg

SEQ ID NO: 923718 - DNA, 33 bp, Homo sapien
agaagtggctctccacgatctgaagtccacctg

SEQ ID NO: 923719 - DNA, 33 bp, Homo sapien
ggctgtagcataggaagagaaacaagtaggaga

SEQ ID NO: 923720 - DNA, 33 bp, Homo sapien
ggctgtagcataggaatagaaacaagtaggaga

SEQ ID NO: 923721 - DNA, 33 bp, Homo sapien
gcaggctagacaggagcactgctataaaaaaaa

SEQ ID NO: 923722 - DNA, 33 bp, Homo sapien
gcaggctagacaggagtactgctataaaaaaaa

SEQ ID NO: 923723 - DNA, 33 bp, Homo sapien
agtaacagcatagcaaacataccatgaaatttc

SEQ ID NO: 923724 - DNA, 33 bp, Homo sapien
agtaacagcatagcaagcataccatgaaatttc

SEQ ID NO: 923725 - DNA, 33 bp, Homo sapien
ctctcatatggattcacgttattatgccaaaac

SEQ ID NO: 923726 - DNA, 33 bp, Homo sapien
ctctcatatggattcatgttattatgccaaaac

SEQ ID NO: 923727 - DNA, 33 bp, Homo sapien
gactctaaaggtgaaaataaggtcaaaatctct

SEQ ID NO: 923728 - DNA, 33 bp, Homo sapien
gactctaaaggtgaaagtaaggtcaaaatctct

SEQ ID NO: 923729 - DNA, 33 bp, Homo sapien
gtctctcctctatcacagaaaaatatgtcacaa

SEQ ID NO: 923730 - DNA, 33 bp, Homo sapien
gtctctcctctatcaccgaaaaatatgtcacaa

SEQ ID NO: 923731 - DNA, 33 bp, Homo sapien
atgccgttaagcagataaggtgcgggcagcccc

SEQ ID NO: 923732 - DNA, 33 bp, Homo sapien
atgccgttaagcagatgaggtgcgggcagcccc

SEQ ID NO: 923733 - DNA, 33 bp, Homo sapien
aacagtgtagacattaccatgaagacaaattcc

SEQ ID NO: 923734 - DNA, 33 bp, Homo sapien
aacagtgtagacattatcatgaagacaaattcc

SEQ ID NO: 923735 - DNA, 33 bp, Homo sapien
aaacccatctgtaggacaataggagaaatgagg

SEQ ID NO: 923736 - DNA, 33 bp, Homo sapien
aaacccatctgtaggataataggagaaatgagg

SEQ ID NO: 923737 - DNA, 33 bp, Homo sapien
gtcagcacaatacagacggtccgaactgtgaga

SEQ ID NO: 923738 - DNA, 33 bp, Homo sapien
gtcagcacaatacagatggtccgaactgtgaga

SEQ ID NO: 923739 - DNA, 33 bp, Homo sapien
agagagttagaaaaggaaacgaagctgaagaaa

SEQ ID NO: 923740 - DNA, 33 bp, Homo sapien
agagagttagaaaagggaacgaagctgaagaaa

SEQ ID NO: 923741 - DNA, 33 bp, Homo sapien
gatcagttttataaaaagataagtggcttttca

SEQ ID NO: 923742 - DNA, 33 bp, Homo sapien
gatcagttttataaaaggataagtggcttttca

SEQ ID NO: 923743 - DNA, 33 bp, Homo sapien
gtgtctccattgtttaaaaaggaagttgtctcc

SEQ ID NO: 923744 - DNA, 33 bp, Homo sapien
gtgtctccattgtttagaaaggaagttgtctcc

SEQ ID NO: 923745 - DNA, 33 bp, Homo sapien
attattgcttaccaaaatgtattagataacatg

SEQ ID NO: 923746 - DNA, 33 bp, Homo sapien
attattgcttaccaaagtgtattagataacatg

SEQ ID NO: 923747 - DNA, 33 bp, Homo sapien
ctgcttgggagtttgaacatggcaactcaagag

SEQ ID NO: 923748 - DNA, 33 bp, Homo sapien
ctgcttgggagtttgaccatggcaactcaagag

SEQ ID NO: 923749 - DNA, 33 bp, Homo sapien
ctctctggagaagcaaccttctaaactaaatta

SEQ ID NO: 923750 - DNA, 33 bp, Homo sapien
ctctctggagaagcaatcttctaaactaaatta

SEQ ID NO: 923751 - DNA, 33 bp, Homo sapien
ctctaccttctccccaacctttgtatagaatat

SEQ ID NO: 923752 - DNA, 33 bp, Homo sapien
ctctaccttctccccagcctttgtatagaatat

SEQ ID NO: 923753 - DNA, 33 bp, Homo sapien
gacctcattgctgggaaaagtgttacattgaaa

SEQ ID NO: 923754 - DNA, 33 bp, Homo sapien
gacctcattgctgggataagtgttacattgaaa

SEQ ID NO: 923755 - DNA, 33 bp, Homo sapien
tgccaatacctaaaacggattaatttgcccctc

SEQ ID NO: 923756 - DNA, 33 bp, Homo sapien
tgccaatacctaaaactgattaatttgcccctc

SEQ ID NO: 923757 - DNA, 33 bp, Homo sapien
aaaaaattgccgacgaatagtattccatttact

SEQ ID NO: 923758 - DNA, 33 bp, Homo sapien
aaaaaattgccgacgagtagtattccatttact

SEQ ID NO: 923759 - DNA, 33 bp, Homo sapien
taatttcaatgacaaactctgattcctgagttg

SEQ ID NO: 923760 - DNA, 33 bp, Homo sapien
taatttcaatgacaaattctgattcctgagttg

SEQ ID NO: 923761 - DNA, 33 bp, Homo sapien
tttctgataggttagacatggaataacagagaa

SEQ ID NO: 923762 - DNA, 33 bp, Homo sapien
tttctgataggttagatatggaataacagagaa

SEQ ID NO: 923763 - DNA, 33 bp, Homo sapien
ccctcagttttatgacagcagacaaatcattgg

SEQ ID NO: 923764 - DNA, 33 bp, Homo sapien
ccctcagttttatgacggcagacaaatcattgg

SEQ ID NO: 923765 - DNA, 33 bp, Homo sapien
catgtaatgacataaacttgggaggtgctaagg

SEQ ID NO: 923766 - DNA, 33 bp, Homo sapien
catgtaatgacataaatttgggaggtgctaagg

SEQ ID NO: 923767 - DNA, 33 bp, Homo sapien
ttgggtttgcactcaagaagcccaaatgcaaag

SEQ ID NO: 923768 - DNA, 33 bp, Homo sapien
ttgggtttgcactcaataagcccaaatgcaaag

SEQ ID NO: 923769 - DNA, 33 bp, Homo sapien
aattttgtgtctggagcagtacgtggcaagtat

SEQ ID NO: 923770 - DNA, 33 bp, Homo sapien
aattttgtgtctggagtagtacgtggcaagtat

SEQ ID NO: 923771 - DNA, 33 bp, Homo sapien
tctctcagtcagtgaaatcattatttgcctaca

SEQ ID NO: 923772 - DNA, 33 bp, Homo sapien
tctctcagtcagtgaactcattatttgcctaca

SEQ ID NO: 923773 - DNA, 33 bp, Homo sapien
gaccccaggtaagaaacccctgctttagagaat

SEQ ID NO: 923774 - DNA, 33 bp, Homo sapien
gaccccaggtaagaaatccctgctttagagaat

SEQ ID NO: 923775 - DNA, 33 bp, Homo sapien
agcaaaatgttatctgaatatagaggtgtgaac

SEQ ID NO: 923776 - DNA, 33 bp, Homo sapien
agcaaaatgttatctggatatagaggtgtgaac

SEQ ID NO: 923777 - DNA, 33 bp, Homo sapien
tcaaaggtctcgcgtacgtaattatcttgagga

SEQ ID NO: 923778 - DNA, 33 bp, Homo sapien
tcaaaggtctcgcgtatgtaattatcttgagga

SEQ ID NO: 923779 - DNA, 33 bp, Homo sapien
aagtagatatgcactccactggaaaaacatcac

SEQ ID NO: 923780 - DNA, 33 bp, Homo sapien
aagtagatatgcactctactggaaaaacatcac

SEQ ID NO: 923781 - DNA, 33 bp, Homo sapien
ttttagtgaaatgctccaattgaagttataaag

SEQ ID NO: 923782 - DNA, 33 bp, Homo sapien
ttttagtgaaatgctcgaattgaagttataaag

SEQ ID NO: 923783 - DNA, 33 bp, Homo sapien
gagcatatgggtcaccgggaagactcacttgca

SEQ ID NO: 923784 - DNA, 33 bp, Homo sapien
gagcatatgggtcacctggaagactcacttgca

SEQ ID NO: 923785 - DNA, 33 bp, Homo sapien
caccattcatgcgtcaaacaagtactgcctctt

SEQ ID NO: 923786 - DNA, 33 bp, Homo sapien
caccattcatgcgtcagacaagtactgcctctt

SEQ ID NO: 923787 - DNA, 33 bp, Homo sapien
atgttgaggataatgacaactctgaaatcaaaa

SEQ ID NO: 923788 - DNA, 33 bp, Homo sapien
atgttgaggataatgataactctgaaatcaaaa

SEQ ID NO: 923789 - DNA, 33 bp, Homo sapien
gaagatgttgactaatcaaatacactgtcattt

SEQ ID NO: 923790 - DNA, 33 bp, Homo sapien
gaagatgttgactaatgaaatacactgtcattt

SEQ ID NO: 923791 - DNA, 33 bp, Homo sapien
ttcttatcagtcataaagcagtaaatgtctaca

SEQ ID NO: 923792 - DNA, 33 bp, Homo sapien
ttcttatcagtcataaggcagtaaatgtctaca

SEQ ID NO: 923793 - DNA, 33 bp, Homo sapien
gctctaacttttgaaaatgtttaccatctttct

SEQ ID NO: 923794 - DNA, 33 bp, Homo sapien
gctctaacttttgaaagtgtttaccatctttct

SEQ ID NO: 923795 - DNA, 33 bp, Homo sapien
ataaattagggatggcaaagaatgaagttcact

SEQ ID NO: 923796 - DNA, 33 bp, Homo sapien
ataaattagggatggcgaagaatgaagttcact

SEQ ID NO: 923797 - DNA, 33 bp, Homo sapien
aattcctttctgtgaacgatacactttaggctt

SEQ ID NO: 923798 - DNA, 33 bp, Homo sapien
aattcctttctgtgaatgatacactttaggctt

SEQ ID NO: 923799 - DNA, 33 bp, Homo sapien
gggcctgactcacacaatctcagtgatgctcac

SEQ ID NO: 923800 - DNA, 33 bp, Homo sapien
gggcctgactcacacagtctcagtgatgctcac

SEQ ID NO: 923801 - DNA, 33 bp, Homo sapien
atcatcttttagttatcagatgtccaaatggta

SEQ ID NO: 923802 - DNA, 33 bp, Homo sapien
atcatcttttagttatgagatgtccaaatggta

SEQ ID NO: 923803 - DNA, 33 bp, Homo sapien
ctaaatcatagcaaagaccagctttacaaaact

SEQ ID NO: 923804 - DNA, 33 bp, Homo sapien
ctaaatcatagcaaaggccagctttacaaaact

SEQ ID NO: 923805 - DNA, 33 bp, Homo sapien
ctttggagtgttgtaaaaccaagattgggactc

SEQ ID NO: 923806 - DNA, 33 bp, Homo sapien
ctttggagtgttgtaagaccaagattgggactc

SEQ ID NO: 923807 - DNA, 33 bp, Homo sapien
aactcctgtcaaaggcacgtcagttctggggta

SEQ ID NO: 923808 - DNA, 33 bp, Homo sapien
aactcctgtcaaaggcgcgtcagttctggggta

SEQ ID NO: 923809 - DNA, 33 bp, Homo sapien
ccaagagcactgctgaaccacctaacagataca

SEQ ID NO: 923810 - DNA, 33 bp, Homo sapien
ccaagagcactgctgagccacctaacagataca

SEQ ID NO: 923811 - DNA, 33 bp, Homo sapien
aggtgagaaaggtcacaggactcaatggaaagg

SEQ ID NO: 923812 - DNA, 33 bp, Homo sapien
aggtgagaaaggtcacgggactcaatggaaagg

SEQ ID NO: 923813 - DNA, 33 bp, Homo sapien
gagatgctcaggaaaacagctgctcttcaaaat

SEQ ID NO: 923814 - DNA, 33 bp, Homo sapien
gagatgctcaggaaaatagctgctcttcaaaat

SEQ ID NO: 923815 - DNA, 33 bp, Homo sapien
ctgatgatgtatgtagcataaattctcagctgt

SEQ ID NO: 923816 - DNA, 33 bp, Homo sapien
ctgatgatgtatgtagtataaattctcagctgt

SEQ ID NO: 923817 - DNA, 33 bp, Homo sapien
agtgtacagcaaggaacgaacgcggagctgcag

SEQ ID NO: 923818 - DNA, 33 bp, Homo sapien
agtgtacagcaaggaatgaacgcggagctgcag

SEQ ID NO: 923819 - DNA, 33 bp, Homo sapien
cccaggtcatgattcaatgaaacattttagata

SEQ ID NO: 923820 - DNA, 33 bp, Homo sapien
cccaggtcatgattcagtgaaacattttagata

SEQ ID NO: 923821 - DNA, 33 bp, Homo sapien
atctaatctgaagaaacctgtatctggaccact

SEQ ID NO: 923822 - DNA, 33 bp, Homo sapien
atctaatctgaagaaagctgtatctggaccact

SEQ ID NO: 923823 - DNA, 33 bp, Homo sapien
ggtgattttagaacaacttgaagagcattagtg

SEQ ID NO: 923824 - DNA, 33 bp, Homo sapien
ggtgattttagaacaatttgaagagcattagtg

SEQ ID NO: 923825 - DNA, 33 bp, Homo sapien
agaaaacctgtatagtcaaggttgaatttgtga

SEQ ID NO: 923826 - DNA, 33 bp, Homo sapien
agaaaacctgtatagtgaaggttgaatttgtga

SEQ ID NO: 923827 - DNA, 33 bp, Homo sapien
tggcttgcatggagcactatcactgtagcaatg

SEQ ID NO: 923828 - DNA, 33 bp, Homo sapien
tggcttgcatggagcattatcactgtagcaatg

SEQ ID NO: 923829 - DNA, 33 bp, Homo sapien
aagacaaatgatgaagcatagttaatgaaaagc

SEQ ID NO: 923830 - DNA, 33 bp, Homo sapien
aagacaaatgatgaagtatagttaatgaaaagc

SEQ ID NO: 923831 - DNA, 33 bp, Homo sapien
gcatggcaggcattcaaagtggagcagtctcct

SEQ ID NO: 923832 - DNA, 33 bp, Homo sapien
gcatggcaggcattcagagtggagcagtctcct

SEQ ID NO: 923833 - DNA, 33 bp, Homo sapien
aatcataacggaaccaagaaaatgagaaataga

SEQ ID NO: 923834 - DNA, 33 bp, Homo sapien
aatcataacggaaccatgaaaatgagaaataga

SEQ ID NO: 923835 - DNA, 33 bp, Homo sapien
cttccagaaatagctgcagaaggcctgttaata

SEQ ID NO: 923836 - DNA, 33 bp, Homo sapien
cttccagaaatagctgtagaaggcctgttaata

SEQ ID NO: 923837 - DNA, 33 bp, Homo sapien
tgtctgtgtgctctgacggaaattctgccagtt

SEQ ID NO: 923838 - DNA, 33 bp, Homo sapien
tgtctgtgtgctctgatggaaattctgccagtt

SEQ ID NO: 923839 - DNA, 33 bp, Homo sapien
tctcatagggttattacgaagtttaagtgagtc

SEQ ID NO: 923840 - DNA, 33 bp, Homo sapien
tctcatagggttattatgaagtttaagtgagtc

SEQ ID NO: 923841 - DNA, 33 bp, Homo sapien
tcctgtgtgaataaaacgtggctcaagttcctg

SEQ ID NO: 923842 - DNA, 33 bp, Homo sapien
tcctgtgtgaataaaatgtggctcaagttcctg

SEQ ID NO: 923843 - DNA, 33 bp, Homo sapien
atttgtcatgtacatacagcacattgaccagaa

SEQ ID NO: 923844 - DNA, 33 bp, Homo sapien
atttgtcatgtacatatagcacattgaccagaa

SEQ ID NO: 923845 - DNA, 33 bp, Homo sapien
agctagttctcttggaaatgactgatggcatga

SEQ ID NO: 923846 - DNA, 33 bp, Homo sapien
agctagttctcttggagatgactgatggcatga

SEQ ID NO: 923847 - DNA, 33 bp, Homo sapien
ttttcctactcctctacggcaagaaagtttttc

SEQ ID NO: 923848 - DNA, 33 bp, Homo sapien
ttttcctactcctctatggcaagaaagtttttc

SEQ ID NO: 923849 - DNA, 33 bp, Homo sapien
actatgatgttcatagaaggaatgctcttctaa

SEQ ID NO: 923850 - DNA, 33 bp, Homo sapien
actatgatgttcataggaggaatgctcttctaa

SEQ ID NO: 923851 - DNA, 33 bp, Homo sapien
cctcctgtcaggattcgactccctccaaaagca

SEQ ID NO: 923852 - DNA, 33 bp, Homo sapien
cctcctgtcaggattctactccctccaaaagca

SEQ ID NO: 923853 - DNA, 33 bp, Homo sapien
cagatgctggaaggaagagacatgataaaatac

SEQ ID NO: 923854 - DNA, 33 bp, Homo sapien
cagatgctggaaggaatagacatgataaaatac

SEQ ID NO: 923855 - DNA, 33 bp, Homo sapien
ctagagttgtgtaggacagcatctataagaatt

SEQ ID NO: 923856 - DNA, 33 bp, Homo sapien
ctagagttgtgtaggagagcatctataagaatt

SEQ ID NO: 923857 - DNA, 33 bp, Homo sapien
tatccagtgaattggcagatatgtattaagtgc

SEQ ID NO: 923858 - DNA, 33 bp, Homo sapien
tatccagtgaattggcggatatgtattaagtgc

SEQ ID NO: 923859 - DNA, 33 bp, Homo sapien
ttattttttgccttaacgcttatcatgatctaa

SEQ ID NO: 923860 - DNA, 33 bp, Homo sapien
ttattttttgccttaatgcttatcatgatctaa

SEQ ID NO: 923861 - DNA, 33 bp, Homo sapien
gaaaccatgaaaatcaaactataatcaggaaag

SEQ ID NO: 923862 - DNA, 33 bp, Homo sapien
gaaaccatgaaaatcagactataatcaggaaag

SEQ ID NO: 923863 - DNA, 33 bp, Homo sapien
attttcttgctcttcaagtgactatgcttttta

SEQ ID NO: 923864 - DNA, 33 bp, Homo sapien
attttcttgctcttcaggtgactatgcttttta

SEQ ID NO: 923865 - DNA, 33 bp, Homo sapien
agatttttgatgaacaataacaaaatctgatga

SEQ ID NO: 923866 - DNA, 33 bp, Homo sapien
agatttttgatgaacagtaacaaaatctgatga

SEQ ID NO: 923867 - DNA, 33 bp, Homo sapien
tattaaaaaatatatcagagtgcctggttttta

SEQ ID NO: 923868 - DNA, 33 bp, Homo sapien
tattaaaaaatatatcggagtgcctggttttta

SEQ ID NO: 923869 - DNA, 33 bp, Homo sapien
tcacctcttacagtgacggtatttttctggcca

SEQ ID NO: 923870 - DNA, 33 bp, Homo sapien
tcacctcttacagtgatggtatttttctggcca

SEQ ID NO: 923871 - DNA, 33 bp, Homo sapien
actcaaagggatccagcatatgcctgatgaggg

SEQ ID NO: 923872 - DNA, 33 bp, Homo sapien
actcaaagggatccaggatatgcctgatgaggg

SEQ ID NO: 923873 - DNA, 33 bp, Homo sapien
gtgggagacacagtgaaaaatttcagaggaggg

SEQ ID NO: 923874 - DNA, 33 bp, Homo sapien
gtgggagacacagtgataaatttcagaggaggg

SEQ ID NO: 923875 - DNA, 33 bp, Homo sapien
tctagtcacataattacctctttaaggtcccac

SEQ ID NO: 923876 - DNA, 33 bp, Homo sapien
tctagtcacataattagctctttaaggtcccac

SEQ ID NO: 923877 - DNA, 33 bp, Homo sapien
gtttcaaaaatatcctgagccagcttacttaaa

SEQ ID NO: 923878 - DNA, 33 bp, Homo sapien
gtttcaaaaatatccttagccagcttacttaaa

SEQ ID NO: 923879 - DNA, 33 bp, Homo sapien
ttgcactggaaatgcaaaaagacaaatattttc

SEQ ID NO: 923880 - DNA, 33 bp, Homo sapien
ttgcactggaaatgcagaaagacaaatattttc

SEQ ID NO: 923881 - DNA, 33 bp, Homo sapien
tccattttagaatcctaaatcctgtcactgatg

SEQ ID NO: 923882 - DNA, 33 bp, Homo sapien
tccattttagaatcctgaatcctgtcactgatg

SEQ ID NO: 923883 - DNA, 33 bp, Homo sapien
ttgtcaggacaagccaatccgtagggatgaaag

SEQ ID NO: 923884 - DNA, 33 bp, Homo sapien
ttgtcaggacaagccagtccgtagggatgaaag

SEQ ID NO: 923885 - DNA, 33 bp, Homo sapien
caaacaaacaaaactccaaaacatcaggatgag

SEQ ID NO: 923886 - DNA, 33 bp, Homo sapien
caaacaaacaaaactctaaaacatcaggatgag

SEQ ID NO: 923887 - DNA, 33 bp, Homo sapien
gagatgaaagactagccccacatcagataactt

SEQ ID NO: 923888 - DNA, 33 bp, Homo sapien
gagatgaaagactagctccacatcagataactt

SEQ ID NO: 923889 - DNA, 33 bp, Homo sapien
ttcaaaatcatttcagaagtttcttctcactta

SEQ ID NO: 923890 - DNA, 33 bp, Homo sapien
ttcaaaatcatttcagtagtttcttctcactta

SEQ ID NO: 923891 - DNA, 33 bp, Homo sapien
tattactgagcaaacaatgaattcaggaaaaca

SEQ ID NO: 923892 - DNA, 33 bp, Homo sapien
tattactgagcaaacagtgaattcaggaaaaca

SEQ ID NO: 923893 - DNA, 33 bp, Homo sapien
aacatacagactgaaaatatatctgcatattgt

SEQ ID NO: 923894 - DNA, 33 bp, Homo sapien
aacatacagactgaaactatatctgcatattgt

SEQ ID NO: 923895 - DNA, 33 bp, Homo sapien
aacacacacacaaaaactcacttagcaaacaaa

SEQ ID NO: 923896 - DNA, 33 bp, Homo sapien
aacacacacacaaaaagtcacttagcaaacaaa

SEQ ID NO: 923897 - DNA, 33 bp, Homo sapien
gtaccagtaagaatggaaaagatcaaattaaga

SEQ ID NO: 923898 - DNA, 33 bp, Homo sapien
gtaccagtaagaatgggaaagatcaaattaaga

SEQ ID NO: 923899 - DNA, 33 bp, Homo sapien
gattaagcaaggacaggaacagcaggctctgct

SEQ ID NO: 923900 - DNA, 33 bp, Homo sapien
gattaagcaaggacagtaacagcaggctctgct

SEQ ID NO: 923901 - DNA, 33 bp, Homo sapien
tagtcccatctattcaaccactgagtcacacca

SEQ ID NO: 923902 - DNA, 33 bp, Homo sapien
tagtcccatctattcagccactgagtcacacca

SEQ ID NO: 923903 - DNA, 33 bp, Homo sapien
aagttatatcaaattccctcatccctgaaatgg

SEQ ID NO: 923904 - DNA, 33 bp, Homo sapien
aagttatatcaaattctctcatccctgaaatgg

SEQ ID NO: 923905 - DNA, 33 bp, Homo sapien
tgatataacttatgacaagggcttggtaacaca

SEQ ID NO: 923906 - DNA, 33 bp, Homo sapien
tgatataacttatgacgagggcttggtaacaca

SEQ ID NO: 923907 - DNA, 33 bp, Homo sapien
atgtgttttaacaggaagctcaggattcatatg

SEQ ID NO: 923908 - DNA, 33 bp, Homo sapien
atgtgttttaacaggaggctcaggattcatatg

SEQ ID NO: 923909 - DNA, 33 bp, Homo sapien
ctctgaatacttctaaatggcaactccaaaact

SEQ ID NO: 923910 - DNA, 33 bp, Homo sapien
ctctgaatacttctaagtggcaactccaaaact

SEQ ID NO: 923911 - DNA, 33 bp, Homo sapien
aaaatacttctggctgaaatcaggcagtaaata

SEQ ID NO: 923912 - DNA, 33 bp, Homo sapien
aaaatacttctggctggaatcaggcagtaaata

SEQ ID NO: 923913 - DNA, 33 bp, Homo sapien
aaaagggcaataggaacctgaggactgaagtga

SEQ ID NO: 923914 - DNA, 33 bp, Homo sapien
aaaagggcaataggaagctgaggactgaagtga

SEQ ID NO: 923915 - DNA, 33 bp, Homo sapien
gattgccaccaaaaataaagttcagagcttaaa

SEQ ID NO: 923916 - DNA, 33 bp, Homo sapien
gattgccaccaaaaatgaagttcagagcttaaa

SEQ ID NO: 923917 - DNA, 33 bp, Homo sapien
agggacaaatcccacacctaaatctgttaatac

SEQ ID NO: 923918 - DNA, 33 bp, Homo sapien
agggacaaatcccacatctaaatctgttaatac

SEQ ID NO: 923919 - DNA, 33 bp, Homo sapien
tgccccctcagtcccacgtagtcttcctggtga

SEQ ID NO: 923920 - DNA, 33 bp, Homo sapien
tgccccctcagtcccatgtagtcttcctggtga

SEQ ID NO: 923921 - DNA, 33 bp, Homo sapien
tttgacccatgcaagtcaaaggacggggctgcc

SEQ ID NO: 923922 - DNA, 33 bp, Homo sapien
tttgacccatgcaagtgaaaggacggggctgcc

SEQ ID NO: 923923 - DNA, 33 bp, Homo sapien
tttactggaaagcaaacaagaacaccagcagtt

SEQ ID NO: 923924 - DNA, 33 bp, Homo sapien
tttactggaaagcaaataagaacaccagcagtt

SEQ ID NO: 923925 - DNA, 33 bp, Homo sapien
tgcatggtgagagttacagttatgacccaaact

SEQ ID NO: 923926 - DNA, 33 bp, Homo sapien
tgcatggtgagagttatagttatgacccaaact

SEQ ID NO: 923927 - DNA, 33 bp, Homo sapien
ttaatcttcacaaaaaccctttatatgagaagc

SEQ ID NO: 923928 - DNA, 33 bp, Homo sapien
ttaatcttcacaaaaatcctttatatgagaagc

SEQ ID NO: 923929 - DNA, 33 bp, Homo sapien
ttttgcagatgtactaacatgggaccagtgatg

SEQ ID NO: 923930 - DNA, 33 bp, Homo sapien
ttttgcagatgtactagcatgggaccagtgatg

SEQ ID NO: 923931 - DNA, 33 bp, Homo sapien
ctaaagagctcatactcaaacagtgatattcag

SEQ ID NO: 923932 - DNA, 33 bp, Homo sapien
ctaaagagctcatactgaaacagtgatattcag

SEQ ID NO: 923933 - DNA, 33 bp, Homo sapien
tagattcaaccaatcactgatggaaaatatcct

SEQ ID NO: 923934 - DNA, 33 bp, Homo sapien
tagattcaaccaatcattgatggaaaatatcct

SEQ ID NO: 923935 - DNA, 33 bp, Homo sapien
gaaggtaaatagatgtcaagggttcactgctgt

SEQ ID NO: 923936 - DNA, 33 bp, Homo sapien
gaaggtaaatagatgttaagggttcactgctgt

SEQ ID NO: 923937 - DNA, 33 bp, Homo sapien
tgcacaagttgtttccacagtcccatcagtggt

SEQ ID NO: 923938 - DNA, 33 bp, Homo sapien
tgcacaagttgtttcctcagtcccatcagtggt

SEQ ID NO: 923939 - DNA, 33 bp, Homo sapien
ggtaaggactagagtcagaagaaccactgatgg

SEQ ID NO: 923940 - DNA, 33 bp, Homo sapien
ggtaaggactagagtcggaagaaccactgatgg

SEQ ID NO: 923941 - DNA, 33 bp, Homo sapien
caactcacactgaggaaaatggtcccagttgtg

SEQ ID NO: 923942 - DNA, 33 bp, Homo sapien
caactcacactgaggagaatggtcccagttgtg

SEQ ID NO: 923943 - DNA, 33 bp, Homo sapien
tagggagatgggagaaatgaaaatgctttaaaa

SEQ ID NO: 923944 - DNA, 33 bp, Homo sapien
tagggagatgggagaagtgaaaatgctttaaaa

SEQ ID NO: 923945 - DNA, 33 bp, Homo sapien
aatcaagctcaagtgacaataagagctcaactc

SEQ ID NO: 923946 - DNA, 33 bp, Homo sapien
aatcaagctcaagtgagaataagagctcaactc

SEQ ID NO: 923947 - DNA, 33 bp, Homo sapien
ctttcccatgctcaaaaaattagaatggtaaaa

SEQ ID NO: 923948 - DNA, 33 bp, Homo sapien
ctttcccatgctcaaagaattagaatggtaaaa

SEQ ID NO: 923949 - DNA, 33 bp, Homo sapien
ttctgcatattagccacgaacgactgtgatgca

SEQ ID NO: 923950 - DNA, 33 bp, Homo sapien
ttctgcatattagccatgaacgactgtgatgca

SEQ ID NO: 923951 - DNA, 33 bp, Homo sapien
cctactagagatctgacgtacagcatggtaact

SEQ ID NO: 923952 - DNA, 33 bp, Homo sapien
cctactagagatctgatgtacagcatggtaact

SEQ ID NO: 923953 - DNA, 33 bp, Homo sapien
taactttggcctcatcaatacctgtcagcctct

SEQ ID NO: 923954 - DNA, 33 bp, Homo sapien
taactttggcctcatcgatacctgtcagcctct

SEQ ID NO: 923955 - DNA, 33 bp, Homo sapien
aagccattttcttgataacattggctgttacca

SEQ ID NO: 923956 - DNA, 33 bp, Homo sapien
aagccattttcttgatgacattggctgttacca

SEQ ID NO: 923957 - DNA, 33 bp, Homo sapien
taaaaccactgtattgaagaacaaattcagcca

SEQ ID NO: 923958 - DNA, 33 bp, Homo sapien
taaaaccactgtattgcagaacaaattcagcca

SEQ ID NO: 923959 - DNA, 33 bp, Homo sapien
tagctgactcaatgaacgacactacctgtccca

SEQ ID NO: 923960 - DNA, 33 bp, Homo sapien
tagctgactcaatgaatgacactacctgtccca

SEQ ID NO: 923961 - DNA, 33 bp, Homo sapien
atgaactagaataatcgctccagttatcacttt

SEQ ID NO: 923962 - DNA, 33 bp, Homo sapien
atgaactagaataatctctccagttatcacttt

SEQ ID NO: 923963 - DNA, 33 bp, Homo sapien
ccaaccttgttcttctcaatgttgttggcatgg

SEQ ID NO: 923964 - DNA, 33 bp, Homo sapien
ccaaccttgttcttcttaatgttgttggcatgg

SEQ ID NO: 923965 - DNA, 33 bp, Homo sapien
tccattgtagatttgacgaaggcgaagaagctg

SEQ ID NO: 923966 - DNA, 33 bp, Homo sapien
tccattgtagatttgatgaaggcgaagaagctg

SEQ ID NO: 923967 - DNA, 33 bp, Homo sapien
gaaaaagtctcttctaccatctgttgatctctg

SEQ ID NO: 923968 - DNA, 33 bp, Homo sapien
gaaaaagtctcttctagcatctgttgatctctg

SEQ ID NO: 923969 - DNA, 33 bp, Homo sapien
accacaacattagacggatttaccagatgatag

SEQ ID NO: 923970 - DNA, 33 bp, Homo sapien
accacaacattagacgtatttaccagatgatag

SEQ ID NO: 923971 - DNA, 33 bp, Homo sapien
tgtctggcttatccaccgctggggtttaccagg

SEQ ID NO: 923972 - DNA, 33 bp, Homo sapien
tgtctggcttatccactgctggggtttaccagg

SEQ ID NO: 923973 - DNA, 33 bp, Homo sapien
agacgttacagcctataaatcagagttattatt

SEQ ID NO: 923974 - DNA, 33 bp, Homo sapien
agacgttacagcctatgaatcagagttattatt

SEQ ID NO: 923975 - DNA, 33 bp, Homo sapien
ataaacttataaatcacgtggtaggaagttact

SEQ ID NO: 923976 - DNA, 33 bp, Homo sapien
ataaacttataaatcatgtggtaggaagttact

SEQ ID NO: 923977 - DNA, 33 bp, Homo sapien
ggatttctaggactaacgtaacaaaataggaca

SEQ ID NO: 923978 - DNA, 33 bp, Homo sapien
ggatttctaggactaatgtaacaaaataggaca

SEQ ID NO: 923979 - DNA, 33 bp, Homo sapien
taagtaaaaaacagcaacttagcgaaaacagat

SEQ ID NO: 923980 - DNA, 33 bp, Homo sapien
taagtaaaaaacagcagcttagcgaaaacagat

SEQ ID NO: 923981 - DNA, 33 bp, Homo sapien
tccttaagttttctacaaaagagattgtgaatg

SEQ ID NO: 923982 - DNA, 33 bp, Homo sapien
tccttaagttttctacgaaagagattgtgaatg

SEQ ID NO: 923983 - DNA, 33 bp, Homo sapien
agagcaatgttgttcaaagttttaccggagaat

SEQ ID NO: 923984 - DNA, 33 bp, Homo sapien
agagcaatgttgttcacagttttaccggagaat

SEQ ID NO: 923985 - DNA, 33 bp, Homo sapien
actaagtcaaatatggccaaaaataatcatcat

SEQ ID NO: 923986 - DNA, 33 bp, Homo sapien
actaagtcaaatatggtcaaaaataatcatcat

SEQ ID NO: 923987 - DNA, 33 bp, Homo sapien
atcatctctgcagtaaaaggcctaagatgtaag

SEQ ID NO: 923988 - DNA, 33 bp, Homo sapien
atcatctctgcagtaagaggcctaagatgtaag

SEQ ID NO: 923989 - DNA, 33 bp, Homo sapien
tactgacaatacaatagaatgttgtctttttcc

SEQ ID NO: 923990 - DNA, 33 bp, Homo sapien
tactgacaatacaatataatgttgtctttttcc

SEQ ID NO: 923991 - DNA, 33 bp, Homo sapien
gaaatgattttcaaaacgcttcttggatccagt

SEQ ID NO: 923992 - DNA, 33 bp, Homo sapien
gaaatgattttcaaaatgcttcttggatccagt

SEQ ID NO: 923993 - DNA, 33 bp, Homo sapien
gtcccctggtactctaaaaatgcaaaaagaaga

SEQ ID NO: 923994 - DNA, 33 bp, Homo sapien
gtcccctggtactctagaaatgcaaaaagaaga

SEQ ID NO: 923995 - DNA, 33 bp, Homo sapien
caaattataagaggacaattatgtaaatgaaaa

SEQ ID NO: 923996 - DNA, 33 bp, Homo sapien
caaattataagaggactattatgtaaatgaaaa

SEQ ID NO: 923997 - DNA, 33 bp, Homo sapien
ctgaaaagtgtggaaagaataaatctatgcaaa

SEQ ID NO: 923998 - DNA, 33 bp, Homo sapien
ctgaaaagtgtggaaataataaatctatgcaaa

SEQ ID NO: 923999 - DNA, 33 bp, Homo sapien
gggatgagagttgacaccagaacatcatcagca

SEQ ID NO: 924000 - DNA, 33 bp, Homo sapien
gggatgagagttgacatcagaacatcatcagca

SEQ ID NO: 924001 - DNA, 33 bp, Homo sapien
tacctgcagatagggcaagtttttcccccattt

SEQ ID NO: 924002 - DNA, 33 bp, Homo sapien
tacctgcagatagggcgagtttttcccccattt

SEQ ID NO: 924003 - DNA, 33 bp, Homo sapien
tgttccaggtgtgttgaaaaagcacaggatgaa

SEQ ID NO: 924004 - DNA, 33 bp, Homo sapien
tgttccaggtgtgttgcaaaagcacaggatgaa

SEQ ID NO: 924005 - DNA, 33 bp, Homo sapien
actgtcacttcacagaatcgtgagacatgaggg

SEQ ID NO: 924006 - DNA, 33 bp, Homo sapien
actgtcacttcacagagtcgtgagacatgaggg

SEQ ID NO: 924007 - DNA, 33 bp, Homo sapien
aggttaaactttagatcaaggaaaggaatcaat

SEQ ID NO: 924008 - DNA, 33 bp, Homo sapien
aggttaaactttagatgaaggaaaggaatcaat

SEQ ID NO: 924009 - DNA, 33 bp, Homo sapien
tattattcagtgcctcaaagctatggtttaagt

SEQ ID NO: 924010 - DNA, 33 bp, Homo sapien
tattattcagtgcctcgaagctatggtttaagt

SEQ ID NO: 924011 - DNA, 33 bp, Homo sapien
tgtactgttacctttacggagcataattaatga

SEQ ID NO: 924012 - DNA, 33 bp, Homo sapien
tgtactgttacctttatggagcataattaatga

SEQ ID NO: 924013 - DNA, 33 bp, Homo sapien
caatggagaataagcaaacaagaattcctgaac

SEQ ID NO: 924014 - DNA, 33 bp, Homo sapien
caatggagaataagcagacaagaattcctgaac

SEQ ID NO: 924015 - DNA, 33 bp, Homo sapien
tttccttaacaaatacaagagccataccatgta

SEQ ID NO: 924016 - DNA, 33 bp, Homo sapien
tttccttaacaaatacgagagccataccatgta

SEQ ID NO: 924017 - DNA, 33 bp, Homo sapien
aaatggtcctattgtcacagaatcagaaatagt

SEQ ID NO: 924018 - DNA, 33 bp, Homo sapien
aaatggtcctattgtcgcagaatcagaaatagt

SEQ ID NO: 924019 - DNA, 33 bp, Homo sapien
gcaactatttaccaaaagtatgtatacatctat

SEQ ID NO: 924020 - DNA, 33 bp, Homo sapien
gcaactatttaccaaaggtatgtatacatctat

SEQ ID NO: 924021 - DNA, 33 bp, Homo sapien
cctgtctggtgctttaaaattcaccttcactat

SEQ ID NO: 924022 - DNA, 33 bp, Homo sapien
cctgtctggtgctttacaattcaccttcactat

SEQ ID NO: 924023 - DNA, 33 bp, Homo sapien
ctctgagtgttgtttacgtaaaaggctatttgt

SEQ ID NO: 924024 - DNA, 33 bp, Homo sapien
ctctgagtgttgtttatgtaaaaggctatttgt

SEQ ID NO: 924025 - DNA, 33 bp, Homo sapien
tgaaaacagagatttagacatcatatacactta

SEQ ID NO: 924026 - DNA, 33 bp, Homo sapien
tgaaaacagagatttatacatcatatacactta

SEQ ID NO: 924027 - DNA, 33 bp, Homo sapien
aaggtgtattggagaaagtggacctatgtgtgt

SEQ ID NO: 924028 - DNA, 33 bp, Homo sapien
aaggtgtattggagaatgtggacctatgtgtgt

SEQ ID NO: 924029 - DNA, 33 bp, Homo sapien
gccatctgctgcaaaaaaatttagagtttcaac

SEQ ID NO: 924030 - DNA, 33 bp, Homo sapien
gccatctgctgcaaaataatttagagtttcaac

SEQ ID NO: 924031 - DNA, 33 bp, Homo sapien
tgtttgcccagtgatacgctccaaatattcatt

SEQ ID NO: 924032 - DNA, 33 bp, Homo sapien
tgtttgcccagtgatatgctccaaatattcatt

SEQ ID NO: 924033 - DNA, 33 bp, Homo sapien
agtgaacacaagtaaaactagaacttttccaag

SEQ ID NO: 924034 - DNA, 33 bp, Homo sapien
agtgaacacaagtaaacctagaacttttccaag

SEQ ID NO: 924035 - DNA, 33 bp, Homo sapien
ctgagtgatattcagcaaagaatcagtctttcc

SEQ ID NO: 924036 - DNA, 33 bp, Homo sapien
ctgagtgatattcagcgaagaatcagtctttcc

SEQ ID NO: 924037 - DNA, 33 bp, Homo sapien
gacttagttgtactgaaccaaatgttcttagca

SEQ ID NO: 924038 - DNA, 33 bp, Homo sapien
gacttagttgtactgatccaaatgttcttagca

SEQ ID NO: 924039 - DNA, 33 bp, Homo sapien
agtctgtaggtccaacagtgttgaaagttgatg

SEQ ID NO: 924040 - DNA, 33 bp, Homo sapien
agtctgtaggtccaacggtgttgaaagttgatg

SEQ ID NO: 924041 - DNA, 33 bp, Homo sapien
cacaggagcaacagataaaatagccagaatgaa

SEQ ID NO: 924042 - DNA, 33 bp, Homo sapien
cacaggagcaacagatgaaatagccagaatgaa

SEQ ID NO: 924043 - DNA, 33 bp, Homo sapien
cccaggttttatgcaggatctttatttgaaggt

SEQ ID NO: 924044 - DNA, 33 bp, Homo sapien
cccaggttttatgcagtatctttatttgaaggt

SEQ ID NO: 924045 - DNA, 33 bp, Homo sapien
ggacagatttcaaggaacaatttttatagagcc

SEQ ID NO: 924046 - DNA, 33 bp, Homo sapien
ggacagatttcaaggagcaatttttatagagcc

SEQ ID NO: 924047 - DNA, 33 bp, Homo sapien
agacacctgagaattaacctagcctcttctcac

SEQ ID NO: 924048 - DNA, 33 bp, Homo sapien
agacacctgagaattaccctagcctcttctcac

SEQ ID NO: 924049 - DNA, 33 bp, Homo sapien
gcatttcccttgaaaaccagtataagacaagca

SEQ ID NO: 924050 - DNA, 33 bp, Homo sapien
gcatttcccttgaaaagcagtataagacaagca

SEQ ID NO: 924051 - DNA, 33 bp, Homo sapien
agcatttgctttgaacactttgcactgggtatt

SEQ ID NO: 924052 - DNA, 33 bp, Homo sapien
agcatttgctttgaacgctttgcactgggtatt

SEQ ID NO: 924053 - DNA, 33 bp, Homo sapien
tatttctcaaaaagagcaggttgatgtcacaag

SEQ ID NO: 924054 - DNA, 33 bp, Homo sapien
tatttctcaaaaagagtaggttgatgtcacaag

SEQ ID NO: 924055 - DNA, 33 bp, Homo sapien
atcacattaattttccaatgaaaagcctttaat

SEQ ID NO: 924056 - DNA, 33 bp, Homo sapien
atcacattaattttccgatgaaaagcctttaat

SEQ ID NO: 924057 - DNA, 33 bp, Homo sapien
attgtgagatttaaacgcagtgcagcatattaa

SEQ ID NO: 924058 - DNA, 33 bp, Homo sapien
attgtgagatttaaactcagtgcagcatattaa

SEQ ID NO: 924059 - DNA, 33 bp, Homo sapien
tgaaagtgatgtcacactggtgtagttagagtc

SEQ ID NO: 924060 - DNA, 33 bp, Homo sapien
tgaaagtgatgtcacagtggtgtagttagagtc

SEQ ID NO: 924061 - DNA, 33 bp, Homo sapien
tcacttggttgaattaagaaggattttcaagca

SEQ ID NO: 924062 - DNA, 33 bp, Homo sapien
tcacttggttgaattaggaaggattttcaagca

SEQ ID NO: 924063 - DNA, 33 bp, Homo sapien
tgacaattttttctccccagccagacaagctag

SEQ ID NO: 924064 - DNA, 33 bp, Homo sapien
tgacaattttttctccgcagccagacaagctag

SEQ ID NO: 924065 - DNA, 33 bp, Homo sapien
ataccaaactaaaacaacccaacatatgcaaat

SEQ ID NO: 924066 - DNA, 33 bp, Homo sapien
ataccaaactaaaacatcccaacatatgcaaat

SEQ ID NO: 924067 - DNA, 33 bp, Homo sapien
tgcactccagctccagaagagaaagaaactcac

SEQ ID NO: 924068 - DNA, 33 bp, Homo sapien
tgcactccagctccaggagagaaagaaactcac

SEQ ID NO: 924069 - DNA, 33 bp, Homo sapien
atgatgttttagactaagatgatggcaatgaag

SEQ ID NO: 924070 - DNA, 33 bp, Homo sapien
atgatgttttagactacgatgatggcaatgaag

SEQ ID NO: 924071 - DNA, 33 bp, Homo sapien
gattaagtaaagtaacaaatgtaaggcttaaca

SEQ ID NO: 924072 - DNA, 33 bp, Homo sapien
gattaagtaaagtaactaatgtaaggcttaaca

SEQ ID NO: 924073 - DNA, 33 bp, Homo sapien
tattacctgcattttacagctaatgaaatggag

SEQ ID NO: 924074 - DNA, 33 bp, Homo sapien
tattacctgcattttatagctaatgaaatggag

SEQ ID NO: 924075 - DNA, 33 bp, Homo sapien
ctgagcaaggccctaacggtcttcatttctatg

SEQ ID NO: 924076 - DNA, 33 bp, Homo sapien
ctgagcaaggccctaatggtcttcatttctatg

SEQ ID NO: 924077 - DNA, 33 bp, Homo sapien
gtcagaagtccaaaatcaaggtaacgggtgggc

SEQ ID NO: 924078 - DNA, 33 bp, Homo sapien
gtcagaagtccaaaatgaaggtaacgggtgggc

SEQ ID NO: 924079 - DNA, 33 bp, Homo sapien
gaatctcaaaactgccaaattaacttacattct

SEQ ID NO: 924080 - DNA, 33 bp, Homo sapien
gaatctcaaaactgccgaattaacttacattct

SEQ ID NO: 924081 - DNA, 33 bp, Homo sapien
gcatggtaccagctaacggtagtatcagtcatt

SEQ ID NO: 924082 - DNA, 33 bp, Homo sapien
gcatggtaccagctaatggtagtatcagtcatt

SEQ ID NO: 924083 - DNA, 33 bp, Homo sapien
ctctcagctttggaggacatcttacctgaagtt

SEQ ID NO: 924084 - DNA, 33 bp, Homo sapien
ctctcagctttggagggcatcttacctgaagtt

SEQ ID NO: 924085 - DNA, 33 bp, Homo sapien
ggcaggacgtctctgcactaggtcttctgtgtg

SEQ ID NO: 924086 - DNA, 33 bp, Homo sapien
ggcaggacgtctctgcgctaggtcttctgtgtg

SEQ ID NO: 924087 - DNA, 33 bp, Homo sapien
gactcacatgtaagaaatcgaaaggatgagaga

SEQ ID NO: 924088 - DNA, 33 bp, Homo sapien
gactcacatgtaagaattcgaaaggatgagaga

SEQ ID NO: 924089 - DNA, 33 bp, Homo sapien
tctctaaacatcaagggacacatattaagctct

SEQ ID NO: 924090 - DNA, 33 bp, Homo sapien
tctctaaacatcaaggtacacatattaagctct

SEQ ID NO: 924091 - DNA, 33 bp, Homo sapien
agttaaaggacttgttaaacaaaggacagatta

SEQ ID NO: 924092 - DNA, 33 bp, Homo sapien
agttaaaggacttgtttaacaaaggacagatta

SEQ ID NO: 924093 - DNA, 33 bp, Homo sapien
gttaacattttggtgcccaggagaacatacagc

SEQ ID NO: 924094 - DNA, 33 bp, Homo sapien
gttaacattttggtgctcaggagaacatacagc

SEQ ID NO: 924095 - DNA, 33 bp, Homo sapien
gccttgctctttgtgacgttagatagtgcacaa

SEQ ID NO: 924096 - DNA, 33 bp, Homo sapien
gccttgctctttgtgatgttagatagtgcacaa

SEQ ID NO: 924097 - DNA, 33 bp, Homo sapien
tcttgttacaaagatacgaaaaagtctactttt

SEQ ID NO: 924098 - DNA, 33 bp, Homo sapien
tcttgttacaaagatatgaaaaagtctactttt

SEQ ID NO: 924099 - DNA, 33 bp, Homo sapien
tgtttaattttttttgcattgacattgcattaa

SEQ ID NO: 924100 - DNA, 33 bp, Homo sapien
tgtttaattttttttgtattgacattgcattaa

SEQ ID NO: 924101 - DNA, 33 bp, Homo sapien
aatttctgctttgacagtgcagaaatccataaa

SEQ ID NO: 924102 - DNA, 33 bp, Homo sapien
aatttctgctttgacattgcagaaatccataaa

SEQ ID NO: 924103 - DNA, 33 bp, Homo sapien
caccttaagagacgaaagtgtaaaataagtgtt

SEQ ID NO: 924104 - DNA, 33 bp, Homo sapien
caccttaagagacgaaggtgtaaaataagtgtt

SEQ ID NO: 924105 - DNA, 33 bp, Homo sapien
acattgtacaactccacaggctccttacacaga

SEQ ID NO: 924106 - DNA, 33 bp, Homo sapien
acattgtacaactccagaggctccttacacaga

SEQ ID NO: 924107 - DNA, 33 bp, Homo sapien
agacccagaggcatcactactacattgtacaac

SEQ ID NO: 924108 - DNA, 33 bp, Homo sapien
agacccagaggcatcattactacattgtacaac

SEQ ID NO: 924109 - DNA, 33 bp, Homo sapien
aggattactgcatgaccctgtgaagttttatac

SEQ ID NO: 924110 - DNA, 33 bp, Homo sapien
aggattactgcatgactctgtgaagttttatac

SEQ ID NO: 924111 - DNA, 33 bp, Homo sapien
acttttgcagacttacaacacaacaatttcact

SEQ ID NO: 924112 - DNA, 33 bp, Homo sapien
acttttgcagacttacgacacaacaatttcact

SEQ ID NO: 924113 - DNA, 33 bp, Homo sapien
ttatgtgttaggtgaacctctggaaggcagtag

SEQ ID NO: 924114 - DNA, 33 bp, Homo sapien
ttatgtgttaggtgaatctctggaaggcagtag

SEQ ID NO: 924115 - DNA, 33 bp, Homo sapien
atctactaattcactgcaagctctataaaaatg

SEQ ID NO: 924116 - DNA, 33 bp, Homo sapien
atctactaattcactggaagctctataaaaatg

SEQ ID NO: 924117 - DNA, 33 bp, Homo sapien
caagtcaatgtggctacggcatctccaaggaag

SEQ ID NO: 924118 - DNA, 33 bp, Homo sapien
caagtcaatgtggctatggcatctccaaggaag

SEQ ID NO: 924119 - DNA, 33 bp, Homo sapien
agtgtttgagcttctaagtgagtactttggact

SEQ ID NO: 924120 - DNA, 33 bp, Homo sapien
agtgtttgagcttctaggtgagtactttggact

SEQ ID NO: 924121 - DNA, 33 bp, Homo sapien
gtactgcagtataaaccacccccaaaactatca

SEQ ID NO: 924122 - DNA, 33 bp, Homo sapien
gtactgcagtataaactacccccaaaactatca

SEQ ID NO: 924123 - DNA, 33 bp, Homo sapien
aaaaaccaacatgtaaagattcaccttttaaat

SEQ ID NO: 924124 - DNA, 33 bp, Homo sapien
aaaaaccaacatgtaaggattcaccttttaaat

SEQ ID NO: 924125 - DNA, 33 bp, Homo sapien
atcataatactaaaaacaagctatgcctttaaa

SEQ ID NO: 924126 - DNA, 33 bp, Homo sapien
atcataatactaaaaataagctatgcctttaaa

SEQ ID NO: 924127 - DNA, 33 bp, Homo sapien
atttctaatctttaccaaaggtgcacaaagggg

SEQ ID NO: 924128 - DNA, 33 bp, Homo sapien
atttctaatctttaccgaaggtgcacaaagggg

SEQ ID NO: 924129 - DNA, 33 bp, Homo sapien
cctacagttgcctatgaagtggagaaagagcct

SEQ ID NO: 924130 - DNA, 33 bp, Homo sapien
cctacagttgcctatgtagtggagaaagagcct

SEQ ID NO: 924131 - DNA, 33 bp, Homo sapien
caagaggtaaatgaaaacttcattgcaatatat

SEQ ID NO: 924132 - DNA, 33 bp, Homo sapien
caagaggtaaatgaaagcttcattgcaatatat

SEQ ID NO: 924133 - DNA, 33 bp, Homo sapien
ccttctggttgctctacaatgccttccagtggt

SEQ ID NO: 924134 - DNA, 33 bp, Homo sapien
ccttctggttgctctataatgccttccagtggt

SEQ ID NO: 924135 - DNA, 33 bp, Homo sapien
attcaacaacctacacagtacaatgtaagaatt

SEQ ID NO: 924136 - DNA, 33 bp, Homo sapien
attcaacaacctacacggtacaatgtaagaatt

SEQ ID NO: 924137 - DNA, 33 bp, Homo sapien
caaccagcacttgtggaatctaatagaataaga

SEQ ID NO: 924138 - DNA, 33 bp, Homo sapien
caaccagcacttgtggtatctaatagaataaga

SEQ ID NO: 924139 - DNA, 33 bp, Homo sapien
ttatctaactactatgaagttttcagaaaatgc

SEQ ID NO: 924140 - DNA, 33 bp, Homo sapien
ttatctaactactatggagttttcagaaaatgc

SEQ ID NO: 924141 - DNA, 33 bp, Homo sapien
ttagttctgtaatttagctaaaatttgtgtgga

SEQ ID NO: 924142 - DNA, 33 bp, Homo sapien
ttagttctgtaatttatctaaaatttgtgtgga

SEQ ID NO: 924143 - DNA, 33 bp, Homo sapien
gaaaagtagagtgagactatgttgcaggttagg

SEQ ID NO: 924144 - DNA, 33 bp, Homo sapien
gaaaagtagagtgagattatgttgcaggttagg

SEQ ID NO: 924145 - DNA, 33 bp, Homo sapien
gtcttcatgtgatgaccgggaaatttaagagca

SEQ ID NO: 924146 - DNA, 33 bp, Homo sapien
gtcttcatgtgatgactgggaaatttaagagca

SEQ ID NO: 924147 - DNA, 33 bp, Homo sapien
agcattcagggccgaacgaagaaaatcttaaga

SEQ ID NO: 924148 - DNA, 33 bp, Homo sapien
agcattcagggccgaatgaagaaaatcttaaga

SEQ ID NO: 924149 - DNA, 33 bp, Homo sapien
tatttaggtccttgaaactttgattccaattct

SEQ ID NO: 924150 - DNA, 33 bp, Homo sapien
tatttaggtccttgaacctttgattccaattct

SEQ ID NO: 924151 - DNA, 33 bp, Homo sapien
aatatgttttgagacccgaagaacctgtattta

SEQ ID NO: 924152 - DNA, 33 bp, Homo sapien
aatatgttttgagacctgaagaacctgtattta

SEQ ID NO: 924153 - DNA, 33 bp, Homo sapien
cgtttatcaaagagcacatggttgtaggtgtgt

SEQ ID NO: 924154 - DNA, 33 bp, Homo sapien
cgtttatcaaagagcagatggttgtaggtgtgt

SEQ ID NO: 924155 - DNA, 33 bp, Homo sapien
aactcttatcttggtaacaaaattatgattgca

SEQ ID NO: 924156 - DNA, 33 bp, Homo sapien
aactcttatcttggtagcaaaattatgattgca

SEQ ID NO: 924157 - DNA, 33 bp, Homo sapien
accaatgacaagcaaacgagagaatttagttgg

SEQ ID NO: 924158 - DNA, 33 bp, Homo sapien
accaatgacaagcaaatgagagaatttagttgg

SEQ ID NO: 924159 - DNA, 33 bp, Homo sapien
gtgaaattatgataaacgcaagttctaggagag

SEQ ID NO: 924160 - DNA, 33 bp, Homo sapien
gtgaaattatgataaatgcaagttctaggagag

SEQ ID NO: 924161 - DNA, 33 bp, Homo sapien
ttataaaggtaagccacgtttaactgaaatatg

SEQ ID NO: 924162 - DNA, 33 bp, Homo sapien
ttataaaggtaagccatgtttaactgaaatatg

SEQ ID NO: 924163 - DNA, 33 bp, Homo sapien
atttcagtatgatggtaaagtcactagcagcat

SEQ ID NO: 924164 - DNA, 33 bp, Homo sapien
atttcagtatgatggttaagtcactagcagcat

SEQ ID NO: 924165 - DNA, 33 bp, Homo sapien
tgagcaatcaagaagacggttgatgagttaaaa

SEQ ID NO: 924166 - DNA, 33 bp, Homo sapien
tgagcaatcaagaagatggttgatgagttaaaa

SEQ ID NO: 924167 - DNA, 33 bp, Homo sapien
tgctctgatgataatacgttgggaattcagcaa

SEQ ID NO: 924168 - DNA, 33 bp, Homo sapien
tgctctgatgataataggttgggaattcagcaa

SEQ ID NO: 924169 - DNA, 33 bp, Homo sapien
agattacaataaatcaacgatacctattgtaat

SEQ ID NO: 924170 - DNA, 33 bp, Homo sapien
agattacaataaatcagcgatacctattgtaat

SEQ ID NO: 924171 - DNA, 33 bp, Homo sapien
attctccaaaacagaccacattttagcgacaaa

SEQ ID NO: 924172 - DNA, 33 bp, Homo sapien
attctccaaaacagactacattttagcgacaaa

SEQ ID NO: 924173 - DNA, 33 bp, Homo sapien
gctgtattggatcctgaaaaatcttccttctgc

SEQ ID NO: 924174 - DNA, 33 bp, Homo sapien
gctgtattggatcctggaaaatcttccttctgc

SEQ ID NO: 924175 - DNA, 33 bp, Homo sapien
gcatataatattggccaacctgccatattttaa

SEQ ID NO: 924176 - DNA, 33 bp, Homo sapien
gcatataatattggcctacctgccatattttaa

SEQ ID NO: 924177 - DNA, 33 bp, Homo sapien
gaagccaggcacaaagcagtatatattttatga

SEQ ID NO: 924178 - DNA, 33 bp, Homo sapien
gaagccaggcacaaagtagtatatattttatga

SEQ ID NO: 924179 - DNA, 33 bp, Homo sapien
gttaggtcttttaaaaattaaagcatcatattt

SEQ ID NO: 924180 - DNA, 33 bp, Homo sapien
gttaggtcttttaaaacttaaagcatcatattt

SEQ ID NO: 924181 - DNA, 33 bp, Homo sapien
taggggaagaaaggtccagtagaaggtggtaac

SEQ ID NO: 924182 - DNA, 33 bp, Homo sapien
taggggaagaaaggtctagtagaaggtggtaac

SEQ ID NO: 924183 - DNA, 33 bp, Homo sapien
agttagttaataagaaaccatactagattagtg

SEQ ID NO: 924184 - DNA, 33 bp, Homo sapien
agttagttaataagaagccatactagattagtg

SEQ ID NO: 924185 - DNA, 33 bp, Homo sapien
gcagagtgagtgccaacttctcatttaataaat

SEQ ID NO: 924186 - DNA, 33 bp, Homo sapien
gcagagtgagtgccaatttctcatttaataaat

SEQ ID NO: 924187 - DNA, 33 bp, Homo sapien
ttccaatgtgagaatacggatacctcagttgaa

SEQ ID NO: 924188 - DNA, 33 bp, Homo sapien
ttccaatgtgagaatatggatacctcagttgaa

SEQ ID NO: 924189 - DNA, 33 bp, Homo sapien
ttttcattcacttactgaaattaagcctacaat

SEQ ID NO: 924190 - DNA, 33 bp, Homo sapien
ttttcattcacttacttaaattaagcctacaat

SEQ ID NO: 924191 - DNA, 33 bp, Homo sapien
aggttgaactatgcacacccccattcatatgtt

SEQ ID NO: 924192 - DNA, 33 bp, Homo sapien
aggttgaactatgcactcccccattcatatgtt

SEQ ID NO: 924193 - DNA, 33 bp, Homo sapien
taaggatagattcctgaaacagatccttctttc

SEQ ID NO: 924194 - DNA, 33 bp, Homo sapien
taaggatagattcctggaacagatccttctttc

SEQ ID NO: 924195 - DNA, 33 bp, Homo sapien
ggttttgtaaacacaaataacaaggtgcacttt

SEQ ID NO: 924196 - DNA, 33 bp, Homo sapien
ggttttgtaaacacaagtaacaaggtgcacttt

SEQ ID NO: 924197 - DNA, 33 bp, Homo sapien
ccacttctgagtaaaacggatgtcaaagaattt

SEQ ID NO: 924198 - DNA, 33 bp, Homo sapien
ccacttctgagtaaaagggatgtcaaagaattt

SEQ ID NO: 924199 - DNA, 33 bp, Homo sapien
gacactgtgaagccacacaaaaaaatcagcaga

SEQ ID NO: 924200 - DNA, 33 bp, Homo sapien
gacactgtgaagccacgcaaaaaaatcagcaga

SEQ ID NO: 924201 - DNA, 33 bp, Homo sapien
ctctgctgtggaggaaactttagcagggcacat

SEQ ID NO: 924202 - DNA, 33 bp, Homo sapien
ctctgctgtggaggaacctttagcagggcacat

SEQ ID NO: 924203 - DNA, 33 bp, Homo sapien
atattttgagttaagcgaattcatctttttgtc

SEQ ID NO: 924204 - DNA, 33 bp, Homo sapien
atattttgagttaagctaattcatctttttgtc

SEQ ID NO: 924205 - DNA, 33 bp, Homo sapien
aaacttgagtgagacacaaacatacctctaaat

SEQ ID NO: 924206 - DNA, 33 bp, Homo sapien
aaacttgagtgagacagaaacatacctctaaat

SEQ ID NO: 924207 - DNA, 33 bp, Homo sapien
cctcagaaggaatcaaacctcttgactccttga

SEQ ID NO: 924208 - DNA, 33 bp, Homo sapien
cctcagaaggaatcaaccctcttgactccttga

SEQ ID NO: 924209 - DNA, 33 bp, Homo sapien
gaatctaggcctctacacttggcttaaagatga

SEQ ID NO: 924210 - DNA, 33 bp, Homo sapien
gaatctaggcctctacccttggcttaaagatga

SEQ ID NO: 924211 - DNA, 33 bp, Homo sapien
aagcagcatattacacaaattgtcatactcaca

SEQ ID NO: 924212 - DNA, 33 bp, Homo sapien
aagcagcatattacacgaattgtcatactcaca

SEQ ID NO: 924213 - DNA, 33 bp, Homo sapien
cattctataggacaacgggccttctatctttaa

SEQ ID NO: 924214 - DNA, 33 bp, Homo sapien
cattctataggacaactggccttctatctttaa

SEQ ID NO: 924215 - DNA, 33 bp, Homo sapien
atctaatggctccaacaaaagtcttttattcca

SEQ ID NO: 924216 - DNA, 33 bp, Homo sapien
atctaatggctccaacgaaagtcttttattcca

SEQ ID NO: 924217 - DNA, 33 bp, Homo sapien
atgaaagtagagaaacagtgttgcaggccgaaa

SEQ ID NO: 924218 - DNA, 33 bp, Homo sapien
atgaaagtagagaaacggtgttgcaggccgaaa

SEQ ID NO: 924219 - DNA, 33 bp, Homo sapien
atcacttcctttacctaaaaatctgagattcta

SEQ ID NO: 924220 - DNA, 33 bp, Homo sapien
atcacttcctttacctgaaaatctgagattcta

SEQ ID NO: 924221 - DNA, 33 bp, Homo sapien
catacaatgagaaaccagcatttacaaggagcc

SEQ ID NO: 924222 - DNA, 33 bp, Homo sapien
catacaatgagaaaccggcatttacaaggagcc

SEQ ID NO: 924223 - DNA, 33 bp, Homo sapien
tcattctcggtatatgcaagagattggatccat

SEQ ID NO: 924224 - DNA, 33 bp, Homo sapien
tcattctcggtatatgtaagagattggatccat

SEQ ID NO: 924225 - DNA, 33 bp, Homo sapien
atttgcttttcctttaagtcccagagaaacaca

SEQ ID NO: 924226 - DNA, 33 bp, Homo sapien
atttgcttttcctttacgtcccagagaaacaca

SEQ ID NO: 924227 - DNA, 33 bp, Homo sapien
cacttcagttcttctccattggacatctggagc

SEQ ID NO: 924228 - DNA, 33 bp, Homo sapien
cacttcagttcttctctattggacatctggagc

SEQ ID NO: 924229 - DNA, 33 bp, Homo sapien
taatgcaggacttgacaaataggctagatgctc

SEQ ID NO: 924230 - DNA, 33 bp, Homo sapien
taatgcaggacttgacgaataggctagatgctc

SEQ ID NO: 924231 - DNA, 33 bp, Homo sapien
acatatagtgtagctacgtaaatgtatatatca

SEQ ID NO: 924232 - DNA, 33 bp, Homo sapien
acatatagtgtagctatgtaaatgtatatatca

SEQ ID NO: 924233 - DNA, 33 bp, Homo sapien
atgttatttccagataaagtgttcttcagtcct

SEQ ID NO: 924234 - DNA, 33 bp, Homo sapien
atgttatttccagatacagtgttcttcagtcct

SEQ ID NO: 924235 - DNA, 33 bp, Homo sapien
ccaagtagcatgttgtaaaatcctcatgaatct

SEQ ID NO: 924236 - DNA, 33 bp, Homo sapien
ccaagtagcatgttgtgaaatcctcatgaatct

SEQ ID NO: 924237 - DNA, 33 bp, Homo sapien
atttagtactccaagacgttaattatctaagaa

SEQ ID NO: 924238 - DNA, 33 bp, Homo sapien
atttagtactccaagatgttaattatctaagaa

SEQ ID NO: 924239 - DNA, 33 bp, Homo sapien
aagacactattcacaaatacagagagtttactg

SEQ ID NO: 924240 - DNA, 33 bp, Homo sapien
aagacactattcacaagtacagagagtttactg

SEQ ID NO: 924241 - DNA, 33 bp, Homo sapien
agataatagttctgcaatgaaaatacagttgac

SEQ ID NO: 924242 - DNA, 33 bp, Homo sapien
agataatagttctgcagtgaaaatacagttgac

SEQ ID NO: 924243 - DNA, 33 bp, Homo sapien
aaactttttaagttcaaccttggctctttcaat

SEQ ID NO: 924244 - DNA, 33 bp, Homo sapien
aaactttttaagttcagccttggctctttcaat

SEQ ID NO: 924245 - DNA, 33 bp, Homo sapien
aaaaggttgggcaagaggtcctatttgagagct

SEQ ID NO: 924246 - DNA, 33 bp, Homo sapien
aaaaggttgggcaagatgtcctatttgagagct

SEQ ID NO: 924247 - DNA, 33 bp, Homo sapien
gattagtctttatggaagttacaactgatagta

SEQ ID NO: 924248 - DNA, 33 bp, Homo sapien
gattagtctttatggaggttacaactgatagta

SEQ ID NO: 924249 - DNA, 33 bp, Homo sapien
cttttttacatattcgccctttacagttaagag

SEQ ID NO: 924250 - DNA, 33 bp, Homo sapien
cttttttacatattcgtcctttacagttaagag

SEQ ID NO: 924251 - DNA, 33 bp, Homo sapien
agacttagagtggagcggaaataagttgagagt

SEQ ID NO: 924252 - DNA, 33 bp, Homo sapien
agacttagagtggagctgaaataagttgagagt

SEQ ID NO: 924253 - DNA, 33 bp, Homo sapien
gggtaataagtaaagaaatctcaaagagtaaaa

SEQ ID NO: 924254 - DNA, 33 bp, Homo sapien
gggtaataagtaaagacatctcaaagagtaaaa

SEQ ID NO: 924255 - DNA, 33 bp, Homo sapien
gagcacaactattccaatcagcaggttccaggg

SEQ ID NO: 924256 - DNA, 33 bp, Homo sapien
gagcacaactattccagtcagcaggttccaggg

SEQ ID NO: 924257 - DNA, 33 bp, Homo sapien
cccctgaagctaaataatactaaaacaacaatc

SEQ ID NO: 924258 - DNA, 33 bp, Homo sapien
cccctgaagctaaatagtactaaaacaacaatc

SEQ ID NO: 924259 - DNA, 33 bp, Homo sapien
cagaatcaaagatgaacgccatatgaccatttt

SEQ ID NO: 924260 - DNA, 33 bp, Homo sapien
cagaatcaaagatgaatgccatatgaccatttt

SEQ ID NO: 924261 - DNA, 33 bp, Homo sapien
acttggtatgatttgactagttctgggaagtcc

SEQ ID NO: 924262 - DNA, 33 bp, Homo sapien
acttggtatgatttgagtagttctgggaagtcc

SEQ ID NO: 924263 - DNA, 33 bp, Homo sapien
atctgataatcgagacggctactgagtaactag

SEQ ID NO: 924264 - DNA, 33 bp, Homo sapien
atctgataatcgagactgctactgagtaactag

SEQ ID NO: 924265 - DNA, 33 bp, Homo sapien
cataatgcacttccaagccctccaaaatggttc

SEQ ID NO: 924266 - DNA, 33 bp, Homo sapien
cataatgcacttccaatccctccaaaatggttc

SEQ ID NO: 924267 - DNA, 33 bp, Homo sapien
aaaggtacatatgagaaaagatttttagcagaa

SEQ ID NO: 924268 - DNA, 33 bp, Homo sapien
aaaggtacatatgagagaagatttttagcagaa

SEQ ID NO: 924269 - DNA, 33 bp, Homo sapien
tggtggtagtggagagccctttgaaagttctct

SEQ ID NO: 924270 - DNA, 33 bp, Homo sapien
tggtggtagtggagagtcctttgaaagttctct

SEQ ID NO: 924271 - DNA, 33 bp, Homo sapien
taggtcatgcagagaaaatttgcctaaaatgtt

SEQ ID NO: 924272 - DNA, 33 bp, Homo sapien
taggtcatgcagagaagatttgcctaaaatgtt

SEQ ID NO: 924273 - DNA, 33 bp, Homo sapien
ttaatatccaaaataactcctcttaagaaagga

SEQ ID NO: 924274 - DNA, 33 bp, Homo sapien
ttaatatccaaaataagtcctcttaagaaagga

SEQ ID NO: 924275 - DNA, 33 bp, Homo sapien
ctcccatctctttgacagacaaacttcttgaac

SEQ ID NO: 924276 - DNA, 33 bp, Homo sapien
ctcccatctctttgactgacaaacttcttgaac

SEQ ID NO: 924277 - DNA, 33 bp, Homo sapien
tgttcttctgttagcacctggcaaaaaattgtc

SEQ ID NO: 924278 - DNA, 33 bp, Homo sapien
tgttcttctgttagcatctggcaaaaaattgtc

SEQ ID NO: 924279 - DNA, 33 bp, Homo sapien
tagcttcattttttccacattttcataatatac

SEQ ID NO: 924280 - DNA, 33 bp, Homo sapien
tagcttcattttttccgcattttcataatatac

SEQ ID NO: 924281 - DNA, 33 bp, Homo sapien
agcctggtggtaactactaaaattgggtattgt

SEQ ID NO: 924282 - DNA, 33 bp, Homo sapien
agcctggtggtaactattaaaattgggtattgt

SEQ ID NO: 924283 - DNA, 33 bp, Homo sapien
ttctaattctatgaaaaatcttggtgttttgat

SEQ ID NO: 924284 - DNA, 33 bp, Homo sapien
ttctaattctatgaaagatcttggtgttttgat

SEQ ID NO: 924285 - DNA, 33 bp, Homo sapien
gggattgctgcatcaaatagttcttcttttatc

SEQ ID NO: 924286 - DNA, 33 bp, Homo sapien
gggattgctgcatcaagtagttcttcttttatc

SEQ ID NO: 924287 - DNA, 33 bp, Homo sapien
atatattgaaacagcactatttagtatccagat

SEQ ID NO: 924288 - DNA, 33 bp, Homo sapien
atatattgaaacagcattatttagtatccagat

SEQ ID NO: 924289 - DNA, 33 bp, Homo sapien
tggctaaattcaaatacgctttggtctgatgtg

SEQ ID NO: 924290 - DNA, 33 bp, Homo sapien
tggctaaattcaaatatgctttggtctgatgtg

SEQ ID NO: 924291 - DNA, 33 bp, Homo sapien
ctagttctatttccaacgataccagattgcctt

SEQ ID NO: 924292 - DNA, 33 bp, Homo sapien
ctagttctatttccaatgataccagattgcctt

SEQ ID NO: 924293 - DNA, 33 bp, Homo sapien
caatagcatattcaaacttaatgctctgtcttc

SEQ ID NO: 924294 - DNA, 33 bp, Homo sapien
caatagcatattcaaagttaatgctctgtcttc

SEQ ID NO: 924295 - DNA, 33 bp, Homo sapien
taggaaattagaccaaacttgagactgaaataa

SEQ ID NO: 924296 - DNA, 33 bp, Homo sapien
taggaaattagaccaaccttgagactgaaataa

SEQ ID NO: 924297 - DNA, 33 bp, Homo sapien
gttacataacagatccaatccaattggaataat

SEQ ID NO: 924298 - DNA, 33 bp, Homo sapien
gttacataacagatcctatccaattggaataat

SEQ ID NO: 924299 - DNA, 33 bp, Homo sapien
gaaaatttccactcacaactactaaaaatacat

SEQ ID NO: 924300 - DNA, 33 bp, Homo sapien
gaaaatttccactcaccactactaaaaatacat

SEQ ID NO: 924301 - DNA, 33 bp, Homo sapien
tatctctacccttacaactggaatgacttgtcc

SEQ ID NO: 924302 - DNA, 33 bp, Homo sapien
tatctctacccttacatctggaatgacttgtcc

SEQ ID NO: 924303 - DNA, 33 bp, Homo sapien
gatcactcatgtaaaactgacaaatgtatcaca

SEQ ID NO: 924304 - DNA, 33 bp, Homo sapien
gatcactcatgtaaaattgacaaatgtatcaca

SEQ ID NO: 924305 - DNA, 33 bp, Homo sapien
aatgcacgtttcccccacattgtagtatctgca

SEQ ID NO: 924306 - DNA, 33 bp, Homo sapien
aatgcacgtttcccccgcattgtagtatctgca

SEQ ID NO: 924307 - DNA, 33 bp, Homo sapien
atgttggcccaactaaactctctacttatatta

SEQ ID NO: 924308 - DNA, 33 bp, Homo sapien
atgttggcccaactaatctctctacttatatta

SEQ ID NO: 924309 - DNA, 33 bp, Homo sapien
tgaaaatatgactgcaaaattaccagctttatt

SEQ ID NO: 924310 - DNA, 33 bp, Homo sapien
tgaaaatatgactgcacaattaccagctttatt

SEQ ID NO: 924311 - DNA, 33 bp, Homo sapien
gcagatgaatgctgagacactctgctggaagta

SEQ ID NO: 924312 - DNA, 33 bp, Homo sapien
gcagatgaatgctgagccactctgctggaagta

SEQ ID NO: 924313 - DNA, 33 bp, Homo sapien
ctactacctttgttcaccataaagttactatct

SEQ ID NO: 924314 - DNA, 33 bp, Homo sapien
ctactacctttgttcatcataaagttactatct

SEQ ID NO: 924315 - DNA, 33 bp, Homo sapien
gaatgaatgctttctcaacagggtaacaaatga

SEQ ID NO: 924316 - DNA, 33 bp, Homo sapien
gaatgaatgctttctcgacagggtaacaaatga

SEQ ID NO: 924317 - DNA, 33 bp, Homo sapien
aagtttttatcttggacggctagatgaaaggtt

SEQ ID NO: 924318 - DNA, 33 bp, Homo sapien
aagtttttatcttggatggctagatgaaaggtt

SEQ ID NO: 924319 - DNA, 33 bp, Homo sapien
aaaagcaccagcattaaaatttttgatgtgtcc

SEQ ID NO: 924320 - DNA, 33 bp, Homo sapien
aaaagcaccagcattacaatttttgatgtgtcc

SEQ ID NO: 924321 - DNA, 33 bp, Homo sapien
atatgtggtctaaataacaaatttactatattt

SEQ ID NO: 924322 - DNA, 33 bp, Homo sapien
atatgtggtctaaataccaaatttactatattt

SEQ ID NO: 924323 - DNA, 33 bp, Homo sapien
agacacaataaacctgaaactacatcatgttca

SEQ ID NO: 924324 - DNA, 33 bp, Homo sapien
agacacaataaacctggaactacatcatgttca

SEQ ID NO: 924325 - DNA, 33 bp, Homo sapien
aaaacactttgttatccctcctctgtgaaatac

SEQ ID NO: 924326 - DNA, 33 bp, Homo sapien
aaaacactttgttatctctcctctgtgaaatac

SEQ ID NO: 924327 - DNA, 33 bp, Homo sapien
aacgtcttttattagaaggctatgcaaaaagat

SEQ ID NO: 924328 - DNA, 33 bp, Homo sapien
aacgtcttttattagagggctatgcaaaaagat

SEQ ID NO: 924329 - DNA, 33 bp, Homo sapien
aaaattctgaggaatgccaagtggtgatgagaa

SEQ ID NO: 924330 - DNA, 33 bp, Homo sapien
aaaattctgaggaatgtcaagtggtgatgagaa

SEQ ID NO: 924331 - DNA, 33 bp, Homo sapien
aagattagcatgaaccgcaaatttcatttaaaa

SEQ ID NO: 924332 - DNA, 33 bp, Homo sapien
aagattagcatgaacctcaaatttcatttaaaa

SEQ ID NO: 924333 - DNA, 33 bp, Homo sapien
gaattgcaacaatgtcaagttttactaagaaaa

SEQ ID NO: 924334 - DNA, 33 bp, Homo sapien
gaattgcaacaatgtcgagttttactaagaaaa

SEQ ID NO: 924335 - DNA, 33 bp, Homo sapien
acaggtgtgcctggccaagggattgttttgaga

SEQ ID NO: 924336 - DNA, 33 bp, Homo sapien
acaggtgtgcctggccgagggattgttttgaga

SEQ ID NO: 924337 - DNA, 33 bp, Homo sapien
cctgcttaaccagagccaagttacaacaaattc

SEQ ID NO: 924338 - DNA, 33 bp, Homo sapien
cctgcttaaccagagctaagttacaacaaattc

SEQ ID NO: 924339 - DNA, 33 bp, Homo sapien
ttggttgcttaattcactaggtaccatatcact

SEQ ID NO: 924340 - DNA, 33 bp, Homo sapien
ttggttgcttaattcagtaggtaccatatcact

SEQ ID NO: 924341 - DNA, 33 bp, Homo sapien
aattattcaatgttcacgatcagcatgatcttc

SEQ ID NO: 924342 - DNA, 33 bp, Homo sapien
aattattcaatgttcaggatcagcatgatcttc

SEQ ID NO: 924343 - DNA, 33 bp, Homo sapien
catgcatatttttaagcagactgcatatcttct

SEQ ID NO: 924344 - DNA, 33 bp, Homo sapien
catgcatatttttaagtagactgcatatcttct

SEQ ID NO: 924345 - DNA, 33 bp, Homo sapien
tgactaaccagcaggccgaatgaatggatacat

SEQ ID NO: 924346 - DNA, 33 bp, Homo sapien
tgactaaccagcaggcggaatgaatggatacat

SEQ ID NO: 924347 - DNA, 33 bp, Homo sapien
ggaggggattgaagacagaggacaaaaatgacc

SEQ ID NO: 924348 - DNA, 33 bp, Homo sapien
ggaggggattgaagaccgaggacaaaaatgacc

SEQ ID NO: 924349 - DNA, 33 bp, Homo sapien
caaaagtccaccatcaaacaaaaatttccctct

SEQ ID NO: 924350 - DNA, 33 bp, Homo sapien
caaaagtccaccatcagacaaaaatttccctct

SEQ ID NO: 924351 - DNA, 33 bp, Homo sapien
aaaagctaaatctacaactggtttcaaaaacag

SEQ ID NO: 924352 - DNA, 33 bp, Homo sapien
aaaagctaaatctacacctggtttcaaaaacag

SEQ ID NO: 924353 - DNA, 33 bp, Homo sapien
tcaccaaagtgattaaaaatggatatgcctttc

SEQ ID NO: 924354 - DNA, 33 bp, Homo sapien
tcaccaaagtgattaagaatggatatgcctttc

SEQ ID NO: 924355 - DNA, 33 bp, Homo sapien
aatttataattgccacacaactgaagggaaatg

SEQ ID NO: 924356 - DNA, 33 bp, Homo sapien
aatttataattgccacgcaactgaagggaaatg

SEQ ID NO: 924357 - DNA, 33 bp, Homo sapien
actggaatattactcaggctaaatggaaatgaa

SEQ ID NO: 924358 - DNA, 33 bp, Homo sapien
actggaatattactcatgctaaatggaaatgaa

SEQ ID NO: 924359 - DNA, 33 bp, Homo sapien
gacttatctgaatggacgaataatgagaattat

SEQ ID NO: 924360 - DNA, 33 bp, Homo sapien
gacttatctgaatggatgaataatgagaattat

SEQ ID NO: 924361 - DNA, 33 bp, Homo sapien
tccaagatagcgtgggaaaaagtatgtttatag

SEQ ID NO: 924362 - DNA, 33 bp, Homo sapien
tccaagatagcgtggggaaaagtatgtttatag

SEQ ID NO: 924363 - DNA, 33 bp, Homo sapien
ctaacactctcaatgacgcttccaattggtaga

SEQ ID NO: 924364 - DNA, 33 bp, Homo sapien
ctaacactctcaatgatgcttccaattggtaga

SEQ ID NO: 924365 - DNA, 33 bp, Homo sapien
aaattcctagcttcaaactagcatgatgccatg

SEQ ID NO: 924366 - DNA, 33 bp, Homo sapien
aaattcctagcttcaacctagcatgatgccatg

SEQ ID NO: 924367 - DNA, 33 bp, Homo sapien
ggaacagagtagacaaaccagaaataaatccac

SEQ ID NO: 924368 - DNA, 33 bp, Homo sapien
ggaacagagtagacaatccagaaataaatccac

SEQ ID NO: 924369 - DNA, 33 bp, Homo sapien
aacattcaaggccaccaagaaaaatgaaacaac

SEQ ID NO: 924370 - DNA, 33 bp, Homo sapien
aacattcaaggccaccgagaaaaatgaaacaac

SEQ ID NO: 924371 - DNA, 33 bp, Homo sapien
tttagtgccttttaaacattctggcacaaagca

SEQ ID NO: 924372 - DNA, 33 bp, Homo sapien
tttagtgccttttaaatattctggcacaaagca

SEQ ID NO: 924373 - DNA, 33 bp, Homo sapien
tgtataaggacttcaaatacttctgtcttagaa

SEQ ID NO: 924374 - DNA, 33 bp, Homo sapien
tgtataaggacttcaattacttctgtcttagaa

SEQ ID NO: 924375 - DNA, 33 bp, Homo sapien
tttggagtatcatttacatcccatcacatcaat

SEQ ID NO: 924376 - DNA, 33 bp, Homo sapien
tttggagtatcatttatatcccatcacatcaat

SEQ ID NO: 924377 - DNA, 33 bp, Homo sapien
ataaatataaaaatcactcaaaggcatattcac

SEQ ID NO: 924378 - DNA, 33 bp, Homo sapien
ataaatataaaaatcattcaaaggcatattcac

SEQ ID NO: 924379 - DNA, 33 bp, Homo sapien
ctatgctcctcagaaccggaccaaaactgaggc

SEQ ID NO: 924380 - DNA, 33 bp, Homo sapien
ctatgctcctcagaactggaccaaaactgaggc

SEQ ID NO: 924381 - DNA, 33 bp, Homo sapien
atggaaatagaacaaaccatgaatgatggaata

SEQ ID NO: 924382 - DNA, 33 bp, Homo sapien
atggaaatagaacaaagcatgaatgatggaata

SEQ ID NO: 924383 - DNA, 33 bp, Homo sapien
aatgatccatgtgatacagaattggaaacaaca

SEQ ID NO: 924384 - DNA, 33 bp, Homo sapien
aatgatccatgtgatatagaattggaaacaaca

SEQ ID NO: 924385 - DNA, 33 bp, Homo sapien
gcatgaatattaaagaacaaaaacagctaaatt

SEQ ID NO: 924386 - DNA, 33 bp, Homo sapien
gcatgaatattaaagagcaaaaacagctaaatt

SEQ ID NO: 924387 - DNA, 33 bp, Homo sapien
ctgtgtcttcttctaaaagttgtatgattttag

SEQ ID NO: 924388 - DNA, 33 bp, Homo sapien
ctgtgtcttcttctaagagttgtatgattttag

SEQ ID NO: 924389 - DNA, 33 bp, Homo sapien
gaacaaatcgtgctggaaccaaatatctgcatg

SEQ ID NO: 924390 - DNA, 33 bp, Homo sapien
gaacaaatcgtgctgggaccaaatatctgcatg

SEQ ID NO: 924391 - DNA, 33 bp, Homo sapien
ataggtaaagctgaaaaagttcatccccaactc

SEQ ID NO: 924392 - DNA, 33 bp, Homo sapien
ataggtaaagctgaaagagttcatccccaactc

SEQ ID NO: 924393 - DNA, 33 bp, Homo sapien
tccaagccttctttcaatcaggacttttctgct

SEQ ID NO: 924394 - DNA, 33 bp, Homo sapien
tccaagccttctttcagtcaggacttttctgct

SEQ ID NO: 924395 - DNA, 33 bp, Homo sapien
ggtcctctgcaaagacagtagtaaaataatcaa

SEQ ID NO: 924396 - DNA, 33 bp, Homo sapien
ggtcctctgcaaagaccgtagtaaaataatcaa

SEQ ID NO: 924397 - DNA, 33 bp, Homo sapien
acaattgttgctcagacggtctggcaaaaaaag

SEQ ID NO: 924398 - DNA, 33 bp, Homo sapien
acaattgttgctcagatggtctggcaaaaaaag

SEQ ID NO: 924399 - DNA, 33 bp, Homo sapien
tgcttggctttatgtacatcaaaatggatcaat

SEQ ID NO: 924400 - DNA, 33 bp, Homo sapien
tgcttggctttatgtatatcaaaatggatcaat

SEQ ID NO: 924401 - DNA, 33 bp, Homo sapien
agttcactttgtgaaccagacgctgtagtagaa

SEQ ID NO: 924402 - DNA, 33 bp, Homo sapien
agttcactttgtgaactagacgctgtagtagaa

SEQ ID NO: 924403 - DNA, 33 bp, Homo sapien
tgtatccttaaaaaaactcagtggcattcttgc

SEQ ID NO: 924404 - DNA, 33 bp, Homo sapien
tgtatccttaaaaaaagtcagtggcattcttgc

SEQ ID NO: 924405 - DNA, 33 bp, Homo sapien
gggataactgactcctcacttatttgctgtgtt

SEQ ID NO: 924406 - DNA, 33 bp, Homo sapien
gggataactgactccttacttatttgctgtgtt

SEQ ID NO: 924407 - DNA, 33 bp, Homo sapien
cctaatgctgaataaccatagattttgggttca

SEQ ID NO: 924408 - DNA, 33 bp, Homo sapien
cctaatgctgaataactatagattttgggttca

SEQ ID NO: 924409 - DNA, 33 bp, Homo sapien
tactacaaaataaagtaacaggccaatgaagag

SEQ ID NO: 924410 - DNA, 33 bp, Homo sapien
tactacaaaataaagtcacaggccaatgaagag

SEQ ID NO: 924411 - DNA, 33 bp, Homo sapien
attgtagcaaatatcaaataatggaaagctaat

SEQ ID NO: 924412 - DNA, 33 bp, Homo sapien
attgtagcaaatatcagataatggaaagctaat

SEQ ID NO: 924413 - DNA, 33 bp, Homo sapien
atctactacttcaacccacagtactttgaattt

SEQ ID NO: 924414 - DNA, 33 bp, Homo sapien
atctactacttcaacctacagtactttgaattt

SEQ ID NO: 924415 - DNA, 33 bp, Homo sapien
tcaaacttgccaatccgagtgaaggttgtggtt

SEQ ID NO: 924416 - DNA, 33 bp, Homo sapien
tcaaacttgccaatcctagtgaaggttgtggtt

SEQ ID NO: 924417 - DNA, 33 bp, Homo sapien
aaatgatgttttaaacaactgctccagttcaca

SEQ ID NO: 924418 - DNA, 33 bp, Homo sapien
aaatgatgttttaaactactgctccagttcaca

SEQ ID NO: 924419 - DNA, 33 bp, Homo sapien
caaaagctctgacttaacgcattctttagtctt

SEQ ID NO: 924420 - DNA, 33 bp, Homo sapien
caaaagctctgacttatcgcattctttagtctt

SEQ ID NO: 924421 - DNA, 33 bp, Homo sapien
tatagatttatgaggaaaataatgataaccagc

SEQ ID NO: 924422 - DNA, 33 bp, Homo sapien
tatagatttatgaggagaataatgataaccagc

SEQ ID NO: 924423 - DNA, 33 bp, Homo sapien
cttatcaaagatcagacgtttacaagtgtgaag

SEQ ID NO: 924424 - DNA, 33 bp, Homo sapien
cttatcaaagatcagatgtttacaagtgtgaag

SEQ ID NO: 924425 - DNA, 33 bp, Homo sapien
ctgagaataacaagaaaatctgtaacattggcc

SEQ ID NO: 924426 - DNA, 33 bp, Homo sapien
ctgagaataacaagaagatctgtaacattggcc

SEQ ID NO: 924427 - DNA, 33 bp, Homo sapien
tgcatcatctgaaagaatattttaattggtcca

SEQ ID NO: 924428 - DNA, 33 bp, Homo sapien
tgcatcatctgaaagagtattttaattggtcca

SEQ ID NO: 924429 - DNA, 33 bp, Homo sapien
ttaaaatgcagttccaataataatttcaagctg

SEQ ID NO: 924430 - DNA, 33 bp, Homo sapien
ttaaaatgcagttccagtaataatttcaagctg

SEQ ID NO: 924431 - DNA, 33 bp, Homo sapien
atctatatctctaaaaactcagccagaaaacat

SEQ ID NO: 924432 - DNA, 33 bp, Homo sapien
atctatatctctaaaatctcagccagaaaacat

SEQ ID NO: 924433 - DNA, 33 bp, Homo sapien
gattgattaaaacagaagttaacacgtagtgaa

SEQ ID NO: 924434 - DNA, 33 bp, Homo sapien
gattgattaaaacagaggttaacacgtagtgaa

SEQ ID NO: 924435 - DNA, 33 bp, Homo sapien
ccagattctagaggtacatatgcagaaaagaag

SEQ ID NO: 924436 - DNA, 33 bp, Homo sapien
ccagattctagaggtatatatgcagaaaagaag

SEQ ID NO: 924437 - DNA, 33 bp, Homo sapien
agtggggatttgaaatcagaattattaccatca

SEQ ID NO: 924438 - DNA, 33 bp, Homo sapien
agtggggatttgaaattagaattattaccatca

SEQ ID NO: 924439 - DNA, 33 bp, Homo sapien
ctcctgctcctagaagacttatgctcttattaa

SEQ ID NO: 924440 - DNA, 33 bp, Homo sapien
ctcctgctcctagaagccttatgctcttattaa

SEQ ID NO: 924441 - DNA, 33 bp, Homo sapien
gttgcactgtgagtgaaatgccatccaacagca

SEQ ID NO: 924442 - DNA, 33 bp, Homo sapien
gttgcactgtgagtgagatgccatccaacagca

SEQ ID NO: 924443 - DNA, 33 bp, Homo sapien
gtagaagctaacatgtcaaaacaaccacaacct

SEQ ID NO: 924444 - DNA, 33 bp, Homo sapien
gtagaagctaacatgttaaaacaaccacaacct

SEQ ID NO: 924445 - DNA, 33 bp, Homo sapien
agtattgccttaatgcacgaagtctgatcatag

SEQ ID NO: 924446 - DNA, 33 bp, Homo sapien
agtattgccttaatgcgcgaagtctgatcatag

SEQ ID NO: 924447 - DNA, 33 bp, Homo sapien
tagatgcttgtatagactaatccaccacactgt

SEQ ID NO: 924448 - DNA, 33 bp, Homo sapien
tagatgcttgtatagagtaatccaccacactgt

SEQ ID NO: 924449 - DNA, 33 bp, Homo sapien
tttctctttgtaagtacgaaaaagatgactttc

SEQ ID NO: 924450 - DNA, 33 bp, Homo sapien
tttctctttgtaagtatgaaaaagatgactttc

SEQ ID NO: 924451 - DNA, 33 bp, Homo sapien
aaggaaacatggacaactaaaagaaggttcagg

SEQ ID NO: 924452 - DNA, 33 bp, Homo sapien
aaggaaacatggacaattaaaagaaggttcagg

SEQ ID NO: 924453 - DNA, 33 bp, Homo sapien
ttttttggtgatgtaaatgtacttgagaaaaaa

SEQ ID NO: 924454 - DNA, 33 bp, Homo sapien
ttttttggtgatgtaactgtacttgagaaaaaa

SEQ ID NO: 924455 - DNA, 33 bp, Homo sapien
actttccaaataaagagaatcctacatttggcc

SEQ ID NO: 924456 - DNA, 33 bp, Homo sapien
actttccaaataaagataatcctacatttggcc

SEQ ID NO: 924457 - DNA, 33 bp, Homo sapien
tgtgtgctaaattaggcaaaagttagtaaatat

SEQ ID NO: 924458 - DNA, 33 bp, Homo sapien
tgtgtgctaaattagggaaaagttagtaaatat

SEQ ID NO: 924459 - DNA, 33 bp, Homo sapien
ctcagttgaaattcagcaatccctgtgtcgcct

SEQ ID NO: 924460 - DNA, 33 bp, Homo sapien
ctcagttgaaattcagtaatccctgtgtcgcct

SEQ ID NO: 924461 - DNA, 33 bp, Homo sapien
caataagatacatggaaaaacactgatttcatc

SEQ ID NO: 924462 - DNA, 33 bp, Homo sapien
caataagatacatggagaaacactgatttcatc

SEQ ID NO: 924463 - DNA, 33 bp, Homo sapien
acctctaacacatgtaagaatccaaagtaattt

SEQ ID NO: 924464 - DNA, 33 bp, Homo sapien
acctctaacacatgtatgaatccaaagtaattt

SEQ ID NO: 924465 - DNA, 33 bp, Homo sapien
tgctgtgtagattcccagcaagaacataaagaa

SEQ ID NO: 924466 - DNA, 33 bp, Homo sapien
tgctgtgtagattcccggcaagaacataaagaa

SEQ ID NO: 924467 - DNA, 33 bp, Homo sapien
tgaggtctttcagttaaaatttgctggagcata

SEQ ID NO: 924468 - DNA, 33 bp, Homo sapien
tgaggtctttcagttagaatttgctggagcata

SEQ ID NO: 924469 - DNA, 33 bp, Homo sapien
ctaataaaaatggcaaaaaaatcttaaaatatt

SEQ ID NO: 924470 - DNA, 33 bp, Homo sapien
ctaataaaaatggcaacaaaatcttaaaatatt

SEQ ID NO: 924471 - DNA, 33 bp, Homo sapien
taaggttttaggaaacactatggaacatctgtg

SEQ ID NO: 924472 - DNA, 33 bp, Homo sapien
taaggttttaggaaacgctatggaacatctgtg

SEQ ID NO: 924473 - DNA, 33 bp, Homo sapien
acccccattctggaaccagcatataagaagttt

SEQ ID NO: 924474 - DNA, 33 bp, Homo sapien
acccccattctggaactagcatataagaagttt

SEQ ID NO: 924475 - DNA, 33 bp, Homo sapien
accatttctgtctatgccagttattaataaaac

SEQ ID NO: 924476 - DNA, 33 bp, Homo sapien
accatttctgtctatgtcagttattaataaaac

SEQ ID NO: 924477 - DNA, 33 bp, Homo sapien
attatcaatgaaagcaatgacacttaaacttta

SEQ ID NO: 924478 - DNA, 33 bp, Homo sapien
attatcaatgaaagcagtgacacttaaacttta

SEQ ID NO: 924479 - DNA, 33 bp, Homo sapien
gattctcactgtgctaaaaattaaaacccattt

SEQ ID NO: 924480 - DNA, 33 bp, Homo sapien
gattctcactgtgctagaaattaaaacccattt

SEQ ID NO: 924481 - DNA, 33 bp, Homo sapien
cacacaaaaatgtaaacgttctgttcagaaaaa

SEQ ID NO: 924482 - DNA, 33 bp, Homo sapien
cacacaaaaatgtaaatgttctgttcagaaaaa

SEQ ID NO: 924483 - DNA, 33 bp, Homo sapien
cttttttgctatgttccagtagcctacttcggt

SEQ ID NO: 924484 - DNA, 33 bp, Homo sapien
cttttttgctatgttctagtagcctacttcggt

SEQ ID NO: 924485 - DNA, 33 bp, Homo sapien
aatatctgaccctaatcagcaatcttttgtaag

SEQ ID NO: 924486 - DNA, 33 bp, Homo sapien
aatatctgaccctaattagcaatcttttgtaag

SEQ ID NO: 924487 - DNA, 33 bp, Homo sapien
atgatgtcagcctagactaggaatgatagtgat

SEQ ID NO: 924488 - DNA, 33 bp, Homo sapien
atgatgtcagcctagattaggaatgatagtgat

SEQ ID NO: 924489 - DNA, 33 bp, Homo sapien
atatataaacctatgaatatgcaatggactcta

SEQ ID NO: 924490 - DNA, 33 bp, Homo sapien
atatataaacctatgactatgcaatggactcta

SEQ ID NO: 924491 - DNA, 33 bp, Homo sapien
tcccaggcatgattctaaacatttcctgtacat

SEQ ID NO: 924492 - DNA, 33 bp, Homo sapien
tcccaggcatgattctgaacatttcctgtacat

SEQ ID NO: 924493 - DNA, 33 bp, Homo sapien
atttcttgtcttcatgcaagttttcaaaaaagt

SEQ ID NO: 924494 - DNA, 33 bp, Homo sapien
atttcttgtcttcatggaagttttcaaaaaagt

SEQ ID NO: 924495 - DNA, 33 bp, Homo sapien
taagggacatagtgtccatttgcaatattagaa

SEQ ID NO: 924496 - DNA, 33 bp, Homo sapien
taagggacatagtgtctatttgcaatattagaa

SEQ ID NO: 924497 - DNA, 33 bp, Homo sapien
tgacattcatggaggaaaaatggaacaggacca

SEQ ID NO: 924498 - DNA, 33 bp, Homo sapien
tgacattcatggaggagaaatggaacaggacca

SEQ ID NO: 924499 - DNA, 33 bp, Homo sapien
aatcactattaaattacggtgttcgagaatggt

SEQ ID NO: 924500 - DNA, 33 bp, Homo sapien
aatcactattaaattatggtgttcgagaatggt

SEQ ID NO: 924501 - DNA, 33 bp, Homo sapien
cttaagccagtttggaccctttgcttgcagatt

SEQ ID NO: 924502 - DNA, 33 bp, Homo sapien
cttaagccagtttggatcctttgcttgcagatt

SEQ ID NO: 924503 - DNA, 33 bp, Homo sapien
tttagcacaatgtttaacaaagacttcattaat

SEQ ID NO: 924504 - DNA, 33 bp, Homo sapien
tttagcacaatgtttagcaaagacttcattaat

SEQ ID NO: 924505 - DNA, 33 bp, Homo sapien
ctgagcaataaacagaatcaatgtagaattcag

SEQ ID NO: 924506 - DNA, 33 bp, Homo sapien
ctgagcaataaacagagtcaatgtagaattcag

SEQ ID NO: 924507 - DNA, 33 bp, Homo sapien
ccaggtggtctgtctacgttggcattgaggcag

SEQ ID NO: 924508 - DNA, 33 bp, Homo sapien
ccaggtggtctgtctatgttggcattgaggcag

SEQ ID NO: 924509 - DNA, 33 bp, Homo sapien
agataaaaacattccaaactcaaaaccacagca

SEQ ID NO: 924510 - DNA, 33 bp, Homo sapien
agataaaaacattccatactcaaaaccacagca

SEQ ID NO: 924511 - DNA, 33 bp, Homo sapien
acaagcaataggaaaaagacttcaatagtcttc

SEQ ID NO: 924512 - DNA, 33 bp, Homo sapien
acaagcaataggaaaatgacttcaatagtcttc

SEQ ID NO: 924513 - DNA, 33 bp, Homo sapien
tttcctgtggaaataaagtttgagaatataaat

SEQ ID NO: 924514 - DNA, 33 bp, Homo sapien
tttcctgtggaaataatgtttgagaatataaat

SEQ ID NO: 924515 - DNA, 33 bp, Homo sapien
gccagtaaaaatgcaaaatggtacaatcactct

SEQ ID NO: 924516 - DNA, 33 bp, Homo sapien
gccagtaaaaatgcaacatggtacaatcactct

SEQ ID NO: 924517 - DNA, 33 bp, Homo sapien
aagagaaacatggacagtggccaaactcttttt

SEQ ID NO: 924518 - DNA, 33 bp, Homo sapien
aagagaaacatggacattggccaaactcttttt

SEQ ID NO: 924519 - DNA, 33 bp, Homo sapien
atatcagctcttgtagaatgacaggaatcagga

SEQ ID NO: 924520 - DNA, 33 bp, Homo sapien
atatcagctcttgtaggatgacaggaatcagga

SEQ ID NO: 924521 - DNA, 33 bp, Homo sapien
ctgtcttggctaatagcaaacataatttcggct

SEQ ID NO: 924522 - DNA, 33 bp, Homo sapien
ctgtcttggctaatagtaaacataatttcggct

SEQ ID NO: 924523 - DNA, 33 bp, Homo sapien
ctattttggtgggtaacagcaggaatcaagcca

SEQ ID NO: 924524 - DNA, 33 bp, Homo sapien
ctattttggtgggtaagagcaggaatcaagcca

SEQ ID NO: 924525 - DNA, 33 bp, Homo sapien
atgtatcggtttgtcacggaagattttgggaac

SEQ ID NO: 924526 - DNA, 33 bp, Homo sapien
atgtatcggtttgtcatggaagattttgggaac

SEQ ID NO: 924527 - DNA, 33 bp, Homo sapien
tggatgatgcacacaacgtggatggtgaaggtt

SEQ ID NO: 924528 - DNA, 33 bp, Homo sapien
tggatgatgcacacaatgtggatggtgaaggtt

SEQ ID NO: 924529 - DNA, 33 bp, Homo sapien
aaattccaggattacagaagtttgcaagctact

SEQ ID NO: 924530 - DNA, 33 bp, Homo sapien
aaattccaggattacataagtttgcaagctact

SEQ ID NO: 924531 - DNA, 33 bp, Homo sapien
acctattctagccttgaatatttccacagaatc

SEQ ID NO: 924532 - DNA, 33 bp, Homo sapien
acctattctagccttggatatttccacagaatc

SEQ ID NO: 924533 - DNA, 33 bp, Homo sapien
cttgctgtttggaaacccttctgacctctactt

SEQ ID NO: 924534 - DNA, 33 bp, Homo sapien
cttgctgtttggaaactcttctgacctctactt

SEQ ID NO: 924535 - DNA, 33 bp, Homo sapien
tgaaagctgtggacaacatcatctacatatagc

SEQ ID NO: 924536 - DNA, 33 bp, Homo sapien
tgaaagctgtggacaatatcatctacatatagc

SEQ ID NO: 924537 - DNA, 33 bp, Homo sapien
gaatttgtgatcttaaatgagctttttccatac

SEQ ID NO: 924538 - DNA, 33 bp, Homo sapien
gaatttgtgatcttaagtgagctttttccatac

SEQ ID NO: 924539 - DNA, 33 bp, Homo sapien
ggattgacttagggtacgtctgtcaagtcacag

SEQ ID NO: 924540 - DNA, 33 bp, Homo sapien
ggattgacttagggtatgtctgtcaagtcacag

SEQ ID NO: 924541 - DNA, 33 bp, Homo sapien
ccctacccacactgtacgaccagctccgcagta

SEQ ID NO: 924542 - DNA, 33 bp, Homo sapien
ccctacccacactgtatgaccagctccgcagta

SEQ ID NO: 924543 - DNA, 33 bp, Homo sapien
ttccatccatgcatcacacctaagagctcacaa

SEQ ID NO: 924544 - DNA, 33 bp, Homo sapien
ttccatccatgcatcatacctaagagctcacaa

SEQ ID NO: 924545 - DNA, 33 bp, Homo sapien
gttcttacaatgatccgagggccctacataatc

SEQ ID NO: 924546 - DNA, 33 bp, Homo sapien
gttcttacaatgatcctagggccctacataatc

SEQ ID NO: 924547 - DNA, 33 bp, Homo sapien
caaacttaatattaggccaagctaacaattatc

SEQ ID NO: 924548 - DNA, 33 bp, Homo sapien
caaacttaatattaggtcaagctaacaattatc

SEQ ID NO: 924549 - DNA, 33 bp, Homo sapien
ataataacaataacacagacttatcaaaaggaa

SEQ ID NO: 924550 - DNA, 33 bp, Homo sapien
ataataacaataacacggacttatcaaaaggaa

SEQ ID NO: 924551 - DNA, 33 bp, Homo sapien
tataagacataagcaacctaaccaatgaaagaa

SEQ ID NO: 924552 - DNA, 33 bp, Homo sapien
tataagacataagcaatctaaccaatgaaagaa

SEQ ID NO: 924553 - DNA, 33 bp, Homo sapien
gagttgttgaagaaaaaagactggatttcaggt

SEQ ID NO: 924554 - DNA, 33 bp, Homo sapien
gagttgttgaagaaaagagactggatttcaggt

SEQ ID NO: 924555 - DNA, 33 bp, Homo sapien
agttagacagaagaaagctcacacttgaaattt

SEQ ID NO: 924556 - DNA, 33 bp, Homo sapien
agttagacagaagaaatctcacacttgaaattt

SEQ ID NO: 924557 - DNA, 33 bp, Homo sapien
ttaattccttgcaagaagattgtctcaaatgat

SEQ ID NO: 924558 - DNA, 33 bp, Homo sapien
ttaattccttgcaagaggattgtctcaaatgat

SEQ ID NO: 924559 - DNA, 33 bp, Homo sapien
aaaagaacttaagcaaatattttgaatgaccaa

SEQ ID NO: 924560 - DNA, 33 bp, Homo sapien
aaaagaacttaagcaagtattttgaatgaccaa

SEQ ID NO: 924561 - DNA, 33 bp, Homo sapien
ggcttgaaggaaaggaagtttagcaggaaccag

SEQ ID NO: 924562 - DNA, 33 bp, Homo sapien
ggcttgaaggaaaggatgtttagcaggaaccag

SEQ ID NO: 924563 - DNA, 33 bp, Homo sapien
gctttcatttacagaacgttgattggtagatca

SEQ ID NO: 924564 - DNA, 33 bp, Homo sapien
gctttcatttacagaatgttgattggtagatca

SEQ ID NO: 924565 - DNA, 33 bp, Homo sapien
aatgaacctgagagtcaccacttaagatactgt

SEQ ID NO: 924566 - DNA, 33 bp, Homo sapien
aatgaacctgagagtcgccacttaagatactgt

SEQ ID NO: 924567 - DNA, 33 bp, Homo sapien
atttttccccgagcaagcatccttggattcaag

SEQ ID NO: 924568 - DNA, 33 bp, Homo sapien
atttttccccgagcaatcatccttggattcaag

SEQ ID NO: 924569 - DNA, 33 bp, Homo sapien
aatattaagatcagcaaagggaaaaatataggc

SEQ ID NO: 924570 - DNA, 33 bp, Homo sapien
aatattaagatcagcagagggaaaaatataggc

SEQ ID NO: 924571 - DNA, 33 bp, Homo sapien
actctcttgttagagacgaatgcagctggtgac

SEQ ID NO: 924572 - DNA, 33 bp, Homo sapien
actctcttgttagagatgaatgcagctggtgac

SEQ ID NO: 924573 - DNA, 33 bp, Homo sapien
caacagataattgtccagatcatggcatgactc

SEQ ID NO: 924574 - DNA, 33 bp, Homo sapien
caacagataattgtccggatcatggcatgactc

SEQ ID NO: 924575 - DNA, 33 bp, Homo sapien
gaagaaatatctggcagcaagtttatgttttct

SEQ ID NO: 924576 - DNA, 33 bp, Homo sapien
gaagaaatatctggcatcaagtttatgttttct

SEQ ID NO: 924577 - DNA, 33 bp, Homo sapien
gacagtatttctggcaacgtgacccacttagga

SEQ ID NO: 924578 - DNA, 33 bp, Homo sapien
gacagtatttctggcaccgtgacccacttagga

SEQ ID NO: 924579 - DNA, 33 bp, Homo sapien
ttgtgtcagctcaaagccagtgtctagcaatcc

SEQ ID NO: 924580 - DNA, 33 bp, Homo sapien
ttgtgtcagctcaaaggcagtgtctagcaatcc

SEQ ID NO: 924581 - DNA, 33 bp, Homo sapien
gtaggatagatatgcaatagtgacctgtgaatt

SEQ ID NO: 924582 - DNA, 33 bp, Homo sapien
gtaggatagatatgcattagtgacctgtgaatt

SEQ ID NO: 924583 - DNA, 33 bp, Homo sapien
gtaagcactaaacaacgcgggccatagatgcct

SEQ ID NO: 924584 - DNA, 33 bp, Homo sapien
gtaagcactaaacaactcgggccatagatgcct

SEQ ID NO: 924585 - DNA, 33 bp, Homo sapien
acttttcttcatacaactaaactctgggcccct

SEQ ID NO: 924586 - DNA, 33 bp, Homo sapien
acttttcttcatacaagtaaactctgggcccct

SEQ ID NO: 924587 - DNA, 33 bp, Homo sapien
cggcattgtaaataaactgggggatggtaagca

SEQ ID NO: 924588 - DNA, 33 bp, Homo sapien
cggcattgtaaataaattgggggatggtaagca

SEQ ID NO: 924589 - DNA, 33 bp, Homo sapien
atatttatgttggcaaaaaataagacaagggaa

SEQ ID NO: 924590 - DNA, 33 bp, Homo sapien
atatttatgttggcaagaaataagacaagggaa

SEQ ID NO: 924591 - DNA, 33 bp, Homo sapien
taacagaacagtaatacgctgtgactccagtta

SEQ ID NO: 924592 - DNA, 33 bp, Homo sapien
taacagaacagtaataggctgtgactccagtta

SEQ ID NO: 924593 - DNA, 33 bp, Homo sapien
tctgcctgacagaaaactatatctagctgatgg

SEQ ID NO: 924594 - DNA, 33 bp, Homo sapien
tctgcctgacagaaaagtatatctagctgatgg

SEQ ID NO: 924595 - DNA, 33 bp, Homo sapien
tgggagtccattctgacgtgattggatgattga

SEQ ID NO: 924596 - DNA, 33 bp, Homo sapien
tgggagtccattctgatgtgattggatgattga

SEQ ID NO: 924597 - DNA, 33 bp, Homo sapien
tattgtctcttagaaccaagtctcatgaccatc

SEQ ID NO: 924598 - DNA, 33 bp, Homo sapien
tattgtctcttagaactaagtctcatgaccatc

SEQ ID NO: 924599 - DNA, 33 bp, Homo sapien
acaacatagcagtagacacagttgaaaatgaag

SEQ ID NO: 924600 - DNA, 33 bp, Homo sapien
acaacatagcagtagatacagttgaaaatgaag

SEQ ID NO: 924601 - DNA, 33 bp, Homo sapien
actttgttctggcctacagtaaagcgcctttca

SEQ ID NO: 924602 - DNA, 33 bp, Homo sapien
actttgttctggcctatagtaaagcgcctttca

SEQ ID NO: 924603 - DNA, 33 bp, Homo sapien
gatggagacgacaggccatctggagcagttgcc

SEQ ID NO: 924604 - DNA, 33 bp, Homo sapien
gatggagacgacaggctatctggagcagttgcc

SEQ ID NO: 924605 - DNA, 33 bp, Homo sapien
ggaaagaagcaaacaaactcagaaataccattt

SEQ ID NO: 924606 - DNA, 33 bp, Homo sapien
ggaaagaagcaaacaagctcagaaataccattt

SEQ ID NO: 924607 - DNA, 33 bp, Homo sapien
agtttggcatgtgaacaggggacacaatatggc

SEQ ID NO: 924608 - DNA, 33 bp, Homo sapien
agtttggcatgtgaacgggggacacaatatggc

SEQ ID NO: 924609 - DNA, 33 bp, Homo sapien
tcttgctacaggaaaacagaaaaccaactggaa

SEQ ID NO: 924610 - DNA, 33 bp, Homo sapien
tcttgctacaggaaaatagaaaaccaactggaa

SEQ ID NO: 924611 - DNA, 33 bp, Homo sapien
catacaaaagtagcaacagcagacaagacctga

SEQ ID NO: 924612 - DNA, 33 bp, Homo sapien
catacaaaagtagcaagagcagacaagacctga

SEQ ID NO: 924613 - DNA, 33 bp, Homo sapien
cttattgcctgaaaaagccatccgtttctcatt

SEQ ID NO: 924614 - DNA, 33 bp, Homo sapien
cttattgcctgaaaaatccatccgtttctcatt

SEQ ID NO: 924615 - DNA, 33 bp, Homo sapien
tgacttctttgagggccaatgagtacagctttg

SEQ ID NO: 924616 - DNA, 33 bp, Homo sapien
tgacttctttgagggctaatgagtacagctttg

SEQ ID NO: 924617 - DNA, 33 bp, Homo sapien
ttaattcctgatgacaataagaaagaaaattga

SEQ ID NO: 924618 - DNA, 33 bp, Homo sapien
ttaattcctgatgacagtaagaaagaaaattga

SEQ ID NO: 924619 - DNA, 33 bp, Homo sapien
tgaattagatttatgacataccgagtttgtggt

SEQ ID NO: 924620 - DNA, 33 bp, Homo sapien
tgaattagatttatgatataccgagtttgtggt

SEQ ID NO: 924621 - DNA, 33 bp, Homo sapien
ttttatatccttcaacaaaaggtaaattccttg

SEQ ID NO: 924622 - DNA, 33 bp, Homo sapien
ttttatatccttcaaccaaaggtaaattccttg

SEQ ID NO: 924623 - DNA, 33 bp, Homo sapien
attatatagaaaaaaaatctccttctcttctca

SEQ ID NO: 924624 - DNA, 33 bp, Homo sapien
attatatagaaaaaaagtctccttctcttctca

SEQ ID NO: 924625 - DNA, 33 bp, Homo sapien
actgaatggatagctaacatttctggaaagttt

SEQ ID NO: 924626 - DNA, 33 bp, Homo sapien
actgaatggatagctagcatttctggaaagttt

SEQ ID NO: 924627 - DNA, 33 bp, Homo sapien
ccctaaatacctgcaagttagtagggaaaaata

SEQ ID NO: 924628 - DNA, 33 bp, Homo sapien
ccctaaatacctgcaatttagtagggaaaaata

SEQ ID NO: 924629 - DNA, 33 bp, Homo sapien
ggagacagaactacagcatgtaactaacaaggt

SEQ ID NO: 924630 - DNA, 33 bp, Homo sapien
ggagacagaactacaggatgtaactaacaaggt

SEQ ID NO: 924631 - DNA, 33 bp, Homo sapien
aacattaaatattgtacagcctgtgggcattgt

SEQ ID NO: 924632 - DNA, 33 bp, Homo sapien
aacattaaatattgtagagcctgtgggcattgt

SEQ ID NO: 924633 - DNA, 33 bp, Homo sapien
actctctaggtggaagcattttcagcatgaaaa

SEQ ID NO: 924634 - DNA, 33 bp, Homo sapien
actctctaggtggaagtattttcagcatgaaaa

SEQ ID NO: 924635 - DNA, 33 bp, Homo sapien
attggttcctctaggagaatttattgccctagt

SEQ ID NO: 924636 - DNA, 33 bp, Homo sapien
attggttcctctaggataatttattgccctagt

SEQ ID NO: 924637 - DNA, 33 bp, Homo sapien
taacacattgctgtaccgagctaagttaatgac

SEQ ID NO: 924638 - DNA, 33 bp, Homo sapien
taacacattgctgtactgagctaagttaatgac

SEQ ID NO: 924639 - DNA, 33 bp, Homo sapien
ccccaggtcattcttacatcatcctgtgggaac

SEQ ID NO: 924640 - DNA, 33 bp, Homo sapien
ccccaggtcattcttatatcatcctgtgggaac

SEQ ID NO: 924641 - DNA, 33 bp, Homo sapien
tttatgggaacttttcgaaatcaaaatattgga

SEQ ID NO: 924642 - DNA, 33 bp, Homo sapien
tttatgggaacttttctaaatcaaaatattgga

SEQ ID NO: 924643 - DNA, 33 bp, Homo sapien
agcaaaactaacctgaaggataaatcatcatga

SEQ ID NO: 924644 - DNA, 33 bp, Homo sapien
agcaaaactaacctgagggataaatcatcatga

SEQ ID NO: 924645 - DNA, 33 bp, Homo sapien
ggaaagaagaaagttcacaacaaatgaatttag

SEQ ID NO: 924646 - DNA, 33 bp, Homo sapien
ggaaagaagaaagttcgcaacaaatgaatttag

SEQ ID NO: 924647 - DNA, 33 bp, Homo sapien
atctgcctgactgacaaatgaaagtttggcatg

SEQ ID NO: 924648 - DNA, 33 bp, Homo sapien
atctgcctgactgacagatgaaagtttggcatg

SEQ ID NO: 924649 - DNA, 33 bp, Homo sapien
taggacacaatttcacacaatggaagaacccag

SEQ ID NO: 924650 - DNA, 33 bp, Homo sapien
taggacacaatttcacgcaatggaagaacccag

SEQ ID NO: 924651 - DNA, 33 bp, Homo sapien
ctaggcaatggcatccaaaggtcattggcctat

SEQ ID NO: 924652 - DNA, 33 bp, Homo sapien
ctaggcaatggcatccgaaggtcattggcctat

SEQ ID NO: 924653 - DNA, 33 bp, Homo sapien
tatccaaagtccttaagtgctgcctattcctga

SEQ ID NO: 924654 - DNA, 33 bp, Homo sapien
tatccaaagtccttaattgctgcctattcctga

SEQ ID NO: 924655 - DNA, 33 bp, Homo sapien
tgactatagttgattacgtaaactgtaacttaa

SEQ ID NO: 924656 - DNA, 33 bp, Homo sapien
tgactatagttgattatgtaaactgtaacttaa

SEQ ID NO: 924657 - DNA, 33 bp, Homo sapien
ttttttcactttttacaacagtcatttcaaaca

SEQ ID NO: 924658 - DNA, 33 bp, Homo sapien
ttttttcactttttaccacagtcatttcaaaca

SEQ ID NO: 924659 - DNA, 33 bp, Homo sapien
cagttcctcctgcccccaccagtcgactatgag

SEQ ID NO: 924660 - DNA, 33 bp, Homo sapien
cagttcctcctgccccgaccagtcgactatgag

SEQ ID NO: 924661 - DNA, 33 bp, Homo sapien
atttacagcacattaaaacgatctgtattatta

SEQ ID NO: 924662 - DNA, 33 bp, Homo sapien
atttacagcacattaagacgatctgtattatta

SEQ ID NO: 924663 - DNA, 33 bp, Homo sapien
tctatttgctatcgtacgtattcaaaaaaatca

SEQ ID NO: 924664 - DNA, 33 bp, Homo sapien
tctatttgctatcgtatgtattcaaaaaaatca

SEQ ID NO: 924665 - DNA, 33 bp, Homo sapien
tcagatctttggtcgaacattattccggatgtt

SEQ ID NO: 924666 - DNA, 33 bp, Homo sapien
tcagatctttggtcgagcattattccggatgtt

SEQ ID NO: 924667 - DNA, 33 bp, Homo sapien
aatttcttccggcagagatcctaaatcatctct

SEQ ID NO: 924668 - DNA, 33 bp, Homo sapien
aatttcttccggcagatatcctaaatcatctct

SEQ ID NO: 924669 - DNA, 33 bp, Homo sapien
atgccagcgaaacagaggcatggtttaagtaaa

SEQ ID NO: 924670 - DNA, 33 bp, Homo sapien
atgccagcgaaacagatgcatggtttaagtaaa

SEQ ID NO: 924671 - DNA, 33 bp, Homo sapien
tcatttttccatgtgacatttggttttacctgc

SEQ ID NO: 924672 - DNA, 33 bp, Homo sapien
tcatttttccatgtgatatttggttttacctgc

SEQ ID NO: 924673 - DNA, 33 bp, Homo sapien
ctagtacaggacactcgaagtatcataacgaac

SEQ ID NO: 924674 - DNA, 33 bp, Homo sapien
ctagtacaggacactctaagtatcataacgaac

SEQ ID NO: 924675 - DNA, 33 bp, Homo sapien
tactgtagggtgtataacttctccttaataatt

SEQ ID NO: 924676 - DNA, 33 bp, Homo sapien
tactgtagggtgtataccttctccttaataatt

SEQ ID NO: 924677 - DNA, 33 bp, Homo sapien
ttccagtgagctttccaatacccattttatctg

SEQ ID NO: 924678 - DNA, 33 bp, Homo sapien
ttccagtgagctttccgatacccattttatctg

SEQ ID NO: 924679 - DNA, 33 bp, Homo sapien
aagatcttagtgcctgcaattacactgaatttg

SEQ ID NO: 924680 - DNA, 33 bp, Homo sapien
aagatcttagtgcctggaattacactgaatttg

SEQ ID NO: 924681 - DNA, 33 bp, Homo sapien
ggattttgcatcaaacgggtggtagtttattct

SEQ ID NO: 924682 - DNA, 33 bp, Homo sapien
ggattttgcatcaaactggtggtagtttattct

SEQ ID NO: 924683 - DNA, 33 bp, Homo sapien
tcaccttatcactgacaccacaaaggcatttca

SEQ ID NO: 924684 - DNA, 33 bp, Homo sapien
tcaccttatcactgacgccacaaaggcatttca

SEQ ID NO: 924685 - DNA, 33 bp, Homo sapien
ctatttccaaaggataggaggccaagaaaacat

SEQ ID NO: 924686 - DNA, 33 bp, Homo sapien
ctatttccaaaggatatgaggccaagaaaacat

SEQ ID NO: 924687 - DNA, 33 bp, Homo sapien
ggtggcaggagacagacagcgcatggagaaact

SEQ ID NO: 924688 - DNA, 33 bp, Homo sapien
ggtggcaggagacagagagcgcatggagaaact

SEQ ID NO: 924689 - DNA, 33 bp, Homo sapien
tttgaaattaaaagccaacctctttgattttac

SEQ ID NO: 924690 - DNA, 33 bp, Homo sapien
tttgaaattaaaagcccacctctttgattttac

SEQ ID NO: 924691 - DNA, 33 bp, Homo sapien
ttgggaataataaccaacatagtagaaagttaa

SEQ ID NO: 924692 - DNA, 33 bp, Homo sapien
ttgggaataataaccatcatagtagaaagttaa

SEQ ID NO: 924693 - DNA, 33 bp, Homo sapien
tccgcaaagctcagaacagtcctgccccctagc

SEQ ID NO: 924694 - DNA, 33 bp, Homo sapien
tccgcaaagctcagaatagtcctgccccctagc

SEQ ID NO: 924695 - DNA, 33 bp, Homo sapien
tgtagtctacccaaataagaagaaagcagaaaa

SEQ ID NO: 924696 - DNA, 33 bp, Homo sapien
tgtagtctacccaaatgagaagaaagcagaaaa

SEQ ID NO: 924697 - DNA, 33 bp, Homo sapien
ctctgaagcaccttgccgatggggaaaaaaaaa

SEQ ID NO: 924698 - DNA, 33 bp, Homo sapien
ctctgaagcaccttgctgatggggaaaaaaaaa

SEQ ID NO: 924699 - DNA, 33 bp, Homo sapien
tcctgttatgccagataaatgcaaaatggcatg

SEQ ID NO: 924700 - DNA, 33 bp, Homo sapien
tcctgttatgccagatgaatgcaaaatggcatg

SEQ ID NO: 924701 - DNA, 33 bp, Homo sapien
aaggttctgacgggaaatatccagagtctcttc

SEQ ID NO: 924702 - DNA, 33 bp, Homo sapien
aaggttctgacgggaattatccagagtctcttc

SEQ ID NO: 924703 - DNA, 33 bp, Homo sapien
atgaaactgaagaaaacgccacaatcctgaagc

SEQ ID NO: 924704 - DNA, 33 bp, Homo sapien
atgaaactgaagaaaatgccacaatcctgaagc

SEQ ID NO: 924705 - DNA, 33 bp, Homo sapien
caggagtctgtcaaataaggatccacttcagaa

SEQ ID NO: 924706 - DNA, 33 bp, Homo sapien
caggagtctgtcaaatgaggatccacttcagaa

SEQ ID NO: 924707 - DNA, 33 bp, Homo sapien
catgaaaatgcaattccaattggctctcttggg

SEQ ID NO: 924708 - DNA, 33 bp, Homo sapien
catgaaaatgcaattctaattggctctcttggg

SEQ ID NO: 924709 - DNA, 33 bp, Homo sapien
tacgacttcataccatcatatcttttgtctgga

SEQ ID NO: 924710 - DNA, 33 bp, Homo sapien
tacgacttcataccattatatcttttgtctgga

SEQ ID NO: 924711 - DNA, 33 bp, Homo sapien
ataagggagggaaggtaaaaacatgaaggctaa

SEQ ID NO: 924712 - DNA, 33 bp, Homo sapien
ataagggagggaaggtgaaaacatgaaggctaa

SEQ ID NO: 924713 - DNA, 33 bp, Homo sapien
ctgagactaaacatccagcttttctggccttta

SEQ ID NO: 924714 - DNA, 33 bp, Homo sapien
ctgagactaaacatccggcttttctggccttta

SEQ ID NO: 924715 - DNA, 33 bp, Homo sapien
ctggcaaccatacaatgaaatcttattcagcct

SEQ ID NO: 924716 - DNA, 33 bp, Homo sapien
ctggcaaccatacaattaaatcttattcagcct

SEQ ID NO: 924717 - DNA, 33 bp, Homo sapien
tggggtagactccataaggactagaagaatagg

SEQ ID NO: 924718 - DNA, 33 bp, Homo sapien
tggggtagactccatagggactagaagaatagg

SEQ ID NO: 924719 - DNA, 33 bp, Homo sapien
tgggctagggtattggaacaaagtaaaaatgaa

SEQ ID NO: 924720 - DNA, 33 bp, Homo sapien
tgggctagggtattggcacaaagtaaaaatgaa

SEQ ID NO: 924721 - DNA, 33 bp, Homo sapien
ttctctttgtagaaaaatcagctcccaatctta

SEQ ID NO: 924722 - DNA, 33 bp, Homo sapien
ttctctttgtagaaaagtcagctcccaatctta

SEQ ID NO: 924723 - DNA, 33 bp, Homo sapien
gtttattatctgaggccaaaggtctgatccact

SEQ ID NO: 924724 - DNA, 33 bp, Homo sapien
gtttattatctgaggctaaaggtctgatccact

SEQ ID NO: 924725 - DNA, 33 bp, Homo sapien
agaggtccttacaagacaatgttgagtatgtag

SEQ ID NO: 924726 - DNA, 33 bp, Homo sapien
agaggtccttacaagagaatgttgagtatgtag

SEQ ID NO: 924727 - DNA, 33 bp, Homo sapien
tgtaggttcaacataacctcaatcaaaagcaag

SEQ ID NO: 924728 - DNA, 33 bp, Homo sapien
tgtaggttcaacataatctcaatcaaaagcaag

SEQ ID NO: 924729 - DNA, 33 bp, Homo sapien
ttactgtagctttaaaatcagctaatgtcagtc

SEQ ID NO: 924730 - DNA, 33 bp, Homo sapien
ttactgtagctttaaagtcagctaatgtcagtc

SEQ ID NO: 924731 - DNA, 33 bp, Homo sapien
aaataaagcttctagaaccgtctttccttctag

SEQ ID NO: 924732 - DNA, 33 bp, Homo sapien
aaataaagcttctagatccgtctttccttctag

SEQ ID NO: 924733 - DNA, 33 bp, Homo sapien
aacagaaaaaaacaatgaatggataatcaaagt

SEQ ID NO: 924734 - DNA, 33 bp, Homo sapien
aacagaaaaaaacaattaatggataatcaaagt

SEQ ID NO: 924735 - DNA, 33 bp, Homo sapien
aatatccaaatgcctaaagcagattcagaaaat

SEQ ID NO: 924736 - DNA, 33 bp, Homo sapien
aatatccaaatgcctatagcagattcagaaaat

SEQ ID NO: 924737 - DNA, 33 bp, Homo sapien
gactaatacaagtgcacagtgataattatatgg

SEQ ID NO: 924738 - DNA, 33 bp, Homo sapien
gactaatacaagtgcatagtgataattatatgg

SEQ ID NO: 924739 - DNA, 33 bp, Homo sapien
aaatgctctacttctcaaagaggctctctcata

SEQ ID NO: 924740 - DNA, 33 bp, Homo sapien
aaatgctctacttctcgaagaggctctctcata

SEQ ID NO: 924741 - DNA, 33 bp, Homo sapien
ccattatattttcatccaactactaaccttcgt

SEQ ID NO: 924742 - DNA, 33 bp, Homo sapien
ccattatattttcatctaactactaaccttcgt

SEQ ID NO: 924743 - DNA, 33 bp, Homo sapien
ctctccaccaggcatgacaaacttatctatgag

SEQ ID NO: 924744 - DNA, 33 bp, Homo sapien
ctctccaccaggcatggcaaacttatctatgag

SEQ ID NO: 924745 - DNA, 33 bp, Homo sapien
aatctgagtacagaacaattctagatttttaca

SEQ ID NO: 924746 - DNA, 33 bp, Homo sapien
aatctgagtacagaacgattctagatttttaca

SEQ ID NO: 924747 - DNA, 33 bp, Homo sapien
acacagtatacaggaacgatgcatgctaggctt

SEQ ID NO: 924748 - DNA, 33 bp, Homo sapien
acacagtatacaggaatgatgcatgctaggctt

SEQ ID NO: 924749 - DNA, 33 bp, Homo sapien
gacatatgaaaaggaactaaaggcttcagcaga

SEQ ID NO: 924750 - DNA, 33 bp, Homo sapien
gacatatgaaaaggaagtaaaggcttcagcaga

SEQ ID NO: 924751 - DNA, 33 bp, Homo sapien
actttcaaatgtttcaataagtctttgaagttc

SEQ ID NO: 924752 - DNA, 33 bp, Homo sapien
actttcaaatgtttcagtaagtctttgaagttc

SEQ ID NO: 924753 - DNA, 33 bp, Homo sapien
tcttctagtctatgtcacactgaaaagattagg

SEQ ID NO: 924754 - DNA, 33 bp, Homo sapien
tcttctagtctatgtcgcactgaaaagattagg

SEQ ID NO: 924755 - DNA, 33 bp, Homo sapien
ttgaatgggatttgcaccgtatctatatactgt

SEQ ID NO: 924756 - DNA, 33 bp, Homo sapien
ttgaatgggatttgcatcgtatctatatactgt

SEQ ID NO: 924757 - DNA, 33 bp, Homo sapien
atccatggactggagaaaaatggaaatagagtc

SEQ ID NO: 924758 - DNA, 33 bp, Homo sapien
atccatggactggagagaaatggaaatagagtc

SEQ ID NO: 924759 - DNA, 33 bp, Homo sapien
ggaatctgtattgaaacagtagtcagtatgtaa

SEQ ID NO: 924760 - DNA, 33 bp, Homo sapien
ggaatctgtattgaaagagtagtcagtatgtaa

SEQ ID NO: 924761 - DNA, 33 bp, Homo sapien
gggtgaggaaagacacagatgggaacggagaca

SEQ ID NO: 924762 - DNA, 33 bp, Homo sapien
gggtgaggaaagacacggatgggaacggagaca

SEQ ID NO: 924763 - DNA, 33 bp, Homo sapien
catgttctccgttaaaaagtaagagattaaatc

SEQ ID NO: 924764 - DNA, 33 bp, Homo sapien
catgttctccgttaaacagtaagagattaaatc

SEQ ID NO: 924765 - DNA, 33 bp, Homo sapien
agtgaatatactatacaagtgacatctaagagc

SEQ ID NO: 924766 - DNA, 33 bp, Homo sapien
agtgaatatactatacgagtgacatctaagagc

SEQ ID NO: 924767 - DNA, 33 bp, Homo sapien
tgccctcagtagaaaaaaagtcatacataatgt

SEQ ID NO: 924768 - DNA, 33 bp, Homo sapien
tgccctcagtagaaaagaagtcatacataatgt

SEQ ID NO: 924769 - DNA, 33 bp, Homo sapien
tggaaattctctcaaaatacaagtaatcaaact

SEQ ID NO: 924770 - DNA, 33 bp, Homo sapien
tggaaattctctcaaagtacaagtaatcaaact

SEQ ID NO: 924771 - DNA, 33 bp, Homo sapien
catcagaaatgtagaccgagagtgaacagattc

SEQ ID NO: 924772 - DNA, 33 bp, Homo sapien
catcagaaatgtagactgagagtgaacagattc

SEQ ID NO: 924773 - DNA, 33 bp, Homo sapien
ccagcagaggtaacgacgtgtttccagcataga

SEQ ID NO: 924774 - DNA, 33 bp, Homo sapien
ccagcagaggtaacgatgtgtttccagcataga

SEQ ID NO: 924775 - DNA, 33 bp, Homo sapien
atgtcctggaagctcccccttcaatgttctaga

SEQ ID NO: 924776 - DNA, 33 bp, Homo sapien
atgtcctggaagctcctccttcaatgttctaga

SEQ ID NO: 924777 - DNA, 33 bp, Homo sapien
gctatcagggatgataaccaatacaataaagta

SEQ ID NO: 924778 - DNA, 33 bp, Homo sapien
gctatcagggatgatagccaatacaataaagta

SEQ ID NO: 924779 - DNA, 33 bp, Homo sapien
aggtcagctttagacacgtagagtacagagtgc

SEQ ID NO: 924780 - DNA, 33 bp, Homo sapien
aggtcagctttagacatgtagagtacagagtgc

SEQ ID NO: 924781 - DNA, 33 bp, Homo sapien
tccaattgtctggtaaatgtctctacttgcgtg

SEQ ID NO: 924782 - DNA, 33 bp, Homo sapien
tccaattgtctggtaattgtctctacttgcgtg

SEQ ID NO: 924783 - DNA, 33 bp, Homo sapien
ttacagagatcagtaacgtgcccacttcagtct

SEQ ID NO: 924784 - DNA, 33 bp, Homo sapien
ttacagagatcagtaatgtgcccacttcagtct

SEQ ID NO: 924785 - DNA, 33 bp, Homo sapien
atggatgagtaggtagaacaacatacagtcttt

SEQ ID NO: 924786 - DNA, 33 bp, Homo sapien
atggatgagtaggtaggacaacatacagtcttt

SEQ ID NO: 924787 - DNA, 33 bp, Homo sapien
aaacaccacagttgttgaaagagtttcataagg

SEQ ID NO: 924788 - DNA, 33 bp, Homo sapien
aaacaccacagttgtttaaagagtttcataagg

SEQ ID NO: 924789 - DNA, 33 bp, Homo sapien
gtgaagtcactatgataaatggacactgtagtc

SEQ ID NO: 924790 - DNA, 33 bp, Homo sapien
gtgaagtcactatgatcaatggacactgtagtc

SEQ ID NO: 924791 - DNA, 33 bp, Homo sapien
tgtattatgtgtactaacaatttatgcaaaagg

SEQ ID NO: 924792 - DNA, 33 bp, Homo sapien
tgtattatgtgtactaccaatttatgcaaaagg

SEQ ID NO: 924793 - DNA, 33 bp, Homo sapien
attattaggggaatcaaataaggtcatatatga

SEQ ID NO: 924794 - DNA, 33 bp, Homo sapien
attattaggggaatcagataaggtcatatatga

SEQ ID NO: 924795 - DNA, 33 bp, Homo sapien
gtaaatgcttttatcaatctcaggagggatggt

SEQ ID NO: 924796 - DNA, 33 bp, Homo sapien
gtaaatgcttttatcattctcaggagggatggt

SEQ ID NO: 924797 - DNA, 33 bp, Homo sapien
agaacttagtggttaaaactgagctttagaggc

SEQ ID NO: 924798 - DNA, 33 bp, Homo sapien
agaacttagtggttaagactgagctttagaggc

SEQ ID NO: 924799 - DNA, 33 bp, Homo sapien
ttacaacaagggaatacgaagttagatagtggg

SEQ ID NO: 924800 - DNA, 33 bp, Homo sapien
ttacaacaagggaatatgaagttagatagtggg

SEQ ID NO: 924801 - DNA, 33 bp, Homo sapien
tgtttgtaaaaatgacggaaatcctcaaaaatc

SEQ ID NO: 924802 - DNA, 33 bp, Homo sapien
tgtttgtaaaaatgactgaaatcctcaaaaatc

SEQ ID NO: 924803 - DNA, 33 bp, Homo sapien
gctaaattaagaggcacatttaggctgagtgtg

SEQ ID NO: 924804 - DNA, 33 bp, Homo sapien
gctaaattaagaggcatatttaggctgagtgtg

SEQ ID NO: 924805 - DNA, 33 bp, Homo sapien
ctcagtctctgttaataatgtttggaacctctg

SEQ ID NO: 924806 - DNA, 33 bp, Homo sapien
ctcagtctctgttaatgatgtttggaacctctg

SEQ ID NO: 924807 - DNA, 33 bp, Homo sapien
aagcagcaatttaaaaccatagaaagctcactg

SEQ ID NO: 924808 - DNA, 33 bp, Homo sapien
aagcagcaatttaaaagcatagaaagctcactg

SEQ ID NO: 924809 - DNA, 33 bp, Homo sapien
ttacagcacccaagagaaaacactagtcacagg

SEQ ID NO: 924810 - DNA, 33 bp, Homo sapien
ttacagcacccaagaggaaacactagtcacagg

SEQ ID NO: 924811 - DNA, 33 bp, Homo sapien
acaggtctgccagtgactaattttttcatcttt

SEQ ID NO: 924812 - DNA, 33 bp, Homo sapien
acaggtctgccagtgattaattttttcatcttt

SEQ ID NO: 924813 - DNA, 33 bp, Homo sapien
acgactctgggacttacgttgtgcagatttagt

SEQ ID NO: 924814 - DNA, 33 bp, Homo sapien
acgactctgggacttatgttgtgcagatttagt

SEQ ID NO: 924815 - DNA, 33 bp, Homo sapien
caggagttcaaggatgcagtgggctataatgac

SEQ ID NO: 924816 - DNA, 33 bp, Homo sapien
caggagttcaaggatgtagtgggctataatgac

SEQ ID NO: 924817 - DNA, 33 bp, Homo sapien
ttaagcttaacttaccacatatttttataactt

SEQ ID NO: 924818 - DNA, 33 bp, Homo sapien
ttaagcttaacttaccgcatatttttataactt

SEQ ID NO: 924819 - DNA, 33 bp, Homo sapien
tctctacaaataacagcaaagcactctcacaca

SEQ ID NO: 924820 - DNA, 33 bp, Homo sapien
tctctacaaataacagtaaagcactctcacaca

SEQ ID NO: 924821 - DNA, 33 bp, Homo sapien
ccttgccatactctagcaaggccctaaatgatc

SEQ ID NO: 924822 - DNA, 33 bp, Homo sapien
ccttgccatactctaggaaggccctaaatgatc

SEQ ID NO: 924823 - DNA, 33 bp, Homo sapien
gatgagaataatgagacgatgtcgaagggaaag

SEQ ID NO: 924824 - DNA, 33 bp, Homo sapien
gatgagaataatgagatgatgtcgaagggaaag

SEQ ID NO: 924825 - DNA, 33 bp, Homo sapien
ctctgttgtcaattaaaggcatattgaacttag

SEQ ID NO: 924826 - DNA, 33 bp, Homo sapien
ctctgttgtcaattaagggcatattgaacttag

SEQ ID NO: 924827 - DNA, 33 bp, Homo sapien
gtattctatgtcataccctttccttatatggca

SEQ ID NO: 924828 - DNA, 33 bp, Homo sapien
gtattctatgtcatactctttccttatatggca

SEQ ID NO: 924829 - DNA, 33 bp, Homo sapien
tatcactgagaggttaagttgtattaaagattg

SEQ ID NO: 924830 - DNA, 33 bp, Homo sapien
tatcactgagaggttaggttgtattaaagattg

SEQ ID NO: 924831 - DNA, 33 bp, Homo sapien
tacaaaatacaaagaacaaaggttggctgggca

SEQ ID NO: 924832 - DNA, 33 bp, Homo sapien
tacaaaatacaaagaataaaggttggctgggca

SEQ ID NO: 924833 - DNA, 33 bp, Homo sapien
gcgcacccagtgcttcactccttcagcaaccac

SEQ ID NO: 924834 - DNA, 33 bp, Homo sapien
gcgcacccagtgcttcgctccttcagcaaccac

SEQ ID NO: 924835 - DNA, 33 bp, Homo sapien
ctaacgtaatattttaaccacacaggaatatat

SEQ ID NO: 924836 - DNA, 33 bp, Homo sapien
ctaacgtaatattttacccacacaggaatatat

SEQ ID NO: 924837 - DNA, 33 bp, Homo sapien
ggcgatcccaatggtaagaacaagcaggactgc

SEQ ID NO: 924838 - DNA, 33 bp, Homo sapien
ggcgatcccaatggtaggaacaagcaggactgc

SEQ ID NO: 924839 - DNA, 33 bp, Homo sapien
ggaggacctcagacaacaacatacttttagccc

SEQ ID NO: 924840 - DNA, 33 bp, Homo sapien
ggaggacctcagacaagaacatacttttagccc

SEQ ID NO: 924841 - DNA, 33 bp, Homo sapien
aaaaaatgtgtctaaaatagttccttaattcct

SEQ ID NO: 924842 - DNA, 33 bp, Homo sapien
aaaaaatgtgtctaaagtagttccttaattcct

SEQ ID NO: 924843 - DNA, 33 bp, Homo sapien
tttcacaatacaaggtaaaaattgaatagctgc

SEQ ID NO: 924844 - DNA, 33 bp, Homo sapien
tttcacaatacaaggttaaaattgaatagctgc

SEQ ID NO: 924845 - DNA, 33 bp, Homo sapien
atattgaaactttataaacgatgcttgaaaggt

SEQ ID NO: 924846 - DNA, 33 bp, Homo sapien
atattgaaactttatatacgatgcttgaaaggt

SEQ ID NO: 924847 - DNA, 33 bp, Homo sapien
gctccatgctggattacgccttgctaagaacag

SEQ ID NO: 924848 - DNA, 33 bp, Homo sapien
gctccatgctggattatgccttgctaagaacag

SEQ ID NO: 924849 - DNA, 33 bp, Homo sapien
tggaagtgcaaatttaccaggtaacataaaact

SEQ ID NO: 924850 - DNA, 33 bp, Homo sapien
tggaagtgcaaatttagcaggtaacataaaact

SEQ ID NO: 924851 - DNA, 33 bp, Homo sapien
gctgtcttgctatacaactatcactattctaag

SEQ ID NO: 924852 - DNA, 33 bp, Homo sapien
gctgtcttgctatacagctatcactattctaag

SEQ ID NO: 924853 - DNA, 33 bp, Homo sapien
attggtgactttgtacaagctaaaatataagca

SEQ ID NO: 924854 - DNA, 33 bp, Homo sapien
attggtgactttgtacgagctaaaatataagca

SEQ ID NO: 924855 - DNA, 33 bp, Homo sapien
gtgggctgtcatttgaataaaacatcatactaa

SEQ ID NO: 924856 - DNA, 33 bp, Homo sapien
gtgggctgtcatttgactaaaacatcatactaa

SEQ ID NO: 924857 - DNA, 33 bp, Homo sapien
atctgatactgctctgaaaactgagaaagacaa

SEQ ID NO: 924858 - DNA, 33 bp, Homo sapien
atctgatactgctctggaaactgagaaagacaa

SEQ ID NO: 924859 - DNA, 33 bp, Homo sapien
actgtcatgattttgccaagttgtggatttaat

SEQ ID NO: 924860 - DNA, 33 bp, Homo sapien
actgtcatgattttgctaagttgtggatttaat

SEQ ID NO: 924861 - DNA, 33 bp, Homo sapien
aaactatggcctgatacgaggtagctagcataa

SEQ ID NO: 924862 - DNA, 33 bp, Homo sapien
aaactatggcctgatatgaggtagctagcataa

SEQ ID NO: 924863 - DNA, 33 bp, Homo sapien
accaagggtagtatgccaaaaccattgttggtt

SEQ ID NO: 924864 - DNA, 33 bp, Homo sapien
accaagggtagtatgctaaaaccattgttggtt

SEQ ID NO: 924865 - DNA, 33 bp, Homo sapien
cttgcctatattctaacgagctaaaccagtggg

SEQ ID NO: 924866 - DNA, 33 bp, Homo sapien
cttgcctatattctaatgagctaaaccagtggg

SEQ ID NO: 924867 - DNA, 33 bp, Homo sapien
tgcaataaaatgcaaacatcatgaaaggctaaa

SEQ ID NO: 924868 - DNA, 33 bp, Homo sapien
tgcaataaaatgcaaagatcatgaaaggctaaa

SEQ ID NO: 924869 - DNA, 33 bp, Homo sapien
gtgttacatctagaaaagctttgcctaacccaa

SEQ ID NO: 924870 - DNA, 33 bp, Homo sapien
gtgttacatctagaaaggctttgcctaacccaa

SEQ ID NO: 924871 - DNA, 33 bp, Homo sapien
ccaaatgcctatgcaaaattctcacctgaaatg

SEQ ID NO: 924872 - DNA, 33 bp, Homo sapien
ccaaatgcctatgcaagattctcacctgaaatg

SEQ ID NO: 924873 - DNA, 33 bp, Homo sapien
atacaatggtctgagacgaagtttgttgggttt

SEQ ID NO: 924874 - DNA, 33 bp, Homo sapien
atacaatggtctgagatgaagtttgttgggttt

SEQ ID NO: 924875 - DNA, 33 bp, Homo sapien
ggcattataaacacgacggtgtgcagcattgct

SEQ ID NO: 924876 - DNA, 33 bp, Homo sapien
ggcattataaacacgatggtgtgcagcattgct

SEQ ID NO: 924877 - DNA, 33 bp, Homo sapien
gtgtgcagcattgctaccatttatctcaggctg

SEQ ID NO: 924878 - DNA, 33 bp, Homo sapien
gtgtgcagcattgctatcatttatctcaggctg

SEQ ID NO: 924879 - DNA, 33 bp, Homo sapien
aatggttctggactatcaggaatgctgggcggc

SEQ ID NO: 924880 - DNA, 33 bp, Homo sapien
aatggttctggactatgaggaatgctgggcggc

SEQ ID NO: 924881 - DNA, 33 bp, Homo sapien
cacttgctcccatccaaataatttgtctctggg

SEQ ID NO: 924882 - DNA, 33 bp, Homo sapien
cacttgctcccatccacataatttgtctctggg

SEQ ID NO: 924883 - DNA, 33 bp, Homo sapien
gctatctgtggagatacgtaacctgttatctgt

SEQ ID NO: 924884 - DNA, 33 bp, Homo sapien
gctatctgtggagatatgtaacctgttatctgt

SEQ ID NO: 924885 - DNA, 33 bp, Homo sapien
taagaattttgagacaatgctgctatgatactc

SEQ ID NO: 924886 - DNA, 33 bp, Homo sapien
taagaattttgagacactgctgctatgatactc

SEQ ID NO: 924887 - DNA, 33 bp, Homo sapien
aaaactacttcaaaccagaataagcaaaaacta

SEQ ID NO: 924888 - DNA, 33 bp, Homo sapien
aaaactacttcaaaccggaataagcaaaaacta

SEQ ID NO: 924889 - DNA, 33 bp, Homo sapien
tatggaatttatcttacgatttaacagagctgt

SEQ ID NO: 924890 - DNA, 33 bp, Homo sapien
tatggaatttatcttaggatttaacagagctgt

SEQ ID NO: 924891 - DNA, 33 bp, Homo sapien
gatgtgaatgaaatagccaaaatttccagagta

SEQ ID NO: 924892 - DNA, 33 bp, Homo sapien
gatgtgaatgaaatagtcaaaatttccagagta

SEQ ID NO: 924893 - DNA, 33 bp, Homo sapien
aatgactaaattggaccgaccacttcttattta

SEQ ID NO: 924894 - DNA, 33 bp, Homo sapien
aatgactaaattggactgaccacttcttattta

SEQ ID NO: 924895 - DNA, 33 bp, Homo sapien
ttttggttcctttccaatgaaaatgccagtctt

SEQ ID NO: 924896 - DNA, 33 bp, Homo sapien
ttttggttcctttccagtgaaaatgccagtctt

SEQ ID NO: 924897 - DNA, 33 bp, Homo sapien
gaagatgtctcaaggaaaggtcaagagaaggtc

SEQ ID NO: 924898 - DNA, 33 bp, Homo sapien
gaagatgtctcaaggagaggtcaagagaaggtc

SEQ ID NO: 924899 - DNA, 33 bp, Homo sapien
aatggtcagccaaccacgtaaatgttacccttt

SEQ ID NO: 924900 - DNA, 33 bp, Homo sapien
aatggtcagccaaccaggtaaatgttacccttt

SEQ ID NO: 924901 - DNA, 33 bp, Homo sapien
gaaaatagcttcacccagatcgattcggtggtc

SEQ ID NO: 924902 - DNA, 33 bp, Homo sapien
gaaaatagcttcacccggatcgattcggtggtc

SEQ ID NO: 924903 - DNA, 33 bp, Homo sapien
gcctcctcttcctgaaacaaagttgccaattag

SEQ ID NO: 924904 - DNA, 33 bp, Homo sapien
gcctcctcttcctgaagcaaagttgccaattag

SEQ ID NO: 924905 - DNA, 33 bp, Homo sapien
actagtatgctctttaagggattaatgaaagac

SEQ ID NO: 924906 - DNA, 33 bp, Homo sapien
actagtatgctctttaggggattaatgaaagac

SEQ ID NO: 924907 - DNA, 33 bp, Homo sapien
tgattaaaggcttcccacgacactgacgtattt

SEQ ID NO: 924908 - DNA, 33 bp, Homo sapien
tgattaaaggcttcccgcgacactgacgtattt

SEQ ID NO: 924909 - DNA, 33 bp, Homo sapien
ctgcatgaattaatgaaaagtctgagattttga

SEQ ID NO: 924910 - DNA, 33 bp, Homo sapien
ctgcatgaattaatgagaagtctgagattttga

SEQ ID NO: 924911 - DNA, 33 bp, Homo sapien
tcgacttcatcacaaagaattggtcaaccagct

SEQ ID NO: 924912 - DNA, 33 bp, Homo sapien
tcgacttcatcacaaataattggtcaaccagct

SEQ ID NO: 924913 - DNA, 33 bp, Homo sapien
gaaggaaggggccaaaaggacacataactgtta

SEQ ID NO: 924914 - DNA, 33 bp, Homo sapien
gaaggaaggggccaaagggacacataactgtta

SEQ ID NO: 924915 - DNA, 33 bp, Homo sapien
gaggttgaggtaggaggatcatctgacaccagg

SEQ ID NO: 924916 - DNA, 33 bp, Homo sapien
gaggttgaggtaggagtatcatctgacaccagg

SEQ ID NO: 924917 - DNA, 33 bp, Homo sapien
ctttaatggtctgtcaaagttgtcctgtgttgg

SEQ ID NO: 924918 - DNA, 33 bp, Homo sapien
ctttaatggtctgtcagagttgtcctgtgttgg

SEQ ID NO: 924919 - DNA, 33 bp, Homo sapien
cagtgctaatgtagaactgatgattatccaaac

SEQ ID NO: 924920 - DNA, 33 bp, Homo sapien
cagtgctaatgtagaattgatgattatccaaac

SEQ ID NO: 924921 - DNA, 33 bp, Homo sapien
ctaataatacacccaaccttttctaatgcaagt

SEQ ID NO: 924922 - DNA, 33 bp, Homo sapien
ctaataatacacccaagcttttctaatgcaagt

SEQ ID NO: 924923 - DNA, 33 bp, Homo sapien
aagagctttaaaggcaaggttgagctatacaag

SEQ ID NO: 924924 - DNA, 33 bp, Homo sapien
aagagctttaaaggcagggttgagctatacaag

SEQ ID NO: 924925 - DNA, 33 bp, Homo sapien
gacactataacaaaaaatacgctggaacaatct

SEQ ID NO: 924926 - DNA, 33 bp, Homo sapien
gacactataacaaaaattacgctggaacaatct

SEQ ID NO: 924927 - DNA, 33 bp, Homo sapien
atgatatgtcagtgtacctagataaataataaa

SEQ ID NO: 924928 - DNA, 33 bp, Homo sapien
atgatatgtcagtgtagctagataaataataaa

SEQ ID NO: 924929 - DNA, 33 bp, Homo sapien
aagcactacaatttagaaagcagtgaactactt

SEQ ID NO: 924930 - DNA, 33 bp, Homo sapien
aagcactacaatttaggaagcagtgaactactt

SEQ ID NO: 924931 - DNA, 33 bp, Homo sapien
ggaacacatgccgttacatggtacaaattctca

SEQ ID NO: 924932 - DNA, 33 bp, Homo sapien
ggaacacatgccgttatatggtacaaattctca

SEQ ID NO: 924933 - DNA, 33 bp, Homo sapien
catgctcttgccaacacctcatagcactgaaaa

SEQ ID NO: 924934 - DNA, 33 bp, Homo sapien
catgctcttgccaacatctcatagcactgaaaa

SEQ ID NO: 924935 - DNA, 33 bp, Homo sapien
tttcaaatgagatctacgtagccaaaaagcgat

SEQ ID NO: 924936 - DNA, 33 bp, Homo sapien
tttcaaatgagatctatgtagccaaaaagcgat

SEQ ID NO: 924937 - DNA, 33 bp, Homo sapien
gaatattgatacgcccagagatgtttccaaagg

SEQ ID NO: 924938 - DNA, 33 bp, Homo sapien
gaatattgatacgcccggagatgtttccaaagg

SEQ ID NO: 924939 - DNA, 33 bp, Homo sapien
ccattctgtgaaaggccacttcatgatactcag

SEQ ID NO: 924940 - DNA, 33 bp, Homo sapien
ccattctgtgaaaggctacttcatgatactcag

SEQ ID NO: 924941 - DNA, 33 bp, Homo sapien
aagccatttgaagggaactatatactatgacct

SEQ ID NO: 924942 - DNA, 33 bp, Homo sapien
aagccatttgaagggagctatatactatgacct

SEQ ID NO: 924943 - DNA, 33 bp, Homo sapien
tacgttgctaaggatacgtgcacacatgatcag

SEQ ID NO: 924944 - DNA, 33 bp, Homo sapien
tacgttgctaaggatatgtgcacacatgatcag

SEQ ID NO: 924945 - DNA, 33 bp, Homo sapien
ggtcttgtggcttaacactgcccacatcgctgg

SEQ ID NO: 924946 - DNA, 33 bp, Homo sapien
ggtcttgtggcttaacgctgcccacatcgctgg

SEQ ID NO: 924947 - DNA, 33 bp, Homo sapien
tcctcattataatccccgctaagccaccctatt

SEQ ID NO: 924948 - DNA, 33 bp, Homo sapien
tcctcattataatccctgctaagccaccctatt

SEQ ID NO: 924949 - DNA, 33 bp, Homo sapien
acttccggttggccagaaaagcaggatcttaaa

SEQ ID NO: 924950 - DNA, 33 bp, Homo sapien
acttccggttggccaggaaagcaggatcttaaa

SEQ ID NO: 924951 - DNA, 33 bp, Homo sapien
ccactcagcctaacaaattgggccctagtgtga

SEQ ID NO: 924952 - DNA, 33 bp, Homo sapien
ccactcagcctaacaatttgggccctagtgtga

SEQ ID NO: 924953 - DNA, 33 bp, Homo sapien
ccaagtaaacaggatcaaatgcttatctgataa

SEQ ID NO: 924954 - DNA, 33 bp, Homo sapien
ccaagtaaacaggatcgaatgcttatctgataa

SEQ ID NO: 924955 - DNA, 33 bp, Homo sapien
gggactcttaacagccaaagtgagataaccaga

SEQ ID NO: 924956 - DNA, 33 bp, Homo sapien
gggactcttaacagccgaagtgagataaccaga

SEQ ID NO: 924957 - DNA, 33 bp, Homo sapien
ctgggccctgtgcttacctggactctgggatga

SEQ ID NO: 924958 - DNA, 33 bp, Homo sapien
ctgggccctgtgcttatctggactctgggatga

SEQ ID NO: 924959 - DNA, 33 bp, Homo sapien
ttctggctagcaccccaaatgctatattaaata

SEQ ID NO: 924960 - DNA, 33 bp, Homo sapien
ttctggctagcaccccgaatgctatattaaata

SEQ ID NO: 924961 - DNA, 33 bp, Homo sapien
ggctgagataactaagactgggctccccgtttc

SEQ ID NO: 924962 - DNA, 33 bp, Homo sapien
ggctgagataactaaggctgggctccccgtttc

SEQ ID NO: 924963 - DNA, 33 bp, Homo sapien
tcctcatcttatttgaactaccactggcacctg

SEQ ID NO: 924964 - DNA, 33 bp, Homo sapien
tcctcatcttatttgatctaccactggcacctg

SEQ ID NO: 924965 - DNA, 33 bp, Homo sapien
ttggttccataactctaaacaaatatccagctt

SEQ ID NO: 924966 - DNA, 33 bp, Homo sapien
ttggttccataactcttaacaaatatccagctt

SEQ ID NO: 924967 - DNA, 33 bp, Homo sapien
taaatcctcagattaccattaaaactggtcccc

SEQ ID NO: 924968 - DNA, 33 bp, Homo sapien
taaatcctcagattactattaaaactggtcccc

SEQ ID NO: 924969 - DNA, 33 bp, Homo sapien
atatttgcctttgaaacctttatagaacctaat

SEQ ID NO: 924970 - DNA, 33 bp, Homo sapien
atatttgcctttgaaatctttatagaacctaat

SEQ ID NO: 924971 - DNA, 33 bp, Homo sapien
cccacctatgaaacacagataatatactagaac

SEQ ID NO: 924972 - DNA, 33 bp, Homo sapien
cccacctatgaaacacggataatatactagaac

SEQ ID NO: 924973 - DNA, 33 bp, Homo sapien
cctgagattcatgaagccatcccaggaagttca

SEQ ID NO: 924974 - DNA, 33 bp, Homo sapien
cctgagattcatgaaggcatcccaggaagttca

SEQ ID NO: 924975 - DNA, 33 bp, Homo sapien
cttaacactctccaacaaggattttgtcacttg

SEQ ID NO: 924976 - DNA, 33 bp, Homo sapien
cttaacactctccaacgaggattttgtcacttg

SEQ ID NO: 924977 - DNA, 33 bp, Homo sapien
cggtctcaaaatgttgaactggtaaatgttttt

SEQ ID NO: 924978 - DNA, 33 bp, Homo sapien
cggtctcaaaatgttggactggtaaatgttttt

SEQ ID NO: 924979 - DNA, 33 bp, Homo sapien
cagattggagacttataagaccataaaatatga

SEQ ID NO: 924980 - DNA, 33 bp, Homo sapien
cagattggagacttatgagaccataaaatatga

SEQ ID NO: 924981 - DNA, 33 bp, Homo sapien
tggctgtattgaggaagggattgaaggtggaca

SEQ ID NO: 924982 - DNA, 33 bp, Homo sapien
tggctgtattgaggaatggattgaaggtggaca

SEQ ID NO: 924983 - DNA, 33 bp, Homo sapien
accctaagcataattgaactttgatctcattac

SEQ ID NO: 924984 - DNA, 33 bp, Homo sapien
accctaagcataattgtactttgatctcattac

SEQ ID NO: 924985 - DNA, 33 bp, Homo sapien
agctgtctttcagatactaaaacagtttctcaa

SEQ ID NO: 924986 - DNA, 33 bp, Homo sapien
agctgtctttcagatagtaaaacagtttctcaa

SEQ ID NO: 924987 - DNA, 33 bp, Homo sapien
aacatgaaaaagcccacaggattgcttccagtg

SEQ ID NO: 924988 - DNA, 33 bp, Homo sapien
aacatgaaaaagcccataggattgcttccagtg

SEQ ID NO: 924989 - DNA, 33 bp, Homo sapien
ctagtaggtgaacacaatggaagtgacataggc

SEQ ID NO: 924990 - DNA, 33 bp, Homo sapien
ctagtaggtgaacacattggaagtgacataggc

SEQ ID NO: 924991 - DNA, 33 bp, Homo sapien
aacagacaaactgttcactcactatcctcaaac

SEQ ID NO: 924992 - DNA, 33 bp, Homo sapien
aacagacaaactgttcgctcactatcctcaaac

SEQ ID NO: 924993 - DNA, 33 bp, Homo sapien
ctctcatgtccagaaacgcaactttacttctca

SEQ ID NO: 924994 - DNA, 33 bp, Homo sapien
ctctcatgtccagaaatgcaactttacttctca

SEQ ID NO: 924995 - DNA, 33 bp, Homo sapien
gcagagccccaggaaaaagagatgtaaaatgtc

SEQ ID NO: 924996 - DNA, 33 bp, Homo sapien
gcagagccccaggaaagagagatgtaaaatgtc

SEQ ID NO: 924997 - DNA, 33 bp, Homo sapien
tctaaaagataactagaaaagaaagctgcctag

SEQ ID NO: 924998 - DNA, 33 bp, Homo sapien
tctaaaagataactaggaaagaaagctgcctag

SEQ ID NO: 924999 - DNA, 33 bp, Homo sapien
tgtctgtagaacgaacaatagctaggcagcttt

SEQ ID NO: 925000 - DNA, 33 bp, Homo sapien
tgtctgtagaacgaacgatagctaggcagcttt

SEQ ID NO: 925001 - DNA, 33 bp, Homo sapien
ctccagtaccagttcacgactaggcagcaactc

SEQ ID NO: 925002 - DNA, 33 bp, Homo sapien
ctccagtaccagttcatgactaggcagcaactc

SEQ ID NO: 925003 - DNA, 33 bp, Homo sapien
ggcaaaagtcacctcacagtttatgtagcccag

SEQ ID NO: 925004 - DNA, 33 bp, Homo sapien
ggcaaaagtcacctcagagtttatgtagcccag

SEQ ID NO: 925005 - DNA, 33 bp, Homo sapien
cttatggcttatgacaccaccgatatttgaata

SEQ ID NO: 925006 - DNA, 33 bp, Homo sapien
cttatggcttatgacatcaccgatatttgaata

SEQ ID NO: 925007 - DNA, 33 bp, Homo sapien
acccagctagatgtgacaccattcagcctccct

SEQ ID NO: 925008 - DNA, 33 bp, Homo sapien
acccagctagatgtgataccattcagcctccct

SEQ ID NO: 925009 - DNA, 33 bp, Homo sapien
gggccatggatttagacacaaacatttggtgtc

SEQ ID NO: 925010 - DNA, 33 bp, Homo sapien
gggccatggatttagatacaaacatttggtgtc

SEQ ID NO: 925011 - DNA, 33 bp, Homo sapien
tttccaaaaggatttgaagtggcagtcacttta

SEQ ID NO: 925012 - DNA, 33 bp, Homo sapien
tttccaaaaggatttgcagtggcagtcacttta

SEQ ID NO: 925013 - DNA, 33 bp, Homo sapien
atgcttctgatttttcaaagtcacataggccag

SEQ ID NO: 925014 - DNA, 33 bp, Homo sapien
atgcttctgatttttcgaagtcacataggccag

SEQ ID NO: 925015 - DNA, 33 bp, Homo sapien
gagctgatacaggaccaaatattatgctggaga

SEQ ID NO: 925016 - DNA, 33 bp, Homo sapien
gagctgatacaggaccgaatattatgctggaga

SEQ ID NO: 925017 - DNA, 33 bp, Homo sapien
gatcctgtctcgaaagcaagaaagagaaaagga

SEQ ID NO: 925018 - DNA, 33 bp, Homo sapien
gatcctgtctcgaaaggaagaaagagaaaagga

SEQ ID NO: 925019 - DNA, 33 bp, Homo sapien
agctgtcaaacacaacgatacacaaaaaggatc

SEQ ID NO: 925020 - DNA, 33 bp, Homo sapien
agctgtcaaacacaactatacacaaaaaggatc

SEQ ID NO: 925021 - DNA, 33 bp, Homo sapien
tgtaaactagggaagcacagggcgaagaaactc

SEQ ID NO: 925022 - DNA, 33 bp, Homo sapien
tgtaaactagggaagcgcagggcgaagaaactc

SEQ ID NO: 925023 - DNA, 33 bp, Homo sapien
agatgtttagtaaacactgagtgagtgattata

SEQ ID NO: 925024 - DNA, 33 bp, Homo sapien
agatgtttagtaaacattgagtgagtgattata

SEQ ID NO: 925025 - DNA, 33 bp, Homo sapien
taagctacagaacttcacaggaaaggacaactt

SEQ ID NO: 925026 - DNA, 33 bp, Homo sapien
taagctacagaacttcgcaggaaaggacaactt

SEQ ID NO: 925027 - DNA, 33 bp, Homo sapien
aaaggaacttatcacactgatagagttggctat

SEQ ID NO: 925028 - DNA, 33 bp, Homo sapien
aaaggaacttatcacattgatagagttggctat

SEQ ID NO: 925029 - DNA, 33 bp, Homo sapien
ccttcaatggatcctcaagaccaatgaaataaa

SEQ ID NO: 925030 - DNA, 33 bp, Homo sapien
ccttcaatggatcctccagaccaatgaaataaa

SEQ ID NO: 925031 - DNA, 33 bp, Homo sapien
ttaaaatgtcaaaatacatgcaatgtctgaaaa

SEQ ID NO: 925032 - DNA, 33 bp, Homo sapien
ttaaaatgtcaaaatatatgcaatgtctgaaaa

SEQ ID NO: 925033 - DNA, 33 bp, Homo sapien
ttgtggtatttacacccattggcatttaatgtg

SEQ ID NO: 925034 - DNA, 33 bp, Homo sapien
ttgtggtatttacaccgattggcatttaatgtg

SEQ ID NO: 925035 - DNA, 33 bp, Homo sapien
ctcttttggagcagggacactcttcttttactg

SEQ ID NO: 925036 - DNA, 33 bp, Homo sapien
ctcttttggagcaggggcactcttcttttactg

SEQ ID NO: 925037 - DNA, 33 bp, Homo sapien
gccatactcattggcaacaaacaacagaatttg

SEQ ID NO: 925038 - DNA, 33 bp, Homo sapien
gccatactcattggcagcaaacaacagaatttg

SEQ ID NO: 925039 - DNA, 33 bp, Homo sapien
aaatgcaggtaagcaaagtctccctcaatttcc

SEQ ID NO: 925040 - DNA, 33 bp, Homo sapien
aaatgcaggtaagcaaggtctccctcaatttcc

SEQ ID NO: 925041 - DNA, 33 bp, Homo sapien
gactttatttaaagaaaatgctcattccctttt

SEQ ID NO: 925042 - DNA, 33 bp, Homo sapien
gactttatttaaagaagatgctcattccctttt

SEQ ID NO: 925043 - DNA, 33 bp, Homo sapien
ttagcttttagtctcaaggtaaagatagcatga

SEQ ID NO: 925044 - DNA, 33 bp, Homo sapien
ttagcttttagtctcagggtaaagatagcatga

SEQ ID NO: 925045 - DNA, 33 bp, Homo sapien
ttagttggtaggaacactggagtcaatactaag

SEQ ID NO: 925046 - DNA, 33 bp, Homo sapien
ttagttggtaggaacattggagtcaatactaag

SEQ ID NO: 925047 - DNA, 33 bp, Homo sapien
agctgttttgcagacacataattgagttctaac

SEQ ID NO: 925048 - DNA, 33 bp, Homo sapien
agctgttttgcagacatataattgagttctaac

SEQ ID NO: 925049 - DNA, 33 bp, Homo sapien
gaacagaatactgaaacctttacctgcctagta

SEQ ID NO: 925050 - DNA, 33 bp, Homo sapien
gaacagaatactgaaatctttacctgcctagta

SEQ ID NO: 925051 - DNA, 33 bp, Homo sapien
tatctcatgagcataacttaaatactagaccca

SEQ ID NO: 925052 - DNA, 33 bp, Homo sapien
tatctcatgagcataatttaaatactagaccca

SEQ ID NO: 925053 - DNA, 33 bp, Homo sapien
caaaacaaaagatggcaacgtactttgagtagc

SEQ ID NO: 925054 - DNA, 33 bp, Homo sapien
caaaacaaaagatggcgacgtactttgagtagc

SEQ ID NO: 925055 - DNA, 33 bp, Homo sapien
cactttgatatatgcaatcttggatgttgagtg

SEQ ID NO: 925056 - DNA, 33 bp, Homo sapien
cactttgatatatgcagtcttggatgttgagtg

SEQ ID NO: 925057 - DNA, 33 bp, Homo sapien
acgactctactcttacagcctaatcgcctccca

SEQ ID NO: 925058 - DNA, 33 bp, Homo sapien
acgactctactcttacggcctaatcgcctccca

SEQ ID NO: 925059 - DNA, 33 bp, Homo sapien
gaacacgatcttcaggccacattcatcagtggg

SEQ ID NO: 925060 - DNA, 33 bp, Homo sapien
gaacacgatcttcaggtcacattcatcagtggg

SEQ ID NO: 925061 - DNA, 33 bp, Homo sapien
cagtctgacttccccaagcagtggatactgtgt

SEQ ID NO: 925062 - DNA, 33 bp, Homo sapien
cagtctgacttccccaggcagtggatactgtgt

SEQ ID NO: 925063 - DNA, 33 bp, Homo sapien
cacacaagaggcctctcaatctcattggctctt

SEQ ID NO: 925064 - DNA, 33 bp, Homo sapien
cacacaagaggcctctgaatctcattggctctt

SEQ ID NO: 925065 - DNA, 33 bp, Homo sapien
ttctgtttccttatgaaagggctgtgtctccaa

SEQ ID NO: 925066 - DNA, 33 bp, Homo sapien
ttctgtttccttatgatagggctgtgtctccaa

SEQ ID NO: 925067 - DNA, 33 bp, Homo sapien
ttaacatatatcacaaaaaagtaacatgaaaat

SEQ ID NO: 925068 - DNA, 33 bp, Homo sapien
ttaacatatatcacaagaaagtaacatgaaaat

SEQ ID NO: 925069 - DNA, 33 bp, Homo sapien
ttgcaatttagtctcacgtatggtatatgtaac

SEQ ID NO: 925070 - DNA, 33 bp, Homo sapien
ttgcaatttagtctcatgtatggtatatgtaac

SEQ ID NO: 925071 - DNA, 33 bp, Homo sapien
gctgctcactagatgaaatcagctctccattca

SEQ ID NO: 925072 - DNA, 33 bp, Homo sapien
gctgctcactagatgagatcagctctccattca

SEQ ID NO: 925073 - DNA, 33 bp, Homo sapien
ctatttaataagaaaacgctatgcttcaatgag

SEQ ID NO: 925074 - DNA, 33 bp, Homo sapien
ctatttaataagaaaatgctatgcttcaatgag

SEQ ID NO: 925075 - DNA, 33 bp, Homo sapien
ctctcaggagactttacataaacacatttttct

SEQ ID NO: 925076 - DNA, 33 bp, Homo sapien
ctctcaggagactttatataaacacatttttct

SEQ ID NO: 925077 - DNA, 33 bp, Homo sapien
catctgaaccacatcactcatctcctcctcttt

SEQ ID NO: 925078 - DNA, 33 bp, Homo sapien
catctgaaccacatcattcatctcctcctcttt

SEQ ID NO: 925079 - DNA, 33 bp, Homo sapien
aattcttcccagtttacagtgctaaagctggct

SEQ ID NO: 925080 - DNA, 33 bp, Homo sapien
aattcttcccagtttatagtgctaaagctggct

SEQ ID NO: 925081 - DNA, 33 bp, Homo sapien
atgaagagatatcgaaacctcctagatctctgt

SEQ ID NO: 925082 - DNA, 33 bp, Homo sapien
atgaagagatatcgaagcctcctagatctctgt

SEQ ID NO: 925083 - DNA, 33 bp, Homo sapien
tttgtaataatttagacgagtgtaacagtatcc

SEQ ID NO: 925084 - DNA, 33 bp, Homo sapien
tttgtaataatttagatgagtgtaacagtatcc

SEQ ID NO: 925085 - DNA, 33 bp, Homo sapien
ttatcacgtgtgctcacaatctgtactctgaaa

SEQ ID NO: 925086 - DNA, 33 bp, Homo sapien
ttatcacgtgtgctcagaatctgtactctgaaa

SEQ ID NO: 925087 - DNA, 33 bp, Homo sapien
atgtactgaattcataaaagagacactagaaat

SEQ ID NO: 925088 - DNA, 33 bp, Homo sapien
atgtactgaattcatagaagagacactagaaat

SEQ ID NO: 925089 - DNA, 33 bp, Homo sapien
tattccaatttattgacgaagaaactgacaagg

SEQ ID NO: 925090 - DNA, 33 bp, Homo sapien
tattccaatttattgatgaagaaactgacaagg

SEQ ID NO: 925091 - DNA, 33 bp, Homo sapien
tttaaatgcttaaaatcattgtcattggtcaca

SEQ ID NO: 925092 - DNA, 33 bp, Homo sapien
tttaaatgcttaaaattattgtcattggtcaca

SEQ ID NO: 925093 - DNA, 33 bp, Homo sapien
taaaggttgaaagccacagaattttaacctggg

SEQ ID NO: 925094 - DNA, 33 bp, Homo sapien
taaaggttgaaagccagagaattttaacctggg

SEQ ID NO: 925095 - DNA, 33 bp, Homo sapien
agatactcttctcagcaatttacaaatattgat

SEQ ID NO: 925096 - DNA, 33 bp, Homo sapien
agatactcttctcagcgatttacaaatattgat

SEQ ID NO: 925097 - DNA, 33 bp, Homo sapien
atctcatgtggaactgcaatccccaatgttgga

SEQ ID NO: 925098 - DNA, 33 bp, Homo sapien
atctcatgtggaactgtaatccccaatgttgga

SEQ ID NO: 925099 - DNA, 33 bp, Homo sapien
atcgtgagaacagcaccaaaggggcaaattcac

SEQ ID NO: 925100 - DNA, 33 bp, Homo sapien
atcgtgagaacagcactaaaggggcaaattcac

SEQ ID NO: 925101 - DNA, 33 bp, Homo sapien
gagagagtgaaaggaaagatggacttgaaacag

SEQ ID NO: 925102 - DNA, 33 bp, Homo sapien
gagagagtgaaaggaaggatggacttgaaacag

SEQ ID NO: 925103 - DNA, 33 bp, Homo sapien
tctgcttcacagaatacactggctattgaaagg

SEQ ID NO: 925104 - DNA, 33 bp, Homo sapien
tctgcttcacagaatagactggctattgaaagg

SEQ ID NO: 925105 - DNA, 33 bp, Homo sapien
acctgtaataccatccaattttaaggctctgtc

SEQ ID NO: 925106 - DNA, 33 bp, Homo sapien
acctgtaataccatccgattttaaggctctgtc

SEQ ID NO: 925107 - DNA, 33 bp, Homo sapien
tggttttgcacaactacgaatttctgtaaattc

SEQ ID NO: 925108 - DNA, 33 bp, Homo sapien
tggttttgcacaactatgaatttctgtaaattc

SEQ ID NO: 925109 - DNA, 33 bp, Homo sapien
aggtatgatgaatattaaactggggctcgtatc

SEQ ID NO: 925110 - DNA, 33 bp, Homo sapien
aggtatgatgaatatttaactggggctcgtatc

SEQ ID NO: 925111 - DNA, 33 bp, Homo sapien
agtccaaaagtctaaaatagaacataaatggaa

SEQ ID NO: 925112 - DNA, 33 bp, Homo sapien
agtccaaaagtctaaagtagaacataaatggaa

SEQ ID NO: 925113 - DNA, 33 bp, Homo sapien
ttatagcttcccattcaaaatttttgttttcat

SEQ ID NO: 925114 - DNA, 33 bp, Homo sapien
ttatagcttcccattccaaatttttgttttcat

SEQ ID NO: 925115 - DNA, 33 bp, Homo sapien
aagatccagtactgaccgaagattttctacaac

SEQ ID NO: 925116 - DNA, 33 bp, Homo sapien
aagatccagtactgactgaagattttctacaac

SEQ ID NO: 925117 - DNA, 33 bp, Homo sapien
agggcttctctgagcacagatgaagcagaatgt

SEQ ID NO: 925118 - DNA, 33 bp, Homo sapien
agggcttctctgagcatagatgaagcagaatgt

SEQ ID NO: 925119 - DNA, 33 bp, Homo sapien
taaaagtttccaaaagaatcatgattaccatac

SEQ ID NO: 925120 - DNA, 33 bp, Homo sapien
taaaagtttccaaaaggatcatgattaccatac

SEQ ID NO: 925121 - DNA, 33 bp, Homo sapien
actgatgtataggcaccgtcccatttaatgaat

SEQ ID NO: 925122 - DNA, 33 bp, Homo sapien
actgatgtataggcactgtcccatttaatgaat

SEQ ID NO: 925123 - DNA, 33 bp, Homo sapien
gaaatgttttaaaaggacaagacatagttgtgt

SEQ ID NO: 925124 - DNA, 33 bp, Homo sapien
gaaatgttttaaaaggtcaagacatagttgtgt

SEQ ID NO: 925125 - DNA, 33 bp, Homo sapien
ccaaccaaatataagaactgcccccctcaaccc

SEQ ID NO: 925126 - DNA, 33 bp, Homo sapien
ccaaccaaatataagacctgcccccctcaaccc

SEQ ID NO: 925127 - DNA, 33 bp, Homo sapien
ggaatatactagtaacaaaatctccatcagtta

SEQ ID NO: 925128 - DNA, 33 bp, Homo sapien
ggaatatactagtaacgaaatctccatcagtta

SEQ ID NO: 925129 - DNA, 33 bp, Homo sapien
ataactttagataaacagtcagttgggcatttt

SEQ ID NO: 925130 - DNA, 33 bp, Homo sapien
ataactttagataaacggtcagttgggcatttt

SEQ ID NO: 925131 - DNA, 33 bp, Homo sapien
aaaggtatctactggcaaagtctgataatacag

SEQ ID NO: 925132 - DNA, 33 bp, Homo sapien
aaaggtatctactggccaagtctgataatacag

SEQ ID NO: 925133 - DNA, 33 bp, Homo sapien
aaataagttcataaaactgtgatgatcaaatga

SEQ ID NO: 925134 - DNA, 33 bp, Homo sapien
aaataagttcataaaattgtgatgatcaaatga

SEQ ID NO: 925135 - DNA, 33 bp, Homo sapien
atctacagggatgttcaatgttgcatgatgttc

SEQ ID NO: 925136 - DNA, 33 bp, Homo sapien
atctacagggatgttcgatgttgcatgatgttc

SEQ ID NO: 925137 - DNA, 33 bp, Homo sapien
cagtaatttcttcccacgtgcatatcaccttga

SEQ ID NO: 925138 - DNA, 33 bp, Homo sapien
cagtaatttcttcccatgtgcatatcaccttga

SEQ ID NO: 925139 - DNA, 33 bp, Homo sapien
tctggaggttccctacggctactgctagaatac

SEQ ID NO: 925140 - DNA, 33 bp, Homo sapien
tctggaggttccctactgctactgctagaatac

SEQ ID NO: 925141 - DNA, 33 bp, Homo sapien
tgaaatggatttatacacagctacatttactct

SEQ ID NO: 925142 - DNA, 33 bp, Homo sapien
tgaaatggatttatacgcagctacatttactct

SEQ ID NO: 925143 - DNA, 33 bp, Homo sapien
ctgagtttttcttctcaacggtatctgagtgtg

SEQ ID NO: 925144 - DNA, 33 bp, Homo sapien
ctgagtttttcttctcgacggtatctgagtgtg

SEQ ID NO: 925145 - DNA, 33 bp, Homo sapien
tttagcatggcattcacaatactctgtacttga

SEQ ID NO: 925146 - DNA, 33 bp, Homo sapien
tttagcatggcattcataatactctgtacttga

SEQ ID NO: 925147 - DNA, 33 bp, Homo sapien
cttaccagataccagacggatggatttatagga

SEQ ID NO: 925148 - DNA, 33 bp, Homo sapien
cttaccagataccagatggatggatttatagga

SEQ ID NO: 925149 - DNA, 33 bp, Homo sapien
tgctcatacagggcacagatttgatgtggcgtg

SEQ ID NO: 925150 - DNA, 33 bp, Homo sapien
tgctcatacagggcacggatttgatgtggcgtg

SEQ ID NO: 925151 - DNA, 33 bp, Homo sapien
acagaagaaagaagaaatggtcaaagacgtgga

SEQ ID NO: 925152 - DNA, 33 bp, Homo sapien
acagaagaaagaagaactggtcaaagacgtgga

SEQ ID NO: 925153 - DNA, 33 bp, Homo sapien
atttctccctgagagagtcacaatggtcaagat

SEQ ID NO: 925154 - DNA, 33 bp, Homo sapien
atttctccctgagagattcacaatggtcaagat

SEQ ID NO: 925155 - DNA, 33 bp, Homo sapien
catgtttagacataatcaggaatggaagatgaa

SEQ ID NO: 925156 - DNA, 33 bp, Homo sapien
catgtttagacataattaggaatggaagatgaa

SEQ ID NO: 925157 - DNA, 33 bp, Homo sapien
acttctgtgatgtgcacctataaagaaacaggc

SEQ ID NO: 925158 - DNA, 33 bp, Homo sapien
acttctgtgatgtgcatctataaagaaacaggc

SEQ ID NO: 925159 - DNA, 33 bp, Homo sapien
cttacagatccttaatcagaataataatccata

SEQ ID NO: 925160 - DNA, 33 bp, Homo sapien
cttacagatccttaatgagaataataatccata

SEQ ID NO: 925161 - DNA, 33 bp, Homo sapien
tactgatgatctcagaaacaactcttaagtaag

SEQ ID NO: 925162 - DNA, 33 bp, Homo sapien
tactgatgatctcagacacaactcttaagtaag

SEQ ID NO: 925163 - DNA, 33 bp, Homo sapien
aatagattactgcttgaaaagtgcttaatatat

SEQ ID NO: 925164 - DNA, 33 bp, Homo sapien
aatagattactgcttgtaaagtgcttaatatat

SEQ ID NO: 925165 - DNA, 33 bp, Homo sapien
agaaaaagaagcagtacgtagtttattcctgtc

SEQ ID NO: 925166 - DNA, 33 bp, Homo sapien
agaaaaagaagcagtaggtagtttattcctgtc

SEQ ID NO: 925167 - DNA, 33 bp, Homo sapien
atgttataaactagagacaccaggtcatggata

SEQ ID NO: 925168 - DNA, 33 bp, Homo sapien
atgttataaactagagtcaccaggtcatggata

SEQ ID NO: 925169 - DNA, 33 bp, Homo sapien
gtaaattatcatgccactgagtaaacataagat

SEQ ID NO: 925170 - DNA, 33 bp, Homo sapien
gtaaattatcatgccagtgagtaaacataagat

SEQ ID NO: 925171 - DNA, 33 bp, Homo sapien
tttttgttcaatctcaaagaaagatttctaatc

SEQ ID NO: 925172 - DNA, 33 bp, Homo sapien
tttttgttcaatctcagagaaagatttctaatc

SEQ ID NO: 925173 - DNA, 33 bp, Homo sapien
gtgccagctcgaccacagggtagataagacacc

SEQ ID NO: 925174 - DNA, 33 bp, Homo sapien
gtgccagctcgaccacggggtagataagacacc

SEQ ID NO: 925175 - DNA, 33 bp, Homo sapien
agaacctccagagcaccagattacctcaagaca

SEQ ID NO: 925176 - DNA, 33 bp, Homo sapien
agaacctccagagcactagattacctcaagaca

SEQ ID NO: 925177 - DNA, 33 bp, Homo sapien
agaaatgtcacagttacgaaagtagtattcgaa

SEQ ID NO: 925178 - DNA, 33 bp, Homo sapien
agaaatgtcacagttatgaaagtagtattcgaa

SEQ ID NO: 925179 - DNA, 33 bp, Homo sapien
gtagtactaatcttacagccaaccaccagagaa

SEQ ID NO: 925180 - DNA, 33 bp, Homo sapien
gtagtactaatcttacggccaaccaccagagaa

SEQ ID NO: 925181 - DNA, 33 bp, Homo sapien
taccatcttatgttccaggaaatcctttatctc

SEQ ID NO: 925182 - DNA, 33 bp, Homo sapien
taccatcttatgttccgggaaatcctttatctc

SEQ ID NO: 925183 - DNA, 33 bp, Homo sapien
tgtgagaaattggactcaaatttagcaatcaat

SEQ ID NO: 925184 - DNA, 33 bp, Homo sapien
tgtgagaaattggactgaaatttagcaatcaat

SEQ ID NO: 925185 - DNA, 33 bp, Homo sapien
taatttcaactttgaacacagtttattattatt

SEQ ID NO: 925186 - DNA, 33 bp, Homo sapien
taatttcaactttgaagacagtttattattatt

SEQ ID NO: 925187 - DNA, 33 bp, Homo sapien
aagagagaaagagatccgaaggtaggcagaaca

SEQ ID NO: 925188 - DNA, 33 bp, Homo sapien
aagagagaaagagatctgaaggtaggcagaaca

SEQ ID NO: 925189 - DNA, 33 bp, Homo sapien
ataatttctcattttacgacctagcaggttttt

SEQ ID NO: 925190 - DNA, 33 bp, Homo sapien
ataatttctcattttatgacctagcaggttttt

SEQ ID NO: 925191 - DNA, 33 bp, Homo sapien
gtatataatgtaatagaaaagaccgtcaaccct

SEQ ID NO: 925192 - DNA, 33 bp, Homo sapien
gtatataatgtaataggaaagaccgtcaaccct

SEQ ID NO: 925193 - DNA, 33 bp, Homo sapien
ttgcttggtcagttaaacctatttaccctcact

SEQ ID NO: 925194 - DNA, 33 bp, Homo sapien
ttgcttggtcagttaaccctatttaccctcact

SEQ ID NO: 925195 - DNA, 33 bp, Homo sapien
ttcattcattgctggaaacaatttaaatatcgt

SEQ ID NO: 925196 - DNA, 33 bp, Homo sapien
ttcattcattgctggagacaatttaaatatcgt

SEQ ID NO: 925197 - DNA, 33 bp, Homo sapien
attttatctgctgtataagactttgtgcatttt

SEQ ID NO: 925198 - DNA, 33 bp, Homo sapien
attttatctgctgtatgagactttgtgcatttt

SEQ ID NO: 925199 - DNA, 33 bp, Homo sapien
aaatgaaagaaatatacctcatgggcaaacaag

SEQ ID NO: 925200 - DNA, 33 bp, Homo sapien
aaatgaaagaaatatatctcatgggcaaacaag

SEQ ID NO: 925201 - DNA, 33 bp, Homo sapien
atctcagtttcagcaccggtaaaaccaaaataa

SEQ ID NO: 925202 - DNA, 33 bp, Homo sapien
atctcagtttcagcactggtaaaaccaaaataa

SEQ ID NO: 925203 - DNA, 33 bp, Homo sapien
ctttggcaataagatacggaatggaacactttg

SEQ ID NO: 925204 - DNA, 33 bp, Homo sapien
ctttggcaataagatatggaatggaacactttg

SEQ ID NO: 925205 - DNA, 33 bp, Homo sapien
aaactcaaaatctactaaaagaatgggagttgc

SEQ ID NO: 925206 - DNA, 33 bp, Homo sapien
aaactcaaaatctactgaaagaatgggagttgc

SEQ ID NO: 925207 - DNA, 33 bp, Homo sapien
gaatgactgccatagacaggtatggatatgaat

SEQ ID NO: 925208 - DNA, 33 bp, Homo sapien
gaatgactgccatagataggtatggatatgaat

SEQ ID NO: 925209 - DNA, 33 bp, Homo sapien
cacatatgagttatcacgtcaagcatggattca

SEQ ID NO: 925210 - DNA, 33 bp, Homo sapien
cacatatgagttatcaggtcaagcatggattca

SEQ ID NO: 925211 - DNA, 33 bp, Homo sapien
ctgttcctgtctataactgtggaaacggagatg

SEQ ID NO: 925212 - DNA, 33 bp, Homo sapien
ctgttcctgtctataattgtggaaacggagatg

SEQ ID NO: 925213 - DNA, 33 bp, Homo sapien
tcacagcaaaagagcccggaatacacgaaatga

SEQ ID NO: 925214 - DNA, 33 bp, Homo sapien
tcacagcaaaagagcctggaatacacgaaatga

SEQ ID NO: 925215 - DNA, 33 bp, Homo sapien
aacttggtccaagagcactaggtcagtacagga

SEQ ID NO: 925216 - DNA, 33 bp, Homo sapien
aacttggtccaagagcgctaggtcagtacagga

SEQ ID NO: 925217 - DNA, 33 bp, Homo sapien
cctatcctatgatagaatatctggaaacacaaa

SEQ ID NO: 925218 - DNA, 33 bp, Homo sapien
cctatcctatgatagactatctggaaacacaaa

SEQ ID NO: 925219 - DNA, 33 bp, Homo sapien
agttgatgggttcaaaactaggtaaatacagtt

SEQ ID NO: 925220 - DNA, 33 bp, Homo sapien
agttgatgggttcaaacctaggtaaatacagtt

SEQ ID NO: 925221 - DNA, 33 bp, Homo sapien
acaaggctgccttcagacaagtactatatgtaa

SEQ ID NO: 925222 - DNA, 33 bp, Homo sapien
acaaggctgccttcagccaagtactatatgtaa

SEQ ID NO: 925223 - DNA, 33 bp, Homo sapien
acatcagtgctcctaaggtataaagatgactgc

SEQ ID NO: 925224 - DNA, 33 bp, Homo sapien
acatcagtgctcctaatgtataaagatgactgc

SEQ ID NO: 925225 - DNA, 33 bp, Homo sapien
ttctcaactggttcagcctatgggcctcggaaa

SEQ ID NO: 925226 - DNA, 33 bp, Homo sapien
ttctcaactggttcaggctatgggcctcggaaa

SEQ ID NO: 925227 - DNA, 33 bp, Homo sapien
gagtagccacatttacactcaaatctgtctgtc

SEQ ID NO: 925228 - DNA, 33 bp, Homo sapien
gagtagccacatttacgctcaaatctgtctgtc

SEQ ID NO: 925229 - DNA, 33 bp, Homo sapien
aaggaagaaagccttacgatgtctaggaaggaa

SEQ ID NO: 925230 - DNA, 33 bp, Homo sapien
aaggaagaaagccttatgatgtctaggaaggaa

SEQ ID NO: 925231 - DNA, 33 bp, Homo sapien
tagaatgaggaaatcacgcattttatgtttgtt

SEQ ID NO: 925232 - DNA, 33 bp, Homo sapien
tagaatgaggaaatcatgcattttatgtttgtt

SEQ ID NO: 925233 - DNA, 33 bp, Homo sapien
taatgatgtatttataacatgagaagcatcaat

SEQ ID NO: 925234 - DNA, 33 bp, Homo sapien
taatgatgtatttatagcatgagaagcatcaat

SEQ ID NO: 925235 - DNA, 33 bp, Homo sapien
aagaaataaaaggcaaccacatcaaatagggaa

SEQ ID NO: 925236 - DNA, 33 bp, Homo sapien
aagaaataaaaggcaatcacatcaaatagggaa

SEQ ID NO: 925237 - DNA, 33 bp, Homo sapien
gagtggccgttataaaaaatacaagggatacaa

SEQ ID NO: 925238 - DNA, 33 bp, Homo sapien
gagtggccgttataaagaatacaagggatacaa

SEQ ID NO: 925239 - DNA, 33 bp, Homo sapien
ggatgcatacgttcaacgaagcactcttcacag

SEQ ID NO: 925240 - DNA, 33 bp, Homo sapien
ggatgcatacgttcaatgaagcactcttcacag

SEQ ID NO: 925241 - DNA, 33 bp, Homo sapien
acaaccaggtaatttacaaggctctaactccaa

SEQ ID NO: 925242 - DNA, 33 bp, Homo sapien
acaaccaggtaatttagaaggctctaactccaa

SEQ ID NO: 925243 - DNA, 33 bp, Homo sapien
taattgggaatggcttaaaaaaatcaggattta

SEQ ID NO: 925244 - DNA, 33 bp, Homo sapien
taattgggaatggctttaaaaaatcaggattta

SEQ ID NO: 925245 - DNA, 33 bp, Homo sapien
gatcctgaacaacaaacatgttttttaaaatgg

SEQ ID NO: 925246 - DNA, 33 bp, Homo sapien
gatcctgaacaacaaatatgttttttaaaatgg

SEQ ID NO: 925247 - DNA, 33 bp, Homo sapien
cgtttgcaagaaagtaaattcctaagagccaaa

SEQ ID NO: 925248 - DNA, 33 bp, Homo sapien
cgtttgcaagaaagtagattcctaagagccaaa

SEQ ID NO: 925249 - DNA, 33 bp, Homo sapien
ccattttcgaatccacagaggcagattaaagga

SEQ ID NO: 925250 - DNA, 33 bp, Homo sapien
ccattttcgaatccacggaggcagattaaagga

SEQ ID NO: 925251 - DNA, 33 bp, Homo sapien
ggatttctcattcaaagaattactttcctgatt

SEQ ID NO: 925252 - DNA, 33 bp, Homo sapien
ggatttctcattcaaataattactttcctgatt

SEQ ID NO: 925253 - DNA, 33 bp, Homo sapien
ccaccagcctgaagtacgtattagctgttcaga

SEQ ID NO: 925254 - DNA, 33 bp, Homo sapien
ccaccagcctgaagtatgtattagctgttcaga

SEQ ID NO: 925255 - DNA, 33 bp, Homo sapien
tattgctccattttaccggtggtcaatattcta

SEQ ID NO: 925256 - DNA, 33 bp, Homo sapien
tattgctccattttacgggtggtcaatattcta

SEQ ID NO: 925257 - DNA, 33 bp, Homo sapien
cctcgtcaaaattacaactactcttaactcctc

SEQ ID NO: 925258 - DNA, 33 bp, Homo sapien
cctcgtcaaaattacagctactcttaactcctc

SEQ ID NO: 925259 - DNA, 33 bp, Homo sapien
gccatctcgaaatccccattgctttcatctggt

SEQ ID NO: 925260 - DNA, 33 bp, Homo sapien
gccatctcgaaatccctattgctttcatctggt

SEQ ID NO: 925261 - DNA, 33 bp, Homo sapien
tgttgtggtagggatcaataacataaaaagtca

SEQ ID NO: 925262 - DNA, 33 bp, Homo sapien
tgttgtggtagggatcgataacataaaaagtca

SEQ ID NO: 925263 - DNA, 33 bp, Homo sapien
gattttaaactagcatcatctcattgatttcat

SEQ ID NO: 925264 - DNA, 33 bp, Homo sapien
gattttaaactagcatgatctcattgatttcat

SEQ ID NO: 925265 - DNA, 33 bp, Homo sapien
taaaagacaaataaccccagctttaaaatgagc

SEQ ID NO: 925266 - DNA, 33 bp, Homo sapien
taaaagacaaataacctcagctttaaaatgagc

SEQ ID NO: 925267 - DNA, 33 bp, Homo sapien
actctaagggtagagccgagattttgggattcg

SEQ ID NO: 925268 - DNA, 33 bp, Homo sapien
actctaagggtagagctgagattttgggattcg

SEQ ID NO: 925269 - DNA, 33 bp, Homo sapien
tccacttattgtaaagcatacatagcccagagt

SEQ ID NO: 925270 - DNA, 33 bp, Homo sapien
tccacttattgtaaagtatacatagcccagagt

SEQ ID NO: 925271 - DNA, 33 bp, Homo sapien
tgccaatcctttgttcgccaagtgagagggtaa

SEQ ID NO: 925272 - DNA, 33 bp, Homo sapien
tgccaatcctttgttctccaagtgagagggtaa

SEQ ID NO: 925273 - DNA, 33 bp, Homo sapien
tctccgtcagaattcccctgcagttgtttgtgg

SEQ ID NO: 925274 - DNA, 33 bp, Homo sapien
tctccgtcagaattcctctgcagttgtttgtgg

SEQ ID NO: 925275 - DNA, 33 bp, Homo sapien
gggcaaaaatcacgtacgtaagtttgggcttat

SEQ ID NO: 925276 - DNA, 33 bp, Homo sapien
gggcaaaaatcacgtatgtaagtttgggcttat

SEQ ID NO: 925277 - DNA, 33 bp, Homo sapien
tagtgctctagtcccacgtaacaaatcttaaaa

SEQ ID NO: 925278 - DNA, 33 bp, Homo sapien
tagtgctctagtcccatgtaacaaatcttaaaa

SEQ ID NO: 925279 - DNA, 33 bp, Homo sapien
ggctagttatcccagcaaatagcgagtcctgtc

SEQ ID NO: 925280 - DNA, 33 bp, Homo sapien
ggctagttatcccagcgaatagcgagtcctgtc

SEQ ID NO: 925281 - DNA, 33 bp, Homo sapien
ctgttgactatgttgtcacaaactgattttatg

SEQ ID NO: 925282 - DNA, 33 bp, Homo sapien
ctgttgactatgttgttacaaactgattttatg

SEQ ID NO: 925283 - DNA, 33 bp, Homo sapien
ttaagtttcattttcaataaaatcaatcgtagc

SEQ ID NO: 925284 - DNA, 33 bp, Homo sapien
ttaagtttcattttcagtaaaatcaatcgtagc

SEQ ID NO: 925285 - DNA, 33 bp, Homo sapien
ttcaaggttcacaccaaatattagctctgagat

SEQ ID NO: 925286 - DNA, 33 bp, Homo sapien
ttcaaggttcacaccacatattagctctgagat

SEQ ID NO: 925287 - DNA, 33 bp, Homo sapien
tagttgttaccctcaaaaagctactgttacctc

SEQ ID NO: 925288 - DNA, 33 bp, Homo sapien
tagttgttaccctcaagaagctactgttacctc

SEQ ID NO: 925289 - DNA, 33 bp, Homo sapien
aaaggcagctagaatgaaagactgaacactttg

SEQ ID NO: 925290 - DNA, 33 bp, Homo sapien
aaaggcagctagaatggaagactgaacactttg

SEQ ID NO: 925291 - DNA, 33 bp, Homo sapien
ggtccatgtagtttaactgggtgagaatcctag

SEQ ID NO: 925292 - DNA, 33 bp, Homo sapien
ggtccatgtagtttaattgggtgagaatcctag

SEQ ID NO: 925293 - DNA, 33 bp, Homo sapien
tctctaatgtgggaagaaaacaccaccaatatt

SEQ ID NO: 925294 - DNA, 33 bp, Homo sapien
tctctaatgtgggaaggaaacaccaccaatatt

SEQ ID NO: 925295 - DNA, 33 bp, Homo sapien
aatctgcttgaacaacaacaactagatagtctt

SEQ ID NO: 925296 - DNA, 33 bp, Homo sapien
aatctgcttgaacaacgacaactagatagtctt

SEQ ID NO: 925297 - DNA, 33 bp, Homo sapien
atggataaaggatatgaacaaatgatgatgatg

SEQ ID NO: 925298 - DNA, 33 bp, Homo sapien
atggataaaggatatggacaaatgatgatgatg

SEQ ID NO: 925299 - DNA, 33 bp, Homo sapien
atgatgatggcaataaaagtaaccgcttacatg

SEQ ID NO: 925300 - DNA, 33 bp, Homo sapien
atgatgatggcaataagagtaaccgcttacatg

SEQ ID NO: 925301 - DNA, 33 bp, Homo sapien
tgaggaaactgaggtacaaatgaagaaactaaa

SEQ ID NO: 925302 - DNA, 33 bp, Homo sapien
tgaggaaactgaggtataaatgaagaaactaaa

SEQ ID NO: 925303 - DNA, 33 bp, Homo sapien
ttcatatggttcaaaactccaaaattatagaag

SEQ ID NO: 925304 - DNA, 33 bp, Homo sapien
ttcatatggttcaaaattccaaaattatagaag

SEQ ID NO: 925305 - DNA, 33 bp, Homo sapien
aaatgcccatcaataacacactagataaagaaa

SEQ ID NO: 925306 - DNA, 33 bp, Homo sapien
aaatgcccatcaataatacactagataaagaaa

SEQ ID NO: 925307 - DNA, 33 bp, Homo sapien
aattggcaaagaatctcaatggtgctgcattca

SEQ ID NO: 925308 - DNA, 33 bp, Homo sapien
aattggcaaagaatctgaatggtgctgcattca

SEQ ID NO: 925309 - DNA, 33 bp, Homo sapien
aaatgatgtgatgatacaagcgcaatgtagcgc

SEQ ID NO: 925310 - DNA, 33 bp, Homo sapien
aaatgatgtgatgatataagcgcaatgtagcgc

SEQ ID NO: 925311 - DNA, 33 bp, Homo sapien
acaagaaagacctgtcaaattttactgtcaatt

SEQ ID NO: 925312 - DNA, 33 bp, Homo sapien
acaagaaagacctgtctaattttactgtcaatt

SEQ ID NO: 925313 - DNA, 33 bp, Homo sapien
cgaattcgtattttgaataagttcccaggtaat

SEQ ID NO: 925314 - DNA, 33 bp, Homo sapien
cgaattcgtattttgagtaagttcccaggtaat

SEQ ID NO: 925315 - DNA, 33 bp, Homo sapien
aatagaaagatatttgcaggatagtagttgaaa

SEQ ID NO: 925316 - DNA, 33 bp, Homo sapien
aatagaaagatatttgtaggatagtagttgaaa

SEQ ID NO: 925317 - DNA, 33 bp, Homo sapien
ttctagaaaagtcttcacctaataatccttcaa

SEQ ID NO: 925318 - DNA, 33 bp, Homo sapien
ttctagaaaagtcttcgcctaataatccttcaa

SEQ ID NO: 925319 - DNA, 33 bp, Homo sapien
tgaagtgtagaagtgcaaataatgcaaaggaag

SEQ ID NO: 925320 - DNA, 33 bp, Homo sapien
tgaagtgtagaagtgcgaataatgcaaaggaag

SEQ ID NO: 925321 - DNA, 33 bp, Homo sapien
tctgcagtctttgcaaaagttcacctataatcc

SEQ ID NO: 925322 - DNA, 33 bp, Homo sapien
tctgcagtctttgcaatagttcacctataatcc

SEQ ID NO: 925323 - DNA, 33 bp, Homo sapien
cataagtccaggtagaaccatttttgacagagt

SEQ ID NO: 925324 - DNA, 33 bp, Homo sapien
cataagtccaggtagagccatttttgacagagt

SEQ ID NO: 925325 - DNA, 33 bp, Homo sapien
atggatggaggataaggatacagcctcagtcaa

SEQ ID NO: 925326 - DNA, 33 bp, Homo sapien
atggatggaggataagtatacagcctcagtcaa

SEQ ID NO: 925327 - DNA, 33 bp, Homo sapien
aattagttaagaccaactaagcctatgatctaa

SEQ ID NO: 925328 - DNA, 33 bp, Homo sapien
aattagttaagaccaattaagcctatgatctaa

SEQ ID NO: 925329 - DNA, 33 bp, Homo sapien
gaacaaagcaaatacaacaaaactatatgctct

SEQ ID NO: 925330 - DNA, 33 bp, Homo sapien
gaacaaagcaaatacagcaaaactatatgctct

SEQ ID NO: 925331 - DNA, 33 bp, Homo sapien
cggagatttagaagaaaaacacataagaagata

SEQ ID NO: 925332 - DNA, 33 bp, Homo sapien
cggagatttagaagaacaacacataagaagata

SEQ ID NO: 925333 - DNA, 33 bp, Homo sapien
agtctggtgcctcctccagttactatgggggtg

SEQ ID NO: 925334 - DNA, 33 bp, Homo sapien
agtctggtgcctcctctagttactatgggggtg

SEQ ID NO: 925335 - DNA, 33 bp, Homo sapien
ctttcatagtagatccaatcagttaattaaaaa

SEQ ID NO: 925336 - DNA, 33 bp, Homo sapien
ctttcatagtagatccgatcagttaattaaaaa

SEQ ID NO: 925337 - DNA, 33 bp, Homo sapien
cagtgctttatctaccaggcagtgagttggcat

SEQ ID NO: 925338 - DNA, 33 bp, Homo sapien
cagtgctttatctaccgggcagtgagttggcat

SEQ ID NO: 925339 - DNA, 33 bp, Homo sapien
attatccctacgattcacccacttctctccatc

SEQ ID NO: 925340 - DNA, 33 bp, Homo sapien
attatccctacgattcgcccacttctctccatc

SEQ ID NO: 925341 - DNA, 33 bp, Homo sapien
ataaagctcaaagacacctgtgaagaaaagaaa

SEQ ID NO: 925342 - DNA, 33 bp, Homo sapien
ataaagctcaaagacatctgtgaagaaaagaaa

SEQ ID NO: 925343 - DNA, 33 bp, Homo sapien
tcatagataagtaaatcattccgtgacacagaa

SEQ ID NO: 925344 - DNA, 33 bp, Homo sapien
tcatagataagtaaattattccgtgacacagaa

SEQ ID NO: 925345 - DNA, 33 bp, Homo sapien
gaggaacacaacaataacctgctcacttttgaa

SEQ ID NO: 925346 - DNA, 33 bp, Homo sapien
gaggaacacaacaatagcctgctcacttttgaa

SEQ ID NO: 925347 - DNA, 33 bp, Homo sapien
gaaccccagagaaaaaatggtgatgtgcctctc

SEQ ID NO: 925348 - DNA, 33 bp, Homo sapien
gaaccccagagaaaaattggtgatgtgcctctc

SEQ ID NO: 925349 - DNA, 33 bp, Homo sapien
aaactgcactgtatgaaaccacacaagatgtcc

SEQ ID NO: 925350 - DNA, 33 bp, Homo sapien
aaactgcactgtatgagaccacacaagatgtcc

SEQ ID NO: 925351 - DNA, 33 bp, Homo sapien
agatgcaagcttgaaaatacaatgtgacctaat

SEQ ID NO: 925352 - DNA, 33 bp, Homo sapien
agatgcaagcttgaaactacaatgtgacctaat

SEQ ID NO: 925353 - DNA, 33 bp, Homo sapien
attaggtgggggtcaacgaactttttctgctca

SEQ ID NO: 925354 - DNA, 33 bp, Homo sapien
attaggtgggggtcaatgaactttttctgctca

SEQ ID NO: 925355 - DNA, 33 bp, Homo sapien
cactggaatggtagaacgaggatgggctttatt

SEQ ID NO: 925356 - DNA, 33 bp, Homo sapien
cactggaatggtagaatgaggatgggctttatt

SEQ ID NO: 925357 - DNA, 33 bp, Homo sapien
agaaggagaagaaggacgaggagaagaagagga

SEQ ID NO: 925358 - DNA, 33 bp, Homo sapien
agaaggagaagaaggatgaggagaagaagagga

SEQ ID NO: 925359 - DNA, 33 bp, Homo sapien
atagccataactccacaaactcatttctttttc

SEQ ID NO: 925360 - DNA, 33 bp, Homo sapien
atagccataactccacgaactcatttctttttc

SEQ ID NO: 925361 - DNA, 33 bp, Homo sapien
ctgttcatgcctaaaacagcttaactgacccag

SEQ ID NO: 925362 - DNA, 33 bp, Homo sapien
ctgttcatgcctaaaatagcttaactgacccag

SEQ ID NO: 925363 - DNA, 33 bp, Homo sapien
gtaccttctcattttaaacactgtgtcctctag

SEQ ID NO: 925364 - DNA, 33 bp, Homo sapien
gtaccttctcattttatacactgtgtcctctag

SEQ ID NO: 925365 - DNA, 33 bp, Homo sapien
ggtcataacaacaaacactaactcatcacacac

SEQ ID NO: 925366 - DNA, 33 bp, Homo sapien
ggtcataacaacaaacgctaactcatcacacac

SEQ ID NO: 925367 - DNA, 33 bp, Homo sapien
tctcagtcactgcataaagtcactatatttctt

SEQ ID NO: 925368 - DNA, 33 bp, Homo sapien
tctcagtcactgcatagagtcactatatttctt

SEQ ID NO: 925369 - DNA, 33 bp, Homo sapien
gaccagaaacctgaaacttgaaaagctgcattt

SEQ ID NO: 925370 - DNA, 33 bp, Homo sapien
gaccagaaacctgaaatttgaaaagctgcattt

SEQ ID NO: 925371 - DNA, 33 bp, Homo sapien
gcttctccctaggtaactctttgctcccagtcc

SEQ ID NO: 925372 - DNA, 33 bp, Homo sapien
gcttctccctaggtaattctttgctcccagtcc

SEQ ID NO: 925373 - DNA, 33 bp, Homo sapien
tttatcagtgattagacgcttctctcttgcggc

SEQ ID NO: 925374 - DNA, 33 bp, Homo sapien
tttatcagtgattagatgcttctctcttgcggc

SEQ ID NO: 925375 - DNA, 33 bp, Homo sapien
tgtgtgaccttagaaaaagaatcattatatgtt

SEQ ID NO: 925376 - DNA, 33 bp, Homo sapien
tgtgtgaccttagaaagagaatcattatatgtt

SEQ ID NO: 925377 - DNA, 33 bp, Homo sapien
aaagaaactcagaagacgatggggagaggtaga

SEQ ID NO: 925378 - DNA, 33 bp, Homo sapien
aaagaaactcagaagatgatggggagaggtaga

SEQ ID NO: 925379 - DNA, 33 bp, Homo sapien
actcctgtagttcagcaagtaggagggagggtt

SEQ ID NO: 925380 - DNA, 33 bp, Homo sapien
actcctgtagttcagcgagtaggagggagggtt

SEQ ID NO: 925381 - DNA, 33 bp, Homo sapien
gtgggagcaaacttagacaagtagctaggaggc

SEQ ID NO: 925382 - DNA, 33 bp, Homo sapien
gtgggagcaaacttaggcaagtagctaggaggc

SEQ ID NO: 925383 - DNA, 33 bp, Homo sapien
atcttggtgaatattccattgcgtctgaaaatg

SEQ ID NO: 925384 - DNA, 33 bp, Homo sapien
atcttggtgaatattctattgcgtctgaaaatg

SEQ ID NO: 925385 - DNA, 33 bp, Homo sapien
gcctgtgatgcactgaaggtgaattccaatatt

SEQ ID NO: 925386 - DNA, 33 bp, Homo sapien
gcctgtgatgcactgacggtgaattccaatatt

SEQ ID NO: 925387 - DNA, 33 bp, Homo sapien
gggaaaggacagaaaaccttcttgactctggga

SEQ ID NO: 925388 - DNA, 33 bp, Homo sapien
gggaaaggacagaaaatcttcttgactctggga

SEQ ID NO: 925389 - DNA, 33 bp, Homo sapien
ttaaaactatgtctaaagagccaacagttcatt

SEQ ID NO: 925390 - DNA, 33 bp, Homo sapien
ttaaaactatgtctaaggagccaacagttcatt

SEQ ID NO: 925391 - DNA, 33 bp, Homo sapien
gactgtggttaattaaaagcttatagatacatc

SEQ ID NO: 925392 - DNA, 33 bp, Homo sapien
gactgtggttaattaagagcttatagatacatc

SEQ ID NO: 925393 - DNA, 33 bp, Homo sapien
tcctaaacaaaagtcacacattcagtaattgga

SEQ ID NO: 925394 - DNA, 33 bp, Homo sapien
tcctaaacaaaagtcatacattcagtaattgga

SEQ ID NO: 925395 - DNA, 33 bp, Homo sapien
gtagcatctgtaataacgaccttctgcagaaca

SEQ ID NO: 925396 - DNA, 33 bp, Homo sapien
gtagcatctgtaataatgaccttctgcagaaca

SEQ ID NO: 925397 - DNA, 33 bp, Homo sapien
gtaaccatggaccccaatgcaatgtattcttga

SEQ ID NO: 925398 - DNA, 33 bp, Homo sapien
gtaaccatggaccccagtgcaatgtattcttga

SEQ ID NO: 925399 - DNA, 33 bp, Homo sapien
aagaccacaaccactcaaggaaagcttcccatt

SEQ ID NO: 925400 - DNA, 33 bp, Homo sapien
aagaccacaaccactcgaggaaagcttcccatt

SEQ ID NO: 925401 - DNA, 33 bp, Homo sapien
tagggtgatgtcatgcaataaaggggaaaagag

SEQ ID NO: 925402 - DNA, 33 bp, Homo sapien
tagggtgatgtcatgcgataaaggggaaaagag

SEQ ID NO: 925403 - DNA, 33 bp, Homo sapien
ttcaattttactgggccgagttagaccatatat

SEQ ID NO: 925404 - DNA, 33 bp, Homo sapien
ttcaattttactgggctgagttagaccatatat

SEQ ID NO: 925405 - DNA, 33 bp, Homo sapien
catgaagtcagcctctcaatcttcagtttgaaa

SEQ ID NO: 925406 - DNA, 33 bp, Homo sapien
catgaagtcagcctcttaatcttcagtttgaaa

SEQ ID NO: 925407 - DNA, 33 bp, Homo sapien
tttaccttattggtccagattctagtcctcatt

SEQ ID NO: 925408 - DNA, 33 bp, Homo sapien
tttaccttattggtccggattctagtcctcatt

SEQ ID NO: 925409 - DNA, 33 bp, Homo sapien
acttttgtatgaggaacagacttgtatgggagg

SEQ ID NO: 925410 - DNA, 33 bp, Homo sapien
acttttgtatgaggaatagacttgtatgggagg

SEQ ID NO: 925411 - DNA, 33 bp, Homo sapien
gactcctgattgaatcaccgaacaggtcacaga

SEQ ID NO: 925412 - DNA, 33 bp, Homo sapien
gactcctgattgaatctccgaacaggtcacaga

SEQ ID NO: 925413 - DNA, 33 bp, Homo sapien
acctactaagtatgacactttaacttacatatg

SEQ ID NO: 925414 - DNA, 33 bp, Homo sapien
acctactaagtatgactctttaacttacatatg

SEQ ID NO: 925415 - DNA, 33 bp, Homo sapien
gaggcaatgggctcccaatcactcatgccttga

SEQ ID NO: 925416 - DNA, 33 bp, Homo sapien
gaggcaatgggctcccgatcactcatgccttga

SEQ ID NO: 925417 - DNA, 33 bp, Homo sapien
aagctgcctcatccagaaagttatgcttatcct

SEQ ID NO: 925418 - DNA, 33 bp, Homo sapien
aagctgcctcatccaggaagttatgcttatcct

SEQ ID NO: 925419 - DNA, 33 bp, Homo sapien
gagttaacctttcaaccatggcctctagtttga

SEQ ID NO: 925420 - DNA, 33 bp, Homo sapien
gagttaacctttcaactatggcctctagtttga

SEQ ID NO: 925421 - DNA, 33 bp, Homo sapien
aaggccagatcagatacgtgcaccgatccacaa

SEQ ID NO: 925422 - DNA, 33 bp, Homo sapien
aaggccagatcagatatgtgcaccgatccacaa

SEQ ID NO: 925423 - DNA, 33 bp, Homo sapien
aaagaggagtgcaggcaaaccaaacacctgtcc

SEQ ID NO: 925424 - DNA, 33 bp, Homo sapien
aaagaggagtgcaggcgaaccaaacacctgtcc

SEQ ID NO: 925425 - DNA, 33 bp, Homo sapien
ttgatatacctacaaactggttttctgcagcaa

SEQ ID NO: 925426 - DNA, 33 bp, Homo sapien
ttgatatacctacaaattggttttctgcagcaa

SEQ ID NO: 925427 - DNA, 33 bp, Homo sapien
ttattgtcacaaattaacagtatttttgcagtg

SEQ ID NO: 925428 - DNA, 33 bp, Homo sapien
ttattgtcacaaattatcagtatttttgcagtg

SEQ ID NO: 925429 - DNA, 33 bp, Homo sapien
gcctccatctactttagagtgaacaggcttgta

SEQ ID NO: 925430 - DNA, 33 bp, Homo sapien
gcctccatctactttatagtgaacaggcttgta

SEQ ID NO: 925431 - DNA, 33 bp, Homo sapien
atcttgtctttgctcacggaatcatttacactc

SEQ ID NO: 925432 - DNA, 33 bp, Homo sapien
atcttgtctttgctcatggaatcatttacactc

SEQ ID NO: 925433 - DNA, 33 bp, Homo sapien
aggtcatcgccagcatcaaatgtggaagcttag

SEQ ID NO: 925434 - DNA, 33 bp, Homo sapien
aggtcatcgccagcattaaatgtggaagcttag

SEQ ID NO: 925435 - DNA, 33 bp, Homo sapien
ttgctaatgaaagacaccgggtttatggcaggt

SEQ ID NO: 925436 - DNA, 33 bp, Homo sapien
ttgctaatgaaagacatcgggtttatggcaggt

SEQ ID NO: 925437 - DNA, 33 bp, Homo sapien
tacacctggttcaagaatcagatcatataaagg

SEQ ID NO: 925438 - DNA, 33 bp, Homo sapien
tacacctggttcaagagtcagatcatataaagg

SEQ ID NO: 925439 - DNA, 33 bp, Homo sapien
attagtgtggaaaaacagaacattttatggaag

SEQ ID NO: 925440 - DNA, 33 bp, Homo sapien
attagtgtggaaaaacggaacattttatggaag

SEQ ID NO: 925441 - DNA, 33 bp, Homo sapien
cactagaaatataacactgaacataatattaat

SEQ ID NO: 925442 - DNA, 33 bp, Homo sapien
cactagaaatataacagtgaacataatattaat

SEQ ID NO: 925443 - DNA, 33 bp, Homo sapien
aaggcaagatataccaatataaacaagattacc

SEQ ID NO: 925444 - DNA, 33 bp, Homo sapien
aaggcaagatataccagtataaacaagattacc

SEQ ID NO: 925445 - DNA, 33 bp, Homo sapien
cgagtatctatatcaccggcagatctgaaaaaa

SEQ ID NO: 925446 - DNA, 33 bp, Homo sapien
cgagtatctatatcactggcagatctgaaaaaa

SEQ ID NO: 925447 - DNA, 33 bp, Homo sapien
taagagttactgattagcttggaattatcaaaa

SEQ ID NO: 925448 - DNA, 33 bp, Homo sapien
taagagttactgattatcttggaattatcaaaa

SEQ ID NO: 925449 - DNA, 33 bp, Homo sapien
tgtaatactgtataagaccaaacattgaggttt

SEQ ID NO: 925450 - DNA, 33 bp, Homo sapien
tgtaatactgtataagcccaaacattgaggttt

SEQ ID NO: 925451 - DNA, 33 bp, Homo sapien
gatttagtagattcaccggactgtccctccaat

SEQ ID NO: 925452 - DNA, 33 bp, Homo sapien
gatttagtagattcactggactgtccctccaat

SEQ ID NO: 925453 - DNA, 33 bp, Homo sapien
cctattacttggttggaaatttgtaagttttta

SEQ ID NO: 925454 - DNA, 33 bp, Homo sapien
cctattacttggttggcaatttgtaagttttta

SEQ ID NO: 925455 - DNA, 33 bp, Homo sapien
ccttaagccaccaaaaatttctgatgtcataca

SEQ ID NO: 925456 - DNA, 33 bp, Homo sapien
ccttaagccaccaaaagtttctgatgtcataca

SEQ ID NO: 925457 - DNA, 33 bp, Homo sapien
gagtccccttcgatcacgaactcttcccaactc

SEQ ID NO: 925458 - DNA, 33 bp, Homo sapien
gagtccccttcgatcatgaactcttcccaactc

SEQ ID NO: 925459 - DNA, 33 bp, Homo sapien
ggttgtatgtactttacggaaggaagagttggg

SEQ ID NO: 925460 - DNA, 33 bp, Homo sapien
ggttgtatgtactttatggaaggaagagttggg

SEQ ID NO: 925461 - DNA, 33 bp, Homo sapien
ttctggtgacatttacaaaacattttattacat

SEQ ID NO: 925462 - DNA, 33 bp, Homo sapien
ttctggtgacatttacgaaacattttattacat

SEQ ID NO: 925463 - DNA, 33 bp, Homo sapien
atttcatgctcttatcaaatttttatcattacc

SEQ ID NO: 925464 - DNA, 33 bp, Homo sapien
atttcatgctcttatccaatttttatcattacc

SEQ ID NO: 925465 - DNA, 33 bp, Homo sapien
ccttcaaattgtttcaagtcaaatacttctgga

SEQ ID NO: 925466 - DNA, 33 bp, Homo sapien
ccttcaaattgtttcatgtcaaatacttctgga

SEQ ID NO: 925467 - DNA, 33 bp, Homo sapien
tgtgttaacatggccaataagtgccaaatatcc

SEQ ID NO: 925468 - DNA, 33 bp, Homo sapien
tgtgttaacatggccagtaagtgccaaatatcc

SEQ ID NO: 925469 - DNA, 33 bp, Homo sapien
tccatactgaaggatcaactggattccaaatac

SEQ ID NO: 925470 - DNA, 33 bp, Homo sapien
tccatactgaaggatcgactggattccaaatac

SEQ ID NO: 925471 - DNA, 33 bp, Homo sapien
gacagtcaccattctaaaagttacacatattaa

SEQ ID NO: 925472 - DNA, 33 bp, Homo sapien
gacagtcaccattctacaagttacacatattaa

SEQ ID NO: 925473 - DNA, 33 bp, Homo sapien
tttgacatatagcctaaacccttggatctgctc

SEQ ID NO: 925474 - DNA, 33 bp, Homo sapien
tttgacatatagcctacacccttggatctgctc

SEQ ID NO: 925475 - DNA, 33 bp, Homo sapien
tacatcctgaaaaatacaatgactaagcaaaaa

SEQ ID NO: 925476 - DNA, 33 bp, Homo sapien
tacatcctgaaaaatataatgactaagcaaaaa

SEQ ID NO: 925477 - DNA, 33 bp, Homo sapien
aaattacatctaataaccactgcctgtgtaaag

SEQ ID NO: 925478 - DNA, 33 bp, Homo sapien
aaattacatctaataagcactgcctgtgtaaag

SEQ ID NO: 925479 - DNA, 33 bp, Homo sapien
ggagagcaataaactccgaagctctaaaacaag

SEQ ID NO: 925480 - DNA, 33 bp, Homo sapien
ggagagcaataaactctgaagctctaaaacaag

SEQ ID NO: 925481 - DNA, 33 bp, Homo sapien
gacagagaaaaccagaatcatgtaagtttttat

SEQ ID NO: 925482 - DNA, 33 bp, Homo sapien
gacagagaaaaccagattcatgtaagtttttat

SEQ ID NO: 925483 - DNA, 33 bp, Homo sapien
atcttatcaaaaataccagaagtcatgcaatgc

SEQ ID NO: 925484 - DNA, 33 bp, Homo sapien
atcttatcaaaaatactagaagtcatgcaatgc

SEQ ID NO: 925485 - DNA, 33 bp, Homo sapien
aaagtgtaagggactactaagacctatgctact

SEQ ID NO: 925486 - DNA, 33 bp, Homo sapien
aaagtgtaagggactattaagacctatgctact

SEQ ID NO: 925487 - DNA, 33 bp, Homo sapien
ggctatcttctacaacagagattaaatactgac

SEQ ID NO: 925488 - DNA, 33 bp, Homo sapien
ggctatcttctacaacggagattaaatactgac

SEQ ID NO: 925489 - DNA, 33 bp, Homo sapien
aaccagaaggaacctcagcaaattttttagaca

SEQ ID NO: 925490 - DNA, 33 bp, Homo sapien
aaccagaaggaacctcggcaaattttttagaca

SEQ ID NO: 925491 - DNA, 33 bp, Homo sapien
aaaaatcacagatgaacataagtacagctcaac

SEQ ID NO: 925492 - DNA, 33 bp, Homo sapien
aaaaatcacagatgaatataagtacagctcaac

SEQ ID NO: 925493 - DNA, 33 bp, Homo sapien
gagaagcgtgtttacccagattattatagctag

SEQ ID NO: 925494 - DNA, 33 bp, Homo sapien
gagaagcgtgtttaccgagattattatagctag

SEQ ID NO: 925495 - DNA, 33 bp, Homo sapien
attagttttcatacacagtcaaggttagttctt

SEQ ID NO: 925496 - DNA, 33 bp, Homo sapien
attagttttcatacaccgtcaaggttagttctt

SEQ ID NO: 925497 - DNA, 33 bp, Homo sapien
tgatggtgctcagccagagctttccatgtctct

SEQ ID NO: 925498 - DNA, 33 bp, Homo sapien
tgatggtgctcagccatagctttccatgtctct

SEQ ID NO: 925499 - DNA, 33 bp, Homo sapien
tacttatgtgaagctacgtatggtttgactgaa

SEQ ID NO: 925500 - DNA, 33 bp, Homo sapien
tacttatgtgaagctatgtatggtttgactgaa

SEQ ID NO: 925501 - DNA, 33 bp, Homo sapien
aacctttttcagtctcacaggaccttttttaat

SEQ ID NO: 925502 - DNA, 33 bp, Homo sapien
aacctttttcagtctcgcaggaccttttttaat

SEQ ID NO: 925503 - DNA, 33 bp, Homo sapien
tagacctatacaaatacgctcaacttatttttg

SEQ ID NO: 925504 - DNA, 33 bp, Homo sapien
tagacctatacaaatatgctcaacttatttttg

SEQ ID NO: 925505 - DNA, 33 bp, Homo sapien
ataaattcttaatgacaagtctattctcccatt

SEQ ID NO: 925506 - DNA, 33 bp, Homo sapien
ataaattcttaatgacgagtctattctcccatt

SEQ ID NO: 925507 - DNA, 33 bp, Homo sapien
ctacatgcacagacaaactaggcaaatcaaacc

SEQ ID NO: 925508 - DNA, 33 bp, Homo sapien
ctacatgcacagacaagctaggcaaatcaaacc

SEQ ID NO: 925509 - DNA, 33 bp, Homo sapien
attatatgtcttcacactatttccaatatccat

SEQ ID NO: 925510 - DNA, 33 bp, Homo sapien
attatatgtcttcacagtatttccaatatccat

SEQ ID NO: 925511 - DNA, 33 bp, Homo sapien
agttaggctgagatcaatgaaaggaaggaaagc

SEQ ID NO: 925512 - DNA, 33 bp, Homo sapien
agttaggctgagatcagtgaaaggaaggaaagc

SEQ ID NO: 925513 - DNA, 33 bp, Homo sapien
cccttgtttgggaccagtatggctccaagaagc

SEQ ID NO: 925514 - DNA, 33 bp, Homo sapien
cccttgtttgggaccattatggctccaagaagc

SEQ ID NO: 925515 - DNA, 33 bp, Homo sapien
ggaagagagtatattacgtttgacaaaggattt

SEQ ID NO: 925516 - DNA, 33 bp, Homo sapien
ggaagagagtatattatgtttgacaaaggattt

SEQ ID NO: 925517 - DNA, 33 bp, Homo sapien
agccatttgtgagttacgagtgatgaacattgg

SEQ ID NO: 925518 - DNA, 33 bp, Homo sapien
agccatttgtgagttatgagtgatgaacattgg

SEQ ID NO: 925519 - DNA, 33 bp, Homo sapien
atctgcagttacgaaactcttctgcctaactgg

SEQ ID NO: 925520 - DNA, 33 bp, Homo sapien
atctgcagttacgaaattcttctgcctaactgg

SEQ ID NO: 925521 - DNA, 33 bp, Homo sapien
ggttttaaagtgggagcatttactgaagtaaca

SEQ ID NO: 925522 - DNA, 33 bp, Homo sapien
ggttttaaagtgggaggatttactgaagtaaca

SEQ ID NO: 925523 - DNA, 33 bp, Homo sapien
aagagggtaaataccaagagagtctagctctat

SEQ ID NO: 925524 - DNA, 33 bp, Homo sapien
aagagggtaaataccaggagagtctagctctat

SEQ ID NO: 925525 - DNA, 33 bp, Homo sapien
catatgatttgcagcacatttcaatgcctaatt

SEQ ID NO: 925526 - DNA, 33 bp, Homo sapien
catatgatttgcagcagatttcaatgcctaatt

SEQ ID NO: 925527 - DNA, 33 bp, Homo sapien
gcaaagtcaatgagtaaaacttgcatatgtcat

SEQ ID NO: 925528 - DNA, 33 bp, Homo sapien
gcaaagtcaatgagtacaacttgcatatgtcat

SEQ ID NO: 925529 - DNA, 33 bp, Homo sapien
caagtagaggcaatgcaaagattcacatagttt

SEQ ID NO: 925530 - DNA, 33 bp, Homo sapien
caagtagaggcaatgcgaagattcacatagttt

SEQ ID NO: 925531 - DNA, 33 bp, Homo sapien
ttctgcttttaactcagacactaatagagctcc

SEQ ID NO: 925532 - DNA, 33 bp, Homo sapien
ttctgcttttaactcatacactaatagagctcc

SEQ ID NO: 925533 - DNA, 33 bp, Homo sapien
ttcttgaacctgcctaagatctctgttttctga

SEQ ID NO: 925534 - DNA, 33 bp, Homo sapien
ttcttgaacctgcctatgatctctgttttctga

SEQ ID NO: 925535 - DNA, 33 bp, Homo sapien
acaaaggaactttaaacatctcagctgtttaga

SEQ ID NO: 925536 - DNA, 33 bp, Homo sapien
acaaaggaactttaaatatctcagctgtttaga

SEQ ID NO: 925537 - DNA, 33 bp, Homo sapien
actactctattttagaagcatatgttttcttta

SEQ ID NO: 925538 - DNA, 33 bp, Homo sapien
actactctattttagaggcatatgttttcttta

SEQ ID NO: 925539 - DNA, 33 bp, Homo sapien
tgatgtggagaccagaagctttggtgtaggaga

SEQ ID NO: 925540 - DNA, 33 bp, Homo sapien
tgatgtggagaccagaggctttggtgtaggaga

SEQ ID NO: 925541 - DNA, 33 bp, Homo sapien
gaccctcttaaagaagcattttggccaagttta

SEQ ID NO: 925542 - DNA, 33 bp, Homo sapien
gaccctcttaaagaagtattttggccaagttta

SEQ ID NO: 925543 - DNA, 33 bp, Homo sapien
aagtagtagtctgaccccattaactccatatct

SEQ ID NO: 925544 - DNA, 33 bp, Homo sapien
aagtagtagtctgacctcattaactccatatct

SEQ ID NO: 925545 - DNA, 33 bp, Homo sapien
gagctagagatgagaaagagtttcatatttaac

SEQ ID NO: 925546 - DNA, 33 bp, Homo sapien
gagctagagatgagaacgagtttcatatttaac

SEQ ID NO: 925547 - DNA, 33 bp, Homo sapien
catttttgatgtaggcagatgacctaaatggtg

SEQ ID NO: 925548 - DNA, 33 bp, Homo sapien
catttttgatgtaggccgatgacctaaatggtg

SEQ ID NO: 925549 - DNA, 33 bp, Homo sapien
tgaaccattctttcagcctctacaatgtgccag

SEQ ID NO: 925550 - DNA, 33 bp, Homo sapien
tgaaccattctttcaggctctacaatgtgccag

SEQ ID NO: 925551 - DNA, 33 bp, Homo sapien
actacccatttactcccggacaggttggttgtt

SEQ ID NO: 925552 - DNA, 33 bp, Homo sapien
actacccatttactcctggacaggttggttgtt

SEQ ID NO: 925553 - DNA, 33 bp, Homo sapien
ttcttatatcatatgcaaagattaactaagtgg

SEQ ID NO: 925554 - DNA, 33 bp, Homo sapien
ttcttatatcatatgcgaagattaactaagtgg

SEQ ID NO: 925555 - DNA, 33 bp, Homo sapien
aactgtctcccattcaaccctgatagcagttcc

SEQ ID NO: 925556 - DNA, 33 bp, Homo sapien
aactgtctcccattcagccctgatagcagttcc

SEQ ID NO: 925557 - DNA, 33 bp, Homo sapien
caaatagatgtactcacattagtgtttaaatac

SEQ ID NO: 925558 - DNA, 33 bp, Homo sapien
caaatagatgtactcatattagtgtttaaatac

SEQ ID NO: 925559 - DNA, 33 bp, Homo sapien
agagccagtagcaacactcctcgtactcctcac

SEQ ID NO: 925560 - DNA, 33 bp, Homo sapien
agagccagtagcaacattcctcgtactcctcac

SEQ ID NO: 925561 - DNA, 33 bp, Homo sapien
ccctgaaacttctccaaaaataatgttctttct

SEQ ID NO: 925562 - DNA, 33 bp, Homo sapien
ccctgaaacttctccagaaataatgttctttct

SEQ ID NO: 925563 - DNA, 33 bp, Homo sapien
aagactgttactaatagtatagcaagcagcatg

SEQ ID NO: 925564 - DNA, 33 bp, Homo sapien
aagactgttactaatattatagcaagcagcatg

SEQ ID NO: 925565 - DNA, 33 bp, Homo sapien
tctactgatctctatgaagtttatgaaagcaaa

SEQ ID NO: 925566 - DNA, 33 bp, Homo sapien
tctactgatctctatgcagtttatgaaagcaaa

SEQ ID NO: 925567 - DNA, 33 bp, Homo sapien
aagaatgtaaagtcacagcttcttccacttttc

SEQ ID NO: 925568 - DNA, 33 bp, Homo sapien
aagaatgtaaagtcactgcttcttccacttttc

SEQ ID NO: 925569 - DNA, 33 bp, Homo sapien
tttgtagacagtactacgagattaaaaagaata

SEQ ID NO: 925570 - DNA, 33 bp, Homo sapien
tttgtagacagtactaggagattaaaaagaata

SEQ ID NO: 925571 - DNA, 33 bp, Homo sapien
cttgctctataatctaacatactgtatgtccta

SEQ ID NO: 925572 - DNA, 33 bp, Homo sapien
cttgctctataatctaccatactgtatgtccta

SEQ ID NO: 925573 - DNA, 33 bp, Homo sapien
gaacttgcagttaaaacccttgaatttcattct

SEQ ID NO: 925574 - DNA, 33 bp, Homo sapien
gaacttgcagttaaaatccttgaatttcattct

SEQ ID NO: 925575 - DNA, 33 bp, Homo sapien
tgttggccgaactttacaaattaaccctgtttt

SEQ ID NO: 925576 - DNA, 33 bp, Homo sapien
tgttggccgaactttataaattaaccctgtttt

SEQ ID NO: 925577 - DNA, 33 bp, Homo sapien
taatacttggtcttaacaaagtgtaatttgtag

SEQ ID NO: 925578 - DNA, 33 bp, Homo sapien
taatacttggtcttaataaagtgtaatttgtag

SEQ ID NO: 925579 - DNA, 33 bp, Homo sapien
ttttaataaaatttgcaaagaaggaaacacttg

SEQ ID NO: 925580 - DNA, 33 bp, Homo sapien
ttttaataaaatttgctaagaaggaaacacttg

SEQ ID NO: 925581 - DNA, 33 bp, Homo sapien
aaaaatgcccttaccaaatgcccgtatattgat

SEQ ID NO: 925582 - DNA, 33 bp, Homo sapien
aaaaatgcccttaccagatgcccgtatattgat

SEQ ID NO: 925583 - DNA, 33 bp, Homo sapien
aagtaccaatagatgaagaagaaaaactaggca

SEQ ID NO: 925584 - DNA, 33 bp, Homo sapien
aagtaccaatagatgaggaagaaaaactaggca

SEQ ID NO: 925585 - DNA, 33 bp, Homo sapien
gtttttctcgagagacacatatattgctggacc

SEQ ID NO: 925586 - DNA, 33 bp, Homo sapien
gtttttctcgagagacgcatatattgctggacc

SEQ ID NO: 925587 - DNA, 33 bp, Homo sapien
gtgaacaacaaactaaatacaaagactgaaatc

SEQ ID NO: 925588 - DNA, 33 bp, Homo sapien
gtgaacaacaaactaattacaaagactgaaatc

SEQ ID NO: 925589 - DNA, 33 bp, Homo sapien
tagcataatgatctcaaatttcattcacgttat

SEQ ID NO: 925590 - DNA, 33 bp, Homo sapien
tagcataatgatctcacatttcattcacgttat

SEQ ID NO: 925591 - DNA, 33 bp, Homo sapien
caagaccagctttgccaacatagcaaaacccct

SEQ ID NO: 925592 - DNA, 33 bp, Homo sapien
caagaccagctttgccgacatagcaaaacccct

SEQ ID NO: 925593 - DNA, 33 bp, Homo sapien
ctacttataagtagaaatgtcctgcctaatgca

SEQ ID NO: 925594 - DNA, 33 bp, Homo sapien
ctacttataagtagaagtgtcctgcctaatgca

SEQ ID NO: 925595 - DNA, 33 bp, Homo sapien
gaggggtttagaagtcagaacccactggcaaat

SEQ ID NO: 925596 - DNA, 33 bp, Homo sapien
gaggggtttagaagtcggaacccactggcaaat

SEQ ID NO: 925597 - DNA, 33 bp, Homo sapien
ttaaatatacttaaaagtctttggctattagaa

SEQ ID NO: 925598 - DNA, 33 bp, Homo sapien
ttaaatatacttaaaattctttggctattagaa

SEQ ID NO: 925599 - DNA, 33 bp, Homo sapien
ctcataagaacaataaaccatctgaaagaagtc

SEQ ID NO: 925600 - DNA, 33 bp, Homo sapien
ctcataagaacaataagccatctgaaagaagtc

SEQ ID NO: 925601 - DNA, 33 bp, Homo sapien
gatttgttttactcaaatgcactgaaaattctg

SEQ ID NO: 925602 - DNA, 33 bp, Homo sapien
gatttgttttactcaagtgcactgaaaattctg

SEQ ID NO: 925603 - DNA, 33 bp, Homo sapien
tctatgacagcttactaagcaaaagacagctgg

SEQ ID NO: 925604 - DNA, 33 bp, Homo sapien
tctatgacagcttacttagcaaaagacagctgg

SEQ ID NO: 925605 - DNA, 33 bp, Homo sapien
ttcctttctaccacaaaacgaaacagtctgcaa

SEQ ID NO: 925606 - DNA, 33 bp, Homo sapien
ttcctttctaccacaagacgaaacagtctgcaa

SEQ ID NO: 925607 - DNA, 33 bp, Homo sapien
tgttacataaatatagaccttccaaattttgat

SEQ ID NO: 925608 - DNA, 33 bp, Homo sapien
tgttacataaatataggccttccaaattttgat

SEQ ID NO: 925609 - DNA, 33 bp, Homo sapien
ttttttcagactgtccagaaggctgcattttgg

SEQ ID NO: 925610 - DNA, 33 bp, Homo sapien
ttttttcagactgtccggaaggctgcattttgg

SEQ ID NO: 925611 - DNA, 33 bp, Homo sapien
attattacctctcatcactattagacttttttt

SEQ ID NO: 925612 - DNA, 33 bp, Homo sapien
attattacctctcatccctattagacttttttt

SEQ ID NO: 925613 - DNA, 33 bp, Homo sapien
tactgaatgtattccaaagcactaattttaagg

SEQ ID NO: 925614 - DNA, 33 bp, Homo sapien
tactgaatgtattccagagcactaattttaagg

SEQ ID NO: 925615 - DNA, 33 bp, Homo sapien
agaacatggacattctcactaggtctctggcaa

SEQ ID NO: 925616 - DNA, 33 bp, Homo sapien
agaacatggacattcttactaggtctctggcaa

SEQ ID NO: 925617 - DNA, 33 bp, Homo sapien
tttgaccctcagacgccaagaaagaaacgactt

SEQ ID NO: 925618 - DNA, 33 bp, Homo sapien
tttgaccctcagacgctaagaaagaaacgactt

SEQ ID NO: 925619 - DNA, 33 bp, Homo sapien
attagttacgctcgccaatgtagcagtcctgca

SEQ ID NO: 925620 - DNA, 33 bp, Homo sapien
attagttacgctcgccgatgtagcagtcctgca

SEQ ID NO: 925621 - DNA, 33 bp, Homo sapien
gagtctccgtatcaatgactgaatacccattgt

SEQ ID NO: 925622 - DNA, 33 bp, Homo sapien
gagtctccgtatcaattactgaatacccattgt

SEQ ID NO: 925623 - DNA, 33 bp, Homo sapien
tcattttggaacagtacctttatttcatcagga

SEQ ID NO: 925624 - DNA, 33 bp, Homo sapien
tcattttggaacagtatctttatttcatcagga

SEQ ID NO: 925625 - DNA, 33 bp, Homo sapien
atgtgagaaaattaaacattggcatcagagaaa

SEQ ID NO: 925626 - DNA, 33 bp, Homo sapien
atgtgagaaaattaaatattggcatcagagaaa

SEQ ID NO: 925627 - DNA, 33 bp, Homo sapien
gcagatttgattacaccgcagggctctagagca

SEQ ID NO: 925628 - DNA, 33 bp, Homo sapien
gcagatttgattacactgcagggctctagagca

SEQ ID NO: 925629 - DNA, 33 bp, Homo sapien
agtaaaagatgtagtaaatgagccctgcttggt

SEQ ID NO: 925630 - DNA, 33 bp, Homo sapien
agtaaaagatgtagtagatgagccctgcttggt

SEQ ID NO: 925631 - DNA, 33 bp, Homo sapien
ccccatgacttacttacccccaccagtttctcc

SEQ ID NO: 925632 - DNA, 33 bp, Homo sapien
ccccatgacttacttagccccaccagtttctcc

SEQ ID NO: 925633 - DNA, 33 bp, Homo sapien
taatttttggattgtacagatcagtagcttata

SEQ ID NO: 925634 - DNA, 33 bp, Homo sapien
taatttttggattgtatagatcagtagcttata

SEQ ID NO: 925635 - DNA, 33 bp, Homo sapien
ttctgactctgccacaaatagttatataagtct

SEQ ID NO: 925636 - DNA, 33 bp, Homo sapien
ttctgactctgccacagatagttatataagtct

SEQ ID NO: 925637 - DNA, 33 bp, Homo sapien
aaaaaagtaatgggaacatctgacttgtgaaac

SEQ ID NO: 925638 - DNA, 33 bp, Homo sapien
aaaaaagtaatgggaatatctgacttgtgaaac

SEQ ID NO: 925639 - DNA, 33 bp, Homo sapien
tattacattgttgaacagtagtgatattttaat

SEQ ID NO: 925640 - DNA, 33 bp, Homo sapien
tattacattgttgaactgtagtgatattttaat

SEQ ID NO: 925641 - DNA, 33 bp, Homo sapien
acttctcaaacaaaaccgattgtcactttcaac

SEQ ID NO: 925642 - DNA, 33 bp, Homo sapien
acttctcaaacaaaactgattgtcactttcaac

SEQ ID NO: 925643 - DNA, 33 bp, Homo sapien
actaatcagccatttaacaagcaagccattatg

SEQ ID NO: 925644 - DNA, 33 bp, Homo sapien
actaatcagccatttatcaagcaagccattatg

SEQ ID NO: 925645 - DNA, 33 bp, Homo sapien
cgcccacctctatgcaatgatccacagggcacc

SEQ ID NO: 925646 - DNA, 33 bp, Homo sapien
cgcccacctctatgcagtgatccacagggcacc

SEQ ID NO: 925647 - DNA, 33 bp, Homo sapien
attgtgctccaatagaaagagattaaaaaacta

SEQ ID NO: 925648 - DNA, 33 bp, Homo sapien
attgtgctccaatagagagagattaaaaaacta

SEQ ID NO: 925649 - DNA, 33 bp, Homo sapien
caggccttttctaggtcaaagcaggatggtttt

SEQ ID NO: 925650 - DNA, 33 bp, Homo sapien
caggccttttctaggtgaaagcaggatggtttt

SEQ ID NO: 925651 - DNA, 33 bp, Homo sapien
agccctagagaaagacagaacggatgtgaagaa

SEQ ID NO: 925652 - DNA, 33 bp, Homo sapien
agccctagagaaagacggaacggatgtgaagaa

SEQ ID NO: 925653 - DNA, 33 bp, Homo sapien
tgtgagtaaagcactcaatacaaaaccagctag

SEQ ID NO: 925654 - DNA, 33 bp, Homo sapien
tgtgagtaaagcactccatacaaaaccagctag

SEQ ID NO: 925655 - DNA, 33 bp, Homo sapien
tataagaaaagtacttgaaagcccatcagaaaa

SEQ ID NO: 925656 - DNA, 33 bp, Homo sapien
tataagaaaagtactttaaagcccatcagaaaa

SEQ ID NO: 925657 - DNA, 33 bp, Homo sapien
cttttttgctaagtaaaatatgccaagtgttca

SEQ ID NO: 925658 - DNA, 33 bp, Homo sapien
cttttttgctaagtaagatatgccaagtgttca

SEQ ID NO: 925659 - DNA, 33 bp, Homo sapien
catggctggtggcgcaagaaactttcaatcatg

SEQ ID NO: 925660 - DNA, 33 bp, Homo sapien
catggctggtggcgcaggaaactttcaatcatg

SEQ ID NO: 925661 - DNA, 33 bp, Homo sapien
aaactggggaacttcgaaaataaaggctgactc

SEQ ID NO: 925662 - DNA, 33 bp, Homo sapien
aaactggggaacttcggaaataaaggctgactc

SEQ ID NO: 925663 - DNA, 33 bp, Homo sapien
ccaaaatgtgtttctgaaaagggtcataatgat

SEQ ID NO: 925664 - DNA, 33 bp, Homo sapien
ccaaaatgtgtttctggaaagggtcataatgat

SEQ ID NO: 925665 - DNA, 33 bp, Homo sapien
tatagcagagtttcctaaagttgtcagataaga

SEQ ID NO: 925666 - DNA, 33 bp, Homo sapien
tatagcagagtttcctgaagttgtcagataaga

SEQ ID NO: 925667 - DNA, 33 bp, Homo sapien
gtaatttttcagaaacagattctaatgctaatt

SEQ ID NO: 925668 - DNA, 33 bp, Homo sapien
gtaatttttcagaaacggattctaatgctaatt

SEQ ID NO: 925669 - DNA, 33 bp, Homo sapien
tgtatctcaaaactgaaccttcagcagaatgac

SEQ ID NO: 925670 - DNA, 33 bp, Homo sapien
tgtatctcaaaactgagccttcagcagaatgac

SEQ ID NO: 925671 - DNA, 33 bp, Homo sapien
ggcggtcggtattcaaagaatctgctctgatta

SEQ ID NO: 925672 - DNA, 33 bp, Homo sapien
ggcggtcggtattcaacgaatctgctctgatta

SEQ ID NO: 925673 - DNA, 33 bp, Homo sapien
ataccagcatggactacgtggattctagagggt

SEQ ID NO: 925674 - DNA, 33 bp, Homo sapien
ataccagcatggactatgtggattctagagggt

SEQ ID NO: 925675 - DNA, 33 bp, Homo sapien
gaaatcaatgttaagacagttttattggctgaa

SEQ ID NO: 925676 - DNA, 33 bp, Homo sapien
gaaatcaatgttaagatagttttattggctgaa

SEQ ID NO: 925677 - DNA, 33 bp, Homo sapien
cgtcagatatcatggaaaagctgagaaagaatc

SEQ ID NO: 925678 - DNA, 33 bp, Homo sapien
cgtcagatatcatggagaagctgagaaagaatc

SEQ ID NO: 925679 - DNA, 33 bp, Homo sapien
tgccagatatatgagcagccctatcacagttcc

SEQ ID NO: 925680 - DNA, 33 bp, Homo sapien
tgccagatatatgagcggccctatcacagttcc

SEQ ID NO: 925681 - DNA, 33 bp, Homo sapien
cctcacatgatcgatccacctttctgttttaaa

SEQ ID NO: 925682 - DNA, 33 bp, Homo sapien
cctcacatgatcgatctacctttctgttttaaa

SEQ ID NO: 925683 - DNA, 33 bp, Homo sapien
gaaatgagaaagaaaaaggagtggaatatcatg

SEQ ID NO: 925684 - DNA, 33 bp, Homo sapien
gaaatgagaaagaaaacggagtggaatatcatg

SEQ ID NO: 925685 - DNA, 33 bp, Homo sapien
aacatggtaacaataaccaagtgccaccagaaa

SEQ ID NO: 925686 - DNA, 33 bp, Homo sapien
aacatggtaacaataatcaagtgccaccagaaa

SEQ ID NO: 925687 - DNA, 33 bp, Homo sapien
tctgagagtatgggaaaaagaattgctgcttct

SEQ ID NO: 925688 - DNA, 33 bp, Homo sapien
tctgagagtatgggaataagaattgctgcttct

SEQ ID NO: 925689 - DNA, 33 bp, Homo sapien
ctgctgatgagacttaaccaatgtatacagatg

SEQ ID NO: 925690 - DNA, 33 bp, Homo sapien
ctgctgatgagacttatccaatgtatacagatg

SEQ ID NO: 925691 - DNA, 33 bp, Homo sapien
gccatctctattgaatcatgaagtctcctggga

SEQ ID NO: 925692 - DNA, 33 bp, Homo sapien
gccatctctattgaattatgaagtctcctggga

SEQ ID NO: 925693 - DNA, 33 bp, Homo sapien
taaattctagcaaaaaattggtatgagccagat

SEQ ID NO: 925694 - DNA, 33 bp, Homo sapien
taaattctagcaaaaagttggtatgagccagat

SEQ ID NO: 925695 - DNA, 33 bp, Homo sapien
gaagttacatgtgataacaatatttaacaaaag

SEQ ID NO: 925696 - DNA, 33 bp, Homo sapien
gaagttacatgtgataccaatatttaacaaaag

SEQ ID NO: 925697 - DNA, 33 bp, Homo sapien
tcacctttgggctttcactctgtattaagctgt

SEQ ID NO: 925698 - DNA, 33 bp, Homo sapien
tcacctttgggctttccctctgtattaagctgt

SEQ ID NO: 925699 - DNA, 33 bp, Homo sapien
catctctacaaatatgaaaacaaaaatagcagg

SEQ ID NO: 925700 - DNA, 33 bp, Homo sapien
catctctacaaatatggaaacaaaaatagcagg

SEQ ID NO: 925701 - DNA, 33 bp, Homo sapien
gggggacaggacagaaaactgtgcgactgtgac

SEQ ID NO: 925702 - DNA, 33 bp, Homo sapien
gggggacaggacagaagactgtgcgactgtgac

SEQ ID NO: 925703 - DNA, 33 bp, Homo sapien
agagaggtcctgtaaccaataacccatgggtac

SEQ ID NO: 925704 - DNA, 33 bp, Homo sapien
agagaggtcctgtaactaataacccatgggtac

SEQ ID NO: 925705 - DNA, 33 bp, Homo sapien
atatctgtatgcattaaggaatggctaaatcag

SEQ ID NO: 925706 - DNA, 33 bp, Homo sapien
atatctgtatgcattatggaatggctaaatcag

SEQ ID NO: 925707 - DNA, 33 bp, Homo sapien
tgtagcttcatatttaactctcactgtatgccc

SEQ ID NO: 925708 - DNA, 33 bp, Homo sapien
tgtagcttcatatttacctctcactgtatgccc

SEQ ID NO: 925709 - DNA, 33 bp, Homo sapien
cctaccccatcactcacggcagaaactaaggcc

SEQ ID NO: 925710 - DNA, 33 bp, Homo sapien
cctaccccatcactcatggcagaaactaaggcc

SEQ ID NO: 925711 - DNA, 33 bp, Homo sapien
gtgtcaccataacttacacatgaagaacactcc

SEQ ID NO: 925712 - DNA, 33 bp, Homo sapien
gtgtcaccataacttagacatgaagaacactcc

SEQ ID NO: 925713 - DNA, 33 bp, Homo sapien
ggcaaaaatagatgccacatgagttgaaaggat

SEQ ID NO: 925714 - DNA, 33 bp, Homo sapien
ggcaaaaatagatgccgcatgagttgaaaggat

SEQ ID NO: 925715 - DNA, 33 bp, Homo sapien
ccaaggtgcagaaccacccacattacttgtaga

SEQ ID NO: 925716 - DNA, 33 bp, Homo sapien
ccaaggtgcagaaccatccacattacttgtaga

SEQ ID NO: 925717 - DNA, 33 bp, Homo sapien
cacagcaacatgtacaagttaccaagtcattgt

SEQ ID NO: 925718 - DNA, 33 bp, Homo sapien
cacagcaacatgtacaggttaccaagtcattgt

SEQ ID NO: 925719 - DNA, 33 bp, Homo sapien
tgttacctatttttgcaatgtttatacttttgt

SEQ ID NO: 925720 - DNA, 33 bp, Homo sapien
tgttacctatttttgccatgtttatacttttgt

SEQ ID NO: 925721 - DNA, 33 bp, Homo sapien
gcaaaacctgaaactccatgtaggaagctatgt

SEQ ID NO: 925722 - DNA, 33 bp, Homo sapien
gcaaaacctgaaactctatgtaggaagctatgt

SEQ ID NO: 925723 - DNA, 33 bp, Homo sapien
caacacttttaaaggcaatgtcttgttgggtcc

SEQ ID NO: 925724 - DNA, 33 bp, Homo sapien
caacacttttaaaggcgatgtcttgttgggtcc

SEQ ID NO: 925725 - DNA, 33 bp, Homo sapien
tactagtgagtttccacgaaaaatctcttttat

SEQ ID NO: 925726 - DNA, 33 bp, Homo sapien
tactagtgagtttccatgaaaaatctcttttat

SEQ ID NO: 925727 - DNA, 33 bp, Homo sapien
tactgctatttgaatacggttttgtttataaaa

SEQ ID NO: 925728 - DNA, 33 bp, Homo sapien
tactgctatttgaatatggttttgtttataaaa

SEQ ID NO: 925729 - DNA, 33 bp, Homo sapien
acacatgattttgtggaataactggcctatgtt

SEQ ID NO: 925730 - DNA, 33 bp, Homo sapien
acacatgattttgtggcataactggcctatgtt

SEQ ID NO: 925731 - DNA, 33 bp, Homo sapien
gatgaagtgttcgataagtgttagctgctgtta

SEQ ID NO: 925732 - DNA, 33 bp, Homo sapien
gatgaagtgttcgatatgtgttagctgctgtta

SEQ ID NO: 925733 - DNA, 33 bp, Homo sapien
agtgcatagtcagcaacgccaggatgcagaaga

SEQ ID NO: 925734 - DNA, 33 bp, Homo sapien
agtgcatagtcagcaatgccaggatgcagaaga

SEQ ID NO: 925735 - DNA, 33 bp, Homo sapien
tcaatgtttcatcaggaaatccaattctggata

SEQ ID NO: 925736 - DNA, 33 bp, Homo sapien
tcaatgtttcatcagggaatccaattctggata

SEQ ID NO: 925737 - DNA, 33 bp, Homo sapien
aaataaaattctggtacccattaacattctctg

SEQ ID NO: 925738 - DNA, 33 bp, Homo sapien
aaataaaattctggtatccattaacattctctg

SEQ ID NO: 925739 - DNA, 33 bp, Homo sapien
agtgtaagctgccaatcaccacatcctcttttt

SEQ ID NO: 925740 - DNA, 33 bp, Homo sapien
agtgtaagctgccaattaccacatcctcttttt

SEQ ID NO: 925741 - DNA, 33 bp, Homo sapien
tttagttcaatgcctacatatcctccttgttaa

SEQ ID NO: 925742 - DNA, 33 bp, Homo sapien
tttagttcaatgcctatatatcctccttgttaa

SEQ ID NO: 925743 - DNA, 33 bp, Homo sapien
acttcataacttctacaaacttgacttttattt

SEQ ID NO: 925744 - DNA, 33 bp, Homo sapien
acttcataacttctacgaacttgacttttattt

SEQ ID NO: 925745 - DNA, 33 bp, Homo sapien
tggctaacatgcaacactggcatactaggatac

SEQ ID NO: 925746 - DNA, 33 bp, Homo sapien
tggctaacatgcaacattggcatactaggatac

SEQ ID NO: 925747 - DNA, 33 bp, Homo sapien
tgaccatttttaactaaatcaactgattgctaa

SEQ ID NO: 925748 - DNA, 33 bp, Homo sapien
tgaccatttttaactagatcaactgattgctaa

SEQ ID NO: 925749 - DNA, 33 bp, Homo sapien
aatgcaaactggaaaacgacatcaacataattt

SEQ ID NO: 925750 - DNA, 33 bp, Homo sapien
aatgcaaactggaaaatgacatcaacataattt

SEQ ID NO: 925751 - DNA, 33 bp, Homo sapien
gagtatggtgtgtggacaaaagaaaataaatga

SEQ ID NO: 925752 - DNA, 33 bp, Homo sapien
gagtatggtgtgtggataaaagaaaataaatga

SEQ ID NO: 925753 - DNA, 33 bp, Homo sapien
aacaataatttagatccaattggctgagtgcag

SEQ ID NO: 925754 - DNA, 33 bp, Homo sapien
aacaataatttagatctaattggctgagtgcag

SEQ ID NO: 925755 - DNA, 33 bp, Homo sapien
aagtgagatctagtcacattttcagcaatgcaa

SEQ ID NO: 925756 - DNA, 33 bp, Homo sapien
aagtgagatctagtcatattttcagcaatgcaa

SEQ ID NO: 925757 - DNA, 33 bp, Homo sapien
ttgtttgggtttcgtacgtttggcaataacatt

SEQ ID NO: 925758 - DNA, 33 bp, Homo sapien
ttgtttgggtttcgtatgtttggcaataacatt

SEQ ID NO: 925759 - DNA, 33 bp, Homo sapien
ttctctcaggtccacagtgacattcttatgtct

SEQ ID NO: 925760 - DNA, 33 bp, Homo sapien
ttctctcaggtccacattgacattcttatgtct

SEQ ID NO: 925761 - DNA, 33 bp, Homo sapien
tgcttcctacattataacatttctcagttttcc

SEQ ID NO: 925762 - DNA, 33 bp, Homo sapien
tgcttcctacattatagcatttctcagttttcc

SEQ ID NO: 925763 - DNA, 33 bp, Homo sapien
cgtcctcctttttctaagctgaatactcctttt

SEQ ID NO: 925764 - DNA, 33 bp, Homo sapien
cgtcctcctttttctaggctgaatactcctttt

SEQ ID NO: 925765 - DNA, 33 bp, Homo sapien
ggactcaattgataatcatcagcatatatttgt

SEQ ID NO: 925766 - DNA, 33 bp, Homo sapien
ggactcaattgataatgatcagcatatatttgt

SEQ ID NO: 925767 - DNA, 33 bp, Homo sapien
gggagttacaattcaacatgaggcttgagtagg

SEQ ID NO: 925768 - DNA, 33 bp, Homo sapien
gggagttacaattcaatatgaggcttgagtagg

SEQ ID NO: 925769 - DNA, 33 bp, Homo sapien
gaaattgcctttctcacctgagtctggtaagtt

SEQ ID NO: 925770 - DNA, 33 bp, Homo sapien
gaaattgcctttctcatctgagtctggtaagtt

SEQ ID NO: 925771 - DNA, 33 bp, Homo sapien
tagaagcctccttactgaacaacagtttgtgta

SEQ ID NO: 925772 - DNA, 33 bp, Homo sapien
tagaagcctccttacttaacaacagtttgtgta

SEQ ID NO: 925773 - DNA, 33 bp, Homo sapien
cattcctgggtcccaacttatagtactatcaaa

SEQ ID NO: 925774 - DNA, 33 bp, Homo sapien
cattcctgggtcccaagttatagtactatcaaa

SEQ ID NO: 925775 - DNA, 33 bp, Homo sapien
gaaatcctatcacactcagatgctactattaat

SEQ ID NO: 925776 - DNA, 33 bp, Homo sapien
gaaatcctatcacacttagatgctactattaat

SEQ ID NO: 925777 - DNA, 33 bp, Homo sapien
tgttgaattcctagcaactaaaatttaataaac

SEQ ID NO: 925778 - DNA, 33 bp, Homo sapien
tgttgaattcctagcacctaaaatttaataaac

SEQ ID NO: 925779 - DNA, 33 bp, Homo sapien
aaaaggaaataatttaagtatgcatgaaaaggg

SEQ ID NO: 925780 - DNA, 33 bp, Homo sapien
aaaaggaaataatttacgtatgcatgaaaaggg

SEQ ID NO: 925781 - DNA, 33 bp, Homo sapien
agcatcatttcttccactgcctggtgattcctc

SEQ ID NO: 925782 - DNA, 33 bp, Homo sapien
agcatcatttcttccattgcctggtgattcctc

SEQ ID NO: 925783 - DNA, 33 bp, Homo sapien
taagaaaagatctcaacgggaaacccaaaaatg

SEQ ID NO: 925784 - DNA, 33 bp, Homo sapien
taagaaaagatctcaatgggaaacccaaaaatg

SEQ ID NO: 925785 - DNA, 33 bp, Homo sapien
tacatatgagctctaacaattaaatggcaaaca

SEQ ID NO: 925786 - DNA, 33 bp, Homo sapien
tacatatgagctctaataattaaatggcaaaca

SEQ ID NO: 925787 - DNA, 33 bp, Homo sapien
taccacagatcagacaccccaaatattgaaatt

SEQ ID NO: 925788 - DNA, 33 bp, Homo sapien
taccacagatcagacatcccaaatattgaaatt

SEQ ID NO: 925789 - DNA, 33 bp, Homo sapien
tctttgatactttccactgcattattttttcta

SEQ ID NO: 925790 - DNA, 33 bp, Homo sapien
tctttgatactttccagtgcattattttttcta

SEQ ID NO: 925791 - DNA, 33 bp, Homo sapien
gcagttcacccggagccaaagtagaaagacagg

SEQ ID NO: 925792 - DNA, 33 bp, Homo sapien
gcagttcacccggagcgaaagtagaaagacagg

SEQ ID NO: 925793 - DNA, 33 bp, Homo sapien
gtatggcaacttctgcactttgatggaaatatt

SEQ ID NO: 925794 - DNA, 33 bp, Homo sapien
gtatggcaacttctgcgctttgatggaaatatt

SEQ ID NO: 925795 - DNA, 33 bp, Homo sapien
aaacatagcagtggaaactatgtaaactgaagc

SEQ ID NO: 925796 - DNA, 33 bp, Homo sapien
aaacatagcagtggaagctatgtaaactgaagc

SEQ ID NO: 925797 - DNA, 33 bp, Homo sapien
cacacaaatggcctaacatggacccagaacatt

SEQ ID NO: 925798 - DNA, 33 bp, Homo sapien
cacacaaatggcctaatatggacccagaacatt

SEQ ID NO: 925799 - DNA, 33 bp, Homo sapien
cttcttgccttgatcaatctttacacttaatat

SEQ ID NO: 925800 - DNA, 33 bp, Homo sapien
cttcttgccttgatcagtctttacacttaatat

SEQ ID NO: 925801 - DNA, 33 bp, Homo sapien
gttgactagttagctaagggattacgctgacat

SEQ ID NO: 925802 - DNA, 33 bp, Homo sapien
gttgactagttagctaggggattacgctgacat

SEQ ID NO: 925803 - DNA, 33 bp, Homo sapien
ggtaactttttcaccaagtcaatcaggaggctt

SEQ ID NO: 925804 - DNA, 33 bp, Homo sapien
ggtaactttttcaccaggtcaatcaggaggctt

SEQ ID NO: 925805 - DNA, 33 bp, Homo sapien
tggtaattccaacataagggttatctcaggatc

SEQ ID NO: 925806 - DNA, 33 bp, Homo sapien
tggtaattccaacatatgggttatctcaggatc

SEQ ID NO: 925807 - DNA, 33 bp, Homo sapien
ctgagcagtcaaaagacaaaggccacaaaataa

SEQ ID NO: 925808 - DNA, 33 bp, Homo sapien
ctgagcagtcaaaagataaaggccacaaaataa

SEQ ID NO: 925809 - DNA, 33 bp, Homo sapien
tatcagttttgtccatgacccttttttgctggg

SEQ ID NO: 925810 - DNA, 33 bp, Homo sapien
tatcagttttgtccattacccttttttgctggg

SEQ ID NO: 925811 - DNA, 33 bp, Homo sapien
tacatggttagtaggcggcagtccaaatgtatt

SEQ ID NO: 925812 - DNA, 33 bp, Homo sapien
tacatggttagtaggctgcagtccaaatgtatt

SEQ ID NO: 925813 - DNA, 33 bp, Homo sapien
taggaaaggttttgtcaagcccaattccaaagg

SEQ ID NO: 925814 - DNA, 33 bp, Homo sapien
taggaaaggttttgtcgagcccaattccaaagg

SEQ ID NO: 925815 - DNA, 33 bp, Homo sapien
cagaacaagaataacaatgtggagctgttccag

SEQ ID NO: 925816 - DNA, 33 bp, Homo sapien
cagaacaagaataacagtgtggagctgttccag

SEQ ID NO: 925817 - DNA, 33 bp, Homo sapien
ctcctgaaagtttccacgactgttcttttagca

SEQ ID NO: 925818 - DNA, 33 bp, Homo sapien
ctcctgaaagtttccatgactgttcttttagca

SEQ ID NO: 925819 - DNA, 33 bp, Homo sapien
gatagaaaagtagccaatcaatgtataccatgt

SEQ ID NO: 925820 - DNA, 33 bp, Homo sapien
gatagaaaagtagccagtcaatgtataccatgt

SEQ ID NO: 925821 - DNA, 33 bp, Homo sapien
tgttctctgcataccacagtggctaaagagtac

SEQ ID NO: 925822 - DNA, 33 bp, Homo sapien
tgttctctgcataccagagtggctaaagagtac

SEQ ID NO: 925823 - DNA, 33 bp, Homo sapien
atggtgttactttcaacaggatgtacacaaagc

SEQ ID NO: 925824 - DNA, 33 bp, Homo sapien
atggtgttactttcaagaggatgtacacaaagc

SEQ ID NO: 925825 - DNA, 33 bp, Homo sapien
ggattatctgcatgaaagcattgacaagaaggt

SEQ ID NO: 925826 - DNA, 33 bp, Homo sapien
ggattatctgcatgaaggcattgacaagaaggt

SEQ ID NO: 925827 - DNA, 33 bp, Homo sapien
taggtagggaaaataacgatccaggaataaaac

SEQ ID NO: 925828 - DNA, 33 bp, Homo sapien
taggtagggaaaataatgatccaggaataaaac

SEQ ID NO: 925829 - DNA, 33 bp, Homo sapien
aatgtgtaaattagaggccccaactaaaagatg

SEQ ID NO: 925830 - DNA, 33 bp, Homo sapien
aatgtgtaaattagagtccccaactaaaagatg

SEQ ID NO: 925831 - DNA, 33 bp, Homo sapien
tatttctctggtaaacacggtgatgtagttgga

SEQ ID NO: 925832 - DNA, 33 bp, Homo sapien
tatttctctggtaaacccggtgatgtagttgga

SEQ ID NO: 925833 - DNA, 33 bp, Homo sapien
ttggagtgtataaacacgaagcattgcaattgc

SEQ ID NO: 925834 - DNA, 33 bp, Homo sapien
ttggagtgtataaacatgaagcattgcaattgc

SEQ ID NO: 925835 - DNA, 33 bp, Homo sapien
taagaatggctagcaccatgaattgctttccat

SEQ ID NO: 925836 - DNA, 33 bp, Homo sapien
taagaatggctagcacgatgaattgctttccat

SEQ ID NO: 925837 - DNA, 33 bp, Homo sapien
tcatttccaaaacccacagcaaatagctgggct

SEQ ID NO: 925838 - DNA, 33 bp, Homo sapien
tcatttccaaaacccatagcaaatagctgggct

SEQ ID NO: 925839 - DNA, 33 bp, Homo sapien
aagcaaagtggtgaaaaggaaacattgctcacc

SEQ ID NO: 925840 - DNA, 33 bp, Homo sapien
aagcaaagtggtgaaagggaaacattgctcacc

SEQ ID NO: 925841 - DNA, 33 bp, Homo sapien
ggaattttggaggggcacatgcattcaaaccac

SEQ ID NO: 925842 - DNA, 33 bp, Homo sapien
ggaattttggaggggcgcatgcattcaaaccac

SEQ ID NO: 925843 - DNA, 33 bp, Homo sapien
gataatcaaataaataacctgttgcttacaaag

SEQ ID NO: 925844 - DNA, 33 bp, Homo sapien
gataatcaaataaataccctgttgcttacaaag

SEQ ID NO: 925845 - DNA, 33 bp, Homo sapien
ataaggattaggaagaactattatgcctgtttc

SEQ ID NO: 925846 - DNA, 33 bp, Homo sapien
ataaggattaggaagagctattatgcctgtttc

SEQ ID NO: 925847 - DNA, 33 bp, Homo sapien
tgacaaaacttacagacgaaagtattttcctgt

SEQ ID NO: 925848 - DNA, 33 bp, Homo sapien
tgacaaaacttacagatgaaagtattttcctgt

SEQ ID NO: 925849 - DNA, 33 bp, Homo sapien
ttgtagatacctgaaacagacataaaacttgag

SEQ ID NO: 925850 - DNA, 33 bp, Homo sapien
ttgtagatacctgaaatagacataaaacttgag

SEQ ID NO: 925851 - DNA, 33 bp, Homo sapien
atatttccagatggcaacctcatcttttatctt

SEQ ID NO: 925852 - DNA, 33 bp, Homo sapien
atatttccagatggcagcctcatcttttatctt

SEQ ID NO: 925853 - DNA, 33 bp, Homo sapien
acttacaaccatgggcaaagttgaagcaaacat

SEQ ID NO: 925854 - DNA, 33 bp, Homo sapien
acttacaaccatgggcgaagttgaagcaaacat

SEQ ID NO: 925855 - DNA, 33 bp, Homo sapien
aaacttttatgtaacaaaataatgccaactaat

SEQ ID NO: 925856 - DNA, 33 bp, Homo sapien
aaacttttatgtaacagaataatgccaactaat

SEQ ID NO: 925857 - DNA, 33 bp, Homo sapien
gtattgttcttagccactagttcaacttttccc

SEQ ID NO: 925858 - DNA, 33 bp, Homo sapien
gtattgttcttagccagtagttcaacttttccc

SEQ ID NO: 925859 - DNA, 33 bp, Homo sapien
gaatgaaatctatttaacctcaatgagaattct

SEQ ID NO: 925860 - DNA, 33 bp, Homo sapien
gaatgaaatctatttagcctcaatgagaattct

SEQ ID NO: 925861 - DNA, 33 bp, Homo sapien
cctaagaaaaaaatctcactatgatacaaattt

SEQ ID NO: 925862 - DNA, 33 bp, Homo sapien
cctaagaaaaaaatctgactatgatacaaattt

SEQ ID NO: 925863 - DNA, 33 bp, Homo sapien
agtaaccttatacatactaaccattctgctata

SEQ ID NO: 925864 - DNA, 33 bp, Homo sapien
agtaaccttatacatattaaccattctgctata

SEQ ID NO: 925865 - DNA, 33 bp, Homo sapien
tttgacatcttctaccaagcttgcagaatatct

SEQ ID NO: 925866 - DNA, 33 bp, Homo sapien
tttgacatcttctaccgagcttgcagaatatct

SEQ ID NO: 925867 - DNA, 33 bp, Homo sapien
ctgtttgtgtgatggaaagcgtattatgtggta

SEQ ID NO: 925868 - DNA, 33 bp, Homo sapien
ctgtttgtgtgatggagagcgtattatgtggta

SEQ ID NO: 925869 - DNA, 33 bp, Homo sapien
atttccttgaagatcacgtgcatggaattttag

SEQ ID NO: 925870 - DNA, 33 bp, Homo sapien
atttccttgaagatcatgtgcatggaattttag

SEQ ID NO: 925871 - DNA, 33 bp, Homo sapien
aatccaatataacctcaccatgatttataaata

SEQ ID NO: 925872 - DNA, 33 bp, Homo sapien
aatccaatataacctcgccatgatttataaata

SEQ ID NO: 925873 - DNA, 33 bp, Homo sapien
ataccattatggtggaaaaggcattctgtgaat

SEQ ID NO: 925874 - DNA, 33 bp, Homo sapien
ataccattatggtggataaggcattctgtgaat

SEQ ID NO: 925875 - DNA, 33 bp, Homo sapien
ttcattttcctgcttacaccagcttgaagtacg

SEQ ID NO: 925876 - DNA, 33 bp, Homo sapien
ttcattttcctgcttataccagcttgaagtacg

SEQ ID NO: 925877 - DNA, 33 bp, Homo sapien
aataaactacaaggaaacttctagttgcaagag

SEQ ID NO: 925878 - DNA, 33 bp, Homo sapien
aataaactacaaggaaccttctagttgcaagag

SEQ ID NO: 925879 - DNA, 33 bp, Homo sapien
aaagttcaacaggcaactctatgttgtatttca

SEQ ID NO: 925880 - DNA, 33 bp, Homo sapien
aaagttcaacaggcaattctatgttgtatttca

SEQ ID NO: 925881 - DNA, 33 bp, Homo sapien
aatggtggagactagtaaagaatgtcagagaac

SEQ ID NO: 925882 - DNA, 33 bp, Homo sapien
aatggtggagactagtgaagaatgtcagagaac

SEQ ID NO: 925883 - DNA, 33 bp, Homo sapien
ctctctagatggaagacagaatcgtgggaatta

SEQ ID NO: 925884 - DNA, 33 bp, Homo sapien
ctctctagatggaagatagaatcgtgggaatta

SEQ ID NO: 925885 - DNA, 33 bp, Homo sapien
cattccactgaattcacataactgtagaaaaga

SEQ ID NO: 925886 - DNA, 33 bp, Homo sapien
cattccactgaattcatataactgtagaaaaga

SEQ ID NO: 925887 - DNA, 33 bp, Homo sapien
tcaaggacagtagaataaataagtgcaaagttt

SEQ ID NO: 925888 - DNA, 33 bp, Homo sapien
tcaaggacagtagaatgaataagtgcaaagttt

SEQ ID NO: 925889 - DNA, 33 bp, Homo sapien
cctggcagaggtcatgaaaaagagtctgtgagt

SEQ ID NO: 925890 - DNA, 33 bp, Homo sapien
cctggcagaggtcatggaaaagagtctgtgagt

SEQ ID NO: 925891 - DNA, 33 bp, Homo sapien
agtgctgggcctgccacgggagaaaaggaactg

SEQ ID NO: 925892 - DNA, 33 bp, Homo sapien
agtgctgggcctgccatgggagaaaaggaactg

SEQ ID NO: 925893 - DNA, 33 bp, Homo sapien
acacaagtctggagatcaggtgagagtcaacag

SEQ ID NO: 925894 - DNA, 33 bp, Homo sapien
acacaagtctggagattaggtgagagtcaacag

SEQ ID NO: 925895 - DNA, 33 bp, Homo sapien
aagcgctgaattccacgatgcataagtatgtgt

SEQ ID NO: 925896 - DNA, 33 bp, Homo sapien
aagcgctgaattccactatgcataagtatgtgt

SEQ ID NO: 925897 - DNA, 33 bp, Homo sapien
attcagagtctctatcaaaatcctgaatgttca

SEQ ID NO: 925898 - DNA, 33 bp, Homo sapien
attcagagtctctatctaaatcctgaatgttca

SEQ ID NO: 925899 - DNA, 33 bp, Homo sapien
gtggagaagactagcgacaaaaagaagttaaga

SEQ ID NO: 925900 - DNA, 33 bp, Homo sapien
gtggagaagactagcggcaaaaagaagttaaga

SEQ ID NO: 925901 - DNA, 33 bp, Homo sapien
aaaatatactgacaaaataaactgacatcaaat

SEQ ID NO: 925902 - DNA, 33 bp, Homo sapien
aaaatatactgacaaattaaactgacatcaaat

SEQ ID NO: 925903 - DNA, 33 bp, Homo sapien
agcttttgcagccaccaatactgggaaacttct

SEQ ID NO: 925904 - DNA, 33 bp, Homo sapien
agcttttgcagccaccgatactgggaaacttct

SEQ ID NO: 925905 - DNA, 33 bp, Homo sapien
gtgtgactgcaaacaaagatccggtgaggtcat

SEQ ID NO: 925906 - DNA, 33 bp, Homo sapien
gtgtgactgcaaacaaggatccggtgaggtcat

SEQ ID NO: 925907 - DNA, 33 bp, Homo sapien
tttaatatgaactgaaatggttgataaagttca

SEQ ID NO: 925908 - DNA, 33 bp, Homo sapien
tttaatatgaactgaagtggttgataaagttca

SEQ ID NO: 925909 - DNA, 33 bp, Homo sapien
cttggagcataacgtaaattgtgaagtcttgtt

SEQ ID NO: 925910 - DNA, 33 bp, Homo sapien
cttggagcataacgtatattgtgaagtcttgtt

SEQ ID NO: 925911 - DNA, 33 bp, Homo sapien
acatggatttgttttccattttgggattctcca

SEQ ID NO: 925912 - DNA, 33 bp, Homo sapien
acatggatttgttttctattttgggattctcca

SEQ ID NO: 925913 - DNA, 33 bp, Homo sapien
aaaagttgatagctaccaagcagaggtctcaga

SEQ ID NO: 925914 - DNA, 33 bp, Homo sapien
aaaagttgatagctactaagcagaggtctcaga

SEQ ID NO: 925915 - DNA, 33 bp, Homo sapien
aattgagccaatcgacaagaataggaagtcaat

SEQ ID NO: 925916 - DNA, 33 bp, Homo sapien
aattgagccaatcgacgagaataggaagtcaat

SEQ ID NO: 925917 - DNA, 33 bp, Homo sapien
attaataaatgcttcccaactcagattgcacat

SEQ ID NO: 925918 - DNA, 33 bp, Homo sapien
attaataaatgcttcctaactcagattgcacat

SEQ ID NO: 925919 - DNA, 33 bp, Homo sapien
catcaaactattaacactgattttggagaaaca

SEQ ID NO: 925920 - DNA, 33 bp, Homo sapien
catcaaactattaacattgattttggagaaaca

SEQ ID NO: 925921 - DNA, 33 bp, Homo sapien
ttcatcagtttggcaaatagaagacagaaaagt

SEQ ID NO: 925922 - DNA, 33 bp, Homo sapien
ttcatcagtttggcaagtagaagacagaaaagt

SEQ ID NO: 925923 - DNA, 33 bp, Homo sapien
attggtcgctcagaaaaacacacagttattcca

SEQ ID NO: 925924 - DNA, 33 bp, Homo sapien
attggtcgctcagaaacacacacagttattcca

SEQ ID NO: 925925 - DNA, 33 bp, Homo sapien
ggaagctaagacactaataatgatacacataat

SEQ ID NO: 925926 - DNA, 33 bp, Homo sapien
ggaagctaagacactagtaatgatacacataat

SEQ ID NO: 925927 - DNA, 33 bp, Homo sapien
agcatcagagaaaaaaacctttcatctcttgta

SEQ ID NO: 925928 - DNA, 33 bp, Homo sapien
agcatcagagaaaaaatcctttcatctcttgta

SEQ ID NO: 925929 - DNA, 33 bp, Homo sapien
tgtagaatatgttacactgaagaagatatagtg

SEQ ID NO: 925930 - DNA, 33 bp, Homo sapien
tgtagaatatgttacattgaagaagatatagtg

SEQ ID NO: 925931 - DNA, 33 bp, Homo sapien
gcatctcaaagactgtcaaaaatcattttgctc

SEQ ID NO: 925932 - DNA, 33 bp, Homo sapien
gcatctcaaagactgttaaaaatcattttgctc

SEQ ID NO: 925933 - DNA, 33 bp, Homo sapien
aacctaaagttggtgaccatattgtctgccaca

SEQ ID NO: 925934 - DNA, 33 bp, Homo sapien
aacctaaagttggtgatcatattgtctgccaca

SEQ ID NO: 925935 - DNA, 33 bp, Homo sapien
catatgtgagcgcttacagaagccaagtcctgg

SEQ ID NO: 925936 - DNA, 33 bp, Homo sapien
catatgtgagcgcttatagaagccaagtcctgg

SEQ ID NO: 925937 - DNA, 33 bp, Homo sapien
ctcagtatctcaccccactattgtccctttgtt

SEQ ID NO: 925938 - DNA, 33 bp, Homo sapien
ctcagtatctcaccccgctattgtccctttgtt

SEQ ID NO: 925939 - DNA, 33 bp, Homo sapien
agctttgccaaatacagaagaaactgcacaaag

SEQ ID NO: 925940 - DNA, 33 bp, Homo sapien
agctttgccaaatacataagaaactgcacaaag

SEQ ID NO: 925941 - DNA, 33 bp, Homo sapien
atttcttcagttggtcccaaatttgtgctgtga

SEQ ID NO: 925942 - DNA, 33 bp, Homo sapien
atttcttcagttggtctcaaatttgtgctgtga

SEQ ID NO: 925943 - DNA, 33 bp, Homo sapien
tttagcattcattttacgttctgaagaatatgt

SEQ ID NO: 925944 - DNA, 33 bp, Homo sapien
tttagcattcattttatgttctgaagaatatgt

SEQ ID NO: 925945 - DNA, 33 bp, Homo sapien
tgctgctttgattcaacccagtctacacatcgc

SEQ ID NO: 925946 - DNA, 33 bp, Homo sapien
tgctgctttgattcaatccagtctacacatcgc

SEQ ID NO: 925947 - DNA, 33 bp, Homo sapien
cttaacgaaggactcaccttttggattttcttc

SEQ ID NO: 925948 - DNA, 33 bp, Homo sapien
cttaacgaaggactcatcttttggattttcttc

SEQ ID NO: 925949 - DNA, 33 bp, Homo sapien
gccatacaaagataaaaagcaatacaaagatag

SEQ ID NO: 925950 - DNA, 33 bp, Homo sapien
gccatacaaagataaacagcaatacaaagatag

SEQ ID NO: 925951 - DNA, 33 bp, Homo sapien
ttctttgcaggtcaaaatggtgaggtcagaagg

SEQ ID NO: 925952 - DNA, 33 bp, Homo sapien
ttctttgcaggtcaaactggtgaggtcagaagg

SEQ ID NO: 925953 - DNA, 33 bp, Homo sapien
ttttctcttccttatgaatctcagaaaggaggg

SEQ ID NO: 925954 - DNA, 33 bp, Homo sapien
ttttctcttccttatggatctcagaaaggaggg

SEQ ID NO: 925955 - DNA, 33 bp, Homo sapien
agaaaaagtgctttaaaatctcagaaacataac

SEQ ID NO: 925956 - DNA, 33 bp, Homo sapien
agaaaaagtgctttaatatctcagaaacataac

SEQ ID NO: 925957 - DNA, 33 bp, Homo sapien
gaaatacatgatcggccagtagcttctccccct

SEQ ID NO: 925958 - DNA, 33 bp, Homo sapien
gaaatacatgatcggctagtagcttctccccct

SEQ ID NO: 925959 - DNA, 33 bp, Homo sapien
gtcctcttgtaaaacaagttccatcatctctcc

SEQ ID NO: 925960 - DNA, 33 bp, Homo sapien
gtcctcttgtaaaacaggttccatcatctctcc

SEQ ID NO: 925961 - DNA, 33 bp, Homo sapien
ccacttcatctctaaccgctcttgcctttgcgc

SEQ ID NO: 925962 - DNA, 33 bp, Homo sapien
ccacttcatctctaactgctcttgcctttgcgc

SEQ ID NO: 925963 - DNA, 33 bp, Homo sapien
tactccatgttaaacaatatcaagtcactgtag

SEQ ID NO: 925964 - DNA, 33 bp, Homo sapien
tactccatgttaaacagtatcaagtcactgtag

SEQ ID NO: 925965 - DNA, 33 bp, Homo sapien
acctcacattgaaaaaatttatcttctgagttt

SEQ ID NO: 925966 - DNA, 33 bp, Homo sapien
acctcacattgaaaaagtttatcttctgagttt

SEQ ID NO: 925967 - DNA, 33 bp, Homo sapien
aatattaagcaacagacactaggcactatgcta

SEQ ID NO: 925968 - DNA, 33 bp, Homo sapien
aatattaagcaacagatactaggcactatgcta

SEQ ID NO: 925969 - DNA, 33 bp, Homo sapien
taaggatttcacaacaagaaactacagaactga

SEQ ID NO: 925970 - DNA, 33 bp, Homo sapien
taaggatttcacaacaggaaactacagaactga

SEQ ID NO: 925971 - DNA, 33 bp, Homo sapien
tgagggaggacacaaactattatcaaaaataaa

SEQ ID NO: 925972 - DNA, 33 bp, Homo sapien
tgagggaggacacaaattattatcaaaaataaa

SEQ ID NO: 925973 - DNA, 33 bp, Homo sapien
atcagacaggcaattacctcaataacaagattt

SEQ ID NO: 925974 - DNA, 33 bp, Homo sapien
atcagacaggcaattatctcaataacaagattt

SEQ ID NO: 925975 - DNA, 33 bp, Homo sapien
aaaagaaaaaagaagactcgtgagccaaatatt

SEQ ID NO: 925976 - DNA, 33 bp, Homo sapien
aaaagaaaaaagaagattcgtgagccaaatatt

SEQ ID NO: 925977 - DNA, 33 bp, Homo sapien
tctaaactggccaccaagtttgtgtctctaaat

SEQ ID NO: 925978 - DNA, 33 bp, Homo sapien
tctaaactggccaccacgtttgtgtctctaaat

SEQ ID NO: 925979 - DNA, 33 bp, Homo sapien
actcaggatgaagaatcagatttagaaggacag

SEQ ID NO: 925980 - DNA, 33 bp, Homo sapien
actcaggatgaagaattagatttagaaggacag

SEQ ID NO: 925981 - DNA, 33 bp, Homo sapien
agttcagggacttggcaagaacagaaatcagcc

SEQ ID NO: 925982 - DNA, 33 bp, Homo sapien
agttcagggacttggcgagaacagaaatcagcc

SEQ ID NO: 925983 - DNA, 33 bp, Homo sapien
taaagatatgcttcacccatcttctctttgaac

SEQ ID NO: 925984 - DNA, 33 bp, Homo sapien
taaagatatgcttcactcatcttctctttgaac

SEQ ID NO: 925985 - DNA, 33 bp, Homo sapien
ggaagttgagcctaataatcttaaagacccgtt

SEQ ID NO: 925986 - DNA, 33 bp, Homo sapien
ggaagttgagcctaatgatcttaaagacccgtt

SEQ ID NO: 925987 - DNA, 33 bp, Homo sapien
ctattttagatgaatccgagtgtagcagtgcac

SEQ ID NO: 925988 - DNA, 33 bp, Homo sapien
ctattttagatgaatctgagtgtagcagtgcac

SEQ ID NO: 925989 - DNA, 33 bp, Homo sapien
gttaaatctgaagaaacttagcttccctcctaa

SEQ ID NO: 925990 - DNA, 33 bp, Homo sapien
gttaaatctgaagaaatttagcttccctcctaa

SEQ ID NO: 925991 - DNA, 33 bp, Homo sapien
ttgaccagatattgacaaaaagagaagttatat

SEQ ID NO: 925992 - DNA, 33 bp, Homo sapien
ttgaccagatattgacgaaaagagaagttatat

SEQ ID NO: 925993 - DNA, 33 bp, Homo sapien
gctcgcaaaggataccaatttgtagttttcttg

SEQ ID NO: 925994 - DNA, 33 bp, Homo sapien
gctcgcaaaggataccgatttgtagttttcttg

SEQ ID NO: 925995 - DNA, 33 bp, Homo sapien
ttgatcaaaatgggaacgaaaagaagaatttat

SEQ ID NO: 925996 - DNA, 33 bp, Homo sapien
ttgatcaaaatgggaatgaaaagaagaatttat

SEQ ID NO: 925997 - DNA, 33 bp, Homo sapien
tccatcctacagatgcaatttaagagaactaat

SEQ ID NO: 925998 - DNA, 33 bp, Homo sapien
tccatcctacagatgcgatttaagagaactaat

SEQ ID NO: 925999 - DNA, 33 bp, Homo sapien
tttcagaggtagttaccatacttacttagaaat

SEQ ID NO: 926000 - DNA, 33 bp, Homo sapien
tttcagaggtagttactatacttacttagaaat

SEQ ID NO: 926001 - DNA, 33 bp, Homo sapien
tctggatgttaagatgaatttttctatatattg

SEQ ID NO: 926002 - DNA, 33 bp, Homo sapien
tctggatgttaagatgtatttttctatatattg

SEQ ID NO: 926003 - DNA, 33 bp, Homo sapien
aattctagtggatgacaacaataaatgtcagct

SEQ ID NO: 926004 - DNA, 33 bp, Homo sapien
aattctagtggatgactacaataaatgtcagct

SEQ ID NO: 926005 - DNA, 33 bp, Homo sapien
cctcctgtgaacctctaaaacaactcttacagc

SEQ ID NO: 926006 - DNA, 33 bp, Homo sapien
cctcctgtgaacctctgaaacaactcttacagc

SEQ ID NO: 926007 - DNA, 33 bp, Homo sapien
taagaaatcaccaaagacataaactattagaac

SEQ ID NO: 926008 - DNA, 33 bp, Homo sapien
taagaaatcaccaaaggcataaactattagaac

SEQ ID NO: 926009 - DNA, 33 bp, Homo sapien
aaacccacggcaaggcggagggggaacaatttg

SEQ ID NO: 926010 - DNA, 33 bp, Homo sapien
aaacccacggcaaggctgagggggaacaatttg

SEQ ID NO: 926011 - DNA, 33 bp, Homo sapien
ttgtttcaaataggaaatatgagacactgaaga

SEQ ID NO: 926012 - DNA, 33 bp, Homo sapien
ttgtttcaaataggaagtatgagacactgaaga

SEQ ID NO: 926013 - DNA, 33 bp, Homo sapien
atttgctgctactgtaagaagggctcaaaagac

SEQ ID NO: 926014 - DNA, 33 bp, Homo sapien
atttgctgctactgtatgaagggctcaaaagac

SEQ ID NO: 926015 - DNA, 33 bp, Homo sapien
tgcaggagaataaagcaagatccttatctttca

SEQ ID NO: 926016 - DNA, 33 bp, Homo sapien
tgcaggagaataaagcgagatccttatctttca

SEQ ID NO: 926017 - DNA, 33 bp, Homo sapien
agactgtaatggaactaaaaattcgtacagcca

SEQ ID NO: 926018 - DNA, 33 bp, Homo sapien
agactgtaatggaactgaaaattcgtacagcca

SEQ ID NO: 926019 - DNA, 33 bp, Homo sapien
ttcttctctcctctcaaattttatcataggtgc

SEQ ID NO: 926020 - DNA, 33 bp, Homo sapien
ttcttctctcctctcacattttatcataggtgc

SEQ ID NO: 926021 - DNA, 33 bp, Homo sapien
tgcctacacatagacaataaacaaatgtgtggt

SEQ ID NO: 926022 - DNA, 33 bp, Homo sapien
tgcctacacatagacagtaaacaaatgtgtggt

SEQ ID NO: 926023 - DNA, 33 bp, Homo sapien
ttgccccaaattagcaatcacaggcatttagaa

SEQ ID NO: 926024 - DNA, 33 bp, Homo sapien
ttgccccaaattagcattcacaggcatttagaa

SEQ ID NO: 926025 - DNA, 33 bp, Homo sapien
ctatgtggttactaaacaagcattactaagact

SEQ ID NO: 926026 - DNA, 33 bp, Homo sapien
ctatgtggttactaaataagcattactaagact

SEQ ID NO: 926027 - DNA, 33 bp, Homo sapien
attttcaaactttagaacctgagaaagtatgtt

SEQ ID NO: 926028 - DNA, 33 bp, Homo sapien
attttcaaactttagaccctgagaaagtatgtt

SEQ ID NO: 926029 - DNA, 33 bp, Homo sapien
taagtagaaagcaaatgattcctaccacagggt

SEQ ID NO: 926030 - DNA, 33 bp, Homo sapien
taagtagaaagcaaattattcctaccacagggt

SEQ ID NO: 926031 - DNA, 33 bp, Homo sapien
gccctgaactagataaacttctccaaattttat

SEQ ID NO: 926032 - DNA, 33 bp, Homo sapien
gccctgaactagataaccttctccaaattttat

SEQ ID NO: 926033 - DNA, 33 bp, Homo sapien
acatccgtcagattcacaggacactcctgcaga

SEQ ID NO: 926034 - DNA, 33 bp, Homo sapien
acatccgtcagattcataggacactcctgcaga

SEQ ID NO: 926035 - DNA, 33 bp, Homo sapien
cacaggtctgagaaaaagaagatagatcatggt

SEQ ID NO: 926036 - DNA, 33 bp, Homo sapien
cacaggtctgagaaaaggaagatagatcatggt

SEQ ID NO: 926037 - DNA, 33 bp, Homo sapien
ctgaaagcaagggaataaaacacacggtgtatt

SEQ ID NO: 926038 - DNA, 33 bp, Homo sapien
ctgaaagcaagggaatgaaacacacggtgtatt

SEQ ID NO: 926039 - DNA, 33 bp, Homo sapien
gtgcttgtaattgaaacgttcatttttatagta

SEQ ID NO: 926040 - DNA, 33 bp, Homo sapien
gtgcttgtaattgaaatgttcatttttatagta

SEQ ID NO: 926041 - DNA, 33 bp, Homo sapien
gactttctgccttgaacgccatgaagttatctt

SEQ ID NO: 926042 - DNA, 33 bp, Homo sapien
gactttctgccttgaatgccatgaagttatctt

SEQ ID NO: 926043 - DNA, 33 bp, Homo sapien
attaaaactcataatgacaacctcagaaataca

SEQ ID NO: 926044 - DNA, 33 bp, Homo sapien
attaaaactcataatgccaacctcagaaataca

SEQ ID NO: 926045 - DNA, 33 bp, Homo sapien
gaaatatgtcctaagaggaaaatgttaccatta

SEQ ID NO: 926046 - DNA, 33 bp, Homo sapien
gaaatatgtcctaagatgaaaatgttaccatta

SEQ ID NO: 926047 - DNA, 33 bp, Homo sapien
cttatcaaatgtgataggacaaagacagttttg

SEQ ID NO: 926048 - DNA, 33 bp, Homo sapien
cttatcaaatgtgatatgacaaagacagttttg

SEQ ID NO: 926049 - DNA, 33 bp, Homo sapien
aaaaataaagtaacgtaaaaatcatttcaaaac

SEQ ID NO: 926050 - DNA, 33 bp, Homo sapien
aaaaataaagtaacgtgaaaatcatttcaaaac

SEQ ID NO: 926051 - DNA, 33 bp, Homo sapien
attcattgcattgcaaaggttgtcaaggatctg

SEQ ID NO: 926052 - DNA, 33 bp, Homo sapien
attcattgcattgcaacggttgtcaaggatctg

SEQ ID NO: 926053 - DNA, 33 bp, Homo sapien
tcaagcagagctgccaatactcttatctccttc

SEQ ID NO: 926054 - DNA, 33 bp, Homo sapien
tcaagcagagctgccagtactcttatctccttc

SEQ ID NO: 926055 - DNA, 33 bp, Homo sapien
cctcaattcaacaagccgacctaacaatcctaa

SEQ ID NO: 926056 - DNA, 33 bp, Homo sapien
cctcaattcaacaagctgacctaacaatcctaa

SEQ ID NO: 926057 - DNA, 33 bp, Homo sapien
tctttaaccaactgcccactcagtgttaattgg

SEQ ID NO: 926058 - DNA, 33 bp, Homo sapien
tctttaaccaactgcctactcagtgttaattgg

SEQ ID NO: 926059 - DNA, 33 bp, Homo sapien
attacctgggtagtgacataatctgtacaccaa

SEQ ID NO: 926060 - DNA, 33 bp, Homo sapien
attacctgggtagtgagataatctgtacaccaa

SEQ ID NO: 926061 - DNA, 33 bp, Homo sapien
tggccctgatcagtgaatacttcctctgcctct

SEQ ID NO: 926062 - DNA, 33 bp, Homo sapien
tggccctgatcagtgactacttcctctgcctct

SEQ ID NO: 926063 - DNA, 33 bp, Homo sapien
tctcaagtgtcttttgcattctgctcaaggaat

SEQ ID NO: 926064 - DNA, 33 bp, Homo sapien
tctcaagtgtcttttgtattctgctcaaggaat

SEQ ID NO: 926065 - DNA, 33 bp, Homo sapien
tccagaaactagaagaaacaaagaaagactctc

SEQ ID NO: 926066 - DNA, 33 bp, Homo sapien
tccagaaactagaagagacaaagaaagactctc

SEQ ID NO: 926067 - DNA, 33 bp, Homo sapien
cacttctgcaaactacacatatgaacttttcaa

SEQ ID NO: 926068 - DNA, 33 bp, Homo sapien
cacttctgcaaactacgcatatgaacttttcaa

SEQ ID NO: 926069 - DNA, 33 bp, Homo sapien
cagcaatcatctcccccaaaggaattgaacaac

SEQ ID NO: 926070 - DNA, 33 bp, Homo sapien
cagcaatcatctccccgaaaggaattgaacaac

SEQ ID NO: 926071 - DNA, 33 bp, Homo sapien
gcctatcttttgaggggcatgaggctgatacag

SEQ ID NO: 926072 - DNA, 33 bp, Homo sapien
gcctatcttttgagggtcatgaggctgatacag

SEQ ID NO: 926073 - DNA, 33 bp, Homo sapien
tccatgaaacttgtagacatttggcttgaggtg

SEQ ID NO: 926074 - DNA, 33 bp, Homo sapien
tccatgaaacttgtagtcatttggcttgaggtg

SEQ ID NO: 926075 - DNA, 33 bp, Homo sapien
gtgagtaaaggtgaacaatcaggtttatgcaaa

SEQ ID NO: 926076 - DNA, 33 bp, Homo sapien
gtgagtaaaggtgaacgatcaggtttatgcaaa

SEQ ID NO: 926077 - DNA, 33 bp, Homo sapien
ttctctggtcaatcaacccccatttagtggagg

SEQ ID NO: 926078 - DNA, 33 bp, Homo sapien
ttctctggtcaatcaatccccatttagtggagg

SEQ ID NO: 926079 - DNA, 33 bp, Homo sapien
gaaaccaaagggcgccagagtggtctgaggagg

SEQ ID NO: 926080 - DNA, 33 bp, Homo sapien
gaaaccaaagggcgccggagtggtctgaggagg

SEQ ID NO: 926081 - DNA, 33 bp, Homo sapien
gagttctgtaatgctacgttatctttatatgtt

SEQ ID NO: 926082 - DNA, 33 bp, Homo sapien
gagttctgtaatgctatgttatctttatatgtt

SEQ ID NO: 926083 - DNA, 33 bp, Homo sapien
cccagtttctgggtaaaaggatatgactcacgg

SEQ ID NO: 926084 - DNA, 33 bp, Homo sapien
cccagtttctgggtaagaggatatgactcacgg

SEQ ID NO: 926085 - DNA, 33 bp, Homo sapien
gtggccagatgtaaaaatcaatatacacaactt

SEQ ID NO: 926086 - DNA, 33 bp, Homo sapien
gtggccagatgtaaaagtcaatatacacaactt

SEQ ID NO: 926087 - DNA, 33 bp, Homo sapien
tggtaagcaatgaagacggctattaaatatgag

SEQ ID NO: 926088 - DNA, 33 bp, Homo sapien
tggtaagcaatgaagatggctattaaatatgag

SEQ ID NO: 926089 - DNA, 33 bp, Homo sapien
gggagtaacacaacccaaaagttagaatttgca

SEQ ID NO: 926090 - DNA, 33 bp, Homo sapien
gggagtaacacaacccgaaagttagaatttgca

SEQ ID NO: 926091 - DNA, 33 bp, Homo sapien
aattgaacattcctgcaattgtatcccaatatg

SEQ ID NO: 926092 - DNA, 33 bp, Homo sapien
aattgaacattcctgctattgtatcccaatatg

SEQ ID NO: 926093 - DNA, 33 bp, Homo sapien
atcctccgtcaagcaccagatatctctgtctga

SEQ ID NO: 926094 - DNA, 33 bp, Homo sapien
atcctccgtcaagcacgagatatctctgtctga

SEQ ID NO: 926095 - DNA, 33 bp, Homo sapien
atatttgttaggtacaaagacgctggcaactca

SEQ ID NO: 926096 - DNA, 33 bp, Homo sapien
atatttgttaggtacatagacgctggcaactca

SEQ ID NO: 926097 - DNA, 33 bp, Homo sapien
tttgacaaaattcaaaaggttcttcatgctaaa

SEQ ID NO: 926098 - DNA, 33 bp, Homo sapien
tttgacaaaattcaaagggttcttcatgctaaa

SEQ ID NO: 926099 - DNA, 33 bp, Homo sapien
catctcaatggtgacaagctggacaggagaact

SEQ ID NO: 926100 - DNA, 33 bp, Homo sapien
catctcaatggtgacaggctggacaggagaact

SEQ ID NO: 926101 - DNA, 33 bp, Homo sapien
cagatctttaatcaaaggtatccacaaaattcc

SEQ ID NO: 926102 - DNA, 33 bp, Homo sapien
cagatctttaatcaaatgtatccacaaaattcc

SEQ ID NO: 926103 - DNA, 33 bp, Homo sapien
gttattcaacacctcaaatccgaatgtgtcatt

SEQ ID NO: 926104 - DNA, 33 bp, Homo sapien
gttattcaacacctcagatccgaatgtgtcatt

SEQ ID NO: 926105 - DNA, 33 bp, Homo sapien
acactgatgaataaacgacagcacttcagaaag

SEQ ID NO: 926106 - DNA, 33 bp, Homo sapien
acactgatgaataaactacagcacttcagaaag

SEQ ID NO: 926107 - DNA, 33 bp, Homo sapien
catttcattagctacacgagtttgaataatgga

SEQ ID NO: 926108 - DNA, 33 bp, Homo sapien
catttcattagctacatgagtttgaataatgga

SEQ ID NO: 926109 - DNA, 33 bp, Homo sapien
atttgtttgttatattcaactgcatgagaggcg

SEQ ID NO: 926110 - DNA, 33 bp, Homo sapien
atttgtttgttatatttaactgcatgagaggcg

SEQ ID NO: 926111 - DNA, 33 bp, Homo sapien
gcatttggcattgtaaatatttttcattttggc

SEQ ID NO: 926112 - DNA, 33 bp, Homo sapien
gcatttggcattgtaagtatttttcattttggc

SEQ ID NO: 926113 - DNA, 33 bp, Homo sapien
gaggcttttacactaccgagtacagcagcatgg

SEQ ID NO: 926114 - DNA, 33 bp, Homo sapien
gaggcttttacactactgagtacagcagcatgg

SEQ ID NO: 926115 - DNA, 33 bp, Homo sapien
ctatcattttacgaataaagctgttgtctaaag

SEQ ID NO: 926116 - DNA, 33 bp, Homo sapien
ctatcattttacgaatgaagctgttgtctaaag

SEQ ID NO: 926117 - DNA, 33 bp, Homo sapien
aagacagtctggttcaaaagaaaattaaaaggt

SEQ ID NO: 926118 - DNA, 33 bp, Homo sapien
aagacagtctggttcacaagaaaattaaaaggt

SEQ ID NO: 926119 - DNA, 33 bp, Homo sapien
gacattcctttgaatacgctaataagtgacaaa

SEQ ID NO: 926120 - DNA, 33 bp, Homo sapien
gacattcctttgaataggctaataagtgacaaa

SEQ ID NO: 926121 - DNA, 33 bp, Homo sapien
gatttccatgattttacggttcttagagttgaa

SEQ ID NO: 926122 - DNA, 33 bp, Homo sapien
gatttccatgattttatggttcttagagttgaa

SEQ ID NO: 926123 - DNA, 33 bp, Homo sapien
aatacagatctaaaagccactcaggcgaaccaa

SEQ ID NO: 926124 - DNA, 33 bp, Homo sapien
aatacagatctaaaagtcactcaggcgaaccaa

SEQ ID NO: 926125 - DNA, 33 bp, Homo sapien
tgacccaggtagctacaaaagaagcagctttcc

SEQ ID NO: 926126 - DNA, 33 bp, Homo sapien
tgacccaggtagctactaaagaagcagctttcc

SEQ ID NO: 926127 - DNA, 33 bp, Homo sapien
ctagagcaattggtgactaatatcagtataaca

SEQ ID NO: 926128 - DNA, 33 bp, Homo sapien
ctagagcaattggtgattaatatcagtataaca

SEQ ID NO: 926129 - DNA, 33 bp, Homo sapien
tcaagataagaaataagaggaaaggctagcaca

SEQ ID NO: 926130 - DNA, 33 bp, Homo sapien
tcaagataagaaataataggaaaggctagcaca

SEQ ID NO: 926131 - DNA, 33 bp, Homo sapien
acaacatttattccaccgacttcaaaggaagct

SEQ ID NO: 926132 - DNA, 33 bp, Homo sapien
acaacatttattccactgacttcaaaggaagct

SEQ ID NO: 926133 - DNA, 33 bp, Homo sapien
ctttgattgatgtggaactctgaactcccttaa

SEQ ID NO: 926134 - DNA, 33 bp, Homo sapien
ctttgattgatgtggatctctgaactcccttaa

SEQ ID NO: 926135 - DNA, 33 bp, Homo sapien
tctgggtgaaaactaaacaaataagacaattgt

SEQ ID NO: 926136 - DNA, 33 bp, Homo sapien
tctgggtgaaaactaagcaaataagacaattgt

SEQ ID NO: 926137 - DNA, 33 bp, Homo sapien
ctcaacctgtctttccagcctcggtgacacagg

SEQ ID NO: 926138 - DNA, 33 bp, Homo sapien
ctcaacctgtctttccggcctcggtgacacagg

SEQ ID NO: 926139 - DNA, 33 bp, Homo sapien
tggagaggaagaacaaagggacgttggaaatgt

SEQ ID NO: 926140 - DNA, 33 bp, Homo sapien
tggagaggaagaacaatgggacgttggaaatgt

SEQ ID NO: 926141 - DNA, 33 bp, Homo sapien
gggcagattttcagcaaactcttttcccactgt

SEQ ID NO: 926142 - DNA, 33 bp, Homo sapien
gggcagattttcagcacactcttttcccactgt

SEQ ID NO: 926143 - DNA, 33 bp, Homo sapien
aaactaatccatcaccagggtggtttagtggct

SEQ ID NO: 926144 - DNA, 33 bp, Homo sapien
aaactaatccatcaccggggtggtttagtggct

SEQ ID NO: 926145 - DNA, 33 bp, Homo sapien
gtcacagcataacagacggttgcaagtgcttta

SEQ ID NO: 926146 - DNA, 33 bp, Homo sapien
gtcacagcataacagatggttgcaagtgcttta

SEQ ID NO: 926147 - DNA, 33 bp, Homo sapien
cacccattcaccatcactaataagttttggagc

SEQ ID NO: 926148 - DNA, 33 bp, Homo sapien
cacccattcaccatcattaataagttttggagc

SEQ ID NO: 926149 - DNA, 33 bp, Homo sapien
atgagagcaattcagaacaaagggagagataga

SEQ ID NO: 926150 - DNA, 33 bp, Homo sapien
atgagagcaattcagagcaaagggagagataga

SEQ ID NO: 926151 - DNA, 33 bp, Homo sapien
aatgaggttaagcgtcccttcactggtttttgg

SEQ ID NO: 926152 - DNA, 33 bp, Homo sapien
aatgaggttaagcgtctcttcactggtttttgg

SEQ ID NO: 926153 - DNA, 33 bp, Homo sapien
tagccagagataatagaagtaccaggttttaga

SEQ ID NO: 926154 - DNA, 33 bp, Homo sapien
tagccagagataataggagtaccaggttttaga

SEQ ID NO: 926155 - DNA, 33 bp, Homo sapien
ctatgatctttggggaccaaataacagggcatt

SEQ ID NO: 926156 - DNA, 33 bp, Homo sapien
ctatgatctttggggatcaaataacagggcatt

SEQ ID NO: 926157 - DNA, 33 bp, Homo sapien
tcttactcaatgtatcggaaattagacctttgt

SEQ ID NO: 926158 - DNA, 33 bp, Homo sapien
tcttactcaatgtatctgaaattagacctttgt

SEQ ID NO: 926159 - DNA, 33 bp, Homo sapien
agttaaatgatgaacacaaaggcagagtgggcc

SEQ ID NO: 926160 - DNA, 33 bp, Homo sapien
agttaaatgatgaacataaaggcagagtgggcc

SEQ ID NO: 926161 - DNA, 33 bp, Homo sapien
gctcttaaaagtgtcacgtccaattcttatcta

SEQ ID NO: 926162 - DNA, 33 bp, Homo sapien
gctcttaaaagtgtcatgtccaattcttatcta

SEQ ID NO: 926163 - DNA, 33 bp, Homo sapien
tggggcctcttttatacggacagtgatctcatt

SEQ ID NO: 926164 - DNA, 33 bp, Homo sapien
tggggcctcttttatatggacagtgatctcatt

SEQ ID NO: 926165 - DNA, 33 bp, Homo sapien
agggttaaaaggcagaagaaagcaaagaccagc

SEQ ID NO: 926166 - DNA, 33 bp, Homo sapien
agggttaaaaggcagacgaaagcaaagaccagc

SEQ ID NO: 926167 - DNA, 33 bp, Homo sapien
aatgacatgattaaagaatggctgctttggaga

SEQ ID NO: 926168 - DNA, 33 bp, Homo sapien
aatgacatgattaaaggatggctgctttggaga

SEQ ID NO: 926169 - DNA, 33 bp, Homo sapien
ttcagatggagccttaaagaagactagaatcta

SEQ ID NO: 926170 - DNA, 33 bp, Homo sapien
ttcagatggagccttacagaagactagaatcta

SEQ ID NO: 926171 - DNA, 33 bp, Homo sapien
agtatctagtcaagtacgtggcatgcaatgggt

SEQ ID NO: 926172 - DNA, 33 bp, Homo sapien
agtatctagtcaagtatgtggcatgcaatgggt

SEQ ID NO: 926173 - DNA, 33 bp, Homo sapien
agatctgtgtgggcttaaacagctggagaaggc

SEQ ID NO: 926174 - DNA, 33 bp, Homo sapien
agatctgtgtgggctttaacagctggagaaggc

SEQ ID NO: 926175 - DNA, 33 bp, Homo sapien
cttcttgatgtcctaaacagttttgaaacattc

SEQ ID NO: 926176 - DNA, 33 bp, Homo sapien
cttcttgatgtcctaagcagttttgaaacattc

SEQ ID NO: 926177 - DNA, 33 bp, Homo sapien
agactgatagaattaacggaaacaaggcagatt

SEQ ID NO: 926178 - DNA, 33 bp, Homo sapien
agactgatagaattaatggaaacaaggcagatt

SEQ ID NO: 926179 - DNA, 33 bp, Homo sapien
catgattctctccagaacactttcattgatgaa

SEQ ID NO: 926180 - DNA, 33 bp, Homo sapien
catgattctctccagagcactttcattgatgaa

SEQ ID NO: 926181 - DNA, 33 bp, Homo sapien
aagaaattgtgacttcaactgaaagctgagttt

SEQ ID NO: 926182 - DNA, 33 bp, Homo sapien
aagaaattgtgacttcgactgaaagctgagttt

SEQ ID NO: 926183 - DNA, 33 bp, Homo sapien
tcaaactcttagacaaagtagaattgtggttgc

SEQ ID NO: 926184 - DNA, 33 bp, Homo sapien
tcaaactcttagacaaggtagaattgtggttgc

SEQ ID NO: 926185 - DNA, 33 bp, Homo sapien
ttccaaaattctctcccgctgtgtcaaagcact

SEQ ID NO: 926186 - DNA, 33 bp, Homo sapien
ttccaaaattctctcctgctgtgtcaaagcact

SEQ ID NO: 926187 - DNA, 33 bp, Homo sapien
ccccaccttatcctgacgtaaacacctttgata

SEQ ID NO: 926188 - DNA, 33 bp, Homo sapien
ccccaccttatcctgatgtaaacacctttgata

SEQ ID NO: 926189 - DNA, 33 bp, Homo sapien
aaatcatgcaattaaaataaagtgatgcaacat

SEQ ID NO: 926190 - DNA, 33 bp, Homo sapien
aaatcatgcaattaaagtaaagtgatgcaacat

SEQ ID NO: 926191 - DNA, 33 bp, Homo sapien
gcagccaggtgaaatcaatcttaggcttcctct

SEQ ID NO: 926192 - DNA, 33 bp, Homo sapien
gcagccaggtgaaatccatcttaggcttcctct

SEQ ID NO: 926193 - DNA, 33 bp, Homo sapien
taagttgctgattacccggatttttctgacgat

SEQ ID NO: 926194 - DNA, 33 bp, Homo sapien
taagttgctgattacctggatttttctgacgat

SEQ ID NO: 926195 - DNA, 33 bp, Homo sapien
gggtcacatggtaagtcaatagtagttataaac

SEQ ID NO: 926196 - DNA, 33 bp, Homo sapien
gggtcacatggtaagttaatagtagttataaac

SEQ ID NO: 926197 - DNA, 33 bp, Homo sapien
tttcacaaagcctttgaattcagcgtttcttgt

SEQ ID NO: 926198 - DNA, 33 bp, Homo sapien
tttcacaaagcctttgtattcagcgtttcttgt

SEQ ID NO: 926199 - DNA, 33 bp, Homo sapien
gactataagcctccccacatataacagaatgat

SEQ ID NO: 926200 - DNA, 33 bp, Homo sapien
gactataagcctccccgcatataacagaatgat

SEQ ID NO: 926201 - DNA, 33 bp, Homo sapien
caggcttgaatttccaaacctacttccccagat

SEQ ID NO: 926202 - DNA, 33 bp, Homo sapien
caggcttgaatttccagacctacttccccagat

SEQ ID NO: 926203 - DNA, 33 bp, Homo sapien
tgatattgcatttcagcatagtatgaaggtaaa

SEQ ID NO: 926204 - DNA, 33 bp, Homo sapien
tgatattgcatttcagtatagtatgaaggtaaa

SEQ ID NO: 926205 - DNA, 33 bp, Homo sapien
ttggattgaattttgacgttctcctggatctca

SEQ ID NO: 926206 - DNA, 33 bp, Homo sapien
ttggattgaattttgatgttctcctggatctca

SEQ ID NO: 926207 - DNA, 33 bp, Homo sapien
tctcttcccctatctaaccccagattgaggaga

SEQ ID NO: 926208 - DNA, 33 bp, Homo sapien
tctcttcccctatctagccccagattgaggaga

SEQ ID NO: 926209 - DNA, 33 bp, Homo sapien
tggaaagtaagcctatcacatccaggtggagct

SEQ ID NO: 926210 - DNA, 33 bp, Homo sapien
tggaaagtaagcctattacatccaggtggagct

SEQ ID NO: 926211 - DNA, 33 bp, Homo sapien
acctggaaggtagatacaatgcaaaactagatt

SEQ ID NO: 926212 - DNA, 33 bp, Homo sapien
acctggaaggtagatataatgcaaaactagatt

SEQ ID NO: 926213 - DNA, 33 bp, Homo sapien
tcaaacactcaccattaaaaacctcattaaatt

SEQ ID NO: 926214 - DNA, 33 bp, Homo sapien
tcaaacactcaccattgaaaacctcattaaatt

SEQ ID NO: 926215 - DNA, 33 bp, Homo sapien
ttctgagtacctgttacaaaattctgaggttct

SEQ ID NO: 926216 - DNA, 33 bp, Homo sapien
ttctgagtacctgttataaaattctgaggttct

SEQ ID NO: 926217 - DNA, 33 bp, Homo sapien
aaagccattaagttaaatgatacaatgctcata

SEQ ID NO: 926218 - DNA, 33 bp, Homo sapien
aaagccattaagttaagtgatacaatgctcata

SEQ ID NO: 926219 - DNA, 33 bp, Homo sapien
aaaggcgcaaactgatcatcagtatggaagatc

SEQ ID NO: 926220 - DNA, 33 bp, Homo sapien
aaaggcgcaaactgatgatcagtatggaagatc

SEQ ID NO: 926221 - DNA, 33 bp, Homo sapien
ttactcctagatttccaaaaattgattctattc

SEQ ID NO: 926222 - DNA, 33 bp, Homo sapien
ttactcctagatttccgaaaattgattctattc

SEQ ID NO: 926223 - DNA, 33 bp, Homo sapien
ttgtgcataaaaatcaacggtcagttaaacatt

SEQ ID NO: 926224 - DNA, 33 bp, Homo sapien
ttgtgcataaaaatcaccggtcagttaaacatt

SEQ ID NO: 926225 - DNA, 33 bp, Homo sapien
tgacattactgagaacaataatgtgacacagac

SEQ ID NO: 926226 - DNA, 33 bp, Homo sapien
tgacattactgagaaccataatgtgacacagac

SEQ ID NO: 926227 - DNA, 33 bp, Homo sapien
gcttatgttattgtcacgaatatttttctcctg

SEQ ID NO: 926228 - DNA, 33 bp, Homo sapien
gcttatgttattgtcatgaatatttttctcctg

SEQ ID NO: 926229 - DNA, 33 bp, Homo sapien
gtctcatttacctttacagcaagtttatgagca

SEQ ID NO: 926230 - DNA, 33 bp, Homo sapien
gtctcatttacctttatagcaagtttatgagca

SEQ ID NO: 926231 - DNA, 33 bp, Homo sapien
gatggtcatgggtaaaactttttaaggattcat

SEQ ID NO: 926232 - DNA, 33 bp, Homo sapien
gatggtcatgggtaaagctttttaaggattcat

SEQ ID NO: 926233 - DNA, 33 bp, Homo sapien
aaaattaaatagggtaagagagatgagtgctag

SEQ ID NO: 926234 - DNA, 33 bp, Homo sapien
aaaattaaatagggtacgagagatgagtgctag

SEQ ID NO: 926235 - DNA, 33 bp, Homo sapien
accctgtttctttcccacagcatataagacgct

SEQ ID NO: 926236 - DNA, 33 bp, Homo sapien
accctgtttctttcccgcagcatataagacgct

SEQ ID NO: 926237 - DNA, 33 bp, Homo sapien
ttcctagttttattcacaacttgctatagaatc

SEQ ID NO: 926238 - DNA, 33 bp, Homo sapien
ttcctagttttattcataacttgctatagaatc

SEQ ID NO: 926239 - DNA, 33 bp, Homo sapien
caggtgttgtgggatacacaaaaacaagcaaaa

SEQ ID NO: 926240 - DNA, 33 bp, Homo sapien
caggtgttgtgggatatacaaaaacaagcaaaa

SEQ ID NO: 926241 - DNA, 33 bp, Homo sapien
aagggtgctaagtacaaccctaaaagatgtgca

SEQ ID NO: 926242 - DNA, 33 bp, Homo sapien
aagggtgctaagtacagccctaaaagatgtgca

SEQ ID NO: 926243 - DNA, 33 bp, Homo sapien
agccgcaagacaaggcaaataatattgatctca

SEQ ID NO: 926244 - DNA, 33 bp, Homo sapien
agccgcaagacaaggcgaataatattgatctca

SEQ ID NO: 926245 - DNA, 33 bp, Homo sapien
gtcattccaaatgttacagattagtcttgtcct

SEQ ID NO: 926246 - DNA, 33 bp, Homo sapien
gtcattccaaatgttatagattagtcttgtcct

SEQ ID NO: 926247 - DNA, 33 bp, Homo sapien
tttgtaggtacttggcagattttcagcacacat

SEQ ID NO: 926248 - DNA, 33 bp, Homo sapien
tttgtaggtacttggcggattttcagcacacat

SEQ ID NO: 926249 - DNA, 33 bp, Homo sapien
atgaaatctgctctagaaaagttttaaactcat

SEQ ID NO: 926250 - DNA, 33 bp, Homo sapien
atgaaatctgctctaggaaagttttaaactcat

SEQ ID NO: 926251 - DNA, 33 bp, Homo sapien
tcaacactgtttttcaatctgtccatttttgct

SEQ ID NO: 926252 - DNA, 33 bp, Homo sapien
tcaacactgtttttcagtctgtccatttttgct

SEQ ID NO: 926253 - DNA, 33 bp, Homo sapien
tatatctgtgtttgaaaggaatataatccctgt

SEQ ID NO: 926254 - DNA, 33 bp, Homo sapien
tatatctgtgtttgaagggaatataatccctgt

SEQ ID NO: 926255 - DNA, 33 bp, Homo sapien
ctggtttattgttgtccaaattttataatcaag

SEQ ID NO: 926256 - DNA, 33 bp, Homo sapien
ctggtttattgttgtctaaattttataatcaag

SEQ ID NO: 926257 - DNA, 33 bp, Homo sapien
caggcaaagccagcaacgcatgcgatgaccagg

SEQ ID NO: 926258 - DNA, 33 bp, Homo sapien
caggcaaagccagcaatgcatgcgatgaccagg

SEQ ID NO: 926259 - DNA, 33 bp, Homo sapien
aaggaggaaagacacaataaaagaagcagaacc

SEQ ID NO: 926260 - DNA, 33 bp, Homo sapien
aaggaggaaagacacagtaaaagaagcagaacc

SEQ ID NO: 926261 - DNA, 33 bp, Homo sapien
acttttgtagccatacccttatagaattttcac

SEQ ID NO: 926262 - DNA, 33 bp, Homo sapien
acttttgtagccatactcttatagaattttcac

SEQ ID NO: 926263 - DNA, 33 bp, Homo sapien
ctgaccgcagaggtaacagagcagagtagacat

SEQ ID NO: 926264 - DNA, 33 bp, Homo sapien
ctgaccgcagaggtaatagagcagagtagacat

SEQ ID NO: 926265 - DNA, 33 bp, Homo sapien
tcctttggtactaaaagaatgtcaacatacgag

SEQ ID NO: 926266 - DNA, 33 bp, Homo sapien
tcctttggtactaaaataatgtcaacatacgag

SEQ ID NO: 926267 - DNA, 33 bp, Homo sapien
aatcagtcttataacacgaggctgatgatttct

SEQ ID NO: 926268 - DNA, 33 bp, Homo sapien
aatcagtcttataacatgaggctgatgatttct

SEQ ID NO: 926269 - DNA, 33 bp, Homo sapien
ttctgaaactgtcttcaaaacatggctttccat

SEQ ID NO: 926270 - DNA, 33 bp, Homo sapien
ttctgaaactgtcttccaaacatggctttccat

SEQ ID NO: 926271 - DNA, 33 bp, Homo sapien
aatgtatgactgaagaaaaagataaataaatct

SEQ ID NO: 926272 - DNA, 33 bp, Homo sapien
aatgtatgactgaagagaaagataaataaatct

SEQ ID NO: 926273 - DNA, 33 bp, Homo sapien
acccaacataaatttgaagggtttgtacatgtg

SEQ ID NO: 926274 - DNA, 33 bp, Homo sapien
acccaacataaatttggagggtttgtacatgtg

SEQ ID NO: 926275 - DNA, 33 bp, Homo sapien
tgggctaaagtgtatcacaatctttatacttaa

SEQ ID NO: 926276 - DNA, 33 bp, Homo sapien
tgggctaaagtgtatcgcaatctttatacttaa

SEQ ID NO: 926277 - DNA, 33 bp, Homo sapien
ggatgaatcactctaaagaaacggatcctaaat

SEQ ID NO: 926278 - DNA, 33 bp, Homo sapien
ggatgaatcactctaatgaaacggatcctaaat

SEQ ID NO: 926279 - DNA, 33 bp, Homo sapien
tagaattatcctaaaactggaaacatttcaaat

SEQ ID NO: 926280 - DNA, 33 bp, Homo sapien
tagaattatcctaaaagtggaaacatttcaaat

SEQ ID NO: 926281 - DNA, 33 bp, Homo sapien
agtgctagctgaagtacataagccctctcactt

SEQ ID NO: 926282 - DNA, 33 bp, Homo sapien
agtgctagctgaagtatataagccctctcactt

SEQ ID NO: 926283 - DNA, 33 bp, Homo sapien
aggacattattataagcaaggacaccatgtgaa

SEQ ID NO: 926284 - DNA, 33 bp, Homo sapien
aggacattattataaggaaggacaccatgtgaa

SEQ ID NO: 926285 - DNA, 33 bp, Homo sapien
gctttgattccattgacgatcatgaaaattaaa

SEQ ID NO: 926286 - DNA, 33 bp, Homo sapien
gctttgattccattgatgatcatgaaaattaaa

SEQ ID NO: 926287 - DNA, 33 bp, Homo sapien
ctgcaagtggctgctcaaaggttcagctttcca

SEQ ID NO: 926288 - DNA, 33 bp, Homo sapien
ctgcaagtggctgctcgaaggttcagctttcca

SEQ ID NO: 926289 - DNA, 33 bp, Homo sapien
aagcctctgaaaatcaagaggaaagcttcatcc

SEQ ID NO: 926290 - DNA, 33 bp, Homo sapien
aagcctctgaaaatcaggaggaaagcttcatcc

SEQ ID NO: 926291 - DNA, 33 bp, Homo sapien
aagaaaatctttggaactgaaaacctcaactgg

SEQ ID NO: 926292 - DNA, 33 bp, Homo sapien
aagaaaatctttggaattgaaaacctcaactgg

SEQ ID NO: 926293 - DNA, 33 bp, Homo sapien
aatgcatatggaagcaaaaagtactccgaatag

SEQ ID NO: 926294 - DNA, 33 bp, Homo sapien
aatgcatatggaagcacaaagtactccgaatag

SEQ ID NO: 926295 - DNA, 33 bp, Homo sapien
gttattaaattccagacggagtgggtataggaa

SEQ ID NO: 926296 - DNA, 33 bp, Homo sapien
gttattaaattccagatggagtgggtataggaa

SEQ ID NO: 926297 - DNA, 33 bp, Homo sapien
tgggcacatgtaacttaaaggaaagaaaagatg

SEQ ID NO: 926298 - DNA, 33 bp, Homo sapien
tgggcacatgtaacttcaaggaaagaaaagatg

SEQ ID NO: 926299 - DNA, 33 bp, Homo sapien
attagttcctcattcaccctgccttgaattgta

SEQ ID NO: 926300 - DNA, 33 bp, Homo sapien
attagttcctcattcatcctgccttgaattgta

SEQ ID NO: 926301 - DNA, 33 bp, Homo sapien
aggcaatggaggatcaagtgaaatgtgttaaaa

SEQ ID NO: 926302 - DNA, 33 bp, Homo sapien
aggcaatggaggatcaggtgaaatgtgttaaaa

SEQ ID NO: 926303 - DNA, 33 bp, Homo sapien
acatcatgctaagaataagggacgattagaagc

SEQ ID NO: 926304 - DNA, 33 bp, Homo sapien
acatcatgctaagaatgagggacgattagaagc

SEQ ID NO: 926305 - DNA, 33 bp, Homo sapien
atacagcaagtattcaataagttcatacgcttt

SEQ ID NO: 926306 - DNA, 33 bp, Homo sapien
atacagcaagtattcagtaagttcatacgcttt

SEQ ID NO: 926307 - DNA, 33 bp, Homo sapien
ccactttgacctagataaggcacttacaatctc

SEQ ID NO: 926308 - DNA, 33 bp, Homo sapien
ccactttgacctagatgaggcacttacaatctc

SEQ ID NO: 926309 - DNA, 33 bp, Homo sapien
gtagtacaggaataacagctagaatgagaagag

SEQ ID NO: 926310 - DNA, 33 bp, Homo sapien
gtagtacaggaataactgctagaatgagaagag

SEQ ID NO: 926311 - DNA, 33 bp, Homo sapien
ctagaatgagaagagcaaatagaagggccagta

SEQ ID NO: 926312 - DNA, 33 bp, Homo sapien
ctagaatgagaagagcgaatagaagggccagta

SEQ ID NO: 926313 - DNA, 33 bp, Homo sapien
ctcagggaatcagcaaagaactagtctgttgta

SEQ ID NO: 926314 - DNA, 33 bp, Homo sapien
ctcagggaatcagcaaggaactagtctgttgta

SEQ ID NO: 926315 - DNA, 33 bp, Homo sapien
ttgaaatgtataagtgaactctcccaaccttca

SEQ ID NO: 926316 - DNA, 33 bp, Homo sapien
ttgaaatgtataagtgtactctcccaaccttca

SEQ ID NO: 926317 - DNA, 33 bp, Homo sapien
tacagtaaatagacacaaaagaatggttctggt

SEQ ID NO: 926318 - DNA, 33 bp, Homo sapien
tacagtaaatagacacgaaagaatggttctggt

SEQ ID NO: 926319 - DNA, 33 bp, Homo sapien
actattagggcataaaccaagattcacttaagc

SEQ ID NO: 926320 - DNA, 33 bp, Homo sapien
actattagggcataaagcaagattcacttaagc

SEQ ID NO: 926321 - DNA, 33 bp, Homo sapien
acaatcccggcattcacgagcttctgcaaagta

SEQ ID NO: 926322 - DNA, 33 bp, Homo sapien
acaatcccggcattcatgagcttctgcaaagta

SEQ ID NO: 926323 - DNA, 33 bp, Homo sapien
gagttgaaaaagcggaatacgcaagaataactt

SEQ ID NO: 926324 - DNA, 33 bp, Homo sapien
gagttgaaaaagcggagtacgcaagaataactt

SEQ ID NO: 926325 - DNA, 33 bp, Homo sapien
tgaataagtactaaaaagataagcctgtcttgt

SEQ ID NO: 926326 - DNA, 33 bp, Homo sapien
tgaataagtactaaaaggataagcctgtcttgt

SEQ ID NO: 926327 - DNA, 33 bp, Homo sapien
ggatgagcatttaagtaaacatgaaagaaagaa

SEQ ID NO: 926328 - DNA, 33 bp, Homo sapien
ggatgagcatttaagtcaacatgaaagaaagaa

SEQ ID NO: 926329 - DNA, 33 bp, Homo sapien
ataagcattcagtgtaacattgctatgtgggat

SEQ ID NO: 926330 - DNA, 33 bp, Homo sapien
ataagcattcagtgtaccattgctatgtgggat

SEQ ID NO: 926331 - DNA, 33 bp, Homo sapien
tgagaatccatcgttaagcaattctgtcattgt

SEQ ID NO: 926332 - DNA, 33 bp, Homo sapien
tgagaatccatcgttaggcaattctgtcattgt

SEQ ID NO: 926333 - DNA, 33 bp, Homo sapien
actttcttctcactttaaaagactccttttggg

SEQ ID NO: 926334 - DNA, 33 bp, Homo sapien
actttcttctcactttgaaagactccttttggg

SEQ ID NO: 926335 - DNA, 33 bp, Homo sapien
catcattgtttcagaacaacataatagctctta

SEQ ID NO: 926336 - DNA, 33 bp, Homo sapien
catcattgtttcagaataacataatagctctta

SEQ ID NO: 926337 - DNA, 33 bp, Homo sapien
ctctctttttaaaatgccagggctatagacaaa

SEQ ID NO: 926338 - DNA, 33 bp, Homo sapien
ctctctttttaaaatgtcagggctatagacaaa

SEQ ID NO: 926339 - DNA, 33 bp, Homo sapien
atatgagataatcgtacgttcagtttcttttaa

SEQ ID NO: 926340 - DNA, 33 bp, Homo sapien
atatgagataatcgtatgttcagtttcttttaa

SEQ ID NO: 926341 - DNA, 33 bp, Homo sapien
tggtaagatacatagcaaaactaaaaattccat

SEQ ID NO: 926342 - DNA, 33 bp, Homo sapien
tggtaagatacatagcgaaactaaaaattccat

SEQ ID NO: 926343 - DNA, 33 bp, Homo sapien
tcataaagattgtctacctaatgaagccactat

SEQ ID NO: 926344 - DNA, 33 bp, Homo sapien
tcataaagattgtctatctaatgaagccactat

SEQ ID NO: 926345 - DNA, 33 bp, Homo sapien
tgataaccacctcaaaaatcctctgacctattt

SEQ ID NO: 926346 - DNA, 33 bp, Homo sapien
tgataaccacctcaaacatcctctgacctattt

SEQ ID NO: 926347 - DNA, 33 bp, Homo sapien
cctcagaatcccagtaaaaacagtgatggccag

SEQ ID NO: 926348 - DNA, 33 bp, Homo sapien
cctcagaatcccagtacaaacagtgatggccag

SEQ ID NO: 926349 - DNA, 33 bp, Homo sapien
atcagcacgatcccaaaagtgaattggttactg

SEQ ID NO: 926350 - DNA, 33 bp, Homo sapien
atcagcacgatcccaacagtgaattggttactg

SEQ ID NO: 926351 - DNA, 33 bp, Homo sapien
caagttagggctgtcaggaataaatcatcctgg

SEQ ID NO: 926352 - DNA, 33 bp, Homo sapien
caagttagggctgtcatgaataaatcatcctgg

SEQ ID NO: 926353 - DNA, 33 bp, Homo sapien
cttttgagttggtgaacatgagaaagtactggc

SEQ ID NO: 926354 - DNA, 33 bp, Homo sapien
cttttgagttggtgaatatgagaaagtactggc

SEQ ID NO: 926355 - DNA, 33 bp, Homo sapien
cagctttagatagttcacaaatctttgttgaga

SEQ ID NO: 926356 - DNA, 33 bp, Homo sapien
cagctttagatagttcccaaatctttgttgaga

SEQ ID NO: 926357 - DNA, 33 bp, Homo sapien
ctctaaagaatatgacaattgacctgtaagagt

SEQ ID NO: 926358 - DNA, 33 bp, Homo sapien
ctctaaagaatatgacgattgacctgtaagagt

SEQ ID NO: 926359 - DNA, 33 bp, Homo sapien
atatgtggtattttcaaccatagagataactga

SEQ ID NO: 926360 - DNA, 33 bp, Homo sapien
atatgtggtattttcacccatagagataactga

SEQ ID NO: 926361 - DNA, 33 bp, Homo sapien
ctagatttacatagagccaggccatttgtactt

SEQ ID NO: 926362 - DNA, 33 bp, Homo sapien
ctagatttacatagagtcaggccatttgtactt

SEQ ID NO: 926363 - DNA, 33 bp, Homo sapien
tattcccattaagcaaagtcaagcctacttgag

SEQ ID NO: 926364 - DNA, 33 bp, Homo sapien
tattcccattaagcaacgtcaagcctacttgag

SEQ ID NO: 926365 - DNA, 33 bp, Homo sapien
agccttactatagtgcaaagactactttctgag

SEQ ID NO: 926366 - DNA, 33 bp, Homo sapien
agccttactatagtgcgaagactactttctgag

SEQ ID NO: 926367 - DNA, 33 bp, Homo sapien
taaatggctagaaggcaagaatgatttaatgaa

SEQ ID NO: 926368 - DNA, 33 bp, Homo sapien
taaatggctagaaggccagaatgatttaatgaa

SEQ ID NO: 926369 - DNA, 33 bp, Homo sapien
ttaaaaatgttttaaacgtgaaccatcattttt

SEQ ID NO: 926370 - DNA, 33 bp, Homo sapien
ttaaaaatgttttaaatgtgaaccatcattttt

SEQ ID NO: 926371 - DNA, 33 bp, Homo sapien
tggtccttcccttcaaagcagcaattcccttga

SEQ ID NO: 926372 - DNA, 33 bp, Homo sapien
tggtccttcccttcaaggcagcaattcccttga

SEQ ID NO: 926373 - DNA, 33 bp, Homo sapien
aatttggttgtttaaacattaggcatcaagttt

SEQ ID NO: 926374 - DNA, 33 bp, Homo sapien
aatttggttgtttaaatattaggcatcaagttt

SEQ ID NO: 926375 - DNA, 33 bp, Homo sapien
tgccaggcagtggacacagtaaacaagacagga

SEQ ID NO: 926376 - DNA, 33 bp, Homo sapien
tgccaggcagtggacatagtaaacaagacagga

SEQ ID NO: 926377 - DNA, 33 bp, Homo sapien
gtttttggaaagcttacagtgttccatctctgt

SEQ ID NO: 926378 - DNA, 33 bp, Homo sapien
gtttttggaaagcttatagtgttccatctctgt

SEQ ID NO: 926379 - DNA, 33 bp, Homo sapien
ttagaatgacattcaactattaggtcagtaacc

SEQ ID NO: 926380 - DNA, 33 bp, Homo sapien
ttagaatgacattcaattattaggtcagtaacc

SEQ ID NO: 926381 - DNA, 33 bp, Homo sapien
tgaaattagcattacaaagtggctttacggctt

SEQ ID NO: 926382 - DNA, 33 bp, Homo sapien
tgaaattagcattacagagtggctttacggctt

SEQ ID NO: 926383 - DNA, 33 bp, Homo sapien
ttcttggccacctctaccttcttaacgtctcac

SEQ ID NO: 926384 - DNA, 33 bp, Homo sapien
ttcttggccacctctatcttcttaacgtctcac

SEQ ID NO: 926385 - DNA, 33 bp, Homo sapien
agcttaaagaaagaaacttgtgcaactgtcaaa

SEQ ID NO: 926386 - DNA, 33 bp, Homo sapien
agcttaaagaaagaaagttgtgcaactgtcaaa

SEQ ID NO: 926387 - DNA, 33 bp, Homo sapien
tataagttcacatttaagagctctttattcaca

SEQ ID NO: 926388 - DNA, 33 bp, Homo sapien
tataagttcacatttaggagctctttattcaca

SEQ ID NO: 926389 - DNA, 33 bp, Homo sapien
tttttgaaaatcactacggtatcctgcatagtg

SEQ ID NO: 926390 - DNA, 33 bp, Homo sapien
tttttgaaaatcactagggtatcctgcatagtg

SEQ ID NO: 926391 - DNA, 33 bp, Homo sapien
aaagaacatgatgcttaaaacagattagggaaa

SEQ ID NO: 926392 - DNA, 33 bp, Homo sapien
aaagaacatgatgcttgaaacagattagggaaa

SEQ ID NO: 926393 - DNA, 33 bp, Homo sapien
gtggtggtgaggtttaagttggtttgctgtttg

SEQ ID NO: 926394 - DNA, 33 bp, Homo sapien
gtggtggtgaggtttatgttggtttgctgtttg

SEQ ID NO: 926395 - DNA, 33 bp, Homo sapien
taagttttggagtcaaatagcactttgtttgaa

SEQ ID NO: 926396 - DNA, 33 bp, Homo sapien
taagttttggagtcaagtagcactttgtttgaa

SEQ ID NO: 926397 - DNA, 33 bp, Homo sapien
tttaatgtgcccaacccggattgcaattccgtc

SEQ ID NO: 926398 - DNA, 33 bp, Homo sapien
tttaatgtgcccaacctggattgcaattccgtc

SEQ ID NO: 926399 - DNA, 33 bp, Homo sapien
gatcttgaagacatacacagaattaattttaaa

SEQ ID NO: 926400 - DNA, 33 bp, Homo sapien
gatcttgaagacatacgcagaattaattttaaa

SEQ ID NO: 926401 - DNA, 33 bp, Homo sapien
catgccaactagaagaagtaagaaactatgtga

SEQ ID NO: 926402 - DNA, 33 bp, Homo sapien
catgccaactagaagaggtaagaaactatgtga

SEQ ID NO: 926403 - DNA, 33 bp, Homo sapien
tattgcttttgaatcacaaacactatttggagt

SEQ ID NO: 926404 - DNA, 33 bp, Homo sapien
tattgcttttgaatcagaaacactatttggagt

SEQ ID NO: 926405 - DNA, 33 bp, Homo sapien
catccccttttacttacgcaggataccaagtct

SEQ ID NO: 926406 - DNA, 33 bp, Homo sapien
catccccttttacttatgcaggataccaagtct

SEQ ID NO: 926407 - DNA, 33 bp, Homo sapien
ataagtaaggttactaacaatcacacctgaaaa

SEQ ID NO: 926408 - DNA, 33 bp, Homo sapien
ataagtaaggttactatcaatcacacctgaaaa

SEQ ID NO: 926409 - DNA, 33 bp, Homo sapien
taacaatttttaaatcgcagttcatcacagcat

SEQ ID NO: 926410 - DNA, 33 bp, Homo sapien
taacaatttttaaatctcagttcatcacagcat

SEQ ID NO: 926411 - DNA, 33 bp, Homo sapien
aaaacaaacacaggcaataaaaggacaaaggag

SEQ ID NO: 926412 - DNA, 33 bp, Homo sapien
aaaacaaacacaggcagtaaaaggacaaaggag

SEQ ID NO: 926413 - DNA, 33 bp, Homo sapien
cctttggagtgataccacaggtgagcaaaagga

SEQ ID NO: 926414 - DNA, 33 bp, Homo sapien
cctttggagtgataccgcaggtgagcaaaagga

SEQ ID NO: 926415 - DNA, 33 bp, Homo sapien
actggagaaaaaagacagcaatgcataacaaat

SEQ ID NO: 926416 - DNA, 33 bp, Homo sapien
actggagaaaaaagaccgcaatgcataacaaat

SEQ ID NO: 926417 - DNA, 33 bp, Homo sapien
attagtgccattgtaaaagagacaccagagagg

SEQ ID NO: 926418 - DNA, 33 bp, Homo sapien
attagtgccattgtaacagagacaccagagagg

SEQ ID NO: 926419 - DNA, 33 bp, Homo sapien
tttatttttaatgctacgttgtaatgaaaatca

SEQ ID NO: 926420 - DNA, 33 bp, Homo sapien
tttatttttaatgctaggttgtaatgaaaatca

SEQ ID NO: 926421 - DNA, 33 bp, Homo sapien
gataagaattctcctacggatcttttggatgta

SEQ ID NO: 926422 - DNA, 33 bp, Homo sapien
gataagaattctcctatggatcttttggatgta

SEQ ID NO: 926423 - DNA, 33 bp, Homo sapien
cccatttagtcatctagaaatctcaagaaatta

SEQ ID NO: 926424 - DNA, 33 bp, Homo sapien
cccatttagtcatctataaatctcaagaaatta

SEQ ID NO: 926425 - DNA, 33 bp, Homo sapien
aaaaagatagaccatagcagcttcatagactga

SEQ ID NO: 926426 - DNA, 33 bp, Homo sapien
aaaaagatagaccatatcagcttcatagactga

SEQ ID NO: 926427 - DNA, 33 bp, Homo sapien
taatatgtatacattgcagatatgccctctagt

SEQ ID NO: 926428 - DNA, 33 bp, Homo sapien
taatatgtatacattgtagatatgccctctagt

SEQ ID NO: 926429 - DNA, 33 bp, Homo sapien
ttcccccttgtcaacacatgatgaagcttttaa

SEQ ID NO: 926430 - DNA, 33 bp, Homo sapien
ttcccccttgtcaacatatgatgaagcttttaa

SEQ ID NO: 926431 - DNA, 33 bp, Homo sapien
gctgattgtggctaacactatatcaacattatg

SEQ ID NO: 926432 - DNA, 33 bp, Homo sapien
gctgattgtggctaacgctatatcaacattatg

SEQ ID NO: 926433 - DNA, 33 bp, Homo sapien
atgaagaatcctactcgctttgaattcaacgtg

SEQ ID NO: 926434 - DNA, 33 bp, Homo sapien
atgaagaatcctactctctttgaattcaacgtg

SEQ ID NO: 926435 - DNA, 33 bp, Homo sapien
tcattcacatatgagcaaaaacatcgtcttctc

SEQ ID NO: 926436 - DNA, 33 bp, Homo sapien
tcattcacatatgagcgaaaacatcgtcttctc

SEQ ID NO: 926437 - DNA, 33 bp, Homo sapien
gtgagaacatttgccaactcagatgagaacact

SEQ ID NO: 926438 - DNA, 33 bp, Homo sapien
gtgagaacatttgccacctcagatgagaacact

SEQ ID NO: 926439 - DNA, 33 bp, Homo sapien
aaaaagcttagagttacacttatggagaatgga

SEQ ID NO: 926440 - DNA, 33 bp, Homo sapien
aaaaagcttagagttagacttatggagaatgga

SEQ ID NO: 926441 - DNA, 33 bp, Homo sapien
tgttggataaatattaagtttaaaggccaagat

SEQ ID NO: 926442 - DNA, 33 bp, Homo sapien
tgttggataaatattaggtttaaaggccaagat

SEQ ID NO: 926443 - DNA, 33 bp, Homo sapien
aatagagcaggtgaccaatgcacagcatcctgc

SEQ ID NO: 926444 - DNA, 33 bp, Homo sapien
aatagagcaggtgaccgatgcacagcatcctgc

SEQ ID NO: 926445 - DNA, 33 bp, Homo sapien
cctcactgcttcattaagttttgatcctggcta

SEQ ID NO: 926446 - DNA, 33 bp, Homo sapien
cctcactgcttcattaggttttgatcctggcta

SEQ ID NO: 926447 - DNA, 33 bp, Homo sapien
aataagcagaaatgtcacactataaatgtgcac

SEQ ID NO: 926448 - DNA, 33 bp, Homo sapien
aataagcagaaatgtctcactataaatgtgcac

SEQ ID NO: 926449 - DNA, 33 bp, Homo sapien
tccgtagtcttgcagcaaacatacgtatgcatg

SEQ ID NO: 926450 - DNA, 33 bp, Homo sapien
tccgtagtcttgcagcgaacatacgtatgcatg

SEQ ID NO: 926451 - DNA, 33 bp, Homo sapien
agtcttcatcgatataccatttatagttacaca

SEQ ID NO: 926452 - DNA, 33 bp, Homo sapien
agtcttcatcgatatatcatttatagttacaca

SEQ ID NO: 926453 - DNA, 33 bp, Homo sapien
ttggtgtcagtgaacccggagcctgaccttgtc

SEQ ID NO: 926454 - DNA, 33 bp, Homo sapien
ttggtgtcagtgaacctggagcctgaccttgtc

SEQ ID NO: 926455 - DNA, 33 bp, Homo sapien
cccacgcaatgaggacaaaatgcaattttctat

SEQ ID NO: 926456 - DNA, 33 bp, Homo sapien
cccacgcaatgaggaccaaatgcaattttctat

SEQ ID NO: 926457 - DNA, 33 bp, Homo sapien
ctgaaccagtccggtacgacattcctgctccct

SEQ ID NO: 926458 - DNA, 33 bp, Homo sapien
ctgaaccagtccggtatgacattcctgctccct

SEQ ID NO: 926459 - DNA, 33 bp, Homo sapien
ggttcatgcagttggcaagttactcctcagtgg

SEQ ID NO: 926460 - DNA, 33 bp, Homo sapien
ggttcatgcagttggcgagttactcctcagtgg

SEQ ID NO: 926461 - DNA, 33 bp, Homo sapien
ttatttggagggagaacagacccaagaagacat

SEQ ID NO: 926462 - DNA, 33 bp, Homo sapien
ttatttggagggagaagagacccaagaagacat

SEQ ID NO: 926463 - DNA, 33 bp, Homo sapien
atcaagttggggtcagacaaataatagaatctt

SEQ ID NO: 926464 - DNA, 33 bp, Homo sapien
atcaagttggggtcaggcaaataatagaatctt

SEQ ID NO: 926465 - DNA, 33 bp, Homo sapien
aatttgggatgaggtccctctatttatggctat

SEQ ID NO: 926466 - DNA, 33 bp, Homo sapien
aatttgggatgaggtctctctatttatggctat

SEQ ID NO: 926467 - DNA, 33 bp, Homo sapien
gaagggaggacttgggacaacattaacaacctg

SEQ ID NO: 926468 - DNA, 33 bp, Homo sapien
gaagggaggacttggggcaacattaacaacctg

SEQ ID NO: 926469 - DNA, 33 bp, Homo sapien
aaaacaaaacaaagagcctccatatacaccgag

SEQ ID NO: 926470 - DNA, 33 bp, Homo sapien
aaaacaaaacaaagagtctccatatacaccgag

SEQ ID NO: 926471 - DNA, 33 bp, Homo sapien
taagctgcaattcttaggtgctttagagtgtaa

SEQ ID NO: 926472 - DNA, 33 bp, Homo sapien
taagctgcaattcttatgtgctttagagtgtaa

SEQ ID NO: 926473 - DNA, 33 bp, Homo sapien
tttgggtctaatttggaaagtggagcaattaaa

SEQ ID NO: 926474 - DNA, 33 bp, Homo sapien
tttgggtctaatttggcaagtggagcaattaaa

SEQ ID NO: 926475 - DNA, 33 bp, Homo sapien
aagatatctgaataagcctggctagggtgtaag

SEQ ID NO: 926476 - DNA, 33 bp, Homo sapien
aagatatctgaataaggctggctagggtgtaag

SEQ ID NO: 926477 - DNA, 33 bp, Homo sapien
atactgaagcaacagcaatcgtattcatagtca

SEQ ID NO: 926478 - DNA, 33 bp, Homo sapien
atactgaagcaacagcgatcgtattcatagtca

SEQ ID NO: 926479 - DNA, 33 bp, Homo sapien
ctcctggttgttcaagactgttgttttgttgac

SEQ ID NO: 926480 - DNA, 33 bp, Homo sapien
ctcctggttgttcaagtctgttgttttgttgac

SEQ ID NO: 926481 - DNA, 33 bp, Homo sapien
tttctgttaacacttacctatattacctgatgc

SEQ ID NO: 926482 - DNA, 33 bp, Homo sapien
tttctgttaacacttatctatattacctgatgc

SEQ ID NO: 926483 - DNA, 33 bp, Homo sapien
tttccataggcttctccaccgttctacatctat

SEQ ID NO: 926484 - DNA, 33 bp, Homo sapien
tttccataggcttctctaccgttctacatctat

SEQ ID NO: 926485 - DNA, 33 bp, Homo sapien
gttgtcatttggttcaaagaagttttttatttc

SEQ ID NO: 926486 - DNA, 33 bp, Homo sapien
gttgtcatttggttcagagaagttttttatttc

SEQ ID NO: 926487 - DNA, 33 bp, Homo sapien
atggaacttccttaaaatcccagtggtttgctt

SEQ ID NO: 926488 - DNA, 33 bp, Homo sapien
atggaacttccttaaactcccagtggtttgctt

SEQ ID NO: 926489 - DNA, 33 bp, Homo sapien
gcctctgtaatacaggcaaatcgaataagtcag

SEQ ID NO: 926490 - DNA, 33 bp, Homo sapien
gcctctgtaatacaggtaaatcgaataagtcag

SEQ ID NO: 926491 - DNA, 33 bp, Homo sapien
agaccagcacacaaaactatcactagaaagtta

SEQ ID NO: 926492 - DNA, 33 bp, Homo sapien
agaccagcacacaaaagtatcactagaaagtta

SEQ ID NO: 926493 - DNA, 33 bp, Homo sapien
cttgctaactcattggcatttccattccttcca

SEQ ID NO: 926494 - DNA, 33 bp, Homo sapien
cttgctaactcattgggatttccattccttcca

SEQ ID NO: 926495 - DNA, 33 bp, Homo sapien
cagtaaaatgctgacacatatacaagcaaaaac

SEQ ID NO: 926496 - DNA, 33 bp, Homo sapien
cagtaaaatgctgacatatatacaagcaaaaac

SEQ ID NO: 926497 - DNA, 33 bp, Homo sapien
agccagaactttggccaacaatcaatggagacc

SEQ ID NO: 926498 - DNA, 33 bp, Homo sapien
agccagaactttggccgacaatcaatggagacc

SEQ ID NO: 926499 - DNA, 33 bp, Homo sapien
acagaaaaagtaagaacgagaaagcgaataaca

SEQ ID NO: 926500 - DNA, 33 bp, Homo sapien
acagaaaaagtaagaatgagaaagcgaataaca

SEQ ID NO: 926501 - DNA, 33 bp, Homo sapien
ttccttacagctttataagtacagccttgactc

SEQ ID NO: 926502 - DNA, 33 bp, Homo sapien
ttccttacagctttatgagtacagccttgactc

SEQ ID NO: 926503 - DNA, 33 bp, Homo sapien
ccagtgtatttgacataaaaattggaaaaaaat

SEQ ID NO: 926504 - DNA, 33 bp, Homo sapien
ccagtgtatttgacatcaaaattggaaaaaaat

SEQ ID NO: 926505 - DNA, 33 bp, Homo sapien
tgagtgtggaatcccgaagaaggggcaagatcc

SEQ ID NO: 926506 - DNA, 33 bp, Homo sapien
tgagtgtggaatcccggagaaggggcaagatcc

SEQ ID NO: 926507 - DNA, 33 bp, Homo sapien
tcctagctcctgtcacaaagtattcaataaatg

SEQ ID NO: 926508 - DNA, 33 bp, Homo sapien
tcctagctcctgtcacgaagtattcaataaatg

SEQ ID NO: 926509 - DNA, 33 bp, Homo sapien
aaccctcaagttcctcaagtaaaaagtatactc

SEQ ID NO: 926510 - DNA, 33 bp, Homo sapien
aaccctcaagttcctccagtaaaaagtatactc

SEQ ID NO: 926511 - DNA, 33 bp, Homo sapien
tcctatgataaacatgcatagtcccaagattat

SEQ ID NO: 926512 - DNA, 33 bp, Homo sapien
tcctatgataaacatggatagtcccaagattat

SEQ ID NO: 926513 - DNA, 33 bp, Homo sapien
actgaaaaatactgcagattggaagcaacggtt

SEQ ID NO: 926514 - DNA, 33 bp, Homo sapien
actgaaaaatactgcatattggaagcaacggtt

SEQ ID NO: 926515 - DNA, 33 bp, Homo sapien
ggcacaatgagtaaaacgaacagatggccaatt

SEQ ID NO: 926516 - DNA, 33 bp, Homo sapien
ggcacaatgagtaaaatgaacagatggccaatt

SEQ ID NO: 926517 - DNA, 33 bp, Homo sapien
tctctactcttctaacagcaccacaagagggga

SEQ ID NO: 926518 - DNA, 33 bp, Homo sapien
tctctactcttctaacggcaccacaagagggga

SEQ ID NO: 926519 - DNA, 33 bp, Homo sapien
tatctgtaaaatattgaatgagcttagatagct

SEQ ID NO: 926520 - DNA, 33 bp, Homo sapien
tatctgtaaaatattgtatgagcttagatagct

SEQ ID NO: 926521 - DNA, 33 bp, Homo sapien
ggcagcaagatgggagaatggcactttaagctg

SEQ ID NO: 926522 - DNA, 33 bp, Homo sapien
ggcagcaagatgggaggatggcactttaagctg

SEQ ID NO: 926523 - DNA, 33 bp, Homo sapien
taacagtgtctagtaacgtctaatagatttttc

SEQ ID NO: 926524 - DNA, 33 bp, Homo sapien
taacagtgtctagtaatgtctaatagatttttc

SEQ ID NO: 926525 - DNA, 33 bp, Homo sapien
ttgcatttggagtctacctttgctccacatcag

SEQ ID NO: 926526 - DNA, 33 bp, Homo sapien
ttgcatttggagtctatctttgctccacatcag

SEQ ID NO: 926527 - DNA, 33 bp, Homo sapien
gcaacaatcacctaaccgagcccagtcaattca

SEQ ID NO: 926528 - DNA, 33 bp, Homo sapien
gcaacaatcacctaactgagcccagtcaattca

SEQ ID NO: 926529 - DNA, 33 bp, Homo sapien
actgacagcattgttacgtttctttctcccttt

SEQ ID NO: 926530 - DNA, 33 bp, Homo sapien
actgacagcattgttatgtttctttctcccttt

SEQ ID NO: 926531 - DNA, 33 bp, Homo sapien
catgctggtcctttgacctaggattatcttctc

SEQ ID NO: 926532 - DNA, 33 bp, Homo sapien
catgctggtcctttgatctaggattatcttctc

SEQ ID NO: 926533 - DNA, 33 bp, Homo sapien
ctttctcacctgctaacccattcttaaagatgc

SEQ ID NO: 926534 - DNA, 33 bp, Homo sapien
ctttctcacctgctaatccattcttaaagatgc

SEQ ID NO: 926535 - DNA, 33 bp, Homo sapien
gtctctctggccaaaaatagcctgattgttagg

SEQ ID NO: 926536 - DNA, 33 bp, Homo sapien
gtctctctggccaaaagtagcctgattgttagg

SEQ ID NO: 926537 - DNA, 33 bp, Homo sapien
tcttcagttgagtaaaatgtgggggtaatgatt

SEQ ID NO: 926538 - DNA, 33 bp, Homo sapien
tcttcagttgagtaaattgtgggggtaatgatt

SEQ ID NO: 926539 - DNA, 33 bp, Homo sapien
gacataaatttggatacaatgtgatcagtggtt

SEQ ID NO: 926540 - DNA, 33 bp, Homo sapien
gacataaatttggatataatgtgatcagtggtt

SEQ ID NO: 926541 - DNA, 33 bp, Homo sapien
ctacaaggaaagctggaaagtataactttgatt

SEQ ID NO: 926542 - DNA, 33 bp, Homo sapien
ctacaaggaaagctgggaagtataactttgatt

SEQ ID NO: 926543 - DNA, 33 bp, Homo sapien
gatggatgaggttttcaaatataggtgtctgtt

SEQ ID NO: 926544 - DNA, 33 bp, Homo sapien
gatggatgaggttttcgaatataggtgtctgtt

SEQ ID NO: 926545 - DNA, 33 bp, Homo sapien
ttttctcccagttccaaagattagaagaacaga

SEQ ID NO: 926546 - DNA, 33 bp, Homo sapien
ttttctcccagttccagagattagaagaacaga

SEQ ID NO: 926547 - DNA, 33 bp, Homo sapien
aagagtttttaagacaaagagaactgtgactgc

SEQ ID NO: 926548 - DNA, 33 bp, Homo sapien
aagagtttttaagacagagagaactgtgactgc

SEQ ID NO: 926549 - DNA, 33 bp, Homo sapien
tggagatcatgcactcaatattgttgaccttca

SEQ ID NO: 926550 - DNA, 33 bp, Homo sapien
tggagatcatgcactcgatattgttgaccttca

SEQ ID NO: 926551 - DNA, 33 bp, Homo sapien
cacaggtcaccttggcacagatactctaaaacc

SEQ ID NO: 926552 - DNA, 33 bp, Homo sapien
cacaggtcaccttggcgcagatactctaaaacc

SEQ ID NO: 926553 - DNA, 33 bp, Homo sapien
ggaggacagtggtagacacaactaaaataccca

SEQ ID NO: 926554 - DNA, 33 bp, Homo sapien
ggaggacagtggtagagacaactaaaataccca

SEQ ID NO: 926555 - DNA, 33 bp, Homo sapien
atccttacttctttcacatttagggctactgct

SEQ ID NO: 926556 - DNA, 33 bp, Homo sapien
atccttacttctttcatatttagggctactgct

SEQ ID NO: 926557 - DNA, 33 bp, Homo sapien
tctgttacaaatagaaacttcattatctgtgca

SEQ ID NO: 926558 - DNA, 33 bp, Homo sapien
tctgttacaaatagaaccttcattatctgtgca

SEQ ID NO: 926559 - DNA, 33 bp, Homo sapien
tgagagagggcagaaaagttaaagtagccaacg

SEQ ID NO: 926560 - DNA, 33 bp, Homo sapien
tgagagagggcagaaatgttaaagtagccaacg

SEQ ID NO: 926561 - DNA, 33 bp, Homo sapien
tgtataaaaaacggtacgtctgatagaagagtt

SEQ ID NO: 926562 - DNA, 33 bp, Homo sapien
tgtataaaaaacggtatgtctgatagaagagtt

SEQ ID NO: 926563 - DNA, 33 bp, Homo sapien
ctttcaatattttgcccaaggatgtcttgcaaa

SEQ ID NO: 926564 - DNA, 33 bp, Homo sapien
ctttcaatattttgcctaaggatgtcttgcaaa

SEQ ID NO: 926565 - DNA, 33 bp, Homo sapien
ccaatggcaaggccacagaacatactggtgata

SEQ ID NO: 926566 - DNA, 33 bp, Homo sapien
ccaatggcaaggccacggaacatactggtgata

SEQ ID NO: 926567 - DNA, 33 bp, Homo sapien
ctatctgtttgaaatcaaatgtagtcaggaatt

SEQ ID NO: 926568 - DNA, 33 bp, Homo sapien
ctatctgtttgaaatcgaatgtagtcaggaatt

SEQ ID NO: 926569 - DNA, 33 bp, Homo sapien
ctggccaattactcttaaacttttatatctgtc

SEQ ID NO: 926570 - DNA, 33 bp, Homo sapien
ctggccaattactcttgaacttttatatctgtc

SEQ ID NO: 926571 - DNA, 33 bp, Homo sapien
gtaattgtaatgaaaacggcccacaatgcaggt

SEQ ID NO: 926572 - DNA, 33 bp, Homo sapien
gtaattgtaatgaaaatggcccacaatgcaggt

SEQ ID NO: 926573 - DNA, 33 bp, Homo sapien
aagtggtggaattattaaaagacctagcactta

SEQ ID NO: 926574 - DNA, 33 bp, Homo sapien
aagtggtggaattattgaaagacctagcactta

SEQ ID NO: 926575 - DNA, 33 bp, Homo sapien
tgtttctatgtcagcgaatattcttgactcaag

SEQ ID NO: 926576 - DNA, 33 bp, Homo sapien
tgtttctatgtcagcgtatattcttgactcaag

SEQ ID NO: 926577 - DNA, 33 bp, Homo sapien
tactatccttagggtcaagcacaagtcatccat

SEQ ID NO: 926578 - DNA, 33 bp, Homo sapien
tactatccttagggtcgagcacaagtcatccat

SEQ ID NO: 926579 - DNA, 33 bp, Homo sapien
ttgcagattatagtgaaaggatatagattaaaa

SEQ ID NO: 926580 - DNA, 33 bp, Homo sapien
ttgcagattatagtgagaggatatagattaaaa

SEQ ID NO: 926581 - DNA, 33 bp, Homo sapien
aaaattctgtgatatacaaataactcgaaataa

SEQ ID NO: 926582 - DNA, 33 bp, Homo sapien
aaaattctgtgatatataaataactcgaaataa

SEQ ID NO: 926583 - DNA, 33 bp, Homo sapien
tatctccatattcttacagctgtttttcttggt

SEQ ID NO: 926584 - DNA, 33 bp, Homo sapien
tatctccatattcttatagctgtttttcttggt

SEQ ID NO: 926585 - DNA, 33 bp, Homo sapien
ccaagtgacatttaaaatcagtagaggaaaaat

SEQ ID NO: 926586 - DNA, 33 bp, Homo sapien
ccaagtgacatttaaactcagtagaggaaaaat

SEQ ID NO: 926587 - DNA, 33 bp, Homo sapien
ggctattgtactagtcaatctttcaaagctcca

SEQ ID NO: 926588 - DNA, 33 bp, Homo sapien
ggctattgtactagtcgatctttcaaagctcca

SEQ ID NO: 926589 - DNA, 33 bp, Homo sapien
gggggtaaatgtcacaatagggctcaattcacc

SEQ ID NO: 926590 - DNA, 33 bp, Homo sapien
gggggtaaatgtcacagtagggctcaattcacc

SEQ ID NO: 926591 - DNA, 33 bp, Homo sapien
tgttgcctatgtaacgaacttaagaatgtgctg

SEQ ID NO: 926592 - DNA, 33 bp, Homo sapien
tgttgcctatgtaacgtacttaagaatgtgctg

SEQ ID NO: 926593 - DNA, 33 bp, Homo sapien
gtatcagtggtttaaacgccaaacatttatttc

SEQ ID NO: 926594 - DNA, 33 bp, Homo sapien
gtatcagtggtttaaatgccaaacatttatttc

SEQ ID NO: 926595 - DNA, 33 bp, Homo sapien
tgatgcttttattctgaagtctttactgagatt

SEQ ID NO: 926596 - DNA, 33 bp, Homo sapien
tgatgcttttattctgcagtctttactgagatt

SEQ ID NO: 926597 - DNA, 33 bp, Homo sapien
tgcctgaattatcaggaacataatcaacattaa

SEQ ID NO: 926598 - DNA, 33 bp, Homo sapien
tgcctgaattatcagggacataatcaacattaa

SEQ ID NO: 926599 - DNA, 33 bp, Homo sapien
gtggatggctcagttgcattttctccagaatct

SEQ ID NO: 926600 - DNA, 33 bp, Homo sapien
gtggatggctcagttggattttctccagaatct

SEQ ID NO: 926601 - DNA, 33 bp, Homo sapien
cagtatttcctctcaaataatttctctcaaata

SEQ ID NO: 926602 - DNA, 33 bp, Homo sapien
cagtatttcctctcaactaatttctctcaaata

SEQ ID NO: 926603 - DNA, 33 bp, Homo sapien
ctccctgggaatttgaagtcatttagatcacct

SEQ ID NO: 926604 - DNA, 33 bp, Homo sapien
ctccctgggaatttgaggtcatttagatcacct

SEQ ID NO: 926605 - DNA, 33 bp, Homo sapien
ctgtagaggaaatctacgttagtgaaatgaagt

SEQ ID NO: 926606 - DNA, 33 bp, Homo sapien
ctgtagaggaaatctatgttagtgaaatgaagt

SEQ ID NO: 926607 - DNA, 33 bp, Homo sapien
cattatgatttcaacaatatcttttccatgagt

SEQ ID NO: 926608 - DNA, 33 bp, Homo sapien
cattatgatttcaacattatcttttccatgagt

SEQ ID NO: 926609 - DNA, 33 bp, Homo sapien
agaatagcctcatggtctgcttgtcctccagat

SEQ ID NO: 926610 - DNA, 33 bp, Homo sapien
agaatagcctcatggtttgcttgtcctccagat

SEQ ID NO: 926611 - DNA, 33 bp, Homo sapien
ggtacttagaataggacgtgacatagagtaata

SEQ ID NO: 926612 - DNA, 33 bp, Homo sapien
ggtacttagaataggatgtgacatagagtaata

SEQ ID NO: 926613 - DNA, 33 bp, Homo sapien
agatgaccaaacatagaactttatattaagagc

SEQ ID NO: 926614 - DNA, 33 bp, Homo sapien
agatgaccaaacataggactttatattaagagc

SEQ ID NO: 926615 - DNA, 33 bp, Homo sapien
gttctggaaaccataacgtgagactgttttttt

SEQ ID NO: 926616 - DNA, 33 bp, Homo sapien
gttctggaaaccataatgtgagactgttttttt

SEQ ID NO: 926617 - DNA, 33 bp, Homo sapien
acttgagatgaagaaaagctaaagaaaagaggg

SEQ ID NO: 926618 - DNA, 33 bp, Homo sapien
acttgagatgaagaaaggctaaagaaaagaggg

SEQ ID NO: 926619 - DNA, 33 bp, Homo sapien
ataccatgatgtagtaaaaacaatgttgtatta

SEQ ID NO: 926620 - DNA, 33 bp, Homo sapien
ataccatgatgtagtagaaacaatgttgtatta

SEQ ID NO: 926621 - DNA, 33 bp, Homo sapien
tgattatatacgctaactgctagtacatattta

SEQ ID NO: 926622 - DNA, 33 bp, Homo sapien
tgattatatacgctaattgctagtacatattta

SEQ ID NO: 926623 - DNA, 33 bp, Homo sapien
aactaacctcaaaaacagtgctagcgaaagcac

SEQ ID NO: 926624 - DNA, 33 bp, Homo sapien
aactaacctcaaaaacggtgctagcgaaagcac

SEQ ID NO: 926625 - DNA, 33 bp, Homo sapien
aagttctcaatcagaaattaactttacattaca

SEQ ID NO: 926626 - DNA, 33 bp, Homo sapien
aagttctcaatcagaagttaactttacattaca

SEQ ID NO: 926627 - DNA, 33 bp, Homo sapien
gtgccagatttgctcaaggtaatatatctgtag

SEQ ID NO: 926628 - DNA, 33 bp, Homo sapien
gtgccagatttgctcacggtaatatatctgtag

SEQ ID NO: 926629 - DNA, 33 bp, Homo sapien
tgaggatgacagttgaatatagttaactcatga

SEQ ID NO: 926630 - DNA, 33 bp, Homo sapien
tgaggatgacagttgagtatagttaactcatga

SEQ ID NO: 926631 - DNA, 33 bp, Homo sapien
aatgcacaaaaatacagcatctactttatttaa

SEQ ID NO: 926632 - DNA, 33 bp, Homo sapien
aatgcacaaaaatacatcatctactttatttaa

SEQ ID NO: 926633 - DNA, 33 bp, Homo sapien
tccatgaatttgttaaaagtttgctgtgtttct

SEQ ID NO: 926634 - DNA, 33 bp, Homo sapien
tccatgaatttgttaacagtttgctgtgtttct

SEQ ID NO: 926635 - DNA, 33 bp, Homo sapien
tgaaaattttatggtcccagaatgcaattatat

SEQ ID NO: 926636 - DNA, 33 bp, Homo sapien
tgaaaattttatggtctcagaatgcaattatat

SEQ ID NO: 926637 - DNA, 33 bp, Homo sapien
acacaatctggaacatcaataagttacagcatg

SEQ ID NO: 926638 - DNA, 33 bp, Homo sapien
acacaatctggaacattaataagttacagcatg

SEQ ID NO: 926639 - DNA, 33 bp, Homo sapien
atctttccaattctaaccttctagacaaatcct

SEQ ID NO: 926640 - DNA, 33 bp, Homo sapien
atctttccaattctaatcttctagacaaatcct

SEQ ID NO: 926641 - DNA, 33 bp, Homo sapien
tatgaagtctgaaggaatatttctctttagcat

SEQ ID NO: 926642 - DNA, 33 bp, Homo sapien
tatgaagtctgaaggagtatttctctttagcat

SEQ ID NO: 926643 - DNA, 33 bp, Homo sapien
ccacacaagcactggagaatgtacttagttaac

SEQ ID NO: 926644 - DNA, 33 bp, Homo sapien
ccacacaagcactggataatgtacttagttaac

SEQ ID NO: 926645 - DNA, 33 bp, Homo sapien
tcaacatatgcaagtacggcttgatttcttctc

SEQ ID NO: 926646 - DNA, 33 bp, Homo sapien
tcaacatatgcaagtatggcttgatttcttctc

SEQ ID NO: 926647 - DNA, 33 bp, Homo sapien
ggtaaattgcttaaaacgtattgggcaagaagt

SEQ ID NO: 926648 - DNA, 33 bp, Homo sapien
ggtaaattgcttaaaatgtattgggcaagaagt

SEQ ID NO: 926649 - DNA, 33 bp, Homo sapien
gaattgtttcacttagaaaggactgccaggaaa

SEQ ID NO: 926650 - DNA, 33 bp, Homo sapien
gaattgtttcacttagcaaggactgccaggaaa

SEQ ID NO: 926651 - DNA, 33 bp, Homo sapien
tctccaaaactgttcaaacaatccatgtatcag

SEQ ID NO: 926652 - DNA, 33 bp, Homo sapien
tctccaaaactgttcagacaatccatgtatcag

SEQ ID NO: 926653 - DNA, 33 bp, Homo sapien
tccaactctcacgattcaaatatgaatagaagc

SEQ ID NO: 926654 - DNA, 33 bp, Homo sapien
tccaactctcacgatttaaatatgaatagaagc

SEQ ID NO: 926655 - DNA, 33 bp, Homo sapien
ttagtcattccaatcaaactgaggaactttttg

SEQ ID NO: 926656 - DNA, 33 bp, Homo sapien
ttagtcattccaatcagactgaggaactttttg

SEQ ID NO: 926657 - DNA, 33 bp, Homo sapien
ggactcaaaaatagaaaccttcaaagacggaag

SEQ ID NO: 926658 - DNA, 33 bp, Homo sapien
ggactcaaaaatagaacccttcaaagacggaag

SEQ ID NO: 926659 - DNA, 33 bp, Homo sapien
tttccagatagagtaccaaagatataatttgaa

SEQ ID NO: 926660 - DNA, 33 bp, Homo sapien
tttccagatagagtacgaaagatataatttgaa

SEQ ID NO: 926661 - DNA, 33 bp, Homo sapien
tttaaatagtgaaatgacaggataaagatataa

SEQ ID NO: 926662 - DNA, 33 bp, Homo sapien
tttaaatagtgaaatgtcaggataaagatataa

SEQ ID NO: 926663 - DNA, 33 bp, Homo sapien
tttaaattcttgttgacggaaaacttacttttt

SEQ ID NO: 926664 - DNA, 33 bp, Homo sapien
tttaaattcttgttgatggaaaacttacttttt

SEQ ID NO: 926665 - DNA, 33 bp, Homo sapien
agtaaattctatgaaaacagtataaagttgatc

SEQ ID NO: 926666 - DNA, 33 bp, Homo sapien
agtaaattctatgaaagcagtataaagttgatc

SEQ ID NO: 926667 - DNA, 33 bp, Homo sapien
atggcttggtatatgactacgtttctggcttat

SEQ ID NO: 926668 - DNA, 33 bp, Homo sapien
atggcttggtatatgattacgtttctggcttat

SEQ ID NO: 926669 - DNA, 33 bp, Homo sapien
acttatgttgaaatcaataactacaacatcatg

SEQ ID NO: 926670 - DNA, 33 bp, Homo sapien
acttatgttgaaatcagtaactacaacatcatg

SEQ ID NO: 926671 - DNA, 33 bp, Homo sapien
tacttttctccacaaaggatatttctcaatatc

SEQ ID NO: 926672 - DNA, 33 bp, Homo sapien
tacttttctccacaaatgatatttctcaatatc

SEQ ID NO: 926673 - DNA, 33 bp, Homo sapien
tatggattacactaaactgtctgatatatgaca

SEQ ID NO: 926674 - DNA, 33 bp, Homo sapien
tatggattacactaaattgtctgatatatgaca

SEQ ID NO: 926675 - DNA, 33 bp, Homo sapien
cagcaactgagcaagaaataaaatcagactcat

SEQ ID NO: 926676 - DNA, 33 bp, Homo sapien
cagcaactgagcaagagataaaatcagactcat

SEQ ID NO: 926677 - DNA, 33 bp, Homo sapien
ctccaatttgctccaaactcttcttcttaccca

SEQ ID NO: 926678 - DNA, 33 bp, Homo sapien
ctccaatttgctccaacctcttcttcttaccca

SEQ ID NO: 926679 - DNA, 33 bp, Homo sapien
aaccagtgacctagacagaatgtaaactttttt

SEQ ID NO: 926680 - DNA, 33 bp, Homo sapien
aaccagtgacctagactgaatgtaaactttttt

SEQ ID NO: 926681 - DNA, 33 bp, Homo sapien
tgtggaattgtcatgaaaataccctgtctgaaa

SEQ ID NO: 926682 - DNA, 33 bp, Homo sapien
tgtggaattgtcatgagaataccctgtctgaaa

SEQ ID NO: 926683 - DNA, 33 bp, Homo sapien
ttatgatctgtctacaatagaaacaatgagggt

SEQ ID NO: 926684 - DNA, 33 bp, Homo sapien
ttatgatctgtctacagtagaaacaatgagggt

SEQ ID NO: 926685 - DNA, 33 bp, Homo sapien
accaaatatactggaaaaactgaatagacacat

SEQ ID NO: 926686 - DNA, 33 bp, Homo sapien
accaaatatactggaacaactgaatagacacat

SEQ ID NO: 926687 - DNA, 33 bp, Homo sapien
tatgtctcaggaacaaactagtctaagaactgt

SEQ ID NO: 926688 - DNA, 33 bp, Homo sapien
tatgtctcaggaacaacctagtctaagaactgt

SEQ ID NO: 926689 - DNA, 33 bp, Homo sapien
catttctgtagtcatccctagctaggtcatatg

SEQ ID NO: 926690 - DNA, 33 bp, Homo sapien
catttctgtagtcatctctagctaggtcatatg

SEQ ID NO: 926691 - DNA, 33 bp, Homo sapien
tttacataaccagcaaataccatataagaatat

SEQ ID NO: 926692 - DNA, 33 bp, Homo sapien
tttacataaccagcaactaccatataagaatat

SEQ ID NO: 926693 - DNA, 33 bp, Homo sapien
gtgggacattatttccaactggatatgtttgct

SEQ ID NO: 926694 - DNA, 33 bp, Homo sapien
gtgggacattatttcccactggatatgtttgct

SEQ ID NO: 926695 - DNA, 33 bp, Homo sapien
tgtttgtatgccttgaagctttggaccacatag

SEQ ID NO: 926696 - DNA, 33 bp, Homo sapien
tgtttgtatgccttgacgctttggaccacatag

SEQ ID NO: 926697 - DNA, 33 bp, Homo sapien
acagttactagtgttcaaaattcagagactctg

SEQ ID NO: 926698 - DNA, 33 bp, Homo sapien
acagttactagtgttccaaattcagagactctg

SEQ ID NO: 926699 - DNA, 33 bp, Homo sapien
tcaaatgtaccacagacaccatgtttataccaa

SEQ ID NO: 926700 - DNA, 33 bp, Homo sapien
tcaaatgtaccacagagaccatgtttataccaa

SEQ ID NO: 926701 - DNA, 33 bp, Homo sapien
aattaaatattacagaccagtgaattctgaatt

SEQ ID NO: 926702 - DNA, 33 bp, Homo sapien
aattaaatattacagagcagtgaattctgaatt

SEQ ID NO: 926703 - DNA, 33 bp, Homo sapien
aagttagagtctttcacatgttggcagaaatct

SEQ ID NO: 926704 - DNA, 33 bp, Homo sapien
aagttagagtctttcatatgttggcagaaatct

SEQ ID NO: 926705 - DNA, 33 bp, Homo sapien
tataaatttctatgtacgtgtttccagttgcaa

SEQ ID NO: 926706 - DNA, 33 bp, Homo sapien
tataaatttctatgtaggtgtttccagttgcaa

SEQ ID NO: 926707 - DNA, 33 bp, Homo sapien
gatcaaatcaattacaatcttgttactgagatc

SEQ ID NO: 926708 - DNA, 33 bp, Homo sapien
gatcaaatcaattacagtcttgttactgagatc

SEQ ID NO: 926709 - DNA, 33 bp, Homo sapien
tatcatagcatgagaacgtgccaatatatcaca

SEQ ID NO: 926710 - DNA, 33 bp, Homo sapien
tatcatagcatgagaatgtgccaatatatcaca

SEQ ID NO: 926711 - DNA, 33 bp, Homo sapien
ttaatttattttggcagcaacatataaaacagt

SEQ ID NO: 926712 - DNA, 33 bp, Homo sapien
ttaatttattttggcatcaacatataaaacagt

SEQ ID NO: 926713 - DNA, 33 bp, Homo sapien
gacagatcttcaattgcagtaaggagtacttgt

SEQ ID NO: 926714 - DNA, 33 bp, Homo sapien
gacagatcttcaattgtagtaaggagtacttgt

SEQ ID NO: 926715 - DNA, 33 bp, Homo sapien
cataatgttgtcctgagctgtaaaattaatagc

SEQ ID NO: 926716 - DNA, 33 bp, Homo sapien
cataatgttgtcctgatctgtaaaattaatagc

SEQ ID NO: 926717 - DNA, 33 bp, Homo sapien
tcctgatgatatcaataatgacgataaagaaaa

SEQ ID NO: 926718 - DNA, 33 bp, Homo sapien
tcctgatgatatcaatgatgacgataaagaaaa

SEQ ID NO: 926719 - DNA, 33 bp, Homo sapien
agtagatataaccagaacatcagatatttttgg

SEQ ID NO: 926720 - DNA, 33 bp, Homo sapien
agtagatataaccagagcatcagatatttttgg

SEQ ID NO: 926721 - DNA, 33 bp, Homo sapien
aaattagtgcatagaacgacaaagctgaaaagg

SEQ ID NO: 926722 - DNA, 33 bp, Homo sapien
aaattagtgcatagaatgacaaagctgaaaagg

SEQ ID NO: 926723 - DNA, 33 bp, Homo sapien
agaaagcagacctatacggcaaaggcaaagaaa

SEQ ID NO: 926724 - DNA, 33 bp, Homo sapien
agaaagcagacctatatggcaaaggcaaagaaa

SEQ ID NO: 926725 - DNA, 33 bp, Homo sapien
atgtccactagagaacagaaatcttaagacagt

SEQ ID NO: 926726 - DNA, 33 bp, Homo sapien
atgtccactagagaacggaaatcttaagacagt

SEQ ID NO: 926727 - DNA, 33 bp, Homo sapien
agcattgcctggataccaaaactaaacaaatac

SEQ ID NO: 926728 - DNA, 33 bp, Homo sapien
agcattgcctggatactaaaactaaacaaatac

SEQ ID NO: 926729 - DNA, 33 bp, Homo sapien
aagacaaaagtgaagacgagaaagaatgtcatt

SEQ ID NO: 926730 - DNA, 33 bp, Homo sapien
aagacaaaagtgaagatgagaaagaatgtcatt

SEQ ID NO: 926731 - DNA, 33 bp, Homo sapien
agatattcctctggaaaccaaactatcaagttg

SEQ ID NO: 926732 - DNA, 33 bp, Homo sapien
agatattcctctggaagccaaactatcaagttg

SEQ ID NO: 926733 - DNA, 33 bp, Homo sapien
tagtaaatattccacagaagctactggggtgta

SEQ ID NO: 926734 - DNA, 33 bp, Homo sapien
tagtaaatattccacataagctactggggtgta

SEQ ID NO: 926735 - DNA, 33 bp, Homo sapien
ccctgtttgtaaaatacacactcaatgaaaaag

SEQ ID NO: 926736 - DNA, 33 bp, Homo sapien
ccctgtttgtaaaatagacactcaatgaaaaag

SEQ ID NO: 926737 - DNA, 33 bp, Homo sapien
tctggacatatagaacacttcctgcatccctaa

SEQ ID NO: 926738 - DNA, 33 bp, Homo sapien
tctggacatatagaacccttcctgcatccctaa

SEQ ID NO: 926739 - DNA, 33 bp, Homo sapien
atggggttccatcccaataaagccatcatacgt

SEQ ID NO: 926740 - DNA, 33 bp, Homo sapien
atggggttccatcccagtaaagccatcatacgt

SEQ ID NO: 926741 - DNA, 33 bp, Homo sapien
ggaagtagggagtaaggcctctctagttttatc

SEQ ID NO: 926742 - DNA, 33 bp, Homo sapien
ggaagtagggagtaagtcctctctagttttatc

SEQ ID NO: 926743 - DNA, 33 bp, Homo sapien
aacaataaaaaatttcacttggcggtgatgtgc

SEQ ID NO: 926744 - DNA, 33 bp, Homo sapien
aacaataaaaaatttcgcttggcggtgatgtgc

SEQ ID NO: 926745 - DNA, 33 bp, Homo sapien
ttttttttacccaaagaatcctcggaagccaat

SEQ ID NO: 926746 - DNA, 33 bp, Homo sapien
ttttttttacccaaagtatcctcggaagccaat

SEQ ID NO: 926747 - DNA, 33 bp, Homo sapien
aatgatagctagaacaactaaatgtctgaaggc

SEQ ID NO: 926748 - DNA, 33 bp, Homo sapien
aatgatagctagaacatctaaatgtctgaaggc

SEQ ID NO: 926749 - DNA, 33 bp, Homo sapien
agaagcacagctccatgaatcctatagccacaa

SEQ ID NO: 926750 - DNA, 33 bp, Homo sapien
agaagcacagctccattaatcctatagccacaa

SEQ ID NO: 926751 - DNA, 33 bp, Homo sapien
tgatccacatttacacgctcttggttgtcagca

SEQ ID NO: 926752 - DNA, 33 bp, Homo sapien
tgatccacatttacactctcttggttgtcagca

SEQ ID NO: 926753 - DNA, 33 bp, Homo sapien
actctgtagataaaaacgccaagatgtgtccaa

SEQ ID NO: 926754 - DNA, 33 bp, Homo sapien
actctgtagataaaaatgccaagatgtgtccaa

SEQ ID NO: 926755 - DNA, 33 bp, Homo sapien
gacactagacattgggaatgaacagacatcagg

SEQ ID NO: 926756 - DNA, 33 bp, Homo sapien
gacactagacattgggtatgaacagacatcagg

SEQ ID NO: 926757 - DNA, 33 bp, Homo sapien
tggccagctgctgagacaaagaaatagccttgg

SEQ ID NO: 926758 - DNA, 33 bp, Homo sapien
tggccagctgctgagataaagaaatagccttgg

SEQ ID NO: 926759 - DNA, 33 bp, Homo sapien
gatcaagtcaggacaccaagcttctagagaatt

SEQ ID NO: 926760 - DNA, 33 bp, Homo sapien
gatcaagtcaggacacgaagcttctagagaatt

SEQ ID NO: 926761 - DNA, 33 bp, Homo sapien
gactatttttatacaactgtcagctaagaatgg

SEQ ID NO: 926762 - DNA, 33 bp, Homo sapien
gactatttttatacaagtgtcagctaagaatgg

SEQ ID NO: 926763 - DNA, 33 bp, Homo sapien
gattgagtcgagttccaaataacaaacttaaaa

SEQ ID NO: 926764 - DNA, 33 bp, Homo sapien
gattgagtcgagttccgaataacaaacttaaaa

SEQ ID NO: 926765 - DNA, 33 bp, Homo sapien
ttcagtttcaggtaaacaaggagtgagcagtgg

SEQ ID NO: 926766 - DNA, 33 bp, Homo sapien
ttcagtttcaggtaaagaaggagtgagcagtgg

SEQ ID NO: 926767 - DNA, 33 bp, Homo sapien
taaacgtctgacacaccgtgaaagaagatggtt

SEQ ID NO: 926768 - DNA, 33 bp, Homo sapien
taaacgtctgacacactgtgaaagaagatggtt

SEQ ID NO: 926769 - DNA, 33 bp, Homo sapien
atccatgggtttatcaatacagagatgcttcaa

SEQ ID NO: 926770 - DNA, 33 bp, Homo sapien
atccatgggtttatcagtacagagatgcttcaa

SEQ ID NO: 926771 - DNA, 33 bp, Homo sapien
tagccacactaaaatacctgctagtttatcata

SEQ ID NO: 926772 - DNA, 33 bp, Homo sapien
tagccacactaaaatatctgctagtttatcata

SEQ ID NO: 926773 - DNA, 33 bp, Homo sapien
ttcaatattagcaacaacaaagtttcaatatta

SEQ ID NO: 926774 - DNA, 33 bp, Homo sapien
ttcaatattagcaacagcaaagtttcaatatta

SEQ ID NO: 926775 - DNA, 33 bp, Homo sapien
gcctttaagcctcaaactgattacataaatctt

SEQ ID NO: 926776 - DNA, 33 bp, Homo sapien
gcctttaagcctcaaattgattacataaatctt

SEQ ID NO: 926777 - DNA, 33 bp, Homo sapien
gcattataccctcagacacatagtgtagggaaa

SEQ ID NO: 926778 - DNA, 33 bp, Homo sapien
gcattataccctcagatacatagtgtagggaaa

SEQ ID NO: 926779 - DNA, 33 bp, Homo sapien
cattcaataaacctcaactgaaatgcaagatca

SEQ ID NO: 926780 - DNA, 33 bp, Homo sapien
cattcaataaacctcagctgaaatgcaagatca

SEQ ID NO: 926781 - DNA, 33 bp, Homo sapien
taacagaaacatagacaggaaatattgaaatca

SEQ ID NO: 926782 - DNA, 33 bp, Homo sapien
taacagaaacatagacgggaaatattgaaatca

SEQ ID NO: 926783 - DNA, 33 bp, Homo sapien
tgatgtcatgatttcactactgttatctctcca

SEQ ID NO: 926784 - DNA, 33 bp, Homo sapien
tgatgtcatgatttcattactgttatctctcca

SEQ ID NO: 926785 - DNA, 33 bp, Homo sapien
tctcctctcatgtgtcaagaagaattttagctg

SEQ ID NO: 926786 - DNA, 33 bp, Homo sapien
tctcctctcatgtgtcgagaagaattttagctg

SEQ ID NO: 926787 - DNA, 33 bp, Homo sapien
ttacatggcaaaggtaaaaggacttcggtgata

SEQ ID NO: 926788 - DNA, 33 bp, Homo sapien
ttacatggcaaaggtagaaggacttcggtgata

SEQ ID NO: 926789 - DNA, 33 bp, Homo sapien
tttgattaaatcagaggcggagaaagacaaatt

SEQ ID NO: 926790 - DNA, 33 bp, Homo sapien
tttgattaaatcagagtcggagaaagacaaatt

SEQ ID NO: 926791 - DNA, 33 bp, Homo sapien
aagccaggtggaaaacaactttcagtgtggaaa

SEQ ID NO: 926792 - DNA, 33 bp, Homo sapien
aagccaggtggaaaacgactttcagtgtggaaa

SEQ ID NO: 926793 - DNA, 33 bp, Homo sapien
gcccagttggcattaccctttcacttctccagc

SEQ ID NO: 926794 - DNA, 33 bp, Homo sapien
gcccagttggcattacgctttcacttctccagc

SEQ ID NO: 926795 - DNA, 33 bp, Homo sapien
ccaagaccctgccctaatagaccttctgcacat

SEQ ID NO: 926796 - DNA, 33 bp, Homo sapien
ccaagaccctgccctagtagaccttctgcacat

SEQ ID NO: 926797 - DNA, 33 bp, Homo sapien
aattccttaaaatgtaagttcaagagaccttct

SEQ ID NO: 926798 - DNA, 33 bp, Homo sapien
aattccttaaaatgtaggttcaagagaccttct

SEQ ID NO: 926799 - DNA, 33 bp, Homo sapien
taattgaatgggaaaaaaggctagatatgtcaa

SEQ ID NO: 926800 - DNA, 33 bp, Homo sapien
taattgaatgggaaaagaggctagatatgtcaa

SEQ ID NO: 926801 - DNA, 33 bp, Homo sapien
agctacttttccttgagactcaattgtacacca

SEQ ID NO: 926802 - DNA, 33 bp, Homo sapien
agctacttttccttgatactcaattgtacacca

SEQ ID NO: 926803 - DNA, 33 bp, Homo sapien
aagggcaattatttcaaaagcgcattctaaaga

SEQ ID NO: 926804 - DNA, 33 bp, Homo sapien
aagggcaattatttcataagcgcattctaaaga

SEQ ID NO: 926805 - DNA, 33 bp, Homo sapien
agacagaagacaatcaaatccattttgtgggaa

SEQ ID NO: 926806 - DNA, 33 bp, Homo sapien
agacagaagacaatcagatccattttgtgggaa

SEQ ID NO: 926807 - DNA, 33 bp, Homo sapien
ttaagaaaaaaatcatcaaagctgagagaaata

SEQ ID NO: 926808 - DNA, 33 bp, Homo sapien
ttaagaaaaaaatcatgaaagctgagagaaata

SEQ ID NO: 926809 - DNA, 33 bp, Homo sapien
gaatatagggatgcaaaaagttgctgcaaagag

SEQ ID NO: 926810 - DNA, 33 bp, Homo sapien
gaatatagggatgcaagaagttgctgcaaagag

SEQ ID NO: 926811 - DNA, 33 bp, Homo sapien
aatttatgtgcaaaaaaattgggggttgcttac

SEQ ID NO: 926812 - DNA, 33 bp, Homo sapien
aatttatgtgcaaaaacattgggggttgcttac

SEQ ID NO: 926813 - DNA, 33 bp, Homo sapien
gtatactgggaatagacaacttgctttaattac

SEQ ID NO: 926814 - DNA, 33 bp, Homo sapien
gtatactgggaatagataacttgctttaattac

SEQ ID NO: 926815 - DNA, 33 bp, Homo sapien
aaataaagtgtgtgaacgtacagcatatagaac

SEQ ID NO: 926816 - DNA, 33 bp, Homo sapien
aaataaagtgtgtgaatgtacagcatatagaac

SEQ ID NO: 926817 - DNA, 33 bp, Homo sapien
gcaagagctaggtaaagcacactcggattagcc

SEQ ID NO: 926818 - DNA, 33 bp, Homo sapien
gcaagagctaggtaaatcacactcggattagcc

SEQ ID NO: 926819 - DNA, 33 bp, Homo sapien
ccacaggtaaacatcaaggaaaaaaggattcaa

SEQ ID NO: 926820 - DNA, 33 bp, Homo sapien
ccacaggtaaacatcagggaaaaaaggattcaa

SEQ ID NO: 926821 - DNA, 33 bp, Homo sapien
agtgaggcagaaacatcatatggccctcaattt

SEQ ID NO: 926822 - DNA, 33 bp, Homo sapien
agtgaggcagaaacatgatatggccctcaattt

SEQ ID NO: 926823 - DNA, 33 bp, Homo sapien
agcaaaatgatgtctaacaaaatgtctgaattt

SEQ ID NO: 926824 - DNA, 33 bp, Homo sapien
agcaaaatgatgtctaccaaaatgtctgaattt

SEQ ID NO: 926825 - DNA, 33 bp, Homo sapien
actgacctgtgtattgaaagaattaaggggctc

SEQ ID NO: 926826 - DNA, 33 bp, Homo sapien
actgacctgtgtattgcaagaattaaggggctc

SEQ ID NO: 926827 - DNA, 33 bp, Homo sapien
gattttcccagcagaaaaacaaaaatctgaatt

SEQ ID NO: 926828 - DNA, 33 bp, Homo sapien
gattttcccagcagaagaacaaaaatctgaatt

SEQ ID NO: 926829 - DNA, 33 bp, Homo sapien
taatgttgtaaactcaaaaggaaaccattgcgt

SEQ ID NO: 926830 - DNA, 33 bp, Homo sapien
taatgttgtaaactcagaaggaaaccattgcgt

SEQ ID NO: 926831 - DNA, 33 bp, Homo sapien
ttttgcccagatattcaaatgttatcttaataa

SEQ ID NO: 926832 - DNA, 33 bp, Homo sapien
ttttgcccagatattcgaatgttatcttaataa

SEQ ID NO: 926833 - DNA, 33 bp, Homo sapien
gaaaacagtgaactcaaggatactaattcccgg

SEQ ID NO: 926834 - DNA, 33 bp, Homo sapien
gaaaacagtgaactcagggatactaattcccgg

SEQ ID NO: 926835 - DNA, 33 bp, Homo sapien
ccaccccaccatagagcaaaatatagcagacac

SEQ ID NO: 926836 - DNA, 33 bp, Homo sapien
ccaccccaccatagagtaaaatatagcagacac

SEQ ID NO: 926837 - DNA, 33 bp, Homo sapien
acattgctttcttgacgaatctgctgtcaagca

SEQ ID NO: 926838 - DNA, 33 bp, Homo sapien
acattgctttcttgactaatctgctgtcaagca

SEQ ID NO: 926839 - DNA, 33 bp, Homo sapien
tgtttggtttttgtaaatatgccttttgaagga

SEQ ID NO: 926840 - DNA, 33 bp, Homo sapien
tgtttggtttttgtaactatgccttttgaagga

SEQ ID NO: 926841 - DNA, 33 bp, Homo sapien
ggtaaaagttgcaacaatgctggtagtgatgat

SEQ ID NO: 926842 - DNA, 33 bp, Homo sapien
ggtaaaagttgcaacagtgctggtagtgatgat

SEQ ID NO: 926843 - DNA, 33 bp, Homo sapien
aaggaaatatttccaaacaaattctatgaggcc

SEQ ID NO: 926844 - DNA, 33 bp, Homo sapien
aaggaaatatttccaaccaaattctatgaggcc

SEQ ID NO: 926845 - DNA, 33 bp, Homo sapien
ttcatcaacactataccagttttacaagaaatg

SEQ ID NO: 926846 - DNA, 33 bp, Homo sapien
ttcatcaacactatactagttttacaagaaatg

SEQ ID NO: 926847 - DNA, 33 bp, Homo sapien
gttattaatactagccccaaattgaaaacaatc

SEQ ID NO: 926848 - DNA, 33 bp, Homo sapien
gttattaatactagcctcaaattgaaaacaatc

SEQ ID NO: 926849 - DNA, 33 bp, Homo sapien
caacaagaaagctaaaaaaatgcaatgaggaaa

SEQ ID NO: 926850 - DNA, 33 bp, Homo sapien
caacaagaaagctaaagaaatgcaatgaggaaa

SEQ ID NO: 926851 - DNA, 33 bp, Homo sapien
atacctttcatgttcacagatcggaatactctc

SEQ ID NO: 926852 - DNA, 33 bp, Homo sapien
atacctttcatgttcatagatcggaatactctc

SEQ ID NO: 926853 - DNA, 33 bp, Homo sapien
acagcaaaacaccataacatacatttacctatg

SEQ ID NO: 926854 - DNA, 33 bp, Homo sapien
acagcaaaacaccatagcatacatttacctatg

SEQ ID NO: 926855 - DNA, 33 bp, Homo sapien
gagaatggtgaccagaagacaggaagggtaata

SEQ ID NO: 926856 - DNA, 33 bp, Homo sapien
gagaatggtgaccagaggacaggaagggtaata

SEQ ID NO: 926857 - DNA, 33 bp, Homo sapien
agtttatcaattctatcataagccgagtttttt

SEQ ID NO: 926858 - DNA, 33 bp, Homo sapien
agtttatcaattctattataagccgagtttttt

SEQ ID NO: 926859 - DNA, 33 bp, Homo sapien
gccagaaaataaatgacgctgccaaggtggtgg

SEQ ID NO: 926860 - DNA, 33 bp, Homo sapien
gccagaaaataaatgatgctgccaaggtggtgg

SEQ ID NO: 926861 - DNA, 33 bp, Homo sapien
ccacagttgtctagggaagcagcaaaatgccac

SEQ ID NO: 926862 - DNA, 33 bp, Homo sapien
ccacagttgtctagggtagcagcaaaatgccac

SEQ ID NO: 926863 - DNA, 33 bp, Homo sapien
ctgcttggttgcttgacaatcataactttgaat

SEQ ID NO: 926864 - DNA, 33 bp, Homo sapien
ctgcttggttgcttgataatcataactttgaat

SEQ ID NO: 926865 - DNA, 33 bp, Homo sapien
gaagattcaagcttaaaagcaaatacacacaaa

SEQ ID NO: 926866 - DNA, 33 bp, Homo sapien
gaagattcaagcttaacagcaaatacacacaaa

SEQ ID NO: 926867 - DNA, 33 bp, Homo sapien
ccctaatatcaacaaacagttttatctgggata

SEQ ID NO: 926868 - DNA, 33 bp, Homo sapien
ccctaatatcaacaaagagttttatctgggata

SEQ ID NO: 926869 - DNA, 33 bp, Homo sapien
ctactgaaacaagaaacgttaccatgttttaca

SEQ ID NO: 926870 - DNA, 33 bp, Homo sapien
ctactgaaacaagaaaggttaccatgttttaca

SEQ ID NO: 926871 - DNA, 33 bp, Homo sapien
tttttcaggatttttgaagatcagatgattgta

SEQ ID NO: 926872 - DNA, 33 bp, Homo sapien
tttttcaggatttttggagatcagatgattgta

SEQ ID NO: 926873 - DNA, 33 bp, Homo sapien
tgtgctacaattttacaaaaatgattttgaggt

SEQ ID NO: 926874 - DNA, 33 bp, Homo sapien
tgtgctacaattttaccaaaatgattttgaggt

SEQ ID NO: 926875 - DNA, 33 bp, Homo sapien
ttaaaattcatgttccaaaagtgcaattacttt

SEQ ID NO: 926876 - DNA, 33 bp, Homo sapien
ttaaaattcatgttccgaaagtgcaattacttt

SEQ ID NO: 926877 - DNA, 33 bp, Homo sapien
ccagtagctgagcttacatgggtgctcaaaaac

SEQ ID NO: 926878 - DNA, 33 bp, Homo sapien
ccagtagctgagcttatatgggtgctcaaaaac

SEQ ID NO: 926879 - DNA, 33 bp, Homo sapien
aagaaggaattgattaaggaaggagagatgaaa

SEQ ID NO: 926880 - DNA, 33 bp, Homo sapien
aagaaggaattgattatggaaggagagatgaaa

SEQ ID NO: 926881 - DNA, 33 bp, Homo sapien
ttgcaggatccaattcaaaccataatagatgca

SEQ ID NO: 926882 - DNA, 33 bp, Homo sapien
ttgcaggatccaattccaaccataatagatgca

SEQ ID NO: 926883 - DNA, 33 bp, Homo sapien
acgccaggctttaaaacataagtagcactcaaa

SEQ ID NO: 926884 - DNA, 33 bp, Homo sapien
acgccaggctttaaaagataagtagcactcaaa

SEQ ID NO: 926885 - DNA, 33 bp, Homo sapien
taaaacaattcaatagaacagcaaacattaaaa

SEQ ID NO: 926886 - DNA, 33 bp, Homo sapien
taaaacaattcaatagtacagcaaacattaaaa

SEQ ID NO: 926887 - DNA, 33 bp, Homo sapien
gtgaatagagttctctcaaaatgtaattgaaat

SEQ ID NO: 926888 - DNA, 33 bp, Homo sapien
gtgaatagagttctcttaaaatgtaattgaaat

SEQ ID NO: 926889 - DNA, 33 bp, Homo sapien
agaaatttaagactacagcaaacattcaaacct

SEQ ID NO: 926890 - DNA, 33 bp, Homo sapien
agaaatttaagactacggcaaacattcaaacct

SEQ ID NO: 926891 - DNA, 33 bp, Homo sapien
ttaagaagcttatctaaaacagtgatttcatgt

SEQ ID NO: 926892 - DNA, 33 bp, Homo sapien
ttaagaagcttatctataacagtgatttcatgt

SEQ ID NO: 926893 - DNA, 33 bp, Homo sapien
cacttgtaagtaagaacgtacaatatttggttt

SEQ ID NO: 926894 - DNA, 33 bp, Homo sapien
cacttgtaagtaagaatgtacaatatttggttt

SEQ ID NO: 926895 - DNA, 33 bp, Homo sapien
tccttctcataaatgcaaatgagtcacatattg

SEQ ID NO: 926896 - DNA, 33 bp, Homo sapien
tccttctcataaatgctaatgagtcacatattg

SEQ ID NO: 926897 - DNA, 33 bp, Homo sapien
cagtgttttgtagttcccctcatagagatcttt

SEQ ID NO: 926898 - DNA, 33 bp, Homo sapien
cagtgttttgtagttctcctcatagagatcttt

SEQ ID NO: 926899 - DNA, 33 bp, Homo sapien
ctacaaaaattgaataacctgacaaaaatacac

SEQ ID NO: 926900 - DNA, 33 bp, Homo sapien
ctacaaaaattgaataccctgacaaaaatacac

SEQ ID NO: 926901 - DNA, 33 bp, Homo sapien
agtgaattgtggcacaaagctggaatatgctgt

SEQ ID NO: 926902 - DNA, 33 bp, Homo sapien
agtgaattgtggcacacagctggaatatgctgt

SEQ ID NO: 926903 - DNA, 33 bp, Homo sapien
aatttactttcttatcaacagtgtgacatggct

SEQ ID NO: 926904 - DNA, 33 bp, Homo sapien
aatttactttcttatccacagtgtgacatggct

SEQ ID NO: 926905 - DNA, 33 bp, Homo sapien
aatgcagaagcttaataatcaaaaccagggaat

SEQ ID NO: 926906 - DNA, 33 bp, Homo sapien
aatgcagaagcttaatgatcaaaaccagggaat

SEQ ID NO: 926907 - DNA, 33 bp, Homo sapien
tggtagaattgggttaacacttagactcttagt

SEQ ID NO: 926908 - DNA, 33 bp, Homo sapien
tggtagaattgggttaccacttagactcttagt

SEQ ID NO: 926909 - DNA, 33 bp, Homo sapien
ctagatgtagatctgagtaagttttccctacat

SEQ ID NO: 926910 - DNA, 33 bp, Homo sapien
ctagatgtagatctgattaagttttccctacat

SEQ ID NO: 926911 - DNA, 33 bp, Homo sapien
attgtatttttatttacatcctctggtgagaaa

SEQ ID NO: 926912 - DNA, 33 bp, Homo sapien
attgtatttttatttatatcctctggtgagaaa

SEQ ID NO: 926913 - DNA, 33 bp, Homo sapien
ttgttgctgttactaactattgtagtttatatt

SEQ ID NO: 926914 - DNA, 33 bp, Homo sapien
ttgttgctgttactaattattgtagtttatatt

SEQ ID NO: 926915 - DNA, 33 bp, Homo sapien
aggtgagaacttacaaacttctcagttatttat

SEQ ID NO: 926916 - DNA, 33 bp, Homo sapien
aggtgagaacttacaatcttctcagttatttat

SEQ ID NO: 926917 - DNA, 33 bp, Homo sapien
tgccagcaacaaaacacctctggagtgttagag

SEQ ID NO: 926918 - DNA, 33 bp, Homo sapien
tgccagcaacaaaacatctctggagtgttagag

SEQ ID NO: 926919 - DNA, 33 bp, Homo sapien
gaaaagcttgtatttcacactgatccttaagat

SEQ ID NO: 926920 - DNA, 33 bp, Homo sapien
gaaaagcttgtatttcgcactgatccttaagat

SEQ ID NO: 926921 - DNA, 33 bp, Homo sapien
tgagttacagctatgaccaggactgcttgccct

SEQ ID NO: 926922 - DNA, 33 bp, Homo sapien
tgagttacagctatgatcaggactgcttgccct

SEQ ID NO: 926923 - DNA, 33 bp, Homo sapien
ctatgatttcatagtaacatttttatgcatctc

SEQ ID NO: 926924 - DNA, 33 bp, Homo sapien
ctatgatttcatagtatcatttttatgcatctc

SEQ ID NO: 926925 - DNA, 33 bp, Homo sapien
actttcttccaataaacgacttcacattaaact

SEQ ID NO: 926926 - DNA, 33 bp, Homo sapien
actttcttccaataaatgacttcacattaaact

SEQ ID NO: 926927 - DNA, 33 bp, Homo sapien
tcttcgtttaaatgaccggaatttgtattctca

SEQ ID NO: 926928 - DNA, 33 bp, Homo sapien
tcttcgtttaaatgactggaatttgtattctca

SEQ ID NO: 926929 - DNA, 33 bp, Homo sapien
tgatccattttcttaaaagagtaaacccaatga

SEQ ID NO: 926930 - DNA, 33 bp, Homo sapien
tgatccattttcttaagagagtaaacccaatga

SEQ ID NO: 926931 - DNA, 33 bp, Homo sapien
ctggatgttcttgtgaagggcatgataaatgga

SEQ ID NO: 926932 - DNA, 33 bp, Homo sapien
ctggatgttcttgtgaggggcatgataaatgga

SEQ ID NO: 926933 - DNA, 33 bp, Homo sapien
ctgaacttcataactgaattaaagacactgtcc

SEQ ID NO: 926934 - DNA, 33 bp, Homo sapien
ctgaacttcataactggattaaagacactgtcc

SEQ ID NO: 926935 - DNA, 33 bp, Homo sapien
aagcaaattagcatagaaagttgaagaatgaaa

SEQ ID NO: 926936 - DNA, 33 bp, Homo sapien
aagcaaattagcataggaagttgaagaatgaaa

SEQ ID NO: 926937 - DNA, 33 bp, Homo sapien
gagtagaaaaaaagaactgaatttgatagttgg

SEQ ID NO: 926938 - DNA, 33 bp, Homo sapien
gagtagaaaaaaagaattgaatttgatagttgg

SEQ ID NO: 926939 - DNA, 33 bp, Homo sapien
ctcaagtatctccacagtaaagacatatgtcaa

SEQ ID NO: 926940 - DNA, 33 bp, Homo sapien
ctcaagtatctccacattaaagacatatgtcaa

SEQ ID NO: 926941 - DNA, 33 bp, Homo sapien
attctacttacaagagaactgactcaatctgct

SEQ ID NO: 926942 - DNA, 33 bp, Homo sapien
attctacttacaagaggactgactcaatctgct

SEQ ID NO: 926943 - DNA, 33 bp, Homo sapien
caagggtcacaggaatgaatgtacaaccataat

SEQ ID NO: 926944 - DNA, 33 bp, Homo sapien
caagggtcacaggaattaatgtacaaccataat

SEQ ID NO: 926945 - DNA, 33 bp, Homo sapien
cgctggatatgaaagaaatctcaagtaaataca

SEQ ID NO: 926946 - DNA, 33 bp, Homo sapien
cgctggatatgaaagagatctcaagtaaataca

SEQ ID NO: 926947 - DNA, 33 bp, Homo sapien
taatgacttttctgtaaataaatgctaattgct

SEQ ID NO: 926948 - DNA, 33 bp, Homo sapien
taatgacttttctgtacataaatgctaattgct

SEQ ID NO: 926949 - DNA, 33 bp, Homo sapien
gtaatgcctagagatacggtgccctgtttccag

SEQ ID NO: 926950 - DNA, 33 bp, Homo sapien
gtaatgcctagagatatggtgccctgtttccag

SEQ ID NO: 926951 - DNA, 33 bp, Homo sapien
tatattcttcacaatacgagcctaattccagcc

SEQ ID NO: 926952 - DNA, 33 bp, Homo sapien
tatattcttcacaatatgagcctaattccagcc

SEQ ID NO: 926953 - DNA, 33 bp, Homo sapien
taaccaattcttaatggaaaggaggcgtaaatg

SEQ ID NO: 926954 - DNA, 33 bp, Homo sapien
taaccaattcttaatgtaaaggaggcgtaaatg

SEQ ID NO: 926955 - DNA, 33 bp, Homo sapien
tctcactataagatcccactgacgttttgacct

SEQ ID NO: 926956 - DNA, 33 bp, Homo sapien
tctcactataagatcctactgacgttttgacct

SEQ ID NO: 926957 - DNA, 33 bp, Homo sapien
tgcactgtagctcaacaatatcattttcagata

SEQ ID NO: 926958 - DNA, 33 bp, Homo sapien
tgcactgtagctcaaccatatcattttcagata

SEQ ID NO: 926959 - DNA, 33 bp, Homo sapien
attacttgagcaaagaatcagctctaccttgaa

SEQ ID NO: 926960 - DNA, 33 bp, Homo sapien
attacttgagcaaagagtcagctctaccttgaa

SEQ ID NO: 926961 - DNA, 33 bp, Homo sapien
agagctgaatatcccaaataaagacattagaca

SEQ ID NO: 926962 - DNA, 33 bp, Homo sapien
agagctgaatatcccagataaagacattagaca

SEQ ID NO: 926963 - DNA, 33 bp, Homo sapien
tttaagttcaagctaaatctcctatatctgtag

SEQ ID NO: 926964 - DNA, 33 bp, Homo sapien
tttaagttcaagctaagtctcctatatctgtag

SEQ ID NO: 926965 - DNA, 33 bp, Homo sapien
gttggtggtaaaataaacactagaatcaaatgt

SEQ ID NO: 926966 - DNA, 33 bp, Homo sapien
gttggtggtaaaataagcactagaatcaaatgt

SEQ ID NO: 926967 - DNA, 33 bp, Homo sapien
tcacagagagagtaaaaagtggagccagtattg

SEQ ID NO: 926968 - DNA, 33 bp, Homo sapien
tcacagagagagtaaatagtggagccagtattg

SEQ ID NO: 926969 - DNA, 33 bp, Homo sapien
tacaaaaatgatgcacaatttcaatggctattt

SEQ ID NO: 926970 - DNA, 33 bp, Homo sapien
tacaaaaatgatgcacgatttcaatggctattt

SEQ ID NO: 926971 - DNA, 33 bp, Homo sapien
acaaatgggaaatccacgtgtttaacataacct

SEQ ID NO: 926972 - DNA, 33 bp, Homo sapien
acaaatgggaaatccatgtgtttaacataacct

SEQ ID NO: 926973 - DNA, 33 bp, Homo sapien
agcaacttgcaagcataaaaaaacctggtgttc

SEQ ID NO: 926974 - DNA, 33 bp, Homo sapien
agcaacttgcaagcattaaaaaacctggtgttc

SEQ ID NO: 926975 - DNA, 33 bp, Homo sapien
taattttactatcaacacatcacagtatttatt

SEQ ID NO: 926976 - DNA, 33 bp, Homo sapien
taattttactatcaacgcatcacagtatttatt

SEQ ID NO: 926977 - DNA, 33 bp, Homo sapien
atttcagaatttcatacaagtagaatcagttag

SEQ ID NO: 926978 - DNA, 33 bp, Homo sapien
atttcagaatttcatataagtagaatcagttag

SEQ ID NO: 926979 - DNA, 33 bp, Homo sapien
gagaaccaacacagggaaaaaacttgatatatc

SEQ ID NO: 926980 - DNA, 33 bp, Homo sapien
gagaaccaacacaggggaaaaacttgatatatc

SEQ ID NO: 926981 - DNA, 33 bp, Homo sapien
tagtgatatataccaactgggaggataaaaatc

SEQ ID NO: 926982 - DNA, 33 bp, Homo sapien
tagtgatatataccaattgggaggataaaaatc

SEQ ID NO: 926983 - DNA, 33 bp, Homo sapien
ccttatctatgttaaaaggagaactctaagagg

SEQ ID NO: 926984 - DNA, 33 bp, Homo sapien
ccttatctatgttaaacggagaactctaagagg

SEQ ID NO: 926985 - DNA, 33 bp, Homo sapien
caggccttctcatttgaagaataacttgagacc

SEQ ID NO: 926986 - DNA, 33 bp, Homo sapien
caggccttctcatttggagaataacttgagacc

SEQ ID NO: 926987 - DNA, 33 bp, Homo sapien
cttagcgtataccatacactccgagcgaagtgt

SEQ ID NO: 926988 - DNA, 33 bp, Homo sapien
cttagcgtataccatatactccgagcgaagtgt

SEQ ID NO: 926989 - DNA, 33 bp, Homo sapien
ccaacccttcaccttaccttgaatgaatctaca

SEQ ID NO: 926990 - DNA, 33 bp, Homo sapien
ccaacccttcaccttagcttgaatgaatctaca

SEQ ID NO: 926991 - DNA, 33 bp, Homo sapien
cacctcccctttttgcacgcttcttcttttatt

SEQ ID NO: 926992 - DNA, 33 bp, Homo sapien
cacctcccctttttgctcgcttcttcttttatt

SEQ ID NO: 926993 - DNA, 33 bp, Homo sapien
ataccgaaggatcgaacgttaccatgtcaagtt

SEQ ID NO: 926994 - DNA, 33 bp, Homo sapien
ataccgaaggatcgaatgttaccatgtcaagtt

SEQ ID NO: 926995 - DNA, 33 bp, Homo sapien
ttcatttattgataagcaacctcctttggtgac

SEQ ID NO: 926996 - DNA, 33 bp, Homo sapien
ttcatttattgataagtaacctcctttggtgac

SEQ ID NO: 926997 - DNA, 33 bp, Homo sapien
tgcagcaacaagacacaattttggaagtagaga

SEQ ID NO: 926998 - DNA, 33 bp, Homo sapien
tgcagcaacaagacaccattttggaagtagaga

SEQ ID NO: 926999 - DNA, 33 bp, Homo sapien
gttaaaaacacttacccgatttgaatattatga

SEQ ID NO: 927000 - DNA, 33 bp, Homo sapien
gttaaaaacacttacctgatttgaatattatga

SEQ ID NO: 927001 - DNA, 33 bp, Homo sapien
accatggcaagaatgggaaagaaaggaccatga

SEQ ID NO: 927002 - DNA, 33 bp, Homo sapien
accatggcaagaatggtaaagaaaggaccatga

SEQ ID NO: 927003 - DNA, 33 bp, Homo sapien
gcgatgattgttggaaacctctatttggccatc

SEQ ID NO: 927004 - DNA, 33 bp, Homo sapien
gcgatgattgttggaagcctctatttggccatc

SEQ ID NO: 927005 - DNA, 33 bp, Homo sapien
gattctgaggaaacagaagtatcgccttgatat

SEQ ID NO: 927006 - DNA, 33 bp, Homo sapien
gattctgaggaaacaggagtatcgccttgatat

SEQ ID NO: 927007 - DNA, 33 bp, Homo sapien
tgtttacaattcatgagcaaatattttggtatt

SEQ ID NO: 927008 - DNA, 33 bp, Homo sapien
tgtttacaattcatgatcaaatattttggtatt

SEQ ID NO: 927009 - DNA, 33 bp, Homo sapien
tctatccccaacctacagataacagcactaatt

SEQ ID NO: 927010 - DNA, 33 bp, Homo sapien
tctatccccaacctacggataacagcactaatt

SEQ ID NO: 927011 - DNA, 33 bp, Homo sapien
tatttacagaatctaacgacaatgaagaacaat

SEQ ID NO: 927012 - DNA, 33 bp, Homo sapien
tatttacagaatctaatgacaatgaagaacaat

SEQ ID NO: 927013 - DNA, 33 bp, Homo sapien
tagatagttcagtacactattcattcacctatc

SEQ ID NO: 927014 - DNA, 33 bp, Homo sapien
tagatagttcagtacattattcattcacctatc

SEQ ID NO: 927015 - DNA, 33 bp, Homo sapien
ttacctttgctatctgcatatgaggatttcctt

SEQ ID NO: 927016 - DNA, 33 bp, Homo sapien
ttacctttgctatctgtatatgaggatttcctt

SEQ ID NO: 927017 - DNA, 33 bp, Homo sapien
attttggtgctttaataacttcaatttaaggtt

SEQ ID NO: 927018 - DNA, 33 bp, Homo sapien
attttggtgctttaatgacttcaatttaaggtt

SEQ ID NO: 927019 - DNA, 33 bp, Homo sapien
atttcatggaaaaaaaacttccacctgagtttg

SEQ ID NO: 927020 - DNA, 33 bp, Homo sapien
atttcatggaaaaaaaccttccacctgagtttg

SEQ ID NO: 927021 - DNA, 33 bp, Homo sapien
taattcacttaaaatccgatacagtaggtgtca

SEQ ID NO: 927022 - DNA, 33 bp, Homo sapien
taattcacttaaaatctgatacagtaggtgtca

SEQ ID NO: 927023 - DNA, 33 bp, Homo sapien
tctaggacagatagcacggtagcatctcaagat

SEQ ID NO: 927024 - DNA, 33 bp, Homo sapien
tctaggacagatagcagggtagcatctcaagat

SEQ ID NO: 927025 - DNA, 33 bp, Homo sapien
acagtatctgtacttacctgtcagccaggaatg

SEQ ID NO: 927026 - DNA, 33 bp, Homo sapien
acagtatctgtacttagctgtcagccaggaatg

SEQ ID NO: 927027 - DNA, 33 bp, Homo sapien
ggtattggtttagacaccaggaaagctcctggg

SEQ ID NO: 927028 - DNA, 33 bp, Homo sapien
ggtattggtttagacatcaggaaagctcctggg

SEQ ID NO: 927029 - DNA, 33 bp, Homo sapien
tttcatttctcagttacgtgttttcaggaaggt

SEQ ID NO: 927030 - DNA, 33 bp, Homo sapien
tttcatttctcagttatgtgttttcaggaaggt

SEQ ID NO: 927031 - DNA, 33 bp, Homo sapien
gctgtgggcatttctcacacttcttaatcctag

SEQ ID NO: 927032 - DNA, 33 bp, Homo sapien
gctgtgggcatttctcgcacttcttaatcctag

SEQ ID NO: 927033 - DNA, 33 bp, Homo sapien
cttaaggtatttttgcactcatatcatgtaatt

SEQ ID NO: 927034 - DNA, 33 bp, Homo sapien
cttaaggtatttttgcgctcatatcatgtaatt

SEQ ID NO: 927035 - DNA, 33 bp, Homo sapien
atccatatcgtgtggacgctttttcaaattgta

SEQ ID NO: 927036 - DNA, 33 bp, Homo sapien
atccatatcgtgtggatgctttttcaaattgta

SEQ ID NO: 927037 - DNA, 33 bp, Homo sapien
aatatgggaaaaacaaattctttactaactatg

SEQ ID NO: 927038 - DNA, 33 bp, Homo sapien
aatatgggaaaaacaacttctttactaactatg

SEQ ID NO: 927039 - DNA, 33 bp, Homo sapien
aacaattggacagatacggaattaacattaata

SEQ ID NO: 927040 - DNA, 33 bp, Homo sapien
aacaattggacagatatggaattaacattaata

SEQ ID NO: 927041 - DNA, 33 bp, Homo sapien
aatgactacggttttcacagacgtaaaggcaaa

SEQ ID NO: 927042 - DNA, 33 bp, Homo sapien
aatgactacggttttcgcagacgtaaaggcaaa

SEQ ID NO: 927043 - DNA, 33 bp, Homo sapien
ccaactcaagagtccaggggggcgtcagggctt

SEQ ID NO: 927044 - DNA, 33 bp, Homo sapien
ccaactcaagagtccatgggggcgtcagggctt

SEQ ID NO: 927045 - DNA, 33 bp, Homo sapien
aattacattgaaattaacctgctccttaatgac

SEQ ID NO: 927046 - DNA, 33 bp, Homo sapien
aattacattgaaattagcctgctccttaatgac

SEQ ID NO: 927047 - DNA, 33 bp, Homo sapien
tttagatttttccataacattatcactttctag

SEQ ID NO: 927048 - DNA, 33 bp, Homo sapien
tttagatttttccatagcattatcactttctag

SEQ ID NO: 927049 - DNA, 33 bp, Homo sapien
gtgcaaacagcagcaacttatgatttgcttgac

SEQ ID NO: 927050 - DNA, 33 bp, Homo sapien
gtgcaaacagcagcaagttatgatttgcttgac

SEQ ID NO: 927051 - DNA, 33 bp, Homo sapien
ccctcttaacggagaaatagaatactcaaatat

SEQ ID NO: 927052 - DNA, 33 bp, Homo sapien
ccctcttaacggagaagtagaatactcaaatat

SEQ ID NO: 927053 - DNA, 33 bp, Homo sapien
ccctatgtctcagcaacgtgaaagcatggtagt

SEQ ID NO: 927054 - DNA, 33 bp, Homo sapien
ccctatgtctcagcaatgtgaaagcatggtagt

SEQ ID NO: 927055 - DNA, 33 bp, Homo sapien
taagttgaagataccacgaggagcaagaaaact

SEQ ID NO: 927056 - DNA, 33 bp, Homo sapien
taagttgaagataccatgaggagcaagaaaact

SEQ ID NO: 927057 - DNA, 33 bp, Homo sapien
aatgtgttgttcctacaaaaatagtggatatgt

SEQ ID NO: 927058 - DNA, 33 bp, Homo sapien
aatgtgttgttcctacgaaaatagtggatatgt

SEQ ID NO: 927059 - DNA, 33 bp, Homo sapien
gtaaataaatctggtactacaaattgcaaaaat

SEQ ID NO: 927060 - DNA, 33 bp, Homo sapien
gtaaataaatctggtattacaaattgcaaaaat

SEQ ID NO: 927061 - DNA, 33 bp, Homo sapien
ctccatctgaaaaaaaaacactcgactgggcgt

SEQ ID NO: 927062 - DNA, 33 bp, Homo sapien
ctccatctgaaaaaaagacactcgactgggcgt

SEQ ID NO: 927063 - DNA, 33 bp, Homo sapien
aaatgttgtccgtgagaattaagctgactgata

SEQ ID NO: 927064 - DNA, 33 bp, Homo sapien
aaatgttgtccgtgaggattaagctgactgata

SEQ ID NO: 927065 - DNA, 33 bp, Homo sapien
ttccagatcactcatgaatatcggtatactctt

SEQ ID NO: 927066 - DNA, 33 bp, Homo sapien
ttccagatcactcatggatatcggtatactctt

SEQ ID NO: 927067 - DNA, 33 bp, Homo sapien
aaaactcttctatatacgtaacaagttcttttc

SEQ ID NO: 927068 - DNA, 33 bp, Homo sapien
aaaactcttctatatatgtaacaagttcttttc

SEQ ID NO: 927069 - DNA, 33 bp, Homo sapien
gtttgtgcttaaatgaaaaagatggtcttctag

SEQ ID NO: 927070 - DNA, 33 bp, Homo sapien
gtttgtgcttaaatgagaaagatggtcttctag

SEQ ID NO: 927071 - DNA, 33 bp, Homo sapien
tatgcagtgatgctcaaatttcccaaacttctt

SEQ ID NO: 927072 - DNA, 33 bp, Homo sapien
tatgcagtgatgctcacatttcccaaacttctt

SEQ ID NO: 927073 - DNA, 33 bp, Homo sapien
aatggttttacaagccagcactttgtagtcaac

SEQ ID NO: 927074 - DNA, 33 bp, Homo sapien
aatggttttacaagcccgcactttgtagtcaac

SEQ ID NO: 927075 - DNA, 33 bp, Homo sapien
tatatacaggagaaaacgagatttctagcaggt

SEQ ID NO: 927076 - DNA, 33 bp, Homo sapien
tatatacaggagaaaaggagatttctagcaggt

SEQ ID NO: 927077 - DNA, 33 bp, Homo sapien
tcttgcaaattcagcacagtgagttctctacaa

SEQ ID NO: 927078 - DNA, 33 bp, Homo sapien
tcttgcaaattcagcatagtgagttctctacaa

SEQ ID NO: 927079 - DNA, 33 bp, Homo sapien
gaagtaatacacaagaagatggcatagaaacat

SEQ ID NO: 927080 - DNA, 33 bp, Homo sapien
gaagtaatacacaagatgatggcatagaaacat

SEQ ID NO: 927081 - DNA, 33 bp, Homo sapien
gagacggaagggcaataaatagtgttggaggga

SEQ ID NO: 927082 - DNA, 33 bp, Homo sapien
gagacggaagggcaatcaatagtgttggaggga

SEQ ID NO: 927083 - DNA, 33 bp, Homo sapien
tgctatatttccttaaatgttggtgtttgtact

SEQ ID NO: 927084 - DNA, 33 bp, Homo sapien
tgctatatttccttaagtgttggtgtttgtact

SEQ ID NO: 927085 - DNA, 33 bp, Homo sapien
aaagaagtctcatgacactttttcactgactta

SEQ ID NO: 927086 - DNA, 33 bp, Homo sapien
aaagaagtctcatgaccctttttcactgactta

SEQ ID NO: 927087 - DNA, 33 bp, Homo sapien
tgttctgagccttagcaacccttacaaaaatag

SEQ ID NO: 927088 - DNA, 33 bp, Homo sapien
tgttctgagccttagcgacccttacaaaaatag

SEQ ID NO: 927089 - DNA, 33 bp, Homo sapien
ttgtctatatgaggagaccctgcacgctgctca

SEQ ID NO: 927090 - DNA, 33 bp, Homo sapien
ttgtctatatgaggagtccctgcacgctgctca

SEQ ID NO: 927091 - DNA, 33 bp, Homo sapien
cattgatcaaagcaccaattctataatagccca

SEQ ID NO: 927092 - DNA, 33 bp, Homo sapien
cattgatcaaagcaccgattctataatagccca

SEQ ID NO: 927093 - DNA, 33 bp, Homo sapien
tcaatcttcttatatgccaccaccccaaagaga

SEQ ID NO: 927094 - DNA, 33 bp, Homo sapien
tcaatcttcttatatgtcaccaccccaaagaga

SEQ ID NO: 927095 - DNA, 33 bp, Homo sapien
aactcacctctgtgaacaaatgtctttggttgg

SEQ ID NO: 927096 - DNA, 33 bp, Homo sapien
aactcacctctgtgaataaatgtctttggttgg

SEQ ID NO: 927097 - DNA, 33 bp, Homo sapien
ggtgtcatccatataaataggtaaagaatgaat

SEQ ID NO: 927098 - DNA, 33 bp, Homo sapien
ggtgtcatccatataagtaggtaaagaatgaat

SEQ ID NO: 927099 - DNA, 33 bp, Homo sapien
agagatgatcatttacaggattaagattcatta

SEQ ID NO: 927100 - DNA, 33 bp, Homo sapien
agagatgatcatttacgggattaagattcatta

SEQ ID NO: 927101 - DNA, 33 bp, Homo sapien
atgaataaaccattctgactgatcatgaaacag

SEQ ID NO: 927102 - DNA, 33 bp, Homo sapien
atgaataaaccattcttactgatcatgaaacag

SEQ ID NO: 927103 - DNA, 33 bp, Homo sapien
attatgtaggttgaaagttgaagcattacttta

SEQ ID NO: 927104 - DNA, 33 bp, Homo sapien
attatgtaggttgaaatttgaagcattacttta

SEQ ID NO: 927105 - DNA, 33 bp, Homo sapien
gtttcatttctaattcaaattatgtaggttgaa

SEQ ID NO: 927106 - DNA, 33 bp, Homo sapien
gtttcatttctaattctaattatgtaggttgaa

SEQ ID NO: 927107 - DNA, 33 bp, Homo sapien
ttcacacatagtggcaagtaccacacttttact

SEQ ID NO: 927108 - DNA, 33 bp, Homo sapien
ttcacacatagtggcaggtaccacacttttact

SEQ ID NO: 927109 - DNA, 33 bp, Homo sapien
tcttaagcattcattacgagactggaagccggg

SEQ ID NO: 927110 - DNA, 33 bp, Homo sapien
tcttaagcattcattaggagactggaagccggg

SEQ ID NO: 927111 - DNA, 33 bp, Homo sapien
tctctctgaaggaaaactcacatttttcagggg

SEQ ID NO: 927112 - DNA, 33 bp, Homo sapien
tctctctgaaggaaaagtcacatttttcagggg

SEQ ID NO: 927113 - DNA, 33 bp, Homo sapien
tggtatatttcatttaataaactgccaaactat

SEQ ID NO: 927114 - DNA, 33 bp, Homo sapien
tggtatatttcatttactaaactgccaaactat

SEQ ID NO: 927115 - DNA, 33 bp, Homo sapien
ctgtaatcagaaataaggcaaaaatgtctgcac

SEQ ID NO: 927116 - DNA, 33 bp, Homo sapien
ctgtaatcagaaataatgcaaaaatgtctgcac

SEQ ID NO: 927117 - DNA, 33 bp, Homo sapien
gacttctttagctgccacctgcacttcctgtag

SEQ ID NO: 927118 - DNA, 33 bp, Homo sapien
gacttctttagctgccgcctgcacttcctgtag

SEQ ID NO: 927119 - DNA, 33 bp, Homo sapien
gaatatcaaaaccacaatgatagattacttcac

SEQ ID NO: 927120 - DNA, 33 bp, Homo sapien
gaatatcaaaaccacagtgatagattacttcac

SEQ ID NO: 927121 - DNA, 33 bp, Homo sapien
ttattaaaaagttgaccctcatggaagatctat

SEQ ID NO: 927122 - DNA, 33 bp, Homo sapien
ttattaaaaagttgactctcatggaagatctat

SEQ ID NO: 927123 - DNA, 33 bp, Homo sapien
tggcattaatagttcaatcatgtttggttgtga

SEQ ID NO: 927124 - DNA, 33 bp, Homo sapien
tggcattaatagttcactcatgtttggttgtga

SEQ ID NO: 927125 - DNA, 33 bp, Homo sapien
acttgctaagtgtccaatgagttcatgtcttta

SEQ ID NO: 927126 - DNA, 33 bp, Homo sapien
acttgctaagtgtccactgagttcatgtcttta

SEQ ID NO: 927127 - DNA, 33 bp, Homo sapien
ccagccctctctttggcaaacattgtgtagaca

SEQ ID NO: 927128 - DNA, 33 bp, Homo sapien
ccagccctctctttgggaaacattgtgtagaca

SEQ ID NO: 927129 - DNA, 33 bp, Homo sapien
tgtcacctacaagacaatctaaaggagagcatt

SEQ ID NO: 927130 - DNA, 33 bp, Homo sapien
tgtcacctacaagacagtctaaaggagagcatt

SEQ ID NO: 927131 - DNA, 33 bp, Homo sapien
tgtttcagtgtctcaacttccttttcactagct

SEQ ID NO: 927132 - DNA, 33 bp, Homo sapien
tgtttcagtgtctcaatttccttttcactagct

SEQ ID NO: 927133 - DNA, 33 bp, Homo sapien
agtatactgctatcctcaaattttcaggcctct

SEQ ID NO: 927134 - DNA, 33 bp, Homo sapien
agtatactgctatccttaaattttcaggcctct

SEQ ID NO: 927135 - DNA, 33 bp, Homo sapien
tgctaccctctgcttccataagtttgactgcat

SEQ ID NO: 927136 - DNA, 33 bp, Homo sapien
tgctaccctctgcttctataagtttgactgcat

SEQ ID NO: 927137 - DNA, 33 bp, Homo sapien
atatctgctgaagatcaacttcctatttcttcc

SEQ ID NO: 927138 - DNA, 33 bp, Homo sapien
atatctgctgaagatcgacttcctatttcttcc

SEQ ID NO: 927139 - DNA, 33 bp, Homo sapien
cagtaccgtattgtacactaaaaattttgttaa

SEQ ID NO: 927140 - DNA, 33 bp, Homo sapien
cagtaccgtattgtacgctaaaaattttgttaa

SEQ ID NO: 927141 - DNA, 33 bp, Homo sapien
ggaacagatgggtgtaagaagtgaagtagaaac

SEQ ID NO: 927142 - DNA, 33 bp, Homo sapien
ggaacagatgggtgtaggaagtgaagtagaaac

SEQ ID NO: 927143 - DNA, 33 bp, Homo sapien
acactgttgtattggacagtaagtttccagcat

SEQ ID NO: 927144 - DNA, 33 bp, Homo sapien
acactgttgtattggatagtaagtttccagcat

SEQ ID NO: 927145 - DNA, 33 bp, Homo sapien
ccatcttgttaccaaagcacaaaatcttttgaa

SEQ ID NO: 927146 - DNA, 33 bp, Homo sapien
ccatcttgttaccaaatcacaaaatcttttgaa

SEQ ID NO: 927147 - DNA, 33 bp, Homo sapien
gattgttttttaattacgccaagtgacataaac

SEQ ID NO: 927148 - DNA, 33 bp, Homo sapien
gattgttttttaattatgccaagtgacataaac

SEQ ID NO: 927149 - DNA, 33 bp, Homo sapien
cggcacgggtccgcacaactgtatgtgcatctg

SEQ ID NO: 927150 - DNA, 33 bp, Homo sapien
cggcacgggtccgcacgactgtatgtgcatctg

SEQ ID NO: 927151 - DNA, 33 bp, Homo sapien
ctgtctattctgcccactctgtctgatctgcct

SEQ ID NO: 927152 - DNA, 33 bp, Homo sapien
ctgtctattctgcccattctgtctgatctgcct

SEQ ID NO: 927153 - DNA, 33 bp, Homo sapien
gatcactgtaatagccacctaataggtttgctt

SEQ ID NO: 927154 - DNA, 33 bp, Homo sapien
gatcactgtaatagcctcctaataggtttgctt

SEQ ID NO: 927155 - DNA, 33 bp, Homo sapien
aagtattatgcttgcaacatggttgagaagaaa

SEQ ID NO: 927156 - DNA, 33 bp, Homo sapien
aagtattatgcttgcagcatggttgagaagaaa

SEQ ID NO: 927157 - DNA, 33 bp, Homo sapien
aggctgaagttctggcagatcacgggaagatca

SEQ ID NO: 927158 - DNA, 33 bp, Homo sapien
aggctgaagttctggcggatcacgggaagatca

SEQ ID NO: 927159 - DNA, 33 bp, Homo sapien
cagcattagttaccataacatctagtttgatgt

SEQ ID NO: 927160 - DNA, 33 bp, Homo sapien
cagcattagttaccatgacatctagtttgatgt

SEQ ID NO: 927161 - DNA, 33 bp, Homo sapien
aatgagtgtctcatcactaaaaatattgaagtc

SEQ ID NO: 927162 - DNA, 33 bp, Homo sapien
aatgagtgtctcatcattaaaaatattgaagtc

SEQ ID NO: 927163 - DNA, 33 bp, Homo sapien
tgatttgagtcttgaacctttgtaggaaaggta

SEQ ID NO: 927164 - DNA, 33 bp, Homo sapien
tgatttgagtcttgaatctttgtaggaaaggta

SEQ ID NO: 927165 - DNA, 33 bp, Homo sapien
cctccattccttcgacaccaccattttaaaggg

SEQ ID NO: 927166 - DNA, 33 bp, Homo sapien
cctccattccttcgacgccaccattttaaaggg

SEQ ID NO: 927167 - DNA, 33 bp, Homo sapien
gctattagtgcactataaaagtgggaaagaact

SEQ ID NO: 927168 - DNA, 33 bp, Homo sapien
gctattagtgcactatgaaagtgggaaagaact

SEQ ID NO: 927169 - DNA, 33 bp, Homo sapien
aggttcctgcaaagtaagaagacaactaaatta

SEQ ID NO: 927170 - DNA, 33 bp, Homo sapien
aggttcctgcaaagtaggaagacaactaaatta

SEQ ID NO: 927171 - DNA, 33 bp, Homo sapien
tgtattagtcaaaggcgccatacaactgagatt

SEQ ID NO: 927172 - DNA, 33 bp, Homo sapien
tgtattagtcaaaggctccatacaactgagatt

SEQ ID NO: 927173 - DNA, 33 bp, Homo sapien
atctccttagtatctaccaatgtcctataggca

SEQ ID NO: 927174 - DNA, 33 bp, Homo sapien
atctccttagtatctagcaatgtcctataggca

SEQ ID NO: 927175 - DNA, 33 bp, Homo sapien
catccttctgggtcaacagatataaacagaatt

SEQ ID NO: 927176 - DNA, 33 bp, Homo sapien
catccttctgggtcaatagatataaacagaatt

SEQ ID NO: 927177 - DNA, 33 bp, Homo sapien
attgtagcagctaaggcagtcttggaaatatag

SEQ ID NO: 927178 - DNA, 33 bp, Homo sapien
attgtagcagctaaggtagtcttggaaatatag

SEQ ID NO: 927179 - DNA, 33 bp, Homo sapien
tttgttgaaggcataactgcatacttaaaattg

SEQ ID NO: 927180 - DNA, 33 bp, Homo sapien
tttgttgaaggcataattgcatacttaaaattg

SEQ ID NO: 927181 - DNA, 33 bp, Homo sapien
ctttctttccacttcaacattctctctgttaca

SEQ ID NO: 927182 - DNA, 33 bp, Homo sapien
ctttctttccacttcagcattctctctgttaca

SEQ ID NO: 927183 - DNA, 33 bp, Homo sapien
agtcatcgagtcactcactggattggttataag

SEQ ID NO: 927184 - DNA, 33 bp, Homo sapien
agtcatcgagtcactccctggattggttataag

SEQ ID NO: 927185 - DNA, 33 bp, Homo sapien
ttttgttcagagactacctgtcaagttctggac

SEQ ID NO: 927186 - DNA, 33 bp, Homo sapien
ttttgttcagagactatctgtcaagttctggac

SEQ ID NO: 927187 - DNA, 33 bp, Homo sapien
cttggaactggcagaaagaacgaagaactatgc

SEQ ID NO: 927188 - DNA, 33 bp, Homo sapien
cttggaactggcagaaggaacgaagaactatgc

SEQ ID NO: 927189 - DNA, 33 bp, Homo sapien
acaagtgtaatgaaaacaattctggtactggtg

SEQ ID NO: 927190 - DNA, 33 bp, Homo sapien
acaagtgtaatgaaaataattctggtactggtg

SEQ ID NO: 927191 - DNA, 33 bp, Homo sapien
aaattcaaaatgcctagtaaaaagagtaagttg

SEQ ID NO: 927192 - DNA, 33 bp, Homo sapien
aaattcaaaatgcctattaaaaagagtaagttg

SEQ ID NO: 927193 - DNA, 33 bp, Homo sapien
agattcctgccttagaatccttaactgtccctt

SEQ ID NO: 927194 - DNA, 33 bp, Homo sapien
agattcctgccttagagtccttaactgtccctt

SEQ ID NO: 927195 - DNA, 33 bp, Homo sapien
ctttcctcattcgtgaaataaggatactaatgt

SEQ ID NO: 927196 - DNA, 33 bp, Homo sapien
ctttcctcattcgtgatataaggatactaatgt

SEQ ID NO: 927197 - DNA, 33 bp, Homo sapien
atgtatcaggctatccagctatttcatttctta

SEQ ID NO: 927198 - DNA, 33 bp, Homo sapien
atgtatcaggctatccggctatttcatttctta

SEQ ID NO: 927199 - DNA, 33 bp, Homo sapien
gtgaggagcaaggtacagggaagaagcaagaaa

SEQ ID NO: 927200 - DNA, 33 bp, Homo sapien
gtgaggagcaaggtacggggaagaagcaagaaa

SEQ ID NO: 927201 - DNA, 33 bp, Homo sapien
gagttcatcagattccaaaatcttagcatctat

SEQ ID NO: 927202 - DNA, 33 bp, Homo sapien
gagttcatcagattccgaaatcttagcatctat

SEQ ID NO: 927203 - DNA, 33 bp, Homo sapien
gagagtgaatagccataagggtaataagagtaa

SEQ ID NO: 927204 - DNA, 33 bp, Homo sapien
gagagtgaatagccatgagggtaataagagtaa

SEQ ID NO: 927205 - DNA, 33 bp, Homo sapien
atcaccccataaacggaagataatattgttact

SEQ ID NO: 927206 - DNA, 33 bp, Homo sapien
atcaccccataaacgggagataatattgttact

SEQ ID NO: 927207 - DNA, 33 bp, Homo sapien
aggcagtcatatatccaaagcagttcatgtcat

SEQ ID NO: 927208 - DNA, 33 bp, Homo sapien
aggcagtcatatatccgaagcagttcatgtcat

SEQ ID NO: 927209 - DNA, 33 bp, Homo sapien
tctgcttacaacaaacaaaacagaagcgctgaa

SEQ ID NO: 927210 - DNA, 33 bp, Homo sapien
tctgcttacaacaaacgaaacagaagcgctgaa

SEQ ID NO: 927211 - DNA, 33 bp, Homo sapien
cttaggagatgacaaaatgggtaatttctatct

SEQ ID NO: 927212 - DNA, 33 bp, Homo sapien
cttaggagatgacaaagtgggtaatttctatct

SEQ ID NO: 927213 - DNA, 33 bp, Homo sapien
tgtctacttgcggtgaaatacagccccaattac

SEQ ID NO: 927214 - DNA, 33 bp, Homo sapien
tgtctacttgcggtgagatacagccccaattac

SEQ ID NO: 927215 - DNA, 33 bp, Homo sapien
ggtaatctgtttgcctaaaaggaatgaaaaaga

SEQ ID NO: 927216 - DNA, 33 bp, Homo sapien
ggtaatctgtttgcctgaaaggaatgaaaaaga

SEQ ID NO: 927217 - DNA, 33 bp, Homo sapien
tgaggaaccctttcaccgatggcttttaaagta

SEQ ID NO: 927218 - DNA, 33 bp, Homo sapien
tgaggaaccctttcactgatggcttttaaagta

SEQ ID NO: 927219 - DNA, 33 bp, Homo sapien
gggataagaaacatgaagaaatttatccagagg

SEQ ID NO: 927220 - DNA, 33 bp, Homo sapien
gggataagaaacatgaggaaatttatccagagg

SEQ ID NO: 927221 - DNA, 33 bp, Homo sapien
tcatacaaagtacctccagtaatgctgaaaatg

SEQ ID NO: 927222 - DNA, 33 bp, Homo sapien
tcatacaaagtacctctagtaatgctgaaaatg

SEQ ID NO: 927223 - DNA, 33 bp, Homo sapien
atgggggactccagcacaagtggagtaaacggt

SEQ ID NO: 927224 - DNA, 33 bp, Homo sapien
atgggggactccagcagaagtggagtaaacggt

SEQ ID NO: 927225 - DNA, 33 bp, Homo sapien
caaagcctgaataagtaaaaaataaattggatt

SEQ ID NO: 927226 - DNA, 33 bp, Homo sapien
caaagcctgaataagtcaaaaataaattggatt

SEQ ID NO: 927227 - DNA, 33 bp, Homo sapien
ttgagtttaacactaacaggttcccaccactac

SEQ ID NO: 927228 - DNA, 33 bp, Homo sapien
ttgagtttaacactaagaggttcccaccactac

SEQ ID NO: 927229 - DNA, 33 bp, Homo sapien
cttcggaaatttcaaacagtagctacaatgtta

SEQ ID NO: 927230 - DNA, 33 bp, Homo sapien
cttcggaaatttcaaagagtagctacaatgtta

SEQ ID NO: 927231 - DNA, 33 bp, Homo sapien
cagatgctttcttagacgctaagagccataaaa

SEQ ID NO: 927232 - DNA, 33 bp, Homo sapien
cagatgctttcttagatgctaagagccataaaa

SEQ ID NO: 927233 - DNA, 33 bp, Homo sapien
tttggtctctgtaccacgtccccaaatcccatt

SEQ ID NO: 927234 - DNA, 33 bp, Homo sapien
tttggtctctgtaccatgtccccaaatcccatt

SEQ ID NO: 927235 - DNA, 33 bp, Homo sapien
catttcttctaagtcaatattccatattccata

SEQ ID NO: 927236 - DNA, 33 bp, Homo sapien
catttcttctaagtcagtattccatattccata

SEQ ID NO: 927237 - DNA, 33 bp, Homo sapien
gtgctccaggtcagtacgccaaaggcctcatgt

SEQ ID NO: 927238 - DNA, 33 bp, Homo sapien
gtgctccaggtcagtatgccaaaggcctcatgt

SEQ ID NO: 927239 - DNA, 33 bp, Homo sapien
cctaccatgaccttaacaatagtgataaaacat

SEQ ID NO: 927240 - DNA, 33 bp, Homo sapien
cctaccatgaccttaataatagtgataaaacat

SEQ ID NO: 927241 - DNA, 33 bp, Homo sapien
tgggttggggaatccacgccatttaaaatggaa

SEQ ID NO: 927242 - DNA, 33 bp, Homo sapien
tgggttggggaatccatgccatttaaaatggaa

SEQ ID NO: 927243 - DNA, 33 bp, Homo sapien
agtgagggagagagacaagagtaatatacaaca

SEQ ID NO: 927244 - DNA, 33 bp, Homo sapien
agtgagggagagagacgagagtaatatacaaca

SEQ ID NO: 927245 - DNA, 33 bp, Homo sapien
ttggaaaatatgtaaaagcgtattaaaggcagg

SEQ ID NO: 927246 - DNA, 33 bp, Homo sapien
ttggaaaatatgtaaaggcgtattaaaggcagg

SEQ ID NO: 927247 - DNA, 33 bp, Homo sapien
tacaaagatgattcaactaggctataatatatt

SEQ ID NO: 927248 - DNA, 33 bp, Homo sapien
tacaaagatgattcaattaggctataatatatt

SEQ ID NO: 927249 - DNA, 33 bp, Homo sapien
ggaggaagagagggaggcaaagaaggaggaaag

SEQ ID NO: 927250 - DNA, 33 bp, Homo sapien
ggaggaagagagggagtcaaagaaggaggaaag

SEQ ID NO: 927251 - DNA, 33 bp, Homo sapien
gttgcaagcagtcagaaggtacaatggaggctg

SEQ ID NO: 927252 - DNA, 33 bp, Homo sapien
gttgcaagcagtcagatggtacaatggaggctg

SEQ ID NO: 927253 - DNA, 33 bp, Homo sapien
gctccctgattacaaacgctaaagagcacttgt

SEQ ID NO: 927254 - DNA, 33 bp, Homo sapien
gctccctgattacaaatgctaaagagcacttgt

SEQ ID NO: 927255 - DNA, 33 bp, Homo sapien
atcctccttggaaataagaaaacctgaaattag

SEQ ID NO: 927256 - DNA, 33 bp, Homo sapien
atcctccttggaaatacgaaaacctgaaattag

SEQ ID NO: 927257 - DNA, 33 bp, Homo sapien
accatggccccagttaaaaaataaggtgtagtg

SEQ ID NO: 927258 - DNA, 33 bp, Homo sapien
accatggccccagttataaaataaggtgtagtg

SEQ ID NO: 927259 - DNA, 33 bp, Homo sapien
agagcctgaaccgatacggctgtgttgggttct

SEQ ID NO: 927260 - DNA, 33 bp, Homo sapien
agagcctgaaccgatatggctgtgttgggttct

SEQ ID NO: 927261 - DNA, 33 bp, Homo sapien
aaattgtgggaattacaggaggacagtcaataa

SEQ ID NO: 927262 - DNA, 33 bp, Homo sapien
aaattgtgggaattacgggaggacagtcaataa

SEQ ID NO: 927263 - DNA, 33 bp, Homo sapien
acaatttttaaagagcaaatgcttgtagatcac

SEQ ID NO: 927264 - DNA, 33 bp, Homo sapien
acaatttttaaagagcgaatgcttgtagatcac

SEQ ID NO: 927265 - DNA, 33 bp, Homo sapien
ataaacttatagcagaacagacaattcataatt

SEQ ID NO: 927266 - DNA, 33 bp, Homo sapien
ataaacttatagcagaccagacaattcataatt

SEQ ID NO: 927267 - DNA, 33 bp, Homo sapien
aagagatgacacttaaaaccaaaaaagagctgt

SEQ ID NO: 927268 - DNA, 33 bp, Homo sapien
aagagatgacacttaagaccaaaaaagagctgt

SEQ ID NO: 927269 - DNA, 33 bp, Homo sapien
aatgggccagattatgcaggcttcaaattttca

SEQ ID NO: 927270 - DNA, 33 bp, Homo sapien
aatgggccagattatggaggcttcaaattttca

SEQ ID NO: 927271 - DNA, 33 bp, Homo sapien
gtagacatagatggtacctgagccagtgcagaa

SEQ ID NO: 927272 - DNA, 33 bp, Homo sapien
gtagacatagatggtatctgagccagtgcagaa

SEQ ID NO: 927273 - DNA, 33 bp, Homo sapien
taaaaagagcaaaatcacatcctttgcagaaac

SEQ ID NO: 927274 - DNA, 33 bp, Homo sapien
taaaaagagcaaaatcgcatcctttgcagaaac

SEQ ID NO: 927275 - DNA, 33 bp, Homo sapien
agctaaacattaagcaaacatggacataaacat

SEQ ID NO: 927276 - DNA, 33 bp, Homo sapien
agctaaacattaagcagacatggacataaacat

SEQ ID NO: 927277 - DNA, 33 bp, Homo sapien
cttctcaaaatagaagacctttcaggcatcaca

SEQ ID NO: 927278 - DNA, 33 bp, Homo sapien
cttctcaaaatagaagtcctttcaggcatcaca

SEQ ID NO: 927279 - DNA, 33 bp, Homo sapien
ttttaaaattgttacactagtctgtcttgcatc

SEQ ID NO: 927280 - DNA, 33 bp, Homo sapien
ttttaaaattgttacattagtctgtcttgcatc

SEQ ID NO: 927281 - DNA, 33 bp, Homo sapien
aacttctgttttaaaaagcctagattatcataa

SEQ ID NO: 927282 - DNA, 33 bp, Homo sapien
aacttctgttttaaaaggcctagattatcataa

SEQ ID NO: 927283 - DNA, 33 bp, Homo sapien
gtttaaactctttccacggtgagcgtatccaag

SEQ ID NO: 927284 - DNA, 33 bp, Homo sapien
gtttaaactctttccatggtgagcgtatccaag

SEQ ID NO: 927285 - DNA, 33 bp, Homo sapien
caaacctcacaattctaaagattaaaagtgagg

SEQ ID NO: 927286 - DNA, 33 bp, Homo sapien
caaacctcacaattctgaagattaaaagtgagg

SEQ ID NO: 927287 - DNA, 33 bp, Homo sapien
tgttaagatgcttaaacgagaaataaagagcat

SEQ ID NO: 927288 - DNA, 33 bp, Homo sapien
tgttaagatgcttaaatgagaaataaagagcat

SEQ ID NO: 927289 - DNA, 33 bp, Homo sapien
caggtggcagtcataaagtttaacacaatatct

SEQ ID NO: 927290 - DNA, 33 bp, Homo sapien
caggtggcagtcataatgtttaacacaatatct

SEQ ID NO: 927291 - DNA, 33 bp, Homo sapien
aaagattgatgagcaccatcaaagttcaggtgg

SEQ ID NO: 927292 - DNA, 33 bp, Homo sapien
aaagattgatgagcacgatcaaagttcaggtgg

SEQ ID NO: 927293 - DNA, 33 bp, Homo sapien
taactccaagtagaagcagcagggatttatttc

SEQ ID NO: 927294 - DNA, 33 bp, Homo sapien
taactccaagtagaagtagcagggatttatttc

SEQ ID NO: 927295 - DNA, 33 bp, Homo sapien
gagttaattaaaatgccattccaattgtaatcg

SEQ ID NO: 927296 - DNA, 33 bp, Homo sapien
gagttaattaaaatgctattccaattgtaatcg

SEQ ID NO: 927297 - DNA, 33 bp, Homo sapien
atttgcatctgtaagcacttatcatatacaaaa

SEQ ID NO: 927298 - DNA, 33 bp, Homo sapien
atttgcatctgtaagcgcttatcatatacaaaa

SEQ ID NO: 927299 - DNA, 33 bp, Homo sapien
ctgtattggtttcctcaagctgccatagcaaag

SEQ ID NO: 927300 - DNA, 33 bp, Homo sapien
ctgtattggtttcctcgagctgccatagcaaag

SEQ ID NO: 927301 - DNA, 33 bp, Homo sapien
gctaataaaagaaaaaatcggctcctcagtcat

SEQ ID NO: 927302 - DNA, 33 bp, Homo sapien
gctaataaaagaaaaagtcggctcctcagtcat

SEQ ID NO: 927303 - DNA, 33 bp, Homo sapien
tgttattatttgtgtgcaatattgtctcattag

SEQ ID NO: 927304 - DNA, 33 bp, Homo sapien
tgttattatttgtgtgtaatattgtctcattag

SEQ ID NO: 927305 - DNA, 33 bp, Homo sapien
atgctaactttgcttacaaattgccatgggaca

SEQ ID NO: 927306 - DNA, 33 bp, Homo sapien
atgctaactttgcttataaattgccatgggaca

SEQ ID NO: 927307 - DNA, 33 bp, Homo sapien
tttgaaggaagaaacactactccaaagttcatc

SEQ ID NO: 927308 - DNA, 33 bp, Homo sapien
tttgaaggaagaaacagtactccaaagttcatc

SEQ ID NO: 927309 - DNA, 33 bp, Homo sapien
agtccgcccagtaataagaacttttgtaaatat

SEQ ID NO: 927310 - DNA, 33 bp, Homo sapien
agtccgcccagtaataggaacttttgtaaatat

SEQ ID NO: 927311 - DNA, 33 bp, Homo sapien
ctgtaacaagaataaacagtattgaaatgtcta

SEQ ID NO: 927312 - DNA, 33 bp, Homo sapien
ctgtaacaagaataaatagtattgaaatgtcta

SEQ ID NO: 927313 - DNA, 33 bp, Homo sapien
ttgaagggcagtcaggcattcttatttttgtac

SEQ ID NO: 927314 - DNA, 33 bp, Homo sapien
ttgaagggcagtcaggtattcttatttttgtac

SEQ ID NO: 927315 - DNA, 33 bp, Homo sapien
cttaggaatgcttacactggttattctggtctt

SEQ ID NO: 927316 - DNA, 33 bp, Homo sapien
cttaggaatgcttacattggttattctggtctt

SEQ ID NO: 927317 - DNA, 33 bp, Homo sapien
ttcttttgctggcactaacttaatcacctcaat

SEQ ID NO: 927318 - DNA, 33 bp, Homo sapien
ttcttttgctggcactgacttaatcacctcaat

SEQ ID NO: 927319 - DNA, 33 bp, Homo sapien
aagtcttgcaaaaaaagttaggaatattataca

SEQ ID NO: 927320 - DNA, 33 bp, Homo sapien
aagtcttgcaaaaaaatttaggaatattataca

SEQ ID NO: 927321 - DNA, 33 bp, Homo sapien
atcctaattgtaattaccacctgtctgtatcag

SEQ ID NO: 927322 - DNA, 33 bp, Homo sapien
atcctaattgtaattatcacctgtctgtatcag

SEQ ID NO: 927323 - DNA, 33 bp, Homo sapien
tgcaagtgccttattacgcatcagtaaaacagg

SEQ ID NO: 927324 - DNA, 33 bp, Homo sapien
tgcaagtgccttattatgcatcagtaaaacagg

SEQ ID NO: 927325 - DNA, 33 bp, Homo sapien
aataggatttctgccacgatgaaaatgctctct

SEQ ID NO: 927326 - DNA, 33 bp, Homo sapien
aataggatttctgccatgatgaaaatgctctct

SEQ ID NO: 927327 - DNA, 33 bp, Homo sapien
gggatgagtttagaaacaggtttgttgggagat

SEQ ID NO: 927328 - DNA, 33 bp, Homo sapien
gggatgagtttagaaataggtttgttgggagat

SEQ ID NO: 927329 - DNA, 33 bp, Homo sapien
gaagggaatgaacaaccgcttaatgaatatggg

SEQ ID NO: 927330 - DNA, 33 bp, Homo sapien
gaagggaatgaacaactgcttaatgaatatggg

SEQ ID NO: 927331 - DNA, 33 bp, Homo sapien
atgagggatcctggcggcaatagaatagctctg

SEQ ID NO: 927332 - DNA, 33 bp, Homo sapien
atgagggatcctggcgtcaatagaatagctctg

SEQ ID NO: 927333 - DNA, 33 bp, Homo sapien
gtcaagccgggccccgaagagattaggacgctt

SEQ ID NO: 927334 - DNA, 33 bp, Homo sapien
gtcaagccgggccccgcagagattaggacgctt

SEQ ID NO: 927335 - DNA, 33 bp, Homo sapien
cctggaactaatccaagcccatcagaaccaatc

SEQ ID NO: 927336 - DNA, 33 bp, Homo sapien
cctggaactaatccaatcccatcagaaccaatc

SEQ ID NO: 927337 - DNA, 33 bp, Homo sapien
aggaagtagcagataactgtggtaaaatgaact

SEQ ID NO: 927338 - DNA, 33 bp, Homo sapien
aggaagtagcagataattgtggtaaaatgaact

SEQ ID NO: 927339 - DNA, 33 bp, Homo sapien
tactctgttgtagcaaacttagcatactaacaa

SEQ ID NO: 927340 - DNA, 33 bp, Homo sapien
tactctgttgtagcaaccttagcatactaacaa

SEQ ID NO: 927341 - DNA, 33 bp, Homo sapien
tgtggcttgggttacacgtgagatcttgtagga

SEQ ID NO: 927342 - DNA, 33 bp, Homo sapien
tgtggcttgggttacatgtgagatcttgtagga

SEQ ID NO: 927343 - DNA, 33 bp, Homo sapien
catttacttctgtaaacttgaaaggacttcttc

SEQ ID NO: 927344 - DNA, 33 bp, Homo sapien
catttacttctgtaaatttgaaaggacttcttc

SEQ ID NO: 927345 - DNA, 33 bp, Homo sapien
aattggattagttaaacaagtttatggtgattg

SEQ ID NO: 927346 - DNA, 33 bp, Homo sapien
aattggattagttaaagaagtttatggtgattg

SEQ ID NO: 927347 - DNA, 33 bp, Homo sapien
agaagccaagagaagcacaaatgagggagaaag

SEQ ID NO: 927348 - DNA, 33 bp, Homo sapien
agaagccaagagaagcgcaaatgagggagaaag

SEQ ID NO: 927349 - DNA, 33 bp, Homo sapien
gcaggtaaggagcacacggttgaatctcagaga

SEQ ID NO: 927350 - DNA, 33 bp, Homo sapien
gcaggtaaggagcacatggttgaatctcagaga

SEQ ID NO: 927351 - DNA, 33 bp, Homo sapien
atttgtttctccatgaacaatggcctcagccac

SEQ ID NO: 927352 - DNA, 33 bp, Homo sapien
atttgtttctccatgagcaatggcctcagccac

SEQ ID NO: 927353 - DNA, 33 bp, Homo sapien
caagtataggaagataatagaccaacaggttat

SEQ ID NO: 927354 - DNA, 33 bp, Homo sapien
caagtataggaagatagtagaccaacaggttat

SEQ ID NO: 927355 - DNA, 33 bp, Homo sapien
aaacaacctcttcagcactattactttttttaa

SEQ ID NO: 927356 - DNA, 33 bp, Homo sapien
aaacaacctcttcagcgctattactttttttaa

SEQ ID NO: 927357 - DNA, 33 bp, Homo sapien
tatgactctctttggcaacaatgcatttgtagg

SEQ ID NO: 927358 - DNA, 33 bp, Homo sapien
tatgactctctttggcgacaatgcatttgtagg

SEQ ID NO: 927359 - DNA, 33 bp, Homo sapien
tggctctttcaaaacaaacctgaatataattgg

SEQ ID NO: 927360 - DNA, 33 bp, Homo sapien
tggctctttcaaaacatacctgaatataattgg

SEQ ID NO: 927361 - DNA, 33 bp, Homo sapien
atgaaaggtttgagaaataaaattttgtggcta

SEQ ID NO: 927362 - DNA, 33 bp, Homo sapien
atgaaaggtttgagaagtaaaattttgtggcta

SEQ ID NO: 927363 - DNA, 33 bp, Homo sapien
agccacatgtgactaccgagtattggaaacagc

SEQ ID NO: 927364 - DNA, 33 bp, Homo sapien
agccacatgtgactactgagtattggaaacagc

SEQ ID NO: 927365 - DNA, 33 bp, Homo sapien
aaggatggtccaaagagtatgccactagccata

SEQ ID NO: 927366 - DNA, 33 bp, Homo sapien
aaggatggtccaaagattatgccactagccata

SEQ ID NO: 927367 - DNA, 33 bp, Homo sapien
ataaggcttcagttggcaattaaaagagaataa

SEQ ID NO: 927368 - DNA, 33 bp, Homo sapien
ataaggcttcagttggtaattaaaagagaataa

SEQ ID NO: 927369 - DNA, 33 bp, Homo sapien
ttgaaagggttggctgaacaccaaaaaggagct

SEQ ID NO: 927370 - DNA, 33 bp, Homo sapien
ttgaaagggttggctggacaccaaaaaggagct

SEQ ID NO: 927371 - DNA, 33 bp, Homo sapien
gaaggctgtcaccaccacatttggttacgctcc

SEQ ID NO: 927372 - DNA, 33 bp, Homo sapien
gaaggctgtcaccaccgcatttggttacgctcc

SEQ ID NO: 927373 - DNA, 33 bp, Homo sapien
gaagtggtgtgtacaacatacttttcctgtgaa

SEQ ID NO: 927374 - DNA, 33 bp, Homo sapien
gaagtggtgtgtacaatatacttttcctgtgaa

SEQ ID NO: 927375 - DNA, 33 bp, Homo sapien
aacatcaagtaacaccggggttattatacgagt

SEQ ID NO: 927376 - DNA, 33 bp, Homo sapien
aacatcaagtaacacctgggttattatacgagt

SEQ ID NO: 927377 - DNA, 33 bp, Homo sapien
catgtgaaagaaacaccagaaagtttaaagtgg

SEQ ID NO: 927378 - DNA, 33 bp, Homo sapien
catgtgaaagaaacacgagaaagtttaaagtgg

SEQ ID NO: 927379 - DNA, 33 bp, Homo sapien
tctagctttcaaagggccaaatttctagtcttc

SEQ ID NO: 927380 - DNA, 33 bp, Homo sapien
tctagctttcaaagggtcaaatttctagtcttc

SEQ ID NO: 927381 - DNA, 33 bp, Homo sapien
cctttgaaagctagataacagtaaaacaatgtc

SEQ ID NO: 927382 - DNA, 33 bp, Homo sapien
cctttgaaagctagatgacagtaaaacaatgtc

SEQ ID NO: 927383 - DNA, 33 bp, Homo sapien
catgggtaagcctcagccaaccttttgtgggtc

SEQ ID NO: 927384 - DNA, 33 bp, Homo sapien
catgggtaagcctcagtcaaccttttgtgggtc

SEQ ID NO: 927385 - DNA, 33 bp, Homo sapien
gtcatgagaaggattgaattgaaaaggagaggc

SEQ ID NO: 927386 - DNA, 33 bp, Homo sapien
gtcatgagaaggattggattgaaaaggagaggc

SEQ ID NO: 927387 - DNA, 33 bp, Homo sapien
attctaaccttttgtaactaagctggcaaattt

SEQ ID NO: 927388 - DNA, 33 bp, Homo sapien
attctaaccttttgtagctaagctggcaaattt

SEQ ID NO: 927389 - DNA, 33 bp, Homo sapien
tcatggtgagagtgacagtaagggcagcagttt

SEQ ID NO: 927390 - DNA, 33 bp, Homo sapien
tcatggtgagagtgacggtaagggcagcagttt

SEQ ID NO: 927391 - DNA, 33 bp, Homo sapien
tgaaattgagaaggccaaagcttagtccttttt

SEQ ID NO: 927392 - DNA, 33 bp, Homo sapien
tgaaattgagaaggccgaagcttagtccttttt

SEQ ID NO: 927393 - DNA, 33 bp, Homo sapien
gtgaaacacaaaaacactgagaatggagtaaaa

SEQ ID NO: 927394 - DNA, 33 bp, Homo sapien
gtgaaacacaaaaacagtgagaatggagtaaaa

SEQ ID NO: 927395 - DNA, 33 bp, Homo sapien
aaaacaagagcaagtacgtctctgggcaaagtt

SEQ ID NO: 927396 - DNA, 33 bp, Homo sapien
aaaacaagagcaagtaggtctctgggcaaagtt

SEQ ID NO: 927397 - DNA, 33 bp, Homo sapien
tgtaatacagataagacggaattgaggtggaga

SEQ ID NO: 927398 - DNA, 33 bp, Homo sapien
tgtaatacagataagatggaattgaggtggaga

SEQ ID NO: 927399 - DNA, 33 bp, Homo sapien
ccactatctccaattccactttccttccatcac

SEQ ID NO: 927400 - DNA, 33 bp, Homo sapien
ccactatctccaattctactttccttccatcac

SEQ ID NO: 927401 - DNA, 33 bp, Homo sapien
tctaataagaaaagtaagtcaggctcttagatg

SEQ ID NO: 927402 - DNA, 33 bp, Homo sapien
tctaataagaaaagtatgtcaggctcttagatg

SEQ ID NO: 927403 - DNA, 33 bp, Homo sapien
aattgcatgctttatgccacatttctccaaaaa

SEQ ID NO: 927404 - DNA, 33 bp, Homo sapien
aattgcatgctttatgtcacatttctccaaaaa

SEQ ID NO: 927405 - DNA, 33 bp, Homo sapien
ccttgtactctaccagacggaccactcctaccc

SEQ ID NO: 927406 - DNA, 33 bp, Homo sapien
ccttgtactctaccaggcggaccactcctaccc

SEQ ID NO: 927407 - DNA, 33 bp, Homo sapien
ttgtctgggaaaatagaatagtccttgacatga

SEQ ID NO: 927408 - DNA, 33 bp, Homo sapien
ttgtctgggaaaataggatagtccttgacatga

SEQ ID NO: 927409 - DNA, 33 bp, Homo sapien
tacttaagtataaagacgaaaggtactcttccc

SEQ ID NO: 927410 - DNA, 33 bp, Homo sapien
tacttaagtataaagatgaaaggtactcttccc

SEQ ID NO: 927411 - DNA, 33 bp, Homo sapien
caaaagaactattccaaatattatcatgatagc

SEQ ID NO: 927412 - DNA, 33 bp, Homo sapien
caaaagaactattccagatattatcatgatagc

SEQ ID NO: 927413 - DNA, 33 bp, Homo sapien
tgtgtagaggaggggacctcacttcatgcctga

SEQ ID NO: 927414 - DNA, 33 bp, Homo sapien
tgtgtagaggaggggatctcacttcatgcctga

SEQ ID NO: 927415 - DNA, 33 bp, Homo sapien
ttaactaatactgaacaccttttgtttatcctt

SEQ ID NO: 927416 - DNA, 33 bp, Homo sapien
ttaactaatactgaactccttttgtttatcctt

SEQ ID NO: 927417 - DNA, 33 bp, Homo sapien
tcagtggagaccagaacattttgggtaaagttc

SEQ ID NO: 927418 - DNA, 33 bp, Homo sapien
tcagtggagaccagaagattttgggtaaagttc

SEQ ID NO: 927419 - DNA, 33 bp, Homo sapien
actgcaagatgactgcccttgttaaattcacta

SEQ ID NO: 927420 - DNA, 33 bp, Homo sapien
actgcaagatgactgctcttgttaaattcacta

SEQ ID NO: 927421 - DNA, 33 bp, Homo sapien
tgtcacttatattccacagtctgaagattctct

SEQ ID NO: 927422 - DNA, 33 bp, Homo sapien
tgtcacttatattccatagtctgaagattctct

SEQ ID NO: 927423 - DNA, 33 bp, Homo sapien
aattaagtaaccaaaacctgcgaaattcgtttg

SEQ ID NO: 927424 - DNA, 33 bp, Homo sapien
aattaagtaaccaaaagctgcgaaattcgtttg

SEQ ID NO: 927425 - DNA, 33 bp, Homo sapien
caggcattgaaaacacagacattaatgcaatat

SEQ ID NO: 927426 - DNA, 33 bp, Homo sapien
caggcattgaaaacacggacattaatgcaatat

SEQ ID NO: 927427 - DNA, 33 bp, Homo sapien
taaatgccttttgatacaggttgcttccatgat

SEQ ID NO: 927428 - DNA, 33 bp, Homo sapien
taaatgccttttgatataggttgcttccatgat

SEQ ID NO: 927429 - DNA, 33 bp, Homo sapien
ctgccagaggaggtacggctatctaaacaaaaa

SEQ ID NO: 927430 - DNA, 33 bp, Homo sapien
ctgccagaggaggtactgctatctaaacaaaaa

SEQ ID NO: 927431 - DNA, 33 bp, Homo sapien
ctacactggtggaacaactattataaaaatgtt

SEQ ID NO: 927432 - DNA, 33 bp, Homo sapien
ctacactggtggaacagctattataaaaatgtt

SEQ ID NO: 927433 - DNA, 33 bp, Homo sapien
aagatgtaaggtcataaaaaatttatcattaga

SEQ ID NO: 927434 - DNA, 33 bp, Homo sapien
aagatgtaaggtcatagaaaatttatcattaga

SEQ ID NO: 927435 - DNA, 33 bp, Homo sapien
aagcccttactatttcacaaaccaggctcaagc

SEQ ID NO: 927436 - DNA, 33 bp, Homo sapien
aagcccttactatttctcaaaccaggctcaagc

SEQ ID NO: 927437 - DNA, 33 bp, Homo sapien
gggtgagttgcccccactctgtctcttcacttc

SEQ ID NO: 927438 - DNA, 33 bp, Homo sapien
gggtgagttgcccccattctgtctcttcacttc

SEQ ID NO: 927439 - DNA, 33 bp, Homo sapien
gggaagaggagtgaaaaagagatgagaaattgg

SEQ ID NO: 927440 - DNA, 33 bp, Homo sapien
gggaagaggagtgaaagagagatgagaaattgg

SEQ ID NO: 927441 - DNA, 33 bp, Homo sapien
tcctggagtcatactacgttctttccaaaaggg

SEQ ID NO: 927442 - DNA, 33 bp, Homo sapien
tcctggagtcatactatgttctttccaaaaggg

SEQ ID NO: 927443 - DNA, 33 bp, Homo sapien
cctgaaattctctggacctgggtatctctatgc

SEQ ID NO: 927444 - DNA, 33 bp, Homo sapien
cctgaaattctctggagctgggtatctctatgc

SEQ ID NO: 927445 - DNA, 33 bp, Homo sapien
gcatcttcccactatccaattcaaaaattcaag

SEQ ID NO: 927446 - DNA, 33 bp, Homo sapien
gcatcttcccactatctaattcaaaaattcaag

SEQ ID NO: 927447 - DNA, 33 bp, Homo sapien
agtaattgatgtcatagaaagctgagattgggt

SEQ ID NO: 927448 - DNA, 33 bp, Homo sapien
agtaattgatgtcatataaagctgagattgggt

SEQ ID NO: 927449 - DNA, 33 bp, Homo sapien
atttctgcatgttgtacaaagtttgttagaaaa

SEQ ID NO: 927450 - DNA, 33 bp, Homo sapien
atttctgcatgttgtataaagtttgttagaaaa

SEQ ID NO: 927451 - DNA, 33 bp, Homo sapien
attccatatgtcccaaatgatcaaaagatattt

SEQ ID NO: 927452 - DNA, 33 bp, Homo sapien
attccatatgtcccaagtgatcaaaagatattt

SEQ ID NO: 927453 - DNA, 33 bp, Homo sapien
gttctctgggaacaacacttagccactgctgat

SEQ ID NO: 927454 - DNA, 33 bp, Homo sapien
gttctctgggaacaacccttagccactgctgat

SEQ ID NO: 927455 - DNA, 33 bp, Homo sapien
gcaaggacattgattgaaacattgggagccgga

SEQ ID NO: 927456 - DNA, 33 bp, Homo sapien
gcaaggacattgattgcaacattgggagccgga

SEQ ID NO: 927457 - DNA, 33 bp, Homo sapien
aggagactgtcactataagaccagatgcctaat

SEQ ID NO: 927458 - DNA, 33 bp, Homo sapien
aggagactgtcactatgagaccagatgcctaat

SEQ ID NO: 927459 - DNA, 33 bp, Homo sapien
acaggtttggtgttaacgacgagatttatatgg

SEQ ID NO: 927460 - DNA, 33 bp, Homo sapien
acaggtttggtgttaaggacgagatttatatgg

SEQ ID NO: 927461 - DNA, 33 bp, Homo sapien
gactttttctaacaagcctatttttgcatcaga

SEQ ID NO: 927462 - DNA, 33 bp, Homo sapien
gactttttctaacaaggctatttttgcatcaga

SEQ ID NO: 927463 - DNA, 33 bp, Homo sapien
tggagaagatcctaaaagcacatcttactgtgg

SEQ ID NO: 927464 - DNA, 33 bp, Homo sapien
tggagaagatcctaaacgcacatcttactgtgg

SEQ ID NO: 927465 - DNA, 33 bp, Homo sapien
attctttgtgatgaaaaagcatcagccacagta

SEQ ID NO: 927466 - DNA, 33 bp, Homo sapien
attctttgtgatgaaagagcatcagccacagta

SEQ ID NO: 927467 - DNA, 33 bp, Homo sapien
agaggataatctgatgcataagccatgtggtgc

SEQ ID NO: 927468 - DNA, 33 bp, Homo sapien
agaggataatctgatgtataagccatgtggtgc

SEQ ID NO: 927469 - DNA, 33 bp, Homo sapien
tctggtgggacagcctcacagggatctgtgatg

SEQ ID NO: 927470 - DNA, 33 bp, Homo sapien
tctggtgggacagccttacagggatctgtgatg

SEQ ID NO: 927471 - DNA, 33 bp, Homo sapien
tttaatgcttctcctaacagtttatatttagca

SEQ ID NO: 927472 - DNA, 33 bp, Homo sapien
tttaatgcttctcctaccagtttatatttagca

SEQ ID NO: 927473 - DNA, 33 bp, Homo sapien
accttctgtactgaaaattaaagagctggataa

SEQ ID NO: 927474 - DNA, 33 bp, Homo sapien
accttctgtactgaaatttaaagagctggataa

SEQ ID NO: 927475 - DNA, 33 bp, Homo sapien
atcctttccctaaaccaaacagtctttctcagt

SEQ ID NO: 927476 - DNA, 33 bp, Homo sapien
atcctttccctaaaccgaacagtctttctcagt

SEQ ID NO: 927477 - DNA, 33 bp, Homo sapien
attcaacctgctacaacgtcttaaaataggaga

SEQ ID NO: 927478 - DNA, 33 bp, Homo sapien
attcaacctgctacaatgtcttaaaataggaga

SEQ ID NO: 927479 - DNA, 33 bp, Homo sapien
agagttattcctaagacgccctaaaatacaaaa

SEQ ID NO: 927480 - DNA, 33 bp, Homo sapien
agagttattcctaagatgccctaaaatacaaaa

SEQ ID NO: 927481 - DNA, 33 bp, Homo sapien
gttatctcctgaatcaaaatatggcacagcagt

SEQ ID NO: 927482 - DNA, 33 bp, Homo sapien
gttatctcctgaatcacaatatggcacagcagt

SEQ ID NO: 927483 - DNA, 33 bp, Homo sapien
ggctgtcttttaacaacgtaaggcagcaggaag

SEQ ID NO: 927484 - DNA, 33 bp, Homo sapien
ggctgtcttttaacaatgtaaggcagcaggaag

SEQ ID NO: 927485 - DNA, 33 bp, Homo sapien
ctaatatgtacaaatacggtatgtgcatggcca

SEQ ID NO: 927486 - DNA, 33 bp, Homo sapien
ctaatatgtacaaatatggtatgtgcatggcca

SEQ ID NO: 927487 - DNA, 33 bp, Homo sapien
cctgaggcttcacagaacaataggaccctgagc

SEQ ID NO: 927488 - DNA, 33 bp, Homo sapien
cctgaggcttcacagagcaataggaccctgagc

SEQ ID NO: 927489 - DNA, 33 bp, Homo sapien
tttttaaatgcttaaaaactataatgctatcac

SEQ ID NO: 927490 - DNA, 33 bp, Homo sapien
tttttaaatgcttaaagactataatgctatcac

SEQ ID NO: 927491 - DNA, 33 bp, Homo sapien
ttgtgaatagtgcttcgatgaacgtaagggtgt

SEQ ID NO: 927492 - DNA, 33 bp, Homo sapien
ttgtgaatagtgcttctatgaacgtaagggtgt

SEQ ID NO: 927493 - DNA, 33 bp, Homo sapien
aaaactccatatcacactgtattttaaaaggag

SEQ ID NO: 927494 - DNA, 33 bp, Homo sapien
aaaactccatatcacattgtattttaaaaggag

SEQ ID NO: 927495 - DNA, 33 bp, Homo sapien
ttggaatactcttaaaaaaacactagcacagat

SEQ ID NO: 927496 - DNA, 33 bp, Homo sapien
ttggaatactcttaaagaaacactagcacagat

SEQ ID NO: 927497 - DNA, 33 bp, Homo sapien
ttttttaaagtgcttgcatcaggaatttggaac

SEQ ID NO: 927498 - DNA, 33 bp, Homo sapien
ttttttaaagtgcttgtatcaggaatttggaac

SEQ ID NO: 927499 - DNA, 33 bp, Homo sapien
gcatggaaatggagagaatttggcatagtcaat

SEQ ID NO: 927500 - DNA, 33 bp, Homo sapien
gcatggaaatggagaggatttggcatagtcaat

SEQ ID NO: 927501 - DNA, 33 bp, Homo sapien
gaataattgctgagccactaaagaagaaaatac

SEQ ID NO: 927502 - DNA, 33 bp, Homo sapien
gaataattgctgagccgctaaagaagaaaatac

SEQ ID NO: 927503 - DNA, 33 bp, Homo sapien
ttgaatgctggcaatacgtgattgaatggtagg

SEQ ID NO: 927504 - DNA, 33 bp, Homo sapien
ttgaatgctggcaatatgtgattgaatggtagg

SEQ ID NO: 927505 - DNA, 33 bp, Homo sapien
aaagtagacaaagcatcagtgagctgtaggaca

SEQ ID NO: 927506 - DNA, 33 bp, Homo sapien
aaagtagacaaagcattagtgagctgtaggaca

SEQ ID NO: 927507 - DNA, 33 bp, Homo sapien
tcccatatgccctatccatctttcatagtcctt

SEQ ID NO: 927508 - DNA, 33 bp, Homo sapien
tcccatatgccctatcgatctttcatagtcctt

SEQ ID NO: 927509 - DNA, 33 bp, Homo sapien
taatgcagcctttacaaaagatgctaatttttt

SEQ ID NO: 927510 - DNA, 33 bp, Homo sapien
taatgcagcctttacagaagatgctaatttttt

SEQ ID NO: 927511 - DNA, 33 bp, Homo sapien
aaatgaagtcatatctaaactatcgtacctttg

SEQ ID NO: 927512 - DNA, 33 bp, Homo sapien
aaatgaagtcatatctgaactatcgtacctttg

SEQ ID NO: 927513 - DNA, 33 bp, Homo sapien
aatttgccacagaatacgcaagaaccctgtggg

SEQ ID NO: 927514 - DNA, 33 bp, Homo sapien
aatttgccacagaatatgcaagaaccctgtggg

SEQ ID NO: 927515 - DNA, 33 bp, Homo sapien
gaggtggagataatgactaaactctatccttac

SEQ ID NO: 927516 - DNA, 33 bp, Homo sapien
gaggtggagataatgattaaactctatccttac

SEQ ID NO: 927517 - DNA, 33 bp, Homo sapien
cctgagtgaacttagaataaacccaagatcttt

SEQ ID NO: 927518 - DNA, 33 bp, Homo sapien
cctgagtgaacttagagtaaacccaagatcttt

SEQ ID NO: 927519 - DNA, 33 bp, Homo sapien
attattctactgatacaatgagaaagaattatc

SEQ ID NO: 927520 - DNA, 33 bp, Homo sapien
attattctactgatacgatgagaaagaattatc

SEQ ID NO: 927521 - DNA, 33 bp, Homo sapien
cctctccagaactgaccataaggttttagaatc

SEQ ID NO: 927522 - DNA, 33 bp, Homo sapien
cctctccagaactgactataaggttttagaatc

SEQ ID NO: 927523 - DNA, 33 bp, Homo sapien
aaatggtgaggaatacaaaagtagtcaccttcc

SEQ ID NO: 927524 - DNA, 33 bp, Homo sapien
aaatggtgaggaatactaaagtagtcaccttcc

SEQ ID NO: 927525 - DNA, 33 bp, Homo sapien
gcctccaacataaaggacagaaagaatgccgct

SEQ ID NO: 927526 - DNA, 33 bp, Homo sapien
gcctccaacataaagggcagaaagaatgccgct

SEQ ID NO: 927527 - DNA, 33 bp, Homo sapien
ggctgatttgtatggtaaagtagggagaccagc

SEQ ID NO: 927528 - DNA, 33 bp, Homo sapien
ggctgatttgtatggtgaagtagggagaccagc

SEQ ID NO: 927529 - DNA, 33 bp, Homo sapien
agagagtctttaaataccgaattgattctattt

SEQ ID NO: 927530 - DNA, 33 bp, Homo sapien
agagagtctttaaatatcgaattgattctattt

SEQ ID NO: 927531 - DNA, 33 bp, Homo sapien
gcagggggaaggtaatcatgaggaatgaaacag

SEQ ID NO: 927532 - DNA, 33 bp, Homo sapien
gcagggggaaggtaatgatgaggaatgaaacag

SEQ ID NO: 927533 - DNA, 33 bp, Homo sapien
gattataaacagaatcagagagacctgcttttg

SEQ ID NO: 927534 - DNA, 33 bp, Homo sapien
gattataaacagaatcggagagacctgcttttg

SEQ ID NO: 927535 - DNA, 33 bp, Homo sapien
cagactaaatttcaagaaaaatggagcccaatg

SEQ ID NO: 927536 - DNA, 33 bp, Homo sapien
cagactaaatttcaagcaaaatggagcccaatg

SEQ ID NO: 927537 - DNA, 33 bp, Homo sapien
tacaggcaatcactaaatcctttcccatttctc

SEQ ID NO: 927538 - DNA, 33 bp, Homo sapien
tacaggcaatcactaagtcctttcccatttctc

SEQ ID NO: 927539 - DNA, 33 bp, Homo sapien
gatcacttgattaaagcatctgtcaggctttcc

SEQ ID NO: 927540 - DNA, 33 bp, Homo sapien
gatcacttgattaaagtatctgtcaggctttcc

SEQ ID NO: 927541 - DNA, 33 bp, Homo sapien
gtttctaataaaaatgcataacctgaagagaca

SEQ ID NO: 927542 - DNA, 33 bp, Homo sapien
gtttctaataaaaatggataacctgaagagaca

SEQ ID NO: 927543 - DNA, 33 bp, Homo sapien
tctggttgatgcctcactatgagatgtattacc

SEQ ID NO: 927544 - DNA, 33 bp, Homo sapien
tctggttgatgcctcattatgagatgtattacc

SEQ ID NO: 927545 - DNA, 33 bp, Homo sapien
acagaaaggctaagtacgttgctcaaaggttcc

SEQ ID NO: 927546 - DNA, 33 bp, Homo sapien
acagaaaggctaagtaggttgctcaaaggttcc

SEQ ID NO: 927547 - DNA, 33 bp, Homo sapien
tcatgttatttgcacactgtgatggtattattt

SEQ ID NO: 927548 - DNA, 33 bp, Homo sapien
tcatgttatttgcacattgtgatggtattattt

SEQ ID NO: 927549 - DNA, 33 bp, Homo sapien
gcaacaaacacagaagaaatgactggctttaga

SEQ ID NO: 927550 - DNA, 33 bp, Homo sapien
gcaacaaacacagaaggaatgactggctttaga

SEQ ID NO: 927551 - DNA, 33 bp, Homo sapien
atttttattacatgaaattataaagcgtagaaa

SEQ ID NO: 927552 - DNA, 33 bp, Homo sapien
atttttattacatgaacttataaagcgtagaaa

SEQ ID NO: 927553 - DNA, 33 bp, Homo sapien
atgcctggaaggcgtgcatacagttgaacttaa

SEQ ID NO: 927554 - DNA, 33 bp, Homo sapien
atgcctggaaggcgtggatacagttgaacttaa

SEQ ID NO: 927555 - DNA, 33 bp, Homo sapien
aaattgttttaggtacaaaattagagtagcata

SEQ ID NO: 927556 - DNA, 33 bp, Homo sapien
aaattgttttaggtacgaaattagagtagcata

SEQ ID NO: 927557 - DNA, 33 bp, Homo sapien
cattatctggccacccacctagaatgaatggag

SEQ ID NO: 927558 - DNA, 33 bp, Homo sapien
cattatctggccacccgcctagaatgaatggag

SEQ ID NO: 927559 - DNA, 33 bp, Homo sapien
tatggattatggattaggttcaaagcactctgc

SEQ ID NO: 927560 - DNA, 33 bp, Homo sapien
tatggattatggattatgttcaaagcactctgc

SEQ ID NO: 927561 - DNA, 33 bp, Homo sapien
aagctttaaaatattagatggcctaaatgctga

SEQ ID NO: 927562 - DNA, 33 bp, Homo sapien
aagctttaaaatattatatggcctaaatgctga

SEQ ID NO: 927563 - DNA, 33 bp, Homo sapien
ctagtgcttaatgtcacgttattcgatagagaa

SEQ ID NO: 927564 - DNA, 33 bp, Homo sapien
ctagtgcttaatgtcatgttattcgatagagaa

SEQ ID NO: 927565 - DNA, 33 bp, Homo sapien
cccagggtctctgtacactccaattatctccct

SEQ ID NO: 927566 - DNA, 33 bp, Homo sapien
cccagggtctctgtactctccaattatctccct

SEQ ID NO: 927567 - DNA, 33 bp, Homo sapien
aaactgtcactaactaacattactttgtgtttt

SEQ ID NO: 927568 - DNA, 33 bp, Homo sapien
aaactgtcactaactaccattactttgtgtttt

SEQ ID NO: 927569 - DNA, 33 bp, Homo sapien
aattacaagtccacaaaccatagaacaacaaca

SEQ ID NO: 927570 - DNA, 33 bp, Homo sapien
aattacaagtccacaatccatagaacaacaaca

SEQ ID NO: 927571 - DNA, 33 bp, Homo sapien
taggtgaatgaaaaaaagaatgcattgattttt

SEQ ID NO: 927572 - DNA, 33 bp, Homo sapien
taggtgaatgaaaaaaggaatgcattgattttt

SEQ ID NO: 927573 - DNA, 33 bp, Homo sapien
ttctgtgaaagtcagacataaacattttaggct

SEQ ID NO: 927574 - DNA, 33 bp, Homo sapien
ttctgtgaaagtcagatataaacattttaggct

SEQ ID NO: 927575 - DNA, 33 bp, Homo sapien
cattctttcttgagggccaaacagaggcaatgc

SEQ ID NO: 927576 - DNA, 33 bp, Homo sapien
cattctttcttgagggtcaaacagaggcaatgc

SEQ ID NO: 927577 - DNA, 33 bp, Homo sapien
atgaggaatttttatcagagtgatgatatcatc

SEQ ID NO: 927578 - DNA, 33 bp, Homo sapien
atgaggaatttttatcggagtgatgatatcatc

SEQ ID NO: 927579 - DNA, 33 bp, Homo sapien
agggtcatcactgacaagtccatgtgccttaca

SEQ ID NO: 927580 - DNA, 33 bp, Homo sapien
agggtcatcactgacaggtccatgtgccttaca

SEQ ID NO: 927581 - DNA, 33 bp, Homo sapien
atgtcctagaactggaaatggagtcaatgtcat

SEQ ID NO: 927582 - DNA, 33 bp, Homo sapien
atgtcctagaactggagatggagtcaatgtcat

SEQ ID NO: 927583 - DNA, 33 bp, Homo sapien
ttataaaactgtcataacatgagtgctaacatc

SEQ ID NO: 927584 - DNA, 33 bp, Homo sapien
ttataaaactgtcataccatgagtgctaacatc

SEQ ID NO: 927585 - DNA, 33 bp, Homo sapien
gtcatgaatttcattccctgtgacagtcttggg

SEQ ID NO: 927586 - DNA, 33 bp, Homo sapien
gtcatgaatttcattctctgtgacagtcttggg

SEQ ID NO: 927587 - DNA, 33 bp, Homo sapien
tatcaggaagtgtcaaactaggtcaagatggcc

SEQ ID NO: 927588 - DNA, 33 bp, Homo sapien
tatcaggaagtgtcaagctaggtcaagatggcc

SEQ ID NO: 927589 - DNA, 33 bp, Homo sapien
gattggatgcatcctaaaactgatactgaccta

SEQ ID NO: 927590 - DNA, 33 bp, Homo sapien
gattggatgcatcctacaactgatactgaccta

SEQ ID NO: 927591 - DNA, 33 bp, Homo sapien
tcatcatggctaatacaagacttattgggtaat

SEQ ID NO: 927592 - DNA, 33 bp, Homo sapien
tcatcatggctaatacgagacttattgggtaat

SEQ ID NO: 927593 - DNA, 33 bp, Homo sapien
tcacttcacaagtctccatgtaaaaactgatcc

SEQ ID NO: 927594 - DNA, 33 bp, Homo sapien
tcacttcacaagtctctatgtaaaaactgatcc

SEQ ID NO: 927595 - DNA, 33 bp, Homo sapien
taaaataggaatgagtcaaacctataccataat

SEQ ID NO: 927596 - DNA, 33 bp, Homo sapien
taaaataggaatgagtgaaacctataccataat

SEQ ID NO: 927597 - DNA, 33 bp, Homo sapien
cagagtatgatatgcaatagccccaaattcaaa

SEQ ID NO: 927598 - DNA, 33 bp, Homo sapien
cagagtatgatatgcagtagccccaaattcaaa

SEQ ID NO: 927599 - DNA, 33 bp, Homo sapien
agggagggaaggataactgaaggaaaggatgat

SEQ ID NO: 927600 - DNA, 33 bp, Homo sapien
agggagggaaggataattgaaggaaaggatgat

SEQ ID NO: 927601 - DNA, 33 bp, Homo sapien
tgaataggattcatcaaagattaagaaggagta

SEQ ID NO: 927602 - DNA, 33 bp, Homo sapien
tgaataggattcatcagagattaagaaggagta

SEQ ID NO: 927603 - DNA, 33 bp, Homo sapien
gtgtggagcaaacctaaaaagtgagtcaatctg

SEQ ID NO: 927604 - DNA, 33 bp, Homo sapien
gtgtggagcaaacctataaagtgagtcaatctg

SEQ ID NO: 927605 - DNA, 33 bp, Homo sapien
gaatctttcattccaaacaaatcaagagatgta

SEQ ID NO: 927606 - DNA, 33 bp, Homo sapien
gaatctttcattccaagcaaatcaagagatgta

SEQ ID NO: 927607 - DNA, 33 bp, Homo sapien
tgggaagacaaaataacgcaatctaaagtgaac

SEQ ID NO: 927608 - DNA, 33 bp, Homo sapien
tgggaagacaaaataatgcaatctaaagtgaac

SEQ ID NO: 927609 - DNA, 33 bp, Homo sapien
gcaggtcttagaaacgaaatctctctctgtgac

SEQ ID NO: 927610 - DNA, 33 bp, Homo sapien
gcaggtcttagaaacggaatctctctctgtgac

SEQ ID NO: 927611 - DNA, 33 bp, Homo sapien
ggtaaaaaaactacaacacattggcataataaa

SEQ ID NO: 927612 - DNA, 33 bp, Homo sapien
ggtaaaaaaactacaagacattggcataataaa

SEQ ID NO: 927613 - DNA, 33 bp, Homo sapien
cttagtggctgccaatcaaggtaaggaagcaag

SEQ ID NO: 927614 - DNA, 33 bp, Homo sapien
cttagtggctgccaattaaggtaaggaagcaag

SEQ ID NO: 927615 - DNA, 33 bp, Homo sapien
aagacagcatcagaccaaaacaacactggctaa

SEQ ID NO: 927616 - DNA, 33 bp, Homo sapien
aagacagcatcagacctaaacaacactggctaa

SEQ ID NO: 927617 - DNA, 33 bp, Homo sapien
aataataatgttgagtcaagatgttaacgtgga

SEQ ID NO: 927618 - DNA, 33 bp, Homo sapien
aataataatgttgagtgaagatgttaacgtgga

SEQ ID NO: 927619 - DNA, 33 bp, Homo sapien
gtattatgtatcaaaaatagagtaccatgttat

SEQ ID NO: 927620 - DNA, 33 bp, Homo sapien
gtattatgtatcaaaagtagagtaccatgttat

SEQ ID NO: 927621 - DNA, 33 bp, Homo sapien
tcattcatgttgcacactaagaaaaaaacaaat

SEQ ID NO: 927622 - DNA, 33 bp, Homo sapien
tcattcatgttgcacattaagaaaaaaacaaat

SEQ ID NO: 927623 - DNA, 33 bp, Homo sapien
gtgggcctaacaagatcaacaagcaggcataaa

SEQ ID NO: 927624 - DNA, 33 bp, Homo sapien
gtgggcctaacaagattaacaagcaggcataaa

SEQ ID NO: 927625 - DNA, 33 bp, Homo sapien
ttgggaataaagtccacacagaggaatgggcat

SEQ ID NO: 927626 - DNA, 33 bp, Homo sapien
ttgggaataaagtccagacagaggaatgggcat

SEQ ID NO: 927627 - DNA, 33 bp, Homo sapien
tattaagacagcaaaacttagatgatgtgttat

SEQ ID NO: 927628 - DNA, 33 bp, Homo sapien
tattaagacagcaaaatttagatgatgtgttat

SEQ ID NO: 927629 - DNA, 33 bp, Homo sapien
cacctaagctctcttaacaatggtaaaactgtc

SEQ ID NO: 927630 - DNA, 33 bp, Homo sapien
cacctaagctctcttaccaatggtaaaactgtc

SEQ ID NO: 927631 - DNA, 33 bp, Homo sapien
tgggcattgatgtgaaacactagctcaaaagtt

SEQ ID NO: 927632 - DNA, 33 bp, Homo sapien
tgggcattgatgtgaagcactagctcaaaagtt

SEQ ID NO: 927633 - DNA, 33 bp, Homo sapien
aaaagattgaagagaaaaatttcattcaggcat

SEQ ID NO: 927634 - DNA, 33 bp, Homo sapien
aaaagattgaagagaacaatttcattcaggcat

SEQ ID NO: 927635 - DNA, 33 bp, Homo sapien
caaatgagatcacccaatacacacttgctccaa

SEQ ID NO: 927636 - DNA, 33 bp, Homo sapien
caaatgagatcacccagtacacacttgctccaa

SEQ ID NO: 927637 - DNA, 33 bp, Homo sapien
tgtattcaggtttttagacacagatagtgattt

SEQ ID NO: 927638 - DNA, 33 bp, Homo sapien
tgtattcaggtttttatacacagatagtgattt

SEQ ID NO: 927639 - DNA, 33 bp, Homo sapien
tcattgctatatataaggtatcccattttcatc

SEQ ID NO: 927640 - DNA, 33 bp, Homo sapien
tcattgctatatataatgtatcccattttcatc

SEQ ID NO: 927641 - DNA, 33 bp, Homo sapien
aacattctggtgtttagcctaacagtctttttc

SEQ ID NO: 927642 - DNA, 33 bp, Homo sapien
aacattctggtgtttatcctaacagtctttttc

SEQ ID NO: 927643 - DNA, 33 bp, Homo sapien
tactatattacgaaacccttcatttatcattaa

SEQ ID NO: 927644 - DNA, 33 bp, Homo sapien
tactatattacgaaactcttcatttatcattaa

SEQ ID NO: 927645 - DNA, 33 bp, Homo sapien
tcactcatcattatgcacttatattcacaccca

SEQ ID NO: 927646 - DNA, 33 bp, Homo sapien
tcactcatcattatgctcttatattcacaccca

SEQ ID NO: 927647 - DNA, 33 bp, Homo sapien
tgcttttgtgcagttacggataatgaggattct

SEQ ID NO: 927648 - DNA, 33 bp, Homo sapien
tgcttttgtgcagttatggataatgaggattct

SEQ ID NO: 927649 - DNA, 33 bp, Homo sapien
cacaagagggcttgcaatgaccctaaggcaact

SEQ ID NO: 927650 - DNA, 33 bp, Homo sapien
cacaagagggcttgcagtgaccctaaggcaact

SEQ ID NO: 927651 - DNA, 33 bp, Homo sapien
taaagtctcccataataacccatcattcttagc

SEQ ID NO: 927652 - DNA, 33 bp, Homo sapien
taaagtctcccataatcacccatcattcttagc

SEQ ID NO: 927653 - DNA, 33 bp, Homo sapien
acagacactccaaaggaagaatttgtgagccat

SEQ ID NO: 927654 - DNA, 33 bp, Homo sapien
acagacactccaaaggcagaatttgtgagccat

SEQ ID NO: 927655 - DNA, 33 bp, Homo sapien
ataatcaaagtttacggaggtcacctttgtttt

SEQ ID NO: 927656 - DNA, 33 bp, Homo sapien
ataatcaaagtttacgtaggtcacctttgtttt

SEQ ID NO: 927657 - DNA, 33 bp, Homo sapien
attacactagactcacagaatatgccaaaatag

SEQ ID NO: 927658 - DNA, 33 bp, Homo sapien
attacactagactcaccgaatatgccaaaatag

SEQ ID NO: 927659 - DNA, 33 bp, Homo sapien
ggaagtataatagtaacgttcgtggttccgcat

SEQ ID NO: 927660 - DNA, 33 bp, Homo sapien
ggaagtataatagtaatgttcgtggttccgcat

SEQ ID NO: 927661 - DNA, 33 bp, Homo sapien
aaaattgagaactttcaatcttccaaagacatt

SEQ ID NO: 927662 - DNA, 33 bp, Homo sapien
aaaattgagaactttcgatcttccaaagacatt

SEQ ID NO: 927663 - DNA, 33 bp, Homo sapien
agccagagatttcaggccagaggtctaaaggag

SEQ ID NO: 927664 - DNA, 33 bp, Homo sapien
agccagagatttcaggtcagaggtctaaaggag

SEQ ID NO: 927665 - DNA, 33 bp, Homo sapien
ttacttctaatatagtaacatcattttgcaggg

SEQ ID NO: 927666 - DNA, 33 bp, Homo sapien
ttacttctaatatagttacatcattttgcaggg

SEQ ID NO: 927667 - DNA, 33 bp, Homo sapien
ttgttttagaatgcagcaatctgccagattgat

SEQ ID NO: 927668 - DNA, 33 bp, Homo sapien
ttgttttagaatgcagtaatctgccagattgat

SEQ ID NO: 927669 - DNA, 33 bp, Homo sapien
ttcaatttagagctcacgtcacacttgttacag

SEQ ID NO: 927670 - DNA, 33 bp, Homo sapien
ttcaatttagagctcatgtcacacttgttacag

SEQ ID NO: 927671 - DNA, 33 bp, Homo sapien
aataatgatttttgcacgatatgtaggtgatta

SEQ ID NO: 927672 - DNA, 33 bp, Homo sapien
aataatgatttttgcatgatatgtaggtgatta

SEQ ID NO: 927673 - DNA, 33 bp, Homo sapien
gttgaagttttatgaacattaaggacacattag

SEQ ID NO: 927674 - DNA, 33 bp, Homo sapien
gttgaagttttatgaagattaaggacacattag

SEQ ID NO: 927675 - DNA, 33 bp, Homo sapien
aatggacagctaacaacgtgccaggcaatgttt

SEQ ID NO: 927676 - DNA, 33 bp, Homo sapien
aatggacagctaacaatgtgccaggcaatgttt

SEQ ID NO: 927677 - DNA, 33 bp, Homo sapien
ctattaaatgttcataactttcattttaagatc

SEQ ID NO: 927678 - DNA, 33 bp, Homo sapien
ctattaaatgttcatacctttcattttaagatc

SEQ ID NO: 927679 - DNA, 33 bp, Homo sapien
tttatttatagaaagaaaagttcccatttgttt

SEQ ID NO: 927680 - DNA, 33 bp, Homo sapien
tttatttatagaaagacaagttcccatttgttt

SEQ ID NO: 927681 - DNA, 33 bp, Homo sapien
gtgaatcatttaaccactcaaaacatagctggt

SEQ ID NO: 927682 - DNA, 33 bp, Homo sapien
gtgaatcatttaaccattcaaaacatagctggt

SEQ ID NO: 927683 - DNA, 33 bp, Homo sapien
gttttaataatgtggaagtcaaatagatctttc

SEQ ID NO: 927684 - DNA, 33 bp, Homo sapien
gttttaataatgtggacgtcaaatagatctttc

SEQ ID NO: 927685 - DNA, 33 bp, Homo sapien
tgtagaaatgtttttagagcaaaatttctaaaa

SEQ ID NO: 927686 - DNA, 33 bp, Homo sapien
tgtagaaatgtttttatagcaaaatttctaaaa

SEQ ID NO: 927687 - DNA, 33 bp, Homo sapien
atgttgtgatgttagaagtccctggcagtggga

SEQ ID NO: 927688 - DNA, 33 bp, Homo sapien
atgttgtgatgttagaggtccctggcagtggga

SEQ ID NO: 927689 - DNA, 33 bp, Homo sapien
atgaagcctaaagagacaagcattagccaaata

SEQ ID NO: 927690 - DNA, 33 bp, Homo sapien
atgaagcctaaagagataagcattagccaaata

SEQ ID NO: 927691 - DNA, 33 bp, Homo sapien
catacacacatcatcaatgaagagatatcatgt

SEQ ID NO: 927692 - DNA, 33 bp, Homo sapien
catacacacatcatcagtgaagagatatcatgt

SEQ ID NO: 927693 - DNA, 33 bp, Homo sapien
tgaaggtaaagataaacgatttcctgataagtt

SEQ ID NO: 927694 - DNA, 33 bp, Homo sapien
tgaaggtaaagataaaggatttcctgataagtt

SEQ ID NO: 927695 - DNA, 33 bp, Homo sapien
agaatgatttagacaactgggttccattctctc

SEQ ID NO: 927696 - DNA, 33 bp, Homo sapien
agaatgatttagacaattgggttccattctctc

SEQ ID NO: 927697 - DNA, 33 bp, Homo sapien
ctcctcaacacagggaaagaattagtgagtaag

SEQ ID NO: 927698 - DNA, 33 bp, Homo sapien
ctcctcaacacagggatagaattagtgagtaag

SEQ ID NO: 927699 - DNA, 33 bp, Homo sapien
gcttcaatgatgtttacctaaaaacaaaagtat

SEQ ID NO: 927700 - DNA, 33 bp, Homo sapien
gcttcaatgatgtttatctaaaaacaaaagtat

SEQ ID NO: 927701 - DNA, 33 bp, Homo sapien
tcaaagcaaagttaaccgagatcttgttcactt

SEQ ID NO: 927702 - DNA, 33 bp, Homo sapien
tcaaagcaaagttaactgagatcttgttcactt

SEQ ID NO: 927703 - DNA, 33 bp, Homo sapien
atctcccagatccttcgctctagcaaaagcaga

SEQ ID NO: 927704 - DNA, 33 bp, Homo sapien
atctcccagatccttctctctagcaaaagcaga

SEQ ID NO: 927705 - DNA, 33 bp, Homo sapien
aaaggagctggtgttccagttttttaataccca

SEQ ID NO: 927706 - DNA, 33 bp, Homo sapien
aaaggagctggtgttctagttttttaataccca

SEQ ID NO: 927707 - DNA, 33 bp, Homo sapien
aactacaatgaggttacgtcctaataagcctgt

SEQ ID NO: 927708 - DNA, 33 bp, Homo sapien
aactacaatgaggttatgtcctaataagcctgt

SEQ ID NO: 927709 - DNA, 33 bp, Homo sapien
ttctgcaaaagttgtacctcaaggtggaactca

SEQ ID NO: 927710 - DNA, 33 bp, Homo sapien
ttctgcaaaagttgtatctcaaggtggaactca

SEQ ID NO: 927711 - DNA, 33 bp, Homo sapien
tgagaatttctggtgccataagtttgtaacaaa

SEQ ID NO: 927712 - DNA, 33 bp, Homo sapien
tgagaatttctggtgctataagtttgtaacaaa

SEQ ID NO: 927713 - DNA, 33 bp, Homo sapien
aatctgtgaactggaacactcgggcaggaccag

SEQ ID NO: 927714 - DNA, 33 bp, Homo sapien
aatctgtgaactggaatactcgggcaggaccag

SEQ ID NO: 927715 - DNA, 33 bp, Homo sapien
ttagtttaatgtgctacctactaccattatatg

SEQ ID NO: 927716 - DNA, 33 bp, Homo sapien
ttagtttaatgtgctatctactaccattatatg

SEQ ID NO: 927717 - DNA, 33 bp, Homo sapien
cagtggcacaatatgacatcaaagctaaaggat

SEQ ID NO: 927718 - DNA, 33 bp, Homo sapien
cagtggcacaatatgatatcaaagctaaaggat

SEQ ID NO: 927719 - DNA, 33 bp, Homo sapien
actcacttcctcaaaactgtgtacatttatggc

SEQ ID NO: 927720 - DNA, 33 bp, Homo sapien
actcacttcctcaaaattgtgtacatttatggc

SEQ ID NO: 927721 - DNA, 33 bp, Homo sapien
cacatttgatggtgtaacatggacagaagttat

SEQ ID NO: 927722 - DNA, 33 bp, Homo sapien
cacatttgatggtgtagcatggacagaagttat

SEQ ID NO: 927723 - DNA, 33 bp, Homo sapien
aatactgaaatgtcatcaatttatttgcattaa

SEQ ID NO: 927724 - DNA, 33 bp, Homo sapien
aatactgaaatgtcattaatttatttgcattaa

SEQ ID NO: 927725 - DNA, 33 bp, Homo sapien
ggaagataatgaccaacaagacttgccaattct

SEQ ID NO: 927726 - DNA, 33 bp, Homo sapien
ggaagataatgaccaataagacttgccaattct

SEQ ID NO: 927727 - DNA, 33 bp, Homo sapien
cccttcttctctcacaaatccttggttttaatc

SEQ ID NO: 927728 - DNA, 33 bp, Homo sapien
cccttcttctctcacatatccttggttttaatc

SEQ ID NO: 927729 - DNA, 33 bp, Homo sapien
gggtgatgtaggaacacgtaagagggtcttcag

SEQ ID NO: 927730 - DNA, 33 bp, Homo sapien
gggtgatgtaggaacatgtaagagggtcttcag

SEQ ID NO: 927731 - DNA, 33 bp, Homo sapien
gtcaaatgagctggaaaacagttcatggtgtat

SEQ ID NO: 927732 - DNA, 33 bp, Homo sapien
gtcaaatgagctggaagacagttcatggtgtat

SEQ ID NO: 927733 - DNA, 33 bp, Homo sapien
tagataaaatcctgcgaataaatggttatattg

SEQ ID NO: 927734 - DNA, 33 bp, Homo sapien
tagataaaatcctgcgtataaatggttatattg

SEQ ID NO: 927735 - DNA, 33 bp, Homo sapien
aaagtaactacagtgcactagtacaaacttact

SEQ ID NO: 927736 - DNA, 33 bp, Homo sapien
aaagtaactacagtgccctagtacaaacttact

SEQ ID NO: 927737 - DNA, 33 bp, Homo sapien
gttttggttaggagtgaatctctagtagatgag

SEQ ID NO: 927738 - DNA, 33 bp, Homo sapien
gttttggttaggagtgcatctctagtagatgag

SEQ ID NO: 927739 - DNA, 33 bp, Homo sapien
aatttgcttctggcaagaaatgtgcctaggtcc

SEQ ID NO: 927740 - DNA, 33 bp, Homo sapien
aatttgcttctggcaataaatgtgcctaggtcc

SEQ ID NO: 927741 - DNA, 33 bp, Homo sapien
gatactgcttttatcccacatctggaaaagccg

SEQ ID NO: 927742 - DNA, 33 bp, Homo sapien
gatactgcttttatcctacatctggaaaagccg

SEQ ID NO: 927743 - DNA, 33 bp, Homo sapien
atttcacaaagccttacctcagaaaagttcatc

SEQ ID NO: 927744 - DNA, 33 bp, Homo sapien
atttcacaaagccttatctcagaaaagttcatc

SEQ ID NO: 927745 - DNA, 33 bp, Homo sapien
tccagttgagcgaaaaaacccaaatgacagcac

SEQ ID NO: 927746 - DNA, 33 bp, Homo sapien
tccagttgagcgaaaacacccaaatgacagcac

SEQ ID NO: 927747 - DNA, 33 bp, Homo sapien
ctgaaaggctttgaaggctccctagcttatttc

SEQ ID NO: 927748 - DNA, 33 bp, Homo sapien
ctgaaaggctttgaagtctccctagcttatttc

SEQ ID NO: 927749 - DNA, 33 bp, Homo sapien
ggtacctgaattcaaccgttcattcaactacaa

SEQ ID NO: 927750 - DNA, 33 bp, Homo sapien
ggtacctgaattcaactgttcattcaactacaa

SEQ ID NO: 927751 - DNA, 33 bp, Homo sapien
tctgttgcttaatccaactcctctactagaata

SEQ ID NO: 927752 - DNA, 33 bp, Homo sapien
tctgttgcttaatccatctcctctactagaata

SEQ ID NO: 927753 - DNA, 33 bp, Homo sapien
cccttgtcaaaatgggaagaaaaagctgagata

SEQ ID NO: 927754 - DNA, 33 bp, Homo sapien
cccttgtcaaaatgggtagaaaaagctgagata

SEQ ID NO: 927755 - DNA, 33 bp, Homo sapien
ggtgtattaaaaaaaacagtcataatcaggtag

SEQ ID NO: 927756 - DNA, 33 bp, Homo sapien
ggtgtattaaaaaaaagagtcataatcaggtag

SEQ ID NO: 927757 - DNA, 33 bp, Homo sapien
aattggcacagttaaaaccaccattactcaggt

SEQ ID NO: 927758 - DNA, 33 bp, Homo sapien
aattggcacagttaaagccaccattactcaggt

SEQ ID NO: 927759 - DNA, 33 bp, Homo sapien
aatgcttttttggggaacaaaatgcttattctc

SEQ ID NO: 927760 - DNA, 33 bp, Homo sapien
aatgcttttttggggagcaaaatgcttattctc

SEQ ID NO: 927761 - DNA, 33 bp, Homo sapien
caagatgaggacactgcagataggaagtaatgc

SEQ ID NO: 927762 - DNA, 33 bp, Homo sapien
caagatgaggacactgtagataggaagtaatgc

SEQ ID NO: 927763 - DNA, 33 bp, Homo sapien
agtaggtattttactacgttgagcaaataaagc

SEQ ID NO: 927764 - DNA, 33 bp, Homo sapien
agtaggtattttactatgttgagcaaataaagc

SEQ ID NO: 927765 - DNA, 33 bp, Homo sapien
atggtacatctattacaaacgtggttaaaagaa

SEQ ID NO: 927766 - DNA, 33 bp, Homo sapien
atggtacatctattacgaacgtggttaaaagaa

SEQ ID NO: 927767 - DNA, 33 bp, Homo sapien
tacaatactcttgtaaagaaagcacagagagat

SEQ ID NO: 927768 - DNA, 33 bp, Homo sapien
tacaatactcttgtaaggaaagcacagagagat

SEQ ID NO: 927769 - DNA, 33 bp, Homo sapien
cagaaaggatttgagcgctggcaatataggtac

SEQ ID NO: 927770 - DNA, 33 bp, Homo sapien
cagaaaggatttgagctctggcaatataggtac

SEQ ID NO: 927771 - DNA, 33 bp, Homo sapien
ctgtgtattctctctcgcttgtttgtggttaca

SEQ ID NO: 927772 - DNA, 33 bp, Homo sapien
ctgtgtattctctctctcttgtttgtggttaca

SEQ ID NO: 927773 - DNA, 33 bp, Homo sapien
ttacaagttggttccaaatctactccacctgtc

SEQ ID NO: 927774 - DNA, 33 bp, Homo sapien
ttacaagttggttccagatctactccacctgtc

SEQ ID NO: 927775 - DNA, 33 bp, Homo sapien
tgcaaaacacagacaacgatgaaggcatcagaa

SEQ ID NO: 927776 - DNA, 33 bp, Homo sapien
tgcaaaacacagacaatgatgaaggcatcagaa

SEQ ID NO: 927777 - DNA, 33 bp, Homo sapien
tggacactaatgctaacgtcaaaataaagtggt

SEQ ID NO: 927778 - DNA, 33 bp, Homo sapien
tggacactaatgctaatgtcaaaataaagtggt

SEQ ID NO: 927779 - DNA, 33 bp, Homo sapien
agtttctacgtttgtacgtctgagaaccaacct

SEQ ID NO: 927780 - DNA, 33 bp, Homo sapien
agtttctacgtttgtaggtctgagaaccaacct

SEQ ID NO: 927781 - DNA, 33 bp, Homo sapien
atcacacagctagaaaaaaatgcccattcatgc

SEQ ID NO: 927782 - DNA, 33 bp, Homo sapien
atcacacagctagaaacaaatgcccattcatgc

SEQ ID NO: 927783 - DNA, 33 bp, Homo sapien
ttattagggattgttacatgattacctatgaca

SEQ ID NO: 927784 - DNA, 33 bp, Homo sapien
ttattagggattgttatatgattacctatgaca

SEQ ID NO: 927785 - DNA, 33 bp, Homo sapien
cttagacaataatggcacatttgaaaacaacaa

SEQ ID NO: 927786 - DNA, 33 bp, Homo sapien
cttagacaataatggcgcatttgaaaacaacaa

SEQ ID NO: 927787 - DNA, 33 bp, Homo sapien
gcaacctttgaagcaaatacattaaacacaaac

SEQ ID NO: 927788 - DNA, 33 bp, Homo sapien
gcaacctttgaagcaattacattaaacacaaac

SEQ ID NO: 927789 - DNA, 33 bp, Homo sapien
ttattctgatttagtacattggaactttccaaa

SEQ ID NO: 927790 - DNA, 33 bp, Homo sapien
ttattctgatttagtagattggaactttccaaa

SEQ ID NO: 927791 - DNA, 33 bp, Homo sapien
caaagagtcaatgagtaaacataggtaagaggc

SEQ ID NO: 927792 - DNA, 33 bp, Homo sapien
caaagagtcaatgagttaacataggtaagaggc

SEQ ID NO: 927793 - DNA, 33 bp, Homo sapien
tccttagtagtgtgataaaatctcatgccctcc

SEQ ID NO: 927794 - DNA, 33 bp, Homo sapien
tccttagtagtgtgatgaaatctcatgccctcc

SEQ ID NO: 927795 - DNA, 33 bp, Homo sapien
aagttaagccccaaaacttgctgttagcgaatg

SEQ ID NO: 927796 - DNA, 33 bp, Homo sapien
aagttaagccccaaaagttgctgttagcgaatg

SEQ ID NO: 927797 - DNA, 33 bp, Homo sapien
aatggaagagttaggagtacaaactcaggcaac

SEQ ID NO: 927798 - DNA, 33 bp, Homo sapien
aatggaagagttaggattacaaactcaggcaac

SEQ ID NO: 927799 - DNA, 33 bp, Homo sapien
cagagagacattgctcacccttaagtgttgtta

SEQ ID NO: 927800 - DNA, 33 bp, Homo sapien
cagagagacattgctcgcccttaagtgttgtta

SEQ ID NO: 927801 - DNA, 33 bp, Homo sapien
catggtctccaggtctcaaggtgactgactgcg

SEQ ID NO: 927802 - DNA, 33 bp, Homo sapien
catggtctccaggtcttaaggtgactgactgcg

SEQ ID NO: 927803 - DNA, 33 bp, Homo sapien
aggctatggatcagtaagaggagagaaagaaca

SEQ ID NO: 927804 - DNA, 33 bp, Homo sapien
aggctatggatcagtacgaggagagaaagaaca

SEQ ID NO: 927805 - DNA, 33 bp, Homo sapien
tttcatgttgtcatgaaaactttctgttccatc

SEQ ID NO: 927806 - DNA, 33 bp, Homo sapien
tttcatgttgtcatgataactttctgttccatc

SEQ ID NO: 927807 - DNA, 33 bp, Homo sapien
ctagctgtttatcataaagagccagtttctcaa

SEQ ID NO: 927808 - DNA, 33 bp, Homo sapien
ctagctgtttatcatatagagccagtttctcaa

SEQ ID NO: 927809 - DNA, 33 bp, Homo sapien
gttctcttactgttaaataggatacatatatat

SEQ ID NO: 927810 - DNA, 33 bp, Homo sapien
gttctcttactgttaattaggatacatatatat

SEQ ID NO: 927811 - DNA, 33 bp, Homo sapien
cagacaaacccacatcaaaggacattctacaaa

SEQ ID NO: 927812 - DNA, 33 bp, Homo sapien
cagacaaacccacatcgaaggacattctacaaa

SEQ ID NO: 927813 - DNA, 33 bp, Homo sapien
aggtaatatttgccaacgctctccactgtagtt

SEQ ID NO: 927814 - DNA, 33 bp, Homo sapien
aggtaatatttgccaaggctctccactgtagtt

SEQ ID NO: 927815 - DNA, 33 bp, Homo sapien
catattctacagctaaaaatctccttttctgtt

SEQ ID NO: 927816 - DNA, 33 bp, Homo sapien
catattctacagctaataatctccttttctgtt

SEQ ID NO: 927817 - DNA, 33 bp, Homo sapien
accgtacatgctgcacaacaacctgtgtcaccc

SEQ ID NO: 927818 - DNA, 33 bp, Homo sapien
accgtacatgctgcacgacaacctgtgtcaccc

SEQ ID NO: 927819 - DNA, 33 bp, Homo sapien
aaggacctgtaagaaaatggtgagcttgaccgt

SEQ ID NO: 927820 - DNA, 33 bp, Homo sapien
aaggacctgtaagaaattggtgagcttgaccgt

SEQ ID NO: 927821 - DNA, 33 bp, Homo sapien
atatccaaccataccaccgtctgccagcagcac

SEQ ID NO: 927822 - DNA, 33 bp, Homo sapien
atatccaaccataccatcgtctgccagcagcac

SEQ ID NO: 927823 - DNA, 33 bp, Homo sapien
tgctatttgtcatttgcatccacatccagatga

SEQ ID NO: 927824 - DNA, 33 bp, Homo sapien
tgctatttgtcatttgtatccacatccagatga

SEQ ID NO: 927825 - DNA, 33 bp, Homo sapien
aggtgtgaaacataagcaaaaactgaaagacca

SEQ ID NO: 927826 - DNA, 33 bp, Homo sapien
aggtgtgaaacataagtaaaaactgaaagacca

SEQ ID NO: 927827 - DNA, 33 bp, Homo sapien
ttagaagattgaaacaactcctgaaagcaaatc

SEQ ID NO: 927828 - DNA, 33 bp, Homo sapien
ttagaagattgaaacacctcctgaaagcaaatc

SEQ ID NO: 927829 - DNA, 33 bp, Homo sapien
tcaccctcaactaccaacagctatgtgtcttgg

SEQ ID NO: 927830 - DNA, 33 bp, Homo sapien
tcaccctcaactaccagcagctatgtgtcttgg

SEQ ID NO: 927831 - DNA, 33 bp, Homo sapien
tgtatacctcagttccacaagtaaaacataagg

SEQ ID NO: 927832 - DNA, 33 bp, Homo sapien
tgtatacctcagttccgcaagtaaaacataagg

SEQ ID NO: 927833 - DNA, 33 bp, Homo sapien
aatcagaaatacttaacgttgcactttcggtca

SEQ ID NO: 927834 - DNA, 33 bp, Homo sapien
aatcagaaatacttaatgttgcactttcggtca

SEQ ID NO: 927835 - DNA, 33 bp, Homo sapien
tccagtttatcactaaaaatttctccaccaagt

SEQ ID NO: 927836 - DNA, 33 bp, Homo sapien
tccagtttatcactaacaatttctccaccaagt

SEQ ID NO: 927837 - DNA, 33 bp, Homo sapien
gtggacccaccatatcaactttcttttcaggag

SEQ ID NO: 927838 - DNA, 33 bp, Homo sapien
gtggacccaccatatcgactttcttttcaggag

SEQ ID NO: 927839 - DNA, 33 bp, Homo sapien
ttttttccatttcctaaccttatattatatctt

SEQ ID NO: 927840 - DNA, 33 bp, Homo sapien
ttttttccatttcctatccttatattatatctt

SEQ ID NO: 927841 - DNA, 33 bp, Homo sapien
tcaatatatctgtttccctatacttttttccat

SEQ ID NO: 927842 - DNA, 33 bp, Homo sapien
tcaatatatctgtttctctatacttttttccat

SEQ ID NO: 927843 - DNA, 33 bp, Homo sapien
cccctaatagcaagaaaaagacatatacacatg

SEQ ID NO: 927844 - DNA, 33 bp, Homo sapien
cccctaatagcaagaagaagacatatacacatg

SEQ ID NO: 927845 - DNA, 33 bp, Homo sapien
gccatcctagattcacaaacacatttgcaccaa

SEQ ID NO: 927846 - DNA, 33 bp, Homo sapien
gccatcctagattcacgaacacatttgcaccaa

SEQ ID NO: 927847 - DNA, 33 bp, Homo sapien
atgctccacaactcaactcaaagtgagaaaaaa

SEQ ID NO: 927848 - DNA, 33 bp, Homo sapien
atgctccacaactcaagtcaaagtgagaaaaaa

SEQ ID NO: 927849 - DNA, 33 bp, Homo sapien
tatctccagatgtttccaaatgttgcttggggg

SEQ ID NO: 927850 - DNA, 33 bp, Homo sapien
tatctccagatgtttcgaaatgttgcttggggg

SEQ ID NO: 927851 - DNA, 33 bp, Homo sapien
atgcctgtctcaccagcataatcctgatgacct

SEQ ID NO: 927852 - DNA, 33 bp, Homo sapien
atgcctgtctcaccagtataatcctgatgacct

SEQ ID NO: 927853 - DNA, 33 bp, Homo sapien
gttactgagaaacgagaaatcatttgaaggttc

SEQ ID NO: 927854 - DNA, 33 bp, Homo sapien
gttactgagaaacgaggaatcatttgaaggttc

SEQ ID NO: 927855 - DNA, 33 bp, Homo sapien
aaaggagactttatacagcagcttagataccag

SEQ ID NO: 927856 - DNA, 33 bp, Homo sapien
aaaggagactttatactgcagcttagataccag

SEQ ID NO: 927857 - DNA, 33 bp, Homo sapien
gagtacactcaataaaacctgttaataactaat

SEQ ID NO: 927858 - DNA, 33 bp, Homo sapien
gagtacactcaataaatcctgttaataactaat

SEQ ID NO: 927859 - DNA, 33 bp, Homo sapien
agactttagatgtgaacctcacagacaagcttc

SEQ ID NO: 927860 - DNA, 33 bp, Homo sapien
agactttagatgtgaatctcacagacaagcttc

SEQ ID NO: 927861 - DNA, 33 bp, Homo sapien
caagtgaggcctgataagagctggttggaccat

SEQ ID NO: 927862 - DNA, 33 bp, Homo sapien
caagtgaggcctgataggagctggttggaccat

SEQ ID NO: 927863 - DNA, 33 bp, Homo sapien
aaaaccagaatatccaccaaaacctcttcatag

SEQ ID NO: 927864 - DNA, 33 bp, Homo sapien
aaaaccagaatatccatcaaaacctcttcatag

SEQ ID NO: 927865 - DNA, 33 bp, Homo sapien
acagtttgccagtgaacgagttaccatgaggga

SEQ ID NO: 927866 - DNA, 33 bp, Homo sapien
acagtttgccagtgaatgagttaccatgaggga

SEQ ID NO: 927867 - DNA, 33 bp, Homo sapien
tgccctgttctgtcaaactctaacattaaccct

SEQ ID NO: 927868 - DNA, 33 bp, Homo sapien
tgccctgttctgtcaagctctaacattaaccct

SEQ ID NO: 927869 - DNA, 33 bp, Homo sapien
tgttctcatgccaaaacctttgggctccataca

SEQ ID NO: 927870 - DNA, 33 bp, Homo sapien
tgttctcatgccaaaatctttgggctccataca

SEQ ID NO: 927871 - DNA, 33 bp, Homo sapien
aagagagggccatttaaaaaagtggcaggggca

SEQ ID NO: 927872 - DNA, 33 bp, Homo sapien
aagagagggccatttagaaaagtggcaggggca

SEQ ID NO: 927873 - DNA, 33 bp, Homo sapien
ttttggatgctaggaacataaaacagacaaggt

SEQ ID NO: 927874 - DNA, 33 bp, Homo sapien
ttttggatgctaggaatataaaacagacaaggt

SEQ ID NO: 927875 - DNA, 33 bp, Homo sapien
gtcacttgcatggttaaagtcttagcattcaga

SEQ ID NO: 927876 - DNA, 33 bp, Homo sapien
gtcacttgcatggttagagtcttagcattcaga

SEQ ID NO: 927877 - DNA, 33 bp, Homo sapien
attgttttgtgagagtaaattatacgtgtttgt

SEQ ID NO: 927878 - DNA, 33 bp, Homo sapien
attgttttgtgagagtcaattatacgtgtttgt

SEQ ID NO: 927879 - DNA, 33 bp, Homo sapien
acacttcctgaggattcaacaccatttagacct

SEQ ID NO: 927880 - DNA, 33 bp, Homo sapien
acacttcctgaggattgaacaccatttagacct

SEQ ID NO: 927881 - DNA, 33 bp, Homo sapien
aatggaactgactactcaattatatatataatc

SEQ ID NO: 927882 - DNA, 33 bp, Homo sapien
aatggaactgactactgaattatatatataatc

SEQ ID NO: 927883 - DNA, 33 bp, Homo sapien
ataatgttgagcaaaaaaaacaacaaacacaca

SEQ ID NO: 927884 - DNA, 33 bp, Homo sapien
ataatgttgagcaaaagaaacaacaaacacaca

SEQ ID NO: 927885 - DNA, 33 bp, Homo sapien
atatacaaagtcagccaaatgtaatatattatt

SEQ ID NO: 927886 - DNA, 33 bp, Homo sapien
atatacaaagtcagccgaatgtaatatattatt

SEQ ID NO: 927887 - DNA, 33 bp, Homo sapien
accaataccagttacagcaatgcacgatgcaca

SEQ ID NO: 927888 - DNA, 33 bp, Homo sapien
accaataccagttacatcaatgcacgatgcaca

SEQ ID NO: 927889 - DNA, 33 bp, Homo sapien
tatgatgccgtaacaacgactttcctttctatg

SEQ ID NO: 927890 - DNA, 33 bp, Homo sapien
tatgatgccgtaacaatgactttcctttctatg

SEQ ID NO: 927891 - DNA, 33 bp, Homo sapien
ggtttcgggtattcacaggaattgcagcagcta

SEQ ID NO: 927892 - DNA, 33 bp, Homo sapien
ggtttcgggtattcacgggaattgcagcagcta

SEQ ID NO: 927893 - DNA, 33 bp, Homo sapien
aaggagcagaatatgaccaggcttctaaagaat

SEQ ID NO: 927894 - DNA, 33 bp, Homo sapien
aaggagcagaatatgatcaggcttctaaagaat

SEQ ID NO: 927895 - DNA, 33 bp, Homo sapien
ttcaacagtcaactaacaggcatttcagaaaaa

SEQ ID NO: 927896 - DNA, 33 bp, Homo sapien
ttcaacagtcaactaataggcatttcagaaaaa

SEQ ID NO: 927897 - DNA, 33 bp, Homo sapien
tgacacatcaatccaacagtacctttggcaaat

SEQ ID NO: 927898 - DNA, 33 bp, Homo sapien
tgacacatcaatccaatagtacctttggcaaat

SEQ ID NO: 927899 - DNA, 33 bp, Homo sapien
caagataatatgttgaagttgtctttgaatgca

SEQ ID NO: 927900 - DNA, 33 bp, Homo sapien
caagataatatgttgaggttgtctttgaatgca

SEQ ID NO: 927901 - DNA, 33 bp, Homo sapien
tgtgaaaacatggagaagtgttcagggatggag

SEQ ID NO: 927902 - DNA, 33 bp, Homo sapien
tgtgaaaacatggagacgtgttcagggatggag

SEQ ID NO: 927903 - DNA, 33 bp, Homo sapien
gtgaggatttatccaacgtatcccctaatttaa

SEQ ID NO: 927904 - DNA, 33 bp, Homo sapien
gtgaggatttatccaatgtatcccctaatttaa

SEQ ID NO: 927905 - DNA, 33 bp, Homo sapien
taaagaaattcagccacgagtttttactttata

SEQ ID NO: 927906 - DNA, 33 bp, Homo sapien
taaagaaattcagccatgagtttttactttata

SEQ ID NO: 927907 - DNA, 33 bp, Homo sapien
cttgtcctcctcaaaaacattatcttcctcatc

SEQ ID NO: 927908 - DNA, 33 bp, Homo sapien
cttgtcctcctcaaaaccattatcttcctcatc

SEQ ID NO: 927909 - DNA, 33 bp, Homo sapien
ttgcaagaattgttggaaaagatcaatacacag

SEQ ID NO: 927910 - DNA, 33 bp, Homo sapien
ttgcaagaattgttgggaaagatcaatacacag

SEQ ID NO: 927911 - DNA, 33 bp, Homo sapien
tttttaatgttctccaaaaattcaaaggagtct

SEQ ID NO: 927912 - DNA, 33 bp, Homo sapien
tttttaatgttctccagaaattcaaaggagtct

SEQ ID NO: 927913 - DNA, 33 bp, Homo sapien
caggaacatagcaaaactgtgcagattaccaaa

SEQ ID NO: 927914 - DNA, 33 bp, Homo sapien
caggaacatagcaaaattgtgcagattaccaaa

SEQ ID NO: 927915 - DNA, 33 bp, Homo sapien
tagacacattcttgcactcatgagttcgcactc

SEQ ID NO: 927916 - DNA, 33 bp, Homo sapien
tagacacattcttgcattcatgagttcgcactc

SEQ ID NO: 927917 - DNA, 33 bp, Homo sapien
tagaaatactcctataataactatggcattagg

SEQ ID NO: 927918 - DNA, 33 bp, Homo sapien
tagaaatactcctatagtaactatggcattagg

SEQ ID NO: 927919 - DNA, 33 bp, Homo sapien
tcccagtgcaatctagcatagtatttttatatt

SEQ ID NO: 927920 - DNA, 33 bp, Homo sapien
tcccagtgcaatctagtatagtatttttatatt

SEQ ID NO: 927921 - DNA, 33 bp, Homo sapien
ctggaagaaatgacgacgatgcccctaatgaaa

SEQ ID NO: 927922 - DNA, 33 bp, Homo sapien
ctggaagaaatgacgatgatgcccctaatgaaa

SEQ ID NO: 927923 - DNA, 33 bp, Homo sapien
ctatatatcaaacccccaaaacatgcaattcac

SEQ ID NO: 927924 - DNA, 33 bp, Homo sapien
ctatatatcaaaccccgaaaacatgcaattcac

SEQ ID NO: 927925 - DNA, 33 bp, Homo sapien
aggaacttaatcaagggagtcatgtgtaaacag

SEQ ID NO: 927926 - DNA, 33 bp, Homo sapien
aggaacttaatcaaggtagtcatgtgtaaacag

SEQ ID NO: 927927 - DNA, 33 bp, Homo sapien
tcagccaaagagggacacttttgaaaatgaaag

SEQ ID NO: 927928 - DNA, 33 bp, Homo sapien
tcagccaaagagggacgcttttgaaaatgaaag

SEQ ID NO: 927929 - DNA, 33 bp, Homo sapien
tggtgagatgatttgaacctcactttttcatct

SEQ ID NO: 927930 - DNA, 33 bp, Homo sapien
tggtgagatgatttgagcctcactttttcatct

SEQ ID NO: 927931 - DNA, 33 bp, Homo sapien
ttgtatactctggttacctacataaattgcatg

SEQ ID NO: 927932 - DNA, 33 bp, Homo sapien
ttgtatactctggttatctacataaattgcatg

SEQ ID NO: 927933 - DNA, 33 bp, Homo sapien
agcttaaaagatcctaaatttttcatgaggaga

SEQ ID NO: 927934 - DNA, 33 bp, Homo sapien
agcttaaaagatcctacatttttcatgaggaga

SEQ ID NO: 927935 - DNA, 33 bp, Homo sapien
attgcttgacatccaaccattttctgttgacat

SEQ ID NO: 927936 - DNA, 33 bp, Homo sapien
attgcttgacatccaatcattttctgttgacat

SEQ ID NO: 927937 - DNA, 33 bp, Homo sapien
gcaaaaccttaatgagcaatgcatggccagtgg

SEQ ID NO: 927938 - DNA, 33 bp, Homo sapien
gcaaaaccttaatgaggaatgcatggccagtgg

SEQ ID NO: 927939 - DNA, 33 bp, Homo sapien
agaagcagaggaaataagttctagttgcatcag

SEQ ID NO: 927940 - DNA, 33 bp, Homo sapien
agaagcagaggaaataggttctagttgcatcag

SEQ ID NO: 927941 - DNA, 33 bp, Homo sapien
gaccaattaaaccagaacctctcttcccagcat

SEQ ID NO: 927942 - DNA, 33 bp, Homo sapien
gaccaattaaaccagagcctctcttcccagcat

SEQ ID NO: 927943 - DNA, 33 bp, Homo sapien
tattatccaagagggaaaaaaggatgtttaatt

SEQ ID NO: 927944 - DNA, 33 bp, Homo sapien
tattatccaagagggagaaaaggatgtttaatt

SEQ ID NO: 927945 - DNA, 33 bp, Homo sapien
gaactatgaaaagctccaacttttgcaggcagg

SEQ ID NO: 927946 - DNA, 33 bp, Homo sapien
gaactatgaaaagctctaacttttgcaggcagg

SEQ ID NO: 927947 - DNA, 33 bp, Homo sapien
ttcctgactctcttcccgattatgccatacttt

SEQ ID NO: 927948 - DNA, 33 bp, Homo sapien
ttcctgactctcttcctgattatgccatacttt

SEQ ID NO: 927949 - DNA, 33 bp, Homo sapien
tgtggtagttacaaagaagattcttaatgaaag

SEQ ID NO: 927950 - DNA, 33 bp, Homo sapien
tgtggtagttacaaagtagattcttaatgaaag

SEQ ID NO: 927951 - DNA, 33 bp, Homo sapien
ggagaagagttgcaataaaatatgtagtaacaa

SEQ ID NO: 927952 - DNA, 33 bp, Homo sapien
ggagaagagttgcaatgaaatatgtagtaacaa

SEQ ID NO: 927953 - DNA, 33 bp, Homo sapien
atgctataccaagtcacgaattaactgaatctg

SEQ ID NO: 927954 - DNA, 33 bp, Homo sapien
atgctataccaagtcatgaattaactgaatctg

SEQ ID NO: 927955 - DNA, 33 bp, Homo sapien
atagcacctttaaccaataagtgcctgttttat

SEQ ID NO: 927956 - DNA, 33 bp, Homo sapien
atagcacctttaaccagtaagtgcctgttttat

SEQ ID NO: 927957 - DNA, 33 bp, Homo sapien
gaaacatattgacttaaaacagatgctgacgtg

SEQ ID NO: 927958 - DNA, 33 bp, Homo sapien
gaaacatattgacttagaacagatgctgacgtg

SEQ ID NO: 927959 - DNA, 33 bp, Homo sapien
tgcatttatgtcattacagagtcaagactgaag

SEQ ID NO: 927960 - DNA, 33 bp, Homo sapien
tgcatttatgtcattatagagtcaagactgaag

SEQ ID NO: 927961 - DNA, 33 bp, Homo sapien
ctacattttcatgagactattaacacagagaaa

SEQ ID NO: 927962 - DNA, 33 bp, Homo sapien
ctacattttcatgagagtattaacacagagaaa

SEQ ID NO: 927963 - DNA, 33 bp, Homo sapien
cagagcttatacttaaaatggaagcaaagcaga

SEQ ID NO: 927964 - DNA, 33 bp, Homo sapien
cagagcttatacttaacatggaagcaaagcaga

SEQ ID NO: 927965 - DNA, 33 bp, Homo sapien
cattcagaaggagagacgtaggccaacggaaag

SEQ ID NO: 927966 - DNA, 33 bp, Homo sapien
cattcagaaggagagatgtaggccaacggaaag

SEQ ID NO: 927967 - DNA, 33 bp, Homo sapien
agcacactcatccgccccaccatgaaatgtcct

SEQ ID NO: 927968 - DNA, 33 bp, Homo sapien
agcacactcatccgcctcaccatgaaatgtcct

SEQ ID NO: 927969 - DNA, 33 bp, Homo sapien
aggcttagaaacaactcagtcaacaggtgctca

SEQ ID NO: 927970 - DNA, 33 bp, Homo sapien
aggcttagaaacaacttagtcaacaggtgctca

SEQ ID NO: 927971 - DNA, 33 bp, Homo sapien
gtgactcatcatgaggaattttgcttgaagtcc

SEQ ID NO: 927972 - DNA, 33 bp, Homo sapien
gtgactcatcatgaggcattttgcttgaagtcc

SEQ ID NO: 927973 - DNA, 33 bp, Homo sapien
ttttctctgttaaaaagttggttattgcaaagt

SEQ ID NO: 927974 - DNA, 33 bp, Homo sapien
ttttctctgttaaaaatttggttattgcaaagt

SEQ ID NO: 927975 - DNA, 33 bp, Homo sapien
atgtagaaatcaaaaacaactcagagatatggt

SEQ ID NO: 927976 - DNA, 33 bp, Homo sapien
atgtagaaatcaaaaataactcagagatatggt

SEQ ID NO: 927977 - DNA, 33 bp, Homo sapien
ctagttaggtaatacaagaggtgagtagagatt

SEQ ID NO: 927978 - DNA, 33 bp, Homo sapien
ctagttaggtaatacaggaggtgagtagagatt

SEQ ID NO: 927979 - DNA, 33 bp, Homo sapien
agggaaagagatgggagaacggacagttagtgg

SEQ ID NO: 927980 - DNA, 33 bp, Homo sapien
agggaaagagatgggataacggacagttagtgg

SEQ ID NO: 927981 - DNA, 33 bp, Homo sapien
tacaaaacaaatcaaacgtaaaatggtcacctt

SEQ ID NO: 927982 - DNA, 33 bp, Homo sapien
tacaaaacaaatcaaatgtaaaatggtcacctt

SEQ ID NO: 927983 - DNA, 33 bp, Homo sapien
agatgacacctggataaaaatttctgctctact

SEQ ID NO: 927984 - DNA, 33 bp, Homo sapien
agatgacacctggatacaaatttctgctctact

SEQ ID NO: 927985 - DNA, 33 bp, Homo sapien
aagagtaatgagacctctgtattataacttgaa

SEQ ID NO: 927986 - DNA, 33 bp, Homo sapien
aagagtaatgagacctttgtattataacttgaa

SEQ ID NO: 927987 - DNA, 33 bp, Homo sapien
ttttcgcagatgatgtcaactctcctcaggctg

SEQ ID NO: 927988 - DNA, 33 bp, Homo sapien
ttttcgcagatgatgtgaactctcctcaggctg

SEQ ID NO: 927989 - DNA, 33 bp, Homo sapien
atttttatgtcacaacaagtaccttctatttct

SEQ ID NO: 927990 - DNA, 33 bp, Homo sapien
atttttatgtcacaacgagtaccttctatttct

SEQ ID NO: 927991 - DNA, 33 bp, Homo sapien
caattgaacagaagagaaataccagtgaaactg

SEQ ID NO: 927992 - DNA, 33 bp, Homo sapien
caattgaacagaagagcaataccagtgaaactg

SEQ ID NO: 927993 - DNA, 33 bp, Homo sapien
gaaggggatttctgagcaattgaattttttagt

SEQ ID NO: 927994 - DNA, 33 bp, Homo sapien
gaaggggatttctgagtaattgaattttttagt

SEQ ID NO: 927995 - DNA, 33 bp, Homo sapien
actgaagagcaggtcccagtgtaaggaaggtgt

SEQ ID NO: 927996 - DNA, 33 bp, Homo sapien
actgaagagcaggtcctagtgtaaggaaggtgt

SEQ ID NO: 927997 - DNA, 33 bp, Homo sapien
aggcagcacagaattcaagtctgcaggtagcat

SEQ ID NO: 927998 - DNA, 33 bp, Homo sapien
aggcagcacagaattcgagtctgcaggtagcat

SEQ ID NO: 927999 - DNA, 33 bp, Homo sapien
ttggttctagtaagcaatcacagtactgtttgt

SEQ ID NO: 928000 - DNA, 33 bp, Homo sapien
ttggttctagtaagcagtcacagtactgtttgt

SEQ ID NO: 928001 - DNA, 33 bp, Homo sapien
tccccaccatctcaccaagaacagatgagaaaa

SEQ ID NO: 928002 - DNA, 33 bp, Homo sapien
tccccaccatctcaccgagaacagatgagaaaa

SEQ ID NO: 928003 - DNA, 33 bp, Homo sapien
tttttggtagaagattcaaatactcccgatttt

SEQ ID NO: 928004 - DNA, 33 bp, Homo sapien
tttttggtagaagattgaaatactcccgatttt

SEQ ID NO: 928005 - DNA, 33 bp, Homo sapien
ttcactacctggattaaagaatcatttgtacac

SEQ ID NO: 928006 - DNA, 33 bp, Homo sapien
ttcactacctggattacagaatcatttgtacac

SEQ ID NO: 928007 - DNA, 33 bp, Homo sapien
accactagtgtaatagaaatagaatgtagcttt

SEQ ID NO: 928008 - DNA, 33 bp, Homo sapien
accactagtgtaataggaatagaatgtagcttt

SEQ ID NO: 928009 - DNA, 33 bp, Homo sapien
atataacttttctgtacggtcaagaaataacat

SEQ ID NO: 928010 - DNA, 33 bp, Homo sapien
atataacttttctgtatggtcaagaaataacat

SEQ ID NO: 928011 - DNA, 33 bp, Homo sapien
ggtagatagaaacgcagcttatacaaggacttt

SEQ ID NO: 928012 - DNA, 33 bp, Homo sapien
ggtagatagaaacgcatcttatacaaggacttt

SEQ ID NO: 928013 - DNA, 33 bp, Homo sapien
ggaagtgtcttggacccaaggagagacatcaac

SEQ ID NO: 928014 - DNA, 33 bp, Homo sapien
ggaagtgtcttggacctaaggagagacatcaac

SEQ ID NO: 928015 - DNA, 33 bp, Homo sapien
cttctttgcttcttcccaactgcagaaatcctg

SEQ ID NO: 928016 - DNA, 33 bp, Homo sapien
cttctttgcttcttcctaactgcagaaatcctg

SEQ ID NO: 928017 - DNA, 33 bp, Homo sapien
aaatgtaataaaactacggtttgtatgcagtct

SEQ ID NO: 928018 - DNA, 33 bp, Homo sapien
aaatgtaataaaactatggtttgtatgcagtct

SEQ ID NO: 928019 - DNA, 33 bp, Homo sapien
ttatgttcagtctccacgaggacaaagatttct

SEQ ID NO: 928020 - DNA, 33 bp, Homo sapien
ttatgttcagtctccatgaggacaaagatttct

SEQ ID NO: 928021 - DNA, 33 bp, Homo sapien
gtaaacattttctaacaataactcagtatatgc

SEQ ID NO: 928022 - DNA, 33 bp, Homo sapien
gtaaacattttctaacgataactcagtatatgc

SEQ ID NO: 928023 - DNA, 33 bp, Homo sapien
tagatgagcatattctaaaaactgttacctacc

SEQ ID NO: 928024 - DNA, 33 bp, Homo sapien
tagatgagcatattctgaaaactgttacctacc

SEQ ID NO: 928025 - DNA, 33 bp, Homo sapien
ggtatgcaaagtttcacgtaaatttttaatata

SEQ ID NO: 928026 - DNA, 33 bp, Homo sapien
ggtatgcaaagtttcaggtaaatttttaatata

SEQ ID NO: 928027 - DNA, 33 bp, Homo sapien
taagctctccagtggacaaattttctccaggtg

SEQ ID NO: 928028 - DNA, 33 bp, Homo sapien
taagctctccagtggataaattttctccaggtg

SEQ ID NO: 928029 - DNA, 33 bp, Homo sapien
gggcagctctgctctgaaattttatccagctat

SEQ ID NO: 928030 - DNA, 33 bp, Homo sapien
gggcagctctgctctgcaattttatccagctat

SEQ ID NO: 928031 - DNA, 33 bp, Homo sapien
tctataattctgtgacccttaaaccagaaaaat

SEQ ID NO: 928032 - DNA, 33 bp, Homo sapien
tctataattctgtgactcttaaaccagaaaaat

SEQ ID NO: 928033 - DNA, 33 bp, Homo sapien
aatttggtttgcattaagtattgttagagattc

SEQ ID NO: 928034 - DNA, 33 bp, Homo sapien
aatttggtttgcattaggtattgttagagattc

SEQ ID NO: 928035 - DNA, 33 bp, Homo sapien
gggctatatctcctgcaccaagtacagtgtact

SEQ ID NO: 928036 - DNA, 33 bp, Homo sapien
gggctatatctcctgcgccaagtacagtgtact

SEQ ID NO: 928037 - DNA, 33 bp, Homo sapien
aacggggagctatggcacaatgtggtttcagaa

SEQ ID NO: 928038 - DNA, 33 bp, Homo sapien
aacggggagctatggcgcaatgtggtttcagaa

SEQ ID NO: 928039 - DNA, 33 bp, Homo sapien
gatctatgccaataaactgttttcaagtggtgt

SEQ ID NO: 928040 - DNA, 33 bp, Homo sapien
gatctatgccaataaattgttttcaagtggtgt

SEQ ID NO: 928041 - DNA, 33 bp, Homo sapien
acacagcccaattcccaattagattaacaaaac

SEQ ID NO: 928042 - DNA, 33 bp, Homo sapien
acacagcccaattccccattagattaacaaaac

SEQ ID NO: 928043 - DNA, 33 bp, Homo sapien
taggtaagctagaataacctgagccaaaaaata

SEQ ID NO: 928044 - DNA, 33 bp, Homo sapien
taggtaagctagaatagcctgagccaaaaaata

SEQ ID NO: 928045 - DNA, 33 bp, Homo sapien
tgtttttaactctgacacaggaaaaatgtcaac

SEQ ID NO: 928046 - DNA, 33 bp, Homo sapien
tgtttttaactctgacgcaggaaaaatgtcaac

SEQ ID NO: 928047 - DNA, 33 bp, Homo sapien
aatttaaaagaactagccctataagcaacaaaa

SEQ ID NO: 928048 - DNA, 33 bp, Homo sapien
aatttaaaagaactagtcctataagcaacaaaa

SEQ ID NO: 928049 - DNA, 33 bp, Homo sapien
atctaaaaggtattgcaatttggtcattggttc

SEQ ID NO: 928050 - DNA, 33 bp, Homo sapien
atctaaaaggtattgccatttggtcattggttc

SEQ ID NO: 928051 - DNA, 33 bp, Homo sapien
ctgtatttctctagacactgatacatttttgtc

SEQ ID NO: 928052 - DNA, 33 bp, Homo sapien
ctgtatttctctagactctgatacatttttgtc

SEQ ID NO: 928053 - DNA, 33 bp, Homo sapien
ttgtaaaatgtgagacccagatttttgctctaa

SEQ ID NO: 928054 - DNA, 33 bp, Homo sapien
ttgtaaaatgtgagactcagatttttgctctaa

SEQ ID NO: 928055 - DNA, 33 bp, Homo sapien
agaaataaagaaaaggacattcaaggaggcatc

SEQ ID NO: 928056 - DNA, 33 bp, Homo sapien
agaaataaagaaaaggccattcaaggaggcatc

SEQ ID NO: 928057 - DNA, 33 bp, Homo sapien
gcttctgacgtcctcaatcactctagcaggcat

SEQ ID NO: 928058 - DNA, 33 bp, Homo sapien
gcttctgacgtcctcactcactctagcaggcat

SEQ ID NO: 928059 - DNA, 33 bp, Homo sapien
aaggcctataatttgtcaaggtgagtcatttca

SEQ ID NO: 928060 - DNA, 33 bp, Homo sapien
aaggcctataatttgttaaggtgagtcatttca

SEQ ID NO: 928061 - DNA, 33 bp, Homo sapien
ttaatacagaaacataaaatcaagtactgcata

SEQ ID NO: 928062 - DNA, 33 bp, Homo sapien
ttaatacagaaacatacaatcaagtactgcata

SEQ ID NO: 928063 - DNA, 33 bp, Homo sapien
taagaagtcagaattacaagagactggaagaaa

SEQ ID NO: 928064 - DNA, 33 bp, Homo sapien
taagaagtcagaattataagagactggaagaaa

SEQ ID NO: 928065 - DNA, 33 bp, Homo sapien
gtcattattagaaacgccaaaatacagcgcagt

SEQ ID NO: 928066 - DNA, 33 bp, Homo sapien
gtcattattagaaacggcaaaatacagcgcagt

SEQ ID NO: 928067 - DNA, 33 bp, Homo sapien
ttctactgacttcctaagtttttagacaaagtt

SEQ ID NO: 928068 - DNA, 33 bp, Homo sapien
ttctactgacttcctacgtttttagacaaagtt

SEQ ID NO: 928069 - DNA, 33 bp, Homo sapien
gccttctttgacatcccctccaaatatccctca

SEQ ID NO: 928070 - DNA, 33 bp, Homo sapien
gccttctttgacatcctctccaaatatccctca

SEQ ID NO: 928071 - DNA, 33 bp, Homo sapien
aaaagcatcccataccactgttgaccacactgg

SEQ ID NO: 928072 - DNA, 33 bp, Homo sapien
aaaagcatcccatacccctgttgaccacactgg

SEQ ID NO: 928073 - DNA, 33 bp, Homo sapien
ctcacatcaaaaactgcagtcactagcactaac

SEQ ID NO: 928074 - DNA, 33 bp, Homo sapien
ctcacatcaaaaactgtagtcactagcactaac

SEQ ID NO: 928075 - DNA, 33 bp, Homo sapien
atttgtaattcttacccacaagactgataatgg

SEQ ID NO: 928076 - DNA, 33 bp, Homo sapien
atttgtaattcttacctacaagactgataatgg

SEQ ID NO: 928077 - DNA, 33 bp, Homo sapien
ctgaataattttgatcaacagctgcactgtcaa

SEQ ID NO: 928078 - DNA, 33 bp, Homo sapien
ctgaataattttgatcgacagctgcactgtcaa

SEQ ID NO: 928079 - DNA, 33 bp, Homo sapien
cctcgggcaagccccacaagcactgtgaatatg

SEQ ID NO: 928080 - DNA, 33 bp, Homo sapien
cctcgggcaagccccataagcactgtgaatatg

SEQ ID NO: 928081 - DNA, 33 bp, Homo sapien
gatgaaaatcttcacacatctagcaacagctaa

SEQ ID NO: 928082 - DNA, 33 bp, Homo sapien
gatgaaaatcttcacatatctagcaacagctaa

SEQ ID NO: 928083 - DNA, 33 bp, Homo sapien
taatgcaatctgataccgctgaaattgaacttg

SEQ ID NO: 928084 - DNA, 33 bp, Homo sapien
taatgcaatctgatactgctgaaattgaacttg

SEQ ID NO: 928085 - DNA, 33 bp, Homo sapien
ttcaataggctcctcacggcaatggaggatgcc

SEQ ID NO: 928086 - DNA, 33 bp, Homo sapien
ttcaataggctcctcatggcaatggaggatgcc

SEQ ID NO: 928087 - DNA, 33 bp, Homo sapien
tttgttatagctacaacgttaactcaacaaaca

SEQ ID NO: 928088 - DNA, 33 bp, Homo sapien
tttgttatagctacaatgttaactcaacaaaca

SEQ ID NO: 928089 - DNA, 33 bp, Homo sapien
taatttcttaaaactgaaaacactggataacgt

SEQ ID NO: 928090 - DNA, 33 bp, Homo sapien
taatttcttaaaactgcaaacactggataacgt

SEQ ID NO: 928091 - DNA, 33 bp, Homo sapien
aacctgggctaaataacagtacatactgagcta

SEQ ID NO: 928092 - DNA, 33 bp, Homo sapien
aacctgggctaaataatagtacatactgagcta

SEQ ID NO: 928093 - DNA, 33 bp, Homo sapien
ttgcacaagtggccacacagttttaatgctata

SEQ ID NO: 928094 - DNA, 33 bp, Homo sapien
ttgcacaagtggccacgcagttttaatgctata

SEQ ID NO: 928095 - DNA, 33 bp, Homo sapien
taaaatgaggggattggattatatgcttgataa

SEQ ID NO: 928096 - DNA, 33 bp, Homo sapien
taaaatgaggggattgtattatatgcttgataa

SEQ ID NO: 928097 - DNA, 33 bp, Homo sapien
atccaactacatggacacttcaggggtcaggga

SEQ ID NO: 928098 - DNA, 33 bp, Homo sapien
atccaactacatggacgcttcaggggtcaggga

SEQ ID NO: 928099 - DNA, 33 bp, Homo sapien
gattgcaaagggtggacgaagataggagagagg

SEQ ID NO: 928100 - DNA, 33 bp, Homo sapien
gattgcaaagggtggatgaagataggagagagg

SEQ ID NO: 928101 - DNA, 33 bp, Homo sapien
tttatacattcatagtcacagtaataggatata

SEQ ID NO: 928102 - DNA, 33 bp, Homo sapien
tttatacattcatagtgacagtaataggatata

SEQ ID NO: 928103 - DNA, 33 bp, Homo sapien
tcagtctctaaagtaaccaagtcaattcactat

SEQ ID NO: 928104 - DNA, 33 bp, Homo sapien
tcagtctctaaagtaatcaagtcaattcactat

SEQ ID NO: 928105 - DNA, 33 bp, Homo sapien
atgttctcaaggtcaacctacattataaatgag

SEQ ID NO: 928106 - DNA, 33 bp, Homo sapien
atgttctcaaggtcaatctacattataaatgag

SEQ ID NO: 928107 - DNA, 33 bp, Homo sapien
atgatatcaacgtgtacgaacatatagtactaa

SEQ ID NO: 928108 - DNA, 33 bp, Homo sapien
atgatatcaacgtgtatgaacatatagtactaa

SEQ ID NO: 928109 - DNA, 33 bp, Homo sapien
ataaccaggacaaaaaataggctggcatcccaa

SEQ ID NO: 928110 - DNA, 33 bp, Homo sapien
ataaccaggacaaaaagtaggctggcatcccaa

SEQ ID NO: 928111 - DNA, 33 bp, Homo sapien
atcatgctgaaatgaccggtagagcaggaagtt

SEQ ID NO: 928112 - DNA, 33 bp, Homo sapien
atcatgctgaaatgactggtagagcaggaagtt

SEQ ID NO: 928113 - DNA, 33 bp, Homo sapien
gaattactgaattccacgttgagagagtgctaa

SEQ ID NO: 928114 - DNA, 33 bp, Homo sapien
gaattactgaattccatgttgagagagtgctaa

SEQ ID NO: 928115 - DNA, 33 bp, Homo sapien
caaggtcaatgagagaagcaactccaatctgag

SEQ ID NO: 928116 - DNA, 33 bp, Homo sapien
caaggtcaatgagagaggcaactccaatctgag

SEQ ID NO: 928117 - DNA, 33 bp, Homo sapien
taggagataaaattgacgggaggtggtgactga

SEQ ID NO: 928118 - DNA, 33 bp, Homo sapien
taggagataaaattgatgggaggtggtgactga

SEQ ID NO: 928119 - DNA, 33 bp, Homo sapien
ttacagttaaaaaacgaaatctgatgtcagacc

SEQ ID NO: 928120 - DNA, 33 bp, Homo sapien
ttacagttaaaaaacggaatctgatgtcagacc

SEQ ID NO: 928121 - DNA, 33 bp, Homo sapien
aatgcacacaaacgtacatgcgcatgcacacat

SEQ ID NO: 928122 - DNA, 33 bp, Homo sapien
aatgcacacaaacgtatatgcgcatgcacacat

SEQ ID NO: 928123 - DNA, 33 bp, Homo sapien
agagagatccattaataagcagttgccgctatc

SEQ ID NO: 928124 - DNA, 33 bp, Homo sapien
agagagatccattaattagcagttgccgctatc

SEQ ID NO: 928125 - DNA, 33 bp, Homo sapien
aggagaataagaagctaaccaaattcaagtaat

SEQ ID NO: 928126 - DNA, 33 bp, Homo sapien
aggagaataagaagctcaccaaattcaagtaat

SEQ ID NO: 928127 - DNA, 33 bp, Homo sapien
tttaagagaacactacacttgcaactagactga

SEQ ID NO: 928128 - DNA, 33 bp, Homo sapien
tttaagagaacactacgcttgcaactagactga

SEQ ID NO: 928129 - DNA, 33 bp, Homo sapien
gtcatttctctctgacggattcacatttaatgt

SEQ ID NO: 928130 - DNA, 33 bp, Homo sapien
gtcatttctctctgactgattcacatttaatgt

SEQ ID NO: 928131 - DNA, 33 bp, Homo sapien
cagtattccttttctgaattaataactcaatgc

SEQ ID NO: 928132 - DNA, 33 bp, Homo sapien
cagtattccttttctggattaataactcaatgc

SEQ ID NO: 928133 - DNA, 33 bp, Homo sapien
ggctttatggtatataggtaaacctttgttgat

SEQ ID NO: 928134 - DNA, 33 bp, Homo sapien
ggctttatggtatatatgtaaacctttgttgat

SEQ ID NO: 928135 - DNA, 33 bp, Homo sapien
gtctgattaaatccaaactgtcacatagacaaa

SEQ ID NO: 928136 - DNA, 33 bp, Homo sapien
gtctgattaaatccaagctgtcacatagacaaa

SEQ ID NO: 928137 - DNA, 33 bp, Homo sapien
aagtgcttttgtttaccgggcaatccaattatc

SEQ ID NO: 928138 - DNA, 33 bp, Homo sapien
aagtgcttttgtttactgggcaatccaattatc

SEQ ID NO: 928139 - DNA, 33 bp, Homo sapien
ccaagttgaagttgatcatatttgccagtgttc

SEQ ID NO: 928140 - DNA, 33 bp, Homo sapien
ccaagttgaagttgattatatttgccagtgttc

SEQ ID NO: 928141 - DNA, 33 bp, Homo sapien
caagagaattccagaacgaccttattgcatcct

SEQ ID NO: 928142 - DNA, 33 bp, Homo sapien
caagagaattccagaatgaccttattgcatcct

SEQ ID NO: 928143 - DNA, 33 bp, Homo sapien
gaagacattttaaaggcccctgaacaaatgatt

SEQ ID NO: 928144 - DNA, 33 bp, Homo sapien
gaagacattttaaaggtccctgaacaaatgatt

SEQ ID NO: 928145 - DNA, 33 bp, Homo sapien
aaggacaaatgtctaccggacaccttaatctca

SEQ ID NO: 928146 - DNA, 33 bp, Homo sapien
aaggacaaatgtctactggacaccttaatctca

SEQ ID NO: 928147 - DNA, 33 bp, Homo sapien
ccccaagtacagggaacaatttttgactggaac

SEQ ID NO: 928148 - DNA, 33 bp, Homo sapien
ccccaagtacagggaagaatttttgactggaac

SEQ ID NO: 928149 - DNA, 33 bp, Homo sapien
ttagtttggtaaattacctcacagcctgctcct

SEQ ID NO: 928150 - DNA, 33 bp, Homo sapien
ttagtttggtaaattatctcacagcctgctcct

SEQ ID NO: 928151 - DNA, 33 bp, Homo sapien
tagatttaggactccaactagatcaaagctagt

SEQ ID NO: 928152 - DNA, 33 bp, Homo sapien
tagatttaggactccagctagatcaaagctagt

SEQ ID NO: 928153 - DNA, 33 bp, Homo sapien
cccacaatgatgaaataacctacaaatgcattt

SEQ ID NO: 928154 - DNA, 33 bp, Homo sapien
cccacaatgatgaaattacctacaaatgcattt

SEQ ID NO: 928155 - DNA, 33 bp, Homo sapien
gataatttgtagccaaaggcagggtggggatca

SEQ ID NO: 928156 - DNA, 33 bp, Homo sapien
gataatttgtagccaacggcagggtggggatca

SEQ ID NO: 928157 - DNA, 33 bp, Homo sapien
tattgttcaattttcaaagccactcatcaattg

SEQ ID NO: 928158 - DNA, 33 bp, Homo sapien
tattgttcaattttcagagccactcatcaattg

SEQ ID NO: 928159 - DNA, 33 bp, Homo sapien
ataccttttggtttacagaatcctgctttttaa

SEQ ID NO: 928160 - DNA, 33 bp, Homo sapien
ataccttttggtttacggaatcctgctttttaa

SEQ ID NO: 928161 - DNA, 33 bp, Homo sapien
aaaacatttcctttagaccttcaagataaaaca

SEQ ID NO: 928162 - DNA, 33 bp, Homo sapien
aaaacatttcctttaggccttcaagataaaaca

SEQ ID NO: 928163 - DNA, 33 bp, Homo sapien
tgaaagtattcctttccatcctgtgcaaattag

SEQ ID NO: 928164 - DNA, 33 bp, Homo sapien
tgaaagtattcctttcgatcctgtgcaaattag

SEQ ID NO: 928165 - DNA, 33 bp, Homo sapien
ccattattgtatgttacaaacgaggcccaggaa

SEQ ID NO: 928166 - DNA, 33 bp, Homo sapien
ccattattgtatgttataaacgaggcccaggaa

SEQ ID NO: 928167 - DNA, 33 bp, Homo sapien
cagcaaacagaaataacagctagtcacagtgct

SEQ ID NO: 928168 - DNA, 33 bp, Homo sapien
cagcaaacagaaataatagctagtcacagtgct

SEQ ID NO: 928169 - DNA, 33 bp, Homo sapien
cccacttataattatacgcaaactgagagcagg

SEQ ID NO: 928170 - DNA, 33 bp, Homo sapien
cccacttataattatatgcaaactgagagcagg

SEQ ID NO: 928171 - DNA, 33 bp, Homo sapien
atgccaatagctcagaagttaccaccccttttc

SEQ ID NO: 928172 - DNA, 33 bp, Homo sapien
atgccaatagctcagacgttaccaccccttttc

SEQ ID NO: 928173 - DNA, 33 bp, Homo sapien
atacatttttgttctacgtcctcccagtctggt

SEQ ID NO: 928174 - DNA, 33 bp, Homo sapien
atacatttttgttctatgtcctcccagtctggt

SEQ ID NO: 928175 - DNA, 33 bp, Homo sapien
tcacagttttagaggacgaagtgtctttatgca

SEQ ID NO: 928176 - DNA, 33 bp, Homo sapien
tcacagttttagaggatgaagtgtctttatgca

SEQ ID NO: 928177 - DNA, 33 bp, Homo sapien
ctgtgtcctgcgatgacgataatgagcatctat

SEQ ID NO: 928178 - DNA, 33 bp, Homo sapien
ctgtgtcctgcgatgatgataatgagcatctat

SEQ ID NO: 928179 - DNA, 33 bp, Homo sapien
taataaacttctactcaaccttgaagctgcagc

SEQ ID NO: 928180 - DNA, 33 bp, Homo sapien
taataaacttctactccaccttgaagctgcagc

SEQ ID NO: 928181 - DNA, 33 bp, Homo sapien
agctaaacatttcccacgtaactctttagtttc

SEQ ID NO: 928182 - DNA, 33 bp, Homo sapien
agctaaacatttcccaggtaactctttagtttc

SEQ ID NO: 928183 - DNA, 33 bp, Homo sapien
caagcctcctgtgatacccttgagtacctgatg

SEQ ID NO: 928184 - DNA, 33 bp, Homo sapien
caagcctcctgtgatatccttgagtacctgatg

SEQ ID NO: 928185 - DNA, 33 bp, Homo sapien
ctttaaatccctcctacctgtgttatctctact

SEQ ID NO: 928186 - DNA, 33 bp, Homo sapien
ctttaaatccctcctatctgtgttatctctact

SEQ ID NO: 928187 - DNA, 33 bp, Homo sapien
attccttatgggccaccgaataataagtatatc

SEQ ID NO: 928188 - DNA, 33 bp, Homo sapien
attccttatgggccactgaataataagtatatc

SEQ ID NO: 928189 - DNA, 33 bp, Homo sapien
ataacactccatttcaccattcttgtttggcaa

SEQ ID NO: 928190 - DNA, 33 bp, Homo sapien
ataacactccatttcagcattcttgtttggcaa

SEQ ID NO: 928191 - DNA, 33 bp, Homo sapien
gggtcttagagaaagacagtggattatcataaa

SEQ ID NO: 928192 - DNA, 33 bp, Homo sapien
gggtcttagagaaagagagtggattatcataaa

SEQ ID NO: 928193 - DNA, 33 bp, Homo sapien
atttttgcagctcaaccctgccattgtttcagt

SEQ ID NO: 928194 - DNA, 33 bp, Homo sapien
atttttgcagctcaactctgccattgtttcagt

SEQ ID NO: 928195 - DNA, 33 bp, Homo sapien
aaagtgatcatgaagacgatggatggacacatg

SEQ ID NO: 928196 - DNA, 33 bp, Homo sapien
aaagtgatcatgaagatgatggatggacacatg

SEQ ID NO: 928197 - DNA, 33 bp, Homo sapien
gagctcctatttttcaccaggaaacattgcttc

SEQ ID NO: 928198 - DNA, 33 bp, Homo sapien
gagctcctatttttcatcaggaaacattgcttc

SEQ ID NO: 928199 - DNA, 33 bp, Homo sapien
tacgtatagtcagacccagctttacagagtgta

SEQ ID NO: 928200 - DNA, 33 bp, Homo sapien
tacgtatagtcagacctagctttacagagtgta

SEQ ID NO: 928201 - DNA, 33 bp, Homo sapien
aagctaattcatgtcaatataactagatcatat

SEQ ID NO: 928202 - DNA, 33 bp, Homo sapien
aagctaattcatgtcagtataactagatcatat

SEQ ID NO: 928203 - DNA, 33 bp, Homo sapien
attataatggaaccaaattgataccaagaaaga

SEQ ID NO: 928204 - DNA, 33 bp, Homo sapien
attataatggaaccaacttgataccaagaaaga

SEQ ID NO: 928205 - DNA, 33 bp, Homo sapien
aggcaggattttgacaatagtactttcaatatt

SEQ ID NO: 928206 - DNA, 33 bp, Homo sapien
aggcaggattttgacagtagtactttcaatatt

SEQ ID NO: 928207 - DNA, 33 bp, Homo sapien
caagaggcatcttttacgtctttaccaagcaaa

SEQ ID NO: 928208 - DNA, 33 bp, Homo sapien
caagaggcatcttttatgtctttaccaagcaaa

SEQ ID NO: 928209 - DNA, 33 bp, Homo sapien
aaacagatctgtgctaagacaagtctcttaaag

SEQ ID NO: 928210 - DNA, 33 bp, Homo sapien
aaacagatctgtgctaggacaagtctcttaaag

SEQ ID NO: 928211 - DNA, 33 bp, Homo sapien
ggcttccaagatgcatgacaaagccatcccact

SEQ ID NO: 928212 - DNA, 33 bp, Homo sapien
ggcttccaagatgcattacaaagccatcccact

SEQ ID NO: 928213 - DNA, 33 bp, Homo sapien
tttctgacaaaaccaaagcaatcgtgctccttg

SEQ ID NO: 928214 - DNA, 33 bp, Homo sapien
tttctgacaaaaccaatgcaatcgtgctccttg

SEQ ID NO: 928215 - DNA, 33 bp, Homo sapien
aatgggaaagggaaaaatcatcaagcttctctc

SEQ ID NO: 928216 - DNA, 33 bp, Homo sapien
aatgggaaagggaaaagtcatcaagcttctctc

SEQ ID NO: 928217 - DNA, 33 bp, Homo sapien
gattttgaaagggcctcaaatttgtggacttag

SEQ ID NO: 928218 - DNA, 33 bp, Homo sapien
gattttgaaagggccttaaatttgtggacttag

SEQ ID NO: 928219 - DNA, 33 bp, Homo sapien
ttactaaatacagcaacgttctggcagcttcag

SEQ ID NO: 928220 - DNA, 33 bp, Homo sapien
ttactaaatacagcaaggttctggcagcttcag

SEQ ID NO: 928221 - DNA, 33 bp, Homo sapien
gcagttgttcttccaactggaggccagagtgtg

SEQ ID NO: 928222 - DNA, 33 bp, Homo sapien
gcagttgttcttccaattggaggccagagtgtg

SEQ ID NO: 928223 - DNA, 33 bp, Homo sapien
aagagtcagataagtacaatcagaagtgacaaa

SEQ ID NO: 928224 - DNA, 33 bp, Homo sapien
aagagtcagataagtataatcagaagtgacaaa

SEQ ID NO: 928225 - DNA, 33 bp, Homo sapien
ttgcactatcctctaccgcaaccacatcagaca

SEQ ID NO: 928226 - DNA, 33 bp, Homo sapien
ttgcactatcctctactgcaaccacatcagaca

SEQ ID NO: 928227 - DNA, 33 bp, Homo sapien
caagattgtttctctactaagtgtaaaaccatt

SEQ ID NO: 928228 - DNA, 33 bp, Homo sapien
caagattgtttctctattaagtgtaaaaccatt

SEQ ID NO: 928229 - DNA, 33 bp, Homo sapien
atgcaactgagaaggaagaattatcactaacta

SEQ ID NO: 928230 - DNA, 33 bp, Homo sapien
atgcaactgagaaggatgaattatcactaacta

SEQ ID NO: 928231 - DNA, 33 bp, Homo sapien
taaataaatatgctccaagaaataatagtttga

SEQ ID NO: 928232 - DNA, 33 bp, Homo sapien
taaataaatatgctccgagaaataatagtttga

SEQ ID NO: 928233 - DNA, 33 bp, Homo sapien
atatcatacaacaaaacaatgatggtcaacatg

SEQ ID NO: 928234 - DNA, 33 bp, Homo sapien
atatcatacaacaaaataatgatggtcaacatg

SEQ ID NO: 928235 - DNA, 33 bp, Homo sapien
tgtattctttagcatacaagggtgctattttca

SEQ ID NO: 928236 - DNA, 33 bp, Homo sapien
tgtattctttagcatagaagggtgctattttca

SEQ ID NO: 928237 - DNA, 33 bp, Homo sapien
tgatcactgagagaataacaaaccatccttgtg

SEQ ID NO: 928238 - DNA, 33 bp, Homo sapien
tgatcactgagagaatgacaaaccatccttgtg

SEQ ID NO: 928239 - DNA, 33 bp, Homo sapien
tttaagtttggtttgcagaaattgtcttccaac

SEQ ID NO: 928240 - DNA, 33 bp, Homo sapien
tttaagtttggtttgcggaaattgtcttccaac

SEQ ID NO: 928241 - DNA, 33 bp, Homo sapien
ttcttccaacttgtcacgttctttttctcttgc

SEQ ID NO: 928242 - DNA, 33 bp, Homo sapien
ttcttccaacttgtcatgttctttttctcttgc

SEQ ID NO: 928243 - DNA, 33 bp, Homo sapien
ttaaggccagcatttaccttggtctaataaact

SEQ ID NO: 928244 - DNA, 33 bp, Homo sapien
ttaaggccagcatttatcttggtctaataaact

SEQ ID NO: 928245 - DNA, 33 bp, Homo sapien
gcctcactggctataactggagtctcgtgttct

SEQ ID NO: 928246 - DNA, 33 bp, Homo sapien
gcctcactggctataattggagtctcgtgttct

SEQ ID NO: 928247 - DNA, 33 bp, Homo sapien
acaagaaagaataaaactgcatactgtgctgga

SEQ ID NO: 928248 - DNA, 33 bp, Homo sapien
acaagaaagaataaaattgcatactgtgctgga

SEQ ID NO: 928249 - DNA, 33 bp, Homo sapien
actggggatacagtgcaattacagccaaatgga

SEQ ID NO: 928250 - DNA, 33 bp, Homo sapien
actggggatacagtgccattacagccaaatgga

SEQ ID NO: 928251 - DNA, 33 bp, Homo sapien
tgaagacccccccccaatacagtgctaccttct

SEQ ID NO: 928252 - DNA, 33 bp, Homo sapien
tgaagacccccccccagtacagtgctaccttct

SEQ ID NO: 928253 - DNA, 33 bp, Homo sapien
aaattggcctaatgaactgactggtatgcacca

SEQ ID NO: 928254 - DNA, 33 bp, Homo sapien
aaattggcctaatgaattgactggtatgcacca

SEQ ID NO: 928255 - DNA, 33 bp, Homo sapien
tggaataggtcaagcaccatctccttaagcaaa

SEQ ID NO: 928256 - DNA, 33 bp, Homo sapien
tggaataggtcaagcagcatctccttaagcaaa

SEQ ID NO: 928257 - DNA, 33 bp, Homo sapien
aaacattctcactagaaggcctcaatcttttta

SEQ ID NO: 928258 - DNA, 33 bp, Homo sapien
aaacattctcactagagggcctcaatcttttta

SEQ ID NO: 928259 - DNA, 33 bp, Homo sapien
aatcttacgtagtagcacaattatttcataaga

SEQ ID NO: 928260 - DNA, 33 bp, Homo sapien
aatcttacgtagtagcgcaattatttcataaga

SEQ ID NO: 928261 - DNA, 33 bp, Homo sapien
tacagagcataggaacaaagaccagtagctata

SEQ ID NO: 928262 - DNA, 33 bp, Homo sapien
tacagagcataggaacgaagaccagtagctata

SEQ ID NO: 928263 - DNA, 33 bp, Homo sapien
tacttgaaagttaaaaacaaagagtgacaagag

SEQ ID NO: 928264 - DNA, 33 bp, Homo sapien
tacttgaaagttaaaagcaaagagtgacaagag

SEQ ID NO: 928265 - DNA, 33 bp, Homo sapien
agagaggaaaactagcagaagcataaggaaaga

SEQ ID NO: 928266 - DNA, 33 bp, Homo sapien
agagaggaaaactagctgaagcataaggaaaga

SEQ ID NO: 928267 - DNA, 33 bp, Homo sapien
cgggcaaccaacaaggaacaggatgtgagtggt

SEQ ID NO: 928268 - DNA, 33 bp, Homo sapien
cgggcaaccaacaaggcacaggatgtgagtggt

SEQ ID NO: 928269 - DNA, 33 bp, Homo sapien
agagcagactggcaggacaatatttttcaaggc

SEQ ID NO: 928270 - DNA, 33 bp, Homo sapien
agagcagactggcagggcaatatttttcaaggc

SEQ ID NO: 928271 - DNA, 33 bp, Homo sapien
catgaactatagtcaacaggaaaatggcatggt

SEQ ID NO: 928272 - DNA, 33 bp, Homo sapien
catgaactatagtcaataggaaaatggcatggt

SEQ ID NO: 928273 - DNA, 33 bp, Homo sapien
gtgatttgagcactcaatataggctaaagacac

SEQ ID NO: 928274 - DNA, 33 bp, Homo sapien
gtgatttgagcactcagtataggctaaagacac

SEQ ID NO: 928275 - DNA, 33 bp, Homo sapien
cttgaagcaagacttacggtgcttgagccatca

SEQ ID NO: 928276 - DNA, 33 bp, Homo sapien
cttgaagcaagacttatggtgcttgagccatca

SEQ ID NO: 928277 - DNA, 33 bp, Homo sapien
gatgatggatccagaaacctaaagtcattttac

SEQ ID NO: 928278 - DNA, 33 bp, Homo sapien
gatgatggatccagaatcctaaagtcattttac

SEQ ID NO: 928279 - DNA, 33 bp, Homo sapien
taggcctctggcaataaccttatttctgtgatt

SEQ ID NO: 928280 - DNA, 33 bp, Homo sapien
taggcctctggcaatatccttatttctgtgatt

SEQ ID NO: 928281 - DNA, 33 bp, Homo sapien
gcattcctctgcaaaacggaaacgagggtatta

SEQ ID NO: 928282 - DNA, 33 bp, Homo sapien
gcattcctctgcaaaatggaaacgagggtatta

SEQ ID NO: 928283 - DNA, 33 bp, Homo sapien
tttccttcatctagcactgattacttcagatat

SEQ ID NO: 928284 - DNA, 33 bp, Homo sapien
tttccttcatctagcattgattacttcagatat

SEQ ID NO: 928285 - DNA, 33 bp, Homo sapien
gttgtttaattttacactcctactacagggtag

SEQ ID NO: 928286 - DNA, 33 bp, Homo sapien
gttgtttaattttacattcctactacagggtag

SEQ ID NO: 928287 - DNA, 33 bp, Homo sapien
tcattttctcttcaaagaattttacatgagaga

SEQ ID NO: 928288 - DNA, 33 bp, Homo sapien
tcattttctcttcaaataattttacatgagaga

SEQ ID NO: 928289 - DNA, 33 bp, Homo sapien
aatagacagttttaacaaattggactaaatgtc

SEQ ID NO: 928290 - DNA, 33 bp, Homo sapien
aatagacagttttaacgaattggactaaatgtc

SEQ ID NO: 928291 - DNA, 33 bp, Homo sapien
aaattaacattcatgaagtttggtgactaagtc

SEQ ID NO: 928292 - DNA, 33 bp, Homo sapien
aaattaacattcatgaggtttggtgactaagtc

SEQ ID NO: 928293 - DNA, 33 bp, Homo sapien
tgcattattctgcttacgtgaggtatctaaagt

SEQ ID NO: 928294 - DNA, 33 bp, Homo sapien
tgcattattctgcttatgtgaggtatctaaagt

SEQ ID NO: 928295 - DNA, 33 bp, Homo sapien
tttaggcaaatagagggaaagcagagaactttc

SEQ ID NO: 928296 - DNA, 33 bp, Homo sapien
tttaggcaaatagaggtaaagcagagaactttc

SEQ ID NO: 928297 - DNA, 33 bp, Homo sapien
aatgtatgtgattatacggtgaataaacattct

SEQ ID NO: 928298 - DNA, 33 bp, Homo sapien
aatgtatgtgattatatggtgaataaacattct

SEQ ID NO: 928299 - DNA, 33 bp, Homo sapien
tgagtcggatttggtacgtcacactgagatatt

SEQ ID NO: 928300 - DNA, 33 bp, Homo sapien
tgagtcggatttggtatgtcacactgagatatt

SEQ ID NO: 928301 - DNA, 33 bp, Homo sapien
gcagtgtagcctggcacgaatagatgttggcat

SEQ ID NO: 928302 - DNA, 33 bp, Homo sapien
gcagtgtagcctggcatgaatagatgttggcat

SEQ ID NO: 928303 - DNA, 33 bp, Homo sapien
atctgtgggtgatgcaatctttcatttaaaaaa

SEQ ID NO: 928304 - DNA, 33 bp, Homo sapien
atctgtgggtgatgcagtctttcatttaaaaaa

SEQ ID NO: 928305 - DNA, 33 bp, Homo sapien
aagtttaggactacgtcaaatgtccaaacctaa

SEQ ID NO: 928306 - DNA, 33 bp, Homo sapien
aagtttaggactacgttaaatgtccaaacctaa

SEQ ID NO: 928307 - DNA, 33 bp, Homo sapien
aacttctggaaattaacgacacacttagagatg

SEQ ID NO: 928308 - DNA, 33 bp, Homo sapien
aacttctggaaattaaggacacacttagagatg

SEQ ID NO: 928309 - DNA, 33 bp, Homo sapien
cctttttcttcagagaaatttcatagctcacag

SEQ ID NO: 928310 - DNA, 33 bp, Homo sapien
cctttttcttcagagagatttcatagctcacag

SEQ ID NO: 928311 - DNA, 33 bp, Homo sapien
ctttcaccatatatggaagtcaaactaaaatgg

SEQ ID NO: 928312 - DNA, 33 bp, Homo sapien
ctttcaccatatatgggagtcaaactaaaatgg

SEQ ID NO: 928313 - DNA, 33 bp, Homo sapien
gaatggaatgagaggaacttatgttaagtgaag

SEQ ID NO: 928314 - DNA, 33 bp, Homo sapien
gaatggaatgagaggaccttatgttaagtgaag

SEQ ID NO: 928315 - DNA, 33 bp, Homo sapien
taagcttttacatacaagaagataaaagtattg

SEQ ID NO: 928316 - DNA, 33 bp, Homo sapien
taagcttttacatacaggaagataaaagtattg

SEQ ID NO: 928317 - DNA, 33 bp, Homo sapien
agacagtggaaagagcggaaagtttctaccttt

SEQ ID NO: 928318 - DNA, 33 bp, Homo sapien
agacagtggaaagagctgaaagtttctaccttt

SEQ ID NO: 928319 - DNA, 33 bp, Homo sapien
ccctgtactgtgcaagaaattttttgattgccc

SEQ ID NO: 928320 - DNA, 33 bp, Homo sapien
ccctgtactgtgcaaggaattttttgattgccc

SEQ ID NO: 928321 - DNA, 33 bp, Homo sapien
taatttataacaaaaaatatctgcaataacact

SEQ ID NO: 928322 - DNA, 33 bp, Homo sapien
taatttataacaaaaagtatctgcaataacact

SEQ ID NO: 928323 - DNA, 33 bp, Homo sapien
tagagctcgagcaaggaaagtgccaggggttga

SEQ ID NO: 928324 - DNA, 33 bp, Homo sapien
tagagctcgagcaagggaagtgccaggggttga

SEQ ID NO: 928325 - DNA, 33 bp, Homo sapien
catcactacagactcacggattcctgttctagt

SEQ ID NO: 928326 - DNA, 33 bp, Homo sapien
catcactacagactcatggattcctgttctagt

SEQ ID NO: 928327 - DNA, 33 bp, Homo sapien
agcaatgtatggcctaccttatattcataactt

SEQ ID NO: 928328 - DNA, 33 bp, Homo sapien
agcaatgtatggcctatcttatattcataactt

SEQ ID NO: 928329 - DNA, 33 bp, Homo sapien
aagctttcttttgaaccctgagatcattatttc

SEQ ID NO: 928330 - DNA, 33 bp, Homo sapien
aagctttcttttgaactctgagatcattatttc

SEQ ID NO: 928331 - DNA, 33 bp, Homo sapien
ttgctgttatgacagaaaagcaacactaagtcc

SEQ ID NO: 928332 - DNA, 33 bp, Homo sapien
ttgctgttatgacagagaagcaacactaagtcc

SEQ ID NO: 928333 - DNA, 33 bp, Homo sapien
taacagacattctgacgagggtaagatgttatc

SEQ ID NO: 928334 - DNA, 33 bp, Homo sapien
taacagacattctgactagggtaagatgttatc

SEQ ID NO: 928335 - DNA, 33 bp, Homo sapien
actttctatcattagcaccatcttaatgaccaa

SEQ ID NO: 928336 - DNA, 33 bp, Homo sapien
actttctatcattagcgccatcttaatgaccaa

SEQ ID NO: 928337 - DNA, 33 bp, Homo sapien
tgcctatggatctttaacaggcttgccactgtg

SEQ ID NO: 928338 - DNA, 33 bp, Homo sapien
tgcctatggatctttagcaggcttgccactgtg

SEQ ID NO: 928339 - DNA, 33 bp, Homo sapien
gaacaaaggagaaatcacaagatatgtaacata

SEQ ID NO: 928340 - DNA, 33 bp, Homo sapien
gaacaaaggagaaatcgcaagatatgtaacata

SEQ ID NO: 928341 - DNA, 33 bp, Homo sapien
ctggtacctctttatagaacatctctaaggcta

SEQ ID NO: 928342 - DNA, 33 bp, Homo sapien
ctggtacctctttatataacatctctaaggcta

SEQ ID NO: 928343 - DNA, 33 bp, Homo sapien
cttggaaagagattaaacaatcccattctagag

SEQ ID NO: 928344 - DNA, 33 bp, Homo sapien
cttggaaagagattaaccaatcccattctagag

SEQ ID NO: 928345 - DNA, 33 bp, Homo sapien
tgtggcatttctgagccgagttagcagagccta

SEQ ID NO: 928346 - DNA, 33 bp, Homo sapien
tgtggcatttctgagctgagttagcagagccta

SEQ ID NO: 928347 - DNA, 33 bp, Homo sapien
ctaccttacccacaaagataggccctccttatc

SEQ ID NO: 928348 - DNA, 33 bp, Homo sapien
ctaccttacccacaaatataggccctccttatc

SEQ ID NO: 928349 - DNA, 33 bp, Homo sapien
tttcagtaatatcaaacgcagaaaatgctgtgt

SEQ ID NO: 928350 - DNA, 33 bp, Homo sapien
tttcagtaatatcaaatgcagaaaatgctgtgt

SEQ ID NO: 928351 - DNA, 33 bp, Homo sapien
gacgtaccatctcctaacacactggtgtcaggg

SEQ ID NO: 928352 - DNA, 33 bp, Homo sapien
gacgtaccatctcctaccacactggtgtcaggg

SEQ ID NO: 928353 - DNA, 33 bp, Homo sapien
tgatagtttgggaaataagaatcaagctgtaac

SEQ ID NO: 928354 - DNA, 33 bp, Homo sapien
tgatagtttgggaaatgagaatcaagctgtaac

SEQ ID NO: 928355 - DNA, 33 bp, Homo sapien
tctgttctgcatacaaactgtgggtgggaccag

SEQ ID NO: 928356 - DNA, 33 bp, Homo sapien
tctgttctgcatacaatctgtgggtgggaccag

SEQ ID NO: 928357 - DNA, 33 bp, Homo sapien
gttctaaatatcctaccgaataatgtgtaccaa

SEQ ID NO: 928358 - DNA, 33 bp, Homo sapien
gttctaaatatcctactgaataatgtgtaccaa

SEQ ID NO: 928359 - DNA, 33 bp, Homo sapien
acaactgttgctttgacgacctgaacaacttcc

SEQ ID NO: 928360 - DNA, 33 bp, Homo sapien
acaactgttgctttgatgacctgaacaacttcc

SEQ ID NO: 928361 - DNA, 33 bp, Homo sapien
atggaagaatctctgaaagcccaagtttcctac

SEQ ID NO: 928362 - DNA, 33 bp, Homo sapien
atggaagaatctctgacagcccaagtttcctac

SEQ ID NO: 928363 - DNA, 33 bp, Homo sapien
gtcattgaaatttaccaagaatctatgaagtaa

SEQ ID NO: 928364 - DNA, 33 bp, Homo sapien
gtcattgaaatttaccgagaatctatgaagtaa

SEQ ID NO: 928365 - DNA, 33 bp, Homo sapien
atgcagtaatttaccaacacgaaaatgtgacca

SEQ ID NO: 928366 - DNA, 33 bp, Homo sapien
atgcagtaatttaccagcacgaaaatgtgacca

SEQ ID NO: 928367 - DNA, 33 bp, Homo sapien
tggtggagcagacgcaaagaccaaatgacttaa

SEQ ID NO: 928368 - DNA, 33 bp, Homo sapien
tggtggagcagacgcagagaccaaatgacttaa

SEQ ID NO: 928369 - DNA, 33 bp, Homo sapien
catggcttgaagtatcaccaataagttaaaatt

SEQ ID NO: 928370 - DNA, 33 bp, Homo sapien
catggcttgaagtatcgccaataagttaaaatt

SEQ ID NO: 928371 - DNA, 33 bp, Homo sapien
atgggtcagaaatacaccataaatttgttggat

SEQ ID NO: 928372 - DNA, 33 bp, Homo sapien
atgggtcagaaatacagcataaatttgttggat

SEQ ID NO: 928373 - DNA, 33 bp, Homo sapien
taaatgtgctttcaacgagcaaatcatttccaa

SEQ ID NO: 928374 - DNA, 33 bp, Homo sapien
taaatgtgctttcaactagcaaatcatttccaa

SEQ ID NO: 928375 - DNA, 33 bp, Homo sapien
ggcataaatgactttgcaatttcacttcatcct

SEQ ID NO: 928376 - DNA, 33 bp, Homo sapien
ggcataaatgactttgtaatttcacttcatcct

SEQ ID NO: 928377 - DNA, 33 bp, Homo sapien
gtcatttaaaaagggacgcaatcaggctaaaaa

SEQ ID NO: 928378 - DNA, 33 bp, Homo sapien
gtcatttaaaaagggatgcaatcaggctaaaaa

SEQ ID NO: 928379 - DNA, 33 bp, Homo sapien
cagctgaagataaaggccaggtcatttaaaaag

SEQ ID NO: 928380 - DNA, 33 bp, Homo sapien
cagctgaagataaaggtcaggtcatttaaaaag

SEQ ID NO: 928381 - DNA, 33 bp, Homo sapien
taaggaatacaataaaacgatacaaaggctaaa

SEQ ID NO: 928382 - DNA, 33 bp, Homo sapien
taaggaatacaataaagcgatacaaaggctaaa

SEQ ID NO: 928383 - DNA, 33 bp, Homo sapien
gttactataggcacaaattacagaataaagaat

SEQ ID NO: 928384 - DNA, 33 bp, Homo sapien
gttactataggcacaagttacagaataaagaat

SEQ ID NO: 928385 - DNA, 33 bp, Homo sapien
agctattttctacaccaagaaatttttagaaag

SEQ ID NO: 928386 - DNA, 33 bp, Homo sapien
agctattttctacaccgagaaatttttagaaag

SEQ ID NO: 928387 - DNA, 33 bp, Homo sapien
gacaaaaaaaggaaaacgaggaatagcacgttt

SEQ ID NO: 928388 - DNA, 33 bp, Homo sapien
gacaaaaaaaggaaaatgaggaatagcacgttt

SEQ ID NO: 928389 - DNA, 33 bp, Homo sapien
atgtttgaaaaaaggccaaaggtcagattgtgt

SEQ ID NO: 928390 - DNA, 33 bp, Homo sapien
atgtttgaaaaaaggctaaaggtcagattgtgt

SEQ ID NO: 928391 - DNA, 33 bp, Homo sapien
caaagctattaaaatcgcacaagagagtgcagg

SEQ ID NO: 928392 - DNA, 33 bp, Homo sapien
caaagctattaaaatctcacaagagagtgcagg

SEQ ID NO: 928393 - DNA, 33 bp, Homo sapien
ataacgtaaaatttggcagatagaaatgaagag

SEQ ID NO: 928394 - DNA, 33 bp, Homo sapien
ataacgtaaaatttggtagatagaaatgaagag

SEQ ID NO: 928395 - DNA, 33 bp, Homo sapien
ctgatcattggacaaagcttctaacattttaaa

SEQ ID NO: 928396 - DNA, 33 bp, Homo sapien
ctgatcattggacaaatcttctaacattttaaa

SEQ ID NO: 928397 - DNA, 33 bp, Homo sapien
tgcctttgatttcaggcattgtgaaaaagtcag

SEQ ID NO: 928398 - DNA, 33 bp, Homo sapien
tgcctttgatttcaggtattgtgaaaaagtcag

SEQ ID NO: 928399 - DNA, 33 bp, Homo sapien
tttaggtcagaatgtcaagaagacttgaagctt

SEQ ID NO: 928400 - DNA, 33 bp, Homo sapien
tttaggtcagaatgtcgagaagacttgaagctt

SEQ ID NO: 928401 - DNA, 33 bp, Homo sapien
taagaaagagttaagcaattttatgagtgtgag

SEQ ID NO: 928402 - DNA, 33 bp, Homo sapien
taagaaagagttaagcgattttatgagtgtgag

SEQ ID NO: 928403 - DNA, 33 bp, Homo sapien
aaacaaaatggactggaaaaaatggccccatat

SEQ ID NO: 928404 - DNA, 33 bp, Homo sapien
aaacaaaatggactgggaaaaatggccccatat

SEQ ID NO: 928405 - DNA, 33 bp, Homo sapien
atatctgcatctttaaacaacatgtgactatat

SEQ ID NO: 928406 - DNA, 33 bp, Homo sapien
atatctgcatctttaagcaacatgtgactatat

SEQ ID NO: 928407 - DNA, 33 bp, Homo sapien
atgttgcaagaagcttgaaagtggttatgaatt

SEQ ID NO: 928408 - DNA, 33 bp, Homo sapien
atgttgcaagaagctttaaagtggttatgaatt

SEQ ID NO: 928409 - DNA, 33 bp, Homo sapien
ttcaaaaagaaaagagaaaatcattgtactaaa

SEQ ID NO: 928410 - DNA, 33 bp, Homo sapien
ttcaaaaagaaaagagcaaatcattgtactaaa

SEQ ID NO: 928411 - DNA, 33 bp, Homo sapien
ccattttctctagacacctatcttttcatttga

SEQ ID NO: 928412 - DNA, 33 bp, Homo sapien
ccattttctctagacatctatcttttcatttga

SEQ ID NO: 928413 - DNA, 33 bp, Homo sapien
tggtagcaataaaaacaaacttctgaaatatgc

SEQ ID NO: 928414 - DNA, 33 bp, Homo sapien
tggtagcaataaaaacgaacttctgaaatatgc

SEQ ID NO: 928415 - DNA, 33 bp, Homo sapien
acattgaatatgggacacaaatgttctatttaa

SEQ ID NO: 928416 - DNA, 33 bp, Homo sapien
acattgaatatgggactcaaatgttctatttaa

SEQ ID NO: 928417 - DNA, 33 bp, Homo sapien
gaatgccctaggccaactgagtacttgactgac

SEQ ID NO: 928418 - DNA, 33 bp, Homo sapien
gaatgccctaggccaattgagtacttgactgac

SEQ ID NO: 928419 - DNA, 33 bp, Homo sapien
agttgtgaccaaagtacgatttaggattttgat

SEQ ID NO: 928420 - DNA, 33 bp, Homo sapien
agttgtgaccaaagtatgatttaggattttgat

SEQ ID NO: 928421 - DNA, 33 bp, Homo sapien
ctagttcaagacatcaaaatctcttaaccagaa

SEQ ID NO: 928422 - DNA, 33 bp, Homo sapien
ctagttcaagacatcacaatctcttaaccagaa

SEQ ID NO: 928423 - DNA, 33 bp, Homo sapien
ttaattttgtggagcggaactgctgaaattttg

SEQ ID NO: 928424 - DNA, 33 bp, Homo sapien
ttaattttgtggagcgtaactgctgaaattttg

SEQ ID NO: 928425 - DNA, 33 bp, Homo sapien
gaggaaagcgagattacactaaggttttgttaa

SEQ ID NO: 928426 - DNA, 33 bp, Homo sapien
gaggaaagcgagattatactaaggttttgttaa

SEQ ID NO: 928427 - DNA, 33 bp, Homo sapien
agaaaatggccttcaaagctaaagaatatcata

SEQ ID NO: 928428 - DNA, 33 bp, Homo sapien
agaaaatggccttcaaggctaaagaatatcata

SEQ ID NO: 928429 - DNA, 33 bp, Homo sapien
ctgaatcatagatcacaggaagaatattgcact

SEQ ID NO: 928430 - DNA, 33 bp, Homo sapien
ctgaatcatagatcacgggaagaatattgcact

SEQ ID NO: 928431 - DNA, 33 bp, Homo sapien
aggaagagaatcataaaataagtagtgcagggg

SEQ ID NO: 928432 - DNA, 33 bp, Homo sapien
aggaagagaatcataatataagtagtgcagggg

SEQ ID NO: 928433 - DNA, 33 bp, Homo sapien
ttattcattatatagactccctcagcctctttc

SEQ ID NO: 928434 - DNA, 33 bp, Homo sapien
ttattcattatatagattccctcagcctctttc

SEQ ID NO: 928435 - DNA, 33 bp, Homo sapien
cctaggaataaaccaacgagaatttttagccaa

SEQ ID NO: 928436 - DNA, 33 bp, Homo sapien
cctaggaataaaccaaggagaatttttagccaa

SEQ ID NO: 928437 - DNA, 33 bp, Homo sapien
taggactgtaatgttacggaaactcggaactcg

SEQ ID NO: 928438 - DNA, 33 bp, Homo sapien
taggactgtaatgttatggaaactcggaactcg

SEQ ID NO: 928439 - DNA, 33 bp, Homo sapien
cagctaaaaacaacaaacttccactatagcatc

SEQ ID NO: 928440 - DNA, 33 bp, Homo sapien
cagctaaaaacaacaagcttccactatagcatc

SEQ ID NO: 928441 - DNA, 33 bp, Homo sapien
agtctaagacatccaactaacacactcaccagg

SEQ ID NO: 928442 - DNA, 33 bp, Homo sapien
agtctaagacatccaattaacacactcaccagg

SEQ ID NO: 928443 - DNA, 33 bp, Homo sapien
gtcaacatgatcaaaacaaattgtggacagtct

SEQ ID NO: 928444 - DNA, 33 bp, Homo sapien
gtcaacatgatcaaaataaattgtggacagtct

SEQ ID NO: 928445 - DNA, 33 bp, Homo sapien
cttatccaatgtcttacgctcctcgttaaacaa

SEQ ID NO: 928446 - DNA, 33 bp, Homo sapien
cttatccaatgtcttatgctcctcgttaaacaa

SEQ ID NO: 928447 - DNA, 33 bp, Homo sapien
atggagaaatagtatcacagctctgcaatagga

SEQ ID NO: 928448 - DNA, 33 bp, Homo sapien
atggagaaatagtatcccagctctgcaatagga

SEQ ID NO: 928449 - DNA, 33 bp, Homo sapien
aatcaacaagcagaaaatacgttttcccagcaa

SEQ ID NO: 928450 - DNA, 33 bp, Homo sapien
aatcaacaagcagaaactacgttttcccagcaa

SEQ ID NO: 928451 - DNA, 33 bp, Homo sapien
tgtatttgtggactcactcgggctataaagtga

SEQ ID NO: 928452 - DNA, 33 bp, Homo sapien
tgtatttgtggactcattcgggctataaagtga

SEQ ID NO: 928453 - DNA, 33 bp, Homo sapien
ccagcaagttgctttacatatggaatcactcat

SEQ ID NO: 928454 - DNA, 33 bp, Homo sapien
ccagcaagttgctttatatatggaatcactcat

SEQ ID NO: 928455 - DNA, 33 bp, Homo sapien
cccaggtcgtattttacgaaaatgtatgtacag

SEQ ID NO: 928456 - DNA, 33 bp, Homo sapien
cccaggtcgtattttatgaaaatgtatgtacag

SEQ ID NO: 928457 - DNA, 33 bp, Homo sapien
tcttagtagtatagaaaaatccagtaaaagagg

SEQ ID NO: 928458 - DNA, 33 bp, Homo sapien
tcttagtagtatagaacaatccagtaaaagagg

SEQ ID NO: 928459 - DNA, 33 bp, Homo sapien
gaggatgaagtacagaatcctgcttcaggaaga

SEQ ID NO: 928460 - DNA, 33 bp, Homo sapien
gaggatgaagtacagattcctgcttcaggaaga

SEQ ID NO: 928461 - DNA, 33 bp, Homo sapien
agaaaagaaacctgtgcattttgatgtatgtaa

SEQ ID NO: 928462 - DNA, 33 bp, Homo sapien
agaaaagaaacctgtgtattttgatgtatgtaa

SEQ ID NO: 928463 - DNA, 33 bp, Homo sapien
tctgtaattgcatttgcaaagagacaatataaa

SEQ ID NO: 928464 - DNA, 33 bp, Homo sapien
tctgtaattgcatttgtaaagagacaatataaa

SEQ ID NO: 928465 - DNA, 33 bp, Homo sapien
cactggctctagtccacgcataaaaagatggta

SEQ ID NO: 928466 - DNA, 33 bp, Homo sapien
cactggctctagtccaggcataaaaagatggta

SEQ ID NO: 928467 - DNA, 33 bp, Homo sapien
aaaatcaaaagtattaacctgtggagtcaagtg

SEQ ID NO: 928468 - DNA, 33 bp, Homo sapien
aaaatcaaaagtattaccctgtggagtcaagtg

SEQ ID NO: 928469 - DNA, 33 bp, Homo sapien
agattagtatctctaaaacggaaagaaacctta

SEQ ID NO: 928470 - DNA, 33 bp, Homo sapien
agattagtatctctaacacggaaagaaacctta

SEQ ID NO: 928471 - DNA, 33 bp, Homo sapien
cagagaagtagtataacgccatatcaatccctt

SEQ ID NO: 928472 - DNA, 33 bp, Homo sapien
cagagaagtagtataatgccatatcaatccctt

SEQ ID NO: 928473 - DNA, 33 bp, Homo sapien
cttacacaagcccagacgatgtttatttttaaa

SEQ ID NO: 928474 - DNA, 33 bp, Homo sapien
cttacacaagcccagatgatgtttatttttaaa

SEQ ID NO: 928475 - DNA, 33 bp, Homo sapien
agcaatactggttgcacattaaatgaatatata

SEQ ID NO: 928476 - DNA, 33 bp, Homo sapien
agcaatactggttgcatattaaatgaatatata

SEQ ID NO: 928477 - DNA, 33 bp, Homo sapien
taacatctctgaaatacggctctatcttaaaat

SEQ ID NO: 928478 - DNA, 33 bp, Homo sapien
taacatctctgaaatatggctctatcttaaaat

SEQ ID NO: 928479 - DNA, 33 bp, Homo sapien
tactgtgatatcagcaaactcgttctcaaattc

SEQ ID NO: 928480 - DNA, 33 bp, Homo sapien
tactgtgatatcagcagactcgttctcaaattc

SEQ ID NO: 928481 - DNA, 33 bp, Homo sapien
tcctagcacctgcgaaagggccctagcacctgg

SEQ ID NO: 928482 - DNA, 33 bp, Homo sapien
tcctagcacctgcgaaggggccctagcacctgg

SEQ ID NO: 928483 - DNA, 33 bp, Homo sapien
actactagctaactaacaacacaagaggcactg

SEQ ID NO: 928484 - DNA, 33 bp, Homo sapien
actactagctaactaataacacaagaggcactg

SEQ ID NO: 928485 - DNA, 33 bp, Homo sapien
gataattgttcgctaaataagtactgaataaga

SEQ ID NO: 928486 - DNA, 33 bp, Homo sapien
gataattgttcgctaagtaagtactgaataaga

SEQ ID NO: 928487 - DNA, 33 bp, Homo sapien
ctgtaatattgtatagacaaactgtgcaccaaa

SEQ ID NO: 928488 - DNA, 33 bp, Homo sapien
ctgtaatattgtataggcaaactgtgcaccaaa

SEQ ID NO: 928489 - DNA, 33 bp, Homo sapien
ctctgatctggaagaaagcgagctggaagaaga

SEQ ID NO: 928490 - DNA, 33 bp, Homo sapien
ctctgatctggaagaacgcgagctggaagaaga

SEQ ID NO: 928491 - DNA, 33 bp, Homo sapien
tgactataggctgcaccgagataatcacctgat

SEQ ID NO: 928492 - DNA, 33 bp, Homo sapien
tgactataggctgcactgagataatcacctgat

SEQ ID NO: 928493 - DNA, 33 bp, Homo sapien
ggctccatccaggtaacagattggctgcctcag

SEQ ID NO: 928494 - DNA, 33 bp, Homo sapien
ggctccatccaggtaatagattggctgcctcag

SEQ ID NO: 928495 - DNA, 33 bp, Homo sapien
taaagggtatctggccaaaatggaaagaaaaga

SEQ ID NO: 928496 - DNA, 33 bp, Homo sapien
taaagggtatctggccgaaatggaaagaaaaga

SEQ ID NO: 928497 - DNA, 33 bp, Homo sapien
aatgggtgtatttacccgatgtctataccacca

SEQ ID NO: 928498 - DNA, 33 bp, Homo sapien
aatgggtgtatttacctgatgtctataccacca

SEQ ID NO: 928499 - DNA, 33 bp, Homo sapien
tttgtccattctcgtacgactgtcttattttag

SEQ ID NO: 928500 - DNA, 33 bp, Homo sapien
tttgtccattctcgtatgactgtcttattttag

SEQ ID NO: 928501 - DNA, 33 bp, Homo sapien
aactcttgtaaggccaatctagtggtaacaaat

SEQ ID NO: 928502 - DNA, 33 bp, Homo sapien
aactcttgtaaggccagtctagtggtaacaaat

SEQ ID NO: 928503 - DNA, 33 bp, Homo sapien
ttgtttcatgtcttaactgtggttgatgttaga

SEQ ID NO: 928504 - DNA, 33 bp, Homo sapien
ttgtttcatgtcttaattgtggttgatgttaga

SEQ ID NO: 928505 - DNA, 33 bp, Homo sapien
tcagaggccctttggtaaatacagctatccatt

SEQ ID NO: 928506 - DNA, 33 bp, Homo sapien
tcagaggccctttggttaatacagctatccatt

SEQ ID NO: 928507 - DNA, 33 bp, Homo sapien
ggtggaaaaaaatcgacactggaaggcttagtg

SEQ ID NO: 928508 - DNA, 33 bp, Homo sapien
ggtggaaaaaaatcgatactggaaggcttagtg

SEQ ID NO: 928509 - DNA, 33 bp, Homo sapien
ctcattttcgtttgaaaggttgacatttttatg

SEQ ID NO: 928510 - DNA, 33 bp, Homo sapien
ctcattttcgtttgaacggttgacatttttatg

SEQ ID NO: 928511 - DNA, 33 bp, Homo sapien
caaacacttgacaaaagatatggtgcttgaatt

SEQ ID NO: 928512 - DNA, 33 bp, Homo sapien
caaacacttgacaaaatatatggtgcttgaatt

SEQ ID NO: 928513 - DNA, 33 bp, Homo sapien
tcctcaaggctccacaactctatactgccacct

SEQ ID NO: 928514 - DNA, 33 bp, Homo sapien
tcctcaaggctccacatctctatactgccacct

SEQ ID NO: 928515 - DNA, 33 bp, Homo sapien
ctgacacagatatttcacctgtcagcacagcta

SEQ ID NO: 928516 - DNA, 33 bp, Homo sapien
ctgacacagatatttcgcctgtcagcacagcta

SEQ ID NO: 928517 - DNA, 33 bp, Homo sapien
agtgccaaaatttttacatatggtaagcttttt

SEQ ID NO: 928518 - DNA, 33 bp, Homo sapien
agtgccaaaatttttatatatggtaagcttttt

SEQ ID NO: 928519 - DNA, 33 bp, Homo sapien
aaacaatgaggaggtacattagatgacagatat

SEQ ID NO: 928520 - DNA, 33 bp, Homo sapien
aaacaatgaggaggtagattagatgacagatat

SEQ ID NO: 928521 - DNA, 33 bp, Homo sapien
gtttcaaaaattttaccgagtggatgaatgaat

SEQ ID NO: 928522 - DNA, 33 bp, Homo sapien
gtttcaaaaattttactgagtggatgaatgaat

SEQ ID NO: 928523 - DNA, 33 bp, Homo sapien
tccagctcaatgcttcaatccactgtgtataac

SEQ ID NO: 928524 - DNA, 33 bp, Homo sapien
tccagctcaatgcttcgatccactgtgtataac

SEQ ID NO: 928525 - DNA, 33 bp, Homo sapien
tgcaaatatgtaaacaaggacacctttacctga

SEQ ID NO: 928526 - DNA, 33 bp, Homo sapien
tgcaaatatgtaaacagggacacctttacctga

SEQ ID NO: 928527 - DNA, 33 bp, Homo sapien
aaccatgtgaacaaaaatctctagcaggaatta

SEQ ID NO: 928528 - DNA, 33 bp, Homo sapien
aaccatgtgaacaaaagtctctagcaggaatta

SEQ ID NO: 928529 - DNA, 33 bp, Homo sapien
gcagaggctacttcccaagaggactgcaggact

SEQ ID NO: 928530 - DNA, 33 bp, Homo sapien
gcagaggctacttcccgagaggactgcaggact

SEQ ID NO: 928531 - DNA, 33 bp, Homo sapien
aaacttctaggcattaaccaaccaagtcccaga

SEQ ID NO: 928532 - DNA, 33 bp, Homo sapien
aaacttctaggcattagccaaccaagtcccaga

SEQ ID NO: 928533 - DNA, 33 bp, Homo sapien
atggctgagttaaagacctagaacgtatataaa

SEQ ID NO: 928534 - DNA, 33 bp, Homo sapien
atggctgagttaaagagctagaacgtatataaa

SEQ ID NO: 928535 - DNA, 33 bp, Homo sapien
acttcatgtggacaaacattatagccaagctgt

SEQ ID NO: 928536 - DNA, 33 bp, Homo sapien
acttcatgtggacaaatattatagccaagctgt

SEQ ID NO: 928537 - DNA, 33 bp, Homo sapien
aggccttagtggttgccgagctcctgttgctac

SEQ ID NO: 928538 - DNA, 33 bp, Homo sapien
aggccttagtggttgctgagctcctgttgctac

SEQ ID NO: 928539 - DNA, 33 bp, Homo sapien
aaacataatgagtaacaatccagctatgtacta

SEQ ID NO: 928540 - DNA, 33 bp, Homo sapien
aaacataatgagtaacgatccagctatgtacta

SEQ ID NO: 928541 - DNA, 33 bp, Homo sapien
ccaatttaaaggaaaactgtcatcagctttact

SEQ ID NO: 928542 - DNA, 33 bp, Homo sapien
ccaatttaaaggaaaattgtcatcagctttact

SEQ ID NO: 928543 - DNA, 33 bp, Homo sapien
tctcaggccccactgaatacccagcagatcaaa

SEQ ID NO: 928544 - DNA, 33 bp, Homo sapien
tctcaggccccactgactacccagcagatcaaa

SEQ ID NO: 928545 - DNA, 33 bp, Homo sapien
tatttttctaacctgtcaataatctgtaatagc

SEQ ID NO: 928546 - DNA, 33 bp, Homo sapien
tatttttctaacctgtgaataatctgtaatagc

SEQ ID NO: 928547 - DNA, 33 bp, Homo sapien
gaagcttcctgttaaacgatacaagggagatta

SEQ ID NO: 928548 - DNA, 33 bp, Homo sapien
gaagcttcctgttaaatgatacaagggagatta

SEQ ID NO: 928549 - DNA, 33 bp, Homo sapien
agagctgacctagcaaaaagtttatatgtaaag

SEQ ID NO: 928550 - DNA, 33 bp, Homo sapien
agagctgacctagcaagaagtttatatgtaaag

SEQ ID NO: 928551 - DNA, 33 bp, Homo sapien
ggcatctgttctctcacgtgtttaattttttat

SEQ ID NO: 928552 - DNA, 33 bp, Homo sapien
ggcatctgttctctcatgtgtttaattttttat

SEQ ID NO: 928553 - DNA, 33 bp, Homo sapien
aggtaacatcaagcaagtctgtagtacaatata

SEQ ID NO: 928554 - DNA, 33 bp, Homo sapien
aggtaacatcaagcaattctgtagtacaatata

SEQ ID NO: 928555 - DNA, 33 bp, Homo sapien
tcccctttttccacgtcaaagactgagtacaga

SEQ ID NO: 928556 - DNA, 33 bp, Homo sapien
tcccctttttccacgtgaaagactgagtacaga

SEQ ID NO: 928557 - DNA, 33 bp, Homo sapien
tgtactatgtgttttaaactgtctttgatgcag

SEQ ID NO: 928558 - DNA, 33 bp, Homo sapien
tgtactatgtgttttatactgtctttgatgcag

SEQ ID NO: 928559 - DNA, 33 bp, Homo sapien
cacaattatattttggaagcacataacttattt

SEQ ID NO: 928560 - DNA, 33 bp, Homo sapien
cacaattatattttggcagcacataacttattt

SEQ ID NO: 928561 - DNA, 33 bp, Homo sapien
agatttgtgtgggactcaaggtatgatccatcc

SEQ ID NO: 928562 - DNA, 33 bp, Homo sapien
agatttgtgtgggacttaaggtatgatccatcc

SEQ ID NO: 928563 - DNA, 33 bp, Homo sapien
tggacattgcatgggccgaaaaatttggagctt

SEQ ID NO: 928564 - DNA, 33 bp, Homo sapien
tggacattgcatgggctgaaaaatttggagctt

SEQ ID NO: 928565 - DNA, 33 bp, Homo sapien
ggttatttactccaaacttatctgctcaagttc

SEQ ID NO: 928566 - DNA, 33 bp, Homo sapien
ggttatttactccaaatttatctgctcaagttc

SEQ ID NO: 928567 - DNA, 33 bp, Homo sapien
gaaacagaggattctcaaaacaaaaaagttgcc

SEQ ID NO: 928568 - DNA, 33 bp, Homo sapien
gaaacagaggattctcgaaacaaaaaagttgcc

SEQ ID NO: 928569 - DNA, 33 bp, Homo sapien
taagcaagaaaatagacggtagatatcaacaat

SEQ ID NO: 928570 - DNA, 33 bp, Homo sapien
taagcaagaaaatagatggtagatatcaacaat

SEQ ID NO: 928571 - DNA, 33 bp, Homo sapien
gcaactcacatggtggaacttctgctagcctga

SEQ ID NO: 928572 - DNA, 33 bp, Homo sapien
gcaactcacatggtgggacttctgctagcctga

SEQ ID NO: 928573 - DNA, 33 bp, Homo sapien
ttcatcactccaaaaaggaaaattgtgtatcaa

SEQ ID NO: 928574 - DNA, 33 bp, Homo sapien
ttcatcactccaaaaatgaaaattgtgtatcaa

SEQ ID NO: 928575 - DNA, 33 bp, Homo sapien
caattggtgagaactacagcaggtgggagaata

SEQ ID NO: 928576 - DNA, 33 bp, Homo sapien
caattggtgagaactatagcaggtgggagaata

SEQ ID NO: 928577 - DNA, 33 bp, Homo sapien
ttaactgaaataggaaatatcagatgtaaaaca

SEQ ID NO: 928578 - DNA, 33 bp, Homo sapien
ttaactgaaataggaactatcagatgtaaaaca

SEQ ID NO: 928579 - DNA, 33 bp, Homo sapien
gcttgcttccctttcgcattctgccataattgt

SEQ ID NO: 928580 - DNA, 33 bp, Homo sapien
gcttgcttccctttcgtattctgccataattgt

SEQ ID NO: 928581 - DNA, 33 bp, Homo sapien
tacaaatttgatcactaagcatttaagatctta

SEQ ID NO: 928582 - DNA, 33 bp, Homo sapien
tacaaatttgatcactgagcatttaagatctta

SEQ ID NO: 928583 - DNA, 33 bp, Homo sapien
gccatgaacatcttaactgggtgggggaagtta

SEQ ID NO: 928584 - DNA, 33 bp, Homo sapien
gccatgaacatcttaattgggtgggggaagtta

SEQ ID NO: 928585 - DNA, 33 bp, Homo sapien
ccagaataatgctcagccaaatatctggagcct

SEQ ID NO: 928586 - DNA, 33 bp, Homo sapien
ccagaataatgctcagtcaaatatctggagcct

SEQ ID NO: 928587 - DNA, 33 bp, Homo sapien
ctgcactaagcagccacgttcaggtgaatatct

SEQ ID NO: 928588 - DNA, 33 bp, Homo sapien
ctgcactaagcagccatgttcaggtgaatatct

SEQ ID NO: 928589 - DNA, 33 bp, Homo sapien
tatccctcgtgcatcagacaacacagagtatgg

SEQ ID NO: 928590 - DNA, 33 bp, Homo sapien
tatccctcgtgcatcatacaacacagagtatgg

SEQ ID NO: 928591 - DNA, 33 bp, Homo sapien
aaaatctggaaatcaaccagtggaataccagtt

SEQ ID NO: 928592 - DNA, 33 bp, Homo sapien
aaaatctggaaatcaatcagtggaataccagtt

SEQ ID NO: 928593 - DNA, 33 bp, Homo sapien
taagtgaagatatcacaagatgtaggaatgaaa

SEQ ID NO: 928594 - DNA, 33 bp, Homo sapien
taagtgaagatatcaccagatgtaggaatgaaa

SEQ ID NO: 928595 - DNA, 33 bp, Homo sapien
atatggatcaaactagaaagctaaaagtcattt

SEQ ID NO: 928596 - DNA, 33 bp, Homo sapien
atatggatcaaactaggaagctaaaagtcattt

SEQ ID NO: 928597 - DNA, 33 bp, Homo sapien
tcagaaacatatgttacaatgtcaacacactat

SEQ ID NO: 928598 - DNA, 33 bp, Homo sapien
tcagaaacatatgttagaatgtcaacacactat

SEQ ID NO: 928599 - DNA, 33 bp, Homo sapien
caagtcagttgatgcacatacccagtgagcagt

SEQ ID NO: 928600 - DNA, 33 bp, Homo sapien
caagtcagttgatgcatatacccagtgagcagt

SEQ ID NO: 928601 - DNA, 33 bp, Homo sapien
atcttcaaaatatctacgggacaggattattaa

SEQ ID NO: 928602 - DNA, 33 bp, Homo sapien
atcttcaaaatatctatgggacaggattattaa

SEQ ID NO: 928603 - DNA, 33 bp, Homo sapien
taaaccaaatctgcaagttgaatctggcaacgt

SEQ ID NO: 928604 - DNA, 33 bp, Homo sapien
taaaccaaatctgcaatttgaatctggcaacgt

SEQ ID NO: 928605 - DNA, 33 bp, Homo sapien
tggaataaagcaataacgataaaagctggaact

SEQ ID NO: 928606 - DNA, 33 bp, Homo sapien
tggaataaagcaataatgataaaagctggaact

SEQ ID NO: 928607 - DNA, 33 bp, Homo sapien
ataacgacagatattacagtttggctttgatat

SEQ ID NO: 928608 - DNA, 33 bp, Homo sapien
ataacgacagatattatagtttggctttgatat

SEQ ID NO: 928609 - DNA, 33 bp, Homo sapien
gggtgctggacagagtcaagattcaagtgctgt

SEQ ID NO: 928610 - DNA, 33 bp, Homo sapien
gggtgctggacagagtgaagattcaagtgctgt

SEQ ID NO: 928611 - DNA, 33 bp, Homo sapien
gaaaattggctaggtactaaaggaattctgaga

SEQ ID NO: 928612 - DNA, 33 bp, Homo sapien
gaaaattggctaggtattaaaggaattctgaga

SEQ ID NO: 928613 - DNA, 33 bp, Homo sapien
ttttaatctatagcaaacctcaagaagtataga

SEQ ID NO: 928614 - DNA, 33 bp, Homo sapien
ttttaatctatagcaagcctcaagaagtataga

SEQ ID NO: 928615 - DNA, 33 bp, Homo sapien
atgaaggtcctagatcacatctctttccagcag

SEQ ID NO: 928616 - DNA, 33 bp, Homo sapien
atgaaggtcctagatcgcatctctttccagcag

SEQ ID NO: 928617 - DNA, 33 bp, Homo sapien
tctattttgcatgtggaaggcttactgggatca

SEQ ID NO: 928618 - DNA, 33 bp, Homo sapien
tctattttgcatgtggcaggcttactgggatca

SEQ ID NO: 928619 - DNA, 33 bp, Homo sapien
tcaatgtgacttcaatcacaagccattcatcca

SEQ ID NO: 928620 - DNA, 33 bp, Homo sapien
tcaatgtgacttcaattacaagccattcatcca

SEQ ID NO: 928621 - DNA, 33 bp, Homo sapien
gtactggtgggaagcccgagatattctgggtaa

SEQ ID NO: 928622 - DNA, 33 bp, Homo sapien
gtactggtgggaagcctgagatattctgggtaa

SEQ ID NO: 928623 - DNA, 33 bp, Homo sapien
tcctttattcagactacatcttgggcaatgaga

SEQ ID NO: 928624 - DNA, 33 bp, Homo sapien
tcctttattcagactagatcttgggcaatgaga

SEQ ID NO: 928625 - DNA, 33 bp, Homo sapien
tggattcaggtctcacagagcttatgtttgaat

SEQ ID NO: 928626 - DNA, 33 bp, Homo sapien
tggattcaggtctcacggagcttatgtttgaat

SEQ ID NO: 928627 - DNA, 33 bp, Homo sapien
tttaaatattaaagggaatgactccacatcttg

SEQ ID NO: 928628 - DNA, 33 bp, Homo sapien
tttaaatattaaaggggatgactccacatcttg

SEQ ID NO: 928629 - DNA, 33 bp, Homo sapien
aaaatactgcatgaaacgattgccttcctaagt

SEQ ID NO: 928630 - DNA, 33 bp, Homo sapien
aaaatactgcatgaaatgattgccttcctaagt

SEQ ID NO: 928631 - DNA, 33 bp, Homo sapien
tgtgaatgcaaaaccactgatgaaatgtggtac

SEQ ID NO: 928632 - DNA, 33 bp, Homo sapien
tgtgaatgcaaaaccattgatgaaatgtggtac

SEQ ID NO: 928633 - DNA, 33 bp, Homo sapien
actctgcaggatcaagcctaggtatctgcaatg

SEQ ID NO: 928634 - DNA, 33 bp, Homo sapien
actctgcaggatcaagtctaggtatctgcaatg

SEQ ID NO: 928635 - DNA, 33 bp, Homo sapien
aaagtgtcaaggagaaaaacatctttaatgagg

SEQ ID NO: 928636 - DNA, 33 bp, Homo sapien
aaagtgtcaaggagaagaacatctttaatgagg

SEQ ID NO: 928637 - DNA, 33 bp, Homo sapien
gaaagaggtaactttacagtggacaaatctgac

SEQ ID NO: 928638 - DNA, 33 bp, Homo sapien
gaaagaggtaactttatagtggacaaatctgac

SEQ ID NO: 928639 - DNA, 33 bp, Homo sapien
ttcttgtagtgctgtaagtttatactggagttg

SEQ ID NO: 928640 - DNA, 33 bp, Homo sapien
ttcttgtagtgctgtatgtttatactggagttg

SEQ ID NO: 928641 - DNA, 33 bp, Homo sapien
agttttttattatggacattttgcaggagtaag

SEQ ID NO: 928642 - DNA, 33 bp, Homo sapien
agttttttattatggatattttgcaggagtaag

SEQ ID NO: 928643 - DNA, 33 bp, Homo sapien
ttttgagtgaaaagtacgaggaatatttgaagt

SEQ ID NO: 928644 - DNA, 33 bp, Homo sapien
ttttgagtgaaaagtatgaggaatatttgaagt

SEQ ID NO: 928645 - DNA, 33 bp, Homo sapien
agctggtcattaacacagctttgcatgccttaa

SEQ ID NO: 928646 - DNA, 33 bp, Homo sapien
agctggtcattaacactgctttgcatgccttaa

SEQ ID NO: 928647 - DNA, 33 bp, Homo sapien
tgatttcgtaaagaacaccaaggcctcattttg

SEQ ID NO: 928648 - DNA, 33 bp, Homo sapien
tgatttcgtaaagaacgccaaggcctcattttg

SEQ ID NO: 928649 - DNA, 33 bp, Homo sapien
gggaagatcatttttcccagtcaataagcctga

SEQ ID NO: 928650 - DNA, 33 bp, Homo sapien
gggaagatcatttttctcagtcaataagcctga

SEQ ID NO: 928651 - DNA, 33 bp, Homo sapien
tagttgctcactgtgacagaatggtccttttgg

SEQ ID NO: 928652 - DNA, 33 bp, Homo sapien
tagttgctcactgtgatagaatggtccttttgg

SEQ ID NO: 928653 - DNA, 33 bp, Homo sapien
gcccaaatttagcaatcactgaactccactttc

SEQ ID NO: 928654 - DNA, 33 bp, Homo sapien
gcccaaatttagcaattactgaactccactttc

SEQ ID NO: 928655 - DNA, 33 bp, Homo sapien
tttcactaaacaaaaaattaaatcagttttgtt

SEQ ID NO: 928656 - DNA, 33 bp, Homo sapien
tttcactaaacaaaaatttaaatcagttttgtt

SEQ ID NO: 928657 - DNA, 33 bp, Homo sapien
atgtcctgtataaggaaagaatctagctcagaa

SEQ ID NO: 928658 - DNA, 33 bp, Homo sapien
atgtcctgtataaggagagaatctagctcagaa

SEQ ID NO: 928659 - DNA, 33 bp, Homo sapien
cttgatagcattgtaaaagccttaatttaaaag

SEQ ID NO: 928660 - DNA, 33 bp, Homo sapien
cttgatagcattgtaagagccttaatttaaaag

SEQ ID NO: 928661 - DNA, 33 bp, Homo sapien
ctggcaattggtatccgcactaaactcatggaa

SEQ ID NO: 928662 - DNA, 33 bp, Homo sapien
ctggcaattggtatcctcactaaactcatggaa

SEQ ID NO: 928663 - DNA, 33 bp, Homo sapien
tatttctcaatagagcacaaaaaacactaggtc

SEQ ID NO: 928664 - DNA, 33 bp, Homo sapien
tatttctcaatagagcgcaaaaaacactaggtc

SEQ ID NO: 928665 - DNA, 33 bp, Homo sapien
aactgatacacaagcaactacatatgtacacac

SEQ ID NO: 928666 - DNA, 33 bp, Homo sapien
aactgatacacaagcacctacatatgtacacac

SEQ ID NO: 928667 - DNA, 33 bp, Homo sapien
tgaaaatcagtcacaacatgcaatagtgttatg

SEQ ID NO: 928668 - DNA, 33 bp, Homo sapien
tgaaaatcagtcacaatatgcaatagtgttatg

SEQ ID NO: 928669 - DNA, 33 bp, Homo sapien
tcacatccgtaacaacagaaacaagtcgtgaaa

SEQ ID NO: 928670 - DNA, 33 bp, Homo sapien
tcacatccgtaacaacggaaacaagtcgtgaaa

SEQ ID NO: 928671 - DNA, 33 bp, Homo sapien
tggtatctttttcacactcccaacctaaagatg

SEQ ID NO: 928672 - DNA, 33 bp, Homo sapien
tggtatctttttcacattcccaacctaaagatg

SEQ ID NO: 928673 - DNA, 33 bp, Homo sapien
aatcagataagcctctaaaccatctagatatta

SEQ ID NO: 928674 - DNA, 33 bp, Homo sapien
aatcagataagcctcttaaccatctagatatta

SEQ ID NO: 928675 - DNA, 33 bp, Homo sapien
tctgattttgtagaacacaatgctccagaaatt

SEQ ID NO: 928676 - DNA, 33 bp, Homo sapien
tctgattttgtagaacgcaatgctccagaaatt

SEQ ID NO: 928677 - DNA, 33 bp, Homo sapien
accaccaggtcatagccgccagtcagatgtatc

SEQ ID NO: 928678 - DNA, 33 bp, Homo sapien
accaccaggtcatagctgccagtcagatgtatc

SEQ ID NO: 928679 - DNA, 33 bp, Homo sapien
ctaaaacaactttccactctaacactccctcta

SEQ ID NO: 928680 - DNA, 33 bp, Homo sapien
ctaaaacaactttccagtctaacactccctcta

SEQ ID NO: 928681 - DNA, 33 bp, Homo sapien
gagctatatatgacacaaagaattccagacatt

SEQ ID NO: 928682 - DNA, 33 bp, Homo sapien
gagctatatatgacacgaagaattccagacatt

SEQ ID NO: 928683 - DNA, 33 bp, Homo sapien
aaagacaatttgaaaactcgatagtgggcaggg

SEQ ID NO: 928684 - DNA, 33 bp, Homo sapien
aaagacaatttgaaaattcgatagtgggcaggg

SEQ ID NO: 928685 - DNA, 33 bp, Homo sapien
ttgcttgtggccaaaacaatataataatcacat

SEQ ID NO: 928686 - DNA, 33 bp, Homo sapien
ttgcttgtggccaaaataatataataatcacat

SEQ ID NO: 928687 - DNA, 33 bp, Homo sapien
atgcccacatgggtaaacaggggccaagagatc

SEQ ID NO: 928688 - DNA, 33 bp, Homo sapien
atgcccacatgggtaagcaggggccaagagatc

SEQ ID NO: 928689 - DNA, 33 bp, Homo sapien
ccattgtttaagtgaaactcagagaatacaaaa

SEQ ID NO: 928690 - DNA, 33 bp, Homo sapien
ccattgtttaagtgaatctcagagaatacaaaa

SEQ ID NO: 928691 - DNA, 33 bp, Homo sapien
tgtatcctatttcttgaaagtaagtgatattct

SEQ ID NO: 928692 - DNA, 33 bp, Homo sapien
tgtatcctatttcttgtaagtaagtgatattct

SEQ ID NO: 928693 - DNA, 33 bp, Homo sapien
acatcttaaacacttcactgctttgaaatttct

SEQ ID NO: 928694 - DNA, 33 bp, Homo sapien
acatcttaaacacttcgctgctttgaaatttct

SEQ ID NO: 928695 - DNA, 33 bp, Homo sapien
accatcagcagcactaagatagaatacaccggt

SEQ ID NO: 928696 - DNA, 33 bp, Homo sapien
accatcagcagcactaggatagaatacaccggt

SEQ ID NO: 928697 - DNA, 33 bp, Homo sapien
tggagagtgagtgcaaagttttgtagagtagtg

SEQ ID NO: 928698 - DNA, 33 bp, Homo sapien
tggagagtgagtgcaaggttttgtagagtagtg

SEQ ID NO: 928699 - DNA, 33 bp, Homo sapien
atggatttatctacaacagcaaagctagctata

SEQ ID NO: 928700 - DNA, 33 bp, Homo sapien
atggatttatctacaatagcaaagctagctata

SEQ ID NO: 928701 - DNA, 33 bp, Homo sapien
actacaaagagaaccacaaaacactgctcaaag

SEQ ID NO: 928702 - DNA, 33 bp, Homo sapien
actacaaagagaaccataaaacactgctcaaag

SEQ ID NO: 928703 - DNA, 33 bp, Homo sapien
cattggttcaccaaatcacaatggtgctatatt

SEQ ID NO: 928704 - DNA, 33 bp, Homo sapien
cattggttcaccaaattacaatggtgctatatt

SEQ ID NO: 928705 - DNA, 33 bp, Homo sapien
aaagcaaagatatcaaagagaaacctgagcttg

SEQ ID NO: 928706 - DNA, 33 bp, Homo sapien
aaagcaaagatatcaaggagaaacctgagcttg

SEQ ID NO: 928707 - DNA, 33 bp, Homo sapien
tcatgttgcctaaaagaagttcatatttgtatg

SEQ ID NO: 928708 - DNA, 33 bp, Homo sapien
tcatgttgcctaaaaggagttcatatttgtatg

SEQ ID NO: 928709 - DNA, 33 bp, Homo sapien
ggcttttgttgttcagacctccatacaaatatg

SEQ ID NO: 928710 - DNA, 33 bp, Homo sapien
ggcttttgttgttcaggcctccatacaaatatg

SEQ ID NO: 928711 - DNA, 33 bp, Homo sapien
ttggtgtccaggatgtcaattggatgtcagtta

SEQ ID NO: 928712 - DNA, 33 bp, Homo sapien
ttggtgtccaggatgttaattggatgtcagtta

SEQ ID NO: 928713 - DNA, 33 bp, Homo sapien
tagaagagtaaattgaaccctattactacacaa

SEQ ID NO: 928714 - DNA, 33 bp, Homo sapien
tagaagagtaaattgatccctattactacacaa

SEQ ID NO: 928715 - DNA, 33 bp, Homo sapien
gagccaaaggtggaaacggcccaaatgtgcatc

SEQ ID NO: 928716 - DNA, 33 bp, Homo sapien
gagccaaaggtggaaatggcccaaatgtgcatc

SEQ ID NO: 928717 - DNA, 33 bp, Homo sapien
cctgccagtgacttaaagcaaacaacttagtgg

SEQ ID NO: 928718 - DNA, 33 bp, Homo sapien
cctgccagtgacttaaggcaaacaacttagtgg

SEQ ID NO: 928719 - DNA, 33 bp, Homo sapien
atcatgttattatccaggtagagagttggtggt

SEQ ID NO: 928720 - DNA, 33 bp, Homo sapien
atcatgttattatccatgtagagagttggtggt

SEQ ID NO: 928721 - DNA, 33 bp, Homo sapien
tccattagtaactgcagaaattaatggctatcc

SEQ ID NO: 928722 - DNA, 33 bp, Homo sapien
tccattagtaactgcataaattaatggctatcc

SEQ ID NO: 928723 - DNA, 33 bp, Homo sapien
ggctctgagtcctgcaaagcactaaaaattgca

SEQ ID NO: 928724 - DNA, 33 bp, Homo sapien
ggctctgagtcctgcatagcactaaaaattgca

SEQ ID NO: 928725 - DNA, 33 bp, Homo sapien
ctgattttttttccacggggaatgtaggctcat

SEQ ID NO: 928726 - DNA, 33 bp, Homo sapien
ctgattttttttccactgggaatgtaggctcat

SEQ ID NO: 928727 - DNA, 33 bp, Homo sapien
ttagaaggagttctgaccattaaagtgatggaa

SEQ ID NO: 928728 - DNA, 33 bp, Homo sapien
ttagaaggagttctgagcattaaagtgatggaa

SEQ ID NO: 928729 - DNA, 33 bp, Homo sapien
atatttacttcctcacccaactataatgatttt

SEQ ID NO: 928730 - DNA, 33 bp, Homo sapien
atatttacttcctcacgcaactataatgatttt

SEQ ID NO: 928731 - DNA, 33 bp, Homo sapien
atcaagctgtcaataccaattttagtatcaata

SEQ ID NO: 928732 - DNA, 33 bp, Homo sapien
atcaagctgtcaatacgaattttagtatcaata

SEQ ID NO: 928733 - DNA, 33 bp, Homo sapien
agtgaggaaacaataaaaattttgcagaagaag

SEQ ID NO: 928734 - DNA, 33 bp, Homo sapien
agtgaggaaacaataagaattttgcagaagaag

SEQ ID NO: 928735 - DNA, 33 bp, Homo sapien
aatttgggagtattccagagacgtattacaaga

SEQ ID NO: 928736 - DNA, 33 bp, Homo sapien
aatttgggagtattccggagacgtattacaaga

SEQ ID NO: 928737 - DNA, 33 bp, Homo sapien
gtacattaccactgtccatcaataggaacatat

SEQ ID NO: 928738 - DNA, 33 bp, Homo sapien
gtacattaccactgtctatcaataggaacatat

SEQ ID NO: 928739 - DNA, 33 bp, Homo sapien
gagtaatatgtggtaacaatgaatcttaagaga

SEQ ID NO: 928740 - DNA, 33 bp, Homo sapien
gagtaatatgtggtaataatgaatcttaagaga

SEQ ID NO: 928741 - DNA, 33 bp, Homo sapien
gagctggaagcttgcaagaatgaatgccagcag

SEQ ID NO: 928742 - DNA, 33 bp, Homo sapien
gagctggaagcttgcacgaatgaatgccagcag

SEQ ID NO: 928743 - DNA, 33 bp, Homo sapien
taagaagttctggcacaatagtttaatgattta

SEQ ID NO: 928744 - DNA, 33 bp, Homo sapien
taagaagttctggcacgatagtttaatgattta

SEQ ID NO: 928745 - DNA, 33 bp, Homo sapien
agatccctaacctgagaaaaatgaatctgaata

SEQ ID NO: 928746 - DNA, 33 bp, Homo sapien
agatccctaacctgaggaaaatgaatctgaata

SEQ ID NO: 928747 - DNA, 33 bp, Homo sapien
cctctacttccttagcccaagggatcgtcccac

SEQ ID NO: 928748 - DNA, 33 bp, Homo sapien
cctctacttccttagctcaagggatcgtcccac

SEQ ID NO: 928749 - DNA, 33 bp, Homo sapien
tgtgtctacagtttcccgaattttttattgttt

SEQ ID NO: 928750 - DNA, 33 bp, Homo sapien
tgtgtctacagtttcctgaattttttattgttt

SEQ ID NO: 928751 - DNA, 33 bp, Homo sapien
gaatcctacatatacccattctaacaggagcca

SEQ ID NO: 928752 - DNA, 33 bp, Homo sapien
gaatcctacatatacctattctaacaggagcca

SEQ ID NO: 928753 - DNA, 33 bp, Homo sapien
tttaataaagatattacacctgtcatggcagct

SEQ ID NO: 928754 - DNA, 33 bp, Homo sapien
tttaataaagatattatacctgtcatggcagct

SEQ ID NO: 928755 - DNA, 33 bp, Homo sapien
aagcacaataaaaatgcatgtcgatatttacta

SEQ ID NO: 928756 - DNA, 33 bp, Homo sapien
aagcacaataaaaatgtatgtcgatatttacta

SEQ ID NO: 928757 - DNA, 33 bp, Homo sapien
cacatagcgatgatcactctttaataagataaa

SEQ ID NO: 928758 - DNA, 33 bp, Homo sapien
cacatagcgatgatcagtctttaataagataaa

SEQ ID NO: 928759 - DNA, 33 bp, Homo sapien
ttcacacattttttccacaaagttgtcccaggt

SEQ ID NO: 928760 - DNA, 33 bp, Homo sapien
ttcacacattttttccgcaaagttgtcccaggt

SEQ ID NO: 928761 - DNA, 33 bp, Homo sapien
gttgtaaactactaaactgtgaagtcgttttca

SEQ ID NO: 928762 - DNA, 33 bp, Homo sapien
gttgtaaactactaaattgtgaagtcgttttca

SEQ ID NO: 928763 - DNA, 33 bp, Homo sapien
cacagccatctttcaactcaatacggcgacatg

SEQ ID NO: 928764 - DNA, 33 bp, Homo sapien
cacagccatctttcaattcaatacggcgacatg

SEQ ID NO: 928765 - DNA, 33 bp, Homo sapien
aaaattgaatgaagtacatggctaataagaatg

SEQ ID NO: 928766 - DNA, 33 bp, Homo sapien
aaaattgaatgaagtatatggctaataagaatg

SEQ ID NO: 928767 - DNA, 33 bp, Homo sapien
tatgtcagtcacttggcatggacaacttattaa

SEQ ID NO: 928768 - DNA, 33 bp, Homo sapien
tatgtcagtcacttgggatggacaacttattaa

SEQ ID NO: 928769 - DNA, 33 bp, Homo sapien
ccttttctgaaaactaccgtagagctcaagact

SEQ ID NO: 928770 - DNA, 33 bp, Homo sapien
ccttttctgaaaactatcgtagagctcaagact

SEQ ID NO: 928771 - DNA, 33 bp, Homo sapien
agtttatgagctctcaatagaaaataaatggcc

SEQ ID NO: 928772 - DNA, 33 bp, Homo sapien
agtttatgagctctcagtagaaaataaatggcc

SEQ ID NO: 928773 - DNA, 33 bp, Homo sapien
atcaaatcttcagaaacgtggaataacgaattt

SEQ ID NO: 928774 - DNA, 33 bp, Homo sapien
atcaaatcttcagaaatgtggaataacgaattt

SEQ ID NO: 928775 - DNA, 33 bp, Homo sapien
gggacagagctaaaaaaactgtaggccccagat

SEQ ID NO: 928776 - DNA, 33 bp, Homo sapien
gggacagagctaaaaacactgtaggccccagat

SEQ ID NO: 928777 - DNA, 33 bp, Homo sapien
ggccagaaatttgttccatgatgtcccaagctc

SEQ ID NO: 928778 - DNA, 33 bp, Homo sapien
ggccagaaatttgttctatgatgtcccaagctc

SEQ ID NO: 928779 - DNA, 33 bp, Homo sapien
attatcgtacctcataagtgtctttcaattcct

SEQ ID NO: 928780 - DNA, 33 bp, Homo sapien
attatcgtacctcataggtgtctttcaattcct

SEQ ID NO: 928781 - DNA, 33 bp, Homo sapien
atggatggtttagcctcaaagaccaaaatacct

SEQ ID NO: 928782 - DNA, 33 bp, Homo sapien
atggatggtttagccttaaagaccaaaatacct

SEQ ID NO: 928783 - DNA, 33 bp, Homo sapien
cctcatttttgaaagacagcattgctcagtaaa

SEQ ID NO: 928784 - DNA, 33 bp, Homo sapien
cctcatttttgaaagatagcattgctcagtaaa

SEQ ID NO: 928785 - DNA, 33 bp, Homo sapien
gcttggtgcttggaaacgggtaatgatgtttaa

SEQ ID NO: 928786 - DNA, 33 bp, Homo sapien
gcttggtgcttggaaatgggtaatgatgtttaa

SEQ ID NO: 928787 - DNA, 33 bp, Homo sapien
tcagaaagtcttataaacagcatatctcgtcac

SEQ ID NO: 928788 - DNA, 33 bp, Homo sapien
tcagaaagtcttataaccagcatatctcgtcac

SEQ ID NO: 928789 - DNA, 33 bp, Homo sapien
ctaggtgagttagaacagtctggagagcagaga

SEQ ID NO: 928790 - DNA, 33 bp, Homo sapien
ctaggtgagttagaacggtctggagagcagaga

SEQ ID NO: 928791 - DNA, 33 bp, Homo sapien
acactaaaatgcatacaatgtgaggtgtcaaac

SEQ ID NO: 928792 - DNA, 33 bp, Homo sapien
acactaaaatgcataccatgtgaggtgtcaaac

SEQ ID NO: 928793 - DNA, 33 bp, Homo sapien
gcctctctagaagtgacaaactcacagccagtg

SEQ ID NO: 928794 - DNA, 33 bp, Homo sapien
gcctctctagaagtgataaactcacagccagtg

SEQ ID NO: 928795 - DNA, 33 bp, Homo sapien
gttacaaaagcagaaacgataggacttattctc

SEQ ID NO: 928796 - DNA, 33 bp, Homo sapien
gttacaaaagcagaaatgataggacttattctc

SEQ ID NO: 928797 - DNA, 33 bp, Homo sapien
actaccattaaaggcaagtagcctctcaagagg

SEQ ID NO: 928798 - DNA, 33 bp, Homo sapien
actaccattaaaggcaggtagcctctcaagagg

SEQ ID NO: 928799 - DNA, 33 bp, Homo sapien
gaaaaataaatgatacgggctgaagtaaatatt

SEQ ID NO: 928800 - DNA, 33 bp, Homo sapien
gaaaaataaatgatactggctgaagtaaatatt

SEQ ID NO: 928801 - DNA, 33 bp, Homo sapien
ctgtatatcctctttaagaaatgttctgcctat

SEQ ID NO: 928802 - DNA, 33 bp, Homo sapien
ctgtatatcctctttaggaaatgttctgcctat

SEQ ID NO: 928803 - DNA, 33 bp, Homo sapien
atggtttttcacttcaatcaacatttaaattat

SEQ ID NO: 928804 - DNA, 33 bp, Homo sapien
atggtttttcacttcagtcaacatttaaattat

SEQ ID NO: 928805 - DNA, 33 bp, Homo sapien
agacaaatccatatataagggtctacagataaa

SEQ ID NO: 928806 - DNA, 33 bp, Homo sapien
agacaaatccatatatgagggtctacagataaa

SEQ ID NO: 928807 - DNA, 33 bp, Homo sapien
aatgttctttcccataaaacatcttgcctgaat

SEQ ID NO: 928808 - DNA, 33 bp, Homo sapien
aatgttctttcccatataacatcttgcctgaat

SEQ ID NO: 928809 - DNA, 33 bp, Homo sapien
gactatattgtgagtagatctagtcaaatttcc

SEQ ID NO: 928810 - DNA, 33 bp, Homo sapien
gactatattgtgagtatatctagtcaaatttcc

SEQ ID NO: 928811 - DNA, 33 bp, Homo sapien
cccataagccataaaaaggaggaatttaggagt

SEQ ID NO: 928812 - DNA, 33 bp, Homo sapien
cccataagccataaaacggaggaatttaggagt

SEQ ID NO: 928813 - DNA, 33 bp, Homo sapien
ctggagaatcctcttacggtgaatgaactaaaa

SEQ ID NO: 928814 - DNA, 33 bp, Homo sapien
ctggagaatcctcttatggtgaatgaactaaaa

SEQ ID NO: 928815 - DNA, 33 bp, Homo sapien
gcttgatagaatggtaaaatgacatattgaaga

SEQ ID NO: 928816 - DNA, 33 bp, Homo sapien
gcttgatagaatggtagaatgacatattgaaga

SEQ ID NO: 928817 - DNA, 33 bp, Homo sapien
aaggtcaatgggaaacgaaaacttaacctgggc

SEQ ID NO: 928818 - DNA, 33 bp, Homo sapien
aaggtcaatgggaaactaaaacttaacctgggc

SEQ ID NO: 928819 - DNA, 33 bp, Homo sapien
ctcctctttgaagaaaaggattagtgcattttc

SEQ ID NO: 928820 - DNA, 33 bp, Homo sapien
ctcctctttgaagaaagggattagtgcattttc

SEQ ID NO: 928821 - DNA, 33 bp, Homo sapien
tttttgggagataaagaatactgtaaggagatg

SEQ ID NO: 928822 - DNA, 33 bp, Homo sapien
tttttgggagataaagcatactgtaaggagatg

SEQ ID NO: 928823 - DNA, 33 bp, Homo sapien
atgtcagggtgtttcaaaaatagattgccattt

SEQ ID NO: 928824 - DNA, 33 bp, Homo sapien
atgtcagggtgtttcagaaatagattgccattt

SEQ ID NO: 928825 - DNA, 33 bp, Homo sapien
cgaatctatacctatacctgtatatcctgtaca

SEQ ID NO: 928826 - DNA, 33 bp, Homo sapien
cgaatctatacctatatctgtatatcctgtaca

SEQ ID NO: 928827 - DNA, 33 bp, Homo sapien
cacagtgatgaagtggacaattacaacattctg

SEQ ID NO: 928828 - DNA, 33 bp, Homo sapien
cacagtgatgaagtgggcaattacaacattctg

SEQ ID NO: 928829 - DNA, 33 bp, Homo sapien
aagcatattttttccaactgtctgcaatgaaat

SEQ ID NO: 928830 - DNA, 33 bp, Homo sapien
aagcatattttttccagctgtctgcaatgaaat

SEQ ID NO: 928831 - DNA, 33 bp, Homo sapien
ttacataagctcctaacgtctatctagactact

SEQ ID NO: 928832 - DNA, 33 bp, Homo sapien
ttacataagctcctaatgtctatctagactact

SEQ ID NO: 928833 - DNA, 33 bp, Homo sapien
cccggcccattaaaccactcttccattctcagc

SEQ ID NO: 928834 - DNA, 33 bp, Homo sapien
cccggcccattaaaccgctcttccattctcagc

SEQ ID NO: 928835 - DNA, 33 bp, Homo sapien
cacagtcagctacttaccacacttcttcctgcc

SEQ ID NO: 928836 - DNA, 33 bp, Homo sapien
cacagtcagctacttatcacacttcttcctgcc

SEQ ID NO: 928837 - DNA, 33 bp, Homo sapien
gaacacatctatattcacgtctttcacccacaa

SEQ ID NO: 928838 - DNA, 33 bp, Homo sapien
gaacacatctatattcgcgtctttcacccacaa

SEQ ID NO: 928839 - DNA, 33 bp, Homo sapien
cctcctccaacacacacggatggcatgagattt

SEQ ID NO: 928840 - DNA, 33 bp, Homo sapien
cctcctccaacacacatggatggcatgagattt

SEQ ID NO: 928841 - DNA, 33 bp, Homo sapien
atcatattagagactacctttacaggacttgat

SEQ ID NO: 928842 - DNA, 33 bp, Homo sapien
atcatattagagactatctttacaggacttgat

SEQ ID NO: 928843 - DNA, 33 bp, Homo sapien
gctgtttgctgttacacggtcagtctcatctct

SEQ ID NO: 928844 - DNA, 33 bp, Homo sapien
gctgtttgctgttacatggtcagtctcatctct

SEQ ID NO: 928845 - DNA, 33 bp, Homo sapien
caaatagaatgaaccacgactcatattcagttt

SEQ ID NO: 928846 - DNA, 33 bp, Homo sapien
caaatagaatgaaccatgactcatattcagttt

SEQ ID NO: 928847 - DNA, 33 bp, Homo sapien
aaaacccataaatttcaccgaaagacatatagt

SEQ ID NO: 928848 - DNA, 33 bp, Homo sapien
aaaacccataaatttcgccgaaagacatatagt

SEQ ID NO: 928849 - DNA, 33 bp, Homo sapien
tatgggtgagtatagacagagtaattgtgagga

SEQ ID NO: 928850 - DNA, 33 bp, Homo sapien
tatgggtgagtatagatagagtaattgtgagga

SEQ ID NO: 928851 - DNA, 33 bp, Homo sapien
aacaaaaagtgaaagaacctgaagccttggtga

SEQ ID NO: 928852 - DNA, 33 bp, Homo sapien
aacaaaaagtgaaagaccctgaagccttggtga

SEQ ID NO: 928853 - DNA, 33 bp, Homo sapien
taggtgtttgctcgaaggtactgtataggaata

SEQ ID NO: 928854 - DNA, 33 bp, Homo sapien
taggtgtttgctcgaatgtactgtataggaata

SEQ ID NO: 928855 - DNA, 33 bp, Homo sapien
tttctctgagtttgcgaaaacaactgcttgatt

SEQ ID NO: 928856 - DNA, 33 bp, Homo sapien
tttctctgagtttgcggaaacaactgcttgatt

SEQ ID NO: 928857 - DNA, 33 bp, Homo sapien
tttgttgaaaagacaaacttccattgcgcattc

SEQ ID NO: 928858 - DNA, 33 bp, Homo sapien
tttgttgaaaagacaagcttccattgcgcattc

SEQ ID NO: 928859 - DNA, 33 bp, Homo sapien
tctcctgatggatgtaagtttgtaggaatcagg

SEQ ID NO: 928860 - DNA, 33 bp, Homo sapien
tctcctgatggatgtaggtttgtaggaatcagg

SEQ ID NO: 928861 - DNA, 33 bp, Homo sapien
taagcctacatttcctcaaaagtgtgaagaata

SEQ ID NO: 928862 - DNA, 33 bp, Homo sapien
taagcctacatttccttaaaagtgtgaagaata

SEQ ID NO: 928863 - DNA, 33 bp, Homo sapien
ccaagtgcacagattacctttctgcactgtggt

SEQ ID NO: 928864 - DNA, 33 bp, Homo sapien
ccaagtgcacagattatctttctgcactgtggt

SEQ ID NO: 928865 - DNA, 33 bp, Homo sapien
caccagaaaaaggaacaggtaatgattgttata

SEQ ID NO: 928866 - DNA, 33 bp, Homo sapien
caccagaaaaaggaacgggtaatgattgttata

SEQ ID NO: 928867 - DNA, 33 bp, Homo sapien
atatatttattgcacaatgtctagaaaagtgat

SEQ ID NO: 928868 - DNA, 33 bp, Homo sapien
atatatttattgcacagtgtctagaaaagtgat

SEQ ID NO: 928869 - DNA, 33 bp, Homo sapien
gaaagtgacatcctgggactcctaaggctggat

SEQ ID NO: 928870 - DNA, 33 bp, Homo sapien
gaaagtgacatcctggtactcctaaggctggat

SEQ ID NO: 928871 - DNA, 33 bp, Homo sapien
agacatacaagctataggacaaaccaggaatat

SEQ ID NO: 928872 - DNA, 33 bp, Homo sapien
agacatacaagctatatgacaaaccaggaatat

SEQ ID NO: 928873 - DNA, 33 bp, Homo sapien
gagctggagacaccaaatccaaaatgatcattt

SEQ ID NO: 928874 - DNA, 33 bp, Homo sapien
gagctggagacaccaattccaaaatgatcattt

SEQ ID NO: 928875 - DNA, 33 bp, Homo sapien
ggcccccttcactttacattgatgacattatgc

SEQ ID NO: 928876 - DNA, 33 bp, Homo sapien
ggcccccttcactttatattgatgacattatgc

SEQ ID NO: 928877 - DNA, 33 bp, Homo sapien
tccagtgagtgagaagcagaaaacatactggac

SEQ ID NO: 928878 - DNA, 33 bp, Homo sapien
tccagtgagtgagaagtagaaaacatactggac

SEQ ID NO: 928879 - DNA, 33 bp, Homo sapien
aagttgaagtattaatcagcttgcttgtggtga

SEQ ID NO: 928880 - DNA, 33 bp, Homo sapien
aagttgaagtattaattagcttgcttgtggtga

SEQ ID NO: 928881 - DNA, 33 bp, Homo sapien
tatggaagctacctcaagtgttcaaatctttgc

SEQ ID NO: 928882 - DNA, 33 bp, Homo sapien
tatggaagctacctcatgtgttcaaatctttgc

SEQ ID NO: 928883 - DNA, 33 bp, Homo sapien
tctcacaagcttgcaaaggagttaccatgaatc

SEQ ID NO: 928884 - DNA, 33 bp, Homo sapien
tctcacaagcttgcaagggagttaccatgaatc

SEQ ID NO: 928885 - DNA, 33 bp, Homo sapien
ttatataagtatgttcaagtacaattttcaaag

SEQ ID NO: 928886 - DNA, 33 bp, Homo sapien
ttatataagtatgttcgagtacaattttcaaag

SEQ ID NO: 928887 - DNA, 33 bp, Homo sapien
ttctttggataggacaacaaaagtacagataac

SEQ ID NO: 928888 - DNA, 33 bp, Homo sapien
ttctttggataggacaccaaaagtacagataac

SEQ ID NO: 928889 - DNA, 33 bp, Homo sapien
atttgcaagccaggtaactataaaggattaatt

SEQ ID NO: 928890 - DNA, 33 bp, Homo sapien
atttgcaagccaggtatctataaaggattaatt

SEQ ID NO: 928891 - DNA, 33 bp, Homo sapien
aacccctagacaccaccgcgggcccacaaggag

SEQ ID NO: 928892 - DNA, 33 bp, Homo sapien
aacccctagacaccactgcgggcccacaaggag

SEQ ID NO: 928893 - DNA, 33 bp, Homo sapien
agaccttgcagcattaacaaaactctttgcaaa

SEQ ID NO: 928894 - DNA, 33 bp, Homo sapien
agaccttgcagcattatcaaaactctttgcaaa

SEQ ID NO: 928895 - DNA, 33 bp, Homo sapien
tagaagtagcttagtgaaactacctaatataga

SEQ ID NO: 928896 - DNA, 33 bp, Homo sapien
tagaagtagcttagtgtaactacctaatataga

SEQ ID NO: 928897 - DNA, 33 bp, Homo sapien
gctcattgttactggacctgccttgtaagaaat

SEQ ID NO: 928898 - DNA, 33 bp, Homo sapien
gctcattgttactggatctgccttgtaagaaat

SEQ ID NO: 928899 - DNA, 33 bp, Homo sapien
cagtgctacttagctactagagatcttaaaata

SEQ ID NO: 928900 - DNA, 33 bp, Homo sapien
cagtgctacttagctagtagagatcttaaaata

SEQ ID NO: 928901 - DNA, 33 bp, Homo sapien
ttaacagaacctagtacggtttttagatggtat

SEQ ID NO: 928902 - DNA, 33 bp, Homo sapien
ttaacagaacctagtatggtttttagatggtat

SEQ ID NO: 928903 - DNA, 33 bp, Homo sapien
aagatcagtagttcccagaagttaggggaagga

SEQ ID NO: 928904 - DNA, 33 bp, Homo sapien
aagatcagtagttcccggaagttaggggaagga

SEQ ID NO: 928905 - DNA, 33 bp, Homo sapien
tttttacttttcagtaagcctcgtaattttttt

SEQ ID NO: 928906 - DNA, 33 bp, Homo sapien
tttttacttttcagtacgcctcgtaattttttt

SEQ ID NO: 928907 - DNA, 33 bp, Homo sapien
tgtttcactttctctccctagatctcacaagtg

SEQ ID NO: 928908 - DNA, 33 bp, Homo sapien
tgtttcactttctctctctagatctcacaagtg

SEQ ID NO: 928909 - DNA, 33 bp, Homo sapien
tcattcaatcattcttaaaaggcacggcaactt

SEQ ID NO: 928910 - DNA, 33 bp, Homo sapien
tcattcaatcattcttgaaaggcacggcaactt

SEQ ID NO: 928911 - DNA, 33 bp, Homo sapien
ctgttttggaaaaaaaatagagcaccaattatg

SEQ ID NO: 928912 - DNA, 33 bp, Homo sapien
ctgttttggaaaaaaagtagagcaccaattatg

SEQ ID NO: 928913 - DNA, 33 bp, Homo sapien
ctgcaatcaccatgacactgcattttattatta

SEQ ID NO: 928914 - DNA, 33 bp, Homo sapien
ctgcaatcaccatgacgctgcattttattatta

SEQ ID NO: 928915 - DNA, 33 bp, Homo sapien
ttttgactcccagagcaaagaagtaaaacacaa

SEQ ID NO: 928916 - DNA, 33 bp, Homo sapien
ttttgactcccagagcgaagaagtaaaacacaa

SEQ ID NO: 928917 - DNA, 33 bp, Homo sapien
ttccatccggtcccaaatggaaaaatgaaagtc

SEQ ID NO: 928918 - DNA, 33 bp, Homo sapien
ttccatccggtcccaagtggaaaaatgaaagtc

SEQ ID NO: 928919 - DNA, 33 bp, Homo sapien
attctcaaatgaagcagcaacatattggtgttt

SEQ ID NO: 928920 - DNA, 33 bp, Homo sapien
attctcaaatgaagcatcaacatattggtgttt

SEQ ID NO: 928921 - DNA, 33 bp, Homo sapien
tcccttaatttgcaaaagatatctctggccatc

SEQ ID NO: 928922 - DNA, 33 bp, Homo sapien
tcccttaatttgcaaaggatatctctggccatc

SEQ ID NO: 928923 - DNA, 33 bp, Homo sapien
attcttgtcttctgtacgcctgtaggccaaata

SEQ ID NO: 928924 - DNA, 33 bp, Homo sapien
attcttgtcttctgtatgcctgtaggccaaata

SEQ ID NO: 928925 - DNA, 33 bp, Homo sapien
ttgacggttttataacaggctattcctcctttg

SEQ ID NO: 928926 - DNA, 33 bp, Homo sapien
ttgacggttttataacgggctattcctcctttg

SEQ ID NO: 928927 - DNA, 33 bp, Homo sapien
ttatggtctgtgaggcaattgtcaaaaacttgc

SEQ ID NO: 928928 - DNA, 33 bp, Homo sapien
ttatggtctgtgaggccattgtcaaaaacttgc

SEQ ID NO: 928929 - DNA, 33 bp, Homo sapien
cacaataattggtagaccctgtagatacataca

SEQ ID NO: 928930 - DNA, 33 bp, Homo sapien
cacaataattggtagatcctgtagatacataca

SEQ ID NO: 928931 - DNA, 33 bp, Homo sapien
gttatcattgagaaaactgacagattttgatta

SEQ ID NO: 928932 - DNA, 33 bp, Homo sapien
gttatcattgagaaaattgacagattttgatta

SEQ ID NO: 928933 - DNA, 33 bp, Homo sapien
aagtgtttctgataacgacaaatattgagtgat

SEQ ID NO: 928934 - DNA, 33 bp, Homo sapien
aagtgtttctgataactacaaatattgagtgat

SEQ ID NO: 928935 - DNA, 33 bp, Homo sapien
ttctttgaatttttaccgcttggaatttgctca

SEQ ID NO: 928936 - DNA, 33 bp, Homo sapien
ttctttgaatttttactgcttggaatttgctca

SEQ ID NO: 928937 - DNA, 33 bp, Homo sapien
ggtggatccttcttacgccacgttgaatgaaag

SEQ ID NO: 928938 - DNA, 33 bp, Homo sapien
ggtggatccttcttactccacgttgaatgaaag

SEQ ID NO: 928939 - DNA, 33 bp, Homo sapien
agaaatacatacgtgaaaatataaccatgtaac

SEQ ID NO: 928940 - DNA, 33 bp, Homo sapien
agaaatacatacgtgagaatataaccatgtaac

SEQ ID NO: 928941 - DNA, 33 bp, Homo sapien
tgtactgcaaaagtaaatcatttcaacaaaaac

SEQ ID NO: 928942 - DNA, 33 bp, Homo sapien
tgtactgcaaaagtaattcatttcaacaaaaac

SEQ ID NO: 928943 - DNA, 33 bp, Homo sapien
cctcaactccatgtccaacatcctagtgctaag

SEQ ID NO: 928944 - DNA, 33 bp, Homo sapien
cctcaactccatgtccgacatcctagtgctaag

SEQ ID NO: 928945 - DNA, 33 bp, Homo sapien
ttgactgtgtcttctcaattaagtgatcatatt

SEQ ID NO: 928946 - DNA, 33 bp, Homo sapien
ttgactgtgtcttctcgattaagtgatcatatt

SEQ ID NO: 928947 - DNA, 33 bp, Homo sapien
tgtcatttttgaagaaggcaacctttaaccctt

SEQ ID NO: 928948 - DNA, 33 bp, Homo sapien
tgtcatttttgaagaatgcaacctttaaccctt

SEQ ID NO: 928949 - DNA, 33 bp, Homo sapien
gatttcaaagcaactaaggaacaactaacacca

SEQ ID NO: 928950 - DNA, 33 bp, Homo sapien
gatttcaaagcaactagggaacaactaacacca

SEQ ID NO: 928951 - DNA, 33 bp, Homo sapien
caaatatttacttgcaccgtgtatgttgcctgt

SEQ ID NO: 928952 - DNA, 33 bp, Homo sapien
caaatatttacttgcatcgtgtatgttgcctgt

SEQ ID NO: 928953 - DNA, 33 bp, Homo sapien
ttgtgctttatctaacacgtacctttagccttc

SEQ ID NO: 928954 - DNA, 33 bp, Homo sapien
ttgtgctttatctaacgcgtacctttagccttc

SEQ ID NO: 928955 - DNA, 33 bp, Homo sapien
tttcaaatattcttccacacagtttttattaaa

SEQ ID NO: 928956 - DNA, 33 bp, Homo sapien
tttcaaatattcttccgcacagtttttattaaa

SEQ ID NO: 928957 - DNA, 33 bp, Homo sapien
ctgttgggtttctccaatctttcaagaggtgtg

SEQ ID NO: 928958 - DNA, 33 bp, Homo sapien
ctgttgggtttctccagtctttcaagaggtgtg

SEQ ID NO: 928959 - DNA, 33 bp, Homo sapien
catcaagagcagaatagcatgttcttggaatgg

SEQ ID NO: 928960 - DNA, 33 bp, Homo sapien
catcaagagcagaatatcatgttcttggaatgg

SEQ ID NO: 928961 - DNA, 33 bp, Homo sapien
ggaaaagaaatcataaagtcaaaaagacacttg

SEQ ID NO: 928962 - DNA, 33 bp, Homo sapien
ggaaaagaaatcataatgtcaaaaagacacttg

SEQ ID NO: 928963 - DNA, 33 bp, Homo sapien
tcatttatacgtaaataagtagcaatgtctatg

SEQ ID NO: 928964 - DNA, 33 bp, Homo sapien
tcatttatacgtaaatgagtagcaatgtctatg

SEQ ID NO: 928965 - DNA, 33 bp, Homo sapien
tttttcatgttagtacagatagtttacatatat

SEQ ID NO: 928966 - DNA, 33 bp, Homo sapien
tttttcatgttagtacggatagtttacatatat

SEQ ID NO: 928967 - DNA, 33 bp, Homo sapien
gagccatctttacagaaaaaccaacttgcaaca

SEQ ID NO: 928968 - DNA, 33 bp, Homo sapien
gagccatctttacagagaaaccaacttgcaaca

SEQ ID NO: 928969 - DNA, 33 bp, Homo sapien
gcttagataagtaaccaaagagaaaattcaaga

SEQ ID NO: 928970 - DNA, 33 bp, Homo sapien
gcttagataagtaaccgaagagaaaattcaaga

SEQ ID NO: 928971 - DNA, 33 bp, Homo sapien
tatatgtacgaacaaagtaagcaaaatatcaca

SEQ ID NO: 928972 - DNA, 33 bp, Homo sapien
tatatgtacgaacaaattaagcaaaatatcaca

SEQ ID NO: 928973 - DNA, 33 bp, Homo sapien
catcaagtcagctgggaatttatttcaatcagc

SEQ ID NO: 928974 - DNA, 33 bp, Homo sapien
catcaagtcagctggggatttatttcaatcagc

SEQ ID NO: 928975 - DNA, 33 bp, Homo sapien
taaaagacattctaacactttagttacgccaca

SEQ ID NO: 928976 - DNA, 33 bp, Homo sapien
taaaagacattctaacgctttagttacgccaca

SEQ ID NO: 928977 - DNA, 33 bp, Homo sapien
accatgtatttccaataagtgagggcctcccta

SEQ ID NO: 928978 - DNA, 33 bp, Homo sapien
accatgtatttccaatgagtgagggcctcccta

SEQ ID NO: 928979 - DNA, 33 bp, Homo sapien
ctctccttgaaaatccagccagatgcctgagtc

SEQ ID NO: 928980 - DNA, 33 bp, Homo sapien
ctctccttgaaaatccggccagatgcctgagtc

SEQ ID NO: 928981 - DNA, 33 bp, Homo sapien
cacctctttccttcaaacggtctatggattctc

SEQ ID NO: 928982 - DNA, 33 bp, Homo sapien
cacctctttccttcaagcggtctatggattctc

SEQ ID NO: 928983 - DNA, 33 bp, Homo sapien
agctgaagggattcacagatggatttaatgtgg

SEQ ID NO: 928984 - DNA, 33 bp, Homo sapien
agctgaagggattcacggatggatttaatgtgg

SEQ ID NO: 928985 - DNA, 33 bp, Homo sapien
tttacacgtaagtcacaaataacacccagtgtg

SEQ ID NO: 928986 - DNA, 33 bp, Homo sapien
tttacacgtaagtcaccaataacacccagtgtg

SEQ ID NO: 928987 - DNA, 33 bp, Homo sapien
tcctccagtacctaagacttacctttttgttat

SEQ ID NO: 928988 - DNA, 33 bp, Homo sapien
tcctccagtacctaaggcttacctttttgttat

SEQ ID NO: 928989 - DNA, 33 bp, Homo sapien
ttagagctggaagagactaagttatatgataca

SEQ ID NO: 928990 - DNA, 33 bp, Homo sapien
ttagagctggaagagattaagttatatgataca

SEQ ID NO: 928991 - DNA, 33 bp, Homo sapien
gggtcacacaacaccacgatgggaagtcacaaa

SEQ ID NO: 928992 - DNA, 33 bp, Homo sapien
gggtcacacaacaccatgatgggaagtcacaaa

SEQ ID NO: 928993 - DNA, 33 bp, Homo sapien
ctttgcagcaacatgaaaaatgaaaagtgtaga

SEQ ID NO: 928994 - DNA, 33 bp, Homo sapien
ctttgcagcaacatgagaaatgaaaagtgtaga

SEQ ID NO: 928995 - DNA, 33 bp, Homo sapien
aacaagaagtcacatacagaatagaattttatc

SEQ ID NO: 928996 - DNA, 33 bp, Homo sapien
aacaagaagtcacatagagaatagaattttatc

SEQ ID NO: 928997 - DNA, 33 bp, Homo sapien
agcaatccgattccccagagacttaaaagtgat

SEQ ID NO: 928998 - DNA, 33 bp, Homo sapien
agcaatccgattccccggagacttaaaagtgat

SEQ ID NO: 928999 - DNA, 33 bp, Homo sapien
aaccagtttctccagcaaggtaggaatggaaat

SEQ ID NO: 929000 - DNA, 33 bp, Homo sapien
aaccagtttctccagcgaggtaggaatggaaat

SEQ ID NO: 929001 - DNA, 33 bp, Homo sapien
cttcatgcaatctgggcatgaaataaatgtttt

SEQ ID NO: 929002 - DNA, 33 bp, Homo sapien
cttcatgcaatctgggtatgaaataaatgtttt

SEQ ID NO: 929003 - DNA, 33 bp, Homo sapien
ggtgtgggagaagggaacatgaatagagattgg

SEQ ID NO: 929004 - DNA, 33 bp, Homo sapien
ggtgtgggagaagggatcatgaatagagattgg

SEQ ID NO: 929005 - DNA, 33 bp, Homo sapien
ccagcagacatcaaaacaaggaactgtaaagtt

SEQ ID NO: 929006 - DNA, 33 bp, Homo sapien
ccagcagacatcaaaagaaggaactgtaaagtt

SEQ ID NO: 929007 - DNA, 33 bp, Homo sapien
aaatcttaatcttgccaaagaaaggtatgcaaa

SEQ ID NO: 929008 - DNA, 33 bp, Homo sapien
aaatcttaatcttgccgaagaaaggtatgcaaa

SEQ ID NO: 929009 - DNA, 33 bp, Homo sapien
tataggtgaatttgaccgaagcattatcatctt

SEQ ID NO: 929010 - DNA, 33 bp, Homo sapien
tataggtgaatttgactgaagcattatcatctt

SEQ ID NO: 929011 - DNA, 33 bp, Homo sapien
tggcttcctatcacaaagcagctggaagatatt

SEQ ID NO: 929012 - DNA, 33 bp, Homo sapien
tggcttcctatcacaaggcagctggaagatatt

SEQ ID NO: 929013 - DNA, 33 bp, Homo sapien
gtcaagatcccaactaacaggataatctttaat

SEQ ID NO: 929014 - DNA, 33 bp, Homo sapien
gtcaagatcccaactaccaggataatctttaat

SEQ ID NO: 929015 - DNA, 33 bp, Homo sapien
ttatccaccagactacaaacttaatcactaaac

SEQ ID NO: 929016 - DNA, 33 bp, Homo sapien
ttatccaccagactaccaacttaatcactaaac

SEQ ID NO: 929017 - DNA, 33 bp, Homo sapien
taggtatagcttcaaaagaaggaatcttagttt

SEQ ID NO: 929018 - DNA, 33 bp, Homo sapien
taggtatagcttcaaaggaaggaatcttagttt

SEQ ID NO: 929019 - DNA, 33 bp, Homo sapien
caatagttgctaagacaatcagctgcatggttc

SEQ ID NO: 929020 - DNA, 33 bp, Homo sapien
caatagttgctaagacgatcagctgcatggttc

SEQ ID NO: 929021 - DNA, 33 bp, Homo sapien
atttattaatttacaacgcaagtagaagttctt

SEQ ID NO: 929022 - DNA, 33 bp, Homo sapien
atttattaatttacaatgcaagtagaagttctt

SEQ ID NO: 929023 - DNA, 33 bp, Homo sapien
tccttgtgcagtgatacagatgtgttatattaa

SEQ ID NO: 929024 - DNA, 33 bp, Homo sapien
tccttgtgcagtgatatagatgtgttatattaa

SEQ ID NO: 929025 - DNA, 33 bp, Homo sapien
cagttaacaacaaccaactgcctacacaaacct

SEQ ID NO: 929026 - DNA, 33 bp, Homo sapien
cagttaacaacaaccagctgcctacacaaacct

SEQ ID NO: 929027 - DNA, 33 bp, Homo sapien
cttgtgtcctacattacccccaactctcctact

SEQ ID NO: 929028 - DNA, 33 bp, Homo sapien
cttgtgtcctacattatccccaactctcctact

SEQ ID NO: 929029 - DNA, 33 bp, Homo sapien
ttctttggctcatggcgctttttctttatcttg

SEQ ID NO: 929030 - DNA, 33 bp, Homo sapien
ttctttggctcatggctctttttctttatcttg

SEQ ID NO: 929031 - DNA, 33 bp, Homo sapien
atctcagtaattcttccatgactttctgctcca

SEQ ID NO: 929032 - DNA, 33 bp, Homo sapien
atctcagtaattcttctatgactttctgctcca

SEQ ID NO: 929033 - DNA, 33 bp, Homo sapien
cagaggtagccaaaaaaccaatatcatcaacat

SEQ ID NO: 929034 - DNA, 33 bp, Homo sapien
cagaggtagccaaaaagccaatatcatcaacat

SEQ ID NO: 929035 - DNA, 33 bp, Homo sapien
agcaacaatctgtcaaatgattaaaaaatgaaa

SEQ ID NO: 929036 - DNA, 33 bp, Homo sapien
agcaacaatctgtcaagtgattaaaaaatgaaa

SEQ ID NO: 929037 - DNA, 33 bp, Homo sapien
taattcaatgcaggctgacaggttttagatcaa

SEQ ID NO: 929038 - DNA, 33 bp, Homo sapien
taattcaatgcaggcttacaggttttagatcaa

SEQ ID NO: 929039 - DNA, 33 bp, Homo sapien
taaatactaaatgtccaataagagttactttgg

SEQ ID NO: 929040 - DNA, 33 bp, Homo sapien
taaatactaaatgtccgataagagttactttgg

SEQ ID NO: 929041 - DNA, 33 bp, Homo sapien
ttttggagttcatggaatatatcttgtcattta

SEQ ID NO: 929042 - DNA, 33 bp, Homo sapien
ttttggagttcatggagtatatcttgtcattta

SEQ ID NO: 929043 - DNA, 33 bp, Homo sapien
aggcctgcacactggaataggcctctgaaaata

SEQ ID NO: 929044 - DNA, 33 bp, Homo sapien
aggcctgcacactggagtaggcctctgaaaata

SEQ ID NO: 929045 - DNA, 33 bp, Homo sapien
ctctatttttatctgaaccttctcttccttcgt

SEQ ID NO: 929046 - DNA, 33 bp, Homo sapien
ctctatttttatctgagccttctcttccttcgt

SEQ ID NO: 929047 - DNA, 33 bp, Homo sapien
ctactcaaatgaactcacaggacagctgtaaac

SEQ ID NO: 929048 - DNA, 33 bp, Homo sapien
ctactcaaatgaactcgcaggacagctgtaaac

SEQ ID NO: 929049 - DNA, 33 bp, Homo sapien
atggcttgatgaatcacactactgttcccaaaa

SEQ ID NO: 929050 - DNA, 33 bp, Homo sapien
atggcttgatgaatcatactactgttcccaaaa

SEQ ID NO: 929051 - DNA, 33 bp, Homo sapien
aattgagagtatcataaaatctctttgcgtgtt

SEQ ID NO: 929052 - DNA, 33 bp, Homo sapien
aattgagagtatcatagaatctctttgcgtgtt

SEQ ID NO: 929053 - DNA, 33 bp, Homo sapien
atagattgcaagggaactaaaactgcatataca

SEQ ID NO: 929054 - DNA, 33 bp, Homo sapien
atagattgcaagggaattaaaactgcatataca

SEQ ID NO: 929055 - DNA, 33 bp, Homo sapien
atcagttgttacattaagttgagaatactgact

SEQ ID NO: 929056 - DNA, 33 bp, Homo sapien
atcagttgttacattaggttgagaatactgact

SEQ ID NO: 929057 - DNA, 33 bp, Homo sapien
gaaggaagctactatacgttaagtcctttctat

SEQ ID NO: 929058 - DNA, 33 bp, Homo sapien
gaaggaagctactataggttaagtcctttctat

SEQ ID NO: 929059 - DNA, 33 bp, Homo sapien
cactctaataactgcacgatgaatctcaaaagg

SEQ ID NO: 929060 - DNA, 33 bp, Homo sapien
cactctaataactgcatgatgaatctcaaaagg

SEQ ID NO: 929061 - DNA, 33 bp, Homo sapien
atgacgctttcaaataccaagctttgtaatgct

SEQ ID NO: 929062 - DNA, 33 bp, Homo sapien
atgacgctttcaaatatcaagctttgtaatgct

SEQ ID NO: 929063 - DNA, 33 bp, Homo sapien
aggctacaatctaaaccaatcaatcttccctgg

SEQ ID NO: 929064 - DNA, 33 bp, Homo sapien
aggctacaatctaaactaatcaatcttccctgg

SEQ ID NO: 929065 - DNA, 33 bp, Homo sapien
tgggagaggtggaaaccagctaaagagaatgat

SEQ ID NO: 929066 - DNA, 33 bp, Homo sapien
tgggagaggtggaaactagctaaagagaatgat

SEQ ID NO: 929067 - DNA, 33 bp, Homo sapien
ttctttttccttactaagatcttggtcccctga

SEQ ID NO: 929068 - DNA, 33 bp, Homo sapien
ttctttttccttactaggatcttggtcccctga

SEQ ID NO: 929069 - DNA, 33 bp, Homo sapien
tgtcctgggttcagataacctattttgccccca

SEQ ID NO: 929070 - DNA, 33 bp, Homo sapien
tgtcctgggttcagatgacctattttgccccca

SEQ ID NO: 929071 - DNA, 33 bp, Homo sapien
tcagtcagactgctaacgacctaaggactattc

SEQ ID NO: 929072 - DNA, 33 bp, Homo sapien
tcagtcagactgctaatgacctaaggactattc

SEQ ID NO: 929073 - DNA, 33 bp, Homo sapien
gcatcactttgggagcagactggtgattagagg

SEQ ID NO: 929074 - DNA, 33 bp, Homo sapien
gcatcactttgggagctgactggtgattagagg

SEQ ID NO: 929075 - DNA, 33 bp, Homo sapien
tatctggtgttgaccacaaaatttcaatatctg

SEQ ID NO: 929076 - DNA, 33 bp, Homo sapien
tatctggtgttgaccataaaatttcaatatctg

SEQ ID NO: 929077 - DNA, 33 bp, Homo sapien
agaggtatcagtaaaacgcaagggctttcaaca

SEQ ID NO: 929078 - DNA, 33 bp, Homo sapien
agaggtatcagtaaaatgcaagggctttcaaca

SEQ ID NO: 929079 - DNA, 33 bp, Homo sapien
ctacaaccctgggatcaatgtcttctacaagga

SEQ ID NO: 929080 - DNA, 33 bp, Homo sapien
ctacaaccctgggatcgatgtcttctacaagga

SEQ ID NO: 929081 - DNA, 33 bp, Homo sapien
tcatgaagttaactgaccagtactattcaaatt

SEQ ID NO: 929082 - DNA, 33 bp, Homo sapien
tcatgaagttaactgagcagtactattcaaatt

SEQ ID NO: 929083 - DNA, 33 bp, Homo sapien
tttggagatgctaaataaaattatcttcaaaac

SEQ ID NO: 929084 - DNA, 33 bp, Homo sapien
tttggagatgctaaatgaaattatcttcaaaac

SEQ ID NO: 929085 - DNA, 33 bp, Homo sapien
tgcttaagtcatactacggacctttctgacttg

SEQ ID NO: 929086 - DNA, 33 bp, Homo sapien
tgcttaagtcatactatggacctttctgacttg

SEQ ID NO: 929087 - DNA, 33 bp, Homo sapien
aacagaaccagtaggccgcagatatagatatgt

SEQ ID NO: 929088 - DNA, 33 bp, Homo sapien
aacagaaccagtaggctgcagatatagatatgt

SEQ ID NO: 929089 - DNA, 33 bp, Homo sapien
gagatcacctatatgaaaagtctacaatgtagt

SEQ ID NO: 929090 - DNA, 33 bp, Homo sapien
gagatcacctatatgagaagtctacaatgtagt

SEQ ID NO: 929091 - DNA, 33 bp, Homo sapien
tgtttgaatctaccaacagttactgtgcaaaca

SEQ ID NO: 929092 - DNA, 33 bp, Homo sapien
tgtttgaatctaccaagagttactgtgcaaaca

SEQ ID NO: 929093 - DNA, 33 bp, Homo sapien
agttgaacacatagaaaactgagttaaaacaaa

SEQ ID NO: 929094 - DNA, 33 bp, Homo sapien
agttgaacacatagaagactgagttaaaacaaa

SEQ ID NO: 929095 - DNA, 33 bp, Homo sapien
tgctgatggtgttagcaaagactggaaagtggc

SEQ ID NO: 929096 - DNA, 33 bp, Homo sapien
tgctgatggtgttagccaagactggaaagtggc

SEQ ID NO: 929097 - DNA, 33 bp, Homo sapien
ccagcaagtccgcagacgctggagttgtggtcc

SEQ ID NO: 929098 - DNA, 33 bp, Homo sapien
ccagcaagtccgcagatgctggagttgtggtcc

SEQ ID NO: 929099 - DNA, 33 bp, Homo sapien
aggttggtcagtatggaaaatgaagactcgtca

SEQ ID NO: 929100 - DNA, 33 bp, Homo sapien
aggttggtcagtatggcaaatgaagactcgtca

SEQ ID NO: 929101 - DNA, 33 bp, Homo sapien
aattgtcaatagtgcacgaaaatatacctaaca

SEQ ID NO: 929102 - DNA, 33 bp, Homo sapien
aattgtcaatagtgcatgaaaatatacctaaca

SEQ ID NO: 929103 - DNA, 33 bp, Homo sapien
ttgccacagcaatgcaaagaattccaaatgtct

SEQ ID NO: 929104 - DNA, 33 bp, Homo sapien
ttgccacagcaatgcagagaattccaaatgtct

SEQ ID NO: 929105 - DNA, 33 bp, Homo sapien
tacagcattataggacagagtcttaaaaccact

SEQ ID NO: 929106 - DNA, 33 bp, Homo sapien
tacagcattataggactgagtcttaaaaccact

SEQ ID NO: 929107 - DNA, 33 bp, Homo sapien
cccatctttcactcaacttctatgcagaaaaag

SEQ ID NO: 929108 - DNA, 33 bp, Homo sapien
cccatctttcactcaagttctatgcagaaaaag

SEQ ID NO: 929109 - DNA, 33 bp, Homo sapien
taatatgtaccttaaaaatgccttatactttgg

SEQ ID NO: 929110 - DNA, 33 bp, Homo sapien
taatatgtaccttaaatatgccttatactttgg

SEQ ID NO: 929111 - DNA, 33 bp, Homo sapien
aagggtaggatcaaaagtctaggtagcatttat

SEQ ID NO: 929112 - DNA, 33 bp, Homo sapien
aagggtaggatcaaaattctaggtagcatttat

SEQ ID NO: 929113 - DNA, 33 bp, Homo sapien
ttgcttataacctacacgcatcctactgtatac

SEQ ID NO: 929114 - DNA, 33 bp, Homo sapien
ttgcttataacctacatgcatcctactgtatac

SEQ ID NO: 929115 - DNA, 33 bp, Homo sapien
gccagatgcctaagtgaagtgtaacatgaggaa

SEQ ID NO: 929116 - DNA, 33 bp, Homo sapien
gccagatgcctaagtgcagtgtaacatgaggaa

SEQ ID NO: 929117 - DNA, 33 bp, Homo sapien
tgaaaaatccttgcataagtgagcatgaagtgg

SEQ ID NO: 929118 - DNA, 33 bp, Homo sapien
tgaaaaatccttgcatgagtgagcatgaagtgg

SEQ ID NO: 929119 - DNA, 33 bp, Homo sapien
aatagggctgacagaaaactgtgagtcatgtta

SEQ ID NO: 929120 - DNA, 33 bp, Homo sapien
aatagggctgacagaagactgtgagtcatgtta

SEQ ID NO: 929121 - DNA, 33 bp, Homo sapien
tttcatagagtttccaatcaacccattatgatg

SEQ ID NO: 929122 - DNA, 33 bp, Homo sapien
tttcatagagtttccagtcaacccattatgatg

SEQ ID NO: 929123 - DNA, 33 bp, Homo sapien
tctattgcctgccatggacttattaaatgtcac

SEQ ID NO: 929124 - DNA, 33 bp, Homo sapien
tctattgcctgccatgtacttattaaatgtcac

SEQ ID NO: 929125 - DNA, 33 bp, Homo sapien
ccaagacttcattaaaattgtctctgctctgtc

SEQ ID NO: 929126 - DNA, 33 bp, Homo sapien
ccaagacttcattaaagttgtctctgctctgtc

SEQ ID NO: 929127 - DNA, 33 bp, Homo sapien
gcagaggcagccataagcctactggtaacgtaa

SEQ ID NO: 929128 - DNA, 33 bp, Homo sapien
gcagaggcagccataatcctactggtaacgtaa

SEQ ID NO: 929129 - DNA, 33 bp, Homo sapien
atttaaaaaagtagcccctgtgattcaaatgct

SEQ ID NO: 929130 - DNA, 33 bp, Homo sapien
atttaaaaaagtagcctctgtgattcaaatgct

SEQ ID NO: 929131 - DNA, 33 bp, Homo sapien
agcagtgtgacaaaacagggtgattaatgaatt

SEQ ID NO: 929132 - DNA, 33 bp, Homo sapien
agcagtgtgacaaaacggggtgattaatgaatt

SEQ ID NO: 929133 - DNA, 33 bp, Homo sapien
ataacgtggagatacaaataattggaaaagtct

SEQ ID NO: 929134 - DNA, 33 bp, Homo sapien
ataacgtggagatacagataattggaaaagtct

SEQ ID NO: 929135 - DNA, 33 bp, Homo sapien
ttatagaaggtagggcactacagaacaagtcag

SEQ ID NO: 929136 - DNA, 33 bp, Homo sapien
ttatagaaggtagggcgctacagaacaagtcag

SEQ ID NO: 929137 - DNA, 33 bp, Homo sapien
catccttacctcttacaatttgtgacctcatat

SEQ ID NO: 929138 - DNA, 33 bp, Homo sapien
catccttacctcttacgatttgtgacctcatat

SEQ ID NO: 929139 - DNA, 33 bp, Homo sapien
cttccttttgggaaaacggttatctattatgac

SEQ ID NO: 929140 - DNA, 33 bp, Homo sapien
cttccttttgggaaaatggttatctattatgac

SEQ ID NO: 929141 - DNA, 33 bp, Homo sapien
ccatgttgccaaaccaagagaggcttatcagtt

SEQ ID NO: 929142 - DNA, 33 bp, Homo sapien
ccatgttgccaaaccaggagaggcttatcagtt

SEQ ID NO: 929143 - DNA, 33 bp, Homo sapien
tggtaatactaagagacgccgcaattgatctac

SEQ ID NO: 929144 - DNA, 33 bp, Homo sapien
tggtaatactaagagatgccgcaattgatctac

SEQ ID NO: 929145 - DNA, 33 bp, Homo sapien
catgacacaagggaaaaatatagcattaaaatc

SEQ ID NO: 929146 - DNA, 33 bp, Homo sapien
catgacacaagggaaagatatagcattaaaatc

SEQ ID NO: 929147 - DNA, 33 bp, Homo sapien
aaatataggtaccctgaaatgtgattttaatgc

SEQ ID NO: 929148 - DNA, 33 bp, Homo sapien
aaatataggtaccctggaatgtgattttaatgc

SEQ ID NO: 929149 - DNA, 33 bp, Homo sapien
gagtctgcaggctttaagaagaaagtgtttgcc

SEQ ID NO: 929150 - DNA, 33 bp, Homo sapien
gagtctgcaggctttaggaagaaagtgtttgcc

SEQ ID NO: 929151 - DNA, 33 bp, Homo sapien
actatatacaacaaataattgaagatagattaa

SEQ ID NO: 929152 - DNA, 33 bp, Homo sapien
actatatacaacaaattattgaagatagattaa

SEQ ID NO: 929153 - DNA, 33 bp, Homo sapien
ccaaagaccagttgcacaaaaataataagagaa

SEQ ID NO: 929154 - DNA, 33 bp, Homo sapien
ccaaagaccagttgcataaaaataataagagaa

SEQ ID NO: 929155 - DNA, 33 bp, Homo sapien
tggagccctggtgccactgaagtcttacaggtc

SEQ ID NO: 929156 - DNA, 33 bp, Homo sapien
tggagccctggtgccattgaagtcttacaggtc

SEQ ID NO: 929157 - DNA, 33 bp, Homo sapien
aaagttcaagtggagagaaagtgatttctttta

SEQ ID NO: 929158 - DNA, 33 bp, Homo sapien
aaagttcaagtggagataaagtgatttctttta

SEQ ID NO: 929159 - DNA, 33 bp, Homo sapien
actcaaaagtggcctagcagataaagttcaagt

SEQ ID NO: 929160 - DNA, 33 bp, Homo sapien
actcaaaagtggcctatcagataaagttcaagt

SEQ ID NO: 929161 - DNA, 33 bp, Homo sapien
actattttatatgcccagcaaaagattaaacaa

SEQ ID NO: 929162 - DNA, 33 bp, Homo sapien
actattttatatgcccggcaaaagattaaacaa

SEQ ID NO: 929163 - DNA, 33 bp, Homo sapien
agcaaggagattggcaagatggcccatggtatc

SEQ ID NO: 929164 - DNA, 33 bp, Homo sapien
agcaaggagattggcatgatggcccatggtatc

SEQ ID NO: 929165 - DNA, 33 bp, Homo sapien
ataaggaggaccattgaaaataacatgtgaaga

SEQ ID NO: 929166 - DNA, 33 bp, Homo sapien
ataaggaggaccattggaaataacatgtgaaga

SEQ ID NO: 929167 - DNA, 33 bp, Homo sapien
tagtaagtgcttaataatactcagtttgacaca

SEQ ID NO: 929168 - DNA, 33 bp, Homo sapien
tagtaagtgcttaatactactcagtttgacaca

SEQ ID NO: 929169 - DNA, 33 bp, Homo sapien
ctgccaacatgagtctcaaattaggccaattag

SEQ ID NO: 929170 - DNA, 33 bp, Homo sapien
ctgccaacatgagtcttaaattaggccaattag

SEQ ID NO: 929171 - DNA, 33 bp, Homo sapien
gaatggccttagttcacgtgtttctcccttcct

SEQ ID NO: 929172 - DNA, 33 bp, Homo sapien
gaatggccttagttcatgtgtttctcccttcct

SEQ ID NO: 929173 - DNA, 33 bp, Homo sapien
gctacaattggtgccacgtgagaaaatgaagca

SEQ ID NO: 929174 - DNA, 33 bp, Homo sapien
gctacaattggtgccaggtgagaaaatgaagca

SEQ ID NO: 929175 - DNA, 33 bp, Homo sapien
ctaatttatactatacaactgaaaaactacagg

SEQ ID NO: 929176 - DNA, 33 bp, Homo sapien
ctaatttatactatacgactgaaaaactacagg

SEQ ID NO: 929177 - DNA, 33 bp, Homo sapien
ggttgggcaaccgtgacctaaacataactgatt

SEQ ID NO: 929178 - DNA, 33 bp, Homo sapien
ggttgggcaaccgtgatctaaacataactgatt

SEQ ID NO: 929179 - DNA, 33 bp, Homo sapien
attggcagtttaaaaactcatgttcccatataa

SEQ ID NO: 929180 - DNA, 33 bp, Homo sapien
attggcagtttaaaaagtcatgttcccatataa

SEQ ID NO: 929181 - DNA, 33 bp, Homo sapien
aattgctcaataaagcacgaaatgtcttgataa

SEQ ID NO: 929182 - DNA, 33 bp, Homo sapien
aattgctcaataaagcgcgaaatgtcttgataa

SEQ ID NO: 929183 - DNA, 33 bp, Homo sapien
cccatttctcaggatacagttcagttttctaag

SEQ ID NO: 929184 - DNA, 33 bp, Homo sapien
cccatttctcaggatagagttcagttttctaag

SEQ ID NO: 929185 - DNA, 33 bp, Homo sapien
atttctattaattacaagtttaaggtgttataa

SEQ ID NO: 929186 - DNA, 33 bp, Homo sapien
atttctattaattacaggtttaaggtgttataa

SEQ ID NO: 929187 - DNA, 33 bp, Homo sapien
aaaattttttagaaaaagcagataggatgagat

SEQ ID NO: 929188 - DNA, 33 bp, Homo sapien
aaaattttttagaaaaggcagataggatgagat

SEQ ID NO: 929189 - DNA, 33 bp, Homo sapien
tcaagttcattgcaaacagtaacaaattgaaca

SEQ ID NO: 929190 - DNA, 33 bp, Homo sapien
tcaagttcattgcaaatagtaacaaattgaaca

SEQ ID NO: 929191 - DNA, 33 bp, Homo sapien
tggtgaattggtatgaagtacaactaatggtgt

SEQ ID NO: 929192 - DNA, 33 bp, Homo sapien
tggtgaattggtatgaggtacaactaatggtgt

SEQ ID NO: 929193 - DNA, 33 bp, Homo sapien
agacgacagggactccacaattcttaggtgact

SEQ ID NO: 929194 - DNA, 33 bp, Homo sapien
agacgacagggactccgcaattcttaggtgact

SEQ ID NO: 929195 - DNA, 33 bp, Homo sapien
taagcaaaacaataaaatgcaattggtagatat

SEQ ID NO: 929196 - DNA, 33 bp, Homo sapien
taagcaaaacaataaagtgcaattggtagatat

SEQ ID NO: 929197 - DNA, 33 bp, Homo sapien
aaatttggtcctctcaagagttgtgtggggtct

SEQ ID NO: 929198 - DNA, 33 bp, Homo sapien
aaatttggtcctctcaggagttgtgtggggtct

SEQ ID NO: 929199 - DNA, 33 bp, Homo sapien
tttattacatttggcaacccaagttataaagct

SEQ ID NO: 929200 - DNA, 33 bp, Homo sapien
tttattacatttggcagcccaagttataaagct

SEQ ID NO: 929201 - DNA, 33 bp, Homo sapien
agactttctttagtgcagaattcagagcatctt

SEQ ID NO: 929202 - DNA, 33 bp, Homo sapien
agactttctttagtgcggaattcagagcatctt

SEQ ID NO: 929203 - DNA, 33 bp, Homo sapien
cttttgattttctacaaaggcccgctactaggc

SEQ ID NO: 929204 - DNA, 33 bp, Homo sapien
cttttgattttctacacaggcccgctactaggc

SEQ ID NO: 929205 - DNA, 33 bp, Homo sapien
cacgctcaggaatctccattttcaacaaacatc

SEQ ID NO: 929206 - DNA, 33 bp, Homo sapien
cacgctcaggaatctctattttcaacaaacatc

SEQ ID NO: 929207 - DNA, 33 bp, Homo sapien
cagggatttactagggaaatgcatctcgcttga

SEQ ID NO: 929208 - DNA, 33 bp, Homo sapien
cagggatttactaggggaatgcatctcgcttga

SEQ ID NO: 929209 - DNA, 33 bp, Homo sapien
atggaggaggcaaagacataccagagcagacac

SEQ ID NO: 929210 - DNA, 33 bp, Homo sapien
atggaggaggcaaagatataccagagcagacac

SEQ ID NO: 929211 - DNA, 33 bp, Homo sapien
ctctatggaaaataagaagagtggtaacaggta

SEQ ID NO: 929212 - DNA, 33 bp, Homo sapien
ctctatggaaaataaggagagtggtaacaggta

SEQ ID NO: 929213 - DNA, 33 bp, Homo sapien
ttgagaaggatagtcacgtggtttagcaaaatg

SEQ ID NO: 929214 - DNA, 33 bp, Homo sapien
ttgagaaggatagtcatgtggtttagcaaaatg

SEQ ID NO: 929215 - DNA, 33 bp, Homo sapien
tatatctggtgactataactattttattcctgc

SEQ ID NO: 929216 - DNA, 33 bp, Homo sapien
tatatctggtgactatgactattttattcctgc

SEQ ID NO: 929217 - DNA, 33 bp, Homo sapien
gcaaatgaaagtcatgcagaaatggtactgttt

SEQ ID NO: 929218 - DNA, 33 bp, Homo sapien
gcaaatgaaagtcatgtagaaatggtactgttt

SEQ ID NO: 929219 - DNA, 33 bp, Homo sapien
gggaaaagcatacaagaagaagcacaaagtaat

SEQ ID NO: 929220 - DNA, 33 bp, Homo sapien
gggaaaagcatacaaggagaagcacaaagtaat

SEQ ID NO: 929221 - DNA, 33 bp, Homo sapien
tcatgagttaatgaagaaagttaaatagctatc

SEQ ID NO: 929222 - DNA, 33 bp, Homo sapien
tcatgagttaatgaagcaagttaaatagctatc

SEQ ID NO: 929223 - DNA, 33 bp, Homo sapien
gagctttatggctccagatcttacattcaagtc

SEQ ID NO: 929224 - DNA, 33 bp, Homo sapien
gagctttatggctccatatcttacattcaagtc

SEQ ID NO: 929225 - DNA, 33 bp, Homo sapien
aggatgtttagaaccgacaaacgtaagacatct

SEQ ID NO: 929226 - DNA, 33 bp, Homo sapien
aggatgtttagaaccggcaaacgtaagacatct

SEQ ID NO: 929227 - DNA, 33 bp, Homo sapien
agttgttaaatcagtaagcaacagtatctgtta

SEQ ID NO: 929228 - DNA, 33 bp, Homo sapien
agttgttaaatcagtaggcaacagtatctgtta

SEQ ID NO: 929229 - DNA, 33 bp, Homo sapien; identical to SEQ ID NO: 929227

SEQ ID NO: 929230 - DNA, 33 bp, Homo sapien; identical to SEQ ID NO: 929228

SEQ ID NO: 929231 - DNA, 33 bp, Homo sapien
gtccaatgacattgaagtatagcagttcacatt

SEQ ID NO: 929232 - DNA, 33 bp, Homo sapien
gtccaatgacattgaattatagcagttcacatt

SEQ ID NO: 929233 - DNA, 33 bp, Homo sapien
taaaacaaattctctacggtgcattcttaccat

SEQ ID NO: 929234 - DNA, 33 bp, Homo sapien
taaaacaaattctctatggtgcattcttaccat

SEQ ID NO: 929235 - DNA, 33 bp, Homo sapien
ccaactgtgatggaaactgaggattaacttatt

SEQ ID NO: 929236 - DNA, 33 bp, Homo sapien
ccaactgtgatggaaattgaggattaacttatt

SEQ ID NO: 929237 - DNA, 33 bp, Homo sapien
ttcatggcaggttgaacgtatttatagcttttg

SEQ ID NO: 929238 - DNA, 33 bp, Homo sapien
ttcatggcaggttgaatgtatttatagcttttg

SEQ ID NO: 929239 - DNA, 33 bp, Homo sapien
aatactgtatggttaacgttctcctaatgtaat

SEQ ID NO: 929240 - DNA, 33 bp, Homo sapien
aatactgtatggttaatgttctcctaatgtaat

SEQ ID NO: 929241 - DNA, 33 bp, Homo sapien
cccagcattggttggacattcataacctcattc

SEQ ID NO: 929242 - DNA, 33 bp, Homo sapien
cccagcattggttggatattcataacctcattc

SEQ ID NO: 929243 - DNA, 33 bp, Homo sapien
atgtacatgtcaaagacggtatccatattatat

SEQ ID NO: 929244 - DNA, 33 bp, Homo sapien
atgtacatgtcaaagatggtatccatattatat

SEQ ID NO: 929245 - DNA, 33 bp, Homo sapien
ggtaagacacagataactagtctccaaaataca

SEQ ID NO: 929246 - DNA, 33 bp, Homo sapien
ggtaagacacagataattagtctccaaaataca

SEQ ID NO: 929247 - DNA, 33 bp, Homo sapien
acttacccaaattcacagtactagtaagttgta

SEQ ID NO: 929248 - DNA, 33 bp, Homo sapien
acttacccaaattcaccgtactagtaagttgta

SEQ ID NO: 929249 - DNA, 33 bp, Homo sapien
gctgacaggactagaaggaacgcacacatccca

SEQ ID NO: 929250 - DNA, 33 bp, Homo sapien
gctgacaggactagaatgaacgcacacatccca

SEQ ID NO: 929251 - DNA, 33 bp, Homo sapien
ataaatactttctgacaaattaattgatagtgt

SEQ ID NO: 929252 - DNA, 33 bp, Homo sapien
ataaatactttctgaccaattaattgatagtgt

SEQ ID NO: 929253 - DNA, 33 bp, Homo sapien
tggccagagatttcctaaagttgtttgcaatta

SEQ ID NO: 929254 - DNA, 33 bp, Homo sapien
tggccagagatttcctcaagttgtttgcaatta

SEQ ID NO: 929255 - DNA, 33 bp, Homo sapien
gtcttaagagtgagcacaaaatattcattaaac

SEQ ID NO: 929256 - DNA, 33 bp, Homo sapien
gtcttaagagtgagcataaaatattcattaaac

SEQ ID NO: 929257 - DNA, 33 bp, Homo sapien
agggctatgagtccataaggagaactaatatcc

SEQ ID NO: 929258 - DNA, 33 bp, Homo sapien
agggctatgagtccatgaggagaactaatatcc

SEQ ID NO: 929259 - DNA, 33 bp, Homo sapien
ctgtctctacctccacagaattgtgcacactta

SEQ ID NO: 929260 - DNA, 33 bp, Homo sapien
ctgtctctacctccacggaattgtgcacactta

SEQ ID NO: 929261 - DNA, 33 bp, Homo sapien
ttggaacttggaagtgcaaattttagaagcatg

SEQ ID NO: 929262 - DNA, 33 bp, Homo sapien
ttggaacttggaagtggaaattttagaagcatg

SEQ ID NO: 929263 - DNA, 33 bp, Homo sapien; identical to SEQ ID NO: 929261

SEQ ID NO: 929264 - DNA, 33 bp, Homo sapien; identical to SEQ ID NO: 929262

SEQ ID NO: 929265 - DNA, 33 bp, Homo sapien
atcctaaactattagaactattaagaccactgt

SEQ ID NO: 929266 - DNA, 33 bp, Homo sapien
atcctaaactattagacctattaagaccactgt

SEQ ID NO: 929267 - DNA, 33 bp, Homo sapien
attttcaaaccttagaaacctcttctggtcctg

SEQ ID NO: 929268 - DNA, 33 bp, Homo sapien
attttcaaaccttagatacctcttctggtcctg

SEQ ID NO: 929269 - DNA, 33 bp, Homo sapien; identical to SEQ ID NO: 929267

SEQ ID NO: 929270 - DNA, 33 bp, Homo sapien; identical to SEQ ID NO: 929268

SEQ ID NO: 929271 - DNA, 33 bp, Homo sapien
atttgaaatttttcaactctgtccatcactgtt

SEQ ID NO: 929272 - DNA, 33 bp, Homo sapien
atttgaaatttttcaattctgtccatcactgtt

SEQ ID NO: 929273 - DNA, 33 bp, Homo sapien; identical to SEQ ID NO: 929271

SEQ ID NO: 929274 - DNA, 33 bp, Homo sapien; identical to SEQ ID NO: 929272

SEQ ID NO: 929275 - DNA, 33 bp, Homo sapien
cttgggaaggaaataacggattcactgctgggg

SEQ ID NO: 929276 - DNA, 33 bp, Homo sapien
cttgggaaggaaataatggattcactgctgggg

SEQ ID NO: 929277 - DNA, 33 bp, Homo sapien; identical to SEQ ID NO: 929275

SEQ ID NO: 929278 - DNA, 33 bp, Homo sapien; identical to SEQ ID NO: 929276

SEQ ID NO: 929279 - DNA, 33 bp, Homo sapien
aatctagagtttcttcacctttgtttctttaga

SEQ ID NO: 929280 - DNA, 33 bp, Homo sapien
aatctagagtttcttcgcctttgtttctttaga

SEQ ID NO: 929281 - DNA, 33 bp, Homo sapien
gattaacatccacaaactaaaatcagctcaacc

SEQ ID NO: 929282 - DNA, 33 bp, Homo sapien
gattaacatccacaaattaaaatcagctcaacc

SEQ ID NO: 929283 - DNA, 33 bp, Homo sapien; identical to SEQ ID NO: 929281

SEQ ID NO: 929284 - DNA, 33 bp, Homo sapien; identical to SEQ ID NO: 929282

SEQ ID NO: 929285 - DNA, 33 bp, Homo sapien
cagagtgcatcatcaaagcaatatggctaagct

SEQ ID NO: 929286 - DNA, 33 bp, Homo sapien
cagagtgcatcatcaacgcaatatggctaagct

SEQ ID NO: 929287 - DNA, 33 bp, Homo sapien
atggcagaggtttcctaaattctgtctcaagta

SEQ ID NO: 929288 - DNA, 33 bp, Homo sapien
atggcagaggtttcctgaattctgtctcaagta

SEQ ID NO: 929289 - DNA, 33 bp, Homo sapien
ttatttccaattaccacgaaactccagtgattc

SEQ ID NO: 929290 - DNA, 33 bp, Homo sapien
ttatttccaattaccaggaaactccagtgattc

SEQ ID NO: 929291 - DNA, 33 bp, Homo sapien; identical to SEQ ID NO: 929289

SEQ ID NO: 929292 - DNA, 33 bp, Homo sapien; identical to SEQ ID NO: 929290

SEQ ID NO: 929293 - DNA, 33 bp, Homo sapien
tgatatgctgataggacggagctggaatgtttc

SEQ ID NO: 929294 - DNA, 33 bp, Homo sapien
tgatatgctgataggatggagctggaatgtttc

SEQ ID NO: 929295 - DNA, 33 bp, Homo sapien; identical to SEQ ID NO: 929293

SEQ ID NO: 929296 - DNA, 33 bp, Homo sapien; identical to SEQ ID NO: 929294

SEQ ID NO: 929297 - DNA, 33 bp, Homo sapien
atcaccccacactcaacaagttccaaatgacat

SEQ ID NO: 929298 - DNA, 33 bp, Homo sapien
atcaccccacactcaagaagttccaaatgacat

SEQ ID NO: 929299 - DNA, 33 bp, Homo sapien
gatcatgaaaaggttacggtgagctgctcaggc

SEQ ID NO: 929300 - DNA, 33 bp, Homo sapien
gatcatgaaaaggttatggtgagctgctcaggc

SEQ ID NO: 929301 - DNA, 33 bp, Homo sapien; identical to SEQ ID NO: 929299

SEQ ID NO: 929302 - DNA, 33 bp, Homo sapien; identical to SEQ ID NO: 929300

SEQ ID NO: 929303 - DNA, 33 bp, Homo sapien
gtggtcctggagactgccacataatggtgactg

SEQ ID NO: 929304 - DNA, 33 bp, Homo sapien
gtggtcctggagactggcacataatggtgactg

SEQ ID NO: 929305 - DNA, 33 bp, Homo sapien
gctaattgtttttctgcagatgtgagctgtcaa

SEQ ID NO: 929306 - DNA, 33 bp, Homo sapien
gctaattgtttttctgtagatgtgagctgtcaa

SEQ ID NO: 929307 - DNA, 33 bp, Homo sapien; identical to SEQ ID NO: 929305

SEQ ID NO: 929308 - DNA, 33 bp, Homo sapien; identical to SEQ ID NO: 929306

SEQ ID NO: 929309 - DNA, 33 bp, Homo sapien
cagtgagaaacatacacctttatatccacgttt

SEQ ID NO: 929310 - DNA, 33 bp, Homo sapien
cagtgagaaacatacagctttatatccacgttt

SEQ ID NO: 929311 - DNA, 33 bp, Homo sapien
agataactcatgaatacgctgcatcaatgcagt

SEQ ID NO: 929312 - DNA, 33 bp, Homo sapien
agataactcatgaatatgctgcatcaatgcagt

SEQ ID NO: 929313 - DNA, 33 bp, Homo sapien; identical to SEQ ID NO: 929311

SEQ ID NO: 929314 - DNA, 33 bp, Homo sapien; identical to SEQ ID NO: 929312

SEQ ID NO: 929315 - DNA, 33 bp, Homo sapien
tcttacaggcaaagcaacttgtataatggggaa

SEQ ID NO: 929316 - DNA, 33 bp, Homo sapien
tcttacaggcaaagcagcttgtataatggggaa

SEQ ID NO: 929317 - DNA, 33 bp, Homo sapien
agtttcctccaatgacaacacccagatcttaat

SEQ ID NO: 929318 - DNA, 33 bp, Homo sapien
agtttcctccaatgacgacacccagatcttaat

SEQ ID NO: 929319 - DNA, 33 bp, Homo sapien
attattttcctaagtccaggtcttcaatggagt

SEQ ID NO: 929320 - DNA, 33 bp, Homo sapien
attattttcctaagtctaggtcttcaatggagt

SEQ ID NO: 929321 - DNA, 33 bp, Homo sapien; identical to SEQ ID NO: 929319

SEQ ID NO: 929322 - DNA, 33 bp, Homo sapien; identical to SEQ ID NO: 929320

SEQ ID NO: 929323 - DNA, 33 bp, Homo sapien
gaatacctgggctctccgaagacctcttgaagc

SEQ ID NO: 929324 - DNA, 33 bp, Homo sapien
gaatacctgggctctctgaagacctcttgaagc

SEQ ID NO: 929325 - DNA, 33 bp, Homo sapien; identical to SEQ ID NO: 929323

SEQ ID NO: 929326 - DNA, 33 bp, Homo sapien; identical to SEQ ID NO: 929324

SEQ ID NO: 929327 - DNA, 33 bp, Homo sapien
cgaactgaccagtagacatgcccattttttaat

SEQ ID NO: 929328 - DNA, 33 bp, Homo sapien
cgaactgaccagtagatatgcccattttttaat

SEQ ID NO: 929329 - DNA, 33 bp, Homo sapien
acctactacatgtcaagttccggtacctcctca

SEQ ID NO: 929330 - DNA, 33 bp, Homo sapien
acctactacatgtcaatttccggtacctcctca

SEQ ID NO: 929331 - DNA, 33 bp, Homo sapien; identical to SEQ ID NO: 929329

SEQ ID NO: 929332 - DNA, 33 bp, Homo sapien; identical to SEQ ID NO: 929330

SEQ ID NO: 929333 - DNA, 33 bp, Homo sapien
tccaccctccttagaaagtggcaatagtttaaa

SEQ ID NO: 929334 - DNA, 33 bp, Homo sapien
tccaccctccttagaacgtggcaatagtttaaa

SEQ ID NO: 929335 - DNA, 33 bp, Homo sapien
gtagaatgaaactgaaccttcagagcagctcct

SEQ ID NO: 929336 - DNA, 33 bp, Homo sapien
gtagaatgaaactgaatcttcagagcagctcct

SEQ ID NO: 929337 - DNA, 33 bp, Homo sapien
aacaaaacattcatcactcagtatccccttgtt

SEQ ID NO: 929338 - DNA, 33 bp, Homo sapien
aacaaaacattcatcattcagtatccccttgtt

SEQ ID NO: 929339 - DNA, 33 bp, Homo sapien
agacgaaggggcattaaatacactataaaccat

SEQ ID NO: 929340 - DNA, 33 bp, Homo sapien
agacgaaggggcattagatacactataaaccat

SEQ ID NO: 929341 - DNA, 33 bp, Homo sapien
tggtggaaggaaagaccacaggttgttttttgt

SEQ ID NO: 929342 - DNA, 33 bp, Homo sapien
tggtggaaggaaagactacaggttgttttttgt

SEQ ID NO: 929343 - DNA, 33 bp, Homo sapien; identical to SEQ ID NO: 929341

SEQ ID NO: 929344 - DNA, 33 bp, Homo sapien; identical to SEQ ID NO: 929342

SEQ ID NO: 929345 - DNA, 33 bp, Homo sapien
cttctgcagaaatgaaacaacatcagaatctat

SEQ ID NO: 929346 - DNA, 33 bp, Homo sapien
cttctgcagaaatgaagcaacatcagaatctat

SEQ ID NO: 929347 - DNA, 33 bp, Homo sapien
aagaattatatcattgaattattactgagcaga

SEQ ID NO: 929348 - DNA, 33 bp, Homo sapien
aagaattatatcattggattattactgagcaga

SEQ ID NO: 929349 - DNA, 33 bp, Homo sapien
gttctactgcatcaaactgccattgtttactaa

SEQ ID NO: 929350 - DNA, 33 bp, Homo sapien
gttctactgcatcaaattgccattgtttactaa

SEQ ID NO: 929351 - DNA, 33 bp, Homo sapien
tgctggactcttagtacctcaggaagtgggagt

SEQ ID NO: 929352 - DNA, 33 bp, Homo sapien
tgctggactcttagtagctcaggaagtgggagt

SEQ ID NO: 929353 - DNA, 33 bp, Homo sapien; identical to SEQ ID NO: 929351

SEQ ID NO: 929354 - DNA, 33 bp, Homo sapien; identical to SEQ ID NO: 929352

SEQ ID NO: 929355 - DNA, 33 bp, Homo sapien
attttttcactctacaataatacacatcagggt

SEQ ID NO: 929356 - DNA, 33 bp, Homo sapien
attttttcactctacagtaatacacatcagggt

SEQ ID NO: 929357 - DNA, 33 bp, Homo sapien
taattaattgccctcaaacattcattgagcact

SEQ ID NO: 929358 - DNA, 33 bp, Homo sapien
taattaattgccctcagacattcattgagcact

SEQ ID NO: 929359 - DNA, 33 bp, Homo sapien; identical to SEQ ID NO: 929357

SEQ ID NO: 929360 - DNA, 33 bp, Homo sapien; identical to SEQ ID NO: 929358

SEQ ID NO: 929361 - DNA, 33 bp, Homo sapien
ctgagacttcataaaaatatcatatgtgcttaa

SEQ ID NO: 929362 - DNA, 33 bp, Homo sapien
ctgagacttcataaaactatcatatgtgcttaa

SEQ ID NO: 929363 - DNA, 33 bp, Homo sapien; identical to SEQ ID NO: 929361

SEQ ID NO: 929364 - DNA, 33 bp, Homo sapien; identical to SEQ ID NO: 929362

SEQ ID NO: 929365 - DNA, 33 bp, Homo sapien
atgccaggactatcaaaaaaatgctacgtaatt

SEQ ID NO: 929366 - DNA, 33 bp, Homo sapien
atgccaggactatcaagaaaatgctacgtaatt

SEQ ID NO: 929367 - DNA, 33 bp, Homo sapien
ttagtgtcatgataaaactatagaccagtgaat

SEQ ID NO: 929368 - DNA, 33 bp, Homo sapien
ttagtgtcatgataaatctatagaccagtgaat

SEQ ID NO: 929369 - DNA, 33 bp, Homo sapien
tttactgtcgctagtaagcagttaatcaacaat

SEQ ID NO: 929370 - DNA, 33 bp, Homo sapien
tttactgtcgctagtaggcagttaatcaacaat

SEQ ID NO: 929371 - DNA, 33 bp, Homo sapien; identical to SEQ ID NO: 929369

SEQ ID NO: 929372 - DNA, 33 bp, Homo sapien; identical to SEQ ID NO: 929370

SEQ ID NO: 929373 - DNA, 33 bp, Homo sapien
gacaacaaattgacagaagctaatgaaagcggt

SEQ ID NO: 929374 - DNA, 33 bp, Homo sapien
gacaacaaattgacaggagctaatgaaagcggt

SEQ ID NO: 929375 - DNA, 33 bp, Homo sapien
agttttcagaaattgccatgcaagggaccatag

SEQ ID NO: 929376 - DNA, 33 bp, Homo sapien
agttttcagaaattgctatgcaagggaccatag

SEQ ID NO: 929377 - DNA, 33 bp, Homo sapien; identical to SEQ ID NO: 929375

SEQ ID NO: 929378 - DNA, 33 bp, Homo sapien; identical to SEQ ID NO: 929376

SEQ ID NO: 929379 - DNA, 33 bp, Homo sapien
tgtgaactgtagaaaacgttgttgatgatcccc

SEQ ID NO: 929380 - DNA, 33 bp, Homo sapien
tgtgaactgtagaaaaggttgttgatgatcccc

SEQ ID NO: 929381 - DNA, 33 bp, Homo sapien
aaaggctgagttaccaagtggactgaggtggat

SEQ ID NO: 929382 - DNA, 33 bp, Homo sapien
aaaggctgagttaccacgtggactgaggtggat

SEQ ID NO: 929383 - DNA, 33 bp, Homo sapien; identical to SEQ ID NO: 929381

SEQ ID NO: 929384 - DNA, 33 bp, Homo sapien; identical to SEQ ID NO: 929382

SEQ ID NO: 929385 - DNA, 33 bp, Homo sapien
ttgaacctggtgaacaagaagatgatataaaga

SEQ ID NO: 929386 - DNA, 33 bp, Homo sapien
ttgaacctggtgaacaggaagatgatataaaga

SEQ ID NO: 929387 - DNA, 33 bp, Homo sapien
gactccaactctaaagcccacatttttctatca

SEQ ID NO: 929388 - DNA, 33 bp, Homo sapien
gactccaactctaaagtccacatttttctatca

SEQ ID NO: 929389 - DNA, 33 bp, Homo sapien; identical to SEQ ID NO: 929387

SEQ ID NO: 929390 - DNA, 33 bp, Homo sapien; identical to SEQ ID NO: 929388

SEQ ID NO: 929391 - DNA, 33 bp, Homo sapien
accaacttctcaacaaatgcacagctttattat

SEQ ID NO: 929392 - DNA, 33 bp, Homo sapien
accaacttctcaacaagtgcacagctttattat

SEQ ID NO: 929393 - DNA, 33 bp, Homo sapien
aaaaaataagaaccaactgttgaaacctcaaaa

SEQ ID NO: 929394 - DNA, 33 bp, Homo sapien
aaaaaataagaaccaattgttgaaacctcaaaa

SEQ ID NO: 929395 - DNA, 33 bp, Homo sapien
tatgtcagtttcatcacggaaaaatcacaagat

SEQ ID NO: 929396 - DNA, 33 bp, Homo sapien
tatgtcagtttcatcatggaaaaatcacaagat

SEQ ID NO: 929397 - DNA, 33 bp, Homo sapien
tgctagatcacatcaactgtaccgaatcaagtg

SEQ ID NO: 929398 - DNA, 33 bp, Homo sapien
tgctagatcacatcaagtgtaccgaatcaagtg

SEQ ID NO: 929399 - DNA, 33 bp, Homo sapien
ccttttgtaaagtcaagaatacactgtccagta

SEQ ID NO: 929400 - DNA, 33 bp, Homo sapien
ccttttgtaaagtcaataatacactgtccagta

SEQ ID NO: 929401 - DNA, 33 bp, Homo sapien
ctcagcaaatactagcaagtgaattaaaaatga

SEQ ID NO: 929402 - DNA, 33 bp, Homo sapien
ctcagcaaatactagcgagtgaattaaaaatga

SEQ ID NO: 929403 - DNA, 33 bp, Homo sapien
gctgtctctacggtgacacacttatccacattc

SEQ ID NO: 929404 - DNA, 33 bp, Homo sapien
gctgtctctacggtgatacacttatccacattc

SEQ ID NO: 929405 - DNA, 33 bp, Homo sapien; identical to SEQ ID NO: 929403

SEQ ID NO: 929406 - DNA, 33 bp, Homo sapien; identical to SEQ ID NO: 929404

SEQ ID NO: 929407 - DNA, 33 bp, Homo sapien
ggctctacttgtactacctaagtgcatcagagg

SEQ ID NO: 929408 - DNA, 33 bp, Homo sapien
ggctctacttgtactatctaagtgcatcagagg

SEQ ID NO: 929409 - DNA, 33 bp, Homo sapien
aggtaagagttggttgcagcagtaactcctgaa

SEQ ID NO: 929410 - DNA, 33 bp, Homo sapien
aggtaagagttggttggagcagtaactcctgaa

SEQ ID NO: 929411 - DNA, 33 bp, Homo sapien
tgcaaattcagcgatgcacccatgaaccactat

SEQ ID NO: 929412 - DNA, 33 bp, Homo sapien
tgcaaattcagcgatgtacccatgaaccactat

SEQ ID NO: 929413 - DNA, 33 bp, Homo sapien; identical to SEQ ID NO: 929411

SEQ ID NO: 929414 - DNA, 33 bp, Homo sapien; identical to SEQ ID NO: 929412

SEQ ID NO: 929415 - DNA, 33 bp, Homo sapien
aaagctgtgggaaaaacattctccacttaatct

SEQ ID NO: 929416 - DNA, 33 bp, Homo sapien
aaagctgtgggaaaaatattctccacttaatct

SEQ ID NO: 929417 - DNA, 33 bp, Homo sapien; identical to SEQ ID NO: 929415

SEQ ID NO: 929418 - DNA, 33 bp, Homo sapien; identical to SEQ ID NO: 929416

SEQ ID NO: 929419 - DNA, 33 bp, Homo sapien
tcctagagactcctaaaataatcctttgaagtt

SEQ ID NO: 929420 - DNA, 33 bp, Homo sapien
tcctagagactcctaagataatcctttgaagtt

SEQ ID NO: 929421 - DNA, 33 bp, Homo sapien
atgaatgtgtatccccaaccagaattcatgttg

SEQ ID NO: 929422 - DNA, 33 bp, Homo sapien
atgaatgtgtatcccccaccagaattcatgttg

SEQ ID NO: 929423 - DNA, 33 bp, Homo sapien
aaggtaacacagttaacaagcattaggtcaaag

SEQ ID NO: 929424 - DNA, 33 bp, Homo sapien
aaggtaacacagttaataagcattaggtcaaag

SEQ ID NO: 929425 - DNA, 33 bp, Homo sapien
tgaaaactaacaaataaaattgccacaacataa

SEQ ID NO: 929426 - DNA, 33 bp, Homo sapien
tgaaaactaacaaatagaattgccacaacataa

SEQ ID NO: 929427 - DNA, 33 bp, Homo sapien
atataacatccagtcacaaaccattcttatgga

SEQ ID NO: 929428 - DNA, 33 bp, Homo sapien
atataacatccagtcataaaccattcttatgga

SEQ ID NO: 929429 - DNA, 33 bp, Homo sapien; identical to SEQ ID NO: 929427

SEQ ID NO: 929430 - DNA, 33 bp, Homo sapien; identical to SEQ ID NO: 929428

SEQ ID NO: 929431 - DNA, 33 bp, Homo sapien
ggacacaattaaaacacgtagccagagttgctc

SEQ ID NO: 929432 - DNA, 33 bp, Homo sapien
ggacacaattaaaacatgtagccagagttgctc

SEQ ID NO: 929433 - DNA, 33 bp, Homo sapien
tgctccagtagaaaataaattacagactaagtt

SEQ ID NO: 929434 - DNA, 33 bp, Homo sapien
tgctccagtagaaaatgaattacagactaagtt

SEQ ID NO: 929435 - DNA, 33 bp, Homo sapien
tagctctggaagaacaataacatattaattagg

SEQ ID NO: 929436 - DNA, 33 bp, Homo sapien
tagctctggaagaacactaacatattaattagg

SEQ ID NO: 929437 - DNA, 33 bp, Homo sapien
tgaagaaaaacgacgacggagtttcagtcattt

SEQ ID NO: 929438 - DNA, 33 bp, Homo sapien
tgaagaaaaacgacgatggagtttcagtcattt

SEQ ID NO: 929439 - DNA, 33 bp, Homo sapien; identical to SEQ ID NO: 929437

SEQ ID NO: 929440 - DNA, 33 bp, Homo sapien; identical to SEQ ID NO: 929438

SEQ ID NO: 929441 - DNA, 33 bp, Homo sapien
ttcaaatgccttcacactctctatcccaaagaa

SEQ ID NO: 929442 - DNA, 33 bp, Homo sapien
ttcaaatgccttcacagtctctatcccaaagaa

SEQ ID NO: 929443 - DNA, 33 bp, Homo sapien; identical to SEQ ID NO: 929441

SEQ ID NO: 929444 - DNA, 33 bp, Homo sapien; identical to SEQ ID NO: 929442

SEQ ID NO: 929445 - DNA, 33 bp, Homo sapien
tgcaatggaaagaccacctcccccagctggttg

SEQ ID NO: 929446 - DNA, 33 bp, Homo sapien
tgcaatggaaagaccatctcccccagctggttg

SEQ ID NO: 929447 - DNA, 33 bp, Homo sapien; identical to SEQ ID NO: 929445

SEQ ID NO: 929448 - DNA, 33 bp, Homo sapien; identical to SEQ ID NO: 929446

SEQ ID NO: 929449 - DNA, 33 bp, Homo sapien
gcataagcaattaatgaatattttgtaggctac

SEQ ID NO: 929450 - DNA, 33 bp, Homo sapien
gcataagcaattaatgcatattttgtaggctac

SEQ ID NO: 929451 - DNA, 33 bp, Homo sapien; identical to SEQ ID NO: 929449

SEQ ID NO: 929452 - DNA, 33 bp, Homo sapien; identical to SEQ ID NO: 929450

SEQ ID NO: 929453 - DNA, 33 bp, Homo sapien
ttttgacccttgagcaatgatgaggattaggga

SEQ ID NO: 929454 - DNA, 33 bp, Homo sapien
ttttgacccttgagcagtgatgaggattaggga

SEQ ID NO: 929455 - DNA, 33 bp, Homo sapien; identical to SEQ ID NO: 929453

SEQ ID NO: 929456 - DNA, 33 bp, Homo sapien; identical to SEQ ID NO: 929454

SEQ ID NO: 929457 - DNA, 33 bp, Homo sapien
gggcaatacggagtggaaaggcctaagagtatg

SEQ ID NO: 929458 - DNA, 33 bp, Homo sapien
gggcaatacggagtggcaaggcctaagagtatg

SEQ ID NO: 929459 - DNA, 33 bp, Homo sapien; identical to SEQ ID NO: 929457

SEQ ID NO: 929460 - DNA, 33 bp, Homo sapien; identical to SEQ ID NO: 929458

SEQ ID NO: 929461 - DNA, 33 bp, Homo sapien
aaagtcaagtagtacaaaataatgtacagtgaa

SEQ ID NO: 929462 - DNA, 33 bp, Homo sapien
aaagtcaagtagtacagaataatgtacagtgaa

SEQ ID NO: 929463 - DNA, 33 bp, Homo sapien; identical to SEQ ID NO: 929461

SEQ ID NO: 929464 - DNA, 33 bp, Homo sapien; identical to SEQ ID NO: 929462

SEQ ID NO: 929465 - DNA, 33 bp, Homo sapien
gatggatgaaggacagaaaaatagatgactttt

SEQ ID NO: 929466 - DNA, 33 bp, Homo sapien
gatggatgaaggacaggaaaatagatgactttt

SEQ ID NO: 929467 - DNA, 33 bp, Homo sapien; identical to SEQ ID NO: 929465

SEQ ID NO: 929468 - DNA, 33 bp, Homo sapien; identical to SEQ ID NO: 929466

SEQ ID NO: 929469 - DNA, 33 bp, Homo sapien
agatgggggctgaaaaatttcctagtgagtaca

SEQ ID NO: 929470 - DNA, 33 bp, Homo sapien
agatgggggctgaaaactttcctagtgagtaca

SEQ ID NO: 929471 - DNA, 33 bp, Homo sapien; identical to SEQ ID NO: 929469

SEQ ID NO: 929472 - DNA, 33 bp, Homo sapien; identical to SEQ ID NO: 929470

SEQ ID NO: 929473 - DNA, 33 bp, Homo sapien
caacagaaaatgtttcactgacaaaaaatgttt

SEQ ID NO: 929474 - DNA, 33 bp, Homo sapien
caacagaaaatgtttcgctgacaaaaaatgttt

SEQ ID NO: 929475 - DNA, 33 bp, Homo sapien; identical to SEQ ID NO: 929473

SEQ ID NO: 929476 - DNA, 33 bp, Homo sapien; identical to SEQ ID NO: 929474

SEQ ID NO: 929477 - DNA, 33 bp, Homo sapien
ttcaatgtgcccatgaagttcactgtgccttca

SEQ ID NO: 929478 - DNA, 33 bp, Homo sapien
ttcaatgtgcccatgaggttcactgtgccttca

SEQ ID NO: 929479 - DNA, 33 bp, Homo sapien; identical to SEQ ID NO: 929477

SEQ ID NO: 929480 - DNA, 33 bp, Homo sapien; identical to SEQ ID NO: 929478

SEQ ID NO: 929481 - DNA, 33 bp, Homo sapien
caagagcagagaagaactgtgcttgctttgtgg

SEQ ID NO: 929482 - DNA, 33 bp, Homo sapien
caagagcagagaagaattgtgcttgctttgtgg

SEQ ID NO: 929483 - DNA, 33 bp, Homo sapien; identical to SEQ ID NO: 929481

SEQ ID NO: 929484 - DNA, 33 bp, Homo sapien; identical to SEQ ID NO: 929482

SEQ ID NO: 929485 - DNA, 33 bp, Homo sapien
gttaaaatggccataaactcaaggctacttaca

SEQ ID NO: 929486 - DNA, 33 bp, Homo sapien
gttaaaatggccataagctcaaggctacttaca

SEQ ID NO: 929487 - DNA, 33 bp, Homo sapien; identical to SEQ ID NO: 929485

SEQ ID NO: 929488 - DNA, 33 bp, Homo sapien; identical to SEQ ID NO: 929486

SEQ ID NO: 929489 - DNA, 33 bp, Homo sapien
agggcagttttatgtaccgttttctacagctct

SEQ ID NO: 929490 - DNA, 33 bp, Homo sapien
agggcagttttatgtatcgttttctacagctct

SEQ ID NO: 929491 - DNA, 33 bp, Homo sapien; identical to SEQ ID NO: 929489

SEQ ID NO: 929492 - DNA, 33 bp, Homo sapien; identical to SEQ ID NO: 929490

SEQ ID NO: 929493 - DNA, 33 bp, Homo sapien
agcttcataactgatacagctggtggagaatga

SEQ ID NO: 929494 - DNA, 33 bp, Homo sapien
agcttcataactgatatagctggtggagaatga

SEQ ID NO: 929495 - DNA, 33 bp, Homo sapien; identical to SEQ ID NO: 929493

SEQ ID NO: 929496 - DNA, 33 bp, Homo sapien; identical to SEQ ID NO: 929494

SEQ ID NO: 929497 - DNA, 33 bp, Homo sapien
gtggacagatttggaccaagagtgaagaaccac

SEQ ID NO: 929498 - DNA, 33 bp, Homo sapien
gtggacagatttggacgaagagtgaagaaccac

SEQ ID NO: 929499 - DNA, 33 bp, Homo sapien; identical to SEQ ID NO: 929497

SEQ ID NO: 929500 - DNA, 33 bp, Homo sapien; identical to SEQ ID NO: 929498

SEQ ID NO: 929501 - DNA, 33 bp, Homo sapien
cggctactcctaccataagaataacctggaaag

SEQ ID NO: 929502 - DNA, 33 bp, Homo sapien
cggctactcctaccatgagaataacctggaaag

SEQ ID NO: 929503 - DNA, 33 bp, Homo sapien
agagagactaagactacgggctttggaggagtc

SEQ ID NO: 929504 - DNA, 33 bp, Homo sapien
agagagactaagactatgggctttggaggagtc

SEQ ID NO: 929505 - DNA, 33 bp, Homo sapien
tccatgacttgttctgcaatcctatatctagca

SEQ ID NO: 929506 - DNA, 33 bp, Homo sapien
tccatgacttgttctggaatcctatatctagca

SEQ ID NO: 929507 - DNA, 33 bp, Homo sapien
aagatgtttttctctaaccagacagaaatctgc

SEQ ID NO: 929508 - DNA, 33 bp, Homo sapien
aagatgtttttctctagccagacagaaatctgc

SEQ ID NO: 929509 - DNA, 33 bp, Homo sapien; identical to SEQ ID NO: 929507

SEQ ID NO: 929510 - DNA, 33 bp, Homo sapien; identical to SEQ ID NO: 929508

SEQ ID NO: 929511 - DNA, 33 bp, Homo sapien
atagaaagcttagaccaggaaaaataggacatg

SEQ ID NO: 929512 - DNA, 33 bp, Homo sapien
atagaaagcttagacctggaaaaataggacatg

SEQ ID NO: 929513 - DNA, 33 bp, Homo sapien; identical to SEQ ID NO: 929511

SEQ ID NO: 929514 - DNA, 33 bp, Homo sapien; identical to SEQ ID NO: 929512

SEQ ID NO: 929515 - DNA, 33 bp, Homo sapien
agcaggtgggtggcacaattcttcaaggcaaag

SEQ ID NO: 929516 - DNA, 33 bp, Homo sapien
agcaggtgggtggcaccattcttcaaggcaaag

SEQ ID NO: 929517 - DNA, 33 bp, Homo sapien; identical to SEQ ID NO: 929515

SEQ ID NO: 929518 - DNA, 33 bp, Homo sapien; identical to SEQ ID NO: 929516

SEQ ID NO: 929519 - DNA, 33 bp, Homo sapien
tttaaaagctataacactatttccacctctgta

SEQ ID NO: 929520 - DNA, 33 bp, Homo sapien
tttaaaagctataacattatttccacctctgta

SEQ ID NO: 929521 - DNA, 33 bp, Homo sapien; identical to SEQ ID NO: 929519

SEQ ID NO: 929522 - DNA, 33 bp, Homo sapien; identical to SEQ ID NO: 929520

SEQ ID NO: 929523 - DNA, 33 bp, Homo sapien
gctccagtatcatgccaggatcagtcttctttg

SEQ ID NO: 929524 - DNA, 33 bp, Homo sapien
gctccagtatcatgccgggatcagtcttctttg

SEQ ID NO: 929525 - DNA, 33 bp, Homo sapien; identical to SEQ ID NO: 929523

SEQ ID NO: 929526 - DNA, 33 bp, Homo sapien; identical to SEQ ID NO: 929524

SEQ ID NO: 929527 - DNA, 33 bp, Homo sapien
ctggcctcagacatgaaaaaaagcctagactta

SEQ ID NO: 929528 - DNA, 33 bp, Homo sapien
ctggcctcagacatgacaaaaagcctagactta

SEQ ID NO: 929529 - DNA, 33 bp, Homo sapien; identical to SEQ ID NO: 929527

SEQ ID NO: 929530 - DNA, 33 bp, Homo sapien; identical to SEQ ID NO: 929528

SEQ ID NO: 929531 - DNA, 33 bp, Homo sapien
tcatgttccacttccacatccaaacaaagcatg

SEQ ID NO: 929532 - DNA, 33 bp, Homo sapien
tcatgttccacttccagatccaaacaaagcatg

SEQ ID NO: 929533 - DNA, 33 bp, Homo sapien
gacatgagagattagcccaacaggcaatgaatc

SEQ ID NO: 929534 - DNA, 33 bp, Homo sapien
gacatgagagattagctcaacaggcaatgaatc

SEQ ID NO: 929535 - DNA, 33 bp, Homo sapien; identical to SEQ ID NO: 929533

SEQ ID NO: 929536 - DNA, 33 bp, Homo sapien; identical to SEQ ID NO: 929534

SEQ ID NO: 929537 - DNA, 33 bp, Homo sapien
caaaatacatggtgtacaatttagagatggaaa

SEQ ID NO: 929538 - DNA, 33 bp, Homo sapien
caaaatacatggtgtagaatttagagatggaaa

SEQ ID NO: 929539 - DNA, 33 bp, Homo sapien; identical to SEQ ID NO: 929537

SEQ ID NO: 929540 - DNA, 33 bp, Homo sapien; identical to SEQ ID NO: 929538

SEQ ID NO: 929541 - DNA, 33 bp, Homo sapien
aagggacctagcataccataggtgcatctgttt

SEQ ID NO: 929542 - DNA, 33 bp, Homo sapien
aagggacctagcatactataggtgcatctgttt

SEQ ID NO: 929543 - DNA, 33 bp, Homo sapien
tcttaaagagagacgaaaggatagcacagagta

SEQ ID NO: 929544 - DNA, 33 bp, Homo sapien
tcttaaagagagacgacaggatagcacagagta

SEQ ID NO: 929545 - DNA, 33 bp, Homo sapien
gccaagctctaagatacgtgcagcaggatattg

SEQ ID NO: 929546 - DNA, 33 bp, Homo sapien
gccaagctctaagatatgtgcagcaggatattg

SEQ ID NO: 929547 - DNA, 33 bp, Homo sapien
atccatagattatcagaattatgatttagccat

SEQ ID NO: 929548 - DNA, 33 bp, Homo sapien
atccatagattatcaggattatgatttagccat

SEQ ID NO: 929549 - DNA, 33 bp, Homo sapien; identical to SEQ ID NO: 929547

SEQ ID NO: 929550 - DNA, 33 bp, Homo sapien; identical to SEQ ID NO: 929548

SEQ ID NO: 929551 - DNA, 33 bp, Homo sapien
tgtgtacactcttcaaaggttttcttcttaaag

SEQ ID NO: 929552 - DNA, 33 bp, Homo sapien
tgtgtacactcttcaacggttttcttcttaaag

SEQ ID NO: 929553 - DNA, 33 bp, Homo sapien; identical to SEQ ID NO: 929551

SEQ ID NO: 929554 - DNA, 33 bp, Homo sapien; identical to SEQ ID NO: 929552

SEQ ID NO: 929555 - DNA, 33 bp, Homo sapien
aagcattttagggaaaagattatcttcgttttt

SEQ ID NO: 929556 - DNA, 33 bp, Homo sapien
aagcattttagggaaaggattatcttcgttttt

SEQ ID NO: 929557 - DNA, 33 bp, Homo sapien
aacatatgaaggttaaaataaagctggttaatg

SEQ ID NO: 929558 - DNA, 33 bp, Homo sapien
aacatatgaaggttaacataaagctggttaatg

SEQ ID NO: 929559 - DNA, 33 bp, Homo sapien
acattcgtgacccccaaatgaatcctataccta

SEQ ID NO: 929560 - DNA, 33 bp, Homo sapien
acattcgtgacccccagatgaatcctataccta

SEQ ID NO: 929561 - DNA, 33 bp, Homo sapien
tttattatgacattggacagattgtatcacaca

SEQ ID NO: 929562 - DNA, 33 bp, Homo sapien
tttattatgacattgggcagattgtatcacaca

SEQ ID NO: 929563 - DNA, 33 bp, Homo sapien
gtgatcaaagaaggcaacttagtctgatcctga

SEQ ID NO: 929564 - DNA, 33 bp, Homo sapien
gtgatcaaagaaggcatcttagtctgatcctga

SEQ ID NO: 929565 - DNA, 33 bp, Homo sapien
aggtaaatctatgtgtcaaaaagaaagaacttc

SEQ ID NO: 929566 - DNA, 33 bp, Homo sapien
aggtaaatctatgtgttaaaaagaaagaacttc

SEQ ID NO: 929567 - DNA, 33 bp, Homo sapien; identical to SEQ ID NO: 929565

SEQ ID NO: 929568 - DNA, 33 bp, Homo sapien; identical to SEQ ID NO: 929566

SEQ ID NO: 929569 - DNA, 33 bp, Homo sapien
tgtttatacccacaacaaattgggactttttga

SEQ ID NO: 929570 - DNA, 33 bp, Homo sapien
tgtttatacccacaacgaattgggactttttga

SEQ ID NO: 929571 - DNA, 33 bp, Homo sapien; identical to SEQ ID NO: 929569

SEQ ID NO: 929572 - DNA, 33 bp, Homo sapien; identical to SEQ ID NO: 929570

SEQ ID NO: 929573 - DNA, 33 bp, Homo sapien
ggcattcgtttaaacacgatctctttcatacct

SEQ ID NO: 929574 - DNA, 33 bp, Homo sapien
ggcattcgtttaaacatgatctctttcatacct

SEQ ID NO: 929575 - DNA, 33 bp, Homo sapien; identical to SEQ ID NO: 929573

SEQ ID NO: 929576 - DNA, 33 bp, Homo sapien; identical to SEQ ID NO: 929574

SEQ ID NO: 929577 - DNA, 33 bp, Homo sapien
cacaaagtgatctacaaagctaattccttctcc

SEQ ID NO: 929578 - DNA, 33 bp, Homo sapien
cacaaagtgatctacagagctaattccttctcc

SEQ ID NO: 929579 - DNA, 33 bp, Homo sapien; identical to SEQ ID NO: 929577

SEQ ID NO: 929580 - DNA, 33 bp, Homo sapien; identical to SEQ ID NO: 929578

SEQ ID NO: 929581 - DNA, 33 bp, Homo sapien
tcgtcttatggagatcaagtggagtactagaag

SEQ ID NO: 929582 - DNA, 33 bp, Homo sapien
tcgtcttatggagatcgagtggagtactagaag

SEQ ID NO: 929583 - DNA, 33 bp, Homo sapien
ccatattacttactaactggtccacaccaaggg

SEQ ID NO: 929584 - DNA, 33 bp, Homo sapien
ccatattacttactaattggtccacaccaaggg

SEQ ID NO: 929585 - DNA, 33 bp, Homo sapien; identical to SEQ ID NO: 929583

SEQ ID NO: 929586 - DNA, 33 bp, Homo sapien; identical to SEQ ID NO: 929584

SEQ ID NO: 929587 - DNA, 33 bp, Homo sapien
ttcctcctgttaaaagacttcatcattttgtat

SEQ ID NO: 929588 - DNA, 33 bp, Homo sapien
ttcctcctgttaaaaggcttcatcattttgtat

SEQ ID NO: 929589 - DNA, 33 bp, Homo sapien; identical to SEQ ID NO: 929587

SEQ ID NO: 929590 - DNA, 33 bp, Homo sapien; identical to SEQ ID NO: 929588

SEQ ID NO: 929591 - DNA, 33 bp, Homo sapien
caaagggtattaacagcaatatgaacgtggggc

SEQ ID NO: 929592 - DNA, 33 bp, Homo sapien
caaagggtattaacaggaatatgaacgtggggc

SEQ ID NO: 929593 - DNA, 33 bp, Homo sapien
tacctccacaggttgacattttctaactacaga

SEQ ID NO: 929594 - DNA, 33 bp, Homo sapien
tacctccacaggttgatattttctaactacaga

SEQ ID NO: 929595 - DNA, 33 bp, Homo sapien
cctgctcacaaaatgcaatggactttcctcaat

SEQ ID NO: 929596 - DNA, 33 bp, Homo sapien
cctgctcacaaaatgcgatggactttcctcaat

SEQ ID NO: 929597 - DNA, 33 bp, Homo sapien
aaaaaccaactctcaccattcttgttcaacata

SEQ ID NO: 929598 - DNA, 33 bp, Homo sapien
aaaaaccaactctcactattcttgttcaacata

SEQ ID NO: 929599 - DNA, 33 bp, Homo sapien
ctttaaacttccttcaatagtgtatgtcaagtg

SEQ ID NO: 929600 - DNA, 33 bp, Homo sapien
ctttaaacttccttcactagtgtatgtcaagtg

SEQ ID NO: 929601 - DNA, 33 bp, Homo sapien
aaattactcactttcacatattctgttataagc

SEQ ID NO: 929602 - DNA, 33 bp, Homo sapien
aaattactcactttcagatattctgttataagc

SEQ ID NO: 929603 - DNA, 33 bp, Homo sapien
tatctttttgtgtaacagatcttcaaacacata

SEQ ID NO: 929604 - DNA, 33 bp, Homo sapien
tatctttttgtgtaacggatcttcaaacacata

SEQ ID NO: 929605 - DNA, 33 bp, Homo sapien
ttaaaaagtgagatgcaaaggaaaacttgagaa

SEQ ID NO: 929606 - DNA, 33 bp, Homo sapien
ttaaaaagtgagatgcgaaggaaaacttgagaa

SEQ ID NO: 929607 - DNA, 33 bp, Homo sapien
tatagcttcaaatgacggcaaggaggatattga

SEQ ID NO: 929608 - DNA, 33 bp, Homo sapien
tatagcttcaaatgactgcaaggaggatattga

SEQ ID NO: 929609 - DNA, 33 bp, Homo sapien
cagaagggaaaccagaagaagaagagcagagag

SEQ ID NO: 929610 - DNA, 33 bp, Homo sapien
cagaagggaaaccagaggaagaagagcagagag

SEQ ID NO: 929611 - DNA, 33 bp, Homo sapien
tcacaatctctgttaactctaagagacaacctt

SEQ ID NO: 929612 - DNA, 33 bp, Homo sapien
tcacaatctctgttaattctaagagacaacctt

SEQ ID NO: 929613 - DNA, 33 bp, Homo sapien
gaggacatgataaagcaaggttagttaatgggt

SEQ ID NO: 929614 - DNA, 33 bp, Homo sapien
gaggacatgataaagcgaggttagttaatgggt

SEQ ID NO: 929615 - DNA, 33 bp, Homo sapien
tgcaactgggctatggaattatggagtgaagtt

SEQ ID NO: 929616 - DNA, 33 bp, Homo sapien
tgcaactgggctatgggattatggagtgaagtt

SEQ ID NO: 929617 - DNA, 33 bp, Homo sapien
gacagtgctgtttaagccatcaactctgtgcct

SEQ ID NO: 929618 - DNA, 33 bp, Homo sapien
gacagtgctgtttaagtcatcaactctgtgcct

SEQ ID NO: 929619 - DNA, 33 bp, Homo sapien
caagttctcctgaaacaaacactgagcaaggct

SEQ ID NO: 929620 - DNA, 33 bp, Homo sapien
caagttctcctgaaacgaacactgagcaaggct

SEQ ID NO: 929621 - DNA, 33 bp, Homo sapien
cacagaggtgtaagcacaaaagatgtaaacaga

SEQ ID NO: 929622 - DNA, 33 bp, Homo sapien
cacagaggtgtaagcataaaagatgtaaacaga

SEQ ID NO: 929623 - DNA, 33 bp, Homo sapien
acagcatggcaaagaccgactcccatgatttaa

SEQ ID NO: 929624 - DNA, 33 bp, Homo sapien
acagcatggcaaagactgactcccatgatttaa

SEQ ID NO: 929625 - DNA, 33 bp, Homo sapien
ttgtgtttggagaccacaaggaaagggcaggac

SEQ ID NO: 929626 - DNA, 33 bp, Homo sapien
ttgtgtttggagaccataaggaaagggcaggac

SEQ ID NO: 929627 - DNA, 33 bp, Homo sapien
acagtgcaactagaaaagtgctaggtcctaatc

SEQ ID NO: 929628 - DNA, 33 bp, Homo sapien
acagtgcaactagaaaggtgctaggtcctaatc

SEQ ID NO: 929629 - DNA, 33 bp, Homo sapien
cttgcttacacatgaaatactttcttcaagagc

SEQ ID NO: 929630 - DNA, 33 bp, Homo sapien
cttgcttacacatgaattactttcttcaagagc

SEQ ID NO: 929631 - DNA, 33 bp, Homo sapien
tttacttaacagaattgtaatcatgcagaaatg

SEQ ID NO: 929632 - DNA, 33 bp, Homo sapien
tttacttaacagaattttaatcatgcagaaatg

SEQ ID NO: 929633 - DNA, 33 bp, Homo sapien
aaatgtatttgcatacctatagctctttctgtt

SEQ ID NO: 929634 - DNA, 33 bp, Homo sapien
aaatgtatttgcatacttatagctctttctgtt

SEQ ID NO: 929635 - DNA, 33 bp, Homo sapien
cttaaaagaatgcttccaaaatttcaccaagaa

SEQ ID NO: 929636 - DNA, 33 bp, Homo sapien
cttaaaagaatgcttctaaaatttcaccaagaa

SEQ ID NO: 929637 - DNA, 33 bp, Homo sapien
agacagtggcaccaaacgatgctggtaaccttg

SEQ ID NO: 929638 - DNA, 33 bp, Homo sapien
agacagtggcaccaaatgatgctggtaaccttg

SEQ ID NO: 929639 - DNA, 33 bp, Homo sapien
tacttaaaaggatgaccgacagatgaactatgg

SEQ ID NO: 929640 - DNA, 33 bp, Homo sapien
tacttaaaaggatgactgacagatgaactatgg

SEQ ID NO: 929641 - DNA, 33 bp, Homo sapien
ctgcatttatgccttcaaaaagagaaattccta

SEQ ID NO: 929642 - DNA, 33 bp, Homo sapien
ctgcatttatgccttcgaaaagagaaattccta

SEQ ID NO: 929643 - DNA, 33 bp, Homo sapien
ggtccctccttgcaaaatagtagctcccttctg

SEQ ID NO: 929644 - DNA, 33 bp, Homo sapien
ggtccctccttgcaaattagtagctcccttctg

SEQ ID NO: 929645 - DNA, 33 bp, Homo sapien
actgagaatgaggaacaactagcacattaagtt

SEQ ID NO: 929646 - DNA, 33 bp, Homo sapien
actgagaatgaggaacgactagcacattaagtt

SEQ ID NO: 929647 - DNA, 33 bp, Homo sapien
taaaatccatcatgaaatctgtaatataaaata

SEQ ID NO: 929648 - DNA, 33 bp, Homo sapien
taaaatccatcatgaactctgtaatataaaata

SEQ ID NO: 929649 - DNA, 33 bp, Homo sapien
ttacattcttttgtatcaagtccttagacaata

SEQ ID NO: 929650 - DNA, 33 bp, Homo sapien
ttacattcttttgtatgaagtccttagacaata

SEQ ID NO: 929651 - DNA, 33 bp, Homo sapien
aaaatgttgataaataaccaacaatctgagact

SEQ ID NO: 929652 - DNA, 33 bp, Homo sapien
aaaatgttgataaatacccaacaatctgagact

SEQ ID NO: 929653 - DNA, 33 bp, Homo sapien
aaccctttatcaaatcacagagcttgtagtcca

SEQ ID NO: 929654 - DNA, 33 bp, Homo sapien
aaccctttatcaaatcgcagagcttgtagtcca

SEQ ID NO: 929655 - DNA, 33 bp, Homo sapien
gagactggaataaacaaaggaattatacacagt

SEQ ID NO: 929656 - DNA, 33 bp, Homo sapien
gagactggaataaacataggaattatacacagt

SEQ ID NO: 929657 - DNA, 33 bp, Homo sapien
tatgatggaggtgaaaatccagtttcattcttc

SEQ ID NO: 929658 - DNA, 33 bp, Homo sapien
tatgatggaggtgaaagtccagtttcattcttc

SEQ ID NO: 929659 - DNA, 33 bp, Homo sapien
actataatgggcttgacgctctagaaaggtggg

SEQ ID NO: 929660 - DNA, 33 bp, Homo sapien
actataatgggcttgatgctctagaaaggtggg

SEQ ID NO: 929661 - DNA, 33 bp, Homo sapien
gattgagcccaaaaaactggcaaaaatcatccc

SEQ ID NO: 929662 - DNA, 33 bp, Homo sapien
gattgagcccaaaaaagtggcaaaaatcatccc

SEQ ID NO: 929663 - DNA, 33 bp, Homo sapien
tcctcattaccaccaacgcaggcttcagagacc

SEQ ID NO: 929664 - DNA, 33 bp, Homo sapien
tcctcattaccaccaatgcaggcttcagagacc

SEQ ID NO: 929665 - DNA, 33 bp, Homo sapien
tttgatgggaagtctaacttactttctgtgata

SEQ ID NO: 929666 - DNA, 33 bp, Homo sapien
tttgatgggaagtctatcttactttctgtgata

SEQ ID NO: 929667 - DNA, 33 bp, Homo sapien
caggagaaagaagaaaaaggtattgctgcctat

SEQ ID NO: 929668 - DNA, 33 bp, Homo sapien
caggagaaagaagaaagaggtattgctgcctat

SEQ ID NO: 929669 - DNA, 33 bp, Homo sapien
ctgtttaaaggcataaccttgttctgtgtgtat

SEQ ID NO: 929670 - DNA, 33 bp, Homo sapien
ctgtttaaaggcataatcttgttctgtgtgtat

SEQ ID NO: 929671 - DNA, 33 bp, Homo sapien
tcctagaggtaatatacagttaggttcctgtaa

SEQ ID NO: 929672 - DNA, 33 bp, Homo sapien
tcctagaggtaatatagagttaggttcctgtaa

SEQ ID NO: 929673 - DNA, 33 bp, Homo sapien
acttaacttctgacaaatcaaaactcttggttt

SEQ ID NO: 929674 - DNA, 33 bp, Homo sapien
acttaacttctgacaactcaaaactcttggttt

SEQ ID NO: 929675 - DNA, 33 bp, Homo sapien
agaaataatgctcaagaatagatttgaactcag

SEQ ID NO: 929676 - DNA, 33 bp, Homo sapien
agaaataatgctcaaggatagatttgaactcag

SEQ ID NO: 929677 - DNA, 33 bp, Homo sapien
attagagatattggtaaaaattcatgatttcta

SEQ ID NO: 929678 - DNA, 33 bp, Homo sapien
attagagatattggtataaattcatgatttcta

SEQ ID NO: 929679 - DNA, 33 bp, Homo sapien
aatcagacctgacacaaacatttactagttaca

SEQ ID NO: 929680 - DNA, 33 bp, Homo sapien
aatcagacctgacacagacatttactagttaca

SEQ ID NO: 929681 - DNA, 33 bp, Homo sapien
tgggctcatcagctgggcaggaacctacctcac

SEQ ID NO: 929682 - DNA, 33 bp, Homo sapien
tgggctcatcagctggtcaggaacctacctcac

SEQ ID NO: 929683 - DNA, 33 bp, Homo sapien
acttttgcctgtctgaaaatggctctgtccctg

SEQ ID NO: 929684 - DNA, 33 bp, Homo sapien
acttttgcctgtctgagaatggctctgtccctg

SEQ ID NO: 929685 - DNA, 33 bp, Homo sapien
tgctgagcatggaagacggggaacttcaggttg

SEQ ID NO: 929686 - DNA, 33 bp, Homo sapien
tgctgagcatggaagatggggaacttcaggttg

SEQ ID NO: 929687 - DNA, 33 bp, Homo sapien
ctcaagatatgtaaaccctggctggatgtgatg

SEQ ID NO: 929688 - DNA, 33 bp, Homo sapien
ctcaagatatgtaaactctggctggatgtgatg

SEQ ID NO: 929689 - DNA, 33 bp, Homo sapien
aaaacaatgactcatgcatagtttaactggtag

SEQ ID NO: 929690 - DNA, 33 bp, Homo sapien
aaaacaatgactcatgtatagtttaactggtag

SEQ ID NO: 929691 - DNA, 33 bp, Homo sapien
tcccattccttagtcaatcttggaaatctgttg

SEQ ID NO: 929692 - DNA, 33 bp, Homo sapien
tcccattccttagtcagtcttggaaatctgttg

SEQ ID NO: 929693 - DNA, 33 bp, Homo sapien
ttttcctctgaaataccgacctgacccatgaaa

SEQ ID NO: 929694 - DNA, 33 bp, Homo sapien
ttttcctctgaaatactgacctgacccatgaaa

SEQ ID NO: 929695 - DNA, 33 bp, Homo sapien
caactaaatgaaagccaaccagagatcttgaaa

SEQ ID NO: 929696 - DNA, 33 bp, Homo sapien
caactaaatgaaagccgaccagagatcttgaaa

SEQ ID NO: 929697 - DNA, 33 bp, Homo sapien
agtatggtgttcataccgcagggcaatctgatc

SEQ ID NO: 929698 - DNA, 33 bp, Homo sapien
agtatggtgttcatacggcagggcaatctgatc

SEQ ID NO: 929699 - DNA, 33 bp, Homo sapien
gaaataaaattcagcaccttgcagattaacata

SEQ ID NO: 929700 - DNA, 33 bp, Homo sapien
gaaataaaattcagcatcttgcagattaacata

SEQ ID NO: 929701 - DNA, 33 bp, Homo sapien
cttatagctaacagtcaccaccaaataaaacca

SEQ ID NO: 929702 - DNA, 33 bp, Homo sapien
cttatagctaacagtcgccaccaaataaaacca

SEQ ID NO: 929703 - DNA, 33 bp, Homo sapien
tgcaaggaagttctgaaagcagcctttagcatt

SEQ ID NO: 929704 - DNA, 33 bp, Homo sapien
tgcaaggaagttctgacagcagcctttagcatt

SEQ ID NO: 929705 - DNA, 33 bp, Homo sapien
gtagtagtgaaaacacaacaaatctaagtctat

SEQ ID NO: 929706 - DNA, 33 bp, Homo sapien
gtagtagtgaaaacacgacaaatctaagtctat

SEQ ID NO: 929707 - DNA, 33 bp, Homo sapien
cagctttgagggtacaataggaggaaaaccaaa

SEQ ID NO: 929708 - DNA, 33 bp, Homo sapien
cagctttgagggtacagtaggaggaaaaccaaa

SEQ ID NO: 929709 - DNA, 33 bp, Homo sapien
cattcacgtcgttgcacatctcttagctgtata

SEQ ID NO: 929710 - DNA, 33 bp, Homo sapien
cattcacgtcgttgcatatctcttagctgtata

SEQ ID NO: 929711 - DNA, 33 bp, Homo sapien
tataggtactcaaggacgaaaaagacctaagaa

SEQ ID NO: 929712 - DNA, 33 bp, Homo sapien
tataggtactcaaggatgaaaaagacctaagaa

SEQ ID NO: 929713 - DNA, 33 bp, Homo sapien
cgcctggcaatgtccactatgcatatcaagatg

SEQ ID NO: 929714 - DNA, 33 bp, Homo sapien
cgcctggcaatgtccagtatgcatatcaagatg

SEQ ID NO: 929715 - DNA, 33 bp, Homo sapien
gtctgcagtaagataaagaacttgtactagaac

SEQ ID NO: 929716 - DNA, 33 bp, Homo sapien
gtctgcagtaagataaggaacttgtactagaac

SEQ ID NO: 929717 - DNA, 33 bp, Homo sapien
tgcagcagggaataaacagatgtcccttctctg

SEQ ID NO: 929718 - DNA, 33 bp, Homo sapien
tgcagcagggaataaatagatgtcccttctctg

SEQ ID NO: 929719 - DNA, 33 bp, Homo sapien
actgaactcaatcttcactgtgctaatggaata

SEQ ID NO: 929720 - DNA, 33 bp, Homo sapien
actgaactcaatcttctctgtgctaatggaata

SEQ ID NO: 929721 - DNA, 33 bp, Homo sapien
tgagtaaaggcccccaatgaggatgcaatgaga

SEQ ID NO: 929722 - DNA, 33 bp, Homo sapien
tgagtaaaggcccccagtgaggatgcaatgaga

SEQ ID NO: 929723 - DNA, 33 bp, Homo sapien
gtttttcaggatttccactatctaccagaagct

SEQ ID NO: 929724 - DNA, 33 bp, Homo sapien
gtttttcaggatttcctctatctaccagaagct

SEQ ID NO: 929725 - DNA, 33 bp, Homo sapien
ccaagccagaactgataagtcgagaggacaact

SEQ ID NO: 929726 - DNA, 33 bp, Homo sapien
ccaagccagaactgatgagtcgagaggacaact

SEQ ID NO: 929727 - DNA, 33 bp, Homo sapien
agtgtccagagggtgccgagtaaccagggaatg

SEQ ID NO: 929728 - DNA, 33 bp, Homo sapien
agtgtccagagggtgctgagtaaccagggaatg

SEQ ID NO: 929729 - DNA, 33 bp, Homo sapien
ctaccttttctgagagaccaggttacagtaaac

SEQ ID NO: 929730 - DNA, 33 bp, Homo sapien
ctaccttttctgagaggccaggttacagtaaac

SEQ ID NO: 929731 - DNA, 33 bp, Homo sapien
aaacgaatctgctgtaccacaaagctgctgtag

SEQ ID NO: 929732 - DNA, 33 bp, Homo sapien
aaacgaatctgctgtagcacaaagctgctgtag

SEQ ID NO: 929733 - DNA, 33 bp, Homo sapien
gtccctgttggagacaaatacatggttcccaga

SEQ ID NO: 929734 - DNA, 33 bp, Homo sapien
gtccctgttggagacagatacatggttcccaga

SEQ ID NO: 929735 - DNA, 33 bp, Homo sapien
cgttgctgccaagaaacagcctgtgatgattca

SEQ ID NO: 929736 - DNA, 33 bp, Homo sapien
cgttgctgccaagaaagagcctgtgatgattca

SEQ ID NO: 929737 - DNA, 33 bp, Homo sapien
ccactgtatctgaccacgtgaatttttaaataa

SEQ ID NO: 929738 - DNA, 33 bp, Homo sapien
ccactgtatctgaccatgtgaatttttaaataa

SEQ ID NO: 929739 - DNA, 33 bp, Homo sapien
cttcacagggacatctcaaagactaatgagata

SEQ ID NO: 929740 - DNA, 33 bp, Homo sapien
cttcacagggacatctgaaagactaatgagata

SEQ ID NO: 929741 - DNA, 33 bp, Homo sapien
atgacatctgttgtataagaagttgaataagaa

SEQ ID NO: 929742 - DNA, 33 bp, Homo sapien
atgacatctgttgtatgagaagttgaataagaa

SEQ ID NO: 929743 - DNA, 33 bp, Homo sapien
atctattgaggatctcgacgtcattgtcaatgt

SEQ ID NO: 929744 - DNA, 33 bp, Homo sapien
atctattgaggatctctacgtcattgtcaatgt

SEQ ID NO: 929745 - DNA, 33 bp, Homo sapien
aatactttcccaagaacaaagcaccaactgcct

SEQ ID NO: 929746 - DNA, 33 bp, Homo sapien
aatactttcccaagaataaagcaccaactgcct

SEQ ID NO: 929747 - DNA, 33 bp, Homo sapien
aggctaaacactgttaaaaggacatgatcatga

SEQ ID NO: 929748 - DNA, 33 bp, Homo sapien
aggctaaacactgttagaaggacatgatcatga

SEQ ID NO: 929749 - DNA, 33 bp, Homo sapien
agggaaacatggaacaaaatccagaggaacata

SEQ ID NO: 929750 - DNA, 33 bp, Homo sapien
agggaaacatggaacagaatccagaggaacata

SEQ ID NO: 929751 - DNA, 33 bp, Homo sapien
tagagaagtagataaacgtgggaaaatgatggt

SEQ ID NO: 929752 - DNA, 33 bp, Homo sapien
tagagaagtagataaaggtgggaaaatgatggt

SEQ ID NO: 929753 - DNA, 33 bp, Homo sapien
gcctcccaatgccaaacctccttctcagtaggc

SEQ ID NO: 929754 - DNA, 33 bp, Homo sapien
gcctcccaatgccaaatctccttctcagtaggc

SEQ ID NO: 929755 - DNA, 33 bp, Homo sapien
tttttttggcctatatgaactctggccagcagc

SEQ ID NO: 929756 - DNA, 33 bp, Homo sapien
tttttttggcctatattaactctggccagcagc

SEQ ID NO: 929757 - DNA, 33 bp, Homo sapien
aaatgaaggtttcaaactccagtgtgcccaaga

SEQ ID NO: 929758 - DNA, 33 bp, Homo sapien
aaatgaaggtttcaaattccagtgtgcccaaga

SEQ ID NO: 929759 - DNA, 33 bp, Homo sapien
ccaggcagagagcagactaagttaaatagtaat

SEQ ID NO: 929760 - DNA, 33 bp, Homo sapien
ccaggcagagagcagattaagttaaatagtaat

SEQ ID NO: 929761 - DNA, 33 bp, Homo sapien
ttgtattactctccacacagaagcatttaatag

SEQ ID NO: 929762 - DNA, 33 bp, Homo sapien
ttgtattactctccacgcagaagcatttaatag

SEQ ID NO: 929763 - DNA, 33 bp, Homo sapien
taatcatggctctgccacttacaaaatgattac

SEQ ID NO: 929764 - DNA, 33 bp, Homo sapien
taatcatggctctgccgcttacaaaatgattac

SEQ ID NO: 929765 - DNA, 33 bp, Homo sapien
gaaagatgtaccactgcagtataatagagagtg

SEQ ID NO: 929766 - DNA, 33 bp, Homo sapien
gaaagatgtaccactggagtataatagagagtg

SEQ ID NO: 929767 - DNA, 33 bp, Homo sapien
tggacaggcaaatgcaaaacacacagtctggtt

SEQ ID NO: 929768 - DNA, 33 bp, Homo sapien
tggacaggcaaatgcataacacacagtctggtt

SEQ ID NO: 929769 - DNA, 33 bp, Homo sapien
tataactttctaagaaccactggtgtgttagga

SEQ ID NO: 929770 - DNA, 33 bp, Homo sapien
tataactttctaagaatcactggtgtgttagga

SEQ ID NO: 929771 - DNA, 33 bp, Homo sapien
atctttggttttttaaagctcattaatggtcat

SEQ ID NO: 929772 - DNA, 33 bp, Homo sapien
atctttggttttttaaggctcattaatggtcat

SEQ ID NO: 929773 - DNA, 33 bp, Homo sapien
ataaacaattccttcgacctttctcctggttac

SEQ ID NO: 929774 - DNA, 33 bp, Homo sapien
ataaacaattccttcggcctttctcctggttac

SEQ ID NO: 929775 - DNA, 33 bp, Homo sapien
tttgtacattatactcacctgatttatctccga

SEQ ID NO: 929776 - DNA, 33 bp, Homo sapien
tttgtacattatactcgcctgatttatctccga

SEQ ID NO: 929777 - DNA, 33 bp, Homo sapien
ttgaggcaagtatttcaaaggcttggatgaggt

SEQ ID NO: 929778 - DNA, 33 bp, Homo sapien
ttgaggcaagtatttcgaaggcttggatgaggt

SEQ ID NO: 929779 - DNA, 33 bp, Homo sapien
ttttgactcttcttctaacaacagagctatttt

SEQ ID NO: 929780 - DNA, 33 bp, Homo sapien
ttttgactcttcttctgacaacagagctatttt

SEQ ID NO: 929781 - DNA, 33 bp, Homo sapien
ctagccaataagagagcacacgcagatgcagtg

SEQ ID NO: 929782 - DNA, 33 bp, Homo sapien
ctagccaataagagagtacacgcagatgcagtg

SEQ ID NO: 929783 - DNA, 33 bp, Homo sapien
gcacaggtagatcgatcagaagattcttggcca

SEQ ID NO: 929784 - DNA, 33 bp, Homo sapien
gcacaggtagatcgatgagaagattcttggcca

SEQ ID NO: 929785 - DNA, 33 bp, Homo sapien
ctctgtagttaaaccacgttctctaaatgtgcc

SEQ ID NO: 929786 - DNA, 33 bp, Homo sapien
ctctgtagttaaaccatgttctctaaatgtgcc

SEQ ID NO: 929787 - DNA, 33 bp, Homo sapien
ttcttaacattatgcaacatataggccaaatgg

SEQ ID NO: 929788 - DNA, 33 bp, Homo sapien
ttcttaacattatgcagcatataggccaaatgg

SEQ ID NO: 929789 - DNA, 33 bp, Homo sapien
gctcctggccctttgcaaagtacttcagaaagc

SEQ ID NO: 929790 - DNA, 33 bp, Homo sapien
gctcctggccctttgcgaagtacttcagaaagc

SEQ ID NO: 929791 - DNA, 33 bp, Homo sapien
actcagctacttccagacgttaaaagctgatag

SEQ ID NO: 929792 - DNA, 33 bp, Homo sapien
actcagctacttccaggcgttaaaagctgatag

SEQ ID NO: 929793 - DNA, 33 bp, Homo sapien
tgttttctctgtcagaccaatttgtttttctta

SEQ ID NO: 929794 - DNA, 33 bp, Homo sapien
tgttttctctgtcagatcaatttgtttttctta

SEQ ID NO: 929795 - DNA, 33 bp, Homo sapien
tgctgctgatctcacacgaggcggagccctggc

SEQ ID NO: 929796 - DNA, 33 bp, Homo sapien
tgctgctgatctcacatgaggcggagccctggc

SEQ ID NO: 929797 - DNA, 33 bp, Homo sapien
tcagggcaccgccttacgggaaagtcctgtgtg

SEQ ID NO: 929798 - DNA, 33 bp, Homo sapien
tcagggcaccgccttatgggaaagtcctgtgtg

SEQ ID NO: 929799 - DNA, 33 bp, Homo sapien
cccaaaagggaactataaaggattgcatcaaac

SEQ ID NO: 929800 - DNA, 33 bp, Homo sapien
cccaaaagggaactatgaaggattgcatcaaac

SEQ ID NO: 929801 - DNA, 33 bp, Homo sapien
tgcgctaggtcgcgaacccagagactacaggta

SEQ ID NO: 929802 - DNA, 33 bp, Homo sapien
tgcgctaggtcgcgaatccagagactacaggta

SEQ ID NO: 929803 - DNA, 33 bp, Homo sapien
tggaagttctcattgccctctccatatcccgga

SEQ ID NO: 929804 - DNA, 33 bp, Homo sapien
tggaagttctcattgctctctccatatcccgga

SEQ ID NO: 929805 - DNA, 33 bp, Homo sapien
ggtcatggggcaaagaagagaggttattgtggg

SEQ ID NO: 929806 - DNA, 33 bp, Homo sapien
ggtcatggggcaaagatgagaggttattgtggg

SEQ ID NO: 929807 - DNA, 33 bp, Homo sapien
ctacggaatttctgaccaaattaaagattttta

SEQ ID NO: 929808 - DNA, 33 bp, Homo sapien
ctacggaatttctgactaaattaaagattttta

SEQ ID NO: 929809 - DNA, 33 bp, Homo sapien
ctgcctcgtgacctacaatcatttcccaagctc

SEQ ID NO: 929810 - DNA, 33 bp, Homo sapien
ctgcctcgtgacctaccatcatttcccaagctc

SEQ ID NO: 929811 - DNA, 33 bp, Homo sapien
tgtagcttcaaagttacagcccctctctgggtg

SEQ ID NO: 929812 - DNA, 33 bp, Homo sapien
tgtagcttcaaagttagagcccctctctgggtg

SEQ ID NO: 929813 - DNA, 33 bp, Homo sapien
ataaaagaggcgtgagaacaaaaggaaagagaa

SEQ ID NO: 929814 - DNA, 33 bp, Homo sapien
ataaaagaggcgtgaggacaaaaggaaagagaa

SEQ ID NO: 929815 - DNA, 33 bp, Homo sapien
cgaggagttcttgaaacaggccttctccagtca

SEQ ID NO: 929816 - DNA, 33 bp, Homo sapien
cgaggagttcttgaaataggccttctccagtca

SEQ ID NO: 929817 - DNA, 33 bp, Homo sapien
ttaagactgtgaaaccaccaacaaaaagcatga

SEQ ID NO: 929818 - DNA, 33 bp, Homo sapien
ttaagactgtgaaaccgccaacaaaaagcatga

SEQ ID NO: 929819 - DNA, 33 bp, Homo sapien
agagggagatactttaccacagactgaagcagg

SEQ ID NO: 929820 - DNA, 33 bp, Homo sapien
agagggagatactttatcacagactgaagcagg

SEQ ID NO: 929821 - DNA, 33 bp, Homo sapien
aggatgagaagggagaaaaagtgacttgcccaa

SEQ ID NO: 929822 - DNA, 33 bp, Homo sapien
aggatgagaagggagacaaagtgacttgcccaa

SEQ ID NO: 929823 - DNA, 33 bp, Homo sapien
accactcaaataggttaaaaatagcactcacag

SEQ ID NO: 929824 - DNA, 33 bp, Homo sapien
accactcaaataggtttaaaatagcactcacag

SEQ ID NO: 929825 - DNA, 33 bp, Homo sapien
ggtctctggcctgtgccgcaagctgtgctagta

SEQ ID NO: 929826 - DNA, 33 bp, Homo sapien
ggtctctggcctgtgcggcaagctgtgctagta

SEQ ID NO: 929827 - DNA, 33 bp, Homo sapien
ggcttttatcttcttgcacccaatatatactgg

SEQ ID NO: 929828 - DNA, 33 bp, Homo sapien
ggcttttatcttcttggacccaatatatactgg

SEQ ID NO: 929829 - DNA, 33 bp, Homo sapien
tactatatttttcaaaactaatgctgtgcttct

SEQ ID NO: 929830 - DNA, 33 bp, Homo sapien
tactatatttttcaaacctaatgctgtgcttct

SEQ ID NO: 929831 - DNA, 33 bp, Homo sapien
tcacaagaaaatgttgaaaccaaacacaccaga

SEQ ID NO: 929832 - DNA, 33 bp, Homo sapien
tcacaagaaaatgttggaaccaaacacaccaga

SEQ ID NO: 929833 - DNA, 33 bp, Homo sapien
tgagcacaaattcatcacttgccataagtcgcc

SEQ ID NO: 929834 - DNA, 33 bp, Homo sapien
tgagcacaaattcatcgcttgccataagtcgcc

SEQ ID NO: 929835 - DNA, 33 bp, Homo sapien
cacaaactagtaaggaagtttcttggcattttt

SEQ ID NO: 929836 - DNA, 33 bp, Homo sapien
cacaaactagtaaggatgtttcttggcattttt

SEQ ID NO: 929837 - DNA, 33 bp, Homo sapien
ccaaagctggcgcagcaagtggcactgtctccg

SEQ ID NO: 929838 - DNA, 33 bp, Homo sapien
ccaaagctggcgcagcgagtggcactgtctccg

SEQ ID NO: 929839 - DNA, 33 bp, Homo sapien
ggggatgtagccaagaagaggaagaacttgggg

SEQ ID NO: 929840 - DNA, 33 bp, Homo sapien
ggggatgtagccaagaggaggaagaacttgggg

SEQ ID NO: 929841 - DNA, 33 bp, Homo sapien
gcagcatgcggtccaaagtaataaacagatgtc

SEQ ID NO: 929842 - DNA, 33 bp, Homo sapien
gcagcatgcggtccaacgtaataaacagatgtc

SEQ ID NO: 929843 - DNA, 33 bp, Homo sapien
agagctcagcatgcaacggtttatctcttgctt

SEQ ID NO: 929844 - DNA, 33 bp, Homo sapien
agagctcagcatgcaatggtttatctcttgctt

SEQ ID NO: 929845 - DNA, 33 bp, Homo sapien
tagttcacagaatgaacggcgcggttaagatcc

SEQ ID NO: 929846 - DNA, 33 bp, Homo sapien
tagttcacagaatgaagggcgcggttaagatcc

SEQ ID NO: 929847 - DNA, 33 bp, Homo sapien
tatggtggggaccatccattgtcctgacattat

SEQ ID NO: 929848 - DNA, 33 bp, Homo sapien
tatggtggggaccatctattgtcctgacattat

SEQ ID NO: 929849 - DNA, 33 bp, Homo sapien
aagtgaatgaaaaagcacaattcacagttaagc

SEQ ID NO: 929850 - DNA, 33 bp, Homo sapien
aagtgaatgaaaaagcgcaattcacagttaagc

SEQ ID NO: 929851 - DNA, 33 bp, Homo sapien
tcaatggtggtatcctgacatgctgtatgcctg

SEQ ID NO: 929852 - DNA, 33 bp, Homo sapien
tcaatggtggtatccttacatgctgtatgcctg

SEQ ID NO: 929853 - DNA, 33 bp, Homo sapien
ctgctgcttagttgcaatccgatatgcctccct

SEQ ID NO: 929854 - DNA, 33 bp, Homo sapien
ctgctgcttagttgcattccgatatgcctccct

SEQ ID NO: 929855 - DNA, 33 bp, Homo sapien
tctccatagtgtatgacggcatttgaaacatca

SEQ ID NO: 929856 - DNA, 33 bp, Homo sapien
tctccatagtgtatgatggcatttgaaacatca

SEQ ID NO: 929857 - DNA, 33 bp, Homo sapien
ccacagctccatggcccaaatgtcacagagctg

SEQ ID NO: 929858 - DNA, 33 bp, Homo sapien
ccacagctccatggccgaaatgtcacagagctg

SEQ ID NO: 929859 - DNA, 33 bp, Homo sapien
tgctgattcagaaaaaaggcactcacgagtttc

SEQ ID NO: 929860 - DNA, 33 bp, Homo sapien
tgctgattcagaaaaagggcactcacgagtttc

SEQ ID NO: 929861 - DNA, 33 bp, Homo sapien
tccaatctgttacatacgtgttctcacgttaaa

SEQ ID NO: 929862 - DNA, 33 bp, Homo sapien
tccaatctgttacatatgtgttctcacgttaaa

SEQ ID NO: 929863 - DNA, 33 bp, Homo sapien
agaattagagctcaaaagcttaaaccaaattgc

SEQ ID NO: 929864 - DNA, 33 bp, Homo sapien
agaattagagctcaaaggcttaaaccaaattgc

SEQ ID NO: 929865 - DNA, 33 bp, Homo sapien
aagataaaacagatacagattctgcctacctgc

SEQ ID NO: 929866 - DNA, 33 bp, Homo sapien
aagataaaacagatacggattctgcctacctgc

SEQ ID NO: 929867 - DNA, 33 bp, Homo sapien
ccgttacccatactccactcttccttgatgcat

SEQ ID NO: 929868 - DNA, 33 bp, Homo sapien
ccgttacccatactccgctcttccttgatgcat

SEQ ID NO: 929869 - DNA, 33 bp, Homo sapien
caggactgctaaatacccgctgttggcccacca

SEQ ID NO: 929870 - DNA, 33 bp, Homo sapien
caggactgctaaatacgcgctgttggcccacca

SEQ ID NO: 929871 - DNA, 33 bp, Homo sapien
atgggcattgattataaattccattccatagag

SEQ ID NO: 929872 - DNA, 33 bp, Homo sapien
atgggcattgattatagattccattccatagag

SEQ ID NO: 929873 - DNA, 33 bp, Homo sapien
ttgtcttaataaagacagaaaatgcttcagcgt

SEQ ID NO: 929874 - DNA, 33 bp, Homo sapien
ttgtcttaataaagactgaaaatgcttcagcgt

SEQ ID NO: 929875 - DNA, 33 bp, Homo sapien
tcttagagttaaaagacgagctgctgaaatgtt

SEQ ID NO: 929876 - DNA, 33 bp, Homo sapien
tcttagagttaaaagatgagctgctgaaatgtt

SEQ ID NO: 929877 - DNA, 33 bp, Homo sapien
aatgttcttccttgcaatgaagttaaatatgta

SEQ ID NO: 929878 - DNA, 33 bp, Homo sapien
aatgttcttccttgcattgaagttaaatatgta

SEQ ID NO: 929879 - DNA, 33 bp, Homo sapien
ttttctatgactggggaagaacggaagacaaga

SEQ ID NO: 929880 - DNA, 33 bp, Homo sapien
ttttctatgactggggcagaacggaagacaaga

SEQ ID NO: 929881 - DNA, 33 bp, Homo sapien
ttggatatttggatcacgtttctggaaggcata

SEQ ID NO: 929882 - DNA, 33 bp, Homo sapien
ttggatatttggatcatgtttctggaaggcata

SEQ ID NO: 929883 - DNA, 33 bp, Homo sapien
gtttgaccactgggaacgcaagatccctgaggg

SEQ ID NO: 929884 - DNA, 33 bp, Homo sapien
gtttgaccactgggaatgcaagatccctgaggg

SEQ ID NO: 929885 - DNA, 33 bp, Homo sapien
tctgaggttgtgtcaccggcaaaaaagttagaa

SEQ ID NO: 929886 - DNA, 33 bp, Homo sapien
tctgaggttgtgtcactggcaaaaaagttagaa

SEQ ID NO: 929887 - DNA, 33 bp, Homo sapien
gctaaagctaagtgacagatacatgggagtcca

SEQ ID NO: 929888 - DNA, 33 bp, Homo sapien
gctaaagctaagtgacggatacatgggagtcca

SEQ ID NO: 929889 - DNA, 33 bp, Homo sapien
ctggagtttttgatgaccacttttgccaccgtc

SEQ ID NO: 929890 - DNA, 33 bp, Homo sapien
ctggagtttttgatgatcacttttgccaccgtc

SEQ ID NO: 929891 - DNA, 33 bp, Homo sapien
cagcatccaggtgaaaagcccagcgcttattaa

SEQ ID NO: 929892 - DNA, 33 bp, Homo sapien
cagcatccaggtgaaaggcccagcgcttattaa

SEQ ID NO: 929893 - DNA, 33 bp, Homo sapien
aaatgagttttaaatacgttgaatcaaaaatga

SEQ ID NO: 929894 - DNA, 33 bp, Homo sapien
aaatgagttttaaatatgttgaatcaaaaatga

SEQ ID NO: 929895 - DNA, 33 bp, Homo sapien
gcccctgataaacaacagatgcatttttagtgt

SEQ ID NO: 929896 - DNA, 33 bp, Homo sapien
gcccctgataaacaactgatgcatttttagtgt

SEQ ID NO: 929897 - DNA, 33 bp, Homo sapien
agttcttttcactgcacaatggggtagaaacga

SEQ ID NO: 929898 - DNA, 33 bp, Homo sapien
agttcttttcactgcagaatggggtagaaacga

SEQ ID NO: 929899 - DNA, 33 bp, Homo sapien
caggtgaattcagggaccaaagctgttttgtgt

SEQ ID NO: 929900 - DNA, 33 bp, Homo sapien
caggtgaattcagggatcaaagctgttttgtgt

SEQ ID NO: 929901 - DNA, 33 bp, Homo sapien
tgagtgaaatgattcaccgcttgagtgaaataa

SEQ ID NO: 929902 - DNA, 33 bp, Homo sapien
tgagtgaaatgattcatcgcttgagtgaaataa

SEQ ID NO: 929903 - DNA, 33 bp, Homo sapien
ttcaatagcttcctcagcaactagcaataacca

SEQ ID NO: 929904 - DNA, 33 bp, Homo sapien
ttcaatagcttcctcatcaactagcaataacca

SEQ ID NO: 929905 - DNA, 33 bp, Homo sapien
tagaaccatgttaaaaattcagaggaaatatag

SEQ ID NO: 929906 - DNA, 33 bp, Homo sapien
tagaaccatgttaaaagttcagaggaaatatag

SEQ ID NO: 929907 - DNA, 33 bp, Homo sapien
cctgctcggacgataactgctgcttctcctgct

SEQ ID NO: 929908 - DNA, 33 bp, Homo sapien
cctgctcggacgataattgctgcttctcctgct

SEQ ID NO: 929909 - DNA, 33 bp, Homo sapien
gaatacatagcaccaaacatccttttcaaccaa

SEQ ID NO: 929910 - DNA, 33 bp, Homo sapien
gaatacatagcaccaagcatccttttcaaccaa

SEQ ID NO: 929911 - DNA, 33 bp, Homo sapien
ataatactgtgattaacatctatgcccagtcct

SEQ ID NO: 929912 - DNA, 33 bp, Homo sapien
ataatactgtgattaatatctatgcccagtcct

SEQ ID NO: 929913 - DNA, 33 bp, Homo sapien
agagccatatcttctcccttctctaataactcc

SEQ ID NO: 929914 - DNA, 33 bp, Homo sapien
agagccatatcttctcgcttctctaataactcc

SEQ ID NO: 929915 - DNA, 33 bp, Homo sapien
agcacatctagcattcaataactatttttgatt

SEQ ID NO: 929916 - DNA, 33 bp, Homo sapien
agcacatctagcattcgataactatttttgatt

SEQ ID NO: 929917 - DNA, 33 bp, Homo sapien
ccaaactgaggaaaataatctgtaaccaggcaa

SEQ ID NO: 929918 - DNA, 33 bp, Homo sapien
ccaaactgaggaaaattatctgtaaccaggcaa

SEQ ID NO: 929919 - DNA, 33 bp, Homo sapien
gtttacctggttattcaatcaagttggacaatc

SEQ ID NO: 929920 - DNA, 33 bp, Homo sapien
gtttacctggttattctatcaagttggacaatc

SEQ ID NO: 929921 - DNA, 33 bp, Homo sapien
cagtttctttgtctccactggttccattattgt

SEQ ID NO: 929922 - DNA, 33 bp, Homo sapien
cagtttctttgtctccgctggttccattattgt

SEQ ID NO: 929923 - DNA, 33 bp, Homo sapien
cttcaacctctcaaacaattggatgatggctat

SEQ ID NO: 929924 - DNA, 33 bp, Homo sapien
cttcaacctctcaaaccattggatgatggctat

SEQ ID NO: 929925 - DNA, 33 bp, Homo sapien
gaagcatggaaggtgacgaggaagcccagcgga

SEQ ID NO: 929926 - DNA, 33 bp, Homo sapien
gaagcatggaaggtgatgaggaagcccagcgga

SEQ ID NO: 929927 - DNA, 33 bp, Homo sapien
tttctcggagatgagactagtttacccgcaagc

SEQ ID NO: 929928 - DNA, 33 bp, Homo sapien
tttctcggagatgagattagtttacccgcaagc

SEQ ID NO: 929929 - DNA, 33 bp, Homo sapien
atgttttgatccatcccctctcatcttcaacca

SEQ ID NO: 929930 - DNA, 33 bp, Homo sapien
atgttttgatccatcctctctcatcttcaacca

SEQ ID NO: 929931 - DNA, 33 bp, Homo sapien
ataaagtgaagatcgcacagggtgtctcgggct

SEQ ID NO: 929932 - DNA, 33 bp, Homo sapien
ataaagtgaagatcgcgcagggtgtctcgggct

SEQ ID NO: 929933 - DNA, 33 bp, Homo sapien; identical to SEQ ID NO: 929931

SEQ ID NO: 929934 - DNA, 33 bp, Homo sapien; identical to SEQ ID NO: 929932

SEQ ID NO: 929935 - DNA, 33 bp, Homo sapien
tctacttggaaagaaaaatgacagacacaggac

SEQ ID NO: 929936 - DNA, 33 bp, Homo sapien
tctacttggaaagaaagatgacagacacaggac

SEQ ID NO: 929937 - DNA, 33 bp, Homo sapien
cttgatggtaccccagcagacctttcgctgtct

SEQ ID NO: 929938 - DNA, 33 bp, Homo sapien
cttgatggtaccccagtagacctttcgctgtct

SEQ ID NO: 929939 - DNA, 33 bp, Homo sapien
tgcctttgaaaacttcccaatcttgatggggag

SEQ ID NO: 929940 - DNA, 33 bp, Homo sapien
tgcctttgaaaacttctcaatcttgatggggag

SEQ ID NO: 929941 - DNA, 33 bp, Homo sapien
ctacatcaacttgcaacgaaaaaattaatcttg

SEQ ID NO: 929942 - DNA, 33 bp, Homo sapien
ctacatcaacttgcaatgaaaaaattaatcttg

SEQ ID NO: 929943 - DNA, 33 bp, Homo sapien
cattgtgtcacaaaacaactccctaattttctg

SEQ ID NO: 929944 - DNA, 33 bp, Homo sapien
cattgtgtcacaaaacgactccctaattttctg

SEQ ID NO: 929945 - DNA, 33 bp, Homo sapien
tcttccaacttgcacaacgttctcaagtttcat

SEQ ID NO: 929946 - DNA, 33 bp, Homo sapien
tcttccaacttgcacagcgttctcaagtttcat

SEQ ID NO: 929947 - DNA, 33 bp, Homo sapien
gtttcataaaaggacaccattttaatatctgca

SEQ ID NO: 929948 - DNA, 33 bp, Homo sapien
gtttcataaaaggacatcattttaatatctgca

SEQ ID NO: 929949 - DNA, 33 bp, Homo sapien
aacaccaaataattgagcataagacattcaaga

SEQ ID NO: 929950 - DNA, 33 bp, Homo sapien
aacaccaaataattgatcataagacattcaaga

SEQ ID NO: 929951 - DNA, 33 bp, Homo sapien
atcgctacctgcctcaaatgtacacaaggtatt

SEQ ID NO: 929952 - DNA, 33 bp, Homo sapien
atcgctacctgcctcagatgtacacaaggtatt

SEQ ID NO: 929953 - DNA, 33 bp, Homo sapien
tacttgtctggaacaactgctgaaagaacaaat

SEQ ID NO: 929954 - DNA, 33 bp, Homo sapien
tacttgtctggaacaattgctgaaagaacaaat

SEQ ID NO: 929955 - DNA, 33 bp, Homo sapien
ggacatctgcttttagaccttcttccaagcagg

SEQ ID NO: 929956 - DNA, 33 bp, Homo sapien
ggacatctgcttttagcccttcttccaagcagg

SEQ ID NO: 929957 - DNA, 33 bp, Homo sapien
ctgttccaacagtacaacaaaagcaataagaag

SEQ ID NO: 929958 - DNA, 33 bp, Homo sapien
ctgttccaacagtacagcaaaagcaataagaag

SEQ ID NO: 929959 - DNA, 33 bp, Homo sapien
ctaatgaaggtttttacgagacagtagaggggg

SEQ ID NO: 929960 - DNA, 33 bp, Homo sapien
ctaatgaaggtttttatgagacagtagaggggg

SEQ ID NO: 929961 - DNA, 33 bp, Homo sapien
aatttcttgcgggtcacgtacatgttctatttt

SEQ ID NO: 929962 - DNA, 33 bp, Homo sapien
aatttcttgcgggtcaggtacatgttctatttt

SEQ ID NO: 929963 - DNA, 33 bp, Homo sapien
gctacgaatctacgaccggctccagcgcatcct

SEQ ID NO: 929964 - DNA, 33 bp, Homo sapien
gctacgaatctacgactggctccagcgcatcct

SEQ ID NO: 929965 - DNA, 33 bp, Homo sapien
aaaaccctgaacttataacatcttcttaccctc

SEQ ID NO: 929966 - DNA, 33 bp, Homo sapien
aaaaccctgaacttatcacatcttcttaccctc

SEQ ID NO: 929967 - DNA, 33 bp, Homo sapien
cagttgtctatttcaacggcagtgtcattgttc

SEQ ID NO: 929968 - DNA, 33 bp, Homo sapien
cagttgtctatttcaatggcagtgtcattgttc

SEQ ID NO: 929969 - DNA, 33 bp, Homo sapien
aatatcttcctcaccacgttttcattagcaatg

SEQ ID NO: 929970 - DNA, 33 bp, Homo sapien
aatatcttcctcaccatgttttcattagcaatg

SEQ ID NO: 929971 - DNA, 33 bp, Homo sapien
atatacaatgtcctcaaagtatcttcaaacatg

SEQ ID NO: 929972 - DNA, 33 bp, Homo sapien
atatacaatgtcctcagagtatcttcaaacatg

SEQ ID NO: 929973 - DNA, 33 bp, Homo sapien
acatgtaaacaaatagccacaattgggtgagaa

SEQ ID NO: 929974 - DNA, 33 bp, Homo sapien
acatgtaaacaaatagtcacaattgggtgagaa

SEQ ID NO: 929975 - DNA, 33 bp, Homo sapien
agtcagcttctcttacgggcaaccaaagaagtc

SEQ ID NO: 929976 - DNA, 33 bp, Homo sapien
agtcagcttctcttactggcaaccaaagaagtc

SEQ ID NO: 929977 - DNA, 33 bp, Homo sapien
atataaatattaactccgagaggaagaagttgt

SEQ ID NO: 929978 - DNA, 33 bp, Homo sapien
atataaatattaactctgagaggaagaagttgt

SEQ ID NO: 929979 - DNA, 33 bp, Homo sapien
agctcttagatgtagaacagcttggagaacatg

SEQ ID NO: 929980 - DNA, 33 bp, Homo sapien
agctcttagatgtagatcagcttggagaacatg

SEQ ID NO: 929981 - DNA, 33 bp, Homo sapien
agatcagagaggatgaagagaatggggtcagga

SEQ ID NO: 929982 - DNA, 33 bp, Homo sapien
agatcagagaggatgaggagaatggggtcagga

SEQ ID NO: 929983 - DNA, 33 bp, Homo sapien
tgagcagtggggacgaacagaggtcccttttat

SEQ ID NO: 929984 - DNA, 33 bp, Homo sapien
tgagcagtggggacgaccagaggtcccttttat

SEQ ID NO: 929985 - DNA, 33 bp, Homo sapien
gcagccagaaacacaccatatatccattacatg

SEQ ID NO: 929986 - DNA, 33 bp, Homo sapien
gcagccagaaacacactatatatccattacatg

SEQ ID NO: 929987 - DNA, 33 bp, Homo sapien
gcgacaacgacaaggacaaggcctggacaaagc

SEQ ID NO: 929988 - DNA, 33 bp, Homo sapien
gcgacaacgacaaggataaggcctggacaaagc

SEQ ID NO: 929989 - DNA, 33 bp, Homo sapien
catggccctcaactgccagaatgccgttagtgc

SEQ ID NO: 929990 - DNA, 33 bp, Homo sapien
catggccctcaactgctagaatgccgttagtgc

SEQ ID NO: 929991 - DNA, 33 bp, Homo sapien
cagaattcatgacagccatcaaacctcagatcc

SEQ ID NO: 929992 - DNA, 33 bp, Homo sapien
cagaattcatgacagctatcaaacctcagatcc

SEQ ID NO: 929993 - DNA, 33 bp, Homo sapien
tgtctggtttatttcactaggtccatgcatgct

SEQ ID NO: 929994 - DNA, 33 bp, Homo sapien
tgtctggtttatttcattaggtccatgcatgct

SEQ ID NO: 929995 - DNA, 33 bp, Homo sapien
gcataggacaatgaaacaatggagaaagaatgt

SEQ ID NO: 929996 - DNA, 33 bp, Homo sapien
gcataggacaatgaaataatggagaaagaatgt

SEQ ID NO: 929997 - DNA, 33 bp, Homo sapien
tcctatgccatctaaacttgctggaaagaggtc

SEQ ID NO: 929998 - DNA, 33 bp, Homo sapien
tcctatgccatctaaagttgctggaaagaggtc

SEQ ID NO: 929999 - DNA, 33 bp, Homo sapien
ttggaaaatacagcaaggttttttttgtttttg

SEQ ID NO: 930000 - DNA, 33 bp, Homo sapien
ttggaaaatacagcaatgttttttttgtttttg

SEQ ID NO: 930001 - DNA, 33 bp, Homo sapien
tgacctcctaagggaaataagtcctgcagaagt

SEQ ID NO: 930002 - DNA, 33 bp, Homo sapien
tgacctcctaagggaagtaagtcctgcagaagt

SEQ ID NO: 930003 - DNA, 33 bp, Homo sapien
caaccctattgcatccaatctgaccctgtcttc

SEQ ID NO: 930004 - DNA, 33 bp, Homo sapien
caaccctattgcatccgatctgaccctgtcttc

SEQ ID NO: 930005 - DNA, 33 bp, Homo sapien
ccacaaacctcaatgggagaatcctgaagccac

SEQ ID NO: 930006 - DNA, 33 bp, Homo sapien
ccacaaacctcaatggtagaatcctgaagccac

SEQ ID NO: 930007 - DNA, 33 bp, Homo sapien
atgagagaaaaatcatcactcaggggcttcatt

SEQ ID NO: 930008 - DNA, 33 bp, Homo sapien
atgagagaaaaatcattactcaggggcttcatt

SEQ ID NO: 930009 - DNA, 33 bp, Homo sapien
aagtgagagagtcacaaagatgttgagaatgca

SEQ ID NO: 930010 - DNA, 33 bp, Homo sapien
aagtgagagagtcacagagatgttgagaatgca

SEQ ID NO: 930011 - DNA, 33 bp, Homo sapien
gaatgagggaagtcaactgagttcaagacatag

SEQ ID NO: 930012 - DNA, 33 bp, Homo sapien
gaatgagggaagtcaattgagttcaagacatag

SEQ ID NO: 930013 - DNA, 33 bp, Homo sapien
taaagggtgcagaaacaaggggggagagaacga

SEQ ID NO: 930014 - DNA, 33 bp, Homo sapien
taaagggtgcagaaacgaggggggagagaacga

SEQ ID NO: 930015 - DNA, 33 bp, Homo sapien
tctttatctttctgcacggaggaatgaaaaatc

SEQ ID NO: 930016 - DNA, 33 bp, Homo sapien
tctttatctttctgcagggaggaatgaaaaatc

SEQ ID NO: 930017 - DNA, 33 bp, Homo sapien
attatcatggacctgcaacagtttcttatgtgc

SEQ ID NO: 930018 - DNA, 33 bp, Homo sapien
attatcatggacctgcgacagtttcttatgtgc

SEQ ID NO: 930019 - DNA, 33 bp, Homo sapien
tgagcactgtcacataacatttgaaagtagata

SEQ ID NO: 930020 - DNA, 33 bp, Homo sapien
tgagcactgtcacatagcatttgaaagtagata

SEQ ID NO: 930021 - DNA, 33 bp, Homo sapien
atacctgaactccaaactgaatcaagaacacac

SEQ ID NO: 930022 - DNA, 33 bp, Homo sapien
atacctgaactccaaattgaatcaagaacacac

SEQ ID NO: 930023 - DNA, 33 bp, Homo sapien
ctgtctctgccacaaggaaaatatgaaatactg

SEQ ID NO: 930024 - DNA, 33 bp, Homo sapien
ctgtctctgccacaagtaaaatatgaaatactg

SEQ ID NO: 930025 - DNA, 33 bp, Homo sapien
attagcttagacaaaaatatactcagaacactg

SEQ ID NO: 930026 - DNA, 33 bp, Homo sapien
attagcttagacaaaagtatactcagaacactg

SEQ ID NO: 930027 - DNA, 33 bp, Homo sapien
tcaaaaggcaaataatgaagtcttgagcatttc

SEQ ID NO: 930028 - DNA, 33 bp, Homo sapien
tcaaaaggcaaataattaagtcttgagcatttc

SEQ ID NO: 930029 - DNA, 33 bp, Homo sapien
cataaaagcactgtcaacagaggcccctccatt

SEQ ID NO: 930030 - DNA, 33 bp, Homo sapien
cataaaagcactgtcagcagaggcccctccatt

SEQ ID NO: 930031 - DNA, 33 bp, Homo sapien
ttcctgagggtttgaccgaagcacagcagataa

SEQ ID NO: 930032 - DNA, 33 bp, Homo sapien
ttcctgagggtttgactgaagcacagcagataa

SEQ ID NO: 930033 - DNA, 33 bp, Homo sapien
cggggtgaggtggaaacgtaggtgtgccattct

SEQ ID NO: 930034 - DNA, 33 bp, Homo sapien
cggggtgaggtggaaatgtaggtgtgccattct

SEQ ID NO: 930035 - DNA, 33 bp, Homo sapien
cctcaccctggaaacacaggcaagtcacatcct

SEQ ID NO: 930036 - DNA, 33 bp, Homo sapien
cctcaccctggaaacagaggcaagtcacatcct

SEQ ID NO: 930037 - DNA, 33 bp, Homo sapien
actccagagaccccacactggttcccagaaaag

SEQ ID NO: 930038 - DNA, 33 bp, Homo sapien
actccagagaccccacgctggttcccagaaaag

SEQ ID NO: 930039 - DNA, 33 bp, Homo sapien
tggtaattggcttcccaagctaggttttctgga

SEQ ID NO: 930040 - DNA, 33 bp, Homo sapien
tggtaattggcttccccagctaggttttctgga

SEQ ID NO: 930041 - DNA, 33 bp, Homo sapien
ttacctcctgggtaaccggtggaggtaagtgat

SEQ ID NO: 930042 - DNA, 33 bp, Homo sapien
ttacctcctgggtaactggtggaggtaagtgat

SEQ ID NO: 930043 - DNA, 33 bp, Homo sapien
ggggttgccaataggaaagtggaattcctgagc

SEQ ID NO: 930044 - DNA, 33 bp, Homo sapien
ggggttgccaataggagagtggaattcctgagc

SEQ ID NO: 930045 - DNA, 33 bp, Homo sapien
tggatcgaacaggggcaccaggtttgagcttgg

SEQ ID NO: 930046 - DNA, 33 bp, Homo sapien
tggatcgaacaggggcgccaggtttgagcttgg

SEQ ID NO: 930047 - DNA, 33 bp, Homo sapien
aggctgttatctgccaatctctaagctgtctgg

SEQ ID NO: 930048 - DNA, 33 bp, Homo sapien
aggctgttatctgccattctctaagctgtctgg

SEQ ID NO: 930049 - DNA, 33 bp, Homo sapien
ggtgaagggtccagaccataaacagagcaagga

SEQ ID NO: 930050 - DNA, 33 bp, Homo sapien
ggtgaagggtccagactataaacagagcaagga

SEQ ID NO: 930051 - DNA, 33 bp, Homo sapien
ggcatctgtttggttaccctgtggtagtggcct

SEQ ID NO: 930052 - DNA, 33 bp, Homo sapien
ggcatctgtttggttatcctgtggtagtggcct

SEQ ID NO: 930053 - DNA, 33 bp, Homo sapien
acgaaagtggctagacagggacaactcagaaac

SEQ ID NO: 930054 - DNA, 33 bp, Homo sapien
acgaaagtggctagaccgggacaactcagaaac

SEQ ID NO: 930055 - DNA, 33 bp, Homo sapien
attattttatctgtcaaatattagtcccactga

SEQ ID NO: 930056 - DNA, 33 bp, Homo sapien
attattttatctgtcatatattagtcccactga

SEQ ID NO: 930057 - DNA, 33 bp, Homo sapien
gaagttcaaagtaatacggtatgtggcaagatt

SEQ ID NO: 930058 - DNA, 33 bp, Homo sapien
gaagttcaaagtaatagggtatgtggcaagatt

SEQ ID NO: 930059 - DNA, 33 bp, Homo sapien
tgctcagcatatagtgaaagtagagaaatcact

SEQ ID NO: 930060 - DNA, 33 bp, Homo sapien
tgctcagcatatagtggaagtagagaaatcact

SEQ ID NO: 930061 - DNA, 33 bp, Homo sapien
actagaaaatgacaagaatatttgactctgatt

SEQ ID NO: 930062 - DNA, 33 bp, Homo sapien
actagaaaatgacaaggatatttgactctgatt

SEQ ID NO: 930063 - DNA, 33 bp, Homo sapien
atcccattctttaccagtcagtttcctaacttt

SEQ ID NO: 930064 - DNA, 33 bp, Homo sapien
atcccattctttaccattcagtttcctaacttt

SEQ ID NO: 930065 - DNA, 33 bp, Homo sapien
ttctgtataatcctctaaaggtgacgttatctc

SEQ ID NO: 930066 - DNA, 33 bp, Homo sapien
ttctgtataatcctcttaaggtgacgttatctc

SEQ ID NO: 930067 - DNA, 33 bp, Homo sapien
tatttacttgagccaacatagtttttctgctat

SEQ ID NO: 930068 - DNA, 33 bp, Homo sapien
tatttacttgagccaagatagtttttctgctat

SEQ ID NO: 930069 - DNA, 33 bp, Homo sapien
aataggcaaaactctacagacagaaagtagatt

SEQ ID NO: 930070 - DNA, 33 bp, Homo sapien
aataggcaaaactctagagacagaaagtagatt

SEQ ID NO: 930071 - DNA, 33 bp, Homo sapien
ttcaaagtgttctgaaagagagtattttgaggc

SEQ ID NO: 930072 - DNA, 33 bp, Homo sapien
ttcaaagtgttctgaaggagagtattttgaggc

SEQ ID NO: 930073 - DNA, 33 bp, Homo sapien
aggggagctgaacaaagattctaggcattttgg

SEQ ID NO: 930074 - DNA, 33 bp, Homo sapien
aggggagctgaacaaatattctaggcattttgg

SEQ ID NO: 930075 - DNA, 33 bp, Homo sapien
ggactggctgcacagcaatgttgtaaccacatt

SEQ ID NO: 930076 - DNA, 33 bp, Homo sapien
ggactggctgcacagcgatgttgtaaccacatt

SEQ ID NO: 930077 - DNA, 33 bp, Homo sapien
gtaacaactgtgaaaaagcataaaataatcatt

SEQ ID NO: 930078 - DNA, 33 bp, Homo sapien
gtaacaactgtgaaaatgcataaaataatcatt

SEQ ID NO: 930079 - DNA, 33 bp, Homo sapien
tacttttacaggattacacactttttactattt

SEQ ID NO: 930080 - DNA, 33 bp, Homo sapien
tacttttacaggattatacactttttactattt

SEQ ID NO: 930081 - DNA, 33 bp, Homo sapien
ctcctgtagacattgaaggtagggtgaacctgt

SEQ ID NO: 930082 - DNA, 33 bp, Homo sapien
ctcctgtagacattgagggtagggtgaacctgt

SEQ ID NO: 930083 - DNA, 33 bp, Homo sapien
ggcagtgagagtggctcacataagatgaagttt

SEQ ID NO: 930084 - DNA, 33 bp, Homo sapien
ggcagtgagagtggcttacataagatgaagttt

SEQ ID NO: 930085 - DNA, 33 bp, Homo sapien
aatgtaagaggcatgaagaaaatctaggtggac

SEQ ID NO: 930086 - DNA, 33 bp, Homo sapien
aatgtaagaggcatgaggaaaatctaggtggac

SEQ ID NO: 930087 - DNA, 33 bp, Homo sapien
gagtaactaactagtcaaccttgcaaattgttg

SEQ ID NO: 930088 - DNA, 33 bp, Homo sapien
gagtaactaactagtctaccttgcaaattgttg

SEQ ID NO: 930089 - DNA, 33 bp, Homo sapien
tccctgttgacaaataagttcagcagtaacatg

SEQ ID NO: 930090 - DNA, 33 bp, Homo sapien
tccctgttgacaaatacgttcagcagtaacatg

SEQ ID NO: 930091 - DNA, 33 bp, Homo sapien
tatagacactctaaagacacaaaactcatcatg

SEQ ID NO: 930092 - DNA, 33 bp, Homo sapien
tatagacactctaaaggcacaaaactcatcatg

SEQ ID NO: 930093 - DNA, 33 bp, Homo sapien
gctctgcattcgttccacttggctaacttggtg

SEQ ID NO: 930094 - DNA, 33 bp, Homo sapien
gctctgcattcgttccgcttggctaacttggtg

SEQ ID NO: 930095 - DNA, 33 bp, Homo sapien
gaatgatccatctttcaacaaaattcctctctg

SEQ ID NO: 930096 - DNA, 33 bp, Homo sapien
gaatgatccatctttcgacaaaattcctctctg

SEQ ID NO: 930097 - DNA, 33 bp, Homo sapien
gccctgttagattgcaaagttgctttagaccaa

SEQ ID NO: 930098 - DNA, 33 bp, Homo sapien
gccctgttagattgcagagttgctttagaccaa

SEQ ID NO: 930099 - DNA, 33 bp, Homo sapien
tgctccaattctatccacattacttcaaataac

SEQ ID NO: 930100 - DNA, 33 bp, Homo sapien
tgctccaattctatccgcattacttcaaataac

SEQ ID NO: 930101 - DNA, 33 bp, Homo sapien
aaccactgctatagagaaaagtttccaaagttt

SEQ ID NO: 930102 - DNA, 33 bp, Homo sapien
aaccactgctatagaggaaagtttccaaagttt

SEQ ID NO: 930103 - DNA, 33 bp, Homo sapien
ggtcccagtcccccaaaattcattagttttctg

SEQ ID NO: 930104 - DNA, 33 bp, Homo sapien
ggtcccagtcccccaacattcattagttttctg

SEQ ID NO: 930105 - DNA, 33 bp, Homo sapien
tgctttaaactactaaatgtctggtaatttgta

SEQ ID NO: 930106 - DNA, 33 bp, Homo sapien
tgctttaaactactaagtgtctggtaatttgta

SEQ ID NO: 930107 - DNA, 33 bp, Homo sapien
ttgatgaattaatgtacacaaagtgcttagaga

SEQ ID NO: 930108 - DNA, 33 bp, Homo sapien
ttgatgaattaatgtagacaaagtgcttagaga

SEQ ID NO: 930109 - DNA, 33 bp, Homo sapien
acagcaacaaagagacgggaagtgtgcattggt

SEQ ID NO: 930110 - DNA, 33 bp, Homo sapien
acagcaacaaagagactggaagtgtgcattggt

SEQ ID NO: 930111 - DNA, 33 bp, Homo sapien
gactgtgcctatttatcaacgcaaatatgacac

SEQ ID NO: 930112 - DNA, 33 bp, Homo sapien
gactgtgcctatttattaacgcaaatatgacac

SEQ ID NO: 930113 - DNA, 33 bp, Homo sapien
aagctcctgagagaaaataagagaatgactttc

SEQ ID NO: 930114 - DNA, 33 bp, Homo sapien
aagctcctgagagaaactaagagaatgactttc

SEQ ID NO: 930115 - DNA, 33 bp, Homo sapien
aaacacaaaggcttcaccggttttggtcacaat

SEQ ID NO: 930116 - DNA, 33 bp, Homo sapien
aaacacaaaggcttcatcggttttggtcacaat

SEQ ID NO: 930117 - DNA, 33 bp, Homo sapien
ggagaccccagagaagccctgaaatctgagttc

SEQ ID NO: 930118 - DNA, 33 bp, Homo sapien
ggagaccccagagaagtcctgaaatctgagttc

SEQ ID NO: 930119 - DNA, 33 bp, Homo sapien
gatgctaccaataaaacatggcctcaaagtaaa

SEQ ID NO: 930120 - DNA, 33 bp, Homo sapien
gatgctaccaataaaatatggcctcaaagtaaa

SEQ ID NO: 930121 - DNA, 33 bp, Homo sapien
ctcacagcatggtgaccgggttctatgtgcaag

SEQ ID NO: 930122 - DNA, 33 bp, Homo sapien
ctcacagcatggtgacggggttctatgtgcaag

SEQ ID NO: 930123 - DNA, 33 bp, Homo sapien
agaagtaaagagaggaaaaacagggatatttaa

SEQ ID NO: 930124 - DNA, 33 bp, Homo sapien
agaagtaaagagaggataaacagggatatttaa

SEQ ID NO: 930125 - DNA, 33 bp, Homo sapien
acaaaaaactatccggacatagtggctcacctg

SEQ ID NO: 930126 - DNA, 33 bp, Homo sapien
acaaaaaactatccgggcatagtggctcacctg

SEQ ID NO: 930127 - DNA, 33 bp, Homo sapien
ttaggtgcctatggaaaagagtttggagaggaa

SEQ ID NO: 930128 - DNA, 33 bp, Homo sapien
ttaggtgcctatggaagagagtttggagaggaa

SEQ ID NO: 930129 - DNA, 33 bp, Homo sapien
ctctttattcacaagaccaaaatatttctcaac

SEQ ID NO: 930130 - DNA, 33 bp, Homo sapien
ctctttattcacaagatcaaaatatttctcaac

SEQ ID NO: 930131 - DNA, 33 bp, Homo sapien
attgcatacccaccaacgaatcagttccttttg

SEQ ID NO: 930132 - DNA, 33 bp, Homo sapien
attgcatacccaccaatgaatcagttccttttg

SEQ ID NO: 930133 - DNA, 33 bp, Homo sapien
acttcaactttgcttcgaagtgcagttctctac

SEQ ID NO: 930134 - DNA, 33 bp, Homo sapien
acttcaactttgcttctaagtgcagttctctac

SEQ ID NO: 930135 - DNA, 33 bp, Homo sapien
ttgcttgaactagctacagtgtgtcattacttc

SEQ ID NO: 930136 - DNA, 33 bp, Homo sapien
ttgcttgaactagctagagtgtgtcattacttc

SEQ ID NO: 930137 - DNA, 33 bp, Homo sapien
ttgtcccagaactgatgatattcactttaatcc

SEQ ID NO: 930138 - DNA, 33 bp, Homo sapien
ttgtcccagaactgattatattcactttaatcc

SEQ ID NO: 930139 - DNA, 33 bp, Homo sapien
atgtcaatccaaggagcatagcagaatgagaga

SEQ ID NO: 930140 - DNA, 33 bp, Homo sapien
atgtcaatccaaggagtatagcagaatgagaga

SEQ ID NO: 930141 - DNA, 33 bp, Homo sapien
tcacatgtggctggttaaaaaacaatagtaatg

SEQ ID NO: 930142 - DNA, 33 bp, Homo sapien
tcacatgtggctggttgaaaaacaatagtaatg

SEQ ID NO: 930143 - DNA, 33 bp, Homo sapien
aaaggaatgaatgtctaacgaggttcaaactag

SEQ ID NO: 930144 - DNA, 33 bp, Homo sapien
aaaggaatgaatgtctgacgaggttcaaactag

SEQ ID NO: 930145 - DNA, 33 bp, Homo sapien
gtgggtctcttcactacagcaaggcagaatgta

SEQ ID NO: 930146 - DNA, 33 bp, Homo sapien
gtgggtctcttcactatagcaaggcagaatgta

SEQ ID NO: 930147 - DNA, 33 bp, Homo sapien
cctctatcctactcccaagatcagtctgccctt

SEQ ID NO: 930148 - DNA, 33 bp, Homo sapien
cctctatcctactcccgagatcagtctgccctt

SEQ ID NO: 930149 - DNA, 33 bp, Homo sapien
gaatcagtatttaatcacacatcttaccattta

SEQ ID NO: 930150 - DNA, 33 bp, Homo sapien
gaatcagtatttaatcgcacatcttaccattta

SEQ ID NO: 930151 - DNA, 33 bp, Homo sapien
cgactggccaaaaatcaagattctaagttactc

SEQ ID NO: 930152 - DNA, 33 bp, Homo sapien
cgactggccaaaaatcgagattctaagttactc

SEQ ID NO: 930153 - DNA, 33 bp, Homo sapien
tctcagagggactacactacttatctcggagga

SEQ ID NO: 930154 - DNA, 33 bp, Homo sapien
tctcagagggactacagtacttatctcggagga

SEQ ID NO: 930155 - DNA, 33 bp, Homo sapien
tttctttcctctaacccgaaccattggcatctt

SEQ ID NO: 930156 - DNA, 33 bp, Homo sapien
tttctttcctctaacctgaaccattggcatctt

SEQ ID NO: 930157 - DNA, 33 bp, Homo sapien
ggaaaatgaaagtacaagtcaggctgtgtcagg

SEQ ID NO: 930158 - DNA, 33 bp, Homo sapien
ggaaaatgaaagtacaggtcaggctgtgtcagg

SEQ ID NO: 930159 - DNA, 33 bp, Homo sapien
cacttatttcagggctaaagatacaaatctccc

SEQ ID NO: 930160 - DNA, 33 bp, Homo sapien
cacttatttcagggctgaagatacaaatctccc

SEQ ID NO: 930161 - DNA, 33 bp, Homo sapien
ccctgtccatacaggcgctgttaccagttcagg

SEQ ID NO: 930162 - DNA, 33 bp, Homo sapien
ccctgtccatacaggctctgttaccagttcagg

SEQ ID NO: 930163 - DNA, 33 bp, Homo sapien
ggatcctgaatcacaacaaaatgatcaacttgc

SEQ ID NO: 930164 - DNA, 33 bp, Homo sapien
ggatcctgaatcacaataaaatgatcaacttgc

SEQ ID NO: 930165 - DNA, 33 bp, Homo sapien
agctgcggctaactcccagacccatgaacaaga

SEQ ID NO: 930166 - DNA, 33 bp, Homo sapien
agctgcggctaactcctagacccatgaacaaga

SEQ ID NO: 930167 - DNA, 33 bp, Homo sapien
acttcacataggtttacacttcatgtagcctgg

SEQ ID NO: 930168 - DNA, 33 bp, Homo sapien
acttcacataggtttatacttcatgtagcctgg

SEQ ID NO: 930169 - DNA, 33 bp, Homo sapien
ggatacaagagtacacaatgaaaaatgtaattt

SEQ ID NO: 930170 - DNA, 33 bp, Homo sapien
ggatacaagagtacaccatgaaaaatgtaattt

SEQ ID NO: 930171 - DNA, 33 bp, Homo sapien
ctgaaactctcatacaactctgatggaaatcta

SEQ ID NO: 930172 - DNA, 33 bp, Homo sapien
ctgaaactctcatacacctctgatggaaatcta

SEQ ID NO: 930173 - DNA, 33 bp, Homo sapien
cttctgtctctttgtcactccctcaggctgaag

SEQ ID NO: 930174 - DNA, 33 bp, Homo sapien
cttctgtctctttgtctctccctcaggctgaag

SEQ ID NO: 930175 - DNA, 33 bp, Homo sapien
aactctgtttaacaataaagtgccatctgtggt

SEQ ID NO: 930176 - DNA, 33 bp, Homo sapien
aactctgtttaacaatgaagtgccatctgtggt

SEQ ID NO: 930177 - DNA, 33 bp, Homo sapien
catccattcgaagaccccctttcacacttgaac

SEQ ID NO: 930178 - DNA, 33 bp, Homo sapien
catccattcgaagacctcctttcacacttgaac

SEQ ID NO: 930179 - DNA, 33 bp, Homo sapien
tgtacattccaaactgaagaacagactattcat

SEQ ID NO: 930180 - DNA, 33 bp, Homo sapien
tgtacattccaaactggagaacagactattcat

SEQ ID NO: 930181 - DNA, 33 bp, Homo sapien
ttctgcatgtggcaccggaaaaacctcacactc

SEQ ID NO: 930182 - DNA, 33 bp, Homo sapien
ttctgcatgtggcacctgaaaaacctcacactc

SEQ ID NO: 930183 - DNA, 33 bp, Homo sapien
cagtggcttaatctcaccttactgcagcctcaa

SEQ ID NO: 930184 - DNA, 33 bp, Homo sapien
cagtggcttaatctcagcttactgcagcctcaa

SEQ ID NO: 930185 - DNA, 33 bp, Homo sapien
ctgggtttcaaatctaccctagctagccttcga

SEQ ID NO: 930186 - DNA, 33 bp, Homo sapien
ctgggtttcaaatctatcctagctagccttcga

SEQ ID NO: 930187 - DNA, 33 bp, Homo sapien
tgcatgctttacatacactatctcgtctttaca

SEQ ID NO: 930188 - DNA, 33 bp, Homo sapien
tgcatgctttacatacgctatctcgtctttaca

SEQ ID NO: 930189 - DNA, 33 bp, Homo sapien
tagaataaaatatacacgaggtgcttagaacaa

SEQ ID NO: 930190 - DNA, 33 bp, Homo sapien
tagaataaaatatacatgaggtgcttagaacaa

SEQ ID NO: 930191 - DNA, 33 bp, Homo sapien
aggacacagtcatagagagggggctgtgaatat

SEQ ID NO: 930192 - DNA, 33 bp, Homo sapien
aggacacagtcatagatagggggctgtgaatat

SEQ ID NO: 930193 - DNA, 33 bp, Homo sapien
gactggcaggaactctgaatgccaaatgtagta

SEQ ID NO: 930194 - DNA, 33 bp, Homo sapien
gactggcaggaactcttaatgccaaatgtagta

SEQ ID NO: 930195 - DNA, 33 bp, Homo sapien
tgtattatttttcctacggcatctctattccca

SEQ ID NO: 930196 - DNA, 33 bp, Homo sapien
tgtattatttttcctatggcatctctattccca

SEQ ID NO: 930197 - DNA, 33 bp, Homo sapien
ccactgtgaacacatcaagtccctttcacatag

SEQ ID NO: 930198 - DNA, 33 bp, Homo sapien
ccactgtgaacacatcgagtccctttcacatag

SEQ ID NO: 930199 - DNA, 33 bp, Homo sapien
taacctcagtttgctcagaatggtaaatgtcat

SEQ ID NO: 930200 - DNA, 33 bp, Homo sapien
taacctcagtttgctcggaatggtaaatgtcat

SEQ ID NO: 930201 - DNA, 33 bp, Homo sapien
gaactgtcagtctttagaaacagtctacagtcc

SEQ ID NO: 930202 - DNA, 33 bp, Homo sapien
gaactgtcagtctttataaacagtctacagtcc

SEQ ID NO: 930203 - DNA, 33 bp, Homo sapien
ctctattttggttctccagaagttgtaacatag

SEQ ID NO: 930204 - DNA, 33 bp, Homo sapien
ctctattttggttctctagaagttgtaacatag

SEQ ID NO: 930205 - DNA, 33 bp, Homo sapien
ggagaaattccttctaaggagaggagaatgata

SEQ ID NO: 930206 - DNA, 33 bp, Homo sapien
ggagaaattccttctagggagaggagaatgata

SEQ ID NO: 930207 - DNA, 33 bp, Homo sapien
caaacctcttatggtccctaaatgcctatagaa

SEQ ID NO: 930208 - DNA, 33 bp, Homo sapien
caaacctcttatggtctctaaatgcctatagaa

SEQ ID NO: 930209 - DNA, 33 bp, Homo sapien
gttacatctctaaggacgctttcttcaagtgag

SEQ ID NO: 930210 - DNA, 33 bp, Homo sapien
gttacatctctaaggatgctttcttcaagtgag

SEQ ID NO: 930211 - DNA, 33 bp, Homo sapien
ctcaaaacactgccaacaccaaacgctgttgag

SEQ ID NO: 930212 - DNA, 33 bp, Homo sapien
ctcaaaacactgccaataccaaacgctgttgag

SEQ ID NO: 930213 - DNA, 33 bp, Homo sapien
aagactcgccttcttcgcccgaggacacctctt

SEQ ID NO: 930214 - DNA, 33 bp, Homo sapien
aagactcgccttcttctcccgaggacacctctt

SEQ ID NO: 930215 - DNA, 33 bp, Homo sapien
ttattccaattacgttaaacagaatcactgaca

SEQ ID NO: 930216 - DNA, 33 bp, Homo sapien
ttattccaattacgttgaacagaatcactgaca

SEQ ID NO: 930217 - DNA, 33 bp, Homo sapien
ttcagactgagaaacactgaaagcaaggacttg

SEQ ID NO: 930218 - DNA, 33 bp, Homo sapien
ttcagactgagaaacattgaaagcaaggacttg

SEQ ID NO: 930219 - DNA, 33 bp, Homo sapien
tcggtccttgagcattaaaaatacgtattaata

SEQ ID NO: 930220 - DNA, 33 bp, Homo sapien
tcggtccttgagcatttaaaatacgtattaata

SEQ ID NO: 930221 - DNA, 33 bp, Homo sapien
gttccttccttctgaacatcatctacttcccct

SEQ ID NO: 930222 - DNA, 33 bp, Homo sapien
gttccttccttctgaatatcatctacttcccct

SEQ ID NO: 930223 - DNA, 33 bp, Homo sapien
gagtgtctagaatcaaaagccccagtgaacagc

SEQ ID NO: 930224 - DNA, 33 bp, Homo sapien
gagtgtctagaatcaagagccccagtgaacagc

SEQ ID NO: 930225 - DNA, 33 bp, Homo sapien
actcctcaggcataccccccgtagctggaggga

SEQ ID NO: 930226 - DNA, 33 bp, Homo sapien
actcctcaggcatacctcccgtagctggaggga

SEQ ID NO: 930227 - DNA, 33 bp, Homo sapien
attcctggcatataaaagatgaatgcccgaggc

SEQ ID NO: 930228 - DNA, 33 bp, Homo sapien
attcctggcatataaacgatgaatgcccgaggc

SEQ ID NO: 930229 - DNA, 33 bp, Homo sapien
ccatccacggtgtcctcaaggccaagttacatg

SEQ ID NO: 930230 - DNA, 33 bp, Homo sapien
ccatccacggtgtcctgaaggccaagttacatg

SEQ ID NO: 930231 - DNA, 33 bp, Homo sapien
ctctcagtctgaccaacaggaggagaaaagagg

SEQ ID NO: 930232 - DNA, 33 bp, Homo sapien
ctctcagtctgaccaataggaggagaaaagagg

SEQ ID NO: 930233 - DNA, 33 bp, Homo sapien
gaatgagctgtttaccacatttgagccctcaaa

SEQ ID NO: 930234 - DNA, 33 bp, Homo sapien
gaatgagctgtttaccgcatttgagccctcaaa

SEQ ID NO: 930235 - DNA, 33 bp, Homo sapien
attttatgttttgaaacgtcttccaatgcacag

SEQ ID NO: 930236 - DNA, 33 bp, Homo sapien
attttatgttttgaaatgtcttccaatgcacag

SEQ ID NO: 930237 - DNA, 33 bp, Homo sapien
gaagcccttgacgttacccctcagtctgggctc

SEQ ID NO: 930238 - DNA, 33 bp, Homo sapien
gaagcccttgacgttatccctcagtctgggctc

SEQ ID NO: 930239 - DNA, 33 bp, Homo sapien
cccaaagtgggcaggaacagggcaagatcaggg

SEQ ID NO: 930240 - DNA, 33 bp, Homo sapien
cccaaagtgggcaggagcagggcaagatcaggg

SEQ ID NO: 930241 - DNA, 33 bp, Homo sapien
ccccaacgtccacgacagccataaactgttgat

SEQ ID NO: 930242 - DNA, 33 bp, Homo sapien
ccccaacgtccacgaccgccataaactgttgat

SEQ ID NO: 930243 - DNA, 33 bp, Homo sapien
cttgcaaaaggtcccactctcaacattgctgca

SEQ ID NO: 930244 - DNA, 33 bp, Homo sapien
cttgcaaaaggtcccagtctcaacattgctgca

SEQ ID NO: 930245 - DNA, 33 bp, Homo sapien
accacctgtttaggcaaatcagtcccagcagga

SEQ ID NO: 930246 - DNA, 33 bp, Homo sapien
accacctgtttaggcagatcagtcccagcagga

SEQ ID NO: 930247 - DNA, 33 bp, Homo sapien
atgggatgagtgggagaaagccctttgagaagg

SEQ ID NO: 930248 - DNA, 33 bp, Homo sapien
atgggatgagtgggaggaagccctttgagaagg

SEQ ID NO: 930249 - DNA, 33 bp, Homo sapien
tttcctcttaacatacacaggagagaaaacatt

SEQ ID NO: 930250 - DNA, 33 bp, Homo sapien
tttcctcttaacatacgcaggagagaaaacatt

SEQ ID NO: 930251 - DNA, 33 bp, Homo sapien
ggctttgcagtcaccacgtgggtcgtcttctca

SEQ ID NO: 930252 - DNA, 33 bp, Homo sapien
ggctttgcagtcaccatgtgggtcgtcttctca

SEQ ID NO: 930253 - DNA, 33 bp, Homo sapien
tattcagccataagaaattccgatacatgcaac

SEQ ID NO: 930254 - DNA, 33 bp, Homo sapien
tattcagccataagaacttccgatacatgcaac

SEQ ID NO: 930255 - DNA, 33 bp, Homo sapien
aatgggagaatcttgcaaacatgacaaccatcc

SEQ ID NO: 930256 - DNA, 33 bp, Homo sapien
aatgggagaatcttgcgaacatgacaaccatcc

SEQ ID NO: 930257 - DNA, 33 bp, Homo sapien
attggatacctactgcaagctgggcgttattct

SEQ ID NO: 930258 - DNA, 33 bp, Homo sapien
attggatacctactgcgagctgggcgttattct

SEQ ID NO: 930259 - DNA, 33 bp, Homo sapien
ttggaaggatgatgtaggccacagccaaagcct

SEQ ID NO: 930260 - DNA, 33 bp, Homo sapien
ttggaaggatgatgtatgccacagccaaagcct

SEQ ID NO: 930261 - DNA, 33 bp, Homo sapien
tctttctcttatcacaatcactttatatacagt

SEQ ID NO: 930262 - DNA, 33 bp, Homo sapien
tctttctcttatcacagtcactttatatacagt

SEQ ID NO: 930263 - DNA, 33 bp, Homo sapien
gatagaggcttggtaaatatttggcacctgtta

SEQ ID NO: 930264 - DNA, 33 bp, Homo sapien
gatagaggcttggtaactatttggcacctgtta

SEQ ID NO: 930265 - DNA, 33 bp, Homo sapien
tgagcctcagaagggtaaagagcctttaactgg

SEQ ID NO: 930266 - DNA, 33 bp, Homo sapien
tgagcctcagaagggttaagagcctttaactgg

SEQ ID NO: 930267 - DNA, 33 bp, Homo sapien
agctgaagtcatttgacgaaaagttaacaagtg

SEQ ID NO: 930268 - DNA, 33 bp, Homo sapien
agctgaagtcatttgatgaaaagttaacaagtg

SEQ ID NO: 930269 - DNA, 33 bp, Homo sapien
tgtgtttaggatgttaaagtcctggaatgaata

SEQ ID NO: 930270 - DNA, 33 bp, Homo sapien
tgtgtttaggatgttagagtcctggaatgaata

SEQ ID NO: 930271 - DNA, 33 bp, Homo sapien
cacagtggcttatgccgattattccagatactc

SEQ ID NO: 930272 - DNA, 33 bp, Homo sapien
cacagtggcttatgcctattattccagatactc

SEQ ID NO: 930273 - DNA, 33 bp, Homo sapien
ctgtgcccaccttaaactgcggtaccaactcta

SEQ ID NO: 930274 - DNA, 33 bp, Homo sapien
ctgtgcccaccttaaattgcggtaccaactcta

SEQ ID NO: 930275 - DNA, 33 bp, Homo sapien
ctatcttttcctcacagaattcaacttactctc

SEQ ID NO: 930276 - DNA, 33 bp, Homo sapien
ctatcttttcctcacataattcaacttactctc

SEQ ID NO: 930277 - DNA, 33 bp, Homo sapien
tgtgaggaaaagatagaaagcccattttgatgt

SEQ ID NO: 930278 - DNA, 33 bp, Homo sapien
tgtgaggaaaagataggaagcccattttgatgt

SEQ ID NO: 930279 - DNA, 33 bp, Homo sapien
catgtaaagaaaataacggtcttgaggccaggc

SEQ ID NO: 930280 - DNA, 33 bp, Homo sapien
catgtaaagaaaataatggtcttgaggccaggc

SEQ ID NO: 930281 - DNA, 33 bp, Homo sapien
ggtcccataccaaacgaaagtgcaaacatggcc

SEQ ID NO: 930282 - DNA, 33 bp, Homo sapien
ggtcccataccaaacgtaagtgcaaacatggcc

SEQ ID NO: 930283 - DNA, 33 bp, Homo sapien
aaaggggtccggaagacatgactggcctcctct

SEQ ID NO: 930284 - DNA, 33 bp, Homo sapien
aaaggggtccggaagatatgactggcctcctct

SEQ ID NO: 930285 - DNA, 33 bp, Homo sapien
gacaggtcaccgcatccgaggcaacggagacaa

SEQ ID NO: 930286 - DNA, 33 bp, Homo sapien
gacaggtcaccgcatctgaggcaacggagacaa

SEQ ID NO: 930287 - DNA, 33 bp, Homo sapien
tctgctgctcacttccagctcagagatggggca

SEQ ID NO: 930288 - DNA, 33 bp, Homo sapien
tctgctgctcacttccggctcagagatggggca

SEQ ID NO: 930289 - DNA, 33 bp, Homo sapien
taaaaatatgcacatccgagactgagggagcat

SEQ ID NO: 930290 - DNA, 33 bp, Homo sapien
taaaaatatgcacatctgagactgagggagcat

SEQ ID NO: 930291 - DNA, 33 bp, Homo sapien
ttcttagaggtagaaactaggtagtcattcatc

SEQ ID NO: 930292 - DNA, 33 bp, Homo sapien
ttcttagaggtagaaagtaggtagtcattcatc

SEQ ID NO: 930293 - DNA, 33 bp, Homo sapien
agcctctggctcaggacggtcaacaggactgga

SEQ ID NO: 930294 - DNA, 33 bp, Homo sapien
agcctctggctcaggatggtcaacaggactgga

SEQ ID NO: 930295 - DNA, 33 bp, Homo sapien
gaagagttcagttttacacacattgagttccag

SEQ ID NO: 930296 - DNA, 33 bp, Homo sapien
gaagagttcagttttatacacattgagttccag

SEQ ID NO: 930297 - DNA, 33 bp, Homo sapien
gccgaggcgggcaaaaagcttaagtccaggagt

SEQ ID NO: 930298 - DNA, 33 bp, Homo sapien
gccgaggcgggcaaaaggcttaagtccaggagt

SEQ ID NO: 930299 - DNA, 33 bp, Homo sapien
tctactctatgccaaaaacctttatatactgag

SEQ ID NO: 930300 - DNA, 33 bp, Homo sapien
tctactctatgccaaacacctttatatactgag

SEQ ID NO: 930301 - DNA, 33 bp, Homo sapien
ctgtagagacctcagcaaacattgtattaaaat

SEQ ID NO: 930302 - DNA, 33 bp, Homo sapien
ctgtagagacctcagcgaacattgtattaaaat

SEQ ID NO: 930303 - DNA, 33 bp, Homo sapien
tgttttcttactccaactcttagagactcattg

SEQ ID NO: 930304 - DNA, 33 bp, Homo sapien
tgttttcttactccaattcttagagactcattg

SEQ ID NO: 930305 - DNA, 33 bp, Homo sapien
gaacaagccagcaaagcagagtggactctggcg

SEQ ID NO: 930306 - DNA, 33 bp, Homo sapien
gaacaagccagcaaagtagagtggactctggcg

SEQ ID NO: 930307 - DNA, 33 bp, Homo sapien
agagtctagttaacacccagtaatcaaccacat

SEQ ID NO: 930308 - DNA, 33 bp, Homo sapien
agagtctagttaacactcagtaatcaaccacat

SEQ ID NO: 930309 - DNA, 33 bp, Homo sapien
tcattctggtgaattacgccacttatctttatc

SEQ ID NO: 930310 - DNA, 33 bp, Homo sapien
tcattctggtgaattatgccacttatctttatc

SEQ ID NO: 930311 - DNA, 33 bp, Homo sapien
tttgcctgaaagtgccacagatgttacagaaac

SEQ ID NO: 930312 - DNA, 33 bp, Homo sapien
tttgcctgaaagtgccgcagatgttacagaaac

SEQ ID NO: 930313 - DNA, 33 bp, Homo sapien
gaagtatttataccacaaaaatcagcagacact

SEQ ID NO: 930314 - DNA, 33 bp, Homo sapien
gaagtatttataccacgaaaatcagcagacact

SEQ ID NO: 930315 - DNA, 33 bp, Homo sapien
cccatttctattctgggaagatgatctccagat

SEQ ID NO: 930316 - DNA, 33 bp, Homo sapien
cccatttctattctggtaagatgatctccagat

SEQ ID NO: 930317 - DNA, 33 bp, Homo sapien
gcagcagggacccttaccatgcagctacagttc

SEQ ID NO: 930318 - DNA, 33 bp, Homo sapien
gcagcagggacccttatcatgcagctacagttc

SEQ ID NO: 930319 - DNA, 33 bp, Homo sapien
gagacttagctggtgaagatagaaatgaacttt

SEQ ID NO: 930320 - DNA, 33 bp, Homo sapien
gagacttagctggtgaggatagaaatgaacttt

SEQ ID NO: 930321 - DNA, 33 bp, Homo sapien
ataaatttctattggagagcattggtctagagg

SEQ ID NO: 930322 - DNA, 33 bp, Homo sapien
ataaatttctattggatagcattggtctagagg

SEQ ID NO: 930323 - DNA, 33 bp, Homo sapien
tcccccttccagagacacatttttgtcccaaac

SEQ ID NO: 930324 - DNA, 33 bp, Homo sapien
tcccccttccagagacgcatttttgtcccaaac

SEQ ID NO: 930325 - DNA, 33 bp, Homo sapien
ttctcttagatttgggaataagtcaatagtgtg

SEQ ID NO: 930326 - DNA, 33 bp, Homo sapien
ttctcttagatttggggataagtcaatagtgtg

SEQ ID NO: 930327 - DNA, 33 bp, Homo sapien
taaatatgcagagacactgctaaagacacagag

SEQ ID NO: 930328 - DNA, 33 bp, Homo sapien
taaatatgcagagacattgctaaagacacagag

SEQ ID NO: 930329 - DNA, 33 bp, Homo sapien
atctcttcttcaaaaaatatggttcctctatac

SEQ ID NO: 930330 - DNA, 33 bp, Homo sapien
atctcttcttcaaaaagtatggttcctctatac

SEQ ID NO: 930331 - DNA, 33 bp, Homo sapien
tgtcctctcaacacttaaactgaattcctacac

SEQ ID NO: 930332 - DNA, 33 bp, Homo sapien
tgtcctctcaacacttcaactgaattcctacac

SEQ ID NO: 930333 - DNA, 33 bp, Homo sapien
cgccaatgttcagcaccatctgaagactgttag

SEQ ID NO: 930334 - DNA, 33 bp, Homo sapien
cgccaatgttcagcactatctgaagactgttag

SEQ ID NO: 930335 - DNA, 33 bp, Homo sapien
agacttgccgtcaatacggtagaccgaacagaa

SEQ ID NO: 930336 - DNA, 33 bp, Homo sapien
agacttgccgtcaatatggtagaccgaacagaa

SEQ ID NO: 930337 - DNA, 33 bp, Homo sapien
tataaactgccaaaaccgggagatactcatcag

SEQ ID NO: 930338 - DNA, 33 bp, Homo sapien
tataaactgccaaaactgggagatactcatcag

SEQ ID NO: 930339 - DNA, 33 bp, Homo sapien
tagtgaatgaaaaatgcaagctgatatggtttg

SEQ ID NO: 930340 - DNA, 33 bp, Homo sapien
tagtgaatgaaaaatggaagctgatatggtttg

SEQ ID NO: 930341 - DNA, 33 bp, Homo sapien
gcaggaggaagccataagtcccggtatctctca

SEQ ID NO: 930342 - DNA, 33 bp, Homo sapien
gcaggaggaagccataggtcccggtatctctca

SEQ ID NO: 930343 - DNA, 33 bp, Homo sapien
tgcaccaaaggtataacgaagcatttcacataa

SEQ ID NO: 930344 - DNA, 33 bp, Homo sapien
tgcaccaaaggtataatgaagcatttcacataa

SEQ ID NO: 930345 - DNA, 33 bp, Homo sapien
tattttattattgcaaagaagaagacaaatctt

SEQ ID NO: 930346 - DNA, 33 bp, Homo sapien
tattttattattgcaaggaagaagacaaatctt

SEQ ID NO: 930347 - DNA, 33 bp, Homo sapien
tcatacctcatcaaatcagtctgtagggaattt

SEQ ID NO: 930348 - DNA, 33 bp, Homo sapien
tcatacctcatcaaattagtctgtagggaattt

SEQ ID NO: 930349 - DNA, 33 bp, Homo sapien
ccccaaactttttataataggcagtgagcctaa

SEQ ID NO: 930350 - DNA, 33 bp, Homo sapien
ccccaaactttttatactaggcagtgagcctaa

SEQ ID NO: 930351 - DNA, 33 bp, Homo sapien
caagagtctatcttcaactgctgggcctacatc

SEQ ID NO: 930352 - DNA, 33 bp, Homo sapien
caagagtctatcttcagctgctgggcctacatc

SEQ ID NO: 930353 - DNA, 33 bp, Homo sapien
caactagaagaataggcccagtgcacataactt

SEQ ID NO: 930354 - DNA, 33 bp, Homo sapien
caactagaagaataggtccagtgcacataactt

SEQ ID NO: 930355 - DNA, 33 bp, Homo sapien
gaagaggagacacagcaagcgtagagatggggt

SEQ ID NO: 930356 - DNA, 33 bp, Homo sapien
gaagaggagacacagcgagcgtagagatggggt

SEQ ID NO: 930357 - DNA, 33 bp, Homo sapien
ggttgcgtatccaagacgcctgtggtgtgggct

SEQ ID NO: 930358 - DNA, 33 bp, Homo sapien
ggttgcgtatccaagaggcctgtggtgtgggct

SEQ ID NO: 930359 - DNA, 33 bp, Homo sapien
agtgaattccagtgtcaatccagatggctgggt

SEQ ID NO: 930360 - DNA, 33 bp, Homo sapien
agtgaattccagtgtcgatccagatggctgggt

SEQ ID NO: 930361 - DNA, 33 bp, Homo sapien
aagggcaccttcagttcaacagttacactcagg

SEQ ID NO: 930362 - DNA, 33 bp, Homo sapien
aagggcaccttcagttgaacagttacactcagg

SEQ ID NO: 930363 - DNA, 33 bp, Homo sapien
agagaccgcttcacagaaaaatccatatctgtc

SEQ ID NO: 930364 - DNA, 33 bp, Homo sapien
agagaccgcttcacaggaaaatccatatctgtc

SEQ ID NO: 930365 - DNA, 33 bp, Homo sapien
gcaaatgactaatggccgaagaaggagactaga

SEQ ID NO: 930366 - DNA, 33 bp, Homo sapien
gcaaatgactaatggctgaagaaggagactaga

SEQ ID NO: 930367 - DNA, 33 bp, Homo sapien
catgtgtagtgtgagcaaaagagattcaaaatt

SEQ ID NO: 930368 - DNA, 33 bp, Homo sapien
catgtgtagtgtgagcgaaagagattcaaaatt

SEQ ID NO: 930369 - DNA, 33 bp, Homo sapien
ccacttgctcgatcacaggaatgaaaggctggc

SEQ ID NO: 930370 - DNA, 33 bp, Homo sapien
ccacttgctcgatcaccggaatgaaaggctggc

SEQ ID NO: 930371 - DNA, 33 bp, Homo sapien
ttatttgccgtaaaaacagaagtaggaccagga

SEQ ID NO: 930372 - DNA, 33 bp, Homo sapien
ttatttgccgtaaaaatagaagtaggaccagga

SEQ ID NO: 930373 - DNA, 33 bp, Homo sapien
gggaaactgaggcacacgagtgatggagtcact

SEQ ID NO: 930374 - DNA, 33 bp, Homo sapien
gggaaactgaggcacaggagtgatggagtcact

SEQ ID NO: 930375 - DNA, 33 bp, Homo sapien
aataggagagaaagggccaatcactttgggaat

SEQ ID NO: 930376 - DNA, 33 bp, Homo sapien
aataggagagaaagggtcaatcactttgggaat

SEQ ID NO: 930377 - DNA, 33 bp, Homo sapien
atttacctgtaacaaccagaagtaaagcctttc

SEQ ID NO: 930378 - DNA, 33 bp, Homo sapien
atttacctgtaacaactagaagtaaagcctttc

SEQ ID NO: 930379 - DNA, 33 bp, Homo sapien
gccacttcagaaatgcaatgtctccatccagga

SEQ ID NO: 930380 - DNA, 33 bp, Homo sapien
gccacttcagaaatgcgatgtctccatccagga

SEQ ID NO: 930381 - DNA, 33 bp, Homo sapien
gcaagattgtagaacacgaggttaatatacaaa

SEQ ID NO: 930382 - DNA, 33 bp, Homo sapien
gcaagattgtagaacatgaggttaatatacaaa

SEQ ID NO: 930383 - DNA, 33 bp, Homo sapien
gaacatggcaagaattgaatctgaatagaatct

SEQ ID NO: 930384 - DNA, 33 bp, Homo sapien
gaacatggcaagaatttaatctgaatagaatct

SEQ ID NO: 930385 - DNA, 33 bp, Homo sapien
atacggaaggctcgccaaagatctctaggtagt

SEQ ID NO: 930386 - DNA, 33 bp, Homo sapien
atacggaaggctcgccgaagatctctaggtagt

SEQ ID NO: 930387 - DNA, 33 bp, Homo sapien
aggtgcgccacggagacaccggggttctaaaaa

SEQ ID NO: 930388 - DNA, 33 bp, Homo sapien
aggtgcgccacggagataccggggttctaaaaa

SEQ ID NO: 930389 - DNA, 33 bp, Homo sapien
tgatacaaagaacaagaaactgtgaccaaattg

SEQ ID NO: 930390 - DNA, 33 bp, Homo sapien
tgatacaaagaacaagcaactgtgaccaaattg

SEQ ID NO: 930391 - DNA, 33 bp, Homo sapien
ccaggaggagatgagacagggggtattttattt

SEQ ID NO: 930392 - DNA, 33 bp, Homo sapien
ccaggaggagatgagagagggggtattttattt

SEQ ID NO: 930393 - DNA, 33 bp, Homo sapien
ttattcagaaaccaaacgtgtttaattagcttc

SEQ ID NO: 930394 - DNA, 33 bp, Homo sapien
ttattcagaaaccaaatgtgtttaattagcttc

SEQ ID NO: 930395 - DNA, 33 bp, Homo sapien; identical to SEQ ID NO: 930393

SEQ ID NO: 930396 - DNA, 33 bp, Homo sapien; identical to SEQ ID NO: 930394

SEQ ID NO: 930397 - DNA, 33 bp, Homo sapien
tttttcaacatttaggcccctttgataggcatg

SEQ ID NO: 930398 - DNA, 33 bp, Homo sapien
tttttcaacatttaggtccctttgataggcatg

SEQ ID NO: 930399 - DNA, 33 bp, Homo sapien
aaaaacctgtggtaaaaagcatacagatcatca

SEQ ID NO: 930400 - DNA, 33 bp, Homo sapien
aaaaacctgtggtaaagagcatacagatcatca

SEQ ID NO: 930401 - DNA, 33 bp, Homo sapien
actgactttaccaatactagaaactcattactg

SEQ ID NO: 930402 - DNA, 33 bp, Homo sapien
actgactttaccaatagtagaaactcattactg

SEQ ID NO: 930403 - DNA, 33 bp, Homo sapien
cttatgaggtatttccagaaagctttgttagaa

SEQ ID NO: 930404 - DNA, 33 bp, Homo sapien
cttatgaggtatttccggaaagctttgttagaa

SEQ ID NO: 930405 - DNA, 33 bp, Homo sapien
ttgattttctgaaaccaggacgtaacttctcac

SEQ ID NO: 930406 - DNA, 33 bp, Homo sapien
ttgattttctgaaaccgggacgtaacttctcac

SEQ ID NO: 930407 - DNA, 33 bp, Homo sapien
atgagtaacaagctacacatcgtggtttacgcc

SEQ ID NO: 930408 - DNA, 33 bp, Homo sapien
atgagtaacaagctacgcatcgtggtttacgcc

SEQ ID NO: 930409 - DNA, 33 bp, Homo sapien
acagataactgatttcaataaccttgcactaaa

SEQ ID NO: 930410 - DNA, 33 bp, Homo sapien
acagataactgatttctataaccttgcactaaa

SEQ ID NO: 930411 - DNA, 33 bp, Homo sapien
aaaaaaagtaccctcaatacaagttaggcgcta

SEQ ID NO: 930412 - DNA, 33 bp, Homo sapien
aaaaaaagtaccctcagtacaagttaggcgcta

SEQ ID NO: 930413 - DNA, 33 bp, Homo sapien
ggcaaagaaccagaaacgtgaatagggaaaaga

SEQ ID NO: 930414 - DNA, 33 bp, Homo sapien
ggcaaagaaccagaaatgtgaatagggaaaaga

SEQ ID NO: 930415 - DNA, 33 bp, Homo sapien
cccaagaagattgaaacgtgtgatatctacaat

SEQ ID NO: 930416 - DNA, 33 bp, Homo sapien
cccaagaagattgaaatgtgtgatatctacaat

SEQ ID NO: 930417 - DNA, 33 bp, Homo sapien
aatcattagcagaggaagtagagaaaatttaat

SEQ ID NO: 930418 - DNA, 33 bp, Homo sapien
aatcattagcagaggaggtagagaaaatttaat

SEQ ID NO: 930419 - DNA, 33 bp, Homo sapien
gcacaagacatgatgaggcttgctcttagaagt

SEQ ID NO: 930420 - DNA, 33 bp, Homo sapien
gcacaagacatgatgatgcttgctcttagaagt

SEQ ID NO: 930421 - DNA, 33 bp, Homo sapien
ttctgagtaatgaagcactaacaagagatttta

SEQ ID NO: 930422 - DNA, 33 bp, Homo sapien
ttctgagtaatgaagcgctaacaagagatttta

SEQ ID NO: 930423 - DNA, 33 bp, Homo sapien
aaaatggttagccatacgatctagcatttacac

SEQ ID NO: 930424 - DNA, 33 bp, Homo sapien
aaaatggttagccatatgatctagcatttacac

SEQ ID NO: 930425 - DNA, 33 bp, Homo sapien
aatttttggagatataaagtctcattatgttcc

SEQ ID NO: 930426 - DNA, 33 bp, Homo sapien
aatttttggagatatagagtctcattatgttcc

SEQ ID NO: 930427 - DNA, 33 bp, Homo sapien
cttcttatgggattgcccacggagagattaagg

SEQ ID NO: 930428 - DNA, 33 bp, Homo sapien
cttcttatgggattgctcacggagagattaagg

SEQ ID NO: 930429 - DNA, 33 bp, Homo sapien
atgctagcatacaataataatcacactccagtt

SEQ ID NO: 930430 - DNA, 33 bp, Homo sapien
atgctagcatacaatagtaatcacactccagtt

SEQ ID NO: 930431 - DNA, 33 bp, Homo sapien
tctgggcacatactcaatagcttggtggtccag

SEQ ID NO: 930432 - DNA, 33 bp, Homo sapien
tctgggcacatactcagtagcttggtggtccag

SEQ ID NO: 930433 - DNA, 33 bp, Homo sapien
attaaagggacctgcacaaaattaagatgtgag

SEQ ID NO: 930434 - DNA, 33 bp, Homo sapien
attaaagggacctgcataaaattaagatgtgag

SEQ ID NO: 930435 - DNA, 33 bp, Homo sapien
attgactgaatatttacatccaaaacactgaat

SEQ ID NO: 930436 - DNA, 33 bp, Homo sapien
attgactgaatatttatatccaaaacactgaat

SEQ ID NO: 930437 - DNA, 33 bp, Homo sapien
gtcttcttcagtttaaaatattcccattcaatt

SEQ ID NO: 930438 - DNA, 33 bp, Homo sapien
gtcttcttcagtttaagatattcccattcaatt

SEQ ID NO: 930439 - DNA, 33 bp, Homo sapien
catctggttaaacaaactgctttcccctatttt

SEQ ID NO: 930440 - DNA, 33 bp, Homo sapien
catctggttaaacaaattgctttcccctatttt

SEQ ID NO: 930441 - DNA, 33 bp, Homo sapien
tgactctgggaaagaaagatgggcagagagaaa

SEQ ID NO: 930442 - DNA, 33 bp, Homo sapien
tgactctgggaaagaaggatgggcagagagaaa

SEQ ID NO: 930443 - DNA, 33 bp, Homo sapien
ggtatgtaactttccaatctgggttttacaatt

SEQ ID NO: 930444 - DNA, 33 bp, Homo sapien
ggtatgtaactttccagtctgggttttacaatt

SEQ ID NO: 930445 - DNA, 33 bp, Homo sapien
tatttatttacagtgaacctctacacagccagg

SEQ ID NO: 930446 - DNA, 33 bp, Homo sapien
tatttatttacagtgagcctctacacagccagg

SEQ ID NO: 930447 - DNA, 33 bp, Homo sapien
ccaggcagtcctgttacggagccaagagatata

SEQ ID NO: 930448 - DNA, 33 bp, Homo sapien
ccaggcagtcctgttatggagccaagagatata

SEQ ID NO: 930449 - DNA, 33 bp, Homo sapien
ggatttggccaccttgcaacacacagcaccttc

SEQ ID NO: 930450 - DNA, 33 bp, Homo sapien
ggatttggccaccttgtaacacacagcaccttc

SEQ ID NO: 930451 - DNA, 33 bp, Homo sapien
agagacctacaacaagactcagataaccacata

SEQ ID NO: 930452 - DNA, 33 bp, Homo sapien
agagacctacaacaagtctcagataaccacata

SEQ ID NO: 930453 - DNA, 33 bp, Homo sapien
tcacacgccaggcctaagagccaaaccttcact

SEQ ID NO: 930454 - DNA, 33 bp, Homo sapien
tcacacgccaggcctaggagccaaaccttcact

SEQ ID NO: 930455 - DNA, 33 bp, Homo sapien
attcacataaaaaataccgctggtgagactggc

SEQ ID NO: 930456 - DNA, 33 bp, Homo sapien
attcacataaaaaatatcgctggtgagactggc

SEQ ID NO: 930457 - DNA, 33 bp, Homo sapien
gtctcggtttgtagcccggcagagtgcagtggc

SEQ ID NO: 930458 - DNA, 33 bp, Homo sapien
gtctcggtttgtagcctggcagagtgcagtggc

SEQ ID NO: 930459 - DNA, 33 bp, Homo sapien
tactgaatgaataggcaaatgaacaaaacctcc

SEQ ID NO: 930460 - DNA, 33 bp, Homo sapien
tactgaatgaataggcgaatgaacaaaacctcc

SEQ ID NO: 930461 - DNA, 33 bp, Homo sapien
ttaagaggataacaaaatgtcatttaaatataa

SEQ ID NO: 930462 - DNA, 33 bp, Homo sapien
ttaagaggataacaaagtgtcatttaaatataa

SEQ ID NO: 930463 - DNA, 33 bp, Homo sapien
aatatgttttcaattcgaagtcagttcacagcc

SEQ ID NO: 930464 - DNA, 33 bp, Homo sapien
aatatgttttcaattctaagtcagttcacagcc

SEQ ID NO: 930465 - DNA, 33 bp, Homo sapien
atgaactactagagagacaaccccatttctcaa

SEQ ID NO: 930466 - DNA, 33 bp, Homo sapien
atgaactactagagaggcaaccccatttctcaa

SEQ ID NO: 930467 - DNA, 33 bp, Homo sapien
tcatcctaaacactaaagagcaagaaggaaatt

SEQ ID NO: 930468 - DNA, 33 bp, Homo sapien
tcatcctaaacactaacgagcaagaaggaaatt

SEQ ID NO: 930469 - DNA, 33 bp, Homo sapien
catggagccatcaccacagtcaagttaacagac

SEQ ID NO: 930470 - DNA, 33 bp, Homo sapien
catggagccatcaccatagtcaagttaacagac

SEQ ID NO: 930471 - DNA, 33 bp, Homo sapien
tcccttccacagttcaagctttattacaggagg

SEQ ID NO: 930472 - DNA, 33 bp, Homo sapien
tcccttccacagttcaggctttattacaggagg

SEQ ID NO: 930473 - DNA, 33 bp, Homo sapien
ccaacctgagtattgacgctggactacagatgc

SEQ ID NO: 930474 - DNA, 33 bp, Homo sapien
ccaacctgagtattgaggctggactacagatgc

SEQ ID NO: 930475 - DNA, 33 bp, Homo sapien
aatggatgttttcttacaggaagcggatgaaca

SEQ ID NO: 930476 - DNA, 33 bp, Homo sapien
aatggatgttttcttataggaagcggatgaaca

SEQ ID NO: 930477 - DNA, 33 bp, Homo sapien
atctgtgggactcatcactgtgctctttgactt

SEQ ID NO: 930478 - DNA, 33 bp, Homo sapien
atctgtgggactcatcgctgtgctctttgactt

SEQ ID NO: 930479 - DNA, 33 bp, Homo sapien
ttgccatacattgacacattctggagtaactga

SEQ ID NO: 930480 - DNA, 33 bp, Homo sapien
ttgccatacattgacatattctggagtaactga

SEQ ID NO: 930481 - DNA, 33 bp, Homo sapien
caacggccacacctcacgttttctcccgcacag

SEQ ID NO: 930482 - DNA, 33 bp, Homo sapien
caacggccacacctcatgttttctcccgcacag

SEQ ID NO: 930483 - DNA, 33 bp, Homo sapien
gctcatccagtctccaatgacgattgtgctctc

SEQ ID NO: 930484 - DNA, 33 bp, Homo sapien
gctcatccagtctccagtgacgattgtgctctc

SEQ ID NO: 930485 - DNA, 33 bp, Homo sapien
aactttcactggtatacaactaactgggcacat

SEQ ID NO: 930486 - DNA, 33 bp, Homo sapien
aactttcactggtatagaactaactgggcacat

SEQ ID NO: 930487 - DNA, 33 bp, Homo sapien
caatgtatgtcacaaacgcgtatttgacaaggg

SEQ ID NO: 930488 - DNA, 33 bp, Homo sapien
caatgtatgtcacaaatgcgtatttgacaaggg

SEQ ID NO: 930489 - DNA, 33 bp, Homo sapien
atcacgaagggctttgcaggacaggccgagtgt

SEQ ID NO: 930490 - DNA, 33 bp, Homo sapien
atcacgaagggctttgtaggacaggccgagtgt

SEQ ID NO: 930491 - DNA, 33 bp, Homo sapien
ttgaagtgcctgcaacaggatttgtcttttctg

SEQ ID NO: 930492 - DNA, 33 bp, Homo sapien
ttgaagtgcctgcaacgggatttgtcttttctg

SEQ ID NO: 930493 - DNA, 33 bp, Homo sapien
gatagtgatgaaaacaaaggcatggtctctgtc

SEQ ID NO: 930494 - DNA, 33 bp, Homo sapien
gatagtgatgaaaacacaggcatggtctctgtc

SEQ ID NO: 930495 - DNA, 33 bp, Homo sapien
ccatttattcagcaaaactttcttgaacaccta

SEQ ID NO: 930496 - DNA, 33 bp, Homo sapien
ccatttattcagcaaacctttcttgaacaccta

SEQ ID NO: 930497 - DNA, 33 bp, Homo sapien
tgtctgcctcttggtgaagcatacaaccagcca

SEQ ID NO: 930498 - DNA, 33 bp, Homo sapien
tgtctgcctcttggtgcagcatacaaccagcca

SEQ ID NO: 930499 - DNA, 33 bp, Homo sapien
cccagaccagccctaccgctgtctggcattgaa

SEQ ID NO: 930500 - DNA, 33 bp, Homo sapien
cccagaccagccctactgctgtctggcattgaa

SEQ ID NO: 930501 - DNA, 33 bp, Homo sapien
ggtgctactttttactcaccctcaatttggaga

SEQ ID NO: 930502 - DNA, 33 bp, Homo sapien
ggtgctactttttacttaccctcaatttggaga

SEQ ID NO: 930503 - DNA, 33 bp, Homo sapien
aatgcatctggaactccacattttaatctgcca

SEQ ID NO: 930504 - DNA, 33 bp, Homo sapien
aatgcatctggaactctacattttaatctgcca

SEQ ID NO: 930505 - DNA, 33 bp, Homo sapien
taataccatttgatagccatttttttcatggca

SEQ ID NO: 930506 - DNA, 33 bp, Homo sapien
taataccatttgataggcatttttttcatggca

SEQ ID NO: 930507 - DNA, 33 bp, Homo sapien
agatacccagtatatacagagagaggtccagta

SEQ ID NO: 930508 - DNA, 33 bp, Homo sapien
agatacccagtatatatagagagaggtccagta

SEQ ID NO: 930509 - DNA, 33 bp, Homo sapien
agtggcttacataatacaattttggacatgaaa

SEQ ID NO: 930510 - DNA, 33 bp, Homo sapien
agtggcttacataatataattttggacatgaaa

SEQ ID NO: 930511 - DNA, 33 bp, Homo sapien
tctatcttcttttgacgatccacagcggtggga

SEQ ID NO: 930512 - DNA, 33 bp, Homo sapien
tctatcttcttttgactatccacagcggtggga

SEQ ID NO: 930513 - DNA, 33 bp, Homo sapien
actcacttaggttctcactgtgaatcagcactc

SEQ ID NO: 930514 - DNA, 33 bp, Homo sapien
actcacttaggttctcgctgtgaatcagcactc

SEQ ID NO: 930515 - DNA, 33 bp, Homo sapien
tacatttgaaatgtgacggctttgccaaatgag

SEQ ID NO: 930516 - DNA, 33 bp, Homo sapien
tacatttgaaatgtgatggctttgccaaatgag

SEQ ID NO: 930517 - DNA, 33 bp, Homo sapien
acttgcttatgttcccaaaatgtatccatatat

SEQ ID NO: 930518 - DNA, 33 bp, Homo sapien
acttgcttatgttcccgaaatgtatccatatat

SEQ ID NO: 930519 - DNA, 33 bp, Homo sapien
tcctgctgctcaagtacagtccatagtctatgc

SEQ ID NO: 930520 - DNA, 33 bp, Homo sapien
tcctgctgctcaagtatagtccatagtctatgc

SEQ ID NO: 930521 - DNA, 33 bp, Homo sapien
gattcagtacagaaaaatagaaacccacttaat

SEQ ID NO: 930522 - DNA, 33 bp, Homo sapien
gattcagtacagaaaagtagaaacccacttaat

SEQ ID NO: 930523 - DNA, 33 bp, Homo sapien
atgtgttagaaatgaccggctcatacgaaaggt

SEQ ID NO: 930524 - DNA, 33 bp, Homo sapien
atgtgttagaaatgactggctcatacgaaaggt

SEQ ID NO: 930525 - DNA, 33 bp, Homo sapien
tagtatggatattttaacagtagtaggtctttc

SEQ ID NO: 930526 - DNA, 33 bp, Homo sapien
tagtatggatattttaccagtagtaggtctttc

SEQ ID NO: 930527 - DNA, 33 bp, Homo sapien
aagacctgtactataacaagaagcagcttgtta

SEQ ID NO: 930528 - DNA, 33 bp, Homo sapien
aagacctgtactataagaagaagcagcttgtta

SEQ ID NO: 930529 - DNA, 33 bp, Homo sapien
gtgtattttgttagaaagtatgtgtgtatcacg

SEQ ID NO: 930530 - DNA, 33 bp, Homo sapien
gtgtattttgttagaaggtatgtgtgtatcacg

SEQ ID NO: 930531 - DNA, 33 bp, Homo sapien
gaaacaagaaatatacacaagatgaaacaggtt

SEQ ID NO: 930532 - DNA, 33 bp, Homo sapien
gaaacaagaaatatacgcaagatgaaacaggtt

SEQ ID NO: 930533 - DNA, 33 bp, Homo sapien
gaacgtaatatattagcccactttgctgcttta

SEQ ID NO: 930534 - DNA, 33 bp, Homo sapien
gaacgtaatatattaggccactttgctgcttta

SEQ ID NO: 930535 - DNA, 33 bp, Homo sapien
tttctcctcctttctcaatcagtaaatatttac

SEQ ID NO: 930536 - DNA, 33 bp, Homo sapien
tttctcctcctttctcgatcagtaaatatttac

SEQ ID NO: 930537 - DNA, 33 bp, Homo sapien
gcaaacttaactgttaaaataacatatcagctc

SEQ ID NO: 930538 - DNA, 33 bp, Homo sapien
gcaaacttaactgttacaataacatatcagctc

SEQ ID NO: 930539 - DNA, 33 bp, Homo sapien
gagaggggacacacgaagtagagactcagcctg

SEQ ID NO: 930540 - DNA, 33 bp, Homo sapien
gagaggggacacacgaggtagagactcagcctg

SEQ ID NO: 930541 - DNA, 33 bp, Homo sapien
ccagtgtccatactcccgctttatatagcaacc

SEQ ID NO: 930542 - DNA, 33 bp, Homo sapien
ccagtgtccatactcctgctttatatagcaacc

SEQ ID NO: 930543 - DNA, 33 bp, Homo sapien
tatgagggtgtaataaaggagaacaatcagcta

SEQ ID NO: 930544 - DNA, 33 bp, Homo sapien
tatgagggtgtaataagggagaacaatcagcta

SEQ ID NO: 930545 - DNA, 33 bp, Homo sapien
atatttttgcaacctgaatgacatgcgaaaaaa

SEQ ID NO: 930546 - DNA, 33 bp, Homo sapien
atatttttgcaacctggatgacatgcgaaaaaa

SEQ ID NO: 930547 - DNA, 33 bp, Homo sapien
agggacattaagggaaaaaagtgattaaatatc

SEQ ID NO: 930548 - DNA, 33 bp, Homo sapien
agggacattaagggaagaaagtgattaaatatc

SEQ ID NO: 930549 - DNA, 33 bp, Homo sapien
cattgcaaagctaaaaaaaactgttggcacatg

SEQ ID NO: 930550 - DNA, 33 bp, Homo sapien
cattgcaaagctaaaacaaactgttggcacatg

SEQ ID NO: 930551 - DNA, 33 bp, Homo sapien
ggcgttctcttttcacacggatgtgataaggat

SEQ ID NO: 930552 - DNA, 33 bp, Homo sapien
ggcgttctcttttcacccggatgtgataaggat

SEQ ID NO: 930553 - DNA, 33 bp, Homo sapien
ctttttgtattgggaaatgttgagaatttagaa

SEQ ID NO: 930554 - DNA, 33 bp, Homo sapien
ctttttgtattgggaattgttgagaatttagaa

SEQ ID NO: 930555 - DNA, 33 bp, Homo sapien
cagctgaggtccaagcaatcaaccagtttatct

SEQ ID NO: 930556 - DNA, 33 bp, Homo sapien
cagctgaggtccaagcgatcaaccagtttatct

SEQ ID NO: 930557 - DNA, 33 bp, Homo sapien
gtctagctaatctaacagggactcggagaactt

SEQ ID NO: 930558 - DNA, 33 bp, Homo sapien
gtctagctaatctaacggggactcggagaactt

SEQ ID NO: 930559 - DNA, 33 bp, Homo sapien
caggaccacaattgaccgtaaactctatatgag

SEQ ID NO: 930560 - DNA, 33 bp, Homo sapien
caggaccacaattgactgtaaactctatatgag

SEQ ID NO: 930561 - DNA, 33 bp, Homo sapien
gctgtctttctgcccccctccatgtggcgatga

SEQ ID NO: 930562 - DNA, 33 bp, Homo sapien
gctgtctttctgccccgctccatgtggcgatga

SEQ ID NO: 930563 - DNA, 33 bp, Homo sapien
tttagaaggaatttacactatttggcattaaca

SEQ ID NO: 930564 - DNA, 33 bp, Homo sapien
tttagaaggaatttacgctatttggcattaaca

SEQ ID NO: 930565 - DNA, 33 bp, Homo sapien
ggtactccgcagtgaaaaatagacttcgagttt

SEQ ID NO: 930566 - DNA, 33 bp, Homo sapien
ggtactccgcagtgaataatagacttcgagttt

SEQ ID NO: 930567 - DNA, 33 bp, Homo sapien
cattacaaagtcctacaatctgccacatcagtt

SEQ ID NO: 930568 - DNA, 33 bp, Homo sapien
cattacaaagtcctacgatctgccacatcagtt

SEQ ID NO: 930569 - DNA, 33 bp, Homo sapien
attaggccttgacagcagcgatgtggcagagaa

SEQ ID NO: 930570 - DNA, 33 bp, Homo sapien
attaggccttgacagcggcgatgtggcagagaa

SEQ ID NO: 930571 - DNA, 33 bp, Homo sapien
agtctcctaactcgtccattctctttagtcttc

SEQ ID NO: 930572 - DNA, 33 bp, Homo sapien
agtctcctaactcgtctattctctttagtcttc

SEQ ID NO: 930573 - DNA, 33 bp, Homo sapien
tccccagatcgagcgacgcaagaaaacaagaca

SEQ ID NO: 930574 - DNA, 33 bp, Homo sapien
tccccagatcgagcgatgcaagaaaacaagaca

SEQ ID NO: 930575 - DNA, 33 bp, Homo sapien
ctgagccttgtattgaaaaataaatgtgcagta

SEQ ID NO: 930576 - DNA, 33 bp, Homo sapien
ctgagccttgtattgacaaataaatgtgcagta

SEQ ID NO: 930577 - DNA, 33 bp, Homo sapien
attctcatgggtctcacggatctgagccctcct

SEQ ID NO: 930578 - DNA, 33 bp, Homo sapien
attctcatgggtctcatggatctgagccctcct

SEQ ID NO: 930579 - DNA, 33 bp, Homo sapien
tgaaaatgcaaatcaaagtaaaacccagatgtc

SEQ ID NO: 930580 - DNA, 33 bp, Homo sapien
tgaaaatgcaaatcaatgtaaaacccagatgtc

SEQ ID NO: 930581 - DNA, 33 bp, Homo sapien
gtctgtcatcttcttacgtattaacattatcga

SEQ ID NO: 930582 - DNA, 33 bp, Homo sapien
gtctgtcatcttcttatgtattaacattatcga

SEQ ID NO: 930583 - DNA, 33 bp, Homo sapien
tgtggcgattgaactaaacgcaaatgtggtttg

SEQ ID NO: 930584 - DNA, 33 bp, Homo sapien
tgtggcgattgaactacacgcaaatgtggtttg

SEQ ID NO: 930585 - DNA, 33 bp, Homo sapien
aactattcaataaacacgataatgtgctcaaac

SEQ ID NO: 930586 - DNA, 33 bp, Homo sapien
aactattcaataaacaggataatgtgctcaaac

SEQ ID NO: 930587 - DNA, 33 bp, Homo sapien
ataatcttgtctcaaccggatgtggaaaaaacc

SEQ ID NO: 930588 - DNA, 33 bp, Homo sapien
ataatcttgtctcaactggatgtggaaaaaacc

SEQ ID NO: 930589 - DNA, 33 bp, Homo sapien
tgctcagcacttggaacagtaactggtacacag

SEQ ID NO: 930590 - DNA, 33 bp, Homo sapien
tgctcagcacttggaatagtaactggtacacag

SEQ ID NO: 930591 - DNA, 33 bp, Homo sapien
acactgtgtattcccaagcttgaagatgttgga

SEQ ID NO: 930592 - DNA, 33 bp, Homo sapien
acactgtgtattcccaggcttgaagatgttgga

SEQ ID NO: 930593 - DNA, 33 bp, Homo sapien
atctaggtaacatcacaaaagaagagattttta

SEQ ID NO: 930594 - DNA, 33 bp, Homo sapien
atctaggtaacatcactaaagaagagattttta

SEQ ID NO: 930595 - DNA, 33 bp, Homo sapien
cctgacatcttttgacacaacccaagcagtttt

SEQ ID NO: 930596 - DNA, 33 bp, Homo sapien
cctgacatcttttgactcaacccaagcagtttt

SEQ ID NO: 930597 - DNA, 33 bp, Homo sapien
atttattatggattgacctgtaggatatattac

SEQ ID NO: 930598 - DNA, 33 bp, Homo sapien
atttattatggattgatctgtaggatatattac

SEQ ID NO: 930599 - DNA, 33 bp, Homo sapien
acaccctaaatttatagcaactctcaattcaaa

SEQ ID NO: 930600 - DNA, 33 bp, Homo sapien
acaccctaaatttatatcaactctcaattcaaa

SEQ ID NO: 930601 - DNA, 33 bp, Homo sapien
atataagtgtaaagaactgggaacatctaaatg

SEQ ID NO: 930602 - DNA, 33 bp, Homo sapien
atataagtgtaaagaattgggaacatctaaatg

SEQ ID NO: 930603 - DNA, 33 bp, Homo sapien
atcttttcctgggctaccgatgtgcagatacta

SEQ ID NO: 930604 - DNA, 33 bp, Homo sapien
atcttttcctgggctagcgatgtgcagatacta

SEQ ID NO: 930605 - DNA, 33 bp, Homo sapien
gtctcaaatagttatcaagacactgtagacatt

SEQ ID NO: 930606 - DNA, 33 bp, Homo sapien
gtctcaaatagttatcgagacactgtagacatt

SEQ ID NO: 930607 - DNA, 33 bp, Homo sapien
atgttatgactcctcaagtctatgtcagcagct

SEQ ID NO: 930608 - DNA, 33 bp, Homo sapien
atgttatgactcctcacgtctatgtcagcagct

SEQ ID NO: 930609 - DNA, 33 bp, Homo sapien
tccctcagtgggcttacggtctgttttattact

SEQ ID NO: 930610 - DNA, 33 bp, Homo sapien
tccctcagtgggcttatggtctgttttattact

SEQ ID NO: 930611 - DNA, 33 bp, Homo sapien
ttcaccattaaggagaaagaagattgcacatac

SEQ ID NO: 930612 - DNA, 33 bp, Homo sapien
ttcaccattaaggagagagaagattgcacatac

SEQ ID NO: 930613 - DNA, 33 bp, Homo sapien
tccttagctttgtttgaaagatgccagtgcctt

SEQ ID NO: 930614 - DNA, 33 bp, Homo sapien
tccttagctttgtttgcaagatgccagtgcctt

SEQ ID NO: 930615 - DNA, 33 bp, Homo sapien
gctgaattgagggttaaagcatggacatataaa

SEQ ID NO: 930616 - DNA, 33 bp, Homo sapien
gctgaattgagggttagagcatggacatataaa

SEQ ID NO: 930617 - DNA, 33 bp, Homo sapien
atttaaaaatcatctggattggcatgcaccagt

SEQ ID NO: 930618 - DNA, 33 bp, Homo sapien
atttaaaaatcatctgtattggcatgcaccagt

SEQ ID NO: 930619 - DNA, 33 bp, Homo sapien
tactagattttaaagaccttgaaggcagagacc

SEQ ID NO: 930620 - DNA, 33 bp, Homo sapien
tactagattttaaagatcttgaaggcagagacc

SEQ ID NO: 930621 - DNA, 33 bp, Homo sapien
gaagaggtggtagagcaatgaatcagactgggt

SEQ ID NO: 930622 - DNA, 33 bp, Homo sapien
gaagaggtggtagagcgatgaatcagactgggt

SEQ ID NO: 930623 - DNA, 33 bp, Homo sapien
atcccttgggttttgaacttctagacttgccta

SEQ ID NO: 930624 - DNA, 33 bp, Homo sapien
atcccttgggttttgaccttctagacttgccta

SEQ ID NO: 930625 - DNA, 33 bp, Homo sapien
acgtggagagaacagaaggttccgacatcctca

SEQ ID NO: 930626 - DNA, 33 bp, Homo sapien
acgtggagagaacagatggttccgacatcctca

SEQ ID NO: 930627 - DNA, 33 bp, Homo sapien
aataggaaagagaaaaaatgatgtgtggactta

SEQ ID NO: 930628 - DNA, 33 bp, Homo sapien
aataggaaagagaaaagatgatgtgtggactta

SEQ ID NO: 930629 - DNA, 33 bp, Homo sapien
catggtgaatgtcagacaagtgtgaaataaact

SEQ ID NO: 930630 - DNA, 33 bp, Homo sapien
catggtgaatgtcagataagtgtgaaataaact

SEQ ID NO: 930631 - DNA, 33 bp, Homo sapien
cataatcatagaatctcagagttggagagtgtg

SEQ ID NO: 930632 - DNA, 33 bp, Homo sapien
cataatcatagaatctgagagttggagagtgtg

SEQ ID NO: 930633 - DNA, 33 bp, Homo sapien
gttctatacggactgcagaaatgacatgattgt

SEQ ID NO: 930634 - DNA, 33 bp, Homo sapien
gttctatacggactgcggaaatgacatgattgt

SEQ ID NO: 930635 - DNA, 33 bp, Homo sapien
aacctcatgtgttacccgcttgcaacacatgat

SEQ ID NO: 930636 - DNA, 33 bp, Homo sapien
aacctcatgtgttacctgcttgcaacacatgat

SEQ ID NO: 930637 - DNA, 33 bp, Homo sapien
cgctcctaaatgtccaatcaaaactgccccagt

SEQ ID NO: 930638 - DNA, 33 bp, Homo sapien
cgctcctaaatgtccagtcaaaactgccccagt

SEQ ID NO: 930639 - DNA, 33 bp, Homo sapien
cagaattctatctggaagggtcaggaaccacta

SEQ ID NO: 930640 - DNA, 33 bp, Homo sapien
cagaattctatctggaggggtcaggaaccacta

SEQ ID NO: 930641 - DNA, 33 bp, Homo sapien
gttatcaagatcctatcaggagatgatttccag

SEQ ID NO: 930642 - DNA, 33 bp, Homo sapien
gttatcaagatcctattaggagatgatttccag

SEQ ID NO: 930643 - DNA, 33 bp, Homo sapien
atttaatgaaaagcaactaagaagaagctggta

SEQ ID NO: 930644 - DNA, 33 bp, Homo sapien
atttaatgaaaagcaagtaagaagaagctggta

SEQ ID NO: 930645 - DNA, 33 bp, Homo sapien
cagtttagcttgttgcacacattgagctaccag

SEQ ID NO: 930646 - DNA, 33 bp, Homo sapien
cagtttagcttgttgcgcacattgagctaccag

SEQ ID NO: 930647 - DNA, 33 bp, Homo sapien
ggcatgggccaatcaaaagaattttggcttacc

SEQ ID NO: 930648 - DNA, 33 bp, Homo sapien
ggcatgggccaatcaagagaattttggcttacc

SEQ ID NO: 930649 - DNA, 33 bp, Homo sapien
tccaagtttcacttaacctctctcaatcttcat

SEQ ID NO: 930650 - DNA, 33 bp, Homo sapien
tccaagtttcacttaatctctctcaatcttcat

SEQ ID NO: 930651 - DNA, 33 bp, Homo sapien
cttagtcacagctctagcctcatgtctgaaaca

SEQ ID NO: 930652 - DNA, 33 bp, Homo sapien
cttagtcacagctctatcctcatgtctgaaaca

SEQ ID NO: 930653 - DNA, 33 bp, Homo sapien
aatttaattttcagaacggagagatatactcag

SEQ ID NO: 930654 - DNA, 33 bp, Homo sapien
aatttaattttcagaatggagagatatactcag

SEQ ID NO: 930655 - DNA, 33 bp, Homo sapien
agcgaaatactgaatccgatcataggtttgtta

SEQ ID NO: 930656 - DNA, 33 bp, Homo sapien
agcgaaatactgaatctgatcataggtttgtta

SEQ ID NO: 930657 - DNA, 33 bp, Homo sapien
ttctgcttgtttgttagggtctatagctcagtt

SEQ ID NO: 930658 - DNA, 33 bp, Homo sapien
ttctgcttgtttgttatggtctatagctcagtt

SEQ ID NO: 930659 - DNA, 33 bp, Homo sapien
ttttaattaaagctataaagtcattatctgtgt

SEQ ID NO: 930660 - DNA, 33 bp, Homo sapien
ttttaattaaagctatgaagtcattatctgtgt

SEQ ID NO: 930661 - DNA, 33 bp, Homo sapien
acaaacaaaaatgagactcaacctcctcccatc

SEQ ID NO: 930662 - DNA, 33 bp, Homo sapien
acaaacaaaaatgagattcaacctcctcccatc

SEQ ID NO: 930663 - DNA, 33 bp, Homo sapien
ggtctactttcccagacactacaagacagtacc

SEQ ID NO: 930664 - DNA, 33 bp, Homo sapien
ggtctactttcccagatactacaagacagtacc

SEQ ID NO: 930665 - DNA, 33 bp, Homo sapien
tttctcataactcaggaacttttcaaaagtgac

SEQ ID NO: 930666 - DNA, 33 bp, Homo sapien
tttctcataactcagggacttttcaaaagtgac

SEQ ID NO: 930667 - DNA, 33 bp, Homo sapien
taacaagaaacagaccccaaatataaagctaca

SEQ ID NO: 930668 - DNA, 33 bp, Homo sapien
taacaagaaacagacctcaaatataaagctaca

SEQ ID NO: 930669 - DNA, 33 bp, Homo sapien
tatttgattcattacaactgacaaattatgtta

SEQ ID NO: 930670 - DNA, 33 bp, Homo sapien
tatttgattcattacagctgacaaattatgtta

SEQ ID NO: 930671 - DNA, 33 bp, Homo sapien
ttccatgttaacaaaactggtgcataagtagta

SEQ ID NO: 930672 - DNA, 33 bp, Homo sapien
ttccatgttaacaaaattggtgcataagtagta

SEQ ID NO: 930673 - DNA, 33 bp, Homo sapien
agtcagtcctgtatgccgcaagttcagatgtta

SEQ ID NO: 930674 - DNA, 33 bp, Homo sapien
agtcagtcctgtatgctgcaagttcagatgtta

SEQ ID NO: 930675 - DNA, 33 bp, Homo sapien
gtaaagtacccagaaagatccagaggtgatatg

SEQ ID NO: 930676 - DNA, 33 bp, Homo sapien
gtaaagtacccagaaatatccagaggtgatatg

SEQ ID NO: 930677 - DNA, 33 bp, Homo sapien
gtaatactccttctacaatcctaagatgggtct

SEQ ID NO: 930678 - DNA, 33 bp, Homo sapien
gtaatactccttctacgatcctaagatgggtct

SEQ ID NO: 930679 - DNA, 33 bp, Homo sapien
tgaccttattaagcaacgctgcgttttaccttt

SEQ ID NO: 930680 - DNA, 33 bp, Homo sapien
tgaccttattaagcaatgctgcgttttaccttt

SEQ ID NO: 930681 - DNA, 33 bp, Homo sapien
cctttcattcctttcaacctagtgcctcttttt

SEQ ID NO: 930682 - DNA, 33 bp, Homo sapien
cctttcattcctttcaccctagtgcctcttttt

SEQ ID NO: 930683 - DNA, 33 bp, Homo sapien
acccccaatccgcaaacagcttggagggaaaaa

SEQ ID NO: 930684 - DNA, 33 bp, Homo sapien
acccccaatccgcaaatagcttggagggaaaaa

SEQ ID NO: 930685 - DNA, 33 bp, Homo sapien
accctctttttggatgcagcttggtaggctgtg

SEQ ID NO: 930686 - DNA, 33 bp, Homo sapien
accctctttttggatgtagcttggtaggctgtg

SEQ ID NO: 930687 - DNA, 33 bp, Homo sapien
tctgagcttaagcaaaaaagacatgggccctgt

SEQ ID NO: 930688 - DNA, 33 bp, Homo sapien
tctgagcttaagcaaagaagacatgggccctgt

SEQ ID NO: 930689 - DNA, 33 bp, Homo sapien
tgaacagcgttggccacaggaagctattgacac

SEQ ID NO: 930690 - DNA, 33 bp, Homo sapien
tgaacagcgttggccataggaagctattgacac

SEQ ID NO: 930691 - DNA, 33 bp, Homo sapien
gccaaatgtctcctgacggcgacaaaatcactg

SEQ ID NO: 930692 - DNA, 33 bp, Homo sapien
gccaaatgtctcctgagggcgacaaaatcactg

SEQ ID NO: 930693 - DNA, 33 bp, Homo sapien
gccactatcaattataagatgcactattatttt

SEQ ID NO: 930694 - DNA, 33 bp, Homo sapien
gccactatcaattataggatgcactattatttt

SEQ ID NO: 930695 - DNA, 33 bp, Homo sapien
agggagcacagggttcaatgacctctacagtct

SEQ ID NO: 930696 - DNA, 33 bp, Homo sapien
agggagcacagggttcgatgacctctacagtct

SEQ ID NO: 930697 - DNA, 33 bp, Homo sapien
gccattcccaatggctcagaacatccacactgt

SEQ ID NO: 930698 - DNA, 33 bp, Homo sapien
gccattcccaatggctgagaacatccacactgt

SEQ ID NO: 930699 - DNA, 33 bp, Homo sapien
gggatcccagggctagaagggagtgtacagtgg

SEQ ID NO: 930700 - DNA, 33 bp, Homo sapien
gggatcccagggctaggagggagtgtacagtgg

SEQ ID NO: 930701 - DNA, 33 bp, Homo sapien
aatttaaagccctccaatcagattctgccaagc

SEQ ID NO: 930702 - DNA, 33 bp, Homo sapien
aatttaaagccctccagtcagattctgccaagc

SEQ ID NO: 930703 - DNA, 33 bp, Homo sapien
actgagtctgcacataaggatgcacttaggtaa

SEQ ID NO: 930704 - DNA, 33 bp, Homo sapien
actgagtctgcacatacggatgcacttaggtaa

SEQ ID NO: 930705 - DNA, 33 bp, Homo sapien
gctacatacttttcccagagacctgaggccctg

SEQ ID NO: 930706 - DNA, 33 bp, Homo sapien
gctacatacttttcccggagacctgaggccctg

SEQ ID NO: 930707 - DNA, 33 bp, Homo sapien
gaaactgtaacacactaaatacatagaatgagg

SEQ ID NO: 930708 - DNA, 33 bp, Homo sapien
gaaactgtaacacactgaatacatagaatgagg

SEQ ID NO: 930709 - DNA, 33 bp, Homo sapien
aggcacctctacgctacagacagttgtcgagcc

SEQ ID NO: 930710 - DNA, 33 bp, Homo sapien
aggcacctctacgctatagacagttgtcgagcc

SEQ ID NO: 930711 - DNA, 33 bp, Homo sapien
tagaagtctgagtgcacggtgtgggcaatgttg

SEQ ID NO: 930712 - DNA, 33 bp, Homo sapien
tagaagtctgagtgcagggtgtgggcaatgttg

SEQ ID NO: 930713 - DNA, 33 bp, Homo sapien
gtagcgaattaggtgaaactagcatgtggaatg

SEQ ID NO: 930714 - DNA, 33 bp, Homo sapien
gtagcgaattaggtgacactagcatgtggaatg

SEQ ID NO: 930715 - DNA, 33 bp, Homo sapien
gtgctagtcttccaaacgaaaaatcgagagcct

SEQ ID NO: 930716 - DNA, 33 bp, Homo sapien
gtgctagtcttccaaatgaaaaatcgagagcct

SEQ ID NO: 930717 - DNA, 33 bp, Homo sapien
taaagtggacaatcaactgacgttagctgtagt

SEQ ID NO: 930718 - DNA, 33 bp, Homo sapien
taaagtggacaatcaattgacgttagctgtagt

SEQ ID NO: 930719 - DNA, 33 bp, Homo sapien
cattcgagcagtcacgacaaagacctggtgtcc

SEQ ID NO: 930720 - DNA, 33 bp, Homo sapien
cattcgagcagtcacgtcaaagacctggtgtcc

SEQ ID NO: 930721 - DNA, 33 bp, Homo sapien
agggtgtaataatggacattggagactccaaaa

SEQ ID NO: 930722 - DNA, 33 bp, Homo sapien
agggtgtaataatggatattggagactccaaaa

SEQ ID NO: 930723 - DNA, 33 bp, Homo sapien
ctttctcatcatcatcacagaaaatcaatgtta

SEQ ID NO: 930724 - DNA, 33 bp, Homo sapien
ctttctcatcatcatcgcagaaaatcaatgtta

SEQ ID NO: 930725 - DNA, 33 bp, Homo sapien
gactttattttggtcacaaaagggacagggtgg

SEQ ID NO: 930726 - DNA, 33 bp, Homo sapien
gactttattttggtcataaaagggacagggtgg

SEQ ID NO: 930727 - DNA, 33 bp, Homo sapien
tgtggccaagaaaggcaagcctggcatgaatgg

SEQ ID NO: 930728 - DNA, 33 bp, Homo sapien
tgtggccaagaaaggcgagcctggcatgaatgg

SEQ ID NO: 930729 - DNA, 33 bp, Homo sapien
ctgcaacagctattaaaatattcctcactttct

SEQ ID NO: 930730 - DNA, 33 bp, Homo sapien
ctgcaacagctattaagatattcctcactttct

SEQ ID NO: 930731 - DNA, 33 bp, Homo sapien
aggagctccgacaccaagaagtttaagggccac

SEQ ID NO: 930732 - DNA, 33 bp, Homo sapien
aggagctccgacaccaggaagtttaagggccac

SEQ ID NO: 930733 - DNA, 33 bp, Homo sapien
gttggtggccttgtgacgagagtgaaggggaac

SEQ ID NO: 930734 - DNA, 33 bp, Homo sapien
gttggtggccttgtgatgagagtgaaggggaac

SEQ ID NO: 930735 - DNA, 33 bp, Homo sapien
ggagccaaggaactgcagaaagctgaccatggt

SEQ ID NO: 930736 - DNA, 33 bp, Homo sapien
ggagccaaggaactgcggaaagctgaccatggt

SEQ ID NO: 930737 - DNA, 33 bp, Homo sapien
agggagacgtctcaaaaaaggtggtgctaaagc

SEQ ID NO: 930738 - DNA, 33 bp, Homo sapien
agggagacgtctcaaagaaggtggtgctaaagc

SEQ ID NO: 930739 - DNA, 33 bp, Homo sapien
atgagaggctgggttcaatagctcacgcctgta

SEQ ID NO: 930740 - DNA, 33 bp, Homo sapien
atgagaggctgggttcgatagctcacgcctgta

SEQ ID NO: 930741 - DNA, 33 bp, Homo sapien
tcttggcctctgtcctcactaatgtgatcgtga

SEQ ID NO: 930742 - DNA, 33 bp, Homo sapien
tcttggcctctgtcctgactaatgtgatcgtga

SEQ ID NO: 930743 - DNA, 33 bp, Homo sapien
tgctgtggcatttaagaagatggaacccaggag

SEQ ID NO: 930744 - DNA, 33 bp, Homo sapien
tgctgtggcatttaaggagatggaacccaggag

SEQ ID NO: 930745 - DNA, 33 bp, Homo sapien
gggctaaagaggccaaatgactacagaacccac

SEQ ID NO: 930746 - DNA, 33 bp, Homo sapien
gggctaaagaggccaactgactacagaacccac

SEQ ID NO: 930747 - DNA, 33 bp, Homo sapien
ggagccccatccaggccgcctaactgaagctgg

SEQ ID NO: 930748 - DNA, 33 bp, Homo sapien
ggagccccatccaggctgcctaactgaagctgg

SEQ ID NO: 930749 - DNA, 33 bp, Homo sapien
ttaaaaaggtgcatgacgaattaaggcccagga

SEQ ID NO: 930750 - DNA, 33 bp, Homo sapien
ttaaaaaggtgcatgatgaattaaggcccagga

SEQ ID NO: 930751 - DNA, 33 bp, Homo sapien
tggcaaagtgggaaccaagtggacctatcagga

SEQ ID NO: 930752 - DNA, 33 bp, Homo sapien
tggcaaagtgggaaccgagtggacctatcagga

SEQ ID NO: 930753 - DNA, 33 bp, Homo sapien
ccccatgctaagataacgtggcataagaaactg

SEQ ID NO: 930754 - DNA, 33 bp, Homo sapien
ccccatgctaagataatgtggcataagaaactg

SEQ ID NO: 930755 - DNA, 33 bp, Homo sapien
cggtctatgaagctcccggaagccaggtgtgta

SEQ ID NO: 930756 - DNA, 33 bp, Homo sapien
cggtctatgaagctcctggaagccaggtgtgta

SEQ ID NO: 930757 - DNA, 33 bp, Homo sapien
gaagaacatcttgcacaatatgaatcaaagaaa

SEQ ID NO: 930758 - DNA, 33 bp, Homo sapien
gaagaacatcttgcacgatatgaatcaaagaaa

SEQ ID NO: 930759 - DNA, 33 bp, Homo sapien; identical to SEQ ID NO: 930757

SEQ ID NO: 930760 - DNA, 33 bp, Homo sapien; identical to SEQ ID NO: 930758

SEQ ID NO: 930761 - DNA, 33 bp, Homo sapien
cttattctttaggaaccctggtctacctgggaa

SEQ ID NO: 930762 - DNA, 33 bp, Homo sapien
cttattctttaggaactctggtctacctgggaa

SEQ ID NO: 930763 - DNA, 33 bp, Homo sapien
ggtaagattttttcagccctgttgctcttcctt

SEQ ID NO: 930764 - DNA, 33 bp, Homo sapien
ggtaagattttttcagtcctgttgctcttcctt

SEQ ID NO: 930765 - DNA, 33 bp, Homo sapien
gataccagtgaagatacgaagaataaaaaatgg

SEQ ID NO: 930766 - DNA, 33 bp, Homo sapien
gataccagtgaagatatgaagaataaaaaatgg

SEQ ID NO: 930767 - DNA, 33 bp, Homo sapien
gtttgcagagttaataagaaaatcagttggtgt

SEQ ID NO: 930768 - DNA, 33 bp, Homo sapien
gtttgcagagttaatatgaaaatcagttggtgt

SEQ ID NO: 930769 - DNA, 33 bp, Homo sapien
gacagaaggcagtataaaggcacttcccatcat

SEQ ID NO: 930770 - DNA, 33 bp, Homo sapien
gacagaaggcagtatacaggcacttcccatcat

SEQ ID NO: 930771 - DNA, 33 bp, Homo sapien
ctgctactaatgatgaagagtgatttgaatgtg

SEQ ID NO: 930772 - DNA, 33 bp, Homo sapien
ctgctactaatgatgatgagtgatttgaatgtg

SEQ ID NO: 930773 - DNA, 33 bp, Homo sapien
caagaaggtctgaaaaaggctacttatctccaa

SEQ ID NO: 930774 - DNA, 33 bp, Homo sapien
caagaaggtctgaaaagggctacttatctccaa

SEQ ID NO: 930775 - DNA, 33 bp, Homo sapien
tgccctaatgctctgacgctctattatctttca

SEQ ID NO: 930776 - DNA, 33 bp, Homo sapien
tgccctaatgctctgaggctctattatctttca

SEQ ID NO: 930777 - DNA, 33 bp, Homo sapien
cacaggctccgacaagacccatttccgcactaa

SEQ ID NO: 930778 - DNA, 33 bp, Homo sapien
cacaggctccgacaagtcccatttccgcactaa

SEQ ID NO: 930779 - DNA, 33 bp, Homo sapien
agcaggataccctagaagacctggccagtggaa

SEQ ID NO: 930780 - DNA, 33 bp, Homo sapien
agcaggataccctagaggacctggccagtggaa

SEQ ID NO: 930781 - DNA, 33 bp, Homo sapien
ccagcttgtcctcatccatgcacctgggtcgat

SEQ ID NO: 930782 - DNA, 33 bp, Homo sapien
ccagcttgtcctcatctatgcacctgggtcgat

SEQ ID NO: 930783 - DNA, 33 bp, Homo sapien
ggaattcctgttgcaccatatcattgccaggat

SEQ ID NO: 930784 - DNA, 33 bp, Homo sapien
ggaattcctgttgcactatatcattgccaggat

SEQ ID NO: 930785 - DNA, 33 bp, Homo sapien
aaacttagagaaaatcactgtgaccttagatta

SEQ ID NO: 930786 - DNA, 33 bp, Homo sapien
aaacttagagaaaatccctgtgaccttagatta

SEQ ID NO: 930787 - DNA, 33 bp, Homo sapien
atttaatggagagaacagtcttttcaacaaatg

SEQ ID NO: 930788 - DNA, 33 bp, Homo sapien
atttaatggagagaaccgtcttttcaacaaatg

SEQ ID NO: 930789 - DNA, 33 bp, Homo sapien
tctcataaatggcatcactaaaactctgcagct

SEQ ID NO: 930790 - DNA, 33 bp, Homo sapien
tctcataaatggcatcgctaaaactctgcagct

SEQ ID NO: 930791 - DNA, 33 bp, Homo sapien
agaagtcaccaaaatacaaggaaacggccttgc

SEQ ID NO: 930792 - DNA, 33 bp, Homo sapien
agaagtcaccaaaatagaaggaaacggccttgc

SEQ ID NO: 930793 - DNA, 33 bp, Homo sapien
ttaaactcctctctaaagccccaaatgcaaata

SEQ ID NO: 930794 - DNA, 33 bp, Homo sapien
ttaaactcctctctaaggccccaaatgcaaata

SEQ ID NO: 930795 - DNA, 33 bp, Homo sapien
cagggttggagtaaaccgagaacagagacctga

SEQ ID NO: 930796 - DNA, 33 bp, Homo sapien
cagggttggagtaaactgagaacagagacctga

SEQ ID NO: 930797 - DNA, 33 bp, Homo sapien
cagtcgtaagaagttccacttgacaagctgacc

SEQ ID NO: 930798 - DNA, 33 bp, Homo sapien
cagtcgtaagaagttctacttgacaagctgacc

SEQ ID NO: 930799 - DNA, 33 bp, Homo sapien
ctcattcttggcaaaggcttcctttcttggtgc

SEQ ID NO: 930800 - DNA, 33 bp, Homo sapien
ctcattcttggcaaagtcttcctttcttggtgc

SEQ ID NO: 930801 - DNA, 33 bp, Homo sapien
atcatttcaaatgcaaaaagcgcttgcaagctt

SEQ ID NO: 930802 - DNA, 33 bp, Homo sapien
atcatttcaaatgcaacaagcgcttgcaagctt

SEQ ID NO: 930803 - DNA, 33 bp, Homo sapien
tgcagactcttcagaagaataacataatttaag

SEQ ID NO: 930804 - DNA, 33 bp, Homo sapien
tgcagactcttcagaataataacataatttaag

SEQ ID NO: 930805 - DNA, 33 bp, Homo sapien
atcatcggctcactcaggggtaaggctatatcc

SEQ ID NO: 930806 - DNA, 33 bp, Homo sapien
atcatcggctcactcatgggtaaggctatatcc

SEQ ID NO: 930807 - DNA, 33 bp, Homo sapien
gcagacaggaccagggaaaagtagacagatttg

SEQ ID NO: 930808 - DNA, 33 bp, Homo sapien
gcagacaggaccagggcaaagtagacagatttg

SEQ ID NO: 930809 - DNA, 33 bp, Homo sapien
tgtgaaagcattagaccgatgtttcaaagcctg

SEQ ID NO: 930810 - DNA, 33 bp, Homo sapien
tgtgaaagcattagactgatgtttcaaagcctg

SEQ ID NO: 930811 - DNA, 33 bp, Homo sapien
atgcagtgtatcccaacattgaggtgttctgtc

SEQ ID NO: 930812 - DNA, 33 bp, Homo sapien
atgcagtgtatcccaatattgaggtgttctgtc

SEQ ID NO: 930813 - DNA, 33 bp, Homo sapien
agtcacttttttttacagaatagtcactagggg

SEQ ID NO: 930814 - DNA, 33 bp, Homo sapien
agtcacttttttttactgaatagtcactagggg

SEQ ID NO: 930815 - DNA, 33 bp, Homo sapien
aactgtgtcaccttctcaagacaacaccaagca

SEQ ID NO: 930816 - DNA, 33 bp, Homo sapien
aactgtgtcaccttctgaagacaacaccaagca

SEQ ID NO: 930817 - DNA, 33 bp, Homo sapien
ctcttgggttcatgacagtggctagaggtgatg

SEQ ID NO: 930818 - DNA, 33 bp, Homo sapien
ctcttgggttcatgaccgtggctagaggtgatg

SEQ ID NO: 930819 - DNA, 33 bp, Homo sapien
ctctcctggaatcagacagaaaggaacagaatg

SEQ ID NO: 930820 - DNA, 33 bp, Homo sapien
ctctcctggaatcagatagaaaggaacagaatg

SEQ ID NO: 930821 - DNA, 33 bp, Homo sapien
tgaaaagagagataccaaagaattggaagtcac

SEQ ID NO: 930822 - DNA, 33 bp, Homo sapien
tgaaaagagagataccgaagaattggaagtcac

SEQ ID NO: 930823 - DNA, 33 bp, Homo sapien
acgagtgcatctccaactcatctccagggatct

SEQ ID NO: 930824 - DNA, 33 bp, Homo sapien
acgagtgcatctccaattcatctccagggatct

SEQ ID NO: 930825 - DNA, 33 bp, Homo sapien
tccaagctttctgagccatcctatccttctaga

SEQ ID NO: 930826 - DNA, 33 bp, Homo sapien
tccaagctttctgagctatcctatccttctaga

SEQ ID NO: 930827 - DNA, 33 bp, Homo sapien
aacaggagatggaaagaaaaaacaataacctgg

SEQ ID NO: 930828 - DNA, 33 bp, Homo sapien
aacaggagatggaaaggaaaaacaataacctgg

SEQ ID NO: 930829 - DNA, 33 bp, Homo sapien
ttccttgcaaaattaacagacaggcttaaagag

SEQ ID NO: 930830 - DNA, 33 bp, Homo sapien
ttccttgcaaaattaagagacaggcttaaagag

SEQ ID NO: 930831 - DNA, 33 bp, Homo sapien
attgagaccatcaaacaggtagtgttaagggaa

SEQ ID NO: 930832 - DNA, 33 bp, Homo sapien
attgagaccatcaaacgggtagtgttaagggaa

SEQ ID NO: 930833 - DNA, 33 bp, Homo sapien
atcatttccttttcagaagtctacaggtaaaaa

SEQ ID NO: 930834 - DNA, 33 bp, Homo sapien
atcatttccttttcaggagtctacaggtaaaaa

SEQ ID NO: 930835 - DNA, 33 bp, Homo sapien
aagtaatggctgtagaatcctttgaggtccttg

SEQ ID NO: 930836 - DNA, 33 bp, Homo sapien
aagtaatggctgtagagtcctttgaggtccttg

SEQ ID NO: 930837 - DNA, 33 bp, Homo sapien
catgagacctgattcacgttcacaaaatcttca

SEQ ID NO: 930838 - DNA, 33 bp, Homo sapien
catgagacctgattcatgttcacaaaatcttca

SEQ ID NO: 930839 - DNA, 33 bp, Homo sapien
ctgtctcaagaaaaaaaaagtgactcaccaagt

SEQ ID NO: 930840 - DNA, 33 bp, Homo sapien
ctgtctcaagaaaaaagaagtgactcaccaagt

SEQ ID NO: 930841 - DNA, 33 bp, Homo sapien
tactttggaattatagaagacttggtgagtcac

SEQ ID NO: 930842 - DNA, 33 bp, Homo sapien
tactttggaattataggagacttggtgagtcac

SEQ ID NO: 930843 - DNA, 33 bp, Homo sapien
ctatgagaaatagacaaatttcatgatgtccaa

SEQ ID NO: 930844 - DNA, 33 bp, Homo sapien
ctatgagaaatagacacatttcatgatgtccaa

SEQ ID NO: 930845 - DNA, 33 bp, Homo sapien
cctcaataaccaggtacagagtgagcacaacaa

SEQ ID NO: 930846 - DNA, 33 bp, Homo sapien
cctcaataaccaggtatagagtgagcacaacaa

SEQ ID NO: 930847 - DNA, 33 bp, Homo sapien
gatttctgactgttgacccaaatatgaccctct

SEQ ID NO: 930848 - DNA, 33 bp, Homo sapien
gatttctgactgttgatccaaatatgaccctct

SEQ ID NO: 930849 - DNA, 33 bp, Homo sapien
ttgattgccctggtgacggttacacaagtgtat

SEQ ID NO: 930850 - DNA, 33 bp, Homo sapien
ttgattgccctggtgatggttacacaagtgtat

SEQ ID NO: 930851 - DNA, 33 bp, Homo sapien
aggctgcagtgagcatcaaagtgcagacattcc

SEQ ID NO: 930852 - DNA, 33 bp, Homo sapien
aggctgcagtgagcatgaaagtgcagacattcc

SEQ ID NO: 930853 - DNA, 33 bp, Homo sapien
acttctggtatggatgacagaggtattgaccaa

SEQ ID NO: 930854 - DNA, 33 bp, Homo sapien
acttctggtatggatggcagaggtattgaccaa

SEQ ID NO: 930855 - DNA, 33 bp, Homo sapien
caaatgattttggtcacagagaaactaagatgt

SEQ ID NO: 930856 - DNA, 33 bp, Homo sapien
caaatgattttggtcatagagaaactaagatgt

SEQ ID NO: 930857 - DNA, 33 bp, Homo sapien
ctgaaaatagcaagtacgggtaacaacgtggag

SEQ ID NO: 930858 - DNA, 33 bp, Homo sapien
ctgaaaatagcaagtatgggtaacaacgtggag

SEQ ID NO: 930859 - DNA, 33 bp, Homo sapien
aaaatttccagctagaaagtgacgaggagtagg

SEQ ID NO: 930860 - DNA, 33 bp, Homo sapien
aaaatttccagctagacagtgacgaggagtagg

SEQ ID NO: 930861 - DNA, 33 bp, Homo sapien
attgtcacccacttcgcagcagttttccgcact

SEQ ID NO: 930862 - DNA, 33 bp, Homo sapien
attgtcacccacttcgtagcagttttccgcact

SEQ ID NO: 930863 - DNA, 33 bp, Homo sapien
agaggggcaagtctgagaaattgtggatcaggg

SEQ ID NO: 930864 - DNA, 33 bp, Homo sapien
agaggggcaagtctgataaattgtggatcaggg

SEQ ID NO: 930865 - DNA, 33 bp, Homo sapien
agcatgaacaaagccaaaaggtcttcataaaca

SEQ ID NO: 930866 - DNA, 33 bp, Homo sapien
agcatgaacaaagccacaaggtcttcataaaca

SEQ ID NO: 930867 - DNA, 33 bp, Homo sapien
agcctctgaggatctacgaggttttgtgacagg

SEQ ID NO: 930868 - DNA, 33 bp, Homo sapien
agcctctgaggatctaggaggttttgtgacagg

SEQ ID NO: 930869 - DNA, 33 bp, Homo sapien
gtctctttttgatacacaattttagcttcagtg

SEQ ID NO: 930870 - DNA, 33 bp, Homo sapien
gtctctttttgatacataattttagcttcagtg

SEQ ID NO: 930871 - DNA, 33 bp, Homo sapien
ttaacaaaaatcatcaatgaaggtttattccat

SEQ ID NO: 930872 - DNA, 33 bp, Homo sapien
ttaacaaaaatcatcagtgaaggtttattccat

SEQ ID NO: 930873 - DNA, 33 bp, Homo sapien
agatttcagagttatcaatccagtggagcctgc

SEQ ID NO: 930874 - DNA, 33 bp, Homo sapien
agatttcagagttatcgatccagtggagcctgc

SEQ ID NO: 930875 - DNA, 33 bp, Homo sapien
cagtctgcaagactcgcccagtgcagactttgc

SEQ ID NO: 930876 - DNA, 33 bp, Homo sapien
cagtctgcaagactcgtccagtgcagactttgc

SEQ ID NO: 930877 - DNA, 33 bp, Homo sapien
ataggaaataggaagtcaatttgggcctcataa

SEQ ID NO: 930878 - DNA, 33 bp, Homo sapien
ataggaaataggaagttaatttgggcctcataa

SEQ ID NO: 930879 - DNA, 33 bp, Homo sapien
tttctatgtggacatccgatatatttgtcccta

SEQ ID NO: 930880 - DNA, 33 bp, Homo sapien
tttctatgtggacatctgatatatttgtcccta

SEQ ID NO: 930881 - DNA, 33 bp, Homo sapien
tctttgtctgctgagaaaaaaaaggaactctct

SEQ ID NO: 930882 - DNA, 33 bp, Homo sapien
tctttgtctgctgagagaaaaaaggaactctct

SEQ ID NO: 930883 - DNA, 33 bp, Homo sapien
tgaccaaaatgtattgaatactcagctatggga

SEQ ID NO: 930884 - DNA, 33 bp, Homo sapien
tgaccaaaatgtattggatactcagctatggga

SEQ ID NO: 930885 - DNA, 33 bp, Homo sapien
caaagtcacagagtaaaagcgtggcaaacttac

SEQ ID NO: 930886 - DNA, 33 bp, Homo sapien
caaagtcacagagtaagagcgtggcaaacttac

SEQ ID NO: 930887 - DNA, 33 bp, Homo sapien
ttctcataatagctagcctacaataattgtgca

SEQ ID NO: 930888 - DNA, 33 bp, Homo sapien
ttctcataatagctagtctacaataattgtgca

SEQ ID NO: 930889 - DNA, 33 bp, Homo sapien
tggaaccaaaccacaagttcatgctgattttca

SEQ ID NO: 930890 - DNA, 33 bp, Homo sapien
tggaaccaaaccacaatttcatgctgattttca

SEQ ID NO: 930891 - DNA, 33 bp, Homo sapien
ctaagtcaaagtgatgaagctatggcaaccctc

SEQ ID NO: 930892 - DNA, 33 bp, Homo sapien
ctaagtcaaagtgatggagctatggcaaccctc

SEQ ID NO: 930893 - DNA, 33 bp, Homo sapien
tttcttgggatcactaccctattggaggagatt

SEQ ID NO: 930894 - DNA, 33 bp, Homo sapien
tttcttgggatcactatcctattggaggagatt

SEQ ID NO: 930895 - DNA, 33 bp, Homo sapien
agaccttttctgaaaaatatgcctggcagcttc

SEQ ID NO: 930896 - DNA, 33 bp, Homo sapien
agaccttttctgaaaagtatgcctggcagcttc

SEQ ID NO: 930897 - DNA, 33 bp, Homo sapien
gaatgcttgccatccacagcctcgtttcacctt

SEQ ID NO: 930898 - DNA, 33 bp, Homo sapien
gaatgcttgccatccatagcctcgtttcacctt

SEQ ID NO: 930899 - DNA, 33 bp, Homo sapien
cagctcgaatgtgggacacaaaggcagacagga

SEQ ID NO: 930900 - DNA, 33 bp, Homo sapien
cagctcgaatgtgggatacaaaggcagacagga

SEQ ID NO: 930901 - DNA, 33 bp, Homo sapien
gctcagagaatcactaaatctagaaactgaaag

SEQ ID NO: 930902 - DNA, 33 bp, Homo sapien
gctcagagaatcactagatctagaaactgaaag

SEQ ID NO: 930903 - DNA, 33 bp, Homo sapien
agaagatccatctaaaatagggtttctcaatct

SEQ ID NO: 930904 - DNA, 33 bp, Homo sapien
agaagatccatctaaagtagggtttctcaatct

SEQ ID NO: 930905 - DNA, 33 bp, Homo sapien
aaaactacagctctaacgggtgacttgatgatt

SEQ ID NO: 930906 - DNA, 33 bp, Homo sapien
aaaactacagctctaatgggtgacttgatgatt

SEQ ID NO: 930907 - DNA, 33 bp, Homo sapien
tttatatttagcaaggccccttcctttctgttg

SEQ ID NO: 930908 - DNA, 33 bp, Homo sapien
tttatatttagcaaggtcccttcctttctgttg

SEQ ID NO: 930909 - DNA, 33 bp, Homo sapien
gctggctagtcctaaacaagatttaatcctctc

SEQ ID NO: 930910 - DNA, 33 bp, Homo sapien
gctggctagtcctaaataagatttaatcctctc

SEQ ID NO: 930911 - DNA, 33 bp, Homo sapien
cagggaagccttagaactcacacactgaagatg

SEQ ID NO: 930912 - DNA, 33 bp, Homo sapien
cagggaagccttagaattcacacactgaagatg

SEQ ID NO: 930913 - DNA, 33 bp, Homo sapien
agaggagggagcatccaattccacttgcatccc

SEQ ID NO: 930914 - DNA, 33 bp, Homo sapien
agaggagggagcatccgattccacttgcatccc

SEQ ID NO: 930915 - DNA, 33 bp, Homo sapien
tctagcaccctctccaccatgaactgttttggg

SEQ ID NO: 930916 - DNA, 33 bp, Homo sapien
tctagcaccctctccatcatgaactgttttggg

SEQ ID NO: 930917 - DNA, 33 bp, Homo sapien
tgaagatcagaaagaagcaagtggcccccaggc

SEQ ID NO: 930918 - DNA, 33 bp, Homo sapien
tgaagatcagaaagaatcaagtggcccccaggc

SEQ ID NO: 930919 - DNA, 33 bp, Homo sapien
gatattgattggtctacggtggtcccattctct

SEQ ID NO: 930920 - DNA, 33 bp, Homo sapien
gatattgattggtctatggtggtcccattctct

SEQ ID NO: 930921 - DNA, 33 bp, Homo sapien
gccacatacttctcaaactaccatctctgggga

SEQ ID NO: 930922 - DNA, 33 bp, Homo sapien
gccacatacttctcaatctaccatctctgggga

SEQ ID NO: 930923 - DNA, 33 bp, Homo sapien
agccttccttgaggaggacatagcccctgctag

SEQ ID NO: 930924 - DNA, 33 bp, Homo sapien
agccttccttgaggagtacatagcccctgctag

SEQ ID NO: 930925 - DNA, 33 bp, Homo sapien
gttcaactttgatagacaatgccagttttccaa

SEQ ID NO: 930926 - DNA, 33 bp, Homo sapien
gttcaactttgatagataatgccagttttccaa

SEQ ID NO: 930927 - DNA, 33 bp, Homo sapien
cacggaactataaaaccaccacaactgtaacac

SEQ ID NO: 930928 - DNA, 33 bp, Homo sapien
cacggaactataaaactaccacaactgtaacac

SEQ ID NO: 930929 - DNA, 33 bp, Homo sapien
agagattctgactctaagagaaatggcagtcac

SEQ ID NO: 930930 - DNA, 33 bp, Homo sapien
agagattctgactctacgagaaatggcagtcac

SEQ ID NO: 930931 - DNA, 33 bp, Homo sapien
attccgtgatcctgaacactgccacccatcagt

SEQ ID NO: 930932 - DNA, 33 bp, Homo sapien
attccgtgatcctgaatactgccacccatcagt

SEQ ID NO: 930933 - DNA, 33 bp, Homo sapien
agccatattttagatccactggaaggggtttgg

SEQ ID NO: 930934 - DNA, 33 bp, Homo sapien
agccatattttagatctactggaaggggtttgg

SEQ ID NO: 930935 - DNA, 33 bp, Homo sapien
caactgaacaagattaacaagccacatttttct

SEQ ID NO: 930936 - DNA, 33 bp, Homo sapien
caactgaacaagattaccaagccacatttttct

SEQ ID NO: 930937 - DNA, 33 bp, Homo sapien
atagttttctacaacacgagaagtggagagctg

SEQ ID NO: 930938 - DNA, 33 bp, Homo sapien
atagttttctacaacatgagaagtggagagctg

SEQ ID NO: 930939 - DNA, 33 bp, Homo sapien
attttcttctttctgtcaaatctcccagtttct

SEQ ID NO: 930940 - DNA, 33 bp, Homo sapien
attttcttctttctgttaaatctcccagtttct

SEQ ID NO: 930941 - DNA, 33 bp, Homo sapien
gatgttcaggaactcacctgtcaccttcctttt

SEQ ID NO: 930942 - DNA, 33 bp, Homo sapien
gatgttcaggaactcatctgtcaccttcctttt

SEQ ID NO: 930943 - DNA, 33 bp, Homo sapien
tactttcttggttcccacctcacttcagtctgt

SEQ ID NO: 930944 - DNA, 33 bp, Homo sapien
tactttcttggttcccgcctcacttcagtctgt

SEQ ID NO: 930945 - DNA, 33 bp, Homo sapien
atctggagctatataacataggtctagtgtctc

SEQ ID NO: 930946 - DNA, 33 bp, Homo sapien
atctggagctatataagataggtctagtgtctc

SEQ ID NO: 930947 - DNA, 33 bp, Homo sapien
tccccagtcaaaattccaagatctagggcctcc

SEQ ID NO: 930948 - DNA, 33 bp, Homo sapien
tccccagtcaaaattctaagatctagggcctcc

SEQ ID NO: 930949 - DNA, 33 bp, Homo sapien
cctgttaacatttctcccggtcctcctcctgct

SEQ ID NO: 930950 - DNA, 33 bp, Homo sapien
cctgttaacatttctctcggtcctcctcctgct

SEQ ID NO: 930951 - DNA, 33 bp, Homo sapien
tgctcaccattttcaccgaccgccgcagcctcc

SEQ ID NO: 930952 - DNA, 33 bp, Homo sapien
tgctcaccattttcacggaccgccgcagcctcc

SEQ ID NO: 930953 - DNA, 33 bp, Homo sapien
taagaagtgtccatcactattggttcctttgcc

SEQ ID NO: 930954 - DNA, 33 bp, Homo sapien
taagaagtgtccatcattattggttcctttgcc

SEQ ID NO: 930955 - DNA, 33 bp, Homo sapien
gtctggaaatccaccactcttcttcaaaggaaa

SEQ ID NO: 930956 - DNA, 33 bp, Homo sapien
gtctggaaatccaccagtcttcttcaaaggaaa

SEQ ID NO: 930957 - DNA, 33 bp, Homo sapien
gccccaccttcaaaacccctattgttcaaagtc

SEQ ID NO: 930958 - DNA, 33 bp, Homo sapien
gccccaccttcaaaactcctattgttcaaagtc

SEQ ID NO: 930959 - DNA, 33 bp, Homo sapien
attccctagctacccaatcaaaaaatttgaacc

SEQ ID NO: 930960 - DNA, 33 bp, Homo sapien
attccctagctacccagtcaaaaaatttgaacc

SEQ ID NO: 930961 - DNA, 33 bp, Homo sapien
catagtatttggaatgaaacggaagagaagtgg

SEQ ID NO: 930962 - DNA, 33 bp, Homo sapien
catagtatttggaatggaacggaagagaagtgg

SEQ ID NO: 930963 - DNA, 33 bp, Homo sapien
gagacaatgtgtagaacgcatttaggatagcaa

SEQ ID NO: 930964 - DNA, 33 bp, Homo sapien
gagacaatgtgtagaatgcatttaggatagcaa

SEQ ID NO: 930965 - DNA, 33 bp, Homo sapien
catggttatagtttaaatcttaggataatgagc

SEQ ID NO: 930966 - DNA, 33 bp, Homo sapien
catggttatagtttaactcttaggataatgagc

SEQ ID NO: 930967 - DNA, 33 bp, Homo sapien
ccctaataggtgcttgaagactgagagctgagg

SEQ ID NO: 930968 - DNA, 33 bp, Homo sapien
ccctaataggtgcttggagactgagagctgagg

SEQ ID NO: 930969 - DNA, 33 bp, Homo sapien
ccactgtcatttgagggaaagtcaacctagtgg

SEQ ID NO: 930970 - DNA, 33 bp, Homo sapien
ccactgtcatttgaggtaaagtcaacctagtgg

SEQ ID NO: 930971 - DNA, 33 bp, Homo sapien
acctgtacccaaaccacgtgataagaggtttgc

SEQ ID NO: 930972 - DNA, 33 bp, Homo sapien
acctgtacccaaaccatgtgataagaggtttgc

SEQ ID NO: 930973 - DNA, 33 bp, Homo sapien
gcaacttgcccaatcaaaatcgcctggagccta

SEQ ID NO: 930974 - DNA, 33 bp, Homo sapien
gcaacttgcccaatcagaatcgcctggagccta

SEQ ID NO: 930975 - DNA, 33 bp, Homo sapien
tgggaataaatacttacgagagtcaggcaatct

SEQ ID NO: 930976 - DNA, 33 bp, Homo sapien
tgggaataaatacttatgagagtcaggcaatct

SEQ ID NO: 930977 - DNA, 33 bp, Homo sapien
actcaatttcaggctcgaaagcacttttcatct

SEQ ID NO: 930978 - DNA, 33 bp, Homo sapien
actcaatttcaggctctaaagcacttttcatct

SEQ ID NO: 930979 - DNA, 33 bp, Homo sapien
aaaaactatttgtggacccagctacctgcaatt

SEQ ID NO: 930980 - DNA, 33 bp, Homo sapien
aaaaactatttgtggagccagctacctgcaatt

SEQ ID NO: 930981 - DNA, 33 bp, Homo sapien
tggttgtagccatgcaatataaatgctaagtaa

SEQ ID NO: 930982 - DNA, 33 bp, Homo sapien
tggttgtagccatgcagtataaatgctaagtaa

SEQ ID NO: 930983 - DNA, 33 bp, Homo sapien
tattcaagttcagaaacgttagaattagagaat

SEQ ID NO: 930984 - DNA, 33 bp, Homo sapien
tattcaagttcagaaatgttagaattagagaat

SEQ ID NO: 930985 - DNA, 33 bp, Homo sapien
aactcgtccactgtcacctaagtcgtcatggca

SEQ ID NO: 930986 - DNA, 33 bp, Homo sapien
aactcgtccactgtcatctaagtcgtcatggca

SEQ ID NO: 930987 - DNA, 33 bp, Homo sapien
ggcaaatctctagttaggtagtcatatcagcag

SEQ ID NO: 930988 - DNA, 33 bp, Homo sapien
ggcaaatctctagttatgtagtcatatcagcag

SEQ ID NO: 930989 - DNA, 33 bp, Homo sapien
ttccctcatagaccaacggtcacgactagtcat

SEQ ID NO: 930990 - DNA, 33 bp, Homo sapien
ttccctcatagaccaatggtcacgactagtcat

SEQ ID NO: 930991 - DNA, 33 bp, Homo sapien
tgggaaatgaagaagcaataatttagttttgtc

SEQ ID NO: 930992 - DNA, 33 bp, Homo sapien
tgggaaatgaagaagccataatttagttttgtc

SEQ ID NO: 930993 - DNA, 33 bp, Homo sapien
aagagtgttattttcactccagcagtgacttca

SEQ ID NO: 930994 - DNA, 33 bp, Homo sapien
aagagtgttattttcattccagcagtgacttca

SEQ ID NO: 930995 - DNA, 33 bp, Homo sapien
cctgaaacttgctgaacgttgaagtgaaggtca

SEQ ID NO: 930996 - DNA, 33 bp, Homo sapien
cctgaaacttgctgaatgttgaagtgaaggtca

SEQ ID NO: 930997 - DNA, 33 bp, Homo sapien
cgtgagagatacatggacactatctgtcacccc

SEQ ID NO: 930998 - DNA, 33 bp, Homo sapien
cgtgagagatacatgggcactatctgtcacccc

SEQ ID NO: 930999 - DNA, 33 bp, Homo sapien
tgaagcatcctccaagaagagatcaattaaaag

SEQ ID NO: 931000 - DNA, 33 bp, Homo sapien
tgaagcatcctccaagcagagatcaattaaaag

SEQ ID NO: 931001 - DNA, 33 bp, Homo sapien
ctaacatactggtccacaactggtaaaactagt

SEQ ID NO: 931002 - DNA, 33 bp, Homo sapien
ctaacatactggtccagaactggtaaaactagt

SEQ ID NO: 931003 - DNA, 33 bp, Homo sapien
gcagcttgtttgagacactgaaatatgaatttt

SEQ ID NO: 931004 - DNA, 33 bp, Homo sapien
gcagcttgtttgagacgctgaaatatgaatttt

SEQ ID NO: 931005 - DNA, 33 bp, Homo sapien
ggtcccaattctgtaccgagctagctgacatta

SEQ ID NO: 931006 - DNA, 33 bp, Homo sapien
ggtcccaattctgtactgagctagctgacatta

SEQ ID NO: 931007 - DNA, 33 bp, Homo sapien
gctgccatagtgaagaaccccatttgcctccag

SEQ ID NO: 931008 - DNA, 33 bp, Homo sapien
gctgccatagtgaagacccccatttgcctccag

SEQ ID NO: 931009 - DNA, 33 bp, Homo sapien
tgcctccagaggtcaaacttccttgtccaagtt

SEQ ID NO: 931010 - DNA, 33 bp, Homo sapien
tgcctccagaggtcaagcttccttgtccaagtt

SEQ ID NO: 931011 - DNA, 33 bp, Homo sapien
catccatgcatgcaaaaattcattttggaacaa

SEQ ID NO: 931012 - DNA, 33 bp, Homo sapien
catccatgcatgcaaatattcattttggaacaa

SEQ ID NO: 931013 - DNA, 33 bp, Homo sapien
gtacagcttgattcagcatatatccaacacctg

SEQ ID NO: 931014 - DNA, 33 bp, Homo sapien
gtacagcttgattcagtatatatccaacacctg

SEQ ID NO: 931015 - DNA, 33 bp, Homo sapien
ctctctttgataactccgagccctaaaccagtg

SEQ ID NO: 931016 - DNA, 33 bp, Homo sapien
ctctctttgataactctgagccctaaaccagtg

SEQ ID NO: 931017 - DNA, 33 bp, Homo sapien
atttgaacttgtagaccgaataaagtgcattgg

SEQ ID NO: 931018 - DNA, 33 bp, Homo sapien
atttgaacttgtagactgaataaagtgcattgg

SEQ ID NO: 931019 - DNA, 33 bp, Homo sapien
ggcctgcccaaccaaacgtcatcgaccattgtt

SEQ ID NO: 931020 - DNA, 33 bp, Homo sapien
ggcctgcccaaccaaatgtcatcgaccattgtt

SEQ ID NO: 931021 - DNA, 33 bp, Homo sapien
atggctgccttgcaaccgagaagagagtcttaa

SEQ ID NO: 931022 - DNA, 33 bp, Homo sapien
atggctgccttgcaactgagaagagagtcttaa

SEQ ID NO: 931023 - DNA, 33 bp, Homo sapien
tccaatttaaatagcacaggtttcctttttaaa

SEQ ID NO: 931024 - DNA, 33 bp, Homo sapien
tccaatttaaatagcataggtttcctttttaaa

SEQ ID NO: 931025 - DNA, 33 bp, Homo sapien
actggcccagcatctccacctcccccatgcaac

SEQ ID NO: 931026 - DNA, 33 bp, Homo sapien
actggcccagcatctctacctcccccatgcaac

SEQ ID NO: 931027 - DNA, 33 bp, Homo sapien
aggacagctttttgacaatgttgcttgtctttg

SEQ ID NO: 931028 - DNA, 33 bp, Homo sapien
aggacagctttttgacgatgttgcttgtctttg

SEQ ID NO: 931029 - DNA, 33 bp, Homo sapien
gacctctggaccacgacgaccagtgtgggaagc

SEQ ID NO: 931030 - DNA, 33 bp, Homo sapien
gacctctggaccacgatgaccagtgtgggaagc

SEQ ID NO: 931031 - DNA, 33 bp, Homo sapien
tctccctgttcttggcccttccgcagatccttg

SEQ ID NO: 931032 - DNA, 33 bp, Homo sapien
tctccctgttcttggctcttccgcagatccttg

SEQ ID NO: 931033 - DNA, 33 bp, Homo sapien
tcctgaaggctgctaacattcaatggaggcagt

SEQ ID NO: 931034 - DNA, 33 bp, Homo sapien
tcctgaaggctgctaatattcaatggaggcagt

SEQ ID NO: 931035 - DNA, 33 bp, Homo sapien
caacctttctgaaataagactcaaaaatctaga

SEQ ID NO: 931036 - DNA, 33 bp, Homo sapien
caacctttctgaaataggactcaaaaatctaga

SEQ ID NO: 931037 - DNA, 33 bp, Homo sapien
tcagatgactagccccaaagcacacagataggg

SEQ ID NO: 931038 - DNA, 33 bp, Homo sapien
tcagatgactagccccgaagcacacagataggg

SEQ ID NO: 931039 - DNA, 33 bp, Homo sapien
tgaggcagtgggaggcaatgaaaattccctctg

SEQ ID NO: 931040 - DNA, 33 bp, Homo sapien
tgaggcagtgggaggcgatgaaaattccctctg

SEQ ID NO: 931041 - DNA, 33 bp, Homo sapien
ggctcctgcgggggtccagccatgcctgactcc

SEQ ID NO: 931042 - DNA, 33 bp, Homo sapien
ggctcctgcgggggtctagccatgcctgactcc

SEQ ID NO: 931043 - DNA, 33 bp, Homo sapien
agcagtcaccgagggaaccaacggaacaagaca

SEQ ID NO: 931044 - DNA, 33 bp, Homo sapien
agcagtcaccgagggagccaacggaacaagaca

SEQ ID NO: 931045 - DNA, 33 bp, Homo sapien
actctgggcccatttacagcctacagcaggtgc

SEQ ID NO: 931046 - DNA, 33 bp, Homo sapien
actctgggcccatttagagcctacagcaggtgc

SEQ ID NO: 931047 - DNA, 33 bp, Homo sapien
ccagggaccatgatgtaaactgaaaggagaggg

SEQ ID NO: 931048 - DNA, 33 bp, Homo sapien
ccagggaccatgatgtgaactgaaaggagaggg

SEQ ID NO: 931049 - DNA, 33 bp, Homo sapien
agcctggaacacagggaattggtaatgaggatc

SEQ ID NO: 931050 - DNA, 33 bp, Homo sapien
agcctggaacacagggtattggtaatgaggatc

SEQ ID NO: 931051 - DNA, 33 bp, Homo sapien
gtaatttgaagcaaacaaaggtgaggctggaga

SEQ ID NO: 931052 - DNA, 33 bp, Homo sapien
gtaatttgaagcaaacgaaggtgaggctggaga

SEQ ID NO: 931053 - DNA, 33 bp, Homo sapien
agtcctgcttgggggacggatgagctggaattg

SEQ ID NO: 931054 - DNA, 33 bp, Homo sapien
agtcctgcttgggggatggatgagctggaattg

SEQ ID NO: 931055 - DNA, 33 bp, Homo sapien
acctggtctttcagtacgtggaagaccccacca

SEQ ID NO: 931056 - DNA, 33 bp, Homo sapien
acctggtctttcagtatgtggaagaccccacca

SEQ ID NO: 931057 - DNA, 33 bp, Homo sapien
attaaaacagcctgtaagtcctgcaaacacagc

SEQ ID NO: 931058 - DNA, 33 bp, Homo sapien
attaaaacagcctgtaggtcctgcaaacacagc

SEQ ID NO: 931059 - DNA, 33 bp, Homo sapien
tatttgtaggagcttccaaaggagatgttctaa

SEQ ID NO: 931060 - DNA, 33 bp, Homo sapien
tatttgtaggagcttctaaaggagatgttctaa

SEQ ID NO: 931061 - DNA, 33 bp, Homo sapien
cacacacacaccagaaaacataagcgttctcat

SEQ ID NO: 931062 - DNA, 33 bp, Homo sapien
cacacacacaccagaacacataagcgttctcat

SEQ ID NO: 931063 - DNA, 33 bp, Homo sapien
tatctttgtctattaacggagtcaaccaaaggc

SEQ ID NO: 931064 - DNA, 33 bp, Homo sapien
tatctttgtctattaatggagtcaaccaaaggc

SEQ ID NO: 931065 - DNA, 33 bp, Homo sapien
ctttctcttttgtgcagtgaagaaaaactttaa

SEQ ID NO: 931066 - DNA, 33 bp, Homo sapien
ctttctcttttgtgcattgaagaaaaactttaa

SEQ ID NO: 931067 - DNA, 33 bp, Homo sapien
cgcaaaccctgcccaacgtgtggcaaatccaca

SEQ ID NO: 931068 - DNA, 33 bp, Homo sapien
cgcaaaccctgcccaatgtgtggcaaatccaca

SEQ ID NO: 931069 - DNA, 33 bp, Homo sapien
gatgggggtatgttgccagaggatccacacatg

SEQ ID NO: 931070 - DNA, 33 bp, Homo sapien
gatgggggtatgttgctagaggatccacacatg

SEQ ID NO: 931071 - DNA, 33 bp, Homo sapien
attttaataattggtacgttgcaacctggtatg

SEQ ID NO: 931072 - DNA, 33 bp, Homo sapien
attttaataattggtatgttgcaacctggtatg

SEQ ID NO: 931073 - DNA, 33 bp, Homo sapien
attttcacccaatcaccgtactgacctttatcc

SEQ ID NO: 931074 - DNA, 33 bp, Homo sapien
attttcacccaatcacggtactgacctttatcc

SEQ ID NO: 931075 - DNA, 33 bp, Homo sapien
tgcagggtaggcagagacgatattcagagctag

SEQ ID NO: 931076 - DNA, 33 bp, Homo sapien
tgcagggtaggcagagccgatattcagagctag

SEQ ID NO: 931077 - DNA, 33 bp, Homo sapien
cccactcctgtctttcacagggcagcttgcccc

SEQ ID NO: 931078 - DNA, 33 bp, Homo sapien
cccactcctgtctttcccagggcagcttgcccc

SEQ ID NO: 931079 - DNA, 33 bp, Homo sapien
cccggtgccgctggccaggcaaacaaatttcaa

SEQ ID NO: 931080 - DNA, 33 bp, Homo sapien
cccggtgccgctggccgggcaaacaaatttcaa

SEQ ID NO: 931081 - DNA, 33 bp, Homo sapien
ggaggctcaaggttacaaatgacagcaccttgc

SEQ ID NO: 931082 - DNA, 33 bp, Homo sapien
ggaggctcaaggttacgaatgacagcaccttgc

SEQ ID NO: 931083 - DNA, 33 bp, Homo sapien
gccccaccctacactacatttcccagtgatcca

SEQ ID NO: 931084 - DNA, 33 bp, Homo sapien
gccccaccctacactagatttcccagtgatcca

SEQ ID NO: 931085 - DNA, 33 bp, Homo sapien
tcttgtctgaaacataaataactcacagacaga

SEQ ID NO: 931086 - DNA, 33 bp, Homo sapien
tcttgtctgaaacatacataactcacagacaga

SEQ ID NO: 931087 - DNA, 33 bp, Homo sapien
atttgacattatggtcaaaatgtgagttattac

SEQ ID NO: 931088 - DNA, 33 bp, Homo sapien
atttgacattatggtcgaaatgtgagttattac

SEQ ID NO: 931089 - DNA, 33 bp, Homo sapien
atcacagggagactccacaaaacctttatgtgg

SEQ ID NO: 931090 - DNA, 33 bp, Homo sapien
atcacagggagactccgcaaaacctttatgtgg

SEQ ID NO: 931091 - DNA, 33 bp, Homo sapien
ttcagaaatacctgccacctttgagcaaagaga

SEQ ID NO: 931092 - DNA, 33 bp, Homo sapien
ttcagaaatacctgccccctttgagcaaagaga

SEQ ID NO: 931093 - DNA, 33 bp, Homo sapien
aaatgaatgcttccgaagtgcttatgtgctcat

SEQ ID NO: 931094 - DNA, 33 bp, Homo sapien
aaatgaatgcttccgatgtgcttatgtgctcat

SEQ ID NO: 931095 - DNA, 33 bp, Homo sapien
tggttagggagaaaaacagagtttgaaatagtt

SEQ ID NO: 931096 - DNA, 33 bp, Homo sapien
tggttagggagaaaaatagagtttgaaatagtt

SEQ ID NO: 931097 - DNA, 33 bp, Homo sapien
ttgaactttgcattaacgtgaatgttgtctgtc

SEQ ID NO: 931098 - DNA, 33 bp, Homo sapien
ttgaactttgcattaatgtgaatgttgtctgtc

SEQ ID NO: 931099 - DNA, 33 bp, Homo sapien
agcatagctggaaagacgcctcggaaaacatgg

SEQ ID NO: 931100 - DNA, 33 bp, Homo sapien
agcatagctggaaagatgcctcggaaaacatgg

SEQ ID NO: 931101 - DNA, 33 bp, Homo sapien
attggaagggtccctcacagctttctgtgccat

SEQ ID NO: 931102 - DNA, 33 bp, Homo sapien
attggaagggtccctctcagctttctgtgccat

SEQ ID NO: 931103 - DNA, 33 bp, Homo sapien
ttcactccttgaagaaacattggccagagaagc

SEQ ID NO: 931104 - DNA, 33 bp, Homo sapien
ttcactccttgaagaagcattggccagagaagc

SEQ ID NO: 931105 - DNA, 33 bp, Homo sapien
cagaccagtgatccaaacaaaatttcaaactca

SEQ ID NO: 931106 - DNA, 33 bp, Homo sapien
cagaccagtgatccaagcaaaatttcaaactca

SEQ ID NO: 931107 - DNA, 33 bp, Homo sapien
tctcttttttttcttcactgagacagagtctca

SEQ ID NO: 931108 - DNA, 33 bp, Homo sapien
tctcttttttttcttcgctgagacagagtctca

SEQ ID NO: 931109 - DNA, 33 bp, Homo sapien
atggtgctgacagataagaaatccccagacagg

SEQ ID NO: 931110 - DNA, 33 bp, Homo sapien
atggtgctgacagatatgaaatccccagacagg

SEQ ID NO: 931111 - DNA, 33 bp, Homo sapien
atcatccccggccatccataagtccttcctaga

SEQ ID NO: 931112 - DNA, 33 bp, Homo sapien
atcatccccggccatcgataagtccttcctaga

SEQ ID NO: 931113 - DNA, 33 bp, Homo sapien
ttcttgcctagccacaatctcagtaatatttgt

SEQ ID NO: 931114 - DNA, 33 bp, Homo sapien
ttcttgcctagccacactctcagtaatatttgt

SEQ ID NO: 931115 - DNA, 33 bp, Homo sapien
gttcacctgaacatacaagatcacattcagttc

SEQ ID NO: 931116 - DNA, 33 bp, Homo sapien
gttcacctgaacatacgagatcacattcagttc

SEQ ID NO: 931117 - DNA, 33 bp, Homo sapien
gattaatgtgcaatgagtactattcaaatgaat

SEQ ID NO: 931118 - DNA, 33 bp, Homo sapien
gattaatgtgcaatgattactattcaaatgaat

SEQ ID NO: 931119 - DNA, 33 bp, Homo sapien
gatcttgggtaacgtcacatgcatccctcactt

SEQ ID NO: 931120 - DNA, 33 bp, Homo sapien
gatcttgggtaacgtcgcatgcatccctcactt

SEQ ID NO: 931121 - DNA, 33 bp, Homo sapien
tcacaaatgaggacccagaaattcatgagtcct

SEQ ID NO: 931122 - DNA, 33 bp, Homo sapien
tcacaaatgaggacccggaaattcatgagtcct

SEQ ID NO: 931123 - DNA, 33 bp, Homo sapien
tttaaatgcatttcataaataagactttgtgta

SEQ ID NO: 931124 - DNA, 33 bp, Homo sapien
tttaaatgcatttcatgaataagactttgtgta

SEQ ID NO: 931125 - DNA, 33 bp, Homo sapien
ttcttatcttggtctagccaaaaggcagttgga

SEQ ID NO: 931126 - DNA, 33 bp, Homo sapien
ttcttatcttggtctatccaaaaggcagttgga

SEQ ID NO: 931127 - DNA, 33 bp, Homo sapien
tctgtaggtgcagctccaggttgcttgactgtg

SEQ ID NO: 931128 - DNA, 33 bp, Homo sapien
tctgtaggtgcagctctaggttgcttgactgtg

SEQ ID NO: 931129 - DNA, 33 bp, Homo sapien
caacctctcaggaccactctctagtttcaaacc

SEQ ID NO: 931130 - DNA, 33 bp, Homo sapien
caacctctcaggaccattctctagtttcaaacc

SEQ ID NO: 931131 - DNA, 33 bp, Homo sapien
ggagaatacactgatacaaatgtgcaccacccc

SEQ ID NO: 931132 - DNA, 33 bp, Homo sapien
ggagaatacactgatagaaatgtgcaccacccc

SEQ ID NO: 931133 - DNA, 33 bp, Homo sapien
tcacaacactcctgtaacgcatcagacacctgc

SEQ ID NO: 931134 - DNA, 33 bp, Homo sapien
tcacaacactcctgtagcgcatcagacacctgc

SEQ ID NO: 931135 - DNA, 33 bp, Homo sapien
gagaaactgttaggcaacctagaagccacttga

SEQ ID NO: 931136 - DNA, 33 bp, Homo sapien
gagaaactgttaggcaccctagaagccacttga

SEQ ID NO: 931137 - DNA, 33 bp, Homo sapien
ggtgcactcagaataaagtttagccagctgtct

SEQ ID NO: 931138 - DNA, 33 bp, Homo sapien
ggtgcactcagaataatgtttagccagctgtct

SEQ ID NO: 931139 - DNA, 33 bp, Homo sapien
catgcaaaatatgcatcaaggttctgctatgcc

SEQ ID NO: 931140 - DNA, 33 bp, Homo sapien
catgcaaaatatgcatgaaggttctgctatgcc

SEQ ID NO: 931141 - DNA, 33 bp, Homo sapien
agcaagaacatctctaccaggtcttgtttaact

SEQ ID NO: 931142 - DNA, 33 bp, Homo sapien
agcaagaacatctctatcaggtcttgtttaact

SEQ ID NO: 931143 - DNA, 33 bp, Homo sapien
tgcacaaagttggttgacaaacttttctgttaa

SEQ ID NO: 931144 - DNA, 33 bp, Homo sapien
tgcacaaagttggttggcaaacttttctgttaa

SEQ ID NO: 931145 - DNA, 33 bp, Homo sapien
ggagccttgtagctcacgcagcagatggggaaa

SEQ ID NO: 931146 - DNA, 33 bp, Homo sapien
ggagccttgtagctcatgcagcagatggggaaa

SEQ ID NO: 931147 - DNA, 33 bp, Homo sapien
ttattttatgaggctcagagacatcaaacaagt

SEQ ID NO: 931148 - DNA, 33 bp, Homo sapien
ttattttatgaggctcggagacatcaaacaagt

SEQ ID NO: 931149 - DNA, 33 bp, Homo sapien
aggtgcccatgatcacagagatagtggtagagc

SEQ ID NO: 931150 - DNA, 33 bp, Homo sapien
aggtgcccatgatcacggagatagtggtagagc

SEQ ID NO: 931151 - DNA, 33 bp, Homo sapien
gaacctcctgataccactgagtgaaatttcaaa

SEQ ID NO: 931152 - DNA, 33 bp, Homo sapien
gaacctcctgataccattgagtgaaatttcaaa

SEQ ID NO: 931153 - DNA, 33 bp, Homo sapien
gggattccaggagtagaagcagcccctcccctt

SEQ ID NO: 931154 - DNA, 33 bp, Homo sapien
gggattccaggagtagcagcagcccctcccctt

SEQ ID NO: 931155 - DNA, 33 bp, Homo sapien
tgtccaaaattacccaggggacgcttggggcag

SEQ ID NO: 931156 - DNA, 33 bp, Homo sapien
tgtccaaaattacccatgggacgcttggggcag

SEQ ID NO: 931157 - DNA, 33 bp, Homo sapien
ccttagcagacttagaacatggtgcacaagata

SEQ ID NO: 931158 - DNA, 33 bp, Homo sapien
ccttagcagacttagaccatggtgcacaagata

SEQ ID NO: 931159 - DNA, 33 bp, Homo sapien
tctgtactgagtctccagagtcctttctgccca

SEQ ID NO: 931160 - DNA, 33 bp, Homo sapien
tctgtactgagtctccggagtcctttctgccca

SEQ ID NO: 931161 - DNA, 33 bp, Homo sapien
cgtattttctctgaacggtgggaaagatggcca

SEQ ID NO: 931162 - DNA, 33 bp, Homo sapien
cgtattttctctgaactgtgggaaagatggcca

SEQ ID NO: 931163 - DNA, 33 bp, Homo sapien
gggatctcccggaggacgagccagcctgttggg

SEQ ID NO: 931164 - DNA, 33 bp, Homo sapien
gggatctcccggaggatgagccagcctgttggg

SEQ ID NO: 931165 - DNA, 33 bp, Homo sapien
tcgggaaacctctgaaagcgagatctgccaagc

SEQ ID NO: 931166 - DNA, 33 bp, Homo sapien
tcgggaaacctctgaaggcgagatctgccaagc

SEQ ID NO: 931167 - DNA, 33 bp, Homo sapien
agcttttttgctgaaaggagcttttattaagga

SEQ ID NO: 931168 - DNA, 33 bp, Homo sapien
agcttttttgctgaaatgagcttttattaagga

SEQ ID NO: 931169 - DNA, 33 bp, Homo sapien
tgccgggcaggagttaaggtaggaacaggacag

SEQ ID NO: 931170 - DNA, 33 bp, Homo sapien
tgccgggcaggagttagggtaggaacaggacag

SEQ ID NO: 931171 - DNA, 33 bp, Homo sapien
aagaaagtcaggcaaaagagtttaaacatctgt

SEQ ID NO: 931172 - DNA, 33 bp, Homo sapien
aagaaagtcaggcaaaggagtttaaacatctgt

SEQ ID NO: 931173 - DNA, 33 bp, Homo sapien
acagagtgttcacctacctctctgccctccttg

SEQ ID NO: 931174 - DNA, 33 bp, Homo sapien
acagagtgttcacctatctctctgccctccttg

SEQ ID NO: 931175 - DNA, 33 bp, Homo sapien
cattgtccccatagacagactcccttcagagtt

SEQ ID NO: 931176 - DNA, 33 bp, Homo sapien
cattgtccccatagacggactcccttcagagtt

SEQ ID NO: 931177 - DNA, 33 bp, Homo sapien
ctttgcatttctccaacgattggaaattgaggg

SEQ ID NO: 931178 - DNA, 33 bp, Homo sapien
ctttgcatttctccaatgattggaaattgaggg

SEQ ID NO: 931179 - DNA, 33 bp, Homo sapien
tggtcacctgttgtgcaaacctctgagttcagg

SEQ ID NO: 931180 - DNA, 33 bp, Homo sapien
tggtcacctgttgtgcgaacctctgagttcagg

SEQ ID NO: 931181 - DNA, 33 bp, Homo sapien
cccagaaagaactcaccatgatctgaggagcta

SEQ ID NO: 931182 - DNA, 33 bp, Homo sapien
cccagaaagaactcacgatgatctgaggagcta

SEQ ID NO: 931183 - DNA, 33 bp, Homo sapien
aggaaggaaaacctccaaacatcagcaaaggaa

SEQ ID NO: 931184 - DNA, 33 bp, Homo sapien
aggaaggaaaacctccgaacatcagcaaaggaa

SEQ ID NO: 931185 - DNA, 33 bp, Homo sapien
taagccaggcatttgcagagaaagaacaaaggc

SEQ ID NO: 931186 - DNA, 33 bp, Homo sapien
taagccaggcatttgcggagaaagaacaaaggc

SEQ ID NO: 931187 - DNA, 33 bp, Homo sapien
tcgagaaatcacatagaaggaggagcaggtggc

SEQ ID NO: 931188 - DNA, 33 bp, Homo sapien
tcgagaaatcacataggaggaggagcaggtggc

SEQ ID NO: 931189 - DNA, 33 bp, Homo sapien
tttgaactgcctcctcaaagagaagtgaaactt

SEQ ID NO: 931190 - DNA, 33 bp, Homo sapien
tttgaactgcctcctcgaagagaagtgaaactt

SEQ ID NO: 931191 - DNA, 33 bp, Homo sapien
atgaccttataagttaacttgagctcacacccc

SEQ ID NO: 931192 - DNA, 33 bp, Homo sapien
atgaccttataagttatcttgagctcacacccc

SEQ ID NO: 931193 - DNA, 33 bp, Homo sapien
cctccttttgggaagaacttccagacagactga

SEQ ID NO: 931194 - DNA, 33 bp, Homo sapien
cctccttttgggaagagcttccagacagactga

SEQ ID NO: 931195 - DNA, 33 bp, Homo sapien
gagatggaagagacagcaataaaaggccaggct

SEQ ID NO: 931196 - DNA, 33 bp, Homo sapien
gagatggaagagacaggaataaaaggccaggct

SEQ ID NO: 931197 - DNA, 33 bp, Homo sapien
tcctggccttctgagccctgctaacatgtactt

SEQ ID NO: 931198 - DNA, 33 bp, Homo sapien
tcctggccttctgagctctgctaacatgtactt

SEQ ID NO: 931199 - DNA, 33 bp, Homo sapien
tctggcaaagtgattaaggaattggaaccaggg

SEQ ID NO: 931200 - DNA, 33 bp, Homo sapien
tctggcaaagtgattagggaattggaaccaggg

SEQ ID NO: 931201 - DNA, 33 bp, Homo sapien
tgaccaaaaactagaacgtggtgcgtggctccc

SEQ ID NO: 931202 - DNA, 33 bp, Homo sapien
tgaccaaaaactagaatgtggtgcgtggctccc

SEQ ID NO: 931203 - DNA, 33 bp, Homo sapien
aaaaattagaatggacaaatgcattgagaaacc

SEQ ID NO: 931204 - DNA, 33 bp, Homo sapien
aaaaattagaatggacgaatgcattgagaaacc

SEQ ID NO: 931205 - DNA, 33 bp, Homo sapien
catctttggggaggggacatgattctacctata

SEQ ID NO: 931206 - DNA, 33 bp, Homo sapien
catctttggggagggggcatgattctacctata

SEQ ID NO: 931207 - DNA, 33 bp, Homo sapien
ccagggatggaaaatgcagacacaatatagcaa

SEQ ID NO: 931208 - DNA, 33 bp, Homo sapien
ccagggatggaaaatgtagacacaatatagcaa

SEQ ID NO: 931209 - DNA, 33 bp, Homo sapien
ggaaaccagatagccaaactctgaaattgtgtc

SEQ ID NO: 931210 - DNA, 33 bp, Homo sapien
ggaaaccagatagccagactctgaaattgtgtc

SEQ ID NO: 931211 - DNA, 33 bp, Homo sapien
cccaggaggaagtaaccgcctaatttgagtgga

SEQ ID NO: 931212 - DNA, 33 bp, Homo sapien
cccaggaggaagtaactgcctaatttgagtgga

SEQ ID NO: 931213 - DNA, 33 bp, Homo sapien
ttggatggtaaaataggcatagtcctctaaata

SEQ ID NO: 931214 - DNA, 33 bp, Homo sapien
ttggatggtaaaatagtcatagtcctctaaata

SEQ ID NO: 931215 - DNA, 33 bp, Homo sapien
gaaaacgaatgtgtaacagaaagagggagagcc

SEQ ID NO: 931216 - DNA, 33 bp, Homo sapien
gaaaacgaatgtgtaagagaaagagggagagcc

SEQ ID NO: 931217 - DNA, 33 bp, Homo sapien
gtctttaggaaatgctaaaatgagagcacagtc

SEQ ID NO: 931218 - DNA, 33 bp, Homo sapien
gtctttaggaaatgctgaaatgagagcacagtc

SEQ ID NO: 931219 - DNA, 33 bp, Homo sapien
gcatgtacgtgtcttgcactacagcacactgtg

SEQ ID NO: 931220 - DNA, 33 bp, Homo sapien
gcatgtacgtgtcttgtactacagcacactgtg

SEQ ID NO: 931221 - DNA, 33 bp, Homo sapien
ctgaaacataaattccaatcagtgtacttttct

SEQ ID NO: 931222 - DNA, 33 bp, Homo sapien
ctgaaacataaattcccatcagtgtacttttct

SEQ ID NO: 931223 - DNA, 33 bp, Homo sapien
cgatcactccaaagaccgagccgctctcgttga

SEQ ID NO: 931224 - DNA, 33 bp, Homo sapien
cgatcactccaaagactgagccgctctcgttga

SEQ ID NO: 931225 - DNA, 33 bp, Homo sapien
gcagatcctcaacgaacgcgtagtcaaatcagg

SEQ ID NO: 931226 - DNA, 33 bp, Homo sapien
gcagatcctcaacgaatgcgtagtcaaatcagg

SEQ ID NO: 931227 - DNA, 33 bp, Homo sapien
gatggtgagattactacacccagagaggagggg

SEQ ID NO: 931228 - DNA, 33 bp, Homo sapien
gatggtgagattactatacccagagaggagggg

SEQ ID NO: 931229 - DNA, 33 bp, Homo sapien
gggttaccgcttacaagaattgacatcctggaa

SEQ ID NO: 931230 - DNA, 33 bp, Homo sapien
gggttaccgcttacaataattgacatcctggaa

SEQ ID NO: 931231 - DNA, 33 bp, Homo sapien
cacgattgccccaaagcattcatcgaactacgt

SEQ ID NO: 931232 - DNA, 33 bp, Homo sapien
cacgattgccccaaaggattcatcgaactacgt

SEQ ID NO: 931233 - DNA, 33 bp, Homo sapien
tctaaagtaatttcacagggtaattgctatttt

SEQ ID NO: 931234 - DNA, 33 bp, Homo sapien
tctaaagtaatttcacggggtaattgctatttt

SEQ ID NO: 931235 - DNA, 33 bp, Homo sapien
tcctaaacttctttccagcatctcacttaaaga

SEQ ID NO: 931236 - DNA, 33 bp, Homo sapien
tcctaaacttctttcctgcatctcacttaaaga

SEQ ID NO: 931237 - DNA, 33 bp, Homo sapien
ttgtaggcttcacagaacacaggctatcattga

SEQ ID NO: 931238 - DNA, 33 bp, Homo sapien
ttgtaggcttcacagagcacaggctatcattga

SEQ ID NO: 931239 - DNA, 33 bp, Homo sapien
cagatttcttataatcagagaaaattgtgacct

SEQ ID NO: 931240 - DNA, 33 bp, Homo sapien
cagatttcttataatctgagaaaattgtgacct

SEQ ID NO: 931241 - DNA, 33 bp, Homo sapien
taataaccgcaaacaccaatacagcagctacta

SEQ ID NO: 931242 - DNA, 33 bp, Homo sapien
taataaccgcaaacacgaatacagcagctacta

SEQ ID NO: 931243 - DNA, 33 bp, Homo sapien
tgtttgcctgggcccacggagctggagatctag

SEQ ID NO: 931244 - DNA, 33 bp, Homo sapien
tgtttgcctgggcccatggagctggagatctag

SEQ ID NO: 931245 - DNA, 33 bp, Homo sapien
agtttgcagagtaaaacataccctgtcagaagt

SEQ ID NO: 931246 - DNA, 33 bp, Homo sapien
agtttgcagagtaaaatataccctgtcagaagt

SEQ ID NO: 931247 - DNA, 33 bp, Homo sapien
aggagctgggtttgaaatgtctatgggacagca

SEQ ID NO: 931248 - DNA, 33 bp, Homo sapien
aggagctgggtttgaagtgtctatgggacagca

SEQ ID NO: 931249 - DNA, 33 bp, Homo sapien
cacataaatagccatacagcctgtttttgaagc

SEQ ID NO: 931250 - DNA, 33 bp, Homo sapien
cacataaatagccatagagcctgtttttgaagc

SEQ ID NO: 931251 - DNA, 33 bp, Homo sapien
atgcccaatgggcagactatgtggggactcatt

SEQ ID NO: 931252 - DNA, 33 bp, Homo sapien
atgcccaatgggcagattatgtggggactcatt

SEQ ID NO: 931253 - DNA, 33 bp, Homo sapien
ccagcagttaatccacaggtccttctggtctgc

SEQ ID NO: 931254 - DNA, 33 bp, Homo sapien
ccagcagttaatccacgggtccttctggtctgc

SEQ ID NO: 931255 - DNA, 33 bp, Homo sapien
cagatcaatgtattcacgtaagcttaataagat

SEQ ID NO: 931256 - DNA, 33 bp, Homo sapien
cagatcaatgtattcatgtaagcttaataagat

SEQ ID NO: 931257 - DNA, 33 bp, Homo sapien
gggggagactcctttcaaacttctgttggccac

SEQ ID NO: 931258 - DNA, 33 bp, Homo sapien
gggggagactcctttcgaacttctgttggccac

SEQ ID NO: 931259 - DNA, 33 bp, Homo sapien
gatgggttcccatgcacaatcatttgagaactg

SEQ ID NO: 931260 - DNA, 33 bp, Homo sapien
gatgggttcccatgcagaatcatttgagaactg

SEQ ID NO: 931261 - DNA, 33 bp, Homo sapien
gtttgagtgatttgatcagggctgggatagtaa

SEQ ID NO: 931262 - DNA, 33 bp, Homo sapien
gtttgagtgatttgatgagggctgggatagtaa

SEQ ID NO: 931263 - DNA, 33 bp, Homo sapien
tgaccactttcacataagatttttgcgggggac

SEQ ID NO: 931264 - DNA, 33 bp, Homo sapien
tgaccactttcacatatgatttttgcgggggac

SEQ ID NO: 931265 - DNA, 33 bp, Homo sapien
gtcagaatgtaagaaacggctcagagtctgaag

SEQ ID NO: 931266 - DNA, 33 bp, Homo sapien
gtcagaatgtaagaaatggctcagagtctgaag

SEQ ID NO: 931267 - DNA, 33 bp, Homo sapien
tccatttacatttcaaaggctagaacccagtag

SEQ ID NO: 931268 - DNA, 33 bp, Homo sapien
tccatttacatttcaatggctagaacccagtag

SEQ ID NO: 931269 - DNA, 33 bp, Homo sapien
gagtcctcatatggtggaagaagcaaatactgt

SEQ ID NO: 931270 - DNA, 33 bp, Homo sapien
gagtcctcatatggtgtaagaagcaaatactgt

SEQ ID NO: 931271 - DNA, 33 bp, Homo sapien
caacagtcttgtaaagcattttgttgtcacttt

SEQ ID NO: 931272 - DNA, 33 bp, Homo sapien
caacagtcttgtaaagtattttgttgtcacttt

SEQ ID NO: 931273 - DNA, 33 bp, Homo sapien
ttgattaaggccagataaattcaaattgtaaaa

SEQ ID NO: 931274 - DNA, 33 bp, Homo sapien
ttgattaaggccagatcaattcaaattgtaaaa

SEQ ID NO: 931275 - DNA, 33 bp, Homo sapien
caagtggtaggaaaccaagcagatggaagacga

SEQ ID NO: 931276 - DNA, 33 bp, Homo sapien
caagtggtaggaaaccgagcagatggaagacga

SEQ ID NO: 931277 - DNA, 33 bp, Homo sapien
ggaggctggctttgataaaaaacaggagaggag

SEQ ID NO: 931278 - DNA, 33 bp, Homo sapien
ggaggctggctttgatcaaaaacaggagaggag

SEQ ID NO: 931279 - DNA, 33 bp, Homo sapien
ctgagagagcctagcagctgggaaggacaggga

SEQ ID NO: 931280 - DNA, 33 bp, Homo sapien
ctgagagagcctagcatctgggaaggacaggga

SEQ ID NO: 931281 - DNA, 33 bp, Homo sapien
agacctggccttggaaaatacagctggggacca

SEQ ID NO: 931282 - DNA, 33 bp, Homo sapien
agacctggccttggaagatacagctggggacca

SEQ ID NO: 931283 - DNA, 33 bp, Homo sapien
tctgtaccagctgggacggaaggagagagaagc

SEQ ID NO: 931284 - DNA, 33 bp, Homo sapien
tctgtaccagctgggatggaaggagagagaagc

SEQ ID NO: 931285 - DNA, 33 bp, Homo sapien
gaaaaggagagaccccagacaaattcctggact

SEQ ID NO: 931286 - DNA, 33 bp, Homo sapien
gaaaaggagagaccccggacaaattcctggact

SEQ ID NO: 931287 - DNA, 33 bp, Homo sapien
gaagttagaatctatacccacatctgggctgga

SEQ ID NO: 931288 - DNA, 33 bp, Homo sapien
gaagttagaatctatatccacatctgggctgga

SEQ ID NO: 931289 - DNA, 33 bp, Homo sapien
tcctgtgtccaagaagaatcataaaggaaatag

SEQ ID NO: 931290 - DNA, 33 bp, Homo sapien
tcctgtgtccaagaaggatcataaaggaaatag

SEQ ID NO: 931291 - DNA, 33 bp, Homo sapien
gagaaacagaaagatccacactcagccccagcg

SEQ ID NO: 931292 - DNA, 33 bp, Homo sapien
gagaaacagaaagatctacactcagccccagcg

SEQ ID NO: 931293 - DNA, 33 bp, Homo sapien
tagttctggggtctccgctcaaaaacttgctgg

SEQ ID NO: 931294 - DNA, 33 bp, Homo sapien
tagttctggggtctcctctcaaaaacttgctgg

SEQ ID NO: 931295 - DNA, 33 bp, Homo sapien
cacagaggtgtgcacaataagcccaggcctgag

SEQ ID NO: 931296 - DNA, 33 bp, Homo sapien
cacagaggtgtgcacagtaagcccaggcctgag

SEQ ID NO: 931297 - DNA, 33 bp, Homo sapien
cctctgaggacaatcaagttactcccttttaca

SEQ ID NO: 931298 - DNA, 33 bp, Homo sapien
cctctgaggacaatcaggttactcccttttaca

SEQ ID NO: 931299 - DNA, 33 bp, Homo sapien
agcccacttagatttcaaagagcataaaatggc

SEQ ID NO: 931300 - DNA, 33 bp, Homo sapien
agcccacttagatttccaagagcataaaatggc

SEQ ID NO: 931301 - DNA, 33 bp, Homo sapien
cagggatgtaaagatgaaccttttgagaagctg

SEQ ID NO: 931302 - DNA, 33 bp, Homo sapien
cagggatgtaaagatgtaccttttgagaagctg

SEQ ID NO: 931303 - DNA, 33 bp, Homo sapien
actcctctgtaagaatcatggccactcgatcta

SEQ ID NO: 931304 - DNA, 33 bp, Homo sapien
actcctctgtaagaatgatggccactcgatcta

SEQ ID NO: 931305 - DNA, 33 bp, Homo sapien
ttggaccaataaagtagaaaccagagcagactc

SEQ ID NO: 931306 - DNA, 33 bp, Homo sapien
ttggaccaataaagtataaaccagagcagactc

SEQ ID NO: 931307 - DNA, 33 bp, Homo sapien
ttggcactcttcctcaacctcaagactctgcct

SEQ ID NO: 931308 - DNA, 33 bp, Homo sapien
ttggcactcttcctcaccctcaagactctgcct

SEQ ID NO: 931309 - DNA, 33 bp, Homo sapien
gttcccctggtgaagaaagggcctgcgatgatg

SEQ ID NO: 931310 - DNA, 33 bp, Homo sapien
gttcccctggtgaagacagggcctgcgatgatg

SEQ ID NO: 931311 - DNA, 33 bp, Homo sapien
tatatctgtaaatttaaatcagccctctgtgga

SEQ ID NO: 931312 - DNA, 33 bp, Homo sapien
tatatctgtaaatttatatcagccctctgtgga

SEQ ID NO: 931313 - DNA, 33 bp, Homo sapien
cttcttaaaacttataggtatatcatgccttgc

SEQ ID NO: 931314 - DNA, 33 bp, Homo sapien
cttcttaaaacttatatgtatatcatgccttgc

SEQ ID NO: 931315 - DNA, 33 bp, Homo sapien
acacatccccatttaccgcgtgatgaattactg

SEQ ID NO: 931316 - DNA, 33 bp, Homo sapien
acacatccccatttactgcgtgatgaattactg

SEQ ID NO: 931317 - DNA, 33 bp, Homo sapien
ggttttaaatccatccacaggctatgattccca

SEQ ID NO: 931318 - DNA, 33 bp, Homo sapien
ggttttaaatccatccgcaggctatgattccca

SEQ ID NO: 931319 - DNA, 33 bp, Homo sapien
acaatgaaagaaagcaagagttctctctcacat

SEQ ID NO: 931320 - DNA, 33 bp, Homo sapien
acaatgaaagaaagcaggagttctctctcacat

SEQ ID NO: 931321 - DNA, 33 bp, Homo sapien
tcctgtgtatttttaaagtttgatgatatgagg

SEQ ID NO: 931322 - DNA, 33 bp, Homo sapien
tcctgtgtatttttaatgtttgatgatatgagg

SEQ ID NO: 931323 - DNA, 33 bp, Homo sapien
agggtgatcttgcggacgactgagatgactgtt

SEQ ID NO: 931324 - DNA, 33 bp, Homo sapien
agggtgatcttgcggatgactgagatgactgtt

SEQ ID NO: 931325 - DNA, 33 bp, Homo sapien
taaactctcctctgccaattactcctctctgaa

SEQ ID NO: 931326 - DNA, 33 bp, Homo sapien
taaactctcctctgccgattactcctctctgaa

SEQ ID NO: 931327 - DNA, 33 bp, Homo sapien
aaaagccaacacagccaactccatagagagact

SEQ ID NO: 931328 - DNA, 33 bp, Homo sapien
aaaagccaacacagccgactccatagagagact

SEQ ID NO: 931329 - DNA, 33 bp, Homo sapien
ttttcaagctctgtaacgggaaacttcaaggcc

SEQ ID NO: 931330 - DNA, 33 bp, Homo sapien
ttttcaagctctgtaatgggaaacttcaaggcc

SEQ ID NO: 931331 - DNA, 33 bp, Homo sapien
caacagcagtacttacagaaccaatacagagac

SEQ ID NO: 931332 - DNA, 33 bp, Homo sapien
caacagcagtacttacggaaccaatacagagac

SEQ ID NO: 931333 - DNA, 33 bp, Homo sapien
attgctgactctatgaatatatggagggtttac

SEQ ID NO: 931334 - DNA, 33 bp, Homo sapien
attgctgactctatgattatatggagggtttac

SEQ ID NO: 931335 - DNA, 33 bp, Homo sapien
actgatcaaagagaaacgaaaacagttttagca

SEQ ID NO: 931336 - DNA, 33 bp, Homo sapien
actgatcaaagagaaatgaaaacagttttagca

SEQ ID NO: 931337 - DNA, 33 bp, Homo sapien
gagagcaggactctaacaacatgtggccacgtg

SEQ ID NO: 931338 - DNA, 33 bp, Homo sapien
gagagcaggactctaataacatgtggccacgtg

SEQ ID NO: 931339 - DNA, 33 bp, Homo sapien
atttttatgcatggacgactcaaatgaaatttc

SEQ ID NO: 931340 - DNA, 33 bp, Homo sapien
atttttatgcatggactactcaaatgaaatttc

SEQ ID NO: 931341 - DNA, 33 bp, Homo sapien
ggccagtggcttgtcaacacctgcaggatagac

SEQ ID NO: 931342 - DNA, 33 bp, Homo sapien
ggccagtggcttgtcatcacctgcaggatagac

SEQ ID NO: 931343 - DNA, 33 bp, Homo sapien
ttgttagttcatgatacagttctcacctaaaac

SEQ ID NO: 931344 - DNA, 33 bp, Homo sapien
ttgttagttcatgatatagttctcacctaaaac

SEQ ID NO: 931345 - DNA, 33 bp, Homo sapien
acataatgtggttagaaatacatacgcaatggt

SEQ ID NO: 931346 - DNA, 33 bp, Homo sapien
acataatgtggttagacatacatacgcaatggt

SEQ ID NO: 931347 - DNA, 33 bp, Homo sapien
gtcctaagaattcacaaggtaccaggttctttg

SEQ ID NO: 931348 - DNA, 33 bp, Homo sapien
gtcctaagaattcacatggtaccaggttctttg

SEQ ID NO: 931349 - DNA, 33 bp, Homo sapien
aagagagaagggtatcaatccttgatctgttac

SEQ ID NO: 931350 - DNA, 33 bp, Homo sapien
aagagagaagggtatcgatccttgatctgttac

SEQ ID NO: 931351 - DNA, 33 bp, Homo sapien
aaatgaaccacataggaagtactgttttgcatc

SEQ ID NO: 931352 - DNA, 33 bp, Homo sapien
aaatgaaccacataggtagtactgttttgcatc

SEQ ID NO: 931353 - DNA, 33 bp, Homo sapien
atcaagggccaggtaaagtctatgatttaaagc

SEQ ID NO: 931354 - DNA, 33 bp, Homo sapien
atcaagggccaggtaacgtctatgatttaaagc

SEQ ID NO: 931355 - DNA, 33 bp, Homo sapien
atcaaatgataaggaactgtaactgtgaacgtt

SEQ ID NO: 931356 - DNA, 33 bp, Homo sapien
atcaaatgataaggaattgtaactgtgaacgtt

SEQ ID NO: 931357 - DNA, 33 bp, Homo sapien
cctctgtaaaacaggaatagtgtaacaatgatt

SEQ ID NO: 931358 - DNA, 33 bp, Homo sapien
cctctgtaaaacaggactagtgtaacaatgatt

SEQ ID NO: 931359 - DNA, 33 bp, Homo sapien
tttctgttccttaagacggatgggaaatatgaa

SEQ ID NO: 931360 - DNA, 33 bp, Homo sapien
tttctgttccttaagatggatgggaaatatgaa

SEQ ID NO: 931361 - DNA, 33 bp, Homo sapien
ctgggcaccagaatacaacaacagtgatggtgt

SEQ ID NO: 931362 - DNA, 33 bp, Homo sapien
ctgggcaccagaatacgacaacagtgatggtgt

SEQ ID NO: 931363 - DNA, 33 bp, Homo sapien
tcattgaatatagatactaagtgtgtgtgttaa

SEQ ID NO: 931364 - DNA, 33 bp, Homo sapien
tcattgaatatagatattaagtgtgtgtgttaa

SEQ ID NO: 931365 - DNA, 33 bp, Homo sapien
cataaggcattcaatacagtgatctggaaatca

SEQ ID NO: 931366 - DNA, 33 bp, Homo sapien
cataaggcattcaatatagtgatctggaaatca

SEQ ID NO: 931367 - DNA, 33 bp, Homo sapien
catctctgacctgaaacgagagagttgaaacaa

SEQ ID NO: 931368 - DNA, 33 bp, Homo sapien
catctctgacctgaaatgagagagttgaaacaa

SEQ ID NO: 931369 - DNA, 33 bp, Homo sapien
tgcgggaagatttgtaaagatccacaggagtaa

SEQ ID NO: 931370 - DNA, 33 bp, Homo sapien
tgcgggaagatttgtagagatccacaggagtaa

SEQ ID NO: 931371 - DNA, 33 bp, Homo sapien
aggtaagttcctttgaagaccggaactcattcc

SEQ ID NO: 931372 - DNA, 33 bp, Homo sapien
aggtaagttcctttgaggaccggaactcattcc

SEQ ID NO: 931373 - DNA, 33 bp, Homo sapien
tggagagagttgctaactaaattctaaggtcat

SEQ ID NO: 931374 - DNA, 33 bp, Homo sapien
tggagagagttgctaattaaattctaaggtcat

SEQ ID NO: 931375 - DNA, 33 bp, Homo sapien
tgccaaaaccgtgaagaaggcgtgaacttggca

SEQ ID NO: 931376 - DNA, 33 bp, Homo sapien
tgccaaaaccgtgaagcaggcgtgaacttggca

SEQ ID NO: 931377 - DNA, 33 bp, Homo sapien
agaaggaaaagagatacggcgtcaagtcagcat

SEQ ID NO: 931378 - DNA, 33 bp, Homo sapien
agaaggaaaagagatatggcgtcaagtcagcat

SEQ ID NO: 931379 - DNA, 33 bp, Homo sapien
ttgttgtagaagtgcacaagtagtgatttggga

SEQ ID NO: 931380 - DNA, 33 bp, Homo sapien
ttgttgtagaagtgcagaagtagtgatttggga

SEQ ID NO: 931381 - DNA, 33 bp, Homo sapien
tggtttaatatgtaaactgcttaaattttctat

SEQ ID NO: 931382 - DNA, 33 bp, Homo sapien
tggtttaatatgtaaagtgcttaaattttctat

SEQ ID NO: 931383 - DNA, 33 bp, Homo sapien
tccactggaagagagcagcaaggatttcgagct

SEQ ID NO: 931384 - DNA, 33 bp, Homo sapien
tccactggaagagagcggcaaggatttcgagct

SEQ ID NO: 931385 - DNA, 33 bp, Homo sapien
gccagcattagagtgacaattcttgttctttgt

SEQ ID NO: 931386 - DNA, 33 bp, Homo sapien
gccagcattagagtgataattcttgttctttgt

SEQ ID NO: 931387 - DNA, 33 bp, Homo sapien
tcaccatttccaaacaccaaatagaacaccaga

SEQ ID NO: 931388 - DNA, 33 bp, Homo sapien
tcaccatttccaaacatcaaatagaacaccaga

SEQ ID NO: 931389 - DNA, 33 bp, Homo sapien
caatcctctgcagataacaggggatgactatat

SEQ ID NO: 931390 - DNA, 33 bp, Homo sapien
caatcctctgcagataccaggggatgactatat

SEQ ID NO: 931391 - DNA, 33 bp, Homo sapien
tgtatgttcttgtccacgtactttctcattagc

SEQ ID NO: 931392 - DNA, 33 bp, Homo sapien
tgtatgttcttgtccatgtactttctcattagc

SEQ ID NO: 931393 - DNA, 33 bp, Homo sapien
acagtgggttctgttaaaatcttcagagaattg

SEQ ID NO: 931394 - DNA, 33 bp, Homo sapien
acagtgggttctgttagaatcttcagagaattg

SEQ ID NO: 931395 - DNA, 33 bp, Homo sapien
tttatagatgttgtcacagagcatcttcatgtc

SEQ ID NO: 931396 - DNA, 33 bp, Homo sapien
tttatagatgttgtcatagagcatcttcatgtc

SEQ ID NO: 931397 - DNA, 33 bp, Homo sapien
catttagaatgcatcaaggaaaaatattgagtt

SEQ ID NO: 931398 - DNA, 33 bp, Homo sapien
catttagaatgcatcagggaaaaatattgagtt

SEQ ID NO: 931399 - DNA, 33 bp, Homo sapien
atccatttttcacatcaagggttaagcattaga

SEQ ID NO: 931400 - DNA, 33 bp, Homo sapien
atccatttttcacatcgagggttaagcattaga

SEQ ID NO: 931401 - DNA, 33 bp, Homo sapien
ggcccaattcctcagagggtacaattcccaaca

SEQ ID NO: 931402 - DNA, 33 bp, Homo sapien
ggcccaattcctcagatggtacaattcccaaca

SEQ ID NO: 931403 - DNA, 33 bp, Homo sapien
gggcaagctgtatggacgtctagaggtacaggc

SEQ ID NO: 931404 - DNA, 33 bp, Homo sapien
gggcaagctgtatggatgtctagaggtacaggc

SEQ ID NO: 931405 - DNA, 33 bp, Homo sapien
actcaatatattattaagagagtggctcagttt

SEQ ID NO: 931406 - DNA, 33 bp, Homo sapien
actcaatatattattacgagagtggctcagttt

SEQ ID NO: 931407 - DNA, 33 bp, Homo sapien
attatgatgtcagttcaataaaattccaacaga

SEQ ID NO: 931408 - DNA, 33 bp, Homo sapien
attatgatgtcagttcgataaaattccaacaga

SEQ ID NO: 931409 - DNA, 33 bp, Homo sapien
ctgtgtggccttttggacagtgattagaaaaga

SEQ ID NO: 931410 - DNA, 33 bp, Homo sapien
ctgtgtggccttttgggcagtgattagaaaaga

SEQ ID NO: 931411 - DNA, 33 bp, Homo sapien
ctgaagtcagacttcacgctatgcttagcccag

SEQ ID NO: 931412 - DNA, 33 bp, Homo sapien
ctgaagtcagacttcatgctatgcttagcccag

SEQ ID NO: 931413 - DNA, 33 bp, Homo sapien
aaagcagtaaagacagacaatagacaagattta

SEQ ID NO: 931414 - DNA, 33 bp, Homo sapien
aaagcagtaaagacagtcaatagacaagattta

SEQ ID NO: 931415 - DNA, 33 bp, Homo sapien
ttaacctcctccactaaatccttagcttccaaa

SEQ ID NO: 931416 - DNA, 33 bp, Homo sapien
ttaacctcctccactacatccttagcttccaaa

SEQ ID NO: 931417 - DNA, 33 bp, Homo sapien
catcacaaggcaacaactggctaccaggtgacc

SEQ ID NO: 931418 - DNA, 33 bp, Homo sapien
catcacaaggcaacaagtggctaccaggtgacc

SEQ ID NO: 931419 - DNA, 33 bp, Homo sapien
ttgaatcgttacagaagtggcaatccttccaag

SEQ ID NO: 931420 - DNA, 33 bp, Homo sapien
ttgaatcgttacagaattggcaatccttccaag

SEQ ID NO: 931421 - DNA, 33 bp, Homo sapien
gttcctactacattcacaactggttaggtcttt

SEQ ID NO: 931422 - DNA, 33 bp, Homo sapien
gttcctactacattcagaactggttaggtcttt

SEQ ID NO: 931423 - DNA, 33 bp, Homo sapien
aaacctctctctgataccacaaaactcaccgtt

SEQ ID NO: 931424 - DNA, 33 bp, Homo sapien
aaacctctctctgatatcacaaaactcaccgtt

SEQ ID NO: 931425 - DNA, 33 bp, Homo sapien
gcaactctgacatgcaagttcttttccatatag

SEQ ID NO: 931426 - DNA, 33 bp, Homo sapien
gcaactctgacatgcaggttcttttccatatag

SEQ ID NO: 931427 - DNA, 33 bp, Homo sapien
gcttttcctgtcaacaccatccgagttacttag

SEQ ID NO: 931428 - DNA, 33 bp, Homo sapien
gcttttcctgtcaacagcatccgagttacttag

SEQ ID NO: 931429 - DNA, 33 bp, Homo sapien
agattttaggtaaggacggaagcaactacaata

SEQ ID NO: 931430 - DNA, 33 bp, Homo sapien
agattttaggtaaggatggaagcaactacaata

SEQ ID NO: 931431 - DNA, 33 bp, Homo sapien
tttggagaagtttaaagctagcaggtgtaattg

SEQ ID NO: 931432 - DNA, 33 bp, Homo sapien
tttggagaagtttaaatctagcaggtgtaattg

SEQ ID NO: 931433 - DNA, 33 bp, Homo sapien
cattgactcttgccaactgaactactttctgtc

SEQ ID NO: 931434 - DNA, 33 bp, Homo sapien
cattgactcttgccaagtgaactactttctgtc

SEQ ID NO: 931435 - DNA, 33 bp, Homo sapien
ctttttttcttctttaacacagaagcatccagg

SEQ ID NO: 931436 - DNA, 33 bp, Homo sapien
ctttttttcttctttatcacagaagcatccagg

SEQ ID NO: 931437 - DNA, 33 bp, Homo sapien
gatttgctttagctcacgcattccacaaacatt

SEQ ID NO: 931438 - DNA, 33 bp, Homo sapien
gatttgctttagctcatgcattccacaaacatt

SEQ ID NO: 931439 - DNA, 33 bp, Homo sapien
gcctttgaaagaagtgaatgttcgcttcccatg

SEQ ID NO: 931440 - DNA, 33 bp, Homo sapien
gcctttgaaagaagtgtatgttcgcttcccatg

SEQ ID NO: 931441 - DNA, 33 bp, Homo sapien
accacacctgaccgcaagatacttcttacacag

SEQ ID NO: 931442 - DNA, 33 bp, Homo sapien
accacacctgaccgcaggatacttcttacacag

SEQ ID NO: 931443 - DNA, 33 bp, Homo sapien
accaattaaaatcaccaaaaagtgcctcatgtg

SEQ ID NO: 931444 - DNA, 33 bp, Homo sapien
accaattaaaatcaccgaaaagtgcctcatgtg

SEQ ID NO: 931445 - DNA, 33 bp, Homo sapien
cagagacaatctgaaaatatggactaagacata

SEQ ID NO: 931446 - DNA, 33 bp, Homo sapien
cagagacaatctgaaactatggactaagacata

SEQ ID NO: 931447 - DNA, 33 bp, Homo sapien
gtatgtaaaaaagttcaaccttgctaataataa

SEQ ID NO: 931448 - DNA, 33 bp, Homo sapien
gtatgtaaaaaagttcgaccttgctaataataa

SEQ ID NO: 931449 - DNA, 33 bp, Homo sapien
ctgagattgaactacaaagtgcaatgggattta

SEQ ID NO: 931450 - DNA, 33 bp, Homo sapien
ctgagattgaactacacagtgcaatgggattta

SEQ ID NO: 931451 - DNA, 33 bp, Homo sapien
gtcggcaggaattaaaagttggcaatggagatc

SEQ ID NO: 931452 - DNA, 33 bp, Homo sapien
gtcggcaggaattaaaggttggcaatggagatc

SEQ ID NO: 931453 - DNA, 33 bp, Homo sapien
gattatatgcatggaagaatgaggtcctctgcc

SEQ ID NO: 931454 - DNA, 33 bp, Homo sapien
gattatatgcatggaataatgaggtcctctgcc

SEQ ID NO: 931455 - DNA, 33 bp, Homo sapien
gtatgttcctggagaacgcaacttgtaatgcta

SEQ ID NO: 931456 - DNA, 33 bp, Homo sapien
gtatgttcctggagaatgcaacttgtaatgcta

SEQ ID NO: 931457 - DNA, 33 bp, Homo sapien
taggcttctcctgccaaaaagttggctatttcg

SEQ ID NO: 931458 - DNA, 33 bp, Homo sapien
taggcttctcctgccagaaagttggctatttcg

SEQ ID NO: 931459 - DNA, 33 bp, Homo sapien
gtataacatttccccacgatcctactgagattt

SEQ ID NO: 931460 - DNA, 33 bp, Homo sapien
gtataacatttccccatgatcctactgagattt

SEQ ID NO: 931461 - DNA, 33 bp, Homo sapien
actgtgatttcctcaacggaaagagccatacat

SEQ ID NO: 931462 - DNA, 33 bp, Homo sapien
actgtgatttcctcaagggaaagagccatacat

SEQ ID NO: 931463 - DNA, 33 bp, Homo sapien
ctcaaaaggtcatcccggaaaatagcaggtcag

SEQ ID NO: 931464 - DNA, 33 bp, Homo sapien
ctcaaaaggtcatccctgaaaatagcaggtcag

SEQ ID NO: 931465 - DNA, 33 bp, Homo sapien
cacctgcaagttcaacacctggaatgtgagagt

SEQ ID NO: 931466 - DNA, 33 bp, Homo sapien
cacctgcaagttcaacgcctggaatgtgagagt

SEQ ID NO: 931467 - DNA, 33 bp, Homo sapien
cgggtttatcactatcagagcagaaatttacag

SEQ ID NO: 931468 - DNA, 33 bp, Homo sapien
cgggtttatcactatcggagcagaaatttacag

SEQ ID NO: 931469 - DNA, 33 bp, Homo sapien
aactgcctttgttagaggaaagtagtactttgg

SEQ ID NO: 931470 - DNA, 33 bp, Homo sapien
aactgcctttgttagatgaaagtagtactttgg

SEQ ID NO: 931471 - DNA, 33 bp, Homo sapien
atattggcatttgctcaagttttgaaggctctc

SEQ ID NO: 931472 - DNA, 33 bp, Homo sapien
atattggcatttgctcgagttttgaaggctctc

SEQ ID NO: 931473 - DNA, 33 bp, Homo sapien
aacaccttagagaccactgcttagttcttagct

SEQ ID NO: 931474 - DNA, 33 bp, Homo sapien
aacaccttagagaccattgcttagttcttagct

SEQ ID NO: 931475 - DNA, 33 bp, Homo sapien
tgtgtgcaacttggccaatgtagacttaaatgc

SEQ ID NO: 931476 - DNA, 33 bp, Homo sapien
tgtgtgcaacttggccgatgtagacttaaatgc

SEQ ID NO: 931477 - DNA, 33 bp, Homo sapien
atagtaactcttttagacgttgcgcaccacaca

SEQ ID NO: 931478 - DNA, 33 bp, Homo sapien
atagtaactcttttaggcgttgcgcaccacaca

SEQ ID NO: 931479 - DNA, 33 bp, Homo sapien
agaaattcaaatcccaacaacacatggcaagaa

SEQ ID NO: 931480 - DNA, 33 bp, Homo sapien
agaaattcaaatcccatcaacacatggcaagaa

SEQ ID NO: 931481 - DNA, 33 bp, Homo sapien
gccactctcagaaccacggctgctactactgcc

SEQ ID NO: 931482 - DNA, 33 bp, Homo sapien
gccactctcagaaccatggctgctactactgcc

SEQ ID NO: 931483 - DNA, 33 bp, Homo sapien
agtatccaccaacagaagaatacatgaataaat

SEQ ID NO: 931484 - DNA, 33 bp, Homo sapien
agtatccaccaacagatgaatacatgaataaat

SEQ ID NO: 931485 - DNA, 33 bp, Homo sapien
aatacctaaacaattaagccgtgtgatcaagcc

SEQ ID NO: 931486 - DNA, 33 bp, Homo sapien
aatacctaaacaattaggccgtgtgatcaagcc

SEQ ID NO: 931487 - DNA, 33 bp, Homo sapien
atcaagaaagagaatacggccaacaccccagtg

SEQ ID NO: 931488 - DNA, 33 bp, Homo sapien
atcaagaaagagaatatggccaacaccccagtg

SEQ ID NO: 931489 - DNA, 33 bp, Homo sapien
cacagatattagtgaaaacccaattaaataaca

SEQ ID NO: 931490 - DNA, 33 bp, Homo sapien
cacagatattagtgaagacccaattaaataaca

SEQ ID NO: 931491 - DNA, 33 bp, Homo sapien
ggagagagacaactcagatgtccttgaggccag

SEQ ID NO: 931492 - DNA, 33 bp, Homo sapien
ggagagagacaactcatatgtccttgaggccag

SEQ ID NO: 931493 - DNA, 33 bp, Homo sapien
tttattttgcacataaatgattttcctcagtaa

SEQ ID NO: 931494 - DNA, 33 bp, Homo sapien
tttattttgcacataagtgattttcctcagtaa

SEQ ID NO: 931495 - DNA, 33 bp, Homo sapien
gggtcattgtcaatcccaactcactatggaatt

SEQ ID NO: 931496 - DNA, 33 bp, Homo sapien
gggtcattgtcaatccgaactcactatggaatt

SEQ ID NO: 931497 - DNA, 33 bp, Homo sapien
ggtgcacagaaaaaaaacattcagcagtctaaa

SEQ ID NO: 931498 - DNA, 33 bp, Homo sapien
ggtgcacagaaaaaaaccattcagcagtctaaa

SEQ ID NO: 931499 - DNA, 33 bp, Homo sapien
acaaccacagcaattcacaccacaggctgtgac

SEQ ID NO: 931500 - DNA, 33 bp, Homo sapien
acaaccacagcaattctcaccacaggctgtgac

SEQ ID NO: 931501 - DNA, 33 bp, Homo sapien
aggcacttttatataccctcatctcatgtgatg

SEQ ID NO: 931502 - DNA, 33 bp, Homo sapien
aggcacttttatatactctcatctcatgtgatg

SEQ ID NO: 931503 - DNA, 33 bp, Homo sapien
tagttaggttgagcaccctgtttcttggtttta

SEQ ID NO: 931504 - DNA, 33 bp, Homo sapien
tagttaggttgagcactctgtttcttggtttta

SEQ ID NO: 931505 - DNA, 33 bp, Homo sapien
tgatgtacacaggaaagaaaagaatttctacct

SEQ ID NO: 931506 - DNA, 33 bp, Homo sapien
tgatgtacacaggaaataaaagaatttctacct

SEQ ID NO: 931507 - DNA, 33 bp, Homo sapien
acaatcttaaaattcacgtggcaccaaaaatgg

SEQ ID NO: 931508 - DNA, 33 bp, Homo sapien
acaatcttaaaattcatgtggcaccaaaaatgg

SEQ ID NO: 931509 - DNA, 33 bp, Homo sapien
ctctaatcttcaacaaatcaagcaaagtgatac

SEQ ID NO: 931510 - DNA, 33 bp, Homo sapien
ctctaatcttcaacaagtcaagcaaagtgatac

SEQ ID NO: 931511 - DNA, 33 bp, Homo sapien
agccgtacaggaattacatacatctgacaatta

SEQ ID NO: 931512 - DNA, 33 bp, Homo sapien
agccgtacaggaattatatacatctgacaatta

SEQ ID NO: 931513 - DNA, 33 bp, Homo sapien
aagaatgttgctaggaaccaagaggccataata

SEQ ID NO: 931514 - DNA, 33 bp, Homo sapien
aagaatgttgctaggatccaagaggccataata

SEQ ID NO: 931515 - DNA, 33 bp, Homo sapien
cagaattgtgttatagaaagtgtattagtctgt

SEQ ID NO: 931516 - DNA, 33 bp, Homo sapien
cagaattgtgttataggaagtgtattagtctgt

SEQ ID NO: 931517 - DNA, 33 bp, Homo sapien
caggatcaaatgtccaatgaaattcaacccaat

SEQ ID NO: 931518 - DNA, 33 bp, Homo sapien
caggatcaaatgtccagtgaaattcaacccaat

SEQ ID NO: 931519 - DNA, 33 bp, Homo sapien
tttcttgtttttaccactcatttgacatatcta

SEQ ID NO: 931520 - DNA, 33 bp, Homo sapien
tttcttgtttttaccattcatttgacatatcta

SEQ ID NO: 931521 - DNA, 33 bp, Homo sapien
ccattctgtgtacaagcagaacctaaccttgat

SEQ ID NO: 931522 - DNA, 33 bp, Homo sapien
ccattctgtgtacaagtagaacctaaccttgat

SEQ ID NO: 931523 - DNA, 33 bp, Homo sapien
ttctcttgcctcatctaaatgtgaaaggaatgg

SEQ ID NO: 931524 - DNA, 33 bp, Homo sapien
ttctcttgcctcatctgaatgtgaaaggaatgg

SEQ ID NO: 931525 - DNA, 33 bp, Homo sapien
tcaggtattttatagcaaacttctatgtagaat

SEQ ID NO: 931526 - DNA, 33 bp, Homo sapien
tcaggtattttatagcgaacttctatgtagaat

SEQ ID NO: 931527 - DNA, 33 bp, Homo sapien
agatgcagtgaaggaacacgtttgaaatgctcc

SEQ ID NO: 931528 - DNA, 33 bp, Homo sapien
agatgcagtgaaggaagacgtttgaaatgctcc

SEQ ID NO: 931529 - DNA, 33 bp, Homo sapien
aaagagattagaatccaaggaaattgtggtaca

SEQ ID NO: 931530 - DNA, 33 bp, Homo sapien
aaagagattagaatccgaggaaattgtggtaca

SEQ ID NO: 931531 - DNA, 33 bp, Homo sapien
aaaggagaaagggaaacaatctcatgttgaaaa

SEQ ID NO: 931532 - DNA, 33 bp, Homo sapien
aaaggagaaagggaaagaatctcatgttgaaaa

SEQ ID NO: 931533 - DNA, 33 bp, Homo sapien
caacattaaagggataaactagaccaggaacac

SEQ ID NO: 931534 - DNA, 33 bp, Homo sapien
caacattaaagggatagactagaccaggaacac

SEQ ID NO: 931535 - DNA, 33 bp, Homo sapien
tctttctctggtatcagtattctctgtgcttgt

SEQ ID NO: 931536 - DNA, 33 bp, Homo sapien
tctttctctggtatcattattctctgtgcttgt

SEQ ID NO: 931537 - DNA, 33 bp, Homo sapien
acatggaacaaatacaaaatggactatcgaatt

SEQ ID NO: 931538 - DNA, 33 bp, Homo sapien
acatggaacaaatacagaatggactatcgaatt

SEQ ID NO: 931539 - DNA, 33 bp, Homo sapien
atcactaagaaaaatccgtagactgtgagaata

SEQ ID NO: 931540 - DNA, 33 bp, Homo sapien
atcactaagaaaaatctgtagactgtgagaata

SEQ ID NO: 931541 - DNA, 33 bp, Homo sapien
ataaaaattagccatgcatcgtggtcacagcta

SEQ ID NO: 931542 - DNA, 33 bp, Homo sapien
ataaaaattagccatgtatcgtggtcacagcta

SEQ ID NO: 931543 - DNA, 33 bp, Homo sapien
gtttgtatctctcaagaatttcatttagcagtt

SEQ ID NO: 931544 - DNA, 33 bp, Homo sapien
gtttgtatctctcaaggatttcatttagcagtt

SEQ ID NO: 931545 - DNA, 33 bp, Homo sapien
attcttttctagctaaaggtcaatatcccccac

SEQ ID NO: 931546 - DNA, 33 bp, Homo sapien
attcttttctagctaacggtcaatatcccccac

SEQ ID NO: 931547 - DNA, 33 bp, Homo sapien
tgttccttcactaagacacctatggattgatga

SEQ ID NO: 931548 - DNA, 33 bp, Homo sapien
tgttccttcactaagatacctatggattgatga

SEQ ID NO: 931549 - DNA, 33 bp, Homo sapien
aactactgaagaatgcaacactgcggatgaatg

SEQ ID NO: 931550 - DNA, 33 bp, Homo sapien
aactactgaagaatgcgacactgcggatgaatg

SEQ ID NO: 931551 - DNA, 33 bp, Homo sapien
ttctctgtatttaaaaacttcatggaggtagac

SEQ ID NO: 931552 - DNA, 33 bp, Homo sapien
ttctctgtatttaaaagcttcatggaggtagac

SEQ ID NO: 931553 - DNA, 33 bp, Homo sapien
tttttctctctaaagcccctctggtttaggaac

SEQ ID NO: 931554 - DNA, 33 bp, Homo sapien
tttttctctctaaagcgcctctggtttaggaac

SEQ ID NO: 931555 - DNA, 33 bp, Homo sapien
gtagctacagtcacaaattaacaattatcaggg

SEQ ID NO: 931556 - DNA, 33 bp, Homo sapien
gtagctacagtcacaagttaacaattatcaggg

SEQ ID NO: 931557 - DNA, 33 bp, Homo sapien
gagcaaaaggccaaacaatgtagcctaggtgtg

SEQ ID NO: 931558 - DNA, 33 bp, Homo sapien
gagcaaaaggccaaaccatgtagcctaggtgtg

SEQ ID NO: 931559 - DNA, 33 bp, Homo sapien
cccatgaaggatgaccaataatgaaagaacagc

SEQ ID NO: 931560 - DNA, 33 bp, Homo sapien
cccatgaaggatgaccgataatgaaagaacagc

SEQ ID NO: 931561 - DNA, 33 bp, Homo sapien
accagtgtaactccaactgattaccccatcata

SEQ ID NO: 931562 - DNA, 33 bp, Homo sapien
accagtgtaactccaattgattaccccatcata

SEQ ID NO: 931563 - DNA, 33 bp, Homo sapien
aactggtgacatgttaagtgagcgataaaaact

SEQ ID NO: 931564 - DNA, 33 bp, Homo sapien
aactggtgacatgttacgtgagcgataaaaact

SEQ ID NO: 931565 - DNA, 33 bp, Homo sapien
atagattaaaggcctacatgtaatacagaaaaa

SEQ ID NO: 931566 - DNA, 33 bp, Homo sapien
atagattaaaggcctagatgtaatacagaaaaa

SEQ ID NO: 931567 - DNA, 33 bp, Homo sapien
tatagctttctaagtgaaaatttgccttcttat

SEQ ID NO: 931568 - DNA, 33 bp, Homo sapien
tatagctttctaagtggaaatttgccttcttat

SEQ ID NO: 931569 - DNA, 33 bp, Homo sapien
aaagcagtattgtatacgttataggtccacaat

SEQ ID NO: 931570 - DNA, 33 bp, Homo sapien
aaagcagtattgtatatgttataggtccacaat

SEQ ID NO: 931571 - DNA, 33 bp, Homo sapien
cacacatggagacaagcaagggaacaacagaca

SEQ ID NO: 931572 - DNA, 33 bp, Homo sapien
cacacatggagacaaggaagggaacaacagaca

SEQ ID NO: 931573 - DNA, 33 bp, Homo sapien
aatacaatcatttctcactcaaagatgggggta

SEQ ID NO: 931574 - DNA, 33 bp, Homo sapien
aatacaatcatttctcgctcaaagatgggggta

SEQ ID NO: 931575 - DNA, 33 bp, Homo sapien
aaggaggaatattttccatcaactgcaactctc

SEQ ID NO: 931576 - DNA, 33 bp, Homo sapien
aaggaggaatattttctatcaactgcaactctc

SEQ ID NO: 931577 - DNA, 33 bp, Homo sapien
ggagtaacaatctaacaattaccagtctataat

SEQ ID NO: 931578 - DNA, 33 bp, Homo sapien
ggagtaacaatctaaccattaccagtctataat

SEQ ID NO: 931579 - DNA, 33 bp, Homo sapien
attctcactgaaatgactatggaacagagggaa

SEQ ID NO: 931580 - DNA, 33 bp, Homo sapien
attctcactgaaatgagtatggaacagagggaa

SEQ ID NO: 931581 - DNA, 33 bp, Homo sapien
ttgaatatctgggctacgagcatttttcactag

SEQ ID NO: 931582 - DNA, 33 bp, Homo sapien
ttgaatatctgggctatgagcatttttcactag

SEQ ID NO: 931583 - DNA, 33 bp, Homo sapien
taaccattattgtgaactctatccctacagata

SEQ ID NO: 931584 - DNA, 33 bp, Homo sapien
taaccattattgtgaattctatccctacagata

SEQ ID NO: 931585 - DNA, 33 bp, Homo sapien
atccttcctttttccaagtctgtcatgctattt

SEQ ID NO: 931586 - DNA, 33 bp, Homo sapien
atccttcctttttccaggtctgtcatgctattt

SEQ ID NO: 931587 - DNA, 33 bp, Homo sapien
gaaagatacaaagtacggattgtgcgtgtgtct

SEQ ID NO: 931588 - DNA, 33 bp, Homo sapien
gaaagatacaaagtactgattgtgcgtgtgtct

SEQ ID NO: 931589 - DNA, 33 bp, Homo sapien
agggattaattttgtccatggtggattgcactg

SEQ ID NO: 931590 - DNA, 33 bp, Homo sapien
agggattaattttgtcgatggtggattgcactg

SEQ ID NO: 931591 - DNA, 33 bp, Homo sapien
aaggggtctactttaacatagcacgtggtctgt

SEQ ID NO: 931592 - DNA, 33 bp, Homo sapien
aaggggtctactttaatatagcacgtggtctgt

SEQ ID NO: 931593 - DNA, 33 bp, Homo sapien
gatacgaataacaaacaacaatgtcactggttt

SEQ ID NO: 931594 - DNA, 33 bp, Homo sapien
gatacgaataacaaacgacaatgtcactggttt

SEQ ID NO: 931595 - DNA, 33 bp, Homo sapien
agttggtacacagcaaatgcttaatcagtgaat

SEQ ID NO: 931596 - DNA, 33 bp, Homo sapien
agttggtacacagcaagtgcttaatcagtgaat

SEQ ID NO: 931597 - DNA, 33 bp, Homo sapien
tcctgttggcttttcaaaaaatatccagaatct

SEQ ID NO: 931598 - DNA, 33 bp, Homo sapien
tcctgttggcttttcagaaaatatccagaatct

SEQ ID NO: 931599 - DNA, 33 bp, Homo sapien
ctgttgaaaactgtgagatcttcttccagcatg

SEQ ID NO: 931600 - DNA, 33 bp, Homo sapien
ctgttgaaaactgtgatatcttcttccagcatg

SEQ ID NO: 931601 - DNA, 33 bp, Homo sapien
ttcagagcctaaaataaagtggttgagtcaggg

SEQ ID NO: 931602 - DNA, 33 bp, Homo sapien
ttcagagcctaaaatagagtggttgagtcaggg

SEQ ID NO: 931603 - DNA, 33 bp, Homo sapien
agatatattaggttcccctgacatatgttacag

SEQ ID NO: 931604 - DNA, 33 bp, Homo sapien
agatatattaggttcctctgacatatgttacag

SEQ ID NO: 931605 - DNA, 33 bp, Homo sapien
agaaccattactgtcagctttttggtagctggt

SEQ ID NO: 931606 - DNA, 33 bp, Homo sapien
agaaccattactgtcatctttttggtagctggt

SEQ ID NO: 931607 - DNA, 33 bp, Homo sapien
taagccctgtgcagtgcattttgtttctagttt

SEQ ID NO: 931608 - DNA, 33 bp, Homo sapien
taagccctgtgcagtgtattttgtttctagttt

SEQ ID NO: 931609 - DNA, 33 bp, Homo sapien
ggtaaggagccaaatcaagctgtctctggtgga

SEQ ID NO: 931610 - DNA, 33 bp, Homo sapien
ggtaaggagccaaatcgagctgtctctggtgga

SEQ ID NO: 931611 - DNA, 33 bp, Homo sapien
atatttgcgaaattaaactagagaaagaaggaa

SEQ ID NO: 931612 - DNA, 33 bp, Homo sapien
atatttgcgaaattaacctagagaaagaaggaa

SEQ ID NO: 931613 - DNA, 33 bp, Homo sapien
acacctctactttaacaaactataactcgtaga

SEQ ID NO: 931614 - DNA, 33 bp, Homo sapien
acacctctactttaacgaactataactcgtaga

SEQ ID NO: 931615 - DNA, 33 bp, Homo sapien
ttgcaggatgcttcaccgtagctgactggtctg

SEQ ID NO: 931616 - DNA, 33 bp, Homo sapien
ttgcaggatgcttcactgtagctgactggtctg

SEQ ID NO: 931617 - DNA, 33 bp, Homo sapien
aaacaaacacaagaaaagtatttgatatggtta

SEQ ID NO: 931618 - DNA, 33 bp, Homo sapien
aaacaaacacaagaaaggtatttgatatggtta

SEQ ID NO: 931619 - DNA, 33 bp, Homo sapien
catggtgcttgtcaccaaatgatctattatctg

SEQ ID NO: 931620 - DNA, 33 bp, Homo sapien
catggtgcttgtcaccgaatgatctattatctg

SEQ ID NO: 931621 - DNA, 33 bp, Homo sapien
cagtaacatatggctaacgtattggtcagaaaa

SEQ ID NO: 931622 - DNA, 33 bp, Homo sapien
cagtaacatatggctagcgtattggtcagaaaa

SEQ ID NO: 931623 - DNA, 33 bp, Homo sapien
ctatgcttcttactagccaagtttcacaaagcc

SEQ ID NO: 931624 - DNA, 33 bp, Homo sapien
ctatgcttcttactagtcaagtttcacaaagcc

SEQ ID NO: 931625 - DNA, 33 bp, Homo sapien
tgttttttcagcctcacgttcatgttgtgagga

SEQ ID NO: 931626 - DNA, 33 bp, Homo sapien
tgttttttcagcctcatgttcatgttgtgagga

SEQ ID NO: 931627 - DNA, 33 bp, Homo sapien
aaccatttgaacagaacggaagtaccaacacaa

SEQ ID NO: 931628 - DNA, 33 bp, Homo sapien
aaccatttgaacagaatggaagtaccaacacaa

SEQ ID NO: 931629 - DNA, 33 bp, Homo sapien
attaagcctcactaaacggacagtgatctctag

SEQ ID NO: 931630 - DNA, 33 bp, Homo sapien
attaagcctcactaaatggacagtgatctctag

SEQ ID NO: 931631 - DNA, 33 bp, Homo sapien
ctgtgagttggaatggacacttctaaaaacaaa

SEQ ID NO: 931632 - DNA, 33 bp, Homo sapien
ctgtgagttggaatggccacttctaaaaacaaa

SEQ ID NO: 931633 - DNA, 33 bp, Homo sapien
aactaactatcctaataaaaaaggaagagcttt

SEQ ID NO: 931634 - DNA, 33 bp, Homo sapien
aactaactatcctaatcaaaaaggaagagcttt

SEQ ID NO: 931635 - DNA, 33 bp, Homo sapien
atttaggtatatgcccacgggaagagaaaatct

SEQ ID NO: 931636 - DNA, 33 bp, Homo sapien
atttaggtatatgcccccgggaagagaaaatct

SEQ ID NO: 931637 - DNA, 33 bp, Homo sapien
gcacaggaagcctgtacatggatttctctagac

SEQ ID NO: 931638 - DNA, 33 bp, Homo sapien
gcacaggaagcctgtatatggatttctctagac

SEQ ID NO: 931639 - DNA, 33 bp, Homo sapien
cgtgaccaggtgacaactcccttatcttaggca

SEQ ID NO: 931640 - DNA, 33 bp, Homo sapien
cgtgaccaggtgacaagtcccttatcttaggca

SEQ ID NO: 931641 - DNA, 33 bp, Homo sapien
gtatggaactaaaagaagttatgttgggataga

SEQ ID NO: 931642 - DNA, 33 bp, Homo sapien
gtatggaactaaaagacgttatgttgggataga

SEQ ID NO: 931643 - DNA, 33 bp, Homo sapien
tatctcacctgtagaaaagtgttgagcttgatc

SEQ ID NO: 931644 - DNA, 33 bp, Homo sapien
tatctcacctgtagaatagtgttgagcttgatc

SEQ ID NO: 931645 - DNA, 33 bp, Homo sapien
tcctgtgcttagggcaaaagattcttgatcccc

SEQ ID NO: 931646 - DNA, 33 bp, Homo sapien
tcctgtgcttagggcagaagattcttgatcccc

SEQ ID NO: 931647 - DNA, 33 bp, Homo sapien
ttttcttttctgtaaaataagcatacctttatt

SEQ ID NO: 931648 - DNA, 33 bp, Homo sapien
ttttcttttctgtaaagtaagcatacctttatt

SEQ ID NO: 931649 - DNA, 33 bp, Homo sapien
caccaagattagttaacgaaccttaattggcaa

SEQ ID NO: 931650 - DNA, 33 bp, Homo sapien
caccaagattagttaatgaaccttaattggcaa

SEQ ID NO: 931651 - DNA, 33 bp, Homo sapien
tgaacatgactttccacatcttcattgagtgtt

SEQ ID NO: 931652 - DNA, 33 bp, Homo sapien
tgaacatgactttccatatcttcattgagtgtt

SEQ ID NO: 931653 - DNA, 33 bp, Homo sapien
actccaagcaaccttacgttgccttctgattgc

SEQ ID NO: 931654 - DNA, 33 bp, Homo sapien
actccaagcaaccttatgttgccttctgattgc

SEQ ID NO: 931655 - DNA, 33 bp, Homo sapien
agcagtcagtttgacaatctcacagggtgatct

SEQ ID NO: 931656 - DNA, 33 bp, Homo sapien
agcagtcagtttgacagtctcacagggtgatct

SEQ ID NO: 931657 - DNA, 33 bp, Homo sapien
gctgatgcacctgttacatatttggcagataaa

SEQ ID NO: 931658 - DNA, 33 bp, Homo sapien
gctgatgcacctgttatatatttggcagataaa

SEQ ID NO: 931659 - DNA, 33 bp, Homo sapien
tccctccattatctcaaatcttctaaggcagca

SEQ ID NO: 931660 - DNA, 33 bp, Homo sapien
tccctccattatctcacatcttctaaggcagca

SEQ ID NO: 931661 - DNA, 33 bp, Homo sapien
atgtaacagagttcaagaaaatatagatggatg

SEQ ID NO: 931662 - DNA, 33 bp, Homo sapien
atgtaacagagttcaataaaatatagatggatg

SEQ ID NO: 931663 - DNA, 33 bp, Homo sapien
tccagggttaaagcacagcccagaacgtaactt

SEQ ID NO: 931664 - DNA, 33 bp, Homo sapien
tccagggttaaagcacggcccagaacgtaactt

SEQ ID NO: 931665 - DNA, 33 bp, Homo sapien
ttagatgtctaatcagcatcttaaactccactt

SEQ ID NO: 931666 - DNA, 33 bp, Homo sapien
ttagatgtctaatcagtatcttaaactccactt

SEQ ID NO: 931667 - DNA, 33 bp, Homo sapien
agatgaaaatatcacccaaattactgatgtctc

SEQ ID NO: 931668 - DNA, 33 bp, Homo sapien
agatgaaaatatcacctaaattactgatgtctc

SEQ ID NO: 931669 - DNA, 33 bp, Homo sapien
tactctatgactcatcgagaccgtaaagatgaa

SEQ ID NO: 931670 - DNA, 33 bp, Homo sapien
tactctatgactcatctagaccgtaaagatgaa

SEQ ID NO: 931671 - DNA, 33 bp, Homo sapien
aacagtagaaatagaccacatgatcattataag

SEQ ID NO: 931672 - DNA, 33 bp, Homo sapien
aacagtagaaatagacgacatgatcattataag

SEQ ID NO: 931673 - DNA, 33 bp, Homo sapien
cccccagtgaaagaatcatgccccaggagctat

SEQ ID NO: 931674 - DNA, 33 bp, Homo sapien
cccccagtgaaagaattatgccccaggagctat

SEQ ID NO: 931675 - DNA, 33 bp, Homo sapien
ggtcctttgatcataacccatagttcctgaaac

SEQ ID NO: 931676 - DNA, 33 bp, Homo sapien
ggtcctttgatcataatccatagttcctgaaac

SEQ ID NO: 931677 - DNA, 33 bp, Homo sapien
tgatgaatatggaaacagatggtaattcttctt

SEQ ID NO: 931678 - DNA, 33 bp, Homo sapien
tgatgaatatggaaaccgatggtaattcttctt

SEQ ID NO: 931679 - DNA, 33 bp, Homo sapien
tttacaatcactataaggcaggaaaataccaaa

SEQ ID NO: 931680 - DNA, 33 bp, Homo sapien
tttacaatcactataatgcaggaaaataccaaa

SEQ ID NO: 931681 - DNA, 33 bp, Homo sapien
cctctgttattattccaaaaccctagctggcta

SEQ ID NO: 931682 - DNA, 33 bp, Homo sapien
cctctgttattattccgaaaccctagctggcta

SEQ ID NO: 931683 - DNA, 33 bp, Homo sapien
ctgtatttacattcaagatccttaagttttcta

SEQ ID NO: 931684 - DNA, 33 bp, Homo sapien
ctgtatttacattcaatatccttaagttttcta

SEQ ID NO: 931685 - DNA, 33 bp, Homo sapien
aaacatgacctaaaaaaacccatgtccacatta

SEQ ID NO: 931686 - DNA, 33 bp, Homo sapien
aaacatgacctaaaaacacccatgtccacatta

SEQ ID NO: 931687 - DNA, 33 bp, Homo sapien
cgtgtctgcagaggcacgtgtaaagtgatgcta

SEQ ID NO: 931688 - DNA, 33 bp, Homo sapien
cgtgtctgcagaggcatgtgtaaagtgatgcta

SEQ ID NO: 931689 - DNA, 33 bp, Homo sapien
agctgaaagtaactaaacagtcctcaagtcaaa

SEQ ID NO: 931690 - DNA, 33 bp, Homo sapien
agctgaaagtaactaagcagtcctcaagtcaaa

SEQ ID NO: 931691 - DNA, 33 bp, Homo sapien
agtggcaatgcctcaaattaaccaatcccattg

SEQ ID NO: 931692 - DNA, 33 bp, Homo sapien
agtggcaatgcctcaagttaaccaatcccattg

SEQ ID NO: 931693 - DNA, 33 bp, Homo sapien
aatgcaatctggttgacctagtttgagtcttct

SEQ ID NO: 931694 - DNA, 33 bp, Homo sapien
aatgcaatctggttgatctagtttgagtcttct

SEQ ID NO: 931695 - DNA, 33 bp, Homo sapien
agagcttatgaaaaaccgaatacccactctaac

SEQ ID NO: 931696 - DNA, 33 bp, Homo sapien
agagcttatgaaaaactgaatacccactctaac

SEQ ID NO: 931697 - DNA, 33 bp, Homo sapien
acagcgaatgtgagtacgactaccgagtacctc

SEQ ID NO: 931698 - DNA, 33 bp, Homo sapien
acagcgaatgtgagtatgactaccgagtacctc

SEQ ID NO: 931699 - DNA, 33 bp, Homo sapien
ttcctctgcctcaccccaagttgaaaacaatca

SEQ ID NO: 931700 - DNA, 33 bp, Homo sapien
ttcctctgcctcacccgaagttgaaaacaatca

SEQ ID NO: 931701 - DNA, 33 bp, Homo sapien
agctaagattttttgacgacagaatgaagattc

SEQ ID NO: 931702 - DNA, 33 bp, Homo sapien
agctaagattttttgatgacagaatgaagattc

SEQ ID NO: 931703 - DNA, 33 bp, Homo sapien
aatgtccaacagcataagactaagttgagaatt

SEQ ID NO: 931704 - DNA, 33 bp, Homo sapien
aatgtccaacagcataggactaagttgagaatt

SEQ ID NO: 931705 - DNA, 33 bp, Homo sapien
aagtaaggacactttgaatcttcagagtcatac

SEQ ID NO: 931706 - DNA, 33 bp, Homo sapien
aagtaaggacactttgcatcttcagagtcatac

SEQ ID NO: 931707 - DNA, 33 bp, Homo sapien
gccatatacaattcaaatgatccaaaatggtat

SEQ ID NO: 931708 - DNA, 33 bp, Homo sapien
gccatatacaattcaagtgatccaaaatggtat

SEQ ID NO: 931709 - DNA, 33 bp, Homo sapien
gaaaatcagagtgcaacgtcttcctgctccctt

SEQ ID NO: 931710 - DNA, 33 bp, Homo sapien
gaaaatcagagtgcaatgtcttcctgctccctt

SEQ ID NO: 931711 - DNA, 33 bp, Homo sapien
tctgtcctgagatccaaccagcagctcatgtgt

SEQ ID NO: 931712 - DNA, 33 bp, Homo sapien
tctgtcctgagatccatccagcagctcatgtgt

SEQ ID NO: 931713 - DNA, 33 bp, Homo sapien
cagactagacactaggaactctggtggcttctg

SEQ ID NO: 931714 - DNA, 33 bp, Homo sapien
cagactagacactagggactctggtggcttctg

SEQ ID NO: 931715 - DNA, 33 bp, Homo sapien
ttaagatggagcaacacacataggaaaagagga

SEQ ID NO: 931716 - DNA, 33 bp, Homo sapien
ttaagatggagcaacatacataggaaaagagga

SEQ ID NO: 931717 - DNA, 33 bp, Homo sapien
acaagactggtccaaagtaaagtgccgtcgtcc

SEQ ID NO: 931718 - DNA, 33 bp, Homo sapien
acaagactggtccaaattaaagtgccgtcgtcc

SEQ ID NO: 931719 - DNA, 33 bp, Homo sapien
aatacaaatcaggtaaggaatacaggtgtgtcc

SEQ ID NO: 931720 - DNA, 33 bp, Homo sapien
aatacaaatcaggtaatgaatacaggtgtgtcc

SEQ ID NO: 931721 - DNA, 33 bp, Homo sapien
tagaactcatcatccaatatgggattccagctt

SEQ ID NO: 931722 - DNA, 33 bp, Homo sapien
tagaactcatcatccagtatgggattccagctt

SEQ ID NO: 931723 - DNA, 33 bp, Homo sapien
tctaagaactctgagacagttaaaaaacataca

SEQ ID NO: 931724 - DNA, 33 bp, Homo sapien
tctaagaactctgagatagttaaaaaacataca

SEQ ID NO: 931725 - DNA, 33 bp, Homo sapien
acagaatattttgtcaaccagttaagaaacata

SEQ ID NO: 931726 - DNA, 33 bp, Homo sapien
acagaatattttgtcacccagttaagaaacata

SEQ ID NO: 931727 - DNA, 33 bp, Homo sapien
gctctgaacagatttcaattcttcaagaggaaa

SEQ ID NO: 931728 - DNA, 33 bp, Homo sapien
gctctgaacagatttcgattcttcaagaggaaa

SEQ ID NO: 931729 - DNA, 33 bp, Homo sapien
ctacagaagtcctagcacctaaagaaaaaacat

SEQ ID NO: 931730 - DNA, 33 bp, Homo sapien
ctacagaagtcctagcgcctaaagaaaaaacat

SEQ ID NO: 931731 - DNA, 33 bp, Homo sapien
taaccaagttaatctgccacctagaaaatattg

SEQ ID NO: 931732 - DNA, 33 bp, Homo sapien
taaccaagttaatctggcacctagaaaatattg

SEQ ID NO: 931733 - DNA, 33 bp, Homo sapien
agatatgtcattgaaaataaatggaaaaggccg

SEQ ID NO: 931734 - DNA, 33 bp, Homo sapien
agatatgtcattgaaagtaaatggaaaaggccg

SEQ ID NO: 931735 - DNA, 33 bp, Homo sapien
atccccaccaggaacaatgacaatgccagttct

SEQ ID NO: 931736 - DNA, 33 bp, Homo sapien
atccccaccaggaacagtgacaatgccagttct

SEQ ID NO: 931737 - DNA, 33 bp, Homo sapien
gatcacctacaaagacaactacaatgcatcagc

SEQ ID NO: 931738 - DNA, 33 bp, Homo sapien
gatcacctacaaagacgactacaatgcatcagc

SEQ ID NO: 931739 - DNA, 33 bp, Homo sapien
gttagataaacaattccaggttgaaaatcaatt

SEQ ID NO: 931740 - DNA, 33 bp, Homo sapien
gttagataaacaattctaggttgaaaatcaatt

SEQ ID NO: 931741 - DNA, 33 bp, Homo sapien
cctgccaccaagtacacagatcatcaccatgag

SEQ ID NO: 931742 - DNA, 33 bp, Homo sapien
cctgccaccaagtacatagatcatcaccatgag

SEQ ID NO: 931743 - DNA, 33 bp, Homo sapien
aaattgtgaagggtaacgtctttagatggcact

SEQ ID NO: 931744 - DNA, 33 bp, Homo sapien
aaattgtgaagggtaatgtctttagatggcact

SEQ ID NO: 931745 - DNA, 33 bp, Homo sapien
tagtgataaaaagctaaccctgattttcctagg

SEQ ID NO: 931746 - DNA, 33 bp, Homo sapien
tagtgataaaaagctagccctgattttcctagg

SEQ ID NO: 931747 - DNA, 33 bp, Homo sapien
caggaaagctatctaaaaggaaacaaattagct

SEQ ID NO: 931748 - DNA, 33 bp, Homo sapien
caggaaagctatctaagaggaaacaaattagct

SEQ ID NO: 931749 - DNA, 33 bp, Homo sapien
gatatataaaagaaacaagagtccaacaatccc

SEQ ID NO: 931750 - DNA, 33 bp, Homo sapien
gatatataaaagaaacgagagtccaacaatccc

SEQ ID NO: 931751 - DNA, 33 bp, Homo sapien
gggagtgcataataaaccttggagtgcatgata

SEQ ID NO: 931752 - DNA, 33 bp, Homo sapien
gggagtgcataataaagcttggagtgcatgata

SEQ ID NO: 931753 - DNA, 33 bp, Homo sapien
gatacagcgactttaaataatcattttgcagaa

SEQ ID NO: 931754 - DNA, 33 bp, Homo sapien
gatacagcgactttaagtaatcattttgcagaa

SEQ ID NO: 931755 - DNA, 33 bp, Homo sapien
atggaaataatatcagcaatgctgccctggcca

SEQ ID NO: 931756 - DNA, 33 bp, Homo sapien
atggaaataatatcagtaatgctgccctggcca

SEQ ID NO: 931757 - DNA, 33 bp, Homo sapien
gtttttcagagtccaacaatttgataccacctt

SEQ ID NO: 931758 - DNA, 33 bp, Homo sapien
gtttttcagagtccaataatttgataccacctt

SEQ ID NO: 931759 - DNA, 33 bp, Homo sapien
aatggatagatgaagaagacacccttattatct

SEQ ID NO: 931760 - DNA, 33 bp, Homo sapien
aatggatagatgaagaggacacccttattatct

SEQ ID NO: 931761 - DNA, 33 bp, Homo sapien
tataagaatgagaaaacggtttgctttgtttcc

SEQ ID NO: 931762 - DNA, 33 bp, Homo sapien
tataagaatgagaaaatggtttgctttgtttcc

SEQ ID NO: 931763 - DNA, 33 bp, Homo sapien
ctctggagggtttcacacaggtaattaaatggc

SEQ ID NO: 931764 - DNA, 33 bp, Homo sapien
ctctggagggtttcacgcaggtaattaaatggc

SEQ ID NO: 931765 - DNA, 33 bp, Homo sapien
tgacctgcagtggacacatgaggtaagtaagaa

SEQ ID NO: 931766 - DNA, 33 bp, Homo sapien
tgacctgcagtggacatatgaggtaagtaagaa

SEQ ID NO: 931767 - DNA, 33 bp, Homo sapien
gactgatacacacaacaaagaggctgatcacag

SEQ ID NO: 931768 - DNA, 33 bp, Homo sapien
gactgatacacacaacgaagaggctgatcacag

SEQ ID NO: 931769 - DNA, 33 bp, Homo sapien
agccccctgtgaataaaccattcccaagatctt

SEQ ID NO: 931770 - DNA, 33 bp, Homo sapien
agccccctgtgaataacccattcccaagatctt

SEQ ID NO: 931771 - DNA, 33 bp, Homo sapien
acaccaacgtacgcaccggccagacattgtcca

SEQ ID NO: 931772 - DNA, 33 bp, Homo sapien
acaccaacgtacgcacgggccagacattgtcca

SEQ ID NO: 931773 - DNA, 33 bp, Homo sapien
gaataacaggctaagacgggaataataaatcac

SEQ ID NO: 931774 - DNA, 33 bp, Homo sapien
gaataacaggctaagatgggaataataaatcac

SEQ ID NO: 931775 - DNA, 33 bp, Homo sapien
cttcctccaacaatgacagacaaaagagataac

SEQ ID NO: 931776 - DNA, 33 bp, Homo sapien
cttcctccaacaatgagagacaaaagagataac

SEQ ID NO: 931777 - DNA, 33 bp, Homo sapien
gccagtcaggcaataacatacagggagcaccct

SEQ ID NO: 931778 - DNA, 33 bp, Homo sapien
gccagtcaggcaataatatacagggagcaccct

SEQ ID NO: 931779 - DNA, 33 bp, Homo sapien
tctgcttcaagaaggacctccatttacctgccc

SEQ ID NO: 931780 - DNA, 33 bp, Homo sapien
tctgcttcaagaaggatctccatttacctgccc

SEQ ID NO: 931781 - DNA, 33 bp, Homo sapien
ttgagaaaaggatgaaaagcaaaagccttagat

SEQ ID NO: 931782 - DNA, 33 bp, Homo sapien
ttgagaaaaggatgaagagcaaaagccttagat

SEQ ID NO: 931783 - DNA, 33 bp, Homo sapien
gagaataagatacagaagtaagcaatgtaagtg

SEQ ID NO: 931784 - DNA, 33 bp, Homo sapien
gagaataagatacagaggtaagcaatgtaagtg

SEQ ID NO: 931785 - DNA, 33 bp, Homo sapien
tatgagccttgtaccaacaaccagagagaacat

SEQ ID NO: 931786 - DNA, 33 bp, Homo sapien
tatgagccttgtaccaccaaccagagagaacat

SEQ ID NO: 931787 - DNA, 33 bp, Homo sapien
ttcacctagtaagagcaaaagcattctaataaa

SEQ ID NO: 931788 - DNA, 33 bp, Homo sapien
ttcacctagtaagagcgaaagcattctaataaa

SEQ ID NO: 931789 - DNA, 33 bp, Homo sapien
ctcactcaggtatggaagaaataaaataccctt

SEQ ID NO: 931790 - DNA, 33 bp, Homo sapien
ctcactcaggtatggatgaaataaaataccctt

SEQ ID NO: 931791 - DNA, 33 bp, Homo sapien
gcaagatgagtattcaaatcagtaagaaagaaa

SEQ ID NO: 931792 - DNA, 33 bp, Homo sapien
gcaagatgagtattcatatcagtaagaaagaaa

SEQ ID NO: 931793 - DNA, 33 bp, Homo sapien
caagtcagacggtgtggaacctgcggtctcctg

SEQ ID NO: 931794 - DNA, 33 bp, Homo sapien
caagtcagacggtgtgtaacctgcggtctcctg

SEQ ID NO: 931795 - DNA, 33 bp, Homo sapien
agtttcacatctgttacagttcactggctttcc

SEQ ID NO: 931796 - DNA, 33 bp, Homo sapien
agtttcacatctgttagagttcactggctttcc

SEQ ID NO: 931797 - DNA, 33 bp, Homo sapien
gatccttgtgataaaactgctctatatcttgac

SEQ ID NO: 931798 - DNA, 33 bp, Homo sapien
gatccttgtgataaaattgctctatatcttgac

SEQ ID NO: 931799 - DNA, 33 bp, Homo sapien
ttattaatacattttaaacacccgaagtaacaa

SEQ ID NO: 931800 - DNA, 33 bp, Homo sapien
ttattaatacattttagacacccgaagtaacaa

SEQ ID NO: 931801 - DNA, 33 bp, Homo sapien
ggaggcacagcgattaagtaatgttactaagta

SEQ ID NO: 931802 - DNA, 33 bp, Homo sapien
ggaggcacagcgattaggtaatgttactaagta

SEQ ID NO: 931803 - DNA, 33 bp, Homo sapien
gtccagaacaagccaactaaatgggacacgcca

SEQ ID NO: 931804 - DNA, 33 bp, Homo sapien
gtccagaacaagccaagtaaatgggacacgcca

SEQ ID NO: 931805 - DNA, 33 bp, Homo sapien
agatatacaagtgagaaaatcctatgatcccta

SEQ ID NO: 931806 - DNA, 33 bp, Homo sapien
agatatacaagtgagataatcctatgatcccta

SEQ ID NO: 931807 - DNA, 33 bp, Homo sapien
cagtaaactgaagctccgaacagcgaaggagct

SEQ ID NO: 931808 - DNA, 33 bp, Homo sapien
cagtaaactgaagctctgaacagcgaaggagct

SEQ ID NO: 931809 - DNA, 33 bp, Homo sapien
ggtcactctgattttaagttctataatttagat

SEQ ID NO: 931810 - DNA, 33 bp, Homo sapien
ggtcactctgattttaggttctataatttagat

SEQ ID NO: 931811 - DNA, 33 bp, Homo sapien
gcgcttgttcactagacggattctgggggccca

SEQ ID NO: 931812 - DNA, 33 bp, Homo sapien
gcgcttgttcactagatggattctgggggccca

SEQ ID NO: 931813 - DNA, 33 bp, Homo sapien
cttatttcaggcctaaacttctttcctggacta

SEQ ID NO: 931814 - DNA, 33 bp, Homo sapien
cttatttcaggcctaaccttctttcctggacta

SEQ ID NO: 931815 - DNA, 33 bp, Homo sapien
attcagtgccttagataaaaagcatctccatgt

SEQ ID NO: 931816 - DNA, 33 bp, Homo sapien
attcagtgccttagatgaaaagcatctccatgt

SEQ ID NO: 931817 - DNA, 33 bp, Homo sapien
ctggatttcccaggaccggaaggacaaagagtg

SEQ ID NO: 931818 - DNA, 33 bp, Homo sapien
ctggatttcccaggactggaaggacaaagagtg

SEQ ID NO: 931819 - DNA, 33 bp, Homo sapien
cccaagagaaaaatgcactaacttttgaataat

SEQ ID NO: 931820 - DNA, 33 bp, Homo sapien
cccaagagaaaaatgcgctaacttttgaataat

SEQ ID NO: 931821 - DNA, 33 bp, Homo sapien
attcattattttatacaatgctaggcacatagt

SEQ ID NO: 931822 - DNA, 33 bp, Homo sapien
attcattattttatacgatgctaggcacatagt

SEQ ID NO: 931823 - DNA, 33 bp, Homo sapien
taaaccttttgaatgcagagactatcttgtatg

SEQ ID NO: 931824 - DNA, 33 bp, Homo sapien
taaaccttttgaatgcggagactatcttgtatg

SEQ ID NO: 931825 - DNA, 33 bp, Homo sapien
ttaaatgcttactaaacaatgatagtgatattt

SEQ ID NO: 931826 - DNA, 33 bp, Homo sapien
ttaaatgcttactaaagaatgatagtgatattt

SEQ ID NO: 931827 - DNA, 33 bp, Homo sapien
gtatacatttttaaaaagcacaatatgctcata

SEQ ID NO: 931828 - DNA, 33 bp, Homo sapien
gtatacatttttaaaaggcacaatatgctcata

SEQ ID NO: 931829 - DNA, 33 bp, Homo sapien
gaaccaagaacacagccgaatcacagtacagga

SEQ ID NO: 931830 - DNA, 33 bp, Homo sapien
gaaccaagaacacagctgaatcacagtacagga

SEQ ID NO: 931831 - DNA, 33 bp, Homo sapien
gggacagctttgattccacctgacagaaaggtg

SEQ ID NO: 931832 - DNA, 33 bp, Homo sapien
gggacagctttgattctacctgacagaaaggtg

SEQ ID NO: 931833 - DNA, 33 bp, Homo sapien
ctattatactttaagagatgtcagcttctatat

SEQ ID NO: 931834 - DNA, 33 bp, Homo sapien
ctattatactttaagatatgtcagcttctatat

SEQ ID NO: 931835 - DNA, 33 bp, Homo sapien
gtgttggtgtattttacggatgctttctgtaga

SEQ ID NO: 931836 - DNA, 33 bp, Homo sapien
gtgttggtgtattttatggatgctttctgtaga

SEQ ID NO: 931837 - DNA, 33 bp, Homo sapien
agtcagccaggactgcagagagatcatcgccag

SEQ ID NO: 931838 - DNA, 33 bp, Homo sapien
agtcagccaggactgcggagagatcatcgccag

SEQ ID NO: 931839 - DNA, 33 bp, Homo sapien
tctctgtgccccaaacccggtggtctctgatat

SEQ ID NO: 931840 - DNA, 33 bp, Homo sapien
tctctgtgccccaaactcggtggtctctgatat

SEQ ID NO: 931841 - DNA, 33 bp, Homo sapien
ttgctctcattttttacagttcttgtttgacga

SEQ ID NO: 931842 - DNA, 33 bp, Homo sapien
ttgctctcattttttagagttcttgtttgacga

SEQ ID NO: 931843 - DNA, 33 bp, Homo sapien
tcataagtgaaagtcacgttgtcaacactggtg

SEQ ID NO: 931844 - DNA, 33 bp, Homo sapien
tcataagtgaaagtcatgttgtcaacactggtg

SEQ ID NO: 931845 - DNA, 33 bp, Homo sapien
atgtaagatttttcataatagaactgcttgctt

SEQ ID NO: 931846 - DNA, 33 bp, Homo sapien
atgtaagatttttcattatagaactgcttgctt

SEQ ID NO: 931847 - DNA, 33 bp, Homo sapien
gggccattcaattataagatcatgtattagtct

SEQ ID NO: 931848 - DNA, 33 bp, Homo sapien
gggccattcaattataggatcatgtattagtct

SEQ ID NO: 931849 - DNA, 33 bp, Homo sapien
cttgtccgactgccagacaagcaacgaggtctc

SEQ ID NO: 931850 - DNA, 33 bp, Homo sapien
cttgtccgactgccaggcaagcaacgaggtctc

SEQ ID NO: 931851 - DNA, 33 bp, Homo sapien
gtgcatgaggccatacgccactcctcagtctgt

SEQ ID NO: 931852 - DNA, 33 bp, Homo sapien
gtgcatgaggccatactccactcctcagtctgt

SEQ ID NO: 931853 - DNA, 33 bp, Homo sapien
tagtggactattcaacaataatgtttaacttcc

SEQ ID NO: 931854 - DNA, 33 bp, Homo sapien
tagtggactattcaaccataatgtttaacttcc

SEQ ID NO: 931855 - DNA, 33 bp, Homo sapien
tcgaggtttggaaggcagaagtgaagcagaagg

SEQ ID NO: 931856 - DNA, 33 bp, Homo sapien
tcgaggtttggaaggcggaagtgaagcagaagg

SEQ ID NO: 931857 - DNA, 33 bp, Homo sapien
ggggctgggtcagtcactcaaggaagttgtcaa

SEQ ID NO: 931858 - DNA, 33 bp, Homo sapien
ggggctgggtcagtcattcaaggaagttgtcaa

SEQ ID NO: 931859 - DNA, 33 bp, Homo sapien
atccaggtaggtgagaaaatagaatttaaatgt

SEQ ID NO: 931860 - DNA, 33 bp, Homo sapien
atccaggtaggtgagataatagaatttaaatgt

SEQ ID NO: 931861 - DNA, 33 bp, Homo sapien
aacacatacccaatgaagaaaacttgtaatgtt

SEQ ID NO: 931862 - DNA, 33 bp, Homo sapien
aacacatacccaatgatgaaaacttgtaatgtt

SEQ ID NO: 931863 - DNA, 33 bp, Homo sapien
aaatgattagcaaagacaggcatgtttccacac

SEQ ID NO: 931864 - DNA, 33 bp, Homo sapien
aaatgattagcaaagagaggcatgtttccacac

SEQ ID NO: 931865 - DNA, 33 bp, Homo sapien
tagcagagatgcattacaacagcaagagaaggg

SEQ ID NO: 931866 - DNA, 33 bp, Homo sapien
tagcagagatgcattagaacagcaagagaaggg

SEQ ID NO: 931867 - DNA, 33 bp, Homo sapien
caaggcgaattccacactataagaagcatgatg

SEQ ID NO: 931868 - DNA, 33 bp, Homo sapien
caaggcgaattccacagtataagaagcatgatg

SEQ ID NO: 931869 - DNA, 33 bp, Homo sapien
agcctcaggagataaacggtccatgatatgaag

SEQ ID NO: 931870 - DNA, 33 bp, Homo sapien
agcctcaggagataaagggtccatgatatgaag

SEQ ID NO: 931871 - DNA, 33 bp, Homo sapien
ccccaaattatgggaacagcagatacaaggagt

SEQ ID NO: 931872 - DNA, 33 bp, Homo sapien
ccccaaattatgggaatagcagatacaaggagt

SEQ ID NO: 931873 - DNA, 33 bp, Homo sapien
atgatttcatctcacaaatctttttttcttctt

SEQ ID NO: 931874 - DNA, 33 bp, Homo sapien
atgatttcatctcacagatctttttttcttctt

SEQ ID NO: 931875 - DNA, 33 bp, Homo sapien
gttatgtggccaacacaacactaggaagtatgg

SEQ ID NO: 931876 - DNA, 33 bp, Homo sapien
gttatgtggccaacacgacactaggaagtatgg

SEQ ID NO: 931877 - DNA, 33 bp, Homo sapien
ttgaagtgataacctccaagtagatcacaaatc

SEQ ID NO: 931878 - DNA, 33 bp, Homo sapien
ttgaagtgataacctcgaagtagatcacaaatc

SEQ ID NO: 931879 - DNA, 33 bp, Homo sapien
agctgtagcagacttccactgttttttcagacc

SEQ ID NO: 931880 - DNA, 33 bp, Homo sapien
agctgtagcagacttctactgttttttcagacc

SEQ ID NO: 931881 - DNA, 33 bp, Homo sapien
tgcccaaaagccgtcaaagccttacacaaaaaa

SEQ ID NO: 931882 - DNA, 33 bp, Homo sapien
tgcccaaaagccgtcatagccttacacaaaaaa

SEQ ID NO: 931883 - DNA, 33 bp, Homo sapien
tgttgataagtaagaaagttgtcagaatcaaaa

SEQ ID NO: 931884 - DNA, 33 bp, Homo sapien
tgttgataagtaagaaggttgtcagaatcaaaa

SEQ ID NO: 931885 - DNA, 33 bp, Homo sapien
tccattgctgcaaccaacacctatattactttc

SEQ ID NO: 931886 - DNA, 33 bp, Homo sapien
tccattgctgcaaccagcacctatattactttc

SEQ ID NO: 931887 - DNA, 33 bp, Homo sapien
atgacaaaaattaaaaggatgctgatactagcc

SEQ ID NO: 931888 - DNA, 33 bp, Homo sapien
atgacaaaaattaaaatgatgctgatactagcc

SEQ ID NO: 931889 - DNA, 33 bp, Homo sapien
tttaatagagagaccccgcaaatcattttcaat

SEQ ID NO: 931890 - DNA, 33 bp, Homo sapien
tttaatagagagaccctgcaaatcattttcaat

SEQ ID NO: 931891 - DNA, 33 bp, Homo sapien
ttcttagctgttgagacctatgcaagttgtttt

SEQ ID NO: 931892 - DNA, 33 bp, Homo sapien
ttcttagctgttgagatctatgcaagttgtttt

SEQ ID NO: 931893 - DNA, 33 bp, Homo sapien
caaagcatgaaaagaccggaattcaaaatgaag

SEQ ID NO: 931894 - DNA, 33 bp, Homo sapien
caaagcatgaaaagactggaattcaaaatgaag

SEQ ID NO: 931895 - DNA, 33 bp, Homo sapien
ctgtgttttattaaatcattaggtggtctccaa

SEQ ID NO: 931896 - DNA, 33 bp, Homo sapien
ctgtgttttattaaatgattaggtggtctccaa

SEQ ID NO: 931897 - DNA, 33 bp, Homo sapien
ttaacatggcaattccagaaaagtattcccatg

SEQ ID NO: 931898 - DNA, 33 bp, Homo sapien
ttaacatggcaattccggaaaagtattcccatg

SEQ ID NO: 931899 - DNA, 33 bp, Homo sapien
tccctggaatgtagaacgcatgtaattaccctc

SEQ ID NO: 931900 - DNA, 33 bp, Homo sapien
tccctggaatgtagaatgcatgtaattaccctc

SEQ ID NO: 931901 - DNA, 33 bp, Homo sapien
tggctggcagcttttacgggagtgactgagcag

SEQ ID NO: 931902 - DNA, 33 bp, Homo sapien
tggctggcagcttttatgggagtgactgagcag

SEQ ID NO: 931903 - DNA, 33 bp, Homo sapien
gtctcaccaggtctacactctgctattcaaaga

SEQ ID NO: 931904 - DNA, 33 bp, Homo sapien
gtctcaccaggtctacgctctgctattcaaaga

SEQ ID NO: 931905 - DNA, 33 bp, Homo sapien
taaatgaaatgttgtacgcattgttgtttttta

SEQ ID NO: 931906 - DNA, 33 bp, Homo sapien
taaatgaaatgttgtatgcattgttgtttttta

SEQ ID NO: 931907 - DNA, 33 bp, Homo sapien
gctatagtcattctagaaatggttgtcaaggcc

SEQ ID NO: 931908 - DNA, 33 bp, Homo sapien
gctatagtcattctagcaatggttgtcaaggcc

SEQ ID NO: 931909 - DNA, 33 bp, Homo sapien
attctgtttgaagttacgggatatccactgtgt

SEQ ID NO: 931910 - DNA, 33 bp, Homo sapien
attctgtttgaagttatgggatatccactgtgt

SEQ ID NO: 931911 - DNA, 33 bp, Homo sapien
gggtctccactttcaccgggactcaaaccccct

SEQ ID NO: 931912 - DNA, 33 bp, Homo sapien
gggtctccactttcactgggactcaaaccccct

SEQ ID NO: 931913 - DNA, 33 bp, Homo sapien
atgtgcagttcataacagcgttcatgatcctgt

SEQ ID NO: 931914 - DNA, 33 bp, Homo sapien
atgtgcagttcataaccgcgttcatgatcctgt

SEQ ID NO: 931915 - DNA, 33 bp, Homo sapien
ggcagagtcagtaagacgaggcaagctcacaca

SEQ ID NO: 931916 - DNA, 33 bp, Homo sapien
ggcagagtcagtaagatgaggcaagctcacaca

SEQ ID NO: 931917 - DNA, 33 bp, Homo sapien
agcagatagatattcagtagaaaagggctggta

SEQ ID NO: 931918 - DNA, 33 bp, Homo sapien
agcagatagatattcattagaaaagggctggta

SEQ ID NO: 931919 - DNA, 33 bp, Homo sapien
gaggaatttgtattaccagaagcttcatttcca

SEQ ID NO: 931920 - DNA, 33 bp, Homo sapien
gaggaatttgtattacgagaagcttcatttcca

SEQ ID NO: 931921 - DNA, 33 bp, Homo sapien
cccatacatactgacaggtcctgaaacataaac

SEQ ID NO: 931922 - DNA, 33 bp, Homo sapien
cccatacatactgacatgtcctgaaacataaac

SEQ ID NO: 931923 - DNA, 33 bp, Homo sapien
cagcactgcggggatcaatctgtttcacctagg

SEQ ID NO: 931924 - DNA, 33 bp, Homo sapien
cagcactgcggggatccatctgtttcacctagg

SEQ ID NO: 931925 - DNA, 33 bp, Homo sapien
tgcattacgtattagaaatggaaaagttaggta

SEQ ID NO: 931926 - DNA, 33 bp, Homo sapien
tgcattacgtattagacatggaaaagttaggta

SEQ ID NO: 931927 - DNA, 33 bp, Homo sapien
cccacaggataaatgcacttatcatattgatag

SEQ ID NO: 931928 - DNA, 33 bp, Homo sapien
cccacaggataaatgcgcttatcatattgatag

SEQ ID NO: 931929 - DNA, 33 bp, Homo sapien
tgtgcatgaacccctacaggacccttggatatt

SEQ ID NO: 931930 - DNA, 33 bp, Homo sapien
tgtgcatgaacccctataggacccttggatatt

SEQ ID NO: 931931 - DNA, 33 bp, Homo sapien
ttagttttttctagccaagcaaagttcctgaac

SEQ ID NO: 931932 - DNA, 33 bp, Homo sapien
ttagttttttctagcccagcaaagttcctgaac

SEQ ID NO: 931933 - DNA, 33 bp, Homo sapien
acccgagagctctgataaaaatgcagaaaggca

SEQ ID NO: 931934 - DNA, 33 bp, Homo sapien
acccgagagctctgattaaaatgcagaaaggca

SEQ ID NO: 931935 - DNA, 33 bp, Homo sapien
tgggtaactgtgtaggaaaaacggaatactaac

SEQ ID NO: 931936 - DNA, 33 bp, Homo sapien
tgggtaactgtgtaggtaaaacggaatactaac

SEQ ID NO: 931937 - DNA, 33 bp, Homo sapien
attaacattcctttgccattaactgtgtgttgt

SEQ ID NO: 931938 - DNA, 33 bp, Homo sapien
attaacattcctttgcgattaactgtgtgttgt

SEQ ID NO: 931939 - DNA, 33 bp, Homo sapien
caaggcgtgctgaagacagactagcaagagaga

SEQ ID NO: 931940 - DNA, 33 bp, Homo sapien
caaggcgtgctgaagagagactagcaagagaga

SEQ ID NO: 931941 - DNA, 33 bp, Homo sapien
aggtccactccatcccaaaagcttttaagagaa

SEQ ID NO: 931942 - DNA, 33 bp, Homo sapien
aggtccactccatccccaaagcttttaagagaa

SEQ ID NO: 931943 - DNA, 33 bp, Homo sapien
gacgaggactgctagggaccgcaactgctgggg

SEQ ID NO: 931944 - DNA, 33 bp, Homo sapien
gacgaggactgctaggtaccgcaactgctgggg

SEQ ID NO: 931945 - DNA, 33 bp, Homo sapien
ggatgaaacagagtcactaagaattccatttgg

SEQ ID NO: 931946 - DNA, 33 bp, Homo sapien
ggatgaaacagagtcagtaagaattccatttgg

SEQ ID NO: 931947 - DNA, 33 bp, Homo sapien
gaaaccattgtatcagaaactgaaaggagatca

SEQ ID NO: 931948 - DNA, 33 bp, Homo sapien
gaaaccattgtatcaggaactgaaaggagatca

SEQ ID NO: 931949 - DNA, 33 bp, Homo sapien
tcgtgagctctgtttcccattgcattgttgttc

SEQ ID NO: 931950 - DNA, 33 bp, Homo sapien
tcgtgagctctgtttctcattgcattgttgttc

SEQ ID NO: 931951 - DNA, 33 bp, Homo sapien
agaagcatggtttgccagagaactgtacctgag

SEQ ID NO: 931952 - DNA, 33 bp, Homo sapien
agaagcatggtttgccggagaactgtacctgag

SEQ ID NO: 931953 - DNA, 33 bp, Homo sapien
gtagagggcgaatgacacttacaactcaggtaa

SEQ ID NO: 931954 - DNA, 33 bp, Homo sapien
gtagagggcgaatgacgcttacaactcaggtaa

SEQ ID NO: 931955 - DNA, 33 bp, Homo sapien
cctccatgttttttagacctttgccaatctgat

SEQ ID NO: 931956 - DNA, 33 bp, Homo sapien
cctccatgttttttagtcctttgccaatctgat

SEQ ID NO: 931957 - DNA, 33 bp, Homo sapien
gaaaagagactgaaaaagaggtatgagaatggg

SEQ ID NO: 931958 - DNA, 33 bp, Homo sapien
gaaaagagactgaaaaggaggtatgagaatggg

SEQ ID NO: 931959 - DNA, 33 bp, Homo sapien
ggatgtacaatgtagacgatgccctccctgtct

SEQ ID NO: 931960 - DNA, 33 bp, Homo sapien
ggatgtacaatgtagatgatgccctccctgtct

SEQ ID NO: 931961 - DNA, 33 bp, Homo sapien
gcactgaggcccacgacgtgaagtatctttgct

SEQ ID NO: 931962 - DNA, 33 bp, Homo sapien
gcactgaggcccacgaggtgaagtatctttgct

SEQ ID NO: 931963 - DNA, 33 bp, Homo sapien
ctttcgtggcagaaaaataacaagttgtaagga

SEQ ID NO: 931964 - DNA, 33 bp, Homo sapien
ctttcgtggcagaaaattaacaagttgtaagga

SEQ ID NO: 931965 - DNA, 33 bp, Homo sapien
ggattcaacccaggaacatttccctggaggggc

SEQ ID NO: 931966 - DNA, 33 bp, Homo sapien
ggattcaacccaggaagatttccctggaggggc

SEQ ID NO: 931967 - DNA, 33 bp, Homo sapien
tgttgataaaattgcacaaactgctgtagtgca

SEQ ID NO: 931968 - DNA, 33 bp, Homo sapien
tgttgataaaattgcagaaactgctgtagtgca

SEQ ID NO: 931969 - DNA, 33 bp, Homo sapien
tggcttccaattggataaagatgaaatagggct

SEQ ID NO: 931970 - DNA, 33 bp, Homo sapien
tggcttccaattggatgaagatgaaatagggct

SEQ ID NO: 931971 - DNA, 33 bp, Homo sapien
catgctgaatcataacgcaggactctgccaaca

SEQ ID NO: 931972 - DNA, 33 bp, Homo sapien
catgctgaatcataactcaggactctgccaaca

SEQ ID NO: 931973 - DNA, 33 bp, Homo sapien
caagttcttcttgtgcaaacaactagactgcaa

SEQ ID NO: 931974 - DNA, 33 bp, Homo sapien
caagttcttcttgtgccaacaactagactgcaa

SEQ ID NO: 931975 - DNA, 33 bp, Homo sapien
acagcatcatggtaaaacaaatgggttttgggg

SEQ ID NO: 931976 - DNA, 33 bp, Homo sapien
acagcatcatggtaaagcaaatgggttttgggg

SEQ ID NO: 931977 - DNA, 33 bp, Homo sapien
ttccaaccaatattagaaccttgcactttctgg

SEQ ID NO: 931978 - DNA, 33 bp, Homo sapien
ttccaaccaatattaggaccttgcactttctgg

SEQ ID NO: 931979 - DNA, 33 bp, Homo sapien
aagaacatatctgacaggtctatggttacagag

SEQ ID NO: 931980 - DNA, 33 bp, Homo sapien
aagaacatatctgacatgtctatggttacagag

SEQ ID NO: 931981 - DNA, 33 bp, Homo sapien
gacacaacccagccaacgcgtctttatagaagc

SEQ ID NO: 931982 - DNA, 33 bp, Homo sapien
gacacaacccagccaatgcgtctttatagaagc

SEQ ID NO: 931983 - DNA, 33 bp, Homo sapien
gtagtatcatcctttgaacctacttcataatca

SEQ ID NO: 931984 - DNA, 33 bp, Homo sapien
gtagtatcatcctttggacctacttcataatca

SEQ ID NO: 931985 - DNA, 33 bp, Homo sapien
acttgacatacactaaagctacattccattatc

SEQ ID NO: 931986 - DNA, 33 bp, Homo sapien
acttgacatacactaaggctacattccattatc

SEQ ID NO: 931987 - DNA, 33 bp, Homo sapien
aaagtgcgctaagggcaaagtctcaattttgaa

SEQ ID NO: 931988 - DNA, 33 bp, Homo sapien
aaagtgcgctaagggctaagtctcaattttgaa

SEQ ID NO: 931989 - DNA, 33 bp, Homo sapien
tagtgtcataaaactaaagctgtgatggtgatg

SEQ ID NO: 931990 - DNA, 33 bp, Homo sapien
tagtgtcataaaactatagctgtgatggtgatg

SEQ ID NO: 931991 - DNA, 33 bp, Homo sapien
tctagcccagtttccaatcttcctaaagctctc

SEQ ID NO: 931992 - DNA, 33 bp, Homo sapien
tctagcccagtttccagtcttcctaaagctctc

SEQ ID NO: 931993 - DNA, 33 bp, Homo sapien
attcaacatttttggaactccactttatttcca

SEQ ID NO: 931994 - DNA, 33 bp, Homo sapien
attcaacatttttggatctccactttatttcca

SEQ ID NO: 931995 - DNA, 33 bp, Homo sapien
attttcctacaaatgaagtccctcttttcagcc

SEQ ID NO: 931996 - DNA, 33 bp, Homo sapien
attttcctacaaatgaggtccctcttttcagcc

SEQ ID NO: 931997 - DNA, 33 bp, Homo sapien
aatgattgcaaatgaccgtaaagggaagccctg

SEQ ID NO: 931998 - DNA, 33 bp, Homo sapien
aatgattgcaaatgactgtaaagggaagccctg

SEQ ID NO: 931999 - DNA, 33 bp, Homo sapien
acaagaattggatctgaattttatcaagcctct

SEQ ID NO: 932000 - DNA, 33 bp, Homo sapien
acaagaattggatctggattttatcaagcctct

SEQ ID NO: 932001 - DNA, 33 bp, Homo sapien
aaaactacacgtccccaccttctctccttgtgc

SEQ ID NO: 932002 - DNA, 33 bp, Homo sapien
aaaactacacgtccccgccttctctccttgtgc

SEQ ID NO: 932003 - DNA, 33 bp, Homo sapien
ctccaaagatcaatcacgaaagtggtgttagtc

SEQ ID NO: 932004 - DNA, 33 bp, Homo sapien
ctccaaagatcaatcatgaaagtggtgttagtc

SEQ ID NO: 932005 - DNA, 33 bp, Homo sapien
gaatgcttgacatttaaaagctacacacaattc

SEQ ID NO: 932006 - DNA, 33 bp, Homo sapien
gaatgcttgacatttagaagctacacacaattc

SEQ ID NO: 932007 - DNA, 33 bp, Homo sapien
gtatagagtactaggacagttgaaaaagtcaat

SEQ ID NO: 932008 - DNA, 33 bp, Homo sapien
gtatagagtactaggagagttgaaaaagtcaat

SEQ ID NO: 932009 - DNA, 33 bp, Homo sapien
agaatgaaaagtttaccggaatctgcatcagga

SEQ ID NO: 932010 - DNA, 33 bp, Homo sapien
agaatgaaaagtttactggaatctgcatcagga

SEQ ID NO: 932011 - DNA, 33 bp, Homo sapien
gaccgcaacaataagaagaccaggaaattcttg

SEQ ID NO: 932012 - DNA, 33 bp, Homo sapien
gaccgcaacaataagaggaccaggaaattcttg

SEQ ID NO: 932013 - DNA, 33 bp, Homo sapien
tagcccaagtcccacacggtgatctgcaaagtg

SEQ ID NO: 932014 - DNA, 33 bp, Homo sapien
tagcccaagtcccacatggtgatctgcaaagtg

SEQ ID NO: 932015 - DNA, 33 bp, Homo sapien
tttctttctcttacacaggatctcactctgttg

SEQ ID NO: 932016 - DNA, 33 bp, Homo sapien
tttctttctcttacacgggatctcactctgttg

SEQ ID NO: 932017 - DNA, 33 bp, Homo sapien
cctgaagacatttcagaactaacctggatgaaa

SEQ ID NO: 932018 - DNA, 33 bp, Homo sapien
cctgaagacatttcaggactaacctggatgaaa

SEQ ID NO: 932019 - DNA, 33 bp, Homo sapien
agctgattaagatccacgatgcagtgtggaaga

SEQ ID NO: 932020 - DNA, 33 bp, Homo sapien
agctgattaagatccatgatgcagtgtggaaga

SEQ ID NO: 932021 - DNA, 33 bp, Homo sapien
tctgccccagggaagactaaggcaagccagggt

SEQ ID NO: 932022 - DNA, 33 bp, Homo sapien
tctgccccagggaagattaaggcaagccagggt

SEQ ID NO: 932023 - DNA, 33 bp, Homo sapien
gactttggtctaattgcagcagggaactgaatt

SEQ ID NO: 932024 - DNA, 33 bp, Homo sapien
gactttggtctaattgtagcagggaactgaatt

SEQ ID NO: 932025 - DNA, 33 bp, Homo sapien
cttggatttcaacataaaaccttgaagcaaact

SEQ ID NO: 932026 - DNA, 33 bp, Homo sapien
cttggatttcaacatataaccttgaagcaaact

SEQ ID NO: 932027 - DNA, 33 bp, Homo sapien
tgttgtggaaattaacacagcagctaatttcaa

SEQ ID NO: 932028 - DNA, 33 bp, Homo sapien
tgttgtggaaattaacgcagcagctaatttcaa

SEQ ID NO: 932029 - DNA, 33 bp, Homo sapien
aaagaacagaccacacaccttcttccctctgtt

SEQ ID NO: 932030 - DNA, 33 bp, Homo sapien
aaagaacagaccacacgccttcttccctctgtt

SEQ ID NO: 932031 - DNA, 33 bp, Homo sapien
atttatgttactactccccagtctccaaaaccg

SEQ ID NO: 932032 - DNA, 33 bp, Homo sapien
atttatgttactactctccagtctccaaaaccg

SEQ ID NO: 932033 - DNA, 33 bp, Homo sapien
ctaactttctcagacaactgatggatttctaac

SEQ ID NO: 932034 - DNA, 33 bp, Homo sapien
ctaactttctcagacagctgatggatttctaac

SEQ ID NO: 932035 - DNA, 33 bp, Homo sapien
ttagtggaaggatgcaatagaacaacacattta

SEQ ID NO: 932036 - DNA, 33 bp, Homo sapien
ttagtggaaggatgcagtagaacaacacattta

SEQ ID NO: 932037 - DNA, 33 bp, Homo sapien
gaaaacaacagagaggaaacttgatattgaata

SEQ ID NO: 932038 - DNA, 33 bp, Homo sapien
gaaaacaacagagagggaacttgatattgaata

SEQ ID NO: 932039 - DNA, 33 bp, Homo sapien
tccctcttgactgaatcaatcccatccacatac

SEQ ID NO: 932040 - DNA, 33 bp, Homo sapien
tccctcttgactgaattaatcccatccacatac

SEQ ID NO: 932041 - DNA, 33 bp, Homo sapien
gatactaggacagaaaaacgcagtgccttaact

SEQ ID NO: 932042 - DNA, 33 bp, Homo sapien
gatactaggacagaaagacgcagtgccttaact

SEQ ID NO: 932043 - DNA, 33 bp, Homo sapien
tcagtacagtaattcaatctttttaatgctaag

SEQ ID NO: 932044 - DNA, 33 bp, Homo sapien
tcagtacagtaattcattctttttaatgctaag

SEQ ID NO: 932045 - DNA, 33 bp, Homo sapien
tgtgcatctcaatgtacgtatattttaccttaa

SEQ ID NO: 932046 - DNA, 33 bp, Homo sapien
tgtgcatctcaatgtatgtatattttaccttaa

SEQ ID NO: 932047 - DNA, 33 bp, Homo sapien
gaaatattcttctgccccatggagattataata

SEQ ID NO: 932048 - DNA, 33 bp, Homo sapien
gaaatattcttctgcctcatggagattataata

SEQ ID NO: 932049 - DNA, 33 bp, Homo sapien
ccctctgaggacctacaaaagccatctgctctc

SEQ ID NO: 932050 - DNA, 33 bp, Homo sapien
ccctctgaggacctacgaaagccatctgctctc

SEQ ID NO: 932051 - DNA, 33 bp, Homo sapien
ctgagttggggttaaacgattaaatggtgaatg

SEQ ID NO: 932052 - DNA, 33 bp, Homo sapien
ctgagttggggttaaatgattaaatggtgaatg

SEQ ID NO: 932053 - DNA, 33 bp, Homo sapien
aatgtgttggaaaggacgtggagaaattggagt

SEQ ID NO: 932054 - DNA, 33 bp, Homo sapien
aatgtgttggaaaggatgtggagaaattggagt

SEQ ID NO: 932055 - DNA, 33 bp, Homo sapien
aaccctgcacttacgcactccctttccacccca

SEQ ID NO: 932056 - DNA, 33 bp, Homo sapien
aaccctgcacttacgctctccctttccacccca

SEQ ID NO: 932057 - DNA, 33 bp, Homo sapien
ttgtttatagtaggcacgaaaaatactaattca

SEQ ID NO: 932058 - DNA, 33 bp, Homo sapien
ttgtttatagtaggcatgaaaaatactaattca

SEQ ID NO: 932059 - DNA, 33 bp, Homo sapien
gcaaagcataaggaaacagatgagtttaggaga

SEQ ID NO: 932060 - DNA, 33 bp, Homo sapien
gcaaagcataaggaaatagatgagtttaggaga

SEQ ID NO: 932061 - DNA, 33 bp, Homo sapien
taatatatgttaataaatgaatgcatcaaaaaa

SEQ ID NO: 932062 - DNA, 33 bp, Homo sapien
taatatatgttaataagtgaatgcatcaaaaaa

SEQ ID NO: 932063 - DNA, 33 bp, Homo sapien
tgaagaccaatggagaaacagatcatatacagt

SEQ ID NO: 932064 - DNA, 33 bp, Homo sapien
tgaagaccaatggagagacagatcatatacagt

SEQ ID NO: 932065 - DNA, 33 bp, Homo sapien
cattaaagcctctttacacaatctaatccaaat

SEQ ID NO: 932066 - DNA, 33 bp, Homo sapien
cattaaagcctctttatacaatctaatccaaat

SEQ ID NO: 932067 - DNA, 33 bp, Homo sapien
tgaaatgggtgtgtaaactcataatataacact

SEQ ID NO: 932068 - DNA, 33 bp, Homo sapien
tgaaatgggtgtgtaacctcataatataacact

SEQ ID NO: 932069 - DNA, 33 bp, Homo sapien
gaagcttctttcagaacttacgtcagaaccagt

SEQ ID NO: 932070 - DNA, 33 bp, Homo sapien
gaagcttctttcagaatttacgtcagaaccagt

SEQ ID NO: 932071 - DNA, 33 bp, Homo sapien
ctacaagttggaaggtaaaactcataaaaggaa

SEQ ID NO: 932072 - DNA, 33 bp, Homo sapien
ctacaagttggaaggtcaaactcataaaaggaa

SEQ ID NO: 932073 - DNA, 33 bp, Homo sapien
taattttcacattagcaatttgggtattatctc

SEQ ID NO: 932074 - DNA, 33 bp, Homo sapien
taattttcacattagcgatttgggtattatctc

SEQ ID NO: 932075 - DNA, 33 bp, Homo sapien
ttagaagctatcctaaatagtgtttcgtgtcct

SEQ ID NO: 932076 - DNA, 33 bp, Homo sapien
ttagaagctatcctaagtagtgtttcgtgtcct

SEQ ID NO: 932077 - DNA, 33 bp, Homo sapien
tcctcatatttgtggccaagtttcagcagaagg

SEQ ID NO: 932078 - DNA, 33 bp, Homo sapien
tcctcatatttgtggctaagtttcagcagaagg

SEQ ID NO: 932079 - DNA, 33 bp, Homo sapien
gaaaaaggagttggcacggttgaatagaataca

SEQ ID NO: 932080 - DNA, 33 bp, Homo sapien
gaaaaaggagttggcatggttgaatagaataca

SEQ ID NO: 932081 - DNA, 33 bp, Homo sapien
gagcctggccacaataaatctgagacccagctc

SEQ ID NO: 932082 - DNA, 33 bp, Homo sapien
gagcctggccacaatacatctgagacccagctc

SEQ ID NO: 932083 - DNA, 33 bp, Homo sapien
caaatccggatcctcacatccattccattagtt

SEQ ID NO: 932084 - DNA, 33 bp, Homo sapien
caaatccggatcctcatatccattccattagtt

SEQ ID NO: 932085 - DNA, 33 bp, Homo sapien
tcctttttggcctataatacctcctggtggtac

SEQ ID NO: 932086 - DNA, 33 bp, Homo sapien
tcctttttggcctatagtacctcctggtggtac

SEQ ID NO: 932087 - DNA, 33 bp, Homo sapien
ttttgagtcttgaaaagttagcatctaaatcca

SEQ ID NO: 932088 - DNA, 33 bp, Homo sapien
ttttgagtcttgaaaatttagcatctaaatcca

SEQ ID NO: 932089 - DNA, 33 bp, Homo sapien
aataaaaaatatgaccaggatatactaaacagc

SEQ ID NO: 932090 - DNA, 33 bp, Homo sapien
aataaaaaatatgacctggatatactaaacagc

SEQ ID NO: 932091 - DNA, 33 bp, Homo sapien
ttttctgcatagaggaataacttcaggaagtca

SEQ ID NO: 932092 - DNA, 33 bp, Homo sapien
ttttctgcatagaggactaacttcaggaagtca

SEQ ID NO: 932093 - DNA, 33 bp, Homo sapien
tcctgctgccagtttacgctttccctggagcca

SEQ ID NO: 932094 - DNA, 33 bp, Homo sapien
tcctgctgccagtttaggctttccctggagcca

SEQ ID NO: 932095 - DNA, 33 bp, Homo sapien
acaacaaacgtcatgcactgttgtttggtcaaa

SEQ ID NO: 932096 - DNA, 33 bp, Homo sapien
acaacaaacgtcatgcgctgttgtttggtcaaa

SEQ ID NO: 932097 - DNA, 33 bp, Homo sapien
aggtgagaaatcgctcagaaattctcaaagccc

SEQ ID NO: 932098 - DNA, 33 bp, Homo sapien
aggtgagaaatcgctcggaaattctcaaagccc

SEQ ID NO: 932099 - DNA, 33 bp, Homo sapien
atcctgtgacctgcaacgaaaggcctatgagag

SEQ ID NO: 932100 - DNA, 33 bp, Homo sapien
atcctgtgacctgcaatgaaaggcctatgagag

SEQ ID NO: 932101 - DNA, 33 bp, Homo sapien
aatgttgggtgctcgacataagcatatcatctc

SEQ ID NO: 932102 - DNA, 33 bp, Homo sapien
aatgttgggtgctcgagataagcatatcatctc

SEQ ID NO: 932103 - DNA, 33 bp, Homo sapien
gctgttactactggacactttttagccgtgtta

SEQ ID NO: 932104 - DNA, 33 bp, Homo sapien
gctgttactactggacgctttttagccgtgtta

SEQ ID NO: 932105 - DNA, 33 bp, Homo sapien
cagtcataattcttgacggtatgattcactaac

SEQ ID NO: 932106 - DNA, 33 bp, Homo sapien
cagtcataattcttgatggtatgattcactaac

SEQ ID NO: 932107 - DNA, 33 bp, Homo sapien
ttaaagtagacactaaagatggtgggttatcaa

SEQ ID NO: 932108 - DNA, 33 bp, Homo sapien
ttaaagtagacactaacgatggtgggttatcaa

SEQ ID NO: 932109 - DNA, 33 bp, Homo sapien
cactcttgagttctgaagatgaacaaatgtaaa

SEQ ID NO: 932110 - DNA, 33 bp, Homo sapien
cactcttgagttctgaggatgaacaaatgtaaa

SEQ ID NO: 932111 - DNA, 33 bp, Homo sapien
ttcaatatgggtcagacctcagctaaaagactg

SEQ ID NO: 932112 - DNA, 33 bp, Homo sapien
ttcaatatgggtcagatctcagctaaaagactg

SEQ ID NO: 932113 - DNA, 33 bp, Homo sapien
cacacaaggccgttgacgtccaagcaaaacaaa

SEQ ID NO: 932114 - DNA, 33 bp, Homo sapien
cacacaaggccgttgatgtccaagcaaaacaaa

SEQ ID NO: 932115 - DNA, 33 bp, Homo sapien
tggccccagattccaacgcttaacatctgtgat

SEQ ID NO: 932116 - DNA, 33 bp, Homo sapien
tggccccagattccaatgcttaacatctgtgat

SEQ ID NO: 932117 - DNA, 33 bp, Homo sapien
ggaacattgtgtcttaaattcatgggcttgtac

SEQ ID NO: 932118 - DNA, 33 bp, Homo sapien
ggaacattgtgtcttatattcatgggcttgtac

SEQ ID NO: 932119 - DNA, 33 bp, Homo sapien
tattttcaagaacggcaattttcagttaattta

SEQ ID NO: 932120 - DNA, 33 bp, Homo sapien
tattttcaagaacggcgattttcagttaattta

SEQ ID NO: 932121 - DNA, 33 bp, Homo sapien
ctgacagccagaaagaactgtaatctctttcac

SEQ ID NO: 932122 - DNA, 33 bp, Homo sapien
ctgacagccagaaagacctgtaatctctttcac

SEQ ID NO: 932123 - DNA, 33 bp, Homo sapien
aatctcctcctgcctcactcttatgatgacact

SEQ ID NO: 932124 - DNA, 33 bp, Homo sapien
aatctcctcctgcctcgctcttatgatgacact

SEQ ID NO: 932125 - DNA, 33 bp, Homo sapien
gatcacaagaactttgaaaggtggtgttattgt

SEQ ID NO: 932126 - DNA, 33 bp, Homo sapien
gatcacaagaactttgtaaggtggtgttattgt

SEQ ID NO: 932127 - DNA, 33 bp, Homo sapien
gtgtgtgtgtgtatcaatacctcatagtgctag

SEQ ID NO: 932128 - DNA, 33 bp, Homo sapien
gtgtgtgtgtgtatcagtacctcatagtgctag

SEQ ID NO: 932129 - DNA, 33 bp, Homo sapien
attgttaaatttcaaaagtctgtgcactggaaa

SEQ ID NO: 932130 - DNA, 33 bp, Homo sapien
attgttaaatttcaaaggtctgtgcactggaaa

SEQ ID NO: 932131 - DNA, 33 bp, Homo sapien
agcccttggccaatgggaaaccttctctagtag

SEQ ID NO: 932132 - DNA, 33 bp, Homo sapien
agcccttggccaatggtaaaccttctctagtag

SEQ ID NO: 932133 - DNA, 33 bp, Homo sapien
agaactgtcgcttttcaaggggaggtaaagtgg

SEQ ID NO: 932134 - DNA, 33 bp, Homo sapien
agaactgtcgcttttctaggggaggtaaagtgg

SEQ ID NO: 932135 - DNA, 33 bp, Homo sapien
aagtttactagagcaacattcttcaccaaacat

SEQ ID NO: 932136 - DNA, 33 bp, Homo sapien
aagtttactagagcaatattcttcaccaaacat

SEQ ID NO: 932137 - DNA, 33 bp, Homo sapien
agcttaggtggctccactgcagcatgcttggca

SEQ ID NO: 932138 - DNA, 33 bp, Homo sapien
agcttaggtggctccagtgcagcatgcttggca

SEQ ID NO: 932139 - DNA, 33 bp, Homo sapien
gttctaacaatccataagtcttggagttttgac

SEQ ID NO: 932140 - DNA, 33 bp, Homo sapien
gttctaacaatccatatgtcttggagttttgac

SEQ ID NO: 932141 - DNA, 33 bp, Homo sapien
gttcttttctgttctccgaaagtgcctttttaa

SEQ ID NO: 932142 - DNA, 33 bp, Homo sapien
gttcttttctgttctctgaaagtgcctttttaa

SEQ ID NO: 932143 - DNA, 33 bp, Homo sapien
atgcaattctaaaacccgaaggagacaggaccc

SEQ ID NO: 932144 - DNA, 33 bp, Homo sapien
atgcaattctaaaacctgaaggagacaggaccc

SEQ ID NO: 932145 - DNA, 33 bp, Homo sapien
ccatagtatgtcccaactcacaatggtggtaga

SEQ ID NO: 932146 - DNA, 33 bp, Homo sapien
ccatagtatgtcccaattcacaatggtggtaga

SEQ ID NO: 932147 - DNA, 33 bp, Homo sapien
ctagttggtttcaagcacccatacattgtgtct

SEQ ID NO: 932148 - DNA, 33 bp, Homo sapien
ctagttggtttcaagcgcccatacattgtgtct

SEQ ID NO: 932149 - DNA, 33 bp, Homo sapien
gatatttccattccaccgtcgcatcttcccagc

SEQ ID NO: 932150 - DNA, 33 bp, Homo sapien
gatatttccattccactgtcgcatcttcccagc

SEQ ID NO: 932151 - DNA, 33 bp, Homo sapien
ggatgatttaaatatccactcggcatcttggca

SEQ ID NO: 932152 - DNA, 33 bp, Homo sapien
ggatgatttaaatatcgactcggcatcttggca

SEQ ID NO: 932153 - DNA, 33 bp, Homo sapien
taaagacaaactatccagattcagctgtaagta

SEQ ID NO: 932154 - DNA, 33 bp, Homo sapien
taaagacaaactatccggattcagctgtaagta

SEQ ID NO: 932155 - DNA, 33 bp, Homo sapien
tccaggctctgtgatacaaagggtatggaagct

SEQ ID NO: 932156 - DNA, 33 bp, Homo sapien
tccaggctctgtgatataaagggtatggaagct

SEQ ID NO: 932157 - DNA, 33 bp, Homo sapien
gctataaatcacgagaggaagtatagagcatga

SEQ ID NO: 932158 - DNA, 33 bp, Homo sapien
gctataaatcacgagatgaagtatagagcatga

SEQ ID NO: 932159 - DNA, 33 bp, Homo sapien
ttgcttgtatgtctgtcacacaaagaacaagaa

SEQ ID NO: 932160 - DNA, 33 bp, Homo sapien
ttgcttgtatgtctgtgacacaaagaacaagaa

SEQ ID NO: 932161 - DNA, 33 bp, Homo sapien
agtggaaaatccaagaatctagcaatttccttc

SEQ ID NO: 932162 - DNA, 33 bp, Homo sapien
agtggaaaatccaagactctagcaatttccttc

SEQ ID NO: 932163 - DNA, 33 bp, Homo sapien
tcctaaggtgagatgtaaaggaagactaggagt

SEQ ID NO: 932164 - DNA, 33 bp, Homo sapien
tcctaaggtgagatgtgaaggaagactaggagt

SEQ ID NO: 932165 - DNA, 33 bp, Homo sapien
gatttttcctttgaaactgggcatctagcattt

SEQ ID NO: 932166 - DNA, 33 bp, Homo sapien
gatttttcctttgaaattgggcatctagcattt

SEQ ID NO: 932167 - DNA, 33 bp, Homo sapien
caaccagtcatctaacaggctgaattctttact

SEQ ID NO: 932168 - DNA, 33 bp, Homo sapien
caaccagtcatctaacgggctgaattctttact

SEQ ID NO: 932169 - DNA, 33 bp, Homo sapien
gatgactggttgtgaaaagccaaacattgggta

SEQ ID NO: 932170 - DNA, 33 bp, Homo sapien
gatgactggttgtgaagagccaaacattgggta

SEQ ID NO: 932171 - DNA, 33 bp, Homo sapien
ccaataaatcatttggaaggttaatctacagga

SEQ ID NO: 932172 - DNA, 33 bp, Homo sapien
ccaataaatcatttgggaggttaatctacagga

SEQ ID NO: 932173 - DNA, 33 bp, Homo sapien
atatggaaataagccaatatcgcggctggtgta

SEQ ID NO: 932174 - DNA, 33 bp, Homo sapien
atatggaaataagccagtatcgcggctggtgta

SEQ ID NO: 932175 - DNA, 33 bp, Homo sapien
tccattttgctgttgacagacattgaggttatt

SEQ ID NO: 932176 - DNA, 33 bp, Homo sapien
tccattttgctgttgatagacattgaggttatt

SEQ ID NO: 932177 - DNA, 33 bp, Homo sapien
aatggatactaagagcagagggtgagatgataa

SEQ ID NO: 932178 - DNA, 33 bp, Homo sapien
aatggatactaagagcggagggtgagatgataa

SEQ ID NO: 932179 - DNA, 33 bp, Homo sapien
gttcttcctcttggacaggtccttctcctgtta

SEQ ID NO: 932180 - DNA, 33 bp, Homo sapien
gttcttcctcttggacgggtccttctcctgtta

SEQ ID NO: 932181 - DNA, 33 bp, Homo sapien
gatgagaatccttaataaccaaagagacagagg

SEQ ID NO: 932182 - DNA, 33 bp, Homo sapien
gatgagaatccttaatgaccaaagagacagagg

SEQ ID NO: 932183 - DNA, 33 bp, Homo sapien
aacaggtggagtgggacaatcagcaggggacaa

SEQ ID NO: 932184 - DNA, 33 bp, Homo sapien
aacaggtggagtgggataatcagcaggggacaa

SEQ ID NO: 932185 - DNA, 33 bp, Homo sapien
cttaattagctttagacacgatgctaaatcatc

SEQ ID NO: 932186 - DNA, 33 bp, Homo sapien
cttaattagctttagatacgatgctaaatcatc

SEQ ID NO: 932187 - DNA, 33 bp, Homo sapien
gaaaaggtgattaccacccagatcttattctaa

SEQ ID NO: 932188 - DNA, 33 bp, Homo sapien
gaaaaggtgattaccatccagatcttattctaa

SEQ ID NO: 932189 - DNA, 33 bp, Homo sapien
cagcctgcagaatcataatccaattaaagtctt

SEQ ID NO: 932190 - DNA, 33 bp, Homo sapien
cagcctgcagaatcatgatccaattaaagtctt

SEQ ID NO: 932191 - DNA, 33 bp, Homo sapien
atctacacaggaagccaaagaaaaatggagcaa

SEQ ID NO: 932192 - DNA, 33 bp, Homo sapien
atctacacaggaagccgaagaaaaatggagcaa

SEQ ID NO: 932193 - DNA, 33 bp, Homo sapien
cacacttttcctgtgaactgggctggggctcct

SEQ ID NO: 932194 - DNA, 33 bp, Homo sapien
cacacttttcctgtgatctgggctggggctcct

SEQ ID NO: 932195 - DNA, 33 bp, Homo sapien
agagaaatggtaatgcaaagagattgtgcgggg

SEQ ID NO: 932196 - DNA, 33 bp, Homo sapien
agagaaatggtaatgctaagagattgtgcgggg

SEQ ID NO: 932197 - DNA, 33 bp, Homo sapien
attcttttcagcaacactggttaggaaacaaac

SEQ ID NO: 932198 - DNA, 33 bp, Homo sapien
attcttttcagcaacattggttaggaaacaaac

SEQ ID NO: 932199 - DNA, 33 bp, Homo sapien
acgtagaagagaaaaaaaaaatcacttaccatt

SEQ ID NO: 932200 - DNA, 33 bp, Homo sapien
acgtagaagagaaaaagaaaatcacttaccatt

SEQ ID NO: 932201 - DNA, 33 bp, Homo sapien
tctcctagttcctacaaatacctcttcttgcca

SEQ ID NO: 932202 - DNA, 33 bp, Homo sapien
tctcctagttcctacatatacctcttcttgcca

SEQ ID NO: 932203 - DNA, 33 bp, Homo sapien
aaaacattcactgacactgaacagcttaatttg

SEQ ID NO: 932204 - DNA, 33 bp, Homo sapien
aaaacattcactgacattgaacagcttaatttg

SEQ ID NO: 932205 - DNA, 33 bp, Homo sapien
acacaacagttttgatgagagaaacagaagaat

SEQ ID NO: 932206 - DNA, 33 bp, Homo sapien
acacaacagttttgattagagaaacagaagaat

SEQ ID NO: 932207 - DNA, 33 bp, Homo sapien
ttagttgcattgtggaagcaaatgatattaata

SEQ ID NO: 932208 - DNA, 33 bp, Homo sapien
ttagttgcattgtggaggcaaatgatattaata

SEQ ID NO: 932209 - DNA, 33 bp, Homo sapien
gactacgcagcttcctaacatcctggcttgggg

SEQ ID NO: 932210 - DNA, 33 bp, Homo sapien
gactacgcagcttcctgacatcctggcttgggg

SEQ ID NO: 932211 - DNA, 33 bp, Homo sapien
ctgccatggcgttgaacgtgttcacttaaacta

SEQ ID NO: 932212 - DNA, 33 bp, Homo sapien
ctgccatggcgttgaatgtgttcacttaaacta

SEQ ID NO: 932213 - DNA, 33 bp, Homo sapien
ggtactgacatgggaacagtgaagagagaagtg

SEQ ID NO: 932214 - DNA, 33 bp, Homo sapien
ggtactgacatgggaagagtgaagagagaagtg

SEQ ID NO: 932215 - DNA, 33 bp, Homo sapien
ggaaaaaaccaaagagacgaaatgaggactcac

SEQ ID NO: 932216 - DNA, 33 bp, Homo sapien
ggaaaaaaccaaagaggcgaaatgaggactcac

SEQ ID NO: 932217 - DNA, 33 bp, Homo sapien
aatgaatgaggtttacagattttctaaggactc

SEQ ID NO: 932218 - DNA, 33 bp, Homo sapien
aatgaatgaggtttacggattttctaaggactc

SEQ ID NO: 932219 - DNA, 33 bp, Homo sapien
ccaatgagcaaaatgcaccaagaacctacctaa

SEQ ID NO: 932220 - DNA, 33 bp, Homo sapien
ccaatgagcaaaatgcgccaagaacctacctaa

SEQ ID NO: 932221 - DNA, 33 bp, Homo sapien
gagtttagatgcaagcacagaatcagaagccaa

SEQ ID NO: 932222 - DNA, 33 bp, Homo sapien
gagtttagatgcaagcgcagaatcagaagccaa

SEQ ID NO: 932223 - DNA, 33 bp, Homo sapien
aggcgaacgtgataaccactacactacagaaac

SEQ ID NO: 932224 - DNA, 33 bp, Homo sapien
aggcgaacgtgataacgactacactacagaaac

SEQ ID NO: 932225 - DNA, 33 bp, Homo sapien
tatcacgaatctcatgacatataacgctttgtg

SEQ ID NO: 932226 - DNA, 33 bp, Homo sapien
tatcacgaatctcatggcatataacgctttgtg

SEQ ID NO: 932227 - DNA, 33 bp, Homo sapien
ggatgttcatgaataacgtctgttaactaaatg

SEQ ID NO: 932228 - DNA, 33 bp, Homo sapien
ggatgttcatgaataatgtctgttaactaaatg

SEQ ID NO: 932229 - DNA, 33 bp, Homo sapien
ccagaatcgaataagcaaattaatcgcacaatt

SEQ ID NO: 932230 - DNA, 33 bp, Homo sapien
ccagaatcgaataagcgaattaatcgcacaatt

SEQ ID NO: 932231 - DNA, 33 bp, Homo sapien
agattgtgaaagagaaatgtatctacttgcaga

SEQ ID NO: 932232 - DNA, 33 bp, Homo sapien
agattgtgaaagagaactgtatctacttgcaga

SEQ ID NO: 932233 - DNA, 33 bp, Homo sapien
ggttatttttgtacaacagctgatacagcaact

SEQ ID NO: 932234 - DNA, 33 bp, Homo sapien
ggttatttttgtacaagagctgatacagcaact

SEQ ID NO: 932235 - DNA, 33 bp, Homo sapien
taggaaatttaaggaaaagaaaggtgtggcaaa

SEQ ID NO: 932236 - DNA, 33 bp, Homo sapien
taggaaatttaaggaagagaaaggtgtggcaaa

SEQ ID NO: 932237 - DNA, 33 bp, Homo sapien
catctgatgtagtacaatagtcttccaaacagg

SEQ ID NO: 932238 - DNA, 33 bp, Homo sapien
catctgatgtagtacagtagtcttccaaacagg

SEQ ID NO: 932239 - DNA, 33 bp, Homo sapien
atgctgaaaaaactgacagctaaaataacatga

SEQ ID NO: 932240 - DNA, 33 bp, Homo sapien
atgctgaaaaaactgagagctaaaataacatga

SEQ ID NO: 932241 - DNA, 33 bp, Homo sapien
gaagcataaaatgggaaaaagtagcctcttacc

SEQ ID NO: 932242 - DNA, 33 bp, Homo sapien
gaagcataaaatgggataaagtagcctcttacc

SEQ ID NO: 932243 - DNA, 33 bp, Homo sapien
gtagaagagaatagagaactcagaagtagaacc

SEQ ID NO: 932244 - DNA, 33 bp, Homo sapien
gtagaagagaatagaggactcagaagtagaacc

SEQ ID NO: 932245 - DNA, 33 bp, Homo sapien
tgatttcatgaatataagtgaaaaacagcacag

SEQ ID NO: 932246 - DNA, 33 bp, Homo sapien
tgatttcatgaatatacgtgaaaaacagcacag

SEQ ID NO: 932247 - DNA, 33 bp, Homo sapien
taactgacttaatcaaatacagtggaatcaact

SEQ ID NO: 932248 - DNA, 33 bp, Homo sapien
taactgacttaatcaactacagtggaatcaact

SEQ ID NO: 932249 - DNA, 33 bp, Homo sapien
gtaaaagttaaaagtacagcttaagcaaaaaga

SEQ ID NO: 932250 - DNA, 33 bp, Homo sapien
gtaaaagttaaaagtatagcttaagcaaaaaga

SEQ ID NO: 932251 - DNA, 33 bp, Homo sapien
gttatgccagtaccaccatattgatattgtagc

SEQ ID NO: 932252 - DNA, 33 bp, Homo sapien
gttatgccagtaccactatattgatattgtagc

SEQ ID NO: 932253 - DNA, 33 bp, Homo sapien
gatgcaaatagttatcaaatgcagttcttgttc

SEQ ID NO: 932254 - DNA, 33 bp, Homo sapien
gatgcaaatagttatcgaatgcagttcttgttc

SEQ ID NO: 932255 - DNA, 33 bp, Homo sapien
ttctattcttaatgtgaaaacttagattactaa

SEQ ID NO: 932256 - DNA, 33 bp, Homo sapien
ttctattcttaatgtggaaacttagattactaa

SEQ ID NO: 932257 - DNA, 33 bp, Homo sapien
ggtacattgcaaaacactataaacaaaacattg

SEQ ID NO: 932258 - DNA, 33 bp, Homo sapien
ggtacattgcaaaacagtataaacaaaacattg

SEQ ID NO: 932259 - DNA, 33 bp, Homo sapien
agattatttggtcataaatgtgtggtcttattt

SEQ ID NO: 932260 - DNA, 33 bp, Homo sapien
agattatttggtcatatatgtgtggtcttattt

SEQ ID NO: 932261 - DNA, 33 bp, Homo sapien
agaccatgaatagccacatcaaatcaatcctga

SEQ ID NO: 932262 - DNA, 33 bp, Homo sapien
agaccatgaatagccatatcaaatcaatcctga

SEQ ID NO: 932263 - DNA, 33 bp, Homo sapien
tgtcattttctaggaaaaccaaggaagctaatg

SEQ ID NO: 932264 - DNA, 33 bp, Homo sapien
tgtcattttctaggaagaccaaggaagctaatg

SEQ ID NO: 932265 - DNA, 33 bp, Homo sapien
ttaaatacagtgcagacggatcagataaaactc

SEQ ID NO: 932266 - DNA, 33 bp, Homo sapien
ttaaatacagtgcagatggatcagataaaactc

SEQ ID NO: 932267 - DNA, 33 bp, Homo sapien
tagagtatgtaccatacggcaatgagaagaatg

SEQ ID NO: 932268 - DNA, 33 bp, Homo sapien
tagagtatgtaccatatggcaatgagaagaatg

SEQ ID NO: 932269 - DNA, 33 bp, Homo sapien
agaattctggcagttcaatggcccaagtgtctt

SEQ ID NO: 932270 - DNA, 33 bp, Homo sapien
agaattctggcagttcgatggcccaagtgtctt

SEQ ID NO: 932271 - DNA, 33 bp, Homo sapien
ttatcagctgttttaaaccttataatcctatgg

SEQ ID NO: 932272 - DNA, 33 bp, Homo sapien
ttatcagctgttttaagccttataatcctatgg

SEQ ID NO: 932273 - DNA, 33 bp, Homo sapien
atatataacttagaacagtgtgtagcacatagg

SEQ ID NO: 932274 - DNA, 33 bp, Homo sapien
atatataacttagaacggtgtgtagcacatagg

SEQ ID NO: 932275 - DNA, 33 bp, Homo sapien
agaggtttgagatcccccattatacctcataag

SEQ ID NO: 932276 - DNA, 33 bp, Homo sapien
agaggtttgagatccctcattatacctcataag

SEQ ID NO: 932277 - DNA, 33 bp, Homo sapien
ttctgttggatttgcacgagttctctctctaga

SEQ ID NO: 932278 - DNA, 33 bp, Homo sapien
ttctgttggatttgcatgagttctctctctaga

SEQ ID NO: 932279 - DNA, 33 bp, Homo sapien
atgctgtggatgttgacgaagatatttgggaag

SEQ ID NO: 932280 - DNA, 33 bp, Homo sapien
atgctgtggatgttgatgaagatatttgggaag

SEQ ID NO: 932281 - DNA, 33 bp, Homo sapien
tttctcaacttgcattaaaaaatgtatgaatgc

SEQ ID NO: 932282 - DNA, 33 bp, Homo sapien
tttctcaacttgcatttaaaaatgtatgaatgc

SEQ ID NO: 932283 - DNA, 33 bp, Homo sapien; identical to SEQ ID NO: 932281

SEQ ID NO: 932284 - DNA, 33 bp, Homo sapien; identical to SEQ ID NO: 932282

SEQ ID NO: 932285 - DNA, 33 bp, Homo sapien
atgggtacactgaagagaattttttgagaactt

SEQ ID NO: 932286 - DNA, 33 bp, Homo sapien
atgggtacactgaagataattttttgagaactt

SEQ ID NO: 932287 - DNA, 33 bp, Homo sapien
aaccgcacccatatgacggtgaacttaattgat

SEQ ID NO: 932288 - DNA, 33 bp, Homo sapien
aaccgcacccatatgatggtgaacttaattgat

SEQ ID NO: 932289 - DNA, 33 bp, Homo sapien
catgttctaaatgccaagcacaaattacttcat

SEQ ID NO: 932290 - DNA, 33 bp, Homo sapien
catgttctaaatgccatgcacaaattacttcat

SEQ ID NO: 932291 - DNA, 33 bp, Homo sapien
aaacttcaacagtagactacaccaagcagaaga

SEQ ID NO: 932292 - DNA, 33 bp, Homo sapien
aaacttcaacagtagattacaccaagcagaaga

SEQ ID NO: 932293 - DNA, 33 bp, Homo sapien
gtttaatgctgattcacaaccagtctgaattaa

SEQ ID NO: 932294 - DNA, 33 bp, Homo sapien
gtttaatgctgattcataaccagtctgaattaa

SEQ ID NO: 932295 - DNA, 33 bp, Homo sapien
tgttcaaaatggatccacttactattctggttt

SEQ ID NO: 932296 - DNA, 33 bp, Homo sapien
tgttcaaaatggatccgcttactattctggttt

SEQ ID NO: 932297 - DNA, 33 bp, Homo sapien
ctaagatgtgtaaccaagattcgtacatgaaag

SEQ ID NO: 932298 - DNA, 33 bp, Homo sapien
ctaagatgtgtaaccaggattcgtacatgaaag

SEQ ID NO: 932299 - DNA, 33 bp, Homo sapien
cccagagaagagcgtaaaacatcaggcagatga

SEQ ID NO: 932300 - DNA, 33 bp, Homo sapien
cccagagaagagcgtataacatcaggcagatga

SEQ ID NO: 932301 - DNA, 33 bp, Homo sapien
cacctgtaccttggtccccgggcagctagctat

SEQ ID NO: 932302 - DNA, 33 bp, Homo sapien
cacctgtaccttggtctccgggcagctagctat

SEQ ID NO: 932303 - DNA, 33 bp, Homo sapien
ccgtcagtaagagagacgccctctgccgtaggc

SEQ ID NO: 932304 - DNA, 33 bp, Homo sapien
ccgtcagtaagagagatgccctctgccgtaggc

SEQ ID NO: 932305 - DNA, 33 bp, Homo sapien
aagtccggtgaattccaatacctccagtcatca

SEQ ID NO: 932306 - DNA, 33 bp, Homo sapien
aagtccggtgaattcccatacctccagtcatca

SEQ ID NO: 932307 - DNA, 33 bp, Homo sapien
gccaactcgatttctccactcttctatggtggc

SEQ ID NO: 932308 - DNA, 33 bp, Homo sapien
gccaactcgatttctctactcttctatggtggc

SEQ ID NO: 932309 - DNA, 33 bp, Homo sapien
tttgccgtgagtgaaaagtttggcattgaagta

SEQ ID NO: 932310 - DNA, 33 bp, Homo sapien
tttgccgtgagtgaaaggtttggcattgaagta

SEQ ID NO: 932311 - DNA, 33 bp, Homo sapien
atgtcttttagcaacactctggttacttcttgg

SEQ ID NO: 932312 - DNA, 33 bp, Homo sapien
atgtcttttagcaacagtctggttacttcttgg

SEQ ID NO: 932313 - DNA, 33 bp, Homo sapien
aaagataaagtggaaactgcacatagtctacca

SEQ ID NO: 932314 - DNA, 33 bp, Homo sapien
aaagataaagtggaaattgcacatagtctacca

SEQ ID NO: 932315 - DNA, 33 bp, Homo sapien
gagctcaggaaaggtacaatggatgaaccagac

SEQ ID NO: 932316 - DNA, 33 bp, Homo sapien
gagctcaggaaaggtagaatggatgaaccagac

SEQ ID NO: 932317 - DNA, 33 bp, Homo sapien
gctcgcctattgtctacgtctaaacagcagttt

SEQ ID NO: 932318 - DNA, 33 bp, Homo sapien
gctcgcctattgtctatgtctaaacagcagttt

SEQ ID NO: 932319 - DNA, 33 bp, Homo sapien
gcaattccactgagccaatgtacacctaaaaat

SEQ ID NO: 932320 - DNA, 33 bp, Homo sapien
gcaattccactgagccgatgtacacctaaaaat

SEQ ID NO: 932321 - DNA, 33 bp, Homo sapien
tgctgtttcccaagacaggctaagcgtttctta

SEQ ID NO: 932322 - DNA, 33 bp, Homo sapien
tgctgtttcccaagacgggctaagcgtttctta

SEQ ID NO: 932323 - DNA, 33 bp, Homo sapien
ctggctctgctggccccgaactgaacctctcca

SEQ ID NO: 932324 - DNA, 33 bp, Homo sapien
ctggctctgctggccctgaactgaacctctcca

SEQ ID NO: 932325 - DNA, 33 bp, Homo sapien
cctcttgcacgcacaccggttgttctcactaca

SEQ ID NO: 932326 - DNA, 33 bp, Homo sapien
cctcttgcacgcacactggttgttctcactaca

SEQ ID NO: 932327 - DNA, 33 bp, Homo sapien
gattcatgagcacctgccaggtagtgagaagtg

SEQ ID NO: 932328 - DNA, 33 bp, Homo sapien
gattcatgagcacctgtcaggtagtgagaagtg

SEQ ID NO: 932329 - DNA, 33 bp, Homo sapien
ccttcaacaaataagcagattcatgagcacctg

SEQ ID NO: 932330 - DNA, 33 bp, Homo sapien
ccttcaacaaataagcggattcatgagcacctg

SEQ ID NO: 932331 - DNA, 33 bp, Homo sapien
atttgttgaaggttcacgtcccatactggggaa

SEQ ID NO: 932332 - DNA, 33 bp, Homo sapien
atttgttgaaggttcatgtcccatactggggaa

SEQ ID NO: 932333 - DNA, 33 bp, Homo sapien
tcttcgcttttgactcagagggaaattacatgc

SEQ ID NO: 932334 - DNA, 33 bp, Homo sapien
tcttcgcttttgactcggagggaaattacatgc

SEQ ID NO: 932335 - DNA, 33 bp, Homo sapien
atgaaaggaagtaccaaaaattactcatcttac

SEQ ID NO: 932336 - DNA, 33 bp, Homo sapien
atgaaaggaagtaccagaaattactcatcttac

SEQ ID NO: 932337 - DNA, 33 bp, Homo sapien
ccacacaccgcgctgaatattttacagatttct

SEQ ID NO: 932338 - DNA, 33 bp, Homo sapien
ccacacaccgcgctgagtattttacagatttct

SEQ ID NO: 932339 - DNA, 33 bp, Homo sapien
gttccaggtaagctaacagtcctttaaaatttt

SEQ ID NO: 932340 - DNA, 33 bp, Homo sapien
gttccaggtaagctaatagtcctttaaaatttt

SEQ ID NO: 932341 - DNA, 33 bp, Homo sapien
tagacctcccgggctacggatgacgttaagtga

SEQ ID NO: 932342 - DNA, 33 bp, Homo sapien
tagacctcccgggctatggatgacgttaagtga

SEQ ID NO: 932343 - DNA, 33 bp, Homo sapien
tttcctaacaatatcacctaaggagatcttaat

SEQ ID NO: 932344 - DNA, 33 bp, Homo sapien
tttcctaacaatatcatctaaggagatcttaat

SEQ ID NO: 932345 - DNA, 33 bp, Homo sapien
agctcactgcctctcactgaagtcagtacacac

SEQ ID NO: 932346 - DNA, 33 bp, Homo sapien
agctcactgcctctcattgaagtcagtacacac

SEQ ID NO: 932347 - DNA, 33 bp, Homo sapien
aacatgataaattgtacagaagtaaatacacac

SEQ ID NO: 932348 - DNA, 33 bp, Homo sapien
aacatgataaattgtatagaagtaaatacacac

SEQ ID NO: 932349 - DNA, 33 bp, Homo sapien; identical to SEQ ID NO: 932347

SEQ ID NO: 932350 - DNA, 33 bp, Homo sapien; identical to SEQ ID NO: 932348

SEQ ID NO: 932351 - DNA, 33 bp, Homo sapien
attaaatcagaatctcccagggtgggtattttt

SEQ ID NO: 932352 - DNA, 33 bp, Homo sapien
attaaatcagaatctctcagggtgggtattttt

SEQ ID NO: 932353 - DNA, 33 bp, Homo sapien
aaacaaaacaacagaaagccaggcaagtggtcc

SEQ ID NO: 932354 - DNA, 33 bp, Homo sapien
aaacaaaacaacagaaggccaggcaagtggtcc

SEQ ID NO: 932355 - DNA, 33 bp, Homo sapien
agccagtctcttgtaaacctcaactgatagcac

SEQ ID NO: 932356 - DNA, 33 bp, Homo sapien
agccagtctcttgtaagcctcaactgatagcac

SEQ ID NO: 932357 - DNA, 33 bp, Homo sapien
catataatcaaaaaagaagtgaatcttatcaca

SEQ ID NO: 932358 - DNA, 33 bp, Homo sapien
catataatcaaaaaaggagtgaatcttatcaca

SEQ ID NO: 932359 - DNA, 33 bp, Homo sapien
attgtagatcctcaaacgggctcaatttagatg

SEQ ID NO: 932360 - DNA, 33 bp, Homo sapien
attgtagatcctcaaatgggctcaatttagatg

SEQ ID NO: 932361 - DNA, 33 bp, Homo sapien
atgttaacctaaatcccctggtgtccagacaca

SEQ ID NO: 932362 - DNA, 33 bp, Homo sapien
atgttaacctaaatcctctggtgtccagacaca

SEQ ID NO: 932363 - DNA, 33 bp, Homo sapien
agattttgaactgcccagggaaaatgagaacct

SEQ ID NO: 932364 - DNA, 33 bp, Homo sapien
agattttgaactgcccggggaaaatgagaacct

SEQ ID NO: 932365 - DNA, 33 bp, Homo sapien
tgaacaggtacttgtccccactgtgaggtcttt

SEQ ID NO: 932366 - DNA, 33 bp, Homo sapien
tgaacaggtacttgtctccactgtgaggtcttt

SEQ ID NO: 932367 - DNA, 33 bp, Homo sapien
tagaataaaagagaaacgaatggtctccagcat

SEQ ID NO: 932368 - DNA, 33 bp, Homo sapien
tagaataaaagagaaaggaatggtctccagcat

SEQ ID NO: 932369 - DNA, 33 bp, Homo sapien
ggcttgtatgaaagggaagccaaacagatgtgt

SEQ ID NO: 932370 - DNA, 33 bp, Homo sapien
ggcttgtatgaaagggcagccaaacagatgtgt

SEQ ID NO: 932371 - DNA, 33 bp, Homo sapien
ccctctttctctcagacacagttaaattagccc

SEQ ID NO: 932372 - DNA, 33 bp, Homo sapien
ccctctttctctcagatacagttaaattagccc

SEQ ID NO: 932373 - DNA, 33 bp, Homo sapien
tactatagcttggccaacttgacacatgaaacc

SEQ ID NO: 932374 - DNA, 33 bp, Homo sapien
tactatagcttggccagcttgacacatgaaacc

SEQ ID NO: 932375 - DNA, 33 bp, Homo sapien
aaaacatacagttgaacggagtggttttagatt

SEQ ID NO: 932376 - DNA, 33 bp, Homo sapien
aaaacatacagttgaatggagtggttttagatt

SEQ ID NO: 932377 - DNA, 33 bp, Homo sapien
ttctcgcatttgcaacacccttagtctgctctc

SEQ ID NO: 932378 - DNA, 33 bp, Homo sapien
ttctcgcatttgcaacgcccttagtctgctctc

SEQ ID NO: 932379 - DNA, 33 bp, Homo sapien
actatcctgaagtaaaatactagttttgttagt

SEQ ID NO: 932380 - DNA, 33 bp, Homo sapien
actatcctgaagtaaagtactagttttgttagt

SEQ ID NO: 932381 - DNA, 33 bp, Homo sapien
accaagccttggaaagaaggttacagggactga

SEQ ID NO: 932382 - DNA, 33 bp, Homo sapien
accaagccttggaaagtaggttacagggactga

SEQ ID NO: 932383 - DNA, 33 bp, Homo sapien
ttgtctacccaagcagaaggaaagctgaacaca

SEQ ID NO: 932384 - DNA, 33 bp, Homo sapien
ttgtctacccaagcaggaggaaagctgaacaca

SEQ ID NO: 932385 - DNA, 33 bp, Homo sapien
gaggtccactgagatacgtggaaagcaatgtga

SEQ ID NO: 932386 - DNA, 33 bp, Homo sapien
gaggtccactgagatatgtggaaagcaatgtga

SEQ ID NO: 932387 - DNA, 33 bp, Homo sapien
agggcttgtggctctagaatgtgtctagacttg

SEQ ID NO: 932388 - DNA, 33 bp, Homo sapien
agggcttgtggctctataatgtgtctagacttg

SEQ ID NO: 932389 - DNA, 33 bp, Homo sapien
gtttaatggaccaaacagttccaggtggctggg

SEQ ID NO: 932390 - DNA, 33 bp, Homo sapien
gtttaatggaccaaacggttccaggtggctggg

SEQ ID NO: 932391 - DNA, 33 bp, Homo sapien
ctagctgtgtcctcacaaagactttccttggta

SEQ ID NO: 932392 - DNA, 33 bp, Homo sapien
ctagctgtgtcctcacgaagactttccttggta

SEQ ID NO: 932393 - DNA, 33 bp, Homo sapien
aagagtggtggaaaagaagctataagtgagcag

SEQ ID NO: 932394 - DNA, 33 bp, Homo sapien
aagagtggtggaaaagcagctataagtgagcag

SEQ ID NO: 932395 - DNA, 33 bp, Homo sapien
tctttctgaaggtggaactcaattaactgggaa

SEQ ID NO: 932396 - DNA, 33 bp, Homo sapien
tctttctgaaggtggacctcaattaactgggaa

SEQ ID NO: 932397 - DNA, 33 bp, Homo sapien
gtaggtctggaagagcacccagaaaaatgcatc

SEQ ID NO: 932398 - DNA, 33 bp, Homo sapien
gtaggtctggaagagcgcccagaaaaatgcatc

SEQ ID NO: 932399 - DNA, 33 bp, Homo sapien
ccaactaagaaacgtacgagtgcttgcctctgc

SEQ ID NO: 932400 - DNA, 33 bp, Homo sapien
ccaactaagaaacgtatgagtgcttgcctctgc

SEQ ID NO: 932401 - DNA, 33 bp, Homo sapien
gaaacacaattcagaaataaaatcatgctcatg

SEQ ID NO: 932402 - DNA, 33 bp, Homo sapien
gaaacacaattcagaagtaaaatcatgctcatg

SEQ ID NO: 932403 - DNA, 33 bp, Homo sapien
tagatagtatcgaaaagtcccttccatctctaa

SEQ ID NO: 932404 - DNA, 33 bp, Homo sapien
tagatagtatcgaaaattcccttccatctctaa

SEQ ID NO: 932405 - DNA, 33 bp, Homo sapien
gcatggaaagtcgtaacgaggcatcccagctag

SEQ ID NO: 932406 - DNA, 33 bp, Homo sapien
gcatggaaagtcgtaatgaggcatcccagctag

SEQ ID NO: 932407 - DNA, 33 bp, Homo sapien
tcattctgcctggaagcccaggtttgaactgag

SEQ ID NO: 932408 - DNA, 33 bp, Homo sapien
tcattctgcctggaaggccaggtttgaactgag

SEQ ID NO: 932409 - DNA, 33 bp, Homo sapien
atacatttctgcctaacctgatctggatttgtg

SEQ ID NO: 932410 - DNA, 33 bp, Homo sapien
atacatttctgcctaagctgatctggatttgtg

SEQ ID NO: 932411 - DNA, 33 bp, Homo sapien
tggtgggatagcttacaaactgggccccttcct

SEQ ID NO: 932412 - DNA, 33 bp, Homo sapien
tggtgggatagcttactaactgggccccttcct

SEQ ID NO: 932413 - DNA, 33 bp, Homo sapien
aatctcagcataagcactcaggatccagagctc

SEQ ID NO: 932414 - DNA, 33 bp, Homo sapien
aatctcagcataagcattcaggatccagagctc

SEQ ID NO: 932415 - DNA, 33 bp, Homo sapien
ctttgggaaacaagcacgaaggattagaagcat

SEQ ID NO: 932416 - DNA, 33 bp, Homo sapien
ctttgggaaacaagcatgaaggattagaagcat

SEQ ID NO: 932417 - DNA, 33 bp, Homo sapien
caagagcttttgaggacgggctttcaagtgttc

SEQ ID NO: 932418 - DNA, 33 bp, Homo sapien
caagagcttttgaggaggggctttcaagtgttc

SEQ ID NO: 932419 - DNA, 33 bp, Homo sapien
tccatcctccatgaaactgctcccactggtgta

SEQ ID NO: 932420 - DNA, 33 bp, Homo sapien
tccatcctccatgaaattgctcccactggtgta

SEQ ID NO: 932421 - DNA, 33 bp, Homo sapien
agtctattccagcagaacagacctggcagacca

SEQ ID NO: 932422 - DNA, 33 bp, Homo sapien
agtctattccagcagaccagacctggcagacca

SEQ ID NO: 932423 - DNA, 33 bp, Homo sapien
atgcctgtatttctacaaaaagcctggtagatt

SEQ ID NO: 932424 - DNA, 33 bp, Homo sapien
atgcctgtatttctactaaaagcctggtagatt

SEQ ID NO: 932425 - DNA, 33 bp, Homo sapien
ttgggaccccaaccaaacaaatgatatagcttg

SEQ ID NO: 932426 - DNA, 33 bp, Homo sapien
ttgggaccccaaccaagcaaatgatatagcttg

SEQ ID NO: 932427 - DNA, 33 bp, Homo sapien
ctcagaagagagattcagaaatgggaggcagca

SEQ ID NO: 932428 - DNA, 33 bp, Homo sapien
ctcagaagagagattccgaaatgggaggcagca

SEQ ID NO: 932429 - DNA, 33 bp, Homo sapien
aagacgcaaaaagaggcagtcactccctagtta

SEQ ID NO: 932430 - DNA, 33 bp, Homo sapien
aagacgcaaaaagaggtagtcactccctagtta

SEQ ID NO: 932431 - DNA, 33 bp, Homo sapien
gacaactagagacagccctgtaccttagagcct

SEQ ID NO: 932432 - DNA, 33 bp, Homo sapien
gacaactagagacagcgctgtaccttagagcct

SEQ ID NO: 932433 - DNA, 33 bp, Homo sapien
tgaagacagtggctcaacctgataaaggaggtg

SEQ ID NO: 932434 - DNA, 33 bp, Homo sapien
tgaagacagtggctcagcctgataaaggaggtg

SEQ ID NO: 932435 - DNA, 33 bp, Homo sapien
aactaattgtctggtaaaagagataggcattaa

SEQ ID NO: 932436 - DNA, 33 bp, Homo sapien
aactaattgtctggtagaagagataggcattaa

SEQ ID NO: 932437 - DNA, 33 bp, Homo sapien
aactcatctacctataccaaagcacagtcatta

SEQ ID NO: 932438 - DNA, 33 bp, Homo sapien
aactcatctacctatatcaaagcacagtcatta

SEQ ID NO: 932439 - DNA, 33 bp, Homo sapien
aaggaagtattagagacggcatggggttttggg

SEQ ID NO: 932440 - DNA, 33 bp, Homo sapien
aaggaagtattagagatggcatggggttttggg

SEQ ID NO: 932441 - DNA, 33 bp, Homo sapien
taccacctgtgtgaccactgaatacctatgttg

SEQ ID NO: 932442 - DNA, 33 bp, Homo sapien
taccacctgtgtgaccgctgaatacctatgttg

SEQ ID NO: 932443 - DNA, 33 bp, Homo sapien
aagatagtaacaactaacagtcaaacaagtaag

SEQ ID NO: 932444 - DNA, 33 bp, Homo sapien
aagatagtaacaactagcagtcaaacaagtaag

SEQ ID NO: 932445 - DNA, 33 bp, Homo sapien
catttaaagggaaacaataatctgtggctttct

SEQ ID NO: 932446 - DNA, 33 bp, Homo sapien
catttaaagggaaacagtaatctgtggctttct

SEQ ID NO: 932447 - DNA, 33 bp, Homo sapien
gtgtacaagatcaataaaaatgaataggccaaa

SEQ ID NO: 932448 - DNA, 33 bp, Homo sapien
gtgtacaagatcaatagaaatgaataggccaaa

SEQ ID NO: 932449 - DNA, 33 bp, Homo sapien
aaagtaagtgcaagaaattcactaataattcaa

SEQ ID NO: 932450 - DNA, 33 bp, Homo sapien
aaagtaagtgcaagaagttcactaataattcaa

SEQ ID NO: 932451 - DNA, 33 bp, Homo sapien
taccacagtgtattgcaatcatttgtttacatg

SEQ ID NO: 932452 - DNA, 33 bp, Homo sapien
taccacagtgtattgcgatcatttgtttacatg

SEQ ID NO: 932453 - DNA, 33 bp, Homo sapien
tctggtaattgagtaaaaagactgagaaaacac

SEQ ID NO: 932454 - DNA, 33 bp, Homo sapien
tctggtaattgagtaagaagactgagaaaacac

SEQ ID NO: 932455 - DNA, 33 bp, Homo sapien
atctcactatattaagaaacagtgctaggctac

SEQ ID NO: 932456 - DNA, 33 bp, Homo sapien
atctcactatattaagcaacagtgctaggctac

SEQ ID NO: 932457 - DNA, 33 bp, Homo sapien
aaaaggataatgcttcaaagtacaaatcattgc

SEQ ID NO: 932458 - DNA, 33 bp, Homo sapien
aaaaggataatgcttctaagtacaaatcattgc

SEQ ID NO: 932459 - DNA, 33 bp, Homo sapien
tagatataatgtgacaaattaaatgactttatc

SEQ ID NO: 932460 - DNA, 33 bp, Homo sapien
tagatataatgtgacagattaaatgactttatc

SEQ ID NO: 932461 - DNA, 33 bp, Homo sapien
aaacaatcgccaacaacatccttctgagcatta

SEQ ID NO: 932462 - DNA, 33 bp, Homo sapien
aaacaatcgccaacaatatccttctgagcatta

SEQ ID NO: 932463 - DNA, 33 bp, Homo sapien
ttttgtaacaataggccatatacccctgagctg

SEQ ID NO: 932464 - DNA, 33 bp, Homo sapien
ttttgtaacaataggcgatatacccctgagctg

SEQ ID NO: 932465 - DNA, 33 bp, Homo sapien
aaagttccctgagcaacaagacaagatgacata

SEQ ID NO: 932466 - DNA, 33 bp, Homo sapien
aaagttccctgagcaataagacaagatgacata

SEQ ID NO: 932467 - DNA, 33 bp, Homo sapien
attaacttgaacactccagattctgcctaaaca

SEQ ID NO: 932468 - DNA, 33 bp, Homo sapien
attaacttgaacactctagattctgcctaaaca

SEQ ID NO: 932469 - DNA, 33 bp, Homo sapien
tatatagataatgtgccgatgtacagggtgctc

SEQ ID NO: 932470 - DNA, 33 bp, Homo sapien
tatatagataatgtgctgatgtacagggtgctc

SEQ ID NO: 932471 - DNA, 33 bp, Homo sapien
atgttgttcaaggaaacgatcaaaggtgaggca

SEQ ID NO: 932472 - DNA, 33 bp, Homo sapien
atgttgttcaaggaaatgatcaaaggtgaggca

SEQ ID NO: 932473 - DNA, 33 bp, Homo sapien
tgaataagaatgatgagacagtatagtaatagt

SEQ ID NO: 932474 - DNA, 33 bp, Homo sapien
tgaataagaatgatgatacagtatagtaatagt

SEQ ID NO: 932475 - DNA, 33 bp, Homo sapien
agtatagtaatagttcagaaaaatcaagaatta

SEQ ID NO: 932476 - DNA, 33 bp, Homo sapien
agtatagtaatagttctgaaaaatcaagaatta

SEQ ID NO: 932477 - DNA, 33 bp, Homo sapien
actgttggttcttatacagacacagaaaagaga

SEQ ID NO: 932478 - DNA, 33 bp, Homo sapien
actgttggttcttatatagacacagaaaagaga

SEQ ID NO: 932479 - DNA, 33 bp, Homo sapien
tataaatccaatactaacatctgtattctgtcc

SEQ ID NO: 932480 - DNA, 33 bp, Homo sapien
tataaatccaatactagcatctgtattctgtcc

SEQ ID NO: 932481 - DNA, 33 bp, Homo sapien
tatgctaactgacaccaaaatctgtatctccat

SEQ ID NO: 932482 - DNA, 33 bp, Homo sapien
tatgctaactgacaccgaaatctgtatctccat

SEQ ID NO: 932483 - DNA, 33 bp, Homo sapien
tatgtagctagtgcaactccactgaatacagtt

SEQ ID NO: 932484 - DNA, 33 bp, Homo sapien
tatgtagctagtgcaagtccactgaatacagtt

SEQ ID NO: 932485 - DNA, 33 bp, Homo sapien
tttgcaaaaacacataaataaggttcagctttc

SEQ ID NO: 932486 - DNA, 33 bp, Homo sapien
tttgcaaaaacacatagataaggttcagctttc

SEQ ID NO: 932487 - DNA, 33 bp, Homo sapien
agccagtgatcttgctaaattagtagttatagt

SEQ ID NO: 932488 - DNA, 33 bp, Homo sapien
agccagtgatcttgctgaattagtagttatagt

SEQ ID NO: 932489 - DNA, 33 bp, Homo sapien
tgtaaaatgattacagcaaacctcttgcagtta

SEQ ID NO: 932490 - DNA, 33 bp, Homo sapien
tgtaaaatgattacagtaaacctcttgcagtta

SEQ ID NO: 932491 - DNA, 33 bp, Homo sapien
catgtaaatgaataaacgaactgtggtatactc

SEQ ID NO: 932492 - DNA, 33 bp, Homo sapien
catgtaaatgaataaatgaactgtggtatactc

SEQ ID NO: 932493 - DNA, 33 bp, Homo sapien
ttttttcatatagccacgtaatattccagaaaa

SEQ ID NO: 932494 - DNA, 33 bp, Homo sapien
ttttttcatatagccatgtaatattccagaaaa

SEQ ID NO: 932495 - DNA, 33 bp, Homo sapien
cataaaaatatagtcaaccttgaaatgagaaaa

SEQ ID NO: 932496 - DNA, 33 bp, Homo sapien
cataaaaatatagtcagccttgaaatgagaaaa

SEQ ID NO: 932497 - DNA, 33 bp, Homo sapien
tggggtccttttggatcaagttcgcagtttcaa

SEQ ID NO: 932498 - DNA, 33 bp, Homo sapien
tggggtccttttggattaagttcgcagtttcaa

SEQ ID NO: 932499 - DNA, 33 bp, Homo sapien
ggatgtcatgctttatcaatgagtattaaagac

SEQ ID NO: 932500 - DNA, 33 bp, Homo sapien
ggatgtcatgctttatgaatgagtattaaagac

SEQ ID NO: 932501 - DNA, 33 bp, Homo sapien
tcttctctgcagattacgtaactttctttcctt

SEQ ID NO: 932502 - DNA, 33 bp, Homo sapien
tcttctctgcagattatgtaactttctttcctt

SEQ ID NO: 932503 - DNA, 33 bp, Homo sapien
acttcacttaactcttcaacaatcctactccta

SEQ ID NO: 932504 - DNA, 33 bp, Homo sapien
acttcacttaactcttgaacaatcctactccta

SEQ ID NO: 932505 - DNA, 33 bp, Homo sapien
ttgtaaagtgtaatgacaggtgaagaggagttg

SEQ ID NO: 932506 - DNA, 33 bp, Homo sapien
ttgtaaagtgtaatgataggtgaagaggagttg

SEQ ID NO: 932507 - DNA, 33 bp, Homo sapien
ataaagtaactctttaaattccagcaactcctc

SEQ ID NO: 932508 - DNA, 33 bp, Homo sapien
ataaagtaactctttagattccagcaactcctc

SEQ ID NO: 932509 - DNA, 33 bp, Homo sapien
catttgtctctatataacaatgacttttagaaa

SEQ ID NO: 932510 - DNA, 33 bp, Homo sapien
catttgtctctatatatcaatgacttttagaaa

SEQ ID NO: 932511 - DNA, 33 bp, Homo sapien
ctgacaggtgggaggtaaagacatgcattccag

SEQ ID NO: 932512 - DNA, 33 bp, Homo sapien
ctgacaggtgggaggtgaagacatgcattccag

SEQ ID NO: 932513 - DNA, 33 bp, Homo sapien
aagagatcacataatacgggactctgacctagc

SEQ ID NO: 932514 - DNA, 33 bp, Homo sapien
aagagatcacataataggggactctgacctagc

SEQ ID NO: 932515 - DNA, 33 bp, Homo sapien
tgtaaaagtctaattcactatcagcatttagat

SEQ ID NO: 932516 - DNA, 33 bp, Homo sapien
tgtaaaagtctaattcgctatcagcatttagat

SEQ ID NO: 932517 - DNA, 33 bp, Homo sapien
tgtattgtacatgctaataataatgaaatcagg

SEQ ID NO: 932518 - DNA, 33 bp, Homo sapien
tgtattgtacatgctagtaataatgaaatcagg

SEQ ID NO: 932519 - DNA, 33 bp, Homo sapien
ttgctttggcctggccagctgtatctccattca

SEQ ID NO: 932520 - DNA, 33 bp, Homo sapien
ttgctttggcctggccggctgtatctccattca

SEQ ID NO: 932521 - DNA, 33 bp, Homo sapien
cctcactgaacagaagcaaacatcagtcttggg

SEQ ID NO: 932522 - DNA, 33 bp, Homo sapien
cctcactgaacagaaggaaacatcagtcttggg

SEQ ID NO: 932523 - DNA, 33 bp, Homo sapien
aggataatgagatcaagtcaaccttacgtacac

SEQ ID NO: 932524 - DNA, 33 bp, Homo sapien
aggataatgagatcaattcaaccttacgtacac

SEQ ID NO: 932525 - DNA, 33 bp, Homo sapien
catctttctctggaccacggatgtatatatggg

SEQ ID NO: 932526 - DNA, 33 bp, Homo sapien
catctttctctggaccgcggatgtatatatggg

SEQ ID NO: 932527 - DNA, 33 bp, Homo sapien
ctggtcacagaactcaatcatctgtgcttctct

SEQ ID NO: 932528 - DNA, 33 bp, Homo sapien
ctggtcacagaactcagtcatctgtgcttctct

SEQ ID NO: 932529 - DNA, 33 bp, Homo sapien
agcccactaccgtgtacgttgtacctccacaaa

SEQ ID NO: 932530 - DNA, 33 bp, Homo sapien
agcccactaccgtgtatgttgtacctccacaaa

SEQ ID NO: 932531 - DNA, 33 bp, Homo sapien
gcatttcaggaattctcaccatactaacttgcc

SEQ ID NO: 932532 - DNA, 33 bp, Homo sapien
gcatttcaggaattcttaccatactaacttgcc

SEQ ID NO: 932533 - DNA, 33 bp, Homo sapien
atccaaaatgtagttacagtgcatagtgctcca

SEQ ID NO: 932534 - DNA, 33 bp, Homo sapien
atccaaaatgtagttatagtgcatagtgctcca

SEQ ID NO: 932535 - DNA, 33 bp, Homo sapien
ggagttcaaataaaaacccatgctgtcaataat

SEQ ID NO: 932536 - DNA, 33 bp, Homo sapien
ggagttcaaataaaaagccatgctgtcaataat

SEQ ID NO: 932537 - DNA, 33 bp, Homo sapien
agacatttgaaatcaacggtcgtaagtgacagt

SEQ ID NO: 932538 - DNA, 33 bp, Homo sapien
agacatttgaaatcaagggtcgtaagtgacagt

SEQ ID NO: 932539 - DNA, 33 bp, Homo sapien
ggggaatccaaatggaacattgctgaagctaac

SEQ ID NO: 932540 - DNA, 33 bp, Homo sapien
ggggaatccaaatggagcattgctgaagctaac

SEQ ID NO: 932541 - DNA, 33 bp, Homo sapien
ctatcctatagagttacgggccagattgaatga

SEQ ID NO: 932542 - DNA, 33 bp, Homo sapien
ctatcctatagagttatgggccagattgaatga

SEQ ID NO: 932543 - DNA, 33 bp, Homo sapien
caaaaaactctaacaagcttcgttatctggctt

SEQ ID NO: 932544 - DNA, 33 bp, Homo sapien
caaaaaactctaacaatcttcgttatctggctt

SEQ ID NO: 932545 - DNA, 33 bp, Homo sapien
tctggactgtgttttaagaaagatgggctcaag

SEQ ID NO: 932546 - DNA, 33 bp, Homo sapien
tctggactgtgttttaggaaagatgggctcaag

SEQ ID NO: 932547 - DNA, 33 bp, Homo sapien
tggtagatgtagaactcagaaaatactgtctct

SEQ ID NO: 932548 - DNA, 33 bp, Homo sapien
tggtagatgtagaactgagaaaatactgtctct

SEQ ID NO: 932549 - DNA, 33 bp, Homo sapien
tggggaatccaggaccagaaatcaccattttgg

SEQ ID NO: 932550 - DNA, 33 bp, Homo sapien
tggggaatccaggaccggaaatcaccattttgg

SEQ ID NO: 932551 - DNA, 33 bp, Homo sapien
ctagtttggcctctacagaaactgattggcagt

SEQ ID NO: 932552 - DNA, 33 bp, Homo sapien
ctagtttggcctctacggaaactgattggcagt

SEQ ID NO: 932553 - DNA, 33 bp, Homo sapien
gggcctgagcaaggataacttcatgagaagggt

SEQ ID NO: 932554 - DNA, 33 bp, Homo sapien
gggcctgagcaaggatgacttcatgagaagggt

SEQ ID NO: 932555 - DNA, 33 bp, Homo sapien
aggttagtggatccaacgctattaagttggtgc

SEQ ID NO: 932556 - DNA, 33 bp, Homo sapien
aggttagtggatccaatgctattaagttggtgc

SEQ ID NO: 932557 - DNA, 33 bp, Homo sapien
cagcttctaaatactgaagagtgccagaggact

SEQ ID NO: 932558 - DNA, 33 bp, Homo sapien
cagcttctaaatactgcagagtgccagaggact

SEQ ID NO: 932559 - DNA, 33 bp, Homo sapien
atgcctcaactggccacgtatcttgataaattc

SEQ ID NO: 932560 - DNA, 33 bp, Homo sapien
atgcctcaactggccatgtatcttgataaattc

SEQ ID NO: 932561 - DNA, 33 bp, Homo sapien
aagtcccagagtcagaataggcagggaccgcaa

SEQ ID NO: 932562 - DNA, 33 bp, Homo sapien
aagtcccagagtcagagtaggcagggaccgcaa

SEQ ID NO: 932563 - DNA, 33 bp, Homo sapien
tgctcagagagtctgaggacccatttttattaa

SEQ ID NO: 932564 - DNA, 33 bp, Homo sapien
tgctcagagagtctgatgacccatttttattaa

SEQ ID NO: 932565 - DNA, 33 bp, Homo sapien
taggaagagactgggcacttatcagacaccaca

SEQ ID NO: 932566 - DNA, 33 bp, Homo sapien
taggaagagactgggcgcttatcagacaccaca

SEQ ID NO: 932567 - DNA, 33 bp, Homo sapien
ctcaaagggagtaatccaatcctggtcacattt

SEQ ID NO: 932568 - DNA, 33 bp, Homo sapien
ctcaaagggagtaatctaatcctggtcacattt

SEQ ID NO: 932569 - DNA, 33 bp, Homo sapien
gaaggcattggggtccagatcattgcatactgc

SEQ ID NO: 932570 - DNA, 33 bp, Homo sapien
gaaggcattggggtccggatcattgcatactgc

SEQ ID NO: 932571 - DNA, 33 bp, Homo sapien
gttgtgttactcaaaacgattgcaccaaggtga

SEQ ID NO: 932572 - DNA, 33 bp, Homo sapien
gttgtgttactcaaaatgattgcaccaaggtga

SEQ ID NO: 932573 - DNA, 33 bp, Homo sapien
ttcatttttaaagctaacccactcatttccttt

SEQ ID NO: 932574 - DNA, 33 bp, Homo sapien
ttcatttttaaagctagcccactcatttccttt

SEQ ID NO: 932575 - DNA, 33 bp, Homo sapien
gagaagtgtgagcaaactgtatgggaaggtgtg

SEQ ID NO: 932576 - DNA, 33 bp, Homo sapien
gagaagtgtgagcaaagtgtatgggaaggtgtg

SEQ ID NO: 932577 - DNA, 33 bp, Homo sapien
ttgatgaagattggctgaatttagtccgacgag

SEQ ID NO: 932578 - DNA, 33 bp, Homo sapien
ttgatgaagattggcttaatttagtccgacgag

SEQ ID NO: 932579 - DNA, 33 bp, Homo sapien
ccacggtggtttccaactgtgcccaccagggtt

SEQ ID NO: 932580 - DNA, 33 bp, Homo sapien
ccacggtggtttccaattgtgcccaccagggtt

SEQ ID NO: 932581 - DNA, 33 bp, Homo sapien
tgaaagagagcaaaagaaacaggaaggagtaat

SEQ ID NO: 932582 - DNA, 33 bp, Homo sapien
tgaaagagagcaaaaggaacaggaaggagtaat

SEQ ID NO: 932583 - DNA, 33 bp, Homo sapien
ccaatgggattgagtgacaaatgctggagagaa

SEQ ID NO: 932584 - DNA, 33 bp, Homo sapien
ccaatgggattgagtggcaaatgctggagagaa

SEQ ID NO: 932585 - DNA, 33 bp, Homo sapien
actttaaagtatccaccagatttagcaacaaag

SEQ ID NO: 932586 - DNA, 33 bp, Homo sapien
actttaaagtatccactagatttagcaacaaag

SEQ ID NO: 932587 - DNA, 33 bp, Homo sapien
gacattactgttggcccgaagctgacatcctac

SEQ ID NO: 932588 - DNA, 33 bp, Homo sapien
gacattactgttggcctgaagctgacatcctac

SEQ ID NO: 932589 - DNA, 33 bp, Homo sapien
tcactatgtttgaaacaaaagctaaacaataca

SEQ ID NO: 932590 - DNA, 33 bp, Homo sapien
tcactatgtttgaaacgaaagctaaacaataca

SEQ ID NO: 932591 - DNA, 33 bp, Homo sapien
ttatgagtgtaaaataaattatgagtgtaaaat

SEQ ID NO: 932592 - DNA, 33 bp, Homo sapien
ttatgagtgtaaaatatattatgagtgtaaaat

SEQ ID NO: 932593 - DNA, 33 bp, Homo sapien
agactatgaattcctacatctgccacctgcaag

SEQ ID NO: 932594 - DNA, 33 bp, Homo sapien
agactatgaattcctatatctgccacctgcaag

SEQ ID NO: 932595 - DNA, 33 bp, Homo sapien
tgtgtatcatgttagacggaatgatggcctttg

SEQ ID NO: 932596 - DNA, 33 bp, Homo sapien
tgtgtatcatgttagatggaatgatggcctttg

SEQ ID NO: 932597 - DNA, 33 bp, Homo sapien
catcaagtcaaaaaagcatcacaaacccacatt

SEQ ID NO: 932598 - DNA, 33 bp, Homo sapien
catcaagtcaaaaaagtatcacaaacccacatt

SEQ ID NO: 932599 - DNA, 33 bp, Homo sapien
aaacaaggatcggagaaagttaccaagatcttg

SEQ ID NO: 932600 - DNA, 33 bp, Homo sapien
aaacaaggatcggagacagttaccaagatcttg

SEQ ID NO: 932601 - DNA, 33 bp, Homo sapien
tgctacacagccattaaacatgaacctgggtct

SEQ ID NO: 932602 - DNA, 33 bp, Homo sapien
tgctacacagccattagacatgaacctgggtct

SEQ ID NO: 932603 - DNA, 33 bp, Homo sapien
aaatgtactcttaaatcaggcatacgttgaaga

SEQ ID NO: 932604 - DNA, 33 bp, Homo sapien
aaatgtactcttaaattaggcatacgttgaaga

SEQ ID NO: 932605 - DNA, 33 bp, Homo sapien
taataaccgcctcagccaaagatttaacttgga

SEQ ID NO: 932606 - DNA, 33 bp, Homo sapien
taataaccgcctcagctaaagatttaacttgga

SEQ ID NO: 932607 - DNA, 33 bp, Homo sapien
ctgtgtttgttctgaacgatgacgtaaaaccat

SEQ ID NO: 932608 - DNA, 33 bp, Homo sapien
ctgtgtttgttctgaatgatgacgtaaaaccat

SEQ ID NO: 932609 - DNA, 33 bp, Homo sapien
cagttgacacttgagccgaaccttagaaactta

SEQ ID NO: 932610 - DNA, 33 bp, Homo sapien
cagttgacacttgagctgaaccttagaaactta

SEQ ID NO: 932611 - DNA, 33 bp, Homo sapien
atgtaacattgccataaacaatacataaacgga

SEQ ID NO: 932612 - DNA, 33 bp, Homo sapien
atgtaacattgccatagacaatacataaacgga

SEQ ID NO: 932613 - DNA, 33 bp, Homo sapien
catgtacatatctgcaagtaaaaagacttgtgg

SEQ ID NO: 932614 - DNA, 33 bp, Homo sapien
catgtacatatctgcaggtaaaaagacttgtgg

SEQ ID NO: 932615 - DNA, 33 bp, Homo sapien
atgaaaactctaaagccgaagaggttaaataac

SEQ ID NO: 932616 - DNA, 33 bp, Homo sapien
atgaaaactctaaagctgaagaggttaaataac

SEQ ID NO: 932617 - DNA, 33 bp, Homo sapien
agttaagactacttcaataattcaaagcaataa

SEQ ID NO: 932618 - DNA, 33 bp, Homo sapien
agttaagactacttcactaattcaaagcaataa

SEQ ID NO: 932619 - DNA, 33 bp, Homo sapien
ctggcttatactagacaaaagattattcaaaat

SEQ ID NO: 932620 - DNA, 33 bp, Homo sapien
ctggcttatactagacgaaagattattcaaaat

SEQ ID NO: 932621 - DNA, 33 bp, Homo sapien
agatgtcaagtccaacaagatgttgctgctgtt

SEQ ID NO: 932622 - DNA, 33 bp, Homo sapien
agatgtcaagtccaacgagatgttgctgctgtt

SEQ ID NO: 932623 - DNA, 33 bp, Homo sapien
atggtggttccagatacagtgtatgtatttaat

SEQ ID NO: 932624 - DNA, 33 bp, Homo sapien
atggtggttccagatagagtgtatgtatttaat

SEQ ID NO: 932625 - DNA, 33 bp, Homo sapien
ttacttttagtgagaccgtatagtgttaacaat

SEQ ID NO: 932626 - DNA, 33 bp, Homo sapien
ttacttttagtgagactgtatagtgttaacaat

SEQ ID NO: 932627 - DNA, 33 bp, Homo sapien
ctcataaatttgtttaaaagcaagattacttac

SEQ ID NO: 932628 - DNA, 33 bp, Homo sapien
ctcataaatttgtttagaagcaagattacttac

SEQ ID NO: 932629 - DNA, 33 bp, Homo sapien
acagaaccagtaaataagagaaatgtaaagaaa

SEQ ID NO: 932630 - DNA, 33 bp, Homo sapien
acagaaccagtaaatatgagaaatgtaaagaaa

SEQ ID NO: 932631 - DNA, 33 bp, Homo sapien
aggtatttaggatatccattgcctggaacattg

SEQ ID NO: 932632 - DNA, 33 bp, Homo sapien
aggtatttaggatatctattgcctggaacattg

SEQ ID NO: 932633 - DNA, 33 bp, Homo sapien
tagttacatattttgaagggtagagaaggggtc

SEQ ID NO: 932634 - DNA, 33 bp, Homo sapien
tagttacatattttgaggggtagagaaggggtc

SEQ ID NO: 932635 - DNA, 33 bp, Homo sapien
taactatgcagattcactctctgggtaggagca

SEQ ID NO: 932636 - DNA, 33 bp, Homo sapien
taactatgcagattcattctctgggtaggagca

SEQ ID NO: 932637 - DNA, 33 bp, Homo sapien
caactccagtgcttaccaacccatgtatgtctt

SEQ ID NO: 932638 - DNA, 33 bp, Homo sapien
caactccagtgcttactaacccatgtatgtctt

SEQ ID NO: 932639 - DNA, 33 bp, Homo sapien
tgatctcatcctcaaaagtggactgtggaagat

SEQ ID NO: 932640 - DNA, 33 bp, Homo sapien
tgatctcatcctcaaacgtggactgtggaagat

SEQ ID NO: 932641 - DNA, 33 bp, Homo sapien
cagaaccactcattccaaagtttctgttgagag

SEQ ID NO: 932642 - DNA, 33 bp, Homo sapien
cagaaccactcattccgaagtttctgttgagag

SEQ ID NO: 932643 - DNA, 33 bp, Homo sapien
ggaaaacaaattttccacttctaaggctgttaa

SEQ ID NO: 932644 - DNA, 33 bp, Homo sapien
ggaaaacaaattttccgcttctaaggctgttaa

SEQ ID NO: 932645 - DNA, 33 bp, Homo sapien
agttattgtaagaacggactgagttaatatgtg

SEQ ID NO: 932646 - DNA, 33 bp, Homo sapien
agttattgtaagaacgtactgagttaatatgtg

SEQ ID NO: 932647 - DNA, 33 bp, Homo sapien
gatactactgtgcatacgttattctctgaaact

SEQ ID NO: 932648 - DNA, 33 bp, Homo sapien
gatactactgtgcatatgttattctctgaaact

SEQ ID NO: 932649 - DNA, 33 bp, Homo sapien
acatcatcaaatacaacggtggttcaagaagca

SEQ ID NO: 932650 - DNA, 33 bp, Homo sapien
acatcatcaaatacaatggtggttcaagaagca

SEQ ID NO: 932651 - DNA, 33 bp, Homo sapien
tttttgtgtaaatgaacgaacacttaaatagca

SEQ ID NO: 932652 - DNA, 33 bp, Homo sapien
tttttgtgtaaatgaatgaacacttaaatagca

SEQ ID NO: 932653 - DNA, 33 bp, Homo sapien
ccactcacaaccaaaaataaagggtagatcaca

SEQ ID NO: 932654 - DNA, 33 bp, Homo sapien
ccactcacaaccaaaagtaaagggtagatcaca

SEQ ID NO: 932655 - DNA, 33 bp, Homo sapien
gaggcaaggtcgtccaacaacctaactttgaaa

SEQ ID NO: 932656 - DNA, 33 bp, Homo sapien
gaggcaaggtcgtccaccaacctaactttgaaa

SEQ ID NO: 932657 - DNA, 33 bp, Homo sapien
ccaaggtcacatactgaagagagcataagcagg

SEQ ID NO: 932658 - DNA, 33 bp, Homo sapien
ccaaggtcacatactggagagagcataagcagg

SEQ ID NO: 932659 - DNA, 33 bp, Homo sapien
cagttggggagaataacgaacagtcactccaag

SEQ ID NO: 932660 - DNA, 33 bp, Homo sapien
cagttggggagaataatgaacagtcactccaag

SEQ ID NO: 932661 - DNA, 33 bp, Homo sapien
gtcagttcatgtagcacgcagaagatgccctta

SEQ ID NO: 932662 - DNA, 33 bp, Homo sapien
gtcagttcatgtagcaggcagaagatgccctta

SEQ ID NO: 932663 - DNA, 33 bp, Homo sapien
acaagctgtttctttcccttaggcaggccagcc

SEQ ID NO: 932664 - DNA, 33 bp, Homo sapien
acaagctgtttctttctcttaggcaggccagcc

SEQ ID NO: 932665 - DNA, 33 bp, Homo sapien
taaagtcccaccttgaaaactggtcagtctccc

SEQ ID NO: 932666 - DNA, 33 bp, Homo sapien
taaagtcccaccttgataactggtcagtctccc

SEQ ID NO: 932667 - DNA, 33 bp, Homo sapien
tcaagtttttagcttacgaaaatttgcacaagt

SEQ ID NO: 932668 - DNA, 33 bp, Homo sapien
tcaagtttttagcttatgaaaatttgcacaagt

SEQ ID NO: 932669 - DNA, 33 bp, Homo sapien
caccacaaaacaaatacgtgtgactgttgacag

SEQ ID NO: 932670 - DNA, 33 bp, Homo sapien
caccacaaaacaaatatgtgtgactgttgacag

SEQ ID NO: 932671 - DNA, 33 bp, Homo sapien
gtcctgaacttttctccccagagtagctcctac

SEQ ID NO: 932672 - DNA, 33 bp, Homo sapien
gtcctgaacttttctctccagagtagctcctac

SEQ ID NO: 932673 - DNA, 33 bp, Homo sapien
agggaagccgactctaagaggaaggttggtgtg

SEQ ID NO: 932674 - DNA, 33 bp, Homo sapien
agggaagccgactctacgaggaaggttggtgtg

SEQ ID NO: 932675 - DNA, 33 bp, Homo sapien
tctaagcaaaggggtaaaggcacaacctcctca

SEQ ID NO: 932676 - DNA, 33 bp, Homo sapien
tctaagcaaaggggtacaggcacaacctcctca

SEQ ID NO: 932677 - DNA, 33 bp, Homo sapien
caggttctatattttacaaaacctggcttaaga

SEQ ID NO: 932678 - DNA, 33 bp, Homo sapien
caggttctatattttagaaaacctggcttaaga

SEQ ID NO: 932679 - DNA, 33 bp, Homo sapien
ccacaactgttaactcaatgcccctgggcgatg

SEQ ID NO: 932680 - DNA, 33 bp, Homo sapien
ccacaactgttaactcgatgcccctgggcgatg

SEQ ID NO: 932681 - DNA, 33 bp, Homo sapien
tgtttgcccaatggtacgaagacaaatagaaag

SEQ ID NO: 932682 - DNA, 33 bp, Homo sapien
tgtttgcccaatggtatgaagacaaatagaaag

SEQ ID NO: 932683 - DNA, 33 bp, Homo sapien
aataataggatgaatcagagaagaagaaaaaag

SEQ ID NO: 932684 - DNA, 33 bp, Homo sapien
aataataggatgaatcggagaagaagaaaaaag

SEQ ID NO: 932685 - DNA, 33 bp, Homo sapien
ctccctagtagcttccacataggattgtacttt

SEQ ID NO: 932686 - DNA, 33 bp, Homo sapien
ctccctagtagcttccgcataggattgtacttt

SEQ ID NO: 932687 - DNA, 33 bp, Homo sapien
taggagaagaagcaccgcatagcttgtaactaa

SEQ ID NO: 932688 - DNA, 33 bp, Homo sapien
taggagaagaagcacctcatagcttgtaactaa

SEQ ID NO: 932689 - DNA, 33 bp, Homo sapien
gaaactgttgacaagaatcttcactgtttttaa

SEQ ID NO: 932690 - DNA, 33 bp, Homo sapien
gaaactgttgacaagagtcttcactgtttttaa

SEQ ID NO: 932691 - DNA, 33 bp, Homo sapien
catacagaaatgtggacgtaaactgaagcgatc

SEQ ID NO: 932692 - DNA, 33 bp, Homo sapien
catacagaaatgtggatgtaaactgaagcgatc

SEQ ID NO: 932693 - DNA, 33 bp, Homo sapien
tgaatcaataattaggaagactgagtcctgtgg

SEQ ID NO: 932694 - DNA, 33 bp, Homo sapien
tgaatcaataattaggcagactgagtcctgtgg

SEQ ID NO: 932695 - DNA, 33 bp, Homo sapien
gatacagcaaggctacccaaaaattatttcttc

SEQ ID NO: 932696 - DNA, 33 bp, Homo sapien
gatacagcaaggctactcaaaaattatttcttc

SEQ ID NO: 932697 - DNA, 33 bp, Homo sapien
atattatcttggatcaataccataaaggaaata

SEQ ID NO: 932698 - DNA, 33 bp, Homo sapien
atattatcttggatcagtaccataaaggaaata

SEQ ID NO: 932699 - DNA, 33 bp, Homo sapien
taaaacaccaatcatccatctatttggaaacaa

SEQ ID NO: 932700 - DNA, 33 bp, Homo sapien
taaaacaccaatcatctatctatttggaaacaa

SEQ ID NO: 932701 - DNA, 33 bp, Homo sapien
acattttatcactgaaactcactacaagctaat

SEQ ID NO: 932702 - DNA, 33 bp, Homo sapien
acattttatcactgaagctcactacaagctaat

SEQ ID NO: 932703 - DNA, 33 bp, Homo sapien
agcatgacaagaaatcaacacagagagaaaaga

SEQ ID NO: 932704 - DNA, 33 bp, Homo sapien
agcatgacaagaaatcgacacagagagaaaaga

SEQ ID NO: 932705 - DNA, 33 bp, Homo sapien
atataacaacaaattgcaacacatcaccttgtt

SEQ ID NO: 932706 - DNA, 33 bp, Homo sapien
atataacaacaaattgtaacacatcaccttgtt

SEQ ID NO: 932707 - DNA, 33 bp, Homo sapien
attcactgatggatgaacttaaagagcttgccg

SEQ ID NO: 932708 - DNA, 33 bp, Homo sapien
attcactgatggatgatcttaaagagcttgccg

SEQ ID NO: 932709 - DNA, 33 bp, Homo sapien
tcttgaatgcttactacaaaaagggcacttcca

SEQ ID NO: 932710 - DNA, 33 bp, Homo sapien
tcttgaatgcttactagaaaaagggcacttcca

SEQ ID NO: 932711 - DNA, 33 bp, Homo sapien
ttcttgggcttctactaagctaagcacttatgg

SEQ ID NO: 932712 - DNA, 33 bp, Homo sapien
ttcttgggcttctactgagctaagcacttatgg

SEQ ID NO: 932713 - DNA, 33 bp, Homo sapien
tatatttgttttgctcaaatgtgtctctattca

SEQ ID NO: 932714 - DNA, 33 bp, Homo sapien
tatatttgttttgctccaatgtgtctctattca

SEQ ID NO: 932715 - DNA, 33 bp, Homo sapien
aatatatgaaaggtcagcttagtagtgggccta

SEQ ID NO: 932716 - DNA, 33 bp, Homo sapien
aatatatgaaaggtcatcttagtagtgggccta

SEQ ID NO: 932717 - DNA, 33 bp, Homo sapien
cccattttcttaggagaacaagctaccacttgg

SEQ ID NO: 932718 - DNA, 33 bp, Homo sapien
cccattttcttaggaggacaagctaccacttgg

SEQ ID NO: 932719 - DNA, 33 bp, Homo sapien
ctgcagaatttggtaactgggtgatctatggct

SEQ ID NO: 932720 - DNA, 33 bp, Homo sapien
ctgcagaatttggtaattgggtgatctatggct

SEQ ID NO: 932721 - DNA, 33 bp, Homo sapien
gctgttaaatgacccaagtgcagaaagatatat

SEQ ID NO: 932722 - DNA, 33 bp, Homo sapien
gctgttaaatgacccatgtgcagaaagatatat

SEQ ID NO: 932723 - DNA, 33 bp, Homo sapien
tgaataatgagctggaaaatgatactgtggaga

SEQ ID NO: 932724 - DNA, 33 bp, Homo sapien
tgaataatgagctggagaatgatactgtggaga

SEQ ID NO: 932725 - DNA, 33 bp, Homo sapien
aagatcttgtatgtttaaaaaactgagctatcg

SEQ ID NO: 932726 - DNA, 33 bp, Homo sapien
aagatcttgtatgtttgaaaaactgagctatcg

SEQ ID NO: 932727 - DNA, 33 bp, Homo sapien
cctggctcttcttatcactctcaccaggactag

SEQ ID NO: 932728 - DNA, 33 bp, Homo sapien
cctggctcttcttatcgctctcaccaggactag

SEQ ID NO: 932729 - DNA, 33 bp, Homo sapien
ggctattcaacaccaaactagggtaatcataga

SEQ ID NO: 932730 - DNA, 33 bp, Homo sapien
ggctattcaacaccaagctagggtaatcataga

SEQ ID NO: 932731 - DNA, 33 bp, Homo sapien
ccagcagatattttacaagtccataattaagaa

SEQ ID NO: 932732 - DNA, 33 bp, Homo sapien
ccagcagatattttacgagtccataattaagaa

SEQ ID NO: 932733 - DNA, 33 bp, Homo sapien
ggtaaataatgatctgcactgaatgtcaaatat

SEQ ID NO: 932734 - DNA, 33 bp, Homo sapien
ggtaaataatgatctgtactgaatgtcaaatat

SEQ ID NO: 932735 - DNA, 33 bp, Homo sapien
atgtataggcaatgacagtagaaatggctagac

SEQ ID NO: 932736 - DNA, 33 bp, Homo sapien
atgtataggcaatgacggtagaaatggctagac

SEQ ID NO: 932737 - DNA, 33 bp, Homo sapien
ccagcagggtgatctccaggttaccagatgaca

SEQ ID NO: 932738 - DNA, 33 bp, Homo sapien
ccagcagggtgatctctaggttaccagatgaca

SEQ ID NO: 932739 - DNA, 33 bp, Homo sapien
gaacaggccactaataaccagtttgttacaagt

SEQ ID NO: 932740 - DNA, 33 bp, Homo sapien
gaacaggccactaatatccagtttgttacaagt

SEQ ID NO: 932741 - DNA, 33 bp, Homo sapien
attaaagagcatttcccaaaacatgaactctca

SEQ ID NO: 932742 - DNA, 33 bp, Homo sapien
attaaagagcatttccgaaaacatgaactctca

SEQ ID NO: 932743 - DNA, 33 bp, Homo sapien
tagtggtcacataaaaagatgctcaaaatcatt

SEQ ID NO: 932744 - DNA, 33 bp, Homo sapien
tagtggtcacataaaatgatgctcaaaatcatt

SEQ ID NO: 932745 - DNA, 33 bp, Homo sapien
agctgtttgtcaatcaagttcctttcatctgta

SEQ ID NO: 932746 - DNA, 33 bp, Homo sapien
agctgtttgtcaatcatgttcctttcatctgta

SEQ ID NO: 932747 - DNA, 33 bp, Homo sapien
catgttgcaatttatccatgtgacaatattgac

SEQ ID NO: 932748 - DNA, 33 bp, Homo sapien
catgttgcaatttatctatgtgacaatattgac

SEQ ID NO: 932749 - DNA, 33 bp, Homo sapien
attgaaggagtagtaagaaaatgtatgctcatt

SEQ ID NO: 932750 - DNA, 33 bp, Homo sapien
attgaaggagtagtaataaaatgtatgctcatt

SEQ ID NO: 932751 - DNA, 33 bp, Homo sapien
caatataagaacaagaacaaccaggcagaagct

SEQ ID NO: 932752 - DNA, 33 bp, Homo sapien
caatataagaacaagagcaaccaggcagaagct

SEQ ID NO: 932753 - DNA, 33 bp, Homo sapien
ttcttttgaacttaagacatagtcaatcatatt

SEQ ID NO: 932754 - DNA, 33 bp, Homo sapien
ttcttttgaacttaagtcatagtcaatcatatt

SEQ ID NO: 932755 - DNA, 33 bp, Homo sapien
cagctaatcaaaggtaagttgtcttcattaggt

SEQ ID NO: 932756 - DNA, 33 bp, Homo sapien
cagctaatcaaaggtaggttgtcttcattaggt

SEQ ID NO: 932757 - DNA, 33 bp, Homo sapien
gagaagaatgtgctaacgtcttataaattttaa

SEQ ID NO: 932758 - DNA, 33 bp, Homo sapien
gagaagaatgtgctaatgtcttataaattttaa

SEQ ID NO: 932759 - DNA, 33 bp, Homo sapien
ctgacttgaactgttggaaatcccttttcaatc

SEQ ID NO: 932760 - DNA, 33 bp, Homo sapien
ctgacttgaactgttgtaaatcccttttcaatc

SEQ ID NO: 932761 - DNA, 33 bp, Homo sapien
accattttccagttgacggagcactttttcata

SEQ ID NO: 932762 - DNA, 33 bp, Homo sapien
accattttccagttgatggagcactttttcata

SEQ ID NO: 932763 - DNA, 33 bp, Homo sapien
tctcttgagctctagccatgaggaactatcaac

SEQ ID NO: 932764 - DNA, 33 bp, Homo sapien
tctcttgagctctagctatgaggaactatcaac

SEQ ID NO: 932765 - DNA, 33 bp, Homo sapien
ttcccttttacttctcactgggcatataacagt

SEQ ID NO: 932766 - DNA, 33 bp, Homo sapien
ttcccttttacttctcgctgggcatataacagt

SEQ ID NO: 932767 - DNA, 33 bp, Homo sapien
tcaaacaaaccatcataaatcattactttattt

SEQ ID NO: 932768 - DNA, 33 bp, Homo sapien
tcaaacaaaccatcatcaatcattactttattt

SEQ ID NO: 932769 - DNA, 33 bp, Homo sapien
gcatggagaactcctacatagcctttacatttt

SEQ ID NO: 932770 - DNA, 33 bp, Homo sapien
gcatggagaactcctatatagcctttacatttt

SEQ ID NO: 932771 - DNA, 33 bp, Homo sapien
aatggagataataataacccctacttcacagga

SEQ ID NO: 932772 - DNA, 33 bp, Homo sapien
aatggagataataataccccctacttcacagga

SEQ ID NO: 932773 - DNA, 33 bp, Homo sapien
tgtgttattttcctaaatcagtaaggtataagc

SEQ ID NO: 932774 - DNA, 33 bp, Homo sapien
tgtgttattttcctaactcagtaaggtataagc

SEQ ID NO: 932775 - DNA, 33 bp, Homo sapien
ctttacttgccctatgaaaagcagcccatgatt

SEQ ID NO: 932776 - DNA, 33 bp, Homo sapien
ctttacttgccctatgcaaagcagcccatgatt

SEQ ID NO: 932777 - DNA, 33 bp, Homo sapien
cttgggtgtcctttgacgaaggatcctctgctt

SEQ ID NO: 932778 - DNA, 33 bp, Homo sapien
cttgggtgtcctttgatgaaggatcctctgctt

SEQ ID NO: 932779 - DNA, 33 bp, Homo sapien
gattttctaagttgaaacagtgtcttaatggct

SEQ ID NO: 932780 - DNA, 33 bp, Homo sapien
gattttctaagttgaagcagtgtcttaatggct

SEQ ID NO: 932781 - DNA, 33 bp, Homo sapien
aatacagcacgcatacacacaaagcactaacac

SEQ ID NO: 932782 - DNA, 33 bp, Homo sapien
aatacagcacgcatacccacaaagcactaacac

SEQ ID NO: 932783 - DNA, 33 bp, Homo sapien
gtggaatttttggtgacggggaatgatacattt

SEQ ID NO: 932784 - DNA, 33 bp, Homo sapien
gtggaatttttggtgatggggaatgatacattt

SEQ ID NO: 932785 - DNA, 33 bp, Homo sapien
gtttctgtcacttgcacctgaacaagtcctgat

SEQ ID NO: 932786 - DNA, 33 bp, Homo sapien
gtttctgtcacttgcatctgaacaagtcctgat

SEQ ID NO: 932787 - DNA, 33 bp, Homo sapien
ttggtgaaacctgaataatccttcatccctttg

SEQ ID NO: 932788 - DNA, 33 bp, Homo sapien
ttggtgaaacctgaattatccttcatccctttg

SEQ ID NO: 932789 - DNA, 33 bp, Homo sapien
cttaaatgtcagattacatagaagattatggaa

SEQ ID NO: 932790 - DNA, 33 bp, Homo sapien
cttaaatgtcagattatatagaagattatggaa

SEQ ID NO: 932791 - DNA, 33 bp, Homo sapien
tctcaattatcactcacggctcagttatttcca

SEQ ID NO: 932792 - DNA, 33 bp, Homo sapien
tctcaattatcactcatggctcagttatttcca

SEQ ID NO: 932793 - DNA, 33 bp, Homo sapien
actgttccatattaacaatcaatcatatttaaa

SEQ ID NO: 932794 - DNA, 33 bp, Homo sapien
actgttccatattaaccatcaatcatatttaaa

SEQ ID NO: 932795 - DNA, 33 bp, Homo sapien
atgcttctttccggaactgggtggtagggtttt

SEQ ID NO: 932796 - DNA, 33 bp, Homo sapien
atgcttctttccggaattgggtggtagggtttt

SEQ ID NO: 932797 - DNA, 33 bp, Homo sapien
atcatcattttgaatacctacaaagtatttcat

SEQ ID NO: 932798 - DNA, 33 bp, Homo sapien
atcatcattttgaatagctacaaagtatttcat

SEQ ID NO: 932799 - DNA, 33 bp, Homo sapien
ctgattacattcatggccatacatttctgttgt

SEQ ID NO: 932800 - DNA, 33 bp, Homo sapien
ctgattacattcatgggcatacatttctgttgt

SEQ ID NO: 932801 - DNA, 33 bp, Homo sapien
gctctctgataggctgaacctttgatttaggat

SEQ ID NO: 932802 - DNA, 33 bp, Homo sapien
gctctctgataggctgcacctttgatttaggat

SEQ ID NO: 932803 - DNA, 33 bp, Homo sapien
ctcaagtcttagaagaaagagtaaatggagcat

SEQ ID NO: 932804 - DNA, 33 bp, Homo sapien
ctcaagtcttagaagagagagtaaatggagcat

SEQ ID NO: 932805 - DNA, 33 bp, Homo sapien
agatcaatgtaatgaaatagctcagaaatagat

SEQ ID NO: 932806 - DNA, 33 bp, Homo sapien
agatcaatgtaatgaactagctcagaaatagat

SEQ ID NO: 932807 - DNA, 33 bp, Homo sapien
gagccatttatacaaccactgttttgacctctg

SEQ ID NO: 932808 - DNA, 33 bp, Homo sapien
gagccatttatacaactactgttttgacctctg

SEQ ID NO: 932809 - DNA, 33 bp, Homo sapien
aaaaaacatagcccaaaccaaataccttctctc

SEQ ID NO: 932810 - DNA, 33 bp, Homo sapien
aaaaaacatagcccaagccaaataccttctctc

SEQ ID NO: 932811 - DNA, 33 bp, Homo sapien
ccaaaaagcattacacgaagagaccaaaataca

SEQ ID NO: 932812 - DNA, 33 bp, Homo sapien
ccaaaaagcattacactaagagaccaaaataca

SEQ ID NO: 932813 - DNA, 33 bp, Homo sapien
atattggtgaagatacagaacaactaaatatat

SEQ ID NO: 932814 - DNA, 33 bp, Homo sapien
atattggtgaagatacggaacaactaaatatat

SEQ ID NO: 932815 - DNA, 33 bp, Homo sapien
aggatttcaaatgagacgataccagttttaaaa

SEQ ID NO: 932816 - DNA, 33 bp, Homo sapien
aggatttcaaatgagatgataccagttttaaaa

SEQ ID NO: 932817 - DNA, 33 bp, Homo sapien
ctcctctctcctgtaaactactccatacctggt

SEQ ID NO: 932818 - DNA, 33 bp, Homo sapien
ctcctctctcctgtaatctactccatacctggt

SEQ ID NO: 932819 - DNA, 33 bp, Homo sapien
atgacctgttgcaggacatctttgttttccata

SEQ ID NO: 932820 - DNA, 33 bp, Homo sapien
atgacctgttgcaggatatctttgttttccata

SEQ ID NO: 932821 - DNA, 33 bp, Homo sapien
acatcatttaaacttccctcttcctgtgtgctg

SEQ ID NO: 932822 - DNA, 33 bp, Homo sapien
acatcatttaaacttctctcttcctgtgtgctg

SEQ ID NO: 932823 - DNA, 33 bp, Homo sapien
ttctataccatttgcacactctgtttgattgac

SEQ ID NO: 932824 - DNA, 33 bp, Homo sapien
ttctataccatttgcatactctgtttgattgac

SEQ ID NO: 932825 - DNA, 33 bp, Homo sapien
aggggggaattgtgaacagtaagagccaggtat

SEQ ID NO: 932826 - DNA, 33 bp, Homo sapien
aggggggaattgtgaatagtaagagccaggtat

SEQ ID NO: 932827 - DNA, 33 bp, Homo sapien
taaattttgccaactagacatgcagcaaattac

SEQ ID NO: 932828 - DNA, 33 bp, Homo sapien
taaattttgccaactatacatgcagcaaattac

SEQ ID NO: 932829 - DNA, 33 bp, Homo sapien
gtagatgttgtatatacgcttggtgaatttttt

SEQ ID NO: 932830 - DNA, 33 bp, Homo sapien
gtagatgttgtatatatgcttggtgaatttttt

SEQ ID NO: 932831 - DNA, 33 bp, Homo sapien
tctcctacctggcctccgaattctagctaattc

SEQ ID NO: 932832 - DNA, 33 bp, Homo sapien
tctcctacctggcctctgaattctagctaattc

SEQ ID NO: 932833 - DNA, 33 bp, Homo sapien
ccgttttctggctacacagagtttctctcctct

SEQ ID NO: 932834 - DNA, 33 bp, Homo sapien
ccgttttctggctacatagagtttctctcctct

SEQ ID NO: 932835 - DNA, 33 bp, Homo sapien
cttgacaaaatcagtagcaggcccaggagtgtg

SEQ ID NO: 932836 - DNA, 33 bp, Homo sapien
cttgacaaaatcagtatcaggcccaggagtgtg

SEQ ID NO: 932837 - DNA, 33 bp, Homo sapien
acatctagcgttgcccaaaataccttcatagct

SEQ ID NO: 932838 - DNA, 33 bp, Homo sapien
acatctagcgttgcccgaaataccttcatagct

SEQ ID NO: 932839 - DNA, 33 bp, Homo sapien
tatgggaaactctaagaacaaaggcccaggttt

SEQ ID NO: 932840 - DNA, 33 bp, Homo sapien
tatgggaaactctaaggacaaaggcccaggttt

SEQ ID NO: 932841 - DNA, 33 bp, Homo sapien
taaatgaaatttgtcacgtgccagataagataa

SEQ ID NO: 932842 - DNA, 33 bp, Homo sapien
taaatgaaatttgtcatgtgccagataagataa

SEQ ID NO: 932843 - DNA, 33 bp, Homo sapien
taaaaggaacagattgaagtccagaaaaaaggc

SEQ ID NO: 932844 - DNA, 33 bp, Homo sapien
taaaaggaacagattggagtccagaaaaaaggc

SEQ ID NO: 932845 - DNA, 33 bp, Homo sapien
tgcctgagattatccaagagtcagatgatgctt

SEQ ID NO: 932846 - DNA, 33 bp, Homo sapien
tgcctgagattatccaggagtcagatgatgctt

SEQ ID NO: 932847 - DNA, 33 bp, Homo sapien
ctctttgctagtgcataactaagtaataaagca

SEQ ID NO: 932848 - DNA, 33 bp, Homo sapien
ctctttgctagtgcatgactaagtaataaagca

SEQ ID NO: 932849 - DNA, 33 bp, Homo sapien
atagctatgttaaaagccagaaagaataaactt

SEQ ID NO: 932850 - DNA, 33 bp, Homo sapien
atagctatgttaaaaggcagaaagaataaactt

SEQ ID NO: 932851 - DNA, 33 bp, Homo sapien
cagaaagaataaacttcaaccatagagaaaaaa

SEQ ID NO: 932852 - DNA, 33 bp, Homo sapien
cagaaagaataaacttgaaccatagagaaaaaa

SEQ ID NO: 932853 - DNA, 33 bp, Homo sapien
aaatattttatgagaacagtgacaggtttaaca

SEQ ID NO: 932854 - DNA, 33 bp, Homo sapien
aaatattttatgagaagagtgacaggtttaaca

SEQ ID NO: 932855 - DNA, 33 bp, Homo sapien
ggatcaaattgactcacaagtaagttaactgca

SEQ ID NO: 932856 - DNA, 33 bp, Homo sapien
ggatcaaattgactcataagtaagttaactgca

SEQ ID NO: 932857 - DNA, 33 bp, Homo sapien
actgcatggccagaataaagtcaaaccatattt

SEQ ID NO: 932858 - DNA, 33 bp, Homo sapien
actgcatggccagaatgaagtcaaaccatattt

SEQ ID NO: 932859 - DNA, 33 bp, Homo sapien
tttttaaaatgcagaaaaacccagcagcataca

SEQ ID NO: 932860 - DNA, 33 bp, Homo sapien
tttttaaaatgcagaacaacccagcagcataca

SEQ ID NO: 932861 - DNA, 33 bp, Homo sapien
ttcttttactaggaagcagaatcacatctacaa

SEQ ID NO: 932862 - DNA, 33 bp, Homo sapien
ttcttttactaggaaggagaatcacatctacaa

SEQ ID NO: 932863 - DNA, 33 bp, Homo sapien
catgggcaagctctaagaatgtcttcccttaat

SEQ ID NO: 932864 - DNA, 33 bp, Homo sapien
catgggcaagctctaataatgtcttcccttaat

SEQ ID NO: 932865 - DNA, 33 bp, Homo sapien
actagatttcttatacactgctgataggaatat

SEQ ID NO: 932866 - DNA, 33 bp, Homo sapien
actagatttcttatacgctgctgataggaatat

SEQ ID NO: 932867 - DNA, 33 bp, Homo sapien
ttttcttgggatctgcaatattagagcatagaa

SEQ ID NO: 932868 - DNA, 33 bp, Homo sapien
ttttcttgggatctgcgatattagagcatagaa

SEQ ID NO: 932869 - DNA, 33 bp, Homo sapien
aaatgatacgcatacccacagcaacagaactga

SEQ ID NO: 932870 - DNA, 33 bp, Homo sapien
aaatgatacgcatacctacagcaacagaactga

SEQ ID NO: 932871 - DNA, 33 bp, Homo sapien
tgtaatatatttattgcagcaactggatcactt

SEQ ID NO: 932872 - DNA, 33 bp, Homo sapien
tgtaatatatttattgtagcaactggatcactt

SEQ ID NO: 932873 - DNA, 33 bp, Homo sapien
tggaggtgtcctcaggaagagtttcatttcatc

SEQ ID NO: 932874 - DNA, 33 bp, Homo sapien
tggaggtgtcctcagggagagtttcatttcatc

SEQ ID NO: 932875 - DNA, 33 bp, Homo sapien
tattacatcattaaacagaaagctacaaaataa

SEQ ID NO: 932876 - DNA, 33 bp, Homo sapien
tattacatcattaaaccgaaagctacaaaataa

SEQ ID NO: 932877 - DNA, 33 bp, Homo sapien
aaacaaaaagcataacaacattctagactaatt

SEQ ID NO: 932878 - DNA, 33 bp, Homo sapien
aaacaaaaagcataacgacattctagactaatt

SEQ ID NO: 932879 - DNA, 33 bp, Homo sapien
taatcatctgaatgcccgagtagaacaaaagac

SEQ ID NO: 932880 - DNA, 33 bp, Homo sapien
taatcatctgaatgcctgagtagaacaaaagac

SEQ ID NO: 932881 - DNA, 33 bp, Homo sapien
ggctaagtgatctaaaactagacacgtaggtag

SEQ ID NO: 932882 - DNA, 33 bp, Homo sapien
ggctaagtgatctaaacctagacacgtaggtag

SEQ ID NO: 932883 - DNA, 33 bp, Homo sapien
tatagacttgttcttcaactttggtttatcttt

SEQ ID NO: 932884 - DNA, 33 bp, Homo sapien
tatagacttgttcttccactttggtttatcttt

SEQ ID NO: 932885 - DNA, 33 bp, Homo sapien
agtcactagtttcagccatactcaaagggtaca

SEQ ID NO: 932886 - DNA, 33 bp, Homo sapien
agtcactagtttcagctatactcaaagggtaca

SEQ ID NO: 932887 - DNA, 33 bp, Homo sapien
aacagcatgcttctgaagtctgctaccaaagaa

SEQ ID NO: 932888 - DNA, 33 bp, Homo sapien
aacagcatgcttctgatgtctgctaccaaagaa

SEQ ID NO: 932889 - DNA, 33 bp, Homo sapien
caaatttccttctgtcactaatgaaagttagtc

SEQ ID NO: 932890 - DNA, 33 bp, Homo sapien
caaatttccttctgtccctaatgaaagttagtc

SEQ ID NO: 932891 - DNA, 33 bp, Homo sapien
tcccccttcacttttcaccttctctggcctgct

SEQ ID NO: 932892 - DNA, 33 bp, Homo sapien
tcccccttcacttttcgccttctctggcctgct

SEQ ID NO: 932893 - DNA, 33 bp, Homo sapien
gaaataaaacccatgactcaaatctctaaacct

SEQ ID NO: 932894 - DNA, 33 bp, Homo sapien
gaaataaaacccatgattcaaatctctaaacct

SEQ ID NO: 932895 - DNA, 33 bp, Homo sapien
ctatttttcctaattacacatccaccacagtga

SEQ ID NO: 932896 - DNA, 33 bp, Homo sapien
ctatttttcctaattatacatccaccacagtga

SEQ ID NO: 932897 - DNA, 33 bp, Homo sapien
ttggtgttatactactcaaaaaacaggattgta

SEQ ID NO: 932898 - DNA, 33 bp, Homo sapien
ttggtgttatactactgaaaaaacaggattgta

SEQ ID NO: 932899 - DNA, 33 bp, Homo sapien
atcaaatctgaatgtaaaagaaggtcaataaca

SEQ ID NO: 932900 - DNA, 33 bp, Homo sapien
atcaaatctgaatgtagaagaaggtcaataaca

SEQ ID NO: 932901 - DNA, 33 bp, Homo sapien
acacacgctactgtcacgtaattttctccttag

SEQ ID NO: 932902 - DNA, 33 bp, Homo sapien
acacacgctactgtcatgtaattttctccttag

SEQ ID NO: 932903 - DNA, 33 bp, Homo sapien
gaacaaaggtcctaaagagaaacaaatggaaag

SEQ ID NO: 932904 - DNA, 33 bp, Homo sapien
gaacaaaggtcctaaatagaaacaaatggaaag

SEQ ID NO: 932905 - DNA, 33 bp, Homo sapien
aatcaatgttgctccaaagaagatatacaaatg

SEQ ID NO: 932906 - DNA, 33 bp, Homo sapien
aatcaatgttgctccagagaagatatacaaatg

SEQ ID NO: 932907 - DNA, 33 bp, Homo sapien
tctggttaggactcatcatatgacccccaacca

SEQ ID NO: 932908 - DNA, 33 bp, Homo sapien
tctggttaggactcatgatatgacccccaacca

SEQ ID NO: 932909 - DNA, 33 bp, Homo sapien
ggatgtttctcactcacagaaaatgtgtagtgg

SEQ ID NO: 932910 - DNA, 33 bp, Homo sapien
ggatgtttctcactcatagaaaatgtgtagtgg

SEQ ID NO: 932911 - DNA, 33 bp, Homo sapien
tccgtgtaacttaacccatcctgattaatggaa

SEQ ID NO: 932912 - DNA, 33 bp, Homo sapien
tccgtgtaacttaacctatcctgattaatggaa

SEQ ID NO: 932913 - DNA, 33 bp, Homo sapien
gtagatgataacatcaataacttgggacgtaag

SEQ ID NO: 932914 - DNA, 33 bp, Homo sapien
gtagatgataacatcagtaacttgggacgtaag

SEQ ID NO: 932915 - DNA, 33 bp, Homo sapien
gccattccagaggttcaatagctcagaataaag

SEQ ID NO: 932916 - DNA, 33 bp, Homo sapien
gccattccagaggttctatagctcagaataaag

SEQ ID NO: 932917 - DNA, 33 bp, Homo sapien
ggcccttgacactacaaaaagtttgtgtcccaa

SEQ ID NO: 932918 - DNA, 33 bp, Homo sapien
ggcccttgacactacataaagtttgtgtcccaa

SEQ ID NO: 932919 - DNA, 33 bp, Homo sapien
ttttactggtcaatataagaagctttccataat

SEQ ID NO: 932920 - DNA, 33 bp, Homo sapien
ttttactggtcaatatgagaagctttccataat

SEQ ID NO: 932921 - DNA, 33 bp, Homo sapien
tagatgtgttgtgagaacttatggaaatcctct

SEQ ID NO: 932922 - DNA, 33 bp, Homo sapien
tagatgtgttgtgagagcttatggaaatcctct

SEQ ID NO: 932923 - DNA, 33 bp, Homo sapien
aaaagataatatttcaactgacttttggtaaca

SEQ ID NO: 932924 - DNA, 33 bp, Homo sapien
aaaagataatatttcagctgacttttggtaaca

SEQ ID NO: 932925 - DNA, 33 bp, Homo sapien
ctctaagctttgggataaatggccctatcactc

SEQ ID NO: 932926 - DNA, 33 bp, Homo sapien
ctctaagctttgggattaatggccctatcactc

SEQ ID NO: 932927 - DNA, 33 bp, Homo sapien
tcctctttttcctttcgacctcaaatcaaagta

SEQ ID NO: 932928 - DNA, 33 bp, Homo sapien
tcctctttttcctttctacctcaaatcaaagta

SEQ ID NO: 932929 - DNA, 33 bp, Homo sapien
cacagagtaccagtcacaggaatcatagcattg

SEQ ID NO: 932930 - DNA, 33 bp, Homo sapien
cacagagtaccagtcataggaatcatagcattg

SEQ ID NO: 932931 - DNA, 33 bp, Homo sapien
tgtatggctaacttaacagactttgtgacttct

SEQ ID NO: 932932 - DNA, 33 bp, Homo sapien
tgtatggctaacttaatagactttgtgacttct

SEQ ID NO: 932933 - DNA, 33 bp, Homo sapien
catttttacagtttcaataatctttctctaaat

SEQ ID NO: 932934 - DNA, 33 bp, Homo sapien
catttttacagtttcagtaatctttctctaaat

SEQ ID NO: 932935 - DNA, 33 bp, Homo sapien
ttccatgaaaaggcacgggtcattttcttacat

SEQ ID NO: 932936 - DNA, 33 bp, Homo sapien
ttccatgaaaaggcactggtcattttcttacat

SEQ ID NO: 932937 - DNA, 33 bp, Homo sapien
tagcaacagtgacatacctaaacatatctaaag

SEQ ID NO: 932938 - DNA, 33 bp, Homo sapien
tagcaacagtgacatatctaaacatatctaaag

SEQ ID NO: 932939 - DNA, 33 bp, Homo sapien
tagagatacaaaagcacaaaacatttttgtata

SEQ ID NO: 932940 - DNA, 33 bp, Homo sapien
tagagatacaaaagcagaaaacatttttgtata

SEQ ID NO: 932941 - DNA, 33 bp, Homo sapien
ctaaatgcaaagacaaaaaatatgctgtattcc

SEQ ID NO: 932942 - DNA, 33 bp, Homo sapien
ctaaatgcaaagacaagaaatatgctgtattcc

SEQ ID NO: 932943 - DNA, 33 bp, Homo sapien
aggacacagtggagaccctggtgatagcccttc

SEQ ID NO: 932944 - DNA, 33 bp, Homo sapien
aggacacagtggagactctggtgatagcccttc

SEQ ID NO: 932945 - DNA, 33 bp, Homo sapien
atttgtgaccattctcgcagtggtaaggtggta

SEQ ID NO: 932946 - DNA, 33 bp, Homo sapien
atttgtgaccattctctcagtggtaaggtggta

SEQ ID NO: 932947 - DNA, 33 bp, Homo sapien
gtcccactaacagcacagagtttatattcatgc

SEQ ID NO: 932948 - DNA, 33 bp, Homo sapien
gtcccactaacagcactgagtttatattcatgc

SEQ ID NO: 932949 - DNA, 33 bp, Homo sapien
tagtgccctgattttccagaattctggttgtgc

SEQ ID NO: 932950 - DNA, 33 bp, Homo sapien
tagtgccctgattttctagaattctggttgtgc

SEQ ID NO: 932951 - DNA, 33 bp, Homo sapien
ttaaatgaccagacttaaaaataattggcattc

SEQ ID NO: 932952 - DNA, 33 bp, Homo sapien
ttaaatgaccagactttaaaataattggcattc

SEQ ID NO: 932953 - DNA, 33 bp, Homo sapien
acccctgcgtctttaacgtagatgcctaaactg

SEQ ID NO: 932954 - DNA, 33 bp, Homo sapien
acccctgcgtctttaatgtagatgcctaaactg

SEQ ID NO: 932955 - DNA, 33 bp, Homo sapien
gcaaaaatagacaaataaggttgaatcaaactg

SEQ ID NO: 932956 - DNA, 33 bp, Homo sapien
gcaaaaatagacaaatgaggttgaatcaaactg

SEQ ID NO: 932957 - DNA, 33 bp, Homo sapien
ccctgtgtttacacggaaactggctcttctcag

SEQ ID NO: 932958 - DNA, 33 bp, Homo sapien
ccctgtgtttacacgggaactggctcttctcag

SEQ ID NO: 932959 - DNA, 33 bp, Homo sapien
cgagggaggagtataacgaatcaggatggagga

SEQ ID NO: 932960 - DNA, 33 bp, Homo sapien
cgagggaggagtataatgaatcaggatggagga

SEQ ID NO: 932961 - DNA, 33 bp, Homo sapien
cccaagaacacataaaagatgatgtgaagcagt

SEQ ID NO: 932962 - DNA, 33 bp, Homo sapien
cccaagaacacataaacgatgatgtgaagcagt

SEQ ID NO: 932963 - DNA, 33 bp, Homo sapien
tatgcatcttcattcacccgtgtatgcaaccac

SEQ ID NO: 932964 - DNA, 33 bp, Homo sapien
tatgcatcttcattcatccgtgtatgcaaccac

SEQ ID NO: 932965 - DNA, 33 bp, Homo sapien
ctgaaggtctcaagaaatcaagagcttgtaatg

SEQ ID NO: 932966 - DNA, 33 bp, Homo sapien
ctgaaggtctcaagaagtcaagagcttgtaatg

SEQ ID NO: 932967 - DNA, 33 bp, Homo sapien
tctcagcttacttgcaccacataattcataaag

SEQ ID NO: 932968 - DNA, 33 bp, Homo sapien
tctcagcttacttgcatcacataattcataaag

SEQ ID NO: 932969 - DNA, 33 bp, Homo sapien
aatagtagcagatggaaaggtaagaagagctca

SEQ ID NO: 932970 - DNA, 33 bp, Homo sapien
aatagtagcagatggataggtaagaagagctca

SEQ ID NO: 932971 - DNA, 33 bp, Homo sapien
gtgcggaagaatcccaaatacattaggtagata

SEQ ID NO: 932972 - DNA, 33 bp, Homo sapien
gtgcggaagaatcccagatacattaggtagata

SEQ ID NO: 932973 - DNA, 33 bp, Homo sapien
taaaacgattgactccccagtagtgaaatgaac

SEQ ID NO: 932974 - DNA, 33 bp, Homo sapien
taaaacgattgactcctcagtagtgaaatgaac

SEQ ID NO: 932975 - DNA, 33 bp, Homo sapien
cattcatctcctgatgaaagttgccaagcctgg

SEQ ID NO: 932976 - DNA, 33 bp, Homo sapien
cattcatctcctgatgcaagttgccaagcctgg

SEQ ID NO: 932977 - DNA, 33 bp, Homo sapien
agtctcatttaacaacaatactaaagctagttg

SEQ ID NO: 932978 - DNA, 33 bp, Homo sapien
agtctcatttaacaacgatactaaagctagttg

SEQ ID NO: 932979 - DNA, 33 bp, Homo sapien
caaatgagccagcaacaaagggaaaattaaggt

SEQ ID NO: 932980 - DNA, 33 bp, Homo sapien
caaatgagccagcaacgaagggaaaattaaggt

SEQ ID NO: 932981 - DNA, 33 bp, Homo sapien
gaagattaagtatccaccctgacagcattcacc

SEQ ID NO: 932982 - DNA, 33 bp, Homo sapien
gaagattaagtatccagcctgacagcattcacc

SEQ ID NO: 932983 - DNA, 33 bp, Homo sapien
atgcatacaacctagcaaaattgaaccatgaaa

SEQ ID NO: 932984 - DNA, 33 bp, Homo sapien
atgcatacaacctagcgaaattgaaccatgaaa

SEQ ID NO: 932985 - DNA, 33 bp, Homo sapien
tgagcaacatcaatgaagaaagtgttgtgacga

SEQ ID NO: 932986 - DNA, 33 bp, Homo sapien
tgagcaacatcaatgaggaaagtgttgtgacga

SEQ ID NO: 932987 - DNA, 33 bp, Homo sapien
tggtctacaactaaagaattgtcagtgctataa

SEQ ID NO: 932988 - DNA, 33 bp, Homo sapien
tggtctacaactaaagcattgtcagtgctataa

SEQ ID NO: 932989 - DNA, 33 bp, Homo sapien
tatgggaagtcagggaacgaagactagtctggg

SEQ ID NO: 932990 - DNA, 33 bp, Homo sapien
tatgggaagtcagggagcgaagactagtctggg

SEQ ID NO: 932991 - DNA, 33 bp, Homo sapien
cagagagagatcattccacttggttatttcaaa

SEQ ID NO: 932992 - DNA, 33 bp, Homo sapien
cagagagagatcattctacttggttatttcaaa

SEQ ID NO: 932993 - DNA, 33 bp, Homo sapien
actttgtataagaacaatctactaacaagccat

SEQ ID NO: 932994 - DNA, 33 bp, Homo sapien
actttgtataagaacattctactaacaagccat

SEQ ID NO: 932995 - DNA, 33 bp, Homo sapien
aacaatattgatttacagctttacagataccat

SEQ ID NO: 932996 - DNA, 33 bp, Homo sapien
aacaatattgatttactgctttacagataccat

SEQ ID NO: 932997 - DNA, 33 bp, Homo sapien
aaagggttcgctcacaggcatattctaaacaaa

SEQ ID NO: 932998 - DNA, 33 bp, Homo sapien
aaagggttcgctcacatgcatattctaaacaaa

SEQ ID NO: 932999 - DNA, 33 bp, Homo sapien
gtggcatagttcccaagagactcctatgtatcg

SEQ ID NO: 933000 - DNA, 33 bp, Homo sapien
gtggcatagttcccaatagactcctatgtatcg

SEQ ID NO: 933001 - DNA, 33 bp, Homo sapien
ggctaaagcaactgacaaaacagaaaatatcat

SEQ ID NO: 933002 - DNA, 33 bp, Homo sapien
ggctaaagcaactgacgaaacagaaaatatcat

SEQ ID NO: 933003 - DNA, 33 bp, Homo sapien
actatttatagcgaaccgattgacacactataa

SEQ ID NO: 933004 - DNA, 33 bp, Homo sapien
actatttatagcgaactgattgacacactataa

SEQ ID NO: 933005 - DNA, 33 bp, Homo sapien
cacgtgccaactaagaacctactcagcactgcc

SEQ ID NO: 933006 - DNA, 33 bp, Homo sapien
cacgtgccaactaagagcctactcagcactgcc

SEQ ID NO: 933007 - DNA, 33 bp, Homo sapien
ggtctgaaaagatgcccggatggaaagaggggg

SEQ ID NO: 933008 - DNA, 33 bp, Homo sapien
ggtctgaaaagatgcctggatggaaagaggggg

SEQ ID NO: 933009 - DNA, 33 bp, Homo sapien
attttaaaataagcctcactggatattttccat

SEQ ID NO: 933010 - DNA, 33 bp, Homo sapien
attttaaaataagcctgactggatattttccat

SEQ ID NO: 933011 - DNA, 33 bp, Homo sapien
ttaccaaattttagaacctatgccatttcttta

SEQ ID NO: 933012 - DNA, 33 bp, Homo sapien
ttaccaaattttagaatctatgccatttcttta

SEQ ID NO: 933013 - DNA, 33 bp, Homo sapien
tttcaatatccatcaacatttttacatactgac

SEQ ID NO: 933014 - DNA, 33 bp, Homo sapien
tttcaatatccatcaatatttttacatactgac

SEQ ID NO: 933015 - DNA, 33 bp, Homo sapien
aggattatctttcacaagggagctgtaacaggg

SEQ ID NO: 933016 - DNA, 33 bp, Homo sapien
aggattatctttcacaggggagctgtaacaggg

SEQ ID NO: 933017 - DNA, 33 bp, Homo sapien
agaaagcaatggtgtaaatttttggcttctttc

SEQ ID NO: 933018 - DNA, 33 bp, Homo sapien
agaaagcaatggtgtatatttttggcttctttc

SEQ ID NO: 933019 - DNA, 33 bp, Homo sapien
tagactgctcctttccacactacccgcttcctg

SEQ ID NO: 933020 - DNA, 33 bp, Homo sapien
tagactgctcctttcctcactacccgcttcctg

SEQ ID NO: 933021 - DNA, 33 bp, Homo sapien
tgcataggtactccaaaatactgtagagttgta

SEQ ID NO: 933022 - DNA, 33 bp, Homo sapien
tgcataggtactccaagatactgtagagttgta

SEQ ID NO: 933023 - DNA, 33 bp, Homo sapien
actcagtttcacttgcaaatgtagatgcaaaat

SEQ ID NO: 933024 - DNA, 33 bp, Homo sapien
actcagtttcacttgcgaatgtagatgcaaaat

SEQ ID NO: 933025 - DNA, 33 bp, Homo sapien
gtgacggtactgttaaatgtgatgaagagactg

SEQ ID NO: 933026 - DNA, 33 bp, Homo sapien
gtgacggtactgttaagtgtgatgaagagactg

SEQ ID NO: 933027 - DNA, 33 bp, Homo sapien
gtgtatcaattaaacgcagtctgattaaatgca

SEQ ID NO: 933028 - DNA, 33 bp, Homo sapien
gtgtatcaattaaacgtagtctgattaaatgca

SEQ ID NO: 933029 - DNA, 33 bp, Homo sapien
tcaaatcttgtcttagaaataagaaaaactcaa

SEQ ID NO: 933030 - DNA, 33 bp, Homo sapien
tcaaatcttgtcttaggaataagaaaaactcaa

SEQ ID NO: 933031 - DNA, 33 bp, Homo sapien
ttagccacacatctggcagccacaaggagagta

SEQ ID NO: 933032 - DNA, 33 bp, Homo sapien
ttagccacacatctggtagccacaaggagagta

SEQ ID NO: 933033 - DNA, 33 bp, Homo sapien
ctctgtctacacaaacagatcagaggattcagg

SEQ ID NO: 933034 - DNA, 33 bp, Homo sapien
ctctgtctacacaaacggatcagaggattcagg

SEQ ID NO: 933035 - DNA, 33 bp, Homo sapien
caatgttaagcacagacagttgagtagcttctt

SEQ ID NO: 933036 - DNA, 33 bp, Homo sapien
caatgttaagcacagagagttgagtagcttctt

SEQ ID NO: 933037 - DNA, 33 bp, Homo sapien
atccttatgacatggtaaaattttctgcacaga

SEQ ID NO: 933038 - DNA, 33 bp, Homo sapien
atccttatgacatggtgaaattttctgcacaga

SEQ ID NO: 933039 - DNA, 33 bp, Homo sapien
ctggagagaattttgcacagagtggattgggaa

SEQ ID NO: 933040 - DNA, 33 bp, Homo sapien
ctggagagaattttgcgcagagtggattgggaa

SEQ ID NO: 933041 - DNA, 33 bp, Homo sapien
ctccaataatctgctgaattttagacagaccaa

SEQ ID NO: 933042 - DNA, 33 bp, Homo sapien
ctccaataatctgctgtattttagacagaccaa

SEQ ID NO: 933043 - DNA, 33 bp, Homo sapien
catggtgttcctattacgcttgtaacggtcgcc

SEQ ID NO: 933044 - DNA, 33 bp, Homo sapien
catggtgttcctattatgcttgtaacggtcgcc

SEQ ID NO: 933045 - DNA, 33 bp, Homo sapien
gaaggtagtgcagctacggaaggcaatcaaggt

SEQ ID NO: 933046 - DNA, 33 bp, Homo sapien
gaaggtagtgcagctatggaaggcaatcaaggt

SEQ ID NO: 933047 - DNA, 33 bp, Homo sapien
gtttgcatcaagaagacgaagtgccctcgttcc

SEQ ID NO: 933048 - DNA, 33 bp, Homo sapien
gtttgcatcaagaagatgaagtgccctcgttcc

SEQ ID NO: 933049 - DNA, 33 bp, Homo sapien
ccatgtttttgccacaatattgtaacctgagat

SEQ ID NO: 933050 - DNA, 33 bp, Homo sapien
ccatgtttttgccacagtattgtaacctgagat

SEQ ID NO: 933051 - DNA, 33 bp, Homo sapien
agagtggagaataaaacacatccagtgccccta

SEQ ID NO: 933052 - DNA, 33 bp, Homo sapien
agagtggagaataaaatacatccagtgccccta

SEQ ID NO: 933053 - DNA, 33 bp, Homo sapien
gtcaggatgcatttcaaaatcatgagaaagaag

SEQ ID NO: 933054 - DNA, 33 bp, Homo sapien
gtcaggatgcatttcagaatcatgagaaagaag

SEQ ID NO: 933055 - DNA, 33 bp, Homo sapien
tgggtaaagggctctccatgcagtaaatggtac

SEQ ID NO: 933056 - DNA, 33 bp, Homo sapien
tgggtaaagggctctctatgcagtaaatggtac

SEQ ID NO: 933057 - DNA, 33 bp, Homo sapien
ttccacaaattgttaaacaaactttctgtagaa

SEQ ID NO: 933058 - DNA, 33 bp, Homo sapien
ttccacaaattgttaatcaaactttctgtagaa

SEQ ID NO: 933059 - DNA, 33 bp, Homo sapien
catggaggcaaactacagtagctgattaccatt

SEQ ID NO: 933060 - DNA, 33 bp, Homo sapien
catggaggcaaactacggtagctgattaccatt

SEQ ID NO: 933061 - DNA, 33 bp, Homo sapien
ctactgtgtcatctgacaaaaagtagctaaatt

SEQ ID NO: 933062 - DNA, 33 bp, Homo sapien
ctactgtgtcatctgataaaaagtagctaaatt

SEQ ID NO: 933063 - DNA, 33 bp, Homo sapien
actgcttgaaatgaaacgactttttggtttatg

SEQ ID NO: 933064 - DNA, 33 bp, Homo sapien
actgcttgaaatgaaatgactttttggtttatg

SEQ ID NO: 933065 - DNA, 33 bp, Homo sapien
caagctgtacccttaaagtttgtgtgcagtgct

SEQ ID NO: 933066 - DNA, 33 bp, Homo sapien
caagctgtacccttaaggtttgtgtgcagtgct

SEQ ID NO: 933067 - DNA, 33 bp, Homo sapien
caatggcccaatatcacgctaagcaacaaggct

SEQ ID NO: 933068 - DNA, 33 bp, Homo sapien
caatggcccaatatcatgctaagcaacaaggct

SEQ ID NO: 933069 - DNA, 33 bp, Homo sapien
accatgtcatttccacaatattacacaatggca

SEQ ID NO: 933070 - DNA, 33 bp, Homo sapien
accatgtcatttccactatattacacaatggca

SEQ ID NO: 933071 - DNA, 33 bp, Homo sapien
tttatgatctttaagaacagggcagatttcaaa

SEQ ID NO: 933072 - DNA, 33 bp, Homo sapien
tttatgatctttaagagcagggcagatttcaaa

SEQ ID NO: 933073 - DNA, 33 bp, Homo sapien
aggtctaggttagttaacacaaaagtaggtcat

SEQ ID NO: 933074 - DNA, 33 bp, Homo sapien
aggtctaggttagttaccacaaaagtaggtcat

SEQ ID NO: 933075 - DNA, 33 bp, Homo sapien
ttgctcctctttgctcaatggtcagttccctgc

SEQ ID NO: 933076 - DNA, 33 bp, Homo sapien
ttgctcctctttgctcgatggtcagttccctgc

SEQ ID NO: 933077 - DNA, 33 bp, Homo sapien
atcttatggaatggaccactcatatgtggacac

SEQ ID NO: 933078 - DNA, 33 bp, Homo sapien
atcttatggaatggactactcatatgtggacac

SEQ ID NO: 933079 - DNA, 33 bp, Homo sapien
tccctcctttgccaaaatccagaatcctttatc

SEQ ID NO: 933080 - DNA, 33 bp, Homo sapien
tccctcctttgccaaagtccagaatcctttatc

SEQ ID NO: 933081 - DNA, 33 bp, Homo sapien
tgccaatgtggcaagcactatgcaatcacatgg

SEQ ID NO: 933082 - DNA, 33 bp, Homo sapien
tgccaatgtggcaagcgctatgcaatcacatgg

SEQ ID NO: 933083 - DNA, 33 bp, Homo sapien
aaagaggagtactcaaagttgtatatgtgtaac

SEQ ID NO: 933084 - DNA, 33 bp, Homo sapien
aaagaggagtactcaaggttgtatatgtgtaac

SEQ ID NO: 933085 - DNA, 33 bp, Homo sapien
gctaaggactgtagcaaattacggagttcccat

SEQ ID NO: 933086 - DNA, 33 bp, Homo sapien
gctaaggactgtagcacattacggagttcccat

SEQ ID NO: 933087 - DNA, 33 bp, Homo sapien
ttcctacgctaagccaaccgcttacctgaacag

SEQ ID NO: 933088 - DNA, 33 bp, Homo sapien
ttcctacgctaagccagccgcttacctgaacag

SEQ ID NO: 933089 - DNA, 33 bp, Homo sapien
agagtatgaacttagaaccgcattttctaaagt

SEQ ID NO: 933090 - DNA, 33 bp, Homo sapien
agagtatgaacttagatccgcattttctaaagt

SEQ ID NO: 933091 - DNA, 33 bp, Homo sapien
gtaatcacattttaggacaatcacgaacaggtt

SEQ ID NO: 933092 - DNA, 33 bp, Homo sapien
gtaatcacattttagggcaatcacgaacaggtt

SEQ ID NO: 933093 - DNA, 33 bp, Homo sapien
taacttaggatcatagcaggacaatcataacag

SEQ ID NO: 933094 - DNA, 33 bp, Homo sapien
taacttaggatcatagtaggacaatcataacag

SEQ ID NO: 933095 - DNA, 33 bp, Homo sapien
ttgttcaaccctacagccatccttgctaacttc

SEQ ID NO: 933096 - DNA, 33 bp, Homo sapien
ttgttcaaccctacaggcatccttgctaacttc

SEQ ID NO: 933097 - DNA, 33 bp, Homo sapien
ttaccttatttggccacataaaagtttgactgc

SEQ ID NO: 933098 - DNA, 33 bp, Homo sapien
ttaccttatttggccatataaaagtttgactgc

SEQ ID NO: 933099 - DNA, 33 bp, Homo sapien
tggtacaactaactcaatatttctgaattgcct

SEQ ID NO: 933100 - DNA, 33 bp, Homo sapien
tggtacaactaactcagtatttctgaattgcct

SEQ ID NO: 933101 - DNA, 33 bp, Homo sapien
gcaatgtcaaacactaaaggaacattagcccac

SEQ ID NO: 933102 - DNA, 33 bp, Homo sapien
gcaatgtcaaacactagaggaacattagcccac

SEQ ID NO: 933103 - DNA, 33 bp, Homo sapien
cctcctaacgcggcaaaaatgaatcactgacaa

SEQ ID NO: 933104 - DNA, 33 bp, Homo sapien
cctcctaacgcggcaagaatgaatcactgacaa

SEQ ID NO: 933105 - DNA, 33 bp, Homo sapien
gcacactgaggaataagagttttgtatccattg

SEQ ID NO: 933106 - DNA, 33 bp, Homo sapien
gcacactgaggaataatagttttgtatccattg

SEQ ID NO: 933107 - DNA, 33 bp, Homo sapien
gagaacttagcaaaaccgaagtgtgaattttca

SEQ ID NO: 933108 - DNA, 33 bp, Homo sapien
gagaacttagcaaaactgaagtgtgaattttca

SEQ ID NO: 933109 - DNA, 33 bp, Homo sapien
tgattgttatttcacaacttcccagattggggc

SEQ ID NO: 933110 - DNA, 33 bp, Homo sapien
tgattgttatttcacagcttcccagattggggc

SEQ ID NO: 933111 - DNA, 33 bp, Homo sapien
ttctatctatcgatcaagtcactcatgcctagt

SEQ ID NO: 933112 - DNA, 33 bp, Homo sapien
ttctatctatcgatcacgtcactcatgcctagt

SEQ ID NO: 933113 - DNA, 33 bp, Homo sapien
gaacatcctgagaactaaaaatacctctacaag

SEQ ID NO: 933114 - DNA, 33 bp, Homo sapien
gaacatcctgagaactgaaaatacctctacaag

SEQ ID NO: 933115 - DNA, 33 bp, Homo sapien
gcaacctcaaagtcagacagaagcgtgaatctc

SEQ ID NO: 933116 - DNA, 33 bp, Homo sapien
gcaacctcaaagtcagtcagaagcgtgaatctc

SEQ ID NO: 933117 - DNA, 33 bp, Homo sapien
tattcatcttctttcccgctttcaaaattgtgt

SEQ ID NO: 933118 - DNA, 33 bp, Homo sapien
tattcatcttctttcctgctttcaaaattgtgt

SEQ ID NO: 933119 - DNA, 33 bp, Homo sapien
ttagtttttagtttggacaatgtatttataggt

SEQ ID NO: 933120 - DNA, 33 bp, Homo sapien
ttagtttttagtttgggcaatgtatttataggt

SEQ ID NO: 933121 - DNA, 33 bp, Homo sapien
aaaatagagagccaaacgttttcttaccagaag

SEQ ID NO: 933122 - DNA, 33 bp, Homo sapien
aaaatagagagccaaatgttttcttaccagaag

SEQ ID NO: 933123 - DNA, 33 bp, Homo sapien
gacccatggactcttccaaaatcctaaatataa

SEQ ID NO: 933124 - DNA, 33 bp, Homo sapien
gacccatggactcttctaaaatcctaaatataa

SEQ ID NO: 933125 - DNA, 33 bp, Homo sapien
gtattatccataatgcacagtagccagtaaaaa

SEQ ID NO: 933126 - DNA, 33 bp, Homo sapien
gtattatccataatgcgcagtagccagtaaaaa

SEQ ID NO: 933127 - DNA, 33 bp, Homo sapien
ttttttcacagttgacacctctcttgttcctgc

SEQ ID NO: 933128 - DNA, 33 bp, Homo sapien
ttttttcacagttgacgcctctcttgttcctgc

SEQ ID NO: 933129 - DNA, 33 bp, Homo sapien
atcggttctcaacatacgatccctaaaataaga

SEQ ID NO: 933130 - DNA, 33 bp, Homo sapien
atcggttctcaacatatgatccctaaaataaga

SEQ ID NO: 933131 - DNA, 33 bp, Homo sapien
ctggaaggaacaagcaatattctctgccctgta

SEQ ID NO: 933132 - DNA, 33 bp, Homo sapien
ctggaaggaacaagcactattctctgccctgta

SEQ ID NO: 933133 - DNA, 33 bp, Homo sapien
aattctgttagagaggaaagtgtcaccctggac

SEQ ID NO: 933134 - DNA, 33 bp, Homo sapien
aattctgttagagaggtaagtgtcaccctggac

SEQ ID NO: 933135 - DNA, 33 bp, Homo sapien
tcttaagggatttagaatcaacaactactaatt

SEQ ID NO: 933136 - DNA, 33 bp, Homo sapien
tcttaagggatttagagtcaacaactactaatt

SEQ ID NO: 933137 - DNA, 33 bp, Homo sapien
tagatgtacattccacacatagaagcagagagg

SEQ ID NO: 933138 - DNA, 33 bp, Homo sapien
tagatgtacattccacgcatagaagcagagagg

SEQ ID NO: 933139 - DNA, 33 bp, Homo sapien
cctcaggtcttagccaaatggagctcaccagag

SEQ ID NO: 933140 - DNA, 33 bp, Homo sapien
cctcaggtcttagccacatggagctcaccagag

SEQ ID NO: 933141 - DNA, 33 bp, Homo sapien
gctattgaactagacgccagtcatttctaggtc

SEQ ID NO: 933142 - DNA, 33 bp, Homo sapien
gctattgaactagacgtcagtcatttctaggtc

SEQ ID NO: 933143 - DNA, 33 bp, Homo sapien
ttttccatcatccaaaatctttaataagaggat

SEQ ID NO: 933144 - DNA, 33 bp, Homo sapien
ttttccatcatccaaagtctttaataagaggat

SEQ ID NO: 933145 - DNA, 33 bp, Homo sapien
actggataattttaagacgtggctaacacaaaa

SEQ ID NO: 933146 - DNA, 33 bp, Homo sapien
actggataattttaagccgtggctaacacaaaa

SEQ ID NO: 933147 - DNA, 33 bp, Homo sapien
acatctgataactacactgaggaattgagagat

SEQ ID NO: 933148 - DNA, 33 bp, Homo sapien
acatctgataactacattgaggaattgagagat

SEQ ID NO: 933149 - DNA, 33 bp, Homo sapien
tcaaatattggaattagcactacacagatttga

SEQ ID NO: 933150 - DNA, 33 bp, Homo sapien
tcaaatattggaattatcactacacagatttga

SEQ ID NO: 933151 - DNA, 33 bp, Homo sapien
tccttcaggattacaacggtggcaatactcttt

SEQ ID NO: 933152 - DNA, 33 bp, Homo sapien
tccttcaggattacaatggtggcaatactcttt

SEQ ID NO: 933153 - DNA, 33 bp, Homo sapien
tttcagaggtttcctaagatagtgtttacttga

SEQ ID NO: 933154 - DNA, 33 bp, Homo sapien
tttcagaggtttcctatgatagtgtttacttga

SEQ ID NO: 933155 - DNA, 33 bp, Homo sapien
gcagcccatcggaatcagacagaaatggattaa

SEQ ID NO: 933156 - DNA, 33 bp, Homo sapien
gcagcccatcggaatccgacagaaatggattaa

SEQ ID NO: 933157 - DNA, 33 bp, Homo sapien
ggaaaatctacttttaacaactggagtgcctgc

SEQ ID NO: 933158 - DNA, 33 bp, Homo sapien
ggaaaatctacttttaccaactggagtgcctgc

SEQ ID NO: 933159 - DNA, 33 bp, Homo sapien
actacgtactatgtacactgacatttttcctct

SEQ ID NO: 933160 - DNA, 33 bp, Homo sapien
actacgtactatgtaccctgacatttttcctct

SEQ ID NO: 933161 - DNA, 33 bp, Homo sapien
atatatgtgggctagcaacagtccaaatcagga

SEQ ID NO: 933162 - DNA, 33 bp, Homo sapien
atatatgtgggctagcgacagtccaaatcagga

SEQ ID NO: 933163 - DNA, 33 bp, Homo sapien
aagtcactcttgggcacaaaggtcccatagttt

SEQ ID NO: 933164 - DNA, 33 bp, Homo sapien
aagtcactcttgggcataaaggtcccatagttt

SEQ ID NO: 933165 - DNA, 33 bp, Homo sapien
actggggaagtataaacgactaaaggagtaggg

SEQ ID NO: 933166 - DNA, 33 bp, Homo sapien
actggggaagtataaatgactaaaggagtaggg

SEQ ID NO: 933167 - DNA, 33 bp, Homo sapien
ctcaatggaaaactacaagagctctgcttagcc

SEQ ID NO: 933168 - DNA, 33 bp, Homo sapien
ctcaatggaaaactacgagagctctgcttagcc

SEQ ID NO: 933169 - DNA, 33 bp, Homo sapien
aactgctttcgattggaagcaatattactgacc

SEQ ID NO: 933170 - DNA, 33 bp, Homo sapien
aactgctttcgattgggagcaatattactgacc

SEQ ID NO: 933171 - DNA, 33 bp, Homo sapien
gtgcttttttattgaactcatatagcggctact

SEQ ID NO: 933172 - DNA, 33 bp, Homo sapien
gtgcttttttattgaagtcatatagcggctact

SEQ ID NO: 933173 - DNA, 33 bp, Homo sapien
ggatgcactttctttacacagtagagtcagggg

SEQ ID NO: 933174 - DNA, 33 bp, Homo sapien
ggatgcactttctttatacagtagagtcagggg

SEQ ID NO: 933175 - DNA, 33 bp, Homo sapien
tggtgaagtctttacactcactcataataggaa

SEQ ID NO: 933176 - DNA, 33 bp, Homo sapien
tggtgaagtctttacagtcactcataataggaa

SEQ ID NO: 933177 - DNA, 33 bp, Homo sapien
ctggagcttggactgaaactttctcaagggtgt

SEQ ID NO: 933178 - DNA, 33 bp, Homo sapien
ctggagcttggactgagactttctcaagggtgt

SEQ ID NO: 933179 - DNA, 33 bp, Homo sapien
agtccaagctccaggacgacccacttcccaatg

SEQ ID NO: 933180 - DNA, 33 bp, Homo sapien
agtccaagctccaggatgacccacttcccaatg

SEQ ID NO: 933181 - DNA, 33 bp, Homo sapien
aaacgtttcatgtatacaaggggttgagattat

SEQ ID NO: 933182 - DNA, 33 bp, Homo sapien
aaacgtttcatgtatataaggggttgagattat

SEQ ID NO: 933183 - DNA, 33 bp, Homo sapien
aaaaactaccagtaacacaagtcatggacgctt

SEQ ID NO: 933184 - DNA, 33 bp, Homo sapien
aaaaactaccagtaactcaagtcatggacgctt

SEQ ID NO: 933185 - DNA, 33 bp, Homo sapien
ctgatgaagttctatcaaaagcctttggataat

SEQ ID NO: 933186 - DNA, 33 bp, Homo sapien
ctgatgaagttctatcgaaagcctttggataat

SEQ ID NO: 933187 - DNA, 33 bp, Homo sapien
gtatcaaaatgtggtacaatcatgacagaaata

SEQ ID NO: 933188 - DNA, 33 bp, Homo sapien
gtatcaaaatgtggtagaatcatgacagaaata

SEQ ID NO: 933189 - DNA, 33 bp, Homo sapien
ttgcaaccactattgaacacattttagactttc

SEQ ID NO: 933190 - DNA, 33 bp, Homo sapien
ttgcaaccactattgagcacattttagactttc

SEQ ID NO: 933191 - DNA, 33 bp, Homo sapien
ataagaagacatagaggaaggactgaagaagta

SEQ ID NO: 933192 - DNA, 33 bp, Homo sapien
ataagaagacatagagtaaggactgaagaagta

SEQ ID NO: 933193 - DNA, 33 bp, Homo sapien
attttgacgagattaaaatccccagctgaactc

SEQ ID NO: 933194 - DNA, 33 bp, Homo sapien
attttgacgagattaagatccccagctgaactc

SEQ ID NO: 933195 - DNA, 33 bp, Homo sapien
aatttagtgtatagaacccagctcaatataagg

SEQ ID NO: 933196 - DNA, 33 bp, Homo sapien
aatttagtgtatagaatccagctcaatataagg

SEQ ID NO: 933197 - DNA, 33 bp, Homo sapien
taatttttccaactatcaaaccttgtaggtata

SEQ ID NO: 933198 - DNA, 33 bp, Homo sapien
taatttttccaactatgaaaccttgtaggtata

SEQ ID NO: 933199 - DNA, 33 bp, Homo sapien
cactcagcctggtacccgggatttattatgcat

SEQ ID NO: 933200 - DNA, 33 bp, Homo sapien
cactcagcctggtacctgggatttattatgcat

SEQ ID NO: 933201 - DNA, 33 bp, Homo sapien
cagcacattgaataaacgaggcttgttccccca

SEQ ID NO: 933202 - DNA, 33 bp, Homo sapien
cagcacattgaataaatgaggcttgttccccca

SEQ ID NO: 933203 - DNA, 33 bp, Homo sapien
gcaactaaggtctaaaatatggaaggctttatg

SEQ ID NO: 933204 - DNA, 33 bp, Homo sapien
gcaactaaggtctaaattatggaaggctttatg

SEQ ID NO: 933205 - DNA, 33 bp, Homo sapien
aaggcagacggcaaacgaatctattgatttttc

SEQ ID NO: 933206 - DNA, 33 bp, Homo sapien
aaggcagacggcaaactaatctattgatttttc

SEQ ID NO: 933207 - DNA, 33 bp, Homo sapien
ttctcaagcacagaaacaaaaaccgggagtgta

SEQ ID NO: 933208 - DNA, 33 bp, Homo sapien
ttctcaagcacagaaataaaaaccgggagtgta

SEQ ID NO: 933209 - DNA, 33 bp, Homo sapien
aagcctgccaaacctgaaagacatgagcagata

SEQ ID NO: 933210 - DNA, 33 bp, Homo sapien
aagcctgccaaacctggaagacatgagcagata

SEQ ID NO: 933211 - DNA, 33 bp, Homo sapien
atatatacaaactacaatggtgactagtttctc

SEQ ID NO: 933212 - DNA, 33 bp, Homo sapien
atatatacaaactacagtggtgactagtttctc

SEQ ID NO: 933213 - DNA, 33 bp, Homo sapien
cctcacggcatgtccagaaagaatctgtcttaa

SEQ ID NO: 933214 - DNA, 33 bp, Homo sapien
cctcacggcatgtccataaagaatctgtcttaa

SEQ ID NO: 933215 - DNA, 33 bp, Homo sapien
ggtccctttcctcagcacaggcatgttgaaaca

SEQ ID NO: 933216 - DNA, 33 bp, Homo sapien
ggtccctttcctcagcgcaggcatgttgaaaca

SEQ ID NO: 933217 - DNA, 33 bp, Homo sapien
aagaaaagcaattcagaagggggaagaagtgag

SEQ ID NO: 933218 - DNA, 33 bp, Homo sapien
aagaaaagcaattcaggagggggaagaagtgag

SEQ ID NO: 933219 - DNA, 33 bp, Homo sapien
gctcccatgttagagaagaaaacactgaagtaa

SEQ ID NO: 933220 - DNA, 33 bp, Homo sapien
gctcccatgttagagatgaaaacactgaagtaa

SEQ ID NO: 933221 - DNA, 33 bp, Homo sapien
ccaaggtccaaaatacagaggtataaaccactg

SEQ ID NO: 933222 - DNA, 33 bp, Homo sapien
ccaaggtccaaaatactgaggtataaaccactg

SEQ ID NO: 933223 - DNA, 33 bp, Homo sapien
gcatttgtaaaatgtcacattctggctgtattg

SEQ ID NO: 933224 - DNA, 33 bp, Homo sapien
gcatttgtaaaatgtcgcattctggctgtattg

SEQ ID NO: 933225 - DNA, 33 bp, Homo sapien
tctttatgctatcgacaagtggggcaactagag

SEQ ID NO: 933226 - DNA, 33 bp, Homo sapien
tctttatgctatcgaccagtggggcaactagag

SEQ ID NO: 933227 - DNA, 33 bp, Homo sapien
ttaaacatgggcattagaatttacaataagaac

SEQ ID NO: 933228 - DNA, 33 bp, Homo sapien
ttaaacatgggcattataatttacaataagaac

SEQ ID NO: 933229 - DNA, 33 bp, Homo sapien
ccagccctacgtatgtaaaaacaattccagaga

SEQ ID NO: 933230 - DNA, 33 bp, Homo sapien
ccagccctacgtatgtgaaaacaattccagaga

SEQ ID NO: 933231 - DNA, 33 bp, Homo sapien
gagagagaggtaaaaagactgcaatgattgctt

SEQ ID NO: 933232 - DNA, 33 bp, Homo sapien
gagagagaggtaaaaatactgcaatgattgctt

SEQ ID NO: 933233 - DNA, 33 bp, Homo sapien
acaccattaataaacaacttacaaacataattc

SEQ ID NO: 933234 - DNA, 33 bp, Homo sapien
acaccattaataaacagcttacaaacataattc

SEQ ID NO: 933235 - DNA, 33 bp, Homo sapien
ttaagtagcttgtataaagtcaaatagttatgg

SEQ ID NO: 933236 - DNA, 33 bp, Homo sapien
ttaagtagcttgtatagagtcaaatagttatgg

SEQ ID NO: 933237 - DNA, 33 bp, Homo sapien
aatggaatcaactccaaaaataaacaggaagct

SEQ ID NO: 933238 - DNA, 33 bp, Homo sapien
aatggaatcaactccagaaataaacaggaagct

SEQ ID NO: 933239 - DNA, 33 bp, Homo sapien
gaataagagagaagatgagtaagccaagaatgg

SEQ ID NO: 933240 - DNA, 33 bp, Homo sapien
gaataagagagaagattagtaagccaagaatgg

SEQ ID NO: 933241 - DNA, 33 bp, Homo sapien
tctctctcctgcaagaatctacctgagaccatg

SEQ ID NO: 933242 - DNA, 33 bp, Homo sapien
tctctctcctgcaagattctacctgagaccatg

SEQ ID NO: 933243 - DNA, 33 bp, Homo sapien
aatcatagaatttaaaacacgttggagtaagta

SEQ ID NO: 933244 - DNA, 33 bp, Homo sapien
aatcatagaatttaaaccacgttggagtaagta

SEQ ID NO: 933245 - DNA, 33 bp, Homo sapien
ttattgctgtgctagcccaattaaaagccttga

SEQ ID NO: 933246 - DNA, 33 bp, Homo sapien
ttattgctgtgctagctcaattaaaagccttga

SEQ ID NO: 933247 - DNA, 33 bp, Homo sapien
ttagctcaggtttaaaattctcctatttgctgt

SEQ ID NO: 933248 - DNA, 33 bp, Homo sapien
ttagctcaggtttaaagttctcctatttgctgt

SEQ ID NO: 933249 - DNA, 33 bp, Homo sapien
aggaaaatatcttggtcaagcagaccgaggccc

SEQ ID NO: 933250 - DNA, 33 bp, Homo sapien
aggaaaatatcttggtgaagcagaccgaggccc

SEQ ID NO: 933251 - DNA, 33 bp, Homo sapien
aggtttgttacaaggacatattgcatgacgctg

SEQ ID NO: 933252 - DNA, 33 bp, Homo sapien
aggtttgttacaaggatatattgcatgacgctg

SEQ ID NO: 933253 - DNA, 33 bp, Homo sapien
ctccacctcagatgtgacaacacaaagctcttt

SEQ ID NO: 933254 - DNA, 33 bp, Homo sapien
ctccacctcagatgtggcaacacaaagctcttt

SEQ ID NO: 933255 - DNA, 33 bp, Homo sapien
caaacataaataacaacgcttgggagcgatatg

SEQ ID NO: 933256 - DNA, 33 bp, Homo sapien
caaacataaataacaatgcttgggagcgatatg

SEQ ID NO: 933257 - DNA, 33 bp, Homo sapien
atgaaatttagtataaccatcaaacacagcaaa

SEQ ID NO: 933258 - DNA, 33 bp, Homo sapien
atgaaatttagtataatcatcaaacacagcaaa

SEQ ID NO: 933259 - DNA, 33 bp, Homo sapien
aatcagtaaaaagacacgtgacaaattatttgt

SEQ ID NO: 933260 - DNA, 33 bp, Homo sapien
aatcagtaaaaagacatgtgacaaattatttgt

SEQ ID NO: 933261 - DNA, 33 bp, Homo sapien
actgggttagtgaaaaaaagctcatgggttaca

SEQ ID NO: 933262 - DNA, 33 bp, Homo sapien
actgggttagtgaaaacaagctcatgggttaca

SEQ ID NO: 933263 - DNA, 33 bp, Homo sapien
ttgtaagtggctggagaagatgagggaatactc

SEQ ID NO: 933264 - DNA, 33 bp, Homo sapien
ttgtaagtggctggaggagatgagggaatactc

SEQ ID NO: 933265 - DNA, 33 bp, Homo sapien
aatgattggaaaggacaaaacaaaattctttgt

SEQ ID NO: 933266 - DNA, 33 bp, Homo sapien
aatgattggaaaggacgaaacaaaattctttgt

SEQ ID NO: 933267 - DNA, 33 bp, Homo sapien
ctcctctttattcttcaaagccaagttcagatg

SEQ ID NO: 933268 - DNA, 33 bp, Homo sapien
ctcctctttattcttcgaagccaagttcagatg

SEQ ID NO: 933269 - DNA, 33 bp, Homo sapien
atagtctttaacttgacctctgccttttaattt

SEQ ID NO: 933270 - DNA, 33 bp, Homo sapien
atagtctttaacttgagctctgccttttaattt

SEQ ID NO: 933271 - DNA, 33 bp, Homo sapien
cccacctcttctactccatccatagtctgtggt

SEQ ID NO: 933272 - DNA, 33 bp, Homo sapien
cccacctcttctactcgatccatagtctgtggt

SEQ ID NO: 933273 - DNA, 33 bp, Homo sapien
agttactacaaacgtacaagcacaaacacaagt

SEQ ID NO: 933274 - DNA, 33 bp, Homo sapien
agttactacaaacgtataagcacaaacacaagt

SEQ ID NO: 933275 - DNA, 33 bp, Homo sapien
tgttgattaactcccaagaaagtcagtacaacc

SEQ ID NO: 933276 - DNA, 33 bp, Homo sapien
tgttgattaactcccaggaaagtcagtacaacc

SEQ ID NO: 933277 - DNA, 33 bp, Homo sapien
ttattcctggcttatacgatgtagtcatttttg

SEQ ID NO: 933278 - DNA, 33 bp, Homo sapien
ttattcctggcttatatgatgtagtcatttttg

SEQ ID NO: 933279 - DNA, 33 bp, Homo sapien
cttatgtatacagataatacagaccacatcccc

SEQ ID NO: 933280 - DNA, 33 bp, Homo sapien
cttatgtatacagatactacagaccacatcccc

SEQ ID NO: 933281 - DNA, 33 bp, Homo sapien
ctgccaagtatgttcacgagaatgtgtctgact

SEQ ID NO: 933282 - DNA, 33 bp, Homo sapien
ctgccaagtatgttcatgagaatgtgtctgact

SEQ ID NO: 933283 - DNA, 33 bp, Homo sapien
gaagttttgattttaacgaagtctgacttaacc

SEQ ID NO: 933284 - DNA, 33 bp, Homo sapien
gaagttttgattttaatgaagtctgacttaacc

SEQ ID NO: 933285 - DNA, 33 bp, Homo sapien
ccagtttgcatgggaacagagttaaatttgggg

SEQ ID NO: 933286 - DNA, 33 bp, Homo sapien
ccagtttgcatgggaatagagttaaatttgggg

SEQ ID NO: 933287 - DNA, 33 bp, Homo sapien
ttagtgtcttacataactctgaaatttaccagc

SEQ ID NO: 933288 - DNA, 33 bp, Homo sapien
ttagtgtcttacataagtctgaaatttaccagc

SEQ ID NO: 933289 - DNA, 33 bp, Homo sapien
gtgcaagatgatattaacttggtctaaaggggt

SEQ ID NO: 933290 - DNA, 33 bp, Homo sapien
gtgcaagatgatattagcttggtctaaaggggt

SEQ ID NO: 933291 - DNA, 33 bp, Homo sapien
actttattttacagaaagtgaatttgggtccag

SEQ ID NO: 933292 - DNA, 33 bp, Homo sapien
actttattttacagaacgtgaatttgggtccag

SEQ ID NO: 933293 - DNA, 33 bp, Homo sapien
ttccctgcacactcaaggcaacaaaacccgcag

SEQ ID NO: 933294 - DNA, 33 bp, Homo sapien
ttccctgcacactcaatgcaacaaaacccgcag

SEQ ID NO: 933295 - DNA, 33 bp, Homo sapien
atataataaacattcaatacaaagtcgttcata

SEQ ID NO: 933296 - DNA, 33 bp, Homo sapien
atataataaacattcagtacaaagtcgttcata

SEQ ID NO: 933297 - DNA, 33 bp, Homo sapien
ttggagaagcagagacaagaacattaaggtttc

SEQ ID NO: 933298 - DNA, 33 bp, Homo sapien
ttggagaagcagagacgagaacattaaggtttc

SEQ ID NO: 933299 - DNA, 33 bp, Homo sapien
gtctctgcttctccaacatcccacagagcattg

SEQ ID NO: 933300 - DNA, 33 bp, Homo sapien
gtctctgcttctccaatatcccacagagcattg

SEQ ID NO: 933301 - DNA, 33 bp, Homo sapien
tagttcatactctgtgcagattcctatgctatg

SEQ ID NO: 933302 - DNA, 33 bp, Homo sapien
tagttcatactctgtgtagattcctatgctatg

SEQ ID NO: 933303 - DNA, 33 bp, Homo sapien
ttgagaaaatcaatacagatagcacattttcaa

SEQ ID NO: 933304 - DNA, 33 bp, Homo sapien
ttgagaaaatcaatacggatagcacattttcaa

SEQ ID NO: 933305 - DNA, 33 bp, Homo sapien
ttttatctaaacttccacaagctatctctaacc

SEQ ID NO: 933306 - DNA, 33 bp, Homo sapien
ttttatctaaacttcctcaagctatctctaacc

SEQ ID NO: 933307 - DNA, 33 bp, Homo sapien
tctgtggctaccatgacgaactgagttctgtct

SEQ ID NO: 933308 - DNA, 33 bp, Homo sapien
tctgtggctaccatgatgaactgagttctgtct

SEQ ID NO: 933309 - DNA, 33 bp, Homo sapien
agtggacctaaaacagcataaatgcaaagaaaa

SEQ ID NO: 933310 - DNA, 33 bp, Homo sapien
agtggacctaaaacaggataaatgcaaagaaaa

SEQ ID NO: 933311 - DNA, 33 bp, Homo sapien
ctacaaccaccaaaaaagatgcccatgttctaa

SEQ ID NO: 933312 - DNA, 33 bp, Homo sapien
ctacaaccaccaaaaatgatgcccatgttctaa

SEQ ID NO: 933313 - DNA, 33 bp, Homo sapien
agacttctgatctccacgaatttaaaataataa

SEQ ID NO: 933314 - DNA, 33 bp, Homo sapien
agacttctgatctccatgaatttaaaataataa

SEQ ID NO: 933315 - DNA, 33 bp, Homo sapien
aagtttaggcaggaaactgatacttatatacta

SEQ ID NO: 933316 - DNA, 33 bp, Homo sapien
aagtttaggcaggaaattgatacttatatacta

SEQ ID NO: 933317 - DNA, 33 bp, Homo sapien
acaacttctatgaatccatgctgtgttgttgtt

SEQ ID NO: 933318 - DNA, 33 bp, Homo sapien
acaacttctatgaatcgatgctgtgttgttgtt

SEQ ID NO: 933319 - DNA, 33 bp, Homo sapien
atcttctcagctattaactcaggatacgtctag

SEQ ID NO: 933320 - DNA, 33 bp, Homo sapien
atcttctcagctattagctcaggatacgtctag

SEQ ID NO: 933321 - DNA, 33 bp, Homo sapien
tggtcattaaaataacgcctgtgttacctatta

SEQ ID NO: 933322 - DNA, 33 bp, Homo sapien
tggtcattaaaataactcctgtgttacctatta

SEQ ID NO: 933323 - DNA, 33 bp, Homo sapien
cttcttgctgcagcataactctttgaccagaat

SEQ ID NO: 933324 - DNA, 33 bp, Homo sapien
cttcttgctgcagcattactctttgaccagaat

SEQ ID NO: 933325 - DNA, 33 bp, Homo sapien
cataaatctcaactccaagtccgtttcttggga

SEQ ID NO: 933326 - DNA, 33 bp, Homo sapien
cataaatctcaactccgagtccgtttcttggga

SEQ ID NO: 933327 - DNA, 33 bp, Homo sapien
gtgattccttgcattacgtctgggaattctgga

SEQ ID NO: 933328 - DNA, 33 bp, Homo sapien
gtgattccttgcattaggtctgggaattctgga

SEQ ID NO: 933329 - DNA, 33 bp, Homo sapien
acaaaacacgctgttcaaagagcatcaagtgag

SEQ ID NO: 933330 - DNA, 33 bp, Homo sapien
acaaaacacgctgttcgaagagcatcaagtgag

SEQ ID NO: 933331 - DNA, 33 bp, Homo sapien
tgacaaccacacatgaacccctgtgccaagatg

SEQ ID NO: 933332 - DNA, 33 bp, Homo sapien
tgacaaccacacatgaccccctgtgccaagatg

SEQ ID NO: 933333 - DNA, 33 bp, Homo sapien
agcttatgggacattaaggcatctatgtaaaac

SEQ ID NO: 933334 - DNA, 33 bp, Homo sapien
agcttatgggacattagggcatctatgtaaaac

SEQ ID NO: 933335 - DNA, 33 bp, Homo sapien
gtgaaccatgattctacgtggaaaggactgtaa

SEQ ID NO: 933336 - DNA, 33 bp, Homo sapien
gtgaaccatgattctatgtggaaaggactgtaa

SEQ ID NO: 933337 - DNA, 33 bp, Homo sapien
gcatctcgaaataccacctcaaatagtatacaa

SEQ ID NO: 933338 - DNA, 33 bp, Homo sapien
gcatctcgaaataccatctcaaatagtatacaa

SEQ ID NO: 933339 - DNA, 33 bp, Homo sapien
tgtgattatagccatcccctatgaagcgttgtt

SEQ ID NO: 933340 - DNA, 33 bp, Homo sapien
tgtgattatagccatctcctatgaagcgttgtt

SEQ ID NO: 933341 - DNA, 33 bp, Homo sapien
aacaaacatttgacaaacttccaccacgtgtca

SEQ ID NO: 933342 - DNA, 33 bp, Homo sapien
aacaaacatttgacaagcttccaccacgtgtca

SEQ ID NO: 933343 - DNA, 33 bp, Homo sapien
cccttcctttcagagcaaatacagagtgagaga

SEQ ID NO: 933344 - DNA, 33 bp, Homo sapien
cccttcctttcagagcgaatacagagtgagaga

SEQ ID NO: 933345 - DNA, 33 bp, Homo sapien
gtctcatttgatttccactggtcaatcttgttc

SEQ ID NO: 933346 - DNA, 33 bp, Homo sapien
gtctcatttgatttccgctggtcaatcttgttc

SEQ ID NO: 933347 - DNA, 33 bp, Homo sapien
gtctcaaagaattccaaaaaagtaccaagacac

SEQ ID NO: 933348 - DNA, 33 bp, Homo sapien
gtctcaaagaattccagaaaagtaccaagacac

SEQ ID NO: 933349 - DNA, 33 bp, Homo sapien
tggggatattttcttaccaccaatttttcagaa

SEQ ID NO: 933350 - DNA, 33 bp, Homo sapien
tggggatattttcttagcaccaatttttcagaa

SEQ ID NO: 933351 - DNA, 33 bp, Homo sapien
tcttgtcctggtagaaaagaataggtctcatga

SEQ ID NO: 933352 - DNA, 33 bp, Homo sapien
tcttgtcctggtagaagagaataggtctcatga

SEQ ID NO: 933353 - DNA, 33 bp, Homo sapien
aaaaagggagaggcaacgccaaaggctttttct

SEQ ID NO: 933354 - DNA, 33 bp, Homo sapien
aaaaagggagaggcaatgccaaaggctttttct

SEQ ID NO: 933355 - DNA, 33 bp, Homo sapien
tcacctcaaggatgacaagtccctcagaactgt

SEQ ID NO: 933356 - DNA, 33 bp, Homo sapien
tcacctcaaggatgacgagtccctcagaactgt

SEQ ID NO: 933357 - DNA, 33 bp, Homo sapien
tctaatattctggtcccgcctcactgtattctt

SEQ ID NO: 933358 - DNA, 33 bp, Homo sapien
tctaatattctggtcctgcctcactgtattctt

SEQ ID NO: 933359 - DNA, 33 bp, Homo sapien
atggcatgagagggtaaaggtcaaattatagtg

SEQ ID NO: 933360 - DNA, 33 bp, Homo sapien
atggcatgagagggtagaggtcaaattatagtg

SEQ ID NO: 933361 - DNA, 33 bp, Homo sapien
tgtatgcctttcatacaacggaggcttataggt

SEQ ID NO: 933362 - DNA, 33 bp, Homo sapien
tgtatgcctttcataccacggaggcttataggt

SEQ ID NO: 933363 - DNA, 33 bp, Homo sapien
aggaaagagctatgtgaaaaattaaacactgtg

SEQ ID NO: 933364 - DNA, 33 bp, Homo sapien
aggaaagagctatgtggaaaattaaacactgtg

SEQ ID NO: 933365 - DNA, 33 bp, Homo sapien
caacaaagactatcaacctcactctgttggaat

SEQ ID NO: 933366 - DNA, 33 bp, Homo sapien
caacaaagactatcaatctcactctgttggaat

SEQ ID NO: 933367 - DNA, 33 bp, Homo sapien
tccatttcttgcagacaacctctgattctctgg

SEQ ID NO: 933368 - DNA, 33 bp, Homo sapien
tccatttcttgcagacgacctctgattctctgg

SEQ ID NO: 933369 - DNA, 33 bp, Homo sapien
agggaaaagatggaaccgagctaagaactagca

SEQ ID NO: 933370 - DNA, 33 bp, Homo sapien
agggaaaagatggaactgagctaagaactagca

SEQ ID NO: 933371 - DNA, 33 bp, Homo sapien
gtggtttgactcacagaagaggggtgggaagat

SEQ ID NO: 933372 - DNA, 33 bp, Homo sapien
gtggtttgactcacagcagaggggtgggaagat

SEQ ID NO: 933373 - DNA, 33 bp, Homo sapien
gtggcagatccagcaacggtggtcgagggtaaa

SEQ ID NO: 933374 - DNA, 33 bp, Homo sapien
gtggcagatccagcaatggtggtcgagggtaaa

SEQ ID NO: 933375 - DNA, 33 bp, Homo sapien
gctccagggtgaatcacgaatagctctcacatg

SEQ ID NO: 933376 - DNA, 33 bp, Homo sapien
gctccagggtgaatcaggaatagctctcacatg

SEQ ID NO: 933377 - DNA, 33 bp, Homo sapien
gaagtgagggggaaagaattgagtggtttgttt

SEQ ID NO: 933378 - DNA, 33 bp, Homo sapien
gaagtgagggggaaaggattgagtggtttgttt

SEQ ID NO: 933379 - DNA, 33 bp, Homo sapien
ttttctccctctctgacattcttgaagctcaac

SEQ ID NO: 933380 - DNA, 33 bp, Homo sapien
ttttctccctctctgatattcttgaagctcaac

SEQ ID NO: 933381 - DNA, 33 bp, Homo sapien
tatctgaatcatcaagaaagcttgtcaaactct

SEQ ID NO: 933382 - DNA, 33 bp, Homo sapien
tatctgaatcatcaaggaagcttgtcaaactct

SEQ ID NO: 933383 - DNA, 33 bp, Homo sapien
tcatcagcactgctaagacaaagtgcagacagt

SEQ ID NO: 933384 - DNA, 33 bp, Homo sapien
tcatcagcactgctaatacaaagtgcagacagt

SEQ ID NO: 933385 - DNA, 33 bp, Homo sapien
ggctttgggtgacttaaaactgagtctgaatcc

SEQ ID NO: 933386 - DNA, 33 bp, Homo sapien
ggctttgggtgacttagaactgagtctgaatcc

SEQ ID NO: 933387 - DNA, 33 bp, Homo sapien
tcttcaaatgagaaagaatgactcaggttttca

SEQ ID NO: 933388 - DNA, 33 bp, Homo sapien
tcttcaaatgagaaagtatgactcaggttttca

SEQ ID NO: 933389 - DNA, 33 bp, Homo sapien
aaagcctacaaggccccacttggtctctcctgt

SEQ ID NO: 933390 - DNA, 33 bp, Homo sapien
aaagcctacaaggccctacttggtctctcctgt

SEQ ID NO: 933391 - DNA, 33 bp, Homo sapien
aacattagaaaagttacatgacctgcttgaagc

SEQ ID NO: 933392 - DNA, 33 bp, Homo sapien
aacattagaaaagttagatgacctgcttgaagc

SEQ ID NO: 933393 - DNA, 33 bp, Homo sapien
atctgattgtttcaccggagctccccttttcta

SEQ ID NO: 933394 - DNA, 33 bp, Homo sapien
atctgattgtttcacctgagctccccttttcta

SEQ ID NO: 933395 - DNA, 33 bp, Homo sapien
gttgttctgggtcacaatgtaaaatttatgtct

SEQ ID NO: 933396 - DNA, 33 bp, Homo sapien
gttgttctgggtcacagtgtaaaatttatgtct

SEQ ID NO: 933397 - DNA, 33 bp, Homo sapien
acctcccctattacaacaacaataccttgcagt

SEQ ID NO: 933398 - DNA, 33 bp, Homo sapien
acctcccctattacaataacaataccttgcagt

SEQ ID NO: 933399 - DNA, 33 bp, Homo sapien
tttgtgtctcctcttcactttctaaatgagatg

SEQ ID NO: 933400 - DNA, 33 bp, Homo sapien
tttgtgtctcctcttccctttctaaatgagatg

SEQ ID NO: 933401 - DNA, 33 bp, Homo sapien
atccatacaacagaaacactccttttcatcata

SEQ ID NO: 933402 - DNA, 33 bp, Homo sapien
atccatacaacagaaatactccttttcatcata

SEQ ID NO: 933403 - DNA, 33 bp, Homo sapien
atctcaaagtcacgtaactaataagtagaggac

SEQ ID NO: 933404 - DNA, 33 bp, Homo sapien
atctcaaagtcacgtagctaataagtagaggac

SEQ ID NO: 933405 - DNA, 33 bp, Homo sapien
ccagctgcctctgaagaatgataatatgagaag

SEQ ID NO: 933406 - DNA, 33 bp, Homo sapien
ccagctgcctctgaaggatgataatatgagaag

SEQ ID NO: 933407 - DNA, 33 bp, Homo sapien
atggtagtaatggctgacaatggattcatctgt

SEQ ID NO: 933408 - DNA, 33 bp, Homo sapien
atggtagtaatggctggcaatggattcatctgt

SEQ ID NO: 933409 - DNA, 33 bp, Homo sapien
ctttccctgctttaacaggtggctaagctagcc

SEQ ID NO: 933410 - DNA, 33 bp, Homo sapien
ctttccctgctttaacgggtggctaagctagcc

SEQ ID NO: 933411 - DNA, 33 bp, Homo sapien
gttacttgtgtacccacgttcattaacgatgaa

SEQ ID NO: 933412 - DNA, 33 bp, Homo sapien
gttacttgtgtacccatgttcattaacgatgaa

SEQ ID NO: 933413 - DNA, 33 bp, Homo sapien
tcaaaaagccagctaacatagacataagctaaa

SEQ ID NO: 933414 - DNA, 33 bp, Homo sapien
tcaaaaagccagctaatatagacataagctaaa

SEQ ID NO: 933415 - DNA, 33 bp, Homo sapien
gcaacaaaccatgaagaatcaggaaacgggaat

SEQ ID NO: 933416 - DNA, 33 bp, Homo sapien
gcaacaaaccatgaagcatcaggaaacgggaat

SEQ ID NO: 933417 - DNA, 33 bp, Homo sapien
aatgctgcattaccagcacttaagtcaggtgat

SEQ ID NO: 933418 - DNA, 33 bp, Homo sapien
aatgctgcattaccagtacttaagtcaggtgat

SEQ ID NO: 933419 - DNA, 33 bp, Homo sapien
gaagccctgttttagccgaaaggagcagtgcta

SEQ ID NO: 933420 - DNA, 33 bp, Homo sapien
gaagccctgttttagctgaaaggagcagtgcta

SEQ ID NO: 933421 - DNA, 33 bp, Homo sapien
ggtggttcgtctgtaactggctctgtcttgatg

SEQ ID NO: 933422 - DNA, 33 bp, Homo sapien
ggtggttcgtctgtaattggctctgtcttgatg

SEQ ID NO: 933423 - DNA, 33 bp, Homo sapien
atgcaaactggggttcacatgaataaaataatt

SEQ ID NO: 933424 - DNA, 33 bp, Homo sapien
atgcaaactggggttcccatgaataaaataatt

SEQ ID NO: 933425 - DNA, 33 bp, Homo sapien
ctgctcagaagaaagaaaacagagtgtcagcag

SEQ ID NO: 933426 - DNA, 33 bp, Homo sapien
ctgctcagaagaaagacaacagagtgtcagcag

SEQ ID NO: 933427 - DNA, 33 bp, Homo sapien
tgaaaggtgaaactgacattctagcccatgttc

SEQ ID NO: 933428 - DNA, 33 bp, Homo sapien
tgaaaggtgaaactgatattctagcccatgttc

SEQ ID NO: 933429 - DNA, 33 bp, Homo sapien
tgtgagcctatctttacctagctttagaggctg

SEQ ID NO: 933430 - DNA, 33 bp, Homo sapien
tgtgagcctatctttatctagctttagaggctg

SEQ ID NO: 933431 - DNA, 33 bp, Homo sapien
gcctcttttgtgcacacgctaacagaagagtgc

SEQ ID NO: 933432 - DNA, 33 bp, Homo sapien
gcctcttttgtgcacaggctaacagaagagtgc

SEQ ID NO: 933433 - DNA, 33 bp, Homo sapien
gtgagcatttctcaggcaggactgtcattagat

SEQ ID NO: 933434 - DNA, 33 bp, Homo sapien
gtgagcatttctcaggtaggactgtcattagat

SEQ ID NO: 933435 - DNA, 33 bp, Homo sapien
tctagactctacccccacaatcttggatgggag

SEQ ID NO: 933436 - DNA, 33 bp, Homo sapien
tctagactctacccccgcaatcttggatgggag

SEQ ID NO: 933437 - DNA, 33 bp, Homo sapien
aggcatatagtctacaacagctctgtagatcct

SEQ ID NO: 933438 - DNA, 33 bp, Homo sapien
aggcatatagtctacatcagctctgtagatcct

SEQ ID NO: 933439 - DNA, 33 bp, Homo sapien
aggcagattggatttcccattttctagtggtgt

SEQ ID NO: 933440 - DNA, 33 bp, Homo sapien
aggcagattggatttctcattttctagtggtgt

SEQ ID NO: 933441 - DNA, 33 bp, Homo sapien
tcctgagcaggcctcaaagctcttggattctgg

SEQ ID NO: 933442 - DNA, 33 bp, Homo sapien
tcctgagcaggcctcatagctcttggattctgg

SEQ ID NO: 933443 - DNA, 33 bp, Homo sapien
taggtcttctggctcacaaaagaggtatttaaa

SEQ ID NO: 933444 - DNA, 33 bp, Homo sapien
taggtcttctggctcataaaagaggtatttaaa

SEQ ID NO: 933445 - DNA, 33 bp, Homo sapien
tatatctaagtggctacgaaaacaaactgctac

SEQ ID NO: 933446 - DNA, 33 bp, Homo sapien
tatatctaagtggctatgaaaacaaactgctac

SEQ ID NO: 933447 - DNA, 33 bp, Homo sapien
agctcaaagcctactacgactacctaaaacatg

SEQ ID NO: 933448 - DNA, 33 bp, Homo sapien
agctcaaagcctactaggactacctaaaacatg

SEQ ID NO: 933449 - DNA, 33 bp, Homo sapien
cccccagactcaaataccacaacatcaggcagg

SEQ ID NO: 933450 - DNA, 33 bp, Homo sapien
cccccagactcaaatatcacaacatcaggcagg

SEQ ID NO: 933451 - DNA, 33 bp, Homo sapien
tctccttctgtctttcaaacacgcagtatcaac

SEQ ID NO: 933452 - DNA, 33 bp, Homo sapien
tctccttctgtctttccaacacgcagtatcaac

SEQ ID NO: 933453 - DNA, 33 bp, Homo sapien
taaatcaatggggttgaaggtgggagccaccaa

SEQ ID NO: 933454 - DNA, 33 bp, Homo sapien
taaatcaatggggttgcaggtgggagccaccaa

SEQ ID NO: 933455 - DNA, 33 bp, Homo sapien
acaaatattcctgagacctgggtactgaggtac

SEQ ID NO: 933456 - DNA, 33 bp, Homo sapien
acaaatattcctgagagctgggtactgaggtac

SEQ ID NO: 933457 - DNA, 33 bp, Homo sapien
aggattcaggtaagaactgaagaaatatttcag

SEQ ID NO: 933458 - DNA, 33 bp, Homo sapien
aggattcaggtaagaattgaagaaatatttcag

SEQ ID NO: 933459 - DNA, 33 bp, Homo sapien
tctcctctccagctccgacattgtgctgtaaac

SEQ ID NO: 933460 - DNA, 33 bp, Homo sapien
tctcctctccagctcctacattgtgctgtaaac

SEQ ID NO: 933461 - DNA, 33 bp, Homo sapien
ttattttactcctccaggctcttgactttctac

SEQ ID NO: 933462 - DNA, 33 bp, Homo sapien
ttattttactcctccatgctcttgactttctac

SEQ ID NO: 933463 - DNA, 33 bp, Homo sapien
acatcaattgtatgacaccaggatcatatgctt

SEQ ID NO: 933464 - DNA, 33 bp, Homo sapien
acatcaattgtatgacgccaggatcatatgctt

SEQ ID NO: 933465 - DNA, 33 bp, Homo sapien
ccagagactttccggaacttgcaccataatggt

SEQ ID NO: 933466 - DNA, 33 bp, Homo sapien
ccagagactttccggaccttgcaccataatggt

SEQ ID NO: 933467 - DNA, 33 bp, Homo sapien; identical to SEQ ID NO: 933465

SEQ ID NO: 933468 - DNA, 33 bp, Homo sapien; identical to SEQ ID NO: 933466

SEQ ID NO: 933469 - DNA, 33 bp, Homo sapien
atggaaggaaaaaggaccaataaatggcaattc

SEQ ID NO: 933470 - DNA, 33 bp, Homo sapien
atggaaggaaaaaggatcaataaatggcaattc

SEQ ID NO: 933471 - DNA, 33 bp, Homo sapien
ctaaagatagtctatgcaaagaactccatataa

SEQ ID NO: 933472 - DNA, 33 bp, Homo sapien
ctaaagatagtctatgtaaagaactccatataa

SEQ ID NO: 933473 - DNA, 33 bp, Homo sapien
cctattggttttatgcagagaagaggaaaaagt

SEQ ID NO: 933474 - DNA, 33 bp, Homo sapien
cctattggttttatgcggagaagaggaaaaagt

SEQ ID NO: 933475 - DNA, 33 bp, Homo sapien
acattagcttaggctacaactcaaaaccaagct

SEQ ID NO: 933476 - DNA, 33 bp, Homo sapien
acattagcttaggctagaactcaaaaccaagct

SEQ ID NO: 933477 - DNA, 33 bp, Homo sapien
ttttatggatttatggccacaaagaaagtataa

SEQ ID NO: 933478 - DNA, 33 bp, Homo sapien
ttttatggatttatggtcacaaagaaagtataa

SEQ ID NO: 933479 - DNA, 33 bp, Homo sapien
caggcttaccttgtaactctccaactggggctt

SEQ ID NO: 933480 - DNA, 33 bp, Homo sapien
caggcttaccttgtaattctccaactggggctt

SEQ ID NO: 933481 - DNA, 33 bp, Homo sapien
atctctgcaaagcatcgctgtgggttatgctct

SEQ ID NO: 933482 - DNA, 33 bp, Homo sapien
atctctgcaaagcatctctgtgggttatgctct

SEQ ID NO: 933483 - DNA, 33 bp, Homo sapien
gttctctgggccctgcggcaaaacatagatcat

SEQ ID NO: 933484 - DNA, 33 bp, Homo sapien
gttctctgggccctgctgcaaaacatagatcat

SEQ ID NO: 933485 - DNA, 33 bp, Homo sapien
ttaaatgatcagttccagcccataaaatctcag

SEQ ID NO: 933486 - DNA, 33 bp, Homo sapien
ttaaatgatcagttccggcccataaaatctcag

SEQ ID NO: 933487 - DNA, 33 bp, Homo sapien
aaaaagagttgtgcgtaaagatgaaagattgaa

SEQ ID NO: 933488 - DNA, 33 bp, Homo sapien
aaaaagagttgtgcgtgaagatgaaagattgaa

SEQ ID NO: 933489 - DNA, 33 bp, Homo sapien
tgggtatgttaataagaatcttgcgaaaaaaag

SEQ ID NO: 933490 - DNA, 33 bp, Homo sapien
tgggtatgttaataagcatcttgcgaaaaaaag

SEQ ID NO: 933491 - DNA, 33 bp, Homo sapien
cttctgagttaataaacttgcaattgtaaccta

SEQ ID NO: 933492 - DNA, 33 bp, Homo sapien
cttctgagttaataaatttgcaattgtaaccta

SEQ ID NO: 933493 - DNA, 33 bp, Homo sapien
atgtccccagaaagaccgtctcaaaaacaaggg

SEQ ID NO: 933494 - DNA, 33 bp, Homo sapien
atgtccccagaaagacggtctcaaaaacaaggg

SEQ ID NO: 933495 - DNA, 33 bp, Homo sapien
caaagatctgaaataacggaaataatagaacat

SEQ ID NO: 933496 - DNA, 33 bp, Homo sapien
caaagatctgaaataatggaaataatagaacat

SEQ ID NO: 933497 - DNA, 33 bp, Homo sapien
taaagtaagtgtccaaactatatgaatcatctt

SEQ ID NO: 933498 - DNA, 33 bp, Homo sapien
taaagtaagtgtccaagctatatgaatcatctt

SEQ ID NO: 933499 - DNA, 33 bp, Homo sapien
ttttacttgcccctctaactagacctcctgcgt

SEQ ID NO: 933500 - DNA, 33 bp, Homo sapien
ttttacttgcccctctcactagacctcctgcgt

SEQ ID NO: 933501 - DNA, 33 bp, Homo sapien
agatttttcactcccacgagtgccaagacggtg

SEQ ID NO: 933502 - DNA, 33 bp, Homo sapien
agatttttcactcccatgagtgccaagacggtg

SEQ ID NO: 933503 - DNA, 33 bp, Homo sapien
tattagttcctagtaacagaaatgcaattcaga

SEQ ID NO: 933504 - DNA, 33 bp, Homo sapien
tattagttcctagtaatagaaatgcaattcaga

SEQ ID NO: 933505 - DNA, 33 bp, Homo sapien
aaacgctggatctcaaagtttagataagtttcc

SEQ ID NO: 933506 - DNA, 33 bp, Homo sapien
aaacgctggatctcaacgtttagataagtttcc

SEQ ID NO: 933507 - DNA, 33 bp, Homo sapien
cagaaatctctgcctaacattattcatgtgtgg

SEQ ID NO: 933508 - DNA, 33 bp, Homo sapien
cagaaatctctgcctagcattattcatgtgtgg

SEQ ID NO: 933509 - DNA, 33 bp, Homo sapien
ttcatcttctaactgcaaggttgtatcctttga

SEQ ID NO: 933510 - DNA, 33 bp, Homo sapien
ttcatcttctaactgccaggttgtatcctttga

SEQ ID NO: 933511 - DNA, 33 bp, Homo sapien
atatccaaaagaaccaaaatcaggatcttgaaa

SEQ ID NO: 933512 - DNA, 33 bp, Homo sapien
atatccaaaagaaccacaatcaggatcttgaaa

SEQ ID NO: 933513 - DNA, 33 bp, Homo sapien
gaagacatacaaatacgcaacagaaaaaggcaa

SEQ ID NO: 933514 - DNA, 33 bp, Homo sapien
gaagacatacaaatactcaacagaaaaaggcaa

SEQ ID NO: 933515 - DNA, 33 bp, Homo sapien
ccattcccaactgttgaatttgttttctagact

SEQ ID NO: 933516 - DNA, 33 bp, Homo sapien
ccattcccaactgttggatttgttttctagact

SEQ ID NO: 933517 - DNA, 33 bp, Homo sapien
atgggctgaccacatgacaagggctgactatgt

SEQ ID NO: 933518 - DNA, 33 bp, Homo sapien
atgggctgaccacatggcaagggctgactatgt

SEQ ID NO: 933519 - DNA, 33 bp, Homo sapien
gcccagaagtaggaacactgactgtatgaagaa

SEQ ID NO: 933520 - DNA, 33 bp, Homo sapien
gcccagaagtaggaaccctgactgtatgaagaa

SEQ ID NO: 933521 - DNA, 33 bp, Homo sapien
ctgaattccttcaacacgaaacccagagttaga

SEQ ID NO: 933522 - DNA, 33 bp, Homo sapien
ctgaattccttcaacatgaaacccagagttaga

SEQ ID NO: 933523 - DNA, 33 bp, Homo sapien
cagtctagaatttcaaacctggagacataattc

SEQ ID NO: 933524 - DNA, 33 bp, Homo sapien
cagtctagaatttcaagcctggagacataattc

SEQ ID NO: 933525 - DNA, 33 bp, Homo sapien
taaatgattatgaaaaatacgaatcagccttca

SEQ ID NO: 933526 - DNA, 33 bp, Homo sapien
taaatgattatgaaaagtacgaatcagccttca

SEQ ID NO: 933527 - DNA, 33 bp, Homo sapien
actgctaaaagataaactgaggcagattaattt

SEQ ID NO: 933528 - DNA, 33 bp, Homo sapien
actgctaaaagataaattgaggcagattaattt

SEQ ID NO: 933529 - DNA, 33 bp, Homo sapien
actacccggcatggataactcacccactaacga

SEQ ID NO: 933530 - DNA, 33 bp, Homo sapien
actacccggcatggatgactcacccactaacga

SEQ ID NO: 933531 - DNA, 33 bp, Homo sapien
ttcactctagtagttaaatatgaagagcttagc

SEQ ID NO: 933532 - DNA, 33 bp, Homo sapien
ttcactctagtagttacatatgaagagcttagc

SEQ ID NO: 933533 - DNA, 33 bp, Homo sapien
ataaaataaaacaaaacaaatgaatgtgatgat

SEQ ID NO: 933534 - DNA, 33 bp, Homo sapien
ataaaataaaacaaaataaatgaatgtgatgat

SEQ ID NO: 933535 - DNA, 33 bp, Homo sapien
gcttgaataaactcttgaaactggattctggtc

SEQ ID NO: 933536 - DNA, 33 bp, Homo sapien
gcttgaataaactctttaaactggattctggtc

SEQ ID NO: 933537 - DNA, 33 bp, Homo sapien
taaaccaaaccacataaaatcaaatagatcaaa

SEQ ID NO: 933538 - DNA, 33 bp, Homo sapien
taaaccaaaccacatacaatcaaatagatcaaa

SEQ ID NO: 933539 - DNA, 33 bp, Homo sapien
atagttagctctaaaaattgtcttaagtagttg

SEQ ID NO: 933540 - DNA, 33 bp, Homo sapien
atagttagctctaaaagttgtcttaagtagttg

SEQ ID NO: 933541 - DNA, 33 bp, Homo sapien
tgtactgtcatgaagaagtgtaccttaggatag

SEQ ID NO: 933542 - DNA, 33 bp, Homo sapien
tgtactgtcatgaagaggtgtaccttaggatag

SEQ ID NO: 933543 - DNA, 33 bp, Homo sapien
ctcacagcaaaacttacatccttcgtttatcat

SEQ ID NO: 933544 - DNA, 33 bp, Homo sapien
ctcacagcaaaacttagatccttcgtttatcat

SEQ ID NO: 933545 - DNA, 33 bp, Homo sapien
agaaacctggctaaaacgagagtgtggagatcc

SEQ ID NO: 933546 - DNA, 33 bp, Homo sapien
agaaacctggctaaaatgagagtgtggagatcc

SEQ ID NO: 933547 - DNA, 33 bp, Homo sapien
attaattctgattgacaaatacaaagatatttg

SEQ ID NO: 933548 - DNA, 33 bp, Homo sapien
attaattctgattgacgaatacaaagatatttg

SEQ ID NO: 933549 - DNA, 33 bp, Homo sapien
gataattgacgttatccaagtagcagaatatct

SEQ ID NO: 933550 - DNA, 33 bp, Homo sapien
gataattgacgttatcgaagtagcagaatatct

SEQ ID NO: 933551 - DNA, 33 bp, Homo sapien
atgtatttgcctatccagatatttcatttaagt

SEQ ID NO: 933552 - DNA, 33 bp, Homo sapien
atgtatttgcctatccggatatttcatttaagt

SEQ ID NO: 933553 - DNA, 33 bp, Homo sapien
atgtctatgccaattacgcactctggccctgag

SEQ ID NO: 933554 - DNA, 33 bp, Homo sapien
atgtctatgccaattatgcactctggccctgag

SEQ ID NO: 933555 - DNA, 33 bp, Homo sapien
gactagtagatgtcgcagaaataagaagcaaaa

SEQ ID NO: 933556 - DNA, 33 bp, Homo sapien
gactagtagatgtcgcggaaataagaagcaaaa

SEQ ID NO: 933557 - DNA, 33 bp, Homo sapien
catctgcatagggtacaaaaaactagttagggc

SEQ ID NO: 933558 - DNA, 33 bp, Homo sapien
catctgcatagggtacgaaaaactagttagggc

SEQ ID NO: 933559 - DNA, 33 bp, Homo sapien
ttcctcatataggtcactctatcgttatcctta

SEQ ID NO: 933560 - DNA, 33 bp, Homo sapien
ttcctcatataggtcattctatcgttatcctta

SEQ ID NO: 933561 - DNA, 33 bp, Homo sapien
agagttgatcctggagacgaaggtaaatgctgg

SEQ ID NO: 933562 - DNA, 33 bp, Homo sapien
agagttgatcctggaggcgaaggtaaatgctgg

SEQ ID NO: 933563 - DNA, 33 bp, Homo sapien
agtaatatacttttaccaagtcatctgcttcta

SEQ ID NO: 933564 - DNA, 33 bp, Homo sapien
agtaatatacttttacgaagtcatctgcttcta

SEQ ID NO: 933565 - DNA, 33 bp, Homo sapien
gggaaaggatagtctccctataaatggtgctgg

SEQ ID NO: 933566 - DNA, 33 bp, Homo sapien
gggaaaggatagtctctctataaatggtgctgg

SEQ ID NO: 933567 - DNA, 33 bp, Homo sapien
ttggatgaccaaaaatcatttattcagaccaaa

SEQ ID NO: 933568 - DNA, 33 bp, Homo sapien
ttggatgaccaaaaattatttattcagaccaaa

SEQ ID NO: 933569 - DNA, 33 bp, Homo sapien
gcattttagaaggtaactggacatatcagctgt

SEQ ID NO: 933570 - DNA, 33 bp, Homo sapien
gcattttagaaggtaattggacatatcagctgt

SEQ ID NO: 933571 - DNA, 33 bp, Homo sapien
catttaagactactgactcaaagactatagaaa

SEQ ID NO: 933572 - DNA, 33 bp, Homo sapien
catttaagactactgattcaaagactatagaaa

SEQ ID NO: 933573 - DNA, 33 bp, Homo sapien
gaacagggactctccaaaaggccagagttcctg

SEQ ID NO: 933574 - DNA, 33 bp, Homo sapien
gaacagggactctccagaaggccagagttcctg

SEQ ID NO: 933575 - DNA, 33 bp, Homo sapien
ctttctttctcttcataaaattaatcagtgttt

SEQ ID NO: 933576 - DNA, 33 bp, Homo sapien
ctttctttctcttcatgaaattaatcagtgttt

SEQ ID NO: 933577 - DNA, 33 bp, Homo sapien
cttttgattgaaacacaccttaaactaatattg

SEQ ID NO: 933578 - DNA, 33 bp, Homo sapien
cttttgattgaaacacgccttaaactaatattg

SEQ ID NO: 933579 - DNA, 33 bp, Homo sapien
ctcctctcatgtttcaccaaagatcttcccctt

SEQ ID NO: 933580 - DNA, 33 bp, Homo sapien
ctcctctcatgtttcatcaaagatcttcccctt

SEQ ID NO: 933581 - DNA, 33 bp, Homo sapien
gtgttctaaactctgacgactaatatttctgga

SEQ ID NO: 933582 - DNA, 33 bp, Homo sapien
gtgttctaaactctgatgactaatatttctgga

SEQ ID NO: 933583 - DNA, 33 bp, Homo sapien
agggccattcttctacagacatatgtgctaaat

SEQ ID NO: 933584 - DNA, 33 bp, Homo sapien
agggccattcttctacggacatatgtgctaaat

SEQ ID NO: 933585 - DNA, 33 bp, Homo sapien
acctaaaagagaaattcaaatggaaagcttact

SEQ ID NO: 933586 - DNA, 33 bp, Homo sapien
acctaaaagagaaattgaaatggaaagcttact

SEQ ID NO: 933587 - DNA, 33 bp, Homo sapien
tcatggtggtatcattaaagtggttataggcat

SEQ ID NO: 933588 - DNA, 33 bp, Homo sapien
tcatggtggtatcattgaagtggttataggcat

SEQ ID NO: 933589 - DNA, 33 bp, Homo sapien
atacaagagttttcaaataaatttcactgccca

SEQ ID NO: 933590 - DNA, 33 bp, Homo sapien
atacaagagttttcaagtaaatttcactgccca

SEQ ID NO: 933591 - DNA, 33 bp, Homo sapien
ttcttaatcttatttgcaggcaattctggctgc

SEQ ID NO: 933592 - DNA, 33 bp, Homo sapien
ttcttaatcttatttgtaggcaattctggctgc

SEQ ID NO: 933593 - DNA, 33 bp, Homo sapien
tgatctgtgtctaccacaaaattgcaggtgaat

SEQ ID NO: 933594 - DNA, 33 bp, Homo sapien
tgatctgtgtctaccataaaattgcaggtgaat

SEQ ID NO: 933595 - DNA, 33 bp, Homo sapien
gtgctgtgcctgtggcccaagaaaatgccccag

SEQ ID NO: 933596 - DNA, 33 bp, Homo sapien
gtgctgtgcctgtggctcaagaaaatgccccag

SEQ ID NO: 933597 - DNA, 33 bp, Homo sapien
tttcttgaatatttcccatatcctgggcacttt

SEQ ID NO: 933598 - DNA, 33 bp, Homo sapien
tttcttgaatatttcctatatcctgggcacttt

SEQ ID NO: 933599 - DNA, 33 bp, Homo sapien
taatcaaatatctgtaagcaaatgttcctcata

SEQ ID NO: 933600 - DNA, 33 bp, Homo sapien
taatcaaatatctgtaggcaaatgttcctcata

SEQ ID NO: 933601 - DNA, 33 bp, Homo sapien
aattataaaattctacagcttactttaaggcca

SEQ ID NO: 933602 - DNA, 33 bp, Homo sapien
aattataaaattctactgcttactttaaggcca

SEQ ID NO: 933603 - DNA, 33 bp, Homo sapien
atatgagaagataacaaccctcattggtaatca

SEQ ID NO: 933604 - DNA, 33 bp, Homo sapien
atatgagaagataacagccctcattggtaatca

SEQ ID NO: 933605 - DNA, 33 bp, Homo sapien
gaaaataaaaaaggcccgcgcataattttcatg

SEQ ID NO: 933606 - DNA, 33 bp, Homo sapien
gaaaataaaaaaggcctgcgcataattttcatg

SEQ ID NO: 933607 - DNA, 33 bp, Homo sapien
tctatagtggcagataccatgaaaattatgcgc

SEQ ID NO: 933608 - DNA, 33 bp, Homo sapien
tctatagtggcagatatcatgaaaattatgcgc

SEQ ID NO: 933609 - DNA, 33 bp, Homo sapien
tcaaagagttggacaccactggctaacataaac

SEQ ID NO: 933610 - DNA, 33 bp, Homo sapien
tcaaagagttggacacgactggctaacataaac

SEQ ID NO: 933611 - DNA, 33 bp, Homo sapien
agtttgtatccacggcagaattgggagaattga

SEQ ID NO: 933612 - DNA, 33 bp, Homo sapien
agtttgtatccacggcggaattgggagaattga

SEQ ID NO: 933613 - DNA, 33 bp, Homo sapien
ttctaccttttggagagtcatagctattttgca

SEQ ID NO: 933614 - DNA, 33 bp, Homo sapien
ttctaccttttggagattcatagctattttgca

SEQ ID NO: 933615 - DNA, 33 bp, Homo sapien
tctttggaatgtgcacaatttgagtaacctaag

SEQ ID NO: 933616 - DNA, 33 bp, Homo sapien
tctttggaatgtgcaccatttgagtaacctaag

SEQ ID NO: 933617 - DNA, 33 bp, Homo sapien
tctgagaaagcagaaaagcattgatctgaggca

SEQ ID NO: 933618 - DNA, 33 bp, Homo sapien
tctgagaaagcagaaaggcattgatctgaggca

SEQ ID NO: 933619 - DNA, 33 bp, Homo sapien
agaccatgaattaacaacgatacctatctgtct

SEQ ID NO: 933620 - DNA, 33 bp, Homo sapien
agaccatgaattaacagcgatacctatctgtct

SEQ ID NO: 933621 - DNA, 33 bp, Homo sapien
ttccttattgctaccacgctaattcagctccca

SEQ ID NO: 933622 - DNA, 33 bp, Homo sapien
ttccttattgctaccatgctaattcagctccca

SEQ ID NO: 933623 - DNA, 33 bp, Homo sapien
tggcatctctgaagtgaattacagtaaagctgg

SEQ ID NO: 933624 - DNA, 33 bp, Homo sapien
tggcatctctgaagtggattacagtaaagctgg

SEQ ID NO: 933625 - DNA, 33 bp, Homo sapien
tggagattgtgagaataacatagaaataggtac

SEQ ID NO: 933626 - DNA, 33 bp, Homo sapien
tggagattgtgagaatgacatagaaataggtac

SEQ ID NO: 933627 - DNA, 33 bp, Homo sapien
attccttttttttcaccgaatgggactagactt

SEQ ID NO: 933628 - DNA, 33 bp, Homo sapien
attccttttttttcactgaatgggactagactt

SEQ ID NO: 933629 - DNA, 33 bp, Homo sapien
gtgaaagagaaaatacagattcacttcactaag

SEQ ID NO: 933630 - DNA, 33 bp, Homo sapien
gtgaaagagaaaatacggattcacttcactaag

SEQ ID NO: 933631 - DNA, 33 bp, Homo sapien
gttcattattaatcaacttgagcagctttcatt

SEQ ID NO: 933632 - DNA, 33 bp, Homo sapien
gttcattattaatcaatttgagcagctttcatt

SEQ ID NO: 933633 - DNA, 33 bp, Homo sapien
acacaaaaattagccaactatgcacacgtcctg

SEQ ID NO: 933634 - DNA, 33 bp, Homo sapien
acacaaaaattagccatctatgcacacgtcctg

SEQ ID NO: 933635 - DNA, 33 bp, Homo sapien
tgcaaggcctctgccaataggtcaagggctgcc

SEQ ID NO: 933636 - DNA, 33 bp, Homo sapien
tgcaaggcctctgccagtaggtcaagggctgcc

SEQ ID NO: 933637 - DNA, 33 bp, Homo sapien
tcgggattcagagagaactaatcagtgtcttcc

SEQ ID NO: 933638 - DNA, 33 bp, Homo sapien
tcgggattcagagagagctaatcagtgtcttcc

SEQ ID NO: 933639 - DNA, 33 bp, Homo sapien
caaaacttatactgaaaaatgagttctggattg

SEQ ID NO: 933640 - DNA, 33 bp, Homo sapien
caaaacttatactgaacaatgagttctggattg

SEQ ID NO: 933641 - DNA, 33 bp, Homo sapien
aactggaggtatctatcacagctggaaatatgt

SEQ ID NO: 933642 - DNA, 33 bp, Homo sapien
aactggaggtatctattacagctggaaatatgt

SEQ ID NO: 933643 - DNA, 33 bp, Homo sapien
cctgtagccaccacggcatgagttgatgtctga

SEQ ID NO: 933644 - DNA, 33 bp, Homo sapien
cctgtagccaccacgggatgagttgatgtctga

SEQ ID NO: 933645 - DNA, 33 bp, Homo sapien
tcctcatcctatcaaaatctgcactgaggatct

SEQ ID NO: 933646 - DNA, 33 bp, Homo sapien
tcctcatcctatcaaagtctgcactgaggatct

SEQ ID NO: 933647 - DNA, 33 bp, Homo sapien
ctctacaacctagagcacctccttaaccttcag

SEQ ID NO: 933648 - DNA, 33 bp, Homo sapien
ctctacaacctagagcgcctccttaaccttcag

SEQ ID NO: 933649 - DNA, 33 bp, Homo sapien
gccagttctggacttgcaaccaccaggatcgtt

SEQ ID NO: 933650 - DNA, 33 bp, Homo sapien
gccagttctggacttggaaccaccaggatcgtt

SEQ ID NO: 933651 - DNA, 33 bp, Homo sapien
gaacacttagagaccactataggattactaatt

SEQ ID NO: 933652 - DNA, 33 bp, Homo sapien
gaacacttagagaccattataggattactaatt

SEQ ID NO: 933653 - DNA, 33 bp, Homo sapien
gctgctggggacgtaacgaggcagtatgttggg

SEQ ID NO: 933654 - DNA, 33 bp, Homo sapien
gctgctggggacgtaatgaggcagtatgttggg

SEQ ID NO: 933655 - DNA, 33 bp, Homo sapien
gtacatctttccactgaaacatttatagccagc

SEQ ID NO: 933656 - DNA, 33 bp, Homo sapien
gtacatctttccactggaacatttatagccagc

SEQ ID NO: 933657 - DNA, 33 bp, Homo sapien
gtctaatcttagtaggcacgtgactttgagcac

SEQ ID NO: 933658 - DNA, 33 bp, Homo sapien
gtctaatcttagtaggtacgtgactttgagcac

SEQ ID NO: 933659 - DNA, 33 bp, Homo sapien
aaagagacacatcaaaccaaaaatggaccttgt

SEQ ID NO: 933660 - DNA, 33 bp, Homo sapien
aaagagacacatcaaatcaaaaatggaccttgt

SEQ ID NO: 933661 - DNA, 33 bp, Homo sapien
cccagatgggctgagaaaccaattattttgctt

SEQ ID NO: 933662 - DNA, 33 bp, Homo sapien
cccagatgggctgagagaccaattattttgctt

SEQ ID NO: 933663 - DNA, 33 bp, Homo sapien
agtcctcagagtgaaactgctcagtcaagaatt

SEQ ID NO: 933664 - DNA, 33 bp, Homo sapien
agtcctcagagtgaaattgctcagtcaagaatt

SEQ ID NO: 933665 - DNA, 33 bp, Homo sapien
atgagatagtcaaacacgtatacaacgatatag

SEQ ID NO: 933666 - DNA, 33 bp, Homo sapien
atgagatagtcaaacaggtatacaacgatatag

SEQ ID NO: 933667 - DNA, 33 bp, Homo sapien
atggggatcggaaaaaacccggactcgtagctg

SEQ ID NO: 933668 - DNA, 33 bp, Homo sapien
atggggatcggaaaaagcccggactcgtagctg

SEQ ID NO: 933669 - DNA, 33 bp, Homo sapien
atcagaacatgataaaagcagagacatggaacg

SEQ ID NO: 933670 - DNA, 33 bp, Homo sapien
atcagaacatgataaacgcagagacatggaacg

SEQ ID NO: 933671 - DNA, 33 bp, Homo sapien
agtttgtgcaaggaaacgaacatagcctgagct

SEQ ID NO: 933672 - DNA, 33 bp, Homo sapien
agtttgtgcaaggaaatgaacatagcctgagct

SEQ ID NO: 933673 - DNA, 33 bp, Homo sapien
tttctagtccaagtaccgctgcatctgtatgtg

SEQ ID NO: 933674 - DNA, 33 bp, Homo sapien
tttctagtccaagtactgctgcatctgtatgtg

SEQ ID NO: 933675 - DNA, 33 bp, Homo sapien
ataaacaatttgttctcacggacttcaggtgat

SEQ ID NO: 933676 - DNA, 33 bp, Homo sapien
ataaacaatttgttctgacggacttcaggtgat

SEQ ID NO: 933677 - DNA, 33 bp, Homo sapien
tccaggactgtaaaataatagcttgtcttgctc

SEQ ID NO: 933678 - DNA, 33 bp, Homo sapien
tccaggactgtaaaatgatagcttgtcttgctc

SEQ ID NO: 933679 - DNA, 33 bp, Homo sapien
gctgctttgacgtccacgtatctcagcacgccc

SEQ ID NO: 933680 - DNA, 33 bp, Homo sapien
gctgctttgacgtccatgtatctcagcacgccc

SEQ ID NO: 933681 - DNA, 33 bp, Homo sapien
caatttatccctgagacgatttttatcctgtgt

SEQ ID NO: 933682 - DNA, 33 bp, Homo sapien
caatttatccctgagatgatttttatcctgtgt

SEQ ID NO: 933683 - DNA, 33 bp, Homo sapien
taggaaaaagcttccaagtccccattatatatc

SEQ ID NO: 933684 - DNA, 33 bp, Homo sapien
taggaaaaagcttccaggtccccattatatatc

SEQ ID NO: 933685 - DNA, 33 bp, Homo sapien
gcctctttctccatcaatcatatccctggtggt

SEQ ID NO: 933686 - DNA, 33 bp, Homo sapien
gcctctttctccatcagtcatatccctggtggt

SEQ ID NO: 933687 - DNA, 33 bp, Homo sapien
cagcgactacaccatccctgtctgtcaactcac

SEQ ID NO: 933688 - DNA, 33 bp, Homo sapien
cagcgactacaccatctctgtctgtcaactcac

SEQ ID NO: 933689 - DNA, 33 bp, Homo sapien
agcttaggacaccaagaatcgagtcttctaagt

SEQ ID NO: 933690 - DNA, 33 bp, Homo sapien
agcttaggacaccaagcatcgagtcttctaagt

SEQ ID NO: 933691 - DNA, 33 bp, Homo sapien
cgagatctgccgtcaccagatatgccacccagc

SEQ ID NO: 933692 - DNA, 33 bp, Homo sapien
cgagatctgccgtcactagatatgccacccagc

SEQ ID NO: 933693 - DNA, 33 bp, Homo sapien
agagccaaaatatgtaaatcgcttgcggtgtgt

SEQ ID NO: 933694 - DNA, 33 bp, Homo sapien
agagccaaaatatgtagatcgcttgcggtgtgt

SEQ ID NO: 933695 - DNA, 33 bp, Homo sapien
tattgggcttgtgagacgcttcggtggcctcat

SEQ ID NO: 933696 - DNA, 33 bp, Homo sapien
tattgggcttgtgagatgcttcggtggcctcat

SEQ ID NO: 933697 - DNA, 33 bp, Homo sapien
ccactctcttggctacccctctctccaaccacc

SEQ ID NO: 933698 - DNA, 33 bp, Homo sapien
ccactctcttggctactcctctctccaaccacc

SEQ ID NO: 933699 - DNA, 33 bp, Homo sapien
taggcaagaagaggaaaaacgtgcatagaagaa

SEQ ID NO: 933700 - DNA, 33 bp, Homo sapien
taggcaagaagaggaagaacgtgcatagaagaa

SEQ ID NO: 933701 - DNA, 33 bp, Homo sapien
aatgacagttaagcccaggactcaagccaggga

SEQ ID NO: 933702 - DNA, 33 bp, Homo sapien
aatgacagttaagcccgggactcaagccaggga

SEQ ID NO: 933703 - DNA, 33 bp, Homo sapien
gaaatccatcccgttgcactgattcaacatctg

SEQ ID NO: 933704 - DNA, 33 bp, Homo sapien
gaaatccatcccgttgtactgattcaacatctg

SEQ ID NO: 933705 - DNA, 33 bp, Homo sapien
cccctgcctgactcagaatggcagcagggagtg

SEQ ID NO: 933706 - DNA, 33 bp, Homo sapien
cccctgcctgactcaggatggcagcagggagtg

SEQ ID NO: 933707 - DNA, 33 bp, Homo sapien
atttccttccacaggccgcaaatgtggcatttc

SEQ ID NO: 933708 - DNA, 33 bp, Homo sapien
atttccttccacaggctgcaaatgtggcatttc

SEQ ID NO: 933709 - DNA, 33 bp, Homo sapien
ccacttgctcaaccaacgaaaaggagagaaatt

SEQ ID NO: 933710 - DNA, 33 bp, Homo sapien
ccacttgctcaaccaatgaaaaggagagaaatt

SEQ ID NO: 933711 - DNA, 33 bp, Homo sapien
tggcctctgcaaggtcccctcatttcacttttt

SEQ ID NO: 933712 - DNA, 33 bp, Homo sapien
tggcctctgcaaggtctcctcatttcacttttt

SEQ ID NO: 933713 - DNA, 33 bp, Homo sapien
ctttagatactgggacaatatagtgagttatag

SEQ ID NO: 933714 - DNA, 33 bp, Homo sapien
ctttagatactgggaccatatagtgagttatag

SEQ ID NO: 933715 - DNA, 33 bp, Homo sapien
aacatgaggggaatgactaaattctgatagatc

SEQ ID NO: 933716 - DNA, 33 bp, Homo sapien
aacatgaggggaatgattaaattctgatagatc

SEQ ID NO: 933717 - DNA, 33 bp, Homo sapien
cacagcactgaaaacacatttgcctgtgcttac

SEQ ID NO: 933718 - DNA, 33 bp, Homo sapien
cacagcactgaaaacatatttgcctgtgcttac

SEQ ID NO: 933719 - DNA, 33 bp, Homo sapien
gtgactgcaaagtttacgttcctatcctatacg

SEQ ID NO: 933720 - DNA, 33 bp, Homo sapien
gtgactgcaaagtttatgttcctatcctatacg

SEQ ID NO: 933721 - DNA, 33 bp, Homo sapien
tgatgtgcaaaaattgacaacctttttggttct

SEQ ID NO: 933722 - DNA, 33 bp, Homo sapien
tgatgtgcaaaaattggcaacctttttggttct

SEQ ID NO: 933723 - DNA, 33 bp, Homo sapien
aaggaaagctgggtaacgttttgggcacagggg

SEQ ID NO: 933724 - DNA, 33 bp, Homo sapien
aaggaaagctgggtaaggttttgggcacagggg

SEQ ID NO: 933725 - DNA, 33 bp, Homo sapien
ttgatctgctttgatagggggacagaatccccg

SEQ ID NO: 933726 - DNA, 33 bp, Homo sapien
ttgatctgctttgatatggggacagaatccccg

SEQ ID NO: 933727 - DNA, 33 bp, Homo sapien
tcagctcttccttccacgccatttgcctgggta

SEQ ID NO: 933728 - DNA, 33 bp, Homo sapien
tcagctcttccttccatgccatttgcctgggta

SEQ ID NO: 933729 - DNA, 33 bp, Homo sapien
aactggtgtcagaaaacagcagcacagagtgga

SEQ ID NO: 933730 - DNA, 33 bp, Homo sapien
aactggtgtcagaaaagagcagcacagagtgga

SEQ ID NO: 933731 - DNA, 33 bp, Homo sapien
tttccttcacattcaaactctcggtcccagagc

SEQ ID NO: 933732 - DNA, 33 bp, Homo sapien
tttccttcacattcaagctctcggtcccagagc

SEQ ID NO: 933733 - DNA, 33 bp, Homo sapien
ggagtcatccatatacagactggacttttctct

SEQ ID NO: 933734 - DNA, 33 bp, Homo sapien
ggagtcatccatatacggactggacttttctct

SEQ ID NO: 933735 - DNA, 33 bp, Homo sapien
ttaacgtcactttcacgcttcacgtgaaattca

SEQ ID NO: 933736 - DNA, 33 bp, Homo sapien
ttaacgtcactttcactcttcacgtgaaattca

SEQ ID NO: 933737 - DNA, 33 bp, Homo sapien
ctggaatacaatggtacgatgtcggcttactgc

SEQ ID NO: 933738 - DNA, 33 bp, Homo sapien
ctggaatacaatggtatgatgtcggcttactgc

SEQ ID NO: 933739 - DNA, 33 bp, Homo sapien
gagcactcactagtacagcataagtatcagtca

SEQ ID NO: 933740 - DNA, 33 bp, Homo sapien
gagcactcactagtacggcataagtatcagtca

SEQ ID NO: 933741 - DNA, 33 bp, Homo sapien
agcaattttcttttccaacgtatgtttcaacag

SEQ ID NO: 933742 - DNA, 33 bp, Homo sapien
agcaattttcttttcccacgtatgtttcaacag

SEQ ID NO: 933743 - DNA, 33 bp, Homo sapien
gaggaaggcaatacacccagctctttggcacag

SEQ ID NO: 933744 - DNA, 33 bp, Homo sapien
gaggaaggcaatacactcagctctttggcacag

SEQ ID NO: 933745 - DNA, 33 bp, Homo sapien
tcgtgtttaaattagacgttagagtgagtacag

SEQ ID NO: 933746 - DNA, 33 bp, Homo sapien
tcgtgtttaaattagatgttagagtgagtacag

SEQ ID NO: 933747 - DNA, 33 bp, Homo sapien
tctctgtctctgatgccgagtgacttgtccccc

SEQ ID NO: 933748 - DNA, 33 bp, Homo sapien
tctctgtctctgatgctgagtgacttgtccccc

SEQ ID NO: 933749 - DNA, 33 bp, Homo sapien
atttaatacgcttttcccctccagacctatcgt

SEQ ID NO: 933750 - DNA, 33 bp, Homo sapien
atttaatacgcttttcgcctccagacctatcgt

SEQ ID NO: 933751 - DNA, 33 bp, Homo sapien
gaaattaaaagtagtaacacaacgaacacatga

SEQ ID NO: 933752 - DNA, 33 bp, Homo sapien
gaaattaaaagtagtaccacaacgaacacatga

SEQ ID NO: 933753 - DNA, 33 bp, Homo sapien
gagataaacctgcaaacgtgaagaggagaagcc

SEQ ID NO: 933754 - DNA, 33 bp, Homo sapien
gagataaacctgcaaatgtgaagaggagaagcc

SEQ ID NO: 933755 - DNA, 33 bp, Homo sapien
taataactgcagatgtaaactacactttcagtc

SEQ ID NO: 933756 - DNA, 33 bp, Homo sapien
taataactgcagatgtgaactacactttcagtc

SEQ ID NO: 933757 - DNA, 33 bp, Homo sapien
gctagccagacaaacacaagaggcaggaaagaa

SEQ ID NO: 933758 - DNA, 33 bp, Homo sapien
gctagccagacaaacagaagaggcaggaaagaa

SEQ ID NO: 933759 - DNA, 33 bp, Homo sapien
cagaagaaggaatagaacaggaagctgtgaaag

SEQ ID NO: 933760 - DNA, 33 bp, Homo sapien
cagaagaaggaatagagcaggaagctgtgaaag

SEQ ID NO: 933761 - DNA, 33 bp, Homo sapien
ataggtaactaaaatcaaatgtgcacttatgtc

SEQ ID NO: 933762 - DNA, 33 bp, Homo sapien
ataggtaactaaaatcgaatgtgcacttatgtc

SEQ ID NO: 933763 - DNA, 33 bp, Homo sapien
ctgtccgaattcctgacccgcagaatcatgaga

SEQ ID NO: 933764 - DNA, 33 bp, Homo sapien
ctgtccgaattcctgatccgcagaatcatgaga

SEQ ID NO: 933765 - DNA, 33 bp, Homo sapien
gggaagttgttctgtacgtaagtgactatccag

SEQ ID NO: 933766 - DNA, 33 bp, Homo sapien
gggaagttgttctgtatgtaagtgactatccag

SEQ ID NO: 933767 - DNA, 33 bp, Homo sapien
cttcgtttgttttatacgccccttgagcctttt

SEQ ID NO: 933768 - DNA, 33 bp, Homo sapien
cttcgtttgttttatatgccccttgagcctttt

SEQ ID NO: 933769 - DNA, 33 bp, Homo sapien
ggagtgaaataacgtacgaagagggagtggtaa

SEQ ID NO: 933770 - DNA, 33 bp, Homo sapien
ggagtgaaataacgtaggaagagggagtggtaa

SEQ ID NO: 933771 - DNA, 33 bp, Homo sapien
aattaatatgaaattcaaatatggtgctatcct

SEQ ID NO: 933772 - DNA, 33 bp, Homo sapien
aattaatatgaaattcgaatatggtgctatcct

SEQ ID NO: 933773 - DNA, 33 bp, Homo sapien
ctattctatttaacacagtaacactgacccttc

SEQ ID NO: 933774 - DNA, 33 bp, Homo sapien
ctattctatttaacacggtaacactgacccttc

SEQ ID NO: 933775 - DNA, 33 bp, Homo sapien
ttaatctcacaaaatacatcaaagttgactcaa

SEQ ID NO: 933776 - DNA, 33 bp, Homo sapien
ttaatctcacaaaatatatcaaagttgactcaa

SEQ ID NO: 933777 - DNA, 33 bp, Homo sapien
aatacaaagtctagaaataaatccacacatacc

SEQ ID NO: 933778 - DNA, 33 bp, Homo sapien
aatacaaagtctagaagtaaatccacacatacc

SEQ ID NO: 933779 - DNA, 33 bp, Homo sapien
attccccagtgcctaccgcaatgcttggcggtc

SEQ ID NO: 933780 - DNA, 33 bp, Homo sapien
attccccagtgcctactgcaatgcttggcggtc

SEQ ID NO: 933781 - DNA, 33 bp, Homo sapien
ctgtcatatgattataatagagtcaagttggaa

SEQ ID NO: 933782 - DNA, 33 bp, Homo sapien
ctgtcatatgattatagtagagtcaagttggaa

SEQ ID NO: 933783 - DNA, 33 bp, Homo sapien
acacttaaggtgtacactggtttgttctggaaa

SEQ ID NO: 933784 - DNA, 33 bp, Homo sapien
acacttaaggtgtacattggtttgttctggaaa

SEQ ID NO: 933785 - DNA, 33 bp, Homo sapien
aagctacaggtcaaccaggcagttcttttgctc

SEQ ID NO: 933786 - DNA, 33 bp, Homo sapien
aagctacaggtcaaccgggcagttcttttgctc

SEQ ID NO: 933787 - DNA, 33 bp, Homo sapien
ttcacagtgaagcatcccaaaaccatatcgctg

SEQ ID NO: 933788 - DNA, 33 bp, Homo sapien
ttcacagtgaagcatcgcaaaaccatatcgctg

SEQ ID NO: 933789 - DNA, 33 bp, Homo sapien
tgctatttcattttaaaccaggtcatctgtgtc

SEQ ID NO: 933790 - DNA, 33 bp, Homo sapien
tgctatttcattttaagccaggtcatctgtgtc

SEQ ID NO: 933791 - DNA, 33 bp, Homo sapien
gccagctcttattaccacattccagagagagtc

SEQ ID NO: 933792 - DNA, 33 bp, Homo sapien
gccagctcttattaccgcattccagagagagtc

SEQ ID NO: 933793 - DNA, 33 bp, Homo sapien
taaataaatgtagcgacaaagaaaagggtgctc

SEQ ID NO: 933794 - DNA, 33 bp, Homo sapien
taaataaatgtagcgataaagaaaagggtgctc

SEQ ID NO: 933795 - DNA, 33 bp, Homo sapien
gtctctgatgtggactaaaccaaggggaaatgt

SEQ ID NO: 933796 - DNA, 33 bp, Homo sapien
gtctctgatgtggactgaaccaaggggaaatgt

SEQ ID NO: 933797 - DNA, 33 bp, Homo sapien
agaaaaagatatgttacgtactggaagtcagag

SEQ ID NO: 933798 - DNA, 33 bp, Homo sapien
agaaaaagatatgttatgtactggaagtcagag

SEQ ID NO: 933799 - DNA, 33 bp, Homo sapien
gatgatgctgacccaaaagtagcacttgttaac

SEQ ID NO: 933800 - DNA, 33 bp, Homo sapien
gatgatgctgacccaagagtagcacttgttaac

SEQ ID NO: 933801 - DNA, 33 bp, Homo sapien
agcagagatataccaaagggggaaaaatacatg

SEQ ID NO: 933802 - DNA, 33 bp, Homo sapien
agcagagatataccaaggggggaaaaatacatg

SEQ ID NO: 933803 - DNA, 33 bp, Homo sapien
aggtccacagactaaccaaaagatactgatcaa

SEQ ID NO: 933804 - DNA, 33 bp, Homo sapien
aggtccacagactaactaaaagatactgatcaa

SEQ ID NO: 933805 - DNA, 33 bp, Homo sapien
aactgttaattatccaccattgtccccgtcttt

SEQ ID NO: 933806 - DNA, 33 bp, Homo sapien
aactgttaattatccatcattgtccccgtcttt

SEQ ID NO: 933807 - DNA, 33 bp, Homo sapien
gaccaatttagaaaatcaagctaaaagaggtca

SEQ ID NO: 933808 - DNA, 33 bp, Homo sapien
gaccaatttagaaaatgaagctaaaagaggtca

SEQ ID NO: 933809 - DNA, 33 bp, Homo sapien
gcaaacttttgatcacacacctaacaaaaactc

SEQ ID NO: 933810 - DNA, 33 bp, Homo sapien
gcaaacttttgatcacgcacctaacaaaaactc

SEQ ID NO: 933811 - DNA, 33 bp, Homo sapien
taagttagcaaccagaatctattattttttaaa

SEQ ID NO: 933812 - DNA, 33 bp, Homo sapien
taagttagcaaccagattctattattttttaaa

SEQ ID NO: 933813 - DNA, 33 bp, Homo sapien
agcaacagttacctcgaataagatggccattcc

SEQ ID NO: 933814 - DNA, 33 bp, Homo sapien
agcaacagttacctcggataagatggccattcc

SEQ ID NO: 933815 - DNA, 33 bp, Homo sapien
gctttgatactgacccgccctgaccttatcact

SEQ ID NO: 933816 - DNA, 33 bp, Homo sapien
gctttgatactgaccctccctgaccttatcact

SEQ ID NO: 933817 - DNA, 33 bp, Homo sapien
gctatgttccttttcaatcctctgccgtaatct

SEQ ID NO: 933818 - DNA, 33 bp, Homo sapien
gctatgttccttttcagtcctctgccgtaatct

SEQ ID NO: 933819 - DNA, 33 bp, Homo sapien
aatgctgaagttggaaatcaaagtgtatgaagt

SEQ ID NO: 933820 - DNA, 33 bp, Homo sapien
aatgctgaagttggaagtcaaagtgtatgaagt

SEQ ID NO: 933821 - DNA, 33 bp, Homo sapien
ttttcgtggtgttaaaatgaggctgcaacccct

SEQ ID NO: 933822 - DNA, 33 bp, Homo sapien
ttttcgtggtgttaaactgaggctgcaacccct

SEQ ID NO: 933823 - DNA, 33 bp, Homo sapien
ctccccctctctgatccaagttcattgtccctg

SEQ ID NO: 933824 - DNA, 33 bp, Homo sapien
ctccccctctctgatctaagttcattgtccctg

SEQ ID NO: 933825 - DNA, 33 bp, Homo sapien
tcataactggtgtcaccaccacccacgcagaag

SEQ ID NO: 933826 - DNA, 33 bp, Homo sapien
tcataactggtgtcactaccacccacgcagaag

SEQ ID NO: 933827 - DNA, 33 bp, Homo sapien
gaaaggaccaagtccgaattataaagcaacaag

SEQ ID NO: 933828 - DNA, 33 bp, Homo sapien
gaaaggaccaagtccgcattataaagcaacaag

SEQ ID NO: 933829 - DNA, 33 bp, Homo sapien
tatctgggaccacaaccacacgccaccacacca

SEQ ID NO: 933830 - DNA, 33 bp, Homo sapien
tatctgggaccacaactacacgccaccacacca

SEQ ID NO: 933831 - DNA, 33 bp, Homo sapien
cacggcagtacagtccagcaacagagggagacc

SEQ ID NO: 933832 - DNA, 33 bp, Homo sapien
cacggcagtacagtccggcaacagagggagacc

SEQ ID NO: 933833 - DNA, 33 bp, Homo sapien
tgttacctgggatctccagacctctacttccga

SEQ ID NO: 933834 - DNA, 33 bp, Homo sapien
tgttacctgggatctctagacctctacttccga

SEQ ID NO: 933835 - DNA, 33 bp, Homo sapien
ctcggataggttaataataatagctgttacctt

SEQ ID NO: 933836 - DNA, 33 bp, Homo sapien
ctcggataggttaatattaatagctgttacctt

SEQ ID NO: 933837 - DNA, 33 bp, Homo sapien
tgagaggccagaactacggatataaatttcagt

SEQ ID NO: 933838 - DNA, 33 bp, Homo sapien
tgagaggccagaactatggatataaatttcagt

SEQ ID NO: 933839 - DNA, 33 bp, Homo sapien
atgtagctttgtgacacattttgaaccattatc

SEQ ID NO: 933840 - DNA, 33 bp, Homo sapien
atgtagctttgtgacagattttgaaccattatc

SEQ ID NO: 933841 - DNA, 33 bp, Homo sapien
gtgatctgcatagaaaatatcaaaaaggttctt

SEQ ID NO: 933842 - DNA, 33 bp, Homo sapien
gtgatctgcatagaaagtatcaaaaaggttctt

SEQ ID NO: 933843 - DNA, 33 bp, Homo sapien
gagatcgtacacctttcaaaggacaatgacagt

SEQ ID NO: 933844 - DNA, 33 bp, Homo sapien
gagatcgtacaccttttaaaggacaatgacagt

SEQ ID NO: 933845 - DNA, 33 bp, Homo sapien
aattgtttgaaaaagccgataatgtgctgggga

SEQ ID NO: 933846 - DNA, 33 bp, Homo sapien
aattgtttgaaaaagctgataatgtgctgggga

SEQ ID NO: 933847 - DNA, 33 bp, Homo sapien
tcctgatgcaaaaggcaatatgcccggtaagga

SEQ ID NO: 933848 - DNA, 33 bp, Homo sapien
tcctgatgcaaaaggcgatatgcccggtaagga

SEQ ID NO: 933849 - DNA, 33 bp, Homo sapien
aatgattgtcattaaagtcatcatgctaggtgc

SEQ ID NO: 933850 - DNA, 33 bp, Homo sapien
aatgattgtcattaaattcatcatgctaggtgc

SEQ ID NO: 933851 - DNA, 33 bp, Homo sapien
tggctttaagtctagcaacagtacacccttcaa

SEQ ID NO: 933852 - DNA, 33 bp, Homo sapien
tggctttaagtctagcgacagtacacccttcaa

SEQ ID NO: 933853 - DNA, 33 bp, Homo sapien
agtagaaaaacaacatcagtctagtgcaaaaag

SEQ ID NO: 933854 - DNA, 33 bp, Homo sapien
agtagaaaaacaacattagtctagtgcaaaaag

SEQ ID NO: 933855 - DNA, 33 bp, Homo sapien
gctcttaggggttctcaatagtagagaggtctt

SEQ ID NO: 933856 - DNA, 33 bp, Homo sapien
gctcttaggggttctcgatagtagagaggtctt

SEQ ID NO: 933857 - DNA, 33 bp, Homo sapien
ctgagtgaaagtgtcactgaactgatagggaat

SEQ ID NO: 933858 - DNA, 33 bp, Homo sapien
ctgagtgaaagtgtcattgaactgatagggaat

SEQ ID NO: 933859 - DNA, 33 bp, Homo sapien
gtagtaggcattcataaatccttgttgaagaaa

SEQ ID NO: 933860 - DNA, 33 bp, Homo sapien
gtagtaggcattcatacatccttgttgaagaaa

SEQ ID NO: 933861 - DNA, 33 bp, Homo sapien
caacaaaaatctgggcagaaagtctggcaagga

SEQ ID NO: 933862 - DNA, 33 bp, Homo sapien
caacaaaaatctgggcggaaagtctggcaagga

SEQ ID NO: 933863 - DNA, 33 bp, Homo sapien
gttcactaaggtcaaaaaagcagccaagcttgg

SEQ ID NO: 933864 - DNA, 33 bp, Homo sapien
gttcactaaggtcaaagaagcagccaagcttgg

SEQ ID NO: 933865 - DNA, 33 bp, Homo sapien
aataccactcagtaagaaaattattaatcacaa

SEQ ID NO: 933866 - DNA, 33 bp, Homo sapien
aataccactcagtaaggaaattattaatcacaa

SEQ ID NO: 933867 - DNA, 33 bp, Homo sapien
catgattttgccaacaagacattttaaatacca

SEQ ID NO: 933868 - DNA, 33 bp, Homo sapien
catgattttgccaacatgacattttaaatacca

SEQ ID NO: 933869 - DNA, 33 bp, Homo sapien
acggagaggtgagaaactgagctaaatgaggta

SEQ ID NO: 933870 - DNA, 33 bp, Homo sapien
acggagaggtgagaaattgagctaaatgaggta

SEQ ID NO: 933871 - DNA, 33 bp, Homo sapien
tcaaccacttttgtgacgaaacccattactgaa

SEQ ID NO: 933872 - DNA, 33 bp, Homo sapien
tcaaccacttttgtgaggaaacccattactgaa

SEQ ID NO: 933873 - DNA, 33 bp, Homo sapien
gtatagttatttggtcaacatttcatgcagtaa

SEQ ID NO: 933874 - DNA, 33 bp, Homo sapien
gtatagttatttggtccacatttcatgcagtaa

SEQ ID NO: 933875 - DNA, 33 bp, Homo sapien
gatatgccaggcagtacgtttctgaaattaaca

SEQ ID NO: 933876 - DNA, 33 bp, Homo sapien
gatatgccaggcagtaggtttctgaaattaaca

SEQ ID NO: 933877 - DNA, 33 bp, Homo sapien
tgccattacaacagtaagaatgaactaagttgc

SEQ ID NO: 933878 - DNA, 33 bp, Homo sapien
tgccattacaacagtaggaatgaactaagttgc

SEQ ID NO: 933879 - DNA, 33 bp, Homo sapien
aatggcccttgagttggatcttgttggaacgag

SEQ ID NO: 933880 - DNA, 33 bp, Homo sapien
aatggcccttgagttgtatcttgttggaacgag

SEQ ID NO: 933881 - DNA, 33 bp, Homo sapien
tcctatacaacttcataaacgcaggaagcatca

SEQ ID NO: 933882 - DNA, 33 bp, Homo sapien
tcctatacaacttcatcaacgcaggaagcatca

SEQ ID NO: 933883 - DNA, 33 bp, Homo sapien
aaacatgtcccttcaactggtaaattagctgct

SEQ ID NO: 933884 - DNA, 33 bp, Homo sapien
aaacatgtcccttcaagtggtaaattagctgct

SEQ ID NO: 933885 - DNA, 33 bp, Homo sapien
tctccaggtagcagcaaaaacattagggtgtta

SEQ ID NO: 933886 - DNA, 33 bp, Homo sapien
tctccaggtagcagcagaaacattagggtgtta

SEQ ID NO: 933887 - DNA, 33 bp, Homo sapien
gaactggaccagagatgatctcaaacacacaat

SEQ ID NO: 933888 - DNA, 33 bp, Homo sapien
gaactggaccagagattatctcaaacacacaat

SEQ ID NO: 933889 - DNA, 33 bp, Homo sapien
ggaaatcagagaaatgcaggcacgttccaggca

SEQ ID NO: 933890 - DNA, 33 bp, Homo sapien
ggaaatcagagaaatgtaggcacgttccaggca

SEQ ID NO: 933891 - DNA, 33 bp, Homo sapien
ttggctggacagctcaactttataatgcagatt

SEQ ID NO: 933892 - DNA, 33 bp, Homo sapien
ttggctggacagctcagctttataatgcagatt

SEQ ID NO: 933893 - DNA, 33 bp, Homo sapien
gctggtgatcatgttacgcttgtaccacaaagg

SEQ ID NO: 933894 - DNA, 33 bp, Homo sapien
gctggtgatcatgttatgcttgtaccacaaagg

SEQ ID NO: 933895 - DNA, 33 bp, Homo sapien
gaacaccagtatttcaagaggacctggataggg

SEQ ID NO: 933896 - DNA, 33 bp, Homo sapien
gaacaccagtatttcaggaggacctggataggg

SEQ ID NO: 933897 - DNA, 33 bp, Homo sapien
attgggaagtttgttgcaaatggaaatggaaag

SEQ ID NO: 933898 - DNA, 33 bp, Homo sapien
attgggaagtttgttggaaatggaaatggaaag

SEQ ID NO: 933899 - DNA, 33 bp, Homo sapien
atactattccagtgtacatgtagctttttcttc

SEQ ID NO: 933900 - DNA, 33 bp, Homo sapien
atactattccagtgtatatgtagctttttcttc

SEQ ID NO: 933901 - DNA, 33 bp, Homo sapien
tgaccacctggcctggaatacgtcatgctctgg

SEQ ID NO: 933902 - DNA, 33 bp, Homo sapien
tgaccacctggcctgggatacgtcatgctctgg

SEQ ID NO: 933903 - DNA, 33 bp, Homo sapien
ttctgggaacaagagaagtgattcgagatgggc

SEQ ID NO: 933904 - DNA, 33 bp, Homo sapien
ttctgggaacaagagaggtgattcgagatgggc

SEQ ID NO: 933905 - DNA, 33 bp, Homo sapien
gggcttggaggctccaatgaactcattagtctt

SEQ ID NO: 933906 - DNA, 33 bp, Homo sapien
gggcttggaggctccagtgaactcattagtctt

SEQ ID NO: 933907 - DNA, 33 bp, Homo sapien
aatttgggtattgttacagaagctagcacaatg

SEQ ID NO: 933908 - DNA, 33 bp, Homo sapien
aatttgggtattgttagagaagctagcacaatg

SEQ ID NO: 933909 - DNA, 33 bp, Homo sapien
gccagatctggaggtgacacacaaaacttctgc

SEQ ID NO: 933910 - DNA, 33 bp, Homo sapien
gccagatctggaggtggcacacaaaacttctgc

SEQ ID NO: 933911 - DNA, 33 bp, Homo sapien
atttacatttttctgacgaatagcattgttgaa

SEQ ID NO: 933912 - DNA, 33 bp, Homo sapien
atttacatttttctgatgaatagcattgttgaa

SEQ ID NO: 933913 - DNA, 33 bp, Homo sapien
ttccttctttaaagccaaatgctggcaaaaagg

SEQ ID NO: 933914 - DNA, 33 bp, Homo sapien
ttccttctttaaagccgaatgctggcaaaaagg

SEQ ID NO: 933915 - DNA, 33 bp, Homo sapien
cttcgccgcaaatgtcagaaagggtgatgctgc

SEQ ID NO: 933916 - DNA, 33 bp, Homo sapien
cttcgccgcaaatgtcggaaagggtgatgctgc

SEQ ID NO: 933917 - DNA, 33 bp, Homo sapien
agcagctggtatttacagagcctcatagagtca

SEQ ID NO: 933918 - DNA, 33 bp, Homo sapien
agcagctggtatttacggagcctcatagagtca

SEQ ID NO: 933919 - DNA, 33 bp, Homo sapien
ggctgtgtggcctcaaacaagatacccgggagg

SEQ ID NO: 933920 - DNA, 33 bp, Homo sapien
ggctgtgtggcctcaagcaagatacccgggagg

SEQ ID NO: 933921 - DNA, 33 bp, Homo sapien
gcgtatttctgaaaggcaaccgggacaacaagg

SEQ ID NO: 933922 - DNA, 33 bp, Homo sapien
gcgtatttctgaaagggaaccgggacaacaagg

SEQ ID NO: 933923 - DNA, 33 bp, Homo sapien
aatgaatagctaatgaacaccagacagtaaagg

SEQ ID NO: 933924 - DNA, 33 bp, Homo sapien
aatgaatagctaatgatcaccagacagtaaagg

SEQ ID NO: 933925 - DNA, 33 bp, Homo sapien
gtggaaccaccgagcacaagtttgggaacctag

SEQ ID NO: 933926 - DNA, 33 bp, Homo sapien
gtggaaccaccgagcagaagtttgggaacctag

SEQ ID NO: 933927 - DNA, 33 bp, Homo sapien
gttttcccctagtttcgaaccctgcttaaggac

SEQ ID NO: 933928 - DNA, 33 bp, Homo sapien
gttttcccctagtttctaaccctgcttaaggac

SEQ ID NO: 933929 - DNA, 33 bp, Homo sapien
ccttttgatgagcaacacttttagttttgcaga

SEQ ID NO: 933930 - DNA, 33 bp, Homo sapien
ccttttgatgagcaacccttttagttttgcaga

SEQ ID NO: 933931 - DNA, 33 bp, Homo sapien
tcttgacaaaaatcagcatggttttgttcatta

SEQ ID NO: 933932 - DNA, 33 bp, Homo sapien
tcttgacaaaaatcaggatggttttgttcatta

SEQ ID NO: 933933 - DNA, 33 bp, Homo sapien
catgttcaacaactaaacaaagtatttgcatcc

SEQ ID NO: 933934 - DNA, 33 bp, Homo sapien
catgttcaacaactaatcaaagtatttgcatcc

SEQ ID NO: 933935 - DNA, 33 bp, Homo sapien
agatgaattttctccaatgccctactacccttt

SEQ ID NO: 933936 - DNA, 33 bp, Homo sapien
agatgaattttctccagtgccctactacccttt

SEQ ID NO: 933937 - DNA, 33 bp, Homo sapien
tgaggagctaagtcacactaccaattggctttt

SEQ ID NO: 933938 - DNA, 33 bp, Homo sapien
tgaggagctaagtcacgctaccaattggctttt

SEQ ID NO: 933939 - DNA, 33 bp, Homo sapien
agcaaggtttgggagacaacgtgacattccaca

SEQ ID NO: 933940 - DNA, 33 bp, Homo sapien
agcaaggtttgggagataacgtgacattccaca

SEQ ID NO: 933941 - DNA, 33 bp, Homo sapien
ctgctccatcttctcaataaccagttttcttat

SEQ ID NO: 933942 - DNA, 33 bp, Homo sapien
ctgctccatcttctcattaaccagttttcttat

SEQ ID NO: 933943 - DNA, 33 bp, Homo sapien
acatagggagtttgtaactatctatcatctatc

SEQ ID NO: 933944 - DNA, 33 bp, Homo sapien
acatagggagtttgtatctatctatcatctatc

SEQ ID NO: 933945 - DNA, 33 bp, Homo sapien
acagtgtgaactttaagaggagagatccgatgt

SEQ ID NO: 933946 - DNA, 33 bp, Homo sapien
acagtgtgaactttaataggagagatccgatgt

SEQ ID NO: 933947 - DNA, 33 bp, Homo sapien
ctggaaaatgcagtgccgaggactatcaactgt

SEQ ID NO: 933948 - DNA, 33 bp, Homo sapien
ctggaaaatgcagtgctgaggactatcaactgt

SEQ ID NO: 933949 - DNA, 33 bp, Homo sapien
aagtaggaaagcgaaaccaaaattttctccata

SEQ ID NO: 933950 - DNA, 33 bp, Homo sapien
aagtaggaaagcgaaagcaaaattttctccata

SEQ ID NO: 933951 - DNA, 33 bp, Homo sapien
taggttgtatattgtcaaagactcttctctgtc

SEQ ID NO: 933952 - DNA, 33 bp, Homo sapien
taggttgtatattgtccaagactcttctctgtc

SEQ ID NO: 933953 - DNA, 33 bp, Homo sapien
aaggctaaacactgacggatggacatatttctc

SEQ ID NO: 933954 - DNA, 33 bp, Homo sapien
aaggctaaacactgactgatggacatatttctc

SEQ ID NO: 933955 - DNA, 33 bp, Homo sapien
tcgtacacaggagagacagctagggacaggctt

SEQ ID NO: 933956 - DNA, 33 bp, Homo sapien
tcgtacacaggagagagagctagggacaggctt

SEQ ID NO: 933957 - DNA, 33 bp, Homo sapien
gatccaggtttctcctaaagtcaaacaaacaag

SEQ ID NO: 933958 - DNA, 33 bp, Homo sapien
gatccaggtttctcctgaagtcaaacaaacaag

SEQ ID NO: 933959 - DNA, 33 bp, Homo sapien
tgattggagatatgtaaggtttaggaaagttga

SEQ ID NO: 933960 - DNA, 33 bp, Homo sapien
tgattggagatatgtatggtttaggaaagttga

SEQ ID NO: 933961 - DNA, 33 bp, Homo sapien
taataaagaccatttaaaaggacctgagaagtg

SEQ ID NO: 933962 - DNA, 33 bp, Homo sapien
taataaagaccatttagaaggacctgagaagtg

SEQ ID NO: 933963 - DNA, 33 bp, Homo sapien
ctgaattgctgcactcccatgatcaaacttaaa

SEQ ID NO: 933964 - DNA, 33 bp, Homo sapien
ctgaattgctgcactctcatgatcaaacttaaa

SEQ ID NO: 933965 - DNA, 33 bp, Homo sapien
cctgccactgctttatcaacgaggcttatggaa

SEQ ID NO: 933966 - DNA, 33 bp, Homo sapien
cctgccactgctttatgaacgaggcttatggaa

SEQ ID NO: 933967 - DNA, 33 bp, Homo sapien
cagagaaaagcggtcacattttgttggcgttaa

SEQ ID NO: 933968 - DNA, 33 bp, Homo sapien
cagagaaaagcggtcatattttgttggcgttaa

SEQ ID NO: 933969 - DNA, 33 bp, Homo sapien
agtttagccccttgcccctcaaatacattcgcc

SEQ ID NO: 933970 - DNA, 33 bp, Homo sapien
agtttagccccttgcctctcaaatacattcgcc

SEQ ID NO: 933971 - DNA, 33 bp, Homo sapien
tctcttatacttcctaccttcacactcttacac

SEQ ID NO: 933972 - DNA, 33 bp, Homo sapien
tctcttatacttcctatcttcacactcttacac

SEQ ID NO: 933973 - DNA, 33 bp, Homo sapien
aatggcaaaatctcaactgctttttaagttatc

SEQ ID NO: 933974 - DNA, 33 bp, Homo sapien
aatggcaaaatctcaagtgctttttaagttatc

SEQ ID NO: 933975 - DNA, 33 bp, Homo sapien
aaataatgagtcaataagtagatagatgtgtgg

SEQ ID NO: 933976 - DNA, 33 bp, Homo sapien
aaataatgagtcaataggtagatagatgtgtgg

SEQ ID NO: 933977 - DNA, 33 bp, Homo sapien
atggttgcatcgcagcaaaaaggagaagcagcc

SEQ ID NO: 933978 - DNA, 33 bp, Homo sapien
atggttgcatcgcagcgaaaaggagaagcagcc

SEQ ID NO: 933979 - DNA, 33 bp, Homo sapien
agaaatgctgggttaaatcaaataaagcggttt

SEQ ID NO: 933980 - DNA, 33 bp, Homo sapien
agaaatgctgggttaagtcaaataaagcggttt

SEQ ID NO: 933981 - DNA, 33 bp, Homo sapien
tgtgaggcagagacacactatgtcaggctacag

SEQ ID NO: 933982 - DNA, 33 bp, Homo sapien
tgtgaggcagagacacgctatgtcaggctacag

SEQ ID NO: 933983 - DNA, 33 bp, Homo sapien
acaaagcctcacattaagcatctctttagtaaa

SEQ ID NO: 933984 - DNA, 33 bp, Homo sapien
acaaagcctcacattacgcatctctttagtaaa

SEQ ID NO: 933985 - DNA, 33 bp, Homo sapien
aaagttaggaagaaaaagaattacagatatgca

SEQ ID NO: 933986 - DNA, 33 bp, Homo sapien
aaagttaggaagaaaaggaattacagatatgca

SEQ ID NO: 933987 - DNA, 33 bp, Homo sapien
agaactgagggccatcaagaccactttgtggag

SEQ ID NO: 933988 - DNA, 33 bp, Homo sapien
agaactgagggccatcgagaccactttgtggag

SEQ ID NO: 933989 - DNA, 33 bp, Homo sapien
tagtttgtgaaaccaacagaacaaagtgctaag

SEQ ID NO: 933990 - DNA, 33 bp, Homo sapien
tagtttgtgaaaccaatagaacaaagtgctaag

SEQ ID NO: 933991 - DNA, 33 bp, Homo sapien
gttccattgagggagaaaaaaggaagaagcagg

SEQ ID NO: 933992 - DNA, 33 bp, Homo sapien
gttccattgagggagagaaaaggaagaagcagg

SEQ ID NO: 933993 - DNA, 33 bp, Homo sapien
gtgatgtcaaagagataaaatgactttaaactg

SEQ ID NO: 933994 - DNA, 33 bp, Homo sapien
gtgatgtcaaagagatcaaatgactttaaactg

SEQ ID NO: 933995 - DNA, 33 bp, Homo sapien
atgtgtcaaagactgaataataacgcatgaaga

SEQ ID NO: 933996 - DNA, 33 bp, Homo sapien
atgtgtcaaagactgagtaataacgcatgaaga

SEQ ID NO: 933997 - DNA, 33 bp, Homo sapien
tgaagcccgtctttgacaccaacccaaagtcct

SEQ ID NO: 933998 - DNA, 33 bp, Homo sapien
tgaagcccgtctttgataccaacccaaagtcct

SEQ ID NO: 933999 - DNA, 33 bp, Homo sapien
ggagctcaaaacccacaaggaatccctcttctt

SEQ ID NO: 934000 - DNA, 33 bp, Homo sapien
ggagctcaaaacccacgaggaatccctcttctt

SEQ ID NO: 934001 - DNA, 33 bp, Homo sapien
gaagcttttcactctacgtggaagacacacgtg

SEQ ID NO: 934002 - DNA, 33 bp, Homo sapien
gaagcttttcactctatgtggaagacacacgtg

SEQ ID NO: 934003 - DNA, 33 bp, Homo sapien
aacatccagaagtttgaaatgaatgtaataatg

SEQ ID NO: 934004 - DNA, 33 bp, Homo sapien
aacatccagaagtttgtaatgaatgtaataatg

SEQ ID NO: 934005 - DNA, 33 bp, Homo sapien
acctgactgtaggctaacaacctcagaagccac

SEQ ID NO: 934006 - DNA, 33 bp, Homo sapien
acctgactgtaggctaccaacctcagaagccac

SEQ ID NO: 934007 - DNA, 33 bp, Homo sapien
tacagaattggagaaaaggttatattctgcttt

SEQ ID NO: 934008 - DNA, 33 bp, Homo sapien
tacagaattggagaaagggttatattctgcttt

SEQ ID NO: 934009 - DNA, 33 bp, Homo sapien
atagagttaccaaaaccacaaggctaagacctg

SEQ ID NO: 934010 - DNA, 33 bp, Homo sapien
atagagttaccaaaacgacaaggctaagacctg

SEQ ID NO: 934011 - DNA, 33 bp, Homo sapien
tttgcagagcattttcacattcatgattcagag

SEQ ID NO: 934012 - DNA, 33 bp, Homo sapien
tttgcagagcattttcgcattcatgattcagag

SEQ ID NO: 934013 - DNA, 33 bp, Homo sapien
catttctggcttggaaactagaagtggaaactc

SEQ ID NO: 934014 - DNA, 33 bp, Homo sapien
catttctggcttggaacctagaagtggaaactc

SEQ ID NO: 934015 - DNA, 33 bp, Homo sapien
gttgaggctgaattccaactgagcaaatacaca

SEQ ID NO: 934016 - DNA, 33 bp, Homo sapien
gttgaggctgaattccgactgagcaaatacaca

SEQ ID NO: 934017 - DNA, 33 bp, Homo sapien
gtggaaggcctcatacaaggtgggaaaatatag

SEQ ID NO: 934018 - DNA, 33 bp, Homo sapien
gtggaaggcctcatacgaggtgggaaaatatag

SEQ ID NO: 934019 - DNA, 33 bp, Homo sapien
cagacgccagcctgataaaaatgctggctgctt

SEQ ID NO: 934020 - DNA, 33 bp, Homo sapien
cagacgccagcctgatcaaaatgctggctgctt

SEQ ID NO: 934021 - DNA, 33 bp, Homo sapien
ctttgatcgttttcccaaaaccgcgttggacac

SEQ ID NO: 934022 - DNA, 33 bp, Homo sapien
ctttgatcgttttcccgaaaccgcgttggacac

SEQ ID NO: 934023 - DNA, 33 bp, Homo sapien
aagtggagaccatttaccgttttttaaggctca

SEQ ID NO: 934024 - DNA, 33 bp, Homo sapien
aagtggagaccatttatcgttttttaaggctca

SEQ ID NO: 934025 - DNA, 33 bp, Homo sapien
gcagaccacattttgactatgtcttcctcggac

SEQ ID NO: 934026 - DNA, 33 bp, Homo sapien
gcagaccacattttgattatgtcttcctcggac

SEQ ID NO: 934027 - DNA, 33 bp, Homo sapien
ccatccttgagagtcacgtcttcttggcagtgt

SEQ ID NO: 934028 - DNA, 33 bp, Homo sapien
ccatccttgagagtcatgtcttcttggcagtgt

SEQ ID NO: 934029 - DNA, 33 bp, Homo sapien
tgacaatttttaaagtaacagcaagatatttaa

SEQ ID NO: 934030 - DNA, 33 bp, Homo sapien
tgacaatttttaaagttacagcaagatatttaa

SEQ ID NO: 934031 - DNA, 33 bp, Homo sapien
ctcaaattcgtgtctacgttcatttcttcatca

SEQ ID NO: 934032 - DNA, 33 bp, Homo sapien
ctcaaattcgtgtctatgttcatttcttcatca

SEQ ID NO: 934033 - DNA, 33 bp, Homo sapien
ttagtagaatttcaaacgtgtatgcggtggtgt

SEQ ID NO: 934034 - DNA, 33 bp, Homo sapien
ttagtagaatttcaaaggtgtatgcggtggtgt

SEQ ID NO: 934035 - DNA, 33 bp, Homo sapien
acaagccattcaccagccatagattccgggcaa

SEQ ID NO: 934036 - DNA, 33 bp, Homo sapien
acaagccattcaccaggcatagattccgggcaa

SEQ ID NO: 934037 - DNA, 33 bp, Homo sapien
ggaagaacctagtggcaatgtcaatcatcagtc

SEQ ID NO: 934038 - DNA, 33 bp, Homo sapien
ggaagaacctagtggccatgtcaatcatcagtc

SEQ ID NO: 934039 - DNA, 33 bp, Homo sapien
attccatgatgtcaacacagtgtgctgtattcc

SEQ ID NO: 934040 - DNA, 33 bp, Homo sapien
attccatgatgtcaacgcagtgtgctgtattcc

SEQ ID NO: 934041 - DNA, 33 bp, Homo sapien
ggagcgcctgtgagtcaaatgcccaggtactcc

SEQ ID NO: 934042 - DNA, 33 bp, Homo sapien
ggagcgcctgtgagtcgaatgcccaggtactcc

SEQ ID NO: 934043 - DNA, 33 bp, Homo sapien
ggaggataaattgatcaaagctgagggcaatat

SEQ ID NO: 934044 - DNA, 33 bp, Homo sapien
ggaggataaattgatcgaagctgagggcaatat

SEQ ID NO: 934045 - DNA, 33 bp, Homo sapien
gtcttaaggataggtaagagatccaatcagcct

SEQ ID NO: 934046 - DNA, 33 bp, Homo sapien
gtcttaaggataggtacgagatccaatcagcct

SEQ ID NO: 934047 - DNA, 33 bp, Homo sapien
aggtgacctaccaatcaagtcttaaatagggag

SEQ ID NO: 934048 - DNA, 33 bp, Homo sapien
aggtgacctaccaatcgagtcttaaatagggag

SEQ ID NO: 934049 - DNA, 33 bp, Homo sapien
agtgtgtgcagttaacaataaagaaaataagaa

SEQ ID NO: 934050 - DNA, 33 bp, Homo sapien
agtgtgtgcagttaaccataaagaaaataagaa

SEQ ID NO: 934051 - DNA, 33 bp, Homo sapien
atgtagaagagaaacaaggtacataaatcactg

SEQ ID NO: 934052 - DNA, 33 bp, Homo sapien
atgtagaagagaaacacggtacataaatcactg

SEQ ID NO: 934053 - DNA, 33 bp, Homo sapien
agaaatagaagggatgacacaactgagccacct

SEQ ID NO: 934054 - DNA, 33 bp, Homo sapien
agaaatagaagggatggcacaactgagccacct

SEQ ID NO: 934055 - DNA, 33 bp, Homo sapien
gggttggtggccagtacgtaggtggcaaaagaa

SEQ ID NO: 934056 - DNA, 33 bp, Homo sapien
gggttggtggccagtaggtaggtggcaaaagaa

SEQ ID NO: 934057 - DNA, 33 bp, Homo sapien
tcccaccagctataacaatagtcacatccagtt

SEQ ID NO: 934058 - DNA, 33 bp, Homo sapien
tcccaccagctataaccatagtcacatccagtt

SEQ ID NO: 934059 - DNA, 33 bp, Homo sapien
agtttactgacccctacaactgaaaactccaga

SEQ ID NO: 934060 - DNA, 33 bp, Homo sapien
agtttactgacccctataactgaaaactccaga

SEQ ID NO: 934061 - DNA, 33 bp, Homo sapien
tagcagtgaccacaaaacttaacttccaagata

SEQ ID NO: 934062 - DNA, 33 bp, Homo sapien
tagcagtgaccacaaatcttaacttccaagata

SEQ ID NO: 934063 - DNA, 33 bp, Homo sapien
ccaagcacagatttgacgggggacgagcaggga

SEQ ID NO: 934064 - DNA, 33 bp, Homo sapien
ccaagcacagatttgaggggggacgagcaggga

SEQ ID NO: 934065 - DNA, 33 bp, Homo sapien
caggaccttcgagggaaacttattatcctcagg

SEQ ID NO: 934066 - DNA, 33 bp, Homo sapien
caggaccttcgagggagacttattatcctcagg

SEQ ID NO: 934067 - DNA, 33 bp, Homo sapien
aactcaggggaattccacaaaaatctaggtacc

SEQ ID NO: 934068 - DNA, 33 bp, Homo sapien
aactcaggggaattccgcaaaaatctaggtacc

SEQ ID NO: 934069 - DNA, 33 bp, Homo sapien
gagagcgtgcgctccaataaaacggcactaaat

SEQ ID NO: 934070 - DNA, 33 bp, Homo sapien
gagagcgtgcgctccattaaaacggcactaaat

SEQ ID NO: 934071 - DNA, 33 bp, Homo sapien
atccccgtctgtgcgacaccatctccccacttc

SEQ ID NO: 934072 - DNA, 33 bp, Homo sapien
atccccgtctgtgcgataccatctccccacttc

SEQ ID NO: 934073 - DNA, 33 bp, Homo sapien
atctccccacttctacaccaagctgctcacggt

SEQ ID NO: 934074 - DNA, 33 bp, Homo sapien
atctccccacttctacgccaagctgctcacggt

SEQ ID NO: 934075 - DNA, 33 bp, Homo sapien
cgacaatgtccaggctaagatttttaggatgag

SEQ ID NO: 934076 - DNA, 33 bp, Homo sapien
cgacaatgtccaggctgagatttttaggatgag

SEQ ID NO: 934077 - DNA, 33 bp, Homo sapien
aacactggggagtaggacccaagcatccatcta

SEQ ID NO: 934078 - DNA, 33 bp, Homo sapien
aacactggggagtagggcccaagcatccatcta

SEQ ID NO: 934079 - DNA, 33 bp, Homo sapien
gctcatcaacagcagacgtttatttaccgggtt

SEQ ID NO: 934080 - DNA, 33 bp, Homo sapien
gctcatcaacagcagatgtttatttaccgggtt

SEQ ID NO: 934081 - DNA, 33 bp, Homo sapien
tcttctgaacaaagtaaaaaggcagcgtgcggt

SEQ ID NO: 934082 - DNA, 33 bp, Homo sapien
tcttctgaacaaagtagaaaggcagcgtgcggt

SEQ ID NO: 934083 - DNA, 33 bp, Homo sapien
gtcatgctggcatatcaatcatttgtttctttt

SEQ ID NO: 934084 - DNA, 33 bp, Homo sapien
gtcatgctggcatatcgatcatttgtttctttt

SEQ ID NO: 934085 - DNA, 33 bp, Homo sapien
caactctcgctgtccactcaattcactaggaga

SEQ ID NO: 934086 - DNA, 33 bp, Homo sapien
caactctcgctgtccattcaattcactaggaga

SEQ ID NO: 934087 - DNA, 33 bp, Homo sapien
gacagcttctggtcaaggggatgtgggtgaaag

SEQ ID NO: 934088 - DNA, 33 bp, Homo sapien
gacagcttctggtcaatgggatgtgggtgaaag

SEQ ID NO: 934089 - DNA, 33 bp, Homo sapien
tgtgtgtcttggtataactgattaaaacaaatc

SEQ ID NO: 934090 - DNA, 33 bp, Homo sapien
tgtgtgtcttggtatacctgattaaaacaaatc

SEQ ID NO: 934091 - DNA, 33 bp, Homo sapien
gagaaatctactcaaccgccaatatgagccatt

SEQ ID NO: 934092 - DNA, 33 bp, Homo sapien
gagaaatctactcaactgccaatatgagccatt

SEQ ID NO: 934093 - DNA, 33 bp, Homo sapien
acatatgctgcttttccaatctcagagacaagt

SEQ ID NO: 934094 - DNA, 33 bp, Homo sapien
acatatgctgcttttctaatctcagagacaagt

SEQ ID NO: 934095 - DNA, 33 bp, Homo sapien
gaccccaccttcaataaagttacattccgaggt

SEQ ID NO: 934096 - DNA, 33 bp, Homo sapien
gaccccaccttcaatacagttacattccgaggt

SEQ ID NO: 934097 - DNA, 33 bp, Homo sapien
ttgatatttgtcgccacgatgcggcggtttatc

SEQ ID NO: 934098 - DNA, 33 bp, Homo sapien
ttgatatttgtcgccatgatgcggcggtttatc

SEQ ID NO: 934099 - DNA, 33 bp, Homo sapien
gctatgttacagacagcatttgaaacaggagcc

SEQ ID NO: 934100 - DNA, 33 bp, Homo sapien
gctatgttacagacaggatttgaaacaggagcc

SEQ ID NO: 934101 - DNA, 33 bp, Homo sapien
aagtccaatttactgaatattgaaggaaaggga

SEQ ID NO: 934102 - DNA, 33 bp, Homo sapien
aagtccaatttactgagtattgaaggaaaggga

SEQ ID NO: 934103 - DNA, 33 bp, Homo sapien
gatcaaacatacataacgacaagtgtttaaaat

SEQ ID NO: 934104 - DNA, 33 bp, Homo sapien
gatcaaacatacataatgacaagtgtttaaaat

SEQ ID NO: 934105 - DNA, 33 bp, Homo sapien
tgccccttaatccttacgcagaaacatataatg

SEQ ID NO: 934106 - DNA, 33 bp, Homo sapien
tgccccttaatccttatgcagaaacatataatg

SEQ ID NO: 934107 - DNA, 33 bp, Homo sapien
caccttacaaagatcacagtaatacaacaacat

SEQ ID NO: 934108 - DNA, 33 bp, Homo sapien
caccttacaaagatcatagtaatacaacaacat

SEQ ID NO: 934109 - DNA, 33 bp, Homo sapien
cataattactcaaagtgaagtcgtgatccatta

SEQ ID NO: 934110 - DNA, 33 bp, Homo sapien
cataattactcaaagttaagtcgtgatccatta

SEQ ID NO: 934111 - DNA, 33 bp, Homo sapien
aggtggagcccggtgtcaattgtttgggtcata

SEQ ID NO: 934112 - DNA, 33 bp, Homo sapien
aggtggagcccggtgtgaattgtttgggtcata

SEQ ID NO: 934113 - DNA, 33 bp, Homo sapien
tcagggagacgagaagcaattgcagttaagaac

SEQ ID NO: 934114 - DNA, 33 bp, Homo sapien
tcagggagacgagaaggaattgcagttaagaac

SEQ ID NO: 934115 - DNA, 33 bp, Homo sapien
cctgaaccaaacagaaaggactgcgttcaccca

SEQ ID NO: 934116 - DNA, 33 bp, Homo sapien
cctgaaccaaacagaagggactgcgttcaccca

SEQ ID NO: 934117 - DNA, 33 bp, Homo sapien
ctcagttaaaatgctaccaaaactgtttcatgt

SEQ ID NO: 934118 - DNA, 33 bp, Homo sapien
ctcagttaaaatgctatcaaaactgtttcatgt

SEQ ID NO: 934119 - DNA, 33 bp, Homo sapien
tctttttgtaacctaaactcttgccaacttgtt

SEQ ID NO: 934120 - DNA, 33 bp, Homo sapien
tctttttgtaacctaatctcttgccaacttgtt

SEQ ID NO: 934121 - DNA, 33 bp, Homo sapien
ggaccctctgatgttaaaaaagccagaaaaggc

SEQ ID NO: 934122 - DNA, 33 bp, Homo sapien
ggaccctctgatgttacaaaagccagaaaaggc

SEQ ID NO: 934123 - DNA, 33 bp, Homo sapien
aagaacttacttcctacagggaaatcaggttcg

SEQ ID NO: 934124 - DNA, 33 bp, Homo sapien
aagaacttacttcctagagggaaatcaggttcg

SEQ ID NO: 934125 - DNA, 33 bp, Homo sapien
aaagaaaaggaaaggcaagtgcacagtgtggaa

SEQ ID NO: 934126 - DNA, 33 bp, Homo sapien
aaagaaaaggaaaggcgagtgcacagtgtggaa

SEQ ID NO: 934127 - DNA, 33 bp, Homo sapien
ttcacattgcatgacaccgggaatccccataat

SEQ ID NO: 934128 - DNA, 33 bp, Homo sapien
ttcacattgcatgacatcgggaatccccataat

SEQ ID NO: 934129 - DNA, 33 bp, Homo sapien
gctggatgggcctttccagcactttctctagga

SEQ ID NO: 934130 - DNA, 33 bp, Homo sapien
gctggatgggcctttctagcactttctctagga

SEQ ID NO: 934131 - DNA, 33 bp, Homo sapien
ttgcggagaggattaaatatgttacttaaggca

SEQ ID NO: 934132 - DNA, 33 bp, Homo sapien
ttgcggagaggattaactatgttacttaaggca

SEQ ID NO: 934133 - DNA, 33 bp, Homo sapien
ggggcacaattcaacccgctgcagattcccatg

SEQ ID NO: 934134 - DNA, 33 bp, Homo sapien
ggggcacaattcaacctgctgcagattcccatg

SEQ ID NO: 934135 - DNA, 33 bp, Homo sapien
cagcaatgtttggttacgtatatatagtcaggt

SEQ ID NO: 934136 - DNA, 33 bp, Homo sapien
cagcaatgtttggttaggtatatatagtcaggt

SEQ ID NO: 934137 - DNA, 33 bp, Homo sapien
ggtcagggcttcactgccacttcgagatgaagg

SEQ ID NO: 934138 - DNA, 33 bp, Homo sapien
ggtcagggcttcactgtcacttcgagatgaagg

SEQ ID NO: 934139 - DNA, 33 bp, Homo sapien
gtggtggtaagtgctacgaaaaattaattaagc

SEQ ID NO: 934140 - DNA, 33 bp, Homo sapien
gtggtggtaagtgctatgaaaaattaattaagc

SEQ ID NO: 934141 - DNA, 33 bp, Homo sapien
tctgcagctgacacaaatagccacatgattgtg

SEQ ID NO: 934142 - DNA, 33 bp, Homo sapien
tctgcagctgacacaagtagccacatgattgtg

SEQ ID NO: 934143 - DNA, 33 bp, Homo sapien
aaaatggaagagcccaggccaggtaaaagaatg

SEQ ID NO: 934144 - DNA, 33 bp, Homo sapien
aaaatggaagagcccatgccaggtaaaagaatg

SEQ ID NO: 934145 - DNA, 33 bp, Homo sapien
aaaagacaagtgccccaccctcagactatcaca

SEQ ID NO: 934146 - DNA, 33 bp, Homo sapien
aaaagacaagtgccccgccctcagactatcaca

SEQ ID NO: 934147 - DNA, 33 bp, Homo sapien
gtacaatgtagtggcactagttacttttgcaat

SEQ ID NO: 934148 - DNA, 33 bp, Homo sapien
gtacaatgtagtggcattagttacttttgcaat

SEQ ID NO: 934149 - DNA, 33 bp, Homo sapien
aaccagcccaccactaataggacctgtgctctg

SEQ ID NO: 934150 - DNA, 33 bp, Homo sapien
aaccagcccaccactactaggacctgtgctctg

SEQ ID NO: 934151 - DNA, 33 bp, Homo sapien
tgccctttggaatctacgctgaatgatgatctc

SEQ ID NO: 934152 - DNA, 33 bp, Homo sapien
tgccctttggaatctatgctgaatgatgatctc

SEQ ID NO: 934153 - DNA, 33 bp, Homo sapien
ggacactgcagacatccaggttcggggacttgt

SEQ ID NO: 934154 - DNA, 33 bp, Homo sapien
ggacactgcagacatctaggttcggggacttgt

SEQ ID NO: 934155 - DNA, 33 bp, Homo sapien
atgaatcttaattttccctcaaggcttggccaa

SEQ ID NO: 934156 - DNA, 33 bp, Homo sapien
atgaatcttaattttctctcaaggcttggccaa

SEQ ID NO: 934157 - DNA, 33 bp, Homo sapien
aaatatgggtatgtgccctgccttataggttca

SEQ ID NO: 934158 - DNA, 33 bp, Homo sapien
aaatatgggtatgtgctctgccttataggttca

SEQ ID NO: 934159 - DNA, 33 bp, Homo sapien
cgtgtgtctcagttccccttcccatggaataga

SEQ ID NO: 934160 - DNA, 33 bp, Homo sapien
cgtgtgtctcagttcctcttcccatggaataga

SEQ ID NO: 934161 - DNA, 33 bp, Homo sapien
cataccggtaaggaccacttacatcttaccaca

SEQ ID NO: 934162 - DNA, 33 bp, Homo sapien
cataccggtaaggaccgcttacatcttaccaca

SEQ ID NO: 934163 - DNA, 33 bp, Homo sapien
gagcttcagagggagaagggcatattagctctc

SEQ ID NO: 934164 - DNA, 33 bp, Homo sapien
gagcttcagagggagatgggcatattagctctc

SEQ ID NO: 934165 - DNA, 33 bp, Homo sapien
tgggactacaggcctgacaatttttgttttttt

SEQ ID NO: 934166 - DNA, 33 bp, Homo sapien
tgggactacaggcctgccaatttttgttttttt

SEQ ID NO: 934167 - DNA, 33 bp, Homo sapien
aatataaacatcctgcagaatcatacatggcat

SEQ ID NO: 934168 - DNA, 33 bp, Homo sapien
aatataaacatcctgcggaatcatacatggcat

SEQ ID NO: 934169 - DNA, 33 bp, Homo sapien
tatcctcaactttatcaagggccagcagtggaa

SEQ ID NO: 934170 - DNA, 33 bp, Homo sapien
tatcctcaactttatctagggccagcagtggaa

SEQ ID NO: 934171 - DNA, 33 bp, Homo sapien
tttgactgttgacttaaatggaaaacaaaacga

SEQ ID NO: 934172 - DNA, 33 bp, Homo sapien
tttgactgttgacttacatggaaaacaaaacga

SEQ ID NO: 934173 - DNA, 33 bp, Homo sapien
tcatactgatctgagcaatgttattgttaattt

SEQ ID NO: 934174 - DNA, 33 bp, Homo sapien
tcatactgatctgagctatgttattgttaattt

SEQ ID NO: 934175 - DNA, 33 bp, Homo sapien
ttagtagagaatggaacgtcgccatgttggcca

SEQ ID NO: 934176 - DNA, 33 bp, Homo sapien
ttagtagagaatggaatgtcgccatgttggcca

SEQ ID NO: 934177 - DNA, 33 bp, Homo sapien
catttttatgcatagcgctgggtgttttacaaa

SEQ ID NO: 934178 - DNA, 33 bp, Homo sapien
catttttatgcatagctctgggtgttttacaaa

SEQ ID NO: 934179 - DNA, 33 bp, Homo sapien
aagccatttacttgaacctcataaatccttttt

SEQ ID NO: 934180 - DNA, 33 bp, Homo sapien
aagccatttacttgaagctcataaatccttttt

SEQ ID NO: 934181 - DNA, 33 bp, Homo sapien
agagaacctagtgcccagaatgcaggtcacaga

SEQ ID NO: 934182 - DNA, 33 bp, Homo sapien
agagaacctagtgcccggaatgcaggtcacaga

SEQ ID NO: 934183 - DNA, 33 bp, Homo sapien
ccaaacacaggaggccactatattggtgacaga

SEQ ID NO: 934184 - DNA, 33 bp, Homo sapien
ccaaacacaggaggccgctatattggtgacaga

SEQ ID NO: 934185 - DNA, 33 bp, Homo sapien
gctgcctttgtggaccgatctcacgtttctggg

SEQ ID NO: 934186 - DNA, 33 bp, Homo sapien
gctgcctttgtggacctatctcacgtttctggg

SEQ ID NO: 934187 - DNA, 33 bp, Homo sapien
ccagtcacaaaaagccacagattatacagctcc

SEQ ID NO: 934188 - DNA, 33 bp, Homo sapien
ccagtcacaaaaagccgcagattatacagctcc

SEQ ID NO: 934189 - DNA, 33 bp, Homo sapien
actccagcccgtgacaaagtaacccagtctcaa

SEQ ID NO: 934190 - DNA, 33 bp, Homo sapien
actccagcccgtgacagagtaacccagtctcaa

SEQ ID NO: 934191 - DNA, 33 bp, Homo sapien
aagttaaagtttctaacacaatgtcttctgaac

SEQ ID NO: 934192 - DNA, 33 bp, Homo sapien
aagttaaagtttctaatacaatgtcttctgaac

SEQ ID NO: 934193 - DNA, 33 bp, Homo sapien
ttacacattcctttaaatagtgcctacacctgc

SEQ ID NO: 934194 - DNA, 33 bp, Homo sapien
ttacacattcctttaagtagtgcctacacctgc

SEQ ID NO: 934195 - DNA, 33 bp, Homo sapien
gtcatgagaacttcacactgcaatggtgaatgg

SEQ ID NO: 934196 - DNA, 33 bp, Homo sapien
gtcatgagaacttcacgctgcaatggtgaatgg

SEQ ID NO: 934197 - DNA, 33 bp, Homo sapien
tttcacttcacctcaaaatatacacttctggcc

SEQ ID NO: 934198 - DNA, 33 bp, Homo sapien
tttcacttcacctcaagatatacacttctggcc

SEQ ID NO: 934199 - DNA, 33 bp, Homo sapien
gccctgctcttcattacctgtggctaccgtggc

SEQ ID NO: 934200 - DNA, 33 bp, Homo sapien
gccctgctcttcattatctgtggctaccgtggc

SEQ ID NO: 934201 - DNA, 33 bp, Homo sapien
gagagaaacccacctgcagactcggttaggctt

SEQ ID NO: 934202 - DNA, 33 bp, Homo sapien
gagagaaacccacctggagactcggttaggctt

SEQ ID NO: 934203 - DNA, 33 bp, Homo sapien
tgttctgttccaagcagtctttcagctgagcat

SEQ ID NO: 934204 - DNA, 33 bp, Homo sapien
tgttctgttccaagcattctttcagctgagcat

SEQ ID NO: 934205 - DNA, 33 bp, Homo sapien
ctggagtcaggaaataacagcatggcatccatg

SEQ ID NO: 934206 - DNA, 33 bp, Homo sapien
ctggagtcaggaaatagcagcatggcatccatg

SEQ ID NO: 934207 - DNA, 33 bp, Homo sapien
aaagaaaaaacgttgacgagggctacagagcaa

SEQ ID NO: 934208 - DNA, 33 bp, Homo sapien
aaagaaaaaacgttgatgagggctacagagcaa

SEQ ID NO: 934209 - DNA, 33 bp, Homo sapien
tactttagttatttcacaggtgagaatctgagg

SEQ ID NO: 934210 - DNA, 33 bp, Homo sapien
tactttagttatttcataggtgagaatctgagg

SEQ ID NO: 934211 - DNA, 33 bp, Homo sapien
gggagactcacagcgacgatgagagaataaatt

SEQ ID NO: 934212 - DNA, 33 bp, Homo sapien
gggagactcacagcgatgatgagagaataaatt

SEQ ID NO: 934213 - DNA, 33 bp, Homo sapien
tccatttttctggtaaaagtacagtgagacacc

SEQ ID NO: 934214 - DNA, 33 bp, Homo sapien
tccatttttctggtaacagtacagtgagacacc

SEQ ID NO: 934215 - DNA, 33 bp, Homo sapien
tccctggcaggtgatcaaactgtgccgcccgct

SEQ ID NO: 934216 - DNA, 33 bp, Homo sapien
tccctggcaggtgatcgaactgtgccgcccgct

SEQ ID NO: 934217 - DNA, 33 bp, Homo sapien
gaattggggacaatcacgtgtagggtcaaaggg

SEQ ID NO: 934218 - DNA, 33 bp, Homo sapien
gaattggggacaatcatgtgtagggtcaaaggg

SEQ ID NO: 934219 - DNA, 33 bp, Homo sapien
atgtatgcgctgataactcgtaggttgatgacg

SEQ ID NO: 934220 - DNA, 33 bp, Homo sapien
atgtatgcgctgataagtcgtaggttgatgacg

SEQ ID NO: 934221 - DNA, 33 bp, Homo sapien
acaggaagctgcacacagaaatttcccacaaat

SEQ ID NO: 934222 - DNA, 33 bp, Homo sapien
acaggaagctgcacacggaaatttcccacaaat

SEQ ID NO: 934223 - DNA, 33 bp, Homo sapien
agataaggttcctacaacaacattaacttggtt

SEQ ID NO: 934224 - DNA, 33 bp, Homo sapien
agataaggttcctacagcaacattaacttggtt

SEQ ID NO: 934225 - DNA, 33 bp, Homo sapien
tacaaagggcctgttacagtcacgtaattcatt

SEQ ID NO: 934226 - DNA, 33 bp, Homo sapien
tacaaagggcctgttatagtcacgtaattcatt

SEQ ID NO: 934227 - DNA, 33 bp, Homo sapien
atcagactgtgttttgcattggagacattcatg

SEQ ID NO: 934228 - DNA, 33 bp, Homo sapien
atcagactgtgttttgtattggagacattcatg

SEQ ID NO: 934229 - DNA, 33 bp, Homo sapien
ggctgccctagttctacgccatgcagccctcac

SEQ ID NO: 934230 - DNA, 33 bp, Homo sapien
ggctgccctagttctatgccatgcagccctcac

SEQ ID NO: 934231 - DNA, 33 bp, Homo sapien
aagagcaggttcgccgacagacacagagttaaa

SEQ ID NO: 934232 - DNA, 33 bp, Homo sapien
aagagcaggttcgccggcagacacagagttaaa

SEQ ID NO: 934233 - DNA, 33 bp, Homo sapien; identical to SEQ ID NO: 934231

SEQ ID NO: 934234 - DNA, 33 bp, Homo sapien; identical to SEQ ID NO: 934232

SEQ ID NO: 934235 - DNA, 33 bp, Homo sapien
catttgcagaggtaccaaagacacttctgaaag

SEQ ID NO: 934236 - DNA, 33 bp, Homo sapien
catttgcagaggtaccgaagacacttctgaaag

SEQ ID NO: 934237 - DNA, 33 bp, Homo sapien
ccaaaaactgcaaacacggattacttttggccc

SEQ ID NO: 934238 - DNA, 33 bp, Homo sapien
ccaaaaactgcaaacatggattacttttggccc

SEQ ID NO: 934239 - DNA, 33 bp, Homo sapien
ctaccgcgccctgccaatattgacctttttgtc

SEQ ID NO: 934240 - DNA, 33 bp, Homo sapien
ctaccgcgccctgccagtattgacctttttgtc

SEQ ID NO: 934241 - DNA, 33 bp, Homo sapien
gatggagcttacagtacgtagctgcaaaactac

SEQ ID NO: 934242 - DNA, 33 bp, Homo sapien
gatggagcttacagtatgtagctgcaaaactac

SEQ ID NO: 934243 - DNA, 33 bp, Homo sapien
tatattgccatcatcaatcaaatgttgtactta

SEQ ID NO: 934244 - DNA, 33 bp, Homo sapien
tatattgccatcatcagtcaaatgttgtactta

SEQ ID NO: 934245 - DNA, 33 bp, Homo sapien
aaatgaagatgagacaacatgaataatcttggt

SEQ ID NO: 934246 - DNA, 33 bp, Homo sapien
aaatgaagatgagacagcatgaataatcttggt

SEQ ID NO: 934247 - DNA, 33 bp, Homo sapien
ctgtgtaatcctttataacttacaaactgcttt

SEQ ID NO: 934248 - DNA, 33 bp, Homo sapien
ctgtgtaatcctttattacttacaaactgcttt

SEQ ID NO: 934249 - DNA, 33 bp, Homo sapien
aaaatctaggagaaaaacaatctctctaaaaca

SEQ ID NO: 934250 - DNA, 33 bp, Homo sapien
aaaatctaggagaaaatcaatctctctaaaaca

SEQ ID NO: 934251 - DNA, 33 bp, Homo sapien
acagtagactatcttacgcaattctagttattc

SEQ ID NO: 934252 - DNA, 33 bp, Homo sapien
acagtagactatcttatgcaattctagttattc

SEQ ID NO: 934253 - DNA, 33 bp, Homo sapien
tctcagttttcactaccaacaacatcctaggtt

SEQ ID NO: 934254 - DNA, 33 bp, Homo sapien
tctcagttttcactactaacaacatcctaggtt

SEQ ID NO: 934255 - DNA, 33 bp, Homo sapien
atgcctttgaaagtgcaatacaattttttttaa

SEQ ID NO: 934256 - DNA, 33 bp, Homo sapien
atgcctttgaaagtgctatacaattttttttaa

SEQ ID NO: 934257 - DNA, 33 bp, Homo sapien
atgtggccattattcaccaaaccaagtaggtag

SEQ ID NO: 934258 - DNA, 33 bp, Homo sapien
atgtggccattattcatcaaaccaagtaggtag

SEQ ID NO: 934259 - DNA, 33 bp, Homo sapien
ctgcttattctacccacaactcttattctaccc

SEQ ID NO: 934260 - DNA, 33 bp, Homo sapien
ctgcttattctacccagaactcttattctaccc

SEQ ID NO: 934261 - DNA, 33 bp, Homo sapien
atctcctcatattcaaattctagctaagaagaa

SEQ ID NO: 934262 - DNA, 33 bp, Homo sapien
atctcctcatattcaatttctagctaagaagaa

SEQ ID NO: 934263 - DNA, 33 bp, Homo sapien
tcatgctgaagatatgaaaattggttatcgagg

SEQ ID NO: 934264 - DNA, 33 bp, Homo sapien
tcatgctgaagatatgtaaattggttatcgagg

SEQ ID NO: 934265 - DNA, 33 bp, Homo sapien
tagtataggcggaagacgaatggcacagggaaa

SEQ ID NO: 934266 - DNA, 33 bp, Homo sapien
tagtataggcggaagatgaatggcacagggaaa

SEQ ID NO: 934267 - DNA, 33 bp, Homo sapien
agtgatgtgtgtatggccattcaggttctttct

SEQ ID NO: 934268 - DNA, 33 bp, Homo sapien
agtgatgtgtgtatggtcattcaggttctttct

SEQ ID NO: 934269 - DNA, 33 bp, Homo sapien
aatctacaaaccatcacggctaatacctattaa

SEQ ID NO: 934270 - DNA, 33 bp, Homo sapien
aatctacaaaccatcagggctaatacctattaa

SEQ ID NO: 934271 - DNA, 33 bp, Homo sapien
atatttatcaacatgaatacatctcaaaaacat

SEQ ID NO: 934272 - DNA, 33 bp, Homo sapien
atatttatcaacatgactacatctcaaaaacat

SEQ ID NO: 934273 - DNA, 33 bp, Homo sapien
ttcatgtatcatcttaccaatgagaccttcaag

SEQ ID NO: 934274 - DNA, 33 bp, Homo sapien
ttcatgtatcatcttatcaatgagaccttcaag

SEQ ID NO: 934275 - DNA, 33 bp, Homo sapien
tcacttaagtgttgagaaaacctactctaactt

SEQ ID NO: 934276 - DNA, 33 bp, Homo sapien
tcacttaagtgttgaggaaacctactctaactt

SEQ ID NO: 934277 - DNA, 33 bp, Homo sapien
aaaggagttaactagcaaaatggacaaagctaa

SEQ ID NO: 934278 - DNA, 33 bp, Homo sapien
aaaggagttaactagcgaaatggacaaagctaa

SEQ ID NO: 934279 - DNA, 33 bp, Homo sapien
ggtatacagtgcgcaacgctgaagtcaaggtga

SEQ ID NO: 934280 - DNA, 33 bp, Homo sapien
ggtatacagtgcgcaatgctgaagtcaaggtga

SEQ ID NO: 934281 - DNA, 33 bp, Homo sapien
ttgtgaaaaaaagtcaatcggcacagcagactt

SEQ ID NO: 934282 - DNA, 33 bp, Homo sapien
ttgtgaaaaaaagtcagtcggcacagcagactt

SEQ ID NO: 934283 - DNA, 33 bp, Homo sapien
agagctacaagaagatgaacgttttctcacctg

SEQ ID NO: 934284 - DNA, 33 bp, Homo sapien
agagctacaagaagattaacgttttctcacctg

SEQ ID NO: 934285 - DNA, 33 bp, Homo sapien
ttgcctctaacactgaagatattccactcatat

SEQ ID NO: 934286 - DNA, 33 bp, Homo sapien
ttgcctctaacactgatgatattccactcatat

SEQ ID NO: 934287 - DNA, 33 bp, Homo sapien
cattcactctctaggaaaagttattagtgacta

SEQ ID NO: 934288 - DNA, 33 bp, Homo sapien
cattcactctctaggagaagttattagtgacta

SEQ ID NO: 934289 - DNA, 33 bp, Homo sapien
cctgtctcatcagtccaccaaatgcacttgaat

SEQ ID NO: 934290 - DNA, 33 bp, Homo sapien
cctgtctcatcagtcctccaaatgcacttgaat

SEQ ID NO: 934291 - DNA, 33 bp, Homo sapien
gttccaagcattaaaaaaaaatctacattcagt

SEQ ID NO: 934292 - DNA, 33 bp, Homo sapien
gttccaagcattaaaagaaaatctacattcagt

SEQ ID NO: 934293 - DNA, 33 bp, Homo sapien
ccagagagagaattgaccaacctgtcgaatcac

SEQ ID NO: 934294 - DNA, 33 bp, Homo sapien
ccagagagagaattgagcaacctgtcgaatcac

SEQ ID NO: 934295 - DNA, 33 bp, Homo sapien
ggaaacaattcagttcaaagaaatcagcttaat

SEQ ID NO: 934296 - DNA, 33 bp, Homo sapien
ggaaacaattcagttcgaagaaatcagcttaat

SEQ ID NO: 934297 - DNA, 33 bp, Homo sapien
tctttcagttctctaaccttttagttgctctca

SEQ ID NO: 934298 - DNA, 33 bp, Homo sapien
tctttcagttctctaagcttttagttgctctca

SEQ ID NO: 934299 - DNA, 33 bp, Homo sapien
cttccatacccttagactcaagttttctgttta

SEQ ID NO: 934300 - DNA, 33 bp, Homo sapien
cttccatacccttagattcaagttttctgttta

SEQ ID NO: 934301 - DNA, 33 bp, Homo sapien
ggacatttcttaaaaactgaaattgtaacgtat

SEQ ID NO: 934302 - DNA, 33 bp, Homo sapien
ggacatttcttaaaaattgaaattgtaacgtat

SEQ ID NO: 934303 - DNA, 33 bp, Homo sapien
ggctttggctaaatcactaaggtcccacctagc

SEQ ID NO: 934304 - DNA, 33 bp, Homo sapien
ggctttggctaaatcattaaggtcccacctagc

SEQ ID NO: 934305 - DNA, 33 bp, Homo sapien
atttgtgggtcatttgaatgagtcttatggtcc

SEQ ID NO: 934306 - DNA, 33 bp, Homo sapien
atttgtgggtcatttggatgagtcttatggtcc

SEQ ID NO: 934307 - DNA, 33 bp, Homo sapien
tggggccctggtaatacacgtggttagcaagag

SEQ ID NO: 934308 - DNA, 33 bp, Homo sapien
tggggccctggtaatatacgtggttagcaagag

SEQ ID NO: 934309 - DNA, 33 bp, Homo sapien
tcctttccatgctttacagctgcgatttttgca

SEQ ID NO: 934310 - DNA, 33 bp, Homo sapien
tcctttccatgctttatagctgcgatttttgca

SEQ ID NO: 934311 - DNA, 33 bp, Homo sapien
gggcagatagtagaaaacattgtgagtatttca

SEQ ID NO: 934312 - DNA, 33 bp, Homo sapien
gggcagatagtagaaagcattgtgagtatttca

SEQ ID NO: 934313 - DNA, 33 bp, Homo sapien
gttctgttttcatttaaaatcaccttgttttat

SEQ ID NO: 934314 - DNA, 33 bp, Homo sapien
gttctgttttcatttagaatcaccttgttttat

SEQ ID NO: 934315 - DNA, 33 bp, Homo sapien
tataatttcccagaaggcataagtatccatctt

SEQ ID NO: 934316 - DNA, 33 bp, Homo sapien
tataatttcccagaagtcataagtatccatctt

SEQ ID NO: 934317 - DNA, 33 bp, Homo sapien
gacttggtctgtgcaccggaggggttggttgcc

SEQ ID NO: 934318 - DNA, 33 bp, Homo sapien
gacttggtctgtgcactggaggggttggttgcc

SEQ ID NO: 934319 - DNA, 33 bp, Homo sapien
gggcgatggggaacaccatttccattagttcaa

SEQ ID NO: 934320 - DNA, 33 bp, Homo sapien
gggcgatggggaacactatttccattagttcaa

SEQ ID NO: 934321 - DNA, 33 bp, Homo sapien
ggcaaagaagaaggaacaagaatagagctacac

SEQ ID NO: 934322 - DNA, 33 bp, Homo sapien
ggcaaagaagaaggaataagaatagagctacac

SEQ ID NO: 934323 - DNA, 33 bp, Homo sapien
aattatataggcccaaatgtaaagtactaaagg

SEQ ID NO: 934324 - DNA, 33 bp, Homo sapien
aattatataggcccaactgtaaagtactaaagg

SEQ ID NO: 934325 - DNA, 33 bp, Homo sapien
ccacatctcattattgcacaaattcaggtttct

SEQ ID NO: 934326 - DNA, 33 bp, Homo sapien
ccacatctcattattgtacaaattcaggtttct

SEQ ID NO: 934327 - DNA, 33 bp, Homo sapien
acacagacatgagcaaaggccttgagttttctc

SEQ ID NO: 934328 - DNA, 33 bp, Homo sapien
acacagacatgagcaagggccttgagttttctc

SEQ ID NO: 934329 - DNA, 33 bp, Homo sapien
tagaacagctgagtgaaaacaaaatggactcta

SEQ ID NO: 934330 - DNA, 33 bp, Homo sapien
tagaacagctgagtgagaacaaaatggactcta

SEQ ID NO: 934331 - DNA, 33 bp, Homo sapien
ccagctcactgcaagggagacatcaagaggaac

SEQ ID NO: 934332 - DNA, 33 bp, Homo sapien
ccagctcactgcaaggtagacatcaagaggaac

SEQ ID NO: 934333 - DNA, 33 bp, Homo sapien
atatttaaagttaggcccacagtctccacacag

SEQ ID NO: 934334 - DNA, 33 bp, Homo sapien
atatttaaagttaggctcacagtctccacacag

SEQ ID NO: 934335 - DNA, 33 bp, Homo sapien
cacgatttatcagccacgtgacttaagacaaaa

SEQ ID NO: 934336 - DNA, 33 bp, Homo sapien
cacgatttatcagccatgtgacttaagacaaaa

SEQ ID NO: 934337 - DNA, 33 bp, Homo sapien
ctatttacttttgctaaccatctgagatttatt

SEQ ID NO: 934338 - DNA, 33 bp, Homo sapien
ctatttacttttgctatccatctgagatttatt

SEQ ID NO: 934339 - DNA, 33 bp, Homo sapien
aaactgctgagagcttaaaatcatggtgggtgt

SEQ ID NO: 934340 - DNA, 33 bp, Homo sapien
aaactgctgagagcttgaaatcatggtgggtgt

SEQ ID NO: 934341 - DNA, 33 bp, Homo sapien
gttaatcccacatccgaccagttcccatcactg

SEQ ID NO: 934342 - DNA, 33 bp, Homo sapien
gttaatcccacatccggccagttcccatcactg

SEQ ID NO: 934343 - DNA, 33 bp, Homo sapien
ttaattggcctgcataaagattcaattattaac

SEQ ID NO: 934344 - DNA, 33 bp, Homo sapien
ttaattggcctgcatagagattcaattattaac

SEQ ID NO: 934345 - DNA, 33 bp, Homo sapien
aagcagatttagtgaaaaatgcaaaggtataga

SEQ ID NO: 934346 - DNA, 33 bp, Homo sapien
aagcagatttagtgaagaatgcaaaggtataga

SEQ ID NO: 934347 - DNA, 33 bp, Homo sapien
tactaggctcaatacccgagtgataaaataatc

SEQ ID NO: 934348 - DNA, 33 bp, Homo sapien
tactaggctcaatacctgagtgataaaataatc

SEQ ID NO: 934349 - DNA, 33 bp, Homo sapien
gctgtgaaggccgccaaagatcacaagctgttc

SEQ ID NO: 934350 - DNA, 33 bp, Homo sapien
gctgtgaaggccgccagagatcacaagctgttc

SEQ ID NO: 934351 - DNA, 33 bp, Homo sapien
gagagaagatagctccgcagtaacacagagcac

SEQ ID NO: 934352 - DNA, 33 bp, Homo sapien
gagagaagatagctcctcagtaacacagagcac

SEQ ID NO: 934353 - DNA, 33 bp, Homo sapien
ccctgcaaatggaaaaattttactttatatgtt

SEQ ID NO: 934354 - DNA, 33 bp, Homo sapien
ccctgcaaatggaaaagttttactttatatgtt

SEQ ID NO: 934355 - DNA, 33 bp, Homo sapien
gatggaggaaacacacagactctcagaagtggt

SEQ ID NO: 934356 - DNA, 33 bp, Homo sapien
gatggaggaaacacacggactctcagaagtggt

SEQ ID NO: 934357 - DNA, 33 bp, Homo sapien
cttttttattcaaagaacagtttccagcactag

SEQ ID NO: 934358 - DNA, 33 bp, Homo sapien
cttttttattcaaagagcagtttccagcactag

SEQ ID NO: 934359 - DNA, 33 bp, Homo sapien
tttaacaatgggtgtcaaggagaacaatatttg

SEQ ID NO: 934360 - DNA, 33 bp, Homo sapien
tttaacaatgggtgtccaggagaacaatatttg

SEQ ID NO: 934361 - DNA, 33 bp, Homo sapien
acccaaactagaagccagagggtaggtcaacct

SEQ ID NO: 934362 - DNA, 33 bp, Homo sapien
acccaaactagaagccggagggtaggtcaacct

SEQ ID NO: 934363 - DNA, 33 bp, Homo sapien
tgatgcggcctttggcagagagtcacagccaac

SEQ ID NO: 934364 - DNA, 33 bp, Homo sapien
tgatgcggcctttggcggagagtcacagccaac

SEQ ID NO: 934365 - DNA, 33 bp, Homo sapien
ctctgtccatatggccacccttgccaggtcctg

SEQ ID NO: 934366 - DNA, 33 bp, Homo sapien
ctctgtccatatggccgcccttgccaggtcctg

SEQ ID NO: 934367 - DNA, 33 bp, Homo sapien
tatactgtgtgtaagaagccaacagagggcctg

SEQ ID NO: 934368 - DNA, 33 bp, Homo sapien
tatactgtgtgtaagaggccaacagagggcctg

SEQ ID NO: 934369 - DNA, 33 bp, Homo sapien
gtagttttaaaccaaactgtgccttttcctact

SEQ ID NO: 934370 - DNA, 33 bp, Homo sapien
gtagttttaaaccaaattgtgccttttcctact

SEQ ID NO: 934371 - DNA, 33 bp, Homo sapien
tctgttatatttaaaacgtaaaccagacagccc

SEQ ID NO: 934372 - DNA, 33 bp, Homo sapien
tctgttatatttaaaatgtaaaccagacagccc

SEQ ID NO: 934373 - DNA, 33 bp, Homo sapien
ccttttctgttaaaaacatccacgtcctgaaca

SEQ ID NO: 934374 - DNA, 33 bp, Homo sapien
ccttttctgttaaaaatatccacgtcctgaaca

SEQ ID NO: 934375 - DNA, 33 bp, Homo sapien
ggcttgtggctatcacacagacttacagaatat

SEQ ID NO: 934376 - DNA, 33 bp, Homo sapien
ggcttgtggctatcacgcagacttacagaatat

SEQ ID NO: 934377 - DNA, 33 bp, Homo sapien
tgcattcctataccccaaaaatggctggggcat

SEQ ID NO: 934378 - DNA, 33 bp, Homo sapien
tgcattcctataccccgaaaatggctggggcat

SEQ ID NO: 934379 - DNA, 33 bp, Homo sapien
cattcctatttagagacggaagcaaagcctgct

SEQ ID NO: 934380 - DNA, 33 bp, Homo sapien
cattcctatttagagatggaagcaaagcctgct

SEQ ID NO: 934381 - DNA, 33 bp, Homo sapien
ttctgtgcttctctgcaccgaatctctgtaact

SEQ ID NO: 934382 - DNA, 33 bp, Homo sapien
ttctgtgcttctctgcgccgaatctctgtaact

SEQ ID NO: 934383 - DNA, 33 bp, Homo sapien
cctttcagaaaacttaacaaaagctagcagata

SEQ ID NO: 934384 - DNA, 33 bp, Homo sapien
cctttcagaaaacttatcaaaagctagcagata

SEQ ID NO: 934385 - DNA, 33 bp, Homo sapien
cttgtctctctacctacgttacaaccccctaga

SEQ ID NO: 934386 - DNA, 33 bp, Homo sapien
cttgtctctctacctatgttacaaccccctaga

SEQ ID NO: 934387 - DNA, 33 bp, Homo sapien
aaagtaatttggctaaatatgtaagacactttg

SEQ ID NO: 934388 - DNA, 33 bp, Homo sapien
aaagtaatttggctaagtatgtaagacactttg

SEQ ID NO: 934389 - DNA, 33 bp, Homo sapien
gtgttagtgtccctaccgaagatgctatgaaat

SEQ ID NO: 934390 - DNA, 33 bp, Homo sapien
gtgttagtgtccctactgaagatgctatgaaat

SEQ ID NO: 934391 - DNA, 33 bp, Homo sapien
ttctagttttggcaccgctatcttctctccttg

SEQ ID NO: 934392 - DNA, 33 bp, Homo sapien
ttctagttttggcacctctatcttctctccttg

SEQ ID NO: 934393 - DNA, 33 bp, Homo sapien
cagtcatggaaatggaagtgagagaaccacaga

SEQ ID NO: 934394 - DNA, 33 bp, Homo sapien
cagtcatggaaatggaggtgagagaaccacaga

SEQ ID NO: 934395 - DNA, 33 bp, Homo sapien
aagacataaagtcatcaatatctagggaaatct

SEQ ID NO: 934396 - DNA, 33 bp, Homo sapien
aagacataaagtcatcgatatctagggaaatct

SEQ ID NO: 934397 - DNA, 33 bp, Homo sapien
ggcagacctgcttataactggaggcaatgagag

SEQ ID NO: 934398 - DNA, 33 bp, Homo sapien
ggcagacctgcttatagctggaggcaatgagag

SEQ ID NO: 934399 - DNA, 33 bp, Homo sapien
ttccaggagtgatttacgatagagagtcagaac

SEQ ID NO: 934400 - DNA, 33 bp, Homo sapien
ttccaggagtgatttatgatagagagtcagaac

SEQ ID NO: 934401 - DNA, 33 bp, Homo sapien
ctgaagctcctgcagacgagtggggtgttacaa

SEQ ID NO: 934402 - DNA, 33 bp, Homo sapien
ctgaagctcctgcagatgagtggggtgttacaa

SEQ ID NO: 934403 - DNA, 33 bp, Homo sapien
aatacctctcatgcgacaaggcttaaattggtg

SEQ ID NO: 934404 - DNA, 33 bp, Homo sapien
aatacctctcatgcgataaggcttaaattggtg

SEQ ID NO: 934405 - DNA, 33 bp, Homo sapien
aacgcaaggtaaggaacaagccaagaaatgcag

SEQ ID NO: 934406 - DNA, 33 bp, Homo sapien
aacgcaaggtaaggaataagccaagaaatgcag

SEQ ID NO: 934407 - DNA, 33 bp, Homo sapien
aaaggggcaggtgttacagagttcaaggaagga

SEQ ID NO: 934408 - DNA, 33 bp, Homo sapien
aaaggggcaggtgttatagagttcaaggaagga

SEQ ID NO: 934409 - DNA, 33 bp, Homo sapien
ctcttgagtgagtaacaactttatttcggaata

SEQ ID NO: 934410 - DNA, 33 bp, Homo sapien
ctcttgagtgagtaaccactttatttcggaata

SEQ ID NO: 934411 - DNA, 33 bp, Homo sapien
ggctgtgtgggtgagacgagaaagatcttaaaa

SEQ ID NO: 934412 - DNA, 33 bp, Homo sapien
ggctgtgtgggtgagatgagaaagatcttaaaa

SEQ ID NO: 934413 - DNA, 33 bp, Homo sapien
atgggattgaccaacaagacaaagtacatccta

SEQ ID NO: 934414 - DNA, 33 bp, Homo sapien
atgggattgaccaacaggacaaagtacatccta

SEQ ID NO: 934415 - DNA, 33 bp, Homo sapien
gctagacacatttccaatcccacagaaaagcta

SEQ ID NO: 934416 - DNA, 33 bp, Homo sapien
gctagacacatttccagtcccacagaaaagcta

SEQ ID NO: 934417 - DNA, 33 bp, Homo sapien
ctagataaacccaatcaaatcagaaagaatgaa

SEQ ID NO: 934418 - DNA, 33 bp, Homo sapien
ctagataaacccaatccaatcagaaagaatgaa

SEQ ID NO: 934419 - DNA, 33 bp, Homo sapien
taatgcttggactgtaaccaagtttagcctgac

SEQ ID NO: 934420 - DNA, 33 bp, Homo sapien
taatgcttggactgtagccaagtttagcctgac

SEQ ID NO: 934421 - DNA, 33 bp, Homo sapien
aagtggaactccagctaaaagagataattctga

SEQ ID NO: 934422 - DNA, 33 bp, Homo sapien
aagtggaactccagctgaaagagataattctga

SEQ ID NO: 934423 - DNA, 33 bp, Homo sapien
atattggggttctacagaaaaatgtgttgagac

SEQ ID NO: 934424 - DNA, 33 bp, Homo sapien
atattggggttctacataaaaatgtgttgagac

SEQ ID NO: 934425 - DNA, 33 bp, Homo sapien
tgtggactccactcctcaatttgaatcttcaac

SEQ ID NO: 934426 - DNA, 33 bp, Homo sapien
tgtggactccactccttaatttgaatcttcaac

SEQ ID NO: 934427 - DNA, 33 bp, Homo sapien
aagcctttcaaagagtaaattctcaaacatctc

SEQ ID NO: 934428 - DNA, 33 bp, Homo sapien
aagcctttcaaagagtgaattctcaaacatctc

SEQ ID NO: 934429 - DNA, 33 bp, Homo sapien
ctgttatttaaaacttaaaggtgcttatcttaa

SEQ ID NO: 934430 - DNA, 33 bp, Homo sapien
ctgttatttaaaactttaaggtgcttatcttaa

SEQ ID NO: 934431 - DNA, 33 bp, Homo sapien
cactctagtactgaccgagtgggaaagaatgtt

SEQ ID NO: 934432 - DNA, 33 bp, Homo sapien
cactctagtactgacctagtgggaaagaatgtt

SEQ ID NO: 934433 - DNA, 33 bp, Homo sapien
tgcctgtgtcctcagcacttagtaggtactcaa

SEQ ID NO: 934434 - DNA, 33 bp, Homo sapien
tgcctgtgtcctcagcccttagtaggtactcaa

SEQ ID NO: 934435 - DNA, 33 bp, Homo sapien
tttggagatgcctataaggaggggacttttact

SEQ ID NO: 934436 - DNA, 33 bp, Homo sapien
tttggagatgcctatagggaggggacttttact

SEQ ID NO: 934437 - DNA, 33 bp, Homo sapien
catcttggccttaaaaatcctcctagtgtctcc

SEQ ID NO: 934438 - DNA, 33 bp, Homo sapien
catcttggccttaaaagtcctcctagtgtctcc

SEQ ID NO: 934439 - DNA, 33 bp, Homo sapien
attctaacccaagcacgctttctctaaagccta

SEQ ID NO: 934440 - DNA, 33 bp, Homo sapien
attctaacccaagcactctttctctaaagccta

SEQ ID NO: 934441 - DNA, 33 bp, Homo sapien
aacaaatgtcacttgaagtcctactgtgcacac

SEQ ID NO: 934442 - DNA, 33 bp, Homo sapien
aacaaatgtcacttgaggtcctactgtgcacac

SEQ ID NO: 934443 - DNA, 33 bp, Homo sapien
aaacttaacattctgtaaaaagcagcattcaaa

SEQ ID NO: 934444 - DNA, 33 bp, Homo sapien
aaacttaacattctgtgaaaagcagcattcaaa

SEQ ID NO: 934445 - DNA, 33 bp, Homo sapien
tgccagaggaaaatgtcaaatattgggcagaga

SEQ ID NO: 934446 - DNA, 33 bp, Homo sapien
tgccagaggaaaatgttaaatattgggcagaga

SEQ ID NO: 934447 - DNA, 33 bp, Homo sapien
ctttgcaagtcaacaaacctaagattcattata

SEQ ID NO: 934448 - DNA, 33 bp, Homo sapien
ctttgcaagtcaacaagcctaagattcattata

SEQ ID NO: 934449 - DNA, 33 bp, Homo sapien
atgatctgaaagtcataagacctgattctcacc

SEQ ID NO: 934450 - DNA, 33 bp, Homo sapien
atgatctgaaagtcatgagacctgattctcacc

SEQ ID NO: 934451 - DNA, 33 bp, Homo sapien
gctcactgcatcagccactgaaactgtcatcaa

SEQ ID NO: 934452 - DNA, 33 bp, Homo sapien
gctcactgcatcagccgctgaaactgtcatcaa

SEQ ID NO: 934453 - DNA, 33 bp, Homo sapien
agtatctcagaagaaactggtacctgtgttagt

SEQ ID NO: 934454 - DNA, 33 bp, Homo sapien
agtatctcagaagaaattggtacctgtgttagt

SEQ ID NO: 934455 - DNA, 33 bp, Homo sapien
accatctgtaccaagcccattgcagggtaaaga

SEQ ID NO: 934456 - DNA, 33 bp, Homo sapien
accatctgtaccaagctcattgcagggtaaaga

SEQ ID NO: 934457 - DNA, 33 bp, Homo sapien
tgttctgttttgttcaatctctgtaaccttctt

SEQ ID NO: 934458 - DNA, 33 bp, Homo sapien
tgttctgttttgttcagtctctgtaaccttctt

SEQ ID NO: 934459 - DNA, 33 bp, Homo sapien
ctttgcaatgtgcaaaatgcataagacatggta

SEQ ID NO: 934460 - DNA, 33 bp, Homo sapien
ctttgcaatgtgcaaagtgcataagacatggta

SEQ ID NO: 934461 - DNA, 33 bp, Homo sapien
taaagtgttcttgtacagataatagacagggac

SEQ ID NO: 934462 - DNA, 33 bp, Homo sapien
taaagtgttcttgtacggataatagacagggac

SEQ ID NO: 934463 - DNA, 33 bp, Homo sapien
cagcatttaaacgggactccaccagcaggtgtg

SEQ ID NO: 934464 - DNA, 33 bp, Homo sapien
cagcatttaaacgggattccaccagcaggtgtg

SEQ ID NO: 934465 - DNA, 33 bp, Homo sapien
actttgacaatctctacgcaggtgcagtcaaga

SEQ ID NO: 934466 - DNA, 33 bp, Homo sapien
actttgacaatctctatgcaggtgcagtcaaga

SEQ ID NO: 934467 - DNA, 33 bp, Homo sapien
atgtaatgacaaagagaaaacaacagtaacacg

SEQ ID NO: 934468 - DNA, 33 bp, Homo sapien
atgtaatgacaaagagtaaacaacagtaacacg

SEQ ID NO: 934469 - DNA, 33 bp, Homo sapien
aacttgcaccattagcacctttcctgttattcc

SEQ ID NO: 934470 - DNA, 33 bp, Homo sapien
aacttgcaccattagcgcctttcctgttattcc

SEQ ID NO: 934471 - DNA, 33 bp, Homo sapien
tgaaagccagtgctcaccacttatgttgcagtg

SEQ ID NO: 934472 - DNA, 33 bp, Homo sapien
tgaaagccagtgctcatcacttatgttgcagtg

SEQ ID NO: 934473 - DNA, 33 bp, Homo sapien
aaaaatgagttaaatcaaataacctggagcttc

SEQ ID NO: 934474 - DNA, 33 bp, Homo sapien
aaaaatgagttaaatccaataacctggagcttc

SEQ ID NO: 934475 - DNA, 33 bp, Homo sapien
tacctcttgaacctaacgtgagtagtggtatct

SEQ ID NO: 934476 - DNA, 33 bp, Homo sapien
tacctcttgaacctaatgtgagtagtggtatct

SEQ ID NO: 934477 - DNA, 33 bp, Homo sapien
tcccatctgtcaaatcacattcactttctgcgt

SEQ ID NO: 934478 - DNA, 33 bp, Homo sapien
tcccatctgtcaaatcgcattcactttctgcgt

SEQ ID NO: 934479 - DNA, 33 bp, Homo sapien
aaaaggtggaagcaaccgatgtatccgctgacg

SEQ ID NO: 934480 - DNA, 33 bp, Homo sapien
aaaaggtggaagcaactgatgtatccgctgacg

SEQ ID NO: 934481 - DNA, 33 bp, Homo sapien
ttgaaattcacttgtccagttggcctacccaat

SEQ ID NO: 934482 - DNA, 33 bp, Homo sapien
ttgaaattcacttgtctagttggcctacccaat

SEQ ID NO: 934483 - DNA, 33 bp, Homo sapien
gttacaaatgggctgacgggtatttactcactg

SEQ ID NO: 934484 - DNA, 33 bp, Homo sapien
gttacaaatgggctgatgggtatttactcactg

SEQ ID NO: 934485 - DNA, 33 bp, Homo sapien
ttcttgtcattacacacgaggaattggaatata

SEQ ID NO: 934486 - DNA, 33 bp, Homo sapien
ttcttgtcattacacatgaggaattggaatata

SEQ ID NO: 934487 - DNA, 33 bp, Homo sapien
gcaagagcacatgggaagtaaatttgactgttc

SEQ ID NO: 934488 - DNA, 33 bp, Homo sapien
gcaagagcacatgggaggtaaatttgactgttc

SEQ ID NO: 934489 - DNA, 33 bp, Homo sapien
caaagttttggaactgcaagaaagcagaaacct

SEQ ID NO: 934490 - DNA, 33 bp, Homo sapien
caaagttttggaactggaagaaagcagaaacct

SEQ ID NO: 934491 - DNA, 33 bp, Homo sapien
attctggtttggatgacggggaaaatgatatcc

SEQ ID NO: 934492 - DNA, 33 bp, Homo sapien
attctggtttggatgatggggaaaatgatatcc

SEQ ID NO: 934493 - DNA, 33 bp, Homo sapien
gaccttatgcaagtcaaatccgagacaagaatg

SEQ ID NO: 934494 - DNA, 33 bp, Homo sapien
gaccttatgcaagtcatatccgagacaagaatg

SEQ ID NO: 934495 - DNA, 33 bp, Homo sapien
acaaaacttatgagacacaatcggtggccaggc

SEQ ID NO: 934496 - DNA, 33 bp, Homo sapien
acaaaacttatgagacgcaatcggtggccaggc

SEQ ID NO: 934497 - DNA, 33 bp, Homo sapien
accatcaacagagtgaagtaacaatctacagaa

SEQ ID NO: 934498 - DNA, 33 bp, Homo sapien
accatcaacagagtgaggtaacaatctacagaa

SEQ ID NO: 934499 - DNA, 33 bp, Homo sapien
gtacatgaaaaaatgacaattgctttaatttag

SEQ ID NO: 934500 - DNA, 33 bp, Homo sapien
gtacatgaaaaaatgagaattgctttaatttag

SEQ ID NO: 934501 - DNA, 33 bp, Homo sapien
cccagtaattaccatcacaacaaggtctaacgc

SEQ ID NO: 934502 - DNA, 33 bp, Homo sapien
cccagtaattaccatcgcaacaaggtctaacgc

SEQ ID NO: 934503 - DNA, 33 bp, Homo sapien
gctgagcaaacgggccgcgggcagataaggaat

SEQ ID NO: 934504 - DNA, 33 bp, Homo sapien
gctgagcaaacgggcctcgggcagataaggaat

SEQ ID NO: 934505 - DNA, 33 bp, Homo sapien
ggagcagccttatccaaatgaatccaaatctgg

SEQ ID NO: 934506 - DNA, 33 bp, Homo sapien
ggagcagccttatccagatgaatccaaatctgg

SEQ ID NO: 934507 - DNA, 33 bp, Homo sapien
ctccatgacaaaaccacaattccctcttcaatt

SEQ ID NO: 934508 - DNA, 33 bp, Homo sapien
ctccatgacaaaaccataattccctcttcaatt

SEQ ID NO: 934509 - DNA, 33 bp, Homo sapien
gtcctcaggaagcttacgttcaagttggagaga

SEQ ID NO: 934510 - DNA, 33 bp, Homo sapien
gtcctcaggaagcttatgttcaagttggagaga

SEQ ID NO: 934511 - DNA, 33 bp, Homo sapien
tattctgatgctgaagacctgcaaaaaaagaaa

SEQ ID NO: 934512 - DNA, 33 bp, Homo sapien
tattctgatgctgaagtcctgcaaaaaaagaaa

SEQ ID NO: 934513 - DNA, 33 bp, Homo sapien
agtaagtgttgtctgcaagcatgccgtcttacc

SEQ ID NO: 934514 - DNA, 33 bp, Homo sapien
agtaagtgttgtctgcgagcatgccgtcttacc

SEQ ID NO: 934515 - DNA, 33 bp, Homo sapien
gcagattgaagtcaccaaagtgccttgacccta

SEQ ID NO: 934516 - DNA, 33 bp, Homo sapien
gcagattgaagtcaccgaagtgccttgacccta

SEQ ID NO: 934517 - DNA, 33 bp, Homo sapien
ctctttcttttgtctactaaacctccggtccta

SEQ ID NO: 934518 - DNA, 33 bp, Homo sapien
ctctttcttttgtctattaaacctccggtccta

SEQ ID NO: 934519 - DNA, 33 bp, Homo sapien
ctgtgaagagctttcacgaactcattctcatac

SEQ ID NO: 934520 - DNA, 33 bp, Homo sapien
ctgtgaagagctttcatgaactcattctcatac

SEQ ID NO: 934521 - DNA, 33 bp, Homo sapien
cctaggctgaaaaccactcaatggcctgctgtt

SEQ ID NO: 934522 - DNA, 33 bp, Homo sapien
cctaggctgaaaaccattcaatggcctgctgtt

SEQ ID NO: 934523 - DNA, 33 bp, Homo sapien
tcccactaaaaacttacgttccacaagggcagg

SEQ ID NO: 934524 - DNA, 33 bp, Homo sapien
tcccactaaaaacttatgttccacaagggcagg

SEQ ID NO: 934525 - DNA, 33 bp, Homo sapien
tgagaagataagataactcccttgtgtagttgt

SEQ ID NO: 934526 - DNA, 33 bp, Homo sapien
tgagaagataagataattcccttgtgtagttgt

SEQ ID NO: 934527 - DNA, 33 bp, Homo sapien
gtctgctcgggaaggaaacacctcgcaggccaa

SEQ ID NO: 934528 - DNA, 33 bp, Homo sapien
gtctgctcgggaaggagacacctcgcaggccaa

SEQ ID NO: 934529 - DNA, 33 bp, Homo sapien
gagctgggtgtcagaacagtcatgtctagacag

SEQ ID NO: 934530 - DNA, 33 bp, Homo sapien
gagctgggtgtcagaagagtcatgtctagacag

SEQ ID NO: 934531 - DNA, 33 bp, Homo sapien
caaagcatgaccaaaaccaagtctgtgaatcct

SEQ ID NO: 934532 - DNA, 33 bp, Homo sapien
caaagcatgaccaaaagcaagtctgtgaatcct

SEQ ID NO: 934533 - DNA, 33 bp, Homo sapien
ccagtgggaggcaagaactggtggataaatcct

SEQ ID NO: 934534 - DNA, 33 bp, Homo sapien
ccagtgggaggcaagagctggtggataaatcct

SEQ ID NO: 934535 - DNA, 33 bp, Homo sapien
tgcaataatgtgaaaaaatattctctctcctag

SEQ ID NO: 934536 - DNA, 33 bp, Homo sapien
tgcaataatgtgaaaacatattctctctcctag

SEQ ID NO: 934537 - DNA, 33 bp, Homo sapien
acaactaacacattgccacatataatactatac

SEQ ID NO: 934538 - DNA, 33 bp, Homo sapien
acaactaacacattgctacatataatactatac

SEQ ID NO: 934539 - DNA, 33 bp, Homo sapien
tgaaggacaggtctccaaaaggcaacaggctcc

SEQ ID NO: 934540 - DNA, 33 bp, Homo sapien
tgaaggacaggtctccgaaaggcaacaggctcc

SEQ ID NO: 934541 - DNA, 33 bp, Homo sapien
acctgggtacgacttacatttttaaacatttcc

SEQ ID NO: 934542 - DNA, 33 bp, Homo sapien
acctgggtacgacttatatttttaaacatttcc

SEQ ID NO: 934543 - DNA, 33 bp, Homo sapien
agtgtaggcaagaagcactgagataagtactga

SEQ ID NO: 934544 - DNA, 33 bp, Homo sapien
agtgtaggcaagaagcgctgagataagtactga

SEQ ID NO: 934545 - DNA, 33 bp, Homo sapien
actcctgtttccactacgccaaaagcaggtcac

SEQ ID NO: 934546 - DNA, 33 bp, Homo sapien
actcctgtttccactatgccaaaagcaggtcac

SEQ ID NO: 934547 - DNA, 33 bp, Homo sapien
gcccccacactctaaagagagctaccgaatgct

SEQ ID NO: 934548 - DNA, 33 bp, Homo sapien
gcccccacactctaaatagagctaccgaatgct

SEQ ID NO: 934549 - DNA, 33 bp, Homo sapien
tatatgtaattagttacgcagtaaagattcttg

SEQ ID NO: 934550 - DNA, 33 bp, Homo sapien
tatatgtaattagttatgcagtaaagattcttg

SEQ ID NO: 934551 - DNA, 33 bp, Homo sapien
aatacaaatatagaacacattcctgttttgata

SEQ ID NO: 934552 - DNA, 33 bp, Homo sapien
aatacaaatatagaacgcattcctgttttgata

SEQ ID NO: 934553 - DNA, 33 bp, Homo sapien
gaatgaattggtagataaagggtgattgcttat

SEQ ID NO: 934554 - DNA, 33 bp, Homo sapien
gaatgaattggtagatgaagggtgattgcttat

SEQ ID NO: 934555 - DNA, 33 bp, Homo sapien
tccgggtagtgcagacacagcttcggagggtcc

SEQ ID NO: 934556 - DNA, 33 bp, Homo sapien
tccgggtagtgcagacgcagcttcggagggtcc

SEQ ID NO: 934557 - DNA, 33 bp, Homo sapien
atgtaggagtcagatacaggaatgtttcagagg

SEQ ID NO: 934558 - DNA, 33 bp, Homo sapien
atgtaggagtcagatataggaatgtttcagagg

SEQ ID NO: 934559 - DNA, 33 bp, Homo sapien
tctgtttcttgctccacctagtatttctccagg

SEQ ID NO: 934560 - DNA, 33 bp, Homo sapien
tctgtttcttgctccagctagtatttctccagg

SEQ ID NO: 934561 - DNA, 33 bp, Homo sapien
ctgtacattcattaggaagtagagtaagaggga

SEQ ID NO: 934562 - DNA, 33 bp, Homo sapien
ctgtacattcattaggtagtagagtaagaggga

SEQ ID NO: 934563 - DNA, 33 bp, Homo sapien
tccatgttatcacaaacggcagcctttcctttt

SEQ ID NO: 934564 - DNA, 33 bp, Homo sapien
tccatgttatcacaaatggcagcctttcctttt

SEQ ID NO: 934565 - DNA, 33 bp, Homo sapien
atactttatgaaaacacagtttgcgttagagga

SEQ ID NO: 934566 - DNA, 33 bp, Homo sapien
atactttatgaaaacatagtttgcgttagagga

SEQ ID NO: 934567 - DNA, 33 bp, Homo sapien
ctaacattcactctaacgactgcctagccttta

SEQ ID NO: 934568 - DNA, 33 bp, Homo sapien
ctaacattcactctaatgactgcctagccttta

SEQ ID NO: 934569 - DNA, 33 bp, Homo sapien
aaaagcattgaggaataaaaacatcaatcaaga

SEQ ID NO: 934570 - DNA, 33 bp, Homo sapien
aaaagcattgaggaatgaaaacatcaatcaaga

SEQ ID NO: 934571 - DNA, 33 bp, Homo sapien
cggttacttcagaacaaactactcgaattaata

SEQ ID NO: 934572 - DNA, 33 bp, Homo sapien
cggttacttcagaacagactactcgaattaata

SEQ ID NO: 934573 - DNA, 33 bp, Homo sapien
aaagaaaatgctgtaggacgagagtctggggaa

SEQ ID NO: 934574 - DNA, 33 bp, Homo sapien
aaagaaaatgctgtagtacgagagtctggggaa

SEQ ID NO: 934575 - DNA, 33 bp, Homo sapien
atcccagcttcttctaccttccattctgaagac

SEQ ID NO: 934576 - DNA, 33 bp, Homo sapien
atcccagcttcttctatcttccattctgaagac

SEQ ID NO: 934577 - DNA, 33 bp, Homo sapien
ggatctggcaactaaaaggatattgaggctgta

SEQ ID NO: 934578 - DNA, 33 bp, Homo sapien
ggatctggcaactaaatggatattgaggctgta

SEQ ID NO: 934579 - DNA, 33 bp, Homo sapien
agttagaatcctgttgcaatcactctgatgggc

SEQ ID NO: 934580 - DNA, 33 bp, Homo sapien
agttagaatcctgttgtaatcactctgatgggc

SEQ ID NO: 934581 - DNA, 33 bp, Homo sapien
gtgcttagcgtcacctaaaagagtcagagaaag

SEQ ID NO: 934582 - DNA, 33 bp, Homo sapien
gtgcttagcgtcacctgaaagagtcagagaaag

SEQ ID NO: 934583 - DNA, 33 bp, Homo sapien
ttttcaaaaaagtatacatggcacttaagagaa

SEQ ID NO: 934584 - DNA, 33 bp, Homo sapien
ttttcaaaaaagtatagatggcacttaagagaa

SEQ ID NO: 934585 - DNA, 33 bp, Homo sapien
gccttgttacgttataccctggtgtctagactt

SEQ ID NO: 934586 - DNA, 33 bp, Homo sapien
gccttgttacgttatatcctggtgtctagactt

SEQ ID NO: 934587 - DNA, 33 bp, Homo sapien
atttctctcctttgtcacattccttattttctt

SEQ ID NO: 934588 - DNA, 33 bp, Homo sapien
atttctctcctttgtcgcattccttattttctt

SEQ ID NO: 934589 - DNA, 33 bp, Homo sapien
ggagaactaaatgaccggaggcaattctcagag

SEQ ID NO: 934590 - DNA, 33 bp, Homo sapien
ggagaactaaatgacctgaggcaattctcagag

SEQ ID NO: 934591 - DNA, 33 bp, Homo sapien
gtatcagaaataaagcactcttcttgtcttggc

SEQ ID NO: 934592 - DNA, 33 bp, Homo sapien
gtatcagaaataaagccctcttcttgtcttggc

SEQ ID NO: 934593 - DNA, 33 bp, Homo sapien
accgacactaatgcagaaaacagagaagtagaa

SEQ ID NO: 934594 - DNA, 33 bp, Homo sapien
accgacactaatgcaggaaacagagaagtagaa

SEQ ID NO: 934595 - DNA, 33 bp, Homo sapien
taggagtcctgcctctcagactccatccaaagg

SEQ ID NO: 934596 - DNA, 33 bp, Homo sapien
taggagtcctgcctcttagactccatccaaagg

SEQ ID NO: 934597 - DNA, 33 bp, Homo sapien
tcaccccatccattaaactgtgccttacaggac

SEQ ID NO: 934598 - DNA, 33 bp, Homo sapien
tcaccccatccattaacctgtgccttacaggac

SEQ ID NO: 934599 - DNA, 33 bp, Homo sapien
atagaaactgctttacccaaattattgatccac

SEQ ID NO: 934600 - DNA, 33 bp, Homo sapien
atagaaactgctttactcaaattattgatccac

SEQ ID NO: 934601 - DNA, 33 bp, Homo sapien
cagatagtgtgggcaaagccagaagcttagcaa

SEQ ID NO: 934602 - DNA, 33 bp, Homo sapien
cagatagtgtgggcaaggccagaagcttagcaa

SEQ ID NO: 934603 - DNA, 33 bp, Homo sapien
aagcagtggacatacaccctttaagtaacatgg

SEQ ID NO: 934604 - DNA, 33 bp, Homo sapien
aagcagtggacatacatcctttaagtaacatgg

SEQ ID NO: 934605 - DNA, 33 bp, Homo sapien
tctagatttcatgagtaaaaagcactcagaagt

SEQ ID NO: 934606 - DNA, 33 bp, Homo sapien
tctagatttcatgagttaaaagcactcagaagt

SEQ ID NO: 934607 - DNA, 33 bp, Homo sapien
cctatagcttcattccaaagagttaacattatt

SEQ ID NO: 934608 - DNA, 33 bp, Homo sapien
cctatagcttcattccgaagagttaacattatt

SEQ ID NO: 934609 - DNA, 33 bp, Homo sapien
ctagtactagtgctgagaaaccttgtacaggat

SEQ ID NO: 934610 - DNA, 33 bp, Homo sapien
ctagtactagtgctgataaaccttgtacaggat

SEQ ID NO: 934611 - DNA, 33 bp, Homo sapien
gaatttttccattataaggaggtgtatactttc

SEQ ID NO: 934612 - DNA, 33 bp, Homo sapien
gaatttttccattatagggaggtgtatactttc

SEQ ID NO: 934613 - DNA, 33 bp, Homo sapien
gtaagttgtttctgcaataagggttctcagaga

SEQ ID NO: 934614 - DNA, 33 bp, Homo sapien
gtaagttgtttctgcagtaagggttctcagaga

SEQ ID NO: 934615 - DNA, 33 bp, Homo sapien
gtcactcttcttcagccccctgtgatggttttc

SEQ ID NO: 934616 - DNA, 33 bp, Homo sapien
gtcactcttcttcagctccctgtgatggttttc

SEQ ID NO: 934617 - DNA, 33 bp, Homo sapien
ttaagttcatcattggaagagttcctggatcct

SEQ ID NO: 934618 - DNA, 33 bp, Homo sapien
ttaagttcatcattgggagagttcctggatcct

SEQ ID NO: 934619 - DNA, 33 bp, Homo sapien
gtgtctgcagacagagaaagaaccctccaagtg

SEQ ID NO: 934620 - DNA, 33 bp, Homo sapien
gtgtctgcagacagaggaagaaccctccaagtg

SEQ ID NO: 934621 - DNA, 33 bp, Homo sapien
ttctatttttttagatcagggtacacataccct

SEQ ID NO: 934622 - DNA, 33 bp, Homo sapien
ttctatttttttagatgagggtacacataccct

SEQ ID NO: 934623 - DNA, 33 bp, Homo sapien
caatggggatgccaaaaaattgggagggacttt

SEQ ID NO: 934624 - DNA, 33 bp, Homo sapien
caatggggatgccaaacaattgggagggacttt

SEQ ID NO: 934625 - DNA, 33 bp, Homo sapien
aagtttaagggccaacaacaatttatcaccttc

SEQ ID NO: 934626 - DNA, 33 bp, Homo sapien
aagtttaagggccaactacaatttatcaccttc

SEQ ID NO: 934627 - DNA, 33 bp, Homo sapien
ctctattcttttctaccgatttatatgtctatt

SEQ ID NO: 934628 - DNA, 33 bp, Homo sapien
ctctattcttttctactgatttatatgtctatt

SEQ ID NO: 934629 - DNA, 33 bp, Homo sapien
tctgaattcaaagttcactagcccttaggtaag

SEQ ID NO: 934630 - DNA, 33 bp, Homo sapien
tctgaattcaaagttctctagcccttaggtaag

SEQ ID NO: 934631 - DNA, 33 bp, Homo sapien
ctgagccactaatggcggcaacataaacacctc

SEQ ID NO: 934632 - DNA, 33 bp, Homo sapien
ctgagccactaatggctgcaacataaacacctc

SEQ ID NO: 934633 - DNA, 33 bp, Homo sapien
gtttgtatggtgttcacattaaagggaatgtag

SEQ ID NO: 934634 - DNA, 33 bp, Homo sapien
gtttgtatggtgttcatattaaagggaatgtag

SEQ ID NO: 934635 - DNA, 33 bp, Homo sapien
ggcagaatctctgactcacaaaatcactacata

SEQ ID NO: 934636 - DNA, 33 bp, Homo sapien
ggcagaatctctgacttacaaaatcactacata

SEQ ID NO: 934637 - DNA, 33 bp, Homo sapien
ttgcaagaagtgggaaaagacatggtgcaagac

SEQ ID NO: 934638 - DNA, 33 bp, Homo sapien
ttgcaagaagtgggaagagacatggtgcaagac

SEQ ID NO: 934639 - DNA, 33 bp, Homo sapien
agtggccaaaagagcaaggaatgcaaacagtct

SEQ ID NO: 934640 - DNA, 33 bp, Homo sapien
agtggccaaaagagcacggaatgcaaacagtct

SEQ ID NO: 934641 - DNA, 33 bp, Homo sapien
tgcccatgtagtttgcagatacaccaaattttg

SEQ ID NO: 934642 - DNA, 33 bp, Homo sapien
tgcccatgtagtttgcggatacaccaaattttg

SEQ ID NO: 934643 - DNA, 33 bp, Homo sapien
tggctcatggttgttccagcaatataattagtt

SEQ ID NO: 934644 - DNA, 33 bp, Homo sapien
tggctcatggttgttctagcaatataattagtt

SEQ ID NO: 934645 - DNA, 33 bp, Homo sapien
atggactatctttccgccaaattacaaaatgtc

SEQ ID NO: 934646 - DNA, 33 bp, Homo sapien
atggactatctttccgtcaaattacaaaatgtc

SEQ ID NO: 934647 - DNA, 33 bp, Homo sapien
actctattccattggaaacaaacctaggttgta

SEQ ID NO: 934648 - DNA, 33 bp, Homo sapien
actctattccattggagacaaacctaggttgta

SEQ ID NO: 934649 - DNA, 33 bp, Homo sapien
acatttattatcgatacgttggaatgcatcttt

SEQ ID NO: 934650 - DNA, 33 bp, Homo sapien
acatttattatcgatatgttggaatgcatcttt

SEQ ID NO: 934651 - DNA, 33 bp, Homo sapien
gatacagcaacaatacaaaagacattaaaagtg

SEQ ID NO: 934652 - DNA, 33 bp, Homo sapien
gatacagcaacaataccaaagacattaaaagtg

SEQ ID NO: 934653 - DNA, 33 bp, Homo sapien
tgttttcattatgctaagtacaagattgtgcta

SEQ ID NO: 934654 - DNA, 33 bp, Homo sapien
tgttttcattatgctatgtacaagattgtgcta

SEQ ID NO: 934655 - DNA, 33 bp, Homo sapien
acaggatctagtgctcaattgcaagcaggtgac

SEQ ID NO: 934656 - DNA, 33 bp, Homo sapien
acaggatctagtgctcgattgcaagcaggtgac

SEQ ID NO: 934657 - DNA, 33 bp, Homo sapien
aaatgaaattactgcacattgatggccatttta

SEQ ID NO: 934658 - DNA, 33 bp, Homo sapien
aaatgaaattactgcatattgatggccatttta

SEQ ID NO: 934659 - DNA, 33 bp, Homo sapien
aggctggggactagtgcatcatcgcttaggatt

SEQ ID NO: 934660 - DNA, 33 bp, Homo sapien
aggctggggactagtggatcatcgcttaggatt

SEQ ID NO: 934661 - DNA, 33 bp, Homo sapien
gatggactagctgttacgtctgcttctctatta

SEQ ID NO: 934662 - DNA, 33 bp, Homo sapien
gatggactagctgttatgtctgcttctctatta

SEQ ID NO: 934663 - DNA, 33 bp, Homo sapien
ggctcttactactctacgatagggagggtgcag

SEQ ID NO: 934664 - DNA, 33 bp, Homo sapien
ggctcttactactctatgatagggagggtgcag

SEQ ID NO: 934665 - DNA, 33 bp, Homo sapien
gacactcactcatggagcagaggccgcacaaca

SEQ ID NO: 934666 - DNA, 33 bp, Homo sapien
gacactcactcatggatcagaggccgcacaaca

SEQ ID NO: 934667 - DNA, 33 bp, Homo sapien
gtcaaggacacattcccgaattacatggtttac

SEQ ID NO: 934668 - DNA, 33 bp, Homo sapien
gtcaaggacacattcctgaattacatggtttac

SEQ ID NO: 934669 - DNA, 33 bp, Homo sapien
ttgttcttgtcatagcagcagagtcactgagag

SEQ ID NO: 934670 - DNA, 33 bp, Homo sapien
ttgttcttgtcatagcggcagagtcactgagag

SEQ ID NO: 934671 - DNA, 33 bp, Homo sapien
tggccacatattgtatcactgcatttatatgaa

SEQ ID NO: 934672 - DNA, 33 bp, Homo sapien
tggccacatattgtattactgcatttatatgaa

SEQ ID NO: 934673 - DNA, 33 bp, Homo sapien
agtcagcagggacaaaaactgttctctctctta

SEQ ID NO: 934674 - DNA, 33 bp, Homo sapien
agtcagcagggacaaagactgttctctctctta

SEQ ID NO: 934675 - DNA, 33 bp, Homo sapien
cactgctgctttctccaccaggaatactgttcc

SEQ ID NO: 934676 - DNA, 33 bp, Homo sapien
cactgctgctttctccgccaggaatactgttcc

SEQ ID NO: 934677 - DNA, 33 bp, Homo sapien
cctgaaagtaggttaacctgtctacaaatccag

SEQ ID NO: 934678 - DNA, 33 bp, Homo sapien
cctgaaagtaggttaatctgtctacaaatccag

SEQ ID NO: 934679 - DNA, 33 bp, Homo sapien
gtttatttggaatttgaatttacctgtatttcc

SEQ ID NO: 934680 - DNA, 33 bp, Homo sapien
gtttatttggaatttggatttacctgtatttcc

SEQ ID NO: 934681 - DNA, 33 bp, Homo sapien
tatctataaaacctcacctccaatctcaatgct

SEQ ID NO: 934682 - DNA, 33 bp, Homo sapien
tatctataaaacctcatctccaatctcaatgct

SEQ ID NO: 934683 - DNA, 33 bp, Homo sapien
ttaaataggagataaaggttatcacgtggaagc

SEQ ID NO: 934684 - DNA, 33 bp, Homo sapien
ttaaataggagataaatgttatcacgtggaagc

SEQ ID NO: 934685 - DNA, 33 bp, Homo sapien
gaggctcctgtctcccgatcaaacttcctggtg

SEQ ID NO: 934686 - DNA, 33 bp, Homo sapien
gaggctcctgtctccctatcaaacttcctggtg

SEQ ID NO: 934687 - DNA, 33 bp, Homo sapien
aatgtggagcaactacagacatgcaaaatgata

SEQ ID NO: 934688 - DNA, 33 bp, Homo sapien
aatgtggagcaactacggacatgcaaaatgata

SEQ ID NO: 934689 - DNA, 33 bp, Homo sapien
agataagaaagtccaacaaatgtggagcaacta

SEQ ID NO: 934690 - DNA, 33 bp, Homo sapien
agataagaaagtccaataaatgtggagcaacta

SEQ ID NO: 934691 - DNA, 33 bp, Homo sapien
gaaaaatgcatccagaaagatttcttagggaag

SEQ ID NO: 934692 - DNA, 33 bp, Homo sapien
gaaaaatgcatccagatagatttcttagggaag

SEQ ID NO: 934693 - DNA, 33 bp, Homo sapien
actggatgaagggtaccagaaatgttcctgtac

SEQ ID NO: 934694 - DNA, 33 bp, Homo sapien
actggatgaagggtacgagaaatgttcctgtac

SEQ ID NO: 934695 - DNA, 33 bp, Homo sapien
ggaagccacatcttgacaaatgcagaggcaatt

SEQ ID NO: 934696 - DNA, 33 bp, Homo sapien
ggaagccacatcttgataaatgcagaggcaatt

SEQ ID NO: 934697 - DNA, 33 bp, Homo sapien
ttgtagctaggatcccagatgtctgcagtgcaa

SEQ ID NO: 934698 - DNA, 33 bp, Homo sapien
ttgtagctaggatcccggatgtctgcagtgcaa

SEQ ID NO: 934699 - DNA, 33 bp, Homo sapien
ctgagtaaaccattacacttcaaacagagcttt

SEQ ID NO: 934700 - DNA, 33 bp, Homo sapien
ctgagtaaaccattacgcttcaaacagagcttt

SEQ ID NO: 934701 - DNA, 33 bp, Homo sapien
ttaacaatagatgccacgatttttccaatttga

SEQ ID NO: 934702 - DNA, 33 bp, Homo sapien
ttaacaatagatgccatgatttttccaatttga

SEQ ID NO: 934703 - DNA, 33 bp, Homo sapien
tatatttgtgaagaacaagtttggtctatgcag

SEQ ID NO: 934704 - DNA, 33 bp, Homo sapien
tatatttgtgaagaaccagtttggtctatgcag

SEQ ID NO: 934705 - DNA, 33 bp, Homo sapien
tttaagaatacagttaagttttgacaaatgtgt

SEQ ID NO: 934706 - DNA, 33 bp, Homo sapien
tttaagaatacagttaggttttgacaaatgtgt

SEQ ID NO: 934707 - DNA, 33 bp, Homo sapien
tgttcttttaagattaaccttgaacagccatta

SEQ ID NO: 934708 - DNA, 33 bp, Homo sapien
tgttcttttaagattatccttgaacagccatta

SEQ ID NO: 934709 - DNA, 33 bp, Homo sapien
aatacagccaagattacctaaacagcccaatag

SEQ ID NO: 934710 - DNA, 33 bp, Homo sapien
aatacagccaagattatctaaacagcccaatag

SEQ ID NO: 934711 - DNA, 33 bp, Homo sapien
caagcatagttctgaaaccaccaaagtccaacc

SEQ ID NO: 934712 - DNA, 33 bp, Homo sapien
caagcatagttctgaagccaccaaagtccaacc

SEQ ID NO: 934713 - DNA, 33 bp, Homo sapien
ttggtcagatgtttgaaaagacttgagaattga

SEQ ID NO: 934714 - DNA, 33 bp, Homo sapien
ttggtcagatgtttgagaagacttgagaattga

SEQ ID NO: 934715 - DNA, 33 bp, Homo sapien
caccaatgccatgtcactcgacctcttcccagt

SEQ ID NO: 934716 - DNA, 33 bp, Homo sapien
caccaatgccatgtcagtcgacctcttcccagt

SEQ ID NO: 934717 - DNA, 33 bp, Homo sapien
gttcctgagctagcccacaaaatactgtctaac

SEQ ID NO: 934718 - DNA, 33 bp, Homo sapien
gttcctgagctagcccgcaaaatactgtctaac

SEQ ID NO: 934719 - DNA, 33 bp, Homo sapien
agaaccaggtatctcccgccatcatgaggaaga

SEQ ID NO: 934720 - DNA, 33 bp, Homo sapien
agaaccaggtatctcctgccatcatgaggaaga

SEQ ID NO: 934721 - DNA, 33 bp, Homo sapien
tggggtaactcaccatcataaggccctcatcct

SEQ ID NO: 934722 - DNA, 33 bp, Homo sapien
tggggtaactcaccattataaggccctcatcct

SEQ ID NO: 934723 - DNA, 33 bp, Homo sapien
tatagcttggagatggaaagttctctgctcaga

SEQ ID NO: 934724 - DNA, 33 bp, Homo sapien
tatagcttggagatgggaagttctctgctcaga

SEQ ID NO: 934725 - DNA, 33 bp, Homo sapien
gagtgaaaattggtcaagaatgcttgcttggga

SEQ ID NO: 934726 - DNA, 33 bp, Homo sapien
gagtgaaaattggtcaggaatgcttgcttggga

SEQ ID NO: 934727 - DNA, 33 bp, Homo sapien
gtatttcaggatgactcactctgatgcctcctc

SEQ ID NO: 934728 - DNA, 33 bp, Homo sapien
gtatttcaggatgacttactctgatgcctcctc

SEQ ID NO: 934729 - DNA, 33 bp, Homo sapien
acagggcagatatatgcaatgctttttggaata

SEQ ID NO: 934730 - DNA, 33 bp, Homo sapien
acagggcagatatatggaatgctttttggaata

SEQ ID NO: 934731 - DNA, 33 bp, Homo sapien
caggacagcagggctaactctataaatatttgc

SEQ ID NO: 934732 - DNA, 33 bp, Homo sapien
caggacagcagggctagctctataaatatttgc

SEQ ID NO: 934733 - DNA, 33 bp, Homo sapien
tttattctgtagcatacgattatgtccggttga

SEQ ID NO: 934734 - DNA, 33 bp, Homo sapien
tttattctgtagcatatgattatgtccggttga

SEQ ID NO: 934735 - DNA, 33 bp, Homo sapien
gaacgctagcattgccacaggcgtacaccagga

SEQ ID NO: 934736 - DNA, 33 bp, Homo sapien
gaacgctagcattgccgcaggcgtacaccagga

SEQ ID NO: 934737 - DNA, 33 bp, Homo sapien
agaaacagagagaagacggaaatgggtatagtt

SEQ ID NO: 934738 - DNA, 33 bp, Homo sapien
agaaacagagagaagagggaaatgggtatagtt

SEQ ID NO: 934739 - DNA, 33 bp, Homo sapien
tatctgtctaaagaaaaaaagtctccacatttg

SEQ ID NO: 934740 - DNA, 33 bp, Homo sapien
tatctgtctaaagaaagaaagtctccacatttg

SEQ ID NO: 934741 - DNA, 33 bp, Homo sapien
ggctgtcaggaggttgaagaagtctagctagaa

SEQ ID NO: 934742 - DNA, 33 bp, Homo sapien
ggctgtcaggaggttggagaagtctagctagaa

SEQ ID NO: 934743 - DNA, 33 bp, Homo sapien
gaattcttcaaaaggaaaaccctggggcaggtg

SEQ ID NO: 934744 - DNA, 33 bp, Homo sapien
gaattcttcaaaaggagaaccctggggcaggtg

SEQ ID NO: 934745 - DNA, 33 bp, Homo sapien
tatgtgagacttcaagaattagggatgcaggaa

SEQ ID NO: 934746 - DNA, 33 bp, Homo sapien
tatgtgagacttcaagtattagggatgcaggaa

SEQ ID NO: 934747 - DNA, 33 bp, Homo sapien
attatgttctctctaacgaattggtaactgaca

SEQ ID NO: 934748 - DNA, 33 bp, Homo sapien
attatgttctctctaatgaattggtaactgaca

SEQ ID NO: 934749 - DNA, 33 bp, Homo sapien
tccatccttatctagaaggcaagaagggttgtt

SEQ ID NO: 934750 - DNA, 33 bp, Homo sapien
tccatccttatctagacggcaagaagggttgtt

SEQ ID NO: 934751 - DNA, 33 bp, Homo sapien
taattctaaaggtgaacgatggggacaagctgt

SEQ ID NO: 934752 - DNA, 33 bp, Homo sapien
taattctaaaggtgaatgatggggacaagctgt

SEQ ID NO: 934753 - DNA, 33 bp, Homo sapien
aatttcttatgatgcaaaatcggtgaccttata

SEQ ID NO: 934754 - DNA, 33 bp, Homo sapien
aatttcttatgatgcagaatcggtgaccttata

SEQ ID NO: 934755 - DNA, 33 bp, Homo sapien
aatcagataagctcaaccagaaatgaaatggga

SEQ ID NO: 934756 - DNA, 33 bp, Homo sapien
aatcagataagctcaagcagaaatgaaatggga

SEQ ID NO: 934757 - DNA, 33 bp, Homo sapien; identical to SEQ ID NO: 934755

SEQ ID NO: 934758 - DNA, 33 bp, Homo sapien; identical to SEQ ID NO: 934756

SEQ ID NO: 934759 - DNA, 33 bp, Homo sapien
ttcctgctatagtggaagtaagaccttattatt

SEQ ID NO: 934760 - DNA, 33 bp, Homo sapien
ttcctgctatagtggaggtaagaccttattatt

SEQ ID NO: 934761 - DNA, 33 bp, Homo sapien
gctgtttagtaggcacagcctttgctaaggatg

SEQ ID NO: 934762 - DNA, 33 bp, Homo sapien
gctgtttagtaggcacggcctttgctaaggatg

SEQ ID NO: 934763 - DNA, 33 bp, Homo sapien
catttattcattcaaaaattaaccactagctgt

SEQ ID NO: 934764 - DNA, 33 bp, Homo sapien
catttattcattcaaatattaaccactagctgt

SEQ ID NO: 934765 - DNA, 33 bp, Homo sapien
acctaatgatgatcaaactatcaacacctgctt

SEQ ID NO: 934766 - DNA, 33 bp, Homo sapien
acctaatgatgatcaagctatcaacacctgctt

SEQ ID NO: 934767 - DNA, 33 bp, Homo sapien
tgcaaaatccttgaacaatgacctaatgatgat

SEQ ID NO: 934768 - DNA, 33 bp, Homo sapien
tgcaaaatccttgaacgatgacctaatgatgat

SEQ ID NO: 934769 - DNA, 33 bp, Homo sapien
caagaaacaacagataagaaactattcatcgat

SEQ ID NO: 934770 - DNA, 33 bp, Homo sapien
caagaaacaacagatatgaaactattcatcgat

SEQ ID NO: 934771 - DNA, 33 bp, Homo sapien
aagagggtggcccgtaagatttcttgtaatcca

SEQ ID NO: 934772 - DNA, 33 bp, Homo sapien
aagagggtggcccgtaggatttcttgtaatcca

SEQ ID NO: 934773 - DNA, 33 bp, Homo sapien
cagcacattctcacacacaacagaaacactgag

SEQ ID NO: 934774 - DNA, 33 bp, Homo sapien
cagcacattctcacacgcaacagaaacactgag

SEQ ID NO: 934775 - DNA, 33 bp, Homo sapien
tatactccctgaagtaacaaagatattaagctg

SEQ ID NO: 934776 - DNA, 33 bp, Homo sapien
tatactccctgaagtagcaaagatattaagctg

SEQ ID NO: 934777 - DNA, 33 bp, Homo sapien
ttcccagagtttcagacagattgaagaaaaagg

SEQ ID NO: 934778 - DNA, 33 bp, Homo sapien
ttcccagagtttcagatagattgaagaaaaagg

SEQ ID NO: 934779 - DNA, 33 bp, Homo sapien
ctcttcaactagaatacgagcttctgaagaaaa

SEQ ID NO: 934780 - DNA, 33 bp, Homo sapien
ctcttcaactagaatatgagcttctgaagaaaa

SEQ ID NO: 934781 - DNA, 33 bp, Homo sapien
agatagattgccctaacatctggcttagagtac

SEQ ID NO: 934782 - DNA, 33 bp, Homo sapien
agatagattgccctaagatctggcttagagtac

SEQ ID NO: 934783 - DNA, 33 bp, Homo sapien
ttaaagttatcaaaaactggctttaaaatgaca

SEQ ID NO: 934784 - DNA, 33 bp, Homo sapien
ttaaagttatcaaaaagtggctttaaaatgaca

SEQ ID NO: 934785 - DNA, 33 bp, Homo sapien
gttttaagtgaacaagcgagattttaatagctc

SEQ ID NO: 934786 - DNA, 33 bp, Homo sapien
gttttaagtgaacaagtgagattttaatagctc

SEQ ID NO: 934787 - DNA, 33 bp, Homo sapien
cttgaactgtcctcaacagcaggcaatagccag

SEQ ID NO: 934788 - DNA, 33 bp, Homo sapien
cttgaactgtcctcaagagcaggcaatagccag

SEQ ID NO: 934789 - DNA, 33 bp, Homo sapien
tgtgaagcattgtggacaatataggcttgaggc

SEQ ID NO: 934790 - DNA, 33 bp, Homo sapien
tgtgaagcattgtggataatataggcttgaggc

SEQ ID NO: 934791 - DNA, 33 bp, Homo sapien
atgctctcagttgaggcacggttggctccccat

SEQ ID NO: 934792 - DNA, 33 bp, Homo sapien
atgctctcagttgaggtacggttggctccccat

SEQ ID NO: 934793 - DNA, 33 bp, Homo sapien
gagaatagacaagctggaatatagagtaataga

SEQ ID NO: 934794 - DNA, 33 bp, Homo sapien
gagaatagacaagctgtaatatagagtaataga

SEQ ID NO: 934795 - DNA, 33 bp, Homo sapien
cacagtcaggattgataaccagtgctgtcaagt

SEQ ID NO: 934796 - DNA, 33 bp, Homo sapien
cacagtcaggattgatgaccagtgctgtcaagt

SEQ ID NO: 934797 - DNA, 33 bp, Homo sapien
cctttcttccatcttaggatgctcattgcaata

SEQ ID NO: 934798 - DNA, 33 bp, Homo sapien
cctttcttccatcttatgatgctcattgcaata

SEQ ID NO: 934799 - DNA, 33 bp, Homo sapien
ttttcccagaatacaaaccactgttgctaactc

SEQ ID NO: 934800 - DNA, 33 bp, Homo sapien
ttttcccagaatacaatccactgttgctaactc

SEQ ID NO: 934801 - DNA, 33 bp, Homo sapien
caagcatatatatttcaacttctgtgagttctg

SEQ ID NO: 934802 - DNA, 33 bp, Homo sapien
caagcatatatatttccacttctgtgagttctg

SEQ ID NO: 934803 - DNA, 33 bp, Homo sapien
cgcgcttaggcattgacggaatggacattttga

SEQ ID NO: 934804 - DNA, 33 bp, Homo sapien
cgcgcttaggcattgagggaatggacattttga

SEQ ID NO: 934805 - DNA, 33 bp, Homo sapien
agatggatattgtgccaaaataacctcaaaagg

SEQ ID NO: 934806 - DNA, 33 bp, Homo sapien
agatggatattgtgccgaaataacctcaaaagg

SEQ ID NO: 934807 - DNA, 33 bp, Homo sapien
caggccactcagcatccatagggcttatttcag

SEQ ID NO: 934808 - DNA, 33 bp, Homo sapien
caggccactcagcatctatagggcttatttcag

SEQ ID NO: 934809 - DNA, 33 bp, Homo sapien
cctgttcaggacgagacaattcaaccactttcc

SEQ ID NO: 934810 - DNA, 33 bp, Homo sapien
cctgttcaggacgagataattcaaccactttcc

SEQ ID NO: 934811 - DNA, 33 bp, Homo sapien
ggttatttcggcacaacatccatctccagatag

SEQ ID NO: 934812 - DNA, 33 bp, Homo sapien
ggttatttcggcacaatatccatctccagatag

SEQ ID NO: 934813 - DNA, 33 bp, Homo sapien
ccttgcagctcctagacacccttaacagaggct

SEQ ID NO: 934814 - DNA, 33 bp, Homo sapien
ccttgcagctcctagagacccttaacagaggct

SEQ ID NO: 934815 - DNA, 33 bp, Homo sapien
agaaaacttccaatgtaacagaagaggcttcag

SEQ ID NO: 934816 - DNA, 33 bp, Homo sapien
agaaaacttccaatgtgacagaagaggcttcag

SEQ ID NO: 934817 - DNA, 33 bp, Homo sapien
caggagcagtggtaaacgaaaacaaaataaaga

SEQ ID NO: 934818 - DNA, 33 bp, Homo sapien
caggagcagtggtaaatgaaaacaaaataaaga

SEQ ID NO: 934819 - DNA, 33 bp, Homo sapien
tagggaaccaagttgacactggagcagtagtgg

SEQ ID NO: 934820 - DNA, 33 bp, Homo sapien
tagggaaccaagttgatactggagcagtagtgg

SEQ ID NO: 934821 - DNA, 33 bp, Homo sapien
tggggcagaatcaccaagtctcctcctcgccag

SEQ ID NO: 934822 - DNA, 33 bp, Homo sapien
tggggcagaatcaccacgtctcctcctcgccag

SEQ ID NO: 934823 - DNA, 33 bp, Homo sapien
catcctgcaggttttacaagcaacttctctgaa

SEQ ID NO: 934824 - DNA, 33 bp, Homo sapien
catcctgcaggttttataagcaacttctctgaa

SEQ ID NO: 934825 - DNA, 33 bp, Homo sapien
ccagtcagaatgccccagactaggtgaactctg

SEQ ID NO: 934826 - DNA, 33 bp, Homo sapien
ccagtcagaatgccccggactaggtgaactctg

SEQ ID NO: 934827 - DNA, 33 bp, Homo sapien
aaaaaggcttggagcccagactttggaaacgtg

SEQ ID NO: 934828 - DNA, 33 bp, Homo sapien
aaaaaggcttggagcctagactttggaaacgtg

SEQ ID NO: 934829 - DNA, 33 bp, Homo sapien
gtcagaatgtcaattgcattttcagctccaaaa

SEQ ID NO: 934830 - DNA, 33 bp, Homo sapien
gtcagaatgtcaattgtattttcagctccaaaa

SEQ ID NO: 934831 - DNA, 33 bp, Homo sapien
gatattaacatagttaaaaaagagccaagtgct

SEQ ID NO: 934832 - DNA, 33 bp, Homo sapien
gatattaacatagttataaaagagccaagtgct

SEQ ID NO: 934833 - DNA, 33 bp, Homo sapien
ggatttttaacacgtaacatcctcatatctgct

SEQ ID NO: 934834 - DNA, 33 bp, Homo sapien
ggatttttaacacgtagcatcctcatatctgct

SEQ ID NO: 934835 - DNA, 33 bp, Homo sapien
cactgggttcccgtccacaagaaccatcttcac

SEQ ID NO: 934836 - DNA, 33 bp, Homo sapien
cactgggttcccgtccgcaagaaccatcttcac

SEQ ID NO: 934837 - DNA, 33 bp, Homo sapien
tgcaaatagcagtaacaaaaattctatcacatg

SEQ ID NO: 934838 - DNA, 33 bp, Homo sapien
tgcaaatagcagtaacgaaaattctatcacatg

SEQ ID NO: 934839 - DNA, 33 bp, Homo sapien
aaagaaaggtcttataccaactgacatcacctg

SEQ ID NO: 934840 - DNA, 33 bp, Homo sapien
aaagaaaggtcttatagcaactgacatcacctg

SEQ ID NO: 934841 - DNA, 33 bp, Homo sapien
tgtttcttgctttttacagtgttaaggtttgca

SEQ ID NO: 934842 - DNA, 33 bp, Homo sapien
tgtttcttgctttttagagtgttaaggtttgca

SEQ ID NO: 934843 - DNA, 33 bp, Homo sapien
cattttatacttcagaacttaaacatgttagat

SEQ ID NO: 934844 - DNA, 33 bp, Homo sapien
cattttatacttcagaccttaaacatgttagat

SEQ ID NO: 934845 - DNA, 33 bp, Homo sapien
gtatatagctataaaaaacagggctttgataga

SEQ ID NO: 934846 - DNA, 33 bp, Homo sapien
gtatatagctataaaatacagggctttgataga

SEQ ID NO: 934847 - DNA, 33 bp, Homo sapien
aggtatcatatgtccgcatctgcctttgcacat

SEQ ID NO: 934848 - DNA, 33 bp, Homo sapien
aggtatcatatgtccgtatctgcctttgcacat

SEQ ID NO: 934849 - DNA, 33 bp, Homo sapien
agaacaggatgggaacagccttatagttgctaa

SEQ ID NO: 934850 - DNA, 33 bp, Homo sapien
agaacaggatgggaacggccttatagttgctaa

SEQ ID NO: 934851 - DNA, 33 bp, Homo sapien
ctaatctttatgtttacggtaacattgattgtt

SEQ ID NO: 934852 - DNA, 33 bp, Homo sapien
ctaatctttatgtttatggtaacattgattgtt

SEQ ID NO: 934853 - DNA, 33 bp, Homo sapien
cacagaacagcagcccaattctcagatttccca

SEQ ID NO: 934854 - DNA, 33 bp, Homo sapien
cacagaacagcagccccattctcagatttccca

SEQ ID NO: 934855 - DNA, 33 bp, Homo sapien
attcatctcagagcaacagtcatggaactggcg

SEQ ID NO: 934856 - DNA, 33 bp, Homo sapien
attcatctcagagcaatagtcatggaactggcg

SEQ ID NO: 934857 - DNA, 33 bp, Homo sapien
gtgagtcctgggcacaacttgaaagtctccgat

SEQ ID NO: 934858 - DNA, 33 bp, Homo sapien
gtgagtcctgggcacagcttgaaagtctccgat

SEQ ID NO: 934859 - DNA, 33 bp, Homo sapien
tccagttcctcattcactattataatggagaag

SEQ ID NO: 934860 - DNA, 33 bp, Homo sapien
tccagttcctcattcagtattataatggagaag

SEQ ID NO: 934861 - DNA, 33 bp, Homo sapien
tgttttgcctggaaatcatgtgtccattggact

SEQ ID NO: 934862 - DNA, 33 bp, Homo sapien
tgttttgcctggaaattatgtgtccattggact

SEQ ID NO: 934863 - DNA, 33 bp, Homo sapien
gagtttcaagaattcaaataaatcccaggttaa

SEQ ID NO: 934864 - DNA, 33 bp, Homo sapien
gagtttcaagaattcagataaatcccaggttaa

SEQ ID NO: 934865 - DNA, 33 bp, Homo sapien
tgagaccgacaggaacagtgaagaaagggagtt

SEQ ID NO: 934866 - DNA, 33 bp, Homo sapien
tgagaccgacaggaacggtgaagaaagggagtt

SEQ ID NO: 934867 - DNA, 33 bp, Homo sapien
tcaagttgaggtagacaattttaacacataatt

SEQ ID NO: 934868 - DNA, 33 bp, Homo sapien
tcaagttgaggtagacgattttaacacataatt

SEQ ID NO: 934869 - DNA, 33 bp, Homo sapien
tcacaaagatggagcaagtagtggcaccttaat

SEQ ID NO: 934870 - DNA, 33 bp, Homo sapien
tcacaaagatggagcaggtagtggcaccttaat

SEQ ID NO: 934871 - DNA, 33 bp, Homo sapien
cagaactttcattacactgatgaccaagaacca

SEQ ID NO: 934872 - DNA, 33 bp, Homo sapien
cagaactttcattacattgatgaccaagaacca

SEQ ID NO: 934873 - DNA, 33 bp, Homo sapien
ctttagcgtattcatgaactgtgtgtaagttca

SEQ ID NO: 934874 - DNA, 33 bp, Homo sapien
ctttagcgtattcatggactgtgtgtaagttca

SEQ ID NO: 934875 - DNA, 33 bp, Homo sapien
ctgttttagttcataacaactggtttctaagaa

SEQ ID NO: 934876 - DNA, 33 bp, Homo sapien
ctgttttagttcataataactggtttctaagaa

SEQ ID NO: 934877 - DNA, 33 bp, Homo sapien
ggatctgccggtaccaataaagggtagcatggc

SEQ ID NO: 934878 - DNA, 33 bp, Homo sapien
ggatctgccggtaccagtaaagggtagcatggc

SEQ ID NO: 934879 - DNA, 33 bp, Homo sapien
ccggagcttctggttcaatttcaggatgagagt

SEQ ID NO: 934880 - DNA, 33 bp, Homo sapien
ccggagcttctggttcgatttcaggatgagagt

SEQ ID NO: 934881 - DNA, 33 bp, Homo sapien; identical to SEQ ID NO: 934879

SEQ ID NO: 934882 - DNA, 33 bp, Homo sapien; identical to SEQ ID NO: 934880

SEQ ID NO: 934883 - DNA, 33 bp, Homo sapien
ggaaccacttctgatgcacagcttaccctagca

SEQ ID NO: 934884 - DNA, 33 bp, Homo sapien
ggaaccacttctgatgtacagcttaccctagca

SEQ ID NO: 934885 - DNA, 33 bp, Homo sapien
ccgtgctcggtaatagaatcttatcatccttgc

SEQ ID NO: 934886 - DNA, 33 bp, Homo sapien
ccgtgctcggtaatagcatcttatcatccttgc

SEQ ID NO: 934887 - DNA, 33 bp, Homo sapien
tcacccagaactgtaaacctggtcacaaagatg

SEQ ID NO: 934888 - DNA, 33 bp, Homo sapien
tcacccagaactgtaaccctggtcacaaagatg

SEQ ID NO: 934889 - DNA, 33 bp, Homo sapien
cattagaaacaaaaaagagataatgaccactac

SEQ ID NO: 934890 - DNA, 33 bp, Homo sapien
cattagaaacaaaaaatagataatgaccactac

SEQ ID NO: 934891 - DNA, 33 bp, Homo sapien
atttttagtgaaggccaatgaacagtttcctct

SEQ ID NO: 934892 - DNA, 33 bp, Homo sapien
atttttagtgaaggccgatgaacagtttcctct

SEQ ID NO: 934893 - DNA, 33 bp, Homo sapien
tctaagtgcataggacaaggaagatagagaacc

SEQ ID NO: 934894 - DNA, 33 bp, Homo sapien
tctaagtgcataggaccaggaagatagagaacc

SEQ ID NO: 934895 - DNA, 33 bp, Homo sapien
cacagtctgtgaatacagtaaagcaacttcgtg

SEQ ID NO: 934896 - DNA, 33 bp, Homo sapien
cacagtctgtgaatacggtaaagcaacttcgtg

SEQ ID NO: 934897 - DNA, 33 bp, Homo sapien
tttcccctgtttttgcagaaatatgctaataag

SEQ ID NO: 934898 - DNA, 33 bp, Homo sapien
tttcccctgtttttgcggaaatatgctaataag

SEQ ID NO: 934899 - DNA, 33 bp, Homo sapien
gaaatttaaagggtgccgaatgaaatagttgaa

SEQ ID NO: 934900 - DNA, 33 bp, Homo sapien
gaaatttaaagggtgctgaatgaaatagttgaa

SEQ ID NO: 934901 - DNA, 33 bp, Homo sapien
ctgaatcagtgtcccgaaagctcattagatttc

SEQ ID NO: 934902 - DNA, 33 bp, Homo sapien
ctgaatcagtgtcccggaagctcattagatttc

SEQ ID NO: 934903 - DNA, 33 bp, Homo sapien
ctgactccttgcttggaacagtgagctggctcg

SEQ ID NO: 934904 - DNA, 33 bp, Homo sapien
ctgactccttgcttggcacagtgagctggctcg

SEQ ID NO: 934905 - DNA, 33 bp, Homo sapien
atagcctccctctaaccaagagacagatagagc

SEQ ID NO: 934906 - DNA, 33 bp, Homo sapien
atagcctccctctaactaagagacagatagagc

SEQ ID NO: 934907 - DNA, 33 bp, Homo sapien
cttccctgcatgtctcgccaggcaacagcttta

SEQ ID NO: 934908 - DNA, 33 bp, Homo sapien
cttccctgcatgtctctccaggcaacagcttta

SEQ ID NO: 934909 - DNA, 33 bp, Homo sapien
tctccagttccctaatgatagctctgagctgaa

SEQ ID NO: 934910 - DNA, 33 bp, Homo sapien
tctccagttccctaattatagctctgagctgaa

SEQ ID NO: 934911 - DNA, 33 bp, Homo sapien
aggcagagggcagaatcactagctggcaggggc

SEQ ID NO: 934912 - DNA, 33 bp, Homo sapien
aggcagagggcagaattactagctggcaggggc

SEQ ID NO: 934913 - DNA, 33 bp, Homo sapien; identical to SEQ ID NO: 934911

SEQ ID NO: 934914 - DNA, 33 bp, Homo sapien; identical to SEQ ID NO: 934912

SEQ ID NO: 934915 - DNA, 33 bp, Homo sapien
atggatgacagtcttaagcatctccatgttgct

SEQ ID NO: 934916 - DNA, 33 bp, Homo sapien
atggatgacagtcttaggcatctccatgttgct

SEQ ID NO: 934917 - DNA, 33 bp, Homo sapien; identical to SEQ ID NO: 934915

SEQ ID NO: 934918 - DNA, 33 bp, Homo sapien; identical to SEQ ID NO: 934916

SEQ ID NO: 934919 - DNA, 33 bp, Homo sapien
tggagaaaaaaacaaagggcttctccattcttt

SEQ ID NO: 934920 - DNA, 33 bp, Homo sapien
tggagaaaaaaacaaatggcttctccattcttt

SEQ ID NO: 934921 - DNA, 33 bp, Homo sapien
atgggtatccccacacaccaggcactgatgttg

SEQ ID NO: 934922 - DNA, 33 bp, Homo sapien
atgggtatccccacacgccaggcactgatgttg

SEQ ID NO: 934923 - DNA, 33 bp, Homo sapien
tgtggctaagcttctgacacagagatacacagc

SEQ ID NO: 934924 - DNA, 33 bp, Homo sapien
tgtggctaagcttctggcacagagatacacagc

SEQ ID NO: 934925 - DNA, 33 bp, Homo sapien
taaaataaaggatacaagtggcttaaagtaggc

SEQ ID NO: 934926 - DNA, 33 bp, Homo sapien
taaaataaaggatacacgtggcttaaagtaggc

SEQ ID NO: 934927 - DNA, 33 bp, Homo sapien
caggcaacagctttaacctgcttgagtgatctg

SEQ ID NO: 934928 - DNA, 33 bp, Homo sapien
caggcaacagctttaatctgcttgagtgatctg

SEQ ID NO: 934929 - DNA, 33 bp, Homo sapien
tgccttcccagagtgaagtttctgttatcattc

SEQ ID NO: 934930 - DNA, 33 bp, Homo sapien
tgccttcccagagtgacgtttctgttatcattc

SEQ ID NO: 934931 - DNA, 33 bp, Homo sapien
aacaaatctttgatgcaagaactttaggtcctg

SEQ ID NO: 934932 - DNA, 33 bp, Homo sapien
aacaaatctttgatgctagaactttaggtcctg

SEQ ID NO: 934933 - DNA, 33 bp, Homo sapien
atctctgaccagtgcactcactttcatggatac

SEQ ID NO: 934934 - DNA, 33 bp, Homo sapien
atctctgaccagtgcattcactttcatggatac

SEQ ID NO: 934935 - DNA, 33 bp, Homo sapien
gtacctatttctattcaacctctaaattctctt

SEQ ID NO: 934936 - DNA, 33 bp, Homo sapien
gtacctatttctattcgacctctaaattctctt

SEQ ID NO: 934937 - DNA, 33 bp, Homo sapien; identical to SEQ ID NO: 934935

SEQ ID NO: 934938 - DNA, 33 bp, Homo sapien; identical to SEQ ID NO: 934936

SEQ ID NO: 934939 - DNA, 33 bp, Homo sapien
gaaaatgttagtagacacatcaaactgtgctgt

SEQ ID NO: 934940 - DNA, 33 bp, Homo sapien
gaaaatgttagtagacgcatcaaactgtgctgt

SEQ ID NO: 934941 - DNA, 33 bp, Homo sapien; identical to SEQ ID NO: 934939

SEQ ID NO: 934942 - DNA, 33 bp, Homo sapien; identical to SEQ ID NO: 934940

SEQ ID NO: 934943 - DNA, 33 bp, Homo sapien
ggcccacggatagacaaaagtcccaattttgcc

SEQ ID NO: 934944 - DNA, 33 bp, Homo sapien
ggcccacggatagacagaagtcccaattttgcc

SEQ ID NO: 934945 - DNA, 33 bp, Homo sapien
cagtctgtgtaccctacagcaccgcaggtacaa

SEQ ID NO: 934946 - DNA, 33 bp, Homo sapien
cagtctgtgtaccctatagcaccgcaggtacaa

SEQ ID NO: 934947 - DNA, 33 bp, Homo sapien; identical to SEQ ID NO: 934945

SEQ ID NO: 934948 - DNA, 33 bp, Homo sapien; identical to SEQ ID NO: 934946

SEQ ID NO: 934949 - DNA, 33 bp, Homo sapien
aagatctgagctttgacaaaattattcccatca

SEQ ID NO: 934950 - DNA, 33 bp, Homo sapien
aagatctgagctttgagaaaattattcccatca

SEQ ID NO: 934951 - DNA, 33 bp, Homo sapien
ttcctgcattctaaaactaggaggatcttattt

SEQ ID NO: 934952 - DNA, 33 bp, Homo sapien
ttcctgcattctaaaattaggaggatcttattt

SEQ ID NO: 934953 - DNA, 33 bp, Homo sapien
tcggctgctccctcccagacatctgtgtacttg

SEQ ID NO: 934954 - DNA, 33 bp, Homo sapien
tcggctgctccctcccggacatctgtgtacttg

SEQ ID NO: 934955 - DNA, 33 bp, Homo sapien
gtgagatgactacaaaagttttccttattctgt

SEQ ID NO: 934956 - DNA, 33 bp, Homo sapien
gtgagatgactacaaatgttttccttattctgt

SEQ ID NO: 934957 - DNA, 33 bp, Homo sapien
aacctctaatgtgacacggatagaagaggcttc

SEQ ID NO: 934958 - DNA, 33 bp, Homo sapien
aacctctaatgtgacatggatagaagaggcttc

SEQ ID NO: 934959 - DNA, 33 bp, Homo sapien; identical to SEQ ID NO: 934957

SEQ ID NO: 934960 - DNA, 33 bp, Homo sapien; identical to SEQ ID NO: 934958

SEQ ID NO: 934961 - DNA, 33 bp, Homo sapien
agtcctctgaagctgccgagatcacagagcaaa

SEQ ID NO: 934962 - DNA, 33 bp, Homo sapien
agtcctctgaagctgctgagatcacagagcaaa

SEQ ID NO: 934963 - DNA, 33 bp, Homo sapien
ggtatgctggtacaacagaaattagcaaatgct

SEQ ID NO: 934964 - DNA, 33 bp, Homo sapien
ggtatgctggtacaaccgaaattagcaaatgct

SEQ ID NO: 934965 - DNA, 33 bp, Homo sapien
aactttcccaagagccaaaaacaatataactac

SEQ ID NO: 934966 - DNA, 33 bp, Homo sapien
aactttcccaagagccgaaaacaatataactac

SEQ ID NO: 934967 - DNA, 33 bp, Homo sapien; identical to SEQ ID NO: 934965

SEQ ID NO: 934968 - DNA, 33 bp, Homo sapien; identical to SEQ ID NO: 934966

SEQ ID NO: 934969 - DNA, 33 bp, Homo sapien
aacaaaacatccacaacttctagaatgatgcct

SEQ ID NO: 934970 - DNA, 33 bp, Homo sapien
aacaaaacatccacaatttctagaatgatgcct

SEQ ID NO: 934971 - DNA, 33 bp, Homo sapien
aagagaaatcccaggcaaaagcttctgaaaccc

SEQ ID NO: 934972 - DNA, 33 bp, Homo sapien
aagagaaatcccaggcgaaagcttctgaaaccc

SEQ ID NO: 934973 - DNA, 33 bp, Homo sapien
gactcaccttcaggtaaaactggctggtgctac

SEQ ID NO: 934974 - DNA, 33 bp, Homo sapien
gactcaccttcaggtacaactggctggtgctac

SEQ ID NO: 934975 - DNA, 33 bp, Homo sapien
agcatagaattcatgaaaagtgataagtcagaa

SEQ ID NO: 934976 - DNA, 33 bp, Homo sapien
agcatagaattcatgacaagtgataagtcagaa

SEQ ID NO: 934977 - DNA, 33 bp, Homo sapien
gagacaaagcatgacacggcagaggagcctggt

SEQ ID NO: 934978 - DNA, 33 bp, Homo sapien
gagacaaagcatgacatggcagaggagcctggt

SEQ ID NO: 934979 - DNA, 33 bp, Homo sapien
tccagcagccactgaaactgtggaggaaggaga

SEQ ID NO: 934980 - DNA, 33 bp, Homo sapien
tccagcagccactgaacctgtggaggaaggaga

SEQ ID NO: 934981 - DNA, 33 bp, Homo sapien
taatgtacttggtatacggcccagagaaaatgg

SEQ ID NO: 934982 - DNA, 33 bp, Homo sapien
taatgtacttggtatatggcccagagaaaatgg

SEQ ID NO: 934983 - DNA, 33 bp, Homo sapien
ggcctaggtgtgagtccaagttctatatttgtt

SEQ ID NO: 934984 - DNA, 33 bp, Homo sapien
ggcctaggtgtgagtctaagttctatatttgtt

SEQ ID NO: 934985 - DNA, 33 bp, Homo sapien
gtgattccagcatccacgtgtcctgtaatagaa

SEQ ID NO: 934986 - DNA, 33 bp, Homo sapien
gtgattccagcatccatgtgtcctgtaatagaa

SEQ ID NO: 934987 - DNA, 33 bp, Homo sapien
tgactctgagatgtcaccagactgagaaccacc

SEQ ID NO: 934988 - DNA, 33 bp, Homo sapien
tgactctgagatgtcatcagactgagaaccacc

SEQ ID NO: 934989 - DNA, 33 bp, Homo sapien
ctgagaaccaccgctacatgtactggtatcgac

SEQ ID NO: 934990 - DNA, 33 bp, Homo sapien
ctgagaaccaccgctatatgtactggtatcgac

SEQ ID NO: 934991 - DNA, 33 bp, Homo sapien
tgctgagtcacatgggaattctacatttgacat

SEQ ID NO: 934992 - DNA, 33 bp, Homo sapien
tgctgagtcacatgggtattctacatttgacat

SEQ ID NO: 934993 - DNA, 33 bp, Homo sapien
aattcaaataaacaccacagatttcttccttgt

SEQ ID NO: 934994 - DNA, 33 bp, Homo sapien
aattcaaataaacaccgcagatttcttccttgt

SEQ ID NO: 934995 - DNA, 33 bp, Homo sapien
gaaggaaaattacacacaaaatcaagaggtcac

SEQ ID NO: 934996 - DNA, 33 bp, Homo sapien
gaaggaaaattacacataaaatcaagaggtcac

SEQ ID NO: 934997 - DNA, 33 bp, Homo sapien
gcaaatcttagctccacatgaattctacttctc

SEQ ID NO: 934998 - DNA, 33 bp, Homo sapien
gcaaatcttagctccagatgaattctacttctc

SEQ ID NO: 934999 - DNA, 33 bp, Homo sapien
tttttttccaactatgcagataacaacagaaag

SEQ ID NO: 935000 - DNA, 33 bp, Homo sapien
tttttttccaactatgtagataacaacagaaag

SEQ ID NO: 935001 - DNA, 33 bp, Homo sapien
ttttgaccattgccccaggaaatactcataaaa

SEQ ID NO: 935002 - DNA, 33 bp, Homo sapien
ttttgaccattgccccgggaaatactcataaaa

SEQ ID NO: 935003 - DNA, 33 bp, Homo sapien
tggggagcgtgtcctgaattttccagatgggcc

SEQ ID NO: 935004 - DNA, 33 bp, Homo sapien
tggggagcgtgtcctggattttccagatgggcc

SEQ ID NO: 935005 - DNA, 33 bp, Homo sapien
actctgagatgtaaaccaatttcaggccacaac

SEQ ID NO: 935006 - DNA, 33 bp, Homo sapien
actctgagatgtaaactaatttcaggccacaac

SEQ ID NO: 935007 - DNA, 33 bp, Homo sapien
ctttctatattttatcactccaaataaccagca

SEQ ID NO: 935008 - DNA, 33 bp, Homo sapien
ctttctatattttatctctccaaataaccagca

SEQ ID NO: 935009 - DNA, 33 bp, Homo sapien
ttggcatcacttggacagactcttgttcaaaat

SEQ ID NO: 935010 - DNA, 33 bp, Homo sapien
ttggcatcacttggacggactcttgttcaaaat

SEQ ID NO: 935011 - DNA, 33 bp, Homo sapien
tagctaatatttaacactgtggattggctgctg

SEQ ID NO: 935012 - DNA, 33 bp, Homo sapien
tagctaatatttaacattgtggattggctgctg

SEQ ID NO: 935013 - DNA, 33 bp, Homo sapien
acggaacgtcttccacactgaagatccatcccg

SEQ ID NO: 935014 - DNA, 33 bp, Homo sapien
acggaacgtcttccacgctgaagatccatcccg

SEQ ID NO: 935015 - DNA, 33 bp, Homo sapien
gacagaagcactacgaagaccaagctgagtttt

SEQ ID NO: 935016 - DNA, 33 bp, Homo sapien
gacagaagcactacgatgaccaagctgagtttt

SEQ ID NO: 935017 - DNA, 33 bp, Homo sapien
tctgggacctggcttgaagtttttcactgatgg

SEQ ID NO: 935018 - DNA, 33 bp, Homo sapien
tctgggacctggcttgcagtttttcactgatgg

SEQ ID NO: 935019 - DNA, 33 bp, Homo sapien
actgagatgcagcccaatgaaaggacacagtca

SEQ ID NO: 935020 - DNA, 33 bp, Homo sapien
actgagatgcagcccagtgaaaggacacagtca

SEQ ID NO: 935021 - DNA, 33 bp, Homo sapien
atgttgaaactgaaaaattatgtctagttctta

SEQ ID NO: 935022 - DNA, 33 bp, Homo sapien
atgttgaaactgaaaatttatgtctagttctta

SEQ ID NO: 935023 - DNA, 33 bp, Homo sapien
aaggtttgggttactccaggagcgctgtagata

SEQ ID NO: 935024 - DNA, 33 bp, Homo sapien
aaggtttgggttactctaggagcgctgtagata

SEQ ID NO: 935025 - DNA, 33 bp, Homo sapien
tcacttgctcccaggaaacaaaggaccacacag

SEQ ID NO: 935026 - DNA, 33 bp, Homo sapien
tcacttgctcccaggagacaaaggaccacacag

SEQ ID NO: 935027 - DNA, 33 bp, Homo sapien
acggtcatagcggagacgaaaagcagcagcgtg

SEQ ID NO: 935028 - DNA, 33 bp, Homo sapien
acggtcatagcggagatgaaaagcagcagcgtg

SEQ ID NO: 935029 - DNA, 33 bp, Homo sapien
agctagaggcattaaacacaatagcaagtataa

SEQ ID NO: 935030 - DNA, 33 bp, Homo sapien
agctagaggcattaaagacaatagcaagtataa

SEQ ID NO: 935031 - DNA, 33 bp, Homo sapien
gactggcaaaattaaacgtatattaaatagcaa

SEQ ID NO: 935032 - DNA, 33 bp, Homo sapien
gactggcaaaattaaaggtatattaaatagcaa

SEQ ID NO: 935033 - DNA, 33 bp, Homo sapien
tccccatggcagcgacaaaatctctctgaagtt

SEQ ID NO: 935034 - DNA, 33 bp, Homo sapien
tccccatggcagcgacgaaatctctctgaagtt

SEQ ID NO: 935035 - DNA, 33 bp, Homo sapien
atacttattgtattcacggaaccaaaaactcaa

SEQ ID NO: 935036 - DNA, 33 bp, Homo sapien
atacttattgtattcatggaaccaaaaactcaa

SEQ ID NO: 935037 - DNA, 33 bp, Homo sapien; identical to SEQ ID NO: 935035

SEQ ID NO: 935038 - DNA, 33 bp, Homo sapien; identical to SEQ ID NO: 935036

SEQ ID NO: 935039 - DNA, 33 bp, Homo sapien
gctccgtttttctgtaagtacatttggtcttgt

SEQ ID NO: 935040 - DNA, 33 bp, Homo sapien
gctccgtttttctgtatgtacatttggtcttgt

SEQ ID NO: 935041 - DNA, 33 bp, Homo sapien
actgggggggaggtaaaaccagataattcactc

SEQ ID NO: 935042 - DNA, 33 bp, Homo sapien
actgggggggaggtaacaccagataattcactc

SEQ ID NO: 935043 - DNA, 33 bp, Homo sapien
ggagtaatagatcaaccgtaggcccagtcctgg

SEQ ID NO: 935044 - DNA, 33 bp, Homo sapien
ggagtaatagatcaactgtaggcccagtcctgg

SEQ ID NO: 935045 - DNA, 33 bp, Homo sapien
ctgcttttggagaacacaaactatgacaatgtg

SEQ ID NO: 935046 - DNA, 33 bp, Homo sapien
ctgcttttggagaacataaactatgacaatgtg

SEQ ID NO: 935047 - DNA, 33 bp, Homo sapien
ttggagaaccatttccaaagggctttgtgtgtt

SEQ ID NO: 935048 - DNA, 33 bp, Homo sapien
ttggagaaccatttccgaagggctttgtgtgtt

SEQ ID NO: 935049 - DNA, 33 bp, Homo sapien; identical to SEQ ID NO: 935047

SEQ ID NO: 935050 - DNA, 33 bp, Homo sapien; identical to SEQ ID NO: 935048

SEQ ID NO: 935051 - DNA, 33 bp, Homo sapien
agaaaataaaagcccacgtagcagaggagcctg

SEQ ID NO: 935052 - DNA, 33 bp, Homo sapien
agaaaataaaagcccatgtagcagaggagcctg

SEQ ID NO: 935053 - DNA, 33 bp, Homo sapien
catagaaatgagccaaagtagaagtttaaacca

SEQ ID NO: 935054 - DNA, 33 bp, Homo sapien
catagaaatgagccaatgtagaagtttaaacca

SEQ ID NO: 935055 - DNA, 33 bp, Homo sapien
taggcttcttgttttacactgttccctatccaa

SEQ ID NO: 935056 - DNA, 33 bp, Homo sapien
taggcttcttgttttatactgttccctatccaa

SEQ ID NO: 935057 - DNA, 33 bp, Homo sapien
atttgagtggctgaaaaaaaggtttgcaaggat

SEQ ID NO: 935058 - DNA, 33 bp, Homo sapien
atttgagtggctgaaagaaaggtttgcaaggat

SEQ ID NO: 935059 - DNA, 33 bp, Homo sapien
cttgtgttgtgtttggaatagagtatgtagctc

SEQ ID NO: 935060 - DNA, 33 bp, Homo sapien
cttgtgttgtgtttgggatagagtatgtagctc

SEQ ID NO: 935061 - DNA, 33 bp, Homo sapien; identical to SEQ ID NO: 935059

SEQ ID NO: 935062 - DNA, 33 bp, Homo sapien; identical to SEQ ID NO: 935060

SEQ ID NO: 935063 - DNA, 33 bp, Homo sapien
gggtaggattcaaacccatgaagctgcacaaaa

SEQ ID NO: 935064 - DNA, 33 bp, Homo sapien
gggtaggattcaaaccgatgaagctgcacaaaa

SEQ ID NO: 935065 - DNA, 33 bp, Homo sapien
gtgactggatttcatagtaggcttgtaatcata

SEQ ID NO: 935066 - DNA, 33 bp, Homo sapien
gtgactggatttcatattaggcttgtaatcata

SEQ ID NO: 935067 - DNA, 33 bp, Homo sapien; identical to SEQ ID NO: 935065

SEQ ID NO: 935068 - DNA, 33 bp, Homo sapien; identical to SEQ ID NO: 935066

SEQ ID NO: 935069 - DNA, 33 bp, Homo sapien
ctgtgtaagggaaatactatgcacagcatgttt

SEQ ID NO: 935070 - DNA, 33 bp, Homo sapien
ctgtgtaagggaaatattatgcacagcatgttt

SEQ ID NO: 935071 - DNA, 33 bp, Homo sapien
gttacaaactttgctgcaggttcctgagaaaaa

SEQ ID NO: 935072 - DNA, 33 bp, Homo sapien
gttacaaactttgctgtaggttcctgagaaaaa

SEQ ID NO: 935073 - DNA, 33 bp, Homo sapien
atcctgcactctcaaccatgatgtgtaaatatt

SEQ ID NO: 935074 - DNA, 33 bp, Homo sapien
atcctgcactctcaactatgatgtgtaaatatt

SEQ ID NO: 935075 - DNA, 33 bp, Homo sapien
agtgagctatgtggacacgagtaaattctgaaa

SEQ ID NO: 935076 - DNA, 33 bp, Homo sapien
agtgagctatgtggacgcgagtaaattctgaaa

SEQ ID NO: 935077 - DNA, 33 bp, Homo sapien
gacgaggatggcaagacctatagagaacggcaa

SEQ ID NO: 935078 - DNA, 33 bp, Homo sapien
gacgaggatggcaagatctatagagaacggcaa

SEQ ID NO: 935079 - DNA, 33 bp, Homo sapien
gaatgttggctactagcatttgatgtattgctt

SEQ ID NO: 935080 - DNA, 33 bp, Homo sapien
gaatgttggctactaggatttgatgtattgctt

SEQ ID NO: 935081 - DNA, 33 bp, Homo sapien
gataaattcaatcatccatttctaccaggaaga

SEQ ID NO: 935082 - DNA, 33 bp, Homo sapien
gataaattcaatcatctatttctaccaggaaga

SEQ ID NO: 935083 - DNA, 33 bp, Homo sapien
cagtgtctactgttcccatctttatatccatgt

SEQ ID NO: 935084 - DNA, 33 bp, Homo sapien
cagtgtctactgttcctatctttatatccatgt

SEQ ID NO: 935085 - DNA, 33 bp, Homo sapien
gtagatagatagacaacacagatacattttttt

SEQ ID NO: 935086 - DNA, 33 bp, Homo sapien
gtagatagatagacaagacagatacattttttt

SEQ ID NO: 935087 - DNA, 33 bp, Homo sapien
gagcattgggtaaaaacggatgtaaagatggga

SEQ ID NO: 935088 - DNA, 33 bp, Homo sapien
gagcattgggtaaaaatggatgtaaagatggga

SEQ ID NO: 935089 - DNA, 33 bp, Homo sapien
gccccctgaccatgtccaatttcaacaccaaat

SEQ ID NO: 935090 - DNA, 33 bp, Homo sapien
gccccctgaccatgtcgaatttcaacaccaaat

SEQ ID NO: 935091 - DNA, 33 bp, Homo sapien
tcagggcttgtagctcggactctttttctgaaa

SEQ ID NO: 935092 - DNA, 33 bp, Homo sapien
tcagggcttgtagctctgactctttttctgaaa

SEQ ID NO: 935093 - DNA, 33 bp, Homo sapien
gttttgctgtgttgtccctgaacatgttatttc

SEQ ID NO: 935094 - DNA, 33 bp, Homo sapien
gttttgctgtgttgtcgctgaacatgttatttc

SEQ ID NO: 935095 - DNA, 33 bp, Homo sapien
aagcgtttggttcttcccttgactcttgagtaa

SEQ ID NO: 935096 - DNA, 33 bp, Homo sapien
aagcgtttggttcttctcttgactcttgagtaa

SEQ ID NO: 935097 - DNA, 33 bp, Homo sapien
ataaatccacttcaccaataatcatctgagggc

SEQ ID NO: 935098 - DNA, 33 bp, Homo sapien
ataaatccacttcaccgataatcatctgagggc

SEQ ID NO: 935099 - DNA, 33 bp, Homo sapien; identical to SEQ ID NO: 935097

SEQ ID NO: 935100 - DNA, 33 bp, Homo sapien; identical to SEQ ID NO: 935098

SEQ ID NO: 935101 - DNA, 33 bp, Homo sapien
gttttcctgccttactcacctcgtttacttatc

SEQ ID NO: 935102 - DNA, 33 bp, Homo sapien
gttttcctgccttactgacctcgtttacttatc

SEQ ID NO: 935103 - DNA, 33 bp, Homo sapien
cctaaatcagaagataagtcagtgatgagcaga

SEQ ID NO: 935104 - DNA, 33 bp, Homo sapien
cctaaatcagaagataggtcagtgatgagcaga

SEQ ID NO: 935105 - DNA, 33 bp, Homo sapien
ttcctgcttcttcccacgtctgatggcttctgg

SEQ ID NO: 935106 - DNA, 33 bp, Homo sapien
ttcctgcttcttcccatgtctgatggcttctgg

SEQ ID NO: 935107 - DNA, 33 bp, Homo sapien
ttggggacgtggaaaaaggaggcattagcaggt

SEQ ID NO: 935108 - DNA, 33 bp, Homo sapien
ttggggacgtggaaaacggaggcattagcaggt

SEQ ID NO: 935109 - DNA, 33 bp, Homo sapien
ctgcacccagaaactccctcagagcctctccac

SEQ ID NO: 935110 - DNA, 33 bp, Homo sapien
ctgcacccagaaactctctcagagcctctccac

SEQ ID NO: 935111 - DNA, 33 bp, Homo sapien
agccctgaggtttgaaacagtcaacaagtccag

SEQ ID NO: 935112 - DNA, 33 bp, Homo sapien
agccctgaggtttgaaccagtcaacaagtccag

SEQ ID NO: 935113 - DNA, 33 bp, Homo sapien
aacatcttctttgctacgataatgttttcatcc

SEQ ID NO: 935114 - DNA, 33 bp, Homo sapien
aacatcttctttgctatgataatgttttcatcc

SEQ ID NO: 935115 - DNA, 33 bp, Homo sapien
gacagcttgagtaagacgaagaatgcccggggt

SEQ ID NO: 935116 - DNA, 33 bp, Homo sapien
gacagcttgagtaagatgaagaatgcccggggt

SEQ ID NO: 935117 - DNA, 33 bp, Homo sapien
aacagttaaaatgaacaaaatagaacaagatgt

SEQ ID NO: 935118 - DNA, 33 bp, Homo sapien
aacagttaaaatgaacgaaatagaacaagatgt

SEQ ID NO: 935119 - DNA, 33 bp, Homo sapien
tctgaccaggatgatacgcattggcctttatgt

SEQ ID NO: 935120 - DNA, 33 bp, Homo sapien
tctgaccaggatgatatgcattggcctttatgt

SEQ ID NO: 935121 - DNA, 33 bp, Homo sapien
aagaaaaagaataaggaacagttgacataagtt

SEQ ID NO: 935122 - DNA, 33 bp, Homo sapien
aagaaaaagaataagggacagttgacataagtt

SEQ ID NO: 935123 - DNA, 33 bp, Homo sapien
aatataactaattacacaagccttgagcagcaa

SEQ ID NO: 935124 - DNA, 33 bp, Homo sapien
aatataactaattacataagccttgagcagcaa

SEQ ID NO: 935125 - DNA, 33 bp, Homo sapien
cactctgtgcactgaccggggacatgcgtggct

SEQ ID NO: 935126 - DNA, 33 bp, Homo sapien
cactctgtgcactgacgggggacatgcgtggct

SEQ ID NO: 935127 - DNA, 33 bp, Homo sapien
ttccacagctgttaaacgcccaggaaattccag

SEQ ID NO: 935128 - DNA, 33 bp, Homo sapien
ttccacagctgttaaatgcccaggaaattccag

SEQ ID NO: 935129 - DNA, 33 bp, Homo sapien
ctgcagattcttttgaagccaatttcaaaggca

SEQ ID NO: 935130 - DNA, 33 bp, Homo sapien
ctgcagattcttttgaggccaatttcaaaggca

SEQ ID NO: 935131 - DNA, 33 bp, Homo sapien
actgaagcaaaccagaatcacggagtccttaga

SEQ ID NO: 935132 - DNA, 33 bp, Homo sapien
actgaagcaaaccagagtcacggagtccttaga

SEQ ID NO: 935133 - DNA, 33 bp, Homo sapien
gtgaaggatcctagtaacatttcagacattttt

SEQ ID NO: 935134 - DNA, 33 bp, Homo sapien
gtgaaggatcctagtagcatttcagacattttt

SEQ ID NO: 935135 - DNA, 33 bp, Homo sapien
ttttatatcagtgcataaacagttgcccgtatt

SEQ ID NO: 935136 - DNA, 33 bp, Homo sapien
ttttatatcagtgcatcaacagttgcccgtatt

SEQ ID NO: 935137 - DNA, 33 bp, Homo sapien
gccggtgcacatttgaccatcttggagtgttcg

SEQ ID NO: 935138 - DNA, 33 bp, Homo sapien
gccggtgcacatttgagcatcttggagtgttcg

SEQ ID NO: 935139 - DNA, 33 bp, Homo sapien
cccccctccacagaccaactaaagagcagtctg

SEQ ID NO: 935140 - DNA, 33 bp, Homo sapien
cccccctccacagaccgactaaagagcagtctg

SEQ ID NO: 935141 - DNA, 33 bp, Homo sapien
gccgcttcctgaggaacaaaacggtgactgggg

SEQ ID NO: 935142 - DNA, 33 bp, Homo sapien
gccgcttcctgaggaataaaacggtgactgggg

SEQ ID NO: 935143 - DNA, 33 bp, Homo sapien
ggcctcagtctgcaacaaagggtgagggaggcc

SEQ ID NO: 935144 - DNA, 33 bp, Homo sapien
ggcctcagtctgcaacgaagggtgagggaggcc

SEQ ID NO: 935145 - DNA, 33 bp, Homo sapien
cccgcagcagtgccaactgggaaaggcttcggc

SEQ ID NO: 935146 - DNA, 33 bp, Homo sapien
cccgcagcagtgccaattgggaaaggcttcggc

SEQ ID NO: 935147 - DNA, 33 bp, Homo sapien
caagatgaggctcatacaaaactagggaccgta

SEQ ID NO: 935148 - DNA, 33 bp, Homo sapien
caagatgaggctcatagaaaactagggaccgta

SEQ ID NO: 935149 - DNA, 33 bp, Homo sapien
tgctgggctggtgcaacgtcatgtacttcgccc

SEQ ID NO: 935150 - DNA, 33 bp, Homo sapien
tgctgggctggtgcaatgtcatgtacttcgccc

SEQ ID NO: 935151 - DNA, 33 bp, Homo sapien
tcgtccttaggggtcacgtaggcttcctaatgg

SEQ ID NO: 935152 - DNA, 33 bp, Homo sapien
tcgtccttaggggtcatgtaggcttcctaatgg

SEQ ID NO: 935153 - DNA, 33 bp, Homo sapien
ggctggggctggtacacaacagggttgctcgga

SEQ ID NO: 935154 - DNA, 33 bp, Homo sapien
ggctggggctggtacataacagggttgctcgga

SEQ ID NO: 935155 - DNA, 33 bp, Homo sapien
ttcagctggtgttagaaggttgtaaagagcaaa

SEQ ID NO: 935156 - DNA, 33 bp, Homo sapien
ttcagctggtgttagagggttgtaaagagcaaa

SEQ ID NO: 935157 - DNA, 33 bp, Homo sapien
ttgttaccgggatgacagagataaggcaggtgg

SEQ ID NO: 935158 - DNA, 33 bp, Homo sapien
ttgttaccgggatgacggagataaggcaggtgg

SEQ ID NO: 935159 - DNA, 33 bp, Homo sapien
cagcccccatatgatccgaggaaaagtgagggc

SEQ ID NO: 935160 - DNA, 33 bp, Homo sapien
cagcccccatatgatctgaggaaaagtgagggc

SEQ ID NO: 935161 - DNA, 33 bp, Homo sapien
aatgtcagcgtgtaaaaacattcatgagcagcg

SEQ ID NO: 935162 - DNA, 33 bp, Homo sapien
aatgtcagcgtgtaaagacattcatgagcagcg

SEQ ID NO: 935163 - DNA, 33 bp, Homo sapien
gttggagatgaaaatagggcacagggaggcaga

SEQ ID NO: 935164 - DNA, 33 bp, Homo sapien
gttggagatgaaaatatggcacagggaggcaga

SEQ ID NO: 935165 - DNA, 33 bp, Homo sapien
gaatagtgaggaaatacgggttatggcatttcc

SEQ ID NO: 935166 - DNA, 33 bp, Homo sapien
gaatagtgaggaaataggggttatggcatttcc

SEQ ID NO: 935167 - DNA, 33 bp, Homo sapien
tgtcaacttcgccttcaccatcattgccacact

SEQ ID NO: 935168 - DNA, 33 bp, Homo sapien
tgtcaacttcgccttcgccatcattgccacact

SEQ ID NO: 935169 - DNA, 33 bp, Homo sapien
ttgtgacaaagacttaacacttgattctgatgg

SEQ ID NO: 935170 - DNA, 33 bp, Homo sapien
ttgtgacaaagacttaccacttgattctgatgg

SEQ ID NO: 935171 - DNA, 33 bp, Homo sapien
ttgaaaagttctgtagacgttttggacgtgtat

SEQ ID NO: 935172 - DNA, 33 bp, Homo sapien
ttgaaaagttctgtaggcgttttggacgtgtat

SEQ ID NO: 935173 - DNA, 33 bp, Homo sapien
ctcccctccagcttcaatagaaaagatattcat

SEQ ID NO: 935174 - DNA, 33 bp, Homo sapien
ctcccctccagcttcagtagaaaagatattcat

SEQ ID NO: 935175 - DNA, 33 bp, Homo sapien
ggtctttgatttaagcgattctcaatattctcc

SEQ ID NO: 935176 - DNA, 33 bp, Homo sapien
ggtctttgatttaagctattctcaatattctcc

SEQ ID NO: 935177 - DNA, 33 bp, Homo sapien
ttcaaggaagaattgggagtcacaggaagatga

SEQ ID NO: 935178 - DNA, 33 bp, Homo sapien
ttcaaggaagaattggtagtcacaggaagatga

SEQ ID NO: 935179 - DNA, 33 bp, Homo sapien
ttggaagagacagtcagagcagaatgaggccaa

SEQ ID NO: 935180 - DNA, 33 bp, Homo sapien
ttggaagagacagtcatagcagaatgaggccaa

SEQ ID NO: 935181 - DNA, 33 bp, Homo sapien
ggtggaaaaaaagacaagagccatacagagaaa

SEQ ID NO: 935182 - DNA, 33 bp, Homo sapien
ggtggaaaaaaagacaggagccatacagagaaa

SEQ ID NO: 935183 - DNA, 33 bp, Homo sapien
gctggcccatggtgagccgacactattatttca

SEQ ID NO: 935184 - DNA, 33 bp, Homo sapien
gctggcccatggtgaggcgacactattatttca

SEQ ID NO: 935185 - DNA, 33 bp, Homo sapien
gcagctttccgatactgaatccaagcccttctc

SEQ ID NO: 935186 - DNA, 33 bp, Homo sapien
gcagctttccgatacttaatccaagcccttctc

SEQ ID NO: 935187 - DNA, 33 bp, Homo sapien
ggcctgggctgtgtaacgataccatttatcaat

SEQ ID NO: 935188 - DNA, 33 bp, Homo sapien
ggcctgggctgtgtaatgataccatttatcaat

SEQ ID NO: 935189 - DNA, 33 bp, Homo sapien
ctggttctgcactgacaagttgatctgagccag

SEQ ID NO: 935190 - DNA, 33 bp, Homo sapien
ctggttctgcactgactagttgatctgagccag

SEQ ID NO: 935191 - DNA, 33 bp, Homo sapien
gacaggcaggcatccaaggattaggagagagca

SEQ ID NO: 935192 - DNA, 33 bp, Homo sapien
gacaggcaggcatccagggattaggagagagca

SEQ ID NO: 935193 - DNA, 33 bp, Homo sapien
ctggaggaaaatgaaaagcaatatcgagagcct

SEQ ID NO: 935194 - DNA, 33 bp, Homo sapien
ctggaggaaaatgaaaggcaatatcgagagcct

SEQ ID NO: 935195 - DNA, 33 bp, Homo sapien
agttgattccatgttcaaacgtgcttcacaaag

SEQ ID NO: 935196 - DNA, 33 bp, Homo sapien
agttgattccatgttcgaacgtgcttcacaaag

SEQ ID NO: 935197 - DNA, 33 bp, Homo sapien
cctttctttgtcatgacgcttacactatttgct

SEQ ID NO: 935198 - DNA, 33 bp, Homo sapien
cctttctttgtcatgatgcttacactatttgct

SEQ ID NO: 935199 - DNA, 33 bp, Homo sapien
gagatgaggagatgaacatggtgaaggctgggg

SEQ ID NO: 935200 - DNA, 33 bp, Homo sapien
gagatgaggagatgaagatggtgaaggctgggg

SEQ ID NO: 935201 - DNA, 33 bp, Homo sapien
aagggaccaagagaaacggaagaagggtaccca

SEQ ID NO: 935202 - DNA, 33 bp, Homo sapien
aagggaccaagagaaatggaagaagggtaccca

SEQ ID NO: 935203 - DNA, 33 bp, Homo sapien
cctcattttccagatgacaaaacttgcttacct

SEQ ID NO: 935204 - DNA, 33 bp, Homo sapien
cctcattttccagatggcaaaacttgcttacct

SEQ ID NO: 935205 - DNA, 33 bp, Homo sapien
ggtggctgtccataggcaaatgtcacagagcac

SEQ ID NO: 935206 - DNA, 33 bp, Homo sapien
ggtggctgtccatagggaaatgtcacagagcac

SEQ ID NO: 935207 - DNA, 33 bp, Homo sapien
gatatgggtgataagaagaagtcctgctcctga

SEQ ID NO: 935208 - DNA, 33 bp, Homo sapien
gatatgggtgataagaggaagtcctgctcctga

SEQ ID NO: 935209 - DNA, 33 bp, Homo sapien
ccatagtgtcattggaagccgtgtgggagtcac

SEQ ID NO: 935210 - DNA, 33 bp, Homo sapien
ccatagtgtcattggaggccgtgtgggagtcac

SEQ ID NO: 935211 - DNA, 33 bp, Homo sapien
ccttgcccaacaataacgaagagtcttaaactg

SEQ ID NO: 935212 - DNA, 33 bp, Homo sapien
ccttgcccaacaataatgaagagtcttaaactg

SEQ ID NO: 935213 - DNA, 33 bp, Homo sapien
atcttactgtactgaacggtgtaggcaattgta

SEQ ID NO: 935214 - DNA, 33 bp, Homo sapien
atcttactgtactgaatggtgtaggcaattgta

SEQ ID NO: 935215 - DNA, 33 bp, Homo sapien
tccagtaagatgctacgcaagaagaacatcccc

SEQ ID NO: 935216 - DNA, 33 bp, Homo sapien
tccagtaagatgctactcaagaagaacatcccc

SEQ ID NO: 935217 - DNA, 33 bp, Homo sapien
tttacgctttggcctaacaattcctcttctaga

SEQ ID NO: 935218 - DNA, 33 bp, Homo sapien
tttacgctttggcctagcaattcctcttctaga

SEQ ID NO: 935219 - DNA, 33 bp, Homo sapien
ttatttttttcacttcaatttcatatgatcaca

SEQ ID NO: 935220 - DNA, 33 bp, Homo sapien
ttatttttttcacttcgatttcatatgatcaca

SEQ ID NO: 935221 - DNA, 33 bp, Homo sapien
tgagttttgaaagggacgtgcaaaccatagcag

SEQ ID NO: 935222 - DNA, 33 bp, Homo sapien
tgagttttgaaagggatgtgcaaaccatagcag

SEQ ID NO: 935223 - DNA, 33 bp, Homo sapien
ttttcacagcctttacaaaaaagaatatggaga

SEQ ID NO: 935224 - DNA, 33 bp, Homo sapien
ttttcacagcctttacgaaaaagaatatggaga

SEQ ID NO: 935225 - DNA, 33 bp, Homo sapien
taataccattattttacagctgaataaacgggc

SEQ ID NO: 935226 - DNA, 33 bp, Homo sapien
taataccattattttatagctgaataaacgggc

SEQ ID NO: 935227 - DNA, 33 bp, Homo sapien
cgggccgtaaatctgcccttctttgttacttac

SEQ ID NO: 935228 - DNA, 33 bp, Homo sapien
cgggccgtaaatctgctcttctttgttacttac

SEQ ID NO: 935229 - DNA, 33 bp, Homo sapien
agaagtgctctatgatcaagaggtagtgtccaa

SEQ ID NO: 935230 - DNA, 33 bp, Homo sapien
agaagtgctctatgattaagaggtagtgtccaa

SEQ ID NO: 935231 - DNA, 33 bp, Homo sapien
tggtttaatccagaaaaatgggacaataggaag

SEQ ID NO: 935232 - DNA, 33 bp, Homo sapien
tggtttaatccagaaagatgggacaataggaag

SEQ ID NO: 935233 - DNA, 33 bp, Homo sapien
tgtctcaatttgctcacgaaagtttactttacc

SEQ ID NO: 935234 - DNA, 33 bp, Homo sapien
tgtctcaatttgctcatgaaagtttactttacc

SEQ ID NO: 935235 - DNA, 33 bp, Homo sapien
gagaatcagaacaccaagatcagagaccaatct

SEQ ID NO: 935236 - DNA, 33 bp, Homo sapien
gagaatcagaacaccaggatcagagaccaatct

SEQ ID NO: 935237 - DNA, 33 bp, Homo sapien
cagctgagactgacacaaaaattccattatggc

SEQ ID NO: 935238 - DNA, 33 bp, Homo sapien
cagctgagactgacaccaaaattccattatggc

SEQ ID NO: 935239 - DNA, 33 bp, Homo sapien
tgtgaccagcacccaaaaagaccacaggacctg

SEQ ID NO: 935240 - DNA, 33 bp, Homo sapien
tgtgaccagcacccaagaagaccacaggacctg

SEQ ID NO: 935241 - DNA, 33 bp, Homo sapien
cattagtatttgggcacatgtcaaccagagggc

SEQ ID NO: 935242 - DNA, 33 bp, Homo sapien
cattagtatttgggcatatgtcaaccagagggc

SEQ ID NO: 935243 - DNA, 33 bp, Homo sapien
acatcttcaatttttaacttctcgcagaaagca

SEQ ID NO: 935244 - DNA, 33 bp, Homo sapien
acatcttcaatttttagcttctcgcagaaagca

SEQ ID NO: 935245 - DNA, 33 bp, Homo sapien
ttcacctgaaggcagacaggaccatctttattg

SEQ ID NO: 935246 - DNA, 33 bp, Homo sapien
ttcacctgaaggcagagaggaccatctttattg

SEQ ID NO: 935247 - DNA, 33 bp, Homo sapien
aagagaaaagtgaaaacatctgggcagtgagaa

SEQ ID NO: 935248 - DNA, 33 bp, Homo sapien
aagagaaaagtgaaaatatctgggcagtgagaa

SEQ ID NO: 935249 - DNA, 33 bp, Homo sapien
aaatgttcaatgaatggatgaaaattaatctgc

SEQ ID NO: 935250 - DNA, 33 bp, Homo sapien
aaatgttcaatgaatgtatgaaaattaatctgc

SEQ ID NO: 935251 - DNA, 33 bp, Homo sapien
tccttatccagatccaatagtgtattaaatccc

SEQ ID NO: 935252 - DNA, 33 bp, Homo sapien
tccttatccagatccagtagtgtattaaatccc

SEQ ID NO: 935253 - DNA, 33 bp, Homo sapien
taaatataagcagcaaaatatgagatacaatta

SEQ ID NO: 935254 - DNA, 33 bp, Homo sapien
taaatataagcagcaagatatgagatacaatta

SEQ ID NO: 935255 - DNA, 33 bp, Homo sapien
ttgtcatggaaaaagacaggtcatggttaataa

SEQ ID NO: 935256 - DNA, 33 bp, Homo sapien
ttgtcatggaaaaagataggtcatggttaataa

SEQ ID NO: 935257 - DNA, 33 bp, Homo sapien
ctgcctcaggatggaaacggagggccaccagac

SEQ ID NO: 935258 - DNA, 33 bp, Homo sapien
ctgcctcaggatggaagcggagggccaccagac

SEQ ID NO: 935259 - DNA, 33 bp, Homo sapien
gggacatacagaaagcacagtgacacaaaacac

SEQ ID NO: 935260 - DNA, 33 bp, Homo sapien
gggacatacagaaagcgcagtgacacaaaacac

SEQ ID NO: 935261 - DNA, 33 bp, Homo sapien
catccttgctgtccacagtagaactggagcctg

SEQ ID NO: 935262 - DNA, 33 bp, Homo sapien
catccttgctgtccacggtagaactggagcctg

SEQ ID NO: 935263 - DNA, 33 bp, Homo sapien
ctgaggaataaagaaaactggagtagaaacagg

SEQ ID NO: 935264 - DNA, 33 bp, Homo sapien
ctgaggaataaagaaatctggagtagaaacagg

SEQ ID NO: 935265 - DNA, 33 bp, Homo sapien
taaaatgtgcagctaaaaggaaacaaagcatta

SEQ ID NO: 935266 - DNA, 33 bp, Homo sapien
taaaatgtgcagctaagaggaaacaaagcatta

SEQ ID NO: 935267 - DNA, 33 bp, Homo sapien
ctcttcacacaaaaaaacaatatttgaggccga

SEQ ID NO: 935268 - DNA, 33 bp, Homo sapien
ctcttcacacaaaaaaccaatatttgaggccga

SEQ ID NO: 935269 - DNA, 33 bp, Homo sapien
gaaaaagaagtgatgtaaaagagatcatctttt

SEQ ID NO: 935270 - DNA, 33 bp, Homo sapien
gaaaaagaagtgatgtgaaagagatcatctttt

SEQ ID NO: 935271 - DNA, 33 bp, Homo sapien
agatgatttctaaggcccttgtagatctgaaac

SEQ ID NO: 935272 - DNA, 33 bp, Homo sapien
agatgatttctaaggcgcttgtagatctgaaac

SEQ ID NO: 935273 - DNA, 33 bp, Homo sapien
aaaatgatgatttttcgaagagttcagtattct

SEQ ID NO: 935274 - DNA, 33 bp, Homo sapien
aaaatgatgatttttctaagagttcagtattct

SEQ ID NO: 935275 - DNA, 33 bp, Homo sapien
ccctggtcagtgccaacactcataatgacttgt

SEQ ID NO: 935276 - DNA, 33 bp, Homo sapien
ccctggtcagtgccaatactcataatgacttgt

SEQ ID NO: 935277 - DNA, 33 bp, Homo sapien
gtttccaaactttaaccctaagctcagtctcag

SEQ ID NO: 935278 - DNA, 33 bp, Homo sapien
gtttccaaactttaactctaagctcagtctcag

SEQ ID NO: 935279 - DNA, 33 bp, Homo sapien
tttaggggccatccaacgtgctatgtacaagga

SEQ ID NO: 935280 - DNA, 33 bp, Homo sapien
tttaggggccatccaatgtgctatgtacaagga

SEQ ID NO: 935281 - DNA, 33 bp, Homo sapien
tttccttaacaataacacggcaacattttcagt

SEQ ID NO: 935282 - DNA, 33 bp, Homo sapien
tttccttaacaataacgcggcaacattttcagt

SEQ ID NO: 935283 - DNA, 33 bp, Homo sapien
tcaagttctcaataaccacatgaggccagtggc

SEQ ID NO: 935284 - DNA, 33 bp, Homo sapien
tcaagttctcaataactacatgaggccagtggc

SEQ ID NO: 935285 - DNA, 33 bp, Homo sapien
cccaaagctgtgtccaatcacgttcctgtgtgt

SEQ ID NO: 935286 - DNA, 33 bp, Homo sapien
cccaaagctgtgtccagtcacgttcctgtgtgt

SEQ ID NO: 935287 - DNA, 33 bp, Homo sapien
tggggtcccttgtcagaaacctaatgcccctaa

SEQ ID NO: 935288 - DNA, 33 bp, Homo sapien
tggggtcccttgtcagcaacctaatgcccctaa

SEQ ID NO: 935289 - DNA, 33 bp, Homo sapien
tgcatgggcaggtcaacgtccccaaatcacgtt

SEQ ID NO: 935290 - DNA, 33 bp, Homo sapien
tgcatgggcaggtcaatgtccccaaatcacgtt

SEQ ID NO: 935291 - DNA, 33 bp, Homo sapien
cacacagctgggtggcactacagaaaaacatac

SEQ ID NO: 935292 - DNA, 33 bp, Homo sapien
cacacagctgggtggcgctacagaaaaacatac

SEQ ID NO: 935293 - DNA, 33 bp, Homo sapien
ggtttttaacaagaacacaatggttcaaagagg

SEQ ID NO: 935294 - DNA, 33 bp, Homo sapien
ggtttttaacaagaacgcaatggttcaaagagg

SEQ ID NO: 935295 - DNA, 33 bp, Homo sapien
taggggttgtttgccaagaaatgtggacaaaga

SEQ ID NO: 935296 - DNA, 33 bp, Homo sapien
taggggttgtttgccaggaaatgtggacaaaga

SEQ ID NO: 935297 - DNA, 33 bp, Homo sapien
ctttgagctactgtgacccctgtgtgtaccttg

SEQ ID NO: 935298 - DNA, 33 bp, Homo sapien
ctttgagctactgtgatccctgtgtgtaccttg

SEQ ID NO: 935299 - DNA, 33 bp, Homo sapien
tagtctgagccaagaaatgatgggccgtgtttg

SEQ ID NO: 935300 - DNA, 33 bp, Homo sapien
tagtctgagccaagaactgatgggccgtgtttg

SEQ ID NO: 935301 - DNA, 33 bp, Homo sapien
ttaagaaaaaatgagaaaagtcaagaaggagag

SEQ ID NO: 935302 - DNA, 33 bp, Homo sapien
ttaagaaaaaatgagacaagtcaagaaggagag

SEQ ID NO: 935303 - DNA, 33 bp, Homo sapien
tggtgtagaggactaacgtgagggaagtgccag

SEQ ID NO: 935304 - DNA, 33 bp, Homo sapien
tggtgtagaggactaatgtgagggaagtgccag

SEQ ID NO: 935305 - DNA, 33 bp, Homo sapien
tgctccatcttcacagcccttcgagtgatacca

SEQ ID NO: 935306 - DNA, 33 bp, Homo sapien
tgctccatcttcacagtccttcgagtgatacca

SEQ ID NO: 935307 - DNA, 33 bp, Homo sapien
acttgaaatttgtaaacggctttcctgaactta

SEQ ID NO: 935308 - DNA, 33 bp, Homo sapien
acttgaaatttgtaaatggctttcctgaactta

SEQ ID NO: 935309 - DNA, 33 bp, Homo sapien
attggatcaattagtcaaacactcaatatttat

SEQ ID NO: 935310 - DNA, 33 bp, Homo sapien
attggatcaattagtccaacactcaatatttat

SEQ ID NO: 935311 - DNA, 33 bp, Homo sapien
tgaggtcttgcaggaacgtataatgcttgacgt

SEQ ID NO: 935312 - DNA, 33 bp, Homo sapien
tgaggtcttgcaggaatgtataatgcttgacgt

SEQ ID NO: 935313 - DNA, 33 bp, Homo sapien
gacttgactgatagaaacgcccagtgaactgtg

SEQ ID NO: 935314 - DNA, 33 bp, Homo sapien
gacttgactgatagaagcgcccagtgaactgtg

SEQ ID NO: 935315 - DNA, 33 bp, Homo sapien
aagaggagtgttcatacggcctgaggatggaac

SEQ ID NO: 935316 - DNA, 33 bp, Homo sapien
aagaggagtgttcatatggcctgaggatggaac

SEQ ID NO: 935317 - DNA, 33 bp, Homo sapien
actctgaaggtgaagaatctgtctatagtaaca

SEQ ID NO: 935318 - DNA, 33 bp, Homo sapien
actctgaaggtgaagattctgtctatagtaaca

SEQ ID NO: 935319 - DNA, 33 bp, Homo sapien
taagtggctgttactacgctcaacaagtccaaa

SEQ ID NO: 935320 - DNA, 33 bp, Homo sapien
taagtggctgttactatgctcaacaagtccaaa

SEQ ID NO: 935321 - DNA, 33 bp, Homo sapien
ggcagtggaagcagcaaagataaacccaagatt

SEQ ID NO: 935322 - DNA, 33 bp, Homo sapien
ggcagtggaagcagcagagataaacccaagatt

SEQ ID NO: 935323 - DNA, 33 bp, Homo sapien
gctagtaacaggaaacccttgaggcaaggagat

SEQ ID NO: 935324 - DNA, 33 bp, Homo sapien
gctagtaacaggaaactcttgaggcaaggagat

SEQ ID NO: 935325 - DNA, 33 bp, Homo sapien
taacattgaacgggcactatgcattccatttct

SEQ ID NO: 935326 - DNA, 33 bp, Homo sapien
taacattgaacgggcattatgcattccatttct

SEQ ID NO: 935327 - DNA, 33 bp, Homo sapien
tagctacgtcttcaggaaacatcagtaaagagt

SEQ ID NO: 935328 - DNA, 33 bp, Homo sapien
tagctacgtcttcagggaacatcagtaaagagt

SEQ ID NO: 935329 - DNA, 33 bp, Homo sapien
caagagtgattctacacatccattcaaagcccc

SEQ ID NO: 935330 - DNA, 33 bp, Homo sapien
caagagtgattctacatatccattcaaagcccc

SEQ ID NO: 935331 - DNA, 33 bp, Homo sapien
ctcttggtagggctctaaatggggatcaggaaa

SEQ ID NO: 935332 - DNA, 33 bp, Homo sapien
ctcttggtagggctctgaatggggatcaggaaa

SEQ ID NO: 935333 - DNA, 33 bp, Homo sapien
ccttttacaaagaatcaaacaggctgctttaga

SEQ ID NO: 935334 - DNA, 33 bp, Homo sapien
ccttttacaaagaatcgaacaggctgctttaga

SEQ ID NO: 935335 - DNA, 33 bp, Homo sapien
tgaagatcaaatgagacgatccatgcagagcac

SEQ ID NO: 935336 - DNA, 33 bp, Homo sapien
tgaagatcaaatgagatgatccatgcagagcac

SEQ ID NO: 935337 - DNA, 33 bp, Homo sapien
acagtttgtattttgcaaaggagaaaaatatga

SEQ ID NO: 935338 - DNA, 33 bp, Homo sapien
acagtttgtattttgcgaaggagaaaaatatga

SEQ ID NO: 935339 - DNA, 33 bp, Homo sapien
ctgtgtgccacctaaacgaagctccttcacttt

SEQ ID NO: 935340 - DNA, 33 bp, Homo sapien
ctgtgtgccacctaaatgaagctccttcacttt

SEQ ID NO: 935341 - DNA, 33 bp, Homo sapien
gaaagacagctcgaatcaatgatggtccagttg

SEQ ID NO: 935342 - DNA, 33 bp, Homo sapien
gaaagacagctcgaattaatgatggtccagttg

SEQ ID NO: 935343 - DNA, 33 bp, Homo sapien
aaggatggagtaatcaacagtgccaaaatgata

SEQ ID NO: 935344 - DNA, 33 bp, Homo sapien
aaggatggagtaatcagcagtgccaaaatgata

SEQ ID NO: 935345 - DNA, 33 bp, Homo sapien
gagagggcagctatagcaattcttgtccaggag

SEQ ID NO: 935346 - DNA, 33 bp, Homo sapien
gagagggcagctataggaattcttgtccaggag

SEQ ID NO: 935347 - DNA, 33 bp, Homo sapien
gaggaaattgaggcctaaggaaatgaaacatca

SEQ ID NO: 935348 - DNA, 33 bp, Homo sapien
gaggaaattgaggcctgaggaaatgaaacatca

SEQ ID NO: 935349 - DNA, 33 bp, Homo sapien
ctattgttattgttccagcagattcactttttt

SEQ ID NO: 935350 - DNA, 33 bp, Homo sapien
ctattgttattgttccggcagattcactttttt

SEQ ID NO: 935351 - DNA, 33 bp, Homo sapien
ttcagtgtttttctgcacctactatgtatcagg

SEQ ID NO: 935352 - DNA, 33 bp, Homo sapien
ttcagtgtttttctgcgcctactatgtatcagg

SEQ ID NO: 935353 - DNA, 33 bp, Homo sapien
aaggaagctaaggttacagttctgaccagacat

SEQ ID NO: 935354 - DNA, 33 bp, Homo sapien
aaggaagctaaggttatagttctgaccagacat

SEQ ID NO: 935355 - DNA, 33 bp, Homo sapien
gtgcaggcttcctacagcagtttcctgcagaca

SEQ ID NO: 935356 - DNA, 33 bp, Homo sapien
gtgcaggcttcctacatcagtttcctgcagaca

SEQ ID NO: 935357 - DNA, 33 bp, Homo sapien
ttggcacaaggcttgacatataataaatgttca

SEQ ID NO: 935358 - DNA, 33 bp, Homo sapien
ttggcacaaggcttgatatataataaatgttca

SEQ ID NO: 935359 - DNA, 33 bp, Homo sapien
acttcaagccggtaaaaatggcagagggccgtg

SEQ ID NO: 935360 - DNA, 33 bp, Homo sapien
acttcaagccggtaaagatggcagagggccgtg

SEQ ID NO: 935361 - DNA, 33 bp, Homo sapien
tgtagtgaccaatgatgacagttaggaaccaag

SEQ ID NO: 935362 - DNA, 33 bp, Homo sapien
tgtagtgaccaatgattacagttaggaaccaag

SEQ ID NO: 935363 - DNA, 33 bp, Homo sapien
tttgttctgagaatgcggagagttttaatatac

SEQ ID NO: 935364 - DNA, 33 bp, Homo sapien
tttgttctgagaatgctgagagttttaatatac

SEQ ID NO: 935365 - DNA, 33 bp, Homo sapien
atgcctggactcaaccaacccaatttctaagtt

SEQ ID NO: 935366 - DNA, 33 bp, Homo sapien
atgcctggactcaaccgacccaatttctaagtt

SEQ ID NO: 935367 - DNA, 33 bp, Homo sapien
tttcaatagtcacacgcattattttgtaataaa

SEQ ID NO: 935368 - DNA, 33 bp, Homo sapien
tttcaatagtcacacgtattattttgtaataaa

SEQ ID NO: 935369 - DNA, 33 bp, Homo sapien
aaatttgttttttaaaatcgagcaccagaaaat

SEQ ID NO: 935370 - DNA, 33 bp, Homo sapien
aaatttgttttttaaagtcgagcaccagaaaat

SEQ ID NO: 935371 - DNA, 33 bp, Homo sapien
aaacttttagttctccacaaatcaatatatacg

SEQ ID NO: 935372 - DNA, 33 bp, Homo sapien
aaacttttagttctccgcaaatcaatatatacg

SEQ ID NO: 935373 - DNA, 33 bp, Homo sapien
gaaaacaaaatacagcaagggtagctatacata

SEQ ID NO: 935374 - DNA, 33 bp, Homo sapien
gaaaacaaaatacagcgagggtagctatacata

SEQ ID NO: 935375 - DNA, 33 bp, Homo sapien
cattaatgccatttagacactagaggaatctga

SEQ ID NO: 935376 - DNA, 33 bp, Homo sapien
cattaatgccatttagtcactagaggaatctga

SEQ ID NO: 935377 - DNA, 33 bp, Homo sapien
agatccagtttccttccaacttggtttgctctt

SEQ ID NO: 935378 - DNA, 33 bp, Homo sapien
agatccagtttccttctaacttggtttgctctt

SEQ ID NO: 935379 - DNA, 33 bp, Homo sapien
catttccccaaacatacctttgtgttcctttgt

SEQ ID NO: 935380 - DNA, 33 bp, Homo sapien
catttccccaaacatatctttgtgttcctttgt

SEQ ID NO: 935381 - DNA, 33 bp, Homo sapien
aaccctgaagagttgaactccgagatgggggtg

SEQ ID NO: 935382 - DNA, 33 bp, Homo sapien
aaccctgaagagttgatctccgagatgggggtg

SEQ ID NO: 935383 - DNA, 33 bp, Homo sapien
aatgattctagacctaaaagatatttgtgtgtg

SEQ ID NO: 935384 - DNA, 33 bp, Homo sapien
aatgattctagacctacaagatatttgtgtgtg

SEQ ID NO: 935385 - DNA, 33 bp, Homo sapien
atgctgagtggccacacggttacctcaaaatcc

SEQ ID NO: 935386 - DNA, 33 bp, Homo sapien
atgctgagtggccacatggttacctcaaaatcc

SEQ ID NO: 935387 - DNA, 33 bp, Homo sapien
gaagaggaagaacggacgggtcttacacttagt

SEQ ID NO: 935388 - DNA, 33 bp, Homo sapien
gaagaggaagaacggatgggtcttacacttagt

SEQ ID NO: 935389 - DNA, 33 bp, Homo sapien
agattcctgttcaatacatacgggaggcaatag

SEQ ID NO: 935390 - DNA, 33 bp, Homo sapien
agattcctgttcaatatatacgggaggcaatag

SEQ ID NO: 935391 - DNA, 33 bp, Homo sapien
tatctgccaagacccaagagaaaagaaccttga

SEQ ID NO: 935392 - DNA, 33 bp, Homo sapien
tatctgccaagacccaggagaaaagaaccttga

SEQ ID NO: 935393 - DNA, 33 bp, Homo sapien
tggggatcactgagtgaagatttttaaagacaa

SEQ ID NO: 935394 - DNA, 33 bp, Homo sapien
tggggatcactgagtggagatttttaaagacaa

SEQ ID NO: 935395 - DNA, 33 bp, Homo sapien
caaattccctgaatgagcccatgtttactttgc

SEQ ID NO: 935396 - DNA, 33 bp, Homo sapien
caaattccctgaatgatcccatgtttactttgc

SEQ ID NO: 935397 - DNA, 33 bp, Homo sapien
tgtcctgaccttgtcacatggagatcaaagtgc

SEQ ID NO: 935398 - DNA, 33 bp, Homo sapien
tgtcctgaccttgtcatatggagatcaaagtgc

SEQ ID NO: 935399 - DNA, 33 bp, Homo sapien
ttgacaaacctcttaacatctatactcagcatt

SEQ ID NO: 935400 - DNA, 33 bp, Homo sapien
ttgacaaacctcttaagatctatactcagcatt

SEQ ID NO: 935401 - DNA, 33 bp, Homo sapien
ctattcaagtgttggaactcaaaacattatctg

SEQ ID NO: 935402 - DNA, 33 bp, Homo sapien
ctattcaagtgttggatctcaaaacattatctg

SEQ ID NO: 935403 - DNA, 33 bp, Homo sapien
gttatgtgattttgaccctgttaacctggaaac

SEQ ID NO: 935404 - DNA, 33 bp, Homo sapien
gttatgtgattttgactctgttaacctggaaac

SEQ ID NO: 935405 - DNA, 33 bp, Homo sapien
aaaatgcagttttagaagaagcgtaatttgtgt

SEQ ID NO: 935406 - DNA, 33 bp, Homo sapien
aaaatgcagttttagaggaagcgtaatttgtgt

SEQ ID NO: 935407 - DNA, 33 bp, Homo sapien
aattgatttactcatacctatttcacttaaatt

SEQ ID NO: 935408 - DNA, 33 bp, Homo sapien
aattgatttactcatagctatttcacttaaatt

SEQ ID NO: 935409 - DNA, 33 bp, Homo sapien
gatttccactaaaggaacacacattgattcaaa

SEQ ID NO: 935410 - DNA, 33 bp, Homo sapien
gatttccactaaaggatcacacattgattcaaa

SEQ ID NO: 935411 - DNA, 33 bp, Homo sapien
aagtccagctgaaaaaagattctgactaaatca

SEQ ID NO: 935412 - DNA, 33 bp, Homo sapien
aagtccagctgaaaaaggattctgactaaatca

SEQ ID NO: 935413 - DNA, 33 bp, Homo sapien
tgccacactggacacgcccttgaataaccacaa

SEQ ID NO: 935414 - DNA, 33 bp, Homo sapien
tgccacactggacacgtccttgaataaccacaa

SEQ ID NO: 935415 - DNA, 33 bp, Homo sapien
agcctgcagaaagaacactagtttacagtttga

SEQ ID NO: 935416 - DNA, 33 bp, Homo sapien
agcctgcagaaagaacgctagtttacagtttga

SEQ ID NO: 935417 - DNA, 33 bp, Homo sapien
acaatgacacaagttacgccatttgagaaaagt

SEQ ID NO: 935418 - DNA, 33 bp, Homo sapien
acaatgacacaagttatgccatttgagaaaagt

SEQ ID NO: 935419 - DNA, 33 bp, Homo sapien
gatggcaacatattcaactctttcaattcttct

SEQ ID NO: 935420 - DNA, 33 bp, Homo sapien
gatggcaacatattcagctctttcaattcttct

SEQ ID NO: 935421 - DNA, 33 bp, Homo sapien
tcttttctgttcttaaaaacaacctgcataact

SEQ ID NO: 935422 - DNA, 33 bp, Homo sapien
tcttttctgttcttaacaacaacctgcataact

SEQ ID NO: 935423 - DNA, 33 bp, Homo sapien
tgcctaaggtagcctacgcatggtctcacattt

SEQ ID NO: 935424 - DNA, 33 bp, Homo sapien
tgcctaaggtagcctatgcatggtctcacattt

SEQ ID NO: 935425 - DNA, 33 bp, Homo sapien
tctttattattcttacacagttttacaattttc

SEQ ID NO: 935426 - DNA, 33 bp, Homo sapien
tctttattattcttactcagttttacaattttc

SEQ ID NO: 935427 - DNA, 33 bp, Homo sapien
aggatgaacactgaagaagcaaagatgaccacc

SEQ ID NO: 935428 - DNA, 33 bp, Homo sapien
aggatgaacactgaagcagcaaagatgaccacc

SEQ ID NO: 935429 - DNA, 33 bp, Homo sapien
tgaaccccttgatctacagcctgaggaacgcag

SEQ ID NO: 935430 - DNA, 33 bp, Homo sapien
tgaaccccttgatctatagcctgaggaacgcag

SEQ ID NO: 935431 - DNA, 33 bp, Homo sapien
tgatatcagaaatctaagagatgagactgtaag

SEQ ID NO: 935432 - DNA, 33 bp, Homo sapien
tgatatcagaaatctacgagatgagactgtaag

SEQ ID NO: 935433 - DNA, 33 bp, Homo sapien
acaacaactaagagtagagaaaatgcctggttt

SEQ ID NO: 935434 - DNA, 33 bp, Homo sapien
acaacaactaagagtatagaaaatgcctggttt

SEQ ID NO: 935435 - DNA, 33 bp, Homo sapien
ttctcacaagtcttcaactagctacatagggaa

SEQ ID NO: 935436 - DNA, 33 bp, Homo sapien
ttctcacaagtcttcagctagctacatagggaa

SEQ ID NO: 935437 - DNA, 33 bp, Homo sapien
ataataaaagctcttaacagctgtaacaggttg

SEQ ID NO: 935438 - DNA, 33 bp, Homo sapien
ataataaaagctcttagcagctgtaacaggttg

SEQ ID NO: 935439 - DNA, 33 bp, Homo sapien
gctgcagttgtagcagccaatacgtctgtcatc

SEQ ID NO: 935440 - DNA, 33 bp, Homo sapien
gctgcagttgtagcaggcaatacgtctgtcatc

SEQ ID NO: 935441 - DNA, 33 bp, Homo sapien
agcaacatcttgacataaacatccttccagaga

SEQ ID NO: 935442 - DNA, 33 bp, Homo sapien
agcaacatcttgacatcaacatccttccagaga

SEQ ID NO: 935443 - DNA, 33 bp, Homo sapien
tttgaactgtaacgaaagtagatttgaaaataa

SEQ ID NO: 935444 - DNA, 33 bp, Homo sapien
tttgaactgtaacgaatgtagatttgaaaataa

SEQ ID NO: 935445 - DNA, 33 bp, Homo sapien
tgtaatactagcaaacaagtttaaattgcatat

SEQ ID NO: 935446 - DNA, 33 bp, Homo sapien
tgtaatactagcaaacgagtttaaattgcatat

SEQ ID NO: 935447 - DNA, 33 bp, Homo sapien
tgtttcaagcaacttgaacattcttttcttatg

SEQ ID NO: 935448 - DNA, 33 bp, Homo sapien
tgtttcaagcaacttgcacattcttttcttatg

SEQ ID NO: 935449 - DNA, 33 bp, Homo sapien
aaatgtggaatgattaccaagaagtcacggcct

SEQ ID NO: 935450 - DNA, 33 bp, Homo sapien
aaatgtggaatgattatcaagaagtcacggcct

SEQ ID NO: 935451 - DNA, 33 bp, Homo sapien
gtcttttcttcaaacacagccttaggcttagaa

SEQ ID NO: 935452 - DNA, 33 bp, Homo sapien
gtcttttcttcaaacatagccttaggcttagaa

SEQ ID NO: 935453 - DNA, 33 bp, Homo sapien
acaggtgtgcaatttacacaaaagataagtcgc

SEQ ID NO: 935454 - DNA, 33 bp, Homo sapien
acaggtgtgcaatttatacaaaagataagtcgc

SEQ ID NO: 935455 - DNA, 33 bp, Homo sapien
gaccagaatcaaggaaagaggcccgactaagac

SEQ ID NO: 935456 - DNA, 33 bp, Homo sapien
gaccagaatcaaggaaggaggcccgactaagac

SEQ ID NO: 935457 - DNA, 33 bp, Homo sapien
aggatgtatgattccacgcgtacataaatttca

SEQ ID NO: 935458 - DNA, 33 bp, Homo sapien
aggatgtatgattccaggcgtacataaatttca

SEQ ID NO: 935459 - DNA, 33 bp, Homo sapien
cactttggagtcattccagagtgaggcttttct

SEQ ID NO: 935460 - DNA, 33 bp, Homo sapien
cactttggagtcattctagagtgaggcttttct

SEQ ID NO: 935461 - DNA, 33 bp, Homo sapien
tgctggtggatcttgcaaactagaaaagcacca

SEQ ID NO: 935462 - DNA, 33 bp, Homo sapien
tgctggtggatcttgcgaactagaaaagcacca

SEQ ID NO: 935463 - DNA, 33 bp, Homo sapien
aatcactggctccagagagtagcgatgaaatgc

SEQ ID NO: 935464 - DNA, 33 bp, Homo sapien
aatcactggctccagatagtagcgatgaaatgc

SEQ ID NO: 935465 - DNA, 33 bp, Homo sapien
aaactctgctagtatcaaccatttccaatatta

SEQ ID NO: 935466 - DNA, 33 bp, Homo sapien
aaactctgctagtatcgaccatttccaatatta

SEQ ID NO: 935467 - DNA, 33 bp, Homo sapien
atgaatcgaagagaaactctggcactaaacagc

SEQ ID NO: 935468 - DNA, 33 bp, Homo sapien
atgaatcgaagagaaattctggcactaaacagc

SEQ ID NO: 935469 - DNA, 33 bp, Homo sapien
caacagttgtttggtgaaaactttagggatttt

SEQ ID NO: 935470 - DNA, 33 bp, Homo sapien
caacagttgtttggtggaaactttagggatttt

SEQ ID NO: 935471 - DNA, 33 bp, Homo sapien
cacaaattatagtatccaaacacataaaattgc

SEQ ID NO: 935472 - DNA, 33 bp, Homo sapien
cacaaattatagtatcgaaacacataaaattgc

SEQ ID NO: 935473 - DNA, 33 bp, Homo sapien
gcttgtgcaatacaacgcagaaaaagtccacaa

SEQ ID NO: 935474 - DNA, 33 bp, Homo sapien
gcttgtgcaatacaactcagaaaaagtccacaa

SEQ ID NO: 935475 - DNA, 33 bp, Homo sapien
tgccacagaaaatagaaacatttaattgggaat

SEQ ID NO: 935476 - DNA, 33 bp, Homo sapien
tgccacagaaaatagagacatttaattgggaat

SEQ ID NO: 935477 - DNA, 33 bp, Homo sapien
gtgtggaaaataaagacgcagtatggttatgtt

SEQ ID NO: 935478 - DNA, 33 bp, Homo sapien
gtgtggaaaataaagatgcagtatggttatgtt

SEQ ID NO: 935479 - DNA, 33 bp, Homo sapien
agcagagagtttagtacgatggaagacacaaga

SEQ ID NO: 935480 - DNA, 33 bp, Homo sapien
agcagagagtttagtatgatggaagacacaaga

SEQ ID NO: 935481 - DNA, 33 bp, Homo sapien
gctttgacaaaaatgcggatactgctatggaca

SEQ ID NO: 935482 - DNA, 33 bp, Homo sapien
gctttgacaaaaatgctgatactgctatggaca

SEQ ID NO: 935483 - DNA, 33 bp, Homo sapien
tcaagtataccgattacagtaggcaagatttaa

SEQ ID NO: 935484 - DNA, 33 bp, Homo sapien
tcaagtataccgattatagtaggcaagatttaa

SEQ ID NO: 935485 - DNA, 33 bp, Homo sapien
tagacctgttgaatcaaaacctgtatttttgca

SEQ ID NO: 935486 - DNA, 33 bp, Homo sapien
tagacctgttgaatcagaacctgtatttttgca

SEQ ID NO: 935487 - DNA, 33 bp, Homo sapien
agttcaaaatcagttcaaaaggttcaatgttgg

SEQ ID NO: 935488 - DNA, 33 bp, Homo sapien
agttcaaaatcagttcgaaaggttcaatgttgg

SEQ ID NO: 935489 - DNA, 33 bp, Homo sapien
gcgttcagttactacacggctctcctacttcat

SEQ ID NO: 935490 - DNA, 33 bp, Homo sapien
gcgttcagttactacatggctctcctacttcat

SEQ ID NO: 935491 - DNA, 33 bp, Homo sapien
atggaagttaaaatacgggctagagcaaagaga

SEQ ID NO: 935492 - DNA, 33 bp, Homo sapien
atggaagttaaaatactggctagagcaaagaga

SEQ ID NO: 935493 - DNA, 33 bp, Homo sapien
accaccatgcacttagaaagagtcatttcttcc

SEQ ID NO: 935494 - DNA, 33 bp, Homo sapien
accaccatgcacttagcaagagtcatttcttcc

SEQ ID NO: 935495 - DNA, 33 bp, Homo sapien
cagggattccatatacactttccccgttttaca

SEQ ID NO: 935496 - DNA, 33 bp, Homo sapien
cagggattccatatacgctttccccgttttaca

SEQ ID NO: 935497 - DNA, 33 bp, Homo sapien
cctcctgtcctcccgacctttgtatcctccacc

SEQ ID NO: 935498 - DNA, 33 bp, Homo sapien
cctcctgtcctcccgatctttgtatcctccacc

SEQ ID NO: 935499 - DNA, 33 bp, Homo sapien
caatatcttctaaataatccacccaatgcccca

SEQ ID NO: 935500 - DNA, 33 bp, Homo sapien
caatatcttctaaatactccacccaatgcccca

SEQ ID NO: 935501 - DNA, 33 bp, Homo sapien
ctaaactaatgagttcaaactttatcctgtaca

SEQ ID NO: 935502 - DNA, 33 bp, Homo sapien
ctaaactaatgagttcgaactttatcctgtaca

SEQ ID NO: 935503 - DNA, 33 bp, Homo sapien
tcaaggtggttatactaagtagtgattgaaaac

SEQ ID NO: 935504 - DNA, 33 bp, Homo sapien
tcaaggtggttatactgagtagtgattgaaaac

SEQ ID NO: 935505 - DNA, 33 bp, Homo sapien
tgggacctagaaatggaagaagccatgttgccc

SEQ ID NO: 935506 - DNA, 33 bp, Homo sapien
tgggacctagaaatgggagaagccatgttgccc

SEQ ID NO: 935507 - DNA, 33 bp, Homo sapien
atgtgtacagtgtgaaacttatcaaagagggaa

SEQ ID NO: 935508 - DNA, 33 bp, Homo sapien
atgtgtacagtgtgaaccttatcaaagagggaa

SEQ ID NO: 935509 - DNA, 33 bp, Homo sapien
ttggaagatgatggtaataaatcattggaggct

SEQ ID NO: 935510 - DNA, 33 bp, Homo sapien
ttggaagatgatggtagtaaatcattggaggct

SEQ ID NO: 935511 - DNA, 33 bp, Homo sapien
caggctggactgccaacagctacccgagtcgct

SEQ ID NO: 935512 - DNA, 33 bp, Homo sapien
caggctggactgccaatagctacccgagtcgct

SEQ ID NO: 935513 - DNA, 33 bp, Homo sapien
tcatttcaatgtcaaacgcataaataagactca

SEQ ID NO: 935514 - DNA, 33 bp, Homo sapien
tcatttcaatgtcaaaggcataaataagactca

SEQ ID NO: 935515 - DNA, 33 bp, Homo sapien
gttcaaattgcatttcaaatctatcacctgttt

SEQ ID NO: 935516 - DNA, 33 bp, Homo sapien
gttcaaattgcatttcgaatctatcacctgttt

SEQ ID NO: 935517 - DNA, 33 bp, Homo sapien
ttaattgtctgagataccactgaaccctaaaac

SEQ ID NO: 935518 - DNA, 33 bp, Homo sapien
ttaattgtctgagatagcactgaaccctaaaac

SEQ ID NO: 935519 - DNA, 33 bp, Homo sapien
cttgtactttacatgccaggaattttcgaatct

SEQ ID NO: 935520 - DNA, 33 bp, Homo sapien
cttgtactttacatgctaggaattttcgaatct

SEQ ID NO: 935521 - DNA, 33 bp, Homo sapien
tgctctgcccttaggcactctttttccaatcta

SEQ ID NO: 935522 - DNA, 33 bp, Homo sapien
tgctctgcccttaggcgctctttttccaatcta

SEQ ID NO: 935523 - DNA, 33 bp, Homo sapien
ccttgtgtcatcaacaataaatatgtagaaagt

SEQ ID NO: 935524 - DNA, 33 bp, Homo sapien
ccttgtgtcatcaacagtaaatatgtagaaagt

SEQ ID NO: 935525 - DNA, 33 bp, Homo sapien
ctcggactctgtgaccacatagctacatatgaa

SEQ ID NO: 935526 - DNA, 33 bp, Homo sapien
ctcggactctgtgaccgcatagctacatatgaa

SEQ ID NO: 935527 - DNA, 33 bp, Homo sapien
agtccgaggttataaacagaacattaaattcaa

SEQ ID NO: 935528 - DNA, 33 bp, Homo sapien
agtccgaggttataaagagaacattaaattcaa

SEQ ID NO: 935529 - DNA, 33 bp, Homo sapien
tcacatcgtaagttcaaatcactcaaaatgatt

SEQ ID NO: 935530 - DNA, 33 bp, Homo sapien
tcacatcgtaagttcacatcactcaaaatgatt

SEQ ID NO: 935531 - DNA, 33 bp, Homo sapien
tgaaaatggtaagagcaagacttattgttatgc

SEQ ID NO: 935532 - DNA, 33 bp, Homo sapien
tgaaaatggtaagagcgagacttattgttatgc

SEQ ID NO: 935533 - DNA, 33 bp, Homo sapien
tgacttctgagagagaagaagataaatgcagcc

SEQ ID NO: 935534 - DNA, 33 bp, Homo sapien
tgacttctgagagagatgaagataaatgcagcc

SEQ ID NO: 935535 - DNA, 33 bp, Homo sapien
catcttcacgatagcactattagaggtaactgg

SEQ ID NO: 935536 - DNA, 33 bp, Homo sapien
catcttcacgatagcagtattagaggtaactgg

SEQ ID NO: 935537 - DNA, 33 bp, Homo sapien
gtgctgacatgtgtaacactatcttacacatta

SEQ ID NO: 935538 - DNA, 33 bp, Homo sapien
gtgctgacatgtgtaatactatcttacacatta

SEQ ID NO: 935539 - DNA, 33 bp, Homo sapien
tatttttttctaccaaatagattataagctcct

SEQ ID NO: 935540 - DNA, 33 bp, Homo sapien
tatttttttctaccaattagattataagctcct

SEQ ID NO: 935541 - DNA, 33 bp, Homo sapien
tttactaaacgtaagagcacacgtaatatcaga

SEQ ID NO: 935542 - DNA, 33 bp, Homo sapien
tttactaaacgtaagatcacacgtaatatcaga

SEQ ID NO: 935543 - DNA, 33 bp, Homo sapien
cattcaataagaatgccaaaatgtgctacccca

SEQ ID NO: 935544 - DNA, 33 bp, Homo sapien
cattcaataagaatgctaaaatgtgctacccca

SEQ ID NO: 935545 - DNA, 33 bp, Homo sapien
cagataaactataaaacgcaggtaacatagatg

SEQ ID NO: 935546 - DNA, 33 bp, Homo sapien
cagataaactataaaatgcaggtaacatagatg

SEQ ID NO: 935547 - DNA, 33 bp, Homo sapien
tagcaagatatagccacaaacgcaattaaggac

SEQ ID NO: 935548 - DNA, 33 bp, Homo sapien
tagcaagatatagccataaacgcaattaaggac

SEQ ID NO: 935549 - DNA, 33 bp, Homo sapien
tccttctgctgggtaaatcctagacgacagagg

SEQ ID NO: 935550 - DNA, 33 bp, Homo sapien
tccttctgctgggtaagtcctagacgacagagg

SEQ ID NO: 935551 - DNA, 33 bp, Homo sapien
gacaaggggaaaggaaggagaatgaatgtgaat

SEQ ID NO: 935552 - DNA, 33 bp, Homo sapien
gacaaggggaaaggaatgagaatgaatgtgaat

SEQ ID NO: 935553 - DNA, 33 bp, Homo sapien
tcaaatgccaaggtagaatagtggcacagtctt

SEQ ID NO: 935554 - DNA, 33 bp, Homo sapien
tcaaatgccaaggtagcatagtggcacagtctt

SEQ ID NO: 935555 - DNA, 33 bp, Homo sapien
ggattctgttaatccacgttgtaacacaattct

SEQ ID NO: 935556 - DNA, 33 bp, Homo sapien
ggattctgttaatccatgttgtaacacaattct

SEQ ID NO: 935557 - DNA, 33 bp, Homo sapien
actacagcttttagccagaggacatgtcatatg

SEQ ID NO: 935558 - DNA, 33 bp, Homo sapien
actacagcttttagccggaggacatgtcatatg

SEQ ID NO: 935559 - DNA, 33 bp, Homo sapien
aaataaaacttacttacgtcactccccagtttg

SEQ ID NO: 935560 - DNA, 33 bp, Homo sapien
aaataaaacttacttatgtcactccccagtttg

SEQ ID NO: 935561 - DNA, 33 bp, Homo sapien
gcttgaacattttttaccatagcacaattagtt

SEQ ID NO: 935562 - DNA, 33 bp, Homo sapien
gcttgaacattttttatcatagcacaattagtt

SEQ ID NO: 935563 - DNA, 33 bp, Homo sapien
gtagactaagctagaacgaaatgatatgttttt

SEQ ID NO: 935564 - DNA, 33 bp, Homo sapien
gtagactaagctagaatgaaatgatatgttttt

SEQ ID NO: 935565 - DNA, 33 bp, Homo sapien
gataactataagccagaaaacagataataacaa

SEQ ID NO: 935566 - DNA, 33 bp, Homo sapien
gataactataagccagcaaacagataataacaa

SEQ ID NO: 935567 - DNA, 33 bp, Homo sapien
caagtttaacatacaaaaatgttgctcaaggga

SEQ ID NO: 935568 - DNA, 33 bp, Homo sapien
caagtttaacatacaacaatgttgctcaaggga

SEQ ID NO: 935569 - DNA, 33 bp, Homo sapien
aagtagaagaggtgtcaaagggtttataagaga

SEQ ID NO: 935570 - DNA, 33 bp, Homo sapien
aagtagaagaggtgtcgaagggtttataagaga

SEQ ID NO: 935571 - DNA, 33 bp, Homo sapien
catgactgagagctaccatgctgcatgtttgta

SEQ ID NO: 935572 - DNA, 33 bp, Homo sapien
catgactgagagctactatgctgcatgtttgta

SEQ ID NO: 935573 - DNA, 33 bp, Homo sapien
acgtttttatggcacaatatgggtagaaactat

SEQ ID NO: 935574 - DNA, 33 bp, Homo sapien
acgtttttatggcacagtatgggtagaaactat

SEQ ID NO: 935575 - DNA, 33 bp, Homo sapien
gcctctcattgtggtccactacttatattttgc

SEQ ID NO: 935576 - DNA, 33 bp, Homo sapien
gcctctcattgtggtctactacttatattttgc

SEQ ID NO: 935577 - DNA, 33 bp, Homo sapien
ttacagatgagtgacccagatcaccaagaggtc

SEQ ID NO: 935578 - DNA, 33 bp, Homo sapien
ttacagatgagtgacctagatcaccaagaggtc

SEQ ID NO: 935579 - DNA, 33 bp, Homo sapien
cactcattcctccaaacgctgtattggctcttc

SEQ ID NO: 935580 - DNA, 33 bp, Homo sapien
cactcattcctccaaatgctgtattggctcttc

SEQ ID NO: 935581 - DNA, 33 bp, Homo sapien
aaacactctatccaatcaagttcacttttttag

SEQ ID NO: 935582 - DNA, 33 bp, Homo sapien
aaacactctatccaatgaagttcacttttttag

SEQ ID NO: 935583 - DNA, 33 bp, Homo sapien
tcagcaatgtacacaaacttctttgcatttgaa

SEQ ID NO: 935584 - DNA, 33 bp, Homo sapien
tcagcaatgtacacaagcttctttgcatttgaa

SEQ ID NO: 935585 - DNA, 33 bp, Homo sapien
atgcgtctgctataaaccataattcccccggta

SEQ ID NO: 935586 - DNA, 33 bp, Homo sapien
atgcgtctgctataaatcataattcccccggta

SEQ ID NO: 935587 - DNA, 33 bp, Homo sapien
aattaaacatttcaagcctggttgccttatgat

SEQ ID NO: 935588 - DNA, 33 bp, Homo sapien
aattaaacatttcaagtctggttgccttatgat

SEQ ID NO: 935589 - DNA, 33 bp, Homo sapien
agcactattattacaaccacgattattacaaaa

SEQ ID NO: 935590 - DNA, 33 bp, Homo sapien
agcactattattacaatcacgattattacaaaa

SEQ ID NO: 935591 - DNA, 33 bp, Homo sapien
atttttagccagagtaaacaatacttggtactt

SEQ ID NO: 935592 - DNA, 33 bp, Homo sapien
atttttagccagagtagacaatacttggtactt

SEQ ID NO: 935593 - DNA, 33 bp, Homo sapien
gaagttccagaactcaactgggaaatacattaa

SEQ ID NO: 935594 - DNA, 33 bp, Homo sapien
gaagttccagaactcacctgggaaatacattaa

SEQ ID NO: 935595 - DNA, 33 bp, Homo sapien
gtgaaatgtaaatagaatcaaacctgaggcttt

SEQ ID NO: 935596 - DNA, 33 bp, Homo sapien
gtgaaatgtaaatagattcaaacctgaggcttt

SEQ ID NO: 935597 - DNA, 33 bp, Homo sapien
atagagagagagattcacaaatgtggttgcttc

SEQ ID NO: 935598 - DNA, 33 bp, Homo sapien
atagagagagagattcccaaatgtggttgcttc

SEQ ID NO: 935599 - DNA, 33 bp, Homo sapien
caaatgatggtttatgcataatagatggagtaa

SEQ ID NO: 935600 - DNA, 33 bp, Homo sapien
caaatgatggtttatgtataatagatggagtaa

SEQ ID NO: 935601 - DNA, 33 bp, Homo sapien
ttggagaaaaaaatgcaaaccctgtcctttagc

SEQ ID NO: 935602 - DNA, 33 bp, Homo sapien
ttggagaaaaaaatgctaaccctgtcctttagc

SEQ ID NO: 935603 - DNA, 33 bp, Homo sapien
caattccataactgagaaatcagcataagcaat

SEQ ID NO: 935604 - DNA, 33 bp, Homo sapien
caattccataactgagcaatcagcataagcaat

SEQ ID NO: 935605 - DNA, 33 bp, Homo sapien
cctgcaaagtcactcactctttaaaaattgtag

SEQ ID NO: 935606 - DNA, 33 bp, Homo sapien
cctgcaaagtcactcattctttaaaaattgtag

SEQ ID NO: 935607 - DNA, 33 bp, Homo sapien
tcctactagattgccacgcactttaaatgccag

SEQ ID NO: 935608 - DNA, 33 bp, Homo sapien
tcctactagattgccatgcactttaaatgccag

SEQ ID NO: 935609 - DNA, 33 bp, Homo sapien
tattacttttcagaaacgttgtaagcatttttc

SEQ ID NO: 935610 - DNA, 33 bp, Homo sapien
tattacttttcagaaaggttgtaagcatttttc

SEQ ID NO: 935611 - DNA, 33 bp, Homo sapien
catcactgattatttcaaatggctgcacaattg

SEQ ID NO: 935612 - DNA, 33 bp, Homo sapien
catcactgattatttcgaatggctgcacaattg

SEQ ID NO: 935613 - DNA, 33 bp, Homo sapien
ggcctcatgggcattacgctcttatctgaagta

SEQ ID NO: 935614 - DNA, 33 bp, Homo sapien
ggcctcatgggcattatgctcttatctgaagta

SEQ ID NO: 935615 - DNA, 33 bp, Homo sapien
aaagctagtacatgcacgtttgtccaaatatta

SEQ ID NO: 935616 - DNA, 33 bp, Homo sapien
aaagctagtacatgcaggtttgtccaaatatta

SEQ ID NO: 935617 - DNA, 33 bp, Homo sapien
taaaatcttttgatcccagaataacagtcttgt

SEQ ID NO: 935618 - DNA, 33 bp, Homo sapien
taaaatcttttgatcctagaataacagtcttgt

SEQ ID NO: 935619 - DNA, 33 bp, Homo sapien
taggcaagtcagtaacgaccctttgattacaag

SEQ ID NO: 935620 - DNA, 33 bp, Homo sapien
taggcaagtcagtaactaccctttgattacaag

SEQ ID NO: 935621 - DNA, 33 bp, Homo sapien
aatcaccatgctgtaaaagtagtcaaccatctc

SEQ ID NO: 935622 - DNA, 33 bp, Homo sapien
aatcaccatgctgtaagagtagtcaaccatctc

SEQ ID NO: 935623 - DNA, 33 bp, Homo sapien
agatctgcgtggatgcacacacgtcaggagttg

SEQ ID NO: 935624 - DNA, 33 bp, Homo sapien
agatctgcgtggatgcccacacgtcaggagttg

SEQ ID NO: 935625 - DNA, 33 bp, Homo sapien
tttgcatagcaagagcaatgtttaccccattac

SEQ ID NO: 935626 - DNA, 33 bp, Homo sapien
tttgcatagcaagagcgatgtttaccccattac

SEQ ID NO: 935627 - DNA, 33 bp, Homo sapien
acttccagtgaagggaagattaggtgatacaat

SEQ ID NO: 935628 - DNA, 33 bp, Homo sapien
acttccagtgaagggaggattaggtgatacaat

SEQ ID NO: 935629 - DNA, 33 bp, Homo sapien
agaaaataaatgcaaaatgttgacttcacctct

SEQ ID NO: 935630 - DNA, 33 bp, Homo sapien
agaaaataaatgcaaactgttgacttcacctct

SEQ ID NO: 935631 - DNA, 33 bp, Homo sapien
gcaagtgaattaaacacggagcaaacaatcaaa

SEQ ID NO: 935632 - DNA, 33 bp, Homo sapien
gcaagtgaattaaacatggagcaaacaatcaaa

SEQ ID NO: 935633 - DNA, 33 bp, Homo sapien
cttcatacacactcaagataaccttattccaat

SEQ ID NO: 935634 - DNA, 33 bp, Homo sapien
cttcatacacactcaatataaccttattccaat

SEQ ID NO: 935635 - DNA, 33 bp, Homo sapien
caatggtttggatcaacggttattctatttcta

SEQ ID NO: 935636 - DNA, 33 bp, Homo sapien
caatggtttggatcaatggttattctatttcta

SEQ ID NO: 935637 - DNA, 33 bp, Homo sapien
acatacgaggtttgcactctaagaaacataaac

SEQ ID NO: 935638 - DNA, 33 bp, Homo sapien
acatacgaggtttgcattctaagaaacataaac

SEQ ID NO: 935639 - DNA, 33 bp, Homo sapien
catttattttacgctcacagccttcctgattac

SEQ ID NO: 935640 - DNA, 33 bp, Homo sapien
catttattttacgctcgcagccttcctgattac

SEQ ID NO: 935641 - DNA, 33 bp, Homo sapien
agttagagtctacttcaagcttgttaagacttg

SEQ ID NO: 935642 - DNA, 33 bp, Homo sapien
agttagagtctacttccagcttgttaagacttg

SEQ ID NO: 935643 - DNA, 33 bp, Homo sapien
tgcctagaaggcgctcactagacattgatgctg

SEQ ID NO: 935644 - DNA, 33 bp, Homo sapien
tgcctagaaggcgctcgctagacattgatgctg

SEQ ID NO: 935645 - DNA, 33 bp, Homo sapien
aatcactgtgcctaatcactgtactattcttat

SEQ ID NO: 935646 - DNA, 33 bp, Homo sapien
aatcactgtgcctaatgactgtactattcttat

SEQ ID NO: 935647 - DNA, 33 bp, Homo sapien
taaggcagctaataaacgagaaaacttggattt

SEQ ID NO: 935648 - DNA, 33 bp, Homo sapien
taaggcagctaataaatgagaaaacttggattt

SEQ ID NO: 935649 - DNA, 33 bp, Homo sapien
gagaatagtagaataacaatcaagcatatgaga

SEQ ID NO: 935650 - DNA, 33 bp, Homo sapien
gagaatagtagaataagaatcaagcatatgaga

SEQ ID NO: 935651 - DNA, 33 bp, Homo sapien
gaattgtttgagagggaaaaatgggcactaagt

SEQ ID NO: 935652 - DNA, 33 bp, Homo sapien
gaattgtttgagaggggaaaatgggcactaagt

SEQ ID NO: 935653 - DNA, 33 bp, Homo sapien
tcattataaacaaaacccaggaacaagattcaa

SEQ ID NO: 935654 - DNA, 33 bp, Homo sapien
tcattataaacaaaactcaggaacaagattcaa

SEQ ID NO: 935655 - DNA, 33 bp, Homo sapien
ccttattggagaatggaatctagaagccaaggt

SEQ ID NO: 935656 - DNA, 33 bp, Homo sapien
ccttattggagaatggtatctagaagccaaggt

SEQ ID NO: 935657 - DNA, 33 bp, Homo sapien
ttgagtagtaggaagacgactggctcaatgtca

SEQ ID NO: 935658 - DNA, 33 bp, Homo sapien
ttgagtagtaggaagatgactggctcaatgtca

SEQ ID NO: 935659 - DNA, 33 bp, Homo sapien
ccttgtccctgtgatacgatagaatgagaaata

SEQ ID NO: 935660 - DNA, 33 bp, Homo sapien
ccttgtccctgtgatatgatagaatgagaaata

SEQ ID NO: 935661 - DNA, 33 bp, Homo sapien
gacatttgggtagcggcaaattttgaatcatct

SEQ ID NO: 935662 - DNA, 33 bp, Homo sapien
gacatttgggtagcggtaaattttgaatcatct

SEQ ID NO: 935663 - DNA, 33 bp, Homo sapien
tccacatcctctgtgtaaaggtacttctacaaa

SEQ ID NO: 935664 - DNA, 33 bp, Homo sapien
tccacatcctctgtgttaaggtacttctacaaa

SEQ ID NO: 935665 - DNA, 33 bp, Homo sapien
aaagatagctgctcaaataatttaataatccta

SEQ ID NO: 935666 - DNA, 33 bp, Homo sapien
aaagatagctgctcaagtaatttaataatccta

SEQ ID NO: 935667 - DNA, 33 bp, Homo sapien
tgtggagggggaaacaacgattggaataaatgc

SEQ ID NO: 935668 - DNA, 33 bp, Homo sapien
tgtggagggggaaacaccgattggaataaatgc

SEQ ID NO: 935669 - DNA, 33 bp, Homo sapien
aaaagacacactctaccattccactgaaatgaa

SEQ ID NO: 935670 - DNA, 33 bp, Homo sapien
aaaagacacactctacgattccactgaaatgaa

SEQ ID NO: 935671 - DNA, 33 bp, Homo sapien
attttatagaaattcaaaaggctatttcccagg

SEQ ID NO: 935672 - DNA, 33 bp, Homo sapien
attttatagaaattcagaaggctatttcccagg

SEQ ID NO: 935673 - DNA, 33 bp, Homo sapien
gcttgaagacatactacatttaagttactgggc

SEQ ID NO: 935674 - DNA, 33 bp, Homo sapien
gcttgaagacatactagatttaagttactgggc

SEQ ID NO: 935675 - DNA, 33 bp, Homo sapien
tgaggtacccagagaacgtaatgtaggcctaga

SEQ ID NO: 935676 - DNA, 33 bp, Homo sapien
tgaggtacccagagaatgtaatgtaggcctaga

SEQ ID NO: 935677 - DNA, 33 bp, Homo sapien
gatcaaataaaaaatagcaagtaggcagaggac

SEQ ID NO: 935678 - DNA, 33 bp, Homo sapien
gatcaaataaaaaatatcaagtaggcagaggac

SEQ ID NO: 935679 - DNA, 33 bp, Homo sapien
tccttgccaccaaatcagattcctcaaaaaata

SEQ ID NO: 935680 - DNA, 33 bp, Homo sapien
tccttgccaccaaatcggattcctcaaaaaata

SEQ ID NO: 935681 - DNA, 33 bp, Homo sapien
tatcctgcaagtcaaacgaatgaggccaattca

SEQ ID NO: 935682 - DNA, 33 bp, Homo sapien
tatcctgcaagtcaaatgaatgaggccaattca

SEQ ID NO: 935683 - DNA, 33 bp, Homo sapien
tttgcataatgtcacactattgggatttgtctg

SEQ ID NO: 935684 - DNA, 33 bp, Homo sapien
tttgcataatgtcacagtattgggatttgtctg

SEQ ID NO: 935685 - DNA, 33 bp, Homo sapien
tatttgtaagaatgtaccctagagctgtagtgt

SEQ ID NO: 935686 - DNA, 33 bp, Homo sapien
tatttgtaagaatgtatcctagagctgtagtgt

SEQ ID NO: 935687 - DNA, 33 bp, Homo sapien
aaggagttgaataagcaaaagcaagtaccctcc

SEQ ID NO: 935688 - DNA, 33 bp, Homo sapien
aaggagttgaataagcgaaagcaagtaccctcc

SEQ ID NO: 935689 - DNA, 33 bp, Homo sapien
taagcaaaaaatagaactgtgtaagcctatata

SEQ ID NO: 935690 - DNA, 33 bp, Homo sapien
taagcaaaaaatagaagtgtgtaagcctatata

SEQ ID NO: 935691 - DNA, 33 bp, Homo sapien
tatagtgctcattgcccagagaagaactatttg

SEQ ID NO: 935692 - DNA, 33 bp, Homo sapien
tatagtgctcattgccgagagaagaactatttg

SEQ ID NO: 935693 - DNA, 33 bp, Homo sapien
aaatctttgcctatatcagtgttctgaagcatt

SEQ ID NO: 935694 - DNA, 33 bp, Homo sapien
aaatctttgcctatatgagtgttctgaagcatt

SEQ ID NO: 935695 - DNA, 33 bp, Homo sapien
atatatatactcgatacagagcaccaagatata

SEQ ID NO: 935696 - DNA, 33 bp, Homo sapien
atatatatactcgatatagagcaccaagatata

SEQ ID NO: 935697 - DNA, 33 bp, Homo sapien
ctctgtttatggtgcaatctcaagttaagtttc

SEQ ID NO: 935698 - DNA, 33 bp, Homo sapien
ctctgtttatggtgcagtctcaagttaagtttc

SEQ ID NO: 935699 - DNA, 33 bp, Homo sapien
cacccaatgagcactgaaggttgacatgaggaa

SEQ ID NO: 935700 - DNA, 33 bp, Homo sapien
cacccaatgagcactggaggttgacatgaggaa

SEQ ID NO: 935701 - DNA, 33 bp, Homo sapien
atgccatttggtttcaagatatagctgacctgg

SEQ ID NO: 935702 - DNA, 33 bp, Homo sapien
atgccatttggtttcacgatatagctgacctgg

SEQ ID NO: 935703 - DNA, 33 bp, Homo sapien
tgttcatggtcatctacggataaagaatgttgc

SEQ ID NO: 935704 - DNA, 33 bp, Homo sapien
tgttcatggtcatctatggataaagaatgttgc

SEQ ID NO: 935705 - DNA, 33 bp, Homo sapien
tgtagactagtttcacacagttgacctgggctt

SEQ ID NO: 935706 - DNA, 33 bp, Homo sapien
tgtagactagtttcacgcagttgacctgggctt

SEQ ID NO: 935707 - DNA, 33 bp, Homo sapien
gtcttcgggctgagccaaggtggatgttttgag

SEQ ID NO: 935708 - DNA, 33 bp, Homo sapien
gtcttcgggctgagccgaggtggatgttttgag

SEQ ID NO: 935709 - DNA, 33 bp, Homo sapien
gcctttcacagcataaatcagctgcattattct

SEQ ID NO: 935710 - DNA, 33 bp, Homo sapien
gcctttcacagcataagtcagctgcattattct

SEQ ID NO: 935711 - DNA, 33 bp, Homo sapien
gggatggcccttcaaagaaacctaataggcttt

SEQ ID NO: 935712 - DNA, 33 bp, Homo sapien
gggatggcccttcaaataaacctaataggcttt

SEQ ID NO: 935713 - DNA, 33 bp, Homo sapien
tagaaaaatctctgaactcttctctggattcca

SEQ ID NO: 935714 - DNA, 33 bp, Homo sapien
tagaaaaatctctgaagtcttctctggattcca

SEQ ID NO: 935715 - DNA, 33 bp, Homo sapien
taagcttctccccttcaaagtgagtacagcatt

SEQ ID NO: 935716 - DNA, 33 bp, Homo sapien
taagcttctccccttcgaagtgagtacagcatt

SEQ ID NO: 935717 - DNA, 33 bp, Homo sapien
tgaactctatcaaccacgtatttaattgataac

SEQ ID NO: 935718 - DNA, 33 bp, Homo sapien
tgaactctatcaaccatgtatttaattgataac

SEQ ID NO: 935719 - DNA, 33 bp, Homo sapien
aaaattctaagatgccacattattgagtacaga

SEQ ID NO: 935720 - DNA, 33 bp, Homo sapien
aaaattctaagatgccgcattattgagtacaga

SEQ ID NO: 935721 - DNA, 33 bp, Homo sapien
tataaatgaattgtaccatggtaatgagaacat

SEQ ID NO: 935722 - DNA, 33 bp, Homo sapien
tataaatgaattgtactatggtaatgagaacat

SEQ ID NO: 935723 - DNA, 33 bp, Homo sapien
ggcttttctagaccaactccctgagtcagaagg

SEQ ID NO: 935724 - DNA, 33 bp, Homo sapien
ggcttttctagaccaattccctgagtcagaagg

SEQ ID NO: 935725 - DNA, 33 bp, Homo sapien
accttggggtgctggaaagtgagaggattgttt

SEQ ID NO: 935726 - DNA, 33 bp, Homo sapien
accttggggtgctggagagtgagaggattgttt

SEQ ID NO: 935727 - DNA, 33 bp, Homo sapien
ggctcttcccattgccacttttacttttatatt

SEQ ID NO: 935728 - DNA, 33 bp, Homo sapien
ggctcttcccattgccgcttttacttttatatt

SEQ ID NO: 935729 - DNA, 33 bp, Homo sapien
gacagccaaaaaactgaatacccaaagtgtgag

SEQ ID NO: 935730 - DNA, 33 bp, Homo sapien
gacagccaaaaaactggatacccaaagtgtgag

SEQ ID NO: 935731 - DNA, 33 bp, Homo sapien
tatttatccattttaccgctgataggcatttgg

SEQ ID NO: 935732 - DNA, 33 bp, Homo sapien
tatttatccattttactgctgataggcatttgg

SEQ ID NO: 935733 - DNA, 33 bp, Homo sapien
atctgggaaatgcaaactatgggtttcttatga

SEQ ID NO: 935734 - DNA, 33 bp, Homo sapien
atctgggaaatgcaaattatgggtttcttatga

SEQ ID NO: 935735 - DNA, 33 bp, Homo sapien
ataaaagcttaaacctcactctgagaatgctga

SEQ ID NO: 935736 - DNA, 33 bp, Homo sapien
ataaaagcttaaacctgactctgagaatgctga

SEQ ID NO: 935737 - DNA, 33 bp, Homo sapien
cctttatttaggacatgagtgccctcctctcta

SEQ ID NO: 935738 - DNA, 33 bp, Homo sapien
cctttatttaggacattagtgccctcctctcta

SEQ ID NO: 935739 - DNA, 33 bp, Homo sapien
gatctggatttcaataaaccccatcatctttcc

SEQ ID NO: 935740 - DNA, 33 bp, Homo sapien
gatctggatttcaatataccccatcatctttcc

SEQ ID NO: 935741 - DNA, 33 bp, Homo sapien
taagctgctgggtgaaatgactgatgatgacag

SEQ ID NO: 935742 - DNA, 33 bp, Homo sapien
taagctgctgggtgaactgactgatgatgacag

SEQ ID NO: 935743 - DNA, 33 bp, Homo sapien
ggggtaggctacatcacgcaggtttgtgcacgt

SEQ ID NO: 935744 - DNA, 33 bp, Homo sapien
ggggtaggctacatcatgcaggtttgtgcacgt

SEQ ID NO: 935745 - DNA, 33 bp, Homo sapien
ctgatatctgccaaaaataacctaatgattatg

SEQ ID NO: 935746 - DNA, 33 bp, Homo sapien
ctgatatctgccaaaagtaacctaatgattatg

SEQ ID NO: 935747 - DNA, 33 bp, Homo sapien
gtgctctcagcccagagcttcaatttagcacat

SEQ ID NO: 935748 - DNA, 33 bp, Homo sapien
gtgctctcagcccagatcttcaatttagcacat

SEQ ID NO: 935749 - DNA, 33 bp, Homo sapien
atacatgttgaaagacagaagcacctatttcac

SEQ ID NO: 935750 - DNA, 33 bp, Homo sapien
atacatgttgaaagacggaagcacctatttcac

SEQ ID NO: 935751 - DNA, 33 bp, Homo sapien
ctcgacaaacttcaacaatcactatctaagtag

SEQ ID NO: 935752 - DNA, 33 bp, Homo sapien
ctcgacaaacttcaaccatcactatctaagtag

SEQ ID NO: 935753 - DNA, 33 bp, Homo sapien
ttaacaaagaattatgcagttcagaaggttaag

SEQ ID NO: 935754 - DNA, 33 bp, Homo sapien
ttaacaaagaattatgtagttcagaaggttaag

SEQ ID NO: 935755 - DNA, 33 bp, Homo sapien
attatgacaacaaacaatatctccagacattgc

SEQ ID NO: 935756 - DNA, 33 bp, Homo sapien
attatgacaacaaacagtatctccagacattgc

SEQ ID NO: 935757 - DNA, 33 bp, Homo sapien
ccttggctcaatagctaactttctgtcattgca

SEQ ID NO: 935758 - DNA, 33 bp, Homo sapien
ccttggctcaatagcttactttctgtcattgca

SEQ ID NO: 935759 - DNA, 33 bp, Homo sapien
agcttcagagaacatacaggatttagaaaggaa

SEQ ID NO: 935760 - DNA, 33 bp, Homo sapien
agcttcagagaacatagaggatttagaaaggaa

SEQ ID NO: 935761 - DNA, 33 bp, Homo sapien
caggctgccagacgccaaagtgtggaagttgga

SEQ ID NO: 935762 - DNA, 33 bp, Homo sapien
caggctgccagacgccgaagtgtggaagttgga

SEQ ID NO: 935763 - DNA, 33 bp, Homo sapien
ttactgtcaattgggaacaaacctatgtacaat

SEQ ID NO: 935764 - DNA, 33 bp, Homo sapien
ttactgtcaattgggatcaaacctatgtacaat

SEQ ID NO: 935765 - DNA, 33 bp, Homo sapien
tgtagcagaaaatatcaagagacacagagaaat

SEQ ID NO: 935766 - DNA, 33 bp, Homo sapien
tgtagcagaaaatatcgagagacacagagaaat

SEQ ID NO: 935767 - DNA, 33 bp, Homo sapien
gccgaaaatgctaaccccttcatagatgctcca

SEQ ID NO: 935768 - DNA, 33 bp, Homo sapien
gccgaaaatgctaaccgcttcatagatgctcca

SEQ ID NO: 935769 - DNA, 33 bp, Homo sapien
cacctaatggggtgcactatcataaaatgtaga

SEQ ID NO: 935770 - DNA, 33 bp, Homo sapien
cacctaatggggtgcattatcataaaatgtaga

SEQ ID NO: 935771 - DNA, 33 bp, Homo sapien
agtggaaattacaaacaaagtgggccaggctga

SEQ ID NO: 935772 - DNA, 33 bp, Homo sapien
agtggaaattacaaaccaagtgggccaggctga

SEQ ID NO: 935773 - DNA, 33 bp, Homo sapien
tacagacatatatagaaggtgagataaggataa

SEQ ID NO: 935774 - DNA, 33 bp, Homo sapien
tacagacatatatagagggtgagataaggataa

SEQ ID NO: 935775 - DNA, 33 bp, Homo sapien
atctgttgcctaaagaaacttaacatccattct

SEQ ID NO: 935776 - DNA, 33 bp, Homo sapien
atctgttgcctaaagagacttaacatccattct

SEQ ID NO: 935777 - DNA, 33 bp, Homo sapien
attcaaagtgcaacaaactttctggagtagggt

SEQ ID NO: 935778 - DNA, 33 bp, Homo sapien
attcaaagtgcaacaatctttctggagtagggt

SEQ ID NO: 935779 - DNA, 33 bp, Homo sapien
tctgtttaaaaaaccaacatgacattctatttt

SEQ ID NO: 935780 - DNA, 33 bp, Homo sapien
tctgtttaaaaaaccatcatgacattctatttt

SEQ ID NO: 935781 - DNA, 33 bp, Homo sapien
aggtaatactgcaaagaaccacacccttgcttt

SEQ ID NO: 935782 - DNA, 33 bp, Homo sapien
aggtaatactgcaaagtaccacacccttgcttt

SEQ ID NO: 935783 - DNA, 33 bp, Homo sapien
agcttccttaaacagacaggaatagtagagagg

SEQ ID NO: 935784 - DNA, 33 bp, Homo sapien
agcttccttaaacagataggaatagtagagagg

SEQ ID NO: 935785 - DNA, 33 bp, Homo sapien
catggttactagaataactggaaacctagaaaa

SEQ ID NO: 935786 - DNA, 33 bp, Homo sapien
catggttactagaatatctggaaacctagaaaa

SEQ ID NO: 935787 - DNA, 33 bp, Homo sapien
catgaaggtaattccaatgaaaacaaataaaac

SEQ ID NO: 935788 - DNA, 33 bp, Homo sapien
catgaaggtaattccagtgaaaacaaataaaac

SEQ ID NO: 935789 - DNA, 33 bp, Homo sapien
gattctagaacagatcaacgacattaggtagaa

SEQ ID NO: 935790 - DNA, 33 bp, Homo sapien
gattctagaacagatcgacgacattaggtagaa

SEQ ID NO: 935791 - DNA, 33 bp, Homo sapien
cagattgatggtggaactggaaagagagaagtt

SEQ ID NO: 935792 - DNA, 33 bp, Homo sapien
cagattgatggtggaattggaaagagagaagtt

SEQ ID NO: 935793 - DNA, 33 bp, Homo sapien
gttttcagcagcttccaaactttggcacagatc

SEQ ID NO: 935794 - DNA, 33 bp, Homo sapien
gttttcagcagcttcccaactttggcacagatc

SEQ ID NO: 935795 - DNA, 33 bp, Homo sapien
cacctcagccacagcaggatagtaaaccagtca

SEQ ID NO: 935796 - DNA, 33 bp, Homo sapien
cacctcagccacagcatgatagtaaaccagtca

SEQ ID NO: 935797 - DNA, 33 bp, Homo sapien
catcagcctagagataactgttgactctccttt

SEQ ID NO: 935798 - DNA, 33 bp, Homo sapien
catcagcctagagatatctgttgactctccttt

SEQ ID NO: 935799 - DNA, 33 bp, Homo sapien
gaacgtacctcagagaatagacatttagaatta

SEQ ID NO: 935800 - DNA, 33 bp, Homo sapien
gaacgtacctcagagagtagacatttagaatta

SEQ ID NO: 935801 - DNA, 33 bp, Homo sapien
aaacagtgtatgattaactgcgttctgagaagg

SEQ ID NO: 935802 - DNA, 33 bp, Homo sapien
aaacagtgtatgattatctgcgttctgagaagg

SEQ ID NO: 935803 - DNA, 33 bp, Homo sapien
ttctggcttgaagccacgtcagagttttctgct

SEQ ID NO: 935804 - DNA, 33 bp, Homo sapien
ttctggcttgaagccatgtcagagttttctgct

SEQ ID NO: 935805 - DNA, 33 bp, Homo sapien
aagttcaatcttccacagaacacttttcctctc

SEQ ID NO: 935806 - DNA, 33 bp, Homo sapien
aagttcaatcttccacggaacacttttcctctc

SEQ ID NO: 935807 - DNA, 33 bp, Homo sapien
tgacatttggtggaaacctgttatttattcaga

SEQ ID NO: 935808 - DNA, 33 bp, Homo sapien
tgacatttggtggaaagctgttatttattcaga

SEQ ID NO: 935809 - DNA, 33 bp, Homo sapien
cctttgtgccatggaaacgtgtcttactaaatg

SEQ ID NO: 935810 - DNA, 33 bp, Homo sapien
cctttgtgccatggaagcgtgtcttactaaatg

SEQ ID NO: 935811 - DNA, 33 bp, Homo sapien
gatacttctcagagccgccaaaagaaaccaacg

SEQ ID NO: 935812 - DNA, 33 bp, Homo sapien
gatacttctcagagcctccaaaagaaaccaacg

SEQ ID NO: 935813 - DNA, 33 bp, Homo sapien
agttatcttacctggccaagaagagcacacaaa

SEQ ID NO: 935814 - DNA, 33 bp, Homo sapien
agttatcttacctggcgaagaagagcacacaaa

SEQ ID NO: 935815 - DNA, 33 bp, Homo sapien
attctagcaaattattcaaccttaggaggaggt

SEQ ID NO: 935816 - DNA, 33 bp, Homo sapien
attctagcaaattatttaaccttaggaggaggt

SEQ ID NO: 935817 - DNA, 33 bp, Homo sapien
gcacaaatacagatccagatagactcaaaagga

SEQ ID NO: 935818 - DNA, 33 bp, Homo sapien
gcacaaatacagatccggatagactcaaaagga

SEQ ID NO: 935819 - DNA, 33 bp, Homo sapien
tacaatgatagttaccacaggctgttaaatata

SEQ ID NO: 935820 - DNA, 33 bp, Homo sapien
tacaatgatagttaccgcaggctgttaaatata

SEQ ID NO: 935821 - DNA, 33 bp, Homo sapien
acctactagattgaatcagaagaattaaaaaca

SEQ ID NO: 935822 - DNA, 33 bp, Homo sapien
acctactagattgaatgagaagaattaaaaaca

SEQ ID NO: 935823 - DNA, 33 bp, Homo sapien
gctaaagtgccctacaaaaatgaaaccacaggt

SEQ ID NO: 935824 - DNA, 33 bp, Homo sapien
gctaaagtgccctacacaaatgaaaccacaggt

SEQ ID NO: 935825 - DNA, 33 bp, Homo sapien
tctaactggcacaaaacctgattactgcagaca

SEQ ID NO: 935826 - DNA, 33 bp, Homo sapien
tctaactggcacaaaatctgattactgcagaca

SEQ ID NO: 935827 - DNA, 33 bp, Homo sapien
cataaaggtatgagctaaatcactattaagaaa

SEQ ID NO: 935828 - DNA, 33 bp, Homo sapien
cataaaggtatgagctgaatcactattaagaaa

SEQ ID NO: 935829 - DNA, 33 bp, Homo sapien
atgagttcaagaaaagaatcaaaaagtggcagc

SEQ ID NO: 935830 - DNA, 33 bp, Homo sapien
atgagttcaagaaaagcatcaaaaagtggcagc

SEQ ID NO: 935831 - DNA, 33 bp, Homo sapien
atagtgaaagaaaagacgaatgctggagcataa

SEQ ID NO: 935832 - DNA, 33 bp, Homo sapien
atagtgaaagaaaagatgaatgctggagcataa

SEQ ID NO: 935833 - DNA, 33 bp, Homo sapien
gtcacacattcccaatcactgaaggtgctgttc

SEQ ID NO: 935834 - DNA, 33 bp, Homo sapien
gtcacacattcccaatgactgaaggtgctgttc

SEQ ID NO: 935835 - DNA, 33 bp, Homo sapien
gacaatattacagttacgattgatctgtttgac

SEQ ID NO: 935836 - DNA, 33 bp, Homo sapien
gacaatattacagttatgattgatctgtttgac

SEQ ID NO: 935837 - DNA, 33 bp, Homo sapien
ctaagcaacaacatgaatactaattttcttaca

SEQ ID NO: 935838 - DNA, 33 bp, Homo sapien
ctaagcaacaacatgagtactaattttcttaca

SEQ ID NO: 935839 - DNA, 33 bp, Homo sapien
gttagaacagataaagacctaaactaatggcag

SEQ ID NO: 935840 - DNA, 33 bp, Homo sapien
gttagaacagataaaggcctaaactaatggcag

SEQ ID NO: 935841 - DNA, 33 bp, Homo sapien
acccgtgtaggtcttacagtaacaataacaaaa

SEQ ID NO: 935842 - DNA, 33 bp, Homo sapien
acccgtgtaggtcttatagtaacaataacaaaa

SEQ ID NO: 935843 - DNA, 33 bp, Homo sapien
gctggaaataatcagaacttatcagcgcctagc

SEQ ID NO: 935844 - DNA, 33 bp, Homo sapien
gctggaaataatcagaccttatcagcgcctagc

SEQ ID NO: 935845 - DNA, 33 bp, Homo sapien
agaaagtgttgtgatacggagaaatatgtttct

SEQ ID NO: 935846 - DNA, 33 bp, Homo sapien
agaaagtgttgtgatatggagaaatatgtttct

SEQ ID NO: 935847 - DNA, 33 bp, Homo sapien; identical to SEQ ID NO: 935845

SEQ ID NO: 935848 - DNA, 33 bp, Homo sapien; identical to SEQ ID NO: 935846

SEQ ID NO: 935849 - DNA, 33 bp, Homo sapien
actgcagactgaaacaacgaatcttgttttcct

SEQ ID NO: 935850 - DNA, 33 bp, Homo sapien
actgcagactgaaacatcgaatcttgttttcct

SEQ ID NO: 935851 - DNA, 33 bp, Homo sapien
tcctgcccaagagagaaacagacaaaaatgaca

SEQ ID NO: 935852 - DNA, 33 bp, Homo sapien
tcctgcccaagagagatacagacaaaaatgaca

SEQ ID NO: 935853 - DNA, 33 bp, Homo sapien
aagtagtcatggaggacgtcgggaagcattatg

SEQ ID NO: 935854 - DNA, 33 bp, Homo sapien
aagtagtcatggaggatgtcgggaagcattatg

SEQ ID NO: 935855 - DNA, 33 bp, Homo sapien
gtgaagcaacacaaaaagtcagttaaggagaca

SEQ ID NO: 935856 - DNA, 33 bp, Homo sapien
gtgaagcaacacaaaacgtcagttaaggagaca

SEQ ID NO: 935857 - DNA, 33 bp, Homo sapien
aaaagatactatttcaccatgttcactctttgt

SEQ ID NO: 935858 - DNA, 33 bp, Homo sapien
aaaagatactatttcatcatgttcactctttgt

SEQ ID NO: 935859 - DNA, 33 bp, Homo sapien
agctcaataaatgcagaaagcgtttgataaaat

SEQ ID NO: 935860 - DNA, 33 bp, Homo sapien
agctcaataaatgcaggaagcgtttgataaaat

SEQ ID NO: 935861 - DNA, 33 bp, Homo sapien
gatgaaaagaaatacacactgttcaaagcaaac

SEQ ID NO: 935862 - DNA, 33 bp, Homo sapien
gatgaaaagaaatacatactgttcaaagcaaac

SEQ ID NO: 935863 - DNA, 33 bp, Homo sapien
tgtcaacatacttaaacatcattagcctaggaa

SEQ ID NO: 935864 - DNA, 33 bp, Homo sapien
tgtcaacatacttaaatatcattagcctaggaa

SEQ ID NO: 935865 - DNA, 33 bp, Homo sapien
actccagatatgattacggttagaatgttcttc

SEQ ID NO: 935866 - DNA, 33 bp, Homo sapien
actccagatatgattatggttagaatgttcttc

SEQ ID NO: 935867 - DNA, 33 bp, Homo sapien
atacttaatttttgccgctgggaaggtttgtaa

SEQ ID NO: 935868 - DNA, 33 bp, Homo sapien
atacttaatttttgcctctgggaaggtttgtaa

SEQ ID NO: 935869 - DNA, 33 bp, Homo sapien
gttgagcttgtttttgcagttctgaatactaca

SEQ ID NO: 935870 - DNA, 33 bp, Homo sapien
gttgagcttgtttttgtagttctgaatactaca

SEQ ID NO: 935871 - DNA, 33 bp, Homo sapien
gatactaataagtatccacttggttgctctaca

SEQ ID NO: 935872 - DNA, 33 bp, Homo sapien
gatactaataagtatctacttggttgctctaca

SEQ ID NO: 935873 - DNA, 33 bp, Homo sapien
tcaaaatagaaaccaccggatgcaccttctaag

SEQ ID NO: 935874 - DNA, 33 bp, Homo sapien
tcaaaatagaaaccactggatgcaccttctaag

SEQ ID NO: 935875 - DNA, 33 bp, Homo sapien
aatgaggtaccagctaaaagtgaaggacttcag

SEQ ID NO: 935876 - DNA, 33 bp, Homo sapien
aatgaggtaccagctagaagtgaaggacttcag

SEQ ID NO: 935877 - DNA, 33 bp, Homo sapien
agtgaaggacttcaggcataaagcaaaatggga

SEQ ID NO: 935878 - DNA, 33 bp, Homo sapien
agtgaaggacttcaggtataaagcaaaatggga

SEQ ID NO: 935879 - DNA, 33 bp, Homo sapien
ccagaagcaatcaaagacccattgctgctggat

SEQ ID NO: 935880 - DNA, 33 bp, Homo sapien
ccagaagcaatcaaaggcccattgctgctggat

SEQ ID NO: 935881 - DNA, 33 bp, Homo sapien
tgcttctgggaagatacagggtttgtgcttttc

SEQ ID NO: 935882 - DNA, 33 bp, Homo sapien
tgcttctgggaagatatagggtttgtgcttttc

SEQ ID NO: 935883 - DNA, 33 bp, Homo sapien
ctgcaccactgaggaacgcttttccttgtctcc

SEQ ID NO: 935884 - DNA, 33 bp, Homo sapien
ctgcaccactgaggaaggcttttccttgtctcc

SEQ ID NO: 935885 - DNA, 33 bp, Homo sapien
ctaacctctaacctggcaatttgaagagattca

SEQ ID NO: 935886 - DNA, 33 bp, Homo sapien
ctaacctctaacctggtaatttgaagagattca

SEQ ID NO: 935887 - DNA, 33 bp, Homo sapien
cctggtagaatgtagggactcggtgaatatttg

SEQ ID NO: 935888 - DNA, 33 bp, Homo sapien
cctggtagaatgtaggtactcggtgaatatttg

SEQ ID NO: 935889 - DNA, 33 bp, Homo sapien
ctgatagaaattgtaaatcaatagtgcctgtta

SEQ ID NO: 935890 - DNA, 33 bp, Homo sapien
ctgatagaaattgtaagtcaatagtgcctgtta

SEQ ID NO: 935891 - DNA, 33 bp, Homo sapien
gaagcagcttgatttcaaagggatggcttgact

SEQ ID NO: 935892 - DNA, 33 bp, Homo sapien
gaagcagcttgatttcgaagggatggcttgact

SEQ ID NO: 935893 - DNA, 33 bp, Homo sapien
ggtgtgaactatcagacgagtgctgaagagaag

SEQ ID NO: 935894 - DNA, 33 bp, Homo sapien
ggtgtgaactatcagatgagtgctgaagagaag

SEQ ID NO: 935895 - DNA, 33 bp, Homo sapien
aatccttagcccgagaagagaccccagatatta

SEQ ID NO: 935896 - DNA, 33 bp, Homo sapien
aatccttagcccgagaggagaccccagatatta

SEQ ID NO: 935897 - DNA, 33 bp, Homo sapien
agtacttgccaagttgaaaaataaagattctca

SEQ ID NO: 935898 - DNA, 33 bp, Homo sapien
agtacttgccaagttggaaaataaagattctca

SEQ ID NO: 935899 - DNA, 33 bp, Homo sapien
aacacgaaagaaattaaatgctgagccttgaga

SEQ ID NO: 935900 - DNA, 33 bp, Homo sapien
aacacgaaagaaattacatgctgagccttgaga

SEQ ID NO: 935901 - DNA, 33 bp, Homo sapien
gggcaacagaggcatacgataaattttctattc

SEQ ID NO: 935902 - DNA, 33 bp, Homo sapien
gggcaacagaggcatatgataaattttctattc

SEQ ID NO: 935903 - DNA, 33 bp, Homo sapien
gagcctgctggacaagaacattgagtactcttg

SEQ ID NO: 935904 - DNA, 33 bp, Homo sapien
gagcctgctggacaaggacattgagtactcttg

SEQ ID NO: 935905 - DNA, 33 bp, Homo sapien
gtttcctgtctccaaagcaattatctcaaacct

SEQ ID NO: 935906 - DNA, 33 bp, Homo sapien
gtttcctgtctccaaatcaattatctcaaacct

SEQ ID NO: 935907 - DNA, 33 bp, Homo sapien
cttagtgaaatttgcaacattaatttatcaggt

SEQ ID NO: 935908 - DNA, 33 bp, Homo sapien
cttagtgaaatttgcagcattaatttatcaggt

SEQ ID NO: 935909 - DNA, 33 bp, Homo sapien
tgattctaatgtgtagaaaagtattgaaagttc

SEQ ID NO: 935910 - DNA, 33 bp, Homo sapien
tgattctaatgtgtagcaaagtattgaaagttc

SEQ ID NO: 935911 - DNA, 33 bp, Homo sapien
aacattttggcatatacaatataaatcataggg

SEQ ID NO: 935912 - DNA, 33 bp, Homo sapien
aacattttggcatatagaatataaatcataggg

SEQ ID NO: 935913 - DNA, 33 bp, Homo sapien
tttaatttcacagtaagtaaagcagttttaaaa

SEQ ID NO: 935914 - DNA, 33 bp, Homo sapien
tttaatttcacagtaattaaagcagttttaaaa

SEQ ID NO: 935915 - DNA, 33 bp, Homo sapien
attcgagtgtattcaaaaagacttccttcaact

SEQ ID NO: 935916 - DNA, 33 bp, Homo sapien
attcgagtgtattcaataagacttccttcaact

SEQ ID NO: 935917 - DNA, 33 bp, Homo sapien
gttgaatcagccaaaacatctttcataaacaaa

SEQ ID NO: 935918 - DNA, 33 bp, Homo sapien
gttgaatcagccaaaatatctttcataaacaaa

SEQ ID NO: 935919 - DNA, 33 bp, Homo sapien
ctttaaaatcttccagaaatctgttggcaaagt

SEQ ID NO: 935920 - DNA, 33 bp, Homo sapien
ctttaaaatcttccagcaatctgttggcaaagt

SEQ ID NO: 935921 - DNA, 33 bp, Homo sapien
aggggatataagcagaacaaaggaatgcaggtt

SEQ ID NO: 935922 - DNA, 33 bp, Homo sapien
aggggatataagcagatcaaaggaatgcaggtt

SEQ ID NO: 935923 - DNA, 33 bp, Homo sapien
ttttcgtgttagatgtcaactcttgccatgttt

SEQ ID NO: 935924 - DNA, 33 bp, Homo sapien
ttttcgtgttagatgtgaactcttgccatgttt

SEQ ID NO: 935925 - DNA, 33 bp, Homo sapien
tgttgaaaacagagaaatctgtcaaaatgctat

SEQ ID NO: 935926 - DNA, 33 bp, Homo sapien
tgttgaaaacagagaagtctgtcaaaatgctat

SEQ ID NO: 935927 - DNA, 33 bp, Homo sapien
tagataaatccacagacagagaaaacagagaga

SEQ ID NO: 935928 - DNA, 33 bp, Homo sapien
tagataaatccacagagagagaaaacagagaga

SEQ ID NO: 935929 - DNA, 33 bp, Homo sapien
gctggcagaatctctacacttattcaatgacag

SEQ ID NO: 935930 - DNA, 33 bp, Homo sapien
gctggcagaatctctatacttattcaatgacag

SEQ ID NO: 935931 - DNA, 33 bp, Homo sapien
acaatgttaattttccacaaactgatttacagg

SEQ ID NO: 935932 - DNA, 33 bp, Homo sapien
acaatgttaattttccgcaaactgatttacagg

SEQ ID NO: 935933 - DNA, 33 bp, Homo sapien
gaatgaatatacatgccatactgaatttaaggt

SEQ ID NO: 935934 - DNA, 33 bp, Homo sapien
gaatgaatatacatgcgatactgaatttaaggt

SEQ ID NO: 935935 - DNA, 33 bp, Homo sapien
ccagaatccttcattaagcaggtccctgatcct

SEQ ID NO: 935936 - DNA, 33 bp, Homo sapien
ccagaatccttcattaggcaggtccctgatcct

SEQ ID NO: 935937 - DNA, 33 bp, Homo sapien
ttgacttataaacaaagtcgtggaagtcttgaa

SEQ ID NO: 935938 - DNA, 33 bp, Homo sapien
ttgacttataaacaaattcgtggaagtcttgaa

SEQ ID NO: 935939 - DNA, 33 bp, Homo sapien
tttatgcttggaaacaaaagcattgtgagactg

SEQ ID NO: 935940 - DNA, 33 bp, Homo sapien
tttatgcttggaaacagaagcattgtgagactg

SEQ ID NO: 935941 - DNA, 33 bp, Homo sapien
agtccttgctgtaaagcataatttgggcaaacc

SEQ ID NO: 935942 - DNA, 33 bp, Homo sapien
agtccttgctgtaaaggataatttgggcaaacc

SEQ ID NO: 935943 - DNA, 33 bp, Homo sapien
tatcacataacaataaagaggtcaattttccat

SEQ ID NO: 935944 - DNA, 33 bp, Homo sapien
tatcacataacaataaggaggtcaattttccat

SEQ ID NO: 935945 - DNA, 33 bp, Homo sapien
acttccaattaccttacatatcttgtgtggttt

SEQ ID NO: 935946 - DNA, 33 bp, Homo sapien
acttccaattaccttatatatcttgtgtggttt

SEQ ID NO: 935947 - DNA, 33 bp, Homo sapien
tatgcaagcaatgcacagtagttttcttgtact

SEQ ID NO: 935948 - DNA, 33 bp, Homo sapien
tatgcaagcaatgcacggtagttttcttgtact

SEQ ID NO: 935949 - DNA, 33 bp, Homo sapien
gactcttcaaaacgcacatatacgccaggtgtt

SEQ ID NO: 935950 - DNA, 33 bp, Homo sapien
gactcttcaaaacgcatatatacgccaggtgtt

SEQ ID NO: 935951 - DNA, 33 bp, Homo sapien
aagaatatgcactttcccaaagctgtttgactt

SEQ ID NO: 935952 - DNA, 33 bp, Homo sapien
aagaatatgcactttcgcaaagctgtttgactt

SEQ ID NO: 935953 - DNA, 33 bp, Homo sapien
gatacagtaatcaagaacgcatggtattggtca

SEQ ID NO: 935954 - DNA, 33 bp, Homo sapien
gatacagtaatcaagagcgcatggtattggtca

SEQ ID NO: 935955 - DNA, 33 bp, Homo sapien
gactgtttaatagtagaccttctgaaccatgtg

SEQ ID NO: 935956 - DNA, 33 bp, Homo sapien
gactgtttaatagtagcccttctgaaccatgtg

SEQ ID NO: 935957 - DNA, 33 bp, Homo sapien
acagtacaggtatgtacagtttaacacaaagca

SEQ ID NO: 935958 - DNA, 33 bp, Homo sapien
acagtacaggtatgtatagtttaacacaaagca

SEQ ID NO: 935959 - DNA, 33 bp, Homo sapien
ttcagatgaggattaacaattgtgttattttag

SEQ ID NO: 935960 - DNA, 33 bp, Homo sapien
ttcagatgaggattaataattgtgttattttag

SEQ ID NO: 935961 - DNA, 33 bp, Homo sapien
cacaatttgttgaggacggtgagagggttagat

SEQ ID NO: 935962 - DNA, 33 bp, Homo sapien
cacaatttgttgaggatggtgagagggttagat

SEQ ID NO: 935963 - DNA, 33 bp, Homo sapien
tatatctcttttctgagactacggaagcataat

SEQ ID NO: 935964 - DNA, 33 bp, Homo sapien
tatatctcttttctgatactacggaagcataat

SEQ ID NO: 935965 - DNA, 33 bp, Homo sapien
aatagtattttaatgaaggagacaaaaagaatg

SEQ ID NO: 935966 - DNA, 33 bp, Homo sapien
aatagtattttaatgacggagacaaaaagaatg

SEQ ID NO: 935967 - DNA, 33 bp, Homo sapien
taacactacctaagaccgaagaagagtgctcaa

SEQ ID NO: 935968 - DNA, 33 bp, Homo sapien
taacactacctaagactgaagaagagtgctcaa

SEQ ID NO: 935969 - DNA, 33 bp, Homo sapien
atagttatttatctaaggctatgtagtagtcag

SEQ ID NO: 935970 - DNA, 33 bp, Homo sapien
atagttatttatctaatgctatgtagtagtcag

SEQ ID NO: 935971 - DNA, 33 bp, Homo sapien
ctgggttaactgtctactaatatttgggaaatt

SEQ ID NO: 935972 - DNA, 33 bp, Homo sapien
ctgggttaactgtctagtaatatttgggaaatt

SEQ ID NO: 935973 - DNA, 33 bp, Homo sapien
agattttgacaaggaactgatgcaataaaaggg

SEQ ID NO: 935974 - DNA, 33 bp, Homo sapien
agattttgacaaggaattgatgcaataaaaggg

SEQ ID NO: 935975 - DNA, 33 bp, Homo sapien
cattaagatttagccaaatgggtctgctgtgat

SEQ ID NO: 935976 - DNA, 33 bp, Homo sapien
cattaagatttagccagatgggtctgctgtgat

SEQ ID NO: 935977 - DNA, 33 bp, Homo sapien
tgctcttgccaatggaatattagaagacttgac

SEQ ID NO: 935978 - DNA, 33 bp, Homo sapien
tgctcttgccaatggactattagaagacttgac

SEQ ID NO: 935979 - DNA, 33 bp, Homo sapien
gctacaaagccttatcagacttgtggtttgcag

SEQ ID NO: 935980 - DNA, 33 bp, Homo sapien
gctacaaagccttatcggacttgtggtttgcag

SEQ ID NO: 935981 - DNA, 33 bp, Homo sapien
acatcatcactctcaaatctcttctttttacag

SEQ ID NO: 935982 - DNA, 33 bp, Homo sapien
acatcatcactctcaagtctcttctttttacag

SEQ ID NO: 935983 - DNA, 33 bp, Homo sapien
aatggcagacaagacacaatccaagaaattatt

SEQ ID NO: 935984 - DNA, 33 bp, Homo sapien
aatggcagacaagacagaatccaagaaattatt

SEQ ID NO: 935985 - DNA, 33 bp, Homo sapien
tcagaatgtcatgtgactattacaagggagact

SEQ ID NO: 935986 - DNA, 33 bp, Homo sapien
tcagaatgtcatgtgattattacaagggagact

SEQ ID NO: 935987 - DNA, 33 bp, Homo sapien
aagctcagcgtaataaacctgagtgactttata

SEQ ID NO: 935988 - DNA, 33 bp, Homo sapien
aagctcagcgtaataaccctgagtgactttata

SEQ ID NO: 935989 - DNA, 33 bp, Homo sapien
ttcttaggtttagtctcacatctggatggttgc

SEQ ID NO: 935990 - DNA, 33 bp, Homo sapien
ttcttaggtttagtcttacatctggatggttgc

SEQ ID NO: 935991 - DNA, 33 bp, Homo sapien
gaaatttacctttgtcaccagagcaaatacatg

SEQ ID NO: 935992 - DNA, 33 bp, Homo sapien
gaaatttacctttgtcgccagagcaaatacatg

SEQ ID NO: 935993 - DNA, 33 bp, Homo sapien
caatccctgttataagcaaatcaacataataat

SEQ ID NO: 935994 - DNA, 33 bp, Homo sapien
caatccctgttataaggaaatcaacataataat

SEQ ID NO: 935995 - DNA, 33 bp, Homo sapien
cacacagtagtacacaaaacatagtaggtgtcc

SEQ ID NO: 935996 - DNA, 33 bp, Homo sapien
cacacagtagtacacagaacatagtaggtgtcc

SEQ ID NO: 935997 - DNA, 33 bp, Homo sapien
attgttatgctagctcgcaaattaattgtaata

SEQ ID NO: 935998 - DNA, 33 bp, Homo sapien
attgttatgctagctctcaaattaattgtaata

SEQ ID NO: 935999 - DNA, 33 bp, Homo sapien
taactgaccaaaggcaaactttagaaattgaga

SEQ ID NO: 936000 - DNA, 33 bp, Homo sapien
taactgaccaaaggcagactttagaaattgaga

SEQ ID NO: 936001 - DNA, 33 bp, Homo sapien; identical to SEQ ID NO: 935999

SEQ ID NO: 936002 - DNA, 33 bp, Homo sapien; identical to SEQ ID NO: 936000

SEQ ID NO: 936003 - DNA, 33 bp, Homo sapien
ttcagcgtagtggatccgaaagttgtattctgg

SEQ ID NO: 936004 - DNA, 33 bp, Homo sapien
ttcagcgtagtggatctgaaagttgtattctgg

SEQ ID NO: 936005 - DNA, 33 bp, Homo sapien
agcgacaaagaaaagcaaaagataacaaagttt

SEQ ID NO: 936006 - DNA, 33 bp, Homo sapien
agcgacaaagaaaagcgaaagataacaaagttt

SEQ ID NO: 936007 - DNA, 33 bp, Homo sapien
ctattgaaaaccatgacaggtgacttgaaaatt

SEQ ID NO: 936008 - DNA, 33 bp, Homo sapien
ctattgaaaaccatgataggtgacttgaaaatt

SEQ ID NO: 936009 - DNA, 33 bp, Homo sapien
ttcttatctcctttccaactgttatcttttttc

SEQ ID NO: 936010 - DNA, 33 bp, Homo sapien
ttcttatctcctttcctactgttatcttttttc

SEQ ID NO: 936011 - DNA, 33 bp, Homo sapien
cctttcccttaggtgacgaatccgcaatagatc

SEQ ID NO: 936012 - DNA, 33 bp, Homo sapien
cctttcccttaggtgaggaatccgcaatagatc

SEQ ID NO: 936013 - DNA, 33 bp, Homo sapien
gctaattcttgaccacgggaattgcagaactct

SEQ ID NO: 936014 - DNA, 33 bp, Homo sapien
gctaattcttgaccactggaattgcagaactct

SEQ ID NO: 936015 - DNA, 33 bp, Homo sapien
tgatttttggctttcgcatgaaccccattataa

SEQ ID NO: 936016 - DNA, 33 bp, Homo sapien
tgatttttggctttcgtatgaaccccattataa

SEQ ID NO: 936017 - DNA, 33 bp, Homo sapien
atgagtttcctctaaaacagcatagataaaaca

SEQ ID NO: 936018 - DNA, 33 bp, Homo sapien
atgagtttcctctaaatcagcatagataaaaca

SEQ ID NO: 936019 - DNA, 33 bp, Homo sapien
atagaaaagagagtaacgtgtttttagtaggca

SEQ ID NO: 936020 - DNA, 33 bp, Homo sapien
atagaaaagagagtaatgtgtttttagtaggca

SEQ ID NO: 936021 - DNA, 33 bp, Homo sapien
aaacaccttatatccaccctcaacatttttcaa

SEQ ID NO: 936022 - DNA, 33 bp, Homo sapien
aaacaccttatatccatcctcaacatttttcaa

SEQ ID NO: 936023 - DNA, 33 bp, Homo sapien
aaaaattacaactttcacctatgctaaacttaa

SEQ ID NO: 936024 - DNA, 33 bp, Homo sapien
aaaaattacaactttcgcctatgctaaacttaa

SEQ ID NO: 936025 - DNA, 33 bp, Homo sapien
agggtatcgccatggaagacttaataacttggg

SEQ ID NO: 936026 - DNA, 33 bp, Homo sapien
agggtatcgccatggatgacttaataacttggg

SEQ ID NO: 936027 - DNA, 33 bp, Homo sapien
ccccaaaaaatcacaactatgctttcataagca

SEQ ID NO: 936028 - DNA, 33 bp, Homo sapien
ccccaaaaaatcacaattatgctttcataagca

SEQ ID NO: 936029 - DNA, 33 bp, Homo sapien
aaaacactgaattttaacaacgactggggagta

SEQ ID NO: 936030 - DNA, 33 bp, Homo sapien
aaaacactgaattttatcaacgactggggagta

SEQ ID NO: 936031 - DNA, 33 bp, Homo sapien
tttatagaagcaagtacgttaaaaattaatcaa

SEQ ID NO: 936032 - DNA, 33 bp, Homo sapien
tttatagaagcaagtatgttaaaaattaatcaa

SEQ ID NO: 936033 - DNA, 33 bp, Homo sapien
ggaaataacaaagccacgtatgtaaatgtaaac

SEQ ID NO: 936034 - DNA, 33 bp, Homo sapien
ggaaataacaaagccaggtatgtaaatgtaaac

SEQ ID NO: 936035 - DNA, 33 bp, Homo sapien
aatgacttagtaattaccacttctaggtaacat

SEQ ID NO: 936036 - DNA, 33 bp, Homo sapien
aatgacttagtaattatcacttctaggtaacat

SEQ ID NO: 936037 - DNA, 33 bp, Homo sapien
aaaagtggagactccaaataaaagcatgaataa

SEQ ID NO: 936038 - DNA, 33 bp, Homo sapien
aaaagtggagactccatataaaagcatgaataa

SEQ ID NO: 936039 - DNA, 33 bp, Homo sapien
gatgggttaagagatagtaagagaggaatgatg

SEQ ID NO: 936040 - DNA, 33 bp, Homo sapien
gatgggttaagagatattaagagaggaatgatg

SEQ ID NO: 936041 - DNA, 33 bp, Homo sapien
aggggaaaaagtgacccgatggcaattcattga

SEQ ID NO: 936042 - DNA, 33 bp, Homo sapien
aggggaaaaagtgacctgatggcaattcattga

SEQ ID NO: 936043 - DNA, 33 bp, Homo sapien
gacttcccaactcatacgctaaaatgctcagtt

SEQ ID NO: 936044 - DNA, 33 bp, Homo sapien
gacttcccaactcatatgctaaaatgctcagtt

SEQ ID NO: 936045 - DNA, 33 bp, Homo sapien
aagtcaattatcataacaagcctcagacaaagg

SEQ ID NO: 936046 - DNA, 33 bp, Homo sapien
aagtcaattatcataagaagcctcagacaaagg

SEQ ID NO: 936047 - DNA, 33 bp, Homo sapien
ttttatttacctgaacacttctaataggacact

SEQ ID NO: 936048 - DNA, 33 bp, Homo sapien
ttttatttacctgaacgcttctaataggacact

SEQ ID NO: 936049 - DNA, 33 bp, Homo sapien
cactctgtctcatgatgaattccaggatcttgt

SEQ ID NO: 936050 - DNA, 33 bp, Homo sapien
cactctgtctcatgattaattccaggatcttgt

SEQ ID NO: 936051 - DNA, 33 bp, Homo sapien
acttagaattagaaaggagtgatgacctgccaa

SEQ ID NO: 936052 - DNA, 33 bp, Homo sapien
acttagaattagaaagtagtgatgacctgccaa

SEQ ID NO: 936053 - DNA, 33 bp, Homo sapien
atgactggtgaaaaagaagttagtggctaaggt

SEQ ID NO: 936054 - DNA, 33 bp, Homo sapien
atgactggtgaaaaagcagttagtggctaaggt

SEQ ID NO: 936055 - DNA, 33 bp, Homo sapien
tatttggtagtatccacggccttgacccacaag

SEQ ID NO: 936056 - DNA, 33 bp, Homo sapien
tatttggtagtatccatggccttgacccacaag

SEQ ID NO: 936057 - DNA, 33 bp, Homo sapien
catgaagtgggcagccaatgaccctacttatga

SEQ ID NO: 936058 - DNA, 33 bp, Homo sapien
catgaagtgggcagccgatgaccctacttatga

SEQ ID NO: 936059 - DNA, 33 bp, Homo sapien
gtttccattctaaaacaaacactagctaatcat

SEQ ID NO: 936060 - DNA, 33 bp, Homo sapien
gtttccattctaaaacgaacactagctaatcat

SEQ ID NO: 936061 - DNA, 33 bp, Homo sapien
aaatagggtagccgaaatgaaaccaaagattaa

SEQ ID NO: 936062 - DNA, 33 bp, Homo sapien
aaatagggtagccgaagtgaaaccaaagattaa

SEQ ID NO: 936063 - DNA, 33 bp, Homo sapien
cagcaattttacatgacatctgaaattctttcc

SEQ ID NO: 936064 - DNA, 33 bp, Homo sapien
cagcaattttacatgagatctgaaattctttcc

SEQ ID NO: 936065 - DNA, 33 bp, Homo sapien
atgaaggaagatggaaagaaatatggaagtaag

SEQ ID NO: 936066 - DNA, 33 bp, Homo sapien
atgaaggaagatggaaggaaatatggaagtaag

SEQ ID NO: 936067 - DNA, 33 bp, Homo sapien
ctacttgcagatgaggaatttattacaggtcta

SEQ ID NO: 936068 - DNA, 33 bp, Homo sapien
ctacttgcagatgagggatttattacaggtcta

SEQ ID NO: 936069 - DNA, 33 bp, Homo sapien
atttatctagtcaatccgaaatcagcagttatc

SEQ ID NO: 936070 - DNA, 33 bp, Homo sapien
atttatctagtcaatctgaaatcagcagttatc

SEQ ID NO: 936071 - DNA, 33 bp, Homo sapien
tggaagcctgtattaacgattcactttgacttt

SEQ ID NO: 936072 - DNA, 33 bp, Homo sapien
tggaagcctgtattaatgattcactttgacttt

SEQ ID NO: 936073 - DNA, 33 bp, Homo sapien
ttcaagatgttgaccacagtatatttttgtcat

SEQ ID NO: 936074 - DNA, 33 bp, Homo sapien
ttcaagatgttgaccatagtatatttttgtcat

SEQ ID NO: 936075 - DNA, 33 bp, Homo sapien
tgtgtcattttgttcccacaagtgttcatatat

SEQ ID NO: 936076 - DNA, 33 bp, Homo sapien
tgtgtcattttgttcctacaagtgttcatatat

SEQ ID NO: 936077 - DNA, 33 bp, Homo sapien
gattataagtcctaaaggaaatgccactaattt

SEQ ID NO: 936078 - DNA, 33 bp, Homo sapien
gattataagtcctaaatgaaatgccactaattt

SEQ ID NO: 936079 - DNA, 33 bp, Homo sapien
gtgctacaaacattaagaatgaaggctgcaaat

SEQ ID NO: 936080 - DNA, 33 bp, Homo sapien
gtgctacaaacattaataatgaaggctgcaaat

SEQ ID NO: 936081 - DNA, 33 bp, Homo sapien
aggtaccaaattgctgcagaagtatttgaagga

SEQ ID NO: 936082 - DNA, 33 bp, Homo sapien
aggtaccaaattgctggagaagtatttgaagga

SEQ ID NO: 936083 - DNA, 33 bp, Homo sapien
tagcacaaaatgctacactgaagagagaaaaca

SEQ ID NO: 936084 - DNA, 33 bp, Homo sapien
tagcacaaaatgctacgctgaagagagaaaaca

SEQ ID NO: 936085 - DNA, 33 bp, Homo sapien
tgaagtttctctcttacgatctgtgtcttgcat

SEQ ID NO: 936086 - DNA, 33 bp, Homo sapien
tgaagtttctctcttatgatctgtgtcttgcat

SEQ ID NO: 936087 - DNA, 33 bp, Homo sapien
ctactatgttccgggtaaaatactgctgttgaa

SEQ ID NO: 936088 - DNA, 33 bp, Homo sapien
ctactatgttccgggtgaaatactgctgttgaa

SEQ ID NO: 936089 - DNA, 33 bp, Homo sapien
ataatgctaatgacgacggcaatataatgtgag

SEQ ID NO: 936090 - DNA, 33 bp, Homo sapien
ataatgctaatgacgatggcaatataatgtgag

SEQ ID NO: 936091 - DNA, 33 bp, Homo sapien
accatggtgtgtaaaacctataacatttctatg

SEQ ID NO: 936092 - DNA, 33 bp, Homo sapien
accatggtgtgtaaaatctataacatttctatg

SEQ ID NO: 936093 - DNA, 33 bp, Homo sapien
ttttgttgaatttagaaagcaatttatgtggat

SEQ ID NO: 936094 - DNA, 33 bp, Homo sapien
ttttgttgaatttagagagcaatttatgtggat

SEQ ID NO: 936095 - DNA, 33 bp, Homo sapien
ccagctaaaaccacacactgagcttcagcacca

SEQ ID NO: 936096 - DNA, 33 bp, Homo sapien
ccagctaaaaccacacgctgagcttcagcacca

SEQ ID NO: 936097 - DNA, 33 bp, Homo sapien
aaaaacttttataggcaaaaatcctccacagta

SEQ ID NO: 936098 - DNA, 33 bp, Homo sapien
aaaaacttttataggcgaaaatcctccacagta

SEQ ID NO: 936099 - DNA, 33 bp, Homo sapien
tgtgccttgtgggatgaaggcaaaggagagcca

SEQ ID NO: 936100 - DNA, 33 bp, Homo sapien
tgtgccttgtgggatgcaggcaaaggagagcca

SEQ ID NO: 936101 - DNA, 33 bp, Homo sapien
atatttcctatgtagcaatctcaggtcaatgat

SEQ ID NO: 936102 - DNA, 33 bp, Homo sapien
atatttcctatgtagccatctcaggtcaatgat

SEQ ID NO: 936103 - DNA, 33 bp, Homo sapien
ctgccatgagttatgactaaccgagaaaaatgt

SEQ ID NO: 936104 - DNA, 33 bp, Homo sapien
ctgccatgagttatgattaaccgagaaaaatgt

SEQ ID NO: 936105 - DNA, 33 bp, Homo sapien
cacagaaacaagcttacaacagcctactcccct

SEQ ID NO: 936106 - DNA, 33 bp, Homo sapien
cacagaaacaagcttagaacagcctactcccct

SEQ ID NO: 936107 - DNA, 33 bp, Homo sapien
agagagattagatggacaggtatgtagtttcac

SEQ ID NO: 936108 - DNA, 33 bp, Homo sapien
agagagattagatggataggtatgtagtttcac

SEQ ID NO: 936109 - DNA, 33 bp, Homo sapien
cacttactgtactgtcacaaatttcagataagt

SEQ ID NO: 936110 - DNA, 33 bp, Homo sapien
cacttactgtactgtcgcaaatttcagataagt

SEQ ID NO: 936111 - DNA, 33 bp, Homo sapien
ttttttaataattgccaaatcaagtaaactcta

SEQ ID NO: 936112 - DNA, 33 bp, Homo sapien
ttttttaataattgcctaatcaagtaaactcta

SEQ ID NO: 936113 - DNA, 33 bp, Homo sapien
gtttgtgtaataataacgcgacttttaattctg

SEQ ID NO: 936114 - DNA, 33 bp, Homo sapien
gtttgtgtaataataatgcgacttttaattctg

SEQ ID NO: 936115 - DNA, 33 bp, Homo sapien
ttatctgagaagcataacaatttactttttaga

SEQ ID NO: 936116 - DNA, 33 bp, Homo sapien
ttatctgagaagcatagcaatttactttttaga

SEQ ID NO: 936117 - DNA, 33 bp, Homo sapien
tcaagagaaaatggacccagaatcagtttacaa

SEQ ID NO: 936118 - DNA, 33 bp, Homo sapien
tcaagagaaaatggactcagaatcagtttacaa

SEQ ID NO: 936119 - DNA, 33 bp, Homo sapien
gcttgttagtcattacaatcaaacaataccaag

SEQ ID NO: 936120 - DNA, 33 bp, Homo sapien
gcttgttagtcattaccatcaaacaataccaag

SEQ ID NO: 936121 - DNA, 33 bp, Homo sapien
gtcaagttcattgacccgccctagctgcctttg

SEQ ID NO: 936122 - DNA, 33 bp, Homo sapien
gtcaagttcattgacctgccctagctgcctttg

SEQ ID NO: 936123 - DNA, 33 bp, Homo sapien
tattatgccggggaaaaaatgagggaacataga

SEQ ID NO: 936124 - DNA, 33 bp, Homo sapien
tattatgccggggaaacaatgagggaacataga

SEQ ID NO: 936125 - DNA, 33 bp, Homo sapien
gctgcacctgctaaaacgcacaagtgaaaagga

SEQ ID NO: 936126 - DNA, 33 bp, Homo sapien
gctgcacctgctaaaaggcacaagtgaaaagga

SEQ ID NO: 936127 - DNA, 33 bp, Homo sapien
cacagaaagacaaacaacacactatctcactta

SEQ ID NO: 936128 - DNA, 33 bp, Homo sapien
cacagaaagacaaacaccacactatctcactta

SEQ ID NO: 936129 - DNA, 33 bp, Homo sapien
acgagtacattttaaagttggcaataacagaaa

SEQ ID NO: 936130 - DNA, 33 bp, Homo sapien
acgagtacattttaaatttggcaataacagaaa

SEQ ID NO: 936131 - DNA, 33 bp, Homo sapien
aaatacttaaaagacacaaagttcaatatgtta

SEQ ID NO: 936132 - DNA, 33 bp, Homo sapien
aaatacttaaaagacagaaagttcaatatgtta

SEQ ID NO: 936133 - DNA, 33 bp, Homo sapien
ttgacccctgaaacttaaaatatctgctatctg

SEQ ID NO: 936134 - DNA, 33 bp, Homo sapien
ttgacccctgaaacttgaaatatctgctatctg

SEQ ID NO: 936135 - DNA, 33 bp, Homo sapien
gggttggttctactcaataaagtgacataaaaa

SEQ ID NO: 936136 - DNA, 33 bp, Homo sapien
gggttggttctactcagtaaagtgacataaaaa

SEQ ID NO: 936137 - DNA, 33 bp, Homo sapien
ccagctaccagcttaacgcagaaaatgagtaaa

SEQ ID NO: 936138 - DNA, 33 bp, Homo sapien
ccagctaccagcttaatgcagaaaatgagtaaa

SEQ ID NO: 936139 - DNA, 33 bp, Homo sapien
ctccacctcttgatgaaaggaaagacccaattt

SEQ ID NO: 936140 - DNA, 33 bp, Homo sapien
ctccacctcttgatgagaggaaagacccaattt

SEQ ID NO: 936141 - DNA, 33 bp, Homo sapien
ctttattcttgatctccgaaagtcattttaatc

SEQ ID NO: 936142 - DNA, 33 bp, Homo sapien
ctttattcttgatctctgaaagtcattttaatc

SEQ ID NO: 936143 - DNA, 33 bp, Homo sapien
tcccacaggtttgtctcaagtattgttttgttc

SEQ ID NO: 936144 - DNA, 33 bp, Homo sapien
tcccacaggtttgtctgaagtattgttttgttc

SEQ ID NO: 936145 - DNA, 33 bp, Homo sapien
tcaggattgtgtccaccgtacaaaaatcagaaa

SEQ ID NO: 936146 - DNA, 33 bp, Homo sapien
tcaggattgtgtccacggtacaaaaatcagaaa

SEQ ID NO: 936147 - DNA, 33 bp, Homo sapien
aagatgagttatctatgaattgtgcttctgttc

SEQ ID NO: 936148 - DNA, 33 bp, Homo sapien
aagatgagttatctattaattgtgcttctgttc

SEQ ID NO: 936149 - DNA, 33 bp, Homo sapien
tcctttggcagaattcgaaaagcaacttgtacg

SEQ ID NO: 936150 - DNA, 33 bp, Homo sapien
tcctttggcagaattctaaaagcaacttgtacg

SEQ ID NO: 936151 - DNA, 33 bp, Homo sapien
tcaacctcaaaaaaccaagcatacatttatccc

SEQ ID NO: 936152 - DNA, 33 bp, Homo sapien
tcaacctcaaaaaaccgagcatacatttatccc

SEQ ID NO: 936153 - DNA, 33 bp, Homo sapien
tagccattcaggtataacaaaaatggaagtcag

SEQ ID NO: 936154 - DNA, 33 bp, Homo sapien
tagccattcaggtatagcaaaaatggaagtcag

SEQ ID NO: 936155 - DNA, 33 bp, Homo sapien
tagacttaaatcatccaactgcagagcatctgt

SEQ ID NO: 936156 - DNA, 33 bp, Homo sapien
tagacttaaatcatccgactgcagagcatctgt

SEQ ID NO: 936157 - DNA, 33 bp, Homo sapien
ggttccatataacccaaaaactactggtattat

SEQ ID NO: 936158 - DNA, 33 bp, Homo sapien
ggttccatataacccacaaactactggtattat

SEQ ID NO: 936159 - DNA, 33 bp, Homo sapien
taccatttcaagagagacacctcccattcctga

SEQ ID NO: 936160 - DNA, 33 bp, Homo sapien
taccatttcaagagaggcacctcccattcctga

SEQ ID NO: 936161 - DNA, 33 bp, Homo sapien
agggacaattgcctccacaaagttaacagcact

SEQ ID NO: 936162 - DNA, 33 bp, Homo sapien
agggacaattgcctccgcaaagttaacagcact

SEQ ID NO: 936163 - DNA, 33 bp, Homo sapien
ttgaacaaataaacacaaagtttctcataagtg

SEQ ID NO: 936164 - DNA, 33 bp, Homo sapien
ttgaacaaataaacacgaagtttctcataagtg

SEQ ID NO: 936165 - DNA, 33 bp, Homo sapien
taaggaaagggatcataaatgttcttgagaatc

SEQ ID NO: 936166 - DNA, 33 bp, Homo sapien
taaggaaagggatcatcaatgttcttgagaatc

SEQ ID NO: 936167 - DNA, 33 bp, Homo sapien
atttgaacacaggaataacataatctgatttac

SEQ ID NO: 936168 - DNA, 33 bp, Homo sapien
atttgaacacaggaatgacataatctgatttac

SEQ ID NO: 936169 - DNA, 33 bp, Homo sapien
aatctggcagaaaccacctagacttgtgttcta

SEQ ID NO: 936170 - DNA, 33 bp, Homo sapien
aatctggcagaaaccatctagacttgtgttcta

SEQ ID NO: 936171 - DNA, 33 bp, Homo sapien
tctaaacatgtattaaatcaaactttctccaat

SEQ ID NO: 936172 - DNA, 33 bp, Homo sapien
tctaaacatgtattaagtcaaactttctccaat

SEQ ID NO: 936173 - DNA, 33 bp, Homo sapien
atttttaaaagttgccagaatttcatatcattt

SEQ ID NO: 936174 - DNA, 33 bp, Homo sapien
atttttaaaagttgccggaatttcatatcattt

SEQ ID NO: 936175 - DNA, 33 bp, Homo sapien
acggaagtgaactgataaactttgcagttaagt

SEQ ID NO: 936176 - DNA, 33 bp, Homo sapien
acggaagtgaactgattaactttgcagttaagt

SEQ ID NO: 936177 - DNA, 33 bp, Homo sapien
tatatttcacatttcaaactttatcttgagtga

SEQ ID NO: 936178 - DNA, 33 bp, Homo sapien
tatatttcacatttcacactttatcttgagtga

SEQ ID NO: 936179 - DNA, 33 bp, Homo sapien
agttaatcctttccaacgctctgattattagct

SEQ ID NO: 936180 - DNA, 33 bp, Homo sapien
agttaatcctttccaatgctctgattattagct

SEQ ID NO: 936181 - DNA, 33 bp, Homo sapien
ctggctttggagaatacgttcatgtcctccttg

SEQ ID NO: 936182 - DNA, 33 bp, Homo sapien
ctggctttggagaatatgttcatgtcctccttg

SEQ ID NO: 936183 - DNA, 33 bp, Homo sapien
aattttgctcagagaacatttgaagcactcaat

SEQ ID NO: 936184 - DNA, 33 bp, Homo sapien
aattttgctcagagaatatttgaagcactcaat

SEQ ID NO: 936185 - DNA, 33 bp, Homo sapien
gtactgtaacctcttacggaatcccttcttttc

SEQ ID NO: 936186 - DNA, 33 bp, Homo sapien
gtactgtaacctcttatggaatcccttcttttc

SEQ ID NO: 936187 - DNA, 33 bp, Homo sapien
cctttacattatatgacactgaggcaccaaaac

SEQ ID NO: 936188 - DNA, 33 bp, Homo sapien
cctttacattatatgatactgaggcaccaaaac

SEQ ID NO: 936189 - DNA, 33 bp, Homo sapien
aatacttgcttactaaatctagtctccctaagt

SEQ ID NO: 936190 - DNA, 33 bp, Homo sapien
aatacttgcttactaactctagtctccctaagt

SEQ ID NO: 936191 - DNA, 33 bp, Homo sapien
actgatattgtagcacggaaagttgtcaatgga

SEQ ID NO: 936192 - DNA, 33 bp, Homo sapien
actgatattgtagcactgaaagttgtcaatgga

SEQ ID NO: 936193 - DNA, 33 bp, Homo sapien
attttgctgattgttacaattttagcaattttg

SEQ ID NO: 936194 - DNA, 33 bp, Homo sapien
attttgctgattgttataattttagcaattttg

SEQ ID NO: 936195 - DNA, 33 bp, Homo sapien
aaaatgctctcaaagacaaatgttagactaacc

SEQ ID NO: 936196 - DNA, 33 bp, Homo sapien
aaaatgctctcaaagataaatgttagactaacc

SEQ ID NO: 936197 - DNA, 33 bp, Homo sapien
ataatcaaaacattacaaacagatattttagga

SEQ ID NO: 936198 - DNA, 33 bp, Homo sapien
ataatcaaaacattacgaacagatattttagga

SEQ ID NO: 936199 - DNA, 33 bp, Homo sapien
aagatggagaacatgaagtttagctccaaatat

SEQ ID NO: 936200 - DNA, 33 bp, Homo sapien
aagatggagaacatgacgtttagctccaaatat

SEQ ID NO: 936201 - DNA, 33 bp, Homo sapien
gaagatattcgtgcaaatatattgttccttttt

SEQ ID NO: 936202 - DNA, 33 bp, Homo sapien
gaagatattcgtgcaagtatattgttccttttt

SEQ ID NO: 936203 - DNA, 33 bp, Homo sapien
catttgaagtaggaaagagtaaatgagattttt

SEQ ID NO: 936204 - DNA, 33 bp, Homo sapien
catttgaagtaggaaatagtaaatgagattttt

SEQ ID NO: 936205 - DNA, 33 bp, Homo sapien
gggtgggtgcaaatacagataatgctcactaca

SEQ ID NO: 936206 - DNA, 33 bp, Homo sapien
gggtgggtgcaaataccgataatgctcactaca

SEQ ID NO: 936207 - DNA, 33 bp, Homo sapien
atgtaatctggtctctcaactcaagtagttatt

SEQ ID NO: 936208 - DNA, 33 bp, Homo sapien
atgtaatctggtctctgaactcaagtagttatt

SEQ ID NO: 936209 - DNA, 33 bp, Homo sapien
tctgctatgactcttacctccagttcataaaat

SEQ ID NO: 936210 - DNA, 33 bp, Homo sapien
tctgctatgactcttatctccagttcataaaat

SEQ ID NO: 936211 - DNA, 33 bp, Homo sapien
cttagattagctttcacagattccgcatatgat

SEQ ID NO: 936212 - DNA, 33 bp, Homo sapien
cttagattagctttcatagattccgcatatgat

SEQ ID NO: 936213 - DNA, 33 bp, Homo sapien
acaatactttacatccactctcagcatttgtca

SEQ ID NO: 936214 - DNA, 33 bp, Homo sapien
acaatactttacatcctctctcagcatttgtca

SEQ ID NO: 936215 - DNA, 33 bp, Homo sapien
tttacaataagttatacagagtgtgcagtaggt

SEQ ID NO: 936216 - DNA, 33 bp, Homo sapien
tttacaataagttatatagagtgtgcagtaggt

SEQ ID NO: 936217 - DNA, 33 bp, Homo sapien
gattttccatgtaacaaataatctgcaagaaga

SEQ ID NO: 936218 - DNA, 33 bp, Homo sapien
gattttccatgtaacatataatctgcaagaaga

SEQ ID NO: 936219 - DNA, 33 bp, Homo sapien
actgtgcatgagtaataacaacaagaagaaact

SEQ ID NO: 936220 - DNA, 33 bp, Homo sapien
actgtgcatgagtaatgacaacaagaagaaact

SEQ ID NO: 936221 - DNA, 33 bp, Homo sapien
tacgcaataataggaacttacgtactttgttat

SEQ ID NO: 936222 - DNA, 33 bp, Homo sapien
tacgcaataataggaatttacgtactttgttat

SEQ ID NO: 936223 - DNA, 33 bp, Homo sapien
gccacttgtaagcatacggatgagattttgtct

SEQ ID NO: 936224 - DNA, 33 bp, Homo sapien
gccacttgtaagcatatggatgagattttgtct

SEQ ID NO: 936225 - DNA, 33 bp, Homo sapien
cacagaagagatctgaaaggtaaagtcttggca

SEQ ID NO: 936226 - DNA, 33 bp, Homo sapien
cacagaagagatctgagaggtaaagtcttggca

SEQ ID NO: 936227 - DNA, 33 bp, Homo sapien
caacaaactaagaagaaaaagtatatgctcatc

SEQ ID NO: 936228 - DNA, 33 bp, Homo sapien
caacaaactaagaagagaaagtatatgctcatc

SEQ ID NO: 936229 - DNA, 33 bp, Homo sapien
gttcgcacatctagaaatgagagttttgttttg

SEQ ID NO: 936230 - DNA, 33 bp, Homo sapien
gttcgcacatctagaagtgagagttttgttttg

SEQ ID NO: 936231 - DNA, 33 bp, Homo sapien
agtactggtctccttgcgtaattgagagtgatg

SEQ ID NO: 936232 - DNA, 33 bp, Homo sapien
agtactggtctccttgtgtaattgagagtgatg

SEQ ID NO: 936233 - DNA, 33 bp, Homo sapien
cctttgtatccacctacaacctggaagaacccc

SEQ ID NO: 936234 - DNA, 33 bp, Homo sapien
cctttgtatccacctataacctggaagaacccc

SEQ ID NO: 936235 - DNA, 33 bp, Homo sapien
cagacctcaagaccaacagaagtgactctttaa

SEQ ID NO: 936236 - DNA, 33 bp, Homo sapien
cagacctcaagaccaatagaagtgactctttaa

SEQ ID NO: 936237 - DNA, 33 bp, Homo sapien
cagccaagggcattccaaaggtaacctgaaaat

SEQ ID NO: 936238 - DNA, 33 bp, Homo sapien
cagccaagggcattccgaaggtaacctgaaaat

SEQ ID NO: 936239 - DNA, 33 bp, Homo sapien
tgttggagggtgaaggcatgactgatgtcccac

SEQ ID NO: 936240 - DNA, 33 bp, Homo sapien
tgttggagggtgaaggtatgactgatgtcccac

SEQ ID NO: 936241 - DNA, 33 bp, Homo sapien
accattgaacacataactgtagagatatagact

SEQ ID NO: 936242 - DNA, 33 bp, Homo sapien
accattgaacacataattgtagagatatagact

SEQ ID NO: 936243 - DNA, 33 bp, Homo sapien
tagcagtgcgattgtacgtagcctgtatgtgtt

SEQ ID NO: 936244 - DNA, 33 bp, Homo sapien
tagcagtgcgattgtatgtagcctgtatgtgtt

SEQ ID NO: 936245 - DNA, 33 bp, Homo sapien
taggcatataaactaaagcaccttattggcaga

SEQ ID NO: 936246 - DNA, 33 bp, Homo sapien
taggcatataaactaacgcaccttattggcaga

SEQ ID NO: 936247 - DNA, 33 bp, Homo sapien
acagacgcctatttaacgctgtgggattccctc

SEQ ID NO: 936248 - DNA, 33 bp, Homo sapien
acagacgcctatttaatgctgtgggattccctc

SEQ ID NO: 936249 - DNA, 33 bp, Homo sapien
ctcctaaattctgatacgaagagacttttcaaa

SEQ ID NO: 936250 - DNA, 33 bp, Homo sapien
ctcctaaattctgatatgaagagacttttcaaa

SEQ ID NO: 936251 - DNA, 33 bp, Homo sapien
ctgtttagagcttatacaacaaacaccactgag

SEQ ID NO: 936252 - DNA, 33 bp, Homo sapien
ctgtttagagcttatagaacaaacaccactgag

SEQ ID NO: 936253 - DNA, 33 bp, Homo sapien
tcttctgataataaaacgagagtgacagatata

SEQ ID NO: 936254 - DNA, 33 bp, Homo sapien
tcttctgataataaaatgagagtgacagatata

SEQ ID NO: 936255 - DNA, 33 bp, Homo sapien
ttgaatccaatccaagacgttaccattgaaaag

SEQ ID NO: 936256 - DNA, 33 bp, Homo sapien
ttgaatccaatccaagtcgttaccattgaaaag

SEQ ID NO: 936257 - DNA, 33 bp, Homo sapien
cagtctaactagcaaaaaaggaatgtgtctttc

SEQ ID NO: 936258 - DNA, 33 bp, Homo sapien
cagtctaactagcaaacaaggaatgtgtctttc

SEQ ID NO: 936259 - DNA, 33 bp, Homo sapien
ggttcttagaggatacaacataaaatttgttct

SEQ ID NO: 936260 - DNA, 33 bp, Homo sapien
ggttcttagaggatactacataaaatttgttct

SEQ ID NO: 936261 - DNA, 33 bp, Homo sapien
aaaggaacagaaggaacagcccaagaaataatg

SEQ ID NO: 936262 - DNA, 33 bp, Homo sapien
aaaggaacagaaggaagagcccaagaaataatg

SEQ ID NO: 936263 - DNA, 33 bp, Homo sapien
cacacagaatgagtcaaagcacaccaaaagaag

SEQ ID NO: 936264 - DNA, 33 bp, Homo sapien
cacacagaatgagtcacagcacaccaaaagaag

SEQ ID NO: 936265 - DNA, 33 bp, Homo sapien
aggtcctctgagtaaaagttgaaagagcacata

SEQ ID NO: 936266 - DNA, 33 bp, Homo sapien
aggtcctctgagtaaaggttgaaagagcacata

SEQ ID NO: 936267 - DNA, 33 bp, Homo sapien
atgagaatccatgagaacacacgaaacacaatg

SEQ ID NO: 936268 - DNA, 33 bp, Homo sapien
atgagaatccatgagatcacacgaaacacaatg

SEQ ID NO: 936269 - DNA, 33 bp, Homo sapien
caatattaagttgagcaataactgatagtgaca

SEQ ID NO: 936270 - DNA, 33 bp, Homo sapien
caatattaagttgagcgataactgatagtgaca

SEQ ID NO: 936271 - DNA, 33 bp, Homo sapien
ttcctgttgtacagctcagaaaatagtgagcac

SEQ ID NO: 936272 - DNA, 33 bp, Homo sapien
ttcctgttgtacagcttagaaaatagtgagcac

SEQ ID NO: 936273 - DNA, 33 bp, Homo sapien
gaagacgattttattccctctgtaaatatgtag

SEQ ID NO: 936274 - DNA, 33 bp, Homo sapien
gaagacgattttattcgctctgtaaatatgtag

SEQ ID NO: 936275 - DNA, 33 bp, Homo sapien
ttcctctatagcttcactcattcagggttttat

SEQ ID NO: 936276 - DNA, 33 bp, Homo sapien
ttcctctatagcttcattcattcagggttttat

SEQ ID NO: 936277 - DNA, 33 bp, Homo sapien
attaatgattgtaagacgagtagctgagcatac

SEQ ID NO: 936278 - DNA, 33 bp, Homo sapien
attaatgattgtaagatgagtagctgagcatac

SEQ ID NO: 936279 - DNA, 33 bp, Homo sapien
taattctagtaggagtaaaactcgtaaagaaaa

SEQ ID NO: 936280 - DNA, 33 bp, Homo sapien
taattctagtaggagtcaaactcgtaaagaaaa

SEQ ID NO: 936281 - DNA, 33 bp, Homo sapien
gagcaggagccagagaacattttgagtacagca

SEQ ID NO: 936282 - DNA, 33 bp, Homo sapien
gagcaggagccagagagcattttgagtacagca

SEQ ID NO: 936283 - DNA, 33 bp, Homo sapien
gagccggttgctaacacagtcattattagatta

SEQ ID NO: 936284 - DNA, 33 bp, Homo sapien
gagccggttgctaacagagtcattattagatta

SEQ ID NO: 936285 - DNA, 33 bp, Homo sapien
acatttgtgaatatcaactctgttcttggcatc

SEQ ID NO: 936286 - DNA, 33 bp, Homo sapien
acatttgtgaatatcagctctgttcttggcatc

SEQ ID NO: 936287 - DNA, 33 bp, Homo sapien
acctggaaaggcctaaatgataagactaagtgt

SEQ ID NO: 936288 - DNA, 33 bp, Homo sapien
acctggaaaggcctaattgataagactaagtgt

SEQ ID NO: 936289 - DNA, 33 bp, Homo sapien
aacaatcccctagtgcacataatctcttgtttt

SEQ ID NO: 936290 - DNA, 33 bp, Homo sapien
aacaatcccctagtgcgcataatctcttgtttt

SEQ ID NO: 936291 - DNA, 33 bp, Homo sapien
attcaaaagctttaaactgctttccagcattat

SEQ ID NO: 936292 - DNA, 33 bp, Homo sapien
attcaaaagctttaaattgctttccagcattat

SEQ ID NO: 936293 - DNA, 33 bp, Homo sapien
caaaaaccgactgatactacctttagatgctaa

SEQ ID NO: 936294 - DNA, 33 bp, Homo sapien
caaaaaccgactgatattacctttagatgctaa

SEQ ID NO: 936295 - DNA, 33 bp, Homo sapien
gtatcattttgtgagacaatgtggcaacacact

SEQ ID NO: 936296 - DNA, 33 bp, Homo sapien
gtatcattttgtgagataatgtggcaacacact

SEQ ID NO: 936297 - DNA, 33 bp, Homo sapien
atcttgggcagggatcaacaaacttcaaccctc

SEQ ID NO: 936298 - DNA, 33 bp, Homo sapien
atcttgggcagggatcgacaaacttcaaccctc

SEQ ID NO: 936299 - DNA, 33 bp, Homo sapien
gcctctgaatcgcatgcacttccagttctacac

SEQ ID NO: 936300 - DNA, 33 bp, Homo sapien
gcctctgaatcgcatggacttccagttctacac

SEQ ID NO: 936301 - DNA, 33 bp, Homo sapien
tctggcacaaatgtaacggtttaataaatggtt

SEQ ID NO: 936302 - DNA, 33 bp, Homo sapien
tctggcacaaatgtaagggtttaataaatggtt

SEQ ID NO: 936303 - DNA, 33 bp, Homo sapien
attatggcagctaaaaattcaagatgagatttg

SEQ ID NO: 936304 - DNA, 33 bp, Homo sapien
attatggcagctaaaatttcaagatgagatttg

SEQ ID NO: 936305 - DNA, 33 bp, Homo sapien
gctccattcctttcaaatgcataagtacataca

SEQ ID NO: 936306 - DNA, 33 bp, Homo sapien
gctccattcctttcaactgcataagtacataca

SEQ ID NO: 936307 - DNA, 33 bp, Homo sapien
ctccaggacttatttaccttgcataactgagat

SEQ ID NO: 936308 - DNA, 33 bp, Homo sapien
ctccaggacttatttatcttgcataactgagat

SEQ ID NO: 936309 - DNA, 33 bp, Homo sapien
tctggaactaagcaaacgggattgtaatggaga

SEQ ID NO: 936310 - DNA, 33 bp, Homo sapien
tctggaactaagcaaatgggattgtaatggaga

SEQ ID NO: 936311 - DNA, 33 bp, Homo sapien
ggcattacctgaactgaacaataccctgtttaa

SEQ ID NO: 936312 - DNA, 33 bp, Homo sapien
ggcattacctgaactggacaataccctgtttaa

SEQ ID NO: 936313 - DNA, 33 bp, Homo sapien
tcctgttttgtcaccacagatagcttgagaatc

SEQ ID NO: 936314 - DNA, 33 bp, Homo sapien
tcctgttttgtcaccagagatagcttgagaatc

SEQ ID NO: 936315 - DNA, 33 bp, Homo sapien
attaaataatcactaccacgagaacagtattgg

SEQ ID NO: 936316 - DNA, 33 bp, Homo sapien
attaaataatcactactacgagaacagtattgg

SEQ ID NO: 936317 - DNA, 33 bp, Homo sapien
taacatttttacaatcacagagctaatatgtgg

SEQ ID NO: 936318 - DNA, 33 bp, Homo sapien
taacatttttacaatcgcagagctaatatgtgg

SEQ ID NO: 936319 - DNA, 33 bp, Homo sapien
atcttggcagacaactaactgtaaaattccaac

SEQ ID NO: 936320 - DNA, 33 bp, Homo sapien
atcttggcagacaacttactgtaaaattccaac

SEQ ID NO: 936321 - DNA, 33 bp, Homo sapien
ttacttacactatccaatgccaaataaggttgt

SEQ ID NO: 936322 - DNA, 33 bp, Homo sapien
ttacttacactatccagtgccaaataaggttgt

SEQ ID NO: 936323 - DNA, 33 bp, Homo sapien
aaatgcagaggaaatagaagggttatctaagtc

SEQ ID NO: 936324 - DNA, 33 bp, Homo sapien
aaatgcagaggaaatataagggttatctaagtc

SEQ ID NO: 936325 - DNA, 33 bp, Homo sapien
aagtttattctgaaaacggcaaaatgtagcagt

SEQ ID NO: 936326 - DNA, 33 bp, Homo sapien
aagtttattctgaaaatggcaaaatgtagcagt

SEQ ID NO: 936327 - DNA, 33 bp, Homo sapien
ggcttcacactcccacgtccattcagcagaatc

SEQ ID NO: 936328 - DNA, 33 bp, Homo sapien
ggcttcacactcccacttccattcagcagaatc

SEQ ID NO: 936329 - DNA, 33 bp, Homo sapien
aaacaggcaaaagcaacggagggaaaagcaggt

SEQ ID NO: 936330 - DNA, 33 bp, Homo sapien
aaacaggcaaaagcaatggagggaaaagcaggt

SEQ ID NO: 936331 - DNA, 33 bp, Homo sapien
ttcacaccaagggagaatataaagtggaacaaa

SEQ ID NO: 936332 - DNA, 33 bp, Homo sapien
ttcacaccaagggagattataaagtggaacaaa

SEQ ID NO: 936333 - DNA, 33 bp, Homo sapien
ctgtcattgaaaggataagatgataacagaagt

SEQ ID NO: 936334 - DNA, 33 bp, Homo sapien
ctgtcattgaaaggatgagatgataacagaagt

SEQ ID NO: 936335 - DNA, 33 bp, Homo sapien
aacagcattatgtttacctgacggcatgcaaaa

SEQ ID NO: 936336 - DNA, 33 bp, Homo sapien
aacagcattatgtttagctgacggcatgcaaaa

SEQ ID NO: 936337 - DNA, 33 bp, Homo sapien
ctatcaggactcaaacagatttttggaagtgat

SEQ ID NO: 936338 - DNA, 33 bp, Homo sapien
ctatcaggactcaaactgatttttggaagtgat

SEQ ID NO: 936339 - DNA, 33 bp, Homo sapien
ttacagtaggtagtaacaaggcttgagcggggc

SEQ ID NO: 936340 - DNA, 33 bp, Homo sapien
ttacagtaggtagtaataaggcttgagcggggc

SEQ ID NO: 936341 - DNA, 33 bp, Homo sapien
ttatttttgttgtccactctgttagtgtgatgt

SEQ ID NO: 936342 - DNA, 33 bp, Homo sapien
ttatttttgttgtccattctgttagtgtgatgt

SEQ ID NO: 936343 - DNA, 33 bp, Homo sapien
ttttgatcctgcctccagagagaccaatactat

SEQ ID NO: 936344 - DNA, 33 bp, Homo sapien
ttttgatcctgcctccggagagaccaatactat

SEQ ID NO: 936345 - DNA, 33 bp, Homo sapien
aggaacaaggttgtgaaggtaacagaaagaaaa

SEQ ID NO: 936346 - DNA, 33 bp, Homo sapien
aggaacaaggttgtgagggtaacagaaagaaaa

SEQ ID NO: 936347 - DNA, 33 bp, Homo sapien
caggaggaaggaacaccgcatagagaggccaag

SEQ ID NO: 936348 - DNA, 33 bp, Homo sapien
caggaggaaggaacactgcatagagaggccaag

SEQ ID NO: 936349 - DNA, 33 bp, Homo sapien
tgttgctgtttttatacggattttcttgaacac

SEQ ID NO: 936350 - DNA, 33 bp, Homo sapien
tgttgctgtttttatatggattttcttgaacac

SEQ ID NO: 936351 - DNA, 33 bp, Homo sapien
gactgactcaaaaagacaccagggtaatgtgta

SEQ ID NO: 936352 - DNA, 33 bp, Homo sapien
gactgactcaaaaagataccagggtaatgtgta

SEQ ID NO: 936353 - DNA, 33 bp, Homo sapien
caagctaaaacgaagacggcaaagaaagcaacc

SEQ ID NO: 936354 - DNA, 33 bp, Homo sapien
caagctaaaacgaagatggcaaagaaagcaacc

SEQ ID NO: 936355 - DNA, 33 bp, Homo sapien
atgtgaaatgtctccaaaaatatcagtatttga

SEQ ID NO: 936356 - DNA, 33 bp, Homo sapien
atgtgaaatgtctccataaatatcagtatttga

SEQ ID NO: 936357 - DNA, 33 bp, Homo sapien
acttccttgctacccccacaaacaggcacagta

SEQ ID NO: 936358 - DNA, 33 bp, Homo sapien
acttccttgctacccctacaaacaggcacagta

SEQ ID NO: 936359 - DNA, 33 bp, Homo sapien
acacaagtctgactggcagaaagtagttatgtt

SEQ ID NO: 936360 - DNA, 33 bp, Homo sapien
acacaagtctgactgggagaaagtagttatgtt

SEQ ID NO: 936361 - DNA, 33 bp, Homo sapien
cttgcatttgaagccagagaacccaatagagat

SEQ ID NO: 936362 - DNA, 33 bp, Homo sapien
cttgcatttgaagccatagaacccaatagagat

SEQ ID NO: 936363 - DNA, 33 bp, Homo sapien
cttcttctctcactaacgttgaaatgttatctt

SEQ ID NO: 936364 - DNA, 33 bp, Homo sapien
cttcttctctcactaatgttgaaatgttatctt

SEQ ID NO: 936365 - DNA, 33 bp, Homo sapien
aggacgcattcataccacagcgtacaccaaatg

SEQ ID NO: 936366 - DNA, 33 bp, Homo sapien
aggacgcattcatacctcagcgtacaccaaatg

SEQ ID NO: 936367 - DNA, 33 bp, Homo sapien
aatgaattttattatccagcgtctgttcttaac

SEQ ID NO: 936368 - DNA, 33 bp, Homo sapien
aatgaattttattatctagcgtctgttcttaac

SEQ ID NO: 936369 - DNA, 33 bp, Homo sapien
acaaacttatgccttaaaacagacatttattat

SEQ ID NO: 936370 - DNA, 33 bp, Homo sapien
acaaacttatgccttagaacagacatttattat

SEQ ID NO: 936371 - DNA, 33 bp, Homo sapien
tttgattccattagaaacccaaagagatgccac

SEQ ID NO: 936372 - DNA, 33 bp, Homo sapien
tttgattccattagaagcccaaagagatgccac

SEQ ID NO: 936373 - DNA, 33 bp, Homo sapien
ggcacttcggattcaacatttaccatgtgtgct

SEQ ID NO: 936374 - DNA, 33 bp, Homo sapien
ggcacttcggattcaagatttaccatgtgtgct

SEQ ID NO: 936375 - DNA, 33 bp, Homo sapien
cctttacaaagttaccggatgcaatcctcataa

SEQ ID NO: 936376 - DNA, 33 bp, Homo sapien
cctttacaaagttacctgatgcaatcctcataa

SEQ ID NO: 936377 - DNA, 33 bp, Homo sapien
tttcctggctcagtcaataatcccacctcagcc

SEQ ID NO: 936378 - DNA, 33 bp, Homo sapien
tttcctggctcagtcagtaatcccacctcagcc

SEQ ID NO: 936379 - DNA, 33 bp, Homo sapien
tgagactctggagttcaaaatgaagaaaatgtc

SEQ ID NO: 936380 - DNA, 33 bp, Homo sapien
tgagactctggagttccaaatgaagaaaatgtc

SEQ ID NO: 936381 - DNA, 33 bp, Homo sapien
cctagatttataacaaagacttatttccaattt

SEQ ID NO: 936382 - DNA, 33 bp, Homo sapien
cctagatttataacaaggacttatttccaattt

SEQ ID NO: 936383 - DNA, 33 bp, Homo sapien
aatcaagatctggttcacagtagctggagtggc

SEQ ID NO: 936384 - DNA, 33 bp, Homo sapien
aatcaagatctggttcgcagtagctggagtggc

SEQ ID NO: 936385 - DNA, 33 bp, Homo sapien
gctcctgatggtaaacagattgaattcctcgca

SEQ ID NO: 936386 - DNA, 33 bp, Homo sapien
gctcctgatggtaaacggattgaattcctcgca

SEQ ID NO: 936387 - DNA, 33 bp, Homo sapien
aaggggcttgagcgagaaatggagccacaccct

SEQ ID NO: 936388 - DNA, 33 bp, Homo sapien
aaggggcttgagcgagcaatggagccacaccct

SEQ ID NO: 936389 - DNA, 33 bp, Homo sapien
gttaggcttcaagctccgagatttcttcctctg

SEQ ID NO: 936390 - DNA, 33 bp, Homo sapien
gttaggcttcaagctctgagatttcttcctctg

SEQ ID NO: 936391 - DNA, 33 bp, Homo sapien
tacaaaagcagcagaacggtaagataaaaggga

SEQ ID NO: 936392 - DNA, 33 bp, Homo sapien
tacaaaagcagcagaatggtaagataaaaggga

SEQ ID NO: 936393 - DNA, 33 bp, Homo sapien
gatccttccagagtaacggtgctgactttggag

SEQ ID NO: 936394 - DNA, 33 bp, Homo sapien
gatccttccagagtaatggtgctgactttggag

SEQ ID NO: 936395 - DNA, 33 bp, Homo sapien
gaaaccgtgtcaggtacatgcatagggtgccat

SEQ ID NO: 936396 - DNA, 33 bp, Homo sapien
gaaaccgtgtcaggtatatgcatagggtgccat

SEQ ID NO: 936397 - DNA, 33 bp, Homo sapien
tttcacaaatacagtcaatatgtgttccttttg

SEQ ID NO: 936398 - DNA, 33 bp, Homo sapien
tttcacaaatacagtcgatatgtgttccttttg

SEQ ID NO: 936399 - DNA, 33 bp, Homo sapien
gctacctgtaatagaccagaatctgttggttaa

SEQ ID NO: 936400 - DNA, 33 bp, Homo sapien
gctacctgtaatagactagaatctgttggttaa

SEQ ID NO: 936401 - DNA, 33 bp, Homo sapien
aaatagtcactggctaacagctaaataaagaga

SEQ ID NO: 936402 - DNA, 33 bp, Homo sapien
aaatagtcactggctagcagctaaataaagaga

SEQ ID NO: 936403 - DNA, 33 bp, Homo sapien
agagtagactcattaaccaatgcagggacaaca

SEQ ID NO: 936404 - DNA, 33 bp, Homo sapien
agagtagactcattaatcaatgcagggacaaca

SEQ ID NO: 936405 - DNA, 33 bp, Homo sapien
ccccataccttagcatcacactatatatctttg

SEQ ID NO: 936406 - DNA, 33 bp, Homo sapien
ccccataccttagcatgacactatatatctttg

SEQ ID NO: 936407 - DNA, 33 bp, Homo sapien
catcatctcataccaaaaactccttaaattgat

SEQ ID NO: 936408 - DNA, 33 bp, Homo sapien
catcatctcataccaagaactccttaaattgat

SEQ ID NO: 936409 - DNA, 33 bp, Homo sapien
aaaaattgacaggtggcatccaattaaactaaa

SEQ ID NO: 936410 - DNA, 33 bp, Homo sapien
aaaaattgacaggtgggatccaattaaactaaa

SEQ ID NO: 936411 - DNA, 33 bp, Homo sapien
aattaaactaaagaaaatgtgtacagcaaaaga

SEQ ID NO: 936412 - DNA, 33 bp, Homo sapien
aattaaactaaagaaattgtgtacagcaaaaga

SEQ ID NO: 936413 - DNA, 33 bp, Homo sapien
ggaatagtaaaagagcagaaggctaatttcttg

SEQ ID NO: 936414 - DNA, 33 bp, Homo sapien
ggaatagtaaaagagcggaaggctaatttcttg

SEQ ID NO: 936415 - DNA, 33 bp, Homo sapien
taataacaattgctataaaagcatcattcagtc

SEQ ID NO: 936416 - DNA, 33 bp, Homo sapien
taataacaattgctatgaaagcatcattcagtc

SEQ ID NO: 936417 - DNA, 33 bp, Homo sapien
cttgcttcctgttcaacagacttctgtgtaagc

SEQ ID NO: 936418 - DNA, 33 bp, Homo sapien
cttgcttcctgttcaatagacttctgtgtaagc

SEQ ID NO: 936419 - DNA, 33 bp, Homo sapien
gttttcctattacacaaaagaatcgaaaatgaa

SEQ ID NO: 936420 - DNA, 33 bp, Homo sapien
gttttcctattacacagaagaatcgaaaatgaa

SEQ ID NO: 936421 - DNA, 33 bp, Homo sapien
tgtgcaaccgactgcaatagtgctatgagagac

SEQ ID NO: 936422 - DNA, 33 bp, Homo sapien
tgtgcaaccgactgcagtagtgctatgagagac

SEQ ID NO: 936423 - DNA, 33 bp, Homo sapien
gactagcttgttacaacggctcatacctgtaat

SEQ ID NO: 936424 - DNA, 33 bp, Homo sapien
gactagcttgttacaatggctcatacctgtaat

SEQ ID NO: 936425 - DNA, 33 bp, Homo sapien
ttttaaaggaatatcaacttacttagcagctaa

SEQ ID NO: 936426 - DNA, 33 bp, Homo sapien
ttttaaaggaatatcagcttacttagcagctaa

SEQ ID NO: 936427 - DNA, 33 bp, Homo sapien
gagcaatctaatttcaaattacaaggccaggtg

SEQ ID NO: 936428 - DNA, 33 bp, Homo sapien
gagcaatctaatttcatattacaaggccaggtg

SEQ ID NO: 936429 - DNA, 33 bp, Homo sapien
tctccaaggcctacaactcacatatcattttat

SEQ ID NO: 936430 - DNA, 33 bp, Homo sapien
tctccaaggcctacaattcacatatcattttat

SEQ ID NO: 936431 - DNA, 33 bp, Homo sapien
aaacaatacggagacccctcaaagatgtaaaac

SEQ ID NO: 936432 - DNA, 33 bp, Homo sapien
aaacaatacggagacctctcaaagatgtaaaac

SEQ ID NO: 936433 - DNA, 33 bp, Homo sapien
gtaagaactttatagacggaagaaatggcataa

SEQ ID NO: 936434 - DNA, 33 bp, Homo sapien
gtaagaactttatagatggaagaaatggcataa

SEQ ID NO: 936435 - DNA, 33 bp, Homo sapien
aactatgtctcttcagaaatcttcaattcaaca

SEQ ID NO: 936436 - DNA, 33 bp, Homo sapien
aactatgtctcttcagcaatcttcaattcaaca

SEQ ID NO: 936437 - DNA, 33 bp, Homo sapien
tctagatgctagttagcccttttaatttttggc

SEQ ID NO: 936438 - DNA, 33 bp, Homo sapien
tctagatgctagttagtccttttaatttttggc

SEQ ID NO: 936439 - DNA, 33 bp, Homo sapien
tgaagaccctatcttcaccatagcatttccctt

SEQ ID NO: 936440 - DNA, 33 bp, Homo sapien
tgaagaccctatcttcgccatagcatttccctt

SEQ ID NO: 936441 - DNA, 33 bp, Homo sapien
gggctgttggagcttaaaagatagtcacatgtt

SEQ ID NO: 936442 - DNA, 33 bp, Homo sapien
gggctgttggagcttagaagatagtcacatgtt

SEQ ID NO: 936443 - DNA, 33 bp, Homo sapien
agacgtggaatctgcccgcattttgataccttg

SEQ ID NO: 936444 - DNA, 33 bp, Homo sapien
agacgtggaatctgcctgcattttgataccttg

SEQ ID NO: 936445 - DNA, 33 bp, Homo sapien
aggatttctgggaaaccatctgggaggcttttc

SEQ ID NO: 936446 - DNA, 33 bp, Homo sapien
aggatttctgggaaactatctgggaggcttttc

SEQ ID NO: 936447 - DNA, 33 bp, Homo sapien
acacattgaaattgaacatattaacctcatcag

SEQ ID NO: 936448 - DNA, 33 bp, Homo sapien
acacattgaaattgaatatattaacctcatcag

SEQ ID NO: 936449 - DNA, 33 bp, Homo sapien
gacttatttatgcttcacaagtaatcacttgac

SEQ ID NO: 936450 - DNA, 33 bp, Homo sapien
gacttatttatgcttcccaagtaatcacttgac

SEQ ID NO: 936451 - DNA, 33 bp, Homo sapien
tcaacttttgcactagactagcaaatagtagaa

SEQ ID NO: 936452 - DNA, 33 bp, Homo sapien
tcaacttttgcactaggctagcaaatagtagaa

SEQ ID NO: 936453 - DNA, 33 bp, Homo sapien
gtgcaaaagttgattcaaagagcagtgggcaga

SEQ ID NO: 936454 - DNA, 33 bp, Homo sapien
gtgcaaaagttgattcgaagagcagtgggcaga

SEQ ID NO: 936455 - DNA, 33 bp, Homo sapien
cccaaaactattagaaatcactctgaattcttc

SEQ ID NO: 936456 - DNA, 33 bp, Homo sapien
cccaaaactattagaagtcactctgaattcttc

SEQ ID NO: 936457 - DNA, 33 bp, Homo sapien
aactttctgctttctacggtttgtctctttctt

SEQ ID NO: 936458 - DNA, 33 bp, Homo sapien
aactttctgctttctatggtttgtctctttctt

SEQ ID NO: 936459 - DNA, 33 bp, Homo sapien
gattcatgaatgtctgcaagaattttatttccc

SEQ ID NO: 936460 - DNA, 33 bp, Homo sapien
gattcatgaatgtctggaagaattttatttccc

SEQ ID NO: 936461 - DNA, 33 bp, Homo sapien
gtgtcctagaagacaacagtgtgcatgatttaa

SEQ ID NO: 936462 - DNA, 33 bp, Homo sapien
gtgtcctagaagacaatagtgtgcatgatttaa

SEQ ID NO: 936463 - DNA, 33 bp, Homo sapien
ttattttttgcaatcacgttattaaagaactct

SEQ ID NO: 936464 - DNA, 33 bp, Homo sapien
ttattttttgcaatcatgttattaaagaactct

SEQ ID NO: 936465 - DNA, 33 bp, Homo sapien
tagacacagaccaagacgaaaggtgaaggaatc

SEQ ID NO: 936466 - DNA, 33 bp, Homo sapien
tagacacagaccaagaggaaaggtgaaggaatc

SEQ ID NO: 936467 - DNA, 33 bp, Homo sapien
gtaaaaggaggaaatgaataggaaaaggcatga

SEQ ID NO: 936468 - DNA, 33 bp, Homo sapien
gtaaaaggaggaaatgcataggaaaaggcatga

SEQ ID NO: 936469 - DNA, 33 bp, Homo sapien
ctgaacatttggtgtcagaaatgctgtgattag

SEQ ID NO: 936470 - DNA, 33 bp, Homo sapien
ctgaacatttggtgtccgaaatgctgtgattag

SEQ ID NO: 936471 - DNA, 33 bp, Homo sapien
caaaaagaaggatgcaaacatttggaagtaaag

SEQ ID NO: 936472 - DNA, 33 bp, Homo sapien
caaaaagaaggatgcatacatttggaagtaaag

SEQ ID NO: 936473 - DNA, 33 bp, Homo sapien
aggaggatataaagacccatcgagattactaga

SEQ ID NO: 936474 - DNA, 33 bp, Homo sapien
aggaggatataaagactcatcgagattactaga

SEQ ID NO: 936475 - DNA, 33 bp, Homo sapien
ggggcaagaagtgaacaaggtctggccagtggc

SEQ ID NO: 936476 - DNA, 33 bp, Homo sapien
ggggcaagaagtgaactaggtctggccagtggc

SEQ ID NO: 936477 - DNA, 33 bp, Homo sapien
caaatcaaattctaacaactcagatgcagtgcc

SEQ ID NO: 936478 - DNA, 33 bp, Homo sapien
caaatcaaattctaaccactcagatgcagtgcc

SEQ ID NO: 936479 - DNA, 33 bp, Homo sapien
aactcatctcctcatactatcttttgcacttgg

SEQ ID NO: 936480 - DNA, 33 bp, Homo sapien
aactcatctcctcatagtatcttttgcacttgg

SEQ ID NO: 936481 - DNA, 33 bp, Homo sapien
gaatgtcagctataaaaacatttgcttatgatc

SEQ ID NO: 936482 - DNA, 33 bp, Homo sapien
gaatgtcagctataaacacatttgcttatgatc

SEQ ID NO: 936483 - DNA, 33 bp, Homo sapien
atcaggtccaagatcaatattatcattgccgca

SEQ ID NO: 936484 - DNA, 33 bp, Homo sapien
atcaggtccaagatcagtattatcattgccgca

SEQ ID NO: 936485 - DNA, 33 bp, Homo sapien
ccagatttaaagatcaagaccagtcatttggag

SEQ ID NO: 936486 - DNA, 33 bp, Homo sapien
ccagatttaaagatcaggaccagtcatttggag

SEQ ID NO: 936487 - DNA, 33 bp, Homo sapien
aatttgaaaaagactacgcaaagtttgaaaggt

SEQ ID NO: 936488 - DNA, 33 bp, Homo sapien
aatttgaaaaagactatgcaaagtttgaaaggt

SEQ ID NO: 936489 - DNA, 33 bp, Homo sapien
catttttatatcctcaatgactagtgtgtattt

SEQ ID NO: 936490 - DNA, 33 bp, Homo sapien
catttttatatcctcagtgactagtgtgtattt

SEQ ID NO: 936491 - DNA, 33 bp, Homo sapien
cagataaagactatataaatctgattccccaag

SEQ ID NO: 936492 - DNA, 33 bp, Homo sapien
cagataaagactatatgaatctgattccccaag

SEQ ID NO: 936493 - DNA, 33 bp, Homo sapien
tttatcagctaattaaagcaaaacaaattgcca

SEQ ID NO: 936494 - DNA, 33 bp, Homo sapien
tttatcagctaattaaggcaaaacaaattgcca

SEQ ID NO: 936495 - DNA, 33 bp, Homo sapien
ttgacacattcaaagaacttcattgattcagta

SEQ ID NO: 936496 - DNA, 33 bp, Homo sapien
ttgacacattcaaagagcttcattgattcagta

SEQ ID NO: 936497 - DNA, 33 bp, Homo sapien
ataacttagtaacaggaaatagagcagccaaaa

SEQ ID NO: 936498 - DNA, 33 bp, Homo sapien
ataacttagtaacaggcaatagagcagccaaaa

SEQ ID NO: 936499 - DNA, 33 bp, Homo sapien
ccgaattatgacattacattttccctcatgaaa

SEQ ID NO: 936500 - DNA, 33 bp, Homo sapien
ccgaattatgacattatattttccctcatgaaa

SEQ ID NO: 936501 - DNA, 33 bp, Homo sapien
ctagatgcaggagcacagaaaacaaatatatca

SEQ ID NO: 936502 - DNA, 33 bp, Homo sapien
ctagatgcaggagcacggaaaacaaatatatca

SEQ ID NO: 936503 - DNA, 33 bp, Homo sapien
gtccatgattttctgacaacaatgaattttata

SEQ ID NO: 936504 - DNA, 33 bp, Homo sapien
gtccatgattttctgataacaatgaattttata

SEQ ID NO: 936505 - DNA, 33 bp, Homo sapien
ctactgcatgatatcaaatggctaagggggtaa

SEQ ID NO: 936506 - DNA, 33 bp, Homo sapien
ctactgcatgatatcagatggctaagggggtaa

SEQ ID NO: 936507 - DNA, 33 bp, Homo sapien
gactatggtctatacaacggaaaaaagtatggg

SEQ ID NO: 936508 - DNA, 33 bp, Homo sapien
gactatggtctatacatcggaaaaaagtatggg

SEQ ID NO: 936509 - DNA, 33 bp, Homo sapien
agggaagtctcatgaacaaaccttagtttctat

SEQ ID NO: 936510 - DNA, 33 bp, Homo sapien
agggaagtctcatgaataaaccttagtttctat

SEQ ID NO: 936511 - DNA, 33 bp, Homo sapien
tctccttctgtgcagtcaaagcaaaggctaaga

SEQ ID NO: 936512 - DNA, 33 bp, Homo sapien
tctccttctgtgcagtgaaagcaaaggctaaga

SEQ ID NO: 936513 - DNA, 33 bp, Homo sapien
tttatggcagatagtcaaaggagagaaatgagg

SEQ ID NO: 936514 - DNA, 33 bp, Homo sapien
tttatggcagatagtcgaaggagagaaatgagg

SEQ ID NO: 936515 - DNA, 33 bp, Homo sapien
tgtctgtacctgataaaagagtgttcaaataga

SEQ ID NO: 936516 - DNA, 33 bp, Homo sapien
tgtctgtacctgataacagagtgttcaaataga

SEQ ID NO: 936517 - DNA, 33 bp, Homo sapien
tgagtaaatacacgtgaaattattgagcataga

SEQ ID NO: 936518 - DNA, 33 bp, Homo sapien
tgagtaaatacacgtggaattattgagcataga

SEQ ID NO: 936519 - DNA, 33 bp, Homo sapien
aagttattgtgcatcaagttttttcttacctct

SEQ ID NO: 936520 - DNA, 33 bp, Homo sapien
aagttattgtgcatcatgttttttcttacctct

SEQ ID NO: 936521 - DNA, 33 bp, Homo sapien
aaaaagaaaaagcaaaataagatggtagaaata

SEQ ID NO: 936522 - DNA, 33 bp, Homo sapien
aaaaagaaaaagcaaagtaagatggtagaaata

SEQ ID NO: 936523 - DNA, 33 bp, Homo sapien
cctttcagtttacaaactcactctgtagctttg

SEQ ID NO: 936524 - DNA, 33 bp, Homo sapien
cctttcagtttacaaattcactctgtagctttg

SEQ ID NO: 936525 - DNA, 33 bp, Homo sapien
acacacatatgtaactaaataaaccaatgcaga

SEQ ID NO: 936526 - DNA, 33 bp, Homo sapien
acacacatatgtaactgaataaaccaatgcaga

SEQ ID NO: 936527 - DNA, 33 bp, Homo sapien
gtatttacttatttgcccaatcaacctgtactg

SEQ ID NO: 936528 - DNA, 33 bp, Homo sapien
gtatttacttatttgctcaatcaacctgtactg

SEQ ID NO: 936529 - DNA, 33 bp, Homo sapien
ataaaaacataaacataatcactgctaatatca

SEQ ID NO: 936530 - DNA, 33 bp, Homo sapien
ataaaaacataaacatcatcactgctaatatca

SEQ ID NO: 936531 - DNA, 33 bp, Homo sapien
tatatttgttcaacagcctccaatcagagaatc

SEQ ID NO: 936532 - DNA, 33 bp, Homo sapien
tatatttgttcaacagtctccaatcagagaatc

SEQ ID NO: 936533 - DNA, 33 bp, Homo sapien
ttgaccgaatatacacagaaaggaggagtgatt

SEQ ID NO: 936534 - DNA, 33 bp, Homo sapien
ttgaccgaatatacacggaaaggaggagtgatt

SEQ ID NO: 936535 - DNA, 33 bp, Homo sapien
aatggtagtacaaccacaaaaggaagtttacct

SEQ ID NO: 936536 - DNA, 33 bp, Homo sapien
aatggtagtacaaccagaaaaggaagtttacct

SEQ ID NO: 936537 - DNA, 33 bp, Homo sapien
ttctgtccctgccacccactgtcatgacaactg

SEQ ID NO: 936538 - DNA, 33 bp, Homo sapien
ttctgtccctgccacctactgtcatgacaactg

SEQ ID NO: 936539 - DNA, 33 bp, Homo sapien
ggtagcagtcttcagacagaatggattgtagat

SEQ ID NO: 936540 - DNA, 33 bp, Homo sapien
ggtagcagtcttcagagagaatggattgtagat

SEQ ID NO: 936541 - DNA, 33 bp, Homo sapien
ctgaatgctgaggtgacgaagggagggtgattg

SEQ ID NO: 936542 - DNA, 33 bp, Homo sapien
ctgaatgctgaggtgatgaagggagggtgattg

SEQ ID NO: 936543 - DNA, 33 bp, Homo sapien
gaatacattgcagttacgatttcacactaagaa

SEQ ID NO: 936544 - DNA, 33 bp, Homo sapien
gaatacattgcagttatgatttcacactaagaa

SEQ ID NO: 936545 - DNA, 33 bp, Homo sapien
aatggctgcgtattgcccaaaggataaattaca

SEQ ID NO: 936546 - DNA, 33 bp, Homo sapien
aatggctgcgtattgctcaaaggataaattaca

SEQ ID NO: 936547 - DNA, 33 bp, Homo sapien
cgtactcattattaaaaggactcagaaatactg

SEQ ID NO: 936548 - DNA, 33 bp, Homo sapien
cgtactcattattaaacggactcagaaatactg

SEQ ID NO: 936549 - DNA, 33 bp, Homo sapien
ctccaaaactctctaagctgggtgtcattaggt

SEQ ID NO: 936550 - DNA, 33 bp, Homo sapien
ctccaaaactctctaatctgggtgtcattaggt

SEQ ID NO: 936551 - DNA, 33 bp, Homo sapien
aaagtgaaagcaatgacgattgttactttaaaa

SEQ ID NO: 936552 - DNA, 33 bp, Homo sapien
aaagtgaaagcaatgatgattgttactttaaaa

SEQ ID NO: 936553 - DNA, 33 bp, Homo sapien
gtagctaatgtgggaaatagtgatattgataaa

SEQ ID NO: 936554 - DNA, 33 bp, Homo sapien
gtagctaatgtgggaagtagtgatattgataaa

SEQ ID NO: 936555 - DNA, 33 bp, Homo sapien
ttaggtaagtgccagtaaaggaaagcagcacag

SEQ ID NO: 936556 - DNA, 33 bp, Homo sapien
ttaggtaagtgccagtgaaggaaagcagcacag

SEQ ID NO: 936557 - DNA, 33 bp, Homo sapien
aaccctattttcctcacgtttgtagtgtatttc

SEQ ID NO: 936558 - DNA, 33 bp, Homo sapien
aaccctattttcctcatgtttgtagtgtatttc

SEQ ID NO: 936559 - DNA, 33 bp, Homo sapien
cctggttatatgtaagacggggaaaattctcct

SEQ ID NO: 936560 - DNA, 33 bp, Homo sapien
cctggttatatgtaaggcggggaaaattctcct

SEQ ID NO: 936561 - DNA, 33 bp, Homo sapien
atcattttatatttgaccaaaatcacaaatcta

SEQ ID NO: 936562 - DNA, 33 bp, Homo sapien
atcattttatatttgagcaaaatcacaaatcta

SEQ ID NO: 936563 - DNA, 33 bp, Homo sapien
aatgggctctgggagacgccttcttttagacat

SEQ ID NO: 936564 - DNA, 33 bp, Homo sapien
aatgggctctgggagatgccttcttttagacat

SEQ ID NO: 936565 - DNA, 33 bp, Homo sapien
catagactcacaagcaaaagtctacttattgag

SEQ ID NO: 936566 - DNA, 33 bp, Homo sapien
catagactcacaagcagaagtctacttattgag

SEQ ID NO: 936567 - DNA, 33 bp, Homo sapien
aaaatgaaaatgaagaactatcacttaagaaag

SEQ ID NO: 936568 - DNA, 33 bp, Homo sapien
aaaatgaaaatgaagagctatcacttaagaaag

SEQ ID NO: 936569 - DNA, 33 bp, Homo sapien
attatgccttttaagaactatgcctcttaaaca

SEQ ID NO: 936570 - DNA, 33 bp, Homo sapien
attatgccttttaagacctatgcctcttaaaca

SEQ ID NO: 936571 - DNA, 33 bp, Homo sapien
tgcctcttaaacagtacggtgcttgtgggtaaa

SEQ ID NO: 936572 - DNA, 33 bp, Homo sapien
tgcctcttaaacagtatggtgcttgtgggtaaa

SEQ ID NO: 936573 - DNA, 33 bp, Homo sapien
atttttcctattcaaacatgttctggtatctac

SEQ ID NO: 936574 - DNA, 33 bp, Homo sapien
atttttcctattcaaatatgttctggtatctac

SEQ ID NO: 936575 - DNA, 33 bp, Homo sapien
ttataaagtcaatttacgcagccacagatttga

SEQ ID NO: 936576 - DNA, 33 bp, Homo sapien
ttataaagtcaatttatgcagccacagatttga

SEQ ID NO: 936577 - DNA, 33 bp, Homo sapien
caactccagtaacataaatctcttttcttcact

SEQ ID NO: 936578 - DNA, 33 bp, Homo sapien
caactccagtaacatagatctcttttcttcact

SEQ ID NO: 936579 - DNA, 33 bp, Homo sapien
tattttggatcagctacaaaagtaatgtcagaa

SEQ ID NO: 936580 - DNA, 33 bp, Homo sapien
tattttggatcagctataaaagtaatgtcagaa

SEQ ID NO: 936581 - DNA, 33 bp, Homo sapien
ggccaaaagacatcccaattgtttaaagacaat

SEQ ID NO: 936582 - DNA, 33 bp, Homo sapien
ggccaaaagacatccccattgtttaaagacaat

SEQ ID NO: 936583 - DNA, 33 bp, Homo sapien
ttttctttgaacccagcagaagtgaacagatgt

SEQ ID NO: 936584 - DNA, 33 bp, Homo sapien
ttttctttgaacccaggagaagtgaacagatgt

SEQ ID NO: 936585 - DNA, 33 bp, Homo sapien
ccatttttaatgtctacgttcaaccaagtgtgg

SEQ ID NO: 936586 - DNA, 33 bp, Homo sapien
ccatttttaatgtctaggttcaaccaagtgtgg

SEQ ID NO: 936587 - DNA, 33 bp, Homo sapien
gaaacatgattgaaggaaaaaagggcctgatct

SEQ ID NO: 936588 - DNA, 33 bp, Homo sapien
gaaacatgattgaagggaaaaagggcctgatct

SEQ ID NO: 936589 - DNA, 33 bp, Homo sapien
gcttcaccattttttacagccctgaaatcaaac

SEQ ID NO: 936590 - DNA, 33 bp, Homo sapien
gcttcaccattttttagagccctgaaatcaaac

SEQ ID NO: 936591 - DNA, 33 bp, Homo sapien
taatttattgctttcacggtgattttattgaaa

SEQ ID NO: 936592 - DNA, 33 bp, Homo sapien
taatttattgctttcatggtgattttattgaaa

SEQ ID NO: 936593 - DNA, 33 bp, Homo sapien
tgagcattgtacgcaacaggtgacctttcaata

SEQ ID NO: 936594 - DNA, 33 bp, Homo sapien
tgagcattgtacgcaataggtgacctttcaata

SEQ ID NO: 936595 - DNA, 33 bp, Homo sapien
taatctgatgtccttaaaatgagatgagatcac

SEQ ID NO: 936596 - DNA, 33 bp, Homo sapien
taatctgatgtccttataatgagatgagatcac

SEQ ID NO: 936597 - DNA, 33 bp, Homo sapien
gcaggtgtcaactgaacactgagcagaaaagtg

SEQ ID NO: 936598 - DNA, 33 bp, Homo sapien
gcaggtgtcaactgaatactgagcagaaaagtg

SEQ ID NO: 936599 - DNA, 33 bp, Homo sapien
aaaagaaaaacttcaacggattctcctttcatt

SEQ ID NO: 936600 - DNA, 33 bp, Homo sapien
aaaagaaaaacttcaatggattctcctttcatt

SEQ ID NO: 936601 - DNA, 33 bp, Homo sapien
cacaactgtgagtgccaatttatctcactttaa

SEQ ID NO: 936602 - DNA, 33 bp, Homo sapien
cacaactgtgagtgccgatttatctcactttaa

SEQ ID NO: 936603 - DNA, 33 bp, Homo sapien
tagttgagattggaaggccaaacttggattcgc

SEQ ID NO: 936604 - DNA, 33 bp, Homo sapien
tagttgagattggaagtccaaacttggattcgc

SEQ ID NO: 936605 - DNA, 33 bp, Homo sapien
catttttgcgaaatcaatgaccacattcaaagc

SEQ ID NO: 936606 - DNA, 33 bp, Homo sapien
catttttgcgaaatcagtgaccacattcaaagc

SEQ ID NO: 936607 - DNA, 33 bp, Homo sapien
aaacccacagaatacacaataagcaactgcaaa

SEQ ID NO: 936608 - DNA, 33 bp, Homo sapien
aaacccacagaatacagaataagcaactgcaaa

SEQ ID NO: 936609 - DNA, 33 bp, Homo sapien
tgatctaactacagggccatggaaagcttttct

SEQ ID NO: 936610 - DNA, 33 bp, Homo sapien
tgatctaactacagggtcatggaaagcttttct

SEQ ID NO: 936611 - DNA, 33 bp, Homo sapien
gagcctcagatttaaaatggtggatgaaatgtg

SEQ ID NO: 936612 - DNA, 33 bp, Homo sapien
gagcctcagatttaaactggtggatgaaatgtg

SEQ ID NO: 936613 - DNA, 33 bp, Homo sapien
gccatgttaagatgccccattcattactgaaat

SEQ ID NO: 936614 - DNA, 33 bp, Homo sapien
gccatgttaagatgcctcattcattactgaaat

SEQ ID NO: 936615 - DNA, 33 bp, Homo sapien
tggccaaacttacttccccatcagttggacatg

SEQ ID NO: 936616 - DNA, 33 bp, Homo sapien
tggccaaacttacttctccatcagttggacatg

SEQ ID NO: 936617 - DNA, 33 bp, Homo sapien
ttatttggttgtggccaaaagatagaatggcct

SEQ ID NO: 936618 - DNA, 33 bp, Homo sapien
ttatttggttgtggccgaaagatagaatggcct

SEQ ID NO: 936619 - DNA, 33 bp, Homo sapien
ttatcttcaaattaaactagactctttccctat

SEQ ID NO: 936620 - DNA, 33 bp, Homo sapien
ttatcttcaaattaaagtagactctttccctat

SEQ ID NO: 936621 - DNA, 33 bp, Homo sapien
atttgaagataaggaacggagcttcaggaaggt

SEQ ID NO: 936622 - DNA, 33 bp, Homo sapien
atttgaagataaggaagggagcttcaggaaggt

SEQ ID NO: 936623 - DNA, 33 bp, Homo sapien
tgtagtcaattctcaacagatgacagccatggt

SEQ ID NO: 936624 - DNA, 33 bp, Homo sapien
tgtagtcaattctcaatagatgacagccatggt

SEQ ID NO: 936625 - DNA, 33 bp, Homo sapien
tcaggtaatttaggaacctgtaggacaatcagt

SEQ ID NO: 936626 - DNA, 33 bp, Homo sapien
tcaggtaatttaggaagctgtaggacaatcagt

SEQ ID NO: 936627 - DNA, 33 bp, Homo sapien
tgggctcctcacatacagcctttattgaattga

SEQ ID NO: 936628 - DNA, 33 bp, Homo sapien
tgggctcctcacatacggcctttattgaattga

SEQ ID NO: 936629 - DNA, 33 bp, Homo sapien
aagaagaagaaaaaaacacatccaaatccaaaa

SEQ ID NO: 936630 - DNA, 33 bp, Homo sapien
aagaagaagaaaaaaagacatccaaatccaaaa

SEQ ID NO: 936631 - DNA, 33 bp, Homo sapien
tgtaatttgtcaagatgaatttgtactggatca

SEQ ID NO: 936632 - DNA, 33 bp, Homo sapien
tgtaatttgtcaagattaatttgtactggatca

SEQ ID NO: 936633 - DNA, 33 bp, Homo sapien
aggaaatggtttgaaactgtggctctgccatga

SEQ ID NO: 936634 - DNA, 33 bp, Homo sapien
aggaaatggtttgaaattgtggctctgccatga

SEQ ID NO: 936635 - DNA, 33 bp, Homo sapien
aatgaggtagctagaacaaatgattgccaagac

SEQ ID NO: 936636 - DNA, 33 bp, Homo sapien
aatgaggtagctagaataaatgattgccaagac

SEQ ID NO: 936637 - DNA, 33 bp, Homo sapien
aagctttttcctgtcacaatcattgccatttct

SEQ ID NO: 936638 - DNA, 33 bp, Homo sapien
aagctttttcctgtcagaatcattgccatttct

SEQ ID NO: 936639 - DNA, 33 bp, Homo sapien
atgtagttagttgcccagaaggtgtgacttgtt

SEQ ID NO: 936640 - DNA, 33 bp, Homo sapien
atgtagttagttgcccggaaggtgtgacttgtt

SEQ ID NO: 936641 - DNA, 33 bp, Homo sapien
gtaactgacaagagtcaatccagtgatatagag

SEQ ID NO: 936642 - DNA, 33 bp, Homo sapien
gtaactgacaagagtcgatccagtgatatagag

SEQ ID NO: 936643 - DNA, 33 bp, Homo sapien
tatctctggtgaaaacacatatcccccgggtgc

SEQ ID NO: 936644 - DNA, 33 bp, Homo sapien
tatctctggtgaaaacgcatatcccccgggtgc

SEQ ID NO: 936645 - DNA, 33 bp, Homo sapien
ggttttgactcttcacagatttctggatatctc

SEQ ID NO: 936646 - DNA, 33 bp, Homo sapien
ggttttgactcttcacggatttctggatatctc

SEQ ID NO: 936647 - DNA, 33 bp, Homo sapien
actctaaatagtcaaactcaattgtggctgaac

SEQ ID NO: 936648 - DNA, 33 bp, Homo sapien
actctaaatagtcaaagtcaattgtggctgaac

SEQ ID NO: 936649 - DNA, 33 bp, Homo sapien
cctcataaatatgaaacctttgggtgaactctt

SEQ ID NO: 936650 - DNA, 33 bp, Homo sapien
cctcataaatatgaaatctttgggtgaactctt

SEQ ID NO: 936651 - DNA, 33 bp, Homo sapien
agctttcaagaatctcaatttgtttagtagtcc

SEQ ID NO: 936652 - DNA, 33 bp, Homo sapien
agctttcaagaatctcgatttgtttagtagtcc

SEQ ID NO: 936653 - DNA, 33 bp, Homo sapien
agtctctacttgattacacctgggagttgatag

SEQ ID NO: 936654 - DNA, 33 bp, Homo sapien
agtctctacttgattatacctgggagttgatag

SEQ ID NO: 936655 - DNA, 33 bp, Homo sapien
gtgcaaccaaataattcaaatataatgcgtgtg

SEQ ID NO: 936656 - DNA, 33 bp, Homo sapien
gtgcaaccaaataattgaaatataatgcgtgtg

SEQ ID NO: 936657 - DNA, 33 bp, Homo sapien
catgtgatcgcctccaatataaaagagcagaaa

SEQ ID NO: 936658 - DNA, 33 bp, Homo sapien
catgtgatcgcctccagtataaaagagcagaaa

SEQ ID NO: 936659 - DNA, 33 bp, Homo sapien
ctagtatgctgttgttgaaatgacatagagttg

SEQ ID NO: 936660 - DNA, 33 bp, Homo sapien
ctagtatgctgttgtttaaatgacatagagttg

SEQ ID NO: 936661 - DNA, 33 bp, Homo sapien
tgttgtgataaaaacacagcaccaaagaaacaa

SEQ ID NO: 936662 - DNA, 33 bp, Homo sapien
tgttgtgataaaaacatagcaccaaagaaacaa

SEQ ID NO: 936663 - DNA, 33 bp, Homo sapien
cgaggaaggtctgtcacgatctaaaagcttcct

SEQ ID NO: 936664 - DNA, 33 bp, Homo sapien
cgaggaaggtctgtcatgatctaaaagcttcct

SEQ ID NO: 936665 - DNA, 33 bp, Homo sapien
catcagacacttggcaatatcttacgcttcaaa

SEQ ID NO: 936666 - DNA, 33 bp, Homo sapien
catcagacacttggcagtatcttacgcttcaaa

SEQ ID NO: 936667 - DNA, 33 bp, Homo sapien
gaactcctgggcataagatgataagggtaatga

SEQ ID NO: 936668 - DNA, 33 bp, Homo sapien
gaactcctgggcataatatgataagggtaatga

SEQ ID NO: 936669 - DNA, 33 bp, Homo sapien
gctgagttaaattgcagccatgctgtttaaggg

SEQ ID NO: 936670 - DNA, 33 bp, Homo sapien
gctgagttaaattgcatccatgctgtttaaggg

SEQ ID NO: 936671 - DNA, 33 bp, Homo sapien
ttaactcagcacttcaaatgacttctgagctct

SEQ ID NO: 936672 - DNA, 33 bp, Homo sapien
ttaactcagcacttcagatgacttctgagctct

SEQ ID NO: 936673 - DNA, 33 bp, Homo sapien
gtggatttaacatcataaagagagcatgatgcc

SEQ ID NO: 936674 - DNA, 33 bp, Homo sapien
gtggatttaacatcattaagagagcatgatgcc

SEQ ID NO: 936675 - DNA, 33 bp, Homo sapien
ccctgtaattcaaccaagtaaagttgtcctaca

SEQ ID NO: 936676 - DNA, 33 bp, Homo sapien
ccctgtaattcaaccaggtaaagttgtcctaca

SEQ ID NO: 936677 - DNA, 33 bp, Homo sapien
attgcttgtcaaccagaaatgacaattactaac

SEQ ID NO: 936678 - DNA, 33 bp, Homo sapien
attgcttgtcaaccaggaatgacaattactaac

SEQ ID NO: 936679 - DNA, 33 bp, Homo sapien
gagagagtcctaaaacaggaacactcagcttcc

SEQ ID NO: 936680 - DNA, 33 bp, Homo sapien
gagagagtcctaaaacgggaacactcagcttcc

SEQ ID NO: 936681 - DNA, 33 bp, Homo sapien
aaggcatataagttaaatgtcagtgtgccagtg

SEQ ID NO: 936682 - DNA, 33 bp, Homo sapien
aaggcatataagttaattgtcagtgtgccagtg

SEQ ID NO: 936683 - DNA, 33 bp, Homo sapien
gctaaaaaaatcattcacacaatctgtcctata

SEQ ID NO: 936684 - DNA, 33 bp, Homo sapien
gctaaaaaaatcattcccacaatctgtcctata

SEQ ID NO: 936685 - DNA, 33 bp, Homo sapien
gtaatttcttccaccaatgaaaagtcaacttcc

SEQ ID NO: 936686 - DNA, 33 bp, Homo sapien
gtaatttcttccaccagtgaaaagtcaacttcc

SEQ ID NO: 936687 - DNA, 33 bp, Homo sapien
ggttgtgttttactaacagtgtcactgatgatc

SEQ ID NO: 936688 - DNA, 33 bp, Homo sapien
ggttgtgttttactaagagtgtcactgatgatc

SEQ ID NO: 936689 - DNA, 33 bp, Homo sapien
agttcgaacatttcctaaaaacaccttgtattg

SEQ ID NO: 936690 - DNA, 33 bp, Homo sapien
agttcgaacatttcctgaaaacaccttgtattg

SEQ ID NO: 936691 - DNA, 33 bp, Homo sapien
aggatgatgttgtttaaatgctcaaaatgtcag

SEQ ID NO: 936692 - DNA, 33 bp, Homo sapien
aggatgatgttgtttatatgctcaaaatgtcag

SEQ ID NO: 936693 - DNA, 33 bp, Homo sapien
tacaacagtcataccactagaaacattttgttg

SEQ ID NO: 936694 - DNA, 33 bp, Homo sapien
tacaacagtcataccattagaaacattttgttg

SEQ ID NO: 936695 - DNA, 33 bp, Homo sapien
tctccttgtgctgtaaaatatgaacaaagagat

SEQ ID NO: 936696 - DNA, 33 bp, Homo sapien
tctccttgtgctgtaagatatgaacaaagagat

SEQ ID NO: 936697 - DNA, 33 bp, Homo sapien
aaacttgaggctattacgaaaattctttaaaag

SEQ ID NO: 936698 - DNA, 33 bp, Homo sapien
aaacttgaggctattatgaaaattctttaaaag

SEQ ID NO: 936699 - DNA, 33 bp, Homo sapien
ggaaattagcttagtagcttcaattctttaccc

SEQ ID NO: 936700 - DNA, 33 bp, Homo sapien
ggaaattagcttagtatcttcaattctttaccc

SEQ ID NO: 936701 - DNA, 33 bp, Homo sapien
actctaatccccagagcctatttaatcattatt

SEQ ID NO: 936702 - DNA, 33 bp, Homo sapien
actctaatccccagaggctatttaatcattatt

SEQ ID NO: 936703 - DNA, 33 bp, Homo sapien
atttaatgggtcattcacttaggctttcaccac

SEQ ID NO: 936704 - DNA, 33 bp, Homo sapien
atttaatgggtcattcgcttaggctttcaccac

SEQ ID NO: 936705 - DNA, 33 bp, Homo sapien
agtagactgatgtataaaactaaaaagccaatt

SEQ ID NO: 936706 - DNA, 33 bp, Homo sapien
agtagactgatgtatacaactaaaaagccaatt

SEQ ID NO: 936707 - DNA, 33 bp, Homo sapien
aactgccatagagagaagatgcagtagttataa

SEQ ID NO: 936708 - DNA, 33 bp, Homo sapien
aactgccatagagagaggatgcagtagttataa

SEQ ID NO: 936709 - DNA, 33 bp, Homo sapien
tcagcatgaaaggaataacataaatcacatgaa

SEQ ID NO: 936710 - DNA, 33 bp, Homo sapien
tcagcatgaaaggaattacataaatcacatgaa

SEQ ID NO: 936711 - DNA, 33 bp, Homo sapien
gatggattgatttgtaagtcagaaagaactaat

SEQ ID NO: 936712 - DNA, 33 bp, Homo sapien
gatggattgatttgtatgtcagaaagaactaat

SEQ ID NO: 936713 - DNA, 33 bp, Homo sapien
catgtggcacttgtataaaaacttgaagaatag

SEQ ID NO: 936714 - DNA, 33 bp, Homo sapien
catgtggcacttgtatcaaaacttgaagaatag

SEQ ID NO: 936715 - DNA, 33 bp, Homo sapien
agctgttgattcatgaagtatgatgatctattc

SEQ ID NO: 936716 - DNA, 33 bp, Homo sapien
agctgttgattcatgaggtatgatgatctattc

SEQ ID NO: 936717 - DNA, 33 bp, Homo sapien
gcagcaccactattaccgatgtgaaaaattcag

SEQ ID NO: 936718 - DNA, 33 bp, Homo sapien
gcagcaccactattactgatgtgaaaaattcag

SEQ ID NO: 936719 - DNA, 33 bp, Homo sapien
ttctcgtggtttgttacgttgccagtatctact

SEQ ID NO: 936720 - DNA, 33 bp, Homo sapien
ttctcgtggtttgttaggttgccagtatctact

SEQ ID NO: 936721 - DNA, 33 bp, Homo sapien
tgaggtttgcacagagaaaggctcaccaacttt

SEQ ID NO: 936722 - DNA, 33 bp, Homo sapien
tgaggtttgcacagaggaaggctcaccaacttt

SEQ ID NO: 936723 - DNA, 33 bp, Homo sapien
tcgtcttcattgctacactccctccagagtcat

SEQ ID NO: 936724 - DNA, 33 bp, Homo sapien
tcgtcttcattgctacgctccctccagagtcat

SEQ ID NO: 936725 - DNA, 33 bp, Homo sapien
tcatttgtaagcctctcaaatgtctgagattat

SEQ ID NO: 936726 - DNA, 33 bp, Homo sapien
tcatttgtaagcctctgaaatgtctgagattat

SEQ ID NO: 936727 - DNA, 33 bp, Homo sapien
tctattttcagcttctcaaggaagttctgaatg

SEQ ID NO: 936728 - DNA, 33 bp, Homo sapien
tctattttcagcttcttaaggaagttctgaatg

SEQ ID NO: 936729 - DNA, 33 bp, Homo sapien
ctctttcttacaataacacaaggtctttgagga

SEQ ID NO: 936730 - DNA, 33 bp, Homo sapien
ctctttcttacaataatacaaggtctttgagga

SEQ ID NO: 936731 - DNA, 33 bp, Homo sapien
actgtagcctgattgaatacattaacagaacta

SEQ ID NO: 936732 - DNA, 33 bp, Homo sapien
actgtagcctgattgagtacattaacagaacta

SEQ ID NO: 936733 - DNA, 33 bp, Homo sapien
acaactcttacacatacctctgtaaatattata

SEQ ID NO: 936734 - DNA, 33 bp, Homo sapien
acaactcttacacatagctctgtaaatattata

SEQ ID NO: 936735 - DNA, 33 bp, Homo sapien
agagtgacacatctttaaaaagagccttaagca

SEQ ID NO: 936736 - DNA, 33 bp, Homo sapien
agagtgacacatctttgaaaagagccttaagca

SEQ ID NO: 936737 - DNA, 33 bp, Homo sapien
gctaatagcacatagaacatgcgtatttgctgt

SEQ ID NO: 936738 - DNA, 33 bp, Homo sapien
gctaatagcacatagagcatgcgtatttgctgt

SEQ ID NO: 936739 - DNA, 33 bp, Homo sapien
taacttttgggtattaagaacatggctagaact

SEQ ID NO: 936740 - DNA, 33 bp, Homo sapien
taacttttgggtattaggaacatggctagaact

SEQ ID NO: 936741 - DNA, 33 bp, Homo sapien
tttcttgaagcttagactagagcatgatgcagt

SEQ ID NO: 936742 - DNA, 33 bp, Homo sapien
tttcttgaagcttagagtagagcatgatgcagt

SEQ ID NO: 936743 - DNA, 33 bp, Homo sapien
tttgctgtttttctcaatgactctagagaaaca

SEQ ID NO: 936744 - DNA, 33 bp, Homo sapien
tttgctgtttttctcagtgactctagagaaaca

SEQ ID NO: 936745 - DNA, 33 bp, Homo sapien
tcctggctctctccccaactctatgtccagaca

SEQ ID NO: 936746 - DNA, 33 bp, Homo sapien
tcctggctctctcccccactctatgtccagaca

SEQ ID NO: 936747 - DNA, 33 bp, Homo sapien
atcctcgttcaaaaaacgacccaccgcatagct

SEQ ID NO: 936748 - DNA, 33 bp, Homo sapien
atcctcgttcaaaaaatgacccaccgcatagct

SEQ ID NO: 936749 - DNA, 33 bp, Homo sapien
ccatcattctgctcggccattgcctggagatca

SEQ ID NO: 936750 - DNA, 33 bp, Homo sapien
ccatcattctgctcggtcattgcctggagatca

SEQ ID NO: 936751 - DNA, 33 bp, Homo sapien
aagtaaggatctaaaactggactctgctgtact

SEQ ID NO: 936752 - DNA, 33 bp, Homo sapien
aagtaaggatctaaaattggactctgctgtact

SEQ ID NO: 936753 - DNA, 33 bp, Homo sapien
agtcttacaatgctgcacctcgggaattagtgt

SEQ ID NO: 936754 - DNA, 33 bp, Homo sapien
agtcttacaatgctgcgcctcgggaattagtgt

SEQ ID NO: 936755 - DNA, 33 bp, Homo sapien
cagggttgatgaagtcaaagggacggccattct

SEQ ID NO: 936756 - DNA, 33 bp, Homo sapien
cagggttgatgaagtcgaagggacggccattct

SEQ ID NO: 936757 - DNA, 33 bp, Homo sapien
atcataaacaatttctcaagcattaagaagaaa

SEQ ID NO: 936758 - DNA, 33 bp, Homo sapien
atcataaacaatttctgaagcattaagaagaaa

SEQ ID NO: 936759 - DNA, 33 bp, Homo sapien
taacctgctttctctacgtaagactaacctcac

SEQ ID NO: 936760 - DNA, 33 bp, Homo sapien
taacctgctttctctatgtaagactaacctcac

SEQ ID NO: 936761 - DNA, 33 bp, Homo sapien
cacaacgtctattctgaagcctgtgaatcaagg

SEQ ID NO: 936762 - DNA, 33 bp, Homo sapien
cacaacgtctattctgcagcctgtgaatcaagg

SEQ ID NO: 936763 - DNA, 33 bp, Homo sapien
agctttcaacaacaaccgccctcatcaattgga

SEQ ID NO: 936764 - DNA, 33 bp, Homo sapien
agctttcaacaacaactgccctcatcaattgga

SEQ ID NO: 936765 - DNA, 33 bp, Homo sapien
tgcttttgcacactaactagacacagtataatg

SEQ ID NO: 936766 - DNA, 33 bp, Homo sapien
tgcttttgcacactaagtagacacagtataatg

SEQ ID NO: 936767 - DNA, 33 bp, Homo sapien
tagatctgcttctaggaaagtttatttaagaag

SEQ ID NO: 936768 - DNA, 33 bp, Homo sapien
tagatctgcttctagggaagtttatttaagaag

SEQ ID NO: 936769 - DNA, 33 bp, Homo sapien
tctcctccagttgggaaaactctgacactcctg

SEQ ID NO: 936770 - DNA, 33 bp, Homo sapien
tctcctccagttgggacaactctgacactcctg

SEQ ID NO: 936771 - DNA, 33 bp, Homo sapien
aagtatgtataaaccacgagtcaaaggtttcct

SEQ ID NO: 936772 - DNA, 33 bp, Homo sapien
aagtatgtataaaccatgagtcaaaggtttcct

SEQ ID NO: 936773 - DNA, 33 bp, Homo sapien
ctctgtgactgaatcaaatgaagcctaatgatg

SEQ ID NO: 936774 - DNA, 33 bp, Homo sapien
ctctgtgactgaatcagatgaagcctaatgatg

SEQ ID NO: 936775 - DNA, 33 bp, Homo sapien
tgagatacttactgaaaatgagttaaaattgtt

SEQ ID NO: 936776 - DNA, 33 bp, Homo sapien
tgagatacttactgaacatgagttaaaattgtt

SEQ ID NO: 936777 - DNA, 33 bp, Homo sapien
catatgagagttgaaaagtaagtccaagacacc

SEQ ID NO: 936778 - DNA, 33 bp, Homo sapien
catatgagagttgaaaggtaagtccaagacacc

SEQ ID NO: 936779 - DNA, 33 bp, Homo sapien
tgataagtgacagaaccgcaactcaaacttgct

SEQ ID NO: 936780 - DNA, 33 bp, Homo sapien
tgataagtgacagaactgcaactcaaacttgct

SEQ ID NO: 936781 - DNA, 33 bp, Homo sapien
cactagtttcaggcacaagtatatccaaggatt

SEQ ID NO: 936782 - DNA, 33 bp, Homo sapien
cactagtttcaggcacgagtatatccaaggatt

SEQ ID NO: 936783 - DNA, 33 bp, Homo sapien
ttttctctgcttggtacgttctcttctcagata

SEQ ID NO: 936784 - DNA, 33 bp, Homo sapien
ttttctctgcttggtatgttctcttctcagata

SEQ ID NO: 936785 - DNA, 33 bp, Homo sapien
tggataccacccaaccaagaaatagatccaata

SEQ ID NO: 936786 - DNA, 33 bp, Homo sapien
tggataccacccaaccgagaaatagatccaata

SEQ ID NO: 936787 - DNA, 33 bp, Homo sapien
gtatatttacttcttagaaacgtgtatcatgta

SEQ ID NO: 936788 - DNA, 33 bp, Homo sapien
gtatatttacttcttataaacgtgtatcatgta

SEQ ID NO: 936789 - DNA, 33 bp, Homo sapien
cttccagagccaggtgaagactccctttcgcag

SEQ ID NO: 936790 - DNA, 33 bp, Homo sapien
cttccagagccaggtggagactccctttcgcag

SEQ ID NO: 936791 - DNA, 33 bp, Homo sapien
caaaacaactcttagaaaaactgtcctgacgct

SEQ ID NO: 936792 - DNA, 33 bp, Homo sapien
caaaacaactcttagagaaactgtcctgacgct

SEQ ID NO: 936793 - DNA, 33 bp, Homo sapien
tgaagaccacataaaaatgctgctagaatgcat

SEQ ID NO: 936794 - DNA, 33 bp, Homo sapien
tgaagaccacataaaactgctgctagaatgcat

SEQ ID NO: 936795 - DNA, 33 bp, Homo sapien
taaagtccttattgaccatcccaaagaagaggg

SEQ ID NO: 936796 - DNA, 33 bp, Homo sapien
taaagtccttattgactatcccaaagaagaggg

SEQ ID NO: 936797 - DNA, 33 bp, Homo sapien
tgaataatgtgcctctcaagctgttttccacag

SEQ ID NO: 936798 - DNA, 33 bp, Homo sapien
tgaataatgtgcctcttaagctgttttccacag

SEQ ID NO: 936799 - DNA, 33 bp, Homo sapien
agtgacttaacccaaacttattatctcacacaa

SEQ ID NO: 936800 - DNA, 33 bp, Homo sapien
agtgacttaacccaaagttattatctcacacaa

SEQ ID NO: 936801 - DNA, 33 bp, Homo sapien
cactgtacattaagcaatagtctcaacaccact

SEQ ID NO: 936802 - DNA, 33 bp, Homo sapien
cactgtacattaagcagtagtctcaacaccact

SEQ ID NO: 936803 - DNA, 33 bp, Homo sapien
tttcactaacattgtcccaagcaacagcatgag

SEQ ID NO: 936804 - DNA, 33 bp, Homo sapien
tttcactaacattgtctcaagcaacagcatgag

SEQ ID NO: 936805 - DNA, 33 bp, Homo sapien
aaatgcctttgggacaaagcagaactttcatga

SEQ ID NO: 936806 - DNA, 33 bp, Homo sapien
aaatgcctttgggacagagcagaactttcatga

SEQ ID NO: 936807 - DNA, 33 bp, Homo sapien
ttatatgtgtctctcacgaagtttggagataat

SEQ ID NO: 936808 - DNA, 33 bp, Homo sapien
ttatatgtgtctctcatgaagtttggagataat

SEQ ID NO: 936809 - DNA, 33 bp, Homo sapien
ggtttgtgtccatttcacttgcacatccattcc

SEQ ID NO: 936810 - DNA, 33 bp, Homo sapien
ggtttgtgtccatttcgcttgcacatccattcc

SEQ ID NO: 936811 - DNA, 33 bp, Homo sapien
gttatctcttctcccaaccatgtactagccaaa

SEQ ID NO: 936812 - DNA, 33 bp, Homo sapien
gttatctcttctcccatccatgtactagccaaa

SEQ ID NO: 936813 - DNA, 33 bp, Homo sapien
ttttattttggctaccaactttattttaattaa

SEQ ID NO: 936814 - DNA, 33 bp, Homo sapien
ttttattttggctaccgactttattttaattaa

SEQ ID NO: 936815 - DNA, 33 bp, Homo sapien
tgacattgaggaaaaccgtcttaaaatatgtta

SEQ ID NO: 936816 - DNA, 33 bp, Homo sapien
tgacattgaggaaaactgtcttaaaatatgtta

SEQ ID NO: 936817 - DNA, 33 bp, Homo sapien
agataagtaagacctaaatcatctattgtacaa

SEQ ID NO: 936818 - DNA, 33 bp, Homo sapien
agataagtaagacctatatcatctattgtacaa

SEQ ID NO: 936819 - DNA, 33 bp, Homo sapien
ttctgtcaaagcaggaatacaaatatggtccct

SEQ ID NO: 936820 - DNA, 33 bp, Homo sapien
ttctgtcaaagcaggagtacaaatatggtccct

SEQ ID NO: 936821 - DNA, 33 bp, Homo sapien
ccaacacatccattgagtatttaccacatacca

SEQ ID NO: 936822 - DNA, 33 bp, Homo sapien
ccaacacatccattgattatttaccacatacca

SEQ ID NO: 936823 - DNA, 33 bp, Homo sapien
cggatggtcttggatacgacacaagccaaatag

SEQ ID NO: 936824 - DNA, 33 bp, Homo sapien
cggatggtcttggatatgacacaagccaaatag

SEQ ID NO: 936825 - DNA, 33 bp, Homo sapien
atctttataactgggaacccttacattagcact

SEQ ID NO: 936826 - DNA, 33 bp, Homo sapien
atctttataactgggaccccttacattagcact

SEQ ID NO: 936827 - DNA, 33 bp, Homo sapien
taagatcatccagtaaatatgtattcagcatct

SEQ ID NO: 936828 - DNA, 33 bp, Homo sapien
taagatcatccagtaagtatgtattcagcatct

SEQ ID NO: 936829 - DNA, 33 bp, Homo sapien
agatgccaagacaagaatatatgtgcaagagat

SEQ ID NO: 936830 - DNA, 33 bp, Homo sapien
agatgccaagacaagagtatatgtgcaagagat

SEQ ID NO: 936831 - DNA, 33 bp, Homo sapien
gaacttaagtctgtctaacctgaaggccacatt

SEQ ID NO: 936832 - DNA, 33 bp, Homo sapien
gaacttaagtctgtctgacctgaaggccacatt

SEQ ID NO: 936833 - DNA, 33 bp, Homo sapien
ttgaactgtaatattaactactattttccagtc

SEQ ID NO: 936834 - DNA, 33 bp, Homo sapien
ttgaactgtaatattagctactattttccagtc

SEQ ID NO: 936835 - DNA, 33 bp, Homo sapien
tgtgtgctttggaggactaatagggcaggaatg

SEQ ID NO: 936836 - DNA, 33 bp, Homo sapien
tgtgtgctttggaggagtaatagggcaggaatg

SEQ ID NO: 936837 - DNA, 33 bp, Homo sapien
gtgcaaaataaattccagaactattcggccacg

SEQ ID NO: 936838 - DNA, 33 bp, Homo sapien
gtgcaaaataaattcccgaactattcggccacg

SEQ ID NO: 936839 - DNA, 33 bp, Homo sapien
agagctgaaggaaagacaccagaactgggaaga

SEQ ID NO: 936840 - DNA, 33 bp, Homo sapien
agagctgaaggaaagataccagaactgggaaga

SEQ ID NO: 936841 - DNA, 33 bp, Homo sapien
ctctgagactcagactcacatatccaactgtcg

SEQ ID NO: 936842 - DNA, 33 bp, Homo sapien
ctctgagactcagacttacatatccaactgtcg

SEQ ID NO: 936843 - DNA, 33 bp, Homo sapien
atttacaaaagcaggcaaatcttaaataaacac

SEQ ID NO: 936844 - DNA, 33 bp, Homo sapien
atttacaaaagcaggcgaatcttaaataaacac

SEQ ID NO: 936845 - DNA, 33 bp, Homo sapien
ctgttttgatcattcacgtttgctttcttatat

SEQ ID NO: 936846 - DNA, 33 bp, Homo sapien
ctgttttgatcattcatgtttgctttcttatat

SEQ ID NO: 936847 - DNA, 33 bp, Homo sapien
taatcgtgaaaccaagcatttaccactagctga

SEQ ID NO: 936848 - DNA, 33 bp, Homo sapien
taatcgtgaaaccaagtatttaccactagctga

SEQ ID NO: 936849 - DNA, 33 bp, Homo sapien
ggactcttattacacaacaggatgggacctaag

SEQ ID NO: 936850 - DNA, 33 bp, Homo sapien
ggactcttattacacaccaggatgggacctaag

SEQ ID NO: 936851 - DNA, 33 bp, Homo sapien
agtgtacacttgactccatgagtgctcagaaat

SEQ ID NO: 936852 - DNA, 33 bp, Homo sapien
agtgtacacttgactctatgagtgctcagaaat

SEQ ID NO: 936853 - DNA, 33 bp, Homo sapien
agtaagccaaaatagccagtcaattaaaatctc

SEQ ID NO: 936854 - DNA, 33 bp, Homo sapien
agtaagccaaaatagctagtcaattaaaatctc

SEQ ID NO: 936855 - DNA, 33 bp, Homo sapien
tgtaattcctaaggataagtctaaagttgcttg

SEQ ID NO: 936856 - DNA, 33 bp, Homo sapien
tgtaattcctaaggatgagtctaaagttgcttg

SEQ ID NO: 936857 - DNA, 33 bp, Homo sapien
taaccaatcaaatgaccgtaacatctgtgctgg

SEQ ID NO: 936858 - DNA, 33 bp, Homo sapien
taaccaatcaaatgactgtaacatctgtgctgg

SEQ ID NO: 936859 - DNA, 33 bp, Homo sapien
catgagctaacccttaactgtgtgtgcttgggt

SEQ ID NO: 936860 - DNA, 33 bp, Homo sapien
catgagctaacccttatctgtgtgtgcttgggt

SEQ ID NO: 936861 - DNA, 33 bp, Homo sapien
tttgtattttctcatcactggtcctttacctac

SEQ ID NO: 936862 - DNA, 33 bp, Homo sapien
tttgtattttctcatcgctggtcctttacctac

SEQ ID NO: 936863 - DNA, 33 bp, Homo sapien
aatgaggctgttacaacgggaaagctcagaatg

SEQ ID NO: 936864 - DNA, 33 bp, Homo sapien
aatgaggctgttacaatgggaaagctcagaatg

SEQ ID NO: 936865 - DNA, 33 bp, Homo sapien
tattgacatactataaacagggttggggcacag

SEQ ID NO: 936866 - DNA, 33 bp, Homo sapien
tattgacatactataagcagggttggggcacag

SEQ ID NO: 936867 - DNA, 33 bp, Homo sapien
ggctcaggttgccttagagtcttccataaaaat

SEQ ID NO: 936868 - DNA, 33 bp, Homo sapien
ggctcaggttgccttatagtcttccataaaaat

SEQ ID NO: 936869 - DNA, 33 bp, Homo sapien
aagaaagtgtatgtgaaggtattaaaagcataa

SEQ ID NO: 936870 - DNA, 33 bp, Homo sapien
aagaaagtgtatgtgacggtattaaaagcataa

SEQ ID NO: 936871 - DNA, 33 bp, Homo sapien
caggactacctaccgactatcaattaaatatgc

SEQ ID NO: 936872 - DNA, 33 bp, Homo sapien
caggactacctaccgattatcaattaaatatgc

SEQ ID NO: 936873 - DNA, 33 bp, Homo sapien
ggtgaatacagttttaagatttaaatgattacg

SEQ ID NO: 936874 - DNA, 33 bp, Homo sapien
ggtgaatacagttttaggatttaaatgattacg

SEQ ID NO: 936875 - DNA, 33 bp, Homo sapien
ttggcgagaaatagtcactgaagtcaagcagaa

SEQ ID NO: 936876 - DNA, 33 bp, Homo sapien
ttggcgagaaatagtcgctgaagtcaagcagaa

SEQ ID NO: 936877 - DNA, 33 bp, Homo sapien
ggttagctgaaaatgaataaatgacaagagggg

SEQ ID NO: 936878 - DNA, 33 bp, Homo sapien
ggttagctgaaaatgagtaaatgacaagagggg

SEQ ID NO: 936879 - DNA, 33 bp, Homo sapien
aattaacatgcttagggacaggggaatcacagg

SEQ ID NO: 936880 - DNA, 33 bp, Homo sapien
aattaacatgcttaggtacaggggaatcacagg

SEQ ID NO: 936881 - DNA, 33 bp, Homo sapien
agtcatctcatgttgacgaagtataaatatgca

SEQ ID NO: 936882 - DNA, 33 bp, Homo sapien
agtcatctcatgttgatgaagtataaatatgca

SEQ ID NO: 936883 - DNA, 33 bp, Homo sapien
ttctcaggtgcaaaatgagactagctattccct

SEQ ID NO: 936884 - DNA, 33 bp, Homo sapien
ttctcaggtgcaaaattagactagctattccct

SEQ ID NO: 936885 - DNA, 33 bp, Homo sapien
agtttcataggaagcaccagttgtgctaagttt

SEQ ID NO: 936886 - DNA, 33 bp, Homo sapien
agtttcataggaagcatcagttgtgctaagttt

SEQ ID NO: 936887 - DNA, 33 bp, Homo sapien
gaatccttagaaagacaagctcatgtagtcaaa

SEQ ID NO: 936888 - DNA, 33 bp, Homo sapien
gaatccttagaaagacgagctcatgtagtcaaa

SEQ ID NO: 936889 - DNA, 33 bp, Homo sapien
ggttaattcacagtgcaaagtgtctgcttctag

SEQ ID NO: 936890 - DNA, 33 bp, Homo sapien
ggttaattcacagtgcgaagtgtctgcttctag

SEQ ID NO: 936891 - DNA, 33 bp, Homo sapien
cctagaaaagggcgcaacatgtacaaacagagg

SEQ ID NO: 936892 - DNA, 33 bp, Homo sapien
cctagaaaagggcgcatcatgtacaaacagagg

SEQ ID NO: 936893 - DNA, 33 bp, Homo sapien
aacagtcacgttgaggaacagtaaatggtttat

SEQ ID NO: 936894 - DNA, 33 bp, Homo sapien
aacagtcacgttgagggacagtaaatggtttat

SEQ ID NO: 936895 - DNA, 33 bp, Homo sapien
ttaattatcagctattcaactttttcttcatga

SEQ ID NO: 936896 - DNA, 33 bp, Homo sapien
ttaattatcagctattgaactttttcttcatga

SEQ ID NO: 936897 - DNA, 33 bp, Homo sapien
ctttttcttcatgacactactagatccctttgt

SEQ ID NO: 936898 - DNA, 33 bp, Homo sapien
ctttttcttcatgacattactagatccctttgt

SEQ ID NO: 936899 - DNA, 33 bp, Homo sapien
aggccaaatgcatcagaactaatgctcttttga

SEQ ID NO: 936900 - DNA, 33 bp, Homo sapien
aggccaaatgcatcaggactaatgctcttttga

SEQ ID NO: 936901 - DNA, 33 bp, Homo sapien
ttccatagacttcaacactcatgaaaaacaata

SEQ ID NO: 936902 - DNA, 33 bp, Homo sapien
ttccatagacttcaaccctcatgaaaaacaata

SEQ ID NO: 936903 - DNA, 33 bp, Homo sapien
aggggccatcaaggcaagagtgaggaggagtgt

SEQ ID NO: 936904 - DNA, 33 bp, Homo sapien
aggggccatcaaggcacgagtgaggaggagtgt

SEQ ID NO: 936905 - DNA, 33 bp, Homo sapien
aataacaggagagtcacagtcatcaatcagaag

SEQ ID NO: 936906 - DNA, 33 bp, Homo sapien
aataacaggagagtcatagtcatcaatcagaag

SEQ ID NO: 936907 - DNA, 33 bp, Homo sapien
tggctttcaaagttcacgttagttatgtggcac

SEQ ID NO: 936908 - DNA, 33 bp, Homo sapien
tggctttcaaagttcaggttagttatgtggcac

SEQ ID NO: 936909 - DNA, 33 bp, Homo sapien
attggctcttacactgccaagctgtgtcttcta

SEQ ID NO: 936910 - DNA, 33 bp, Homo sapien
attggctcttacactggcaagctgtgtcttcta

SEQ ID NO: 936911 - DNA, 33 bp, Homo sapien
gcaccctaacaatggacatgaagtactgactaa

SEQ ID NO: 936912 - DNA, 33 bp, Homo sapien
gcaccctaacaatggatatgaagtactgactaa

SEQ ID NO: 936913 - DNA, 33 bp, Homo sapien
taagtaccatggctcaaattaaaccatcttaga

SEQ ID NO: 936914 - DNA, 33 bp, Homo sapien
taagtaccatggctcacattaaaccatcttaga

SEQ ID NO: 936915 - DNA, 33 bp, Homo sapien
ctgaaattatgaggaaaagatgtggttcaggag

SEQ ID NO: 936916 - DNA, 33 bp, Homo sapien
ctgaaattatgaggaagagatgtggttcaggag

SEQ ID NO: 936917 - DNA, 33 bp, Homo sapien
ctactaccaatacaccaaaatgttagctgggta

SEQ ID NO: 936918 - DNA, 33 bp, Homo sapien
ctactaccaatacaccgaaatgttagctgggta

SEQ ID NO: 936919 - DNA, 33 bp, Homo sapien
agtcaagaaagctgaacaatttgacagatctgc

SEQ ID NO: 936920 - DNA, 33 bp, Homo sapien
agtcaagaaagctgaataatttgacagatctgc

SEQ ID NO: 936921 - DNA, 33 bp, Homo sapien
taaatggcttttctacactgagaagtatacaac

SEQ ID NO: 936922 - DNA, 33 bp, Homo sapien
taaatggcttttctacgctgagaagtatacaac

SEQ ID NO: 936923 - DNA, 33 bp, Homo sapien
agagacagagagggtaagagtcagaccgaagga

SEQ ID NO: 936924 - DNA, 33 bp, Homo sapien
agagacagagagggtaggagtcagaccgaagga

SEQ ID NO: 936925 - DNA, 33 bp, Homo sapien
tgggtaccagagagagcagtgttgctatagtaa

SEQ ID NO: 936926 - DNA, 33 bp, Homo sapien
tgggtaccagagagagtagtgttgctatagtaa

SEQ ID NO: 936927 - DNA, 33 bp, Homo sapien
gccaacagggtgaacactaaatcttaagactcc

SEQ ID NO: 936928 - DNA, 33 bp, Homo sapien
gccaacagggtgaacattaaatcttaagactcc

SEQ ID NO: 936929 - DNA, 33 bp, Homo sapien
ttacatctaggtcaataataaaaaataagcaca

SEQ ID NO: 936930 - DNA, 33 bp, Homo sapien
ttacatctaggtcaatgataaaaaataagcaca

SEQ ID NO: 936931 - DNA, 33 bp, Homo sapien
cagttgatggggttgacggacaggttgaggcat

SEQ ID NO: 936932 - DNA, 33 bp, Homo sapien
cagttgatggggttgatggacaggttgaggcat

SEQ ID NO: 936933 - DNA, 33 bp, Homo sapien
tttaactgcggaagcaacttgggaaaggtacag

SEQ ID NO: 936934 - DNA, 33 bp, Homo sapien
tttaactgcggaagcagcttgggaaaggtacag

SEQ ID NO: 936935 - DNA, 33 bp, Homo sapien
gagtctcaaaggatcacagaattttaactgcgg

SEQ ID NO: 936936 - DNA, 33 bp, Homo sapien
gagtctcaaaggatcagagaattttaactgcgg

SEQ ID NO: 936937 - DNA, 33 bp, Homo sapien
aaggaatactgttatacggctaaacttaaatgt

SEQ ID NO: 936938 - DNA, 33 bp, Homo sapien
aaggaatactgttatatggctaaacttaaatgt

SEQ ID NO: 936939 - DNA, 33 bp, Homo sapien
agctttggcttttagacagaaaactgactgcat

SEQ ID NO: 936940 - DNA, 33 bp, Homo sapien
agctttggcttttagatagaaaactgactgcat

SEQ ID NO: 936941 - DNA, 33 bp, Homo sapien
acactgcagaaatacaatggttatcaagaatgt

SEQ ID NO: 936942 - DNA, 33 bp, Homo sapien
acactgcagaaatacagtggttatcaagaatgt

SEQ ID NO: 936943 - DNA, 33 bp, Homo sapien
taacttggaggtagtacggaaattctcttttat

SEQ ID NO: 936944 - DNA, 33 bp, Homo sapien
taacttggaggtagtatggaaattctcttttat

SEQ ID NO: 936945 - DNA, 33 bp, Homo sapien
attcaaatattgttatcaaagtggtgccaaaaa

SEQ ID NO: 936946 - DNA, 33 bp, Homo sapien
attcaaatattgttatgaaagtggtgccaaaaa

SEQ ID NO: 936947 - DNA, 33 bp, Homo sapien
aaatccagcctgactccagtatagcattacatg

SEQ ID NO: 936948 - DNA, 33 bp, Homo sapien
aaatccagcctgactctagtatagcattacatg

SEQ ID NO: 936949 - DNA, 33 bp, Homo sapien
catgtcataaatacataaatttccaagcagtca

SEQ ID NO: 936950 - DNA, 33 bp, Homo sapien
catgtcataaatacatcaatttccaagcagtca

SEQ ID NO: 936951 - DNA, 33 bp, Homo sapien
tgtaggtggattgtctcaaacccattaccgttg

SEQ ID NO: 936952 - DNA, 33 bp, Homo sapien
tgtaggtggattgtctgaaacccattaccgttg

SEQ ID NO: 936953 - DNA, 33 bp, Homo sapien
atgtccaacttcatggccaaatgtaaactttgg

SEQ ID NO: 936954 - DNA, 33 bp, Homo sapien
atgtccaacttcatggtcaaatgtaaactttgg

SEQ ID NO: 936955 - DNA, 33 bp, Homo sapien
ctggtctctttaacatcagcattccccgtcagt

SEQ ID NO: 936956 - DNA, 33 bp, Homo sapien
ctggtctctttaacatgagcattccccgtcagt

SEQ ID NO: 936957 - DNA, 33 bp, Homo sapien
tgtgaaggcttctagacattagtcctttattct

SEQ ID NO: 936958 - DNA, 33 bp, Homo sapien
tgtgaaggcttctagatattagtcctttattct

SEQ ID NO: 936959 - DNA, 33 bp, Homo sapien
acacacacacacacacactgaactttttagttt

SEQ ID NO: 936960 - DNA, 33 bp, Homo sapien
acacacacacacacactctgaactttttagttt

SEQ ID NO: 936961 - DNA, 33 bp, Homo sapien
gtttgtgcatcttccaatcttaattttagagcc

SEQ ID NO: 936962 - DNA, 33 bp, Homo sapien
gtttgtgcatcttccagtcttaattttagagcc

SEQ ID NO: 936963 - DNA, 33 bp, Homo sapien
cacattctgctcaataaatgtagaaggaagtgc

SEQ ID NO: 936964 - DNA, 33 bp, Homo sapien
cacattctgctcaatacatgtagaaggaagtgc

SEQ ID NO: 936965 - DNA, 33 bp, Homo sapien
aggttgagaggagtaaaccagctgaggaagtga

SEQ ID NO: 936966 - DNA, 33 bp, Homo sapien
aggttgagaggagtaagccagctgaggaagtga

SEQ ID NO: 936967 - DNA, 33 bp, Homo sapien
ttgcctaacatgcagtcacaaagcttctcatgt

SEQ ID NO: 936968 - DNA, 33 bp, Homo sapien
ttgcctaacatgcagttacaaagcttctcatgt

SEQ ID NO: 936969 - DNA, 33 bp, Homo sapien
gatatgaaagatgtgaaacagaacagaaattag

SEQ ID NO: 936970 - DNA, 33 bp, Homo sapien
gatatgaaagatgtgagacagaacagaaattag

SEQ ID NO: 936971 - DNA, 33 bp, Homo sapien
tgaatagactcattcacggggaagtcatgcctt

SEQ ID NO: 936972 - DNA, 33 bp, Homo sapien
tgaatagactcattcatggggaagtcatgcctt

SEQ ID NO: 936973 - DNA, 33 bp, Homo sapien
acaagacatgaagctgaagataaacattcctct

SEQ ID NO: 936974 - DNA, 33 bp, Homo sapien
acaagacatgaagctgtagataaacattcctct

SEQ ID NO: 936975 - DNA, 33 bp, Homo sapien
aggaaaatcatgtcaaagtcaaggaagacagga

SEQ ID NO: 936976 - DNA, 33 bp, Homo sapien
aggaaaatcatgtcaaggtcaaggaagacagga

SEQ ID NO: 936977 - DNA, 33 bp, Homo sapien
gcaacagacgatgtacaacagggattattctcc

SEQ ID NO: 936978 - DNA, 33 bp, Homo sapien
gcaacagacgatgtacgacagggattattctcc

SEQ ID NO: 936979 - DNA, 33 bp, Homo sapien
gcactttcttctcctacgtctgatatgcttcta

SEQ ID NO: 936980 - DNA, 33 bp, Homo sapien
gcactttcttctcctatgtctgatatgcttcta

SEQ ID NO: 936981 - DNA, 33 bp, Homo sapien
ttactggtagctgttacgattattgctattatt

SEQ ID NO: 936982 - DNA, 33 bp, Homo sapien
ttactggtagctgttatgattattgctattatt

SEQ ID NO: 936983 - DNA, 33 bp, Homo sapien
ttttctttctttgcaccgatgtctgactttttt

SEQ ID NO: 936984 - DNA, 33 bp, Homo sapien
ttttctttctttgcactgatgtctgactttttt

SEQ ID NO: 936985 - DNA, 33 bp, Homo sapien
tcacaacaacttatcaaagtagatattatttgc

SEQ ID NO: 936986 - DNA, 33 bp, Homo sapien
tcacaacaacttatcagagtagatattatttgc

SEQ ID NO: 936987 - DNA, 33 bp, Homo sapien
cctgcttgaccagaagaagaaattgactcaact

SEQ ID NO: 936988 - DNA, 33 bp, Homo sapien
cctgcttgaccagaagtagaaattgactcaact

SEQ ID NO: 936989 - DNA, 33 bp, Homo sapien
gtaaagttttctgtgaacggttggtgcatctct

SEQ ID NO: 936990 - DNA, 33 bp, Homo sapien
gtaaagttttctgtgagcggttggtgcatctct

SEQ ID NO: 936991 - DNA, 33 bp, Homo sapien
ggtgattttctttaaactggtacttatgtagtg

SEQ ID NO: 936992 - DNA, 33 bp, Homo sapien
ggtgattttctttaaattggtacttatgtagtg

SEQ ID NO: 936993 - DNA, 33 bp, Homo sapien
ttcactttatctgcaacgtggcctaacctggag

SEQ ID NO: 936994 - DNA, 33 bp, Homo sapien
ttcactttatctgcaatgtggcctaacctggag

SEQ ID NO: 936995 - DNA, 33 bp, Homo sapien
ttatttttagtacagacggtttcaacatgttgg

SEQ ID NO: 936996 - DNA, 33 bp, Homo sapien
ttatttttagtacagatggtttcaacatgttgg

SEQ ID NO: 936997 - DNA, 33 bp, Homo sapien
atgataagcgcgcaaacggttgtggagtgaaga

SEQ ID NO: 936998 - DNA, 33 bp, Homo sapien
atgataagcgcgcaaatggttgtggagtgaaga

SEQ ID NO: 936999 - DNA, 33 bp, Homo sapien
caagtttagtgaaatacgggaacatgtacagag

SEQ ID NO: 937000 - DNA, 33 bp, Homo sapien
caagtttagtgaaatatgggaacatgtacagag

SEQ ID NO: 937001 - DNA, 33 bp, Homo sapien
attaggtgcaacccacaactatctgccatgctg

SEQ ID NO: 937002 - DNA, 33 bp, Homo sapien
attaggtgcaacccaccactatctgccatgctg

SEQ ID NO: 937003 - DNA, 33 bp, Homo sapien
aaggggaaggtgtccactaggttcatataaaat

SEQ ID NO: 937004 - DNA, 33 bp, Homo sapien
aaggggaaggtgtccattaggttcatataaaat

SEQ ID NO: 937005 - DNA, 33 bp, Homo sapien
tgggcttctccactaaccctgcatattctggcc

SEQ ID NO: 937006 - DNA, 33 bp, Homo sapien
tgggcttctccactaatcctgcatattctggcc

SEQ ID NO: 937007 - DNA, 33 bp, Homo sapien
tcttggactcggtataccatcataaacagcatt

SEQ ID NO: 937008 - DNA, 33 bp, Homo sapien
tcttggactcggtatagcatcataaacagcatt

SEQ ID NO: 937009 - DNA, 33 bp, Homo sapien
cagggctgcaatccacaacttttgattcttggc

SEQ ID NO: 937010 - DNA, 33 bp, Homo sapien
cagggctgcaatccacgacttttgattcttggc

SEQ ID NO: 937011 - DNA, 33 bp, Homo sapien
ccagttactccatcccaaagccagaactggagt

SEQ ID NO: 937012 - DNA, 33 bp, Homo sapien
ccagttactccatcccgaagccagaactggagt

SEQ ID NO: 937013 - DNA, 33 bp, Homo sapien
caatgttctaaatcaccccgactcactgtgaag

SEQ ID NO: 937014 - DNA, 33 bp, Homo sapien
caatgttctaaatcactccgactcactgtgaag

SEQ ID NO: 937015 - DNA, 33 bp, Homo sapien
gcatgaataagagataggtttgcatgtgtaatg

SEQ ID NO: 937016 - DNA, 33 bp, Homo sapien
gcatgaataagagatatgtttgcatgtgtaatg

SEQ ID NO: 937017 - DNA, 33 bp, Homo sapien
ttgatcaacgcccttgaagacaatgaaagtcct

SEQ ID NO: 937018 - DNA, 33 bp, Homo sapien
ttgatcaacgcccttgcagacaatgaaagtcct

SEQ ID NO: 937019 - DNA, 33 bp, Homo sapien
caatctacattctaacacatattcagcaacccc

SEQ ID NO: 937020 - DNA, 33 bp, Homo sapien
caatctacattctaacgcatattcagcaacccc

SEQ ID NO: 937021 - DNA, 33 bp, Homo sapien
tcccacctccttttgacgacttctccttgcttt

SEQ ID NO: 937022 - DNA, 33 bp, Homo sapien
tcccacctccttttgatgacttctccttgcttt

SEQ ID NO: 937023 - DNA, 33 bp, Homo sapien
ggaaagagatataataaaatgttcacagtgatc

SEQ ID NO: 937024 - DNA, 33 bp, Homo sapien
ggaaagagatataatagaatgttcacagtgatc

SEQ ID NO: 937025 - DNA, 33 bp, Homo sapien
tgactaaatgagaaaacgtgtctaaagtgctta

SEQ ID NO: 937026 - DNA, 33 bp, Homo sapien
tgactaaatgagaaaatgtgtctaaagtgctta

SEQ ID NO: 937027 - DNA, 33 bp, Homo sapien
cactttgaagtatgacagacctgggttcgacta

SEQ ID NO: 937028 - DNA, 33 bp, Homo sapien
cactttgaagtatgacggacctgggttcgacta

SEQ ID NO: 937029 - DNA, 33 bp, Homo sapien
tagaagaaaaaatgaactctgactcatatacag

SEQ ID NO: 937030 - DNA, 33 bp, Homo sapien
tagaagaaaaaatgaattctgactcatatacag

SEQ ID NO: 937031 - DNA, 33 bp, Homo sapien
ggctttaagtagaagaaaagtacattgataaca

SEQ ID NO: 937032 - DNA, 33 bp, Homo sapien
ggctttaagtagaagagaagtacattgataaca

SEQ ID NO: 937033 - DNA, 33 bp, Homo sapien
acagcaatcgtttctgaagcctgatttggataa

SEQ ID NO: 937034 - DNA, 33 bp, Homo sapien
acagcaatcgtttctggagcctgatttggataa

SEQ ID NO: 937035 - DNA, 33 bp, Homo sapien
gtttctattatctgacaaaatgcctagtgactg

SEQ ID NO: 937036 - DNA, 33 bp, Homo sapien
gtttctattatctgacgaaatgcctagtgactg

SEQ ID NO: 937037 - DNA, 33 bp, Homo sapien
ccagtagaagaaagacaatcagtcatacagata

SEQ ID NO: 937038 - DNA, 33 bp, Homo sapien
ccagtagaagaaagaccatcagtcatacagata

SEQ ID NO: 937039 - DNA, 33 bp, Homo sapien
ttctttctccagaatacggctaaagcttgtaag

SEQ ID NO: 937040 - DNA, 33 bp, Homo sapien
ttctttctccagaatatggctaaagcttgtaag

SEQ ID NO: 937041 - DNA, 33 bp, Homo sapien
tgcactaaaatcactcgcaaagattgtaactct

SEQ ID NO: 937042 - DNA, 33 bp, Homo sapien
tgcactaaaatcactctcaaagattgtaactct

SEQ ID NO: 937043 - DNA, 33 bp, Homo sapien
cagttacctgggcaagaaacaacccgctctgcc

SEQ ID NO: 937044 - DNA, 33 bp, Homo sapien
cagttacctgggcaagtaacaacccgctctgcc

SEQ ID NO: 937045 - DNA, 33 bp, Homo sapien
tccctctacaaacagaagttctaatggaagtaa

SEQ ID NO: 937046 - DNA, 33 bp, Homo sapien
tccctctacaaacagacgttctaatggaagtaa

SEQ ID NO: 937047 - DNA, 33 bp, Homo sapien
aaaagctaggaatccacaccttaaacacacaca

SEQ ID NO: 937048 - DNA, 33 bp, Homo sapien
aaaagctaggaatccataccttaaacacacaca

SEQ ID NO: 937049 - DNA, 33 bp, Homo sapien
tgctagtccagggttgaagctctgttcctgatc

SEQ ID NO: 937050 - DNA, 33 bp, Homo sapien
tgctagtccagggttgcagctctgttcctgatc

SEQ ID NO: 937051 - DNA, 33 bp, Homo sapien
agaagaaatacctaaacggcgtgggttctcctg

SEQ ID NO: 937052 - DNA, 33 bp, Homo sapien
agaagaaatacctaaatggcgtgggttctcctg

SEQ ID NO: 937053 - DNA, 33 bp, Homo sapien
gaccttgtgtcttacacgtggagcttaaagctt

SEQ ID NO: 937054 - DNA, 33 bp, Homo sapien
gaccttgtgtcttacatgtggagcttaaagctt

SEQ ID NO: 937055 - DNA, 33 bp, Homo sapien
acacaaggtcctgcctaaatcagtatgcttcta

SEQ ID NO: 937056 - DNA, 33 bp, Homo sapien
acacaaggtcctgcctgaatcagtatgcttcta

SEQ ID NO: 937057 - DNA, 33 bp, Homo sapien
ctaagccctcactgcaacaagggataaacccaa

SEQ ID NO: 937058 - DNA, 33 bp, Homo sapien
ctaagccctcactgcagcaagggataaacccaa

SEQ ID NO: 937059 - DNA, 33 bp, Homo sapien
caggccttttaagagaaccctctgtgaccctag

SEQ ID NO: 937060 - DNA, 33 bp, Homo sapien
caggccttttaagagatccctctgtgaccctag

SEQ ID NO: 937061 - DNA, 33 bp, Homo sapien
atagccaagcatgcaaatgtttactttaatagt

SEQ ID NO: 937062 - DNA, 33 bp, Homo sapien
atagccaagcatgcaagtgtttactttaatagt

SEQ ID NO: 937063 - DNA, 33 bp, Homo sapien
tccttcctctacacaactgacgtggcccccatg

SEQ ID NO: 937064 - DNA, 33 bp, Homo sapien
tccttcctctacacaattgacgtggcccccatg

SEQ ID NO: 937065 - DNA, 33 bp, Homo sapien
acaagattgtttgacccacttaagagtctggac

SEQ ID NO: 937066 - DNA, 33 bp, Homo sapien
acaagattgtttgacctacttaagagtctggac

SEQ ID NO: 937067 - DNA, 33 bp, Homo sapien
gctaactgatggcatcactcaactttcaaatac

SEQ ID NO: 937068 - DNA, 33 bp, Homo sapien
gctaactgatggcatcgctcaactttcaaatac

SEQ ID NO: 937069 - DNA, 33 bp, Homo sapien
ctagttacatgacctgaaaaacagaggaaccag

SEQ ID NO: 937070 - DNA, 33 bp, Homo sapien
ctagttacatgacctggaaaacagaggaaccag

SEQ ID NO: 937071 - DNA, 33 bp, Homo sapien
gctccttgttagtatacggtggaactatgagat

SEQ ID NO: 937072 - DNA, 33 bp, Homo sapien
gctccttgttagtatatggtggaactatgagat

SEQ ID NO: 937073 - DNA, 33 bp, Homo sapien
actgatcagcctgctgcaaatagattagtttca

SEQ ID NO: 937074 - DNA, 33 bp, Homo sapien
actgatcagcctgctgtaaatagattagtttca

SEQ ID NO: 937075 - DNA, 33 bp, Homo sapien
agcgtgatttgtgacccaagacctatgctttgc

SEQ ID NO: 937076 - DNA, 33 bp, Homo sapien
agcgtgatttgtgacctaagacctatgctttgc

SEQ ID NO: 937077 - DNA, 33 bp, Homo sapien
ttagaaagaagctgaacactaatgcagtgtcgt

SEQ ID NO: 937078 - DNA, 33 bp, Homo sapien
ttagaaagaagctgaatactaatgcagtgtcgt

SEQ ID NO: 937079 - DNA, 33 bp, Homo sapien
aaactgaagctctaaaaatgtgacccagtgcat

SEQ ID NO: 937080 - DNA, 33 bp, Homo sapien
aaactgaagctctaaagatgtgacccagtgcat

SEQ ID NO: 937081 - DNA, 33 bp, Homo sapien
tggttcctcaaatttccctcatagcacactgtg

SEQ ID NO: 937082 - DNA, 33 bp, Homo sapien
tggttcctcaaatttctctcatagcacactgtg

SEQ ID NO: 937083 - DNA, 33 bp, Homo sapien
cattgtaatgcacaaaacagctcacatatgtgg

SEQ ID NO: 937084 - DNA, 33 bp, Homo sapien
cattgtaatgcacaaagcagctcacatatgtgg

SEQ ID NO: 937085 - DNA, 33 bp, Homo sapien
cgatcaatgtcctagtcaagccaagacatctat

SEQ ID NO: 937086 - DNA, 33 bp, Homo sapien
cgatcaatgtcctagttaagccaagacatctat

SEQ ID NO: 937087 - DNA, 33 bp, Homo sapien
attataaagtcattcaagtgttgcatatgaacg

SEQ ID NO: 937088 - DNA, 33 bp, Homo sapien
attataaagtcattcaggtgttgcatatgaacg

SEQ ID NO: 937089 - DNA, 33 bp, Homo sapien
atatgaacgcaatgataaagaagaacaaattac

SEQ ID NO: 937090 - DNA, 33 bp, Homo sapien
atatgaacgcaatgatgaagaagaacaaattac

SEQ ID NO: 937091 - DNA, 33 bp, Homo sapien
tttgtcatttcaaaaacgttgcataaatgggat

SEQ ID NO: 937092 - DNA, 33 bp, Homo sapien
tttgtcatttcaaaaatgttgcataaatgggat

SEQ ID NO: 937093 - DNA, 33 bp, Homo sapien
aataattaatacatcacaacctgcaaacatact

SEQ ID NO: 937094 - DNA, 33 bp, Homo sapien
aataattaatacatcataacctgcaaacatact

SEQ ID NO: 937095 - DNA, 33 bp, Homo sapien
ttgagggtcaggctcaatacaggctctgtgtca

SEQ ID NO: 937096 - DNA, 33 bp, Homo sapien
ttgagggtcaggctcagtacaggctctgtgtca

SEQ ID NO: 937097 - DNA, 33 bp, Homo sapien
gaggacaaatctgttccgaaaactcccatcaag

SEQ ID NO: 937098 - DNA, 33 bp, Homo sapien
gaggacaaatctgttcggaaaactcccatcaag

SEQ ID NO: 937099 - DNA, 33 bp, Homo sapien
gtgttttcatcagttaaaacccatcagctttaa

SEQ ID NO: 937100 - DNA, 33 bp, Homo sapien
gtgttttcatcagttagaacccatcagctttaa

SEQ ID NO: 937101 - DNA, 33 bp, Homo sapien
gtgtctttaactggcacaatttcacgggataat

SEQ ID NO: 937102 - DNA, 33 bp, Homo sapien
gtgtctttaactggcagaatttcacgggataat

SEQ ID NO: 937103 - DNA, 33 bp, Homo sapien
gcccaagctcctaagaaaggatgcgcccttcca

SEQ ID NO: 937104 - DNA, 33 bp, Homo sapien
gcccaagctcctaagagaggatgcgcccttcca

SEQ ID NO: 937105 - DNA, 33 bp, Homo sapien
aggtcatacatactaacctgagaatgcaatagt

SEQ ID NO: 937106 - DNA, 33 bp, Homo sapien
aggtcatacatactaagctgagaatgcaatagt

SEQ ID NO: 937107 - DNA, 33 bp, Homo sapien
ttattgtcctaattggaaattatcttgaagccg

SEQ ID NO: 937108 - DNA, 33 bp, Homo sapien
ttattgtcctaattgggaattatcttgaagccg

SEQ ID NO: 937109 - DNA, 33 bp, Homo sapien
ttagattgtaagcaaaaaaattgtccaaacatc

SEQ ID NO: 937110 - DNA, 33 bp, Homo sapien
ttagattgtaagcaaagaaattgtccaaacatc

SEQ ID NO: 937111 - DNA, 33 bp, Homo sapien
ctggagctttcaatcaacccaagacaaaaatct

SEQ ID NO: 937112 - DNA, 33 bp, Homo sapien
ctggagctttcaatcagcccaagacaaaaatct

SEQ ID NO: 937113 - DNA, 33 bp, Homo sapien
gttaacaatctacataaagcaactgggattaaa

SEQ ID NO: 937114 - DNA, 33 bp, Homo sapien
gttaacaatctacatagagcaactgggattaaa

SEQ ID NO: 937115 - DNA, 33 bp, Homo sapien
ctctgcaatggaatgacggtcagaaaagaacag

SEQ ID NO: 937116 - DNA, 33 bp, Homo sapien
ctctgcaatggaatgatggtcagaaaagaacag

SEQ ID NO: 937117 - DNA, 33 bp, Homo sapien
gctttcccaagttagacctgtggtagttcaggt

SEQ ID NO: 937118 - DNA, 33 bp, Homo sapien
gctttcccaagttagatctgtggtagttcaggt

SEQ ID NO: 937119 - DNA, 33 bp, Homo sapien
ttcactgcatttaatcaattcagaggatttctt

SEQ ID NO: 937120 - DNA, 33 bp, Homo sapien
ttcactgcatttaatcgattcagaggatttctt

SEQ ID NO: 937121 - DNA, 33 bp, Homo sapien
agtatagaaatgttctaactttcacattcccgg

SEQ ID NO: 937122 - DNA, 33 bp, Homo sapien
agtatagaaatgttctgactttcacattcccgg

SEQ ID NO: 937123 - DNA, 33 bp, Homo sapien
agaacatcaaagccacactaatttatttaaaat

SEQ ID NO: 937124 - DNA, 33 bp, Homo sapien
agaacatcaaagccacgctaatttatttaaaat

SEQ ID NO: 937125 - DNA, 33 bp, Homo sapien
gtgctgtggcccacaacggaactttccctttgt

SEQ ID NO: 937126 - DNA, 33 bp, Homo sapien
gtgctgtggcccacaatggaactttccctttgt

SEQ ID NO: 937127 - DNA, 33 bp, Homo sapien
ggtagtggttacgaaactgggaacagagagtgg

SEQ ID NO: 937128 - DNA, 33 bp, Homo sapien
ggtagtggttacgaaattgggaacagagagtgg

SEQ ID NO: 937129 - DNA, 33 bp, Homo sapien
ccacattccccacaccaaatacatccgcagata

SEQ ID NO: 937130 - DNA, 33 bp, Homo sapien
ccacattccccacaccgaatacatccgcagata

SEQ ID NO: 937131 - DNA, 33 bp, Homo sapien
acacattgtttactacacatgacctcaaaaaat

SEQ ID NO: 937132 - DNA, 33 bp, Homo sapien
acacattgtttactacgcatgacctcaaaaaat

SEQ ID NO: 937133 - DNA, 33 bp, Homo sapien
aaaagggagtgttttacggacaacgaggcagca

SEQ ID NO: 937134 - DNA, 33 bp, Homo sapien
aaaagggagtgttttatggacaacgaggcagca

SEQ ID NO: 937135 - DNA, 33 bp, Homo sapien
attagtatgctctatacaaaaggccctgtgctt

SEQ ID NO: 937136 - DNA, 33 bp, Homo sapien
attagtatgctctatataaaaggccctgtgctt

SEQ ID NO: 937137 - DNA, 33 bp, Homo sapien
tatattgcaactgtagcaagtactagttatgtg

SEQ ID NO: 937138 - DNA, 33 bp, Homo sapien
tatattgcaactgtagtaagtactagttatgtg

SEQ ID NO: 937139 - DNA, 33 bp, Homo sapien
cagtaaacccttgtaactgtgcgatcaacttct

SEQ ID NO: 937140 - DNA, 33 bp, Homo sapien
cagtaaacccttgtaattgtgcgatcaacttct

SEQ ID NO: 937141 - DNA, 33 bp, Homo sapien
gaaagcaaacagtctacgctttggcaaggagga

SEQ ID NO: 937142 - DNA, 33 bp, Homo sapien
gaaagcaaacagtctatgctttggcaaggagga

SEQ ID NO: 937143 - DNA, 33 bp, Homo sapien
atttctttagccgtgaagctatctgccattcgt

SEQ ID NO: 937144 - DNA, 33 bp, Homo sapien
atttctttagccgtgatgctatctgccattcgt

SEQ ID NO: 937145 - DNA, 33 bp, Homo sapien
tgttttttcccctgccacgaatttctttcattc

SEQ ID NO: 937146 - DNA, 33 bp, Homo sapien
tgttttttcccctgccgcgaatttctttcattc

SEQ ID NO: 937147 - DNA, 33 bp, Homo sapien
atggggagagccaacacgtagtacagtgtagtc

SEQ ID NO: 937148 - DNA, 33 bp, Homo sapien
atggggagagccaacatgtagtacagtgtagtc

SEQ ID NO: 937149 - DNA, 33 bp, Homo sapien
ctgcatggtagtgctgcaaactttaaagtacat

SEQ ID NO: 937150 - DNA, 33 bp, Homo sapien
ctgcatggtagtgctggaaactttaaagtacat

SEQ ID NO: 937151 - DNA, 33 bp, Homo sapien
ccatttcattgaatgacatttatatgccactta

SEQ ID NO: 937152 - DNA, 33 bp, Homo sapien
ccatttcattgaatgagatttatatgccactta

SEQ ID NO: 937153 - DNA, 33 bp, Homo sapien
gctcaatgggagatgacagaccaacttctcaac

SEQ ID NO: 937154 - DNA, 33 bp, Homo sapien
gctcaatgggagatgatagaccaacttctcaac

SEQ ID NO: 937155 - DNA, 33 bp, Homo sapien
aggtctgatttgggtacgtccatggttaacctc

SEQ ID NO: 937156 - DNA, 33 bp, Homo sapien
aggtctgatttgggtatgtccatggttaacctc

SEQ ID NO: 937157 - DNA, 33 bp, Homo sapien
ctgcagtatgttcagaaagcatcaagcgtcaaa

SEQ ID NO: 937158 - DNA, 33 bp, Homo sapien
ctgcagtatgttcagacagcatcaagcgtcaaa

SEQ ID NO: 937159 - DNA, 33 bp, Homo sapien
gctgatattcaagacaactaaaattcctggcac

SEQ ID NO: 937160 - DNA, 33 bp, Homo sapien
gctgatattcaagacatctaaaattcctggcac

SEQ ID NO: 937161 - DNA, 33 bp, Homo sapien
taggttatactataccacttactaacatcacag

SEQ ID NO: 937162 - DNA, 33 bp, Homo sapien
taggttatactatacctcttactaacatcacag

SEQ ID NO: 937163 - DNA, 33 bp, Homo sapien
ttgtctgatcaccactcagatatgggccaatga

SEQ ID NO: 937164 - DNA, 33 bp, Homo sapien
ttgtctgatcaccacttagatatgggccaatga

SEQ ID NO: 937165 - DNA, 33 bp, Homo sapien
ggcaaggacaaaagaacgtgcacactaggactt

SEQ ID NO: 937166 - DNA, 33 bp, Homo sapien
ggcaaggacaaaagaatgtgcacactaggactt

SEQ ID NO: 937167 - DNA, 33 bp, Homo sapien
gccatggataaagaaagttacacagaaagaaca

SEQ ID NO: 937168 - DNA, 33 bp, Homo sapien
gccatggataaagaaatttacacagaaagaaca

SEQ ID NO: 937169 - DNA, 33 bp, Homo sapien
ttactagaattatgctcatattacaggtgagga

SEQ ID NO: 937170 - DNA, 33 bp, Homo sapien
ttactagaattatgctgatattacaggtgagga

SEQ ID NO: 937171 - DNA, 33 bp, Homo sapien
taaatattagatagcagcagggcagcacacaat

SEQ ID NO: 937172 - DNA, 33 bp, Homo sapien
taaatattagatagcatcagggcagcacacaat

SEQ ID NO: 937173 - DNA, 33 bp, Homo sapien
ccattctctgggtacaaagttcagcataatttt

SEQ ID NO: 937174 - DNA, 33 bp, Homo sapien
ccattctctgggtacacagttcagcataatttt

SEQ ID NO: 937175 - DNA, 33 bp, Homo sapien
gaacccagggatctgacgccaggaaccagactc

SEQ ID NO: 937176 - DNA, 33 bp, Homo sapien
gaacccagggatctgatgccaggaaccagactc

SEQ ID NO: 937177 - DNA, 33 bp, Homo sapien
attatcccacttttacagatgaagaaactgagg

SEQ ID NO: 937178 - DNA, 33 bp, Homo sapien
attatcccacttttacggatgaagaaactgagg

SEQ ID NO: 937179 - DNA, 33 bp, Homo sapien
ttgccagtttaatttcaagagccccagctggag

SEQ ID NO: 937180 - DNA, 33 bp, Homo sapien
ttgccagtttaatttccagagccccagctggag

SEQ ID NO: 937181 - DNA, 33 bp, Homo sapien
aacattctgaaattccactaccaaacattgaat

SEQ ID NO: 937182 - DNA, 33 bp, Homo sapien
aacattctgaaattccgctaccaaacattgaat

SEQ ID NO: 937183 - DNA, 33 bp, Homo sapien
ctgcatacagttttaaacccaaacgagatagtc

SEQ ID NO: 937184 - DNA, 33 bp, Homo sapien
ctgcatacagttttaaccccaaacgagatagtc

SEQ ID NO: 937185 - DNA, 33 bp, Homo sapien
ccttaaggacttcaaactgacacagaagcctca

SEQ ID NO: 937186 - DNA, 33 bp, Homo sapien
ccttaaggacttcaaagtgacacagaagcctca

SEQ ID NO: 937187 - DNA, 33 bp, Homo sapien
gttgatgtcacagagcaagtatgggcaagaaca

SEQ ID NO: 937188 - DNA, 33 bp, Homo sapien
gttgatgtcacagagcgagtatgggcaagaaca

SEQ ID NO: 937189 - DNA, 33 bp, Homo sapien
aaaattatttacttacaaacatatcactttgtc

SEQ ID NO: 937190 - DNA, 33 bp, Homo sapien
aaaattatttacttacgaacatatcactttgtc

SEQ ID NO: 937191 - DNA, 33 bp, Homo sapien
aggtcagtgtgtcagacgtggcccttcacacac

SEQ ID NO: 937192 - DNA, 33 bp, Homo sapien
aggtcagtgtgtcagatgtggcccttcacacac

SEQ ID NO: 937193 - DNA, 33 bp, Homo sapien
ttctatggtcagtcaccgtaatttattcctttc

SEQ ID NO: 937194 - DNA, 33 bp, Homo sapien
ttctatggtcagtcactgtaatttattcctttc

SEQ ID NO: 937195 - DNA, 33 bp, Homo sapien
ctataaagtgacatacacactcctaaaaatcaa

SEQ ID NO: 937196 - DNA, 33 bp, Homo sapien
ctataaagtgacatacgcactcctaaaaatcaa

SEQ ID NO: 937197 - DNA, 33 bp, Homo sapien
tacagacattggtgagcacagcttaggccatgg

SEQ ID NO: 937198 - DNA, 33 bp, Homo sapien
tacagacattggtgaggacagcttaggccatgg

SEQ ID NO: 937199 - DNA, 33 bp, Homo sapien
catatcttgatacagactagagccacatatatt

SEQ ID NO: 937200 - DNA, 33 bp, Homo sapien
catatcttgatacagattagagccacatatatt

SEQ ID NO: 937201 - DNA, 33 bp, Homo sapien
ttgtatctatgttcaaaaatgaaattggcatca

SEQ ID NO: 937202 - DNA, 33 bp, Homo sapien
ttgtatctatgttcaagaatgaaattggcatca

SEQ ID NO: 937203 - DNA, 33 bp, Homo sapien
tcatttaccaaactagacaactaattacagtta

SEQ ID NO: 937204 - DNA, 33 bp, Homo sapien
tcatttaccaaactaggcaactaattacagtta

SEQ ID NO: 937205 - DNA, 33 bp, Homo sapien
tgaaccatttttgggcacactagttcctgaggg

SEQ ID NO: 937206 - DNA, 33 bp, Homo sapien
tgaaccatttttgggcgcactagttcctgaggg

SEQ ID NO: 937207 - DNA, 33 bp, Homo sapien
tctcaaggtcactttcaagttgggttctagcac

SEQ ID NO: 937208 - DNA, 33 bp, Homo sapien
tctcaaggtcactttcgagttgggttctagcac

SEQ ID NO: 937209 - DNA, 33 bp, Homo sapien
aggcattttagatgacagcattgcgggatctcg

SEQ ID NO: 937210 - DNA, 33 bp, Homo sapien
aggcattttagatgacggcattgcgggatctcg

SEQ ID NO: 937211 - DNA, 33 bp, Homo sapien
tccgaaatggcatttgaacgaagaattcccata

SEQ ID NO: 937212 - DNA, 33 bp, Homo sapien
tccgaaatggcatttgcacgaagaattcccata

SEQ ID NO: 937213 - DNA, 33 bp, Homo sapien
gaatctaagagtcacacctctaaatttgtgtag

SEQ ID NO: 937214 - DNA, 33 bp, Homo sapien
gaatctaagagtcacatctctaaatttgtgtag

SEQ ID NO: 937215 - DNA, 33 bp, Homo sapien
aaataatatcataaataacagtgtgtttcagtt

SEQ ID NO: 937216 - DNA, 33 bp, Homo sapien
aaataatatcataaatgacagtgtgtttcagtt

SEQ ID NO: 937217 - DNA, 33 bp, Homo sapien
ctgcatttcaaactggcaggatttcccctcctg

SEQ ID NO: 937218 - DNA, 33 bp, Homo sapien
ctgcatttcaaactggtaggatttcccctcctg

SEQ ID NO: 937219 - DNA, 33 bp, Homo sapien
ttgagcggtttcaggaaaatatcagaactggct

SEQ ID NO: 937220 - DNA, 33 bp, Homo sapien
ttgagcggtttcaggacaatatcagaactggct

SEQ ID NO: 937221 - DNA, 33 bp, Homo sapien
acatagaaggtagcgaaaaagatggtggtgtga

SEQ ID NO: 937222 - DNA, 33 bp, Homo sapien
acatagaaggtagcgagaaagatggtggtgtga

SEQ ID NO: 937223 - DNA, 33 bp, Homo sapien
ttaccttgcggtttgaactctgggacgtgggac

SEQ ID NO: 937224 - DNA, 33 bp, Homo sapien
ttaccttgcggtttgagctctgggacgtgggac

SEQ ID NO: 937225 - DNA, 33 bp, Homo sapien
gaatatcctaacaatcaaactctgtgccaggaa

SEQ ID NO: 937226 - DNA, 33 bp, Homo sapien
gaatatcctaacaatcgaactctgtgccaggaa

SEQ ID NO: 937227 - DNA, 33 bp, Homo sapien
gtctgcggccattatgaataaagctaaccacag

SEQ ID NO: 937228 - DNA, 33 bp, Homo sapien
gtctgcggccattatggataaagctaaccacag

SEQ ID NO: 937229 - DNA, 33 bp, Homo sapien
ttgcttatctgttcaccagttgttggacattcg

SEQ ID NO: 937230 - DNA, 33 bp, Homo sapien
ttgcttatctgttcactagttgttggacattcg

SEQ ID NO: 937231 - DNA, 33 bp, Homo sapien
aacaacacgaatttcaaaagcattatgccaagt

SEQ ID NO: 937232 - DNA, 33 bp, Homo sapien
aacaacacgaatttcagaagcattatgccaagt

SEQ ID NO: 937233 - DNA, 33 bp, Homo sapien
ggagctgcgtggagataaaagggaatgagagct

SEQ ID NO: 937234 - DNA, 33 bp, Homo sapien
ggagctgcgtggagatgaaagggaatgagagct

SEQ ID NO: 937235 - DNA, 33 bp, Homo sapien
cacatcaaaactgttacgtaggatcatcacaat

SEQ ID NO: 937236 - DNA, 33 bp, Homo sapien
cacatcaaaactgttatgtaggatcatcacaat

SEQ ID NO: 937237 - DNA, 33 bp, Homo sapien
tgggccatcttggtcaagtcactatccattgag

SEQ ID NO: 937238 - DNA, 33 bp, Homo sapien
tgggccatcttggtcacgtcactatccattgag

SEQ ID NO: 937239 - DNA, 33 bp, Homo sapien
ctcttcccccgcctcaaacagaaggaaggagtc

SEQ ID NO: 937240 - DNA, 33 bp, Homo sapien
ctcttcccccgcctcagacagaaggaaggagtc

SEQ ID NO: 937241 - DNA, 33 bp, Homo sapien
atatatctgcgtgttcaagtgttgggtgcatat

SEQ ID NO: 937242 - DNA, 33 bp, Homo sapien
atatatctgcgtgttcgagtgttgggtgcatat

SEQ ID NO: 937243 - DNA, 33 bp, Homo sapien
agcgcaaagtgaattaacaggatggttctcaaa

SEQ ID NO: 937244 - DNA, 33 bp, Homo sapien
agcgcaaagtgaattagcaggatggttctcaaa

SEQ ID NO: 937245 - DNA, 33 bp, Homo sapien
tatgaaacagtctgaaattcaaaagacttctgg

SEQ ID NO: 937246 - DNA, 33 bp, Homo sapien
tatgaaacagtctgaagttcaaaagacttctgg

SEQ ID NO: 937247 - DNA, 33 bp, Homo sapien
acaaattgcaaacagccaatatggaaatgcgtg

SEQ ID NO: 937248 - DNA, 33 bp, Homo sapien
acaaattgcaaacagctaatatggaaatgcgtg

SEQ ID NO: 937249 - DNA, 33 bp, Homo sapien
tcctaagatgtttataagagaaaattctgtact

SEQ ID NO: 937250 - DNA, 33 bp, Homo sapien
tcctaagatgtttataggagaaaattctgtact

SEQ ID NO: 937251 - DNA, 33 bp, Homo sapien
cataagatatgaaaccaacagtaaaacaattta

SEQ ID NO: 937252 - DNA, 33 bp, Homo sapien
cataagatatgaaaccgacagtaaaacaattta

SEQ ID NO: 937253 - DNA, 33 bp, Homo sapien
tgatcaaaagggatagaacatcgagcaaaagtt

SEQ ID NO: 937254 - DNA, 33 bp, Homo sapien
tgatcaaaagggataggacatcgagcaaaagtt

SEQ ID NO: 937255 - DNA, 33 bp, Homo sapien
gtagatgctgaactccaggaaggcagtctgttg

SEQ ID NO: 937256 - DNA, 33 bp, Homo sapien
gtagatgctgaactccgggaaggcagtctgttg

SEQ ID NO: 937257 - DNA, 33 bp, Homo sapien
cctactctcccaggaaagcaactgctaaaggat

SEQ ID NO: 937258 - DNA, 33 bp, Homo sapien
cctactctcccaggaaggcaactgctaaaggat

SEQ ID NO: 937259 - DNA, 33 bp, Homo sapien
gacgtctatactgtgaacccagggaaatttgca

SEQ ID NO: 937260 - DNA, 33 bp, Homo sapien
gacgtctatactgtgaccccagggaaatttgca

SEQ ID NO: 937261 - DNA, 33 bp, Homo sapien
agccatgtaaaaaccggatcatctcttgagaca

SEQ ID NO: 937262 - DNA, 33 bp, Homo sapien
agccatgtaaaaaccgtatcatctcttgagaca

SEQ ID NO: 937263 - DNA, 33 bp, Homo sapien
taggtcattccttagaatctaaatccaggatat

SEQ ID NO: 937264 - DNA, 33 bp, Homo sapien
taggtcattccttagagtctaaatccaggatat

SEQ ID NO: 937265 - DNA, 33 bp, Homo sapien
cttttatgcactgaaaaaaattttgcatatcca

SEQ ID NO: 937266 - DNA, 33 bp, Homo sapien
cttttatgcactgaaacaaattttgcatatcca

SEQ ID NO: 937267 - DNA, 33 bp, Homo sapien
aaatgtgggctaattaaaggattttgatttagt

SEQ ID NO: 937268 - DNA, 33 bp, Homo sapien
aaatgtgggctaattagaggattttgatttagt

SEQ ID NO: 937269 - DNA, 33 bp, Homo sapien
tgccttccattgtcgccgccttcctttggccac

SEQ ID NO: 937270 - DNA, 33 bp, Homo sapien
tgccttccattgtcgctgccttcctttggccac

SEQ ID NO: 937271 - DNA, 33 bp, Homo sapien
cgtttctaagtaaagcacactgttccaagctta

SEQ ID NO: 937272 - DNA, 33 bp, Homo sapien
cgtttctaagtaaagcccactgttccaagctta

SEQ ID NO: 937273 - DNA, 33 bp, Homo sapien
tacgttccaactagataaaaggacagcattata

SEQ ID NO: 937274 - DNA, 33 bp, Homo sapien
tacgttccaactagatgaaaggacagcattata

SEQ ID NO: 937275 - DNA, 33 bp, Homo sapien
tctttgcttcttttgacgggtcactttgccatg

SEQ ID NO: 937276 - DNA, 33 bp, Homo sapien
tctttgcttcttttgatgggtcactttgccatg

SEQ ID NO: 937277 - DNA, 33 bp, Homo sapien
tccctagacgagaaaaactaaatgtggctagaa

SEQ ID NO: 937278 - DNA, 33 bp, Homo sapien
tccctagacgagaaaagctaaatgtggctagaa

SEQ ID NO: 937279 - DNA, 33 bp, Homo sapien
agatgattttactctaagcagttatatgtccat

SEQ ID NO: 937280 - DNA, 33 bp, Homo sapien
agatgattttactctaggcagttatatgtccat

SEQ ID NO: 937281 - DNA, 33 bp, Homo sapien
ggagatctctgaataccgcctcatgaatagact

SEQ ID NO: 937282 - DNA, 33 bp, Homo sapien
ggagatctctgaatactgcctcatgaatagact

SEQ ID NO: 937283 - DNA, 33 bp, Homo sapien
attctattctgtcttaacttttgtttgattggc

SEQ ID NO: 937284 - DNA, 33 bp, Homo sapien
attctattctgtcttaccttttgtttgattggc

SEQ ID NO: 937285 - DNA, 33 bp, Homo sapien
aaagtgggaaggctaacaaaatgttgatagaag

SEQ ID NO: 937286 - DNA, 33 bp, Homo sapien
aaagtgggaaggctaataaaatgttgatagaag

SEQ ID NO: 937287 - DNA, 33 bp, Homo sapien
aatatttgggtaggcaacatctctttacaatat

SEQ ID NO: 937288 - DNA, 33 bp, Homo sapien
aatatttgggtaggcagcatctctttacaatat

SEQ ID NO: 937289 - DNA, 33 bp, Homo sapien
cagaataatcatcacaagtagtaagcactcaaa

SEQ ID NO: 937290 - DNA, 33 bp, Homo sapien
cagaataatcatcacaggtagtaagcactcaaa

SEQ ID NO: 937291 - DNA, 33 bp, Homo sapien
agcataatgaacagcaatcgccttcaagaagtc

SEQ ID NO: 937292 - DNA, 33 bp, Homo sapien
agcataatgaacagcattcgccttcaagaagtc

SEQ ID NO: 937293 - DNA, 33 bp, Homo sapien
ttgagatgctaaaataaggaagatattccagaa

SEQ ID NO: 937294 - DNA, 33 bp, Homo sapien
ttgagatgctaaaatacggaagatattccagaa

SEQ ID NO: 937295 - DNA, 33 bp, Homo sapien
ttgagaagagataatacctgtgaaacttgaaca

SEQ ID NO: 937296 - DNA, 33 bp, Homo sapien
ttgagaagagataatatctgtgaaacttgaaca

SEQ ID NO: 937297 - DNA, 33 bp, Homo sapien
tgcaaagagcctgaaaataatctagctgcagaa

SEQ ID NO: 937298 - DNA, 33 bp, Homo sapien
tgcaaagagcctgaaagtaatctagctgcagaa

SEQ ID NO: 937299 - DNA, 33 bp, Homo sapien
agtgtatcatcttaaacggcacttccggcagcc

SEQ ID NO: 937300 - DNA, 33 bp, Homo sapien
agtgtatcatcttaaatggcacttccggcagcc

SEQ ID NO: 937301 - DNA, 33 bp, Homo sapien
aaaattcaagtaggtaataagagccaagtggtg

SEQ ID NO: 937302 - DNA, 33 bp, Homo sapien
aaaattcaagtaggtagtaagagccaagtggtg

SEQ ID NO: 937303 - DNA, 33 bp, Homo sapien
ggaaattgagttttctcacacaaatcgcaccac

SEQ ID NO: 937304 - DNA, 33 bp, Homo sapien
ggaaattgagttttctgacacaaatcgcaccac

SEQ ID NO: 937305 - DNA, 33 bp, Homo sapien
atataagcactctcaccgagtttagtaagaaat

SEQ ID NO: 937306 - DNA, 33 bp, Homo sapien
atataagcactctcactgagtttagtaagaaat

SEQ ID NO: 937307 - DNA, 33 bp, Homo sapien
aggcatgttttcaattcaacctgatctgagcct

SEQ ID NO: 937308 - DNA, 33 bp, Homo sapien
aggcatgttttcaatttaacctgatctgagcct

SEQ ID NO: 937309 - DNA, 33 bp, Homo sapien
acactcttgggctacccgacttccagactattt

SEQ ID NO: 937310 - DNA, 33 bp, Homo sapien
acactcttgggctacctgacttccagactattt

SEQ ID NO: 937311 - DNA, 33 bp, Homo sapien
agaggtggttctgtgccataagggttccagggc

SEQ ID NO: 937312 - DNA, 33 bp, Homo sapien
agaggtggttctgtgctataagggttccagggc

SEQ ID NO: 937313 - DNA, 33 bp, Homo sapien
tgtcacaccagtaaaccgaactgggcacagcaa

SEQ ID NO: 937314 - DNA, 33 bp, Homo sapien
tgtcacaccagtaaactgaactgggcacagcaa

SEQ ID NO: 937315 - DNA, 33 bp, Homo sapien
gttacttgcaagcagacggatgggaagattgga

SEQ ID NO: 937316 - DNA, 33 bp, Homo sapien
gttacttgcaagcagatggatgggaagattgga

SEQ ID NO: 937317 - DNA, 33 bp, Homo sapien
atgtatactataaatcaaccaatgaacaagcca

SEQ ID NO: 937318 - DNA, 33 bp, Homo sapien
atgtatactataaatcgaccaatgaacaagcca

SEQ ID NO: 937319 - DNA, 33 bp, Homo sapien
atgaaacagaaatacaatcaaacttctggaggc

SEQ ID NO: 937320 - DNA, 33 bp, Homo sapien
atgaaacagaaatacagtcaaacttctggaggc

SEQ ID NO: 937321 - DNA, 33 bp, Homo sapien
taagagttactagcaactggttttgaattttac

SEQ ID NO: 937322 - DNA, 33 bp, Homo sapien
taagagttactagcaattggttttgaattttac

SEQ ID NO: 937323 - DNA, 33 bp, Homo sapien
ggacatatggcaataacaatggcagttcaataa

SEQ ID NO: 937324 - DNA, 33 bp, Homo sapien
ggacatatggcaataataatggcagttcaataa

SEQ ID NO: 937325 - DNA, 33 bp, Homo sapien
aattttgtcccctggcaacattttttattgtta

SEQ ID NO: 937326 - DNA, 33 bp, Homo sapien
aattttgtcccctggcgacattttttattgtta

SEQ ID NO: 937327 - DNA, 33 bp, Homo sapien
ctagctgagctctttacgtagtctagacaggag

SEQ ID NO: 937328 - DNA, 33 bp, Homo sapien
ctagctgagctctttatgtagtctagacaggag

SEQ ID NO: 937329 - DNA, 33 bp, Homo sapien
aaatgtggagagttaaaatttaaataggatgca

SEQ ID NO: 937330 - DNA, 33 bp, Homo sapien
aaatgtggagagttaagatttaaataggatgca

SEQ ID NO: 937331 - DNA, 33 bp, Homo sapien
tccctgtccgaccttccaggtgtaggagtcgcc

SEQ ID NO: 937332 - DNA, 33 bp, Homo sapien
tccctgtccgaccttctaggtgtaggagtcgcc

SEQ ID NO: 937333 - DNA, 33 bp, Homo sapien
ttttcctctacctcatcagcctttccttctttt

SEQ ID NO: 937334 - DNA, 33 bp, Homo sapien
ttttcctctacctcatgagcctttccttctttt

SEQ ID NO: 937335 - DNA, 33 bp, Homo sapien
cagttgcccagaaaaacaggaaatcttgccgtg

SEQ ID NO: 937336 - DNA, 33 bp, Homo sapien
cagttgcccagaaaaagaggaaatcttgccgtg

SEQ ID NO: 937337 - DNA, 33 bp, Homo sapien
gtatttcaaaatcagtaaagacatcaatgcatt

SEQ ID NO: 937338 - DNA, 33 bp, Homo sapien
gtatttcaaaatcagtgaagacatcaatgcatt

SEQ ID NO: 937339 - DNA, 33 bp, Homo sapien
tagttatctgtcatagacctcagcaagtacaaa

SEQ ID NO: 937340 - DNA, 33 bp, Homo sapien
tagttatctgtcatagccctcagcaagtacaaa

SEQ ID NO: 937341 - DNA, 33 bp, Homo sapien
ttcacccatcccataaaatacaatgatatattc

SEQ ID NO: 937342 - DNA, 33 bp, Homo sapien
ttcacccatcccataagatacaatgatatattc

SEQ ID NO: 937343 - DNA, 33 bp, Homo sapien
agtcacttagaagctacgtcaactgtggcagta

SEQ ID NO: 937344 - DNA, 33 bp, Homo sapien
agtcacttagaagctatgtcaactgtggcagta

SEQ ID NO: 937345 - DNA, 33 bp, Homo sapien
cacatctgttacagcacggtttacagaatattt

SEQ ID NO: 937346 - DNA, 33 bp, Homo sapien
cacatctgttacagcatggtttacagaatattt

SEQ ID NO: 937347 - DNA, 33 bp, Homo sapien
gaaggtaagataatcaagttggtttgctgaaca

SEQ ID NO: 937348 - DNA, 33 bp, Homo sapien
gaaggtaagataatcatgttggtttgctgaaca

SEQ ID NO: 937349 - DNA, 33 bp, Homo sapien
gtattgtagaagagaacctcaagatcagaaggg

SEQ ID NO: 937350 - DNA, 33 bp, Homo sapien
gtattgtagaagagaatctcaagatcagaaggg

SEQ ID NO: 937351 - DNA, 33 bp, Homo sapien
tggggagagaggggtaacattctacaaaaggga

SEQ ID NO: 937352 - DNA, 33 bp, Homo sapien
tggggagagaggggtagcattctacaaaaggga

SEQ ID NO: 937353 - DNA, 33 bp, Homo sapien
ttgcagccttctgctgaatttctgatctgagct

SEQ ID NO: 937354 - DNA, 33 bp, Homo sapien
ttgcagccttctgctgtatttctgatctgagct

SEQ ID NO: 937355 - DNA, 33 bp, Homo sapien
gtttaaatggcaataaaagcctgtttcaaatca

SEQ ID NO: 937356 - DNA, 33 bp, Homo sapien
gtttaaatggcaataagagcctgtttcaaatca

SEQ ID NO: 937357 - DNA, 33 bp, Homo sapien
tggacagattgaggaaattcctagatcactgag

SEQ ID NO: 937358 - DNA, 33 bp, Homo sapien
tggacagattgaggaacttcctagatcactgag

SEQ ID NO: 937359 - DNA, 33 bp, Homo sapien
tcaaacttaaacacccaaacacatacatgttct

SEQ ID NO: 937360 - DNA, 33 bp, Homo sapien
tcaaacttaaacacccgaacacatacatgttct

SEQ ID NO: 937361 - DNA, 33 bp, Homo sapien
gacctgctccgggacacagcagagtggagagca

SEQ ID NO: 937362 - DNA, 33 bp, Homo sapien
gacctgctccgggacatagcagagtggagagca

SEQ ID NO: 937363 - DNA, 33 bp, Homo sapien
gggctagccttaatgacgaactttgtatttgcc

SEQ ID NO: 937364 - DNA, 33 bp, Homo sapien
gggctagccttaatgatgaactttgtatttgcc

SEQ ID NO: 937365 - DNA, 33 bp, Homo sapien
tctatttgggaggtgacagcatacagattgctt

SEQ ID NO: 937366 - DNA, 33 bp, Homo sapien
tctatttgggaggtgagagcatacagattgctt

SEQ ID NO: 937367 - DNA, 33 bp, Homo sapien
catggccgtcctcgccacctcttccatcagggt

SEQ ID NO: 937368 - DNA, 33 bp, Homo sapien
catggccgtcctcgcctcctcttccatcagggt

SEQ ID NO: 937369 - DNA, 33 bp, Homo sapien
gaggcgctagattaaccgcttgttggcttaggt

SEQ ID NO: 937370 - DNA, 33 bp, Homo sapien
gaggcgctagattaactgcttgttggcttaggt

SEQ ID NO: 937371 - DNA, 33 bp, Homo sapien
tgagagtccagagctacgcggctttaacaaacc

SEQ ID NO: 937372 - DNA, 33 bp, Homo sapien
tgagagtccagagctatgcggctttaacaaacc

SEQ ID NO: 937373 - DNA, 33 bp, Homo sapien
ctcagagaggctgacaaaggagggaaaaaggag

SEQ ID NO: 937374 - DNA, 33 bp, Homo sapien
ctcagagaggctgacagaggagggaaaaaggag

SEQ ID NO: 937375 - DNA, 33 bp, Homo sapien
cctttttgcccatccccgcttctcacaaatcat

SEQ ID NO: 937376 - DNA, 33 bp, Homo sapien
cctttttgcccatcccggcttctcacaaatcat

SEQ ID NO: 937377 - DNA, 33 bp, Homo sapien
catggtctgccagcccccagagttagctgtcac

SEQ ID NO: 937378 - DNA, 33 bp, Homo sapien
catggtctgccagccctcagagttagctgtcac

SEQ ID NO: 937379 - DNA, 33 bp, Homo sapien
ggtcataggtcaataacggagcttcagaaagac

SEQ ID NO: 937380 - DNA, 33 bp, Homo sapien
ggtcataggtcaataagggagcttcagaaagac

SEQ ID NO: 937381 - DNA, 33 bp, Homo sapien
actgataaataggaagaaggctcactttgggag

SEQ ID NO: 937382 - DNA, 33 bp, Homo sapien
actgataaataggaagcaggctcactttgggag

SEQ ID NO: 937383 - DNA, 33 bp, Homo sapien
gctaaaaggtgcttccagagtgagaggtggtaa

SEQ ID NO: 937384 - DNA, 33 bp, Homo sapien
gctaaaaggtgcttccggagtgagaggtggtaa

SEQ ID NO: 937385 - DNA, 33 bp, Homo sapien
cttacaagaaaggagactaggccgggtgtcatg

SEQ ID NO: 937386 - DNA, 33 bp, Homo sapien
cttacaagaaaggagagtaggccgggtgtcatg

SEQ ID NO: 937387 - DNA, 33 bp, Homo sapien
ttttgccgagatcaccaacaatatccaacctgt

SEQ ID NO: 937388 - DNA, 33 bp, Homo sapien
ttttgccgagatcaccgacaatatccaacctgt

SEQ ID NO: 937389 - DNA, 33 bp, Homo sapien
gacactgccacattggaaatacaatttcaacat

SEQ ID NO: 937390 - DNA, 33 bp, Homo sapien
gacactgccacattgggaatacaatttcaacat

SEQ ID NO: 937391 - DNA, 33 bp, Homo sapien
gtgtgatgttccacctcagacagatatagaaac

SEQ ID NO: 937392 - DNA, 33 bp, Homo sapien
gtgtgatgttccaccttagacagatatagaaac

SEQ ID NO: 937393 - DNA, 33 bp, Homo sapien
cctcaccagcatctgacggtttttgagttttta

SEQ ID NO: 937394 - DNA, 33 bp, Homo sapien
cctcaccagcatctgatggtttttgagttttta

SEQ ID NO: 937395 - DNA, 33 bp, Homo sapien
ctcaagctacaaacataaaagtccaggggcagt

SEQ ID NO: 937396 - DNA, 33 bp, Homo sapien
ctcaagctacaaacatgaaagtccaggggcagt

SEQ ID NO: 937397 - DNA, 33 bp, Homo sapien
agacaagggacagcaacgggctgcccaggtcag

SEQ ID NO: 937398 - DNA, 33 bp, Homo sapien
agacaagggacagcaatgggctgcccaggtcag

SEQ ID NO: 937399 - DNA, 33 bp, Homo sapien
cccaacaggaggagccactgctgagtaggcaac

SEQ ID NO: 937400 - DNA, 33 bp, Homo sapien
cccaacaggaggagccgctgctgagtaggcaac

SEQ ID NO: 937401 - DNA, 33 bp, Homo sapien
catgagaatcaactataatacagctgactggaa

SEQ ID NO: 937402 - DNA, 33 bp, Homo sapien
catgagaatcaactatgatacagctgactggaa

SEQ ID NO: 937403 - DNA, 33 bp, Homo sapien
cagatgtgtgctgagaagtaaggcaggaactgg

SEQ ID NO: 937404 - DNA, 33 bp, Homo sapien
cagatgtgtgctgagaggtaaggcaggaactgg

SEQ ID NO: 937405 - DNA, 33 bp, Homo sapien
agcaagaccctttgacaaattcactgttcatcg

SEQ ID NO: 937406 - DNA, 33 bp, Homo sapien
agcaagaccctttgacgaattcactgttcatcg

SEQ ID NO: 937407 - DNA, 33 bp, Homo sapien
gggccaacagagggaggctacggtcaattctgg

SEQ ID NO: 937408 - DNA, 33 bp, Homo sapien
gggccaacagagggagtctacggtcaattctgg

SEQ ID NO: 937409 - DNA, 33 bp, Homo sapien
tgtgtcacttctgaaacgaagtcataaaataca

SEQ ID NO: 937410 - DNA, 33 bp, Homo sapien
tgtgtcacttctgaaatgaagtcataaaataca

SEQ ID NO: 937411 - DNA, 33 bp, Homo sapien
aggctgaatgtatttaaatgggctcactgagct

SEQ ID NO: 937412 - DNA, 33 bp, Homo sapien
aggctgaatgtatttatatgggctcactgagct

SEQ ID NO: 937413 - DNA, 33 bp, Homo sapien
tgactctgaaaggataccttcaaaggggacagc

SEQ ID NO: 937414 - DNA, 33 bp, Homo sapien
tgactctgaaaggatatcttcaaaggggacagc

SEQ ID NO: 937415 - DNA, 33 bp, Homo sapien
tgggagttcttggggaaaccaaccatgagaaag

SEQ ID NO: 937416 - DNA, 33 bp, Homo sapien
tgggagttcttggggataccaaccatgagaaag

SEQ ID NO: 937417 - DNA, 33 bp, Homo sapien
cattatcacagagcagacaatgagggatgcatt

SEQ ID NO: 937418 - DNA, 33 bp, Homo sapien
cattatcacagagcaggcaatgagggatgcatt

SEQ ID NO: 937419 - DNA, 33 bp, Homo sapien
ctaactcaagcctagtaaaggagcttcaaggag

SEQ ID NO: 937420 - DNA, 33 bp, Homo sapien
ctaactcaagcctagtgaaggagcttcaaggag

SEQ ID NO: 937421 - DNA, 33 bp, Homo sapien
tttgctgtttttattgccaaaattttctccata

SEQ ID NO: 937422 - DNA, 33 bp, Homo sapien
tttgctgtttttattgtcaaaattttctccata

SEQ ID NO: 937423 - DNA, 33 bp, Homo sapien
ggtcttatattctgagaccacacttcatctaga

SEQ ID NO: 937424 - DNA, 33 bp, Homo sapien
ggtcttatattctgaggccacacttcatctaga

SEQ ID NO: 937425 - DNA, 33 bp, Homo sapien
ctcctagtaatcatgcagagggaaaacagacca

SEQ ID NO: 937426 - DNA, 33 bp, Homo sapien
ctcctagtaatcatgcggagggaaaacagacca

SEQ ID NO: 937427 - DNA, 33 bp, Homo sapien
ctgtgatggttgctcaatgagaaatagtggaat

SEQ ID NO: 937428 - DNA, 33 bp, Homo sapien
ctgtgatggttgctcactgagaaatagtggaat

SEQ ID NO: 937429 - DNA, 33 bp, Homo sapien
ctacagtctctgacccggatggtttcttttcat

SEQ ID NO: 937430 - DNA, 33 bp, Homo sapien
ctacagtctctgaccctgatggtttcttttcat

SEQ ID NO: 937431 - DNA, 33 bp, Homo sapien
ggagttactgttgagaatcactgttgtgagcca

SEQ ID NO: 937432 - DNA, 33 bp, Homo sapien
ggagttactgttgagagtcactgttgtgagcca

SEQ ID NO: 937433 - DNA, 33 bp, Homo sapien
gaacagcaaggaccccaaggcagcaggaaacca

SEQ ID NO: 937434 - DNA, 33 bp, Homo sapien
gaacagcaaggaccccgaggcagcaggaaacca

SEQ ID NO: 937435 - DNA, 33 bp, Homo sapien
ttatctcccaatgccaggtaggcaaagaccctt

SEQ ID NO: 937436 - DNA, 33 bp, Homo sapien
ttatctcccaatgccatgtaggcaaagaccctt

SEQ ID NO: 937437 - DNA, 33 bp, Homo sapien
actcccacagtccagacgcgtatcactgcccac

SEQ ID NO: 937438 - DNA, 33 bp, Homo sapien
actcccacagtccagatgcgtatcactgcccac

SEQ ID NO: 937439 - DNA, 33 bp, Homo sapien
ctaaaaatagaactcaacagttagtgccaaata

SEQ ID NO: 937440 - DNA, 33 bp, Homo sapien
ctaaaaatagaactcaccagttagtgccaaata

SEQ ID NO: 937441 - DNA, 33 bp, Homo sapien
tatcttattataggaccagtcaagcaagaattc

SEQ ID NO: 937442 - DNA, 33 bp, Homo sapien
tatcttattataggacgagtcaagcaagaattc

SEQ ID NO: 937443 - DNA, 33 bp, Homo sapien
aggctggaggtctcaacatctgcacgtcaagtc

SEQ ID NO: 937444 - DNA, 33 bp, Homo sapien
aggctggaggtctcaatatctgcacgtcaagtc

SEQ ID NO: 937445 - DNA, 33 bp, Homo sapien
agtgatgcaagtccaaaggcagttccaaagcag

SEQ ID NO: 937446 - DNA, 33 bp, Homo sapien
agtgatgcaagtccaagggcagttccaaagcag

SEQ ID NO: 937447 - DNA, 33 bp, Homo sapien
ctggcactaatatctaaccgtagggcctggcac

SEQ ID NO: 937448 - DNA, 33 bp, Homo sapien
ctggcactaatatctacccgtagggcctggcac

SEQ ID NO: 937449 - DNA, 33 bp, Homo sapien
tctattctaacaagccgatctcttgaaggatat

SEQ ID NO: 937450 - DNA, 33 bp, Homo sapien
tctattctaacaagcctatctcttgaaggatat

SEQ ID NO: 937451 - DNA, 33 bp, Homo sapien
ctactcaatgtcccccacctccaggatgcaggc

SEQ ID NO: 937452 - DNA, 33 bp, Homo sapien
ctactcaatgtcccccgcctccaggatgcaggc

SEQ ID NO: 937453 - DNA, 33 bp, Homo sapien
atgacaatttatcacaacttctggctcaccaag

SEQ ID NO: 937454 - DNA, 33 bp, Homo sapien
atgacaatttatcacaccttctggctcaccaag

SEQ ID NO: 937455 - DNA, 33 bp, Homo sapien
ttcttcaatcgttgcacactgttttatacttgt

SEQ ID NO: 937456 - DNA, 33 bp, Homo sapien
ttcttcaatcgttgcatactgttttatacttgt

SEQ ID NO: 937457 - DNA, 33 bp, Homo sapien
tggccacagtagaataagcttgaaatccataac

SEQ ID NO: 937458 - DNA, 33 bp, Homo sapien
tggccacagtagaataggcttgaaatccataac

SEQ ID NO: 937459 - DNA, 33 bp, Homo sapien
ggagcaagccccaataaagaaatgcctttgttc

SEQ ID NO: 937460 - DNA, 33 bp, Homo sapien
ggagcaagccccaatacagaaatgcctttgttc

SEQ ID NO: 937461 - DNA, 33 bp, Homo sapien
tggaaaaaagaaaagacgccatggattccattt

SEQ ID NO: 937462 - DNA, 33 bp, Homo sapien
tggaaaaaagaaaagatgccatggattccattt

SEQ ID NO: 937463 - DNA, 33 bp, Homo sapien
tagtcagaaaaatacaatcattcacctgttgag

SEQ ID NO: 937464 - DNA, 33 bp, Homo sapien
tagtcagaaaaatacagtcattcacctgttgag

SEQ ID NO: 937465 - DNA, 33 bp, Homo sapien
tttttttccaagcacaagtggaacactgacaaa

SEQ ID NO: 937466 - DNA, 33 bp, Homo sapien
tttttttccaagcacacgtggaacactgacaaa

SEQ ID NO: 937467 - DNA, 33 bp, Homo sapien
agtggtatttgtcctcaacatctggcttaattt

SEQ ID NO: 937468 - DNA, 33 bp, Homo sapien
agtggtatttgtcctcgacatctggcttaattt

SEQ ID NO: 937469 - DNA, 33 bp, Homo sapien
accaatcacttcagaaagaaacgatgtaagtct

SEQ ID NO: 937470 - DNA, 33 bp, Homo sapien
accaatcacttcagaatgaaacgatgtaagtct

SEQ ID NO: 937471 - DNA, 33 bp, Homo sapien
gggtttaatgggccctaaattcacagtctttat

SEQ ID NO: 937472 - DNA, 33 bp, Homo sapien
gggtttaatgggccctgaattcacagtctttat

SEQ ID NO: 937473 - DNA, 33 bp, Homo sapien
ttgtcacaggagctggaaaactcttcttctgta

SEQ ID NO: 937474 - DNA, 33 bp, Homo sapien
ttgtcacaggagctggcaaactcttcttctgta

SEQ ID NO: 937475 - DNA, 33 bp, Homo sapien
ctccaagaaatagtgaaaagtgtgtagctgagt

SEQ ID NO: 937476 - DNA, 33 bp, Homo sapien
ctccaagaaatagtgagaagtgtgtagctgagt

SEQ ID NO: 937477 - DNA, 33 bp, Homo sapien
aagcatcatcaccgtcagaatcatgagccattg

SEQ ID NO: 937478 - DNA, 33 bp, Homo sapien
aagcatcatcaccgtcggaatcatgagccattg

SEQ ID NO: 937479 - DNA, 33 bp, Homo sapien
ggctgggaatgaatacaatttatagtgcactgt

SEQ ID NO: 937480 - DNA, 33 bp, Homo sapien
ggctgggaatgaatacgatttatagtgcactgt

SEQ ID NO: 937481 - DNA, 33 bp, Homo sapien
catgctaggcagtttaccatcagttatcatatt

SEQ ID NO: 937482 - DNA, 33 bp, Homo sapien
catgctaggcagtttatcatcagttatcatatt

SEQ ID NO: 937483 - DNA, 33 bp, Homo sapien
gaagagacagtttaccagctcctatgacaagag

SEQ ID NO: 937484 - DNA, 33 bp, Homo sapien
gaagagacagtttaccggctcctatgacaagag

SEQ ID NO: 937485 - DNA, 33 bp, Homo sapien
tttcatttcacacttacgtggacagcacttaaa

SEQ ID NO: 937486 - DNA, 33 bp, Homo sapien
tttcatttcacacttatgtggacagcacttaaa

SEQ ID NO: 937487 - DNA, 33 bp, Homo sapien
ggaacatctgaacacaacgtagaacttttactt

SEQ ID NO: 937488 - DNA, 33 bp, Homo sapien
ggaacatctgaacacagcgtagaacttttactt

SEQ ID NO: 937489 - DNA, 33 bp, Homo sapien
catatatgtgtcttcacgcaattataggaatat

SEQ ID NO: 937490 - DNA, 33 bp, Homo sapien
catatatgtgtcttcatgcaattataggaatat

SEQ ID NO: 937491 - DNA, 33 bp, Homo sapien
gcttgtcatcctcttccctgcctccatctgagc

SEQ ID NO: 937492 - DNA, 33 bp, Homo sapien
gcttgtcatcctcttcgctgcctccatctgagc

SEQ ID NO: 937493 - DNA, 33 bp, Homo sapien
ttaataaacataaaaacctaatggccagttcct

SEQ ID NO: 937494 - DNA, 33 bp, Homo sapien
ttaataaacataaaaatctaatggccagttcct

SEQ ID NO: 937495 - DNA, 33 bp, Homo sapien
ctcctagtacagctacaaaaatgattgaagcca

SEQ ID NO: 937496 - DNA, 33 bp, Homo sapien
ctcctagtacagctacgaaaatgattgaagcca

SEQ ID NO: 937497 - DNA, 33 bp, Homo sapien
tttcttgcagaggaataacataagctgatttcg

SEQ ID NO: 937498 - DNA, 33 bp, Homo sapien
tttcttgcagaggaatgacataagctgatttcg

SEQ ID NO: 937499 - DNA, 33 bp, Homo sapien
gaggaatagatcaagaggtacaaatgttcacag

SEQ ID NO: 937500 - DNA, 33 bp, Homo sapien
gaggaatagatcaagatgtacaaatgttcacag

SEQ ID NO: 937501 - DNA, 33 bp, Homo sapien
ggaagaagagagcagacgggcaagcctcttttg

SEQ ID NO: 937502 - DNA, 33 bp, Homo sapien
ggaagaagagagcagatgggcaagcctcttttg

SEQ ID NO: 937503 - DNA, 33 bp, Homo sapien
tctgtttcaggtagtcaaagctagcttctggtt

SEQ ID NO: 937504 - DNA, 33 bp, Homo sapien
tctgtttcaggtagtccaagctagcttctggtt

SEQ ID NO: 937505 - DNA, 33 bp, Homo sapien
ttccactctcttaatcactgacctgttttcagc

SEQ ID NO: 937506 - DNA, 33 bp, Homo sapien
ttccactctcttaatcgctgacctgttttcagc

SEQ ID NO: 937507 - DNA, 33 bp, Homo sapien
ttgtacccattgaacaactcaagtacaatgatg

SEQ ID NO: 937508 - DNA, 33 bp, Homo sapien
ttgtacccattgaacacctcaagtacaatgatg

SEQ ID NO: 937509 - DNA, 33 bp, Homo sapien
atctttgaatcaagagaagcctcatctgattta

SEQ ID NO: 937510 - DNA, 33 bp, Homo sapien
atctttgaatcaagagtagcctcatctgattta

SEQ ID NO: 937511 - DNA, 33 bp, Homo sapien
gatttaatatggatcacaagagcttggactttg

SEQ ID NO: 937512 - DNA, 33 bp, Homo sapien
gatttaatatggatcataagagcttggactttg

SEQ ID NO: 937513 - DNA, 33 bp, Homo sapien
cttgaagcggatacaccaggtcgagcccagcct

SEQ ID NO: 937514 - DNA, 33 bp, Homo sapien
cttgaagcggatacacgaggtcgagcccagcct

SEQ ID NO: 937515 - DNA, 33 bp, Homo sapien
acttagctgtgggttccctttttctgatgttag

SEQ ID NO: 937516 - DNA, 33 bp, Homo sapien
acttagctgtgggttctctttttctgatgttag

SEQ ID NO: 937517 - DNA, 33 bp, Homo sapien
aagctcagatgtctacaccttctccagacacag

SEQ ID NO: 937518 - DNA, 33 bp, Homo sapien
aagctcagatgtctacgccttctccagacacag

SEQ ID NO: 937519 - DNA, 33 bp, Homo sapien
tagcaattcataacacaagagatggggaaatgt

SEQ ID NO: 937520 - DNA, 33 bp, Homo sapien
tagcaattcataacacgagagatggggaaatgt

SEQ ID NO: 937521 - DNA, 33 bp, Homo sapien
gtgaatagaggttggacaagagccaacaaggtg

SEQ ID NO: 937522 - DNA, 33 bp, Homo sapien
gtgaatagaggttggataagagccaacaaggtg

SEQ ID NO: 937523 - DNA, 33 bp, Homo sapien
ccaaggcaacttggaaacacttcccggacagct

SEQ ID NO: 937524 - DNA, 33 bp, Homo sapien
ccaaggcaacttggaagcacttcccggacagct

SEQ ID NO: 937525 - DNA, 33 bp, Homo sapien
ggtatttaggtgtcagaaggcttcccaccattc

SEQ ID NO: 937526 - DNA, 33 bp, Homo sapien
ggtatttaggtgtcaggaggcttcccaccattc

SEQ ID NO: 937527 - DNA, 33 bp, Homo sapien
ggcaagcaggccttccgaaggacagcggtctag

SEQ ID NO: 937528 - DNA, 33 bp, Homo sapien
ggcaagcaggccttcctaaggacagcggtctag

SEQ ID NO: 937529 - DNA, 33 bp, Homo sapien
ctgatgggcagtgagacgctgcagcctttgcct

SEQ ID NO: 937530 - DNA, 33 bp, Homo sapien
ctgatgggcagtgagatgctgcagcctttgcct

SEQ ID NO: 937531 - DNA, 33 bp, Homo sapien
cactttcctttcagaacgtccagctcctcctct

SEQ ID NO: 937532 - DNA, 33 bp, Homo sapien
cactttcctttcagaatgtccagctcctcctct

SEQ ID NO: 937533 - DNA, 33 bp, Homo sapien
agagtctaggcagtaaaaacatatatcattgac

SEQ ID NO: 937534 - DNA, 33 bp, Homo sapien
agagtctaggcagtaacaacatatatcattgac

SEQ ID NO: 937535 - DNA, 33 bp, Homo sapien
ggaacatctcgagggcagaagtcgtgttttttt

SEQ ID NO: 937536 - DNA, 33 bp, Homo sapien
ggaacatctcgagggcggaagtcgtgttttttt

SEQ ID NO: 937537 - DNA, 33 bp, Homo sapien
gtggttctaaagtcaaaaatttggtgccttatc

SEQ ID NO: 937538 - DNA, 33 bp, Homo sapien
gtggttctaaagtcaacaatttggtgccttatc

SEQ ID NO: 937539 - DNA, 33 bp, Homo sapien
cctaccatgtgccagacgttttcaggatttcac

SEQ ID NO: 937540 - DNA, 33 bp, Homo sapien
cctaccatgtgccagatgttttcaggatttcac

SEQ ID NO: 937541 - DNA, 33 bp, Homo sapien
gggaggcaggggagcaccatccaggcagaagtt

SEQ ID NO: 937542 - DNA, 33 bp, Homo sapien
gggaggcaggggagcatcatccaggcagaagtt

SEQ ID NO: 937543 - DNA, 33 bp, Homo sapien
tgggctgagtttgttacagactacttcatgcaa

SEQ ID NO: 937544 - DNA, 33 bp, Homo sapien
tgggctgagtttgttatagactacttcatgcaa

SEQ ID NO: 937545 - DNA, 33 bp, Homo sapien
tgggcctcgcagctctaacctgacgaccagatg

SEQ ID NO: 937546 - DNA, 33 bp, Homo sapien
tgggcctcgcagctctcacctgacgaccagatg

SEQ ID NO: 937547 - DNA, 33 bp, Homo sapien
ttatgtacttcatggaatatctgggcattgctt

SEQ ID NO: 937548 - DNA, 33 bp, Homo sapien
ttatgtacttcatggagtatctgggcattgctt

SEQ ID NO: 937549 - DNA, 33 bp, Homo sapien
ccttaacactggactccaggggggatataaagc

SEQ ID NO: 937550 - DNA, 33 bp, Homo sapien
ccttaacactggactctaggggggatataaagc

SEQ ID NO: 937551 - DNA, 33 bp, Homo sapien
aactctcatttttccaaaatccagaaaaacagc

SEQ ID NO: 937552 - DNA, 33 bp, Homo sapien
aactctcatttttccagaatccagaaaaacagc

SEQ ID NO: 937553 - DNA, 33 bp, Homo sapien
agaatgaacagagtagcaacagatgagggctgc

SEQ ID NO: 937554 - DNA, 33 bp, Homo sapien
agaatgaacagagtaggaacagatgagggctgc

SEQ ID NO: 937555 - DNA, 33 bp, Homo sapien
gtttccacgggggtcccgaatgaggaagttcag

SEQ ID NO: 937556 - DNA, 33 bp, Homo sapien
gtttccacgggggtcctgaatgaggaagttcag

SEQ ID NO: 937557 - DNA, 33 bp, Homo sapien
cttcctgtttatgcctcacaagaagaaaaacca

SEQ ID NO: 937558 - DNA, 33 bp, Homo sapien
cttcctgtttatgccttacaagaagaaaaacca

SEQ ID NO: 937559 - DNA, 33 bp, Homo sapien
gccggattgccctcaccctgattgtcccatcag

SEQ ID NO: 937560 - DNA, 33 bp, Homo sapien
gccggattgccctcactctgattgtcccatcag

SEQ ID NO: 937561 - DNA, 33 bp, Homo sapien
gaaggaattataccagcatgtgataagaaggaa

SEQ ID NO: 937562 - DNA, 33 bp, Homo sapien
gaaggaattataccaggatgtgataagaaggaa

SEQ ID NO: 937563 - DNA, 33 bp, Homo sapien
agtggttgaggtaacacagacccccattgtcct

SEQ ID NO: 937564 - DNA, 33 bp, Homo sapien
agtggttgaggtaacatagacccccattgtcct

SEQ ID NO: 937565 - DNA, 33 bp, Homo sapien
aaggaaggatggaagacgtgagaaaggccaccc

SEQ ID NO: 937566 - DNA, 33 bp, Homo sapien
aaggaaggatggaagatgtgagaaaggccaccc

SEQ ID NO: 937567 - DNA, 33 bp, Homo sapien
ccagttcctttacaaccagcagtggcaggtcta

SEQ ID NO: 937568 - DNA, 33 bp, Homo sapien
ccagttcctttacaactagcagtggcaggtcta

SEQ ID NO: 937569 - DNA, 33 bp, Homo sapien
ttcctgcccatcctgcccattttagcatagttt

SEQ ID NO: 937570 - DNA, 33 bp, Homo sapien
ttcctgcccatcctgctcattttagcatagttt

SEQ ID NO: 937571 - DNA, 33 bp, Homo sapien
gggattgtaaatacccaaggacactgtgcccac

SEQ ID NO: 937572 - DNA, 33 bp, Homo sapien
gggattgtaaatacccgaggacactgtgcccac

SEQ ID NO: 937573 - DNA, 33 bp, Homo sapien
ctaggatgcaccaaggcataaaagagtccaaca

SEQ ID NO: 937574 - DNA, 33 bp, Homo sapien
ctaggatgcaccaagggataaaagagtccaaca

SEQ ID NO: 937575 - DNA, 33 bp, Homo sapien
cctctactgaaaaccacatcgggttctggggaa

SEQ ID NO: 937576 - DNA, 33 bp, Homo sapien
cctctactgaaaaccatatcgggttctggggaa

SEQ ID NO: 937577 - DNA, 33 bp, Homo sapien
tgttttctttttctaaagccatattgtagattc

SEQ ID NO: 937578 - DNA, 33 bp, Homo sapien
tgttttctttttctaaggccatattgtagattc

SEQ ID NO: 937579 - DNA, 33 bp, Homo sapien
tataacactatcacctcagaccaaatctctgat

SEQ ID NO: 937580 - DNA, 33 bp, Homo sapien
tataacactatcacctgagaccaaatctctgat

SEQ ID NO: 937581 - DNA, 33 bp, Homo sapien
gctaaatgagatcctgcaaagcaatctttccaa

SEQ ID NO: 937582 - DNA, 33 bp, Homo sapien
gctaaatgagatcctgtaaagcaatctttccaa

SEQ ID NO: 937583 - DNA, 33 bp, Homo sapien
ctcacacctttaatcccagtattttgggaggct

SEQ ID NO: 937584 - DNA, 33 bp, Homo sapien
ctcacacctttaatccgagtattttgggaggct

SEQ ID NO: 937585 - DNA, 33 bp, Homo sapien
cagagactgggtaacacaagcgacattttccaa

SEQ ID NO: 937586 - DNA, 33 bp, Homo sapien
cagagactgggtaacagaagcgacattttccaa

SEQ ID NO: 937587 - DNA, 33 bp, Homo sapien
atacttgcactagtaaatgtccacttctaaatg

SEQ ID NO: 937588 - DNA, 33 bp, Homo sapien
atacttgcactagtaattgtccacttctaaatg

SEQ ID NO: 937589 - DNA, 33 bp, Homo sapien
ggtccatgctcagaaacgagccctgaaatggaa

SEQ ID NO: 937590 - DNA, 33 bp, Homo sapien
ggtccatgctcagaaatgagccctgaaatggaa

SEQ ID NO: 937591 - DNA, 33 bp, Homo sapien
aatatctacctcatctcaactgaaaactctctc

SEQ ID NO: 937592 - DNA, 33 bp, Homo sapien
aatatctacctcatctgaactgaaaactctctc

SEQ ID NO: 937593 - DNA, 33 bp, Homo sapien
aggctaagtcagtaaccgctaaatgcctgtcca

SEQ ID NO: 937594 - DNA, 33 bp, Homo sapien
aggctaagtcagtaactgctaaatgcctgtcca

SEQ ID NO: 937595 - DNA, 33 bp, Homo sapien
cggtgcctgaaagcagccacgatcccagcgtca

SEQ ID NO: 937596 - DNA, 33 bp, Homo sapien
cggtgcctgaaagcagtcacgatcccagcgtca

SEQ ID NO: 937597 - DNA, 33 bp, Homo sapien
tgccagacaaccatacacgtgggaagagccatc

SEQ ID NO: 937598 - DNA, 33 bp, Homo sapien
tgccagacaaccatacccgtgggaagagccatc

SEQ ID NO: 937599 - DNA, 33 bp, Homo sapien
agcaacatgaaggaaaacaactgtcggaagcca

SEQ ID NO: 937600 - DNA, 33 bp, Homo sapien
agcaacatgaaggaaagcaactgtcggaagcca

SEQ ID NO: 937601 - DNA, 33 bp, Homo sapien
ttagtataaaatatggacacaaacaggatccaa

SEQ ID NO: 937602 - DNA, 33 bp, Homo sapien
ttagtataaaatatgggcacaaacaggatccaa

SEQ ID NO: 937603 - DNA, 33 bp, Homo sapien
taacctttaaaacacacatggccgcctgtagct

SEQ ID NO: 937604 - DNA, 33 bp, Homo sapien
taacctttaaaacacatatggccgcctgtagct

SEQ ID NO: 937605 - DNA, 33 bp, Homo sapien
tttcaacacaacctaaatataaagtgcagataa

SEQ ID NO: 937606 - DNA, 33 bp, Homo sapien
tttcaacacaacctaagtataaagtgcagataa

SEQ ID NO: 937607 - DNA, 33 bp, Homo sapien
cctccaggaggaagaaacttctacagcctgagg

SEQ ID NO: 937608 - DNA, 33 bp, Homo sapien
cctccaggaggaagaaccttctacagcctgagg

SEQ ID NO: 937609 - DNA, 33 bp, Homo sapien
ccaagcaacagatagacggtttatggcatgctg

SEQ ID NO: 937610 - DNA, 33 bp, Homo sapien
ccaagcaacagatagatggtttatggcatgctg

SEQ ID NO: 937611 - DNA, 33 bp, Homo sapien
caacaagaggtttggaaccgctgatctacaaaa

SEQ ID NO: 937612 - DNA, 33 bp, Homo sapien
caacaagaggtttggatccgctgatctacaaaa

SEQ ID NO: 937613 - DNA, 33 bp, Homo sapien
accgctgtctaatggacggtgaattactcagga

SEQ ID NO: 937614 - DNA, 33 bp, Homo sapien
accgctgtctaatggatggtgaattactcagga

SEQ ID NO: 937615 - DNA, 33 bp, Homo sapien
tcattcagtgtgtggcagatgcccggcaagcat

SEQ ID NO: 937616 - DNA, 33 bp, Homo sapien
tcattcagtgtgtggcggatgcccggcaagcat

SEQ ID NO: 937617 - DNA, 33 bp, Homo sapien
cccagccctcggaaatcagtgctctgctttcta

SEQ ID NO: 937618 - DNA, 33 bp, Homo sapien
cccagccctcggaaattagtgctctgctttcta

SEQ ID NO: 937619 - DNA, 33 bp, Homo sapien
ttgggagcatgagagcggcctgtgatacactgt

SEQ ID NO: 937620 - DNA, 33 bp, Homo sapien
ttgggagcatgagagctgcctgtgatacactgt

SEQ ID NO: 937621 - DNA, 33 bp, Homo sapien
tcatttataaggaggacggatgaaagagagaga

SEQ ID NO: 937622 - DNA, 33 bp, Homo sapien
tcatttataaggaggatggatgaaagagagaga

SEQ ID NO: 937623 - DNA, 33 bp, Homo sapien
accagggcatggaaaaccaatccctgagatgag

SEQ ID NO: 937624 - DNA, 33 bp, Homo sapien
accagggcatggaaaatcaatccctgagatgag

SEQ ID NO: 937625 - DNA, 33 bp, Homo sapien
ccacactggcttggtcaagacacgtgggcgtcc

SEQ ID NO: 937626 - DNA, 33 bp, Homo sapien
ccacactggcttggtccagacacgtgggcgtcc

SEQ ID NO: 937627 - DNA, 33 bp, Homo sapien
taacaagacccaaatcaaaatcctagagaggaa

SEQ ID NO: 937628 - DNA, 33 bp, Homo sapien
taacaagacccaaatcgaaatcctagagaggaa

SEQ ID NO: 937629 - DNA, 33 bp, Homo sapien
ctaagtcaagagatgacgtcttaaaagcaggac

SEQ ID NO: 937630 - DNA, 33 bp, Homo sapien
ctaagtcaagagatgatgtcttaaaagcaggac

SEQ ID NO: 937631 - DNA, 33 bp, Homo sapien
cttatttagatcgtgcaatatttagaattgtgt

SEQ ID NO: 937632 - DNA, 33 bp, Homo sapien
cttatttagatcgtgcgatatttagaattgtgt

SEQ ID NO: 937633 - DNA, 33 bp, Homo sapien
cctctagagaaatacaaaacagggaaacaatgt

SEQ ID NO: 937634 - DNA, 33 bp, Homo sapien
cctctagagaaatacacaacagggaaacaatgt

SEQ ID NO: 937635 - DNA, 33 bp, Homo sapien
ctgaggtatcattagacattcttttttagacta

SEQ ID NO: 937636 - DNA, 33 bp, Homo sapien
ctgaggtatcattagatattcttttttagacta

SEQ ID NO: 937637 - DNA, 33 bp, Homo sapien
ctgtattttaaacaacgccacaagtgacctcat

SEQ ID NO: 937638 - DNA, 33 bp, Homo sapien
ctgtattttaaacaactccacaagtgacctcat

SEQ ID NO: 937639 - DNA, 33 bp, Homo sapien
atttcagctgtgtggaaggaaaaaggttgagat

SEQ ID NO: 937640 - DNA, 33 bp, Homo sapien
atttcagctgtgtggacggaaaaaggttgagat

SEQ ID NO: 937641 - DNA, 33 bp, Homo sapien
ttgtttgtgtaggatactagagctaagaatagt

SEQ ID NO: 937642 - DNA, 33 bp, Homo sapien
ttgtttgtgtaggatattagagctaagaatagt

SEQ ID NO: 937643 - DNA, 33 bp, Homo sapien
cagggcctagtcaaaaagaggactgagaggagc

SEQ ID NO: 937644 - DNA, 33 bp, Homo sapien
cagggcctagtcaaaacgaggactgagaggagc

SEQ ID NO: 937645 - DNA, 33 bp, Homo sapien
tgtgggggtatgtgtgcacttccctctggaaat

SEQ ID NO: 937646 - DNA, 33 bp, Homo sapien
tgtgggggtatgtgtgtacttccctctggaaat

SEQ ID NO: 937647 - DNA, 33 bp, Homo sapien
taagtaagacacagtacgacacacctctgtctt

SEQ ID NO: 937648 - DNA, 33 bp, Homo sapien
taagtaagacacagtatgacacacctctgtctt

SEQ ID NO: 937649 - DNA, 33 bp, Homo sapien
taggcctcaacagaccacatcaaaatggagtca

SEQ ID NO: 937650 - DNA, 33 bp, Homo sapien
taggcctcaacagaccgcatcaaaatggagtca

SEQ ID NO: 937651 - DNA, 33 bp, Homo sapien
atatctagttcccagaatctcttgctaaaagaa

SEQ ID NO: 937652 - DNA, 33 bp, Homo sapien
atatctagttcccagagtctcttgctaaaagaa

SEQ ID NO: 937653 - DNA, 33 bp, Homo sapien
cctgctaagtcatgtgaaaattattcaggaaaa

SEQ ID NO: 937654 - DNA, 33 bp, Homo sapien
cctgctaagtcatgtggaaattattcaggaaaa

SEQ ID NO: 937655 - DNA, 33 bp, Homo sapien
agttagtgatgctgaaagtgcctcccctgtggg

SEQ ID NO: 937656 - DNA, 33 bp, Homo sapien
agttagtgatgctgaacgtgcctcccctgtggg

SEQ ID NO: 937657 - DNA, 33 bp, Homo sapien
tgttctttcctctaaaacgcctgggtttgcaaa

SEQ ID NO: 937658 - DNA, 33 bp, Homo sapien
tgttctttcctctaaagcgcctgggtttgcaaa

SEQ ID NO: 937659 - DNA, 33 bp, Homo sapien
aacgtgtggttgcctaaagaaactaaaggtaac

SEQ ID NO: 937660 - DNA, 33 bp, Homo sapien
aacgtgtggttgcctatagaaactaaaggtaac

SEQ ID NO: 937661 - DNA, 33 bp, Homo sapien
tataacaaatgtaccacatgaatgcaaaatgtt

SEQ ID NO: 937662 - DNA, 33 bp, Homo sapien
tataacaaatgtaccatatgaatgcaaaatgtt

SEQ ID NO: 937663 - DNA, 33 bp, Homo sapien
aacctggaatgtgcaaaggaatccactgagaaa

SEQ ID NO: 937664 - DNA, 33 bp, Homo sapien
aacctggaatgtgcaagggaatccactgagaaa

SEQ ID NO: 937665 - DNA, 33 bp, Homo sapien
ggcaaaatgaacccacaagttagaagtcaggat

SEQ ID NO: 937666 - DNA, 33 bp, Homo sapien
ggcaaaatgaacccacgagttagaagtcaggat

SEQ ID NO: 937667 - DNA, 33 bp, Homo sapien
cccggtgctgctgaaagatgttctccttgtcct

SEQ ID NO: 937668 - DNA, 33 bp, Homo sapien
cccggtgctgctgaaatatgttctccttgtcct

SEQ ID NO: 937669 - DNA, 33 bp, Homo sapien
acgtttcaaaggtgcaatccctaagttccttac

SEQ ID NO: 937670 - DNA, 33 bp, Homo sapien
acgtttcaaaggtgcagtccctaagttccttac

SEQ ID NO: 937671 - DNA, 33 bp, Homo sapien
tgatgagaaaggtcagactcagatgttaaggag

SEQ ID NO: 937672 - DNA, 33 bp, Homo sapien
tgatgagaaaggtcaggctcagatgttaaggag

SEQ ID NO: 937673 - DNA, 33 bp, Homo sapien
ggaatggtggcaagcccagaggagcaggagcag

SEQ ID NO: 937674 - DNA, 33 bp, Homo sapien
ggaatggtggcaagcctagaggagcaggagcag

SEQ ID NO: 937675 - DNA, 33 bp, Homo sapien
ttgccaagagcacaatcattgccagtcgtaccc

SEQ ID NO: 937676 - DNA, 33 bp, Homo sapien
ttgccaagagcacaattattgccagtcgtaccc

SEQ ID NO: 937677 - DNA, 33 bp, Homo sapien
acacataaggtattcaaggttatacaaaacaga

SEQ ID NO: 937678 - DNA, 33 bp, Homo sapien
acacataaggtattcatggttatacaaaacaga

SEQ ID NO: 937679 - DNA, 33 bp, Homo sapien
gagccgtcaccaggggcagatccaggatttatg

SEQ ID NO: 937680 - DNA, 33 bp, Homo sapien
gagccgtcaccaggggtagatccaggatttatg

SEQ ID NO: 937681 - DNA, 33 bp, Homo sapien
agagcagctgagtaagaacactgccttctctga

SEQ ID NO: 937682 - DNA, 33 bp, Homo sapien
agagcagctgagtaaggacactgccttctctga

SEQ ID NO: 937683 - DNA, 33 bp, Homo sapien
tttgaatccacgtgctcacagaggggtagagaa

SEQ ID NO: 937684 - DNA, 33 bp, Homo sapien
tttgaatccacgtgcttacagaggggtagagaa

SEQ ID NO: 937685 - DNA, 33 bp, Homo sapien
agcatgattgtgatgcagagtgcccgtgccaca

SEQ ID NO: 937686 - DNA, 33 bp, Homo sapien
agcatgattgtgatgcggagtgcccgtgccaca

SEQ ID NO: 937687 - DNA, 33 bp, Homo sapien
tgtggagcgttatgagaaagtattgtactgcgt

SEQ ID NO: 937688 - DNA, 33 bp, Homo sapien
tgtggagcgttatgaggaagtattgtactgcgt

SEQ ID NO: 937689 - DNA, 33 bp, Homo sapien
accttatttgtagtagaaaaaattggaagcagc

SEQ ID NO: 937690 - DNA, 33 bp, Homo sapien
accttatttgtagtaggaaaaattggaagcagc

SEQ ID NO: 937691 - DNA, 33 bp, Homo sapien
tgtattaggaacccagaaataccctgatccagc

SEQ ID NO: 937692 - DNA, 33 bp, Homo sapien
tgtattaggaacccaggaataccctgatccagc

SEQ ID NO: 937693 - DNA, 33 bp, Homo sapien
tccatttatcagttgacgttgagttgtttccac

SEQ ID NO: 937694 - DNA, 33 bp, Homo sapien
tccatttatcagttgatgttgagttgtttccac

SEQ ID NO: 937695 - DNA, 33 bp, Homo sapien
aggcctaaaagagtcaagttgcttctggaagat

SEQ ID NO: 937696 - DNA, 33 bp, Homo sapien
aggcctaaaagagtcatgttgcttctggaagat

SEQ ID NO: 937697 - DNA, 33 bp, Homo sapien
ttctcttttacacatcacccactataaatgctg

SEQ ID NO: 937698 - DNA, 33 bp, Homo sapien
ttctcttttacacatcgcccactataaatgctg

SEQ ID NO: 937699 - DNA, 33 bp, Homo sapien
tgggatattgtgtggaacctttggcaggccctt

SEQ ID NO: 937700 - DNA, 33 bp, Homo sapien
tgggatattgtgtggagcctttggcaggccctt

SEQ ID NO: 937701 - DNA, 33 bp, Homo sapien
agacaatatcaggttaccgtcaacattaatcca

SEQ ID NO: 937702 - DNA, 33 bp, Homo sapien
agacaatatcaggttagcgtcaacattaatcca

SEQ ID NO: 937703 - DNA, 33 bp, Homo sapien
caagtctgaacggggcaacaatactgctgtgtc

SEQ ID NO: 937704 - DNA, 33 bp, Homo sapien
caagtctgaacggggcgacaatactgctgtgtc

SEQ ID NO: 937705 - DNA, 33 bp, Homo sapien
ttttcattttccacccacttgacctatctcatg

SEQ ID NO: 937706 - DNA, 33 bp, Homo sapien
ttttcattttccacccgcttgacctatctcatg

SEQ ID NO: 937707 - DNA, 33 bp, Homo sapien
gtcttccataaatataataacctggaagacaat

SEQ ID NO: 937708 - DNA, 33 bp, Homo sapien
gtcttccataaatatagtaacctggaagacaat

SEQ ID NO: 937709 - DNA, 33 bp, Homo sapien
ttaacttattgattaacgagaaaaccagtaaga

SEQ ID NO: 937710 - DNA, 33 bp, Homo sapien
ttaacttattgattaatgagaaaaccagtaaga

SEQ ID NO: 937711 - DNA, 33 bp, Homo sapien
tattgatggcttgttaaaagcaggaggcaacag

SEQ ID NO: 937712 - DNA, 33 bp, Homo sapien
tattgatggcttgttataagcaggaggcaacag

SEQ ID NO: 937713 - DNA, 33 bp, Homo sapien
ctggtcactgtgctaagaggtattgggcagaga

SEQ ID NO: 937714 - DNA, 33 bp, Homo sapien
ctggtcactgtgctaataggtattgggcagaga

SEQ ID NO: 937715 - DNA, 33 bp, Homo sapien
cttcccgcaacaactacgcattgatcatttgga

SEQ ID NO: 937716 - DNA, 33 bp, Homo sapien
cttcccgcaacaactatgcattgatcatttgga

SEQ ID NO: 937717 - DNA, 33 bp, Homo sapien
actgatctggaggtccggccttttggacccttt

SEQ ID NO: 937718 - DNA, 33 bp, Homo sapien
actgatctggaggtcctgccttttggacccttt

SEQ ID NO: 937719 - DNA, 33 bp, Homo sapien
gatttatcacaaaaacagaactaaagacaaaaa

SEQ ID NO: 937720 - DNA, 33 bp, Homo sapien
gatttatcacaaaaactgaactaaagacaaaaa

SEQ ID NO: 937721 - DNA, 33 bp, Homo sapien
aagaatctacataagaagatcatccccaataca

SEQ ID NO: 937722 - DNA, 33 bp, Homo sapien
aagaatctacataagaggatcatccccaataca

SEQ ID NO: 937723 - DNA, 33 bp, Homo sapien
aagctacatttcatccaagaagaggaagccagt

SEQ ID NO: 937724 - DNA, 33 bp, Homo sapien
aagctacatttcatccgagaagaggaagccagt

SEQ ID NO: 937725 - DNA, 33 bp, Homo sapien
cacttcaaagcctgaacgctggaatagctaagt

SEQ ID NO: 937726 - DNA, 33 bp, Homo sapien
cacttcaaagcctgaatgctggaatagctaagt

SEQ ID NO: 937727 - DNA, 33 bp, Homo sapien
ttttaattctctgggacgaagctctcagcatga

SEQ ID NO: 937728 - DNA, 33 bp, Homo sapien
ttttaattctctgggatgaagctctcagcatga

SEQ ID NO: 937729 - DNA, 33 bp, Homo sapien
ctgacccacatggacccaagttcaggttcatcc

SEQ ID NO: 937730 - DNA, 33 bp, Homo sapien
ctgacccacatggaccgaagttcaggttcatcc

SEQ ID NO: 937731 - DNA, 33 bp, Homo sapien
gcctaacacagcttggcattggagtccttgaac

SEQ ID NO: 937732 - DNA, 33 bp, Homo sapien
gcctaacacagcttggtattggagtccttgaac

SEQ ID NO: 937733 - DNA, 33 bp, Homo sapien
caagaaaacacaaactaaacaataatcagaata

SEQ ID NO: 937734 - DNA, 33 bp, Homo sapien
caagaaaacacaaactgaacaataatcagaata

SEQ ID NO: 937735 - DNA, 33 bp, Homo sapien
agaagaatgaaaaagcacgaagaaatcctacag

SEQ ID NO: 937736 - DNA, 33 bp, Homo sapien
agaagaatgaaaaagcgcgaagaaatcctacag

SEQ ID NO: 937737 - DNA, 33 bp, Homo sapien
gacttttgagaactgaatataatgcatctcagt

SEQ ID NO: 937738 - DNA, 33 bp, Homo sapien
gacttttgagaactgagtataatgcatctcagt

SEQ ID NO: 937739 - DNA, 33 bp, Homo sapien
atgcatgcaaaagggaatattttaggttgaaat

SEQ ID NO: 937740 - DNA, 33 bp, Homo sapien
atgcatgcaaaagggagtattttaggttgaaat

SEQ ID NO: 937741 - DNA, 33 bp, Homo sapien
tgtggggaaacagaaacgctcttacactgttgg

SEQ ID NO: 937742 - DNA, 33 bp, Homo sapien
tgtggggaaacagaaatgctcttacactgttgg

SEQ ID NO: 937743 - DNA, 33 bp, Homo sapien
gaggattgctaacccaacatcaggcagaacaat

SEQ ID NO: 937744 - DNA, 33 bp, Homo sapien
gaggattgctaacccagcatcaggcagaacaat

SEQ ID NO: 937745 - DNA, 33 bp, Homo sapien
cactagcttttaactgcagtcctgaaagttttt

SEQ ID NO: 937746 - DNA, 33 bp, Homo sapien
cactagcttttaactggagtcctgaaagttttt

SEQ ID NO: 937747 - DNA, 33 bp, Homo sapien
ggcactggcaaaacaacgtgaggaatagctgtg

SEQ ID NO: 937748 - DNA, 33 bp, Homo sapien
ggcactggcaaaacaatgtgaggaatagctgtg

SEQ ID NO: 937749 - DNA, 33 bp, Homo sapien
gaagatggggaagaacaagtgggatcctatttt

SEQ ID NO: 937750 - DNA, 33 bp, Homo sapien
gaagatggggaagaacgagtgggatcctatttt

SEQ ID NO: 937751 - DNA, 33 bp, Homo sapien
agattcagtgtagaagccctcgattttaaaagt

SEQ ID NO: 937752 - DNA, 33 bp, Homo sapien
agattcagtgtagaagtcctcgattttaaaagt

SEQ ID NO: 937753 - DNA, 33 bp, Homo sapien
cacatctgaataggaagggcgtagtctgagcac

SEQ ID NO: 937754 - DNA, 33 bp, Homo sapien
cacatctgaataggaatggcgtagtctgagcac

SEQ ID NO: 937755 - DNA, 33 bp, Homo sapien
tagtatttcagtgacaatatgaatggaaaggga

SEQ ID NO: 937756 - DNA, 33 bp, Homo sapien
tagtatttcagtgacagtatgaatggaaaggga

SEQ ID NO: 937757 - DNA, 33 bp, Homo sapien
acctcttacttggctgaactccccagttgaggt

SEQ ID NO: 937758 - DNA, 33 bp, Homo sapien
acctcttacttggctggactccccagttgaggt

SEQ ID NO: 937759 - DNA, 33 bp, Homo sapien
ttccctatggccaaaaaatgccctcaggatatc

SEQ ID NO: 937760 - DNA, 33 bp, Homo sapien
ttccctatggccaaaagatgccctcaggatatc

SEQ ID NO: 937761 - DNA, 33 bp, Homo sapien
catttaacaaaagttagcaaaggcttaaatata

SEQ ID NO: 937762 - DNA, 33 bp, Homo sapien
catttaacaaaagttatcaaaggcttaaatata

SEQ ID NO: 937763 - DNA, 33 bp, Homo sapien
gtttgccaacatgaaacgtcttccactgaggca

SEQ ID NO: 937764 - DNA, 33 bp, Homo sapien
gtttgccaacatgaaaggtcttccactgaggca

SEQ ID NO: 937765 - DNA, 33 bp, Homo sapien
aaaaataaagcagtcaaatgtgtatcctgagtt

SEQ ID NO: 937766 - DNA, 33 bp, Homo sapien
aaaaataaagcagtcagatgtgtatcctgagtt

SEQ ID NO: 937767 - DNA, 33 bp, Homo sapien
gtaatcatgtggtttacgtcgttggttctgttt

SEQ ID NO: 937768 - DNA, 33 bp, Homo sapien
gtaatcatgtggtttaggtcgttggttctgttt

SEQ ID NO: 937769 - DNA, 33 bp, Homo sapien
attaaatctgtttttccccagcagaagcaggtt

SEQ ID NO: 937770 - DNA, 33 bp, Homo sapien
attaaatctgtttttctccagcagaagcaggtt

SEQ ID NO: 937771 - DNA, 33 bp, Homo sapien
gggcccagggcgccaacgtgagtaatggaggct

SEQ ID NO: 937772 - DNA, 33 bp, Homo sapien
gggcccagggcgccaatgtgagtaatggaggct

SEQ ID NO: 937773 - DNA, 33 bp, Homo sapien
catgtacatttgtgtacgtatgctttatgattt

SEQ ID NO: 937774 - DNA, 33 bp, Homo sapien
catgtacatttgtgtatgtatgctttatgattt

SEQ ID NO: 937775 - DNA, 33 bp, Homo sapien
tatgttaagtttgaggaaattggtagttcaagt

SEQ ID NO: 937776 - DNA, 33 bp, Homo sapien
tatgttaagtttgagggaattggtagttcaagt

SEQ ID NO: 937777 - DNA, 33 bp, Homo sapien
aggctgttcctacagacggggtttataagtact

SEQ ID NO: 937778 - DNA, 33 bp, Homo sapien
aggctgttcctacagatggggtttataagtact

SEQ ID NO: 937779 - DNA, 33 bp, Homo sapien
tgacagtgcgtgtgacaaaaataagtggccttg

SEQ ID NO: 937780 - DNA, 33 bp, Homo sapien
tgacagtgcgtgtgacgaaaataagtggccttg

SEQ ID NO: 937781 - DNA, 33 bp, Homo sapien
gtagataaaaggaggcaagaaatagcaccaatg

SEQ ID NO: 937782 - DNA, 33 bp, Homo sapien
gtagataaaaggaggcgagaaatagcaccaatg

SEQ ID NO: 937783 - DNA, 33 bp, Homo sapien
cctccccagatcccagaagtatatatgcggata

SEQ ID NO: 937784 - DNA, 33 bp, Homo sapien
cctccccagatcccaggagtatatatgcggata

SEQ ID NO: 937785 - DNA, 33 bp, Homo sapien
tcacacctaagaccacaggggaaatctcctatg

SEQ ID NO: 937786 - DNA, 33 bp, Homo sapien
tcacacctaagaccactggggaaatctcctatg

SEQ ID NO: 937787 - DNA, 33 bp, Homo sapien
acttcttctcctccagaccattcctatgatgtc

SEQ ID NO: 937788 - DNA, 33 bp, Homo sapien
acttcttctcctccagcccattcctatgatgtc

SEQ ID NO: 937789 - DNA, 33 bp, Homo sapien
cacctgctggactcccaagaaacccagtcacag

SEQ ID NO: 937790 - DNA, 33 bp, Homo sapien
cacctgctggactcccgagaaacccagtcacag

SEQ ID NO: 937791 - DNA, 33 bp, Homo sapien
ctgatagagttgtccacgttcttgaagtgttga

SEQ ID NO: 937792 - DNA, 33 bp, Homo sapien
ctgatagagttgtccaggttcttgaagtgttga

SEQ ID NO: 937793 - DNA, 33 bp, Homo sapien
ttgatttttgctccctcacttacagatgcttgt

SEQ ID NO: 937794 - DNA, 33 bp, Homo sapien
ttgatttttgctcccttacttacagatgcttgt

SEQ ID NO: 937795 - DNA, 33 bp, Homo sapien
gtcaaagcactaggatcagattgttggatacat

SEQ ID NO: 937796 - DNA, 33 bp, Homo sapien
gtcaaagcactaggattagattgttggatacat

SEQ ID NO: 937797 - DNA, 33 bp, Homo sapien
tgggcaaggttgctaacggtgagcacagttggt

SEQ ID NO: 937798 - DNA, 33 bp, Homo sapien
tgggcaaggttgctaatggtgagcacagttggt

SEQ ID NO: 937799 - DNA, 33 bp, Homo sapien
agcagaggatcaaaaaatctcaagttgtggagg

SEQ ID NO: 937800 - DNA, 33 bp, Homo sapien
agcagaggatcaaaaagtctcaagttgtggagg

SEQ ID NO: 937801 - DNA, 33 bp, Homo sapien
accagcacacatggagaaatggagtccaagagg

SEQ ID NO: 937802 - DNA, 33 bp, Homo sapien
accagcacacatggagtaatggagtccaagagg

SEQ ID NO: 937803 - DNA, 33 bp, Homo sapien
gttcatgctctttacaaggatgttgatgaagct

SEQ ID NO: 937804 - DNA, 33 bp, Homo sapien
gttcatgctctttacagggatgttgatgaagct

SEQ ID NO: 937805 - DNA, 33 bp, Homo sapien
cctgcaaggaacatgaaagttacaagagtcact

SEQ ID NO: 937806 - DNA, 33 bp, Homo sapien
cctgcaaggaacatgagagttacaagagtcact

SEQ ID NO: 937807 - DNA, 33 bp, Homo sapien
gtgtgtcaataatgacaatctctctatttcccc

SEQ ID NO: 937808 - DNA, 33 bp, Homo sapien
gtgtgtcaataatgacgatctctctatttcccc

SEQ ID NO: 937809 - DNA, 33 bp, Homo sapien
ggggtcctggtgcagacagcaagtagcacctct

SEQ ID NO: 937810 - DNA, 33 bp, Homo sapien
ggggtcctggtgcagagagcaagtagcacctct

SEQ ID NO: 937811 - DNA, 33 bp, Homo sapien
catcagggagccaccactgaggtcttccttgtg

SEQ ID NO: 937812 - DNA, 33 bp, Homo sapien
catcagggagccaccattgaggtcttccttgtg

SEQ ID NO: 937813 - DNA, 33 bp, Homo sapien
ctgatggattacatgcacgactcagataacaaa

SEQ ID NO: 937814 - DNA, 33 bp, Homo sapien
ctgatggattacatgcgcgactcagataacaaa

SEQ ID NO: 937815 - DNA, 33 bp, Homo sapien
gttctattggttagaaataggtctcagatccca

SEQ ID NO: 937816 - DNA, 33 bp, Homo sapien
gttctattggttagaagtaggtctcagatccca

SEQ ID NO: 937817 - DNA, 33 bp, Homo sapien
aaccccaagcaaataaaacatccacaagaagaa

SEQ ID NO: 937818 - DNA, 33 bp, Homo sapien
aaccccaagcaaataagacatccacaagaagaa

SEQ ID NO: 937819 - DNA, 33 bp, Homo sapien
caatcaatgtcagttacgacttatggataaaca

SEQ ID NO: 937820 - DNA, 33 bp, Homo sapien
caatcaatgtcagttaggacttatggataaaca

SEQ ID NO: 937821 - DNA, 33 bp, Homo sapien
agagctgatatcctagaagcagatttcaatcaa

SEQ ID NO: 937822 - DNA, 33 bp, Homo sapien
agagctgatatcctaggagcagatttcaatcaa

SEQ ID NO: 937823 - DNA, 33 bp, Homo sapien
taacagcctgacagaagaagaggcataaccatt

SEQ ID NO: 937824 - DNA, 33 bp, Homo sapien
taacagcctgacagaataagaggcataaccatt

SEQ ID NO: 937825 - DNA, 33 bp, Homo sapien
cttcccacactaaagaagaagagattatccagg

SEQ ID NO: 937826 - DNA, 33 bp, Homo sapien
cttcccacactaaagaggaagagattatccagg

SEQ ID NO: 937827 - DNA, 33 bp, Homo sapien
tcttacgaaaatcaaaaagcaggtaaaagatgc

SEQ ID NO: 937828 - DNA, 33 bp, Homo sapien
tcttacgaaaatcaaagagcaggtaaaagatgc

SEQ ID NO: 937829 - DNA, 33 bp, Homo sapien
tatagatttgccagtggagacctccttgaccct

SEQ ID NO: 937830 - DNA, 33 bp, Homo sapien
tatagatttgccagtgtagacctccttgaccct

SEQ ID NO: 937831 - DNA, 33 bp, Homo sapien
tctttgagtcacaggccgatacccaagagctgt

SEQ ID NO: 937832 - DNA, 33 bp, Homo sapien
tctttgagtcacaggctgatacccaagagctgt

SEQ ID NO: 937833 - DNA, 33 bp, Homo sapien
agtgtttgactctgagaagcgccttgtatgccc

SEQ ID NO: 937834 - DNA, 33 bp, Homo sapien
agtgtttgactctgaggagcgccttgtatgccc

SEQ ID NO: 937835 - DNA, 33 bp, Homo sapien
gttgtattagccaataaatttcctacttattta

SEQ ID NO: 937836 - DNA, 33 bp, Homo sapien
gttgtattagccaatagatttcctacttattta

SEQ ID NO: 937837 - DNA, 33 bp, Homo sapien
attctaaaacattcaaagtaataaaaatttctc

SEQ ID NO: 937838 - DNA, 33 bp, Homo sapien
attctaaaacattcaaggtaataaaaatttctc

SEQ ID NO: 937839 - DNA, 33 bp, Homo sapien
ggaattcagtggaaacaggtaatcagatgaaga

SEQ ID NO: 937840 - DNA, 33 bp, Homo sapien
ggaattcagtggaaaccggtaatcagatgaaga

SEQ ID NO: 937841 - DNA, 33 bp, Homo sapien
ctccttctacagcaataacctcttcctggatgc

SEQ ID NO: 937842 - DNA, 33 bp, Homo sapien
ctccttctacagcaatgacctcttcctggatgc

SEQ ID NO: 937843 - DNA, 33 bp, Homo sapien
ctaggtaaaactatggacaaactggagatttta

SEQ ID NO: 937844 - DNA, 33 bp, Homo sapien
ctaggtaaaactatgggcaaactggagatttta

SEQ ID NO: 937845 - DNA, 33 bp, Homo sapien
tcacttttacttgacaatgcttcccacataatt

SEQ ID NO: 937846 - DNA, 33 bp, Homo sapien
tcacttttacttgacagtgcttcccacataatt

SEQ ID NO: 937847 - DNA, 33 bp, Homo sapien
ttagttccagggataaagcctgtgacccaaact

SEQ ID NO: 937848 - DNA, 33 bp, Homo sapien
ttagttccagggataacgcctgtgacccaaact

SEQ ID NO: 937849 - DNA, 33 bp, Homo sapien
ttcacaacatctccaagtgcaaaagttctccca

SEQ ID NO: 937850 - DNA, 33 bp, Homo sapien
ttcacaacatctccaattgcaaaagttctccca

SEQ ID NO: 937851 - DNA, 33 bp, Homo sapien
aactgttcaatacaaacggcttaaacaaactcc

SEQ ID NO: 937852 - DNA, 33 bp, Homo sapien
aactgttcaatacaaatggcttaaacaaactcc

SEQ ID NO: 937853 - DNA, 33 bp, Homo sapien
catcctgtttgggaaccctgtaagttctgctgc

SEQ ID NO: 937854 - DNA, 33 bp, Homo sapien
catcctgtttgggaacgctgtaagttctgctgc

SEQ ID NO: 937855 - DNA, 33 bp, Homo sapien
acaaagggctcctcaacagtaaacaaggaaggg

SEQ ID NO: 937856 - DNA, 33 bp, Homo sapien
acaaagggctcctcaatagtaaacaaggaaggg

SEQ ID NO: 937857 - DNA, 33 bp, Homo sapien
tctcatggctgttcacaacatgagcaacggcaa

SEQ ID NO: 937858 - DNA, 33 bp, Homo sapien
tctcatggctgttcacgacatgagcaacggcaa

SEQ ID NO: 937859 - DNA, 33 bp, Homo sapien
tgggtctctttccacactatccatttcaaccca

SEQ ID NO: 937860 - DNA, 33 bp, Homo sapien
tgggtctctttccacattatccatttcaaccca

SEQ ID NO: 937861 - DNA, 33 bp, Homo sapien
tggaattggcagggcaacaggaatgcgcatttg

SEQ ID NO: 937862 - DNA, 33 bp, Homo sapien
tggaattggcagggcaccaggaatgcgcatttg

SEQ ID NO: 937863 - DNA, 33 bp, Homo sapien
ttaaaattgtggtaatgatgcctagcccatgag

SEQ ID NO: 937864 - DNA, 33 bp, Homo sapien
ttaaaattgtggtaattatgcctagcccatgag

SEQ ID NO: 937865 - DNA, 33 bp, Homo sapien
ccacaattttaacatgcagcttaatgctaattg

SEQ ID NO: 937866 - DNA, 33 bp, Homo sapien
ccacaattttaacatggagcttaatgctaattg

SEQ ID NO: 937867 - DNA, 33 bp, Homo sapien
gaaactgctttgaaaaataggtagagtacgaat

SEQ ID NO: 937868 - DNA, 33 bp, Homo sapien
gaaactgctttgaaaagtaggtagagtacgaat

SEQ ID NO: 937869 - DNA, 33 bp, Homo sapien
tctttggtgacaatacccaagcttggtgcagaa

SEQ ID NO: 937870 - DNA, 33 bp, Homo sapien
tctttggtgacaatacgcaagcttggtgcagaa

SEQ ID NO: 937871 - DNA, 33 bp, Homo sapien
catttgtacagtgacaagtttgggctatgattt

SEQ ID NO: 937872 - DNA, 33 bp, Homo sapien
catttgtacagtgacaggtttgggctatgattt

SEQ ID NO: 937873 - DNA, 33 bp, Homo sapien
aattcttaaattgccaagcattcaccttcttaa

SEQ ID NO: 937874 - DNA, 33 bp, Homo sapien
aattcttaaattgccaggcattcaccttcttaa

SEQ ID NO: 937875 - DNA, 33 bp, Homo sapien
ttcatattttatcaagcagttttaggatttttt

SEQ ID NO: 937876 - DNA, 33 bp, Homo sapien
ttcatattttatcaaggagttttaggatttttt

SEQ ID NO: 937877 - DNA, 33 bp, Homo sapien
tgtccacctgaaatcacattgtacagtctaggc

SEQ ID NO: 937878 - DNA, 33 bp, Homo sapien
tgtccacctgaaatcatattgtacagtctaggc

SEQ ID NO: 937879 - DNA, 33 bp, Homo sapien
ttcttaccattcttcactcagataaatgaatgt

SEQ ID NO: 937880 - DNA, 33 bp, Homo sapien
ttcttaccattcttcagtcagataaatgaatgt

SEQ ID NO: 937881 - DNA, 33 bp, Homo sapien
cattgcccaccagttgaaacttgccagctccct

SEQ ID NO: 937882 - DNA, 33 bp, Homo sapien
cattgcccaccagttggaacttgccagctccct

SEQ ID NO: 937883 - DNA, 33 bp, Homo sapien
cagaaacagtaggaaacgcagtaaaggaagctg

SEQ ID NO: 937884 - DNA, 33 bp, Homo sapien
cagaaacagtaggaaatgcagtaaaggaagctg

SEQ ID NO: 937885 - DNA, 33 bp, Homo sapien
gccgctcactctctaaaagccaatgatgaggga

SEQ ID NO: 937886 - DNA, 33 bp, Homo sapien
gccgctcactctctaacagccaatgatgaggga

SEQ ID NO: 937887 - DNA, 33 bp, Homo sapien
tgaatgcagttgattccaggatcaaaggagagt

SEQ ID NO: 937888 - DNA, 33 bp, Homo sapien
tgaatgcagttgattctaggatcaaaggagagt

SEQ ID NO: 937889 - DNA, 33 bp, Homo sapien
agaggcagacaggctaaatttggaggagacaag

SEQ ID NO: 937890 - DNA, 33 bp, Homo sapien
agaggcagacaggctatatttggaggagacaag

SEQ ID NO: 937891 - DNA, 33 bp, Homo sapien
gcaggaatttaggtaaaacatagcaaaagcaca

SEQ ID NO: 937892 - DNA, 33 bp, Homo sapien
gcaggaatttaggtaagacatagcaaaagcaca

SEQ ID NO: 937893 - DNA, 33 bp, Homo sapien
cagttccacatggataacgcaggataatctccc

SEQ ID NO: 937894 - DNA, 33 bp, Homo sapien
cagttccacatggatagcgcaggataatctccc

SEQ ID NO: 937895 - DNA, 33 bp, Homo sapien
tggaatattactctgcaatcaaaaggaacagac

SEQ ID NO: 937896 - DNA, 33 bp, Homo sapien
tggaatattactctgcgatcaaaaggaacagac

SEQ ID NO: 937897 - DNA, 33 bp, Homo sapien
gggtctaagctttaagaagagacttccagtgca

SEQ ID NO: 937898 - DNA, 33 bp, Homo sapien
gggtctaagctttaaggagagacttccagtgca

SEQ ID NO: 937899 - DNA, 33 bp, Homo sapien
gtatttcccatatggcagacattgttacaaaca

SEQ ID NO: 937900 - DNA, 33 bp, Homo sapien
gtatttcccatatggcggacattgttacaaaca

SEQ ID NO: 937901 - DNA, 33 bp, Homo sapien
aggcaatgcgctctccaccgaagtgcacgttca

SEQ ID NO: 937902 - DNA, 33 bp, Homo sapien
aggcaatgcgctctccgccgaagtgcacgttca

SEQ ID NO: 937903 - DNA, 33 bp, Homo sapien
gacatcatggatcagaaagaagccatctccagg

SEQ ID NO: 937904 - DNA, 33 bp, Homo sapien
gacatcatggatcagagagaagccatctccagg

SEQ ID NO: 937905 - DNA, 33 bp, Homo sapien
tcttggatgctaataccggaggcagcaattgtc

SEQ ID NO: 937906 - DNA, 33 bp, Homo sapien
tcttggatgctaatactggaggcagcaattgtc

SEQ ID NO: 937907 - DNA, 33 bp, Homo sapien
caagaaggaagccgcacgccttttatgacctaa

SEQ ID NO: 937908 - DNA, 33 bp, Homo sapien
caagaaggaagccgcatgccttttatgacctaa

SEQ ID NO: 937909 - DNA, 33 bp, Homo sapien
aaaataagagtagccacgagtagttgaagctgg

SEQ ID NO: 937910 - DNA, 33 bp, Homo sapien
aaaataagagtagccatgagtagttgaagctgg

SEQ ID NO: 937911 - DNA, 33 bp, Homo sapien
gagtttggctttctccaccactaagcatatgct

SEQ ID NO: 937912 - DNA, 33 bp, Homo sapien
gagtttggctttctccgccactaagcatatgct

SEQ ID NO: 937913 - DNA, 33 bp, Homo sapien
ctaatctgcagaattaaaacaattccctagttc

SEQ ID NO: 937914 - DNA, 33 bp, Homo sapien
ctaatctgcagaattagaacaattccctagttc

SEQ ID NO: 937915 - DNA, 33 bp, Homo sapien
caaaatgggagtaactaaaggaggaagagagag

SEQ ID NO: 937916 - DNA, 33 bp, Homo sapien
caaaatgggagtaactgaaggaggaagagagag

SEQ ID NO: 937917 - DNA, 33 bp, Homo sapien
gaacatatttctagaaagacactgccaagacca

SEQ ID NO: 937918 - DNA, 33 bp, Homo sapien
gaacatatttctagaaggacactgccaagacca

SEQ ID NO: 937919 - DNA, 33 bp, Homo sapien
atgcaagatcaagatacaaactgtaggctgggc

SEQ ID NO: 937920 - DNA, 33 bp, Homo sapien
atgcaagatcaagatataaactgtaggctgggc

SEQ ID NO: 937921 - DNA, 33 bp, Homo sapien
gactgtcctttcataaaatattgccttgtagca

SEQ ID NO: 937922 - DNA, 33 bp, Homo sapien
gactgtcctttcataatatattgccttgtagca

SEQ ID NO: 937923 - DNA, 33 bp, Homo sapien
atcttttagccaatgaaaagccaagtgccccag

SEQ ID NO: 937924 - DNA, 33 bp, Homo sapien
atcttttagccaatgacaagccaagtgccccag

SEQ ID NO: 937925 - DNA, 33 bp, Homo sapien
ggctatctcacggcgacgtcagccacatgtgaa

SEQ ID NO: 937926 - DNA, 33 bp, Homo sapien
ggctatctcacggcgatgtcagccacatgtgaa

SEQ ID NO: 937927 - DNA, 33 bp, Homo sapien
atccctacatcctccacgtatcagttagcatgg

SEQ ID NO: 937928 - DNA, 33 bp, Homo sapien
atccctacatcctccatgtatcagttagcatgg

SEQ ID NO: 937929 - DNA, 33 bp, Homo sapien
gccctcactgttgctgcagggaattgccttatg

SEQ ID NO: 937930 - DNA, 33 bp, Homo sapien
gccctcactgttgctgtagggaattgccttatg

SEQ ID NO: 937931 - DNA, 33 bp, Homo sapien
ttcatgaggaagtaaccagaaattgtggtgtaa

SEQ ID NO: 937932 - DNA, 33 bp, Homo sapien
ttcatgaggaagtaactagaaattgtggtgtaa

SEQ ID NO: 937933 - DNA, 33 bp, Homo sapien
gaaaaggtagatcccacagacccgaatctggaa

SEQ ID NO: 937934 - DNA, 33 bp, Homo sapien
gaaaaggtagatcccatagacccgaatctggaa

SEQ ID NO: 937935 - DNA, 33 bp, Homo sapien
tgttcccatgctctggaatgcctctgaggtgga

SEQ ID NO: 937936 - DNA, 33 bp, Homo sapien
tgttcccatgctctgggatgcctctgaggtgga

SEQ ID NO: 937937 - DNA, 33 bp, Homo sapien
cgtgtcttgttggtcacggtggctcaacacttc

SEQ ID NO: 937938 - DNA, 33 bp, Homo sapien
cgtgtcttgttggtcatggtggctcaacacttc

SEQ ID NO: 937939 - DNA, 33 bp, Homo sapien
catttcttcctgtgcccattcctttaaatcaga

SEQ ID NO: 937940 - DNA, 33 bp, Homo sapien
catttcttcctgtgcctattcctttaaatcaga

SEQ ID NO: 937941 - DNA, 33 bp, Homo sapien
tctatgcacattaataacccttttgcatttgtg

SEQ ID NO: 937942 - DNA, 33 bp, Homo sapien
tctatgcacattaatagcccttttgcatttgtg

SEQ ID NO: 937943 - DNA, 33 bp, Homo sapien
ttttgtcaacgtgcaacacaagtccagaggtgc

SEQ ID NO: 937944 - DNA, 33 bp, Homo sapien
ttttgtcaacgtgcaatacaagtccagaggtgc

SEQ ID NO: 937945 - DNA, 33 bp, Homo sapien
gttttagtggatttcacgggtggacaaactctc

SEQ ID NO: 937946 - DNA, 33 bp, Homo sapien
gttttagtggatttcatgggtggacaaactctc

SEQ ID NO: 937947 - DNA, 33 bp, Homo sapien
aggtgctctctcaaacgcccttgtacgtgtgcc

SEQ ID NO: 937948 - DNA, 33 bp, Homo sapien
aggtgctctctcaaactcccttgtacgtgtgcc

SEQ ID NO: 937949 - DNA, 33 bp, Homo sapien
atctctaccgcgacgaagtgcagaacgcccagc

SEQ ID NO: 937950 - DNA, 33 bp, Homo sapien
atctctaccgcgacgaggtgcagaacgcccagc

SEQ ID NO: 937951 - DNA, 33 bp, Homo sapien
gcggtcaatggcccgcgctgagtaggtttttcc

SEQ ID NO: 937952 - DNA, 33 bp, Homo sapien
gcggtcaatggcccgctctgagtaggtttttcc

SEQ ID NO: 937953 - DNA, 33 bp, Homo sapien
tctgtttggcccccaactaattcactctaggat

SEQ ID NO: 937954 - DNA, 33 bp, Homo sapien
tctgtttggcccccaagtaattcactctaggat

SEQ ID NO: 937955 - DNA, 33 bp, Homo sapien
tgctcctgacactggcaagacaattttcggagg

SEQ ID NO: 937956 - DNA, 33 bp, Homo sapien
tgctcctgacactggcgagacaattttcggagg

SEQ ID NO: 937957 - DNA, 33 bp, Homo sapien
tgtgctcaaaactccacggactctcccctccca

SEQ ID NO: 937958 - DNA, 33 bp, Homo sapien
tgtgctcaaaactccatggactctcccctccca

SEQ ID NO: 937959 - DNA, 33 bp, Homo sapien
gctgaggtgagctagaagatgggatatgggatt

SEQ ID NO: 937960 - DNA, 33 bp, Homo sapien
gctgaggtgagctagacgatgggatatgggatt

SEQ ID NO: 937961 - DNA, 33 bp, Homo sapien
cgccctgaacatgcaactgtgcccagcaacggg

SEQ ID NO: 937962 - DNA, 33 bp, Homo sapien
cgccctgaacatgcaagtgtgcccagcaacggg

SEQ ID NO: 937963 - DNA, 33 bp, Homo sapien
gacccgcacagtgtcactctgatgtcagtgata

SEQ ID NO: 937964 - DNA, 33 bp, Homo sapien
gacccgcacagtgtcattctgatgtcagtgata

SEQ ID NO: 937965 - DNA, 33 bp, Homo sapien
ggctgctgcaagttgaacatcggtctgtggtct

SEQ ID NO: 937966 - DNA, 33 bp, Homo sapien
ggctgctgcaagttgagcatcggtctgtggtct

SEQ ID NO: 937967 - DNA, 33 bp, Homo sapien
gccctgtctgtgtcccccagcgtgagctgccgc

SEQ ID NO: 937968 - DNA, 33 bp, Homo sapien
gccctgtctgtgtccctcagcgtgagctgccgc

SEQ ID NO: 937969 - DNA, 33 bp, Homo sapien
ctggagagtgacccaaatagaccaggatggcca

SEQ ID NO: 937970 - DNA, 33 bp, Homo sapien
ctggagagtgacccaagtagaccaggatggcca

SEQ ID NO: 937971 - DNA, 33 bp, Homo sapien
tagtagaagagctagacgtgtgaacagcccaac

SEQ ID NO: 937972 - DNA, 33 bp, Homo sapien
tagtagaagagctagatgtgtgaacagcccaac

SEQ ID NO: 937973 - DNA, 33 bp, Homo sapien
gctctgggaaaagctcagaagcagatgtgcccc

SEQ ID NO: 937974 - DNA, 33 bp, Homo sapien
gctctgggaaaagctcggaagcagatgtgcccc

SEQ ID NO: 937975 - DNA, 33 bp, Homo sapien
cttaatctaggtcctacgctgtctcacttgtga

SEQ ID NO: 937976 - DNA, 33 bp, Homo sapien
cttaatctaggtcctaggctgtctcacttgtga

SEQ ID NO: 937977 - DNA, 33 bp, Homo sapien
acagacgcctcagagaaccaccattcaattcag

SEQ ID NO: 937978 - DNA, 33 bp, Homo sapien
acagacgcctcagagagccaccattcaattcag

SEQ ID NO: 937979 - DNA, 33 bp, Homo sapien
catggcttcaccgcagcagtgcttttattatta

SEQ ID NO: 937980 - DNA, 33 bp, Homo sapien
catggcttcaccgcagtagtgcttttattatta

SEQ ID NO: 937981 - DNA, 33 bp, Homo sapien
atgtggtgctgttgaaaatgggggatgctggaa

SEQ ID NO: 937982 - DNA, 33 bp, Homo sapien
atgtggtgctgttgaagatgggggatgctggaa

SEQ ID NO: 937983 - DNA, 33 bp, Homo sapien
tctgaccctgggctgaaccaatgagcaaaagag

SEQ ID NO: 937984 - DNA, 33 bp, Homo sapien
tctgaccctgggctgacccaatgagcaaaagag

SEQ ID NO: 937985 - DNA, 33 bp, Homo sapien
aaaactttcctgacccagagaaactagacaggg

SEQ ID NO: 937986 - DNA, 33 bp, Homo sapien
aaaactttcctgacccggagaaactagacaggg

SEQ ID NO: 937987 - DNA, 33 bp, Homo sapien
tgtagacacacttcaccgaattcactacgaaaa

SEQ ID NO: 937988 - DNA, 33 bp, Homo sapien
tgtagacacacttcacggaattcactacgaaaa

SEQ ID NO: 937989 - DNA, 33 bp, Homo sapien
cagtcaggggtatagacggccaggagtagacgc

SEQ ID NO: 937990 - DNA, 33 bp, Homo sapien
cagtcaggggtatagatggccaggagtagacgc

SEQ ID NO: 937991 - DNA, 33 bp, Homo sapien
ctcctggcagactccccctagagctgctttgag

SEQ ID NO: 937992 - DNA, 33 bp, Homo sapien
ctcctggcagactccctctagagctgctttgag

SEQ ID NO: 937993 - DNA, 33 bp, Homo sapien
attctaagccacagaacgtctccgagtctggat

SEQ ID NO: 937994 - DNA, 33 bp, Homo sapien
attctaagccacagaatgtctccgagtctggat

SEQ ID NO: 937995 - DNA, 33 bp, Homo sapien
acaagtttgttagctacgccaagcctctgtttc

SEQ ID NO: 937996 - DNA, 33 bp, Homo sapien
acaagtttgttagctatgccaagcctctgtttc

SEQ ID NO: 937997 - DNA, 33 bp, Homo sapien
agagaccttaatgaaacgaaggaggaaaccaag

SEQ ID NO: 937998 - DNA, 33 bp, Homo sapien
agagaccttaatgaaatgaaggaggaaaccaag

SEQ ID NO: 937999 - DNA, 33 bp, Homo sapien
actatagcttcgtgaaagtaggtattctgaata

SEQ ID NO: 938000 - DNA, 33 bp, Homo sapien
actatagcttcgtgaaggtaggtattctgaata

SEQ ID NO: 938001 - DNA, 33 bp, Homo sapien
agcaaaacagtagtgcaatcctttacaatgtgg

SEQ ID NO: 938002 - DNA, 33 bp, Homo sapien
agcaaaacagtagtgcgatcctttacaatgtgg

SEQ ID NO: 938003 - DNA, 33 bp, Homo sapien
gaagagttctgactaaatacgatgctgtaacca

SEQ ID NO: 938004 - DNA, 33 bp, Homo sapien
gaagagttctgactaagtacgatgctgtaacca

SEQ ID NO: 938005 - DNA, 33 bp, Homo sapien
acccttgtttctcagaatagactgaagattcac

SEQ ID NO: 938006 - DNA, 33 bp, Homo sapien
acccttgtttctcagactagactgaagattcac

SEQ ID NO: 938007 - DNA, 33 bp, Homo sapien
agggcactgtcctagacggagtggccaagaaag

SEQ ID NO: 938008 - DNA, 33 bp, Homo sapien
agggcactgtcctagatggagtggccaagaaag

SEQ ID NO: 938009 - DNA, 33 bp, Homo sapien
aggtctccctaccaaccgggctaggagcttggg

SEQ ID NO: 938010 - DNA, 33 bp, Homo sapien
aggtctccctaccaactgggctaggagcttggg

SEQ ID NO: 938011 - DNA, 33 bp, Homo sapien
caaggaacagggcacaatgacctacgcactcgt

SEQ ID NO: 938012 - DNA, 33 bp, Homo sapien
caaggaacagggcacagtgacctacgcactcgt

SEQ ID NO: 938013 - DNA, 33 bp, Homo sapien
gtcagatacatggaagaaccggtgtgagagcat

SEQ ID NO: 938014 - DNA, 33 bp, Homo sapien
gtcagatacatggaaggaccggtgtgagagcat

SEQ ID NO: 938015 - DNA, 33 bp, Homo sapien
atcacacgttgctcacaggatacacctagaaag

SEQ ID NO: 938016 - DNA, 33 bp, Homo sapien
atcacacgttgctcacgggatacacctagaaag

SEQ ID NO: 938017 - DNA, 33 bp, Homo sapien
tgtgctcatacaaggaacttaatcatgttacct

SEQ ID NO: 938018 - DNA, 33 bp, Homo sapien
tgtgctcatacaaggagcttaatcatgttacct

SEQ ID NO: 938019 - DNA, 33 bp, Homo sapien
gccaacactaacctcaaggtccccacttccagc

SEQ ID NO: 938020 - DNA, 33 bp, Homo sapien
gccaacactaacctcagggtccccacttccagc

SEQ ID NO: 938021 - DNA, 33 bp, Homo sapien
agatctcctgtcctagcatggagactctggaga

SEQ ID NO: 938022 - DNA, 33 bp, Homo sapien
agatctcctgtcctagtatggagactctggaga

SEQ ID NO: 938023 - DNA, 33 bp, Homo sapien
tggacttagatctctcacctttggagtacatga

SEQ ID NO: 938024 - DNA, 33 bp, Homo sapien
tggacttagatctctcgcctttggagtacatga

SEQ ID NO: 938025 - DNA, 33 bp, Homo sapien
tagtcttctttccataaacacgaagaaaggccc

SEQ ID NO: 938026 - DNA, 33 bp, Homo sapien
tagtcttctttccatatacacgaagaaaggccc

SEQ ID NO: 938027 - DNA, 33 bp, Homo sapien
cttgaaatcaattttaagctctatacctcagag

SEQ ID NO: 938028 - DNA, 33 bp, Homo sapien
cttgaaatcaattttaggctctatacctcagag

SEQ ID NO: 938029 - DNA, 33 bp, Homo sapien
aggccaagttggcagcagacagggcagtgggct

SEQ ID NO: 938030 - DNA, 33 bp, Homo sapien
aggccaagttggcagccgacagggcagtgggct

SEQ ID NO: 938031 - DNA, 33 bp, Homo sapien
catcgtcattttgtacagcaaatggtaattccc

SEQ ID NO: 938032 - DNA, 33 bp, Homo sapien
catcgtcattttgtacggcaaatggtaattccc

SEQ ID NO: 938033 - DNA, 33 bp, Homo sapien
gacctccaaatcctgcaactcctctggaacctc

SEQ ID NO: 938034 - DNA, 33 bp, Homo sapien
gacctccaaatcctgcgactcctctggaacctc

SEQ ID NO: 938035 - DNA, 33 bp, Homo sapien
gaagagagcccactccaagcccgttcaggatct

SEQ ID NO: 938036 - DNA, 33 bp, Homo sapien
gaagagagcccactccgagcccgttcaggatct

SEQ ID NO: 938037 - DNA, 33 bp, Homo sapien
gccgtccccacacagcacactagtaactcagca

SEQ ID NO: 938038 - DNA, 33 bp, Homo sapien
gccgtccccacacagcgcactagtaactcagca

SEQ ID NO: 938039 - DNA, 33 bp, Homo sapien
ttctgtctctctctacagcatggccagagtgat

SEQ ID NO: 938040 - DNA, 33 bp, Homo sapien
ttctgtctctctctacggcatggccagagtgat

SEQ ID NO: 938041 - DNA, 33 bp, Homo sapien
cacaaagttcaaggtaagaagaaatggtaagaa

SEQ ID NO: 938042 - DNA, 33 bp, Homo sapien
cacaaagttcaaggtaggaagaaatggtaagaa

SEQ ID NO: 938043 - DNA, 33 bp, Homo sapien
tccaccagtgggtggaagaaggaagccaaaagg

SEQ ID NO: 938044 - DNA, 33 bp, Homo sapien
tccaccagtgggtggaggaaggaagccaaaagg

SEQ ID NO: 938045 - DNA, 33 bp, Homo sapien
cactattggacaggaacaactatgagtcgcccc

SEQ ID NO: 938046 - DNA, 33 bp, Homo sapien
cactattggacaggaagaactatgagtcgcccc

SEQ ID NO: 938047 - DNA, 33 bp, Homo sapien
tactttaagccaatggccaaaatatggtgctgt

SEQ ID NO: 938048 - DNA, 33 bp, Homo sapien
tactttaagccaatgggcaaaatatggtgctgt

SEQ ID NO: 938049 - DNA, 33 bp, Homo sapien
cttacaggtcatatggaacttcttaaatctgtg

SEQ ID NO: 938050 - DNA, 33 bp, Homo sapien
cttacaggtcatatgggacttcttaaatctgtg

SEQ ID NO: 938051 - DNA, 33 bp, Homo sapien
tgatattaactgcaacagatggtcaacaataga

SEQ ID NO: 938052 - DNA, 33 bp, Homo sapien
tgatattaactgcaacggatggtcaacaataga

SEQ ID NO: 938053 - DNA, 33 bp, Homo sapien
aggccacctgagttgaagatgctgagaaagctt

SEQ ID NO: 938054 - DNA, 33 bp, Homo sapien
aggccacctgagttgaggatgctgagaaagctt

SEQ ID NO: 938055 - DNA, 33 bp, Homo sapien
ctggcacagtgcttaacacacagaatgggccaa

SEQ ID NO: 938056 - DNA, 33 bp, Homo sapien
ctggcacagtgcttaatacacagaatgggccaa

SEQ ID NO: 938057 - DNA, 33 bp, Homo sapien
ccggctactctccacaagggtatttggcccatt

SEQ ID NO: 938058 - DNA, 33 bp, Homo sapien
ccggctactctccacaggggtatttggcccatt

SEQ ID NO: 938059 - DNA, 33 bp, Homo sapien
actaaggcttccaacaccggaagttcttcatct

SEQ ID NO: 938060 - DNA, 33 bp, Homo sapien
actaaggcttccaacatcggaagttcttcatct

SEQ ID NO: 938061 - DNA, 33 bp, Homo sapien
tctctactaaaaatacaagaattagtggcgcat

SEQ ID NO: 938062 - DNA, 33 bp, Homo sapien
tctctactaaaaatacgagaattagtggcgcat

SEQ ID NO: 938063 - DNA, 33 bp, Homo sapien
ccctctggtggtgagactcagaatttgtgttag

SEQ ID NO: 938064 - DNA, 33 bp, Homo sapien
ccctctggtggtgagattcagaatttgtgttag

SEQ ID NO: 938065 - DNA, 33 bp, Homo sapien
ctagtttcttcacctacacataaggacataggg

SEQ ID NO: 938066 - DNA, 33 bp, Homo sapien
ctagtttcttcacctagacataaggacataggg

SEQ ID NO: 938067 - DNA, 33 bp, Homo sapien
cttctggggtcagagacgtatttgaaaccagtc

SEQ ID NO: 938068 - DNA, 33 bp, Homo sapien
cttctggggtcagagatgtatttgaaaccagtc

SEQ ID NO: 938069 - DNA, 33 bp, Homo sapien
tccctctggactttggacaccaagaagcattgc

SEQ ID NO: 938070 - DNA, 33 bp, Homo sapien
tccctctggactttgggcaccaagaagcattgc

SEQ ID NO: 938071 - DNA, 33 bp, Homo sapien
cattcttatgcagaagcagaaagggttgcgtta

SEQ ID NO: 938072 - DNA, 33 bp, Homo sapien
cattcttatgcagaaggagaaagggttgcgtta

SEQ ID NO: 938073 - DNA, 33 bp, Homo sapien
cacagattggttcaacaaggtgtgacaattaca

SEQ ID NO: 938074 - DNA, 33 bp, Homo sapien
cacagattggttcaacgaggtgtgacaattaca

SEQ ID NO: 938075 - DNA, 33 bp, Homo sapien
tctattttactaggaacccttgacaaaggctct

SEQ ID NO: 938076 - DNA, 33 bp, Homo sapien
tctattttactaggaatccttgacaaaggctct

SEQ ID NO: 938077 - DNA, 33 bp, Homo sapien
atgtataggaaaaatgaagtgtgtgtatatata

SEQ ID NO: 938078 - DNA, 33 bp, Homo sapien
atgtataggaaaaatgtagtgtgtgtatatata

SEQ ID NO: 938079 - DNA, 33 bp, Homo sapien
tatatatttttagagaagtctggagctcattta

SEQ ID NO: 938080 - DNA, 33 bp, Homo sapien
tatatatttttagagaggtctggagctcattta

SEQ ID NO: 938081 - DNA, 33 bp, Homo sapien
aatttaatgcctcatgacaatccttagtccctg

SEQ ID NO: 938082 - DNA, 33 bp, Homo sapien
aatttaatgcctcatggcaatccttagtccctg

SEQ ID NO: 938083 - DNA, 33 bp, Homo sapien
ctaatacagtttgtcaactcccaagcacatcat

SEQ ID NO: 938084 - DNA, 33 bp, Homo sapien
ctaatacagtttgtcacctcccaagcacatcat

SEQ ID NO: 938085 - DNA, 33 bp, Homo sapien
acacagtggataactacgccgtcctccagctgg

SEQ ID NO: 938086 - DNA, 33 bp, Homo sapien
acacagtggataactatgccgtcctccagctgg

SEQ ID NO: 938087 - DNA, 33 bp, Homo sapien
actatcaaaatgaaatcaccttctggcagtagt

SEQ ID NO: 938088 - DNA, 33 bp, Homo sapien
actatcaaaatgaaattaccttctggcagtagt

SEQ ID NO: 938089 - DNA, 33 bp, Homo sapien
tgagcatttagcccaaaggaacatggtttgcta

SEQ ID NO: 938090 - DNA, 33 bp, Homo sapien
tgagcatttagcccaagggaacatggtttgcta

SEQ ID NO: 938091 - DNA, 33 bp, Homo sapien
atactcatctctgtcactcccttggtctccaga

SEQ ID NO: 938092 - DNA, 33 bp, Homo sapien
atactcatctctgtcattcccttggtctccaga

SEQ ID NO: 938093 - DNA, 33 bp, Homo sapien
ataatgacctcatgaaaaaacaattttgttttt

SEQ ID NO: 938094 - DNA, 33 bp, Homo sapien
ataatgacctcatgaagaaacaattttgttttt

SEQ ID NO: 938095 - DNA, 33 bp, Homo sapien
cactgtcgccttgctaggaatgaagaaacaagg

SEQ ID NO: 938096 - DNA, 33 bp, Homo sapien
cactgtcgccttgctatgaatgaagaaacaagg

SEQ ID NO: 938097 - DNA, 33 bp, Homo sapien
tcgctctggtttctgacagcctgagagacacgg

SEQ ID NO: 938098 - DNA, 33 bp, Homo sapien
tcgctctggtttctgagagcctgagagacacgg

SEQ ID NO: 938099 - DNA, 33 bp, Homo sapien
agctacctggattttcccttctctgcagacaaa

SEQ ID NO: 938100 - DNA, 33 bp, Homo sapien
agctacctggattttctcttctctgcagacaaa

SEQ ID NO: 938101 - DNA, 33 bp, Homo sapien
tgggtggacaaagaagcaaatcagcaaatgcag

SEQ ID NO: 938102 - DNA, 33 bp, Homo sapien
tgggtggacaaagaagtaaatcagcaaatgcag

SEQ ID NO: 938103 - DNA, 33 bp, Homo sapien
gtgtgtctgtaagccaaaaaatcctcgaacgca

SEQ ID NO: 938104 - DNA, 33 bp, Homo sapien
gtgtgtctgtaagccagaaaatcctcgaacgca

SEQ ID NO: 938105 - DNA, 33 bp, Homo sapien
cctcatctgcaggacacgaaagctatgtgacct

SEQ ID NO: 938106 - DNA, 33 bp, Homo sapien
cctcatctgcaggacatgaaagctatgtgacct

SEQ ID NO: 938107 - DNA, 33 bp, Homo sapien
cgcagatgatggcaaactgataaaaatgtaaat

SEQ ID NO: 938108 - DNA, 33 bp, Homo sapien
cgcagatgatggcaaattgataaaaatgtaaat

SEQ ID NO: 938109 - DNA, 33 bp, Homo sapien
ccaagtttccatgaacagataaacagatcaaca

SEQ ID NO: 938110 - DNA, 33 bp, Homo sapien
ccaagtttccatgaacggataaacagatcaaca

SEQ ID NO: 938111 - DNA, 33 bp, Homo sapien
attgctgtccttcaccacctggtgtacagtgtc

SEQ ID NO: 938112 - DNA, 33 bp, Homo sapien
attgctgtccttcaccgcctggtgtacagtgtc

SEQ ID NO: 938113 - DNA, 33 bp, Homo sapien
gggacctggcaatgaccggttatcagtagatac

SEQ ID NO: 938114 - DNA, 33 bp, Homo sapien
gggacctggcaatgactggttatcagtagatac

SEQ ID NO: 938115 - DNA, 33 bp, Homo sapien
cataatattctccccgccacaagtcctgtgctg

SEQ ID NO: 938116 - DNA, 33 bp, Homo sapien
cataatattctccccggcacaagtcctgtgctg

SEQ ID NO: 938117 - DNA, 33 bp, Homo sapien
ctcaagtgttgctttacccttggaggcactggg

SEQ ID NO: 938118 - DNA, 33 bp, Homo sapien
ctcaagtgttgctttatccttggaggcactggg

SEQ ID NO: 938119 - DNA, 33 bp, Homo sapien
ggtggggaagtcagaacccggagtgtgtggctg

SEQ ID NO: 938120 - DNA, 33 bp, Homo sapien
ggtggggaagtcagaatccggagtgtgtggctg

SEQ ID NO: 938121 - DNA, 33 bp, Homo sapien
cattgatgaatagataactaaactgtggtactt

SEQ ID NO: 938122 - DNA, 33 bp, Homo sapien
cattgatgaatagatagctaaactgtggtactt

SEQ ID NO: 938123 - DNA, 33 bp, Homo sapien
gctcaacatcagttcaaatgtatagcgttcatt

SEQ ID NO: 938124 - DNA, 33 bp, Homo sapien
gctcaacatcagttcacatgtatagcgttcatt

SEQ ID NO: 938125 - DNA, 33 bp, Homo sapien
ttgctaggaaaaaacaagagttctttgtgttca

SEQ ID NO: 938126 - DNA, 33 bp, Homo sapien
ttgctaggaaaaaacaggagttctttgtgttca

SEQ ID NO: 938127 - DNA, 33 bp, Homo sapien
ggtttgggtttgttcaatatcttatcctttgaa

SEQ ID NO: 938128 - DNA, 33 bp, Homo sapien
ggtttgggtttgttcagtatcttatcctttgaa

SEQ ID NO: 938129 - DNA, 33 bp, Homo sapien
caatccagttgctccaagagaaaatcactaaaa

SEQ ID NO: 938130 - DNA, 33 bp, Homo sapien
caatccagttgctccacgagaaaatcactaaaa

SEQ ID NO: 938131 - DNA, 33 bp, Homo sapien
ccaatctgataggtgaaaaaaagcagtgtactt

SEQ ID NO: 938132 - DNA, 33 bp, Homo sapien
ccaatctgataggtgagaaaaagcagtgtactt

SEQ ID NO: 938133 - DNA, 33 bp, Homo sapien
cggtcatagaggtttccaaaatttggtgttcac

SEQ ID NO: 938134 - DNA, 33 bp, Homo sapien
cggtcatagaggtttctaaaatttggtgttcac

SEQ ID NO: 938135 - DNA, 33 bp, Homo sapien
tcttaaaaagataccactgaaaagctactgggc

SEQ ID NO: 938136 - DNA, 33 bp, Homo sapien
tcttaaaaagataccattgaaaagctactgggc

SEQ ID NO: 938137 - DNA, 33 bp, Homo sapien
ctgcatttcgcagtgacccatttacatggcatt

SEQ ID NO: 938138 - DNA, 33 bp, Homo sapien
ctgcatttcgcagtgatccatttacatggcatt

SEQ ID NO: 938139 - DNA, 33 bp, Homo sapien
ttaaggttatagggacacttgtcagaacgttga

SEQ ID NO: 938140 - DNA, 33 bp, Homo sapien
ttaaggttatagggacgcttgtcagaacgttga

SEQ ID NO: 938141 - DNA, 33 bp, Homo sapien
gttataggataggtaccattatgatgtccattt

SEQ ID NO: 938142 - DNA, 33 bp, Homo sapien
gttataggataggtactattatgatgtccattt

SEQ ID NO: 938143 - DNA, 33 bp, Homo sapien
atgagatgaagaggacacacatgggagatttcc

SEQ ID NO: 938144 - DNA, 33 bp, Homo sapien
atgagatgaagaggacgcacatgggagatttcc

SEQ ID NO: 938145 - DNA, 33 bp, Homo sapien
agttgaatgttaataactacctgatggcatagt

SEQ ID NO: 938146 - DNA, 33 bp, Homo sapien
agttgaatgttaataattacctgatggcatagt

SEQ ID NO: 938147 - DNA, 33 bp, Homo sapien
actgttatgtctcacactggtgtcattccaaat

SEQ ID NO: 938148 - DNA, 33 bp, Homo sapien
actgttatgtctcacattggtgtcattccaaat

SEQ ID NO: 938149 - DNA, 33 bp, Homo sapien
caacacataatgatgaatactttggatgtgttc

SEQ ID NO: 938150 - DNA, 33 bp, Homo sapien
caacacataatgatgagtactttggatgtgttc

SEQ ID NO: 938151 - DNA, 33 bp, Homo sapien
ggggtttgctttagaagcattcagaggaataga

SEQ ID NO: 938152 - DNA, 33 bp, Homo sapien
ggggtttgctttagaatcattcagaggaataga

SEQ ID NO: 938153 - DNA, 33 bp, Homo sapien
agacctcagatcaaacagtggtcaaacctatcc

SEQ ID NO: 938154 - DNA, 33 bp, Homo sapien
agacctcagatcaaaccgtggtcaaacctatcc

SEQ ID NO: 938155 - DNA, 33 bp, Homo sapien
gtttctctgttattaacattgaggctttgatct

SEQ ID NO: 938156 - DNA, 33 bp, Homo sapien
gtttctctgttattaagattgaggctttgatct

SEQ ID NO: 938157 - DNA, 33 bp, Homo sapien
ggaaagtggccctgaacgaggccaagtctagtt

SEQ ID NO: 938158 - DNA, 33 bp, Homo sapien
ggaaagtggccctgaatgaggccaagtctagtt

SEQ ID NO: 938159 - DNA, 33 bp, Homo sapien
atgtgttgcttacccacgagaatgcattgagaa

SEQ ID NO: 938160 - DNA, 33 bp, Homo sapien
atgtgttgcttacccatgagaatgcattgagaa

SEQ ID NO: 938161 - DNA, 33 bp, Homo sapien
tttcatttcctagtaggccaaatatgagaggga

SEQ ID NO: 938162 - DNA, 33 bp, Homo sapien
tttcatttcctagtagtccaaatatgagaggga

SEQ ID NO: 938163 - DNA, 33 bp, Homo sapien
actaggaaatgaaaaaattgataccttagcacc

SEQ ID NO: 938164 - DNA, 33 bp, Homo sapien
actaggaaatgaaaaacttgataccttagcacc

SEQ ID NO: 938165 - DNA, 33 bp, Homo sapien
ctactgttattttgtcaacatatcaatcacaat

SEQ ID NO: 938166 - DNA, 33 bp, Homo sapien
ctactgttattttgtctacatatcaatcacaat

SEQ ID NO: 938167 - DNA, 33 bp, Homo sapien
gcattattattactacaaaatatcatgtaatgt

SEQ ID NO: 938168 - DNA, 33 bp, Homo sapien
gcattattattactaccaaatatcatgtaatgt

SEQ ID NO: 938169 - DNA, 33 bp, Homo sapien
gcaacagtaactgagcagcatccagaaactcat

SEQ ID NO: 938170 - DNA, 33 bp, Homo sapien
gcaacagtaactgagcggcatccagaaactcat

SEQ ID NO: 938171 - DNA, 33 bp, Homo sapien
atccaggcttttcctcacagtggcaatgtaact

SEQ ID NO: 938172 - DNA, 33 bp, Homo sapien
atccaggcttttcctcgcagtggcaatgtaact

SEQ ID NO: 938173 - DNA, 33 bp, Homo sapien
ctaggattggtggggggaagcattaggaatgat

SEQ ID NO: 938174 - DNA, 33 bp, Homo sapien
ctaggattggtgggggtaagcattaggaatgat

SEQ ID NO: 938175 - DNA, 33 bp, Homo sapien
ggcccttatagagaccaaacaagctagccacga

SEQ ID NO: 938176 - DNA, 33 bp, Homo sapien
ggcccttatagagaccgaacaagctagccacga

SEQ ID NO: 938177 - DNA, 33 bp, Homo sapien
cataggcatataatagaatactgcataatggag

SEQ ID NO: 938178 - DNA, 33 bp, Homo sapien
cataggcatataataggatactgcataatggag

SEQ ID NO: 938179 - DNA, 33 bp, Homo sapien
ttagtataaactttacaattataggtggcacca

SEQ ID NO: 938180 - DNA, 33 bp, Homo sapien
ttagtataaactttacgattataggtggcacca

SEQ ID NO: 938181 - DNA, 33 bp, Homo sapien
cgtacttgcccctctcaaatttgatctgtgctt

SEQ ID NO: 938182 - DNA, 33 bp, Homo sapien
cgtacttgcccctctcgaatttgatctgtgctt

SEQ ID NO: 938183 - DNA, 33 bp, Homo sapien
acaggtcatagtaacagattcaaaacttgtctt

SEQ ID NO: 938184 - DNA, 33 bp, Homo sapien
acaggtcatagtaacatattcaaaacttgtctt

SEQ ID NO: 938185 - DNA, 33 bp, Homo sapien
agatctttaaaagtaacgttgatcaaagcacac

SEQ ID NO: 938186 - DNA, 33 bp, Homo sapien
agatctttaaaagtaatgttgatcaaagcacac

SEQ ID NO: 938187 - DNA, 33 bp, Homo sapien
tgcacacatttatggacgtatgtgtaatctctg

SEQ ID NO: 938188 - DNA, 33 bp, Homo sapien
tgcacacatttatggatgtatgtgtaatctctg

SEQ ID NO: 938189 - DNA, 33 bp, Homo sapien
tggcagagccattacaataagtcaccaatagaa

SEQ ID NO: 938190 - DNA, 33 bp, Homo sapien
tggcagagccattacagtaagtcaccaatagaa

SEQ ID NO: 938191 - DNA, 33 bp, Homo sapien
gggagagaatgcggaccgctctaaagaggctgc

SEQ ID NO: 938192 - DNA, 33 bp, Homo sapien
gggagagaatgcggactgctctaaagaggctgc

SEQ ID NO: 938193 - DNA, 33 bp, Homo sapien
taccactagaacttacaagtgaatttagcaagg

SEQ ID NO: 938194 - DNA, 33 bp, Homo sapien
taccactagaacttacgagtgaatttagcaagg

SEQ ID NO: 938195 - DNA, 33 bp, Homo sapien
aactccatctctgctaaacatacacaacttagc

SEQ ID NO: 938196 - DNA, 33 bp, Homo sapien
aactccatctctgctagacatacacaacttagc

SEQ ID NO: 938197 - DNA, 33 bp, Homo sapien
gtgggcaattacgcaaactttacctctagggaa

SEQ ID NO: 938198 - DNA, 33 bp, Homo sapien
gtgggcaattacgcaacctttacctctagggaa

SEQ ID NO: 938199 - DNA, 33 bp, Homo sapien
acgactatgcaaataccactgatacctgagcca

SEQ ID NO: 938200 - DNA, 33 bp, Homo sapien
acgactatgcaaatactactgatacctgagcca

SEQ ID NO: 938201 - DNA, 33 bp, Homo sapien
gctttttaaataaaccacctagatccaatgtca

SEQ ID NO: 938202 - DNA, 33 bp, Homo sapien
gctttttaaataaaccgcctagatccaatgtca

SEQ ID NO: 938203 - DNA, 33 bp, Homo sapien
tagaaaaacactggacagagaagtagagctggg

SEQ ID NO: 938204 - DNA, 33 bp, Homo sapien
tagaaaaacactggacggagaagtagagctggg

SEQ ID NO: 938205 - DNA, 33 bp, Homo sapien
tgcagtctcaacaaaggcctcagctaacccaca

SEQ ID NO: 938206 - DNA, 33 bp, Homo sapien
tgcagtctcaacaaagtcctcagctaacccaca

SEQ ID NO: 938207 - DNA, 33 bp, Homo sapien
tgcaggatgtttatcacgaagtgctctgaggat

SEQ ID NO: 938208 - DNA, 33 bp, Homo sapien
tgcaggatgtttatcatgaagtgctctgaggat

SEQ ID NO: 938209 - DNA, 33 bp, Homo sapien
ttgatcacccaagaacaatcctgctaaaaaggt

SEQ ID NO: 938210 - DNA, 33 bp, Homo sapien
ttgatcacccaagaacgatcctgctaaaaaggt

SEQ ID NO: 938211 - DNA, 33 bp, Homo sapien
catatacaatggtttcagaaaaacaatttgcta

SEQ ID NO: 938212 - DNA, 33 bp, Homo sapien
catatacaatggtttcggaaaaacaatttgcta

SEQ ID NO: 938213 - DNA, 33 bp, Homo sapien
tacctctgcccctcgacggcaacaacaattctg

SEQ ID NO: 938214 - DNA, 33 bp, Homo sapien
tacctctgcccctcgatggcaacaacaattctg

SEQ ID NO: 938215 - DNA, 33 bp, Homo sapien
actcactgccattcacacttagtggaagacccg

SEQ ID NO: 938216 - DNA, 33 bp, Homo sapien
actcactgccattcacgcttagtggaagacccg

SEQ ID NO: 938217 - DNA, 33 bp, Homo sapien
ctattgtatagatgcaccagttttttggtttgt

SEQ ID NO: 938218 - DNA, 33 bp, Homo sapien
ctattgtatagatgcagcagttttttggtttgt

SEQ ID NO: 938219 - DNA, 33 bp, Homo sapien
aaattatagcggacagaaaaaaaagtcagtgtt

SEQ ID NO: 938220 - DNA, 33 bp, Homo sapien
aaattatagcggacagcaaaaaaagtcagtgtt

SEQ ID NO: 938221 - DNA, 33 bp, Homo sapien
gtgctgagtgagagaacgcagtcatgaagggac

SEQ ID NO: 938222 - DNA, 33 bp, Homo sapien
gtgctgagtgagagaatgcagtcatgaagggac

SEQ ID NO: 938223 - DNA, 33 bp, Homo sapien
gatgggtgtttatcaaatagctttattcagaag

SEQ ID NO: 938224 - DNA, 33 bp, Homo sapien
gatgggtgtttatcaagtagctttattcagaag

SEQ ID NO: 938225 - DNA, 33 bp, Homo sapien
atcttaaccctgatgaacaagactcaagagacc

SEQ ID NO: 938226 - DNA, 33 bp, Homo sapien
atcttaaccctgatgagcaagactcaagagacc

SEQ ID NO: 938227 - DNA, 33 bp, Homo sapien
caggtatgtgaaaccacgttgtaccctgcaaag

SEQ ID NO: 938228 - DNA, 33 bp, Homo sapien
caggtatgtgaaaccatgttgtaccctgcaaag

SEQ ID NO: 938229 - DNA, 33 bp, Homo sapien
tgactttgctgtgctcaagttccctgtgaattg

SEQ ID NO: 938230 - DNA, 33 bp, Homo sapien
tgactttgctgtgctcgagttccctgtgaattg

SEQ ID NO: 938231 - DNA, 33 bp, Homo sapien
aggaggtgtaaaaagacgctgcgtgggcagaaa

SEQ ID NO: 938232 - DNA, 33 bp, Homo sapien
aggaggtgtaaaaagatgctgcgtgggcagaaa

SEQ ID NO: 938233 - DNA, 33 bp, Homo sapien
gacctgcatgcagctgaaggactcgtgccgtgc

SEQ ID NO: 938234 - DNA, 33 bp, Homo sapien
gacctgcatgcagctggaggactcgtgccgtgc

SEQ ID NO: 938235 - DNA, 33 bp, Homo sapien
gctggtctgggacaagcattgttgttcaagcca

SEQ ID NO: 938236 - DNA, 33 bp, Homo sapien
gctggtctgggacaagtattgttgttcaagcca

SEQ ID NO: 938237 - DNA, 33 bp, Homo sapien
ccacctgctatcttcacggtgtgtccttcacag

SEQ ID NO: 938238 - DNA, 33 bp, Homo sapien
ccacctgctatcttcatggtgtgtccttcacag

SEQ ID NO: 938239 - DNA, 33 bp, Homo sapien
aggagcctggggggtgcatgaagccatgtcccc

SEQ ID NO: 938240 - DNA, 33 bp, Homo sapien
aggagcctggggggtgtatgaagccatgtcccc

SEQ ID NO: 938241 - DNA, 33 bp, Homo sapien
ccactgcaagatggaacagcaggacccctaccc

SEQ ID NO: 938242 - DNA, 33 bp, Homo sapien
ccactgcaagatggaatagcaggacccctaccc

SEQ ID NO: 938243 - DNA, 33 bp, Homo sapien
gacaggaatttctccgaattatttgtagcacct

SEQ ID NO: 938244 - DNA, 33 bp, Homo sapien
gacaggaatttctccggattatttgtagcacct

SEQ ID NO: 938245 - DNA, 33 bp, Homo sapien
tgaacaggggatgacacgatgggatttatgttt

SEQ ID NO: 938246 - DNA, 33 bp, Homo sapien
tgaacaggggatgacatgatgggatttatgttt

SEQ ID NO: 938247 - DNA, 33 bp, Homo sapien
caatactgtgagatagccaagcctccttcctcc

SEQ ID NO: 938248 - DNA, 33 bp, Homo sapien
caatactgtgagatagtcaagcctccttcctcc

SEQ ID NO: 938249 - DNA, 33 bp, Homo sapien
cttcttgttaccacccaaatctcctgttgaatt

SEQ ID NO: 938250 - DNA, 33 bp, Homo sapien
cttcttgttaccacccgaatctcctgttgaatt

SEQ ID NO: 938251 - DNA, 33 bp, Homo sapien
gcaatttcagactcaactcatctcctttatctg

SEQ ID NO: 938252 - DNA, 33 bp, Homo sapien
gcaatttcagactcaattcatctcctttatctg

SEQ ID NO: 938253 - DNA, 33 bp, Homo sapien
agctcaaacacagttcactcaacaacctgtact

SEQ ID NO: 938254 - DNA, 33 bp, Homo sapien
agctcaaacacagttcgctcaacaacctgtact

SEQ ID NO: 938255 - DNA, 33 bp, Homo sapien
aggtgaccttatttggaaacagagtcattgcag

SEQ ID NO: 938256 - DNA, 33 bp, Homo sapien
aggtgaccttatttggcaacagagtcattgcag

SEQ ID NO: 938257 - DNA, 33 bp, Homo sapien
aagactccagtacctcccccctctctcttgctc

SEQ ID NO: 938258 - DNA, 33 bp, Homo sapien
aagactccagtacctctcccctctctcttgctc

SEQ ID NO: 938259 - DNA, 33 bp, Homo sapien
tattatcatcgacggcactcaaatgaaaatacc

SEQ ID NO: 938260 - DNA, 33 bp, Homo sapien
tattatcatcgacggcgctcaaatgaaaatacc

SEQ ID NO: 938261 - DNA, 33 bp, Homo sapien
gaagaaatggctgggactaaaggagtcaggaag

SEQ ID NO: 938262 - DNA, 33 bp, Homo sapien
gaagaaatggctgggagtaaaggagtcaggaag

SEQ ID NO: 938263 - DNA, 33 bp, Homo sapien
acacaagtaggaaagaaaagtggtatcatcccc

SEQ ID NO: 938264 - DNA, 33 bp, Homo sapien
acacaagtaggaaagacaagtggtatcatcccc

SEQ ID NO: 938265 - DNA, 33 bp, Homo sapien
gttctggcactttcccaaaaccgtagccatcag

SEQ ID NO: 938266 - DNA, 33 bp, Homo sapien
gttctggcactttcccgaaaccgtagccatcag

SEQ ID NO: 938267 - DNA, 33 bp, Homo sapien
cacacctagcagtccccgaattctcgatttatg

SEQ ID NO: 938268 - DNA, 33 bp, Homo sapien
cacacctagcagtccctgaattctcgatttatg

SEQ ID NO: 938269 - DNA, 33 bp, Homo sapien
gggaatccagcgttgacggcgttacggattgta

SEQ ID NO: 938270 - DNA, 33 bp, Homo sapien
gggaatccagcgttgatggcgttacggattgta

SEQ ID NO: 938271 - DNA, 33 bp, Homo sapien
tttttttttccttacaatcgccttccgtaagcc

SEQ ID NO: 938272 - DNA, 33 bp, Homo sapien
tttttttttccttacagtcgccttccgtaagcc

SEQ ID NO: 938273 - DNA, 33 bp, Homo sapien
cgtaaggctccaggcaatagcccaagtatctca

SEQ ID NO: 938274 - DNA, 33 bp, Homo sapien
cgtaaggctccaggcagtagcccaagtatctca

SEQ ID NO: 938275 - DNA, 33 bp, Homo sapien
gggcttctctgacaccggagtcacgcggcactg

SEQ ID NO: 938276 - DNA, 33 bp, Homo sapien
gggcttctctgacacctgagtcacgcggcactg

SEQ ID NO: 938277 - DNA, 33 bp, Homo sapien
cacacagaggctactaagatctcattacaatct

SEQ ID NO: 938278 - DNA, 33 bp, Homo sapien
cacacagaggctactaggatctcattacaatct

SEQ ID NO: 938279 - DNA, 33 bp, Homo sapien
aagaatacatttgaagcctgttttttccccttt

SEQ ID NO: 938280 - DNA, 33 bp, Homo sapien
aagaatacatttgaagtctgttttttccccttt

SEQ ID NO: 938281 - DNA, 33 bp, Homo sapien
ctcctttcacgtcccaccccctgagctggacat

SEQ ID NO: 938282 - DNA, 33 bp, Homo sapien
ctcctttcacgtcccatcccctgagctggacat

SEQ ID NO: 938283 - DNA, 33 bp, Homo sapien
gaaatctcgttcaaataacaatcaaagaatcac

SEQ ID NO: 938284 - DNA, 33 bp, Homo sapien
gaaatctcgttcaaattacaatcaaagaatcac

SEQ ID NO: 938285 - DNA, 33 bp, Homo sapien
gtttttatcttgccaacggaagagtggctgcta

SEQ ID NO: 938286 - DNA, 33 bp, Homo sapien
gtttttatcttgccaatggaagagtggctgcta

SEQ ID NO: 938287 - DNA, 33 bp, Homo sapien
tggcactgtcacataacagaagctgcatgtttt

SEQ ID NO: 938288 - DNA, 33 bp, Homo sapien
tggcactgtcacataatagaagctgcatgtttt

SEQ ID NO: 938289 - DNA, 33 bp, Homo sapien
taaagctgtgaggtggaaagagatggtctagga

SEQ ID NO: 938290 - DNA, 33 bp, Homo sapien
taaagctgtgaggtgggaagagatggtctagga

SEQ ID NO: 938291 - DNA, 33 bp, Homo sapien
gtctggtatttgcactaacatcaaggaagagac

SEQ ID NO: 938292 - DNA, 33 bp, Homo sapien
gtctggtatttgcactgacatcaaggaagagac

SEQ ID NO: 938293 - DNA, 33 bp, Homo sapien
gtggtgacaagtggccactggctgtgctttgac

SEQ ID NO: 938294 - DNA, 33 bp, Homo sapien
gtggtgacaagtggcctctggctgtgctttgac

SEQ ID NO: 938295 - DNA, 33 bp, Homo sapien
gatgaatgttcgccaccgggacacattggcagc

SEQ ID NO: 938296 - DNA, 33 bp, Homo sapien
gatgaatgttcgccactgggacacattggcagc

SEQ ID NO: 938297 - DNA, 33 bp, Homo sapien
gctgttcttctctcatcagctcgtgaaaggtaa

SEQ ID NO: 938298 - DNA, 33 bp, Homo sapien
gctgttcttctctcattagctcgtgaaaggtaa

SEQ ID NO: 938299 - DNA, 33 bp, Homo sapien
aagatctaatacgggaatagacaatgagaactg

SEQ ID NO: 938300 - DNA, 33 bp, Homo sapien
aagatctaatacgggagtagacaatgagaactg

SEQ ID NO: 938301 - DNA, 33 bp, Homo sapien
aagcaccaggttacacaaattgcctgaattttc

SEQ ID NO: 938302 - DNA, 33 bp, Homo sapien
aagcaccaggttacacgaattgcctgaattttc

SEQ ID NO: 938303 - DNA, 33 bp, Homo sapien
actattcaaaatgaagccaataccgaatatgaa

SEQ ID NO: 938304 - DNA, 33 bp, Homo sapien
actattcaaaatgaagtcaataccgaatatgaa

SEQ ID NO: 938305 - DNA, 33 bp, Homo sapien
ctggtttggaatagaaacaatcagcatgtggtc

SEQ ID NO: 938306 - DNA, 33 bp, Homo sapien
ctggtttggaatagaagcaatcagcatgtggtc

SEQ ID NO: 938307 - DNA, 33 bp, Homo sapien
cagatcccacatgatggatggctgggtacccag

SEQ ID NO: 938308 - DNA, 33 bp, Homo sapien
cagatcccacatgatgtatggctgggtacccag

SEQ ID NO: 938309 - DNA, 33 bp, Homo sapien
cctgcagaccttcttacgttcccaacacaccct

SEQ ID NO: 938310 - DNA, 33 bp, Homo sapien
cctgcagaccttcttatgttcccaacacaccct

SEQ ID NO: 938311 - DNA, 33 bp, Homo sapien
tcccctaattccttcacgtggttattctagctt

SEQ ID NO: 938312 - DNA, 33 bp, Homo sapien
tcccctaattccttcatgtggttattctagctt

SEQ ID NO: 938313 - DNA, 33 bp, Homo sapien
ctgcccaggtattgctaaagggttactgggaag

SEQ ID NO: 938314 - DNA, 33 bp, Homo sapien
ctgcccaggtattgcttaagggttactgggaag

SEQ ID NO: 938315 - DNA, 33 bp, Homo sapien
taggccctgcaggtaaatccaagctctaggacc

SEQ ID NO: 938316 - DNA, 33 bp, Homo sapien
taggccctgcaggtaagtccaagctctaggacc

SEQ ID NO: 938317 - DNA, 33 bp, Homo sapien
ttttcacgacactgataaagatacccgaggctg

SEQ ID NO: 938318 - DNA, 33 bp, Homo sapien
ttttcacgacactgatgaagatacccgaggctg

SEQ ID NO: 938319 - DNA, 33 bp, Homo sapien
ttgtcttggataaaaaggaagacgaggacaagg

SEQ ID NO: 938320 - DNA, 33 bp, Homo sapien
ttgtcttggataaaaatgaagacgaggacaagg

SEQ ID NO: 938321 - DNA, 33 bp, Homo sapien
ctgggcaagaagtcaccgggaaagccaccagca

SEQ ID NO: 938322 - DNA, 33 bp, Homo sapien
ctgggcaagaagtcactgggaaagccaccagca

SEQ ID NO: 938323 - DNA, 33 bp, Homo sapien
tacattcctaccaacactgtgcaagcgttccct

SEQ ID NO: 938324 - DNA, 33 bp, Homo sapien
tacattcctaccaacattgtgcaagcgttccct

SEQ ID NO: 938325 - DNA, 33 bp, Homo sapien
aaaatcttatgggcccaagtgtcagtgagcaat

SEQ ID NO: 938326 - DNA, 33 bp, Homo sapien
aaaatcttatgggcccgagtgtcagtgagcaat

SEQ ID NO: 938327 - DNA, 33 bp, Homo sapien
ttcaacactatcactaccctgaatgccaggcct

SEQ ID NO: 938328 - DNA, 33 bp, Homo sapien
ttcaacactatcactatcctgaatgccaggcct

SEQ ID NO: 938329 - DNA, 33 bp, Homo sapien
agggcctgagaaggatcacaaagcagaagaata

SEQ ID NO: 938330 - DNA, 33 bp, Homo sapien
agggcctgagaaggattacaaagcagaagaata

SEQ ID NO: 938331 - DNA, 33 bp, Homo sapien
tagtttaggatctgtcagaagcaagccagtttg

SEQ ID NO: 938332 - DNA, 33 bp, Homo sapien
tagtttaggatctgtccgaagcaagccagtttg

SEQ ID NO: 938333 - DNA, 33 bp, Homo sapien
ccgtgaatcagtcccacagctcagtgtctgtaa

SEQ ID NO: 938334 - DNA, 33 bp, Homo sapien
ccgtgaatcagtcccatagctcagtgtctgtaa

SEQ ID NO: 938335 - DNA, 33 bp, Homo sapien
tcaagaacaagcttccaaaggtggaaaccagcc

SEQ ID NO: 938336 - DNA, 33 bp, Homo sapien
tcaagaacaagcttccgaaggtggaaaccagcc

SEQ ID NO: 938337 - DNA, 33 bp, Homo sapien
gtggttacggtggccgcaggtttactgccttga

SEQ ID NO: 938338 - DNA, 33 bp, Homo sapien
gtggttacggtggccgtaggtttactgccttga

SEQ ID NO: 938339 - DNA, 33 bp, Homo sapien
ttattaggctcggacacaaacaccacaactgtc

SEQ ID NO: 938340 - DNA, 33 bp, Homo sapien
ttattaggctcggacagaaacaccacaactgtc

SEQ ID NO: 938341 - DNA, 33 bp, Homo sapien
ataataacggaagccaactcttccaggaaacca

SEQ ID NO: 938342 - DNA, 33 bp, Homo sapien
ataataacggaagccagctcttccaggaaacca

SEQ ID NO: 938343 - DNA, 33 bp, Homo sapien
atgtatgaaaatctaacgtacagtagtaactgg

SEQ ID NO: 938344 - DNA, 33 bp, Homo sapien
atgtatgaaaatctaatgtacagtagtaactgg

SEQ ID NO: 938345 - DNA, 33 bp, Homo sapien
cttcctgagctgcagaaccaaatatccaaatgc

SEQ ID NO: 938346 - DNA, 33 bp, Homo sapien
cttcctgagctgcagacccaaatatccaaatgc

SEQ ID NO: 938347 - DNA, 33 bp, Homo sapien
tcatgaaatcagtgcacgttttttggtagactg

SEQ ID NO: 938348 - DNA, 33 bp, Homo sapien
tcatgaaatcagtgcatgttttttggtagactg

SEQ ID NO: 938349 - DNA, 33 bp, Homo sapien
tacttaaatatgagtacgcaaattcagtttcaa

SEQ ID NO: 938350 - DNA, 33 bp, Homo sapien
tacttaaatatgagtatgcaaattcagtttcaa

SEQ ID NO: 938351 - DNA, 33 bp, Homo sapien
aaggtcttttctggaacacattgcttgtgaaat

SEQ ID NO: 938352 - DNA, 33 bp, Homo sapien
aaggtcttttctggaatacattgcttgtgaaat

SEQ ID NO: 938353 - DNA, 33 bp, Homo sapien
gtgcaaatgtcattcaagcatccactcaactac

SEQ ID NO: 938354 - DNA, 33 bp, Homo sapien
gtgcaaatgtcattcaggcatccactcaactac

SEQ ID NO: 938355 - DNA, 33 bp, Homo sapien
gtccaggaagttgggacacaccagagaactgct

SEQ ID NO: 938356 - DNA, 33 bp, Homo sapien
gtccaggaagttgggagacaccagagaactgct

SEQ ID NO: 938357 - DNA, 33 bp, Homo sapien
agataaaaaaaaatcaagtgatcaggttaggaa

SEQ ID NO: 938358 - DNA, 33 bp, Homo sapien
agataaaaaaaaatcaggtgatcaggttaggaa

SEQ ID NO: 938359 - DNA, 33 bp, Homo sapien
cctgtggtcccttttacaaccaaactctcaagt

SEQ ID NO: 938360 - DNA, 33 bp, Homo sapien
cctgtggtcccttttataaccaaactctcaagt

SEQ ID NO: 938361 - DNA, 33 bp, Homo sapien
ctcacctggctgtaaacgatccatctcagctcc

SEQ ID NO: 938362 - DNA, 33 bp, Homo sapien
ctcacctggctgtaaaggatccatctcagctcc

SEQ ID NO: 938363 - DNA, 33 bp, Homo sapien
agtatgaagtgttcaaataagtggtgagggcac

SEQ ID NO: 938364 - DNA, 33 bp, Homo sapien
agtatgaagtgttcaagtaagtggtgagggcac

SEQ ID NO: 938365 - DNA, 33 bp, Homo sapien
gttatgtttcttaagacagtaccagtatttatc

SEQ ID NO: 938366 - DNA, 33 bp, Homo sapien
gttatgtttcttaagagagtaccagtatttatc

SEQ ID NO: 938367 - DNA, 33 bp, Homo sapien
cattttgaggactttcaatttgaggtcattatg

SEQ ID NO: 938368 - DNA, 33 bp, Homo sapien
cattttgaggactttcgatttgaggtcattatg

SEQ ID NO: 938369 - DNA, 33 bp, Homo sapien
ctcagatctctagaaacggagaagtatacagac

SEQ ID NO: 938370 - DNA, 33 bp, Homo sapien
ctcagatctctagaaatggagaagtatacagac

SEQ ID NO: 938371 - DNA, 33 bp, Homo sapien
ctcaatcaagactgtacgtcacaaattggaagt

SEQ ID NO: 938372 - DNA, 33 bp, Homo sapien
ctcaatcaagactgtatgtcacaaattggaagt

SEQ ID NO: 938373 - DNA, 33 bp, Homo sapien
gtcctactaaaacttgaaaagcatagaagatga

SEQ ID NO: 938374 - DNA, 33 bp, Homo sapien
gtcctactaaaacttggaaagcatagaagatga

SEQ ID NO: 938375 - DNA, 33 bp, Homo sapien
acatccctaagaaagcaaatgcatccctgaggg

SEQ ID NO: 938376 - DNA, 33 bp, Homo sapien
acatccctaagaaagcgaatgcatccctgaggg

SEQ ID NO: 938377 - DNA, 33 bp, Homo sapien
aaaaaaagaatgaaatgatcctttgcaacagca

SEQ ID NO: 938378 - DNA, 33 bp, Homo sapien
aaaaaaagaatgaaattatcctttgcaacagca

SEQ ID NO: 938379 - DNA, 33 bp, Homo sapien
atgaatgtatccgtaaaaatggcagaactgctc

SEQ ID NO: 938380 - DNA, 33 bp, Homo sapien
atgaatgtatccgtaagaatggcagaactgctc

SEQ ID NO: 938381 - DNA, 33 bp, Homo sapien
caaaaaacaaaatagacatgtggatttcagagt

SEQ ID NO: 938382 - DNA, 33 bp, Homo sapien
caaaaaacaaaatagagatgtggatttcagagt

SEQ ID NO: 938383 - DNA, 33 bp, Homo sapien
ggaaataaataatgacagcctggcacagtggct

SEQ ID NO: 938384 - DNA, 33 bp, Homo sapien
ggaaataaataatgacggcctggcacagtggct

SEQ ID NO: 938385 - DNA, 33 bp, Homo sapien
acacatgtcacaagggccatcacaaatttctga

SEQ ID NO: 938386 - DNA, 33 bp, Homo sapien
acacatgtcacaagggtcatcacaaatttctga

SEQ ID NO: 938387 - DNA, 33 bp, Homo sapien
gtggagtcacgtaagcagaaacttactaagagt

SEQ ID NO: 938388 - DNA, 33 bp, Homo sapien
gtggagtcacgtaagcggaaacttactaagagt

SEQ ID NO: 938389 - DNA, 33 bp, Homo sapien
gtagaaaaaagtcccacgtggcactcagtgaac

SEQ ID NO: 938390 - DNA, 33 bp, Homo sapien
gtagaaaaaagtcccaggtggcactcagtgaac

SEQ ID NO: 938391 - DNA, 33 bp, Homo sapien
caacaaatatttatcaagttcctcacatgagcc

SEQ ID NO: 938392 - DNA, 33 bp, Homo sapien
caacaaatatttatcacgttcctcacatgagcc

SEQ ID NO: 938393 - DNA, 33 bp, Homo sapien
tgtgccccttgctaatcacatgactttgaataa

SEQ ID NO: 938394 - DNA, 33 bp, Homo sapien
tgtgccccttgctaattacatgactttgaataa

SEQ ID NO: 938395 - DNA, 33 bp, Homo sapien
ctattgctgttactcaaactcctacagggaagg

SEQ ID NO: 938396 - DNA, 33 bp, Homo sapien
ctattgctgttactcagactcctacagggaagg

SEQ ID NO: 938397 - DNA, 33 bp, Homo sapien
tctctagttttcctcacgtttacctgagtgagc

SEQ ID NO: 938398 - DNA, 33 bp, Homo sapien
tctctagttttcctcatgtttacctgagtgagc

SEQ ID NO: 938399 - DNA, 33 bp, Homo sapien
cgcattgtacctccacaccatcagcctaacagg

SEQ ID NO: 938400 - DNA, 33 bp, Homo sapien
cgcattgtacctccacgccatcagcctaacagg

SEQ ID NO: 938401 - DNA, 33 bp, Homo sapien
tgctaagtaaatgcaagttcaattttaagacaa

SEQ ID NO: 938402 - DNA, 33 bp, Homo sapien
tgctaagtaaatgcaatttcaattttaagacaa

SEQ ID NO: 938403 - DNA, 33 bp, Homo sapien
tctgcctatactggccaggagtaaccagctggc

SEQ ID NO: 938404 - DNA, 33 bp, Homo sapien
tctgcctatactggccgggagtaaccagctggc

SEQ ID NO: 938405 - DNA, 33 bp, Homo sapien
ggcatgaaccaaccaaaaggcattcattattga

SEQ ID NO: 938406 - DNA, 33 bp, Homo sapien
ggcatgaaccaaccaagaggcattcattattga

SEQ ID NO: 938407 - DNA, 33 bp, Homo sapien
cagtattttccccataagcgatgcattctaaat

SEQ ID NO: 938408 - DNA, 33 bp, Homo sapien
cagtattttccccatacgcgatgcattctaaat

SEQ ID NO: 938409 - DNA, 33 bp, Homo sapien
aaatatttctgtgggtaaataccattgcaattc

SEQ ID NO: 938410 - DNA, 33 bp, Homo sapien
aaatatttctgtgggtcaataccattgcaattc

SEQ ID NO: 938411 - DNA, 33 bp, Homo sapien
tggctgaaacattccaatagttaaagctggtaa

SEQ ID NO: 938412 - DNA, 33 bp, Homo sapien
tggctgaaacattccagtagttaaagctggtaa

SEQ ID NO: 938413 - DNA, 33 bp, Homo sapien
ccgcacttccgcttccaagtacgcccagttctc

SEQ ID NO: 938414 - DNA, 33 bp, Homo sapien
ccgcacttccgcttccgagtacgcccagttctc

SEQ ID NO: 938415 - DNA, 33 bp, Homo sapien
ctcagtaacatagtaaaagagggcacactgaac

SEQ ID NO: 938416 - DNA, 33 bp, Homo sapien
ctcagtaacatagtaagagagggcacactgaac

SEQ ID NO: 938417 - DNA, 33 bp, Homo sapien
agttttacagctatagcatcttcagtagttttc

SEQ ID NO: 938418 - DNA, 33 bp, Homo sapien
agttttacagctataggatcttcagtagttttc

SEQ ID NO: 938419 - DNA, 33 bp, Homo sapien
tgcacaggcttattggaaaattgtatatctttg

SEQ ID NO: 938420 - DNA, 33 bp, Homo sapien
tgcacaggcttattggcaaattgtatatctttg

SEQ ID NO: 938421 - DNA, 33 bp, Homo sapien
aaaccagctttacgtaagaatgtctttgaagta

SEQ ID NO: 938422 - DNA, 33 bp, Homo sapien
aaaccagctttacgtaggaatgtctttgaagta

SEQ ID NO: 938423 - DNA, 33 bp, Homo sapien
gagaggagaccaggaaagatcaggaaatagggg

SEQ ID NO: 938424 - DNA, 33 bp, Homo sapien
gagaggagaccaggaaggatcaggaaatagggg

SEQ ID NO: 938425 - DNA, 33 bp, Homo sapien
ttataattttattgacaggactcttttgggcga

SEQ ID NO: 938426 - DNA, 33 bp, Homo sapien
ttataattttattgacgggactcttttgggcga

SEQ ID NO: 938427 - DNA, 33 bp, Homo sapien
ttacccacaaggattacgcaatctgcatcagac

SEQ ID NO: 938428 - DNA, 33 bp, Homo sapien
ttacccacaaggattaggcaatctgcatcagac

SEQ ID NO: 938429 - DNA, 33 bp, Homo sapien
aatattaacaattcacaagccaagcaaattgtt

SEQ ID NO: 938430 - DNA, 33 bp, Homo sapien
aatattaacaattcactagccaagcaaattgtt

SEQ ID NO: 938431 - DNA, 33 bp, Homo sapien
agcccatttgtttcaggacgtaagagttgggtt

SEQ ID NO: 938432 - DNA, 33 bp, Homo sapien
agcccatttgtttcagtacgtaagagttgggtt

SEQ ID NO: 938433 - DNA, 33 bp, Homo sapien
gtccagccacagaataaatttttaaaggtcttg

SEQ ID NO: 938434 - DNA, 33 bp, Homo sapien
gtccagccacagaatacatttttaaaggtcttg

SEQ ID NO: 938435 - DNA, 33 bp, Homo sapien
aaatattaggataaaaatgatggatccaaaact

SEQ ID NO: 938436 - DNA, 33 bp, Homo sapien
aaatattaggataaaattgatggatccaaaact

SEQ ID NO: 938437 - DNA, 33 bp, Homo sapien
aatataaaggcaaaaactcactgaaattgaata

SEQ ID NO: 938438 - DNA, 33 bp, Homo sapien
aatataaaggcaaaaattcactgaaattgaata

SEQ ID NO: 938439 - DNA, 33 bp, Homo sapien
ttctatttcttccctcaattctcagcattttat

SEQ ID NO: 938440 - DNA, 33 bp, Homo sapien
ttctatttcttccctcgattctcagcattttat

SEQ ID NO: 938441 - DNA, 33 bp, Homo sapien
acaatattatctataccaaattggagaccaaat

SEQ ID NO: 938442 - DNA, 33 bp, Homo sapien
acaatattatctatactaaattggagaccaaat

SEQ ID NO: 938443 - DNA, 33 bp, Homo sapien; identical to SEQ ID NO: 938441

SEQ ID NO: 938444 - DNA, 33 bp, Homo sapien; identical to SEQ ID NO: 938442

SEQ ID NO: 938445 - DNA, 33 bp, Homo sapien
attttttttcatgcaaatacgttgtcaaatggt

SEQ ID NO: 938446 - DNA, 33 bp, Homo sapien
attttttttcatgcaagtacgttgtcaaatggt

SEQ ID NO: 938447 - DNA, 33 bp, Homo sapien
gagaccgcctgagaacaatcaaactcccagagc

SEQ ID NO: 938448 - DNA, 33 bp, Homo sapien
gagaccgcctgagaacgatcaaactcccagagc

SEQ ID NO: 938449 - DNA, 33 bp, Homo sapien
gactctgaagcagtgaagtggaaccctggcctt

SEQ ID NO: 938450 - DNA, 33 bp, Homo sapien
gactctgaagcagtgaggtggaaccctggcctt

SEQ ID NO: 938451 - DNA, 33 bp, Homo sapien
ctccttagagtaaggacggagagttagagttac

SEQ ID NO: 938452 - DNA, 33 bp, Homo sapien
ctccttagagtaaggatggagagttagagttac

SEQ ID NO: 938453 - DNA, 33 bp, Homo sapien
tcctggaaagatggtacccttctgtcctgcaaa

SEQ ID NO: 938454 - DNA, 33 bp, Homo sapien
tcctggaaagatggtatccttctgtcctgcaaa

SEQ ID NO: 938455 - DNA, 33 bp, Homo sapien
aacaacttccacagtacgactcccaagtctttc

SEQ ID NO: 938456 - DNA, 33 bp, Homo sapien
aacaacttccacagtatgactcccaagtctttc

SEQ ID NO: 938457 - DNA, 33 bp, Homo sapien
cagaagctagcagctaacaatcaaaaaagctcc

SEQ ID NO: 938458 - DNA, 33 bp, Homo sapien
cagaagctagcagctagcaatcaaaaaagctcc

SEQ ID NO: 938459 - DNA, 33 bp, Homo sapien
atacgttgagaccatacgtgaataatctgaaac

SEQ ID NO: 938460 - DNA, 33 bp, Homo sapien
atacgttgagaccatatgtgaataatctgaaac

SEQ ID NO: 938461 - DNA, 33 bp, Homo sapien
ccatctggcagtgtcacctggactgtttttaaa

SEQ ID NO: 938462 - DNA, 33 bp, Homo sapien
ccatctggcagtgtcagctggactgtttttaaa

SEQ ID NO: 938463 - DNA, 33 bp, Homo sapien
gttcatttcagaaaacaatgtgaaatctcgttc

SEQ ID NO: 938464 - DNA, 33 bp, Homo sapien
gttcatttcagaaaacgatgtgaaatctcgttc

SEQ ID NO: 938465 - DNA, 33 bp, Homo sapien
cccttcagagtttcgcactggctgttctgagga

SEQ ID NO: 938466 - DNA, 33 bp, Homo sapien
cccttcagagtttcgccctggctgttctgagga

SEQ ID NO: 938467 - DNA, 33 bp, Homo sapien
ggaggcagcttgttagaaatttagtgtgtaggg

SEQ ID NO: 938468 - DNA, 33 bp, Homo sapien
ggaggcagcttgttagtaatttagtgtgtaggg

SEQ ID NO: 938469 - DNA, 33 bp, Homo sapien
ttagcaagacactagcaactttataaaaggttt

SEQ ID NO: 938470 - DNA, 33 bp, Homo sapien
ttagcaagacactagcgactttataaaaggttt

SEQ ID NO: 938471 - DNA, 33 bp, Homo sapien
tattgtatgttaacaagtcctctgtattaaaaa

SEQ ID NO: 938472 - DNA, 33 bp, Homo sapien
tattgtatgttaacaattcctctgtattaaaaa

SEQ ID NO: 938473 - DNA, 33 bp, Homo sapien
aaggcatagatgtgtcaatgaagagtcaaagtc

SEQ ID NO: 938474 - DNA, 33 bp, Homo sapien
aaggcatagatgtgtcgatgaagagtcaaagtc

SEQ ID NO: 938475 - DNA, 33 bp, Homo sapien
tatgagtgctttcggcagcaccacaatgtcggg

SEQ ID NO: 938476 - DNA, 33 bp, Homo sapien
tatgagtgctttcggcggcaccacaatgtcggg

SEQ ID NO: 938477 - DNA, 33 bp, Homo sapien
atcctccttttttagaagagaaaatgtgaaaat

SEQ ID NO: 938478 - DNA, 33 bp, Homo sapien
atcctccttttttagatgagaaaatgtgaaaat

SEQ ID NO: 938479 - DNA, 33 bp, Homo sapien
cgactgccaaaagttacagccatgaatatatta

SEQ ID NO: 938480 - DNA, 33 bp, Homo sapien
cgactgccaaaagttatagccatgaatatatta

SEQ ID NO: 938481 - DNA, 33 bp, Homo sapien
cagcctcacaccaattaaactttctttactgca

SEQ ID NO: 938482 - DNA, 33 bp, Homo sapien
cagcctcacaccaattcaactttctttactgca

SEQ ID NO: 938483 - DNA, 33 bp, Homo sapien
taccattggaaaatgcaaaacagaatatgtaga

SEQ ID NO: 938484 - DNA, 33 bp, Homo sapien
taccattggaaaatgcgaaacagaatatgtaga

SEQ ID NO: 938485 - DNA, 33 bp, Homo sapien
ggaacagaatccacaacagagtttaaatcataa

SEQ ID NO: 938486 - DNA, 33 bp, Homo sapien
ggaacagaatccacaatagagtttaaatcataa

SEQ ID NO: 938487 - DNA, 33 bp, Homo sapien
gctggttttatttgtactaaatcctgaacaact

SEQ ID NO: 938488 - DNA, 33 bp, Homo sapien
gctggttttatttgtattaaatcctgaacaact

SEQ ID NO: 938489 - DNA, 33 bp, Homo sapien
atttttcattggcaaaatgctcttgcagtgtta

SEQ ID NO: 938490 - DNA, 33 bp, Homo sapien
atttttcattggcaaagtgctcttgcagtgtta

SEQ ID NO: 938491 - DNA, 33 bp, Homo sapien
aaatctgcatcttacaaaaaactgaagctggac

SEQ ID NO: 938492 - DNA, 33 bp, Homo sapien
aaatctgcatcttacagaaaactgaagctggac

SEQ ID NO: 938493 - DNA, 33 bp, Homo sapien
agagatactcaaaagcagaagaaaattatgtcc

SEQ ID NO: 938494 - DNA, 33 bp, Homo sapien
agagatactcaaaagcggaagaaaattatgtcc

SEQ ID NO: 938495 - DNA, 33 bp, Homo sapien
agcaggaaggagtgaacggaaaagtagctgaga

SEQ ID NO: 938496 - DNA, 33 bp, Homo sapien
agcaggaaggagtgaatggaaaagtagctgaga

SEQ ID NO: 938497 - DNA, 33 bp, Homo sapien
tattttgttcctatgcagcactgaagctgtgac

SEQ ID NO: 938498 - DNA, 33 bp, Homo sapien
tattttgttcctatgcggcactgaagctgtgac

SEQ ID NO: 938499 - DNA, 33 bp, Homo sapien
gacactgagggaaaggcaggtatttgtgcagta

SEQ ID NO: 938500 - DNA, 33 bp, Homo sapien
gacactgagggaaagggaggtatttgtgcagta

SEQ ID NO: 938501 - DNA, 33 bp, Homo sapien
ccatcctctgcttcccaaataaccaacactcct

SEQ ID NO: 938502 - DNA, 33 bp, Homo sapien
ccatcctctgcttcccgaataaccaacactcct

SEQ ID NO: 938503 - DNA, 33 bp, Homo sapien
gattttcaggaaaaaggagcctaacatttgaaa

SEQ ID NO: 938504 - DNA, 33 bp, Homo sapien
gattttcaggaaaaagtagcctaacatttgaaa

SEQ ID NO: 938505 - DNA, 33 bp, Homo sapien
gtaacctgtggatttacgcagctagctatcttc

SEQ ID NO: 938506 - DNA, 33 bp, Homo sapien
gtaacctgtggatttatgcagctagctatcttc

SEQ ID NO: 938507 - DNA, 33 bp, Homo sapien
ccaagtcttctgtgcactattgttagggccctc

SEQ ID NO: 938508 - DNA, 33 bp, Homo sapien
ccaagtcttctgtgcattattgttagggccctc

SEQ ID NO: 938509 - DNA, 33 bp, Homo sapien
tcttgtgaaatcttaccgaatatgtctcttcct

SEQ ID NO: 938510 - DNA, 33 bp, Homo sapien
tcttgtgaaatcttactgaatatgtctcttcct

SEQ ID NO: 938511 - DNA, 33 bp, Homo sapien
ctggaggatttattccactattccctgaggcct

SEQ ID NO: 938512 - DNA, 33 bp, Homo sapien
ctggaggatttattccgctattccctgaggcct

SEQ ID NO: 938513 - DNA, 33 bp, Homo sapien
caggttctgcagaaggaatcaccatccttttct

SEQ ID NO: 938514 - DNA, 33 bp, Homo sapien
caggttctgcagaagggatcaccatccttttct

SEQ ID NO: 938515 - DNA, 33 bp, Homo sapien
agatgaaaatattgtacccaaaaatgcatttaa

SEQ ID NO: 938516 - DNA, 33 bp, Homo sapien
agatgaaaatattgtagccaaaaatgcatttaa

SEQ ID NO: 938517 - DNA, 33 bp, Homo sapien
tgtgaccatgtggagccgaatctccatttgtaa

SEQ ID NO: 938518 - DNA, 33 bp, Homo sapien
tgtgaccatgtggagctgaatctccatttgtaa

SEQ ID NO: 938519 - DNA, 33 bp, Homo sapien
ggagttgccaggtgaaagcctgctcagttgagt

SEQ ID NO: 938520 - DNA, 33 bp, Homo sapien
ggagttgccaggtgaaggcctgctcagttgagt

SEQ ID NO: 938521 - DNA, 33 bp, Homo sapien
agtgtatgagggaaaacatggtgcatttagata

SEQ ID NO: 938522 - DNA, 33 bp, Homo sapien
agtgtatgagggaaaagatggtgcatttagata

SEQ ID NO: 938523 - DNA, 33 bp, Homo sapien
gtcttgtgagggaaaccattagcttggtctttg

SEQ ID NO: 938524 - DNA, 33 bp, Homo sapien
gtcttgtgagggaaactattagcttggtctttg

SEQ ID NO: 938525 - DNA, 33 bp, Homo sapien
tatgcacccctgagtacgttgaaaaaaggaata

SEQ ID NO: 938526 - DNA, 33 bp, Homo sapien
tatgcacccctgagtatgttgaaaaaaggaata

SEQ ID NO: 938527 - DNA, 33 bp, Homo sapien
caatgagagggctgccaagtcttgtacccatga

SEQ ID NO: 938528 - DNA, 33 bp, Homo sapien
caatgagagggctgccgagtcttgtacccatga

SEQ ID NO: 938529 - DNA, 33 bp, Homo sapien
ggccctaaagctggaaaccttattacctgttac

SEQ ID NO: 938530 - DNA, 33 bp, Homo sapien
ggccctaaagctggaagccttattacctgttac

SEQ ID NO: 938531 - DNA, 33 bp, Homo sapien
ctaaacaaagtgaaaacttaatggagaattgaa

SEQ ID NO: 938532 - DNA, 33 bp, Homo sapien
ctaaacaaagtgaaaatttaatggagaattgaa

SEQ ID NO: 938533 - DNA, 33 bp, Homo sapien
cagtttggcgatgtgtcaatgttggatactctt

SEQ ID NO: 938534 - DNA, 33 bp, Homo sapien
cagtttggcgatgtgttaatgttggatactctt

SEQ ID NO: 938535 - DNA, 33 bp, Homo sapien
aattatatcatgcccccagttcacggagctgtg

SEQ ID NO: 938536 - DNA, 33 bp, Homo sapien
aattatatcatgcccctagttcacggagctgtg

SEQ ID NO: 938537 - DNA, 33 bp, Homo sapien
ctttaacctttcttacagaatcccatctctaag

SEQ ID NO: 938538 - DNA, 33 bp, Homo sapien
ctttaacctttcttacggaatcccatctctaag

SEQ ID NO: 938539 - DNA, 33 bp, Homo sapien
taattcccgagcacacaaggctagagcttgatg

SEQ ID NO: 938540 - DNA, 33 bp, Homo sapien
taattcccgagcacacgaggctagagcttgatg

SEQ ID NO: 938541 - DNA, 33 bp, Homo sapien
tacaatgtaaatgctacggacagaattgttatg

SEQ ID NO: 938542 - DNA, 33 bp, Homo sapien
tacaatgtaaatgctatggacagaattgttatg

SEQ ID NO: 938543 - DNA, 33 bp, Homo sapien
acgccctttactgtcgcatgtggattcccatag

SEQ ID NO: 938544 - DNA, 33 bp, Homo sapien
acgccctttactgtcgtatgtggattcccatag

SEQ ID NO: 938545 - DNA, 33 bp, Homo sapien
tgtgtagagtgggttaaggaatactgtatctcc

SEQ ID NO: 938546 - DNA, 33 bp, Homo sapien
tgtgtagagtgggttagggaatactgtatctcc

SEQ ID NO: 938547 - DNA, 33 bp, Homo sapien
ttgagagccattaccccacagagtgattaccct

SEQ ID NO: 938548 - DNA, 33 bp, Homo sapien
ttgagagccattacccgacagagtgattaccct

SEQ ID NO: 938549 - DNA, 33 bp, Homo sapien
ctcaatgccggctaaaatattccccctttaagt

SEQ ID NO: 938550 - DNA, 33 bp, Homo sapien
ctcaatgccggctaaagtattccccctttaagt

SEQ ID NO: 938551 - DNA, 33 bp, Homo sapien
agtcctaagaaactaccattccaagttctgcct

SEQ ID NO: 938552 - DNA, 33 bp, Homo sapien
agtcctaagaaactactattccaagttctgcct

SEQ ID NO: 938553 - DNA, 33 bp, Homo sapien
accatcagacccctacaaacttcactgatatgg

SEQ ID NO: 938554 - DNA, 33 bp, Homo sapien
accatcagacccctactaacttcactgatatgg

SEQ ID NO: 938555 - DNA, 33 bp, Homo sapien
tccgacccaatgtggacgttccaagcaccgcca

SEQ ID NO: 938556 - DNA, 33 bp, Homo sapien
tccgacccaatgtggatgttccaagcaccgcca

SEQ ID NO: 938557 - DNA, 33 bp, Homo sapien
tattccaatcaggatcaatttccttttgatgtg

SEQ ID NO: 938558 - DNA, 33 bp, Homo sapien
tattccaatcaggatcgatttccttttgatgtg

SEQ ID NO: 938559 - DNA, 33 bp, Homo sapien
gaccaaggacttgctcactgaagtctatgaaag

SEQ ID NO: 938560 - DNA, 33 bp, Homo sapien
gaccaaggacttgctcgctgaagtctatgaaag

SEQ ID NO: 938561 - DNA, 33 bp, Homo sapien
tggaagacggtgtgacaactcttcaaaaatcta

SEQ ID NO: 938562 - DNA, 33 bp, Homo sapien
tggaagacggtgtgacgactcttcaaaaatcta

SEQ ID NO: 938563 - DNA, 33 bp, Homo sapien
ttttttgttgttaaaacggtgagagcaaaataa

SEQ ID NO: 938564 - DNA, 33 bp, Homo sapien
ttttttgttgttaaaatggtgagagcaaaataa

SEQ ID NO: 938565 - DNA, 33 bp, Homo sapien
tgttctttacagaccaagatgacattctcagtt

SEQ ID NO: 938566 - DNA, 33 bp, Homo sapien
tgttctttacagaccaggatgacattctcagtt

SEQ ID NO: 938567 - DNA, 33 bp, Homo sapien
aaaactaagatattcaagatgtcagcttgcgca

SEQ ID NO: 938568 - DNA, 33 bp, Homo sapien
aaaactaagatattcaggatgtcagcttgcgca

SEQ ID NO: 938569 - DNA, 33 bp, Homo sapien
ttttaaaacccaataacaaaggacagagccttt

SEQ ID NO: 938570 - DNA, 33 bp, Homo sapien
ttttaaaacccaataataaaggacagagccttt

SEQ ID NO: 938571 - DNA, 33 bp, Homo sapien
taaaatttgaactccacgtcctctgttttgatg

SEQ ID NO: 938572 - DNA, 33 bp, Homo sapien
taaaatttgaactccatgtcctctgttttgatg

SEQ ID NO: 938573 - DNA, 33 bp, Homo sapien
catgtgtgtgctgaggacaggggcactatttgt

SEQ ID NO: 938574 - DNA, 33 bp, Homo sapien
catgtgtgtgctgagggcaggggcactatttgt

SEQ ID NO: 938575 - DNA, 33 bp, Homo sapien
agagcttttaggacagaaaaaaacaagccagga

SEQ ID NO: 938576 - DNA, 33 bp, Homo sapien
agagcttttaggacaggaaaaaacaagccagga

SEQ ID NO: 938577 - DNA, 33 bp, Homo sapien
ggttatgatatatctcaagctcgactctttagc

SEQ ID NO: 938578 - DNA, 33 bp, Homo sapien
ggttatgatatatctctagctcgactctttagc

SEQ ID NO: 938579 - DNA, 33 bp, Homo sapien
tagtcctacctccttcaataaggccagacttct

SEQ ID NO: 938580 - DNA, 33 bp, Homo sapien
tagtcctacctccttcgataaggccagacttct

SEQ ID NO: 938581 - DNA, 33 bp, Homo sapien
atgcctgattgcttcacgttcttgcaaccactg

SEQ ID NO: 938582 - DNA, 33 bp, Homo sapien
atgcctgattgcttcatgttcttgcaaccactg

SEQ ID NO: 938583 - DNA, 33 bp, Homo sapien
ctctaattgtatcatgaaaatgctgacagccag

SEQ ID NO: 938584 - DNA, 33 bp, Homo sapien
ctctaattgtatcatggaaatgctgacagccag

SEQ ID NO: 938585 - DNA, 33 bp, Homo sapien
acttactgactgtaataactttgggaaatgctc

SEQ ID NO: 938586 - DNA, 33 bp, Homo sapien
acttactgactgtaatgactttgggaaatgctc

SEQ ID NO: 938587 - DNA, 33 bp, Homo sapien
gaacaagccatttgagaaattgctgtgagaatt

SEQ ID NO: 938588 - DNA, 33 bp, Homo sapien
gaacaagccatttgaggaattgctgtgagaatt

SEQ ID NO: 938589 - DNA, 33 bp, Homo sapien
ttttgtgtacatctctaaactgccagctaacca

SEQ ID NO: 938590 - DNA, 33 bp, Homo sapien
ttttgtgtacatctctgaactgccagctaacca

SEQ ID NO: 938591 - DNA, 33 bp, Homo sapien
aactcctggggttctaacaagtcattcatattt

SEQ ID NO: 938592 - DNA, 33 bp, Homo sapien
aactcctggggttctaccaagtcattcatattt

SEQ ID NO: 938593 - DNA, 33 bp, Homo sapien
atattactgttcaacccatcacctatcataggc

SEQ ID NO: 938594 - DNA, 33 bp, Homo sapien
atattactgttcaaccgatcacctatcataggc

SEQ ID NO: 938595 - DNA, 33 bp, Homo sapien
tgcacatagacaaatacatagaagaatgaaggg

SEQ ID NO: 938596 - DNA, 33 bp, Homo sapien
tgcacatagacaaatatatagaagaatgaaggg

SEQ ID NO: 938597 - DNA, 33 bp, Homo sapien
gagaggcctcagttcaaaagtatttctctctta

SEQ ID NO: 938598 - DNA, 33 bp, Homo sapien
gagaggcctcagttcacaagtatttctctctta

SEQ ID NO: 938599 - DNA, 33 bp, Homo sapien
ttgagaattgctaagtgaaagacactgaaaaca

SEQ ID NO: 938600 - DNA, 33 bp, Homo sapien
ttgagaattgctaagttaaagacactgaaaaca

SEQ ID NO: 938601 - DNA, 33 bp, Homo sapien
ttgcagtactagtcacaatttcaaagtcatgga

SEQ ID NO: 938602 - DNA, 33 bp, Homo sapien
ttgcagtactagtcacgatttcaaagtcatgga

SEQ ID NO: 938603 - DNA, 33 bp, Homo sapien
ggctgttactccataccatggctgcagtatctt

SEQ ID NO: 938604 - DNA, 33 bp, Homo sapien
ggctgttactccatactatggctgcagtatctt

SEQ ID NO: 938605 - DNA, 33 bp, Homo sapien
ttattagatgctcaaacctctgtcgaatgcatg

SEQ ID NO: 938606 - DNA, 33 bp, Homo sapien
ttattagatgctcaaatctctgtcgaatgcatg

SEQ ID NO: 938607 - DNA, 33 bp, Homo sapien
atgctcattcacagttaaaatacaacattatga

SEQ ID NO: 938608 - DNA, 33 bp, Homo sapien
atgctcattcacagttgaaatacaacattatga

SEQ ID NO: 938609 - DNA, 33 bp, Homo sapien
tcagtttcagacacaaacaattttccttcactg

SEQ ID NO: 938610 - DNA, 33 bp, Homo sapien
tcagtttcagacacaagcaattttccttcactg

SEQ ID NO: 938611 - DNA, 33 bp, Homo sapien
ccagagggagagcacaccaggcaaaagcacaag

SEQ ID NO: 938612 - DNA, 33 bp, Homo sapien
ccagagggagagcacatcaggcaaaagcacaag

SEQ ID NO: 938613 - DNA, 33 bp, Homo sapien
tgcagcagtgggcacacaaatttagaatggagg

SEQ ID NO: 938614 - DNA, 33 bp, Homo sapien
tgcagcagtgggcacataaatttagaatggagg

SEQ ID NO: 938615 - DNA, 33 bp, Homo sapien
aactaggatgaaatgacggaggataaggccaca

SEQ ID NO: 938616 - DNA, 33 bp, Homo sapien
aactaggatgaaatgatggaggataaggccaca

SEQ ID NO: 938617 - DNA, 33 bp, Homo sapien
tttgattaacaagactaacaaatttggtataat

SEQ ID NO: 938618 - DNA, 33 bp, Homo sapien
tttgattaacaagacttacaaatttggtataat

SEQ ID NO: 938619 - DNA, 33 bp, Homo sapien
gagaaaatgctaacaaaggaaacacgtgtagca

SEQ ID NO: 938620 - DNA, 33 bp, Homo sapien
gagaaaatgctaacaagggaaacacgtgtagca

SEQ ID NO: 938621 - DNA, 33 bp, Homo sapien
gccatctgaaggtagcacttctctcttccagca

SEQ ID NO: 938622 - DNA, 33 bp, Homo sapien
gccatctgaaggtagcgcttctctcttccagca

SEQ ID NO: 938623 - DNA, 33 bp, Homo sapien
cagttggcttcacgtcccttgtctccccttgac

SEQ ID NO: 938624 - DNA, 33 bp, Homo sapien
cagttggcttcacgtctcttgtctccccttgac

SEQ ID NO: 938625 - DNA, 33 bp, Homo sapien
gtgcctggcatgtagaagcagcacaattctttt

SEQ ID NO: 938626 - DNA, 33 bp, Homo sapien
gtgcctggcatgtagaggcagcacaattctttt

SEQ ID NO: 938627 - DNA, 33 bp, Homo sapien
ttatctacagatttcacgagaagcttatcatga

SEQ ID NO: 938628 - DNA, 33 bp, Homo sapien
ttatctacagatttcatgagaagcttatcatga

SEQ ID NO: 938629 - DNA, 33 bp, Homo sapien
gttctggtttttacaccccacaaataagtgaga

SEQ ID NO: 938630 - DNA, 33 bp, Homo sapien
gttctggtttttacactccacaaataagtgaga

SEQ ID NO: 938631 - DNA, 33 bp, Homo sapien
ttgtgaacatttgctacgcatcataaactctaa

SEQ ID NO: 938632 - DNA, 33 bp, Homo sapien
ttgtgaacatttgctatgcatcataaactctaa

SEQ ID NO: 938633 - DNA, 33 bp, Homo sapien
gaataccataggaaaaccatagcatctgcacct

SEQ ID NO: 938634 - DNA, 33 bp, Homo sapien
gaataccataggaaaagcatagcatctgcacct

SEQ ID NO: 938635 - DNA, 33 bp, Homo sapien
gttagtagtgtgctacagaagtgataccacatg

SEQ ID NO: 938636 - DNA, 33 bp, Homo sapien
gttagtagtgtgctaccgaagtgataccacatg

SEQ ID NO: 938637 - DNA, 33 bp, Homo sapien
acttattgcaggcacaaagctgataaatccttt

SEQ ID NO: 938638 - DNA, 33 bp, Homo sapien
acttattgcaggcacagagctgataaatccttt

SEQ ID NO: 938639 - DNA, 33 bp, Homo sapien
cagaagcaatccttcagggctgagccacattct

SEQ ID NO: 938640 - DNA, 33 bp, Homo sapien
cagaagcaatccttcatggctgagccacattct

SEQ ID NO: 938641 - DNA, 33 bp, Homo sapien
cacagtgtctagataacgtccttaagattgcaa

SEQ ID NO: 938642 - DNA, 33 bp, Homo sapien
cacagtgtctagataatgtccttaagattgcaa

SEQ ID NO: 938643 - DNA, 33 bp, Homo sapien
cagcacagactgaaaacgttatgaattctgaaa

SEQ ID NO: 938644 - DNA, 33 bp, Homo sapien
cagcacagactgaaaatgttatgaattctgaaa

SEQ ID NO: 938645 - DNA, 33 bp, Homo sapien
aaataaacaaagaaatgaagatatgcgcactct

SEQ ID NO: 938646 - DNA, 33 bp, Homo sapien
aaataaacaaagaaattaagatatgcgcactct

SEQ ID NO: 938647 - DNA, 33 bp, Homo sapien
tctgtatgcagcccacacctacacatttatatc

SEQ ID NO: 938648 - DNA, 33 bp, Homo sapien
tctgtatgcagcccacgcctacacatttatatc

SEQ ID NO: 938649 - DNA, 33 bp, Homo sapien
ccaacacagtggcaaacttaccttggtcctgat

SEQ ID NO: 938650 - DNA, 33 bp, Homo sapien
ccaacacagtggcaaatttaccttggtcctgat

SEQ ID NO: 938651 - DNA, 33 bp, Homo sapien
gtattttggaaaatggaatgattcagccacagg

SEQ ID NO: 938652 - DNA, 33 bp, Homo sapien
gtattttggaaaatggtatgattcagccacagg

SEQ ID NO: 938653 - DNA, 33 bp, Homo sapien
actgctaaaatgctgaccgcttctgaggggtat

SEQ ID NO: 938654 - DNA, 33 bp, Homo sapien
actgctaaaatgctgatcgcttctgaggggtat

SEQ ID NO: 938655 - DNA, 33 bp, Homo sapien
tagtatcttgaatgtacgcagaagggatcagat

SEQ ID NO: 938656 - DNA, 33 bp, Homo sapien
tagtatcttgaatgtatgcagaagggatcagat

SEQ ID NO: 938657 - DNA, 33 bp, Homo sapien
gactcttccaaaactcaactaatagcctactgt

SEQ ID NO: 938658 - DNA, 33 bp, Homo sapien
gactcttccaaaactcgactaatagcctactgt

SEQ ID NO: 938659 - DNA, 33 bp, Homo sapien
aacatcatctagataactggagtcacagattct

SEQ ID NO: 938660 - DNA, 33 bp, Homo sapien
aacatcatctagataattggagtcacagattct

SEQ ID NO: 938661 - DNA, 33 bp, Homo sapien
agaaataaacaaagaccgcccacccaaatgaga

SEQ ID NO: 938662 - DNA, 33 bp, Homo sapien
agaaataaacaaagactgcccacccaaatgaga

SEQ ID NO: 938663 - DNA, 33 bp, Homo sapien
caagtttcactccaaagacagtggttagaagat

SEQ ID NO: 938664 - DNA, 33 bp, Homo sapien
caagtttcactccaaatacagtggttagaagat

SEQ ID NO: 938665 - DNA, 33 bp, Homo sapien
tcaccattccatagatcaccgctttcctaacca

SEQ ID NO: 938666 - DNA, 33 bp, Homo sapien
tcaccattccatagatgaccgctttcctaacca

SEQ ID NO: 938667 - DNA, 33 bp, Homo sapien
cctggtttcaatcttaaaggccctgggctattt

SEQ ID NO: 938668 - DNA, 33 bp, Homo sapien
cctggtttcaatcttagaggccctgggctattt

SEQ ID NO: 938669 - DNA, 33 bp, Homo sapien
cactgactggctttgaactggaggtcaaaaaca

SEQ ID NO: 938670 - DNA, 33 bp, Homo sapien
cactgactggctttgagctggaggtcaaaaaca

SEQ ID NO: 938671 - DNA, 33 bp, Homo sapien
ggtcatgttcttctaacgatggatcacaggagt

SEQ ID NO: 938672 - DNA, 33 bp, Homo sapien
ggtcatgttcttctaatgatggatcacaggagt

SEQ ID NO: 938673 - DNA, 33 bp, Homo sapien
aaggagattcctagcacagaactgatcttgaga

SEQ ID NO: 938674 - DNA, 33 bp, Homo sapien
aaggagattcctagcagagaactgatcttgaga

SEQ ID NO: 938675 - DNA, 33 bp, Homo sapien
ggctgaggtcaggctacgtattccattggctcc

SEQ ID NO: 938676 - DNA, 33 bp, Homo sapien
ggctgaggtcaggctatgtattccattggctcc

SEQ ID NO: 938677 - DNA, 33 bp, Homo sapien
cagcaggagagccaaacactagcgtatgaaaca

SEQ ID NO: 938678 - DNA, 33 bp, Homo sapien
cagcaggagagccaaagactagcgtatgaaaca

SEQ ID NO: 938679 - DNA, 33 bp, Homo sapien
gagtcctgaagtggagaactttgtgtcaagagt

SEQ ID NO: 938680 - DNA, 33 bp, Homo sapien
gagtcctgaagtggagtactttgtgtcaagagt

SEQ ID NO: 938681 - DNA, 33 bp, Homo sapien
agccttctgtctgctaggtgataatgggataaa

SEQ ID NO: 938682 - DNA, 33 bp, Homo sapien
agccttctgtctgctatgtgataatgggataaa

SEQ ID NO: 938683 - DNA, 33 bp, Homo sapien
gggcgcccgagtcctaagctctgttctgttacc

SEQ ID NO: 938684 - DNA, 33 bp, Homo sapien
gggcgcccgagtcctaggctctgttctgttacc

SEQ ID NO: 938685 - DNA, 33 bp, Homo sapien
aatgccgcacctaaaagttatttcctggcatgc

SEQ ID NO: 938686 - DNA, 33 bp, Homo sapien
aatgccgcacctaaaatttatttcctggcatgc

SEQ ID NO: 938687 - DNA, 33 bp, Homo sapien
tgagaatgaggccttcacatgagatggtgctaa

SEQ ID NO: 938688 - DNA, 33 bp, Homo sapien
tgagaatgaggccttcgcatgagatggtgctaa

SEQ ID NO: 938689 - DNA, 33 bp, Homo sapien
aactcagcctaattcaacgagtcccagaccccc

SEQ ID NO: 938690 - DNA, 33 bp, Homo sapien
aactcagcctaattcaccgagtcccagaccccc

SEQ ID NO: 938691 - DNA, 33 bp, Homo sapien
agaggcaggtaaataactagagtagcagtcata

SEQ ID NO: 938692 - DNA, 33 bp, Homo sapien
agaggcaggtaaataattagagtagcagtcata

SEQ ID NO: 938693 - DNA, 33 bp, Homo sapien
atgccaagtgcaggtacggtgacaatgtcagtg

SEQ ID NO: 938694 - DNA, 33 bp, Homo sapien
atgccaagtgcaggtatggtgacaatgtcagtg

SEQ ID NO: 938695 - DNA, 33 bp, Homo sapien
attgtctgcccaaccaaggctgaaatcagtggg

SEQ ID NO: 938696 - DNA, 33 bp, Homo sapien
attgtctgcccaaccatggctgaaatcagtggg

SEQ ID NO: 938697 - DNA, 33 bp, Homo sapien
gattaccaggtagaacaccggacccgagcttgg

SEQ ID NO: 938698 - DNA, 33 bp, Homo sapien
gattaccaggtagaacgccggacccgagcttgg

SEQ ID NO: 938699 - DNA, 33 bp, Homo sapien
tgtgttataccgcaaacctcaagaactcatgta

SEQ ID NO: 938700 - DNA, 33 bp, Homo sapien
tgtgttataccgcaaatctcaagaactcatgta

SEQ ID NO: 938701 - DNA, 33 bp, Homo sapien
tgtgctcaagtttgcacaaagggtggttgaacc

SEQ ID NO: 938702 - DNA, 33 bp, Homo sapien
tgtgctcaagtttgcataaagggtggttgaacc

SEQ ID NO: 938703 - DNA, 33 bp, Homo sapien
atatgcactagaaaccaagaaatttgtgtgact

SEQ ID NO: 938704 - DNA, 33 bp, Homo sapien
atatgcactagaaaccgagaaatttgtgtgact

SEQ ID NO: 938705 - DNA, 33 bp, Homo sapien
agatgaggctgattaacagtggtattcaggtca

SEQ ID NO: 938706 - DNA, 33 bp, Homo sapien
agatgaggctgattaatagtggtattcaggtca

SEQ ID NO: 938707 - DNA, 33 bp, Homo sapien
agtggatcagagccaactaggagattaaggtag

SEQ ID NO: 938708 - DNA, 33 bp, Homo sapien
agtggatcagagccaagtaggagattaaggtag

SEQ ID NO: 938709 - DNA, 33 bp, Homo sapien
tcaagccctgtttcaccaccgactgttcttatc

SEQ ID NO: 938710 - DNA, 33 bp, Homo sapien
tcaagccctgtttcacgaccgactgttcttatc

SEQ ID NO: 938711 - DNA, 33 bp, Homo sapien
cacaaagcagttgtgacgacagcattgaatagc

SEQ ID NO: 938712 - DNA, 33 bp, Homo sapien
cacaaagcagttgtgatgacagcattgaatagc

SEQ ID NO: 938713 - DNA, 33 bp, Homo sapien
ctctcctcctcacgcaagttcgaccttagctca

SEQ ID NO: 938714 - DNA, 33 bp, Homo sapien
ctctcctcctcacgcaggttcgaccttagctca

SEQ ID NO: 938715 - DNA, 33 bp, Homo sapien
cttgactcttggtgcacgtgttacttccagtta

SEQ ID NO: 938716 - DNA, 33 bp, Homo sapien
cttgactcttggtgcaggtgttacttccagtta

SEQ ID NO: 938717 - DNA, 33 bp, Homo sapien
caaagagattgcaatgaaatcatttttgagcct

SEQ ID NO: 938718 - DNA, 33 bp, Homo sapien
caaagagattgcaatgtaatcatttttgagcct

SEQ ID NO: 938719 - DNA, 33 bp, Homo sapien
atcccttaggagacagaactaaaaatagagatg

SEQ ID NO: 938720 - DNA, 33 bp, Homo sapien
atcccttaggagacaggactaaaaatagagatg

SEQ ID NO: 938721 - DNA, 33 bp, Homo sapien
gggaaaagtggacccaaatcttgtctacacaat

SEQ ID NO: 938722 - DNA, 33 bp, Homo sapien
gggaaaagtggacccacatcttgtctacacaat

SEQ ID NO: 938723 - DNA, 33 bp, Homo sapien
tttttttcctctgcaaattagactgactctgct

SEQ ID NO: 938724 - DNA, 33 bp, Homo sapien
tttttttcctctgcaagttagactgactctgct

SEQ ID NO: 938725 - DNA, 33 bp, Homo sapien
tttcaatcatcactgacgtcttggttcaaaagt

SEQ ID NO: 938726 - DNA, 33 bp, Homo sapien
tttcaatcatcactgaggtcttggttcaaaagt

SEQ ID NO: 938727 - DNA, 33 bp, Homo sapien
tgctgattcctgcttagaaaggtattgatactc

SEQ ID NO: 938728 - DNA, 33 bp, Homo sapien
tgctgattcctgcttataaaggtattgatactc

SEQ ID NO: 938729 - DNA, 33 bp, Homo sapien
gggctctgccaatgagaagcgtgcagtgttacg

SEQ ID NO: 938730 - DNA, 33 bp, Homo sapien
gggctctgccaatgaggagcgtgcagtgttacg

SEQ ID NO: 938731 - DNA, 33 bp, Homo sapien
ctagagctctagtgtcaagaaaaaccacctagg

SEQ ID NO: 938732 - DNA, 33 bp, Homo sapien
ctagagctctagtgtcgagaaaaaccacctagg

SEQ ID NO: 938733 - DNA, 33 bp, Homo sapien
aaagaaaagttgtgtacggtttgcaaaatctta

SEQ ID NO: 938734 - DNA, 33 bp, Homo sapien
aaagaaaagttgtgtatggtttgcaaaatctta

SEQ ID NO: 938735 - DNA, 33 bp, Homo sapien
gaggctgcagttgtctaaaggctggaccgaggc

SEQ ID NO: 938736 - DNA, 33 bp, Homo sapien
gaggctgcagttgtctgaaggctggaccgaggc

SEQ ID NO: 938737 - DNA, 33 bp, Homo sapien
actttccttttattcacagcccgtgaggattct

SEQ ID NO: 938738 - DNA, 33 bp, Homo sapien
actttccttttattcatagcccgtgaggattct

SEQ ID NO: 938739 - DNA, 33 bp, Homo sapien
gatgagctgccacccacaagagagcagtaagga

SEQ ID NO: 938740 - DNA, 33 bp, Homo sapien
gatgagctgccacccataagagagcagtaagga

SEQ ID NO: 938741 - DNA, 33 bp, Homo sapien
cttgcaagagatagcaatacccagggcttgaac

SEQ ID NO: 938742 - DNA, 33 bp, Homo sapien
cttgcaagagatagcattacccagggcttgaac

SEQ ID NO: 938743 - DNA, 33 bp, Homo sapien
ttgtaaaggcccagacaggtggactcctgtgct

SEQ ID NO: 938744 - DNA, 33 bp, Homo sapien
ttgtaaaggcccagaccggtggactcctgtgct

SEQ ID NO: 938745 - DNA, 33 bp, Homo sapien
aaaccctgacccgaagaactccatcactcatca

SEQ ID NO: 938746 - DNA, 33 bp, Homo sapien
aaaccctgacccgaaggactccatcactcatca

SEQ ID NO: 938747 - DNA, 33 bp, Homo sapien
gcctctgttgtccaataagtgatgagtgatgga

SEQ ID NO: 938748 - DNA, 33 bp, Homo sapien
gcctctgttgtccaatgagtgatgagtgatgga

SEQ ID NO: 938749 - DNA, 33 bp, Homo sapien
catgctctatcacataagcagaagagggtaagt

SEQ ID NO: 938750 - DNA, 33 bp, Homo sapien
catgctctatcacataggcagaagagggtaagt

SEQ ID NO: 938751 - DNA, 33 bp, Homo sapien
agttgaagaaaaatcaacaactgaccacacttt

SEQ ID NO: 938752 - DNA, 33 bp, Homo sapien
agttgaagaaaaatcagcaactgaccacacttt

SEQ ID NO: 938753 - DNA, 33 bp, Homo sapien
atcagagagcaaaccaaatatggaagagccgag

SEQ ID NO: 938754 - DNA, 33 bp, Homo sapien
atcagagagcaaaccacatatggaagagccgag

SEQ ID NO: 938755 - DNA, 33 bp, Homo sapien
cattcagggtgtaggacacagaaaagagctgga

SEQ ID NO: 938756 - DNA, 33 bp, Homo sapien
cattcagggtgtaggatacagaaaagagctgga

SEQ ID NO: 938757 - DNA, 33 bp, Homo sapien
aataatccgttgtcacactactgcagaaaaatc

SEQ ID NO: 938758 - DNA, 33 bp, Homo sapien
aataatccgttgtcacgctactgcagaaaaatc

SEQ ID NO: 938759 - DNA, 33 bp, Homo sapien
aacatttttctgaacacgaaattcaaacctatc

SEQ ID NO: 938760 - DNA, 33 bp, Homo sapien
aacatttttctgaacatgaaattcaaacctatc

SEQ ID NO: 938761 - DNA, 33 bp, Homo sapien
caggcctgagagcacccgaggagtttagattta

SEQ ID NO: 938762 - DNA, 33 bp, Homo sapien
caggcctgagagcacctgaggagtttagattta

SEQ ID NO: 938763 - DNA, 33 bp, Homo sapien
tgaattgcttctctcacgttagtgctattgcct

SEQ ID NO: 938764 - DNA, 33 bp, Homo sapien
tgaattgcttctctcatgttagtgctattgcct

SEQ ID NO: 938765 - DNA, 33 bp, Homo sapien
acttcaccaggcaaaactgttgggagttctgac

SEQ ID NO: 938766 - DNA, 33 bp, Homo sapien
acttcaccaggcaaaattgttgggagttctgac

SEQ ID NO: 938767 - DNA, 33 bp, Homo sapien
ttccactctctggccacaatttatttacatttc

SEQ ID NO: 938768 - DNA, 33 bp, Homo sapien
ttccactctctggccataatttatttacatttc

SEQ ID NO: 938769 - DNA, 33 bp, Homo sapien
gtggcatacaggaagcaagagcatgaggaagaa

SEQ ID NO: 938770 - DNA, 33 bp, Homo sapien
gtggcatacaggaagcgagagcatgaggaagaa

SEQ ID NO: 938771 - DNA, 33 bp, Homo sapien
taactgagaggtatacactcatccatttggaca

SEQ ID NO: 938772 - DNA, 33 bp, Homo sapien
taactgagaggtatacgctcatccatttggaca

SEQ ID NO: 938773 - DNA, 33 bp, Homo sapien
ggttgtaggtagataacagacaaacggttgcat

SEQ ID NO: 938774 - DNA, 33 bp, Homo sapien
ggttgtaggtagataagagacaaacggttgcat

SEQ ID NO: 938775 - DNA, 33 bp, Homo sapien
ttacaggcagtcagaccactttctccagcaatc

SEQ ID NO: 938776 - DNA, 33 bp, Homo sapien
ttacaggcagtcagactactttctccagcaatc

SEQ ID NO: 938777 - DNA, 33 bp, Homo sapien
atagccccttgcagaacgatgagaacggtgctt

SEQ ID NO: 938778 - DNA, 33 bp, Homo sapien
atagccccttgcagaatgatgagaacggtgctt

SEQ ID NO: 938779 - DNA, 33 bp, Homo sapien
ccacgcttgagcctataagggtgagatctgcta

SEQ ID NO: 938780 - DNA, 33 bp, Homo sapien
ccacgcttgagcctatcagggtgagatctgcta

SEQ ID NO: 938781 - DNA, 33 bp, Homo sapien
ccagcatggaggaacaagttgacgctcccttat

SEQ ID NO: 938782 - DNA, 33 bp, Homo sapien
ccagcatggaggaacaggttgacgctcccttat

SEQ ID NO: 938783 - DNA, 33 bp, Homo sapien
ttgaggtgcatatgaaacattaatggattttct

SEQ ID NO: 938784 - DNA, 33 bp, Homo sapien
ttgaggtgcatatgaagcattaatggattttct

SEQ ID NO: 938785 - DNA, 33 bp, Homo sapien
ggctgagatgacccaaaacctgcaattggaaag

SEQ ID NO: 938786 - DNA, 33 bp, Homo sapien
ggctgagatgacccaagacctgcaattggaaag

SEQ ID NO: 938787 - DNA, 33 bp, Homo sapien
tgtggataaagcatcaagtggcgggcacaagta

SEQ ID NO: 938788 - DNA, 33 bp, Homo sapien
tgtggataaagcatcaggtggcgggcacaagta

SEQ ID NO: 938789 - DNA, 33 bp, Homo sapien
ccatagcagagtccccccaatggccacagcatg

SEQ ID NO: 938790 - DNA, 33 bp, Homo sapien
ccatagcagagtccccgcaatggccacagcatg

SEQ ID NO: 938791 - DNA, 33 bp, Homo sapien
gccatgattccttgaccggctgaagaacacatc

SEQ ID NO: 938792 - DNA, 33 bp, Homo sapien
gccatgattccttgactggctgaagaacacatc

SEQ ID NO: 938793 - DNA, 33 bp, Homo sapien
agttgtaagatgggaacggagaagtgaggtaac

SEQ ID NO: 938794 - DNA, 33 bp, Homo sapien
agttgtaagatgggaatggagaagtgaggtaac

SEQ ID NO: 938795 - DNA, 33 bp, Homo sapien
acactcaggcaataaaaaaaagtataaagaata

SEQ ID NO: 938796 - DNA, 33 bp, Homo sapien
acactcaggcaataaagaaaagtataaagaata

SEQ ID NO: 938797 - DNA, 33 bp, Homo sapien
aagaataaattttctcaaatcctcaaaaatagt

SEQ ID NO: 938798 - DNA, 33 bp, Homo sapien
aagaataaattttctctaatcctcaaaaatagt

SEQ ID NO: 938799 - DNA, 33 bp, Homo sapien
cttgaacataatggaaatctcagaaggcacatg

SEQ ID NO: 938800 - DNA, 33 bp, Homo sapien
cttgaacataatggaactctcagaaggcacatg

SEQ ID NO: 938801 - DNA, 33 bp, Homo sapien
ctgaacgagcggtagcaattagtcagtagggat

SEQ ID NO: 938802 - DNA, 33 bp, Homo sapien
ctgaacgagcggtagcgattagtcagtagggat

SEQ ID NO: 938803 - DNA, 33 bp, Homo sapien
gctgtttatttccttcactattcagaagctttt

SEQ ID NO: 938804 - DNA, 33 bp, Homo sapien
gctgtttatttccttcgctattcagaagctttt

SEQ ID NO: 938805 - DNA, 33 bp, Homo sapien
aatagcaagaacacaaactgattaaaaatgagc

SEQ ID NO: 938806 - DNA, 33 bp, Homo sapien
aatagcaagaacacaagctgattaaaaatgagc

SEQ ID NO: 938807 - DNA, 33 bp, Homo sapien
agaaaatttggtaagaatcattgaagaaagatt

SEQ ID NO: 938808 - DNA, 33 bp, Homo sapien
agaaaatttggtaagagtcattgaagaaagatt

SEQ ID NO: 938809 - DNA, 33 bp, Homo sapien
tttctttacaatcttacgcagttttcgttgtat

SEQ ID NO: 938810 - DNA, 33 bp, Homo sapien
tttctttacaatcttatgcagttttcgttgtat

SEQ ID NO: 938811 - DNA, 33 bp, Homo sapien
acttagtttatgaaaaaacagcatagccactac

SEQ ID NO: 938812 - DNA, 33 bp, Homo sapien
acttagtttatgaaaagacagcatagccactac

SEQ ID NO: 938813 - DNA, 33 bp, Homo sapien
cattacaagaaggatgcatggtagcacagggct

SEQ ID NO: 938814 - DNA, 33 bp, Homo sapien
cattacaagaaggatgtatggtagcacagggct

SEQ ID NO: 938815 - DNA, 33 bp, Homo sapien
tggcaacccaatgtcacctgtacctattggtgg

SEQ ID NO: 938816 - DNA, 33 bp, Homo sapien
tggcaacccaatgtcatctgtacctattggtgg

SEQ ID NO: 938817 - DNA, 33 bp, Homo sapien
ctctggtaagtgatgaagtgaatcttccatttg

SEQ ID NO: 938818 - DNA, 33 bp, Homo sapien
ctctggtaagtgatgatgtgaatcttccatttg

SEQ ID NO: 938819 - DNA, 33 bp, Homo sapien
gatagttcaataaggagggatcgtcttctaact

SEQ ID NO: 938820 - DNA, 33 bp, Homo sapien
gatagttcaataaggatggatcgtcttctaact

SEQ ID NO: 938821 - DNA, 33 bp, Homo sapien
ctcttactaccgggtccccagcatctgtcccat

SEQ ID NO: 938822 - DNA, 33 bp, Homo sapien
ctcttactaccgggtctccagcatctgtcccat

SEQ ID NO: 938823 - DNA, 33 bp, Homo sapien
aaggagccacttctgacgcttattaacatggcc

SEQ ID NO: 938824 - DNA, 33 bp, Homo sapien
aaggagccacttctgatgcttattaacatggcc

SEQ ID NO: 938825 - DNA, 33 bp, Homo sapien
ttctttttgcaataggcatctgaaagcctgtag

SEQ ID NO: 938826 - DNA, 33 bp, Homo sapien
ttctttttgcaatagggatctgaaagcctgtag

SEQ ID NO: 938827 - DNA, 33 bp, Homo sapien
taaaaacattagcagaaaaactggtaatatctg

SEQ ID NO: 938828 - DNA, 33 bp, Homo sapien
taaaaacattagcagagaaactggtaatatctg

SEQ ID NO: 938829 - DNA, 33 bp, Homo sapien
ttatattaagcttaaaattagccatatcagcta

SEQ ID NO: 938830 - DNA, 33 bp, Homo sapien
ttatattaagcttaaagttagccatatcagcta

SEQ ID NO: 938831 - DNA, 33 bp, Homo sapien
cacttacgttagtctgaatcctccaagaggcag

SEQ ID NO: 938832 - DNA, 33 bp, Homo sapien
cacttacgttagtctggatcctccaagaggcag

SEQ ID NO: 938833 - DNA, 33 bp, Homo sapien
aacttagtaatctctcagaagaccctctctcca

SEQ ID NO: 938834 - DNA, 33 bp, Homo sapien
aacttagtaatctctctgaagaccctctctcca

SEQ ID NO: 938835 - DNA, 33 bp, Homo sapien
tggcttatttctcctaaaagtcaatgacaaaaa

SEQ ID NO: 938836 - DNA, 33 bp, Homo sapien
tggcttatttctcctagaagtcaatgacaaaaa

SEQ ID NO: 938837 - DNA, 33 bp, Homo sapien
ttttgtgagcagtggaagaatgagcggcacacg

SEQ ID NO: 938838 - DNA, 33 bp, Homo sapien
ttttgtgagcagtggacgaatgagcggcacacg

SEQ ID NO: 938839 - DNA, 33 bp, Homo sapien
cactatatcttgataaagagcagctccttgaga

SEQ ID NO: 938840 - DNA, 33 bp, Homo sapien
cactatatcttgataaggagcagctccttgaga

SEQ ID NO: 938841 - DNA, 33 bp, Homo sapien
acagagaacttctgatcagggacaagaggaggg

SEQ ID NO: 938842 - DNA, 33 bp, Homo sapien
acagagaacttctgattagggacaagaggaggg

SEQ ID NO: 938843 - DNA, 33 bp, Homo sapien
ttcagttttctgatccaggagtgtaatatacct

SEQ ID NO: 938844 - DNA, 33 bp, Homo sapien
ttcagttttctgatccgggagtgtaatatacct

SEQ ID NO: 938845 - DNA, 33 bp, Homo sapien
catccaaactagtagaagggaaaatggaactaa

SEQ ID NO: 938846 - DNA, 33 bp, Homo sapien
catccaaactagtagaggggaaaatggaactaa

SEQ ID NO: 938847 - DNA, 33 bp, Homo sapien
actttttgaacactgacatttaatgtgtggtct

SEQ ID NO: 938848 - DNA, 33 bp, Homo sapien
actttttgaacactgatatttaatgtgtggtct

SEQ ID NO: 938849 - DNA, 33 bp, Homo sapien
gtttgccagcttctgaactagatattgcagcgt

SEQ ID NO: 938850 - DNA, 33 bp, Homo sapien
gtttgccagcttctgacctagatattgcagcgt

SEQ ID NO: 938851 - DNA, 33 bp, Homo sapien
taatttgcccaagctacctagttactggtggat

SEQ ID NO: 938852 - DNA, 33 bp, Homo sapien
taatttgcccaagctatctagttactggtggat

SEQ ID NO: 938853 - DNA, 33 bp, Homo sapien; identical to SEQ ID NO: 938851

SEQ ID NO: 938854 - DNA, 33 bp, Homo sapien; identical to SEQ ID NO: 938852

SEQ ID NO: 938855 - DNA, 33 bp, Homo sapien
ggtctttcatagcggcagaaagtgccaaagcaa

SEQ ID NO: 938856 - DNA, 33 bp, Homo sapien
ggtctttcatagcggcggaaagtgccaaagcaa

SEQ ID NO: 938857 - DNA, 33 bp, Homo sapien
taggtgtcgaaaataaaatgacagagtaaagca

SEQ ID NO: 938858 - DNA, 33 bp, Homo sapien
taggtgtcgaaaataagatgacagagtaaagca

SEQ ID NO: 938859 - DNA, 33 bp, Homo sapien
caagaagccactttaacactggagccaaagaca

SEQ ID NO: 938860 - DNA, 33 bp, Homo sapien
caagaagccactttaatactggagccaaagaca

SEQ ID NO: 938861 - DNA, 33 bp, Homo sapien
aatagattttcagtaacatcctggaagtcataa

SEQ ID NO: 938862 - DNA, 33 bp, Homo sapien
aatagattttcagtaatatcctggaagtcataa

SEQ ID NO: 938863 - DNA, 33 bp, Homo sapien
aggatacagcgtcacacggtggttatggatctc

SEQ ID NO: 938864 - DNA, 33 bp, Homo sapien
aggatacagcgtcacatggtggttatggatctc

SEQ ID NO: 938865 - DNA, 33 bp, Homo sapien
agactacttaatacaaaaactcaatgcaagtgg

SEQ ID NO: 938866 - DNA, 33 bp, Homo sapien
agactacttaatacaacaactcaatgcaagtgg

SEQ ID NO: 938867 - DNA, 33 bp, Homo sapien; identical to SEQ ID NO: 938865

SEQ ID NO: 938868 - DNA, 33 bp, Homo sapien; identical to SEQ ID NO: 938866

SEQ ID NO: 938869 - DNA, 33 bp, Homo sapien
atgtttgtaccaattacgttgactgaaattaag

SEQ ID NO: 938870 - DNA, 33 bp, Homo sapien
atgtttgtaccaattatgttgactgaaattaag

SEQ ID NO: 938871 - DNA, 33 bp, Homo sapien; identical to SEQ ID NO: 938869

SEQ ID NO: 938872 - DNA, 33 bp, Homo sapien; identical to SEQ ID NO: 938870

SEQ ID NO: 938873 - DNA, 33 bp, Homo sapien
cccacttatttaaaaaatggctttggctatctt

SEQ ID NO: 938874 - DNA, 33 bp, Homo sapien
cccacttatttaaaaactggctttggctatctt

SEQ ID NO: 938875 - DNA, 33 bp, Homo sapien
gtctaacttactgtcaagttcataggaggcacc

SEQ ID NO: 938876 - DNA, 33 bp, Homo sapien
gtctaacttactgtcaggttcataggaggcacc

SEQ ID NO: 938877 - DNA, 33 bp, Homo sapien
aaacagataaaagtcagctttgggaatgggcct

SEQ ID NO: 938878 - DNA, 33 bp, Homo sapien
aaacagataaaagtcatctttgggaatgggcct

SEQ ID NO: 938879 - DNA, 33 bp, Homo sapien
gtgtgggtagaagtggaaagtctctcacttggc

SEQ ID NO: 938880 - DNA, 33 bp, Homo sapien
gtgtgggtagaagtgggaagtctctcacttggc

SEQ ID NO: 938881 - DNA, 33 bp, Homo sapien
ctggctctttaaataaccaaaacttatggttgt

SEQ ID NO: 938882 - DNA, 33 bp, Homo sapien
ctggctctttaaataatcaaaacttatggttgt

SEQ ID NO: 938883 - DNA, 33 bp, Homo sapien
aacttatggttgtagcaataaaaactagcctac

SEQ ID NO: 938884 - DNA, 33 bp, Homo sapien
aacttatggttgtagcgataaaaactagcctac

SEQ ID NO: 938885 - DNA, 33 bp, Homo sapien
taatcctctttttgtacaggcataagcatgatt

SEQ ID NO: 938886 - DNA, 33 bp, Homo sapien
taatcctctttttgtataggcataagcatgatt

SEQ ID NO: 938887 - DNA, 33 bp, Homo sapien
agtaggagagccaaaactcctgctgtaatcctt

SEQ ID NO: 938888 - DNA, 33 bp, Homo sapien
agtaggagagccaaaattcctgctgtaatcctt

SEQ ID NO: 938889 - DNA, 33 bp, Homo sapien
tctgtcctcaaaaccaatcgttggatgatgttc

SEQ ID NO: 938890 - DNA, 33 bp, Homo sapien
tctgtcctcaaaaccagtcgttggatgatgttc

SEQ ID NO: 938891 - DNA, 33 bp, Homo sapien
atgatgtttagccagaaggagaggacaaattag

SEQ ID NO: 938892 - DNA, 33 bp, Homo sapien
atgatgtttagccagagggagaggacaaattag

SEQ ID NO: 938893 - DNA, 33 bp, Homo sapien
ctggattccacactccaagcagcagttgactgt

SEQ ID NO: 938894 - DNA, 33 bp, Homo sapien
ctggattccacactccgagcagcagttgactgt

SEQ ID NO: 938895 - DNA, 33 bp, Homo sapien
gtaaaattggaaaaaaatattcttcaatccaat

SEQ ID NO: 938896 - DNA, 33 bp, Homo sapien
gtaaaattggaaaaaagtattcttcaatccaat

SEQ ID NO: 938897 - DNA, 33 bp, Homo sapien
ttcctctgatgggcagcaattgaaatctatgtc

SEQ ID NO: 938898 - DNA, 33 bp, Homo sapien
ttcctctgatgggcagtaattgaaatctatgtc

SEQ ID NO: 938899 - DNA, 33 bp, Homo sapien
cactaaggttcgcttaactaatgtgtagaaagg

SEQ ID NO: 938900 - DNA, 33 bp, Homo sapien
cactaaggttcgcttatctaatgtgtagaaagg

SEQ ID NO: 938901 - DNA, 33 bp, Homo sapien
gatggagtaacccaaaaggcaatttagtggtag

SEQ ID NO: 938902 - DNA, 33 bp, Homo sapien
gatggagtaacccaaacggcaatttagtggtag

SEQ ID NO: 938903 - DNA, 33 bp, Homo sapien
caactatgaaaaacttaaagcgatttaccagca

SEQ ID NO: 938904 - DNA, 33 bp, Homo sapien
caactatgaaaaacttgaagcgatttaccagca

SEQ ID NO: 938905 - DNA, 33 bp, Homo sapien
tattcttcagccttcaaaactcatgctgtttta

SEQ ID NO: 938906 - DNA, 33 bp, Homo sapien
tattcttcagccttcagaactcatgctgtttta

SEQ ID NO: 938907 - DNA, 33 bp, Homo sapien
ctcagtgctaatgttacattacaagggctatgt

SEQ ID NO: 938908 - DNA, 33 bp, Homo sapien
ctcagtgctaatgttatattacaagggctatgt

SEQ ID NO: 938909 - DNA, 33 bp, Homo sapien
tgcttgccaaacacaacagtttaatataatttg

SEQ ID NO: 938910 - DNA, 33 bp, Homo sapien
tgcttgccaaacacaatagtttaatataatttg

SEQ ID NO: 938911 - DNA, 33 bp, Homo sapien
aatcactggcacttcaccacaaagagtttgcga

SEQ ID NO: 938912 - DNA, 33 bp, Homo sapien
aatcactggcacttcatcacaaagagtttgcga

SEQ ID NO: 938913 - DNA, 33 bp, Homo sapien
ggccattcacccgccccagaaatcatttactct

SEQ ID NO: 938914 - DNA, 33 bp, Homo sapien
ggccattcacccgccctagaaatcatttactct

SEQ ID NO: 938915 - DNA, 33 bp, Homo sapien
ttcatctacatagcttcaagcagaatctgtgtt

SEQ ID NO: 938916 - DNA, 33 bp, Homo sapien
ttcatctacatagctttaagcagaatctgtgtt

SEQ ID NO: 938917 - DNA, 33 bp, Homo sapien
agtgagtgaagtaatccgacccgtgtctaaaac

SEQ ID NO: 938918 - DNA, 33 bp, Homo sapien
agtgagtgaagtaatctgacccgtgtctaaaac

SEQ ID NO: 938919 - DNA, 33 bp, Homo sapien
gcttataaaacagaccaattggggctaattctt

SEQ ID NO: 938920 - DNA, 33 bp, Homo sapien
gcttataaaacagacctattggggctaattctt

SEQ ID NO: 938921 - DNA, 33 bp, Homo sapien
acttgaaagtatctgcaaggcgagaaagttagc

SEQ ID NO: 938922 - DNA, 33 bp, Homo sapien
acttgaaagtatctgccaggcgagaaagttagc

SEQ ID NO: 938923 - DNA, 33 bp, Homo sapien
cagctgggaatacaaaagcatgccactatgccc

SEQ ID NO: 938924 - DNA, 33 bp, Homo sapien
cagctgggaatacaaacgcatgccactatgccc

SEQ ID NO: 938925 - DNA, 33 bp, Homo sapien
gtttattaaaaatgataaaagagtcccaaccca

SEQ ID NO: 938926 - DNA, 33 bp, Homo sapien
gtttattaaaaatgatcaaagagtcccaaccca

SEQ ID NO: 938927 - DNA, 33 bp, Homo sapien
tctgcagttctgataaagggagatcatcctgca

SEQ ID NO: 938928 - DNA, 33 bp, Homo sapien
tctgcagttctgataatgggagatcatcctgca

SEQ ID NO: 938929 - DNA, 33 bp, Homo sapien
tagatgttacaatggaaatcactgaagtagaag

SEQ ID NO: 938930 - DNA, 33 bp, Homo sapien
tagatgttacaatggatatcactgaagtagaag

SEQ ID NO: 938931 - DNA, 33 bp, Homo sapien
acaatcacttttaagacgacatgatgtgcttct

SEQ ID NO: 938932 - DNA, 33 bp, Homo sapien
acaatcacttttaagatgacatgatgtgcttct

SEQ ID NO: 938933 - DNA, 33 bp, Homo sapien
tgctcgtgtttgtatgcacgtgagtgtgtacac

SEQ ID NO: 938934 - DNA, 33 bp, Homo sapien
tgctcgtgtttgtatgtacgtgagtgtgtacac

SEQ ID NO: 938935 - DNA, 33 bp, Homo sapien
taagcctggatcataaccgagaggggccaacgg

SEQ ID NO: 938936 - DNA, 33 bp, Homo sapien
taagcctggatcataatcgagaggggccaacgg

SEQ ID NO: 938937 - DNA, 33 bp, Homo sapien
gatgagttgagaaagaaaacagccgagtcaaga

SEQ ID NO: 938938 - DNA, 33 bp, Homo sapien
gatgagttgagaaagagaacagccgagtcaaga

SEQ ID NO: 938939 - DNA, 33 bp, Homo sapien
atgattcatgttgacacgtgttaaatgccagag

SEQ ID NO: 938940 - DNA, 33 bp, Homo sapien
atgattcatgttgacatgtgttaaatgccagag

SEQ ID NO: 938941 - DNA, 33 bp, Homo sapien
gcttggcgaacacaccacttttattcagatctt

SEQ ID NO: 938942 - DNA, 33 bp, Homo sapien
gcttggcgaacacaccgcttttattcagatctt

SEQ ID NO: 938943 - DNA, 33 bp, Homo sapien
atgagttcgtgcatagcaggcatggaacacaca

SEQ ID NO: 938944 - DNA, 33 bp, Homo sapien
atgagttcgtgcatagtaggcatggaacacaca

SEQ ID NO: 938945 - DNA, 33 bp, Homo sapien
ttgccattgcagaaacacttcagaggtgcttgg

SEQ ID NO: 938946 - DNA, 33 bp, Homo sapien
ttgccattgcagaaacgcttcagaggtgcttgg

SEQ ID NO: 938947 - DNA, 33 bp, Homo sapien
aaatttctagtctcacaagtcatccatttcctc

SEQ ID NO: 938948 - DNA, 33 bp, Homo sapien
aaatttctagtctcacgagtcatccatttcctc

SEQ ID NO: 938949 - DNA, 33 bp, Homo sapien
tggggcagagatttcacggaactgagagttcct

SEQ ID NO: 938950 - DNA, 33 bp, Homo sapien
tggggcagagatttcatggaactgagagttcct

SEQ ID NO: 938951 - DNA, 33 bp, Homo sapien
cccttctcataaagacactggcatgttggatta

SEQ ID NO: 938952 - DNA, 33 bp, Homo sapien
cccttctcataaagacgctggcatgttggatta

SEQ ID NO: 938953 - DNA, 33 bp, Homo sapien
ctgcagagtagctctcaccagggccaccaaagt

SEQ ID NO: 938954 - DNA, 33 bp, Homo sapien
ctgcagagtagctctcgccagggccaccaaagt

SEQ ID NO: 938955 - DNA, 33 bp, Homo sapien
gtgcggctattaagaacgtgaccaatgtgtttt

SEQ ID NO: 938956 - DNA, 33 bp, Homo sapien
gtgcggctattaagaatgtgaccaatgtgtttt

SEQ ID NO: 938957 - DNA, 33 bp, Homo sapien
acttctgctttacaggaaagagtacctgggtgc

SEQ ID NO: 938958 - DNA, 33 bp, Homo sapien
acttctgctttacagggaagagtacctgggtgc

SEQ ID NO: 938959 - DNA, 33 bp, Homo sapien
gactagtcacagcaacaatgtgacaacggacca

SEQ ID NO: 938960 - DNA, 33 bp, Homo sapien
gactagtcacagcaacgatgtgacaacggacca

SEQ ID NO: 938961 - DNA, 33 bp, Homo sapien
ttaggaactaaatctcagaaaatacgaagctcc

SEQ ID NO: 938962 - DNA, 33 bp, Homo sapien
ttaggaactaaatctctgaaaatacgaagctcc

SEQ ID NO: 938963 - DNA, 33 bp, Homo sapien
actcagcacataccccacagaccgctgtctaat

SEQ ID NO: 938964 - DNA, 33 bp, Homo sapien
actcagcacataccccgcagaccgctgtctaat

SEQ ID NO: 938965 - DNA, 33 bp, Homo sapien
tatccttcaaggttcaatctcatagtttcttcc

SEQ ID NO: 938966 - DNA, 33 bp, Homo sapien
tatccttcaaggttcagtctcatagtttcttcc

SEQ ID NO: 938967 - DNA, 33 bp, Homo sapien
agtggatagtgcaatcaaagggaaaatcagaag

SEQ ID NO: 938968 - DNA, 33 bp, Homo sapien
agtggatagtgcaatcgaagggaaaatcagaag

SEQ ID NO: 938969 - DNA, 33 bp, Homo sapien
ggtaatagccagggaggataagacaaccaggga

SEQ ID NO: 938970 - DNA, 33 bp, Homo sapien
ggtaatagccagggagtataagacaaccaggga

SEQ ID NO: 938971 - DNA, 33 bp, Homo sapien
ttaagttgtgttgaaaggcaaaaccctgttgcc

SEQ ID NO: 938972 - DNA, 33 bp, Homo sapien
ttaagttgtgttgaaatgcaaaaccctgttgcc

SEQ ID NO: 938973 - DNA, 33 bp, Homo sapien
attgaggtcttctccaagtgtgtttgttctggg

SEQ ID NO: 938974 - DNA, 33 bp, Homo sapien
attgaggtcttctccaggtgtgtttgttctggg

SEQ ID NO: 938975 - DNA, 33 bp, Homo sapien
agccagtgtcaactcaataaatcctgccacgta

SEQ ID NO: 938976 - DNA, 33 bp, Homo sapien
agccagtgtcaactcattaaatcctgccacgta

SEQ ID NO: 938977 - DNA, 33 bp, Homo sapien
acctttatcagcaaaaaacaaataaaatagcat

SEQ ID NO: 938978 - DNA, 33 bp, Homo sapien
acctttatcagcaaaagacaaataaaatagcat

SEQ ID NO: 938979 - DNA, 33 bp, Homo sapien
taatgaggaatacagcgctttgaaacagaaacc

SEQ ID NO: 938980 - DNA, 33 bp, Homo sapien
taatgaggaatacagctctttgaaacagaaacc

SEQ ID NO: 938981 - DNA, 33 bp, Homo sapien
tcatatgactcagtggaaaatagaggataatcg

SEQ ID NO: 938982 - DNA, 33 bp, Homo sapien
tcatatgactcagtggcaaatagaggataatcg

SEQ ID NO: 938983 - DNA, 33 bp, Homo sapien
ttggaacacttccaaaagtggaactctatgatc

SEQ ID NO: 938984 - DNA, 33 bp, Homo sapien
ttggaacacttccaaacgtggaactctatgatc

SEQ ID NO: 938985 - DNA, 33 bp, Homo sapien
gtaagatgtttgttccgccaactcagtctctat

SEQ ID NO: 938986 - DNA, 33 bp, Homo sapien
gtaagatgtttgttcctccaactcagtctctat

SEQ ID NO: 938987 - DNA, 33 bp, Homo sapien
gacagaggagagacgaataagtccacgaaaaac

SEQ ID NO: 938988 - DNA, 33 bp, Homo sapien
gacagaggagagacgagtaagtccacgaaaaac

SEQ ID NO: 938989 - DNA, 33 bp, Homo sapien
cacaatatcaatgaataaagattgcaattcacc

SEQ ID NO: 938990 - DNA, 33 bp, Homo sapien
cacaatatcaatgaatgaagattgcaattcacc

SEQ ID NO: 938991 - DNA, 33 bp, Homo sapien
aaggtcaagcagaagacatgtaaagctctaaat

SEQ ID NO: 938992 - DNA, 33 bp, Homo sapien
aaggtcaagcagaagatatgtaaagctctaaat

SEQ ID NO: 938993 - DNA, 33 bp, Homo sapien
tgatttcgcttttgcaaacaagaggtagtccag

SEQ ID NO: 938994 - DNA, 33 bp, Homo sapien
tgatttcgcttttgcagacaagaggtagtccag

SEQ ID NO: 938995 - DNA, 33 bp, Homo sapien
tgtgcaaacttacgatcatcctggagcacgggg

SEQ ID NO: 938996 - DNA, 33 bp, Homo sapien
tgtgcaaacttacgattatcctggagcacgggg

SEQ ID NO: 938997 - DNA, 33 bp, Homo sapien
ggggccctgtgtcatacggatcctgcttgatgt

SEQ ID NO: 938998 - DNA, 33 bp, Homo sapien
ggggccctgtgtcatatggatcctgcttgatgt

SEQ ID NO: 938999 - DNA, 33 bp, Homo sapien
agtagtctaagcattacgcaactctggttagat

SEQ ID NO: 939000 - DNA, 33 bp, Homo sapien
agtagtctaagcattatgcaactctggttagat

SEQ ID NO: 939001 - DNA, 33 bp, Homo sapien
ccaaactccatcacaccatttacttatttaaat

SEQ ID NO: 939002 - DNA, 33 bp, Homo sapien
ccaaactccatcacacgatttacttatttaaat

SEQ ID NO: 939003 - DNA, 33 bp, Homo sapien
tggagagtattaaatacggaaatgagctaaagt

SEQ ID NO: 939004 - DNA, 33 bp, Homo sapien
tggagagtattaaatatggaaatgagctaaagt

SEQ ID NO: 939005 - DNA, 33 bp, Homo sapien
tgtgtgagtatgtgtacctgcatgtgtttatac

SEQ ID NO: 939006 - DNA, 33 bp, Homo sapien
tgtgtgagtatgtgtatctgcatgtgtttatac

SEQ ID NO: 939007 - DNA, 33 bp, Homo sapien
ggggtcataacagctcacaaagcaaccttttca

SEQ ID NO: 939008 - DNA, 33 bp, Homo sapien
ggggtcataacagctcgcaaagcaaccttttca

SEQ ID NO: 939009 - DNA, 33 bp, Homo sapien
caaagcaaccttttcacgtacctgagaaactct

SEQ ID NO: 939010 - DNA, 33 bp, Homo sapien
caaagcaaccttttcatgtacctgagaaactct

SEQ ID NO: 939011 - DNA, 33 bp, Homo sapien
tcgccatcttgattcacgtaacaaaaataggtg

SEQ ID NO: 939012 - DNA, 33 bp, Homo sapien
tcgccatcttgattcaggtaacaaaaataggtg

SEQ ID NO: 939013 - DNA, 33 bp, Homo sapien
cttcaaccagccaaccaaacaacagcatgaatc

SEQ ID NO: 939014 - DNA, 33 bp, Homo sapien
cttcaaccagccaaccgaacaacagcatgaatc

SEQ ID NO: 939015 - DNA, 33 bp, Homo sapien
tttagaagaagcagtacgtatctagtataagat

SEQ ID NO: 939016 - DNA, 33 bp, Homo sapien
tttagaagaagcagtaggtatctagtataagat

SEQ ID NO: 939017 - DNA, 33 bp, Homo sapien
gaggatgcataatcaaaggtgtggtcatgtagc

SEQ ID NO: 939018 - DNA, 33 bp, Homo sapien
gaggatgcataatcaagggtgtggtcatgtagc

SEQ ID NO: 939019 - DNA, 33 bp, Homo sapien
tttgcatttttagccccgctgtttaatagaaaa

SEQ ID NO: 939020 - DNA, 33 bp, Homo sapien
tttgcatttttagccctgctgtttaatagaaaa

SEQ ID NO: 939021 - DNA, 33 bp, Homo sapien
ctgtttctttgcccaacaatacacatcatcatg

SEQ ID NO: 939022 - DNA, 33 bp, Homo sapien
ctgtttctttgcccaataatacacatcatcatg

SEQ ID NO: 939023 - DNA, 33 bp, Homo sapien
agaatcacagaatcacaaatgaaatggtttggc

SEQ ID NO: 939024 - DNA, 33 bp, Homo sapien
agaatcacagaatcacgaatgaaatggtttggc

SEQ ID NO: 939025 - DNA, 33 bp, Homo sapien
ggccataccatctttacgtccagtgattcacct

SEQ ID NO: 939026 - DNA, 33 bp, Homo sapien
ggccataccatctttatgtccagtgattcacct

SEQ ID NO: 939027 - DNA, 33 bp, Homo sapien
agcattgcttgctatacgaagttaaagtattac

SEQ ID NO: 939028 - DNA, 33 bp, Homo sapien
agcattgcttgctatatgaagttaaagtattac

SEQ ID NO: 939029 - DNA, 33 bp, Homo sapien
catttggtgaggactccaccttccctctcatct

SEQ ID NO: 939030 - DNA, 33 bp, Homo sapien
catttggtgaggactctaccttccctctcatct

SEQ ID NO: 939031 - DNA, 33 bp, Homo sapien
cattagaaaggccccccgaagaatccctgtgtc

SEQ ID NO: 939032 - DNA, 33 bp, Homo sapien
cattagaaaggccccctgaagaatccctgtgtc

SEQ ID NO: 939033 - DNA, 33 bp, Homo sapien
aaaattggtaataggaacacatgtccactgtca

SEQ ID NO: 939034 - DNA, 33 bp, Homo sapien
aaaattggtaataggatcacatgtccactgtca

SEQ ID NO: 939035 - DNA, 33 bp, Homo sapien
tacatgggcatcctcagtaggctctgctgtcaa

SEQ ID NO: 939036 - DNA, 33 bp, Homo sapien
tacatgggcatcctcattaggctctgctgtcaa

SEQ ID NO: 939037 - DNA, 33 bp, Homo sapien
tcatagggacaaaagtcactccaaattgttttt

SEQ ID NO: 939038 - DNA, 33 bp, Homo sapien
tcatagggacaaaagtgactccaaattgttttt

SEQ ID NO: 939039 - DNA, 33 bp, Homo sapien
ggagagagacaacagggagtcttcactgcaggc

SEQ ID NO: 939040 - DNA, 33 bp, Homo sapien
ggagagagacaacaggtagtcttcactgcaggc

SEQ ID NO: 939041 - DNA, 33 bp, Homo sapien
ctctcatctgtggctcacaagtgctccaggaga

SEQ ID NO: 939042 - DNA, 33 bp, Homo sapien
ctctcatctgtggctcgcaagtgctccaggaga

SEQ ID NO: 939043 - DNA, 33 bp, Homo sapien
gtggagagcaatagcaatcaggacttgggaggg

SEQ ID NO: 939044 - DNA, 33 bp, Homo sapien
gtggagagcaatagcagtcaggacttgggaggg

SEQ ID NO: 939045 - DNA, 33 bp, Homo sapien
agttttgcttcgcttcgctttttactttttcta

SEQ ID NO: 939046 - DNA, 33 bp, Homo sapien
agttttgcttcgcttctctttttactttttcta

SEQ ID NO: 939047 - DNA, 33 bp, Homo sapien
cctgccatcagcttcaaattagctttatctcaa

SEQ ID NO: 939048 - DNA, 33 bp, Homo sapien
cctgccatcagcttcagattagctttatctcaa

SEQ ID NO: 939049 - DNA, 33 bp, Homo sapien
agttctgagatggagacgcacaatcttaattac

SEQ ID NO: 939050 - DNA, 33 bp, Homo sapien
agttctgagatggagatgcacaatcttaattac

SEQ ID NO: 939051 - DNA, 33 bp, Homo sapien
ttttaaaaagtgaatccgatcacaacacactcc

SEQ ID NO: 939052 - DNA, 33 bp, Homo sapien
ttttaaaaagtgaatctgatcacaacacactcc

SEQ ID NO: 939053 - DNA, 33 bp, Homo sapien
ggttctaatatagtaactcaaagtcaccaggtc

SEQ ID NO: 939054 - DNA, 33 bp, Homo sapien
ggttctaatatagtaattcaaagtcaccaggtc

SEQ ID NO: 939055 - DNA, 33 bp, Homo sapien
tgaaacaaagtggtcactgaatttcgttataca

SEQ ID NO: 939056 - DNA, 33 bp, Homo sapien
tgaaacaaagtggtcattgaatttcgttataca

SEQ ID NO: 939057 - DNA, 33 bp, Homo sapien
gaacataggcatctcaatacagcaatatgtaga

SEQ ID NO: 939058 - DNA, 33 bp, Homo sapien
gaacataggcatctcagtacagcaatatgtaga

SEQ ID NO: 939059 - DNA, 33 bp, Homo sapien
tatcattgagagaacacgttgaccaattacaat

SEQ ID NO: 939060 - DNA, 33 bp, Homo sapien
tatcattgagagaacatgttgaccaattacaat

SEQ ID NO: 939061 - DNA, 33 bp, Homo sapien
acgcgatttcctatgaactattggaactccact

SEQ ID NO: 939062 - DNA, 33 bp, Homo sapien
acgcgatttcctatgagctattggaactccact

SEQ ID NO: 939063 - DNA, 33 bp, Homo sapien
agagaggtgtcacctcaaccctaaaaaatgaac

SEQ ID NO: 939064 - DNA, 33 bp, Homo sapien
agagaggtgtcacctcgaccctaaaaaatgaac

SEQ ID NO: 939065 - DNA, 33 bp, Homo sapien
cctgcttcaaaaccaaaccacaaagcagcaatc

SEQ ID NO: 939066 - DNA, 33 bp, Homo sapien
cctgcttcaaaaccaatccacaaagcagcaatc

SEQ ID NO: 939067 - DNA, 33 bp, Homo sapien
acttgaaggaactgctaaagaatagggacacca

SEQ ID NO: 939068 - DNA, 33 bp, Homo sapien
acttgaaggaactgctgaagaatagggacacca

SEQ ID NO: 939069 - DNA, 33 bp, Homo sapien
agaacaggtgtttgtgaaataggtaaaaccaga

SEQ ID NO: 939070 - DNA, 33 bp, Homo sapien
agaacaggtgtttgtggaataggtaaaaccaga

SEQ ID NO: 939071 - DNA, 33 bp, Homo sapien
atcatcttaaaaatggaacatgagctctgacca

SEQ ID NO: 939072 - DNA, 33 bp, Homo sapien
atcatcttaaaaatgggacatgagctctgacca

SEQ ID NO: 939073 - DNA, 33 bp, Homo sapien
cagtctaatcttgcacaggagtaaaaccaagct

SEQ ID NO: 939074 - DNA, 33 bp, Homo sapien
cagtctaatcttgcactggagtaaaaccaagct

SEQ ID NO: 939075 - DNA, 33 bp, Homo sapien
caaattctcgcctggaagtcagttaagaaaagg

SEQ ID NO: 939076 - DNA, 33 bp, Homo sapien
caaattctcgcctggaggtcagttaagaaaagg

SEQ ID NO: 939077 - DNA, 33 bp, Homo sapien
aagaagtatctacatcacaaacacattttcgac

SEQ ID NO: 939078 - DNA, 33 bp, Homo sapien
aagaagtatctacatcgcaaacacattttcgac

SEQ ID NO: 939079 - DNA, 33 bp, Homo sapien
tttgtacactgataaaacttcttggaaacataa

SEQ ID NO: 939080 - DNA, 33 bp, Homo sapien
tttgtacactgataaatcttcttggaaacataa

SEQ ID NO: 939081 - DNA, 33 bp, Homo sapien
tactctattctagacactgaaattatgcagaga

SEQ ID NO: 939082 - DNA, 33 bp, Homo sapien
tactctattctagacattgaaattatgcagaga

SEQ ID NO: 939083 - DNA, 33 bp, Homo sapien
ttaacagacttctaggcacaaaggatccaatgg

SEQ ID NO: 939084 - DNA, 33 bp, Homo sapien
ttaacagacttctaggtacaaaggatccaatgg

SEQ ID NO: 939085 - DNA, 33 bp, Homo sapien
ggctggtgatcagggacgatgagcttttctcat

SEQ ID NO: 939086 - DNA, 33 bp, Homo sapien
ggctggtgatcagggatgatgagcttttctcat

SEQ ID NO: 939087 - DNA, 33 bp, Homo sapien
agcatgctctatctccaccctagccgcttgaga

SEQ ID NO: 939088 - DNA, 33 bp, Homo sapien
agcatgctctatctccgccctagccgcttgaga

SEQ ID NO: 939089 - DNA, 33 bp, Homo sapien
ttgatgtttttccacaaatacctgtagaaatcc

SEQ ID NO: 939090 - DNA, 33 bp, Homo sapien
ttgatgtttttccacagatacctgtagaaatcc

SEQ ID NO: 939091 - DNA, 33 bp, Homo sapien
agagagacgtttaagcaccagctctaaggtagt

SEQ ID NO: 939092 - DNA, 33 bp, Homo sapien
agagagacgtttaagcgccagctctaaggtagt

SEQ ID NO: 939093 - DNA, 33 bp, Homo sapien
gcctcagcttagtaggccaattcagaggcattc

SEQ ID NO: 939094 - DNA, 33 bp, Homo sapien
gcctcagcttagtagggcaattcagaggcattc

SEQ ID NO: 939095 - DNA, 33 bp, Homo sapien
ctgaaaatgacttgaccgtagatttgcttctgg

SEQ ID NO: 939096 - DNA, 33 bp, Homo sapien
ctgaaaatgacttgactgtagatttgcttctgg

SEQ ID NO: 939097 - DNA, 33 bp, Homo sapien
ttttagcaatttacaacccatttgccccagaag

SEQ ID NO: 939098 - DNA, 33 bp, Homo sapien
ttttagcaatttacaatccatttgccccagaag

SEQ ID NO: 939099 - DNA, 33 bp, Homo sapien
agataagagaggaaaaagcttgggaccaaagac

SEQ ID NO: 939100 - DNA, 33 bp, Homo sapien
agataagagaggaaaaggcttgggaccaaagac

SEQ ID NO: 939101 - DNA, 33 bp, Homo sapien
gaaataaccttaacagaaatgactgcagataag

SEQ ID NO: 939102 - DNA, 33 bp, Homo sapien
gaaataaccttaacaggaatgactgcagataag

SEQ ID NO: 939103 - DNA, 33 bp, Homo sapien
cacacaggcgaacatactacaagtttattattt

SEQ ID NO: 939104 - DNA, 33 bp, Homo sapien
cacacaggcgaacatattacaagtttattattt

SEQ ID NO: 939105 - DNA, 33 bp, Homo sapien
attttaaatctttccacgtgtgtctcttctggc

SEQ ID NO: 939106 - DNA, 33 bp, Homo sapien
attttaaatctttccatgtgtgtctcttctggc

SEQ ID NO: 939107 - DNA, 33 bp, Homo sapien
cctgttattctgaagccccatactaactctgta

SEQ ID NO: 939108 - DNA, 33 bp, Homo sapien
cctgttattctgaagctccatactaactctgta

SEQ ID NO: 939109 - DNA, 33 bp, Homo sapien
ttccagtttgtccccaatgcttcaagagagggt

SEQ ID NO: 939110 - DNA, 33 bp, Homo sapien
ttccagtttgtccccagtgcttcaagagagggt

SEQ ID NO: 939111 - DNA, 33 bp, Homo sapien
aataattgtttccaaacaatggggcgcattagc

SEQ ID NO: 939112 - DNA, 33 bp, Homo sapien
aataattgtttccaaataatggggcgcattagc

SEQ ID NO: 939113 - DNA, 33 bp, Homo sapien
cccacctgtcaccttagcatgaccctgggaagc

SEQ ID NO: 939114 - DNA, 33 bp, Homo sapien
cccacctgtcaccttatcatgaccctgggaagc

SEQ ID NO: 939115 - DNA, 33 bp, Homo sapien
aacacttttagtgacaaacaagtcaaattaata

SEQ ID NO: 939116 - DNA, 33 bp, Homo sapien
aacacttttagtgacacacaagtcaaattaata

SEQ ID NO: 939117 - DNA, 33 bp, Homo sapien
taggctacttatgatccgaaaaatgctggtttc

SEQ ID NO: 939118 - DNA, 33 bp, Homo sapien
taggctacttatgatctgaaaaatgctggtttc

SEQ ID NO: 939119 - DNA, 33 bp, Homo sapien
acttcgcaactcataaaatacaatttcctgttt

SEQ ID NO: 939120 - DNA, 33 bp, Homo sapien
acttcgcaactcataagatacaatttcctgttt

SEQ ID NO: 939121 - DNA, 33 bp, Homo sapien
gagccagaagaaatagcagatgtgaagaggctg

SEQ ID NO: 939122 - DNA, 33 bp, Homo sapien
gagccagaagaaataggagatgtgaagaggctg

SEQ ID NO: 939123 - DNA, 33 bp, Homo sapien
tacatggtaaaagcaaacaacatagatgagagt

SEQ ID NO: 939124 - DNA, 33 bp, Homo sapien
tacatggtaaaagcaagcaacatagatgagagt

SEQ ID NO: 939125 - DNA, 33 bp, Homo sapien
gctgtagaggactggacgaaaacagtacatgat

SEQ ID NO: 939126 - DNA, 33 bp, Homo sapien
gctgtagaggactggatgaaaacagtacatgat

SEQ ID NO: 939127 - DNA, 33 bp, Homo sapien
tgtccaagccaccaggccaggaaatagtgggac

SEQ ID NO: 939128 - DNA, 33 bp, Homo sapien
tgtccaagccaccaggtcaggaaatagtgggac

SEQ ID NO: 939129 - DNA, 33 bp, Homo sapien
ctgaggcgagagagaccaaagcaacaatgacaa

SEQ ID NO: 939130 - DNA, 33 bp, Homo sapien
ctgaggcgagagagacgaaagcaacaatgacaa

SEQ ID NO: 939131 - DNA, 33 bp, Homo sapien
acaagaaagatgtaaagaaactaacacctggca

SEQ ID NO: 939132 - DNA, 33 bp, Homo sapien
acaagaaagatgtaaataaactaacacctggca

SEQ ID NO: 939133 - DNA, 33 bp, Homo sapien
ggcttaactttgttcactacaaccccaaattat

SEQ ID NO: 939134 - DNA, 33 bp, Homo sapien
ggcttaactttgttcagtacaaccccaaattat

SEQ ID NO: 939135 - DNA, 33 bp, Homo sapien
atttatgtaggtatgacgcttggcacacatagg

SEQ ID NO: 939136 - DNA, 33 bp, Homo sapien
atttatgtaggtatgatgcttggcacacatagg

SEQ ID NO: 939137 - DNA, 33 bp, Homo sapien
atcagagtattcaccaaaggattccttaaactg

SEQ ID NO: 939138 - DNA, 33 bp, Homo sapien
atcagagtattcaccataggattccttaaactg

SEQ ID NO: 939139 - DNA, 33 bp, Homo sapien
caaacatcagcttttccatcagtacacaaatca

SEQ ID NO: 939140 - DNA, 33 bp, Homo sapien
caaacatcagcttttctatcagtacacaaatca

SEQ ID NO: 939141 - DNA, 33 bp, Homo sapien
cagtacttcattgccccagcctacttgtcaaat

SEQ ID NO: 939142 - DNA, 33 bp, Homo sapien
cagtacttcattgccctagcctacttgtcaaat

SEQ ID NO: 939143 - DNA, 33 bp, Homo sapien
gcagaagagttatacacggttcagaacagggaa

SEQ ID NO: 939144 - DNA, 33 bp, Homo sapien
gcagaagagttatacatggttcagaacagggaa

SEQ ID NO: 939145 - DNA, 33 bp, Homo sapien
gaggccgcagatgaaaagagtcctgctgacacc

SEQ ID NO: 939146 - DNA, 33 bp, Homo sapien
gaggccgcagatgaaacgagtcctgctgacacc

SEQ ID NO: 939147 - DNA, 33 bp, Homo sapien
gagacacgctgccctaaagtggtcctcggtata

SEQ ID NO: 939148 - DNA, 33 bp, Homo sapien
gagacacgctgccctatagtggtcctcggtata

SEQ ID NO: 939149 - DNA, 33 bp, Homo sapien
tcagccttttgattcaccacaaattacctcact

SEQ ID NO: 939150 - DNA, 33 bp, Homo sapien
tcagccttttgattcagcacaaattacctcact

SEQ ID NO: 939151 - DNA, 33 bp, Homo sapien
aatcggccatcattacaggaatattggcttcca

SEQ ID NO: 939152 - DNA, 33 bp, Homo sapien
aatcggccatcattacgggaatattggcttcca

SEQ ID NO: 939153 - DNA, 33 bp, Homo sapien
atcaatcaatcgtacaatcttcctttacctaaa

SEQ ID NO: 939154 - DNA, 33 bp, Homo sapien
atcaatcaatcgtacagtcttcctttacctaaa

SEQ ID NO: 939155 - DNA, 33 bp, Homo sapien
ctaacttgacagccacacaagggggacagttag

SEQ ID NO: 939156 - DNA, 33 bp, Homo sapien
ctaacttgacagccacgcaagggggacagttag

SEQ ID NO: 939157 - DNA, 33 bp, Homo sapien
ggtgagtacagtacagaaagatattttgtgaca

SEQ ID NO: 939158 - DNA, 33 bp, Homo sapien
ggtgagtacagtacaggaagatattttgtgaca

SEQ ID NO: 939159 - DNA, 33 bp, Homo sapien
cgtaccaagcactggaagtatttaaatgcacaa

SEQ ID NO: 939160 - DNA, 33 bp, Homo sapien
cgtaccaagcactggaggtatttaaatgcacaa

SEQ ID NO: 939161 - DNA, 33 bp, Homo sapien
agtcattagtggagaacggaaccagctatttaa

SEQ ID NO: 939162 - DNA, 33 bp, Homo sapien
agtcattagtggagaatggaaccagctatttaa

SEQ ID NO: 939163 - DNA, 33 bp, Homo sapien
aaaagccttgcttaataaaatgttctgctggtt

SEQ ID NO: 939164 - DNA, 33 bp, Homo sapien
aaaagccttgcttaatgaaatgttctgctggtt

SEQ ID NO: 939165 - DNA, 33 bp, Homo sapien
ttatagtcaaagcaccactgatttagaatctaa

SEQ ID NO: 939166 - DNA, 33 bp, Homo sapien
ttatagtcaaagcacctctgatttagaatctaa

SEQ ID NO: 939167 - DNA, 33 bp, Homo sapien
ttaggcagggcttgaacgaggtgcagcgaggcc

SEQ ID NO: 939168 - DNA, 33 bp, Homo sapien
ttaggcagggcttgaatgaggtgcagcgaggcc

SEQ ID NO: 939169 - DNA, 33 bp, Homo sapien
taaactcacagcttaacgggtgagtgtaacctg

SEQ ID NO: 939170 - DNA, 33 bp, Homo sapien
taaactcacagcttaatgggtgagtgtaacctg

SEQ ID NO: 939171 - DNA, 33 bp, Homo sapien
ctctgtttctagacctaaatgggctatttcaca

SEQ ID NO: 939172 - DNA, 33 bp, Homo sapien
ctctgtttctagacctgaatgggctatttcaca

SEQ ID NO: 939173 - DNA, 33 bp, Homo sapien
gaacaggagcggccaaaaaggcacaggggtaat

SEQ ID NO: 939174 - DNA, 33 bp, Homo sapien
gaacaggagcggccaacaaggcacaggggtaat

SEQ ID NO: 939175 - DNA, 33 bp, Homo sapien
ttgggggagaaaagtggaacctggccacaaaag

SEQ ID NO: 939176 - DNA, 33 bp, Homo sapien
ttgggggagaaaagtgtaacctggccacaaaag

SEQ ID NO: 939177 - DNA, 33 bp, Homo sapien
tggtcatctgatttcaacaggtgcagggatctg

SEQ ID NO: 939178 - DNA, 33 bp, Homo sapien
tggtcatctgatttcagcaggtgcagggatctg

SEQ ID NO: 939179 - DNA, 33 bp, Homo sapien
ccagtacttcccatgaagcttagagtccacgta

SEQ ID NO: 939180 - DNA, 33 bp, Homo sapien
ccagtacttcccatgacgcttagagtccacgta

SEQ ID NO: 939181 - DNA, 33 bp, Homo sapien
aatgaacaaaactggacgaatcatattatctga

SEQ ID NO: 939182 - DNA, 33 bp, Homo sapien
aatgaacaaaactggatgaatcatattatctga

SEQ ID NO: 939183 - DNA, 33 bp, Homo sapien
aattttaacactgaaaccatctgaatgagtttt

SEQ ID NO: 939184 - DNA, 33 bp, Homo sapien
aattttaacactgaaatcatctgaatgagtttt

SEQ ID NO: 939185 - DNA, 33 bp, Homo sapien
tgtaactttgacatgggcactatgggaatagaa

SEQ ID NO: 939186 - DNA, 33 bp, Homo sapien
tgtaactttgacatggtcactatgggaatagaa

SEQ ID NO: 939187 - DNA, 33 bp, Homo sapien
caagttaatcaggcccagcgagcagcttctgtc

SEQ ID NO: 939188 - DNA, 33 bp, Homo sapien
caagttaatcaggcccggcgagcagcttctgtc

SEQ ID NO: 939189 - DNA, 33 bp, Homo sapien
ccaagacacacctctcgctgctttcagacggag

SEQ ID NO: 939190 - DNA, 33 bp, Homo sapien
ccaagacacacctctctctgctttcagacggag

SEQ ID NO: 939191 - DNA, 33 bp, Homo sapien
gaattaagcagcatcaacagcggggcccagcat

SEQ ID NO: 939192 - DNA, 33 bp, Homo sapien
gaattaagcagcatcagcagcggggcccagcat

SEQ ID NO: 939193 - DNA, 33 bp, Homo sapien
cactttgcagttgaaacggaattcgtgctttgt

SEQ ID NO: 939194 - DNA, 33 bp, Homo sapien
cactttgcagttgaaatggaattcgtgctttgt

SEQ ID NO: 939195 - DNA, 33 bp, Homo sapien
ccagctgtggctgaaacggcccaagttagagtt

SEQ ID NO: 939196 - DNA, 33 bp, Homo sapien
ccagctgtggctgaaatggcccaagttagagtt

SEQ ID NO: 939197 - DNA, 33 bp, Homo sapien
taggctggccttcctacgaactacaaaatagag

SEQ ID NO: 939198 - DNA, 33 bp, Homo sapien
taggctggccttcctatgaactacaaaatagag

SEQ ID NO: 939199 - DNA, 33 bp, Homo sapien
cgtgtaggtgaagaaacgaatggctgagaggca

SEQ ID NO: 939200 - DNA, 33 bp, Homo sapien
cgtgtaggtgaagaaaggaatggctgagaggca

SEQ ID NO: 939201 - DNA, 33 bp, Homo sapien
ctggagaattgatggcaaggctggcatttaaag

SEQ ID NO: 939202 - DNA, 33 bp, Homo sapien
ctggagaattgatggcgaggctggcatttaaag

SEQ ID NO: 939203 - DNA, 33 bp, Homo sapien
ggcagctaaatttacactcacgataagattata

SEQ ID NO: 939204 - DNA, 33 bp, Homo sapien
ggcagctaaatttacagtcacgataagattata

SEQ ID NO: 939205 - DNA, 33 bp, Homo sapien
gagactacagtatttaaactttccagatgctgc

SEQ ID NO: 939206 - DNA, 33 bp, Homo sapien
gagactacagtatttagactttccagatgctgc

SEQ ID NO: 939207 - DNA, 33 bp, Homo sapien
ttatgcttctattccacgtaattgaaccataag

SEQ ID NO: 939208 - DNA, 33 bp, Homo sapien
ttatgcttctattccatgtaattgaaccataag

SEQ ID NO: 939209 - DNA, 33 bp, Homo sapien
cacagtcttattggaactatgtgaaatgggagg

SEQ ID NO: 939210 - DNA, 33 bp, Homo sapien
cacagtcttattggaagtatgtgaaatgggagg

SEQ ID NO: 939211 - DNA, 33 bp, Homo sapien
gacatcaaaattatcaataacgcaaaatataag

SEQ ID NO: 939212 - DNA, 33 bp, Homo sapien
gacatcaaaattatcagtaacgcaaaatataag

SEQ ID NO: 939213 - DNA, 33 bp, Homo sapien
caaatgcctcctaataacctcagacttacaaaa

SEQ ID NO: 939214 - DNA, 33 bp, Homo sapien
caaatgcctcctaataccctcagacttacaaaa

SEQ ID NO: 939215 - DNA, 33 bp, Homo sapien
attgctggctggttaaggagctccctctggctc

SEQ ID NO: 939216 - DNA, 33 bp, Homo sapien
attgctggctggttaatgagctccctctggctc

SEQ ID NO: 939217 - DNA, 33 bp, Homo sapien
ccctaagtgagatgtgaacattagaattgctgg

SEQ ID NO: 939218 - DNA, 33 bp, Homo sapien
ccctaagtgagatgtggacattagaattgctgg

SEQ ID NO: 939219 - DNA, 33 bp, Homo sapien
agcagaacccaagagaaagcaagtccactgtgt

SEQ ID NO: 939220 - DNA, 33 bp, Homo sapien
agcagaacccaagagagagcaagtccactgtgt

SEQ ID NO: 939221 - DNA, 33 bp, Homo sapien
tcatgagaaaaggcccagaaaaattagatggaa

SEQ ID NO: 939222 - DNA, 33 bp, Homo sapien
tcatgagaaaaggcccggaaaaattagatggaa

SEQ ID NO: 939223 - DNA, 33 bp, Homo sapien
cagacatcattccaagaaaataaacaattccgt

SEQ ID NO: 939224 - DNA, 33 bp, Homo sapien
cagacatcattccaagtaaataaacaattccgt

SEQ ID NO: 939225 - DNA, 33 bp, Homo sapien
ttataactatcctcaacgaattaacataagcct

SEQ ID NO: 939226 - DNA, 33 bp, Homo sapien
ttataactatcctcaatgaattaacataagcct

SEQ ID NO: 939227 - DNA, 33 bp, Homo sapien
tcacatttttagctgtgaatttgacaaattgtt

SEQ ID NO: 939228 - DNA, 33 bp, Homo sapien
tcacatttttagctgttaatttgacaaattgtt

SEQ ID NO: 939229 - DNA, 33 bp, Homo sapien
gatcagtctctgcttacgttagaagggtagaca

SEQ ID NO: 939230 - DNA, 33 bp, Homo sapien
gatcagtctctgcttaggttagaagggtagaca

SEQ ID NO: 939231 - DNA, 33 bp, Homo sapien
tatatttccaaattcaaccatgtgataaagtgt

SEQ ID NO: 939232 - DNA, 33 bp, Homo sapien
tatatttccaaattcacccatgtgataaagtgt

SEQ ID NO: 939233 - DNA, 33 bp, Homo sapien
agcatgaaagttgaaacgagaaagcagaatagt

SEQ ID NO: 939234 - DNA, 33 bp, Homo sapien
agcatgaaagttgaaatgagaaagcagaatagt

SEQ ID NO: 939235 - DNA, 33 bp, Homo sapien
cacacaccctgatgcaactgtgactgccctggc

SEQ ID NO: 939236 - DNA, 33 bp, Homo sapien
cacacaccctgatgcacctgtgactgccctggc

SEQ ID NO: 939237 - DNA, 33 bp, Homo sapien
cttgctttggtaatcaaaggtttcattgagtgc

SEQ ID NO: 939238 - DNA, 33 bp, Homo sapien
cttgctttggtaatcacaggtttcattgagtgc

SEQ ID NO: 939239 - DNA, 33 bp, Homo sapien
ggggtagagatgatgcaaaaccaacctgtacat

SEQ ID NO: 939240 - DNA, 33 bp, Homo sapien
ggggtagagatgatgcgaaaccaacctgtacat

SEQ ID NO: 939241 - DNA, 33 bp, Homo sapien
tgcttaaaggaaggcaaaactcatcacaggttg

SEQ ID NO: 939242 - DNA, 33 bp, Homo sapien
tgcttaaaggaaggcacaactcatcacaggttg

SEQ ID NO: 939243 - DNA, 33 bp, Homo sapien
actgcccgacagctcacgggtgtaggggtttag

SEQ ID NO: 939244 - DNA, 33 bp, Homo sapien
actgcccgacagctcatgggtgtaggggtttag

SEQ ID NO: 939245 - DNA, 33 bp, Homo sapien
aaggagcttgagtctaacaaggaatatagaccc

SEQ ID NO: 939246 - DNA, 33 bp, Homo sapien
aaggagcttgagtctagcaaggaatatagaccc

SEQ ID NO: 939247 - DNA, 33 bp, Homo sapien
aaggacaagtttcggactaatgcatttggatgg

SEQ ID NO: 939248 - DNA, 33 bp, Homo sapien
aaggacaagtttcggattaatgcatttggatgg

SEQ ID NO: 939249 - DNA, 33 bp, Homo sapien
cccacaaaggccatcaaaatacaaatgccctta

SEQ ID NO: 939250 - DNA, 33 bp, Homo sapien
cccacaaaggccatcagaatacaaatgccctta

SEQ ID NO: 939251 - DNA, 33 bp, Homo sapien
ttgagagatggcaaaacggaagcccaagagttc

SEQ ID NO: 939252 - DNA, 33 bp, Homo sapien
ttgagagatggcaaaatggaagcccaagagttc

SEQ ID NO: 939253 - DNA, 33 bp, Homo sapien
ccaaaatcaggaccaaattacaggccagtatta

SEQ ID NO: 939254 - DNA, 33 bp, Homo sapien
ccaaaatcaggaccaagttacaggccagtatta

SEQ ID NO: 939255 - DNA, 33 bp, Homo sapien
agtgaagataaattcacgatgagaacatttgag

SEQ ID NO: 939256 - DNA, 33 bp, Homo sapien
agtgaagataaattcatgatgagaacatttgag

SEQ ID NO: 939257 - DNA, 33 bp, Homo sapien
gacaagatggttatatagcagggctcacttgca

SEQ ID NO: 939258 - DNA, 33 bp, Homo sapien
gacaagatggttatattgcagggctcacttgca

SEQ ID NO: 939259 - DNA, 33 bp, Homo sapien
gcgatcatttctggaaaggagtgaatggatcta

SEQ ID NO: 939260 - DNA, 33 bp, Homo sapien
gcgatcatttctggaagggagtgaatggatcta

SEQ ID NO: 939261 - DNA, 33 bp, Homo sapien
ccatttcccaagctaacgagataaagtgatgtg

SEQ ID NO: 939262 - DNA, 33 bp, Homo sapien
ccatttcccaagctaatgagataaagtgatgtg

SEQ ID NO: 939263 - DNA, 33 bp, Homo sapien
atagtggttcagcaaaagtttgtgggatgccaa

SEQ ID NO: 939264 - DNA, 33 bp, Homo sapien
atagtggttcagcaaatgtttgtgggatgccaa

SEQ ID NO: 939265 - DNA, 33 bp, Homo sapien
tctatgagagatgaggaagcaagaaaaaatttc

SEQ ID NO: 939266 - DNA, 33 bp, Homo sapien
tctatgagagatgaggtagcaagaaaaaatttc

SEQ ID NO: 939267 - DNA, 33 bp, Homo sapien
tgtaatattaagcaaccagccattctttaccaa

SEQ ID NO: 939268 - DNA, 33 bp, Homo sapien
tgtaatattaagcaactagccattctttaccaa

SEQ ID NO: 939269 - DNA, 33 bp, Homo sapien
tgctgctaaaacaggagatcacagtctcagtaa

SEQ ID NO: 939270 - DNA, 33 bp, Homo sapien
tgctgctaaaacaggatatcacagtctcagtaa

SEQ ID NO: 939271 - DNA, 33 bp, Homo sapien
acccctcgtgatactccgacagccacagccact

SEQ ID NO: 939272 - DNA, 33 bp, Homo sapien
acccctcgtgatactctgacagccacagccact

SEQ ID NO: 939273 - DNA, 33 bp, Homo sapien
tttctgtttagcataactcctgagatccaccca

SEQ ID NO: 939274 - DNA, 33 bp, Homo sapien
tttctgtttagcataattcctgagatccaccca

SEQ ID NO: 939275 - DNA, 33 bp, Homo sapien
aaaggaacccgctatgaatacatgaacagcttg

SEQ ID NO: 939276 - DNA, 33 bp, Homo sapien
aaaggaacccgctatggatacatgaacagcttg

SEQ ID NO: 939277 - DNA, 33 bp, Homo sapien
taaacccagatatccacaaatgagtgaatggtt

SEQ ID NO: 939278 - DNA, 33 bp, Homo sapien
taaacccagatatccataaatgagtgaatggtt

SEQ ID NO: 939279 - DNA, 33 bp, Homo sapien
ctgacttcttgttgtaacctcatgtggtgaaga

SEQ ID NO: 939280 - DNA, 33 bp, Homo sapien
ctgacttcttgttgtagcctcatgtggtgaaga

SEQ ID NO: 939281 - DNA, 33 bp, Homo sapien
ataattgctggaactacagagcaaagaggctcg

SEQ ID NO: 939282 - DNA, 33 bp, Homo sapien
ataattgctggaactatagagcaaagaggctcg

SEQ ID NO: 939283 - DNA, 33 bp, Homo sapien
ggggctgtacccaaataatcccaggaagctgag

SEQ ID NO: 939284 - DNA, 33 bp, Homo sapien
ggggctgtacccaaatcatcccaggaagctgag

SEQ ID NO: 939285 - DNA, 33 bp, Homo sapien
ccctacatttacaggacggtcagctgtccccat

SEQ ID NO: 939286 - DNA, 33 bp, Homo sapien
ccctacatttacaggatggtcagctgtccccat

SEQ ID NO: 939287 - DNA, 33 bp, Homo sapien
tctaactgtagatacacgtggataccatagcag

SEQ ID NO: 939288 - DNA, 33 bp, Homo sapien
tctaactgtagatacatgtggataccatagcag

SEQ ID NO: 939289 - DNA, 33 bp, Homo sapien
gctacatcgtgcaggaacatgacagtggatgga

SEQ ID NO: 939290 - DNA, 33 bp, Homo sapien
gctacatcgtgcaggaccatgacagtggatgga

SEQ ID NO: 939291 - DNA, 33 bp, Homo sapien
aaaaatattggaattcacatcagccattcccct

SEQ ID NO: 939292 - DNA, 33 bp, Homo sapien
aaaaatattggaattcgcatcagccattcccct

SEQ ID NO: 939293 - DNA, 33 bp, Homo sapien
cgtatactggatattacgtcctgagcaaaattc

SEQ ID NO: 939294 - DNA, 33 bp, Homo sapien
cgtatactggatattatgtcctgagcaaaattc

SEQ ID NO: 939295 - DNA, 33 bp, Homo sapien
ccgccctaagggttaaacagctcgtccatgttc

SEQ ID NO: 939296 - DNA, 33 bp, Homo sapien
ccgccctaagggttaagcagctcgtccatgttc

SEQ ID NO: 939297 - DNA, 33 bp, Homo sapien
ttaccgtaatcccataaatatgttccagatttg

SEQ ID NO: 939298 - DNA, 33 bp, Homo sapien
ttaccgtaatcccatagatatgttccagatttg

SEQ ID NO: 939299 - DNA, 33 bp, Homo sapien
acattattgagagaccagatgaggttagcagtg

SEQ ID NO: 939300 - DNA, 33 bp, Homo sapien
acattattgagagaccggatgaggttagcagtg

SEQ ID NO: 939301 - DNA, 33 bp, Homo sapien
gctctctgttttctacacagcttagaatacagg

SEQ ID NO: 939302 - DNA, 33 bp, Homo sapien
gctctctgttttctactcagcttagaatacagg

SEQ ID NO: 939303 - DNA, 33 bp, Homo sapien
ggccattgatgagaaaatagccaattaattcat

SEQ ID NO: 939304 - DNA, 33 bp, Homo sapien
ggccattgatgagaaattagccaattaattcat

SEQ ID NO: 939305 - DNA, 33 bp, Homo sapien
tctcattaagacaaataagactctgacaatatt

SEQ ID NO: 939306 - DNA, 33 bp, Homo sapien
tctcattaagacaaatcagactctgacaatatt

SEQ ID NO: 939307 - DNA, 33 bp, Homo sapien
catcagctggtaattacgcccggcaccaggata

SEQ ID NO: 939308 - DNA, 33 bp, Homo sapien
catcagctggtaattatgcccggcaccaggata

SEQ ID NO: 939309 - DNA, 33 bp, Homo sapien
cccatattggccttgaaaacaaattgctcaaac

SEQ ID NO: 939310 - DNA, 33 bp, Homo sapien
cccatattggccttgagaacaaattgctcaaac

SEQ ID NO: 939311 - DNA, 33 bp, Homo sapien
gactggagggtgctaaaaagaaagaacatctaa

SEQ ID NO: 939312 - DNA, 33 bp, Homo sapien
gactggagggtgctaagaagaaagaacatctaa

SEQ ID NO: 939313 - DNA, 33 bp, Homo sapien
aagtcagcaatgcaaaacttcagtatgcaggat

SEQ ID NO: 939314 - DNA, 33 bp, Homo sapien
aagtcagcaatgcaaagcttcagtatgcaggat

SEQ ID NO: 939315 - DNA, 33 bp, Homo sapien
ctgatagaaaccgagaaggctgcaatgaccacg

SEQ ID NO: 939316 - DNA, 33 bp, Homo sapien
ctgatagaaaccgagagggctgcaatgaccacg

SEQ ID NO: 939317 - DNA, 33 bp, Homo sapien
gccctcatcttagaaacagtgttcagggccttt

SEQ ID NO: 939318 - DNA, 33 bp, Homo sapien
gccctcatcttagaaatagtgttcagggccttt

SEQ ID NO: 939319 - DNA, 33 bp, Homo sapien
gaacaaacctgaaggaccgtattatccaaattc

SEQ ID NO: 939320 - DNA, 33 bp, Homo sapien
gaacaaacctgaaggatcgtattatccaaattc

SEQ ID NO: 939321 - DNA, 33 bp, Homo sapien
tccccatagtacaatcacattttcttggttata

SEQ ID NO: 939322 - DNA, 33 bp, Homo sapien
tccccatagtacaatcgcattttcttggttata

SEQ ID NO: 939323 - DNA, 33 bp, Homo sapien
tggggtcaggctttccccatgagaacaaccaag

SEQ ID NO: 939324 - DNA, 33 bp, Homo sapien
tggggtcaggctttcctcatgagaacaaccaag

SEQ ID NO: 939325 - DNA, 33 bp, Homo sapien
tgcagtcattactaccagagaaatgttctatgg

SEQ ID NO: 939326 - DNA, 33 bp, Homo sapien
tgcagtcattactaccggagaaatgttctatgg

SEQ ID NO: 939327 - DNA, 33 bp, Homo sapien
tgtttccaaaggaaaacgtgatgatgcaccaaa

SEQ ID NO: 939328 - DNA, 33 bp, Homo sapien
tgtttccaaaggaaaatgtgatgatgcaccaaa

SEQ ID NO: 939329 - DNA, 33 bp, Homo sapien
tggttccttaaatcccacttcacactgaggtgt

SEQ ID NO: 939330 - DNA, 33 bp, Homo sapien
tggttccttaaatcccgcttcacactgaggtgt

SEQ ID NO: 939331 - DNA, 33 bp, Homo sapien
agttctcacagagatgaaagccatgttgcaaaa

SEQ ID NO: 939332 - DNA, 33 bp, Homo sapien
agttctcacagagatgtaagccatgttgcaaaa

SEQ ID NO: 939333 - DNA, 33 bp, Homo sapien
ccatatctatcctccacatattttgtaggctct

SEQ ID NO: 939334 - DNA, 33 bp, Homo sapien
ccatatctatcctccatatattttgtaggctct

SEQ ID NO: 939335 - DNA, 33 bp, Homo sapien
gtaggtaaaggaaggcccacgctctctcgctgt

SEQ ID NO: 939336 - DNA, 33 bp, Homo sapien
gtaggtaaaggaaggctcacgctctctcgctgt

SEQ ID NO: 939337 - DNA, 33 bp, Homo sapien
atttttattgaaggcaaaaaccccaatgccata

SEQ ID NO: 939338 - DNA, 33 bp, Homo sapien
atttttattgaaggcagaaaccccaatgccata

SEQ ID NO: 939339 - DNA, 33 bp, Homo sapien
cacccagctaattttaaaaacacgactttgtat

SEQ ID NO: 939340 - DNA, 33 bp, Homo sapien
cacccagctaattttagaaacacgactttgtat

SEQ ID NO: 939341 - DNA, 33 bp, Homo sapien
aggtgctgaatataaaattgctggtcattaaaa

SEQ ID NO: 939342 - DNA, 33 bp, Homo sapien
aggtgctgaatataaacttgctggtcattaaaa

SEQ ID NO: 939343 - DNA, 33 bp, Homo sapien
gctttaaagccaggcactgaattttcctctcta

SEQ ID NO: 939344 - DNA, 33 bp, Homo sapien
gctttaaagccaggcattgaattttcctctcta

SEQ ID NO: 939345 - DNA, 33 bp, Homo sapien
gggaggaagtttaaaaagtgccaacagggcacc

SEQ ID NO: 939346 - DNA, 33 bp, Homo sapien
gggaggaagtttaaaacgtgccaacagggcacc

SEQ ID NO: 939347 - DNA, 33 bp, Homo sapien
tttatgataagttgcactgagataaggagaacc

SEQ ID NO: 939348 - DNA, 33 bp, Homo sapien
tttatgataagttgcattgagataaggagaacc

SEQ ID NO: 939349 - DNA, 33 bp, Homo sapien
ctgtgccaatcctgcaaataactcctgtcactg

SEQ ID NO: 939350 - DNA, 33 bp, Homo sapien
ctgtgccaatcctgcagataactcctgtcactg

SEQ ID NO: 939351 - DNA, 33 bp, Homo sapien
gttctgtgcttcgcccgataaattatgttctat

SEQ ID NO: 939352 - DNA, 33 bp, Homo sapien
gttctgtgcttcgccctataaattatgttctat

SEQ ID NO: 939353 - DNA, 33 bp, Homo sapien
atttgacaaagtgaaaaatgaaagaaatctctt

SEQ ID NO: 939354 - DNA, 33 bp, Homo sapien
atttgacaaagtgaaagatgaaagaaatctctt

SEQ ID NO: 939355 - DNA, 33 bp, Homo sapien
attagaggttgggttgaatgatctctaagagat

SEQ ID NO: 939356 - DNA, 33 bp, Homo sapien
attagaggttgggttggatgatctctaagagat

SEQ ID NO: 939357 - DNA, 33 bp, Homo sapien
gtggtatctttaatgaacaacaaatgtcaggta

SEQ ID NO: 939358 - DNA, 33 bp, Homo sapien
gtggtatctttaatgatcaacaaatgtcaggta

SEQ ID NO: 939359 - DNA, 33 bp, Homo sapien
ccactgactagatttcaaattttatgagagcag

SEQ ID NO: 939360 - DNA, 33 bp, Homo sapien
ccactgactagatttccaattttatgagagcag

SEQ ID NO: 939361 - DNA, 33 bp, Homo sapien
ttttttctctctgtgcacatcttaccttcatac

SEQ ID NO: 939362 - DNA, 33 bp, Homo sapien
ttttttctctctgtgcgcatcttaccttcatac

SEQ ID NO: 939363 - DNA, 33 bp, Homo sapien
ctgggtaatagagtcagggttttgcaggacata

SEQ ID NO: 939364 - DNA, 33 bp, Homo sapien
ctgggtaatagagtcatggttttgcaggacata

SEQ ID NO: 939365 - DNA, 33 bp, Homo sapien
gacccctgagttaccaaaattcaaacatactcc

SEQ ID NO: 939366 - DNA, 33 bp, Homo sapien
gacccctgagttaccacaattcaaacatactcc

SEQ ID NO: 939367 - DNA, 33 bp, Homo sapien
catgattttggtgctacggttcctcacatttta

SEQ ID NO: 939368 - DNA, 33 bp, Homo sapien
catgattttggtgctatggttcctcacatttta

SEQ ID NO: 939369 - DNA, 33 bp, Homo sapien
ggatgacccagtcgatgaacaaatgagtgagaa

SEQ ID NO: 939370 - DNA, 33 bp, Homo sapien
ggatgacccagtcgattaacaaatgagtgagaa

SEQ ID NO: 939371 - DNA, 33 bp, Homo sapien
agttcctcaattcatacggtgcagccctaaccc

SEQ ID NO: 939372 - DNA, 33 bp, Homo sapien
agttcctcaattcatatggtgcagccctaaccc

SEQ ID NO: 939373 - DNA, 33 bp, Homo sapien
aaggaagaagaatgagacccttatggccacagc

SEQ ID NO: 939374 - DNA, 33 bp, Homo sapien
aaggaagaagaatgaggcccttatggccacagc

SEQ ID NO: 939375 - DNA, 33 bp, Homo sapien
gagtttttaaaagtccacacagatatatcagaa

SEQ ID NO: 939376 - DNA, 33 bp, Homo sapien
gagtttttaaaagtccgcacagatatatcagaa

SEQ ID NO: 939377 - DNA, 33 bp, Homo sapien
tctcatctaactttcacaactgtccacgagagt

SEQ ID NO: 939378 - DNA, 33 bp, Homo sapien
tctcatctaactttcagaactgtccacgagagt

SEQ ID NO: 939379 - DNA, 33 bp, Homo sapien
ggagagttaagtctgcactttcaaatctttgca

SEQ ID NO: 939380 - DNA, 33 bp, Homo sapien
ggagagttaagtctgctctttcaaatctttgca

SEQ ID NO: 939381 - DNA, 33 bp, Homo sapien
tccatgagttgcatcaatgactatacctggtgc

SEQ ID NO: 939382 - DNA, 33 bp, Homo sapien
tccatgagttgcatcagtgactatacctggtgc

SEQ ID NO: 939383 - DNA, 33 bp, Homo sapien
cctgccagcaacattcaacaaaggtcctgcttt

SEQ ID NO: 939384 - DNA, 33 bp, Homo sapien
cctgccagcaacattctacaaaggtcctgcttt

SEQ ID NO: 939385 - DNA, 33 bp, Homo sapien
agctccaggagaatccaagttccagggagggtc

SEQ ID NO: 939386 - DNA, 33 bp, Homo sapien
agctccaggagaatccgagttccagggagggtc

SEQ ID NO: 939387 - DNA, 33 bp, Homo sapien
tcctgatgcagacccacgaggatcctctgccag

SEQ ID NO: 939388 - DNA, 33 bp, Homo sapien
tcctgatgcagacccatgaggatcctctgccag

SEQ ID NO: 939389 - DNA, 33 bp, Homo sapien
aaaaatgctacaaataactcacaaagaagctct

SEQ ID NO: 939390 - DNA, 33 bp, Homo sapien
aaaaatgctacaaatagctcacaaagaagctct

SEQ ID NO: 939391 - DNA, 33 bp, Homo sapien
atttagggcaggtgtcaccaccatctctgcctg

SEQ ID NO: 939392 - DNA, 33 bp, Homo sapien
atttagggcaggtgtcgccaccatctctgcctg

SEQ ID NO: 939393 - DNA, 33 bp, Homo sapien
tgacctcttcaggagacggtgaccccgagatgt

SEQ ID NO: 939394 - DNA, 33 bp, Homo sapien
tgacctcttcaggagatggtgaccccgagatgt

SEQ ID NO: 939395 - DNA, 33 bp, Homo sapien
atttgggatcagggtaaatgaatgaaatttgat

SEQ ID NO: 939396 - DNA, 33 bp, Homo sapien
atttgggatcagggtagatgaatgaaatttgat

SEQ ID NO: 939397 - DNA, 33 bp, Homo sapien
tctgttgttccaggagcaaagatatttcacggg

SEQ ID NO: 939398 - DNA, 33 bp, Homo sapien
tctgttgttccaggagtaaagatatttcacggg

SEQ ID NO: 939399 - DNA, 33 bp, Homo sapien
tgcggcaaaatgttcaaataagaacttcttcca

SEQ ID NO: 939400 - DNA, 33 bp, Homo sapien
tgcggcaaaatgttcagataagaacttcttcca

SEQ ID NO: 939401 - DNA, 33 bp, Homo sapien
taacttttatcagagcaatgtctttgctagcct

SEQ ID NO: 939402 - DNA, 33 bp, Homo sapien
taacttttatcagagcgatgtctttgctagcct

SEQ ID NO: 939403 - DNA, 33 bp, Homo sapien
ttcaaggatgaaacccactcatggctgaagagt

SEQ ID NO: 939404 - DNA, 33 bp, Homo sapien
ttcaaggatgaaacccgctcatggctgaagagt

SEQ ID NO: 939405 - DNA, 33 bp, Homo sapien
gagttcagtttctgaaccaacaaaagaaaggca

SEQ ID NO: 939406 - DNA, 33 bp, Homo sapien
gagttcagtttctgaatcaacaaaagaaaggca

SEQ ID NO: 939407 - DNA, 33 bp, Homo sapien
ataattaggtatgtaggcacagaaaaaacatta

SEQ ID NO: 939408 - DNA, 33 bp, Homo sapien
ataattaggtatgtagtcacagaaaaaacatta

SEQ ID NO: 939409 - DNA, 33 bp, Homo sapien
acatcctctcgctgcaaaacataattaaccagg

SEQ ID NO: 939410 - DNA, 33 bp, Homo sapien
acatcctctcgctgcacaacataattaaccagg

SEQ ID NO: 939411 - DNA, 33 bp, Homo sapien
atccatcaatcgcttacgactttcatgacatca

SEQ ID NO: 939412 - DNA, 33 bp, Homo sapien
atccatcaatcgcttatgactttcatgacatca

SEQ ID NO: 939413 - DNA, 33 bp, Homo sapien
caccctacatgtttgaagctaataagacagttt

SEQ ID NO: 939414 - DNA, 33 bp, Homo sapien
caccctacatgtttgaggctaataagacagttt

SEQ ID NO: 939415 - DNA, 33 bp, Homo sapien
taaacattcacttggacaaattcaaaattaaaa

SEQ ID NO: 939416 - DNA, 33 bp, Homo sapien
taaacattcacttggataaattcaaaattaaaa

SEQ ID NO: 939417 - DNA, 33 bp, Homo sapien
agagaaaacaggatgaagagcaggaaataggat

SEQ ID NO: 939418 - DNA, 33 bp, Homo sapien
agagaaaacaggatgaggagcaggaaataggat

SEQ ID NO: 939419 - DNA, 33 bp, Homo sapien
agggatcctacacaaacgtgcctatcactggtc

SEQ ID NO: 939420 - DNA, 33 bp, Homo sapien
agggatcctacacaaatgtgcctatcactggtc

SEQ ID NO: 939421 - DNA, 33 bp, Homo sapien
aaaagtcagtatgccacgattttaagatttatg

SEQ ID NO: 939422 - DNA, 33 bp, Homo sapien
aaaagtcagtatgccatgattttaagatttatg

SEQ ID NO: 939423 - DNA, 33 bp, Homo sapien
gatcggttgttgggtaaagacttcatgtgtgtc

SEQ ID NO: 939424 - DNA, 33 bp, Homo sapien
gatcggttgttgggtagagacttcatgtgtgtc

SEQ ID NO: 939425 - DNA, 33 bp, Homo sapien
tccacaggaagcggaaacctttccagtctcctc

SEQ ID NO: 939426 - DNA, 33 bp, Homo sapien
tccacaggaagcggaagcctttccagtctcctc

SEQ ID NO: 939427 - DNA, 33 bp, Homo sapien
ctccttttcatcaacacagtgagcatggagtac

SEQ ID NO: 939428 - DNA, 33 bp, Homo sapien
ctccttttcatcaacagagtgagcatggagtac

SEQ ID NO: 939429 - DNA, 33 bp, Homo sapien
gaaaacgtacattgacacgttaacagcaagtcg

SEQ ID NO: 939430 - DNA, 33 bp, Homo sapien
gaaaacgtacattgactcgttaacagcaagtcg

SEQ ID NO: 939431 - DNA, 33 bp, Homo sapien
cttttctgtttttttcccagccaatatctctgg

SEQ ID NO: 939432 - DNA, 33 bp, Homo sapien
cttttctgtttttttctcagccaatatctctgg

SEQ ID NO: 939433 - DNA, 33 bp, Homo sapien
gccacatggcatcaaaacgtattttcatgcaag

SEQ ID NO: 939434 - DNA, 33 bp, Homo sapien
gccacatggcatcaaagcgtattttcatgcaag

SEQ ID NO: 939435 - DNA, 33 bp, Homo sapien
tccagatgagctgagacacacagactgtgggtc

SEQ ID NO: 939436 - DNA, 33 bp, Homo sapien
tccagatgagctgagatacacagactgtgggtc

SEQ ID NO: 939437 - DNA, 33 bp, Homo sapien
cacagcaaagctgaagcatgcacactatcttgg

SEQ ID NO: 939438 - DNA, 33 bp, Homo sapien
cacagcaaagctgaaggatgcacactatcttgg

SEQ ID NO: 939439 - DNA, 33 bp, Homo sapien
ttgaaaacattaagagacaggcctggtgacttt

SEQ ID NO: 939440 - DNA, 33 bp, Homo sapien
ttgaaaacattaagaggcaggcctggtgacttt

SEQ ID NO: 939441 - DNA, 33 bp, Homo sapien
agtaccaccacagagagaggaatcagggagccg

SEQ ID NO: 939442 - DNA, 33 bp, Homo sapien
agtaccaccacagagataggaatcagggagccg

SEQ ID NO: 939443 - DNA, 33 bp, Homo sapien
ttaactctgctgggaaacaaaacaaccacttct

SEQ ID NO: 939444 - DNA, 33 bp, Homo sapien
ttaactctgctgggaagcaaaacaaccacttct

SEQ ID NO: 939445 - DNA, 33 bp, Homo sapien
ttttatttcttaagccactgggtcccatctctt

SEQ ID NO: 939446 - DNA, 33 bp, Homo sapien
ttttatttcttaagccgctgggtcccatctctt

SEQ ID NO: 939447 - DNA, 33 bp, Homo sapien
gaggacagtaggggtcccatcttgctcagtgtc

SEQ ID NO: 939448 - DNA, 33 bp, Homo sapien
gaggacagtaggggtctcatcttgctcagtgtc

SEQ ID NO: 939449 - DNA, 33 bp, Homo sapien
atcaggcaagtttctacctaagacccacagctt

SEQ ID NO: 939450 - DNA, 33 bp, Homo sapien
atcaggcaagtttctagctaagacccacagctt

SEQ ID NO: 939451 - DNA, 33 bp, Homo sapien
tgttagccaaatgccaacttgcccacccaaatg

SEQ ID NO: 939452 - DNA, 33 bp, Homo sapien
tgttagccaaatgccagcttgcccacccaaatg

SEQ ID NO: 939453 - DNA, 33 bp, Homo sapien
cctgaagtcaaaagaaaagtccttcagggaata

SEQ ID NO: 939454 - DNA, 33 bp, Homo sapien
cctgaagtcaaaagaagagtccttcagggaata

SEQ ID NO: 939455 - DNA, 33 bp, Homo sapien
tggaagtgacaaccgacgaagatcaggggaact

SEQ ID NO: 939456 - DNA, 33 bp, Homo sapien
tggaagtgacaaccgatgaagatcaggggaact

SEQ ID NO: 939457 - DNA, 33 bp, Homo sapien
ctcccagcgcttgtgaagagtacataaaatgaa

SEQ ID NO: 939458 - DNA, 33 bp, Homo sapien
ctcccagcgcttgtgacgagtacataaaatgaa

SEQ ID NO: 939459 - DNA, 33 bp, Homo sapien
aatggtctaggagaaaaagaataattttgtgtg

SEQ ID NO: 939460 - DNA, 33 bp, Homo sapien
aatggtctaggagaaagagaataattttgtgtg

SEQ ID NO: 939461 - DNA, 33 bp, Homo sapien
tgttgatgttaactacaacccagattaccaaag

SEQ ID NO: 939462 - DNA, 33 bp, Homo sapien
tgttgatgttaactacgacccagattaccaaag

SEQ ID NO: 939463 - DNA, 33 bp, Homo sapien
gatgctaacaacttccaaaccagctttcttccc

SEQ ID NO: 939464 - DNA, 33 bp, Homo sapien
gatgctaacaacttccgaaccagctttcttccc

SEQ ID NO: 939465 - DNA, 33 bp, Homo sapien
cgctccgtatttcccacctgcaacacgggtttc

SEQ ID NO: 939466 - DNA, 33 bp, Homo sapien
cgctccgtatttcccagctgcaacacgggtttc

SEQ ID NO: 939467 - DNA, 33 bp, Homo sapien
caaatgaaacctcccacggctggaatcactaag

SEQ ID NO: 939468 - DNA, 33 bp, Homo sapien
caaatgaaacctcccatggctggaatcactaag

SEQ ID NO: 939469 - DNA, 33 bp, Homo sapien
ccactaaaaggattgacgctttattcttcagag

SEQ ID NO: 939470 - DNA, 33 bp, Homo sapien
ccactaaaaggattgatgctttattcttcagag

SEQ ID NO: 939471 - DNA, 33 bp, Homo sapien
gtgttctgcttggaaaactgactgagaaggtag

SEQ ID NO: 939472 - DNA, 33 bp, Homo sapien
gtgttctgcttggaaacctgactgagaaggtag

SEQ ID NO: 939473 - DNA, 33 bp, Homo sapien
tttgtgaaaggaccaacgtgctgataaacagga

SEQ ID NO: 939474 - DNA, 33 bp, Homo sapien
tttgtgaaaggaccaatgtgctgataaacagga

SEQ ID NO: 939475 - DNA, 33 bp, Homo sapien
ttcaatgggcctgaacaactacaaagccagcta

SEQ ID NO: 939476 - DNA, 33 bp, Homo sapien
ttcaatgggcctgaacgactacaaagccagcta

SEQ ID NO: 939477 - DNA, 33 bp, Homo sapien
gttgcgtccttctctactacccagactgctgcg

SEQ ID NO: 939478 - DNA, 33 bp, Homo sapien
gttgcgtccttctctattacccagactgctgcg

SEQ ID NO: 939479 - DNA, 33 bp, Homo sapien
tgtggataggagttgacggtttgctcaagaagg

SEQ ID NO: 939480 - DNA, 33 bp, Homo sapien
tgtggataggagttgatggtttgctcaagaagg

SEQ ID NO: 939481 - DNA, 33 bp, Homo sapien
ccctggtgtccctcatcagaacgctctatcttc

SEQ ID NO: 939482 - DNA, 33 bp, Homo sapien
ccctggtgtccctcattagaacgctctatcttc

SEQ ID NO: 939483 - DNA, 33 bp, Homo sapien
caattaacacatttcaatctacaactaccccat

SEQ ID NO: 939484 - DNA, 33 bp, Homo sapien
caattaacacatttcattctacaactaccccat

SEQ ID NO: 939485 - DNA, 33 bp, Homo sapien
tacgtcccttctcttacggaggcacagattctt

SEQ ID NO: 939486 - DNA, 33 bp, Homo sapien
tacgtcccttctcttatggaggcacagattctt

SEQ ID NO: 939487 - DNA, 33 bp, Homo sapien
tctatatctaaggtcaccatttttcattatcag

SEQ ID NO: 939488 - DNA, 33 bp, Homo sapien
tctatatctaaggtcagcatttttcattatcag

SEQ ID NO: 939489 - DNA, 33 bp, Homo sapien
ttctcatctcaccttgccaaccattcctttgat

SEQ ID NO: 939490 - DNA, 33 bp, Homo sapien
ttctcatctcaccttgtcaaccattcctttgat

SEQ ID NO: 939491 - DNA, 33 bp, Homo sapien
gggttccaacattcatcatccagtttcagagac

SEQ ID NO: 939492 - DNA, 33 bp, Homo sapien
gggttccaacattcattatccagtttcagagac

SEQ ID NO: 939493 - DNA, 33 bp, Homo sapien
ttgaatgggtaagaaacaggctgtagcattcct

SEQ ID NO: 939494 - DNA, 33 bp, Homo sapien
ttgaatgggtaagaaagaggctgtagcattcct

SEQ ID NO: 939495 - DNA, 33 bp, Homo sapien
aacattttcctcttaacgctaaagagcttatgg

SEQ ID NO: 939496 - DNA, 33 bp, Homo sapien
aacattttcctcttaatgctaaagagcttatgg

SEQ ID NO: 939497 - DNA, 33 bp, Homo sapien
caggcacacacgaagaaaaaaaaactcggcaag

SEQ ID NO: 939498 - DNA, 33 bp, Homo sapien
caggcacacacgaagagaaaaaaactcggcaag

SEQ ID NO: 939499 - DNA, 33 bp, Homo sapien
tttcagtcatcactgaagttatttttaaggttg

SEQ ID NO: 939500 - DNA, 33 bp, Homo sapien
tttcagtcatcactgaggttatttttaaggttg

SEQ ID NO: 939501 - DNA, 33 bp, Homo sapien
ctgctgctgtccttctcagaactgctcccttcc

SEQ ID NO: 939502 - DNA, 33 bp, Homo sapien
ctgctgctgtccttcttagaactgctcccttcc

SEQ ID NO: 939503 - DNA, 33 bp, Homo sapien
gactaagaaattatcagtcatctgtttcaggaa

SEQ ID NO: 939504 - DNA, 33 bp, Homo sapien
gactaagaaattatcattcatctgtttcaggaa

SEQ ID NO: 939505 - DNA, 33 bp, Homo sapien
atatgaatttactttacgatattggcgttacaa

SEQ ID NO: 939506 - DNA, 33 bp, Homo sapien
atatgaatttactttatgatattggcgttacaa

SEQ ID NO: 939507 - DNA, 33 bp, Homo sapien
agctgtgagtccaagaccctttcgctccactgt

SEQ ID NO: 939508 - DNA, 33 bp, Homo sapien
agctgtgagtccaagagcctttcgctccactgt

SEQ ID NO: 939509 - DNA, 33 bp, Homo sapien
acttccttcactgtacaccgcaagcagcactgt

SEQ ID NO: 939510 - DNA, 33 bp, Homo sapien
acttccttcactgtacgccgcaagcagcactgt

SEQ ID NO: 939511 - DNA, 33 bp, Homo sapien
cccttcccagaacacacaatcaaatgacactat

SEQ ID NO: 939512 - DNA, 33 bp, Homo sapien
cccttcccagaacacataatcaaatgacactat

SEQ ID NO: 939513 - DNA, 33 bp, Homo sapien
atctacttagacccctcagcctgtgtgatgctc

SEQ ID NO: 939514 - DNA, 33 bp, Homo sapien
atctacttagaccccttagcctgtgtgatgctc

SEQ ID NO: 939515 - DNA, 33 bp, Homo sapien
agcatttttagcttcaagcatccattcgactgg

SEQ ID NO: 939516 - DNA, 33 bp, Homo sapien
agcatttttagcttcacgcatccattcgactgg

SEQ ID NO: 939517 - DNA, 33 bp, Homo sapien
ctctcctgttcagctagccatacatcccttaaa

SEQ ID NO: 939518 - DNA, 33 bp, Homo sapien
ctctcctgttcagctatccatacatcccttaaa

SEQ ID NO: 939519 - DNA, 33 bp, Homo sapien
atgtggtcttcttacacgtccaagaaaagaaaa

SEQ ID NO: 939520 - DNA, 33 bp, Homo sapien
atgtggtcttcttacatgtccaagaaaagaaaa

SEQ ID NO: 939521 - DNA, 33 bp, Homo sapien
gtttaggaagctgcctaaaaggtgacattcaat

SEQ ID NO: 939522 - DNA, 33 bp, Homo sapien
gtttaggaagctgcctgaaaggtgacattcaat

SEQ ID NO: 939523 - DNA, 33 bp, Homo sapien
tttcctgctggttacacgggtacattctccctg

SEQ ID NO: 939524 - DNA, 33 bp, Homo sapien
tttcctgctggttacatgggtacattctccctg

SEQ ID NO: 939525 - DNA, 33 bp, Homo sapien
aactttgctgtgtagagatggttaaacttgggg

SEQ ID NO: 939526 - DNA, 33 bp, Homo sapien
aactttgctgtgtagatatggttaaacttgggg

SEQ ID NO: 939527 - DNA, 33 bp, Homo sapien
tctggttcttctaagcacagatattgtgattat

SEQ ID NO: 939528 - DNA, 33 bp, Homo sapien
tctggttcttctaagcgcagatattgtgattat

SEQ ID NO: 939529 - DNA, 33 bp, Homo sapien
tagtggagaagggagaagatgagtatctgtcac

SEQ ID NO: 939530 - DNA, 33 bp, Homo sapien
tagtggagaagggagatgatgagtatctgtcac

SEQ ID NO: 939531 - DNA, 33 bp, Homo sapien
tgctagcacaggtgcaagaaaacacaggcagct

SEQ ID NO: 939532 - DNA, 33 bp, Homo sapien
tgctagcacaggtgcaggaaaacacaggcagct

SEQ ID NO: 939533 - DNA, 33 bp, Homo sapien
caagatcttttcatgcaatgattgccacatcta

SEQ ID NO: 939534 - DNA, 33 bp, Homo sapien
caagatcttttcatgccatgattgccacatcta

SEQ ID NO: 939535 - DNA, 33 bp, Homo sapien
tttcccacagtgtggaagctacaaatctgaaat

SEQ ID NO: 939536 - DNA, 33 bp, Homo sapien
tttcccacagtgtggaggctacaaatctgaaat

SEQ ID NO: 939537 - DNA, 33 bp, Homo sapien
atgtgaagacagagccaagtgatgccaccacac

SEQ ID NO: 939538 - DNA, 33 bp, Homo sapien
atgtgaagacagagccgagtgatgccaccacac

SEQ ID NO: 939539 - DNA, 33 bp, Homo sapien
gaagattagaagatatcaagattggatttccag

SEQ ID NO: 939540 - DNA, 33 bp, Homo sapien
gaagattagaagatattaagattggatttccag

SEQ ID NO: 939541 - DNA, 33 bp, Homo sapien
ttggggctatgctttaagatgaagctgaaatat

SEQ ID NO: 939542 - DNA, 33 bp, Homo sapien
ttggggctatgctttacgatgaagctgaaatat

SEQ ID NO: 939543 - DNA, 33 bp, Homo sapien
acttgttcaacgtggcaaactcatttcaggcaa

SEQ ID NO: 939544 - DNA, 33 bp, Homo sapien
acttgttcaacgtggcgaactcatttcaggcaa

SEQ ID NO: 939545 - DNA, 33 bp, Homo sapien
aggaggttaggttcacaggtaaatccatctctg

SEQ ID NO: 939546 - DNA, 33 bp, Homo sapien
aggaggttaggttcactggtaaatccatctctg

SEQ ID NO: 939547 - DNA, 33 bp, Homo sapien
gaaaaagaatagactaagatgaaatgctaacct

SEQ ID NO: 939548 - DNA, 33 bp, Homo sapien
gaaaaagaatagactaggatgaaatgctaacct

SEQ ID NO: 939549 - DNA, 33 bp, Homo sapien
tggaatttgagtggaccctcatacacatggaac

SEQ ID NO: 939550 - DNA, 33 bp, Homo sapien
tggaatttgagtggacgctcatacacatggaac

SEQ ID NO: 939551 - DNA, 33 bp, Homo sapien
tccactcaaattccagaccaggaacaagaagac

SEQ ID NO: 939552 - DNA, 33 bp, Homo sapien
tccactcaaattccaggccaggaacaagaagac

SEQ ID NO: 939553 - DNA, 33 bp, Homo sapien
ggcttagcaaaaggacccaaaataatccagtac

SEQ ID NO: 939554 - DNA, 33 bp, Homo sapien
ggcttagcaaaaggacgcaaaataatccagtac

SEQ ID NO: 939555 - DNA, 33 bp, Homo sapien
tcatgatgagattatacctgatctgacgtgaga

SEQ ID NO: 939556 - DNA, 33 bp, Homo sapien
tcatgatgagattatagctgatctgacgtgaga

SEQ ID NO: 939557 - DNA, 33 bp, Homo sapien
gtttatgtgggtgtcaatataactaccagtaac

SEQ ID NO: 939558 - DNA, 33 bp, Homo sapien
gtttatgtgggtgtcagtataactaccagtaac

SEQ ID NO: 939559 - DNA, 33 bp, Homo sapien
tatttgtgtatacccaacagctgaagtatagtc

SEQ ID NO: 939560 - DNA, 33 bp, Homo sapien
tatttgtgtatacccaccagctgaagtatagtc

SEQ ID NO: 939561 - DNA, 33 bp, Homo sapien
aaatgacttcaatggaacctccagaactgtcca

SEQ ID NO: 939562 - DNA, 33 bp, Homo sapien
aaatgacttcaatggagcctccagaactgtcca

SEQ ID NO: 939563 - DNA, 33 bp, Homo sapien
tggatgaaataaaagaacataccagatttgtga

SEQ ID NO: 939564 - DNA, 33 bp, Homo sapien
tggatgaaataaaagagcataccagatttgtga

SEQ ID NO: 939565 - DNA, 33 bp, Homo sapien
gctctcttctaatccacgattgcaataaagcac

SEQ ID NO: 939566 - DNA, 33 bp, Homo sapien
gctctcttctaatccatgattgcaataaagcac

SEQ ID NO: 939567 - DNA, 33 bp, Homo sapien
ccctcaaatggtggaactgttttcttactctat

SEQ ID NO: 939568 - DNA, 33 bp, Homo sapien
ccctcaaatggtggaattgttttcttactctat

SEQ ID NO: 939569 - DNA, 33 bp, Homo sapien
tgactaaactctaaaaaaattctaagccctaag

SEQ ID NO: 939570 - DNA, 33 bp, Homo sapien
tgactaaactctaaaacaattctaagccctaag

SEQ ID NO: 939571 - DNA, 33 bp, Homo sapien
ataagcattgaaaatcccactttctgtacctct

SEQ ID NO: 939572 - DNA, 33 bp, Homo sapien
ataagcattgaaaatctcactttctgtacctct

SEQ ID NO: 939573 - DNA, 33 bp, Homo sapien
gtttttaaagtttggactattatggaccattgg

SEQ ID NO: 939574 - DNA, 33 bp, Homo sapien
gtttttaaagtttggattattatggaccattgg

SEQ ID NO: 939575 - DNA, 33 bp, Homo sapien
cttggtcttcgtacttcaacacagaaacagccc

SEQ ID NO: 939576 - DNA, 33 bp, Homo sapien
cttggtcttcgtactttaacacagaaacagccc

SEQ ID NO: 939577 - DNA, 33 bp, Homo sapien
tcgctaatccaccgggaattgcttgttaggtca

SEQ ID NO: 939578 - DNA, 33 bp, Homo sapien
tcgctaatccaccggggattgcttgttaggtca

SEQ ID NO: 939579 - DNA, 33 bp, Homo sapien
ctccaggtgaatcagcaagggagtgagtggaga

SEQ ID NO: 939580 - DNA, 33 bp, Homo sapien
ctccaggtgaatcagcgagggagtgagtggaga

SEQ ID NO: 939581 - DNA, 33 bp, Homo sapien
aaaccaatggggcaccgactctcttcccttcta

SEQ ID NO: 939582 - DNA, 33 bp, Homo sapien
aaaccaatggggcacctactctcttcccttcta

SEQ ID NO: 939583 - DNA, 33 bp, Homo sapien
agattggcttaaacaaatagagagattaagagg

SEQ ID NO: 939584 - DNA, 33 bp, Homo sapien
agattggcttaaacaactagagagattaagagg

SEQ ID NO: 939585 - DNA, 33 bp, Homo sapien
atttcatcagaaaacaccttcacagacacgtcc

SEQ ID NO: 939586 - DNA, 33 bp, Homo sapien
atttcatcagaaaacatcttcacagacacgtcc

SEQ ID NO: 939587 - DNA, 33 bp, Homo sapien
agctgatgatgtttaactggaaaatattattta

SEQ ID NO: 939588 - DNA, 33 bp, Homo sapien
agctgatgatgtttaattggaaaatattattta

SEQ ID NO: 939589 - DNA, 33 bp, Homo sapien
cttgctccaaaaatgcactgtagaaattgttgc

SEQ ID NO: 939590 - DNA, 33 bp, Homo sapien
cttgctccaaaaatgcgctgtagaaattgttgc

SEQ ID NO: 939591 - DNA, 33 bp, Homo sapien
ctccaaataccagtcacggaactagataccttg

SEQ ID NO: 939592 - DNA, 33 bp, Homo sapien
ctccaaataccagtcatggaactagataccttg

SEQ ID NO: 939593 - DNA, 33 bp, Homo sapien
gatgaacgttgcataaggccccttttacaaggg

SEQ ID NO: 939594 - DNA, 33 bp, Homo sapien
gatgaacgttgcataatgccccttttacaaggg

SEQ ID NO: 939595 - DNA, 33 bp, Homo sapien
aactcccactacttcaaaacaccagaggctgca

SEQ ID NO: 939596 - DNA, 33 bp, Homo sapien
aactcccactacttcagaacaccagaggctgca

SEQ ID NO: 939597 - DNA, 33 bp, Homo sapien
aggctgactgaatttgaaaatcaacaaagtaat

SEQ ID NO: 939598 - DNA, 33 bp, Homo sapien
aggctgactgaatttggaaatcaacaaagtaat

SEQ ID NO: 939599 - DNA, 33 bp, Homo sapien
ccattttgcctggacactggctgaggttccttt

SEQ ID NO: 939600 - DNA, 33 bp, Homo sapien
ccattttgcctggacattggctgaggttccttt

SEQ ID NO: 939601 - DNA, 33 bp, Homo sapien; identical to SEQ ID NO: 939599

SEQ ID NO: 939602 - DNA, 33 bp, Homo sapien; identical to SEQ ID NO: 939600

SEQ ID NO: 939603 - DNA, 33 bp, Homo sapien
tccctcagcacaaatcagatggttcttcctacc

SEQ ID NO: 939604 - DNA, 33 bp, Homo sapien
tccctcagcacaaatcggatggttcttcctacc

SEQ ID NO: 939605 - DNA, 33 bp, Homo sapien
agctccagcagagccaacattaaagccaccaat

SEQ ID NO: 939606 - DNA, 33 bp, Homo sapien
agctccagcagagccaccattaaagccaccaat

SEQ ID NO: 939607 - DNA, 33 bp, Homo sapien
gtagtctgtgtgaacactgatttctcctaaggt

SEQ ID NO: 939608 - DNA, 33 bp, Homo sapien
gtagtctgtgtgaacattgatttctcctaaggt

SEQ ID NO: 939609 - DNA, 33 bp, Homo sapien
gcaacaatatttggccccataatgacaaaagaa

SEQ ID NO: 939610 - DNA, 33 bp, Homo sapien
gcaacaatatttggcctcataatgacaaaagaa

SEQ ID NO: 939611 - DNA, 33 bp, Homo sapien
tgcttttccagccaaacgcctaagaggaacatt

SEQ ID NO: 939612 - DNA, 33 bp, Homo sapien
tgcttttccagccaaatgcctaagaggaacatt

SEQ ID NO: 939613 - DNA, 33 bp, Homo sapien
ttctgccttacatgaaacatcagtgaaaccaga

SEQ ID NO: 939614 - DNA, 33 bp, Homo sapien
ttctgccttacatgaagcatcagtgaaaccaga

SEQ ID NO: 939615 - DNA, 33 bp, Homo sapien
ttgaagccatttaagcacagaaatatgaaacca

SEQ ID NO: 939616 - DNA, 33 bp, Homo sapien
ttgaagccatttaagcgcagaaatatgaaacca

SEQ ID NO: 939617 - DNA, 33 bp, Homo sapien
cctcacccctgaaagacagattgaagtgtatct

SEQ ID NO: 939618 - DNA, 33 bp, Homo sapien
cctcacccctgaaagagagattgaagtgtatct

SEQ ID NO: 939619 - DNA, 33 bp, Homo sapien
ctccatccagactttcaataagcagaatgagat

SEQ ID NO: 939620 - DNA, 33 bp, Homo sapien
ctccatccagactttcgataagcagaatgagat

SEQ ID NO: 939621 - DNA, 33 bp, Homo sapien
gggtgttgtatgactaaggtgttattagagata

SEQ ID NO: 939622 - DNA, 33 bp, Homo sapien
gggtgttgtatgactagggtgttattagagata

SEQ ID NO: 939623 - DNA, 33 bp, Homo sapien
tcaaattgagaaatcaaacaagctctggaagat

SEQ ID NO: 939624 - DNA, 33 bp, Homo sapien
tcaaattgagaaatcatacaagctctggaagat

SEQ ID NO: 939625 - DNA, 33 bp, Homo sapien
ggcaatgatgtgtcaccgtagattaatcagttg

SEQ ID NO: 939626 - DNA, 33 bp, Homo sapien
ggcaatgatgtgtcactgtagattaatcagttg

SEQ ID NO: 939627 - DNA, 33 bp, Homo sapien
tgagggtgaggaacaacttagaatttctgctga

SEQ ID NO: 939628 - DNA, 33 bp, Homo sapien
tgagggtgaggaacaatttagaatttctgctga

SEQ ID NO: 939629 - DNA, 33 bp, Homo sapien
ttcactgtggttaggaagtgtttgatgtagact

SEQ ID NO: 939630 - DNA, 33 bp, Homo sapien
ttcactgtggttaggacgtgtttgatgtagact

SEQ ID NO: 939631 - DNA, 33 bp, Homo sapien
gcaggagagctggaggcatcctctagcaagcca

SEQ ID NO: 939632 - DNA, 33 bp, Homo sapien
gcaggagagctggaggtatcctctagcaagcca

SEQ ID NO: 939633 - DNA, 33 bp, Homo sapien
atgctcttactcccaacgcctgggtgcttcctg

SEQ ID NO: 939634 - DNA, 33 bp, Homo sapien
atgctcttactcccaatgcctgggtgcttcctg

SEQ ID NO: 939635 - DNA, 33 bp, Homo sapien
agtcctctggtgaggacgcatggtaaagagtgt

SEQ ID NO: 939636 - DNA, 33 bp, Homo sapien
agtcctctggtgaggatgcatggtaaagagtgt

SEQ ID NO: 939637 - DNA, 33 bp, Homo sapien
gaaagaggttgaggaccgtcaggatcaggccag

SEQ ID NO: 939638 - DNA, 33 bp, Homo sapien
gaaagaggttgaggactgtcaggatcaggccag

SEQ ID NO: 939639 - DNA, 33 bp, Homo sapien
aatcatgacttactataaactctagtctgtatc

SEQ ID NO: 939640 - DNA, 33 bp, Homo sapien
aatcatgacttactatcaactctagtctgtatc

SEQ ID NO: 939641 - DNA, 33 bp, Homo sapien
ttagaaattactggtacggtcttatgtttgata

SEQ ID NO: 939642 - DNA, 33 bp, Homo sapien
ttagaaattactggtatggtcttatgtttgata

SEQ ID NO: 939643 - DNA, 33 bp, Homo sapien
gatccatcacagctgccacctcggtctacttag

SEQ ID NO: 939644 - DNA, 33 bp, Homo sapien
gatccatcacagctgctacctcggtctacttag

SEQ ID NO: 939645 - DNA, 33 bp, Homo sapien
tctaaagaactcaccactggtaggtgtagattg

SEQ ID NO: 939646 - DNA, 33 bp, Homo sapien
tctaaagaactcaccattggtaggtgtagattg

SEQ ID NO: 939647 - DNA, 33 bp, Homo sapien
ctcccacttttaccccacgctttctcactctcc

SEQ ID NO: 939648 - DNA, 33 bp, Homo sapien
ctcccacttttaccccgcgctttctcactctcc

SEQ ID NO: 939649 - DNA, 33 bp, Homo sapien
agaagccctccatgtcaaagtctccagctcaga

SEQ ID NO: 939650 - DNA, 33 bp, Homo sapien
agaagccctccatgtcgaagtctccagctcaga

SEQ ID NO: 939651 - DNA, 33 bp, Homo sapien
ccattcactgcttgaaagtttagccccagatgg

SEQ ID NO: 939652 - DNA, 33 bp, Homo sapien
ccattcactgcttgaatgtttagccccagatgg

SEQ ID NO: 939653 - DNA, 33 bp, Homo sapien
attaccagcataggtaagaggactgtgaagacg

SEQ ID NO: 939654 - DNA, 33 bp, Homo sapien
attaccagcataggtaggaggactgtgaagacg

SEQ ID NO: 939655 - DNA, 33 bp, Homo sapien
gtgtctgtgtgtctgaagttgtaagaaatcagt

SEQ ID NO: 939656 - DNA, 33 bp, Homo sapien
gtgtctgtgtgtctgacgttgtaagaaatcagt

SEQ ID NO: 939657 - DNA, 33 bp, Homo sapien
atcacagaagggaagcaaatatggaataccagg

SEQ ID NO: 939658 - DNA, 33 bp, Homo sapien
atcacagaagggaagcgaatatggaataccagg

SEQ ID NO: 939659 - DNA, 33 bp, Homo sapien
ctggaaccttttatcacagaattacagttgccg

SEQ ID NO: 939660 - DNA, 33 bp, Homo sapien
ctggaaccttttatcagagaattacagttgccg

SEQ ID NO: 939661 - DNA, 33 bp, Homo sapien
gcatttgctcagatgacggtttggtcagaactg

SEQ ID NO: 939662 - DNA, 33 bp, Homo sapien
gcatttgctcagatgatggtttggtcagaactg

SEQ ID NO: 939663 - DNA, 33 bp, Homo sapien
gtttggctaagggttcacacctgtcctcttcta

SEQ ID NO: 939664 - DNA, 33 bp, Homo sapien
gtttggctaagggttcgcacctgtcctcttcta

SEQ ID NO: 939665 - DNA, 33 bp, Homo sapien
ctgtcacacgccctgcaaggggaatatgggaac

SEQ ID NO: 939666 - DNA, 33 bp, Homo sapien
ctgtcacacgccctgcgaggggaatatgggaac

SEQ ID NO: 939667 - DNA, 33 bp, Homo sapien
gtcttattggaacggaatcacaccacttgagca

SEQ ID NO: 939668 - DNA, 33 bp, Homo sapien
gtcttattggaacggagtcacaccacttgagca

SEQ ID NO: 939669 - DNA, 33 bp, Homo sapien
aaccgcagaaacccacaaggatgcccacaacca

SEQ ID NO: 939670 - DNA, 33 bp, Homo sapien
aaccgcagaaacccacgaggatgcccacaacca

SEQ ID NO: 939671 - DNA, 33 bp, Homo sapien
atgtgccacagagaataaaccaaactcactctg

SEQ ID NO: 939672 - DNA, 33 bp, Homo sapien
atgtgccacagagaatgaaccaaactcactctg

SEQ ID NO: 939673 - DNA, 33 bp, Homo sapien
aggtgctaagacgacaacttcatcatgcctgca

SEQ ID NO: 939674 - DNA, 33 bp, Homo sapien
aggtgctaagacgacagcttcatcatgcctgca

SEQ ID NO: 939675 - DNA, 33 bp, Homo sapien
aggagctcatctaggaagagagtacaggtaaca

SEQ ID NO: 939676 - DNA, 33 bp, Homo sapien
aggagctcatctaggaggagagtacaggtaaca

SEQ ID NO: 939677 - DNA, 33 bp, Homo sapien
gaccctgaaggctttaacattccaccctacaaa

SEQ ID NO: 939678 - DNA, 33 bp, Homo sapien
gaccctgaaggctttagcattccaccctacaaa

SEQ ID NO: 939679 - DNA, 33 bp, Homo sapien
gttccttttctataatcagaggttcctaatttg

SEQ ID NO: 939680 - DNA, 33 bp, Homo sapien
gttccttttctataatgagaggttcctaatttg

SEQ ID NO: 939681 - DNA, 33 bp, Homo sapien
taagaaagaaaaaagacaagccacagagtaagg

SEQ ID NO: 939682 - DNA, 33 bp, Homo sapien
taagaaagaaaaaagagaagccacagagtaagg

SEQ ID NO: 939683 - DNA, 33 bp, Homo sapien
gctttacattcacatgaagctgattagattgtg

SEQ ID NO: 939684 - DNA, 33 bp, Homo sapien
gctttacattcacatgcagctgattagattgtg

SEQ ID NO: 939685 - DNA, 33 bp, Homo sapien
atgtcacatggcgaataaaccaccacatgccca

SEQ ID NO: 939686 - DNA, 33 bp, Homo sapien
atgtcacatggcgaatgaaccaccacatgccca

SEQ ID NO: 939687 - DNA, 33 bp, Homo sapien
ccaatcaaaagtgtgtaaagtgatatcacaatg

SEQ ID NO: 939688 - DNA, 33 bp, Homo sapien
ccaatcaaaagtgtgtgaagtgatatcacaatg

SEQ ID NO: 939689 - DNA, 33 bp, Homo sapien
catggagatctggctacggaacagtgagttcta

SEQ ID NO: 939690 - DNA, 33 bp, Homo sapien
catggagatctggctatggaacagtgagttcta

SEQ ID NO: 939691 - DNA, 33 bp, Homo sapien
ctttcaaggaattactaacttctgagaaagtgt

SEQ ID NO: 939692 - DNA, 33 bp, Homo sapien
ctttcaaggaattactgacttctgagaaagtgt

SEQ ID NO: 939693 - DNA, 33 bp, Homo sapien
tggtgtctgaagtgaaagcattcttgtggggct

SEQ ID NO: 939694 - DNA, 33 bp, Homo sapien
tggtgtctgaagtgaaggcattcttgtggggct

SEQ ID NO: 939695 - DNA, 33 bp, Homo sapien
ctgggaagaggtgacaacatctagagctccatg

SEQ ID NO: 939696 - DNA, 33 bp, Homo sapien
ctgggaagaggtgacaccatctagagctccatg

SEQ ID NO: 939697 - DNA, 33 bp, Homo sapien
gtttttattggggctcaagcatctactgtccat

SEQ ID NO: 939698 - DNA, 33 bp, Homo sapien
gtttttattggggctccagcatctactgtccat

SEQ ID NO: 939699 - DNA, 33 bp, Homo sapien
attgtgaggtggggctcacaagcaggagaaact

SEQ ID NO: 939700 - DNA, 33 bp, Homo sapien
attgtgaggtggggcttacaagcaggagaaact

SEQ ID NO: 939701 - DNA, 33 bp, Homo sapien
atttctgaagattatcacctctttctaaagatc

SEQ ID NO: 939702 - DNA, 33 bp, Homo sapien
atttctgaagattatctcctctttctaaagatc

SEQ ID NO: 939703 - DNA, 33 bp, Homo sapien
cctcgcagaagtttccaacaccctgatcccatg

SEQ ID NO: 939704 - DNA, 33 bp, Homo sapien
cctcgcagaagtttccgacaccctgatcccatg

SEQ ID NO: 939705 - DNA, 33 bp, Homo sapien
ctaagcaaatctctgacgtgttcattccagatt

SEQ ID NO: 939706 - DNA, 33 bp, Homo sapien
ctaagcaaatctctgatgtgttcattccagatt

SEQ ID NO: 939707 - DNA, 33 bp, Homo sapien
gttgaaggagactaaccgcttcgccgtctgctt

SEQ ID NO: 939708 - DNA, 33 bp, Homo sapien
gttgaaggagactaactgcttcgccgtctgctt

SEQ ID NO: 939709 - DNA, 33 bp, Homo sapien
cgctggatatgaagccactgtgtaacacacaaa

SEQ ID NO: 939710 - DNA, 33 bp, Homo sapien
cgctggatatgaagccgctgtgtaacacacaaa

SEQ ID NO: 939711 - DNA, 33 bp, Homo sapien
ggggctgaaagctgcaactttgcaggatgtttg

SEQ ID NO: 939712 - DNA, 33 bp, Homo sapien
ggggctgaaagctgcatctttgcaggatgtttg

SEQ ID NO: 939713 - DNA, 33 bp, Homo sapien
taataaggaatcatacaatttctaggtcaaggc

SEQ ID NO: 939714 - DNA, 33 bp, Homo sapien
taataaggaatcatacgatttctaggtcaaggc

SEQ ID NO: 939715 - DNA, 33 bp, Homo sapien
agaatttcagggaaacaacaatagtgaaaacat

SEQ ID NO: 939716 - DNA, 33 bp, Homo sapien
agaatttcagggaaactacaatagtgaaaacat

SEQ ID NO: 939717 - DNA, 33 bp, Homo sapien
tatttatattctcaacgctaacatttaatgttt

SEQ ID NO: 939718 - DNA, 33 bp, Homo sapien
tatttatattctcaactctaacatttaatgttt

SEQ ID NO: 939719 - DNA, 33 bp, Homo sapien
ttgttaaatcgttccaacctgtacaacttttct

SEQ ID NO: 939720 - DNA, 33 bp, Homo sapien
ttgttaaatcgttccagcctgtacaacttttct

SEQ ID NO: 939721 - DNA, 33 bp, Homo sapien
gtgagaaatctttcacaagacagtagcaagggg

SEQ ID NO: 939722 - DNA, 33 bp, Homo sapien
gtgagaaatctttcacgagacagtagcaagggg

SEQ ID NO: 939723 - DNA, 33 bp, Homo sapien
tatccagcataggatccgacccggcaggacctc

SEQ ID NO: 939724 - DNA, 33 bp, Homo sapien
tatccagcataggatctgacccggcaggacctc

SEQ ID NO: 939725 - DNA, 33 bp, Homo sapien
gcctcctgatggggaaaacaagaataagtaatc

SEQ ID NO: 939726 - DNA, 33 bp, Homo sapien
gcctcctgatggggaagacaagaataagtaatc

SEQ ID NO: 939727 - DNA, 33 bp, Homo sapien
ctgtggcctcacttaaccttcatcccctcccta

SEQ ID NO: 939728 - DNA, 33 bp, Homo sapien
ctgtggcctcacttaagcttcatcccctcccta

SEQ ID NO: 939729 - DNA, 33 bp, Homo sapien
atgctgaggcctaacccggtgtgactgcacatg

SEQ ID NO: 939730 - DNA, 33 bp, Homo sapien
atgctgaggcctaacctggtgtgactgcacatg

SEQ ID NO: 939731 - DNA, 33 bp, Homo sapien
ggcagagccagaactcaaactaaggcagtttct

SEQ ID NO: 939732 - DNA, 33 bp, Homo sapien
ggcagagccagaactccaactaaggcagtttct

SEQ ID NO: 939733 - DNA, 33 bp, Homo sapien
gacgtctgatgatgcgaacaccgctggaaccct

SEQ ID NO: 939734 - DNA, 33 bp, Homo sapien
gacgtctgatgatgcgcacaccgctggaaccct

SEQ ID NO: 939735 - DNA, 33 bp, Homo sapien
gtgactgtttttatgacgatcaatgactctgac

SEQ ID NO: 939736 - DNA, 33 bp, Homo sapien
gtgactgtttttatgatgatcaatgactctgac

SEQ ID NO: 939737 - DNA, 33 bp, Homo sapien
atgaagctttggaatcaccagtacatgggcatg

SEQ ID NO: 939738 - DNA, 33 bp, Homo sapien
atgaagctttggaatcgccagtacatgggcatg

SEQ ID NO: 939739 - DNA, 33 bp, Homo sapien
caacgctgctcctccaatgacacagaggaacgt

SEQ ID NO: 939740 - DNA, 33 bp, Homo sapien
caacgctgctcctccagtgacacagaggaacgt

SEQ ID NO: 939741 - DNA, 33 bp, Homo sapien
aggccaagtctacttccatcccatgtcctgaac

SEQ ID NO: 939742 - DNA, 33 bp, Homo sapien
aggccaagtctacttcgatcccatgtcctgaac

SEQ ID NO: 939743 - DNA, 33 bp, Homo sapien
tgggtcaagaagaacacgagatctttagcaagt

SEQ ID NO: 939744 - DNA, 33 bp, Homo sapien
tgggtcaagaagaacatgagatctttagcaagt

SEQ ID NO: 939745 - DNA, 33 bp, Homo sapien
ctcagaaaccagagataagcagtgagttcctga

SEQ ID NO: 939746 - DNA, 33 bp, Homo sapien
ctcagaaaccagagatgagcagtgagttcctga

SEQ ID NO: 939747 - DNA, 33 bp, Homo sapien
gaaactaggccaggacaacaaatctgaccagag

SEQ ID NO: 939748 - DNA, 33 bp, Homo sapien
gaaactaggccaggacgacaaatctgaccagag

SEQ ID NO: 939749 - DNA, 33 bp, Homo sapien
cagcgcagcatccctgaaggaacgggaaaacaa

SEQ ID NO: 939750 - DNA, 33 bp, Homo sapien
cagcgcagcatccctgcaggaacgggaaaacaa

SEQ ID NO: 939751 - DNA, 33 bp, Homo sapien
gaacaggctggggacacgggtcactaggtgatt

SEQ ID NO: 939752 - DNA, 33 bp, Homo sapien
gaacaggctggggacatgggtcactaggtgatt

SEQ ID NO: 939753 - DNA, 33 bp, Homo sapien
aaaggtttcatcctgacattctacaatcaaact

SEQ ID NO: 939754 - DNA, 33 bp, Homo sapien
aaaggtttcatcctgatattctacaatcaaact

SEQ ID NO: 939755 - DNA, 33 bp, Homo sapien
ctagttttattgatcacggtactgcgcaagact

SEQ ID NO: 939756 - DNA, 33 bp, Homo sapien
ctagttttattgatcatggtactgcgcaagact

SEQ ID NO: 939757 - DNA, 33 bp, Homo sapien
ccttacgagatcctgcagaataacaaggacaac

SEQ ID NO: 939758 - DNA, 33 bp, Homo sapien
ccttacgagatcctgcggaataacaaggacaac

SEQ ID NO: 939759 - DNA, 33 bp, Homo sapien
gactgatcgacttttcacttcttaggcccctgg

SEQ ID NO: 939760 - DNA, 33 bp, Homo sapien
gactgatcgacttttcgcttcttaggcccctgg

SEQ ID NO: 939761 - DNA, 33 bp, Homo sapien
acacagcaaggatagcagatcaagacccagcct

SEQ ID NO: 939762 - DNA, 33 bp, Homo sapien
acacagcaaggatagcggatcaagacccagcct

SEQ ID NO: 939763 - DNA, 33 bp, Homo sapien
gtcctggtacccacaacatcaatcccggctgaa

SEQ ID NO: 939764 - DNA, 33 bp, Homo sapien
gtcctggtacccacaagatcaatcccggctgaa

SEQ ID NO: 939765 - DNA, 33 bp, Homo sapien
tgctatttttcacagccaatctttaatcacatt

SEQ ID NO: 939766 - DNA, 33 bp, Homo sapien
tgctatttttcacagctaatctttaatcacatt

SEQ ID NO: 939767 - DNA, 33 bp, Homo sapien
ttctggagacaacacagaaatctattaatatta

SEQ ID NO: 939768 - DNA, 33 bp, Homo sapien
ttctggagacaacacataaatctattaatatta

SEQ ID NO: 939769 - DNA, 33 bp, Homo sapien
cactccaccttgcataagtgcttgaggatcaca

SEQ ID NO: 939770 - DNA, 33 bp, Homo sapien
cactccaccttgcataggtgcttgaggatcaca

SEQ ID NO: 939771 - DNA, 33 bp, Homo sapien; identical to SEQ ID NO: 939769

SEQ ID NO: 939772 - DNA, 33 bp, Homo sapien; identical to SEQ ID NO: 939770

SEQ ID NO: 939773 - DNA, 33 bp, Homo sapien
ggattgaacctttatcagaagggaggtttctgc

SEQ ID NO: 939774 - DNA, 33 bp, Homo sapien
ggattgaacctttatctgaagggaggtttctgc

SEQ ID NO: 939775 - DNA, 33 bp, Homo sapien
ctcccagctcccctgcaccgtcttcatggctct

SEQ ID NO: 939776 - DNA, 33 bp, Homo sapien
ctcccagctcccctgcgccgtcttcatggctct

SEQ ID NO: 939777 - DNA, 33 bp, Homo sapien
agttaataacaggtaaaatcgctgcctaccctc

SEQ ID NO: 939778 - DNA, 33 bp, Homo sapien
agttaataacaggtaagatcgctgcctaccctc

SEQ ID NO: 939779 - DNA, 33 bp, Homo sapien
aaaatgacattcctaaaccctgccctgccacct

SEQ ID NO: 939780 - DNA, 33 bp, Homo sapien
aaaatgacattcctaatccctgccctgccacct

SEQ ID NO: 939781 - DNA, 33 bp, Homo sapien
cctatgattagatccacgctcaagttcatgtga

SEQ ID NO: 939782 - DNA, 33 bp, Homo sapien
cctatgattagatccatgctcaagttcatgtga

SEQ ID NO: 939783 - DNA, 33 bp, Homo sapien
ttcttggtaaataccacaaaaaggcactttggg

SEQ ID NO: 939784 - DNA, 33 bp, Homo sapien
ttcttggtaaataccagaaaaaggcactttggg

SEQ ID NO: 939785 - DNA, 33 bp, Homo sapien
tttaattgcagcttcacgaaaaaataatccctg

SEQ ID NO: 939786 - DNA, 33 bp, Homo sapien
tttaattgcagcttcatgaaaaaataatccctg

SEQ ID NO: 939787 - DNA, 33 bp, Homo sapien
atcacttcatgtttaaccatattttacagataa

SEQ ID NO: 939788 - DNA, 33 bp, Homo sapien
atcacttcatgtttaatcatattttacagataa

SEQ ID NO: 939789 - DNA, 33 bp, Homo sapien
aagcaacacacgattagaggtttaattgttttc

SEQ ID NO: 939790 - DNA, 33 bp, Homo sapien
aagcaacacacgattataggtttaattgttttc

SEQ ID NO: 939791 - DNA, 33 bp, Homo sapien
gttgcccagatgcttaactcgttgttgaatgtg

SEQ ID NO: 939792 - DNA, 33 bp, Homo sapien
gttgcccagatgcttagctcgttgttgaatgtg

SEQ ID NO: 939793 - DNA, 33 bp, Homo sapien
atcggtggccgtcaccactgtattgctactcac

SEQ ID NO: 939794 - DNA, 33 bp, Homo sapien
atcggtggccgtcaccgctgtattgctactcac

SEQ ID NO: 939795 - DNA, 33 bp, Homo sapien
ctactccaggctggatgaaaaacccactttcat

SEQ ID NO: 939796 - DNA, 33 bp, Homo sapien
ctactccaggctggattaaaaacccactttcat

SEQ ID NO: 939797 - DNA, 33 bp, Homo sapien
ggcaggttatgtgcataatagaaggaagagcgg

SEQ ID NO: 939798 - DNA, 33 bp, Homo sapien
ggcaggttatgtgcatgatagaaggaagagcgg

SEQ ID NO: 939799 - DNA, 33 bp, Homo sapien
tggtcttctgggcatccacatgattgcatcatg

SEQ ID NO: 939800 - DNA, 33 bp, Homo sapien
tggtcttctgggcatctacatgattgcatcatg

SEQ ID NO: 939801 - DNA, 33 bp, Homo sapien
atcataagaaatacaagagcagtgctgtctctg

SEQ ID NO: 939802 - DNA, 33 bp, Homo sapien
atcataagaaatacaatagcagtgctgtctctg

SEQ ID NO: 939803 - DNA, 33 bp, Homo sapien
agaaatgcaagatttcactggtcaccacgctgc

SEQ ID NO: 939804 - DNA, 33 bp, Homo sapien
agaaatgcaagatttcgctggtcaccacgctgc

SEQ ID NO: 939805 - DNA, 33 bp, Homo sapien
cgcacagggttagagaccaggaccagtacagga

SEQ ID NO: 939806 - DNA, 33 bp, Homo sapien
cgcacagggttagagatcaggaccagtacagga

SEQ ID NO: 939807 - DNA, 33 bp, Homo sapien
acgcgctcattcattccatccatcgttcctgct

SEQ ID NO: 939808 - DNA, 33 bp, Homo sapien
acgcgctcattcattctatccatcgttcctgct

SEQ ID NO: 939809 - DNA, 33 bp, Homo sapien
caagaccccatgagccacttcatgagctccagg

SEQ ID NO: 939810 - DNA, 33 bp, Homo sapien
caagaccccatgagccgcttcatgagctccagg

SEQ ID NO: 939811 - DNA, 33 bp, Homo sapien
agctccaagtaagcaaagccctgaaagcatggg

SEQ ID NO: 939812 - DNA, 33 bp, Homo sapien
agctccaagtaagcaacgccctgaaagcatggg

SEQ ID NO: 939813 - DNA, 33 bp, Homo sapien
cctcggcaatttgctcagaaatttgcactgtgg

SEQ ID NO: 939814 - DNA, 33 bp, Homo sapien
cctcggcaatttgctcggaaatttgcactgtgg

SEQ ID NO: 939815 - DNA, 33 bp, Homo sapien
tgcttcatcaatttaactccccaaaccttgcca

SEQ ID NO: 939816 - DNA, 33 bp, Homo sapien
tgcttcatcaatttaagtccccaaaccttgcca

SEQ ID NO: 939817 - DNA, 33 bp, Homo sapien
ctccagggattactctcaaaggcaggctcccag

SEQ ID NO: 939818 - DNA, 33 bp, Homo sapien
ctccagggattactctgaaaggcaggctcccag

SEQ ID NO: 939819 - DNA, 33 bp, Homo sapien
gcttggctctggcataaattttacccagataga

SEQ ID NO: 939820 - DNA, 33 bp, Homo sapien
gcttggctctggcatacattttacccagataga

SEQ ID NO: 939821 - DNA, 33 bp, Homo sapien
catggacgagactcataaacgcgaagaagaaga

SEQ ID NO: 939822 - DNA, 33 bp, Homo sapien
catggacgagactcatcaacgcgaagaagaaga

SEQ ID NO: 939823 - DNA, 33 bp, Homo sapien
cattttcccactgcaacactagagaaaggctca

SEQ ID NO: 939824 - DNA, 33 bp, Homo sapien
cattttcccactgcaatactagagaaaggctca

SEQ ID NO: 939825 - DNA, 33 bp, Homo sapien
tgggagtattattaacagtgccatcaatgacac

SEQ ID NO: 939826 - DNA, 33 bp, Homo sapien
tgggagtattattaacggtgccatcaatgacac

SEQ ID NO: 939827 - DNA, 33 bp, Homo sapien
ctccatcattctcgtcagaccgaactcctgctc

SEQ ID NO: 939828 - DNA, 33 bp, Homo sapien
ctccatcattctcgtcggaccgaactcctgctc

SEQ ID NO: 939829 - DNA, 33 bp, Homo sapien
cactggacccaactgaagactagctaaaaggga

SEQ ID NO: 939830 - DNA, 33 bp, Homo sapien
cactggacccaactgaggactagctaaaaggga

SEQ ID NO: 939831 - DNA, 33 bp, Homo sapien
acaagacaagtgagccagataaggagaccgtgg

SEQ ID NO: 939832 - DNA, 33 bp, Homo sapien
acaagacaagtgagccggataaggagaccgtgg

SEQ ID NO: 939833 - DNA, 33 bp, Homo sapien
caagatgccactcgcacgaggctcctagaatca

SEQ ID NO: 939834 - DNA, 33 bp, Homo sapien
caagatgccactcgcatgaggctcctagaatca

SEQ ID NO: 939835 - DNA, 33 bp, Homo sapien
tgctccctaaagccgaatcatacaccgcacaaa

SEQ ID NO: 939836 - DNA, 33 bp, Homo sapien
tgctccctaaagccgattcatacaccgcacaaa

SEQ ID NO: 939837 - DNA, 33 bp, Homo sapien
tgtggggagttttgctcacatccaggagtttta

SEQ ID NO: 939838 - DNA, 33 bp, Homo sapien
tgtggggagttttgcttacatccaggagtttta

SEQ ID NO: 939839 - DNA, 33 bp, Homo sapien
tttccctgtttgatgccaaatgttaattgcttt

SEQ ID NO: 939840 - DNA, 33 bp, Homo sapien
tttccctgtttgatgctaaatgttaattgcttt

SEQ ID NO: 939841 - DNA, 33 bp, Homo sapien
acagtggacataaaaaagattctaccctgccac

SEQ ID NO: 939842 - DNA, 33 bp, Homo sapien
acagtggacataaaaaggattctaccctgccac

SEQ ID NO: 939843 - DNA, 33 bp, Homo sapien
ctaaaaaaatagagtcaatagctggctgtgctt

SEQ ID NO: 939844 - DNA, 33 bp, Homo sapien
ctaaaaaaatagagtcgatagctggctgtgctt

SEQ ID NO: 939845 - DNA, 33 bp, Homo sapien
actttaaatgtaggctaaacatttctagatact

SEQ ID NO: 939846 - DNA, 33 bp, Homo sapien
actttaaatgtaggctgaacatttctagatact

SEQ ID NO: 939847 - DNA, 33 bp, Homo sapien
tgtgccactcaaggtacggaacagagcactgta

SEQ ID NO: 939848 - DNA, 33 bp, Homo sapien
tgtgccactcaaggtatggaacagagcactgta

SEQ ID NO: 939849 - DNA, 33 bp, Homo sapien
acactctccctgaatgaaaacgtgtgccacttc

SEQ ID NO: 939850 - DNA, 33 bp, Homo sapien
acactctccctgaatgcaaacgtgtgccacttc

SEQ ID NO: 939851 - DNA, 33 bp, Homo sapien
tgcaccttttggaaacagttccccatgttaaaa

SEQ ID NO: 939852 - DNA, 33 bp, Homo sapien
tgcaccttttggaaaccgttccccatgttaaaa

SEQ ID NO: 939853 - DNA, 33 bp, Homo sapien
ctttttttttgccaccaataacaggtcaggttt

SEQ ID NO: 939854 - DNA, 33 bp, Homo sapien
ctttttttttgccaccgataacaggtcaggttt

SEQ ID NO: 939855 - DNA, 33 bp, Homo sapien
agtactgggaggttagaaagcctacgggccgct

SEQ ID NO: 939856 - DNA, 33 bp, Homo sapien
agtactgggaggttagcaagcctacgggccgct

SEQ ID NO: 939857 - DNA, 33 bp, Homo sapien
tgtcagaatagtttaaatatcatacactgcctg

SEQ ID NO: 939858 - DNA, 33 bp, Homo sapien
tgtcagaatagtttaagtatcatacactgcctg

SEQ ID NO: 939859 - DNA, 33 bp, Homo sapien
actgtttggacttgacccagtgcacaggggctc

SEQ ID NO: 939860 - DNA, 33 bp, Homo sapien
actgtttggacttgacgcagtgcacaggggctc

SEQ ID NO: 939861 - DNA, 33 bp, Homo sapien
ttcagggagtgaaagacgacagggacacacagg

SEQ ID NO: 939862 - DNA, 33 bp, Homo sapien
ttcagggagtgaaagatgacagggacacacagg

SEQ ID NO: 939863 - DNA, 33 bp, Homo sapien
ttttaacttgctgggaaaccgccgcactgtttt

SEQ ID NO: 939864 - DNA, 33 bp, Homo sapien
ttttaacttgctgggacaccgccgcactgtttt

SEQ ID NO: 939865 - DNA, 33 bp, Homo sapien
agtacatgagcaatgcacttgtttgacacgttt

SEQ ID NO: 939866 - DNA, 33 bp, Homo sapien
agtacatgagcaatgcgcttgtttgacacgttt

SEQ ID NO: 939867 - DNA, 33 bp, Homo sapien
tctgaaacatcaataacggactgacgtggagca

SEQ ID NO: 939868 - DNA, 33 bp, Homo sapien
tctgaaacatcaataatggactgacgtggagca

SEQ ID NO: 939869 - DNA, 33 bp, Homo sapien
actcaggtccttccaccggccttgtgctccagc

SEQ ID NO: 939870 - DNA, 33 bp, Homo sapien
actcaggtccttccactggccttgtgctccagc

SEQ ID NO: 939871 - DNA, 33 bp, Homo sapien
tttcatcttcaggcagcaaaccatctttaaaat

SEQ ID NO: 939872 - DNA, 33 bp, Homo sapien
tttcatcttcaggcagtaaaccatctttaaaat

SEQ ID NO: 939873 - DNA, 33 bp, Homo sapien
ccacagccggtaatgaagctctgaagcgttgtg

SEQ ID NO: 939874 - DNA, 33 bp, Homo sapien
ccacagccggtaatgaggctctgaagcgttgtg

SEQ ID NO: 939875 - DNA, 33 bp, Homo sapien
gcgtgggtaatgacacacctcaaactcatctgc

SEQ ID NO: 939876 - DNA, 33 bp, Homo sapien
gcgtgggtaatgacacgcctcaaactcatctgc

SEQ ID NO: 939877 - DNA, 33 bp, Homo sapien
ttgccaagtctggtcaacttttcagtctgtacc

SEQ ID NO: 939878 - DNA, 33 bp, Homo sapien
ttgccaagtctggtcaccttttcagtctgtacc

SEQ ID NO: 939879 - DNA, 33 bp, Homo sapien
tgtttactttgctcctaaataaccacatagctt

SEQ ID NO: 939880 - DNA, 33 bp, Homo sapien
tgtttactttgctcctgaataaccacatagctt

SEQ ID NO: 939881 - DNA, 33 bp, Homo sapien
cttctggagcatgaccaaaaacagtatctcacc

SEQ ID NO: 939882 - DNA, 33 bp, Homo sapien
cttctggagcatgaccgaaaacagtatctcacc

SEQ ID NO: 939883 - DNA, 33 bp, Homo sapien
gcatccccaagcactaactttcaatagtgagac

SEQ ID NO: 939884 - DNA, 33 bp, Homo sapien
gcatccccaagcactacctttcaatagtgagac

SEQ ID NO: 939885 - DNA, 33 bp, Homo sapien
taatttaagacttaccaaagagtttcaaagata

SEQ ID NO: 939886 - DNA, 33 bp, Homo sapien
taatttaagacttaccgaagagtttcaaagata

SEQ ID NO: 939887 - DNA, 33 bp, Homo sapien
gattctttattctagtaacacaccatagggtta

SEQ ID NO: 939888 - DNA, 33 bp, Homo sapien
gattctttattctagtgacacaccatagggtta

SEQ ID NO: 939889 - DNA, 33 bp, Homo sapien
aagcatgtgttccagcccataccctgtgagagg

SEQ ID NO: 939890 - DNA, 33 bp, Homo sapien
aagcatgtgttccagctcataccctgtgagagg

SEQ ID NO: 939891 - DNA, 33 bp, Homo sapien
aaccatatatccttcaatagacacttgagttgc

SEQ ID NO: 939892 - DNA, 33 bp, Homo sapien
aaccatatatccttcagtagacacttgagttgc

SEQ ID NO: 939893 - DNA, 33 bp, Homo sapien
gacagtttctggttcacgcatttgtcttattct

SEQ ID NO: 939894 - DNA, 33 bp, Homo sapien
gacagtttctggttcatgcatttgtcttattct

SEQ ID NO: 939895 - DNA, 33 bp, Homo sapien
gatgaaggctgagaataactacatttttgtcaa

SEQ ID NO: 939896 - DNA, 33 bp, Homo sapien
gatgaaggctgagaatgactacatttttgtcaa

SEQ ID NO: 939897 - DNA, 33 bp, Homo sapien
ccaccagcaaacccaaaataaatggcctgtcaa

SEQ ID NO: 939898 - DNA, 33 bp, Homo sapien
ccaccagcaaacccaagataaatggcctgtcaa

SEQ ID NO: 939899 - DNA, 33 bp, Homo sapien
gtgttggttcagcaataacatcatattcttcca

SEQ ID NO: 939900 - DNA, 33 bp, Homo sapien
gtgttggttcagcaatgacatcatattcttcca

SEQ ID NO: 939901 - DNA, 33 bp, Homo sapien
tgacattgctcacagaaagacattgaactacta

SEQ ID NO: 939902 - DNA, 33 bp, Homo sapien
tgacattgctcacagagagacattgaactacta

SEQ ID NO: 939903 - DNA, 33 bp, Homo sapien
gccttctagttctagacgtttttaacttcagtt

SEQ ID NO: 939904 - DNA, 33 bp, Homo sapien
gccttctagttctagatgtttttaacttcagtt

SEQ ID NO: 939905 - DNA, 33 bp, Homo sapien
aataaggagactaggacaatgttatctgtatca

SEQ ID NO: 939906 - DNA, 33 bp, Homo sapien
aataaggagactaggagaatgttatctgtatca

SEQ ID NO: 939907 - DNA, 33 bp, Homo sapien
agacttgccattttcacatagttttggcatgtg

SEQ ID NO: 939908 - DNA, 33 bp, Homo sapien
agacttgccattttcagatagttttggcatgtg

SEQ ID NO: 939909 - DNA, 33 bp, Homo sapien
ttcacaagtattttaaatggtgcaaatatgttt

SEQ ID NO: 939910 - DNA, 33 bp, Homo sapien
ttcacaagtattttaagtggtgcaaatatgttt

SEQ ID NO: 939911 - DNA, 33 bp, Homo sapien
ttgtcttttaaaaaaaagtcagactgtcatttg

SEQ ID NO: 939912 - DNA, 33 bp, Homo sapien
ttgtcttttaaaaaaaggtcagactgtcatttg

SEQ ID NO: 939913 - DNA, 33 bp, Homo sapien
ctcaaatgtaatgcacccagaaatacctctcta

SEQ ID NO: 939914 - DNA, 33 bp, Homo sapien
ctcaaatgtaatgcactcagaaatacctctcta

SEQ ID NO: 939915 - DNA, 33 bp, Homo sapien
catacagtgcacaaggaccaaacagaagccaag

SEQ ID NO: 939916 - DNA, 33 bp, Homo sapien
catacagtgcacaagggccaaacagaagccaag

SEQ ID NO: 939917 - DNA, 33 bp, Homo sapien
caaaatgcaaaatcaccacagaaaacggcttct

SEQ ID NO: 939918 - DNA, 33 bp, Homo sapien
caaaatgcaaaatcactacagaaaacggcttct

SEQ ID NO: 939919 - DNA, 33 bp, Homo sapien
caacttttaagtatcactcttctttctcacaca

SEQ ID NO: 939920 - DNA, 33 bp, Homo sapien
caacttttaagtatcattcttctttctcacaca

SEQ ID NO: 939921 - DNA, 33 bp, Homo sapien
actatcatggaaggaactgatcgccagatgtgc

SEQ ID NO: 939922 - DNA, 33 bp, Homo sapien
actatcatggaaggaagtgatcgccagatgtgc

SEQ ID NO: 939923 - DNA, 33 bp, Homo sapien
ctgaggctacttaccaaccaggctgcgttttca

SEQ ID NO: 939924 - DNA, 33 bp, Homo sapien
ctgaggctacttaccatccaggctgcgttttca

SEQ ID NO: 939925 - DNA, 33 bp, Homo sapien
tctggtacaattctaaaatcaacataaataatg

SEQ ID NO: 939926 - DNA, 33 bp, Homo sapien
tctggtacaattctaacatcaacataaataatg

SEQ ID NO: 939927 - DNA, 33 bp, Homo sapien
agggagactgagtgtaaatggcttttgacacag

SEQ ID NO: 939928 - DNA, 33 bp, Homo sapien
agggagactgagtgtacatggcttttgacacag

SEQ ID NO: 939929 - DNA, 33 bp, Homo sapien
agaaaaatagggcatacagaatcctgattaatc

SEQ ID NO: 939930 - DNA, 33 bp, Homo sapien
agaaaaatagggcatatagaatcctgattaatc

SEQ ID NO: 939931 - DNA, 33 bp, Homo sapien
aggcccagcattgttggagttaatagaaacctg

SEQ ID NO: 939932 - DNA, 33 bp, Homo sapien
aggcccagcattgttgtagttaatagaaacctg

SEQ ID NO: 939933 - DNA, 33 bp, Homo sapien
gcaatgaaggcttgaacataagtaaaaggttgt

SEQ ID NO: 939934 - DNA, 33 bp, Homo sapien
gcaatgaaggcttgaatataagtaaaaggttgt

SEQ ID NO: 939935 - DNA, 33 bp, Homo sapien
taatttgcaggaacacagtagacactagagcat

SEQ ID NO: 939936 - DNA, 33 bp, Homo sapien
taatttgcaggaacacggtagacactagagcat

SEQ ID NO: 939937 - DNA, 33 bp, Homo sapien
aaaagacaagacagaaattagctggtttggcaa

SEQ ID NO: 939938 - DNA, 33 bp, Homo sapien
aaaagacaagacagaagttagctggtttggcaa

SEQ ID NO: 939939 - DNA, 33 bp, Homo sapien
cctatgtggtttatgaatagacagaaaaaaaaa

SEQ ID NO: 939940 - DNA, 33 bp, Homo sapien
cctatgtggtttatgagtagacagaaaaaaaaa

SEQ ID NO: 939941 - DNA, 33 bp, Homo sapien
ctaccttttatacctacgatttcatgtcacatt

SEQ ID NO: 939942 - DNA, 33 bp, Homo sapien
ctaccttttatacctaggatttcatgtcacatt

SEQ ID NO: 939943 - DNA, 33 bp, Homo sapien
cgtcatctcgtttccacagttgacgttttatat

SEQ ID NO: 939944 - DNA, 33 bp, Homo sapien
cgtcatctcgtttccatagttgacgttttatat

SEQ ID NO: 939945 - DNA, 33 bp, Homo sapien
gatgtaattccctccacgctaagcttatgaccc

SEQ ID NO: 939946 - DNA, 33 bp, Homo sapien
gatgtaattccctccatgctaagcttatgaccc

SEQ ID NO: 939947 - DNA, 33 bp, Homo sapien
aatagggatgtggtgaagacaactaacccatgc

SEQ ID NO: 939948 - DNA, 33 bp, Homo sapien
aatagggatgtggtgaggacaactaacccatgc

SEQ ID NO: 939949 - DNA, 33 bp, Homo sapien
cagtccctggacaaacagaggctatcagggaaa

SEQ ID NO: 939950 - DNA, 33 bp, Homo sapien
cagtccctggacaaacggaggctatcagggaaa

SEQ ID NO: 939951 - DNA, 33 bp, Homo sapien
ctcccttagcaagataccagcttcctgcaaagt

SEQ ID NO: 939952 - DNA, 33 bp, Homo sapien
ctcccttagcaagatatcagcttcctgcaaagt

SEQ ID NO: 939953 - DNA, 33 bp, Homo sapien
agacggatcctggaaaaggagctgatatctgtg

SEQ ID NO: 939954 - DNA, 33 bp, Homo sapien
agacggatcctggaaatggagctgatatctgtg

SEQ ID NO: 939955 - DNA, 33 bp, Homo sapien
actgacatgacaccgacatgccagtgactgaga

SEQ ID NO: 939956 - DNA, 33 bp, Homo sapien
actgacatgacaccgagatgccagtgactgaga

SEQ ID NO: 939957 - DNA, 33 bp, Homo sapien
gtgctttcaatgctcaaatgattacttgccaaa

SEQ ID NO: 939958 - DNA, 33 bp, Homo sapien
gtgctttcaatgctcacatgattacttgccaaa

SEQ ID NO: 939959 - DNA, 33 bp, Homo sapien
actttctcctggacagactaaccagctaacggg

SEQ ID NO: 939960 - DNA, 33 bp, Homo sapien
actttctcctggacaggctaaccagctaacggg

SEQ ID NO: 939961 - DNA, 33 bp, Homo sapien
acttgagtgtgtcagaaccgttttctctgccca

SEQ ID NO: 939962 - DNA, 33 bp, Homo sapien
acttgagtgtgtcagagccgttttctctgccca

SEQ ID NO: 939963 - DNA, 33 bp, Homo sapien
aagacagggtatcactgaagcctttggttagtg

SEQ ID NO: 939964 - DNA, 33 bp, Homo sapien
aagacagggtatcacttaagcctttggttagtg

SEQ ID NO: 939965 - DNA, 33 bp, Homo sapien
gacccgcatacttcaaatgcacattaagcctct

SEQ ID NO: 939966 - DNA, 33 bp, Homo sapien
gacccgcatacttcaagtgcacattaagcctct

SEQ ID NO: 939967 - DNA, 33 bp, Homo sapien
gaaagtgaaagacaaacaggaaaggaagcaaga

SEQ ID NO: 939968 - DNA, 33 bp, Homo sapien
gaaagtgaaagacaaataggaaaggaagcaaga

SEQ ID NO: 939969 - DNA, 33 bp, Homo sapien
aaagcgcgtcccttgcaccctccagcctatgtc

SEQ ID NO: 939970 - DNA, 33 bp, Homo sapien
aaagcgcgtcccttgcgccctccagcctatgtc

SEQ ID NO: 939971 - DNA, 33 bp, Homo sapien
acacgctgggctattccatgattagacttgtgt

SEQ ID NO: 939972 - DNA, 33 bp, Homo sapien
acacgctgggctattcgatgattagacttgtgt

SEQ ID NO: 939973 - DNA, 33 bp, Homo sapien
accaccattcagtgcccgctaattctgtgttca

SEQ ID NO: 939974 - DNA, 33 bp, Homo sapien
accaccattcagtgcctgctaattctgtgttca

SEQ ID NO: 939975 - DNA, 33 bp, Homo sapien
aaagaggtgcttgttcaaaaggccaccaactca

SEQ ID NO: 939976 - DNA, 33 bp, Homo sapien
aaagaggtgcttgttcgaaaggccaccaactca

SEQ ID NO: 939977 - DNA, 33 bp, Homo sapien
tgccctcactccttgaaaccgcctacattctgc

SEQ ID NO: 939978 - DNA, 33 bp, Homo sapien
tgccctcactccttgagaccgcctacattctgc

SEQ ID NO: 939979 - DNA, 33 bp, Homo sapien
ctttctgacaccgactaactcttctgcatcccc

SEQ ID NO: 939980 - DNA, 33 bp, Homo sapien
ctttctgacaccgactcactcttctgcatcccc

SEQ ID NO: 939981 - DNA, 33 bp, Homo sapien
taggcttaggtcaaacactcttctttctaagca

SEQ ID NO: 939982 - DNA, 33 bp, Homo sapien
taggcttaggtcaaacgctcttctttctaagca

SEQ ID NO: 939983 - DNA, 33 bp, Homo sapien
atttaattcctcacaacgaccgtgtaagcaagg

SEQ ID NO: 939984 - DNA, 33 bp, Homo sapien
atttaattcctcacaatgaccgtgtaagcaagg

SEQ ID NO: 939985 - DNA, 33 bp, Homo sapien
gtctaaccataaaggacctgggacgtgtggccc

SEQ ID NO: 939986 - DNA, 33 bp, Homo sapien
gtctaaccataaaggatctgggacgtgtggccc

SEQ ID NO: 939987 - DNA, 33 bp, Homo sapien
caggtaagatgcctcacgcgaacaatttcagtg

SEQ ID NO: 939988 - DNA, 33 bp, Homo sapien
caggtaagatgcctcatgcgaacaatttcagtg

SEQ ID NO: 939989 - DNA, 33 bp, Homo sapien
atcgcaagaactgcacggagaaggaaatccacc

SEQ ID NO: 939990 - DNA, 33 bp, Homo sapien
atcgcaagaactgcactgagaaggaaatccacc

SEQ ID NO: 939991 - DNA, 33 bp, Homo sapien
attaactcagtaacccaaggctctcacccattt

SEQ ID NO: 939992 - DNA, 33 bp, Homo sapien
attaactcagtaaccctaggctctcacccattt

SEQ ID NO: 939993 - DNA, 33 bp, Homo sapien
gcttgatggtgcaggaaacagtaaatgcatcag

SEQ ID NO: 939994 - DNA, 33 bp, Homo sapien
gcttgatggtgcaggacacagtaaatgcatcag

SEQ ID NO: 939995 - DNA, 33 bp, Homo sapien
acctgaggaccctctcactcaagcatggggaca

SEQ ID NO: 939996 - DNA, 33 bp, Homo sapien
acctgaggaccctctcgctcaagcatggggaca

SEQ ID NO: 939997 - DNA, 33 bp, Homo sapien
acagctgctccctgaaagacatgtgatgtgtgg

SEQ ID NO: 939998 - DNA, 33 bp, Homo sapien
acagctgctccctgaaggacatgtgatgtgtgg

SEQ ID NO: 939999 - DNA, 33 bp, Homo sapien
cacggatgtgatggatcaggacattcaggccac

SEQ ID NO: 940000 - DNA, 33 bp, Homo sapien
cacggatgtgatggatgaggacattcaggccac

SEQ ID NO: 940001 - DNA, 33 bp, Homo sapien
tttttgcatctcagcactacactcccattttcg

SEQ ID NO: 940002 - DNA, 33 bp, Homo sapien
tttttgcatctcagcattacactcccattttcg

SEQ ID NO: 940003 - DNA, 33 bp, Homo sapien
gttgaacatttgtaagaatcttcaggaataggt

SEQ ID NO: 940004 - DNA, 33 bp, Homo sapien
gttgaacatttgtaaggatcttcaggaataggt

SEQ ID NO: 940005 - DNA, 33 bp, Homo sapien
actgagcagcccttgaagcctgcagacagtctc

SEQ ID NO: 940006 - DNA, 33 bp, Homo sapien
actgagcagcccttgatgcctgcagacagtctc

SEQ ID NO: 940007 - DNA, 33 bp, Homo sapien
ccttaccatcagggttaaaattccacaagcctc

SEQ ID NO: 940008 - DNA, 33 bp, Homo sapien
ccttaccatcagggttgaaattccacaagcctc

SEQ ID NO: 940009 - DNA, 33 bp, Homo sapien
aggtgctcttttcaaactttctgtgctccacag

SEQ ID NO: 940010 - DNA, 33 bp, Homo sapien
aggtgctcttttcaaattttctgtgctccacag

SEQ ID NO: 940011 - DNA, 33 bp, Homo sapien
acactggtgtaaggtgaatccaaagagttgtaa

SEQ ID NO: 940012 - DNA, 33 bp, Homo sapien
acactggtgtaaggtgcatccaaagagttgtaa

SEQ ID NO: 940013 - DNA, 33 bp, Homo sapien
cctctgtcgcttgctgccactgcctgggtcaac

SEQ ID NO: 940014 - DNA, 33 bp, Homo sapien
cctctgtcgcttgctgtcactgcctgggtcaac

SEQ ID NO: 940015 - DNA, 33 bp, Homo sapien
aatacatacacatggtaaacaggtataggaaaa

SEQ ID NO: 940016 - DNA, 33 bp, Homo sapien
aatacatacacatggtcaacaggtataggaaaa

SEQ ID NO: 940017 - DNA, 33 bp, Homo sapien
taaacaaaacaatcaaaaaagtgaagatgaaga

SEQ ID NO: 940018 - DNA, 33 bp, Homo sapien
taaacaaaacaatcaacaaagtgaagatgaaga

SEQ ID NO: 940019 - DNA, 33 bp, Homo sapien
cagtgaaaaaggtacacgacatctaggtgttat

SEQ ID NO: 940020 - DNA, 33 bp, Homo sapien
cagtgaaaaaggtacatgacatctaggtgttat

SEQ ID NO: 940021 - DNA, 33 bp, Homo sapien
atgagcatgagccatcaactttatttacagaga

SEQ ID NO: 940022 - DNA, 33 bp, Homo sapien
atgagcatgagccatcgactttatttacagaga

SEQ ID NO: 940023 - DNA, 33 bp, Homo sapien
cactcaaggttctcacactgttttctcaagtaa

SEQ ID NO: 940024 - DNA, 33 bp, Homo sapien
cactcaaggttctcacgctgttttctcaagtaa

SEQ ID NO: 940025 - DNA, 33 bp, Homo sapien
ccggcccgacgggtacacgagaagtcggtgctg

SEQ ID NO: 940026 - DNA, 33 bp, Homo sapien
ccggcccgacgggtacgcgagaagtcggtgctg

SEQ ID NO: 940027 - DNA, 33 bp, Homo sapien
ggcagcaaaacttacaatagaattcccagctcc

SEQ ID NO: 940028 - DNA, 33 bp, Homo sapien
ggcagcaaaacttacagtagaattcccagctcc

SEQ ID NO: 940029 - DNA, 33 bp, Homo sapien
gaaaggcttcacatgacaacggtccggtcaggt

SEQ ID NO: 940030 - DNA, 33 bp, Homo sapien
gaaaggcttcacatgagaacggtccggtcaggt

SEQ ID NO: 940031 - DNA, 33 bp, Homo sapien
ctaagtgataagttggcaggtgcagcaagccac

SEQ ID NO: 940032 - DNA, 33 bp, Homo sapien
ctaagtgataagttggtaggtgcagcaagccac

SEQ ID NO: 940033 - DNA, 33 bp, Homo sapien
gggaagtttccattccaccgtcttggctgtgga

SEQ ID NO: 940034 - DNA, 33 bp, Homo sapien
gggaagtttccattccgccgtcttggctgtgga

SEQ ID NO: 940035 - DNA, 33 bp, Homo sapien
acctgagaactttgccaacagggatctgcacag

SEQ ID NO: 940036 - DNA, 33 bp, Homo sapien
acctgagaactttgccgacagggatctgcacag

SEQ ID NO: 940037 - DNA, 33 bp, Homo sapien
ctataaaaaaccaataagtgagtgttccaaagc

SEQ ID NO: 940038 - DNA, 33 bp, Homo sapien
ctataaaaaaccaataggtgagtgttccaaagc

SEQ ID NO: 940039 - DNA, 33 bp, Homo sapien
ggtgggctgtgagcccaatgcagctgaatgtcg

SEQ ID NO: 940040 - DNA, 33 bp, Homo sapien
ggtgggctgtgagcccgatgcagctgaatgtcg

SEQ ID NO: 940041 - DNA, 33 bp, Homo sapien
tgacggggagttgtgaagaagcttggctcatgt

SEQ ID NO: 940042 - DNA, 33 bp, Homo sapien
tgacggggagttgtgaggaagcttggctcatgt

SEQ ID NO: 940043 - DNA, 33 bp, Homo sapien
tgcttcgttctggccacgctggattggtgccca

SEQ ID NO: 940044 - DNA, 33 bp, Homo sapien
tgcttcgttctggccatgctggattggtgccca

SEQ ID NO: 940045 - DNA, 33 bp, Homo sapien
acaggaaattcaaagtaaaaacacagcttcttt

SEQ ID NO: 940046 - DNA, 33 bp, Homo sapien
acaggaaattcaaagtgaaaacacagcttcttt

SEQ ID NO: 940047 - DNA, 33 bp, Homo sapien
accatcaggaaatctcaagaatgaaagaagaga

SEQ ID NO: 940048 - DNA, 33 bp, Homo sapien
accatcaggaaatctcgagaatgaaagaagaga

SEQ ID NO: 940049 - DNA, 33 bp, Homo sapien
tttgctctcttacggaactgtgagaattaaaac

SEQ ID NO: 940050 - DNA, 33 bp, Homo sapien
tttgctctcttacggagctgtgagaattaaaac

SEQ ID NO: 940051 - DNA, 33 bp, Homo sapien
tccaaactctgaagtgaacctctcccagccctg

SEQ ID NO: 940052 - DNA, 33 bp, Homo sapien
tccaaactctgaagtggacctctcccagccctg

SEQ ID NO: 940053 - DNA, 33 bp, Homo sapien
atggtctcctaaaacaaagaggcccaggctgga

SEQ ID NO: 940054 - DNA, 33 bp, Homo sapien
atggtctcctaaaacagagaggcccaggctgga

SEQ ID NO: 940055 - DNA, 33 bp, Homo sapien
ccagtggcaccacccgccataacaagcaaaaac

SEQ ID NO: 940056 - DNA, 33 bp, Homo sapien
ccagtggcaccacccgtcataacaagcaaaaac

SEQ ID NO: 940057 - DNA, 33 bp, Homo sapien
atttcaaccatgcaagaaccataatttatttaa

SEQ ID NO: 940058 - DNA, 33 bp, Homo sapien
atttcaaccatgcaagcaccataatttatttaa

SEQ ID NO: 940059 - DNA, 33 bp, Homo sapien
ggactgagatgctcaaaaataaataaatacata

SEQ ID NO: 940060 - DNA, 33 bp, Homo sapien
ggactgagatgctcaagaataaataaatacata

SEQ ID NO: 940061 - DNA, 33 bp, Homo sapien
ttatcatgcgtttttaggagatttgattgaatt

SEQ ID NO: 940062 - DNA, 33 bp, Homo sapien
ttatcatgcgtttttatgagatttgattgaatt

SEQ ID NO: 940063 - DNA, 33 bp, Homo sapien
atggattcatcgctgaacagtcaaggatgctga

SEQ ID NO: 940064 - DNA, 33 bp, Homo sapien
atggattcatcgctgagcagtcaaggatgctga

SEQ ID NO: 940065 - DNA, 33 bp, Homo sapien
atttcttttgataggtgaaagcatacccatgct

SEQ ID NO: 940066 - DNA, 33 bp, Homo sapien
atttcttttgataggttaaagcatacccatgct

SEQ ID NO: 940067 - DNA, 33 bp, Homo sapien
ttttttctgaataccaagtctcaacaatgggat

SEQ ID NO: 940068 - DNA, 33 bp, Homo sapien
ttttttctgaataccaggtctcaacaatgggat

SEQ ID NO: 940069 - DNA, 33 bp, Homo sapien
cggcagaggtcgtgaacgtggactccagggagg

SEQ ID NO: 940070 - DNA, 33 bp, Homo sapien
cggcagaggtcgtgaatgtggactccagggagg

SEQ ID NO: 940071 - DNA, 33 bp, Homo sapien
tggccgtgtcacctgaagatgaggtgaggggtg

SEQ ID NO: 940072 - DNA, 33 bp, Homo sapien
tggccgtgtcacctgaggatgaggtgaggggtg

SEQ ID NO: 940073 - DNA, 33 bp, Homo sapien
agaccatgtacggtaacaaccatagcaaagtgc

SEQ ID NO: 940074 - DNA, 33 bp, Homo sapien
agaccatgtacggtaataaccatagcaaagtgc

SEQ ID NO: 940075 - DNA, 33 bp, Homo sapien
tccaaactaccacaaagtcagaacattactttg

SEQ ID NO: 940076 - DNA, 33 bp, Homo sapien
tccaaactaccacaaattcagaacattactttg

SEQ ID NO: 940077 - DNA, 33 bp, Homo sapien
gatgtgccttcagtaccctccttttctgaggtg

SEQ ID NO: 940078 - DNA, 33 bp, Homo sapien
gatgtgccttcagtactctccttttctgaggtg

SEQ ID NO: 940079 - DNA, 33 bp, Homo sapien
tttatgtgtgacagccaacactggatgcaacta

SEQ ID NO: 940080 - DNA, 33 bp, Homo sapien
tttatgtgtgacagcccacactggatgcaacta

SEQ ID NO: 940081 - DNA, 33 bp, Homo sapien
acctgttgaactcgtgcaaggaattagatactc

SEQ ID NO: 940082 - DNA, 33 bp, Homo sapien
acctgttgaactcgtggaaggaattagatactc

SEQ ID NO: 940083 - DNA, 33 bp, Homo sapien
gccctggaggaagcacaaatcaggagaattcag

SEQ ID NO: 940084 - DNA, 33 bp, Homo sapien
gccctggaggaagcacgaatcaggagaattcag

SEQ ID NO: 940085 - DNA, 33 bp, Homo sapien
ggtgggcgcccaagacaatgtgcctggcgatat

SEQ ID NO: 940086 - DNA, 33 bp, Homo sapien
ggtgggcgcccaagacgatgtgcctggcgatat

SEQ ID NO: 940087 - DNA, 33 bp, Homo sapien
actgaagtcaactaaacatcacttccataaatg

SEQ ID NO: 940088 - DNA, 33 bp, Homo sapien
actgaagtcaactaaatatcacttccataaatg

SEQ ID NO: 940089 - DNA, 33 bp, Homo sapien
gaaaggagcagagaaccgggaaacaggataagc

SEQ ID NO: 940090 - DNA, 33 bp, Homo sapien
gaaaggagcagagaacggggaaacaggataagc

SEQ ID NO: 940091 - DNA, 33 bp, Homo sapien
gtctcctgcacacttgcataacatttgtggact

SEQ ID NO: 940092 - DNA, 33 bp, Homo sapien
gtctcctgcacacttggataacatttgtggact

SEQ ID NO: 940093 - DNA, 33 bp, Homo sapien
ctctttgctggtcaacacggaccaccttattcc

SEQ ID NO: 940094 - DNA, 33 bp, Homo sapien
ctctttgctggtcaacgcggaccaccttattcc

SEQ ID NO: 940095 - DNA, 33 bp, Homo sapien
agggtgtcctggtggaaactgtgaaggcattgc

SEQ ID NO: 940096 - DNA, 33 bp, Homo sapien
agggtgtcctggtggagactgtgaaggcattgc

SEQ ID NO: 940097 - DNA, 33 bp, Homo sapien
tttggtagtaagttgagattgagaggagttaaa

SEQ ID NO: 940098 - DNA, 33 bp, Homo sapien
tttggtagtaagttgatattgagaggagttaaa

SEQ ID NO: 940099 - DNA, 33 bp, Homo sapien
cagccagaccctatcaatctgtgtgcttcccag

SEQ ID NO: 940100 - DNA, 33 bp, Homo sapien
cagccagaccctatcactctgtgtgcttcccag

SEQ ID NO: 940101 - DNA, 33 bp, Homo sapien
atggttctgtaggcaacatgaccaccccgaact

SEQ ID NO: 940102 - DNA, 33 bp, Homo sapien
atggttctgtaggcaatatgaccaccccgaact

SEQ ID NO: 940103 - DNA, 33 bp, Homo sapien
ggattttgttttggagccaatgagatgatggag

SEQ ID NO: 940104 - DNA, 33 bp, Homo sapien
ggattttgttttggagtcaatgagatgatggag

SEQ ID NO: 940105 - DNA, 33 bp, Homo sapien
taatggttagaagcacagtgctcaggtgatgga

SEQ ID NO: 940106 - DNA, 33 bp, Homo sapien
taatggttagaagcacggtgctcaggtgatgga

SEQ ID NO: 940107 - DNA, 33 bp, Homo sapien
cactacatcttttcccaatggccaaccacacag

SEQ ID NO: 940108 - DNA, 33 bp, Homo sapien
cactacatcttttcccgatggccaaccacacag

SEQ ID NO: 940109 - DNA, 33 bp, Homo sapien
gcgtgaatgttgcgacagagattgaaagtgtct

SEQ ID NO: 940110 - DNA, 33 bp, Homo sapien
gcgtgaatgttgcgacggagattgaaagtgtct

SEQ ID NO: 940111 - DNA, 33 bp, Homo sapien
tgttgataactcgcgacgtaactcagcattgta

SEQ ID NO: 940112 - DNA, 33 bp, Homo sapien
tgttgataactcgcgatgtaactcagcattgta

SEQ ID NO: 940113 - DNA, 33 bp, Homo sapien
gggtgtggcagagaacacgccggagtcagagac

SEQ ID NO: 940114 - DNA, 33 bp, Homo sapien
gggtgtggcagagaacgcgccggagtcagagac

SEQ ID NO: 940115 - DNA, 33 bp, Homo sapien
ccacaggatcctctaaactcgaggtcctcaaat

SEQ ID NO: 940116 - DNA, 33 bp, Homo sapien
ccacaggatcctctaacctcgaggtcctcaaat

SEQ ID NO: 940117 - DNA, 33 bp, Homo sapien
cgcctgcaggtgaaataaatggtcctgattccc

SEQ ID NO: 940118 - DNA, 33 bp, Homo sapien
cgcctgcaggtgaaatgaatggtcctgattccc

SEQ ID NO: 940119 - DNA, 33 bp, Homo sapien
tttaaaaattagcacacaattacaatgatagca

SEQ ID NO: 940120 - DNA, 33 bp, Homo sapien
tttaaaaattagcacataattacaatgatagca

SEQ ID NO: 940121 - DNA, 33 bp, Homo sapien
agatgaagcaggtgaacgttaggcatagtctaa

SEQ ID NO: 940122 - DNA, 33 bp, Homo sapien
agatgaagcaggtgaatgttaggcatagtctaa

SEQ ID NO: 940123 - DNA, 33 bp, Homo sapien
aaaacaggaagaatgacgctgccactcagagct

SEQ ID NO: 940124 - DNA, 33 bp, Homo sapien
aaaacaggaagaatgatgctgccactcagagct

SEQ ID NO: 940125 - DNA, 33 bp, Homo sapien
agtccgcgttggattgaatgtctgaacaaagga

SEQ ID NO: 940126 - DNA, 33 bp, Homo sapien
agtccgcgttggattggatgtctgaacaaagga

SEQ ID NO: 940127 - DNA, 33 bp, Homo sapien
cagcagttgagatgacagagattaaaatgtcaa

SEQ ID NO: 940128 - DNA, 33 bp, Homo sapien
cagcagttgagatgacggagattaaaatgtcaa

SEQ ID NO: 940129 - DNA, 33 bp, Homo sapien
tcagtgtcagtgataacgctgggataaaacacc

SEQ ID NO: 940130 - DNA, 33 bp, Homo sapien
tcagtgtcagtgataatgctgggataaaacacc

SEQ ID NO: 940131 - DNA, 33 bp, Homo sapien
atcaaatatggatcaacgttacaaccaaacatc

SEQ ID NO: 940132 - DNA, 33 bp, Homo sapien
atcaaatatggatcaatgttacaaccaaacatc

SEQ ID NO: 940133 - DNA, 33 bp, Homo sapien
atgtttgaggattggcagcattagctccaccac

SEQ ID NO: 940134 - DNA, 33 bp, Homo sapien
atgtttgaggattggcggcattagctccaccac

SEQ ID NO: 940135 - DNA, 33 bp, Homo sapien
gtccttaattgtccccagcactcaggatttcat

SEQ ID NO: 940136 - DNA, 33 bp, Homo sapien
gtccttaattgtccccggcactcaggatttcat

SEQ ID NO: 940137 - DNA, 33 bp, Homo sapien
tagggccatctccctaaggttgaactgaaagtc

SEQ ID NO: 940138 - DNA, 33 bp, Homo sapien
tagggccatctccctacggttgaactgaaagtc

SEQ ID NO: 940139 - DNA, 33 bp, Homo sapien
agtgattgcaggtagaagaggtttctggataat

SEQ ID NO: 940140 - DNA, 33 bp, Homo sapien
agtgattgcaggtagatgaggtttctggataat

SEQ ID NO: 940141 - DNA, 33 bp, Homo sapien
gaggttctgctaagaccgctgtgaactttcaca

SEQ ID NO: 940142 - DNA, 33 bp, Homo sapien
gaggttctgctaagactgctgtgaactttcaca

SEQ ID NO: 940143 - DNA, 33 bp, Homo sapien
tctattcttaagcatacacccaggagaactgaa

SEQ ID NO: 940144 - DNA, 33 bp, Homo sapien
tctattcttaagcatatacccaggagaactgaa

SEQ ID NO: 940145 - DNA, 33 bp, Homo sapien
acacatccaaacctgaccatcatctcttttaaa

SEQ ID NO: 940146 - DNA, 33 bp, Homo sapien
acacatccaaacctgatcatcatctcttttaaa

SEQ ID NO: 940147 - DNA, 33 bp, Homo sapien
tcaggactggatgatccacgctggccacccagt

SEQ ID NO: 940148 - DNA, 33 bp, Homo sapien
tcaggactggatgatctacgctggccacccagt

SEQ ID NO: 940149 - DNA, 33 bp, Homo sapien
ctgagagtcctgagctgaagagttttggtgcat

SEQ ID NO: 940150 - DNA, 33 bp, Homo sapien
ctgagagtcctgagcttaagagttttggtgcat

SEQ ID NO: 940151 - DNA, 33 bp, Homo sapien
atctgcagggactatcaataccatattttcctt

SEQ ID NO: 940152 - DNA, 33 bp, Homo sapien
atctgcagggactatcgataccatattttcctt

SEQ ID NO: 940153 - DNA, 33 bp, Homo sapien
ttttcctctgctgtagcctaaaaatagattgct

SEQ ID NO: 940154 - DNA, 33 bp, Homo sapien
ttttcctctgctgtagtctaaaaatagattgct

SEQ ID NO: 940155 - DNA, 33 bp, Homo sapien
tttctcagtctttacaaagatccaaattatgca

SEQ ID NO: 940156 - DNA, 33 bp, Homo sapien
tttctcagtctttacagagatccaaattatgca

SEQ ID NO: 940157 - DNA, 33 bp, Homo sapien
gttgttaatcagatgaacttaaacttggacatt

SEQ ID NO: 940158 - DNA, 33 bp, Homo sapien
gttgttaatcagatgaccttaaacttggacatt

SEQ ID NO: 940159 - DNA, 33 bp, Homo sapien
cagagataaacatggccatttccaaataataaa

SEQ ID NO: 940160 - DNA, 33 bp, Homo sapien
cagagataaacatggctatttccaaataataaa

SEQ ID NO: 940161 - DNA, 33 bp, Homo sapien
aattgtgtataaaccccgcatgttgaactggaa

SEQ ID NO: 940162 - DNA, 33 bp, Homo sapien
aattgtgtataaaccctgcatgttgaactggaa

SEQ ID NO: 940163 - DNA, 33 bp, Homo sapien
cgtgccagactgttcaagaagagccaaggtcct

SEQ ID NO: 940164 - DNA, 33 bp, Homo sapien
cgtgccagactgttcaggaagagccaaggtcct

SEQ ID NO: 940165 - DNA, 33 bp, Homo sapien
catcataccattacaactgcctagcttcttctt

SEQ ID NO: 940166 - DNA, 33 bp, Homo sapien
catcataccattacaagtgcctagcttcttctt

SEQ ID NO: 940167 - DNA, 33 bp, Homo sapien
ctgactccaaattccaggttctttccaaatact

SEQ ID NO: 940168 - DNA, 33 bp, Homo sapien
ctgactccaaattccatgttctttccaaatact

SEQ ID NO: 940169 - DNA, 33 bp, Homo sapien
ataccaacagacaccactagataccaacaggtg

SEQ ID NO: 940170 - DNA, 33 bp, Homo sapien
ataccaacagacaccattagataccaacaggtg

SEQ ID NO: 940171 - DNA, 33 bp, Homo sapien
gggtggattgacgtctaaccacaggcgtggact

SEQ ID NO: 940172 - DNA, 33 bp, Homo sapien
gggtggattgacgtctcaccacaggcgtggact

SEQ ID NO: 940173 - DNA, 33 bp, Homo sapien
acaatgactaaaggaacgtgcaggaagcccact

SEQ ID NO: 940174 - DNA, 33 bp, Homo sapien
acaatgactaaaggaaggtgcaggaagcccact

SEQ ID NO: 940175 - DNA, 33 bp, Homo sapien
atttgtccttatatacaaaacacctgtctttgt

SEQ ID NO: 940176 - DNA, 33 bp, Homo sapien
atttgtccttatataccaaacacctgtctttgt

SEQ ID NO: 940177 - DNA, 33 bp, Homo sapien
caggctaaagccataacaactccaggaaagcag

SEQ ID NO: 940178 - DNA, 33 bp, Homo sapien
caggctaaagccataagaactccaggaaagcag

SEQ ID NO: 940179 - DNA, 33 bp, Homo sapien
ttagtgccacctcttcacaccgtgttgtcagta

SEQ ID NO: 940180 - DNA, 33 bp, Homo sapien
ttagtgccacctcttcgcaccgtgttgtcagta

SEQ ID NO: 940181 - DNA, 33 bp, Homo sapien
catggaacatggaccaacgcaaaatcctgccat

SEQ ID NO: 940182 - DNA, 33 bp, Homo sapien
catggaacatggaccagcgcaaaatcctgccat

SEQ ID NO: 940183 - DNA, 33 bp, Homo sapien
aagctaggagagacagcaataaaatcaatgatg

SEQ ID NO: 940184 - DNA, 33 bp, Homo sapien
aagctaggagagacaggaataaaatcaatgatg

SEQ ID NO: 940185 - DNA, 33 bp, Homo sapien
cgcatccggactgtgcaccacctcgtttcaaat

SEQ ID NO: 940186 - DNA, 33 bp, Homo sapien
cgcatccggactgtgcgccacctcgtttcaaat

SEQ ID NO: 940187 - DNA, 33 bp, Homo sapien
tctgtgcactgttcccacagaagctggatttgt

SEQ ID NO: 940188 - DNA, 33 bp, Homo sapien
tctgtgcactgttcccgcagaagctggatttgt

SEQ ID NO: 940189 - DNA, 33 bp, Homo sapien
agtgacaaaaccagccacggggatgtcaaaagg

SEQ ID NO: 940190 - DNA, 33 bp, Homo sapien
agtgacaaaaccagccgcggggatgtcaaaagg

SEQ ID NO: 940191 - DNA, 33 bp, Homo sapien
aaagtgcacctgctaaaccacgtgcagaggatc

SEQ ID NO: 940192 - DNA, 33 bp, Homo sapien
aaagtgcacctgctaagccacgtgcagaggatc

SEQ ID NO: 940193 - DNA, 33 bp, Homo sapien
caattacacacgcgaacgggcccctctcctgca

SEQ ID NO: 940194 - DNA, 33 bp, Homo sapien
caattacacacgcgaatgggcccctctcctgca

SEQ ID NO: 940195 - DNA, 33 bp, Homo sapien
ttgtttgtaaattccacgtcagagaacacggaa

SEQ ID NO: 940196 - DNA, 33 bp, Homo sapien
ttgtttgtaaattccatgtcagagaacacggaa

SEQ ID NO: 940197 - DNA, 33 bp, Homo sapien
actgatttaagtaacccggaaggtgagtctttt

SEQ ID NO: 940198 - DNA, 33 bp, Homo sapien
actgatttaagtaacctggaaggtgagtctttt

SEQ ID NO: 940199 - DNA, 33 bp, Homo sapien
gcacattttgtattacaccattaagtgatgttc

SEQ ID NO: 940200 - DNA, 33 bp, Homo sapien
gcacattttgtattactccattaagtgatgttc

SEQ ID NO: 940201 - DNA, 33 bp, Homo sapien
gtatgttcaacattacaggataatgccaaaata

SEQ ID NO: 940202 - DNA, 33 bp, Homo sapien
gtatgttcaacattacgggataatgccaaaata

SEQ ID NO: 940203 - DNA, 33 bp, Homo sapien
tttgtgcccagaataacaccatttccactaatt

SEQ ID NO: 940204 - DNA, 33 bp, Homo sapien
tttgtgcccagaataataccatttccactaatt

SEQ ID NO: 940205 - DNA, 33 bp, Homo sapien
cagagctaagcactggaaagagcaccgaggcca

SEQ ID NO: 940206 - DNA, 33 bp, Homo sapien
cagagctaagcactgggaagagcaccgaggcca

SEQ ID NO: 940207 - DNA, 33 bp, Homo sapien
aggcagttaagccacacggtgagagaggctgaa

SEQ ID NO: 940208 - DNA, 33 bp, Homo sapien
aggcagttaagccacatggtgagagaggctgaa

SEQ ID NO: 940209 - DNA, 33 bp, Homo sapien
ctaaggaaaggagcagacacaggggatcttgcc

SEQ ID NO: 940210 - DNA, 33 bp, Homo sapien
ctaaggaaaggagcagtcacaggggatcttgcc

SEQ ID NO: 940211 - DNA, 33 bp, Homo sapien
gtttcaccatttttaccaaaactacagcagaac

SEQ ID NO: 940212 - DNA, 33 bp, Homo sapien
gtttcaccatttttactaaaactacagcagaac

SEQ ID NO: 940213 - DNA, 33 bp, Homo sapien
atatttattacaaagcccaaaggtcatctctga

SEQ ID NO: 940214 - DNA, 33 bp, Homo sapien
atatttattacaaagctcaaaggtcatctctga

SEQ ID NO: 940215 - DNA, 33 bp, Homo sapien
gccataattctccattaaagccaggaaaaaagc

SEQ ID NO: 940216 - DNA, 33 bp, Homo sapien
gccataattctccatttaagccaggaaaaaagc

SEQ ID NO: 940217 - DNA, 33 bp, Homo sapien
gcagcttcatgtacgcaagaactttcctgcagc

SEQ ID NO: 940218 - DNA, 33 bp, Homo sapien
gcagcttcatgtacgcgagaactttcctgcagc

SEQ ID NO: 940219 - DNA, 33 bp, Homo sapien
ttccacagggaccaacagatgtgacggggtaga

SEQ ID NO: 940220 - DNA, 33 bp, Homo sapien
ttccacagggaccaacggatgtgacggggtaga

SEQ ID NO: 940221 - DNA, 33 bp, Homo sapien
gttagcaaaaagtagaaagtgttttaatatcaa

SEQ ID NO: 940222 - DNA, 33 bp, Homo sapien
gttagcaaaaagtagacagtgttttaatatcaa

SEQ ID NO: 940223 - DNA, 33 bp, Homo sapien
ccacggaggcacaggcacattgtgttgaggtgc

SEQ ID NO: 940224 - DNA, 33 bp, Homo sapien
ccacggaggcacaggcgcattgtgttgaggtgc

SEQ ID NO: 940225 - DNA, 33 bp, Homo sapien
aggcgcttaagtgcaacgtattattagcttcaa

SEQ ID NO: 940226 - DNA, 33 bp, Homo sapien
aggcgcttaagtgcaatgtattattagcttcaa

SEQ ID NO: 940227 - DNA, 33 bp, Homo sapien
tactatgcggtctcaccgaaacatctggagcac

SEQ ID NO: 940228 - DNA, 33 bp, Homo sapien
tactatgcggtctcactgaaacatctggagcac

SEQ ID NO: 940229 - DNA, 33 bp, Homo sapien
acagacagtgtttagcagagctggtaagaacaa

SEQ ID NO: 940230 - DNA, 33 bp, Homo sapien
acagacagtgtttagcggagctggtaagaacaa

SEQ ID NO: 940231 - DNA, 33 bp, Homo sapien
atgagtgattgagggaacgaagccatctcctgg

SEQ ID NO: 940232 - DNA, 33 bp, Homo sapien
atgagtgattgagggagcgaagccatctcctgg

SEQ ID NO: 940233 - DNA, 33 bp, Homo sapien
tcattccatcctcctcaccgctgcagagtcctc

SEQ ID NO: 940234 - DNA, 33 bp, Homo sapien
tcattccatcctcctcgccgctgcagagtcctc

SEQ ID NO: 940235 - DNA, 33 bp, Homo sapien
attaccctgcattagccgcaaggataaacagtg

SEQ ID NO: 940236 - DNA, 33 bp, Homo sapien
attaccctgcattagctgcaaggataaacagtg

SEQ ID NO: 940237 - DNA, 33 bp, Homo sapien
tcacttttgggtcatacggatattttaacaata

SEQ ID NO: 940238 - DNA, 33 bp, Homo sapien
tcacttttgggtcatatggatattttaacaata

SEQ ID NO: 940239 - DNA, 33 bp, Homo sapien
agtgggtcagagcccactgatggacttgacacc

SEQ ID NO: 940240 - DNA, 33 bp, Homo sapien
agtgggtcagagcccattgatggacttgacacc

SEQ ID NO: 940241 - DNA, 33 bp, Homo sapien
cacacttagtttgagaagacaaattctccaagt

SEQ ID NO: 940242 - DNA, 33 bp, Homo sapien
cacacttagtttgagatgacaaattctccaagt

SEQ ID NO: 940243 - DNA, 33 bp, Homo sapien
cacctgcagacacacacgctctctttttaaagc

SEQ ID NO: 940244 - DNA, 33 bp, Homo sapien
cacctgcagacacacatgctctctttttaaagc

SEQ ID NO: 940245 - DNA, 33 bp, Homo sapien
ctgctagttcccggccacagaaaggaggtccca

SEQ ID NO: 940246 - DNA, 33 bp, Homo sapien
ctgctagttcccggccgcagaaaggaggtccca

SEQ ID NO: 940247 - DNA, 33 bp, Homo sapien
aagggccagaagttgaacttaggagacaaagat

SEQ ID NO: 940248 - DNA, 33 bp, Homo sapien
aagggccagaagttgaccttaggagacaaagat

SEQ ID NO: 940249 - DNA, 33 bp, Homo sapien
caggatgtgagccagacgatggcctccagaact

SEQ ID NO: 940250 - DNA, 33 bp, Homo sapien
caggatgtgagccagatgatggcctccagaact

SEQ ID NO: 940251 - DNA, 33 bp, Homo sapien
tataacctcaggaaggaactcggtcttgactca

SEQ ID NO: 940252 - DNA, 33 bp, Homo sapien
tataacctcaggaaggcactcggtcttgactca

SEQ ID NO: 940253 - DNA, 33 bp, Homo sapien
gctgtaagacatgcaaccatcttagaccagtgc

SEQ ID NO: 940254 - DNA, 33 bp, Homo sapien
gctgtaagacatgcaatcatcttagaccagtgc

SEQ ID NO: 940255 - DNA, 33 bp, Homo sapien
gcgctctgccagaacaaagaatatctccatgta

SEQ ID NO: 940256 - DNA, 33 bp, Homo sapien
gcgctctgccagaacacagaatatctccatgta

SEQ ID NO: 940257 - DNA, 33 bp, Homo sapien
agactctttttccacgaaacatcttacaggcta

SEQ ID NO: 940258 - DNA, 33 bp, Homo sapien
agactctttttccacggaacatcttacaggcta

SEQ ID NO: 940259 - DNA, 33 bp, Homo sapien
gacacaggataaaataacaggaagaggtgttgc

SEQ ID NO: 940260 - DNA, 33 bp, Homo sapien
gacacaggataaaatatcaggaagaggtgttgc

SEQ ID NO: 940261 - DNA, 33 bp, Homo sapien
aatccctttggcagacagaaagtactattctaa

SEQ ID NO: 940262 - DNA, 33 bp, Homo sapien
aatccctttggcagacggaaagtactattctaa

SEQ ID NO: 940263 - DNA, 33 bp, Homo sapien
tctggcactagtaacacacagtgaacattacag

SEQ ID NO: 940264 - DNA, 33 bp, Homo sapien
tctggcactagtaacatacagtgaacattacag

SEQ ID NO: 940265 - DNA, 33 bp, Homo sapien
tgattaaatgaaccaaactgagtaactcccaaa

SEQ ID NO: 940266 - DNA, 33 bp, Homo sapien
tgattaaatgaaccaatctgagtaactcccaaa

SEQ ID NO: 940267 - DNA, 33 bp, Homo sapien
gaatgtgatgatgcataatccccattttatagt

SEQ ID NO: 940268 - DNA, 33 bp, Homo sapien
gaatgtgatgatgcatgatccccattttatagt

SEQ ID NO: 940269 - DNA, 33 bp, Homo sapien
tgaaaaatcaacctgacaaaataatgttttatt

SEQ ID NO: 940270 - DNA, 33 bp, Homo sapien
tgaaaaatcaacctgagaaaataatgttttatt

SEQ ID NO: 940271 - DNA, 33 bp, Homo sapien
tatgcttggataaaaaggccatcatactgagaa

SEQ ID NO: 940272 - DNA, 33 bp, Homo sapien
tatgcttggataaaaatgccatcatactgagaa

SEQ ID NO: 940273 - DNA, 33 bp, Homo sapien
gtgaagaaaatggtaacaagccatacttctcac

SEQ ID NO: 940274 - DNA, 33 bp, Homo sapien
gtgaagaaaatggtaataagccatacttctcac

SEQ ID NO: 940275 - DNA, 33 bp, Homo sapien
agttttgggctgatacaaatgaagcgttatgaa

SEQ ID NO: 940276 - DNA, 33 bp, Homo sapien
agttttgggctgatacgaatgaagcgttatgaa

SEQ ID NO: 940277 - DNA, 33 bp, Homo sapien
agtcttgccaatcccacggacaaacttatccta

SEQ ID NO: 940278 - DNA, 33 bp, Homo sapien
agtcttgccaatcccagggacaaacttatccta

SEQ ID NO: 940279 - DNA, 33 bp, Homo sapien
gaatcaatagtgaaagccagcatcaaagtatca

SEQ ID NO: 940280 - DNA, 33 bp, Homo sapien
gaatcaatagtgaaagtcagcatcaaagtatca

SEQ ID NO: 940281 - DNA, 33 bp, Homo sapien
gtccaaatgggcatgaataccagaaattggtga

SEQ ID NO: 940282 - DNA, 33 bp, Homo sapien
gtccaaatgggcatgagtaccagaaattggtga

SEQ ID NO: 940283 - DNA, 33 bp, Homo sapien
cctttatcatctcttcaattactccaaagccat

SEQ ID NO: 940284 - DNA, 33 bp, Homo sapien
cctttatcatctcttctattactccaaagccat

SEQ ID NO: 940285 - DNA, 33 bp, Homo sapien
tttcacaatagccctacgaaatgagtatgattt

SEQ ID NO: 940286 - DNA, 33 bp, Homo sapien
tttcacaatagccctatgaaatgagtatgattt

SEQ ID NO: 940287 - DNA, 33 bp, Homo sapien
acttaggttcatccatcagaaaggtaagacgtg

SEQ ID NO: 940288 - DNA, 33 bp, Homo sapien
acttaggttcatccattagaaaggtaagacgtg

SEQ ID NO: 940289 - DNA, 33 bp, Homo sapien
gccacgtatcaatggacggggcagggtaaagat

SEQ ID NO: 940290 - DNA, 33 bp, Homo sapien
gccacgtatcaatggatggggcagggtaaagat

SEQ ID NO: 940291 - DNA, 33 bp, Homo sapien
cactactgagcgtcgacccaaaggaaaagaaac

SEQ ID NO: 940292 - DNA, 33 bp, Homo sapien
cactactgagcgtcgatccaaaggaaaagaaac

SEQ ID NO: 940293 - DNA, 33 bp, Homo sapien
aagagaatgcaaagcccaaaggaatcctaaagg

SEQ ID NO: 940294 - DNA, 33 bp, Homo sapien
aagagaatgcaaagcctaaaggaatcctaaagg

SEQ ID NO: 940295 - DNA, 33 bp, Homo sapien
gggtgagtcttagccccgccttacactaaatta

SEQ ID NO: 940296 - DNA, 33 bp, Homo sapien
gggtgagtcttagccctgccttacactaaatta

SEQ ID NO: 940297 - DNA, 33 bp, Homo sapien
tcaccttgttgtgagaccagacaaagatttaga

SEQ ID NO: 940298 - DNA, 33 bp, Homo sapien
tcaccttgttgtgagatcagacaaagatttaga

SEQ ID NO: 940299 - DNA, 33 bp, Homo sapien
ggaccagccaaaggagaacaaacaggctgttta

SEQ ID NO: 940300 - DNA, 33 bp, Homo sapien
ggaccagccaaaggagtacaaacaggctgttta

SEQ ID NO: 940301 - DNA, 33 bp, Homo sapien
ataggtacaatcacatcaggcaaagctaactga

SEQ ID NO: 940302 - DNA, 33 bp, Homo sapien
ataggtacaatcacattaggcaaagctaactga

SEQ ID NO: 940303 - DNA, 33 bp, Homo sapien
gcttgcagtaaatatcaccagagattgtttttc

SEQ ID NO: 940304 - DNA, 33 bp, Homo sapien
gcttgcagtaaatatcgccagagattgtttttc

SEQ ID NO: 940305 - DNA, 33 bp, Homo sapien
ataagctgaaatggcaagagtctccttagtagt

SEQ ID NO: 940306 - DNA, 33 bp, Homo sapien
ataagctgaaatggcaggagtctccttagtagt

SEQ ID NO: 940307 - DNA, 33 bp, Homo sapien
atcactgcagagatcaacttactcagaaaaccc

SEQ ID NO: 940308 - DNA, 33 bp, Homo sapien
atcactgcagagatcagcttactcagaaaaccc

SEQ ID NO: 940309 - DNA, 33 bp, Homo sapien
aaacatcacataagtaagtaaatgaaacgtgtt

SEQ ID NO: 940310 - DNA, 33 bp, Homo sapien
aaacatcacataagtaggtaaatgaaacgtgtt

SEQ ID NO: 940311 - DNA, 33 bp, Homo sapien
aagatgcactgtgaaaatcataaaatttataat

SEQ ID NO: 940312 - DNA, 33 bp, Homo sapien
aagatgcactgtgaaagtcataaaatttataat

SEQ ID NO: 940313 - DNA, 33 bp, Homo sapien
gatgtatactatcaaaaaatttgcagactaatt

SEQ ID NO: 940314 - DNA, 33 bp, Homo sapien
gatgtatactatcaaagaatttgcagactaatt

SEQ ID NO: 940315 - DNA, 33 bp, Homo sapien
aagagcctcgaggaaccgtgattacgcagcagc

SEQ ID NO: 940316 - DNA, 33 bp, Homo sapien
aagagcctcgaggaactgtgattacgcagcagc

SEQ ID NO: 940317 - DNA, 33 bp, Homo sapien
ttcttcaaggagcgtacagctttatggaggaaa

SEQ ID NO: 940318 - DNA, 33 bp, Homo sapien
ttcttcaaggagcgtagagctttatggaggaaa

SEQ ID NO: 940319 - DNA, 33 bp, Homo sapien
ctgtacagtatttgaacggcaaacgtctttgca

SEQ ID NO: 940320 - DNA, 33 bp, Homo sapien
ctgtacagtatttgaatggcaaacgtctttgca

SEQ ID NO: 940321 - DNA, 33 bp, Homo sapien
acagagctgaaatttacgcatcacaggattgag

SEQ ID NO: 940322 - DNA, 33 bp, Homo sapien
acagagctgaaatttatgcatcacaggattgag

SEQ ID NO: 940323 - DNA, 33 bp, Homo sapien
aatggggtcagacctactactttaccatttgct

SEQ ID NO: 940324 - DNA, 33 bp, Homo sapien
aatggggtcagacctattactttaccatttgct

SEQ ID NO: 940325 - DNA, 33 bp, Homo sapien
aaggagacattggtaacggaagaagaggtcgga

SEQ ID NO: 940326 - DNA, 33 bp, Homo sapien
aaggagacattggtaatggaagaagaggtcgga

SEQ ID NO: 940327 - DNA, 33 bp, Homo sapien
catttcatcttgcaaaaaaataatttctatggg

SEQ ID NO: 940328 - DNA, 33 bp, Homo sapien
catttcatcttgcaaacaaataatttctatggg

SEQ ID NO: 940329 - DNA, 33 bp, Homo sapien
attctcccttcagtgacgtaactaacagcaaat

SEQ ID NO: 940330 - DNA, 33 bp, Homo sapien
attctcccttcagtgatgtaactaacagcaaat

SEQ ID NO: 940331 - DNA, 33 bp, Homo sapien
ttctgacaggtcacaaattctacaaaaagcttg

SEQ ID NO: 940332 - DNA, 33 bp, Homo sapien
ttctgacaggtcacaagttctacaaaaagcttg

SEQ ID NO: 940333 - DNA, 33 bp, Homo sapien
aatatgcttcacgcaaaccaaataagacccagg

SEQ ID NO: 940334 - DNA, 33 bp, Homo sapien
aatatgcttcacgcaagccaaataagacccagg

SEQ ID NO: 940335 - DNA, 33 bp, Homo sapien
tggtggagatgtttaaaaagatcaatattttca

SEQ ID NO: 940336 - DNA, 33 bp, Homo sapien
tggtggagatgtttaagaagatcaatattttca

SEQ ID NO: 940337 - DNA, 33 bp, Homo sapien
tcacactggcccattacgttgacgatattttgc

SEQ ID NO: 940338 - DNA, 33 bp, Homo sapien
tcacactggcccattatgttgacgatattttgc

SEQ ID NO: 940339 - DNA, 33 bp, Homo sapien
ttagcaaccttgagcaaattgtttacgctttca

SEQ ID NO: 940340 - DNA, 33 bp, Homo sapien
ttagcaaccttgagcatattgtttacgctttca

SEQ ID NO: 940341 - DNA, 33 bp, Homo sapien
tcattctaccgtaaagacacatacatgcattat

SEQ ID NO: 940342 - DNA, 33 bp, Homo sapien
tcattctaccgtaaaggcacatacatgcattat

SEQ ID NO: 940343 - DNA, 33 bp, Homo sapien
cataactagataattcccacttggttgtggtat

SEQ ID NO: 940344 - DNA, 33 bp, Homo sapien
cataactagataattctcacttggttgtggtat

SEQ ID NO: 940345 - DNA, 33 bp, Homo sapien
ccattcatgatcaagactctcagaaacctgtga

SEQ ID NO: 940346 - DNA, 33 bp, Homo sapien
ccattcatgatcaagattctcagaaacctgtga

SEQ ID NO: 940347 - DNA, 33 bp, Homo sapien
aatttagctttgaacactggcagtatcgtagcc

SEQ ID NO: 940348 - DNA, 33 bp, Homo sapien
aatttagctttgaacattggcagtatcgtagcc

SEQ ID NO: 940349 - DNA, 33 bp, Homo sapien
gctgctgtaaccaaataacacaaactttgtgac

SEQ ID NO: 940350 - DNA, 33 bp, Homo sapien
gctgctgtaaccaaattacacaaactttgtgac

SEQ ID NO: 940351 - DNA, 33 bp, Homo sapien
gagctgagaatactgacgcaaataaagcttaca

SEQ ID NO: 940352 - DNA, 33 bp, Homo sapien
gagctgagaatactgatgcaaataaagcttaca

SEQ ID NO: 940353 - DNA, 33 bp, Homo sapien
gcacttgcaggtttaccgaatgtgaaatcagag

SEQ ID NO: 940354 - DNA, 33 bp, Homo sapien
gcacttgcaggtttactgaatgtgaaatcagag

SEQ ID NO: 940355 - DNA, 33 bp, Homo sapien
agtccatactataaaccgtagtcttactggaag

SEQ ID NO: 940356 - DNA, 33 bp, Homo sapien
agtccatactataaactgtagtcttactggaag

SEQ ID NO: 940357 - DNA, 33 bp, Homo sapien
tgctcagggttttaaacgtcatctacctgctga

SEQ ID NO: 940358 - DNA, 33 bp, Homo sapien
tgctcagggttttaaatgtcatctacctgctga

SEQ ID NO: 940359 - DNA, 33 bp, Homo sapien
accagttcagacctcacctcagtttagtctaca

SEQ ID NO: 940360 - DNA, 33 bp, Homo sapien
accagttcagacctcatctcagtttagtctaca

SEQ ID NO: 940361 - DNA, 33 bp, Homo sapien
aaaacaattacgaaaaggaagagtaacaaggaa

SEQ ID NO: 940362 - DNA, 33 bp, Homo sapien
aaaacaattacgaaaatgaagagtaacaaggaa

SEQ ID NO: 940363 - DNA, 33 bp, Homo sapien
accaaagagcctctctcactttaaccacaaggg

SEQ ID NO: 940364 - DNA, 33 bp, Homo sapien
accaaagagcctctctgactttaaccacaaggg

SEQ ID NO: 940365 - DNA, 33 bp, Homo sapien
ttcagatgtgttgaaggaaatccgtccaactaa

SEQ ID NO: 940366 - DNA, 33 bp, Homo sapien
ttcagatgtgttgaagtaaatccgtccaactaa

SEQ ID NO: 940367 - DNA, 33 bp, Homo sapien
ataaacgtacaccagggaattagacttttaggg

SEQ ID NO: 940368 - DNA, 33 bp, Homo sapien
ataaacgtacaccaggtaattagacttttaggg

SEQ ID NO: 940369 - DNA, 33 bp, Homo sapien
gctgcactgcaaagcaagcttcagtaaaggtct

SEQ ID NO: 940370 - DNA, 33 bp, Homo sapien
gctgcactgcaaagcaggcttcagtaaaggtct

SEQ ID NO: 940371 - DNA, 33 bp, Homo sapien
tatttagagtcttaccaagtggggctctccaaa

SEQ ID NO: 940372 - DNA, 33 bp, Homo sapien
tatttagagtcttaccgagtggggctctccaaa

SEQ ID NO: 940373 - DNA, 33 bp, Homo sapien
acttcattttggcaaaaccgtgcatcttttttt

SEQ ID NO: 940374 - DNA, 33 bp, Homo sapien
acttcattttggcaaatccgtgcatcttttttt

SEQ ID NO: 940375 - DNA, 33 bp, Homo sapien
tgtgtcacttagatgaacttgtgcctccgagtc

SEQ ID NO: 940376 - DNA, 33 bp, Homo sapien
tgtgtcacttagatgagcttgtgcctccgagtc

SEQ ID NO: 940377 - DNA, 33 bp, Homo sapien
ggaagctctgagcaaaacagaattgaaagttcc

SEQ ID NO: 940378 - DNA, 33 bp, Homo sapien
ggaagctctgagcaaagcagaattgaaagttcc

SEQ ID NO: 940379 - DNA, 33 bp, Homo sapien
caggacttccactccaactagaaactctagttt

SEQ ID NO: 940380 - DNA, 33 bp, Homo sapien
caggacttccactccagctagaaactctagttt

SEQ ID NO: 940381 - DNA, 33 bp, Homo sapien
gactagggagatgggaggttttcggcaaaacgg

SEQ ID NO: 940382 - DNA, 33 bp, Homo sapien
gactagggagatgggatgttttcggcaaaacgg

SEQ ID NO: 940383 - DNA, 33 bp, Homo sapien
tgtgacagaggcagaggcaaaactagagggaca

SEQ ID NO: 940384 - DNA, 33 bp, Homo sapien
tgtgacagaggcagagtcaaaactagagggaca

SEQ ID NO: 940385 - DNA, 33 bp, Homo sapien
acgattcctttccagactatctgacaacccaaa

SEQ ID NO: 940386 - DNA, 33 bp, Homo sapien
acgattcctttccagagtatctgacaacccaaa

SEQ ID NO: 940387 - DNA, 33 bp, Homo sapien
aaaccctcacgtaacacccccagctttgggttg

SEQ ID NO: 940388 - DNA, 33 bp, Homo sapien
aaaccctcacgtaacatccccagctttgggttg

SEQ ID NO: 940389 - DNA, 33 bp, Homo sapien
aaataaatagtatctgaaagtgccacaaatggg

SEQ ID NO: 940390 - DNA, 33 bp, Homo sapien
aaataaatagtatctggaagtgccacaaatggg

SEQ ID NO: 940391 - DNA, 33 bp, Homo sapien
acgtagagactgaacagtaactgaagtgtgtgg

SEQ ID NO: 940392 - DNA, 33 bp, Homo sapien
acgtagagactgaacattaactgaagtgtgtgg

SEQ ID NO: 940393 - DNA, 33 bp, Homo sapien
tttcatcattttaccacgcaaacatcatttttc

SEQ ID NO: 940394 - DNA, 33 bp, Homo sapien
tttcatcattttaccatgcaaacatcatttttc

SEQ ID NO: 940395 - DNA, 33 bp, Homo sapien
gttgcaaacatccacactaatatcgattttgtc

SEQ ID NO: 940396 - DNA, 33 bp, Homo sapien
gttgcaaacatccacattaatatcgattttgtc

SEQ ID NO: 940397 - DNA, 33 bp, Homo sapien
ccgtctccataacataaaagtgcaaggtgaagc

SEQ ID NO: 940398 - DNA, 33 bp, Homo sapien
ccgtctccataacatagaagtgcaaggtgaagc

SEQ ID NO: 940399 - DNA, 33 bp, Homo sapien
ttacaaacaatccaatcagactcttagttattt

SEQ ID NO: 940400 - DNA, 33 bp, Homo sapien
ttacaaacaatccaattagactcttagttattt

SEQ ID NO: 940401 - DNA, 33 bp, Homo sapien
ggaaatgccatccaacaggcagagacaaccaat

SEQ ID NO: 940402 - DNA, 33 bp, Homo sapien
ggaaatgccatccaacgggcagagacaaccaat

SEQ ID NO: 940403 - DNA, 33 bp, Homo sapien
tgaagctgaaagaatcaacacaggggtcgggaa

SEQ ID NO: 940404 - DNA, 33 bp, Homo sapien
tgaagctgaaagaatccacacaggggtcgggaa

SEQ ID NO: 940405 - DNA, 33 bp, Homo sapien
aacttcaaaattagcacgccaggttgctacaag

SEQ ID NO: 940406 - DNA, 33 bp, Homo sapien
aacttcaaaattagcaggccaggttgctacaag

SEQ ID NO: 940407 - DNA, 33 bp, Homo sapien
ttgggaagctaatctgccaagagcccgctgctt

SEQ ID NO: 940408 - DNA, 33 bp, Homo sapien
ttgggaagctaatctgtcaagagcccgctgctt

SEQ ID NO: 940409 - DNA, 33 bp, Homo sapien
cttacttcacttagcagaaggccctcaaggttc

SEQ ID NO: 940410 - DNA, 33 bp, Homo sapien
cttacttcacttagcataaggccctcaaggttc

SEQ ID NO: 940411 - DNA, 33 bp, Homo sapien
agtcctggggtgcaaacgtatagacacaggtgt

SEQ ID NO: 940412 - DNA, 33 bp, Homo sapien
agtcctggggtgcaaatgtatagacacaggtgt

SEQ ID NO: 940413 - DNA, 33 bp, Homo sapien
gaagaagacgaagaagacaaggaaagcctcttt

SEQ ID NO: 940414 - DNA, 33 bp, Homo sapien
gaagaagacgaagaaggcaaggaaagcctcttt

SEQ ID NO: 940415 - DNA, 33 bp, Homo sapien
atttatgtttcatatacaccttacacacatagc

SEQ ID NO: 940416 - DNA, 33 bp, Homo sapien
atttatgtttcatatataccttacacacatagc

SEQ ID NO: 940417 - DNA, 33 bp, Homo sapien
tttggcagcccttcaacgtgtgggaagtaggag

SEQ ID NO: 940418 - DNA, 33 bp, Homo sapien
tttggcagcccttcaatgtgtgggaagtaggag

SEQ ID NO: 940419 - DNA, 33 bp, Homo sapien
attcagcgtttgtatcactaaaatgtagccctc

SEQ ID NO: 940420 - DNA, 33 bp, Homo sapien
attcagcgtttgtatcgctaaaatgtagccctc

SEQ ID NO: 940421 - DNA, 33 bp, Homo sapien
cttttctctattactagcatctggcattaatgt

SEQ ID NO: 940422 - DNA, 33 bp, Homo sapien
cttttctctattactatcatctggcattaatgt

SEQ ID NO: 940423 - DNA, 33 bp, Homo sapien
ttaatcacaaaggctacagctgctaattggcca

SEQ ID NO: 940424 - DNA, 33 bp, Homo sapien
ttaatcacaaaggctagagctgctaattggcca

SEQ ID NO: 940425 - DNA, 33 bp, Homo sapien
caaactctaaaatacaaggtctcagtgtttaca

SEQ ID NO: 940426 - DNA, 33 bp, Homo sapien
caaactctaaaatacagggtctcagtgtttaca

SEQ ID NO: 940427 - DNA, 33 bp, Homo sapien
aattaagctgcttcaccgtactactttttggtg

SEQ ID NO: 940428 - DNA, 33 bp, Homo sapien
aattaagctgcttcactgtactactttttggtg

SEQ ID NO: 940429 - DNA, 33 bp, Homo sapien
ctttctacagtagatcaagtcctgaaaccagat

SEQ ID NO: 940430 - DNA, 33 bp, Homo sapien
ctttctacagtagatctagtcctgaaaccagat

SEQ ID NO: 940431 - DNA, 33 bp, Homo sapien
aatggaaagaccagacacgaacatcttcataca

SEQ ID NO: 940432 - DNA, 33 bp, Homo sapien
aatggaaagaccagacgcgaacatcttcataca

SEQ ID NO: 940433 - DNA, 33 bp, Homo sapien
ccaaacagttaaccagacagaactaataatgag

SEQ ID NO: 940434 - DNA, 33 bp, Homo sapien
ccaaacagttaaccaggcagaactaataatgag

SEQ ID NO: 940435 - DNA, 33 bp, Homo sapien
aacaccatagagtcaaaggtcaaggaatagctg

SEQ ID NO: 940436 - DNA, 33 bp, Homo sapien
aacaccatagagtcaagggtcaaggaatagctg

SEQ ID NO: 940437 - DNA, 33 bp, Homo sapien
agctaagacatttccaaattcgtgggttttttt

SEQ ID NO: 940438 - DNA, 33 bp, Homo sapien
agctaagacatttccagattcgtgggttttttt

SEQ ID NO: 940439 - DNA, 33 bp, Homo sapien
ctccagaaagttgtgcaatgggaaaatgtcagc

SEQ ID NO: 940440 - DNA, 33 bp, Homo sapien
ctccagaaagttgtgcgatgggaaaatgtcagc

SEQ ID NO: 940441 - DNA, 33 bp, Homo sapien
acccctatgtttcctgcaattttgtagttagat

SEQ ID NO: 940442 - DNA, 33 bp, Homo sapien
acccctatgtttcctgtaattttgtagttagat

SEQ ID NO: 940443 - DNA, 33 bp, Homo sapien
tgctaataattgcattcaagttaaaagatttgg

SEQ ID NO: 940444 - DNA, 33 bp, Homo sapien
tgctaataattgcattgaagttaaaagatttgg

SEQ ID NO: 940445 - DNA, 33 bp, Homo sapien
actcaaatactgtaagaatgattaagccatgtg

SEQ ID NO: 940446 - DNA, 33 bp, Homo sapien
actcaaatactgtaagcatgattaagccatgtg

SEQ ID NO: 940447 - DNA, 33 bp, Homo sapien
actttacaattcttacagcaatcccatgaggga

SEQ ID NO: 940448 - DNA, 33 bp, Homo sapien
actttacaattcttaccgcaatcccatgaggga

SEQ ID NO: 940449 - DNA, 33 bp, Homo sapien
ccgaggtctatttttacatgaaggttactttac

SEQ ID NO: 940450 - DNA, 33 bp, Homo sapien
ccgaggtctatttttatatgaaggttactttac

SEQ ID NO: 940451 - DNA, 33 bp, Homo sapien
ctatgacacttacttacatccgagcaatggtta

SEQ ID NO: 940452 - DNA, 33 bp, Homo sapien
ctatgacacttacttagatccgagcaatggtta

SEQ ID NO: 940453 - DNA, 33 bp, Homo sapien
aataaaattaacaccacataccttcatttggct

SEQ ID NO: 940454 - DNA, 33 bp, Homo sapien
aataaaattaacaccatataccttcatttggct

SEQ ID NO: 940455 - DNA, 33 bp, Homo sapien
gaggcggcagtaagtaaagtggtggaggtcacg

SEQ ID NO: 940456 - DNA, 33 bp, Homo sapien
gaggcggcagtaagtagagtggtggaggtcacg

SEQ ID NO: 940457 - DNA, 33 bp, Homo sapien
atacgactggagaaaacgagaaaatagctgttg

SEQ ID NO: 940458 - DNA, 33 bp, Homo sapien
atacgactggagaaaatgagaaaatagctgttg

SEQ ID NO: 940459 - DNA, 33 bp, Homo sapien
ccccatcctgtgggcacggccttgtttggaaat

SEQ ID NO: 940460 - DNA, 33 bp, Homo sapien
ccccatcctgtgggcatggccttgtttggaaat

SEQ ID NO: 940461 - DNA, 33 bp, Homo sapien
ttggaaatagggtccaatagctgcgaggcgtga

SEQ ID NO: 940462 - DNA, 33 bp, Homo sapien
ttggaaatagggtccagtagctgcgaggcgtga

SEQ ID NO: 940463 - DNA, 33 bp, Homo sapien
ccacagtataggttgccctcatctaaccccagg

SEQ ID NO: 940464 - DNA, 33 bp, Homo sapien
ccacagtataggttgctctcatctaaccccagg

SEQ ID NO: 940465 - DNA, 33 bp, Homo sapien
taacgatcagtgataacagatcagccaatttct

SEQ ID NO: 940466 - DNA, 33 bp, Homo sapien
taacgatcagtgataatagatcagccaatttct

SEQ ID NO: 940467 - DNA, 33 bp, Homo sapien
cggccaggtaaggttcacacattatgttcacat

SEQ ID NO: 940468 - DNA, 33 bp, Homo sapien
cggccaggtaaggttcgcacattatgttcacat

SEQ ID NO: 940469 - DNA, 33 bp, Homo sapien
cagatgttctgcaccaagtaagggatgaacaga

SEQ ID NO: 940470 - DNA, 33 bp, Homo sapien
cagatgttctgcaccacgtaagggatgaacaga

SEQ ID NO: 940471 - DNA, 33 bp, Homo sapien
ggaagtattttaagaaagataaaggcaatccag

SEQ ID NO: 940472 - DNA, 33 bp, Homo sapien
ggaagtattttaagaaggataaaggcaatccag

SEQ ID NO: 940473 - DNA, 33 bp, Homo sapien
ttagcagcatttccaaagataggtagcttgtag

SEQ ID NO: 940474 - DNA, 33 bp, Homo sapien
ttagcagcatttccaaggataggtagcttgtag

SEQ ID NO: 940475 - DNA, 33 bp, Homo sapien
aagctatatgaagtgaccttttgttttactgag

SEQ ID NO: 940476 - DNA, 33 bp, Homo sapien
aagctatatgaagtgagcttttgttttactgag

SEQ ID NO: 940477 - DNA, 33 bp, Homo sapien
catacatcgtatttaaactttgaaggtgttaga

SEQ ID NO: 940478 - DNA, 33 bp, Homo sapien
catacatcgtatttaacctttgaaggtgttaga

SEQ ID NO: 940479 - DNA, 33 bp, Homo sapien
ctttgaaggtgttagacacagtcaacatggtag

SEQ ID NO: 940480 - DNA, 33 bp, Homo sapien
ctttgaaggtgttagatacagtcaacatggtag

SEQ ID NO: 940481 - DNA, 33 bp, Homo sapien
atctcacctgctcgtccgacagacttgggtttc

SEQ ID NO: 940482 - DNA, 33 bp, Homo sapien
atctcacctgctcgtcggacagacttgggtttc

SEQ ID NO: 940483 - DNA, 33 bp, Homo sapien
attgtggctgctggaccgactctgcattccttt

SEQ ID NO: 940484 - DNA, 33 bp, Homo sapien
attgtggctgctggactgactctgcattccttt

SEQ ID NO: 940485 - DNA, 33 bp, Homo sapien
aacaggcagattctgcggaggaaactaaagccg

SEQ ID NO: 940486 - DNA, 33 bp, Homo sapien
aacaggcagattctgctgaggaaactaaagccg

SEQ ID NO: 940487 - DNA, 33 bp, Homo sapien
ttatgctatttgagagaaaattcaaaccatgag

SEQ ID NO: 940488 - DNA, 33 bp, Homo sapien
ttatgctatttgagaggaaattcaaaccatgag

SEQ ID NO: 940489 - DNA, 33 bp, Homo sapien
ctcgttagtaatgaaacagttggagaaatgcca

SEQ ID NO: 940490 - DNA, 33 bp, Homo sapien
ctcgttagtaatgaaagagttggagaaatgcca

SEQ ID NO: 940491 - DNA, 33 bp, Homo sapien
aagtccacatttaacaatactgtagcggtgtca

SEQ ID NO: 940492 - DNA, 33 bp, Homo sapien
aagtccacatttaacagtactgtagcggtgtca

SEQ ID NO: 940493 - DNA, 33 bp, Homo sapien
caacctgtaactaagaataaatgacaactaaat

SEQ ID NO: 940494 - DNA, 33 bp, Homo sapien
caacctgtaactaagagtaaatgacaactaaat

SEQ ID NO: 940495 - DNA, 33 bp, Homo sapien
cggtcaagaaaaacaacgggacagacaacctgt

SEQ ID NO: 940496 - DNA, 33 bp, Homo sapien
cggtcaagaaaaacaaggggacagacaacctgt

SEQ ID NO: 940497 - DNA, 33 bp, Homo sapien
ccgctgaagaaaccacaggaatgctggccgggt

SEQ ID NO: 940498 - DNA, 33 bp, Homo sapien
ccgctgaagaaaccacgggaatgctggccgggt

SEQ ID NO: 940499 - DNA, 33 bp, Homo sapien
ttgatttaggtaaccacgagtgctggggagctc

SEQ ID NO: 940500 - DNA, 33 bp, Homo sapien
ttgatttaggtaaccatgagtgctggggagctc

SEQ ID NO: 940501 - DNA, 33 bp, Homo sapien
aacattgtattttgtcacgaaactttgtgttta

SEQ ID NO: 940502 - DNA, 33 bp, Homo sapien
aacattgtattttgtcgcgaaactttgtgttta

SEQ ID NO: 940503 - DNA, 33 bp, Homo sapien
aacccgtcctttacagaagaagccctcccagga

SEQ ID NO: 940504 - DNA, 33 bp, Homo sapien
aacccgtcctttacagcagaagccctcccagga

SEQ ID NO: 940505 - DNA, 33 bp, Homo sapien
atacaagaaaatggaacggaaaagcattggcct

SEQ ID NO: 940506 - DNA, 33 bp, Homo sapien
atacaagaaaatggaatggaaaagcattggcct

SEQ ID NO: 940507 - DNA, 33 bp, Homo sapien
aggtagcttctgtagaggatgatataattatga

SEQ ID NO: 940508 - DNA, 33 bp, Homo sapien
aggtagcttctgtagatgatgatataattatga

SEQ ID NO: 940509 - DNA, 33 bp, Homo sapien
aagctgcttgggtcccgcgaagctctgcatgag

SEQ ID NO: 940510 - DNA, 33 bp, Homo sapien
aagctgcttgggtccctcgaagctctgcatgag

SEQ ID NO: 940511 - DNA, 33 bp, Homo sapien
acacgtttcgtacacaaatttctgccaaattga

SEQ ID NO: 940512 - DNA, 33 bp, Homo sapien
acacgtttcgtacacacatttctgccaaattga

SEQ ID NO: 940513 - DNA, 33 bp, Homo sapien
gccagcatcccaggacagaacaagccagcctca

SEQ ID NO: 940514 - DNA, 33 bp, Homo sapien
gccagcatcccaggacggaacaagccagcctca

SEQ ID NO: 940515 - DNA, 33 bp, Homo sapien
tggccctgtcagccctaaacatggagagccact

SEQ ID NO: 940516 - DNA, 33 bp, Homo sapien
tggccctgtcagccctgaacatggagagccact

SEQ ID NO: 940517 - DNA, 33 bp, Homo sapien
gtctgcgattctatgacgtgagtgaagtaaaac

SEQ ID NO: 940518 - DNA, 33 bp, Homo sapien
gtctgcgattctatgatgtgagtgaagtaaaac

SEQ ID NO: 940519 - DNA, 33 bp, Homo sapien
gtccatgtagtgtgaagcgtgcgtcagttggaa

SEQ ID NO: 940520 - DNA, 33 bp, Homo sapien
gtccatgtagtgtgaatcgtgcgtcagttggaa

SEQ ID NO: 940521 - DNA, 33 bp, Homo sapien
tcaacattacgattacaaaggatgaaagtggtg

SEQ ID NO: 940522 - DNA, 33 bp, Homo sapien
tcaacattacgattacgaaggatgaaagtggtg

SEQ ID NO: 940523 - DNA, 33 bp, Homo sapien
tctcctgagaagaaacaaagtcagcacggggag

SEQ ID NO: 940524 - DNA, 33 bp, Homo sapien
tctcctgagaagaaacgaagtcagcacggggag

SEQ ID NO: 940525 - DNA, 33 bp, Homo sapien
agccagtagcaggaaccaccgagacgcagggag

SEQ ID NO: 940526 - DNA, 33 bp, Homo sapien
agccagtagcaggaactaccgagacgcagggag

SEQ ID NO: 940527 - DNA, 33 bp, Homo sapien
agtttttcttgttgaacagttaacatccagtct

SEQ ID NO: 940528 - DNA, 33 bp, Homo sapien
agtttttcttgttgaatagttaacatccagtct

SEQ ID NO: 940529 - DNA, 33 bp, Homo sapien
gcactgttgccagccaatccaggaagatagatc

SEQ ID NO: 940530 - DNA, 33 bp, Homo sapien
gcactgttgccagccagtccaggaagatagatc

SEQ ID NO: 940531 - DNA, 33 bp, Homo sapien
agacgggtttcagtgcagatgcaaatgaactta

SEQ ID NO: 940532 - DNA, 33 bp, Homo sapien
agacgggtttcagtgcggatgcaaatgaactta

SEQ ID NO: 940533 - DNA, 33 bp, Homo sapien
aatctttaatctaatcaacaatgaggctgggtt

SEQ ID NO: 940534 - DNA, 33 bp, Homo sapien
aatctttaatctaatcgacaatgaggctgggtt

SEQ ID NO: 940535 - DNA, 33 bp, Homo sapien
cagtgtaagttaaaacggaagaaggatctcacc

SEQ ID NO: 940536 - DNA, 33 bp, Homo sapien
cagtgtaagttaaaactgaagaaggatctcacc

SEQ ID NO: 940537 - DNA, 33 bp, Homo sapien
cttgtattttaatgaccgatgtaaaggcctgcc

SEQ ID NO: 940538 - DNA, 33 bp, Homo sapien
cttgtattttaatgactgatgtaaaggcctgcc

SEQ ID NO: 940539 - DNA, 33 bp, Homo sapien
tttatgtctccttttgcaaggacccagtcagag

SEQ ID NO: 940540 - DNA, 33 bp, Homo sapien
tttatgtctccttttgtaaggacccagtcagag

SEQ ID NO: 940541 - DNA, 33 bp, Homo sapien
tcctagaaaaaacacaaagtatatatgtatttc

SEQ ID NO: 940542 - DNA, 33 bp, Homo sapien
tcctagaaaaaacacacagtatatatgtatttc

SEQ ID NO: 940543 - DNA, 33 bp, Homo sapien
tctgaggaaaagcgcccatcctgtctggagcca

SEQ ID NO: 940544 - DNA, 33 bp, Homo sapien
tctgaggaaaagcgcctatcctgtctggagcca

SEQ ID NO: 940545 - DNA, 33 bp, Homo sapien
ggtatttttcagccccgcgcaggccgagctggc

SEQ ID NO: 940546 - DNA, 33 bp, Homo sapien
ggtatttttcagcccctcgcaggccgagctggc

SEQ ID NO: 940547 - DNA, 33 bp, Homo sapien
ctttctgtctttgactcacgtggttccctctgt

SEQ ID NO: 940548 - DNA, 33 bp, Homo sapien
ctttctgtctttgactgacgtggttccctctgt

SEQ ID NO: 940549 - DNA, 33 bp, Homo sapien
gagagtgagacgaagacggagacaattaactgg

SEQ ID NO: 940550 - DNA, 33 bp, Homo sapien
gagagtgagacgaagatggagacaattaactgg

SEQ ID NO: 940551 - DNA, 33 bp, Homo sapien
ggacatgaggtttacacacttcattagggctcc

SEQ ID NO: 940552 - DNA, 33 bp, Homo sapien
ggacatgaggtttacatacttcattagggctcc

SEQ ID NO: 940553 - DNA, 33 bp, Homo sapien
agacaggacggccctcaagtagccatgatccca

SEQ ID NO: 940554 - DNA, 33 bp, Homo sapien
agacaggacggccctcgagtagccatgatccca

SEQ ID NO: 940555 - DNA, 33 bp, Homo sapien
agttcctatgaggtcactcctatttccactgac

SEQ ID NO: 940556 - DNA, 33 bp, Homo sapien
agttcctatgaggtcattcctatttccactgac

SEQ ID NO: 940557 - DNA, 33 bp, Homo sapien
ctagcctggttattgcacccgtggttactgcac

SEQ ID NO: 940558 - DNA, 33 bp, Homo sapien
ctagcctggttattgcgcccgtggttactgcac

SEQ ID NO: 940559 - DNA, 33 bp, Homo sapien
atgacacacactacaacgtggatgaagcttgga

SEQ ID NO: 940560 - DNA, 33 bp, Homo sapien
atgacacacactacaatgtggatgaagcttgga

SEQ ID NO: 940561 - DNA, 33 bp, Homo sapien
gcagtaattctccaaacgacggcaaaagctgtg

SEQ ID NO: 940562 - DNA, 33 bp, Homo sapien
gcagtaattctccaaatgacggcaaaagctgtg

SEQ ID NO: 940563 - DNA, 33 bp, Homo sapien
caatctgtcttccgcaaaccctggctttcccat

SEQ ID NO: 940564 - DNA, 33 bp, Homo sapien
caatctgtcttccgcagaccctggctttcccat

SEQ ID NO: 940565 - DNA, 33 bp, Homo sapien
tagtttgttccagggaagtgctgctgaaccagg

SEQ ID NO: 940566 - DNA, 33 bp, Homo sapien
tagtttgttccagggacgtgctgctgaaccagg

SEQ ID NO: 940567 - DNA, 33 bp, Homo sapien
gtgtgacctttaaagcaacttttgtctcccgct

SEQ ID NO: 940568 - DNA, 33 bp, Homo sapien
gtgtgacctttaaagcgacttttgtctcccgct

SEQ ID NO: 940569 - DNA, 33 bp, Homo sapien
tgtgcatgtacaaaaaagatggttttgaatgag

SEQ ID NO: 940570 - DNA, 33 bp, Homo sapien
tgtgcatgtacaaaaaggatggttttgaatgag

SEQ ID NO: 940571 - DNA, 33 bp, Homo sapien
cgacctcttcagccgcaattcctgctcaggagt

SEQ ID NO: 940572 - DNA, 33 bp, Homo sapien
cgacctcttcagccgcgattcctgctcaggagt

SEQ ID NO: 940573 - DNA, 33 bp, Homo sapien
gagtggtccctgggcacctgaatgtcctcaccc

SEQ ID NO: 940574 - DNA, 33 bp, Homo sapien
gagtggtccctgggcatctgaatgtcctcaccc

SEQ ID NO: 940575 - DNA, 33 bp, Homo sapien
ccccagtgtctgatgcgccgctctttctgtcca

SEQ ID NO: 940576 - DNA, 33 bp, Homo sapien
ccccagtgtctgatgctccgctctttctgtcca

SEQ ID NO: 940577 - DNA, 33 bp, Homo sapien
gcagcagagacctaaaggcccattgaccgtaga

SEQ ID NO: 940578 - DNA, 33 bp, Homo sapien
gcagcagagacctaaatgcccattgaccgtaga

SEQ ID NO: 940579 - DNA, 33 bp, Homo sapien
aggctgcttggatttcgatttgtgcttatgttt

SEQ ID NO: 940580 - DNA, 33 bp, Homo sapien
aggctgcttggatttctatttgtgcttatgttt

SEQ ID NO: 940581 - DNA, 33 bp, Homo sapien
gtgggcgctggtgaaacattttctattcgaccc

SEQ ID NO: 940582 - DNA, 33 bp, Homo sapien
gtgggcgctggtgaaatattttctattcgaccc

SEQ ID NO: 940583 - DNA, 33 bp, Homo sapien
aggcataaggaaatggaaccatgcgaaagtcac

SEQ ID NO: 940584 - DNA, 33 bp, Homo sapien
aggcataaggaaatgggaccatgcgaaagtcac

SEQ ID NO: 940585 - DNA, 33 bp, Homo sapien
tggcgaacaggatacacacaatgggaggcttgg

SEQ ID NO: 940586 - DNA, 33 bp, Homo sapien
tggcgaacaggatacatacaatgggaggcttgg

SEQ ID NO: 940587 - DNA, 33 bp, Homo sapien
tgagtcagtcataaaaaggaagttagtgctgac

SEQ ID NO: 940588 - DNA, 33 bp, Homo sapien
tgagtcagtcataaaatggaagttagtgctgac

SEQ ID NO: 940589 - DNA, 33 bp, Homo sapien
gagggtcaccaatctcagaaaaggccccaggcc

SEQ ID NO: 940590 - DNA, 33 bp, Homo sapien
gagggtcaccaatctccgaaaaggccccaggcc

SEQ ID NO: 940591 - DNA, 33 bp, Homo sapien
aagcaggaaggaaatgaactgtcactagctttg

SEQ ID NO: 940592 - DNA, 33 bp, Homo sapien
aagcaggaaggaaatggactgtcactagctttg

SEQ ID NO: 940593 - DNA, 33 bp, Homo sapien
ttcaagaaagatgtgaatacccagcagatatca

SEQ ID NO: 940594 - DNA, 33 bp, Homo sapien
ttcaagaaagatgtgactacccagcagatatca

SEQ ID NO: 940595 - DNA, 33 bp, Homo sapien
ctcatatccctaagtacgttaaaaccacaccag

SEQ ID NO: 940596 - DNA, 33 bp, Homo sapien
ctcatatccctaagtatgttaaaaccacaccag

SEQ ID NO: 940597 - DNA, 33 bp, Homo sapien
ttctgagcctctgctgaacgtcctggtggttga

SEQ ID NO: 940598 - DNA, 33 bp, Homo sapien
ttctgagcctctgctggacgtcctggtggttga

SEQ ID NO: 940599 - DNA, 33 bp, Homo sapien
gcgaacacattctcagaaagcttcacacttaga

SEQ ID NO: 940600 - DNA, 33 bp, Homo sapien
gcgaacacattctcaggaagcttcacacttaga

SEQ ID NO: 940601 - DNA, 33 bp, Homo sapien
ggggttcctgcagaaacgcttaggcccggaagt

SEQ ID NO: 940602 - DNA, 33 bp, Homo sapien
ggggttcctgcagaaatgcttaggcccggaagt

SEQ ID NO: 940603 - DNA, 33 bp, Homo sapien
cttgtggctgtaaacccacatcttaacatttac

SEQ ID NO: 940604 - DNA, 33 bp, Homo sapien
cttgtggctgtaaacctacatcttaacatttac

SEQ ID NO: 940605 - DNA, 33 bp, Homo sapien
ctctgtggggcttcagaagagcttattttaaga

SEQ ID NO: 940606 - DNA, 33 bp, Homo sapien
ctctgtggggcttcaggagagcttattttaaga

SEQ ID NO: 940607 - DNA, 33 bp, Homo sapien
acttcgctggtaatttcaaaagcaatatgttga

SEQ ID NO: 940608 - DNA, 33 bp, Homo sapien
acttcgctggtaatttgaaaagcaatatgttga

SEQ ID NO: 940609 - DNA, 33 bp, Homo sapien
ctcagaaagtcgccccccaatgggatcggaagc

SEQ ID NO: 940610 - DNA, 33 bp, Homo sapien
ctcagaaagtcgcccctcaatgggatcggaagc

SEQ ID NO: 940611 - DNA, 33 bp, Homo sapien
tggtaagaagatcagcaagaaggctgcagtgac

SEQ ID NO: 940612 - DNA, 33 bp, Homo sapien
tggtaagaagatcagcgagaaggctgcagtgac

SEQ ID NO: 940613 - DNA, 33 bp, Homo sapien
ttaaggaaatacaacacgtccactctcttctgt

SEQ ID NO: 940614 - DNA, 33 bp, Homo sapien
ttaaggaaatacaacatgtccactctcttctgt

SEQ ID NO: 940615 - DNA, 33 bp, Homo sapien
gcaaggtcatacctacacttaagttacctgaag

SEQ ID NO: 940616 - DNA, 33 bp, Homo sapien
gcaaggtcatacctacccttaagttacctgaag

SEQ ID NO: 940617 - DNA, 33 bp, Homo sapien
acagtctggataaaaacctgaaaaattctatcc

SEQ ID NO: 940618 - DNA, 33 bp, Homo sapien
acagtctggataaaaatctgaaaaattctatcc

SEQ ID NO: 940619 - DNA, 33 bp, Homo sapien
atgaaacactggtaacaatttgtccgaaacgcc

SEQ ID NO: 940620 - DNA, 33 bp, Homo sapien
atgaaacactggtaaccatttgtccgaaacgcc

SEQ ID NO: 940621 - DNA, 33 bp, Homo sapien
ttttctcattgaataaagaatgtgtattgattt

SEQ ID NO: 940622 - DNA, 33 bp, Homo sapien
ttttctcattgaataaggaatgtgtattgattt

SEQ ID NO: 940623 - DNA, 33 bp, Homo sapien
gaaatatagtttaagcaatgagttacttaaaaa

SEQ ID NO: 940624 - DNA, 33 bp, Homo sapien
gaaatatagtttaagccatgagttacttaaaaa

SEQ ID NO: 940625 - DNA, 33 bp, Homo sapien
atcagcgaacctttgaactttgccgctggtagg

SEQ ID NO: 940626 - DNA, 33 bp, Homo sapien
atcagcgaacctttgagctttgccgctggtagg

SEQ ID NO: 940627 - DNA, 33 bp, Homo sapien
ttctccagaaaaataacgtccaaccaaagcatg

SEQ ID NO: 940628 - DNA, 33 bp, Homo sapien
ttctccagaaaaataatgtccaaccaaagcatg

SEQ ID NO: 940629 - DNA, 33 bp, Homo sapien
cttgagtttgtaaggacgagtaagaccttgtgg

SEQ ID NO: 940630 - DNA, 33 bp, Homo sapien
cttgagtttgtaaggatgagtaagaccttgtgg

SEQ ID NO: 940631 - DNA, 33 bp, Homo sapien
catggcacaaaaataaatgacttcccctttgta

SEQ ID NO: 940632 - DNA, 33 bp, Homo sapien
catggcacaaaaataagtgacttcccctttgta

SEQ ID NO: 940633 - DNA, 33 bp, Homo sapien
caggcggctctacggcaagcgaggactgtggtg

SEQ ID NO: 940634 - DNA, 33 bp, Homo sapien
caggcggctctacggcgagcgaggactgtggtg

SEQ ID NO: 940635 - DNA, 33 bp, Homo sapien
tagaataattgggccccagaacgacgtgcagtt

SEQ ID NO: 940636 - DNA, 33 bp, Homo sapien
tagaataattgggccctagaacgacgtgcagtt

SEQ ID NO: 940637 - DNA, 33 bp, Homo sapien
acaaattgttaagtgagccccaaacgtgaagct

SEQ ID NO: 940638 - DNA, 33 bp, Homo sapien
acaaattgttaagtgatccccaaacgtgaagct

SEQ ID NO: 940639 - DNA, 33 bp, Homo sapien
cacgtacaccggcataaaaggaggcaagacgct

SEQ ID NO: 940640 - DNA, 33 bp, Homo sapien
cacgtacaccggcatacaaggaggcaagacgct

SEQ ID NO: 940641 - DNA, 33 bp, Homo sapien
cagtgcctcacactacaagggaagatggtggag

SEQ ID NO: 940642 - DNA, 33 bp, Homo sapien
cagtgcctcacactacgagggaagatggtggag

SEQ ID NO: 940643 - DNA, 33 bp, Homo sapien
ttggtagcttttcacacctgggtatgactcgaa

SEQ ID NO: 940644 - DNA, 33 bp, Homo sapien
ttggtagcttttcacagctgggtatgactcgaa

SEQ ID NO: 940645 - DNA, 33 bp, Homo sapien
aaaatcacagagaccacgcagtgagatatttgg

SEQ ID NO: 940646 - DNA, 33 bp, Homo sapien
aaaatcacagagaccatgcagtgagatatttgg

SEQ ID NO: 940647 - DNA, 33 bp, Homo sapien
cagatgcagtttccaaaagcagtgtacatcctg

SEQ ID NO: 940648 - DNA, 33 bp, Homo sapien
cagatgcagtttccaagagcagtgtacatcctg

SEQ ID NO: 940649 - DNA, 33 bp, Homo sapien
cagactggagcaaaaaatgggtgtattaacttt

SEQ ID NO: 940650 - DNA, 33 bp, Homo sapien
cagactggagcaaaaattgggtgtattaacttt

SEQ ID NO: 940651 - DNA, 33 bp, Homo sapien
ttgtctgagtccttgaaacgttactcagctaac

SEQ ID NO: 940652 - DNA, 33 bp, Homo sapien
ttgtctgagtccttgacacgttactcagctaac

SEQ ID NO: 940653 - DNA, 33 bp, Homo sapien
tggagctgtcttagaaattagcatctgcagaca

SEQ ID NO: 940654 - DNA, 33 bp, Homo sapien
tggagctgtcttagaacttagcatctgcagaca

SEQ ID NO: 940655 - DNA, 33 bp, Homo sapien
taggggccttcaaacaacaggcgtttattctcc

SEQ ID NO: 940656 - DNA, 33 bp, Homo sapien
taggggccttcaaacagcaggcgtttattctcc

SEQ ID NO: 940657 - DNA, 33 bp, Homo sapien
cgagcctgcaattgaccgcggaagccagtgccc

SEQ ID NO: 940658 - DNA, 33 bp, Homo sapien
cgagcctgcaattgactgcggaagccagtgccc

SEQ ID NO: 940659 - DNA, 33 bp, Homo sapien
ccacatgaggagacgcaagggagcgatttccat

SEQ ID NO: 940660 - DNA, 33 bp, Homo sapien
ccacatgaggagacgcgagggagcgatttccat

SEQ ID NO: 940661 - DNA, 33 bp, Homo sapien
cttgaaggcttcagaacaggtgtaacagggatg

SEQ ID NO: 940662 - DNA, 33 bp, Homo sapien
cttgaaggcttcagaagaggtgtaacagggatg

SEQ ID NO: 940663 - DNA, 33 bp, Homo sapien
aaggcagaaagaataacagccagtggcagtgga

SEQ ID NO: 940664 - DNA, 33 bp, Homo sapien
aaggcagaaagaataatagccagtggcagtgga

SEQ ID NO: 940665 - DNA, 33 bp, Homo sapien
cgaataagctacaacgaaggtgcccctgggccg

SEQ ID NO: 940666 - DNA, 33 bp, Homo sapien
cgaataagctacaacgcaggtgcccctgggccg

SEQ ID NO: 940667 - DNA, 33 bp, Homo sapien
agagccttcagtggggaactaagagcaggccgg

SEQ ID NO: 940668 - DNA, 33 bp, Homo sapien
agagccttcagtgggggactaagagcaggccgg

SEQ ID NO: 940669 - DNA, 33 bp, Homo sapien
ggcatcttctgctctaaaaactgctgaggactg

SEQ ID NO: 940670 - DNA, 33 bp, Homo sapien
ggcatcttctgctctagaaactgctgaggactg

SEQ ID NO: 940671 - DNA, 33 bp, Homo sapien
ggtttttctatgtcgtaacaataatgatctctt

SEQ ID NO: 940672 - DNA, 33 bp, Homo sapien
ggtttttctatgtcgtcacaataatgatctctt

SEQ ID NO: 940673 - DNA, 33 bp, Homo sapien
ttgcagatctgaacaccaacatcattgaccaat

SEQ ID NO: 940674 - DNA, 33 bp, Homo sapien
ttgcagatctgaacacgaacatcattgaccaat

SEQ ID NO: 940675 - DNA, 33 bp, Homo sapien
gaaggaggcccctagaacagagtatggcatctg

SEQ ID NO: 940676 - DNA, 33 bp, Homo sapien
gaaggaggcccctagagcagagtatggcatctg

SEQ ID NO: 940677 - DNA, 33 bp, Homo sapien
agaatgtggtctgtccagagagcagtggcatag

SEQ ID NO: 940678 - DNA, 33 bp, Homo sapien
agaatgtggtctgtccggagagcagtggcatag

SEQ ID NO: 940679 - DNA, 33 bp, Homo sapien
tcacccagccggtgcacacacagccacggtgtg

SEQ ID NO: 940680 - DNA, 33 bp, Homo sapien
tcacccagccggtgcatacacagccacggtgtg

SEQ ID NO: 940681 - DNA, 33 bp, Homo sapien
gtgtctgctggggacacggtcggagatgcagga

SEQ ID NO: 940682 - DNA, 33 bp, Homo sapien
gtgtctgctggggacatggtcggagatgcagga

SEQ ID NO: 940683 - DNA, 33 bp, Homo sapien
ggacagaaaggccatcaagtatctgccatgcat

SEQ ID NO: 940684 - DNA, 33 bp, Homo sapien
ggacagaaaggccatcgagtatctgccatgcat

SEQ ID NO: 940685 - DNA, 33 bp, Homo sapien
gtcatctcctggtgcacggaacagcgactttgc

SEQ ID NO: 940686 - DNA, 33 bp, Homo sapien
gtcatctcctggtgcatggaacagcgactttgc

SEQ ID NO: 940687 - DNA, 33 bp, Homo sapien
cgctgaggctttgtgccaaagagaaacagaaaa

SEQ ID NO: 940688 - DNA, 33 bp, Homo sapien
cgctgaggctttgtgctaaagagaaacagaaaa

SEQ ID NO: 940689 - DNA, 33 bp, Homo sapien
tatcctaattggagagaaccaacaattaacagc

SEQ ID NO: 940690 - DNA, 33 bp, Homo sapien
tatcctaattggagaggaccaacaattaacagc

SEQ ID NO: 940691 - DNA, 33 bp, Homo sapien
aaaaacgactgtcagaaactagaacacaccacc

SEQ ID NO: 940692 - DNA, 33 bp, Homo sapien
aaaaacgactgtcagagactagaacacaccacc

SEQ ID NO: 940693 - DNA, 33 bp, Homo sapien
tcttattcacctgttacgtacatgggcttctaa

SEQ ID NO: 940694 - DNA, 33 bp, Homo sapien
tcttattcacctgttatgtacatgggcttctaa

SEQ ID NO: 940695 - DNA, 33 bp, Homo sapien
atagcaggaaaatatcaattactctcacccctt

SEQ ID NO: 940696 - DNA, 33 bp, Homo sapien
atagcaggaaaatatcgattactctcacccctt

SEQ ID NO: 940697 - DNA, 33 bp, Homo sapien
gtccttgtaaactgtgaactgcgcttggtgctg

SEQ ID NO: 940698 - DNA, 33 bp, Homo sapien
gtccttgtaaactgtggactgcgcttggtgctg

SEQ ID NO: 940699 - DNA, 33 bp, Homo sapien
cgaggacaaatgctgaaatgtttgagacttccc

SEQ ID NO: 940700 - DNA, 33 bp, Homo sapien
cgaggacaaatgctgagatgtttgagacttccc

SEQ ID NO: 940701 - DNA, 33 bp, Homo sapien
aaaccactctgtttgacgctatgatgatggata

SEQ ID NO: 940702 - DNA, 33 bp, Homo sapien
aaaccactctgtttgatgctatgatgatggata

SEQ ID NO: 940703 - DNA, 33 bp, Homo sapien
accatctcgggtgtgaccgctaacatcctacac

SEQ ID NO: 940704 - DNA, 33 bp, Homo sapien
accatctcgggtgtgatcgctaacatcctacac

SEQ ID NO: 940705 - DNA, 33 bp, Homo sapien
acgagttcttacgcacacccttcacagctgagg

SEQ ID NO: 940706 - DNA, 33 bp, Homo sapien
acgagttcttacgcacgcccttcacagctgagg

SEQ ID NO: 940707 - DNA, 33 bp, Homo sapien
gcggatccatcttgccactggtgacgttcactg

SEQ ID NO: 940708 - DNA, 33 bp, Homo sapien
gcggatccatcttgccgctggtgacgttcactg

SEQ ID NO: 940709 - DNA, 33 bp, Homo sapien
aggtcagagtggaaatgaaacaaatgtgattct

SEQ ID NO: 940710 - DNA, 33 bp, Homo sapien
aggtcagagtggaaattaaacaaatgtgattct

SEQ ID NO: 940711 - DNA, 33 bp, Homo sapien
cagagaaccccaagcaagttaagtgcaaagaaa

SEQ ID NO: 940712 - DNA, 33 bp, Homo sapien
cagagaaccccaagcaggttaagtgcaaagaaa

SEQ ID NO: 940713 - DNA, 33 bp, Homo sapien
cacaggttgtaagatacgccagagggaagctgg

SEQ ID NO: 940714 - DNA, 33 bp, Homo sapien
cacaggttgtaagatatgccagagggaagctgg

SEQ ID NO: 940715 - DNA, 33 bp, Homo sapien
gctggcgttcgcgacgaaccatgctcaatcttt

SEQ ID NO: 940716 - DNA, 33 bp, Homo sapien
gctggcgttcgcgacgcaccatgctcaatcttt

SEQ ID NO: 940717 - DNA, 33 bp, Homo sapien
atcaaatttgggatagcattggtcagtataact

SEQ ID NO: 940718 - DNA, 33 bp, Homo sapien
atcaaatttgggatagtattggtcagtataact

SEQ ID NO: 940719 - DNA, 33 bp, Homo sapien
tcaaaccatcaaaagccaaagacagaaatttga

SEQ ID NO: 940720 - DNA, 33 bp, Homo sapien
tcaaaccatcaaaagcgaaagacagaaatttga

SEQ ID NO: 940721 - DNA, 33 bp, Homo sapien
gatgtgtaagaacagcaaagagaactggacagg

SEQ ID NO: 940722 - DNA, 33 bp, Homo sapien
gatgtgtaagaacagcgaagagaactggacagg

SEQ ID NO: 940723 - DNA, 33 bp, Homo sapien
cgtattattggaaatcacaccaatttgggggtt

SEQ ID NO: 940724 - DNA, 33 bp, Homo sapien
cgtattattggaaatcgcaccaatttgggggtt

SEQ ID NO: 940725 - DNA, 33 bp, Homo sapien
acgtaggaagaataaaatctcatccaaacacaa

SEQ ID NO: 940726 - DNA, 33 bp, Homo sapien
acgtaggaagaataaagtctcatccaaacacaa

SEQ ID NO: 940727 - DNA, 33 bp, Homo sapien
tggaccggagcgatcacggctacagcagcagcc

SEQ ID NO: 940728 - DNA, 33 bp, Homo sapien
tggaccggagcgatcatggctacagcagcagcc

SEQ ID NO: 940729 - DNA, 33 bp, Homo sapien
ctagatgccaaaaatacgtgtctcctaagctca

SEQ ID NO: 940730 - DNA, 33 bp, Homo sapien
ctagatgccaaaaatatgtgtctcctaagctca

SEQ ID NO: 940731 - DNA, 33 bp, Homo sapien
taaatggatgctttaaggctgagacaggtctct

SEQ ID NO: 940732 - DNA, 33 bp, Homo sapien
taaatggatgctttaatgctgagacaggtctct

SEQ ID NO: 940733 - DNA, 33 bp, Homo sapien
ttgagtggaaacaggccacagttcgggcctggg

SEQ ID NO: 940734 - DNA, 33 bp, Homo sapien
ttgagtggaaacaggctacagttcgggcctggg

SEQ ID NO: 940735 - DNA, 33 bp, Homo sapien
ccatccccagggcagacgatgccgcttctcagt

SEQ ID NO: 940736 - DNA, 33 bp, Homo sapien
ccatccccagggcagatgatgccgcttctcagt

SEQ ID NO: 940737 - DNA, 33 bp, Homo sapien
gactcctttgaacatgaataccagacacggagg

SEQ ID NO: 940738 - DNA, 33 bp, Homo sapien
gactcctttgaacatggataccagacacggagg

SEQ ID NO: 940739 - DNA, 33 bp, Homo sapien
ggcagagtttcaccgacgtctgagagctagttt

SEQ ID NO: 940740 - DNA, 33 bp, Homo sapien
ggcagagtttcaccgatgtctgagagctagttt

SEQ ID NO: 940741 - DNA, 33 bp, Homo sapien
gtttgggccctacttgaatttaagccatccagt

SEQ ID NO: 940742 - DNA, 33 bp, Homo sapien
gtttgggccctacttgcatttaagccatccagt

SEQ ID NO: 940743 - DNA, 33 bp, Homo sapien
attagagatgaaaatgcagttataccatatatg

SEQ ID NO: 940744 - DNA, 33 bp, Homo sapien
attagagatgaaaatgtagttataccatatatg

SEQ ID NO: 940745 - DNA, 33 bp, Homo sapien
gcctgatggtgatggaagccctgactgtcatgc

SEQ ID NO: 940746 - DNA, 33 bp, Homo sapien
gcctgatggtgatggaggccctgactgtcatgc

SEQ ID NO: 940747 - DNA, 33 bp, Homo sapien
ctctggctggtgtggacaagcccttaactgaga

SEQ ID NO: 940748 - DNA, 33 bp, Homo sapien
ctctggctggtgtggagaagcccttaactgaga

SEQ ID NO: 940749 - DNA, 33 bp, Homo sapien
tctgtagcacctacaacgtctgaggcctgaagt

SEQ ID NO: 940750 - DNA, 33 bp, Homo sapien
tctgtagcacctacaatgtctgaggcctgaagt

SEQ ID NO: 940751 - DNA, 33 bp, Homo sapien
ataacctgtgtttaaaagtgtgttaacagcatt

SEQ ID NO: 940752 - DNA, 33 bp, Homo sapien
ataacctgtgtttaaaggtgtgttaacagcatt

SEQ ID NO: 940753 - DNA, 33 bp, Homo sapien
tttatatagcaccagtaaaagttattccaaata

SEQ ID NO: 940754 - DNA, 33 bp, Homo sapien
tttatatagcaccagttaaagttattccaaata

SEQ ID NO: 940755 - DNA, 33 bp, Homo sapien
ccatgctgagagataccgacatccccaagtctc

SEQ ID NO: 940756 - DNA, 33 bp, Homo sapien
ccatgctgagagatactgacatccccaagtctc

SEQ ID NO: 940757 - DNA, 33 bp, Homo sapien
aaggtatttgtgcaaaaattcaggaggagatgg

SEQ ID NO: 940758 - DNA, 33 bp, Homo sapien
aaggtatttgtgcaaagattcaggaggagatgg

SEQ ID NO: 940759 - DNA, 33 bp, Homo sapien
atgcatgctatatgcacccttattgatcgaaat

SEQ ID NO: 940760 - DNA, 33 bp, Homo sapien
atgcatgctatatgcatccttattgatcgaaat

SEQ ID NO: 940761 - DNA, 33 bp, Homo sapien
cctcttccacgtgagacggtacaggagggagct

SEQ ID NO: 940762 - DNA, 33 bp, Homo sapien
cctcttccacgtgagatggtacaggagggagct

SEQ ID NO: 940763 - DNA, 33 bp, Homo sapien
tcatgtctaaaatgtaagtaaagttcaaacttt

SEQ ID NO: 940764 - DNA, 33 bp, Homo sapien
tcatgtctaaaatgtatgtaaagttcaaacttt

SEQ ID NO: 940765 - DNA, 33 bp, Homo sapien
cacaaagcctaccccacaaaagtagagtctgct

SEQ ID NO: 940766 - DNA, 33 bp, Homo sapien
cacaaagcctaccccagaaaagtagagtctgct

SEQ ID NO: 940767 - DNA, 33 bp, Homo sapien
agtagttgactgaaacactgttatgtggcaatg

SEQ ID NO: 940768 - DNA, 33 bp, Homo sapien
agtagttgactgaaacgctgttatgtggcaatg

SEQ ID NO: 940769 - DNA, 33 bp, Homo sapien
ccagcctcggtgacaggctaagcaagagagagg

SEQ ID NO: 940770 - DNA, 33 bp, Homo sapien
ccagcctcggtgacagtctaagcaagagagagg

SEQ ID NO: 940771 - DNA, 33 bp, Homo sapien
cgtgacgggatactgcaaagatgttaagtgcgg

SEQ ID NO: 940772 - DNA, 33 bp, Homo sapien
cgtgacgggatactgcgaagatgttaagtgcgg

SEQ ID NO: 940773 - DNA, 33 bp, Homo sapien
accctacacagagcgacacttctaacggggccc

SEQ ID NO: 940774 - DNA, 33 bp, Homo sapien
accctacacagagcgatacttctaacggggccc

SEQ ID NO: 940775 - DNA, 33 bp, Homo sapien
cagagcaagagcctccaaagattccagactgaa

SEQ ID NO: 940776 - DNA, 33 bp, Homo sapien
cagagcaagagcctccgaagattccagactgaa

SEQ ID NO: 940777 - DNA, 33 bp, Homo sapien
tgccgtgagtcagggacgttctaagagcaggag

SEQ ID NO: 940778 - DNA, 33 bp, Homo sapien
tgccgtgagtcagggatgttctaagagcaggag

SEQ ID NO: 940779 - DNA, 33 bp, Homo sapien
gcattctaaccttacgaatattccctttggctt

SEQ ID NO: 940780 - DNA, 33 bp, Homo sapien
gcattctaaccttacggatattccctttggctt

SEQ ID NO: 940781 - DNA, 33 bp, Homo sapien
gcactgtgagagtggccgattctccctgtctcc

SEQ ID NO: 940782 - DNA, 33 bp, Homo sapien
gcactgtgagagtggctgattctccctgtctcc

SEQ ID NO: 940783 - DNA, 33 bp, Homo sapien
attttgtggttgttaccgagcaccacagcagcg

SEQ ID NO: 940784 - DNA, 33 bp, Homo sapien
attttgtggttgttactgagcaccacagcagcg

SEQ ID NO: 940785 - DNA, 33 bp, Homo sapien
accagcatctctagaacgtgaacccctcgaggg

SEQ ID NO: 940786 - DNA, 33 bp, Homo sapien
accagcatctctagaatgtgaacccctcgaggg

SEQ ID NO: 940787 - DNA, 33 bp, Homo sapien
tacataaagaagtgccaccaatgccaacggtcc

SEQ ID NO: 940788 - DNA, 33 bp, Homo sapien
tacataaagaagtgccgccaatgccaacggtcc

SEQ ID NO: 940789 - DNA, 33 bp, Homo sapien
taataacaaatttgcaacgactgagctcttcca

SEQ ID NO: 940790 - DNA, 33 bp, Homo sapien
taataacaaatttgcatcgactgagctcttcca

SEQ ID NO: 940791 - DNA, 33 bp, Homo sapien
cttccagcacacaaagacactgtactaaatgcg

SEQ ID NO: 940792 - DNA, 33 bp, Homo sapien
cttccagcacacaaaggcactgtactaaatgcg

SEQ ID NO: 940793 - DNA, 33 bp, Homo sapien
aggaagaaaacatcagcagttctggttttgaat

SEQ ID NO: 940794 - DNA, 33 bp, Homo sapien
aggaagaaaacatcaggagttctggttttgaat

SEQ ID NO: 940795 - DNA, 33 bp, Homo sapien
cctaccagagcaattacgttgaatggcaaattg

SEQ ID NO: 940796 - DNA, 33 bp, Homo sapien
cctaccagagcaattatgttgaatggcaaattg

SEQ ID NO: 940797 - DNA, 33 bp, Homo sapien
caccaattatagtacagggaacccaatttccaa

SEQ ID NO: 940798 - DNA, 33 bp, Homo sapien
caccaattatagtacatggaacccaatttccaa

SEQ ID NO: 940799 - DNA, 33 bp, Homo sapien
cccaggccatcaagcactcggactccaggggaa

SEQ ID NO: 940800 - DNA, 33 bp, Homo sapien
cccaggccatcaagcattcggactccaggggaa

SEQ ID NO: 940801 - DNA, 33 bp, Homo sapien
taaaatccaacaccaaaggcaaaatccatgaat

SEQ ID NO: 940802 - DNA, 33 bp, Homo sapien
taaaatccaacaccaatggcaaaatccatgaat

SEQ ID NO: 940803 - DNA, 33 bp, Homo sapien
taatcactggatcacacagtaagagaatgtttg

SEQ ID NO: 940804 - DNA, 33 bp, Homo sapien
taatcactggatcacatagtaagagaatgtttg

SEQ ID NO: 940805 - DNA, 33 bp, Homo sapien
cttgcattgcattccccctaatttgagaatttc

SEQ ID NO: 940806 - DNA, 33 bp, Homo sapien
cttgcattgcattcccgctaatttgagaatttc

SEQ ID NO: 940807 - DNA, 33 bp, Homo sapien
acactgccttttcaataaggttgctttctttta

SEQ ID NO: 940808 - DNA, 33 bp, Homo sapien
acactgccttttcaatgaggttgctttctttta

SEQ ID NO: 940809 - DNA, 33 bp, Homo sapien
cattctccaaaatagactagatgaagaaaatgt

SEQ ID NO: 940810 - DNA, 33 bp, Homo sapien
cattctccaaaatagagtagatgaagaaaatgt

SEQ ID NO: 940811 - DNA, 33 bp, Homo sapien
cagccgcaacatccacacattagaaacaaaccg

SEQ ID NO: 940812 - DNA, 33 bp, Homo sapien
cagccgcaacatccacgcattagaaacaaaccg

SEQ ID NO: 940813 - DNA, 33 bp, Homo sapien
gaggggtgatttcaacaaaccaggaaacacagt

SEQ ID NO: 940814 - DNA, 33 bp, Homo sapien
gaggggtgatttcaaccaaccaggaaacacagt

SEQ ID NO: 940815 - DNA, 33 bp, Homo sapien
ccttttggtcatgtgcaaaaaagcaaaggcctc

SEQ ID NO: 940816 - DNA, 33 bp, Homo sapien
ccttttggtcatgtgcgaaaaagcaaaggcctc

SEQ ID NO: 940817 - DNA, 33 bp, Homo sapien
tgggttgaagcaggaacaggtctccagccaggg

SEQ ID NO: 940818 - DNA, 33 bp, Homo sapien
tgggttgaagcaggaagaggtctccagccaggg

SEQ ID NO: 940819 - DNA, 33 bp, Homo sapien
actagtgcttagtactcagcagagactatgact

SEQ ID NO: 940820 - DNA, 33 bp, Homo sapien
actagtgcttagtacttagcagagactatgact

SEQ ID NO: 940821 - DNA, 33 bp, Homo sapien
ttgtgttggttatcaaactgccatttgtcattt

SEQ ID NO: 940822 - DNA, 33 bp, Homo sapien
ttgtgttggttatcaagctgccatttgtcattt

SEQ ID NO: 940823 - DNA, 33 bp, Homo sapien
gtgtacacaaagggacacgtggacaaatacata

SEQ ID NO: 940824 - DNA, 33 bp, Homo sapien
gtgtacacaaagggacgcgtggacaaatacata

SEQ ID NO: 940825 - DNA, 33 bp, Homo sapien
acacagcagcgggatacagacggtggtccctcc

SEQ ID NO: 940826 - DNA, 33 bp, Homo sapien
acacagcagcgggatatagacggtggtccctcc

SEQ ID NO: 940827 - DNA, 33 bp, Homo sapien
cagctctcaggaggaaaacactcttgagagaag

SEQ ID NO: 940828 - DNA, 33 bp, Homo sapien
cagctctcaggaggaagacactcttgagagaag

SEQ ID NO: 940829 - DNA, 33 bp, Homo sapien
agggtcaggaataagccgagtccgtacgccaaa

SEQ ID NO: 940830 - DNA, 33 bp, Homo sapien
agggtcaggaataagcggagtccgtacgccaaa

SEQ ID NO: 940831 - DNA, 33 bp, Homo sapien
gggatcctgtgctatgaagggacaggagaaggt

SEQ ID NO: 940832 - DNA, 33 bp, Homo sapien
gggatcctgtgctatgtagggacaggagaaggt

SEQ ID NO: 940833 - DNA, 33 bp, Homo sapien
ttaaaaattctagaaactctggatgtggaaaac

SEQ ID NO: 940834 - DNA, 33 bp, Homo sapien
ttaaaaattctagaaattctggatgtggaaaac

SEQ ID NO: 940835 - DNA, 33 bp, Homo sapien
ccttgtgtctttgcccactagggtcttggggag

SEQ ID NO: 940836 - DNA, 33 bp, Homo sapien
ccttgtgtctttgcccgctagggtcttggggag

SEQ ID NO: 940837 - DNA, 33 bp, Homo sapien
acaggcaccagcagacgaggtagttggaggaga

SEQ ID NO: 940838 - DNA, 33 bp, Homo sapien
acaggcaccagcagactaggtagttggaggaga

SEQ ID NO: 940839 - DNA, 33 bp, Homo sapien
agaaaggccaactgccacccagaagagagtggg

SEQ ID NO: 940840 - DNA, 33 bp, Homo sapien
agaaaggccaactgccgcccagaagagagtggg

SEQ ID NO: 940841 - DNA, 33 bp, Homo sapien
gaattcaagaatcgtaagaaaacactactaatg

SEQ ID NO: 940842 - DNA, 33 bp, Homo sapien
gaattcaagaatcgtaggaaaacactactaatg

SEQ ID NO: 940843 - DNA, 33 bp, Homo sapien
gaggcgcatggccaccggagaacttgcgagact

SEQ ID NO: 940844 - DNA, 33 bp, Homo sapien
gaggcgcatggccacctgagaacttgcgagact

SEQ ID NO: 940845 - DNA, 33 bp, Homo sapien
caggcctgcactaaacaacatcccgagtgacac

SEQ ID NO: 940846 - DNA, 33 bp, Homo sapien
caggcctgcactaaacgacatcccgagtgacac

SEQ ID NO: 940847 - DNA, 33 bp, Homo sapien
cacggcgactgcatcacgttacgttcctgcccg

SEQ ID NO: 940848 - DNA, 33 bp, Homo sapien
cacggcgactgcatcaggttacgttcctgcccg

SEQ ID NO: 940849 - DNA, 33 bp, Homo sapien
gctttggggatcaaataaaaaaaattgttgccc

SEQ ID NO: 940850 - DNA, 33 bp, Homo sapien
gctttggggatcaaatcaaaaaaattgttgccc

SEQ ID NO: 940851 - DNA, 33 bp, Homo sapien
gccatcagcaagcctgcagcagccactgccaag

SEQ ID NO: 940852 - DNA, 33 bp, Homo sapien
gccatcagcaagcctgtagcagccactgccaag

SEQ ID NO: 940853 - DNA, 33 bp, Homo sapien
tggcttctgatttgaacaggatcagacctcaag

SEQ ID NO: 940854 - DNA, 33 bp, Homo sapien
tggcttctgatttgaataggatcagacctcaag

SEQ ID NO: 940855 - DNA, 33 bp, Homo sapien
aattaaagagaagtctcaaaacgacgccactgg

SEQ ID NO: 940856 - DNA, 33 bp, Homo sapien
aattaaagagaagtctgaaaacgacgccactgg

SEQ ID NO: 940857 - DNA, 33 bp, Homo sapien
aaccatgaaaatgaccaaagacgtcacaaggaa

SEQ ID NO: 940858 - DNA, 33 bp, Homo sapien
aaccatgaaaatgaccgaagacgtcacaaggaa

SEQ ID NO: 940859 - DNA, 33 bp, Homo sapien
aactgtaattttaggacgagagctctgccagac

SEQ ID NO: 940860 - DNA, 33 bp, Homo sapien
aactgtaattttaggatgagagctctgccagac

SEQ ID NO: 940861 - DNA, 33 bp, Homo sapien
gaatgttctaaggaaacgattcatatgcggaaa

SEQ ID NO: 940862 - DNA, 33 bp, Homo sapien
gaatgttctaaggaaatgattcatatgcggaaa

SEQ ID NO: 940863 - DNA, 33 bp, Homo sapien
caaaggaatttccaaccgtaggtgaataattaa

SEQ ID NO: 940864 - DNA, 33 bp, Homo sapien
caaaggaatttccaactgtaggtgaataattaa

SEQ ID NO: 940865 - DNA, 33 bp, Homo sapien
acacagattaacatgaacagagaggtctgactg

SEQ ID NO: 940866 - DNA, 33 bp, Homo sapien
acacagattaacatgagcagagaggtctgactg

SEQ ID NO: 940867 - DNA, 33 bp, Homo sapien
acagcctattgataaacggcacactccgtcagt

SEQ ID NO: 940868 - DNA, 33 bp, Homo sapien
acagcctattgataaatggcacactccgtcagt

SEQ ID NO: 940869 - DNA, 33 bp, Homo sapien
gtatttgcttcagaacagagcaatcatgcacat

SEQ ID NO: 940870 - DNA, 33 bp, Homo sapien
gtatttgcttcagaacggagcaatcatgcacat

SEQ ID NO: 940871 - DNA, 33 bp, Homo sapien
ttccataaactctcacactgagactcttctgca

SEQ ID NO: 940872 - DNA, 33 bp, Homo sapien
ttccataaactctcaccctgagactcttctgca

SEQ ID NO: 940873 - DNA, 33 bp, Homo sapien
gcacacatatgtctcaaagaggcacacagtagc

SEQ ID NO: 940874 - DNA, 33 bp, Homo sapien
gcacacatatgtctcagagaggcacacagtagc

SEQ ID NO: 940875 - DNA, 33 bp, Homo sapien
ttgtgctcctgagagacgtgttggtgtctggcc

SEQ ID NO: 940876 - DNA, 33 bp, Homo sapien
ttgtgctcctgagagatgtgttggtgtctggcc

SEQ ID NO: 940877 - DNA, 33 bp, Homo sapien
gcagatttgctaaaaccctggagagctgcatta

SEQ ID NO: 940878 - DNA, 33 bp, Homo sapien
gcagatttgctaaaactctggagagctgcatta

SEQ ID NO: 940879 - DNA, 33 bp, Homo sapien
caacctcctcgggtgcaatttttctttggatga

SEQ ID NO: 940880 - DNA, 33 bp, Homo sapien
caacctcctcgggtgcgatttttctttggatga

SEQ ID NO: 940881 - DNA, 33 bp, Homo sapien
tggaaccaggccctgcaagaacacggatgacaa

SEQ ID NO: 940882 - DNA, 33 bp, Homo sapien
tggaaccaggccctgcgagaacacggatgacaa

SEQ ID NO: 940883 - DNA, 33 bp, Homo sapien
gcactaagtcgcagccaaaccaatttgcttcat

SEQ ID NO: 940884 - DNA, 33 bp, Homo sapien
gcactaagtcgcagccgaaccaatttgcttcat

SEQ ID NO: 940885 - DNA, 33 bp, Homo sapien
agggtgtttggaataacaagtatttgttcctgc

SEQ ID NO: 940886 - DNA, 33 bp, Homo sapien
agggtgtttggaataagaagtatttgttcctgc

SEQ ID NO: 940887 - DNA, 33 bp, Homo sapien
gggaggatgctgaggagacagagattctgtgtg

SEQ ID NO: 940888 - DNA, 33 bp, Homo sapien
gggaggatgctgaggatacagagattctgtgtg

SEQ ID NO: 940889 - DNA, 33 bp, Homo sapien
cataaagagctgagaaaatgtgttgacgtcgcc

SEQ ID NO: 940890 - DNA, 33 bp, Homo sapien
cataaagagctgagaagatgtgttgacgtcgcc

SEQ ID NO: 940891 - DNA, 33 bp, Homo sapien
acaaaagatggcaagacggtcagagtcaagcac

SEQ ID NO: 940892 - DNA, 33 bp, Homo sapien
acaaaagatggcaagagggtcagagtcaagcac

SEQ ID NO: 940893 - DNA, 33 bp, Homo sapien
gctgagctcttttttcaagtgtgattccagtca

SEQ ID NO: 940894 - DNA, 33 bp, Homo sapien
gctgagctcttttttccagtgtgattccagtca

SEQ ID NO: 940895 - DNA, 33 bp, Homo sapien
cctgctgctctccagagataaagcgaggagagg

SEQ ID NO: 940896 - DNA, 33 bp, Homo sapien
cctgctgctctccagatataaagcgaggagagg

SEQ ID NO: 940897 - DNA, 33 bp, Homo sapien
agccgtcggattccggaacctgctggaccaccc

SEQ ID NO: 940898 - DNA, 33 bp, Homo sapien
agccgtcggattccggcacctgctggaccaccc

SEQ ID NO: 940899 - DNA, 33 bp, Homo sapien
aggacgatctgcatgacggtagctgcttttata

SEQ ID NO: 940900 - DNA, 33 bp, Homo sapien
aggacgatctgcatgagggtagctgcttttata

SEQ ID NO: 940901 - DNA, 33 bp, Homo sapien
ttattaaatgcaatctgaatacagatggatgca

SEQ ID NO: 940902 - DNA, 33 bp, Homo sapien
ttattaaatgcaatcttaatacagatggatgca

SEQ ID NO: 940903 - DNA, 33 bp, Homo sapien
atttgtttatctgatcaaaacatttccgtctaa

SEQ ID NO: 940904 - DNA, 33 bp, Homo sapien
atttgtttatctgatcgaaacatttccgtctaa

SEQ ID NO: 940905 - DNA, 33 bp, Homo sapien
tggccctttttatctcagaaaatgcttcctgcc

SEQ ID NO: 940906 - DNA, 33 bp, Homo sapien
tggccctttttatctcggaaaatgcttcctgcc

SEQ ID NO: 940907 - DNA, 33 bp, Homo sapien
tgaaggtggtcccttgcaagcagtgtggttttg

SEQ ID NO: 940908 - DNA, 33 bp, Homo sapien
tgaaggtggtcccttgtaagcagtgtggttttg

SEQ ID NO: 940909 - DNA, 33 bp, Homo sapien
ttaatttttgagtggaatatttatctcatttat

SEQ ID NO: 940910 - DNA, 33 bp, Homo sapien
ttaatttttgagtggagtatttatctcatttat

SEQ ID NO: 940911 - DNA, 33 bp, Homo sapien
ccatgataaatcaaggacccgtgttattatttc

SEQ ID NO: 940912 - DNA, 33 bp, Homo sapien
ccatgataaatcaaggtcccgtgttattatttc

SEQ ID NO: 940913 - DNA, 33 bp, Homo sapien
caaaattggaccgttaccttataccatacacac

SEQ ID NO: 940914 - DNA, 33 bp, Homo sapien
caaaattggaccgttatcttataccatacacac

SEQ ID NO: 940915 - DNA, 33 bp, Homo sapien
aacaagtttgatatgacagctcattgtagtgct

SEQ ID NO: 940916 - DNA, 33 bp, Homo sapien
aacaagtttgatatgatagctcattgtagtgct

SEQ ID NO: 940917 - DNA, 33 bp, Homo sapien
atccagtgggagaatcaagacagtctctggggg

SEQ ID NO: 940918 - DNA, 33 bp, Homo sapien
atccagtgggagaatcgagacagtctctggggg

SEQ ID NO: 940919 - DNA, 33 bp, Homo sapien
cactattattactttacgccatttcagtcacaa

SEQ ID NO: 940920 - DNA, 33 bp, Homo sapien
cactattattactttatgccatttcagtcacaa

SEQ ID NO: 940921 - DNA, 33 bp, Homo sapien
aagacagagcagaccaacgtcccaagaatgatt

SEQ ID NO: 940922 - DNA, 33 bp, Homo sapien
aagacagagcagaccagcgtcccaagaatgatt

SEQ ID NO: 940923 - DNA, 33 bp, Homo sapien
attagacggcgcctctaaaataacaaggccgtt

SEQ ID NO: 940924 - DNA, 33 bp, Homo sapien
attagacggcgcctctgaaataacaaggccgtt

SEQ ID NO: 940925 - DNA, 33 bp, Homo sapien
caactgtctaacagtcaaccatgatagattggg

SEQ ID NO: 940926 - DNA, 33 bp, Homo sapien
caactgtctaacagtcgaccatgatagattggg

SEQ ID NO: 940927 - DNA, 33 bp, Homo sapien
gtcaggactttaaggaaagaactctgggttttg

SEQ ID NO: 940928 - DNA, 33 bp, Homo sapien
gtcaggactttaaggagagaactctgggttttg

SEQ ID NO: 940929 - DNA, 33 bp, Homo sapien
cctcctcattcgttaccgacgtgctgagccttc

SEQ ID NO: 940930 - DNA, 33 bp, Homo sapien
cctcctcattcgttactgacgtgctgagccttc

SEQ ID NO: 940931 - DNA, 33 bp, Homo sapien
cgttttactccgtgacagctttatcactcctga

SEQ ID NO: 940932 - DNA, 33 bp, Homo sapien
cgttttactccgtgacggctttatcactcctga

SEQ ID NO: 940933 - DNA, 33 bp, Homo sapien
tgtggccggtgtcactcagtcattctactgaag

SEQ ID NO: 940934 - DNA, 33 bp, Homo sapien
tgtggccggtgtcacttagtcattctactgaag

SEQ ID NO: 940935 - DNA, 33 bp, Homo sapien
cacacccctaacttaaagcctagctccaagttt

SEQ ID NO: 940936 - DNA, 33 bp, Homo sapien
cacacccctaacttaaggcctagctccaagttt

SEQ ID NO: 940937 - DNA, 33 bp, Homo sapien
ggaaagagattgactcaactgtgtgtgtatttt

SEQ ID NO: 940938 - DNA, 33 bp, Homo sapien
ggaaagagattgactcgactgtgtgtgtatttt

SEQ ID NO: 940939 - DNA, 33 bp, Homo sapien
ccaaaggcccacatcaagtggacaggactgacc

SEQ ID NO: 940940 - DNA, 33 bp, Homo sapien
ccaaaggcccacatcacgtggacaggactgacc

SEQ ID NO: 940941 - DNA, 33 bp, Homo sapien
aacatttttatgacaacggatatgtatcaatat

SEQ ID NO: 940942 - DNA, 33 bp, Homo sapien
aacatttttatgacaatggatatgtatcaatat

SEQ ID NO: 940943 - DNA, 33 bp, Homo sapien
cagtttaatgctgccccaaaacaatgtatacca

SEQ ID NO: 940944 - DNA, 33 bp, Homo sapien
cagtttaatgctgccctaaaacaatgtatacca

SEQ ID NO: 940945 - DNA, 33 bp, Homo sapien
aaatgaggtcatggggcaaactgctatcctgaa

SEQ ID NO: 940946 - DNA, 33 bp, Homo sapien
aaatgaggtcatggggtaaactgctatcctgaa

SEQ ID NO: 940947 - DNA, 33 bp, Homo sapien
ggtttgcgctacccagcattgaagggtgtatta

SEQ ID NO: 940948 - DNA, 33 bp, Homo sapien
ggtttgcgctacccagtattgaagggtgtatta

SEQ ID NO: 940949 - DNA, 33 bp, Homo sapien
gccccagggccgagaacctaaacagccaggcag

SEQ ID NO: 940950 - DNA, 33 bp, Homo sapien
gccccagggccgagaatctaaacagccaggcag

SEQ ID NO: 940951 - DNA, 33 bp, Homo sapien
acttttttggatagaactggaattggttttccc

SEQ ID NO: 940952 - DNA, 33 bp, Homo sapien
acttttttggatagaattggaattggttttccc

SEQ ID NO: 940953 - DNA, 33 bp, Homo sapien
tgtttgtcaggttccaagagaagaccaaaacca

SEQ ID NO: 940954 - DNA, 33 bp, Homo sapien
tgtttgtcaggttccaggagaagaccaaaacca

SEQ ID NO: 940955 - DNA, 33 bp, Homo sapien
cttggttttccacctgcaatagctgagacatga

SEQ ID NO: 940956 - DNA, 33 bp, Homo sapien
cttggttttccacctgtaatagctgagacatga

SEQ ID NO: 940957 - DNA, 33 bp, Homo sapien
aattttattgtgaaagaatctaatcatagcaac

SEQ ID NO: 940958 - DNA, 33 bp, Homo sapien
aattttattgtgaaaggatctaatcatagcaac

SEQ ID NO: 940959 - DNA, 33 bp, Homo sapien
aagtttctctaagttacgaatccctgaagtgct

SEQ ID NO: 940960 - DNA, 33 bp, Homo sapien
aagtttctctaagttatgaatccctgaagtgct

SEQ ID NO: 940961 - DNA, 33 bp, Homo sapien
tgtcaggggatgtggcacatgaggcaccccatg

SEQ ID NO: 940962 - DNA, 33 bp, Homo sapien
tgtcaggggatgtggcgcatgaggcaccccatg

SEQ ID NO: 940963 - DNA, 33 bp, Homo sapien
acaaaaagattatggcaagagagctcgtggtcc

SEQ ID NO: 940964 - DNA, 33 bp, Homo sapien
acaaaaagattatggcgagagagctcgtggtcc

SEQ ID NO: 940965 - DNA, 33 bp, Homo sapien
aggcaaacctgagacacgactctacacaactag

SEQ ID NO: 940966 - DNA, 33 bp, Homo sapien
aggcaaacctgagacatgactctacacaactag

SEQ ID NO: 940967 - DNA, 33 bp, Homo sapien
acaatactccttggaaataaatgccgcatctta

SEQ ID NO: 940968 - DNA, 33 bp, Homo sapien
acaatactccttggaactaaatgccgcatctta

SEQ ID NO: 940969 - DNA, 33 bp, Homo sapien
cgcttgttccaaaacactaactaacctctttat

SEQ ID NO: 940970 - DNA, 33 bp, Homo sapien
cgcttgttccaaaacattaactaacctctttat

SEQ ID NO: 940971 - DNA, 33 bp, Homo sapien
cttatcaccatcaataaaaactacaaaataata

SEQ ID NO: 940972 - DNA, 33 bp, Homo sapien
cttatcaccatcaatacaaactacaaaataata

SEQ ID NO: 940973 - DNA, 33 bp, Homo sapien
gtttgctttttgtgtacaatactatcaaacttt

SEQ ID NO: 940974 - DNA, 33 bp, Homo sapien
gtttgctttttgtgtataatactatcaaacttt

SEQ ID NO: 940975 - DNA, 33 bp, Homo sapien
ctcaattctttagtagccatgttaacaaaagta

SEQ ID NO: 940976 - DNA, 33 bp, Homo sapien
ctcaattctttagtagtcatgttaacaaaagta

SEQ ID NO: 940977 - DNA, 33 bp, Homo sapien
catcgaggaagttcttaaacttgctggattttt

SEQ ID NO: 940978 - DNA, 33 bp, Homo sapien
catcgaggaagttcttgaacttgctggattttt

SEQ ID NO: 940979 - DNA, 33 bp, Homo sapien
ctctccattttccttaagcctttgcctgtcaat

SEQ ID NO: 940980 - DNA, 33 bp, Homo sapien
ctctccattttccttaggcctttgcctgtcaat

SEQ ID NO: 940981 - DNA, 33 bp, Homo sapien
atgtggcaagtggtaaaaactggcaaacctgga

SEQ ID NO: 940982 - DNA, 33 bp, Homo sapien
atgtggcaagtggtaacaactggcaaacctgga

SEQ ID NO: 940983 - DNA, 33 bp, Homo sapien
cttcaagagaaattccagaaggcaatgttatca

SEQ ID NO: 940984 - DNA, 33 bp, Homo sapien
cttcaagagaaattcctgaaggcaatgttatca

SEQ ID NO: 940985 - DNA, 33 bp, Homo sapien
ctagctcagccctttcccctggtatccagacgt

SEQ ID NO: 940986 - DNA, 33 bp, Homo sapien
ctagctcagccctttcgcctggtatccagacgt

SEQ ID NO: 940987 - DNA, 33 bp, Homo sapien
tctggatttgcaagacacggttatttctgaact

SEQ ID NO: 940988 - DNA, 33 bp, Homo sapien
tctggatttgcaagacgcggttatttctgaact

SEQ ID NO: 940989 - DNA, 33 bp, Homo sapien
tactcaggaagtggaaaccccaggaacagatgg

SEQ ID NO: 940990 - DNA, 33 bp, Homo sapien
tactcaggaagtggaacccccaggaacagatgg

SEQ ID NO: 940991 - DNA, 33 bp, Homo sapien
ttcctggtgtgaaccccggcgacagttcctgtt

SEQ ID NO: 940992 - DNA, 33 bp, Homo sapien
ttcctggtgtgaaccctggcgacagttcctgtt

SEQ ID NO: 940993 - DNA, 33 bp, Homo sapien
atacacatggagcggactacacactggactgca

SEQ ID NO: 940994 - DNA, 33 bp, Homo sapien
atacacatggagcggattacacactggactgca

SEQ ID NO: 940995 - DNA, 33 bp, Homo sapien
agaaaagattgaaaaaataagagccttcagaaa

SEQ ID NO: 940996 - DNA, 33 bp, Homo sapien
agaaaagattgaaaaagtaagagccttcagaaa

SEQ ID NO: 940997 - DNA, 33 bp, Homo sapien
gagcacctgtaagctacatcgctgaatacatct

SEQ ID NO: 940998 - DNA, 33 bp, Homo sapien
gagcacctgtaagctatatcgctgaatacatct

SEQ ID NO: 940999 - DNA, 33 bp, Homo sapien
cctgaaatgccagattaaaacattaggtagaag

SEQ ID NO: 941000 - DNA, 33 bp, Homo sapien
cctgaaatgccagattcaaacattaggtagaag

SEQ ID NO: 941001 - DNA, 33 bp, Homo sapien
ggtgaggagcgtctctcaacatgtctgactctt

SEQ ID NO: 941002 - DNA, 33 bp, Homo sapien
ggtgaggagcgtctctgaacatgtctgactctt

SEQ ID NO: 941003 - DNA, 33 bp, Homo sapien
ttatcccacattttaaccccctggaagagtcag

SEQ ID NO: 941004 - DNA, 33 bp, Homo sapien
ttatcccacattttaatcccctggaagagtcag

SEQ ID NO: 941005 - DNA, 33 bp, Homo sapien
aaattgaaattgtaacaggtaaagtcacagact

SEQ ID NO: 941006 - DNA, 33 bp, Homo sapien
aaattgaaattgtaacgggtaaagtcacagact

SEQ ID NO: 941007 - DNA, 33 bp, Homo sapien
catccaatccatgcaacagagacagaactaaaa

SEQ ID NO: 941008 - DNA, 33 bp, Homo sapien
catccaatccatgcaatagagacagaactaaaa

SEQ ID NO: 941009 - DNA, 33 bp, Homo sapien
agggttgagatgctttcaaacattttttgatgc

SEQ ID NO: 941010 - DNA, 33 bp, Homo sapien
agggttgagatgcttttaaacattttttgatgc

SEQ ID NO: 941011 - DNA, 33 bp, Homo sapien
tgtgtgcacctgattcaataattggaaattgtt

SEQ ID NO: 941012 - DNA, 33 bp, Homo sapien
tgtgtgcacctgattcgataattggaaattgtt

SEQ ID NO: 941013 - DNA, 33 bp, Homo sapien
gtaattacaataaagaaaagttgtcaaaattct

SEQ ID NO: 941014 - DNA, 33 bp, Homo sapien
gtaattacaataaagagaagttgtcaaaattct

SEQ ID NO: 941015 - DNA, 33 bp, Homo sapien
ttgtaatgccccaaaacgattacattagaaaca

SEQ ID NO: 941016 - DNA, 33 bp, Homo sapien
ttgtaatgccccaaaatgattacattagaaaca

SEQ ID NO: 941017 - DNA, 33 bp, Homo sapien
aactatcaacgatggaatattaaaaacacaaaa

SEQ ID NO: 941018 - DNA, 33 bp, Homo sapien
aactatcaacgatggagtattaaaaacacaaaa

SEQ ID NO: 941019 - DNA, 33 bp, Homo sapien
aactcccagttactaacgtgtggtctgagtctg

SEQ ID NO: 941020 - DNA, 33 bp, Homo sapien
aactcccagttactaatgtgtggtctgagtctg

SEQ ID NO: 941021 - DNA, 33 bp, Homo sapien
cgagcagaggtggagacagtcacgaaggctttc

SEQ ID NO: 941022 - DNA, 33 bp, Homo sapien
cgagcagaggtggagagagtcacgaaggctttc

SEQ ID NO: 941023 - DNA, 33 bp, Homo sapien
ataaacccagctgagacggaattttaaatatcc

SEQ ID NO: 941024 - DNA, 33 bp, Homo sapien
ataaacccagctgagatggaattttaaatatcc

SEQ ID NO: 941025 - DNA, 33 bp, Homo sapien
tcatattctcatcatacgtcctatgtttacaag

SEQ ID NO: 941026 - DNA, 33 bp, Homo sapien
tcatattctcatcatatgtcctatgtttacaag

SEQ ID NO: 941027 - DNA, 33 bp, Homo sapien
gtgggagatgatggtacggagaggagccatgta

SEQ ID NO: 941028 - DNA, 33 bp, Homo sapien
gtgggagatgatggtatggagaggagccatgta

SEQ ID NO: 941029 - DNA, 33 bp, Homo sapien
ggtcagctaaacaaccagaatctgaggggccaa

SEQ ID NO: 941030 - DNA, 33 bp, Homo sapien
ggtcagctaaacaaccggaatctgaggggccaa

SEQ ID NO: 941031 - DNA, 33 bp, Homo sapien
ctcctgctccagtactcacgttgacatctacgg

SEQ ID NO: 941032 - DNA, 33 bp, Homo sapien
ctcctgctccagtactgacgttgacatctacgg

SEQ ID NO: 941033 - DNA, 33 bp, Homo sapien
ttacaattctggagacggagaaatccaagatca

SEQ ID NO: 941034 - DNA, 33 bp, Homo sapien
ttacaattctggagactgagaaatccaagatca

SEQ ID NO: 941035 - DNA, 33 bp, Homo sapien
ttggcacttgctaagccatgcacaatatcatct

SEQ ID NO: 941036 - DNA, 33 bp, Homo sapien
ttggcacttgctaagctatgcacaatatcatct

SEQ ID NO: 941037 - DNA, 33 bp, Homo sapien
tgaggattcagatttacggagataataagcctt

SEQ ID NO: 941038 - DNA, 33 bp, Homo sapien
tgaggattcagatttatggagataataagcctt

SEQ ID NO: 941039 - DNA, 33 bp, Homo sapien
cacacacacggataaacacctaagcatacgtaa

SEQ ID NO: 941040 - DNA, 33 bp, Homo sapien
cacacacacggataaatacctaagcatacgtaa

SEQ ID NO: 941041 - DNA, 33 bp, Homo sapien
atgtacctcaaaaattaaatttctgcaaggtac

SEQ ID NO: 941042 - DNA, 33 bp, Homo sapien
atgtacctcaaaaattgaatttctgcaaggtac

SEQ ID NO: 941043 - DNA, 33 bp, Homo sapien
atttttcttttatggaataggcaaggtattaaa

SEQ ID NO: 941044 - DNA, 33 bp, Homo sapien
atttttcttttatggattaggcaaggtattaaa

SEQ ID NO: 941045 - DNA, 33 bp, Homo sapien
tgtgagacccagaagcacctcgtgtttgtccct

SEQ ID NO: 941046 - DNA, 33 bp, Homo sapien
tgtgagacccagaagcgcctcgtgtttgtccct

SEQ ID NO: 941047 - DNA, 33 bp, Homo sapien
tgacatttctgatgaaaacagaaacaaaaagaa

SEQ ID NO: 941048 - DNA, 33 bp, Homo sapien
tgacatttctgatgaagacagaaacaaaaagaa

SEQ ID NO: 941049 - DNA, 33 bp, Homo sapien
ccaacgcctacaggaaacttgcaggacctctct

SEQ ID NO: 941050 - DNA, 33 bp, Homo sapien
ccaacgcctacaggaatcttgcaggacctctct

SEQ ID NO: 941051 - DNA, 33 bp, Homo sapien
ctctctgttacaaatacataggccatataaagg

SEQ ID NO: 941052 - DNA, 33 bp, Homo sapien
ctctctgttacaaatagataggccatataaagg

SEQ ID NO: 941053 - DNA, 33 bp, Homo sapien
taatcatttactagagcacaaattggtcattta

SEQ ID NO: 941054 - DNA, 33 bp, Homo sapien
taatcatttactagaggacaaattggtcattta

SEQ ID NO: 941055 - DNA, 33 bp, Homo sapien
tttttaaaccactgacaccccataaatgaccaa

SEQ ID NO: 941056 - DNA, 33 bp, Homo sapien
tttttaaaccactgacgccccataaatgaccaa

SEQ ID NO: 941057 - DNA, 33 bp, Homo sapien
aaggcttccctgacaccgggcaaataaaacagt

SEQ ID NO: 941058 - DNA, 33 bp, Homo sapien
aaggcttccctgacactgggcaaataaaacagt

SEQ ID NO: 941059 - DNA, 33 bp, Homo sapien
tgtcctttgagatccaacttggtgccatcacct

SEQ ID NO: 941060 - DNA, 33 bp, Homo sapien
tgtcctttgagatccagcttggtgccatcacct

SEQ ID NO: 941061 - DNA, 33 bp, Homo sapien
gggcctacggctcacactcctggcacctgcaac

SEQ ID NO: 941062 - DNA, 33 bp, Homo sapien
gggcctacggctcacattcctggcacctgcaac

SEQ ID NO: 941063 - DNA, 33 bp, Homo sapien
ggagcctgggaaggacacattcaaggacatcat

SEQ ID NO: 941064 - DNA, 33 bp, Homo sapien
ggagcctgggaaggacgcattcaaggacatcat

SEQ ID NO: 941065 - DNA, 33 bp, Homo sapien
ctttcaggtccttacacggcaaaatgtggtgat

SEQ ID NO: 941066 - DNA, 33 bp, Homo sapien
ctttcaggtccttacatggcaaaatgtggtgat

SEQ ID NO: 941067 - DNA, 33 bp, Homo sapien
acatacatgcacatacacatttacacattcata

SEQ ID NO: 941068 - DNA, 33 bp, Homo sapien
acatacatgcacatacgcatttacacattcata

SEQ ID NO: 941069 - DNA, 33 bp, Homo sapien
cacacaagtgaataaacgcacacacaacacgtg

SEQ ID NO: 941070 - DNA, 33 bp, Homo sapien
cacacaagtgaataaatgcacacacaacacgtg

SEQ ID NO: 941071 - DNA, 33 bp, Homo sapien
gatgctgtgtccacaaagtctgtgcacaccagc

SEQ ID NO: 941072 - DNA, 33 bp, Homo sapien
gatgctgtgtccacaaggtctgtgcacaccagc

SEQ ID NO: 941073 - DNA, 33 bp, Homo sapien
gattggtgtggataaccggtcttggggcttgtg

SEQ ID NO: 941074 - DNA, 33 bp, Homo sapien
gattggtgtggataactggtcttggggcttgtg

SEQ ID NO: 941075 - DNA, 33 bp, Homo sapien
attgtttctggtaagaagttttgtagaaagtaa

SEQ ID NO: 941076 - DNA, 33 bp, Homo sapien
attgtttctggtaagaggttttgtagaaagtaa

SEQ ID NO: 941077 - DNA, 33 bp, Homo sapien
aatatctctctctggacaaagaacaggcccact

SEQ ID NO: 941078 - DNA, 33 bp, Homo sapien
aatatctctctctggataaagaacaggcccact

SEQ ID NO: 941079 - DNA, 33 bp, Homo sapien
ttaaaaatgtccaacaaagctaagaagtctact

SEQ ID NO: 941080 - DNA, 33 bp, Homo sapien
ttaaaaatgtccaacagagctaagaagtctact

SEQ ID NO: 941081 - DNA, 33 bp, Homo sapien
tggctacaagaagctgcaaaggcaccaatggtt

SEQ ID NO: 941082 - DNA, 33 bp, Homo sapien
tggctacaagaagctgtaaaggcaccaatggtt

SEQ ID NO: 941083 - DNA, 33 bp, Homo sapien
acacatcccacagatacggagctaataaaccca

SEQ ID NO: 941084 - DNA, 33 bp, Homo sapien
acacatcccacagatatggagctaataaaccca

SEQ ID NO: 941085 - DNA, 33 bp, Homo sapien
aggaagcttttcctaaccaccaactgtgaacat

SEQ ID NO: 941086 - DNA, 33 bp, Homo sapien
aggaagcttttcctaatcaccaactgtgaacat

SEQ ID NO: 941087 - DNA, 33 bp, Homo sapien
gttgctgggatacaaacgaccacagtgtgccct

SEQ ID NO: 941088 - DNA, 33 bp, Homo sapien
gttgctgggatacaaatgaccacagtgtgccct

SEQ ID NO: 941089 - DNA, 33 bp, Homo sapien
ctgtcaagtgtctgtcaagggtgactgctttct

SEQ ID NO: 941090 - DNA, 33 bp, Homo sapien
ctgtcaagtgtctgtcgagggtgactgctttct

SEQ ID NO: 941091 - DNA, 33 bp, Homo sapien
actccacagaaacacagggggtggaagagagag

SEQ ID NO: 941092 - DNA, 33 bp, Homo sapien
actccacagaaacacatggggtggaagagagag

SEQ ID NO: 941093 - DNA, 33 bp, Homo sapien
tgaataaaaggaaataactggccagacaattgt

SEQ ID NO: 941094 - DNA, 33 bp, Homo sapien
tgaataaaaggaaatatctggccagacaattgt

SEQ ID NO: 941095 - DNA, 33 bp, Homo sapien
catactttttagagtaccttgtttctggttcac

SEQ ID NO: 941096 - DNA, 33 bp, Homo sapien
catactttttagagtatcttgtttctggttcac

SEQ ID NO: 941097 - DNA, 33 bp, Homo sapien
gacacgtttactgtcactccattcataacccat

SEQ ID NO: 941098 - DNA, 33 bp, Homo sapien
gacacgtttactgtcagtccattcataacccat

SEQ ID NO: 941099 - DNA, 33 bp, Homo sapien
actgctccgttcccacaacacggatgaggcggg

SEQ ID NO: 941100 - DNA, 33 bp, Homo sapien
actgctccgttcccacgacacggatgaggcggg

SEQ ID NO: 941101 - DNA, 33 bp, Homo sapien
cagggaaggaggttaacaaggaaatgcacagat

SEQ ID NO: 941102 - DNA, 33 bp, Homo sapien
cagggaaggaggttaagaaggaaatgcacagat

SEQ ID NO: 941103 - DNA, 33 bp, Homo sapien
tctaattaaggtgagacgtccaaagcagacaga

SEQ ID NO: 941104 - DNA, 33 bp, Homo sapien
tctaattaaggtgagatgtccaaagcagacaga

SEQ ID NO: 941105 - DNA, 33 bp, Homo sapien
ccaatcgcatcctccactcaagaaagcttgact

SEQ ID NO: 941106 - DNA, 33 bp, Homo sapien
ccaatcgcatcctccattcaagaaagcttgact

SEQ ID NO: 941107 - DNA, 33 bp, Homo sapien
gggcgtcccagtcatcaaatactccccttgcac

SEQ ID NO: 941108 - DNA, 33 bp, Homo sapien
gggcgtcccagtcatcgaatactccccttgcac

SEQ ID NO: 941109 - DNA, 33 bp, Homo sapien
gttctctgcaatcctcaccgcttctgccccaaa

SEQ ID NO: 941110 - DNA, 33 bp, Homo sapien
gttctctgcaatcctcgccgcttctgccccaaa

SEQ ID NO: 941111 - DNA, 33 bp, Homo sapien
tttacggtgaatgagacggaggggaaggaagag

SEQ ID NO: 941112 - DNA, 33 bp, Homo sapien
tttacggtgaatgagatggaggggaaggaagag

SEQ ID NO: 941113 - DNA, 33 bp, Homo sapien
aacagtgtgtcaaaataaactcctggggtctca

SEQ ID NO: 941114 - DNA, 33 bp, Homo sapien
aacagtgtgtcaaaatgaactcctggggtctca

SEQ ID NO: 941115 - DNA, 33 bp, Homo sapien
atgggtaaccacacgccgatttgtgtgacctct

SEQ ID NO: 941116 - DNA, 33 bp, Homo sapien
atgggtaaccacacgctgatttgtgtgacctct

SEQ ID NO: 941117 - DNA, 33 bp, Homo sapien
gtgagtcaacaaaacagctaaacacatcaactt

SEQ ID NO: 941118 - DNA, 33 bp, Homo sapien
gtgagtcaacaaaacatctaaacacatcaactt

SEQ ID NO: 941119 - DNA, 33 bp, Homo sapien
ccttcttgcagtataccctccctccagaccgta

SEQ ID NO: 941120 - DNA, 33 bp, Homo sapien
ccttcttgcagtatactctccctccagaccgta

SEQ ID NO: 941121 - DNA, 33 bp, Homo sapien
acattcagttctgccccgacacattgcccatcc

SEQ ID NO: 941122 - DNA, 33 bp, Homo sapien
acattcagttctgccctgacacattgcccatcc

SEQ ID NO: 941123 - DNA, 33 bp, Homo sapien
ctccagccttgtcacacatgaagataactgcat

SEQ ID NO: 941124 - DNA, 33 bp, Homo sapien
ctccagccttgtcacagatgaagataactgcat

SEQ ID NO: 941125 - DNA, 33 bp, Homo sapien
catcctgggggccttacgattacgggctcatct

SEQ ID NO: 941126 - DNA, 33 bp, Homo sapien
catcctgggggccttatgattacgggctcatct

SEQ ID NO: 941127 - DNA, 33 bp, Homo sapien
gaaggctttgcataacggacactaacattattt

SEQ ID NO: 941128 - DNA, 33 bp, Homo sapien
gaaggctttgcataactgacactaacattattt

SEQ ID NO: 941129 - DNA, 33 bp, Homo sapien
tgcaggcaacttgcaacatgattggaaagaaat

SEQ ID NO: 941130 - DNA, 33 bp, Homo sapien
tgcaggcaacttgcaatatgattggaaagaaat

SEQ ID NO: 941131 - DNA, 33 bp, Homo sapien
gaagatgcaggttccaaggaaagcaaaggagga

SEQ ID NO: 941132 - DNA, 33 bp, Homo sapien
gaagatgcaggttccagggaaagcaaaggagga

SEQ ID NO: 941133 - DNA, 33 bp, Homo sapien
gaggagcataaagcaaacatgggtgatgaaatg

SEQ ID NO: 941134 - DNA, 33 bp, Homo sapien
gaggagcataaagcaagcatgggtgatgaaatg

SEQ ID NO: 941135 - DNA, 33 bp, Homo sapien
tctcattgactttatccatctcaatccaataca

SEQ ID NO: 941136 - DNA, 33 bp, Homo sapien
tctcattgactttatctatctcaatccaataca

SEQ ID NO: 941137 - DNA, 33 bp, Homo sapien
acactgaagaccgaaaaccatgttgaattccac

SEQ ID NO: 941138 - DNA, 33 bp, Homo sapien
acactgaagaccgaaacccatgttgaattccac

SEQ ID NO: 941139 - DNA, 33 bp, Homo sapien
gagatgcctagtcataagattccctcagaagaa

SEQ ID NO: 941140 - DNA, 33 bp, Homo sapien
gagatgcctagtcataggattccctcagaagaa

SEQ ID NO: 941141 - DNA, 33 bp, Homo sapien
tcaaccaaatattcaactgttctccactctagg

SEQ ID NO: 941142 - DNA, 33 bp, Homo sapien
tcaaccaaatattcaagtgttctccactctagg

SEQ ID NO: 941143 - DNA, 33 bp, Homo sapien
ttgtgtaaatataccacgatctgttcattcatt

SEQ ID NO: 941144 - DNA, 33 bp, Homo sapien
ttgtgtaaatataccatgatctgttcattcatt

SEQ ID NO: 941145 - DNA, 33 bp, Homo sapien
gaattatctgcaaacaagctgacgattagaagc

SEQ ID NO: 941146 - DNA, 33 bp, Homo sapien
gaattatctgcaaacaggctgacgattagaagc

SEQ ID NO: 941147 - DNA, 33 bp, Homo sapien
tttgggaattcctaaaatcatgtatacctgtgc

SEQ ID NO: 941148 - DNA, 33 bp, Homo sapien
tttgggaattcctaaagtcatgtatacctgtgc

SEQ ID NO: 941149 - DNA, 33 bp, Homo sapien
tcaggactttctgaatcagaatttcagaggcac

SEQ ID NO: 941150 - DNA, 33 bp, Homo sapien
tcaggactttctgaatgagaatttcagaggcac

SEQ ID NO: 941151 - DNA, 33 bp, Homo sapien
ccccaggtgatcccgacgtagtcagttattgga

SEQ ID NO: 941152 - DNA, 33 bp, Homo sapien
ccccaggtgatcccgatgtagtcagttattgga

SEQ ID NO: 941153 - DNA, 33 bp, Homo sapien
gtttcaactctgtgaacgtactaagagccattg

SEQ ID NO: 941154 - DNA, 33 bp, Homo sapien
gtttcaactctgtgaatgtactaagagccattg

SEQ ID NO: 941155 - DNA, 33 bp, Homo sapien
tggtaaaactagttagaaagatgctatagtaat

SEQ ID NO: 941156 - DNA, 33 bp, Homo sapien
tggtaaaactagttaggaagatgctatagtaat

SEQ ID NO: 941157 - DNA, 33 bp, Homo sapien
gaccaaggaggagccaaaagtttcttcatagac

SEQ ID NO: 941158 - DNA, 33 bp, Homo sapien
gaccaaggaggagccagaagtttcttcatagac

SEQ ID NO: 941159 - DNA, 33 bp, Homo sapien
gttatgaaaatgtaccaaggaattacaccagaa

SEQ ID NO: 941160 - DNA, 33 bp, Homo sapien
gttatgaaaatgtaccgaggaattacaccagaa

SEQ ID NO: 941161 - DNA, 33 bp, Homo sapien
tatttctcctgataaaatgtgagtaatatctcc

SEQ ID NO: 941162 - DNA, 33 bp, Homo sapien
tatttctcctgataaagtgtgagtaatatctcc

SEQ ID NO: 941163 - DNA, 33 bp, Homo sapien
ctgggactttaggcaaagcttttcttggcacct

SEQ ID NO: 941164 - DNA, 33 bp, Homo sapien
ctgggactttaggcaaggcttttcttggcacct

SEQ ID NO: 941165 - DNA, 33 bp, Homo sapien
ggattttacagttgcaagttcattttaagtaca

SEQ ID NO: 941166 - DNA, 33 bp, Homo sapien
ggattttacagttgcacgttcattttaagtaca

SEQ ID NO: 941167 - DNA, 33 bp, Homo sapien
atgctgagaaagtggcagagcaacagttattgt

SEQ ID NO: 941168 - DNA, 33 bp, Homo sapien
atgctgagaaagtggcggagcaacagttattgt

SEQ ID NO: 941169 - DNA, 33 bp, Homo sapien
gagtagtgaaggccaaatacaagcaacttcaca

SEQ ID NO: 941170 - DNA, 33 bp, Homo sapien
gagtagtgaaggccaagtacaagcaacttcaca

SEQ ID NO: 941171 - DNA, 33 bp, Homo sapien; identical to SEQ ID NO: 941169

SEQ ID NO: 941172 - DNA, 33 bp, Homo sapien; identical to SEQ ID NO: 941170

SEQ ID NO: 941173 - DNA, 33 bp, Homo sapien
tttttttagcaaacacacatttttatgccttca

SEQ ID NO: 941174 - DNA, 33 bp, Homo sapien
tttttttagcaaacacccatttttatgccttca

SEQ ID NO: 941175 - DNA, 33 bp, Homo sapien
aatttgatttttaggaagccaatcaaatatgtc

SEQ ID NO: 941176 - DNA, 33 bp, Homo sapien
aatttgatttttaggaggccaatcaaatatgtc

SEQ ID NO: 941177 - DNA, 33 bp, Homo sapien; identical to SEQ ID NO: 941175

SEQ ID NO: 941178 - DNA, 33 bp, Homo sapien; identical to SEQ ID NO: 941176

SEQ ID NO: 941179 - DNA, 33 bp, Homo sapien
tctcatacggcatttacacgattatatgattga

SEQ ID NO: 941180 - DNA, 33 bp, Homo sapien
tctcatacggcatttatacgattatatgattga

SEQ ID NO: 941181 - DNA, 33 bp, Homo sapien
gtggtgtagcctttggaagggctggtttctgtt

SEQ ID NO: 941182 - DNA, 33 bp, Homo sapien
gtggtgtagcctttggcagggctggtttctgtt

SEQ ID NO: 941183 - DNA, 33 bp, Homo sapien
tccttagggaagaaagcctcatcatggttagca

SEQ ID NO: 941184 - DNA, 33 bp, Homo sapien
tccttagggaagaaagtctcatcatggttagca

SEQ ID NO: 941185 - DNA, 33 bp, Homo sapien
gttcagtcagttgggaacttaggatttcatttt

SEQ ID NO: 941186 - DNA, 33 bp, Homo sapien
gttcagtcagttgggagcttaggatttcatttt

SEQ ID NO: 941187 - DNA, 33 bp, Homo sapien
ttataaagtaagcacacaacaaaggtatctttc

SEQ ID NO: 941188 - DNA, 33 bp, Homo sapien
ttataaagtaagcacagaacaaaggtatctttc

SEQ ID NO: 941189 - DNA, 33 bp, Homo sapien; identical to SEQ ID NO: 941187

SEQ ID NO: 941190 - DNA, 33 bp, Homo sapien; identical to SEQ ID NO: 941188

SEQ ID NO: 941191 - DNA, 33 bp, Homo sapien
gggaagaacggtgttacgaaagaaggggcagaa

SEQ ID NO: 941192 - DNA, 33 bp, Homo sapien
gggaagaacggtgttatgaaagaaggggcagaa

SEQ ID NO: 941193 - DNA, 33 bp, Homo sapien; identical to SEQ ID NO: 941191

SEQ ID NO: 941194 - DNA, 33 bp, Homo sapien; identical to SEQ ID NO: 941192

SEQ ID NO: 941195 - DNA, 33 bp, Homo sapien
tagagtaatttaataacgagatcacacatacat

SEQ ID NO: 941196 - DNA, 33 bp, Homo sapien
tagagtaatttaataatgagatcacacatacat

SEQ ID NO: 941197 - DNA, 33 bp, Homo sapien
ctagcgcatggaattccgaaatgtttaattcct

SEQ ID NO: 941198 - DNA, 33 bp, Homo sapien
ctagcgcatggaattctgaaatgtttaattcct

SEQ ID NO: 941199 - DNA, 33 bp, Homo sapien
gtaaatagatatggcacactggtgggtatctct

SEQ ID NO: 941200 - DNA, 33 bp, Homo sapien
gtaaatagatatggcagactggtgggtatctct

SEQ ID NO: 941201 - DNA, 33 bp, Homo sapien
agttgagattaacattcaaaagatctatgagca

SEQ ID NO: 941202 - DNA, 33 bp, Homo sapien
agttgagattaacattgaaaagatctatgagca

SEQ ID NO: 941203 - DNA, 33 bp, Homo sapien
tgctgcatgtatattaacaaatctggacaagtt

SEQ ID NO: 941204 - DNA, 33 bp, Homo sapien
tgctgcatgtatattagcaaatctggacaagtt

SEQ ID NO: 941205 - DNA, 33 bp, Homo sapien
aagacataagaaattcaatttggacccgtacct

SEQ ID NO: 941206 - DNA, 33 bp, Homo sapien
aagacataagaaattccatttggacccgtacct

SEQ ID NO: 941207 - DNA, 33 bp, Homo sapien
ctctcacaaccaagtaccctgccttaatcgtcc

SEQ ID NO: 941208 - DNA, 33 bp, Homo sapien
ctctcacaaccaagtatcctgccttaatcgtcc

SEQ ID NO: 941209 - DNA, 33 bp, Homo sapien
gtcactacgagtaagcactttgaaagactttta

SEQ ID NO: 941210 - DNA, 33 bp, Homo sapien
gtcactacgagtaagcgctttgaaagactttta

SEQ ID NO: 941211 - DNA, 33 bp, Homo sapien
gactttatctgttcccactttactatcagcctt

SEQ ID NO: 941212 - DNA, 33 bp, Homo sapien
gactttatctgttccctctttactatcagcctt

SEQ ID NO: 941213 - DNA, 33 bp, Homo sapien
gtttggagatagcaacagaagaaatggaagcaa

SEQ ID NO: 941214 - DNA, 33 bp, Homo sapien
gtttggagatagcaacggaagaaatggaagcaa

SEQ ID NO: 941215 - DNA, 33 bp, Homo sapien
cagttcaactatgaggaaaagcacaggaaagca

SEQ ID NO: 941216 - DNA, 33 bp, Homo sapien
cagttcaactatgagggaaagcacaggaaagca

SEQ ID NO: 941217 - DNA, 33 bp, Homo sapien
attcttttagctccataaatacatcaaatctac

SEQ ID NO: 941218 - DNA, 33 bp, Homo sapien
attcttttagctccatgaatacatcaaatctac

SEQ ID NO: 941219 - DNA, 33 bp, Homo sapien
attaggccaggatcaacctcctagtcatgttct

SEQ ID NO: 941220 - DNA, 33 bp, Homo sapien
attaggccaggatcaatctcctagtcatgttct

SEQ ID NO: 941221 - DNA, 33 bp, Homo sapien
tacagatgctgggacacagtaagtgacatttta

SEQ ID NO: 941222 - DNA, 33 bp, Homo sapien
tacagatgctgggacatagtaagtgacatttta

SEQ ID NO: 941223 - DNA, 33 bp, Homo sapien
ataactagacctaaaccctatgcagctacctga

SEQ ID NO: 941224 - DNA, 33 bp, Homo sapien
ataactagacctaaactctatgcagctacctga

SEQ ID NO: 941225 - DNA, 33 bp, Homo sapien
tcaggctcagattcaacggctatccactgcttg

SEQ ID NO: 941226 - DNA, 33 bp, Homo sapien
tcaggctcagattcaatggctatccactgcttg

SEQ ID NO: 941227 - DNA, 33 bp, Homo sapien
gtgtcttgtcactttccatatctctggtgctaa

SEQ ID NO: 941228 - DNA, 33 bp, Homo sapien
gtgtcttgtcactttctatatctctggtgctaa

SEQ ID NO: 941229 - DNA, 33 bp, Homo sapien
aaaataagtaacgcaacgatttctgagtgtcca

SEQ ID NO: 941230 - DNA, 33 bp, Homo sapien
aaaataagtaacgcaatgatttctgagtgtcca

SEQ ID NO: 941231 - DNA, 33 bp, Homo sapien
tcgactttagcccaaacccagatggcagagtct

SEQ ID NO: 941232 - DNA, 33 bp, Homo sapien
tcgactttagcccaaatccagatggcagagtct

SEQ ID NO: 941233 - DNA, 33 bp, Homo sapien
gagcaaacgcaccggacggcaggttttggaaat

SEQ ID NO: 941234 - DNA, 33 bp, Homo sapien
gagcaaacgcaccggatggcaggttttggaaat

SEQ ID NO: 941235 - DNA, 33 bp, Homo sapien
agacgtgtgaagaaacaagttcagaaagatggg

SEQ ID NO: 941236 - DNA, 33 bp, Homo sapien
agacgtgtgaagaaacgagttcagaaagatggg

SEQ ID NO: 941237 - DNA, 33 bp, Homo sapien
tggctttcaggaaaaagtatatgagtggcaaga

SEQ ID NO: 941238 - DNA, 33 bp, Homo sapien
tggctttcaggaaaaattatatgagtggcaaga

SEQ ID NO: 941239 - DNA, 33 bp, Homo sapien
cggggtgaggcagagcaaaaagcaaggagacac

SEQ ID NO: 941240 - DNA, 33 bp, Homo sapien
cggggtgaggcagagcgaaaagcaaggagacac

SEQ ID NO: 941241 - DNA, 33 bp, Homo sapien
agatgaggtcccataacgggatggctgtcaaaa

SEQ ID NO: 941242 - DNA, 33 bp, Homo sapien
agatgaggtcccataatgggatggctgtcaaaa

SEQ ID NO: 941243 - DNA, 33 bp, Homo sapien
cctacaagggtgttcacgcagaccagcccgaca

SEQ ID NO: 941244 - DNA, 33 bp, Homo sapien
cctacaagggtgttcatgcagaccagcccgaca

SEQ ID NO: 941245 - DNA, 33 bp, Homo sapien
gagcaagggaatgctaggacggtatttaccttt

SEQ ID NO: 941246 - DNA, 33 bp, Homo sapien
gagcaagggaatgctatgacggtatttaccttt

SEQ ID NO: 941247 - DNA, 33 bp, Homo sapien
cttcaaagtttctctcacactgaactatattct

SEQ ID NO: 941248 - DNA, 33 bp, Homo sapien
cttcaaagtttctctcgcactgaactatattct

SEQ ID NO: 941249 - DNA, 33 bp, Homo sapien
gagaaagacaagtgcaaatttaaatgagaaaat

SEQ ID NO: 941250 - DNA, 33 bp, Homo sapien
gagaaagacaagtgcacatttaaatgagaaaat

SEQ ID NO: 941251 - DNA, 33 bp, Homo sapien
ccgtgtgccttgaatgacaatctctagaggaaa

SEQ ID NO: 941252 - DNA, 33 bp, Homo sapien
ccgtgtgccttgaatgccaatctctagaggaaa

SEQ ID NO: 941253 - DNA, 33 bp, Homo sapien
ccatttgatgaaccaaaaatattttgtaatacc

SEQ ID NO: 941254 - DNA, 33 bp, Homo sapien
ccatttgatgaaccaagaatattttgtaatacc

SEQ ID NO: 941255 - DNA, 33 bp, Homo sapien
ttcagtccttgaaaaacgtcttaccacagaatt

SEQ ID NO: 941256 - DNA, 33 bp, Homo sapien
ttcagtccttgaaaaatgtcttaccacagaatt

SEQ ID NO: 941257 - DNA, 33 bp, Homo sapien
cctcataggttctgaacactgcagttaaagaaa

SEQ ID NO: 941258 - DNA, 33 bp, Homo sapien
cctcataggttctgaagactgcagttaaagaaa

SEQ ID NO: 941259 - DNA, 33 bp, Homo sapien
gatgtgggaatgaagaactccacagaagataac

SEQ ID NO: 941260 - DNA, 33 bp, Homo sapien
gatgtgggaatgaagagctccacagaagataac

SEQ ID NO: 941261 - DNA, 33 bp, Homo sapien
tgttgccatcgaatctaacaaaagtggaaacag

SEQ ID NO: 941262 - DNA, 33 bp, Homo sapien
tgttgccatcgaatctgacaaaagtggaaacag

SEQ ID NO: 941263 - DNA, 33 bp, Homo sapien
tgaaccagtttaagtaccattttagatcccagg

SEQ ID NO: 941264 - DNA, 33 bp, Homo sapien
tgaaccagtttaagtatcattttagatcccagg

SEQ ID NO: 941265 - DNA, 33 bp, Homo sapien
tgaaaaacagataaaagttgaaacggttgcctc

SEQ ID NO: 941266 - DNA, 33 bp, Homo sapien
tgaaaaacagataaaatttgaaacggttgcctc

SEQ ID NO: 941267 - DNA, 33 bp, Homo sapien
ttctgcttaagataaacgatctacagacttgca

SEQ ID NO: 941268 - DNA, 33 bp, Homo sapien
ttctgcttaagataaatgatctacagacttgca

SEQ ID NO: 941269 - DNA, 33 bp, Homo sapien
tagcaaaccaaacataaccctgtagtcaacacc

SEQ ID NO: 941270 - DNA, 33 bp, Homo sapien
tagcaaaccaaacatacccctgtagtcaacacc

SEQ ID NO: 941271 - DNA, 33 bp, Homo sapien
gagcaatgcaataaacagtggtgtataggatat

SEQ ID NO: 941272 - DNA, 33 bp, Homo sapien
gagcaatgcaataaacggtggtgtataggatat

SEQ ID NO: 941273 - DNA, 33 bp, Homo sapien
cagctatataggttacaacacttcttaatattt

SEQ ID NO: 941274 - DNA, 33 bp, Homo sapien
cagctatataggttacgacacttcttaatattt

SEQ ID NO: 941275 - DNA, 33 bp, Homo sapien
ccgaaatttcccgagcactgtcaggcagttatc

SEQ ID NO: 941276 - DNA, 33 bp, Homo sapien
ccgaaatttcccgagcgctgtcaggcagttatc

SEQ ID NO: 941277 - DNA, 33 bp, Homo sapien
aagctgccacagactacgaggtacggaaaatgg

SEQ ID NO: 941278 - DNA, 33 bp, Homo sapien
aagctgccacagactatgaggtacggaaaatgg

SEQ ID NO: 941279 - DNA, 33 bp, Homo sapien
acaggtcagtccaaaaatgtggttttgcctaca

SEQ ID NO: 941280 - DNA, 33 bp, Homo sapien
acaggtcagtccaaaagtgtggttttgcctaca

SEQ ID NO: 941281 - DNA, 33 bp, Homo sapien
acataatagtcgcaccactttacagacctcatt

SEQ ID NO: 941282 - DNA, 33 bp, Homo sapien
acataatagtcgcaccgctttacagacctcatt

SEQ ID NO: 941283 - DNA, 33 bp, Homo sapien
catgtccgagaagcgacgccgttgaaggaattt

SEQ ID NO: 941284 - DNA, 33 bp, Homo sapien
catgtccgagaagcgatgccgttgaaggaattt

SEQ ID NO: 941285 - DNA, 33 bp, Homo sapien
ggaacactgaatctcacagtgctctcagcaaac

SEQ ID NO: 941286 - DNA, 33 bp, Homo sapien
ggaacactgaatctcatagtgctctcagcaaac

SEQ ID NO: 941287 - DNA, 33 bp, Homo sapien
actttcacagctaaaaaaaagttcatttcttta

SEQ ID NO: 941288 - DNA, 33 bp, Homo sapien
actttcacagctaaaagaaagttcatttcttta

SEQ ID NO: 941289 - DNA, 33 bp, Homo sapien
gccaagttcctgagtacagttggtcttagttgt

SEQ ID NO: 941290 - DNA, 33 bp, Homo sapien
gccaagttcctgagtatagttggtcttagttgt

SEQ ID NO: 941291 - DNA, 33 bp, Homo sapien
ttaaacacgcgagaagcctcttgtgaagtctaa

SEQ ID NO: 941292 - DNA, 33 bp, Homo sapien
ttaaacacgcgagaaggctcttgtgaagtctaa

SEQ ID NO: 941293 - DNA, 33 bp, Homo sapien
tcatgtatctgtgtggaaccattcccttgtgcc

SEQ ID NO: 941294 - DNA, 33 bp, Homo sapien
tcatgtatctgtgtgggaccattcccttgtgcc

SEQ ID NO: 941295 - DNA, 33 bp, Homo sapien
tctgcccttttctgccaatctattaacgccaca

SEQ ID NO: 941296 - DNA, 33 bp, Homo sapien
tctgcccttttctgccgatctattaacgccaca

SEQ ID NO: 941297 - DNA, 33 bp, Homo sapien; identical to SEQ ID NO: 941295

SEQ ID NO: 941298 - DNA, 33 bp, Homo sapien; identical to SEQ ID NO: 941296

SEQ ID NO: 941299 - DNA, 33 bp, Homo sapien
gaggtggataaagacacctgggaaggggaaaat

SEQ ID NO: 941300 - DNA, 33 bp, Homo sapien
gaggtggataaagacatctgggaaggggaaaat

SEQ ID NO: 941301 - DNA, 33 bp, Homo sapien
gttattggaagaatgcccattaaccatttcatc

SEQ ID NO: 941302 - DNA, 33 bp, Homo sapien
gttattggaagaatgctcattaaccatttcatc

SEQ ID NO: 941303 - DNA, 33 bp, Homo sapien
gtgagacagtcaacaaacctctaaccaccgacc

SEQ ID NO: 941304 - DNA, 33 bp, Homo sapien
gtgagacagtcaacaagcctctaaccaccgacc

SEQ ID NO: 941305 - DNA, 33 bp, Homo sapien; identical to SEQ ID NO: 941303

SEQ ID NO: 941306 - DNA, 33 bp, Homo sapien; identical to SEQ ID NO: 941304

SEQ ID NO: 941307 - DNA, 33 bp, Homo sapien
gataagtacaaaagaaagtgtaaactgaccatt

SEQ ID NO: 941308 - DNA, 33 bp, Homo sapien
gataagtacaaaagaacgtgtaaactgaccatt

SEQ ID NO: 941309 - DNA, 33 bp, Homo sapien
tctacaattttgccttaaaaatggtcagtttac

SEQ ID NO: 941310 - DNA, 33 bp, Homo sapien
tctacaattttgcctttaaaatggtcagtttac

SEQ ID NO: 941311 - DNA, 33 bp, Homo sapien
ctgctgaacatcactaccacggatctgcctcat

SEQ ID NO: 941312 - DNA, 33 bp, Homo sapien
ctgctgaacatcactagcacggatctgcctcat

SEQ ID NO: 941313 - DNA, 33 bp, Homo sapien
gtatgcgttatgaaccaatggccacagcccagc

SEQ ID NO: 941314 - DNA, 33 bp, Homo sapien
gtatgcgttatgaaccgatggccacagcccagc

SEQ ID NO: 941315 - DNA, 33 bp, Homo sapien
tcagaaaaatcacagacggttattcaggaggaa

SEQ ID NO: 941316 - DNA, 33 bp, Homo sapien
tcagaaaaatcacagatggttattcaggaggaa

SEQ ID NO: 941317 - DNA, 33 bp, Homo sapien
agaactattacaagcaatgatacttttataggg

SEQ ID NO: 941318 - DNA, 33 bp, Homo sapien
agaactattacaagcagtgatacttttataggg

SEQ ID NO: 941319 - DNA, 33 bp, Homo sapien
tagggtcttggtttgacgccatgacccaccaca

SEQ ID NO: 941320 - DNA, 33 bp, Homo sapien
tagggtcttggtttgatgccatgacccaccaca

SEQ ID NO: 941321 - DNA, 33 bp, Homo sapien
gggttatctgatgagaacttgtttgcttttaat

SEQ ID NO: 941322 - DNA, 33 bp, Homo sapien
gggttatctgatgagaccttgtttgcttttaat

SEQ ID NO: 941323 - DNA, 33 bp, Homo sapien
attctgttgagatacacatgagtgcagggtgga

SEQ ID NO: 941324 - DNA, 33 bp, Homo sapien
attctgttgagatacatatgagtgcagggtgga

SEQ ID NO: 941325 - DNA, 33 bp, Homo sapien
ctgagcagctcctaccagctcagtggcatttag

SEQ ID NO: 941326 - DNA, 33 bp, Homo sapien
ctgagcagctcctaccggctcagtggcatttag

SEQ ID NO: 941327 - DNA, 33 bp, Homo sapien
ctggctcttggaccataaccagcgttcactgag

SEQ ID NO: 941328 - DNA, 33 bp, Homo sapien
ctggctcttggaccatgaccagcgttcactgag

SEQ ID NO: 941329 - DNA, 33 bp, Homo sapien
atttcacttgccaacccgatttatacttttgta

SEQ ID NO: 941330 - DNA, 33 bp, Homo sapien
atttcacttgccaacctgatttatacttttgta

SEQ ID NO: 941331 - DNA, 33 bp, Homo sapien
gatagataaaagcaccaggtattgacaacaagg

SEQ ID NO: 941332 - DNA, 33 bp, Homo sapien
gatagataaaagcaccgggtattgacaacaagg

SEQ ID NO: 941333 - DNA, 33 bp, Homo sapien
aaagacaaagtactgtcaagagcaattgctgag

SEQ ID NO: 941334 - DNA, 33 bp, Homo sapien
aaagacaaagtactgtgaagagcaattgctgag

SEQ ID NO: 941335 - DNA, 33 bp, Homo sapien
gcctctgttggaacgccaagtgcctgcaactca

SEQ ID NO: 941336 - DNA, 33 bp, Homo sapien
gcctctgttggaacgctaagtgcctgcaactca

SEQ ID NO: 941337 - DNA, 33 bp, Homo sapien
agagatgctctcaaaccggtcgtcgattattct

SEQ ID NO: 941338 - DNA, 33 bp, Homo sapien
agagatgctctcaaactggtcgtcgattattct

SEQ ID NO: 941339 - DNA, 33 bp, Homo sapien
aaccactgttactatccagtggacatacaagaa

SEQ ID NO: 941340 - DNA, 33 bp, Homo sapien
aaccactgttactatctagtggacatacaagaa

SEQ ID NO: 941341 - DNA, 33 bp, Homo sapien
tccaaagggtaagtcacaactgtgtaagaaaat

SEQ ID NO: 941342 - DNA, 33 bp, Homo sapien
tccaaagggtaagtcataactgtgtaagaaaat

SEQ ID NO: 941343 - DNA, 33 bp, Homo sapien
tctagaggctaacccagctggactctggaggaa

SEQ ID NO: 941344 - DNA, 33 bp, Homo sapien
tctagaggctaacccatctggactctggaggaa

SEQ ID NO: 941345 - DNA, 33 bp, Homo sapien
gcttccaacgcattggacatctccacagaccct

SEQ ID NO: 941346 - DNA, 33 bp, Homo sapien
gcttccaacgcattgggcatctccacagaccct

SEQ ID NO: 941347 - DNA, 33 bp, Homo sapien
gtttgaagttcataaactagagactattttttt

SEQ ID NO: 941348 - DNA, 33 bp, Homo sapien
gtttgaagttcataaagtagagactattttttt

SEQ ID NO: 941349 - DNA, 33 bp, Homo sapien
tgggctcgagaggtgacggttccaccccaggag

SEQ ID NO: 941350 - DNA, 33 bp, Homo sapien
tgggctcgagaggtgatggttccaccccaggag

SEQ ID NO: 941351 - DNA, 33 bp, Homo sapien
aatgttgcatcaaagacagaatgccagtaaaga

SEQ ID NO: 941352 - DNA, 33 bp, Homo sapien
aatgttgcatcaaagagagaatgccagtaaaga

SEQ ID NO: 941353 - DNA, 33 bp, Homo sapien
agctctgcctgaagtcagaaaggaatggaatgc

SEQ ID NO: 941354 - DNA, 33 bp, Homo sapien
agctctgcctgaagtcggaaaggaatggaatgc

SEQ ID NO: 941355 - DNA, 33 bp, Homo sapien
ttctttctggttatcacagggattacataaaac

SEQ ID NO: 941356 - DNA, 33 bp, Homo sapien
ttctttctggttatcatagggattacataaaac

SEQ ID NO: 941357 - DNA, 33 bp, Homo sapien
ttaacttaaccccgcacataaatgtattacttt

SEQ ID NO: 941358 - DNA, 33 bp, Homo sapien
ttaacttaaccccgcatataaatgtattacttt

SEQ ID NO: 941359 - DNA, 33 bp, Homo sapien
catgtttactgtattgaaaattgagccaaaaca

SEQ ID NO: 941360 - DNA, 33 bp, Homo sapien
catgtttactgtattggaaattgagccaaaaca

SEQ ID NO: 941361 - DNA, 33 bp, Homo sapien
tactaggatggacaaaatctacatactgacagc

SEQ ID NO: 941362 - DNA, 33 bp, Homo sapien
tactaggatggacaaagtctacatactgacagc

SEQ ID NO: 941363 - DNA, 33 bp, Homo sapien
agcttctgaatccacacggcagctagtcaagat

SEQ ID NO: 941364 - DNA, 33 bp, Homo sapien
agcttctgaatccacagggcagctagtcaagat

SEQ ID NO: 941365 - DNA, 33 bp, Homo sapien
ttaagcaagaatctgaagttggtttagtaggaa

SEQ ID NO: 941366 - DNA, 33 bp, Homo sapien
ttaagcaagaatctgaggttggtttagtaggaa

SEQ ID NO: 941367 - DNA, 33 bp, Homo sapien
aatctacctttgcttaaatgttgtaatgtagga

SEQ ID NO: 941368 - DNA, 33 bp, Homo sapien
aatctacctttgcttacatgttgtaatgtagga

SEQ ID NO: 941369 - DNA, 33 bp, Homo sapien
ggagtctgcagggcggaaagtgaagccttctca

SEQ ID NO: 941370 - DNA, 33 bp, Homo sapien
ggagtctgcagggcgggaagtgaagccttctca

SEQ ID NO: 941371 - DNA, 33 bp, Homo sapien
ccctgctggattcgctaaactcacaggcacttc

SEQ ID NO: 941372 - DNA, 33 bp, Homo sapien
ccctgctggattcgctgaactcacaggcacttc

SEQ ID NO: 941373 - DNA, 33 bp, Homo sapien
ctctgtggagccctaaacaggacaaaatgagcc

SEQ ID NO: 941374 - DNA, 33 bp, Homo sapien
ctctgtggagccctaagcaggacaaaatgagcc

SEQ ID NO: 941375 - DNA, 33 bp, Homo sapien
ttgacggaaccatcaggatcaggagcgagggag

SEQ ID NO: 941376 - DNA, 33 bp, Homo sapien
ttgacggaaccatcagtatcaggagcgagggag

SEQ ID NO: 941377 - DNA, 33 bp, Homo sapien
ccacacaaatccaacaccagactggcaccttga

SEQ ID NO: 941378 - DNA, 33 bp, Homo sapien
ccacacaaatccaacagcagactggcaccttga

SEQ ID NO: 941379 - DNA, 33 bp, Homo sapien
tgagctaattttatgagatgtgagactcaggta

SEQ ID NO: 941380 - DNA, 33 bp, Homo sapien
tgagctaattttatgatatgtgagactcaggta

SEQ ID NO: 941381 - DNA, 33 bp, Homo sapien
caagtcctgagggtataaggtacttgaacatga

SEQ ID NO: 941382 - DNA, 33 bp, Homo sapien
caagtcctgagggtattaggtacttgaacatga

SEQ ID NO: 941383 - DNA, 33 bp, Homo sapien
atacatttaagatataactttgtcacaatttct

SEQ ID NO: 941384 - DNA, 33 bp, Homo sapien
atacatttaagatatacctttgtcacaatttct

SEQ ID NO: 941385 - DNA, 33 bp, Homo sapien
atgactgttcttcatgcacacaaaatggtaatt

SEQ ID NO: 941386 - DNA, 33 bp, Homo sapien
atgactgttcttcatgtacacaaaatggtaatt

SEQ ID NO: 941387 - DNA, 33 bp, Homo sapien
tcccacctggaagttgcagataagaacacttac

SEQ ID NO: 941388 - DNA, 33 bp, Homo sapien
tcccacctggaagttggagataagaacacttac

SEQ ID NO: 941389 - DNA, 33 bp, Homo sapien
ctgacgtccagacccccctgtagtcaccagccg

SEQ ID NO: 941390 - DNA, 33 bp, Homo sapien
ctgacgtccagaccccgctgtagtcaccagccg

SEQ ID NO: 941391 - DNA, 33 bp, Homo sapien
accacagccattcccaagtcttctccgaatggc

SEQ ID NO: 941392 - DNA, 33 bp, Homo sapien
accacagccattcccaggtcttctccgaatggc

SEQ ID NO: 941393 - DNA, 33 bp, Homo sapien
aattctgtcatctctaagtttgtttgccccact

SEQ ID NO: 941394 - DNA, 33 bp, Homo sapien
aattctgtcatctctatgtttgtttgccccact

SEQ ID NO: 941395 - DNA, 33 bp, Homo sapien
ataaaggacatccccactcacgctgtgtctttc

SEQ ID NO: 941396 - DNA, 33 bp, Homo sapien
ataaaggacatccccattcacgctgtgtctttc

SEQ ID NO: 941397 - DNA, 33 bp, Homo sapien
gtttctttcttcttcaactcttgcagtatctat

SEQ ID NO: 941398 - DNA, 33 bp, Homo sapien
gtttctttcttcttcagctcttgcagtatctat

SEQ ID NO: 941399 - DNA, 33 bp, Homo sapien
acaaacaactgcacaacaatgcatgctgagaaa

SEQ ID NO: 941400 - DNA, 33 bp, Homo sapien
acaaacaactgcacaataatgcatgctgagaaa

SEQ ID NO: 941401 - DNA, 33 bp, Homo sapien
ctgagctcaccttcataagcagactgagaggtg

SEQ ID NO: 941402 - DNA, 33 bp, Homo sapien
ctgagctcaccttcattagcagactgagaggtg

SEQ ID NO: 941403 - DNA, 33 bp, Homo sapien
gggacctcaacgttataaaaaactgagttgggc

SEQ ID NO: 941404 - DNA, 33 bp, Homo sapien
gggacctcaacgttatgaaaaactgagttgggc

SEQ ID NO: 941405 - DNA, 33 bp, Homo sapien
gtctcaccataaaacaccttgatagatactttt

SEQ ID NO: 941406 - DNA, 33 bp, Homo sapien
gtctcaccataaaacagcttgatagatactttt

SEQ ID NO: 941407 - DNA, 33 bp, Homo sapien
taattaagagccctggaaaaagaatgcattcct

SEQ ID NO: 941408 - DNA, 33 bp, Homo sapien
taattaagagccctgggaaaagaatgcattcct

SEQ ID NO: 941409 - DNA, 33 bp, Homo sapien
tgtgtccctatgccacggtgccggaaacaagtc

SEQ ID NO: 941410 - DNA, 33 bp, Homo sapien
tgtgtccctatgccactgtgccggaaacaagtc

SEQ ID NO: 941411 - DNA, 33 bp, Homo sapien
cgttgtgctcaaaataccgcttacgtccgtctt

SEQ ID NO: 941412 - DNA, 33 bp, Homo sapien
cgttgtgctcaaaatatcgcttacgtccgtctt

SEQ ID NO: 941413 - DNA, 33 bp, Homo sapien
tatttccttgattacaaatttgatgtacaatgt

SEQ ID NO: 941414 - DNA, 33 bp, Homo sapien
tatttccttgattacagatttgatgtacaatgt

SEQ ID NO: 941415 - DNA, 33 bp, Homo sapien
cacaatacttgacatactaaaatcagtatttat

SEQ ID NO: 941416 - DNA, 33 bp, Homo sapien
cacaatacttgacatattaaaatcagtatttat

SEQ ID NO: 941417 - DNA, 33 bp, Homo sapien
ttcatgtgaattcaaacaatcatgggcagttcc

SEQ ID NO: 941418 - DNA, 33 bp, Homo sapien
ttcatgtgaattcaaataatcatgggcagttcc

SEQ ID NO: 941419 - DNA, 33 bp, Homo sapien
accccataaagtgtaaccggtctcttccttgca

SEQ ID NO: 941420 - DNA, 33 bp, Homo sapien
accccataaagtgtaatcggtctcttccttgca

SEQ ID NO: 941421 - DNA, 33 bp, Homo sapien
agagtcacgcacttacactgttgcttcctgttt

SEQ ID NO: 941422 - DNA, 33 bp, Homo sapien
agagtcacgcacttaccctgttgcttcctgttt

SEQ ID NO: 941423 - DNA, 33 bp, Homo sapien
ataattccatttgtcccaaagataagactgatt

SEQ ID NO: 941424 - DNA, 33 bp, Homo sapien
ataattccatttgtccgaaagataagactgatt

SEQ ID NO: 941425 - DNA, 33 bp, Homo sapien
atgtaccacaaaagacactggtgaaaggctggc

SEQ ID NO: 941426 - DNA, 33 bp, Homo sapien
atgtaccacaaaagacgctggtgaaaggctggc

SEQ ID NO: 941427 - DNA, 33 bp, Homo sapien
ccaaacattaaaaacgaacggtgaaagtgcagt

SEQ ID NO: 941428 - DNA, 33 bp, Homo sapien
ccaaacattaaaaacgtacggtgaaagtgcagt

SEQ ID NO: 941429 - DNA, 33 bp, Homo sapien
acatagaaaatctaagaaatccacaacaaaaat

SEQ ID NO: 941430 - DNA, 33 bp, Homo sapien
acatagaaaatctaaggaatccacaacaaaaat

SEQ ID NO: 941431 - DNA, 33 bp, Homo sapien
caacatcagctgaaaacggatcaaggacctaca

SEQ ID NO: 941432 - DNA, 33 bp, Homo sapien
caacatcagctgaaaatggatcaaggacctaca

SEQ ID NO: 941433 - DNA, 33 bp, Homo sapien
ccttacaagaagcaggccatccctaacatttcc

SEQ ID NO: 941434 - DNA, 33 bp, Homo sapien
ccttacaagaagcagggcatccctaacatttcc

SEQ ID NO: 941435 - DNA, 33 bp, Homo sapien
aaaactgaggagaccccaaaaagatcagtgact

SEQ ID NO: 941436 - DNA, 33 bp, Homo sapien
aaaactgaggagacccgaaaaagatcagtgact

SEQ ID NO: 941437 - DNA, 33 bp, Homo sapien
aagccatgttcaacctcaggatcatgctttcag

SEQ ID NO: 941438 - DNA, 33 bp, Homo sapien
aagccatgttcaacctgaggatcatgctttcag

SEQ ID NO: 941439 - DNA, 33 bp, Homo sapien
tctccctcacccctgaagagatgagcattccgc

SEQ ID NO: 941440 - DNA, 33 bp, Homo sapien
tctccctcacccctgacgagatgagcattccgc

SEQ ID NO: 941441 - DNA, 33 bp, Homo sapien
atgttgttcactgcagaaagccatatgttcctc

SEQ ID NO: 941442 - DNA, 33 bp, Homo sapien
atgttgttcactgcaggaagccatatgttcctc

SEQ ID NO: 941443 - DNA, 33 bp, Homo sapien
gaatctcatgatattacatacacgggaaagtat

SEQ ID NO: 941444 - DNA, 33 bp, Homo sapien
gaatctcatgatattagatacacgggaaagtat

SEQ ID NO: 941445 - DNA, 33 bp, Homo sapien
catgatttgggagcgacgtaccagcttcatcct

SEQ ID NO: 941446 - DNA, 33 bp, Homo sapien
catgatttgggagcgatgtaccagcttcatcct

SEQ ID NO: 941447 - DNA, 33 bp, Homo sapien
ctacgcacaggccggcaaacagctcatcccaac

SEQ ID NO: 941448 - DNA, 33 bp, Homo sapien
ctacgcacaggccggccaacagctcatcccaac

SEQ ID NO: 941449 - DNA, 33 bp, Homo sapien
tttaaagaaaacacaacgtctgtacatctttaa

SEQ ID NO: 941450 - DNA, 33 bp, Homo sapien
tttaaagaaaacacaatgtctgtacatctttaa

SEQ ID NO: 941451 - DNA, 33 bp, Homo sapien
acagatgagcgtaaaagtatccaaatcaaccag

SEQ ID NO: 941452 - DNA, 33 bp, Homo sapien
acagatgagcgtaaaattatccaaatcaaccag

SEQ ID NO: 941453 - DNA, 33 bp, Homo sapien
ttatagaatgtacttcaaaaacaataggtggca

SEQ ID NO: 941454 - DNA, 33 bp, Homo sapien
ttatagaatgtacttcgaaaacaataggtggca

SEQ ID NO: 941455 - DNA, 33 bp, Homo sapien
acatcgctccaaagaccgccacggaggtggggc

SEQ ID NO: 941456 - DNA, 33 bp, Homo sapien
acatcgctccaaagactgccacggaggtggggc

SEQ ID NO: 941457 - DNA, 33 bp, Homo sapien
cgcacctggagtcaacacagggtgctgcttgtc

SEQ ID NO: 941458 - DNA, 33 bp, Homo sapien
cgcacctggagtcaacgcagggtgctgcttgtc

SEQ ID NO: 941459 - DNA, 33 bp, Homo sapien
aggtgcgagtaagatacgcaccacatcctgcag

SEQ ID NO: 941460 - DNA, 33 bp, Homo sapien
aggtgcgagtaagataggcaccacatcctgcag

SEQ ID NO: 941461 - DNA, 33 bp, Homo sapien
acacctaaatgaatccagaagaatgcaggcaat

SEQ ID NO: 941462 - DNA, 33 bp, Homo sapien
acacctaaatgaatcccgaagaatgcaggcaat

SEQ ID NO: 941463 - DNA, 33 bp, Homo sapien
ctctcctcctagttgaccccacagtgtcttcgc

SEQ ID NO: 941464 - DNA, 33 bp, Homo sapien
ctctcctcctagttgatcccacagtgtcttcgc

SEQ ID NO: 941465 - DNA, 33 bp, Homo sapien
gttgatacagggcttaactgtcttcatgctgtg

SEQ ID NO: 941466 - DNA, 33 bp, Homo sapien
gttgatacagggcttacctgtcttcatgctgtg

SEQ ID NO: 941467 - DNA, 33 bp, Homo sapien
caaagtccctctgccacgtgaggtcaccagttc

SEQ ID NO: 941468 - DNA, 33 bp, Homo sapien
caaagtccctctgccatgtgaggtcaccagttc

SEQ ID NO: 941469 - DNA, 33 bp, Homo sapien
tggctcctcagtgggacgagaattcgtgccttt

SEQ ID NO: 941470 - DNA, 33 bp, Homo sapien
tggctcctcagtgggatgagaattcgtgccttt

SEQ ID NO: 941471 - DNA, 33 bp, Homo sapien
ttaagttttcagggaacgtttacgaattatagc

SEQ ID NO: 941472 - DNA, 33 bp, Homo sapien
ttaagttttcagggaatgtttacgaattatagc

SEQ ID NO: 941473 - DNA, 33 bp, Homo sapien
tgctagatgccaggaaccacactcggagctggg

SEQ ID NO: 941474 - DNA, 33 bp, Homo sapien
tgctagatgccaggaatcacactcggagctggg

SEQ ID NO: 941475 - DNA, 33 bp, Homo sapien
aagagaggagtaataacaaagacagctccaggt

SEQ ID NO: 941476 - DNA, 33 bp, Homo sapien
aagagaggagtaataataaagacagctccaggt

SEQ ID NO: 941477 - DNA, 33 bp, Homo sapien
attttattgtcactaaaaacctgagacatagac

SEQ ID NO: 941478 - DNA, 33 bp, Homo sapien
attttattgtcactaacaacctgagacatagac

SEQ ID NO: 941479 - DNA, 33 bp, Homo sapien
gtagggaacaatgtccaaaagaagtctgtgcat

SEQ ID NO: 941480 - DNA, 33 bp, Homo sapien
gtagggaacaatgtccgaaagaagtctgtgcat

SEQ ID NO: 941481 - DNA, 33 bp, Homo sapien
tgtcccagaatagtgacgtttctaaaattttct

SEQ ID NO: 941482 - DNA, 33 bp, Homo sapien
tgtcccagaatagtgaggtttctaaaattttct

SEQ ID NO: 941483 - DNA, 33 bp, Homo sapien
tcccagtcatttgagcagaagtgaattaaaata

SEQ ID NO: 941484 - DNA, 33 bp, Homo sapien
tcccagtcatttgagcggaagtgaattaaaata

SEQ ID NO: 941485 - DNA, 33 bp, Homo sapien
atgcgcatgttttgaaccgtagttggaacattc

SEQ ID NO: 941486 - DNA, 33 bp, Homo sapien
atgcgcatgttttgaagcgtagttggaacattc

SEQ ID NO: 941487 - DNA, 33 bp, Homo sapien
aaattcttttaggagaatacgggatatagaaca

SEQ ID NO: 941488 - DNA, 33 bp, Homo sapien
aaattcttttaggagagtacgggatatagaaca

SEQ ID NO: 941489 - DNA, 33 bp, Homo sapien
aatttctcacattgcaaatccattcaattagat

SEQ ID NO: 941490 - DNA, 33 bp, Homo sapien
aatttctcacattgcatatccattcaattagat

SEQ ID NO: 941491 - DNA, 33 bp, Homo sapien
tgttcactgtgacaaacgctgatgtttcatgga

SEQ ID NO: 941492 - DNA, 33 bp, Homo sapien
tgttcactgtgacaaatgctgatgtttcatgga

SEQ ID NO: 941493 - DNA, 33 bp, Homo sapien
gctgcataacgagcaccgtaagtcaggtgactt

SEQ ID NO: 941494 - DNA, 33 bp, Homo sapien
gctgcataacgagcactgtaagtcaggtgactt

SEQ ID NO: 941495 - DNA, 33 bp, Homo sapien
ttagctccagactaacacaagtgcaggcaaccc

SEQ ID NO: 941496 - DNA, 33 bp, Homo sapien
ttagctccagactaacgcaagtgcaggcaaccc

SEQ ID NO: 941497 - DNA, 33 bp, Homo sapien
agctcatcagggaaacagtgtcagatacgaccc

SEQ ID NO: 941498 - DNA, 33 bp, Homo sapien
agctcatcagggaaacggtgtcagatacgaccc

SEQ ID NO: 941499 - DNA, 33 bp, Homo sapien
ccgccttcagcccaaacgtggtggcgcatccag

SEQ ID NO: 941500 - DNA, 33 bp, Homo sapien
ccgccttcagcccaaatgtggtggcgcatccag

SEQ ID NO: 941501 - DNA, 33 bp, Homo sapien
caaactttgataataacaagtgaataatgaaac

SEQ ID NO: 941502 - DNA, 33 bp, Homo sapien
caaactttgataataagaagtgaataatgaaac

SEQ ID NO: 941503 - DNA, 33 bp, Homo sapien
accaattttctaataaaggcatttccagattat

SEQ ID NO: 941504 - DNA, 33 bp, Homo sapien
accaattttctaataagggcatttccagattat

SEQ ID NO: 941505 - DNA, 33 bp, Homo sapien
tcctgaagttgacataactagttaggatattcg

SEQ ID NO: 941506 - DNA, 33 bp, Homo sapien
tcctgaagttgacatatctagttaggatattcg

SEQ ID NO: 941507 - DNA, 33 bp, Homo sapien
ccacacaccggagctccactttcccacagagca

SEQ ID NO: 941508 - DNA, 33 bp, Homo sapien
ccacacaccggagctctactttcccacagagca

SEQ ID NO: 941509 - DNA, 33 bp, Homo sapien
aaaactcaaccaaaaaggagaggtcagtgccac

SEQ ID NO: 941510 - DNA, 33 bp, Homo sapien
aaaactcaaccaaaaatgagaggtcagtgccac

SEQ ID NO: 941511 - DNA, 33 bp, Homo sapien
gtaaacgcagctgtaacatctggaccagtggag

SEQ ID NO: 941512 - DNA, 33 bp, Homo sapien
gtaaacgcagctgtaatatctggaccagtggag

SEQ ID NO: 941513 - DNA, 33 bp, Homo sapien
gtccatcagtaaggaactgtttaaacgtgtaca

SEQ ID NO: 941514 - DNA, 33 bp, Homo sapien
gtccatcagtaaggaagtgtttaaacgtgtaca

SEQ ID NO: 941515 - DNA, 33 bp, Homo sapien
aaaatacctaggtaaccgtagatttagtgatga

SEQ ID NO: 941516 - DNA, 33 bp, Homo sapien
aaaatacctaggtaactgtagatttagtgatga

SEQ ID NO: 941517 - DNA, 33 bp, Homo sapien
tttaactttaatgcaaattcaacttatcaatta

SEQ ID NO: 941518 - DNA, 33 bp, Homo sapien
tttaactttaatgcaagttcaacttatcaatta

SEQ ID NO: 941519 - DNA, 33 bp, Homo sapien
acattgtagccaaagaaacgggatgggaggaaa

SEQ ID NO: 941520 - DNA, 33 bp, Homo sapien
acattgtagccaaagatacgggatgggaggaaa

SEQ ID NO: 941521 - DNA, 33 bp, Homo sapien
tctctgcatcctctccaatatggtattttttgt

SEQ ID NO: 941522 - DNA, 33 bp, Homo sapien
tctctgcatcctctccgatatggtattttttgt

SEQ ID NO: 941523 - DNA, 33 bp, Homo sapien
tagcaaggcaccacaccgggcattagcaatgtt

SEQ ID NO: 941524 - DNA, 33 bp, Homo sapien
tagcaaggcaccacactgggcattagcaatgtt

SEQ ID NO: 941525 - DNA, 33 bp, Homo sapien
aatatagaaaactacaaagaagacaacaactga

SEQ ID NO: 941526 - DNA, 33 bp, Homo sapien
aatatagaaaactacagagaagacaacaactga

SEQ ID NO: 941527 - DNA, 33 bp, Homo sapien
gtgggccaggaactccacatagatgcaccagtg

SEQ ID NO: 941528 - DNA, 33 bp, Homo sapien
gtgggccaggaactccgcatagatgcaccagtg

SEQ ID NO: 941529 - DNA, 33 bp, Homo sapien
aaagcccgttatccgacatgacatctatgaaat

SEQ ID NO: 941530 - DNA, 33 bp, Homo sapien
aaagcccgttatccgatatgacatctatgaaat

SEQ ID NO: 941531 - DNA, 33 bp, Homo sapien
cccagctgggaagtaccaggaccagagaatctc

SEQ ID NO: 941532 - DNA, 33 bp, Homo sapien
cccagctgggaagtacgaggaccagagaatctc

SEQ ID NO: 941533 - DNA, 33 bp, Homo sapien
ggtcactttctaatacacttcagggtttcatac

SEQ ID NO: 941534 - DNA, 33 bp, Homo sapien
ggtcactttctaatacgcttcagggtttcatac

SEQ ID NO: 941535 - DNA, 33 bp, Homo sapien
tggaataggcttattacctggatgtcattacta

SEQ ID NO: 941536 - DNA, 33 bp, Homo sapien
tggaataggcttattatctggatgtcattacta

SEQ ID NO: 941537 - DNA, 33 bp, Homo sapien
atacaacaccgtgaacaattcttttgtccatct

SEQ ID NO: 941538 - DNA, 33 bp, Homo sapien
atacaacaccgtgaactattcttttgtccatct

SEQ ID NO: 941539 - DNA, 33 bp, Homo sapien
tttccgaaaaattacacaaatcaactgcatcct

SEQ ID NO: 941540 - DNA, 33 bp, Homo sapien
tttccgaaaaattacagaaatcaactgcatcct

SEQ ID NO: 941541 - DNA, 33 bp, Homo sapien
gggatacatgcgggagaaacaactgtctggagg

SEQ ID NO: 941542 - DNA, 33 bp, Homo sapien
gggatacatgcgggaggaacaactgtctggagg

SEQ ID NO: 941543 - DNA, 33 bp, Homo sapien
tctagtcttttagtgcaatgggaatcgaagtca

SEQ ID NO: 941544 - DNA, 33 bp, Homo sapien
tctagtcttttagtgctatgggaatcgaagtca

SEQ ID NO: 941545 - DNA, 33 bp, Homo sapien
ataactgaagtagcaacggctttgaagtcagat

SEQ ID NO: 941546 - DNA, 33 bp, Homo sapien
ataactgaagtagcaatggctttgaagtcagat

SEQ ID NO: 941547 - DNA, 33 bp, Homo sapien
gtgtttccttgggccaaataatttgaataagct

SEQ ID NO: 941548 - DNA, 33 bp, Homo sapien
gtgtttccttgggccacataatttgaataagct

SEQ ID NO: 941549 - DNA, 33 bp, Homo sapien
tgccttcttcataagacggttataaagtttggg

SEQ ID NO: 941550 - DNA, 33 bp, Homo sapien
tgccttcttcataagatggttataaagtttggg

SEQ ID NO: 941551 - DNA, 33 bp, Homo sapien
aaggctgaatctgaccaggaaaaggaagccggt

SEQ ID NO: 941552 - DNA, 33 bp, Homo sapien
aaggctgaatctgaccgggaaaaggaagccggt

SEQ ID NO: 941553 - DNA, 33 bp, Homo sapien
tccagtgcaacagcgtaacaccaatacaatgca

SEQ ID NO: 941554 - DNA, 33 bp, Homo sapien
tccagtgcaacagcgtgacaccaatacaatgca

SEQ ID NO: 941555 - DNA, 33 bp, Homo sapien
cagcacttacatcagaacagctgcaatgagtac

SEQ ID NO: 941556 - DNA, 33 bp, Homo sapien
cagcacttacatcagaccagctgcaatgagtac

SEQ ID NO: 941557 - DNA, 33 bp, Homo sapien
tttattacacaacatcaaaatatcaacacattg

SEQ ID NO: 941558 - DNA, 33 bp, Homo sapien
tttattacacaacatcgaaatatcaacacattg

SEQ ID NO: 941559 - DNA, 33 bp, Homo sapien
ttttcccaataatcaccgagtactggagcaatt

SEQ ID NO: 941560 - DNA, 33 bp, Homo sapien
ttttcccaataatcactgagtactggagcaatt

SEQ ID NO: 941561 - DNA, 33 bp, Homo sapien
cccacctaaatatgcacaaaccaataacatctt

SEQ ID NO: 941562 - DNA, 33 bp, Homo sapien
cccacctaaatatgcagaaaccaataacatctt

SEQ ID NO: 941563 - DNA, 33 bp, Homo sapien
ttgttgcaaattgggaacaagaattaaacttag

SEQ ID NO: 941564 - DNA, 33 bp, Homo sapien
ttgttgcaaattgggagcaagaattaaacttag

SEQ ID NO: 941565 - DNA, 33 bp, Homo sapien
tcagattggaaaaatacagctgcaagaggtaca

SEQ ID NO: 941566 - DNA, 33 bp, Homo sapien
tcagattggaaaaatatagctgcaagaggtaca

SEQ ID NO: 941567 - DNA, 33 bp, Homo sapien
aacagatattgccttagaaaacaacaactgcag

SEQ ID NO: 941568 - DNA, 33 bp, Homo sapien
aacagatattgccttataaaacaacaactgcag

SEQ ID NO: 941569 - DNA, 33 bp, Homo sapien
tcattcattccaaatactagctgagggaaaaca

SEQ ID NO: 941570 - DNA, 33 bp, Homo sapien
tcattcattccaaatattagctgagggaaaaca

SEQ ID NO: 941571 - DNA, 33 bp, Homo sapien
tctcgtcagtgtgctggacattggccggccagc

SEQ ID NO: 941572 - DNA, 33 bp, Homo sapien
tctcgtcagtgtgctgtacattggccggccagc

SEQ ID NO: 941573 - DNA, 33 bp, Homo sapien
ttgatgcagttacagaaaagttggtgacatcga

SEQ ID NO: 941574 - DNA, 33 bp, Homo sapien
ttgatgcagttacagagaagttggtgacatcga

SEQ ID NO: 941575 - DNA, 33 bp, Homo sapien
caagtgtgagctgatacgtgatttgatattgac

SEQ ID NO: 941576 - DNA, 33 bp, Homo sapien
caagtgtgagctgatatgtgatttgatattgac

SEQ ID NO: 941577 - DNA, 33 bp, Homo sapien
tgcctgttggccattcaagtgccttcttttgag

SEQ ID NO: 941578 - DNA, 33 bp, Homo sapien
tgcctgttggccattcgagtgccttcttttgag

SEQ ID NO: 941579 - DNA, 33 bp, Homo sapien
agctcttgatgatgaacatgccccggaatgcat

SEQ ID NO: 941580 - DNA, 33 bp, Homo sapien
agctcttgatgatgaatatgccccggaatgcat

SEQ ID NO: 941581 - DNA, 33 bp, Homo sapien
aagggggcctactgtaagagctttgcggcataa

SEQ ID NO: 941582 - DNA, 33 bp, Homo sapien
aagggggcctactgtatgagctttgcggcataa

SEQ ID NO: 941583 - DNA, 33 bp, Homo sapien
tggtgacaagaagtcacggcacgtgtgggccag

SEQ ID NO: 941584 - DNA, 33 bp, Homo sapien
tggtgacaagaagtcatggcacgtgtgggccag

SEQ ID NO: 941585 - DNA, 33 bp, Homo sapien
gcacgccacagtgcccaactccggggctgcttt

SEQ ID NO: 941586 - DNA, 33 bp, Homo sapien
gcacgccacagtgcccgactccggggctgcttt

SEQ ID NO: 941587 - DNA, 33 bp, Homo sapien
ttcaatgagaattaccaaatgctcctcaaagaa

SEQ ID NO: 941588 - DNA, 33 bp, Homo sapien
ttcaatgagaattaccgaatgctcctcaaagaa

SEQ ID NO: 941589 - DNA, 33 bp, Homo sapien
atgtctcacaaaataacactcacctagtcccat

SEQ ID NO: 941590 - DNA, 33 bp, Homo sapien
atgtctcacaaaataatactcacctagtcccat

SEQ ID NO: 941591 - DNA, 33 bp, Homo sapien
gaactgcgagaagcaacgggccttgtgctcatt

SEQ ID NO: 941592 - DNA, 33 bp, Homo sapien
gaactgcgagaagcaatgggccttgtgctcatt

SEQ ID NO: 941593 - DNA, 33 bp, Homo sapien
tcagctgttcacatgacgaaacagcgtgtgtgc

SEQ ID NO: 941594 - DNA, 33 bp, Homo sapien
tcagctgttcacatgaggaaacagcgtgtgtgc

SEQ ID NO: 941595 - DNA, 33 bp, Homo sapien
tccttgttcctccagaatccattaccacctatc

SEQ ID NO: 941596 - DNA, 33 bp, Homo sapien
tccttgttcctccagattccattaccacctatc

SEQ ID NO: 941597 - DNA, 33 bp, Homo sapien
tccttgtctcttcagaacttataaccttctatc

SEQ ID NO: 941598 - DNA, 33 bp, Homo sapien
tccttgtctcttcagagcttataaccttctatc

SEQ ID NO: 941599 - DNA, 33 bp, Homo sapien
gggcatctggataaaaccgtgtctcgatgtatt

SEQ ID NO: 941600 - DNA, 33 bp, Homo sapien
gggcatctggataaaatcgtgtctcgatgtatt

SEQ ID NO: 941601 - DNA, 33 bp, Homo sapien
aactaaatgctcaggcagaacctgcaaggggca

SEQ ID NO: 941602 - DNA, 33 bp, Homo sapien
aactaaatgctcaggcggaacctgcaaggggca

SEQ ID NO: 941603 - DNA, 33 bp, Homo sapien
ttatatataggaaaacactatctttagaaagcc

SEQ ID NO: 941604 - DNA, 33 bp, Homo sapien
ttatatataggaaaacgctatctttagaaagcc

SEQ ID NO: 941605 - DNA, 33 bp, Homo sapien
tcgtccaaagccatgaaaagagagcagtttata

SEQ ID NO: 941606 - DNA, 33 bp, Homo sapien
tcgtccaaagccatgagaagagagcagtttata

SEQ ID NO: 941607 - DNA, 33 bp, Homo sapien
ccaggttgtttgaacccgcagacggccgttgca

SEQ ID NO: 941608 - DNA, 33 bp, Homo sapien
ccaggttgtttgaacctgcagacggccgttgca

SEQ ID NO: 941609 - DNA, 33 bp, Homo sapien
ctttttcggtcatgtaagtcaggaggcttttac

SEQ ID NO: 941610 - DNA, 33 bp, Homo sapien
ctttttcggtcatgtacgtcaggaggcttttac

SEQ ID NO: 941611 - DNA, 33 bp, Homo sapien
ataattttaagtattaactcaatgtgggccact

SEQ ID NO: 941612 - DNA, 33 bp, Homo sapien
ataattttaagtattacctcaatgtgggccact

SEQ ID NO: 941613 - DNA, 33 bp, Homo sapien
catgtgcacacttaaacaggctttaaaagaagc

SEQ ID NO: 941614 - DNA, 33 bp, Homo sapien
catgtgcacacttaaagaggctttaaaagaagc

SEQ ID NO: 941615 - DNA, 33 bp, Homo sapien
tttactcaagacggtgaaattaatttggcactg

SEQ ID NO: 941616 - DNA, 33 bp, Homo sapien
tttactcaagacggtggaattaatttggcactg

SEQ ID NO: 941617 - DNA, 33 bp, Homo sapien
ttctatgtgtattgcaatcctaatttgtgtttt

SEQ ID NO: 941618 - DNA, 33 bp, Homo sapien
ttctatgtgtattgcattcctaatttgtgtttt

SEQ ID NO: 941619 - DNA, 33 bp, Homo sapien
aaaaaagtgtaatttacgtcctcagtttggaaa

SEQ ID NO: 941620 - DNA, 33 bp, Homo sapien
aaaaaagtgtaatttaggtcctcagtttggaaa

SEQ ID NO: 941621 - DNA, 33 bp, Homo sapien
atccatggtgatgcaacacagaagactaagagc

SEQ ID NO: 941622 - DNA, 33 bp, Homo sapien
atccatggtgatgcaagacagaagactaagagc

SEQ ID NO: 941623 - DNA, 33 bp, Homo sapien
cactggttcttgtgtgaaattacaacagataat

SEQ ID NO: 941624 - DNA, 33 bp, Homo sapien
cactggttcttgtgtggaattacaacagataat

SEQ ID NO: 941625 - DNA, 33 bp, Homo sapien
aaatgcattcacgttccattccctcgagatgcc

SEQ ID NO: 941626 - DNA, 33 bp, Homo sapien
aaatgcattcacgttcgattccctcgagatgcc

SEQ ID NO: 941627 - DNA, 33 bp, Homo sapien
gggaaacaaggagctacgtaaggacacagcagc

SEQ ID NO: 941628 - DNA, 33 bp, Homo sapien
gggaaacaaggagctaggtaaggacacagcagc

SEQ ID NO: 941629 - DNA, 33 bp, Homo sapien
agggacgttttcgttcccagtaatttaaggtct

SEQ ID NO: 941630 - DNA, 33 bp, Homo sapien
agggacgttttcgttctcagtaatttaaggtct

SEQ ID NO: 941631 - DNA, 33 bp, Homo sapien
ttaagtctgcgtttgaaggcctgaaaatcgggg

SEQ ID NO: 941632 - DNA, 33 bp, Homo sapien
ttaagtctgcgtttgagggcctgaaaatcgggg

SEQ ID NO: 941633 - DNA, 33 bp, Homo sapien
ccacctaaacctgagccaagccaatgtggagca

SEQ ID NO: 941634 - DNA, 33 bp, Homo sapien
ccacctaaacctgagcgaagccaatgtggagca

SEQ ID NO: 941635 - DNA, 33 bp, Homo sapien
ataaacctgagccacgccaatgtggagcatctg

SEQ ID NO: 941636 - DNA, 33 bp, Homo sapien
ataaacctgagccacgtcaatgtggagcatctg

SEQ ID NO: 941637 - DNA, 33 bp, Homo sapien
cctcaaaggtcactcacaggacagacatgggtg

SEQ ID NO: 941638 - DNA, 33 bp, Homo sapien
cctcaaaggtcactcataggacagacatgggtg

SEQ ID NO: 941639 - DNA, 33 bp, Homo sapien
gctggaatcctcaaggaaattgctccttttcgc

SEQ ID NO: 941640 - DNA, 33 bp, Homo sapien
gctggaatcctcaaggcaattgctccttttcgc

SEQ ID NO: 941641 - DNA, 33 bp, Homo sapien
aaacttgaagcttacaaaagtccctttcctcct

SEQ ID NO: 941642 - DNA, 33 bp, Homo sapien
aaacttgaagcttacagaagtccctttcctcct

SEQ ID NO: 941643 - DNA, 33 bp, Homo sapien
gttttgaaatgacaacaacagcttcgtcgtggg

SEQ ID NO: 941644 - DNA, 33 bp, Homo sapien
gttttgaaatgacaactacagcttcgtcgtggg

SEQ ID NO: 941645 - DNA, 33 bp, Homo sapien
cacctttattcaaccaagcgacctctgctgcat

SEQ ID NO: 941646 - DNA, 33 bp, Homo sapien
cacctttattcaaccacgcgacctctgctgcat

SEQ ID NO: 941647 - DNA, 33 bp, Homo sapien
ctaatttgtaataagcactcacttctcttctgt

SEQ ID NO: 941648 - DNA, 33 bp, Homo sapien
ctaatttgtaataagcgctcacttctcttctgt

SEQ ID NO: 941649 - DNA, 33 bp, Homo sapien
aaggattggatgaagaagccgagaggacctgga

SEQ ID NO: 941650 - DNA, 33 bp, Homo sapien
aaggattggatgaagacgccgagaggacctgga

SEQ ID NO: 941651 - DNA, 33 bp, Homo sapien
agaggccgtaacacgggacagtcacaggcagag

SEQ ID NO: 941652 - DNA, 33 bp, Homo sapien
agaggccgtaacacggtacagtcacaggcagag

SEQ ID NO: 941653 - DNA, 33 bp, Homo sapien
tcccgagaagctgagcaacatcacggtttccgt

SEQ ID NO: 941654 - DNA, 33 bp, Homo sapien
tcccgagaagctgagcgacatcacggtttccgt

SEQ ID NO: 941655 - DNA, 33 bp, Homo sapien
gtgtcctgcacgagggaattatagacgtgtgtg

SEQ ID NO: 941656 - DNA, 33 bp, Homo sapien
gtgtcctgcacgaggggattatagacgtgtgtg

SEQ ID NO: 941657 - DNA, 33 bp, Homo sapien
gaagcttcaactctcaaggtcatcagtctcatg

SEQ ID NO: 941658 - DNA, 33 bp, Homo sapien
gaagcttcaactctcagggtcatcagtctcatg

SEQ ID NO: 941659 - DNA, 33 bp, Homo sapien
aaacgagaagctgaaacttaaagggaagagtag

SEQ ID NO: 941660 - DNA, 33 bp, Homo sapien
aaacgagaagctgaaagttaaagggaagagtag

SEQ ID NO: 941661 - DNA, 33 bp, Homo sapien
gtgctcttgaaacttcaatgtgcttacgaacca

SEQ ID NO: 941662 - DNA, 33 bp, Homo sapien
gtgctcttgaaacttcgatgtgcttacgaacca

SEQ ID NO: 941663 - DNA, 33 bp, Homo sapien
taagtcacacccatcacagaatatcagcgggtt

SEQ ID NO: 941664 - DNA, 33 bp, Homo sapien
taagtcacacccatcagagaatatcagcgggtt

SEQ ID NO: 941665 - DNA, 33 bp, Homo sapien
acacagtaggagcagacaaaaacccgctgatat

SEQ ID NO: 941666 - DNA, 33 bp, Homo sapien
acacagtaggagcagataaaaacccgctgatat

SEQ ID NO: 941667 - DNA, 33 bp, Homo sapien
attgttctctcgtgagaacttccgatctcagaa

SEQ ID NO: 941668 - DNA, 33 bp, Homo sapien
attgttctctcgtgagcacttccgatctcagaa

SEQ ID NO: 941669 - DNA, 33 bp, Homo sapien
atcacttcactccaaaatccatctttctttaaa

SEQ ID NO: 941670 - DNA, 33 bp, Homo sapien
atcacttcactccaaagtccatctttctttaaa

SEQ ID NO: 941671 - DNA, 33 bp, Homo sapien
cacctcactcctgcaacaatgatcataattaaa

SEQ ID NO: 941672 - DNA, 33 bp, Homo sapien
cacctcactcctgcaagaatgatcataattaaa

SEQ ID NO: 941673 - DNA, 33 bp, Homo sapien
acctgcatcctgacaacggtggcctggagcacg

SEQ ID NO: 941674 - DNA, 33 bp, Homo sapien
acctgcatcctgacaatggtggcctggagcacg

SEQ ID NO: 941675 - DNA, 33 bp, Homo sapien
tattaccaccactttacgtaggagatgctgaaa

SEQ ID NO: 941676 - DNA, 33 bp, Homo sapien
tattaccaccactttatgtaggagatgctgaaa

SEQ ID NO: 941677 - DNA, 33 bp, Homo sapien
aagtaattcaagaggaagctgtttaatttccat

SEQ ID NO: 941678 - DNA, 33 bp, Homo sapien
aagtaattcaagaggaggctgtttaatttccat

SEQ ID NO: 941679 - DNA, 33 bp, Homo sapien
cacacggcacatattccaagattgataacatcc

SEQ ID NO: 941680 - DNA, 33 bp, Homo sapien
cacacggcacatattctaagattgataacatcc

SEQ ID NO: 941681 - DNA, 33 bp, Homo sapien
cacacttgaccaaatacacctaatagatatcta

SEQ ID NO: 941682 - DNA, 33 bp, Homo sapien
cacacttgaccaaatagacctaatagatatcta

SEQ ID NO: 941683 - DNA, 33 bp, Homo sapien
aagtcagcatgaaaaaaaaatgctaaatgcagc

SEQ ID NO: 941684 - DNA, 33 bp, Homo sapien
aagtcagcatgaaaaagaaatgctaaatgcagc

SEQ ID NO: 941685 - DNA, 33 bp, Homo sapien
acatggatcccgtcaaaatggttaattttatgt

SEQ ID NO: 941686 - DNA, 33 bp, Homo sapien
acatggatcccgtcaacatggttaattttatgt

SEQ ID NO: 941687 - DNA, 33 bp, Homo sapien
ggaatggctaaatcaacctgcttaaactttttt

SEQ ID NO: 941688 - DNA, 33 bp, Homo sapien
ggaatggctaaatcaagctgcttaaactttttt

SEQ ID NO: 941689 - DNA, 33 bp, Homo sapien
aaatctactttcctgccgaagtgtgggggttcc

SEQ ID NO: 941690 - DNA, 33 bp, Homo sapien
aaatctactttcctgctgaagtgtgggggttcc

SEQ ID NO: 941691 - DNA, 33 bp, Homo sapien
tctctgtaaatatatcacgtggcaaatattcag

SEQ ID NO: 941692 - DNA, 33 bp, Homo sapien
tctctgtaaatatatcgcgtggcaaatattcag

SEQ ID NO: 941693 - DNA, 33 bp, Homo sapien
aactaaaaacacaaacaaagcttagcaagtctt

SEQ ID NO: 941694 - DNA, 33 bp, Homo sapien
aactaaaaacacaaacgaagcttagcaagtctt

SEQ ID NO: 941695 - DNA, 33 bp, Homo sapien
actattgaaaggcccaagtgaatacctaacatt

SEQ ID NO: 941696 - DNA, 33 bp, Homo sapien
actattgaaaggcccaggtgaatacctaacatt

SEQ ID NO: 941697 - DNA, 33 bp, Homo sapien
gagcctgtgagggaagcacgtgttctaggcatc

SEQ ID NO: 941698 - DNA, 33 bp, Homo sapien
gagcctgtgagggaagtacgtgttctaggcatc

SEQ ID NO: 941699 - DNA, 33 bp, Homo sapien
ggtccgtggccaggaaagaacagacgggccaag

SEQ ID NO: 941700 - DNA, 33 bp, Homo sapien
ggtccgtggccaggaacgaacagacgggccaag

SEQ ID NO: 941701 - DNA, 33 bp, Homo sapien
gtacctcagcaggattcaagaggaagtgggcgg

SEQ ID NO: 941702 - DNA, 33 bp, Homo sapien
gtacctcagcaggattgaagaggaagtgggcgg

SEQ ID NO: 941703 - DNA, 33 bp, Homo sapien
tggacagatggaccgacggatagatgggtggac

SEQ ID NO: 941704 - DNA, 33 bp, Homo sapien
tggacagatggaccgatggatagatgggtggac

SEQ ID NO: 941705 - DNA, 33 bp, Homo sapien
aggaaaaacaaagtaacgcaacatggggacgtg

SEQ ID NO: 941706 - DNA, 33 bp, Homo sapien
aggaaaaacaaagtaaggcaacatggggacgtg

SEQ ID NO: 941707 - DNA, 33 bp, Homo sapien
agctcaaccgtgtccactggaaaggctcttact

SEQ ID NO: 941708 - DNA, 33 bp, Homo sapien
agctcaaccgtgtccattggaaaggctcttact

SEQ ID NO: 941709 - DNA, 33 bp, Homo sapien
gatttactgggaaaaaactcttcttttatgaca

SEQ ID NO: 941710 - DNA, 33 bp, Homo sapien
gatttactgggaaaaacctcttcttttatgaca

SEQ ID NO: 941711 - DNA, 33 bp, Homo sapien
agggaaatagaagaatcaagttgcgtggaagat

SEQ ID NO: 941712 - DNA, 33 bp, Homo sapien
agggaaatagaagaattaagttgcgtggaagat

SEQ ID NO: 941713 - DNA, 33 bp, Homo sapien
aactttgttttaaaatgagaacatcattcgtgc

SEQ ID NO: 941714 - DNA, 33 bp, Homo sapien
aactttgttttaaaattagaacatcattcgtgc

SEQ ID NO: 941715 - DNA, 33 bp, Homo sapien
agcattttcatcacaggccttgcccttctcaac

SEQ ID NO: 941716 - DNA, 33 bp, Homo sapien
agcattttcatcacagtccttgcccttctcaac

SEQ ID NO: 941717 - DNA, 33 bp, Homo sapien
agtgagaaaatgataacgtcttcccatccaaga

SEQ ID NO: 941718 - DNA, 33 bp, Homo sapien
agtgagaaaatgataatgtcttcccatccaaga

SEQ ID NO: 941719 - DNA, 33 bp, Homo sapien
caggagaattagaaaaaaaaatgattatgaaac

SEQ ID NO: 941720 - DNA, 33 bp, Homo sapien
caggagaattagaaaacaaaatgattatgaaac

SEQ ID NO: 941721 - DNA, 33 bp, Homo sapien
gtatccaagtgttatccgaaatgagtggtgggg

SEQ ID NO: 941722 - DNA, 33 bp, Homo sapien
gtatccaagtgttatctgaaatgagtggtgggg

SEQ ID NO: 941723 - DNA, 33 bp, Homo sapien
tcagtagcaggactcaagagatttgatcaatca

SEQ ID NO: 941724 - DNA, 33 bp, Homo sapien
tcagtagcaggactcatgagatttgatcaatca

SEQ ID NO: 941725 - DNA, 33 bp, Homo sapien
caaaacccacatctacaactttgaaggtatctg

SEQ ID NO: 941726 - DNA, 33 bp, Homo sapien
caaaacccacatctacgactttgaaggtatctg

SEQ ID NO: 941727 - DNA, 33 bp, Homo sapien
gatggatttgctcgtacgatgaaaactggcccc

SEQ ID NO: 941728 - DNA, 33 bp, Homo sapien
gatggatttgctcgtatgatgaaaactggcccc

SEQ ID NO: 941729 - DNA, 33 bp, Homo sapien
ttgtggtgtgtcagctaagcctgtgttattaaa

SEQ ID NO: 941730 - DNA, 33 bp, Homo sapien
ttgtggtgtgtcagctgagcctgtgttattaaa

SEQ ID NO: 941731 - DNA, 33 bp, Homo sapien
tggttttgccaggagacagccggatgcggagga

SEQ ID NO: 941732 - DNA, 33 bp, Homo sapien
tggttttgccaggagagagccggatgcggagga

SEQ ID NO: 941733 - DNA, 33 bp, Homo sapien
ctgcaaagcacccttccgaaaatcaacactcgg

SEQ ID NO: 941734 - DNA, 33 bp, Homo sapien
ctgcaaagcacccttctgaaaatcaacactcgg

SEQ ID NO: 941735 - DNA, 33 bp, Homo sapien
acttaccacgtttcccacaagcgaacccaaaga

SEQ ID NO: 941736 - DNA, 33 bp, Homo sapien
acttaccacgtttcccgcaagcgaacccaaaga

SEQ ID NO: 941737 - DNA, 33 bp, Homo sapien
gtgcagtctcagaaaacacgagggatgccacca

SEQ ID NO: 941738 - DNA, 33 bp, Homo sapien
gtgcagtctcagaaaatacgagggatgccacca

SEQ ID NO: 941739 - DNA, 33 bp, Homo sapien
gtcaggtgtcgtgatgaattactaacaactagg

SEQ ID NO: 941740 - DNA, 33 bp, Homo sapien
gtcaggtgtcgtgatggattactaacaactagg

SEQ ID NO: 941741 - DNA, 33 bp, Homo sapien
gcgagttacagccagacgttttggaaagtacct

SEQ ID NO: 941742 - DNA, 33 bp, Homo sapien
gcgagttacagccagaggttttggaaagtacct

SEQ ID NO: 941743 - DNA, 33 bp, Homo sapien
tgtaactctctcttaacggagaatcagtagaaa

SEQ ID NO: 941744 - DNA, 33 bp, Homo sapien
tgtaactctctcttaatggagaatcagtagaaa

SEQ ID NO: 941745 - DNA, 33 bp, Homo sapien
ttcattgtaactaatcaattgtcagtgatcagc

SEQ ID NO: 941746 - DNA, 33 bp, Homo sapien
ttcattgtaactaatccattgtcagtgatcagc

SEQ ID NO: 941747 - DNA, 33 bp, Homo sapien
aattgtgagtttaacactgtcaacatctactaa

SEQ ID NO: 941748 - DNA, 33 bp, Homo sapien
aattgtgagtttaacagtgtcaacatctactaa

SEQ ID NO: 941749 - DNA, 33 bp, Homo sapien
tctttagccagcataaaatgtcttgagcaatga

SEQ ID NO: 941750 - DNA, 33 bp, Homo sapien
tctttagccagcataacatgtcttgagcaatga

SEQ ID NO: 941751 - DNA, 33 bp, Homo sapien
ctcagccttacctgtaaaattgcaaagaaatac

SEQ ID NO: 941752 - DNA, 33 bp, Homo sapien
ctcagccttacctgtagaattgcaaagaaatac

SEQ ID NO: 941753 - DNA, 33 bp, Homo sapien
tcgcttgtcgcttgtcacctgtcgcctgtcgca

SEQ ID NO: 941754 - DNA, 33 bp, Homo sapien
tcgcttgtcgcttgtcgcctgtcgcctgtcgca

SEQ ID NO: 941755 - DNA, 33 bp, Homo sapien
aatgaccttcgaaaaacggatctagctgaatct

SEQ ID NO: 941756 - DNA, 33 bp, Homo sapien
aatgaccttcgaaaaatggatctagctgaatct

SEQ ID NO: 941757 - DNA, 33 bp, Homo sapien
atttaatgctcagaacgaatccacagaaaggag

SEQ ID NO: 941758 - DNA, 33 bp, Homo sapien
atttaatgctcagaactaatccacagaaaggag

SEQ ID NO: 941759 - DNA, 33 bp, Homo sapien
aaaatagttacattcaaaaccattcattgaata

SEQ ID NO: 941760 - DNA, 33 bp, Homo sapien
aaaatagttacattcagaaccattcattgaata

SEQ ID NO: 941761 - DNA, 33 bp, Homo sapien
ctccacagggtgcgtacctcatcctgcaacgtg

SEQ ID NO: 941762 - DNA, 33 bp, Homo sapien
ctccacagggtgcgtatctcatcctgcaacgtg

SEQ ID NO: 941763 - DNA, 33 bp, Homo sapien
cctccctcctggaccgaaatattccacttccgg

SEQ ID NO: 941764 - DNA, 33 bp, Homo sapien
cctccctcctggaccgcaatattccacttccgg

SEQ ID NO: 941765 - DNA, 33 bp, Homo sapien
taaacaaatgatttcactctctctccctttgtt

SEQ ID NO: 941766 - DNA, 33 bp, Homo sapien
taaacaaatgatttcagtctctctccctttgtt

SEQ ID NO: 941767 - DNA, 33 bp, Homo sapien
gcctggagtcacttcacgtccccgagtttgctt

SEQ ID NO: 941768 - DNA, 33 bp, Homo sapien
gcctggagtcacttcatgtccccgagtttgctt

SEQ ID NO: 941769 - DNA, 33 bp, Homo sapien
cacaggataactctcacagtgtggaccccgagg

SEQ ID NO: 941770 - DNA, 33 bp, Homo sapien
cacaggataactctcatagtgtggaccccgagg

SEQ ID NO: 941771 - DNA, 33 bp, Homo sapien
tactcacctcattcaccaaccgtcacggtttca

SEQ ID NO: 941772 - DNA, 33 bp, Homo sapien
tactcacctcattcacgaaccgtcacggtttca

SEQ ID NO: 941773 - DNA, 33 bp, Homo sapien
acagtgccgagtgtctaaaagggaagtgggtga

SEQ ID NO: 941774 - DNA, 33 bp, Homo sapien
acagtgccgagtgtctgaaagggaagtgggtga

SEQ ID NO: 941775 - DNA, 33 bp, Homo sapien
taatgcgtgtctcattgaaaacggttccctatt

SEQ ID NO: 941776 - DNA, 33 bp, Homo sapien
taatgcgtgtctcatttaaaacggttccctatt

SEQ ID NO: 941777 - DNA, 33 bp, Homo sapien
ctcaattcgaggaagacctttccaattgtcata

SEQ ID NO: 941778 - DNA, 33 bp, Homo sapien
ctcaattcgaggaagagctttccaattgtcata

SEQ ID NO: 941779 - DNA, 33 bp, Homo sapien
caaatgaaacacaaaaaaaatgtgacttgttac

SEQ ID NO: 941780 - DNA, 33 bp, Homo sapien
caaatgaaacacaaaagaaatgtgacttgttac

SEQ ID NO: 941781 - DNA, 33 bp, Homo sapien
ttaaacctgcagtgaccgggcagcaacgcgctg

SEQ ID NO: 941782 - DNA, 33 bp, Homo sapien
ttaaacctgcagtgactgggcagcaacgcgctg

SEQ ID NO: 941783 - DNA, 33 bp, Homo sapien
ggaagtgagaggataacagagttctgcagaaga

SEQ ID NO: 941784 - DNA, 33 bp, Homo sapien
ggaagtgagaggataatagagttctgcagaaga

SEQ ID NO: 941785 - DNA, 33 bp, Homo sapien
gaattcattaggttaccaggccaggtctgtatt

SEQ ID NO: 941786 - DNA, 33 bp, Homo sapien
gaattcattaggttactaggccaggtctgtatt

SEQ ID NO: 941787 - DNA, 33 bp, Homo sapien
cctggtgtccctggataagccgcgtgcctctgc

SEQ ID NO: 941788 - DNA, 33 bp, Homo sapien
cctggtgtccctggatgagccgcgtgcctctgc

SEQ ID NO: 941789 - DNA, 33 bp, Homo sapien
agatgggttcataaaaagtttagagggcagagg

SEQ ID NO: 941790 - DNA, 33 bp, Homo sapien
agatgggttcataaaaggtttagagggcagagg

SEQ ID NO: 941791 - DNA, 33 bp, Homo sapien
ttcctggataagacaaatgaaaacaaggaagtt

SEQ ID NO: 941792 - DNA, 33 bp, Homo sapien
ttcctggataagacaactgaaaacaaggaagtt

SEQ ID NO: 941793 - DNA, 33 bp, Homo sapien
ttagtttagctggcaaatcaaagtaacgtacaa

SEQ ID NO: 941794 - DNA, 33 bp, Homo sapien
ttagtttagctggcaagtcaaagtaacgtacaa

SEQ ID NO: 941795 - DNA, 33 bp, Homo sapien
taaattcaagttctggaaagttcacggaaataa

SEQ ID NO: 941796 - DNA, 33 bp, Homo sapien
taaattcaagttctgggaagttcacggaaataa

SEQ ID NO: 941797 - DNA, 33 bp, Homo sapien
ggagcatgtgtctgaacgtggaggatactggcg

SEQ ID NO: 941798 - DNA, 33 bp, Homo sapien
ggagcatgtgtctgaatgtggaggatactggcg

SEQ ID NO: 941799 - DNA, 33 bp, Homo sapien
ttcagacacatgctccaaaaacctacaggcaac

SEQ ID NO: 941800 - DNA, 33 bp, Homo sapien
ttcagacacatgctccgaaaacctacaggcaac

SEQ ID NO: 941801 - DNA, 33 bp, Homo sapien
gcctcctgctctgagccctagactctgcagcct

SEQ ID NO: 941802 - DNA, 33 bp, Homo sapien
gcctcctgctctgagcgctagactctgcagcct

SEQ ID NO: 941803 - DNA, 33 bp, Homo sapien
tgggatatttcagcacggaattcgtgagatcag

SEQ ID NO: 941804 - DNA, 33 bp, Homo sapien
tgggatatttcagcactgaattcgtgagatcag

SEQ ID NO: 941805 - DNA, 33 bp, Homo sapien
gcaactctgactttacagaccttgaaagaatgc

SEQ ID NO: 941806 - DNA, 33 bp, Homo sapien
gcaactctgactttactgaccttgaaagaatgc

SEQ ID NO: 941807 - DNA, 33 bp, Homo sapien
gtttcctaatgtcttacggccgctaggagagaa

SEQ ID NO: 941808 - DNA, 33 bp, Homo sapien
gtttcctaatgtcttatggccgctaggagagaa

SEQ ID NO: 941809 - DNA, 33 bp, Homo sapien
ctgatggtttggcatacgtaagaaagtcacagc

SEQ ID NO: 941810 - DNA, 33 bp, Homo sapien
ctgatggtttggcataggtaagaaagtcacagc

SEQ ID NO: 941811 - DNA, 33 bp, Homo sapien
atccttgcattcctgacataaaccttacatgat

SEQ ID NO: 941812 - DNA, 33 bp, Homo sapien
atccttgcattcctgagataaaccttacatgat

SEQ ID NO: 941813 - DNA, 33 bp, Homo sapien
cttatgtagaatctaaattaaaatctaaccaaa

SEQ ID NO: 941814 - DNA, 33 bp, Homo sapien
cttatgtagaatctaagttaaaatctaaccaaa

SEQ ID NO: 941815 - DNA, 33 bp, Homo sapien
ataaagcaatgaagccactaaagatttaatctg

SEQ ID NO: 941816 - DNA, 33 bp, Homo sapien
ataaagcaatgaagccgctaaagatttaatctg

SEQ ID NO: 941817 - DNA, 33 bp, Homo sapien
cacagtcctgtctaaacgtttatttgtcatttt

SEQ ID NO: 941818 - DNA, 33 bp, Homo sapien
cacagtcctgtctaaatgtttatttgtcatttt

SEQ ID NO: 941819 - DNA, 33 bp, Homo sapien
aggcgcgtaagggtgacgccatccgggtctgcg

SEQ ID NO: 941820 - DNA, 33 bp, Homo sapien
aggcgcgtaagggtgatgccatccgggtctgcg

SEQ ID NO: 941821 - DNA, 33 bp, Homo sapien
agagaaaaagtgaagtaaaaaatgtcctttgag

SEQ ID NO: 941822 - DNA, 33 bp, Homo sapien
agagaaaaagtgaagtcaaaaatgtcctttgag

SEQ ID NO: 941823 - DNA, 33 bp, Homo sapien
caagtggcttatgatcaaacttgtgtcttatga

SEQ ID NO: 941824 - DNA, 33 bp, Homo sapien
caagtggcttatgatcgaacttgtgtcttatga

SEQ ID NO: 941825 - DNA, 33 bp, Homo sapien
gcaatggtcaaaccaacggaatagacctggtcc

SEQ ID NO: 941826 - DNA, 33 bp, Homo sapien
gcaatggtcaaaccaatggaatagacctggtcc

SEQ ID NO: 941827 - DNA, 33 bp, Homo sapien
cttcacatggacgcaacgtgggacacacggcct

SEQ ID NO: 941828 - DNA, 33 bp, Homo sapien
cttcacatggacgcaatgtgggacacacggcct

SEQ ID NO: 941829 - DNA, 33 bp, Homo sapien
ttgtctccacgttcccaatactgctgggcaacc

SEQ ID NO: 941830 - DNA, 33 bp, Homo sapien
ttgtctccacgttcccgatactgctgggcaacc

SEQ ID NO: 941831 - DNA, 33 bp, Homo sapien
aaaccatactccacaacgtgtgactggagaccc

SEQ ID NO: 941832 - DNA, 33 bp, Homo sapien
aaaccatactccacaatgtgtgactggagaccc

SEQ ID NO: 941833 - DNA, 33 bp, Homo sapien
cagttcagaaccctcactaggcaagaaccctgt

SEQ ID NO: 941834 - DNA, 33 bp, Homo sapien
cagttcagaaccctcattaggcaagaaccctgt

SEQ ID NO: 941835 - DNA, 33 bp, Homo sapien
ctctttttgtcgacaacaggaaaaatctaccta

SEQ ID NO: 941836 - DNA, 33 bp, Homo sapien
ctctttttgtcgacaataggaaaaatctaccta

SEQ ID NO: 941837 - DNA, 33 bp, Homo sapien
gagttaaagctgagaaccattgggactcactgc

SEQ ID NO: 941838 - DNA, 33 bp, Homo sapien
gagttaaagctgagaatcattgggactcactgc

SEQ ID NO: 941839 - DNA, 33 bp, Homo sapien
tttcttcaaacgtcaccgctcagagcccagcat

SEQ ID NO: 941840 - DNA, 33 bp, Homo sapien
tttcttcaaacgtcactgctcagagcccagcat

SEQ ID NO: 941841 - DNA, 33 bp, Homo sapien
gatgcttgtattataaaaaaggtttcaagctga

SEQ ID NO: 941842 - DNA, 33 bp, Homo sapien
gatgcttgtattataagaaaggtttcaagctga

SEQ ID NO: 941843 - DNA, 33 bp, Homo sapien
tattggatgaatactagctgcagttagcagtaa

SEQ ID NO: 941844 - DNA, 33 bp, Homo sapien
tattggatgaatactatctgcagttagcagtaa

SEQ ID NO: 941845 - DNA, 33 bp, Homo sapien
gcagccttggaaatcacggagagttgttgcatt

SEQ ID NO: 941846 - DNA, 33 bp, Homo sapien
gcagccttggaaatcatggagagttgttgcatt

SEQ ID NO: 941847 - DNA, 33 bp, Homo sapien
gtaaactttcaaattacacgcgccaagtggttc

SEQ ID NO: 941848 - DNA, 33 bp, Homo sapien
gtaaactttcaaattatacgcgccaagtggttc

SEQ ID NO: 941849 - DNA, 33 bp, Homo sapien
tttttacctgggtgacagatgtatatgttttaa

SEQ ID NO: 941850 - DNA, 33 bp, Homo sapien
tttttacctgggtgacggatgtatatgttttaa

SEQ ID NO: 941851 - DNA, 33 bp, Homo sapien
aatccggacttgcggcagagtctccaaacgaat

SEQ ID NO: 941852 - DNA, 33 bp, Homo sapien
aatccggacttgcggcggagtctccaaacgaat

SEQ ID NO: 941853 - DNA, 33 bp, Homo sapien
acttaccttaaagtcacgagttcaaaattcaaa

SEQ ID NO: 941854 - DNA, 33 bp, Homo sapien
acttaccttaaagtcatgagttcaaaattcaaa

SEQ ID NO: 941855 - DNA, 33 bp, Homo sapien
tgactgacatggtgtgcacctcgtcctcttgtc

SEQ ID NO: 941856 - DNA, 33 bp, Homo sapien
tgactgacatggtgtgtacctcgtcctcttgtc

SEQ ID NO: 941857 - DNA, 33 bp, Homo sapien
ctatctatgtgggaacagaacggaaatattcag

SEQ ID NO: 941858 - DNA, 33 bp, Homo sapien
ctatctatgtgggaacggaacggaaatattcag

SEQ ID NO: 941859 - DNA, 33 bp, Homo sapien
tttcaaaacatttgacgataaccgaacctccta

SEQ ID NO: 941860 - DNA, 33 bp, Homo sapien
tttcaaaacatttgactataaccgaacctccta

SEQ ID NO: 941861 - DNA, 33 bp, Homo sapien
gggcgtgtgaaatccaaacactgagggcaggag

SEQ ID NO: 941862 - DNA, 33 bp, Homo sapien
gggcgtgtgaaatccagacactgagggcaggag

SEQ ID NO: 941863 - DNA, 33 bp, Homo sapien
ccgagttgactgtcacaaacggtttaattcctt

SEQ ID NO: 941864 - DNA, 33 bp, Homo sapien
ccgagttgactgtcactaacggtttaattcctt

SEQ ID NO: 941865 - DNA, 33 bp, Homo sapien
ttctgctaacaatcccaggaagtcgtcagtcac

SEQ ID NO: 941866 - DNA, 33 bp, Homo sapien
ttctgctaacaatcccgggaagtcgtcagtcac

SEQ ID NO: 941867 - DNA, 33 bp, Homo sapien
tcagcaccatgccgacaaccatgaaaactgcct

SEQ ID NO: 941868 - DNA, 33 bp, Homo sapien
tcagcaccatgccgacgaccatgaaaactgcct

SEQ ID NO: 941869 - DNA, 33 bp, Homo sapien
tgggcaaaagggagacaaaatgaatatgagacc

SEQ ID NO: 941870 - DNA, 33 bp, Homo sapien
tgggcaaaagggagacgaaatgaatatgagacc

SEQ ID NO: 941871 - DNA, 33 bp, Homo sapien
cagtctctcagctgcaccccgtgtacctctctc

SEQ ID NO: 941872 - DNA, 33 bp, Homo sapien
cagtctctcagctgcatcccgtgtacctctctc

SEQ ID NO: 941873 - DNA, 33 bp, Homo sapien
cctccttacttatggccactccatccatcttta

SEQ ID NO: 941874 - DNA, 33 bp, Homo sapien
cctccttacttatggctactccatccatcttta

SEQ ID NO: 941875 - DNA, 33 bp, Homo sapien
agatctcaaaatggaaaacagattgttgattcc

SEQ ID NO: 941876 - DNA, 33 bp, Homo sapien
agatctcaaaatggaagacagattgttgattcc

SEQ ID NO: 941877 - DNA, 33 bp, Homo sapien
aaagaaagcgtactcaacattccgtgtggatct

SEQ ID NO: 941878 - DNA, 33 bp, Homo sapien
aaagaaagcgtactcatcattccgtgtggatct

SEQ ID NO: 941879 - DNA, 33 bp, Homo sapien
agctcaggccggtgaactgcaatttaagttatc

SEQ ID NO: 941880 - DNA, 33 bp, Homo sapien
agctcaggccggtgaattgcaatttaagttatc

SEQ ID NO: 941881 - DNA, 33 bp, Homo sapien
ccacctactacctgccagaagcacccccattta

SEQ ID NO: 941882 - DNA, 33 bp, Homo sapien
ccacctactacctgccggaagcacccccattta

SEQ ID NO: 941883 - DNA, 33 bp, Homo sapien
cacacacacggcttaaaggaatgcagaagacat

SEQ ID NO: 941884 - DNA, 33 bp, Homo sapien
cacacacacggcttaagggaatgcagaagacat

SEQ ID NO: 941885 - DNA, 33 bp, Homo sapien
agaagaaatttcaatacagaaagaatgtcaacc

SEQ ID NO: 941886 - DNA, 33 bp, Homo sapien
agaagaaatttcaatagagaaagaatgtcaacc

SEQ ID NO: 941887 - DNA, 33 bp, Homo sapien
aaacagaatactggccggcactgtcatcttcat

SEQ ID NO: 941888 - DNA, 33 bp, Homo sapien
aaacagaatactggcctgcactgtcatcttcat

SEQ ID NO: 941889 - DNA, 33 bp, Homo sapien
ctgtgtgtttgcgttaagtgtctctctgagggg

SEQ ID NO: 941890 - DNA, 33 bp, Homo sapien
ctgtgtgtttgcgttacgtgtctctctgagggg

SEQ ID NO: 941891 - DNA, 33 bp, Homo sapien
gccgttctcagtgacaaagttgatgcgtgtttc

SEQ ID NO: 941892 - DNA, 33 bp, Homo sapien
gccgttctcagtgacagagttgatgcgtgtttc

SEQ ID NO: 941893 - DNA, 33 bp, Homo sapien
aagtcggcaatcctacaagagccgctgctgaag

SEQ ID NO: 941894 - DNA, 33 bp, Homo sapien
aagtcggcaatcctaccagagccgctgctgaag

SEQ ID NO: 941895 - DNA, 33 bp, Homo sapien
aatattttcagcttggcaatttagtttaaatgg

SEQ ID NO: 941896 - DNA, 33 bp, Homo sapien
aatattttcagcttgggaatttagtttaaatgg

SEQ ID NO: 941897 - DNA, 33 bp, Homo sapien
aggctacagtaaccgaaacaggaggatattctt

SEQ ID NO: 941898 - DNA, 33 bp, Homo sapien
aggctacagtaaccgagacaggaggatattctt

SEQ ID NO: 941899 - DNA, 33 bp, Homo sapien
aatgaaaaaattcataaattaggcatcatacgc

SEQ ID NO: 941900 - DNA, 33 bp, Homo sapien
aatgaaaaaattcatatattaggcatcatacgc

SEQ ID NO: 941901 - DNA, 33 bp, Homo sapien
gagattaatgctcacactggcagattttgagta

SEQ ID NO: 941902 - DNA, 33 bp, Homo sapien
gagattaatgctcacattggcagattttgagta

SEQ ID NO: 941903 - DNA, 33 bp, Homo sapien
aaataaagctgttgatcacaaatttattactat

SEQ ID NO: 941904 - DNA, 33 bp, Homo sapien
aaataaagctgttgatgacaaatttattactat

SEQ ID NO: 941905 - DNA, 33 bp, Homo sapien
agagacagaaccacatcacagggagtggttggg

SEQ ID NO: 941906 - DNA, 33 bp, Homo sapien
agagacagaaccacattacagggagtggttggg

SEQ ID NO: 941907 - DNA, 33 bp, Homo sapien
ctgggtgcgcagtgcagaaatttcagttgaagt

SEQ ID NO: 941908 - DNA, 33 bp, Homo sapien
ctgggtgcgcagtgcataaatttcagttgaagt

SEQ ID NO: 941909 - DNA, 33 bp, Homo sapien
tggaacttttgaacaacttgtcaggaacagcag

SEQ ID NO: 941910 - DNA, 33 bp, Homo sapien
tggaacttttgaacaatttgtcaggaacagcag

SEQ ID NO: 941911 - DNA, 33 bp, Homo sapien
tacatggatcagtaaaggacagctattgaacgt

SEQ ID NO: 941912 - DNA, 33 bp, Homo sapien
tacatggatcagtaaatgacagctattgaacgt

SEQ ID NO: 941913 - DNA, 33 bp, Homo sapien
cagaggttagaagtctaaagtaggttctgtggg

SEQ ID NO: 941914 - DNA, 33 bp, Homo sapien
cagaggttagaagtctgaagtaggttctgtggg

SEQ ID NO: 941915 - DNA, 33 bp, Homo sapien
acgacctgatgtttgacgctagccccacagaac

SEQ ID NO: 941916 - DNA, 33 bp, Homo sapien
acgacctgatgtttgatgctagccccacagaac

SEQ ID NO: 941917 - DNA, 33 bp, Homo sapien
ggtccccttctgcatgaaggattcgctcaagtc

SEQ ID NO: 941918 - DNA, 33 bp, Homo sapien
ggtccccttctgcatgcaggattcgctcaagtc

SEQ ID NO: 941919 - DNA, 33 bp, Homo sapien
gggcaagtggggcttgcagaaacgagctgtgta

SEQ ID NO: 941920 - DNA, 33 bp, Homo sapien
gggcaagtggggcttgtagaaacgagctgtgta

SEQ ID NO: 941921 - DNA, 33 bp, Homo sapien
cctcggtgtgcgtaaaacccaatctcctttgct

SEQ ID NO: 941922 - DNA, 33 bp, Homo sapien
cctcggtgtgcgtaaagcccaatctcctttgct

SEQ ID NO: 941923 - DNA, 33 bp, Homo sapien
cgcacaccgaggttctcacgtgaagatgctaat

SEQ ID NO: 941924 - DNA, 33 bp, Homo sapien
cgcacaccgaggttcttacgtgaagatgctaat

SEQ ID NO: 941925 - DNA, 33 bp, Homo sapien
ctcacaatgaatggaacggattactaaaatata

SEQ ID NO: 941926 - DNA, 33 bp, Homo sapien
ctcacaatgaatggaatggattactaaaatata

SEQ ID NO: 941927 - DNA, 33 bp, Homo sapien
agttgcaagtgggcagcagtgctaaggtagtag

SEQ ID NO: 941928 - DNA, 33 bp, Homo sapien
agttgcaagtgggcaggagtgctaaggtagtag

SEQ ID NO: 941929 - DNA, 33 bp, Homo sapien
aactcagaaatatcacgcacaagaccagggtta

SEQ ID NO: 941930 - DNA, 33 bp, Homo sapien
aactcagaaatatcactcacaagaccagggtta

SEQ ID NO: 941931 - DNA, 33 bp, Homo sapien
aagaacactgagaatgaatcaacgtttagtgaa

SEQ ID NO: 941932 - DNA, 33 bp, Homo sapien
aagaacactgagaatgcatcaacgtttagtgaa

SEQ ID NO: 941933 - DNA, 33 bp, Homo sapien
aattagcaagaaattacagtctcaccagcattt

SEQ ID NO: 941934 - DNA, 33 bp, Homo sapien
aattagcaagaaattatagtctcaccagcattt

SEQ ID NO: 941935 - DNA, 33 bp, Homo sapien
ccacaatctacacttcacatggctttgaggaat

SEQ ID NO: 941936 - DNA, 33 bp, Homo sapien
ccacaatctacacttcccatggctttgaggaat

SEQ ID NO: 941937 - DNA, 33 bp, Homo sapien
gtgtccggcgtcccacaaagcggagataagcat

SEQ ID NO: 941938 - DNA, 33 bp, Homo sapien
gtgtccggcgtcccacgaagcggagataagcat

SEQ ID NO: 941939 - DNA, 33 bp, Homo sapien
tgtgtttgctacaggccgatgaaatgatttttt

SEQ ID NO: 941940 - DNA, 33 bp, Homo sapien
tgtgtttgctacaggctgatgaaatgatttttt

SEQ ID NO: 941941 - DNA, 33 bp, Homo sapien
tattaaacacgccaaactggttggattttccca

SEQ ID NO: 941942 - DNA, 33 bp, Homo sapien
tattaaacacgccaaattggttggattttccca

SEQ ID NO: 941943 - DNA, 33 bp, Homo sapien
cacttgcttctgatgacgcctttcctggcagtg

SEQ ID NO: 941944 - DNA, 33 bp, Homo sapien
cacttgcttctgatgatgcctttcctggcagtg

SEQ ID NO: 941945 - DNA, 33 bp, Homo sapien
cagccagtctcctcccaaactcgagttgcatgg

SEQ ID NO: 941946 - DNA, 33 bp, Homo sapien
cagccagtctcctcccgaactcgagttgcatgg

SEQ ID NO: 941947 - DNA, 33 bp, Homo sapien
acttatagggaagcaaataagtttctgctatta

SEQ ID NO: 941948 - DNA, 33 bp, Homo sapien
acttatagggaagcaagtaagtttctgctatta

SEQ ID NO: 941949 - DNA, 33 bp, Homo sapien
actaggttcagaagcacgccggatgctaaacta

SEQ ID NO: 941950 - DNA, 33 bp, Homo sapien
actaggttcagaagcaggccggatgctaaacta

SEQ ID NO: 941951 - DNA, 33 bp, Homo sapien
cttagtctgatccacaaaatggacacagtctat

SEQ ID NO: 941952 - DNA, 33 bp, Homo sapien
cttagtctgatccacataatggacacagtctat

SEQ ID NO: 941953 - DNA, 33 bp, Homo sapien
tggctgcagagaagaacgggctcagccgcgcgg

SEQ ID NO: 941954 - DNA, 33 bp, Homo sapien
tggctgcagagaagaatgggctcagccgcgcgg

SEQ ID NO: 941955 - DNA, 33 bp, Homo sapien
tctcaaaaataacataaataaatgtaggcagct

SEQ ID NO: 941956 - DNA, 33 bp, Homo sapien
tctcaaaaataacatacataaatgtaggcagct

SEQ ID NO: 941957 - DNA, 33 bp, Homo sapien
gtgcctgacagatacacgatttccaccagctgc

SEQ ID NO: 941958 - DNA, 33 bp, Homo sapien
gtgcctgacagatacatgatttccaccagctgc

SEQ ID NO: 941959 - DNA, 33 bp, Homo sapien
agcactttgtttcttcaccttgatttgcacttt

SEQ ID NO: 941960 - DNA, 33 bp, Homo sapien
agcactttgtttcttcgccttgatttgcacttt

SEQ ID NO: 941961 - DNA, 33 bp, Homo sapien
accatttacctttccagtaagtgcttgaagttt

SEQ ID NO: 941962 - DNA, 33 bp, Homo sapien
accatttacctttccattaagtgcttgaagttt

SEQ ID NO: 941963 - DNA, 33 bp, Homo sapien
ttggacaatgcttttacgtccgtaccagcgcac

SEQ ID NO: 941964 - DNA, 33 bp, Homo sapien
ttggacaatgcttttatgtccgtaccagcgcac

SEQ ID NO: 941965 - DNA, 33 bp, Homo sapien
taacactaatccaaagaaagctgcagtcactgc

SEQ ID NO: 941966 - DNA, 33 bp, Homo sapien
taacactaatccaaagcaagctgcagtcactgc

SEQ ID NO: 941967 - DNA, 33 bp, Homo sapien
ccaaaagcaagggcaactaaagccaaaattaac

SEQ ID NO: 941968 - DNA, 33 bp, Homo sapien
ccaaaagcaagggcaagtaaagccaaaattaac

SEQ ID NO: 941969 - DNA, 33 bp, Homo sapien
gtagggcttgggtagtaaaacaaccaggctgat

SEQ ID NO: 941970 - DNA, 33 bp, Homo sapien
gtagggcttgggtagtgaaacaaccaggctgat

SEQ ID NO: 941971 - DNA, 33 bp, Homo sapien
gcatatgttgagacctaagatagcttttccaga

SEQ ID NO: 941972 - DNA, 33 bp, Homo sapien
gcatatgttgagacctgagatagcttttccaga

SEQ ID NO: 941973 - DNA, 33 bp, Homo sapien
ttccctattctcctcacgaagcccatagctgtt

SEQ ID NO: 941974 - DNA, 33 bp, Homo sapien
ttccctattctcctcatgaagcccatagctgtt

SEQ ID NO: 941975 - DNA, 33 bp, Homo sapien
ggaggcaggcccgacaagtagtggcgtcccagg

SEQ ID NO: 941976 - DNA, 33 bp, Homo sapien
ggaggcaggcccgacaggtagtggcgtcccagg

SEQ ID NO: 941977 - DNA, 33 bp, Homo sapien
gtcgccagtgcgggcacagacatctgcggaaac

SEQ ID NO: 941978 - DNA, 33 bp, Homo sapien
gtcgccagtgcgggcatagacatctgcggaaac

SEQ ID NO: 941979 - DNA, 33 bp, Homo sapien
cacttcgagtacccaacggcgtgccgcatgaca

SEQ ID NO: 941980 - DNA, 33 bp, Homo sapien
cacttcgagtacccaatggcgtgccgcatgaca

SEQ ID NO: 941981 - DNA, 33 bp, Homo sapien
cattttaatgatagtcaaagatgtatcaagcaa

SEQ ID NO: 941982 - DNA, 33 bp, Homo sapien
cattttaatgatagtcgaagatgtatcaagcaa

SEQ ID NO: 941983 - DNA, 33 bp, Homo sapien
atgggcaagccgtctggagacatcccaacacca

SEQ ID NO: 941984 - DNA, 33 bp, Homo sapien
atgggcaagccgtctgtagacatcccaacacca

SEQ ID NO: 941985 - DNA, 33 bp, Homo sapien
gtctcatagggaatccacatttcacatcaactc

SEQ ID NO: 941986 - DNA, 33 bp, Homo sapien
gtctcatagggaatccgcatttcacatcaactc

SEQ ID NO: 941987 - DNA, 33 bp, Homo sapien
caaacaacatttggcagggttcttcctgttgaa

SEQ ID NO: 941988 - DNA, 33 bp, Homo sapien
caaacaacatttggcatggttcttcctgttgaa

SEQ ID NO: 941989 - DNA, 33 bp, Homo sapien
taagaaaagggcaagacgatcccctgccacctc

SEQ ID NO: 941990 - DNA, 33 bp, Homo sapien
taagaaaagggcaagatgatcccctgccacctc

SEQ ID NO: 941991 - DNA, 33 bp, Homo sapien
ctacaggaaaaagaaacacacagagcaggccga

SEQ ID NO: 941992 - DNA, 33 bp, Homo sapien
ctacaggaaaaagaaatacacagagcaggccga

SEQ ID NO: 941993 - DNA, 33 bp, Homo sapien
cttccccaagttggcaccatcttacctgtcagg

SEQ ID NO: 941994 - DNA, 33 bp, Homo sapien
cttccccaagttggcatcatcttacctgtcagg

SEQ ID NO: 941995 - DNA, 33 bp, Homo sapien
catttcttgtctacagaagactggtagcctcga

SEQ ID NO: 941996 - DNA, 33 bp, Homo sapien
catttcttgtctacaggagactggtagcctcga

SEQ ID NO: 941997 - DNA, 33 bp, Homo sapien
cgtctttgttatgacccggcacctggcacaggg

SEQ ID NO: 941998 - DNA, 33 bp, Homo sapien
cgtctttgttatgacctggcacctggcacaggg

SEQ ID NO: 941999 - DNA, 33 bp, Homo sapien
tttcatacgctgggaaactttaataaggaacaa

SEQ ID NO: 942000 - DNA, 33 bp, Homo sapien
tttcatacgctgggaagctttaataaggaacaa

SEQ ID NO: 942001 - DNA, 33 bp, Homo sapien
gttctcttcccatgtcagaattttgtgagctcc

SEQ ID NO: 942002 - DNA, 33 bp, Homo sapien
gttctcttcccatgtccgaattttgtgagctcc

SEQ ID NO: 942003 - DNA, 33 bp, Homo sapien
ccctggcctgctaaacaacccttgaaatacagt

SEQ ID NO: 942004 - DNA, 33 bp, Homo sapien
ccctggcctgctaaactacccttgaaatacagt

SEQ ID NO: 942005 - DNA, 33 bp, Homo sapien
ctatgtttgattcacaccttgcataacttacac

SEQ ID NO: 942006 - DNA, 33 bp, Homo sapien
ctatgtttgattcacagcttgcataacttacac

SEQ ID NO: 942007 - DNA, 33 bp, Homo sapien
ctatacgggcagcagaaagtaaaacaataatat

SEQ ID NO: 942008 - DNA, 33 bp, Homo sapien
ctatacgggcagcagagagtaaaacaataatat

SEQ ID NO: 942009 - DNA, 33 bp, Homo sapien
tatggaacgcataagcacatgataaacatatat

SEQ ID NO: 942010 - DNA, 33 bp, Homo sapien
tatggaacgcataagcgcatgataaacatatat

SEQ ID NO: 942011 - DNA, 33 bp, Homo sapien
ggccgccagggacaccactgagtagggccacag

SEQ ID NO: 942012 - DNA, 33 bp, Homo sapien
ggccgccagggacaccgctgagtagggccacag

SEQ ID NO: 942013 - DNA, 33 bp, Homo sapien
acctttttagaaaacactacaagtatcaggatt

SEQ ID NO: 942014 - DNA, 33 bp, Homo sapien
acctttttagaaaacattacaagtatcaggatt

SEQ ID NO: 942015 - DNA, 33 bp, Homo sapien
gattcataaaaacaacacagtctgatttcataa

SEQ ID NO: 942016 - DNA, 33 bp, Homo sapien
gattcataaaaacaactcagtctgatttcataa

SEQ ID NO: 942017 - DNA, 33 bp, Homo sapien
tacaaccgtcattagcacatttccagtttgctc

SEQ ID NO: 942018 - DNA, 33 bp, Homo sapien
tacaaccgtcattagcgcatttccagtttgctc

SEQ ID NO: 942019 - DNA, 33 bp, Homo sapien
tgcttgtcatatggccacaggtagattttcttc

SEQ ID NO: 942020 - DNA, 33 bp, Homo sapien
tgcttgtcatatggccgcaggtagattttcttc

SEQ ID NO: 942021 - DNA, 33 bp, Homo sapien
agtgtgttgactttcacgtcgatgacaggcagc

SEQ ID NO: 942022 - DNA, 33 bp, Homo sapien
agtgtgttgactttcatgtcgatgacaggcagc

SEQ ID NO: 942023 - DNA, 33 bp, Homo sapien
gctgacacagaaaccacgcctttgtttctggac

SEQ ID NO: 942024 - DNA, 33 bp, Homo sapien
gctgacacagaaaccatgcctttgtttctggac

SEQ ID NO: 942025 - DNA, 33 bp, Homo sapien
acaggcatcactaatcaataaaccaatggtttc

SEQ ID NO: 942026 - DNA, 33 bp, Homo sapien
acaggcatcactaatccataaaccaatggtttc

SEQ ID NO: 942027 - DNA, 33 bp, Homo sapien
attatagtttactaccactgaactcaaacaatt

SEQ ID NO: 942028 - DNA, 33 bp, Homo sapien
attatagtttactaccgctgaactcaaacaatt

SEQ ID NO: 942029 - DNA, 33 bp, Homo sapien
gtcacaagcgtaaccactcctctcttgaacatc

SEQ ID NO: 942030 - DNA, 33 bp, Homo sapien
gtcacaagcgtaaccagtcctctcttgaacatc

SEQ ID NO: 942031 - DNA, 33 bp, Homo sapien
gctacgggaatgctccactcggaaggatgatga

SEQ ID NO: 942032 - DNA, 33 bp, Homo sapien
gctacgggaatgctccgctcggaaggatgatga

SEQ ID NO: 942033 - DNA, 33 bp, Homo sapien
taaagcctgtgctagaaagaaacgaccaggaag

SEQ ID NO: 942034 - DNA, 33 bp, Homo sapien
taaagcctgtgctagatagaaacgaccaggaag

SEQ ID NO: 942035 - DNA, 33 bp, Homo sapien
tccagcatgaccctaacaagtaagcaagagcct

SEQ ID NO: 942036 - DNA, 33 bp, Homo sapien
tccagcatgaccctaagaagtaagcaagagcct

SEQ ID NO: 942037 - DNA, 33 bp, Homo sapien
ttacttaggtctgttacaactcaggctattcag

SEQ ID NO: 942038 - DNA, 33 bp, Homo sapien
ttacttaggtctgttagaactcaggctattcag

SEQ ID NO: 942039 - DNA, 33 bp, Homo sapien
cttgacccattcatccactgagctgagttgctg

SEQ ID NO: 942040 - DNA, 33 bp, Homo sapien
cttgacccattcatccgctgagctgagttgctg

SEQ ID NO: 942041 - DNA, 33 bp, Homo sapien
tctttatgcatccacaatcattcactgtaacaa

SEQ ID NO: 942042 - DNA, 33 bp, Homo sapien
tctttatgcatccacagtcattcactgtaacaa

SEQ ID NO: 942043 - DNA, 33 bp, Homo sapien
aaagagttagagagacactcatattctgggagt

SEQ ID NO: 942044 - DNA, 33 bp, Homo sapien
aaagagttagagagacgctcatattctgggagt

SEQ ID NO: 942045 - DNA, 33 bp, Homo sapien
agatttttcttcttgtaaagttctctaaggctg

SEQ ID NO: 942046 - DNA, 33 bp, Homo sapien
agatttttcttcttgtgaagttctctaaggctg

SEQ ID NO: 942047 - DNA, 33 bp, Homo sapien
tgtgaaaacctccaaacgtagctcacacacccc

SEQ ID NO: 942048 - DNA, 33 bp, Homo sapien
tgtgaaaacctccaaatgtagctcacacacccc

SEQ ID NO: 942049 - DNA, 33 bp, Homo sapien
atgatagctgggattacgattagaaacttagca

SEQ ID NO: 942050 - DNA, 33 bp, Homo sapien
atgatagctgggattaggattagaaacttagca

SEQ ID NO: 942051 - DNA, 33 bp, Homo sapien
tcagattgagctgccaaaaagactgacatcacg

SEQ ID NO: 942052 - DNA, 33 bp, Homo sapien
tcagattgagctgccagaaagactgacatcacg

SEQ ID NO: 942053 - DNA, 33 bp, Homo sapien
caggtatcgctgggatgaaacacacacacacac

SEQ ID NO: 942054 - DNA, 33 bp, Homo sapien
caggtatcgctgggattaaacacacacacacac

SEQ ID NO: 942055 - DNA, 33 bp, Homo sapien
ggtttaggagaaactccattgccctgttttgct

SEQ ID NO: 942056 - DNA, 33 bp, Homo sapien
ggtttaggagaaactctattgccctgttttgct

SEQ ID NO: 942057 - DNA, 33 bp, Homo sapien
taatttactgtccacagtcttggcctcataggt

SEQ ID NO: 942058 - DNA, 33 bp, Homo sapien
taatttactgtccacattcttggcctcataggt

SEQ ID NO: 942059 - DNA, 33 bp, Homo sapien
taattaccgaagccacaaagacatcgcctatca

SEQ ID NO: 942060 - DNA, 33 bp, Homo sapien
taattaccgaagccacgaagacatcgcctatca

SEQ ID NO: 942061 - DNA, 33 bp, Homo sapien
atctgaggacatttaaaaatatgcactttatcg

SEQ ID NO: 942062 - DNA, 33 bp, Homo sapien
atctgaggacatttaacaatatgcactttatcg

SEQ ID NO: 942063 - DNA, 33 bp, Homo sapien
gtgaagcacttacctgaagcaggaggatgaact

SEQ ID NO: 942064 - DNA, 33 bp, Homo sapien
gtgaagcacttacctggagcaggaggatgaact

SEQ ID NO: 942065 - DNA, 33 bp, Homo sapien
aagtggaggaacagacaccattttcaaatgagt

SEQ ID NO: 942066 - DNA, 33 bp, Homo sapien
aagtggaggaacagacgccattttcaaatgagt

SEQ ID NO: 942067 - DNA, 33 bp, Homo sapien
cacagttgtctagccaaaaatctagtacactgt

SEQ ID NO: 942068 - DNA, 33 bp, Homo sapien
cacagttgtctagccacaaatctagtacactgt

SEQ ID NO: 942069 - DNA, 33 bp, Homo sapien
cactgaatctttctaaatgcaagtcttttgaca

SEQ ID NO: 942070 - DNA, 33 bp, Homo sapien
cactgaatctttctaagtgcaagtcttttgaca

SEQ ID NO: 942071 - DNA, 33 bp, Homo sapien
agagatgcaggacccacaaggcggcagttcatt

SEQ ID NO: 942072 - DNA, 33 bp, Homo sapien
agagatgcaggacccagaaggcggcagttcatt

SEQ ID NO: 942073 - DNA, 33 bp, Homo sapien
ctgcagcagtactctgaatttatgtgggctttc

SEQ ID NO: 942074 - DNA, 33 bp, Homo sapien
ctgcagcagtactctggatttatgtgggctttc

SEQ ID NO: 942075 - DNA, 33 bp, Homo sapien
actgaattttagaacactcattcaagcagcaga

SEQ ID NO: 942076 - DNA, 33 bp, Homo sapien
actgaattttagaacagtcattcaagcagcaga

SEQ ID NO: 942077 - DNA, 33 bp, Homo sapien
aattcagtgttggaaacgttggtgtgttacttg

SEQ ID NO: 942078 - DNA, 33 bp, Homo sapien
aattcagtgttggaaatgttggtgtgttacttg

SEQ ID NO: 942079 - DNA, 33 bp, Homo sapien
aactcagtttcaatcacgaggaacgtcctgtag

SEQ ID NO: 942080 - DNA, 33 bp, Homo sapien
aactcagtttcaatcatgaggaacgtcctgtag

SEQ ID NO: 942081 - DNA, 33 bp, Homo sapien
tcagctagagggctggaagtcaactctaacaaa

SEQ ID NO: 942082 - DNA, 33 bp, Homo sapien
tcagctagagggctgggagtcaactctaacaaa

SEQ ID NO: 942083 - DNA, 33 bp, Homo sapien
atgatcttcacaattaccatccaatcaaattga

SEQ ID NO: 942084 - DNA, 33 bp, Homo sapien
atgatcttcacaattatcatccaatcaaattga

SEQ ID NO: 942085 - DNA, 33 bp, Homo sapien
tatttgctttcattcgcaaactttgatgataaa

SEQ ID NO: 942086 - DNA, 33 bp, Homo sapien
tatttgctttcattcgtaaactttgatgataaa

SEQ ID NO: 942087 - DNA, 33 bp, Homo sapien
atctacagtaaaaccacagggttgatctttggt

SEQ ID NO: 942088 - DNA, 33 bp, Homo sapien
atctacagtaaaaccatagggttgatctttggt

SEQ ID NO: 942089 - DNA, 33 bp, Homo sapien
aattttgaaacgagacaatggcaatctgaccca

SEQ ID NO: 942090 - DNA, 33 bp, Homo sapien
aattttgaaacgagacgatggcaatctgaccca

SEQ ID NO: 942091 - DNA, 33 bp, Homo sapien
taaaagcagtcaaggcgccaagaaagtgagact

SEQ ID NO: 942092 - DNA, 33 bp, Homo sapien
taaaagcagtcaaggctccaagaaagtgagact

SEQ ID NO: 942093 - DNA, 33 bp, Homo sapien
tcatgacgatgctcaaatgggttttcatgtgtg

SEQ ID NO: 942094 - DNA, 33 bp, Homo sapien
tcatgacgatgctcaagtgggttttcatgtgtg

SEQ ID NO: 942095 - DNA, 33 bp, Homo sapien
ttgtgctattgctggaatataaaagtcaggtag

SEQ ID NO: 942096 - DNA, 33 bp, Homo sapien
ttgtgctattgctggactataaaagtcaggtag

SEQ ID NO: 942097 - DNA, 33 bp, Homo sapien
tggtgatgtaacctaccgcaactgctcacaacc

SEQ ID NO: 942098 - DNA, 33 bp, Homo sapien
tggtgatgtaacctactgcaactgctcacaacc

SEQ ID NO: 942099 - DNA, 33 bp, Homo sapien
cagagcctgcagtgacacggaaaactcctcgtc

SEQ ID NO: 942100 - DNA, 33 bp, Homo sapien
cagagcctgcagtgacgcggaaaactcctcgtc

SEQ ID NO: 942101 - DNA, 33 bp, Homo sapien
caaaatctgagtgcacagaagccaccgtcaggt

SEQ ID NO: 942102 - DNA, 33 bp, Homo sapien
caaaatctgagtgcacggaagccaccgtcaggt

SEQ ID NO: 942103 - DNA, 33 bp, Homo sapien
acagtttaaatggtaacgagaagaggccacctg

SEQ ID NO: 942104 - DNA, 33 bp, Homo sapien
acagtttaaatggtaatgagaagaggccacctg

SEQ ID NO: 942105 - DNA, 33 bp, Homo sapien
caactcacccatctcacgacagcattccacggg

SEQ ID NO: 942106 - DNA, 33 bp, Homo sapien
caactcacccatctcatgacagcattccacggg

SEQ ID NO: 942107 - DNA, 33 bp, Homo sapien
gagctcaggatcctgaaatgaatagatgaccct

SEQ ID NO: 942108 - DNA, 33 bp, Homo sapien
gagctcaggatcctgagatgaatagatgaccct

SEQ ID NO: 942109 - DNA, 33 bp, Homo sapien
ctagaaaagagtattagccatagctttgatgct

SEQ ID NO: 942110 - DNA, 33 bp, Homo sapien
ctagaaaagagtattatccatagctttgatgct

SEQ ID NO: 942111 - DNA, 33 bp, Homo sapien
cataaatcagttctaaaccatgctgctatcact

SEQ ID NO: 942112 - DNA, 33 bp, Homo sapien
cataaatcagttctaacccatgctgctatcact

SEQ ID NO: 942113 - DNA, 33 bp, Homo sapien
ggtgtgtcctgttgtcacataaatcagttctaa

SEQ ID NO: 942114 - DNA, 33 bp, Homo sapien
ggtgtgtcctgttgtcccataaatcagttctaa

SEQ ID NO: 942115 - DNA, 33 bp, Homo sapien
taaggataactttcaaatcatagcacgaaatat

SEQ ID NO: 942116 - DNA, 33 bp, Homo sapien
taaggataactttcaactcatagcacgaaatat

SEQ ID NO: 942117 - DNA, 33 bp, Homo sapien
ctctggactctggcagaatggtagagaagatgc

SEQ ID NO: 942118 - DNA, 33 bp, Homo sapien
ctctggactctggcaggatggtagagaagatgc

SEQ ID NO: 942119 - DNA, 33 bp, Homo sapien
actgcagacttttaagcaaaatgaatgctattg

SEQ ID NO: 942120 - DNA, 33 bp, Homo sapien
actgcagacttttaaggaaaatgaatgctattg

SEQ ID NO: 942121 - DNA, 33 bp, Homo sapien
ccactaaggtcatgtcccttccacataaaaaag

SEQ ID NO: 942122 - DNA, 33 bp, Homo sapien
ccactaaggtcatgtctcttccacataaaaaag

SEQ ID NO: 942123 - DNA, 33 bp, Homo sapien
caccacatagaccgtaacattcaggttccttct

SEQ ID NO: 942124 - DNA, 33 bp, Homo sapien
caccacatagaccgtatcattcaggttccttct

SEQ ID NO: 942125 - DNA, 33 bp, Homo sapien
tcctcttctactttcaagtatggtccatgcagg

SEQ ID NO: 942126 - DNA, 33 bp, Homo sapien
tcctcttctactttcaggtatggtccatgcagg

SEQ ID NO: 942127 - DNA, 33 bp, Homo sapien
gtggcatttattagcgaacttacctcagacgcc

SEQ ID NO: 942128 - DNA, 33 bp, Homo sapien
gtggcatttattagcgcacttacctcagacgcc

SEQ ID NO: 942129 - DNA, 33 bp, Homo sapien
tgacagttctataaaaaaaagtgtaggcacatt

SEQ ID NO: 942130 - DNA, 33 bp, Homo sapien
tgacagttctataaaagaaagtgtaggcacatt

SEQ ID NO: 942131 - DNA, 33 bp, Homo sapien
tttcatgttcctaaaacctgaatcagagcagtc

SEQ ID NO: 942132 - DNA, 33 bp, Homo sapien
tttcatgttcctaaaatctgaatcagagcagtc

SEQ ID NO: 942133 - DNA, 33 bp, Homo sapien
caggtatgtaggccacacgccgagttgctcaca

SEQ ID NO: 942134 - DNA, 33 bp, Homo sapien
caggtatgtaggccacgcgccgagttgctcaca

SEQ ID NO: 942135 - DNA, 33 bp, Homo sapien
ccacgagaatgattagacatttaactagacaga

SEQ ID NO: 942136 - DNA, 33 bp, Homo sapien
ccacgagaatgattagccatttaactagacaga

SEQ ID NO: 942137 - DNA, 33 bp, Homo sapien
tccttctttttcaagcggatagtcttcagttct

SEQ ID NO: 942138 - DNA, 33 bp, Homo sapien
tccttctttttcaagctgatagtcttcagttct

SEQ ID NO: 942139 - DNA, 33 bp, Homo sapien
ctttgcacgctcttgacgtcaggtagcacagaa

SEQ ID NO: 942140 - DNA, 33 bp, Homo sapien
ctttgcacgctcttgatgtcaggtagcacagaa

SEQ ID NO: 942141 - DNA, 33 bp, Homo sapien
tcaagccgtgtgttcagaagaagagcgcttgta

SEQ ID NO: 942142 - DNA, 33 bp, Homo sapien
tcaagccgtgtgttcataagaagagcgcttgta

SEQ ID NO: 942143 - DNA, 33 bp, Homo sapien
caaggagaggaaagtacgagacttcggtcattt

SEQ ID NO: 942144 - DNA, 33 bp, Homo sapien
caaggagaggaaagtatgagacttcggtcattt

SEQ ID NO: 942145 - DNA, 33 bp, Homo sapien
gagatctgaactatgacaaattcatctccgagc

SEQ ID NO: 942146 - DNA, 33 bp, Homo sapien
gagatctgaactatgagaaattcatctccgagc

SEQ ID NO: 942147 - DNA, 33 bp, Homo sapien
tccaatcagcccattaagattgcagatttgctg

SEQ ID NO: 942148 - DNA, 33 bp, Homo sapien
tccaatcagcccattaggattgcagatttgctg

SEQ ID NO: 942149 - DNA, 33 bp, Homo sapien
cctctcagctaaggtcactcttccctcctcacc

SEQ ID NO: 942150 - DNA, 33 bp, Homo sapien
cctctcagctaaggtcgctcttccctcctcacc

SEQ ID NO: 942151 - DNA, 33 bp, Homo sapien
attatctcaattaatccgaacaagaaaactact

SEQ ID NO: 942152 - DNA, 33 bp, Homo sapien
attatctcaattaatctgaacaagaaaactact

SEQ ID NO: 942153 - DNA, 33 bp, Homo sapien
tattgcaagagcatagaccaatgtgttttagga

SEQ ID NO: 942154 - DNA, 33 bp, Homo sapien
tattgcaagagcatagcccaatgtgttttagga

SEQ ID NO: 942155 - DNA, 33 bp, Homo sapien
tccttcccaggagaaacgattggctacttctca

SEQ ID NO: 942156 - DNA, 33 bp, Homo sapien
tccttcccaggagaaaggattggctacttctca

SEQ ID NO: 942157 - DNA, 33 bp, Homo sapien
aactgttaggtgctaccgggctaacggtgctat

SEQ ID NO: 942158 - DNA, 33 bp, Homo sapien
aactgttaggtgctactgggctaacggtgctat

SEQ ID NO: 942159 - DNA, 33 bp, Homo sapien
ctgtggatttatccgacaaacggcttgatgctt

SEQ ID NO: 942160 - DNA, 33 bp, Homo sapien
ctgtggatttatccgataaacggcttgatgctt

SEQ ID NO: 942161 - DNA, 33 bp, Homo sapien
ctcagagagtcgggaacttaatctgaggctctt

SEQ ID NO: 942162 - DNA, 33 bp, Homo sapien
ctcagagagtcgggaagttaatctgaggctctt

SEQ ID NO: 942163 - DNA, 33 bp, Homo sapien
taagtgcgttcaagaaaagaacaggagaaatgc

SEQ ID NO: 942164 - DNA, 33 bp, Homo sapien
taagtgcgttcaagaagagaacaggagaaatgc

SEQ ID NO: 942165 - DNA, 33 bp, Homo sapien
taaagtcgttgaatccaccccggaataccacaa

SEQ ID NO: 942166 - DNA, 33 bp, Homo sapien
taaagtcgttgaatccgccccggaataccacaa

SEQ ID NO: 942167 - DNA, 33 bp, Homo sapien
gctgggtagggttgtagaatctgcttttggaac

SEQ ID NO: 942168 - DNA, 33 bp, Homo sapien
gctgggtagggttgtataatctgcttttggaac

SEQ ID NO: 942169 - DNA, 33 bp, Homo sapien
tacggttccttcctgggaagttcaggccaattc

SEQ ID NO: 942170 - DNA, 33 bp, Homo sapien
tacggttccttcctggtaagttcaggccaattc

SEQ ID NO: 942171 - DNA, 33 bp, Homo sapien
aatgaacggctgcggacagaaaggttgacactc

SEQ ID NO: 942172 - DNA, 33 bp, Homo sapien
aatgaacggctgcggagagaaaggttgacactc

SEQ ID NO: 942173 - DNA, 33 bp, Homo sapien
gacattttaactgaaacggattgagtctttcct

SEQ ID NO: 942174 - DNA, 33 bp, Homo sapien
gacattttaactgaaatggattgagtctttcct

SEQ ID NO: 942175 - DNA, 33 bp, Homo sapien
aactcccaaaagaagaccgttgagagttctggt

SEQ ID NO: 942176 - DNA, 33 bp, Homo sapien
aactcccaaaagaagagcgttgagagttctggt

SEQ ID NO: 942177 - DNA, 33 bp, Homo sapien
ggggcactcaaaattccatcatgacctaaccat

SEQ ID NO: 942178 - DNA, 33 bp, Homo sapien
ggggcactcaaaattcgatcatgacctaaccat

SEQ ID NO: 942179 - DNA, 33 bp, Homo sapien
acagcagagatcttccagcccttttcacaggga

SEQ ID NO: 942180 - DNA, 33 bp, Homo sapien
acagcagagatcttccggcccttttcacaggga

SEQ ID NO: 942181 - DNA, 33 bp, Homo sapien
aaaatgaaagaggttccatcagattgggagcga

SEQ ID NO: 942182 - DNA, 33 bp, Homo sapien
aaaatgaaagaggttctatcagattgggagcga

SEQ ID NO: 942183 - DNA, 33 bp, Homo sapien
ctggtgtcgatgaacaaggcaacatctatctgg

SEQ ID NO: 942184 - DNA, 33 bp, Homo sapien
ctggtgtcgatgaacagggcaacatctatctgg

SEQ ID NO: 942185 - DNA, 33 bp, Homo sapien
tccaacttccaggcctcacttactgatccccca

SEQ ID NO: 942186 - DNA, 33 bp, Homo sapien
tccaacttccaggcctgacttactgatccccca

SEQ ID NO: 942187 - DNA, 33 bp, Homo sapien
caaactctaaagtttacactgtttccaccaagt

SEQ ID NO: 942188 - DNA, 33 bp, Homo sapien
caaactctaaagtttatactgtttccaccaagt

SEQ ID NO: 942189 - DNA, 33 bp, Homo sapien
agaaatcagatgatcaaagaaaaatttttttat

SEQ ID NO: 942190 - DNA, 33 bp, Homo sapien
agaaatcagatgatcagagaaaaatttttttat

SEQ ID NO: 942191 - DNA, 33 bp, Homo sapien
ccctacgagttcacgccgcaccactgccccttc

SEQ ID NO: 942192 - DNA, 33 bp, Homo sapien
ccctacgagttcacgctgcaccactgccccttc

SEQ ID NO: 942193 - DNA, 33 bp, Homo sapien
aactcgtagggctggagggtatcctcagatttc

SEQ ID NO: 942194 - DNA, 33 bp, Homo sapien
aactcgtagggctggatggtatcctcagatttc

SEQ ID NO: 942195 - DNA, 33 bp, Homo sapien
gccccagccatgccaccgtagaatcacgggagt

SEQ ID NO: 942196 - DNA, 33 bp, Homo sapien
gccccagccatgccactgtagaatcacgggagt

SEQ ID NO: 942197 - DNA, 33 bp, Homo sapien
gacattggattccctcaacgccatcgtgccttg

SEQ ID NO: 942198 - DNA, 33 bp, Homo sapien
gacattggattccctcgacgccatcgtgccttg

SEQ ID NO: 942199 - DNA, 33 bp, Homo sapien
tgtctgacattgagcagggtcttgacggtagaa

SEQ ID NO: 942200 - DNA, 33 bp, Homo sapien
tgtctgacattgagcatggtcttgacggtagaa

SEQ ID NO: 942201 - DNA, 33 bp, Homo sapien
atgtgctaacagataccgaaaggtgttatggct

SEQ ID NO: 942202 - DNA, 33 bp, Homo sapien
atgtgctaacagatactgaaaggtgttatggct

SEQ ID NO: 942203 - DNA, 33 bp, Homo sapien
gttagcacatcccaaacgctgagtgagcagagg

SEQ ID NO: 942204 - DNA, 33 bp, Homo sapien
gttagcacatcccaaaggctgagtgagcagagg

SEQ ID NO: 942205 - DNA, 33 bp, Homo sapien
gaagccttcttgatcaactgagaccttcccctc

SEQ ID NO: 942206 - DNA, 33 bp, Homo sapien
gaagccttcttgatcagctgagaccttcccctc

SEQ ID NO: 942207 - DNA, 33 bp, Homo sapien
ggtttggttgtatgcagtatatatgacaaaatt

SEQ ID NO: 942208 - DNA, 33 bp, Homo sapien
ggtttggttgtatgcattatatatgacaaaatt

SEQ ID NO: 942209 - DNA, 33 bp, Homo sapien
gtttcaggtgaggaaaggataaatggacctcca

SEQ ID NO: 942210 - DNA, 33 bp, Homo sapien
gtttcaggtgaggaaatgataaatggacctcca

SEQ ID NO: 942211 - DNA, 33 bp, Homo sapien
tagcataaagcaaagacgattggagtatttgtc

SEQ ID NO: 942212 - DNA, 33 bp, Homo sapien
tagcataaagcaaagatgattggagtatttgtc

SEQ ID NO: 942213 - DNA, 33 bp, Homo sapien
tatttcaccagggcacactttctcataaactca

SEQ ID NO: 942214 - DNA, 33 bp, Homo sapien
tatttcaccagggcacgctttctcataaactca

SEQ ID NO: 942215 - DNA, 33 bp, Homo sapien
caattgtctttgcttacgtccgcatttcacaaa

SEQ ID NO: 942216 - DNA, 33 bp, Homo sapien
caattgtctttgcttatgtccgcatttcacaaa

SEQ ID NO: 942217 - DNA, 33 bp, Homo sapien
tgtgaaatctcctgaaatgaattaaaatacaca

SEQ ID NO: 942218 - DNA, 33 bp, Homo sapien
tgtgaaatctcctgaattgaattaaaatacaca

SEQ ID NO: 942219 - DNA, 33 bp, Homo sapien
acaaacgattgaaggaccaataaatgtaactga

SEQ ID NO: 942220 - DNA, 33 bp, Homo sapien
acaaacgattgaaggatcaataaatgtaactga

SEQ ID NO: 942221 - DNA, 33 bp, Homo sapien
gcagacaacacactagaattttcacgggtgtgg

SEQ ID NO: 942222 - DNA, 33 bp, Homo sapien
gcagacaacacactagcattttcacgggtgtgg

SEQ ID NO: 942223 - DNA, 33 bp, Homo sapien
ttccagaagaattgcaaataacagaggtagatg

SEQ ID NO: 942224 - DNA, 33 bp, Homo sapien
ttccagaagaattgcacataacagaggtagatg

SEQ ID NO: 942225 - DNA, 33 bp, Homo sapien
tacagagtcatttgccaaggtattgattctgtg

SEQ ID NO: 942226 - DNA, 33 bp, Homo sapien
tacagagtcatttgccgaggtattgattctgtg

SEQ ID NO: 942227 - DNA, 33 bp, Homo sapien
gtattgattctgtgaaaaaattaaattttccta

SEQ ID NO: 942228 - DNA, 33 bp, Homo sapien
gtattgattctgtgaagaaattaaattttccta

SEQ ID NO: 942229 - DNA, 33 bp, Homo sapien
ggcttccaaaatggaggcaagggctaacaagag

SEQ ID NO: 942230 - DNA, 33 bp, Homo sapien
ggcttccaaaatggagtcaagggctaacaagag

SEQ ID NO: 942231 - DNA, 33 bp, Homo sapien
tttggctaaaatcaagcataaaaattagtctat

SEQ ID NO: 942232 - DNA, 33 bp, Homo sapien
tttggctaaaatcaaggataaaaattagtctat

SEQ ID NO: 942233 - DNA, 33 bp, Homo sapien
acatgtctagataaaactatagatgacatttgt

SEQ ID NO: 942234 - DNA, 33 bp, Homo sapien
acatgtctagataaaagtatagatgacatttgt

SEQ ID NO: 942235 - DNA, 33 bp, Homo sapien
gctatttcctggaaaccgtaatttgctggacct

SEQ ID NO: 942236 - DNA, 33 bp, Homo sapien
gctatttcctggaaactgtaatttgctggacct

SEQ ID NO: 942237 - DNA, 33 bp, Homo sapien
tgacatgcctctttgaaacatggaatatttaaa

SEQ ID NO: 942238 - DNA, 33 bp, Homo sapien
tgacatgcctctttgatacatggaatatttaaa

SEQ ID NO: 942239 - DNA, 33 bp, Homo sapien
ggactattatatgcaacctttccttccattcat

SEQ ID NO: 942240 - DNA, 33 bp, Homo sapien
ggactattatatgcaatctttccttccattcat

SEQ ID NO: 942241 - DNA, 33 bp, Homo sapien
taaaaaatatggtcatcatcctacaggtaaaat

SEQ ID NO: 942242 - DNA, 33 bp, Homo sapien
taaaaaatatggtcatgatcctacaggtaaaat

SEQ ID NO: 942243 - DNA, 33 bp, Homo sapien
cttggttcagtggtaacagaggctgcaccatca

SEQ ID NO: 942244 - DNA, 33 bp, Homo sapien
cttggttcagtggtaatagaggctgcaccatca

SEQ ID NO: 942245 - DNA, 33 bp, Homo sapien
gcaccatcagttcagacacacggctgtaacagc

SEQ ID NO: 942246 - DNA, 33 bp, Homo sapien
gcaccatcagttcagagacacggctgtaacagc

SEQ ID NO: 942247 - DNA, 33 bp, Homo sapien
actagggattggaatcaagcaatacgtcagtgg

SEQ ID NO: 942248 - DNA, 33 bp, Homo sapien
actagggattggaatcgagcaatacgtcagtgg

SEQ ID NO: 942249 - DNA, 33 bp, Homo sapien
ttacagcaagagttcacgttattaactgatatg

SEQ ID NO: 942250 - DNA, 33 bp, Homo sapien
ttacagcaagagttcatgttattaactgatatg

SEQ ID NO: 942251 - DNA, 33 bp, Homo sapien
acaggtgcttcatcaagattgcctaaagttaaa

SEQ ID NO: 942252 - DNA, 33 bp, Homo sapien
acaggtgcttcatcaatattgcctaaagttaaa

SEQ ID NO: 942253 - DNA, 33 bp, Homo sapien
gagacatccgaggaaacatctagttaaaaataa

SEQ ID NO: 942254 - DNA, 33 bp, Homo sapien
gagacatccgaggaaatatctagttaaaaataa

SEQ ID NO: 942255 - DNA, 33 bp, Homo sapien
gaacctctcttttgaacctgtcacctaccattt

SEQ ID NO: 942256 - DNA, 33 bp, Homo sapien
gaacctctcttttgaatctgtcacctaccattt

SEQ ID NO: 942257 - DNA, 33 bp, Homo sapien
gaccaagtccaagggcaatatcacaggaatgga

SEQ ID NO: 942258 - DNA, 33 bp, Homo sapien
gaccaagtccaagggcgatatcacaggaatgga

SEQ ID NO: 942259 - DNA, 33 bp, Homo sapien
ccacgtgtgtagaaaaccatgcctgtgcagagc

SEQ ID NO: 942260 - DNA, 33 bp, Homo sapien
ccacgtgtgtagaaaagcatgcctgtgcagagc

SEQ ID NO: 942261 - DNA, 33 bp, Homo sapien
gtggattttttcaaaacttcatgaaaacacagg

SEQ ID NO: 942262 - DNA, 33 bp, Homo sapien
gtggattttttcaaaagttcatgaaaacacagg

SEQ ID NO: 942263 - DNA, 33 bp, Homo sapien
ttcatttagtattataagttacagcattataat

SEQ ID NO: 942264 - DNA, 33 bp, Homo sapien
ttcatttagtattatatgttacagcattataat

SEQ ID NO: 942265 - DNA, 33 bp, Homo sapien
gcctccttagcttgaaactgtttcctcctggat

SEQ ID NO: 942266 - DNA, 33 bp, Homo sapien
gcctccttagcttgaacctgtttcctcctggat

SEQ ID NO: 942267 - DNA, 33 bp, Homo sapien
tcagtgaagtctttgacgtgggaacagagaata

SEQ ID NO: 942268 - DNA, 33 bp, Homo sapien
tcagtgaagtctttgatgtgggaacagagaata

SEQ ID NO: 942269 - DNA, 33 bp, Homo sapien
gaatatgaagagtggaaattcttgacgcctttc

SEQ ID NO: 942270 - DNA, 33 bp, Homo sapien
gaatatgaagagtggatattcttgacgcctttc

SEQ ID NO: 942271 - DNA, 33 bp, Homo sapien
ttgttaaatagtggagacatttggtgtaatctt

SEQ ID NO: 942272 - DNA, 33 bp, Homo sapien
ttgttaaatagtggaggcatttggtgtaatctt

SEQ ID NO: 942273 - DNA, 33 bp, Homo sapien
agaatcttatgacaacaatgtgtaacccagttc

SEQ ID NO: 942274 - DNA, 33 bp, Homo sapien
agaatcttatgacaacgatgtgtaacccagttc

SEQ ID NO: 942275 - DNA, 33 bp, Homo sapien
tctcaggatgatcagcactggcttcctctcttg

SEQ ID NO: 942276 - DNA, 33 bp, Homo sapien
tctcaggatgatcagcgctggcttcctctcttg

SEQ ID NO: 942277 - DNA, 33 bp, Homo sapien
ctgaaatttgtgtcatcaaactgatatctagat

SEQ ID NO: 942278 - DNA, 33 bp, Homo sapien
ctgaaatttgtgtcattaaactgatatctagat

SEQ ID NO: 942279 - DNA, 33 bp, Homo sapien
tgtgaatggcatagtaccagtctatacaatttt

SEQ ID NO: 942280 - DNA, 33 bp, Homo sapien
tgtgaatggcatagtagcagtctatacaatttt

SEQ ID NO: 942281 - DNA, 33 bp, Homo sapien
tccctgtagctcgtcacgcaagcattcagtaat

SEQ ID NO: 942282 - DNA, 33 bp, Homo sapien
tccctgtagctcgtcatgcaagcattcagtaat

SEQ ID NO: 942283 - DNA, 33 bp, Homo sapien
ctttgacttctgggaacaggactcactgtggtg

SEQ ID NO: 942284 - DNA, 33 bp, Homo sapien
ctttgacttctgggaataggactcactgtggtg

SEQ ID NO: 942285 - DNA, 33 bp, Homo sapien
catgtaccctctaagcacataactttctccttt

SEQ ID NO: 942286 - DNA, 33 bp, Homo sapien
catgtaccctctaagcgcataactttctccttt

SEQ ID NO: 942287 - DNA, 33 bp, Homo sapien
tgactcgagttgtgatgaaggtcagtcgttttg

SEQ ID NO: 942288 - DNA, 33 bp, Homo sapien
tgactcgagttgtgattaaggtcagtcgttttg

SEQ ID NO: 942289 - DNA, 33 bp, Homo sapien
agttgaaaaatacgtacaatgtgtatgtcagat

SEQ ID NO: 942290 - DNA, 33 bp, Homo sapien
agttgaaaaatacgtagaatgtgtatgtcagat

SEQ ID NO: 942291 - DNA, 33 bp, Homo sapien
tatgtcacaaataacacggctttcataaccctt

SEQ ID NO: 942292 - DNA, 33 bp, Homo sapien
tatgtcacaaataacatggctttcataaccctt

SEQ ID NO: 942293 - DNA, 33 bp, Homo sapien
tggcatattttatgaacattccctacaatctaa

SEQ ID NO: 942294 - DNA, 33 bp, Homo sapien
tggcatattttatgaagattccctacaatctaa

SEQ ID NO: 942295 - DNA, 33 bp, Homo sapien
gcttctaggctgcacaggagatggacatattcc

SEQ ID NO: 942296 - DNA, 33 bp, Homo sapien
gcttctaggctgcacatgagatggacatattcc

SEQ ID NO: 942297 - DNA, 33 bp, Homo sapien
tccacctgttaaaggaaaggaacttgatatctt

SEQ ID NO: 942298 - DNA, 33 bp, Homo sapien
tccacctgttaaaggagaggaacttgatatctt

SEQ ID NO: 942299 - DNA, 33 bp, Homo sapien
tttcatctctaattaaggcttcacttaacccaa

SEQ ID NO: 942300 - DNA, 33 bp, Homo sapien
tttcatctctaattaatgcttcacttaacccaa

SEQ ID NO: 942301 - DNA, 33 bp, Homo sapien
gactgtatttgtgggacgtatggtaaaggtaga

SEQ ID NO: 942302 - DNA, 33 bp, Homo sapien
gactgtatttgtgggatgtatggtaaaggtaga

SEQ ID NO: 942303 - DNA, 33 bp, Homo sapien
actgaaaaatgctgctaaaacagttatgaccat

SEQ ID NO: 942304 - DNA, 33 bp, Homo sapien
actgaaaaatgctgctgaaacagttatgaccat

SEQ ID NO: 942305 - DNA, 33 bp, Homo sapien
agagtgctctatttagaaacgttaggctggcag

SEQ ID NO: 942306 - DNA, 33 bp, Homo sapien
agagtgctctatttaggaacgttaggctggcag

SEQ ID NO: 942307 - DNA, 33 bp, Homo sapien
gacattgtcctccatccagacatagagaacgtt

SEQ ID NO: 942308 - DNA, 33 bp, Homo sapien
gacattgtcctccatctagacatagagaacgtt

SEQ ID NO: 942309 - DNA, 33 bp, Homo sapien
ctgcgggccttgccaaatgcgtgctcggattca

SEQ ID NO: 942310 - DNA, 33 bp, Homo sapien
ctgcgggccttgccaagtgcgtgctcggattca

SEQ ID NO: 942311 - DNA, 33 bp, Homo sapien
gctctgccttgggtagaaagagtctaggggtga

SEQ ID NO: 942312 - DNA, 33 bp, Homo sapien
gctctgccttgggtagcaagagtctaggggtga

SEQ ID NO: 942313 - DNA, 33 bp, Homo sapien
tttggagtcccatccacacacttctgcaagctg

SEQ ID NO: 942314 - DNA, 33 bp, Homo sapien
tttggagtcccatccatacacttctgcaagctg

SEQ ID NO: 942315 - DNA, 33 bp, Homo sapien
tgctttttgtcaggaacgtactggtgatgtctg

SEQ ID NO: 942316 - DNA, 33 bp, Homo sapien
tgctttttgtcaggaatgtactggtgatgtctg

SEQ ID NO: 942317 - DNA, 33 bp, Homo sapien
tgatttcatgagcgtccagcatttcccctgctt

SEQ ID NO: 942318 - DNA, 33 bp, Homo sapien
tgatttcatgagcgtctagcatttcccctgctt

SEQ ID NO: 942319 - DNA, 33 bp, Homo sapien
tctccatgtctgcttacatttaatcttcaaatc

SEQ ID NO: 942320 - DNA, 33 bp, Homo sapien
tctccatgtctgcttatatttaatcttcaaatc

SEQ ID NO: 942321 - DNA, 33 bp, Homo sapien
aactattctgtcttcagtcaattcttcttcccc

SEQ ID NO: 942322 - DNA, 33 bp, Homo sapien
aactattctgtcttcattcaattcttcttcccc

SEQ ID NO: 942323 - DNA, 33 bp, Homo sapien
caataaatggaaggtacacattggtttggtcca

SEQ ID NO: 942324 - DNA, 33 bp, Homo sapien
caataaatggaaggtatacattggtttggtcca

SEQ ID NO: 942325 - DNA, 33 bp, Homo sapien
cgtggctgttacatgacgcagataaaatgtgca

SEQ ID NO: 942326 - DNA, 33 bp, Homo sapien
cgtggctgttacatgatgcagataaaatgtgca

SEQ ID NO: 942327 - DNA, 33 bp, Homo sapien
ccttttctcgaaccaaccagaccaacgacattg

SEQ ID NO: 942328 - DNA, 33 bp, Homo sapien
ccttttctcgaaccaatcagaccaacgacattg

SEQ ID NO: 942329 - DNA, 33 bp, Homo sapien
atgcgtaaaattctcacataagccctgctctat

SEQ ID NO: 942330 - DNA, 33 bp, Homo sapien
atgcgtaaaattctcatataagccctgctctat

SEQ ID NO: 942331 - DNA, 33 bp, Homo sapien
tgatatatgtgcaaaactgtacacaaatgtgcc

SEQ ID NO: 942332 - DNA, 33 bp, Homo sapien
tgatatatgtgcaaaagtgtacacaaatgtgcc

SEQ ID NO: 942333 - DNA, 33 bp, Homo sapien
aatagcactacaaccaccttgttgctgtatttc

SEQ ID NO: 942334 - DNA, 33 bp, Homo sapien
aatagcactacaaccatcttgttgctgtatttc

SEQ ID NO: 942335 - DNA, 33 bp, Homo sapien
tctattcaaatgtgcaaatgaaggtacataaat

SEQ ID NO: 942336 - DNA, 33 bp, Homo sapien
tctattcaaatgtgcagatgaaggtacataaat

SEQ ID NO: 942337 - DNA, 33 bp, Homo sapien
ataatttctttatgccagacgagaatgtataaa

SEQ ID NO: 942338 - DNA, 33 bp, Homo sapien
ataatttctttatgccggacgagaatgtataaa

SEQ ID NO: 942339 - DNA, 33 bp, Homo sapien
taatgattattctagcagacacacatctagtag

SEQ ID NO: 942340 - DNA, 33 bp, Homo sapien
taatgattattctagcggacacacatctagtag

SEQ ID NO: 942341 - DNA, 33 bp, Homo sapien
gaccctaccttgcttcaaaatgagttggagcat

SEQ ID NO: 942342 - DNA, 33 bp, Homo sapien
gaccctaccttgcttccaaatgagttggagcat

SEQ ID NO: 942343 - DNA, 33 bp, Homo sapien
cgtcctgggatctgtccatgcctgggctctctg

SEQ ID NO: 942344 - DNA, 33 bp, Homo sapien
cgtcctgggatctgtcgatgcctgggctctctg

SEQ ID NO: 942345 - DNA, 33 bp, Homo sapien
tcagagatattcatccaatcctcctgctacaag

SEQ ID NO: 942346 - DNA, 33 bp, Homo sapien
tcagagatattcatccgatcctcctgctacaag

SEQ ID NO: 942347 - DNA, 33 bp, Homo sapien
ccgtgtcccatcatcaactgcaatgaggaaagg

SEQ ID NO: 942348 - DNA, 33 bp, Homo sapien
ccgtgtcccatcatcagctgcaatgaggaaagg

SEQ ID NO: 942349 - DNA, 33 bp, Homo sapien
gaagcaaaacttacaacagaaatgaagcaagac

SEQ ID NO: 942350 - DNA, 33 bp, Homo sapien
gaagcaaaacttacaagagaaatgaagcaagac

SEQ ID NO: 942351 - DNA, 33 bp, Homo sapien
agatgccaaaaccatacaagacagaaaagggaa

SEQ ID NO: 942352 - DNA, 33 bp, Homo sapien
agatgccaaaaccatagaagacagaaaagggaa

SEQ ID NO: 942353 - DNA, 33 bp, Homo sapien
acaaatgtacaggaataaaaaaaaacatcaaaa

SEQ ID NO: 942354 - DNA, 33 bp, Homo sapien
acaaatgtacaggaattaaaaaaaacatcaaaa

SEQ ID NO: 942355 - DNA, 33 bp, Homo sapien
agttattcatcaaaaacatagaaacttactctg

SEQ ID NO: 942356 - DNA, 33 bp, Homo sapien
agttattcatcaaaaatatagaaacttactctg

SEQ ID NO: 942357 - DNA, 33 bp, Homo sapien
ggtcattaggccaccaacctcaccgaaacactt

SEQ ID NO: 942358 - DNA, 33 bp, Homo sapien
ggtcattaggccaccagcctcaccgaaacactt

SEQ ID NO: 942359 - DNA, 33 bp, Homo sapien
taaaggtcaatggctacgaaagtgactagaatt

SEQ ID NO: 942360 - DNA, 33 bp, Homo sapien
taaaggtcaatggctatgaaagtgactagaatt

SEQ ID NO: 942361 - DNA, 33 bp, Homo sapien
ggttccatttctgtaacaattctttactctgca

SEQ ID NO: 942362 - DNA, 33 bp, Homo sapien
ggttccatttctgtaataattctttactctgca

SEQ ID NO: 942363 - DNA, 33 bp, Homo sapien
attgagattaccaagacaattgggactttaaac

SEQ ID NO: 942364 - DNA, 33 bp, Homo sapien
attgagattaccaagataattgggactttaaac

SEQ ID NO: 942365 - DNA, 33 bp, Homo sapien
ttggcagcgcggatgacgtaaaagggactacat

SEQ ID NO: 942366 - DNA, 33 bp, Homo sapien
ttggcagcgcggatgatgtaaaagggactacat

SEQ ID NO: 942367 - DNA, 33 bp, Homo sapien
atgagaatggattgtaaatttgagaaaaaatta

SEQ ID NO: 942368 - DNA, 33 bp, Homo sapien
atgagaatggattgtatatttgagaaaaaatta

SEQ ID NO: 942369 - DNA, 33 bp, Homo sapien
ttgatgaaagatgaaggatgaccaacgctgcat

SEQ ID NO: 942370 - DNA, 33 bp, Homo sapien
ttgatgaaagatgaagtatgaccaacgctgcat

SEQ ID NO: 942371 - DNA, 33 bp, Homo sapien
tctgcatttctcgaagaagaccattgccggcca

SEQ ID NO: 942372 - DNA, 33 bp, Homo sapien
tctgcatttctcgaaggagaccattgccggcca

SEQ ID NO: 942373 - DNA, 33 bp, Homo sapien
cagatgtgtgctttcactcaataaacatggctt

SEQ ID NO: 942374 - DNA, 33 bp, Homo sapien
cagatgtgtgctttcattcaataaacatggctt

SEQ ID NO: 942375 - DNA, 33 bp, Homo sapien
gtgtgtacgtttctggaatctcctcactcttag

SEQ ID NO: 942376 - DNA, 33 bp, Homo sapien
gtgtgtacgtttctggtatctcctcactcttag

SEQ ID NO: 942377 - DNA, 33 bp, Homo sapien
gcactgaggacagacagtgggaggaggagcccc

SEQ ID NO: 942378 - DNA, 33 bp, Homo sapien
gcactgaggacagacattgggaggaggagcccc

SEQ ID NO: 942379 - DNA, 33 bp, Homo sapien
tggaagacgttcctgacgcttgtctttctctca

SEQ ID NO: 942380 - DNA, 33 bp, Homo sapien
tggaagacgttcctgatgcttgtctttctctca

SEQ ID NO: 942381 - DNA, 33 bp, Homo sapien
tcattgccgtacgagacctgcccatcttccagg

SEQ ID NO: 942382 - DNA, 33 bp, Homo sapien
tcattgccgtacgagatctgcccatcttccagg

SEQ ID NO: 942383 - DNA, 33 bp, Homo sapien
atacactttaaatacaacatcttccagctctgg

SEQ ID NO: 942384 - DNA, 33 bp, Homo sapien
atacactttaaatacagcatcttccagctctgg

SEQ ID NO: 942385 - DNA, 33 bp, Homo sapien
cacatcctgccaaataaatcagtccatgctctg

SEQ ID NO: 942386 - DNA, 33 bp, Homo sapien
cacatcctgccaaatatatcagtccatgctctg

SEQ ID NO: 942387 - DNA, 33 bp, Homo sapien
tttggatagccccgtcaaatacattttcaagca

SEQ ID NO: 942388 - DNA, 33 bp, Homo sapien
tttggatagccccgtcgaatacattttcaagca

SEQ ID NO: 942389 - DNA, 33 bp, Homo sapien
agcttgactctctaagaatagctctcaatattt

SEQ ID NO: 942390 - DNA, 33 bp, Homo sapien
agcttgactctctaaggatagctctcaatattt

SEQ ID NO: 942391 - DNA, 33 bp, Homo sapien
tgaaagacccttgccaagcacagaggctcactc

SEQ ID NO: 942392 - DNA, 33 bp, Homo sapien
tgaaagacccttgccaggcacagaggctcactc

SEQ ID NO: 942393 - DNA, 33 bp, Homo sapien
cctgcacttctacttcacagcaggaggagccca

SEQ ID NO: 942394 - DNA, 33 bp, Homo sapien
cctgcacttctacttcgcagcaggaggagccca

SEQ ID NO: 942395 - DNA, 33 bp, Homo sapien
aggtatccttaaggcaacagaaaatttgagaaa

SEQ ID NO: 942396 - DNA, 33 bp, Homo sapien
aggtatccttaaggcatcagaaaatttgagaaa

SEQ ID NO: 942397 - DNA, 33 bp, Homo sapien
caggtgacagcctggcagatgacagaagcagtc

SEQ ID NO: 942398 - DNA, 33 bp, Homo sapien
caggtgacagcctggcggatgacagaagcagtc

SEQ ID NO: 942399 - DNA, 33 bp, Homo sapien
attctctggaaacttaaactttacacctactgt

SEQ ID NO: 942400 - DNA, 33 bp, Homo sapien
attctctggaaacttagactttacacctactgt

SEQ ID NO: 942401 - DNA, 33 bp, Homo sapien
aatgcagagaagaaagaaatgtttggatcagaa

SEQ ID NO: 942402 - DNA, 33 bp, Homo sapien
aatgcagagaagaaaggaatgtttggatcagaa

SEQ ID NO: 942403 - DNA, 33 bp, Homo sapien
attacacagcgttttcccaacctatttttgtgt

SEQ ID NO: 942404 - DNA, 33 bp, Homo sapien
attacacagcgttttctcaacctatttttgtgt

SEQ ID NO: 942405 - DNA, 33 bp, Homo sapien
gaggaactcttatgaaagctgcctagagaaaca

SEQ ID NO: 942406 - DNA, 33 bp, Homo sapien
gaggaactcttatgaacgctgcctagagaaaca

SEQ ID NO: 942407 - DNA, 33 bp, Homo sapien
gcaattatcttatgaaatcctgcttttgctctc

SEQ ID NO: 942408 - DNA, 33 bp, Homo sapien
gcaattatcttatgaattcctgcttttgctctc

SEQ ID NO: 942409 - DNA, 33 bp, Homo sapien
tttttactgctccaatgatcaacttagaggcca

SEQ ID NO: 942410 - DNA, 33 bp, Homo sapien
tttttactgctccaattatcaacttagaggcca

SEQ ID NO: 942411 - DNA, 33 bp, Homo sapien
aagccacacttttttcaaaatcccaggtgttga

SEQ ID NO: 942412 - DNA, 33 bp, Homo sapien
aagccacacttttttcgaaatcccaggtgttga

SEQ ID NO: 942413 - DNA, 33 bp, Homo sapien
tgttgcaaagtgacccaagacatacttagcaat

SEQ ID NO: 942414 - DNA, 33 bp, Homo sapien
tgttgcaaagtgacccgagacatacttagcaat

SEQ ID NO: 942415 - DNA, 33 bp, Homo sapien
ctgtgtcacttccatacattttctgatcatgcc

SEQ ID NO: 942416 - DNA, 33 bp, Homo sapien
ctgtgtcacttccatagattttctgatcatgcc

SEQ ID NO: 942417 - DNA, 33 bp, Homo sapien
aaaatggtgcaaggaaacatgcaatccacccac

SEQ ID NO: 942418 - DNA, 33 bp, Homo sapien
aaaatggtgcaaggaagcatgcaatccacccac

SEQ ID NO: 942419 - DNA, 33 bp, Homo sapien
ttggaataaagttctccattggagtcctgcacc

SEQ ID NO: 942420 - DNA, 33 bp, Homo sapien
ttggaataaagttctctattggagtcctgcacc

SEQ ID NO: 942421 - DNA, 33 bp, Homo sapien
tgtggtcaaggtaaaaatggatagaatcacaga

SEQ ID NO: 942422 - DNA, 33 bp, Homo sapien
tgtggtcaaggtaaaattggatagaatcacaga

SEQ ID NO: 942423 - DNA, 33 bp, Homo sapien
ggatttttgtaccgtccaatttaatgtttctga

SEQ ID NO: 942424 - DNA, 33 bp, Homo sapien
ggatttttgtaccgtctaatttaatgtttctga

SEQ ID NO: 942425 - DNA, 33 bp, Homo sapien
gaaagtacttgacacaagtttttaacactgtta

SEQ ID NO: 942426 - DNA, 33 bp, Homo sapien
gaaagtacttgacacatgtttttaacactgtta

SEQ ID NO: 942427 - DNA, 33 bp, Homo sapien
tgagtggttgtgtgaacgacagagactaaagac

SEQ ID NO: 942428 - DNA, 33 bp, Homo sapien
tgagtggttgtgtgaatgacagagactaaagac

SEQ ID NO: 942429 - DNA, 33 bp, Homo sapien
ttgctacttaaatccaatctgttcaatgggcca

SEQ ID NO: 942430 - DNA, 33 bp, Homo sapien
ttgctacttaaatccagtctgttcaatgggcca

SEQ ID NO: 942431 - DNA, 33 bp, Homo sapien
ctttctaataaggaacagtggattagtcataca

SEQ ID NO: 942432 - DNA, 33 bp, Homo sapien
ctttctaataaggaactgtggattagtcataca

SEQ ID NO: 942433 - DNA, 33 bp, Homo sapien
cttaagggtctgtctcactcttcaggcgcagaa

SEQ ID NO: 942434 - DNA, 33 bp, Homo sapien
cttaagggtctgtctcgctcttcaggcgcagaa

SEQ ID NO: 942435 - DNA, 33 bp, Homo sapien
agcattggggaggatacggtcctcaaagatatg

SEQ ID NO: 942436 - DNA, 33 bp, Homo sapien
agcattggggaggatatggtcctcaaagatatg

SEQ ID NO: 942437 - DNA, 33 bp, Homo sapien
ggagtacagcagaaagccaagagaaacgtatct

SEQ ID NO: 942438 - DNA, 33 bp, Homo sapien
ggagtacagcagaaagtcaagagaaacgtatct

SEQ ID NO: 942439 - DNA, 33 bp, Homo sapien
tcttcagcaaataggacgagtgcatttatttgg

SEQ ID NO: 942440 - DNA, 33 bp, Homo sapien
tcttcagcaaataggatgagtgcatttatttgg

SEQ ID NO: 942441 - DNA, 33 bp, Homo sapien
ttgaactgaaaaacctaaggtggcggctctagt

SEQ ID NO: 942442 - DNA, 33 bp, Homo sapien
ttgaactgaaaaaccttaggtggcggctctagt

SEQ ID NO: 942443 - DNA, 33 bp, Homo sapien
taattttggattgtatcttagacattgtggtgg

SEQ ID NO: 942444 - DNA, 33 bp, Homo sapien
taattttggattgtatgttagacattgtggtgg

SEQ ID NO: 942445 - DNA, 33 bp, Homo sapien
caaatagcacaggaaccacttggactagcggtg

SEQ ID NO: 942446 - DNA, 33 bp, Homo sapien
caaatagcacaggaactacttggactagcggtg

SEQ ID NO: 942447 - DNA, 33 bp, Homo sapien
catttcataagaacaaggacattattttccaga

SEQ ID NO: 942448 - DNA, 33 bp, Homo sapien
catttcataagaacaatgacattattttccaga

SEQ ID NO: 942449 - DNA, 33 bp, Homo sapien
ggtactggagaaagaacgaacacatcagtcagt

SEQ ID NO: 942450 - DNA, 33 bp, Homo sapien
ggtactggagaaagaatgaacacatcagtcagt

SEQ ID NO: 942451 - DNA, 33 bp, Homo sapien
atctattgtcctaacagattgcctgaatcctgt

SEQ ID NO: 942452 - DNA, 33 bp, Homo sapien
atctattgtcctaacatattgcctgaatcctgt

SEQ ID NO: 942453 - DNA, 33 bp, Homo sapien
aattataactcagagacatcaattatcttcctt

SEQ ID NO: 942454 - DNA, 33 bp, Homo sapien
aattataactcagagagatcaattatcttcctt

SEQ ID NO: 942455 - DNA, 33 bp, Homo sapien
gtttcacatgagaaaactaacatatggactcac

SEQ ID NO: 942456 - DNA, 33 bp, Homo sapien
gtttcacatgagaaaagtaacatatggactcac

SEQ ID NO: 942457 - DNA, 33 bp, Homo sapien
ctttctccgtcttttgcagattaaacctctgct

SEQ ID NO: 942458 - DNA, 33 bp, Homo sapien
ctttctccgtcttttgtagattaaacctctgct

SEQ ID NO: 942459 - DNA, 33 bp, Homo sapien
tgatggtttggtggcaatctctgacattcctcg

SEQ ID NO: 942460 - DNA, 33 bp, Homo sapien
tgatggtttggtggcagtctctgacattcctcg

SEQ ID NO: 942461 - DNA, 33 bp, Homo sapien
ctttggaattgacctcaccagtctcccctccat

SEQ ID NO: 942462 - DNA, 33 bp, Homo sapien
ctttggaattgacctctccagtctcccctccat

SEQ ID NO: 942463 - DNA, 33 bp, Homo sapien
acacacatggtatatacgcaaaaaatgataatt

SEQ ID NO: 942464 - DNA, 33 bp, Homo sapien
acacacatggtatatatgcaaaaaatgataatt

SEQ ID NO: 942465 - DNA, 33 bp, Homo sapien
atgcgaatatgaattaccaaccttagtgtattc

SEQ ID NO: 942466 - DNA, 33 bp, Homo sapien
atgcgaatatgaattatcaaccttagtgtattc

SEQ ID NO: 942467 - DNA, 33 bp, Homo sapien
tgcctctgtcggtaaacaagaaagaaactggag

SEQ ID NO: 942468 - DNA, 33 bp, Homo sapien
tgcctctgtcggtaaagaagaaagaaactggag

SEQ ID NO: 942469 - DNA, 33 bp, Homo sapien
aagtttgtgaaaatgcaaagtgttcaacattta

SEQ ID NO: 942470 - DNA, 33 bp, Homo sapien
aagtttgtgaaaatgcgaagtgttcaacattta

SEQ ID NO: 942471 - DNA, 33 bp, Homo sapien
tctggcaaatacgtgccgataagtcaatacaat

SEQ ID NO: 942472 - DNA, 33 bp, Homo sapien
tctggcaaatacgtgctgataagtcaatacaat

SEQ ID NO: 942473 - DNA, 33 bp, Homo sapien
ctttgttttagcaaaactgcaacaataaaagtg

SEQ ID NO: 942474 - DNA, 33 bp, Homo sapien
ctttgttttagcaaaattgcaacaataaaagtg

SEQ ID NO: 942475 - DNA, 33 bp, Homo sapien
ggatagcacttaaacactgaagaggatagagct

SEQ ID NO: 942476 - DNA, 33 bp, Homo sapien
ggatagcacttaaacattgaagaggatagagct

SEQ ID NO: 942477 - DNA, 33 bp, Homo sapien
gatcactcatagagaaacaagaaaccttctaaa

SEQ ID NO: 942478 - DNA, 33 bp, Homo sapien
gatcactcatagagaagcaagaaaccttctaaa

SEQ ID NO: 942479 - DNA, 33 bp, Homo sapien
tcccctagatcagctccagctctggccgtgtgt

SEQ ID NO: 942480 - DNA, 33 bp, Homo sapien
tcccctagatcagctctagctctggccgtgtgt

SEQ ID NO: 942481 - DNA, 33 bp, Homo sapien
ttatgtgtcattttgaagttacagactagcagc

SEQ ID NO: 942482 - DNA, 33 bp, Homo sapien
ttatgtgtcattttgaggttacagactagcagc

SEQ ID NO: 942483 - DNA, 33 bp, Homo sapien
tctccagtgttttaaactgacccatctagttca

SEQ ID NO: 942484 - DNA, 33 bp, Homo sapien
tctccagtgttttaaattgacccatctagttca

SEQ ID NO: 942485 - DNA, 33 bp, Homo sapien
agacatgaaatcagccgaagcatccatcagtgg

SEQ ID NO: 942486 - DNA, 33 bp, Homo sapien
agacatgaaatcagcctaagcatccatcagtgg

SEQ ID NO: 942487 - DNA, 33 bp, Homo sapien
gttccgtaggttactaacgcacttggtactttt

SEQ ID NO: 942488 - DNA, 33 bp, Homo sapien
gttccgtaggttactagcgcacttggtactttt

SEQ ID NO: 942489 - DNA, 33 bp, Homo sapien
tgcgattttaaaacaccagactccacacaaaga

SEQ ID NO: 942490 - DNA, 33 bp, Homo sapien
tgcgattttaaaacactagactccacacaaaga

SEQ ID NO: 942491 - DNA, 33 bp, Homo sapien
ttttactcactttacacattacagaccctttga

SEQ ID NO: 942492 - DNA, 33 bp, Homo sapien
ttttactcactttacagattacagaccctttga

SEQ ID NO: 942493 - DNA, 33 bp, Homo sapien
gtgacacggacattacgcatttttgtacatttg

SEQ ID NO: 942494 - DNA, 33 bp, Homo sapien
gtgacacggacattactcatttttgtacatttg

SEQ ID NO: 942495 - DNA, 33 bp, Homo sapien
tctgtcaaagcaggtaggtagctgtgcctgaat

SEQ ID NO: 942496 - DNA, 33 bp, Homo sapien
tctgtcaaagcaggtatgtagctgtgcctgaat

SEQ ID NO: 942497 - DNA, 33 bp, Homo sapien
gcttattgttgagtaaagaaacaaataccctgt

SEQ ID NO: 942498 - DNA, 33 bp, Homo sapien
gcttattgttgagtaacgaaacaaataccctgt

SEQ ID NO: 942499 - DNA, 33 bp, Homo sapien
agcagccatctgtgaaacactccttataaactg

SEQ ID NO: 942500 - DNA, 33 bp, Homo sapien
agcagccatctgtgaagcactccttataaactg

SEQ ID NO: 942501 - DNA, 33 bp, Homo sapien
tgcgcggctgccatctaaattcctgcatgtggg

SEQ ID NO: 942502 - DNA, 33 bp, Homo sapien
tgcgcggctgccatctgaattcctgcatgtggg

SEQ ID NO: 942503 - DNA, 33 bp, Homo sapien
gagaaaggaagtattaaggttagtatccagtgt

SEQ ID NO: 942504 - DNA, 33 bp, Homo sapien
gagaaaggaagtattagggttagtatccagtgt

SEQ ID NO: 942505 - DNA, 33 bp, Homo sapien
actgtgcaaatcaaaacatcagtaaggagtaaa

SEQ ID NO: 942506 - DNA, 33 bp, Homo sapien
actgtgcaaatcaaaatatcagtaaggagtaaa

SEQ ID NO: 942507 - DNA, 33 bp, Homo sapien
gactgctgtcattttgaaaaagaaagtttggag

SEQ ID NO: 942508 - DNA, 33 bp, Homo sapien
gactgctgtcattttgtaaaagaaagtttggag

SEQ ID NO: 942509 - DNA, 33 bp, Homo sapien
tttttgctatttgcaacgtcacaatagttttaa

SEQ ID NO: 942510 - DNA, 33 bp, Homo sapien
tttttgctatttgcaatgtcacaatagttttaa

SEQ ID NO: 942511 - DNA, 33 bp, Homo sapien
acaacaggattgaaaaacattagccacaaagga

SEQ ID NO: 942512 - DNA, 33 bp, Homo sapien
acaacaggattgaaaagcattagccacaaagga

SEQ ID NO: 942513 - DNA, 33 bp, Homo sapien
ttatgagcttgctatgcaacatcaaatttgtaa

SEQ ID NO: 942514 - DNA, 33 bp, Homo sapien
ttatgagcttgctatgtaacatcaaatttgtaa

SEQ ID NO: 942515 - DNA, 33 bp, Homo sapien
gttgctgttgttgtgaaggaaaaacagcaatga

SEQ ID NO: 942516 - DNA, 33 bp, Homo sapien
gttgctgttgttgtgagggaaaaacagcaatga

SEQ ID NO: 942517 - DNA, 33 bp, Homo sapien
agttcaggtgagcaaactaacaagtgggcacat

SEQ ID NO: 942518 - DNA, 33 bp, Homo sapien
agttcaggtgagcaaattaacaagtgggcacat

SEQ ID NO: 942519 - DNA, 33 bp, Homo sapien
tttccatatgtacagacacaacttattaccttc

SEQ ID NO: 942520 - DNA, 33 bp, Homo sapien
tttccatatgtacagagacaacttattaccttc

SEQ ID NO: 942521 - DNA, 33 bp, Homo sapien
tttgaatatgccattccattttcttatggcccc

SEQ ID NO: 942522 - DNA, 33 bp, Homo sapien
tttgaatatgccattcgattttcttatggcccc

SEQ ID NO: 942523 - DNA, 33 bp, Homo sapien
ttactacttctctcccaggacaccttcacgtaa

SEQ ID NO: 942524 - DNA, 33 bp, Homo sapien
ttactacttctctcccgggacaccttcacgtaa

SEQ ID NO: 942525 - DNA, 33 bp, Homo sapien
ctgaaaacaaccataaggctttcaaggaggata

SEQ ID NO: 942526 - DNA, 33 bp, Homo sapien
ctgaaaacaaccataatgctttcaaggaggata

SEQ ID NO: 942527 - DNA, 33 bp, Homo sapien
aagaaactgagtatcacattcacttttgttaca

SEQ ID NO: 942528 - DNA, 33 bp, Homo sapien
aagaaactgagtatcagattcacttttgttaca

SEQ ID NO: 942529 - DNA, 33 bp, Homo sapien
ctgtgactctcagcacactgtcattgctaaaaa

SEQ ID NO: 942530 - DNA, 33 bp, Homo sapien
ctgtgactctcagcacgctgtcattgctaaaaa

SEQ ID NO: 942531 - DNA, 33 bp, Homo sapien
agggaattctaccaaaatcattctacaaggcat

SEQ ID NO: 942532 - DNA, 33 bp, Homo sapien
agggaattctaccaaactcattctacaaggcat

SEQ ID NO: 942533 - DNA, 33 bp, Homo sapien
ccacaacttattaaaggctacataccacaaacc

SEQ ID NO: 942534 - DNA, 33 bp, Homo sapien
ccacaacttattaaagtctacataccacaaacc

SEQ ID NO: 942535 - DNA, 33 bp, Homo sapien
tatggaacctggaggaaacctgagaagcagtgt

SEQ ID NO: 942536 - DNA, 33 bp, Homo sapien
tatggaacctggaggagacctgagaagcagtgt

SEQ ID NO: 942537 - DNA, 33 bp, Homo sapien
ttttgttctgccgtccccttgcatccagtttct

SEQ ID NO: 942538 - DNA, 33 bp, Homo sapien
ttttgttctgccgtccgcttgcatccagtttct

SEQ ID NO: 942539 - DNA, 33 bp, Homo sapien
ttgcaccagtgaaagacatttaacacttgccaa

SEQ ID NO: 942540 - DNA, 33 bp, Homo sapien
ttgcaccagtgaaagatatttaacacttgccaa

SEQ ID NO: 942541 - DNA, 33 bp, Homo sapien
tctttaaactaaaattcaagacacttctcagta

SEQ ID NO: 942542 - DNA, 33 bp, Homo sapien
tctttaaactaaaattgaagacacttctcagta

SEQ ID NO: 942543 - DNA, 33 bp, Homo sapien
acccaaagtcagtggtgaaaattcggctttaca

SEQ ID NO: 942544 - DNA, 33 bp, Homo sapien
acccaaagtcagtggttaaaattcggctttaca

SEQ ID NO: 942545 - DNA, 33 bp, Homo sapien
gatgacatgattcccaagttaattatttgagat

SEQ ID NO: 942546 - DNA, 33 bp, Homo sapien
gatgacatgattcccaggttaattatttgagat

SEQ ID NO: 942547 - DNA, 33 bp, Homo sapien
tctaatgagcctgtcacccaagtagtgaacata

SEQ ID NO: 942548 - DNA, 33 bp, Homo sapien
tctaatgagcctgtcagccaagtagtgaacata

SEQ ID NO: 942549 - DNA, 33 bp, Homo sapien
taaaatatttgttttcacctccagttttgaata

SEQ ID NO: 942550 - DNA, 33 bp, Homo sapien
taaaatatttgttttcgcctccagttttgaata

SEQ ID NO: 942551 - DNA, 33 bp, Homo sapien
gtgcaggagacatatacgagtttatgaaccaac

SEQ ID NO: 942552 - DNA, 33 bp, Homo sapien
gtgcaggagacatatatgagtttatgaaccaac

SEQ ID NO: 942553 - DNA, 33 bp, Homo sapien
agctttattaactttacgccaagtacttctcct

SEQ ID NO: 942554 - DNA, 33 bp, Homo sapien
agctttattaactttatgccaagtacttctcct

SEQ ID NO: 942555 - DNA, 33 bp, Homo sapien
tggatcaaactgtctcaatgcagaagtcttaaa

SEQ ID NO: 942556 - DNA, 33 bp, Homo sapien
tggatcaaactgtctcgatgcagaagtcttaaa

SEQ ID NO: 942557 - DNA, 33 bp, Homo sapien
attgtctcttctctgacactagtgatgaaatga

SEQ ID NO: 942558 - DNA, 33 bp, Homo sapien
attgtctcttctctgatactagtgatgaaatga

SEQ ID NO: 942559 - DNA, 33 bp, Homo sapien
acaatgtgaaagatgaaacagagaattctcatg

SEQ ID NO: 942560 - DNA, 33 bp, Homo sapien
acaatgtgaaagatgagacagagaattctcatg

SEQ ID NO: 942561 - DNA, 33 bp, Homo sapien
ctctcctgcactgaccaaaccccgcagaaaggc

SEQ ID NO: 942562 - DNA, 33 bp, Homo sapien
ctctcctgcactgaccgaaccccgcagaaaggc

SEQ ID NO: 942563 - DNA, 33 bp, Homo sapien
accctcctgtatgtggcagaagtgtaaattttg

SEQ ID NO: 942564 - DNA, 33 bp, Homo sapien
accctcctgtatgtggtagaagtgtaaattttg

SEQ ID NO: 942565 - DNA, 33 bp, Homo sapien
ctgaagaattatctcactcatttttacaatgaa

SEQ ID NO: 942566 - DNA, 33 bp, Homo sapien
ctgaagaattatctcagtcatttttacaatgaa

SEQ ID NO: 942567 - DNA, 33 bp, Homo sapien
tgatgaaaaagaattacgccttgtgtgattctg

SEQ ID NO: 942568 - DNA, 33 bp, Homo sapien
tgatgaaaaagaattatgccttgtgtgattctg

SEQ ID NO: 942569 - DNA, 33 bp, Homo sapien
tatatttccaaaaacaccagtgagtgagtttat

SEQ ID NO: 942570 - DNA, 33 bp, Homo sapien
tatatttccaaaaacatcagtgagtgagtttat

SEQ ID NO: 942571 - DNA, 33 bp, Homo sapien
gatggaaattgattacaacaaatgaatcctctg

SEQ ID NO: 942572 - DNA, 33 bp, Homo sapien
gatggaaattgattaccacaaatgaatcctctg

SEQ ID NO: 942573 - DNA, 33 bp, Homo sapien
ccccagtgttactctaccttatcttgtggatca

SEQ ID NO: 942574 - DNA, 33 bp, Homo sapien
ccccagtgttactctagcttatcttgtggatca

SEQ ID NO: 942575 - DNA, 33 bp, Homo sapien
gaactgaatagaagagcagttgacagagcctgg

SEQ ID NO: 942576 - DNA, 33 bp, Homo sapien
gaactgaatagaagagtagttgacagagcctgg

SEQ ID NO: 942577 - DNA, 33 bp, Homo sapien
gtgtgtgtgtgcgcacgcaagctcatgtgtgca

SEQ ID NO: 942578 - DNA, 33 bp, Homo sapien
gtgtgtgtgtgcgcactcaagctcatgtgtgca

SEQ ID NO: 942579 - DNA, 33 bp, Homo sapien
tgtttatttgtggatgaacattgaggtttattc

SEQ ID NO: 942580 - DNA, 33 bp, Homo sapien
tgtttatttgtggatggacattgaggtttattc

SEQ ID NO: 942581 - DNA, 33 bp, Homo sapien
ccaagagtaaagtagactcacaatgtaatttga

SEQ ID NO: 942582 - DNA, 33 bp, Homo sapien
ccaagagtaaagtagagtcacaatgtaatttga

SEQ ID NO: 942583 - DNA, 33 bp, Homo sapien
cacacgtggagaggaaacatcacaatgagacca

SEQ ID NO: 942584 - DNA, 33 bp, Homo sapien
cacacgtggagaggaagcatcacaatgagacca

SEQ ID NO: 942585 - DNA, 33 bp, Homo sapien
taaacagctgcaggaacattgccaaccgtttcc

SEQ ID NO: 942586 - DNA, 33 bp, Homo sapien
taaacagctgcaggaatattgccaaccgtttcc

SEQ ID NO: 942587 - DNA, 33 bp, Homo sapien
tgataactgtcctgcaataaatttttctttaaa

SEQ ID NO: 942588 - DNA, 33 bp, Homo sapien
tgataactgtcctgcactaaatttttctttaaa

SEQ ID NO: 942589 - DNA, 33 bp, Homo sapien
acctctgttcacattaacatctccacatcctct

SEQ ID NO: 942590 - DNA, 33 bp, Homo sapien
acctctgttcacattagcatctccacatcctct

SEQ ID NO: 942591 - DNA, 33 bp, Homo sapien
taggagtaattcttcaaaacacaaattgggtaa

SEQ ID NO: 942592 - DNA, 33 bp, Homo sapien
taggagtaattcttcacaacacaaattgggtaa

SEQ ID NO: 942593 - DNA, 33 bp, Homo sapien
cttgtgattctttaaaatgaaatgcaccattgc

SEQ ID NO: 942594 - DNA, 33 bp, Homo sapien
cttgtgattctttaaagtgaaatgcaccattgc

SEQ ID NO: 942595 - DNA, 33 bp, Homo sapien
ctctcatccatgagtacaaagagggcagcaggg

SEQ ID NO: 942596 - DNA, 33 bp, Homo sapien
ctctcatccatgagtagaaagagggcagcaggg

SEQ ID NO: 942597 - DNA, 33 bp, Homo sapien
tccttgaaattactgacgtaacgtttttcagca

SEQ ID NO: 942598 - DNA, 33 bp, Homo sapien
tccttgaaattactgatgtaacgtttttcagca

SEQ ID NO: 942599 - DNA, 33 bp, Homo sapien
taatatgaaggaaggaagcataatgtgaccact

SEQ ID NO: 942600 - DNA, 33 bp, Homo sapien
taatatgaaggaaggaggcataatgtgaccact

SEQ ID NO: 942601 - DNA, 33 bp, Homo sapien
gaggagctgaagagcacgaaagggaccaggttc

SEQ ID NO: 942602 - DNA, 33 bp, Homo sapien
gaggagctgaagagcatgaaagggaccaggttc

SEQ ID NO: 942603 - DNA, 33 bp, Homo sapien
tatcaggaggcactaactctttggttcactcat

SEQ ID NO: 942604 - DNA, 33 bp, Homo sapien
tatcaggaggcactaattctttggttcactcat

SEQ ID NO: 942605 - DNA, 33 bp, Homo sapien
ggctgagtaaggtcacaggaaaagatgtcaaga

SEQ ID NO: 942606 - DNA, 33 bp, Homo sapien
ggctgagtaaggtcaccggaaaagatgtcaaga

SEQ ID NO: 942607 - DNA, 33 bp, Homo sapien
ccagcacagaaagaatcacaaattgctaagctt

SEQ ID NO: 942608 - DNA, 33 bp, Homo sapien
ccagcacagaaagaatgacaaattgctaagctt

SEQ ID NO: 942609 - DNA, 33 bp, Homo sapien
gatctttatatagtcaataggtgttgagtgtta

SEQ ID NO: 942610 - DNA, 33 bp, Homo sapien
gatctttatatagtcagtaggtgttgagtgtta

SEQ ID NO: 942611 - DNA, 33 bp, Homo sapien
tttatttagggatgcgacaatggcagtagttct

SEQ ID NO: 942612 - DNA, 33 bp, Homo sapien
tttatttagggatgcggcaatggcagtagttct

SEQ ID NO: 942613 - DNA, 33 bp, Homo sapien
tttcctagttaatggacgtgctgcttgccactg

SEQ ID NO: 942614 - DNA, 33 bp, Homo sapien
tttcctagttaatggatgtgctgcttgccactg

SEQ ID NO: 942615 - DNA, 33 bp, Homo sapien
ggaagcaatcataaaactctttaaaggcagact

SEQ ID NO: 942616 - DNA, 33 bp, Homo sapien
ggaagcaatcataaaagtctttaaaggcagact

SEQ ID NO: 942617 - DNA, 33 bp, Homo sapien
aggcaaaatgacctcaatagagcccggaaccgg

SEQ ID NO: 942618 - DNA, 33 bp, Homo sapien
aggcaaaatgacctcagtagagcccggaaccgg

SEQ ID NO: 942619 - DNA, 33 bp, Homo sapien
tgtaacttgtttctcaaaagtagataactaata

SEQ ID NO: 942620 - DNA, 33 bp, Homo sapien
tgtaacttgtttctcagaagtagataactaata

SEQ ID NO: 942621 - DNA, 33 bp, Homo sapien
atgcgaatgtgtttcacgctttggttcataatc

SEQ ID NO: 942622 - DNA, 33 bp, Homo sapien
atgcgaatgtgtttcatgctttggttcataatc

SEQ ID NO: 942623 - DNA, 33 bp, Homo sapien
gagataatgtctcacacagaaaggtatttaata

SEQ ID NO: 942624 - DNA, 33 bp, Homo sapien
gagataatgtctcacatagaaaggtatttaata

SEQ ID NO: 942625 - DNA, 33 bp, Homo sapien
ttatgcaatgctacacagctcaagaaatgtttt

SEQ ID NO: 942626 - DNA, 33 bp, Homo sapien
ttatgcaatgctacacggctcaagaaatgtttt

SEQ ID NO: 942627 - DNA, 33 bp, Homo sapien
ctgttgtgttcatcaacgaaaggtaacagcttt

SEQ ID NO: 942628 - DNA, 33 bp, Homo sapien
ctgttgtgttcatcaaggaaaggtaacagcttt

SEQ ID NO: 942629 - DNA, 33 bp, Homo sapien
taaatttcaaagggcaaatatcaacattaatct

SEQ ID NO: 942630 - DNA, 33 bp, Homo sapien
taaatttcaaagggcagatatcaacattaatct

SEQ ID NO: 942631 - DNA, 33 bp, Homo sapien
tgaaaaaaaattcctagctaccactagcacaca

SEQ ID NO: 942632 - DNA, 33 bp, Homo sapien
tgaaaaaaaattcctatctaccactagcacaca

SEQ ID NO: 942633 - DNA, 33 bp, Homo sapien
accagatgaaatgatgcagatttgtttctttta

SEQ ID NO: 942634 - DNA, 33 bp, Homo sapien
accagatgaaatgatggagatttgtttctttta

SEQ ID NO: 942635 - DNA, 33 bp, Homo sapien
ccataggagttaaccactatttcgacctctaac

SEQ ID NO: 942636 - DNA, 33 bp, Homo sapien
ccataggagttaaccagtatttcgacctctaac

SEQ ID NO: 942637 - DNA, 33 bp, Homo sapien
tcaatccctaatgccgcagcaaaggaaaaaaac

SEQ ID NO: 942638 - DNA, 33 bp, Homo sapien
tcaatccctaatgccgtagcaaaggaaaaaaac

SEQ ID NO: 942639 - DNA, 33 bp, Homo sapien
gagagagacgtggagaacaggcctccagcatcc

SEQ ID NO: 942640 - DNA, 33 bp, Homo sapien
gagagagacgtggagaccaggcctccagcatcc

SEQ ID NO: 942641 - DNA, 33 bp, Homo sapien
gacacagttgtaaaacccacacaaggtttcttg

SEQ ID NO: 942642 - DNA, 33 bp, Homo sapien
gacacagttgtaaaactcacacaaggtttcttg

SEQ ID NO: 942643 - DNA, 33 bp, Homo sapien
tggtttccactgtgtcacaagaagcaggaatgg

SEQ ID NO: 942644 - DNA, 33 bp, Homo sapien
tggtttccactgtgtcgcaagaagcaggaatgg

SEQ ID NO: 942645 - DNA, 33 bp, Homo sapien
aacaggtgataggataaaaagtgagcacagaga

SEQ ID NO: 942646 - DNA, 33 bp, Homo sapien
aacaggtgataggatagaaagtgagcacagaga

SEQ ID NO: 942647 - DNA, 33 bp, Homo sapien
ttgtgcatttagcaaaattggttccatactcta

SEQ ID NO: 942648 - DNA, 33 bp, Homo sapien
ttgtgcatttagcaaagttggttccatactcta

SEQ ID NO: 942649 - DNA, 33 bp, Homo sapien
gtgcgcaccgcagtacgcaactgtctgcataaa

SEQ ID NO: 942650 - DNA, 33 bp, Homo sapien
gtgcgcaccgcagtactcaactgtctgcataaa

SEQ ID NO: 942651 - DNA, 33 bp, Homo sapien
tgaattagatccctacggaagagacaaagggaa

SEQ ID NO: 942652 - DNA, 33 bp, Homo sapien
tgaattagatccctactgaagagacaaagggaa

SEQ ID NO: 942653 - DNA, 33 bp, Homo sapien
tcaacagcacggaaatcacagaaatcagcaaat

SEQ ID NO: 942654 - DNA, 33 bp, Homo sapien
tcaacagcacggaaatgacagaaatcagcaaat

SEQ ID NO: 942655 - DNA, 33 bp, Homo sapien
ttttagagcactgtcacggaatcctgaacattc

SEQ ID NO: 942656 - DNA, 33 bp, Homo sapien
ttttagagcactgtcatggaatcctgaacattc

SEQ ID NO: 942657 - DNA, 33 bp, Homo sapien
ctttccaacactctcacgtgaacaaatctaatc

SEQ ID NO: 942658 - DNA, 33 bp, Homo sapien
ctttccaacactctcatgtgaacaaatctaatc

SEQ ID NO: 942659 - DNA, 33 bp, Homo sapien
gtatgtgctcatgatgccagaacttctcaatgg

SEQ ID NO: 942660 - DNA, 33 bp, Homo sapien
gtatgtgctcatgatgtcagaacttctcaatgg

SEQ ID NO: 942661 - DNA, 33 bp, Homo sapien
gactttatcatatttcaacgatgtgtggttctg

SEQ ID NO: 942662 - DNA, 33 bp, Homo sapien
gactttatcatatttcgacgatgtgtggttctg

SEQ ID NO: 942663 - DNA, 33 bp, Homo sapien
tcaaattgggaaaaccaactgatttctattgac

SEQ ID NO: 942664 - DNA, 33 bp, Homo sapien
tcaaattgggaaaaccgactgatttctattgac

SEQ ID NO: 942665 - DNA, 33 bp, Homo sapien
gagagagaatgaagacaatgcttttcaacagag

SEQ ID NO: 942666 - DNA, 33 bp, Homo sapien
gagagagaatgaagacgatgcttttcaacagag

SEQ ID NO: 942667 - DNA, 33 bp, Homo sapien
ttcactgcaacgtttacagtagattatgtatct

SEQ ID NO: 942668 - DNA, 33 bp, Homo sapien
ttcactgcaacgtttagagtagattatgtatct

SEQ ID NO: 942669 - DNA, 33 bp, Homo sapien
aaatttccagagaacaatgccacttttatttct

SEQ ID NO: 942670 - DNA, 33 bp, Homo sapien
aaatttccagagaacagtgccacttttatttct

SEQ ID NO: 942671 - DNA, 33 bp, Homo sapien
cttatgatgactattacaatgatgatatggtaa

SEQ ID NO: 942672 - DNA, 33 bp, Homo sapien
cttatgatgactattagaatgatgatatggtaa

SEQ ID NO: 942673 - DNA, 33 bp, Homo sapien
gattgccaattccagacgagttagctgagaaac

SEQ ID NO: 942674 - DNA, 33 bp, Homo sapien
gattgccaattccagatgagttagctgagaaac

SEQ ID NO: 942675 - DNA, 33 bp, Homo sapien
ggagtaaaatgcacacaatatatggaatagact

SEQ ID NO: 942676 - DNA, 33 bp, Homo sapien
ggagtaaaatgcacactatatatggaatagact

SEQ ID NO: 942677 - DNA, 33 bp, Homo sapien
tgctcattaatacctgcaaggttgaggcaatac

SEQ ID NO: 942678 - DNA, 33 bp, Homo sapien
tgctcattaatacctgtaaggttgaggcaatac

SEQ ID NO: 942679 - DNA, 33 bp, Homo sapien
ggcttcagtcctgcgacctacctgggtttgtgt

SEQ ID NO: 942680 - DNA, 33 bp, Homo sapien
ggcttcagtcctgcgatctacctgggtttgtgt

SEQ ID NO: 942681 - DNA, 33 bp, Homo sapien
catgctacttggttcacctcgtctacctgtgtc

SEQ ID NO: 942682 - DNA, 33 bp, Homo sapien
catgctacttggttcatctcgtctacctgtgtc

SEQ ID NO: 942683 - DNA, 33 bp, Homo sapien
tgagtattcgtcttgacggcttaaaaacatatt

SEQ ID NO: 942684 - DNA, 33 bp, Homo sapien
tgagtattcgtcttgatggcttaaaaacatatt

SEQ ID NO: 942685 - DNA, 33 bp, Homo sapien
aatatttgctacacaaagttatttatcacatac

SEQ ID NO: 942686 - DNA, 33 bp, Homo sapien
aatatttgctacacaaggttatttatcacatac

SEQ ID NO: 942687 - DNA, 33 bp, Homo sapien
atcctgcacaatgttaaaatatcaatgctgttt

SEQ ID NO: 942688 - DNA, 33 bp, Homo sapien
atcctgcacaatgttagaatatcaatgctgttt

SEQ ID NO: 942689 - DNA, 33 bp, Homo sapien
gcctagcctttagcacagtatgcttacactaaa

SEQ ID NO: 942690 - DNA, 33 bp, Homo sapien
gcctagcctttagcacggtatgcttacactaaa

SEQ ID NO: 942691 - DNA, 33 bp, Homo sapien
gtgccacgtggcaaaaacagaaatttaatgtac

SEQ ID NO: 942692 - DNA, 33 bp, Homo sapien
gtgccacgtggcaaaaccagaaatttaatgtac

SEQ ID NO: 942693 - DNA, 33 bp, Homo sapien
aagaaaaagagaagtacgtggcacatggctctg

SEQ ID NO: 942694 - DNA, 33 bp, Homo sapien
aagaaaaagagaagtatgtggcacatggctctg

SEQ ID NO: 942695 - DNA, 33 bp, Homo sapien
caatccattttcttcaagttctcaccacctggt

SEQ ID NO: 942696 - DNA, 33 bp, Homo sapien
caatccattttcttcaggttctcaccacctggt

SEQ ID NO: 942697 - DNA, 33 bp, Homo sapien
gatggtggaatttttgcagaagcaaggaagccc

SEQ ID NO: 942698 - DNA, 33 bp, Homo sapien
gatggtggaatttttgtagaagcaaggaagccc

SEQ ID NO: 942699 - DNA, 33 bp, Homo sapien
gagaacattctgttcaaccttttgctggaaggt

SEQ ID NO: 942700 - DNA, 33 bp, Homo sapien
gagaacattctgttcacccttttgctggaaggt

SEQ ID NO: 942701 - DNA, 33 bp, Homo sapien
attgtccttccaacaacgtactcgtaatatgtg

SEQ ID NO: 942702 - DNA, 33 bp, Homo sapien
attgtccttccaacaatgtactcgtaatatgtg

SEQ ID NO: 942703 - DNA, 33 bp, Homo sapien
tacgagggtcttcacaataacacatggacagct

SEQ ID NO: 942704 - DNA, 33 bp, Homo sapien
tacgagggtcttcacagtaacacatggacagct

SEQ ID NO: 942705 - DNA, 33 bp, Homo sapien
gctgccactactacaacgataaatcaaacagtg

SEQ ID NO: 942706 - DNA, 33 bp, Homo sapien
gctgccactactacaatgataaatcaaacagtg

SEQ ID NO: 942707 - DNA, 33 bp, Homo sapien
gttgcccatctatgctaaaagaattgcttcaat

SEQ ID NO: 942708 - DNA, 33 bp, Homo sapien
gttgcccatctatgctgaaagaattgcttcaat

SEQ ID NO: 942709 - DNA, 33 bp, Homo sapien
ctgcataaccatttccaaactattttaatctat

SEQ ID NO: 942710 - DNA, 33 bp, Homo sapien
ctgcataaccatttccgaactattttaatctat

SEQ ID NO: 942711 - DNA, 33 bp, Homo sapien
tctctgctctaaatcactactcaaattatatgt

SEQ ID NO: 942712 - DNA, 33 bp, Homo sapien
tctctgctctaaatcattactcaaattatatgt

SEQ ID NO: 942713 - DNA, 33 bp, Homo sapien
aatatagttaagggtcaatggaaaaatgtaggc

SEQ ID NO: 942714 - DNA, 33 bp, Homo sapien
aatatagttaagggtcgatggaaaaatgtaggc

SEQ ID NO: 942715 - DNA, 33 bp, Homo sapien
aatacactgacaataaagctgtaagaggggcca

SEQ ID NO: 942716 - DNA, 33 bp, Homo sapien
aatacactgacaataaggctgtaagaggggcca

SEQ ID NO: 942717 - DNA, 33 bp, Homo sapien
catatcctgatagtaactggcttgtgaattgaa

SEQ ID NO: 942718 - DNA, 33 bp, Homo sapien
catatcctgatagtaattggcttgtgaattgaa

SEQ ID NO: 942719 - DNA, 33 bp, Homo sapien
ctgttcaatatttaacaatgacgttgacctgtc

SEQ ID NO: 942720 - DNA, 33 bp, Homo sapien
ctgttcaatatttaacgatgacgttgacctgtc

SEQ ID NO: 942721 - DNA, 33 bp, Homo sapien
cttgcgtcagtcactcagaaagtcaccactgac

SEQ ID NO: 942722 - DNA, 33 bp, Homo sapien
cttgcgtcagtcactcggaaagtcaccactgac

SEQ ID NO: 942723 - DNA, 33 bp, Homo sapien
acagagagaaaagtaaagtagtcattcataact

SEQ ID NO: 942724 - DNA, 33 bp, Homo sapien
acagagagaaaagtaacgtagtcattcataact

SEQ ID NO: 942725 - DNA, 33 bp, Homo sapien
acaccgtatgtgtgtaacgaaaatctcatgtgc

SEQ ID NO: 942726 - DNA, 33 bp, Homo sapien
acaccgtatgtgtgtatcgaaaatctcatgtgc

SEQ ID NO: 942727 - DNA, 33 bp, Homo sapien
agccatgattatatagacacagttttcagaata

SEQ ID NO: 942728 - DNA, 33 bp, Homo sapien
agccatgattatataggcacagttttcagaata

SEQ ID NO: 942729 - DNA, 33 bp, Homo sapien
atatcatcatttataacctgcctccaaatatgg

SEQ ID NO: 942730 - DNA, 33 bp, Homo sapien
atatcatcatttataatctgcctccaaatatgg

SEQ ID NO: 942731 - DNA, 33 bp, Homo sapien
gtgctaaatgaattacccatggtttacccatta

SEQ ID NO: 942732 - DNA, 33 bp, Homo sapien
gtgctaaatgaattactcatggtttacccatta

SEQ ID NO: 942733 - DNA, 33 bp, Homo sapien
ctctttgatttagatgcaaatttcctattaata

SEQ ID NO: 942734 - DNA, 33 bp, Homo sapien
ctctttgatttagatgtaaatttcctattaata

SEQ ID NO: 942735 - DNA, 33 bp, Homo sapien
cacagactgtcggctacatggggtttaccgcca

SEQ ID NO: 942736 - DNA, 33 bp, Homo sapien
cacagactgtcggctagatggggtttaccgcca

SEQ ID NO: 942737 - DNA, 33 bp, Homo sapien
cgggaatcccgtcgaagcacagctgaaagcggg

SEQ ID NO: 942738 - DNA, 33 bp, Homo sapien
cgggaatcccgtcgaatcacagctgaaagcggg

SEQ ID NO: 942739 - DNA, 33 bp, Homo sapien
ccagatgttgtctgtacgtaaacgggtaaataa

SEQ ID NO: 942740 - DNA, 33 bp, Homo sapien
ccagatgttgtctgtaggtaaacgggtaaataa

SEQ ID NO: 942741 - DNA, 33 bp, Homo sapien
attatgtgtttatataaatttcttcatccagcc

SEQ ID NO: 942742 - DNA, 33 bp, Homo sapien
attatgtgtttatatacatttcttcatccagcc

SEQ ID NO: 942743 - DNA, 33 bp, Homo sapien
gaaaatgtattccccaataaaatccaaactcct

SEQ ID NO: 942744 - DNA, 33 bp, Homo sapien
gaaaatgtattccccattaaaatccaaactcct

SEQ ID NO: 942745 - DNA, 33 bp, Homo sapien
gtcactaatgcctcaaatatttcagatttttca

SEQ ID NO: 942746 - DNA, 33 bp, Homo sapien
gtcactaatgcctcaattatttcagatttttca

SEQ ID NO: 942747 - DNA, 33 bp, Homo sapien
ggattttttgttagaactcctgagtcttggaga

SEQ ID NO: 942748 - DNA, 33 bp, Homo sapien
ggattttttgttagaagtcctgagtcttggaga

SEQ ID NO: 942749 - DNA, 33 bp, Homo sapien
tcatggaaactaaggaaaagtctgttgcattct

SEQ ID NO: 942750 - DNA, 33 bp, Homo sapien
tcatggaaactaaggacaagtctgttgcattct

SEQ ID NO: 942751 - DNA, 33 bp, Homo sapien
caggatgctgctttccgcatactggctgttctg

SEQ ID NO: 942752 - DNA, 33 bp, Homo sapien
caggatgctgctttcctcatactggctgttctg

SEQ ID NO: 942753 - DNA, 33 bp, Homo sapien
aagtaattttcaacctcaagtggattatttctc

SEQ ID NO: 942754 - DNA, 33 bp, Homo sapien
aagtaattttcaacctgaagtggattatttctc

SEQ ID NO: 942755 - DNA, 33 bp, Homo sapien
caacaccattacagccactaattcacctgacat

SEQ ID NO: 942756 - DNA, 33 bp, Homo sapien
caacaccattacagccgctaattcacctgacat

SEQ ID NO: 942757 - DNA, 33 bp, Homo sapien
ggagtatggaaccgaacaatatatcaaaccaat

SEQ ID NO: 942758 - DNA, 33 bp, Homo sapien
ggagtatggaaccgaagaatatatcaaaccaat

SEQ ID NO: 942759 - DNA, 33 bp, Homo sapien
actggggagatttttcaaagccaattttgtcta

SEQ ID NO: 942760 - DNA, 33 bp, Homo sapien
actggggagatttttccaagccaattttgtcta

SEQ ID NO: 942761 - DNA, 33 bp, Homo sapien
tttcatatcaaatgcaatcaagtcattttcctc

SEQ ID NO: 942762 - DNA, 33 bp, Homo sapien
tttcatatcaaatgcattcaagtcattttcctc

SEQ ID NO: 942763 - DNA, 33 bp, Homo sapien
cctacttttgctaggccatgtgcctgatccccc

SEQ ID NO: 942764 - DNA, 33 bp, Homo sapien
cctacttttgctaggcgatgtgcctgatccccc

SEQ ID NO: 942765 - DNA, 33 bp, Homo sapien
tttgcaaggtgagaacaattggtcatggaggac

SEQ ID NO: 942766 - DNA, 33 bp, Homo sapien
tttgcaaggtgagaaccattggtcatggaggac

SEQ ID NO: 942767 - DNA, 33 bp, Homo sapien
ggaaaacaggcaaagcacacactgtctgcatcg

SEQ ID NO: 942768 - DNA, 33 bp, Homo sapien
ggaaaacaggcaaagcgcacactgtctgcatcg

SEQ ID NO: 942769 - DNA, 33 bp, Homo sapien
aagataccagctgacactgaaggataggttatg

SEQ ID NO: 942770 - DNA, 33 bp, Homo sapien
aagataccagctgacattgaaggataggttatg

SEQ ID NO: 942771 - DNA, 33 bp, Homo sapien
agtaaagacagtgaaacgccctgtgtgcagttt

SEQ ID NO: 942772 - DNA, 33 bp, Homo sapien
agtaaagacagtgaaatgccctgtgtgcagttt

SEQ ID NO: 942773 - DNA, 33 bp, Homo sapien
aacattctgcttgacaaccaaccaataggtttg

SEQ ID NO: 942774 - DNA, 33 bp, Homo sapien
aacattctgcttgacagccaaccaataggtttg

SEQ ID NO: 942775 - DNA, 33 bp, Homo sapien
gaaacctttatcataccgccagctaagaacagg

SEQ ID NO: 942776 - DNA, 33 bp, Homo sapien
gaaacctttatcatactgccagctaagaacagg

SEQ ID NO: 942777 - DNA, 33 bp, Homo sapien
tatgataaaggtttcacgccaacatttgcgttt

SEQ ID NO: 942778 - DNA, 33 bp, Homo sapien
tatgataaaggtttcatgccaacatttgcgttt

SEQ ID NO: 942779 - DNA, 33 bp, Homo sapien
atttaagcaagggcaactgggataaacctcatt

SEQ ID NO: 942780 - DNA, 33 bp, Homo sapien
atttaagcaagggcaattgggataaacctcatt

SEQ ID NO: 942781 - DNA, 33 bp, Homo sapien
cagtttgagctatatgaactgtgtggattcaca

SEQ ID NO: 942782 - DNA, 33 bp, Homo sapien
cagtttgagctatatggactgtgtggattcaca

SEQ ID NO: 942783 - DNA, 33 bp, Homo sapien
cctcataatccgtttccagaactccttgcatat

SEQ ID NO: 942784 - DNA, 33 bp, Homo sapien
cctcataatccgtttctagaactccttgcatat

SEQ ID NO: 942785 - DNA, 33 bp, Homo sapien
acaaagcgatgaggtcaccatcacagaagaaaa

SEQ ID NO: 942786 - DNA, 33 bp, Homo sapien
acaaagcgatgaggtcgccatcacagaagaaaa

SEQ ID NO: 942787 - DNA, 33 bp, Homo sapien
atttgtttaaaacaaccggagagtgatcttagc

SEQ ID NO: 942788 - DNA, 33 bp, Homo sapien
atttgtttaaaacaactggagagtgatcttagc

SEQ ID NO: 942789 - DNA, 33 bp, Homo sapien
aacttattcaacatggaaaattgtattgtttgt

SEQ ID NO: 942790 - DNA, 33 bp, Homo sapien
aacttattcaacatgggaaattgtattgtttgt

SEQ ID NO: 942791 - DNA, 33 bp, Homo sapien
gcaagactgtaaaatcaaatggctttacagcat

SEQ ID NO: 942792 - DNA, 33 bp, Homo sapien
gcaagactgtaaaatcgaatggctttacagcat

SEQ ID NO: 942793 - DNA, 33 bp, Homo sapien
ttctgagtgagatttacggaaactttggctaat

SEQ ID NO: 942794 - DNA, 33 bp, Homo sapien
ttctgagtgagatttatggaaactttggctaat

SEQ ID NO: 942795 - DNA, 33 bp, Homo sapien
ttttccattctaaatacggagcttaatctatgg

SEQ ID NO: 942796 - DNA, 33 bp, Homo sapien
ttttccattctaaatatggagcttaatctatgg

SEQ ID NO: 942797 - DNA, 33 bp, Homo sapien
ctatggtcccattttacagatgacaagcttcag

SEQ ID NO: 942798 - DNA, 33 bp, Homo sapien
ctatggtcccattttagagatgacaagcttcag

SEQ ID NO: 942799 - DNA, 33 bp, Homo sapien
acataaagataagaaacctacatattttgatcc

SEQ ID NO: 942800 - DNA, 33 bp, Homo sapien
acataaagataagaaagctacatattttgatcc

SEQ ID NO: 942801 - DNA, 33 bp, Homo sapien
gattctagagctagcactcgctgtgttgaaagt

SEQ ID NO: 942802 - DNA, 33 bp, Homo sapien
gattctagagctagcagtcgctgtgttgaaagt

SEQ ID NO: 942803 - DNA, 33 bp, Homo sapien
tcacattgcataaagacaggaaaaggtagcaca

SEQ ID NO: 942804 - DNA, 33 bp, Homo sapien
tcacattgcataaagagaggaaaaggtagcaca

SEQ ID NO: 942805 - DNA, 33 bp, Homo sapien
taaatcgcccccatgcaaagtgatgaacttacc

SEQ ID NO: 942806 - DNA, 33 bp, Homo sapien
taaatcgcccccatgcgaagtgatgaacttacc

SEQ ID NO: 942807 - DNA, 33 bp, Homo sapien
tttgagcgttagaaagcataagtcctctcctag

SEQ ID NO: 942808 - DNA, 33 bp, Homo sapien
tttgagcgttagaaagtataagtcctctcctag

SEQ ID NO: 942809 - DNA, 33 bp, Homo sapien
acctagaaaacaacctaaatgcgtcacagccaa

SEQ ID NO: 942810 - DNA, 33 bp, Homo sapien
acctagaaaacaacctgaatgcgtcacagccaa

SEQ ID NO: 942811 - DNA, 33 bp, Homo sapien
gaaacaggaaggttagcaacccactcccagcct

SEQ ID NO: 942812 - DNA, 33 bp, Homo sapien
gaaacaggaaggttaggaacccactcccagcct

SEQ ID NO: 942813 - DNA, 33 bp, Homo sapien
ggtcttcccacttagacatttcctggagcacag

SEQ ID NO: 942814 - DNA, 33 bp, Homo sapien
ggtcttcccacttagatatttcctggagcacag

SEQ ID NO: 942815 - DNA, 33 bp, Homo sapien
cataagttttctggaactatgttttagaaatta

SEQ ID NO: 942816 - DNA, 33 bp, Homo sapien
cataagttttctggaattatgttttagaaatta

SEQ ID NO: 942817 - DNA, 33 bp, Homo sapien
ccctcatccacttttacagtgaccattcgcaaa

SEQ ID NO: 942818 - DNA, 33 bp, Homo sapien
ccctcatccacttttatagtgaccattcgcaaa

SEQ ID NO: 942819 - DNA, 33 bp, Homo sapien
agtgccccagctgaaggaggaaatgaatttggc

SEQ ID NO: 942820 - DNA, 33 bp, Homo sapien
agtgccccagctgaagtaggaaatgaatttggc

SEQ ID NO: 942821 - DNA, 33 bp, Homo sapien
gagaagtgagattttgcatataaagcacttggt

SEQ ID NO: 942822 - DNA, 33 bp, Homo sapien
gagaagtgagattttgtatataaagcacttggt

SEQ ID NO: 942823 - DNA, 33 bp, Homo sapien
acaggggctggcaaacactgaatgctaaagggg

SEQ ID NO: 942824 - DNA, 33 bp, Homo sapien
acaggggctggcaaacgctgaatgctaaagggg

SEQ ID NO: 942825 - DNA, 33 bp, Homo sapien
tatgatgcctttaaaaaaatctgtgagtgtctt

SEQ ID NO: 942826 - DNA, 33 bp, Homo sapien
tatgatgcctttaaaataatctgtgagtgtctt

SEQ ID NO: 942827 - DNA, 33 bp, Homo sapien
aagaacgatgtttgcaatgattgaaagtgatct

SEQ ID NO: 942828 - DNA, 33 bp, Homo sapien
aagaacgatgtttgcattgattgaaagtgatct

SEQ ID NO: 942829 - DNA, 33 bp, Homo sapien
gtttttggtcaaattaagacactcatcttctta

SEQ ID NO: 942830 - DNA, 33 bp, Homo sapien
gtttttggtcaaattaggacactcatcttctta

SEQ ID NO: 942831 - DNA, 33 bp, Homo sapien
tgggtggtacgtagaccaaaatagtcctgtgac

SEQ ID NO: 942832 - DNA, 33 bp, Homo sapien
tgggtggtacgtagacgaaaatagtcctgtgac

SEQ ID NO: 942833 - DNA, 33 bp, Homo sapien
gatgcatgattcctgcacatgtgtaatgcagag

SEQ ID NO: 942834 - DNA, 33 bp, Homo sapien
gatgcatgattcctgcccatgtgtaatgcagag

SEQ ID NO: 942835 - DNA, 33 bp, Homo sapien
atgttaaaacttgaaagaattctctgttctaca

SEQ ID NO: 942836 - DNA, 33 bp, Homo sapien
atgttaaaacttgaaataattctctgttctaca

SEQ ID NO: 942837 - DNA, 33 bp, Homo sapien
atcaatactgagttcaataacagtcactgccac

SEQ ID NO: 942838 - DNA, 33 bp, Homo sapien
atcaatactgagttcagtaacagtcactgccac

SEQ ID NO: 942839 - DNA, 33 bp, Homo sapien
gatcatatacattaaaccagactttcttggaac

SEQ ID NO: 942840 - DNA, 33 bp, Homo sapien
gatcatatacattaaatcagactttcttggaac

SEQ ID NO: 942841 - DNA, 33 bp, Homo sapien
actaccctaccaggaaggtgacgtatagatggc

SEQ ID NO: 942842 - DNA, 33 bp, Homo sapien
actaccctaccaggaatgtgacgtatagatggc

SEQ ID NO: 942843 - DNA, 33 bp, Homo sapien
taaaatttaagggtccagataaggttggagaat

SEQ ID NO: 942844 - DNA, 33 bp, Homo sapien
taaaatttaagggtccggataaggttggagaat

SEQ ID NO: 942845 - DNA, 33 bp, Homo sapien
cttagagtaagaccatcaagaaacaggtgagta

SEQ ID NO: 942846 - DNA, 33 bp, Homo sapien
cttagagtaagaccattaagaaacaggtgagta

SEQ ID NO: 942847 - DNA, 33 bp, Homo sapien
tatcattgttcatgtaaattttctcttactgtg

SEQ ID NO: 942848 - DNA, 33 bp, Homo sapien
tatcattgttcatgtacattttctcttactgtg

SEQ ID NO: 942849 - DNA, 33 bp, Homo sapien
tttaagatttttattacatcacgatggccatat

SEQ ID NO: 942850 - DNA, 33 bp, Homo sapien
tttaagatttttattagatcacgatggccatat

SEQ ID NO: 942851 - DNA, 33 bp, Homo sapien
ctaggaaagtctcatcaagagagaactggaggg

SEQ ID NO: 942852 - DNA, 33 bp, Homo sapien
ctaggaaagtctcatcgagagagaactggaggg

SEQ ID NO: 942853 - DNA, 33 bp, Homo sapien
gtagtagccaaaccataacaattactgtgtttc

SEQ ID NO: 942854 - DNA, 33 bp, Homo sapien
gtagtagccaaaccatgacaattactgtgtttc

SEQ ID NO: 942855 - DNA, 33 bp, Homo sapien
aaaaactggcaatagcgcttcattttgtggaag

SEQ ID NO: 942856 - DNA, 33 bp, Homo sapien
aaaaactggcaatagctcttcattttgtggaag

SEQ ID NO: 942857 - DNA, 33 bp, Homo sapien
cactgctgtgaagccaaattgaaatcgggccag

SEQ ID NO: 942858 - DNA, 33 bp, Homo sapien
cactgctgtgaagccacattgaaatcgggccag

SEQ ID NO: 942859 - DNA, 33 bp, Homo sapien
gagggcatgaattatacggcttagttggttttc

SEQ ID NO: 942860 - DNA, 33 bp, Homo sapien
gagggcatgaattatatggcttagttggttttc

SEQ ID NO: 942861 - DNA, 33 bp, Homo sapien
taatcagatggtctcccgaaaataaacagacct

SEQ ID NO: 942862 - DNA, 33 bp, Homo sapien
taatcagatggtctcctgaaaataaacagacct

SEQ ID NO: 942863 - DNA, 33 bp, Homo sapien
cgttcattcaacggcacgaaactaaagataaga

SEQ ID NO: 942864 - DNA, 33 bp, Homo sapien
cgttcattcaacggcaggaaactaaagataaga

SEQ ID NO: 942865 - DNA, 33 bp, Homo sapien
agagcctctagacttaaattgcttcagaagttc

SEQ ID NO: 942866 - DNA, 33 bp, Homo sapien
agagcctctagacttacattgcttcagaagttc

SEQ ID NO: 942867 - DNA, 33 bp, Homo sapien
tatataccaaatcacaagttttcctgcaaatat

SEQ ID NO: 942868 - DNA, 33 bp, Homo sapien
tatataccaaatcacaggttttcctgcaaatat

SEQ ID NO: 942869 - DNA, 33 bp, Homo sapien
aacagatcgacagaggaagaacgttattttttg

SEQ ID NO: 942870 - DNA, 33 bp, Homo sapien
aacagatcgacagagggagaacgttattttttg

SEQ ID NO: 942871 - DNA, 33 bp, Homo sapien
atattactgtataagacactgggcgcgtggctc

SEQ ID NO: 942872 - DNA, 33 bp, Homo sapien
atattactgtataagagactgggcgcgtggctc

SEQ ID NO: 942873 - DNA, 33 bp, Homo sapien
aagcaaatacagatcaaataagtaaacctgtaa

SEQ ID NO: 942874 - DNA, 33 bp, Homo sapien
aagcaaatacagatcagataagtaaacctgtaa

SEQ ID NO: 942875 - DNA, 33 bp, Homo sapien
ctcatataattgtgagaatgtacactgatcatt

SEQ ID NO: 942876 - DNA, 33 bp, Homo sapien
ctcatataattgtgagtatgtacactgatcatt

SEQ ID NO: 942877 - DNA, 33 bp, Homo sapien
tctggtttcaagatatcataaatgggttaacag

SEQ ID NO: 942878 - DNA, 33 bp, Homo sapien
tctggtttcaagatattataaatgggttaacag

SEQ ID NO: 942879 - DNA, 33 bp, Homo sapien
ctagtagcgtcttcctcaaaattaggaggcacc

SEQ ID NO: 942880 - DNA, 33 bp, Homo sapien
ctagtagcgtcttccttaaaattaggaggcacc

SEQ ID NO: 942881 - DNA, 33 bp, Homo sapien
ccaaaagtttaagtgacctctaagtatacatat

SEQ ID NO: 942882 - DNA, 33 bp, Homo sapien
ccaaaagtttaagtgagctctaagtatacatat

SEQ ID NO: 942883 - DNA, 33 bp, Homo sapien
ttcacagtgactataaatgtatgcattccactt

SEQ ID NO: 942884 - DNA, 33 bp, Homo sapien
ttcacagtgactataagtgtatgcattccactt

SEQ ID NO: 942885 - DNA, 33 bp, Homo sapien
cccctcctgtgatagcccataaatccgttaatc

SEQ ID NO: 942886 - DNA, 33 bp, Homo sapien
cccctcctgtgatagcgcataaatccgttaatc

SEQ ID NO: 942887 - DNA, 33 bp, Homo sapien
tggttggtttttgcaaattatgtttagtaagga

SEQ ID NO: 942888 - DNA, 33 bp, Homo sapien
tggttggtttttgcaagttatgtttagtaagga

SEQ ID NO: 942889 - DNA, 33 bp, Homo sapien
ctgaggttgaaaatataataggagaccctcatg

SEQ ID NO: 942890 - DNA, 33 bp, Homo sapien
ctgaggttgaaaatatcataggagaccctcatg

SEQ ID NO: 942891 - DNA, 33 bp, Homo sapien
aggaaagttttacacaaaggtgcacagatttta

SEQ ID NO: 942892 - DNA, 33 bp, Homo sapien
aggaaagttttacacagaggtgcacagatttta

SEQ ID NO: 942893 - DNA, 33 bp, Homo sapien
caaatagaagtccacagaatatcagtagaaaca

SEQ ID NO: 942894 - DNA, 33 bp, Homo sapien
caaatagaagtccacataatatcagtagaaaca

SEQ ID NO: 942895 - DNA, 33 bp, Homo sapien
catggatttctagttaccatgtgagctctgcaa

SEQ ID NO: 942896 - DNA, 33 bp, Homo sapien
catggatttctagttagcatgtgagctctgcaa

SEQ ID NO: 942897 - DNA, 33 bp, Homo sapien
catttaacacaaaatcaatcagtgagtgcttta

SEQ ID NO: 942898 - DNA, 33 bp, Homo sapien
catttaacacaaaatccatcagtgagtgcttta

SEQ ID NO: 942899 - DNA, 33 bp, Homo sapien
tttgatttccagtatacagtttgccaactcatg

SEQ ID NO: 942900 - DNA, 33 bp, Homo sapien
tttgatttccagtatatagtttgccaactcatg

SEQ ID NO: 942901 - DNA, 33 bp, Homo sapien
gcgatgccatcctcaaagtctcttaccagtgtg

SEQ ID NO: 942902 - DNA, 33 bp, Homo sapien
gcgatgccatcctcaacgtctcttaccagtgtg

SEQ ID NO: 942903 - DNA, 33 bp, Homo sapien
aacaggattccatgaaaacagggtcattgccct

SEQ ID NO: 942904 - DNA, 33 bp, Homo sapien
aacaggattccatgaagacagggtcattgccct

SEQ ID NO: 942905 - DNA, 33 bp, Homo sapien
aaagacattgtgataacccagtgaattaaatgt

SEQ ID NO: 942906 - DNA, 33 bp, Homo sapien
aaagacattgtgataatccagtgaattaaatgt

SEQ ID NO: 942907 - DNA, 33 bp, Homo sapien
gttgaattgattgaaactaagatgctggtttag

SEQ ID NO: 942908 - DNA, 33 bp, Homo sapien
gttgaattgattgaaagtaagatgctggtttag

SEQ ID NO: 942909 - DNA, 33 bp, Homo sapien
ttgaaagataacttaacaggtgcattttcattt

SEQ ID NO: 942910 - DNA, 33 bp, Homo sapien
ttgaaagataacttaataggtgcattttcattt

SEQ ID NO: 942911 - DNA, 33 bp, Homo sapien
tgttacattactaccactatttacggagaaatc

SEQ ID NO: 942912 - DNA, 33 bp, Homo sapien
tgttacattactaccattatttacggagaaatc

SEQ ID NO: 942913 - DNA, 33 bp, Homo sapien
tcaatctcgcaaaacccgagaatgaaacatggt

SEQ ID NO: 942914 - DNA, 33 bp, Homo sapien
tcaatctcgcaaaacctgagaatgaaacatggt

SEQ ID NO: 942915 - DNA, 33 bp, Homo sapien
taaagcaaagtttaggacacaaccctactccat

SEQ ID NO: 942916 - DNA, 33 bp, Homo sapien
taaagcaaagtttaggtcacaaccctactccat

SEQ ID NO: 942917 - DNA, 33 bp, Homo sapien
aaaagaagaggttagacaaagtccttgctcatc

SEQ ID NO: 942918 - DNA, 33 bp, Homo sapien
aaaagaagaggttagagaaagtccttgctcatc

SEQ ID NO: 942919 - DNA, 33 bp, Homo sapien
aataatcttgaggcagcaacaactgtctagtaa

SEQ ID NO: 942920 - DNA, 33 bp, Homo sapien
aataatcttgaggcaggaacaactgtctagtaa

SEQ ID NO: 942921 - DNA, 33 bp, Homo sapien
ggcagaatagttttataaagttcaatggtcatt

SEQ ID NO: 942922 - DNA, 33 bp, Homo sapien
ggcagaatagttttatgaagttcaatggtcatt

SEQ ID NO: 942923 - DNA, 33 bp, Homo sapien
acttaaaattttgataccagttggaaatcaggc

SEQ ID NO: 942924 - DNA, 33 bp, Homo sapien
acttaaaattttgatagcagttggaaatcaggc

SEQ ID NO: 942925 - DNA, 33 bp, Homo sapien
agtacttgatactgtacacttgctttgatgagt

SEQ ID NO: 942926 - DNA, 33 bp, Homo sapien
agtacttgatactgtagacttgctttgatgagt

SEQ ID NO: 942927 - DNA, 33 bp, Homo sapien
ttgactttaccaaaacagggaagatgtcaaggg

SEQ ID NO: 942928 - DNA, 33 bp, Homo sapien
ttgactttaccaaaaccgggaagatgtcaaggg

SEQ ID NO: 942929 - DNA, 33 bp, Homo sapien
acaccaaaagtgaacccggagaaaactgtggat

SEQ ID NO: 942930 - DNA, 33 bp, Homo sapien
acaccaaaagtgaacctggagaaaactgtggat

SEQ ID NO: 942931 - DNA, 33 bp, Homo sapien
tttagagtagttttgcactggcagtaagattga

SEQ ID NO: 942932 - DNA, 33 bp, Homo sapien
tttagagtagttttgcgctggcagtaagattga

SEQ ID NO: 942933 - DNA, 33 bp, Homo sapien
catctgctcttgccacaatttcaaaagattaag

SEQ ID NO: 942934 - DNA, 33 bp, Homo sapien
catctgctcttgccaccatttcaaaagattaag

SEQ ID NO: 942935 - DNA, 33 bp, Homo sapien
attgtgtgttttaatggatagtcgtgcagaagt

SEQ ID NO: 942936 - DNA, 33 bp, Homo sapien
attgtgtgttttaatgtatagtcgtgcagaagt

SEQ ID NO: 942937 - DNA, 33 bp, Homo sapien
acttcaaattaggctcaataaattgcatctgtg

SEQ ID NO: 942938 - DNA, 33 bp, Homo sapien
acttcaaattaggctcgataaattgcatctgtg

SEQ ID NO: 942939 - DNA, 33 bp, Homo sapien
ccctccatttatattcaccagcgtctccttaca

SEQ ID NO: 942940 - DNA, 33 bp, Homo sapien
ccctccatttatattctccagcgtctccttaca

SEQ ID NO: 942941 - DNA, 33 bp, Homo sapien
tgcctgggtacctccacattcagctcatctcag

SEQ ID NO: 942942 - DNA, 33 bp, Homo sapien
tgcctgggtacctccatattcagctcatctcag

SEQ ID NO: 942943 - DNA, 33 bp, Homo sapien
agcacacatcctccaacgcacagtgtcccaagg

SEQ ID NO: 942944 - DNA, 33 bp, Homo sapien
agcacacatcctccaatgcacagtgtcccaagg

SEQ ID NO: 942945 - DNA, 33 bp, Homo sapien
aatggctataaaaattcaaatgtgcaaacatag

SEQ ID NO: 942946 - DNA, 33 bp, Homo sapien
aatggctataaaaattgaaatgtgcaaacatag

SEQ ID NO: 942947 - DNA, 33 bp, Homo sapien
catcatcatcactggtaacagatcacatctcct

SEQ ID NO: 942948 - DNA, 33 bp, Homo sapien
catcatcatcactggtgacagatcacatctcct

SEQ ID NO: 942949 - DNA, 33 bp, Homo sapien
atgtccagcctctgtacatagaccatgggttgg

SEQ ID NO: 942950 - DNA, 33 bp, Homo sapien
atgtccagcctctgtatatagaccatgggttgg

SEQ ID NO: 942951 - DNA, 33 bp, Homo sapien
gagtgaaattgcactgaagatctaggaatatta

SEQ ID NO: 942952 - DNA, 33 bp, Homo sapien
gagtgaaattgcactggagatctaggaatatta

SEQ ID NO: 942953 - DNA, 33 bp, Homo sapien
tagagcttatggctataaactactgaaacaatt

SEQ ID NO: 942954 - DNA, 33 bp, Homo sapien
tagagcttatggctatcaactactgaaacaatt

SEQ ID NO: 942955 - DNA, 33 bp, Homo sapien
ttttcttgtaaaaatcgctacagcatgggggag

SEQ ID NO: 942956 - DNA, 33 bp, Homo sapien
ttttcttgtaaaaatctctacagcatgggggag

SEQ ID NO: 942957 - DNA, 33 bp, Homo sapien
tccccatgcaaataccccattacttcgtctaga

SEQ ID NO: 942958 - DNA, 33 bp, Homo sapien
tccccatgcaaatacctcattacttcgtctaga

SEQ ID NO: 942959 - DNA, 33 bp, Homo sapien
attccatcagctttcactacatatcagtgtgga

SEQ ID NO: 942960 - DNA, 33 bp, Homo sapien
attccatcagctttcattacatatcagtgtgga

SEQ ID NO: 942961 - DNA, 33 bp, Homo sapien
aaggtctgcctgccatcaaaagtaaagccccat

SEQ ID NO: 942962 - DNA, 33 bp, Homo sapien
aaggtctgcctgccattaaaagtaaagccccat

SEQ ID NO: 942963 - DNA, 33 bp, Homo sapien
aggaccagtgctaactcaagagtgtgagcagag

SEQ ID NO: 942964 - DNA, 33 bp, Homo sapien
aggaccagtgctaactgaagagtgtgagcagag

SEQ ID NO: 942965 - DNA, 33 bp, Homo sapien
aggttggaactgtgaactcgtaacacagagcag

SEQ ID NO: 942966 - DNA, 33 bp, Homo sapien
aggttggaactgtgaattcgtaacacagagcag

SEQ ID NO: 942967 - DNA, 33 bp, Homo sapien
cattccatacacagaaaccattgttaccattaa

SEQ ID NO: 942968 - DNA, 33 bp, Homo sapien
cattccatacacagaagccattgttaccattaa

SEQ ID NO: 942969 - DNA, 33 bp, Homo sapien
agtgtatgtcgttgatgaacatggaacactccc

SEQ ID NO: 942970 - DNA, 33 bp, Homo sapien
agtgtatgtcgttgattaacatggaacactccc

SEQ ID NO: 942971 - DNA, 33 bp, Homo sapien
gctttcagctccaaaactctaagtccaatacga

SEQ ID NO: 942972 - DNA, 33 bp, Homo sapien
gctttcagctccaaaattctaagtccaatacga

SEQ ID NO: 942973 - DNA, 33 bp, Homo sapien
atgcaattaagatttcccagtgaatatgtaata

SEQ ID NO: 942974 - DNA, 33 bp, Homo sapien
atgcaattaagatttctcagtgaatatgtaata

SEQ ID NO: 942975 - DNA, 33 bp, Homo sapien
aaaattgctttcctcacaaggttctcttttcat

SEQ ID NO: 942976 - DNA, 33 bp, Homo sapien
aaaattgctttcctcagaaggttctcttttcat

SEQ ID NO: 942977 - DNA, 33 bp, Homo sapien
caattctgggaactcccatgatcacctgcaaaa

SEQ ID NO: 942978 - DNA, 33 bp, Homo sapien
caattctgggaactcctatgatcacctgcaaaa

SEQ ID NO: 942979 - DNA, 33 bp, Homo sapien
tatttctggattttaacgaaccagagatacaca

SEQ ID NO: 942980 - DNA, 33 bp, Homo sapien
tatttctggattttaatgaaccagagatacaca

SEQ ID NO: 942981 - DNA, 33 bp, Homo sapien
ctctgaaagcaacttacaaggacagaaagcctg

SEQ ID NO: 942982 - DNA, 33 bp, Homo sapien
ctctgaaagcaacttagaaggacagaaagcctg

SEQ ID NO: 942983 - DNA, 33 bp, Homo sapien
aaagcctttggagaaaaaagagagcattcaact

SEQ ID NO: 942984 - DNA, 33 bp, Homo sapien
aaagcctttggagaaagaagagagcattcaact

SEQ ID NO: 942985 - DNA, 33 bp, Homo sapien
gcttcatgcaacatccagagttaacatccaagt

SEQ ID NO: 942986 - DNA, 33 bp, Homo sapien
gcttcatgcaacatcctgagttaacatccaagt

SEQ ID NO: 942987 - DNA, 33 bp, Homo sapien
ggacagaggagagtacactcattctttaattgc

SEQ ID NO: 942988 - DNA, 33 bp, Homo sapien
ggacagaggagagtacgctcattctttaattgc

SEQ ID NO: 942989 - DNA, 33 bp, Homo sapien
actagaagttagcactcaagaagtagacacgtc

SEQ ID NO: 942990 - DNA, 33 bp, Homo sapien
actagaagttagcactgaagaagtagacacgtc

SEQ ID NO: 942991 - DNA, 33 bp, Homo sapien
ataaactcgattaacaagaaagaaggcagatat

SEQ ID NO: 942992 - DNA, 33 bp, Homo sapien
ataaactcgattaacaggaaagaaggcagatat

SEQ ID NO: 942993 - DNA, 33 bp, Homo sapien
accatttatgataaacaacaaagtctctggatg

SEQ ID NO: 942994 - DNA, 33 bp, Homo sapien
accatttatgataaaccacaaagtctctggatg

SEQ ID NO: 942995 - DNA, 33 bp, Homo sapien
atgtcatcaagacttaccttagaaattagtaaa

SEQ ID NO: 942996 - DNA, 33 bp, Homo sapien
atgtcatcaagacttatcttagaaattagtaaa

SEQ ID NO: 942997 - DNA, 33 bp, Homo sapien
tcttatctcccaaaccaaaactgaagatcttgg

SEQ ID NO: 942998 - DNA, 33 bp, Homo sapien
tcttatctcccaaaccgaaactgaagatcttgg

SEQ ID NO: 942999 - DNA, 33 bp, Homo sapien
ctcaactattgtgacacataatctcataagtgg

SEQ ID NO: 943000 - DNA, 33 bp, Homo sapien
ctcaactattgtgacagataatctcataagtgg

SEQ ID NO: 943001 - DNA, 33 bp, Homo sapien
aaaggaactttcctcacagatcttgtagagttg

SEQ ID NO: 943002 - DNA, 33 bp, Homo sapien
aaaggaactttcctcagagatcttgtagagttg

SEQ ID NO: 943003 - DNA, 33 bp, Homo sapien
cactacattctgcaaaacccttctcactcgatt

SEQ ID NO: 943004 - DNA, 33 bp, Homo sapien
cactacattctgcaaagcccttctcactcgatt

SEQ ID NO: 943005 - DNA, 33 bp, Homo sapien
aggattgtagcctgaaacttttttctgtgacta

SEQ ID NO: 943006 - DNA, 33 bp, Homo sapien
aggattgtagcctgaatcttttttctgtgacta

SEQ ID NO: 943007 - DNA, 33 bp, Homo sapien
caggctacaatcctaaacccagtgtttataatc

SEQ ID NO: 943008 - DNA, 33 bp, Homo sapien
caggctacaatcctaatcccagtgtttataatc

SEQ ID NO: 943009 - DNA, 33 bp, Homo sapien
catgatatatctgggaaaatttttgtactttcc

SEQ ID NO: 943010 - DNA, 33 bp, Homo sapien
catgatatatctgggacaatttttgtactttcc

SEQ ID NO: 943011 - DNA, 33 bp, Homo sapien
attccttaccacgatacctatatttcaagctta

SEQ ID NO: 943012 - DNA, 33 bp, Homo sapien
attccttaccacgatagctatatttcaagctta

SEQ ID NO: 943013 - DNA, 33 bp, Homo sapien
tctcaaacatacagacaaataaatgagacagaa

SEQ ID NO: 943014 - DNA, 33 bp, Homo sapien
tctcaaacatacagactaataaatgagacagaa

SEQ ID NO: 943015 - DNA, 33 bp, Homo sapien
taaagagagatgattacagcactaaagtttcac

SEQ ID NO: 943016 - DNA, 33 bp, Homo sapien
taaagagagatgattatagcactaaagtttcac

SEQ ID NO: 943017 - DNA, 33 bp, Homo sapien
tgataactgaattggactacgttgtgtttgcac

SEQ ID NO: 943018 - DNA, 33 bp, Homo sapien
tgataactgaattggagtacgttgtgtttgcac

SEQ ID NO: 943019 - DNA, 33 bp, Homo sapien
gtttctcgggatgtcaccttggagtcacctctc

SEQ ID NO: 943020 - DNA, 33 bp, Homo sapien
gtttctcgggatgtcatcttggagtcacctctc

SEQ ID NO: 943021 - DNA, 33 bp, Homo sapien
tggtaatgaaaactgacatacccaagcaagaga

SEQ ID NO: 943022 - DNA, 33 bp, Homo sapien
tggtaatgaaaactgatatacccaagcaagaga

SEQ ID NO: 943023 - DNA, 33 bp, Homo sapien
atgccagggctgggtacgcatagtccatgttgc

SEQ ID NO: 943024 - DNA, 33 bp, Homo sapien
atgccagggctgggtatgcatagtccatgttgc

SEQ ID NO: 943025 - DNA, 33 bp, Homo sapien
atgtactagatagaacaactgtccttcaacttt

SEQ ID NO: 943026 - DNA, 33 bp, Homo sapien
atgtactagatagaacgactgtccttcaacttt

SEQ ID NO: 943027 - DNA, 33 bp, Homo sapien
ttattcatggaagaaacattgtgataaaggagt

SEQ ID NO: 943028 - DNA, 33 bp, Homo sapien
ttattcatggaagaaatattgtgataaaggagt

SEQ ID NO: 943029 - DNA, 33 bp, Homo sapien
tgaaattattaatgacacttcttcatgcccata

SEQ ID NO: 943030 - DNA, 33 bp, Homo sapien
tgaaattattaatgacgcttcttcatgcccata

SEQ ID NO: 943031 - DNA, 33 bp, Homo sapien
taataatccccaatagcacaatctcttagaaca

SEQ ID NO: 943032 - DNA, 33 bp, Homo sapien
taataatccccaataggacaatctcttagaaca

SEQ ID NO: 943033 - DNA, 33 bp, Homo sapien
ctcctatgcgggaaccaaaaaaaactgccatct

SEQ ID NO: 943034 - DNA, 33 bp, Homo sapien
ctcctatgcgggaaccgaaaaaaactgccatct

SEQ ID NO: 943035 - DNA, 33 bp, Homo sapien
tgctcagtgaaagtgactatgcatacctgtatc

SEQ ID NO: 943036 - DNA, 33 bp, Homo sapien
tgctcagtgaaagtgattatgcatacctgtatc

SEQ ID NO: 943037 - DNA, 33 bp, Homo sapien
cccgcctgttccatcgaagcgtcccctaccttc

SEQ ID NO: 943038 - DNA, 33 bp, Homo sapien
cccgcctgttccatcggagcgtcccctaccttc

SEQ ID NO: 943039 - DNA, 33 bp, Homo sapien
aactttttctttctgccgagggcttcctttgtt

SEQ ID NO: 943040 - DNA, 33 bp, Homo sapien
aactttttctttctgctgagggcttcctttgtt

SEQ ID NO: 943041 - DNA, 33 bp, Homo sapien
gggtgaaatattgataaatagaagggcaacaaa

SEQ ID NO: 943042 - DNA, 33 bp, Homo sapien
gggtgaaatattgatacatagaagggcaacaaa

SEQ ID NO: 943043 - DNA, 33 bp, Homo sapien
agataaatggacaaaacgatggaagggaaggat

SEQ ID NO: 943044 - DNA, 33 bp, Homo sapien
agataaatggacaaaatgatggaagggaaggat

SEQ ID NO: 943045 - DNA, 33 bp, Homo sapien
gattgttaaatctgtaccacctgttcagagtca

SEQ ID NO: 943046 - DNA, 33 bp, Homo sapien
gattgttaaatctgtagcacctgttcagagtca

SEQ ID NO: 943047 - DNA, 33 bp, Homo sapien
gcaaagtgagtagaaacatagactcttggaata

SEQ ID NO: 943048 - DNA, 33 bp, Homo sapien
gcaaagtgagtagaaatatagactcttggaata

SEQ ID NO: 943049 - DNA, 33 bp, Homo sapien
ttagactggggttataagttttccaggaatatc

SEQ ID NO: 943050 - DNA, 33 bp, Homo sapien
ttagactggggttatacgttttccaggaatatc

SEQ ID NO: 943051 - DNA, 33 bp, Homo sapien
atccaccctgagttaactgtcttgcctcatctg

SEQ ID NO: 943052 - DNA, 33 bp, Homo sapien
atccaccctgagttaattgtcttgcctcatctg

SEQ ID NO: 943053 - DNA, 33 bp, Homo sapien
gggtctcaggtagaaggaagaagttcttgtgtg

SEQ ID NO: 943054 - DNA, 33 bp, Homo sapien
gggtctcaggtagaagtaagaagttcttgtgtg

SEQ ID NO: 943055 - DNA, 33 bp, Homo sapien
tgggggctgtcaggaacgttcaatatctttcac

SEQ ID NO: 943056 - DNA, 33 bp, Homo sapien
tgggggctgtcaggaatgttcaatatctttcac

SEQ ID NO: 943057 - DNA, 33 bp, Homo sapien
tatgaatatacacacaactatactgggaattct

SEQ ID NO: 943058 - DNA, 33 bp, Homo sapien
tatgaatatacacacacctatactgggaattct

SEQ ID NO: 943059 - DNA, 33 bp, Homo sapien
agtagcagatggcatacaaaattcagtttaaga

SEQ ID NO: 943060 - DNA, 33 bp, Homo sapien
agtagcagatggcatagaaaattcagtttaaga

SEQ ID NO: 943061 - DNA, 33 bp, Homo sapien
ctagcgaccttgatgactatgagctgttacatg

SEQ ID NO: 943062 - DNA, 33 bp, Homo sapien
ctagcgaccttgatgagtatgagctgttacatg

SEQ ID NO: 943063 - DNA, 33 bp, Homo sapien
atcagaggtacaaaaacgtgagaaagtccatgc

SEQ ID NO: 943064 - DNA, 33 bp, Homo sapien
atcagaggtacaaaaaggtgagaaagtccatgc

SEQ ID NO: 943065 - DNA, 33 bp, Homo sapien
ttgccaaactgtttaaaaatgtggctgtaccat

SEQ ID NO: 943066 - DNA, 33 bp, Homo sapien
ttgccaaactgtttaacaatgtggctgtaccat

SEQ ID NO: 943067 - DNA, 33 bp, Homo sapien
gtattgttttcaaacactacatttgtggtggtt

SEQ ID NO: 943068 - DNA, 33 bp, Homo sapien
gtattgttttcaaacagtacatttgtggtggtt

SEQ ID NO: 943069 - DNA, 33 bp, Homo sapien
taataataagtgactaagacattgctttatata

SEQ ID NO: 943070 - DNA, 33 bp, Homo sapien
taataataagtgactatgacattgctttatata

SEQ ID NO: 943071 - DNA, 33 bp, Homo sapien
gtgtctatatttatgacagatattagtacatag

SEQ ID NO: 943072 - DNA, 33 bp, Homo sapien
gtgtctatatttatgagagatattagtacatag

SEQ ID NO: 943073 - DNA, 33 bp, Homo sapien
gagacagagaggcaacaatgaaatgactgcttg

SEQ ID NO: 943074 - DNA, 33 bp, Homo sapien
gagacagagaggcaacgatgaaatgactgcttg

SEQ ID NO: 943075 - DNA, 33 bp, Homo sapien
ttatctttgggtaaaacctaagccatctttttt

SEQ ID NO: 943076 - DNA, 33 bp, Homo sapien
ttatctttgggtaaaatctaagccatctttttt

SEQ ID NO: 943077 - DNA, 33 bp, Homo sapien
cagccgcacaaagtacactgcctgcacttccca

SEQ ID NO: 943078 - DNA, 33 bp, Homo sapien
cagccgcacaaagtactctgcctgcacttccca

SEQ ID NO: 943079 - DNA, 33 bp, Homo sapien
ctaaaatatcacctagaagtacaccttgttaat

SEQ ID NO: 943080 - DNA, 33 bp, Homo sapien
ctaaaatatcacctagcagtacaccttgttaat

SEQ ID NO: 943081 - DNA, 33 bp, Homo sapien
attatcagaactttcactcttacctgagactaa

SEQ ID NO: 943082 - DNA, 33 bp, Homo sapien
attatcagaactttcattcttacctgagactaa

SEQ ID NO: 943083 - DNA, 33 bp, Homo sapien
agagcaggtggtgccgaagaacattaaattcta

SEQ ID NO: 943084 - DNA, 33 bp, Homo sapien
agagcaggtggtgccggagaacattaaattcta

SEQ ID NO: 943085 - DNA, 33 bp, Homo sapien
ttttaatatcgtttcaataaaatcctatgttca

SEQ ID NO: 943086 - DNA, 33 bp, Homo sapien
ttttaatatcgtttcagtaaaatcctatgttca

SEQ ID NO: 943087 - DNA, 33 bp, Homo sapien
caggggtcttcatagacggagattcaggtcagg

SEQ ID NO: 943088 - DNA, 33 bp, Homo sapien
caggggtcttcatagatggagattcaggtcagg

SEQ ID NO: 943089 - DNA, 33 bp, Homo sapien
tacgtgtgatagaacacggacaagtctagcagc

SEQ ID NO: 943090 - DNA, 33 bp, Homo sapien
tacgtgtgatagaacatggacaagtctagcagc

SEQ ID NO: 943091 - DNA, 33 bp, Homo sapien
gccgtaacagaatatgcagatagagttggcttg

SEQ ID NO: 943092 - DNA, 33 bp, Homo sapien
gccgtaacagaatatggagatagagttggcttg

SEQ ID NO: 943093 - DNA, 33 bp, Homo sapien
tgcaaacaatttctgaaccattgaaatgcaaat

SEQ ID NO: 943094 - DNA, 33 bp, Homo sapien
tgcaaacaatttctgagccattgaaatgcaaat

SEQ ID NO: 943095 - DNA, 33 bp, Homo sapien
cagagccatcacagaactccaaatgttaagccc

SEQ ID NO: 943096 - DNA, 33 bp, Homo sapien
cagagccatcacagaattccaaatgttaagccc

SEQ ID NO: 943097 - DNA, 33 bp, Homo sapien
ctgaagagttccttcaagttggattaatacaat

SEQ ID NO: 943098 - DNA, 33 bp, Homo sapien
ctgaagagttccttcaggttggattaatacaat

SEQ ID NO: 943099 - DNA, 33 bp, Homo sapien
ggttgcagtcagtatcaatgttgaactgaaatc

SEQ ID NO: 943100 - DNA, 33 bp, Homo sapien
ggttgcagtcagtatcgatgttgaactgaaatc

SEQ ID NO: 943101 - DNA, 33 bp, Homo sapien
gtctacacagtaaaatcacaagtaaccaaaaca

SEQ ID NO: 943102 - DNA, 33 bp, Homo sapien
gtctacacagtaaaatgacaagtaaccaaaaca

SEQ ID NO: 943103 - DNA, 33 bp, Homo sapien
acaatttcatctctgaacaaatcttccctttgc

SEQ ID NO: 943104 - DNA, 33 bp, Homo sapien
acaatttcatctctgatcaaatcttccctttgc

SEQ ID NO: 943105 - DNA, 33 bp, Homo sapien
aacaagagatggataaaacctatctctgactct

SEQ ID NO: 943106 - DNA, 33 bp, Homo sapien
aacaagagatggataacacctatctctgactct

SEQ ID NO: 943107 - DNA, 33 bp, Homo sapien
ctttacgtttccattgccaaattttcaactgta

SEQ ID NO: 943108 - DNA, 33 bp, Homo sapien
ctttacgtttccattgtcaaattttcaactgta

SEQ ID NO: 943109 - DNA, 33 bp, Homo sapien
agtgaagacaaggagaactcgaatcgatagtca

SEQ ID NO: 943110 - DNA, 33 bp, Homo sapien
agtgaagacaaggagagctcgaatcgatagtca

SEQ ID NO: 943111 - DNA, 33 bp, Homo sapien
ttccagtaactgggccactctcttcagacaaca

SEQ ID NO: 943112 - DNA, 33 bp, Homo sapien
ttccagtaactgggccgctctcttcagacaaca

SEQ ID NO: 943113 - DNA, 33 bp, Homo sapien
ctttcccggcctcttaactggaagcgttcttgc

SEQ ID NO: 943114 - DNA, 33 bp, Homo sapien
ctttcccggcctcttatctggaagcgttcttgc

SEQ ID NO: 943115 - DNA, 33 bp, Homo sapien
atctcaacaatcagcaagtcctgttgtcaaaca

SEQ ID NO: 943116 - DNA, 33 bp, Homo sapien
atctcaacaatcagcaggtcctgttgtcaaaca

SEQ ID NO: 943117 - DNA, 33 bp, Homo sapien
ctgactggcttattccaaaaatcctgtctccag

SEQ ID NO: 943118 - DNA, 33 bp, Homo sapien
ctgactggcttattccgaaaatcctgtctccag

SEQ ID NO: 943119 - DNA, 33 bp, Homo sapien
taccctataccacaaggcgtcaagcagagtcgg

SEQ ID NO: 943120 - DNA, 33 bp, Homo sapien
taccctataccacaagtcgtcaagcagagtcgg

SEQ ID NO: 943121 - DNA, 33 bp, Homo sapien
ggttcaggtttgtgtcactgagtgcagctgggg

SEQ ID NO: 943122 - DNA, 33 bp, Homo sapien
ggttcaggtttgtgtccctgagtgcagctgggg

SEQ ID NO: 943123 - DNA, 33 bp, Homo sapien
aagaatgtgtcagagacgattttttcttttaat

SEQ ID NO: 943124 - DNA, 33 bp, Homo sapien
aagaatgtgtcagagaggattttttcttttaat

SEQ ID NO: 943125 - DNA, 33 bp, Homo sapien
agaaggtgacgtgttgcaacatttcaactgcat

SEQ ID NO: 943126 - DNA, 33 bp, Homo sapien
agaaggtgacgtgttgtaacatttcaactgcat

SEQ ID NO: 943127 - DNA, 33 bp, Homo sapien
cttctaacccctaacaatcactaatctttttac

SEQ ID NO: 943128 - DNA, 33 bp, Homo sapien
cttctaacccctaacagtcactaatctttttac

SEQ ID NO: 943129 - DNA, 33 bp, Homo sapien
gagagccacagatagcaaaaatatagaaagaag

SEQ ID NO: 943130 - DNA, 33 bp, Homo sapien
gagagccacagatagcgaaaatatagaaagaag

SEQ ID NO: 943131 - DNA, 33 bp, Homo sapien
ttaagtgattgtcattaaagccatttttagtca

SEQ ID NO: 943132 - DNA, 33 bp, Homo sapien
ttaagtgattgtcatttaagccatttttagtca

SEQ ID NO: 943133 - DNA, 33 bp, Homo sapien
ttatatatgactagcactgaaaaaagtagtgag

SEQ ID NO: 943134 - DNA, 33 bp, Homo sapien
ttatatatgactagcagtgaaaaaagtagtgag

SEQ ID NO: 943135 - DNA, 33 bp, Homo sapien
tttctttgtccctcaaagttccatctcacgtaa

SEQ ID NO: 943136 - DNA, 33 bp, Homo sapien
tttctttgtccctcaaggttccatctcacgtaa

SEQ ID NO: 943137 - DNA, 33 bp, Homo sapien
gaataaggtgcctaaactccaattcgcccacct

SEQ ID NO: 943138 - DNA, 33 bp, Homo sapien
gaataaggtgcctaaagtccaattcgcccacct

SEQ ID NO: 943139 - DNA, 33 bp, Homo sapien
cccctggacaccattagatgaaaggaatattag

SEQ ID NO: 943140 - DNA, 33 bp, Homo sapien
cccctggacaccattatatgaaaggaatattag

SEQ ID NO: 943141 - DNA, 33 bp, Homo sapien
tttccactactcagaaccaaatgttaattggct

SEQ ID NO: 943142 - DNA, 33 bp, Homo sapien
tttccactactcagaagcaaatgttaattggct

SEQ ID NO: 943143 - DNA, 33 bp, Homo sapien
gctcagaagaggaaacaaagtatgttgatgcat

SEQ ID NO: 943144 - DNA, 33 bp, Homo sapien
gctcagaagaggaaacgaagtatgttgatgcat

SEQ ID NO: 943145 - DNA, 33 bp, Homo sapien
ctcccaagtagctgtacagttagagatcttagt

SEQ ID NO: 943146 - DNA, 33 bp, Homo sapien
ctcccaagtagctgtatagttagagatcttagt

SEQ ID NO: 943147 - DNA, 33 bp, Homo sapien
aaaaaggatgtacacaatggttttctaaaattg

SEQ ID NO: 943148 - DNA, 33 bp, Homo sapien
aaaaaggatgtacacagtggttttctaaaattg

SEQ ID NO: 943149 - DNA, 33 bp, Homo sapien
tgtaggtagaactctaggctggccactaagctt

SEQ ID NO: 943150 - DNA, 33 bp, Homo sapien
tgtaggtagaactctatgctggccactaagctt

SEQ ID NO: 943151 - DNA, 33 bp, Homo sapien
gatgatccggatatcacagcttggtatcataaa

SEQ ID NO: 943152 - DNA, 33 bp, Homo sapien
gatgatccggatatcagagcttggtatcataaa

SEQ ID NO: 943153 - DNA, 33 bp, Homo sapien
atgaatagtgtgaacaaaaacggtaattcagaa

SEQ ID NO: 943154 - DNA, 33 bp, Homo sapien
atgaatagtgtgaacagaaacggtaattcagaa

SEQ ID NO: 943155 - DNA, 33 bp, Homo sapien
tccccactatgcattcactataattttattgct

SEQ ID NO: 943156 - DNA, 33 bp, Homo sapien
tccccactatgcattcgctataattttattgct

SEQ ID NO: 943157 - DNA, 33 bp, Homo sapien
tcaatatgttgactaactgtttggcttaggagc

SEQ ID NO: 943158 - DNA, 33 bp, Homo sapien
tcaatatgttgactaattgtttggcttaggagc

SEQ ID NO: 943159 - DNA, 33 bp, Homo sapien
gtccgtgacaagctgccataatatgatgttctc

SEQ ID NO: 943160 - DNA, 33 bp, Homo sapien
gtccgtgacaagctgcgataatatgatgttctc

SEQ ID NO: 943161 - DNA, 33 bp, Homo sapien
acattctgatttagaaaaaagggctgaggaaat

SEQ ID NO: 943162 - DNA, 33 bp, Homo sapien
acattctgatttagaagaaagggctgaggaaat

SEQ ID NO: 943163 - DNA, 33 bp, Homo sapien
ttacgttgtacactgaaaagggattagtcttct

SEQ ID NO: 943164 - DNA, 33 bp, Homo sapien
ttacgttgtacactgataagggattagtcttct

SEQ ID NO: 943165 - DNA, 33 bp, Homo sapien
aaaagagaaacagttacataaagtttccatgca

SEQ ID NO: 943166 - DNA, 33 bp, Homo sapien
aaaagagaaacagttagataaagtttccatgca

SEQ ID NO: 943167 - DNA, 33 bp, Homo sapien
tctttgtgtacacttacgcagacattgtatata

SEQ ID NO: 943168 - DNA, 33 bp, Homo sapien
tctttgtgtacacttatgcagacattgtatata

SEQ ID NO: 943169 - DNA, 33 bp, Homo sapien
tttgactctcacccaccgcgtcatctctctctc

SEQ ID NO: 943170 - DNA, 33 bp, Homo sapien
tttgactctcacccacggcgtcatctctctctc

SEQ ID NO: 943171 - DNA, 33 bp, Homo sapien
tgaaaataactagttaccaaacacgtcactatc

SEQ ID NO: 943172 - DNA, 33 bp, Homo sapien
tgaaaataactagttagcaaacacgtcactatc

SEQ ID NO: 943173 - DNA, 33 bp, Homo sapien
caacctcactgcaatacgaaagtgaacattttt

SEQ ID NO: 943174 - DNA, 33 bp, Homo sapien
caacctcactgcaataggaaagtgaacattttt

SEQ ID NO: 943175 - DNA, 33 bp, Homo sapien
gccaccatcacacttaccaccacagctccagtg

SEQ ID NO: 943176 - DNA, 33 bp, Homo sapien
gccaccatcacacttatcaccacagctccagtg

SEQ ID NO: 943177 - DNA, 33 bp, Homo sapien
aaaattagtgatttcccagtgaagcaggttaaa

SEQ ID NO: 943178 - DNA, 33 bp, Homo sapien
aaaattagtgatttcctagtgaagcaggttaaa

SEQ ID NO: 943179 - DNA, 33 bp, Homo sapien
ttctatgcatctttcaagacgtaacccaaattt

SEQ ID NO: 943180 - DNA, 33 bp, Homo sapien
ttctatgcatctttcaggacgtaacccaaattt

SEQ ID NO: 943181 - DNA, 33 bp, Homo sapien
gtccttccccagtagacacaatgacttaggttt

SEQ ID NO: 943182 - DNA, 33 bp, Homo sapien
gtccttccccagtagatacaatgacttaggttt

SEQ ID NO: 943183 - DNA, 33 bp, Homo sapien
gatattaacacaaagcacagaagtatggaagag

SEQ ID NO: 943184 - DNA, 33 bp, Homo sapien
gatattaacacaaagcccagaagtatggaagag

SEQ ID NO: 943185 - DNA, 33 bp, Homo sapien
cacattatgtgtgaaaatcaaacgggtaataaa

SEQ ID NO: 943186 - DNA, 33 bp, Homo sapien
cacattatgtgtgaaagtcaaacgggtaataaa

SEQ ID NO: 943187 - DNA, 33 bp, Homo sapien
tctgattttgggcatcccatatgtctgctgaag

SEQ ID NO: 943188 - DNA, 33 bp, Homo sapien
tctgattttgggcatctcatatgtctgctgaag

SEQ ID NO: 943189 - DNA, 33 bp, Homo sapien
gaactgagaggactcacggtaaacatcgggccc

SEQ ID NO: 943190 - DNA, 33 bp, Homo sapien
gaactgagaggactcatggtaaacatcgggccc

SEQ ID NO: 943191 - DNA, 33 bp, Homo sapien
ctgtgctcagcttcagaatcagcccagggagat

SEQ ID NO: 943192 - DNA, 33 bp, Homo sapien
ctgtgctcagcttcagtatcagcccagggagat

SEQ ID NO: 943193 - DNA, 33 bp, Homo sapien
gttattttcaggtcaccaggctattaaatagtt

SEQ ID NO: 943194 - DNA, 33 bp, Homo sapien
gttattttcaggtcactaggctattaaatagtt

SEQ ID NO: 943195 - DNA, 33 bp, Homo sapien
gctatgtgattgaaaacgtggatagagaggaag

SEQ ID NO: 943196 - DNA, 33 bp, Homo sapien
gctatgtgattgaaaatgtggatagagaggaag

SEQ ID NO: 943197 - DNA, 33 bp, Homo sapien
aacacgagaaggatcacagaaatgaagacgtgc

SEQ ID NO: 943198 - DNA, 33 bp, Homo sapien
aacacgagaaggatcatagaaatgaagacgtgc

SEQ ID NO: 943199 - DNA, 33 bp, Homo sapien
ctgtaccatgaagcccagctgtgtatcaggcta

SEQ ID NO: 943200 - DNA, 33 bp, Homo sapien
ctgtaccatgaagccccgctgtgtatcaggcta

SEQ ID NO: 943201 - DNA, 33 bp, Homo sapien
tttaataggcaaaaccaactgatatggaatagt

SEQ ID NO: 943202 - DNA, 33 bp, Homo sapien
tttaataggcaaaaccgactgatatggaatagt

SEQ ID NO: 943203 - DNA, 33 bp, Homo sapien
gctgagcagaaggacaatcttggtttaattgat

SEQ ID NO: 943204 - DNA, 33 bp, Homo sapien
gctgagcagaaggacagtcttggtttaattgat

SEQ ID NO: 943205 - DNA, 33 bp, Homo sapien
cagctctgactctgacaagatatagcactttgt

SEQ ID NO: 943206 - DNA, 33 bp, Homo sapien
cagctctgactctgactagatatagcactttgt

SEQ ID NO: 943207 - DNA, 33 bp, Homo sapien
ctgacagtatttttcaacatagaccactgtcta

SEQ ID NO: 943208 - DNA, 33 bp, Homo sapien
ctgacagtatttttcaccatagaccactgtcta

SEQ ID NO: 943209 - DNA, 33 bp, Homo sapien
atttgctatgttacaacaaaaattgagttgaat

SEQ ID NO: 943210 - DNA, 33 bp, Homo sapien
atttgctatgttacaagaaaaattgagttgaat

SEQ ID NO: 943211 - DNA, 33 bp, Homo sapien
aaggagaagaatgagcaaagtggaggaaaatcc

SEQ ID NO: 943212 - DNA, 33 bp, Homo sapien
aaggagaagaatgagcgaagtggaggaaaatcc

SEQ ID NO: 943213 - DNA, 33 bp, Homo sapien
caattaacagcatgatcagaaaaacagcattat

SEQ ID NO: 943214 - DNA, 33 bp, Homo sapien
caattaacagcatgatgagaaaaacagcattat

SEQ ID NO: 943215 - DNA, 33 bp, Homo sapien
tatttctcgaatttcacggaaaaacttttctcc

SEQ ID NO: 943216 - DNA, 33 bp, Homo sapien
tatttctcgaatttcatggaaaaacttttctcc

SEQ ID NO: 943217 - DNA, 33 bp, Homo sapien
ttcaacattcatttcaccctgtataatttgtct

SEQ ID NO: 943218 - DNA, 33 bp, Homo sapien
ttcaacattcatttcatcctgtataatttgtct

SEQ ID NO: 943219 - DNA, 33 bp, Homo sapien
ttataggaaaatggcaccaatagttctacattt

SEQ ID NO: 943220 - DNA, 33 bp, Homo sapien
ttataggaaaatggcagcaatagttctacattt

SEQ ID NO: 943221 - DNA, 33 bp, Homo sapien
aacatgggcttgaagacaaaagtagtagagtat

SEQ ID NO: 943222 - DNA, 33 bp, Homo sapien
aacatgggcttgaagagaaaagtagtagagtat

SEQ ID NO: 943223 - DNA, 33 bp, Homo sapien
gggtacagttctcaatcagtaagcagtggtcta

SEQ ID NO: 943224 - DNA, 33 bp, Homo sapien
gggtacagttctcaatgagtaagcagtggtcta

SEQ ID NO: 943225 - DNA, 33 bp, Homo sapien
tctattatttctgacaaacatcaatgatagtcg

SEQ ID NO: 943226 - DNA, 33 bp, Homo sapien
tctattatttctgacacacatcaatgatagtcg

SEQ ID NO: 943227 - DNA, 33 bp, Homo sapien
tgtttcgtgtgataaacagtcagaaaaagtatg

SEQ ID NO: 943228 - DNA, 33 bp, Homo sapien
tgtttcgtgtgataaagagtcagaaaaagtatg

SEQ ID NO: 943229 - DNA, 33 bp, Homo sapien
cataaggtaattatggccagagtacagaaaggt

SEQ ID NO: 943230 - DNA, 33 bp, Homo sapien
cataaggtaattatgggcagagtacagaaaggt

SEQ ID NO: 943231 - DNA, 33 bp, Homo sapien
gcccttcaacgcataacgtctcataaggtaatt

SEQ ID NO: 943232 - DNA, 33 bp, Homo sapien
gcccttcaacgcataatgtctcataaggtaatt

SEQ ID NO: 943233 - DNA, 33 bp, Homo sapien
ctaaagactcgtggttcaaaccatatggcttcc

SEQ ID NO: 943234 - DNA, 33 bp, Homo sapien
ctaaagactcgtggttgaaaccatatggcttcc

SEQ ID NO: 943235 - DNA, 33 bp, Homo sapien
tgttgaataactaaataaaactggctacaatta

SEQ ID NO: 943236 - DNA, 33 bp, Homo sapien
tgttgaataactaaatgaaactggctacaatta

SEQ ID NO: 943237 - DNA, 33 bp, Homo sapien
ctggagtattcaaagaaccgaaaaaagatgaat

SEQ ID NO: 943238 - DNA, 33 bp, Homo sapien
ctggagtattcaaagatccgaaaaaagatgaat

SEQ ID NO: 943239 - DNA, 33 bp, Homo sapien
tctgtaggagtagcgacgatgaactgtttaaca

SEQ ID NO: 943240 - DNA, 33 bp, Homo sapien
tctgtaggagtagcgatgatgaactgtttaaca

SEQ ID NO: 943241 - DNA, 33 bp, Homo sapien
caccatggtggctaaaacaatagaagaacacat

SEQ ID NO: 943242 - DNA, 33 bp, Homo sapien
caccatggtggctaaagcaatagaagaacacat

SEQ ID NO: 943243 - DNA, 33 bp, Homo sapien
gggaagaggtacatgggcagagtccgggagaca

SEQ ID NO: 943244 - DNA, 33 bp, Homo sapien
gggaagaggtacatggtcagagtccgggagaca

SEQ ID NO: 943245 - DNA, 33 bp, Homo sapien
ttcactaatgggtaagcaatcaaactgtgtgcc

SEQ ID NO: 943246 - DNA, 33 bp, Homo sapien
ttcactaatgggtaagtaatcaaactgtgtgcc

SEQ ID NO: 943247 - DNA, 33 bp, Homo sapien
tagcctaggagcaagcagctgtaccctatagcc

SEQ ID NO: 943248 - DNA, 33 bp, Homo sapien
tagcctaggagcaagcggctgtaccctatagcc

SEQ ID NO: 943249 - DNA, 33 bp, Homo sapien
tatgctggtcatgaaacggaatgtgaaaaacat

SEQ ID NO: 943250 - DNA, 33 bp, Homo sapien
tatgctggtcatgaaatggaatgtgaaaaacat

SEQ ID NO: 943251 - DNA, 33 bp, Homo sapien
gacctagttacctcacaatggcaacaaaatcta

SEQ ID NO: 943252 - DNA, 33 bp, Homo sapien
gacctagttacctcacgatggcaacaaaatcta

SEQ ID NO: 943253 - DNA, 33 bp, Homo sapien
aaagtcgacacatgggcaaaaggcttgtggtca

SEQ ID NO: 943254 - DNA, 33 bp, Homo sapien
aaagtcgacacatggggaaaaggcttgtggtca

SEQ ID NO: 943255 - DNA, 33 bp, Homo sapien
agtaggaccgcccaaaatagcagtcagggaacc

SEQ ID NO: 943256 - DNA, 33 bp, Homo sapien
agtaggaccgcccaaagtagcagtcagggaacc

SEQ ID NO: 943257 - DNA, 33 bp, Homo sapien
cctctgaggctggaaacaacgttttcatggata

SEQ ID NO: 943258 - DNA, 33 bp, Homo sapien
cctctgaggctggaaagaacgttttcatggata

SEQ ID NO: 943259 - DNA, 33 bp, Homo sapien
tgcttcttgcgtgtcacctcaggttttcttttg

SEQ ID NO: 943260 - DNA, 33 bp, Homo sapien
tgcttcttgcgtgtcagctcaggttttcttttg

SEQ ID NO: 943261 - DNA, 33 bp, Homo sapien
tgattaaagcattcaaacaaattttgtgaattt

SEQ ID NO: 943262 - DNA, 33 bp, Homo sapien
tgattaaagcattcaatcaaattttgtgaattt

SEQ ID NO: 943263 - DNA, 33 bp, Homo sapien
ggccatagtaaagtggcaggttctgtttttagg

SEQ ID NO: 943264 - DNA, 33 bp, Homo sapien
ggccatagtaaagtggtaggttctgtttttagg

SEQ ID NO: 943265 - DNA, 33 bp, Homo sapien; identical to SEQ ID NO: 943263

SEQ ID NO: 943266 - DNA, 33 bp, Homo sapien; identical to SEQ ID NO: 943264

SEQ ID NO: 943267 - DNA, 33 bp, Homo sapien
aatatcggaagacttacggtatcagtacaaacc

SEQ ID NO: 943268 - DNA, 33 bp, Homo sapien
aatatcggaagacttatggtatcagtacaaacc

SEQ ID NO: 943269 - DNA, 33 bp, Homo sapien
catagggaaaagataacggtacaggaagagggt

SEQ ID NO: 943270 - DNA, 33 bp, Homo sapien
catagggaaaagataatggtacaggaagagggt

SEQ ID NO: 943271 - DNA, 33 bp, Homo sapien
agccagtcttacttagcatatcacaaatggagc

SEQ ID NO: 943272 - DNA, 33 bp, Homo sapien
agccagtcttacttaggatatcacaaatggagc

SEQ ID NO: 943273 - DNA, 33 bp, Homo sapien
aatcaacaatgatgtaaggtccctccccatcag

SEQ ID NO: 943274 - DNA, 33 bp, Homo sapien
aatcaacaatgatgtatggtccctccccatcag

SEQ ID NO: 943275 - DNA, 33 bp, Homo sapien
gattatcacaatgctaacaacattattatcatc

SEQ ID NO: 943276 - DNA, 33 bp, Homo sapien
gattatcacaatgctagcaacattattatcatc

SEQ ID NO: 943277 - DNA, 33 bp, Homo sapien
gagtcatatttgaataaagtttacatagaaaat

SEQ ID NO: 943278 - DNA, 33 bp, Homo sapien
gagtcatatttgaatacagtttacatagaaaat

SEQ ID NO: 943279 - DNA, 33 bp, Homo sapien
tatctctatagcctaaatcttttgtgaagataa

SEQ ID NO: 943280 - DNA, 33 bp, Homo sapien
tatctctatagcctaactcttttgtgaagataa

SEQ ID NO: 943281 - DNA, 33 bp, Homo sapien
cagatgtcagcaaaatcagagccccacagaact

SEQ ID NO: 943282 - DNA, 33 bp, Homo sapien
cagatgtcagcaaaatgagagccccacagaact

SEQ ID NO: 943283 - DNA, 33 bp, Homo sapien
tcactttcatggagaacggcctcttcaactctt

SEQ ID NO: 943284 - DNA, 33 bp, Homo sapien
tcactttcatggagaatggcctcttcaactctt

SEQ ID NO: 943285 - DNA, 33 bp, Homo sapien
cgttctgtttggaacacggcaagtttgacttta

SEQ ID NO: 943286 - DNA, 33 bp, Homo sapien
cgttctgtttggaacatggcaagtttgacttta

SEQ ID NO: 943287 - DNA, 33 bp, Homo sapien
ctgtccacatgtcttaaaagcagtcagggaaat

SEQ ID NO: 943288 - DNA, 33 bp, Homo sapien
ctgtccacatgtcttacaagcagtcagggaaat

SEQ ID NO: 943289 - DNA, 33 bp, Homo sapien
atttggacagataacgaatctacaggggtgtgc

SEQ ID NO: 943290 - DNA, 33 bp, Homo sapien
atttggacagataacgcatctacaggggtgtgc

SEQ ID NO: 943291 - DNA, 33 bp, Homo sapien
agggaacatagtaaaactgacatccgtccacca

SEQ ID NO: 943292 - DNA, 33 bp, Homo sapien
agggaacatagtaaaagtgacatccgtccacca

SEQ ID NO: 943293 - DNA, 33 bp, Homo sapien
gccctgtgtaaaggaacatatgaagtgagagga

SEQ ID NO: 943294 - DNA, 33 bp, Homo sapien
gccctgtgtaaaggaagatatgaagtgagagga

SEQ ID NO: 943295 - DNA, 33 bp, Homo sapien
tattcaggtggagagacgatagagtttggggga

SEQ ID NO: 943296 - DNA, 33 bp, Homo sapien
tattcaggtggagagatgatagagtttggggga

SEQ ID NO: 943297 - DNA, 33 bp, Homo sapien
gtagcctgaatgagacccttccggacagaaaat

SEQ ID NO: 943298 - DNA, 33 bp, Homo sapien
gtagcctgaatgagactcttccggacagaaaat

SEQ ID NO: 943299 - DNA, 33 bp, Homo sapien
tgctaggaactgggtacaaagaggaaggccagg

SEQ ID NO: 943300 - DNA, 33 bp, Homo sapien
tgctaggaactgggtataaagaggaaggccagg

SEQ ID NO: 943301 - DNA, 33 bp, Homo sapien
aagaaagaagaaggaaagaggtgcttgatcatc

SEQ ID NO: 943302 - DNA, 33 bp, Homo sapien
aagaaagaagaaggaaggaggtgcttgatcatc

SEQ ID NO: 943303 - DNA, 33 bp, Homo sapien
tcattaatgggacacacaatctgaaattattca

SEQ ID NO: 943304 - DNA, 33 bp, Homo sapien
tcattaatgggacacagaatctgaaattattca

SEQ ID NO: 943305 - DNA, 33 bp, Homo sapien
tgtgcatgaaccacaacaaacatttccaaattc

SEQ ID NO: 943306 - DNA, 33 bp, Homo sapien
tgtgcatgaaccacaataaacatttccaaattc

SEQ ID NO: 943307 - DNA, 33 bp, Homo sapien
aatgagaaatgcttagaaaattatggcttctac

SEQ ID NO: 943308 - DNA, 33 bp, Homo sapien
aatgagaaatgcttaggaaattatggcttctac

SEQ ID NO: 943309 - DNA, 33 bp, Homo sapien
taatactcaggtacatgactctccaatgatggg

SEQ ID NO: 943310 - DNA, 33 bp, Homo sapien
taatactcaggtacattactctccaatgatggg

SEQ ID NO: 943311 - DNA, 33 bp, Homo sapien
ttacagagtctctgaccgggaagatggcaggcc

SEQ ID NO: 943312 - DNA, 33 bp, Homo sapien
ttacagagtctctgactgggaagatggcaggcc

SEQ ID NO: 943313 - DNA, 33 bp, Homo sapien
agtcatcatttgattaacacctgtatctcttaa

SEQ ID NO: 943314 - DNA, 33 bp, Homo sapien
agtcatcatttgattagcacctgtatctcttaa

SEQ ID NO: 943315 - DNA, 33 bp, Homo sapien
ttgatagaaatggacactcatctttaagatatg

SEQ ID NO: 943316 - DNA, 33 bp, Homo sapien
ttgatagaaatggacagtcatctttaagatatg

SEQ ID NO: 943317 - DNA, 33 bp, Homo sapien
tttgggaggcgtcccccagttagtacagacatt

SEQ ID NO: 943318 - DNA, 33 bp, Homo sapien
tttgggaggcgtcccctagttagtacagacatt

SEQ ID NO: 943319 - DNA, 33 bp, Homo sapien
gagtatctcagtacaaactgtggcaaagatgta

SEQ ID NO: 943320 - DNA, 33 bp, Homo sapien
gagtatctcagtacaacctgtggcaaagatgta

SEQ ID NO: 943321 - DNA, 33 bp, Homo sapien
ttgactgagatctcacccggagcaggcagatcg

SEQ ID NO: 943322 - DNA, 33 bp, Homo sapien
ttgactgagatctcactcggagcaggcagatcg

SEQ ID NO: 943323 - DNA, 33 bp, Homo sapien
cgtgcctccttcgacccaagccaccagacattt

SEQ ID NO: 943324 - DNA, 33 bp, Homo sapien
cgtgcctccttcgacctaagccaccagacattt

SEQ ID NO: 943325 - DNA, 33 bp, Homo sapien
gaaagattctagcaaaatgtatttaaaagttac

SEQ ID NO: 943326 - DNA, 33 bp, Homo sapien
gaaagattctagcaaattgtatttaaaagttac

SEQ ID NO: 943327 - DNA, 33 bp, Homo sapien
gctattttaagttggaaaagtgtttgctggttg

SEQ ID NO: 943328 - DNA, 33 bp, Homo sapien
gctattttaagttggagaagtgtttgctggttg

SEQ ID NO: 943329 - DNA, 33 bp, Homo sapien
tatgacttgtggaagaactaccatttgtatatt

SEQ ID NO: 943330 - DNA, 33 bp, Homo sapien
tatgacttgtggaagacctaccatttgtatatt

SEQ ID NO: 943331 - DNA, 33 bp, Homo sapien
tatggaataacatcaaccatgtgacatccgaag

SEQ ID NO: 943332 - DNA, 33 bp, Homo sapien
tatggaataacatcaagcatgtgacatccgaag

SEQ ID NO: 943333 - DNA, 33 bp, Homo sapien
agttcaaaccataaaacaggcaatttagacagg

SEQ ID NO: 943334 - DNA, 33 bp, Homo sapien
agttcaaaccataaaataggcaatttagacagg

SEQ ID NO: 943335 - DNA, 33 bp, Homo sapien
tcaggtcttgcttttaaggacgcgagtgctgta

SEQ ID NO: 943336 - DNA, 33 bp, Homo sapien
tcaggtcttgcttttagggacgcgagtgctgta

SEQ ID NO: 943337 - DNA, 33 bp, Homo sapien
ggataatcttcagtaaggaacatgatcctcttt

SEQ ID NO: 943338 - DNA, 33 bp, Homo sapien
ggataatcttcagtaatgaacatgatcctcttt

SEQ ID NO: 943339 - DNA, 33 bp, Homo sapien
gtagatgcccttctaactccaaaatatatacat

SEQ ID NO: 943340 - DNA, 33 bp, Homo sapien
gtagatgcccttctaagtccaaaatatatacat

SEQ ID NO: 943341 - DNA, 33 bp, Homo sapien
atctgtccaggtgcagactgacttttcccaggc

SEQ ID NO: 943342 - DNA, 33 bp, Homo sapien
atctgtccaggtgcagcctgacttttcccaggc

SEQ ID NO: 943343 - DNA, 33 bp, Homo sapien
ggagctcgctaatcacacaaagaacagaaggct

SEQ ID NO: 943344 - DNA, 33 bp, Homo sapien
ggagctcgctaatcacgcaaagaacagaaggct

SEQ ID NO: 943345 - DNA, 33 bp, Homo sapien
tacagattagaaaagtaactcaaacagctagag

SEQ ID NO: 943346 - DNA, 33 bp, Homo sapien
tacagattagaaaagtgactcaaacagctagag

SEQ ID NO: 943347 - DNA, 33 bp, Homo sapien
caaaggctctgtttgcaaaagggtgaatctggg

SEQ ID NO: 943348 - DNA, 33 bp, Homo sapien
caaaggctctgtttgccaaagggtgaatctggg

SEQ ID NO: 943349 - DNA, 33 bp, Homo sapien
acggggacagcctcacactctacagtgaacaga

SEQ ID NO: 943350 - DNA, 33 bp, Homo sapien
acggggacagcctcacgctctacagtgaacaga

SEQ ID NO: 943351 - DNA, 33 bp, Homo sapien
gattatatcacttctgaaagagaggtttgtgtg

SEQ ID NO: 943352 - DNA, 33 bp, Homo sapien
gattatatcacttctgcaagagaggtttgtgtg

SEQ ID NO: 943353 - DNA, 33 bp, Homo sapien
gtgtgcttggatctaaactctagaatctcaaga

SEQ ID NO: 943354 - DNA, 33 bp, Homo sapien
gtgtgcttggatctaatctctagaatctcaaga

SEQ ID NO: 943355 - DNA, 33 bp, Homo sapien
agcactttcatactcaatctcctacagatggta

SEQ ID NO: 943356 - DNA, 33 bp, Homo sapien
agcactttcatactcagtctcctacagatggta

SEQ ID NO: 943357 - DNA, 33 bp, Homo sapien
aaaatctgatgcccaaatgatcggatatccaac

SEQ ID NO: 943358 - DNA, 33 bp, Homo sapien
aaaatctgatgcccaattgatcggatatccaac

SEQ ID NO: 943359 - DNA, 33 bp, Homo sapien
atgatctaaagttcaacgtagaaccacatatcc

SEQ ID NO: 943360 - DNA, 33 bp, Homo sapien
atgatctaaagttcaatgtagaaccacatatcc

SEQ ID NO: 943361 - DNA, 33 bp, Homo sapien
atagtgagtctccaagaagcacataggctgttg

SEQ ID NO: 943362 - DNA, 33 bp, Homo sapien
atagtgagtctccaaggagcacataggctgttg

SEQ ID NO: 943363 - DNA, 33 bp, Homo sapien
atctgaggattgatacacccttgtaagcagagg

SEQ ID NO: 943364 - DNA, 33 bp, Homo sapien
atctgaggattgatacgcccttgtaagcagagg

SEQ ID NO: 943365 - DNA, 33 bp, Homo sapien
tttcgggggttgatagaaagcagttatgactgg

SEQ ID NO: 943366 - DNA, 33 bp, Homo sapien
tttcgggggttgataggaagcagttatgactgg

SEQ ID NO: 943367 - DNA, 33 bp, Homo sapien
aatgataccaagtcaaggaagtcaaagagcttg

SEQ ID NO: 943368 - DNA, 33 bp, Homo sapien
aatgataccaagtcaatgaagtcaaagagcttg

SEQ ID NO: 943369 - DNA, 33 bp, Homo sapien
tgaggctatcaagcagcaagatcacatcttaca

SEQ ID NO: 943370 - DNA, 33 bp, Homo sapien
tgaggctatcaagcaggaagatcacatcttaca

SEQ ID NO: 943371 - DNA, 33 bp, Homo sapien
ttacagcatcagtgtcagaagctaaaaataata

SEQ ID NO: 943372 - DNA, 33 bp, Homo sapien
ttacagcatcagtgtcggaagctaaaaataata

SEQ ID NO: 943373 - DNA, 33 bp, Homo sapien
acacagattcgctaaactgtgagtaaatgaata

SEQ ID NO: 943374 - DNA, 33 bp, Homo sapien
acacagattcgctaaattgtgagtaaatgaata

SEQ ID NO: 943375 - DNA, 33 bp, Homo sapien
acgtgctgtagataaaatgctagacaccaccag

SEQ ID NO: 943376 - DNA, 33 bp, Homo sapien
acgtgctgtagataaagtgctagacaccaccag

SEQ ID NO: 943377 - DNA, 33 bp, Homo sapien
aacatatttaactctcagaatgatgatgctaga

SEQ ID NO: 943378 - DNA, 33 bp, Homo sapien
aacatatttaactctccgaatgatgatgctaga

SEQ ID NO: 943379 - DNA, 33 bp, Homo sapien
gggtgggcctggtccaatcagatgaaggcccaa

SEQ ID NO: 943380 - DNA, 33 bp, Homo sapien
gggtgggcctggtccagtcagatgaaggcccaa

SEQ ID NO: 943381 - DNA, 33 bp, Homo sapien
tgaagattacatgacacggcaaatagaagcacc

SEQ ID NO: 943382 - DNA, 33 bp, Homo sapien
tgaagattacatgacatggcaaatagaagcacc

SEQ ID NO: 943383 - DNA, 33 bp, Homo sapien
ggagaagctactggaaagtgactttggcaactc

SEQ ID NO: 943384 - DNA, 33 bp, Homo sapien
ggagaagctactggaatgtgactttggcaactc

SEQ ID NO: 943385 - DNA, 33 bp, Homo sapien
caaaaggtctatggcaacagaaaggaagtggtt

SEQ ID NO: 943386 - DNA, 33 bp, Homo sapien
caaaaggtctatggcagcagaaaggaagtggtt

SEQ ID NO: 943387 - DNA, 33 bp, Homo sapien
tcctgaagctgttttgaatcgtgtcagcatctg

SEQ ID NO: 943388 - DNA, 33 bp, Homo sapien
tcctgaagctgttttggatcgtgtcagcatctg

SEQ ID NO: 943389 - DNA, 33 bp, Homo sapien
ccattatgcaaaagtcacaactggccgggcatg

SEQ ID NO: 943390 - DNA, 33 bp, Homo sapien
ccattatgcaaaagtcgcaactggccgggcatg

SEQ ID NO: 943391 - DNA, 33 bp, Homo sapien
actccctgaattctcacggttgagcccagggta

SEQ ID NO: 943392 - DNA, 33 bp, Homo sapien
actccctgaattctcatggttgagcccagggta

SEQ ID NO: 943393 - DNA, 33 bp, Homo sapien
cttgagggccttcctaacaacactaatctcttt

SEQ ID NO: 943394 - DNA, 33 bp, Homo sapien
cttgagggccttcctagcaacactaatctcttt

SEQ ID NO: 943395 - DNA, 33 bp, Homo sapien
aaaacatgaagattcaaaaacactggacccaaa

SEQ ID NO: 943396 - DNA, 33 bp, Homo sapien
aaaacatgaagattcagaaacactggacccaaa

SEQ ID NO: 943397 - DNA, 33 bp, Homo sapien
ggctcaggaatgagaaatggactggcaagttcc

SEQ ID NO: 943398 - DNA, 33 bp, Homo sapien
ggctcaggaatgagaactggactggcaagttcc

SEQ ID NO: 943399 - DNA, 33 bp, Homo sapien
gtttacttttgcaaacaggaaagttcttttggg

SEQ ID NO: 943400 - DNA, 33 bp, Homo sapien
gtttacttttgcaaacgggaaagttcttttggg

SEQ ID NO: 943401 - DNA, 33 bp, Homo sapien
atatggttaaattcgacatgagaaaataccttg

SEQ ID NO: 943402 - DNA, 33 bp, Homo sapien
atatggttaaattcgagatgagaaaataccttg

SEQ ID NO: 943403 - DNA, 33 bp, Homo sapien
tacagataaaagtgaaatgaacctacagatacc

SEQ ID NO: 943404 - DNA, 33 bp, Homo sapien
tacagataaaagtgaattgaacctacagatacc

SEQ ID NO: 943405 - DNA, 33 bp, Homo sapien
tatccatgaattgtccaacagtggctgggcaag

SEQ ID NO: 943406 - DNA, 33 bp, Homo sapien
tatccatgaattgtccgacagtggctgggcaag

SEQ ID NO: 943407 - DNA, 33 bp, Homo sapien
aagatgatgagcaataccaatattaatggtaac

SEQ ID NO: 943408 - DNA, 33 bp, Homo sapien
aagatgatgagcaatagcaatattaatggtaac

SEQ ID NO: 943409 - DNA, 33 bp, Homo sapien
aacattgtaagaagagcagaatgcatgctctcc

SEQ ID NO: 943410 - DNA, 33 bp, Homo sapien
aacattgtaagaagaggagaatgcatgctctcc

SEQ ID NO: 943411 - DNA, 33 bp, Homo sapien
attcatatttcattcacagtctcgaaatctgta

SEQ ID NO: 943412 - DNA, 33 bp, Homo sapien
attcatatttcattcatagtctcgaaatctgta

SEQ ID NO: 943413 - DNA, 33 bp, Homo sapien
aattaaacctgtgtcacgtgaaatgtaagaaca

SEQ ID NO: 943414 - DNA, 33 bp, Homo sapien
aattaaacctgtgtcaggtgaaatgtaagaaca

SEQ ID NO: 943415 - DNA, 33 bp, Homo sapien
tattgtaagtggctacgaattttattggtattt

SEQ ID NO: 943416 - DNA, 33 bp, Homo sapien
tattgtaagtggctactaattttattggtattt

SEQ ID NO: 943417 - DNA, 33 bp, Homo sapien
cctactaaactctaccacatggagtcatacctc

SEQ ID NO: 943418 - DNA, 33 bp, Homo sapien
cctactaaactctaccgcatggagtcatacctc

SEQ ID NO: 943419 - DNA, 33 bp, Homo sapien
ctgcaaacctctttaaacatttagtctctgacc

SEQ ID NO: 943420 - DNA, 33 bp, Homo sapien
ctgcaaacctctttaaccatttagtctctgacc

SEQ ID NO: 943421 - DNA, 33 bp, Homo sapien
ggagaccgaaggggaaagtatcacaggatggca

SEQ ID NO: 943422 - DNA, 33 bp, Homo sapien
ggagaccgaaggggaatgtatcacaggatggca

SEQ ID NO: 943423 - DNA, 33 bp, Homo sapien
tctaggtgagaattaaatctatctacagaacat

SEQ ID NO: 943424 - DNA, 33 bp, Homo sapien
tctaggtgagaattaagtctatctacagaacat

SEQ ID NO: 943425 - DNA, 33 bp, Homo sapien
ctgcactgaaaataaaataaacctgcctgtgga

SEQ ID NO: 943426 - DNA, 33 bp, Homo sapien
ctgcactgaaaataaagtaaacctgcctgtgga

SEQ ID NO: 943427 - DNA, 33 bp, Homo sapien
gcgtggaatagtgtgacattaggatggtgttag

SEQ ID NO: 943428 - DNA, 33 bp, Homo sapien
gcgtggaatagtgtgatattaggatggtgttag

SEQ ID NO: 943429 - DNA, 33 bp, Homo sapien
accctgtgggcttccactgattactaaacaggg

SEQ ID NO: 943430 - DNA, 33 bp, Homo sapien
accctgtgggcttccagtgattactaaacaggg

SEQ ID NO: 943431 - DNA, 33 bp, Homo sapien
ccatgactagtttgtcaatgtaaatgtggatga

SEQ ID NO: 943432 - DNA, 33 bp, Homo sapien
ccatgactagtttgtccatgtaaatgtggatga

SEQ ID NO: 943433 - DNA, 33 bp, Homo sapien
ttttaaaggctcatgaaattccaaccaggttct

SEQ ID NO: 943434 - DNA, 33 bp, Homo sapien
ttttaaaggctcatgagattccaaccaggttct

SEQ ID NO: 943435 - DNA, 33 bp, Homo sapien
agacatttcttcaaaagtgctctgacaaagaaa

SEQ ID NO: 943436 - DNA, 33 bp, Homo sapien
agacatttcttcaaaattgctctgacaaagaaa

SEQ ID NO: 943437 - DNA, 33 bp, Homo sapien
cttgtgaaaagacaaacgcttcagagtctcagt

SEQ ID NO: 943438 - DNA, 33 bp, Homo sapien
cttgtgaaaagacaaatgcttcagagtctcagt

SEQ ID NO: 943439 - DNA, 33 bp, Homo sapien
tttcattaagtacttacgattagccagtacccc

SEQ ID NO: 943440 - DNA, 33 bp, Homo sapien
tttcattaagtacttaggattagccagtacccc

SEQ ID NO: 943441 - DNA, 33 bp, Homo sapien
agaggccatgtattaactgactttgaaccttaa

SEQ ID NO: 943442 - DNA, 33 bp, Homo sapien
agaggccatgtattaattgactttgaaccttaa

SEQ ID NO: 943443 - DNA, 33 bp, Homo sapien
tgaacggttctgactgaaaaaaccaggtggaat

SEQ ID NO: 943444 - DNA, 33 bp, Homo sapien
tgaacggttctgactgcaaaaaccaggtggaat

SEQ ID NO: 943445 - DNA, 33 bp, Homo sapien
ttaaaagagcctagcactcccccctctcctctc

SEQ ID NO: 943446 - DNA, 33 bp, Homo sapien
ttaaaagagcctagcattcccccctctcctctc

SEQ ID NO: 943447 - DNA, 33 bp, Homo sapien
gagccctgctttggtcacctctagtcatgtctt

SEQ ID NO: 943448 - DNA, 33 bp, Homo sapien
gagccctgctttggtcgcctctagtcatgtctt

SEQ ID NO: 943449 - DNA, 33 bp, Homo sapien
agaacacaaggttcacaaaagggcgtgataaga

SEQ ID NO: 943450 - DNA, 33 bp, Homo sapien
agaacacaaggttcacgaaagggcgtgataaga

SEQ ID NO: 943451 - DNA, 33 bp, Homo sapien
gaaacaggcacttggacgtttcgttttccaggt

SEQ ID NO: 943452 - DNA, 33 bp, Homo sapien
gaaacaggcacttggaggtttcgttttccaggt

SEQ ID NO: 943453 - DNA, 33 bp, Homo sapien
tacatcatttaaaatccacttttttccattaag

SEQ ID NO: 943454 - DNA, 33 bp, Homo sapien
tacatcatttaaaatcgacttttttccattaag

SEQ ID NO: 943455 - DNA, 33 bp, Homo sapien
aaggtgatgtgctataaaacttatgagactgtg

SEQ ID NO: 943456 - DNA, 33 bp, Homo sapien
aaggtgatgtgctatacaacttatgagactgtg

SEQ ID NO: 943457 - DNA, 33 bp, Homo sapien
aagccatgtgtagaaaagtttcaaaatcatggg

SEQ ID NO: 943458 - DNA, 33 bp, Homo sapien
aagccatgtgtagaaatgtttcaaaatcatggg

SEQ ID NO: 943459 - DNA, 33 bp, Homo sapien
tcactgagagtaaagcaagactctaaagaggcg

SEQ ID NO: 943460 - DNA, 33 bp, Homo sapien
tcactgagagtaaagccagactctaaagaggcg

SEQ ID NO: 943461 - DNA, 33 bp, Homo sapien
attcctcattgaatacccagttgagaaaacatg

SEQ ID NO: 943462 - DNA, 33 bp, Homo sapien
attcctcattgaatactcagttgagaaaacatg

SEQ ID NO: 943463 - DNA, 33 bp, Homo sapien
tatttcgtaggggaaactgaaatctaagcaaag

SEQ ID NO: 943464 - DNA, 33 bp, Homo sapien
tatttcgtaggggaaattgaaatctaagcaaag

SEQ ID NO: 943465 - DNA, 33 bp, Homo sapien
actaccacagagtacacgccgagagaatatggt

SEQ ID NO: 943466 - DNA, 33 bp, Homo sapien
actaccacagagtacatgccgagagaatatggt

SEQ ID NO: 943467 - DNA, 33 bp, Homo sapien
atgaatctaggaagtagagagagcaaaatcata

SEQ ID NO: 943468 - DNA, 33 bp, Homo sapien
atgaatctaggaagtatagagagcaaaatcata

SEQ ID NO: 943469 - DNA, 33 bp, Homo sapien
ttattaaatgggtctaccaaaattagaaaatga

SEQ ID NO: 943470 - DNA, 33 bp, Homo sapien
ttattaaatgggtctatcaaaattagaaaatga

SEQ ID NO: 943471 - DNA, 33 bp, Homo sapien
ggcttccatattgtagcacagcattttcccact

SEQ ID NO: 943472 - DNA, 33 bp, Homo sapien
ggcttccatattgtaggacagcattttcccact

SEQ ID NO: 943473 - DNA, 33 bp, Homo sapien
aagtagagcaattaaacagggatatgtcatgtt

SEQ ID NO: 943474 - DNA, 33 bp, Homo sapien
aagtagagcaattaaagagggatatgtcatgtt

SEQ ID NO: 943475 - DNA, 33 bp, Homo sapien
aagaaaattagaaggacggaagaagtgatgttt

SEQ ID NO: 943476 - DNA, 33 bp, Homo sapien
aagaaaattagaaggatggaagaagtgatgttt

SEQ ID NO: 943477 - DNA, 33 bp, Homo sapien
tttaaccaaatctctacgttttcctccttcaag

SEQ ID NO: 943478 - DNA, 33 bp, Homo sapien
tttaaccaaatctctatgttttcctccttcaag

SEQ ID NO: 943479 - DNA, 33 bp, Homo sapien
acacctgctcttgaaaggctccttcttcttccg

SEQ ID NO: 943480 - DNA, 33 bp, Homo sapien
acacctgctcttgaaatgctccttcttcttccg

SEQ ID NO: 943481 - DNA, 33 bp, Homo sapien
tggcctgaataatgaaagcaatttgaagctatc

SEQ ID NO: 943482 - DNA, 33 bp, Homo sapien
tggcctgaataatgaaggcaatttgaagctatc

SEQ ID NO: 943483 - DNA, 33 bp, Homo sapien
agtacctcactactaccggattaaattatatta

SEQ ID NO: 943484 - DNA, 33 bp, Homo sapien
agtacctcactactactggattaaattatatta

SEQ ID NO: 943485 - DNA, 33 bp, Homo sapien
tgaagaagccaggacactgataaacctatattt

SEQ ID NO: 943486 - DNA, 33 bp, Homo sapien
tgaagaagccaggacattgataaacctatattt

SEQ ID NO: 943487 - DNA, 33 bp, Homo sapien
aaggggattgcttttggacttagcattacccca

SEQ ID NO: 943488 - DNA, 33 bp, Homo sapien
aaggggattgcttttgtacttagcattacccca

SEQ ID NO: 943489 - DNA, 33 bp, Homo sapien
ttactgaaaagtataaagagagaaacacagctt

SEQ ID NO: 943490 - DNA, 33 bp, Homo sapien
ttactgaaaagtataaggagagaaacacagctt

SEQ ID NO: 943491 - DNA, 33 bp, Homo sapien
agttcccacttgcgtaaactttcaactctctct

SEQ ID NO: 943492 - DNA, 33 bp, Homo sapien
agttcccacttgcgtatactttcaactctctct

SEQ ID NO: 943493 - DNA, 33 bp, Homo sapien
gtttgtctcggaattgaaaaatttcaaggggca

SEQ ID NO: 943494 - DNA, 33 bp, Homo sapien
gtttgtctcggaattggaaaatttcaaggggca

SEQ ID NO: 943495 - DNA, 33 bp, Homo sapien
atttccaaaggaaagcgcagcccttaggtctca

SEQ ID NO: 943496 - DNA, 33 bp, Homo sapien
atttccaaaggaaagctcagcccttaggtctca

SEQ ID NO: 943497 - DNA, 33 bp, Homo sapien
gctgcgtgattccccaagggctgttggaaagct

SEQ ID NO: 943498 - DNA, 33 bp, Homo sapien
gctgcgtgattccccaggggctgttggaaagct

SEQ ID NO: 943499 - DNA, 33 bp, Homo sapien
ttcagggagagctaagcccaagtgttttcttgt

SEQ ID NO: 943500 - DNA, 33 bp, Homo sapien
ttcagggagagctaagtccaagtgttttcttgt

SEQ ID NO: 943501 - DNA, 33 bp, Homo sapien
actggtcctcgttggccaattcaggatgtgatg

SEQ ID NO: 943502 - DNA, 33 bp, Homo sapien
actggtcctcgttggctaattcaggatgtgatg

SEQ ID NO: 943503 - DNA, 33 bp, Homo sapien
gtaggagtctataacacaatttaacaagaattt

SEQ ID NO: 943504 - DNA, 33 bp, Homo sapien
gtaggagtctataacagaatttaacaagaattt

SEQ ID NO: 943505 - DNA, 33 bp, Homo sapien
acggcagtcaacaaagcaagggagatggaaaac

SEQ ID NO: 943506 - DNA, 33 bp, Homo sapien
acggcagtcaacaaaggaagggagatggaaaac

SEQ ID NO: 943507 - DNA, 33 bp, Homo sapien
gtctgcccacagtgaaactcaatgtctcccagg

SEQ ID NO: 943508 - DNA, 33 bp, Homo sapien
gtctgcccacagtgaagctcaatgtctcccagg

SEQ ID NO: 943509 - DNA, 33 bp, Homo sapien
cagcaattcgggaaaccatgaattattcaaggg

SEQ ID NO: 943510 - DNA, 33 bp, Homo sapien
cagcaattcgggaaacgatgaattattcaaggg

SEQ ID NO: 943511 - DNA, 33 bp, Homo sapien
taatttgaatgccttgcacaaagtgctctccaa

SEQ ID NO: 943512 - DNA, 33 bp, Homo sapien
taatttgaatgccttgtacaaagtgctctccaa

SEQ ID NO: 943513 - DNA, 33 bp, Homo sapien
atgtgagctcagaagacgacacagtagtctaag

SEQ ID NO: 943514 - DNA, 33 bp, Homo sapien
atgtgagctcagaagaggacacagtagtctaag

SEQ ID NO: 943515 - DNA, 33 bp, Homo sapien
tctttggtactcagttcaaacaccatatatccc

SEQ ID NO: 943516 - DNA, 33 bp, Homo sapien
tctttggtactcagttgaaacaccatatatccc

SEQ ID NO: 943517 - DNA, 33 bp, Homo sapien
actgagtaccaaagaacgactaaaagtgagtca

SEQ ID NO: 943518 - DNA, 33 bp, Homo sapien
actgagtaccaaagaaggactaaaagtgagtca

SEQ ID NO: 943519 - DNA, 33 bp, Homo sapien
ctgtcttccaacttgaaaccttgtcccactgga

SEQ ID NO: 943520 - DNA, 33 bp, Homo sapien
ctgtcttccaacttgataccttgtcccactgga

SEQ ID NO: 943521 - DNA, 33 bp, Homo sapien
gtgtctaaatgagaaccagagtaactcactgtg

SEQ ID NO: 943522 - DNA, 33 bp, Homo sapien
gtgtctaaatgagaactagagtaactcactgtg

SEQ ID NO: 943523 - DNA, 33 bp, Homo sapien
agctgagaacttcaaactaattcagttttgcca

SEQ ID NO: 943524 - DNA, 33 bp, Homo sapien
agctgagaacttcaaagtaattcagttttgcca

SEQ ID NO: 943525 - DNA, 33 bp, Homo sapien
attatccactagccataagcagccacgacacac

SEQ ID NO: 943526 - DNA, 33 bp, Homo sapien
attatccactagccatgagcagccacgacacac

SEQ ID NO: 943527 - DNA, 33 bp, Homo sapien
aatttgcatcagaggcaattttcaaacccaaac

SEQ ID NO: 943528 - DNA, 33 bp, Homo sapien
aatttgcatcagaggcgattttcaaacccaaac

SEQ ID NO: 943529 - DNA, 33 bp, Homo sapien
catgggttttgaggaaccaactctgacttggtc

SEQ ID NO: 943530 - DNA, 33 bp, Homo sapien
catgggttttgaggaatcaactctgacttggtc

SEQ ID NO: 943531 - DNA, 33 bp, Homo sapien
aaacctcttcgaataaaacatgatttttgaaag

SEQ ID NO: 943532 - DNA, 33 bp, Homo sapien
aaacctcttcgaataatacatgatttttgaaag

SEQ ID NO: 943533 - DNA, 33 bp, Homo sapien
tcagccttcacttgccaaatgattggtcgttgg

SEQ ID NO: 943534 - DNA, 33 bp, Homo sapien
tcagccttcacttgccgaatgattggtcgttgg

SEQ ID NO: 943535 - DNA, 33 bp, Homo sapien
agacgttacctggaccacttccaatcagatgat

SEQ ID NO: 943536 - DNA, 33 bp, Homo sapien
agacgttacctggaccgcttccaatcagatgat

SEQ ID NO: 943537 - DNA, 33 bp, Homo sapien
gtgaaaaatctatccactcatcaatgtagagtc

SEQ ID NO: 943538 - DNA, 33 bp, Homo sapien
gtgaaaaatctatccagtcatcaatgtagagtc

SEQ ID NO: 943539 - DNA, 33 bp, Homo sapien
aagccaatgtcaggaacaatcagaagttgtcag

SEQ ID NO: 943540 - DNA, 33 bp, Homo sapien
aagccaatgtcaggaagaatcagaagttgtcag

SEQ ID NO: 943541 - DNA, 33 bp, Homo sapien
tgttgtaaagtgcagagaatagatggaatttaa

SEQ ID NO: 943542 - DNA, 33 bp, Homo sapien
tgttgtaaagtgcagataatagatggaatttaa

SEQ ID NO: 943543 - DNA, 33 bp, Homo sapien
tccatcattttctcatcaaccattcccaggttg

SEQ ID NO: 943544 - DNA, 33 bp, Homo sapien
tccatcattttctcattaaccattcccaggttg

SEQ ID NO: 943545 - DNA, 33 bp, Homo sapien
agctttaggtgatagacaataagaaacaaagaa

SEQ ID NO: 943546 - DNA, 33 bp, Homo sapien
agctttaggtgatagagaataagaaacaaagaa

SEQ ID NO: 943547 - DNA, 33 bp, Homo sapien
aaaccatcgatacaaacactctataagaatact

SEQ ID NO: 943548 - DNA, 33 bp, Homo sapien
aaaccatcgatacaaatactctataagaatact

SEQ ID NO: 943549 - DNA, 33 bp, Homo sapien
cttcctcaatccctaacaccatctactatgttt

SEQ ID NO: 943550 - DNA, 33 bp, Homo sapien
cttcctcaatccctaagaccatctactatgttt

SEQ ID NO: 943551 - DNA, 33 bp, Homo sapien
aggcattggatggagtcacgtgggttgctcgac

SEQ ID NO: 943552 - DNA, 33 bp, Homo sapien
aggcattggatggagtgacgtgggttgctcgac

SEQ ID NO: 943553 - DNA, 33 bp, Homo sapien
gctcacatttgaattacgagaaggaacacttat

SEQ ID NO: 943554 - DNA, 33 bp, Homo sapien
gctcacatttgaattatgagaaggaacacttat

SEQ ID NO: 943555 - DNA, 33 bp, Homo sapien
aattgacaagaccaaacaccagtgaactattct

SEQ ID NO: 943556 - DNA, 33 bp, Homo sapien
aattgacaagaccaaagaccagtgaactattct

SEQ ID NO: 943557 - DNA, 33 bp, Homo sapien
tgaccagtctaatgatcaccacaaacagtaggg

SEQ ID NO: 943558 - DNA, 33 bp, Homo sapien
tgaccagtctaatgattaccacaaacagtaggg

SEQ ID NO: 943559 - DNA, 33 bp, Homo sapien
gttcaggctgcaggtacgcatttgggaattggt

SEQ ID NO: 943560 - DNA, 33 bp, Homo sapien
gttcaggctgcaggtatgcatttgggaattggt

SEQ ID NO: 943561 - DNA, 33 bp, Homo sapien
tctaaagtgaggttttcaaaaattgtctgtatt

SEQ ID NO: 943562 - DNA, 33 bp, Homo sapien
tctaaagtgaggttttgaaaaattgtctgtatt

SEQ ID NO: 943563 - DNA, 33 bp, Homo sapien
actaagtaatcagaaaccagaaagctcagactt

SEQ ID NO: 943564 - DNA, 33 bp, Homo sapien
actaagtaatcagaaatcagaaagctcagactt

SEQ ID NO: 943565 - DNA, 33 bp, Homo sapien
aaatcactggtgcgcaccatcgcagtggatctc

SEQ ID NO: 943566 - DNA, 33 bp, Homo sapien
aaatcactggtgcgcagcatcgcagtggatctc

SEQ ID NO: 943567 - DNA, 33 bp, Homo sapien
acgttccatacaggctcagaagcggagtctagc

SEQ ID NO: 943568 - DNA, 33 bp, Homo sapien
acgttccatacaggcttagaagcggagtctagc

SEQ ID NO: 943569 - DNA, 33 bp, Homo sapien
aatctagcaggccctacagctctctcaatttgc

SEQ ID NO: 943570 - DNA, 33 bp, Homo sapien
aatctagcaggccctatagctctctcaatttgc

SEQ ID NO: 943571 - DNA, 33 bp, Homo sapien
tgtatatttctaggcaaagagaagtgtgctgta

SEQ ID NO: 943572 - DNA, 33 bp, Homo sapien
tgtatatttctaggcatagagaagtgtgctgta

SEQ ID NO: 943573 - DNA, 33 bp, Homo sapien
ataaagtattcatacactgtagcacaagccaat

SEQ ID NO: 943574 - DNA, 33 bp, Homo sapien
ataaagtattcatacattgtagcacaagccaat

SEQ ID NO: 943575 - DNA, 33 bp, Homo sapien
tgattcatttcctccacattaattggcttgtgc

SEQ ID NO: 943576 - DNA, 33 bp, Homo sapien
tgattcatttcctccagattaattggcttgtgc

SEQ ID NO: 943577 - DNA, 33 bp, Homo sapien
atattaccttaacaatcacatagctatcagaat

SEQ ID NO: 943578 - DNA, 33 bp, Homo sapien
atattaccttaacaattacatagctatcagaat

SEQ ID NO: 943579 - DNA, 33 bp, Homo sapien
aacacagatctaattcaaaactttctgccctca

SEQ ID NO: 943580 - DNA, 33 bp, Homo sapien
aacacagatctaattcgaaactttctgccctca

SEQ ID NO: 943581 - DNA, 33 bp, Homo sapien
aggacaaaaatttgctcaaacattagcacagac

SEQ ID NO: 943582 - DNA, 33 bp, Homo sapien
aggacaaaaatttgctgaaacattagcacagac

SEQ ID NO: 943583 - DNA, 33 bp, Homo sapien
tatagctaaggaaaatgaaggccgtgaaataat

SEQ ID NO: 943584 - DNA, 33 bp, Homo sapien
tatagctaaggaaaattaaggccgtgaaataat

SEQ ID NO: 943585 - DNA, 33 bp, Homo sapien
cacagtaagtagattccaatggtggagatggga

SEQ ID NO: 943586 - DNA, 33 bp, Homo sapien
cacagtaagtagattctaatggtggagatggga

SEQ ID NO: 943587 - DNA, 33 bp, Homo sapien
gaaaaacatctaaggacattaaaaagaaggttg

SEQ ID NO: 943588 - DNA, 33 bp, Homo sapien
gaaaaacatctaaggatattaaaaagaaggttg

SEQ ID NO: 943589 - DNA, 33 bp, Homo sapien
gaaacagaaattttacaacaacaaccttctttt

SEQ ID NO: 943590 - DNA, 33 bp, Homo sapien
gaaacagaaattttactacaacaaccttctttt

SEQ ID NO: 943591 - DNA, 33 bp, Homo sapien
aatacaagaaggtctacaaaggacagaacagag

SEQ ID NO: 943592 - DNA, 33 bp, Homo sapien
aatacaagaaggtctataaaggacagaacagag

SEQ ID NO: 943593 - DNA, 33 bp, Homo sapien
aaccttcatcttccctaaaatccgtgctgatgc

SEQ ID NO: 943594 - DNA, 33 bp, Homo sapien
aaccttcatcttccctgaaatccgtgctgatgc

SEQ ID NO: 943595 - DNA, 33 bp, Homo sapien
tttctctgaaaaccaccgaagtaaaacagtatc

SEQ ID NO: 943596 - DNA, 33 bp, Homo sapien
tttctctgaaaaccactgaagtaaaacagtatc

SEQ ID NO: 943597 - DNA, 33 bp, Homo sapien
cttggggtgttcacaaatattctttgtttgcat

SEQ ID NO: 943598 - DNA, 33 bp, Homo sapien
cttggggtgttcacaagtattctttgtttgcat

SEQ ID NO: 943599 - DNA, 33 bp, Homo sapien
ctcttgttcatagtcacacatcatggcatgaga

SEQ ID NO: 943600 - DNA, 33 bp, Homo sapien
ctcttgttcatagtcagacatcatggcatgaga

SEQ ID NO: 943601 - DNA, 33 bp, Homo sapien
caatgactccctaacaaacaagaccactaaaga

SEQ ID NO: 943602 - DNA, 33 bp, Homo sapien
caatgactccctaacagacaagaccactaaaga

SEQ ID NO: 943603 - DNA, 33 bp, Homo sapien
attctgaagtaacttacggatatcaggagctga

SEQ ID NO: 943604 - DNA, 33 bp, Homo sapien
attctgaagtaacttatggatatcaggagctga

SEQ ID NO: 943605 - DNA, 33 bp, Homo sapien
tgtcccagagatttcactaaatgcacatttggc

SEQ ID NO: 943606 - DNA, 33 bp, Homo sapien
tgtcccagagatttcagtaaatgcacatttggc

SEQ ID NO: 943607 - DNA, 33 bp, Homo sapien
caaggtttagggtgatcagcatccaattttaag

SEQ ID NO: 943608 - DNA, 33 bp, Homo sapien
caaggtttagggtgatgagcatccaattttaag

SEQ ID NO: 943609 - DNA, 33 bp, Homo sapien
ccattgcaaaggagcaaataaatagtaagagat

SEQ ID NO: 943610 - DNA, 33 bp, Homo sapien
ccattgcaaaggagcagataaatagtaagagat

SEQ ID NO: 943611 - DNA, 33 bp, Homo sapien
atgtgattactagctacgacatttggaaacttt

SEQ ID NO: 943612 - DNA, 33 bp, Homo sapien
atgtgattactagctatgacatttggaaacttt

SEQ ID NO: 943613 - DNA, 33 bp, Homo sapien
cgaggtacactttaaggcagtatggtaaaaaat

SEQ ID NO: 943614 - DNA, 33 bp, Homo sapien
cgaggtacactttaagtcagtatggtaaaaaat

SEQ ID NO: 943615 - DNA, 33 bp, Homo sapien
cgctgctcgtatcaaacagcccaagatatctct

SEQ ID NO: 943616 - DNA, 33 bp, Homo sapien
cgctgctcgtatcaaatagcccaagatatctct

SEQ ID NO: 943617 - DNA, 33 bp, Homo sapien
tagcttgattgatcacaaccaggaacgctttct

SEQ ID NO: 943618 - DNA, 33 bp, Homo sapien
tagcttgattgatcacgaccaggaacgctttct

SEQ ID NO: 943619 - DNA, 33 bp, Homo sapien
actacattcaaggcaaccttctagccaatttgg

SEQ ID NO: 943620 - DNA, 33 bp, Homo sapien
actacattcaaggcaatcttctagccaatttgg

SEQ ID NO: 943621 - DNA, 33 bp, Homo sapien
gttgaagcatgatagaaaagagagagaaggagc

SEQ ID NO: 943622 - DNA, 33 bp, Homo sapien
gttgaagcatgatagagaagagagagaaggagc

SEQ ID NO: 943623 - DNA, 33 bp, Homo sapien
ttttccacttgaggacccttgtaaacactgggt

SEQ ID NO: 943624 - DNA, 33 bp, Homo sapien
ttttccacttgaggacgcttgtaaacactgggt

SEQ ID NO: 943625 - DNA, 33 bp, Homo sapien
tactcctctcaatccacgttcacaccctgtgtt

SEQ ID NO: 943626 - DNA, 33 bp, Homo sapien
tactcctctcaatccatgttcacaccctgtgtt

SEQ ID NO: 943627 - DNA, 33 bp, Homo sapien
gtcacgattctctccacgccttagctcattata

SEQ ID NO: 943628 - DNA, 33 bp, Homo sapien
gtcacgattctctccatgccttagctcattata

SEQ ID NO: 943629 - DNA, 33 bp, Homo sapien
cgtccattggcaggaactgggttgtctgtctat

SEQ ID NO: 943630 - DNA, 33 bp, Homo sapien
cgtccattggcaggaagtgggttgtctgtctat

SEQ ID NO: 943631 - DNA, 33 bp, Homo sapien
tgcatcttttaaagcaacttcccctcatatcca

SEQ ID NO: 943632 - DNA, 33 bp, Homo sapien
tgcatcttttaaagcatcttcccctcatatcca

SEQ ID NO: 943633 - DNA, 33 bp, Homo sapien
ttgcatacaaaaggagcacaaattgcatgcgaa

SEQ ID NO: 943634 - DNA, 33 bp, Homo sapien
ttgcatacaaaaggaggacaaattgcatgcgaa

SEQ ID NO: 943635 - DNA, 33 bp, Homo sapien
atcctaaaggagaaatcaggtgagatttattta

SEQ ID NO: 943636 - DNA, 33 bp, Homo sapien
atcctaaaggagaaatgaggtgagatttattta

SEQ ID NO: 943637 - DNA, 33 bp, Homo sapien
ttttcatcattgattacgtaggagtgtaatgaa

SEQ ID NO: 943638 - DNA, 33 bp, Homo sapien
ttttcatcattgattaggtaggagtgtaatgaa

SEQ ID NO: 943639 - DNA, 33 bp, Homo sapien
ataagatcttaatggacgaggagctgcttctta

SEQ ID NO: 943640 - DNA, 33 bp, Homo sapien
ataagatcttaatggatgaggagctgcttctta

SEQ ID NO: 943641 - DNA, 33 bp, Homo sapien
gctgctgctttattaactgagtttatgaaataa

SEQ ID NO: 943642 - DNA, 33 bp, Homo sapien
gctgctgctttattaattgagtttatgaaataa

SEQ ID NO: 943643 - DNA, 33 bp, Homo sapien
aggaggaatcaactgacgtggtaaactttactg

SEQ ID NO: 943644 - DNA, 33 bp, Homo sapien
aggaggaatcaactgatgtggtaaactttactg

SEQ ID NO: 943645 - DNA, 33 bp, Homo sapien
tgtgtaagcagtaattcaagtaacattctatgt

SEQ ID NO: 943646 - DNA, 33 bp, Homo sapien
tgtgtaagcagtaattgaagtaacattctatgt

SEQ ID NO: 943647 - DNA, 33 bp, Homo sapien
cccagaatattgttggaagtcaattaggaaagc

SEQ ID NO: 943648 - DNA, 33 bp, Homo sapien
cccagaatattgttggcagtcaattaggaaagc

SEQ ID NO: 943649 - DNA, 33 bp, Homo sapien
tatgcttcacactttcaaaatttctactacacg

SEQ ID NO: 943650 - DNA, 33 bp, Homo sapien
tatgcttcacactttccaaatttctactacacg

SEQ ID NO: 943651 - DNA, 33 bp, Homo sapien
aaaactagcctaccacagattgcattcagcata

SEQ ID NO: 943652 - DNA, 33 bp, Homo sapien
aaaactagcctaccaccgattgcattcagcata

SEQ ID NO: 943653 - DNA, 33 bp, Homo sapien
catctctttttttcagccatttcttggaaatca

SEQ ID NO: 943654 - DNA, 33 bp, Homo sapien
catctctttttttcaggcatttcttggaaatca

SEQ ID NO: 943655 - DNA, 33 bp, Homo sapien
ttgaattacagaaaaactgttcttgccctgtgg

SEQ ID NO: 943656 - DNA, 33 bp, Homo sapien
ttgaattacagaaaaattgttcttgccctgtgg

SEQ ID NO: 943657 - DNA, 33 bp, Homo sapien
gcccagtgtcctgaacagagcaggaattcaaga

SEQ ID NO: 943658 - DNA, 33 bp, Homo sapien
gcccagtgtcctgaacggagcaggaattcaaga

SEQ ID NO: 943659 - DNA, 33 bp, Homo sapien
taagttacattctgccccaaatgccttttgcat

SEQ ID NO: 943660 - DNA, 33 bp, Homo sapien
taagttacattctgcctcaaatgccttttgcat

SEQ ID NO: 943661 - DNA, 33 bp, Homo sapien
taaaggaaattttcccagattacacttggaaca

SEQ ID NO: 943662 - DNA, 33 bp, Homo sapien
taaaggaaattttccctgattacacttggaaca

SEQ ID NO: 943663 - DNA, 33 bp, Homo sapien
ctaaaactaagctttgcagttgggctaaagaac

SEQ ID NO: 943664 - DNA, 33 bp, Homo sapien
ctaaaactaagctttggagttgggctaaagaac

SEQ ID NO: 943665 - DNA, 33 bp, Homo sapien
atacggaaaggttggacctgtttttcttgtggg

SEQ ID NO: 943666 - DNA, 33 bp, Homo sapien
atacggaaaggttggatctgtttttcttgtggg

SEQ ID NO: 943667 - DNA, 33 bp, Homo sapien
cagataaatgagtaaactgatacctcagtaaat

SEQ ID NO: 943668 - DNA, 33 bp, Homo sapien
cagataaatgagtaaattgatacctcagtaaat

SEQ ID NO: 943669 - DNA, 33 bp, Homo sapien
tttatccattcacatacccgcatttgaataatt

SEQ ID NO: 943670 - DNA, 33 bp, Homo sapien
tttatccattcacatatccgcatttgaataatt

SEQ ID NO: 943671 - DNA, 33 bp, Homo sapien
atggatcaggacataactgagggtcaaacatga

SEQ ID NO: 943672 - DNA, 33 bp, Homo sapien
atggatcaggacataattgagggtcaaacatga

SEQ ID NO: 943673 - DNA, 33 bp, Homo sapien
gttcaaagaggaacgacattatggctttatcta

SEQ ID NO: 943674 - DNA, 33 bp, Homo sapien
gttcaaagaggaacgagattatggctttatcta

SEQ ID NO: 943675 - DNA, 33 bp, Homo sapien
atctacttacacttcacctactacacaatttcc

SEQ ID NO: 943676 - DNA, 33 bp, Homo sapien
atctacttacacttcagctactacacaatttcc

SEQ ID NO: 943677 - DNA, 33 bp, Homo sapien
acaaatggtgcctgagcaaattatgatctcaaa

SEQ ID NO: 943678 - DNA, 33 bp, Homo sapien
acaaatggtgcctgagtaaattatgatctcaaa

SEQ ID NO: 943679 - DNA, 33 bp, Homo sapien
ggaaatgctcccatgaatatcgcagcaatcttt

SEQ ID NO: 943680 - DNA, 33 bp, Homo sapien
ggaaatgctcccatgagtatcgcagcaatcttt

SEQ ID NO: 943681 - DNA, 33 bp, Homo sapien
agaatgatggtccgtgcaccttctcacatgtcc

SEQ ID NO: 943682 - DNA, 33 bp, Homo sapien
agaatgatggtccgtgtaccttctcacatgtcc

SEQ ID NO: 943683 - DNA, 33 bp, Homo sapien
tctgagtccaagctcaagttatctctgagaatg

SEQ ID NO: 943684 - DNA, 33 bp, Homo sapien
tctgagtccaagctcaggttatctctgagaatg

SEQ ID NO: 943685 - DNA, 33 bp, Homo sapien
ctgtcactgctggaacaaaatcccaagttgaat

SEQ ID NO: 943686 - DNA, 33 bp, Homo sapien
ctgtcactgctggaaccaaatcccaagttgaat

SEQ ID NO: 943687 - DNA, 33 bp, Homo sapien
ctccttttcagccaatcatcctctcctttcctc

SEQ ID NO: 943688 - DNA, 33 bp, Homo sapien
ctccttttcagccaatgatcctctcctttcctc

SEQ ID NO: 943689 - DNA, 33 bp, Homo sapien
aaacattgagggcaataagtttcttttcacatt

SEQ ID NO: 943690 - DNA, 33 bp, Homo sapien
aaacattgagggcaatgagtttcttttcacatt

SEQ ID NO: 943691 - DNA, 33 bp, Homo sapien
ttccattcaggtgtaacggaaggaacaaaggga

SEQ ID NO: 943692 - DNA, 33 bp, Homo sapien
ttccattcaggtgtaagggaaggaacaaaggga

SEQ ID NO: 943693 - DNA, 33 bp, Homo sapien
gattgtcactttttctcaaaatatcatttaatt

SEQ ID NO: 943694 - DNA, 33 bp, Homo sapien
gattgtcactttttctgaaaatatcatttaatt

SEQ ID NO: 943695 - DNA, 33 bp, Homo sapien
cgtttgttcttataccagaatgatttgttggga

SEQ ID NO: 943696 - DNA, 33 bp, Homo sapien
cgtttgttcttataccggaatgatttgttggga

SEQ ID NO: 943697 - DNA, 33 bp, Homo sapien
tatgaatatcctggtccaagtgaaaataaaaat

SEQ ID NO: 943698 - DNA, 33 bp, Homo sapien
tatgaatatcctggtcgaagtgaaaataaaaat

SEQ ID NO: 943699 - DNA, 33 bp, Homo sapien
tcgtaacaggatgctgaatgaaaatcatactgt

SEQ ID NO: 943700 - DNA, 33 bp, Homo sapien
tcgtaacaggatgctgcatgaaaatcatactgt

SEQ ID NO: 943701 - DNA, 33 bp, Homo sapien
accaagtaatcaattacgtaacaataacatcgt

SEQ ID NO: 943702 - DNA, 33 bp, Homo sapien
accaagtaatcaattatgtaacaataacatcgt

SEQ ID NO: 943703 - DNA, 33 bp, Homo sapien
tgctacttgatggagacagtgtcactccactgt

SEQ ID NO: 943704 - DNA, 33 bp, Homo sapien
tgctacttgatggagagagtgtcactccactgt

SEQ ID NO: 943705 - DNA, 33 bp, Homo sapien
gcagtgcttaatggtcccgattcaggaaatgta

SEQ ID NO: 943706 - DNA, 33 bp, Homo sapien
gcagtgcttaatggtctcgattcaggaaatgta

SEQ ID NO: 943707 - DNA, 33 bp, Homo sapien
gtgtgggaaattatcagaggtggaatgtagcaa

SEQ ID NO: 943708 - DNA, 33 bp, Homo sapien
gtgtgggaaattatcataggtggaatgtagcaa

SEQ ID NO: 943709 - DNA, 33 bp, Homo sapien
atgacagaaagagaaagttggtgatttaccaca

SEQ ID NO: 943710 - DNA, 33 bp, Homo sapien
atgacagaaagagaaatttggtgatttaccaca

SEQ ID NO: 943711 - DNA, 33 bp, Homo sapien
tggaggagcaaattaactaagcatacatgcaga

SEQ ID NO: 943712 - DNA, 33 bp, Homo sapien
tggaggagcaaattaagtaagcatacatgcaga

SEQ ID NO: 943713 - DNA, 33 bp, Homo sapien
gcgtgatacctgattcacacctctgttactaca

SEQ ID NO: 943714 - DNA, 33 bp, Homo sapien
gcgtgatacctgattcgcacctctgttactaca

SEQ ID NO: 943715 - DNA, 33 bp, Homo sapien
ctctaatgatgtaaaacgcctcagacatcgtta

SEQ ID NO: 943716 - DNA, 33 bp, Homo sapien
ctctaatgatgtaaaaggcctcagacatcgtta

SEQ ID NO: 943717 - DNA, 33 bp, Homo sapien
cggtgtgctctagaaccgcaattgacagtccca

SEQ ID NO: 943718 - DNA, 33 bp, Homo sapien
cggtgtgctctagaactgcaattgacagtccca

SEQ ID NO: 943719 - DNA, 33 bp, Homo sapien
gctcccagatacgaacaagatccttgatttttg

SEQ ID NO: 943720 - DNA, 33 bp, Homo sapien
gctcccagatacgaacgagatccttgatttttg

SEQ ID NO: 943721 - DNA, 33 bp, Homo sapien
ggaaggattgtagagagaatgttgatgccctca

SEQ ID NO: 943722 - DNA, 33 bp, Homo sapien
ggaaggattgtagagataatgttgatgccctca

SEQ ID NO: 943723 - DNA, 33 bp, Homo sapien
ctttcacgtcagaatgaacctccaggagcaaag

SEQ ID NO: 943724 - DNA, 33 bp, Homo sapien
ctttcacgtcagaatggacctccaggagcaaag

SEQ ID NO: 943725 - DNA, 33 bp, Homo sapien
tgaaagaaagccaccaatcaagttagaaattat

SEQ ID NO: 943726 - DNA, 33 bp, Homo sapien
tgaaagaaagccaccagtcaagttagaaattat

SEQ ID NO: 943727 - DNA, 33 bp, Homo sapien
acagtaacagagatgactacaaattagaagtgg

SEQ ID NO: 943728 - DNA, 33 bp, Homo sapien
acagtaacagagatgagtacaaattagaagtgg

SEQ ID NO: 943729 - DNA, 33 bp, Homo sapien
tggttgctttaaaacactccaaaaatgacagca

SEQ ID NO: 943730 - DNA, 33 bp, Homo sapien
tggttgctttaaaacagtccaaaaatgacagca

SEQ ID NO: 943731 - DNA, 33 bp, Homo sapien
taaattatcttattaactgaatggccattgcgg

SEQ ID NO: 943732 - DNA, 33 bp, Homo sapien
taaattatcttattaattgaatggccattgcgg

SEQ ID NO: 943733 - DNA, 33 bp, Homo sapien
gtttttaagtctcaaaatgttgcttacatagtg

SEQ ID NO: 943734 - DNA, 33 bp, Homo sapien
gtttttaagtctcaaagtgttgcttacatagtg

SEQ ID NO: 943735 - DNA, 33 bp, Homo sapien
ctcaaagccaggtatccatgaataaacgcccac

SEQ ID NO: 943736 - DNA, 33 bp, Homo sapien
ctcaaagccaggtatctatgaataaacgcccac

SEQ ID NO: 943737 - DNA, 33 bp, Homo sapien
aaagtgataagtgaaaggccagtaaagataaaa

SEQ ID NO: 943738 - DNA, 33 bp, Homo sapien
aaagtgataagtgaaatgccagtaaagataaaa

SEQ ID NO: 943739 - DNA, 33 bp, Homo sapien
gagagggctcatataccccggcaaattactcaa

SEQ ID NO: 943740 - DNA, 33 bp, Homo sapien
gagagggctcatatacgccggcaaattactcaa

SEQ ID NO: 943741 - DNA, 33 bp, Homo sapien
tggtagaatatcagacacgtacaatatactcag

SEQ ID NO: 943742 - DNA, 33 bp, Homo sapien
tggtagaatatcagacgcgtacaatatactcag

SEQ ID NO: 943743 - DNA, 33 bp, Homo sapien
aaaaagtagtctataaaaactgcctcaagaact

SEQ ID NO: 943744 - DNA, 33 bp, Homo sapien
aaaaagtagtctataagaactgcctcaagaact

SEQ ID NO: 943745 - DNA, 33 bp, Homo sapien
aaatggatgaatgttaaatgtcactgagatctt

SEQ ID NO: 943746 - DNA, 33 bp, Homo sapien
aaatggatgaatgttagatgtcactgagatctt

SEQ ID NO: 943747 - DNA, 33 bp, Homo sapien
ctacgaaataattagaaagtcacaagaacttgc

SEQ ID NO: 943748 - DNA, 33 bp, Homo sapien
ctacgaaataattagatagtcacaagaacttgc

SEQ ID NO: 943749 - DNA, 33 bp, Homo sapien
tcattgtggctatgtcgacaatatagctaggca

SEQ ID NO: 943750 - DNA, 33 bp, Homo sapien
tcattgtggctatgtctacaatatagctaggca

SEQ ID NO: 943751 - DNA, 33 bp, Homo sapien
gggtgtccaagattcagtctcttcacctcttct

SEQ ID NO: 943752 - DNA, 33 bp, Homo sapien
gggtgtccaagattcattctcttcacctcttct

SEQ ID NO: 943753 - DNA, 33 bp, Homo sapien
cataaacttaggtcaacagagcccttaacccaa

SEQ ID NO: 943754 - DNA, 33 bp, Homo sapien
cataaacttaggtcaagagagcccttaacccaa

SEQ ID NO: 943755 - DNA, 33 bp, Homo sapien
aagacataaaaacacacaaaacactttgtagga

SEQ ID NO: 943756 - DNA, 33 bp, Homo sapien
aagacataaaaacacagaaaacactttgtagga

SEQ ID NO: 943757 - DNA, 33 bp, Homo sapien
acaagaacatacgtaaagcatgtaaacattgtc

SEQ ID NO: 943758 - DNA, 33 bp, Homo sapien
acaagaacatacgtaaggcatgtaaacattgtc

SEQ ID NO: 943759 - DNA, 33 bp, Homo sapien
ctttactaacattgaacatcagtaacatatgaa

SEQ ID NO: 943760 - DNA, 33 bp, Homo sapien
ctttactaacattgaagatcagtaacatatgaa

SEQ ID NO: 943761 - DNA, 33 bp, Homo sapien
gtgactgggaacttccagagtatgacttcaggg

SEQ ID NO: 943762 - DNA, 33 bp, Homo sapien
gtgactgggaacttcctgagtatgacttcaggg

SEQ ID NO: 943763 - DNA, 33 bp, Homo sapien
taggcagccgggacaacatcagactaatactca

SEQ ID NO: 943764 - DNA, 33 bp, Homo sapien
taggcagccgggacaagatcagactaatactca

SEQ ID NO: 943765 - DNA, 33 bp, Homo sapien
aatagaggatcaaatgcaaaacaaggtattctt

SEQ ID NO: 943766 - DNA, 33 bp, Homo sapien
aatagaggatcaaatgtaaaacaaggtattctt

SEQ ID NO: 943767 - DNA, 33 bp, Homo sapien
aaggaggacctagccacgtcttatatggatagc

SEQ ID NO: 943768 - DNA, 33 bp, Homo sapien
aaggaggacctagccatgtcttatatggatagc

SEQ ID NO: 943769 - DNA, 33 bp, Homo sapien
ccaaattaagtgttacagagggaattttcgtgt

SEQ ID NO: 943770 - DNA, 33 bp, Homo sapien
ccaaattaagtgttacggagggaattttcgtgt

SEQ ID NO: 943771 - DNA, 33 bp, Homo sapien
gacaaggctatcgaaaagaagtttaaaattcat

SEQ ID NO: 943772 - DNA, 33 bp, Homo sapien
gacaaggctatcgaaaggaagtttaaaattcat

SEQ ID NO: 943773 - DNA, 33 bp, Homo sapien
ctctccatttctctacactttgcctctgtagta

SEQ ID NO: 943774 - DNA, 33 bp, Homo sapien
ctctccatttctctacgctttgcctctgtagta

SEQ ID NO: 943775 - DNA, 33 bp, Homo sapien
agcagcaaatagtccaaaacaaacacatttgat

SEQ ID NO: 943776 - DNA, 33 bp, Homo sapien
agcagcaaatagtccagaacaaacacatttgat

SEQ ID NO: 943777 - DNA, 33 bp, Homo sapien
ctatgctagcatttcaataatagccttgactct

SEQ ID NO: 943778 - DNA, 33 bp, Homo sapien
ctatgctagcatttcattaatagccttgactct

SEQ ID NO: 943779 - DNA, 33 bp, Homo sapien
gctaaatgaaaaactacgatgtccttctccttc

SEQ ID NO: 943780 - DNA, 33 bp, Homo sapien
gctaaatgaaaaactaggatgtccttctccttc

SEQ ID NO: 943781 - DNA, 33 bp, Homo sapien
agaattaatccatataaaaattttcgcaaaact

SEQ ID NO: 943782 - DNA, 33 bp, Homo sapien
agaattaatccatatataaattttcgcaaaact

SEQ ID NO: 943783 - DNA, 33 bp, Homo sapien
atttcagtacttcctaaaagttgctgaatctct

SEQ ID NO: 943784 - DNA, 33 bp, Homo sapien
atttcagtacttcctataagttgctgaatctct

SEQ ID NO: 943785 - DNA, 33 bp, Homo sapien
cacagaggctgggtaacaagaaaggagagcaca

SEQ ID NO: 943786 - DNA, 33 bp, Homo sapien
cacagaggctgggtaagaagaaaggagagcaca

SEQ ID NO: 943787 - DNA, 33 bp, Homo sapien
tcacctattgtatagcaaagatacagcaatgtg

SEQ ID NO: 943788 - DNA, 33 bp, Homo sapien
tcacctattgtatagcgaagatacagcaatgtg

SEQ ID NO: 943789 - DNA, 33 bp, Homo sapien
agttaagcagcttttacggtaaagaattttaga

SEQ ID NO: 943790 - DNA, 33 bp, Homo sapien
agttaagcagcttttatggtaaagaattttaga

SEQ ID NO: 943791 - DNA, 33 bp, Homo sapien
tggagttaggactcaagttccctcttggccata

SEQ ID NO: 943792 - DNA, 33 bp, Homo sapien
tggagttaggactcaatttccctcttggccata

SEQ ID NO: 943793 - DNA, 33 bp, Homo sapien
attagtggtagcgtaaatgcagggaaggcaaca

SEQ ID NO: 943794 - DNA, 33 bp, Homo sapien
attagtggtagcgtaactgcagggaaggcaaca

SEQ ID NO: 943795 - DNA, 33 bp, Homo sapien
gaaaagaatgaatgtacgcagtcagactttgtt

SEQ ID NO: 943796 - DNA, 33 bp, Homo sapien
gaaaagaatgaatgtatgcagtcagactttgtt

SEQ ID NO: 943797 - DNA, 33 bp, Homo sapien
acaatgcttcctagacaaaccactgtgtacata

SEQ ID NO: 943798 - DNA, 33 bp, Homo sapien
acaatgcttcctagaccaaccactgtgtacata

SEQ ID NO: 943799 - DNA, 33 bp, Homo sapien
cttaaggaatacgaaaggaggctagttatacac

SEQ ID NO: 943800 - DNA, 33 bp, Homo sapien
cttaaggaatacgaaatgaggctagttatacac

SEQ ID NO: 943801 - DNA, 33 bp, Homo sapien
caagctgagaaaatcacgaaattcttgcctttc

SEQ ID NO: 943802 - DNA, 33 bp, Homo sapien
caagctgagaaaatcatgaaattcttgcctttc

SEQ ID NO: 943803 - DNA, 33 bp, Homo sapien
gaggtaccaattgttaacctttgctaaagtata

SEQ ID NO: 943804 - DNA, 33 bp, Homo sapien
gaggtaccaattgttaccctttgctaaagtata

SEQ ID NO: 943805 - DNA, 33 bp, Homo sapien
gcgcacacactgtctgcagagaatttagaataa

SEQ ID NO: 943806 - DNA, 33 bp, Homo sapien
gcgcacacactgtctgtagagaatttagaataa

SEQ ID NO: 943807 - DNA, 33 bp, Homo sapien
tttattcactttaccactatgctcagaagttgt

SEQ ID NO: 943808 - DNA, 33 bp, Homo sapien
tttattcactttaccagtatgctcagaagttgt

SEQ ID NO: 943809 - DNA, 33 bp, Homo sapien
aggctcatgatatgcactgataccagaaacacg

SEQ ID NO: 943810 - DNA, 33 bp, Homo sapien
aggctcatgatatgcagtgataccagaaacacg

SEQ ID NO: 943811 - DNA, 33 bp, Homo sapien
aagacttgccaagtgacgggagtgaggaaaggc

SEQ ID NO: 943812 - DNA, 33 bp, Homo sapien
aagacttgccaagtgaggggagtgaggaaaggc

SEQ ID NO: 943813 - DNA, 33 bp, Homo sapien
ttattgcagcatttatcacatgatgactctgag

SEQ ID NO: 943814 - DNA, 33 bp, Homo sapien
ttattgcagcatttatgacatgatgactctgag

SEQ ID NO: 943815 - DNA, 33 bp, Homo sapien
aataagagggcaatgacaccaatcggttgtaca

SEQ ID NO: 943816 - DNA, 33 bp, Homo sapien
aataagagggcaatgagaccaatcggttgtaca

SEQ ID NO: 943817 - DNA, 33 bp, Homo sapien
gattccttgtgcaagacccatgatggcaaagcc

SEQ ID NO: 943818 - DNA, 33 bp, Homo sapien
gattccttgtgcaagagccatgatggcaaagcc

SEQ ID NO: 943819 - DNA, 33 bp, Homo sapien
tgatgctgacagataccgggtttgaacaatcag

SEQ ID NO: 943820 - DNA, 33 bp, Homo sapien
tgatgctgacagatactgggtttgaacaatcag

SEQ ID NO: 943821 - DNA, 33 bp, Homo sapien
ttactcttcagtattacgtacaggctttcattt

SEQ ID NO: 943822 - DNA, 33 bp, Homo sapien
ttactcttcagtattatgtacaggctttcattt

SEQ ID NO: 943823 - DNA, 33 bp, Homo sapien
tccactgctggaagccactgaactggaaacgta

SEQ ID NO: 943824 - DNA, 33 bp, Homo sapien
tccactgctggaagccgctgaactggaaacgta

SEQ ID NO: 943825 - DNA, 33 bp, Homo sapien
gtattttatatcctgcaatgttcctgggctcca

SEQ ID NO: 943826 - DNA, 33 bp, Homo sapien
gtattttatatcctgccatgttcctgggctcca

SEQ ID NO: 943827 - DNA, 33 bp, Homo sapien
tctccctcaatgttgaaaaggtagagaataagt

SEQ ID NO: 943828 - DNA, 33 bp, Homo sapien
tctccctcaatgttgagaaggtagagaataagt

SEQ ID NO: 943829 - DNA, 33 bp, Homo sapien
aacggcagttgtatgacagggtggaagtaggag

SEQ ID NO: 943830 - DNA, 33 bp, Homo sapien
aacggcagttgtatgagagggtggaagtaggag

SEQ ID NO: 943831 - DNA, 33 bp, Homo sapien
gagccttgccacgttcagaaacggcagttgtat

SEQ ID NO: 943832 - DNA, 33 bp, Homo sapien
gagccttgccacgttcggaaacggcagttgtat

SEQ ID NO: 943833 - DNA, 33 bp, Homo sapien
cctgccatagaaaccaagtatgtgaaggcacag

SEQ ID NO: 943834 - DNA, 33 bp, Homo sapien
cctgccatagaaaccatgtatgtgaaggcacag

SEQ ID NO: 943835 - DNA, 33 bp, Homo sapien
gtacaggaaggctgttcctaaatggactggatt

SEQ ID NO: 943836 - DNA, 33 bp, Homo sapien
gtacaggaaggctgtttctaaatggactggatt

SEQ ID NO: 943837 - DNA, 33 bp, Homo sapien
atacagtttcttgataccgtaacttcactttga

SEQ ID NO: 943838 - DNA, 33 bp, Homo sapien
atacagtttcttgatatcgtaacttcactttga

SEQ ID NO: 943839 - DNA, 33 bp, Homo sapien
caaaagtaggaacaccacatgtatctgtgctag

SEQ ID NO: 943840 - DNA, 33 bp, Homo sapien
caaaagtaggaacaccgcatgtatctgtgctag

SEQ ID NO: 943841 - DNA, 33 bp, Homo sapien
gagttagagaaaactgacaaatcattgatgttc

SEQ ID NO: 943842 - DNA, 33 bp, Homo sapien
gagttagagaaaactgtcaaatcattgatgttc

SEQ ID NO: 943843 - DNA, 33 bp, Homo sapien
tttcacccaaattggacgaacatcaatgatttg

SEQ ID NO: 943844 - DNA, 33 bp, Homo sapien
tttcacccaaattggaggaacatcaatgatttg

SEQ ID NO: 943845 - DNA, 33 bp, Homo sapien
atgggaaagcctggaacaggtggctcatttaca

SEQ ID NO: 943846 - DNA, 33 bp, Homo sapien
atgggaaagcctggaataggtggctcatttaca

SEQ ID NO: 943847 - DNA, 33 bp, Homo sapien
ctgtatgtaatgcgtcaattttctgtggctgct

SEQ ID NO: 943848 - DNA, 33 bp, Homo sapien
ctgtatgtaatgcgtccattttctgtggctgct

SEQ ID NO: 943849 - DNA, 33 bp, Homo sapien
tgttggaattagcggacaaggattttaatgcag

SEQ ID NO: 943850 - DNA, 33 bp, Homo sapien
tgttggaattagcggagaaggattttaatgcag

SEQ ID NO: 943851 - DNA, 33 bp, Homo sapien
tttaaactagctgaaagatgtggagtgattagt

SEQ ID NO: 943852 - DNA, 33 bp, Homo sapien
tttaaactagctgaaatatgtggagtgattagt

SEQ ID NO: 943853 - DNA, 33 bp, Homo sapien
atgcatagtgcaattacgtaatacgtttatatg

SEQ ID NO: 943854 - DNA, 33 bp, Homo sapien
atgcatagtgcaattatgtaatacgtttatatg

SEQ ID NO: 943855 - DNA, 33 bp, Homo sapien
atgacaaaactgaatacaatgcctgattacaga

SEQ ID NO: 943856 - DNA, 33 bp, Homo sapien
atgacaaaactgaatagaatgcctgattacaga

SEQ ID NO: 943857 - DNA, 33 bp, Homo sapien
actctggctaaaaacaagatatagaacaccatc

SEQ ID NO: 943858 - DNA, 33 bp, Homo sapien
actctggctaaaaacaggatatagaacaccatc

SEQ ID NO: 943859 - DNA, 33 bp, Homo sapien
ttctcgtctcctagcaggtaagctctatggtcc

SEQ ID NO: 943860 - DNA, 33 bp, Homo sapien
ttctcgtctcctagcatgtaagctctatggtcc

SEQ ID NO: 943861 - DNA, 33 bp, Homo sapien
cgcccacatgaaaatactaatggagcaccgtgc

SEQ ID NO: 943862 - DNA, 33 bp, Homo sapien
cgcccacatgaaaatagtaatggagcaccgtgc

SEQ ID NO: 943863 - DNA, 33 bp, Homo sapien
tggtgatgtgtttgggacatattgtgtatgtta

SEQ ID NO: 943864 - DNA, 33 bp, Homo sapien
tggtgatgtgtttggggcatattgtgtatgtta

SEQ ID NO: 943865 - DNA, 33 bp, Homo sapien
aactgcagaggaaacaaagtgacgtgacggata

SEQ ID NO: 943866 - DNA, 33 bp, Homo sapien
aactgcagaggaaacacagtgacgtgacggata

SEQ ID NO: 943867 - DNA, 33 bp, Homo sapien
gtgacggatatggaaacaacttgggaggaagag

SEQ ID NO: 943868 - DNA, 33 bp, Homo sapien
gtgacggatatggaaagaacttgggaggaagag

SEQ ID NO: 943869 - DNA, 33 bp, Homo sapien
aatgctcaaattgcaaaaaagaactacaatcac

SEQ ID NO: 943870 - DNA, 33 bp, Homo sapien
aatgctcaaattgcaagaaagaactacaatcac

SEQ ID NO: 943871 - DNA, 33 bp, Homo sapien
ctgaattcacgtaatacgactatgtagagaaat

SEQ ID NO: 943872 - DNA, 33 bp, Homo sapien
ctgaattcacgtaataggactatgtagagaaat

SEQ ID NO: 943873 - DNA, 33 bp, Homo sapien
tgaatggaaataaacccagagtaggtgctacag

SEQ ID NO: 943874 - DNA, 33 bp, Homo sapien
tgaatggaaataaacctagagtaggtgctacag

SEQ ID NO: 943875 - DNA, 33 bp, Homo sapien
ccttagtctcatcaaccataaaatggattaaaa

SEQ ID NO: 943876 - DNA, 33 bp, Homo sapien
ccttagtctcatcaactataaaatggattaaaa

SEQ ID NO: 943877 - DNA, 33 bp, Homo sapien
taaaagtctttccaaacagaatgttgaatttat

SEQ ID NO: 943878 - DNA, 33 bp, Homo sapien
taaaagtctttccaaatagaatgttgaatttat

SEQ ID NO: 943879 - DNA, 33 bp, Homo sapien
aaatgctgtacattatcaggagagatagtagtt

SEQ ID NO: 943880 - DNA, 33 bp, Homo sapien
aaatgctgtacattattaggagagatagtagtt

SEQ ID NO: 943881 - DNA, 33 bp, Homo sapien
atctgtgacagtaatccctcagctattgccggg

SEQ ID NO: 943882 - DNA, 33 bp, Homo sapien
atctgtgacagtaatctctcagctattgccggg

SEQ ID NO: 943883 - DNA, 33 bp, Homo sapien
cagaaattagtgcagcacaggtaaaacttgctg

SEQ ID NO: 943884 - DNA, 33 bp, Homo sapien
cagaaattagtgcagcgcaggtaaaacttgctg

SEQ ID NO: 943885 - DNA, 33 bp, Homo sapien
tttattgtctcttttgcaatttaggactcatgc

SEQ ID NO: 943886 - DNA, 33 bp, Homo sapien
tttattgtctcttttgtaatttaggactcatgc

SEQ ID NO: 943887 - DNA, 33 bp, Homo sapien
tacacattataaggaacatcagagaaatcatga

SEQ ID NO: 943888 - DNA, 33 bp, Homo sapien
tacacattataaggaagatcagagaaatcatga

SEQ ID NO: 943889 - DNA, 33 bp, Homo sapien
gggagaatattctccacaggggttaaccttacg

SEQ ID NO: 943890 - DNA, 33 bp, Homo sapien
gggagaatattctccagaggggttaaccttacg

SEQ ID NO: 943891 - DNA, 33 bp, Homo sapien
ctatatctcttgcagtaaatatttgttctctcc

SEQ ID NO: 943892 - DNA, 33 bp, Homo sapien
ctatatctcttgcagttaatatttgttctctcc

SEQ ID NO: 943893 - DNA, 33 bp, Homo sapien
tctgggcattactcaactactacaataggttct

SEQ ID NO: 943894 - DNA, 33 bp, Homo sapien
tctgggcattactcaagtactacaataggttct

SEQ ID NO: 943895 - DNA, 33 bp, Homo sapien
gaaaatcaaggacagtaactgctgcagacgagg

SEQ ID NO: 943896 - DNA, 33 bp, Homo sapien
gaaaatcaaggacagttactgctgcagacgagg

SEQ ID NO: 943897 - DNA, 33 bp, Homo sapien
tccaagggcagaaaaaactcacataacgtcaaa

SEQ ID NO: 943898 - DNA, 33 bp, Homo sapien
tccaagggcagaaaaagctcacataacgtcaaa

SEQ ID NO: 943899 - DNA, 33 bp, Homo sapien
ttccttctatttccatcagagagaatgtgcagc

SEQ ID NO: 943900 - DNA, 33 bp, Homo sapien
ttccttctatttccatgagagagaatgtgcagc

SEQ ID NO: 943901 - DNA, 33 bp, Homo sapien
ctctcgaccatgttcacagcatacgacaaagtg

SEQ ID NO: 943902 - DNA, 33 bp, Homo sapien
ctctcgaccatgttcatagcatacgacaaagtg

SEQ ID NO: 943903 - DNA, 33 bp, Homo sapien
gcaatcacttgccactaaatctgatgcttttaa

SEQ ID NO: 943904 - DNA, 33 bp, Homo sapien
gcaatcacttgccactgaatctgatgcttttaa

SEQ ID NO: 943905 - DNA, 33 bp, Homo sapien
cacaccactaaatatggaaccctactttacaat

SEQ ID NO: 943906 - DNA, 33 bp, Homo sapien
cacaccactaaatatgtaaccctactttacaat

SEQ ID NO: 943907 - DNA, 33 bp, Homo sapien
ctgaggctagtcttgaaataaaaggaaactgaa

SEQ ID NO: 943908 - DNA, 33 bp, Homo sapien
ctgaggctagtcttgagataaaaggaaactgaa

SEQ ID NO: 943909 - DNA, 33 bp, Homo sapien
agttccaggtgaagcaccaaatgtcaatgtaga

SEQ ID NO: 943910 - DNA, 33 bp, Homo sapien
agttccaggtgaagcagcaaatgtcaatgtaga

SEQ ID NO: 943911 - DNA, 33 bp, Homo sapien
atgtcaacaggcaaatcactaatcaaagtttgg

SEQ ID NO: 943912 - DNA, 33 bp, Homo sapien
atgtcaacaggcaaattactaatcaaagtttgg

SEQ ID NO: 943913 - DNA, 33 bp, Homo sapien
tgatgaagttactgacgagagaaggccagtggc

SEQ ID NO: 943914 - DNA, 33 bp, Homo sapien
tgatgaagttactgactagagaaggccagtggc

SEQ ID NO: 943915 - DNA, 33 bp, Homo sapien
tgtatagtttgtccatgaccatgtaagaaaagt

SEQ ID NO: 943916 - DNA, 33 bp, Homo sapien
tgtatagtttgtccattaccatgtaagaaaagt

SEQ ID NO: 943917 - DNA, 33 bp, Homo sapien
aagacctggttatttacagatttgctggtcata

SEQ ID NO: 943918 - DNA, 33 bp, Homo sapien
aagacctggttatttatagatttgctggtcata

SEQ ID NO: 943919 - DNA, 33 bp, Homo sapien
tcactgtcttccatcaaaaaaacaaatgattta

SEQ ID NO: 943920 - DNA, 33 bp, Homo sapien
tcactgtcttccatcagaaaaacaaatgattta

SEQ ID NO: 943921 - DNA, 33 bp, Homo sapien
aaatgatccatcagtacacaaaataggaagatg

SEQ ID NO: 943922 - DNA, 33 bp, Homo sapien
aaatgatccatcagtatacaaaataggaagatg

SEQ ID NO: 943923 - DNA, 33 bp, Homo sapien
aagaaaaccaaatacacaaagcctcaaggacat

SEQ ID NO: 943924 - DNA, 33 bp, Homo sapien
aagaaaaccaaatacagaaagcctcaaggacat

SEQ ID NO: 943925 - DNA, 33 bp, Homo sapien
accaagtaaaaacttacgtggatggtaaacagt

SEQ ID NO: 943926 - DNA, 33 bp, Homo sapien
accaagtaaaaacttatgtggatggtaaacagt

SEQ ID NO: 943927 - DNA, 33 bp, Homo sapien
gaattggcatcttctgaaatactgtaaattaga

SEQ ID NO: 943928 - DNA, 33 bp, Homo sapien
gaattggcatcttctgcaatactgtaaattaga

SEQ ID NO: 943929 - DNA, 33 bp, Homo sapien
ttagtttgttggactcaataatttgtaagattg

SEQ ID NO: 943930 - DNA, 33 bp, Homo sapien
ttagtttgttggactctataatttgtaagattg

SEQ ID NO: 943931 - DNA, 33 bp, Homo sapien
catcttgcctggaaacagttgcctttaattaat

SEQ ID NO: 943932 - DNA, 33 bp, Homo sapien
catcttgcctggaaacggttgcctttaattaat

SEQ ID NO: 943933 - DNA, 33 bp, Homo sapien
cagaaaagaggcatcacggagaattaattaaag

SEQ ID NO: 943934 - DNA, 33 bp, Homo sapien
cagaaaagaggcatcatggagaattaattaaag

SEQ ID NO: 943935 - DNA, 33 bp, Homo sapien
attctaatcctggaccaatttcctactggtttt

SEQ ID NO: 943936 - DNA, 33 bp, Homo sapien
attctaatcctggacccatttcctactggtttt

SEQ ID NO: 943937 - DNA, 33 bp, Homo sapien
ttagcttcattatgcaccagtgtaaagtgttgc

SEQ ID NO: 943938 - DNA, 33 bp, Homo sapien
ttagcttcattatgcatcagtgtaaagtgttgc

SEQ ID NO: 943939 - DNA, 33 bp, Homo sapien
aacgacagctgtaagacacagggtgccaattat

SEQ ID NO: 943940 - DNA, 33 bp, Homo sapien
aacgacagctgtaagatacagggtgccaattat

SEQ ID NO: 943941 - DNA, 33 bp, Homo sapien
agtgtgcaaacatctaagtgattgtgccctgct

SEQ ID NO: 943942 - DNA, 33 bp, Homo sapien
agtgtgcaaacatctacgtgattgtgccctgct

SEQ ID NO: 943943 - DNA, 33 bp, Homo sapien
acctggagaactcacactcaatgctctccttcc

SEQ ID NO: 943944 - DNA, 33 bp, Homo sapien
acctggagaactcacagtcaatgctctccttcc

SEQ ID NO: 943945 - DNA, 33 bp, Homo sapien
gagggctccagtctaaatgcttcacctcattac

SEQ ID NO: 943946 - DNA, 33 bp, Homo sapien
gagggctccagtctaagtgcttcacctcattac

SEQ ID NO: 943947 - DNA, 33 bp, Homo sapien
acctgtccaggtcatgaatgtcctatttggaaa

SEQ ID NO: 943948 - DNA, 33 bp, Homo sapien
acctgtccaggtcatggatgtcctatttggaaa

SEQ ID NO: 943949 - DNA, 33 bp, Homo sapien
ttcattaagaaatgcgaaatgtggccaggtgtg

SEQ ID NO: 943950 - DNA, 33 bp, Homo sapien
ttcattaagaaatgcggaatgtggccaggtgtg

SEQ ID NO: 943951 - DNA, 33 bp, Homo sapien
gggtacaaaatttgcaacctgtctacaaatgac

SEQ ID NO: 943952 - DNA, 33 bp, Homo sapien
gggtacaaaatttgcaccctgtctacaaatgac

SEQ ID NO: 943953 - DNA, 33 bp, Homo sapien
atctgttggggagtgaacacttagcaacattgc

SEQ ID NO: 943954 - DNA, 33 bp, Homo sapien
atctgttggggagtgaccacttagcaacattgc

SEQ ID NO: 943955 - DNA, 33 bp, Homo sapien
tctgcttggtgtctgacacatccaaagcaggtg

SEQ ID NO: 943956 - DNA, 33 bp, Homo sapien
tctgcttggtgtctgatacatccaaagcaggtg

SEQ ID NO: 943957 - DNA, 33 bp, Homo sapien
cccatgagccagcactaagagtaaccttcatgc

SEQ ID NO: 943958 - DNA, 33 bp, Homo sapien
cccatgagccagcactcagagtaaccttcatgc

SEQ ID NO: 943959 - DNA, 33 bp, Homo sapien
acttctctggtctggaaatggtagctgagcttc

SEQ ID NO: 943960 - DNA, 33 bp, Homo sapien
acttctctggtctggagatggtagctgagcttc

SEQ ID NO: 943961 - DNA, 33 bp, Homo sapien
ggtgaagctcaacttaaagtcaataacagctcc

SEQ ID NO: 943962 - DNA, 33 bp, Homo sapien
ggtgaagctcaacttagagtcaataacagctcc

SEQ ID NO: 943963 - DNA, 33 bp, Homo sapien
aaggacaaagtgatcaccaaagaataattaaca

SEQ ID NO: 943964 - DNA, 33 bp, Homo sapien
aaggacaaagtgatcagcaaagaataattaaca

SEQ ID NO: 943965 - DNA, 33 bp, Homo sapien
tagatcaaaatgtaccacttgatgaactctgtc

SEQ ID NO: 943966 - DNA, 33 bp, Homo sapien
tagatcaaaatgtaccgcttgatgaactctgtc

SEQ ID NO: 943967 - DNA, 33 bp, Homo sapien
attttataatggttcactaagtcaagacttcat

SEQ ID NO: 943968 - DNA, 33 bp, Homo sapien
attttataatggttcagtaagtcaagacttcat

SEQ ID NO: 943969 - DNA, 33 bp, Homo sapien
atattctcaaaattcaatcgtgtcttgtgtgag

SEQ ID NO: 943970 - DNA, 33 bp, Homo sapien
atattctcaaaattcagtcgtgtcttgtgtgag

SEQ ID NO: 943971 - DNA, 33 bp, Homo sapien
ttaatatgatacctacacctagccagtaactat

SEQ ID NO: 943972 - DNA, 33 bp, Homo sapien
ttaatatgatacctacgcctagccagtaactat

SEQ ID NO: 943973 - DNA, 33 bp, Homo sapien
gcacacagaacttaaccgagtggatcaacagct

SEQ ID NO: 943974 - DNA, 33 bp, Homo sapien
gcacacagaacttaactgagtggatcaacagct

SEQ ID NO: 943975 - DNA, 33 bp, Homo sapien
catctagataaatggccactgcgttttccactt

SEQ ID NO: 943976 - DNA, 33 bp, Homo sapien
catctagataaatggcgactgcgttttccactt

SEQ ID NO: 943977 - DNA, 33 bp, Homo sapien
aattatccgaatatacggaactgcatgaaatga

SEQ ID NO: 943978 - DNA, 33 bp, Homo sapien
aattatccgaatatactgaactgcatgaaatga

SEQ ID NO: 943979 - DNA, 33 bp, Homo sapien
taagttggaggagctacaactctgacaaaagta

SEQ ID NO: 943980 - DNA, 33 bp, Homo sapien
taagttggaggagctagaactctgacaaaagta

SEQ ID NO: 943981 - DNA, 33 bp, Homo sapien
gatccaatcaacatcaaggagactcacagagtg

SEQ ID NO: 943982 - DNA, 33 bp, Homo sapien
gatccaatcaacatcagggagactcacagagtg

SEQ ID NO: 943983 - DNA, 33 bp, Homo sapien
tatttcatcatttttaaaggtcatccactacat

SEQ ID NO: 943984 - DNA, 33 bp, Homo sapien
tatttcatcatttttacaggtcatccactacat

SEQ ID NO: 943985 - DNA, 33 bp, Homo sapien
ataatcaaataagatacgtcacattattagcga

SEQ ID NO: 943986 - DNA, 33 bp, Homo sapien
ataatcaaataagatatgtcacattattagcga

SEQ ID NO: 943987 - DNA, 33 bp, Homo sapien
gcatatatagcccgtccaacatttcgctaataa

SEQ ID NO: 943988 - DNA, 33 bp, Homo sapien
gcatatatagcccgtctaacatttcgctaataa

SEQ ID NO: 943989 - DNA, 33 bp, Homo sapien
aaacactgttgtccataaaattccctcagagta

SEQ ID NO: 943990 - DNA, 33 bp, Homo sapien
aaacactgttgtccatgaaattccctcagagta

SEQ ID NO: 943991 - DNA, 33 bp, Homo sapien
ttgaggggctaaaaatgattgacaagctgtgac

SEQ ID NO: 943992 - DNA, 33 bp, Homo sapien
ttgaggggctaaaaattattgacaagctgtgac

SEQ ID NO: 943993 - DNA, 33 bp, Homo sapien
attattgcagggtagacaataacagaatttgcc

SEQ ID NO: 943994 - DNA, 33 bp, Homo sapien
attattgcagggtagataataacagaatttgcc

SEQ ID NO: 943995 - DNA, 33 bp, Homo sapien
gagttagcctcagccactaattcctgaatagcg

SEQ ID NO: 943996 - DNA, 33 bp, Homo sapien
gagttagcctcagccattaattcctgaatagcg

SEQ ID NO: 943997 - DNA, 33 bp, Homo sapien
acaaaaatgcaaaaatcagtacaggctgggaac

SEQ ID NO: 943998 - DNA, 33 bp, Homo sapien
acaaaaatgcaaaaatgagtacaggctgggaac

SEQ ID NO: 943999 - DNA, 33 bp, Homo sapien
tttcagtcataggaaacgacaacccactaggat

SEQ ID NO: 944000 - DNA, 33 bp, Homo sapien
tttcagtcataggaaaggacaacccactaggat

SEQ ID NO: 944001 - DNA, 33 bp, Homo sapien
taactgacacaggtaaacattaagtagcatttg

SEQ ID NO: 944002 - DNA, 33 bp, Homo sapien
taactgacacaggtaagcattaagtagcatttg

SEQ ID NO: 944003 - DNA, 33 bp, Homo sapien
tttcactctcaccatacagtaaaataggcaggt

SEQ ID NO: 944004 - DNA, 33 bp, Homo sapien
tttcactctcaccatatagtaaaataggcaggt

SEQ ID NO: 944005 - DNA, 33 bp, Homo sapien
tcagatgacttgctgacactatttcataggcag

SEQ ID NO: 944006 - DNA, 33 bp, Homo sapien
tcagatgacttgctgagactatttcataggcag

SEQ ID NO: 944007 - DNA, 33 bp, Homo sapien
gtgcatcctgccagcaatcacttttctatttgt

SEQ ID NO: 944008 - DNA, 33 bp, Homo sapien
gtgcatcctgccagcagtcacttttctatttgt

SEQ ID NO: 944009 - DNA, 33 bp, Homo sapien
atcgttagaagaatgacgtgcaatttaaatacg

SEQ ID NO: 944010 - DNA, 33 bp, Homo sapien
atcgttagaagaatgatgtgcaatttaaatacg

SEQ ID NO: 944011 - DNA, 33 bp, Homo sapien
tcagtggctttgcccaataaccgtgtatttctg

SEQ ID NO: 944012 - DNA, 33 bp, Homo sapien
tcagtggctttgcccagtaaccgtgtatttctg

SEQ ID NO: 944013 - DNA, 33 bp, Homo sapien
agagatgactcacaaacttggtttacagggcat

SEQ ID NO: 944014 - DNA, 33 bp, Homo sapien
agagatgactcacaaagttggtttacagggcat

SEQ ID NO: 944015 - DNA, 33 bp, Homo sapien
gtcaattcaaccttaaccacaggatgaactgaa

SEQ ID NO: 944016 - DNA, 33 bp, Homo sapien
gtcaattcaaccttaatcacaggatgaactgaa

SEQ ID NO: 944017 - DNA, 33 bp, Homo sapien
gctgaggtctggaaaccgactgttgattttgct

SEQ ID NO: 944018 - DNA, 33 bp, Homo sapien
gctgaggtctggaaactgactgttgattttgct

SEQ ID NO: 944019 - DNA, 33 bp, Homo sapien
atcaaaatttgacaacaattcaaagatgaggaa

SEQ ID NO: 944020 - DNA, 33 bp, Homo sapien
atcaaaatttgacaacgattcaaagatgaggaa

SEQ ID NO: 944021 - DNA, 33 bp, Homo sapien
gcatatttcgagtgaaatccttagggacgtgtt

SEQ ID NO: 944022 - DNA, 33 bp, Homo sapien
gcatatttcgagtgaagtccttagggacgtgtt

SEQ ID NO: 944023 - DNA, 33 bp, Homo sapien
gccaccatcagaattacaccttcctctgtgtgg

SEQ ID NO: 944024 - DNA, 33 bp, Homo sapien
gccaccatcagaattataccttcctctgtgtgg

SEQ ID NO: 944025 - DNA, 33 bp, Homo sapien
ttgagtgttttgcaaaccaaatgcaatcatatc

SEQ ID NO: 944026 - DNA, 33 bp, Homo sapien
ttgagtgttttgcaaatcaaatgcaatcatatc

SEQ ID NO: 944027 - DNA, 33 bp, Homo sapien
taacctcagctctttgaagtcataagcagggct

SEQ ID NO: 944028 - DNA, 33 bp, Homo sapien
taacctcagctctttggagtcataagcagggct

SEQ ID NO: 944029 - DNA, 33 bp, Homo sapien
gaagaactttggcaaacggctttgtgttgtatg

SEQ ID NO: 944030 - DNA, 33 bp, Homo sapien
gaagaactttggcaaatggctttgtgttgtatg

SEQ ID NO: 944031 - DNA, 33 bp, Homo sapien
aagtctttctcacagtcaagagcaggggatcat

SEQ ID NO: 944032 - DNA, 33 bp, Homo sapien
aagtctttctcacagtgaagagcaggggatcat

SEQ ID NO: 944033 - DNA, 33 bp, Homo sapien
tgtgatgtgcgtctgaccaatagtatatggtag

SEQ ID NO: 944034 - DNA, 33 bp, Homo sapien
tgtgatgtgcgtctgagcaatagtatatggtag

SEQ ID NO: 944035 - DNA, 33 bp, Homo sapien
ctggagcctgtgaataagttgctttatgggaaa

SEQ ID NO: 944036 - DNA, 33 bp, Homo sapien
ctggagcctgtgaataggttgctttatgggaaa

SEQ ID NO: 944037 - DNA, 33 bp, Homo sapien
cattaagttatcctcaactcattattacagaag

SEQ ID NO: 944038 - DNA, 33 bp, Homo sapien
cattaagttatcctcagctcattattacagaag

SEQ ID NO: 944039 - DNA, 33 bp, Homo sapien
atatgacactttcaggaacgtgcacaaggaatt

SEQ ID NO: 944040 - DNA, 33 bp, Homo sapien
atatgacactttcaggcacgtgcacaaggaatt

SEQ ID NO: 944041 - DNA, 33 bp, Homo sapien
tccttctgatgccgaacactctccagggttcct

SEQ ID NO: 944042 - DNA, 33 bp, Homo sapien
tccttctgatgccgaagactctccagggttcct

SEQ ID NO: 944043 - DNA, 33 bp, Homo sapien
ctctactgttagattccatgtcaagtgtgggat

SEQ ID NO: 944044 - DNA, 33 bp, Homo sapien
ctctactgttagattctatgtcaagtgtgggat

SEQ ID NO: 944045 - DNA, 33 bp, Homo sapien
aaatcctgagaagaaaaagttggatttgaatgt

SEQ ID NO: 944046 - DNA, 33 bp, Homo sapien
aaatcctgagaagaaacagttggatttgaatgt

SEQ ID NO: 944047 - DNA, 33 bp, Homo sapien
aacgcaaactaacttgcattgagaaagataaga

SEQ ID NO: 944048 - DNA, 33 bp, Homo sapien
aacgcaaactaacttggattgagaaagataaga

SEQ ID NO: 944049 - DNA, 33 bp, Homo sapien
tatcctttaagagacaaaagacaattctagtta

SEQ ID NO: 944050 - DNA, 33 bp, Homo sapien
tatcctttaagagacacaagacaattctagtta

SEQ ID NO: 944051 - DNA, 33 bp, Homo sapien
tactttgtagaaaagcccagaaataactactga

SEQ ID NO: 944052 - DNA, 33 bp, Homo sapien
tactttgtagaaaagcgcagaaataactactga

SEQ ID NO: 944053 - DNA, 33 bp, Homo sapien
ttactagaacgttcagaatgtaggagttactta

SEQ ID NO: 944054 - DNA, 33 bp, Homo sapien
ttactagaacgttcagcatgtaggagttactta

SEQ ID NO: 944055 - DNA, 33 bp, Homo sapien
ttgcgtgtgacaatagaaatacatccaagtttg

SEQ ID NO: 944056 - DNA, 33 bp, Homo sapien
ttgcgtgtgacaatagcaatacatccaagtttg

SEQ ID NO: 944057 - DNA, 33 bp, Homo sapien
acagagaacatagacaacttgactcagaaacaa

SEQ ID NO: 944058 - DNA, 33 bp, Homo sapien
acagagaacatagacagcttgactcagaaacaa

SEQ ID NO: 944059 - DNA, 33 bp, Homo sapien
tgggaacacaacaccaagtgctacaaaaagggc

SEQ ID NO: 944060 - DNA, 33 bp, Homo sapien
tgggaacacaacaccaggtgctacaaaaagggc

SEQ ID NO: 944061 - DNA, 33 bp, Homo sapien
aactatatttagcagacggagtggtaaaagagg

SEQ ID NO: 944062 - DNA, 33 bp, Homo sapien
aactatatttagcagatggagtggtaaaagagg

SEQ ID NO: 944063 - DNA, 33 bp, Homo sapien
gtgtagcagtattatccaaatgatctcactctt

SEQ ID NO: 944064 - DNA, 33 bp, Homo sapien
gtgtagcagtattatcgaaatgatctcactctt

SEQ ID NO: 944065 - DNA, 33 bp, Homo sapien
ccagtggtatattttgcaggtggaatcaacaca

SEQ ID NO: 944066 - DNA, 33 bp, Homo sapien
ccagtggtatattttggaggtggaatcaacaca

SEQ ID NO: 944067 - DNA, 33 bp, Homo sapien
aattcactagctgggacgagaaagacagagaaa

SEQ ID NO: 944068 - DNA, 33 bp, Homo sapien
aattcactagctgggatgagaaagacagagaaa

SEQ ID NO: 944069 - DNA, 33 bp, Homo sapien
cctcttgtagttctcactcagccccatggtgtc

SEQ ID NO: 944070 - DNA, 33 bp, Homo sapien
cctcttgtagttctcagtcagccccatggtgtc

SEQ ID NO: 944071 - DNA, 33 bp, Homo sapien
acagaacctataatgactcaaaacaattagcct

SEQ ID NO: 944072 - DNA, 33 bp, Homo sapien
acagaacctataatgagtcaaaacaattagcct

SEQ ID NO: 944073 - DNA, 33 bp, Homo sapien
cttaaaatgttagacaatagacctcttattagg

SEQ ID NO: 944074 - DNA, 33 bp, Homo sapien
cttaaaatgttagacagtagacctcttattagg

SEQ ID NO: 944075 - DNA, 33 bp, Homo sapien
ggatgacaggaaggcaaatatttttacagtgaa

SEQ ID NO: 944076 - DNA, 33 bp, Homo sapien
ggatgacaggaaggcatatatttttacagtgaa

SEQ ID NO: 944077 - DNA, 33 bp, Homo sapien
attttgctgaatttaaacagcagcacctacact

SEQ ID NO: 944078 - DNA, 33 bp, Homo sapien
attttgctgaatttaagcagcagcacctacact

SEQ ID NO: 944079 - DNA, 33 bp, Homo sapien
taacttgagtcaccaccaaattcaatattatat

SEQ ID NO: 944080 - DNA, 33 bp, Homo sapien
taacttgagtcaccacgaaattcaatattatat

SEQ ID NO: 944081 - DNA, 33 bp, Homo sapien
gagcaaaaactatccaacttgctaccgtgggaa

SEQ ID NO: 944082 - DNA, 33 bp, Homo sapien
gagcaaaaactatccagcttgctaccgtgggaa

SEQ ID NO: 944083 - DNA, 33 bp, Homo sapien
tgactctgagcctcacacgcttttcttagcatc

SEQ ID NO: 944084 - DNA, 33 bp, Homo sapien
tgactctgagcctcacgcgcttttcttagcatc

SEQ ID NO: 944085 - DNA, 33 bp, Homo sapien
tctcagaggaggaaaactatccagcaatgctag

SEQ ID NO: 944086 - DNA, 33 bp, Homo sapien
tctcagaggaggaaaattatccagcaatgctag

SEQ ID NO: 944087 - DNA, 33 bp, Homo sapien
agccaagtcttaagaaagtgactggtagtgatg

SEQ ID NO: 944088 - DNA, 33 bp, Homo sapien
agccaagtcttaagaatgtgactggtagtgatg

SEQ ID NO: 944089 - DNA, 33 bp, Homo sapien
acttgtgttttactaaaatttctgaatctcata

SEQ ID NO: 944090 - DNA, 33 bp, Homo sapien
acttgtgttttactaacatttctgaatctcata

SEQ ID NO: 944091 - DNA, 33 bp, Homo sapien
atgctatcacttatccacaacgttccagcttca

SEQ ID NO: 944092 - DNA, 33 bp, Homo sapien
atgctatcacttatccgcaacgttccagcttca

SEQ ID NO: 944093 - DNA, 33 bp, Homo sapien
ctgtgtggccatttgaaacctgcttatccttga

SEQ ID NO: 944094 - DNA, 33 bp, Homo sapien
ctgtgtggccatttgagacctgcttatccttga

SEQ ID NO: 944095 - DNA, 33 bp, Homo sapien
catctagtcttttctcgcagggatctcatgaca

SEQ ID NO: 944096 - DNA, 33 bp, Homo sapien
catctagtcttttctctcagggatctcatgaca

SEQ ID NO: 944097 - DNA, 33 bp, Homo sapien
cggctgacacatcccgcagctgagccgcagctt

SEQ ID NO: 944098 - DNA, 33 bp, Homo sapien
cggctgacacatcccgtagctgagccgcagctt

SEQ ID NO: 944099 - DNA, 33 bp, Homo sapien
ttagggtaaggaggcacattaagaggtgactag

SEQ ID NO: 944100 - DNA, 33 bp, Homo sapien
ttagggtaaggaggcatattaagaggtgactag

SEQ ID NO: 944101 - DNA, 33 bp, Homo sapien
aagttatttttgttcagggatgtgtgatatttc

SEQ ID NO: 944102 - DNA, 33 bp, Homo sapien
aagttatttttgttcatggatgtgtgatatttc

SEQ ID NO: 944103 - DNA, 33 bp, Homo sapien
ccctatggatttgatcactgaattacttatcct

SEQ ID NO: 944104 - DNA, 33 bp, Homo sapien
ccctatggatttgatcgctgaattacttatcct

SEQ ID NO: 944105 - DNA, 33 bp, Homo sapien
cgtgaaatatgttccacggggttacagcaggta

SEQ ID NO: 944106 - DNA, 33 bp, Homo sapien
cgtgaaatatgttccagggggttacagcaggta

SEQ ID NO: 944107 - DNA, 33 bp, Homo sapien
atgttaatccgtttgaaaacttatactgaatct

SEQ ID NO: 944108 - DNA, 33 bp, Homo sapien
atgttaatccgtttgacaacttatactgaatct

SEQ ID NO: 944109 - DNA, 33 bp, Homo sapien
tgaagggcagactggaaaattcatagtagtgta

SEQ ID NO: 944110 - DNA, 33 bp, Homo sapien
tgaagggcagactggagaattcatagtagtgta

SEQ ID NO: 944111 - DNA, 33 bp, Homo sapien
gggaacaaggagcaaaatggtcagtagaggatg

SEQ ID NO: 944112 - DNA, 33 bp, Homo sapien
gggaacaaggagcaaagtggtcagtagaggatg

SEQ ID NO: 944113 - DNA, 33 bp, Homo sapien
tttaacctggctgcagactctttgtttttatgt

SEQ ID NO: 944114 - DNA, 33 bp, Homo sapien
tttaacctggctgcaggctctttgtttttatgt

SEQ ID NO: 944115 - DNA, 33 bp, Homo sapien
gcctggagctccaagaactgggattttaatagg

SEQ ID NO: 944116 - DNA, 33 bp, Homo sapien
gcctggagctccaagacctgggattttaatagg

SEQ ID NO: 944117 - DNA, 33 bp, Homo sapien
ttgacaaaaatatacaagcctgcttttctacta

SEQ ID NO: 944118 - DNA, 33 bp, Homo sapien
ttgacaaaaatatacaggcctgcttttctacta

SEQ ID NO: 944119 - DNA, 33 bp, Homo sapien
ccattgcttgaaaacaaataaactttaaaataa

SEQ ID NO: 944120 - DNA, 33 bp, Homo sapien
ccattgcttgaaaacatataaactttaaaataa

SEQ ID NO: 944121 - DNA, 33 bp, Homo sapien
aacacaacaaacactgcataaaagtatgtactt

SEQ ID NO: 944122 - DNA, 33 bp, Homo sapien
aacacaacaaacactgtataaaagtatgtactt

SEQ ID NO: 944123 - DNA, 33 bp, Homo sapien
tggattgggaaacatccaaccttaggctcttca

SEQ ID NO: 944124 - DNA, 33 bp, Homo sapien
tggattgggaaacatcgaaccttaggctcttca

SEQ ID NO: 944125 - DNA, 33 bp, Homo sapien
ttatgacattgttgaccagaggaacctgttgac

SEQ ID NO: 944126 - DNA, 33 bp, Homo sapien
ttatgacattgttgactagaggaacctgttgac

SEQ ID NO: 944127 - DNA, 33 bp, Homo sapien
gttccttaacaatttccattcattcaaatgatc

SEQ ID NO: 944128 - DNA, 33 bp, Homo sapien
gttccttaacaatttcgattcattcaaatgatc

SEQ ID NO: 944129 - DNA, 33 bp, Homo sapien
gattgcgacttttaaccggttaatccactgcta

SEQ ID NO: 944130 - DNA, 33 bp, Homo sapien
gattgcgacttttaacgggttaatccactgcta

SEQ ID NO: 944131 - DNA, 33 bp, Homo sapien
cgtagtcgtattttcaacaaagctttattggac

SEQ ID NO: 944132 - DNA, 33 bp, Homo sapien
cgtagtcgtattttcaccaaagctttattggac

SEQ ID NO: 944133 - DNA, 33 bp, Homo sapien
ttttccttccgctttccctccgtgggctgctga

SEQ ID NO: 944134 - DNA, 33 bp, Homo sapien
ttttccttccgctttctctccgtgggctgctga

SEQ ID NO: 944135 - DNA, 33 bp, Homo sapien
taattaattgtagtcacgttggtaatcatcatc

SEQ ID NO: 944136 - DNA, 33 bp, Homo sapien
taattaattgtagtcaggttggtaatcatcatc

SEQ ID NO: 944137 - DNA, 33 bp, Homo sapien
gagctcttattctgaacgagtatttttcctgaa

SEQ ID NO: 944138 - DNA, 33 bp, Homo sapien
gagctcttattctgaatgagtatttttcctgaa

SEQ ID NO: 944139 - DNA, 33 bp, Homo sapien
ttatttttaccaataacagtcgaggtcaaatta

SEQ ID NO: 944140 - DNA, 33 bp, Homo sapien
ttatttttaccaataatagtcgaggtcaaatta

SEQ ID NO: 944141 - DNA, 33 bp, Homo sapien
aggatatactgaaacactgatgtatgcaagtgc

SEQ ID NO: 944142 - DNA, 33 bp, Homo sapien
aggatatactgaaacagtgatgtatgcaagtgc

SEQ ID NO: 944143 - DNA, 33 bp, Homo sapien
gtaattagttgtcatgaaagttgcaattgcaaa

SEQ ID NO: 944144 - DNA, 33 bp, Homo sapien
gtaattagttgtcatggaagttgcaattgcaaa

SEQ ID NO: 944145 - DNA, 33 bp, Homo sapien
ttatagataacaaagacgggggactaatgtctg

SEQ ID NO: 944146 - DNA, 33 bp, Homo sapien
ttatagataacaaagaggggggactaatgtctg

SEQ ID NO: 944147 - DNA, 33 bp, Homo sapien
gcatggctagcaaaataagtaaaacttaaggct

SEQ ID NO: 944148 - DNA, 33 bp, Homo sapien
gcatggctagcaaaatgagtaaaacttaaggct

SEQ ID NO: 944149 - DNA, 33 bp, Homo sapien
ttctagtggatttttaagcaaatctatgattcc

SEQ ID NO: 944150 - DNA, 33 bp, Homo sapien
ttctagtggatttttaggcaaatctatgattcc

SEQ ID NO: 944151 - DNA, 33 bp, Homo sapien
cgtatcaccatttttacagctgccacactatta

SEQ ID NO: 944152 - DNA, 33 bp, Homo sapien
cgtatcaccatttttatagctgccacactatta

SEQ ID NO: 944153 - DNA, 33 bp, Homo sapien
tatgagattgctatcacgtaactcccatacatt

SEQ ID NO: 944154 - DNA, 33 bp, Homo sapien
tatgagattgctatcaggtaactcccatacatt

SEQ ID NO: 944155 - DNA, 33 bp, Homo sapien
aagtgagtaattagaagcattattgacctcttc

SEQ ID NO: 944156 - DNA, 33 bp, Homo sapien
aagtgagtaattagaatcattattgacctcttc

SEQ ID NO: 944157 - DNA, 33 bp, Homo sapien
ttacagtcaaaatacacgattgcagtattgctt

SEQ ID NO: 944158 - DNA, 33 bp, Homo sapien
ttacagtcaaaatacaggattgcagtattgctt

SEQ ID NO: 944159 - DNA, 33 bp, Homo sapien
aaacctaaagactttacctccaacaacatctta

SEQ ID NO: 944160 - DNA, 33 bp, Homo sapien
aaacctaaagactttatctccaacaacatctta

SEQ ID NO: 944161 - DNA, 33 bp, Homo sapien
gaaaatatgttagatgcagaaagctctgtgttt

SEQ ID NO: 944162 - DNA, 33 bp, Homo sapien
gaaaatatgttagatgtagaaagctctgtgttt

SEQ ID NO: 944163 - DNA, 33 bp, Homo sapien
gacaaactagccaaaactttagcagaccactac

SEQ ID NO: 944164 - DNA, 33 bp, Homo sapien
gacaaactagccaaaagtttagcagaccactac

SEQ ID NO: 944165 - DNA, 33 bp, Homo sapien
attcaccttctgtcgcacttagatggtaataat

SEQ ID NO: 944166 - DNA, 33 bp, Homo sapien
attcaccttctgtcgctcttagatggtaataat

SEQ ID NO: 944167 - DNA, 33 bp, Homo sapien
acgatgagatgatgaacaagtactcttttatca

SEQ ID NO: 944168 - DNA, 33 bp, Homo sapien
acgatgagatgatgaagaagtactcttttatca

SEQ ID NO: 944169 - DNA, 33 bp, Homo sapien
acattctgatgcttgaaaacaattgcatataca

SEQ ID NO: 944170 - DNA, 33 bp, Homo sapien
acattctgatgcttgagaacaattgcatataca

SEQ ID NO: 944171 - DNA, 33 bp, Homo sapien
agaaaagttcttccaaaatatcacgacactaac

SEQ ID NO: 944172 - DNA, 33 bp, Homo sapien
agaaaagttcttccaacatatcacgacactaac

SEQ ID NO: 944173 - DNA, 33 bp, Homo sapien
gttatgctttccttacactaaaaatatacttca

SEQ ID NO: 944174 - DNA, 33 bp, Homo sapien
gttatgctttccttacgctaaaaatatacttca

SEQ ID NO: 944175 - DNA, 33 bp, Homo sapien
tcatcaacttctgaaaacccatgttacatcccc

SEQ ID NO: 944176 - DNA, 33 bp, Homo sapien
tcatcaacttctgaaagcccatgttacatcccc

SEQ ID NO: 944177 - DNA, 33 bp, Homo sapien
cctctgttacaccgaaaacccttgcatccgggg

SEQ ID NO: 944178 - DNA, 33 bp, Homo sapien
cctctgttacaccgaagacccttgcatccgggg

SEQ ID NO: 944179 - DNA, 33 bp, Homo sapien
acacacctgaagaaataacagaggctcaaggag

SEQ ID NO: 944180 - DNA, 33 bp, Homo sapien
acacacctgaagaaattacagaggctcaaggag

SEQ ID NO: 944181 - DNA, 33 bp, Homo sapien
caaaaggccatttcagaacttcagagaccctgc

SEQ ID NO: 944182 - DNA, 33 bp, Homo sapien
caaaaggccatttcagtacttcagagaccctgc

SEQ ID NO: 944183 - DNA, 33 bp, Homo sapien
tttaattaattcacacaaactaattattcagct

SEQ ID NO: 944184 - DNA, 33 bp, Homo sapien
tttaattaattcacaccaactaattattcagct

SEQ ID NO: 944185 - DNA, 33 bp, Homo sapien
acatgctaaatagacaatgcaattatattgtat

SEQ ID NO: 944186 - DNA, 33 bp, Homo sapien
acatgctaaatagacagtgcaattatattgtat

SEQ ID NO: 944187 - DNA, 33 bp, Homo sapien
tgctaaggtctgcaatgatcacctctcagagat

SEQ ID NO: 944188 - DNA, 33 bp, Homo sapien
tgctaaggtctgcaattatcacctctcagagat

SEQ ID NO: 944189 - DNA, 33 bp, Homo sapien
ctccactagatggaaaagagattaccattgttt

SEQ ID NO: 944190 - DNA, 33 bp, Homo sapien
ctccactagatggaaaggagattaccattgttt

SEQ ID NO: 944191 - DNA, 33 bp, Homo sapien
ggaaaaggcctccacactggaatgaatgggtat

SEQ ID NO: 944192 - DNA, 33 bp, Homo sapien
ggaaaaggcctccacattggaatgaatgggtat

SEQ ID NO: 944193 - DNA, 33 bp, Homo sapien
atacagccttaccaaacgaagaaattcacatta

SEQ ID NO: 944194 - DNA, 33 bp, Homo sapien
atacagccttaccaaaggaagaaattcacatta

SEQ ID NO: 944195 - DNA, 33 bp, Homo sapien
cagctagctattaaccagattcttcgcattctc

SEQ ID NO: 944196 - DNA, 33 bp, Homo sapien
cagctagctattaaccggattcttcgcattctc

SEQ ID NO: 944197 - DNA, 33 bp, Homo sapien
atgcgtttagtgtgaacatgcctgacgggaccc

SEQ ID NO: 944198 - DNA, 33 bp, Homo sapien
atgcgtttagtgtgaagatgcctgacgggaccc

SEQ ID NO: 944199 - DNA, 33 bp, Homo sapien
gttcctgcattgctaacattttcagaggagaat

SEQ ID NO: 944200 - DNA, 33 bp, Homo sapien
gttcctgcattgctaatattttcagaggagaat

SEQ ID NO: 944201 - DNA, 33 bp, Homo sapien
atacgtgagccctaaccaatatacctacacttc

SEQ ID NO: 944202 - DNA, 33 bp, Homo sapien
atacgtgagccctaactaatatacctacacttc

SEQ ID NO: 944203 - DNA, 33 bp, Homo sapien
tcctagcaaagccttaagaaggagtagctatta

SEQ ID NO: 944204 - DNA, 33 bp, Homo sapien
tcctagcaaagccttacgaaggagtagctatta

SEQ ID NO: 944205 - DNA, 33 bp, Homo sapien
cagagaaactggtataaggaggcaatgctgaaa

SEQ ID NO: 944206 - DNA, 33 bp, Homo sapien
cagagaaactggtatatggaggcaatgctgaaa

SEQ ID NO: 944207 - DNA, 33 bp, Homo sapien
cactgaggaattaagaaagtgataaggtaagat

SEQ ID NO: 944208 - DNA, 33 bp, Homo sapien
cactgaggaattaagagagtgataaggtaagat

SEQ ID NO: 944209 - DNA, 33 bp, Homo sapien
cagtctatgatgaaaactatctgtgaattaggc

SEQ ID NO: 944210 - DNA, 33 bp, Homo sapien
cagtctatgatgaaaagtatctgtgaattaggc

SEQ ID NO: 944211 - DNA, 33 bp, Homo sapien
aacataagtgagacctaaattcaatttcatgtt

SEQ ID NO: 944212 - DNA, 33 bp, Homo sapien
aacataagtgagacctgaattcaatttcatgtt

SEQ ID NO: 944213 - DNA, 33 bp, Homo sapien
acttttttttgcaacaatctgagcactggagag

SEQ ID NO: 944214 - DNA, 33 bp, Homo sapien
acttttttttgcaacagtctgagcactggagag

SEQ ID NO: 944215 - DNA, 33 bp, Homo sapien
aaattttccttcatcaaaatcttacttactctc

SEQ ID NO: 944216 - DNA, 33 bp, Homo sapien
aaattttccttcatcataatcttacttactctc

SEQ ID NO: 944217 - DNA, 33 bp, Homo sapien
ccaatgacatcacctaaaaatctcctgccttaa

SEQ ID NO: 944218 - DNA, 33 bp, Homo sapien
ccaatgacatcacctagaaatctcctgccttaa

SEQ ID NO: 944219 - DNA, 33 bp, Homo sapien
aaatatagaacaaagtaaactgtgtcatcggaa

SEQ ID NO: 944220 - DNA, 33 bp, Homo sapien
aaatatagaacaaagtgaactgtgtcatcggaa

SEQ ID NO: 944221 - DNA, 33 bp, Homo sapien
actcacattcttggtgcagggaaatctctgcag

SEQ ID NO: 944222 - DNA, 33 bp, Homo sapien
actcacattcttggtgtagggaaatctctgcag

SEQ ID NO: 944223 - DNA, 33 bp, Homo sapien
atggctgctactacagaaccttccgagtattga

SEQ ID NO: 944224 - DNA, 33 bp, Homo sapien
atggctgctactacaggaccttccgagtattga

SEQ ID NO: 944225 - DNA, 33 bp, Homo sapien
tctagggccagaaagcgagatgcaggataaaac

SEQ ID NO: 944226 - DNA, 33 bp, Homo sapien
tctagggccagaaagctagatgcaggataaaac

SEQ ID NO: 944227 - DNA, 33 bp, Homo sapien
ttccagccatcaggtgcaataagcttttgttaa

SEQ ID NO: 944228 - DNA, 33 bp, Homo sapien
ttccagccatcaggtggaataagcttttgttaa

SEQ ID NO: 944229 - DNA, 33 bp, Homo sapien
gggatacagatccaaacgatatcactgaggttt

SEQ ID NO: 944230 - DNA, 33 bp, Homo sapien
gggatacagatccaaatgatatcactgaggttt

SEQ ID NO: 944231 - DNA, 33 bp, Homo sapien
taaaacttaaaggcataagaggttgtgaaaaca

SEQ ID NO: 944232 - DNA, 33 bp, Homo sapien
taaaacttaaaggcatgagaggttgtgaaaaca

SEQ ID NO: 944233 - DNA, 33 bp, Homo sapien
acggcacagtaacacaaaggcggctgtatatgt

SEQ ID NO: 944234 - DNA, 33 bp, Homo sapien
acggcacagtaacacagaggcggctgtatatgt

SEQ ID NO: 944235 - DNA, 33 bp, Homo sapien
ttaaagccaatcctgaagctaagtcctcacctg

SEQ ID NO: 944236 - DNA, 33 bp, Homo sapien
ttaaagccaatcctgacgctaagtcctcacctg

SEQ ID NO: 944237 - DNA, 33 bp, Homo sapien
tacagaaagggcgagcacagggttactagcaca

SEQ ID NO: 944238 - DNA, 33 bp, Homo sapien
tacagaaagggcgagcgcagggttactagcaca

SEQ ID NO: 944239 - DNA, 33 bp, Homo sapien
ttgttgcaaacttccacctaagtcatttctgcc

SEQ ID NO: 944240 - DNA, 33 bp, Homo sapien
ttgttgcaaacttccagctaagtcatttctgcc

SEQ ID NO: 944241 - DNA, 33 bp, Homo sapien
tttaaaaattatcacaatcatcctattttttca

SEQ ID NO: 944242 - DNA, 33 bp, Homo sapien
tttaaaaattatcacagtcatcctattttttca

SEQ ID NO: 944243 - DNA, 33 bp, Homo sapien
aatttttttatggttacaacacttaaggtcagc

SEQ ID NO: 944244 - DNA, 33 bp, Homo sapien
aatttttttatggttagaacacttaaggtcagc

SEQ ID NO: 944245 - DNA, 33 bp, Homo sapien
acagttctgatgagacactaccacttcaatttg

SEQ ID NO: 944246 - DNA, 33 bp, Homo sapien
acagttctgatgagacgctaccacttcaatttg

SEQ ID NO: 944247 - DNA, 33 bp, Homo sapien
tgctacaggagatgtacgagaaaaacaaattga

SEQ ID NO: 944248 - DNA, 33 bp, Homo sapien
tgctacaggagatgtaggagaaaaacaaattga

SEQ ID NO: 944249 - DNA, 33 bp, Homo sapien
atttccttcttcttcacagatgtggtataagct

SEQ ID NO: 944250 - DNA, 33 bp, Homo sapien
atttccttcttcttcatagatgtggtataagct

SEQ ID NO: 944251 - DNA, 33 bp, Homo sapien
agaaaagtcatttgccccgagtgacaccgagga

SEQ ID NO: 944252 - DNA, 33 bp, Homo sapien
agaaaagtcatttgccgcgagtgacaccgagga

SEQ ID NO: 944253 - DNA, 33 bp, Homo sapien
gacaaatctactgttgcaatgtggacatggctg

SEQ ID NO: 944254 - DNA, 33 bp, Homo sapien
gacaaatctactgttggaatgtggacatggctg

SEQ ID NO: 944255 - DNA, 33 bp, Homo sapien
gacaagtgaatcatgacgacggtttcccccaga

SEQ ID NO: 944256 - DNA, 33 bp, Homo sapien
gacaagtgaatcatgaggacggtttcccccaga

SEQ ID NO: 944257 - DNA, 33 bp, Homo sapien
agtagacacgttcttacacgttcaaggagaagg

SEQ ID NO: 944258 - DNA, 33 bp, Homo sapien
agtagacacgttcttatacgttcaaggagaagg

SEQ ID NO: 944259 - DNA, 33 bp, Homo sapien
ctcactaacaggtgtacgtgaactaccttcgca

SEQ ID NO: 944260 - DNA, 33 bp, Homo sapien
ctcactaacaggtgtatgtgaactaccttcgca

SEQ ID NO: 944261 - DNA, 33 bp, Homo sapien
tgtaatgcctgaatgacactcagtttaagatgt

SEQ ID NO: 944262 - DNA, 33 bp, Homo sapien
tgtaatgcctgaatgagactcagtttaagatgt

SEQ ID NO: 944263 - DNA, 33 bp, Homo sapien
ttcacgtgtcacgaaacagtccccttctttttc

SEQ ID NO: 944264 - DNA, 33 bp, Homo sapien
ttcacgtgtcacgaaatagtccccttctttttc

SEQ ID NO: 944265 - DNA, 33 bp, Homo sapien
tagactattactttcaacacactttttctttaa

SEQ ID NO: 944266 - DNA, 33 bp, Homo sapien
tagactattactttcagcacactttttctttaa

SEQ ID NO: 944267 - DNA, 33 bp, Homo sapien
tcaaggagttggtaaaaaacgcacaatgagtac

SEQ ID NO: 944268 - DNA, 33 bp, Homo sapien
tcaaggagttggtaaagaacgcacaatgagtac

SEQ ID NO: 944269 - DNA, 33 bp, Homo sapien
agtgaaagaatgcttcactactggagatcttcc

SEQ ID NO: 944270 - DNA, 33 bp, Homo sapien
agtgaaagaatgcttccctactggagatcttcc

SEQ ID NO: 944271 - DNA, 33 bp, Homo sapien
acatggttaggatgctcaattagccaaatgcca

SEQ ID NO: 944272 - DNA, 33 bp, Homo sapien
acatggttaggatgctgaattagccaaatgcca

SEQ ID NO: 944273 - DNA, 33 bp, Homo sapien
gagaggaactgtatgcacagatggggacaggga

SEQ ID NO: 944274 - DNA, 33 bp, Homo sapien
gagaggaactgtatgctcagatggggacaggga

SEQ ID NO: 944275 - DNA, 33 bp, Homo sapien
ccccctaaaatggtgacaaatgccacgcgttta

SEQ ID NO: 944276 - DNA, 33 bp, Homo sapien
ccccctaaaatggtgataaatgccacgcgttta

SEQ ID NO: 944277 - DNA, 33 bp, Homo sapien
ttgtcttgctttttctcaatctaaggataggaa

SEQ ID NO: 944278 - DNA, 33 bp, Homo sapien
ttgtcttgctttttcttaatctaaggataggaa

SEQ ID NO: 944279 - DNA, 33 bp, Homo sapien
gaaataaagccatacaactacaatcacgtgatc

SEQ ID NO: 944280 - DNA, 33 bp, Homo sapien
gaaataaagccatacacctacaatcacgtgatc

SEQ ID NO: 944281 - DNA, 33 bp, Homo sapien
ctcattgttattccagaaagagaaagagagcaa

SEQ ID NO: 944282 - DNA, 33 bp, Homo sapien
ctcattgttattccagcaagagaaagagagcaa

SEQ ID NO: 944283 - DNA, 33 bp, Homo sapien
acaagagtaatgatgacgaaaagtggtagctcc

SEQ ID NO: 944284 - DNA, 33 bp, Homo sapien
acaagagtaatgatgatgaaaagtggtagctcc

SEQ ID NO: 944285 - DNA, 33 bp, Homo sapien
aaaatctatggcccacactttaggtccaagtcc

SEQ ID NO: 944286 - DNA, 33 bp, Homo sapien
aaaatctatggcccacgctttaggtccaagtcc

SEQ ID NO: 944287 - DNA, 33 bp, Homo sapien
gcagcaaattttatcaataccgtagagaactgt

SEQ ID NO: 944288 - DNA, 33 bp, Homo sapien
gcagcaaattttatcagtaccgtagagaactgt

SEQ ID NO: 944289 - DNA, 33 bp, Homo sapien
tctggctggacttaacagaaatgaggcaaggca

SEQ ID NO: 944290 - DNA, 33 bp, Homo sapien
tctggctggacttaacggaaatgaggcaaggca

SEQ ID NO: 944291 - DNA, 33 bp, Homo sapien
ccctggctattgcagacaggttgtggtaccaga

SEQ ID NO: 944292 - DNA, 33 bp, Homo sapien
ccctggctattgcagataggttgtggtaccaga

SEQ ID NO: 944293 - DNA, 33 bp, Homo sapien
aagtgtttaataaagacgtgctgattaaactga

SEQ ID NO: 944294 - DNA, 33 bp, Homo sapien
aagtgtttaataaagatgtgctgattaaactga

SEQ ID NO: 944295 - DNA, 33 bp, Homo sapien
gctgattaaactgagaatcaactatgtacttca

SEQ ID NO: 944296 - DNA, 33 bp, Homo sapien
gctgattaaactgagagtcaactatgtacttca

SEQ ID NO: 944297 - DNA, 33 bp, Homo sapien
ataatttttaagctataagacattaacactcta

SEQ ID NO: 944298 - DNA, 33 bp, Homo sapien
ataatttttaagctatgagacattaacactcta

SEQ ID NO: 944299 - DNA, 33 bp, Homo sapien
ttgctgaccactgaaactgtcatgggcattttt

SEQ ID NO: 944300 - DNA, 33 bp, Homo sapien
ttgctgaccactgaaattgtcatgggcattttt

SEQ ID NO: 944301 - DNA, 33 bp, Homo sapien
aacgatctgctgtgtaaaaagcaacctcaagac

SEQ ID NO: 944302 - DNA, 33 bp, Homo sapien
aacgatctgctgtgtagaaagcaacctcaagac

SEQ ID NO: 944303 - DNA, 33 bp, Homo sapien
gacattcattgccttaaaaacagaaaaagctgc

SEQ ID NO: 944304 - DNA, 33 bp, Homo sapien
gacattcattgccttagaaacagaaaaagctgc

SEQ ID NO: 944305 - DNA, 33 bp, Homo sapien
agaaatagactcacatgaggaaaattcaggagc

SEQ ID NO: 944306 - DNA, 33 bp, Homo sapien
agaaatagactcacattaggaaaattcaggagc

SEQ ID NO: 944307 - DNA, 33 bp, Homo sapien
gctggaaacaatgccaacaactttatttttggt

SEQ ID NO: 944308 - DNA, 33 bp, Homo sapien
gctggaaacaatgccagcaactttatttttggt

SEQ ID NO: 944309 - DNA, 33 bp, Homo sapien
attgatcaacttgaaacggtgtcatatagagta

SEQ ID NO: 944310 - DNA, 33 bp, Homo sapien
attgatcaacttgaaatggtgtcatatagagta

SEQ ID NO: 944311 - DNA, 33 bp, Homo sapien
gatggcctcacctgcacaatagatactctgttg

SEQ ID NO: 944312 - DNA, 33 bp, Homo sapien
gatggcctcacctgcagaatagatactctgttg

SEQ ID NO: 944313 - DNA, 33 bp, Homo sapien
tttctttaaatggagccagaaaaatggcagctg

SEQ ID NO: 944314 - DNA, 33 bp, Homo sapien
tttctttaaatggagcgagaaaaatggcagctg

SEQ ID NO: 944315 - DNA, 33 bp, Homo sapien
caactttaggtagcaaaaacatcagaaatcata

SEQ ID NO: 944316 - DNA, 33 bp, Homo sapien
caactttaggtagcaagaacatcagaaatcata

SEQ ID NO: 944317 - DNA, 33 bp, Homo sapien
agtaggaagtatgtaaattaaggtaaaaatgca

SEQ ID NO: 944318 - DNA, 33 bp, Homo sapien
agtaggaagtatgtaagttaaggtaaaaatgca

SEQ ID NO: 944319 - DNA, 33 bp, Homo sapien
aaattcaaggactgtacagaactgtaggccatt

SEQ ID NO: 944320 - DNA, 33 bp, Homo sapien
aaattcaaggactgtatagaactgtaggccatt

SEQ ID NO: 944321 - DNA, 33 bp, Homo sapien
tttaaataacttgagacaatttcttcttgaaaa

SEQ ID NO: 944322 - DNA, 33 bp, Homo sapien
tttaaataacttgagagaatttcttcttgaaaa

SEQ ID NO: 944323 - DNA, 33 bp, Homo sapien
tcctcctctccaaagcacccaccacatctatgt

SEQ ID NO: 944324 - DNA, 33 bp, Homo sapien
tcctcctctccaaagcgcccaccacatctatgt

SEQ ID NO: 944325 - DNA, 33 bp, Homo sapien
tgaagagcagtgaagcaaaattgatgagaaatt

SEQ ID NO: 944326 - DNA, 33 bp, Homo sapien
tgaagagcagtgaagccaaattgatgagaaatt

SEQ ID NO: 944327 - DNA, 33 bp, Homo sapien
attgttttaaaagccacggcagtaacttacatt

SEQ ID NO: 944328 - DNA, 33 bp, Homo sapien
attgttttaaaagccagggcagtaacttacatt

SEQ ID NO: 944329 - DNA, 33 bp, Homo sapien
acgtgatacagattcacataatacacctttcaa

SEQ ID NO: 944330 - DNA, 33 bp, Homo sapien
acgtgatacagattcagataatacacctttcaa

SEQ ID NO: 944331 - DNA, 33 bp, Homo sapien
atgaaaatttgccccaaacgtctaggactgatg

SEQ ID NO: 944332 - DNA, 33 bp, Homo sapien
atgaaaatttgccccagacgtctaggactgatg

SEQ ID NO: 944333 - DNA, 33 bp, Homo sapien
ttctcaagcagcacaaatgtatgcaatcaattt

SEQ ID NO: 944334 - DNA, 33 bp, Homo sapien
ttctcaagcagcacaactgtatgcaatcaattt

SEQ ID NO: 944335 - DNA, 33 bp, Homo sapien
ctgtgcttagagtgaccctgctttttgatgttt

SEQ ID NO: 944336 - DNA, 33 bp, Homo sapien
ctgtgcttagagtgactctgctttttgatgttt

SEQ ID NO: 944337 - DNA, 33 bp, Homo sapien
attattttccttcatgcacctgtgcttagagtg

SEQ ID NO: 944338 - DNA, 33 bp, Homo sapien
attattttccttcatgtacctgtgcttagagtg

SEQ ID NO: 944339 - DNA, 33 bp, Homo sapien
agctcaacaaattctacgcttttggattattct

SEQ ID NO: 944340 - DNA, 33 bp, Homo sapien
agctcaacaaattctatgcttttggattattct

SEQ ID NO: 944341 - DNA, 33 bp, Homo sapien
cagaaggagacagaaacctaattctgggacagg

SEQ ID NO: 944342 - DNA, 33 bp, Homo sapien
cagaaggagacagaaagctaattctgggacagg

SEQ ID NO: 944343 - DNA, 33 bp, Homo sapien
aatcagtgtagatacactaaaacacaacaatac

SEQ ID NO: 944344 - DNA, 33 bp, Homo sapien
aatcagtgtagatacattaaaacacaacaatac

SEQ ID NO: 944345 - DNA, 33 bp, Homo sapien
ctactttgatgagactcaggccaaaacttcaaa

SEQ ID NO: 944346 - DNA, 33 bp, Homo sapien
ctactttgatgagactgaggccaaaacttcaaa

SEQ ID NO: 944347 - DNA, 33 bp, Homo sapien
ttcagaaagccgaaaacaattgttagaatgaga

SEQ ID NO: 944348 - DNA, 33 bp, Homo sapien
ttcagaaagccgaaaataattgttagaatgaga

SEQ ID NO: 944349 - DNA, 33 bp, Homo sapien
tgaaaaagaatggtacaaaagagtaaagacaaa

SEQ ID NO: 944350 - DNA, 33 bp, Homo sapien
tgaaaaagaatggtacgaaagagtaaagacaaa

SEQ ID NO: 944351 - DNA, 33 bp, Homo sapien
tcaaatgccagttcaaatcccgatttcaccact

SEQ ID NO: 944352 - DNA, 33 bp, Homo sapien
tcaaatgccagttcaagtcccgatttcaccact

SEQ ID NO: 944353 - DNA, 33 bp, Homo sapien
aagaaggaaagtaagaaaattgcccatctttgc

SEQ ID NO: 944354 - DNA, 33 bp, Homo sapien
aagaaggaaagtaagagaattgcccatctttgc

SEQ ID NO: 944355 - DNA, 33 bp, Homo sapien
ttattaattcccccaaaaggaacgataattcct

SEQ ID NO: 944356 - DNA, 33 bp, Homo sapien
ttattaattcccccaataggaacgataattcct

SEQ ID NO: 944357 - DNA, 33 bp, Homo sapien
acttaattagaaagcgaaaagatattacaattc

SEQ ID NO: 944358 - DNA, 33 bp, Homo sapien
acttaattagaaagcggaaagatattacaattc

SEQ ID NO: 944359 - DNA, 33 bp, Homo sapien
caaacattcagtctacaacacagggtttcatat

SEQ ID NO: 944360 - DNA, 33 bp, Homo sapien
caaacattcagtctacgacacagggtttcatat

SEQ ID NO: 944361 - DNA, 33 bp, Homo sapien
gaaaatgtctcaaagactcaatgcataaggaaa

SEQ ID NO: 944362 - DNA, 33 bp, Homo sapien
gaaaatgtctcaaagattcaatgcataaggaaa

SEQ ID NO: 944363 - DNA, 33 bp, Homo sapien
ttacatcacaagtaaaaatgagcttagattcct

SEQ ID NO: 944364 - DNA, 33 bp, Homo sapien
ttacatcacaagtaaacatgagcttagattcct

SEQ ID NO: 944365 - DNA, 33 bp, Homo sapien
tgagaaatattataatgatcagatgtggtttaa

SEQ ID NO: 944366 - DNA, 33 bp, Homo sapien
tgagaaatattataattatcagatgtggtttaa

SEQ ID NO: 944367 - DNA, 33 bp, Homo sapien
aaatctagtcttcttacggtaccagagcaggtc

SEQ ID NO: 944368 - DNA, 33 bp, Homo sapien
aaatctagtcttcttatggtaccagagcaggtc

SEQ ID NO: 944369 - DNA, 33 bp, Homo sapien
agaggaaaatcaccaacgaggtaaaagagaaac

SEQ ID NO: 944370 - DNA, 33 bp, Homo sapien
agaggaaaatcaccaatgaggtaaaagagaaac

SEQ ID NO: 944371 - DNA, 33 bp, Homo sapien
acttctctctgaaaagcacaaggctaagttatt

SEQ ID NO: 944372 - DNA, 33 bp, Homo sapien
acttctctctgaaaaggacaaggctaagttatt

SEQ ID NO: 944373 - DNA, 33 bp, Homo sapien
caggaagtaaaactcacaatgtgtagacccctg

SEQ ID NO: 944374 - DNA, 33 bp, Homo sapien
caggaagtaaaactcataatgtgtagacccctg

SEQ ID NO: 944375 - DNA, 33 bp, Homo sapien
agaaaactgcagaccaacgtttctcatggacat

SEQ ID NO: 944376 - DNA, 33 bp, Homo sapien
agaaaactgcagaccatcgtttctcatggacat

SEQ ID NO: 944377 - DNA, 33 bp, Homo sapien
taagaaccccatagtacgattgccacatattct

SEQ ID NO: 944378 - DNA, 33 bp, Homo sapien
taagaaccccatagtaggattgccacatattct

SEQ ID NO: 944379 - DNA, 33 bp, Homo sapien
cctataataagtataacgtcacctgccctacac

SEQ ID NO: 944380 - DNA, 33 bp, Homo sapien
cctataataagtataaggtcacctgccctacac

SEQ ID NO: 944381 - DNA, 33 bp, Homo sapien
catacatacactccaaaagggcagatttgtcac

SEQ ID NO: 944382 - DNA, 33 bp, Homo sapien
catacatacactccaagagggcagatttgtcac

SEQ ID NO: 944383 - DNA, 33 bp, Homo sapien
aattgtgctccctagcaaatgctttctcttttc

SEQ ID NO: 944384 - DNA, 33 bp, Homo sapien
aattgtgctccctagcgaatgctttctcttttc

SEQ ID NO: 944385 - DNA, 33 bp, Homo sapien
gcaagagagtaaaggtcaatgagtgaaaacaag

SEQ ID NO: 944386 - DNA, 33 bp, Homo sapien
gcaagagagtaaaggtgaatgagtgaaaacaag

SEQ ID NO: 944387 - DNA, 33 bp, Homo sapien
ctgttggataaacacgaccctgagagtcagcaa

SEQ ID NO: 944388 - DNA, 33 bp, Homo sapien
ctgttggataaacacggccctgagagtcagcaa

SEQ ID NO: 944389 - DNA, 33 bp, Homo sapien
taccacctgcaagtcaacttcatcagacaccct

SEQ ID NO: 944390 - DNA, 33 bp, Homo sapien
taccacctgcaagtcaccttcatcagacaccct

SEQ ID NO: 944391 - DNA, 33 bp, Homo sapien
tcagctctaaaatctgcacagtctgcaaccatc

SEQ ID NO: 944392 - DNA, 33 bp, Homo sapien
tcagctctaaaatctggacagtctgcaaccatc

SEQ ID NO: 944393 - DNA, 33 bp, Homo sapien
caataaagttcgaataaatcactacaatagtaa

SEQ ID NO: 944394 - DNA, 33 bp, Homo sapien
caataaagttcgaatacatcactacaatagtaa

SEQ ID NO: 944395 - DNA, 33 bp, Homo sapien
agagcctctttgggtaacttgggtttctcatga

SEQ ID NO: 944396 - DNA, 33 bp, Homo sapien
agagcctctttgggtatcttgggtttctcatga

SEQ ID NO: 944397 - DNA, 33 bp, Homo sapien
gtgcaagccctgtcctaaatgtttctgtcccca

SEQ ID NO: 944398 - DNA, 33 bp, Homo sapien
gtgcaagccctgtcctcaatgtttctgtcccca

SEQ ID NO: 944399 - DNA, 33 bp, Homo sapien
gaagacttggagttgcaaagtaacaaaagaagt

SEQ ID NO: 944400 - DNA, 33 bp, Homo sapien
gaagacttggagttgcgaagtaacaaaagaagt

SEQ ID NO: 944401 - DNA, 33 bp, Homo sapien
atagctgggccaattccaatgttacttactgat

SEQ ID NO: 944402 - DNA, 33 bp, Homo sapien
atagctgggccaattctaatgttacttactgat

SEQ ID NO: 944403 - DNA, 33 bp, Homo sapien
ggtgctatccagcccagatagcatgcttttccc

SEQ ID NO: 944404 - DNA, 33 bp, Homo sapien
ggtgctatccagcccatatagcatgcttttccc

SEQ ID NO: 944405 - DNA, 33 bp, Homo sapien
tgtatttttccacccaagagatcacggcagctt

SEQ ID NO: 944406 - DNA, 33 bp, Homo sapien
tgtatttttccacccaggagatcacggcagctt

SEQ ID NO: 944407 - DNA, 33 bp, Homo sapien
tcacacccggaggaagaatgccgtgggccacac

SEQ ID NO: 944408 - DNA, 33 bp, Homo sapien
tcacacccggaggaaggatgccgtgggccacac

SEQ ID NO: 944409 - DNA, 33 bp, Homo sapien
aggacaggcagataaaataatcaaacagcatac

SEQ ID NO: 944410 - DNA, 33 bp, Homo sapien
aggacaggcagataaagtaatcaaacagcatac

SEQ ID NO: 944411 - DNA, 33 bp, Homo sapien
aacttcaccattggcaagaggattttttatata

SEQ ID NO: 944412 - DNA, 33 bp, Homo sapien
aacttcaccattggcatgaggattttttatata

SEQ ID NO: 944413 - DNA, 33 bp, Homo sapien
aagcccttcctgattaaatcaccccaaatcaat

SEQ ID NO: 944414 - DNA, 33 bp, Homo sapien
aagcccttcctgattatatcaccccaaatcaat

SEQ ID NO: 944415 - DNA, 33 bp, Homo sapien
atctctctccctttgaggttctcctaacatttt

SEQ ID NO: 944416 - DNA, 33 bp, Homo sapien
atctctctccctttgatgttctcctaacatttt

SEQ ID NO: 944417 - DNA, 33 bp, Homo sapien
gattgatttacctagccatgaccacatgtctgt

SEQ ID NO: 944418 - DNA, 33 bp, Homo sapien
gattgatttacctagctatgaccacatgtctgt

SEQ ID NO: 944419 - DNA, 33 bp, Homo sapien
aaatctcagtagcctacgatgatgaaatgaaac

SEQ ID NO: 944420 - DNA, 33 bp, Homo sapien
aaatctcagtagcctaggatgatgaaatgaaac

SEQ ID NO: 944421 - DNA, 33 bp, Homo sapien
tttgtttttattatctcaactgatgagctttgt

SEQ ID NO: 944422 - DNA, 33 bp, Homo sapien
tttgtttttattatctgaactgatgagctttgt

SEQ ID NO: 944423 - DNA, 33 bp, Homo sapien
tatgccagatactggagagaaaaagttgaacac

SEQ ID NO: 944424 - DNA, 33 bp, Homo sapien
tatgccagatactggatagaaaaagttgaacac

SEQ ID NO: 944425 - DNA, 33 bp, Homo sapien
tgtactgtgtaagagacgttacatctatataag

SEQ ID NO: 944426 - DNA, 33 bp, Homo sapien
tgtactgtgtaagagaggttacatctatataag

SEQ ID NO: 944427 - DNA, 33 bp, Homo sapien
tttaatccatgaaacactgcttttactattata

SEQ ID NO: 944428 - DNA, 33 bp, Homo sapien
tttaatccatgaaacattgcttttactattata

SEQ ID NO: 944429 - DNA, 33 bp, Homo sapien
taggtactggttaagacattttctccacttatg

SEQ ID NO: 944430 - DNA, 33 bp, Homo sapien
taggtactggttaagagattttctccacttatg

SEQ ID NO: 944431 - DNA, 33 bp, Homo sapien
gttcataatgtgaaaactgcttgtgttagcatc

SEQ ID NO: 944432 - DNA, 33 bp, Homo sapien
gttcataatgtgaaaagtgcttgtgttagcatc

SEQ ID NO: 944433 - DNA, 33 bp, Homo sapien
attttatttggtaaagcaagtgaattttgctca

SEQ ID NO: 944434 - DNA, 33 bp, Homo sapien
attttatttggtaaagtaagtgaattttgctca

SEQ ID NO: 944435 - DNA, 33 bp, Homo sapien
ttatattaaaattcaggcctgttccaatctgac

SEQ ID NO: 944436 - DNA, 33 bp, Homo sapien
ttatattaaaattcagtcctgttccaatctgac

SEQ ID NO: 944437 - DNA, 33 bp, Homo sapien
gagatattggcaaaggcaaaacaggctgcaggt

SEQ ID NO: 944438 - DNA, 33 bp, Homo sapien
gagatattggcaaaggtaaaacaggctgcaggt

SEQ ID NO: 944439 - DNA, 33 bp, Homo sapien
ttttatcatgacaataacaaggatttagccatg

SEQ ID NO: 944440 - DNA, 33 bp, Homo sapien
ttttatcatgacaataccaaggatttagccatg

SEQ ID NO: 944441 - DNA, 33 bp, Homo sapien
atgcaaagaaggaatgaaagatccatgtagacg

SEQ ID NO: 944442 - DNA, 33 bp, Homo sapien
atgcaaagaaggaatggaagatccatgtagacg

SEQ ID NO: 944443 - DNA, 33 bp, Homo sapien
atctgtatgaccatagaagttcctttatgatct

SEQ ID NO: 944444 - DNA, 33 bp, Homo sapien
atctgtatgaccataggagttcctttatgatct

SEQ ID NO: 944445 - DNA, 33 bp, Homo sapien
gtcatacagatgataaaaggtagtattaagaat

SEQ ID NO: 944446 - DNA, 33 bp, Homo sapien
gtcatacagatgataagaggtagtattaagaat

SEQ ID NO: 944447 - DNA, 33 bp, Homo sapien
taaagactaggatctccaggaaggaaggatcat

SEQ ID NO: 944448 - DNA, 33 bp, Homo sapien
taaagactaggatctctaggaaggaaggatcat

SEQ ID NO: 944449 - DNA, 33 bp, Homo sapien
aagcaacaacccccatcatatctgtggctggcc

SEQ ID NO: 944450 - DNA, 33 bp, Homo sapien
aagcaacaacccccatgatatctgtggctggcc

SEQ ID NO: 944451 - DNA, 33 bp, Homo sapien
actcctgctaagctaacgtggaacttaaaatta

SEQ ID NO: 944452 - DNA, 33 bp, Homo sapien
actcctgctaagctaatgtggaacttaaaatta

SEQ ID NO: 944453 - DNA, 33 bp, Homo sapien
ctaaggcatatgggcacaagaagagattgcttt

SEQ ID NO: 944454 - DNA, 33 bp, Homo sapien
ctaaggcatatgggcagaagaagagattgcttt

SEQ ID NO: 944455 - DNA, 33 bp, Homo sapien
tatggtgagaatatacgataaaaccaagcatca

SEQ ID NO: 944456 - DNA, 33 bp, Homo sapien
tatggtgagaatatactataaaaccaagcatca

SEQ ID NO: 944457 - DNA, 33 bp, Homo sapien
ccaatagtcagtttcacgaacttcccacttgat

SEQ ID NO: 944458 - DNA, 33 bp, Homo sapien
ccaatagtcagtttcaggaacttcccacttgat

SEQ ID NO: 944459 - DNA, 33 bp, Homo sapien
taaattcaacatatcaagcactattgtaagcat

SEQ ID NO: 944460 - DNA, 33 bp, Homo sapien
taaattcaacatatcaggcactattgtaagcat

SEQ ID NO: 944461 - DNA, 33 bp, Homo sapien
attaacaaagggaatgccaatatttagcatcaa

SEQ ID NO: 944462 - DNA, 33 bp, Homo sapien
attaacaaagggaatgtcaatatttagcatcaa

SEQ ID NO: 944463 - DNA, 33 bp, Homo sapien
aacaatagcttcaaaactcttttttagtgacat

SEQ ID NO: 944464 - DNA, 33 bp, Homo sapien
aacaatagcttcaaaagtcttttttagtgacat

SEQ ID NO: 944465 - DNA, 33 bp, Homo sapien
ttctgattatgtgccactcagcattgtgcaggg

SEQ ID NO: 944466 - DNA, 33 bp, Homo sapien
ttctgattatgtgccagtcagcattgtgcaggg

SEQ ID NO: 944467 - DNA, 33 bp, Homo sapien
gtctagctcttgttgacctccttcttacaaccg

SEQ ID NO: 944468 - DNA, 33 bp, Homo sapien
gtctagctcttgttgatctccttcttacaaccg

SEQ ID NO: 944469 - DNA, 33 bp, Homo sapien
aaaaccttggaagaaaatggacactctgatact

SEQ ID NO: 944470 - DNA, 33 bp, Homo sapien
aaaaccttggaagaaattggacactctgatact

SEQ ID NO: 944471 - DNA, 33 bp, Homo sapien
tgtttcattttgataaagtttgaaaattcaaac

SEQ ID NO: 944472 - DNA, 33 bp, Homo sapien
tgtttcattttgataatgtttgaaaattcaaac

SEQ ID NO: 944473 - DNA, 33 bp, Homo sapien
agagaattaggtataaacatgatgagagcccaa

SEQ ID NO: 944474 - DNA, 33 bp, Homo sapien
agagaattaggtataaccatgatgagagcccaa

SEQ ID NO: 944475 - DNA, 33 bp, Homo sapien
ggcaagattcagtctcaagacaataaaataaaa

SEQ ID NO: 944476 - DNA, 33 bp, Homo sapien
ggcaagattcagtctccagacaataaaataaaa

SEQ ID NO: 944477 - DNA, 33 bp, Homo sapien
aagttagaaagaccgacgaactcgagataaatg

SEQ ID NO: 944478 - DNA, 33 bp, Homo sapien
aagttagaaagaccgaggaactcgagataaatg

SEQ ID NO: 944479 - DNA, 33 bp, Homo sapien
gaaagtgaataaaggcaaatctatgaagggaga

SEQ ID NO: 944480 - DNA, 33 bp, Homo sapien
gaaagtgaataaaggcgaatctatgaagggaga

SEQ ID NO: 944481 - DNA, 33 bp, Homo sapien
gatatgttgactttcaaatcgtcaataagtgtt

SEQ ID NO: 944482 - DNA, 33 bp, Homo sapien
gatatgttgactttcacatcgtcaataagtgtt

SEQ ID NO: 944483 - DNA, 33 bp, Homo sapien
ggggagcagggaaaaactcaagacgttggtaat

SEQ ID NO: 944484 - DNA, 33 bp, Homo sapien
ggggagcagggaaaaagtcaagacgttggtaat

SEQ ID NO: 944485 - DNA, 33 bp, Homo sapien
tcctcaaatgctcacaatgaatcagtttggatc

SEQ ID NO: 944486 - DNA, 33 bp, Homo sapien
tcctcaaatgctcacagtgaatcagtttggatc

SEQ ID NO: 944487 - DNA, 33 bp, Homo sapien
tctctgtgcacactcacagggaagcagggaaag

SEQ ID NO: 944488 - DNA, 33 bp, Homo sapien
tctctgtgcacactcatagggaagcagggaaag

SEQ ID NO: 944489 - DNA, 33 bp, Homo sapien
caacaatttctcagtacgtgaaaacattacatt

SEQ ID NO: 944490 - DNA, 33 bp, Homo sapien
caacaatttctcagtaggtgaaaacattacatt

SEQ ID NO: 944491 - DNA, 33 bp, Homo sapien
tcagagtgggtacacactgaatgactttattac

SEQ ID NO: 944492 - DNA, 33 bp, Homo sapien
tcagagtgggtacacattgaatgactttattac

SEQ ID NO: 944493 - DNA, 33 bp, Homo sapien
aaacaccccttaagaactgactttgctgccatc

SEQ ID NO: 944494 - DNA, 33 bp, Homo sapien
aaacaccccttaagaattgactttgctgccatc

SEQ ID NO: 944495 - DNA, 33 bp, Homo sapien
tgaggcaccattagggaccacttggtgacagac

SEQ ID NO: 944496 - DNA, 33 bp, Homo sapien
tgaggcaccattaggggccacttggtgacagac

SEQ ID NO: 944497 - DNA, 33 bp, Homo sapien
atctcttgcccgaaccagaaacaacaggagcca

SEQ ID NO: 944498 - DNA, 33 bp, Homo sapien
atctcttgcccgaaccggaaacaacaggagcca

SEQ ID NO: 944499 - DNA, 33 bp, Homo sapien
ttttacatacactacaaatattttctgcccata

SEQ ID NO: 944500 - DNA, 33 bp, Homo sapien
ttttacatacactacagatattttctgcccata

SEQ ID NO: 944501 - DNA, 33 bp, Homo sapien
aggaaactcttccaacaaaacacatagcaatca

SEQ ID NO: 944502 - DNA, 33 bp, Homo sapien
aggaaactcttccaacgaaacacatagcaatca

SEQ ID NO: 944503 - DNA, 33 bp, Homo sapien
atgaataaggacacgacaagttcagtggatttt

SEQ ID NO: 944504 - DNA, 33 bp, Homo sapien
atgaataaggacacgagaagttcagtggatttt

SEQ ID NO: 944505 - DNA, 33 bp, Homo sapien
tttttcttactatcatgaaaataggcttccatt

SEQ ID NO: 944506 - DNA, 33 bp, Homo sapien
tttttcttactatcattaaaataggcttccatt

SEQ ID NO: 944507 - DNA, 33 bp, Homo sapien
cccttacccagttatcaagcaactccaacatat

SEQ ID NO: 944508 - DNA, 33 bp, Homo sapien
cccttacccagttatcgagcaactccaacatat

SEQ ID NO: 944509 - DNA, 33 bp, Homo sapien
taaacaaagtgctgcacgggagaaaataaacac

SEQ ID NO: 944510 - DNA, 33 bp, Homo sapien
taaacaaagtgctgcatgggagaaaataaacac

SEQ ID NO: 944511 - DNA, 33 bp, Homo sapien
accaagcgtaacagtacggaaacaaagttcacc

SEQ ID NO: 944512 - DNA, 33 bp, Homo sapien
accaagcgtaacagtatggaaacaaagttcacc

SEQ ID NO: 944513 - DNA, 33 bp, Homo sapien
cttcgagaaataaagactatgtgtattccatgt

SEQ ID NO: 944514 - DNA, 33 bp, Homo sapien
cttcgagaaataaagagtatgtgtattccatgt

SEQ ID NO: 944515 - DNA, 33 bp, Homo sapien
aaatcgtgtaaccagcaactaatatcagtccct

SEQ ID NO: 944516 - DNA, 33 bp, Homo sapien
aaatcgtgtaaccagccactaatatcagtccct

SEQ ID NO: 944517 - DNA, 33 bp, Homo sapien
aaagaaaatcttttaaatcaaggtcgcaggcaa

SEQ ID NO: 944518 - DNA, 33 bp, Homo sapien
aaagaaaatcttttaattcaaggtcgcaggcaa

SEQ ID NO: 944519 - DNA, 33 bp, Homo sapien
tgccagacaccacataaacaatagataagtaaa

SEQ ID NO: 944520 - DNA, 33 bp, Homo sapien
tgccagacaccacatagacaatagataagtaaa

SEQ ID NO: 944521 - DNA, 33 bp, Homo sapien
tatatttaactcgacaccatttaagtcaactta

SEQ ID NO: 944522 - DNA, 33 bp, Homo sapien
tatatttaactcgacatcatttaagtcaactta

SEQ ID NO: 944523 - DNA, 33 bp, Homo sapien
cagaggcaacagaagaagcatttgagaaagaca

SEQ ID NO: 944524 - DNA, 33 bp, Homo sapien
cagaggcaacagaagacgcatttgagaaagaca

SEQ ID NO: 944525 - DNA, 33 bp, Homo sapien
ggtgaagtaggcagggcaagcttaagagctggt

SEQ ID NO: 944526 - DNA, 33 bp, Homo sapien
ggtgaagtaggcaggggaagcttaagagctggt

SEQ ID NO: 944527 - DNA, 33 bp, Homo sapien
actcatgcaaagtgtgcattcccacctttctcc

SEQ ID NO: 944528 - DNA, 33 bp, Homo sapien
actcatgcaaagtgtgtattcccacctttctcc

SEQ ID NO: 944529 - DNA, 33 bp, Homo sapien
tctgcggtctgctaccaaacgcttttgcacact

SEQ ID NO: 944530 - DNA, 33 bp, Homo sapien
tctgcggtctgctaccgaacgcttttgcacact

SEQ ID NO: 944531 - DNA, 33 bp, Homo sapien
acaaaatacctgttcaaatgtgttaaaaatgca

SEQ ID NO: 944532 - DNA, 33 bp, Homo sapien
acaaaatacctgttcagatgtgttaaaaatgca

SEQ ID NO: 944533 - DNA, 33 bp, Homo sapien
taatctgtaggagttccaagtgaaattgctgca

SEQ ID NO: 944534 - DNA, 33 bp, Homo sapien
taatctgtaggagttctaagtgaaattgctgca

SEQ ID NO: 944535 - DNA, 33 bp, Homo sapien
agatgaagtaacaaaacttttctgtgctgtgac

SEQ ID NO: 944536 - DNA, 33 bp, Homo sapien
agatgaagtaacaaaatttttctgtgctgtgac

SEQ ID NO: 944537 - DNA, 33 bp, Homo sapien
aagaaaatcataataacctccagaagatctttt

SEQ ID NO: 944538 - DNA, 33 bp, Homo sapien
aagaaaatcataataagctccagaagatctttt

SEQ ID NO: 944539 - DNA, 33 bp, Homo sapien
ttttcatggcgagacacacaactaacaagattg

SEQ ID NO: 944540 - DNA, 33 bp, Homo sapien
ttttcatggcgagacagacaactaacaagattg

SEQ ID NO: 944541 - DNA, 33 bp, Homo sapien
tcataaattaagacaaatatcagtgtagtgatt

SEQ ID NO: 944542 - DNA, 33 bp, Homo sapien
tcataaattaagacaagtatcagtgtagtgatt

SEQ ID NO: 944543 - DNA, 33 bp, Homo sapien
agaaaagagacctgaacagttgatgaatagaga

SEQ ID NO: 944544 - DNA, 33 bp, Homo sapien
agaaaagagacctgaagagttgatgaatagaga

SEQ ID NO: 944545 - DNA, 33 bp, Homo sapien
gcttaaagcaacaacacatatcctggtgcgtgt

SEQ ID NO: 944546 - DNA, 33 bp, Homo sapien
gcttaaagcaacaacagatatcctggtgcgtgt

SEQ ID NO: 944547 - DNA, 33 bp, Homo sapien
ttctgccttctacttaccacaccgtatattggc

SEQ ID NO: 944548 - DNA, 33 bp, Homo sapien
ttctgccttctacttagcacaccgtatattggc

SEQ ID NO: 944549 - DNA, 33 bp, Homo sapien
tctgaaggtgtttagacgtattgccgtttggcc

SEQ ID NO: 944550 - DNA, 33 bp, Homo sapien
tctgaaggtgtttagaggtattgccgtttggcc

SEQ ID NO: 944551 - DNA, 33 bp, Homo sapien
tcaggaaaatgtcaatcatcttgtacagaggat

SEQ ID NO: 944552 - DNA, 33 bp, Homo sapien
tcaggaaaatgtcaatgatcttgtacagaggat

SEQ ID NO: 944553 - DNA, 33 bp, Homo sapien
actgctgaacagaaaactgagttgcttttttaa

SEQ ID NO: 944554 - DNA, 33 bp, Homo sapien
actgctgaacagaaaattgagttgcttttttaa

SEQ ID NO: 944555 - DNA, 33 bp, Homo sapien
agcttggtgtctgacaatgaggacctctgcgtt

SEQ ID NO: 944556 - DNA, 33 bp, Homo sapien
agcttggtgtctgacattgaggacctctgcgtt

SEQ ID NO: 944557 - DNA, 33 bp, Homo sapien
acagagtgaaaacgaaatgaattaaatgcatga

SEQ ID NO: 944558 - DNA, 33 bp, Homo sapien
acagagtgaaaacgaagtgaattaaatgcatga

SEQ ID NO: 944559 - DNA, 33 bp, Homo sapien
agggaagagacaaaaacagaccttacaatatcg

SEQ ID NO: 944560 - DNA, 33 bp, Homo sapien
agggaagagacaaaaagagaccttacaatatcg

SEQ ID NO: 944561 - DNA, 33 bp, Homo sapien
aggcaggtgcaatcatgaacccaagacttagta

SEQ ID NO: 944562 - DNA, 33 bp, Homo sapien
aggcaggtgcaatcattaacccaagacttagta

SEQ ID NO: 944563 - DNA, 33 bp, Homo sapien
cagatatgattttagcacaacaattataaatat

SEQ ID NO: 944564 - DNA, 33 bp, Homo sapien
cagatatgattttagcccaacaattataaatat

SEQ ID NO: 944565 - DNA, 33 bp, Homo sapien
cttaattaaacaagaaatagccattccagggta

SEQ ID NO: 944566 - DNA, 33 bp, Homo sapien
cttaattaaacaagaagtagccattccagggta

SEQ ID NO: 944567 - DNA, 33 bp, Homo sapien
ctccctctgatgttcacacagttaatatagctc

SEQ ID NO: 944568 - DNA, 33 bp, Homo sapien
ctccctctgatgttcatacagttaatatagctc

SEQ ID NO: 944569 - DNA, 33 bp, Homo sapien
ttcttgtgtcctaacaaccttacaccaggcccc

SEQ ID NO: 944570 - DNA, 33 bp, Homo sapien
ttcttgtgtcctaacagccttacaccaggcccc

SEQ ID NO: 944571 - DNA, 33 bp, Homo sapien
atcctcctttctcgtccatatcaggataccaag

SEQ ID NO: 944572 - DNA, 33 bp, Homo sapien
atcctcctttctcgtctatatcaggataccaag

SEQ ID NO: 944573 - DNA, 33 bp, Homo sapien
taagggaaatgggtaacgttcatcataagagtg

SEQ ID NO: 944574 - DNA, 33 bp, Homo sapien
taagggaaatgggtaatgttcatcataagagtg

SEQ ID NO: 944575 - DNA, 33 bp, Homo sapien
gtgcccaaactattaaatacgctttctaacaca

SEQ ID NO: 944576 - DNA, 33 bp, Homo sapien
gtgcccaaactattaattacgctttctaacaca

SEQ ID NO: 944577 - DNA, 33 bp, Homo sapien
aactggaggtgggattcaagaatgctttggttc

SEQ ID NO: 944578 - DNA, 33 bp, Homo sapien
aactggaggtgggattgaagaatgctttggttc

SEQ ID NO: 944579 - DNA, 33 bp, Homo sapien
tatttcttcaatgtaacgtaccataggacagaa

SEQ ID NO: 944580 - DNA, 33 bp, Homo sapien
tatttcttcaatgtaatgtaccataggacagaa

SEQ ID NO: 944581 - DNA, 33 bp, Homo sapien
atcttcatctttaaaaggagatcataacacttc

SEQ ID NO: 944582 - DNA, 33 bp, Homo sapien
atcttcatctttaaaatgagatcataacacttc

SEQ ID NO: 944583 - DNA, 33 bp, Homo sapien
ttgcagttttgccgttaaaaacaatggtgaaac

SEQ ID NO: 944584 - DNA, 33 bp, Homo sapien
ttgcagttttgccgttgaaaacaatggtgaaac

SEQ ID NO: 944585 - DNA, 33 bp, Homo sapien
ggaccatgtgaaaatacatataatcaggaatct

SEQ ID NO: 944586 - DNA, 33 bp, Homo sapien
ggaccatgtgaaaatagatataatcaggaatct

SEQ ID NO: 944587 - DNA, 33 bp, Homo sapien
atttatgacacagaaactctccctgctccttcc

SEQ ID NO: 944588 - DNA, 33 bp, Homo sapien
atttatgacacagaaattctccctgctccttcc

SEQ ID NO: 944589 - DNA, 33 bp, Homo sapien
ggacacagaccttcacaaaggtgggcctctttc

SEQ ID NO: 944590 - DNA, 33 bp, Homo sapien
ggacacagaccttcacgaaggtgggcctctttc

SEQ ID NO: 944591 - DNA, 33 bp, Homo sapien
aatcaggtggaatagacacagcaaaaaataaca

SEQ ID NO: 944592 - DNA, 33 bp, Homo sapien
aatcaggtggaatagatacagcaaaaaataaca

SEQ ID NO: 944593 - DNA, 33 bp, Homo sapien
aagaatggccgatgcaaacagttgctgaatttt

SEQ ID NO: 944594 - DNA, 33 bp, Homo sapien
aagaatggccgatgcagacagttgctgaatttt

SEQ ID NO: 944595 - DNA, 33 bp, Homo sapien
ctggaaattttacgtacaggaatgtctctttaa

SEQ ID NO: 944596 - DNA, 33 bp, Homo sapien
ctggaaattttacgtataggaatgtctctttaa

SEQ ID NO: 944597 - DNA, 33 bp, Homo sapien
gccagaggccttaagcaatgcagctctggaatg

SEQ ID NO: 944598 - DNA, 33 bp, Homo sapien
gccagaggccttaagcgatgcagctctggaatg

SEQ ID NO: 944599 - DNA, 33 bp, Homo sapien
ctagatttttgtgatcaaatgggtggttttcaa

SEQ ID NO: 944600 - DNA, 33 bp, Homo sapien
ctagatttttgtgatccaatgggtggttttcaa

SEQ ID NO: 944601 - DNA, 33 bp, Homo sapien
tcctgggtgctacacaaaagaggaatccaccac

SEQ ID NO: 944602 - DNA, 33 bp, Homo sapien
tcctgggtgctacacagaagaggaatccaccac

SEQ ID NO: 944603 - DNA, 33 bp, Homo sapien
tgtccctgaattaataactatggctccttttat

SEQ ID NO: 944604 - DNA, 33 bp, Homo sapien
tgtccctgaattaatagctatggctccttttat

SEQ ID NO: 944605 - DNA, 33 bp, Homo sapien
gctcatcctttggcaacaattaaaatgtcttat

SEQ ID NO: 944606 - DNA, 33 bp, Homo sapien
gctcatcctttggcaataattaaaatgtcttat

SEQ ID NO: 944607 - DNA, 33 bp, Homo sapien
aagcatctggaaaagaccttgagtttgtgttct

SEQ ID NO: 944608 - DNA, 33 bp, Homo sapien
aagcatctggaaaagatcttgagtttgtgttct

SEQ ID NO: 944609 - DNA, 33 bp, Homo sapien
aagagcatctacaaaaatgcatgagaacacaaa

SEQ ID NO: 944610 - DNA, 33 bp, Homo sapien
aagagcatctacaaaattgcatgagaacacaaa

SEQ ID NO: 944611 - DNA, 33 bp, Homo sapien
tttcatcagatacaaggcagtaattccagagtg

SEQ ID NO: 944612 - DNA, 33 bp, Homo sapien
tttcatcagatacaagtcagtaattccagagtg

SEQ ID NO: 944613 - DNA, 33 bp, Homo sapien
taatctattattattacctcatacctgtaatcc

SEQ ID NO: 944614 - DNA, 33 bp, Homo sapien
taatctattattattagctcatacctgtaatcc

SEQ ID NO: 944615 - DNA, 33 bp, Homo sapien
gtgctgtatactagtacgagacttggtgtatat

SEQ ID NO: 944616 - DNA, 33 bp, Homo sapien
gtgctgtatactagtaggagacttggtgtatat

SEQ ID NO: 944617 - DNA, 33 bp, Homo sapien
atactacctaatttccgccagtcaagtcataat

SEQ ID NO: 944618 - DNA, 33 bp, Homo sapien
atactacctaatttcctccagtcaagtcataat

SEQ ID NO: 944619 - DNA, 33 bp, Homo sapien
atattaagaaaggaacagggcttattggctcaa

SEQ ID NO: 944620 - DNA, 33 bp, Homo sapien
atattaagaaaggaaccgggcttattggctcaa

SEQ ID NO: 944621 - DNA, 33 bp, Homo sapien
attatcttttgatacaactgccctgtaatacca

SEQ ID NO: 944622 - DNA, 33 bp, Homo sapien
attatcttttgatacatctgccctgtaatacca

SEQ ID NO: 944623 - DNA, 33 bp, Homo sapien
tcatgagtgatatataagtgcagggagcttgta

SEQ ID NO: 944624 - DNA, 33 bp, Homo sapien
tcatgagtgatatatacgtgcagggagcttgta

SEQ ID NO: 944625 - DNA, 33 bp, Homo sapien
atagttaatgatatgacagagtttcagcaaaga

SEQ ID NO: 944626 - DNA, 33 bp, Homo sapien
atagttaatgatatgatagagtttcagcaaaga

SEQ ID NO: 944627 - DNA, 33 bp, Homo sapien
taaattcaacctcagcaacaattttgatttagt

SEQ ID NO: 944628 - DNA, 33 bp, Homo sapien
taaattcaacctcagccacaattttgatttagt

SEQ ID NO: 944629 - DNA, 33 bp, Homo sapien
taagtggtgagaacaaagtttggaaatgggttt

SEQ ID NO: 944630 - DNA, 33 bp, Homo sapien
taagtggtgagaacaaggtttggaaatgggttt

SEQ ID NO: 944631 - DNA, 33 bp, Homo sapien
tgctgagctgctcttccaggtattctgtgtctt

SEQ ID NO: 944632 - DNA, 33 bp, Homo sapien
tgctgagctgctcttcgaggtattctgtgtctt

SEQ ID NO: 944633 - DNA, 33 bp, Homo sapien
agataaaaccattgaacggaaaatgctcatgta

SEQ ID NO: 944634 - DNA, 33 bp, Homo sapien
agataaaaccattgaatggaaaatgctcatgta

SEQ ID NO: 944635 - DNA, 33 bp, Homo sapien
gtctgatttcatcaagaaaattcctggcctgcc

SEQ ID NO: 944636 - DNA, 33 bp, Homo sapien
gtctgatttcatcaaggaaattcctggcctgcc

SEQ ID NO: 944637 - DNA, 33 bp, Homo sapien
gtggtatatactttccacataagatgttctaat

SEQ ID NO: 944638 - DNA, 33 bp, Homo sapien
gtggtatatactttccgcataagatgttctaat

SEQ ID NO: 944639 - DNA, 33 bp, Homo sapien
tactgcagctgcaaaaatgagtaattctcaaca

SEQ ID NO: 944640 - DNA, 33 bp, Homo sapien
tactgcagctgcaaaagtgagtaattctcaaca

SEQ ID NO: 944641 - DNA, 33 bp, Homo sapien
tgagtaattctcaacagtgttatatctcatcaa

SEQ ID NO: 944642 - DNA, 33 bp, Homo sapien
tgagtaattctcaacattgttatatctcatcaa

SEQ ID NO: 944643 - DNA, 33 bp, Homo sapien
tggtacacataggtgaagtccaggaaatttaca

SEQ ID NO: 944644 - DNA, 33 bp, Homo sapien
tggtacacataggtgacgtccaggaaatttaca

SEQ ID NO: 944645 - DNA, 33 bp, Homo sapien
gttttgcacataggcacccgggttccctgcagc

SEQ ID NO: 944646 - DNA, 33 bp, Homo sapien
gttttgcacataggcatccgggttccctgcagc

SEQ ID NO: 944647 - DNA, 33 bp, Homo sapien
aggaacattccaaaccactacattgattataga

SEQ ID NO: 944648 - DNA, 33 bp, Homo sapien
aggaacattccaaacccctacattgattataga

SEQ ID NO: 944649 - DNA, 33 bp, Homo sapien
atgtctcctggaattgcacagtacctttagatt

SEQ ID NO: 944650 - DNA, 33 bp, Homo sapien
atgtctcctggaattggacagtacctttagatt

SEQ ID NO: 944651 - DNA, 33 bp, Homo sapien
tattctgttttacacaatgcctatcacagtgca

SEQ ID NO: 944652 - DNA, 33 bp, Homo sapien
tattctgttttacacagtgcctatcacagtgca

SEQ ID NO: 944653 - DNA, 33 bp, Homo sapien
tatcagtttgttcattcaacggatacgttccag

SEQ ID NO: 944654 - DNA, 33 bp, Homo sapien
tatcagtttgttcatttaacggatacgttccag

SEQ ID NO: 944655 - DNA, 33 bp, Homo sapien
aaaagagagtgacttacgagagagtggcattca

SEQ ID NO: 944656 - DNA, 33 bp, Homo sapien
aaaagagagtgacttaggagagagtggcattca

SEQ ID NO: 944657 - DNA, 33 bp, Homo sapien
tagaacttatatctcaagccgtcaaaaaaaaaa

SEQ ID NO: 944658 - DNA, 33 bp, Homo sapien
tagaacttatatctcaggccgtcaaaaaaaaaa

SEQ ID NO: 944659 - DNA, 33 bp, Homo sapien
gcttcctgagcaatcaatgaaaaaagagtaaag

SEQ ID NO: 944660 - DNA, 33 bp, Homo sapien
gcttcctgagcaatcagtgaaaaaagagtaaag

SEQ ID NO: 944661 - DNA, 33 bp, Homo sapien
atcaagcgtccagagaaagattaaatctatagg

SEQ ID NO: 944662 - DNA, 33 bp, Homo sapien
atcaagcgtccagagagagattaaatctatagg

SEQ ID NO: 944663 - DNA, 33 bp, Homo sapien
ttgactctattactacactgtaaacatccagaa

SEQ ID NO: 944664 - DNA, 33 bp, Homo sapien
ttgactctattactacgctgtaaacatccagaa

SEQ ID NO: 944665 - DNA, 33 bp, Homo sapien
tcccaagtgtgactccaagtcttaagatgttca

SEQ ID NO: 944666 - DNA, 33 bp, Homo sapien
tcccaagtgtgactccgagtcttaagatgttca

SEQ ID NO: 944667 - DNA, 33 bp, Homo sapien
tacatgatgaatcccacgctacttatttgcctt

SEQ ID NO: 944668 - DNA, 33 bp, Homo sapien
tacatgatgaatcccatgctacttatttgcctt

SEQ ID NO: 944669 - DNA, 33 bp, Homo sapien
gagtggctgtacgaacactgctcaaaaaagact

SEQ ID NO: 944670 - DNA, 33 bp, Homo sapien
gagtggctgtacgaacgctgctcaaaaaagact

SEQ ID NO: 944671 - DNA, 33 bp, Homo sapien
ttgtgaccttttgatacgtcctgtgatttttgg

SEQ ID NO: 944672 - DNA, 33 bp, Homo sapien
ttgtgaccttttgatatgtcctgtgatttttgg

SEQ ID NO: 944673 - DNA, 33 bp, Homo sapien
tcagcttacttcgtagacatttgcatttctcgt

SEQ ID NO: 944674 - DNA, 33 bp, Homo sapien
tcagcttacttcgtaggcatttgcatttctcgt

SEQ ID NO: 944675 - DNA, 33 bp, Homo sapien
caggtgacagtttgaaccagttaggaaaaagaa

SEQ ID NO: 944676 - DNA, 33 bp, Homo sapien
caggtgacagtttgaatcagttaggaaaaagaa

SEQ ID NO: 944677 - DNA, 33 bp, Homo sapien
aaatttttggttgatacgatgaaaggattttga

SEQ ID NO: 944678 - DNA, 33 bp, Homo sapien
aaatttttggttgatatgatgaaaggattttga

SEQ ID NO: 944679 - DNA, 33 bp, Homo sapien
ccccaggtatgtctgaaaccagagaaaaagcta

SEQ ID NO: 944680 - DNA, 33 bp, Homo sapien
ccccaggtatgtctgacaccagagaaaaagcta

SEQ ID NO: 944681 - DNA, 33 bp, Homo sapien
agccatatgattttacactttatgagaagattt

SEQ ID NO: 944682 - DNA, 33 bp, Homo sapien
agccatatgattttaccctttatgagaagattt

SEQ ID NO: 944683 - DNA, 33 bp, Homo sapien
tcatagaaagctccaactcctcattattcctta

SEQ ID NO: 944684 - DNA, 33 bp, Homo sapien
tcatagaaagctccaattcctcattattcctta

SEQ ID NO: 944685 - DNA, 33 bp, Homo sapien
taaccttcagacaaaacggcaaaaagcttgggc

SEQ ID NO: 944686 - DNA, 33 bp, Homo sapien
taaccttcagacaaaatggcaaaaagcttgggc

SEQ ID NO: 944687 - DNA, 33 bp, Homo sapien
cttctgctgtaatccactcttataatgcaggag

SEQ ID NO: 944688 - DNA, 33 bp, Homo sapien
cttctgctgtaatccagtcttataatgcaggag

SEQ ID NO: 944689 - DNA, 33 bp, Homo sapien
ctgccttcctattttacctcaagtttgtttggc

SEQ ID NO: 944690 - DNA, 33 bp, Homo sapien
ctgccttcctattttagctcaagtttgtttggc

SEQ ID NO: 944691 - DNA, 33 bp, Homo sapien
gttttaatttcaagtacgtttcagttttacagg

SEQ ID NO: 944692 - DNA, 33 bp, Homo sapien
gttttaatttcaagtatgtttcagttttacagg

SEQ ID NO: 944693 - DNA, 33 bp, Homo sapien
agtaaaagtatattgcaagagctaatttagttc

SEQ ID NO: 944694 - DNA, 33 bp, Homo sapien
agtaaaagtatattgcgagagctaatttagttc

SEQ ID NO: 944695 - DNA, 33 bp, Homo sapien
aatcaaagttccataagcttctgtaaatttcca

SEQ ID NO: 944696 - DNA, 33 bp, Homo sapien
aatcaaagttccataatcttctgtaaatttcca

SEQ ID NO: 944697 - DNA, 33 bp, Homo sapien
attgttttttttgtcaccattctgtgctttgta

SEQ ID NO: 944698 - DNA, 33 bp, Homo sapien
attgttttttttgtcagcattctgtgctttgta

SEQ ID NO: 944699 - DNA, 33 bp, Homo sapien
aagaggaatttggtacagtaagttactagccat

SEQ ID NO: 944700 - DNA, 33 bp, Homo sapien
aagaggaatttggtactgtaagttactagccat

SEQ ID NO: 944701 - DNA, 33 bp, Homo sapien
tccattgagtggaaaaggcagagtaaaatgata

SEQ ID NO: 944702 - DNA, 33 bp, Homo sapien
tccattgagtggaaaatgcagagtaaaatgata

SEQ ID NO: 944703 - DNA, 33 bp, Homo sapien
aaatgatatggcttcaatctgaattattttctg

SEQ ID NO: 944704 - DNA, 33 bp, Homo sapien
aaatgatatggcttcattctgaattattttctg

SEQ ID NO: 944705 - DNA, 33 bp, Homo sapien
cctctctaaacttcacaaggctagttgatactg

SEQ ID NO: 944706 - DNA, 33 bp, Homo sapien
cctctctaaacttcacgaggctagttgatactg

SEQ ID NO: 944707 - DNA, 33 bp, Homo sapien
atttgtcccagaaataaacagaatcaaaacact

SEQ ID NO: 944708 - DNA, 33 bp, Homo sapien
atttgtcccagaaatagacagaatcaaaacact

SEQ ID NO: 944709 - DNA, 33 bp, Homo sapien
ttgttgtttcaaacacagtaacattctttgatt

SEQ ID NO: 944710 - DNA, 33 bp, Homo sapien
ttgttgtttcaaacactgtaacattctttgatt

SEQ ID NO: 944711 - DNA, 33 bp, Homo sapien
gggcatgatgtagataactgtgaattcctccag

SEQ ID NO: 944712 - DNA, 33 bp, Homo sapien
gggcatgatgtagatacctgtgaattcctccag

SEQ ID NO: 944713 - DNA, 33 bp, Homo sapien
cacagaatcagtggagaatccaataccgacctt

SEQ ID NO: 944714 - DNA, 33 bp, Homo sapien
cacagaatcagtggagtatccaataccgacctt

SEQ ID NO: 944715 - DNA, 33 bp, Homo sapien
tgagacatgaaagtaactgttcataacagatga

SEQ ID NO: 944716 - DNA, 33 bp, Homo sapien
tgagacatgaaagtaattgttcataacagatga

SEQ ID NO: 944717 - DNA, 33 bp, Homo sapien
agcaaactcagctacaaactttagacaaaatat

SEQ ID NO: 944718 - DNA, 33 bp, Homo sapien
agcaaactcagctacacactttagacaaaatat

SEQ ID NO: 944719 - DNA, 33 bp, Homo sapien
ttaagaaaaagtaccacggtggcaaacaaatgt

SEQ ID NO: 944720 - DNA, 33 bp, Homo sapien
ttaagaaaaagtaccagggtggcaaacaaatgt

SEQ ID NO: 944721 - DNA, 33 bp, Homo sapien
caaggtagaagatacaatcaaagtataaggtag

SEQ ID NO: 944722 - DNA, 33 bp, Homo sapien
caaggtagaagatacactcaaagtataaggtag

SEQ ID NO: 944723 - DNA, 33 bp, Homo sapien
gtacaatatctattcaaaattgaacttgttgta

SEQ ID NO: 944724 - DNA, 33 bp, Homo sapien
gtacaatatctattcacaattgaacttgttgta

SEQ ID NO: 944725 - DNA, 33 bp, Homo sapien
gagcatttctggatgaacccaacatcgtccacg

SEQ ID NO: 944726 - DNA, 33 bp, Homo sapien
gagcatttctggatgaccccaacatcgtccacg

SEQ ID NO: 944727 - DNA, 33 bp, Homo sapien
ataaatacagaaaacagtacttcccatgcattt

SEQ ID NO: 944728 - DNA, 33 bp, Homo sapien
ataaatacagaaaacattacttcccatgcattt

SEQ ID NO: 944729 - DNA, 33 bp, Homo sapien
ctcagcgtattatctaccttgtctaactttgat

SEQ ID NO: 944730 - DNA, 33 bp, Homo sapien
ctcagcgtattatctagcttgtctaactttgat

SEQ ID NO: 944731 - DNA, 33 bp, Homo sapien
cacttcaatttattcaatgaagaatactgcagt

SEQ ID NO: 944732 - DNA, 33 bp, Homo sapien
cacttcaatttattcagtgaagaatactgcagt

SEQ ID NO: 944733 - DNA, 33 bp, Homo sapien
tacatatgcaaagaaaagttaattcaccaaggg

SEQ ID NO: 944734 - DNA, 33 bp, Homo sapien
tacatatgcaaagaaaggttaattcaccaaggg

SEQ ID NO: 944735 - DNA, 33 bp, Homo sapien
tgcatattgtggaggacagtttttgaagtgaag

SEQ ID NO: 944736 - DNA, 33 bp, Homo sapien
tgcatattgtggaggagagtttttgaagtgaag

SEQ ID NO: 944737 - DNA, 33 bp, Homo sapien
taattgttatcaatggcaacatttttaaaatct

SEQ ID NO: 944738 - DNA, 33 bp, Homo sapien
taattgttatcaatgggaacatttttaaaatct

SEQ ID NO: 944739 - DNA, 33 bp, Homo sapien
tgtgtatttgaataaaacctggctttttgagat

SEQ ID NO: 944740 - DNA, 33 bp, Homo sapien
tgtgtatttgaataaatcctggctttttgagat

SEQ ID NO: 944741 - DNA, 33 bp, Homo sapien
tttgtgtactaagcctaaagtctctgtttttat

SEQ ID NO: 944742 - DNA, 33 bp, Homo sapien
tttgtgtactaagcctgaagtctctgtttttat

SEQ ID NO: 944743 - DNA, 33 bp, Homo sapien
gcaatacacctgcgtaacaagtaataatttatt

SEQ ID NO: 944744 - DNA, 33 bp, Homo sapien
gcaatacacctgcgtagcaagtaataatttatt

SEQ ID NO: 944745 - DNA, 33 bp, Homo sapien
gttaagttcagtcttacctttgcagaaagagtt

SEQ ID NO: 944746 - DNA, 33 bp, Homo sapien
gttaagttcagtcttatctttgcagaaagagtt

SEQ ID NO: 944747 - DNA, 33 bp, Homo sapien
cctaagagtctgttcaccacacactcttctaga

SEQ ID NO: 944748 - DNA, 33 bp, Homo sapien
cctaagagtctgttcagcacacactcttctaga

SEQ ID NO: 944749 - DNA, 33 bp, Homo sapien
ctgcggagaggataaacctgggtaacagagaat

SEQ ID NO: 944750 - DNA, 33 bp, Homo sapien
ctgcggagaggataaatctgggtaacagagaat

SEQ ID NO: 944751 - DNA, 33 bp, Homo sapien
cctttaatgacaatacccgttctttgtctccaa

SEQ ID NO: 944752 - DNA, 33 bp, Homo sapien
cctttaatgacaatactcgttctttgtctccaa

SEQ ID NO: 944753 - DNA, 33 bp, Homo sapien
ggcattaaaaagtggcgcaaatctcttcttctg

SEQ ID NO: 944754 - DNA, 33 bp, Homo sapien
ggcattaaaaagtggctcaaatctcttcttctg

SEQ ID NO: 944755 - DNA, 33 bp, Homo sapien
ttgaactcactaaaaagaatggctggaatcaag

SEQ ID NO: 944756 - DNA, 33 bp, Homo sapien
ttgaactcactaaaaataatggctggaatcaag

SEQ ID NO: 944757 - DNA, 33 bp, Homo sapien
atgtaaacaaatgaataaaaaatcagcaagcaa

SEQ ID NO: 944758 - DNA, 33 bp, Homo sapien
atgtaaacaaatgaatgaaaaatcagcaagcaa

SEQ ID NO: 944759 - DNA, 33 bp, Homo sapien
tgagggccagttgaaacgtcaagcaggtaaatg

SEQ ID NO: 944760 - DNA, 33 bp, Homo sapien
tgagggccagttgaaatgtcaagcaggtaaatg

SEQ ID NO: 944761 - DNA, 33 bp, Homo sapien
cagcaaggaggatgaacagcagaaggaaaaacc

SEQ ID NO: 944762 - DNA, 33 bp, Homo sapien
cagcaaggaggatgaagagcagaaggaaaaacc

SEQ ID NO: 944763 - DNA, 33 bp, Homo sapien
gtggtgtaggtgaataagaagggcccatgcgtt

SEQ ID NO: 944764 - DNA, 33 bp, Homo sapien
gtggtgtaggtgaataggaagggcccatgcgtt

SEQ ID NO: 944765 - DNA, 33 bp, Homo sapien
tccttgcatttaggcacgaatacctaagtgcaa

SEQ ID NO: 944766 - DNA, 33 bp, Homo sapien
tccttgcatttaggcatgaatacctaagtgcaa

SEQ ID NO: 944767 - DNA, 33 bp, Homo sapien
gatttaaaattcagcgcaatagagagtatttaa

SEQ ID NO: 944768 - DNA, 33 bp, Homo sapien
gatttaaaattcagcggaatagagagtatttaa

SEQ ID NO: 944769 - DNA, 33 bp, Homo sapien
gtttgggcatggctaaatctaacacaatccaaa

SEQ ID NO: 944770 - DNA, 33 bp, Homo sapien
gtttgggcatggctaagtctaacacaatccaaa

SEQ ID NO: 944771 - DNA, 33 bp, Homo sapien
tcataatcatgatcaagaaacaatttggtacga

SEQ ID NO: 944772 - DNA, 33 bp, Homo sapien
tcataatcatgatcaataaacaatttggtacga

SEQ ID NO: 944773 - DNA, 33 bp, Homo sapien
cgaaaaattcactgtaaaaacacacaaatacaa

SEQ ID NO: 944774 - DNA, 33 bp, Homo sapien
cgaaaaattcactgtataaacacacaaatacaa

SEQ ID NO: 944775 - DNA, 33 bp, Homo sapien
taactgtgcaaggagaaaatttgcagtgttgtc

SEQ ID NO: 944776 - DNA, 33 bp, Homo sapien
taactgtgcaaggagagaatttgcagtgttgtc

SEQ ID NO: 944777 - DNA, 33 bp, Homo sapien
ttttaaggtcatttagaaaagaagcgagcaagg

SEQ ID NO: 944778 - DNA, 33 bp, Homo sapien
ttttaaggtcatttaggaaagaagcgagcaagg

SEQ ID NO: 944779 - DNA, 33 bp, Homo sapien
atttggaaacttgaaacctataccatatcagca

SEQ ID NO: 944780 - DNA, 33 bp, Homo sapien
atttggaaacttgaaatctataccatatcagca

SEQ ID NO: 944781 - DNA, 33 bp, Homo sapien
ttcaagtgtggacccaagtttcacagatttaag

SEQ ID NO: 944782 - DNA, 33 bp, Homo sapien
ttcaagtgtggacccaggtttcacagatttaag

SEQ ID NO: 944783 - DNA, 33 bp, Homo sapien
tcagaaaatgctgcaaattcctggcactgcctg

SEQ ID NO: 944784 - DNA, 33 bp, Homo sapien
tcagaaaatgctgcaagttcctggcactgcctg

SEQ ID NO: 944785 - DNA, 33 bp, Homo sapien
gatcagcctgatgaaacatcccagcttcatgga

SEQ ID NO: 944786 - DNA, 33 bp, Homo sapien
gatcagcctgatgaaatatcccagcttcatgga

SEQ ID NO: 944787 - DNA, 33 bp, Homo sapien
cagttattaaaaagccaaaggaattaagaagaa

SEQ ID NO: 944788 - DNA, 33 bp, Homo sapien
cagttattaaaaagccgaaggaattaagaagaa

SEQ ID NO: 944789 - DNA, 33 bp, Homo sapien
tactctcaaaatgaccggggtggtgaatcgaac

SEQ ID NO: 944790 - DNA, 33 bp, Homo sapien
tactctcaaaatgacctgggtggtgaatcgaac

SEQ ID NO: 944791 - DNA, 33 bp, Homo sapien
ttcatttttctgatgaactaatccacagcccct

SEQ ID NO: 944792 - DNA, 33 bp, Homo sapien
ttcatttttctgatgagctaatccacagcccct

SEQ ID NO: 944793 - DNA, 33 bp, Homo sapien
ggaagtgatgaggagcaatcataaatatggatg

SEQ ID NO: 944794 - DNA, 33 bp, Homo sapien
ggaagtgatgaggagcgatcataaatatggatg

SEQ ID NO: 944795 - DNA, 33 bp, Homo sapien
gggcccctgccataaacgatagcgtccatcagt

SEQ ID NO: 944796 - DNA, 33 bp, Homo sapien
gggcccctgccataaaggatagcgtccatcagt

SEQ ID NO: 944797 - DNA, 33 bp, Homo sapien
tgccactatagcctatcacgcaaaaaatgtaag

SEQ ID NO: 944798 - DNA, 33 bp, Homo sapien
tgccactatagcctattacgcaaaaaatgtaag

SEQ ID NO: 944799 - DNA, 33 bp, Homo sapien
gataatgtagtgtacacaaaatgtgagtagcaa

SEQ ID NO: 944800 - DNA, 33 bp, Homo sapien
gataatgtagtgtacataaaatgtgagtagcaa

SEQ ID NO: 944801 - DNA, 33 bp, Homo sapien
aggatgagagtttagaaacaagacaagcgcatc

SEQ ID NO: 944802 - DNA, 33 bp, Homo sapien
aggatgagagtttagacacaagacaagcgcatc

SEQ ID NO: 944803 - DNA, 33 bp, Homo sapien
tccctgcaaccatttacgagtccttcacttgtg

SEQ ID NO: 944804 - DNA, 33 bp, Homo sapien
tccctgcaaccatttatgagtccttcacttgtg

SEQ ID NO: 944805 - DNA, 33 bp, Homo sapien
aacactattgaaaatgcagttttggatacagtc

SEQ ID NO: 944806 - DNA, 33 bp, Homo sapien
aacactattgaaaatgtagttttggatacagtc

SEQ ID NO: 944807 - DNA, 33 bp, Homo sapien
tatcatgcatctgtatgaggagcatggttacac

SEQ ID NO: 944808 - DNA, 33 bp, Homo sapien
tatcatgcatctgtattaggagcatggttacac

SEQ ID NO: 944809 - DNA, 33 bp, Homo sapien
catttcctatttttgcacggcctgaagagttga

SEQ ID NO: 944810 - DNA, 33 bp, Homo sapien
catttcctatttttgcgcggcctgaagagttga

SEQ ID NO: 944811 - DNA, 33 bp, Homo sapien
ttagtaatagggcttacaagtacagagtggacc

SEQ ID NO: 944812 - DNA, 33 bp, Homo sapien
ttagtaatagggcttagaagtacagagtggacc

SEQ ID NO: 944813 - DNA, 33 bp, Homo sapien
caaatcataacgctacactttatggtccacacc

SEQ ID NO: 944814 - DNA, 33 bp, Homo sapien
caaatcataacgctactctttatggtccacacc

SEQ ID NO: 944815 - DNA, 33 bp, Homo sapien
atcattggtggagatactaattcactgtatttt

SEQ ID NO: 944816 - DNA, 33 bp, Homo sapien
atcattggtggagatattaattcactgtatttt

SEQ ID NO: 944817 - DNA, 33 bp, Homo sapien
tttgatgtgtagagggaaagagacgggaaatgt

SEQ ID NO: 944818 - DNA, 33 bp, Homo sapien
tttgatgtgtagaggggaagagacgggaaatgt

SEQ ID NO: 944819 - DNA, 33 bp, Homo sapien
tcagtagcagttctgacgtcacacaaacccata

SEQ ID NO: 944820 - DNA, 33 bp, Homo sapien
tcagtagcagttctgatgtcacacaaacccata

SEQ ID NO: 944821 - DNA, 33 bp, Homo sapien
gcagtgcagtccacaaacacctttttgtagggt

SEQ ID NO: 944822 - DNA, 33 bp, Homo sapien
gcagtgcagtccacaatcacctttttgtagggt

SEQ ID NO: 944823 - DNA, 33 bp, Homo sapien
aatttaaagtatacacaaggatgtaggtcgctt

SEQ ID NO: 944824 - DNA, 33 bp, Homo sapien
aatttaaagtatacacgaggatgtaggtcgctt

SEQ ID NO: 944825 - DNA, 33 bp, Homo sapien
gactgacgaatcctgacgtcaccattggctcag

SEQ ID NO: 944826 - DNA, 33 bp, Homo sapien
gactgacgaatcctgatgtcaccattggctcag

SEQ ID NO: 944827 - DNA, 33 bp, Homo sapien
acctctgttcttgcaactctgccatgactcaga

SEQ ID NO: 944828 - DNA, 33 bp, Homo sapien
acctctgttcttgcaattctgccatgactcaga

SEQ ID NO: 944829 - DNA, 33 bp, Homo sapien
cttggggtctaagagacgtaactagacaggtat

SEQ ID NO: 944830 - DNA, 33 bp, Homo sapien
cttggggtctaagagatgtaactagacaggtat

SEQ ID NO: 944831 - DNA, 33 bp, Homo sapien
gcagccacgtaggtccccgggttctgcaggctt

SEQ ID NO: 944832 - DNA, 33 bp, Homo sapien
gcagccacgtaggtcctcgggttctgcaggctt

SEQ ID NO: 944833 - DNA, 33 bp, Homo sapien
aagaaataaacatcacacagcaactcttatggt

SEQ ID NO: 944834 - DNA, 33 bp, Homo sapien
aagaaataaacatcacgcagcaactcttatggt

SEQ ID NO: 944835 - DNA, 33 bp, Homo sapien
tcagatgtaatagatgcattctgaggttaatta

SEQ ID NO: 944836 - DNA, 33 bp, Homo sapien
tcagatgtaatagatgtattctgaggttaatta

SEQ ID NO: 944837 - DNA, 33 bp, Homo sapien
aatgctatcttccataccaaagttaaagaagga

SEQ ID NO: 944838 - DNA, 33 bp, Homo sapien
aatgctatcttccatatcaaagttaaagaagga

SEQ ID NO: 944839 - DNA, 33 bp, Homo sapien
aacctgccctgagagaaagaatctattacgtct

SEQ ID NO: 944840 - DNA, 33 bp, Homo sapien
aacctgccctgagagagagaatctattacgtct

SEQ ID NO: 944841 - DNA, 33 bp, Homo sapien
aaacagactaatacaactgctgtcattaatgaa

SEQ ID NO: 944842 - DNA, 33 bp, Homo sapien
aaacagactaatacaagtgctgtcattaatgaa

SEQ ID NO: 944843 - DNA, 33 bp, Homo sapien
tgacaattgctaaagcacaacatggtttatgat

SEQ ID NO: 944844 - DNA, 33 bp, Homo sapien
tgacaattgctaaagcgcaacatggtttatgat

SEQ ID NO: 944845 - DNA, 33 bp, Homo sapien
ttagttcttgcatcgaccaatttgttaaccttc

SEQ ID NO: 944846 - DNA, 33 bp, Homo sapien
ttagttcttgcatcgagcaatttgttaaccttc

SEQ ID NO: 944847 - DNA, 33 bp, Homo sapien
tatcttgttttattgcacattgccttattttgc

SEQ ID NO: 944848 - DNA, 33 bp, Homo sapien
tatcttgttttattgcgcattgccttattttgc

SEQ ID NO: 944849 - DNA, 33 bp, Homo sapien
cctcagagaataaccacgaaaaagaaattccag

SEQ ID NO: 944850 - DNA, 33 bp, Homo sapien
cctcagagaataaccaggaaaaagaaattccag

SEQ ID NO: 944851 - DNA, 33 bp, Homo sapien
ctttgaggttaactgaaggcactaaggtagaaa

SEQ ID NO: 944852 - DNA, 33 bp, Homo sapien
ctttgaggttaactgatggcactaaggtagaaa

SEQ ID NO: 944853 - DNA, 33 bp, Homo sapien
aaaaaaagaagttttacgatattgcctgtccta

SEQ ID NO: 944854 - DNA, 33 bp, Homo sapien
aaaaaaagaagttttatgatattgcctgtccta

SEQ ID NO: 944855 - DNA, 33 bp, Homo sapien
atattcatgattagaagcacattttctgagatc

SEQ ID NO: 944856 - DNA, 33 bp, Homo sapien
atattcatgattagaatcacattttctgagatc

SEQ ID NO: 944857 - DNA, 33 bp, Homo sapien
atcagtgtttttcaccgacttgtaaccaagaac

SEQ ID NO: 944858 - DNA, 33 bp, Homo sapien
atcagtgtttttcacctacttgtaaccaagaac

SEQ ID NO: 944859 - DNA, 33 bp, Homo sapien
tgatctgcagaaattacagtttctccttcaagt

SEQ ID NO: 944860 - DNA, 33 bp, Homo sapien
tgatctgcagaaattagagtttctccttcaagt

SEQ ID NO: 944861 - DNA, 33 bp, Homo sapien
taagttgacttcctctcaagcttggcatttggt

SEQ ID NO: 944862 - DNA, 33 bp, Homo sapien
taagttgacttcctcttaagcttggcatttggt

SEQ ID NO: 944863 - DNA, 33 bp, Homo sapien
gctacaaagtggaatgcattttttcttctctct

SEQ ID NO: 944864 - DNA, 33 bp, Homo sapien
gctacaaagtggaatgtattttttcttctctct

SEQ ID NO: 944865 - DNA, 33 bp, Homo sapien
aagcgacagaagtgacactcaaccacttgctca

SEQ ID NO: 944866 - DNA, 33 bp, Homo sapien
aagcgacagaagtgacgctcaaccacttgctca

SEQ ID NO: 944867 - DNA, 33 bp, Homo sapien
ctttaatatgtgcataagtgttacgcaactctt

SEQ ID NO: 944868 - DNA, 33 bp, Homo sapien
ctttaatatgtgcatatgtgttacgcaactctt

SEQ ID NO: 944869 - DNA, 33 bp, Homo sapien
caaactagagaaaggaaagcttaagagaagaag

SEQ ID NO: 944870 - DNA, 33 bp, Homo sapien
caaactagagaaaggatagcttaagagaagaag

SEQ ID NO: 944871 - DNA, 33 bp, Homo sapien
cataaaacacaatggcacactgggaaaacacat

SEQ ID NO: 944872 - DNA, 33 bp, Homo sapien
cataaaacacaatggcgcactgggaaaacacat

SEQ ID NO: 944873 - DNA, 33 bp, Homo sapien
tcacgtattattcaagcaaggtttatacacata

SEQ ID NO: 944874 - DNA, 33 bp, Homo sapien
tcacgtattattcaaggaaggtttatacacata

SEQ ID NO: 944875 - DNA, 33 bp, Homo sapien
gttatttcctgcagccgctaaaaatactttaag

SEQ ID NO: 944876 - DNA, 33 bp, Homo sapien
gttatttcctgcagcctctaaaaatactttaag

SEQ ID NO: 944877 - DNA, 33 bp, Homo sapien
ttcctacaatgagaaaaaatgttgccaacttaa

SEQ ID NO: 944878 - DNA, 33 bp, Homo sapien
ttcctacaatgagaaagaatgttgccaacttaa

SEQ ID NO: 944879 - DNA, 33 bp, Homo sapien
tgctgaacaagccgacagaaaatcagcaagggt

SEQ ID NO: 944880 - DNA, 33 bp, Homo sapien
tgctgaacaagccgactgaaaatcagcaagggt

SEQ ID NO: 944881 - DNA, 33 bp, Homo sapien
cgatgtgatctgtaaactgtacctgcttctgtt

SEQ ID NO: 944882 - DNA, 33 bp, Homo sapien
cgatgtgatctgtaaagtgtacctgcttctgtt

SEQ ID NO: 944883 - DNA, 33 bp, Homo sapien
gtttgaacagcaaaaaataggaattaagacacc

SEQ ID NO: 944884 - DNA, 33 bp, Homo sapien
gtttgaacagcaaaaactaggaattaagacacc

SEQ ID NO: 944885 - DNA, 33 bp, Homo sapien
aaagacgattggataagtgaaaacaatgacttt

SEQ ID NO: 944886 - DNA, 33 bp, Homo sapien
aaagacgattggataattgaaaacaatgacttt

SEQ ID NO: 944887 - DNA, 33 bp, Homo sapien
tgtaacaacagaactcaatctcaaaatcagtgt

SEQ ID NO: 944888 - DNA, 33 bp, Homo sapien
tgtaacaacagaactcgatctcaaaatcagtgt

SEQ ID NO: 944889 - DNA, 33 bp, Homo sapien
gcagttgcaatatccccggcagctgatagatgt

SEQ ID NO: 944890 - DNA, 33 bp, Homo sapien
gcagttgcaatatccctggcagctgatagatgt

SEQ ID NO: 944891 - DNA, 33 bp, Homo sapien
ggttttttggatcatgaagttatgtatttccgt

SEQ ID NO: 944892 - DNA, 33 bp, Homo sapien
ggttttttggatcatgtagttatgtatttccgt

SEQ ID NO: 944893 - DNA, 33 bp, Homo sapien
gctataaatttgcctacaaagtggaaaaaagaa

SEQ ID NO: 944894 - DNA, 33 bp, Homo sapien
gctataaatttgcctataaagtggaaaaaagaa

SEQ ID NO: 944895 - DNA, 33 bp, Homo sapien
ttgtatgacaagtgaaatatgaccataaaccac

SEQ ID NO: 944896 - DNA, 33 bp, Homo sapien
ttgtatgacaagtgaagtatgaccataaaccac

SEQ ID NO: 944897 - DNA, 33 bp, Homo sapien
tgtatgtgaaaacagcactttttattactttaa

SEQ ID NO: 944898 - DNA, 33 bp, Homo sapien
tgtatgtgaaaacagcgctttttattactttaa

SEQ ID NO: 944899 - DNA, 33 bp, Homo sapien
aataaaatgattttgcacagagagagaacaaac

SEQ ID NO: 944900 - DNA, 33 bp, Homo sapien
aataaaatgattttgcgcagagagagaacaaac

SEQ ID NO: 944901 - DNA, 33 bp, Homo sapien
tgaacaactctcttaacaactgagtgtctgtct

SEQ ID NO: 944902 - DNA, 33 bp, Homo sapien
tgaacaactctcttaataactgagtgtctgtct

SEQ ID NO: 944903 - DNA, 33 bp, Homo sapien
aaaagcaaaacctcaacgctcacctttgcaaat

SEQ ID NO: 944904 - DNA, 33 bp, Homo sapien
aaaagcaaaacctcaaggctcacctttgcaaat

SEQ ID NO: 944905 - DNA, 33 bp, Homo sapien
atttatgcaaatgacaacttctctagagccaat

SEQ ID NO: 944906 - DNA, 33 bp, Homo sapien
atttatgcaaatgacaccttctctagagccaat

SEQ ID NO: 944907 - DNA, 33 bp, Homo sapien
acgctgtccaaatccaagagtagtcctttagag

SEQ ID NO: 944908 - DNA, 33 bp, Homo sapien
acgctgtccaaatccaggagtagtcctttagag

SEQ ID NO: 944909 - DNA, 33 bp, Homo sapien
aggtttcctaacctccaaaaaatgtggaattca

SEQ ID NO: 944910 - DNA, 33 bp, Homo sapien
aggtttcctaacctccgaaaaatgtggaattca

SEQ ID NO: 944911 - DNA, 33 bp, Homo sapien
acacaaggaaagaaaccatgtgagatgctacat

SEQ ID NO: 944912 - DNA, 33 bp, Homo sapien
acacaaggaaagaaactatgtgagatgctacat

SEQ ID NO: 944913 - DNA, 33 bp, Homo sapien
atggtatatcgtcaaaagttaaatgatgactat

SEQ ID NO: 944914 - DNA, 33 bp, Homo sapien
atggtatatcgtcaaacgttaaatgatgactat

SEQ ID NO: 944915 - DNA, 33 bp, Homo sapien
atttgcagatttctaacgccctatcagataaat

SEQ ID NO: 944916 - DNA, 33 bp, Homo sapien
atttgcagatttctaatgccctatcagataaat

SEQ ID NO: 944917 - DNA, 33 bp, Homo sapien
tcagaagacaggaaagaataatagacacaacaa

SEQ ID NO: 944918 - DNA, 33 bp, Homo sapien
tcagaagacaggaaaggataatagacacaacaa

SEQ ID NO: 944919 - DNA, 33 bp, Homo sapien
ctcccttgaccataatcaagcagactcttaggc

SEQ ID NO: 944920 - DNA, 33 bp, Homo sapien
ctcccttgaccataatgaagcagactcttaggc

SEQ ID NO: 944921 - DNA, 33 bp, Homo sapien
aaagggatttaaggcacaacttcaagctgggta

SEQ ID NO: 944922 - DNA, 33 bp, Homo sapien
aaagggatttaaggcagaacttcaagctgggta

SEQ ID NO: 944923 - DNA, 33 bp, Homo sapien
tcgcagaatgaatcaacagagaacagtagcttg

SEQ ID NO: 944924 - DNA, 33 bp, Homo sapien
tcgcagaatgaatcaatagagaacagtagcttg

SEQ ID NO: 944925 - DNA, 33 bp, Homo sapien
atttctgatattaaaacagaccttgccaaaatt

SEQ ID NO: 944926 - DNA, 33 bp, Homo sapien
atttctgatattaaaagagaccttgccaaaatt

SEQ ID NO: 944927 - DNA, 33 bp, Homo sapien
acttcaaggttggcaaatgtcaaaaccagggat

SEQ ID NO: 944928 - DNA, 33 bp, Homo sapien
acttcaaggttggcaagtgtcaaaaccagggat

SEQ ID NO: 944929 - DNA, 33 bp, Homo sapien
aactccaattgtgttacattttgctgatgaaag

SEQ ID NO: 944930 - DNA, 33 bp, Homo sapien
aactccaattgtgttatattttgctgatgaaag

SEQ ID NO: 944931 - DNA, 33 bp, Homo sapien
ctcttgtgttggcttaaaggtaaaataagacac

SEQ ID NO: 944932 - DNA, 33 bp, Homo sapien
ctcttgtgttggcttagaggtaaaataagacac

SEQ ID NO: 944933 - DNA, 33 bp, Homo sapien
aataaaagaatgttataaagcttcagatgtcat

SEQ ID NO: 944934 - DNA, 33 bp, Homo sapien
aataaaagaatgttatgaagcttcagatgtcat

SEQ ID NO: 944935 - DNA, 33 bp, Homo sapien
ttattttaatcctcgtcaaatgacatctgaagc

SEQ ID NO: 944936 - DNA, 33 bp, Homo sapien
ttattttaatcctcgtgaaatgacatctgaagc

SEQ ID NO: 944937 - DNA, 33 bp, Homo sapien
ccttttcaaatcataactcatcaactaccaagt

SEQ ID NO: 944938 - DNA, 33 bp, Homo sapien
ccttttcaaatcataagtcatcaactaccaagt

SEQ ID NO: 944939 - DNA, 33 bp, Homo sapien
acacatctttgtcttaaaagttgtgctaatgtg

SEQ ID NO: 944940 - DNA, 33 bp, Homo sapien
acacatctttgtcttagaagttgtgctaatgtg

SEQ ID NO: 944941 - DNA, 33 bp, Homo sapien
atgtggagatggcattcaagtctaaccttcact

SEQ ID NO: 944942 - DNA, 33 bp, Homo sapien
atgtggagatggcattgaagtctaaccttcact

SEQ ID NO: 944943 - DNA, 33 bp, Homo sapien
tcatcaaagaaatcaaaatatcccatagactaa

SEQ ID NO: 944944 - DNA, 33 bp, Homo sapien
tcatcaaagaaatcaagatatcccatagactaa

SEQ ID NO: 944945 - DNA, 33 bp, Homo sapien
aaagaggaaatatataatagtaagctgattttg

SEQ ID NO: 944946 - DNA, 33 bp, Homo sapien
aaagaggaaatatatagtagtaagctgattttg

SEQ ID NO: 944947 - DNA, 33 bp, Homo sapien
gctgattttgtattcaacatcaccatcatcaca

SEQ ID NO: 944948 - DNA, 33 bp, Homo sapien
gctgattttgtattcagcatcaccatcatcaca

SEQ ID NO: 944949 - DNA, 33 bp, Homo sapien
ttttgttccttatctacctccgtaatcaaatct

SEQ ID NO: 944950 - DNA, 33 bp, Homo sapien
ttttgttccttatctagctccgtaatcaaatct

SEQ ID NO: 944951 - DNA, 33 bp, Homo sapien
gtagtttagctcctgccatactactactgcatg

SEQ ID NO: 944952 - DNA, 33 bp, Homo sapien
gtagtttagctcctgcgatactactactgcatg

SEQ ID NO: 944953 - DNA, 33 bp, Homo sapien
tattagcaccaagatgaacaaacatataattag

SEQ ID NO: 944954 - DNA, 33 bp, Homo sapien
tattagcaccaagatggacaaacatataattag

SEQ ID NO: 944955 - DNA, 33 bp, Homo sapien
aagtattcatttctaaagtcatcgatgtcaggt

SEQ ID NO: 944956 - DNA, 33 bp, Homo sapien
aagtattcatttctaacgtcatcgatgtcaggt

SEQ ID NO: 944957 - DNA, 33 bp, Homo sapien
aagtcttatccataaaccttgcaatgggtgaag

SEQ ID NO: 944958 - DNA, 33 bp, Homo sapien
aagtcttatccataaatcttgcaatgggtgaag

SEQ ID NO: 944959 - DNA, 33 bp, Homo sapien
aaagcccgattgactactacaaaagcaaatgtg

SEQ ID NO: 944960 - DNA, 33 bp, Homo sapien
aaagcccgattgactattacaaaagcaaatgtg

SEQ ID NO: 944961 - DNA, 33 bp, Homo sapien
actgggtaacatttgaacatgtcctttaactct

SEQ ID NO: 944962 - DNA, 33 bp, Homo sapien
actgggtaacatttgatcatgtcctttaactct

SEQ ID NO: 944963 - DNA, 33 bp, Homo sapien
tccagctgaaagtgaaagaataaagaaatcctg

SEQ ID NO: 944964 - DNA, 33 bp, Homo sapien
tccagctgaaagtgaaggaataaagaaatcctg

SEQ ID NO: 944965 - DNA, 33 bp, Homo sapien
agataccaaaataccaagcatgctctgttaaac

SEQ ID NO: 944966 - DNA, 33 bp, Homo sapien
agataccaaaataccatgcatgctctgttaaac

SEQ ID NO: 944967 - DNA, 33 bp, Homo sapien
aggggcttttgtacaaattgggtttggaatggt

SEQ ID NO: 944968 - DNA, 33 bp, Homo sapien
aggggcttttgtacaatttgggtttggaatggt

SEQ ID NO: 944969 - DNA, 33 bp, Homo sapien
catcagttctcttcaacgagcagagagagcgac

SEQ ID NO: 944970 - DNA, 33 bp, Homo sapien
catcagttctcttcaatgagcagagagagcgac

SEQ ID NO: 944971 - DNA, 33 bp, Homo sapien
atgacacatttaagagccgattcctagtgttta

SEQ ID NO: 944972 - DNA, 33 bp, Homo sapien
atgacacatttaagagtcgattcctagtgttta

SEQ ID NO: 944973 - DNA, 33 bp, Homo sapien
tcttaaatgtgtcataacttaaagctggtcgtg

SEQ ID NO: 944974 - DNA, 33 bp, Homo sapien
tcttaaatgtgtcatatcttaaagctggtcgtg

SEQ ID NO: 944975 - DNA, 33 bp, Homo sapien
gagtccattctttcaaaacacaaggaggcctgc

SEQ ID NO: 944976 - DNA, 33 bp, Homo sapien
gagtccattctttcaacacacaaggaggcctgc

SEQ ID NO: 944977 - DNA, 33 bp, Homo sapien
aactgtactttgaaaacattcagtttaatataa

SEQ ID NO: 944978 - DNA, 33 bp, Homo sapien
aactgtactttgaaaatattcagtttaatataa

SEQ ID NO: 944979 - DNA, 33 bp, Homo sapien
gcttgcatgtctaaacactttctctgctcctat

SEQ ID NO: 944980 - DNA, 33 bp, Homo sapien
gcttgcatgtctaaaccctttctctgctcctat

SEQ ID NO: 944981 - DNA, 33 bp, Homo sapien
caaagatgcatttcataaaggactgttactaaa

SEQ ID NO: 944982 - DNA, 33 bp, Homo sapien
caaagatgcatttcatcaaggactgttactaaa

SEQ ID NO: 944983 - DNA, 33 bp, Homo sapien
agaattaccaaagcctcagatataacagggaca

SEQ ID NO: 944984 - DNA, 33 bp, Homo sapien
agaattaccaaagcctgagatataacagggaca

SEQ ID NO: 944985 - DNA, 33 bp, Homo sapien
ttaatcttctaaagcaagtttgtgaagtgaggg

SEQ ID NO: 944986 - DNA, 33 bp, Homo sapien
ttaatcttctaaagcacgtttgtgaagtgaggg

SEQ ID NO: 944987 - DNA, 33 bp, Homo sapien
caccagttaatgccacagctgaatttaaaaacc

SEQ ID NO: 944988 - DNA, 33 bp, Homo sapien
caccagttaatgccacggctgaatttaaaaacc

SEQ ID NO: 944989 - DNA, 33 bp, Homo sapien
tcatttaactagtttgaatatgtgcctactata

SEQ ID NO: 944990 - DNA, 33 bp, Homo sapien
tcatttaactagtttggatatgtgcctactata

SEQ ID NO: 944991 - DNA, 33 bp, Homo sapien
tcaatctctctagtgaagttgggaacaccttca

SEQ ID NO: 944992 - DNA, 33 bp, Homo sapien
tcaatctctctagtgaggttgggaacaccttca

SEQ ID NO: 944993 - DNA, 33 bp, Homo sapien
acaacacgcgactcacagtattagatcatggac

SEQ ID NO: 944994 - DNA, 33 bp, Homo sapien
acaacacgcgactcacggtattagatcatggac

SEQ ID NO: 944995 - DNA, 33 bp, Homo sapien
tcttggttttcccatcaagcaactaacttctcc

SEQ ID NO: 944996 - DNA, 33 bp, Homo sapien
tcttggttttcccatcgagcaactaacttctcc

SEQ ID NO: 944997 - DNA, 33 bp, Homo sapien
tgttacacacataaagcacagagagatctagaa

SEQ ID NO: 944998 - DNA, 33 bp, Homo sapien
tgttacacacataaaggacagagagatctagaa

SEQ ID NO: 944999 - DNA, 33 bp, Homo sapien
aagaagaaagaagagcaaatgtaaggcgtgcag

SEQ ID NO: 945000 - DNA, 33 bp, Homo sapien
aagaagaaagaagagccaatgtaaggcgtgcag

SEQ ID NO: 945001 - DNA, 33 bp, Homo sapien
tagtaaaagtgagagaggaaacaagttatttta

SEQ ID NO: 945002 - DNA, 33 bp, Homo sapien
tagtaaaagtgagagatgaaacaagttatttta

SEQ ID NO: 945003 - DNA, 33 bp, Homo sapien
gacaattttgatagaacgaaaaacgcaaaggaa

SEQ ID NO: 945004 - DNA, 33 bp, Homo sapien
gacaattttgatagaatgaaaaacgcaaaggaa

SEQ ID NO: 945005 - DNA, 33 bp, Homo sapien
cttttcttcttataagcacactagccactggac

SEQ ID NO: 945006 - DNA, 33 bp, Homo sapien
cttttcttcttataaggacactagccactggac

SEQ ID NO: 945007 - DNA, 33 bp, Homo sapien
tgcaacttcctgctgacattgttctgcttttct

SEQ ID NO: 945008 - DNA, 33 bp, Homo sapien
tgcaacttcctgctgagattgttctgcttttct

SEQ ID NO: 945009 - DNA, 33 bp, Homo sapien
ccagtaagaagaatggacattttagatcatgcc

SEQ ID NO: 945010 - DNA, 33 bp, Homo sapien
ccagtaagaagaatggtcattttagatcatgcc

SEQ ID NO: 945011 - DNA, 33 bp, Homo sapien
aagaaaagacaccttacgtacagaggaatgaga

SEQ ID NO: 945012 - DNA, 33 bp, Homo sapien
aagaaaagacaccttatgtacagaggaatgaga

SEQ ID NO: 945013 - DNA, 33 bp, Homo sapien
gtatagacaaatctcacataagttagacccttc

SEQ ID NO: 945014 - DNA, 33 bp, Homo sapien
gtatagacaaatctcatataagttagacccttc

SEQ ID NO: 945015 - DNA, 33 bp, Homo sapien
ctatgacagaaatataaataagtgaggcagtat

SEQ ID NO: 945016 - DNA, 33 bp, Homo sapien
ctatgacagaaatatacataagtgaggcagtat

SEQ ID NO: 945017 - DNA, 33 bp, Homo sapien
tgcatgtctcaatgacactggagagcctgctca

SEQ ID NO: 945018 - DNA, 33 bp, Homo sapien
tgcatgtctcaatgacgctggagagcctgctca

SEQ ID NO: 945019 - DNA, 33 bp, Homo sapien
tggagatgttgttgaacagagtcaaactctaaa

SEQ ID NO: 945020 - DNA, 33 bp, Homo sapien
tggagatgttgttgaagagagtcaaactctaaa

SEQ ID NO: 945021 - DNA, 33 bp, Homo sapien
acttatctgaaccaaactgaattctgatgtcct

SEQ ID NO: 945022 - DNA, 33 bp, Homo sapien
acttatctgaaccaaattgaattctgatgtcct

SEQ ID NO: 945023 - DNA, 33 bp, Homo sapien
ctcctgggcgtctttaaaactatctaagtaatt

SEQ ID NO: 945024 - DNA, 33 bp, Homo sapien
ctcctgggcgtctttagaactatctaagtaatt

SEQ ID NO: 945025 - DNA, 33 bp, Homo sapien
gatgtttacttagaaagttggtgatgtttttgt

SEQ ID NO: 945026 - DNA, 33 bp, Homo sapien
gatgtttacttagaaatttggtgatgtttttgt

SEQ ID NO: 945027 - DNA, 33 bp, Homo sapien
aataaaacgaggctatcagcatggaacctaatt

SEQ ID NO: 945028 - DNA, 33 bp, Homo sapien
aataaaacgaggctattagcatggaacctaatt

SEQ ID NO: 945029 - DNA, 33 bp, Homo sapien
aatattttgatcgaacacattcaaaattgcaag

SEQ ID NO: 945030 - DNA, 33 bp, Homo sapien
aatattttgatcgaacccattcaaaattgcaag

SEQ ID NO: 945031 - DNA, 33 bp, Homo sapien
ggtgctgctcagaacaatgtgaatatacactca

SEQ ID NO: 945032 - DNA, 33 bp, Homo sapien
ggtgctgctcagaacagtgtgaatatacactca

SEQ ID NO: 945033 - DNA, 33 bp, Homo sapien
cagtgaaagcactttgcatcatttagcactttg

SEQ ID NO: 945034 - DNA, 33 bp, Homo sapien
cagtgaaagcactttgtatcatttagcactttg

SEQ ID NO: 945035 - DNA, 33 bp, Homo sapien
acctggtgacttttaacaaatctccattcactt

SEQ ID NO: 945036 - DNA, 33 bp, Homo sapien
acctggtgacttttaagaaatctccattcactt

SEQ ID NO: 945037 - DNA, 33 bp, Homo sapien
taatacacccatatcaccctgaatacactcttc

SEQ ID NO: 945038 - DNA, 33 bp, Homo sapien
taatacacccatatcatcctgaatacactcttc

SEQ ID NO: 945039 - DNA, 33 bp, Homo sapien
agatgtttgccatgagacatcaggggccttcat

SEQ ID NO: 945040 - DNA, 33 bp, Homo sapien
agatgtttgccatgagtcatcaggggccttcat

SEQ ID NO: 945041 - DNA, 33 bp, Homo sapien
acaatgcaactcaagtaacgttttgcaaactca

SEQ ID NO: 945042 - DNA, 33 bp, Homo sapien
acaatgcaactcaagtgacgttttgcaaactca

SEQ ID NO: 945043 - DNA, 33 bp, Homo sapien
atcctgttgttccaataagaaaccaaagtgtca

SEQ ID NO: 945044 - DNA, 33 bp, Homo sapien
atcctgttgttccaatgagaaaccaaagtgtca

SEQ ID NO: 945045 - DNA, 33 bp, Homo sapien
cacgagatttataaagaacagctccgctgcaca

SEQ ID NO: 945046 - DNA, 33 bp, Homo sapien
cacgagatttataaaggacagctccgctgcaca

SEQ ID NO: 945047 - DNA, 33 bp, Homo sapien
atgagacctgaagaaacgtcatttttaaatact

SEQ ID NO: 945048 - DNA, 33 bp, Homo sapien
atgagacctgaagaaatgtcatttttaaatact

SEQ ID NO: 945049 - DNA, 33 bp, Homo sapien
tgcagattttacaataagccccatctatgaatc

SEQ ID NO: 945050 - DNA, 33 bp, Homo sapien
tgcagattttacaataggccccatctatgaatc

SEQ ID NO: 945051 - DNA, 33 bp, Homo sapien
ctaatacattactacaaattgagtgcagatttt

SEQ ID NO: 945052 - DNA, 33 bp, Homo sapien
ctaatacattactacatattgagtgcagatttt

SEQ ID NO: 945053 - DNA, 33 bp, Homo sapien
tttattcaacaatcaacggaaaatgaaatgaga

SEQ ID NO: 945054 - DNA, 33 bp, Homo sapien
tttattcaacaatcaatggaaaatgaaatgaga

SEQ ID NO: 945055 - DNA, 33 bp, Homo sapien
gaaattaccgttgcaaaggaatcagtaaatcac

SEQ ID NO: 945056 - DNA, 33 bp, Homo sapien
gaaattaccgttgcaatggaatcagtaaatcac

SEQ ID NO: 945057 - DNA, 33 bp, Homo sapien
tactaaaaactggagaaactgaaacagagtaac

SEQ ID NO: 945058 - DNA, 33 bp, Homo sapien
tactaaaaactggagacactgaaacagagtaac

SEQ ID NO: 945059 - DNA, 33 bp, Homo sapien
gtgcatatagcctgaagaaactggtagagaagg

SEQ ID NO: 945060 - DNA, 33 bp, Homo sapien
gtgcatatagcctgaataaactggtagagaagg

SEQ ID NO: 945061 - DNA, 33 bp, Homo sapien
tatttaaaattcagcaaacttttccactgtgtt

SEQ ID NO: 945062 - DNA, 33 bp, Homo sapien
tatttaaaattcagcagacttttccactgtgtt

SEQ ID NO: 945063 - DNA, 33 bp, Homo sapien
tgctcagctggatttcaaaagtgttttggacca

SEQ ID NO: 945064 - DNA, 33 bp, Homo sapien
tgctcagctggatttcgaaagtgttttggacca

SEQ ID NO: 945065 - DNA, 33 bp, Homo sapien
gaaataatgggctaccgattgtgtacctgaact

SEQ ID NO: 945066 - DNA, 33 bp, Homo sapien
gaaataatgggctacctattgtgtacctgaact

SEQ ID NO: 945067 - DNA, 33 bp, Homo sapien
attttggttttctgagcatgatttcactacatg

SEQ ID NO: 945068 - DNA, 33 bp, Homo sapien
attttggttttctgagtatgatttcactacatg

SEQ ID NO: 945069 - DNA, 33 bp, Homo sapien
acgcaacacataaaaacaatcaaagcataccac

SEQ ID NO: 945070 - DNA, 33 bp, Homo sapien
acgcaacacataaaaagaatcaaagcataccac

SEQ ID NO: 945071 - DNA, 33 bp, Homo sapien
ttcagaattatctggccatgggggttcatggga

SEQ ID NO: 945072 - DNA, 33 bp, Homo sapien
ttcagaattatctggctatgggggttcatggga

SEQ ID NO: 945073 - DNA, 33 bp, Homo sapien
taggtgagtgggcctacagccagagtccacagg

SEQ ID NO: 945074 - DNA, 33 bp, Homo sapien
taggtgagtgggcctagagccagagtccacagg

SEQ ID NO: 945075 - DNA, 33 bp, Homo sapien
ttatgaattaagtaaaatgatgcaaatttctta

SEQ ID NO: 945076 - DNA, 33 bp, Homo sapien
ttatgaattaagtaaagtgatgcaaatttctta

SEQ ID NO: 945077 - DNA, 33 bp, Homo sapien
ttatgaatgaaaatcccccttttttgccctccg

SEQ ID NO: 945078 - DNA, 33 bp, Homo sapien
ttatgaatgaaaatcctccttttttgccctccg

SEQ ID NO: 945079 - DNA, 33 bp, Homo sapien
tcaagcgtgaataaaacggcttctaaactcagc

SEQ ID NO: 945080 - DNA, 33 bp, Homo sapien
tcaagcgtgaataaaatggcttctaaactcagc

SEQ ID NO: 945081 - DNA, 33 bp, Homo sapien
tgctgcctcagtaaaactcattgtttaatgcta

SEQ ID NO: 945082 - DNA, 33 bp, Homo sapien
tgctgcctcagtaaaagtcattgtttaatgcta

SEQ ID NO: 945083 - DNA, 33 bp, Homo sapien
ttaaggcaaaattctcaattagcaactaacact

SEQ ID NO: 945084 - DNA, 33 bp, Homo sapien
ttaaggcaaaattctctattagcaactaacact

SEQ ID NO: 945085 - DNA, 33 bp, Homo sapien
ccacacgcttgtgaataagaagtacgtgtttgt

SEQ ID NO: 945086 - DNA, 33 bp, Homo sapien
ccacacgcttgtgaatgagaagtacgtgtttgt

SEQ ID NO: 945087 - DNA, 33 bp, Homo sapien
gcattaataactcttgaataaccattcggcata

SEQ ID NO: 945088 - DNA, 33 bp, Homo sapien
gcattaataactcttggataaccattcggcata

SEQ ID NO: 945089 - DNA, 33 bp, Homo sapien
ctggaattgttgtaataactttctctatcctgg

SEQ ID NO: 945090 - DNA, 33 bp, Homo sapien
ctggaattgttgtaatcactttctctatcctgg

SEQ ID NO: 945091 - DNA, 33 bp, Homo sapien
cttgattttagcatgaccatatatgaatgtctc

SEQ ID NO: 945092 - DNA, 33 bp, Homo sapien
cttgattttagcatgagcatatatgaatgtctc

SEQ ID NO: 945093 - DNA, 33 bp, Homo sapien
atttgcataaccttataacacccgtggaagcag

SEQ ID NO: 945094 - DNA, 33 bp, Homo sapien
atttgcataaccttattacacccgtggaagcag

SEQ ID NO: 945095 - DNA, 33 bp, Homo sapien
gtaaatttgatggaaactgctgaagaaggagag

SEQ ID NO: 945096 - DNA, 33 bp, Homo sapien
gtaaatttgatggaaattgctgaagaaggagag

SEQ ID NO: 945097 - DNA, 33 bp, Homo sapien
ggttgtacagattcaacgtcaagtactcagaac

SEQ ID NO: 945098 - DNA, 33 bp, Homo sapien
ggttgtacagattcaatgtcaagtactcagaac

SEQ ID NO: 945099 - DNA, 33 bp, Homo sapien
atcttttattacatctcaaaacctagccttctc

SEQ ID NO: 945100 - DNA, 33 bp, Homo sapien
atcttttattacatctgaaaacctagccttctc

SEQ ID NO: 945101 - DNA, 33 bp, Homo sapien
atatcccagtgaaaaacggtatgttagaaaatc

SEQ ID NO: 945102 - DNA, 33 bp, Homo sapien
atatcccagtgaaaaatggtatgttagaaaatc

SEQ ID NO: 945103 - DNA, 33 bp, Homo sapien
actgccaggagtgcacagtaattgggttgtcag

SEQ ID NO: 945104 - DNA, 33 bp, Homo sapien
actgccaggagtgcaccgtaattgggttgtcag

SEQ ID NO: 945105 - DNA, 33 bp, Homo sapien
tccacattactatgacaatgcaataggcagaac

SEQ ID NO: 945106 - DNA, 33 bp, Homo sapien
tccacattactatgacgatgcaataggcagaac

SEQ ID NO: 945107 - DNA, 33 bp, Homo sapien
tttcctctcccggtaactcattcttatgcatca

SEQ ID NO: 945108 - DNA, 33 bp, Homo sapien
tttcctctcccggtaagtcattcttatgcatca

SEQ ID NO: 945109 - DNA, 33 bp, Homo sapien
aaaatctcaagtgctacgagtctaagaaatcat

SEQ ID NO: 945110 - DNA, 33 bp, Homo sapien
aaaatctcaagtgctatgagtctaagaaatcat

SEQ ID NO: 945111 - DNA, 33 bp, Homo sapien
taggagaaaacaaaaggcttgtgttggcacttc

SEQ ID NO: 945112 - DNA, 33 bp, Homo sapien
taggagaaaacaaaagtcttgtgttggcacttc

SEQ ID NO: 945113 - DNA, 33 bp, Homo sapien
ttctctttcatggcttcaaaatggaatttaatg

SEQ ID NO: 945114 - DNA, 33 bp, Homo sapien
ttctctttcatggcttgaaaatggaatttaatg

SEQ ID NO: 945115 - DNA, 33 bp, Homo sapien
gtcaaatatcacttgaatatatttacatgagtc

SEQ ID NO: 945116 - DNA, 33 bp, Homo sapien
gtcaaatatcacttgagtatatttacatgagtc

SEQ ID NO: 945117 - DNA, 33 bp, Homo sapien
acaacttccacgtgcacctttctccctctgtga

SEQ ID NO: 945118 - DNA, 33 bp, Homo sapien
acaacttccacgtgcatctttctccctctgtga

SEQ ID NO: 945119 - DNA, 33 bp, Homo sapien
gcaaaggaaaggagaaagaacaactggctgagc

SEQ ID NO: 945120 - DNA, 33 bp, Homo sapien
gcaaaggaaaggagaaggaacaactggctgagc

SEQ ID NO: 945121 - DNA, 33 bp, Homo sapien
caatgtcattattatgccagccttaaaattaaa

SEQ ID NO: 945122 - DNA, 33 bp, Homo sapien
caatgtcattattatgtcagccttaaaattaaa

SEQ ID NO: 945123 - DNA, 33 bp, Homo sapien
ctcaaaatctaatccgaaggtcaaaaacatgat

SEQ ID NO: 945124 - DNA, 33 bp, Homo sapien
ctcaaaatctaatccgcaggtcaaaaacatgat

SEQ ID NO: 945125 - DNA, 33 bp, Homo sapien
aggaccaaaaaagccactggagccataaccaag

SEQ ID NO: 945126 - DNA, 33 bp, Homo sapien
aggaccaaaaaagccagtggagccataaccaag

SEQ ID NO: 945127 - DNA, 33 bp, Homo sapien
atatatgaagctcaaaaacattcaagcaccctg

SEQ ID NO: 945128 - DNA, 33 bp, Homo sapien
atatatgaagctcaaacacattcaagcaccctg

SEQ ID NO: 945129 - DNA, 33 bp, Homo sapien
taactattatcgtctgcattcatttgtgattga

SEQ ID NO: 945130 - DNA, 33 bp, Homo sapien
taactattatcgtctgtattcatttgtgattga

SEQ ID NO: 945131 - DNA, 33 bp, Homo sapien
cttgcaaaaaaattaacaaggcgatgctagtat

SEQ ID NO: 945132 - DNA, 33 bp, Homo sapien
cttgcaaaaaaattaagaaggcgatgctagtat

SEQ ID NO: 945133 - DNA, 33 bp, Homo sapien
gttacaatgtctctgacagttttctataaagta

SEQ ID NO: 945134 - DNA, 33 bp, Homo sapien
gttacaatgtctctgatagttttctataaagta

SEQ ID NO: 945135 - DNA, 33 bp, Homo sapien
ctaggattgaaaatttcaaagaataagggcgaa

SEQ ID NO: 945136 - DNA, 33 bp, Homo sapien
ctaggattgaaaatttgaaagaataagggcgaa

SEQ ID NO: 945137 - DNA, 33 bp, Homo sapien
ttaataattgcttaaaaagattttgctttctca

SEQ ID NO: 945138 - DNA, 33 bp, Homo sapien
ttaataattgcttaaagagattttgctttctca

SEQ ID NO: 945139 - DNA, 33 bp, Homo sapien
caggacgcgtggaaacaaaaaaccatgtgaaat

SEQ ID NO: 945140 - DNA, 33 bp, Homo sapien
caggacgcgtggaaacgaaaaaccatgtgaaat

SEQ ID NO: 945141 - DNA, 33 bp, Homo sapien
tgattaaggtaagcaactgagtaactaaggcaa

SEQ ID NO: 945142 - DNA, 33 bp, Homo sapien
tgattaaggtaagcaattgagtaactaaggcaa

SEQ ID NO: 945143 - DNA, 33 bp, Homo sapien
taaaaaatagttaacacaaatagcaatctgtgg

SEQ ID NO: 945144 - DNA, 33 bp, Homo sapien
taaaaaatagttaacagaaatagcaatctgtgg

SEQ ID NO: 945145 - DNA, 33 bp, Homo sapien
actctttatgctaagacaatggagcacttgtga

SEQ ID NO: 945146 - DNA, 33 bp, Homo sapien
actctttatgctaagagaatggagcacttgtga

SEQ ID NO: 945147 - DNA, 33 bp, Homo sapien
agtatgtatcatttctcacagttgttttaacaa

SEQ ID NO: 945148 - DNA, 33 bp, Homo sapien
agtatgtatcatttctgacagttgttttaacaa

SEQ ID NO: 945149 - DNA, 33 bp, Homo sapien
atttgtacagctattcccattgaattttccttt

SEQ ID NO: 945150 - DNA, 33 bp, Homo sapien
atttgtacagctattctcattgaattttccttt

SEQ ID NO: 945151 - DNA, 33 bp, Homo sapien
atgttccttcacattcaaggggaggtaggtctg

SEQ ID NO: 945152 - DNA, 33 bp, Homo sapien
atgttccttcacattccaggggaggtaggtctg

SEQ ID NO: 945153 - DNA, 33 bp, Homo sapien
ctttcattcatattcaaagcaagaatagagtct

SEQ ID NO: 945154 - DNA, 33 bp, Homo sapien
ctttcattcatattcagagcaagaatagagtct

SEQ ID NO: 945155 - DNA, 33 bp, Homo sapien
ctactctgatcactcactgaagattctgaaaag

SEQ ID NO: 945156 - DNA, 33 bp, Homo sapien
ctactctgatcactcattgaagattctgaaaag

SEQ ID NO: 945157 - DNA, 33 bp, Homo sapien
gaaatgcaaccgcttacgtaagtcatggttgac

SEQ ID NO: 945158 - DNA, 33 bp, Homo sapien
gaaatgcaaccgcttaggtaagtcatggttgac

SEQ ID NO: 945159 - DNA, 33 bp, Homo sapien
tcttcatcccctaactgaaagtgtccttgttct

SEQ ID NO: 945160 - DNA, 33 bp, Homo sapien
tcttcatcccctaacttaaagtgtccttgttct

SEQ ID NO: 945161 - DNA, 33 bp, Homo sapien
cctctttaatctctgaagtatgctgcaagtatg

SEQ ID NO: 945162 - DNA, 33 bp, Homo sapien
cctctttaatctctgaggtatgctgcaagtatg

SEQ ID NO: 945163 - DNA, 33 bp, Homo sapien
cactggctgacataaacgggagttgcggaagag

SEQ ID NO: 945164 - DNA, 33 bp, Homo sapien
cactggctgacataaaggggagttgcggaagag

SEQ ID NO: 945165 - DNA, 33 bp, Homo sapien
agttttagacctttgcactttaatcataggtgt

SEQ ID NO: 945166 - DNA, 33 bp, Homo sapien
agttttagacctttgctctttaatcataggtgt

SEQ ID NO: 945167 - DNA, 33 bp, Homo sapien
atttagactggttttacaattgtttatacatat

SEQ ID NO: 945168 - DNA, 33 bp, Homo sapien
atttagactggttttagaattgtttatacatat

SEQ ID NO: 945169 - DNA, 33 bp, Homo sapien
ctaagaccaacaataactcattagcatacagtg

SEQ ID NO: 945170 - DNA, 33 bp, Homo sapien
ctaagaccaacaataattcattagcatacagtg

SEQ ID NO: 945171 - DNA, 33 bp, Homo sapien
ctcaaatgaaatctcacggttattcttgttaga

SEQ ID NO: 945172 - DNA, 33 bp, Homo sapien
ctcaaatgaaatctcatggttattcttgttaga

SEQ ID NO: 945173 - DNA, 33 bp, Homo sapien
aaacacaaccgaatgactacttccgcatgcaca

SEQ ID NO: 945174 - DNA, 33 bp, Homo sapien
aaacacaaccgaatgattacttccgcatgcaca

SEQ ID NO: 945175 - DNA, 33 bp, Homo sapien
gcaaaagagagcttgacagatccttcaagaaac

SEQ ID NO: 945176 - DNA, 33 bp, Homo sapien
gcaaaagagagcttgagagatccttcaagaaac

SEQ ID NO: 945177 - DNA, 33 bp, Homo sapien
tggggttgataggagacagtgacagtcaggcct

SEQ ID NO: 945178 - DNA, 33 bp, Homo sapien
tggggttgataggagagagtgacagtcaggcct

SEQ ID NO: 945179 - DNA, 33 bp, Homo sapien
tcagttacatcctggtgaaaaactattgagaga

SEQ ID NO: 945180 - DNA, 33 bp, Homo sapien
tcagttacatcctggttaaaaactattgagaga

SEQ ID NO: 945181 - DNA, 33 bp, Homo sapien
gtaggtgtcagaagcaccttgattagggctatg

SEQ ID NO: 945182 - DNA, 33 bp, Homo sapien
gtaggtgtcagaagcatcttgattagggctatg

SEQ ID NO: 945183 - DNA, 33 bp, Homo sapien
gtataaaatcattgaagacttatgtcaaaccaa

SEQ ID NO: 945184 - DNA, 33 bp, Homo sapien
gtataaaatcattgaatacttatgtcaaaccaa

SEQ ID NO: 945185 - DNA, 33 bp, Homo sapien
tacctcctgctattgaaagtggacgatactccc

SEQ ID NO: 945186 - DNA, 33 bp, Homo sapien
tacctcctgctattgacagtggacgatactccc

SEQ ID NO: 945187 - DNA, 33 bp, Homo sapien
cttgtttgtctttcaaatcaagggaagaaatgt

SEQ ID NO: 945188 - DNA, 33 bp, Homo sapien
cttgtttgtctttcaagtcaagggaagaaatgt

SEQ ID NO: 945189 - DNA, 33 bp, Homo sapien
tttgttacagatcttacagtagaaaccaaaaaa

SEQ ID NO: 945190 - DNA, 33 bp, Homo sapien
tttgttacagatcttagagtagaaaccaaaaaa

SEQ ID NO: 945191 - DNA, 33 bp, Homo sapien
gtgctcttcctcactacgttctcgaattttttt

SEQ ID NO: 945192 - DNA, 33 bp, Homo sapien
gtgctcttcctcactatgttctcgaattttttt

SEQ ID NO: 945193 - DNA, 33 bp, Homo sapien
aaattcactctgaaatcaaatgtattcctcctc

SEQ ID NO: 945194 - DNA, 33 bp, Homo sapien
aaattcactctgaaatgaaatgtattcctcctc

SEQ ID NO: 945195 - DNA, 33 bp, Homo sapien
catcgtgtacattgcacccaatagttaatttct

SEQ ID NO: 945196 - DNA, 33 bp, Homo sapien
catcgtgtacattgcatccaatagttaatttct

SEQ ID NO: 945197 - DNA, 33 bp, Homo sapien
ttttttttaatcagaaggaagagaatgctacat

SEQ ID NO: 945198 - DNA, 33 bp, Homo sapien
ttttttttaatcagaatgaagagaatgctacat

SEQ ID NO: 945199 - DNA, 33 bp, Homo sapien
gattcaaccgagataactaaatgcaagacatct

SEQ ID NO: 945200 - DNA, 33 bp, Homo sapien
gattcaaccgagataagtaaatgcaagacatct

SEQ ID NO: 945201 - DNA, 33 bp, Homo sapien
tttgggggacagaaaactgaggaccagacagca

SEQ ID NO: 945202 - DNA, 33 bp, Homo sapien
tttgggggacagaaaagtgaggaccagacagca

SEQ ID NO: 945203 - DNA, 33 bp, Homo sapien
tgcaaaactgtgcaagcaatatcttctcttaaa

SEQ ID NO: 945204 - DNA, 33 bp, Homo sapien
tgcaaaactgtgcaaggaatatcttctcttaaa

SEQ ID NO: 945205 - DNA, 33 bp, Homo sapien
ataatttattcttaaaatggaaaatcagtaaaa

SEQ ID NO: 945206 - DNA, 33 bp, Homo sapien
ataatttattcttaaagtggaaaatcagtaaaa

SEQ ID NO: 945207 - DNA, 33 bp, Homo sapien
tcctgaaatcgttcatcaccatactgacaaaga

SEQ ID NO: 945208 - DNA, 33 bp, Homo sapien
tcctgaaatcgttcattaccatactgacaaaga

SEQ ID NO: 945209 - DNA, 33 bp, Homo sapien
gatgcatcacattctgaaagctacagaagccat

SEQ ID NO: 945210 - DNA, 33 bp, Homo sapien
gatgcatcacattctggaagctacagaagccat

SEQ ID NO: 945211 - DNA, 33 bp, Homo sapien
gacatcacctggtgccagaagttttctgtgtcc

SEQ ID NO: 945212 - DNA, 33 bp, Homo sapien
gacatcacctggtgccggaagttttctgtgtcc

SEQ ID NO: 945213 - DNA, 33 bp, Homo sapien
ccacaggttttaatcccaaaagcaatcctaatc

SEQ ID NO: 945214 - DNA, 33 bp, Homo sapien
ccacaggttttaatcctaaaagcaatcctaatc

SEQ ID NO: 945215 - DNA, 33 bp, Homo sapien
gtgaatctgagaagcacatcaaaatttccagga

SEQ ID NO: 945216 - DNA, 33 bp, Homo sapien
gtgaatctgagaagcatatcaaaatttccagga

SEQ ID NO: 945217 - DNA, 33 bp, Homo sapien
taggagaatagccgtcaacatcaaacaactaag

SEQ ID NO: 945218 - DNA, 33 bp, Homo sapien
taggagaatagccgtccacatcaaacaactaag

SEQ ID NO: 945219 - DNA, 33 bp, Homo sapien
tatttagggtcttattaaaatgccttgtatatt

SEQ ID NO: 945220 - DNA, 33 bp, Homo sapien
tatttagggtcttattgaaatgccttgtatatt

SEQ ID NO: 945221 - DNA, 33 bp, Homo sapien
aatgtgccttgagatacgaagtcccttctggtt

SEQ ID NO: 945222 - DNA, 33 bp, Homo sapien
aatgtgccttgagataggaagtcccttctggtt

SEQ ID NO: 945223 - DNA, 33 bp, Homo sapien
taggaggaagagtctcaaggaaacattacagga

SEQ ID NO: 945224 - DNA, 33 bp, Homo sapien
taggaggaagagtctcgaggaaacattacagga

SEQ ID NO: 945225 - DNA, 33 bp, Homo sapien
atctgtaggatgattagggcgttcagatatcct

SEQ ID NO: 945226 - DNA, 33 bp, Homo sapien
atctgtaggatgattatggcgttcagatatcct

SEQ ID NO: 945227 - DNA, 33 bp, Homo sapien
gtttccttcttgataccactcaatagggataat

SEQ ID NO: 945228 - DNA, 33 bp, Homo sapien
gtttccttcttgatacgactcaatagggataat

SEQ ID NO: 945229 - DNA, 33 bp, Homo sapien
ggcgacatcatcctaactggatcctgtgaacag

SEQ ID NO: 945230 - DNA, 33 bp, Homo sapien
ggcgacatcatcctaattggatcctgtgaacag

SEQ ID NO: 945231 - DNA, 33 bp, Homo sapien
tgtatgaggacagagcaaaaagacagctgtctg

SEQ ID NO: 945232 - DNA, 33 bp, Homo sapien
tgtatgaggacagagctaaaagacagctgtctg

SEQ ID NO: 945233 - DNA, 33 bp, Homo sapien
gacctaattacatcacaaaggccccattgtcta

SEQ ID NO: 945234 - DNA, 33 bp, Homo sapien
gacctaattacatcacgaaggccccattgtcta

SEQ ID NO: 945235 - DNA, 33 bp, Homo sapien
ggtaggaggatgatataagttaaaatacactgt

SEQ ID NO: 945236 - DNA, 33 bp, Homo sapien
ggtaggaggatgatatcagttaaaatacactgt

SEQ ID NO: 945237 - DNA, 33 bp, Homo sapien
cctctggaagcaccaacttctccagccacagtc

SEQ ID NO: 945238 - DNA, 33 bp, Homo sapien
cctctggaagcaccaagttctccagccacagtc

SEQ ID NO: 945239 - DNA, 33 bp, Homo sapien
acataggttttgcaagaatcactgtggctgctc

SEQ ID NO: 945240 - DNA, 33 bp, Homo sapien
acataggttttgcaagcatcactgtggctgctc

SEQ ID NO: 945241 - DNA, 33 bp, Homo sapien
ttgttttagtttcacaatgcctctttggaggag

SEQ ID NO: 945242 - DNA, 33 bp, Homo sapien
ttgttttagtttcacagtgcctctttggaggag

SEQ ID NO: 945243 - DNA, 33 bp, Homo sapien
cacattcagcatttaacaataacagaataaaag

SEQ ID NO: 945244 - DNA, 33 bp, Homo sapien
cacattcagcatttaagaataacagaataaaag

SEQ ID NO: 945245 - DNA, 33 bp, Homo sapien
attagagctattagtaaagggttcccttgtgag

SEQ ID NO: 945246 - DNA, 33 bp, Homo sapien
attagagctattagtatagggttcccttgtgag

SEQ ID NO: 945247 - DNA, 33 bp, Homo sapien
atcaaccaatagcctaagtgggaaatgcattaa

SEQ ID NO: 945248 - DNA, 33 bp, Homo sapien
atcaaccaatagcctacgtgggaaatgcattaa

SEQ ID NO: 945249 - DNA, 33 bp, Homo sapien
tctttaagtaacaccaacgtggagacatcaacc

SEQ ID NO: 945250 - DNA, 33 bp, Homo sapien
tctttaagtaacaccagcgtggagacatcaacc

SEQ ID NO: 945251 - DNA, 33 bp, Homo sapien
agggtttcgacaaagacgacataagagaaatca

SEQ ID NO: 945252 - DNA, 33 bp, Homo sapien
agggtttcgacaaagatgacataagagaaatca

SEQ ID NO: 945253 - DNA, 33 bp, Homo sapien
attgaaatgtccagaagagttacagattcataa

SEQ ID NO: 945254 - DNA, 33 bp, Homo sapien
attgaaatgtccagaatagttacagattcataa

SEQ ID NO: 945255 - DNA, 33 bp, Homo sapien
ctctttgtaagcaaacaataggcccttatccct

SEQ ID NO: 945256 - DNA, 33 bp, Homo sapien
ctctttgtaagcaaaccataggcccttatccct

SEQ ID NO: 945257 - DNA, 33 bp, Homo sapien
tatgaaatgaaggagacgtaattctttaagaag

SEQ ID NO: 945258 - DNA, 33 bp, Homo sapien
tatgaaatgaaggagatgtaattctttaagaag

SEQ ID NO: 945259 - DNA, 33 bp, Homo sapien
aataaatgaaacatgcccttttgtgctttggtg

SEQ ID NO: 945260 - DNA, 33 bp, Homo sapien
aataaatgaaacatgctcttttgtgctttggtg

SEQ ID NO: 945261 - DNA, 33 bp, Homo sapien
ctcatggcctgtcacaatggtccctgaagtatg

SEQ ID NO: 945262 - DNA, 33 bp, Homo sapien
ctcatggcctgtcacagtggtccctgaagtatg

SEQ ID NO: 945263 - DNA, 33 bp, Homo sapien
ggtatttaacaaccaactgcaagaaaacaatgg

SEQ ID NO: 945264 - DNA, 33 bp, Homo sapien
ggtatttaacaaccaagtgcaagaaaacaatgg

SEQ ID NO: 945265 - DNA, 33 bp, Homo sapien
aattcaccggaaaagacgagtctgtacgctggg

SEQ ID NO: 945266 - DNA, 33 bp, Homo sapien
aattcaccggaaaagatgagtctgtacgctggg

SEQ ID NO: 945267 - DNA, 33 bp, Homo sapien
tgagattaaggctgtgaaccttcctgcagcccc

SEQ ID NO: 945268 - DNA, 33 bp, Homo sapien
tgagattaaggctgtgcaccttcctgcagcccc

SEQ ID NO: 945269 - DNA, 33 bp, Homo sapien
catgaatttctgtttccctatcctcaccacatg

SEQ ID NO: 945270 - DNA, 33 bp, Homo sapien
catgaatttctgtttctctatcctcaccacatg

SEQ ID NO: 945271 - DNA, 33 bp, Homo sapien
cccttcctttccccgtcacatatcaaagccctc

SEQ ID NO: 945272 - DNA, 33 bp, Homo sapien
cccttcctttccccgtgacatatcaaagccctc

SEQ ID NO: 945273 - DNA, 33 bp, Homo sapien
tggcatgatgaggacactgtaatatggtcactt

SEQ ID NO: 945274 - DNA, 33 bp, Homo sapien
tggcatgatgaggacattgtaatatggtcactt

SEQ ID NO: 945275 - DNA, 33 bp, Homo sapien
agcaccagtaactttgaaaggatgtaaataaac

SEQ ID NO: 945276 - DNA, 33 bp, Homo sapien
agcaccagtaactttggaaggatgtaaataaac

SEQ ID NO: 945277 - DNA, 33 bp, Homo sapien
gtttcctttgtagctccagttagtagaaggaca

SEQ ID NO: 945278 - DNA, 33 bp, Homo sapien
gtttcctttgtagctctagttagtagaaggaca

SEQ ID NO: 945279 - DNA, 33 bp, Homo sapien
tttgaatccattcggaaaactcattctttggaa

SEQ ID NO: 945280 - DNA, 33 bp, Homo sapien
tttgaatccattcggagaactcattctttggaa

SEQ ID NO: 945281 - DNA, 33 bp, Homo sapien
attgtggttagttacactgataatggttatgct

SEQ ID NO: 945282 - DNA, 33 bp, Homo sapien
attgtggttagttacattgataatggttatgct

SEQ ID NO: 945283 - DNA, 33 bp, Homo sapien
aaatatagacaggagcaaaacaagacaagtaag

SEQ ID NO: 945284 - DNA, 33 bp, Homo sapien
aaatatagacaggagccaaacaagacaagtaag

SEQ ID NO: 945285 - DNA, 33 bp, Homo sapien
agatgaaaatggatgacattaataacaaaatat
